United States Patent Application Publication US 2005/0255487 A1 - sequence listing, part 44

SEQ ID NO: 1202087 - RNA, 19 nt, Homo sapiens
  misc_RNA (1)...(19): siRNA sense strand
ggauacaaccacccugugu

SEQ ID NO: 1202088 - RNA, 19 nt, Homo sapiens
  misc_RNA (1)...(19): siRNA sense strand
uuugauccaucuuugguuu

SEQ ID NO: 1202089 - RNA, 19 nt, Homo sapiens
  misc_RNA (1)...(19): siRNA sense strand
gcacuacguaugauggaau

SEQ ID NO: 1202090 - RNA, 19 nt, Homo sapiens
  misc_RNA (1)...(19): siRNA sense strand
aauaggacuuucccuuuua

SEQ ID NO: 1202091 - RNA, 19 nt, Homo sapiens
  misc_RNA (1)...(19): siRNA sense strand
uaacgggacuuuuagaaca

SEQ ID NO: 1202092 - RNA, 19 nt, Homo sapiens
  misc_RNA (1)...(19): siRNA sense strand
agcagucccuuaagagaaa

SEQ ID NO: 1202093 - RNA, 19 nt, Homo sapiens
  misc_RNA (1)...(19): siRNA sense strand
cacagaaaucccucaaauu

SEQ ID NO: 1202094 - RNA, 19 nt, Homo sapiens
  misc_RNA (1)...(19): siRNA sense strand
cagaaaucccucaaauugu

SEQ ID NO: 1202095 - RNA, 19 nt, Homo sapiens
  misc_RNA (1)...(19): siRNA sense strand
gaagaagauaggcuuagag

SEQ ID NO: 1202096 - RNA, 19 nt, Homo sapiens
  misc_RNA (1)...(19): siRNA sense strand
caaagcagucccuuaagag

SEQ ID NO: 1202097 - RNA, 19 nt, Homo sapiens
  misc_RNA (1)...(19): siRNA sense strand
uucauuggaugcugauaaa

SEQ ID NO: 1202098 - RNA, 19 nt, Homo sapiens
  misc_RNA (1)...(19): siRNA sense strand
uuucacuccuccacuguaa

SEQ ID NO: 1202099 - RNA, 19 nt, Homo sapiens
  misc_RNA (1)...(19): siRNA sense strand
guugaaauaagcaucgaaa

SEQ ID NO: 1202100 - RNA, 19 nt, Homo sapiens
  misc_RNA (1)...(19): siRNA sense strand
gaaauaagcaucgaaaagg

SEQ ID NO: 1202101 - RNA, 19 nt, Homo sapiens
  misc_RNA (1)...(19): siRNA sense strand
aggacuaccucuucucugu

SEQ ID NO: 1202102 - RNA, 19 nt, Homo sapiens
  misc_RNA (1)...(19): siRNA sense strand
caaccacccuguguuugca

SEQ ID NO: 1202103 - RNA, 19 nt, Homo sapiens
  misc_RNA (1)...(19): siRNA sense strand
gcacucaaaugguagguuu

SEQ ID NO: 1202104 - RNA, 19 nt, Homo sapiens
  misc_RNA (1)...(19): siRNA sense strand
gaugauuccuuauuuggua

SEQ ID NO: 1202105 - RNA, 19 nt, Homo sapiens
  misc_RNA (1)...(19): siRNA sense strand
gugaauggcuuguugauug

SEQ ID NO: 1202106 - RNA, 19 nt, Homo sapiens
  misc_RNA (1)...(19): siRNA sense strand
gaggagaccugcaucaaga

SEQ ID NO: 1202107 - RNA, 19 nt, Homo sapiens
  misc_RNA (1)...(19): siRNA sense strand
gaaaguaugcgcugucauu

SEQ ID NO: 1202108 - RNA, 19 nt, Homo sapiens
  misc_RNA (1)...(19): siRNA sense strand
gaacaugugccugucguua

SEQ ID NO: 1202109 - RNA, 19 nt, Homo sapiens
  misc_RNA (1)...(19): siRNA sense strand
guccauaguugaucuaauu

SEQ ID NO: 1202110 - RNA, 19 nt, Homo sapiens
  misc_RNA (1)...(19): siRNA sense strand
gagcucggcuucucauaau

SEQ ID NO: 1202111 - RNA, 19 nt, Homo sapiens
  misc_RNA (1)...(19): siRNA sense strand
ccacguggcugaaaguaug

SEQ ID NO: 1202112 - RNA, 19 nt, Homo sapiens
  misc_RNA (1)...(19): siRNA sense strand
uaucaacggugaagaugaa

SEQ ID NO: 1202113 - RNA, 19 nt, Homo sapiens
  misc_RNA (1)...(19): siRNA sense strand
gcagaauaaucaaauccaa

SEQ ID NO: 1202114 - RNA, 19 nt, Homo sapiens
  misc_RNA (1)...(19): siRNA sense strand
aguaugcgcugucauuuga

SEQ ID NO: 1202115 - RNA, 19 nt, Homo sapiens
  misc_RNA (1)...(19): siRNA sense strand
gauauggccagcugcgaua

SEQ ID NO: 1202116 - RNA, 19 nt, Homo sapiens
  misc_RNA (1)...(19): siRNA sense strand
guaaaacacuucacacuag

SEQ ID NO: 1202117 - RNA, 19 nt, Homo sapiens
  misc_RNA (1)...(19): siRNA sense strand
cagcacccauagucuuuaa

SEQ ID NO: 1202118 - RNA, 19 nt, Homo sapiens
  misc_RNA (1)...(19): siRNA sense strand
gagcaagccaauucacuga

SEQ ID NO: 1202119 - RNA, 19 nt, Homo sapiens
  misc_RNA (1)...(19): siRNA sense strand
aaccaucgcuagccaguga

SEQ ID NO: 1202120 - RNA, 19 nt, Homo sapiens
  misc_RNA (1)...(19): siRNA sense strand
uaccuccaaugcagaauaa

SEQ ID NO: 1202121 - RNA, 19 nt, Homo sapiens
  misc_RNA (1)...(19): siRNA sense strand
acacuucacacuagaauug

SEQ ID NO: 1202122 - RNA, 19 nt, Homo sapiens
  misc_RNA (1)...(19): siRNA sense strand
ugacgaccguuaccuuuua

SEQ ID NO: 1202123 - RNA, 19 nt, Homo sapiens
  misc_RNA (1)...(19): siRNA sense strand
aaacugauuucaugguagu

SEQ ID NO: 1202124 - RNA, 19 nt, Homo sapiens
  misc_RNA (1)...(19): siRNA sense strand
ggaaggaucacggagcuau

SEQ ID NO: 1202125 - RNA, 19 nt, Homo sapiens
  misc_RNA (1)...(19): siRNA sense strand
acaugugccugucguuauu

SEQ ID NO: 1202126 - RNA, 19 nt, Homo sapiens
  misc_RNA (1)...(19): siRNA sense strand
gagagcgggucacgaugau

SEQ ID NO: 1202127 - RNA, 19 nt, Homo sapiens
  misc_RNA (1)...(19): siRNA sense strand
ucaccuggaugaacaugug

SEQ ID NO: 1202128 - RNA, 19 nt, Homo sapiens
  misc_RNA (1)...(19): siRNA sense strand
gaaggaucacggagcuauu

SEQ ID NO: 1202129 - RNA, 19 nt, Homo sapiens
  misc_RNA (1)...(19): siRNA sense strand
gaugaugucccuccacucu

SEQ ID NO: 1202130 - RNA, 19 nt, Homo sapiens
  misc_RNA (1)...(19): siRNA sense strand
ugaugucccuccacucuca

SEQ ID NO: 1202131 - RNA, 19 nt, Homo sapiens
  misc_RNA (1)...(19): siRNA sense strand
ccucaggacuacauucagu

SEQ ID NO: 1202132 - RNA, 19 nt, Homo sapiens
  misc_RNA (1)...(19): siRNA sense strand
cgagagcgggucacgauga

SEQ ID NO: 1202133 - RNA, 19 nt, Homo sapiens
  misc_RNA (1)...(19): siRNA sense strand
guccgugaauggcuuguug

SEQ ID NO: 1202134 - RNA, 19 nt, Homo sapiens
  misc_RNA (1)...(19): siRNA sense strand
gacauacguccauaguuga

SEQ ID NO: 1202135 - RNA, 19 nt, Homo sapiens
  misc_RNA (1)...(19): siRNA sense strand
caaaugguagguuuagcuu

SEQ ID NO: 1202136 - RNA, 19 nt, Homo sapiens
  misc_RNA (1)...(19): siRNA sense strand
ccagaugguucuuuucuug

SEQ ID NO: 1202137 - RNA, 19 nt, Homo sapiens
  misc_RNA (1)...(19): siRNA sense strand
cagaagggaagcuagcaaa

SEQ ID NO: 1202138 - RNA, 19 nt, Homo sapiens
  misc_RNA (1)...(19): siRNA sense strand
guuuaugacucagugcaaa

SEQ ID NO: 1202139 - RNA, 19 nt, Homo sapiens
  misc_RNA (1)...(19): siRNA sense strand
gccaggagcaagccaauuc

SEQ ID NO: 1202140 - RNA, 19 nt, Homo sapiens
  misc_RNA (1)...(19): siRNA sense strand
guauaccagaauagacuua

SEQ ID NO: 1202141 - RNA, 19 nt, Homo sapiens
  misc_RNA (1)...(19): siRNA sense strand
ugcaguaccugugucguuu

SEQ ID NO: 1202142 - RNA, 19 nt, Homo sapiens
  misc_RNA (1)...(19): siRNA sense strand
cauaguugaucuaauugag

SEQ ID NO: 1202143 - RNA, 19 nt, Homo sapiens
  misc_RNA (1)...(19): siRNA sense strand
aaaccuuacggaaaucuuu

SEQ ID NO: 1202144 - RNA, 19 nt, Homo sapiens
  misc_RNA (1)...(19): siRNA sense strand
gagcgggucacgaugaugu

SEQ ID NO: 1202145 - RNA, 19 nt, Homo sapiens
  misc_RNA (1)...(19): siRNA sense strand
ccacgggagucauguugca

SEQ ID NO: 1202146 - RNA, 19 nt, Homo sapiens
  misc_RNA (1)...(19): siRNA sense strand
auacugugccuuuagauga

SEQ ID NO: 1202147 - RNA, 19 nt, Homo sapiens
  misc_RNA (1)...(19): siRNA sense strand
gauaucaacggugaagaug

SEQ ID NO: 1202148 - RNA, 19 nt, Homo sapiens
  misc_RNA (1)...(19): siRNA sense strand
ccaaugcagaauaaucaaa

SEQ ID NO: 1202149 - RNA, 19 nt, Homo sapiens
  misc_RNA (1)...(19): siRNA sense strand
gcuagccagugacuuugga

SEQ ID NO: 1202150 - RNA, 19 nt, Homo sapiens
  misc_RNA (1)...(19): siRNA sense strand
ggacuacauucaguauacu

SEQ ID NO: 1202151 - RNA, 19 nt, Homo sapiens
  misc_RNA (1)...(19): siRNA sense strand
gcacccauagucuuuaaag

SEQ ID NO: 1202152 - RNA, 19 nt, Homo sapiens
  misc_RNA (1)...(19): siRNA sense strand
gcaaacgugccagaugguu

SEQ ID NO: 1202153 - RNA, 19 nt, Homo sapiens
  misc_RNA (1)...(19): siRNA sense strand
gcagaagggaagcuagcaa

SEQ ID NO: 1202154 - RNA, 19 nt, Homo sapiens
  misc_RNA (1)...(19): siRNA sense strand
ugaauggcuuguugauugg

SEQ ID NO: 1202155 - RNA, 19 nt, Homo sapiens
  misc_RNA (1)...(19): siRNA sense strand
cagcucuucucccauggaa

SEQ ID NO: 1202156 - RNA, 19 nt, Homo sapiens
  misc_RNA (1)...(19): siRNA sense strand
acggaaaucuuuuaacuug

SEQ ID NO: 1202157 - RNA, 19 nt, Homo sapiens
  misc_RNA (1)...(19): siRNA sense strand
agacuuaauucagaaacug

SEQ ID NO: 1202158 - RNA, 19 nt, Homo sapiens
  misc_RNA (1)...(19): siRNA sense strand
gguaaaacacuucacacua

SEQ ID NO: 1202159 - RNA, 19 nt, Homo sapiens
  misc_RNA (1)...(19): siRNA sense strand
cuuaaaaccuuacggaaau

SEQ ID NO: 1202160 - RNA, 19 nt, Homo sapiens
  misc_RNA (1)...(19): siRNA sense strand
guaguggucccaugguugu

SEQ ID NO: 1202161 - RNA, 19 nt, Homo sapiens
  misc_RNA (1)...(19): siRNA sense strand
aguauacugugccuuuaga

SEQ ID NO: 1202162 - RNA, 19 nt, Homo sapiens
  misc_RNA (1)...(19): siRNA sense strand
ccgcagccaucacuacagu

SEQ ID NO: 1202163 - RNA, 19 nt, Homo sapiens
  misc_RNA (1)...(19): siRNA sense strand
uggacucacuggcacagaa

SEQ ID NO: 1202164 - RNA, 19 nt, Homo sapiens
  misc_RNA (1)...(19): siRNA sense strand
ugaauggcguccggaagga

SEQ ID NO: 1202165 - RNA, 19 nt, Homo sapiens
  misc_RNA (1)...(19): siRNA sense strand
agagcucggcuucucauaa

SEQ ID NO: 1202166 - RNA, 19 nt, Homo sapiens
  misc_RNA (1)...(19): siRNA sense strand
aaugguagguuuagcuuuu

SEQ ID NO: 1202167 - RNA, 19 nt, Homo sapiens
  misc_RNA (1)...(19): siRNA sense strand
uaaaacacuucacacuaga

SEQ ID NO: 1202168 - RNA, 19 nt, Homo sapiens
  misc_RNA (1)...(19): siRNA sense strand
aaaguaugcgcugucauuu

SEQ ID NO: 1202169 - RNA, 19 nt, Homo sapiens
  misc_RNA (1)...(19): siRNA sense strand
gguagaccaggaccuaguu

SEQ ID NO: 1202170 - RNA, 19 nt, Homo sapiens
  misc_RNA (1)...(19): siRNA sense strand
gaucacggagcuauugucu

SEQ ID NO: 1202171 - RNA, 19 nt, Homo sapiens
  misc_RNA (1)...(19): siRNA sense strand
ggaggcagaagggaagcua

SEQ ID NO: 1202172 - RNA, 19 nt, Homo sapiens
  misc_RNA (1)...(19): siRNA sense strand
aagggaagcuagcaaacgu

SEQ ID NO: 1202173 - RNA, 19 nt, Homo sapiens
  misc_RNA (1)...(19): siRNA sense strand
auggagaccugcaucuuca

SEQ ID NO: 1202174 - RNA, 19 nt, Homo sapiens
  misc_RNA (1)...(19): siRNA sense strand
gcugcuaugguaaagauau

SEQ ID NO: 1202175 - RNA, 19 nt, Homo sapiens
  misc_RNA (1)...(19): siRNA sense strand
cuaccuccaaugcagaaua

SEQ ID NO: 1202176 - RNA, 19 nt, Homo sapiens
  misc_RNA (1)...(19): siRNA sense strand
aggacuacauucaguauac

SEQ ID NO: 1202177 - RNA, 19 nt, Homo sapiens
  misc_RNA (1)...(19): siRNA sense strand
gacuuaugccucaggacua

SEQ ID NO: 1202178 - RNA, 19 nt, Homo sapiens
  misc_RNA (1)...(19): siRNA sense strand
uaauucagaaacugccuuu

SEQ ID NO: 1202179 - RNA, 19 nt, Homo sapiens
  misc_RNA (1)...(19): siRNA sense strand
gccuggaucugcaacuuac

SEQ ID NO: 1202180 - RNA, 19 nt, Homo sapiens
  misc_RNA (1)...(19): siRNA sense strand
cgauaucaacggugaagau

SEQ ID NO: 1202181 - RNA, 19 nt, Homo sapiens
  misc_RNA (1)...(19): siRNA sense strand
gaagggaagcuagcaaacg

SEQ ID NO: 1202182 - RNA, 19 nt, Homo sapiens
  misc_RNA (1)...(19): siRNA sense strand
gcaaagcaaggaugguacu

SEQ ID NO: 1202183 - RNA, 19 nt, Homo sapiens
  misc_RNA (1)...(19): siRNA sense strand
gcaccacgggagucauguu

SEQ ID NO: 1202184 - RNA, 19 nt, Homo sapiens
  misc_RNA (1)...(19): siRNA sense strand
guggaucaguccgugaaug

SEQ ID NO: 1202185 - RNA, 19 nt, Homo sapiens
  misc_RNA (1)...(19): siRNA sense strand
aaacacuucacacuagaau

SEQ ID NO: 1202186 - RNA, 19 nt, Homo sapiens
  misc_RNA (1)...(19): siRNA sense strand
agcuuucgcucccauggua

SEQ ID NO: 1202187 - RNA, 19 nt, Homo sapiens
  misc_RNA (1)...(19): siRNA sense strand
acaguucugacgaccguua

SEQ ID NO: 1202188 - RNA, 19 nt, Homo sapiens
  misc_RNA (1)...(19): siRNA sense strand
cgaggagaccugcaucaag

SEQ ID NO: 1202189 - RNA, 19 nt, Homo sapiens
  misc_RNA (1)...(19): siRNA sense strand
caaauccaaaggaacuuca

SEQ ID NO: 1202190 - RNA, 19 nt, Homo sapiens
  misc_RNA (1)...(19): siRNA sense strand
caggacuacauucaguaua

SEQ ID NO: 1202191 - RNA, 19 nt, Homo sapiens
  misc_RNA (1)...(19): siRNA sense strand
ugaacagccagauguggaa

SEQ ID NO: 1202192 - RNA, 19 nt, Homo sapiens
  misc_RNA (1)...(19): siRNA sense strand
uaugcgcugucauuugaau

SEQ ID NO: 1202193 - RNA, 19 nt, Homo sapiens
  misc_RNA (1)...(19): siRNA sense strand
aaucaaauccaaaggaacu

SEQ ID NO: 1202194 - RNA, 19 nt, Homo sapiens
  misc_RNA (1)...(19): siRNA sense strand
gcugucauuugaauuuuga

SEQ ID NO: 1202195 - RNA, 19 nt, Homo sapiens
  misc_RNA (1)...(19): siRNA sense strand
guaccugugucguuuuguu

SEQ ID NO: 1202196 - RNA, 19 nt, Homo sapiens
  misc_RNA (1)...(19): siRNA sense strand
ccauaguugaucuaauuga

SEQ ID NO: 1202197 - RNA, 19 nt, Homo sapiens
  misc_RNA (1)...(19): siRNA sense strand
ccucagcacccauagucuu

SEQ ID NO: 1202198 - RNA, 19 nt, Homo sapiens
  misc_RNA (1)...(19): siRNA sense strand
ucaggacuacauucaguau

SEQ ID NO: 1202199 - RNA, 19 nt, Homo sapiens
  misc_RNA (1)...(19): siRNA sense strand
cugaaaguaugcgcuguca

SEQ ID NO: 1202200 - RNA, 19 nt, Homo sapiens
  misc_RNA (1)...(19): siRNA sense strand
ucagcacccauagucuuua

SEQ ID NO: 1202201 - RNA, 19 nt, Homo sapiens
  misc_RNA (1)...(19): siRNA sense strand
ucugacgaccguuaccuuu

SEQ ID NO: 1202202 - RNA, 19 nt, Homo sapiens
  misc_RNA (1)...(19): siRNA sense strand
aaguaguggucccaugguu

SEQ ID NO: 1202203 - RNA, 19 nt, Homo sapiens
  misc_RNA (1)...(19): siRNA sense strand
ggagaaaguugcugaauaa

SEQ ID NO: 1202204 - RNA, 19 nt, Homo sapiens
  misc_RNA (1)...(19): siRNA sense strand
gaaagaugcuccagaauuc

SEQ ID NO: 1202205 - RNA, 19 nt, Homo sapiens
  misc_RNA (1)...(19): siRNA sense strand
gauauucucuggugcagua

SEQ ID NO: 1202206 - RNA, 19 nt, Homo sapiens
  misc_RNA (1)...(19): siRNA sense strand
ggaagaagaggaagauaua

SEQ ID NO: 1202207 - RNA, 19 nt, Homo sapiens
  misc_RNA (1)...(19): siRNA sense strand
ccagauaccuguaguaauc

SEQ ID NO: 1202208 - RNA, 19 nt, Homo sapiens
  misc_RNA (1)...(19): siRNA sense strand
gaaaguugcugaauaacca

SEQ ID NO: 1202209 - RNA, 19 nt, Homo sapiens
  misc_RNA (1)...(19): siRNA sense strand
gaacaaacucuaagcagaa

SEQ ID NO: 1202210 - RNA, 19 nt, Homo sapiens
  misc_RNA (1)...(19): siRNA sense strand
gaugaugccucuaaauuca

SEQ ID NO: 1202211 - RNA, 19 nt, Homo sapiens
  misc_RNA (1)...(19): siRNA sense strand
gaacagaaagcagacauuu

SEQ ID NO: 1202212 - RNA, 19 nt, Homo sapiens
  misc_RNA (1)...(19): siRNA sense strand
cagaauggcucacaucuuc

SEQ ID NO: 1202213 - RNA, 19 nt, Homo sapiens
  misc_RNA (1)...(19): siRNA sense strand
gaauugagcccuugccauu

SEQ ID NO: 1202214 - RNA, 19 nt, Homo sapiens
  misc_RNA (1)...(19): siRNA sense strand
ggaaggcuuugaagauuau

SEQ ID NO: 1202215 - RNA, 19 nt, Homo sapiens
  misc_RNA (1)...(19): siRNA sense strand
gaacagagagaucccuuug

SEQ ID NO: 1202216 - RNA, 19 nt, Homo sapiens
  misc_RNA (1)...(19): siRNA sense strand
gaaagcagacauuuaugaa

SEQ ID NO: 1202217 - RNA, 19 nt, Homo sapiens
  misc_RNA (1)...(19): siRNA sense strand
cagauuacuucuccuauga

SEQ ID NO: 1202218 - RNA, 19 nt, Homo sapiens
  misc_RNA (1)...(19): siRNA sense strand
gcucacaucuucuaugaca

SEQ ID NO: 1202219 - RNA, 19 nt, Homo sapiens
  misc_RNA (1)...(19): siRNA sense strand
guggaaagcuucaaucagu

SEQ ID NO: 1202220 - RNA, 19 nt, Homo sapiens
  misc_RNA (1)...(19): siRNA sense strand
uggagaaaguugcugaaua

SEQ ID NO: 1202221 - RNA, 19 nt, Homo sapiens
  misc_RNA (1)...(19): siRNA sense strand
gagaagacaggauuuguga

SEQ ID NO: 1202222 - RNA, 19 nt, Homo sapiens
  misc_RNA (1)...(19): siRNA sense strand
uguaugagcuggaguacuu

SEQ ID NO: 1202223 - RNA, 19 nt, Homo sapiens
  misc_RNA (1)...(19): siRNA sense strand
agaaugagcuaugcagauu

SEQ ID NO: 1202224 - RNA, 19 nt, Homo sapiens
  misc_RNA (1)...(19): siRNA sense strand
caggaaggcuuugaagauu

SEQ ID NO: 1202225 - RNA, 19 nt, Homo sapiens
  misc_RNA (1)...(19): siRNA sense strand
ccagccaccucuccaagua

SEQ ID NO: 1202226 - RNA, 19 nt, Homo sapiens
  misc_RNA (1)...(19): siRNA sense strand
ugaaagaugcuccagaauu

SEQ ID NO: 1202227 - RNA, 19 nt, Homo sapiens
  misc_RNA (1)...(19): siRNA sense strand
agaaauacuuagaccauga

SEQ ID NO: 1202228 - RNA, 19 nt, Homo sapiens
  misc_RNA (1)...(19): siRNA sense strand
gugcaagccuuccagagaa

SEQ ID NO: 1202229 - RNA, 19 nt, Homo sapiens
  misc_RNA (1)...(19): siRNA sense strand
ugaauaauguugugaaugc

SEQ ID NO: 1202230 - RNA, 19 nt, Homo sapiens
  misc_RNA (1)...(19): siRNA sense strand
ccugaaagaugcuccagaa

SEQ ID NO: 1202231 - RNA, 19 nt, Homo sapiens
  misc_RNA (1)...(19): siRNA sense strand
gaagaagaggaagauauaa

SEQ ID NO: 1202232 - RNA, 19 nt, Homo sapiens
  misc_RNA (1)...(19): siRNA sense strand
acagaaagcagacauuuau

SEQ ID NO: 1202233 - RNA, 19 nt, Homo sapiens
  misc_RNA (1)...(19): siRNA sense strand
gaagacaggauuugugaca

SEQ ID NO: 1202234 - RNA, 19 nt, Homo sapiens
  misc_RNA (1)...(19): siRNA sense strand
aaacugcuuucauggauau

SEQ ID NO: 1202235 - RNA, 19 nt, Homo sapiens
  misc_RNA (1)...(19): siRNA sense strand
aggaaggcuuugaagauua

SEQ ID NO: 1202236 - RNA, 19 nt, Homo sapiens
  misc_RNA (1)...(19): siRNA sense strand
caacugcagcucucuagaa

SEQ ID NO: 1202237 - RNA, 19 nt, Homo sapiens
  misc_RNA (1)...(19): siRNA sense strand
agagaaauguggaaagcuu

SEQ ID NO: 1202238 - RNA, 19 nt, Homo sapiens
  misc_RNA (1)...(19): siRNA sense strand
caagcaggauuauugaaag

SEQ ID NO: 1202239 - RNA, 19 nt, Homo sapiens
  misc_RNA (1)...(19): siRNA sense strand
gaaauacuuagaccaugaa

SEQ ID NO: 1202240 - RNA, 19 nt, Homo sapiens
  misc_RNA (1)...(19): siRNA sense strand
ggagaaauacuuagaccau

SEQ ID NO: 1202241 - RNA, 19 nt, Homo sapiens
  misc_RNA (1)...(19): siRNA sense strand
cuaccagcauugaguauug

SEQ ID NO: 1202242 - RNA, 19 nt, Homo sapiens
  misc_RNA (1)...(19): siRNA sense strand
aaauucaucugucuucuag

SEQ ID NO: 1202243 - RNA, 19 nt, Homo sapiens
  misc_RNA (1)...(19): siRNA sense strand
agaaggauguugagaacga

SEQ ID NO: 1202244 - RNA, 19 nt, Homo sapiens
  misc_RNA (1)...(19): siRNA sense strand
gaauggcucacaucuucua

SEQ ID NO: 1202245 - RNA, 19 nt, Homo sapiens
  misc_RNA (1)...(19): siRNA sense strand
gaucacgaccucuacauca

SEQ ID NO: 1202246 - RNA, 19 nt, Homo sapiens
  misc_RNA (1)...(19): siRNA sense strand
gguguacucuccauguaug

SEQ ID NO: 1202247 - RNA, 19 nt, Homo sapiens
  misc_RNA (1)...(19): siRNA sense strand
cugaagaggugcagaaugg

SEQ ID NO: 1202248 - RNA, 19 nt, Homo sapiens
  misc_RNA (1)...(19): siRNA sense strand
ccagaaggauguugagaac

SEQ ID NO: 1202249 - RNA, 19 nt, Homo sapiens
  misc_RNA (1)...(19): siRNA sense strand
uggcucacaucuucuauga

SEQ ID NO: 1202250 - RNA, 19 nt, Homo sapiens
  misc_RNA (1)...(19): siRNA sense strand
gcuguccucucuauuggaa

SEQ ID NO: 1202251 - RNA, 19 nt, Homo sapiens
  misc_RNA (1)...(19): siRNA sense strand
gcaggauuauugaaaggau

SEQ ID NO: 1202252 - RNA, 19 nt, Homo sapiens
  misc_RNA (1)...(19): siRNA sense strand
agaggaagauauaaaccaa

SEQ ID NO: 1202253 - RNA, 19 nt, Homo sapiens
  misc_RNA (1)...(19): siRNA sense strand
ggauauugaagaacagaaa

SEQ ID NO: 1202254 - RNA, 19 nt, Homo sapiens
  misc_RNA (1)...(19): siRNA sense strand
agaaagcagacauuuauga

SEQ ID NO: 1202255 - RNA, 19 nt, Homo sapiens
  misc_RNA (1)...(19): siRNA sense strand
caaacucuaagcagaauug

SEQ ID NO: 1202256 - RNA, 19 nt, Homo sapiens
  misc_RNA (1)...(19): siRNA sense strand
agaggaaucugcccaagca

SEQ ID NO: 1202257 - RNA, 19 nt, Homo sapiens
  misc_RNA (1)...(19): siRNA sense strand
caucuucuaugacacuuuc

SEQ ID NO: 1202258 - RNA, 19 nt, Homo sapiens
  misc_RNA (1)...(19): siRNA sense strand
caggauuauugaaaggaua

SEQ ID NO: 1202259 - RNA, 19 nt, Homo sapiens
  misc_RNA (1)...(19): siRNA sense strand
ucugggaacuagauacuga

SEQ ID NO: 1202260 - RNA, 19 nt, Homo sapiens
  misc_RNA (1)...(19): siRNA sense strand
ggagagaagacaggauuug

SEQ ID NO: 1202261 - RNA, 19 nt, Homo sapiens
  misc_RNA (1)...(19): siRNA sense strand
gaauuccacucccgcuaca

SEQ ID NO: 1202262 - RNA, 19 nt, Homo sapiens
  misc_RNA (1)...(19): siRNA sense strand
ccaggaaggcuuugaagau

SEQ ID NO: 1202263 - RNA, 19 nt, Homo sapiens
  misc_RNA (1)...(19): siRNA sense strand
ccagaugcuugaccuagug

SEQ ID NO: 1202264 - RNA, 19 nt, Homo sapiens
  misc_RNA (1)...(19): siRNA sense strand
gagcuggaguacuucuaug

SEQ ID NO: 1202265 - RNA, 19 nt, Homo sapiens
  misc_RNA (1)...(19): siRNA sense strand
cagaaagagggaagaauga

SEQ ID NO: 1202266 - RNA, 19 nt, Homo sapiens
  misc_RNA (1)...(19): siRNA sense strand
aggccgaucugucucgaua

SEQ ID NO: 1202267 - RNA, 19 nt, Homo sapiens
  misc_RNA (1)...(19): siRNA sense strand
ccaaauuacagauuacuuc

SEQ ID NO: 1202268 - RNA, 19 nt, Homo sapiens
  misc_RNA (1)...(19): siRNA sense strand
acucuaagcagaauugaaa

SEQ ID NO: 1202269 - RNA, 19 nt, Homo sapiens
  misc_RNA (1)...(19): siRNA sense strand
gaaugagcuaugcagauuu

SEQ ID NO: 1202270 - RNA, 19 nt, Homo sapiens
  misc_RNA (1)...(19): siRNA sense strand
ucauggauauugaagaaca

SEQ ID NO: 1202271 - RNA, 19 nt, Homo sapiens
  misc_RNA (1)...(19): siRNA sense strand
ccugaaggacucccagaua

SEQ ID NO: 1202272 - RNA, 19 nt, Homo sapiens
  misc_RNA (1)...(19): siRNA sense strand
ucaucaagcaggauuauug

SEQ ID NO: 1202273 - RNA, 19 nt, Homo sapiens
  misc_RNA (1)...(19): siRNA sense strand
ggaacuagauacugaucac

SEQ ID NO: 1202274 - RNA, 19 nt, Homo sapiens
  misc_RNA (1)...(19): siRNA sense strand
acagauuacuucuccuaug

SEQ ID NO: 1202275 - RNA, 19 nt, Homo sapiens
  misc_RNA (1)...(19): siRNA sense strand
ggaaucugcccaagcacaa

SEQ ID NO: 1202276 - RNA, 19 nt, Homo sapiens
  misc_RNA (1)...(19): siRNA sense strand
gcagaauggcucacaucuu

SEQ ID NO: 1202277 - RNA, 19 nt, Homo sapiens
  misc_RNA (1)...(19): siRNA sense strand
ggucucacguuccugaaag

SEQ ID NO: 1202278 - RNA, 19 nt, Homo sapiens
  misc_RNA (1)...(19): siRNA sense strand
ucaucugucuucuagcaaa

SEQ ID NO: 1202279 - RNA, 19 nt, Homo sapiens
  misc_RNA (1)...(19): siRNA sense strand
gccauuccaugauuuacug

SEQ ID NO: 1202280 - RNA, 19 nt, Homo sapiens
  misc_RNA (1)...(19): siRNA sense strand
gauuucaucccucuacuuc

SEQ ID NO: 1202281 - RNA, 19 nt, Homo sapiens
  misc_RNA (1)...(19): siRNA sense strand
gaaggauguugagaacgau

SEQ ID NO: 1202282 - RNA, 19 nt, Homo sapiens
  misc_RNA (1)...(19): siRNA sense strand
acagaaagagggaagaaug

SEQ ID NO: 1202283 - RNA, 19 nt, Homo sapiens
  misc_RNA (1)...(19): siRNA sense strand
cgaucugucucgauacaau

SEQ ID NO: 1202284 - RNA, 19 nt, Homo sapiens
  misc_RNA (1)...(19): siRNA sense strand
gagggaagaaugagcuaug

SEQ ID NO: 1202285 - RNA, 19 nt, Homo sapiens
  misc_RNA (1)...(19): siRNA sense strand
gccauuguccauaaacauu

SEQ ID NO: 1202286 - RNA, 19 nt, Homo sapiens
  misc_RNA (1)...(19): siRNA sense strand
guaguaaucaugaacaaac

SEQ ID NO: 1202287 - RNA, 19 nt, Homo sapiens
  misc_RNA (1)...(19): siRNA sense strand
aacagaaagcagacauuua

SEQ ID NO: 1202288 - RNA, 19 nt, Homo sapiens
  misc_RNA (1)...(19): siRNA sense strand
aaucaguggaugaagaaua

SEQ ID NO: 1202289 - RNA, 19 nt, Homo sapiens
  misc_RNA (1)...(19): siRNA sense strand
gagagaagacaggauuugu

SEQ ID NO: 1202290 - RNA, 19 nt, Homo sapiens
  misc_RNA (1)...(19): siRNA sense strand
acagcacagucauucauug

SEQ ID NO: 1202291 - RNA, 19 nt, Homo sapiens
  misc_RNA (1)...(19): siRNA sense strand
ucaaucaguggaugaagaa

SEQ ID NO: 1202292 - RNA, 19 nt, Homo sapiens
  misc_RNA (1)...(19): siRNA sense strand
ccagagaaauguggaaagc

SEQ ID NO: 1202293 - RNA, 19 nt, Homo sapiens
  misc_RNA (1)...(19): siRNA sense strand
ggaauccuaccagcauuga

SEQ ID NO: 1202294 - RNA, 19 nt, Homo sapiens
  misc_RNA (1)...(19): siRNA sense strand
uaaauucugggaacuagau

SEQ ID NO: 1202295 - RNA, 19 nt, Homo sapiens
  misc_RNA (1)...(19): siRNA sense strand
gaggaagauauaaaccaaa

SEQ ID NO: 1202296 - RNA, 19 nt, Homo sapiens
  misc_RNA (1)...(19): siRNA sense strand
gacagcacagucauucauu

SEQ ID NO: 1202297 - RNA, 19 nt, Homo sapiens
  misc_RNA (1)...(19): siRNA sense strand
ggauggagacgguguacuc

SEQ ID NO: 1202298 - RNA, 19 nt, Homo sapiens
  misc_RNA (1)...(19): siRNA sense strand
gaucucugaagaagacaaa

SEQ ID NO: 1202299 - RNA, 19 nt, Homo sapiens
  misc_RNA (1)...(19): siRNA sense strand
cugaaggacucccagauac

SEQ ID NO: 1202300 - RNA, 19 nt, Homo sapiens
  misc_RNA (1)...(19): siRNA sense strand
ccucuaaauucaucugucu

SEQ ID NO: 1202301 - RNA, 19 nt, Homo sapiens
  misc_RNA (1)...(19): siRNA sense strand
uuacagauuacuucuccua

SEQ ID NO: 1202302 - RNA, 19 nt, Homo sapiens
  misc_RNA (1)...(19): siRNA sense strand
uggaagccaugggaauuga

SEQ ID NO: 1202303 - RNA, 19 nt, Homo sapiens
  misc_RNA (1)...(19): siRNA sense strand
ggagaaaguugcugaauaa

SEQ ID NO: 1202304 - RNA, 19 nt, Homo sapiens
  misc_RNA (1)...(19): siRNA sense strand
gaaagaugcuccagaauuc

SEQ ID NO: 1202305 - RNA, 19 nt, Homo sapiens
  misc_RNA (1)...(19): siRNA sense strand
gauauucucuggugcagua

SEQ ID NO: 1202306 - RNA, 19 nt, Homo sapiens
  misc_RNA (1)...(19): siRNA sense strand
ggaagaagaggaagauaua

SEQ ID NO: 1202307 - RNA, 19 nt, Homo sapiens
  misc_RNA (1)...(19): siRNA sense strand
ccagauaccuguaguaauc

SEQ ID NO: 1202308 - RNA, 19 nt, Homo sapiens
  misc_RNA (1)...(19): siRNA sense strand
gaaaguugcugaauaacca

SEQ ID NO: 1202309 - RNA, 19 nt, Homo sapiens
  misc_RNA (1)...(19): siRNA sense strand
gaacaaacucuaagcagaa

SEQ ID NO: 1202310 - RNA, 19 nt, Homo sapiens
  misc_RNA (1)...(19): siRNA sense strand
gaugaugccucuaaauuca

SEQ ID NO: 1202311 - RNA, 19 nt, Homo sapiens
  misc_RNA (1)...(19): siRNA sense strand
gaacagaaagcagacauuu

SEQ ID NO: 1202312 - RNA, 19 nt, Homo sapiens
  misc_RNA (1)...(19): siRNA sense strand
cagaauggcucacaucuuc

SEQ ID NO: 1202313 - RNA, 19 nt, Homo sapiens
  misc_RNA (1)...(19): siRNA sense strand
gaauugagcccuugccauu

SEQ ID NO: 1202314 - RNA, 19 nt, Homo sapiens
  misc_RNA (1)...(19): siRNA sense strand
ggaaggcuuugaagauuau

SEQ ID NO: 1202315 - RNA, 19 nt, Homo sapiens
  misc_RNA (1)...(19): siRNA sense strand
gaacagagagaucccuuug

SEQ ID NO: 1202316 - RNA, 19 nt, Homo sapiens
  misc_RNA (1)...(19): siRNA sense strand
gaaagcagacauuuaugaa

SEQ ID NO: 1202317 - RNA, 19 nt, Homo sapiens
  misc_RNA (1)...(19): siRNA sense strand
cagauuacuucuccuauga

SEQ ID NO: 1202318 - RNA, 19 nt, Homo sapiens
  misc_RNA (1)...(19): siRNA sense strand
gcucacaucuucuaugaca

SEQ ID NO: 1202319 - RNA, 19 nt, Homo sapiens
  misc_RNA (1)...(19): siRNA sense strand
guggaaagcuucaaucagu

SEQ ID NO: 1202320 - RNA, 19 nt, Homo sapiens
  misc_RNA (1)...(19): siRNA sense strand
uggagaaaguugcugaaua

SEQ ID NO: 1202321 - RNA, 19 nt, Homo sapiens
  misc_RNA (1)...(19): siRNA sense strand
gagaagacaggauuuguga

SEQ ID NO: 1202322 - RNA, 19 nt, Homo sapiens
  misc_RNA (1)...(19): siRNA sense strand
uguaugagcuggaguacuu

SEQ ID NO: 1202323 - RNA, 19 nt, Homo sapiens
  misc_RNA (1)...(19): siRNA sense strand
agaaugagcuaugcagauu

SEQ ID NO: 1202324 - RNA, 19 nt, Homo sapiens
  misc_RNA (1)...(19): siRNA sense strand
caggaaggcuuugaagauu

SEQ ID NO: 1202325 - RNA, 19 nt, Homo sapiens
  misc_RNA (1)...(19): siRNA sense strand
ccagccaccucuccaagua

SEQ ID NO: 1202326 - RNA, 19 nt, Homo sapiens
  misc_RNA (1)...(19): siRNA sense strand
ugaaagaugcuccagaauu

SEQ ID NO: 1202327 - RNA, 19 nt, Homo sapiens
  misc_RNA (1)...(19): siRNA sense strand
agaaauacuuagaccauga

SEQ ID NO: 1202328 - RNA, 19 nt, Homo sapiens
  misc_RNA (1)...(19): siRNA sense strand
gugcaagccuuccagagaa

SEQ ID NO: 1202329 - RNA, 19 nt, Homo sapiens
  misc_RNA (1)...(19): siRNA sense strand
ugaauaauguugugaaugc

SEQ ID NO: 1202330 - RNA, 19 nt, Homo sapiens
  misc_RNA (1)...(19): siRNA sense strand
ccugaaagaugcuccagaa

SEQ ID NO: 1202331 - RNA, 19 nt, Homo sapiens
  misc_RNA (1)...(19): siRNA sense strand
gaagaagaggaagauauaa

SEQ ID NO: 1202332 - RNA, 19 nt, Homo sapiens
  misc_RNA (1)...(19): siRNA sense strand
acagaaagcagacauuuau

SEQ ID NO: 1202333 - RNA, 19 nt, Homo sapiens
  misc_RNA (1)...(19): siRNA sense strand
gaagacaggauuugugaca

SEQ ID NO: 1202334 - RNA, 19 nt, Homo sapiens
  misc_RNA (1)...(19): siRNA sense strand
aaacugcuuucauggauau

SEQ ID NO: 1202335 - RNA, 19 nt, Homo sapiens
  misc_RNA (1)...(19): siRNA sense strand
aggaaggcuuugaagauua

SEQ ID NO: 1202336 - RNA, 19 nt, Homo sapiens
  misc_RNA (1)...(19): siRNA sense strand
caacugcagcucucuagaa

SEQ ID NO: 1202337 - RNA, 19 nt, Homo sapiens
  misc_RNA (1)...(19): siRNA sense strand
agagaaauguggaaagcuu

SEQ ID NO: 1202338 - RNA, 19 nt, Homo sapiens
  misc_RNA (1)...(19): siRNA sense strand
caagcaggauuauugaaag

SEQ ID NO: 1202339 - RNA, 19 nt, Homo sapiens
  misc_RNA (1)...(19): siRNA sense strand
gaaauacuuagaccaugaa

SEQ ID NO: 1202340 - RNA, 19 nt, Homo sapiens
  misc_RNA (1)...(19): siRNA sense strand
ggagaaauacuuagaccau

SEQ ID NO: 1202341 - RNA, 19 nt, Homo sapiens
  misc_RNA (1)...(19): siRNA sense strand
cuaccagcauugaguauug

SEQ ID NO: 1202342 - RNA, 19 nt, Homo sapiens
  misc_RNA (1)...(19): siRNA sense strand
aaauucaucugucuucuag

SEQ ID NO: 1202343 - RNA, 19 nt, Homo sapiens
  misc_RNA (1)...(19): siRNA sense strand
agaaggauguugagaacga

SEQ ID NO: 1202344 - RNA, 19 nt, Homo sapiens
  misc_RNA (1)...(19): siRNA sense strand
gaauggcucacaucuucua

SEQ ID NO: 1202345 - RNA, 19 nt, Homo sapiens
  misc_RNA (1)...(19): siRNA sense strand
gaucacgaccucuacauca

SEQ ID NO: 1202346 - RNA, 19 nt, Homo sapiens
  misc_RNA (1)...(19): siRNA sense strand
gguguacucuccauguaug

SEQ ID NO: 1202347 - RNA, 19 nt, Homo sapiens
  misc_RNA (1)...(19): siRNA sense strand
cugaagaggugcagaaugg

SEQ ID NO: 1202348 - RNA, 19 nt, Homo sapiens
  misc_RNA (1)...(19): siRNA sense strand
ccagaaggauguugagaac

SEQ ID NO: 1202349 - RNA, 19 nt, Homo sapiens
  misc_RNA (1)...(19): siRNA sense strand
uggcucacaucuucuauga

SEQ ID NO: 1202350 - RNA, 19 nt, Homo sapiens
  misc_RNA (1)...(19): siRNA sense strand
gcuguccucucuauuggaa

SEQ ID NO: 1202351 - RNA, 19 nt, Homo sapiens
  misc_RNA (1)...(19): siRNA sense strand
gcaggauuauugaaaggau

SEQ ID NO: 1202352 - RNA, 19 nt, Homo sapiens
  misc_RNA (1)...(19): siRNA sense strand
agaggaagauauaaaccaa

SEQ ID NO: 1202353 - RNA, 19 nt, Homo sapiens
  misc_RNA (1)...(19): siRNA sense strand
ggauauugaagaacagaaa

SEQ ID NO: 1202354 - RNA, 19 nt, Homo sapiens
  misc_RNA (1)...(19): siRNA sense strand
agaaagcagacauuuauga

SEQ ID NO: 1202355 - RNA, 19 nt, Homo sapiens
  misc_RNA (1)...(19): siRNA sense strand
caaacucuaagcagaauug

SEQ ID NO: 1202356 - RNA, 19 nt, Homo sapiens
  misc_RNA (1)...(19): siRNA sense strand
agaggaaucugcccaagca

SEQ ID NO: 1202357 - RNA, 19 nt, Homo sapiens
  misc_RNA (1)...(19): siRNA sense strand
caucuucuaugacacuuuc

SEQ ID NO: 1202358 - RNA, 19 nt, Homo sapiens
  misc_RNA (1)...(19): siRNA sense strand
caggauuauugaaaggaua

SEQ ID NO: 1202359 - RNA, 19 nt, Homo sapiens
  misc_RNA (1)...(19): siRNA sense strand
ucugggaacuagauacuga

SEQ ID NO: 1202360 - RNA, 19 nt, Homo sapiens
  misc_RNA (1)...(19): siRNA sense strand
ggagagaagacaggauuug

SEQ ID NO: 1202361 - RNA, 19 nt, Homo sapiens
  misc_RNA (1)...(19): siRNA sense strand
gaauuccacucccgcuaca

SEQ ID NO: 1202362 - RNA, 19 nt, Homo sapiens
  misc_RNA (1)...(19): siRNA sense strand
ccaggaaggcuuugaagau

SEQ ID NO: 1202363 - RNA, 19 nt, Homo sapiens
  misc_RNA (1)...(19): siRNA sense strand
ccagaugcuugaccuagug

SEQ ID NO: 1202364 - RNA, 19 nt, Homo sapiens
  misc_RNA (1)...(19): siRNA sense strand
gagcuggaguacuucuaug

SEQ ID NO: 1202365 - RNA, 19 nt, Homo sapiens
  misc_RNA (1)...(19): siRNA sense strand
cagaaagagggaagaauga

SEQ ID NO: 1202366 - RNA, 19 nt, Homo sapiens
  misc_RNA (1)...(19): siRNA sense strand
aggccgaucugucucgaua

SEQ ID NO: 1202367 - RNA, 19 nt, Homo sapiens
  misc_RNA (1)...(19): siRNA sense strand
ccaaauuacagauuacuuc

SEQ ID NO: 1202368 - RNA, 19 nt, Homo sapiens
  misc_RNA (1)...(19): siRNA sense strand
acucuaagcagaauugaaa

SEQ ID NO: 1202369 - RNA, 19 nt, Homo sapiens
  misc_RNA (1)...(19): siRNA sense strand
gaaugagcuaugcagauuu

SEQ ID NO: 1202370 - RNA, 19 nt, Homo sapiens
  misc_RNA (1)...(19): siRNA sense strand
ucauggauauugaagaaca

SEQ ID NO: 1202371 - RNA, 19 nt, Homo sapiens
  misc_RNA (1)...(19): siRNA sense strand
ccugaaggacucccagaua

SEQ ID NO: 1202372 - RNA, 19 nt, Homo sapiens
  misc_RNA (1)...(19): siRNA sense strand
ucaucaagcaggauuauug

SEQ ID NO: 1202373 - RNA, 19 nt, Homo sapiens
  misc_RNA (1)...(19): siRNA sense strand
ggaacuagauacugaucac

SEQ ID NO: 1202374 - RNA, 19 nt, Homo sapiens
  misc_RNA (1)...(19): siRNA sense strand
acagauuacuucuccuaug

SEQ ID NO: 1202375 - RNA, 19 nt, Homo sapiens
  misc_RNA (1)...(19): siRNA sense strand
ggaaucugcccaagcacaa

SEQ ID NO: 1202376 - RNA, 19 nt, Homo sapiens
  misc_RNA (1)...(19): siRNA sense strand
gcagaauggcucacaucuu

SEQ ID NO: 1202377 - RNA, 19 nt, Homo sapiens
  misc_RNA (1)...(19): siRNA sense strand
ggucucacguuccugaaag

SEQ ID NO: 1202378 - RNA, 19 nt, Homo sapiens
  misc_RNA (1)...(19): siRNA sense strand
ucaucugucuucuagcaaa

SEQ ID NO: 1202379 - RNA, 19 nt, Homo sapiens
  misc_RNA (1)...(19): siRNA sense strand
gccauuccaugauuuacug

SEQ ID NO: 1202380 - RNA, 19 nt, Homo sapiens
  misc_RNA (1)...(19): siRNA sense strand
gauuucaucccucuacuuc

SEQ ID NO: 1202381 - RNA, 19 nt, Homo sapiens
  misc_RNA (1)...(19): siRNA sense strand
gaaggauguugagaacgau

SEQ ID NO: 1202382 - RNA, 19 nt, Homo sapiens
  misc_RNA (1)...(19): siRNA sense strand
acagaaagagggaagaaug

SEQ ID NO: 1202383 - RNA, 19 nt, Homo sapiens
  misc_RNA (1)...(19): siRNA sense strand
cgaucugucucgauacaau

SEQ ID NO: 1202384 - RNA, 19 nt, Homo sapiens
  misc_RNA (1)...(19): siRNA sense strand
gagggaagaaugagcuaug

SEQ ID NO: 1202385 - RNA, 19 nt, Homo sapiens
  misc_RNA (1)...(19): siRNA sense strand
gccauuguccauaaacauu

SEQ ID NO: 1202386 - RNA, 19 nt, Homo sapiens
  misc_RNA (1)...(19): siRNA sense strand
guaguaaucaugaacaaac

SEQ ID NO: 1202387 - RNA, 19 nt, Homo sapiens
  misc_RNA (1)...(19): siRNA sense strand
aacagaaagcagacauuua

SEQ ID NO: 1202388 - RNA, 19 nt, Homo sapiens
  misc_RNA (1)...(19): siRNA sense strand
aaucaguggaugaagaaua

SEQ ID NO: 1202389 - RNA, 19 nt, Homo sapiens
  misc_RNA (1)...(19): siRNA sense strand
gagagaagacaggauuugu

SEQ ID NO: 1202390 - RNA, 19 nt, Homo sapiens
  misc_RNA (1)...(19): siRNA sense strand
acagcacagucauucauug

SEQ ID NO: 1202391 - RNA, 19 nt, Homo sapiens
  misc_RNA (1)...(19): siRNA sense strand
ucaaucaguggaugaagaa

SEQ ID NO: 1202392 - RNA, 19 nt, Homo sapiens
  misc_RNA (1)...(19): siRNA sense strand
ccagagaaauguggaaagc

SEQ ID NO: 1202393 - RNA, 19 nt, Homo sapiens
  misc_RNA (1)...(19): siRNA sense strand
ggaauccuaccagcauuga

SEQ ID NO: 1202394 - RNA, 19 nt, Homo sapiens
  misc_RNA (1)...(19): siRNA sense strand
uaaauucugggaacuagau

SEQ ID NO: 1202395 - RNA, 19 nt, Homo sapiens
  misc_RNA (1)...(19): siRNA sense strand
gaggaagauauaaaccaaa

SEQ ID NO: 1202396 - RNA, 19 nt, Homo sapiens
  misc_RNA (1)...(19): siRNA sense strand
gacagcacagucauucauu

SEQ ID NO: 1202397 - RNA, 19 nt, Homo sapiens
  misc_RNA (1)...(19): siRNA sense strand
ggauggagacgguguacuc

SEQ ID NO: 1202398 - RNA, 19 nt, Homo sapiens
  misc_RNA (1)...(19): siRNA sense strand
gaucucugaagaagacaaa

SEQ ID NO: 1202399 - RNA, 19 nt, Homo sapiens
  misc_RNA (1)...(19): siRNA sense strand
cugaaggacucccagauac

SEQ ID NO: 1202400 - RNA, 19 nt, Homo sapiens
  misc_RNA (1)...(19): siRNA sense strand
ccucuaaauucaucugucu

SEQ ID NO: 1202401 - RNA, 19 nt, Homo sapiens
  misc_RNA (1)...(19): siRNA sense strand
uuacagauuacuucuccua

SEQ ID NO: 1202402 - RNA, 19 nt, Homo sapiens
  misc_RNA (1)...(19): siRNA sense strand
uggaagccaugggaauuga

SEQ ID NO: 1202403 - RNA, 19 nt, Homo sapiens
  misc_RNA (1)...(19): siRNA sense strand
gaccugagcuugaauuucu

SEQ ID NO: 1202404 - RNA, 19 nt, Homo sapiens
  misc_RNA (1)...(19): siRNA sense strand
gaccugguguucacauauu

SEQ ID NO: 1202405 - RNA, 19 nt, Homo sapiens
  misc_RNA (1)...(19): siRNA sense strand
ucaagaacaucaccaagca

SEQ ID NO: 1202406 - RNA, 19 nt, Homo sapiens
  misc_RNA (1)...(19): siRNA sense strand
gcgagaagaucccguucau

SEQ ID NO: 1202407 - RNA, 19 nt, Homo sapiens
  misc_RNA (1)...(19): siRNA sense strand
ucaagcacauggccgacua

SEQ ID NO: 1202408 - RNA, 19 nt, Homo sapiens
  misc_RNA (1)...(19): siRNA sense strand
ggaggagggcgaauucaug

SEQ ID NO: 1202409 - RNA, 19 nt, Homo sapiens
  misc_RNA (1)...(19): siRNA sense strand
gcuacaacgucgccaaagu

SEQ ID NO: 1202410 - RNA, 19 nt, Homo sapiens
  misc_RNA (1)...(19): siRNA sense strand
ggacgaggaggacgaggaa

SEQ ID NO: 1202411 - RNA, 19 nt, Homo sapiens
  misc_RNA (1)...(19): siRNA sense strand
uccaagggcuccagcaaga

SEQ ID NO: 1202412 - RNA, 19 nt, Homo sapiens
  misc_RNA (1)...(19): siRNA sense strand
caagggcuccagcaagaaa

SEQ ID NO: 1202413 - RNA, 19 nt, Homo sapiens
  misc_RNA (1)...(19): siRNA sense strand
auaaggauuuggauucguu

SEQ ID NO: 1202414 - RNA, 19 nt, Homo sapiens
  misc_RNA (1)...(19): siRNA sense strand
ggauaaggauuuggauucg

SEQ ID NO: 1202415 - RNA, 19 nt, Homo sapiens
  misc_RNA (1)...(19): siRNA sense strand
cccugucgcugguggauaa

SEQ ID NO: 1202416 - RNA, 19 nt, Homo sapiens
  misc_RNA (1)...(19): siRNA sense strand
uacuacagcuucaagaaca

SEQ ID NO: 1202417 - RNA, 19 nt, Homo sapiens
  misc_RNA (1)...(19): siRNA sense strand
gcugguggauaaggauuug

SEQ ID NO: 1202418 - RNA, 19 nt, Homo sapiens
  misc_RNA (1)...(19): siRNA sense strand
gaaaugcggcaagcucaag

SEQ ID NO: 1202419 - RNA, 19 nt, Homo sapiens
  misc_RNA (1)...(19): siRNA sense strand
cuacaacgucgccaaagug

SEQ ID NO: 1202420 - RNA, 19 nt, Homo sapiens
  misc_RNA (1)...(19): siRNA sense strand
ccgacgaccugauguucga

SEQ ID NO: 1202421 - RNA, 19 nt, Homo sapiens
  misc_RNA (1)...(19): siRNA sense strand
ccgaccugguguucacaua

SEQ ID NO: 1202422 - RNA, 19 nt, Homo sapiens
  misc_RNA (1)...(19): siRNA sense strand
ugaaggacagcgagaagau

SEQ ID NO: 1202423 - RNA, 19 nt, Homo sapiens
  misc_RNA (1)...(19): siRNA sense strand
gauaaggauuuggauucgu

SEQ ID NO: 1202424 - RNA, 19 nt, Homo sapiens
  misc_RNA (1)...(19): siRNA sense strand
uggauaaggauuuggauuc

SEQ ID NO: 1202425 - RNA, 19 nt, Homo sapiens
  misc_RNA (1)...(19): siRNA sense strand
gcagccgccucuacuacag

SEQ ID NO: 1202426 - RNA, 19 nt, Homo sapiens
  misc_RNA (1)...(19): siRNA sense strand
gaaggacagcgagaagauc

SEQ ID NO: 1202427 - RNA, 19 nt, Homo sapiens
  misc_RNA (1)...(19): siRNA sense strand
gcuggaaaaugcugaagga

SEQ ID NO: 1202428 - RNA, 19 nt, Homo sapiens
  misc_RNA (1)...(19): siRNA sense strand
gacggucaagugcguguuu

SEQ ID NO: 1202429 - RNA, 19 nt, Homo sapiens
  misc_RNA (1)...(19): siRNA sense strand
ggcaagcgcuggaaaaugc

SEQ ID NO: 1202430 - RNA, 19 nt, Homo sapiens
  misc_RNA (1)...(19): siRNA sense strand
gguaugguccaagaucgaa

SEQ ID NO: 1202431 - RNA, 19 nt, Homo sapiens
  misc_RNA (1)...(19): siRNA sense strand
cgaccugguguucacauau

SEQ ID NO: 1202432 - RNA, 19 nt, Homo sapiens
  misc_RNA (1)...(19): siRNA sense strand
guggauaaggauuuggauu

SEQ ID NO: 1202433 - RNA, 19 nt, Homo sapiens
  misc_RNA (1)...(19): siRNA sense strand
acacggaggagggcgaauu

SEQ ID NO: 1202434 - RNA, 19 nt, Homo sapiens
  misc_RNA (1)...(19): siRNA sense strand
ggaaugugcugcuggcuuu

SEQ ID NO: 1202435 - RNA, 19 nt, Homo sapiens
  misc_RNA (1)...(19): siRNA sense strand
ggcagucgcuggagauuau

SEQ ID NO: 1202436 - RNA, 19 nt, Homo sapiens
  misc_RNA (1)...(19): siRNA sense strand
gaagguggcaucaggaaug

SEQ ID NO: 1202437 - RNA, 19 nt, Homo sapiens
  misc_RNA (1)...(19): siRNA sense strand
gguuuggcauaucuaauaa

SEQ ID NO: 1202438 - RNA, 19 nt, Homo sapiens
  misc_RNA (1)...(19): siRNA sense strand
gagcugguuuggcauaucu

SEQ ID NO: 1202439 - RNA, 19 nt, Homo sapiens
  misc_RNA (1)...(19): siRNA sense strand
gauuaucucucgguaccuu

SEQ ID NO: 1202440 - RNA, 19 nt, Homo sapiens
  misc_RNA (1)...(19): siRNA sense strand
uaaucggacucaaccucua

SEQ ID NO: 1202441 - RNA, 19 nt, Homo sapiens
  misc_RNA (1)...(19): siRNA sense strand
ccauguagaggaccuagaa

SEQ ID NO: 1202442 - RNA, 19 nt, Homo sapiens
  misc_RNA (1)...(19): siRNA sense strand
ugguuuggcauaucuaaua

SEQ ID NO: 1202443 - RNA, 19 nt, Homo sapiens
  misc_RNA (1)...(19): siRNA sense strand
ggagcugguuuggcauauc

SEQ ID NO: 1202444 - RNA, 19 nt, Homo sapiens
  misc_RNA (1)...(19): siRNA sense strand
ccaaggacacaaagccaau

SEQ ID NO: 1202445 - RNA, 19 nt, Homo sapiens
  misc_RNA (1)...(19): siRNA sense strand
ggauggguuuguggaguuc

SEQ ID NO: 1202446 - RNA, 19 nt, Homo sapiens
  misc_RNA (1)...(19): siRNA sense strand
ccacgagacggccuuccaa

SEQ ID NO: 1202447 - RNA, 19 nt, Homo sapiens
  misc_RNA (1)...(19): siRNA sense strand
ggaguucuuccauguagag

SEQ ID NO: 1202448 - RNA, 19 nt, Homo sapiens
  misc_RNA (1)...(19): siRNA sense strand
uaggagcugguuuggcaua

SEQ ID NO: 1202449 - RNA, 19 nt, Homo sapiens
  misc_RNA (1)...(19): siRNA sense strand
gcugguuuggcauaucuaa

SEQ ID NO: 1202450 - RNA, 19 nt, Homo sapiens
  misc_RNA (1)...(19): siRNA sense strand
uagaagguggcaucaggaa

SEQ ID NO: 1202451 - RNA, 19 nt, Homo sapiens
  misc_RNA (1)...(19): siRNA sense strand
caaaagaaacgcgguaauc

SEQ ID NO: 1202452 - RNA, 19 nt, Homo sapiens
  misc_RNA (1)...(19): siRNA sense strand
ggaaugugcugcuggcuuu

SEQ ID NO: 1202453 - RNA, 19 nt, Homo sapiens
  misc_RNA (1)...(19): siRNA sense strand
ggcagucgcuggagauuau

SEQ ID NO: 1202454 - RNA, 19 nt, Homo sapiens
  misc_RNA (1)...(19): siRNA sense strand
gaagguggcaucaggaaug

SEQ ID NO: 1202455 - RNA, 19 nt, Homo sapiens
  misc_RNA (1)...(19): siRNA sense strand
gguuuggcauaucuaauaa

SEQ ID NO: 1202456 - RNA, 19 nt, Homo sapiens
  misc_RNA (1)...(19): siRNA sense strand
gagcugguuuggcauaucu

SEQ ID NO: 1202457 - RNA, 19 nt, Homo sapiens
  misc_RNA (1)...(19): siRNA sense strand
gauuaucucucgguaccuu

SEQ ID NO: 1202458 - RNA, 19 nt, Homo sapiens
  misc_RNA (1)...(19): siRNA sense strand
uaaucggacucaaccucua

SEQ ID NO: 1202459 - RNA, 19 nt, Homo sapiens
  misc_RNA (1)...(19): siRNA sense strand
ccauguagaggaccuagaa

SEQ ID NO: 1202460 - RNA, 19 nt, Homo sapiens
  misc_RNA (1)...(19): siRNA sense strand
ugguuuggcauaucuaaua

SEQ ID NO: 1202461 - RNA, 19 nt, Homo sapiens
  misc_RNA (1)...(19): siRNA sense strand
ggagcugguuuggcauauc

SEQ ID NO: 1202462 - RNA, 19 nt, Homo sapiens
  misc_RNA (1)...(19): siRNA sense strand
ccaaggacacaaagccaau

SEQ ID NO: 1202463 - RNA, 19 nt, Homo sapiens
  misc_RNA (1)...(19): siRNA sense strand
ggauggguuuguggaguuc

SEQ ID NO: 1202464 - RNA, 19 nt, Homo sapiens
  misc_RNA (1)...(19): siRNA sense strand
ccacgagacggccuuccaa

SEQ ID NO: 1202465 - RNA, 19 nt, Homo sapiens
  misc_RNA (1)...(19): siRNA sense strand
ggaguucuuccauguagag

SEQ ID NO: 1202466 - RNA, 19 nt, Homo sapiens
  misc_RNA (1)...(19): siRNA sense strand
uaggagcugguuuggcaua

SEQ ID NO: 1202467 - RNA, 19 nt, Homo sapiens
  misc_RNA (1)...(19): siRNA sense strand
gcugguuuggcauaucuaa

SEQ ID NO: 1202468 - RNA, 19 nt, Homo sapiens
  misc_RNA (1)...(19): siRNA sense strand
uagaagguggcaucaggaa

SEQ ID NO: 1202469 - RNA, 19 nt, Homo sapiens
  misc_RNA (1)...(19): siRNA sense strand
caaaagaaacgcgguaauc

SEQ ID NO: 1202470 - RNA, 19 nt, Homo sapiens
  misc_RNA (1)...(19): siRNA sense strand
gcacagagauguuauuuau

SEQ ID NO: 1202471 - RNA, 19 nt, Homo sapiens
  misc_RNA (1)...(19): siRNA sense strand
gaaauggucuggaauguuu

SEQ ID NO: 1202472 - RNA, 19 nt, Homo sapiens
  misc_RNA (1)...(19): siRNA sense strand
gguaaaugcugcucgauua

SEQ ID NO: 1202473 - RNA, 19 nt, Homo sapiens
  misc_RNA (1)...(19): siRNA sense strand
ccaaaugguuuauacagua

SEQ ID NO: 1202474 - RNA, 19 nt, Homo sapiens
  misc_RNA (1)...(19): siRNA sense strand
gaaugggucuuguaaauca

SEQ ID NO: 1202475 - RNA, 19 nt, Homo sapiens
  misc_RNA (1)...(19): siRNA sense strand
gaauuguucuuguagauga

SEQ ID NO: 1202476 - RNA, 19 nt, Homo sapiens
  misc_RNA (1)...(19): siRNA sense strand
gggaaugggucuuguaaau

SEQ ID NO: 1202477 - RNA, 19 nt, Homo sapiens
  misc_RNA (1)...(19): siRNA sense strand
ggaaauauccagacacaau

SEQ ID NO: 1202478 - RNA, 19 nt, Homo sapiens
  misc_RNA (1)...(19): siRNA sense strand
ugaaaugauuacccaguua

SEQ ID NO: 1202479 - RNA, 19 nt, Homo sapiens
  misc_RNA (1)...(19): siRNA sense strand
gcaauaccaucucaccuau

SEQ ID NO: 1202480 - RNA, 19 nt, Homo sapiens
  misc_RNA (1)...(19): siRNA sense strand
ggagagugcugguauugug

SEQ ID NO: 1202481 - RNA, 19 nt, Homo sapiens
  misc_RNA (1)...(19): siRNA sense strand
caaagaaucuggugcaaaa

SEQ ID NO: 1202482 - RNA, 19 nt, Homo sapiens
  misc_RNA (1)...(19): siRNA sense strand
ccaauaaaccagaauuuga

SEQ ID NO: 1202483 - RNA, 19 nt, Homo sapiens
  misc_RNA (1)...(19): siRNA sense strand
aauaccaucucaccuauaa

SEQ ID NO: 1202484 - RNA, 19 nt, Homo sapiens
  misc_RNA (1)...(19): siRNA sense strand
gaaccuucauucagccaaa

SEQ ID NO: 1202485 - RNA, 19 nt, Homo sapiens
  misc_RNA (1)...(19): siRNA sense strand
guagaugauucaauuguca

SEQ ID NO: 1202486 - RNA, 19 nt, Homo sapiens
  misc_RNA (1)...(19): siRNA sense strand
gguuucaucuguacaagaa

SEQ ID NO: 1202487 - RNA, 19 nt, Homo sapiens
  misc_RNA (1)...(19): siRNA sense strand
gagaaauuguggaaauauc

SEQ ID NO: 1202488 - RNA, 19 nt, Homo sapiens
  misc_RNA (1)...(19): siRNA sense strand
cagcuugucucacuggaaa

SEQ ID NO: 1202489 - RNA, 19 nt, Homo sapiens
  misc_RNA (1)...(19): siRNA sense strand
cagaauaucuaggagcaaa

SEQ ID NO: 1202490 - RNA, 19 nt, Homo sapiens
  misc_RNA (1)...(19): siRNA sense strand
gaaauauccagacacaaug

SEQ ID NO: 1202491 - RNA, 19 nt, Homo sapiens
  misc_RNA (1)...(19): siRNA sense strand
gaaaagaguggucauugua

SEQ ID NO: 1202492 - RNA, 19 nt, Homo sapiens
  misc_RNA (1)...(19): siRNA sense strand
uguccaaacucuugauauu

SEQ ID NO: 1202493 - RNA, 19 nt, Homo sapiens
  misc_RNA (1)...(19): siRNA sense strand
gaauuggacacaccaggua

SEQ ID NO: 1202494 - RNA, 19 nt, Homo sapiens
  misc_RNA (1)...(19): siRNA sense strand
gguuagcacuguuccagaa

SEQ ID NO: 1202495 - RNA, 19 nt, Homo sapiens
  misc_RNA (1)...(19): siRNA sense strand
ucuuguagcuucuuaucua

SEQ ID NO: 1202496 - RNA, 19 nt, Homo sapiens
  misc_RNA (1)...(19): siRNA sense strand
gcauacucccugcuuauaa

SEQ ID NO: 1202497 - RNA, 19 nt, Homo sapiens
  misc_RNA (1)...(19): siRNA sense strand
uagaaggacugguuucauc

SEQ ID NO: 1202498 - RNA, 19 nt, Homo sapiens
  misc_RNA (1)...(19): siRNA sense strand
uugaucaccuugcagaaua

SEQ ID NO: 1202499 - RNA, 19 nt, Homo sapiens
  misc_RNA (1)...(19): siRNA sense strand
gccagcagcuagcgauuga

SEQ ID NO: 1202500 - RNA, 19 nt, Homo sapiens
  misc_RNA (1)...(19): siRNA sense strand
aaucgucccuuaugcauug

SEQ ID NO: 1202501 - RNA, 19 nt, Homo sapiens
  misc_RNA (1)...(19): siRNA sense strand
uuauggaaaucgucccuua

SEQ ID NO: 1202502 - RNA, 19 nt, Homo sapiens
  misc_RNA (1)...(19): siRNA sense strand
gugaaaugauuacccaguu

SEQ ID NO: 1202503 - RNA, 19 nt, Homo sapiens
  misc_RNA (1)...(19): siRNA sense strand
acagagauguuauuuaugc

SEQ ID NO: 1202504 - RNA, 19 nt, Homo sapiens
  misc_RNA (1)...(19): siRNA sense strand
ggacugguuucaucuguac

SEQ ID NO: 1202505 - RNA, 19 nt, Homo sapiens
  misc_RNA (1)...(19): siRNA sense strand
uaccaucucaccuauaaua

SEQ ID NO: 1202506 - RNA, 19 nt, Homo sapiens
  misc_RNA (1)...(19): siRNA sense strand
cauaauggcgaauugguaa

SEQ ID NO: 1202507 - RNA, 19 nt, Homo sapiens
  misc_RNA (1)...(19): siRNA sense strand
agucuugccuggagaaauu

SEQ ID NO: 1202508 - RNA, 19 nt, Homo sapiens
  misc_RNA (1)...(19): siRNA sense strand
guaaaugcugcucgauuaa

SEQ ID NO: 1202509 - RNA, 19 nt, Homo sapiens
  misc_RNA (1)...(19): siRNA sense strand
gguggugucuucagaaucu

SEQ ID NO: 1202510 - RNA, 19 nt, Homo sapiens
  misc_RNA (1)...(19): siRNA sense strand
aaauggaaauggucuggaa

SEQ ID NO: 1202511 - RNA, 19 nt, Homo sapiens
  misc_RNA (1)...(19): siRNA sense strand
uggagaaauuguggaaaua

SEQ ID NO: 1202512 - RNA, 19 nt, Homo sapiens
  misc_RNA (1)...(19): siRNA sense strand
ggagaaauuguggaaauau

SEQ ID NO: 1202513 - RNA, 19 nt, Homo sapiens
  misc_RNA (1)...(19): siRNA sense strand
cauacucccugcuuauaau

SEQ ID NO: 1202514 - RNA, 19 nt, Homo sapiens
  misc_RNA (1)...(19): siRNA sense strand
ggaaauggucuggaauguu

SEQ ID NO: 1202515 - RNA, 19 nt, Homo sapiens
  misc_RNA (1)...(19): siRNA sense strand
ggcaauaccaucucaccua

SEQ ID NO: 1202516 - RNA, 19 nt, Homo sapiens
  misc_RNA (1)...(19): siRNA sense strand
gauggguggugucuucaga

SEQ ID NO: 1202517 - RNA, 19 nt, Homo sapiens
  misc_RNA (1)...(19): siRNA sense strand
gaaaucgucccuuaugcau

SEQ ID NO: 1202518 - RNA, 19 nt, Homo sapiens
  misc_RNA (1)...(19): siRNA sense strand
acaagaagggauaaaguuu

SEQ ID NO: 1202519 - RNA, 19 nt, Homo sapiens
  misc_RNA (1)...(19): siRNA sense strand
guccaaacucuugauauua

SEQ ID NO: 1202520 - RNA, 19 nt, Homo sapiens
  misc_RNA (1)...(19): siRNA sense strand
gauauuaccgugaagucuu

SEQ ID NO: 1202521 - RNA, 19 nt, Homo sapiens
  misc_RNA (1)...(19): siRNA sense strand
guauuggucugucuacaag

SEQ ID NO: 1202522 - RNA, 19 nt, Homo sapiens
  misc_RNA (1)...(19): siRNA sense strand
ucuuguaaaucacgucuuu

SEQ ID NO: 1202523 - RNA, 19 nt, Homo sapiens
  misc_RNA (1)...(19): siRNA sense strand
ggaaaucgucccuuaugca

SEQ ID NO: 1202524 - RNA, 19 nt, Homo sapiens
  misc_RNA (1)...(19): siRNA sense strand
guagcuucaccaccaauua

SEQ ID NO: 1202525 - RNA, 19 nt, Homo sapiens
  misc_RNA (1)...(19): siRNA sense strand
uccagugucugauauaaau

SEQ ID NO: 1202526 - RNA, 19 nt, Homo sapiens
  misc_RNA (1)...(19): siRNA sense strand
guacaagaagggauaaagu

SEQ ID NO: 1202527 - RNA, 19 nt, Homo sapiens
  misc_RNA (1)...(19): siRNA sense strand
guagggagaaccuucauuc

SEQ ID NO: 1202528 - RNA, 19 nt, Homo sapiens
  misc_RNA (1)...(19): siRNA sense strand
uguagcuucuuaucuauug

SEQ ID NO: 1202529 - RNA, 19 nt, Homo sapiens
  misc_RNA (1)...(19): siRNA sense strand
agacaacuuuaaaggcaaa

SEQ ID NO: 1202530 - RNA, 19 nt, Homo sapiens
  misc_RNA (1)...(19): siRNA sense strand
agaggaauguggcguguuc

SEQ ID NO: 1202531 - RNA, 19 nt, Homo sapiens
  misc_RNA (1)...(19): siRNA sense strand
gaaaugauuacccaguuac

SEQ ID NO: 1202532 - RNA, 19 nt, Homo sapiens
  misc_RNA (1)...(19): siRNA sense strand
ugucagcccuucguuguug

SEQ ID NO: 1202533 - RNA, 19 nt, Homo sapiens
  misc_RNA (1)...(19): siRNA sense strand
gccaauaaaccagaauuug

SEQ ID NO: 1202534 - RNA, 19 nt, Homo sapiens
  misc_RNA (1)...(19): siRNA sense strand
uagcuucaccaccaauuaa

SEQ ID NO: 1202535 - RNA, 19 nt, Homo sapiens
  misc_RNA (1)...(19): siRNA sense strand
acaguaagauaccguugug

SEQ ID NO: 1202536 - RNA, 19 nt, Homo sapiens
  misc_RNA (1)...(19): siRNA sense strand
cagacaguauguucgaaga

SEQ ID NO: 1202537 - RNA, 19 nt, Homo sapiens
  misc_RNA (1)...(19): siRNA sense strand
ucaggagagugcugguauu

SEQ ID NO: 1202538 - RNA, 19 nt, Homo sapiens
  misc_RNA (1)...(19): siRNA sense strand
ggaaugggucuuguaaauc

SEQ ID NO: 1202539 - RNA, 19 nt, Homo sapiens
  misc_RNA (1)...(19): siRNA sense strand
cuacaaguucugauaguga

SEQ ID NO: 1202540 - RNA, 19 nt, Homo sapiens
  misc_RNA (1)...(19): siRNA sense strand
aaagaguggucauuguaca

SEQ ID NO: 1202541 - RNA, 19 nt, Homo sapiens
  misc_RNA (1)...(19): siRNA sense strand
ccaauuaaauauccaugcu

SEQ ID NO: 1202542 - RNA, 19 nt, Homo sapiens
  misc_RNA (1)...(19): siRNA sense strand
cuucaccaccaauuaaaua

SEQ ID NO: 1202543 - RNA, 19 nt, Homo sapiens
  misc_RNA (1)...(19): siRNA sense strand
cagccaaacaugagguuaa

SEQ ID NO: 1202544 - RNA, 19 nt, Homo sapiens
  misc_RNA (1)...(19): siRNA sense strand
cuggagaaauuguggaaau

SEQ ID NO: 1202545 - RNA, 19 nt, Homo sapiens
  misc_RNA (1)...(19): siRNA sense strand
ugcaagauauuaccgugaa

SEQ ID NO: 1202546 - RNA, 19 nt, Homo sapiens
  misc_RNA (1)...(19): siRNA sense strand
aaggauggguggugucuuc

SEQ ID NO: 1202547 - RNA, 19 nt, Homo sapiens
  misc_RNA (1)...(19): siRNA sense strand
gugcugguauugugacuag

SEQ ID NO: 1202548 - RNA, 19 nt, Homo sapiens
  misc_RNA (1)...(19): siRNA sense strand
uacaaguucugauagugaa

SEQ ID NO: 1202549 - RNA, 19 nt, Homo sapiens
  misc_RNA (1)...(19): siRNA sense strand
uacgagauccuuauggaaa

SEQ ID NO: 1202550 - RNA, 19 nt, Homo sapiens
  misc_RNA (1)...(19): siRNA sense strand
aaucacgucuuuacugaag

SEQ ID NO: 1202551 - RNA, 19 nt, Homo sapiens
  misc_RNA (1)...(19): siRNA sense strand
gguauuggucugucuacaa

SEQ ID NO: 1202552 - RNA, 19 nt, Homo sapiens
  misc_RNA (1)...(19): siRNA sense strand
ggauguaccgcaugugauc

SEQ ID NO: 1202553 - RNA, 19 nt, Homo sapiens
  misc_RNA (1)...(19): siRNA sense strand
gcaagaccagacaguaugu

SEQ ID NO: 1202554 - RNA, 19 nt, Homo sapiens
  misc_RNA (1)...(19): siRNA sense strand
ggaagcacccacagcauac

SEQ ID NO: 1202555 - RNA, 19 nt, Homo sapiens
  misc_RNA (1)...(19): siRNA sense strand
guacgagauccuuauggaa

SEQ ID NO: 1202556 - RNA, 19 nt, Homo sapiens
  misc_RNA (1)...(19): siRNA sense strand
ggucuggaauguuuugaaa

SEQ ID NO: 1202557 - RNA, 19 nt, Homo sapiens
  misc_RNA (1)...(19): siRNA sense strand
cacaauguccaaacucuug

SEQ ID NO: 1202558 - RNA, 19 nt, Homo sapiens
  misc_RNA (1)...(19): siRNA sense strand
ucaaaucacacaagggaau

SEQ ID NO: 1202559 - RNA, 19 nt, Homo sapiens
  misc_RNA (1)...(19): siRNA sense strand
uaucaaggucugaaggaaa

SEQ ID NO: 1202560 - RNA, 19 nt, Homo sapiens
  misc_RNA (1)...(19): siRNA sense strand
uggaaaauauccuguagaa

SEQ ID NO: 1202561 - RNA, 19 nt, Homo sapiens
  misc_RNA (1)...(19): siRNA sense strand
uacaagaagggauaaaguu

SEQ ID NO: 1202562 - RNA, 19 nt, Homo sapiens
  misc_RNA (1)...(19): siRNA sense strand
caaaagagguacacauucg

SEQ ID NO: 1202563 - RNA, 19 nt, Homo sapiens
  misc_RNA (1)...(19): siRNA sense strand
uaaaacugcucaaagaauc

SEQ ID NO: 1202564 - RNA, 19 nt, Homo sapiens
  misc_RNA (1)...(19): siRNA sense strand
ccaucucaccuauaauaaa

SEQ ID NO: 1202565 - RNA, 19 nt, Homo sapiens
  misc_RNA (1)...(19): siRNA sense strand
cagaggcaauaccaucuca

SEQ ID NO: 1202566 - RNA, 19 nt, Homo sapiens
  misc_RNA (1)...(19): siRNA sense strand
aaacaugagguuaagacaa

SEQ ID NO: 1202567 - RNA, 19 nt, Homo sapiens
  misc_RNA (1)...(19): siRNA sense strand
gauugaagcaccuguggau

SEQ ID NO: 1202568 - RNA, 19 nt, Homo sapiens
  misc_RNA (1)...(19): siRNA sense strand
gcagcuagcgauugaagca

SEQ ID NO: 1202569 - RNA, 19 nt, Homo sapiens
  misc_RNA (1)...(19): siRNA sense strand
aaagcacgauauuaugauc

SEQ ID NO: 1202570 - RNA, 19 nt, Homo sapiens
  misc_RNA (1)...(19): siRNA sense strand
acgcggaccucgagcugaa

SEQ ID NO: 1202571 - RNA, 19 nt, Homo sapiens
  misc_RNA (1)...(19): siRNA sense strand
gggaagaccugccugauga

SEQ ID NO: 1202572 - RNA, 19 nt, Homo sapiens
  misc_RNA (1)...(19): siRNA sense strand
ggaaaucacugucuacaac

SEQ ID NO: 1202573 - RNA, 19 nt, Homo sapiens
  misc_RNA (1)...(19): siRNA sense strand
ggaagaaguuugccaagca

SEQ ID NO: 1202574 - RNA, 19 nt, Homo sapiens
  misc_RNA (1)...(19): siRNA sense strand
gauacugucugucuucuug

SEQ ID NO: 1202575 - RNA, 19 nt, Homo sapiens
  misc_RNA (1)...(19): siRNA sense strand
gggcgaacaugcucuacua

SEQ ID NO: 1202576 - RNA, 19 nt, Homo sapiens
  misc_RNA (1)...(19): siRNA sense strand
gugcacagcuggccaagga

SEQ ID NO: 1202577 - RNA, 19 nt, Homo sapiens
  misc_RNA (1)...(19): siRNA sense strand
cagcagaacuccaaguauc

SEQ ID NO: 1202578 - RNA, 19 nt, Homo sapiens
  misc_RNA (1)...(19): siRNA sense strand
gcaaaguggccgaggauga

SEQ ID NO: 1202579 - RNA, 19 nt, Homo sapiens
  misc_RNA (1)...(19): siRNA sense strand
gaggugaaguggacugaau

SEQ ID NO: 1202580 - RNA, 19 nt, Homo sapiens
  misc_RNA (1)...(19): siRNA sense strand
gugcaucucugguaacugu

SEQ ID NO: 1202581 - RNA, 19 nt, Homo sapiens
  misc_RNA (1)...(19): siRNA sense strand
aaaccacucucaaugcauu

SEQ ID NO: 1202582 - RNA, 19 nt, Homo sapiens
  misc_RNA (1)...(19): siRNA sense strand
acgaacagauuucaacaaa

SEQ ID NO: 1202583 - RNA, 19 nt, Homo sapiens
  misc_RNA (1)...(19): siRNA sense strand
guucugaaguucuuguuug

SEQ ID NO: 1202584 - RNA, 19 nt, Homo sapiens
  misc_RNA (1)...(19): siRNA sense strand
aggcggagauccugaagua

SEQ ID NO: 1202585 - RNA, 19 nt, Homo sapiens
  misc_RNA (1)...(19): siRNA sense strand
gcgaacaugcucuacuaua

SEQ ID NO: 1202586 - RNA, 19 nt, Homo sapiens
  misc_RNA (1)...(19): siRNA sense strand
gagaaaauguuaccagaau

SEQ ID NO: 1202587 - RNA, 19 nt, Homo sapiens
  misc_RNA (1)...(19): siRNA sense strand
acacagaggaggccuauga

SEQ ID NO: 1202588 - RNA, 19 nt, Homo sapiens
  misc_RNA (1)...(19): siRNA sense strand
cgaacaugcucuacuauac

SEQ ID NO: 1202589 - RNA, 19 nt, Homo sapiens
  misc_RNA (1)...(19): siRNA sense strand
cauaugaaguggaagaagu

SEQ ID NO: 1202590 - RNA, 19 nt, Homo sapiens
  misc_RNA (1)...(19): siRNA sense strand
ggagauagaaggguuugaa

SEQ ID NO: 1202591 - RNA, 19 nt, Homo sapiens
  misc_RNA (1)...(19): siRNA sense strand
uugaagaagucgaggaauu

SEQ ID NO: 1202592 - RNA, 19 nt, Homo sapiens
  misc_RNA (1)...(19): siRNA sense strand
ggagaccacucgcaacaac

SEQ ID NO: 1202593 - RNA, 19 nt, Homo sapiens
  misc_RNA (1)...(19): siRNA sense strand
acgcacgucuccuuccuua

SEQ ID NO: 1202594 - RNA, 19 nt, Homo sapiens
  misc_RNA (1)...(19): siRNA sense strand
gaggaugauuuccgacugu

SEQ ID NO: 1202595 - RNA, 19 nt, Homo sapiens
  misc_RNA (1)...(19): siRNA sense strand
ggcagugcaucucugguaa

SEQ ID NO: 1202596 - RNA, 19 nt, Homo sapiens
  misc_RNA (1)...(19): siRNA sense strand
ccaaguaucccauucucuu

SEQ ID NO: 1202597 - RNA, 19 nt, Homo sapiens
  misc_RNA (1)...(19): siRNA sense strand
ggaccaucuuggaguuuga

SEQ ID NO: 1202598 - RNA, 19 nt, Homo sapiens
  misc_RNA (1)...(19): siRNA sense strand
ggacaacucagugcuggaa

SEQ ID NO: 1202599 - RNA, 19 nt, Homo sapiens
  misc_RNA (1)...(19): siRNA sense strand
gcucaucaccuaugucauc

SEQ ID NO: 1202600 - RNA, 19 nt, Homo sapiens
  misc_RNA (1)...(19): siRNA sense strand
cugaaguucuuguuuguau

SEQ ID NO: 1202601 - RNA, 19 nt, Homo sapiens
  misc_RNA (1)...(19): siRNA sense strand
ccaagcacauguucuuucu

SEQ ID NO: 1202602 - RNA, 19 nt, Homo sapiens
  misc_RNA (1)...(19): siRNA sense strand
gaacuccaaguaucccauu

SEQ ID NO: 1202603 - RNA, 19 nt, Homo sapiens
  misc_RNA (1)...(19): siRNA sense strand
ccaggaccaucuuggaguu

SEQ ID NO: 1202604 - RNA, 19 nt, Homo sapiens
  misc_RNA (1)...(19): siRNA sense strand
caaguaucccauucucuuu

SEQ ID NO: 1202605 - RNA, 19 nt, Homo sapiens
  misc_RNA (1)...(19): siRNA sense strand
gucgugagaucaaggagaa

SEQ ID NO: 1202606 - RNA, 19 nt, Homo sapiens
  misc_RNA (1)...(19): siRNA sense strand
aagcacauguucuuucugu

SEQ ID NO: 1202607 - RNA, 19 nt, Homo sapiens
  misc_RNA (1)...(19): siRNA sense strand
ugaugaaggccuuguuaaa

SEQ ID NO: 1202608 - RNA, 19 nt, Homo sapiens
  misc_RNA (1)...(19): siRNA sense strand
ugaaguggacugaauggaa

SEQ ID NO: 1202609 - RNA, 19 nt, Homo sapiens
  misc_RNA (1)...(19): siRNA sense strand
ugcaugauguucugaaguu

SEQ ID NO: 1202610 - RNA, 19 nt, Homo sapiens
  misc_RNA (1)...(19): siRNA sense strand
gcagaaugacuuugugaag

SEQ ID NO: 1202611 - RNA, 19 nt, Homo sapiens
  misc_RNA (1)...(19): siRNA sense strand
gcacgucuccuuccuuaac

SEQ ID NO: 1202612 - RNA, 19 nt, Homo sapiens
  misc_RNA (1)...(19): siRNA sense strand
uggaggaguugguagaguu

SEQ ID NO: 1202613 - RNA, 19 nt, Homo sapiens
  misc_RNA (1)...(19): siRNA sense strand
caucuuggaguuugagaaa

SEQ ID NO: 1202614 - RNA, 19 nt, Homo sapiens
  misc_RNA (1)...(19): siRNA sense strand
acacgcugcugcauaugaa

SEQ ID NO: 1202615 - RNA, 19 nt, Homo sapiens
  misc_RNA (1)...(19): siRNA sense strand
gaaaucacugucuacaaca

SEQ ID NO: 1202616 - RNA, 19 nt, Homo sapiens
  misc_RNA (1)...(19): siRNA sense strand
gaugaaggccuuguuaaac

SEQ ID NO: 1202617 - RNA, 19 nt, Homo sapiens
  misc_RNA (1)...(19): siRNA sense strand
cgacuguguuugcggauca

SEQ ID NO: 1202618 - RNA, 19 nt, Homo sapiens
  misc_RNA (1)...(19): siRNA sense strand
ugggagagcugugcaaagu

SEQ ID NO: 1202619 - RNA, 19 nt, Homo sapiens
  misc_RNA (1)...(19): siRNA sense strand
gcaaggcggagauccugaa

SEQ ID NO: 1202620 - RNA, 19 nt, Homo sapiens
  misc_RNA (1)...(19): siRNA sense strand
ccaaccagcccgagauugu

SEQ ID NO: 1202621 - RNA, 19 nt, Homo sapiens
  misc_RNA (1)...(19): siRNA sense strand
gaugauuuccgacuguguu

SEQ ID NO: 1202622 - RNA, 19 nt, Homo sapiens
  misc_RNA (1)...(19): siRNA sense strand
caaaguggccgaggaugau

SEQ ID NO: 1202623 - RNA, 19 nt, Homo sapiens
  misc_RNA (1)...(19): siRNA sense strand
gcggagauccugaaguaca

SEQ ID NO: 1202624 - RNA, 19 nt, Homo sapiens
  misc_RNA (1)...(19): siRNA sense strand
ucaagacgcagaaugacuu

SEQ ID NO: 1202625 - RNA, 19 nt, Homo sapiens
  misc_RNA (1)...(19): siRNA sense strand
gaaguuugccaagcacaug

SEQ ID NO: 1202626 - RNA, 19 nt, Homo sapiens
  misc_RNA (1)...(19): siRNA sense strand
caaugcauuugaagaaguc

SEQ ID NO: 1202627 - RNA, 19 nt, Homo sapiens
  misc_RNA (1)...(19): siRNA sense strand
cgagaagugucccaaagac

SEQ ID NO: 1202628 - RNA, 19 nt, Homo sapiens
  misc_RNA (1)...(19): siRNA sense strand
gaacaugcucuacuauacg

SEQ ID NO: 1202629 - RNA, 19 nt, Homo sapiens
  misc_RNA (1)...(19): siRNA sense strand
ccucggaucugcaguccau

SEQ ID NO: 1202630 - RNA, 19 nt, Homo sapiens
  misc_RNA (1)...(19): siRNA sense strand
ccugaugaaggccuuguua

SEQ ID NO: 1202631 - RNA, 19 nt, Homo sapiens
  misc_RNA (1)...(19): siRNA sense strand
ugaagaagucgaggaauuc

SEQ ID NO: 1202632 - RNA, 19 nt, Homo sapiens
  misc_RNA (1)...(19): siRNA sense strand
gaucgagaagugucccaaa

SEQ ID NO: 1202633 - RNA, 19 nt, Homo sapiens
  misc_RNA (1)...(19): siRNA sense strand
gcaccaaccagcccgagau

SEQ ID NO: 1202634 - RNA, 19 nt, Homo sapiens
  misc_RNA (1)...(19): siRNA sense strand
gaccucuccuccugucuuc

SEQ ID NO: 1202635 - RNA, 19 nt, Homo sapiens
  misc_RNA (1)...(19): siRNA sense strand
caagacgcagaaugacuuu

SEQ ID NO: 1202636 - RNA, 19 nt, Homo sapiens
  misc_RNA (1)...(19): siRNA sense strand
ggaagaccugccugaugaa

SEQ ID NO: 1202637 - RNA, 19 nt, Homo sapiens
  misc_RNA (1)...(19): siRNA sense strand
ccaugugcaucucugugaa

SEQ ID NO: 1202638 - RNA, 19 nt, Homo sapiens
  misc_RNA (1)...(19): siRNA sense strand
acaacucagugcuggaaau

SEQ ID NO: 1202639 - RNA, 19 nt, Homo sapiens
  misc_RNA (1)...(19): siRNA sense strand
ggaggaguugguagaguug

SEQ ID NO: 1202640 - RNA, 19 nt, Homo sapiens
  misc_RNA (1)...(19): siRNA sense strand
caaaaccacucucaaugca

SEQ ID NO: 1202641 - RNA, 19 nt, Homo sapiens
  misc_RNA (1)...(19): siRNA sense strand
guaagacgaacagauuuca

SEQ ID NO: 1202642 - RNA, 19 nt, Homo sapiens
  misc_RNA (1)...(19): siRNA sense strand
cggcagugcaucucuggua

SEQ ID NO: 1202643 - RNA, 19 nt, Homo sapiens
  misc_RNA (1)...(19): siRNA sense strand
cgacaaccggcaugagaug

SEQ ID NO: 1202644 - RNA, 19 nt, Homo sapiens
  misc_RNA (1)...(19): siRNA sense strand
caucaacgccgaguacaca

SEQ ID NO: 1202645 - RNA, 19 nt, Homo sapiens
  misc_RNA (1)...(19): siRNA sense strand
gcgagacuguggagaacgu

SEQ ID NO: 1202646 - RNA, 19 nt, Homo sapiens
  misc_RNA (1)...(19): siRNA sense strand
gcaugauguucugaaguuc

SEQ ID NO: 1202647 - RNA, 19 nt, Homo sapiens
  misc_RNA (1)...(19): siRNA sense strand
gugcucaucugggccaugu

SEQ ID NO: 1202648 - RNA, 19 nt, Homo sapiens
  misc_RNA (1)...(19): siRNA sense strand
guacacagaggaggccuau

SEQ ID NO: 1202649 - RNA, 19 nt, Homo sapiens
  misc_RNA (1)...(19): siRNA sense strand
gagccaggaccaucuugga

SEQ ID NO: 1202650 - RNA, 19 nt, Homo sapiens
  misc_RNA (1)...(19): siRNA sense strand
gacgaacagauuucaacaa

SEQ ID NO: 1202651 - RNA, 19 nt, Homo sapiens
  misc_RNA (1)...(19): siRNA sense strand
gaugggagagcugugcaaa

SEQ ID NO: 1202652 - RNA, 19 nt, Homo sapiens
  misc_RNA (1)...(19): siRNA sense strand
gaagagcagaggaggaaaa

SEQ ID NO: 1202653 - RNA, 19 nt, Homo sapiens
  misc_RNA (1)...(19): siRNA sense strand
gccaugugcaucucuguga

SEQ ID NO: 1202654 - RNA, 19 nt, Homo sapiens
  misc_RNA (1)...(19): siRNA sense strand
gccaagcacauguucuuuc

SEQ ID NO: 1202655 - RNA, 19 nt, Homo sapiens
  misc_RNA (1)...(19): siRNA sense strand
uacugucugucuucuugua

SEQ ID NO: 1202656 - RNA, 19 nt, Homo sapiens
  misc_RNA (1)...(19): siRNA sense strand
gaugccugguuccacuuug

SEQ ID NO: 1202657 - RNA, 19 nt, Homo sapiens
  misc_RNA (1)...(19): siRNA sense strand
ggaggauguuugugcucau

SEQ ID NO: 1202658 - RNA, 19 nt, Homo sapiens
  misc_RNA (1)...(19): siRNA sense strand
gacgcagaaugacuuugug

SEQ ID NO: 1202659 - RNA, 19 nt, Homo sapiens
  misc_RNA (1)...(19): siRNA sense strand
gcggaucaaugaggugaag

SEQ ID NO: 1202660 - RNA, 19 nt, Homo sapiens
  misc_RNA (1)...(19): siRNA sense strand
ggaguuugagaaaauguua

SEQ ID NO: 1202661 - RNA, 19 nt, Homo sapiens
  misc_RNA (1)...(19): siRNA sense strand
uaugucauccucaccuuug

SEQ ID NO: 1202662 - RNA, 19 nt, Homo sapiens
  misc_RNA (1)...(19): siRNA sense strand
ggaugccugguuccacuuu

SEQ ID NO: 1202663 - RNA, 19 nt, Homo sapiens
  misc_RNA (1)...(19): siRNA sense strand
cggagauccugaaguacau

SEQ ID NO: 1202664 - RNA, 19 nt, Homo sapiens
  misc_RNA (1)...(19): siRNA sense strand
ucugguaacugugaugaca

SEQ ID NO: 1202665 - RNA, 19 nt, Homo sapiens
  misc_RNA (1)...(19): siRNA sense strand
ggaucaaugaggugaagug

SEQ ID NO: 1202666 - RNA, 19 nt, Homo sapiens
  misc_RNA (1)...(19): siRNA sense strand
ugacccucgucucguacua

SEQ ID NO: 1202667 - RNA, 19 nt, Homo sapiens
  misc_RNA (1)...(19): siRNA sense strand
ugguaacugugaugacaug

SEQ ID NO: 1202668 - RNA, 19 nt, Homo sapiens
  misc_RNA (1)...(19): siRNA sense strand
gggcgagacuguggagaac

SEQ ID NO: 1202669 - RNA, 19 nt, Homo sapiens
  misc_RNA (1)...(19): siRNA sense strand
acgcagugcuggaacucuu

SEQ ID NO: 1202670 - RNA, 19 nt, Homo sapiens
  misc_RNA (1)...(19): siRNA sense strand
gcaucucugguaacuguga

SEQ ID NO: 1202671 - RNA, 19 nt, Homo sapiens
  misc_RNA (1)...(19): siRNA sense strand
acaagaagcuggagaaaua

SEQ ID NO: 1202672 - RNA, 19 nt, Homo sapiens
  misc_RNA (1)...(19): siRNA sense strand
ggaagaaacugaaaguaga

SEQ ID NO: 1202673 - RNA, 19 nt, Homo sapiens
  misc_RNA (1)...(19): siRNA sense strand
gaagaagugucuaaggaaa

SEQ ID NO: 1202674 - RNA, 19 nt, Homo sapiens
  misc_RNA (1)...(19): siRNA sense strand
gcaagaacaucccugacua

SEQ ID NO: 1202675 - RNA, 19 nt, Homo sapiens
  misc_RNA (1)...(19): siRNA sense strand
ggaccuaagucaauauuug

SEQ ID NO: 1202676 - RNA, 19 nt, Homo sapiens
  misc_RNA (1)...(19): siRNA sense strand
ccaaauugcuucuggguuu

SEQ ID NO: 1202677 - RNA, 19 nt, Homo sapiens
  misc_RNA (1)...(19): siRNA sense strand
gagugaagauggucagaua

SEQ ID NO: 1202678 - RNA, 19 nt, Homo sapiens
  misc_RNA (1)...(19): siRNA sense strand
caagacagcucaccagaug

SEQ ID NO: 1202679 - RNA, 19 nt, Homo sapiens
  misc_RNA (1)...(19): siRNA sense strand
gagaggaccuaagucaaua

SEQ ID NO: 1202680 - RNA, 19 nt, Homo sapiens
  misc_RNA (1)...(19): siRNA sense strand
ggaugucugugcccacuua

SEQ ID NO: 1202681 - RNA, 19 nt, Homo sapiens
  misc_RNA (1)...(19): siRNA sense strand
gaggaaagguugaaacaag

SEQ ID NO: 1202682 - RNA, 19 nt, Homo sapiens
  misc_RNA (1)...(19): siRNA sense strand
ggaagucgguguuuauuac

SEQ ID NO: 1202683 - RNA, 19 nt, Homo sapiens
  misc_RNA (1)...(19): siRNA sense strand
gaaccgaucuggacaaagc

SEQ ID NO: 1202684 - RNA, 19 nt, Homo sapiens
  misc_RNA (1)...(19): siRNA sense strand
gaagagaggaccuaaguca

SEQ ID NO: 1202685 - RNA, 19 nt, Homo sapiens
  misc_RNA (1)...(19): siRNA sense strand
gaaaccaggugacggugaa

SEQ ID NO: 1202686 - RNA, 19 nt, Homo sapiens
  misc_RNA (1)...(19): siRNA sense strand
gaaacuggcuuuguugagu

SEQ ID NO: 1202687 - RNA, 19 nt, Homo sapiens
  misc_RNA (1)...(19): siRNA sense strand
gcuagcagccuccugaaua

SEQ ID NO: 1202688 - RNA, 19 nt, Homo sapiens
  misc_RNA (1)...(19): siRNA sense strand
cgagaucccugauaccauu

SEQ ID NO: 1202689 - RNA, 19 nt, Homo sapiens
  misc_RNA (1)...(19): siRNA sense strand
gaacccaacuaauccuuuc

SEQ ID NO: 1202690 - RNA, 19 nt, Homo sapiens
  misc_RNA (1)...(19): siRNA sense strand
gcacauugcagcugaagaa

SEQ ID NO: 1202691 - RNA, 19 nt, Homo sapiens
  misc_RNA (1)...(19): siRNA sense strand
uaagagaaguacaacaguu

SEQ ID NO: 1202692 - RNA, 19 nt, Homo sapiens
  misc_RNA (1)...(19): siRNA sense strand
gccagacucucauucagua

SEQ ID NO: 1202693 - RNA, 19 nt, Homo sapiens
  misc_RNA (1)...(19): siRNA sense strand
gaagagaacaagagguuug

SEQ ID NO: 1202694 - RNA, 19 nt, Homo sapiens
  misc_RNA (1)...(19): siRNA sense strand
ggaaacacaggauuuaguu

SEQ ID NO: 1202695 - RNA, 19 nt, Homo sapiens
  misc_RNA (1)...(19): siRNA sense strand
gcagugcaguggcugguuu

SEQ ID NO: 1202696 - RNA, 19 nt, Homo sapiens
  misc_RNA (1)...(19): siRNA sense strand
guacauuucuuugaucaug

SEQ ID NO: 1202697 - RNA, 19 nt, Homo sapiens
  misc_RNA (1)...(19): siRNA sense strand
gaacaagagguuugaagau

SEQ ID NO: 1202698 - RNA, 19 nt, Homo sapiens
  misc_RNA (1)...(19): siRNA sense strand
ggucagauauguguguauu

SEQ ID NO: 1202699 - RNA, 19 nt, Homo sapiens
  misc_RNA (1)...(19): siRNA sense strand
gaucuuaucgccuugugua

SEQ ID NO: 1202700 - RNA, 19 nt, Homo sapiens
  misc_RNA (1)...(19): siRNA sense strand
agagagagcugguguuaag

SEQ ID NO: 1202701 - RNA, 19 nt, Homo sapiens
  misc_RNA (1)...(19): siRNA sense strand
gagaaccgaucuggacaaa

SEQ ID NO: 1202702 - RNA, 19 nt, Homo sapiens
  misc_RNA (1)...(19): siRNA sense strand
gaaagaaggggaaaaguuu

SEQ ID NO: 1202703 - RNA, 19 nt, Homo sapiens
  misc_RNA (1)...(19): siRNA sense strand
gcaccugccuggauaugug

SEQ ID NO: 1202704 - RNA, 19 nt, Homo sapiens
  misc_RNA (1)...(19): siRNA sense strand
gagggacguuuggcaauaa

SEQ ID NO: 1202705 - RNA, 19 nt, Homo sapiens
  misc_RNA (1)...(19): siRNA sense strand
guagagagaagaaagaaga

SEQ ID NO: 1202706 - RNA, 19 nt, Homo sapiens
  misc_RNA (1)...(19): siRNA sense strand
cuagcagccuccugaauaa

SEQ ID NO: 1202707 - RNA, 19 nt, Homo sapiens
  misc_RNA (1)...(19): siRNA sense strand
gagcacacuuccaccuuug

SEQ ID NO: 1202708 - RNA, 19 nt, Homo sapiens
  misc_RNA (1)...(19): siRNA sense strand
caacaagggagacauccua

SEQ ID NO: 1202709 - RNA, 19 nt, Homo sapiens
  misc_RNA (1)...(19): siRNA sense strand
gaaaguagagagaagaaag

SEQ ID NO: 1202710 - RNA, 19 nt, Homo sapiens
  misc_RNA (1)...(19): siRNA sense strand
gaauaaagaggaagaaacu

SEQ ID NO: 1202711 - RNA, 19 nt, Homo sapiens
  misc_RNA (1)...(19): siRNA sense strand
gagaagagaggaccuaagu

SEQ ID NO: 1202712 - RNA, 19 nt, Homo sapiens
  misc_RNA (1)...(19): siRNA sense strand
gggaagagcucgggauuuu

SEQ ID NO: 1202713 - RNA, 19 nt, Homo sapiens
  misc_RNA (1)...(19): siRNA sense strand
aagaucagcuucagcaaug

SEQ ID NO: 1202714 - RNA, 19 nt, Homo sapiens
  misc_RNA (1)...(19): siRNA sense strand
gagagcugguguuaaguga

SEQ ID NO: 1202715 - RNA, 19 nt, Homo sapiens
  misc_RNA (1)...(19): siRNA sense strand
gcagagggacugugaggaa

SEQ ID NO: 1202716 - RNA, 19 nt, Homo sapiens
  misc_RNA (1)...(19): siRNA sense strand
ggaaaaguuugcauaaaga

SEQ ID NO: 1202717 - RNA, 19 nt, Homo sapiens
  misc_RNA (1)...(19): siRNA sense strand
aauaaaagcucuccaguga

SEQ ID NO: 1202718 - RNA, 19 nt, Homo sapiens
  misc_RNA (1)...(19): siRNA sense strand
aaacaucuguaacuacuag

SEQ ID NO: 1202719 - RNA, 19 nt, Homo sapiens
  misc_RNA (1)...(19): siRNA sense strand
gaaccgcacgcguggcaua

SEQ ID NO: 1202720 - RNA, 19 nt, Homo sapiens
  misc_RNA (1)...(19): siRNA sense strand
gguaugacuucguguggaa

SEQ ID NO: 1202721 - RNA, 19 nt, Homo sapiens
  misc_RNA (1)...(19): siRNA sense strand
gaaaacagaauucagcuuu

SEQ ID NO: 1202722 - RNA, 19 nt, Homo sapiens
  misc_RNA (1)...(19): siRNA sense strand
gauuucagauuacacuguu

SEQ ID NO: 1202723 - RNA, 19 nt, Homo sapiens
  misc_RNA (1)...(19): siRNA sense strand
ggacuugguuucagcuaag

SEQ ID NO: 1202724 - RNA, 19 nt, Homo sapiens
  misc_RNA (1)...(19): siRNA sense strand
gcaaauugguuaaaaguca

SEQ ID NO: 1202725 - RNA, 19 nt, Homo sapiens
  misc_RNA (1)...(19): siRNA sense strand
gaagaaugcaguagagaca

SEQ ID NO: 1202726 - RNA, 19 nt, Homo sapiens
  misc_RNA (1)...(19): siRNA sense strand
ccugaacgcuugucuuuua

SEQ ID NO: 1202727 - RNA, 19 nt, Homo sapiens
  misc_RNA (1)...(19): siRNA sense strand
caagggagacauccuaaga

SEQ ID NO: 1202728 - RNA, 19 nt, Homo sapiens
  misc_RNA (1)...(19): siRNA sense strand
caggagcauuuacggauuu

SEQ ID NO: 1202729 - RNA, 19 nt, Homo sapiens
  misc_RNA (1)...(19): siRNA sense strand
ggagacauccuaagagaag

SEQ ID NO: 1202730 - RNA, 19 nt, Homo sapiens
  misc_RNA (1)...(19): siRNA sense strand
cagcuaccacuucaaauuu

SEQ ID NO: 1202731 - RNA, 19 nt, Homo sapiens
  misc_RNA (1)...(19): siRNA sense strand
acagcgaucuaccaucuuu

SEQ ID NO: 1202732 - RNA, 19 nt, Homo sapiens
  misc_RNA (1)...(19): siRNA sense strand
gaggugaaauuugcuguuc

SEQ ID NO: 1202733 - RNA, 19 nt, Homo sapiens
  misc_RNA (1)...(19): siRNA sense strand
gaucaauaaugagaacaug

SEQ ID NO: 1202734 - RNA, 19 nt, Homo sapiens
  misc_RNA (1)...(19): siRNA sense strand
gggcuugucucccucugaa

SEQ ID NO: 1202735 - RNA, 19 nt, Homo sapiens
  misc_RNA (1)...(19): siRNA sense strand
acccaaaccucaaguguug

SEQ ID NO: 1202736 - RNA, 19 nt, Homo sapiens
  misc_RNA (1)...(19): siRNA sense strand
gaaaacaucuguaacuacu

SEQ ID NO: 1202737 - RNA, 19 nt, Homo sapiens
  misc_RNA (1)...(19): siRNA sense strand
caucugaggugaaauuugc

SEQ ID NO: 1202738 - RNA, 19 nt, Homo sapiens
  misc_RNA (1)...(19): siRNA sense strand
ggauauguguccugagaag

SEQ ID NO: 1202739 - RNA, 19 nt, Homo sapiens
  misc_RNA (1)...(19): siRNA sense strand
gaagagaagagaggaccua

SEQ ID NO: 1202740 - RNA, 19 nt, Homo sapiens
  misc_RNA (1)...(19): siRNA sense strand
guucaucugugcugggaaa

SEQ ID NO: 1202741 - RNA, 19 nt, Homo sapiens
  misc_RNA (1)...(19): siRNA sense strand
ccacuucccagccuaauga

SEQ ID NO: 1202742 - RNA, 19 nt, Homo sapiens
  misc_RNA (1)...(19): siRNA sense strand
gaucuacaagguucaacua

SEQ ID NO: 1202743 - RNA, 19 nt, Homo sapiens
  misc_RNA (1)...(19): siRNA sense strand
ccagagaguuguggcagaa

SEQ ID NO: 1202744 - RNA, 19 nt, Homo sapiens
  misc_RNA (1)...(19): siRNA sense strand
ucacagguauccagcuuuc

SEQ ID NO: 1202745 - RNA, 19 nt, Homo sapiens
  misc_RNA (1)...(19): siRNA sense strand
ugagcacacuuccaccuuu

SEQ ID NO: 1202746 - RNA, 19 nt, Homo sapiens
  misc_RNA (1)...(19): siRNA sense strand
caacucacuuagcagcaaa

SEQ ID NO: 1202747 - RNA, 19 nt, Homo sapiens
  misc_RNA (1)...(19): siRNA sense strand
cugaagaagugucuaagga

SEQ ID NO: 1202748 - RNA, 19 nt, Homo sapiens
  misc_RNA (1)...(19): siRNA sense strand
gcaugcugcuguucagaga

SEQ ID NO: 1202749 - RNA, 19 nt, Homo sapiens
  misc_RNA (1)...(19): siRNA sense strand
cacagaggaugcacccuuu

SEQ ID NO: 1202750 - RNA, 19 nt, Homo sapiens
  misc_RNA (1)...(19): siRNA sense strand
gaaacugaaaguagagaga

SEQ ID NO: 1202751 - RNA, 19 nt, Homo sapiens
  misc_RNA (1)...(19): siRNA sense strand
gaaaggcugauccggaguu

SEQ ID NO: 1202752 - RNA, 19 nt, Homo sapiens
  misc_RNA (1)...(19): siRNA sense strand
ugaagacucaggagcauuu

SEQ ID NO: 1202753 - RNA, 19 nt, Homo sapiens
  misc_RNA (1)...(19): siRNA sense strand
acaagagguuugaagauca

SEQ ID NO: 1202754 - RNA, 19 nt, Homo sapiens
  misc_RNA (1)...(19): siRNA sense strand
agagggacguuuggcaaua

SEQ ID NO: 1202755 - RNA, 19 nt, Homo sapiens
  misc_RNA (1)...(19): siRNA sense strand
gcuccaugguuguccagua

SEQ ID NO: 1202756 - RNA, 19 nt, Homo sapiens
  misc_RNA (1)...(19): siRNA sense strand
cauugcagcugaagaagug

SEQ ID NO: 1202757 - RNA, 19 nt, Homo sapiens
  misc_RNA (1)...(19): siRNA sense strand
ggagaggagugugguguag

SEQ ID NO: 1202758 - RNA, 19 nt, Homo sapiens
  misc_RNA (1)...(19): siRNA sense strand
acacagcgaucuaccaucu

SEQ ID NO: 1202759 - RNA, 19 nt, Homo sapiens
  misc_RNA (1)...(19): siRNA sense strand
aaaauaagccccaauaaga

SEQ ID NO: 1202760 - RNA, 19 nt, Homo sapiens
  misc_RNA (1)...(19): siRNA sense strand
ucacagccauccagugcaa

SEQ ID NO: 1202761 - RNA, 19 nt, Homo sapiens
  misc_RNA (1)...(19): siRNA sense strand
gagagaagaaagaagauuc

SEQ ID NO: 1202762 - RNA, 19 nt, Homo sapiens
  misc_RNA (1)...(19): siRNA sense strand
gaaauagugaacucugguu

SEQ ID NO: 1202763 - RNA, 19 nt, Homo sapiens
  misc_RNA (1)...(19): siRNA sense strand
cagaggcgcugagugaaga

SEQ ID NO: 1202764 - RNA, 19 nt, Homo sapiens
  misc_RNA (1)...(19): siRNA sense strand
gggauuggccaugaguuua

SEQ ID NO: 1202765 - RNA, 19 nt, Homo sapiens
  misc_RNA (1)...(19): siRNA sense strand
aguagaagauggucugaug

SEQ ID NO: 1202766 - RNA, 19 nt, Homo sapiens
  misc_RNA (1)...(19): siRNA sense strand
ccucuucagugcaaacauu

SEQ ID NO: 1202767 - RNA, 19 nt, Homo sapiens
  misc_RNA (1)...(19): siRNA sense strand
caagaucaauaaugagaac

SEQ ID NO: 1202768 - RNA, 19 nt, Homo sapiens
  misc_RNA (1)...(19): siRNA sense strand
gaagauggucagauaugug

SEQ ID NO: 1202769 - RNA, 19 nt, Homo sapiens
  misc_RNA (1)...(19): siRNA sense strand
cuacaagguucaacuaagg

SEQ ID NO: 1202770 - RNA, 19 nt, Homo sapiens
  misc_RNA (1)...(19): siRNA sense strand
ucuguuaacguguguauaa

SEQ ID NO: 1202771 - RNA, 19 nt, Homo sapiens
  misc_RNA (1)...(19): siRNA sense strand
ugacagagccauugaaaua

SEQ ID NO: 1202772 - RNA, 19 nt, Homo sapiens
  misc_RNA (1)...(19): siRNA sense strand
gaaagaauagaacgaguua

SEQ ID NO: 1202773 - RNA, 19 nt, Homo sapiens
  misc_RNA (1)...(19): siRNA sense strand
ccagaaagccauugacuua

SEQ ID NO: 1202774 - RNA, 19 nt, Homo sapiens
  misc_RNA (1)...(19): siRNA sense strand
guaagaagguggaggaaga

SEQ ID NO: 1202775 - RNA, 19 nt, Homo sapiens
  misc_RNA (1)...(19): siRNA sense strand
gaagguggaggaagacuua

SEQ ID NO: 1202776 - RNA, 19 nt, Homo sapiens
  misc_RNA (1)...(19): siRNA sense strand
gaaagccauugacuuauuc

SEQ ID NO: 1202777 - RNA, 19 nt, Homo sapiens
  misc_RNA (1)...(19): siRNA sense strand
gcucagaacccagcaaaua

SEQ ID NO: 1202778 - RNA, 19 nt, Homo sapiens
  misc_RNA (1)...(19): siRNA sense strand
uaaagaaggugugauugaa

SEQ ID NO: 1202779 - RNA, 19 nt, Homo sapiens
  misc_RNA (1)...(19): siRNA sense strand
gaauagaacgaguuaagaa

SEQ ID NO: 1202780 - RNA, 19 nt, Homo sapiens
  misc_RNA (1)...(19): siRNA sense strand
uaagaaggcucgagaagag

SEQ ID NO: 1202781 - RNA, 19 nt, Homo sapiens
  misc_RNA (1)...(19): siRNA sense strand
agaaagccauugacuuauu

SEQ ID NO: 1202782 - RNA, 19 nt, Homo sapiens
  misc_RNA (1)...(19): siRNA sense strand
gaacaucggagaaaguaug

SEQ ID NO: 1202783 - RNA, 19 nt, Homo sapiens
  misc_RNA (1)...(19): siRNA sense strand
ggaagaagcagcccaugau

SEQ ID NO: 1202784 - RNA, 19 nt, Homo sapiens
  misc_RNA (1)...(19): siRNA sense strand
acagagccauugaaauaaa

SEQ ID NO: 1202785 - RNA, 19 nt, Homo sapiens
  misc_RNA (1)...(19): siRNA sense strand
ggacucaaugaaauucuua

SEQ ID NO: 1202786 - RNA, 19 nt, Homo sapiens
  misc_RNA (1)...(19): siRNA sense strand
ggagaaaguaugagcgaaa

SEQ ID NO: 1202787 - RNA, 19 nt, Homo sapiens
  misc_RNA (1)...(19): siRNA sense strand
gggaaugccugguaauuuu

SEQ ID NO: 1202788 - RNA, 19 nt, Homo sapiens
  misc_RNA (1)...(19): siRNA sense strand
gaacgagcuucgggccuuu

SEQ ID NO: 1202789 - RNA, 19 nt, Homo sapiens
  misc_RNA (1)...(19): siRNA sense strand
gaaagcacacagacuucua

SEQ ID NO: 1202790 - RNA, 19 nt, Homo sapiens
  misc_RNA (1)...(19): siRNA sense strand
ccuguaaauuggauuauga

SEQ ID NO: 1202791 - RNA, 19 nt, Homo sapiens
  misc_RNA (1)...(19): siRNA sense strand
gaacccagcaaauauguca

SEQ ID NO: 1202792 - RNA, 19 nt, Homo sapiens
  misc_RNA (1)...(19): siRNA sense strand
cagaaguuaugguggcuuu

SEQ ID NO: 1202793 - RNA, 19 nt, Homo sapiens
  misc_RNA (1)...(19): siRNA sense strand
gugcaaugcugaaagaagu

SEQ ID NO: 1202794 - RNA, 19 nt, Homo sapiens
  misc_RNA (1)...(19): siRNA sense strand
ugaagaugcuagugcaaug

SEQ ID NO: 1202795 - RNA, 19 nt, Homo sapiens
  misc_RNA (1)...(19): siRNA sense strand
gaagaagccagacgacagu

SEQ ID NO: 1202796 - RNA, 19 nt, Homo sapiens
  misc_RNA (1)...(19): siRNA sense strand
ggagauaacggaggagaug

SEQ ID NO: 1202797 - RNA, 19 nt, Homo sapiens
  misc_RNA (1)...(19): siRNA sense strand
aaaaguggcugcuauugaa

SEQ ID NO: 1202798 - RNA, 19 nt, Homo sapiens
  misc_RNA (1)...(19): siRNA sense strand
cuagugcaaugcugaaaga

SEQ ID NO: 1202799 - RNA, 19 nt, Homo sapiens
  misc_RNA (1)...(19): siRNA sense strand
caagaaaugggagaugaaa

SEQ ID NO: 1202800 - RNA, 19 nt, Homo sapiens
  misc_RNA (1)...(19): siRNA sense strand
uggaaugccuggacucaau

SEQ ID NO: 1202801 - RNA, 19 nt, Homo sapiens
  misc_RNA (1)...(19): siRNA sense strand
gacagagccauugaaauaa

SEQ ID NO: 1202802 - RNA, 19 nt, Homo sapiens
  misc_RNA (1)...(19): siRNA sense strand
ugauaaagaaggugugauu

SEQ ID NO: 1202803 - RNA, 19 nt, Homo sapiens
  misc_RNA (1)...(19): siRNA sense strand
gagcuucgggccuuuguga

SEQ ID NO: 1202804 - RNA, 19 nt, Homo sapiens
  misc_RNA (1)...(19): siRNA sense strand
cagcucagccuuacaagug

SEQ ID NO: 1202805 - RNA, 19 nt, Homo sapiens
  misc_RNA (1)...(19): siRNA sense strand
cagaacaucggagaaagua

SEQ ID NO: 1202806 - RNA, 19 nt, Homo sapiens
  misc_RNA (1)...(19): siRNA sense strand
gggaagaagcagcccauga

SEQ ID NO: 1202807 - RNA, 19 nt, Homo sapiens
  misc_RNA (1)...(19): siRNA sense strand
gagcgagagaucaaagaaa

SEQ ID NO: 1202808 - RNA, 19 nt, Homo sapiens
  misc_RNA (1)...(19): siRNA sense strand
caugcaggauccagaaguu

SEQ ID NO: 1202809 - RNA, 19 nt, Homo sapiens
  misc_RNA (1)...(19): siRNA sense strand
uaacggaggagaugaugga

SEQ ID NO: 1202810 - RNA, 19 nt, Homo sapiens
  misc_RNA (1)...(19): siRNA sense strand
acccaaagguuaugaaucu

SEQ ID NO: 1202811 - RNA, 19 nt, Homo sapiens
  misc_RNA (1)...(19): siRNA sense strand
gaagaagcagcccaugauc

SEQ ID NO: 1202812 - RNA, 19 nt, Homo sapiens
  misc_RNA (1)...(19): siRNA sense strand
gaaaauaccaaggaagaaa

SEQ ID NO: 1202813 - RNA, 19 nt, Homo sapiens
  misc_RNA (1)...(19): siRNA sense strand
aauccucgcuuggccauuu

SEQ ID NO: 1202814 - RNA, 19 nt, Homo sapiens
  misc_RNA (1)...(19): siRNA sense strand
gauaaagaaggugugauug

SEQ ID NO: 1202815 - RNA, 19 nt, Homo sapiens
  misc_RNA (1)...(19): siRNA sense strand
uaugguggcuuuccaggau

SEQ ID NO: 1202816 - RNA, 19 nt, Homo sapiens
  misc_RNA (1)...(19): siRNA sense strand
gaagagcgagagaucaaag

SEQ ID NO: 1202817 - RNA, 19 nt, Homo sapiens
  misc_RNA (1)...(19): siRNA sense strand
gcccuugccuguaaauugg

SEQ ID NO: 1202818 - RNA, 19 nt, Homo sapiens
  misc_RNA (1)...(19): siRNA sense strand
gaucuugcccuugccugua

SEQ ID NO: 1202819 - RNA, 19 nt, Homo sapiens
  misc_RNA (1)...(19): siRNA sense strand
gcagacgaaccaucaagug

SEQ ID NO: 1202820 - RNA, 19 nt, Homo sapiens
  misc_RNA (1)...(19): siRNA sense strand
caaagaaagaauagaacga

SEQ ID NO: 1202821 - RNA, 19 nt, Homo sapiens
  misc_RNA (1)...(19): siRNA sense strand
gcagaacaucggagaaagu

SEQ ID NO: 1202822 - RNA, 19 nt, Homo sapiens
  misc_RNA (1)...(19): siRNA sense strand
auaaagaaggugugauuga

SEQ ID NO: 1202823 - RNA, 19 nt, Homo sapiens
  misc_RNA (1)...(19): siRNA sense strand
cuauugaagcccuaaauga

SEQ ID NO: 1202824 - RNA, 19 nt, Homo sapiens
  misc_RNA (1)...(19): siRNA sense strand
cgagagaucaaagaaagaa

SEQ ID NO: 1202825 - RNA, 19 nt, Homo sapiens
  misc_RNA (1)...(19): siRNA sense strand
gagaaaguaugagcgaaaa

SEQ ID NO: 1202826 - RNA, 19 nt, Homo sapiens
  misc_RNA (1)...(19): siRNA sense strand
cagagccauugaaauaaau

SEQ ID NO: 1202827 - RNA, 19 nt, Homo sapiens
  misc_RNA (1)...(19): siRNA sense strand
ucaaauuacagaagccaaa

SEQ ID NO: 1202828 - RNA, 19 nt, Homo sapiens
  misc_RNA (1)...(19): siRNA sense strand
ucucaucaguaaauuguca

SEQ ID NO: 1202829 - RNA, 19 nt, Homo sapiens
  misc_RNA (1)...(19): siRNA sense strand
ccauugacuuauucacaga

SEQ ID NO: 1202830 - RNA, 19 nt, Homo sapiens
  misc_RNA (1)...(19): siRNA sense strand
gagaucaaagaaagaauag

SEQ ID NO: 1202831 - RNA, 19 nt, Homo sapiens
  misc_RNA (1)...(19): siRNA sense strand
gugaagagcgagagaucaa

SEQ ID NO: 1202832 - RNA, 19 nt, Homo sapiens
  misc_RNA (1)...(19): siRNA sense strand
gggaguggguggagagcau

SEQ ID NO: 1202833 - RNA, 19 nt, Homo sapiens
  misc_RNA (1)...(19): siRNA sense strand
agaagcagcccaugaucuu

SEQ ID NO: 1202834 - RNA, 19 nt, Homo sapiens
  misc_RNA (1)...(19): siRNA sense strand
cagacgaaccaucaaguga

SEQ ID NO: 1202835 - RNA, 19 nt, Homo sapiens
  misc_RNA (1)...(19): siRNA sense strand
acacugaugcuccucaaga

SEQ ID NO: 1202836 - RNA, 19 nt, Homo sapiens
  misc_RNA (1)...(19): siRNA sense strand
gaaucucaucaguaaauug

SEQ ID NO: 1202837 - RNA, 19 nt, Homo sapiens
  misc_RNA (1)...(19): siRNA sense strand
gcaaauaugucaaaauacc

SEQ ID NO: 1202838 - RNA, 19 nt, Homo sapiens
  misc_RNA (1)...(19): siRNA sense strand
gcuauugaagcccuaaaug

SEQ ID NO: 1202839 - RNA, 19 nt, Homo sapiens
  misc_RNA (1)...(19): siRNA sense strand
ugauugaaccagacacuga

SEQ ID NO: 1202840 - RNA, 19 nt, Homo sapiens
  misc_RNA (1)...(19): siRNA sense strand
ucagaacccagcaaauaug

SEQ ID NO: 1202841 - RNA, 19 nt, Homo sapiens
  misc_RNA (1)...(19): siRNA sense strand
cacugaugcuccucaagaa

SEQ ID NO: 1202842 - RNA, 19 nt, Homo sapiens
  misc_RNA (1)...(19): siRNA sense strand
gcaggauccagaaguuaug

SEQ ID NO: 1202843 - RNA, 19 nt, Homo sapiens
  misc_RNA (1)...(19): siRNA sense strand
agaaagaauagaacgaguu

SEQ ID NO: 1202844 - RNA, 19 nt, Homo sapiens
  misc_RNA (1)...(19): siRNA sense strand
gaagcagcccaugaucuug

SEQ ID NO: 1202845 - RNA, 19 nt, Homo sapiens
  misc_RNA (1)...(19): siRNA sense strand
cucaagaaaugggagauga

SEQ ID NO: 1202846 - RNA, 19 nt, Homo sapiens
  misc_RNA (1)...(19): siRNA sense strand
ccaaagguuaugaaucuca

SEQ ID NO: 1202847 - RNA, 19 nt, Homo sapiens
  misc_RNA (1)...(19): siRNA sense strand
ggaaugccuggacucaaug

SEQ ID NO: 1202848 - RNA, 19 nt, Homo sapiens
  misc_RNA (1)...(19): siRNA sense strand
aaaggcagacgaaccauca

SEQ ID NO: 1202849 - RNA, 19 nt, Homo sapiens
  misc_RNA (1)...(19): siRNA sense strand
ccuaaaugauggugaacuc

SEQ ID NO: 1202850 - RNA, 19 nt, Homo sapiens
  misc_RNA (1)...(19): siRNA sense strand
ugccuggacucaaugaaau

SEQ ID NO: 1202851 - RNA, 19 nt, Homo sapiens
  misc_RNA (1)...(19): siRNA sense strand
uauugaagcccuaaaugau

SEQ ID NO: 1202852 - RNA, 19 nt, Homo sapiens
  misc_RNA (1)...(19): siRNA sense strand
aagaauagaacgaguuaag

SEQ ID NO: 1202853 - RNA, 19 nt, Homo sapiens
  misc_RNA (1)...(19): siRNA sense strand
agacuuaaaggcagacgaa

SEQ ID NO: 1202854 - RNA, 19 nt, Homo sapiens
  misc_RNA (1)...(19): siRNA sense strand
ggauuaugaugaagaugcu

SEQ ID NO: 1202855 - RNA, 19 nt, Homo sapiens
  misc_RNA (1)...(19): siRNA sense strand
gcuucgggccuuugugaaa

SEQ ID NO: 1202856 - RNA, 19 nt, Homo sapiens
  misc_RNA (1)...(19): siRNA sense strand
ugaugcuccucaagaaaug

SEQ ID NO: 1202857 - RNA, 19 nt, Homo sapiens
  misc_RNA (1)...(19): siRNA sense strand
uccaggauguggcucagaa

SEQ ID NO: 1202858 - RNA, 19 nt, Homo sapiens
  misc_RNA (1)...(19): siRNA sense strand
ucaagaaaugggagaugaa

SEQ ID NO: 1202859 - RNA, 19 nt, Homo sapiens
  misc_RNA (1)...(19): siRNA sense strand
gaaaauguguaagcaggau

SEQ ID NO: 1202860 - RNA, 19 nt, Homo sapiens
  misc_RNA (1)...(19): siRNA sense strand
ggaaagcacacagacuucu

SEQ ID NO: 1202861 - RNA, 19 nt, Homo sapiens
  misc_RNA (1)...(19): siRNA sense strand
gggaaagcacacagacuuc

SEQ ID NO: 1202862 - RNA, 19 nt, Homo sapiens
  misc_RNA (1)...(19): siRNA sense strand
gagauaacggaggagauga

SEQ ID NO: 1202863 - RNA, 19 nt, Homo sapiens
  misc_RNA (1)...(19): siRNA sense strand
gaaugccuggacucaauga

SEQ ID NO: 1202864 - RNA, 19 nt, Homo sapiens
  misc_RNA (1)...(19): siRNA sense strand
uuaagaaggcucgagaaga

SEQ ID NO: 1202865 - RNA, 19 nt, Homo sapiens
  misc_RNA (1)...(19): siRNA sense strand
caaauuacagaagccaaau

SEQ ID NO: 1202866 - RNA, 19 nt, Homo sapiens
  misc_RNA (1)...(19): siRNA sense strand
gauaacggaggagaugaug

SEQ ID NO: 1202867 - RNA, 19 nt, Homo sapiens
  misc_RNA (1)...(19): siRNA sense strand
agcgagagaucaaagaaag

SEQ ID NO: 1202868 - RNA, 19 nt, Homo sapiens
  misc_RNA (1)...(19): siRNA sense strand
gccuguaaauuggauuaug

SEQ ID NO: 1202869 - RNA, 19 nt, Homo sapiens
  misc_RNA (1)...(19): siRNA sense strand
auuuggaggucaagcguaa

SEQ ID NO: 1202870 - RNA, 19 nt, Homo sapiens
  misc_RNA (1)...(19): siRNA sense strand
agaauagaacgaguuaaga

SEQ ID NO: 1202871 - RNA, 19 nt, Homo sapiens
  misc_RNA (1)...(19): siRNA sense strand
gacaacaccugcagaagau

SEQ ID NO: 1202872 - RNA, 19 nt, Homo sapiens
  misc_RNA (1)...(19): siRNA sense strand
gaaggcacguucuuaguac

SEQ ID NO: 1202873 - RNA, 19 nt, Homo sapiens
  misc_RNA (1)...(19): siRNA sense strand
cgacaacaccugcagaaga

SEQ ID NO: 1202874 - RNA, 19 nt, Homo sapiens
  misc_RNA (1)...(19): siRNA sense strand
ccacugcuguacaccuaaa

SEQ ID NO: 1202875 - RNA, 19 nt, Homo sapiens
  misc_RNA (1)...(19): siRNA sense strand
agacagagagugagccaaa

SEQ ID NO: 1202876 - RNA, 19 nt, Homo sapiens
  misc_RNA (1)...(19): siRNA sense strand
ccgacuaccuccgacagua

SEQ ID NO: 1202877 - RNA, 19 nt, Homo sapiens
  misc_RNA (1)...(19): siRNA sense strand
ucgggaaucuggcugguau

SEQ ID NO: 1202878 - RNA, 19 nt, Homo sapiens
  misc_RNA (1)...(19): siRNA sense strand
gaggaucugcugugcauag

SEQ ID NO: 1202879 - RNA, 19 nt, Homo sapiens
  misc_RNA (1)...(19): siRNA sense strand
uagccaagaccuucuccua

SEQ ID NO: 1202880 - RNA, 19 nt, Homo sapiens
  misc_RNA (1)...(19): siRNA sense strand
gggaaucuggcugguauug

SEQ ID NO: 1202881 - RNA, 19 nt, Homo sapiens
  misc_RNA (1)...(19): siRNA sense strand
aggaggaucugcugugcau

SEQ ID NO: 1202882 - RNA, 19 nt, Homo sapiens
  misc_RNA (1)...(19): siRNA sense strand
gacagagagugagccaaag

SEQ ID NO: 1202883 - RNA, 19 nt, Homo sapiens
  misc_RNA (1)...(19): siRNA sense strand
uaaggaggaugcgccuagu

SEQ ID NO: 1202884 - RNA, 19 nt, Homo sapiens
  misc_RNA (1)...(19): siRNA sense strand
agccacugcuguacaccua

SEQ ID NO: 1202885 - RNA, 19 nt, Homo sapiens
  misc_RNA (1)...(19): siRNA sense strand
gacaacaccugcagaagau

SEQ ID NO: 1202886 - RNA, 19 nt, Homo sapiens
  misc_RNA (1)...(19): siRNA sense strand
gaaggcacguucuuaguac

SEQ ID NO: 1202887 - RNA, 19 nt, Homo sapiens
  misc_RNA (1)...(19): siRNA sense strand
cgacaacaccugcagaaga

SEQ ID NO: 1202888 - RNA, 19 nt, Homo sapiens
  misc_RNA (1)...(19): siRNA sense strand
ccacugcuguacaccuaaa

SEQ ID NO: 1202889 - RNA, 19 nt, Homo sapiens
  misc_RNA (1)...(19): siRNA sense strand
agacagagagugagccaaa

SEQ ID NO: 1202890 - RNA, 19 nt, Homo sapiens
  misc_RNA (1)...(19): siRNA sense strand
ccgacuaccuccgacagua

SEQ ID NO: 1202891 - RNA, 19 nt, Homo sapiens
  misc_RNA (1)...(19): siRNA sense strand
ucgggaaucuggcugguau

SEQ ID NO: 1202892 - RNA, 19 nt, Homo sapiens
  misc_RNA (1)...(19): siRNA sense strand
gaggaucugcugugcauag

SEQ ID NO: 1202893 - RNA, 19 nt, Homo sapiens
  misc_RNA (1)...(19): siRNA sense strand
uagccaagaccuucuccua

SEQ ID NO: 1202894 - RNA, 19 nt, Homo sapiens
  misc_RNA (1)...(19): siRNA sense strand
gggaaucuggcugguauug

SEQ ID NO: 1202895 - RNA, 19 nt, Homo sapiens
  misc_RNA (1)...(19): siRNA sense strand
aggaggaucugcugugcau

SEQ ID NO: 1202896 - RNA, 19 nt, Homo sapiens
  misc_RNA (1)...(19): siRNA sense strand
gacagagagugagccaaag

SEQ ID NO: 1202897 - RNA, 19 nt, Homo sapiens
  misc_RNA (1)...(19): siRNA sense strand
uaaggaggaugcgccuagu

SEQ ID NO: 1202898 - RNA, 19 nt, Homo sapiens
  misc_RNA (1)...(19): siRNA sense strand
agccacugcuguacaccua

SEQ ID NO: 1202899 - RNA, 19 nt, Homo sapiens
  misc_RNA (1)...(19): siRNA sense strand
gacaacaccugcagaagau

SEQ ID NO: 1202900 - RNA, 19 nt, Homo sapiens
  misc_RNA (1)...(19): siRNA sense strand
gaaggcacguucuuaguac

SEQ ID NO: 1202901 - RNA, 19 nt, Homo sapiens
  misc_RNA (1)...(19): siRNA sense strand
cgacaacaccugcagaaga

SEQ ID NO: 1202902 - RNA, 19 nt, Homo sapiens
  misc_RNA (1)...(19): siRNA sense strand
ccacugcuguacaccuaaa

SEQ ID NO: 1202903 - RNA, 19 nt, Homo sapiens
  misc_RNA (1)...(19): siRNA sense strand
agacagagagugagccaaa

SEQ ID NO: 1202904 - RNA, 19 nt, Homo sapiens
  misc_RNA (1)...(19): siRNA sense strand
ccgacuaccuccgacagua

SEQ ID NO: 1202905 - RNA, 19 nt, Homo sapiens
  misc_RNA (1)...(19): siRNA sense strand
ucgggaaucuggcugguau

SEQ ID NO: 1202906 - RNA, 19 nt, Homo sapiens
  misc_RNA (1)...(19): siRNA sense strand
gaggaucugcugugcauag

SEQ ID NO: 1202907 - RNA, 19 nt, Homo sapiens
  misc_RNA (1)...(19): siRNA sense strand
uagccaagaccuucuccua

SEQ ID NO: 1202908 - RNA, 19 nt, Homo sapiens
  misc_RNA (1)...(19): siRNA sense strand
gggaaucuggcugguauug

SEQ ID NO: 1202909 - RNA, 19 nt, Homo sapiens
  misc_RNA (1)...(19): siRNA sense strand
aggaggaucugcugugcau

SEQ ID NO: 1202910 - RNA, 19 nt, Homo sapiens
  misc_RNA (1)...(19): siRNA sense strand
gacagagagugagccaaag

SEQ ID NO: 1202911 - RNA, 19 nt, Homo sapiens
  misc_RNA (1)...(19): siRNA sense strand
uaaggaggaugcgccuagu

SEQ ID NO: 1202912 - RNA, 19 nt, Homo sapiens
  misc_RNA (1)...(19): siRNA sense strand
agccacugcuguacaccua

SEQ ID NO: 1202913 - RNA, 19 nt, Homo sapiens
  misc_RNA (1)...(19): siRNA sense strand
gacaacaccugcagaagau

SEQ ID NO: 1202914 - RNA, 19 nt, Homo sapiens
  misc_RNA (1)...(19): siRNA sense strand
gaaggcacguucuuaguac

SEQ ID NO: 1202915 - RNA, 19 nt, Homo sapiens
  misc_RNA (1)...(19): siRNA sense strand
cgacaacaccugcagaaga

SEQ ID NO: 1202916 - RNA, 19 nt, Homo sapiens
  misc_RNA (1)...(19): siRNA sense strand
ccacugcuguacaccuaaa

SEQ ID NO: 1202917 - RNA, 19 nt, Homo sapiens
  misc_RNA (1)...(19): siRNA sense strand
agacagagagugagccaaa

SEQ ID NO: 1202918 - RNA, 19 nt, Homo sapiens
  misc_RNA (1)...(19): siRNA sense strand
ccgacuaccuccgacagua

SEQ ID NO: 1202919 - RNA, 19 nt, Homo sapiens
  misc_RNA (1)...(19): siRNA sense strand
ucgggaaucuggcugguau

SEQ ID NO: 1202920 - RNA, 19 nt, Homo sapiens
  misc_RNA (1)...(19): siRNA sense strand
gaggaucugcugugcauag

SEQ ID NO: 1202921 - RNA, 19 nt, Homo sapiens
  misc_RNA (1)...(19): siRNA sense strand
uagccaagaccuucuccua

SEQ ID NO: 1202922 - RNA, 19 nt, Homo sapiens
  misc_RNA (1)...(19): siRNA sense strand
gggaaucuggcugguauug

SEQ ID NO: 1202923 - RNA, 19 nt, Homo sapiens
  misc_RNA (1)...(19): siRNA sense strand
aggaggaucugcugugcau

SEQ ID NO: 1202924 - RNA, 19 nt, Homo sapiens
  misc_RNA (1)...(19): siRNA sense strand
gacagagagugagccaaag

SEQ ID NO: 1202925 - RNA, 19 nt, Homo sapiens
  misc_RNA (1)...(19): siRNA sense strand
uaaggaggaugcgccuagu

SEQ ID NO: 1202926 - RNA, 19 nt, Homo sapiens
  misc_RNA (1)...(19): siRNA sense strand
agccacugcuguacaccua

SEQ ID NO: 1202927 - RNA, 19 nt, Homo sapiens
  misc_RNA (1)...(19): siRNA sense strand
caucuaagcuucuuucuga

SEQ ID NO: 1202928 - RNA, 19 nt, Homo sapiens
  misc_RNA (1)...(19): siRNA sense strand
caaaggaacuguagauugu

SEQ ID NO: 1202929 - RNA, 19 nt, Homo sapiens
  misc_RNA (1)...(19): siRNA sense strand
ugaaagaucuaccugaauu

SEQ ID NO: 1202930 - RNA, 19 nt, Homo sapiens
  misc_RNA (1)...(19): siRNA sense strand
gaaaagagguuaugagaga

SEQ ID NO: 1202931 - RNA, 19 nt, Homo sapiens
  misc_RNA (1)...(19): siRNA sense strand
ugaaagauccuaacuauga

SEQ ID NO: 1202932 - RNA, 19 nt, Homo sapiens
  misc_RNA (1)...(19): siRNA sense strand
gagcagauacugaauguaa

SEQ ID NO: 1202933 - RNA, 19 nt, Homo sapiens
  misc_RNA (1)...(19): siRNA sense strand
ggagaacuguguuuaugaa

SEQ ID NO: 1202934 - RNA, 19 nt, Homo sapiens
  misc_RNA (1)...(19): siRNA sense strand
ucaaucaccuuguuaaaga

SEQ ID NO: 1202935 - RNA, 19 nt, Homo sapiens
  misc_RNA (1)...(19): siRNA sense strand
gcggaaauguuaagagauu

SEQ ID NO: 1202936 - RNA, 19 nt, Homo sapiens
  misc_RNA (1)...(19): siRNA sense strand
ggagauggaggucgucuua

SEQ ID NO: 1202937 - RNA, 19 nt, Homo sapiens
  misc_RNA (1)...(19): siRNA sense strand
agacauaucugaagcugaa

SEQ ID NO: 1202938 - RNA, 19 nt, Homo sapiens
  misc_RNA (1)...(19): siRNA sense strand
gagaagacuuuaacaccaa

SEQ ID NO: 1202939 - RNA, 19 nt, Homo sapiens
  misc_RNA (1)...(19): siRNA sense strand
gaaagggcauuugagaaga

SEQ ID NO: 1202940 - RNA, 19 nt, Homo sapiens
  misc_RNA (1)...(19): siRNA sense strand
ggagaaaguacauuuaaga

SEQ ID NO: 1202941 - RNA, 19 nt, Homo sapiens
  misc_RNA (1)...(19): siRNA sense strand
gaaagaucuaccugaauua

SEQ ID NO: 1202942 - RNA, 19 nt, Homo sapiens
  misc_RNA (1)...(19): siRNA sense strand
gcauggagauacuaaugaa

SEQ ID NO: 1202943 - RNA, 19 nt, Homo sapiens
  misc_RNA (1)...(19): siRNA sense strand
gaaagauccuaacuaugau

SEQ ID NO: 1202944 - RNA, 19 nt, Homo sapiens
  misc_RNA (1)...(19): siRNA sense strand
ggacugaggaaauaaagaa

SEQ ID NO: 1202945 - RNA, 19 nt, Homo sapiens
  misc_RNA (1)...(19): siRNA sense strand
accaugagcuuguauauga

SEQ ID NO: 1202946 - RNA, 19 nt, Homo sapiens
  misc_RNA (1)...(19): siRNA sense strand
guaaugagcacaacugaug

SEQ ID NO: 1202947 - RNA, 19 nt, Homo sapiens
  misc_RNA (1)...(19): siRNA sense strand
ugugaaagauccuaacuau

SEQ ID NO: 1202948 - RNA, 19 nt, Homo sapiens
  misc_RNA (1)...(19): siRNA sense strand
guugaaagaucuaccugaa

SEQ ID NO: 1202949 - RNA, 19 nt, Homo sapiens
  misc_RNA (1)...(19): siRNA sense strand
gaacuggaaguaccucauu

SEQ ID NO: 1202950 - RNA, 19 nt, Homo sapiens
  misc_RNA (1)...(19): siRNA sense strand
ggauaaggcuaccgugcuu

SEQ ID NO: 1202951 - RNA, 19 nt, Homo sapiens
  misc_RNA (1)...(19): siRNA sense strand
ugaaguugcggaaauguua

SEQ ID NO: 1202952 - RNA, 19 nt, Homo sapiens
  misc_RNA (1)...(19): siRNA sense strand
gaugaaagggcauuugaga

SEQ ID NO: 1202953 - RNA, 19 nt, Homo sapiens
  misc_RNA (1)...(19): siRNA sense strand
cuaaugaaguugcggaaau

SEQ ID NO: 1202954 - RNA, 19 nt, Homo sapiens
  misc_RNA (1)...(19): siRNA sense strand
gguggaaagcguaaagaua

SEQ ID NO: 1202955 - RNA, 19 nt, Homo sapiens
  misc_RNA (1)...(19): siRNA sense strand
aagggaagguugcuggaua

SEQ ID NO: 1202956 - RNA, 19 nt, Homo sapiens
  misc_RNA (1)...(19): siRNA sense strand
caggagaacuguguuuaug

SEQ ID NO: 1202957 - RNA, 19 nt, Homo sapiens
  misc_RNA (1)...(19): siRNA sense strand
ggagguggaugugaaagau

SEQ ID NO: 1202958 - RNA, 19 nt, Homo sapiens
  misc_RNA (1)...(19): siRNA sense strand
gauccuaacuaugaugaug

SEQ ID NO: 1202959 - RNA, 19 nt, Homo sapiens
  misc_RNA (1)...(19): siRNA sense strand
gaagcugaacauugccuua

SEQ ID NO: 1202960 - RNA, 19 nt, Homo sapiens
  misc_RNA (1)...(19): siRNA sense strand
agauggaggucgucuuaaa

SEQ ID NO: 1202961 - RNA, 19 nt, Homo sapiens
  misc_RNA (1)...(19): siRNA sense strand
gagguuaugagagaauuua

SEQ ID NO: 1202962 - RNA, 19 nt, Homo sapiens
  misc_RNA (1)...(19): siRNA sense strand
gacuuuaacaccaaucaua

SEQ ID NO: 1202963 - RNA, 19 nt, Homo sapiens
  misc_RNA (1)...(19): siRNA sense strand
ccaaacaacucagagaucu

SEQ ID NO: 1202964 - RNA, 19 nt, Homo sapiens
  misc_RNA (1)...(19): siRNA sense strand
ggcaguauccuuagcauug

SEQ ID NO: 1202965 - RNA, 19 nt, Homo sapiens
  misc_RNA (1)...(19): siRNA sense strand
ggagcgguuuguagaagaa

SEQ ID NO: 1202966 - RNA, 19 nt, Homo sapiens
  misc_RNA (1)...(19): siRNA sense strand
cugaggaaauaaagaauga

SEQ ID NO: 1202967 - RNA, 19 nt, Homo sapiens
  misc_RNA (1)...(19): siRNA sense strand
aaacaacucagagaucuuu

SEQ ID NO: 1202968 - RNA, 19 nt, Homo sapiens
  misc_RNA (1)...(19): siRNA sense strand
gagcauggagauacuaaug

SEQ ID NO: 1202969 - RNA, 19 nt, Homo sapiens
  misc_RNA (1)...(19): siRNA sense strand
gaaggggacuaccaaagaa

SEQ ID NO: 1202970 - RNA, 19 nt, Homo sapiens
  misc_RNA (1)...(19): siRNA sense strand
uaaugaaguugcggaaaug

SEQ ID NO: 1202971 - RNA, 19 nt, Homo sapiens
  misc_RNA (1)...(19): siRNA sense strand
gaaauuccggacauuaauc

SEQ ID NO: 1202972 - RNA, 19 nt, Homo sapiens
  misc_RNA (1)...(19): siRNA sense strand
gaaguugcggaaauguuaa

SEQ ID NO: 1202973 - RNA, 19 nt, Homo sapiens
  misc_RNA (1)...(19): siRNA sense strand
ccugauaacuuaagugacu

SEQ ID NO: 1202974 - RNA, 19 nt, Homo sapiens
  misc_RNA (1)...(19): siRNA sense strand
cuaccgugcuucugaguau

SEQ ID NO: 1202975 - RNA, 19 nt, Homo sapiens
  misc_RNA (1)...(19): siRNA sense strand
caccaaucauacaggaaua

SEQ ID NO: 1202976 - RNA, 19 nt, Homo sapiens
  misc_RNA (1)...(19): siRNA sense strand
agagucaacuggagaaagu

SEQ ID NO: 1202977 - RNA, 19 nt, Homo sapiens
  misc_RNA (1)...(19): siRNA sense strand
guggaaagcguaaagauag

SEQ ID NO: 1202978 - RNA, 19 nt, Homo sapiens
  misc_RNA (1)...(19): siRNA sense strand
acaaaggaacuguagauug

SEQ ID NO: 1202979 - RNA, 19 nt, Homo sapiens
  misc_RNA (1)...(19): siRNA sense strand
ggaaggcuagucauagaga

SEQ ID NO: 1202980 - RNA, 19 nt, Homo sapiens
  misc_RNA (1)...(19): siRNA sense strand
gauaugcugcugaaagaau

SEQ ID NO: 1202981 - RNA, 19 nt, Homo sapiens
  misc_RNA (1)...(19): siRNA sense strand
gcagcaaucugucaaucac

SEQ ID NO: 1202982 - RNA, 19 nt, Homo sapiens
  misc_RNA (1)...(19): siRNA sense strand
uaucugaagcugaacauug

SEQ ID NO: 1202983 - RNA, 19 nt, Homo sapiens
  misc_RNA (1)...(19): siRNA sense strand
ugaaagggcauuugagaag

SEQ ID NO: 1202984 - RNA, 19 nt, Homo sapiens
  misc_RNA (1)...(19): siRNA sense strand
acaaugaaauuccggacau

SEQ ID NO: 1202985 - RNA, 19 nt, Homo sapiens
  misc_RNA (1)...(19): siRNA sense strand
gaaaaugagcagauacuga

SEQ ID NO: 1202986 - RNA, 19 nt, Homo sapiens
  misc_RNA (1)...(19): siRNA sense strand
uggaggagguggaugugaa

SEQ ID NO: 1202987 - RNA, 19 nt, Homo sapiens
  misc_RNA (1)...(19): siRNA sense strand
uugauaugcugcugaaaga

SEQ ID NO: 1202988 - RNA, 19 nt, Homo sapiens
  misc_RNA (1)...(19): siRNA sense strand
ggagauggaauuuuaugua

SEQ ID NO: 1202989 - RNA, 19 nt, Homo sapiens
  misc_RNA (1)...(19): siRNA sense strand
ggaggagguggaugugaaa

SEQ ID NO: 1202990 - RNA, 19 nt, Homo sapiens
  misc_RNA (1)...(19): siRNA sense strand
guaccaguguuggcaguau

SEQ ID NO: 1202991 - RNA, 19 nt, Homo sapiens
  misc_RNA (1)...(19): siRNA sense strand
gcugaaagaauauuuacuc

SEQ ID NO: 1202992 - RNA, 19 nt, Homo sapiens
  misc_RNA (1)...(19): siRNA sense strand
gcugcugaaagaauauuua

SEQ ID NO: 1202993 - RNA, 19 nt, Homo sapiens
  misc_RNA (1)...(19): siRNA sense strand
gggagugacgcccuuagaa

SEQ ID NO: 1202994 - RNA, 19 nt, Homo sapiens
  misc_RNA (1)...(19): siRNA sense strand
gauuucagcauccuccauu

SEQ ID NO: 1202995 - RNA, 19 nt, Homo sapiens
  misc_RNA (1)...(19): siRNA sense strand
auaugcugcugaaagaaua

SEQ ID NO: 1202996 - RNA, 19 nt, Homo sapiens
  misc_RNA (1)...(19): siRNA sense strand
gcaguauccuuagcauugg

SEQ ID NO: 1202997 - RNA, 19 nt, Homo sapiens
  misc_RNA (1)...(19): siRNA sense strand
ggagugacgcccuuagaag

SEQ ID NO: 1202998 - RNA, 19 nt, Homo sapiens
  misc_RNA (1)...(19): siRNA sense strand
gggcauuugagaagacuuu

SEQ ID NO: 1202999 - RNA, 19 nt, Homo sapiens
  misc_RNA (1)...(19): siRNA sense strand
gggcagcaaucugucaauc

SEQ ID NO: 1203000 - RNA, 19 nt, Homo sapiens
  misc_RNA (1)...(19): siRNA sense strand
uugcggaaauguuaagaga

SEQ ID NO: 1203001 - RNA, 19 nt, Homo sapiens
  misc_RNA (1)...(19): siRNA sense strand
gcauuugagaagacuuuaa

SEQ ID NO: 1203002 - RNA, 19 nt, Homo sapiens
  misc_RNA (1)...(19): siRNA sense strand
gagaacuguguuuaugaaa

SEQ ID NO: 1203003 - RNA, 19 nt, Homo sapiens
  misc_RNA (1)...(19): siRNA sense strand
uaccauuacuguagaccaa

SEQ ID NO: 1203004 - RNA, 19 nt, Homo sapiens
  misc_RNA (1)...(19): siRNA sense strand
gaggugggcagcaaucugu

SEQ ID NO: 1203005 - RNA, 19 nt, Homo sapiens
  misc_RNA (1)...(19): siRNA sense strand
ggacaguaaugagcacaac

SEQ ID NO: 1203006 - RNA, 19 nt, Homo sapiens
  misc_RNA (1)...(19): siRNA sense strand
gcccuuagaaguggauuaa

SEQ ID NO: 1203007 - RNA, 19 nt, Homo sapiens
  misc_RNA (1)...(19): siRNA sense strand
ggaaggggacuaccaaaga

SEQ ID NO: 1203008 - RNA, 19 nt, Homo sapiens
  misc_RNA (1)...(19): siRNA sense strand
ccaugagcuuguauaugaa

SEQ ID NO: 1203009 - RNA, 19 nt, Homo sapiens
  misc_RNA (1)...(19): siRNA sense strand
agauugauaugcugcugaa

SEQ ID NO: 1203010 - RNA, 19 nt, Homo sapiens
  misc_RNA (1)...(19): siRNA sense strand
uggagauacuaaugaaguu

SEQ ID NO: 1203011 - RNA, 19 nt, Homo sapiens
  misc_RNA (1)...(19): siRNA sense strand
gaccaggagaacuguguuu

SEQ ID NO: 1203012 - RNA, 19 nt, Homo sapiens
  misc_RNA (1)...(19): siRNA sense strand
ggaaguaccucauuuucac

SEQ ID NO: 1203013 - RNA, 19 nt, Homo sapiens
  misc_RNA (1)...(19): siRNA sense strand
gcugaacauugccuuaagg

SEQ ID NO: 1203014 - RNA, 19 nt, Homo sapiens
  misc_RNA (1)...(19): siRNA sense strand
gaaagcguaaagauagugu

SEQ ID NO: 1203015 - RNA, 19 nt, Homo sapiens
  misc_RNA (1)...(19): siRNA sense strand
uuaagugacucucucuuuu

SEQ ID NO: 1203016 - RNA, 19 nt, Homo sapiens
  misc_RNA (1)...(19): siRNA sense strand
uguuggagauggaauuuua

SEQ ID NO: 1203017 - RNA, 19 nt, Homo sapiens
  misc_RNA (1)...(19): siRNA sense strand
agaucuaccugaauuagca

SEQ ID NO: 1203018 - RNA, 19 nt, Homo sapiens
  misc_RNA (1)...(19): siRNA sense strand
ccaggagaacuguguuuau

SEQ ID NO: 1203019 - RNA, 19 nt, Homo sapiens
  misc_RNA (1)...(19): siRNA sense strand
cuggacagguguaugaugu

SEQ ID NO: 1203020 - RNA, 19 nt, Homo sapiens
  misc_RNA (1)...(19): siRNA sense strand
agagaucuuuguccuucaa

SEQ ID NO: 1203021 - RNA, 19 nt, Homo sapiens
  misc_RNA (1)...(19): siRNA sense strand
ugaaauuccggacauuaau

SEQ ID NO: 1203022 - RNA, 19 nt, Homo sapiens
  misc_RNA (1)...(19): siRNA sense strand
ggagauacuaaugaaguug

SEQ ID NO: 1203023 - RNA, 19 nt, Homo sapiens
  misc_RNA (1)...(19): siRNA sense strand
cauuaacgaagcuagaauu

SEQ ID NO: 1203024 - RNA, 19 nt, Homo sapiens
  misc_RNA (1)...(19): siRNA sense strand
cuggagaaaguacauuuaa

SEQ ID NO: 1203025 - RNA, 19 nt, Homo sapiens
  misc_RNA (1)...(19): siRNA sense strand
cuuaagugacucucucuuu

SEQ ID NO: 1203026 - RNA, 19 nt, Homo sapiens
  misc_RNA (1)...(19): siRNA sense strand
ucaccuuguuaaagagauu

SEQ ID NO: 1203027 - RNA, 19 nt, Homo sapiens
  misc_RNA (1)...(19): siRNA sense strand
caucuaagcuucuuucuga

SEQ ID NO: 1203028 - RNA, 19 nt, Homo sapiens
  misc_RNA (1)...(19): siRNA sense strand
caaaggaacuguagauugu

SEQ ID NO: 1203029 - RNA, 19 nt, Homo sapiens
  misc_RNA (1)...(19): siRNA sense strand
ugaaagaucuaccugaauu

SEQ ID NO: 1203030 - RNA, 19 nt, Homo sapiens
  misc_RNA (1)...(19): siRNA sense strand
gaaaagagguuaugagaga

SEQ ID NO: 1203031 - RNA, 19 nt, Homo sapiens
  misc_RNA (1)...(19): siRNA sense strand
ugaaagauccuaacuauga

SEQ ID NO: 1203032 - RNA, 19 nt, Homo sapiens
  misc_RNA (1)...(19): siRNA sense strand
ggagaacuguguuuaugaa

SEQ ID NO: 1203033 - RNA, 19 nt, Homo sapiens
  misc_RNA (1)...(19): siRNA sense strand
ucaaucaccuuguuaaaga

SEQ ID NO: 1203034 - RNA, 19 nt, Homo sapiens
  misc_RNA (1)...(19): siRNA sense strand
gcggaaauguuaagagauu

SEQ ID NO: 1203035 - RNA, 19 nt, Homo sapiens
  misc_RNA (1)...(19): siRNA sense strand
ggagauggaggucgucuua

SEQ ID NO: 1203036 - RNA, 19 nt, Homo sapiens
  misc_RNA (1)...(19): siRNA sense strand
agacauaucugaagcugaa

SEQ ID NO: 1203037 - RNA, 19 nt, Homo sapiens
  misc_RNA (1)...(19): siRNA sense strand
gagaagacuuuaacaccaa

SEQ ID NO: 1203038 - RNA, 19 nt, Homo sapiens
  misc_RNA (1)...(19): siRNA sense strand
gaaagggcauuugagaaga

SEQ ID NO: 1203039 - RNA, 19 nt, Homo sapiens
  misc_RNA (1)...(19): siRNA sense strand
ggagaaaguacauuuaaga

SEQ ID NO: 1203040 - RNA, 19 nt, Homo sapiens
  misc_RNA (1)...(19): siRNA sense strand
gaaagaucuaccugaauua

SEQ ID NO: 1203041 - RNA, 19 nt, Homo sapiens
  misc_RNA (1)...(19): siRNA sense strand
gcauggagauacuaaugaa

SEQ ID NO: 1203042 - RNA, 19 nt, Homo sapiens
  misc_RNA (1)...(19): siRNA sense strand
gaaagauccuaacuaugau

SEQ ID NO: 1203043 - RNA, 19 nt, Homo sapiens
  misc_RNA (1)...(19): siRNA sense strand
ggacugaggaaauaaagaa

SEQ ID NO: 1203044 - RNA, 19 nt, Homo sapiens
  misc_RNA (1)...(19): siRNA sense strand
accaugagcuuguauauga

SEQ ID NO: 1203045 - RNA, 19 nt, Homo sapiens
  misc_RNA (1)...(19): siRNA sense strand
guaaugagcacaacugaug

SEQ ID NO: 1203046 - RNA, 19 nt, Homo sapiens
  misc_RNA (1)...(19): siRNA sense strand
ugugaaagauccuaacuau

SEQ ID NO: 1203047 - RNA, 19 nt, Homo sapiens
  misc_RNA (1)...(19): siRNA sense strand
guugaaagaucuaccugaa

SEQ ID NO: 1203048 - RNA, 19 nt, Homo sapiens
  misc_RNA (1)...(19): siRNA sense strand
gaacuggaaguaccucauu

SEQ ID NO: 1203049 - RNA, 19 nt, Homo sapiens
  misc_RNA (1)...(19): siRNA sense strand
ggauaaggcuaccgugcuu

SEQ ID NO: 1203050 - RNA, 19 nt, Homo sapiens
  misc_RNA (1)...(19): siRNA sense strand
ugaaguugcggaaauguua

SEQ ID NO: 1203051 - RNA, 19 nt, Homo sapiens
  misc_RNA (1)...(19): siRNA sense strand
gaugaaagggcauuugaga

SEQ ID NO: 1203052 - RNA, 19 nt, Homo sapiens
  misc_RNA (1)...(19): siRNA sense strand
cuaaugaaguugcggaaau

SEQ ID NO: 1203053 - RNA, 19 nt, Homo sapiens
  misc_RNA (1)...(19): siRNA sense strand
gguggaaagcguaaagaua

SEQ ID NO: 1203054 - RNA, 19 nt, Homo sapiens
  misc_RNA (1)...(19): siRNA sense strand
aagggaagguugcuggaua

SEQ ID NO: 1203055 - RNA, 19 nt, Homo sapiens
  misc_RNA (1)...(19): siRNA sense strand
caggagaacuguguuuaug

SEQ ID NO: 1203056 - RNA, 19 nt, Homo sapiens
  misc_RNA (1)...(19): siRNA sense strand
ggagguggaugugaaagau

SEQ ID NO: 1203057 - RNA, 19 nt, Homo sapiens
  misc_RNA (1)...(19): siRNA sense strand
gauccuaacuaugaugaug

SEQ ID NO: 1203058 - RNA, 19 nt, Homo sapiens
  misc_RNA (1)...(19): siRNA sense strand
gaagcugaacauugccuua

SEQ ID NO: 1203059 - RNA, 19 nt, Homo sapiens
  misc_RNA (1)...(19): siRNA sense strand
agauggaggucgucuuaaa

SEQ ID NO: 1203060 - RNA, 19 nt, Homo sapiens
  misc_RNA (1)...(19): siRNA sense strand
gagguuaugagagaauuua

SEQ ID NO: 1203061 - RNA, 19 nt, Homo sapiens
  misc_RNA (1)...(19): siRNA sense strand
gacuuuaacaccaaucaua

SEQ ID NO: 1203062 - RNA, 19 nt, Homo sapiens
  misc_RNA (1)...(19): siRNA sense strand
ccaaacaacucagagaucu

SEQ ID NO: 1203063 - RNA, 19 nt, Homo sapiens
  misc_RNA (1)...(19): siRNA sense strand
ggcaguauccuuagcauug

SEQ ID NO: 1203064 - RNA, 19 nt, Homo sapiens
  misc_RNA (1)...(19): siRNA sense strand
ggagcgguuuguagaagaa

SEQ ID NO: 1203065 - RNA, 19 nt, Homo sapiens
  misc_RNA (1)...(19): siRNA sense strand
gagcauggagauacuaaug

SEQ ID NO: 1203066 - RNA, 19 nt, Homo sapiens
  misc_RNA (1)...(19): siRNA sense strand
aaacaacucagagaucuuu

SEQ ID NO: 1203067 - RNA, 19 nt, Homo sapiens
  misc_RNA (1)...(19): siRNA sense strand
cugaggaaauaaagaauga

SEQ ID NO: 1203068 - RNA, 19 nt, Homo sapiens
  misc_RNA (1)...(19): siRNA sense strand
gaaggggacuaccaaagaa

SEQ ID NO: 1203069 - RNA, 19 nt, Homo sapiens
  misc_RNA (1)...(19): siRNA sense strand
uaaugaaguugcggaaaug

SEQ ID NO: 1203070 - RNA, 19 nt, Homo sapiens
  misc_RNA (1)...(19): siRNA sense strand
gaaauuccggacauuaauc

SEQ ID NO: 1203071 - RNA, 19 nt, Homo sapiens
  misc_RNA (1)...(19): siRNA sense strand
gaaguugcggaaauguuaa

SEQ ID NO: 1203072 - RNA, 19 nt, Homo sapiens
  misc_RNA (1)...(19): siRNA sense strand
ccugauaacuuaagugacu

SEQ ID NO: 1203073 - RNA, 19 nt, Homo sapiens
  misc_RNA (1)...(19): siRNA sense strand
cuaccgugcuucugaguau

SEQ ID NO: 1203074 - RNA, 19 nt, Homo sapiens
  misc_RNA (1)...(19): siRNA sense strand
caccaaucauacaggaaua

SEQ ID NO: 1203075 - RNA, 19 nt, Homo sapiens
  misc_RNA (1)...(19): siRNA sense strand
agagucaacuggagaaagu

SEQ ID NO: 1203076 - RNA, 19 nt, Homo sapiens
  misc_RNA (1)...(19): siRNA sense strand
guggaaagcguaaagauag

SEQ ID NO: 1203077 - RNA, 19 nt, Homo sapiens
  misc_RNA (1)...(19): siRNA sense strand
acaaaggaacuguagauug

SEQ ID NO: 1203078 - RNA, 19 nt, Homo sapiens
  misc_RNA (1)...(19): siRNA sense strand
ggaaggcuagucauagaga

SEQ ID NO: 1203079 - RNA, 19 nt, Homo sapiens
  misc_RNA (1)...(19): siRNA sense strand
gauaugcugcugaaagaau

SEQ ID NO: 1203080 - RNA, 19 nt, Homo sapiens
  misc_RNA (1)...(19): siRNA sense strand
gcagcaaucugucaaucac

SEQ ID NO: 1203081 - RNA, 19 nt, Homo sapiens
  misc_RNA (1)...(19): siRNA sense strand
uaucugaagcugaacauug

SEQ ID NO: 1203082 - RNA, 19 nt, Homo sapiens
  misc_RNA (1)...(19): siRNA sense strand
ugaaagggcauuugagaag

SEQ ID NO: 1203083 - RNA, 19 nt, Homo sapiens
  misc_RNA (1)...(19): siRNA sense strand
acaaugaaauuccggacau

SEQ ID NO: 1203084 - RNA, 19 nt, Homo sapiens
  misc_RNA (1)...(19): siRNA sense strand
uggaggagguggaugugaa

SEQ ID NO: 1203085 - RNA, 19 nt, Homo sapiens
  misc_RNA (1)...(19): siRNA sense strand
uugauaugcugcugaaaga

SEQ ID NO: 1203086 - RNA, 19 nt, Homo sapiens
  misc_RNA (1)...(19): siRNA sense strand
ggagauggaauuuuaugua

SEQ ID NO: 1203087 - RNA, 19 nt, Homo sapiens
  misc_RNA (1)...(19): siRNA sense strand
ggaggagguggaugugaaa

SEQ ID NO: 1203088 - RNA, 19 nt, Homo sapiens
  misc_RNA (1)...(19): siRNA sense strand
guaccaguguuggcaguau

SEQ ID NO: 1203089 - RNA, 19 nt, Homo sapiens
  misc_RNA (1)...(19): siRNA sense strand
gcugaaagaauauuuacuc

SEQ ID NO: 1203090 - RNA, 19 nt, Homo sapiens
  misc_RNA (1)...(19): siRNA sense strand
gcugcugaaagaauauuua

SEQ ID NO: 1203091 - RNA, 19 nt, Homo sapiens
  misc_RNA (1)...(19): siRNA sense strand
ggagugacgcccuuagaag

SEQ ID NO: 1203092 - RNA, 19 nt, Homo sapiens
  misc_RNA (1)...(19): siRNA sense strand
gggagugacgcccuuagaa

SEQ ID NO: 1203093 - RNA, 19 nt, Homo sapiens
  misc_RNA (1)...(19): siRNA sense strand
gauuucagcauccuccauu

SEQ ID NO: 1203094 - RNA, 19 nt, Homo sapiens
  misc_RNA (1)...(19): siRNA sense strand
auaugcugcugaaagaaua

SEQ ID NO: 1203095 - RNA, 19 nt, Homo sapiens
  misc_RNA (1)...(19): siRNA sense strand
gcaguauccuuagcauugg

SEQ ID NO: 1203096 - RNA, 19 nt, Homo sapiens
  misc_RNA (1)...(19): siRNA sense strand
gggcauuugagaagacuuu

SEQ ID NO: 1203097 - RNA, 19 nt, Homo sapiens
  misc_RNA (1)...(19): siRNA sense strand
gggcagcaaucugucaauc

SEQ ID NO: 1203098 - RNA, 19 nt, Homo sapiens
  misc_RNA (1)...(19): siRNA sense strand
uugcggaaauguuaagaga

SEQ ID NO: 1203099 - RNA, 19 nt, Homo sapiens
  misc_RNA (1)...(19): siRNA sense strand
gcauuugagaagacuuuaa

SEQ ID NO: 1203100 - RNA, 19 nt, Homo sapiens
  misc_RNA (1)...(19): siRNA sense strand
gagaacuguguuuaugaaa

SEQ ID NO: 1203101 - RNA, 19 nt, Homo sapiens
  misc_RNA (1)...(19): siRNA sense strand
uaccauuacuguagaccaa

SEQ ID NO: 1203102 - RNA, 19 nt, Homo sapiens
  misc_RNA (1)...(19): siRNA sense strand
gcccuuagaaguggauuaa

SEQ ID NO: 1203103 - RNA, 19 nt, Homo sapiens
  misc_RNA (1)...(19): siRNA sense strand
gaggugggcagcaaucugu

SEQ ID NO: 1203104 - RNA, 19 nt, Homo sapiens
  misc_RNA (1)...(19): siRNA sense strand
ggacaguaaugagcacaac

SEQ ID NO: 1203105 - RNA, 19 nt, Homo sapiens
  misc_RNA (1)...(19): siRNA sense strand
ggaaggggacuaccaaaga

SEQ ID NO: 1203106 - RNA, 19 nt, Homo sapiens
  misc_RNA (1)...(19): siRNA sense strand
ccaugagcuuguauaugaa

SEQ ID NO: 1203107 - RNA, 19 nt, Homo sapiens
  misc_RNA (1)...(19): siRNA sense strand
agauugauaugcugcugaa

SEQ ID NO: 1203108 - RNA, 19 nt, Homo sapiens
  misc_RNA (1)...(19): siRNA sense strand
uggagauacuaaugaaguu

SEQ ID NO: 1203109 - RNA, 19 nt, Homo sapiens
  misc_RNA (1)...(19): siRNA sense strand
gaccaggagaacuguguuu

SEQ ID NO: 1203110 - RNA, 19 nt, Homo sapiens
  misc_RNA (1)...(19): siRNA sense strand
ggaaguaccucauuuucac

SEQ ID NO: 1203111 - RNA, 19 nt, Homo sapiens
  misc_RNA (1)...(19): siRNA sense strand
gcugaacauugccuuaagg

SEQ ID NO: 1203112 - RNA, 19 nt, Homo sapiens
  misc_RNA (1)...(19): siRNA sense strand
gaaagcguaaagauagugu

SEQ ID NO: 1203113 - RNA, 19 nt, Homo sapiens
  misc_RNA (1)...(19): siRNA sense strand
uguuggagauggaauuuua

SEQ ID NO: 1203114 - RNA, 19 nt, Homo sapiens
  misc_RNA (1)...(19): siRNA sense strand
agaucuaccugaauuagca

SEQ ID NO: 1203115 - RNA, 19 nt, Homo sapiens
  misc_RNA (1)...(19): siRNA sense strand
uuaagugacucucucuuuu

SEQ ID NO: 1203116 - RNA, 19 nt, Homo sapiens
  misc_RNA (1)...(19): siRNA sense strand
ccaggagaacuguguuuau

SEQ ID NO: 1203117 - RNA, 19 nt, Homo sapiens
  misc_RNA (1)...(19): siRNA sense strand
cuggacagguguaugaugu

SEQ ID NO: 1203118 - RNA, 19 nt, Homo sapiens
  misc_RNA (1)...(19): siRNA sense strand
agagaucuuuguccuucaa

SEQ ID NO: 1203119 - RNA, 19 nt, Homo sapiens
  misc_RNA (1)...(19): siRNA sense strand
ugaaauuccggacauuaau

SEQ ID NO: 1203120 - RNA, 19 nt, Homo sapiens
  misc_RNA (1)...(19): siRNA sense strand
ggagauacuaaugaaguug

SEQ ID NO: 1203121 - RNA, 19 nt, Homo sapiens
  misc_RNA (1)...(19): siRNA sense strand
cauuaacgaagcuagaauu

SEQ ID NO: 1203122 - RNA, 19 nt, Homo sapiens
  misc_RNA (1)...(19): siRNA sense strand
cuggagaaaguacauuuaa

SEQ ID NO: 1203123 - RNA, 19 nt, Homo sapiens
  misc_RNA (1)...(19): siRNA sense strand
ucaccuuguuaaagagauu

SEQ ID NO: 1203124 - RNA, 19 nt, Homo sapiens
  misc_RNA (1)...(19): siRNA sense strand
cuuaagugacucucucuuu

SEQ ID NO: 1203125 - RNA, 19 nt, Homo sapiens
  misc_RNA (1)...(19): siRNA sense strand
gagugacgcccuuagaagu

SEQ ID NO: 1203126 - RNA, 19 nt, Homo sapiens
  misc_RNA (1)...(19): siRNA sense strand
ccuuagaaguggauuaacu

SEQ ID NO: 1203127 - RNA, 19 nt, Homo sapiens
  misc_RNA (1)...(19): siRNA sense strand
ggaauaaccuguucaagua

SEQ ID NO: 1203128 - RNA, 19 nt, Homo sapiens
  misc_RNA (1)...(19): siRNA sense strand
ccaaagaacuggacucgua

SEQ ID NO: 1203129 - RNA, 19 nt, Homo sapiens
  misc_RNA (1)...(19): siRNA sense strand
gaacauggcucagaugaau

SEQ ID NO: 1203130 - RNA, 19 nt, Homo sapiens
  misc_RNA (1)...(19): siRNA sense strand
uuaaagagcuuccaaagaa

SEQ ID NO: 1203131 - RNA, 19 nt, Homo sapiens
  misc_RNA (1)...(19): siRNA sense strand
cagaauagcagcucauuua

SEQ ID NO: 1203132 - RNA, 19 nt, Homo sapiens
  misc_RNA (1)...(19): siRNA sense strand
ggugaggucuguuucaaua

SEQ ID NO: 1203133 - RNA, 19 nt, Homo sapiens
  misc_RNA (1)...(19): siRNA sense strand
ggaauauacuggagaaaug

SEQ ID NO: 1203134 - RNA, 19 nt, Homo sapiens
  misc_RNA (1)...(19): siRNA sense strand
gcucaacgcuuuagacaug

SEQ ID NO: 1203135 - RNA, 19 nt, Homo sapiens
  misc_RNA (1)...(19): siRNA sense strand
gaaauaaagucaugacacu

SEQ ID NO: 1203136 - RNA, 19 nt, Homo sapiens
  misc_RNA (1)...(19): siRNA sense strand
guacgaccuucaugcauua

SEQ ID NO: 1203137 - RNA, 19 nt, Homo sapiens
  misc_RNA (1)...(19): siRNA sense strand
gcagaaauguggccucuuc

SEQ ID NO: 1203138 - RNA, 19 nt, Homo sapiens
  misc_RNA (1)...(19): siRNA sense strand
ccacauaagugcaauagug

SEQ ID NO: 1203139 - RNA, 19 nt, Homo sapiens
  misc_RNA (1)...(19): siRNA sense strand
gggaggagcuacucaagaa

SEQ ID NO: 1203140 - RNA, 19 nt, Homo sapiens
  misc_RNA (1)...(19): siRNA sense strand
gcauugaaaucguggcaua

SEQ ID NO: 1203141 - RNA, 19 nt, Homo sapiens
  misc_RNA (1)...(19): siRNA sense strand
ggaaugugcuauggauaua

SEQ ID NO: 1203142 - RNA, 19 nt, Homo sapiens
  misc_RNA (1)...(19): siRNA sense strand
agacaaagcagaagagaua

SEQ ID NO: 1203143 - RNA, 19 nt, Homo sapiens
  misc_RNA (1)...(19): siRNA sense strand
ccacugaguuguuguuuga

SEQ ID NO: 1203144 - RNA, 19 nt, Homo sapiens
  misc_RNA (1)...(19): siRNA sense strand
caaagaaaguuaugaaagg

SEQ ID NO: 1203145 - RNA, 19 nt, Homo sapiens
  misc_RNA (1)...(19): siRNA sense strand
gaagacaucugacgaagac

SEQ ID NO: 1203146 - RNA, 19 nt, Homo sapiens
  misc_RNA (1)...(19): siRNA sense strand
uaacagcagccaagucuua

SEQ ID NO: 1203147 - RNA, 19 nt, Homo sapiens
  misc_RNA (1)...(19): siRNA sense strand
gagcgacccuuuauggauu

SEQ ID NO: 1203148 - RNA, 19 nt, Homo sapiens
  misc_RNA (1)...(19): siRNA sense strand
gaacaugaacaaagaauca

SEQ ID NO: 1203149 - RNA, 19 nt, Homo sapiens
  misc_RNA (1)...(19): siRNA sense strand
ggagacauccugaaauuug

SEQ ID NO: 1203150 - RNA, 19 nt, Homo sapiens
  misc_RNA (1)...(19): siRNA sense strand
cuuccuaucuucaucauua

SEQ ID NO: 1203151 - RNA, 19 nt, Homo sapiens
  misc_RNA (1)...(19): siRNA sense strand
ggauuuggccauugaguua

SEQ ID NO: 1203152 - RNA, 19 nt, Homo sapiens
  misc_RNA (1)...(19): siRNA sense strand
cgaccuucaugcauuauua

SEQ ID NO: 1203153 - RNA, 19 nt, Homo sapiens
  misc_RNA (1)...(19): siRNA sense strand
gagaaagucauguuuggua

SEQ ID NO: 1203154 - RNA, 19 nt, Homo sapiens
  misc_RNA (1)...(19): siRNA sense strand
gagaaaugcuggcugaaca

SEQ ID NO: 1203155 - RNA, 19 nt, Homo sapiens
  misc_RNA (1)...(19): siRNA sense strand
gaagcagauugauaacaaa

SEQ ID NO: 1203156 - RNA, 19 nt, Homo sapiens
  misc_RNA (1)...(19): siRNA sense strand
caacuuaaucuccuuguuu

SEQ ID NO: 1203157 - RNA, 19 nt, Homo sapiens
  misc_RNA (1)...(19): siRNA sense strand
ugaagcagauugauaacaa

SEQ ID NO: 1203158 - RNA, 19 nt, Homo sapiens
  misc_RNA (1)...(19): siRNA sense strand
gaaccaugacacuuacuua

SEQ ID NO: 1203159 - RNA, 19 nt, Homo sapiens
  misc_RNA (1)...(19): siRNA sense strand
ccaccuggcuggcuacaaa

SEQ ID NO: 1203160 - RNA, 19 nt, Homo sapiens
  misc_RNA (1)...(19): siRNA sense strand
gcagccaagucuuaaugua

SEQ ID NO: 1203161 - RNA, 19 nt, Homo sapiens
  misc_RNA (1)...(19): siRNA sense strand
gcuuacgucuguauauuaa

SEQ ID NO: 1203162 - RNA, 19 nt, Homo sapiens
  misc_RNA (1)...(19): siRNA sense strand
agaagaaccaugacacuua

SEQ ID NO: 1203163 - RNA, 19 nt, Homo sapiens
  misc_RNA (1)...(19): siRNA sense strand
ugacaaagccuuauauuac

SEQ ID NO: 1203164 - RNA, 19 nt, Homo sapiens
  misc_RNA (1)...(19): siRNA sense strand
caaauaggaccuggaauaa

SEQ ID NO: 1203165 - RNA, 19 nt, Homo sapiens
  misc_RNA (1)...(19): siRNA sense strand
agaccaaccuucgaaauaa

SEQ ID NO: 1203166 - RNA, 19 nt, Homo sapiens
  misc_RNA (1)...(19): siRNA sense strand
aagaucagcuuccaucaaa

SEQ ID NO: 1203167 - RNA, 19 nt, Homo sapiens
  misc_RNA (1)...(19): siRNA sense strand
gagaucaacuacuucaugu

SEQ ID NO: 1203168 - RNA, 19 nt, Homo sapiens
  misc_RNA (1)...(19): siRNA sense strand
ccaugacacuuacuuacua

SEQ ID NO: 1203169 - RNA, 19 nt, Homo sapiens
  misc_RNA (1)...(19): siRNA sense strand
gaagaaccaugacacuuac

SEQ ID NO: 1203170 - RNA, 19 nt, Homo sapiens
  misc_RNA (1)...(19): siRNA sense strand
gcaguuaugaugcaaauga

SEQ ID NO: 1203171 - RNA, 19 nt, Homo sapiens
  misc_RNA (1)...(19): siRNA sense strand
ccauuaagcuaacagagaa

SEQ ID NO: 1203172 - RNA, 19 nt, Homo sapiens
  misc_RNA (1)...(19): siRNA sense strand
acaaauaggaccuggaaua

SEQ ID NO: 1203173 - RNA, 19 nt, Homo sapiens
  misc_RNA (1)...(19): siRNA sense strand
uaaagagcuuccaaagaaa

SEQ ID NO: 1203174 - RNA, 19 nt, Homo sapiens
  misc_RNA (1)...(19): siRNA sense strand
ucgcaguccugaagaaaua

SEQ ID NO: 1203175 - RNA, 19 nt, Homo sapiens
  misc_RNA (1)...(19): siRNA sense strand
ggagcaugauugaaauuga

SEQ ID NO: 1203176 - RNA, 19 nt, Homo sapiens
  misc_RNA (1)...(19): siRNA sense strand
gaaauugcaucugcuuauc

SEQ ID NO: 1203177 - RNA, 19 nt, Homo sapiens
  misc_RNA (1)...(19): siRNA sense strand
agaagaagaugcccacaga

SEQ ID NO: 1203178 - RNA, 19 nt, Homo sapiens
  misc_RNA (1)...(19): siRNA sense strand
gagggaagcugugggauuc

SEQ ID NO: 1203179 - RNA, 19 nt, Homo sapiens
  misc_RNA (1)...(19): siRNA sense strand
cauguucaguucccuauuu

SEQ ID NO: 1203180 - RNA, 19 nt, Homo sapiens
  misc_RNA (1)...(19): siRNA sense strand
ccaaaucaauaaagucuuc

SEQ ID NO: 1203181 - RNA, 19 nt, Homo sapiens
  misc_RNA (1)...(19): siRNA sense strand
gaucaacuacuucauguau

SEQ ID NO: 1203182 - RNA, 19 nt, Homo sapiens
  misc_RNA (1)...(19): siRNA sense strand
gcuuggacauccugcuuua

SEQ ID NO: 1203183 - RNA, 19 nt, Homo sapiens
  misc_RNA (1)...(19): siRNA sense strand
gcagauacccgcaauugau

SEQ ID NO: 1203184 - RNA, 19 nt, Homo sapiens
  misc_RNA (1)...(19): siRNA sense strand
gaccaaccuucgaaauaaa

SEQ ID NO: 1203185 - RNA, 19 nt, Homo sapiens
  misc_RNA (1)...(19): siRNA sense strand
ggaagaaggccuagacauc

SEQ ID NO: 1203186 - RNA, 19 nt, Homo sapiens
  misc_RNA (1)...(19): siRNA sense strand
gcacaacuuuaccggcaaa

SEQ ID NO: 1203187 - RNA, 19 nt, Homo sapiens
  misc_RNA (1)...(19): siRNA sense strand
gaccggagcaugauugaaa

SEQ ID NO: 1203188 - RNA, 19 nt, Homo sapiens
  misc_RNA (1)...(19): siRNA sense strand
gaucuugagucucccauca

SEQ ID NO: 1203189 - RNA, 19 nt, Homo sapiens
  misc_RNA (1)...(19): siRNA sense strand
ggcuaugucucauggauuu

SEQ ID NO: 1203190 - RNA, 19 nt, Homo sapiens
  misc_RNA (1)...(19): siRNA sense strand
gaaaagccaugcacuugaa

SEQ ID NO: 1203191 - RNA, 19 nt, Homo sapiens
  misc_RNA (1)...(19): siRNA sense strand
gcaacagaaaggaggauua

SEQ ID NO: 1203192 - RNA, 19 nt, Homo sapiens
  misc_RNA (1)...(19): siRNA sense strand
ugaaagguguugcagauuc

SEQ ID NO: 1203193 - RNA, 19 nt, Homo sapiens
  misc_RNA (1)...(19): siRNA sense strand
ucacagugguaauuaaaug

SEQ ID NO: 1203194 - RNA, 19 nt, Homo sapiens
  misc_RNA (1)...(19): siRNA sense strand
gacaaagccuuauauuacu

SEQ ID NO: 1203195 - RNA, 19 nt, Homo sapiens
  misc_RNA (1)...(19): siRNA sense strand
cuaguggaaucuaacauuu

SEQ ID NO: 1203196 - RNA, 19 nt, Homo sapiens
  misc_RNA (1)...(19): siRNA sense strand
ccaggaugaugauguacua

SEQ ID NO: 1203197 - RNA, 19 nt, Homo sapiens
  misc_RNA (1)...(19): siRNA sense strand
gaaaggcgagggcauugaa

SEQ ID NO: 1203198 - RNA, 19 nt, Homo sapiens
  misc_RNA (1)...(19): siRNA sense strand
gaauuucuuugaccacguu

SEQ ID NO: 1203199 - RNA, 19 nt, Homo sapiens
  misc_RNA (1)...(19): siRNA sense strand
uaaggaaagugaagaaguc

SEQ ID NO: 1203200 - RNA, 19 nt, Homo sapiens
  misc_RNA (1)...(19): siRNA sense strand
gaaagguguugcagauucu

SEQ ID NO: 1203201 - RNA, 19 nt, Homo sapiens
  misc_RNA (1)...(19): siRNA sense strand
ucaaagaacagucagagaa

SEQ ID NO: 1203202 - RNA, 19 nt, Homo sapiens
  misc_RNA (1)...(19): siRNA sense strand
gacccuuuauggauuauuu

SEQ ID NO: 1203203 - RNA, 19 nt, Homo sapiens
  misc_RNA (1)...(19): siRNA sense strand
caacagaauccucaaguuc

SEQ ID NO: 1203204 - RNA, 19 nt, Homo sapiens
  misc_RNA (1)...(19): siRNA sense strand
gugaagaaauccuagagau

SEQ ID NO: 1203205 - RNA, 19 nt, Homo sapiens
  misc_RNA (1)...(19): siRNA sense strand
gcaucuauagcuacaguua

SEQ ID NO: 1203206 - RNA, 19 nt, Homo sapiens
  misc_RNA (1)...(19): siRNA sense strand
ccauauccaugucgagaaa

SEQ ID NO: 1203207 - RNA, 19 nt, Homo sapiens
  misc_RNA (1)...(19): siRNA sense strand
gcugaagccugauccugaa

SEQ ID NO: 1203208 - RNA, 19 nt, Homo sapiens
  misc_RNA (1)...(19): siRNA sense strand
gaacaccaccuacauuguc

SEQ ID NO: 1203209 - RNA, 19 nt, Homo sapiens
  misc_RNA (1)...(19): siRNA sense strand
ucuacugucuucuuaauga

SEQ ID NO: 1203210 - RNA, 19 nt, Homo sapiens
  misc_RNA (1)...(19): siRNA sense strand
gggcugcucuuuccucugu

SEQ ID NO: 1203211 - RNA, 19 nt, Homo sapiens
  misc_RNA (1)...(19): siRNA sense strand
ucagagagcaguuaagguu

SEQ ID NO: 1203212 - RNA, 19 nt, Homo sapiens
  misc_RNA (1)...(19): siRNA sense strand
cagaccaaccuucgaaaua

SEQ ID NO: 1203213 - RNA, 19 nt, Homo sapiens
  misc_RNA (1)...(19): siRNA sense strand
uaugaaagguguugcagau

SEQ ID NO: 1203214 - RNA, 19 nt, Homo sapiens
  misc_RNA (1)...(19): siRNA sense strand
gagcuuccaaagaaaguua

SEQ ID NO: 1203215 - RNA, 19 nt, Homo sapiens
  misc_RNA (1)...(19): siRNA sense strand
cuaauaccguggacaauca

SEQ ID NO: 1203216 - RNA, 19 nt, Homo sapiens
  misc_RNA (1)...(19): siRNA sense strand
ucaaccgaaucuuuccuua

SEQ ID NO: 1203217 - RNA, 19 nt, Homo sapiens
  misc_RNA (1)...(19): siRNA sense strand
gauccucaacuaccacaua

SEQ ID NO: 1203218 - RNA, 19 nt, Homo sapiens
  misc_RNA (1)...(19): siRNA sense strand
ccugauggcuuacgucugu

SEQ ID NO: 1203219 - RNA, 19 nt, Homo sapiens
  misc_RNA (1)...(19): siRNA sense strand
gaaaaguucuacugucuuc

SEQ ID NO: 1203220 - RNA, 19 nt, Homo sapiens
  misc_RNA (1)...(19): siRNA sense strand
guccugauguuuguugaua

SEQ ID NO: 1203221 - RNA, 19 nt, Homo sapiens
  misc_RNA (1)...(19): siRNA sense strand
ccuggaacaucaugaggua

SEQ ID NO: 1203222 - RNA, 19 nt, Homo sapiens
  misc_RNA (1)...(19): siRNA sense strand
cuagacacuuguaaacauu

SEQ ID NO: 1203223 - RNA, 19 nt, Homo sapiens
  misc_RNA (1)...(19): siRNA sense strand
gcugugggauuccauuuua

SEQ ID NO: 1203224 - RNA, 19 nt, Homo sapiens
  misc_RNA (1)...(19): siRNA sense strand
cguggacaaucauuucuaa

SEQ ID NO: 1203225 - RNA, 19 nt, Homo sapiens
  misc_RNA (1)...(19): siRNA sense strand
ucuaccaccugauggcuua

SEQ ID NO: 1203226 - RNA, 19 nt, Homo sapiens
  misc_RNA (1)...(19): siRNA sense strand
ggacuuuauuccucuguag

SEQ ID NO: 1203227 - RNA, 19 nt, Homo sapiens
  misc_RNA (1)...(19): siRNA sense strand
gagaaacacugaccuuaua

SEQ ID NO: 1203228 - RNA, 19 nt, Homo sapiens
  misc_RNA (1)...(19): siRNA sense strand
acacugaccuuauauguga

SEQ ID NO: 1203229 - RNA, 19 nt, Homo sapiens
  misc_RNA (1)...(19): siRNA sense strand
gggcagugcuguuguuguu

SEQ ID NO: 1203230 - RNA, 19 nt, Homo sapiens
  misc_RNA (1)...(19): siRNA sense strand
gcagugcuguuguuguugu

SEQ ID NO: 1203231 - RNA, 19 nt, Homo sapiens
  misc_RNA (1)...(19): siRNA sense strand
ucgcagaugugguggagaa

SEQ ID NO: 1203232 - RNA, 19 nt, Homo sapiens
  misc_RNA (1)...(19): siRNA sense strand
cgagaaacacugaccuuau

SEQ ID NO: 1203233 - RNA, 19 nt, Homo sapiens
  misc_RNA (1)...(19): siRNA sense strand
gaaacacugaccuuauaug

SEQ ID NO: 1203234 - RNA, 19 nt, Homo sapiens
  misc_RNA (1)...(19): siRNA sense strand
gcgcagaguccgugugaga

SEQ ID NO: 1203235 - RNA, 19 nt, Homo sapiens
  misc_RNA (1)...(19): siRNA sense strand
gaaggucacagcuggaauc

SEQ ID NO: 1203236 - RNA, 19 nt, Homo sapiens
  misc_RNA (1)...(19): siRNA sense strand
caccugccguggucuauau

SEQ ID NO: 1203237 - RNA, 19 nt, Homo sapiens
  misc_RNA (1)...(19): siRNA sense strand
gcuaagcggcgacacguau

SEQ ID NO: 1203238 - RNA, 19 nt, Homo sapiens
  misc_RNA (1)...(19): siRNA sense strand
ggaccggcacccuuucuug

SEQ ID NO: 1203239 - RNA, 19 nt, Homo sapiens
  misc_RNA (1)...(19): siRNA sense strand
ucgcaacgcugaggauuca

SEQ ID NO: 1203240 - RNA, 19 nt, Homo sapiens
  misc_RNA (1)...(19): siRNA sense strand
gggagcagaugguacaaaa

SEQ ID NO: 1203241 - RNA, 19 nt, Homo sapiens
  misc_RNA (1)...(19): siRNA sense strand
aaacacugaccuuauaugu

SEQ ID NO: 1203242 - RNA, 19 nt, Homo sapiens
  misc_RNA (1)...(19): siRNA sense strand
acaaaaugcugaagauguu

SEQ ID NO: 1203243 - RNA, 19 nt, Homo sapiens
  misc_RNA (1)...(19): siRNA sense strand
gcaccugccguggucuaua

SEQ ID NO: 1203244 - RNA, 19 nt, Homo sapiens
  misc_RNA (1)...(19): siRNA sense strand
ggaggugauuggagugaac

SEQ ID NO: 1203245 - RNA, 19 nt, Homo sapiens
  misc_RNA (1)...(19): siRNA sense strand
gagcagaugguacaaaaug

SEQ ID NO: 1203246 - RNA, 19 nt, Homo sapiens
  misc_RNA (1)...(19): siRNA sense strand
ugcugaagauguuuaugaa

SEQ ID NO: 1203247 - RNA, 19 nt, Homo sapiens
  misc_RNA (1)...(19): siRNA sense strand
gcagaugugguggagaaga

SEQ ID NO: 1203248 - RNA, 19 nt, Homo sapiens
  misc_RNA (1)...(19): siRNA sense strand
gggaggugauuggagugaa

SEQ ID NO: 1203249 - RNA, 19 nt, Homo sapiens
  misc_RNA (1)...(19): siRNA sense strand
ugaagauguuuaugaagcu

SEQ ID NO: 1203250 - RNA, 19 nt, Homo sapiens
  misc_RNA (1)...(19): siRNA sense strand
gccgaugggcucauuguca

SEQ ID NO: 1203251 - RNA, 19 nt, Homo sapiens
  misc_RNA (1)...(19): siRNA sense strand
cagcuggaaucuccuuugc

SEQ ID NO: 1203252 - RNA, 19 nt, Homo sapiens
  misc_RNA (1)...(19): siRNA sense strand
ccuuugccaucccuucuga

SEQ ID NO: 1203253 - RNA, 19 nt, Homo sapiens
  misc_RNA (1)...(19): siRNA sense strand
acgagaaacacugaccuua

SEQ ID NO: 1203254 - RNA, 19 nt, Homo sapiens
  misc_RNA (1)...(19): siRNA sense strand
gacgagaaacacugaccuu

SEQ ID NO: 1203255 - RNA, 19 nt, Homo sapiens
  misc_RNA (1)...(19): siRNA sense strand
gguacaaaaugcugaagau

SEQ ID NO: 1203256 - RNA, 19 nt, Homo sapiens
  misc_RNA (1)...(19): siRNA sense strand
gagugaacaccaugaaggu

SEQ ID NO: 1203257 - RNA, 19 nt, Homo sapiens
  misc_RNA (1)...(19): siRNA sense strand
gaagcuguucgaacccaau

SEQ ID NO: 1203258 - RNA, 19 nt, Homo sapiens
  misc_RNA (1)...(19): siRNA sense strand
agaaacacugaccuuauau

SEQ ID NO: 1203259 - RNA, 19 nt, Homo sapiens
  misc_RNA (1)...(19): siRNA sense strand
cagaugugguggagaagac

SEQ ID NO: 1203260 - RNA, 19 nt, Homo sapiens
  misc_RNA (1)...(19): siRNA sense strand
guacaacuucaucgcagau

SEQ ID NO: 1203261 - RNA, 19 nt, Homo sapiens
  misc_RNA (1)...(19): siRNA sense strand
uaagcggcgacacguauga

SEQ ID NO: 1203262 - RNA, 19 nt, Homo sapiens
  misc_RNA (1)...(19): siRNA sense strand
gcggccuggugaugugauu

SEQ ID NO: 1203263 - RNA, 19 nt, Homo sapiens
  misc_RNA (1)...(19): siRNA sense strand
gggaggagaccccguuuga

SEQ ID NO: 1203264 - RNA, 19 nt, Homo sapiens
  misc_RNA (1)...(19): siRNA sense strand
ggagucaguacaacuucau

SEQ ID NO: 1203265 - RNA, 19 nt, Homo sapiens
  misc_RNA (1)...(19): siRNA sense strand
gaugugauuuuggccauug

SEQ ID NO: 1203266 - RNA, 19 nt, Homo sapiens
  misc_RNA (1)...(19): siRNA sense strand
cggagucaguacaacuuca

SEQ ID NO: 1203267 - RNA, 19 nt, Homo sapiens
  misc_RNA (1)...(19): siRNA sense strand
gagaaacacugaccuuaua

SEQ ID NO: 1203268 - RNA, 19 nt, Homo sapiens
  misc_RNA (1)...(19): siRNA sense strand
acacugaccuuauauguga

SEQ ID NO: 1203269 - RNA, 19 nt, Homo sapiens
  misc_RNA (1)...(19): siRNA sense strand
gggcagugcuguuguuguu

SEQ ID NO: 1203270 - RNA, 19 nt, Homo sapiens
  misc_RNA (1)...(19): siRNA sense strand
gcagugcuguuguuguugu

SEQ ID NO: 1203271 - RNA, 19 nt, Homo sapiens
  misc_RNA (1)...(19): siRNA sense strand
ucgcagaugugguggagaa

SEQ ID NO: 1203272 - RNA, 19 nt, Homo sapiens
  misc_RNA (1)...(19): siRNA sense strand
cgagaaacacugaccuuau

SEQ ID NO: 1203273 - RNA, 19 nt, Homo sapiens
  misc_RNA (1)...(19): siRNA sense strand
gaaacacugaccuuauaug

SEQ ID NO: 1203274 - RNA, 19 nt, Homo sapiens
  misc_RNA (1)...(19): siRNA sense strand
gcgcagaguccgugugaga

SEQ ID NO: 1203275 - RNA, 19 nt, Homo sapiens
  misc_RNA (1)...(19): siRNA sense strand
gaaggucacagcuggaauc

SEQ ID NO: 1203276 - RNA, 19 nt, Homo sapiens
  misc_RNA (1)...(19): siRNA sense strand
caccugccguggucuauau

SEQ ID NO: 1203277 - RNA, 19 nt, Homo sapiens
  misc_RNA (1)...(19): siRNA sense strand
gcuaagcggcgacacguau

SEQ ID NO: 1203278 - RNA, 19 nt, Homo sapiens
  misc_RNA (1)...(19): siRNA sense strand
ggaccggcacccuuucuug

SEQ ID NO: 1203279 - RNA, 19 nt, Homo sapiens
  misc_RNA (1)...(19): siRNA sense strand
ucgcaacgcugaggauuca

SEQ ID NO: 1203280 - RNA, 19 nt, Homo sapiens
  misc_RNA (1)...(19): siRNA sense strand
gggagcagaugguacaaaa

SEQ ID NO: 1203281 - RNA, 19 nt, Homo sapiens
  misc_RNA (1)...(19): siRNA sense strand
aaacacugaccuuauaugu

SEQ ID NO: 1203282 - RNA, 19 nt, Homo sapiens
  misc_RNA (1)...(19): siRNA sense strand
acaaaaugcugaagauguu

SEQ ID NO: 1203283 - RNA, 19 nt, Homo sapiens
  misc_RNA (1)...(19): siRNA sense strand
gcaccugccguggucuaua

SEQ ID NO: 1203284 - RNA, 19 nt, Homo sapiens
  misc_RNA (1)...(19): siRNA sense strand
ggaggugauuggagugaac

SEQ ID NO: 1203285 - RNA, 19 nt, Homo sapiens
  misc_RNA (1)...(19): siRNA sense strand
gagcagaugguacaaaaug

SEQ ID NO: 1203286 - RNA, 19 nt, Homo sapiens
  misc_RNA (1)...(19): siRNA sense strand
ugcugaagauguuuaugaa

SEQ ID NO: 1203287 - RNA, 19 nt, Homo sapiens
  misc_RNA (1)...(19): siRNA sense strand
gcagaugugguggagaaga

SEQ ID NO: 1203288 - RNA, 19 nt, Homo sapiens
  misc_RNA (1)...(19): siRNA sense strand
gggaggugauuggagugaa

SEQ ID NO: 1203289 - RNA, 19 nt, Homo sapiens
  misc_RNA (1)...(19): siRNA sense strand
ugaagauguuuaugaagcu

SEQ ID NO: 1203290 - RNA, 19 nt, Homo sapiens
  misc_RNA (1)...(19): siRNA sense strand
gccgaugggcucauuguca

SEQ ID NO: 1203291 - RNA, 19 nt, Homo sapiens
  misc_RNA (1)...(19): siRNA sense strand
cagcuggaaucuccuuugc

SEQ ID NO: 1203292 - RNA, 19 nt, Homo sapiens
  misc_RNA (1)...(19): siRNA sense strand
ccuuugccaucccuucuga

SEQ ID NO: 1203293 - RNA, 19 nt, Homo sapiens
  misc_RNA (1)...(19): siRNA sense strand
acgagaaacacugaccuua

SEQ ID NO: 1203294 - RNA, 19 nt, Homo sapiens
  misc_RNA (1)...(19): siRNA sense strand
gacgagaaacacugaccuu

SEQ ID NO: 1203295 - RNA, 19 nt, Homo sapiens
  misc_RNA (1)...(19): siRNA sense strand
gguacaaaaugcugaagau

SEQ ID NO: 1203296 - RNA, 19 nt, Homo sapiens
  misc_RNA (1)...(19): siRNA sense strand
gagugaacaccaugaaggu

SEQ ID NO: 1203297 - RNA, 19 nt, Homo sapiens
  misc_RNA (1)...(19): siRNA sense strand
gaagcuguucgaacccaau

SEQ ID NO: 1203298 - RNA, 19 nt, Homo sapiens
  misc_RNA (1)...(19): siRNA sense strand
agaaacacugaccuuauau

SEQ ID NO: 1203299 - RNA, 19 nt, Homo sapiens
  misc_RNA (1)...(19): siRNA sense strand
cagaugugguggagaagac

SEQ ID NO: 1203300 - RNA, 19 nt, Homo sapiens
  misc_RNA (1)...(19): siRNA sense strand
guacaacuucaucgcagau

SEQ ID NO: 1203301 - RNA, 19 nt, Homo sapiens
  misc_RNA (1)...(19): siRNA sense strand
uaagcggcgacacguauga

SEQ ID NO: 1203302 - RNA, 19 nt, Homo sapiens
  misc_RNA (1)...(19): siRNA sense strand
gcggccuggugaugugauu

SEQ ID NO: 1203303 - RNA, 19 nt, Homo sapiens
  misc_RNA (1)...(19): siRNA sense strand
gggaggagaccccguuuga

SEQ ID NO: 1203304 - RNA, 19 nt, Homo sapiens
  misc_RNA (1)...(19): siRNA sense strand
ggagucaguacaacuucau

SEQ ID NO: 1203305 - RNA, 19 nt, Homo sapiens
  misc_RNA (1)...(19): siRNA sense strand
gaugugauuuuggccauug

SEQ ID NO: 1203306 - RNA, 19 nt, Homo sapiens
  misc_RNA (1)...(19): siRNA sense strand
cggagucaguacaacuuca

SEQ ID NO: 1203307 - RNA, 19 nt, Homo sapiens
  misc_RNA (1)...(19): siRNA sense strand
gagauaaaguccuugauga

SEQ ID NO: 1203308 - RNA, 19 nt, Homo sapiens
  misc_RNA (1)...(19): siRNA sense strand
ggaauuaaauccuuagucu

SEQ ID NO: 1203309 - RNA, 19 nt, Homo sapiens
  misc_RNA (1)...(19): siRNA sense strand
gaugaaaccugaucccaau

SEQ ID NO: 1203310 - RNA, 19 nt, Homo sapiens
  misc_RNA (1)...(19): siRNA sense strand
gggauuccauauucaauuu

SEQ ID NO: 1203311 - RNA, 19 nt, Homo sapiens
  misc_RNA (1)...(19): siRNA sense strand
ucacuacaauuccuggaua

SEQ ID NO: 1203312 - RNA, 19 nt, Homo sapiens
  misc_RNA (1)...(19): siRNA sense strand
gagagauggugcuggagua

SEQ ID NO: 1203313 - RNA, 19 nt, Homo sapiens
  misc_RNA (1)...(19): siRNA sense strand
ugugauggaugauacaaua

SEQ ID NO: 1203314 - RNA, 19 nt, Homo sapiens
  misc_RNA (1)...(19): siRNA sense strand
gggagauccuggcaaagua

SEQ ID NO: 1203315 - RNA, 19 nt, Homo sapiens
  misc_RNA (1)...(19): siRNA sense strand
gaaaccugaucccaauuug

SEQ ID NO: 1203316 - RNA, 19 nt, Homo sapiens
  misc_RNA (1)...(19): siRNA sense strand
uuacguaucuggaaguuau

SEQ ID NO: 1203317 - RNA, 19 nt, Homo sapiens
  misc_RNA (1)...(19): siRNA sense strand
gauaaaguccuugaugaaa

SEQ ID NO: 1203318 - RNA, 19 nt, Homo sapiens
  misc_RNA (1)...(19): siRNA sense strand
gaaaauagcagcugaauac

SEQ ID NO: 1203319 - RNA, 19 nt, Homo sapiens
  misc_RNA (1)...(19): siRNA sense strand
caaccucccucacuacaau

SEQ ID NO: 1203320 - RNA, 19 nt, Homo sapiens
  misc_RNA (1)...(19): siRNA sense strand
uggaaucgcugguuuggaa

SEQ ID NO: 1203321 - RNA, 19 nt, Homo sapiens
  misc_RNA (1)...(19): siRNA sense strand
caaugacucuggcuauuca

SEQ ID NO: 1203322 - RNA, 19 nt, Homo sapiens
  misc_RNA (1)...(19): siRNA sense strand
caauuuccuuuaagaggua

SEQ ID NO: 1203323 - RNA, 19 nt, Homo sapiens
  misc_RNA (1)...(19): siRNA sense strand
gagcauuacauguucuuaa

SEQ ID NO: 1203324 - RNA, 19 nt, Homo sapiens
  misc_RNA (1)...(19): siRNA sense strand
gguaucacauggaucauca

SEQ ID NO: 1203325 - RNA, 19 nt, Homo sapiens
  misc_RNA (1)...(19): siRNA sense strand
ccaaaccaauuacguaucu

SEQ ID NO: 1203326 - RNA, 19 nt, Homo sapiens
  misc_RNA (1)...(19): siRNA sense strand
ggauaaaaguacuguauga

SEQ ID NO: 1203327 - RNA, 19 nt, Homo sapiens
  misc_RNA (1)...(19): siRNA sense strand
gcaaagcaauguggaaucg

SEQ ID NO: 1203328 - RNA, 19 nt, Homo sapiens
  misc_RNA (1)...(19): siRNA sense strand
uaagagguaucacauggau

SEQ ID NO: 1203329 - RNA, 19 nt, Homo sapiens
  misc_RNA (1)...(19): siRNA sense strand
uacaauaagucccuacuca

SEQ ID NO: 1203330 - RNA, 19 nt, Homo sapiens
  misc_RNA (1)...(19): siRNA sense strand
gcguuuggcaguugcauua

SEQ ID NO: 1203331 - RNA, 19 nt, Homo sapiens
  misc_RNA (1)...(19): siRNA sense strand
cauguuggcagcaucuuua

SEQ ID NO: 1203332 - RNA, 19 nt, Homo sapiens
  misc_RNA (1)...(19): siRNA sense strand
gguuuggaauguuugcuaa

SEQ ID NO: 1203333 - RNA, 19 nt, Homo sapiens
  misc_RNA (1)...(19): siRNA sense strand
cuauugggauuccauauuc

SEQ ID NO: 1203334 - RNA, 19 nt, Homo sapiens
  misc_RNA (1)...(19): siRNA sense strand
uggcgucgauguagauauu

SEQ ID NO: 1203335 - RNA, 19 nt, Homo sapiens
  misc_RNA (1)...(19): siRNA sense strand
ggacuggaaaugggucaua

SEQ ID NO: 1203336 - RNA, 19 nt, Homo sapiens
  misc_RNA (1)...(19): siRNA sense strand
auaagucccuacucaagaa

SEQ ID NO: 1203337 - RNA, 19 nt, Homo sapiens
  misc_RNA (1)...(19): siRNA sense strand
uuaugggccucugaauuua

SEQ ID NO: 1203338 - RNA, 19 nt, Homo sapiens
  misc_RNA (1)...(19): siRNA sense strand
uagcugagcauuacauguu

SEQ ID NO: 1203339 - RNA, 19 nt, Homo sapiens
  misc_RNA (1)...(19): siRNA sense strand
gccgggagauccuggcaaa

SEQ ID NO: 1203340 - RNA, 19 nt, Homo sapiens
  misc_RNA (1)...(19): siRNA sense strand
gauggaugauacaauaagu

SEQ ID NO: 1203341 - RNA, 19 nt, Homo sapiens
  misc_RNA (1)...(19): siRNA sense strand
ugaaaccugaucccaauuu

SEQ ID NO: 1203342 - RNA, 19 nt, Homo sapiens
  misc_RNA (1)...(19): siRNA sense strand
uaaaagacuuggacuggaa

SEQ ID NO: 1203343 - RNA, 19 nt, Homo sapiens
  misc_RNA (1)...(19): siRNA sense strand
gaucccaauuugauaugga

SEQ ID NO: 1203344 - RNA, 19 nt, Homo sapiens
  misc_RNA (1)...(19): siRNA sense strand
uagauauuccuaccgauuu

SEQ ID NO: 1203345 - RNA, 19 nt, Homo sapiens
  misc_RNA (1)...(19): siRNA sense strand
aaauagcagcugaauacua

SEQ ID NO: 1203346 - RNA, 19 nt, Homo sapiens
  misc_RNA (1)...(19): siRNA sense strand
gagggcugguucuucugua

SEQ ID NO: 1203347 - RNA, 19 nt, Homo sapiens
  misc_RNA (1)...(19): siRNA sense strand
auuaugggccucugaauuu

SEQ ID NO: 1203348 - RNA, 19 nt, Homo sapiens
  misc_RNA (1)...(19): siRNA sense strand
caauaagucccuacucaag

SEQ ID NO: 1203349 - RNA, 19 nt, Homo sapiens
  misc_RNA (1)...(19): siRNA sense strand
ucgcugguuuggaauguuu

SEQ ID NO: 1203350 - RNA, 19 nt, Homo sapiens
  misc_RNA (1)...(19): siRNA sense strand
ggagauccuggcaaaguau

SEQ ID NO: 1203351 - RNA, 19 nt, Homo sapiens
  misc_RNA (1)...(19): siRNA sense strand
gcagcugaauacuaugaca

SEQ ID NO: 1203352 - RNA, 19 nt, Homo sapiens
  misc_RNA (1)...(19): siRNA sense strand
uugcuaaucuuccuauugg

SEQ ID NO: 1203353 - RNA, 19 nt, Homo sapiens
  misc_RNA (1)...(19): siRNA sense strand
cacuacaauuccuggauaa

SEQ ID NO: 1203354 - RNA, 19 nt, Homo sapiens
  misc_RNA (1)...(19): siRNA sense strand
gacuggaaaugggucauau

SEQ ID NO: 1203355 - RNA, 19 nt, Homo sapiens
  misc_RNA (1)...(19): siRNA sense strand
cauuacauguucuuaaagg

SEQ ID NO: 1203356 - RNA, 19 nt, Homo sapiens
  misc_RNA (1)...(19): siRNA sense strand
gcacccaauuucuggacau

SEQ ID NO: 1203357 - RNA, 19 nt, Homo sapiens
  misc_RNA (1)...(19): siRNA sense strand
gagcugauggcgucgaugu

SEQ ID NO: 1203358 - RNA, 19 nt, Homo sapiens
  misc_RNA (1)...(19): siRNA sense strand
aauguggaaucgcugguuu

SEQ ID NO: 1203359 - RNA, 19 nt, Homo sapiens
  misc_RNA (1)...(19): siRNA sense strand
agauaaaguccuugaugaa

SEQ ID NO: 1203360 - RNA, 19 nt, Homo sapiens
  misc_RNA (1)...(19): siRNA sense strand
gaaugaagaggcaccaaaa

SEQ ID NO: 1203361 - RNA, 19 nt, Homo sapiens
  misc_RNA (1)...(19): siRNA sense strand
agagauaaaguccuugaug

SEQ ID NO: 1203362 - RNA, 19 nt, Homo sapiens
  misc_RNA (1)...(19): siRNA sense strand
ccagagauaaaguccuuga

SEQ ID NO: 1203363 - RNA, 19 nt, Homo sapiens
  misc_RNA (1)...(19): siRNA sense strand
gggccucugaauuuacuua

SEQ ID NO: 1203364 - RNA, 19 nt, Homo sapiens
  misc_RNA (1)...(19): siRNA sense strand
uggaauguuugcuaaucuu

SEQ ID NO: 1203365 - RNA, 19 nt, Homo sapiens
  misc_RNA (1)...(19): siRNA sense strand
auaaaguccuugaugaaac

SEQ ID NO: 1203366 - RNA, 19 nt, Homo sapiens
  misc_RNA (1)...(19): siRNA sense strand
ggaaaauagcagcugaaua

SEQ ID NO: 1203367 - RNA, 19 nt, Homo sapiens
  misc_RNA (1)...(19): siRNA sense strand
uauuaugggccucugaauu

SEQ ID NO: 1203368 - RNA, 19 nt, Homo sapiens
  misc_RNA (1)...(19): siRNA sense strand
guucuuaaagggucaugaa

SEQ ID NO: 1203369 - RNA, 19 nt, Homo sapiens
  misc_RNA (1)...(19): siRNA sense strand
ccuauugggauuccauauu

SEQ ID NO: 1203370 - RNA, 19 nt, Homo sapiens
  misc_RNA (1)...(19): siRNA sense strand
ugaugguucucacccaguu

SEQ ID NO: 1203371 - RNA, 19 nt, Homo sapiens
  misc_RNA (1)...(19): siRNA sense strand
agagguaucacauggauca

SEQ ID NO: 1203372 - RNA, 19 nt, Homo sapiens
  misc_RNA (1)...(19): siRNA sense strand
ggaauguuugcuaaucuuc

SEQ ID NO: 1203373 - RNA, 19 nt, Homo sapiens
  misc_RNA (1)...(19): siRNA sense strand
agaaugaagaggcaccaaa

SEQ ID NO: 1203374 - RNA, 19 nt, Homo sapiens
  misc_RNA (1)...(19): siRNA sense strand
augacaaccucccucacua

SEQ ID NO: 1203375 - RNA, 19 nt, Homo sapiens
  misc_RNA (1)...(19): siRNA sense strand
uagcagcugaauacuauga

SEQ ID NO: 1203376 - RNA, 19 nt, Homo sapiens
  misc_RNA (1)...(19): siRNA sense strand
cccaauuugauauggauua

SEQ ID NO: 1203377 - RNA, 19 nt, Homo sapiens
  misc_RNA (1)...(19): siRNA sense strand
ugacucuggcuauucauga

SEQ ID NO: 1203378 - RNA, 19 nt, Homo sapiens
  misc_RNA (1)...(19): siRNA sense strand
aauaagucccuacucaaga

SEQ ID NO: 1203379 - RNA, 19 nt, Homo sapiens
  misc_RNA (1)...(19): siRNA sense strand
ccuaugcguuuggcaguug

SEQ ID NO: 1203380 - RNA, 19 nt, Homo sapiens
  misc_RNA (1)...(19): siRNA sense strand
guuggcagcaucuuuacuu

SEQ ID NO: 1203381 - RNA, 19 nt, Homo sapiens
  misc_RNA (1)...(19): siRNA sense strand
uaaaguccuugaugaaacc

SEQ ID NO: 1203382 - RNA, 19 nt, Homo sapiens
  misc_RNA (1)...(19): siRNA sense strand
acaauaagucccuacucaa

SEQ ID NO: 1203383 - RNA, 19 nt, Homo sapiens
  misc_RNA (1)...(19): siRNA sense strand
uucaugagauugcccacaa

SEQ ID NO: 1203384 - RNA, 19 nt, Homo sapiens
  misc_RNA (1)...(19): siRNA sense strand
aaaccugaucccaauuuga

SEQ ID NO: 1203385 - RNA, 19 nt, Homo sapiens
  misc_RNA (1)...(19): siRNA sense strand
ucaaugacucuggcuauuc

SEQ ID NO: 1203386 - RNA, 19 nt, Homo sapiens
  misc_RNA (1)...(19): siRNA sense strand
guucuucuguaccgcuuuc

SEQ ID NO: 1203387 - RNA, 19 nt, Homo sapiens
  misc_RNA (1)...(19): siRNA sense strand
gugauggaugauacaauaa

SEQ ID NO: 1203388 - RNA, 19 nt, Homo sapiens
  misc_RNA (1)...(19): siRNA sense strand
uggcacaggucacuuuuga

SEQ ID NO: 1203389 - RNA, 19 nt, Homo sapiens
  misc_RNA (1)...(19): siRNA sense strand
gaaucgcugguuuggaaug

SEQ ID NO: 1203390 - RNA, 19 nt, Homo sapiens
  misc_RNA (1)...(19): siRNA sense strand
cucaaugacucuggcuauu

SEQ ID NO: 1203391 - RNA, 19 nt, Homo sapiens
  misc_RNA (1)...(19): siRNA sense strand
gcugauggcgucgauguag

SEQ ID NO: 1203392 - RNA, 19 nt, Homo sapiens
  misc_RNA (1)...(19): siRNA sense strand
gacaaccucccucacuaca

SEQ ID NO: 1203393 - RNA, 19 nt, Homo sapiens
  misc_RNA (1)...(19): siRNA sense strand
cccaauuucuggacauuuu

SEQ ID NO: 1203394 - RNA, 19 nt, Homo sapiens
  misc_RNA (1)...(19): siRNA sense strand
cacccaauuucuggacauu

SEQ ID NO: 1203395 - RNA, 19 nt, Homo sapiens
  misc_RNA (1)...(19): siRNA sense strand
gcauuacauguucuuaaag

SEQ ID NO: 1203396 - RNA, 19 nt, Homo sapiens
  misc_RNA (1)...(19): siRNA sense strand
uuugagggcugguucuucu

SEQ ID NO: 1203397 - RNA, 19 nt, Homo sapiens
  misc_RNA (1)...(19): siRNA sense strand
agucccuacucaagaauga

SEQ ID NO: 1203398 - RNA, 19 nt, Homo sapiens
  misc_RNA (1)...(19): siRNA sense strand
gauggcgucgauguagaua

SEQ ID NO: 1203399 - RNA, 19 nt, Homo sapiens
  misc_RNA (1)...(19): siRNA sense strand
aaccugaucccaauuugau

SEQ ID NO: 1203400 - RNA, 19 nt, Homo sapiens
  misc_RNA (1)...(19): siRNA sense strand
auccagagauaaaguccuu

SEQ ID NO: 1203401 - RNA, 19 nt, Homo sapiens
  misc_RNA (1)...(19): siRNA sense strand
ccugaucccaauuugauau

SEQ ID NO: 1203402 - RNA, 19 nt, Homo sapiens
  misc_RNA (1)...(19): siRNA sense strand
gggaauuaaauccuuaguc

SEQ ID NO: 1203403 - RNA, 19 nt, Homo sapiens
  misc_RNA (1)...(19): siRNA sense strand
gagauaaaguccuugauga

SEQ ID NO: 1203404 - RNA, 19 nt, Homo sapiens
  misc_RNA (1)...(19): siRNA sense strand
ggaauuaaauccuuagucu

SEQ ID NO: 1203405 - RNA, 19 nt, Homo sapiens
  misc_RNA (1)...(19): siRNA sense strand
gaugaaaccugaucccaau

SEQ ID NO: 1203406 - RNA, 19 nt, Homo sapiens
  misc_RNA (1)...(19): siRNA sense strand
gggauuccauauucaauuu

SEQ ID NO: 1203407 - RNA, 19 nt, Homo sapiens
  misc_RNA (1)...(19): siRNA sense strand
ucacuacaauuccuggaua

SEQ ID NO: 1203408 - RNA, 19 nt, Homo sapiens
  misc_RNA (1)...(19): siRNA sense strand
gagagauggugcuggagua

SEQ ID NO: 1203409 - RNA, 19 nt, Homo sapiens
  misc_RNA (1)...(19): siRNA sense strand
ugugauggaugauacaaua

SEQ ID NO: 1203410 - RNA, 19 nt, Homo sapiens
  misc_RNA (1)...(19): siRNA sense strand
gggagauccuggcaaagua

SEQ ID NO: 1203411 - RNA, 19 nt, Homo sapiens
  misc_RNA (1)...(19): siRNA sense strand
gaaaccugaucccaauuug

SEQ ID NO: 1203412 - RNA, 19 nt, Homo sapiens
  misc_RNA (1)...(19): siRNA sense strand
uuacguaucuggaaguuau

SEQ ID NO: 1203413 - RNA, 19 nt, Homo sapiens
  misc_RNA (1)...(19): siRNA sense strand
gauaaaguccuugaugaaa

SEQ ID NO: 1203414 - RNA, 19 nt, Homo sapiens
  misc_RNA (1)...(19): siRNA sense strand
gaaaauagcagcugaauac

SEQ ID NO: 1203415 - RNA, 19 nt, Homo sapiens
  misc_RNA (1)...(19): siRNA sense strand
caaccucccucacuacaau

SEQ ID NO: 1203416 - RNA, 19 nt, Homo sapiens
  misc_RNA (1)...(19): siRNA sense strand
uggaaucgcugguuuggaa

SEQ ID NO: 1203417 - RNA, 19 nt, Homo sapiens
  misc_RNA (1)...(19): siRNA sense strand
caaugacucuggcuauuca

SEQ ID NO: 1203418 - RNA, 19 nt, Homo sapiens
  misc_RNA (1)...(19): siRNA sense strand
caauuuccuuuaagaggua

SEQ ID NO: 1203419 - RNA, 19 nt, Homo sapiens
  misc_RNA (1)...(19): siRNA sense strand
gagcauuacauguucuuaa

SEQ ID NO: 1203420 - RNA, 19 nt, Homo sapiens
  misc_RNA (1)...(19): siRNA sense strand
gguaucacauggaucauca

SEQ ID NO: 1203421 - RNA, 19 nt, Homo sapiens
  misc_RNA (1)...(19): siRNA sense strand
ccaaaccaauuacguaucu

SEQ ID NO: 1203422 - RNA, 19 nt, Homo sapiens
  misc_RNA (1)...(19): siRNA sense strand
ggauaaaaguacuguauga

SEQ ID NO: 1203423 - RNA, 19 nt, Homo sapiens
  misc_RNA (1)...(19): siRNA sense strand
gcaaagcaauguggaaucg

SEQ ID NO: 1203424 - RNA, 19 nt, Homo sapiens
  misc_RNA (1)...(19): siRNA sense strand
uaagagguaucacauggau

SEQ ID NO: 1203425 - RNA, 19 nt, Homo sapiens
  misc_RNA (1)...(19): siRNA sense strand
uacaauaagucccuacuca

SEQ ID NO: 1203426 - RNA, 19 nt, Homo sapiens
  misc_RNA (1)...(19): siRNA sense strand
gcguuuggcaguugcauua

SEQ ID NO: 1203427 - RNA, 19 nt, Homo sapiens
  misc_RNA (1)...(19): siRNA sense strand
cauguuggcagcaucuuua

SEQ ID NO: 1203428 - RNA, 19 nt, Homo sapiens
  misc_RNA (1)...(19): siRNA sense strand
gguuuggaauguuugcuaa

SEQ ID NO: 1203429 - RNA, 19 nt, Homo sapiens
  misc_RNA (1)...(19): siRNA sense strand
cuauugggauuccauauuc

SEQ ID NO: 1203430 - RNA, 19 nt, Homo sapiens
  misc_RNA (1)...(19): siRNA sense strand
uggcgucgauguagauauu

SEQ ID NO: 1203431 - RNA, 19 nt, Homo sapiens
  misc_RNA (1)...(19): siRNA sense strand
ggacuggaaaugggucaua

SEQ ID NO: 1203432 - RNA, 19 nt, Homo sapiens
  misc_RNA (1)...(19): siRNA sense strand
auaagucccuacucaagaa

SEQ ID NO: 1203433 - RNA, 19 nt, Homo sapiens
  misc_RNA (1)...(19): siRNA sense strand
uuaugggccucugaauuua

SEQ ID NO: 1203434 - RNA, 19 nt, Homo sapiens
  misc_RNA (1)...(19): siRNA sense strand
uagcugagcauuacauguu

SEQ ID NO: 1203435 - RNA, 19 nt, Homo sapiens
  misc_RNA (1)...(19): siRNA sense strand
gccgggagauccuggcaaa

SEQ ID NO: 1203436 - RNA, 19 nt, Homo sapiens
  misc_RNA (1)...(19): siRNA sense strand
gauggaugauacaauaagu

SEQ ID NO: 1203437 - RNA, 19 nt, Homo sapiens
  misc_RNA (1)...(19): siRNA sense strand
ugaaaccugaucccaauuu

SEQ ID NO: 1203438 - RNA, 19 nt, Homo sapiens
  misc_RNA (1)...(19): siRNA sense strand
uaaaagacuuggacuggaa

SEQ ID NO: 1203439 - RNA, 19 nt, Homo sapiens
  misc_RNA (1)...(19): siRNA sense strand
gaucccaauuugauaugga

SEQ ID NO: 1203440 - RNA, 19 nt, Homo sapiens
  misc_RNA (1)...(19): siRNA sense strand
uagauauuccuaccgauuu

SEQ ID NO: 1203441 - RNA, 19 nt, Homo sapiens
  misc_RNA (1)...(19): siRNA sense strand
aaauagcagcugaauacua

SEQ ID NO: 1203442 - RNA, 19 nt, Homo sapiens
  misc_RNA (1)...(19): siRNA sense strand
gagggcugguucuucugua

SEQ ID NO: 1203443 - RNA, 19 nt, Homo sapiens
  misc_RNA (1)...(19): siRNA sense strand
auuaugggccucugaauuu

SEQ ID NO: 1203444 - RNA, 19 nt, Homo sapiens
  misc_RNA (1)...(19): siRNA sense strand
caauaagucccuacucaag

SEQ ID NO: 1203445 - RNA, 19 nt, Homo sapiens
  misc_RNA (1)...(19): siRNA sense strand
ucgcugguuuggaauguuu

SEQ ID NO: 1203446 - RNA, 19 nt, Homo sapiens
  misc_RNA (1)...(19): siRNA sense strand
ggagauccuggcaaaguau

SEQ ID NO: 1203447 - RNA, 19 nt, Homo sapiens
  misc_RNA (1)...(19): siRNA sense strand
gcagcugaauacuaugaca

SEQ ID NO: 1203448 - RNA, 19 nt, Homo sapiens
  misc_RNA (1)...(19): siRNA sense strand
uugcuaaucuuccuauugg

SEQ ID NO: 1203449 - RNA, 19 nt, Homo sapiens
  misc_RNA (1)...(19): siRNA sense strand
cacuacaauuccuggauaa

SEQ ID NO: 1203450 - RNA, 19 nt, Homo sapiens
  misc_RNA (1)...(19): siRNA sense strand
gacuggaaaugggucauau

SEQ ID NO: 1203451 - RNA, 19 nt, Homo sapiens
  misc_RNA (1)...(19): siRNA sense strand
cauuacauguucuuaaagg

SEQ ID NO: 1203452 - RNA, 19 nt, Homo sapiens
  misc_RNA (1)...(19): siRNA sense strand
gcacccaauuucuggacau

SEQ ID NO: 1203453 - RNA, 19 nt, Homo sapiens
  misc_RNA (1)...(19): siRNA sense strand
gagcugauggcgucgaugu

SEQ ID NO: 1203454 - RNA, 19 nt, Homo sapiens
  misc_RNA (1)...(19): siRNA sense strand
aauguggaaucgcugguuu

SEQ ID NO: 1203455 - RNA, 19 nt, Homo sapiens
  misc_RNA (1)...(19): siRNA sense strand
agauaaaguccuugaugaa

SEQ ID NO: 1203456 - RNA, 19 nt, Homo sapiens
  misc_RNA (1)...(19): siRNA sense strand
gaaugaagaggcaccaaaa

SEQ ID NO: 1203457 - RNA, 19 nt, Homo sapiens
  misc_RNA (1)...(19): siRNA sense strand
agagauaaaguccuugaug

SEQ ID NO: 1203458 - RNA, 19 nt, Homo sapiens
  misc_RNA (1)...(19): siRNA sense strand
ccagagauaaaguccuuga

SEQ ID NO: 1203459 - RNA, 19 nt, Homo sapiens
  misc_RNA (1)...(19): siRNA sense strand
gggccucugaauuuacuua

SEQ ID NO: 1203460 - RNA, 19 nt, Homo sapiens
  misc_RNA (1)...(19): siRNA sense strand
uggaauguuugcuaaucuu

SEQ ID NO: 1203461 - RNA, 19 nt, Homo sapiens
  misc_RNA (1)...(19): siRNA sense strand
auaaaguccuugaugaaac

SEQ ID NO: 1203462 - RNA, 19 nt, Homo sapiens
  misc_RNA (1)...(19): siRNA sense strand
ggaaaauagcagcugaaua

SEQ ID NO: 1203463 - RNA, 19 nt, Homo sapiens
  misc_RNA (1)...(19): siRNA sense strand
uauuaugggccucugaauu

SEQ ID NO: 1203464 - RNA, 19 nt, Homo sapiens
  misc_RNA (1)...(19): siRNA sense strand
guucuuaaagggucaugaa

SEQ ID NO: 1203465 - RNA, 19 nt, Homo sapiens
  misc_RNA (1)...(19): siRNA sense strand
ccuauugggauuccauauu

SEQ ID NO: 1203466 - RNA, 19 nt, Homo sapiens
  misc_RNA (1)...(19): siRNA sense strand
ugaugguucucacccaguu

SEQ ID NO: 1203467 - RNA, 19 nt, Homo sapiens
  misc_RNA (1)...(19): siRNA sense strand
agagguaucacauggauca

SEQ ID NO: 1203468 - RNA, 19 nt, Homo sapiens
  misc_RNA (1)...(19): siRNA sense strand
ggaauguuugcuaaucuuc

SEQ ID NO: 1203469 - RNA, 19 nt, Homo sapiens
  misc_RNA (1)...(19): siRNA sense strand
agaaugaagaggcaccaaa

SEQ ID NO: 1203470 - RNA, 19 nt, Homo sapiens
  misc_RNA (1)...(19): siRNA sense strand
augacaaccucccucacua

SEQ ID NO: 1203471 - RNA, 19 nt, Homo sapiens
  misc_RNA (1)...(19): siRNA sense strand
uagcagcugaauacuauga

SEQ ID NO: 1203472 - RNA, 19 nt, Homo sapiens
  misc_RNA (1)...(19): siRNA sense strand
cccaauuugauauggauua

SEQ ID NO: 1203473 - RNA, 19 nt, Homo sapiens
  misc_RNA (1)...(19): siRNA sense strand
ugacucuggcuauucauga

SEQ ID NO: 1203474 - RNA, 19 nt, Homo sapiens
  misc_RNA (1)...(19): siRNA sense strand
aauaagucccuacucaaga

SEQ ID NO: 1203475 - RNA, 19 nt, Homo sapiens
  misc_RNA (1)...(19): siRNA sense strand
ccuaugcguuuggcaguug

SEQ ID NO: 1203476 - RNA, 19 nt, Homo sapiens
  misc_RNA (1)...(19): siRNA sense strand
guuggcagcaucuuuacuu

SEQ ID NO: 1203477 - RNA, 19 nt, Homo sapiens
  misc_RNA (1)...(19): siRNA sense strand
uaaaguccuugaugaaacc

SEQ ID NO: 1203478 - RNA, 19 nt, Homo sapiens
  misc_RNA (1)...(19): siRNA sense strand
acaauaagucccuacucaa

SEQ ID NO: 1203479 - RNA, 19 nt, Homo sapiens
  misc_RNA (1)...(19): siRNA sense strand
uucaugagauugcccacaa

SEQ ID NO: 1203480 - RNA, 19 nt, Homo sapiens
  misc_RNA (1)...(19): siRNA sense strand
aaaccugaucccaauuuga

SEQ ID NO: 1203481 - RNA, 19 nt, Homo sapiens
  misc_RNA (1)...(19): siRNA sense strand
ucaaugacucuggcuauuc

SEQ ID NO: 1203482 - RNA, 19 nt, Homo sapiens
  misc_RNA (1)...(19): siRNA sense strand
guucuucuguaccgcuuuc

SEQ ID NO: 1203483 - RNA, 19 nt, Homo sapiens
  misc_RNA (1)...(19): siRNA sense strand
gugauggaugauacaauaa

SEQ ID NO: 1203484 - RNA, 19 nt, Homo sapiens
  misc_RNA (1)...(19): siRNA sense strand
uggcacaggucacuuuuga

SEQ ID NO: 1203485 - RNA, 19 nt, Homo sapiens
  misc_RNA (1)...(19): siRNA sense strand
gaaucgcugguuuggaaug

SEQ ID NO: 1203486 - RNA, 19 nt, Homo sapiens
  misc_RNA (1)...(19): siRNA sense strand
cucaaugacucuggcuauu

SEQ ID NO: 1203487 - RNA, 19 nt, Homo sapiens
  misc_RNA (1)...(19): siRNA sense strand
gcugauggcgucgauguag

SEQ ID NO: 1203488 - RNA, 19 nt, Homo sapiens
  misc_RNA (1)...(19): siRNA sense strand
gacaaccucccucacuaca

SEQ ID NO: 1203489 - RNA, 19 nt, Homo sapiens
  misc_RNA (1)...(19): siRNA sense strand
cccaauuucuggacauuuu

SEQ ID NO: 1203490 - RNA, 19 nt, Homo sapiens
  misc_RNA (1)...(19): siRNA sense strand
cacccaauuucuggacauu

SEQ ID NO: 1203491 - RNA, 19 nt, Homo sapiens
  misc_RNA (1)...(19): siRNA sense strand
gcauuacauguucuuaaag

SEQ ID NO: 1203492 - RNA, 19 nt, Homo sapiens
  misc_RNA (1)...(19): siRNA sense strand
uuugagggcugguucuucu

SEQ ID NO: 1203493 - RNA, 19 nt, Homo sapiens
  misc_RNA (1)...(19): siRNA sense strand
agucccuacucaagaauga

SEQ ID NO: 1203494 - RNA, 19 nt, Homo sapiens
  misc_RNA (1)...(19): siRNA sense strand
gauggcgucgauguagaua

SEQ ID NO: 1203495 - RNA, 19 nt, Homo sapiens
  misc_RNA (1)...(19): siRNA sense strand
aaccugaucccaauuugau

SEQ ID NO: 1203496 - RNA, 19 nt, Homo sapiens
  misc_RNA (1)...(19): siRNA sense strand
auccagagauaaaguccuu

SEQ ID NO: 1203497 - RNA, 19 nt, Homo sapiens
  misc_RNA (1)...(19): siRNA sense strand
ccugaucccaauuugauau

SEQ ID NO: 1203498 - RNA, 19 nt, Homo sapiens
  misc_RNA (1)...(19): siRNA sense strand
gggaauuaaauccuuaguc

SEQ ID NO: 1203499 - RNA, 19 nt, Homo sapiens
  misc_RNA (1)...(19): siRNA sense strand
gcagcagccuuccucauua

SEQ ID NO: 1203500 - RNA, 19 nt, Homo sapiens
  misc_RNA (1)...(19): siRNA sense strand
caacaaagauacaagugaa

SEQ ID NO: 1203501 - RNA, 19 nt, Homo sapiens
  misc_RNA (1)...(19): siRNA sense strand
aaacagaggcauugauuua

SEQ ID NO: 1203502 - RNA, 19 nt, Homo sapiens
  misc_RNA (1)...(19): siRNA sense strand
gcaaggaccuagacacaug

SEQ ID NO: 1203503 - RNA, 19 nt, Homo sapiens
  misc_RNA (1)...(19): siRNA sense strand
agaccgaucuugcuaauuu

SEQ ID NO: 1203504 - RNA, 19 nt, Homo sapiens
  misc_RNA (1)...(19): siRNA sense strand
gaugacagauuaagagaug

SEQ ID NO: 1203505 - RNA, 19 nt, Homo sapiens
  misc_RNA (1)...(19): siRNA sense strand
caaagaaucuccaagugau

SEQ ID NO: 1203506 - RNA, 19 nt, Homo sapiens
  misc_RNA (1)...(19): siRNA sense strand
ggagaugugugaagguuga

SEQ ID NO: 1203507 - RNA, 19 nt, Homo sapiens
  misc_RNA (1)...(19): siRNA sense strand
gacagaagaaggaaacuua

SEQ ID NO: 1203508 - RNA, 19 nt, Homo sapiens
  misc_RNA (1)...(19): siRNA sense strand
gaagaacgcagacagaaga

SEQ ID NO: 1203509 - RNA, 19 nt, Homo sapiens
  misc_RNA (1)...(19): siRNA sense strand
gcaaagaaucuccaaguga

SEQ ID NO: 1203510 - RNA, 19 nt, Homo sapiens
  misc_RNA (1)...(19): siRNA sense strand
gaacaaggacgacuauaca

SEQ ID NO: 1203511 - RNA, 19 nt, Homo sapiens
  misc_RNA (1)...(19): siRNA sense strand
uagaugaacugagucguua

SEQ ID NO: 1203512 - RNA, 19 nt, Homo sapiens
  misc_RNA (1)...(19): siRNA sense strand
gcaggaaccuaauaugcuu

SEQ ID NO: 1203513 - RNA, 19 nt, Homo sapiens
  misc_RNA (1)...(19): siRNA sense strand
agacuuccauggacucuua

SEQ ID NO: 1203514 - RNA, 19 nt, Homo sapiens
  misc_RNA (1)...(19): siRNA sense strand
uaaagaaaccugaaggaaa

SEQ ID NO: 1203515 - RNA, 19 nt, Homo sapiens
  misc_RNA (1)...(19): siRNA sense strand
gaagaaguugcaaagaaua

SEQ ID NO: 1203516 - RNA, 19 nt, Homo sapiens
  misc_RNA (1)...(19): siRNA sense strand
gcuaguacuucuucccaua

SEQ ID NO: 1203517 - RNA, 19 nt, Homo sapiens
  misc_RNA (1)...(19): siRNA sense strand
aaagaaaccugaaggaaag

SEQ ID NO: 1203518 - RNA, 19 nt, Homo sapiens
  misc_RNA (1)...(19): siRNA sense strand
cagaauggauuaugaagau

SEQ ID NO: 1203519 - RNA, 19 nt, Homo sapiens
  misc_RNA (1)...(19): siRNA sense strand
caagauuacuccugagaau

SEQ ID NO: 1203520 - RNA, 19 nt, Homo sapiens
  misc_RNA (1)...(19): siRNA sense strand
ccagaugaguauagaauug

SEQ ID NO: 1203521 - RNA, 19 nt, Homo sapiens
  misc_RNA (1)...(19): siRNA sense strand
gaugccagcuucuucuuga

SEQ ID NO: 1203522 - RNA, 19 nt, Homo sapiens
  misc_RNA (1)...(19): siRNA sense strand
ugaagaaguugcaaagaau

SEQ ID NO: 1203523 - RNA, 19 nt, Homo sapiens
  misc_RNA (1)...(19): siRNA sense strand
ugauacaucucagcaauuu

SEQ ID NO: 1203524 - RNA, 19 nt, Homo sapiens
  misc_RNA (1)...(19): siRNA sense strand
guauagaauuggaccauau

SEQ ID NO: 1203525 - RNA, 19 nt, Homo sapiens
  misc_RNA (1)...(19): siRNA sense strand
gaagagaaguccggugaag

SEQ ID NO: 1203526 - RNA, 19 nt, Homo sapiens
  misc_RNA (1)...(19): siRNA sense strand
guaaagaacaagaagagaa

SEQ ID NO: 1203527 - RNA, 19 nt, Homo sapiens
  misc_RNA (1)...(19): siRNA sense strand
caauguuccuguugguaua

SEQ ID NO: 1203528 - RNA, 19 nt, Homo sapiens
  misc_RNA (1)...(19): siRNA sense strand
agacagagcaggaaccuaa

SEQ ID NO: 1203529 - RNA, 19 nt, Homo sapiens
  misc_RNA (1)...(19): siRNA sense strand
guacuucuucccauaauuu

SEQ ID NO: 1203530 - RNA, 19 nt, Homo sapiens
  misc_RNA (1)...(19): siRNA sense strand
ugaauaaauuggcagaaga

SEQ ID NO: 1203531 - RNA, 19 nt, Homo sapiens
  misc_RNA (1)...(19): siRNA sense strand
gcagaaaggcagaguggaa

SEQ ID NO: 1203532 - RNA, 19 nt, Homo sapiens
  misc_RNA (1)...(19): siRNA sense strand
gaauaaauuggcagaagaa

SEQ ID NO: 1203533 - RNA, 19 nt, Homo sapiens
  misc_RNA (1)...(19): siRNA sense strand
aaacgcagauggucaaagu

SEQ ID NO: 1203534 - RNA, 19 nt, Homo sapiens
  misc_RNA (1)...(19): siRNA sense strand
gaccgaucuugcuaauuua

SEQ ID NO: 1203535 - RNA, 19 nt, Homo sapiens
  misc_RNA (1)...(19): siRNA sense strand
agacuuagaugaacugagu

SEQ ID NO: 1203536 - RNA, 19 nt, Homo sapiens
  misc_RNA (1)...(19): siRNA sense strand
uaagcuguguucacucuuu

SEQ ID NO: 1203537 - RNA, 19 nt, Homo sapiens
  misc_RNA (1)...(19): siRNA sense strand
ggugagaccucgcauaacu

SEQ ID NO: 1203538 - RNA, 19 nt, Homo sapiens
  misc_RNA (1)...(19): siRNA sense strand
gaagaugacagauuaagag

SEQ ID NO: 1203539 - RNA, 19 nt, Homo sapiens
  misc_RNA (1)...(19): siRNA sense strand
gaugaucccaacaaagaua

SEQ ID NO: 1203540 - RNA, 19 nt, Homo sapiens
  misc_RNA (1)...(19): siRNA sense strand
uagacuaugugauaccuaa

SEQ ID NO: 1203541 - RNA, 19 nt, Homo sapiens
  misc_RNA (1)...(19): siRNA sense strand
gaccaggccaguaacauuu

SEQ ID NO: 1203542 - RNA, 19 nt, Homo sapiens
  misc_RNA (1)...(19): siRNA sense strand
gaccauaucagcccaaugu

SEQ ID NO: 1203543 - RNA, 19 nt, Homo sapiens
  misc_RNA (1)...(19): siRNA sense strand
gcuagaaaguggcaguuca

SEQ ID NO: 1203544 - RNA, 19 nt, Homo sapiens
  misc_RNA (1)...(19): siRNA sense strand
cuaauaugcuucuugaauc

SEQ ID NO: 1203545 - RNA, 19 nt, Homo sapiens
  misc_RNA (1)...(19): siRNA sense strand
gaaccuaauaugcuucuug

SEQ ID NO: 1203546 - RNA, 19 nt, Homo sapiens
  misc_RNA (1)...(19): siRNA sense strand
ccaaacagaggcauugauu

SEQ ID NO: 1203547 - RNA, 19 nt, Homo sapiens
  misc_RNA (1)...(19): siRNA sense strand
ggaguggagucaacauauc

SEQ ID NO: 1203548 - RNA, 19 nt, Homo sapiens
  misc_RNA (1)...(19): siRNA sense strand
caacaaggagcucauagug

SEQ ID NO: 1203549 - RNA, 19 nt, Homo sapiens
  misc_RNA (1)...(19): siRNA sense strand
guagcaauauugaagacuu

SEQ ID NO: 1203550 - RNA, 19 nt, Homo sapiens
  misc_RNA (1)...(19): siRNA sense strand
gcacugucuucugcuagua

SEQ ID NO: 1203551 - RNA, 19 nt, Homo sapiens
  misc_RNA (1)...(19): siRNA sense strand
cagcagucaucucucagua

SEQ ID NO: 1203552 - RNA, 19 nt, Homo sapiens
  misc_RNA (1)...(19): siRNA sense strand
gcuacccagucuuuaagua

SEQ ID NO: 1203553 - RNA, 19 nt, Homo sapiens
  misc_RNA (1)...(19): siRNA sense strand
gacaagagaagaugcaaug

SEQ ID NO: 1203554 - RNA, 19 nt, Homo sapiens
  misc_RNA (1)...(19): siRNA sense strand
uagcagaguuguucacauc

SEQ ID NO: 1203555 - RNA, 19 nt, Homo sapiens
  misc_RNA (1)...(19): siRNA sense strand
ccaaauccuucuacagcuu

SEQ ID NO: 1203556 - RNA, 19 nt, Homo sapiens
  misc_RNA (1)...(19): siRNA sense strand
aaaggaaccaucagauaaa

SEQ ID NO: 1203557 - RNA, 19 nt, Homo sapiens
  misc_RNA (1)...(19): siRNA sense strand
gauaagaaauccaaaacug

SEQ ID NO: 1203558 - RNA, 19 nt, Homo sapiens
  misc_RNA (1)...(19): siRNA sense strand
ggcaaagaaucuccaagug

SEQ ID NO: 1203559 - RNA, 19 nt, Homo sapiens
  misc_RNA (1)...(19): siRNA sense strand
ugaccugucugagaaauau

SEQ ID NO: 1203560 - RNA, 19 nt, Homo sapiens
  misc_RNA (1)...(19): siRNA sense strand
cauucuggcuauucugaua

SEQ ID NO: 1203561 - RNA, 19 nt, Homo sapiens
  misc_RNA (1)...(19): siRNA sense strand
gaauggauuaugaagauga

SEQ ID NO: 1203562 - RNA, 19 nt, Homo sapiens
  misc_RNA (1)...(19): siRNA sense strand
caaauccuucuacagcuua

SEQ ID NO: 1203563 - RNA, 19 nt, Homo sapiens
  misc_RNA (1)...(19): siRNA sense strand
gcagaagaacgcagacaga

SEQ ID NO: 1203564 - RNA, 19 nt, Homo sapiens
  misc_RNA (1)...(19): siRNA sense strand
gaaguccggugaagauggu

SEQ ID NO: 1203565 - RNA, 19 nt, Homo sapiens
  misc_RNA (1)...(19): siRNA sense strand
gaaagccagaucagaaguu

SEQ ID NO: 1203566 - RNA, 19 nt, Homo sapiens
  misc_RNA (1)...(19): siRNA sense strand
gcaggaauaggccuucuug

SEQ ID NO: 1203567 - RNA, 19 nt, Homo sapiens
  misc_RNA (1)...(19): siRNA sense strand
caucugugcucuauaugug

SEQ ID NO: 1203568 - RNA, 19 nt, Homo sapiens
  misc_RNA (1)...(19): siRNA sense strand
ggcccuaccuugaguuaug

SEQ ID NO: 1203569 - RNA, 19 nt, Homo sapiens
  misc_RNA (1)...(19): siRNA sense strand
gaagagauaguuuugauga

SEQ ID NO: 1203570 - RNA, 19 nt, Homo sapiens
  misc_RNA (1)...(19): siRNA sense strand
uaggugauguggcuucuga

SEQ ID NO: 1203571 - RNA, 19 nt, Homo sapiens
  misc_RNA (1)...(19): siRNA sense strand
gaaggaaagccagaucaga

SEQ ID NO: 1203572 - RNA, 19 nt, Homo sapiens
  misc_RNA (1)...(19): siRNA sense strand
acccagugcuugauuauga

SEQ ID NO: 1203573 - RNA, 19 nt, Homo sapiens
  misc_RNA (1)...(19): siRNA sense strand
augaagaaguugcaaagaa

SEQ ID NO: 1203574 - RNA, 19 nt, Homo sapiens
  misc_RNA (1)...(19): siRNA sense strand
gguugaccauuguuugaaa

SEQ ID NO: 1203575 - RNA, 19 nt, Homo sapiens
  misc_RNA (1)...(19): siRNA sense strand
ccagugagaguucauuuau

SEQ ID NO: 1203576 - RNA, 19 nt, Homo sapiens
  misc_RNA (1)...(19): siRNA sense strand
guagaaccauuuggaguca

SEQ ID NO: 1203577 - RNA, 19 nt, Homo sapiens
  misc_RNA (1)...(19): siRNA sense strand
aauggaauccugacaauga

SEQ ID NO: 1203578 - RNA, 19 nt, Homo sapiens
  misc_RNA (1)...(19): siRNA sense strand
cagcagccuuccucauuau

SEQ ID NO: 1203579 - RNA, 19 nt, Homo sapiens
  misc_RNA (1)...(19): siRNA sense strand
caaaggaugaccagacaga

SEQ ID NO: 1203580 - RNA, 19 nt, Homo sapiens
  misc_RNA (1)...(19): siRNA sense strand
aaagccagaucagaaguuu

SEQ ID NO: 1203581 - RNA, 19 nt, Homo sapiens
  misc_RNA (1)...(19): siRNA sense strand
ccaccucccucauuucauc

SEQ ID NO: 1203582 - RNA, 19 nt, Homo sapiens
  misc_RNA (1)...(19): siRNA sense strand
guagagguccacucccuuu

SEQ ID NO: 1203583 - RNA, 19 nt, Homo sapiens
  misc_RNA (1)...(19): siRNA sense strand
caaaugaagaaguugcaaa

SEQ ID NO: 1203584 - RNA, 19 nt, Homo sapiens
  misc_RNA (1)...(19): siRNA sense strand
cugcacgccuugcuaguuu

SEQ ID NO: 1203585 - RNA, 19 nt, Homo sapiens
  misc_RNA (1)...(19): siRNA sense strand
agaaagacacaaaggauga

SEQ ID NO: 1203586 - RNA, 19 nt, Homo sapiens
  misc_RNA (1)...(19): siRNA sense strand
cggugaagauggugagaaa

SEQ ID NO: 1203587 - RNA, 19 nt, Homo sapiens
  misc_RNA (1)...(19): siRNA sense strand
aggcauugauuuacugaaa

SEQ ID NO: 1203588 - RNA, 19 nt, Homo sapiens
  misc_RNA (1)...(19): siRNA sense strand
caaacagaggcauugauuu

SEQ ID NO: 1203589 - RNA, 19 nt, Homo sapiens
  misc_RNA (1)...(19): siRNA sense strand
ggagucaacauaucaaugg

SEQ ID NO: 1203590 - RNA, 19 nt, Homo sapiens
  misc_RNA (1)...(19): siRNA sense strand
agauuacuccugagaauuu

SEQ ID NO: 1203591 - RNA, 19 nt, Homo sapiens
  misc_RNA (1)...(19): siRNA sense strand
cacaaaggaugaccagaca

SEQ ID NO: 1203592 - RNA, 19 nt, Homo sapiens
  misc_RNA (1)...(19): siRNA sense strand
ccagaagacugagaguuca

SEQ ID NO: 1203593 - RNA, 19 nt, Homo sapiens
  misc_RNA (1)...(19): siRNA sense strand
aggccgcaguggauuauua

SEQ ID NO: 1203594 - RNA, 19 nt, Homo sapiens
  misc_RNA (1)...(19): siRNA sense strand
agaauggaauccugacaau

SEQ ID NO: 1203595 - RNA, 19 nt, Homo sapiens
  misc_RNA (1)...(19): siRNA sense strand
ccaaguagcaauauugaag

SEQ ID NO: 1203596 - RNA, 19 nt, Homo sapiens
  misc_RNA (1)...(19): siRNA sense strand
cgagaccgaucuugcuaau

SEQ ID NO: 1203597 - RNA, 19 nt, Homo sapiens
  misc_RNA (1)...(19): siRNA sense strand
gcaguggauuauuacacaa

SEQ ID NO: 1203598 - RNA, 19 nt, Homo sapiens
  misc_RNA (1)...(19): siRNA sense strand
gcagaguuguucacaucau

SEQ ID NO: 1203599 - RNA, 19 nt, Homo sapiens
  misc_RNA (1)...(19): siRNA sense strand
ggacagaucccauaaauac

SEQ ID NO: 1203600 - RNA, 19 nt, Homo sapiens
  misc_RNA (1)...(19): siRNA sense strand
ggagaaacccuacaaaugu

SEQ ID NO: 1203601 - RNA, 19 nt, Homo sapiens
  misc_RNA (1)...(19): siRNA sense strand
gcagaauccuucccagaaa

SEQ ID NO: 1203602 - RNA, 19 nt, Homo sapiens
  misc_RNA (1)...(19): siRNA sense strand
gggaaagccuucagaguga

SEQ ID NO: 1203603 - RNA, 19 nt, Homo sapiens
  misc_RNA (1)...(19): siRNA sense strand
ggagagagaccacauaaau

SEQ ID NO: 1203604 - RNA, 19 nt, Homo sapiens
  misc_RNA (1)...(19): siRNA sense strand
gagagacccuucaagugua

SEQ ID NO: 1203605 - RNA, 19 nt, Homo sapiens
  misc_RNA (1)...(19): siRNA sense strand
gaggacagaucccauaaau

SEQ ID NO: 1203606 - RNA, 19 nt, Homo sapiens
  misc_RNA (1)...(19): siRNA sense strand
gaagucacaucuuaaucaa

SEQ ID NO: 1203607 - RNA, 19 nt, Homo sapiens
  misc_RNA (1)...(19): siRNA sense strand
ggagaaggcugugaguuuc

SEQ ID NO: 1203608 - RNA, 19 nt, Homo sapiens
  misc_RNA (1)...(19): siRNA sense strand
ggagagacccuucaagugu

SEQ ID NO: 1203609 - RNA, 19 nt, Homo sapiens
  misc_RNA (1)...(19): siRNA sense strand
gaacaucacccugaaagug

SEQ ID NO: 1203610 - RNA, 19 nt, Homo sapiens
  misc_RNA (1)...(19): siRNA sense strand
acucugaagucacaucuua

SEQ ID NO: 1203611 - RNA, 19 nt, Homo sapiens
  misc_RNA (1)...(19): siRNA sense strand
gggaaaagcuucauucaga

SEQ ID NO: 1203612 - RNA, 19 nt, Homo sapiens
  misc_RNA (1)...(19): siRNA sense strand
gggcacagaugcagcgauu

SEQ ID NO: 1203613 - RNA, 19 nt, Homo sapiens
  misc_RNA (1)...(19): siRNA sense strand
gaacgcagacagcagauug

SEQ ID NO: 1203614 - RNA, 19 nt, Homo sapiens
  misc_RNA (1)...(19): siRNA sense strand
gagaagcccuaucaaugug

SEQ ID NO: 1203615 - RNA, 19 nt, Homo sapiens
  misc_RNA (1)...(19): siRNA sense strand
gaacuucggucgccauucg

SEQ ID NO: 1203616 - RNA, 19 nt, Homo sapiens
  misc_RNA (1)...(19): siRNA sense strand
acaagaagauugaguuaca

SEQ ID NO: 1203617 - RNA, 19 nt, Homo sapiens
  misc_RNA (1)...(19): siRNA sense strand
ucacagacaucagcccuaa

SEQ ID NO: 1203618 - RNA, 19 nt, Homo sapiens
  misc_RNA (1)...(19): siRNA sense strand
caacaucagagaauccaua

SEQ ID NO: 1203619 - RNA, 19 nt, Homo sapiens
  misc_RNA (1)...(19): siRNA sense strand
gggagaaacccuacaaaug

SEQ ID NO: 1203620 - RNA, 19 nt, Homo sapiens
  misc_RNA (1)...(19): siRNA sense strand
ggagaacuaugggaguauu

SEQ ID NO: 1203621 - RNA, 19 nt, Homo sapiens
  misc_RNA (1)...(19): siRNA sense strand
gugcacaucuuauucaaca

SEQ ID NO: 1203622 - RNA, 19 nt, Homo sapiens
  misc_RNA (1)...(19): siRNA sense strand
caaagaggaugaacuacag

SEQ ID NO: 1203623 - RNA, 19 nt, Homo sapiens
  misc_RNA (1)...(19): siRNA sense strand
gagaaacccuacaaauguc

SEQ ID NO: 1203624 - RNA, 19 nt, Homo sapiens
  misc_RNA (1)...(19): siRNA sense strand
ucccagaagucccuuuaua

SEQ ID NO: 1203625 - RNA, 19 nt, Homo sapiens
  misc_RNA (1)...(19): siRNA sense strand
gcagagaagcccuaucaau

SEQ ID NO: 1203626 - RNA, 19 nt, Homo sapiens
  misc_RNA (1)...(19): siRNA sense strand
ggaauucccaugaaagaga

SEQ ID NO: 1203627 - RNA, 19 nt, Homo sapiens
  misc_RNA (1)...(19): siRNA sense strand
aaagggaucuggaugcaau

SEQ ID NO: 1203628 - RNA, 19 nt, Homo sapiens
  misc_RNA (1)...(19): siRNA sense strand
cagagaagcccuaucaaug

SEQ ID NO: 1203629 - RNA, 19 nt, Homo sapiens
  misc_RNA (1)...(19): siRNA sense strand
guacaacccgccaacguuu

SEQ ID NO: 1203630 - RNA, 19 nt, Homo sapiens
  misc_RNA (1)...(19): siRNA sense strand
cgagagaaaucccaucagu

SEQ ID NO: 1203631 - RNA, 19 nt, Homo sapiens
  misc_RNA (1)...(19): siRNA sense strand
cuccaagccucaaacuuua

SEQ ID NO: 1203632 - RNA, 19 nt, Homo sapiens
  misc_RNA (1)...(19): siRNA sense strand
gaccgaaucccgagaaguu

SEQ ID NO: 1203633 - RNA, 19 nt, Homo sapiens
  misc_RNA (1)...(19): siRNA sense strand
aaggcaagcuggauagaaa

SEQ ID NO: 1203634 - RNA, 19 nt, Homo sapiens
  misc_RNA (1)...(19): siRNA sense strand
gaacuugacagugauugaa

SEQ ID NO: 1203635 - RNA, 19 nt, Homo sapiens
  misc_RNA (1)...(19): siRNA sense strand
gaacucauacagcagagaa

SEQ ID NO: 1203636 - RNA, 19 nt, Homo sapiens
  misc_RNA (1)...(19): siRNA sense strand
ugacagugauugaagacaa

SEQ ID NO: 1203637 - RNA, 19 nt, Homo sapiens
  misc_RNA (1)...(19): siRNA sense strand
gacaucagcccuaagcaaa

SEQ ID NO: 1203638 - RNA, 19 nt, Homo sapiens
  misc_RNA (1)...(19): siRNA sense strand
gcaggaagaccuuuucaua

SEQ ID NO: 1203639 - RNA, 19 nt, Homo sapiens
  misc_RNA (1)...(19): siRNA sense strand
gcacagaugcagcgauugu

SEQ ID NO: 1203640 - RNA, 19 nt, Homo sapiens
  misc_RNA (1)...(19): siRNA sense strand
ccuccaagccucaaacuuu

SEQ ID NO: 1203641 - RNA, 19 nt, Homo sapiens
  misc_RNA (1)...(19): siRNA sense strand
ggaguuguagccucuuuaa

SEQ ID NO: 1203642 - RNA, 19 nt, Homo sapiens
  misc_RNA (1)...(19): siRNA sense strand
ccaccuggcuggacaucuu

SEQ ID NO: 1203643 - RNA, 19 nt, Homo sapiens
  misc_RNA (1)...(19): siRNA sense strand
gagagagaccacauaaaug

SEQ ID NO: 1203644 - RNA, 19 nt, Homo sapiens
  misc_RNA (1)...(19): siRNA sense strand
acagugaagucccauaugu

SEQ ID NO: 1203645 - RNA, 19 nt, Homo sapiens
  misc_RNA (1)...(19): siRNA sense strand
aauuucagcuggaguugua

SEQ ID NO: 1203646 - RNA, 19 nt, Homo sapiens
  misc_RNA (1)...(19): siRNA sense strand
caagaagauugaguuacaa

SEQ ID NO: 1203647 - RNA, 19 nt, Homo sapiens
  misc_RNA (1)...(19): siRNA sense strand
gaaaaugcccuuccuguuc

SEQ ID NO: 1203648 - RNA, 19 nt, Homo sapiens
  misc_RNA (1)...(19): siRNA sense strand
guuguagccucuuuaaaca

SEQ ID NO: 1203649 - RNA, 19 nt, Homo sapiens
  misc_RNA (1)...(19): siRNA sense strand
cgacuccacucccgagaga

SEQ ID NO: 1203650 - RNA, 19 nt, Homo sapiens
  misc_RNA (1)...(19): siRNA sense strand
cgccaacguuugagacuuu

SEQ ID NO: 1203651 - RNA, 19 nt, Homo sapiens
  misc_RNA (1)...(19): siRNA sense strand
gaggaagcauauaguugga

SEQ ID NO: 1203652 - RNA, 19 nt, Homo sapiens
  misc_RNA (1)...(19): siRNA sense strand
gagaggacagaucccauaa

SEQ ID NO: 1203653 - RNA, 19 nt, Homo sapiens
  misc_RNA (1)...(19): siRNA sense strand
uguaaagaauguggaauga

SEQ ID NO: 1203654 - RNA, 19 nt, Homo sapiens
  misc_RNA (1)...(19): siRNA sense strand
cagcauuacagaacucaua

SEQ ID NO: 1203655 - RNA, 19 nt, Homo sapiens
  misc_RNA (1)...(19): siRNA sense strand
gagaacuaugggaguauua

SEQ ID NO: 1203656 - RNA, 19 nt, Homo sapiens
  misc_RNA (1)...(19): siRNA sense strand
ccaucaaugucaugaaugu

SEQ ID NO: 1203657 - RNA, 19 nt, Homo sapiens
  misc_RNA (1)...(19): siRNA sense strand
cagcagagaagcccuauca

SEQ ID NO: 1203658 - RNA, 19 nt, Homo sapiens
  misc_RNA (1)...(19): siRNA sense strand
uacaagagcagccuuauca

SEQ ID NO: 1203659 - RNA, 19 nt, Homo sapiens
  misc_RNA (1)...(19): siRNA sense strand
agacaagaagauugaguua

SEQ ID NO: 1203660 - RNA, 19 nt, Homo sapiens
  misc_RNA (1)...(19): siRNA sense strand
gcccuacaccugucccuua

SEQ ID NO: 1203661 - RNA, 19 nt, Homo sapiens
  misc_RNA (1)...(19): siRNA sense strand
gaauucccaugaaagagau

SEQ ID NO: 1203662 - RNA, 19 nt, Homo sapiens
  misc_RNA (1)...(19): siRNA sense strand
gcaaugagugugggaagaa

SEQ ID NO: 1203663 - RNA, 19 nt, Homo sapiens
  misc_RNA (1)...(19): siRNA sense strand
gagaaugugggaagagcua

SEQ ID NO: 1203664 - RNA, 19 nt, Homo sapiens
  misc_RNA (1)...(19): siRNA sense strand
ugaagucacaucuuaauca

SEQ ID NO: 1203665 - RNA, 19 nt, Homo sapiens
  misc_RNA (1)...(19): siRNA sense strand
cuacaccugucccuuaugu

SEQ ID NO: 1203666 - RNA, 19 nt, Homo sapiens
  misc_RNA (1)...(19): siRNA sense strand
caacaucaaagaauacaca

SEQ ID NO: 1203667 - RNA, 19 nt, Homo sapiens
  misc_RNA (1)...(19): siRNA sense strand
agucacaucuuaaucaaca

SEQ ID NO: 1203668 - RNA, 19 nt, Homo sapiens
  misc_RNA (1)...(19): siRNA sense strand
gaagauugaguuacaagag

SEQ ID NO: 1203669 - RNA, 19 nt, Homo sapiens
  misc_RNA (1)...(19): siRNA sense strand
agagaaaucccaucagugu

SEQ ID NO: 1203670 - RNA, 19 nt, Homo sapiens
  misc_RNA (1)...(19): siRNA sense strand
uugaagagguggcugaugu

SEQ ID NO: 1203671 - RNA, 19 nt, Homo sapiens
  misc_RNA (1)...(19): siRNA sense strand
uagugaagguggaagaaga

SEQ ID NO: 1203672 - RNA, 19 nt, Homo sapiens
  misc_RNA (1)...(19): siRNA sense strand
cauccugccugaagaguuc

SEQ ID NO: 1203673 - RNA, 19 nt, Homo sapiens
  misc_RNA (1)...(19): siRNA sense strand
gaagaccuuuucauaguga

SEQ ID NO: 1203674 - RNA, 19 nt, Homo sapiens
  misc_RNA (1)...(19): siRNA sense strand
uggagaaggcugugaguuu

SEQ ID NO: 1203675 - RNA, 19 nt, Homo sapiens
  misc_RNA (1)...(19): siRNA sense strand
ccagagaugcagugacaaa

SEQ ID NO: 1203676 - RNA, 19 nt, Homo sapiens
  misc_RNA (1)...(19): siRNA sense strand
ggaucuggaugcaaucaca

SEQ ID NO: 1203677 - RNA, 19 nt, Homo sapiens
  misc_RNA (1)...(19): siRNA sense strand
uuacuuccauggguuauga

SEQ ID NO: 1203678 - RNA, 19 nt, Homo sapiens
  misc_RNA (1)...(19): siRNA sense strand
aaggagaacuaugggagua

SEQ ID NO: 1203679 - RNA, 19 nt, Homo sapiens
  misc_RNA (1)...(19): siRNA sense strand
ggcagaauccuucccagaa

SEQ ID NO: 1203680 - RNA, 19 nt, Homo sapiens
  misc_RNA (1)...(19): siRNA sense strand
ccauaaauaccuuaagugu

SEQ ID NO: 1203681 - RNA, 19 nt, Homo sapiens
  misc_RNA (1)...(19): siRNA sense strand
ugagaggacagaucccaua

SEQ ID NO: 1203682 - RNA, 19 nt, Homo sapiens
  misc_RNA (1)...(19): siRNA sense strand
acauggaacuaucuggaaa

SEQ ID NO: 1203683 - RNA, 19 nt, Homo sapiens
  misc_RNA (1)...(19): siRNA sense strand
uuaaaggcaugguacaaag

SEQ ID NO: 1203684 - RNA, 19 nt, Homo sapiens
  misc_RNA (1)...(19): siRNA sense strand
gagugcacaucuuauucaa

SEQ ID NO: 1203685 - RNA, 19 nt, Homo sapiens
  misc_RNA (1)...(19): siRNA sense strand
gaaagagauacuaggacaa

SEQ ID NO: 1203686 - RNA, 19 nt, Homo sapiens
  misc_RNA (1)...(19): siRNA sense strand
caucugaucgaacaccuaa

SEQ ID NO: 1203687 - RNA, 19 nt, Homo sapiens
  misc_RNA (1)...(19): siRNA sense strand
caucagagaauccauacug

SEQ ID NO: 1203688 - RNA, 19 nt, Homo sapiens
  misc_RNA (1)...(19): siRNA sense strand
agagaagcccuaucaaugu

SEQ ID NO: 1203689 - RNA, 19 nt, Homo sapiens
  misc_RNA (1)...(19): siRNA sense strand
cagaccucauucagcauua

SEQ ID NO: 1203690 - RNA, 19 nt, Homo sapiens
  misc_RNA (1)...(19): siRNA sense strand
agagacccuucaaguguaa

SEQ ID NO: 1203691 - RNA, 19 nt, Homo sapiens
  misc_RNA (1)...(19): siRNA sense strand
gcaccuaacucagcaucag

SEQ ID NO: 1203692 - RNA, 19 nt, Homo sapiens
  misc_RNA (1)...(19): siRNA sense strand
gcacaucuuauucaacauc

SEQ ID NO: 1203693 - RNA, 19 nt, Homo sapiens
  misc_RNA (1)...(19): siRNA sense strand
gagaugcagugacaaaaga

SEQ ID NO: 1203694 - RNA, 19 nt, Homo sapiens
  misc_RNA (1)...(19): siRNA sense strand
cagcuucacuucucucaac

SEQ ID NO: 1203695 - RNA, 19 nt, Homo sapiens
  misc_RNA (1)...(19): siRNA sense strand
ucagagugcacaucuuauu

SEQ ID NO: 1203696 - RNA, 19 nt, Homo sapiens
  misc_RNA (1)...(19): siRNA sense strand
aagcagacauggaacuauc

SEQ ID NO: 1203697 - RNA, 19 nt, Homo sapiens
  misc_RNA (1)...(19): siRNA sense strand
cagcgauuguggcaaauuc

SEQ ID NO: 1203698 - RNA, 19 nt, Homo sapiens
  misc_RNA (1)...(19): siRNA sense strand
ggaacuugacagugauuga

SEQ ID NO: 1203699 - RNA, 19 nt, Homo sapiens
  misc_RNA (1)...(19): siRNA sense strand
ggacagaucccauaaauac

SEQ ID NO: 1203700 - RNA, 19 nt, Homo sapiens
  misc_RNA (1)...(19): siRNA sense strand
ggagaaacccuacaaaugu

SEQ ID NO: 1203701 - RNA, 19 nt, Homo sapiens
  misc_RNA (1)...(19): siRNA sense strand
gcagaauccuucccagaaa

SEQ ID NO: 1203702 - RNA, 19 nt, Homo sapiens
  misc_RNA (1)...(19): siRNA sense strand
gggaaagccuucagaguga

SEQ ID NO: 1203703 - RNA, 19 nt, Homo sapiens
  misc_RNA (1)...(19): siRNA sense strand
ggagagagaccacauaaau

SEQ ID NO: 1203704 - RNA, 19 nt, Homo sapiens
  misc_RNA (1)...(19): siRNA sense strand
gagagacccuucaagugua

SEQ ID NO: 1203705 - RNA, 19 nt, Homo sapiens
  misc_RNA (1)...(19): siRNA sense strand
gaggacagaucccauaaau

SEQ ID NO: 1203706 - RNA, 19 nt, Homo sapiens
  misc_RNA (1)...(19): siRNA sense strand
gaagucacaucuuaaucaa

SEQ ID NO: 1203707 - RNA, 19 nt, Homo sapiens
  misc_RNA (1)...(19): siRNA sense strand
ggagaaggcugugaguuuc

SEQ ID NO: 1203708 - RNA, 19 nt, Homo sapiens
  misc_RNA (1)...(19): siRNA sense strand
ggagagacccuucaagugu

SEQ ID NO: 1203709 - RNA, 19 nt, Homo sapiens
  misc_RNA (1)...(19): siRNA sense strand
gaacaucacccugaaagug

SEQ ID NO: 1203710 - RNA, 19 nt, Homo sapiens
  misc_RNA (1)...(19): siRNA sense strand
acucugaagucacaucuua

SEQ ID NO: 1203711 - RNA, 19 nt, Homo sapiens
  misc_RNA (1)...(19): siRNA sense strand
gggaaaagcuucauucaga

SEQ ID NO: 1203712 - RNA, 19 nt, Homo sapiens
  misc_RNA (1)...(19): siRNA sense strand
gggcacagaugcagcgauu

SEQ ID NO: 1203713 - RNA, 19 nt, Homo sapiens
  misc_RNA (1)...(19): siRNA sense strand
gaacgcagacagcagauug

SEQ ID NO: 1203714 - RNA, 19 nt, Homo sapiens
  misc_RNA (1)...(19): siRNA sense strand
gagaagcccuaucaaugug

SEQ ID NO: 1203715 - RNA, 19 nt, Homo sapiens
  misc_RNA (1)...(19): siRNA sense strand
gaacuucggucgccauucg

SEQ ID NO: 1203716 - RNA, 19 nt, Homo sapiens
  misc_RNA (1)...(19): siRNA sense strand
acaagaagauugaguuaca

SEQ ID NO: 1203717 - RNA, 19 nt, Homo sapiens
  misc_RNA (1)...(19): siRNA sense strand
ucacagacaucagcccuaa

SEQ ID NO: 1203718 - RNA, 19 nt, Homo sapiens
  misc_RNA (1)...(19): siRNA sense strand
caacaucagagaauccaua

SEQ ID NO: 1203719 - RNA, 19 nt, Homo sapiens
  misc_RNA (1)...(19): siRNA sense strand
gggagaaacccuacaaaug

SEQ ID NO: 1203720 - RNA, 19 nt, Homo sapiens
  misc_RNA (1)...(19): siRNA sense strand
ggagaacuaugggaguauu

SEQ ID NO: 1203721 - RNA, 19 nt, Homo sapiens
  misc_RNA (1)...(19): siRNA sense strand
gugcacaucuuauucaaca

SEQ ID NO: 1203722 - RNA, 19 nt, Homo sapiens
  misc_RNA (1)...(19): siRNA sense strand
caaagaggaugaacuacag

SEQ ID NO: 1203723 - RNA, 19 nt, Homo sapiens
  misc_RNA (1)...(19): siRNA sense strand
gagaaacccuacaaauguc

SEQ ID NO: 1203724 - RNA, 19 nt, Homo sapiens
  misc_RNA (1)...(19): siRNA sense strand
ucccagaagucccuuuaua

SEQ ID NO: 1203725 - RNA, 19 nt, Homo sapiens
  misc_RNA (1)...(19): siRNA sense strand
gcagagaagcccuaucaau

SEQ ID NO: 1203726 - RNA, 19 nt, Homo sapiens
  misc_RNA (1)...(19): siRNA sense strand
ggaauucccaugaaagaga

SEQ ID NO: 1203727 - RNA, 19 nt, Homo sapiens
  misc_RNA (1)...(19): siRNA sense strand
aaagggaucuggaugcaau

SEQ ID NO: 1203728 - RNA, 19 nt, Homo sapiens
  misc_RNA (1)...(19): siRNA sense strand
cagagaagcccuaucaaug

SEQ ID NO: 1203729 - RNA, 19 nt, Homo sapiens
  misc_RNA (1)...(19): siRNA sense strand
guacaacccgccaacguuu

SEQ ID NO: 1203730 - RNA, 19 nt, Homo sapiens
  misc_RNA (1)...(19): siRNA sense strand
cgagagaaaucccaucagu

SEQ ID NO: 1203731 - RNA, 19 nt, Homo sapiens
  misc_RNA (1)...(19): siRNA sense strand
cuccaagccucaaacuuua

SEQ ID NO: 1203732 - RNA, 19 nt, Homo sapiens
  misc_RNA (1)...(19): siRNA sense strand
gaccgaaucccgagaaguu

SEQ ID NO: 1203733 - RNA, 19 nt, Homo sapiens
  misc_RNA (1)...(19): siRNA sense strand
aaggcaagcuggauagaaa

SEQ ID NO: 1203734 - RNA, 19 nt, Homo sapiens
  misc_RNA (1)...(19): siRNA sense strand
gaacuugacagugauugaa

SEQ ID NO: 1203735 - RNA, 19 nt, Homo sapiens
  misc_RNA (1)...(19): siRNA sense strand
gaacucauacagcagagaa

SEQ ID NO: 1203736 - RNA, 19 nt, Homo sapiens
  misc_RNA (1)...(19): siRNA sense strand
ugacagugauugaagacaa

SEQ ID NO: 1203737 - RNA, 19 nt, Homo sapiens
  misc_RNA (1)...(19): siRNA sense strand
gacaucagcccuaagcaaa

SEQ ID NO: 1203738 - RNA, 19 nt, Homo sapiens
  misc_RNA (1)...(19): siRNA sense strand
gcaggaagaccuuuucaua

SEQ ID NO: 1203739 - RNA, 19 nt, Homo sapiens
  misc_RNA (1)...(19): siRNA sense strand
gcacagaugcagcgauugu

SEQ ID NO: 1203740 - RNA, 19 nt, Homo sapiens
  misc_RNA (1)...(19): siRNA sense strand
ccuccaagccucaaacuuu

SEQ ID NO: 1203741 - RNA, 19 nt, Homo sapiens
  misc_RNA (1)...(19): siRNA sense strand
ggaguuguagccucuuuaa

SEQ ID NO: 1203742 - RNA, 19 nt, Homo sapiens
  misc_RNA (1)...(19): siRNA sense strand
ccaccuggcuggacaucuu

SEQ ID NO: 1203743 - RNA, 19 nt, Homo sapiens
  misc_RNA (1)...(19): siRNA sense strand
gagagagaccacauaaaug

SEQ ID NO: 1203744 - RNA, 19 nt, Homo sapiens
  misc_RNA (1)...(19): siRNA sense strand
acagugaagucccauaugu

SEQ ID NO: 1203745 - RNA, 19 nt, Homo sapiens
  misc_RNA (1)...(19): siRNA sense strand
aauuucagcuggaguugua

SEQ ID NO: 1203746 - RNA, 19 nt, Homo sapiens
  misc_RNA (1)...(19): siRNA sense strand
caagaagauugaguuacaa

SEQ ID NO: 1203747 - RNA, 19 nt, Homo sapiens
  misc_RNA (1)...(19): siRNA sense strand
gaaaaugcccuuccuguuc

SEQ ID NO: 1203748 - RNA, 19 nt, Homo sapiens
  misc_RNA (1)...(19): siRNA sense strand
guuguagccucuuuaaaca

SEQ ID NO: 1203749 - RNA, 19 nt, Homo sapiens
  misc_RNA (1)...(19): siRNA sense strand
cgacuccacucccgagaga

SEQ ID NO: 1203750 - RNA, 19 nt, Homo sapiens
  misc_RNA (1)...(19): siRNA sense strand
cgccaacguuugagacuuu

SEQ ID NO: 1203751 - RNA, 19 nt, Homo sapiens
  misc_RNA (1)...(19): siRNA sense strand
gaggaagcauauaguugga

SEQ ID NO: 1203752 - RNA, 19 nt, Homo sapiens
  misc_RNA (1)...(19): siRNA sense strand
gagaggacagaucccauaa

SEQ ID NO: 1203753 - RNA, 19 nt, Homo sapiens
  misc_RNA (1)...(19): siRNA sense strand
uguaaagaauguggaauga

SEQ ID NO: 1203754 - RNA, 19 nt, Homo sapiens
  misc_RNA (1)...(19): siRNA sense strand
cagcauuacagaacucaua

SEQ ID NO: 1203755 - RNA, 19 nt, Homo sapiens
  misc_RNA (1)...(19): siRNA sense strand
gagaacuaugggaguauua

SEQ ID NO: 1203756 - RNA, 19 nt, Homo sapiens
  misc_RNA (1)...(19): siRNA sense strand
ccaucaaugucaugaaugu

SEQ ID NO: 1203757 - RNA, 19 nt, Homo sapiens
  misc_RNA (1)...(19): siRNA sense strand
cagcagagaagcccuauca

SEQ ID NO: 1203758 - RNA, 19 nt, Homo sapiens
  misc_RNA (1)...(19): siRNA sense strand
uacaagagcagccuuauca

SEQ ID NO: 1203759 - RNA, 19 nt, Homo sapiens
  misc_RNA (1)...(19): siRNA sense strand
agacaagaagauugaguua

SEQ ID NO: 1203760 - RNA, 19 nt, Homo sapiens
  misc_RNA (1)...(19): siRNA sense strand
gcccuacaccugucccuua

SEQ ID NO: 1203761 - RNA, 19 nt, Homo sapiens
  misc_RNA (1)...(19): siRNA sense strand
gaauucccaugaaagagau

SEQ ID NO: 1203762 - RNA, 19 nt, Homo sapiens
  misc_RNA (1)...(19): siRNA sense strand
gcaaugagugugggaagaa

SEQ ID NO: 1203763 - RNA, 19 nt, Homo sapiens
  misc_RNA (1)...(19): siRNA sense strand
gagaaugugggaagagcua

SEQ ID NO: 1203764 - RNA, 19 nt, Homo sapiens
  misc_RNA (1)...(19): siRNA sense strand
ugaagucacaucuuaauca

SEQ ID NO: 1203765 - RNA, 19 nt, Homo sapiens
  misc_RNA (1)...(19): siRNA sense strand
cuacaccugucccuuaugu

SEQ ID NO: 1203766 - RNA, 19 nt, Homo sapiens
  misc_RNA (1)...(19): siRNA sense strand
caacaucaaagaauacaca

SEQ ID NO: 1203767 - RNA, 19 nt, Homo sapiens
  misc_RNA (1)...(19): siRNA sense strand
agucacaucuuaaucaaca

SEQ ID NO: 1203768 - RNA, 19 nt, Homo sapiens
  misc_RNA (1)...(19): siRNA sense strand
gaagauugaguuacaagag

SEQ ID NO: 1203769 - RNA, 19 nt, Homo sapiens
  misc_RNA (1)...(19): siRNA sense strand
agagaaaucccaucagugu

SEQ ID NO: 1203770 - RNA, 19 nt, Homo sapiens
  misc_RNA (1)...(19): siRNA sense strand
uugaagagguggcugaugu

SEQ ID NO: 1203771 - RNA, 19 nt, Homo sapiens
  misc_RNA (1)...(19): siRNA sense strand
uagugaagguggaagaaga

SEQ ID NO: 1203772 - RNA, 19 nt, Homo sapiens
  misc_RNA (1)...(19): siRNA sense strand
cauccugccugaagaguuc

SEQ ID NO: 1203773 - RNA, 19 nt, Homo sapiens
  misc_RNA (1)...(19): siRNA sense strand
gaagaccuuuucauaguga

SEQ ID NO: 1203774 - RNA, 19 nt, Homo sapiens
  misc_RNA (1)...(19): siRNA sense strand
uggagaaggcugugaguuu

SEQ ID NO: 1203775 - RNA, 19 nt, Homo sapiens
  misc_RNA (1)...(19): siRNA sense strand
ccagagaugcagugacaaa

SEQ ID NO: 1203776 - RNA, 19 nt, Homo sapiens
  misc_RNA (1)...(19): siRNA sense strand
ggaucuggaugcaaucaca

SEQ ID NO: 1203777 - RNA, 19 nt, Homo sapiens
  misc_RNA (1)...(19): siRNA sense strand
uuacuuccauggguuauga

SEQ ID NO: 1203778 - RNA, 19 nt, Homo sapiens
  misc_RNA (1)...(19): siRNA sense strand
aaggagaacuaugggagua

SEQ ID NO: 1203779 - RNA, 19 nt, Homo sapiens
  misc_RNA (1)...(19): siRNA sense strand
ggcagaauccuucccagaa

SEQ ID NO: 1203780 - RNA, 19 nt, Homo sapiens
  misc_RNA (1)...(19): siRNA sense strand
ccauaaauaccuuaagugu

SEQ ID NO: 1203781 - RNA, 19 nt, Homo sapiens
  misc_RNA (1)...(19): siRNA sense strand
ugagaggacagaucccaua

SEQ ID NO: 1203782 - RNA, 19 nt, Homo sapiens
  misc_RNA (1)...(19): siRNA sense strand
acauggaacuaucuggaaa

SEQ ID NO: 1203783 - RNA, 19 nt, Homo sapiens
  misc_RNA (1)...(19): siRNA sense strand
uuaaaggcaugguacaaag

SEQ ID NO: 1203784 - RNA, 19 nt, Homo sapiens
  misc_RNA (1)...(19): siRNA sense strand
gagugcacaucuuauucaa

SEQ ID NO: 1203785 - RNA, 19 nt, Homo sapiens
  misc_RNA (1)...(19): siRNA sense strand
gaaagagauacuaggacaa

SEQ ID NO: 1203786 - RNA, 19 nt, Homo sapiens
  misc_RNA (1)...(19): siRNA sense strand
caucugaucgaacaccuaa

SEQ ID NO: 1203787 - RNA, 19 nt, Homo sapiens
  misc_RNA (1)...(19): siRNA sense strand
caucagagaauccauacug

SEQ ID NO: 1203788 - RNA, 19 nt, Homo sapiens
  misc_RNA (1)...(19): siRNA sense strand
agagaagcccuaucaaugu

SEQ ID NO: 1203789 - RNA, 19 nt, Homo sapiens
  misc_RNA (1)...(19): siRNA sense strand
cagaccucauucagcauua

SEQ ID NO: 1203790 - RNA, 19 nt, Homo sapiens
  misc_RNA (1)...(19): siRNA sense strand
agagacccuucaaguguaa

SEQ ID NO: 1203791 - RNA, 19 nt, Homo sapiens
  misc_RNA (1)...(19): siRNA sense strand
gcaccuaacucagcaucag

SEQ ID NO: 1203792 - RNA, 19 nt, Homo sapiens
  misc_RNA (1)...(19): siRNA sense strand
gcacaucuuauucaacauc

SEQ ID NO: 1203793 - RNA, 19 nt, Homo sapiens
  misc_RNA (1)...(19): siRNA sense strand
gagaugcagugacaaaaga

SEQ ID NO: 1203794 - RNA, 19 nt, Homo sapiens
  misc_RNA (1)...(19): siRNA sense strand
cagcuucacuucucucaac

SEQ ID NO: 1203795 - RNA, 19 nt, Homo sapiens
  misc_RNA (1)...(19): siRNA sense strand
ucagagugcacaucuuauu

SEQ ID NO: 1203796 - RNA, 19 nt, Homo sapiens
  misc_RNA (1)...(19): siRNA sense strand
aagcagacauggaacuauc

SEQ ID NO: 1203797 - RNA, 19 nt, Homo sapiens
  misc_RNA (1)...(19): siRNA sense strand
cagcgauuguggcaaauuc

SEQ ID NO: 1203798 - RNA, 19 nt, Homo sapiens
  misc_RNA (1)...(19): siRNA sense strand
ggaacuugacagugauuga

SEQ ID NO: 1203799 - RNA, 19 nt, Homo sapiens
  misc_RNA (1)...(19): siRNA sense strand
gguggaggcugaugacuug

SEQ ID NO: 1203800 - RNA, 19 nt, Homo sapiens
  misc_RNA (1)...(19): siRNA sense strand
cagaagggcuacaauguca

SEQ ID NO: 1203801 - RNA, 19 nt, Homo sapiens
  misc_RNA (1)...(19): siRNA sense strand
ccaauguccuuaucaacaa

SEQ ID NO: 1203802 - RNA, 19 nt, Homo sapiens
  misc_RNA (1)...(19): siRNA sense strand
ggagauugcugugucuauc

SEQ ID NO: 1203803 - RNA, 19 nt, Homo sapiens
  misc_RNA (1)...(19): siRNA sense strand
acccagagcugaaccagaa

SEQ ID NO: 1203804 - RNA, 19 nt, Homo sapiens
  misc_RNA (1)...(19): siRNA sense strand
gugaagaugugugacuuug

SEQ ID NO: 1203805 - RNA, 19 nt, Homo sapiens
  misc_RNA (1)...(19): siRNA sense strand
ccgcagagcguaugagcua

SEQ ID NO: 1203806 - RNA, 19 nt, Homo sapiens
  misc_RNA (1)...(19): siRNA sense strand
ucauggaccuggacaucaa

SEQ ID NO: 1203807 - RNA, 19 nt, Homo sapiens
  misc_RNA (1)...(19): siRNA sense strand
ggagggccaugugaagaug

SEQ ID NO: 1203808 - RNA, 19 nt, Homo sapiens
  misc_RNA (1)...(19): siRNA sense strand
uggcaucaguggcuacuug

SEQ ID NO: 1203809 - RNA, 19 nt, Homo sapiens
  misc_RNA (1)...(19): siRNA sense strand
agaagcggcugcucaugga

SEQ ID NO: 1203810 - RNA, 19 nt, Homo sapiens
  misc_RNA (1)...(19): siRNA sense strand
caacaaggagggccaugug

SEQ ID NO: 1203811 - RNA, 19 nt, Homo sapiens
  misc_RNA (1)...(19): siRNA sense strand
gaugugaagcccuccaaug

SEQ ID NO: 1203812 - RNA, 19 nt, Homo sapiens
  misc_RNA (1)...(19): siRNA sense strand
ggaccuggacaucaacaug

SEQ ID NO: 1203813 - RNA, 19 nt, Homo sapiens
  misc_RNA (1)...(19): siRNA sense strand
gaaccagaagggcuacaau

SEQ ID NO: 1203814 - RNA, 19 nt, Homo sapiens
  misc_RNA (1)...(19): siRNA sense strand
cauuggagacagaaacuuu

SEQ ID NO: 1203815 - RNA, 19 nt, Homo sapiens
  misc_RNA (1)...(19): siRNA sense strand
accggaaggugcuggauaa

SEQ ID NO: 1203816 - RNA, 19 nt, Homo sapiens
  misc_RNA (1)...(19): siRNA sense strand
caucaccauuggagacaga

SEQ ID NO: 1203817 - RNA, 19 nt, Homo sapiens
  misc_RNA (1)...(19): siRNA sense strand
ccaagaagacggacauugc

SEQ ID NO: 1203818 - RNA, 19 nt, Homo sapiens
  misc_RNA (1)...(19): siRNA sense strand
ggaccuucaucaccauugg

SEQ ID NO: 1203819 - RNA, 19 nt, Homo sapiens
  misc_RNA (1)...(19): siRNA sense strand
ccuccaauguccuuaucaa

SEQ ID NO: 1203820 - RNA, 19 nt, Homo sapiens
  misc_RNA (1)...(19): siRNA sense strand
gcuacuugguggacucugu

SEQ ID NO: 1203821 - RNA, 19 nt, Homo sapiens
  misc_RNA (1)...(19): siRNA sense strand
uggagcaucugcacagcaa

SEQ ID NO: 1203822 - RNA, 19 nt, Homo sapiens
  misc_RNA (1)...(19): siRNA sense strand
gaagggcuacaaugucaag

SEQ ID NO: 1203823 - RNA, 19 nt, Homo sapiens
  misc_RNA (1)...(19): siRNA sense strand
caaggagggccaugugaag

SEQ ID NO: 1203824 - RNA, 19 nt, Homo sapiens
  misc_RNA (1)...(19): siRNA sense strand
ggacauccuuggggagauu

SEQ ID NO: 1203825 - RNA, 19 nt, Homo sapiens
  misc_RNA (1)...(19): siRNA sense strand
ccagaagggcuacaauguc

SEQ ID NO: 1203826 - RNA, 19 nt, Homo sapiens
  misc_RNA (1)...(19): siRNA sense strand
gauccugggagaagacuca

SEQ ID NO: 1203827 - RNA, 19 nt, Homo sapiens
  misc_RNA (1)...(19): siRNA sense strand
ccagagcggcaccaucaug

SEQ ID NO: 1203828 - RNA, 19 nt, Homo sapiens
  misc_RNA (1)...(19): siRNA sense strand
ucuacacugucaccuucua

SEQ ID NO: 1203829 - RNA, 19 nt, Homo sapiens
  misc_RNA (1)...(19): siRNA sense strand
ugucggugauccacagaga

SEQ ID NO: 1203830 - RNA, 19 nt, Homo sapiens
  misc_RNA (1)...(19): siRNA sense strand
ggaucaacccagagcugaa

SEQ ID NO: 1203831 - RNA, 19 nt, Homo sapiens
  misc_RNA (1)...(19): siRNA sense strand
acaaggagggccaugugaa

SEQ ID NO: 1203832 - RNA, 19 nt, Homo sapiens
  misc_RNA (1)...(19): siRNA sense strand
gaacucacaggagcagaag

SEQ ID NO: 1203833 - RNA, 19 nt, Homo sapiens
  misc_RNA (1)...(19): siRNA sense strand
gggagauugcugugucuau

SEQ ID NO: 1203834 - RNA, 19 nt, Homo sapiens
  misc_RNA (1)...(19): siRNA sense strand
gcucauggaccuggacauc

SEQ ID NO: 1203835 - RNA, 19 nt, Homo sapiens
  misc_RNA (1)...(19): siRNA sense strand
ugaacucacaggagcagaa

SEQ ID NO: 1203836 - RNA, 19 nt, Homo sapiens
  misc_RNA (1)...(19): siRNA sense strand
caauguccuuaucaacaag

SEQ ID NO: 1203837 - RNA, 19 nt, Homo sapiens
  misc_RNA (1)...(19): siRNA sense strand
gaagcccuccaauguccuu

SEQ ID NO: 1203838 - RNA, 19 nt, Homo sapiens
  misc_RNA (1)...(19): siRNA sense strand
gcccuccaauguccuuauc

SEQ ID NO: 1203839 - RNA, 19 nt, Homo sapiens
  misc_RNA (1)...(19): siRNA sense strand
caagaagacggacauugcu

SEQ ID NO: 1203840 - RNA, 19 nt, Homo sapiens
  misc_RNA (1)...(19): siRNA sense strand
gagaugugaagcccuccaa

SEQ ID NO: 1203841 - RNA, 19 nt, Homo sapiens
  misc_RNA (1)...(19): siRNA sense strand
uaccggaaggugcuggaua

SEQ ID NO: 1203842 - RNA, 19 nt, Homo sapiens
  misc_RNA (1)...(19): siRNA sense strand
gccaugugaagauguguga

SEQ ID NO: 1203843 - RNA, 19 nt, Homo sapiens
  misc_RNA (1)...(19): siRNA sense strand
gaagaaggaucuacggaua

SEQ ID NO: 1203844 - RNA, 19 nt, Homo sapiens
  misc_RNA (1)...(19): siRNA sense strand
gguggaggcugaugacuug

SEQ ID NO: 1203845 - RNA, 19 nt, Homo sapiens
  misc_RNA (1)...(19): siRNA sense strand
cagaagggcuacaauguca

SEQ ID NO: 1203846 - RNA, 19 nt, Homo sapiens
  misc_RNA (1)...(19): siRNA sense strand
ccaauguccuuaucaacaa

SEQ ID NO: 1203847 - RNA, 19 nt, Homo sapiens
  misc_RNA (1)...(19): siRNA sense strand
cuacggauauccugcaugu

SEQ ID NO: 1203848 - RNA, 19 nt, Homo sapiens
  misc_RNA (1)...(19): siRNA sense strand
ggagauugcugugucuauc

SEQ ID NO: 1203849 - RNA, 19 nt, Homo sapiens
  misc_RNA (1)...(19): siRNA sense strand
acccagagcugaaccagaa

SEQ ID NO: 1203850 - RNA, 19 nt, Homo sapiens
  misc_RNA (1)...(19): siRNA sense strand
gugaagaugugugacuuug

SEQ ID NO: 1203851 - RNA, 19 nt, Homo sapiens
  misc_RNA (1)...(19): siRNA sense strand
ccgcagagcguaugagcua

SEQ ID NO: 1203852 - RNA, 19 nt, Homo sapiens
  misc_RNA (1)...(19): siRNA sense strand
ucauggaccuggacaucaa

SEQ ID NO: 1203853 - RNA, 19 nt, Homo sapiens
  misc_RNA (1)...(19): siRNA sense strand
ggagggccaugugaagaug

SEQ ID NO: 1203854 - RNA, 19 nt, Homo sapiens
  misc_RNA (1)...(19): siRNA sense strand
uggcaucaguggcuacuug

SEQ ID NO: 1203855 - RNA, 19 nt, Homo sapiens
  misc_RNA (1)...(19): siRNA sense strand
agaagcggcugcucaugga

SEQ ID NO: 1203856 - RNA, 19 nt, Homo sapiens
  misc_RNA (1)...(19): siRNA sense strand
caacaaggagggccaugug

SEQ ID NO: 1203857 - RNA, 19 nt, Homo sapiens
  misc_RNA (1)...(19): siRNA sense strand
gaugugaagcccuccaaug

SEQ ID NO: 1203858 - RNA, 19 nt, Homo sapiens
  misc_RNA (1)...(19): siRNA sense strand
ggaccuggacaucaacaug

SEQ ID NO: 1203859 - RNA, 19 nt, Homo sapiens
  misc_RNA (1)...(19): siRNA sense strand
gaaccagaagggcuacaau

SEQ ID NO: 1203860 - RNA, 19 nt, Homo sapiens
  misc_RNA (1)...(19): siRNA sense strand
cauuggagacagaaacuuu

SEQ ID NO: 1203861 - RNA, 19 nt, Homo sapiens
  misc_RNA (1)...(19): siRNA sense strand
accggaaggugcuggauaa

SEQ ID NO: 1203862 - RNA, 19 nt, Homo sapiens
  misc_RNA (1)...(19): siRNA sense strand
ggaccuucaucaccauugg

SEQ ID NO: 1203863 - RNA, 19 nt, Homo sapiens
  misc_RNA (1)...(19): siRNA sense strand
ccaagaagacggacauugc

SEQ ID NO: 1203864 - RNA, 19 nt, Homo sapiens
  misc_RNA (1)...(19): siRNA sense strand
caucaccauuggagacaga

SEQ ID NO: 1203865 - RNA, 19 nt, Homo sapiens
  misc_RNA (1)...(19): siRNA sense strand
agaaggaucuacggauauc

SEQ ID NO: 1203866 - RNA, 19 nt, Homo sapiens
  misc_RNA (1)...(19): siRNA sense strand
ccuccaauguccuuaucaa

SEQ ID NO: 1203867 - RNA, 19 nt, Homo sapiens
  misc_RNA (1)...(19): siRNA sense strand
gcuacuugguggacucugu

SEQ ID NO: 1203868 - RNA, 19 nt, Homo sapiens
  misc_RNA (1)...(19): siRNA sense strand
uggagcaucugcacagcaa

SEQ ID NO: 1203869 - RNA, 19 nt, Homo sapiens
  misc_RNA (1)...(19): siRNA sense strand
gaagggcuacaaugucaag

SEQ ID NO: 1203870 - RNA, 19 nt, Homo sapiens
  misc_RNA (1)...(19): siRNA sense strand
caaggagggccaugugaag

SEQ ID NO: 1203871 - RNA, 19 nt, Homo sapiens
  misc_RNA (1)...(19): siRNA sense strand
ggacauccuuggggagauu

SEQ ID NO: 1203872 - RNA, 19 nt, Homo sapiens
  misc_RNA (1)...(19): siRNA sense strand
ccagaagggcuacaauguc

SEQ ID NO: 1203873 - RNA, 19 nt, Homo sapiens
  misc_RNA (1)...(19): siRNA sense strand
gaaaauccaagaggaagaa

SEQ ID NO: 1203874 - RNA, 19 nt, Homo sapiens
  misc_RNA (1)...(19): siRNA sense strand
gauccugggagaagacuca

SEQ ID NO: 1203875 - RNA, 19 nt, Homo sapiens
  misc_RNA (1)...(19): siRNA sense strand
ccagagcggcaccaucaug

SEQ ID NO: 1203876 - RNA, 19 nt, Homo sapiens
  misc_RNA (1)...(19): siRNA sense strand
ucuacacugucaccuucua

SEQ ID NO: 1203877 - RNA, 19 nt, Homo sapiens
  misc_RNA (1)...(19): siRNA sense strand
ugucggugauccacagaga

SEQ ID NO: 1203878 - RNA, 19 nt, Homo sapiens
  misc_RNA (1)...(19): siRNA sense strand
ggaucaacccagagcugaa

SEQ ID NO: 1203879 - RNA, 19 nt, Homo sapiens
  misc_RNA (1)...(19): siRNA sense strand
acaaggagggccaugugaa

SEQ ID NO: 1203880 - RNA, 19 nt, Homo sapiens
  misc_RNA (1)...(19): siRNA sense strand
gaacucacaggagcagaag

SEQ ID NO: 1203881 - RNA, 19 nt, Homo sapiens
  misc_RNA (1)...(19): siRNA sense strand
ccaagaggaagaaggaucu

SEQ ID NO: 1203882 - RNA, 19 nt, Homo sapiens
  misc_RNA (1)...(19): siRNA sense strand
gggagauugcugugucuau

SEQ ID NO: 1203883 - RNA, 19 nt, Homo sapiens
  misc_RNA (1)...(19): siRNA sense strand
gcucauggaccuggacauc

SEQ ID NO: 1203884 - RNA, 19 nt, Homo sapiens
  misc_RNA (1)...(19): siRNA sense strand
ugaacucacaggagcagaa

SEQ ID NO: 1203885 - RNA, 19 nt, Homo sapiens
  misc_RNA (1)...(19): siRNA sense strand
caauguccuuaucaacaag

SEQ ID NO: 1203886 - RNA, 19 nt, Homo sapiens
  misc_RNA (1)...(19): siRNA sense strand
gaagcccuccaauguccuu

SEQ ID NO: 1203887 - RNA, 19 nt, Homo sapiens
  misc_RNA (1)...(19): siRNA sense strand
gcccuccaauguccuuauc

SEQ ID NO: 1203888 - RNA, 19 nt, Homo sapiens
  misc_RNA (1)...(19): siRNA sense strand
caagaagacggacauugcu

SEQ ID NO: 1203889 - RNA, 19 nt, Homo sapiens
  misc_RNA (1)...(19): siRNA sense strand
aagaaggaucuacggauau

SEQ ID NO: 1203890 - RNA, 19 nt, Homo sapiens
  misc_RNA (1)...(19): siRNA sense strand
gagaugugaagcccuccaa

SEQ ID NO: 1203891 - RNA, 19 nt, Homo sapiens
  misc_RNA (1)...(19): siRNA sense strand
uaccggaaggugcuggaua

SEQ ID NO: 1203892 - RNA, 19 nt, Homo sapiens
  misc_RNA (1)...(19): siRNA sense strand
gccaugugaagauguguga

SEQ ID NO: 1203893 - RNA, 19 nt, Homo sapiens
  misc_RNA (1)...(19): siRNA sense strand
gaagaaggaucuacggaua

SEQ ID NO: 1203894 - RNA, 19 nt, Homo sapiens
  misc_RNA (1)...(19): siRNA sense strand
gguggaggcugaugacuug

SEQ ID NO: 1203895 - RNA, 19 nt, Homo sapiens
  misc_RNA (1)...(19): siRNA sense strand
cagaagggcuacaauguca

SEQ ID NO: 1203896 - RNA, 19 nt, Homo sapiens
  misc_RNA (1)...(19): siRNA sense strand
ccaauguccuuaucaacaa

SEQ ID NO: 1203897 - RNA, 19 nt, Homo sapiens
  misc_RNA (1)...(19): siRNA sense strand
cuacggauauccugcaugu

SEQ ID NO: 1203898 - RNA, 19 nt, Homo sapiens
  misc_RNA (1)...(19): siRNA sense strand
ggagauugcugugucuauc

SEQ ID NO: 1203899 - RNA, 19 nt, Homo sapiens
  misc_RNA (1)...(19): siRNA sense strand
acccagagcugaaccagaa

SEQ ID NO: 1203900 - RNA, 19 nt, Homo sapiens
  misc_RNA (1)...(19): siRNA sense strand
gugaagaugugugacuuug

SEQ ID NO: 1203901 - RNA, 19 nt, Homo sapiens
  misc_RNA (1)...(19): siRNA sense strand
ccgcagagcguaugagcua

SEQ ID NO: 1203902 - RNA, 19 nt, Homo sapiens
  misc_RNA (1)...(19): siRNA sense strand
ucauggaccuggacaucaa

SEQ ID NO: 1203903 - RNA, 19 nt, Homo sapiens
  misc_RNA (1)...(19): siRNA sense strand
ggagggccaugugaagaug

SEQ ID NO: 1203904 - RNA, 19 nt, Homo sapiens
  misc_RNA (1)...(19): siRNA sense strand
uggcaucaguggcuacuug

SEQ ID NO: 1203905 - RNA, 19 nt, Homo sapiens
  misc_RNA (1)...(19): siRNA sense strand
agaagcggcugcucaugga

SEQ ID NO: 1203906 - RNA, 19 nt, Homo sapiens
  misc_RNA (1)...(19): siRNA sense strand
caacaaggagggccaugug

SEQ ID NO: 1203907 - RNA, 19 nt, Homo sapiens
  misc_RNA (1)...(19): siRNA sense strand
gaugugaagcccuccaaug

SEQ ID NO: 1203908 - RNA, 19 nt, Homo sapiens
  misc_RNA (1)...(19): siRNA sense strand
ggaccuggacaucaacaug

SEQ ID NO: 1203909 - RNA, 19 nt, Homo sapiens
  misc_RNA (1)...(19): siRNA sense strand
gaaccagaagggcuacaau

SEQ ID NO: 1203910 - RNA, 19 nt, Homo sapiens
  misc_RNA (1)...(19): siRNA sense strand
cauuggagacagaaacuuu

SEQ ID NO: 1203911 - RNA, 19 nt, Homo sapiens
  misc_RNA (1)...(19): siRNA sense strand
accggaaggugcuggauaa

SEQ ID NO: 1203912 - RNA, 19 nt, Homo sapiens
  misc_RNA (1)...(19): siRNA sense strand
ggaccuucaucaccauugg

SEQ ID NO: 1203913 - RNA, 19 nt, Homo sapiens
  misc_RNA (1)...(19): siRNA sense strand
ccaagaagacggacauugc

SEQ ID NO: 1203914 - RNA, 19 nt, Homo sapiens
  misc_RNA (1)...(19): siRNA sense strand
caucaccauuggagacaga

SEQ ID NO: 1203915 - RNA, 19 nt, Homo sapiens
  misc_RNA (1)...(19): siRNA sense strand
agaaggaucuacggauauc

SEQ ID NO: 1203916 - RNA, 19 nt, Homo sapiens
  misc_RNA (1)...(19): siRNA sense strand
ccuccaauguccuuaucaa

SEQ ID NO: 1203917 - RNA, 19 nt, Homo sapiens
  misc_RNA (1)...(19): siRNA sense strand
gcuacuugguggacucugu

SEQ ID NO: 1203918 - RNA, 19 nt, Homo sapiens
  misc_RNA (1)...(19): siRNA sense strand
uggagcaucugcacagcaa

SEQ ID NO: 1203919 - RNA, 19 nt, Homo sapiens
  misc_RNA (1)...(19): siRNA sense strand
gaagggcuacaaugucaag

SEQ ID NO: 1203920 - RNA, 19 nt, Homo sapiens
  misc_RNA (1)...(19): siRNA sense strand
caaggagggccaugugaag

SEQ ID NO: 1203921 - RNA, 19 nt, Homo sapiens
  misc_RNA (1)...(19): siRNA sense strand
ggacauccuuggggagauu

SEQ ID NO: 1203922 - RNA, 19 nt, Homo sapiens
  misc_RNA (1)...(19): siRNA sense strand
ccagaagggcuacaauguc

SEQ ID NO: 1203923 - RNA, 19 nt, Homo sapiens
  misc_RNA (1)...(19): siRNA sense strand
gaaaauccaagaggaagaa

SEQ ID NO: 1203924 - RNA, 19 nt, Homo sapiens
  misc_RNA (1)...(19): siRNA sense strand
gauccugggagaagacuca

SEQ ID NO: 1203925 - RNA, 19 nt, Homo sapiens
  misc_RNA (1)...(19): siRNA sense strand
ccagagcggcaccaucaug

SEQ ID NO: 1203926 - RNA, 19 nt, Homo sapiens
  misc_RNA (1)...(19): siRNA sense strand
ucuacacugucaccuucua

SEQ ID NO: 1203927 - RNA, 19 nt, Homo sapiens
  misc_RNA (1)...(19): siRNA sense strand
ugucggugauccacagaga

SEQ ID NO: 1203928 - RNA, 19 nt, Homo sapiens
  misc_RNA (1)...(19): siRNA sense strand
ggaucaacccagagcugaa

SEQ ID NO: 1203929 - RNA, 19 nt, Homo sapiens
  misc_RNA (1)...(19): siRNA sense strand
acaaggagggccaugugaa

SEQ ID NO: 1203930 - RNA, 19 nt, Homo sapiens
  misc_RNA (1)...(19): siRNA sense strand
gaacucacaggagcagaag

SEQ ID NO: 1203931 - RNA, 19 nt, Homo sapiens
  misc_RNA (1)...(19): siRNA sense strand
ccaagaggaagaaggaucu

SEQ ID NO: 1203932 - RNA, 19 nt, Homo sapiens
  misc_RNA (1)...(19): siRNA sense strand
gggagauugcugugucuau

SEQ ID NO: 1203933 - RNA, 19 nt, Homo sapiens
  misc_RNA (1)...(19): siRNA sense strand
gcucauggaccuggacauc

SEQ ID NO: 1203934 - RNA, 19 nt, Homo sapiens
  misc_RNA (1)...(19): siRNA sense strand
ugaacucacaggagcagaa

SEQ ID NO: 1203935 - RNA, 19 nt, Homo sapiens
  misc_RNA (1)...(19): siRNA sense strand
caauguccuuaucaacaag

SEQ ID NO: 1203936 - RNA, 19 nt, Homo sapiens
  misc_RNA (1)...(19): siRNA sense strand
gaagcccuccaauguccuu

SEQ ID NO: 1203937 - RNA, 19 nt, Homo sapiens
  misc_RNA (1)...(19): siRNA sense strand
gcccuccaauguccuuauc

SEQ ID NO: 1203938 - RNA, 19 nt, Homo sapiens
  misc_RNA (1)...(19): siRNA sense strand
caagaagacggacauugcu

SEQ ID NO: 1203939 - RNA, 19 nt, Homo sapiens
  misc_RNA (1)...(19): siRNA sense strand
aagaaggaucuacggauau

SEQ ID NO: 1203940 - RNA, 19 nt, Homo sapiens
  misc_RNA (1)...(19): siRNA sense strand
gagaugugaagcccuccaa

SEQ ID NO: 1203941 - RNA, 19 nt, Homo sapiens
  misc_RNA (1)...(19): siRNA sense strand
uaccggaaggugcuggaua

SEQ ID NO: 1203942 - RNA, 19 nt, Homo sapiens
  misc_RNA (1)...(19): siRNA sense strand
gccaugugaagauguguga

SEQ ID NO: 1203943 - RNA, 19 nt, Homo sapiens
  misc_RNA (1)...(19): siRNA sense strand
gguggaggcugaugacuug

SEQ ID NO: 1203944 - RNA, 19 nt, Homo sapiens
  misc_RNA (1)...(19): siRNA sense strand
cagaagggcuacaauguca

SEQ ID NO: 1203945 - RNA, 19 nt, Homo sapiens
  misc_RNA (1)...(19): siRNA sense strand
ccaauguccuuaucaacaa

SEQ ID NO: 1203946 - RNA, 19 nt, Homo sapiens
  misc_RNA (1)...(19): siRNA sense strand
ggagauugcugugucuauc

SEQ ID NO: 1203947 - RNA, 19 nt, Homo sapiens
  misc_RNA (1)...(19): siRNA sense strand
acccagagcugaaccagaa

SEQ ID NO: 1203948 - RNA, 19 nt, Homo sapiens
  misc_RNA (1)...(19): siRNA sense strand
gugaagaugugugacuuug

SEQ ID NO: 1203949 - RNA, 19 nt, Homo sapiens
  misc_RNA (1)...(19): siRNA sense strand
ccgcagagcguaugagcua

SEQ ID NO: 1203950 - RNA, 19 nt, Homo sapiens
  misc_RNA (1)...(19): siRNA sense strand
ucauggaccuggacaucaa

SEQ ID NO: 1203951 - RNA, 19 nt, Homo sapiens
  misc_RNA (1)...(19): siRNA sense strand
ggagggccaugugaagaug

SEQ ID NO: 1203952 - RNA, 19 nt, Homo sapiens
  misc_RNA (1)...(19): siRNA sense strand
uggcaucaguggcuacuug

SEQ ID NO: 1203953 - RNA, 19 nt, Homo sapiens
  misc_RNA (1)...(19): siRNA sense strand
agaagcggcugcucaugga

SEQ ID NO: 1203954 - RNA, 19 nt, Homo sapiens
  misc_RNA (1)...(19): siRNA sense strand
caacaaggagggccaugug

SEQ ID NO: 1203955 - RNA, 19 nt, Homo sapiens
  misc_RNA (1)...(19): siRNA sense strand
gaugugaagcccuccaaug

SEQ ID NO: 1203956 - RNA, 19 nt, Homo sapiens
  misc_RNA (1)...(19): siRNA sense strand
ggaccuggacaucaacaug

SEQ ID NO: 1203957 - RNA, 19 nt, Homo sapiens
  misc_RNA (1)...(19): siRNA sense strand
gaaccagaagggcuacaau

SEQ ID NO: 1203958 - RNA, 19 nt, Homo sapiens
  misc_RNA (1)...(19): siRNA sense strand
cauuggagacagaaacuuu

SEQ ID NO: 1203959 - RNA, 19 nt, Homo sapiens
  misc_RNA (1)...(19): siRNA sense strand
accggaaggugcuggauaa

SEQ ID NO: 1203960 - RNA, 19 nt, Homo sapiens
  misc_RNA (1)...(19): siRNA sense strand
caucaccauuggagacaga

SEQ ID NO: 1203961 - RNA, 19 nt, Homo sapiens
  misc_RNA (1)...(19): siRNA sense strand
ccaagaagacggacauugc

SEQ ID NO: 1203962 - RNA, 19 nt, Homo sapiens
  misc_RNA (1)...(19): siRNA sense strand
ggaccuucaucaccauugg

SEQ ID NO: 1203963 - RNA, 19 nt, Homo sapiens
  misc_RNA (1)...(19): siRNA sense strand
ccuccaauguccuuaucaa

SEQ ID NO: 1203964 - RNA, 19 nt, Homo sapiens
  misc_RNA (1)...(19): siRNA sense strand
gcuacuugguggacucugu

SEQ ID NO: 1203965 - RNA, 19 nt, Homo sapiens
  misc_RNA (1)...(19): siRNA sense strand
uggagcaucugcacagcaa

SEQ ID NO: 1203966 - RNA, 19 nt, Homo sapiens
  misc_RNA (1)...(19): siRNA sense strand
gaagggcuacaaugucaag

SEQ ID NO: 1203967 - RNA, 19 nt, Homo sapiens
  misc_RNA (1)...(19): siRNA sense strand
caaggagggccaugugaag

SEQ ID NO: 1203968 - RNA, 19 nt, Homo sapiens
  misc_RNA (1)...(19): siRNA sense strand
ggacauccuuggggagauu

SEQ ID NO: 1203969 - RNA, 19 nt, Homo sapiens
  misc_RNA (1)...(19): siRNA sense strand
ccagaagggcuacaauguc

SEQ ID NO: 1203970 - RNA, 19 nt, Homo sapiens
  misc_RNA (1)...(19): siRNA sense strand
gauccugggagaagacuca

SEQ ID NO: 1203971 - RNA, 19 nt, Homo sapiens
  misc_RNA (1)...(19): siRNA sense strand
ccagagcggcaccaucaug

SEQ ID NO: 1203972 - RNA, 19 nt, Homo sapiens
  misc_RNA (1)...(19): siRNA sense strand
ucuacacugucaccuucua

SEQ ID NO: 1203973 - RNA, 19 nt, Homo sapiens
  misc_RNA (1)...(19): siRNA sense strand
ugucggugauccacagaga

SEQ ID NO: 1203974 - RNA, 19 nt, Homo sapiens
  misc_RNA (1)...(19): siRNA sense strand
ggaucaacccagagcugaa

SEQ ID NO: 1203975 - RNA, 19 nt, Homo sapiens
  misc_RNA (1)...(19): siRNA sense strand
acaaggagggccaugugaa

SEQ ID NO: 1203976 - RNA, 19 nt, Homo sapiens
  misc_RNA (1)...(19): siRNA sense strand
gaacucacaggagcagaag

SEQ ID NO: 1203977 - RNA, 19 nt, Homo sapiens
  misc_RNA (1)...(19): siRNA sense strand
gggagauugcugugucuau

SEQ ID NO: 1203978 - RNA, 19 nt, Homo sapiens
  misc_RNA (1)...(19): siRNA sense strand
gcucauggaccuggacauc

SEQ ID NO: 1203979 - RNA, 19 nt, Homo sapiens
  misc_RNA (1)...(19): siRNA sense strand
ugaacucacaggagcagaa

SEQ ID NO: 1203980 - RNA, 19 nt, Homo sapiens
  misc_RNA (1)...(19): siRNA sense strand
caauguccuuaucaacaag

SEQ ID NO: 1203981 - RNA, 19 nt, Homo sapiens
  misc_RNA (1)...(19): siRNA sense strand
gaagcccuccaauguccuu

SEQ ID NO: 1203982 - RNA, 19 nt, Homo sapiens
  misc_RNA (1)...(19): siRNA sense strand
gcccuccaauguccuuauc

SEQ ID NO: 1203983 - RNA, 19 nt, Homo sapiens
  misc_RNA (1)...(19): siRNA sense strand
caagaagacggacauugcu

SEQ ID NO: 1203984 - RNA, 19 nt, Homo sapiens
  misc_RNA (1)...(19): siRNA sense strand
gagaugugaagcccuccaa

SEQ ID NO: 1203985 - RNA, 19 nt, Homo sapiens
  misc_RNA (1)...(19): siRNA sense strand
uaccggaaggugcuggaua

SEQ ID NO: 1203986 - RNA, 19 nt, Homo sapiens
  misc_RNA (1)...(19): siRNA sense strand
gccaugugaagauguguga

SEQ ID NO: 1203987 - RNA, 19 nt, Homo sapiens
  misc_RNA (1)...(19): siRNA sense strand
gaagaaggaucuacggaua

SEQ ID NO: 1203988 - RNA, 19 nt, Homo sapiens
  misc_RNA (1)...(19): siRNA sense strand
gguggaggcugaugacuug

SEQ ID NO: 1203989 - RNA, 19 nt, Homo sapiens
  misc_RNA (1)...(19): siRNA sense strand
cagaagggcuacaauguca

SEQ ID NO: 1203990 - RNA, 19 nt, Homo sapiens
  misc_RNA (1)...(19): siRNA sense strand
ccaauguccuuaucaacaa

SEQ ID NO: 1203991 - RNA, 19 nt, Homo sapiens
  misc_RNA (1)...(19): siRNA sense strand
cuacggauauccugcaugu

SEQ ID NO: 1203992 - RNA, 19 nt, Homo sapiens
  misc_RNA (1)...(19): siRNA sense strand
ggagauugcugugucuauc

SEQ ID NO: 1203993 - RNA, 19 nt, Homo sapiens
  misc_RNA (1)...(19): siRNA sense strand
acccagagcugaaccagaa

SEQ ID NO: 1203994 - RNA, 19 nt, Homo sapiens
  misc_RNA (1)...(19): siRNA sense strand
gugaagaugugugacuuug

SEQ ID NO: 1203995 - RNA, 19 nt, Homo sapiens
  misc_RNA (1)...(19): siRNA sense strand
ccgcagagcguaugagcua

SEQ ID NO: 1203996 - RNA, 19 nt, Homo sapiens
  misc_RNA (1)...(19): siRNA sense strand
ucauggaccuggacaucaa

SEQ ID NO: 1203997 - RNA, 19 nt, Homo sapiens
  misc_RNA (1)...(19): siRNA sense strand
ggagggccaugugaagaug

SEQ ID NO: 1203998 - RNA, 19 nt, Homo sapiens
  misc_RNA (1)...(19): siRNA sense strand
uggcaucaguggcuacuug

SEQ ID NO: 1203999 - RNA, 19 nt, Homo sapiens
  misc_RNA (1)...(19): siRNA sense strand
agaagcggcugcucaugga

SEQ ID NO: 1204000 - RNA, 19 nt, Homo sapiens
  misc_RNA (1)...(19): siRNA sense strand
caacaaggagggccaugug

SEQ ID NO: 1204001 - RNA, 19 nt, Homo sapiens
  misc_RNA (1)...(19): siRNA sense strand
gaugugaagcccuccaaug

SEQ ID NO: 1204002 - RNA, 19 nt, Homo sapiens
  misc_RNA (1)...(19): siRNA sense strand
ggaccuggacaucaacaug

SEQ ID NO: 1204003 - RNA, 19 nt, Homo sapiens
  misc_RNA (1)...(19): siRNA sense strand
gaaccagaagggcuacaau

SEQ ID NO: 1204004 - RNA, 19 nt, Homo sapiens
  misc_RNA (1)...(19): siRNA sense strand
cauuggagacagaaacuuu

SEQ ID NO: 1204005 - RNA, 19 nt, Homo sapiens
  misc_RNA (1)...(19): siRNA sense strand
accggaaggugcuggauaa

SEQ ID NO: 1204006 - RNA, 19 nt, Homo sapiens
  misc_RNA (1)...(19): siRNA sense strand
ggaccuucaucaccauugg

SEQ ID NO: 1204007 - RNA, 19 nt, Homo sapiens
  misc_RNA (1)...(19): siRNA sense strand
ccaagaagacggacauugc

SEQ ID NO: 1204008 - RNA, 19 nt, Homo sapiens
  misc_RNA (1)...(19): siRNA sense strand
caucaccauuggagacaga

SEQ ID NO: 1204009 - RNA, 19 nt, Homo sapiens
  misc_RNA (1)...(19): siRNA sense strand
agaaggaucuacggauauc

SEQ ID NO: 1204010 - RNA, 19 nt, Homo sapiens
  misc_RNA (1)...(19): siRNA sense strand
ccuccaauguccuuaucaa

SEQ ID NO: 1204011 - RNA, 19 nt, Homo sapiens
  misc_RNA (1)...(19): siRNA sense strand
gcuacuugguggacucugu

SEQ ID NO: 1204012 - RNA, 19 nt, Homo sapiens
  misc_RNA (1)...(19): siRNA sense strand
uggagcaucugcacagcaa

SEQ ID NO: 1204013 - RNA, 19 nt, Homo sapiens
  misc_RNA (1)...(19): siRNA sense strand
gaagggcuacaaugucaag

SEQ ID NO: 1204014 - RNA, 19 nt, Homo sapiens
  misc_RNA (1)...(19): siRNA sense strand
caaggagggccaugugaag

SEQ ID NO: 1204015 - RNA, 19 nt, Homo sapiens
  misc_RNA (1)...(19): siRNA sense strand
ggacauccuuggggagauu

SEQ ID NO: 1204016 - RNA, 19 nt, Homo sapiens
  misc_RNA (1)...(19): siRNA sense strand
ccagaagggcuacaauguc

SEQ ID NO: 1204017 - RNA, 19 nt, Homo sapiens
  misc_RNA (1)...(19): siRNA sense strand
gaaaauccaagaggaagaa

SEQ ID NO: 1204018 - RNA, 19 nt, Homo sapiens
  misc_RNA (1)...(19): siRNA sense strand
gauccugggagaagacuca

SEQ ID NO: 1204019 - RNA, 19 nt, Homo sapiens
  misc_RNA (1)...(19): siRNA sense strand
ccagagcggcaccaucaug

SEQ ID NO: 1204020 - RNA, 19 nt, Homo sapiens
  misc_RNA (1)...(19): siRNA sense strand
ucuacacugucaccuucua

SEQ ID NO: 1204021 - RNA, 19 nt, Homo sapiens
  misc_RNA (1)...(19): siRNA sense strand
ugucggugauccacagaga

SEQ ID NO: 1204022 - RNA, 19 nt, Homo sapiens
  misc_RNA (1)...(19): siRNA sense strand
ggaucaacccagagcugaa

SEQ ID NO: 1204023 - RNA, 19 nt, Homo sapiens
  misc_RNA (1)...(19): siRNA sense strand
acaaggagggccaugugaa

SEQ ID NO: 1204024 - RNA, 19 nt, Homo sapiens
  misc_RNA (1)...(19): siRNA sense strand
gaacucacaggagcagaag

SEQ ID NO: 1204025 - RNA, 19 nt, Homo sapiens
  misc_RNA (1)...(19): siRNA sense strand
ccaagaggaagaaggaucu

SEQ ID NO: 1204026 - RNA, 19 nt, Homo sapiens
  misc_RNA (1)...(19): siRNA sense strand
gggagauugcugugucuau

SEQ ID NO: 1204027 - RNA, 19 nt, Homo sapiens
  misc_RNA (1)...(19): siRNA sense strand
gcucauggaccuggacauc

SEQ ID NO: 1204028 - RNA, 19 nt, Homo sapiens
  misc_RNA (1)...(19): siRNA sense strand
ugaacucacaggagcagaa

SEQ ID NO: 1204029 - RNA, 19 nt, Homo sapiens
  misc_RNA (1)...(19): siRNA sense strand
caauguccuuaucaacaag

SEQ ID NO: 1204030 - RNA, 19 nt, Homo sapiens
  misc_RNA (1)...(19): siRNA sense strand
gaagcccuccaauguccuu

SEQ ID NO: 1204031 - RNA, 19 nt, Homo sapiens
  misc_RNA (1)...(19): siRNA sense strand
gcccuccaauguccuuauc

SEQ ID NO: 1204032 - RNA, 19 nt, Homo sapiens
  misc_RNA (1)...(19): siRNA sense strand
caagaagacggacauugcu

SEQ ID NO: 1204033 - RNA, 19 nt, Homo sapiens
  misc_RNA (1)...(19): siRNA sense strand
aagaaggaucuacggauau

SEQ ID NO: 1204034 - RNA, 19 nt, Homo sapiens
  misc_RNA (1)...(19): siRNA sense strand
gagaugugaagcccuccaa

SEQ ID NO: 1204035 - RNA, 19 nt, Homo sapiens
  misc_RNA (1)...(19): siRNA sense strand
uaccggaaggugcuggaua

SEQ ID NO: 1204036 - RNA, 19 nt, Homo sapiens
  misc_RNA (1)...(19): siRNA sense strand
gccaugugaagauguguga

SEQ ID NO: 1204037 - RNA, 19 nt, Homo sapiens
  misc_RNA (1)...(19): siRNA sense strand
gaagaaggaucuacggaua

SEQ ID NO: 1204038 - RNA, 19 nt, Homo sapiens
  misc_RNA (1)...(19): siRNA sense strand
gguggaggcugaugacuug

SEQ ID NO: 1204039 - RNA, 19 nt, Homo sapiens
  misc_RNA (1)...(19): siRNA sense strand
cagaagggcuacaauguca

SEQ ID NO: 1204040 - RNA, 19 nt, Homo sapiens
  misc_RNA (1)...(19): siRNA sense strand
ccaauguccuuaucaacaa

SEQ ID NO: 1204041 - RNA, 19 nt, Homo sapiens
  misc_RNA (1)...(19): siRNA sense strand
cuacggauauccugcaugu

SEQ ID NO: 1204042 - RNA, 19 nt, Homo sapiens
  misc_RNA (1)...(19): siRNA sense strand
ggagauugcugugucuauc

SEQ ID NO: 1204043 - RNA, 19 nt, Homo sapiens
  misc_RNA (1)...(19): siRNA sense strand
acccagagcugaaccagaa

SEQ ID NO: 1204044 - RNA, 19 nt, Homo sapiens
  misc_RNA (1)...(19): siRNA sense strand
gugaagaugugugacuuug

SEQ ID NO: 1204045 - RNA, 19 nt, Homo sapiens
  misc_RNA (1)...(19): siRNA sense strand
ccgcagagcguaugagcua

SEQ ID NO: 1204046 - RNA, 19 nt, Homo sapiens
  misc_RNA (1)...(19): siRNA sense strand
ucauggaccuggacaucaa

SEQ ID NO: 1204047 - RNA, 19 nt, Homo sapiens
  misc_RNA (1)...(19): siRNA sense strand
ggagggccaugugaagaug

SEQ ID NO: 1204048 - RNA, 19 nt, Homo sapiens
  misc_RNA (1)...(19): siRNA sense strand
uggcaucaguggcuacuug

SEQ ID NO: 1204049 - RNA, 19 nt, Homo sapiens
  misc_RNA (1)...(19): siRNA sense strand
agaagcggcugcucaugga

SEQ ID NO: 1204050 - RNA, 19 nt, Homo sapiens
  misc_RNA (1)...(19): siRNA sense strand
caacaaggagggccaugug

SEQ ID NO: 1204051 - RNA, 19 nt, Homo sapiens
  misc_RNA (1)...(19): siRNA sense strand
gaugugaagcccuccaaug

SEQ ID NO: 1204052 - RNA, 19 nt, Homo sapiens
  misc_RNA (1)...(19): siRNA sense strand
ggaccuggacaucaacaug

SEQ ID NO: 1204053 - RNA, 19 nt, Homo sapiens
  misc_RNA (1)...(19): siRNA sense strand
gaaccagaagggcuacaau

SEQ ID NO: 1204054 - RNA, 19 nt, Homo sapiens
  misc_RNA (1)...(19): siRNA sense strand
cauuggagacagaaacuuu

SEQ ID NO: 1204055 - RNA, 19 nt, Homo sapiens
  misc_RNA (1)...(19): siRNA sense strand
accggaaggugcuggauaa

SEQ ID NO: 1204056 - RNA, 19 nt, Homo sapiens
  misc_RNA (1)...(19): siRNA sense strand
ggaccuucaucaccauugg

SEQ ID NO: 1204057 - RNA, 19 nt, Homo sapiens
  misc_RNA (1)...(19): siRNA sense strand
ccaagaagacggacauugc

SEQ ID NO: 1204058 - RNA, 19 nt, Homo sapiens
  misc_RNA (1)...(19): siRNA sense strand
caucaccauuggagacaga

SEQ ID NO: 1204059 - RNA, 19 nt, Homo sapiens
  misc_RNA (1)...(19): siRNA sense strand
agaaggaucuacggauauc

SEQ ID NO: 1204060 - RNA, 19 nt, Homo sapiens
  misc_RNA (1)...(19): siRNA sense strand
ccuccaauguccuuaucaa

SEQ ID NO: 1204061 - RNA, 19 nt, Homo sapiens
  misc_RNA (1)...(19): siRNA sense strand
gcuacuugguggacucugu

SEQ ID NO: 1204062 - RNA, 19 nt, Homo sapiens
  misc_RNA (1)...(19): siRNA sense strand
uggagcaucugcacagcaa

SEQ ID NO: 1204063 - RNA, 19 nt, Homo sapiens
  misc_RNA (1)...(19): siRNA sense strand
gaagggcuacaaugucaag

SEQ ID NO: 1204064 - RNA, 19 nt, Homo sapiens
  misc_RNA (1)...(19): siRNA sense strand
caaggagggccaugugaag

SEQ ID NO: 1204065 - RNA, 19 nt, Homo sapiens
  misc_RNA (1)...(19): siRNA sense strand
ggacauccuuggggagauu

SEQ ID NO: 1204066 - RNA, 19 nt, Homo sapiens
  misc_RNA (1)...(19): siRNA sense strand
ccagaagggcuacaauguc

SEQ ID NO: 1204067 - RNA, 19 nt, Homo sapiens
  misc_RNA (1)...(19): siRNA sense strand
gaaaauccaagaggaagaa

SEQ ID NO: 1204068 - RNA, 19 nt, Homo sapiens
  misc_RNA (1)...(19): siRNA sense strand
gauccugggagaagacuca

SEQ ID NO: 1204069 - RNA, 19 nt, Homo sapiens
  misc_RNA (1)...(19): siRNA sense strand
ccagagcggcaccaucaug

SEQ ID NO: 1204070 - RNA, 19 nt, Homo sapiens
  misc_RNA (1)...(19): siRNA sense strand
ucuacacugucaccuucua

SEQ ID NO: 1204071 - RNA, 19 nt, Homo sapiens
  misc_RNA (1)...(19): siRNA sense strand
ugucggugauccacagaga

SEQ ID NO: 1204072 - RNA, 19 nt, Homo sapiens
  misc_RNA (1)...(19): siRNA sense strand
ggaucaacccagagcugaa

SEQ ID NO: 1204073 - RNA, 19 nt, Homo sapiens
  misc_RNA (1)...(19): siRNA sense strand
acaaggagggccaugugaa

SEQ ID NO: 1204074 - RNA, 19 nt, Homo sapiens
  misc_RNA (1)...(19): siRNA sense strand
gaacucacaggagcagaag

SEQ ID NO: 1204075 - RNA, 19 nt, Homo sapiens
  misc_RNA (1)...(19): siRNA sense strand
ccaagaggaagaaggaucu

SEQ ID NO: 1204076 - RNA, 19 nt, Homo sapiens
  misc_RNA (1)...(19): siRNA sense strand
gggagauugcugugucuau

SEQ ID NO: 1204077 - RNA, 19 nt, Homo sapiens
  misc_RNA (1)...(19): siRNA sense strand
gcucauggaccuggacauc

SEQ ID NO: 1204078 - RNA, 19 nt, Homo sapiens
  misc_RNA (1)...(19): siRNA sense strand
ugaacucacaggagcagaa

SEQ ID NO: 1204079 - RNA, 19 nt, Homo sapiens
  misc_RNA (1)...(19): siRNA sense strand
caauguccuuaucaacaag

SEQ ID NO: 1204080 - RNA, 19 nt, Homo sapiens
  misc_RNA (1)...(19): siRNA sense strand
gaagcccuccaauguccuu

SEQ ID NO: 1204081 - RNA, 19 nt, Homo sapiens
  misc_RNA (1)...(19): siRNA sense strand
gcccuccaauguccuuauc

SEQ ID NO: 1204082 - RNA, 19 nt, Homo sapiens
  misc_RNA (1)...(19): siRNA sense strand
caagaagacggacauugcu

SEQ ID NO: 1204083 - RNA, 19 nt, Homo sapiens
  misc_RNA (1)...(19): siRNA sense strand
aagaaggaucuacggauau

SEQ ID NO: 1204084 - RNA, 19 nt, Homo sapiens
  misc_RNA (1)...(19): siRNA sense strand
gagaugugaagcccuccaa

SEQ ID NO: 1204085 - RNA, 19 nt, Homo sapiens
  misc_RNA (1)...(19): siRNA sense strand
uaccggaaggugcuggaua

SEQ ID NO: 1204086 - RNA, 19 nt, Homo sapiens
  misc_RNA (1)...(19): siRNA sense strand
gccaugugaagauguguga

SEQ ID NO: 1204087 - RNA, 19 nt, Homo sapiens
  misc_RNA (1)...(19): siRNA sense strand
aaaggaagcucacugaaua

SEQ ID NO: 1204088 - RNA, 19 nt, Homo sapiens
  misc_RNA (1)...(19): siRNA sense strand
gcacugauauugcaaguug

SEQ ID NO: 1204089 - RNA, 19 nt, Homo sapiens
  misc_RNA (1)...(19): siRNA sense strand
guaaaggaauuucaaguga

SEQ ID NO: 1204090 - RNA, 19 nt, Homo sapiens
  misc_RNA (1)...(19): siRNA sense strand
ggaaggaacuuaugaacag

SEQ ID NO: 1204091 - RNA, 19 nt, Homo sapiens
  misc_RNA (1)...(19): siRNA sense strand
gaggaucucuuauguuguu

SEQ ID NO: 1204092 - RNA, 19 nt, Homo sapiens
  misc_RNA (1)...(19): siRNA sense strand
gaaccacacccacuuauug

SEQ ID NO: 1204093 - RNA, 19 nt, Homo sapiens
  misc_RNA (1)...(19): siRNA sense strand
ggaacgagauuuacauuuu

SEQ ID NO: 1204094 - RNA, 19 nt, Homo sapiens
  misc_RNA (1)...(19): siRNA sense strand
gaaacaaaguagagucauc

SEQ ID NO: 1204095 - RNA, 19 nt, Homo sapiens
  misc_RNA (1)...(19): siRNA sense strand
cagcaaauaugaccggaaa

SEQ ID NO: 1204096 - RNA, 19 nt, Homo sapiens
  misc_RNA (1)...(19): siRNA sense strand
gaagagaaauaggcucaau

SEQ ID NO: 1204097 - RNA, 19 nt, Homo sapiens
  misc_RNA (1)...(19): siRNA sense strand
caagggauacuacagauuu

SEQ ID NO: 1204098 - RNA, 19 nt, Homo sapiens
  misc_RNA (1)...(19): siRNA sense strand
ggaggaagaugaagaagac

SEQ ID NO: 1204099 - RNA, 19 nt, Homo sapiens
  misc_RNA (1)...(19): siRNA sense strand
gaugagagcacugauauug

SEQ ID NO: 1204100 - RNA, 19 nt, Homo sapiens
  misc_RNA (1)...(19): siRNA sense strand
caaagaaauuucaccaagu

SEQ ID NO: 1204101 - RNA, 19 nt, Homo sapiens
  misc_RNA (1)...(19): siRNA sense strand
gaaggcaucgugauaguga

SEQ ID NO: 1204102 - RNA, 19 nt, Homo sapiens
  misc_RNA (1)...(19): siRNA sense strand
gaagacugcuuaaaagaaa

SEQ ID NO: 1204103 - RNA, 19 nt, Homo sapiens
  misc_RNA (1)...(19): siRNA sense strand
gaagacgacauuuggguaa

SEQ ID NO: 1204104 - RNA, 19 nt, Homo sapiens
  misc_RNA (1)...(19): siRNA sense strand
gcugauaaacuaagaacua

SEQ ID NO: 1204105 - RNA, 19 nt, Homo sapiens
  misc_RNA (1)...(19): siRNA sense strand
ugagagagccuuauuguca

SEQ ID NO: 1204106 - RNA, 19 nt, Homo sapiens
  misc_RNA (1)...(19): siRNA sense strand
gaaauuucaccaagucuga

SEQ ID NO: 1204107 - RNA, 19 nt, Homo sapiens
  misc_RNA (1)...(19): siRNA sense strand
gaugaaagauccauuugcu

SEQ ID NO: 1204108 - RNA, 19 nt, Homo sapiens
  misc_RNA (1)...(19): siRNA sense strand
ggaagaguauauugcuguu

SEQ ID NO: 1204109 - RNA, 19 nt, Homo sapiens
  misc_RNA (1)...(19): siRNA sense strand
ggaaaacacagcagacuua

SEQ ID NO: 1204110 - RNA, 19 nt, Homo sapiens
  misc_RNA (1)...(19): siRNA sense strand
caucguauuuaguugcaua

SEQ ID NO: 1204111 - RNA, 19 nt, Homo sapiens
  misc_RNA (1)...(19): siRNA sense strand
agaaauaggcucaauagug

SEQ ID NO: 1204112 - RNA, 19 nt, Homo sapiens
  misc_RNA (1)...(19): siRNA sense strand
uuacuaccauucacaacua

SEQ ID NO: 1204113 - RNA, 19 nt, Homo sapiens
  misc_RNA (1)...(19): siRNA sense strand
ggaagagaaauuugaauca

SEQ ID NO: 1204114 - RNA, 19 nt, Homo sapiens
  misc_RNA (1)...(19): siRNA sense strand
uacaauaucucgucgaauc

SEQ ID NO: 1204115 - RNA, 19 nt, Homo sapiens
  misc_RNA (1)...(19): siRNA sense strand
ggaaagaaacaaaguagag

SEQ ID NO: 1204116 - RNA, 19 nt, Homo sapiens
  misc_RNA (1)...(19): siRNA sense strand
uagccgacuucucgaaaua

SEQ ID NO: 1204117 - RNA, 19 nt, Homo sapiens
  misc_RNA (1)...(19): siRNA sense strand
ucugauggauguauugaaa

SEQ ID NO: 1204118 - RNA, 19 nt, Homo sapiens
  misc_RNA (1)...(19): siRNA sense strand
gauggaacagcaaauauga

SEQ ID NO: 1204119 - RNA, 19 nt, Homo sapiens
  misc_RNA (1)...(19): siRNA sense strand
gaaggaacuuaugaacaga

SEQ ID NO: 1204120 - RNA, 19 nt, Homo sapiens
  misc_RNA (1)...(19): siRNA sense strand
gcucuacaacuaugaauga

SEQ ID NO: 1204121 - RNA, 19 nt, Homo sapiens
  misc_RNA (1)...(19): siRNA sense strand
aaagaaauuucaccaaguc

SEQ ID NO: 1204122 - RNA, 19 nt, Homo sapiens
  misc_RNA (1)...(19): siRNA sense strand
gacaugguacggacaauuu

SEQ ID NO: 1204123 - RNA, 19 nt, Homo sapiens
  misc_RNA (1)...(19): siRNA sense strand
aaaggaauuucaagugaug

SEQ ID NO: 1204124 - RNA, 19 nt, Homo sapiens
  misc_RNA (1)...(19): siRNA sense strand
gcagcucaguucaucauuc

SEQ ID NO: 1204125 - RNA, 19 nt, Homo sapiens
  misc_RNA (1)...(19): siRNA sense strand
gaaaagcaaucucauuugg

SEQ ID NO: 1204126 - RNA, 19 nt, Homo sapiens
  misc_RNA (1)...(19): siRNA sense strand
gaagcaacccacaacaaug

SEQ ID NO: 1204127 - RNA, 19 nt, Homo sapiens
  misc_RNA (1)...(19): siRNA sense strand
caccaagucugauggaugu

SEQ ID NO: 1204128 - RNA, 19 nt, Homo sapiens
  misc_RNA (1)...(19): siRNA sense strand
gaacucaggaacgagauuu

SEQ ID NO: 1204129 - RNA, 19 nt, Homo sapiens
  misc_RNA (1)...(19): siRNA sense strand
gagagagccuuauugucau

SEQ ID NO: 1204130 - RNA, 19 nt, Homo sapiens
  misc_RNA (1)...(19): siRNA sense strand
ggaggaggaagaugaagaa

SEQ ID NO: 1204131 - RNA, 19 nt, Homo sapiens
  misc_RNA (1)...(19): siRNA sense strand
uaaccgcccuagcuacuau

SEQ ID NO: 1204132 - RNA, 19 nt, Homo sapiens
  misc_RNA (1)...(19): siRNA sense strand
ccacacccacuuauuguuu

SEQ ID NO: 1204133 - RNA, 19 nt, Homo sapiens
  misc_RNA (1)...(19): siRNA sense strand
gucccacacucuugguuua

SEQ ID NO: 1204134 - RNA, 19 nt, Homo sapiens
  misc_RNA (1)...(19): siRNA sense strand
aagcacacccaucacauua

SEQ ID NO: 1204135 - RNA, 19 nt, Homo sapiens
  misc_RNA (1)...(19): siRNA sense strand
guucaucauucacacuaaa

SEQ ID NO: 1204136 - RNA, 19 nt, Homo sapiens
  misc_RNA (1)...(19): siRNA sense strand
gaaguucguuggcuuucuc

SEQ ID NO: 1204137 - RNA, 19 nt, Homo sapiens
  misc_RNA (1)...(19): siRNA sense strand
uaaaggaagcucacugaau

SEQ ID NO: 1204138 - RNA, 19 nt, Homo sapiens
  misc_RNA (1)...(19): siRNA sense strand
gaaugagagagccuuauug

SEQ ID NO: 1204139 - RNA, 19 nt, Homo sapiens
  misc_RNA (1)...(19): siRNA sense strand
gaagaguauauugcuguua

SEQ ID NO: 1204140 - RNA, 19 nt, Homo sapiens
  misc_RNA (1)...(19): siRNA sense strand
ucagauauguguggcaaga

SEQ ID NO: 1204141 - RNA, 19 nt, Homo sapiens
  misc_RNA (1)...(19): siRNA sense strand
ugagagcacugauauugca

SEQ ID NO: 1204142 - RNA, 19 nt, Homo sapiens
  misc_RNA (1)...(19): siRNA sense strand
caagucugauggauguauu

SEQ ID NO: 1204143 - RNA, 19 nt, Homo sapiens
  misc_RNA (1)...(19): siRNA sense strand
cucagucgcucuacaacua

SEQ ID NO: 1204144 - RNA, 19 nt, Homo sapiens
  misc_RNA (1)...(19): siRNA sense strand
gaaagaaacaaaguagagu

SEQ ID NO: 1204145 - RNA, 19 nt, Homo sapiens
  misc_RNA (1)...(19): siRNA sense strand
gaacuuaugaacagacaag

SEQ ID NO: 1204146 - RNA, 19 nt, Homo sapiens
  misc_RNA (1)...(19): siRNA sense strand
cagcucaguucaucauuca

SEQ ID NO: 1204147 - RNA, 19 nt, Homo sapiens
  misc_RNA (1)...(19): siRNA sense strand
gaagaagaccauuuucaaa

SEQ ID NO: 1204148 - RNA, 19 nt, Homo sapiens
  misc_RNA (1)...(19): siRNA sense strand
aaacacagcagacuuacug

SEQ ID NO: 1204149 - RNA, 19 nt, Homo sapiens
  misc_RNA (1)...(19): siRNA sense strand
uauaugaacucaggaacga

SEQ ID NO: 1204150 - RNA, 19 nt, Homo sapiens
  misc_RNA (1)...(19): siRNA sense strand
cuauaccucuuagugauaa

SEQ ID NO: 1204151 - RNA, 19 nt, Homo sapiens
  misc_RNA (1)...(19): siRNA sense strand
gcaucucacuucuuugucu

SEQ ID NO: 1204152 - RNA, 19 nt, Homo sapiens
  misc_RNA (1)...(19): siRNA sense strand
gagccuuauugucaucgua

SEQ ID NO: 1204153 - RNA, 19 nt, Homo sapiens
  misc_RNA (1)...(19): siRNA sense strand
caagcacacccaucacauu

SEQ ID NO: 1204154 - RNA, 19 nt, Homo sapiens
  misc_RNA (1)...(19): siRNA sense strand
caacuacauauuuguguga

SEQ ID NO: 1204155 - RNA, 19 nt, Homo sapiens
  misc_RNA (1)...(19): siRNA sense strand
cuaaguaggaagaguauau

SEQ ID NO: 1204156 - RNA, 19 nt, Homo sapiens
  misc_RNA (1)...(19): siRNA sense strand
cuggaaacauuguaaagga

SEQ ID NO: 1204157 - RNA, 19 nt, Homo sapiens
  misc_RNA (1)...(19): siRNA sense strand
ggacaugguacggacaauu

SEQ ID NO: 1204158 - RNA, 19 nt, Homo sapiens
  misc_RNA (1)...(19): siRNA sense strand
aaacuuggagccugaagaa

SEQ ID NO: 1204159 - RNA, 19 nt, Homo sapiens
  misc_RNA (1)...(19): siRNA sense strand
uguugcaucucacuucuuu

SEQ ID NO: 1204160 - RNA, 19 nt, Homo sapiens
  misc_RNA (1)...(19): siRNA sense strand
caacauuauugcaacacau

SEQ ID NO: 1204161 - RNA, 19 nt, Homo sapiens
  misc_RNA (1)...(19): siRNA sense strand
aauacaauaucucgucgaa

SEQ ID NO: 1204162 - RNA, 19 nt, Homo sapiens
  misc_RNA (1)...(19): siRNA sense strand
ugaaugagagagccuuauu

SEQ ID NO: 1204163 - RNA, 19 nt, Homo sapiens
  misc_RNA (1)...(19): siRNA sense strand
caucgaagagaacauuauu

SEQ ID NO: 1204164 - RNA, 19 nt, Homo sapiens
  misc_RNA (1)...(19): siRNA sense strand
gaauagccgacuucucgaa

SEQ ID NO: 1204165 - RNA, 19 nt, Homo sapiens
  misc_RNA (1)...(19): siRNA sense strand
ggaaacauuguaaaggaau

SEQ ID NO: 1204166 - RNA, 19 nt, Homo sapiens
  misc_RNA (1)...(19): siRNA sense strand
aaaguaaccgcccuagcua

SEQ ID NO: 1204167 - RNA, 19 nt, Homo sapiens
  misc_RNA (1)...(19): siRNA sense strand
cgcccuagcuacuauaugu

SEQ ID NO: 1204168 - RNA, 19 nt, Homo sapiens
  misc_RNA (1)...(19): siRNA sense strand
uggaaacauuguaaaggaa

SEQ ID NO: 1204169 - RNA, 19 nt, Homo sapiens
  misc_RNA (1)...(19): siRNA sense strand
ccaaaagacguuauuauug

SEQ ID NO: 1204170 - RNA, 19 nt, Homo sapiens
  misc_RNA (1)...(19): siRNA sense strand
gccgacuucucgaaauauu

SEQ ID NO: 1204171 - RNA, 19 nt, Homo sapiens
  misc_RNA (1)...(19): siRNA sense strand
acaaugcuguuuggaauca

SEQ ID NO: 1204172 - RNA, 19 nt, Homo sapiens
  misc_RNA (1)...(19): siRNA sense strand
gagcacugauauugcaagu

SEQ ID NO: 1204173 - RNA, 19 nt, Homo sapiens
  misc_RNA (1)...(19): siRNA sense strand
gcggguagcauuaucuuca

SEQ ID NO: 1204174 - RNA, 19 nt, Homo sapiens
  misc_RNA (1)...(19): siRNA sense strand
gcucaauagugcaccagau

SEQ ID NO: 1204175 - RNA, 19 nt, Homo sapiens
  misc_RNA (1)...(19): siRNA sense strand
ccacacucuugguuuaugu

SEQ ID NO: 1204176 - RNA, 19 nt, Homo sapiens
  misc_RNA (1)...(19): siRNA sense strand
cguauuuaguugcauauag

SEQ ID NO: 1204177 - RNA, 19 nt, Homo sapiens
  misc_RNA (1)...(19): siRNA sense strand
gcauuaucuucauguguuc

SEQ ID NO: 1204178 - RNA, 19 nt, Homo sapiens
  misc_RNA (1)...(19): siRNA sense strand
agcauuaucuucauguguu

SEQ ID NO: 1204179 - RNA, 19 nt, Homo sapiens
  misc_RNA (1)...(19): siRNA sense strand
gaauuaagccugaaaaugc

SEQ ID NO: 1204180 - RNA, 19 nt, Homo sapiens
  misc_RNA (1)...(19): siRNA sense strand
agauauguguggcaagaug

SEQ ID NO: 1204181 - RNA, 19 nt, Homo sapiens
  misc_RNA (1)...(19): siRNA sense strand
caauagugcaccagauaug

SEQ ID NO: 1204182 - RNA, 19 nt, Homo sapiens
  misc_RNA (1)...(19): siRNA sense strand
ucaaaacccagaaucaaua

SEQ ID NO: 1204183 - RNA, 19 nt, Homo sapiens
  misc_RNA (1)...(19): siRNA sense strand
caaguucucagucgcucua

SEQ ID NO: 1204184 - RNA, 19 nt, Homo sapiens
  misc_RNA (1)...(19): siRNA sense strand
cacagcagacuuacugaaa

SEQ ID NO: 1204185 - RNA, 19 nt, Homo sapiens
  misc_RNA (1)...(19): siRNA sense strand
aagaguauauugcuguuac

SEQ ID NO: 1204186 - RNA, 19 nt, Homo sapiens
  misc_RNA (1)...(19): siRNA sense strand
agagaaauaggcucaauag

SEQ ID NO: 1204187 - RNA, 19 nt, Homo sapiens
  misc_RNA (1)...(19): siRNA sense strand
caaacgggcucaucauaau

SEQ ID NO: 1204188 - RNA, 19 nt, Homo sapiens
  misc_RNA (1)...(19): siRNA sense strand
gacaaacgggcucaucaua

SEQ ID NO: 1204189 - RNA, 19 nt, Homo sapiens
  misc_RNA (1)...(19): siRNA sense strand
guagggaccacaucaaaga

SEQ ID NO: 1204190 - RNA, 19 nt, Homo sapiens
  misc_RNA (1)...(19): siRNA sense strand
auaaugcacuggaacgaaa

SEQ ID NO: 1204191 - RNA, 19 nt, Homo sapiens
  misc_RNA (1)...(19): siRNA sense strand
acaaacgggcucaucauaa

SEQ ID NO: 1204192 - RNA, 19 nt, Homo sapiens
  misc_RNA (1)...(19): siRNA sense strand
agacagcuuucacaguuug

SEQ ID NO: 1204193 - RNA, 19 nt, Homo sapiens
  misc_RNA (1)...(19): siRNA sense strand
gcacuggaacgaaaacgua

SEQ ID NO: 1204194 - RNA, 19 nt, Homo sapiens
  misc_RNA (1)...(19): siRNA sense strand
aagacagcuuucacaguuu

SEQ ID NO: 1204195 - RNA, 19 nt, Homo sapiens
  misc_RNA (1)...(19): siRNA sense strand
aaacguagggaccacauca

SEQ ID NO: 1204196 - RNA, 19 nt, Homo sapiens
  misc_RNA (1)...(19): siRNA sense strand
cauaaugcacuggaacgaa

SEQ ID NO: 1204197 - RNA, 19 nt, Homo sapiens
  misc_RNA (1)...(19): siRNA sense strand
ugacaaacgggcucaucau

SEQ ID NO: 1204198 - RNA, 19 nt, Homo sapiens
  misc_RNA (1)...(19): siRNA sense strand
aaacgggcucaucauaaug

SEQ ID NO: 1204199 - RNA, 19 nt, Homo sapiens
  misc_RNA (1)...(19): siRNA sense strand
caaacgggcucaucauaau

SEQ ID NO: 1204200 - RNA, 19 nt, Homo sapiens
  misc_RNA (1)...(19): siRNA sense strand
gacaaacgggcucaucaua

SEQ ID NO: 1204201 - RNA, 19 nt, Homo sapiens
  misc_RNA (1)...(19): siRNA sense strand
guagggaccacaucaaaga

SEQ ID NO: 1204202 - RNA, 19 nt, Homo sapiens
  misc_RNA (1)...(19): siRNA sense strand
auaaugcacuggaacgaaa

SEQ ID NO: 1204203 - RNA, 19 nt, Homo sapiens
  misc_RNA (1)...(19): siRNA sense strand
acaaacgggcucaucauaa

SEQ ID NO: 1204204 - RNA, 19 nt, Homo sapiens
  misc_RNA (1)...(19): siRNA sense strand
agacagcuuucacaguuug

SEQ ID NO: 1204205 - RNA, 19 nt, Homo sapiens
  misc_RNA (1)...(19): siRNA sense strand
gcacuggaacgaaaacgua

SEQ ID NO: 1204206 - RNA, 19 nt, Homo sapiens
  misc_RNA (1)...(19): siRNA sense strand
aagacagcuuucacaguuu

SEQ ID NO: 1204207 - RNA, 19 nt, Homo sapiens
  misc_RNA (1)...(19): siRNA sense strand
aaacguagggaccacauca

SEQ ID NO: 1204208 - RNA, 19 nt, Homo sapiens
  misc_RNA (1)...(19): siRNA sense strand
cauaaugcacuggaacgaa

SEQ ID NO: 1204209 - RNA, 19 nt, Homo sapiens
  misc_RNA (1)...(19): siRNA sense strand
ugacaaacgggcucaucau

SEQ ID NO: 1204210 - RNA, 19 nt, Homo sapiens
  misc_RNA (1)...(19): siRNA sense strand
aaacgggcucaucauaaug

SEQ ID NO: 1204211 - RNA, 19 nt, Homo sapiens
  misc_RNA (1)...(19): siRNA sense strand
caaacgggcucaucauaau

SEQ ID NO: 1204212 - RNA, 19 nt, Homo sapiens
  misc_RNA (1)...(19): siRNA sense strand
gacaaacgggcucaucaua

SEQ ID NO: 1204213 - RNA, 19 nt, Homo sapiens
  misc_RNA (1)...(19): siRNA sense strand
guagggaccacaucaaaga

SEQ ID NO: 1204214 - RNA, 19 nt, Homo sapiens
  misc_RNA (1)...(19): siRNA sense strand
auaaugcacuggaacgaaa

SEQ ID NO: 1204215 - RNA, 19 nt, Homo sapiens
  misc_RNA (1)...(19): siRNA sense strand
acaaacgggcucaucauaa

SEQ ID NO: 1204216 - RNA, 19 nt, Homo sapiens
  misc_RNA (1)...(19): siRNA sense strand
agacagcuuucacaguuug

SEQ ID NO: 1204217 - RNA, 19 nt, Homo sapiens
  misc_RNA (1)...(19): siRNA sense strand
gcacuggaacgaaaacgua

SEQ ID NO: 1204218 - RNA, 19 nt, Homo sapiens
  misc_RNA (1)...(19): siRNA sense strand
aagacagcuuucacaguuu

SEQ ID NO: 1204219 - RNA, 19 nt, Homo sapiens
  misc_RNA (1)...(19): siRNA sense strand
aaacguagggaccacauca

SEQ ID NO: 1204220 - RNA, 19 nt, Homo sapiens
  misc_RNA (1)...(19): siRNA sense strand
cauaaugcacuggaacgaa

SEQ ID NO: 1204221 - RNA, 19 nt, Homo sapiens
  misc_RNA (1)...(19): siRNA sense strand
ugacaaacgggcucaucau

SEQ ID NO: 1204222 - RNA, 19 nt, Homo sapiens
  misc_RNA (1)...(19): siRNA sense strand
aaacgggcucaucauaaug

SEQ ID NO: 1204223 - RNA, 19 nt, Homo sapiens
  misc_RNA (1)...(19): siRNA sense strand
caaacgggcucaucauaau

SEQ ID NO: 1204224 - RNA, 19 nt, Homo sapiens
  misc_RNA (1)...(19): siRNA sense strand
gacaaacgggcucaucaua

SEQ ID NO: 1204225 - RNA, 19 nt, Homo sapiens
  misc_RNA (1)...(19): siRNA sense strand
guagggaccacaucaaaga

SEQ ID NO: 1204226 - RNA, 19 nt, Homo sapiens
  misc_RNA (1)...(19): siRNA sense strand
auaaugcacuggaacgaaa

SEQ ID NO: 1204227 - RNA, 19 nt, Homo sapiens
  misc_RNA (1)...(19): siRNA sense strand
acaaacgggcucaucauaa

SEQ ID NO: 1204228 - RNA, 19 nt, Homo sapiens
  misc_RNA (1)...(19): siRNA sense strand
agacagcuuucacaguuug

SEQ ID NO: 1204229 - RNA, 19 nt, Homo sapiens
  misc_RNA (1)...(19): siRNA sense strand
gcacuggaacgaaaacgua

SEQ ID NO: 1204230 - RNA, 19 nt, Homo sapiens
  misc_RNA (1)...(19): siRNA sense strand
aagacagcuuucacaguuu

SEQ ID NO: 1204231 - RNA, 19 nt, Homo sapiens
  misc_RNA (1)...(19): siRNA sense strand
aaacguagggaccacauca

SEQ ID NO: 1204232 - RNA, 19 nt, Homo sapiens
  misc_RNA (1)...(19): siRNA sense strand
cauaaugcacuggaacgaa

SEQ ID NO: 1204233 - RNA, 19 nt, Homo sapiens
  misc_RNA (1)...(19): siRNA sense strand
ugacaaacgggcucaucau

SEQ ID NO: 1204234 - RNA, 19 nt, Homo sapiens
  misc_RNA (1)...(19): siRNA sense strand
aaacgggcucaucauaaug

SEQ ID NO: 1204235 - RNA, 19 nt, Homo sapiens
  misc_RNA (1)...(19): siRNA sense strand
caaacgggcucaucauaau

SEQ ID NO: 1204236 - RNA, 19 nt, Homo sapiens
  misc_RNA (1)...(19): siRNA sense strand
gacaaacgggcucaucaua

SEQ ID NO: 1204237 - RNA, 19 nt, Homo sapiens
  misc_RNA (1)...(19): siRNA sense strand
guagggaccacaucaaaga

SEQ ID NO: 1204238 - RNA, 19 nt, Homo sapiens
  misc_RNA (1)...(19): siRNA sense strand
auaaugcacuggaacgaaa

SEQ ID NO: 1204239 - RNA, 19 nt, Homo sapiens
  misc_RNA (1)...(19): siRNA sense strand
acaaacgggcucaucauaa

SEQ ID NO: 1204240 - RNA, 19 nt, Homo sapiens
  misc_RNA (1)...(19): siRNA sense strand
agacagcuuucacaguuug

SEQ ID NO: 1204241 - RNA, 19 nt, Homo sapiens
  misc_RNA (1)...(19): siRNA sense strand
gcacuggaacgaaaacgua

SEQ ID NO: 1204242 - RNA, 19 nt, Homo sapiens
  misc_RNA (1)...(19): siRNA sense strand
aagacagcuuucacaguuu

SEQ ID NO: 1204243 - RNA, 19 nt, Homo sapiens
  misc_RNA (1)...(19): siRNA sense strand
aaacguagggaccacauca

SEQ ID NO: 1204244 - RNA, 19 nt, Homo sapiens
  misc_RNA (1)...(19): siRNA sense strand
cauaaugcacuggaacgaa

SEQ ID NO: 1204245 - RNA, 19 nt, Homo sapiens
  misc_RNA (1)...(19): siRNA sense strand
ugacaaacgggcucaucau

SEQ ID NO: 1204246 - RNA, 19 nt, Homo sapiens
  misc_RNA (1)...(19): siRNA sense strand
aaacgggcucaucauaaug

SEQ ID NO: 1204247 - RNA, 19 nt, Homo sapiens
  misc_RNA (1)...(19): siRNA sense strand
caaacgggcucaucauaau

SEQ ID NO: 1204248 - RNA, 19 nt, Homo sapiens
  misc_RNA (1)...(19): siRNA sense strand
gacaaacgggcucaucaua

SEQ ID NO: 1204249 - RNA, 19 nt, Homo sapiens
  misc_RNA (1)...(19): siRNA sense strand
guagggaccacaucaaaga

SEQ ID NO: 1204250 - RNA, 19 nt, Homo sapiens
  misc_RNA (1)...(19): siRNA sense strand
auaaugcacuggaacgaaa

SEQ ID NO: 1204251 - RNA, 19 nt, Homo sapiens
  misc_RNA (1)...(19): siRNA sense strand
acaaacgggcucaucauaa

SEQ ID NO: 1204252 - RNA, 19 nt, Homo sapiens
  misc_RNA (1)...(19): siRNA sense strand
agacagcuuucacaguuug

SEQ ID NO: 1204253 - RNA, 19 nt, Homo sapiens
  misc_RNA (1)...(19): siRNA sense strand
gcacuggaacgaaaacgua

SEQ ID NO: 1204254 - RNA, 19 nt, Homo sapiens
  misc_RNA (1)...(19): siRNA sense strand
aagacagcuuucacaguuu

SEQ ID NO: 1204255 - RNA, 19 nt, Homo sapiens
  misc_RNA (1)...(19): siRNA sense strand
aaacguagggaccacauca

SEQ ID NO: 1204256 - RNA, 19 nt, Homo sapiens
  misc_RNA (1)...(19): siRNA sense strand
cauaaugcacuggaacgaa

SEQ ID NO: 1204257 - RNA, 19 nt, Homo sapiens
  misc_RNA (1)...(19): siRNA sense strand
ugacaaacgggcucaucau

SEQ ID NO: 1204258 - RNA, 19 nt, Homo sapiens
  misc_RNA (1)...(19): siRNA sense strand
aaacgggcucaucauaaug

SEQ ID NO: 1204259 - RNA, 19 nt, Homo sapiens
  misc_RNA (1)...(19): siRNA sense strand
caaggaaacuccaguauaa

SEQ ID NO: 1204260 - RNA, 19 nt, Homo sapiens
  misc_RNA (1)...(19): siRNA sense strand
gaauucaccuagcagauua

SEQ ID NO: 1204261 - RNA, 19 nt, Homo sapiens
  misc_RNA (1)...(19): siRNA sense strand
cgaaauagccauaccuuua

SEQ ID NO: 1204262 - RNA, 19 nt, Homo sapiens
  misc_RNA (1)...(19): siRNA sense strand
cagaugagcucacagaauu

SEQ ID NO: 1204263 - RNA, 19 nt, Homo sapiens
  misc_RNA (1)...(19): siRNA sense strand
gaaauagccauaccuuuaa

SEQ ID NO: 1204264 - RNA, 19 nt, Homo sapiens
  misc_RNA (1)...(19): siRNA sense strand
ucagacaucucaucaagua

SEQ ID NO: 1204265 - RNA, 19 nt, Homo sapiens
  misc_RNA (1)...(19): siRNA sense strand
gaauguaaccagcuacuua

SEQ ID NO: 1204266 - RNA, 19 nt, Homo sapiens
  misc_RNA (1)...(19): siRNA sense strand
gacaacagcucuagugaug

SEQ ID NO: 1204267 - RNA, 19 nt, Homo sapiens
  misc_RNA (1)...(19): siRNA sense strand
gacgaugccuguucaagua

SEQ ID NO: 1204268 - RNA, 19 nt, Homo sapiens
  misc_RNA (1)...(19): siRNA sense strand
ugaagaaucugcuaccaaa

SEQ ID NO: 1204269 - RNA, 19 nt, Homo sapiens
  misc_RNA (1)...(19): siRNA sense strand
cagauuccauggacaaaua

SEQ ID NO: 1204270 - RNA, 19 nt, Homo sapiens
  misc_RNA (1)...(19): siRNA sense strand
ccagacagcuguuccaaga

SEQ ID NO: 1204271 - RNA, 19 nt, Homo sapiens
  misc_RNA (1)...(19): siRNA sense strand
caagagaaaucaacaacug

SEQ ID NO: 1204272 - RNA, 19 nt, Homo sapiens
  misc_RNA (1)...(19): siRNA sense strand
ucaccuagcagauuaaaua

SEQ ID NO: 1204273 - RNA, 19 nt, Homo sapiens
  misc_RNA (1)...(19): siRNA sense strand
gaauaucccuagcacaguu

SEQ ID NO: 1204274 - RNA, 19 nt, Homo sapiens
  misc_RNA (1)...(19): siRNA sense strand
gagaagauuuccagucaug

SEQ ID NO: 1204275 - RNA, 19 nt, Homo sapiens
  misc_RNA (1)...(19): siRNA sense strand
caggaggaauuaaugaaua

SEQ ID NO: 1204276 - RNA, 19 nt, Homo sapiens
  misc_RNA (1)...(19): siRNA sense strand
caacuuugcuccaucucua

SEQ ID NO: 1204277 - RNA, 19 nt, Homo sapiens
  misc_RNA (1)...(19): siRNA sense strand
ccucagauaucaccacuuu

SEQ ID NO: 1204278 - RNA, 19 nt, Homo sapiens
  misc_RNA (1)...(19): siRNA sense strand
gacacaagcugcaaagaug

SEQ ID NO: 1204279 - RNA, 19 nt, Homo sapiens
  misc_RNA (1)...(19): siRNA sense strand
gaacaugaacccaaugaug

SEQ ID NO: 1204280 - RNA, 19 nt, Homo sapiens
  misc_RNA (1)...(19): siRNA sense strand
gaucagauacagcuaauga

SEQ ID NO: 1204281 - RNA, 19 nt, Homo sapiens
  misc_RNA (1)...(19): siRNA sense strand
gaaauacgaauguucagaa

SEQ ID NO: 1204282 - RNA, 19 nt, Homo sapiens
  misc_RNA (1)...(19): siRNA sense strand
gcagaggcaugacaggaaa

SEQ ID NO: 1204283 - RNA, 19 nt, Homo sapiens
  misc_RNA (1)...(19): siRNA sense strand
aguagugccuguaauaaua

SEQ ID NO: 1204284 - RNA, 19 nt, Homo sapiens
  misc_RNA (1)...(19): siRNA sense strand
ucagaagaccaguguauua

SEQ ID NO: 1204285 - RNA, 19 nt, Homo sapiens
  misc_RNA (1)...(19): siRNA sense strand
gcaagauacuacagguaaa

SEQ ID NO: 1204286 - RNA, 19 nt, Homo sapiens
  misc_RNA (1)...(19): siRNA sense strand
uguauuagcucacaauuag

SEQ ID NO: 1204287 - RNA, 19 nt, Homo sapiens
  misc_RNA (1)...(19): siRNA sense strand
gguguagaauccuuuauga

SEQ ID NO: 1204288 - RNA, 19 nt, Homo sapiens
  misc_RNA (1)...(19): siRNA sense strand
gcaaagagccaugcuuaug

SEQ ID NO: 1204289 - RNA, 19 nt, Homo sapiens
  misc_RNA (1)...(19): siRNA sense strand
gauuuaagaucaacuccaa

SEQ ID NO: 1204290 - RNA, 19 nt, Homo sapiens
  misc_RNA (1)...(19): siRNA sense strand
gaaaucagacaucucauca

SEQ ID NO: 1204291 - RNA, 19 nt, Homo sapiens
  misc_RNA (1)...(19): siRNA sense strand
caaagagccaugcuuauga

SEQ ID NO: 1204292 - RNA, 19 nt, Homo sapiens
  misc_RNA (1)...(19): siRNA sense strand
cagcugguauccuuccuua

SEQ ID NO: 1204293 - RNA, 19 nt, Homo sapiens
  misc_RNA (1)...(19): siRNA sense strand
ggagaaggcagcacaguug

SEQ ID NO: 1204294 - RNA, 19 nt, Homo sapiens
  misc_RNA (1)...(19): siRNA sense strand
cagcugaccuugaccaguu

SEQ ID NO: 1204295 - RNA, 19 nt, Homo sapiens
  misc_RNA (1)...(19): siRNA sense strand
gagaauggaacaagagaaa

SEQ ID NO: 1204296 - RNA, 19 nt, Homo sapiens
  misc_RNA (1)...(19): siRNA sense strand
ucaaaccagucacaaacua

SEQ ID NO: 1204297 - RNA, 19 nt, Homo sapiens
  misc_RNA (1)...(19): siRNA sense strand
uauggaagguacaggaaua

SEQ ID NO: 1204298 - RNA, 19 nt, Homo sapiens
  misc_RNA (1)...(19): siRNA sense strand
ggaagcaauugauaaccaa

SEQ ID NO: 1204299 - RNA, 19 nt, Homo sapiens
  misc_RNA (1)...(19): siRNA sense strand
gaaaacagucgaucagaua

SEQ ID NO: 1204300 - RNA, 19 nt, Homo sapiens
  misc_RNA (1)...(19): siRNA sense strand
gaagggagaauuguauuug

SEQ ID NO: 1204301 - RNA, 19 nt, Homo sapiens
  misc_RNA (1)...(19): siRNA sense strand
ugaccaguuugaucaguua

SEQ ID NO: 1204302 - RNA, 19 nt, Homo sapiens
  misc_RNA (1)...(19): siRNA sense strand
gcauaacaaugacagacuu

SEQ ID NO: 1204303 - RNA, 19 nt, Homo sapiens
  misc_RNA (1)...(19): siRNA sense strand
uaaccgaucuuauucaaac

SEQ ID NO: 1204304 - RNA, 19 nt, Homo sapiens
  misc_RNA (1)...(19): siRNA sense strand
gaacugguugggaagauuu

SEQ ID NO: 1204305 - RNA, 19 nt, Homo sapiens
  misc_RNA (1)...(19): siRNA sense strand
gcccugagcagauaaauga

SEQ ID NO: 1204306 - RNA, 19 nt, Homo sapiens
  misc_RNA (1)...(19): siRNA sense strand
auucagggcuucugcauaa

SEQ ID NO: 1204307 - RNA, 19 nt, Homo sapiens
  misc_RNA (1)...(19): siRNA sense strand
gaacaagagaaaucaacaa

SEQ ID NO: 1204308 - RNA, 19 nt, Homo sapiens
  misc_RNA (1)...(19): siRNA sense strand
gaugagcucuuugcagaug

SEQ ID NO: 1204309 - RNA, 19 nt, Homo sapiens
  misc_RNA (1)...(19): siRNA sense strand
cauagcagcagucauagua

SEQ ID NO: 1204310 - RNA, 19 nt, Homo sapiens
  misc_RNA (1)...(19): siRNA sense strand
guaaaucccucggucaauc

SEQ ID NO: 1204311 - RNA, 19 nt, Homo sapiens
  misc_RNA (1)...(19): siRNA sense strand
guacagaaaucagacaucu

SEQ ID NO: 1204312 - RNA, 19 nt, Homo sapiens
  misc_RNA (1)...(19): siRNA sense strand
gaggcaacacgacgaaaua

SEQ ID NO: 1204313 - RNA, 19 nt, Homo sapiens
  misc_RNA (1)...(19): siRNA sense strand
ggacaggccaguucacaga

SEQ ID NO: 1204314 - RNA, 19 nt, Homo sapiens
  misc_RNA (1)...(19): siRNA sense strand
cuucauagcagcagucaua

SEQ ID NO: 1204315 - RNA, 19 nt, Homo sapiens
  misc_RNA (1)...(19): siRNA sense strand
guccagacaugcaaccuuu

SEQ ID NO: 1204316 - RNA, 19 nt, Homo sapiens
  misc_RNA (1)...(19): siRNA sense strand
ucaagaggauggagaagau

SEQ ID NO: 1204317 - RNA, 19 nt, Homo sapiens
  misc_RNA (1)...(19): siRNA sense strand
ugaagagaauggaacaaga

SEQ ID NO: 1204318 - RNA, 19 nt, Homo sapiens
  misc_RNA (1)...(19): siRNA sense strand
ccugaaugcucaaauguug

SEQ ID NO: 1204319 - RNA, 19 nt, Homo sapiens
  misc_RNA (1)...(19): siRNA sense strand
ggaaaggaucgccauguga

SEQ ID NO: 1204320 - RNA, 19 nt, Homo sapiens
  misc_RNA (1)...(19): siRNA sense strand
gagccuggaugauguaaag

SEQ ID NO: 1204321 - RNA, 19 nt, Homo sapiens
  misc_RNA (1)...(19): siRNA sense strand
aaagcugaguccaaagaua

SEQ ID NO: 1204322 - RNA, 19 nt, Homo sapiens
  misc_RNA (1)...(19): siRNA sense strand
gggaagauuuagugaggaa

SEQ ID NO: 1204323 - RNA, 19 nt, Homo sapiens
  misc_RNA (1)...(19): siRNA sense strand
agucaugucugauuuguau

SEQ ID NO: 1204324 - RNA, 19 nt, Homo sapiens
  misc_RNA (1)...(19): siRNA sense strand
gaaguaaugcaguguuuca

SEQ ID NO: 1204325 - RNA, 19 nt, Homo sapiens
  misc_RNA (1)...(19): siRNA sense strand
acaaguagugccuguaaua

SEQ ID NO: 1204326 - RNA, 19 nt, Homo sapiens
  misc_RNA (1)...(19): siRNA sense strand
aaacugagcuagcugaacu

SEQ ID NO: 1204327 - RNA, 19 nt, Homo sapiens
  misc_RNA (1)...(19): siRNA sense strand
ugacagacuuucagaugga

SEQ ID NO: 1204328 - RNA, 19 nt, Homo sapiens
  misc_RNA (1)...(19): siRNA sense strand
gugaggaagugcauuuaug

SEQ ID NO: 1204329 - RNA, 19 nt, Homo sapiens
  misc_RNA (1)...(19): siRNA sense strand
cagaaugucuuccaguauc

SEQ ID NO: 1204330 - RNA, 19 nt, Homo sapiens
  misc_RNA (1)...(19): siRNA sense strand
auugacagcuugaguguaa

SEQ ID NO: 1204331 - RNA, 19 nt, Homo sapiens
  misc_RNA (1)...(19): siRNA sense strand
ugaugacgauguacagaaa

SEQ ID NO: 1204332 - RNA, 19 nt, Homo sapiens
  misc_RNA (1)...(19): siRNA sense strand
acacaggccucuacugcaa

SEQ ID NO: 1204333 - RNA, 19 nt, Homo sapiens
  misc_RNA (1)...(19): siRNA sense strand
caggcaaacucuaaacaga

SEQ ID NO: 1204334 - RNA, 19 nt, Homo sapiens
  misc_RNA (1)...(19): siRNA sense strand
gaagaccaguguauuagcu

SEQ ID NO: 1204335 - RNA, 19 nt, Homo sapiens
  misc_RNA (1)...(19): siRNA sense strand
uaccugagcuggaauugga

SEQ ID NO: 1204336 - RNA, 19 nt, Homo sapiens
  misc_RNA (1)...(19): siRNA sense strand
gaacuggaugcuucaaaga

SEQ ID NO: 1204337 - RNA, 19 nt, Homo sapiens
  misc_RNA (1)...(19): siRNA sense strand
guacaaggaaacuccagua

SEQ ID NO: 1204338 - RNA, 19 nt, Homo sapiens
  misc_RNA (1)...(19): siRNA sense strand
ucacagaauucaccuagca

SEQ ID NO: 1204339 - RNA, 19 nt, Homo sapiens
  misc_RNA (1)...(19): siRNA sense strand
gcagagaaccaucuuaugc

SEQ ID NO: 1204340 - RNA, 19 nt, Homo sapiens
  misc_RNA (1)...(19): siRNA sense strand
cagagaauguaaccagcua

SEQ ID NO: 1204341 - RNA, 19 nt, Homo sapiens
  misc_RNA (1)...(19): siRNA sense strand
guuacugucugccaacauu

SEQ ID NO: 1204342 - RNA, 19 nt, Homo sapiens
  misc_RNA (1)...(19): siRNA sense strand
ccuagcagauuaaauauac

SEQ ID NO: 1204343 - RNA, 19 nt, Homo sapiens
  misc_RNA (1)...(19): siRNA sense strand
uaacaucuuuacaggguau

SEQ ID NO: 1204344 - RNA, 19 nt, Homo sapiens
  misc_RNA (1)...(19): siRNA sense strand
uagccaauguugccuuaaa

SEQ ID NO: 1204345 - RNA, 19 nt, Homo sapiens
  misc_RNA (1)...(19): siRNA sense strand
guuacggcaugcugauaua

SEQ ID NO: 1204346 - RNA, 19 nt, Homo sapiens
  misc_RNA (1)...(19): siRNA sense strand
gaauuguauuugugucaga

SEQ ID NO: 1204347 - RNA, 19 nt, Homo sapiens
  misc_RNA (1)...(19): siRNA sense strand
uagauuaccugagcuggaa

SEQ ID NO: 1204348 - RNA, 19 nt, Homo sapiens
  misc_RNA (1)...(19): siRNA sense strand
acaaggaaacuccaguaua

SEQ ID NO: 1204349 - RNA, 19 nt, Homo sapiens
  misc_RNA (1)...(19): siRNA sense strand
gacaacaacugccgaacag

SEQ ID NO: 1204350 - RNA, 19 nt, Homo sapiens
  misc_RNA (1)...(19): siRNA sense strand
gaauggaacaagagaaauc

SEQ ID NO: 1204351 - RNA, 19 nt, Homo sapiens
  misc_RNA (1)...(19): siRNA sense strand
caaguagugccuguaauaa

SEQ ID NO: 1204352 - RNA, 19 nt, Homo sapiens
  misc_RNA (1)...(19): siRNA sense strand
caaaaucacuaguaaaugg

SEQ ID NO: 1204353 - RNA, 19 nt, Homo sapiens
  misc_RNA (1)...(19): siRNA sense strand
cauaguaauucuagcaaca

SEQ ID NO: 1204354 - RNA, 19 nt, Homo sapiens
  misc_RNA (1)...(19): siRNA sense strand
gaucagauuccauggacaa

SEQ ID NO: 1204355 - RNA, 19 nt, Homo sapiens
  misc_RNA (1)...(19): siRNA sense strand
gcagggagcaagaaaauaa

SEQ ID NO: 1204356 - RNA, 19 nt, Homo sapiens
  misc_RNA (1)...(19): siRNA sense strand
gcagaugagcucacagaau

SEQ ID NO: 1204357 - RNA, 19 nt, Homo sapiens
  misc_RNA (1)...(19): siRNA sense strand
ugaaugaaggacccaauaa

SEQ ID NO: 1204358 - RNA, 19 nt, Homo sapiens
  misc_RNA (1)...(19): siRNA sense strand
acaauuccuuuccuccuaa

SEQ ID NO: 1204359 - RNA, 19 nt, Homo sapiens
  misc_RNA (1)...(19): siRNA sense strand
caaggaaacuccaguauaa

SEQ ID NO: 1204360 - RNA, 19 nt, Homo sapiens
  misc_RNA (1)...(19): siRNA sense strand
gaauucaccuagcagauua

SEQ ID NO: 1204361 - RNA, 19 nt, Homo sapiens
  misc_RNA (1)...(19): siRNA sense strand
cgaaauagccauaccuuua

SEQ ID NO: 1204362 - RNA, 19 nt, Homo sapiens
  misc_RNA (1)...(19): siRNA sense strand
cagaugagcucacagaauu

SEQ ID NO: 1204363 - RNA, 19 nt, Homo sapiens
  misc_RNA (1)...(19): siRNA sense strand
gaaauagccauaccuuuaa

SEQ ID NO: 1204364 - RNA, 19 nt, Homo sapiens
  misc_RNA (1)...(19): siRNA sense strand
ucagacaucucaucaagua

SEQ ID NO: 1204365 - RNA, 19 nt, Homo sapiens
  misc_RNA (1)...(19): siRNA sense strand
gaauguaaccagcuacuua

SEQ ID NO: 1204366 - RNA, 19 nt, Homo sapiens
  misc_RNA (1)...(19): siRNA sense strand
gacaacagcucuagugaug

SEQ ID NO: 1204367 - RNA, 19 nt, Homo sapiens
  misc_RNA (1)...(19): siRNA sense strand
gacgaugccuguucaagua

SEQ ID NO: 1204368 - RNA, 19 nt, Homo sapiens
  misc_RNA (1)...(19): siRNA sense strand
ugaagaaucugcuaccaaa

SEQ ID NO: 1204369 - RNA, 19 nt, Homo sapiens
  misc_RNA (1)...(19): siRNA sense strand
cagauuccauggacaaaua

SEQ ID NO: 1204370 - RNA, 19 nt, Homo sapiens
  misc_RNA (1)...(19): siRNA sense strand
ccagacagcuguuccaaga

SEQ ID NO: 1204371 - RNA, 19 nt, Homo sapiens
  misc_RNA (1)...(19): siRNA sense strand
caagagaaaucaacaacug

SEQ ID NO: 1204372 - RNA, 19 nt, Homo sapiens
  misc_RNA (1)...(19): siRNA sense strand
ucaccuagcagauuaaaua

SEQ ID NO: 1204373 - RNA, 19 nt, Homo sapiens
  misc_RNA (1)...(19): siRNA sense strand
gaauaucccuagcacaguu

SEQ ID NO: 1204374 - RNA, 19 nt, Homo sapiens
  misc_RNA (1)...(19): siRNA sense strand
gagaagauuuccagucaug

SEQ ID NO: 1204375 - RNA, 19 nt, Homo sapiens
  misc_RNA (1)...(19): siRNA sense strand
caggaggaauuaaugaaua

SEQ ID NO: 1204376 - RNA, 19 nt, Homo sapiens
  misc_RNA (1)...(19): siRNA sense strand
caacuuugcuccaucucua

SEQ ID NO: 1204377 - RNA, 19 nt, Homo sapiens
  misc_RNA (1)...(19): siRNA sense strand
ccucagauaucaccacuuu

SEQ ID NO: 1204378 - RNA, 19 nt, Homo sapiens
  misc_RNA (1)...(19): siRNA sense strand
gacacaagcugcaaagaug

SEQ ID NO: 1204379 - RNA, 19 nt, Homo sapiens
  misc_RNA (1)...(19): siRNA sense strand
gaacaugaacccaaugaug

SEQ ID NO: 1204380 - RNA, 19 nt, Homo sapiens
  misc_RNA (1)...(19): siRNA sense strand
gaucagauacagcuaauga

SEQ ID NO: 1204381 - RNA, 19 nt, Homo sapiens
  misc_RNA (1)...(19): siRNA sense strand
gaaauacgaauguucagaa

SEQ ID NO: 1204382 - RNA, 19 nt, Homo sapiens
  misc_RNA (1)...(19): siRNA sense strand
gcagaggcaugacaggaaa

SEQ ID NO: 1204383 - RNA, 19 nt, Homo sapiens
  misc_RNA (1)...(19): siRNA sense strand
aguagugccuguaauaaua

SEQ ID NO: 1204384 - RNA, 19 nt, Homo sapiens
  misc_RNA (1)...(19): siRNA sense strand
ucagaagaccaguguauua

SEQ ID NO: 1204385 - RNA, 19 nt, Homo sapiens
  misc_RNA (1)...(19): siRNA sense strand
gcaagauacuacagguaaa

SEQ ID NO: 1204386 - RNA, 19 nt, Homo sapiens
  misc_RNA (1)...(19): siRNA sense strand
uguauuagcucacaauuag

SEQ ID NO: 1204387 - RNA, 19 nt, Homo sapiens
  misc_RNA (1)...(19): siRNA sense strand
gguguagaauccuuuauga

SEQ ID NO: 1204388 - RNA, 19 nt, Homo sapiens
  misc_RNA (1)...(19): siRNA sense strand
gcaaagagccaugcuuaug

SEQ ID NO: 1204389 - RNA, 19 nt, Homo sapiens
  misc_RNA (1)...(19): siRNA sense strand
gauuuaagaucaacuccaa

SEQ ID NO: 1204390 - RNA, 19 nt, Homo sapiens
  misc_RNA (1)...(19): siRNA sense strand
gaaaucagacaucucauca

SEQ ID NO: 1204391 - RNA, 19 nt, Homo sapiens
  misc_RNA (1)...(19): siRNA sense strand
caaagagccaugcuuauga

SEQ ID NO: 1204392 - RNA, 19 nt, Homo sapiens
  misc_RNA (1)...(19): siRNA sense strand
cagcugguauccuuccuua

SEQ ID NO: 1204393 - RNA, 19 nt, Homo sapiens
  misc_RNA (1)...(19): siRNA sense strand
ggagaaggcagcacaguug

SEQ ID NO: 1204394 - RNA, 19 nt, Homo sapiens
  misc_RNA (1)...(19): siRNA sense strand
cagcugaccuugaccaguu

SEQ ID NO: 1204395 - RNA, 19 nt, Homo sapiens
  misc_RNA (1)...(19): siRNA sense strand
gagaauggaacaagagaaa

SEQ ID NO: 1204396 - RNA, 19 nt, Homo sapiens
  misc_RNA (1)...(19): siRNA sense strand
ucaaaccagucacaaacua

SEQ ID NO: 1204397 - RNA, 19 nt, Homo sapiens
  misc_RNA (1)...(19): siRNA sense strand
uauggaagguacaggaaua

SEQ ID NO: 1204398 - RNA, 19 nt, Homo sapiens
  misc_RNA (1)...(19): siRNA sense strand
ggaagcaauugauaaccaa

SEQ ID NO: 1204399 - RNA, 19 nt, Homo sapiens
  misc_RNA (1)...(19): siRNA sense strand
gaaaacagucgaucagaua

SEQ ID NO: 1204400 - RNA, 19 nt, Homo sapiens
  misc_RNA (1)...(19): siRNA sense strand
gaagggagaauuguauuug

SEQ ID NO: 1204401 - RNA, 19 nt, Homo sapiens
  misc_RNA (1)...(19): siRNA sense strand
ugaccaguuugaucaguua

SEQ ID NO: 1204402 - RNA, 19 nt, Homo sapiens
  misc_RNA (1)...(19): siRNA sense strand
gcauaacaaugacagacuu

SEQ ID NO: 1204403 - RNA, 19 nt, Homo sapiens
  misc_RNA (1)...(19): siRNA sense strand
uaaccgaucuuauucaaac

SEQ ID NO: 1204404 - RNA, 19 nt, Homo sapiens
  misc_RNA (1)...(19): siRNA sense strand
gaacugguugggaagauuu

SEQ ID NO: 1204405 - RNA, 19 nt, Homo sapiens
  misc_RNA (1)...(19): siRNA sense strand
gcccugagcagauaaauga

SEQ ID NO: 1204406 - RNA, 19 nt, Homo sapiens
  misc_RNA (1)...(19): siRNA sense strand
auucagggcuucugcauaa

SEQ ID NO: 1204407 - RNA, 19 nt, Homo sapiens
  misc_RNA (1)...(19): siRNA sense strand
gaacaagagaaaucaacaa

SEQ ID NO: 1204408 - RNA, 19 nt, Homo sapiens
  misc_RNA (1)...(19): siRNA sense strand
gaugagcucuuugcagaug

SEQ ID NO: 1204409 - RNA, 19 nt, Homo sapiens
  misc_RNA (1)...(19): siRNA sense strand
cauagcagcagucauagua

SEQ ID NO: 1204410 - RNA, 19 nt, Homo sapiens
  misc_RNA (1)...(19): siRNA sense strand
guaaaucccucggucaauc

SEQ ID NO: 1204411 - RNA, 19 nt, Homo sapiens
  misc_RNA (1)...(19): siRNA sense strand
guacagaaaucagacaucu

SEQ ID NO: 1204412 - RNA, 19 nt, Homo sapiens
  misc_RNA (1)...(19): siRNA sense strand
gaggcaacacgacgaaaua

SEQ ID NO: 1204413 - RNA, 19 nt, Homo sapiens
  misc_RNA (1)...(19): siRNA sense strand
ggacaggccaguucacaga

SEQ ID NO: 1204414 - RNA, 19 nt, Homo sapiens
  misc_RNA (1)...(19): siRNA sense strand
cuucauagcagcagucaua

SEQ ID NO: 1204415 - RNA, 19 nt, Homo sapiens
  misc_RNA (1)...(19): siRNA sense strand
guccagacaugcaaccuuu

SEQ ID NO: 1204416 - RNA, 19 nt, Homo sapiens
  misc_RNA (1)...(19): siRNA sense strand
ucaagaggauggagaagau

SEQ ID NO: 1204417 - RNA, 19 nt, Homo sapiens
  misc_RNA (1)...(19): siRNA sense strand
ugaagagaauggaacaaga

SEQ ID NO: 1204418 - RNA, 19 nt, Homo sapiens
  misc_RNA (1)...(19): siRNA sense strand
ccugaaugcucaaauguug

SEQ ID NO: 1204419 - RNA, 19 nt, Homo sapiens
  misc_RNA (1)...(19): siRNA sense strand
ggaaaggaucgccauguga

SEQ ID NO: 1204420 - RNA, 19 nt, Homo sapiens
  misc_RNA (1)...(19): siRNA sense strand
gagccuggaugauguaaag

SEQ ID NO: 1204421 - RNA, 19 nt, Homo sapiens
  misc_RNA (1)...(19): siRNA sense strand
aaagcugaguccaaagaua

SEQ ID NO: 1204422 - RNA, 19 nt, Homo sapiens
  misc_RNA (1)...(19): siRNA sense strand
gggaagauuuagugaggaa

SEQ ID NO: 1204423 - RNA, 19 nt, Homo sapiens
  misc_RNA (1)...(19): siRNA sense strand
agucaugucugauuuguau

SEQ ID NO: 1204424 - RNA, 19 nt, Homo sapiens
  misc_RNA (1)...(19): siRNA sense strand
gaaguaaugcaguguuuca

SEQ ID NO: 1204425 - RNA, 19 nt, Homo sapiens
  misc_RNA (1)...(19): siRNA sense strand
acaaguagugccuguaaua

SEQ ID NO: 1204426 - RNA, 19 nt, Homo sapiens
  misc_RNA (1)...(19): siRNA sense strand
aaacugagcuagcugaacu

SEQ ID NO: 1204427 - RNA, 19 nt, Homo sapiens
  misc_RNA (1)...(19): siRNA sense strand
ugacagacuuucagaugga

SEQ ID NO: 1204428 - RNA, 19 nt, Homo sapiens
  misc_RNA (1)...(19): siRNA sense strand
gugaggaagugcauuuaug

SEQ ID NO: 1204429 - RNA, 19 nt, Homo sapiens
  misc_RNA (1)...(19): siRNA sense strand
cagaaugucuuccaguauc

SEQ ID NO: 1204430 - RNA, 19 nt, Homo sapiens
  misc_RNA (1)...(19): siRNA sense strand
auugacagcuugaguguaa

SEQ ID NO: 1204431 - RNA, 19 nt, Homo sapiens
  misc_RNA (1)...(19): siRNA sense strand
ugaugacgauguacagaaa

SEQ ID NO: 1204432 - RNA, 19 nt, Homo sapiens
  misc_RNA (1)...(19): siRNA sense strand
acacaggccucuacugcaa

SEQ ID NO: 1204433 - RNA, 19 nt, Homo sapiens
  misc_RNA (1)...(19): siRNA sense strand
caggcaaacucuaaacaga

SEQ ID NO: 1204434 - RNA, 19 nt, Homo sapiens
  misc_RNA (1)...(19): siRNA sense strand
gaagaccaguguauuagcu

SEQ ID NO: 1204435 - RNA, 19 nt, Homo sapiens
  misc_RNA (1)...(19): siRNA sense strand
uaccugagcuggaauugga

SEQ ID NO: 1204436 - RNA, 19 nt, Homo sapiens
  misc_RNA (1)...(19): siRNA sense strand
gaacuggaugcuucaaaga

SEQ ID NO: 1204437 - RNA, 19 nt, Homo sapiens
  misc_RNA (1)...(19): siRNA sense strand
guacaaggaaacuccagua

SEQ ID NO: 1204438 - RNA, 19 nt, Homo sapiens
  misc_RNA (1)...(19): siRNA sense strand
ucacagaauucaccuagca

SEQ ID NO: 1204439 - RNA, 19 nt, Homo sapiens
  misc_RNA (1)...(19): siRNA sense strand
gcagagaaccaucuuaugc

SEQ ID NO: 1204440 - RNA, 19 nt, Homo sapiens
  misc_RNA (1)...(19): siRNA sense strand
cagagaauguaaccagcua

SEQ ID NO: 1204441 - RNA, 19 nt, Homo sapiens
  misc_RNA (1)...(19): siRNA sense strand
guuacugucugccaacauu

SEQ ID NO: 1204442 - RNA, 19 nt, Homo sapiens
  misc_RNA (1)...(19): siRNA sense strand
ccuagcagauuaaauauac

SEQ ID NO: 1204443 - RNA, 19 nt, Homo sapiens
  misc_RNA (1)...(19): siRNA sense strand
uaacaucuuuacaggguau

SEQ ID NO: 1204444 - RNA, 19 nt, Homo sapiens
  misc_RNA (1)...(19): siRNA sense strand
uagccaauguugccuuaaa

SEQ ID NO: 1204445 - RNA, 19 nt, Homo sapiens
  misc_RNA (1)...(19): siRNA sense strand
guuacggcaugcugauaua

SEQ ID NO: 1204446 - RNA, 19 nt, Homo sapiens
  misc_RNA (1)...(19): siRNA sense strand
gaauuguauuugugucaga

SEQ ID NO: 1204447 - RNA, 19 nt, Homo sapiens
  misc_RNA (1)...(19): siRNA sense strand
uagauuaccugagcuggaa

SEQ ID NO: 1204448 - RNA, 19 nt, Homo sapiens
  misc_RNA (1)...(19): siRNA sense strand
acaaggaaacuccaguaua

SEQ ID NO: 1204449 - RNA, 19 nt, Homo sapiens
  misc_RNA (1)...(19): siRNA sense strand
gacaacaacugccgaacag

SEQ ID NO: 1204450 - RNA, 19 nt, Homo sapiens
  misc_RNA (1)...(19): siRNA sense strand
gaauggaacaagagaaauc

SEQ ID NO: 1204451 - RNA, 19 nt, Homo sapiens
  misc_RNA (1)...(19): siRNA sense strand
caaguagugccuguaauaa

SEQ ID NO: 1204452 - RNA, 19 nt, Homo sapiens
  misc_RNA (1)...(19): siRNA sense strand
caaaaucacuaguaaaugg

SEQ ID NO: 1204453 - RNA, 19 nt, Homo sapiens
  misc_RNA (1)...(19): siRNA sense strand
cauaguaauucuagcaaca

SEQ ID NO: 1204454 - RNA, 19 nt, Homo sapiens
  misc_RNA (1)...(19): siRNA sense strand
gaucagauuccauggacaa

SEQ ID NO: 1204455 - RNA, 19 nt, Homo sapiens
  misc_RNA (1)...(19): siRNA sense strand
gcagggagcaagaaaauaa

SEQ ID NO: 1204456 - RNA, 19 nt, Homo sapiens
  misc_RNA (1)...(19): siRNA sense strand
gcagaugagcucacagaau

SEQ ID NO: 1204457 - RNA, 19 nt, Homo sapiens
  misc_RNA (1)...(19): siRNA sense strand
ugaaugaaggacccaauaa

SEQ ID NO: 1204458 - RNA, 19 nt, Homo sapiens
  misc_RNA (1)...(19): siRNA sense strand
acaauuccuuuccuccuaa

SEQ ID NO: 1204459 - RNA, 19 nt, Homo sapiens
  misc_RNA (1)...(19): siRNA sense strand
caaggaaacuccaguauaa

SEQ ID NO: 1204460 - RNA, 19 nt, Homo sapiens
  misc_RNA (1)...(19): siRNA sense strand
gaauucaccuagcagauua

SEQ ID NO: 1204461 - RNA, 19 nt, Homo sapiens
  misc_RNA (1)...(19): siRNA sense strand
cgaaauagccauaccuuua

SEQ ID NO: 1204462 - RNA, 19 nt, Homo sapiens
  misc_RNA (1)...(19): siRNA sense strand
cagaugagcucacagaauu

SEQ ID NO: 1204463 - RNA, 19 nt, Homo sapiens
  misc_RNA (1)...(19): siRNA sense strand
gaaauagccauaccuuuaa

SEQ ID NO: 1204464 - RNA, 19 nt, Homo sapiens
  misc_RNA (1)...(19): siRNA sense strand
ucagacaucucaucaagua

SEQ ID NO: 1204465 - RNA, 19 nt, Homo sapiens
  misc_RNA (1)...(19): siRNA sense strand
gaauguaaccagcuacuua

SEQ ID NO: 1204466 - RNA, 19 nt, Homo sapiens
  misc_RNA (1)...(19): siRNA sense strand
gacaacagcucuagugaug

SEQ ID NO: 1204467 - RNA, 19 nt, Homo sapiens
  misc_RNA (1)...(19): siRNA sense strand
gacgaugccuguucaagua

SEQ ID NO: 1204468 - RNA, 19 nt, Homo sapiens
  misc_RNA (1)...(19): siRNA sense strand
ugaagaaucugcuaccaaa

SEQ ID NO: 1204469 - RNA, 19 nt, Homo sapiens
  misc_RNA (1)...(19): siRNA sense strand
cagauuccauggacaaaua

SEQ ID NO: 1204470 - RNA, 19 nt, Homo sapiens
  misc_RNA (1)...(19): siRNA sense strand
ccagacagcuguuccaaga

SEQ ID NO: 1204471 - RNA, 19 nt, Homo sapiens
  misc_RNA (1)...(19): siRNA sense strand
caagagaaaucaacaacug

SEQ ID NO: 1204472 - RNA, 19 nt, Homo sapiens
  misc_RNA (1)...(19): siRNA sense strand
ucaccuagcagauuaaaua

SEQ ID NO: 1204473 - RNA, 19 nt, Homo sapiens
  misc_RNA (1)...(19): siRNA sense strand
gaauaucccuagcacaguu

SEQ ID NO: 1204474 - RNA, 19 nt, Homo sapiens
  misc_RNA (1)...(19): siRNA sense strand
gagaagauuuccagucaug

SEQ ID NO: 1204475 - RNA, 19 nt, Homo sapiens
  misc_RNA (1)...(19): siRNA sense strand
caggaggaauuaaugaaua

SEQ ID NO: 1204476 - RNA, 19 nt, Homo sapiens
  misc_RNA (1)...(19): siRNA sense strand
caacuuugcuccaucucua

SEQ ID NO: 1204477 - RNA, 19 nt, Homo sapiens
  misc_RNA (1)...(19): siRNA sense strand
ccucagauaucaccacuuu

SEQ ID NO: 1204478 - RNA, 19 nt, Homo sapiens
  misc_RNA (1)...(19): siRNA sense strand
gacacaagcugcaaagaug

SEQ ID NO: 1204479 - RNA, 19 nt, Homo sapiens
  misc_RNA (1)...(19): siRNA sense strand
gaacaugaacccaaugaug

SEQ ID NO: 1204480 - RNA, 19 nt, Homo sapiens
  misc_RNA (1)...(19): siRNA sense strand
gaucagauacagcuaauga

SEQ ID NO: 1204481 - RNA, 19 nt, Homo sapiens
  misc_RNA (1)...(19): siRNA sense strand
gaaauacgaauguucagaa

SEQ ID NO: 1204482 - RNA, 19 nt, Homo sapiens
  misc_RNA (1)...(19): siRNA sense strand
gcagaggcaugacaggaaa

SEQ ID NO: 1204483 - RNA, 19 nt, Homo sapiens
  misc_RNA (1)...(19): siRNA sense strand
aguagugccuguaauaaua

SEQ ID NO: 1204484 - RNA, 19 nt, Homo sapiens
  misc_RNA (1)...(19): siRNA sense strand
ucagaagaccaguguauua

SEQ ID NO: 1204485 - RNA, 19 nt, Homo sapiens
  misc_RNA (1)...(19): siRNA sense strand
gcaagauacuacagguaaa

SEQ ID NO: 1204486 - RNA, 19 nt, Homo sapiens
  misc_RNA (1)...(19): siRNA sense strand
uguauuagcucacaauuag

SEQ ID NO: 1204487 - RNA, 19 nt, Homo sapiens
  misc_RNA (1)...(19): siRNA sense strand
gguguagaauccuuuauga

SEQ ID NO: 1204488 - RNA, 19 nt, Homo sapiens
  misc_RNA (1)...(19): siRNA sense strand
gcaaagagccaugcuuaug

SEQ ID NO: 1204489 - RNA, 19 nt, Homo sapiens
  misc_RNA (1)...(19): siRNA sense strand
gauuuaagaucaacuccaa

SEQ ID NO: 1204490 - RNA, 19 nt, Homo sapiens
  misc_RNA (1)...(19): siRNA sense strand
gaaaucagacaucucauca

SEQ ID NO: 1204491 - RNA, 19 nt, Homo sapiens
  misc_RNA (1)...(19): siRNA sense strand
caaagagccaugcuuauga

SEQ ID NO: 1204492 - RNA, 19 nt, Homo sapiens
  misc_RNA (1)...(19): siRNA sense strand
cagcugguauccuuccuua

SEQ ID NO: 1204493 - RNA, 19 nt, Homo sapiens
  misc_RNA (1)...(19): siRNA sense strand
ggagaaggcagcacaguug

SEQ ID NO: 1204494 - RNA, 19 nt, Homo sapiens
  misc_RNA (1)...(19): siRNA sense strand
cagcugaccuugaccaguu

SEQ ID NO: 1204495 - RNA, 19 nt, Homo sapiens
  misc_RNA (1)...(19): siRNA sense strand
gagaauggaacaagagaaa

SEQ ID NO: 1204496 - RNA, 19 nt, Homo sapiens
  misc_RNA (1)...(19): siRNA sense strand
ucaaaccagucacaaacua

SEQ ID NO: 1204497 - RNA, 19 nt, Homo sapiens
  misc_RNA (1)...(19): siRNA sense strand
uauggaagguacaggaaua

SEQ ID NO: 1204498 - RNA, 19 nt, Homo sapiens
  misc_RNA (1)...(19): siRNA sense strand
ggaagcaauugauaaccaa

SEQ ID NO: 1204499 - RNA, 19 nt, Homo sapiens
  misc_RNA (1)...(19): siRNA sense strand
gaaaacagucgaucagaua

SEQ ID NO: 1204500 - RNA, 19 nt, Homo sapiens
  misc_RNA (1)...(19): siRNA sense strand
gaagggagaauuguauuug

SEQ ID NO: 1204501 - RNA, 19 nt, Homo sapiens
  misc_RNA (1)...(19): siRNA sense strand
ugaccaguuugaucaguua

SEQ ID NO: 1204502 - RNA, 19 nt, Homo sapiens
  misc_RNA (1)...(19): siRNA sense strand
gcauaacaaugacagacuu

SEQ ID NO: 1204503 - RNA, 19 nt, Homo sapiens
  misc_RNA (1)...(19): siRNA sense strand
uaaccgaucuuauucaaac

SEQ ID NO: 1204504 - RNA, 19 nt, Homo sapiens
  misc_RNA (1)...(19): siRNA sense strand
gaacugguugggaagauuu

SEQ ID NO: 1204505 - RNA, 19 nt, Homo sapiens
  misc_RNA (1)...(19): siRNA sense strand
gcccugagcagauaaauga

SEQ ID NO: 1204506 - RNA, 19 nt, Homo sapiens
  misc_RNA (1)...(19): siRNA sense strand
auucagggcuucugcauaa

SEQ ID NO: 1204507 - RNA, 19 nt, Homo sapiens
  misc_RNA (1)...(19): siRNA sense strand
gaacaagagaaaucaacaa

SEQ ID NO: 1204508 - RNA, 19 nt, Homo sapiens
  misc_RNA (1)...(19): siRNA sense strand
gaugagcucuuugcagaug

SEQ ID NO: 1204509 - RNA, 19 nt, Homo sapiens
  misc_RNA (1)...(19): siRNA sense strand
cauagcagcagucauagua

SEQ ID NO: 1204510 - RNA, 19 nt, Homo sapiens
  misc_RNA (1)...(19): siRNA sense strand
guaaaucccucggucaauc

SEQ ID NO: 1204511 - RNA, 19 nt, Homo sapiens
  misc_RNA (1)...(19): siRNA sense strand
guacagaaaucagacaucu

SEQ ID NO: 1204512 - RNA, 19 nt, Homo sapiens
  misc_RNA (1)...(19): siRNA sense strand
gaggcaacacgacgaaaua

SEQ ID NO: 1204513 - RNA, 19 nt, Homo sapiens
  misc_RNA (1)...(19): siRNA sense strand
ggacaggccaguucacaga

SEQ ID NO: 1204514 - RNA, 19 nt, Homo sapiens
  misc_RNA (1)...(19): siRNA sense strand
cuucauagcagcagucaua

SEQ ID NO: 1204515 - RNA, 19 nt, Homo sapiens
  misc_RNA (1)...(19): siRNA sense strand
guccagacaugcaaccuuu

SEQ ID NO: 1204516 - RNA, 19 nt, Homo sapiens
  misc_RNA (1)...(19): siRNA sense strand
ucaagaggauggagaagau

SEQ ID NO: 1204517 - RNA, 19 nt, Homo sapiens
  misc_RNA (1)...(19): siRNA sense strand
ugaagagaauggaacaaga

SEQ ID NO: 1204518 - RNA, 19 nt, Homo sapiens
  misc_RNA (1)...(19): siRNA sense strand
ccugaaugcucaaauguug

SEQ ID NO: 1204519 - RNA, 19 nt, Homo sapiens
  misc_RNA (1)...(19): siRNA sense strand
ggaaaggaucgccauguga

SEQ ID NO: 1204520 - RNA, 19 nt, Homo sapiens
  misc_RNA (1)...(19): siRNA sense strand
gagccuggaugauguaaag

SEQ ID NO: 1204521 - RNA, 19 nt, Homo sapiens
  misc_RNA (1)...(19): siRNA sense strand
aaagcugaguccaaagaua

SEQ ID NO: 1204522 - RNA, 19 nt, Homo sapiens
  misc_RNA (1)...(19): siRNA sense strand
gggaagauuuagugaggaa

SEQ ID NO: 1204523 - RNA, 19 nt, Homo sapiens
  misc_RNA (1)...(19): siRNA sense strand
agucaugucugauuuguau

SEQ ID NO: 1204524 - RNA, 19 nt, Homo sapiens
  misc_RNA (1)...(19): siRNA sense strand
gaaguaaugcaguguuuca

SEQ ID NO: 1204525 - RNA, 19 nt, Homo sapiens
  misc_RNA (1)...(19): siRNA sense strand
acaaguagugccuguaaua

SEQ ID NO: 1204526 - RNA, 19 nt, Homo sapiens
  misc_RNA (1)...(19): siRNA sense strand
aaacugagcuagcugaacu

SEQ ID NO: 1204527 - RNA, 19 nt, Homo sapiens
  misc_RNA (1)...(19): siRNA sense strand
ugacagacuuucagaugga

SEQ ID NO: 1204528 - RNA, 19 nt, Homo sapiens
  misc_RNA (1)...(19): siRNA sense strand
gugaggaagugcauuuaug

SEQ ID NO: 1204529 - RNA, 19 nt, Homo sapiens
  misc_RNA (1)...(19): siRNA sense strand
cagaaugucuuccaguauc

SEQ ID NO: 1204530 - RNA, 19 nt, Homo sapiens
  misc_RNA (1)...(19): siRNA sense strand
auugacagcuugaguguaa

SEQ ID NO: 1204531 - RNA, 19 nt, Homo sapiens
  misc_RNA (1)...(19): siRNA sense strand
ugaugacgauguacagaaa

SEQ ID NO: 1204532 - RNA, 19 nt, Homo sapiens
  misc_RNA (1)...(19): siRNA sense strand
acacaggccucuacugcaa

SEQ ID NO: 1204533 - RNA, 19 nt, Homo sapiens
  misc_RNA (1)...(19): siRNA sense strand
caggcaaacucuaaacaga

SEQ ID NO: 1204534 - RNA, 19 nt, Homo sapiens
  misc_RNA (1)...(19): siRNA sense strand
gaagaccaguguauuagcu

SEQ ID NO: 1204535 - RNA, 19 nt, Homo sapiens
  misc_RNA (1)...(19): siRNA sense strand
uaccugagcuggaauugga

SEQ ID NO: 1204536 - RNA, 19 nt, Homo sapiens
  misc_RNA (1)...(19): siRNA sense strand
gaacuggaugcuucaaaga

SEQ ID NO: 1204537 - RNA, 19 nt, Homo sapiens
  misc_RNA (1)...(19): siRNA sense strand
guacaaggaaacuccagua

SEQ ID NO: 1204538 - RNA, 19 nt, Homo sapiens
  misc_RNA (1)...(19): siRNA sense strand
ucacagaauucaccuagca

SEQ ID NO: 1204539 - RNA, 19 nt, Homo sapiens
  misc_RNA (1)...(19): siRNA sense strand
gcagagaaccaucuuaugc

SEQ ID NO: 1204540 - RNA, 19 nt, Homo sapiens
  misc_RNA (1)...(19): siRNA sense strand
cagagaauguaaccagcua

SEQ ID NO: 1204541 - RNA, 19 nt, Homo sapiens
  misc_RNA (1)...(19): siRNA sense strand
guuacugucugccaacauu

SEQ ID NO: 1204542 - RNA, 19 nt, Homo sapiens
  misc_RNA (1)...(19): siRNA sense strand
ccuagcagauuaaauauac

SEQ ID NO: 1204543 - RNA, 19 nt, Homo sapiens
  misc_RNA (1)...(19): siRNA sense strand
uaacaucuuuacaggguau

SEQ ID NO: 1204544 - RNA, 19 nt, Homo sapiens
  misc_RNA (1)...(19): siRNA sense strand
uagccaauguugccuuaaa

SEQ ID NO: 1204545 - RNA, 19 nt, Homo sapiens
  misc_RNA (1)...(19): siRNA sense strand
guuacggcaugcugauaua

SEQ ID NO: 1204546 - RNA, 19 nt, Homo sapiens
  misc_RNA (1)...(19): siRNA sense strand
gaauuguauuugugucaga

SEQ ID NO: 1204547 - RNA, 19 nt, Homo sapiens
  misc_RNA (1)...(19): siRNA sense strand
uagauuaccugagcuggaa

SEQ ID NO: 1204548 - RNA, 19 nt, Homo sapiens
  misc_RNA (1)...(19): siRNA sense strand
acaaggaaacuccaguaua

SEQ ID NO: 1204549 - RNA, 19 nt, Homo sapiens
  misc_RNA (1)...(19): siRNA sense strand
gacaacaacugccgaacag

SEQ ID NO: 1204550 - RNA, 19 nt, Homo sapiens
  misc_RNA (1)...(19): siRNA sense strand
gaauggaacaagagaaauc

SEQ ID NO: 1204551 - RNA, 19 nt, Homo sapiens
  misc_RNA (1)...(19): siRNA sense strand
caaguagugccuguaauaa

SEQ ID NO: 1204552 - RNA, 19 nt, Homo sapiens
  misc_RNA (1)...(19): siRNA sense strand
caaaaucacuaguaaaugg

SEQ ID NO: 1204553 - RNA, 19 nt, Homo sapiens
  misc_RNA (1)...(19): siRNA sense strand
cauaguaauucuagcaaca

SEQ ID NO: 1204554 - RNA, 19 nt, Homo sapiens
  misc_RNA (1)...(19): siRNA sense strand
gaucagauuccauggacaa

SEQ ID NO: 1204555 - RNA, 19 nt, Homo sapiens
  misc_RNA (1)...(19): siRNA sense strand
gcagggagcaagaaaauaa

SEQ ID NO: 1204556 - RNA, 19 nt, Homo sapiens
  misc_RNA (1)...(19): siRNA sense strand
gcagaugagcucacagaau

SEQ ID NO: 1204557 - RNA, 19 nt, Homo sapiens
  misc_RNA (1)...(19): siRNA sense strand
ugaaugaaggacccaauaa

SEQ ID NO: 1204558 - RNA, 19 nt, Homo sapiens
  misc_RNA (1)...(19): siRNA sense strand
acaauuccuuuccuccuaa

SEQ ID NO: 1204559 - RNA, 19 nt, Homo sapiens
  misc_RNA (1)...(19): siRNA sense strand
ucaaugagaucgugaguau

SEQ ID NO: 1204560 - RNA, 19 nt, Homo sapiens
  misc_RNA (1)...(19): siRNA sense strand
gaaaguucauguaucuaga

SEQ ID NO: 1204561 - RNA, 19 nt, Homo sapiens
  misc_RNA (1)...(19): siRNA sense strand
ggacagaagcucacaacga

SEQ ID NO: 1204562 - RNA, 19 nt, Homo sapiens
  misc_RNA (1)...(19): siRNA sense strand
gcaaauauggacaggacua

SEQ ID NO: 1204563 - RNA, 19 nt, Homo sapiens
  misc_RNA (1)...(19): siRNA sense strand
ucauguaucuagaagguaa

SEQ ID NO: 1204564 - RNA, 19 nt, Homo sapiens
  misc_RNA (1)...(19): siRNA sense strand
gccaacaggugucaacaug

SEQ ID NO: 1204565 - RNA, 19 nt, Homo sapiens
  misc_RNA (1)...(19): siRNA sense strand
gcaagucuuuacuguggaa

SEQ ID NO: 1204566 - RNA, 19 nt, Homo sapiens
  misc_RNA (1)...(19): siRNA sense strand
gaagauugaggaccacuug

SEQ ID NO: 1204567 - RNA, 19 nt, Homo sapiens
  misc_RNA (1)...(19): siRNA sense strand
gauaaagugggucaacaaa

SEQ ID NO: 1204568 - RNA, 19 nt, Homo sapiens
  misc_RNA (1)...(19): siRNA sense strand
acacgaugcugauaaagug

SEQ ID NO: 1204569 - RNA, 19 nt, Homo sapiens
  misc_RNA (1)...(19): siRNA sense strand
guugagcucuggaaaguuc

SEQ ID NO: 1204570 - RNA, 19 nt, Homo sapiens
  misc_RNA (1)...(19): siRNA sense strand
ggaaaguucauguaucuag

SEQ ID NO: 1204571 - RNA, 19 nt, Homo sapiens
  misc_RNA (1)...(19): siRNA sense strand
gauuguggcuguguuuguu

SEQ ID NO: 1204572 - RNA, 19 nt, Homo sapiens
  misc_RNA (1)...(19): siRNA sense strand
caaggucggugauuguaca

SEQ ID NO: 1204573 - RNA, 19 nt, Homo sapiens
  misc_RNA (1)...(19): siRNA sense strand
ccagagggauggucaaggu

SEQ ID NO: 1204574 - RNA, 19 nt, Homo sapiens
  misc_RNA (1)...(19): siRNA sense strand
ggaaugaccuccuuuucug

SEQ ID NO: 1204575 - RNA, 19 nt, Homo sapiens
  misc_RNA (1)...(19): siRNA sense strand
caucauaggagucacaguu

SEQ ID NO: 1204576 - RNA, 19 nt, Homo sapiens
  misc_RNA (1)...(19): siRNA sense strand
guucauguaucuagaaggu

SEQ ID NO: 1204577 - RNA, 19 nt, Homo sapiens
  misc_RNA (1)...(19): siRNA sense strand
gacaccauaucucagaaga

SEQ ID NO: 1204578 - RNA, 19 nt, Homo sapiens
  misc_RNA (1)...(19): siRNA sense strand
ccacugagacucugagaca

SEQ ID NO: 1204579 - RNA, 19 nt, Homo sapiens
  misc_RNA (1)...(19): siRNA sense strand
ucagaagacgguagagauu

SEQ ID NO: 1204580 - RNA, 19 nt, Homo sapiens
  misc_RNA (1)...(19): siRNA sense strand
uguacacgaugcugauaaa

SEQ ID NO: 1204581 - RNA, 19 nt, Homo sapiens
  misc_RNA (1)...(19): siRNA sense strand
ucacuggaaugaccuccuu

SEQ ID NO: 1204582 - RNA, 19 nt, Homo sapiens
  misc_RNA (1)...(19): siRNA sense strand
gaaggugaucccacugaga

SEQ ID NO: 1204583 - RNA, 19 nt, Homo sapiens
  misc_RNA (1)...(19): siRNA sense strand
gauugaggaccacuuguug

SEQ ID NO: 1204584 - RNA, 19 nt, Homo sapiens
  misc_RNA (1)...(19): siRNA sense strand
cuauagcacucacuggaau

SEQ ID NO: 1204585 - RNA, 19 nt, Homo sapiens
  misc_RNA (1)...(19): siRNA sense strand
agauaaagguggcuaaagc

SEQ ID NO: 1204586 - RNA, 19 nt, Homo sapiens
  misc_RNA (1)...(19): siRNA sense strand
gcucuggaaaguucaugua

SEQ ID NO: 1204587 - RNA, 19 nt, Homo sapiens
  misc_RNA (1)...(19): siRNA sense strand
cagacuuggugcccuuuga

SEQ ID NO: 1204588 - RNA, 19 nt, Homo sapiens
  misc_RNA (1)...(19): siRNA sense strand
cuggaaaguucauguaucu

SEQ ID NO: 1204589 - RNA, 19 nt, Homo sapiens
  misc_RNA (1)...(19): siRNA sense strand
gugcuucgaugacuuugca

SEQ ID NO: 1204590 - RNA, 19 nt, Homo sapiens
  misc_RNA (1)...(19): siRNA sense strand
cgaugacuuugcagacuug

SEQ ID NO: 1204591 - RNA, 19 nt, Homo sapiens
  misc_RNA (1)...(19): siRNA sense strand
ggucaaggucggugauugu

SEQ ID NO: 1204592 - RNA, 19 nt, Homo sapiens
  misc_RNA (1)...(19): siRNA sense strand
gacagugcuucgaugacuu

SEQ ID NO: 1204593 - RNA, 19 nt, Homo sapiens
  misc_RNA (1)...(19): siRNA sense strand
gaucacccaacaagaccua

SEQ ID NO: 1204594 - RNA, 19 nt, Homo sapiens
  misc_RNA (1)...(19): siRNA sense strand
gcucugaucacccaacaag

SEQ ID NO: 1204595 - RNA, 19 nt, Homo sapiens
  misc_RNA (1)...(19): siRNA sense strand
ccugagaugugccggaagu

SEQ ID NO: 1204596 - RNA, 19 nt, Homo sapiens
  misc_RNA (1)...(19): siRNA sense strand
ggaaccggcagaagcugaa

SEQ ID NO: 1204597 - RNA, 19 nt, Homo sapiens
  misc_RNA (1)...(19): siRNA sense strand
uaaagugggucaacaaaac

SEQ ID NO: 1204598 - RNA, 19 nt, Homo sapiens
  misc_RNA (1)...(19): siRNA sense strand
ugagacagugcuucgauga

SEQ ID NO: 1204599 - RNA, 19 nt, Homo sapiens
  misc_RNA (1)...(19): siRNA sense strand
cagaagacgguagagauug

SEQ ID NO: 1204600 - RNA, 19 nt, Homo sapiens
  misc_RNA (1)...(19): siRNA sense strand
ggaaguugggccucaugga

SEQ ID NO: 1204601 - RNA, 19 nt, Homo sapiens
  misc_RNA (1)...(19): siRNA sense strand
gagauaaagguggcuaaag

SEQ ID NO: 1204602 - RNA, 19 nt, Homo sapiens
  misc_RNA (1)...(19): siRNA sense strand
caggugaaguggagcuaag

SEQ ID NO: 1204603 - RNA, 19 nt, Homo sapiens
  misc_RNA (1)...(19): siRNA sense strand
caaauauggacaggacuau

SEQ ID NO: 1204604 - RNA, 19 nt, Homo sapiens
  misc_RNA (1)...(19): siRNA sense strand
ugauaaagugggucaacaa

SEQ ID NO: 1204605 - RNA, 19 nt, Homo sapiens
  misc_RNA (1)...(19): siRNA sense strand
ccacagggacaccuuguac

SEQ ID NO: 1204606 - RNA, 19 nt, Homo sapiens
  misc_RNA (1)...(19): siRNA sense strand
ucgaugacuuugcagacuu

SEQ ID NO: 1204607 - RNA, 19 nt, Homo sapiens
  misc_RNA (1)...(19): siRNA sense strand
guuugcaagucuuuacugu

SEQ ID NO: 1204608 - RNA, 19 nt, Homo sapiens
  misc_RNA (1)...(19): siRNA sense strand
agaaaguccuuccuuaccu

SEQ ID NO: 1204609 - RNA, 19 nt, Homo sapiens
  misc_RNA (1)...(19): siRNA sense strand
aaauauggacaggacuaua

SEQ ID NO: 1204610 - RNA, 19 nt, Homo sapiens
  misc_RNA (1)...(19): siRNA sense strand
gauaaagguggcuaaagcu

SEQ ID NO: 1204611 - RNA, 19 nt, Homo sapiens
  misc_RNA (1)...(19): siRNA sense strand
cauggacaaugagauaaag

SEQ ID NO: 1204612 - RNA, 19 nt, Homo sapiens
  misc_RNA (1)...(19): siRNA sense strand
agacagugcuucgaugacu

SEQ ID NO: 1204613 - RNA, 19 nt, Homo sapiens
  misc_RNA (1)...(19): siRNA sense strand
agaagacgguagagauugc

SEQ ID NO: 1204614 - RNA, 19 nt, Homo sapiens
  misc_RNA (1)...(19): siRNA sense strand
ucuggaaaguucauguauc

SEQ ID NO: 1204615 - RNA, 19 nt, Homo sapiens
  misc_RNA (1)...(19): siRNA sense strand
aauauggacaggacuauag

SEQ ID NO: 1204616 - RNA, 19 nt, Homo sapiens
  misc_RNA (1)...(19): siRNA sense strand
aguccuuccuuaccugaaa

SEQ ID NO: 1204617 - RNA, 19 nt, Homo sapiens
  misc_RNA (1)...(19): siRNA sense strand
ugagauaaagguggcuaaa

SEQ ID NO: 1204618 - RNA, 19 nt, Homo sapiens
  misc_RNA (1)...(19): siRNA sense strand
acagugcuucgaugacuuu

SEQ ID NO: 1204619 - RNA, 19 nt, Homo sapiens
  misc_RNA (1)...(19): siRNA sense strand
gcagagccaacagguguca

SEQ ID NO: 1204620 - RNA, 19 nt, Homo sapiens
  misc_RNA (1)...(19): siRNA sense strand
agaagguaaugcagacucu

SEQ ID NO: 1204621 - RNA, 19 nt, Homo sapiens
  misc_RNA (1)...(19): siRNA sense strand
uugccaagcagaagauuga

SEQ ID NO: 1204622 - RNA, 19 nt, Homo sapiens
  misc_RNA (1)...(19): siRNA sense strand
ggacaccauaucucagaag

SEQ ID NO: 1204623 - RNA, 19 nt, Homo sapiens
  misc_RNA (1)...(19): siRNA sense strand
gaaccggcagaagcugaaa

SEQ ID NO: 1204624 - RNA, 19 nt, Homo sapiens
  misc_RNA (1)...(19): siRNA sense strand
uguacacccuggagugaca

SEQ ID NO: 1204625 - RNA, 19 nt, Homo sapiens
  misc_RNA (1)...(19): siRNA sense strand
gggacaccuuguacacgau

SEQ ID NO: 1204626 - RNA, 19 nt, Homo sapiens
  misc_RNA (1)...(19): siRNA sense strand
gucaaggucggugauugua

SEQ ID NO: 1204627 - RNA, 19 nt, Homo sapiens
  misc_RNA (1)...(19): siRNA sense strand
cagccguagucuugauugu

SEQ ID NO: 1204628 - RNA, 19 nt, Homo sapiens
  misc_RNA (1)...(19): siRNA sense strand
gcagccguagucuugauug

SEQ ID NO: 1204629 - RNA, 19 nt, Homo sapiens
  misc_RNA (1)...(19): siRNA sense strand
ucaaugagaucgugaguau

SEQ ID NO: 1204630 - RNA, 19 nt, Homo sapiens
  misc_RNA (1)...(19): siRNA sense strand
gaaaguucauguaucuaga

SEQ ID NO: 1204631 - RNA, 19 nt, Homo sapiens
  misc_RNA (1)...(19): siRNA sense strand
ggacagaagcucacaacga

SEQ ID NO: 1204632 - RNA, 19 nt, Homo sapiens
  misc_RNA (1)...(19): siRNA sense strand
gcaaauauggacaggacua

SEQ ID NO: 1204633 - RNA, 19 nt, Homo sapiens
  misc_RNA (1)...(19): siRNA sense strand
ucauguaucuagaagguaa

SEQ ID NO: 1204634 - RNA, 19 nt, Homo sapiens
  misc_RNA (1)...(19): siRNA sense strand
gccaacaggugucaacaug

SEQ ID NO: 1204635 - RNA, 19 nt, Homo sapiens
  misc_RNA (1)...(19): siRNA sense strand
gcaagucuuuacuguggaa

SEQ ID NO: 1204636 - RNA, 19 nt, Homo sapiens
  misc_RNA (1)...(19): siRNA sense strand
gaagauugaggaccacuug

SEQ ID NO: 1204637 - RNA, 19 nt, Homo sapiens
  misc_RNA (1)...(19): siRNA sense strand
gauaaagugggucaacaaa

SEQ ID NO: 1204638 - RNA, 19 nt, Homo sapiens
  misc_RNA (1)...(19): siRNA sense strand
acacgaugcugauaaagug

SEQ ID NO: 1204639 - RNA, 19 nt, Homo sapiens
  misc_RNA (1)...(19): siRNA sense strand
guugagcucuggaaaguuc

SEQ ID NO: 1204640 - RNA, 19 nt, Homo sapiens
  misc_RNA (1)...(19): siRNA sense strand
ggaaaguucauguaucuag

SEQ ID NO: 1204641 - RNA, 19 nt, Homo sapiens
  misc_RNA (1)...(19): siRNA sense strand
gauuguggcuguguuuguu

SEQ ID NO: 1204642 - RNA, 19 nt, Homo sapiens
  misc_RNA (1)...(19): siRNA sense strand
caaggucggugauuguaca

SEQ ID NO: 1204643 - RNA, 19 nt, Homo sapiens
  misc_RNA (1)...(19): siRNA sense strand
ccagagggauggucaaggu

SEQ ID NO: 1204644 - RNA, 19 nt, Homo sapiens
  misc_RNA (1)...(19): siRNA sense strand
ggaaugaccuccuuuucug

SEQ ID NO: 1204645 - RNA, 19 nt, Homo sapiens
  misc_RNA (1)...(19): siRNA sense strand
caucauaggagucacaguu

SEQ ID NO: 1204646 - RNA, 19 nt, Homo sapiens
  misc_RNA (1)...(19): siRNA sense strand
guucauguaucuagaaggu

SEQ ID NO: 1204647 - RNA, 19 nt, Homo sapiens
  misc_RNA (1)...(19): siRNA sense strand
gacaccauaucucagaaga

SEQ ID NO: 1204648 - RNA, 19 nt, Homo sapiens
  misc_RNA (1)...(19): siRNA sense strand
ccacugagacucugagaca

SEQ ID NO: 1204649 - RNA, 19 nt, Homo sapiens
  misc_RNA (1)...(19): siRNA sense strand
ucagaagacgguagagauu

SEQ ID NO: 1204650 - RNA, 19 nt, Homo sapiens
  misc_RNA (1)...(19): siRNA sense strand
uguacacgaugcugauaaa

SEQ ID NO: 1204651 - RNA, 19 nt, Homo sapiens
  misc_RNA (1)...(19): siRNA sense strand
ucacuggaaugaccuccuu

SEQ ID NO: 1204652 - RNA, 19 nt, Homo sapiens
  misc_RNA (1)...(19): siRNA sense strand
gaaggugaucccacugaga

SEQ ID NO: 1204653 - RNA, 19 nt, Homo sapiens
  misc_RNA (1)...(19): siRNA sense strand
gauugaggaccacuuguug

SEQ ID NO: 1204654 - RNA, 19 nt, Homo sapiens
  misc_RNA (1)...(19): siRNA sense strand
cuauagcacucacuggaau

SEQ ID NO: 1204655 - RNA, 19 nt, Homo sapiens
  misc_RNA (1)...(19): siRNA sense strand
agauaaagguggcuaaagc

SEQ ID NO: 1204656 - RNA, 19 nt, Homo sapiens
  misc_RNA (1)...(19): siRNA sense strand
gcucuggaaaguucaugua

SEQ ID NO: 1204657 - RNA, 19 nt, Homo sapiens
  misc_RNA (1)...(19): siRNA sense strand
cagacuuggugcccuuuga

SEQ ID NO: 1204658 - RNA, 19 nt, Homo sapiens
  misc_RNA (1)...(19): siRNA sense strand
cuggaaaguucauguaucu

SEQ ID NO: 1204659 - RNA, 19 nt, Homo sapiens
  misc_RNA (1)...(19): siRNA sense strand
gugcuucgaugacuuugca

SEQ ID NO: 1204660 - RNA, 19 nt, Homo sapiens
  misc_RNA (1)...(19): siRNA sense strand
cgaugacuuugcagacuug

SEQ ID NO: 1204661 - RNA, 19 nt, Homo sapiens
  misc_RNA (1)...(19): siRNA sense strand
ggucaaggucggugauugu

SEQ ID NO: 1204662 - RNA, 19 nt, Homo sapiens
  misc_RNA (1)...(19): siRNA sense strand
gacagugcuucgaugacuu

SEQ ID NO: 1204663 - RNA, 19 nt, Homo sapiens
  misc_RNA (1)...(19): siRNA sense strand
gaucacccaacaagaccua

SEQ ID NO: 1204664 - RNA, 19 nt, Homo sapiens
  misc_RNA (1)...(19): siRNA sense strand
gcucugaucacccaacaag

SEQ ID NO: 1204665 - RNA, 19 nt, Homo sapiens
  misc_RNA (1)...(19): siRNA sense strand
ccugagaugugccggaagu

SEQ ID NO: 1204666 - RNA, 19 nt, Homo sapiens
  misc_RNA (1)...(19): siRNA sense strand
ggaaccggcagaagcugaa

SEQ ID NO: 1204667 - RNA, 19 nt, Homo sapiens
  misc_RNA (1)...(19): siRNA sense strand
uaaagugggucaacaaaac

SEQ ID NO: 1204668 - RNA, 19 nt, Homo sapiens
  misc_RNA (1)...(19): siRNA sense strand
ugagacagugcuucgauga

SEQ ID NO: 1204669 - RNA, 19 nt, Homo sapiens
  misc_RNA (1)...(19): siRNA sense strand
cagaagacgguagagauug

SEQ ID NO: 1204670 - RNA, 19 nt, Homo sapiens
  misc_RNA (1)...(19): siRNA sense strand
ggaaguugggccucaugga

SEQ ID NO: 1204671 - RNA, 19 nt, Homo sapiens
  misc_RNA (1)...(19): siRNA sense strand
gagauaaagguggcuaaag

SEQ ID NO: 1204672 - RNA, 19 nt, Homo sapiens
  misc_RNA (1)...(19): siRNA sense strand
caggugaaguggagcuaag

SEQ ID NO: 1204673 - RNA, 19 nt, Homo sapiens
  misc_RNA (1)...(19): siRNA sense strand
caaauauggacaggacuau

SEQ ID NO: 1204674 - RNA, 19 nt, Homo sapiens
  misc_RNA (1)...(19): siRNA sense strand
ugauaaagugggucaacaa

SEQ ID NO: 1204675 - RNA, 19 nt, Homo sapiens
  misc_RNA (1)...(19): siRNA sense strand
ccacagggacaccuuguac

SEQ ID NO: 1204676 - RNA, 19 nt, Homo sapiens
  misc_RNA (1)...(19): siRNA sense strand
ucgaugacuuugcagacuu

SEQ ID NO: 1204677 - RNA, 19 nt, Homo sapiens
  misc_RNA (1)...(19): siRNA sense strand
guuugcaagucuuuacugu

SEQ ID NO: 1204678 - RNA, 19 nt, Homo sapiens
  misc_RNA (1)...(19): siRNA sense strand
agaaaguccuuccuuaccu

SEQ ID NO: 1204679 - RNA, 19 nt, Homo sapiens
  misc_RNA (1)...(19): siRNA sense strand
aaauauggacaggacuaua

SEQ ID NO: 1204680 - RNA, 19 nt, Homo sapiens
  misc_RNA (1)...(19): siRNA sense strand
gauaaagguggcuaaagcu

SEQ ID NO: 1204681 - RNA, 19 nt, Homo sapiens
  misc_RNA (1)...(19): siRNA sense strand
cauggacaaugagauaaag

SEQ ID NO: 1204682 - RNA, 19 nt, Homo sapiens
  misc_RNA (1)...(19): siRNA sense strand
agacagugcuucgaugacu

SEQ ID NO: 1204683 - RNA, 19 nt, Homo sapiens
  misc_RNA (1)...(19): siRNA sense strand
agaagacgguagagauugc

SEQ ID NO: 1204684 - RNA, 19 nt, Homo sapiens
  misc_RNA (1)...(19): siRNA sense strand
ucuggaaaguucauguauc

SEQ ID NO: 1204685 - RNA, 19 nt, Homo sapiens
  misc_RNA (1)...(19): siRNA sense strand
aauauggacaggacuauag

SEQ ID NO: 1204686 - RNA, 19 nt, Homo sapiens
  misc_RNA (1)...(19): siRNA sense strand
aguccuuccuuaccugaaa

SEQ ID NO: 1204687 - RNA, 19 nt, Homo sapiens
  misc_RNA (1)...(19): siRNA sense strand
ugagauaaagguggcuaaa

SEQ ID NO: 1204688 - RNA, 19 nt, Homo sapiens
  misc_RNA (1)...(19): siRNA sense strand
acagugcuucgaugacuuu

SEQ ID NO: 1204689 - RNA, 19 nt, Homo sapiens
  misc_RNA (1)...(19): siRNA sense strand
gcagagccaacagguguca

SEQ ID NO: 1204690 - RNA, 19 nt, Homo sapiens
  misc_RNA (1)...(19): siRNA sense strand
agaagguaaugcagacucu

SEQ ID NO: 1204691 - RNA, 19 nt, Homo sapiens
  misc_RNA (1)...(19): siRNA sense strand
uugccaagcagaagauuga

SEQ ID NO: 1204692 - RNA, 19 nt, Homo sapiens
  misc_RNA (1)...(19): siRNA sense strand
ggacaccauaucucagaag

SEQ ID NO: 1204693 - RNA, 19 nt, Homo sapiens
  misc_RNA (1)...(19): siRNA sense strand
gaaccggcagaagcugaaa

SEQ ID NO: 1204694 - RNA, 19 nt, Homo sapiens
  misc_RNA (1)...(19): siRNA sense strand
uguacacccuggagugaca

SEQ ID NO: 1204695 - RNA, 19 nt, Homo sapiens
  misc_RNA (1)...(19): siRNA sense strand
gggacaccuuguacacgau

SEQ ID NO: 1204696 - RNA, 19 nt, Homo sapiens
  misc_RNA (1)...(19): siRNA sense strand
gucaaggucggugauugua

SEQ ID NO: 1204697 - RNA, 19 nt, Homo sapiens
  misc_RNA (1)...(19): siRNA sense strand
cagccguagucuugauugu

SEQ ID NO: 1204698 - RNA, 19 nt, Homo sapiens
  misc_RNA (1)...(19): siRNA sense strand
gcagccguagucuugauug

SEQ ID NO: 1204699 - RNA, 19 nt, Homo sapiens
  misc_RNA (1)...(19): siRNA sense strand
caaacgggcucaucauaau

SEQ ID NO: 1204700 - RNA, 19 nt, Homo sapiens
  misc_RNA (1)...(19): siRNA sense strand
gacaaacgggcucaucaua

SEQ ID NO: 1204701 - RNA, 19 nt, Homo sapiens
  misc_RNA (1)...(19): siRNA sense strand
guagggaccacaucaaaga

SEQ ID NO: 1204702 - RNA, 19 nt, Homo sapiens
  misc_RNA (1)...(19): siRNA sense strand
auaaugcacuggaacgaaa

SEQ ID NO: 1204703 - RNA, 19 nt, Homo sapiens
  misc_RNA (1)...(19): siRNA sense strand
acaaacgggcucaucauaa

SEQ ID NO: 1204704 - RNA, 19 nt, Homo sapiens
  misc_RNA (1)...(19): siRNA sense strand
agacagcuuucacaguuug

SEQ ID NO: 1204705 - RNA, 19 nt, Homo sapiens
  misc_RNA (1)...(19): siRNA sense strand
gcacuggaacgaaaacgua

SEQ ID NO: 1204706 - RNA, 19 nt, Homo sapiens
  misc_RNA (1)...(19): siRNA sense strand
aagacagcuuucacaguuu

SEQ ID NO: 1204707 - RNA, 19 nt, Homo sapiens
  misc_RNA (1)...(19): siRNA sense strand
aaacguagggaccacauca

SEQ ID NO: 1204708 - RNA, 19 nt, Homo sapiens
  misc_RNA (1)...(19): siRNA sense strand
cauaaugcacuggaacgaa

SEQ ID NO: 1204709 - RNA, 19 nt, Homo sapiens
  misc_RNA (1)...(19): siRNA sense strand
ugacaaacgggcucaucau

SEQ ID NO: 1204710 - RNA, 19 nt, Homo sapiens
  misc_RNA (1)...(19): siRNA sense strand
aaacgggcucaucauaaug

SEQ ID NO: 1204711 - RNA, 19 nt, Homo sapiens
  misc_RNA (1)...(19): siRNA sense strand
caaacgggcucaucauaau

SEQ ID NO: 1204712 - RNA, 19 nt, Homo sapiens
  misc_RNA (1)...(19): siRNA sense strand
gacaaacgggcucaucaua

SEQ ID NO: 1204713 - RNA, 19 nt, Homo sapiens
  misc_RNA (1)...(19): siRNA sense strand
guagggaccacaucaaaga

SEQ ID NO: 1204714 - RNA, 19 nt, Homo sapiens
  misc_RNA (1)...(19): siRNA sense strand
auaaugcacuggaacgaaa

SEQ ID NO: 1204715 - RNA, 19 nt, Homo sapiens
  misc_RNA (1)...(19): siRNA sense strand
acaaacgggcucaucauaa

SEQ ID NO: 1204716 - RNA, 19 nt, Homo sapiens
  misc_RNA (1)...(19): siRNA sense strand
agacagcuuucacaguuug

SEQ ID NO: 1204717 - RNA, 19 nt, Homo sapiens
  misc_RNA (1)...(19): siRNA sense strand
gcacuggaacgaaaacgua

SEQ ID NO: 1204718 - RNA, 19 nt, Homo sapiens
  misc_RNA (1)...(19): siRNA sense strand
aagacagcuuucacaguuu

SEQ ID NO: 1204719 - RNA, 19 nt, Homo sapiens
  misc_RNA (1)...(19): siRNA sense strand
aaacguagggaccacauca

SEQ ID NO: 1204720 - RNA, 19 nt, Homo sapiens
  misc_RNA (1)...(19): siRNA sense strand
cauaaugcacuggaacgaa

SEQ ID NO: 1204721 - RNA, 19 nt, Homo sapiens
  misc_RNA (1)...(19): siRNA sense strand
ugacaaacgggcucaucau

SEQ ID NO: 1204722 - RNA, 19 nt, Homo sapiens
  misc_RNA (1)...(19): siRNA sense strand
aaacgggcucaucauaaug

SEQ ID NO: 1204723 - RNA, 19 nt, Homo sapiens
  misc_RNA (1)...(19): siRNA sense strand
caaacgggcucaucauaau

SEQ ID NO: 1204724 - RNA, 19 nt, Homo sapiens
  misc_RNA (1)...(19): siRNA sense strand
gacaaacgggcucaucaua

SEQ ID NO: 1204725 - RNA, 19 nt, Homo sapiens
  misc_RNA (1)...(19): siRNA sense strand
guagggaccacaucaaaga

SEQ ID NO: 1204726 - RNA, 19 nt, Homo sapiens
  misc_RNA (1)...(19): siRNA sense strand
auaaugcacuggaacgaaa

SEQ ID NO: 1204727 - RNA, 19 nt, Homo sapiens
  misc_RNA (1)...(19): siRNA sense strand
acaaacgggcucaucauaa

SEQ ID NO: 1204728 - RNA, 19 nt, Homo sapiens
  misc_RNA (1)...(19): siRNA sense strand
agacagcuuucacaguuug

SEQ ID NO: 1204729 - RNA, 19 nt, Homo sapiens
  misc_RNA (1)...(19): siRNA sense strand
gcacuggaacgaaaacgua

SEQ ID NO: 1204730 - RNA, 19 nt, Homo sapiens
  misc_RNA (1)...(19): siRNA sense strand
aagacagcuuucacaguuu

SEQ ID NO: 1204731 - RNA, 19 nt, Homo sapiens
  misc_RNA (1)...(19): siRNA sense strand
aaacguagggaccacauca

SEQ ID NO: 1204732 - RNA, 19 nt, Homo sapiens
  misc_RNA (1)...(19): siRNA sense strand
cauaaugcacuggaacgaa

SEQ ID NO: 1204733 - RNA, 19 nt, Homo sapiens
  misc_RNA (1)...(19): siRNA sense strand
ugacaaacgggcucaucau

SEQ ID NO: 1204734 - RNA, 19 nt, Homo sapiens
  misc_RNA (1)...(19): siRNA sense strand
aaacgggcucaucauaaug

SEQ ID NO: 1204735 - RNA, 19 nt, Homo sapiens
  misc_RNA (1)...(19): siRNA sense strand
caaacgggcucaucauaau

SEQ ID NO: 1204736 - RNA, 19 nt, Homo sapiens
  misc_RNA (1)...(19): siRNA sense strand
gacaaacgggcucaucaua

SEQ ID NO: 1204737 - RNA, 19 nt, Homo sapiens
  misc_RNA (1)...(19): siRNA sense strand
guagggaccacaucaaaga

SEQ ID NO: 1204738 - RNA, 19 nt, Homo sapiens
  misc_RNA (1)...(19): siRNA sense strand
auaaugcacuggaacgaaa

SEQ ID NO: 1204739 - RNA, 19 nt, Homo sapiens
  misc_RNA (1)...(19): siRNA sense strand
acaaacgggcucaucauaa

SEQ ID NO: 1204740 - RNA, 19 nt, Homo sapiens
  misc_RNA (1)...(19): siRNA sense strand
agacagcuuucacaguuug

SEQ ID NO: 1204741 - RNA, 19 nt, Homo sapiens
  misc_RNA (1)...(19): siRNA sense strand
gcacuggaacgaaaacgua

SEQ ID NO: 1204742 - RNA, 19 nt, Homo sapiens
  misc_RNA (1)...(19): siRNA sense strand
aagacagcuuucacaguuu

SEQ ID NO: 1204743 - RNA, 19 nt, Homo sapiens
  misc_RNA (1)...(19): siRNA sense strand
aaacguagggaccacauca

SEQ ID NO: 1204744 - RNA, 19 nt, Homo sapiens
  misc_RNA (1)...(19): siRNA sense strand
cauaaugcacuggaacgaa

SEQ ID NO: 1204745 - RNA, 19 nt, Homo sapiens
  misc_RNA (1)...(19): siRNA sense strand
ugacaaacgggcucaucau

SEQ ID NO: 1204746 - RNA, 19 nt, Homo sapiens
  misc_RNA (1)...(19): siRNA sense strand
aaacgggcucaucauaaug

SEQ ID NO: 1204747 - RNA, 19 nt, Homo sapiens
  misc_RNA (1)...(19): siRNA sense strand
caaacgggcucaucauaau

SEQ ID NO: 1204748 - RNA, 19 nt, Homo sapiens
  misc_RNA (1)...(19): siRNA sense strand
gacaaacgggcucaucaua

SEQ ID NO: 1204749 - RNA, 19 nt, Homo sapiens
  misc_RNA (1)...(19): siRNA sense strand
guagggaccacaucaaaga

SEQ ID NO: 1204750 - RNA, 19 nt, Homo sapiens
  misc_RNA (1)...(19): siRNA sense strand
auaaugcacuggaacgaaa

SEQ ID NO: 1204751 - RNA, 19 nt, Homo sapiens
  misc_RNA (1)...(19): siRNA sense strand
acaaacgggcucaucauaa

SEQ ID NO: 1204752 - RNA, 19 nt, Homo sapiens
  misc_RNA (1)...(19): siRNA sense strand
agacagcuuucacaguuug

SEQ ID NO: 1204753 - RNA, 19 nt, Homo sapiens
  misc_RNA (1)...(19): siRNA sense strand
gcacuggaacgaaaacgua

SEQ ID NO: 1204754 - RNA, 19 nt, Homo sapiens
  misc_RNA (1)...(19): siRNA sense strand
aagacagcuuucacaguuu

SEQ ID NO: 1204755 - RNA, 19 nt, Homo sapiens
  misc_RNA (1)...(19): siRNA sense strand
aaacguagggaccacauca

SEQ ID NO: 1204756 - RNA, 19 nt, Homo sapiens
  misc_RNA (1)...(19): siRNA sense strand
cauaaugcacuggaacgaa

SEQ ID NO: 1204757 - RNA, 19 nt, Homo sapiens
  misc_RNA (1)...(19): siRNA sense strand
ugacaaacgggcucaucau

SEQ ID NO: 1204758 - RNA, 19 nt, Homo sapiens
  misc_RNA (1)...(19): siRNA sense strand
aaacgggcucaucauaaug

SEQ ID NO: 1204759 - RNA, 19 nt, Homo sapiens
  misc_RNA (1)...(19): siRNA sense strand
caaacgggcucaucauaau

SEQ ID NO: 1204760 - RNA, 19 nt, Homo sapiens
  misc_RNA (1)...(19): siRNA sense strand
gacaaacgggcucaucaua

SEQ ID NO: 1204761 - RNA, 19 nt, Homo sapiens
  misc_RNA (1)...(19): siRNA sense strand
guagggaccacaucaaaga

SEQ ID NO: 1204762 - RNA, 19 nt, Homo sapiens
  misc_RNA (1)...(19): siRNA sense strand
auaaugcacuggaacgaaa

SEQ ID NO: 1204763 - RNA, 19 nt, Homo sapiens
  misc_RNA (1)...(19): siRNA sense strand
acaaacgggcucaucauaa

SEQ ID NO: 1204764 - RNA, 19 nt, Homo sapiens
  misc_RNA (1)...(19): siRNA sense strand
agacagcuuucacaguuug

SEQ ID NO: 1204765 - RNA, 19 nt, Homo sapiens
  misc_RNA (1)...(19): siRNA sense strand
gcacuggaacgaaaacgua

SEQ ID NO: 1204766 - RNA, 19 nt, Homo sapiens
  misc_RNA (1)...(19): siRNA sense strand
aagacagcuuucacaguuu

SEQ ID NO: 1204767 - RNA, 19 nt, Homo sapiens
  misc_RNA (1)...(19): siRNA sense strand
aaacguagggaccacauca

SEQ ID NO: 1204768 - RNA, 19 nt, Homo sapiens
  misc_RNA (1)...(19): siRNA sense strand
cauaaugcacuggaacgaa

SEQ ID NO: 1204769 - RNA, 19 nt, Homo sapiens
  misc_RNA (1)...(19): siRNA sense strand
ugacaaacgggcucaucau

SEQ ID NO: 1204770 - RNA, 19 nt, Homo sapiens
  misc_RNA (1)...(19): siRNA sense strand
aaacgggcucaucauaaug

SEQ ID NO: 1204771 - RNA, 19 nt, Homo sapiens
  misc_RNA (1)...(19): siRNA sense strand
caaacgggcucaucauaau

SEQ ID NO: 1204772 - RNA, 19 nt, Homo sapiens
  misc_RNA (1)...(19): siRNA sense strand
gacaaacgggcucaucaua

SEQ ID NO: 1204773 - RNA, 19 nt, Homo sapiens
  misc_RNA (1)...(19): siRNA sense strand
guagggaccacaucaaaga

SEQ ID NO: 1204774 - RNA, 19 nt, Homo sapiens
  misc_RNA (1)...(19): siRNA sense strand
auaaugcacuggaacgaaa

SEQ ID NO: 1204775 - RNA, 19 nt, Homo sapiens
  misc_RNA (1)...(19): siRNA sense strand
acaaacgggcucaucauaa

SEQ ID NO: 1204776 - RNA, 19 nt, Homo sapiens
  misc_RNA (1)...(19): siRNA sense strand
agacagcuuucacaguuug

SEQ ID NO: 1204777 - RNA, 19 nt, Homo sapiens
  misc_RNA (1)...(19): siRNA sense strand
gcacuggaacgaaaacgua

SEQ ID NO: 1204778 - RNA, 19 nt, Homo sapiens
  misc_RNA (1)...(19): siRNA sense strand
aagacagcuuucacaguuu

SEQ ID NO: 1204779 - RNA, 19 nt, Homo sapiens
  misc_RNA (1)...(19): siRNA sense strand
aaacguagggaccacauca

SEQ ID NO: 1204780 - RNA, 19 nt, Homo sapiens
  misc_RNA (1)...(19): siRNA sense strand
cauaaugcacuggaacgaa

SEQ ID NO: 1204781 - RNA, 19 nt, Homo sapiens
  misc_RNA (1)...(19): siRNA sense strand
ugacaaacgggcucaucau

SEQ ID NO: 1204782 - RNA, 19 nt, Homo sapiens
  misc_RNA (1)...(19): siRNA sense strand
aaacgggcucaucauaaug

SEQ ID NO: 1204783 - RNA, 19 nt, Homo sapiens
  misc_RNA (1)...(19): siRNA sense strand
caaacgggcucaucauaau

SEQ ID NO: 1204784 - RNA, 19 nt, Homo sapiens
  misc_RNA (1)...(19): siRNA sense strand
gacaaacgggcucaucaua

SEQ ID NO: 1204785 - RNA, 19 nt, Homo sapiens
  misc_RNA (1)...(19): siRNA sense strand
guagggaccacaucaaaga

SEQ ID NO: 1204786 - RNA, 19 nt, Homo sapiens
  misc_RNA (1)...(19): siRNA sense strand
auaaugcacuggaacgaaa

SEQ ID NO: 1204787 - RNA, 19 nt, Homo sapiens
  misc_RNA (1)...(19): siRNA sense strand
acaaacgggcucaucauaa

SEQ ID NO: 1204788 - RNA, 19 nt, Homo sapiens
  misc_RNA (1)...(19): siRNA sense strand
agacagcuuucacaguuug

SEQ ID NO: 1204789 - RNA, 19 nt, Homo sapiens
  misc_RNA (1)...(19): siRNA sense strand
gcacuggaacgaaaacgua

SEQ ID NO: 1204790 - RNA, 19 nt, Homo sapiens
  misc_RNA (1)...(19): siRNA sense strand
aagacagcuuucacaguuu

SEQ ID NO: 1204791 - RNA, 19 nt, Homo sapiens
  misc_RNA (1)...(19): siRNA sense strand
aaacguagggaccacauca

SEQ ID NO: 1204792 - RNA, 19 nt, Homo sapiens
  misc_RNA (1)...(19): siRNA sense strand
cauaaugcacuggaacgaa

SEQ ID NO: 1204793 - RNA, 19 nt, Homo sapiens
  misc_RNA (1)...(19): siRNA sense strand
ugacaaacgggcucaucau

SEQ ID NO: 1204794 - RNA, 19 nt, Homo sapiens
  misc_RNA (1)...(19): siRNA sense strand
aaacgggcucaucauaaug

SEQ ID NO: 1204795 - RNA, 19 nt, Homo sapiens
  misc_RNA (1)...(19): siRNA sense strand
caaacgggcucaucauaau

SEQ ID NO: 1204796 - RNA, 19 nt, Homo sapiens
  misc_RNA (1)...(19): siRNA sense strand
gacaaacgggcucaucaua

SEQ ID NO: 1204797 - RNA, 19 nt, Homo sapiens
  misc_RNA (1)...(19): siRNA sense strand
guagggaccacaucaaaga

SEQ ID NO: 1204798 - RNA, 19 nt, Homo sapiens
  misc_RNA (1)...(19): siRNA sense strand
auaaugcacuggaacgaaa

SEQ ID NO: 1204799 - RNA, 19 nt, Homo sapiens
  misc_RNA (1)...(19): siRNA sense strand
acaaacgggcucaucauaa

SEQ ID NO: 1204800 - RNA, 19 nt, Homo sapiens
  misc_RNA (1)...(19): siRNA sense strand
agacagcuuucacaguuug

SEQ ID NO: 1204801 - RNA, 19 nt, Homo sapiens
  misc_RNA (1)...(19): siRNA sense strand
gcacuggaacgaaaacgua

SEQ ID NO: 1204802 - RNA, 19 nt, Homo sapiens
  misc_RNA (1)...(19): siRNA sense strand
aagacagcuuucacaguuu

SEQ ID NO: 1204803 - RNA, 19 nt, Homo sapiens
  misc_RNA (1)...(19): siRNA sense strand
aaacguagggaccacauca

SEQ ID NO: 1204804 - RNA, 19 nt, Homo sapiens
  misc_RNA (1)...(19): siRNA sense strand
cauaaugcacuggaacgaa

SEQ ID NO: 1204805 - RNA, 19 nt, Homo sapiens
  misc_RNA (1)...(19): siRNA sense strand
ugacaaacgggcucaucau

SEQ ID NO: 1204806 - RNA, 19 nt, Homo sapiens
  misc_RNA (1)...(19): siRNA sense strand
aaacgggcucaucauaaug

SEQ ID NO: 1204807 - RNA, 19 nt, Homo sapiens
  misc_RNA (1)...(19): siRNA sense strand
caaacgggcucaucauaau

SEQ ID NO: 1204808 - RNA, 19 nt, Homo sapiens
  misc_RNA (1)...(19): siRNA sense strand
gacaaacgggcucaucaua

SEQ ID NO: 1204809 - RNA, 19 nt, Homo sapiens
  misc_RNA (1)...(19): siRNA sense strand
guagggaccacaucaaaga

SEQ ID NO: 1204810 - RNA, 19 nt, Homo sapiens
  misc_RNA (1)...(19): siRNA sense strand
auaaugcacuggaacgaaa

SEQ ID NO: 1204811 - RNA, 19 nt, Homo sapiens
  misc_RNA (1)...(19): siRNA sense strand
acaaacgggcucaucauaa

SEQ ID NO: 1204812 - RNA, 19 nt, Homo sapiens
  misc_RNA (1)...(19): siRNA sense strand
agacagcuuucacaguuug

SEQ ID NO: 1204813 - RNA, 19 nt, Homo sapiens
  misc_RNA (1)...(19): siRNA sense strand
gcacuggaacgaaaacgua

SEQ ID NO: 1204814 - RNA, 19 nt, Homo sapiens
  misc_RNA (1)...(19): siRNA sense strand
aagacagcuuucacaguuu

SEQ ID NO: 1204815 - RNA, 19 nt, Homo sapiens
  misc_RNA (1)...(19): siRNA sense strand
aaacguagggaccacauca

SEQ ID NO: 1204816 - RNA, 19 nt, Homo sapiens
  misc_RNA (1)...(19): siRNA sense strand
cauaaugcacuggaacgaa

SEQ ID NO: 1204817 - RNA, 19 nt, Homo sapiens
  misc_RNA (1)...(19): siRNA sense strand
ugacaaacgggcucaucau

SEQ ID NO: 1204818 - RNA, 19 nt, Homo sapiens
  misc_RNA (1)...(19): siRNA sense strand
aaacgggcucaucauaaug

SEQ ID NO: 1204819 - RNA, 19 nt, Homo sapiens
  misc_RNA (1)...(19): siRNA sense strand
caaacgggcucaucauaau

SEQ ID NO: 1204820 - RNA, 19 nt, Homo sapiens
  misc_RNA (1)...(19): siRNA sense strand
gacaaacgggcucaucaua

SEQ ID NO: 1204821 - RNA, 19 nt, Homo sapiens
  misc_RNA (1)...(19): siRNA sense strand
guagggaccacaucaaaga

SEQ ID NO: 1204822 - RNA, 19 nt, Homo sapiens
  misc_RNA (1)...(19): siRNA sense strand
auaaugcacuggaacgaaa

SEQ ID NO: 1204823 - RNA, 19 nt, Homo sapiens
  misc_RNA (1)...(19): siRNA sense strand
acaaacgggcucaucauaa

SEQ ID NO: 1204824 - RNA, 19 nt, Homo sapiens
  misc_RNA (1)...(19): siRNA sense strand
agacagcuuucacaguuug

SEQ ID NO: 1204825 - RNA, 19 nt, Homo sapiens
  misc_RNA (1)...(19): siRNA sense strand
gcacuggaacgaaaacgua

SEQ ID NO: 1204826 - RNA, 19 nt, Homo sapiens
  misc_RNA (1)...(19): siRNA sense strand
aagacagcuuucacaguuu

SEQ ID NO: 1204827 - RNA, 19 nt, Homo sapiens
  misc_RNA (1)...(19): siRNA sense strand
aaacguagggaccacauca

SEQ ID NO: 1204828 - RNA, 19 nt, Homo sapiens
  misc_RNA (1)...(19): siRNA sense strand
cauaaugcacuggaacgaa

SEQ ID NO: 1204829 - RNA, 19 nt, Homo sapiens
  misc_RNA (1)...(19): siRNA sense strand
ugacaaacgggcucaucau

SEQ ID NO: 1204830 - RNA, 19 nt, Homo sapiens
  misc_RNA (1)...(19): siRNA sense strand
aaacgggcucaucauaaug

SEQ ID NO: 1204831 - RNA, 19 nt, Homo sapiens
  misc_RNA (1)...(19): siRNA sense strand
caaacgggcucaucauaau

SEQ ID NO: 1204832 - RNA, 19 nt, Homo sapiens
  misc_RNA (1)...(19): siRNA sense strand
gacaaacgggcucaucaua

SEQ ID NO: 1204833 - RNA, 19 nt, Homo sapiens
  misc_RNA (1)...(19): siRNA sense strand
guagggaccacaucaaaga

SEQ ID NO: 1204834 - RNA, 19 nt, Homo sapiens
  misc_RNA (1)...(19): siRNA sense strand
auaaugcacuggaacgaaa

SEQ ID NO: 1204835 - RNA, 19 nt, Homo sapiens
  misc_RNA (1)...(19): siRNA sense strand
acaaacgggcucaucauaa

SEQ ID NO: 1204836 - RNA, 19 nt, Homo sapiens
  misc_RNA (1)...(19): siRNA sense strand
agacagcuuucacaguuug

SEQ ID NO: 1204837 - RNA, 19 nt, Homo sapiens
  misc_RNA (1)...(19): siRNA sense strand
gcacuggaacgaaaacgua

SEQ ID NO: 1204838 - RNA, 19 nt, Homo sapiens
  misc_RNA (1)...(19): siRNA sense strand
aagacagcuuucacaguuu

SEQ ID NO: 1204839 - RNA, 19 nt, Homo sapiens
  misc_RNA (1)...(19): siRNA sense strand
aaacguagggaccacauca

SEQ ID NO: 1204840 - RNA, 19 nt, Homo sapiens
  misc_RNA (1)...(19): siRNA sense strand
cauaaugcacuggaacgaa

SEQ ID NO: 1204841 - RNA, 19 nt, Homo sapiens
  misc_RNA (1)...(19): siRNA sense strand
ugacaaacgggcucaucau

SEQ ID NO: 1204842 - RNA, 19 nt, Homo sapiens
  misc_RNA (1)...(19): siRNA sense strand
aaacgggcucaucauaaug

SEQ ID NO: 1204843 - RNA, 19 nt, Homo sapiens
  misc_RNA (1)...(19): siRNA sense strand
gcaccaaguucacuguuua

SEQ ID NO: 1204844 - RNA, 19 nt, Homo sapiens
  misc_RNA (1)...(19): siRNA sense strand
ccaauuaccucaucucugu

SEQ ID NO: 1204845 - RNA, 19 nt, Homo sapiens
  misc_RNA (1)...(19): siRNA sense strand
ggacagcuauaucgggaaa

SEQ ID NO: 1204846 - RNA, 19 nt, Homo sapiens
  misc_RNA (1)...(19): siRNA sense strand
ggaaggagaagaagggaaa

SEQ ID NO: 1204847 - RNA, 19 nt, Homo sapiens
  misc_RNA (1)...(19): siRNA sense strand
ggaagagaaagaagaguaa

SEQ ID NO: 1204848 - RNA, 19 nt, Homo sapiens
  misc_RNA (1)...(19): siRNA sense strand
aaacugcgguccaacuuga

SEQ ID NO: 1204849 - RNA, 19 nt, Homo sapiens
  misc_RNA (1)...(19): siRNA sense strand
cuagcacgcuggcagaaua

SEQ ID NO: 1204850 - RNA, 19 nt, Homo sapiens
  misc_RNA (1)...(19): siRNA sense strand
cagcagcacuggcagaaga

SEQ ID NO: 1204851 - RNA, 19 nt, Homo sapiens
  misc_RNA (1)...(19): siRNA sense strand
gcaaugacccggacuacau

SEQ ID NO: 1204852 - RNA, 19 nt, Homo sapiens
  misc_RNA (1)...(19): siRNA sense strand
ggaaggaagagaaagaaga

SEQ ID NO: 1204853 - RNA, 19 nt, Homo sapiens
  misc_RNA (1)...(19): siRNA sense strand
ccucccagcuaaauaguaa

SEQ ID NO: 1204854 - RNA, 19 nt, Homo sapiens
  misc_RNA (1)...(19): siRNA sense strand
gagcagaagcagaagaaga

SEQ ID NO: 1204855 - RNA, 19 nt, Homo sapiens
  misc_RNA (1)...(19): siRNA sense strand
caaguucacuguuuaugac

SEQ ID NO: 1204856 - RNA, 19 nt, Homo sapiens
  misc_RNA (1)...(19): siRNA sense strand
gaagagaaagaagaguaaa

SEQ ID NO: 1204857 - RNA, 19 nt, Homo sapiens
  misc_RNA (1)...(19): siRNA sense strand
gaagaagggaaagcacaaa

SEQ ID NO: 1204858 - RNA, 19 nt, Homo sapiens
  misc_RNA (1)...(19): siRNA sense strand
caccauggauuacaacuac

SEQ ID NO: 1204859 - RNA, 19 nt, Homo sapiens
  misc_RNA (1)...(19): siRNA sense strand
uuuggaaaguggaaccuua

SEQ ID NO: 1204860 - RNA, 19 nt, Homo sapiens
  misc_RNA (1)...(19): siRNA sense strand
ggcaccaaguucacuguuu

SEQ ID NO: 1204861 - RNA, 19 nt, Homo sapiens
  misc_RNA (1)...(19): siRNA sense strand
gaaacugcgguccaacuug

SEQ ID NO: 1204862 - RNA, 19 nt, Homo sapiens
  misc_RNA (1)...(19): siRNA sense strand
ggaaacugcgguccaacuu

SEQ ID NO: 1204863 - RNA, 19 nt, Homo sapiens
  misc_RNA (1)...(19): siRNA sense strand
gaaggaagagaaagaagag

SEQ ID NO: 1204864 - RNA, 19 nt, Homo sapiens
  misc_RNA (1)...(19): siRNA sense strand
ccaaguucacuguuuauga

SEQ ID NO: 1204865 - RNA, 19 nt, Homo sapiens
  misc_RNA (1)...(19): siRNA sense strand
acaccugucuggaaugaug

SEQ ID NO: 1204866 - RNA, 19 nt, Homo sapiens
  misc_RNA (1)...(19): siRNA sense strand
ugacacacaguccuaugua

SEQ ID NO: 1204867 - RNA, 19 nt, Homo sapiens
  misc_RNA (1)...(19): siRNA sense strand
acacaggccuccgugaaga

SEQ ID NO: 1204868 - RNA, 19 nt, Homo sapiens
  misc_RNA (1)...(19): siRNA sense strand
uccaggaucuugaggaguu

SEQ ID NO: 1204869 - RNA, 19 nt, Homo sapiens
  misc_RNA (1)...(19): siRNA sense strand
gaacacggagaguaucauc

SEQ ID NO: 1204870 - RNA, 19 nt, Homo sapiens
  misc_RNA (1)...(19): siRNA sense strand
gcaacgagcaugagacacu

SEQ ID NO: 1204871 - RNA, 19 nt, Homo sapiens
  misc_RNA (1)...(19): siRNA sense strand
cagaggauguguucaccau

SEQ ID NO: 1204872 - RNA, 19 nt, Homo sapiens
  misc_RNA (1)...(19): siRNA sense strand
ggaagaugagcgugauugu

SEQ ID NO: 1204873 - RNA, 19 nt, Homo sapiens
  misc_RNA (1)...(19): siRNA sense strand
aauaagaacacggagagua

SEQ ID NO: 1204874 - RNA, 19 nt, Homo sapiens
  misc_RNA (1)...(19): siRNA sense strand
gugccacgaugcagaggaa

SEQ ID NO: 1204875 - RNA, 19 nt, Homo sapiens
  misc_RNA (1)...(19): siRNA sense strand
ccauugcccuguccagcuu

SEQ ID NO: 1204876 - RNA, 19 nt, Homo sapiens
  misc_RNA (1)...(19): siRNA sense strand
gcaccagcuucagccaaga

SEQ ID NO: 1204877 - RNA, 19 nt, Homo sapiens
  misc_RNA (1)...(19): siRNA sense strand
cugcaggccuuugccauug

SEQ ID NO: 1204878 - RNA, 19 nt, Homo sapiens
  misc_RNA (1)...(19): siRNA sense strand
gcacgcuggcagaauaaga

SEQ ID NO: 1204879 - RNA, 19 nt, Homo sapiens
  misc_RNA (1)...(19): siRNA sense strand
acaaacgucuuaggcuuca

SEQ ID NO: 1204880 - RNA, 19 nt, Homo sapiens
  misc_RNA (1)...(19): siRNA sense strand
guucacuguuuaugacaau

SEQ ID NO: 1204881 - RNA, 19 nt, Homo sapiens
  misc_RNA (1)...(19): siRNA sense strand
gcaccuggaccgugaggau

SEQ ID NO: 1204882 - RNA, 19 nt, Homo sapiens
  misc_RNA (1)...(19): siRNA sense strand
gguagcagaggauguguuc

SEQ ID NO: 1204883 - RNA, 19 nt, Homo sapiens
  misc_RNA (1)...(19): siRNA sense strand
auaagaacacggagaguau

SEQ ID NO: 1204884 - RNA, 19 nt, Homo sapiens
  misc_RNA (1)...(19): siRNA sense strand
gaagaugagcgugauuguc

SEQ ID NO: 1204885 - RNA, 19 nt, Homo sapiens
  misc_RNA (1)...(19): siRNA sense strand
ugacgaggaugaggaggau

SEQ ID NO: 1204886 - RNA, 19 nt, Homo sapiens
  misc_RNA (1)...(19): siRNA sense strand
gacacacaguccuauguac

SEQ ID NO: 1204887 - RNA, 19 nt, Homo sapiens
  misc_RNA (1)...(19): siRNA sense strand
gcaguggcagcaccagcua

SEQ ID NO: 1204888 - RNA, 19 nt, Homo sapiens
  misc_RNA (1)...(19): siRNA sense strand
aggaagagaaagaagagua

SEQ ID NO: 1204889 - RNA, 19 nt, Homo sapiens
  misc_RNA (1)...(19): siRNA sense strand
ugaggcagcagaagcuuga

SEQ ID NO: 1204890 - RNA, 19 nt, Homo sapiens
  misc_RNA (1)...(19): siRNA sense strand
gcaucacucgggacaagaa

SEQ ID NO: 1204891 - RNA, 19 nt, Homo sapiens
  misc_RNA (1)...(19): siRNA sense strand
caggguaucaccaucaaau

SEQ ID NO: 1204892 - RNA, 19 nt, Homo sapiens
  misc_RNA (1)...(19): siRNA sense strand
gcgggaaggaagagaaaga

SEQ ID NO: 1204893 - RNA, 19 nt, Homo sapiens
  misc_RNA (1)...(19): siRNA sense strand
ggccucauccuccacuuug

SEQ ID NO: 1204894 - RNA, 19 nt, Homo sapiens
  misc_RNA (1)...(19): siRNA sense strand
ccagcagcaugagcuuuga

SEQ ID NO: 1204895 - RNA, 19 nt, Homo sapiens
  misc_RNA (1)...(19): siRNA sense strand
gaacuuccagaucauccau

SEQ ID NO: 1204896 - RNA, 19 nt, Homo sapiens
  misc_RNA (1)...(19): siRNA sense strand
acacaguccuauguacuca

SEQ ID NO: 1204897 - RNA, 19 nt, Homo sapiens
  misc_RNA (1)...(19): siRNA sense strand
cagcaccagcuaccaaguu

SEQ ID NO: 1204898 - RNA, 19 nt, Homo sapiens
  misc_RNA (1)...(19): siRNA sense strand
caugagcuuugacgaggau

SEQ ID NO: 1204899 - RNA, 19 nt, Homo sapiens
  misc_RNA (1)...(19): siRNA sense strand
caagcuggcgugcgaguag

SEQ ID NO: 1204900 - RNA, 19 nt, Homo sapiens
  misc_RNA (1)...(19): siRNA sense strand
gcaagcuggcgugcgagua

SEQ ID NO: 1204901 - RNA, 19 nt, Homo sapiens
  misc_RNA (1)...(19): siRNA sense strand
gauguguucaccauggauu

SEQ ID NO: 1204902 - RNA, 19 nt, Homo sapiens
  misc_RNA (1)...(19): siRNA sense strand
gaaaccugaggcagcagaa

SEQ ID NO: 1204903 - RNA, 19 nt, Homo sapiens
  misc_RNA (1)...(19): siRNA sense strand
agcagaagcagaagaagaa

SEQ ID NO: 1204904 - RNA, 19 nt, Homo sapiens
  misc_RNA (1)...(19): siRNA sense strand
gaggaugaggaggagaaua

SEQ ID NO: 1204905 - RNA, 19 nt, Homo sapiens
  misc_RNA (1)...(19): siRNA sense strand
gcuccucccagcuaaauag

SEQ ID NO: 1204906 - RNA, 19 nt, Homo sapiens
  misc_RNA (1)...(19): siRNA sense strand
ccaggaucuugaggaguuu

SEQ ID NO: 1204907 - RNA, 19 nt, Homo sapiens
  misc_RNA (1)...(19): siRNA sense strand
ccaaggcccagugcagauu

SEQ ID NO: 1204908 - RNA, 19 nt, Homo sapiens
  misc_RNA (1)...(19): siRNA sense strand
gaugacacacaguccuaug

SEQ ID NO: 1204909 - RNA, 19 nt, Homo sapiens
  misc_RNA (1)...(19): siRNA sense strand
gugauugucccaggcauga

SEQ ID NO: 1204910 - RNA, 19 nt, Homo sapiens
  misc_RNA (1)...(19): siRNA sense strand
ccgcaucacucgggacaag

SEQ ID NO: 1204911 - RNA, 19 nt, Homo sapiens
  misc_RNA (1)...(19): siRNA sense strand
ucaccauggauuacaacua

SEQ ID NO: 1204912 - RNA, 19 nt, Homo sapiens
  misc_RNA (1)...(19): siRNA sense strand
ucaucgagcugcaaaacaa

SEQ ID NO: 1204913 - RNA, 19 nt, Homo sapiens
  misc_RNA (1)...(19): siRNA sense strand
ccgcuaggaaggagaagaa

SEQ ID NO: 1204914 - RNA, 19 nt, Homo sapiens
  misc_RNA (1)...(19): siRNA sense strand
agaagaagggaaagcacaa

SEQ ID NO: 1204915 - RNA, 19 nt, Homo sapiens
  misc_RNA (1)...(19): siRNA sense strand
acacggagaguaucaucga

SEQ ID NO: 1204916 - RNA, 19 nt, Homo sapiens
  misc_RNA (1)...(19): siRNA sense strand
ccagcuaccaaguucaaga

SEQ ID NO: 1204917 - RNA, 19 nt, Homo sapiens
  misc_RNA (1)...(19): siRNA sense strand
cuugaggaguuugcacuga

SEQ ID NO: 1204918 - RNA, 19 nt, Homo sapiens
  misc_RNA (1)...(19): siRNA sense strand
uagcacgcuggcagaauaa

SEQ ID NO: 1204919 - RNA, 19 nt, Homo sapiens
  misc_RNA (1)...(19): siRNA sense strand
ggaaaguggaaccuuacgu

SEQ ID NO: 1204920 - RNA, 19 nt, Homo sapiens
  misc_RNA (1)...(19): siRNA sense strand
gcauguaccccaccuacuu

SEQ ID NO: 1204921 - RNA, 19 nt, Homo sapiens
  misc_RNA (1)...(19): siRNA sense strand
ccaacuugaugggcaccaa

SEQ ID NO: 1204922 - RNA, 19 nt, Homo sapiens
  misc_RNA (1)...(19): siRNA sense strand
caaugacccggacuacauc

SEQ ID NO: 1204923 - RNA, 19 nt, Homo sapiens
  misc_RNA (1)...(19): siRNA sense strand
aguccuauguacucaacuu

SEQ ID NO: 1204924 - RNA, 19 nt, Homo sapiens
  misc_RNA (1)...(19): siRNA sense strand
gcugugugcuacgagacaa

SEQ ID NO: 1204925 - RNA, 19 nt, Homo sapiens
  misc_RNA (1)...(19): siRNA sense strand
gcaccaaguucacuguuua

SEQ ID NO: 1204926 - RNA, 19 nt, Homo sapiens
  misc_RNA (1)...(19): siRNA sense strand
ccaauuaccucaucucugu

SEQ ID NO: 1204927 - RNA, 19 nt, Homo sapiens
  misc_RNA (1)...(19): siRNA sense strand
ggacagcuauaucgggaaa

SEQ ID NO: 1204928 - RNA, 19 nt, Homo sapiens
  misc_RNA (1)...(19): siRNA sense strand
ggaaggagaagaagggaaa

SEQ ID NO: 1204929 - RNA, 19 nt, Homo sapiens
  misc_RNA (1)...(19): siRNA sense strand
ggaagagaaagaagaguaa

SEQ ID NO: 1204930 - RNA, 19 nt, Homo sapiens
  misc_RNA (1)...(19): siRNA sense strand
aaacugcgguccaacuuga

SEQ ID NO: 1204931 - RNA, 19 nt, Homo sapiens
  misc_RNA (1)...(19): siRNA sense strand
cuagcacgcuggcagaaua

SEQ ID NO: 1204932 - RNA, 19 nt, Homo sapiens
  misc_RNA (1)...(19): siRNA sense strand
cagcagcacuggcagaaga

SEQ ID NO: 1204933 - RNA, 19 nt, Homo sapiens
  misc_RNA (1)...(19): siRNA sense strand
gcaaugacccggacuacau

SEQ ID NO: 1204934 - RNA, 19 nt, Homo sapiens
  misc_RNA (1)...(19): siRNA sense strand
ggaaggaagagaaagaaga

SEQ ID NO: 1204935 - RNA, 19 nt, Homo sapiens
  misc_RNA (1)...(19): siRNA sense strand
ccucccagcuaaauaguaa

SEQ ID NO: 1204936 - RNA, 19 nt, Homo sapiens
  misc_RNA (1)...(19): siRNA sense strand
gagcagaagcagaagaaga

SEQ ID NO: 1204937 - RNA, 19 nt, Homo sapiens
  misc_RNA (1)...(19): siRNA sense strand
caaguucacuguuuaugac

SEQ ID NO: 1204938 - RNA, 19 nt, Homo sapiens
  misc_RNA (1)...(19): siRNA sense strand
gaagagaaagaagaguaaa

SEQ ID NO: 1204939 - RNA, 19 nt, Homo sapiens
  misc_RNA (1)...(19): siRNA sense strand
gaagaagggaaagcacaaa

SEQ ID NO: 1204940 - RNA, 19 nt, Homo sapiens
  misc_RNA (1)...(19): siRNA sense strand
caccauggauuacaacuac

SEQ ID NO: 1204941 - RNA, 19 nt, Homo sapiens
  misc_RNA (1)...(19): siRNA sense strand
uuuggaaaguggaaccuua

SEQ ID NO: 1204942 - RNA, 19 nt, Homo sapiens
  misc_RNA (1)...(19): siRNA sense strand
ggcaccaaguucacuguuu

SEQ ID NO: 1204943 - RNA, 19 nt, Homo sapiens
  misc_RNA (1)...(19): siRNA sense strand
gaaacugcgguccaacuug

SEQ ID NO: 1204944 - RNA, 19 nt, Homo sapiens
  misc_RNA (1)...(19): siRNA sense strand
ggaaacugcgguccaacuu

SEQ ID NO: 1204945 - RNA, 19 nt, Homo sapiens
  misc_RNA (1)...(19): siRNA sense strand
gaaggaagagaaagaagag

SEQ ID NO: 1204946 - RNA, 19 nt, Homo sapiens
  misc_RNA (1)...(19): siRNA sense strand
ccaaguucacuguuuauga

SEQ ID NO: 1204947 - RNA, 19 nt, Homo sapiens
  misc_RNA (1)...(19): siRNA sense strand
acaccugucuggaaugaug

SEQ ID NO: 1204948 - RNA, 19 nt, Homo sapiens
  misc_RNA (1)...(19): siRNA sense strand
ugacacacaguccuaugua

SEQ ID NO: 1204949 - RNA, 19 nt, Homo sapiens
  misc_RNA (1)...(19): siRNA sense strand
acacaggccuccgugaaga

SEQ ID NO: 1204950 - RNA, 19 nt, Homo sapiens
  misc_RNA (1)...(19): siRNA sense strand
uccaggaucuugaggaguu

SEQ ID NO: 1204951 - RNA, 19 nt, Homo sapiens
  misc_RNA (1)...(19): siRNA sense strand
gaacacggagaguaucauc

SEQ ID NO: 1204952 - RNA, 19 nt, Homo sapiens
  misc_RNA (1)...(19): siRNA sense strand
gcaacgagcaugagacacu

SEQ ID NO: 1204953 - RNA, 19 nt, Homo sapiens
  misc_RNA (1)...(19): siRNA sense strand
cagaggauguguucaccau

SEQ ID NO: 1204954 - RNA, 19 nt, Homo sapiens
  misc_RNA (1)...(19): siRNA sense strand
ggaagaugagcgugauugu

SEQ ID NO: 1204955 - RNA, 19 nt, Homo sapiens
  misc_RNA (1)...(19): siRNA sense strand
aauaagaacacggagagua

SEQ ID NO: 1204956 - RNA, 19 nt, Homo sapiens
  misc_RNA (1)...(19): siRNA sense strand
gugccacgaugcagaggaa

SEQ ID NO: 1204957 - RNA, 19 nt, Homo sapiens
  misc_RNA (1)...(19): siRNA sense strand
ccauugcccuguccagcuu

SEQ ID NO: 1204958 - RNA, 19 nt, Homo sapiens
  misc_RNA (1)...(19): siRNA sense strand
gcaccagcuucagccaaga

SEQ ID NO: 1204959 - RNA, 19 nt, Homo sapiens
  misc_RNA (1)...(19): siRNA sense strand
cugcaggccuuugccauug

SEQ ID NO: 1204960 - RNA, 19 nt, Homo sapiens
  misc_RNA (1)...(19): siRNA sense strand
gcacgcuggcagaauaaga

SEQ ID NO: 1204961 - RNA, 19 nt, Homo sapiens
  misc_RNA (1)...(19): siRNA sense strand
acaaacgucuuaggcuuca

SEQ ID NO: 1204962 - RNA, 19 nt, Homo sapiens
  misc_RNA (1)...(19): siRNA sense strand
guucacuguuuaugacaau

SEQ ID NO: 1204963 - RNA, 19 nt, Homo sapiens
  misc_RNA (1)...(19): siRNA sense strand
gcaccuggaccgugaggau

SEQ ID NO: 1204964 - RNA, 19 nt, Homo sapiens
  misc_RNA (1)...(19): siRNA sense strand
gguagcagaggauguguuc

SEQ ID NO: 1204965 - RNA, 19 nt, Homo sapiens
  misc_RNA (1)...(19): siRNA sense strand
auaagaacacggagaguau

SEQ ID NO: 1204966 - RNA, 19 nt, Homo sapiens
  misc_RNA (1)...(19): siRNA sense strand
gaagaugagcgugauuguc

SEQ ID NO: 1204967 - RNA, 19 nt, Homo sapiens
  misc_RNA (1)...(19): siRNA sense strand
ugacgaggaugaggaggau

SEQ ID NO: 1204968 - RNA, 19 nt, Homo sapiens
  misc_RNA (1)...(19): siRNA sense strand
gacacacaguccuauguac

SEQ ID NO: 1204969 - RNA, 19 nt, Homo sapiens
  misc_RNA (1)...(19): siRNA sense strand
gcaguggcagcaccagcua

SEQ ID NO: 1204970 - RNA, 19 nt, Homo sapiens
  misc_RNA (1)...(19): siRNA sense strand
aggaagagaaagaagagua

SEQ ID NO: 1204971 - RNA, 19 nt, Homo sapiens
  misc_RNA (1)...(19): siRNA sense strand
ugaggcagcagaagcuuga

SEQ ID NO: 1204972 - RNA, 19 nt, Homo sapiens
  misc_RNA (1)...(19): siRNA sense strand
gcaucacucgggacaagaa

SEQ ID NO: 1204973 - RNA, 19 nt, Homo sapiens
  misc_RNA (1)...(19): siRNA sense strand
caggguaucaccaucaaau

SEQ ID NO: 1204974 - RNA, 19 nt, Homo sapiens
  misc_RNA (1)...(19): siRNA sense strand
gcgggaaggaagagaaaga

SEQ ID NO: 1204975 - RNA, 19 nt, Homo sapiens
  misc_RNA (1)...(19): siRNA sense strand
ggccucauccuccacuuug

SEQ ID NO: 1204976 - RNA, 19 nt, Homo sapiens
  misc_RNA (1)...(19): siRNA sense strand
ccagcagcaugagcuuuga

SEQ ID NO: 1204977 - RNA, 19 nt, Homo sapiens
  misc_RNA (1)...(19): siRNA sense strand
gaacuuccagaucauccau

SEQ ID NO: 1204978 - RNA, 19 nt, Homo sapiens
  misc_RNA (1)...(19): siRNA sense strand
acacaguccuauguacuca

SEQ ID NO: 1204979 - RNA, 19 nt, Homo sapiens
  misc_RNA (1)...(19): siRNA sense strand
cagcaccagcuaccaaguu

SEQ ID NO: 1204980 - RNA, 19 nt, Homo sapiens
  misc_RNA (1)...(19): siRNA sense strand
caugagcuuugacgaggau

SEQ ID NO: 1204981 - RNA, 19 nt, Homo sapiens
  misc_RNA (1)...(19): siRNA sense strand
caagcuggcgugcgaguag

SEQ ID NO: 1204982 - RNA, 19 nt, Homo sapiens
  misc_RNA (1)...(19): siRNA sense strand
gcaagcuggcgugcgagua

SEQ ID NO: 1204983 - RNA, 19 nt, Homo sapiens
  misc_RNA (1)...(19): siRNA sense strand
gauguguucaccauggauu

SEQ ID NO: 1204984 - RNA, 19 nt, Homo sapiens
  misc_RNA (1)...(19): siRNA sense strand
gaaaccugaggcagcagaa

SEQ ID NO: 1204985 - RNA, 19 nt, Homo sapiens
  misc_RNA (1)...(19): siRNA sense strand
agcagaagcagaagaagaa

SEQ ID NO: 1204986 - RNA, 19 nt, Homo sapiens
  misc_RNA (1)...(19): siRNA sense strand
gaggaugaggaggagaaua

SEQ ID NO: 1204987 - RNA, 19 nt, Homo sapiens
  misc_RNA (1)...(19): siRNA sense strand
gcuccucccagcuaaauag

SEQ ID NO: 1204988 - RNA, 19 nt, Homo sapiens
  misc_RNA (1)...(19): siRNA sense strand
ccaggaucuugaggaguuu

SEQ ID NO: 1204989 - RNA, 19 nt, Homo sapiens
  misc_RNA (1)...(19): siRNA sense strand
ccaaggcccagugcagauu

SEQ ID NO: 1204990 - RNA, 19 nt, Homo sapiens
  misc_RNA (1)...(19): siRNA sense strand
gaugacacacaguccuaug

SEQ ID NO: 1204991 - RNA, 19 nt, Homo sapiens
  misc_RNA (1)...(19): siRNA sense strand
gugauugucccaggcauga

SEQ ID NO: 1204992 - RNA, 19 nt, Homo sapiens
  misc_RNA (1)...(19): siRNA sense strand
ccgcaucacucgggacaag

SEQ ID NO: 1204993 - RNA, 19 nt, Homo sapiens
  misc_RNA (1)...(19): siRNA sense strand
ucaccauggauuacaacua

SEQ ID NO: 1204994 - RNA, 19 nt, Homo sapiens
  misc_RNA (1)...(19): siRNA sense strand
ucaucgagcugcaaaacaa

SEQ ID NO: 1204995 - RNA, 19 nt, Homo sapiens
  misc_RNA (1)...(19): siRNA sense strand
ccgcuaggaaggagaagaa

SEQ ID NO: 1204996 - RNA, 19 nt, Homo sapiens
  misc_RNA (1)...(19): siRNA sense strand
agaagaagggaaagcacaa

SEQ ID NO: 1204997 - RNA, 19 nt, Homo sapiens
  misc_RNA (1)...(19): siRNA sense strand
acacggagaguaucaucga

SEQ ID NO: 1204998 - RNA, 19 nt, Homo sapiens
  misc_RNA (1)...(19): siRNA sense strand
ccagcuaccaaguucaaga

SEQ ID NO: 1204999 - RNA, 19 nt, Homo sapiens
  misc_RNA (1)...(19): siRNA sense strand
cuugaggaguuugcacuga

SEQ ID NO: 1205000 - RNA, 19 nt, Homo sapiens
  misc_RNA (1)...(19): siRNA sense strand
uagcacgcuggcagaauaa

SEQ ID NO: 1205001 - RNA, 19 nt, Homo sapiens
  misc_RNA (1)...(19): siRNA sense strand
ggaaaguggaaccuuacgu

SEQ ID NO: 1205002 - RNA, 19 nt, Homo sapiens
  misc_RNA (1)...(19): siRNA sense strand
gcauguaccccaccuacuu

SEQ ID NO: 1205003 - RNA, 19 nt, Homo sapiens
  misc_RNA (1)...(19): siRNA sense strand
ccaacuugaugggcaccaa

SEQ ID NO: 1205004 - RNA, 19 nt, Homo sapiens
  misc_RNA (1)...(19): siRNA sense strand
caaugacccggacuacauc

SEQ ID NO: 1205005 - RNA, 19 nt, Homo sapiens
  misc_RNA (1)...(19): siRNA sense strand
aguccuauguacucaacuu

SEQ ID NO: 1205006 - RNA, 19 nt, Homo sapiens
  misc_RNA (1)...(19): siRNA sense strand
gcugugugcuacgagacaa

SEQ ID NO: 1205007 - RNA, 19 nt, Homo sapiens
  misc_RNA (1)...(19): siRNA sense strand
ggaaguauuugucucgaua

SEQ ID NO: 1205008 - RNA, 19 nt, Homo sapiens
  misc_RNA (1)...(19): siRNA sense strand
gagaauggacucagaaaua

SEQ ID NO: 1205009 - RNA, 19 nt, Homo sapiens
  misc_RNA (1)...(19): siRNA sense strand
caacagacaugcaagagaa

SEQ ID NO: 1205010 - RNA, 19 nt, Homo sapiens
  misc_RNA (1)...(19): siRNA sense strand
gcacaaaucuauaaaucag

SEQ ID NO: 1205011 - RNA, 19 nt, Homo sapiens
  misc_RNA (1)...(19): siRNA sense strand
gcaagagaauggacucaga

SEQ ID NO: 1205012 - RNA, 19 nt, Homo sapiens
  misc_RNA (1)...(19): siRNA sense strand
gaagaggauucagaaagaa

SEQ ID NO: 1205013 - RNA, 19 nt, Homo sapiens
  misc_RNA (1)...(19): siRNA sense strand
agaauggacucagaaauau

SEQ ID NO: 1205014 - RNA, 19 nt, Homo sapiens
  misc_RNA (1)...(19): siRNA sense strand
gguggagucuucuuucuca

SEQ ID NO: 1205015 - RNA, 19 nt, Homo sapiens
  misc_RNA (1)...(19): siRNA sense strand
guccauauguucucuacuu

SEQ ID NO: 1205016 - RNA, 19 nt, Homo sapiens
  misc_RNA (1)...(19): siRNA sense strand
gaaagaauugagugaucua

SEQ ID NO: 1205017 - RNA, 19 nt, Homo sapiens
  misc_RNA (1)...(19): siRNA sense strand
cagaaagaauugagugauc

SEQ ID NO: 1205018 - RNA, 19 nt, Homo sapiens
  misc_RNA (1)...(19): siRNA sense strand
uaccagauauugcacaaau

SEQ ID NO: 1205019 - RNA, 19 nt, Homo sapiens
  misc_RNA (1)...(19): siRNA sense strand
cauauguucucuacuuugu

SEQ ID NO: 1205020 - RNA, 19 nt, Homo sapiens
  misc_RNA (1)...(19): siRNA sense strand
cauccaaacauaaacagua

SEQ ID NO: 1205021 - RNA, 19 nt, Homo sapiens
  misc_RNA (1)...(19): siRNA sense strand
uauguucucuacuuuguga

SEQ ID NO: 1205022 - RNA, 19 nt, Homo sapiens
  misc_RNA (1)...(19): siRNA sense strand
guauuugucucgauauucu

SEQ ID NO: 1205023 - RNA, 19 nt, Homo sapiens
  misc_RNA (1)...(19): siRNA sense strand
cauaaacaguaauggaagu

SEQ ID NO: 1205024 - RNA, 19 nt, Homo sapiens
  misc_RNA (1)...(19): siRNA sense strand
ugugggagaugacuuguuc

SEQ ID NO: 1205025 - RNA, 19 nt, Homo sapiens
  misc_RNA (1)...(19): siRNA sense strand
caagagaauggacucagaa

SEQ ID NO: 1205026 - RNA, 19 nt, Homo sapiens
  misc_RNA (1)...(19): siRNA sense strand
ccaaacauaaacaguaaug

SEQ ID NO: 1205027 - RNA, 19 nt, Homo sapiens
  misc_RNA (1)...(19): siRNA sense strand
caccagcucugacuguauc

SEQ ID NO: 1205028 - RNA, 19 nt, Homo sapiens
  misc_RNA (1)...(19): siRNA sense strand
ggacucagaaauaugcaau

SEQ ID NO: 1205029 - RNA, 19 nt, Homo sapiens
  misc_RNA (1)...(19): siRNA sense strand
gaauggacucagaaauaug

SEQ ID NO: 1205030 - RNA, 19 nt, Homo sapiens
  misc_RNA (1)...(19): siRNA sense strand
gaaguauuugucucgauau

SEQ ID NO: 1205031 - RNA, 19 nt, Homo sapiens
  misc_RNA (1)...(19): siRNA sense strand
agaaagaauugagugaucu

SEQ ID NO: 1205032 - RNA, 19 nt, Homo sapiens
  misc_RNA (1)...(19): siRNA sense strand
gauauucugaggucacaau

SEQ ID NO: 1205033 - RNA, 19 nt, Homo sapiens
  misc_RNA (1)...(19): siRNA sense strand
ucaagguggagucuucuuu

SEQ ID NO: 1205034 - RNA, 19 nt, Homo sapiens
  misc_RNA (1)...(19): siRNA sense strand
aagauugcuuucacaacaa

SEQ ID NO: 1205035 - RNA, 19 nt, Homo sapiens
  misc_RNA (1)...(19): siRNA sense strand
agauugcuuucacaacaaa

SEQ ID NO: 1205036 - RNA, 19 nt, Homo sapiens
  misc_RNA (1)...(19): siRNA sense strand
agaauugagugaucuacag

SEQ ID NO: 1205037 - RNA, 19 nt, Homo sapiens
  misc_RNA (1)...(19): siRNA sense strand
caagguggagucuucuuuc

SEQ ID NO: 1205038 - RNA, 19 nt, Homo sapiens
  misc_RNA (1)...(19): siRNA sense strand
acucagaaauaugcaaugu

SEQ ID NO: 1205039 - RNA, 19 nt, Homo sapiens
  misc_RNA (1)...(19): siRNA sense strand
uccauauguucucuacuuu

SEQ ID NO: 1205040 - RNA, 19 nt, Homo sapiens
  misc_RNA (1)...(19): siRNA sense strand
guaauggaaguauuugucu

SEQ ID NO: 1205041 - RNA, 19 nt, Homo sapiens
  misc_RNA (1)...(19): siRNA sense strand
cgauccaccugcucacugu

SEQ ID NO: 1205042 - RNA, 19 nt, Homo sapiens
  misc_RNA (1)...(19): siRNA sense strand
cgacagauuauccuuuuaa

SEQ ID NO: 1205043 - RNA, 19 nt, Homo sapiens
  misc_RNA (1)...(19): siRNA sense strand
uaauccagaugaccccuua

SEQ ID NO: 1205044 - RNA, 19 nt, Homo sapiens
  misc_RNA (1)...(19): siRNA sense strand
aaauacaacagacaugcaa

SEQ ID NO: 1205045 - RNA, 19 nt, Homo sapiens
  misc_RNA (1)...(19): siRNA sense strand
agucuucuuucucacugua

SEQ ID NO: 1205046 - RNA, 19 nt, Homo sapiens
  misc_RNA (1)...(19): siRNA sense strand
auaucaagguggagucuuc

SEQ ID NO: 1205047 - RNA, 19 nt, Homo sapiens
  misc_RNA (1)...(19): siRNA sense strand
uuuaaaccaccaaagauug

SEQ ID NO: 1205048 - RNA, 19 nt, Homo sapiens
  misc_RNA (1)...(19): siRNA sense strand
cagcucugacuguaucaaa

SEQ ID NO: 1205049 - RNA, 19 nt, Homo sapiens
  misc_RNA (1)...(19): siRNA sense strand
ccauauguucucuacuuug

SEQ ID NO: 1205050 - RNA, 19 nt, Homo sapiens
  misc_RNA (1)...(19): siRNA sense strand
acaacagacaugcaagaga

SEQ ID NO: 1205051 - RNA, 19 nt, Homo sapiens
  misc_RNA (1)...(19): siRNA sense strand
caaacgggcucaucauaau

SEQ ID NO: 1205052 - RNA, 19 nt, Homo sapiens
  misc_RNA (1)...(19): siRNA sense strand
gacaaacgggcucaucaua

SEQ ID NO: 1205053 - RNA, 19 nt, Homo sapiens
  misc_RNA (1)...(19): siRNA sense strand
guagggaccacaucaaaga

SEQ ID NO: 1205054 - RNA, 19 nt, Homo sapiens
  misc_RNA (1)...(19): siRNA sense strand
auaaugcacuggaacgaaa

SEQ ID NO: 1205055 - RNA, 19 nt, Homo sapiens
  misc_RNA (1)...(19): siRNA sense strand
acaaacgggcucaucauaa

SEQ ID NO: 1205056 - RNA, 19 nt, Homo sapiens
  misc_RNA (1)...(19): siRNA sense strand
agacagcuuucacaguuug

SEQ ID NO: 1205057 - RNA, 19 nt, Homo sapiens
  misc_RNA (1)...(19): siRNA sense strand
gcacuggaacgaaaacgua

SEQ ID NO: 1205058 - RNA, 19 nt, Homo sapiens
  misc_RNA (1)...(19): siRNA sense strand
aagacagcuuucacaguuu

SEQ ID NO: 1205059 - RNA, 19 nt, Homo sapiens
  misc_RNA (1)...(19): siRNA sense strand
aaacguagggaccacauca

SEQ ID NO: 1205060 - RNA, 19 nt, Homo sapiens
  misc_RNA (1)...(19): siRNA sense strand
cauaaugcacuggaacgaa

SEQ ID NO: 1205061 - RNA, 19 nt, Homo sapiens
  misc_RNA (1)...(19): siRNA sense strand
ugacaaacgggcucaucau

SEQ ID NO: 1205062 - RNA, 19 nt, Homo sapiens
  misc_RNA (1)...(19): siRNA sense strand
aaacgggcucaucauaaug

SEQ ID NO: 1205063 - RNA, 19 nt, Homo sapiens
  misc_RNA (1)...(19): siRNA sense strand
caaacgggcucaucauaau

SEQ ID NO: 1205064 - RNA, 19 nt, Homo sapiens
  misc_RNA (1)...(19): siRNA sense strand
gacaaacgggcucaucaua

SEQ ID NO: 1205065 - RNA, 19 nt, Homo sapiens
  misc_RNA (1)...(19): siRNA sense strand
guagggaccacaucaaaga

SEQ ID NO: 1205066 - RNA, 19 nt, Homo sapiens
  misc_RNA (1)...(19): siRNA sense strand
auaaugcacuggaacgaaa

SEQ ID NO: 1205067 - RNA, 19 nt, Homo sapiens
  misc_RNA (1)...(19): siRNA sense strand
acaaacgggcucaucauaa

SEQ ID NO: 1205068 - RNA, 19 nt, Homo sapiens
  misc_RNA (1)...(19): siRNA sense strand
agacagcuuucacaguuug

SEQ ID NO: 1205069 - RNA, 19 nt, Homo sapiens
  misc_RNA (1)...(19): siRNA sense strand
gcacuggaacgaaaacgua

SEQ ID NO: 1205070 - RNA, 19 nt, Homo sapiens
  misc_RNA (1)...(19): siRNA sense strand
aagacagcuuucacaguuu

SEQ ID NO: 1205071 - RNA, 19 nt, Homo sapiens
  misc_RNA (1)...(19): siRNA sense strand
aaacguagggaccacauca

SEQ ID NO: 1205072 - RNA, 19 nt, Homo sapiens
  misc_RNA (1)...(19): siRNA sense strand
cauaaugcacuggaacgaa

SEQ ID NO: 1205073 - RNA, 19 nt, Homo sapiens
  misc_RNA (1)...(19): siRNA sense strand
ugacaaacgggcucaucau

SEQ ID NO: 1205074 - RNA, 19 nt, Homo sapiens
  misc_RNA (1)...(19): siRNA sense strand
aaacgggcucaucauaaug

SEQ ID NO: 1205075 - RNA, 19 nt, Homo sapiens
  misc_RNA (1)...(19): siRNA sense strand
caaacgggcucaucauaau

SEQ ID NO: 1205076 - RNA, 19 nt, Homo sapiens
  misc_RNA (1)...(19): siRNA sense strand
gacaaacgggcucaucaua

SEQ ID NO: 1205077 - RNA, 19 nt, Homo sapiens
  misc_RNA (1)...(19): siRNA sense strand
guagggaccacaucaaaga

SEQ ID NO: 1205078 - RNA, 19 nt, Homo sapiens
  misc_RNA (1)...(19): siRNA sense strand
auaaugcacuggaacgaaa

SEQ ID NO: 1205079 - RNA, 19 nt, Homo sapiens
  misc_RNA (1)...(19): siRNA sense strand
acaaacgggcucaucauaa

SEQ ID NO: 1205080 - RNA, 19 nt, Homo sapiens
  misc_RNA (1)...(19): siRNA sense strand
agacagcuuucacaguuug

SEQ ID NO: 1205081 - RNA, 19 nt, Homo sapiens
  misc_RNA (1)...(19): siRNA sense strand
gcacuggaacgaaaacgua

SEQ ID NO: 1205082 - RNA, 19 nt, Homo sapiens
  misc_RNA (1)...(19): siRNA sense strand
aagacagcuuucacaguuu

SEQ ID NO: 1205083 - RNA, 19 nt, Homo sapiens
  misc_RNA (1)...(19): siRNA sense strand
aaacguagggaccacauca

SEQ ID NO: 1205084 - RNA, 19 nt, Homo sapiens
  misc_RNA (1)...(19): siRNA sense strand
cauaaugcacuggaacgaa

SEQ ID NO: 1205085 - RNA, 19 nt, Homo sapiens
  misc_RNA (1)...(19): siRNA sense strand
ugacaaacgggcucaucau

SEQ ID NO: 1205086 - RNA, 19 nt, Homo sapiens
  misc_RNA (1)...(19): siRNA sense strand
aaacgggcucaucauaaug

SEQ ID NO: 1205087 - RNA, 19 nt, Homo sapiens
  misc_RNA (1)...(19): siRNA sense strand
caaacgggcucaucauaau

SEQ ID NO: 1205088 - RNA, 19 nt, Homo sapiens
  misc_RNA (1)...(19): siRNA sense strand
gacaaacgggcucaucaua

SEQ ID NO: 1205089 - RNA, 19 nt, Homo sapiens
  misc_RNA (1)...(19): siRNA sense strand
guagggaccacaucaaaga

SEQ ID NO: 1205090 - RNA, 19 nt, Homo sapiens
  misc_RNA (1)...(19): siRNA sense strand
auaaugcacuggaacgaaa

SEQ ID NO: 1205091 - RNA, 19 nt, Homo sapiens
  misc_RNA (1)...(19): siRNA sense strand
acaaacgggcucaucauaa

SEQ ID NO: 1205092 - RNA, 19 nt, Homo sapiens
  misc_RNA (1)...(19): siRNA sense strand
agacagcuuucacaguuug

SEQ ID NO: 1205093 - RNA, 19 nt, Homo sapiens
  misc_RNA (1)...(19): siRNA sense strand
gcacuggaacgaaaacgua

SEQ ID NO: 1205094 - RNA, 19 nt, Homo sapiens
  misc_RNA (1)...(19): siRNA sense strand
aagacagcuuucacaguuu

SEQ ID NO: 1205095 - RNA, 19 nt, Homo sapiens
  misc_RNA (1)...(19): siRNA sense strand
aaacguagggaccacauca

SEQ ID NO: 1205096 - RNA, 19 nt, Homo sapiens
  misc_RNA (1)...(19): siRNA sense strand
cauaaugcacuggaacgaa

SEQ ID NO: 1205097 - RNA, 19 nt, Homo sapiens
  misc_RNA (1)...(19): siRNA sense strand
ugacaaacgggcucaucau

SEQ ID NO: 1205098 - RNA, 19 nt, Homo sapiens
  misc_RNA (1)...(19): siRNA sense strand
aaacgggcucaucauaaug

SEQ ID NO: 1205099 - RNA, 19 nt, Homo sapiens
  misc_RNA (1)...(19): siRNA sense strand
caaacgggcucaucauaau

SEQ ID NO: 1205100 - RNA, 19 nt, Homo sapiens
  misc_RNA (1)...(19): siRNA sense strand
gacaaacgggcucaucaua

SEQ ID NO: 1205101 - RNA, 19 nt, Homo sapiens
  misc_RNA (1)...(19): siRNA sense strand
guagggaccacaucaaaga

SEQ ID NO: 1205102 - RNA, 19 nt, Homo sapiens
  misc_RNA (1)...(19): siRNA sense strand
auaaugcacuggaacgaaa

SEQ ID NO: 1205103 - RNA, 19 nt, Homo sapiens
  misc_RNA (1)...(19): siRNA sense strand
acaaacgggcucaucauaa

SEQ ID NO: 1205104 - RNA, 19 nt, Homo sapiens
  misc_RNA (1)...(19): siRNA sense strand
agacagcuuucacaguuug

SEQ ID NO: 1205105 - RNA, 19 nt, Homo sapiens
  misc_RNA (1)...(19): siRNA sense strand
gcacuggaacgaaaacgua

SEQ ID NO: 1205106 - RNA, 19 nt, Homo sapiens
  misc_RNA (1)...(19): siRNA sense strand
aagacagcuuucacaguuu

SEQ ID NO: 1205107 - RNA, 19 nt, Homo sapiens
  misc_RNA (1)...(19): siRNA sense strand
aaacguagggaccacauca

SEQ ID NO: 1205108 - RNA, 19 nt, Homo sapiens
  misc_RNA (1)...(19): siRNA sense strand
cauaaugcacuggaacgaa

SEQ ID NO: 1205109 - RNA, 19 nt, Homo sapiens
  misc_RNA (1)...(19): siRNA sense strand
ugacaaacgggcucaucau

SEQ ID NO: 1205110 - RNA, 19 nt, Homo sapiens
  misc_RNA (1)...(19): siRNA sense strand
aaacgggcucaucauaaug

SEQ ID NO: 1205111 - RNA, 19 nt, Homo sapiens
  misc_RNA (1)...(19): siRNA sense strand
caaacgggcucaucauaau

SEQ ID NO: 1205112 - RNA, 19 nt, Homo sapiens
  misc_RNA (1)...(19): siRNA sense strand
gacaaacgggcucaucaua

SEQ ID NO: 1205113 - RNA, 19 nt, Homo sapiens
  misc_RNA (1)...(19): siRNA sense strand
guagggaccacaucaaaga

SEQ ID NO: 1205114 - RNA, 19 nt, Homo sapiens
  misc_RNA (1)...(19): siRNA sense strand
auaaugcacuggaacgaaa

SEQ ID NO: 1205115 - RNA, 19 nt, Homo sapiens
  misc_RNA (1)...(19): siRNA sense strand
acaaacgggcucaucauaa

SEQ ID NO: 1205116 - RNA, 19 nt, Homo sapiens
  misc_RNA (1)...(19): siRNA sense strand
agacagcuuucacaguuug

SEQ ID NO: 1205117 - RNA, 19 nt, Homo sapiens
  misc_RNA (1)...(19): siRNA sense strand
gcacuggaacgaaaacgua

SEQ ID NO: 1205118 - RNA, 19 nt, Homo sapiens
  misc_RNA (1)...(19): siRNA sense strand
aagacagcuuucacaguuu

SEQ ID NO: 1205119 - RNA, 19 nt, Homo sapiens
  misc_RNA (1)...(19): siRNA sense strand
aaacguagggaccacauca

SEQ ID NO: 1205120 - RNA, 19 nt, Homo sapiens
  misc_RNA (1)...(19): siRNA sense strand
cauaaugcacuggaacgaa

SEQ ID NO: 1205121 - RNA, 19 nt, Homo sapiens
  misc_RNA (1)...(19): siRNA sense strand
ugacaaacgggcucaucau

SEQ ID NO: 1205122 - RNA, 19 nt, Homo sapiens
  misc_RNA (1)...(19): siRNA sense strand
aaacgggcucaucauaaug

SEQ ID NO: 1205123 - RNA, 19 nt, Homo sapiens
  misc_RNA (1)...(19): siRNA sense strand
gagaauaccugaugaagca

SEQ ID NO: 1205124 - RNA, 19 nt, Homo sapiens
  misc_RNA (1)...(19): siRNA sense strand
gggagaagcccuacaagug

SEQ ID NO: 1205125 - RNA, 19 nt, Homo sapiens
  misc_RNA (1)...(19): siRNA sense strand
gggaagcgguucagcaaag

SEQ ID NO: 1205126 - RNA, 19 nt, Homo sapiens
  misc_RNA (1)...(19): siRNA sense strand
ggagaagcccuaccacugu

SEQ ID NO: 1205127 - RNA, 19 nt, Homo sapiens
  misc_RNA (1)...(19): siRNA sense strand
gcuuuacccugagagaaua

SEQ ID NO: 1205128 - RNA, 19 nt, Homo sapiens
  misc_RNA (1)...(19): siRNA sense strand
gcaagagcuucagcaggaa

SEQ ID NO: 1205129 - RNA, 19 nt, Homo sapiens
  misc_RNA (1)...(19): siRNA sense strand
cagcaggaaugccaaucug

SEQ ID NO: 1205130 - RNA, 19 nt, Homo sapiens
  misc_RNA (1)...(19): siRNA sense strand
cgacaccagagaauccaua

SEQ ID NO: 1205131 - RNA, 19 nt, Homo sapiens
  misc_RNA (1)...(19): siRNA sense strand
gcgggaagcgguucagcaa

SEQ ID NO: 1205132 - RNA, 19 nt, Homo sapiens
  misc_RNA (1)...(19): siRNA sense strand
gaggaguggaggcauguga

SEQ ID NO: 1205133 - RNA, 19 nt, Homo sapiens
  misc_RNA (1)...(19): siRNA sense strand
gagagaauaccugaugaag

SEQ ID NO: 1205134 - RNA, 19 nt, Homo sapiens
  misc_RNA (1)...(19): siRNA sense strand
ggaagcgguucagcaaagg

SEQ ID NO: 1205135 - RNA, 19 nt, Homo sapiens
  misc_RNA (1)...(19): siRNA sense strand
ccugagagaauaccugaug

SEQ ID NO: 1205136 - RNA, 19 nt, Homo sapiens
  misc_RNA (1)...(19): siRNA sense strand
cugagagaauaccugauga

SEQ ID NO: 1205137 - RNA, 19 nt, Homo sapiens
  misc_RNA (1)...(19): siRNA sense strand
ugagagaauaccugaugaa

SEQ ID NO: 1205138 - RNA, 19 nt, Homo sapiens
  misc_RNA (1)...(19): siRNA sense strand
cagcccagauagacugcuu

SEQ ID NO: 1205139 - RNA, 19 nt, Homo sapiens
  misc_RNA (1)...(19): siRNA sense strand
gcaaggaaaaggaggcaaa

SEQ ID NO: 1205140 - RNA, 19 nt, Homo sapiens
  misc_RNA (1)...(19): siRNA sense strand
ggcuuuacccugagagaau

SEQ ID NO: 1205141 - RNA, 19 nt, Homo sapiens
  misc_RNA (1)...(19): siRNA sense strand
ccagcgaacccacgaagag

SEQ ID NO: 1205142 - RNA, 19 nt, Homo sapiens
  misc_RNA (1)...(19): siRNA sense strand
gcccagauagacugcuuug

SEQ ID NO: 1205143 - RNA, 19 nt, Homo sapiens
  misc_RNA (1)...(19): siRNA sense strand
gaacccacgaagagaaguc

SEQ ID NO: 1205144 - RNA, 19 nt, Homo sapiens
  misc_RNA (1)...(19): siRNA sense strand
caaacgggcucaucauaau

SEQ ID NO: 1205145 - RNA, 19 nt, Homo sapiens
  misc_RNA (1)...(19): siRNA sense strand
gacaaacgggcucaucaua

SEQ ID NO: 1205146 - RNA, 19 nt, Homo sapiens
  misc_RNA (1)...(19): siRNA sense strand
guagggaccacaucaaaga

SEQ ID NO: 1205147 - RNA, 19 nt, Homo sapiens
  misc_RNA (1)...(19): siRNA sense strand
auaaugcacuggaacgaaa

SEQ ID NO: 1205148 - RNA, 19 nt, Homo sapiens
  misc_RNA (1)...(19): siRNA sense strand
acaaacgggcucaucauaa

SEQ ID NO: 1205149 - RNA, 19 nt, Homo sapiens
  misc_RNA (1)...(19): siRNA sense strand
agacagcuuucacaguuug

SEQ ID NO: 1205150 - RNA, 19 nt, Homo sapiens
  misc_RNA (1)...(19): siRNA sense strand
gcacuggaacgaaaacgua

SEQ ID NO: 1205151 - RNA, 19 nt, Homo sapiens
  misc_RNA (1)...(19): siRNA sense strand
aagacagcuuucacaguuu

SEQ ID NO: 1205152 - RNA, 19 nt, Homo sapiens
  misc_RNA (1)...(19): siRNA sense strand
aaacguagggaccacauca

SEQ ID NO: 1205153 - RNA, 19 nt, Homo sapiens
  misc_RNA (1)...(19): siRNA sense strand
cauaaugcacuggaacgaa

SEQ ID NO: 1205154 - RNA, 19 nt, Homo sapiens
  misc_RNA (1)...(19): siRNA sense strand
ugacaaacgggcucaucau

SEQ ID NO: 1205155 - RNA, 19 nt, Homo sapiens
  misc_RNA (1)...(19): siRNA sense strand
aaacgggcucaucauaaug

SEQ ID NO: 1205156 - RNA, 19 nt, Homo sapiens
  misc_RNA (1)...(19): siRNA sense strand
caaacgggcucaucauaau

SEQ ID NO: 1205157 - RNA, 19 nt, Homo sapiens
  misc_RNA (1)...(19): siRNA sense strand
gacaaacgggcucaucaua

SEQ ID NO: 1205158 - RNA, 19 nt, Homo sapiens
  misc_RNA (1)...(19): siRNA sense strand
guagggaccacaucaaaga

SEQ ID NO: 1205159 - RNA, 19 nt, Homo sapiens
  misc_RNA (1)...(19): siRNA sense strand
auaaugcacuggaacgaaa

SEQ ID NO: 1205160 - RNA, 19 nt, Homo sapiens
  misc_RNA (1)...(19): siRNA sense strand
acaaacgggcucaucauaa

SEQ ID NO: 1205161 - RNA, 19 nt, Homo sapiens
  misc_RNA (1)...(19): siRNA sense strand
agacagcuuucacaguuug

SEQ ID NO: 1205162 - RNA, 19 nt, Homo sapiens
  misc_RNA (1)...(19): siRNA sense strand
gcacuggaacgaaaacgua

SEQ ID NO: 1205163 - RNA, 19 nt, Homo sapiens
  misc_RNA (1)...(19): siRNA sense strand
aagacagcuuucacaguuu

SEQ ID NO: 1205164 - RNA, 19 nt, Homo sapiens
  misc_RNA (1)...(19): siRNA sense strand
aaacguagggaccacauca

SEQ ID NO: 1205165 - RNA, 19 nt, Homo sapiens
  misc_RNA (1)...(19): siRNA sense strand
cauaaugcacuggaacgaa

SEQ ID NO: 1205166 - RNA, 19 nt, Homo sapiens
  misc_RNA (1)...(19): siRNA sense strand
ugacaaacgggcucaucau

SEQ ID NO: 1205167 - RNA, 19 nt, Homo sapiens
  misc_RNA (1)...(19): siRNA sense strand
aaacgggcucaucauaaug

SEQ ID NO: 1205168 - RNA, 19 nt, Homo sapiens
  misc_RNA (1)...(19): siRNA sense strand
caaacgggcucaucauaau

SEQ ID NO: 1205169 - RNA, 19 nt, Homo sapiens
  misc_RNA (1)...(19): siRNA sense strand
gacaaacgggcucaucaua

SEQ ID NO: 1205170 - RNA, 19 nt, Homo sapiens
  misc_RNA (1)...(19): siRNA sense strand
guagggaccacaucaaaga

SEQ ID NO: 1205171 - RNA, 19 nt, Homo sapiens
  misc_RNA (1)...(19): siRNA sense strand
auaaugcacuggaacgaaa

SEQ ID NO: 1205172 - RNA, 19 nt, Homo sapiens
  misc_RNA (1)...(19): siRNA sense strand
acaaacgggcucaucauaa

SEQ ID NO: 1205173 - RNA, 19 nt, Homo sapiens
  misc_RNA (1)...(19): siRNA sense strand
agacagcuuucacaguuug

SEQ ID NO: 1205174 - RNA, 19 nt, Homo sapiens
  misc_RNA (1)...(19): siRNA sense strand
gcacuggaacgaaaacgua

SEQ ID NO: 1205175 - RNA, 19 nt, Homo sapiens
  misc_RNA (1)...(19): siRNA sense strand
aagacagcuuucacaguuu

SEQ ID NO: 1205176 - RNA, 19 nt, Homo sapiens
  misc_RNA (1)...(19): siRNA sense strand
aaacguagggaccacauca

SEQ ID NO: 1205177 - RNA, 19 nt, Homo sapiens
  misc_RNA (1)...(19): siRNA sense strand
cauaaugcacuggaacgaa

SEQ ID NO: 1205178 - RNA, 19 nt, Homo sapiens
  misc_RNA (1)...(19): siRNA sense strand
ugacaaacgggcucaucau

SEQ ID NO: 1205179 - RNA, 19 nt, Homo sapiens
  misc_RNA (1)...(19): siRNA sense strand
aaacgggcucaucauaaug

SEQ ID NO: 1205180 - RNA, 19 nt, Homo sapiens
  misc_RNA (1)...(19): siRNA sense strand
caaacgggcucaucauaau

SEQ ID NO: 1205181 - RNA, 19 nt, Homo sapiens
  misc_RNA (1)...(19): siRNA sense strand
gacaaacgggcucaucaua

SEQ ID NO: 1205182 - RNA, 19 nt, Homo sapiens
  misc_RNA (1)...(19): siRNA sense strand
guagggaccacaucaaaga

SEQ ID NO: 1205183 - RNA, 19 nt, Homo sapiens
  misc_RNA (1)...(19): siRNA sense strand
auaaugcacuggaacgaaa

SEQ ID NO: 1205184 - RNA, 19 nt, Homo sapiens
  misc_RNA (1)...(19): siRNA sense strand
acaaacgggcucaucauaa

SEQ ID NO: 1205185 - RNA, 19 nt, Homo sapiens
  misc_RNA (1)...(19): siRNA sense strand
agacagcuuucacaguuug

SEQ ID NO: 1205186 - RNA, 19 nt, Homo sapiens
  misc_RNA (1)...(19): siRNA sense strand
gcacuggaacgaaaacgua

SEQ ID NO: 1205187 - RNA, 19 nt, Homo sapiens
  misc_RNA (1)...(19): siRNA sense strand
aagacagcuuucacaguuu

SEQ ID NO: 1205188 - RNA, 19 nt, Homo sapiens
  misc_RNA (1)...(19): siRNA sense strand
aaacguagggaccacauca

SEQ ID NO: 1205189 - RNA, 19 nt, Homo sapiens
  misc_RNA (1)...(19): siRNA sense strand
cauaaugcacuggaacgaa

SEQ ID NO: 1205190 - RNA, 19 nt, Homo sapiens
  misc_RNA (1)...(19): siRNA sense strand
ugacaaacgggcucaucau

SEQ ID NO: 1205191 - RNA, 19 nt, Homo sapiens
  misc_RNA (1)...(19): siRNA sense strand
aaacgggcucaucauaaug

SEQ ID NO: 1205192 - RNA, 19 nt, Homo sapiens
  misc_RNA (1)...(19): siRNA sense strand
caaacgggcucaucauaau

SEQ ID NO: 1205193 - RNA, 19 nt, Homo sapiens
  misc_RNA (1)...(19): siRNA sense strand
gacaaacgggcucaucaua

SEQ ID NO: 1205194 - RNA, 19 nt, Homo sapiens
  misc_RNA (1)...(19): siRNA sense strand
guagggaccacaucaaaga

SEQ ID NO: 1205195 - RNA, 19 nt, Homo sapiens
  misc_RNA (1)...(19): siRNA sense strand
auaaugcacuggaacgaaa

SEQ ID NO: 1205196 - RNA, 19 nt, Homo sapiens
  misc_RNA (1)...(19): siRNA sense strand
acaaacgggcucaucauaa

SEQ ID NO: 1205197 - RNA, 19 nt, Homo sapiens
  misc_RNA (1)...(19): siRNA sense strand
agacagcuuucacaguuug

SEQ ID NO: 1205198 - RNA, 19 nt, Homo sapiens
  misc_RNA (1)...(19): siRNA sense strand
gcacuggaacgaaaacgua

SEQ ID NO: 1205199 - RNA, 19 nt, Homo sapiens
  misc_RNA (1)...(19): siRNA sense strand
aagacagcuuucacaguuu

SEQ ID NO: 1205200 - RNA, 19 nt, Homo sapiens
  misc_RNA (1)...(19): siRNA sense strand
aaacguagggaccacauca

SEQ ID NO: 1205201 - RNA, 19 nt, Homo sapiens
  misc_RNA (1)...(19): siRNA sense strand
cauaaugcacuggaacgaa

SEQ ID NO: 1205202 - RNA, 19 nt, Homo sapiens
  misc_RNA (1)...(19): siRNA sense strand
ugacaaacgggcucaucau

SEQ ID NO: 1205203 - RNA, 19 nt, Homo sapiens
  misc_RNA (1)...(19): siRNA sense strand
aaacgggcucaucauaaug

SEQ ID NO: 1205204 - RNA, 19 nt, Homo sapiens
  misc_RNA (1)...(19): siRNA sense strand
caaacgggcucaucauaau

SEQ ID NO: 1205205 - RNA, 19 nt, Homo sapiens
  misc_RNA (1)...(19): siRNA sense strand
gacaaacgggcucaucaua

SEQ ID NO: 1205206 - RNA, 19 nt, Homo sapiens
  misc_RNA (1)...(19): siRNA sense strand
guagggaccacaucaaaga

SEQ ID NO: 1205207 - RNA, 19 nt, Homo sapiens
  misc_RNA (1)...(19): siRNA sense strand
auaaugcacuggaacgaaa

SEQ ID NO: 1205208 - RNA, 19 nt, Homo sapiens
  misc_RNA (1)...(19): siRNA sense strand
acaaacgggcucaucauaa

SEQ ID NO: 1205209 - RNA, 19 nt, Homo sapiens
  misc_RNA (1)...(19): siRNA sense strand
agacagcuuucacaguuug

SEQ ID NO: 1205210 - RNA, 19 nt, Homo sapiens
  misc_RNA (1)...(19): siRNA sense strand
gcacuggaacgaaaacgua

SEQ ID NO: 1205211 - RNA, 19 nt, Homo sapiens
  misc_RNA (1)...(19): siRNA sense strand
aagacagcuuucacaguuu

SEQ ID NO: 1205212 - RNA, 19 nt, Homo sapiens
  misc_RNA (1)...(19): siRNA sense strand
aaacguagggaccacauca

SEQ ID NO: 1205213 - RNA, 19 nt, Homo sapiens
  misc_RNA (1)...(19): siRNA sense strand
cauaaugcacuggaacgaa

SEQ ID NO: 1205214 - RNA, 19 nt, Homo sapiens
  misc_RNA (1)...(19): siRNA sense strand
ugacaaacgggcucaucau

SEQ ID NO: 1205215 - RNA, 19 nt, Homo sapiens
  misc_RNA (1)...(19): siRNA sense strand
aaacgggcucaucauaaug

SEQ ID NO: 1205216 - RNA, 19 nt, Homo sapiens
  misc_RNA (1)...(19): siRNA sense strand
gcacguggacucccuuuaa

SEQ ID NO: 1205217 - RNA, 19 nt, Homo sapiens
  misc_RNA (1)...(19): siRNA sense strand
agacaggaguggagugaua

SEQ ID NO: 1205218 - RNA, 19 nt, Homo sapiens
  misc_RNA (1)...(19): siRNA sense strand
ggaguggagugauaucaga

SEQ ID NO: 1205219 - RNA, 19 nt, Homo sapiens
  misc_RNA (1)...(19): siRNA sense strand
cugcagagguugacggaua

SEQ ID NO: 1205220 - RNA, 19 nt, Homo sapiens
  misc_RNA (1)...(19): siRNA sense strand
ggucuucaguaucguauga

SEQ ID NO: 1205221 - RNA, 19 nt, Homo sapiens
  misc_RNA (1)...(19): siRNA sense strand
ggauucaggugucguacga

SEQ ID NO: 1205222 - RNA, 19 nt, Homo sapiens
  misc_RNA (1)...(19): siRNA sense strand
ucacggguguguggaagua

SEQ ID NO: 1205223 - RNA, 19 nt, Homo sapiens
  misc_RNA (1)...(19): siRNA sense strand
gaucaggacggcuggauuc

SEQ ID NO: 1205224 - RNA, 19 nt, Homo sapiens
  misc_RNA (1)...(19): siRNA sense strand
cauccucauucgaaaguuu

SEQ ID NO: 1205225 - RNA, 19 nt, Homo sapiens
  misc_RNA (1)...(19): siRNA sense strand
gagguugacggauauauuc

SEQ ID NO: 1205226 - RNA, 19 nt, Homo sapiens
  misc_RNA (1)...(19): siRNA sense strand
ggacaacuccgggaugauc

SEQ ID NO: 1205227 - RNA, 19 nt, Homo sapiens
  misc_RNA (1)...(19): siRNA sense strand
acggauauauucagacguu

SEQ ID NO: 1205228 - RNA, 19 nt, Homo sapiens
  misc_RNA (1)...(19): siRNA sense strand
acuccgggaugaucgauaa

SEQ ID NO: 1205229 - RNA, 19 nt, Homo sapiens
  misc_RNA (1)...(19): siRNA sense strand
guugacggauauauucaga

SEQ ID NO: 1205230 - RNA, 19 nt, Homo sapiens
  misc_RNA (1)...(19): siRNA sense strand
ucgaucauauccauguuug

SEQ ID NO: 1205231 - RNA, 19 nt, Homo sapiens
  misc_RNA (1)...(19): siRNA sense strand
uccagagggucgauaaaga

SEQ ID NO: 1205232 - RNA, 19 nt, Homo sapiens
  misc_RNA (1)...(19): siRNA sense strand
ucaggucgaucauauccau

SEQ ID NO: 1205233 - RNA, 19 nt, Homo sapiens
  misc_RNA (1)...(19): siRNA sense strand
gcaucguccugcagagguu

SEQ ID NO: 1205234 - RNA, 19 nt, Homo sapiens
  misc_RNA (1)...(19): siRNA sense strand
cacguggacucccuuuaau

SEQ ID NO: 1205235 - RNA, 19 nt, Homo sapiens
  misc_RNA (1)...(19): siRNA sense strand
ccgggaugaucgauaagaa

SEQ ID NO: 1205236 - RNA, 19 nt, Homo sapiens
  misc_RNA (1)...(19): siRNA sense strand
gauaucagacaccgagcuu

SEQ ID NO: 1205237 - RNA, 19 nt, Homo sapiens
  misc_RNA (1)...(19): siRNA sense strand
cgggacaacuccgggauga

SEQ ID NO: 1205238 - RNA, 19 nt, Homo sapiens
  misc_RNA (1)...(19): siRNA sense strand
ggucgaucauauccauguu

SEQ ID NO: 1205239 - RNA, 19 nt, Homo sapiens
  misc_RNA (1)...(19): siRNA sense strand
acugucaggucgaucauau

SEQ ID NO: 1205240 - RNA, 19 nt, Homo sapiens
  misc_RNA (1)...(19): siRNA sense strand
uaucagacaccgagcuuca

SEQ ID NO: 1205241 - RNA, 19 nt, Homo sapiens
  misc_RNA (1)...(19): siRNA sense strand
gaucauauccauguuugac

SEQ ID NO: 1205242 - RNA, 19 nt, Homo sapiens
  misc_RNA (1)...(19): siRNA sense strand
cacgacauccucauucgaa

SEQ ID NO: 1205243 - RNA, 19 nt, Homo sapiens
  misc_RNA (1)...(19): siRNA sense strand
ggacuggcagaacgucuuc

SEQ ID NO: 1205244 - RNA, 19 nt, Homo sapiens
  misc_RNA (1)...(19): siRNA sense strand
aagcaggcccucucagguu

SEQ ID NO: 1205245 - RNA, 19 nt, Homo sapiens
  misc_RNA (1)...(19): siRNA sense strand
ggaucaggacggcuggauu

SEQ ID NO: 1205246 - RNA, 19 nt, Homo sapiens
  misc_RNA (1)...(19): siRNA sense strand
cggauauauucagacguua

SEQ ID NO: 1205247 - RNA, 19 nt, Homo sapiens
  misc_RNA (1)...(19): siRNA sense strand
gcagagguugacggauaua

SEQ ID NO: 1205248 - RNA, 19 nt, Homo sapiens
  misc_RNA (1)...(19): siRNA sense strand
agcaggcccucucagguuu

SEQ ID NO: 1205249 - RNA, 19 nt, Homo sapiens
  misc_RNA (1)...(19): siRNA sense strand
aaagacaggaguggaguga

SEQ ID NO: 1205250 - RNA, 19 nt, Homo sapiens
  misc_RNA (1)...(19): siRNA sense strand
gcacguacgaccgggacaa

SEQ ID NO: 1205251 - RNA, 19 nt, Homo sapiens
  misc_RNA (1)...(19): siRNA sense strand
uguccauggucuucaguau

SEQ ID NO: 1205252 - RNA, 19 nt, Homo sapiens
  misc_RNA (1)...(19): siRNA sense strand
gcuggauucaggugucgua

SEQ ID NO: 1205253 - RNA, 19 nt, Homo sapiens
  misc_RNA (1)...(19): siRNA sense strand
agagguugacggauauauu

SEQ ID NO: 1205254 - RNA, 19 nt, Homo sapiens
  misc_RNA (1)...(19): siRNA sense strand
ugcagagguugacggauau

SEQ ID NO: 1205255 - RNA, 19 nt, Homo sapiens
  misc_RNA (1)...(19): siRNA sense strand
gacauccucauucgaaagu

SEQ ID NO: 1205256 - RNA, 19 nt, Homo sapiens
  misc_RNA (1)...(19): siRNA sense strand
gacaggaguggagugauau

SEQ ID NO: 1205257 - RNA, 19 nt, Homo sapiens
  misc_RNA (1)...(19): siRNA sense strand
ccggcucucugaccaguuc

SEQ ID NO: 1205258 - RNA, 19 nt, Homo sapiens
  misc_RNA (1)...(19): siRNA sense strand
ggauauauucagacguuac

SEQ ID NO: 1205259 - RNA, 19 nt, Homo sapiens
  misc_RNA (1)...(19): siRNA sense strand
gacguuacgacacggauca

SEQ ID NO: 1205260 - RNA, 19 nt, Homo sapiens
  misc_RNA (1)...(19): siRNA sense strand
uccauggucuucaguaucg

SEQ ID NO: 1205261 - RNA, 19 nt, Homo sapiens
  misc_RNA (1)...(19): siRNA sense strand
ccagugaggucagcgauua

SEQ ID NO: 1205262 - RNA, 19 nt, Homo sapiens
  misc_RNA (1)...(19): siRNA sense strand
gcauuagccucauccuuga

SEQ ID NO: 1205263 - RNA, 19 nt, Homo sapiens
  misc_RNA (1)...(19): siRNA sense strand
gaacaggaaacacauugaa

SEQ ID NO: 1205264 - RNA, 19 nt, Homo sapiens
  misc_RNA (1)...(19): siRNA sense strand
ugacaaggauaaaggacaa

SEQ ID NO: 1205265 - RNA, 19 nt, Homo sapiens
  misc_RNA (1)...(19): siRNA sense strand
caggaaacacauugaauuu

SEQ ID NO: 1205266 - RNA, 19 nt, Homo sapiens
  misc_RNA (1)...(19): siRNA sense strand
gaaaggaaguccgauucuc

SEQ ID NO: 1205267 - RNA, 19 nt, Homo sapiens
  misc_RNA (1)...(19): siRNA sense strand
gaagaaggagaaacugaug

SEQ ID NO: 1205268 - RNA, 19 nt, Homo sapiens
  misc_RNA (1)...(19): siRNA sense strand
ggagaaaggaaguccgauu

SEQ ID NO: 1205269 - RNA, 19 nt, Homo sapiens
  misc_RNA (1)...(19): siRNA sense strand
gagaaaggaaguccgauuc

SEQ ID NO: 1205270 - RNA, 19 nt, Homo sapiens
  misc_RNA (1)...(19): siRNA sense strand
gagaacaggaaacacauug

SEQ ID NO: 1205271 - RNA, 19 nt, Homo sapiens
  misc_RNA (1)...(19): siRNA sense strand
gauaaaggacaaagucauc

SEQ ID NO: 1205272 - RNA, 19 nt, Homo sapiens
  misc_RNA (1)...(19): siRNA sense strand
acaggaaacacauugaauu

SEQ ID NO: 1205273 - RNA, 19 nt, Homo sapiens
  misc_RNA (1)...(19): siRNA sense strand
gaagcuggcugcccaaaag

SEQ ID NO: 1205274 - RNA, 19 nt, Homo sapiens
  misc_RNA (1)...(19): siRNA sense strand
ggugacagauaaauuugag

SEQ ID NO: 1205275 - RNA, 19 nt, Homo sapiens
  misc_RNA (1)...(19): siRNA sense strand
gcaccuccugcaauuguaa

SEQ ID NO: 1205276 - RNA, 19 nt, Homo sapiens
  misc_RNA (1)...(19): siRNA sense strand
cagauaaauuugagaacag

SEQ ID NO: 1205277 - RNA, 19 nt, Homo sapiens
  misc_RNA (1)...(19): siRNA sense strand
ggauaaaggacaaagucau

SEQ ID NO: 1205278 - RNA, 19 nt, Homo sapiens
  misc_RNA (1)...(19): siRNA sense strand
agaaggagaaacugaugaa

SEQ ID NO: 1205279 - RNA, 19 nt, Homo sapiens
  misc_RNA (1)...(19): siRNA sense strand
aggagaaacugaugaagcu

SEQ ID NO: 1205280 - RNA, 19 nt, Homo sapiens
  misc_RNA (1)...(19): siRNA sense strand
ugaagaaggagaaacugau

SEQ ID NO: 1205281 - RNA, 19 nt, Homo sapiens
  misc_RNA (1)...(19): siRNA sense strand
gcucagccucugcggagaa

SEQ ID NO: 1205282 - RNA, 19 nt, Homo sapiens
  misc_RNA (1)...(19): siRNA sense strand
ucucuacugugacaaggau

SEQ ID NO: 1205283 - RNA, 19 nt, Homo sapiens
  misc_RNA (1)...(19): siRNA sense strand
ugagaacaggaaacacauu

SEQ ID NO: 1205284 - RNA, 19 nt, Homo sapiens
  misc_RNA (1)...(19): siRNA sense strand
ucaaccaguuugcaaagcu

SEQ ID NO: 1205285 - RNA, 19 nt, Homo sapiens
  misc_RNA (1)...(19): siRNA sense strand
gaaggagaaacugaugaag

SEQ ID NO: 1205286 - RNA, 19 nt, Homo sapiens
  misc_RNA (1)...(19): siRNA sense strand
ggaguuuugucucuacugu

SEQ ID NO: 1205287 - RNA, 19 nt, Homo sapiens
  misc_RNA (1)...(19): siRNA sense strand
aaagucauccaucccuuca

SEQ ID NO: 1205288 - RNA, 19 nt, Homo sapiens
  misc_RNA (1)...(19): siRNA sense strand
gggugacagauaaauuuga

SEQ ID NO: 1205289 - RNA, 19 nt, Homo sapiens
  misc_RNA (1)...(19): siRNA sense strand
ccagugaggucagcgauua

SEQ ID NO: 1205290 - RNA, 19 nt, Homo sapiens
  misc_RNA (1)...(19): siRNA sense strand
gcauuagccucauccuuga

SEQ ID NO: 1205291 - RNA, 19 nt, Homo sapiens
  misc_RNA (1)...(19): siRNA sense strand
gaacaggaaacacauugaa

SEQ ID NO: 1205292 - RNA, 19 nt, Homo sapiens
  misc_RNA (1)...(19): siRNA sense strand
ugacaaggauaaaggacaa

SEQ ID NO: 1205293 - RNA, 19 nt, Homo sapiens
  misc_RNA (1)...(19): siRNA sense strand
caggaaacacauugaauuu

SEQ ID NO: 1205294 - RNA, 19 nt, Homo sapiens
  misc_RNA (1)...(19): siRNA sense strand
gaaaggaaguccgauucuc

SEQ ID NO: 1205295 - RNA, 19 nt, Homo sapiens
  misc_RNA (1)...(19): siRNA sense strand
gaagaaggagaaacugaug

SEQ ID NO: 1205296 - RNA, 19 nt, Homo sapiens
  misc_RNA (1)...(19): siRNA sense strand
ggagaaaggaaguccgauu

SEQ ID NO: 1205297 - RNA, 19 nt, Homo sapiens
  misc_RNA (1)...(19): siRNA sense strand
gagaaaggaaguccgauuc

SEQ ID NO: 1205298 - RNA, 19 nt, Homo sapiens
  misc_RNA (1)...(19): siRNA sense strand
gagaacaggaaacacauug

SEQ ID NO: 1205299 - RNA, 19 nt, Homo sapiens
  misc_RNA (1)...(19): siRNA sense strand
gauaaaggacaaagucauc

SEQ ID NO: 1205300 - RNA, 19 nt, Homo sapiens
  misc_RNA (1)...(19): siRNA sense strand
acaggaaacacauugaauu

SEQ ID NO: 1205301 - RNA, 19 nt, Homo sapiens
  misc_RNA (1)...(19): siRNA sense strand
gaagcuggcugcccaaaag

SEQ ID NO: 1205302 - RNA, 19 nt, Homo sapiens
  misc_RNA (1)...(19): siRNA sense strand
ggugacagauaaauuugag

SEQ ID NO: 1205303 - RNA, 19 nt, Homo sapiens
  misc_RNA (1)...(19): siRNA sense strand
gcaccuccugcaauuguaa

SEQ ID NO: 1205304 - RNA, 19 nt, Homo sapiens
  misc_RNA (1)...(19): siRNA sense strand
cagauaaauuugagaacag

SEQ ID NO: 1205305 - RNA, 19 nt, Homo sapiens
  misc_RNA (1)...(19): siRNA sense strand
ggauaaaggacaaagucau

SEQ ID NO: 1205306 - RNA, 19 nt, Homo sapiens
  misc_RNA (1)...(19): siRNA sense strand
agaaggagaaacugaugaa

SEQ ID NO: 1205307 - RNA, 19 nt, Homo sapiens
  misc_RNA (1)...(19): siRNA sense strand
aggagaaacugaugaagcu

SEQ ID NO: 1205308 - RNA, 19 nt, Homo sapiens
  misc_RNA (1)...(19): siRNA sense strand
ugaagaaggagaaacugau

SEQ ID NO: 1205309 - RNA, 19 nt, Homo sapiens
  misc_RNA (1)...(19): siRNA sense strand
gcucagccucugcggagaa

SEQ ID NO: 1205310 - RNA, 19 nt, Homo sapiens
  misc_RNA (1)...(19): siRNA sense strand
ucucuacugugacaaggau

SEQ ID NO: 1205311 - RNA, 19 nt, Homo sapiens
  misc_RNA (1)...(19): siRNA sense strand
ugagaacaggaaacacauu

SEQ ID NO: 1205312 - RNA, 19 nt, Homo sapiens
  misc_RNA (1)...(19): siRNA sense strand
ucaaccaguuugcaaagcu

SEQ ID NO: 1205313 - RNA, 19 nt, Homo sapiens
  misc_RNA (1)...(19): siRNA sense strand
gaaggagaaacugaugaag

SEQ ID NO: 1205314 - RNA, 19 nt, Homo sapiens
  misc_RNA (1)...(19): siRNA sense strand
ggaguuuugucucuacugu

SEQ ID NO: 1205315 - RNA, 19 nt, Homo sapiens
  misc_RNA (1)...(19): siRNA sense strand
aaagucauccaucccuuca

SEQ ID NO: 1205316 - RNA, 19 nt, Homo sapiens
  misc_RNA (1)...(19): siRNA sense strand
gggugacagauaaauuuga

SEQ ID NO: 1205317 - RNA, 19 nt, Homo sapiens
  misc_RNA (1)...(19): siRNA sense strand
ccagugaggucagcgauua

SEQ ID NO: 1205318 - RNA, 19 nt, Homo sapiens
  misc_RNA (1)...(19): siRNA sense strand
gcauuagccucauccuuga

SEQ ID NO: 1205319 - RNA, 19 nt, Homo sapiens
  misc_RNA (1)...(19): siRNA sense strand
gaacaggaaacacauugaa

SEQ ID NO: 1205320 - RNA, 19 nt, Homo sapiens
  misc_RNA (1)...(19): siRNA sense strand
ugacaaggauaaaggacaa

SEQ ID NO: 1205321 - RNA, 19 nt, Homo sapiens
  misc_RNA (1)...(19): siRNA sense strand
caggaaacacauugaauuu

SEQ ID NO: 1205322 - RNA, 19 nt, Homo sapiens
  misc_RNA (1)...(19): siRNA sense strand
gaaaggaaguccgauucuc

SEQ ID NO: 1205323 - RNA, 19 nt, Homo sapiens
  misc_RNA (1)...(19): siRNA sense strand
gaagaaggagaaacugaug

SEQ ID NO: 1205324 - RNA, 19 nt, Homo sapiens
  misc_RNA (1)...(19): siRNA sense strand
ggagaaaggaaguccgauu

SEQ ID NO: 1205325 - RNA, 19 nt, Homo sapiens
  misc_RNA (1)...(19): siRNA sense strand
gagaaaggaaguccgauuc

SEQ ID NO: 1205326 - RNA, 19 nt, Homo sapiens
  misc_RNA (1)...(19): siRNA sense strand
gagaacaggaaacacauug

SEQ ID NO: 1205327 - RNA, 19 nt, Homo sapiens
  misc_RNA (1)...(19): siRNA sense strand
gauaaaggacaaagucauc

SEQ ID NO: 1205328 - RNA, 19 nt, Homo sapiens
  misc_RNA (1)...(19): siRNA sense strand
acaggaaacacauugaauu

SEQ ID NO: 1205329 - RNA, 19 nt, Homo sapiens
  misc_RNA (1)...(19): siRNA sense strand
gaagcuggcugcccaaaag

SEQ ID NO: 1205330 - RNA, 19 nt, Homo sapiens
  misc_RNA (1)...(19): siRNA sense strand
ggugacagauaaauuugag

SEQ ID NO: 1205331 - RNA, 19 nt, Homo sapiens
  misc_RNA (1)...(19): siRNA sense strand
gcaccuccugcaauuguaa

SEQ ID NO: 1205332 - RNA, 19 nt, Homo sapiens
  misc_RNA (1)...(19): siRNA sense strand
cagauaaauuugagaacag

SEQ ID NO: 1205333 - RNA, 19 nt, Homo sapiens
  misc_RNA (1)...(19): siRNA sense strand
ggauaaaggacaaagucau

SEQ ID NO: 1205334 - RNA, 19 nt, Homo sapiens
  misc_RNA (1)...(19): siRNA sense strand
agaaggagaaacugaugaa

SEQ ID NO: 1205335 - RNA, 19 nt, Homo sapiens
  misc_RNA (1)...(19): siRNA sense strand
aggagaaacugaugaagcu

SEQ ID NO: 1205336 - RNA, 19 nt, Homo sapiens
  misc_RNA (1)...(19): siRNA sense strand
ugaagaaggagaaacugau

SEQ ID NO: 1205337 - RNA, 19 nt, Homo sapiens
  misc_RNA (1)...(19): siRNA sense strand
gcucagccucugcggagaa

SEQ ID NO: 1205338 - RNA, 19 nt, Homo sapiens
  misc_RNA (1)...(19): siRNA sense strand
ucucuacugugacaaggau

SEQ ID NO: 1205339 - RNA, 19 nt, Homo sapiens
  misc_RNA (1)...(19): siRNA sense strand
ugagaacaggaaacacauu

SEQ ID NO: 1205340 - RNA, 19 nt, Homo sapiens
  misc_RNA (1)...(19): siRNA sense strand
ucaaccaguuugcaaagcu

SEQ ID NO: 1205341 - RNA, 19 nt, Homo sapiens
  misc_RNA (1)...(19): siRNA sense strand
gaaggagaaacugaugaag

SEQ ID NO: 1205342 - RNA, 19 nt, Homo sapiens
  misc_RNA (1)...(19): siRNA sense strand
ggaguuuugucucuacugu

SEQ ID NO: 1205343 - RNA, 19 nt, Homo sapiens
  misc_RNA (1)...(19): siRNA sense strand
aaagucauccaucccuuca

SEQ ID NO: 1205344 - RNA, 19 nt, Homo sapiens
  misc_RNA (1)...(19): siRNA sense strand
gggugacagauaaauuuga

SEQ ID NO: 1205345 - RNA, 19 nt, Homo sapiens
  misc_RNA (1)...(19): siRNA sense strand
ccagugaggucagcgauua

SEQ ID NO: 1205346 - RNA, 19 nt, Homo sapiens
  misc_RNA (1)...(19): siRNA sense strand
gcauuagccucauccuuga

SEQ ID NO: 1205347 - RNA, 19 nt, Homo sapiens
  misc_RNA (1)...(19): siRNA sense strand
gaacaggaaacacauugaa

SEQ ID NO: 1205348 - RNA, 19 nt, Homo sapiens
  misc_RNA (1)...(19): siRNA sense strand
ugacaaggauaaaggacaa

SEQ ID NO: 1205349 - RNA, 19 nt, Homo sapiens
  misc_RNA (1)...(19): siRNA sense strand
caggaaacacauugaauuu

SEQ ID NO: 1205350 - RNA, 19 nt, Homo sapiens
  misc_RNA (1)...(19): siRNA sense strand
gaaaggaaguccgauucuc

SEQ ID NO: 1205351 - RNA, 19 nt, Homo sapiens
  misc_RNA (1)...(19): siRNA sense strand
gaagaaggagaaacugaug

SEQ ID NO: 1205352 - RNA, 19 nt, Homo sapiens
  misc_RNA (1)...(19): siRNA sense strand
ggagaaaggaaguccgauu

SEQ ID NO: 1205353 - RNA, 19 nt, Homo sapiens
  misc_RNA (1)...(19): siRNA sense strand
gagaaaggaaguccgauuc

SEQ ID NO: 1205354 - RNA, 19 nt, Homo sapiens
  misc_RNA (1)...(19): siRNA sense strand
gagaacaggaaacacauug

SEQ ID NO: 1205355 - RNA, 19 nt, Homo sapiens
  misc_RNA (1)...(19): siRNA sense strand
gauaaaggacaaagucauc

SEQ ID NO: 1205356 - RNA, 19 nt, Homo sapiens
  misc_RNA (1)...(19): siRNA sense strand
acaggaaacacauugaauu

SEQ ID NO: 1205357 - RNA, 19 nt, Homo sapiens
  misc_RNA (1)...(19): siRNA sense strand
gaagcuggcugcccaaaag

SEQ ID NO: 1205358 - RNA, 19 nt, Homo sapiens
  misc_RNA (1)...(19): siRNA sense strand
ggugacagauaaauuugag

SEQ ID NO: 1205359 - RNA, 19 nt, Homo sapiens
  misc_RNA (1)...(19): siRNA sense strand
gcaccuccugcaauuguaa

SEQ ID NO: 1205360 - RNA, 19 nt, Homo sapiens
  misc_RNA (1)...(19): siRNA sense strand
cagauaaauuugagaacag

SEQ ID NO: 1205361 - RNA, 19 nt, Homo sapiens
  misc_RNA (1)...(19): siRNA sense strand
ggauaaaggacaaagucau

SEQ ID NO: 1205362 - RNA, 19 nt, Homo sapiens
  misc_RNA (1)...(19): siRNA sense strand
agaaggagaaacugaugaa

SEQ ID NO: 1205363 - RNA, 19 nt, Homo sapiens
  misc_RNA (1)...(19): siRNA sense strand
aggagaaacugaugaagcu

SEQ ID NO: 1205364 - RNA, 19 nt, Homo sapiens
  misc_RNA (1)...(19): siRNA sense strand
ugaagaaggagaaacugau

SEQ ID NO: 1205365 - RNA, 19 nt, Homo sapiens
  misc_RNA (1)...(19): siRNA sense strand
gcucagccucugcggagaa

SEQ ID NO: 1205366 - RNA, 19 nt, Homo sapiens
  misc_RNA (1)...(19): siRNA sense strand
ucucuacugugacaaggau

SEQ ID NO: 1205367 - RNA, 19 nt, Homo sapiens
  misc_RNA (1)...(19): siRNA sense strand
ugagaacaggaaacacauu

SEQ ID NO: 1205368 - RNA, 19 nt, Homo sapiens
  misc_RNA (1)...(19): siRNA sense strand
ucaaccaguuugcaaagcu

SEQ ID NO: 1205369 - RNA, 19 nt, Homo sapiens
  misc_RNA (1)...(19): siRNA sense strand
gaaggagaaacugaugaag

SEQ ID NO: 1205370 - RNA, 19 nt, Homo sapiens
  misc_RNA (1)...(19): siRNA sense strand
ggaguuuugucucuacugu

SEQ ID NO: 1205371 - RNA, 19 nt, Homo sapiens
  misc_RNA (1)...(19): siRNA sense strand
aaagucauccaucccuuca

SEQ ID NO: 1205372 - RNA, 19 nt, Homo sapiens
  misc_RNA (1)...(19): siRNA sense strand
gggugacagauaaauuuga

SEQ ID NO: 1205373 - RNA, 19 nt, Homo sapiens
  misc_RNA (1)...(19): siRNA sense strand
ccagugaggucagcgauua

SEQ ID NO: 1205374 - RNA, 19 nt, Homo sapiens
  misc_RNA (1)...(19): siRNA sense strand
gcauuagccucauccuuga

SEQ ID NO: 1205375 - RNA, 19 nt, Homo sapiens
  misc_RNA (1)...(19): siRNA sense strand
gaacaggaaacacauugaa

SEQ ID NO: 1205376 - RNA, 19 nt, Homo sapiens
  misc_RNA (1)...(19): siRNA sense strand
ugacaaggauaaaggacaa

SEQ ID NO: 1205377 - RNA, 19 nt, Homo sapiens
  misc_RNA (1)...(19): siRNA sense strand
caggaaacacauugaauuu

SEQ ID NO: 1205378 - RNA, 19 nt, Homo sapiens
  misc_RNA (1)...(19): siRNA sense strand
gaaaggaaguccgauucuc

SEQ ID NO: 1205379 - RNA, 19 nt, Homo sapiens
  misc_RNA (1)...(19): siRNA sense strand
gaagaaggagaaacugaug

SEQ ID NO: 1205380 - RNA, 19 nt, Homo sapiens
  misc_RNA (1)...(19): siRNA sense strand
ggagaaaggaaguccgauu

SEQ ID NO: 1205381 - RNA, 19 nt, Homo sapiens
  misc_RNA (1)...(19): siRNA sense strand
gagaaaggaaguccgauuc

SEQ ID NO: 1205382 - RNA, 19 nt, Homo sapiens
  misc_RNA (1)...(19): siRNA sense strand
gagaacaggaaacacauug

SEQ ID NO: 1205383 - RNA, 19 nt, Homo sapiens
  misc_RNA (1)...(19): siRNA sense strand
gauaaaggacaaagucauc

SEQ ID NO: 1205384 - RNA, 19 nt, Homo sapiens
  misc_RNA (1)...(19): siRNA sense strand
acaggaaacacauugaauu

SEQ ID NO: 1205385 - RNA, 19 nt, Homo sapiens
  misc_RNA (1)...(19): siRNA sense strand
gaagcuggcugcccaaaag

SEQ ID NO: 1205386 - RNA, 19 nt, Homo sapiens
  misc_RNA (1)...(19): siRNA sense strand
ggugacagauaaauuugag

SEQ ID NO: 1205387 - RNA, 19 nt, Homo sapiens
  misc_RNA (1)...(19): siRNA sense strand
gcaccuccugcaauuguaa

SEQ ID NO: 1205388 - RNA, 19 nt, Homo sapiens
  misc_RNA (1)...(19): siRNA sense strand
cagauaaauuugagaacag

SEQ ID NO: 1205389 - RNA, 19 nt, Homo sapiens
  misc_RNA (1)...(19): siRNA sense strand
ggauaaaggacaaagucau

SEQ ID NO: 1205390 - RNA, 19 nt, Homo sapiens
  misc_RNA (1)...(19): siRNA sense strand
agaaggagaaacugaugaa

SEQ ID NO: 1205391 - RNA, 19 nt, Homo sapiens
  misc_RNA (1)...(19): siRNA sense strand
aggagaaacugaugaagcu

SEQ ID NO: 1205392 - RNA, 19 nt, Homo sapiens
  misc_RNA (1)...(19): siRNA sense strand
ugaagaaggagaaacugau

SEQ ID NO: 1205393 - RNA, 19 nt, Homo sapiens
  misc_RNA (1)...(19): siRNA sense strand
gcucagccucugcggagaa

SEQ ID NO: 1205394 - RNA, 19 nt, Homo sapiens
  misc_RNA (1)...(19): siRNA sense strand
ucucuacugugacaaggau

SEQ ID NO: 1205395 - RNA, 19 nt, Homo sapiens
  misc_RNA (1)...(19): siRNA sense strand
ugagaacaggaaacacauu

SEQ ID NO: 1205396 - RNA, 19 nt, Homo sapiens
  misc_RNA (1)...(19): siRNA sense strand
ucaaccaguuugcaaagcu

SEQ ID NO: 1205397 - RNA, 19 nt, Homo sapiens
  misc_RNA (1)...(19): siRNA sense strand
gaaggagaaacugaugaag

SEQ ID NO: 1205398 - RNA, 19 nt, Homo sapiens
  misc_RNA (1)...(19): siRNA sense strand
ggaguuuugucucuacugu

SEQ ID NO: 1205399 - RNA, 19 nt, Homo sapiens
  misc_RNA (1)...(19): siRNA sense strand
aaagucauccaucccuuca

SEQ ID NO: 1205400 - RNA, 19 nt, Homo sapiens
  misc_RNA (1)...(19): siRNA sense strand
gggugacagauaaauuuga

SEQ ID NO: 1205401 - RNA, 19 nt, Homo sapiens
  misc_RNA (1)...(19): siRNA sense strand
ccagugaggucagcgauua

SEQ ID NO: 1205402 - RNA, 19 nt, Homo sapiens
  misc_RNA (1)...(19): siRNA sense strand
gcauuagccucauccuuga

SEQ ID NO: 1205403 - RNA, 19 nt, Homo sapiens
  misc_RNA (1)...(19): siRNA sense strand
gaacaggaaacacauugaa

SEQ ID NO: 1205404 - RNA, 19 nt, Homo sapiens
  misc_RNA (1)...(19): siRNA sense strand
ugacaaggauaaaggacaa

SEQ ID NO: 1205405 - RNA, 19 nt, Homo sapiens
  misc_RNA (1)...(19): siRNA sense strand
caggaaacacauugaauuu

SEQ ID NO: 1205406 - RNA, 19 nt, Homo sapiens
  misc_RNA (1)...(19): siRNA sense strand
gaaaggaaguccgauucuc

SEQ ID NO: 1205407 - RNA, 19 nt, Homo sapiens
  misc_RNA (1)...(19): siRNA sense strand
gaagaaggagaaacugaug

SEQ ID NO: 1205408 - RNA, 19 nt, Homo sapiens
  misc_RNA (1)...(19): siRNA sense strand
ggagaaaggaaguccgauu

SEQ ID NO: 1205409 - RNA, 19 nt, Homo sapiens
  misc_RNA (1)...(19): siRNA sense strand
gagaaaggaaguccgauuc

SEQ ID NO: 1205410 - RNA, 19 nt, Homo sapiens
  misc_RNA (1)...(19): siRNA sense strand
gagaacaggaaacacauug

SEQ ID NO: 1205411 - RNA, 19 nt, Homo sapiens
  misc_RNA (1)...(19): siRNA sense strand
gauaaaggacaaagucauc

SEQ ID NO: 1205412 - RNA, 19 nt, Homo sapiens
  misc_RNA (1)...(19): siRNA sense strand
acaggaaacacauugaauu

SEQ ID NO: 1205413 - RNA, 19 nt, Homo sapiens
  misc_RNA (1)...(19): siRNA sense strand
gaagcuggcugcccaaaag

SEQ ID NO: 1205414 - RNA, 19 nt, Homo sapiens
  misc_RNA (1)...(19): siRNA sense strand
ggugacagauaaauuugag

SEQ ID NO: 1205415 - RNA, 19 nt, Homo sapiens
  misc_RNA (1)...(19): siRNA sense strand
gcaccuccugcaauuguaa

SEQ ID NO: 1205416 - RNA, 19 nt, Homo sapiens
  misc_RNA (1)...(19): siRNA sense strand
cagauaaauuugagaacag

SEQ ID NO: 1205417 - RNA, 19 nt, Homo sapiens
  misc_RNA (1)...(19): siRNA sense strand
ggauaaaggacaaagucau

SEQ ID NO: 1205418 - RNA, 19 nt, Homo sapiens
  misc_RNA (1)...(19): siRNA sense strand
agaaggagaaacugaugaa

SEQ ID NO: 1205419 - RNA, 19 nt, Homo sapiens
  misc_RNA (1)...(19): siRNA sense strand
aggagaaacugaugaagcu

SEQ ID NO: 1205420 - RNA, 19 nt, Homo sapiens
  misc_RNA (1)...(19): siRNA sense strand
ugaagaaggagaaacugau

SEQ ID NO: 1205421 - RNA, 19 nt, Homo sapiens
  misc_RNA (1)...(19): siRNA sense strand
gcucagccucugcggagaa

SEQ ID NO: 1205422 - RNA, 19 nt, Homo sapiens
  misc_RNA (1)...(19): siRNA sense strand
ucucuacugugacaaggau

SEQ ID NO: 1205423 - RNA, 19 nt, Homo sapiens
  misc_RNA (1)...(19): siRNA sense strand
ugagaacaggaaacacauu

SEQ ID NO: 1205424 - RNA, 19 nt, Homo sapiens
  misc_RNA (1)...(19): siRNA sense strand
ucaaccaguuugcaaagcu

SEQ ID NO: 1205425 - RNA, 19 nt, Homo sapiens
  misc_RNA (1)...(19): siRNA sense strand
gaaggagaaacugaugaag

SEQ ID NO: 1205426 - RNA, 19 nt, Homo sapiens
  misc_RNA (1)...(19): siRNA sense strand
ggaguuuugucucuacugu

SEQ ID NO: 1205427 - RNA, 19 nt, Homo sapiens
  misc_RNA (1)...(19): siRNA sense strand
aaagucauccaucccuuca

SEQ ID NO: 1205428 - RNA, 19 nt, Homo sapiens
  misc_RNA (1)...(19): siRNA sense strand
gggugacagauaaauuuga

SEQ ID NO: 1205429 - RNA, 19 nt, Homo sapiens
  misc_RNA (1)...(19): siRNA sense strand
ccagugaggucagcgauua

SEQ ID NO: 1205430 - RNA, 19 nt, Homo sapiens
  misc_RNA (1)...(19): siRNA sense strand
gcauuagccucauccuuga

SEQ ID NO: 1205431 - RNA, 19 nt, Homo sapiens
  misc_RNA (1)...(19): siRNA sense strand
gaacaggaaacacauugaa

SEQ ID NO: 1205432 - RNA, 19 nt, Homo sapiens
  misc_RNA (1)...(19): siRNA sense strand
ugacaaggauaaaggacaa

SEQ ID NO: 1205433 - RNA, 19 nt, Homo sapiens
  misc_RNA (1)...(19): siRNA sense strand
caggaaacacauugaauuu

SEQ ID NO: 1205434 - RNA, 19 nt, Homo sapiens
  misc_RNA (1)...(19): siRNA sense strand
gaaaggaaguccgauucuc

SEQ ID NO: 1205435 - RNA, 19 nt, Homo sapiens
  misc_RNA (1)...(19): siRNA sense strand
gaagaaggagaaacugaug

SEQ ID NO: 1205436 - RNA, 19 nt, Homo sapiens
  misc_RNA (1)...(19): siRNA sense strand
ggagaaaggaaguccgauu

SEQ ID NO: 1205437 - RNA, 19 nt, Homo sapiens
  misc_RNA (1)...(19): siRNA sense strand
gagaaaggaaguccgauuc

SEQ ID NO: 1205438 - RNA, 19 nt, Homo sapiens
  misc_RNA (1)...(19): siRNA sense strand
gagaacaggaaacacauug

SEQ ID NO: 1205439 - RNA, 19 nt, Homo sapiens
  misc_RNA (1)...(19): siRNA sense strand
gauaaaggacaaagucauc

SEQ ID NO: 1205440 - RNA, 19 nt, Homo sapiens
  misc_RNA (1)...(19): siRNA sense strand
acaggaaacacauugaauu

SEQ ID NO: 1205441 - RNA, 19 nt, Homo sapiens
  misc_RNA (1)...(19): siRNA sense strand
gaagcuggcugcccaaaag

SEQ ID NO: 1205442 - RNA, 19 nt, Homo sapiens
  misc_RNA (1)...(19): siRNA sense strand
ggugacagauaaauuugag

SEQ ID NO: 1205443 - RNA, 19 nt, Homo sapiens
  misc_RNA (1)...(19): siRNA sense strand
gcaccuccugcaauuguaa

SEQ ID NO: 1205444 - RNA, 19 nt, Homo sapiens
  misc_RNA (1)...(19): siRNA sense strand
cagauaaauuugagaacag

SEQ ID NO: 1205445 - RNA, 19 nt, Homo sapiens
  misc_RNA (1)...(19): siRNA sense strand
ggauaaaggacaaagucau

SEQ ID NO: 1205446 - RNA, 19 nt, Homo sapiens
  misc_RNA (1)...(19): siRNA sense strand
agaaggagaaacugaugaa

SEQ ID NO: 1205447 - RNA, 19 nt, Homo sapiens
  misc_RNA (1)...(19): siRNA sense strand
aggagaaacugaugaagcu

SEQ ID NO: 1205448 - RNA, 19 nt, Homo sapiens
  misc_RNA (1)...(19): siRNA sense strand
ugaagaaggagaaacugau

SEQ ID NO: 1205449 - RNA, 19 nt, Homo sapiens
  misc_RNA (1)...(19): siRNA sense strand
gcucagccucugcggagaa

SEQ ID NO: 1205450 - RNA, 19 nt, Homo sapiens
  misc_RNA (1)...(19): siRNA sense strand
ucucuacugugacaaggau

SEQ ID NO: 1205451 - RNA, 19 nt, Homo sapiens
  misc_RNA (1)...(19): siRNA sense strand
ugagaacaggaaacacauu

SEQ ID NO: 1205452 - RNA, 19 nt, Homo sapiens
  misc_RNA (1)...(19): siRNA sense strand
ucaaccaguuugcaaagcu

SEQ ID NO: 1205453 - RNA, 19 nt, Homo sapiens
  misc_RNA (1)...(19): siRNA sense strand
gaaggagaaacugaugaag

SEQ ID NO: 1205454 - RNA, 19 nt, Homo sapiens
  misc_RNA (1)...(19): siRNA sense strand
ggaguuuugucucuacugu

SEQ ID NO: 1205455 - RNA, 19 nt, Homo sapiens
  misc_RNA (1)...(19): siRNA sense strand
aaagucauccaucccuuca

SEQ ID NO: 1205456 - RNA, 19 nt, Homo sapiens
  misc_RNA (1)...(19): siRNA sense strand
gggugacagauaaauuuga

SEQ ID NO: 1205457 - RNA, 19 nt, Homo sapiens
  misc_RNA (1)...(19): siRNA sense strand
ccagugaggucagcgauua

SEQ ID NO: 1205458 - RNA, 19 nt, Homo sapiens
  misc_RNA (1)...(19): siRNA sense strand
gcauuagccucauccuuga

SEQ ID NO: 1205459 - RNA, 19 nt, Homo sapiens
  misc_RNA (1)...(19): siRNA sense strand
gaacaggaaacacauugaa

SEQ ID NO: 1205460 - RNA, 19 nt, Homo sapiens
  misc_RNA (1)...(19): siRNA sense strand
ugacaaggauaaaggacaa

SEQ ID NO: 1205461 - RNA, 19 nt, Homo sapiens
  misc_RNA (1)...(19): siRNA sense strand
caggaaacacauugaauuu

SEQ ID NO: 1205462 - RNA, 19 nt, Homo sapiens
  misc_RNA (1)...(19): siRNA sense strand
gaaaggaaguccgauucuc

SEQ ID NO: 1205463 - RNA, 19 nt, Homo sapiens
  misc_RNA (1)...(19): siRNA sense strand
gaagaaggagaaacugaug

SEQ ID NO: 1205464 - RNA, 19 nt, Homo sapiens
  misc_RNA (1)...(19): siRNA sense strand
ggagaaaggaaguccgauu

SEQ ID NO: 1205465 - RNA, 19 nt, Homo sapiens
  misc_RNA (1)...(19): siRNA sense strand
gagaaaggaaguccgauuc

SEQ ID NO: 1205466 - RNA, 19 nt, Homo sapiens
  misc_RNA (1)...(19): siRNA sense strand
gagaacaggaaacacauug

SEQ ID NO: 1205467 - RNA, 19 nt, Homo sapiens
  misc_RNA (1)...(19): siRNA sense strand
gauaaaggacaaagucauc

SEQ ID NO: 1205468 - RNA, 19 nt, Homo sapiens
  misc_RNA (1)...(19): siRNA sense strand
acaggaaacacauugaauu

SEQ ID NO: 1205469 - RNA, 19 nt, Homo sapiens
  misc_RNA (1)...(19): siRNA sense strand
gaagcuggcugcccaaaag

SEQ ID NO: 1205470 - RNA, 19 nt, Homo sapiens
  misc_RNA (1)...(19): siRNA sense strand
ggugacagauaaauuugag

SEQ ID NO: 1205471 - RNA, 19 nt, Homo sapiens
  misc_RNA (1)...(19): siRNA sense strand
gcaccuccugcaauuguaa

SEQ ID NO: 1205472 - RNA, 19 nt, Homo sapiens
  misc_RNA (1)...(19): siRNA sense strand
cagauaaauuugagaacag

SEQ ID NO: 1205473 - RNA, 19 nt, Homo sapiens
  misc_RNA (1)...(19): siRNA sense strand
ggauaaaggacaaagucau

SEQ ID NO: 1205474 - RNA, 19 nt, Homo sapiens
  misc_RNA (1)...(19): siRNA sense strand
agaaggagaaacugaugaa

SEQ ID NO: 1205475 - RNA, 19 nt, Homo sapiens
  misc_RNA (1)...(19): siRNA sense strand
aggagaaacugaugaagcu

SEQ ID NO: 1205476 - RNA, 19 nt, Homo sapiens
  misc_RNA (1)...(19): siRNA sense strand
ugaagaaggagaaacugau

SEQ ID NO: 1205477 - RNA, 19 nt, Homo sapiens
  misc_RNA (1)...(19): siRNA sense strand
gcucagccucugcggagaa

SEQ ID NO: 1205478 - RNA, 19 nt, Homo sapiens
  misc_RNA (1)...(19): siRNA sense strand
ucucuacugugacaaggau

SEQ ID NO: 1205479 - RNA, 19 nt, Homo sapiens
  misc_RNA (1)...(19): siRNA sense strand
ugagaacaggaaacacauu

SEQ ID NO: 1205480 - RNA, 19 nt, Homo sapiens
  misc_RNA (1)...(19): siRNA sense strand
ucaaccaguuugcaaagcu

SEQ ID NO: 1205481 - RNA, 19 nt, Homo sapiens
  misc_RNA (1)...(19): siRNA sense strand
gaaggagaaacugaugaag

SEQ ID NO: 1205482 - RNA, 19 nt, Homo sapiens
  misc_RNA (1)...(19): siRNA sense strand
ggaguuuugucucuacugu

SEQ ID NO: 1205483 - RNA, 19 nt, Homo sapiens
  misc_RNA (1)...(19): siRNA sense strand
aaagucauccaucccuuca

SEQ ID NO: 1205484 - RNA, 19 nt, Homo sapiens
  misc_RNA (1)...(19): siRNA sense strand
gggugacagauaaauuuga

SEQ ID NO: 1205485 - RNA, 19 nt, Homo sapiens
  misc_RNA (1)...(19): siRNA sense strand
ccagugaggucagcgauua

SEQ ID NO: 1205486 - RNA, 19 nt, Homo sapiens
  misc_RNA (1)...(19): siRNA sense strand
gcauuagccucauccuuga

SEQ ID NO: 1205487 - RNA, 19 nt, Homo sapiens
  misc_RNA (1)...(19): siRNA sense strand
gaacaggaaacacauugaa

SEQ ID NO: 1205488 - RNA, 19 nt, Homo sapiens
  misc_RNA (1)...(19): siRNA sense strand
ugacaaggauaaaggacaa

SEQ ID NO: 1205489 - RNA, 19 nt, Homo sapiens
  misc_RNA (1)...(19): siRNA sense strand
caggaaacacauugaauuu

SEQ ID NO: 1205490 - RNA, 19 nt, Homo sapiens
  misc_RNA (1)...(19): siRNA sense strand
gaaaggaaguccgauucuc

SEQ ID NO: 1205491 - RNA, 19 nt, Homo sapiens
  misc_RNA (1)...(19): siRNA sense strand
gaagaaggagaaacugaug

SEQ ID NO: 1205492 - RNA, 19 nt, Homo sapiens
  misc_RNA (1)...(19): siRNA sense strand
ggagaaaggaaguccgauu

SEQ ID NO: 1205493 - RNA, 19 nt, Homo sapiens
  misc_RNA (1)...(19): siRNA sense strand
gagaaaggaaguccgauuc

SEQ ID NO: 1205494 - RNA, 19 nt, Homo sapiens
  misc_RNA (1)...(19): siRNA sense strand
gagaacaggaaacacauug

SEQ ID NO: 1205495 - RNA, 19 nt, Homo sapiens
  misc_RNA (1)...(19): siRNA sense strand
gauaaaggacaaagucauc

SEQ ID NO: 1205496 - RNA, 19 nt, Homo sapiens
  misc_RNA (1)...(19): siRNA sense strand
acaggaaacacauugaauu

SEQ ID NO: 1205497 - RNA, 19 nt, Homo sapiens
  misc_RNA (1)...(19): siRNA sense strand
gaagcuggcugcccaaaag

SEQ ID NO: 1205498 - RNA, 19 nt, Homo sapiens
  misc_RNA (1)...(19): siRNA sense strand
ggugacagauaaauuugag

SEQ ID NO: 1205499 - RNA, 19 nt, Homo sapiens
  misc_RNA (1)...(19): siRNA sense strand
gcaccuccugcaauuguaa

SEQ ID NO: 1205500 - RNA, 19 nt, Homo sapiens
  misc_RNA (1)...(19): siRNA sense strand
cagauaaauuugagaacag

SEQ ID NO: 1205501 - RNA, 19 nt, Homo sapiens
  misc_RNA (1)...(19): siRNA sense strand
ggauaaaggacaaagucau

SEQ ID NO: 1205502 - RNA, 19 nt, Homo sapiens
  misc_RNA (1)...(19): siRNA sense strand
agaaggagaaacugaugaa

SEQ ID NO: 1205503 - RNA, 19 nt, Homo sapiens
  misc_RNA (1)...(19): siRNA sense strand
aggagaaacugaugaagcu

SEQ ID NO: 1205504 - RNA, 19 nt, Homo sapiens
  misc_RNA (1)...(19): siRNA sense strand
ugaagaaggagaaacugau

SEQ ID NO: 1205505 - RNA, 19 nt, Homo sapiens
  misc_RNA (1)...(19): siRNA sense strand
gcucagccucugcggagaa

SEQ ID NO: 1205506 - RNA, 19 nt, Homo sapiens
  misc_RNA (1)...(19): siRNA sense strand
ucucuacugugacaaggau

SEQ ID NO: 1205507 - RNA, 19 nt, Homo sapiens
  misc_RNA (1)...(19): siRNA sense strand
ugagaacaggaaacacauu

SEQ ID NO: 1205508 - RNA, 19 nt, Homo sapiens
  misc_RNA (1)...(19): siRNA sense strand
ucaaccaguuugcaaagcu

SEQ ID NO: 1205509 - RNA, 19 nt, Homo sapiens
  misc_RNA (1)...(19): siRNA sense strand
gaaggagaaacugaugaag

SEQ ID NO: 1205510 - RNA, 19 nt, Homo sapiens
  misc_RNA (1)...(19): siRNA sense strand
ggaguuuugucucuacugu

SEQ ID NO: 1205511 - RNA, 19 nt, Homo sapiens
  misc_RNA (1)...(19): siRNA sense strand
aaagucauccaucccuuca

SEQ ID NO: 1205512 - RNA, 19 nt, Homo sapiens
  misc_RNA (1)...(19): siRNA sense strand
gggugacagauaaauuuga

SEQ ID NO: 1205513 - RNA, 19 nt, Homo sapiens
  misc_RNA (1)...(19): siRNA sense strand
ccagugaggucagcgauua

SEQ ID NO: 1205514 - RNA, 19 nt, Homo sapiens
  misc_RNA (1)...(19): siRNA sense strand
gcauuagccucauccuuga

SEQ ID NO: 1205515 - RNA, 19 nt, Homo sapiens
  misc_RNA (1)...(19): siRNA sense strand
gaacaggaaacacauugaa

SEQ ID NO: 1205516 - RNA, 19 nt, Homo sapiens
  misc_RNA (1)...(19): siRNA sense strand
ugacaaggauaaaggacaa

SEQ ID NO: 1205517 - RNA, 19 nt, Homo sapiens
  misc_RNA (1)...(19): siRNA sense strand
caggaaacacauugaauuu

SEQ ID NO: 1205518 - RNA, 19 nt, Homo sapiens
  misc_RNA (1)...(19): siRNA sense strand
gaaaggaaguccgauucuc

SEQ ID NO: 1205519 - RNA, 19 nt, Homo sapiens
  misc_RNA (1)...(19): siRNA sense strand
gaagaaggagaaacugaug

SEQ ID NO: 1205520 - RNA, 19 nt, Homo sapiens
  misc_RNA (1)...(19): siRNA sense strand
ggagaaaggaaguccgauu

SEQ ID NO: 1205521 - RNA, 19 nt, Homo sapiens
  misc_RNA (1)...(19): siRNA sense strand
gagaaaggaaguccgauuc

SEQ ID NO: 1205522 - RNA, 19 nt, Homo sapiens
  misc_RNA (1)...(19): siRNA sense strand
gagaacaggaaacacauug

SEQ ID NO: 1205523 - RNA, 19 nt, Homo sapiens
  misc_RNA (1)...(19): siRNA sense strand
gauaaaggacaaagucauc

SEQ ID NO: 1205524 - RNA, 19 nt, Homo sapiens
  misc_RNA (1)...(19): siRNA sense strand
acaggaaacacauugaauu

SEQ ID NO: 1205525 - RNA, 19 nt, Homo sapiens
  misc_RNA (1)...(19): siRNA sense strand
gaagcuggcugcccaaaag

SEQ ID NO: 1205526 - RNA, 19 nt, Homo sapiens
  misc_RNA (1)...(19): siRNA sense strand
ggugacagauaaauuugag

SEQ ID NO: 1205527 - RNA, 19 nt, Homo sapiens
  misc_RNA (1)...(19): siRNA sense strand
gcaccuccugcaauuguaa

SEQ ID NO: 1205528 - RNA, 19 nt, Homo sapiens
  misc_RNA (1)...(19): siRNA sense strand
cagauaaauuugagaacag

SEQ ID NO: 1205529 - RNA, 19 nt, Homo sapiens
  misc_RNA (1)...(19): siRNA sense strand
ggauaaaggacaaagucau

SEQ ID NO: 1205530 - RNA, 19 nt, Homo sapiens
  misc_RNA (1)...(19): siRNA sense strand
agaaggagaaacugaugaa

SEQ ID NO: 1205531 - RNA, 19 nt, Homo sapiens
  misc_RNA (1)...(19): siRNA sense strand
aggagaaacugaugaagcu

SEQ ID NO: 1205532 - RNA, 19 nt, Homo sapiens
  misc_RNA (1)...(19): siRNA sense strand
ugaagaaggagaaacugau

SEQ ID NO: 1205533 - RNA, 19 nt, Homo sapiens
  misc_RNA (1)...(19): siRNA sense strand
gcucagccucugcggagaa

SEQ ID NO: 1205534 - RNA, 19 nt, Homo sapiens
  misc_RNA (1)...(19): siRNA sense strand
ucucuacugugacaaggau

SEQ ID NO: 1205535 - RNA, 19 nt, Homo sapiens
  misc_RNA (1)...(19): siRNA sense strand
ugagaacaggaaacacauu

SEQ ID NO: 1205536 - RNA, 19 nt, Homo sapiens
  misc_RNA (1)...(19): siRNA sense strand
ucaaccaguuugcaaagcu

SEQ ID NO: 1205537 - RNA, 19 nt, Homo sapiens
  misc_RNA (1)...(19): siRNA sense strand
gaaggagaaacugaugaag

SEQ ID NO: 1205538 - RNA, 19 nt, Homo sapiens
  misc_RNA (1)...(19): siRNA sense strand
ggaguuuugucucuacugu

SEQ ID NO: 1205539 - RNA, 19 nt, Homo sapiens
  misc_RNA (1)...(19): siRNA sense strand
aaagucauccaucccuuca

SEQ ID NO: 1205540 - RNA, 19 nt, Homo sapiens
  misc_RNA (1)...(19): siRNA sense strand
gggugacagauaaauuuga

SEQ ID NO: 1205541 - RNA, 19 nt, Homo sapiens
  misc_RNA (1)...(19): siRNA sense strand
gagaaaggauggcaaagau

SEQ ID NO: 1205542 - RNA, 19 nt, Homo sapiens
  misc_RNA (1)...(19): siRNA sense strand
gcaaagauccaaaucaguu

SEQ ID NO: 1205543 - RNA, 19 nt, Homo sapiens
  misc_RNA (1)...(19): siRNA sense strand
caaacgggcugcagagaug

SEQ ID NO: 1205544 - RNA, 19 nt, Homo sapiens
  misc_RNA (1)...(19): siRNA sense strand
agauggagcuucaggcaaa

SEQ ID NO: 1205545 - RNA, 19 nt, Homo sapiens
  misc_RNA (1)...(19): siRNA sense strand
gacauucccuuggaccuuu

SEQ ID NO: 1205546 - RNA, 19 nt, Homo sapiens
  misc_RNA (1)...(19): siRNA sense strand
gcauggacauucccuugga

SEQ ID NO: 1205547 - RNA, 19 nt, Homo sapiens
  misc_RNA (1)...(19): siRNA sense strand
acagacaccucucucaugu

SEQ ID NO: 1205548 - RNA, 19 nt, Homo sapiens
  misc_RNA (1)...(19): siRNA sense strand
aggcaaaacuuacagcuua

SEQ ID NO: 1205549 - RNA, 19 nt, Homo sapiens
  misc_RNA (1)...(19): siRNA sense strand
ucagugaucugccauacca

SEQ ID NO: 1205550 - RNA, 19 nt, Homo sapiens
  misc_RNA (1)...(19): siRNA sense strand
ggacuucaguggauuucag

SEQ ID NO: 1205551 - RNA, 19 nt, Homo sapiens
  misc_RNA (1)...(19): siRNA sense strand
acacagauauacagcagau

SEQ ID NO: 1205552 - RNA, 19 nt, Homo sapiens
  misc_RNA (1)...(19): siRNA sense strand
ugacugcauugaaagaugu

SEQ ID NO: 1205553 - RNA, 19 nt, Homo sapiens
  misc_RNA (1)...(19): siRNA sense strand
cugcagagauggagcuuca

SEQ ID NO: 1205554 - RNA, 19 nt, Homo sapiens
  misc_RNA (1)...(19): siRNA sense strand
agacaccucucucauguac

SEQ ID NO: 1205555 - RNA, 19 nt, Homo sapiens
  misc_RNA (1)...(19): siRNA sense strand
cacugugacugcauugaaa

SEQ ID NO: 1205556 - RNA, 19 nt, Homo sapiens
  misc_RNA (1)...(19): siRNA sense strand
ucccugacaugcugagaaa

SEQ ID NO: 1205557 - RNA, 19 nt, Homo sapiens
  misc_RNA (1)...(19): siRNA sense strand
gucuguaacugguucauca

SEQ ID NO: 1205558 - RNA, 19 nt, Homo sapiens
  misc_RNA (1)...(19): siRNA sense strand
uggcaaagauccaaaucag

SEQ ID NO: 1205559 - RNA, 19 nt, Homo sapiens
  misc_RNA (1)...(19): siRNA sense strand
gcugagaaaggauggcaaa

SEQ ID NO: 1205560 - RNA, 19 nt, Homo sapiens
  misc_RNA (1)...(19): siRNA sense strand
ugagaaaggauggcaaaga

SEQ ID NO: 1205561 - RNA, 19 nt, Homo sapiens
  misc_RNA (1)...(19): siRNA sense strand
gaggacagcauggacauuc

SEQ ID NO: 1205562 - RNA, 19 nt, Homo sapiens
  misc_RNA (1)...(19): siRNA sense strand
ggacauucccuuggaccuu

SEQ ID NO: 1205563 - RNA, 19 nt, Homo sapiens
  misc_RNA (1)...(19): siRNA sense strand
gugacugcauugaaagaug

SEQ ID NO: 1205564 - RNA, 19 nt, Homo sapiens
  misc_RNA (1)...(19): siRNA sense strand
uaugagcaccguuacaaug

SEQ ID NO: 1205565 - RNA, 19 nt, Homo sapiens
  misc_RNA (1)...(19): siRNA sense strand
ccacugugacugcauugaa

SEQ ID NO: 1205566 - RNA, 19 nt, Homo sapiens
  misc_RNA (1)...(19): siRNA sense strand
ccuuggaccuuucuucauc

SEQ ID NO: 1205567 - RNA, 19 nt, Homo sapiens
  misc_RNA (1)...(19): siRNA sense strand
uuacaaugccuauccuuca

SEQ ID NO: 1205568 - RNA, 19 nt, Homo sapiens
  misc_RNA (1)...(19): siRNA sense strand
gugcagauucuucgggauu

SEQ ID NO: 1205569 - RNA, 19 nt, Homo sapiens
  misc_RNA (1)...(19): siRNA sense strand
aaccaggacuucaguggau

SEQ ID NO: 1205570 - RNA, 19 nt, Homo sapiens
  misc_RNA (1)...(19): siRNA sense strand
cagcaaacacaccugucua

SEQ ID NO: 1205571 - RNA, 19 nt, Homo sapiens
  misc_RNA (1)...(19): siRNA sense strand
caaagauccaaaucaguuc

SEQ ID NO: 1205572 - RNA, 19 nt, Homo sapiens
  misc_RNA (1)...(19): siRNA sense strand
gagcuucaggcaaaacuua

SEQ ID NO: 1205573 - RNA, 19 nt, Homo sapiens
  misc_RNA (1)...(19): siRNA sense strand
ggacaaaacacagauauac

SEQ ID NO: 1205574 - RNA, 19 nt, Homo sapiens
  misc_RNA (1)...(19): siRNA sense strand
acagauauacagcagauag

SEQ ID NO: 1205575 - RNA, 19 nt, Homo sapiens
  misc_RNA (1)...(19): siRNA sense strand
auaccacugugacugcauu

SEQ ID NO: 1205576 - RNA, 19 nt, Homo sapiens
  misc_RNA (1)...(19): siRNA sense strand
ggcaaaacuuacagcuuaa

SEQ ID NO: 1205577 - RNA, 19 nt, Homo sapiens
  misc_RNA (1)...(19): siRNA sense strand
cacagacaccucucucaug

SEQ ID NO: 1205578 - RNA, 19 nt, Homo sapiens
  misc_RNA (1)...(19): siRNA sense strand
ucacagacaccucucucau

SEQ ID NO: 1205579 - RNA, 19 nt, Homo sapiens
  misc_RNA (1)...(19): siRNA sense strand
ucaaacgggcugcagagau

SEQ ID NO: 1205580 - RNA, 19 nt, Homo sapiens
  misc_RNA (1)...(19): siRNA sense strand
guaaaucuggaccaaguac

SEQ ID NO: 1205581 - RNA, 19 nt, Homo sapiens
  misc_RNA (1)...(19): siRNA sense strand
gauccaaaucaguucacaa

SEQ ID NO: 1205582 - RNA, 19 nt, Homo sapiens
  misc_RNA (1)...(19): siRNA sense strand
ccaggacuucaguggauuu

SEQ ID NO: 1205583 - RNA, 19 nt, Homo sapiens
  misc_RNA (1)...(19): siRNA sense strand
gcagauucuucgggauugg

SEQ ID NO: 1205584 - RNA, 19 nt, Homo sapiens
  misc_RNA (1)...(19): siRNA sense strand
gaugucccuuucucucucu

SEQ ID NO: 1205585 - RNA, 19 nt, Homo sapiens
  misc_RNA (1)...(19): siRNA sense strand
ggaccucaaccaggacuuc

SEQ ID NO: 1205586 - RNA, 19 nt, Homo sapiens
  misc_RNA (1)...(19): siRNA sense strand
ggcuguaugagcaccguua

SEQ ID NO: 1205587 - RNA, 19 nt, Homo sapiens
  misc_RNA (1)...(19): siRNA sense strand
guaugagcaccguuacaau

SEQ ID NO: 1205588 - RNA, 19 nt, Homo sapiens
  misc_RNA (1)...(19): siRNA sense strand
caguggauuucagcuucua

SEQ ID NO: 1205589 - RNA, 19 nt, Homo sapiens
  misc_RNA (1)...(19): siRNA sense strand
gagaaaggauggcaaagau

SEQ ID NO: 1205590 - RNA, 19 nt, Homo sapiens
  misc_RNA (1)...(19): siRNA sense strand
gcaaagauccaaaucaguu

SEQ ID NO: 1205591 - RNA, 19 nt, Homo sapiens
  misc_RNA (1)...(19): siRNA sense strand
caaacgggcugcagagaug

SEQ ID NO: 1205592 - RNA, 19 nt, Homo sapiens
  misc_RNA (1)...(19): siRNA sense strand
agauggagcuucaggcaaa

SEQ ID NO: 1205593 - RNA, 19 nt, Homo sapiens
  misc_RNA (1)...(19): siRNA sense strand
gacauucccuuggaccuuu

SEQ ID NO: 1205594 - RNA, 19 nt, Homo sapiens
  misc_RNA (1)...(19): siRNA sense strand
gcauggacauucccuugga

SEQ ID NO: 1205595 - RNA, 19 nt, Homo sapiens
  misc_RNA (1)...(19): siRNA sense strand
acagacaccucucucaugu

SEQ ID NO: 1205596 - RNA, 19 nt, Homo sapiens
  misc_RNA (1)...(19): siRNA sense strand
aggcaaaacuuacagcuua

SEQ ID NO: 1205597 - RNA, 19 nt, Homo sapiens
  misc_RNA (1)...(19): siRNA sense strand
ucagugaucugccauacca

SEQ ID NO: 1205598 - RNA, 19 nt, Homo sapiens
  misc_RNA (1)...(19): siRNA sense strand
ggacuucaguggauuucag

SEQ ID NO: 1205599 - RNA, 19 nt, Homo sapiens
  misc_RNA (1)...(19): siRNA sense strand
acacagauauacagcagau

SEQ ID NO: 1205600 - RNA, 19 nt, Homo sapiens
  misc_RNA (1)...(19): siRNA sense strand
ugacugcauugaaagaugu

SEQ ID NO: 1205601 - RNA, 19 nt, Homo sapiens
  misc_RNA (1)...(19): siRNA sense strand
cugcagagauggagcuuca

SEQ ID NO: 1205602 - RNA, 19 nt, Homo sapiens
  misc_RNA (1)...(19): siRNA sense strand
agacaccucucucauguac

SEQ ID NO: 1205603 - RNA, 19 nt, Homo sapiens
  misc_RNA (1)...(19): siRNA sense strand
cacugugacugcauugaaa

SEQ ID NO: 1205604 - RNA, 19 nt, Homo sapiens
  misc_RNA (1)...(19): siRNA sense strand
ucccugacaugcugagaaa

SEQ ID NO: 1205605 - RNA, 19 nt, Homo sapiens
  misc_RNA (1)...(19): siRNA sense strand
gucuguaacugguucauca

SEQ ID NO: 1205606 - RNA, 19 nt, Homo sapiens
  misc_RNA (1)...(19): siRNA sense strand
uggcaaagauccaaaucag

SEQ ID NO: 1205607 - RNA, 19 nt, Homo sapiens
  misc_RNA (1)...(19): siRNA sense strand
gcugagaaaggauggcaaa

SEQ ID NO: 1205608 - RNA, 19 nt, Homo sapiens
  misc_RNA (1)...(19): siRNA sense strand
ugagaaaggauggcaaaga

SEQ ID NO: 1205609 - RNA, 19 nt, Homo sapiens
  misc_RNA (1)...(19): siRNA sense strand
gaggacagcauggacauuc

SEQ ID NO: 1205610 - RNA, 19 nt, Homo sapiens
  misc_RNA (1)...(19): siRNA sense strand
ggacauucccuuggaccuu

SEQ ID NO: 1205611 - RNA, 19 nt, Homo sapiens
  misc_RNA (1)...(19): siRNA sense strand
gugacugcauugaaagaug

SEQ ID NO: 1205612 - RNA, 19 nt, Homo sapiens
  misc_RNA (1)...(19): siRNA sense strand
uaugagcaccguuacaaug

SEQ ID NO: 1205613 - RNA, 19 nt, Homo sapiens
  misc_RNA (1)...(19): siRNA sense strand
ccacugugacugcauugaa

SEQ ID NO: 1205614 - RNA, 19 nt, Homo sapiens
  misc_RNA (1)...(19): siRNA sense strand
ccuuggaccuuucuucauc

SEQ ID NO: 1205615 - RNA, 19 nt, Homo sapiens
  misc_RNA (1)...(19): siRNA sense strand
uuacaaugccuauccuuca

SEQ ID NO: 1205616 - RNA, 19 nt, Homo sapiens
  misc_RNA (1)...(19): siRNA sense strand
gugcagauucuucgggauu

SEQ ID NO: 1205617 - RNA, 19 nt, Homo sapiens
  misc_RNA (1)...(19): siRNA sense strand
aaccaggacuucaguggau

SEQ ID NO: 1205618 - RNA, 19 nt, Homo sapiens
  misc_RNA (1)...(19): siRNA sense strand
cagcaaacacaccugucua

SEQ ID NO: 1205619 - RNA, 19 nt, Homo sapiens
  misc_RNA (1)...(19): siRNA sense strand
caaagauccaaaucaguuc

SEQ ID NO: 1205620 - RNA, 19 nt, Homo sapiens
  misc_RNA (1)...(19): siRNA sense strand
gagcuucaggcaaaacuua

SEQ ID NO: 1205621 - RNA, 19 nt, Homo sapiens
  misc_RNA (1)...(19): siRNA sense strand
ggacaaaacacagauauac

SEQ ID NO: 1205622 - RNA, 19 nt, Homo sapiens
  misc_RNA (1)...(19): siRNA sense strand
acagauauacagcagauag

SEQ ID NO: 1205623 - RNA, 19 nt, Homo sapiens
  misc_RNA (1)...(19): siRNA sense strand
auaccacugugacugcauu

SEQ ID NO: 1205624 - RNA, 19 nt, Homo sapiens
  misc_RNA (1)...(19): siRNA sense strand
ggcaaaacuuacagcuuaa

SEQ ID NO: 1205625 - RNA, 19 nt, Homo sapiens
  misc_RNA (1)...(19): siRNA sense strand
cacagacaccucucucaug

SEQ ID NO: 1205626 - RNA, 19 nt, Homo sapiens
  misc_RNA (1)...(19): siRNA sense strand
ucacagacaccucucucau

SEQ ID NO: 1205627 - RNA, 19 nt, Homo sapiens
  misc_RNA (1)...(19): siRNA sense strand
ucaaacgggcugcagagau

SEQ ID NO: 1205628 - RNA, 19 nt, Homo sapiens
  misc_RNA (1)...(19): siRNA sense strand
guaaaucuggaccaaguac

SEQ ID NO: 1205629 - RNA, 19 nt, Homo sapiens
  misc_RNA (1)...(19): siRNA sense strand
gauccaaaucaguucacaa

SEQ ID NO: 1205630 - RNA, 19 nt, Homo sapiens
  misc_RNA (1)...(19): siRNA sense strand
ccaggacuucaguggauuu

SEQ ID NO: 1205631 - RNA, 19 nt, Homo sapiens
  misc_RNA (1)...(19): siRNA sense strand
gcagauucuucgggauugg

SEQ ID NO: 1205632 - RNA, 19 nt, Homo sapiens
  misc_RNA (1)...(19): siRNA sense strand
gaugucccuuucucucucu

SEQ ID NO: 1205633 - RNA, 19 nt, Homo sapiens
  misc_RNA (1)...(19): siRNA sense strand
ggaccucaaccaggacuuc

SEQ ID NO: 1205634 - RNA, 19 nt, Homo sapiens
  misc_RNA (1)...(19): siRNA sense strand
ggcuguaugagcaccguua

SEQ ID NO: 1205635 - RNA, 19 nt, Homo sapiens
  misc_RNA (1)...(19): siRNA sense strand
guaugagcaccguuacaau

SEQ ID NO: 1205636 - RNA, 19 nt, Homo sapiens
  misc_RNA (1)...(19): siRNA sense strand
caguggauuucagcuucua

SEQ ID NO: 1205637 - RNA, 19 nt, Homo sapiens
  misc_RNA (1)...(19): siRNA sense strand
gagaaaggauggcaaagau

SEQ ID NO: 1205638 - RNA, 19 nt, Homo sapiens
  misc_RNA (1)...(19): siRNA sense strand
gcaaagauccaaaucaguu

SEQ ID NO: 1205639 - RNA, 19 nt, Homo sapiens
  misc_RNA (1)...(19): siRNA sense strand
caaacgggcugcagagaug

SEQ ID NO: 1205640 - RNA, 19 nt, Homo sapiens
  misc_RNA (1)...(19): siRNA sense strand
agauggagcuucaggcaaa

SEQ ID NO: 1205641 - RNA, 19 nt, Homo sapiens
  misc_RNA (1)...(19): siRNA sense strand
gacauucccuuggaccuuu

SEQ ID NO: 1205642 - RNA, 19 nt, Homo sapiens
  misc_RNA (1)...(19): siRNA sense strand
gcauggacauucccuugga

SEQ ID NO: 1205643 - RNA, 19 nt, Homo sapiens
  misc_RNA (1)...(19): siRNA sense strand
acagacaccucucucaugu

SEQ ID NO: 1205644 - RNA, 19 nt, Homo sapiens
  misc_RNA (1)...(19): siRNA sense strand
aggcaaaacuuacagcuua

SEQ ID NO: 1205645 - RNA, 19 nt, Homo sapiens
  misc_RNA (1)...(19): siRNA sense strand
ucagugaucugccauacca

SEQ ID NO: 1205646 - RNA, 19 nt, Homo sapiens
  misc_RNA (1)...(19): siRNA sense strand
ggacuucaguggauuucag

SEQ ID NO: 1205647 - RNA, 19 nt, Homo sapiens
  misc_RNA (1)...(19): siRNA sense strand
acacagauauacagcagau

SEQ ID NO: 1205648 - RNA, 19 nt, Homo sapiens
  misc_RNA (1)...(19): siRNA sense strand
ugacugcauugaaagaugu

SEQ ID NO: 1205649 - RNA, 19 nt, Homo sapiens
  misc_RNA (1)...(19): siRNA sense strand
cugcagagauggagcuuca

SEQ ID NO: 1205650 - RNA, 19 nt, Homo sapiens
  misc_RNA (1)...(19): siRNA sense strand
agacaccucucucauguac

SEQ ID NO: 1205651 - RNA, 19 nt, Homo sapiens
  misc_RNA (1)...(19): siRNA sense strand
cacugugacugcauugaaa

SEQ ID NO: 1205652 - RNA, 19 nt, Homo sapiens
  misc_RNA (1)...(19): siRNA sense strand
ucccugacaugcugagaaa

SEQ ID NO: 1205653 - RNA, 19 nt, Homo sapiens
  misc_RNA (1)...(19): siRNA sense strand
gucuguaacugguucauca

SEQ ID NO: 1205654 - RNA, 19 nt, Homo sapiens
  misc_RNA (1)...(19): siRNA sense strand
uggcaaagauccaaaucag

SEQ ID NO: 1205655 - RNA, 19 nt, Homo sapiens
  misc_RNA (1)...(19): siRNA sense strand
gcugagaaaggauggcaaa

SEQ ID NO: 1205656 - RNA, 19 nt, Homo sapiens
  misc_RNA (1)...(19): siRNA sense strand
ugagaaaggauggcaaaga

SEQ ID NO: 1205657 - RNA, 19 nt, Homo sapiens
  misc_RNA (1)...(19): siRNA sense strand
gaggacagcauggacauuc

SEQ ID NO: 1205658 - RNA, 19 nt, Homo sapiens
  misc_RNA (1)...(19): siRNA sense strand
ggacauucccuuggaccuu

SEQ ID NO: 1205659 - RNA, 19 nt, Homo sapiens
  misc_RNA (1)...(19): siRNA sense strand
gugacugcauugaaagaug

SEQ ID NO: 1205660 - RNA, 19 nt, Homo sapiens
  misc_RNA (1)...(19): siRNA sense strand
uaugagcaccguuacaaug

SEQ ID NO: 1205661 - RNA, 19 nt, Homo sapiens
  misc_RNA (1)...(19): siRNA sense strand
ccacugugacugcauugaa

SEQ ID NO: 1205662 - RNA, 19 nt, Homo sapiens
  misc_RNA (1)...(19): siRNA sense strand
ccuuggaccuuucuucauc

SEQ ID NO: 1205663 - RNA, 19 nt, Homo sapiens
  misc_RNA (1)...(19): siRNA sense strand
uuacaaugccuauccuuca

SEQ ID NO: 1205664 - RNA, 19 nt, Homo sapiens
  misc_RNA (1)...(19): siRNA sense strand
gugcagauucuucgggauu

SEQ ID NO: 1205665 - RNA, 19 nt, Homo sapiens
  misc_RNA (1)...(19): siRNA sense strand
aaccaggacuucaguggau

SEQ ID NO: 1205666 - RNA, 19 nt, Homo sapiens
  misc_RNA (1)...(19): siRNA sense strand
cagcaaacacaccugucua

SEQ ID NO: 1205667 - RNA, 19 nt, Homo sapiens
  misc_RNA (1)...(19): siRNA sense strand
caaagauccaaaucaguuc

SEQ ID NO: 1205668 - RNA, 19 nt, Homo sapiens
  misc_RNA (1)...(19): siRNA sense strand
gagcuucaggcaaaacuua

SEQ ID NO: 1205669 - RNA, 19 nt, Homo sapiens
  misc_RNA (1)...(19): siRNA sense strand
ggacaaaacacagauauac

SEQ ID NO: 1205670 - RNA, 19 nt, Homo sapiens
  misc_RNA (1)...(19): siRNA sense strand
acagauauacagcagauag

SEQ ID NO: 1205671 - RNA, 19 nt, Homo sapiens
  misc_RNA (1)...(19): siRNA sense strand
auaccacugugacugcauu

SEQ ID NO: 1205672 - RNA, 19 nt, Homo sapiens
  misc_RNA (1)...(19): siRNA sense strand
ggcaaaacuuacagcuuaa

SEQ ID NO: 1205673 - RNA, 19 nt, Homo sapiens
  misc_RNA (1)...(19): siRNA sense strand
cacagacaccucucucaug

SEQ ID NO: 1205674 - RNA, 19 nt, Homo sapiens
  misc_RNA (1)...(19): siRNA sense strand
ucacagacaccucucucau

SEQ ID NO: 1205675 - RNA, 19 nt, Homo sapiens
  misc_RNA (1)...(19): siRNA sense strand
ucaaacgggcugcagagau

SEQ ID NO: 1205676 - RNA, 19 nt, Homo sapiens
  misc_RNA (1)...(19): siRNA sense strand
guaaaucuggaccaaguac

SEQ ID NO: 1205677 - RNA, 19 nt, Homo sapiens
  misc_RNA (1)...(19): siRNA sense strand
gauccaaaucaguucacaa

SEQ ID NO: 1205678 - RNA, 19 nt, Homo sapiens
  misc_RNA (1)...(19): siRNA sense strand
ccaggacuucaguggauuu

SEQ ID NO: 1205679 - RNA, 19 nt, Homo sapiens
  misc_RNA (1)...(19): siRNA sense strand
gcagauucuucgggauugg

SEQ ID NO: 1205680 - RNA, 19 nt, Homo sapiens
  misc_RNA (1)...(19): siRNA sense strand
gaugucccuuucucucucu

SEQ ID NO: 1205681 - RNA, 19 nt, Homo sapiens
  misc_RNA (1)...(19): siRNA sense strand
ggaccucaaccaggacuuc

SEQ ID NO: 1205682 - RNA, 19 nt, Homo sapiens
  misc_RNA (1)...(19): siRNA sense strand
ggcuguaugagcaccguua

SEQ ID NO: 1205683 - RNA, 19 nt, Homo sapiens
  misc_RNA (1)...(19): siRNA sense strand
guaugagcaccguuacaau

SEQ ID NO: 1205684 - RNA, 19 nt, Homo sapiens
  misc_RNA (1)...(19): siRNA sense strand
caguggauuucagcuucua

SEQ ID NO: 1205685 - RNA, 19 nt, Homo sapiens
  misc_RNA (1)...(19): siRNA sense strand
gagaaaggauggcaaagau

SEQ ID NO: 1205686 - RNA, 19 nt, Homo sapiens
  misc_RNA (1)...(19): siRNA sense strand
gcaaagauccaaaucaguu

SEQ ID NO: 1205687 - RNA, 19 nt, Homo sapiens
  misc_RNA (1)...(19): siRNA sense strand
caaacgggcugcagagaug

SEQ ID NO: 1205688 - RNA, 19 nt, Homo sapiens
  misc_RNA (1)...(19): siRNA sense strand
agauggagcuucaggcaaa

SEQ ID NO: 1205689 - RNA, 19 nt, Homo sapiens
  misc_RNA (1)...(19): siRNA sense strand
gacauucccuuggaccuuu

SEQ ID NO: 1205690 - RNA, 19 nt, Homo sapiens
  misc_RNA (1)...(19): siRNA sense strand
gcauggacauucccuugga

SEQ ID NO: 1205691 - RNA, 19 nt, Homo sapiens
  misc_RNA (1)...(19): siRNA sense strand
acagacaccucucucaugu

SEQ ID NO: 1205692 - RNA, 19 nt, Homo sapiens
  misc_RNA (1)...(19): siRNA sense strand
aggcaaaacuuacagcuua

SEQ ID NO: 1205693 - RNA, 19 nt, Homo sapiens
  misc_RNA (1)...(19): siRNA sense strand
ucagugaucugccauacca

SEQ ID NO: 1205694 - RNA, 19 nt, Homo sapiens
  misc_RNA (1)...(19): siRNA sense strand
ggacuucaguggauuucag

SEQ ID NO: 1205695 - RNA, 19 nt, Homo sapiens
  misc_RNA (1)...(19): siRNA sense strand
acacagauauacagcagau

SEQ ID NO: 1205696 - RNA, 19 nt, Homo sapiens
  misc_RNA (1)...(19): siRNA sense strand
ugacugcauugaaagaugu

SEQ ID NO: 1205697 - RNA, 19 nt, Homo sapiens
  misc_RNA (1)...(19): siRNA sense strand
cugcagagauggagcuuca

SEQ ID NO: 1205698 - RNA, 19 nt, Homo sapiens
  misc_RNA (1)...(19): siRNA sense strand
agacaccucucucauguac

SEQ ID NO: 1205699 - RNA, 19 nt, Homo sapiens
  misc_RNA (1)...(19): siRNA sense strand
cacugugacugcauugaaa

SEQ ID NO: 1205700 - RNA, 19 nt, Homo sapiens
  misc_RNA (1)...(19): siRNA sense strand
ucccugacaugcugagaaa

SEQ ID NO: 1205701 - RNA, 19 nt, Homo sapiens
  misc_RNA (1)...(19): siRNA sense strand
gucuguaacugguucauca

SEQ ID NO: 1205702 - RNA, 19 nt, Homo sapiens
  misc_RNA (1)...(19): siRNA sense strand
uggcaaagauccaaaucag

SEQ ID NO: 1205703 - RNA, 19 nt, Homo sapiens
  misc_RNA (1)...(19): siRNA sense strand
gcugagaaaggauggcaaa

SEQ ID NO: 1205704 - RNA, 19 nt, Homo sapiens
  misc_RNA (1)...(19): siRNA sense strand
ugagaaaggauggcaaaga

SEQ ID NO: 1205705 - RNA, 19 nt, Homo sapiens
  misc_RNA (1)...(19): siRNA sense strand
gaggacagcauggacauuc

SEQ ID NO: 1205706 - RNA, 19 nt, Homo sapiens
  misc_RNA (1)...(19): siRNA sense strand
ggacauucccuuggaccuu

SEQ ID NO: 1205707 - RNA, 19 nt, Homo sapiens
  misc_RNA (1)...(19): siRNA sense strand
gugacugcauugaaagaug

SEQ ID NO: 1205708 - RNA, 19 nt, Homo sapiens
  misc_RNA (1)...(19): siRNA sense strand
uaugagcaccguuacaaug

SEQ ID NO: 1205709 - RNA, 19 nt, Homo sapiens
  misc_RNA (1)...(19): siRNA sense strand
ccacugugacugcauugaa

SEQ ID NO: 1205710 - RNA, 19 nt, Homo sapiens
  misc_RNA (1)...(19): siRNA sense strand
ccuuggaccuuucuucauc

SEQ ID NO: 1205711 - RNA, 19 nt, Homo sapiens
  misc_RNA (1)...(19): siRNA sense strand
uuacaaugccuauccuuca

SEQ ID NO: 1205712 - RNA, 19 nt, Homo sapiens
  misc_RNA (1)...(19): siRNA sense strand
gugcagauucuucgggauu

SEQ ID NO: 1205713 - RNA, 19 nt, Homo sapiens
  misc_RNA (1)...(19): siRNA sense strand
aaccaggacuucaguggau

SEQ ID NO: 1205714 - RNA, 19 nt, Homo sapiens
  misc_RNA (1)...(19): siRNA sense strand
cagcaaacacaccugucua

SEQ ID NO: 1205715 - RNA, 19 nt, Homo sapiens
  misc_RNA (1)...(19): siRNA sense strand
caaagauccaaaucaguuc

SEQ ID NO: 1205716 - RNA, 19 nt, Homo sapiens
  misc_RNA (1)...(19): siRNA sense strand
gagcuucaggcaaaacuua

SEQ ID NO: 1205717 - RNA, 19 nt, Homo sapiens
  misc_RNA (1)...(19): siRNA sense strand
ggacaaaacacagauauac

SEQ ID NO: 1205718 - RNA, 19 nt, Homo sapiens
  misc_RNA (1)...(19): siRNA sense strand
acagauauacagcagauag

SEQ ID NO: 1205719 - RNA, 19 nt, Homo sapiens
  misc_RNA (1)...(19): siRNA sense strand
auaccacugugacugcauu

SEQ ID NO: 1205720 - RNA, 19 nt, Homo sapiens
  misc_RNA (1)...(19): siRNA sense strand
ggcaaaacuuacagcuuaa

SEQ ID NO: 1205721 - RNA, 19 nt, Homo sapiens
  misc_RNA (1)...(19): siRNA sense strand
cacagacaccucucucaug

SEQ ID NO: 1205722 - RNA, 19 nt, Homo sapiens
  misc_RNA (1)...(19): siRNA sense strand
ucacagacaccucucucau

SEQ ID NO: 1205723 - RNA, 19 nt, Homo sapiens
  misc_RNA (1)...(19): siRNA sense strand
ucaaacgggcugcagagau

SEQ ID NO: 1205724 - RNA, 19 nt, Homo sapiens
  misc_RNA (1)...(19): siRNA sense strand
guaaaucuggaccaaguac

SEQ ID NO: 1205725 - RNA, 19 nt, Homo sapiens
  misc_RNA (1)...(19): siRNA sense strand
gauccaaaucaguucacaa

SEQ ID NO: 1205726 - RNA, 19 nt, Homo sapiens
  misc_RNA (1)...(19): siRNA sense strand
ccaggacuucaguggauuu

SEQ ID NO: 1205727 - RNA, 19 nt, Homo sapiens
  misc_RNA (1)...(19): siRNA sense strand
gcagauucuucgggauugg

SEQ ID NO: 1205728 - RNA, 19 nt, Homo sapiens
  misc_RNA (1)...(19): siRNA sense strand
gaugucccuuucucucucu

SEQ ID NO: 1205729 - RNA, 19 nt, Homo sapiens
  misc_RNA (1)...(19): siRNA sense strand
ggaccucaaccaggacuuc

SEQ ID NO: 1205730 - RNA, 19 nt, Homo sapiens
  misc_RNA (1)...(19): siRNA sense strand
ggcuguaugagcaccguua

SEQ ID NO: 1205731 - RNA, 19 nt, Homo sapiens
  misc_RNA (1)...(19): siRNA sense strand
guaugagcaccguuacaau

SEQ ID NO: 1205732 - RNA, 19 nt, Homo sapiens
  misc_RNA (1)...(19): siRNA sense strand
caguggauuucagcuucua

SEQ ID NO: 1205733 - RNA, 19 nt, Homo sapiens
  misc_RNA (1)...(19): siRNA sense strand
gagaaaggauggcaaagau

SEQ ID NO: 1205734 - RNA, 19 nt, Homo sapiens
  misc_RNA (1)...(19): siRNA sense strand
gcaaagauccaaaucaguu

SEQ ID NO: 1205735 - RNA, 19 nt, Homo sapiens
  misc_RNA (1)...(19): siRNA sense strand
caaacgggcugcagagaug

SEQ ID NO: 1205736 - RNA, 19 nt, Homo sapiens
  misc_RNA (1)...(19): siRNA sense strand
agauggagcuucaggcaaa

SEQ ID NO: 1205737 - RNA, 19 nt, Homo sapiens
  misc_RNA (1)...(19): siRNA sense strand
gacauucccuuggaccuuu

SEQ ID NO: 1205738 - RNA, 19 nt, Homo sapiens
  misc_RNA (1)...(19): siRNA sense strand
acagacaccucucucaugu

SEQ ID NO: 1205739 - RNA, 19 nt, Homo sapiens
  misc_RNA (1)...(19): siRNA sense strand
aggcaaaacuuacagcuua

SEQ ID NO: 1205740 - RNA, 19 nt, Homo sapiens
  misc_RNA (1)...(19): siRNA sense strand
ucagugaucugccauacca

SEQ ID NO: 1205741 - RNA, 19 nt, Homo sapiens
  misc_RNA (1)...(19): siRNA sense strand
ggacuucaguggauuucag

SEQ ID NO: 1205742 - RNA, 19 nt, Homo sapiens
  misc_RNA (1)...(19): siRNA sense strand
acacagauauacagcagau

SEQ ID NO: 1205743 - RNA, 19 nt, Homo sapiens
  misc_RNA (1)...(19): siRNA sense strand
ugacugcauugaaagaugu

SEQ ID NO: 1205744 - RNA, 19 nt, Homo sapiens
  misc_RNA (1)...(19): siRNA sense strand
cugcagagauggagcuuca

SEQ ID NO: 1205745 - RNA, 19 nt, Homo sapiens
  misc_RNA (1)...(19): siRNA sense strand
agacaccucucucauguac

SEQ ID NO: 1205746 - RNA, 19 nt, Homo sapiens
  misc_RNA (1)...(19): siRNA sense strand
cacugugacugcauugaaa

SEQ ID NO: 1205747 - RNA, 19 nt, Homo sapiens
  misc_RNA (1)...(19): siRNA sense strand
ucccugacaugcugagaaa

SEQ ID NO: 1205748 - RNA, 19 nt, Homo sapiens
  misc_RNA (1)...(19): siRNA sense strand
gucuguaacugguucauca

SEQ ID NO: 1205749 - RNA, 19 nt, Homo sapiens
  misc_RNA (1)...(19): siRNA sense strand
uggcaaagauccaaaucag

SEQ ID NO: 1205750 - RNA, 19 nt, Homo sapiens
  misc_RNA (1)...(19): siRNA sense strand
gcugagaaaggauggcaaa

SEQ ID NO: 1205751 - RNA, 19 nt, Homo sapiens
  misc_RNA (1)...(19): siRNA sense strand
ugagaaaggauggcaaaga

SEQ ID NO: 1205752 - RNA, 19 nt, Homo sapiens
  misc_RNA (1)...(19): siRNA sense strand
ggacauucccuuggaccuu

SEQ ID NO: 1205753 - RNA, 19 nt, Homo sapiens
  misc_RNA (1)...(19): siRNA sense strand
gugacugcauugaaagaug

SEQ ID NO: 1205754 - RNA, 19 nt, Homo sapiens
  misc_RNA (1)...(19): siRNA sense strand
uaugagcaccguuacaaug

SEQ ID NO: 1205755 - RNA, 19 nt, Homo sapiens
  misc_RNA (1)...(19): siRNA sense strand
ccuuggaccuuucuucauc

SEQ ID NO: 1205756 - RNA, 19 nt, Homo sapiens
  misc_RNA (1)...(19): siRNA sense strand
ccacugugacugcauugaa

SEQ ID NO: 1205757 - RNA, 19 nt, Homo sapiens
  misc_RNA (1)...(19): siRNA sense strand
uuacaaugccuauccuuca

SEQ ID NO: 1205758 - RNA, 19 nt, Homo sapiens
  misc_RNA (1)...(19): siRNA sense strand
cagcaaacacaccugucua

SEQ ID NO: 1205759 - RNA, 19 nt, Homo sapiens
  misc_RNA (1)...(19): siRNA sense strand
aaccaggacuucaguggau

SEQ ID NO: 1205760 - RNA, 19 nt, Homo sapiens
  misc_RNA (1)...(19): siRNA sense strand
gugcagauucuucgggauu

SEQ ID NO: 1205761 - RNA, 19 nt, Homo sapiens
  misc_RNA (1)...(19): siRNA sense strand
caaagauccaaaucaguuc

SEQ ID NO: 1205762 - RNA, 19 nt, Homo sapiens
  misc_RNA (1)...(19): siRNA sense strand
gagcuucaggcaaaacuua

SEQ ID NO: 1205763 - RNA, 19 nt, Homo sapiens
  misc_RNA (1)...(19): siRNA sense strand
ggacaaaacacagauauac

SEQ ID NO: 1205764 - RNA, 19 nt, Homo sapiens
  misc_RNA (1)...(19): siRNA sense strand
acagauauacagcagauag

SEQ ID NO: 1205765 - RNA, 19 nt, Homo sapiens
  misc_RNA (1)...(19): siRNA sense strand
auaccacugugacugcauu

SEQ ID NO: 1205766 - RNA, 19 nt, Homo sapiens
  misc_RNA (1)...(19): siRNA sense strand
ggcaaaacuuacagcuuaa

SEQ ID NO: 1205767 - RNA, 19 nt, Homo sapiens
  misc_RNA (1)...(19): siRNA sense strand
cacagacaccucucucaug

SEQ ID NO: 1205768 - RNA, 19 nt, Homo sapiens
  misc_RNA (1)...(19): siRNA sense strand
ucacagacaccucucucau

SEQ ID NO: 1205769 - RNA, 19 nt, Homo sapiens
  misc_RNA (1)...(19): siRNA sense strand
ucaaacgggcugcagagau

SEQ ID NO: 1205770 - RNA, 19 nt, Homo sapiens
  misc_RNA (1)...(19): siRNA sense strand
guaaaucuggaccaaguac

SEQ ID NO: 1205771 - RNA, 19 nt, Homo sapiens
  misc_RNA (1)...(19): siRNA sense strand
gauccaaaucaguucacaa

SEQ ID NO: 1205772 - RNA, 19 nt, Homo sapiens
  misc_RNA (1)...(19): siRNA sense strand
gcagauucuucgggauugg

SEQ ID NO: 1205773 - RNA, 19 nt, Homo sapiens
  misc_RNA (1)...(19): siRNA sense strand
ccaggacuucaguggauuu

SEQ ID NO: 1205774 - RNA, 19 nt, Homo sapiens
  misc_RNA (1)...(19): siRNA sense strand
ggcuguaugagcaccguua

SEQ ID NO: 1205775 - RNA, 19 nt, Homo sapiens
  misc_RNA (1)...(19): siRNA sense strand
ggaccucaaccaggacuuc

SEQ ID NO: 1205776 - RNA, 19 nt, Homo sapiens
  misc_RNA (1)...(19): siRNA sense strand
guaugagcaccguuacaau

SEQ ID NO: 1205777 - RNA, 19 nt, Homo sapiens
  misc_RNA (1)...(19): siRNA sense strand
gaugucccuuucucucucu

SEQ ID NO: 1205778 - RNA, 19 nt, Homo sapiens
  misc_RNA (1)...(19): siRNA sense strand
caguggauuucagcuucua

SEQ ID NO: 1205779 - RNA, 19 nt, Homo sapiens
  misc_RNA (1)...(19): siRNA sense strand
gagaaaggauggcaaagau

SEQ ID NO: 1205780 - RNA, 19 nt, Homo sapiens
  misc_RNA (1)...(19): siRNA sense strand
gcaaagauccaaaucaguu

SEQ ID NO: 1205781 - RNA, 19 nt, Homo sapiens
  misc_RNA (1)...(19): siRNA sense strand
caaacgggcugcagagaug

SEQ ID NO: 1205782 - RNA, 19 nt, Homo sapiens
  misc_RNA (1)...(19): siRNA sense strand
agauggagcuucaggcaaa

SEQ ID NO: 1205783 - RNA, 19 nt, Homo sapiens
  misc_RNA (1)...(19): siRNA sense strand
gacauucccuuggaccuuu

SEQ ID NO: 1205784 - RNA, 19 nt, Homo sapiens
  misc_RNA (1)...(19): siRNA sense strand
acagacaccucucucaugu

SEQ ID NO: 1205785 - RNA, 19 nt, Homo sapiens
  misc_RNA (1)...(19): siRNA sense strand
aggcaaaacuuacagcuua

SEQ ID NO: 1205786 - RNA, 19 nt, Homo sapiens
  misc_RNA (1)...(19): siRNA sense strand
ucagugaucugccauacca

SEQ ID NO: 1205787 - RNA, 19 nt, Homo sapiens
  misc_RNA (1)...(19): siRNA sense strand
ggacuucaguggauuucag

SEQ ID NO: 1205788 - RNA, 19 nt, Homo sapiens
  misc_RNA (1)...(19): siRNA sense strand
acacagauauacagcagau

SEQ ID NO: 1205789 - RNA, 19 nt, Homo sapiens
  misc_RNA (1)...(19): siRNA sense strand
ugacugcauugaaagaugu

SEQ ID NO: 1205790 - RNA, 19 nt, Homo sapiens
  misc_RNA (1)...(19): siRNA sense strand
cugcagagauggagcuuca

SEQ ID NO: 1205791 - RNA, 19 nt, Homo sapiens
  misc_RNA (1)...(19): siRNA sense strand
agacaccucucucauguac

SEQ ID NO: 1205792 - RNA, 19 nt, Homo sapiens
  misc_RNA (1)...(19): siRNA sense strand
cacugugacugcauugaaa

SEQ ID NO: 1205793 - RNA, 19 nt, Homo sapiens
  misc_RNA (1)...(19): siRNA sense strand
ucccugacaugcugagaaa

SEQ ID NO: 1205794 - RNA, 19 nt, Homo sapiens
  misc_RNA (1)...(19): siRNA sense strand
gucuguaacugguucauca

SEQ ID NO: 1205795 - RNA, 19 nt, Homo sapiens
  misc_RNA (1)...(19): siRNA sense strand
uggcaaagauccaaaucag

SEQ ID NO: 1205796 - RNA, 19 nt, Homo sapiens
  misc_RNA (1)...(19): siRNA sense strand
gcugagaaaggauggcaaa

SEQ ID NO: 1205797 - RNA, 19 nt, Homo sapiens
  misc_RNA (1)...(19): siRNA sense strand
ugagaaaggauggcaaaga

SEQ ID NO: 1205798 - RNA, 19 nt, Homo sapiens
  misc_RNA (1)...(19): siRNA sense strand
ggacauucccuuggaccuu

SEQ ID NO: 1205799 - RNA, 19 nt, Homo sapiens
  misc_RNA (1)...(19): siRNA sense strand
gugacugcauugaaagaug

SEQ ID NO: 1205800 - RNA, 19 nt, Homo sapiens
  misc_RNA (1)...(19): siRNA sense strand
uaugagcaccguuacaaug

SEQ ID NO: 1205801 - RNA, 19 nt, Homo sapiens
  misc_RNA (1)...(19): siRNA sense strand
ccuuggaccuuucuucauc

SEQ ID NO: 1205802 - RNA, 19 nt, Homo sapiens
  misc_RNA (1)...(19): siRNA sense strand
ccacugugacugcauugaa

SEQ ID NO: 1205803 - RNA, 19 nt, Homo sapiens
  misc_RNA (1)...(19): siRNA sense strand
uuacaaugccuauccuuca

SEQ ID NO: 1205804 - RNA, 19 nt, Homo sapiens
  misc_RNA (1)...(19): siRNA sense strand
cagcaaacacaccugucua

SEQ ID NO: 1205805 - RNA, 19 nt, Homo sapiens
  misc_RNA (1)...(19): siRNA sense strand
aaccaggacuucaguggau

SEQ ID NO: 1205806 - RNA, 19 nt, Homo sapiens
  misc_RNA (1)...(19): siRNA sense strand
gugcagauucuucgggauu

SEQ ID NO: 1205807 - RNA, 19 nt, Homo sapiens
  misc_RNA (1)...(19): siRNA sense strand
caaagauccaaaucaguuc

SEQ ID NO: 1205808 - RNA, 19 nt, Homo sapiens
  misc_RNA (1)...(19): siRNA sense strand
gagcuucaggcaaaacuua

SEQ ID NO: 1205809 - RNA, 19 nt, Homo sapiens
  misc_RNA (1)...(19): siRNA sense strand
ggacaaaacacagauauac

SEQ ID NO: 1205810 - RNA, 19 nt, Homo sapiens
  misc_RNA (1)...(19): siRNA sense strand
acagauauacagcagauag

SEQ ID NO: 1205811 - RNA, 19 nt, Homo sapiens
  misc_RNA (1)...(19): siRNA sense strand
auaccacugugacugcauu

SEQ ID NO: 1205812 - RNA, 19 nt, Homo sapiens
  misc_RNA (1)...(19): siRNA sense strand
ggcaaaacuuacagcuuaa

SEQ ID NO: 1205813 - RNA, 19 nt, Homo sapiens
  misc_RNA (1)...(19): siRNA sense strand
cacagacaccucucucaug

SEQ ID NO: 1205814 - RNA, 19 nt, Homo sapiens
  misc_RNA (1)...(19): siRNA sense strand
ucacagacaccucucucau

SEQ ID NO: 1205815 - RNA, 19 nt, Homo sapiens
  misc_RNA (1)...(19): siRNA sense strand
ucaaacgggcugcagagau

SEQ ID NO: 1205816 - RNA, 19 nt, Homo sapiens
  misc_RNA (1)...(19): siRNA sense strand
guaaaucuggaccaaguac

SEQ ID NO: 1205817 - RNA, 19 nt, Homo sapiens
  misc_RNA (1)...(19): siRNA sense strand
gauccaaaucaguucacaa

SEQ ID NO: 1205818 - RNA, 19 nt, Homo sapiens
  misc_RNA (1)...(19): siRNA sense strand
gcagauucuucgggauugg

SEQ ID NO: 1205819 - RNA, 19 nt, Homo sapiens
  misc_RNA (1)...(19): siRNA sense strand
ccaggacuucaguggauuu

SEQ ID NO: 1205820 - RNA, 19 nt, Homo sapiens
  misc_RNA (1)...(19): siRNA sense strand
ggcuguaugagcaccguua

SEQ ID NO: 1205821 - RNA, 19 nt, Homo sapiens
  misc_RNA (1)...(19): siRNA sense strand
ggaccucaaccaggacuuc

SEQ ID NO: 1205822 - RNA, 19 nt, Homo sapiens
  misc_RNA (1)...(19): siRNA sense strand
guaugagcaccguuacaau

SEQ ID NO: 1205823 - RNA, 19 nt, Homo sapiens
  misc_RNA (1)...(19): siRNA sense strand
gaugucccuuucucucucu

SEQ ID NO: 1205824 - RNA, 19 nt, Homo sapiens
  misc_RNA (1)...(19): siRNA sense strand
caguggauuucagcuucua

SEQ ID NO: 1205825 - RNA, 19 nt, Homo sapiens
  misc_RNA (1)...(19): siRNA sense strand
gagaaaggauggcaaagau

SEQ ID NO: 1205826 - RNA, 19 nt, Homo sapiens
  misc_RNA (1)...(19): siRNA sense strand
gcaaagauccaaaucaguu

SEQ ID NO: 1205827 - RNA, 19 nt, Homo sapiens
  misc_RNA (1)...(19): siRNA sense strand
caaacgggcugcagagaug

SEQ ID NO: 1205828 - RNA, 19 nt, Homo sapiens
  misc_RNA (1)...(19): siRNA sense strand
agauggagcuucaggcaaa

SEQ ID NO: 1205829 - RNA, 19 nt, Homo sapiens
  misc_RNA (1)...(19): siRNA sense strand
gacauucccuuggaccuuu

SEQ ID NO: 1205830 - RNA, 19 nt, Homo sapiens
  misc_RNA (1)...(19): siRNA sense strand
acagacaccucucucaugu

SEQ ID NO: 1205831 - RNA, 19 nt, Homo sapiens
  misc_RNA (1)...(19): siRNA sense strand
aggcaaaacuuacagcuua

SEQ ID NO: 1205832 - RNA, 19 nt, Homo sapiens
  misc_RNA (1)...(19): siRNA sense strand
ucagugaucugccauacca

SEQ ID NO: 1205833 - RNA, 19 nt, Homo sapiens
  misc_RNA (1)...(19): siRNA sense strand
ggacuucaguggauuucag

SEQ ID NO: 1205834 - RNA, 19 nt, Homo sapiens
  misc_RNA (1)...(19): siRNA sense strand
acacagauauacagcagau

SEQ ID NO: 1205835 - RNA, 19 nt, Homo sapiens
  misc_RNA (1)...(19): siRNA sense strand
ugacugcauugaaagaugu

SEQ ID NO: 1205836 - RNA, 19 nt, Homo sapiens
  misc_RNA (1)...(19): siRNA sense strand
cugcagagauggagcuuca

SEQ ID NO: 1205837 - RNA, 19 nt, Homo sapiens
  misc_RNA (1)...(19): siRNA sense strand
agacaccucucucauguac

SEQ ID NO: 1205838 - RNA, 19 nt, Homo sapiens
  misc_RNA (1)...(19): siRNA sense strand
cacugugacugcauugaaa

SEQ ID NO: 1205839 - RNA, 19 nt, Homo sapiens
  misc_RNA (1)...(19): siRNA sense strand
ucccugacaugcugagaaa

SEQ ID NO: 1205840 - RNA, 19 nt, Homo sapiens
  misc_RNA (1)...(19): siRNA sense strand
gucuguaacugguucauca

SEQ ID NO: 1205841 - RNA, 19 nt, Homo sapiens
  misc_RNA (1)...(19): siRNA sense strand
uggcaaagauccaaaucag

SEQ ID NO: 1205842 - RNA, 19 nt, Homo sapiens
  misc_RNA (1)...(19): siRNA sense strand
gcugagaaaggauggcaaa

SEQ ID NO: 1205843 - RNA, 19 nt, Homo sapiens
  misc_RNA (1)...(19): siRNA sense strand
ugagaaaggauggcaaaga

SEQ ID NO: 1205844 - RNA, 19 nt, Homo sapiens
  misc_RNA (1)...(19): siRNA sense strand
ggacauucccuuggaccuu

SEQ ID NO: 1205845 - RNA, 19 nt, Homo sapiens
  misc_RNA (1)...(19): siRNA sense strand
gugacugcauugaaagaug

SEQ ID NO: 1205846 - RNA, 19 nt, Homo sapiens
  misc_RNA (1)...(19): siRNA sense strand
uaugagcaccguuacaaug

SEQ ID NO: 1205847 - RNA, 19 nt, Homo sapiens
  misc_RNA (1)...(19): siRNA sense strand
ccuuggaccuuucuucauc

SEQ ID NO: 1205848 - RNA, 19 nt, Homo sapiens
  misc_RNA (1)...(19): siRNA sense strand
ccacugugacugcauugaa

SEQ ID NO: 1205849 - RNA, 19 nt, Homo sapiens
  misc_RNA (1)...(19): siRNA sense strand
uuacaaugccuauccuuca

SEQ ID NO: 1205850 - RNA, 19 nt, Homo sapiens
  misc_RNA (1)...(19): siRNA sense strand
cagcaaacacaccugucua

SEQ ID NO: 1205851 - RNA, 19 nt, Homo sapiens
  misc_RNA (1)...(19): siRNA sense strand
aaccaggacuucaguggau

SEQ ID NO: 1205852 - RNA, 19 nt, Homo sapiens
  misc_RNA (1)...(19): siRNA sense strand
gugcagauucuucgggauu

SEQ ID NO: 1205853 - RNA, 19 nt, Homo sapiens
  misc_RNA (1)...(19): siRNA sense strand
caaagauccaaaucaguuc

SEQ ID NO: 1205854 - RNA, 19 nt, Homo sapiens
  misc_RNA (1)...(19): siRNA sense strand
gagcuucaggcaaaacuua

SEQ ID NO: 1205855 - RNA, 19 nt, Homo sapiens
  misc_RNA (1)...(19): siRNA sense strand
ggacaaaacacagauauac

SEQ ID NO: 1205856 - RNA, 19 nt, Homo sapiens
  misc_RNA (1)...(19): siRNA sense strand
acagauauacagcagauag

SEQ ID NO: 1205857 - RNA, 19 nt, Homo sapiens
  misc_RNA (1)...(19): siRNA sense strand
auaccacugugacugcauu

SEQ ID NO: 1205858 - RNA, 19 nt, Homo sapiens
  misc_RNA (1)...(19): siRNA sense strand
ggcaaaacuuacagcuuaa

SEQ ID NO: 1205859 - RNA, 19 nt, Homo sapiens
  misc_RNA (1)...(19): siRNA sense strand
cacagacaccucucucaug

SEQ ID NO: 1205860 - RNA, 19 nt, Homo sapiens
  misc_RNA (1)...(19): siRNA sense strand
ucacagacaccucucucau

SEQ ID NO: 1205861 - RNA, 19 nt, Homo sapiens
  misc_RNA (1)...(19): siRNA sense strand
ucaaacgggcugcagagau

SEQ ID NO: 1205862 - RNA, 19 nt, Homo sapiens
  misc_RNA (1)...(19): siRNA sense strand
guaaaucuggaccaaguac

SEQ ID NO: 1205863 - RNA, 19 nt, Homo sapiens
  misc_RNA (1)...(19): siRNA sense strand
gauccaaaucaguucacaa

SEQ ID NO: 1205864 - RNA, 19 nt, Homo sapiens
  misc_RNA (1)...(19): siRNA sense strand
gcagauucuucgggauugg

SEQ ID NO: 1205865 - RNA, 19 nt, Homo sapiens
  misc_RNA (1)...(19): siRNA sense strand
ccaggacuucaguggauuu

SEQ ID NO: 1205866 - RNA, 19 nt, Homo sapiens
  misc_RNA (1)...(19): siRNA sense strand
ggcuguaugagcaccguua

SEQ ID NO: 1205867 - RNA, 19 nt, Homo sapiens
  misc_RNA (1)...(19): siRNA sense strand
ggaccucaaccaggacuuc

SEQ ID NO: 1205868 - RNA, 19 nt, Homo sapiens
  misc_RNA (1)...(19): siRNA sense strand
guaugagcaccguuacaau

SEQ ID NO: 1205869 - RNA, 19 nt, Homo sapiens
  misc_RNA (1)...(19): siRNA sense strand
gaugucccuuucucucucu

SEQ ID NO: 1205870 - RNA, 19 nt, Homo sapiens
  misc_RNA (1)...(19): siRNA sense strand
caguggauuucagcuucua

SEQ ID NO: 1205871 - RNA, 19 nt, Homo sapiens
  misc_RNA (1)...(19): siRNA sense strand
gagaaaggauggcaaagau

SEQ ID NO: 1205872 - RNA, 19 nt, Homo sapiens
  misc_RNA (1)...(19): siRNA sense strand
gcaaagauccaaaucaguu

SEQ ID NO: 1205873 - RNA, 19 nt, Homo sapiens
  misc_RNA (1)...(19): siRNA sense strand
caaacgggcugcagagaug

SEQ ID NO: 1205874 - RNA, 19 nt, Homo sapiens
  misc_RNA (1)...(19): siRNA sense strand
agauggagcuucaggcaaa

SEQ ID NO: 1205875 - RNA, 19 nt, Homo sapiens
  misc_RNA (1)...(19): siRNA sense strand
gacauucccuuggaccuuu

SEQ ID NO: 1205876 - RNA, 19 nt, Homo sapiens
  misc_RNA (1)...(19): siRNA sense strand
acagacaccucucucaugu

SEQ ID NO: 1205877 - RNA, 19 nt, Homo sapiens
  misc_RNA (1)...(19): siRNA sense strand
aggcaaaacuuacagcuua

SEQ ID NO: 1205878 - RNA, 19 nt, Homo sapiens
  misc_RNA (1)...(19): siRNA sense strand
ucagugaucugccauacca

SEQ ID NO: 1205879 - RNA, 19 nt, Homo sapiens
  misc_RNA (1)...(19): siRNA sense strand
ggacuucaguggauuucag

SEQ ID NO: 1205880 - RNA, 19 nt, Homo sapiens
  misc_RNA (1)...(19): siRNA sense strand
acacagauauacagcagau

SEQ ID NO: 1205881 - RNA, 19 nt, Homo sapiens
  misc_RNA (1)...(19): siRNA sense strand
ugacugcauugaaagaugu

SEQ ID NO: 1205882 - RNA, 19 nt, Homo sapiens
  misc_RNA (1)...(19): siRNA sense strand
cugcagagauggagcuuca

SEQ ID NO: 1205883 - RNA, 19 nt, Homo sapiens
  misc_RNA (1)...(19): siRNA sense strand
agacaccucucucauguac

SEQ ID NO: 1205884 - RNA, 19 nt, Homo sapiens
  misc_RNA (1)...(19): siRNA sense strand
cacugugacugcauugaaa

SEQ ID NO: 1205885 - RNA, 19 nt, Homo sapiens
  misc_RNA (1)...(19): siRNA sense strand
ucccugacaugcugagaaa

SEQ ID NO: 1205886 - RNA, 19 nt, Homo sapiens
  misc_RNA (1)...(19): siRNA sense strand
gucuguaacugguucauca

SEQ ID NO: 1205887 - RNA, 19 nt, Homo sapiens
  misc_RNA (1)...(19): siRNA sense strand
uggcaaagauccaaaucag

SEQ ID NO: 1205888 - RNA, 19 nt, Homo sapiens
  misc_RNA (1)...(19): siRNA sense strand
gcugagaaaggauggcaaa

SEQ ID NO: 1205889 - RNA, 19 nt, Homo sapiens
  misc_RNA (1)...(19): siRNA sense strand
ugagaaaggauggcaaaga

SEQ ID NO: 1205890 - RNA, 19 nt, Homo sapiens
  misc_RNA (1)...(19): siRNA sense strand
ggacauucccuuggaccuu

SEQ ID NO: 1205891 - RNA, 19 nt, Homo sapiens
  misc_RNA (1)...(19): siRNA sense strand
gugacugcauugaaagaug

SEQ ID NO: 1205892 - RNA, 19 nt, Homo sapiens
  misc_RNA (1)...(19): siRNA sense strand
uaugagcaccguuacaaug

SEQ ID NO: 1205893 - RNA, 19 nt, Homo sapiens
  misc_RNA (1)...(19): siRNA sense strand
ccuuggaccuuucuucauc

SEQ ID NO: 1205894 - RNA, 19 nt, Homo sapiens
  misc_RNA (1)...(19): siRNA sense strand
ccacugugacugcauugaa

SEQ ID NO: 1205895 - RNA, 19 nt, Homo sapiens
  misc_RNA (1)...(19): siRNA sense strand
uuacaaugccuauccuuca

SEQ ID NO: 1205896 - RNA, 19 nt, Homo sapiens
  misc_RNA (1)...(19): siRNA sense strand
cagcaaacacaccugucua

SEQ ID NO: 1205897 - RNA, 19 nt, Homo sapiens
  misc_RNA (1)...(19): siRNA sense strand
aaccaggacuucaguggau

SEQ ID NO: 1205898 - RNA, 19 nt, Homo sapiens
  misc_RNA (1)...(19): siRNA sense strand
gugcagauucuucgggauu

SEQ ID NO: 1205899 - RNA, 19 nt, Homo sapiens
  misc_RNA (1)...(19): siRNA sense strand
caaagauccaaaucaguuc

SEQ ID NO: 1205900 - RNA, 19 nt, Homo sapiens
  misc_RNA (1)...(19): siRNA sense strand
gagcuucaggcaaaacuua

SEQ ID NO: 1205901 - RNA, 19 nt, Homo sapiens
  misc_RNA (1)...(19): siRNA sense strand
ggacaaaacacagauauac

SEQ ID NO: 1205902 - RNA, 19 nt, Homo sapiens
  misc_RNA (1)...(19): siRNA sense strand
acagauauacagcagauag

SEQ ID NO: 1205903 - RNA, 19 nt, Homo sapiens
  misc_RNA (1)...(19): siRNA sense strand
auaccacugugacugcauu

SEQ ID NO: 1205904 - RNA, 19 nt, Homo sapiens
  misc_RNA (1)...(19): siRNA sense strand
ggcaaaacuuacagcuuaa

SEQ ID NO: 1205905 - RNA, 19 nt, Homo sapiens
  misc_RNA (1)...(19): siRNA sense strand
cacagacaccucucucaug

SEQ ID NO: 1205906 - RNA, 19 nt, Homo sapiens
  misc_RNA (1)...(19): siRNA sense strand
ucacagacaccucucucau

SEQ ID NO: 1205907 - RNA, 19 nt, Homo sapiens
  misc_RNA (1)...(19): siRNA sense strand
ucaaacgggcugcagagau

SEQ ID NO: 1205908 - RNA, 19 nt, Homo sapiens
  misc_RNA (1)...(19): siRNA sense strand
guaaaucuggaccaaguac

SEQ ID NO: 1205909 - RNA, 19 nt, Homo sapiens
  misc_RNA (1)...(19): siRNA sense strand
gauccaaaucaguucacaa

SEQ ID NO: 1205910 - RNA, 19 nt, Homo sapiens
  misc_RNA (1)...(19): siRNA sense strand
gcagauucuucgggauugg

SEQ ID NO: 1205911 - RNA, 19 nt, Homo sapiens
  misc_RNA (1)...(19): siRNA sense strand
ccaggacuucaguggauuu

SEQ ID NO: 1205912 - RNA, 19 nt, Homo sapiens
  misc_RNA (1)...(19): siRNA sense strand
ggcuguaugagcaccguua

SEQ ID NO: 1205913 - RNA, 19 nt, Homo sapiens
  misc_RNA (1)...(19): siRNA sense strand
ggaccucaaccaggacuuc

SEQ ID NO: 1205914 - RNA, 19 nt, Homo sapiens
  misc_RNA (1)...(19): siRNA sense strand
guaugagcaccguuacaau

SEQ ID NO: 1205915 - RNA, 19 nt, Homo sapiens
  misc_RNA (1)...(19): siRNA sense strand
gaugucccuuucucucucu

SEQ ID NO: 1205916 - RNA, 19 nt, Homo sapiens
  misc_RNA (1)...(19): siRNA sense strand
caguggauuucagcuucua

SEQ ID NO: 1205917 - RNA, 19 nt, Homo sapiens
  misc_RNA (1)...(19): siRNA sense strand
gagaaaggauggcaaagau

SEQ ID NO: 1205918 - RNA, 19 nt, Homo sapiens
  misc_RNA (1)...(19): siRNA sense strand
gcaaagauccaaaucaguu

SEQ ID NO: 1205919 - RNA, 19 nt, Homo sapiens
  misc_RNA (1)...(19): siRNA sense strand
caaacgggcugcagagaug

SEQ ID NO: 1205920 - RNA, 19 nt, Homo sapiens
  misc_RNA (1)...(19): siRNA sense strand
agauggagcuucaggcaaa

SEQ ID NO: 1205921 - RNA, 19 nt, Homo sapiens
  misc_RNA (1)...(19): siRNA sense strand
gacauucccuuggaccuuu

SEQ ID NO: 1205922 - RNA, 19 nt, Homo sapiens
  misc_RNA (1)...(19): siRNA sense strand
gcauggacauucccuugga

SEQ ID NO: 1205923 - RNA, 19 nt, Homo sapiens
  misc_RNA (1)...(19): siRNA sense strand
acagacaccucucucaugu

SEQ ID NO: 1205924 - RNA, 19 nt, Homo sapiens
  misc_RNA (1)...(19): siRNA sense strand
aggcaaaacuuacagcuua

SEQ ID NO: 1205925 - RNA, 19 nt, Homo sapiens
  misc_RNA (1)...(19): siRNA sense strand
ucagugaucugccauacca

SEQ ID NO: 1205926 - RNA, 19 nt, Homo sapiens
  misc_RNA (1)...(19): siRNA sense strand
ggacuucaguggauuucag

SEQ ID NO: 1205927 - RNA, 19 nt, Homo sapiens
  misc_RNA (1)...(19): siRNA sense strand
acacagauauacagcagau

SEQ ID NO: 1205928 - RNA, 19 nt, Homo sapiens
  misc_RNA (1)...(19): siRNA sense strand
ugacugcauugaaagaugu

SEQ ID NO: 1205929 - RNA, 19 nt, Homo sapiens
  misc_RNA (1)...(19): siRNA sense strand
cugcagagauggagcuuca

SEQ ID NO: 1205930 - RNA, 19 nt, Homo sapiens
  misc_RNA (1)...(19): siRNA sense strand
agacaccucucucauguac

SEQ ID NO: 1205931 - RNA, 19 nt, Homo sapiens
  misc_RNA (1)...(19): siRNA sense strand
cacugugacugcauugaaa

SEQ ID NO: 1205932 - RNA, 19 nt, Homo sapiens
  misc_RNA (1)...(19): siRNA sense strand
ucccugacaugcugagaaa

SEQ ID NO: 1205933 - RNA, 19 nt, Homo sapiens
  misc_RNA (1)...(19): siRNA sense strand
gucuguaacugguucauca

SEQ ID NO: 1205934 - RNA, 19 nt, Homo sapiens
  misc_RNA (1)...(19): siRNA sense strand
uggcaaagauccaaaucag

SEQ ID NO: 1205935 - RNA, 19 nt, Homo sapiens
  misc_RNA (1)...(19): siRNA sense strand
gcugagaaaggauggcaaa

SEQ ID NO: 1205936 - RNA, 19 nt, Homo sapiens
  misc_RNA (1)...(19): siRNA sense strand
ugagaaaggauggcaaaga

SEQ ID NO: 1205937 - RNA, 19 nt, Homo sapiens
  misc_RNA (1)...(19): siRNA sense strand
gaggacagcauggacauuc

SEQ ID NO: 1205938 - RNA, 19 nt, Homo sapiens
  misc_RNA (1)...(19): siRNA sense strand
ggacauucccuuggaccuu

SEQ ID NO: 1205939 - RNA, 19 nt, Homo sapiens
  misc_RNA (1)...(19): siRNA sense strand
gugacugcauugaaagaug

SEQ ID NO: 1205940 - RNA, 19 nt, Homo sapiens
  misc_RNA (1)...(19): siRNA sense strand
uaugagcaccguuacaaug

SEQ ID NO: 1205941 - RNA, 19 nt, Homo sapiens
  misc_RNA (1)...(19): siRNA sense strand
ccacugugacugcauugaa

SEQ ID NO: 1205942 - RNA, 19 nt, Homo sapiens
  misc_RNA (1)...(19): siRNA sense strand
ccuuggaccuuucuucauc

SEQ ID NO: 1205943 - RNA, 19 nt, Homo sapiens
  misc_RNA (1)...(19): siRNA sense strand
uuacaaugccuauccuuca

SEQ ID NO: 1205944 - RNA, 19 nt, Homo sapiens
  misc_RNA (1)...(19): siRNA sense strand
gugcagauucuucgggauu

SEQ ID NO: 1205945 - RNA, 19 nt, Homo sapiens
  misc_RNA (1)...(19): siRNA sense strand
aaccaggacuucaguggau

SEQ ID NO: 1205946 - RNA, 19 nt, Homo sapiens
  misc_RNA (1)...(19): siRNA sense strand
cagcaaacacaccugucua

SEQ ID NO: 1205947 - RNA, 19 nt, Homo sapiens
  misc_RNA (1)...(19): siRNA sense strand
caaagauccaaaucaguuc

SEQ ID NO: 1205948 - RNA, 19 nt, Homo sapiens
  misc_RNA (1)...(19): siRNA sense strand
gagcuucaggcaaaacuua

SEQ ID NO: 1205949 - RNA, 19 nt, Homo sapiens
  misc_RNA (1)...(19): siRNA sense strand
ggacaaaacacagauauac

SEQ ID NO: 1205950 - RNA, 19 nt, Homo sapiens
  misc_RNA (1)...(19): siRNA sense strand
acagauauacagcagauag

SEQ ID NO: 1205951 - RNA, 19 nt, Homo sapiens
  misc_RNA (1)...(19): siRNA sense strand
auaccacugugacugcauu

SEQ ID NO: 1205952 - RNA, 19 nt, Homo sapiens
  misc_RNA (1)...(19): siRNA sense strand
ggcaaaacuuacagcuuaa

SEQ ID NO: 1205953 - RNA, 19 nt, Homo sapiens
  misc_RNA (1)...(19): siRNA sense strand
cacagacaccucucucaug

SEQ ID NO: 1205954 - RNA, 19 nt, Homo sapiens
  misc_RNA (1)...(19): siRNA sense strand
ucacagacaccucucucau

SEQ ID NO: 1205955 - RNA, 19 nt, Homo sapiens
  misc_RNA (1)...(19): siRNA sense strand
ucaaacgggcugcagagau

SEQ ID NO: 1205956 - RNA, 19 nt, Homo sapiens
  misc_RNA (1)...(19): siRNA sense strand
guaaaucuggaccaaguac

SEQ ID NO: 1205957 - RNA, 19 nt, Homo sapiens
  misc_RNA (1)...(19): siRNA sense strand
gauccaaaucaguucacaa

SEQ ID NO: 1205958 - RNA, 19 nt, Homo sapiens
  misc_RNA (1)...(19): siRNA sense strand
ccaggacuucaguggauuu

SEQ ID NO: 1205959 - RNA, 19 nt, Homo sapiens
  misc_RNA (1)...(19): siRNA sense strand
gcagauucuucgggauugg

SEQ ID NO: 1205960 - RNA, 19 nt, Homo sapiens
  misc_RNA (1)...(19): siRNA sense strand
gaugucccuuucucucucu

SEQ ID NO: 1205961 - RNA, 19 nt, Homo sapiens
  misc_RNA (1)...(19): siRNA sense strand
ggaccucaaccaggacuuc

SEQ ID NO: 1205962 - RNA, 19 nt, Homo sapiens
  misc_RNA (1)...(19): siRNA sense strand
ggcuguaugagcaccguua

SEQ ID NO: 1205963 - RNA, 19 nt, Homo sapiens
  misc_RNA (1)...(19): siRNA sense strand
guaugagcaccguuacaau

SEQ ID NO: 1205964 - RNA, 19 nt, Homo sapiens
  misc_RNA (1)...(19): siRNA sense strand
caguggauuucagcuucua

SEQ ID NO: 1205965 - RNA, 19 nt, Homo sapiens
  misc_RNA (1)...(19): siRNA sense strand
gagaaaggauggcaaagau

SEQ ID NO: 1205966 - RNA, 19 nt, Homo sapiens
  misc_RNA (1)...(19): siRNA sense strand
gcaaagauccaaaucaguu

SEQ ID NO: 1205967 - RNA, 19 nt, Homo sapiens
  misc_RNA (1)...(19): siRNA sense strand
caaacgggcugcagagaug

SEQ ID NO: 1205968 - RNA, 19 nt, Homo sapiens
  misc_RNA (1)...(19): siRNA sense strand
agauggagcuucaggcaaa

SEQ ID NO: 1205969 - RNA, 19 nt, Homo sapiens
  misc_RNA (1)...(19): siRNA sense strand
gacauucccuuggaccuuu

SEQ ID NO: 1205970 - RNA, 19 nt, Homo sapiens
  misc_RNA (1)...(19): siRNA sense strand
gcauggacauucccuugga

SEQ ID NO: 1205971 - RNA, 19 nt, Homo sapiens
  misc_RNA (1)...(19): siRNA sense strand
acagacaccucucucaugu

SEQ ID NO: 1205972 - RNA, 19 nt, Homo sapiens
  misc_RNA (1)...(19): siRNA sense strand
aggcaaaacuuacagcuua

SEQ ID NO: 1205973 - RNA, 19 nt, Homo sapiens
  misc_RNA (1)...(19): siRNA sense strand
ucagugaucugccauacca

SEQ ID NO: 1205974 - RNA, 19 nt, Homo sapiens
  misc_RNA (1)...(19): siRNA sense strand
ggacuucaguggauuucag

SEQ ID NO: 1205975 - RNA, 19 nt, Homo sapiens
  misc_RNA (1)...(19): siRNA sense strand
acacagauauacagcagau

SEQ ID NO: 1205976 - RNA, 19 nt, Homo sapiens
  misc_RNA (1)...(19): siRNA sense strand
ugacugcauugaaagaugu

SEQ ID NO: 1205977 - RNA, 19 nt, Homo sapiens
  misc_RNA (1)...(19): siRNA sense strand
cugcagagauggagcuuca

SEQ ID NO: 1205978 - RNA, 19 nt, Homo sapiens
  misc_RNA (1)...(19): siRNA sense strand
agacaccucucucauguac

SEQ ID NO: 1205979 - RNA, 19 nt, Homo sapiens
  misc_RNA (1)...(19): siRNA sense strand
cacugugacugcauugaaa

SEQ ID NO: 1205980 - RNA, 19 nt, Homo sapiens
  misc_RNA (1)...(19): siRNA sense strand
ucccugacaugcugagaaa

SEQ ID NO: 1205981 - RNA, 19 nt, Homo sapiens
  misc_RNA (1)...(19): siRNA sense strand
gucuguaacugguucauca

SEQ ID NO: 1205982 - RNA, 19 nt, Homo sapiens
  misc_RNA (1)...(19): siRNA sense strand
uggcaaagauccaaaucag

SEQ ID NO: 1205983 - RNA, 19 nt, Homo sapiens
  misc_RNA (1)...(19): siRNA sense strand
gcugagaaaggauggcaaa

SEQ ID NO: 1205984 - RNA, 19 nt, Homo sapiens
  misc_RNA (1)...(19): siRNA sense strand
ugagaaaggauggcaaaga

SEQ ID NO: 1205985 - RNA, 19 nt, Homo sapiens
  misc_RNA (1)...(19): siRNA sense strand
gaggacagcauggacauuc

SEQ ID NO: 1205986 - RNA, 19 nt, Homo sapiens
  misc_RNA (1)...(19): siRNA sense strand
ggacauucccuuggaccuu

SEQ ID NO: 1205987 - RNA, 19 nt, Homo sapiens
  misc_RNA (1)...(19): siRNA sense strand
gugacugcauugaaagaug

SEQ ID NO: 1205988 - RNA, 19 nt, Homo sapiens
  misc_RNA (1)...(19): siRNA sense strand
uaugagcaccguuacaaug

SEQ ID NO: 1205989 - RNA, 19 nt, Homo sapiens
  misc_RNA (1)...(19): siRNA sense strand
ccacugugacugcauugaa

SEQ ID NO: 1205990 - RNA, 19 nt, Homo sapiens
  misc_RNA (1)...(19): siRNA sense strand
ccuuggaccuuucuucauc

SEQ ID NO: 1205991 - RNA, 19 nt, Homo sapiens
  misc_RNA (1)...(19): siRNA sense strand
uuacaaugccuauccuuca

SEQ ID NO: 1205992 - RNA, 19 nt, Homo sapiens
  misc_RNA (1)...(19): siRNA sense strand
gugcagauucuucgggauu

SEQ ID NO: 1205993 - RNA, 19 nt, Homo sapiens
  misc_RNA (1)...(19): siRNA sense strand
aaccaggacuucaguggau

SEQ ID NO: 1205994 - RNA, 19 nt, Homo sapiens
  misc_RNA (1)...(19): siRNA sense strand
cagcaaacacaccugucua

SEQ ID NO: 1205995 - RNA, 19 nt, Homo sapiens
  misc_RNA (1)...(19): siRNA sense strand
caaagauccaaaucaguuc

SEQ ID NO: 1205996 - RNA, 19 nt, Homo sapiens
  misc_RNA (1)...(19): siRNA sense strand
gagcuucaggcaaaacuua

SEQ ID NO: 1205997 - RNA, 19 nt, Homo sapiens
  misc_RNA (1)...(19): siRNA sense strand
ggacaaaacacagauauac

SEQ ID NO: 1205998 - RNA, 19 nt, Homo sapiens
  misc_RNA (1)...(19): siRNA sense strand
acagauauacagcagauag

SEQ ID NO: 1205999 - RNA, 19 nt, Homo sapiens
  misc_RNA (1)...(19): siRNA sense strand
auaccacugugacugcauu

SEQ ID NO: 1206000 - RNA, 19 nt, Homo sapiens
  misc_RNA (1)...(19): siRNA sense strand
ggcaaaacuuacagcuuaa

SEQ ID NO: 1206001 - RNA, 19 nt, Homo sapiens
  misc_RNA (1)...(19): siRNA sense strand
cacagacaccucucucaug

SEQ ID NO: 1206002 - RNA, 19 nt, Homo sapiens
  misc_RNA (1)...(19): siRNA sense strand
ucacagacaccucucucau

SEQ ID NO: 1206003 - RNA, 19 nt, Homo sapiens
  misc_RNA (1)...(19): siRNA sense strand
ucaaacgggcugcagagau

SEQ ID NO: 1206004 - RNA, 19 nt, Homo sapiens
  misc_RNA (1)...(19): siRNA sense strand
guaaaucuggaccaaguac

SEQ ID NO: 1206005 - RNA, 19 nt, Homo sapiens
  misc_RNA (1)...(19): siRNA sense strand
gauccaaaucaguucacaa

SEQ ID NO: 1206006 - RNA, 19 nt, Homo sapiens
  misc_RNA (1)...(19): siRNA sense strand
ccaggacuucaguggauuu

SEQ ID NO: 1206007 - RNA, 19 nt, Homo sapiens
  misc_RNA (1)...(19): siRNA sense strand
gcagauucuucgggauugg

SEQ ID NO: 1206008 - RNA, 19 nt, Homo sapiens
  misc_RNA (1)...(19): siRNA sense strand
gaugucccuuucucucucu

SEQ ID NO: 1206009 - RNA, 19 nt, Homo sapiens
  misc_RNA (1)...(19): siRNA sense strand
ggaccucaaccaggacuuc

SEQ ID NO: 1206010 - RNA, 19 nt, Homo sapiens
  misc_RNA (1)...(19): siRNA sense strand
ggcuguaugagcaccguua

SEQ ID NO: 1206011 - RNA, 19 nt, Homo sapiens
  misc_RNA (1)...(19): siRNA sense strand
guaugagcaccguuacaau

SEQ ID NO: 1206012 - RNA, 19 nt, Homo sapiens
  misc_RNA (1)...(19): siRNA sense strand
caguggauuucagcuucua

SEQ ID NO: 1206013 - RNA, 19 nt, Homo sapiens
  misc_RNA (1)...(19): siRNA sense strand
gagaaaggauggcaaagau

SEQ ID NO: 1206014 - RNA, 19 nt, Homo sapiens
  misc_RNA (1)...(19): siRNA sense strand
gcaaagauccaaaucaguu

SEQ ID NO: 1206015 - RNA, 19 nt, Homo sapiens
  misc_RNA (1)...(19): siRNA sense strand
caaacgggcugcagagaug

SEQ ID NO: 1206016 - RNA, 19 nt, Homo sapiens
  misc_RNA (1)...(19): siRNA sense strand
agauggagcuucaggcaaa

SEQ ID NO: 1206017 - RNA, 19 nt, Homo sapiens
  misc_RNA (1)...(19): siRNA sense strand
gacauucccuuggaccuuu

SEQ ID NO: 1206018 - RNA, 19 nt, Homo sapiens
  misc_RNA (1)...(19): siRNA sense strand
gcauggacauucccuugga

SEQ ID NO: 1206019 - RNA, 19 nt, Homo sapiens
  misc_RNA (1)...(19): siRNA sense strand
acagacaccucucucaugu

SEQ ID NO: 1206020 - RNA, 19 nt, Homo sapiens
  misc_RNA (1)...(19): siRNA sense strand
aggcaaaacuuacagcuua

SEQ ID NO: 1206021 - RNA, 19 nt, Homo sapiens
  misc_RNA (1)...(19): siRNA sense strand
ucagugaucugccauacca

SEQ ID NO: 1206022 - RNA, 19 nt, Homo sapiens
  misc_RNA (1)...(19): siRNA sense strand
ggacuucaguggauuucag

SEQ ID NO: 1206023 - RNA, 19 nt, Homo sapiens
  misc_RNA (1)...(19): siRNA sense strand
acacagauauacagcagau

SEQ ID NO: 1206024 - RNA, 19 nt, Homo sapiens
  misc_RNA (1)...(19): siRNA sense strand
ugacugcauugaaagaugu

SEQ ID NO: 1206025 - RNA, 19 nt, Homo sapiens
  misc_RNA (1)...(19): siRNA sense strand
cugcagagauggagcuuca

SEQ ID NO: 1206026 - RNA, 19 nt, Homo sapiens
  misc_RNA (1)...(19): siRNA sense strand
agacaccucucucauguac

SEQ ID NO: 1206027 - RNA, 19 nt, Homo sapiens
  misc_RNA (1)...(19): siRNA sense strand
cacugugacugcauugaaa

SEQ ID NO: 1206028 - RNA, 19 nt, Homo sapiens
  misc_RNA (1)...(19): siRNA sense strand
ucccugacaugcugagaaa

SEQ ID NO: 1206029 - RNA, 19 nt, Homo sapiens
  misc_RNA (1)...(19): siRNA sense strand
gucuguaacugguucauca

SEQ ID NO: 1206030 - RNA, 19 nt, Homo sapiens
  misc_RNA (1)...(19): siRNA sense strand
uggcaaagauccaaaucag

SEQ ID NO: 1206031 - RNA, 19 nt, Homo sapiens
  misc_RNA (1)...(19): siRNA sense strand
gcugagaaaggauggcaaa

SEQ ID NO: 1206032 - RNA, 19 nt, Homo sapiens
  misc_RNA (1)...(19): siRNA sense strand
ugagaaaggauggcaaaga

SEQ ID NO: 1206033 - RNA, 19 nt, Homo sapiens
  misc_RNA (1)...(19): siRNA sense strand
gaggacagcauggacauuc

SEQ ID NO: 1206034 - RNA, 19 nt, Homo sapiens
  misc_RNA (1)...(19): siRNA sense strand
ggacauucccuuggaccuu

SEQ ID NO: 1206035 - RNA, 19 nt, Homo sapiens
  misc_RNA (1)...(19): siRNA sense strand
gugacugcauugaaagaug

SEQ ID NO: 1206036 - RNA, 19 nt, Homo sapiens
  misc_RNA (1)...(19): siRNA sense strand
uaugagcaccguuacaaug

SEQ ID NO: 1206037 - RNA, 19 nt, Homo sapiens
  misc_RNA (1)...(19): siRNA sense strand
ccacugugacugcauugaa

SEQ ID NO: 1206038 - RNA, 19 nt, Homo sapiens
  misc_RNA (1)...(19): siRNA sense strand
ccuuggaccuuucuucauc

SEQ ID NO: 1206039 - RNA, 19 nt, Homo sapiens
  misc_RNA (1)...(19): siRNA sense strand
uuacaaugccuauccuuca

SEQ ID NO: 1206040 - RNA, 19 nt, Homo sapiens
  misc_RNA (1)...(19): siRNA sense strand
gugcagauucuucgggauu

SEQ ID NO: 1206041 - RNA, 19 nt, Homo sapiens
  misc_RNA (1)...(19): siRNA sense strand
aaccaggacuucaguggau

SEQ ID NO: 1206042 - RNA, 19 nt, Homo sapiens
  misc_RNA (1)...(19): siRNA sense strand
cagcaaacacaccugucua

SEQ ID NO: 1206043 - RNA, 19 nt, Homo sapiens
  misc_RNA (1)...(19): siRNA sense strand
caaagauccaaaucaguuc

SEQ ID NO: 1206044 - RNA, 19 nt, Homo sapiens
  misc_RNA (1)...(19): siRNA sense strand
gagcuucaggcaaaacuua

SEQ ID NO: 1206045 - RNA, 19 nt, Homo sapiens
  misc_RNA (1)...(19): siRNA sense strand
ggacaaaacacagauauac

SEQ ID NO: 1206046 - RNA, 19 nt, Homo sapiens
  misc_RNA (1)...(19): siRNA sense strand
acagauauacagcagauag

SEQ ID NO: 1206047 - RNA, 19 nt, Homo sapiens
  misc_RNA (1)...(19): siRNA sense strand
auaccacugugacugcauu

SEQ ID NO: 1206048 - RNA, 19 nt, Homo sapiens
  misc_RNA (1)...(19): siRNA sense strand
ggcaaaacuuacagcuuaa

SEQ ID NO: 1206049 - RNA, 19 nt, Homo sapiens
  misc_RNA (1)...(19): siRNA sense strand
cacagacaccucucucaug

SEQ ID NO: 1206050 - RNA, 19 nt, Homo sapiens
  misc_RNA (1)...(19): siRNA sense strand
ucacagacaccucucucau

SEQ ID NO: 1206051 - RNA, 19 nt, Homo sapiens
  misc_RNA (1)...(19): siRNA sense strand
ucaaacgggcugcagagau

SEQ ID NO: 1206052 - RNA, 19 nt, Homo sapiens
  misc_RNA (1)...(19): siRNA sense strand
guaaaucuggaccaaguac

SEQ ID NO: 1206053 - RNA, 19 nt, Homo sapiens
  misc_RNA (1)...(19): siRNA sense strand
gauccaaaucaguucacaa

SEQ ID NO: 1206054 - RNA, 19 nt, Homo sapiens
  misc_RNA (1)...(19): siRNA sense strand
ccaggacuucaguggauuu

SEQ ID NO: 1206055 - RNA, 19 nt, Homo sapiens
  misc_RNA (1)...(19): siRNA sense strand
gcagauucuucgggauugg

SEQ ID NO: 1206056 - RNA, 19 nt, Homo sapiens
  misc_RNA (1)...(19): siRNA sense strand
gaugucccuuucucucucu

SEQ ID NO: 1206057 - RNA, 19 nt, Homo sapiens
  misc_RNA (1)...(19): siRNA sense strand
ggaccucaaccaggacuuc

SEQ ID NO: 1206058 - RNA, 19 nt, Homo sapiens
  misc_RNA (1)...(19): siRNA sense strand
ggcuguaugagcaccguua

SEQ ID NO: 1206059 - RNA, 19 nt, Homo sapiens
  misc_RNA (1)...(19): siRNA sense strand
guaugagcaccguuacaau

SEQ ID NO: 1206060 - RNA, 19 nt, Homo sapiens
  misc_RNA (1)...(19): siRNA sense strand
caguggauuucagcuucua

SEQ ID NO: 1206061 - RNA, 19 nt, Homo sapiens
  misc_RNA (1)...(19): siRNA sense strand
gagaaaggauggcaaagau

SEQ ID NO: 1206062 - RNA, 19 nt, Homo sapiens
  misc_RNA (1)...(19): siRNA sense strand
gcaaagauccaaaucaguu

SEQ ID NO: 1206063 - RNA, 19 nt, Homo sapiens
  misc_RNA (1)...(19): siRNA sense strand
caaacgggcugcagagaug

SEQ ID NO: 1206064 - RNA, 19 nt, Homo sapiens
  misc_RNA (1)...(19): siRNA sense strand
agauggagcuucaggcaaa

SEQ ID NO: 1206065 - RNA, 19 nt, Homo sapiens
  misc_RNA (1)...(19): siRNA sense strand
gacauucccuuggaccuuu

SEQ ID NO: 1206066 - RNA, 19 nt, Homo sapiens
  misc_RNA (1)...(19): siRNA sense strand
gcauggacauucccuugga

SEQ ID NO: 1206067 - RNA, 19 nt, Homo sapiens
  misc_RNA (1)...(19): siRNA sense strand
acagacaccucucucaugu

SEQ ID NO: 1206068 - RNA, 19 nt, Homo sapiens
  misc_RNA (1)...(19): siRNA sense strand
aggcaaaacuuacagcuua

SEQ ID NO: 1206069 - RNA, 19 nt, Homo sapiens
  misc_RNA (1)...(19): siRNA sense strand
ucagugaucugccauacca

SEQ ID NO: 1206070 - RNA, 19 nt, Homo sapiens
  misc_RNA (1)...(19): siRNA sense strand
ggacuucaguggauuucag

SEQ ID NO: 1206071 - RNA, 19 nt, Homo sapiens
  misc_RNA (1)...(19): siRNA sense strand
acacagauauacagcagau

SEQ ID NO: 1206072 - RNA, 19 nt, Homo sapiens
  misc_RNA (1)...(19): siRNA sense strand
ugacugcauugaaagaugu

SEQ ID NO: 1206073 - RNA, 19 nt, Homo sapiens
  misc_RNA (1)...(19): siRNA sense strand
cugcagagauggagcuuca

SEQ ID NO: 1206074 - RNA, 19 nt, Homo sapiens
  misc_RNA (1)...(19): siRNA sense strand
agacaccucucucauguac

SEQ ID NO: 1206075 - RNA, 19 nt, Homo sapiens
  misc_RNA (1)...(19): siRNA sense strand
cacugugacugcauugaaa

SEQ ID NO: 1206076 - RNA, 19 nt, Homo sapiens
  misc_RNA (1)...(19): siRNA sense strand
ucccugacaugcugagaaa

SEQ ID NO: 1206077 - RNA, 19 nt, Homo sapiens
  misc_RNA (1)...(19): siRNA sense strand
gucuguaacugguucauca

SEQ ID NO: 1206078 - RNA, 19 nt, Homo sapiens
  misc_RNA (1)...(19): siRNA sense strand
uggcaaagauccaaaucag

SEQ ID NO: 1206079 - RNA, 19 nt, Homo sapiens
  misc_RNA (1)...(19): siRNA sense strand
gcugagaaaggauggcaaa

SEQ ID NO: 1206080 - RNA, 19 nt, Homo sapiens
  misc_RNA (1)...(19): siRNA sense strand
ugagaaaggauggcaaaga

SEQ ID NO: 1206081 - RNA, 19 nt, Homo sapiens
  misc_RNA (1)...(19): siRNA sense strand
gaggacagcauggacauuc

SEQ ID NO: 1206082 - RNA, 19 nt, Homo sapiens
  misc_RNA (1)...(19): siRNA sense strand
ggacauucccuuggaccuu

SEQ ID NO: 1206083 - RNA, 19 nt, Homo sapiens
  misc_RNA (1)...(19): siRNA sense strand
gugacugcauugaaagaug

SEQ ID NO: 1206084 - RNA, 19 nt, Homo sapiens
  misc_RNA (1)...(19): siRNA sense strand
uaugagcaccguuacaaug

SEQ ID NO: 1206085 - RNA, 19 nt, Homo sapiens
  misc_RNA (1)...(19): siRNA sense strand
ccacugugacugcauugaa

SEQ ID NO: 1206086 - RNA, 19 nt, Homo sapiens
  misc_RNA (1)...(19): siRNA sense strand
ccuuggaccuuucuucauc

SEQ ID NO: 1206087 - RNA, 19 nt, Homo sapiens
  misc_RNA (1)...(19): siRNA sense strand
uuacaaugccuauccuuca

SEQ ID NO: 1206088 - RNA, 19 nt, Homo sapiens
  misc_RNA (1)...(19): siRNA sense strand
gugcagauucuucgggauu

SEQ ID NO: 1206089 - RNA, 19 nt, Homo sapiens
  misc_RNA (1)...(19): siRNA sense strand
aaccaggacuucaguggau

SEQ ID NO: 1206090 - RNA, 19 nt, Homo sapiens
  misc_RNA (1)...(19): siRNA sense strand
cagcaaacacaccugucua

SEQ ID NO: 1206091 - RNA, 19 nt, Homo sapiens
  misc_RNA (1)...(19): siRNA sense strand
caaagauccaaaucaguuc

SEQ ID NO: 1206092 - RNA, 19 nt, Homo sapiens
  misc_RNA (1)...(19): siRNA sense strand
gagcuucaggcaaaacuua

SEQ ID NO: 1206093 - RNA, 19 nt, Homo sapiens
  misc_RNA (1)...(19): siRNA sense strand
ggacaaaacacagauauac

SEQ ID NO: 1206094 - RNA, 19 nt, Homo sapiens
  misc_RNA (1)...(19): siRNA sense strand
acagauauacagcagauag

SEQ ID NO: 1206095 - RNA, 19 nt, Homo sapiens
  misc_RNA (1)...(19): siRNA sense strand
auaccacugugacugcauu

SEQ ID NO: 1206096 - RNA, 19 nt, Homo sapiens
  misc_RNA (1)...(19): siRNA sense strand
ggcaaaacuuacagcuuaa

SEQ ID NO: 1206097 - RNA, 19 nt, Homo sapiens
  misc_RNA (1)...(19): siRNA sense strand
cacagacaccucucucaug

SEQ ID NO: 1206098 - RNA, 19 nt, Homo sapiens
  misc_RNA (1)...(19): siRNA sense strand
ucacagacaccucucucau

SEQ ID NO: 1206099 - RNA, 19 nt, Homo sapiens
  misc_RNA (1)...(19): siRNA sense strand
ucaaacgggcugcagagau

SEQ ID NO: 1206100 - RNA, 19 nt, Homo sapiens
  misc_RNA (1)...(19): siRNA sense strand
guaaaucuggaccaaguac

SEQ ID NO: 1206101 - RNA, 19 nt, Homo sapiens
  misc_RNA (1)...(19): siRNA sense strand
gauccaaaucaguucacaa

SEQ ID NO: 1206102 - RNA, 19 nt, Homo sapiens
  misc_RNA (1)...(19): siRNA sense strand
ccaggacuucaguggauuu

SEQ ID NO: 1206103 - RNA, 19 nt, Homo sapiens
  misc_RNA (1)...(19): siRNA sense strand
gcagauucuucgggauugg

SEQ ID NO: 1206104 - RNA, 19 nt, Homo sapiens
  misc_RNA (1)...(19): siRNA sense strand
gaugucccuuucucucucu

SEQ ID NO: 1206105 - RNA, 19 nt, Homo sapiens
  misc_RNA (1)...(19): siRNA sense strand
ggaccucaaccaggacuuc

SEQ ID NO: 1206106 - RNA, 19 nt, Homo sapiens
  misc_RNA (1)...(19): siRNA sense strand
ggcuguaugagcaccguua

SEQ ID NO: 1206107 - RNA, 19 nt, Homo sapiens
  misc_RNA (1)...(19): siRNA sense strand
guaugagcaccguuacaau

SEQ ID NO: 1206108 - RNA, 19 nt, Homo sapiens
  misc_RNA (1)...(19): siRNA sense strand
caguggauuucagcuucua

SEQ ID NO: 1206109 - RNA, 19 nt, Homo sapiens
  misc_RNA (1)...(19): siRNA sense strand
gagaaaggauggcaaagau

SEQ ID NO: 1206110 - RNA, 19 nt, Homo sapiens
  misc_RNA (1)...(19): siRNA sense strand
gcaaagauccaaaucaguu

SEQ ID NO: 1206111 - RNA, 19 nt, Homo sapiens
  misc_RNA (1)...(19): siRNA sense strand
caaacgggcugcagagaug

SEQ ID NO: 1206112 - RNA, 19 nt, Homo sapiens
  misc_RNA (1)...(19): siRNA sense strand
agauggagcuucaggcaaa

SEQ ID NO: 1206113 - RNA, 19 nt, Homo sapiens
  misc_RNA (1)...(19): siRNA sense strand
gacauucccuuggaccuuu

SEQ ID NO: 1206114 - RNA, 19 nt, Homo sapiens
  misc_RNA (1)...(19): siRNA sense strand
acagacaccucucucaugu

SEQ ID NO: 1206115 - RNA, 19 nt, Homo sapiens
  misc_RNA (1)...(19): siRNA sense strand
aggcaaaacuuacagcuua

SEQ ID NO: 1206116 - RNA, 19 nt, Homo sapiens
  misc_RNA (1)...(19): siRNA sense strand
ucagugaucugccauacca

SEQ ID NO: 1206117 - RNA, 19 nt, Homo sapiens
  misc_RNA (1)...(19): siRNA sense strand
ggacuucaguggauuucag

SEQ ID NO: 1206118 - RNA, 19 nt, Homo sapiens
  misc_RNA (1)...(19): siRNA sense strand
acacagauauacagcagau

SEQ ID NO: 1206119 - RNA, 19 nt, Homo sapiens
  misc_RNA (1)...(19): siRNA sense strand
ugacugcauugaaagaugu

SEQ ID NO: 1206120 - RNA, 19 nt, Homo sapiens
  misc_RNA (1)...(19): siRNA sense strand
cugcagagauggagcuuca

SEQ ID NO: 1206121 - RNA, 19 nt, Homo sapiens
  misc_RNA (1)...(19): siRNA sense strand
agacaccucucucauguac

SEQ ID NO: 1206122 - RNA, 19 nt, Homo sapiens
  misc_RNA (1)...(19): siRNA sense strand
cacugugacugcauugaaa

SEQ ID NO: 1206123 - RNA, 19 nt, Homo sapiens
  misc_RNA (1)...(19): siRNA sense strand
ucccugacaugcugagaaa

SEQ ID NO: 1206124 - RNA, 19 nt, Homo sapiens
  misc_RNA (1)...(19): siRNA sense strand
gucuguaacugguucauca

SEQ ID NO: 1206125 - RNA, 19 nt, Homo sapiens
  misc_RNA (1)...(19): siRNA sense strand
uggcaaagauccaaaucag

SEQ ID NO: 1206126 - RNA, 19 nt, Homo sapiens
  misc_RNA (1)...(19): siRNA sense strand
gcugagaaaggauggcaaa

SEQ ID NO: 1206127 - RNA, 19 nt, Homo sapiens
  misc_RNA (1)...(19): siRNA sense strand
ugagaaaggauggcaaaga

SEQ ID NO: 1206128 - RNA, 19 nt, Homo sapiens
  misc_RNA (1)...(19): siRNA sense strand
ggacauucccuuggaccuu

SEQ ID NO: 1206129 - RNA, 19 nt, Homo sapiens
  misc_RNA (1)...(19): siRNA sense strand
gugacugcauugaaagaug

SEQ ID NO: 1206130 - RNA, 19 nt, Homo sapiens
  misc_RNA (1)...(19): siRNA sense strand
uaugagcaccguuacaaug

SEQ ID NO: 1206131 - RNA, 19 nt, Homo sapiens
  misc_RNA (1)...(19): siRNA sense strand
ccuuggaccuuucuucauc

SEQ ID NO: 1206132 - RNA, 19 nt, Homo sapiens
  misc_RNA (1)...(19): siRNA sense strand
ccacugugacugcauugaa

SEQ ID NO: 1206133 - RNA, 19 nt, Homo sapiens
  misc_RNA (1)...(19): siRNA sense strand
uuacaaugccuauccuuca

SEQ ID NO: 1206134 - RNA, 19 nt, Homo sapiens
  misc_RNA (1)...(19): siRNA sense strand
cagcaaacacaccugucua

SEQ ID NO: 1206135 - RNA, 19 nt, Homo sapiens
  misc_RNA (1)...(19): siRNA sense strand
aaccaggacuucaguggau

SEQ ID NO: 1206136 - RNA, 19 nt, Homo sapiens
  misc_RNA (1)...(19): siRNA sense strand
gugcagauucuucgggauu

SEQ ID NO: 1206137 - RNA, 19 nt, Homo sapiens
  misc_RNA (1)...(19): siRNA sense strand
caaagauccaaaucaguuc

SEQ ID NO: 1206138 - RNA, 19 nt, Homo sapiens
  misc_RNA (1)...(19): siRNA sense strand
gagcuucaggcaaaacuua

SEQ ID NO: 1206139 - RNA, 19 nt, Homo sapiens
  misc_RNA (1)...(19): siRNA sense strand
ggacaaaacacagauauac

SEQ ID NO: 1206140 - RNA, 19 nt, Homo sapiens
  misc_RNA (1)...(19): siRNA sense strand
acagauauacagcagauag

SEQ ID NO: 1206141 - RNA, 19 nt, Homo sapiens
  misc_RNA (1)...(19): siRNA sense strand
auaccacugugacugcauu

SEQ ID NO: 1206142 - RNA, 19 nt, Homo sapiens
  misc_RNA (1)...(19): siRNA sense strand
ggcaaaacuuacagcuuaa

SEQ ID NO: 1206143 - RNA, 19 nt, Homo sapiens
  misc_RNA (1)...(19): siRNA sense strand
cacagacaccucucucaug

SEQ ID NO: 1206144 - RNA, 19 nt, Homo sapiens
  misc_RNA (1)...(19): siRNA sense strand
ucacagacaccucucucau

SEQ ID NO: 1206145 - RNA, 19 nt, Homo sapiens
  misc_RNA (1)...(19): siRNA sense strand
ucaaacgggcugcagagau

SEQ ID NO: 1206146 - RNA, 19 nt, Homo sapiens
  misc_RNA (1)...(19): siRNA sense strand
guaaaucuggaccaaguac

SEQ ID NO: 1206147 - RNA, 19 nt, Homo sapiens
  misc_RNA (1)...(19): siRNA sense strand
gauccaaaucaguucacaa

SEQ ID NO: 1206148 - RNA, 19 nt, Homo sapiens
  misc_RNA (1)...(19): siRNA sense strand
gcagauucuucgggauugg

SEQ ID NO: 1206149 - RNA, 19 nt, Homo sapiens
  misc_RNA (1)...(19): siRNA sense strand
ccaggacuucaguggauuu

SEQ ID NO: 1206150 - RNA, 19 nt, Homo sapiens
  misc_RNA (1)...(19): siRNA sense strand
ggcuguaugagcaccguua

SEQ ID NO: 1206151 - RNA, 19 nt, Homo sapiens
  misc_RNA (1)...(19): siRNA sense strand
ggaccucaaccaggacuuc

SEQ ID NO: 1206152 - RNA, 19 nt, Homo sapiens
  misc_RNA (1)...(19): siRNA sense strand
guaugagcaccguuacaau

SEQ ID NO: 1206153 - RNA, 19 nt, Homo sapiens
  misc_RNA (1)...(19): siRNA sense strand
gaugucccuuucucucucu

SEQ ID NO: 1206154 - RNA, 19 nt, Homo sapiens
  misc_RNA (1)...(19): siRNA sense strand
caguggauuucagcuucua

SEQ ID NO: 1206155 - RNA, 19 nt, Homo sapiens
  misc_RNA (1)...(19): siRNA sense strand
gagaaaggauggcaaagau

SEQ ID NO: 1206156 - RNA, 19 nt, Homo sapiens
  misc_RNA (1)...(19): siRNA sense strand
gcaaagauccaaaucaguu

SEQ ID NO: 1206157 - RNA, 19 nt, Homo sapiens
  misc_RNA (1)...(19): siRNA sense strand
caaacgggcugcagagaug

SEQ ID NO: 1206158 - RNA, 19 nt, Homo sapiens
  misc_RNA (1)...(19): siRNA sense strand
agauggagcuucaggcaaa

SEQ ID NO: 1206159 - RNA, 19 nt, Homo sapiens
  misc_RNA (1)...(19): siRNA sense strand
gacauucccuuggaccuuu

SEQ ID NO: 1206160 - RNA, 19 nt, Homo sapiens
  misc_RNA (1)...(19): siRNA sense strand
acagacaccucucucaugu

SEQ ID NO: 1206161 - RNA, 19 nt, Homo sapiens
  misc_RNA (1)...(19): siRNA sense strand
aggcaaaacuuacagcuua

SEQ ID NO: 1206162 - RNA, 19 nt, Homo sapiens
  misc_RNA (1)...(19): siRNA sense strand
ucagugaucugccauacca

SEQ ID NO: 1206163 - RNA, 19 nt, Homo sapiens
  misc_RNA (1)...(19): siRNA sense strand
ggacuucaguggauuucag

SEQ ID NO: 1206164 - RNA, 19 nt, Homo sapiens
  misc_RNA (1)...(19): siRNA sense strand
acacagauauacagcagau

SEQ ID NO: 1206165 - RNA, 19 nt, Homo sapiens
  misc_RNA (1)...(19): siRNA sense strand
ugacugcauugaaagaugu

SEQ ID NO: 1206166 - RNA, 19 nt, Homo sapiens
  misc_RNA (1)...(19): siRNA sense strand
cugcagagauggagcuuca

SEQ ID NO: 1206167 - RNA, 19 nt, Homo sapiens
  misc_RNA (1)...(19): siRNA sense strand
agacaccucucucauguac

SEQ ID NO: 1206168 - RNA, 19 nt, Homo sapiens
  misc_RNA (1)...(19): siRNA sense strand
cacugugacugcauugaaa

SEQ ID NO: 1206169 - RNA, 19 nt, Homo sapiens
  misc_RNA (1)...(19): siRNA sense strand
ucccugacaugcugagaaa

SEQ ID NO: 1206170 - RNA, 19 nt, Homo sapiens
  misc_RNA (1)...(19): siRNA sense strand
gucuguaacugguucauca

SEQ ID NO: 1206171 - RNA, 19 nt, Homo sapiens
  misc_RNA (1)...(19): siRNA sense strand
uggcaaagauccaaaucag

SEQ ID NO: 1206172 - RNA, 19 nt, Homo sapiens
  misc_RNA (1)...(19): siRNA sense strand
gcugagaaaggauggcaaa

SEQ ID NO: 1206173 - RNA, 19 nt, Homo sapiens
  misc_RNA (1)...(19): siRNA sense strand
ugagaaaggauggcaaaga

SEQ ID NO: 1206174 - RNA, 19 nt, Homo sapiens
  misc_RNA (1)...(19): siRNA sense strand
ggacauucccuuggaccuu

SEQ ID NO: 1206175 - RNA, 19 nt, Homo sapiens
  misc_RNA (1)...(19): siRNA sense strand
gugacugcauugaaagaug

SEQ ID NO: 1206176 - RNA, 19 nt, Homo sapiens
  misc_RNA (1)...(19): siRNA sense strand
uaugagcaccguuacaaug

SEQ ID NO: 1206177 - RNA, 19 nt, Homo sapiens
  misc_RNA (1)...(19): siRNA sense strand
ccuuggaccuuucuucauc

SEQ ID NO: 1206178 - RNA, 19 nt, Homo sapiens
  misc_RNA (1)...(19): siRNA sense strand
ccacugugacugcauugaa

SEQ ID NO: 1206179 - RNA, 19 nt, Homo sapiens
  misc_RNA (1)...(19): siRNA sense strand
uuacaaugccuauccuuca

SEQ ID NO: 1206180 - RNA, 19 nt, Homo sapiens
  misc_RNA (1)...(19): siRNA sense strand
cagcaaacacaccugucua

SEQ ID NO: 1206181 - RNA, 19 nt, Homo sapiens
  misc_RNA (1)...(19): siRNA sense strand
aaccaggacuucaguggau

SEQ ID NO: 1206182 - RNA, 19 nt, Homo sapiens
  misc_RNA (1)...(19): siRNA sense strand
gugcagauucuucgggauu

SEQ ID NO: 1206183 - RNA, 19 nt, Homo sapiens
  misc_RNA (1)...(19): siRNA sense strand
caaagauccaaaucaguuc

SEQ ID NO: 1206184 - RNA, 19 nt, Homo sapiens
  misc_RNA (1)...(19): siRNA sense strand
gagcuucaggcaaaacuua

SEQ ID NO: 1206185 - RNA, 19 nt, Homo sapiens
  misc_RNA (1)...(19): siRNA sense strand
ggacaaaacacagauauac

SEQ ID NO: 1206186 - RNA, 19 nt, Homo sapiens
  misc_RNA (1)...(19): siRNA sense strand
acagauauacagcagauag

SEQ ID NO: 1206187 - RNA, 19 nt, Homo sapiens
  misc_RNA (1)...(19): siRNA sense strand
auaccacugugacugcauu

SEQ ID NO: 1206188 - RNA, 19 nt, Homo sapiens
  misc_RNA (1)...(19): siRNA sense strand
ggcaaaacuuacagcuuaa

SEQ ID NO: 1206189 - RNA, 19 nt, Homo sapiens
  misc_RNA (1)...(19): siRNA sense strand
cacagacaccucucucaug

SEQ ID NO: 1206190 - RNA, 19 nt, Homo sapiens
  misc_RNA (1)...(19): siRNA sense strand
ucacagacaccucucucau

SEQ ID NO: 1206191 - RNA, 19 nt, Homo sapiens
  misc_RNA (1)...(19): siRNA sense strand
ucaaacgggcugcagagau

SEQ ID NO: 1206192 - RNA, 19 nt, Homo sapiens
  misc_RNA (1)...(19): siRNA sense strand
guaaaucuggaccaaguac

SEQ ID NO: 1206193 - RNA, 19 nt, Homo sapiens
  misc_RNA (1)...(19): siRNA sense strand
gauccaaaucaguucacaa

SEQ ID NO: 1206194 - RNA, 19 nt, Homo sapiens
  misc_RNA (1)...(19): siRNA sense strand
gcagauucuucgggauugg

SEQ ID NO: 1206195 - RNA, 19 nt, Homo sapiens
  misc_RNA (1)...(19): siRNA sense strand
ccaggacuucaguggauuu

SEQ ID NO: 1206196 - RNA, 19 nt, Homo sapiens
  misc_RNA (1)...(19): siRNA sense strand
ggcuguaugagcaccguua

SEQ ID NO: 1206197 - RNA, 19 nt, Homo sapiens
  misc_RNA (1)...(19): siRNA sense strand
ggaccucaaccaggacuuc

SEQ ID NO: 1206198 - RNA, 19 nt, Homo sapiens
  misc_RNA (1)...(19): siRNA sense strand
guaugagcaccguuacaau

SEQ ID NO: 1206199 - RNA, 19 nt, Homo sapiens
  misc_RNA (1)...(19): siRNA sense strand
gaugucccuuucucucucu

SEQ ID NO: 1206200 - RNA, 19 nt, Homo sapiens
  misc_RNA (1)...(19): siRNA sense strand
caguggauuucagcuucua

SEQ ID NO: 1206201 - RNA, 19 nt, Homo sapiens
  misc_RNA (1)...(19): siRNA sense strand
gagaaaggauggcaaagau

SEQ ID NO: 1206202 - RNA, 19 nt, Homo sapiens
  misc_RNA (1)...(19): siRNA sense strand
gcaaagauccaaaucaguu

SEQ ID NO: 1206203 - RNA, 19 nt, Homo sapiens
  misc_RNA (1)...(19): siRNA sense strand
caaacgggcugcagagaug

SEQ ID NO: 1206204 - RNA, 19 nt, Homo sapiens
  misc_RNA (1)...(19): siRNA sense strand
agauggagcuucaggcaaa

SEQ ID NO: 1206205 - RNA, 19 nt, Homo sapiens
  misc_RNA (1)...(19): siRNA sense strand
gacauucccuuggaccuuu

SEQ ID NO: 1206206 - RNA, 19 nt, Homo sapiens
  misc_RNA (1)...(19): siRNA sense strand
acagacaccucucucaugu

SEQ ID NO: 1206207 - RNA, 19 nt, Homo sapiens
  misc_RNA (1)...(19): siRNA sense strand
aggcaaaacuuacagcuua

SEQ ID NO: 1206208 - RNA, 19 nt, Homo sapiens
  misc_RNA (1)...(19): siRNA sense strand
ucagugaucugccauacca

SEQ ID NO: 1206209 - RNA, 19 nt, Homo sapiens
  misc_RNA (1)...(19): siRNA sense strand
ggacuucaguggauuucag

SEQ ID NO: 1206210 - RNA, 19 nt, Homo sapiens
  misc_RNA (1)...(19): siRNA sense strand
acacagauauacagcagau

SEQ ID NO: 1206211 - RNA, 19 nt, Homo sapiens
  misc_RNA (1)...(19): siRNA sense strand
ugacugcauugaaagaugu

SEQ ID NO: 1206212 - RNA, 19 nt, Homo sapiens
  misc_RNA (1)...(19): siRNA sense strand
cugcagagauggagcuuca

SEQ ID NO: 1206213 - RNA, 19 nt, Homo sapiens
  misc_RNA (1)...(19): siRNA sense strand
agacaccucucucauguac

SEQ ID NO: 1206214 - RNA, 19 nt, Homo sapiens
  misc_RNA (1)...(19): siRNA sense strand
cacugugacugcauugaaa

SEQ ID NO: 1206215 - RNA, 19 nt, Homo sapiens
  misc_RNA (1)...(19): siRNA sense strand
ucccugacaugcugagaaa

SEQ ID NO: 1206216 - RNA, 19 nt, Homo sapiens
  misc_RNA (1)...(19): siRNA sense strand
gucuguaacugguucauca

SEQ ID NO: 1206217 - RNA, 19 nt, Homo sapiens
  misc_RNA (1)...(19): siRNA sense strand
uggcaaagauccaaaucag

SEQ ID NO: 1206218 - RNA, 19 nt, Homo sapiens
  misc_RNA (1)...(19): siRNA sense strand
gcugagaaaggauggcaaa

SEQ ID NO: 1206219 - RNA, 19 nt, Homo sapiens
  misc_RNA (1)...(19): siRNA sense strand
ugagaaaggauggcaaaga

SEQ ID NO: 1206220 - RNA, 19 nt, Homo sapiens
  misc_RNA (1)...(19): siRNA sense strand
ggacauucccuuggaccuu

SEQ ID NO: 1206221 - RNA, 19 nt, Homo sapiens
  misc_RNA (1)...(19): siRNA sense strand
gugacugcauugaaagaug

SEQ ID NO: 1206222 - RNA, 19 nt, Homo sapiens
  misc_RNA (1)...(19): siRNA sense strand
uaugagcaccguuacaaug

SEQ ID NO: 1206223 - RNA, 19 nt, Homo sapiens
  misc_RNA (1)...(19): siRNA sense strand
ccuuggaccuuucuucauc

SEQ ID NO: 1206224 - RNA, 19 nt, Homo sapiens
  misc_RNA (1)...(19): siRNA sense strand
ccacugugacugcauugaa

SEQ ID NO: 1206225 - RNA, 19 nt, Homo sapiens
  misc_RNA (1)...(19): siRNA sense strand
uuacaaugccuauccuuca

SEQ ID NO: 1206226 - RNA, 19 nt, Homo sapiens
  misc_RNA (1)...(19): siRNA sense strand
cagcaaacacaccugucua

SEQ ID NO: 1206227 - RNA, 19 nt, Homo sapiens
  misc_RNA (1)...(19): siRNA sense strand
aaccaggacuucaguggau

SEQ ID NO: 1206228 - RNA, 19 nt, Homo sapiens
  misc_RNA (1)...(19): siRNA sense strand
gugcagauucuucgggauu

SEQ ID NO: 1206229 - RNA, 19 nt, Homo sapiens
  misc_RNA (1)...(19): siRNA sense strand
caaagauccaaaucaguuc

SEQ ID NO: 1206230 - RNA, 19 nt, Homo sapiens
  misc_RNA (1)...(19): siRNA sense strand
gagcuucaggcaaaacuua

SEQ ID NO: 1206231 - RNA, 19 nt, Homo sapiens
  misc_RNA (1)...(19): siRNA sense strand
ggacaaaacacagauauac

SEQ ID NO: 1206232 - RNA, 19 nt, Homo sapiens
  misc_RNA (1)...(19): siRNA sense strand
acagauauacagcagauag

SEQ ID NO: 1206233 - RNA, 19 nt, Homo sapiens
  misc_RNA (1)...(19): siRNA sense strand
auaccacugugacugcauu

SEQ ID NO: 1206234 - RNA, 19 nt, Homo sapiens
  misc_RNA (1)...(19): siRNA sense strand
ggcaaaacuuacagcuuaa

SEQ ID NO: 1206235 - RNA, 19 nt, Homo sapiens
  misc_RNA (1)...(19): siRNA sense strand
cacagacaccucucucaug

SEQ ID NO: 1206236 - RNA, 19 nt, Homo sapiens
  misc_RNA (1)...(19): siRNA sense strand
ucacagacaccucucucau

SEQ ID NO: 1206237 - RNA, 19 nt, Homo sapiens
  misc_RNA (1)...(19): siRNA sense strand
ucaaacgggcugcagagau

SEQ ID NO: 1206238 - RNA, 19 nt, Homo sapiens
  misc_RNA (1)...(19): siRNA sense strand
guaaaucuggaccaaguac

SEQ ID NO: 1206239 - RNA, 19 nt, Homo sapiens
  misc_RNA (1)...(19): siRNA sense strand
gauccaaaucaguucacaa

SEQ ID NO: 1206240 - RNA, 19 nt, Homo sapiens
  misc_RNA (1)...(19): siRNA sense strand
gcagauucuucgggauugg

SEQ ID NO: 1206241 - RNA, 19 nt, Homo sapiens
  misc_RNA (1)...(19): siRNA sense strand
ccaggacuucaguggauuu

SEQ ID NO: 1206242 - RNA, 19 nt, Homo sapiens
  misc_RNA (1)...(19): siRNA sense strand
ggcuguaugagcaccguua

SEQ ID NO: 1206243 - RNA, 19 nt, Homo sapiens
  misc_RNA (1)...(19): siRNA sense strand
ggaccucaaccaggacuuc

SEQ ID NO: 1206244 - RNA, 19 nt, Homo sapiens
  misc_RNA (1)...(19): siRNA sense strand
guaugagcaccguuacaau

SEQ ID NO: 1206245 - RNA, 19 nt, Homo sapiens
  misc_RNA (1)...(19): siRNA sense strand
gaugucccuuucucucucu

SEQ ID NO: 1206246 - RNA, 19 nt, Homo sapiens
  misc_RNA (1)...(19): siRNA sense strand
caguggauuucagcuucua

SEQ ID NO: 1206247 - RNA, 19 nt, Homo sapiens
  misc_RNA (1)...(19): siRNA sense strand
gagaaaggauggcaaagau

SEQ ID NO: 1206248 - RNA, 19 nt, Homo sapiens
  misc_RNA (1)...(19): siRNA sense strand
gcaaagauccaaaucaguu

SEQ ID NO: 1206249 - RNA, 19 nt, Homo sapiens
  misc_RNA (1)...(19): siRNA sense strand
caaacgggcugcagagaug

SEQ ID NO: 1206250 - RNA, 19 nt, Homo sapiens
  misc_RNA (1)...(19): siRNA sense strand
agauggagcuucaggcaaa

SEQ ID NO: 1206251 - RNA, 19 nt, Homo sapiens
  misc_RNA (1)...(19): siRNA sense strand
gacauucccuuggaccuuu

SEQ ID NO: 1206252 - RNA, 19 nt, Homo sapiens
  misc_RNA (1)...(19): siRNA sense strand
acagacaccucucucaugu

SEQ ID NO: 1206253 - RNA, 19 nt, Homo sapiens
  misc_RNA (1)...(19): siRNA sense strand
aggcaaaacuuacagcuua

SEQ ID NO: 1206254 - RNA, 19 nt, Homo sapiens
  misc_RNA (1)...(19): siRNA sense strand
ucagugaucugccauacca

SEQ ID NO: 1206255 - RNA, 19 nt, Homo sapiens
  misc_RNA (1)...(19): siRNA sense strand
ggacuucaguggauuucag

SEQ ID NO: 1206256 - RNA, 19 nt, Homo sapiens
  misc_RNA (1)...(19): siRNA sense strand
acacagauauacagcagau

SEQ ID NO: 1206257 - RNA, 19 nt, Homo sapiens
  misc_RNA (1)...(19): siRNA sense strand
ugacugcauugaaagaugu

SEQ ID NO: 1206258 - RNA, 19 nt, Homo sapiens
  misc_RNA (1)...(19): siRNA sense strand
cugcagagauggagcuuca

SEQ ID NO: 1206259 - RNA, 19 nt, Homo sapiens
  misc_RNA (1)...(19): siRNA sense strand
agacaccucucucauguac

SEQ ID NO: 1206260 - RNA, 19 nt, Homo sapiens
  misc_RNA (1)...(19): siRNA sense strand
cacugugacugcauugaaa

SEQ ID NO: 1206261 - RNA, 19 nt, Homo sapiens
  misc_RNA (1)...(19): siRNA sense strand
ucccugacaugcugagaaa

SEQ ID NO: 1206262 - RNA, 19 nt, Homo sapiens
  misc_RNA (1)...(19): siRNA sense strand
gucuguaacugguucauca

SEQ ID NO: 1206263 - RNA, 19 nt, Homo sapiens
  misc_RNA (1)...(19): siRNA sense strand
uggcaaagauccaaaucag

SEQ ID NO: 1206264 - RNA, 19 nt, Homo sapiens
  misc_RNA (1)...(19): siRNA sense strand
gcugagaaaggauggcaaa

SEQ ID NO: 1206265 - RNA, 19 nt, Homo sapiens
  misc_RNA (1)...(19): siRNA sense strand
ugagaaaggauggcaaaga

SEQ ID NO: 1206266 - RNA, 19 nt, Homo sapiens
  misc_RNA (1)...(19): siRNA sense strand
ggacauucccuuggaccuu

SEQ ID NO: 1206267 - RNA, 19 nt, Homo sapiens
  misc_RNA (1)...(19): siRNA sense strand
gugacugcauugaaagaug

SEQ ID NO: 1206268 - RNA, 19 nt, Homo sapiens
  misc_RNA (1)...(19): siRNA sense strand
uaugagcaccguuacaaug

SEQ ID NO: 1206269 - RNA, 19 nt, Homo sapiens
  misc_RNA (1)...(19): siRNA sense strand
ccuuggaccuuucuucauc

SEQ ID NO: 1206270 - RNA, 19 nt, Homo sapiens
  misc_RNA (1)...(19): siRNA sense strand
ccacugugacugcauugaa

SEQ ID NO: 1206271 - RNA, 19 nt, Homo sapiens
  misc_RNA (1)...(19): siRNA sense strand
uuacaaugccuauccuuca

SEQ ID NO: 1206272 - RNA, 19 nt, Homo sapiens
  misc_RNA (1)...(19): siRNA sense strand
cagcaaacacaccugucua

SEQ ID NO: 1206273 - RNA, 19 nt, Homo sapiens
  misc_RNA (1)...(19): siRNA sense strand
aaccaggacuucaguggau

SEQ ID NO: 1206274 - RNA, 19 nt, Homo sapiens
  misc_RNA (1)...(19): siRNA sense strand
gugcagauucuucgggauu

SEQ ID NO: 1206275 - RNA, 19 nt, Homo sapiens
  misc_RNA (1)...(19): siRNA sense strand
caaagauccaaaucaguuc

SEQ ID NO: 1206276 - RNA, 19 nt, Homo sapiens
  misc_RNA (1)...(19): siRNA sense strand
gagcuucaggcaaaacuua

SEQ ID NO: 1206277 - RNA, 19 nt, Homo sapiens
  misc_RNA (1)...(19): siRNA sense strand
ggacaaaacacagauauac

SEQ ID NO: 1206278 - RNA, 19 nt, Homo sapiens
  misc_RNA (1)...(19): siRNA sense strand
acagauauacagcagauag

SEQ ID NO: 1206279 - RNA, 19 nt, Homo sapiens
  misc_RNA (1)...(19): siRNA sense strand
auaccacugugacugcauu

SEQ ID NO: 1206280 - RNA, 19 nt, Homo sapiens
  misc_RNA (1)...(19): siRNA sense strand
ggcaaaacuuacagcuuaa

SEQ ID NO: 1206281 - RNA, 19 nt, Homo sapiens
  misc_RNA (1)...(19): siRNA sense strand
cacagacaccucucucaug

SEQ ID NO: 1206282 - RNA, 19 nt, Homo sapiens
  misc_RNA (1)...(19): siRNA sense strand
ucacagacaccucucucau

SEQ ID NO: 1206283 - RNA, 19 nt, Homo sapiens
  misc_RNA (1)...(19): siRNA sense strand
ucaaacgggcugcagagau

SEQ ID NO: 1206284 - RNA, 19 nt, Homo sapiens
  misc_RNA (1)...(19): siRNA sense strand
guaaaucuggaccaaguac

SEQ ID NO: 1206285 - RNA, 19 nt, Homo sapiens
  misc_RNA (1)...(19): siRNA sense strand
gauccaaaucaguucacaa

SEQ ID NO: 1206286 - RNA, 19 nt, Homo sapiens
  misc_RNA (1)...(19): siRNA sense strand
gcagauucuucgggauugg

SEQ ID NO: 1206287 - RNA, 19 nt, Homo sapiens
  misc_RNA (1)...(19): siRNA sense strand
ccaggacuucaguggauuu

SEQ ID NO: 1206288 - RNA, 19 nt, Homo sapiens
  misc_RNA (1)...(19): siRNA sense strand
ggcuguaugagcaccguua

SEQ ID NO: 1206289 - RNA, 19 nt, Homo sapiens
  misc_RNA (1)...(19): siRNA sense strand
ggaccucaaccaggacuuc

SEQ ID NO: 1206290 - RNA, 19 nt, Homo sapiens
  misc_RNA (1)...(19): siRNA sense strand
guaugagcaccguuacaau

SEQ ID NO: 1206291 - RNA, 19 nt, Homo sapiens
  misc_RNA (1)...(19): siRNA sense strand
gaugucccuuucucucucu

SEQ ID NO: 1206292 - RNA, 19 nt, Homo sapiens
  misc_RNA (1)...(19): siRNA sense strand
caguggauuucagcuucua

SEQ ID NO: 1206293 - RNA, 19 nt, Homo sapiens
  misc_RNA (1)...(19): siRNA sense strand
gagaaaggauggcaaagau

SEQ ID NO: 1206294 - RNA, 19 nt, Homo sapiens
  misc_RNA (1)...(19): siRNA sense strand
gcaaagauccaaaucaguu

SEQ ID NO: 1206295 - RNA, 19 nt, Homo sapiens
  misc_RNA (1)...(19): siRNA sense strand
caaacgggcugcagagaug

SEQ ID NO: 1206296 - RNA, 19 nt, Homo sapiens
  misc_RNA (1)...(19): siRNA sense strand
agauggagcuucaggcaaa

SEQ ID NO: 1206297 - RNA, 19 nt, Homo sapiens
  misc_RNA (1)...(19): siRNA sense strand
gacauucccuuggaccuuu

SEQ ID NO: 1206298 - RNA, 19 nt, Homo sapiens
  misc_RNA (1)...(19): siRNA sense strand
gcauggacauucccuugga

SEQ ID NO: 1206299 - RNA, 19 nt, Homo sapiens
  misc_RNA (1)...(19): siRNA sense strand
acagacaccucucucaugu

SEQ ID NO: 1206300 - RNA, 19 nt, Homo sapiens
  misc_RNA (1)...(19): siRNA sense strand
aggcaaaacuuacagcuua

SEQ ID NO: 1206301 - RNA, 19 nt, Homo sapiens
  misc_RNA (1)...(19): siRNA sense strand
ucagugaucugccauacca

SEQ ID NO: 1206302 - RNA, 19 nt, Homo sapiens
  misc_RNA (1)...(19): siRNA sense strand
ggacuucaguggauuucag

SEQ ID NO: 1206303 - RNA, 19 nt, Homo sapiens
  misc_RNA (1)...(19): siRNA sense strand
acacagauauacagcagau

SEQ ID NO: 1206304 - RNA, 19 nt, Homo sapiens
  misc_RNA (1)...(19): siRNA sense strand
ugacugcauugaaagaugu

SEQ ID NO: 1206305 - RNA, 19 nt, Homo sapiens
  misc_RNA (1)...(19): siRNA sense strand
cugcagagauggagcuuca

SEQ ID NO: 1206306 - RNA, 19 nt, Homo sapiens
  misc_RNA (1)...(19): siRNA sense strand
agacaccucucucauguac

SEQ ID NO: 1206307 - RNA, 19 nt, Homo sapiens
  misc_RNA (1)...(19): siRNA sense strand
cacugugacugcauugaaa

SEQ ID NO: 1206308 - RNA, 19 nt, Homo sapiens
  misc_RNA (1)...(19): siRNA sense strand
ucccugacaugcugagaaa

SEQ ID NO: 1206309 - RNA, 19 nt, Homo sapiens
  misc_RNA (1)...(19): siRNA sense strand
gucuguaacugguucauca

SEQ ID NO: 1206310 - RNA, 19 nt, Homo sapiens
  misc_RNA (1)...(19): siRNA sense strand
uggcaaagauccaaaucag

SEQ ID NO: 1206311 - RNA, 19 nt, Homo sapiens
  misc_RNA (1)...(19): siRNA sense strand
gcugagaaaggauggcaaa

SEQ ID NO: 1206312 - RNA, 19 nt, Homo sapiens
  misc_RNA (1)...(19): siRNA sense strand
ugagaaaggauggcaaaga

SEQ ID NO: 1206313 - RNA, 19 nt, Homo sapiens
  misc_RNA (1)...(19): siRNA sense strand
gaggacagcauggacauuc

SEQ ID NO: 1206314 - RNA, 19 nt, Homo sapiens
  misc_RNA (1)...(19): siRNA sense strand
ggacauucccuuggaccuu

SEQ ID NO: 1206315 - RNA, 19 nt, Homo sapiens
  misc_RNA (1)...(19): siRNA sense strand
gugacugcauugaaagaug

SEQ ID NO: 1206316 - RNA, 19 nt, Homo sapiens
  misc_RNA (1)...(19): siRNA sense strand
uaugagcaccguuacaaug

SEQ ID NO: 1206317 - RNA, 19 nt, Homo sapiens
  misc_RNA (1)...(19): siRNA sense strand
ccacugugacugcauugaa

SEQ ID NO: 1206318 - RNA, 19 nt, Homo sapiens
  misc_RNA (1)...(19): siRNA sense strand
ccuuggaccuuucuucauc

SEQ ID NO: 1206319 - RNA, 19 nt, Homo sapiens
  misc_RNA (1)...(19): siRNA sense strand
uuacaaugccuauccuuca

SEQ ID NO: 1206320 - RNA, 19 nt, Homo sapiens
  misc_RNA (1)...(19): siRNA sense strand
gugcagauucuucgggauu

SEQ ID NO: 1206321 - RNA, 19 nt, Homo sapiens
  misc_RNA (1)...(19): siRNA sense strand
aaccaggacuucaguggau

SEQ ID NO: 1206322 - RNA, 19 nt, Homo sapiens
  misc_RNA (1)...(19): siRNA sense strand
cagcaaacacaccugucua

SEQ ID NO: 1206323 - RNA, 19 nt, Homo sapiens
  misc_RNA (1)...(19): siRNA sense strand
caaagauccaaaucaguuc

SEQ ID NO: 1206324 - RNA, 19 nt, Homo sapiens
  misc_RNA (1)...(19): siRNA sense strand
gagcuucaggcaaaacuua

SEQ ID NO: 1206325 - RNA, 19 nt, Homo sapiens
  misc_RNA (1)...(19): siRNA sense strand
ggacaaaacacagauauac

SEQ ID NO: 1206326 - RNA, 19 nt, Homo sapiens
  misc_RNA (1)...(19): siRNA sense strand
acagauauacagcagauag

SEQ ID NO: 1206327 - RNA, 19 nt, Homo sapiens
  misc_RNA (1)...(19): siRNA sense strand
auaccacugugacugcauu

SEQ ID NO: 1206328 - RNA, 19 nt, Homo sapiens
  misc_RNA (1)...(19): siRNA sense strand
ggcaaaacuuacagcuuaa

SEQ ID NO: 1206329 - RNA, 19 nt, Homo sapiens
  misc_RNA (1)...(19): siRNA sense strand
cacagacaccucucucaug

SEQ ID NO: 1206330 - RNA, 19 nt, Homo sapiens
  misc_RNA (1)...(19): siRNA sense strand
ucacagacaccucucucau

SEQ ID NO: 1206331 - RNA, 19 nt, Homo sapiens
  misc_RNA (1)...(19): siRNA sense strand
ucaaacgggcugcagagau

SEQ ID NO: 1206332 - RNA, 19 nt, Homo sapiens
  misc_RNA (1)...(19): siRNA sense strand
guaaaucuggaccaaguac

SEQ ID NO: 1206333 - RNA, 19 nt, Homo sapiens
  misc_RNA (1)...(19): siRNA sense strand
gauccaaaucaguucacaa

SEQ ID NO: 1206334 - RNA, 19 nt, Homo sapiens
  misc_RNA (1)...(19): siRNA sense strand
ccaggacuucaguggauuu

SEQ ID NO: 1206335 - RNA, 19 nt, Homo sapiens
  misc_RNA (1)...(19): siRNA sense strand
gcagauucuucgggauugg

SEQ ID NO: 1206336 - RNA, 19 nt, Homo sapiens
  misc_RNA (1)...(19): siRNA sense strand
gaugucccuuucucucucu

SEQ ID NO: 1206337 - RNA, 19 nt, Homo sapiens
  misc_RNA (1)...(19): siRNA sense strand
ggaccucaaccaggacuuc

SEQ ID NO: 1206338 - RNA, 19 nt, Homo sapiens
  misc_RNA (1)...(19): siRNA sense strand
ggcuguaugagcaccguua

SEQ ID NO: 1206339 - RNA, 19 nt, Homo sapiens
  misc_RNA (1)...(19): siRNA sense strand
guaugagcaccguuacaau

SEQ ID NO: 1206340 - RNA, 19 nt, Homo sapiens
  misc_RNA (1)...(19): siRNA sense strand
caguggauuucagcuucua

SEQ ID NO: 1206341 - RNA, 19 nt, Homo sapiens
  misc_RNA (1)...(19): siRNA sense strand
gagaaaggauggcaaagau

SEQ ID NO: 1206342 - RNA, 19 nt, Homo sapiens
  misc_RNA (1)...(19): siRNA sense strand
gcaaagauccaaaucaguu

SEQ ID NO: 1206343 - RNA, 19 nt, Homo sapiens
  misc_RNA (1)...(19): siRNA sense strand
caaacgggcugcagagaug

SEQ ID NO: 1206344 - RNA, 19 nt, Homo sapiens
  misc_RNA (1)...(19): siRNA sense strand
agauggagcuucaggcaaa

SEQ ID NO: 1206345 - RNA, 19 nt, Homo sapiens
  misc_RNA (1)...(19): siRNA sense strand
gacauucccuuggaccuuu

SEQ ID NO: 1206346 - RNA, 19 nt, Homo sapiens
  misc_RNA (1)...(19): siRNA sense strand
gcauggacauucccuugga

SEQ ID NO: 1206347 - RNA, 19 nt, Homo sapiens
  misc_RNA (1)...(19): siRNA sense strand
acagacaccucucucaugu

SEQ ID NO: 1206348 - RNA, 19 nt, Homo sapiens
  misc_RNA (1)...(19): siRNA sense strand
aggcaaaacuuacagcuua

SEQ ID NO: 1206349 - RNA, 19 nt, Homo sapiens
  misc_RNA (1)...(19): siRNA sense strand
ucagugaucugccauacca

SEQ ID NO: 1206350 - RNA, 19 nt, Homo sapiens
  misc_RNA (1)...(19): siRNA sense strand
ggacuucaguggauuucag

SEQ ID NO: 1206351 - RNA, 19 nt, Homo sapiens
  misc_RNA (1)...(19): siRNA sense strand
acacagauauacagcagau

SEQ ID NO: 1206352 - RNA, 19 nt, Homo sapiens
  misc_RNA (1)...(19): siRNA sense strand
ugacugcauugaaagaugu

SEQ ID NO: 1206353 - RNA, 19 nt, Homo sapiens
  misc_RNA (1)...(19): siRNA sense strand
cugcagagauggagcuuca

SEQ ID NO: 1206354 - RNA, 19 nt, Homo sapiens
  misc_RNA (1)...(19): siRNA sense strand
agacaccucucucauguac

SEQ ID NO: 1206355 - RNA, 19 nt, Homo sapiens
  misc_RNA (1)...(19): siRNA sense strand
cacugugacugcauugaaa

SEQ ID NO: 1206356 - RNA, 19 nt, Homo sapiens
  misc_RNA (1)...(19): siRNA sense strand
ucccugacaugcugagaaa

SEQ ID NO: 1206357 - RNA, 19 nt, Homo sapiens
  misc_RNA (1)...(19): siRNA sense strand
gucuguaacugguucauca

SEQ ID NO: 1206358 - RNA, 19 nt, Homo sapiens
  misc_RNA (1)...(19): siRNA sense strand
uggcaaagauccaaaucag

SEQ ID NO: 1206359 - RNA, 19 nt, Homo sapiens
  misc_RNA (1)...(19): siRNA sense strand
gcugagaaaggauggcaaa

SEQ ID NO: 1206360 - RNA, 19 nt, Homo sapiens
  misc_RNA (1)...(19): siRNA sense strand
ugagaaaggauggcaaaga

SEQ ID NO: 1206361 - RNA, 19 nt, Homo sapiens
  misc_RNA (1)...(19): siRNA sense strand
gaggacagcauggacauuc

SEQ ID NO: 1206362 - RNA, 19 nt, Homo sapiens
  misc_RNA (1)...(19): siRNA sense strand
ggacauucccuuggaccuu

SEQ ID NO: 1206363 - RNA, 19 nt, Homo sapiens
  misc_RNA (1)...(19): siRNA sense strand
gugacugcauugaaagaug

SEQ ID NO: 1206364 - RNA, 19 nt, Homo sapiens
  misc_RNA (1)...(19): siRNA sense strand
uaugagcaccguuacaaug

SEQ ID NO: 1206365 - RNA, 19 nt, Homo sapiens
  misc_RNA (1)...(19): siRNA sense strand
ccacugugacugcauugaa

SEQ ID NO: 1206366 - RNA, 19 nt, Homo sapiens
  misc_RNA (1)...(19): siRNA sense strand
ccuuggaccuuucuucauc

SEQ ID NO: 1206367 - RNA, 19 nt, Homo sapiens
  misc_RNA (1)...(19): siRNA sense strand
uuacaaugccuauccuuca

SEQ ID NO: 1206368 - RNA, 19 nt, Homo sapiens
  misc_RNA (1)...(19): siRNA sense strand
gugcagauucuucgggauu

SEQ ID NO: 1206369 - RNA, 19 nt, Homo sapiens
  misc_RNA (1)...(19): siRNA sense strand
aaccaggacuucaguggau

SEQ ID NO: 1206370 - RNA, 19 nt, Homo sapiens
  misc_RNA (1)...(19): siRNA sense strand
cagcaaacacaccugucua

SEQ ID NO: 1206371 - RNA, 19 nt, Homo sapiens
  misc_RNA (1)...(19): siRNA sense strand
caaagauccaaaucaguuc

SEQ ID NO: 1206372 - RNA, 19 nt, Homo sapiens
  misc_RNA (1)...(19): siRNA sense strand
gagcuucaggcaaaacuua

SEQ ID NO: 1206373 - RNA, 19 nt, Homo sapiens
  misc_RNA (1)...(19): siRNA sense strand
ggacaaaacacagauauac

SEQ ID NO: 1206374 - RNA, 19 nt, Homo sapiens
  misc_RNA (1)...(19): siRNA sense strand
acagauauacagcagauag

SEQ ID NO: 1206375 - RNA, 19 nt, Homo sapiens
  misc_RNA (1)...(19): siRNA sense strand
auaccacugugacugcauu

SEQ ID NO: 1206376 - RNA, 19 nt, Homo sapiens
  misc_RNA (1)...(19): siRNA sense strand
ggcaaaacuuacagcuuaa

SEQ ID NO: 1206377 - RNA, 19 nt, Homo sapiens
  misc_RNA (1)...(19): siRNA sense strand
cacagacaccucucucaug

SEQ ID NO: 1206378 - RNA, 19 nt, Homo sapiens
  misc_RNA (1)...(19): siRNA sense strand
ucacagacaccucucucau

SEQ ID NO: 1206379 - RNA, 19 nt, Homo sapiens
  misc_RNA (1)...(19): siRNA sense strand
ucaaacgggcugcagagau

SEQ ID NO: 1206380 - RNA, 19 nt, Homo sapiens
  misc_RNA (1)...(19): siRNA sense strand
guaaaucuggaccaaguac

SEQ ID NO: 1206381 - RNA, 19 nt, Homo sapiens
  misc_RNA (1)...(19): siRNA sense strand
gauccaaaucaguucacaa

SEQ ID NO: 1206382 - RNA, 19 nt, Homo sapiens
  misc_RNA (1)...(19): siRNA sense strand
ccaggacuucaguggauuu

SEQ ID NO: 1206383 - RNA, 19 nt, Homo sapiens
  misc_RNA (1)...(19): siRNA sense strand
gcagauucuucgggauugg

SEQ ID NO: 1206384 - RNA, 19 nt, Homo sapiens
  misc_RNA (1)...(19): siRNA sense strand
gaugucccuuucucucucu

SEQ ID NO: 1206385 - RNA, 19 nt, Homo sapiens
  misc_RNA (1)...(19): siRNA sense strand
ggaccucaaccaggacuuc

SEQ ID NO: 1206386 - RNA, 19 nt, Homo sapiens
  misc_RNA (1)...(19): siRNA sense strand
ggcuguaugagcaccguua

SEQ ID NO: 1206387 - RNA, 19 nt, Homo sapiens
  misc_RNA (1)...(19): siRNA sense strand
guaugagcaccguuacaau

SEQ ID NO: 1206388 - RNA, 19 nt, Homo sapiens
  misc_RNA (1)...(19): siRNA sense strand
caguggauuucagcuucua

SEQ ID NO: 1206389 - RNA, 19 nt, Homo sapiens
  misc_RNA (1)...(19): siRNA sense strand
gagaaaggauggcaaagau

SEQ ID NO: 1206390 - RNA, 19 nt, Homo sapiens
  misc_RNA (1)...(19): siRNA sense strand
gcaaagauccaaaucaguu

SEQ ID NO: 1206391 - RNA, 19 nt, Homo sapiens
  misc_RNA (1)...(19): siRNA sense strand
caaacgggcugcagagaug

SEQ ID NO: 1206392 - RNA, 19 nt, Homo sapiens
  misc_RNA (1)...(19): siRNA sense strand
agauggagcuucaggcaaa

SEQ ID NO: 1206393 - RNA, 19 nt, Homo sapiens
  misc_RNA (1)...(19): siRNA sense strand
gacauucccuuggaccuuu

SEQ ID NO: 1206394 - RNA, 19 nt, Homo sapiens
  misc_RNA (1)...(19): siRNA sense strand
gcauggacauucccuugga

SEQ ID NO: 1206395 - RNA, 19 nt, Homo sapiens
  misc_RNA (1)...(19): siRNA sense strand
acagacaccucucucaugu

SEQ ID NO: 1206396 - RNA, 19 nt, Homo sapiens
  misc_RNA (1)...(19): siRNA sense strand
aggcaaaacuuacagcuua

SEQ ID NO: 1206397 - RNA, 19 nt, Homo sapiens
  misc_RNA (1)...(19): siRNA sense strand
ucagugaucugccauacca

SEQ ID NO: 1206398 - RNA, 19 nt, Homo sapiens
  misc_RNA (1)...(19): siRNA sense strand
ggacuucaguggauuucag

SEQ ID NO: 1206399 - RNA, 19 nt, Homo sapiens
  misc_RNA (1)...(19): siRNA sense strand
acacagauauacagcagau

SEQ ID NO: 1206400 - RNA, 19 nt, Homo sapiens
  misc_RNA (1)...(19): siRNA sense strand
ugacugcauugaaagaugu

SEQ ID NO: 1206401 - RNA, 19 nt, Homo sapiens
  misc_RNA (1)...(19): siRNA sense strand
cugcagagauggagcuuca

SEQ ID NO: 1206402 - RNA, 19 nt, Homo sapiens
  misc_RNA (1)...(19): siRNA sense strand
agacaccucucucauguac

SEQ ID NO: 1206403 - RNA, 19 nt, Homo sapiens
  misc_RNA (1)...(19): siRNA sense strand
cacugugacugcauugaaa

SEQ ID NO: 1206404 - RNA, 19 nt, Homo sapiens
  misc_RNA (1)...(19): siRNA sense strand
ucccugacaugcugagaaa

SEQ ID NO: 1206405 - RNA, 19 nt, Homo sapiens
  misc_RNA (1)...(19): siRNA sense strand
gucuguaacugguucauca

SEQ ID NO: 1206406 - RNA, 19 nt, Homo sapiens
  misc_RNA (1)...(19): siRNA sense strand
uggcaaagauccaaaucag

SEQ ID NO: 1206407 - RNA, 19 nt, Homo sapiens
  misc_RNA (1)...(19): siRNA sense strand
gcugagaaaggauggcaaa

SEQ ID NO: 1206408 - RNA, 19 nt, Homo sapiens
  misc_RNA (1)...(19): siRNA sense strand
ugagaaaggauggcaaaga

SEQ ID NO: 1206409 - RNA, 19 nt, Homo sapiens
  misc_RNA (1)...(19): siRNA sense strand
gaggacagcauggacauuc

SEQ ID NO: 1206410 - RNA, 19 nt, Homo sapiens
  misc_RNA (1)...(19): siRNA sense strand
ggacauucccuuggaccuu

SEQ ID NO: 1206411 - RNA, 19 nt, Homo sapiens
  misc_RNA (1)...(19): siRNA sense strand
gugacugcauugaaagaug

SEQ ID NO: 1206412 - RNA, 19 nt, Homo sapiens
  misc_RNA (1)...(19): siRNA sense strand
uaugagcaccguuacaaug

SEQ ID NO: 1206413 - RNA, 19 nt, Homo sapiens
  misc_RNA (1)...(19): siRNA sense strand
ccacugugacugcauugaa

SEQ ID NO: 1206414 - RNA, 19 nt, Homo sapiens
  misc_RNA (1)...(19): siRNA sense strand
ccuuggaccuuucuucauc

SEQ ID NO: 1206415 - RNA, 19 nt, Homo sapiens
  misc_RNA (1)...(19): siRNA sense strand
uuacaaugccuauccuuca

SEQ ID NO: 1206416 - RNA, 19 nt, Homo sapiens
  misc_RNA (1)...(19): siRNA sense strand
gugcagauucuucgggauu

SEQ ID NO: 1206417 - RNA, 19 nt, Homo sapiens
  misc_RNA (1)...(19): siRNA sense strand
aaccaggacuucaguggau

SEQ ID NO: 1206418 - RNA, 19 nt, Homo sapiens
  misc_RNA (1)...(19): siRNA sense strand
cagcaaacacaccugucua

SEQ ID NO: 1206419 - RNA, 19 nt, Homo sapiens
  misc_RNA (1)...(19): siRNA sense strand
caaagauccaaaucaguuc

SEQ ID NO: 1206420 - RNA, 19 nt, Homo sapiens
  misc_RNA (1)...(19): siRNA sense strand
gagcuucaggcaaaacuua

SEQ ID NO: 1206421 - RNA, 19 nt, Homo sapiens
  misc_RNA (1)...(19): siRNA sense strand
ggacaaaacacagauauac

SEQ ID NO: 1206422 - RNA, 19 nt, Homo sapiens
  misc_RNA (1)...(19): siRNA sense strand
acagauauacagcagauag

SEQ ID NO: 1206423 - RNA, 19 nt, Homo sapiens
  misc_RNA (1)...(19): siRNA sense strand
auaccacugugacugcauu

SEQ ID NO: 1206424 - RNA, 19 nt, Homo sapiens
  misc_RNA (1)...(19): siRNA sense strand
ggcaaaacuuacagcuuaa

SEQ ID NO: 1206425 - RNA, 19 nt, Homo sapiens
  misc_RNA (1)...(19): siRNA sense strand
cacagacaccucucucaug

SEQ ID NO: 1206426 - RNA, 19 nt, Homo sapiens
  misc_RNA (1)...(19): siRNA sense strand
ucacagacaccucucucau

SEQ ID NO: 1206427 - RNA, 19 nt, Homo sapiens
  misc_RNA (1)...(19): siRNA sense strand
ucaaacgggcugcagagau

SEQ ID NO: 1206428 - RNA, 19 nt, Homo sapiens
  misc_RNA (1)...(19): siRNA sense strand
guaaaucuggaccaaguac

SEQ ID NO: 1206429 - RNA, 19 nt, Homo sapiens
  misc_RNA (1)...(19): siRNA sense strand
gauccaaaucaguucacaa

SEQ ID NO: 1206430 - RNA, 19 nt, Homo sapiens
  misc_RNA (1)...(19): siRNA sense strand
ccaggacuucaguggauuu

SEQ ID NO: 1206431 - RNA, 19 nt, Homo sapiens
  misc_RNA (1)...(19): siRNA sense strand
gcagauucuucgggauugg

SEQ ID NO: 1206432 - RNA, 19 nt, Homo sapiens
  misc_RNA (1)...(19): siRNA sense strand
gaugucccuuucucucucu

SEQ ID NO: 1206433 - RNA, 19 nt, Homo sapiens
  misc_RNA (1)...(19): siRNA sense strand
ggaccucaaccaggacuuc

SEQ ID NO: 1206434 - RNA, 19 nt, Homo sapiens
  misc_RNA (1)...(19): siRNA sense strand
ggcuguaugagcaccguua

SEQ ID NO: 1206435 - RNA, 19 nt, Homo sapiens
  misc_RNA (1)...(19): siRNA sense strand
guaugagcaccguuacaau

SEQ ID NO: 1206436 - RNA, 19 nt, Homo sapiens
  misc_RNA (1)...(19): siRNA sense strand
caguggauuucagcuucua

SEQ ID NO: 1206437 - RNA, 19 nt, Homo sapiens
  misc_RNA (1)...(19): siRNA sense strand
gagaaaggauggcaaagau

SEQ ID NO: 1206438 - RNA, 19 nt, Homo sapiens
  misc_RNA (1)...(19): siRNA sense strand
gcaaagauccaaaucaguu

SEQ ID NO: 1206439 - RNA, 19 nt, Homo sapiens
  misc_RNA (1)...(19): siRNA sense strand
caaacgggcugcagagaug

SEQ ID NO: 1206440 - RNA, 19 nt, Homo sapiens
  misc_RNA (1)...(19): siRNA sense strand
agauggagcuucaggcaaa

SEQ ID NO: 1206441 - RNA, 19 nt, Homo sapiens
  misc_RNA (1)...(19): siRNA sense strand
gacauucccuuggaccuuu

SEQ ID NO: 1206442 - RNA, 19 nt, Homo sapiens
  misc_RNA (1)...(19): siRNA sense strand
gcauggacauucccuugga

SEQ ID NO: 1206443 - RNA, 19 nt, Homo sapiens
  misc_RNA (1)...(19): siRNA sense strand
acagacaccucucucaugu

SEQ ID NO: 1206444 - RNA, 19 nt, Homo sapiens
  misc_RNA (1)...(19): siRNA sense strand
aggcaaaacuuacagcuua

SEQ ID NO: 1206445 - RNA, 19 nt, Homo sapiens
  misc_RNA (1)...(19): siRNA sense strand
ucagugaucugccauacca

SEQ ID NO: 1206446 - RNA, 19 nt, Homo sapiens
  misc_RNA (1)...(19): siRNA sense strand
ggacuucaguggauuucag

SEQ ID NO: 1206447 - RNA, 19 nt, Homo sapiens
  misc_RNA (1)...(19): siRNA sense strand
acacagauauacagcagau

SEQ ID NO: 1206448 - RNA, 19 nt, Homo sapiens
  misc_RNA (1)...(19): siRNA sense strand
ugacugcauugaaagaugu

SEQ ID NO: 1206449 - RNA, 19 nt, Homo sapiens
  misc_RNA (1)...(19): siRNA sense strand
cugcagagauggagcuuca

SEQ ID NO: 1206450 - RNA, 19 nt, Homo sapiens
  misc_RNA (1)...(19): siRNA sense strand
agacaccucucucauguac

SEQ ID NO: 1206451 - RNA, 19 nt, Homo sapiens
  misc_RNA (1)...(19): siRNA sense strand
cacugugacugcauugaaa

SEQ ID NO: 1206452 - RNA, 19 nt, Homo sapiens
  misc_RNA (1)...(19): siRNA sense strand
ucccugacaugcugagaaa

SEQ ID NO: 1206453 - RNA, 19 nt, Homo sapiens
  misc_RNA (1)...(19): siRNA sense strand
gucuguaacugguucauca

SEQ ID NO: 1206454 - RNA, 19 nt, Homo sapiens
  misc_RNA (1)...(19): siRNA sense strand
uggcaaagauccaaaucag

SEQ ID NO: 1206455 - RNA, 19 nt, Homo sapiens
  misc_RNA (1)...(19): siRNA sense strand
gcugagaaaggauggcaaa

SEQ ID NO: 1206456 - RNA, 19 nt, Homo sapiens
  misc_RNA (1)...(19): siRNA sense strand
ugagaaaggauggcaaaga

SEQ ID NO: 1206457 - RNA, 19 nt, Homo sapiens
  misc_RNA (1)...(19): siRNA sense strand
gaggacagcauggacauuc

SEQ ID NO: 1206458 - RNA, 19 nt, Homo sapiens
  misc_RNA (1)...(19): siRNA sense strand
ggacauucccuuggaccuu

SEQ ID NO: 1206459 - RNA, 19 nt, Homo sapiens
  misc_RNA (1)...(19): siRNA sense strand
gugacugcauugaaagaug

SEQ ID NO: 1206460 - RNA, 19 nt, Homo sapiens
  misc_RNA (1)...(19): siRNA sense strand
uaugagcaccguuacaaug

SEQ ID NO: 1206461 - RNA, 19 nt, Homo sapiens
  misc_RNA (1)...(19): siRNA sense strand
ccacugugacugcauugaa

SEQ ID NO: 1206462 - RNA, 19 nt, Homo sapiens
  misc_RNA (1)...(19): siRNA sense strand
ccuuggaccuuucuucauc

SEQ ID NO: 1206463 - RNA, 19 nt, Homo sapiens
  misc_RNA (1)...(19): siRNA sense strand
uuacaaugccuauccuuca

SEQ ID NO: 1206464 - RNA, 19 nt, Homo sapiens
  misc_RNA (1)...(19): siRNA sense strand
gugcagauucuucgggauu

SEQ ID NO: 1206465 - RNA, 19 nt, Homo sapiens
  misc_RNA (1)...(19): siRNA sense strand
aaccaggacuucaguggau

SEQ ID NO: 1206466 - RNA, 19 nt, Homo sapiens
  misc_RNA (1)...(19): siRNA sense strand
cagcaaacacaccugucua

SEQ ID NO: 1206467 - RNA, 19 nt, Homo sapiens
  misc_RNA (1)...(19): siRNA sense strand
caaagauccaaaucaguuc

SEQ ID NO: 1206468 - RNA, 19 nt, Homo sapiens
  misc_RNA (1)...(19): siRNA sense strand
gagcuucaggcaaaacuua

SEQ ID NO: 1206469 - RNA, 19 nt, Homo sapiens
  misc_RNA (1)...(19): siRNA sense strand
ggacaaaacacagauauac

SEQ ID NO: 1206470 - RNA, 19 nt, Homo sapiens
  misc_RNA (1)...(19): siRNA sense strand
acagauauacagcagauag

SEQ ID NO: 1206471 - RNA, 19 nt, Homo sapiens
  misc_RNA (1)...(19): siRNA sense strand
auaccacugugacugcauu

SEQ ID NO: 1206472 - RNA, 19 nt, Homo sapiens
  misc_RNA (1)...(19): siRNA sense strand
ggcaaaacuuacagcuuaa

SEQ ID NO: 1206473 - RNA, 19 nt, Homo sapiens
  misc_RNA (1)...(19): siRNA sense strand
cacagacaccucucucaug

SEQ ID NO: 1206474 - RNA, 19 nt, Homo sapiens
  misc_RNA (1)...(19): siRNA sense strand
ucacagacaccucucucau

SEQ ID NO: 1206475 - RNA, 19 nt, Homo sapiens
  misc_RNA (1)...(19): siRNA sense strand
ucaaacgggcugcagagau

SEQ ID NO: 1206476 - RNA, 19 nt, Homo sapiens
  misc_RNA (1)...(19): siRNA sense strand
guaaaucuggaccaaguac

SEQ ID NO: 1206477 - RNA, 19 nt, Homo sapiens
  misc_RNA (1)...(19): siRNA sense strand
gauccaaaucaguucacaa

SEQ ID NO: 1206478 - RNA, 19 nt, Homo sapiens
  misc_RNA (1)...(19): siRNA sense strand
ccaggacuucaguggauuu

SEQ ID NO: 1206479 - RNA, 19 nt, Homo sapiens
  misc_RNA (1)...(19): siRNA sense strand
gcagauucuucgggauugg

SEQ ID NO: 1206480 - RNA, 19 nt, Homo sapiens
  misc_RNA (1)...(19): siRNA sense strand
gaugucccuuucucucucu

SEQ ID NO: 1206481 - RNA, 19 nt, Homo sapiens
  misc_RNA (1)...(19): siRNA sense strand
ggaccucaaccaggacuuc

SEQ ID NO: 1206482 - RNA, 19 nt, Homo sapiens
  misc_RNA (1)...(19): siRNA sense strand
ggcuguaugagcaccguua

SEQ ID NO: 1206483 - RNA, 19 nt, Homo sapiens
  misc_RNA (1)...(19): siRNA sense strand
guaugagcaccguuacaau

SEQ ID NO: 1206484 - RNA, 19 nt, Homo sapiens
  misc_RNA (1)...(19): siRNA sense strand
caguggauuucagcuucua

SEQ ID NO: 1206485 - RNA, 19 nt, Homo sapiens
  misc_RNA (1)...(19): siRNA sense strand
gagaaaggauggcaaagau

SEQ ID NO: 1206486 - RNA, 19 nt, Homo sapiens
  misc_RNA (1)...(19): siRNA sense strand
gcaaagauccaaaucaguu

SEQ ID NO: 1206487 - RNA, 19 nt, Homo sapiens
  misc_RNA (1)...(19): siRNA sense strand
caaacgggcugcagagaug

SEQ ID NO: 1206488 - RNA, 19 nt, Homo sapiens
  misc_RNA (1)...(19): siRNA sense strand
agauggagcuucaggcaaa

SEQ ID NO: 1206489 - RNA, 19 nt, Homo sapiens
  misc_RNA (1)...(19): siRNA sense strand
gacauucccuuggaccuuu

SEQ ID NO: 1206490 - RNA, 19 nt, Homo sapiens
  misc_RNA (1)...(19): siRNA sense strand
acagacaccucucucaugu

SEQ ID NO: 1206491 - RNA, 19 nt, Homo sapiens
  misc_RNA (1)...(19): siRNA sense strand
aggcaaaacuuacagcuua

SEQ ID NO: 1206492 - RNA, 19 nt, Homo sapiens
  misc_RNA (1)...(19): siRNA sense strand
ucagugaucugccauacca

SEQ ID NO: 1206493 - RNA, 19 nt, Homo sapiens
  misc_RNA (1)...(19): siRNA sense strand
ggacuucaguggauuucag

SEQ ID NO: 1206494 - RNA, 19 nt, Homo sapiens
  misc_RNA (1)...(19): siRNA sense strand
acacagauauacagcagau

SEQ ID NO: 1206495 - RNA, 19 nt, Homo sapiens
  misc_RNA (1)...(19): siRNA sense strand
ugacugcauugaaagaugu

SEQ ID NO: 1206496 - RNA, 19 nt, Homo sapiens
  misc_RNA (1)...(19): siRNA sense strand
cugcagagauggagcuuca

SEQ ID NO: 1206497 - RNA, 19 nt, Homo sapiens
  misc_RNA (1)...(19): siRNA sense strand
agacaccucucucauguac

SEQ ID NO: 1206498 - RNA, 19 nt, Homo sapiens
  misc_RNA (1)...(19): siRNA sense strand
cacugugacugcauugaaa

SEQ ID NO: 1206499 - RNA, 19 nt, Homo sapiens
  misc_RNA (1)...(19): siRNA sense strand
ucccugacaugcugagaaa

SEQ ID NO: 1206500 - RNA, 19 nt, Homo sapiens
  misc_RNA (1)...(19): siRNA sense strand
gucuguaacugguucauca

SEQ ID NO: 1206501 - RNA, 19 nt, Homo sapiens
  misc_RNA (1)...(19): siRNA sense strand
uggcaaagauccaaaucag

SEQ ID NO: 1206502 - RNA, 19 nt, Homo sapiens
  misc_RNA (1)...(19): siRNA sense strand
gcugagaaaggauggcaaa

SEQ ID NO: 1206503 - RNA, 19 nt, Homo sapiens
  misc_RNA (1)...(19): siRNA sense strand
ugagaaaggauggcaaaga

SEQ ID NO: 1206504 - RNA, 19 nt, Homo sapiens
  misc_RNA (1)...(19): siRNA sense strand
ggacauucccuuggaccuu

SEQ ID NO: 1206505 - RNA, 19 nt, Homo sapiens
  misc_RNA (1)...(19): siRNA sense strand
gugacugcauugaaagaug

SEQ ID NO: 1206506 - RNA, 19 nt, Homo sapiens
  misc_RNA (1)...(19): siRNA sense strand
uaugagcaccguuacaaug

SEQ ID NO: 1206507 - RNA, 19 nt, Homo sapiens
  misc_RNA (1)...(19): siRNA sense strand
ccuuggaccuuucuucauc

SEQ ID NO: 1206508 - RNA, 19 nt, Homo sapiens
  misc_RNA (1)...(19): siRNA sense strand
ccacugugacugcauugaa

SEQ ID NO: 1206509 - RNA, 19 nt, Homo sapiens
  misc_RNA (1)...(19): siRNA sense strand
uuacaaugccuauccuuca

SEQ ID NO: 1206510 - RNA, 19 nt, Homo sapiens
  misc_RNA (1)...(19): siRNA sense strand
cagcaaacacaccugucua

SEQ ID NO: 1206511 - RNA, 19 nt, Homo sapiens
  misc_RNA (1)...(19): siRNA sense strand
aaccaggacuucaguggau

SEQ ID NO: 1206512 - RNA, 19 nt, Homo sapiens
  misc_RNA (1)...(19): siRNA sense strand
gugcagauucuucgggauu

SEQ ID NO: 1206513 - RNA, 19 nt, Homo sapiens
  misc_RNA (1)...(19): siRNA sense strand
caaagauccaaaucaguuc

SEQ ID NO: 1206514 - RNA, 19 nt, Homo sapiens
  misc_RNA (1)...(19): siRNA sense strand
gagcuucaggcaaaacuua

SEQ ID NO: 1206515 - RNA, 19 nt, Homo sapiens
  misc_RNA (1)...(19): siRNA sense strand
ggacaaaacacagauauac

SEQ ID NO: 1206516 - RNA, 19 nt, Homo sapiens
  misc_RNA (1)...(19): siRNA sense strand
acagauauacagcagauag

SEQ ID NO: 1206517 - RNA, 19 nt, Homo sapiens
  misc_RNA (1)...(19): siRNA sense strand
auaccacugugacugcauu

SEQ ID NO: 1206518 - RNA, 19 nt, Homo sapiens
  misc_RNA (1)...(19): siRNA sense strand
ggcaaaacuuacagcuuaa

SEQ ID NO: 1206519 - RNA, 19 nt, Homo sapiens
  misc_RNA (1)...(19): siRNA sense strand
cacagacaccucucucaug

SEQ ID NO: 1206520 - RNA, 19 nt, Homo sapiens
  misc_RNA (1)...(19): siRNA sense strand
ucacagacaccucucucau

SEQ ID NO: 1206521 - RNA, 19 nt, Homo sapiens
  misc_RNA (1)...(19): siRNA sense strand
ucaaacgggcugcagagau

SEQ ID NO: 1206522 - RNA, 19 nt, Homo sapiens
  misc_RNA (1)...(19): siRNA sense strand
guaaaucuggaccaaguac

SEQ ID NO: 1206523 - RNA, 19 nt, Homo sapiens
  misc_RNA (1)...(19): siRNA sense strand
gauccaaaucaguucacaa

SEQ ID NO: 1206524 - RNA, 19 nt, Homo sapiens
  misc_RNA (1)...(19): siRNA sense strand
gcagauucuucgggauugg

SEQ ID NO: 1206525 - RNA, 19 nt, Homo sapiens
  misc_RNA (1)...(19): siRNA sense strand
ccaggacuucaguggauuu

SEQ ID NO: 1206526 - RNA, 19 nt, Homo sapiens
  misc_RNA (1)...(19): siRNA sense strand
ggcuguaugagcaccguua

SEQ ID NO: 1206527 - RNA, 19 nt, Homo sapiens
  misc_RNA (1)...(19): siRNA sense strand
ggaccucaaccaggacuuc

SEQ ID NO: 1206528 - RNA, 19 nt, Homo sapiens
  misc_RNA (1)...(19): siRNA sense strand
guaugagcaccguuacaau

SEQ ID NO: 1206529 - RNA, 19 nt, Homo sapiens
  misc_RNA (1)...(19): siRNA sense strand
gaugucccuuucucucucu

SEQ ID NO: 1206530 - RNA, 19 nt, Homo sapiens
  misc_RNA (1)...(19): siRNA sense strand
caguggauuucagcuucua

SEQ ID NO: 1206531 - RNA, 19 nt, Homo sapiens
  misc_RNA (1)...(19): siRNA sense strand
gagaaaggauggcaaagau

SEQ ID NO: 1206532 - RNA, 19 nt, Homo sapiens
  misc_RNA (1)...(19): siRNA sense strand
gcaaagauccaaaucaguu

SEQ ID NO: 1206533 - RNA, 19 nt, Homo sapiens
  misc_RNA (1)...(19): siRNA sense strand
caaacgggcugcagagaug

SEQ ID NO: 1206534 - RNA, 19 nt, Homo sapiens
  misc_RNA (1)...(19): siRNA sense strand
agauggagcuucaggcaaa

SEQ ID NO: 1206535 - RNA, 19 nt, Homo sapiens
  misc_RNA (1)...(19): siRNA sense strand
gacauucccuuggaccuuu

SEQ ID NO: 1206536 - RNA, 19 nt, Homo sapiens
  misc_RNA (1)...(19): siRNA sense strand
acagacaccucucucaugu

SEQ ID NO: 1206537 - RNA, 19 nt, Homo sapiens
  misc_RNA (1)...(19): siRNA sense strand
aggcaaaacuuacagcuua

SEQ ID NO: 1206538 - RNA, 19 nt, Homo sapiens
  misc_RNA (1)...(19): siRNA sense strand
ucagugaucugccauacca

SEQ ID NO: 1206539 - RNA, 19 nt, Homo sapiens
  misc_RNA (1)...(19): siRNA sense strand
ggacuucaguggauuucag

SEQ ID NO: 1206540 - RNA, 19 nt, Homo sapiens
  misc_RNA (1)...(19): siRNA sense strand
acacagauauacagcagau

SEQ ID NO: 1206541 - RNA, 19 nt, Homo sapiens
  misc_RNA (1)...(19): siRNA sense strand
ugacugcauugaaagaugu

SEQ ID NO: 1206542 - RNA, 19 nt, Homo sapiens
  misc_RNA (1)...(19): siRNA sense strand
cugcagagauggagcuuca

SEQ ID NO: 1206543 - RNA, 19 nt, Homo sapiens
  misc_RNA (1)...(19): siRNA sense strand
agacaccucucucauguac

SEQ ID NO: 1206544 - RNA, 19 nt, Homo sapiens
  misc_RNA (1)...(19): siRNA sense strand
cacugugacugcauugaaa

SEQ ID NO: 1206545 - RNA, 19 nt, Homo sapiens
  misc_RNA (1)...(19): siRNA sense strand
ucccugacaugcugagaaa

SEQ ID NO: 1206546 - RNA, 19 nt, Homo sapiens
  misc_RNA (1)...(19): siRNA sense strand
gucuguaacugguucauca

SEQ ID NO: 1206547 - RNA, 19 nt, Homo sapiens
  misc_RNA (1)...(19): siRNA sense strand
uggcaaagauccaaaucag

SEQ ID NO: 1206548 - RNA, 19 nt, Homo sapiens
  misc_RNA (1)...(19): siRNA sense strand
gcugagaaaggauggcaaa

SEQ ID NO: 1206549 - RNA, 19 nt, Homo sapiens
  misc_RNA (1)...(19): siRNA sense strand
ugagaaaggauggcaaaga

SEQ ID NO: 1206550 - RNA, 19 nt, Homo sapiens
  misc_RNA (1)...(19): siRNA sense strand
ggacauucccuuggaccuu

SEQ ID NO: 1206551 - RNA, 19 nt, Homo sapiens
  misc_RNA (1)...(19): siRNA sense strand
gugacugcauugaaagaug

SEQ ID NO: 1206552 - RNA, 19 nt, Homo sapiens
  misc_RNA (1)...(19): siRNA sense strand
uaugagcaccguuacaaug

SEQ ID NO: 1206553 - RNA, 19 nt, Homo sapiens
  misc_RNA (1)...(19): siRNA sense strand
ccuuggaccuuucuucauc

SEQ ID NO: 1206554 - RNA, 19 nt, Homo sapiens
  misc_RNA (1)...(19): siRNA sense strand
ccacugugacugcauugaa

SEQ ID NO: 1206555 - RNA, 19 nt, Homo sapiens
  misc_RNA (1)...(19): siRNA sense strand
uuacaaugccuauccuuca

SEQ ID NO: 1206556 - RNA, 19 nt, Homo sapiens
  misc_RNA (1)...(19): siRNA sense strand
cagcaaacacaccugucua

SEQ ID NO: 1206557 - RNA, 19 nt, Homo sapiens
  misc_RNA (1)...(19): siRNA sense strand
aaccaggacuucaguggau

SEQ ID NO: 1206558 - RNA, 19 nt, Homo sapiens
  misc_RNA (1)...(19): siRNA sense strand
gugcagauucuucgggauu

SEQ ID NO: 1206559 - RNA, 19 nt, Homo sapiens
  misc_RNA (1)...(19): siRNA sense strand
caaagauccaaaucaguuc

SEQ ID NO: 1206560 - RNA, 19 nt, Homo sapiens
  misc_RNA (1)...(19): siRNA sense strand
gagcuucaggcaaaacuua

SEQ ID NO: 1206561 - RNA, 19 nt, Homo sapiens
  misc_RNA (1)...(19): siRNA sense strand
ggacaaaacacagauauac

SEQ ID NO: 1206562 - RNA, 19 nt, Homo sapiens
  misc_RNA (1)...(19): siRNA sense strand
acagauauacagcagauag

SEQ ID NO: 1206563 - RNA, 19 nt, Homo sapiens
  misc_RNA (1)...(19): siRNA sense strand
auaccacugugacugcauu

SEQ ID NO: 1206564 - RNA, 19 nt, Homo sapiens
  misc_RNA (1)...(19): siRNA sense strand
ggcaaaacuuacagcuuaa

SEQ ID NO: 1206565 - RNA, 19 nt, Homo sapiens
  misc_RNA (1)...(19): siRNA sense strand
cacagacaccucucucaug

SEQ ID NO: 1206566 - RNA, 19 nt, Homo sapiens
  misc_RNA (1)...(19): siRNA sense strand
ucacagacaccucucucau

SEQ ID NO: 1206567 - RNA, 19 nt, Homo sapiens
  misc_RNA (1)...(19): siRNA sense strand
ucaaacgggcugcagagau

SEQ ID NO: 1206568 - RNA, 19 nt, Homo sapiens
  misc_RNA (1)...(19): siRNA sense strand
guaaaucuggaccaaguac

SEQ ID NO: 1206569 - RNA, 19 nt, Homo sapiens
  misc_RNA (1)...(19): siRNA sense strand
gauccaaaucaguucacaa

SEQ ID NO: 1206570 - RNA, 19 nt, Homo sapiens
  misc_RNA (1)...(19): siRNA sense strand
gcagauucuucgggauugg

SEQ ID NO: 1206571 - RNA, 19 nt, Homo sapiens
  misc_RNA (1)...(19): siRNA sense strand
ccaggacuucaguggauuu

SEQ ID NO: 1206572 - RNA, 19 nt, Homo sapiens
  misc_RNA (1)...(19): siRNA sense strand
ggcuguaugagcaccguua

SEQ ID NO: 1206573 - RNA, 19 nt, Homo sapiens
  misc_RNA (1)...(19): siRNA sense strand
ggaccucaaccaggacuuc

SEQ ID NO: 1206574 - RNA, 19 nt, Homo sapiens
  misc_RNA (1)...(19): siRNA sense strand
guaugagcaccguuacaau

SEQ ID NO: 1206575 - RNA, 19 nt, Homo sapiens
  misc_RNA (1)...(19): siRNA sense strand
gaugucccuuucucucucu

SEQ ID NO: 1206576 - RNA, 19 nt, Homo sapiens
  misc_RNA (1)...(19): siRNA sense strand
caguggauuucagcuucua

SEQ ID NO: 1206577 - RNA, 19 nt, Homo sapiens
  misc_RNA (1)...(19): siRNA sense strand
gagaaaggauggcaaagau

SEQ ID NO: 1206578 - RNA, 19 nt, Homo sapiens
  misc_RNA (1)...(19): siRNA sense strand
gcaaagauccaaaucaguu

SEQ ID NO: 1206579 - RNA, 19 nt, Homo sapiens
  misc_RNA (1)...(19): siRNA sense strand
caaacgggcugcagagaug

SEQ ID NO: 1206580 - RNA, 19 nt, Homo sapiens
  misc_RNA (1)...(19): siRNA sense strand
agauggagcuucaggcaaa

SEQ ID NO: 1206581 - RNA, 19 nt, Homo sapiens
  misc_RNA (1)...(19): siRNA sense strand
gacauucccuuggaccuuu

SEQ ID NO: 1206582 - RNA, 19 nt, Homo sapiens
  misc_RNA (1)...(19): siRNA sense strand
acagacaccucucucaugu

SEQ ID NO: 1206583 - RNA, 19 nt, Homo sapiens
  misc_RNA (1)...(19): siRNA sense strand
aggcaaaacuuacagcuua

SEQ ID NO: 1206584 - RNA, 19 nt, Homo sapiens
  misc_RNA (1)...(19): siRNA sense strand
ucagugaucugccauacca

SEQ ID NO: 1206585 - RNA, 19 nt, Homo sapiens
  misc_RNA (1)...(19): siRNA sense strand
ggacuucaguggauuucag

SEQ ID NO: 1206586 - RNA, 19 nt, Homo sapiens
  misc_RNA (1)...(19): siRNA sense strand
acacagauauacagcagau

SEQ ID NO: 1206587 - RNA, 19 nt, Homo sapiens
  misc_RNA (1)...(19): siRNA sense strand
ugacugcauugaaagaugu

SEQ ID NO: 1206588 - RNA, 19 nt, Homo sapiens
  misc_RNA (1)...(19): siRNA sense strand
cugcagagauggagcuuca

SEQ ID NO: 1206589 - RNA, 19 nt, Homo sapiens
  misc_RNA (1)...(19): siRNA sense strand
agacaccucucucauguac

SEQ ID NO: 1206590 - RNA, 19 nt, Homo sapiens
  misc_RNA (1)...(19): siRNA sense strand
cacugugacugcauugaaa

SEQ ID NO: 1206591 - RNA, 19 nt, Homo sapiens
  misc_RNA (1)...(19): siRNA sense strand
ucccugacaugcugagaaa

SEQ ID NO: 1206592 - RNA, 19 nt, Homo sapiens
  misc_RNA (1)...(19): siRNA sense strand
gucuguaacugguucauca

SEQ ID NO: 1206593 - RNA, 19 nt, Homo sapiens
  misc_RNA (1)...(19): siRNA sense strand
uggcaaagauccaaaucag

SEQ ID NO: 1206594 - RNA, 19 nt, Homo sapiens
  misc_RNA (1)...(19): siRNA sense strand
gcugagaaaggauggcaaa

SEQ ID NO: 1206595 - RNA, 19 nt, Homo sapiens
  misc_RNA (1)...(19): siRNA sense strand
ugagaaaggauggcaaaga

SEQ ID NO: 1206596 - RNA, 19 nt, Homo sapiens
  misc_RNA (1)...(19): siRNA sense strand
ggacauucccuuggaccuu

SEQ ID NO: 1206597 - RNA, 19 nt, Homo sapiens
  misc_RNA (1)...(19): siRNA sense strand
gugacugcauugaaagaug

SEQ ID NO: 1206598 - RNA, 19 nt, Homo sapiens
  misc_RNA (1)...(19): siRNA sense strand
uaugagcaccguuacaaug

SEQ ID NO: 1206599 - RNA, 19 nt, Homo sapiens
  misc_RNA (1)...(19): siRNA sense strand
ccuuggaccuuucuucauc

SEQ ID NO: 1206600 - RNA, 19 nt, Homo sapiens
  misc_RNA (1)...(19): siRNA sense strand
ccacugugacugcauugaa

SEQ ID NO: 1206601 - RNA, 19 nt, Homo sapiens
  misc_RNA (1)...(19): siRNA sense strand
uuacaaugccuauccuuca

SEQ ID NO: 1206602 - RNA, 19 nt, Homo sapiens
  misc_RNA (1)...(19): siRNA sense strand
cagcaaacacaccugucua

SEQ ID NO: 1206603 - RNA, 19 nt, Homo sapiens
  misc_RNA (1)...(19): siRNA sense strand
aaccaggacuucaguggau

SEQ ID NO: 1206604 - RNA, 19 nt, Homo sapiens
  misc_RNA (1)...(19): siRNA sense strand
gugcagauucuucgggauu

SEQ ID NO: 1206605 - RNA, 19 nt, Homo sapiens
  misc_RNA (1)...(19): siRNA sense strand
caaagauccaaaucaguuc

SEQ ID NO: 1206606 - RNA, 19 nt, Homo sapiens
  misc_RNA (1)...(19): siRNA sense strand
gagcuucaggcaaaacuua

SEQ ID NO: 1206607 - RNA, 19 nt, Homo sapiens
  misc_RNA (1)...(19): siRNA sense strand
ggacaaaacacagauauac

SEQ ID NO: 1206608 - RNA, 19 nt, Homo sapiens
  misc_RNA (1)...(19): siRNA sense strand
acagauauacagcagauag

SEQ ID NO: 1206609 - RNA, 19 nt, Homo sapiens
  misc_RNA (1)...(19): siRNA sense strand
auaccacugugacugcauu

SEQ ID NO: 1206610 - RNA, 19 nt, Homo sapiens
  misc_RNA (1)...(19): siRNA sense strand
ggcaaaacuuacagcuuaa

SEQ ID NO: 1206611 - RNA, 19 nt, Homo sapiens
  misc_RNA (1)...(19): siRNA sense strand
cacagacaccucucucaug

SEQ ID NO: 1206612 - RNA, 19 nt, Homo sapiens
  misc_RNA (1)...(19): siRNA sense strand
ucacagacaccucucucau

SEQ ID NO: 1206613 - RNA, 19 nt, Homo sapiens
  misc_RNA (1)...(19): siRNA sense strand
ucaaacgggcugcagagau

SEQ ID NO: 1206614 - RNA, 19 nt, Homo sapiens
  misc_RNA (1)...(19): siRNA sense strand
guaaaucuggaccaaguac

SEQ ID NO: 1206615 - RNA, 19 nt, Homo sapiens
  misc_RNA (1)...(19): siRNA sense strand
gauccaaaucaguucacaa

SEQ ID NO: 1206616 - RNA, 19 nt, Homo sapiens
  misc_RNA (1)...(19): siRNA sense strand
gcagauucuucgggauugg

SEQ ID NO: 1206617 - RNA, 19 nt, Homo sapiens
  misc_RNA (1)...(19): siRNA sense strand
ccaggacuucaguggauuu

SEQ ID NO: 1206618 - RNA, 19 nt, Homo sapiens
  misc_RNA (1)...(19): siRNA sense strand
ggcuguaugagcaccguua

SEQ ID NO: 1206619 - RNA, 19 nt, Homo sapiens
  misc_RNA (1)...(19): siRNA sense strand
ggaccucaaccaggacuuc

SEQ ID NO: 1206620 - RNA, 19 nt, Homo sapiens
  misc_RNA (1)...(19): siRNA sense strand
guaugagcaccguuacaau

SEQ ID NO: 1206621 - RNA, 19 nt, Homo sapiens
  misc_RNA (1)...(19): siRNA sense strand
gaugucccuuucucucucu

SEQ ID NO: 1206622 - RNA, 19 nt, Homo sapiens
  misc_RNA (1)...(19): siRNA sense strand
caguggauuucagcuucua

SEQ ID NO: 1206623 - RNA, 19 nt, Homo sapiens
  misc_RNA (1)...(19): siRNA sense strand
gagaaaggauggcaaagau

SEQ ID NO: 1206624 - RNA, 19 nt, Homo sapiens
  misc_RNA (1)...(19): siRNA sense strand
gcaaagauccaaaucaguu

SEQ ID NO: 1206625 - RNA, 19 nt, Homo sapiens
  misc_RNA (1)...(19): siRNA sense strand
caaacgggcugcagagaug

SEQ ID NO: 1206626 - RNA, 19 nt, Homo sapiens
  misc_RNA (1)...(19): siRNA sense strand
agauggagcuucaggcaaa

SEQ ID NO: 1206627 - RNA, 19 nt, Homo sapiens
  misc_RNA (1)...(19): siRNA sense strand
gacauucccuuggaccuuu

SEQ ID NO: 1206628 - RNA, 19 nt, Homo sapiens
  misc_RNA (1)...(19): siRNA sense strand
acagacaccucucucaugu

SEQ ID NO: 1206629 - RNA, 19 nt, Homo sapiens
  misc_RNA (1)...(19): siRNA sense strand
aggcaaaacuuacagcuua

SEQ ID NO: 1206630 - RNA, 19 nt, Homo sapiens
  misc_RNA (1)...(19): siRNA sense strand
ucagugaucugccauacca

SEQ ID NO: 1206631 - RNA, 19 nt, Homo sapiens
  misc_RNA (1)...(19): siRNA sense strand
ggacuucaguggauuucag

SEQ ID NO: 1206632 - RNA, 19 nt, Homo sapiens
  misc_RNA (1)...(19): siRNA sense strand
acacagauauacagcagau

SEQ ID NO: 1206633 - RNA, 19 nt, Homo sapiens
  misc_RNA (1)...(19): siRNA sense strand
ugacugcauugaaagaugu

SEQ ID NO: 1206634 - RNA, 19 nt, Homo sapiens
  misc_RNA (1)...(19): siRNA sense strand
cugcagagauggagcuuca

SEQ ID NO: 1206635 - RNA, 19 nt, Homo sapiens
  misc_RNA (1)...(19): siRNA sense strand
agacaccucucucauguac

SEQ ID NO: 1206636 - RNA, 19 nt, Homo sapiens
  misc_RNA (1)...(19): siRNA sense strand
cacugugacugcauugaaa

SEQ ID NO: 1206637 - RNA, 19 nt, Homo sapiens
  misc_RNA (1)...(19): siRNA sense strand
ucccugacaugcugagaaa

SEQ ID NO: 1206638 - RNA, 19 nt, Homo sapiens
  misc_RNA (1)...(19): siRNA sense strand
gucuguaacugguucauca

SEQ ID NO: 1206639 - RNA, 19 nt, Homo sapiens
  misc_RNA (1)...(19): siRNA sense strand
uggcaaagauccaaaucag

SEQ ID NO: 1206640 - RNA, 19 nt, Homo sapiens
  misc_RNA (1)...(19): siRNA sense strand
gcugagaaaggauggcaaa

SEQ ID NO: 1206641 - RNA, 19 nt, Homo sapiens
  misc_RNA (1)...(19): siRNA sense strand
ugagaaaggauggcaaaga

SEQ ID NO: 1206642 - RNA, 19 nt, Homo sapiens
  misc_RNA (1)...(19): siRNA sense strand
ggacauucccuuggaccuu

SEQ ID NO: 1206643 - RNA, 19 nt, Homo sapiens
  misc_RNA (1)...(19): siRNA sense strand
gugacugcauugaaagaug

SEQ ID NO: 1206644 - RNA, 19 nt, Homo sapiens
  misc_RNA (1)...(19): siRNA sense strand
uaugagcaccguuacaaug

SEQ ID NO: 1206645 - RNA, 19 nt, Homo sapiens
  misc_RNA (1)...(19): siRNA sense strand
ccuuggaccuuucuucauc

SEQ ID NO: 1206646 - RNA, 19 nt, Homo sapiens
  misc_RNA (1)...(19): siRNA sense strand
ccacugugacugcauugaa

SEQ ID NO: 1206647 - RNA, 19 nt, Homo sapiens
  misc_RNA (1)...(19): siRNA sense strand
uuacaaugccuauccuuca

SEQ ID NO: 1206648 - RNA, 19 nt, Homo sapiens
  misc_RNA (1)...(19): siRNA sense strand
cagcaaacacaccugucua

SEQ ID NO: 1206649 - RNA, 19 nt, Homo sapiens
  misc_RNA (1)...(19): siRNA sense strand
aaccaggacuucaguggau

SEQ ID NO: 1206650 - RNA, 19 nt, Homo sapiens
  misc_RNA (1)...(19): siRNA sense strand
gugcagauucuucgggauu

SEQ ID NO: 1206651 - RNA, 19 nt, Homo sapiens
  misc_RNA (1)...(19): siRNA sense strand
caaagauccaaaucaguuc

SEQ ID NO: 1206652 - RNA, 19 nt, Homo sapiens
  misc_RNA (1)...(19): siRNA sense strand
gagcuucaggcaaaacuua

SEQ ID NO: 1206653 - RNA, 19 nt, Homo sapiens
  misc_RNA (1)...(19): siRNA sense strand
ggacaaaacacagauauac

SEQ ID NO: 1206654 - RNA, 19 nt, Homo sapiens
  misc_RNA (1)...(19): siRNA sense strand
acagauauacagcagauag

SEQ ID NO: 1206655 - RNA, 19 nt, Homo sapiens
  misc_RNA (1)...(19): siRNA sense strand
auaccacugugacugcauu

SEQ ID NO: 1206656 - RNA, 19 nt, Homo sapiens
  misc_RNA (1)...(19): siRNA sense strand
ggcaaaacuuacagcuuaa

SEQ ID NO: 1206657 - RNA, 19 nt, Homo sapiens
  misc_RNA (1)...(19): siRNA sense strand
cacagacaccucucucaug

SEQ ID NO: 1206658 - RNA, 19 nt, Homo sapiens
  misc_RNA (1)...(19): siRNA sense strand
ucacagacaccucucucau

SEQ ID NO: 1206659 - RNA, 19 nt, Homo sapiens
  misc_RNA (1)...(19): siRNA sense strand
ucaaacgggcugcagagau

SEQ ID NO: 1206660 - RNA, 19 nt, Homo sapiens
  misc_RNA (1)...(19): siRNA sense strand
guaaaucuggaccaaguac

SEQ ID NO: 1206661 - RNA, 19 nt, Homo sapiens
  misc_RNA (1)...(19): siRNA sense strand
gauccaaaucaguucacaa

SEQ ID NO: 1206662 - RNA, 19 nt, Homo sapiens
  misc_RNA (1)...(19): siRNA sense strand
gcagauucuucgggauugg

SEQ ID NO: 1206663 - RNA, 19 nt, Homo sapiens
  misc_RNA (1)...(19): siRNA sense strand
ccaggacuucaguggauuu

SEQ ID NO: 1206664 - RNA, 19 nt, Homo sapiens
  misc_RNA (1)...(19): siRNA sense strand
ggcuguaugagcaccguua

SEQ ID NO: 1206665 - RNA, 19 nt, Homo sapiens
  misc_RNA (1)...(19): siRNA sense strand
ggaccucaaccaggacuuc

SEQ ID NO: 1206666 - RNA, 19 nt, Homo sapiens
  misc_RNA (1)...(19): siRNA sense strand
guaugagcaccguuacaau

SEQ ID NO: 1206667 - RNA, 19 nt, Homo sapiens
  misc_RNA (1)...(19): siRNA sense strand
gaugucccuuucucucucu

SEQ ID NO: 1206668 - RNA, 19 nt, Homo sapiens
  misc_RNA (1)...(19): siRNA sense strand
caguggauuucagcuucua

SEQ ID NO: 1206669 - RNA, 19 nt, Homo sapiens
  misc_RNA (1)...(19): siRNA sense strand
gagaaaggauggcaaagau

SEQ ID NO: 1206670 - RNA, 19 nt, Homo sapiens
  misc_RNA (1)...(19): siRNA sense strand
gcaaagauccaaaucaguu

SEQ ID NO: 1206671 - RNA, 19 nt, Homo sapiens
  misc_RNA (1)...(19): siRNA sense strand
caaacgggcugcagagaug

SEQ ID NO: 1206672 - RNA, 19 nt, Homo sapiens
  misc_RNA (1)...(19): siRNA sense strand
agauggagcuucaggcaaa

SEQ ID NO: 1206673 - RNA, 19 nt, Homo sapiens
  misc_RNA (1)...(19): siRNA sense strand
gacauucccuuggaccuuu

SEQ ID NO: 1206674 - RNA, 19 nt, Homo sapiens
  misc_RNA (1)...(19): siRNA sense strand
gcauggacauucccuugga

SEQ ID NO: 1206675 - RNA, 19 nt, Homo sapiens
  misc_RNA (1)...(19): siRNA sense strand
acagacaccucucucaugu

SEQ ID NO: 1206676 - RNA, 19 nt, Homo sapiens
  misc_RNA (1)...(19): siRNA sense strand
aggcaaaacuuacagcuua

SEQ ID NO: 1206677 - RNA, 19 nt, Homo sapiens
  misc_RNA (1)...(19): siRNA sense strand
ucagugaucugccauacca

SEQ ID NO: 1206678 - RNA, 19 nt, Homo sapiens
  misc_RNA (1)...(19): siRNA sense strand
ggacuucaguggauuucag

SEQ ID NO: 1206679 - RNA, 19 nt, Homo sapiens
  misc_RNA (1)...(19): siRNA sense strand
acacagauauacagcagau

SEQ ID NO: 1206680 - RNA, 19 nt, Homo sapiens
  misc_RNA (1)...(19): siRNA sense strand
ugacugcauugaaagaugu

SEQ ID NO: 1206681 - RNA, 19 nt, Homo sapiens
  misc_RNA (1)...(19): siRNA sense strand
cugcagagauggagcuuca

SEQ ID NO: 1206682 - RNA, 19 nt, Homo sapiens
  misc_RNA (1)...(19): siRNA sense strand
agacaccucucucauguac

SEQ ID NO: 1206683 - RNA, 19 nt, Homo sapiens
  misc_RNA (1)...(19): siRNA sense strand
cacugugacugcauugaaa

SEQ ID NO: 1206684 - RNA, 19 nt, Homo sapiens
  misc_RNA (1)...(19): siRNA sense strand
ucccugacaugcugagaaa

SEQ ID NO: 1206685 - RNA, 19 nt, Homo sapiens
  misc_RNA (1)...(19): siRNA sense strand
gucuguaacugguucauca

SEQ ID NO: 1206686 - RNA, 19 nt, Homo sapiens
  misc_RNA (1)...(19): siRNA sense strand
uggcaaagauccaaaucag

SEQ ID NO: 1206687 - RNA, 19 nt, Homo sapiens
  misc_RNA (1)...(19): siRNA sense strand
gcugagaaaggauggcaaa

SEQ ID NO: 1206688 - RNA, 19 nt, Homo sapiens
  misc_RNA (1)...(19): siRNA sense strand
ugagaaaggauggcaaaga

SEQ ID NO: 1206689 - RNA, 19 nt, Homo sapiens
  misc_RNA (1)...(19): siRNA sense strand
gaggacagcauggacauuc

SEQ ID NO: 1206690 - RNA, 19 nt, Homo sapiens
  misc_RNA (1)...(19): siRNA sense strand
ggacauucccuuggaccuu

SEQ ID NO: 1206691 - RNA, 19 nt, Homo sapiens
  misc_RNA (1)...(19): siRNA sense strand
gugacugcauugaaagaug

SEQ ID NO: 1206692 - RNA, 19 nt, Homo sapiens
  misc_RNA (1)...(19): siRNA sense strand
uaugagcaccguuacaaug

SEQ ID NO: 1206693 - RNA, 19 nt, Homo sapiens
  misc_RNA (1)...(19): siRNA sense strand
ccacugugacugcauugaa

SEQ ID NO: 1206694 - RNA, 19 nt, Homo sapiens
  misc_RNA (1)...(19): siRNA sense strand
ccuuggaccuuucuucauc

SEQ ID NO: 1206695 - RNA, 19 nt, Homo sapiens
  misc_RNA (1)...(19): siRNA sense strand
uuacaaugccuauccuuca

SEQ ID NO: 1206696 - RNA, 19 nt, Homo sapiens
  misc_RNA (1)...(19): siRNA sense strand
gugcagauucuucgggauu

SEQ ID NO: 1206697 - RNA, 19 nt, Homo sapiens
  misc_RNA (1)...(19): siRNA sense strand
aaccaggacuucaguggau

SEQ ID NO: 1206698 - RNA, 19 nt, Homo sapiens
  misc_RNA (1)...(19): siRNA sense strand
cagcaaacacaccugucua

SEQ ID NO: 1206699 - RNA, 19 nt, Homo sapiens
  misc_RNA (1)...(19): siRNA sense strand
caaagauccaaaucaguuc

SEQ ID NO: 1206700 - RNA, 19 nt, Homo sapiens
  misc_RNA (1)...(19): siRNA sense strand
gagcuucaggcaaaacuua

SEQ ID NO: 1206701 - RNA, 19 nt, Homo sapiens
  misc_RNA (1)...(19): siRNA sense strand
ggacaaaacacagauauac

SEQ ID NO: 1206702 - RNA, 19 nt, Homo sapiens
  misc_RNA (1)...(19): siRNA sense strand
acagauauacagcagauag

SEQ ID NO: 1206703 - RNA, 19 nt, Homo sapiens
  misc_RNA (1)...(19): siRNA sense strand
auaccacugugacugcauu

SEQ ID NO: 1206704 - RNA, 19 nt, Homo sapiens
  misc_RNA (1)...(19): siRNA sense strand
ggcaaaacuuacagcuuaa

SEQ ID NO: 1206705 - RNA, 19 nt, Homo sapiens
  misc_RNA (1)...(19): siRNA sense strand
cacagacaccucucucaug

SEQ ID NO: 1206706 - RNA, 19 nt, Homo sapiens
  misc_RNA (1)...(19): siRNA sense strand
ucacagacaccucucucau

SEQ ID NO: 1206707 - RNA, 19 nt, Homo sapiens
  misc_RNA (1)...(19): siRNA sense strand
ucaaacgggcugcagagau

SEQ ID NO: 1206708 - RNA, 19 nt, Homo sapiens
  misc_RNA (1)...(19): siRNA sense strand
guaaaucuggaccaaguac

SEQ ID NO: 1206709 - RNA, 19 nt, Homo sapiens
  misc_RNA (1)...(19): siRNA sense strand
gauccaaaucaguucacaa

SEQ ID NO: 1206710 - RNA, 19 nt, Homo sapiens
  misc_RNA (1)...(19): siRNA sense strand
ccaggacuucaguggauuu

SEQ ID NO: 1206711 - RNA, 19 nt, Homo sapiens
  misc_RNA (1)...(19): siRNA sense strand
gcagauucuucgggauugg

SEQ ID NO: 1206712 - RNA, 19 nt, Homo sapiens
  misc_RNA (1)...(19): siRNA sense strand
gaugucccuuucucucucu

SEQ ID NO: 1206713 - RNA, 19 nt, Homo sapiens
  misc_RNA (1)...(19): siRNA sense strand
ggaccucaaccaggacuuc

SEQ ID NO: 1206714 - RNA, 19 nt, Homo sapiens
  misc_RNA (1)...(19): siRNA sense strand
ggcuguaugagcaccguua

SEQ ID NO: 1206715 - RNA, 19 nt, Homo sapiens
  misc_RNA (1)...(19): siRNA sense strand
guaugagcaccguuacaau

SEQ ID NO: 1206716 - RNA, 19 nt, Homo sapiens
  misc_RNA (1)...(19): siRNA sense strand
caguggauuucagcuucua

SEQ ID NO: 1206717 - RNA, 19 nt, Homo sapiens
  misc_RNA (1)...(19): siRNA sense strand
gagaaaggauggcaaagau

SEQ ID NO: 1206718 - RNA, 19 nt, Homo sapiens
  misc_RNA (1)...(19): siRNA sense strand
gcaaagauccaaaucaguu

SEQ ID NO: 1206719 - RNA, 19 nt, Homo sapiens
  misc_RNA (1)...(19): siRNA sense strand
caaacgggcugcagagaug

SEQ ID NO: 1206720 - RNA, 19 nt, Homo sapiens
  misc_RNA (1)...(19): siRNA sense strand
agauggagcuucaggcaaa

SEQ ID NO: 1206721 - RNA, 19 nt, Homo sapiens
  misc_RNA (1)...(19): siRNA sense strand
gacauucccuuggaccuuu

SEQ ID NO: 1206722 - RNA, 19 nt, Homo sapiens
  misc_RNA (1)...(19): siRNA sense strand
gcauggacauucccuugga

SEQ ID NO: 1206723 - RNA, 19 nt, Homo sapiens
  misc_RNA (1)...(19): siRNA sense strand
acagacaccucucucaugu

SEQ ID NO: 1206724 - RNA, 19 nt, Homo sapiens
  misc_RNA (1)...(19): siRNA sense strand
aggcaaaacuuacagcuua

SEQ ID NO: 1206725 - RNA, 19 nt, Homo sapiens
  misc_RNA (1)...(19): siRNA sense strand
ucagugaucugccauacca

SEQ ID NO: 1206726 - RNA, 19 nt, Homo sapiens
  misc_RNA (1)...(19): siRNA sense strand
ggacuucaguggauuucag

SEQ ID NO: 1206727 - RNA, 19 nt, Homo sapiens
  misc_RNA (1)...(19): siRNA sense strand
acacagauauacagcagau

SEQ ID NO: 1206728 - RNA, 19 nt, Homo sapiens
  misc_RNA (1)...(19): siRNA sense strand
ugacugcauugaaagaugu

SEQ ID NO: 1206729 - RNA, 19 nt, Homo sapiens
  misc_RNA (1)...(19): siRNA sense strand
cugcagagauggagcuuca

SEQ ID NO: 1206730 - RNA, 19 nt, Homo sapiens
  misc_RNA (1)...(19): siRNA sense strand
agacaccucucucauguac

SEQ ID NO: 1206731 - RNA, 19 nt, Homo sapiens
  misc_RNA (1)...(19): siRNA sense strand
cacugugacugcauugaaa

SEQ ID NO: 1206732 - RNA, 19 nt, Homo sapiens
  misc_RNA (1)...(19): siRNA sense strand
ucccugacaugcugagaaa

SEQ ID NO: 1206733 - RNA, 19 nt, Homo sapiens
  misc_RNA (1)...(19): siRNA sense strand
gucuguaacugguucauca

SEQ ID NO: 1206734 - RNA, 19 nt, Homo sapiens
  misc_RNA (1)...(19): siRNA sense strand
uggcaaagauccaaaucag

SEQ ID NO: 1206735 - RNA, 19 nt, Homo sapiens
  misc_RNA (1)...(19): siRNA sense strand
gcugagaaaggauggcaaa

SEQ ID NO: 1206736 - RNA, 19 nt, Homo sapiens
  misc_RNA (1)...(19): siRNA sense strand
ugagaaaggauggcaaaga

SEQ ID NO: 1206737 - RNA, 19 nt, Homo sapiens
  misc_RNA (1)...(19): siRNA sense strand
gaggacagcauggacauuc

SEQ ID NO: 1206738 - RNA, 19 nt, Homo sapiens
  misc_RNA (1)...(19): siRNA sense strand
ggacauucccuuggaccuu

SEQ ID NO: 1206739 - RNA, 19 nt, Homo sapiens
  misc_RNA (1)...(19): siRNA sense strand
gugacugcauugaaagaug

SEQ ID NO: 1206740 - RNA, 19 nt, Homo sapiens
  misc_RNA (1)...(19): siRNA sense strand
uaugagcaccguuacaaug

SEQ ID NO: 1206741 - RNA, 19 nt, Homo sapiens
  misc_RNA (1)...(19): siRNA sense strand
ccacugugacugcauugaa

SEQ ID NO: 1206742 - RNA, 19 nt, Homo sapiens
  misc_RNA (1)...(19): siRNA sense strand
ccuuggaccuuucuucauc

SEQ ID NO: 1206743 - RNA, 19 nt, Homo sapiens
  misc_RNA (1)...(19): siRNA sense strand
uuacaaugccuauccuuca

SEQ ID NO: 1206744 - RNA, 19 nt, Homo sapiens
  misc_RNA (1)...(19): siRNA sense strand
gugcagauucuucgggauu

SEQ ID NO: 1206745 - RNA, 19 nt, Homo sapiens
  misc_RNA (1)...(19): siRNA sense strand
aaccaggacuucaguggau

SEQ ID NO: 1206746 - RNA, 19 nt, Homo sapiens
  misc_RNA (1)...(19): siRNA sense strand
cagcaaacacaccugucua

SEQ ID NO: 1206747 - RNA, 19 nt, Homo sapiens
  misc_RNA (1)...(19): siRNA sense strand
caaagauccaaaucaguuc

SEQ ID NO: 1206748 - RNA, 19 nt, Homo sapiens
  misc_RNA (1)...(19): siRNA sense strand
gagcuucaggcaaaacuua

SEQ ID NO: 1206749 - RNA, 19 nt, Homo sapiens
  misc_RNA (1)...(19): siRNA sense strand
ggacaaaacacagauauac

SEQ ID NO: 1206750 - RNA, 19 nt, Homo sapiens
  misc_RNA (1)...(19): siRNA sense strand
acagauauacagcagauag

SEQ ID NO: 1206751 - RNA, 19 nt, Homo sapiens
  misc_RNA (1)...(19): siRNA sense strand
auaccacugugacugcauu

SEQ ID NO: 1206752 - RNA, 19 nt, Homo sapiens
  misc_RNA (1)...(19): siRNA sense strand
ggcaaaacuuacagcuuaa

SEQ ID NO: 1206753 - RNA, 19 nt, Homo sapiens
  misc_RNA (1)...(19): siRNA sense strand
cacagacaccucucucaug

SEQ ID NO: 1206754 - RNA, 19 nt, Homo sapiens
  misc_RNA (1)...(19): siRNA sense strand
ucacagacaccucucucau

SEQ ID NO: 1206755 - RNA, 19 nt, Homo sapiens
  misc_RNA (1)...(19): siRNA sense strand
ucaaacgggcugcagagau

SEQ ID NO: 1206756 - RNA, 19 nt, Homo sapiens
  misc_RNA (1)...(19): siRNA sense strand
guaaaucuggaccaaguac

SEQ ID NO: 1206757 - RNA, 19 nt, Homo sapiens
  misc_RNA (1)...(19): siRNA sense strand
gauccaaaucaguucacaa

SEQ ID NO: 1206758 - RNA, 19 nt, Homo sapiens
  misc_RNA (1)...(19): siRNA sense strand
ccaggacuucaguggauuu

SEQ ID NO: 1206759 - RNA, 19 nt, Homo sapiens
  misc_RNA (1)...(19): siRNA sense strand
gcagauucuucgggauugg

SEQ ID NO: 1206760 - RNA, 19 nt, Homo sapiens
  misc_RNA (1)...(19): siRNA sense strand
gaugucccuuucucucucu

SEQ ID NO: 1206761 - RNA, 19 nt, Homo sapiens
  misc_RNA (1)...(19): siRNA sense strand
ggaccucaaccaggacuuc

SEQ ID NO: 1206762 - RNA, 19 nt, Homo sapiens
  misc_RNA (1)...(19): siRNA sense strand
ggcuguaugagcaccguua

SEQ ID NO: 1206763 - RNA, 19 nt, Homo sapiens
  misc_RNA (1)...(19): siRNA sense strand
guaugagcaccguuacaau

SEQ ID NO: 1206764 - RNA, 19 nt, Homo sapiens
  misc_RNA (1)...(19): siRNA sense strand
caguggauuucagcuucua

SEQ ID NO: 1206765 - RNA, 19 nt, Homo sapiens
  misc_RNA (1)...(19): siRNA sense strand
gagaaaggauggcaaagau

SEQ ID NO: 1206766 - RNA, 19 nt, Homo sapiens
  misc_RNA (1)...(19): siRNA sense strand
gcaaagauccaaaucaguu

SEQ ID NO: 1206767 - RNA, 19 nt, Homo sapiens
  misc_RNA (1)...(19): siRNA sense strand
caaacgggcugcagagaug

SEQ ID NO: 1206768 - RNA, 19 nt, Homo sapiens
  misc_RNA (1)...(19): siRNA sense strand
agauggagcuucaggcaaa

SEQ ID NO: 1206769 - RNA, 19 nt, Homo sapiens
  misc_RNA (1)...(19): siRNA sense strand
gacauucccuuggaccuuu

SEQ ID NO: 1206770 - RNA, 19 nt, Homo sapiens
  misc_RNA (1)...(19): siRNA sense strand
gcauggacauucccuugga

SEQ ID NO: 1206771 - RNA, 19 nt, Homo sapiens
  misc_RNA (1)...(19): siRNA sense strand
acagacaccucucucaugu

SEQ ID NO: 1206772 - RNA, 19 nt, Homo sapiens
  misc_RNA (1)...(19): siRNA sense strand
aggcaaaacuuacagcuua

SEQ ID NO: 1206773 - RNA, 19 nt, Homo sapiens
  misc_RNA (1)...(19): siRNA sense strand
ucagugaucugccauacca

SEQ ID NO: 1206774 - RNA, 19 nt, Homo sapiens
  misc_RNA (1)...(19): siRNA sense strand
ggacuucaguggauuucag

SEQ ID NO: 1206775 - RNA, 19 nt, Homo sapiens
  misc_RNA (1)...(19): siRNA sense strand
acacagauauacagcagau

SEQ ID NO: 1206776 - RNA, 19 nt, Homo sapiens
  misc_RNA (1)...(19): siRNA sense strand
ugacugcauugaaagaugu

SEQ ID NO: 1206777 - RNA, 19 nt, Homo sapiens
  misc_RNA (1)...(19): siRNA sense strand
cugcagagauggagcuuca

SEQ ID NO: 1206778 - RNA, 19 nt, Homo sapiens
  misc_RNA (1)...(19): siRNA sense strand
agacaccucucucauguac

SEQ ID NO: 1206779 - RNA, 19 nt, Homo sapiens
  misc_RNA (1)...(19): siRNA sense strand
cacugugacugcauugaaa

SEQ ID NO: 1206780 - RNA, 19 nt, Homo sapiens
  misc_RNA (1)...(19): siRNA sense strand
ucccugacaugcugagaaa

SEQ ID NO: 1206781 - RNA, 19 nt, Homo sapiens
  misc_RNA (1)...(19): siRNA sense strand
gucuguaacugguucauca

SEQ ID NO: 1206782 - RNA, 19 nt, Homo sapiens
  misc_RNA (1)...(19): siRNA sense strand
uggcaaagauccaaaucag

SEQ ID NO: 1206783 - RNA, 19 nt, Homo sapiens
  misc_RNA (1)...(19): siRNA sense strand
gcugagaaaggauggcaaa

SEQ ID NO: 1206784 - RNA, 19 nt, Homo sapiens
  misc_RNA (1)...(19): siRNA sense strand
ugagaaaggauggcaaaga

SEQ ID NO: 1206785 - RNA, 19 nt, Homo sapiens
  misc_RNA (1)...(19): siRNA sense strand
gaggacagcauggacauuc

SEQ ID NO: 1206786 - RNA, 19 nt, Homo sapiens
  misc_RNA (1)...(19): siRNA sense strand
ggacauucccuuggaccuu

SEQ ID NO: 1206787 - RNA, 19 nt, Homo sapiens
  misc_RNA (1)...(19): siRNA sense strand
gugacugcauugaaagaug

SEQ ID NO: 1206788 - RNA, 19 nt, Homo sapiens
  misc_RNA (1)...(19): siRNA sense strand
uaugagcaccguuacaaug

SEQ ID NO: 1206789 - RNA, 19 nt, Homo sapiens
  misc_RNA (1)...(19): siRNA sense strand
ccacugugacugcauugaa

SEQ ID NO: 1206790 - RNA, 19 nt, Homo sapiens
  misc_RNA (1)...(19): siRNA sense strand
ccuuggaccuuucuucauc

SEQ ID NO: 1206791 - RNA, 19 nt, Homo sapiens
  misc_RNA (1)...(19): siRNA sense strand
uuacaaugccuauccuuca

SEQ ID NO: 1206792 - RNA, 19 nt, Homo sapiens
  misc_RNA (1)...(19): siRNA sense strand
gugcagauucuucgggauu

SEQ ID NO: 1206793 - RNA, 19 nt, Homo sapiens
  misc_RNA (1)...(19): siRNA sense strand
aaccaggacuucaguggau

SEQ ID NO: 1206794 - RNA, 19 nt, Homo sapiens
  misc_RNA (1)...(19): siRNA sense strand
cagcaaacacaccugucua

SEQ ID NO: 1206795 - RNA, 19 nt, Homo sapiens
  misc_RNA (1)...(19): siRNA sense strand
caaagauccaaaucaguuc

SEQ ID NO: 1206796 - RNA, 19 nt, Homo sapiens
  misc_RNA (1)...(19): siRNA sense strand
gagcuucaggcaaaacuua

SEQ ID NO: 1206797 - RNA, 19 nt, Homo sapiens
  misc_RNA (1)...(19): siRNA sense strand
ggacaaaacacagauauac

SEQ ID NO: 1206798 - RNA, 19 nt, Homo sapiens
  misc_RNA (1)...(19): siRNA sense strand
acagauauacagcagauag

SEQ ID NO: 1206799 - RNA, 19 nt, Homo sapiens
  misc_RNA (1)...(19): siRNA sense strand
auaccacugugacugcauu

SEQ ID NO: 1206800 - RNA, 19 nt, Homo sapiens
  misc_RNA (1)...(19): siRNA sense strand
ggcaaaacuuacagcuuaa

SEQ ID NO: 1206801 - RNA, 19 nt, Homo sapiens
  misc_RNA (1)...(19): siRNA sense strand
cacagacaccucucucaug

SEQ ID NO: 1206802 - RNA, 19 nt, Homo sapiens
  misc_RNA (1)...(19): siRNA sense strand
ucacagacaccucucucau

SEQ ID NO: 1206803 - RNA, 19 nt, Homo sapiens
  misc_RNA (1)...(19): siRNA sense strand
ucaaacgggcugcagagau

SEQ ID NO: 1206804 - RNA, 19 nt, Homo sapiens
  misc_RNA (1)...(19): siRNA sense strand
guaaaucuggaccaaguac

SEQ ID NO: 1206805 - RNA, 19 nt, Homo sapiens
  misc_RNA (1)...(19): siRNA sense strand
gauccaaaucaguucacaa

SEQ ID NO: 1206806 - RNA, 19 nt, Homo sapiens
  misc_RNA (1)...(19): siRNA sense strand
ccaggacuucaguggauuu

SEQ ID NO: 1206807 - RNA, 19 nt, Homo sapiens
  misc_RNA (1)...(19): siRNA sense strand
gcagauucuucgggauugg

SEQ ID NO: 1206808 - RNA, 19 nt, Homo sapiens
  misc_RNA (1)...(19): siRNA sense strand
gaugucccuuucucucucu

SEQ ID NO: 1206809 - RNA, 19 nt, Homo sapiens
  misc_RNA (1)...(19): siRNA sense strand
ggaccucaaccaggacuuc

SEQ ID NO: 1206810 - RNA, 19 nt, Homo sapiens
  misc_RNA (1)...(19): siRNA sense strand
ggcuguaugagcaccguua

SEQ ID NO: 1206811 - RNA, 19 nt, Homo sapiens
  misc_RNA (1)...(19): siRNA sense strand
guaugagcaccguuacaau

SEQ ID NO: 1206812 - RNA, 19 nt, Homo sapiens
  misc_RNA (1)...(19): siRNA sense strand
caguggauuucagcuucua

SEQ ID NO: 1206813 - RNA, 19 nt, Homo sapiens
  misc_RNA (1)...(19): siRNA sense strand
gagaaaggauggcaaagau

SEQ ID NO: 1206814 - RNA, 19 nt, Homo sapiens
  misc_RNA (1)...(19): siRNA sense strand
gcaaagauccaaaucaguu

SEQ ID NO: 1206815 - RNA, 19 nt, Homo sapiens
  misc_RNA (1)...(19): siRNA sense strand
caaacgggcugcagagaug

SEQ ID NO: 1206816 - RNA, 19 nt, Homo sapiens
  misc_RNA (1)...(19): siRNA sense strand
agauggagcuucaggcaaa

SEQ ID NO: 1206817 - RNA, 19 nt, Homo sapiens
  misc_RNA (1)...(19): siRNA sense strand
gacauucccuuggaccuuu

SEQ ID NO: 1206818 - RNA, 19 nt, Homo sapiens
  misc_RNA (1)...(19): siRNA sense strand
gcauggacauucccuugga

SEQ ID NO: 1206819 - RNA, 19 nt, Homo sapiens
  misc_RNA (1)...(19): siRNA sense strand
acagacaccucucucaugu

SEQ ID NO: 1206820 - RNA, 19 nt, Homo sapiens
  misc_RNA (1)...(19): siRNA sense strand
aggcaaaacuuacagcuua

SEQ ID NO: 1206821 - RNA, 19 nt, Homo sapiens
  misc_RNA (1)...(19): siRNA sense strand
ucagugaucugccauacca

SEQ ID NO: 1206822 - RNA, 19 nt, Homo sapiens
  misc_RNA (1)...(19): siRNA sense strand
ggacuucaguggauuucag

SEQ ID NO: 1206823 - RNA, 19 nt, Homo sapiens
  misc_RNA (1)...(19): siRNA sense strand
acacagauauacagcagau

SEQ ID NO: 1206824 - RNA, 19 nt, Homo sapiens
  misc_RNA (1)...(19): siRNA sense strand
ugacugcauugaaagaugu

SEQ ID NO: 1206825 - RNA, 19 nt, Homo sapiens
  misc_RNA (1)...(19): siRNA sense strand
cugcagagauggagcuuca

SEQ ID NO: 1206826 - RNA, 19 nt, Homo sapiens
  misc_RNA (1)...(19): siRNA sense strand
agacaccucucucauguac

SEQ ID NO: 1206827 - RNA, 19 nt, Homo sapiens
  misc_RNA (1)...(19): siRNA sense strand
cacugugacugcauugaaa

SEQ ID NO: 1206828 - RNA, 19 nt, Homo sapiens
  misc_RNA (1)...(19): siRNA sense strand
ucccugacaugcugagaaa

SEQ ID NO: 1206829 - RNA, 19 nt, Homo sapiens
  misc_RNA (1)...(19): siRNA sense strand
gucuguaacugguucauca

SEQ ID NO: 1206830 - RNA, 19 nt, Homo sapiens
  misc_RNA (1)...(19): siRNA sense strand
uggcaaagauccaaaucag

SEQ ID NO: 1206831 - RNA, 19 nt, Homo sapiens
  misc_RNA (1)...(19): siRNA sense strand
gcugagaaaggauggcaaa

SEQ ID NO: 1206832 - RNA, 19 nt, Homo sapiens
  misc_RNA (1)...(19): siRNA sense strand
ugagaaaggauggcaaaga

SEQ ID NO: 1206833 - RNA, 19 nt, Homo sapiens
  misc_RNA (1)...(19): siRNA sense strand
gaggacagcauggacauuc

SEQ ID NO: 1206834 - RNA, 19 nt, Homo sapiens
  misc_RNA (1)...(19): siRNA sense strand
ggacauucccuuggaccuu

SEQ ID NO: 1206835 - RNA, 19 nt, Homo sapiens
  misc_RNA (1)...(19): siRNA sense strand
gugacugcauugaaagaug

SEQ ID NO: 1206836 - RNA, 19 nt, Homo sapiens
  misc_RNA (1)...(19): siRNA sense strand
uaugagcaccguuacaaug

SEQ ID NO: 1206837 - RNA, 19 nt, Homo sapiens
  misc_RNA (1)...(19): siRNA sense strand
ccacugugacugcauugaa

SEQ ID NO: 1206838 - RNA, 19 nt, Homo sapiens
  misc_RNA (1)...(19): siRNA sense strand
ccuuggaccuuucuucauc

SEQ ID NO: 1206839 - RNA, 19 nt, Homo sapiens
  misc_RNA (1)...(19): siRNA sense strand
uuacaaugccuauccuuca

SEQ ID NO: 1206840 - RNA, 19 nt, Homo sapiens
  misc_RNA (1)...(19): siRNA sense strand
gugcagauucuucgggauu

SEQ ID NO: 1206841 - RNA, 19 nt, Homo sapiens
  misc_RNA (1)...(19): siRNA sense strand
aaccaggacuucaguggau

SEQ ID NO: 1206842 - RNA, 19 nt, Homo sapiens
  misc_RNA (1)...(19): siRNA sense strand
cagcaaacacaccugucua

SEQ ID NO: 1206843 - RNA, 19 nt, Homo sapiens
  misc_RNA (1)...(19): siRNA sense strand
caaagauccaaaucaguuc

SEQ ID NO: 1206844 - RNA, 19 nt, Homo sapiens
  misc_RNA (1)...(19): siRNA sense strand
gagcuucaggcaaaacuua

SEQ ID NO: 1206845 - RNA, 19 nt, Homo sapiens
  misc_RNA (1)...(19): siRNA sense strand
ggacaaaacacagauauac

SEQ ID NO: 1206846 - RNA, 19 nt, Homo sapiens
  misc_RNA (1)...(19): siRNA sense strand
acagauauacagcagauag

SEQ ID NO: 1206847 - RNA, 19 nt, Homo sapiens
  misc_RNA (1)...(19): siRNA sense strand
auaccacugugacugcauu

SEQ ID NO: 1206848 - RNA, 19 nt, Homo sapiens
  misc_RNA (1)...(19): siRNA sense strand
ggcaaaacuuacagcuuaa

SEQ ID NO: 1206849 - RNA, 19 nt, Homo sapiens
  misc_RNA (1)...(19): siRNA sense strand
cacagacaccucucucaug

SEQ ID NO: 1206850 - RNA, 19 nt, Homo sapiens
  misc_RNA (1)...(19): siRNA sense strand
ucacagacaccucucucau

SEQ ID NO: 1206851 - RNA, 19 nt, Homo sapiens
  misc_RNA (1)...(19): siRNA sense strand
ucaaacgggcugcagagau

SEQ ID NO: 1206852 - RNA, 19 nt, Homo sapiens
  misc_RNA (1)...(19): siRNA sense strand
guaaaucuggaccaaguac

SEQ ID NO: 1206853 - RNA, 19 nt, Homo sapiens
  misc_RNA (1)...(19): siRNA sense strand
gauccaaaucaguucacaa

SEQ ID NO: 1206854 - RNA, 19 nt, Homo sapiens
  misc_RNA (1)...(19): siRNA sense strand
ccaggacuucaguggauuu

SEQ ID NO: 1206855 - RNA, 19 nt, Homo sapiens
  misc_RNA (1)...(19): siRNA sense strand
gcagauucuucgggauugg

SEQ ID NO: 1206856 - RNA, 19 nt, Homo sapiens
  misc_RNA (1)...(19): siRNA sense strand
gaugucccuuucucucucu

SEQ ID NO: 1206857 - RNA, 19 nt, Homo sapiens
  misc_RNA (1)...(19): siRNA sense strand
ggaccucaaccaggacuuc

SEQ ID NO: 1206858 - RNA, 19 nt, Homo sapiens
  misc_RNA (1)...(19): siRNA sense strand
ggcuguaugagcaccguua

SEQ ID NO: 1206859 - RNA, 19 nt, Homo sapiens
  misc_RNA (1)...(19): siRNA sense strand
guaugagcaccguuacaau

SEQ ID NO: 1206860 - RNA, 19 nt, Homo sapiens
  misc_RNA (1)...(19): siRNA sense strand
caguggauuucagcuucua

SEQ ID NO: 1206861 - RNA, 19 nt, Homo sapiens
  misc_RNA (1)...(19): siRNA sense strand
gagaaaggauggcaaagau

SEQ ID NO: 1206862 - RNA, 19 nt, Homo sapiens
  misc_RNA (1)...(19): siRNA sense strand
gcaaagauccaaaucaguu

SEQ ID NO: 1206863 - RNA, 19 nt, Homo sapiens
  misc_RNA (1)...(19): siRNA sense strand
caaacgggcugcagagaug

SEQ ID NO: 1206864 - RNA, 19 nt, Homo sapiens
  misc_RNA (1)...(19): siRNA sense strand
agauggagcuucaggcaaa

SEQ ID NO: 1206865 - RNA, 19 nt, Homo sapiens
  misc_RNA (1)...(19): siRNA sense strand
gacauucccuuggaccuuu

SEQ ID NO: 1206866 - RNA, 19 nt, Homo sapiens
  misc_RNA (1)...(19): siRNA sense strand
acagacaccucucucaugu

SEQ ID NO: 1206867 - RNA, 19 nt, Homo sapiens
  misc_RNA (1)...(19): siRNA sense strand
aggcaaaacuuacagcuua

SEQ ID NO: 1206868 - RNA, 19 nt, Homo sapiens
  misc_RNA (1)...(19): siRNA sense strand
ucagugaucugccauacca

SEQ ID NO: 1206869 - RNA, 19 nt, Homo sapiens
  misc_RNA (1)...(19): siRNA sense strand
ggacuucaguggauuucag

SEQ ID NO: 1206870 - RNA, 19 nt, Homo sapiens
  misc_RNA (1)...(19): siRNA sense strand
acacagauauacagcagau

SEQ ID NO: 1206871 - RNA, 19 nt, Homo sapiens
  misc_RNA (1)...(19): siRNA sense strand
ugacugcauugaaagaugu

SEQ ID NO: 1206872 - RNA, 19 nt, Homo sapiens
  misc_RNA (1)...(19): siRNA sense strand
cugcagagauggagcuuca

SEQ ID NO: 1206873 - RNA, 19 nt, Homo sapiens
  misc_RNA (1)...(19): siRNA sense strand
agacaccucucucauguac

SEQ ID NO: 1206874 - RNA, 19 nt, Homo sapiens
  misc_RNA (1)...(19): siRNA sense strand
cacugugacugcauugaaa

SEQ ID NO: 1206875 - RNA, 19 nt, Homo sapiens
  misc_RNA (1)...(19): siRNA sense strand
ucccugacaugcugagaaa

SEQ ID NO: 1206876 - RNA, 19 nt, Homo sapiens
  misc_RNA (1)...(19): siRNA sense strand
gucuguaacugguucauca

SEQ ID NO: 1206877 - RNA, 19 nt, Homo sapiens
  misc_RNA (1)...(19): siRNA sense strand
uggcaaagauccaaaucag

SEQ ID NO: 1206878 - RNA, 19 nt, Homo sapiens
  misc_RNA (1)...(19): siRNA sense strand
gcugagaaaggauggcaaa

SEQ ID NO: 1206879 - RNA, 19 nt, Homo sapiens
  misc_RNA (1)...(19): siRNA sense strand
ugagaaaggauggcaaaga

SEQ ID NO: 1206880 - RNA, 19 nt, Homo sapiens
  misc_RNA (1)...(19): siRNA sense strand
ggacauucccuuggaccuu

SEQ ID NO: 1206881 - RNA, 19 nt, Homo sapiens
  misc_RNA (1)...(19): siRNA sense strand
gugacugcauugaaagaug

SEQ ID NO: 1206882 - RNA, 19 nt, Homo sapiens
  misc_RNA (1)...(19): siRNA sense strand
uaugagcaccguuacaaug

SEQ ID NO: 1206883 - RNA, 19 nt, Homo sapiens
  misc_RNA (1)...(19): siRNA sense strand
ccuuggaccuuucuucauc

SEQ ID NO: 1206884 - RNA, 19 nt, Homo sapiens
  misc_RNA (1)...(19): siRNA sense strand
ccacugugacugcauugaa

SEQ ID NO: 1206885 - RNA, 19 nt, Homo sapiens
  misc_RNA (1)...(19): siRNA sense strand
uuacaaugccuauccuuca

SEQ ID NO: 1206886 - RNA, 19 nt, Homo sapiens
  misc_RNA (1)...(19): siRNA sense strand
cagcaaacacaccugucua

SEQ ID NO: 1206887 - RNA, 19 nt, Homo sapiens
  misc_RNA (1)...(19): siRNA sense strand
aaccaggacuucaguggau

SEQ ID NO: 1206888 - RNA, 19 nt, Homo sapiens
  misc_RNA (1)...(19): siRNA sense strand
gugcagauucuucgggauu

SEQ ID NO: 1206889 - RNA, 19 nt, Homo sapiens
  misc_RNA (1)...(19): siRNA sense strand
caaagauccaaaucaguuc

SEQ ID NO: 1206890 - RNA, 19 nt, Homo sapiens
  misc_RNA (1)...(19): siRNA sense strand
gagcuucaggcaaaacuua

SEQ ID NO: 1206891 - RNA, 19 nt, Homo sapiens
  misc_RNA (1)...(19): siRNA sense strand
ggacaaaacacagauauac

SEQ ID NO: 1206892 - RNA, 19 nt, Homo sapiens
  misc_RNA (1)...(19): siRNA sense strand
acagauauacagcagauag

SEQ ID NO: 1206893 - RNA, 19 nt, Homo sapiens
  misc_RNA (1)...(19): siRNA sense strand
auaccacugugacugcauu

SEQ ID NO: 1206894 - RNA, 19 nt, Homo sapiens
  misc_RNA (1)...(19): siRNA sense strand
ggcaaaacuuacagcuuaa

SEQ ID NO: 1206895 - RNA, 19 nt, Homo sapiens
  misc_RNA (1)...(19): siRNA sense strand
cacagacaccucucucaug

SEQ ID NO: 1206896 - RNA, 19 nt, Homo sapiens
  misc_RNA (1)...(19): siRNA sense strand
ucacagacaccucucucau

SEQ ID NO: 1206897 - RNA, 19 nt, Homo sapiens
  misc_RNA (1)...(19): siRNA sense strand
ucaaacgggcugcagagau

SEQ ID NO: 1206898 - RNA, 19 nt, Homo sapiens
  misc_RNA (1)...(19): siRNA sense strand
guaaaucuggaccaaguac

SEQ ID NO: 1206899 - RNA, 19 nt, Homo sapiens
  misc_RNA (1)...(19): siRNA sense strand
gauccaaaucaguucacaa

SEQ ID NO: 1206900 - RNA, 19 nt, Homo sapiens
  misc_RNA (1)...(19): siRNA sense strand
gcagauucuucgggauugg

SEQ ID NO: 1206901 - RNA, 19 nt, Homo sapiens
  misc_RNA (1)...(19): siRNA sense strand
ccaggacuucaguggauuu

SEQ ID NO: 1206902 - RNA, 19 nt, Homo sapiens
  misc_RNA (1)...(19): siRNA sense strand
ggcuguaugagcaccguua

SEQ ID NO: 1206903 - RNA, 19 nt, Homo sapiens
  misc_RNA (1)...(19): siRNA sense strand
ggaccucaaccaggacuuc

SEQ ID NO: 1206904 - RNA, 19 nt, Homo sapiens
  misc_RNA (1)...(19): siRNA sense strand
guaugagcaccguuacaau

SEQ ID NO: 1206905 - RNA, 19 nt, Homo sapiens
  misc_RNA (1)...(19): siRNA sense strand
gaugucccuuucucucucu

SEQ ID NO: 1206906 - RNA, 19 nt, Homo sapiens
  misc_RNA (1)...(19): siRNA sense strand
caguggauuucagcuucua

SEQ ID NO: 1206907 - RNA, 19 nt, Homo sapiens
  misc_RNA (1)...(19): siRNA sense strand
gagaaaggauggcaaagau

SEQ ID NO: 1206908 - RNA, 19 nt, Homo sapiens
  misc_RNA (1)...(19): siRNA sense strand
gcaaagauccaaaucaguu

SEQ ID NO: 1206909 - RNA, 19 nt, Homo sapiens
  misc_RNA (1)...(19): siRNA sense strand
caaacgggcugcagagaug

SEQ ID NO: 1206910 - RNA, 19 nt, Homo sapiens
  misc_RNA (1)...(19): siRNA sense strand
agauggagcuucaggcaaa

SEQ ID NO: 1206911 - RNA, 19 nt, Homo sapiens
  misc_RNA (1)...(19): siRNA sense strand
gacauucccuuggaccuuu

SEQ ID NO: 1206912 - RNA, 19 nt, Homo sapiens
  misc_RNA (1)...(19): siRNA sense strand
acagacaccucucucaugu

SEQ ID NO: 1206913 - RNA, 19 nt, Homo sapiens
  misc_RNA (1)...(19): siRNA sense strand
aggcaaaacuuacagcuua

SEQ ID NO: 1206914 - RNA, 19 nt, Homo sapiens
  misc_RNA (1)...(19): siRNA sense strand
ucagugaucugccauacca

SEQ ID NO: 1206915 - RNA, 19 nt, Homo sapiens
  misc_RNA (1)...(19): siRNA sense strand
ggacuucaguggauuucag

SEQ ID NO: 1206916 - RNA, 19 nt, Homo sapiens
  misc_RNA (1)...(19): siRNA sense strand
acacagauauacagcagau

SEQ ID NO: 1206917 - RNA, 19 nt, Homo sapiens
  misc_RNA (1)...(19): siRNA sense strand
ugacugcauugaaagaugu

SEQ ID NO: 1206918 - RNA, 19 nt, Homo sapiens
  misc_RNA (1)...(19): siRNA sense strand
cugcagagauggagcuuca

SEQ ID NO: 1206919 - RNA, 19 nt, Homo sapiens
  misc_RNA (1)...(19): siRNA sense strand
agacaccucucucauguac

SEQ ID NO: 1206920 - RNA, 19 nt, Homo sapiens
  misc_RNA (1)...(19): siRNA sense strand
cacugugacugcauugaaa

SEQ ID NO: 1206921 - RNA, 19 nt, Homo sapiens
  misc_RNA (1)...(19): siRNA sense strand
ucccugacaugcugagaaa

SEQ ID NO: 1206922 - RNA, 19 nt, Homo sapiens
  misc_RNA (1)...(19): siRNA sense strand
gucuguaacugguucauca

SEQ ID NO: 1206923 - RNA, 19 nt, Homo sapiens
  misc_RNA (1)...(19): siRNA sense strand
uggcaaagauccaaaucag

SEQ ID NO: 1206924 - RNA, 19 nt, Homo sapiens
  misc_RNA (1)...(19): siRNA sense strand
gcugagaaaggauggcaaa

SEQ ID NO: 1206925 - RNA, 19 nt, Homo sapiens
  misc_RNA (1)...(19): siRNA sense strand
ugagaaaggauggcaaaga

SEQ ID NO: 1206926 - RNA, 19 nt, Homo sapiens
  misc_RNA (1)...(19): siRNA sense strand
ggacauucccuuggaccuu

SEQ ID NO: 1206927 - RNA, 19 nt, Homo sapiens
  misc_RNA (1)...(19): siRNA sense strand
gugacugcauugaaagaug

SEQ ID NO: 1206928 - RNA, 19 nt, Homo sapiens
  misc_RNA (1)...(19): siRNA sense strand
uaugagcaccguuacaaug

SEQ ID NO: 1206929 - RNA, 19 nt, Homo sapiens
  misc_RNA (1)...(19): siRNA sense strand
ccuuggaccuuucuucauc

SEQ ID NO: 1206930 - RNA, 19 nt, Homo sapiens
  misc_RNA (1)...(19): siRNA sense strand
ccacugugacugcauugaa

SEQ ID NO: 1206931 - RNA, 19 nt, Homo sapiens
  misc_RNA (1)...(19): siRNA sense strand
uuacaaugccuauccuuca

SEQ ID NO: 1206932 - RNA, 19 nt, Homo sapiens
  misc_RNA (1)...(19): siRNA sense strand
cagcaaacacaccugucua

SEQ ID NO: 1206933 - RNA, 19 nt, Homo sapiens
  misc_RNA (1)...(19): siRNA sense strand
aaccaggacuucaguggau

SEQ ID NO: 1206934 - RNA, 19 nt, Homo sapiens
  misc_RNA (1)...(19): siRNA sense strand
gugcagauucuucgggauu

SEQ ID NO: 1206935 - RNA, 19 nt, Homo sapiens
  misc_RNA (1)...(19): siRNA sense strand
caaagauccaaaucaguuc

SEQ ID NO: 1206936 - RNA, 19 nt, Homo sapiens
  misc_RNA (1)...(19): siRNA sense strand
gagcuucaggcaaaacuua

SEQ ID NO: 1206937 - RNA, 19 nt, Homo sapiens
  misc_RNA (1)...(19): siRNA sense strand
ggacaaaacacagauauac

SEQ ID NO: 1206938 - RNA, 19 nt, Homo sapiens
  misc_RNA (1)...(19): siRNA sense strand
acagauauacagcagauag

SEQ ID NO: 1206939 - RNA, 19 nt, Homo sapiens
  misc_RNA (1)...(19): siRNA sense strand
auaccacugugacugcauu

SEQ ID NO: 1206940 - RNA, 19 nt, Homo sapiens
  misc_RNA (1)...(19): siRNA sense strand
ggcaaaacuuacagcuuaa

SEQ ID NO: 1206941 - RNA, 19 nt, Homo sapiens
  misc_RNA (1)...(19): siRNA sense strand
cacagacaccucucucaug

SEQ ID NO: 1206942 - RNA, 19 nt, Homo sapiens
  misc_RNA (1)...(19): siRNA sense strand
ucacagacaccucucucau

SEQ ID NO: 1206943 - RNA, 19 nt, Homo sapiens
  misc_RNA (1)...(19): siRNA sense strand
ucaaacgggcugcagagau

SEQ ID NO: 1206944 - RNA, 19 nt, Homo sapiens
  misc_RNA (1)...(19): siRNA sense strand
guaaaucuggaccaaguac

SEQ ID NO: 1206945 - RNA, 19 nt, Homo sapiens
  misc_RNA (1)...(19): siRNA sense strand
gauccaaaucaguucacaa

SEQ ID NO: 1206946 - RNA, 19 nt, Homo sapiens
  misc_RNA (1)...(19): siRNA sense strand
gcagauucuucgggauugg

SEQ ID NO: 1206947 - RNA, 19 nt, Homo sapiens
  misc_RNA (1)...(19): siRNA sense strand
ccaggacuucaguggauuu

SEQ ID NO: 1206948 - RNA, 19 nt, Homo sapiens
  misc_RNA (1)...(19): siRNA sense strand
ggcuguaugagcaccguua

SEQ ID NO: 1206949 - RNA, 19 nt, Homo sapiens
  misc_RNA (1)...(19): siRNA sense strand
ggaccucaaccaggacuuc

SEQ ID NO: 1206950 - RNA, 19 nt, Homo sapiens
  misc_RNA (1)...(19): siRNA sense strand
guaugagcaccguuacaau

SEQ ID NO: 1206951 - RNA, 19 nt, Homo sapiens
  misc_RNA (1)...(19): siRNA sense strand
gaugucccuuucucucucu

SEQ ID NO: 1206952 - RNA, 19 nt, Homo sapiens
  misc_RNA (1)...(19): siRNA sense strand
caguggauuucagcuucua

SEQ ID NO: 1206953 - RNA, 19 nt, Homo sapiens
  misc_RNA (1)...(19): siRNA sense strand
gagaaaggauggcaaagau

SEQ ID NO: 1206954 - RNA, 19 nt, Homo sapiens
  misc_RNA (1)...(19): siRNA sense strand
gcaaagauccaaaucaguu

SEQ ID NO: 1206955 - RNA, 19 nt, Homo sapiens
  misc_RNA (1)...(19): siRNA sense strand
caaacgggcugcagagaug

SEQ ID NO: 1206956 - RNA, 19 nt, Homo sapiens
  misc_RNA (1)...(19): siRNA sense strand
agauggagcuucaggcaaa

SEQ ID NO: 1206957 - RNA, 19 nt, Homo sapiens
  misc_RNA (1)...(19): siRNA sense strand
gacauucccuuggaccuuu

SEQ ID NO: 1206958 - RNA, 19 nt, Homo sapiens
  misc_RNA (1)...(19): siRNA sense strand
acagacaccucucucaugu

SEQ ID NO: 1206959 - RNA, 19 nt, Homo sapiens
  misc_RNA (1)...(19): siRNA sense strand
aggcaaaacuuacagcuua

SEQ ID NO: 1206960 - RNA, 19 nt, Homo sapiens
  misc_RNA (1)...(19): siRNA sense strand
ucagugaucugccauacca

SEQ ID NO: 1206961 - RNA, 19 nt, Homo sapiens
  misc_RNA (1)...(19): siRNA sense strand
ggacuucaguggauuucag

SEQ ID NO: 1206962 - RNA, 19 nt, Homo sapiens
  misc_RNA (1)...(19): siRNA sense strand
acacagauauacagcagau

SEQ ID NO: 1206963 - RNA, 19 nt, Homo sapiens
  misc_RNA (1)...(19): siRNA sense strand
ugacugcauugaaagaugu

SEQ ID NO: 1206964 - RNA, 19 nt, Homo sapiens
  misc_RNA (1)...(19): siRNA sense strand
cugcagagauggagcuuca

SEQ ID NO: 1206965 - RNA, 19 nt, Homo sapiens
  misc_RNA (1)...(19): siRNA sense strand
agacaccucucucauguac

SEQ ID NO: 1206966 - RNA, 19 nt, Homo sapiens
  misc_RNA (1)...(19): siRNA sense strand
cacugugacugcauugaaa

SEQ ID NO: 1206967 - RNA, 19 nt, Homo sapiens
  misc_RNA (1)...(19): siRNA sense strand
ucccugacaugcugagaaa

SEQ ID NO: 1206968 - RNA, 19 nt, Homo sapiens
  misc_RNA (1)...(19): siRNA sense strand
gucuguaacugguucauca

SEQ ID NO: 1206969 - RNA, 19 nt, Homo sapiens
  misc_RNA (1)...(19): siRNA sense strand
uggcaaagauccaaaucag

SEQ ID NO: 1206970 - RNA, 19 nt, Homo sapiens
  misc_RNA (1)...(19): siRNA sense strand
gcugagaaaggauggcaaa

SEQ ID NO: 1206971 - RNA, 19 nt, Homo sapiens
  misc_RNA (1)...(19): siRNA sense strand
ugagaaaggauggcaaaga

SEQ ID NO: 1206972 - RNA, 19 nt, Homo sapiens
  misc_RNA (1)...(19): siRNA sense strand
ggacauucccuuggaccuu

SEQ ID NO: 1206973 - RNA, 19 nt, Homo sapiens
  misc_RNA (1)...(19): siRNA sense strand
gugacugcauugaaagaug

SEQ ID NO: 1206974 - RNA, 19 nt, Homo sapiens
  misc_RNA (1)...(19): siRNA sense strand
uaugagcaccguuacaaug

SEQ ID NO: 1206975 - RNA, 19 nt, Homo sapiens
  misc_RNA (1)...(19): siRNA sense strand
ccuuggaccuuucuucauc

SEQ ID NO: 1206976 - RNA, 19 nt, Homo sapiens
  misc_RNA (1)...(19): siRNA sense strand
ccacugugacugcauugaa

SEQ ID NO: 1206977 - RNA, 19 nt, Homo sapiens
  misc_RNA (1)...(19): siRNA sense strand
uuacaaugccuauccuuca

SEQ ID NO: 1206978 - RNA, 19 nt, Homo sapiens
  misc_RNA (1)...(19): siRNA sense strand
cagcaaacacaccugucua

SEQ ID NO: 1206979 - RNA, 19 nt, Homo sapiens
  misc_RNA (1)...(19): siRNA sense strand
aaccaggacuucaguggau

SEQ ID NO: 1206980 - RNA, 19 nt, Homo sapiens
  misc_RNA (1)...(19): siRNA sense strand
gugcagauucuucgggauu

SEQ ID NO: 1206981 - RNA, 19 nt, Homo sapiens
  misc_RNA (1)...(19): siRNA sense strand
caaagauccaaaucaguuc

SEQ ID NO: 1206982 - RNA, 19 nt, Homo sapiens
  misc_RNA (1)...(19): siRNA sense strand
gagcuucaggcaaaacuua

SEQ ID NO: 1206983 - RNA, 19 nt, Homo sapiens
  misc_RNA (1)...(19): siRNA sense strand
ggacaaaacacagauauac

SEQ ID NO: 1206984 - RNA, 19 nt, Homo sapiens
  misc_RNA (1)...(19): siRNA sense strand
acagauauacagcagauag

SEQ ID NO: 1206985 - RNA, 19 nt, Homo sapiens
  misc_RNA (1)...(19): siRNA sense strand
auaccacugugacugcauu

SEQ ID NO: 1206986 - RNA, 19 nt, Homo sapiens
  misc_RNA (1)...(19): siRNA sense strand
ggcaaaacuuacagcuuaa

SEQ ID NO: 1206987 - RNA, 19 nt, Homo sapiens
  misc_RNA (1)...(19): siRNA sense strand
cacagacaccucucucaug

SEQ ID NO: 1206988 - RNA, 19 nt, Homo sapiens
  misc_RNA (1)...(19): siRNA sense strand
ucacagacaccucucucau

SEQ ID NO: 1206989 - RNA, 19 nt, Homo sapiens
  misc_RNA (1)...(19): siRNA sense strand
ucaaacgggcugcagagau

SEQ ID NO: 1206990 - RNA, 19 nt, Homo sapiens
  misc_RNA (1)...(19): siRNA sense strand
guaaaucuggaccaaguac

SEQ ID NO: 1206991 - RNA, 19 nt, Homo sapiens
  misc_RNA (1)...(19): siRNA sense strand
gauccaaaucaguucacaa

SEQ ID NO: 1206992 - RNA, 19 nt, Homo sapiens
  misc_RNA (1)...(19): siRNA sense strand
gcagauucuucgggauugg

SEQ ID NO: 1206993 - RNA, 19 nt, Homo sapiens
  misc_RNA (1)...(19): siRNA sense strand
ccaggacuucaguggauuu

SEQ ID NO: 1206994 - RNA, 19 nt, Homo sapiens
  misc_RNA (1)...(19): siRNA sense strand
ggcuguaugagcaccguua

SEQ ID NO: 1206995 - RNA, 19 nt, Homo sapiens
  misc_RNA (1)...(19): siRNA sense strand
ggaccucaaccaggacuuc

SEQ ID NO: 1206996 - RNA, 19 nt, Homo sapiens
  misc_RNA (1)...(19): siRNA sense strand
guaugagcaccguuacaau

SEQ ID NO: 1206997 - RNA, 19 nt, Homo sapiens
  misc_RNA (1)...(19): siRNA sense strand
gaugucccuuucucucucu

SEQ ID NO: 1206998 - RNA, 19 nt, Homo sapiens
  misc_RNA (1)...(19): siRNA sense strand
caguggauuucagcuucua

SEQ ID NO: 1206999 - RNA, 19 nt, Homo sapiens
  misc_RNA (1)...(19): siRNA sense strand
gagaaaggauggcaaagau

SEQ ID NO: 1207000 - RNA, 19 nt, Homo sapiens
  misc_RNA (1)...(19): siRNA sense strand
gcaaagauccaaaucaguu

SEQ ID NO: 1207001 - RNA, 19 nt, Homo sapiens
  misc_RNA (1)...(19): siRNA sense strand
caaacgggcugcagagaug

SEQ ID NO: 1207002 - RNA, 19 nt, Homo sapiens
  misc_RNA (1)...(19): siRNA sense strand
agauggagcuucaggcaaa

SEQ ID NO: 1207003 - RNA, 19 nt, Homo sapiens
  misc_RNA (1)...(19): siRNA sense strand
gacauucccuuggaccuuu

SEQ ID NO: 1207004 - RNA, 19 nt, Homo sapiens
  misc_RNA (1)...(19): siRNA sense strand
acagacaccucucucaugu

SEQ ID NO: 1207005 - RNA, 19 nt, Homo sapiens
  misc_RNA (1)...(19): siRNA sense strand
aggcaaaacuuacagcuua

SEQ ID NO: 1207006 - RNA, 19 nt, Homo sapiens
  misc_RNA (1)...(19): siRNA sense strand
ucagugaucugccauacca

SEQ ID NO: 1207007 - RNA, 19 nt, Homo sapiens
  misc_RNA (1)...(19): siRNA sense strand
ggacuucaguggauuucag

SEQ ID NO: 1207008 - RNA, 19 nt, Homo sapiens
  misc_RNA (1)...(19): siRNA sense strand
acacagauauacagcagau

SEQ ID NO: 1207009 - RNA, 19 nt, Homo sapiens
  misc_RNA (1)...(19): siRNA sense strand
ugacugcauugaaagaugu

SEQ ID NO: 1207010 - RNA, 19 nt, Homo sapiens
  misc_RNA (1)...(19): siRNA sense strand
cugcagagauggagcuuca

SEQ ID NO: 1207011 - RNA, 19 nt, Homo sapiens
  misc_RNA (1)...(19): siRNA sense strand
agacaccucucucauguac

SEQ ID NO: 1207012 - RNA, 19 nt, Homo sapiens
  misc_RNA (1)...(19): siRNA sense strand
cacugugacugcauugaaa

SEQ ID NO: 1207013 - RNA, 19 nt, Homo sapiens
  misc_RNA (1)...(19): siRNA sense strand
ucccugacaugcugagaaa

SEQ ID NO: 1207014 - RNA, 19 nt, Homo sapiens
  misc_RNA (1)...(19): siRNA sense strand
gucuguaacugguucauca

SEQ ID NO: 1207015 - RNA, 19 nt, Homo sapiens
  misc_RNA (1)...(19): siRNA sense strand
uggcaaagauccaaaucag

SEQ ID NO: 1207016 - RNA, 19 nt, Homo sapiens
  misc_RNA (1)...(19): siRNA sense strand
gcugagaaaggauggcaaa

SEQ ID NO: 1207017 - RNA, 19 nt, Homo sapiens
  misc_RNA (1)...(19): siRNA sense strand
ugagaaaggauggcaaaga

SEQ ID NO: 1207018 - RNA, 19 nt, Homo sapiens
  misc_RNA (1)...(19): siRNA sense strand
ggacauucccuuggaccuu

SEQ ID NO: 1207019 - RNA, 19 nt, Homo sapiens
  misc_RNA (1)...(19): siRNA sense strand
gugacugcauugaaagaug

SEQ ID NO: 1207020 - RNA, 19 nt, Homo sapiens
  misc_RNA (1)...(19): siRNA sense strand
uaugagcaccguuacaaug

SEQ ID NO: 1207021 - RNA, 19 nt, Homo sapiens
  misc_RNA (1)...(19): siRNA sense strand
ccuuggaccuuucuucauc

SEQ ID NO: 1207022 - RNA, 19 nt, Homo sapiens
  misc_RNA (1)...(19): siRNA sense strand
ccacugugacugcauugaa

SEQ ID NO: 1207023 - RNA, 19 nt, Homo sapiens
  misc_RNA (1)...(19): siRNA sense strand
uuacaaugccuauccuuca

SEQ ID NO: 1207024 - RNA, 19 nt, Homo sapiens
  misc_RNA (1)...(19): siRNA sense strand
cagcaaacacaccugucua

SEQ ID NO: 1207025 - RNA, 19 nt, Homo sapiens
  misc_RNA (1)...(19): siRNA sense strand
aaccaggacuucaguggau

SEQ ID NO: 1207026 - RNA, 19 nt, Homo sapiens
  misc_RNA (1)...(19): siRNA sense strand
gugcagauucuucgggauu

SEQ ID NO: 1207027 - RNA, 19 nt, Homo sapiens
  misc_RNA (1)...(19): siRNA sense strand
caaagauccaaaucaguuc

SEQ ID NO: 1207028 - RNA, 19 nt, Homo sapiens
  misc_RNA (1)...(19): siRNA sense strand
gagcuucaggcaaaacuua

SEQ ID NO: 1207029 - RNA, 19 nt, Homo sapiens
  misc_RNA (1)...(19): siRNA sense strand
ggacaaaacacagauauac

SEQ ID NO: 1207030 - RNA, 19 nt, Homo sapiens
  misc_RNA (1)...(19): siRNA sense strand
acagauauacagcagauag

SEQ ID NO: 1207031 - RNA, 19 nt, Homo sapiens
  misc_RNA (1)...(19): siRNA sense strand
auaccacugugacugcauu

SEQ ID NO: 1207032 - RNA, 19 nt, Homo sapiens
  misc_RNA (1)...(19): siRNA sense strand
ggcaaaacuuacagcuuaa

SEQ ID NO: 1207033 - RNA, 19 nt, Homo sapiens
  misc_RNA (1)...(19): siRNA sense strand
cacagacaccucucucaug

SEQ ID NO: 1207034 - RNA, 19 nt, Homo sapiens
  misc_RNA (1)...(19): siRNA sense strand
ucacagacaccucucucau

SEQ ID NO: 1207035 - RNA, 19 nt, Homo sapiens
  misc_RNA (1)...(19): siRNA sense strand
ucaaacgggcugcagagau

SEQ ID NO: 1207036 - RNA, 19 nt, Homo sapiens
  misc_RNA (1)...(19): siRNA sense strand
guaaaucuggaccaaguac

SEQ ID NO: 1207037 - RNA, 19 nt, Homo sapiens
  misc_RNA (1)...(19): siRNA sense strand
gauccaaaucaguucacaa

SEQ ID NO: 1207038 - RNA, 19 nt, Homo sapiens
  misc_RNA (1)...(19): siRNA sense strand
gcagauucuucgggauugg

SEQ ID NO: 1207039 - RNA, 19 nt, Homo sapiens
  misc_RNA (1)...(19): siRNA sense strand
ccaggacuucaguggauuu

SEQ ID NO: 1207040 - RNA, 19 nt, Homo sapiens
  misc_RNA (1)...(19): siRNA sense strand
ggcuguaugagcaccguua

SEQ ID NO: 1207041 - RNA, 19 nt, Homo sapiens
  misc_RNA (1)...(19): siRNA sense strand
ggaccucaaccaggacuuc

SEQ ID NO: 1207042 - RNA, 19 nt, Homo sapiens
  misc_RNA (1)...(19): siRNA sense strand
guaugagcaccguuacaau

SEQ ID NO: 1207043 - RNA, 19 nt, Homo sapiens
  misc_RNA (1)...(19): siRNA sense strand
gaugucccuuucucucucu

SEQ ID NO: 1207044 - RNA, 19 nt, Homo sapiens
  misc_RNA (1)...(19): siRNA sense strand
caguggauuucagcuucua

SEQ ID NO: 1207045 - RNA, 19 nt, Homo sapiens
  misc_RNA (1)...(19): siRNA sense strand
gagaaaggauggcaaagau

SEQ ID NO: 1207046 - RNA, 19 nt, Homo sapiens
  misc_RNA (1)...(19): siRNA sense strand
gcaaagauccaaaucaguu

SEQ ID NO: 1207047 - RNA, 19 nt, Homo sapiens
  misc_RNA (1)...(19): siRNA sense strand
caaacgggcugcagagaug

SEQ ID NO: 1207048 - RNA, 19 nt, Homo sapiens
  misc_RNA (1)...(19): siRNA sense strand
agauggagcuucaggcaaa

SEQ ID NO: 1207049 - RNA, 19 nt, Homo sapiens
  misc_RNA (1)...(19): siRNA sense strand
gacauucccuuggaccuuu

SEQ ID NO: 1207050 - RNA, 19 nt, Homo sapiens
  misc_RNA (1)...(19): siRNA sense strand
gcauggacauucccuugga

SEQ ID NO: 1207051 - RNA, 19 nt, Homo sapiens
  misc_RNA (1)...(19): siRNA sense strand
acagacaccucucucaugu

SEQ ID NO: 1207052 - RNA, 19 nt, Homo sapiens
  misc_RNA (1)...(19): siRNA sense strand
aggcaaaacuuacagcuua

SEQ ID NO: 1207053 - RNA, 19 nt, Homo sapiens
  misc_RNA (1)...(19): siRNA sense strand
ucagugaucugccauacca

SEQ ID NO: 1207054 - RNA, 19 nt, Homo sapiens
  misc_RNA (1)...(19): siRNA sense strand
ggacuucaguggauuucag

SEQ ID NO: 1207055 - RNA, 19 nt, Homo sapiens
  misc_RNA (1)...(19): siRNA sense strand
acacagauauacagcagau

SEQ ID NO: 1207056 - RNA, 19 nt, Homo sapiens
  misc_RNA (1)...(19): siRNA sense strand
ugacugcauugaaagaugu

SEQ ID NO: 1207057 - RNA, 19 nt, Homo sapiens
  misc_RNA (1)...(19): siRNA sense strand
cugcagagauggagcuuca

SEQ ID NO: 1207058 - RNA, 19 nt, Homo sapiens
  misc_RNA (1)...(19): siRNA sense strand
agacaccucucucauguac

SEQ ID NO: 1207059 - RNA, 19 nt, Homo sapiens
  misc_RNA (1)...(19): siRNA sense strand
cacugugacugcauugaaa

SEQ ID NO: 1207060 - RNA, 19 nt, Homo sapiens
  misc_RNA (1)...(19): siRNA sense strand
ucccugacaugcugagaaa

SEQ ID NO: 1207061 - RNA, 19 nt, Homo sapiens
  misc_RNA (1)...(19): siRNA sense strand
gucuguaacugguucauca

SEQ ID NO: 1207062 - RNA, 19 nt, Homo sapiens
  misc_RNA (1)...(19): siRNA sense strand
uggcaaagauccaaaucag

SEQ ID NO: 1207063 - RNA, 19 nt, Homo sapiens
  misc_RNA (1)...(19): siRNA sense strand
gcugagaaaggauggcaaa

SEQ ID NO: 1207064 - RNA, 19 nt, Homo sapiens
  misc_RNA (1)...(19): siRNA sense strand
ugagaaaggauggcaaaga

SEQ ID NO: 1207065 - RNA, 19 nt, Homo sapiens
  misc_RNA (1)...(19): siRNA sense strand
gaggacagcauggacauuc

SEQ ID NO: 1207066 - RNA, 19 nt, Homo sapiens
  misc_RNA (1)...(19): siRNA sense strand
ggacauucccuuggaccuu

SEQ ID NO: 1207067 - RNA, 19 nt, Homo sapiens
  misc_RNA (1)...(19): siRNA sense strand
gugacugcauugaaagaug

SEQ ID NO: 1207068 - RNA, 19 nt, Homo sapiens
  misc_RNA (1)...(19): siRNA sense strand
uaugagcaccguuacaaug

SEQ ID NO: 1207069 - RNA, 19 nt, Homo sapiens
  misc_RNA (1)...(19): siRNA sense strand
ccacugugacugcauugaa

SEQ ID NO: 1207070 - RNA, 19 nt, Homo sapiens
  misc_RNA (1)...(19): siRNA sense strand
ccuuggaccuuucuucauc

SEQ ID NO: 1207071 - RNA, 19 nt, Homo sapiens
  misc_RNA (1)...(19): siRNA sense strand
uuacaaugccuauccuuca

SEQ ID NO: 1207072 - RNA, 19 nt, Homo sapiens
  misc_RNA (1)...(19): siRNA sense strand
gugcagauucuucgggauu

SEQ ID NO: 1207073 - RNA, 19 nt, Homo sapiens
  misc_RNA (1)...(19): siRNA sense strand
aaccaggacuucaguggau

SEQ ID NO: 1207074 - RNA, 19 nt, Homo sapiens
  misc_RNA (1)...(19): siRNA sense strand
cagcaaacacaccugucua

SEQ ID NO: 1207075 - RNA, 19 nt, Homo sapiens
  misc_RNA (1)...(19): siRNA sense strand
caaagauccaaaucaguuc

SEQ ID NO: 1207076 - RNA, 19 nt, Homo sapiens
  misc_RNA (1)...(19): siRNA sense strand
gagcuucaggcaaaacuua

SEQ ID NO: 1207077 - RNA, 19 nt, Homo sapiens
  misc_RNA (1)...(19): siRNA sense strand
ggacaaaacacagauauac

SEQ ID NO: 1207078 - RNA, 19 nt, Homo sapiens
  misc_RNA (1)...(19): siRNA sense strand
acagauauacagcagauag

SEQ ID NO: 1207079 - RNA, 19 nt, Homo sapiens
  misc_RNA (1)...(19): siRNA sense strand
auaccacugugacugcauu

SEQ ID NO: 1207080 - RNA, 19 nt, Homo sapiens
  misc_RNA (1)...(19): siRNA sense strand
ggcaaaacuuacagcuuaa

SEQ ID NO: 1207081 - RNA, 19 nt, Homo sapiens
  misc_RNA (1)...(19): siRNA sense strand
cacagacaccucucucaug

SEQ ID NO: 1207082 - RNA, 19 nt, Homo sapiens
  misc_RNA (1)...(19): siRNA sense strand
ucacagacaccucucucau

SEQ ID NO: 1207083 - RNA, 19 nt, Homo sapiens
  misc_RNA (1)...(19): siRNA sense strand
ucaaacgggcugcagagau

SEQ ID NO: 1207084 - RNA, 19 nt, Homo sapiens
  misc_RNA (1)...(19): siRNA sense strand
guaaaucuggaccaaguac

SEQ ID NO: 1207085 - RNA, 19 nt, Homo sapiens
  misc_RNA (1)...(19): siRNA sense strand
gauccaaaucaguucacaa

SEQ ID NO: 1207086 - RNA, 19 nt, Homo sapiens
  misc_RNA (1)...(19): siRNA sense strand
ccaggacuucaguggauuu

SEQ ID NO: 1207087 - RNA, 19 nt, Homo sapiens
  misc_RNA (1)...(19): siRNA sense strand
gcagauucuucgggauugg

SEQ ID NO: 1207088 - RNA, 19 nt, Homo sapiens
  misc_RNA (1)...(19): siRNA sense strand
gaugucccuuucucucucu

SEQ ID NO: 1207089 - RNA, 19 nt, Homo sapiens
  misc_RNA (1)...(19): siRNA sense strand
ggaccucaaccaggacuuc

SEQ ID NO: 1207090 - RNA, 19 nt, Homo sapiens
  misc_RNA (1)...(19): siRNA sense strand
ggcuguaugagcaccguua

SEQ ID NO: 1207091 - RNA, 19 nt, Homo sapiens
  misc_RNA (1)...(19): siRNA sense strand
guaugagcaccguuacaau

SEQ ID NO: 1207092 - RNA, 19 nt, Homo sapiens
  misc_RNA (1)...(19): siRNA sense strand
caguggauuucagcuucua

SEQ ID NO: 1207093 - RNA, 19 nt, Homo sapiens
  misc_RNA (1)...(19): siRNA sense strand
gagaaaggauggcaaagau

SEQ ID NO: 1207094 - RNA, 19 nt, Homo sapiens
  misc_RNA (1)...(19): siRNA sense strand
gcaaagauccaaaucaguu

SEQ ID NO: 1207095 - RNA, 19 nt, Homo sapiens
  misc_RNA (1)...(19): siRNA sense strand
caaacgggcugcagagaug

SEQ ID NO: 1207096 - RNA, 19 nt, Homo sapiens
  misc_RNA (1)...(19): siRNA sense strand
agauggagcuucaggcaaa

SEQ ID NO: 1207097 - RNA, 19 nt, Homo sapiens
  misc_RNA (1)...(19): siRNA sense strand
gacauucccuuggaccuuu

SEQ ID NO: 1207098 - RNA, 19 nt, Homo sapiens
  misc_RNA (1)...(19): siRNA sense strand
gcauggacauucccuugga

SEQ ID NO: 1207099 - RNA, 19 nt, Homo sapiens
  misc_RNA (1)...(19): siRNA sense strand
acagacaccucucucaugu

SEQ ID NO: 1207100 - RNA, 19 nt, Homo sapiens
  misc_RNA (1)...(19): siRNA sense strand
aggcaaaacuuacagcuua

SEQ ID NO: 1207101 - RNA, 19 nt, Homo sapiens
  misc_RNA (1)...(19): siRNA sense strand
ucagugaucugccauacca

SEQ ID NO: 1207102 - RNA, 19 nt, Homo sapiens
  misc_RNA (1)...(19): siRNA sense strand
ggacuucaguggauuucag

SEQ ID NO: 1207103 - RNA, 19 nt, Homo sapiens
  misc_RNA (1)...(19): siRNA sense strand
acacagauauacagcagau

SEQ ID NO: 1207104 - RNA, 19 nt, Homo sapiens
  misc_RNA (1)...(19): siRNA sense strand
ugacugcauugaaagaugu

SEQ ID NO: 1207105 - RNA, 19 nt, Homo sapiens
  misc_RNA (1)...(19): siRNA sense strand
cugcagagauggagcuuca

SEQ ID NO: 1207106 - RNA, 19 nt, Homo sapiens
  misc_RNA (1)...(19): siRNA sense strand
agacaccucucucauguac

SEQ ID NO: 1207107 - RNA, 19 nt, Homo sapiens
  misc_RNA (1)...(19): siRNA sense strand
cacugugacugcauugaaa

SEQ ID NO: 1207108 - RNA, 19 nt, Homo sapiens
  misc_RNA (1)...(19): siRNA sense strand
ucccugacaugcugagaaa

SEQ ID NO: 1207109 - RNA, 19 nt, Homo sapiens
  misc_RNA (1)...(19): siRNA sense strand
gucuguaacugguucauca

SEQ ID NO: 1207110 - RNA, 19 nt, Homo sapiens
  misc_RNA (1)...(19): siRNA sense strand
uggcaaagauccaaaucag

SEQ ID NO: 1207111 - RNA, 19 nt, Homo sapiens
  misc_RNA (1)...(19): siRNA sense strand
gcugagaaaggauggcaaa

SEQ ID NO: 1207112 - RNA, 19 nt, Homo sapiens
  misc_RNA (1)...(19): siRNA sense strand
ugagaaaggauggcaaaga

SEQ ID NO: 1207113 - RNA, 19 nt, Homo sapiens
  misc_RNA (1)...(19): siRNA sense strand
gaggacagcauggacauuc

SEQ ID NO: 1207114 - RNA, 19 nt, Homo sapiens
  misc_RNA (1)...(19): siRNA sense strand
ggacauucccuuggaccuu

SEQ ID NO: 1207115 - RNA, 19 nt, Homo sapiens
  misc_RNA (1)...(19): siRNA sense strand
gugacugcauugaaagaug

SEQ ID NO: 1207116 - RNA, 19 nt, Homo sapiens
  misc_RNA (1)...(19): siRNA sense strand
uaugagcaccguuacaaug

SEQ ID NO: 1207117 - RNA, 19 nt, Homo sapiens
  misc_RNA (1)...(19): siRNA sense strand
ccacugugacugcauugaa

SEQ ID NO: 1207118 - RNA, 19 nt, Homo sapiens
  misc_RNA (1)...(19): siRNA sense strand
ccuuggaccuuucuucauc

SEQ ID NO: 1207119 - RNA, 19 nt, Homo sapiens
  misc_RNA (1)...(19): siRNA sense strand
uuacaaugccuauccuuca

SEQ ID NO: 1207120 - RNA, 19 nt, Homo sapiens
  misc_RNA (1)...(19): siRNA sense strand
gugcagauucuucgggauu

SEQ ID NO: 1207121 - RNA, 19 nt, Homo sapiens
  misc_RNA (1)...(19): siRNA sense strand
aaccaggacuucaguggau

SEQ ID NO: 1207122 - RNA, 19 nt, Homo sapiens
  misc_RNA (1)...(19): siRNA sense strand
cagcaaacacaccugucua

SEQ ID NO: 1207123 - RNA, 19 nt, Homo sapiens
  misc_RNA (1)...(19): siRNA sense strand
caaagauccaaaucaguuc

SEQ ID NO: 1207124 - RNA, 19 nt, Homo sapiens
  misc_RNA (1)...(19): siRNA sense strand
gagcuucaggcaaaacuua

SEQ ID NO: 1207125 - RNA, 19 nt, Homo sapiens
  misc_RNA (1)...(19): siRNA sense strand
ggacaaaacacagauauac

SEQ ID NO: 1207126 - RNA, 19 nt, Homo sapiens
  misc_RNA (1)...(19): siRNA sense strand
acagauauacagcagauag

SEQ ID NO: 1207127 - RNA, 19 nt, Homo sapiens
  misc_RNA (1)...(19): siRNA sense strand
auaccacugugacugcauu

SEQ ID NO: 1207128 - RNA, 19 nt, Homo sapiens
  misc_RNA (1)...(19): siRNA sense strand
ggcaaaacuuacagcuuaa

SEQ ID NO: 1207129 - RNA, 19 nt, Homo sapiens
  misc_RNA (1)...(19): siRNA sense strand
cacagacaccucucucaug

SEQ ID NO: 1207130 - RNA, 19 nt, Homo sapiens
  misc_RNA (1)...(19): siRNA sense strand
ucacagacaccucucucau

SEQ ID NO: 1207131 - RNA, 19 nt, Homo sapiens
  misc_RNA (1)...(19): siRNA sense strand
ucaaacgggcugcagagau

SEQ ID NO: 1207132 - RNA, 19 nt, Homo sapiens
  misc_RNA (1)...(19): siRNA sense strand
guaaaucuggaccaaguac

SEQ ID NO: 1207133 - RNA, 19 nt, Homo sapiens
  misc_RNA (1)...(19): siRNA sense strand
gauccaaaucaguucacaa

SEQ ID NO: 1207134 - RNA, 19 nt, Homo sapiens
  misc_RNA (1)...(19): siRNA sense strand
ccaggacuucaguggauuu

SEQ ID NO: 1207135 - RNA, 19 nt, Homo sapiens
  misc_RNA (1)...(19): siRNA sense strand
gcagauucuucgggauugg

SEQ ID NO: 1207136 - RNA, 19 nt, Homo sapiens
  misc_RNA (1)...(19): siRNA sense strand
gaugucccuuucucucucu

SEQ ID NO: 1207137 - RNA, 19 nt, Homo sapiens
  misc_RNA (1)...(19): siRNA sense strand
ggaccucaaccaggacuuc

SEQ ID NO: 1207138 - RNA, 19 nt, Homo sapiens
  misc_RNA (1)...(19): siRNA sense strand
ggcuguaugagcaccguua

SEQ ID NO: 1207139 - RNA, 19 nt, Homo sapiens
  misc_RNA (1)...(19): siRNA sense strand
guaugagcaccguuacaau

SEQ ID NO: 1207140 - RNA, 19 nt, Homo sapiens
  misc_RNA (1)...(19): siRNA sense strand
caguggauuucagcuucua

SEQ ID NO: 1207141 - RNA, 19 nt, Homo sapiens
  misc_RNA (1)...(19): siRNA sense strand
gagaaaggauggcaaagau

SEQ ID NO: 1207142 - RNA, 19 nt, Homo sapiens
  misc_RNA (1)...(19): siRNA sense strand
gcaaagauccaaaucaguu

SEQ ID NO: 1207143 - RNA, 19 nt, Homo sapiens
  misc_RNA (1)...(19): siRNA sense strand
caaacgggcugcagagaug

SEQ ID NO: 1207144 - RNA, 19 nt, Homo sapiens
  misc_RNA (1)...(19): siRNA sense strand
agauggagcuucaggcaaa

SEQ ID NO: 1207145 - RNA, 19 nt, Homo sapiens
  misc_RNA (1)...(19): siRNA sense strand
gacauucccuuggaccuuu

SEQ ID NO: 1207146 - RNA, 19 nt, Homo sapiens
  misc_RNA (1)...(19): siRNA sense strand
gcauggacauucccuugga

SEQ ID NO: 1207147 - RNA, 19 nt, Homo sapiens
  misc_RNA (1)...(19): siRNA sense strand
acagacaccucucucaugu

SEQ ID NO: 1207148 - RNA, 19 nt, Homo sapiens
  misc_RNA (1)...(19): siRNA sense strand
aggcaaaacuuacagcuua

SEQ ID NO: 1207149 - RNA, 19 nt, Homo sapiens
  misc_RNA (1)...(19): siRNA sense strand
ucagugaucugccauacca

SEQ ID NO: 1207150 - RNA, 19 nt, Homo sapiens
  misc_RNA (1)...(19): siRNA sense strand
ggacuucaguggauuucag

SEQ ID NO: 1207151 - RNA, 19 nt, Homo sapiens
  misc_RNA (1)...(19): siRNA sense strand
acacagauauacagcagau

SEQ ID NO: 1207152 - RNA, 19 nt, Homo sapiens
  misc_RNA (1)...(19): siRNA sense strand
ugacugcauugaaagaugu

SEQ ID NO: 1207153 - RNA, 19 nt, Homo sapiens
  misc_RNA (1)...(19): siRNA sense strand
cugcagagauggagcuuca

SEQ ID NO: 1207154 - RNA, 19 nt, Homo sapiens
  misc_RNA (1)...(19): siRNA sense strand
agacaccucucucauguac

SEQ ID NO: 1207155 - RNA, 19 nt, Homo sapiens
  misc_RNA (1)...(19): siRNA sense strand
cacugugacugcauugaaa

SEQ ID NO: 1207156 - RNA, 19 nt, Homo sapiens
  misc_RNA (1)...(19): siRNA sense strand
ucccugacaugcugagaaa

SEQ ID NO: 1207157 - RNA, 19 nt, Homo sapiens
  misc_RNA (1)...(19): siRNA sense strand
gucuguaacugguucauca

SEQ ID NO: 1207158 - RNA, 19 nt, Homo sapiens
  misc_RNA (1)...(19): siRNA sense strand
uggcaaagauccaaaucag

SEQ ID NO: 1207159 - RNA, 19 nt, Homo sapiens
  misc_RNA (1)...(19): siRNA sense strand
gcugagaaaggauggcaaa

SEQ ID NO: 1207160 - RNA, 19 nt, Homo sapiens
  misc_RNA (1)...(19): siRNA sense strand
ugagaaaggauggcaaaga

SEQ ID NO: 1207161 - RNA, 19 nt, Homo sapiens
  misc_RNA (1)...(19): siRNA sense strand
gaggacagcauggacauuc

SEQ ID NO: 1207162 - RNA, 19 nt, Homo sapiens
  misc_RNA (1)...(19): siRNA sense strand
ggacauucccuuggaccuu

SEQ ID NO: 1207163 - RNA, 19 nt, Homo sapiens
  misc_RNA (1)...(19): siRNA sense strand
gugacugcauugaaagaug

SEQ ID NO: 1207164 - RNA, 19 nt, Homo sapiens
  misc_RNA (1)...(19): siRNA sense strand
uaugagcaccguuacaaug

SEQ ID NO: 1207165 - RNA, 19 nt, Homo sapiens
  misc_RNA (1)...(19): siRNA sense strand
ccacugugacugcauugaa

SEQ ID NO: 1207166 - RNA, 19 nt, Homo sapiens
  misc_RNA (1)...(19): siRNA sense strand
ccuuggaccuuucuucauc

SEQ ID NO: 1207167 - RNA, 19 nt, Homo sapiens
  misc_RNA (1)...(19): siRNA sense strand
uuacaaugccuauccuuca

SEQ ID NO: 1207168 - RNA, 19 nt, Homo sapiens
  misc_RNA (1)...(19): siRNA sense strand
gugcagauucuucgggauu

SEQ ID NO: 1207169 - RNA, 19 nt, Homo sapiens
  misc_RNA (1)...(19): siRNA sense strand
aaccaggacuucaguggau

SEQ ID NO: 1207170 - RNA, 19 nt, Homo sapiens
  misc_RNA (1)...(19): siRNA sense strand
cagcaaacacaccugucua

SEQ ID NO: 1207171 - RNA, 19 nt, Homo sapiens
  misc_RNA (1)...(19): siRNA sense strand
caaagauccaaaucaguuc

SEQ ID NO: 1207172 - RNA, 19 nt, Homo sapiens
  misc_RNA (1)...(19): siRNA sense strand
gagcuucaggcaaaacuua

SEQ ID NO: 1207173 - RNA, 19 nt, Homo sapiens
  misc_RNA (1)...(19): siRNA sense strand
ggacaaaacacagauauac

SEQ ID NO: 1207174 - RNA, 19 nt, Homo sapiens
  misc_RNA (1)...(19): siRNA sense strand
acagauauacagcagauag

SEQ ID NO: 1207175 - RNA, 19 nt, Homo sapiens
  misc_RNA (1)...(19): siRNA sense strand
auaccacugugacugcauu

SEQ ID NO: 1207176 - RNA, 19 nt, Homo sapiens
  misc_RNA (1)...(19): siRNA sense strand
ggcaaaacuuacagcuuaa

SEQ ID NO: 1207177 - RNA, 19 nt, Homo sapiens
  misc_RNA (1)...(19): siRNA sense strand
cacagacaccucucucaug

SEQ ID NO: 1207178 - RNA, 19 nt, Homo sapiens
  misc_RNA (1)...(19): siRNA sense strand
ucacagacaccucucucau

SEQ ID NO: 1207179 - RNA, 19 nt, Homo sapiens
  misc_RNA (1)...(19): siRNA sense strand
ucaaacgggcugcagagau

SEQ ID NO: 1207180 - RNA, 19 nt, Homo sapiens
  misc_RNA (1)...(19): siRNA sense strand
guaaaucuggaccaaguac

SEQ ID NO: 1207181 - RNA, 19 nt, Homo sapiens
  misc_RNA (1)...(19): siRNA sense strand
gauccaaaucaguucacaa

SEQ ID NO: 1207182 - RNA, 19 nt, Homo sapiens
  misc_RNA (1)...(19): siRNA sense strand
ccaggacuucaguggauuu

SEQ ID NO: 1207183 - RNA, 19 nt, Homo sapiens
  misc_RNA (1)...(19): siRNA sense strand
gcagauucuucgggauugg

SEQ ID NO: 1207184 - RNA, 19 nt, Homo sapiens
  misc_RNA (1)...(19): siRNA sense strand
gaugucccuuucucucucu

SEQ ID NO: 1207185 - RNA, 19 nt, Homo sapiens
  misc_RNA (1)...(19): siRNA sense strand
ggaccucaaccaggacuuc

SEQ ID NO: 1207186 - RNA, 19 nt, Homo sapiens
  misc_RNA (1)...(19): siRNA sense strand
ggcuguaugagcaccguua

SEQ ID NO: 1207187 - RNA, 19 nt, Homo sapiens
  misc_RNA (1)...(19): siRNA sense strand
guaugagcaccguuacaau

SEQ ID NO: 1207188 - RNA, 19 nt, Homo sapiens
  misc_RNA (1)...(19): siRNA sense strand
caguggauuucagcuucua

SEQ ID NO: 1207189 - RNA, 19 nt, Homo sapiens
  misc_RNA (1)...(19): siRNA sense strand
gagaaaggauggcaaagau

SEQ ID NO: 1207190 - RNA, 19 nt, Homo sapiens
  misc_RNA (1)...(19): siRNA sense strand
gcaaagauccaaaucaguu

SEQ ID NO: 1207191 - RNA, 19 nt, Homo sapiens
  misc_RNA (1)...(19): siRNA sense strand
caaacgggcugcagagaug

SEQ ID NO: 1207192 - RNA, 19 nt, Homo sapiens
  misc_RNA (1)...(19): siRNA sense strand
agauggagcuucaggcaaa

SEQ ID NO: 1207193 - RNA, 19 nt, Homo sapiens
  misc_RNA (1)...(19): siRNA sense strand
gacauucccuuggaccuuu

SEQ ID NO: 1207194 - RNA, 19 nt, Homo sapiens
  misc_RNA (1)...(19): siRNA sense strand
gcauggacauucccuugga

SEQ ID NO: 1207195 - RNA, 19 nt, Homo sapiens
  misc_RNA (1)...(19): siRNA sense strand
acagacaccucucucaugu

SEQ ID NO: 1207196 - RNA, 19 nt, Homo sapiens
  misc_RNA (1)...(19): siRNA sense strand
aggcaaaacuuacagcuua

SEQ ID NO: 1207197 - RNA, 19 nt, Homo sapiens
  misc_RNA (1)...(19): siRNA sense strand
ucagugaucugccauacca

SEQ ID NO: 1207198 - RNA, 19 nt, Homo sapiens
  misc_RNA (1)...(19): siRNA sense strand
ggacuucaguggauuucag

SEQ ID NO: 1207199 - RNA, 19 nt, Homo sapiens
  misc_RNA (1)...(19): siRNA sense strand
acacagauauacagcagau

SEQ ID NO: 1207200 - RNA, 19 nt, Homo sapiens
  misc_RNA (1)...(19): siRNA sense strand
ugacugcauugaaagaugu

SEQ ID NO: 1207201 - RNA, 19 nt, Homo sapiens
  misc_RNA (1)...(19): siRNA sense strand
cugcagagauggagcuuca

SEQ ID NO: 1207202 - RNA, 19 nt, Homo sapiens
  misc_RNA (1)...(19): siRNA sense strand
agacaccucucucauguac

SEQ ID NO: 1207203 - RNA, 19 nt, Homo sapiens
  misc_RNA (1)...(19): siRNA sense strand
cacugugacugcauugaaa

SEQ ID NO: 1207204 - RNA, 19 nt, Homo sapiens
  misc_RNA (1)...(19): siRNA sense strand
ucccugacaugcugagaaa

SEQ ID NO: 1207205 - RNA, 19 nt, Homo sapiens
  misc_RNA (1)...(19): siRNA sense strand
gucuguaacugguucauca

SEQ ID NO: 1207206 - RNA, 19 nt, Homo sapiens
  misc_RNA (1)...(19): siRNA sense strand
uggcaaagauccaaaucag

SEQ ID NO: 1207207 - RNA, 19 nt, Homo sapiens
  misc_RNA (1)...(19): siRNA sense strand
gcugagaaaggauggcaaa

SEQ ID NO: 1207208 - RNA, 19 nt, Homo sapiens
  misc_RNA (1)...(19): siRNA sense strand
ugagaaaggauggcaaaga

SEQ ID NO: 1207209 - RNA, 19 nt, Homo sapiens
  misc_RNA (1)...(19): siRNA sense strand
gaggacagcauggacauuc

SEQ ID NO: 1207210 - RNA, 19 nt, Homo sapiens
  misc_RNA (1)...(19): siRNA sense strand
ggacauucccuuggaccuu

SEQ ID NO: 1207211 - RNA, 19 nt, Homo sapiens
  misc_RNA (1)...(19): siRNA sense strand
gugacugcauugaaagaug

SEQ ID NO: 1207212 - RNA, 19 nt, Homo sapiens
  misc_RNA (1)...(19): siRNA sense strand
uaugagcaccguuacaaug

SEQ ID NO: 1207213 - RNA, 19 nt, Homo sapiens
  misc_RNA (1)...(19): siRNA sense strand
ccacugugacugcauugaa

SEQ ID NO: 1207214 - RNA, 19 nt, Homo sapiens
  misc_RNA (1)...(19): siRNA sense strand
ccuuggaccuuucuucauc

SEQ ID NO: 1207215 - RNA, 19 nt, Homo sapiens
  misc_RNA (1)...(19): siRNA sense strand
uuacaaugccuauccuuca

SEQ ID NO: 1207216 - RNA, 19 nt, Homo sapiens
  misc_RNA (1)...(19): siRNA sense strand
gugcagauucuucgggauu

SEQ ID NO: 1207217 - RNA, 19 nt, Homo sapiens
  misc_RNA (1)...(19): siRNA sense strand
aaccaggacuucaguggau

SEQ ID NO: 1207218 - RNA, 19 nt, Homo sapiens
  misc_RNA (1)...(19): siRNA sense strand
cagcaaacacaccugucua

SEQ ID NO: 1207219 - RNA, 19 nt, Homo sapiens
  misc_RNA (1)...(19): siRNA sense strand
caaagauccaaaucaguuc

SEQ ID NO: 1207220 - RNA, 19 nt, Homo sapiens
  misc_RNA (1)...(19): siRNA sense strand
gagcuucaggcaaaacuua

SEQ ID NO: 1207221 - RNA, 19 nt, Homo sapiens
  misc_RNA (1)...(19): siRNA sense strand
ggacaaaacacagauauac

SEQ ID NO: 1207222 - RNA, 19 nt, Homo sapiens
  misc_RNA (1)...(19): siRNA sense strand
acagauauacagcagauag

SEQ ID NO: 1207223 - RNA, 19 nt, Homo sapiens
  misc_RNA (1)...(19): siRNA sense strand
auaccacugugacugcauu

SEQ ID NO: 1207224 - RNA, 19 nt, Homo sapiens
  misc_RNA (1)...(19): siRNA sense strand
ggcaaaacuuacagcuuaa

SEQ ID NO: 1207225 - RNA, 19 nt, Homo sapiens
  misc_RNA (1)...(19): siRNA sense strand
cacagacaccucucucaug

SEQ ID NO: 1207226 - RNA, 19 nt, Homo sapiens
  misc_RNA (1)...(19): siRNA sense strand
ucacagacaccucucucau

SEQ ID NO: 1207227 - RNA, 19 nt, Homo sapiens
  misc_RNA (1)...(19): siRNA sense strand
ucaaacgggcugcagagau

SEQ ID NO: 1207228 - RNA, 19 nt, Homo sapiens
  misc_RNA (1)...(19): siRNA sense strand
guaaaucuggaccaaguac

SEQ ID NO: 1207229 - RNA, 19 nt, Homo sapiens
  misc_RNA (1)...(19): siRNA sense strand
gauccaaaucaguucacaa

SEQ ID NO: 1207230 - RNA, 19 nt, Homo sapiens
  misc_RNA (1)...(19): siRNA sense strand
ccaggacuucaguggauuu

SEQ ID NO: 1207231 - RNA, 19 nt, Homo sapiens
  misc_RNA (1)...(19): siRNA sense strand
gcagauucuucgggauugg

SEQ ID NO: 1207232 - RNA, 19 nt, Homo sapiens
  misc_RNA (1)...(19): siRNA sense strand
gaugucccuuucucucucu

SEQ ID NO: 1207233 - RNA, 19 nt, Homo sapiens
  misc_RNA (1)...(19): siRNA sense strand
ggaccucaaccaggacuuc

SEQ ID NO: 1207234 - RNA, 19 nt, Homo sapiens
  misc_RNA (1)...(19): siRNA sense strand
ggcuguaugagcaccguua

SEQ ID NO: 1207235 - RNA, 19 nt, Homo sapiens
  misc_RNA (1)...(19): siRNA sense strand
guaugagcaccguuacaau

SEQ ID NO: 1207236 - RNA, 19 nt, Homo sapiens
  misc_RNA (1)...(19): siRNA sense strand
caguggauuucagcuucua

SEQ ID NO: 1207237 - RNA, 19 nt, Homo sapiens
  misc_RNA (1)...(19): siRNA sense strand
gagaaaggauggcaaagau

SEQ ID NO: 1207238 - RNA, 19 nt, Homo sapiens
  misc_RNA (1)...(19): siRNA sense strand
gcaaagauccaaaucaguu

SEQ ID NO: 1207239 - RNA, 19 nt, Homo sapiens
  misc_RNA (1)...(19): siRNA sense strand
caaacgggcugcagagaug

SEQ ID NO: 1207240 - RNA, 19 nt, Homo sapiens
  misc_RNA (1)...(19): siRNA sense strand
agauggagcuucaggcaaa

SEQ ID NO: 1207241 - RNA, 19 nt, Homo sapiens
  misc_RNA (1)...(19): siRNA sense strand
gacauucccuuggaccuuu

SEQ ID NO: 1207242 - RNA, 19 nt, Homo sapiens
  misc_RNA (1)...(19): siRNA sense strand
acagacaccucucucaugu

SEQ ID NO: 1207243 - RNA, 19 nt, Homo sapiens
  misc_RNA (1)...(19): siRNA sense strand
aggcaaaacuuacagcuua

SEQ ID NO: 1207244 - RNA, 19 nt, Homo sapiens
  misc_RNA (1)...(19): siRNA sense strand
ucagugaucugccauacca

SEQ ID NO: 1207245 - RNA, 19 nt, Homo sapiens
  misc_RNA (1)...(19): siRNA sense strand
ggacuucaguggauuucag

SEQ ID NO: 1207246 - RNA, 19 nt, Homo sapiens
  misc_RNA (1)...(19): siRNA sense strand
acacagauauacagcagau

SEQ ID NO: 1207247 - RNA, 19 nt, Homo sapiens
  misc_RNA (1)...(19): siRNA sense strand
ugacugcauugaaagaugu

SEQ ID NO: 1207248 - RNA, 19 nt, Homo sapiens
  misc_RNA (1)...(19): siRNA sense strand
cugcagagauggagcuuca

SEQ ID NO: 1207249 - RNA, 19 nt, Homo sapiens
  misc_RNA (1)...(19): siRNA sense strand
agacaccucucucauguac

SEQ ID NO: 1207250 - RNA, 19 nt, Homo sapiens
  misc_RNA (1)...(19): siRNA sense strand
cacugugacugcauugaaa

SEQ ID NO: 1207251 - RNA, 19 nt, Homo sapiens
  misc_RNA (1)...(19): siRNA sense strand
ucccugacaugcugagaaa

SEQ ID NO: 1207252 - RNA, 19 nt, Homo sapiens
  misc_RNA (1)...(19): siRNA sense strand
gucuguaacugguucauca

SEQ ID NO: 1207253 - RNA, 19 nt, Homo sapiens
  misc_RNA (1)...(19): siRNA sense strand
uggcaaagauccaaaucag

SEQ ID NO: 1207254 - RNA, 19 nt, Homo sapiens
  misc_RNA (1)...(19): siRNA sense strand
gcugagaaaggauggcaaa

SEQ ID NO: 1207255 - RNA, 19 nt, Homo sapiens
  misc_RNA (1)...(19): siRNA sense strand
ugagaaaggauggcaaaga

SEQ ID NO: 1207256 - RNA, 19 nt, Homo sapiens
  misc_RNA (1)...(19): siRNA sense strand
ggacauucccuuggaccuu

SEQ ID NO: 1207257 - RNA, 19 nt, Homo sapiens
  misc_RNA (1)...(19): siRNA sense strand
gugacugcauugaaagaug

SEQ ID NO: 1207258 - RNA, 19 nt, Homo sapiens
  misc_RNA (1)...(19): siRNA sense strand
uaugagcaccguuacaaug

SEQ ID NO: 1207259 - RNA, 19 nt, Homo sapiens
  misc_RNA (1)...(19): siRNA sense strand
ccuuggaccuuucuucauc

SEQ ID NO: 1207260 - RNA, 19 nt, Homo sapiens
  misc_RNA (1)...(19): siRNA sense strand
ccacugugacugcauugaa

SEQ ID NO: 1207261 - RNA, 19 nt, Homo sapiens
  misc_RNA (1)...(19): siRNA sense strand
uuacaaugccuauccuuca

SEQ ID NO: 1207262 - RNA, 19 nt, Homo sapiens
  misc_RNA (1)...(19): siRNA sense strand
cagcaaacacaccugucua

SEQ ID NO: 1207263 - RNA, 19 nt, Homo sapiens
  misc_RNA (1)...(19): siRNA sense strand
aaccaggacuucaguggau

SEQ ID NO: 1207264 - RNA, 19 nt, Homo sapiens
  misc_RNA (1)...(19): siRNA sense strand
gugcagauucuucgggauu

SEQ ID NO: 1207265 - RNA, 19 nt, Homo sapiens
  misc_RNA (1)...(19): siRNA sense strand
caaagauccaaaucaguuc

SEQ ID NO: 1207266 - RNA, 19 nt, Homo sapiens
  misc_RNA (1)...(19): siRNA sense strand
gagcuucaggcaaaacuua

SEQ ID NO: 1207267 - RNA, 19 nt, Homo sapiens
  misc_RNA (1)...(19): siRNA sense strand
ggacaaaacacagauauac

SEQ ID NO: 1207268 - RNA, 19 nt, Homo sapiens
  misc_RNA (1)...(19): siRNA sense strand
acagauauacagcagauag

SEQ ID NO: 1207269 - RNA, 19 nt, Homo sapiens
  misc_RNA (1)...(19): siRNA sense strand
auaccacugugacugcauu

SEQ ID NO: 1207270 - RNA, 19 nt, Homo sapiens
  misc_RNA (1)...(19): siRNA sense strand
ggcaaaacuuacagcuuaa

SEQ ID NO: 1207271 - RNA, 19 nt, Homo sapiens
  misc_RNA (1)...(19): siRNA sense strand
cacagacaccucucucaug

SEQ ID NO: 1207272 - RNA, 19 nt, Homo sapiens
  misc_RNA (1)...(19): siRNA sense strand
ucacagacaccucucucau

SEQ ID NO: 1207273 - RNA, 19 nt, Homo sapiens
  misc_RNA (1)...(19): siRNA sense strand
ucaaacgggcugcagagau

SEQ ID NO: 1207274 - RNA, 19 nt, Homo sapiens
  misc_RNA (1)...(19): siRNA sense strand
guaaaucuggaccaaguac

SEQ ID NO: 1207275 - RNA, 19 nt, Homo sapiens
  misc_RNA (1)...(19): siRNA sense strand
gauccaaaucaguucacaa

SEQ ID NO: 1207276 - RNA, 19 nt, Homo sapiens
  misc_RNA (1)...(19): siRNA sense strand
gcagauucuucgggauugg

SEQ ID NO: 1207277 - RNA, 19 nt, Homo sapiens
  misc_RNA (1)...(19): siRNA sense strand
ccaggacuucaguggauuu

SEQ ID NO: 1207278 - RNA, 19 nt, Homo sapiens
  misc_RNA (1)...(19): siRNA sense strand
ggcuguaugagcaccguua

SEQ ID NO: 1207279 - RNA, 19 nt, Homo sapiens
  misc_RNA (1)...(19): siRNA sense strand
ggaccucaaccaggacuuc

SEQ ID NO: 1207280 - RNA, 19 nt, Homo sapiens
  misc_RNA (1)...(19): siRNA sense strand
guaugagcaccguuacaau

SEQ ID NO: 1207281 - RNA, 19 nt, Homo sapiens
  misc_RNA (1)...(19): siRNA sense strand
gaugucccuuucucucucu

SEQ ID NO: 1207282 - RNA, 19 nt, Homo sapiens
  misc_RNA (1)...(19): siRNA sense strand
caguggauuucagcuucua

SEQ ID NO: 1207283 - RNA, 19 nt, Homo sapiens
  misc_RNA (1)...(19): siRNA sense strand
gagaaaggauggcaaagau

SEQ ID NO: 1207284 - RNA, 19 nt, Homo sapiens
  misc_RNA (1)...(19): siRNA sense strand
gcaaagauccaaaucaguu

SEQ ID NO: 1207285 - RNA, 19 nt, Homo sapiens
  misc_RNA (1)...(19): siRNA sense strand
caaacgggcugcagagaug

SEQ ID NO: 1207286 - RNA, 19 nt, Homo sapiens
  misc_RNA (1)...(19): siRNA sense strand
agauggagcuucaggcaaa

SEQ ID NO: 1207287 - RNA, 19 nt, Homo sapiens
  misc_RNA (1)...(19): siRNA sense strand
gacauucccuuggaccuuu

SEQ ID NO: 1207288 - RNA, 19 nt, Homo sapiens
  misc_RNA (1)...(19): siRNA sense strand
acagacaccucucucaugu

SEQ ID NO: 1207289 - RNA, 19 nt, Homo sapiens
  misc_RNA (1)...(19): siRNA sense strand
aggcaaaacuuacagcuua

SEQ ID NO: 1207290 - RNA, 19 nt, Homo sapiens
  misc_RNA (1)...(19): siRNA sense strand
ucagugaucugccauacca

SEQ ID NO: 1207291 - RNA, 19 nt, Homo sapiens
  misc_RNA (1)...(19): siRNA sense strand
ggacuucaguggauuucag

SEQ ID NO: 1207292 - RNA, 19 nt, Homo sapiens
  misc_RNA (1)...(19): siRNA sense strand
acacagauauacagcagau

SEQ ID NO: 1207293 - RNA, 19 nt, Homo sapiens
  misc_RNA (1)...(19): siRNA sense strand
ugacugcauugaaagaugu

SEQ ID NO: 1207294 - RNA, 19 nt, Homo sapiens
  misc_RNA (1)...(19): siRNA sense strand
cugcagagauggagcuuca

SEQ ID NO: 1207295 - RNA, 19 nt, Homo sapiens
  misc_RNA (1)...(19): siRNA sense strand
agacaccucucucauguac

SEQ ID NO: 1207296 - RNA, 19 nt, Homo sapiens
  misc_RNA (1)...(19): siRNA sense strand
cacugugacugcauugaaa

SEQ ID NO: 1207297 - RNA, 19 nt, Homo sapiens
  misc_RNA (1)...(19): siRNA sense strand
ucccugacaugcugagaaa

SEQ ID NO: 1207298 - RNA, 19 nt, Homo sapiens
  misc_RNA (1)...(19): siRNA sense strand
gucuguaacugguucauca

SEQ ID NO: 1207299 - RNA, 19 nt, Homo sapiens
  misc_RNA (1)...(19): siRNA sense strand
uggcaaagauccaaaucag

SEQ ID NO: 1207300 - RNA, 19 nt, Homo sapiens
  misc_RNA (1)...(19): siRNA sense strand
gcugagaaaggauggcaaa

SEQ ID NO: 1207301 - RNA, 19 nt, Homo sapiens
  misc_RNA (1)...(19): siRNA sense strand
ugagaaaggauggcaaaga

SEQ ID NO: 1207302 - RNA, 19 nt, Homo sapiens
  misc_RNA (1)...(19): siRNA sense strand
ggacauucccuuggaccuu

SEQ ID NO: 1207303 - RNA, 19 nt, Homo sapiens
  misc_RNA (1)...(19): siRNA sense strand
gugacugcauugaaagaug

SEQ ID NO: 1207304 - RNA, 19 nt, Homo sapiens
  misc_RNA (1)...(19): siRNA sense strand
uaugagcaccguuacaaug

SEQ ID NO: 1207305 - RNA, 19 nt, Homo sapiens
  misc_RNA (1)...(19): siRNA sense strand
ccuuggaccuuucuucauc

SEQ ID NO: 1207306 - RNA, 19 nt, Homo sapiens
  misc_RNA (1)...(19): siRNA sense strand
ccacugugacugcauugaa

SEQ ID NO: 1207307 - RNA, 19 nt, Homo sapiens
  misc_RNA (1)...(19): siRNA sense strand
uuacaaugccuauccuuca

SEQ ID NO: 1207308 - RNA, 19 nt, Homo sapiens
  misc_RNA (1)...(19): siRNA sense strand
cagcaaacacaccugucua

SEQ ID NO: 1207309 - RNA, 19 nt, Homo sapiens
  misc_RNA (1)...(19): siRNA sense strand
aaccaggacuucaguggau

SEQ ID NO: 1207310 - RNA, 19 nt, Homo sapiens
  misc_RNA (1)...(19): siRNA sense strand
gugcagauucuucgggauu

SEQ ID NO: 1207311 - RNA, 19 nt, Homo sapiens
  misc_RNA (1)...(19): siRNA sense strand
caaagauccaaaucaguuc

SEQ ID NO: 1207312 - RNA, 19 nt, Homo sapiens
  misc_RNA (1)...(19): siRNA sense strand
gagcuucaggcaaaacuua

SEQ ID NO: 1207313 - RNA, 19 nt, Homo sapiens
  misc_RNA (1)...(19): siRNA sense strand
ggacaaaacacagauauac

SEQ ID NO: 1207314 - RNA, 19 nt, Homo sapiens
  misc_RNA (1)...(19): siRNA sense strand
acagauauacagcagauag

SEQ ID NO: 1207315 - RNA, 19 nt, Homo sapiens
  misc_RNA (1)...(19): siRNA sense strand
auaccacugugacugcauu

SEQ ID NO: 1207316 - RNA, 19 nt, Homo sapiens
  misc_RNA (1)...(19): siRNA sense strand
ggcaaaacuuacagcuuaa

SEQ ID NO: 1207317 - RNA, 19 nt, Homo sapiens
  misc_RNA (1)...(19): siRNA sense strand
cacagacaccucucucaug

SEQ ID NO: 1207318 - RNA, 19 nt, Homo sapiens
  misc_RNA (1)...(19): siRNA sense strand
ucacagacaccucucucau

SEQ ID NO: 1207319 - RNA, 19 nt, Homo sapiens
  misc_RNA (1)...(19): siRNA sense strand
ucaaacgggcugcagagau

SEQ ID NO: 1207320 - RNA, 19 nt, Homo sapiens
  misc_RNA (1)...(19): siRNA sense strand
guaaaucuggaccaaguac

SEQ ID NO: 1207321 - RNA, 19 nt, Homo sapiens
  misc_RNA (1)...(19): siRNA sense strand
gauccaaaucaguucacaa

SEQ ID NO: 1207322 - RNA, 19 nt, Homo sapiens
  misc_RNA (1)...(19): siRNA sense strand
gcagauucuucgggauugg

SEQ ID NO: 1207323 - RNA, 19 nt, Homo sapiens
  misc_RNA (1)...(19): siRNA sense strand
ccaggacuucaguggauuu

SEQ ID NO: 1207324 - RNA, 19 nt, Homo sapiens
  misc_RNA (1)...(19): siRNA sense strand
ggcuguaugagcaccguua

SEQ ID NO: 1207325 - RNA, 19 nt, Homo sapiens
  misc_RNA (1)...(19): siRNA sense strand
ggaccucaaccaggacuuc

SEQ ID NO: 1207326 - RNA, 19 nt, Homo sapiens
  misc_RNA (1)...(19): siRNA sense strand
guaugagcaccguuacaau

SEQ ID NO: 1207327 - RNA, 19 nt, Homo sapiens
  misc_RNA (1)...(19): siRNA sense strand
gaugucccuuucucucucu

SEQ ID NO: 1207328 - RNA, 19 nt, Homo sapiens
  misc_RNA (1)...(19): siRNA sense strand
caguggauuucagcuucua

SEQ ID NO: 1207329 - RNA, 19 nt, Homo sapiens
  misc_RNA (1)...(19): siRNA sense strand
gagaaaggauggcaaagau

SEQ ID NO: 1207330 - RNA, 19 nt, Homo sapiens
  misc_RNA (1)...(19): siRNA sense strand
gcaaagauccaaaucaguu

SEQ ID NO: 1207331 - RNA, 19 nt, Homo sapiens
  misc_RNA (1)...(19): siRNA sense strand
caaacgggcugcagagaug

SEQ ID NO: 1207332 - RNA, 19 nt, Homo sapiens
  misc_RNA (1)...(19): siRNA sense strand
agauggagcuucaggcaaa

SEQ ID NO: 1207333 - RNA, 19 nt, Homo sapiens
  misc_RNA (1)...(19): siRNA sense strand
gacauucccuuggaccuuu

SEQ ID NO: 1207334 - RNA, 19 nt, Homo sapiens
  misc_RNA (1)...(19): siRNA sense strand
acagacaccucucucaugu

SEQ ID NO: 1207335 - RNA, 19 nt, Homo sapiens
  misc_RNA (1)...(19): siRNA sense strand
aggcaaaacuuacagcuua

SEQ ID NO: 1207336 - RNA, 19 nt, Homo sapiens
  misc_RNA (1)...(19): siRNA sense strand
ucagugaucugccauacca

SEQ ID NO: 1207337 - RNA, 19 nt, Homo sapiens
  misc_RNA (1)...(19): siRNA sense strand
ggacuucaguggauuucag

SEQ ID NO: 1207338 - RNA, 19 nt, Homo sapiens
  misc_RNA (1)...(19): siRNA sense strand
acacagauauacagcagau

SEQ ID NO: 1207339 - RNA, 19 nt, Homo sapiens
  misc_RNA (1)...(19): siRNA sense strand
ugacugcauugaaagaugu

SEQ ID NO: 1207340 - RNA, 19 nt, Homo sapiens
  misc_RNA (1)...(19): siRNA sense strand
cugcagagauggagcuuca

SEQ ID NO: 1207341 - RNA, 19 nt, Homo sapiens
  misc_RNA (1)...(19): siRNA sense strand
agacaccucucucauguac

SEQ ID NO: 1207342 - RNA, 19 nt, Homo sapiens
  misc_RNA (1)...(19): siRNA sense strand
cacugugacugcauugaaa

SEQ ID NO: 1207343 - RNA, 19 nt, Homo sapiens
  misc_RNA (1)...(19): siRNA sense strand
ucccugacaugcugagaaa

SEQ ID NO: 1207344 - RNA, 19 nt, Homo sapiens
  misc_RNA (1)...(19): siRNA sense strand
gucuguaacugguucauca

SEQ ID NO: 1207345 - RNA, 19 nt, Homo sapiens
  misc_RNA (1)...(19): siRNA sense strand
uggcaaagauccaaaucag

SEQ ID NO: 1207346 - RNA, 19 nt, Homo sapiens
  misc_RNA (1)...(19): siRNA sense strand
gcugagaaaggauggcaaa

SEQ ID NO: 1207347 - RNA, 19 nt, Homo sapiens
  misc_RNA (1)...(19): siRNA sense strand
ugagaaaggauggcaaaga

SEQ ID NO: 1207348 - RNA, 19 nt, Homo sapiens
  misc_RNA (1)...(19): siRNA sense strand
ggacauucccuuggaccuu

SEQ ID NO: 1207349 - RNA, 19 nt, Homo sapiens
  misc_RNA (1)...(19): siRNA sense strand
gugacugcauugaaagaug

SEQ ID NO: 1207350 - RNA, 19 nt, Homo sapiens
  misc_RNA (1)...(19): siRNA sense strand
uaugagcaccguuacaaug

SEQ ID NO: 1207351 - RNA, 19 nt, Homo sapiens
  misc_RNA (1)...(19): siRNA sense strand
ccuuggaccuuucuucauc

SEQ ID NO: 1207352 - RNA, 19 nt, Homo sapiens
  misc_RNA (1)...(19): siRNA sense strand
ccacugugacugcauugaa

SEQ ID NO: 1207353 - RNA, 19 nt, Homo sapiens
  misc_RNA (1)...(19): siRNA sense strand
uuacaaugccuauccuuca

SEQ ID NO: 1207354 - RNA, 19 nt, Homo sapiens
  misc_RNA (1)...(19): siRNA sense strand
cagcaaacacaccugucua

SEQ ID NO: 1207355 - RNA, 19 nt, Homo sapiens
  misc_RNA (1)...(19): siRNA sense strand
aaccaggacuucaguggau

SEQ ID NO: 1207356 - RNA, 19 nt, Homo sapiens
  misc_RNA (1)...(19): siRNA sense strand
gugcagauucuucgggauu

SEQ ID NO: 1207357 - RNA, 19 nt, Homo sapiens
  misc_RNA (1)...(19): siRNA sense strand
caaagauccaaaucaguuc

SEQ ID NO: 1207358 - RNA, 19 nt, Homo sapiens
  misc_RNA (1)...(19): siRNA sense strand
gagcuucaggcaaaacuua

SEQ ID NO: 1207359 - RNA, 19 nt, Homo sapiens
  misc_RNA (1)...(19): siRNA sense strand
ggacaaaacacagauauac

SEQ ID NO: 1207360 - RNA, 19 nt, Homo sapiens
  misc_RNA (1)...(19): siRNA sense strand
acagauauacagcagauag

SEQ ID NO: 1207361 - RNA, 19 nt, Homo sapiens
  misc_RNA (1)...(19): siRNA sense strand
auaccacugugacugcauu

SEQ ID NO: 1207362 - RNA, 19 nt, Homo sapiens
  misc_RNA (1)...(19): siRNA sense strand
ggcaaaacuuacagcuuaa

SEQ ID NO: 1207363 - RNA, 19 nt, Homo sapiens
  misc_RNA (1)...(19): siRNA sense strand
cacagacaccucucucaug

SEQ ID NO: 1207364 - RNA, 19 nt, Homo sapiens
  misc_RNA (1)...(19): siRNA sense strand
ucacagacaccucucucau

SEQ ID NO: 1207365 - RNA, 19 nt, Homo sapiens
  misc_RNA (1)...(19): siRNA sense strand
ucaaacgggcugcagagau

SEQ ID NO: 1207366 - RNA, 19 nt, Homo sapiens
  misc_RNA (1)...(19): siRNA sense strand
guaaaucuggaccaaguac

SEQ ID NO: 1207367 - RNA, 19 nt, Homo sapiens
  misc_RNA (1)...(19): siRNA sense strand
gauccaaaucaguucacaa

SEQ ID NO: 1207368 - RNA, 19 nt, Homo sapiens
  misc_RNA (1)...(19): siRNA sense strand
gcagauucuucgggauugg

SEQ ID NO: 1207369 - RNA, 19 nt, Homo sapiens
  misc_RNA (1)...(19): siRNA sense strand
ccaggacuucaguggauuu

SEQ ID NO: 1207370 - RNA, 19 nt, Homo sapiens
  misc_RNA (1)...(19): siRNA sense strand
ggcuguaugagcaccguua

SEQ ID NO: 1207371 - RNA, 19 nt, Homo sapiens
  misc_RNA (1)...(19): siRNA sense strand
ggaccucaaccaggacuuc

SEQ ID NO: 1207372 - RNA, 19 nt, Homo sapiens
  misc_RNA (1)...(19): siRNA sense strand
guaugagcaccguuacaau

SEQ ID NO: 1207373 - RNA, 19 nt, Homo sapiens
  misc_RNA (1)...(19): siRNA sense strand
gaugucccuuucucucucu

SEQ ID NO: 1207374 - RNA, 19 nt, Homo sapiens
  misc_RNA (1)...(19): siRNA sense strand
caguggauuucagcuucua

SEQ ID NO: 1207375 - RNA, 19 nt, Homo sapiens
  misc_RNA (1)...(19): siRNA sense strand
gagaaaggauggcaaagau

SEQ ID NO: 1207376 - RNA, 19 nt, Homo sapiens
  misc_RNA (1)...(19): siRNA sense strand
gcaaagauccaaaucaguu

SEQ ID NO: 1207377 - RNA, 19 nt, Homo sapiens
  misc_RNA (1)...(19): siRNA sense strand
caaacgggcugcagagaug

SEQ ID NO: 1207378 - RNA, 19 nt, Homo sapiens
  misc_RNA (1)...(19): siRNA sense strand
agauggagcuucaggcaaa

SEQ ID NO: 1207379 - RNA, 19 nt, Homo sapiens
  misc_RNA (1)...(19): siRNA sense strand
gacauucccuuggaccuuu

SEQ ID NO: 1207380 - RNA, 19 nt, Homo sapiens
  misc_RNA (1)...(19): siRNA sense strand
acagacaccucucucaugu

SEQ ID NO: 1207381 - RNA, 19 nt, Homo sapiens
  misc_RNA (1)...(19): siRNA sense strand
aggcaaaacuuacagcuua

SEQ ID NO: 1207382 - RNA, 19 nt, Homo sapiens
  misc_RNA (1)...(19): siRNA sense strand
ucagugaucugccauacca

SEQ ID NO: 1207383 - RNA, 19 nt, Homo sapiens
  misc_RNA (1)...(19): siRNA sense strand
ggacuucaguggauuucag

SEQ ID NO: 1207384 - RNA, 19 nt, Homo sapiens
  misc_RNA (1)...(19): siRNA sense strand
acacagauauacagcagau

SEQ ID NO: 1207385 - RNA, 19 nt, Homo sapiens
  misc_RNA (1)...(19): siRNA sense strand
ugacugcauugaaagaugu

SEQ ID NO: 1207386 - RNA, 19 nt, Homo sapiens
  misc_RNA (1)...(19): siRNA sense strand
cugcagagauggagcuuca

SEQ ID NO: 1207387 - RNA, 19 nt, Homo sapiens
  misc_RNA (1)...(19): siRNA sense strand
agacaccucucucauguac

SEQ ID NO: 1207388 - RNA, 19 nt, Homo sapiens
  misc_RNA (1)...(19): siRNA sense strand
cacugugacugcauugaaa

SEQ ID NO: 1207389 - RNA, 19 nt, Homo sapiens
  misc_RNA (1)...(19): siRNA sense strand
ucccugacaugcugagaaa

SEQ ID NO: 1207390 - RNA, 19 nt, Homo sapiens
  misc_RNA (1)...(19): siRNA sense strand
gucuguaacugguucauca

SEQ ID NO: 1207391 - RNA, 19 nt, Homo sapiens
  misc_RNA (1)...(19): siRNA sense strand
uggcaaagauccaaaucag

SEQ ID NO: 1207392 - RNA, 19 nt, Homo sapiens
  misc_RNA (1)...(19): siRNA sense strand
gcugagaaaggauggcaaa

SEQ ID NO: 1207393 - RNA, 19 nt, Homo sapiens
  misc_RNA (1)...(19): siRNA sense strand
ugagaaaggauggcaaaga

SEQ ID NO: 1207394 - RNA, 19 nt, Homo sapiens
  misc_RNA (1)...(19): siRNA sense strand
ggacauucccuuggaccuu

SEQ ID NO: 1207395 - RNA, 19 nt, Homo sapiens
  misc_RNA (1)...(19): siRNA sense strand
gugacugcauugaaagaug

SEQ ID NO: 1207396 - RNA, 19 nt, Homo sapiens
  misc_RNA (1)...(19): siRNA sense strand
uaugagcaccguuacaaug

SEQ ID NO: 1207397 - RNA, 19 nt, Homo sapiens
  misc_RNA (1)...(19): siRNA sense strand
ccuuggaccuuucuucauc

SEQ ID NO: 1207398 - RNA, 19 nt, Homo sapiens
  misc_RNA (1)...(19): siRNA sense strand
ccacugugacugcauugaa

SEQ ID NO: 1207399 - RNA, 19 nt, Homo sapiens
  misc_RNA (1)...(19): siRNA sense strand
uuacaaugccuauccuuca

SEQ ID NO: 1207400 - RNA, 19 nt, Homo sapiens
  misc_RNA (1)...(19): siRNA sense strand
cagcaaacacaccugucua

SEQ ID NO: 1207401 - RNA, 19 nt, Homo sapiens
  misc_RNA (1)...(19): siRNA sense strand
aaccaggacuucaguggau

SEQ ID NO: 1207402 - RNA, 19 nt, Homo sapiens
  misc_RNA (1)...(19): siRNA sense strand
gugcagauucuucgggauu

SEQ ID NO: 1207403 - RNA, 19 nt, Homo sapiens
  misc_RNA (1)...(19): siRNA sense strand
caaagauccaaaucaguuc

SEQ ID NO: 1207404 - RNA, 19 nt, Homo sapiens
  misc_RNA (1)...(19): siRNA sense strand
gagcuucaggcaaaacuua

SEQ ID NO: 1207405 - RNA, 19 nt, Homo sapiens
  misc_RNA (1)...(19): siRNA sense strand
ggacaaaacacagauauac

SEQ ID NO: 1207406 - RNA, 19 nt, Homo sapiens
  misc_RNA (1)...(19): siRNA sense strand
acagauauacagcagauag

SEQ ID NO: 1207407 - RNA, 19 nt, Homo sapiens
  misc_RNA (1)...(19): siRNA sense strand
auaccacugugacugcauu

SEQ ID NO: 1207408 - RNA, 19 nt, Homo sapiens
  misc_RNA (1)...(19): siRNA sense strand
ggcaaaacuuacagcuuaa

SEQ ID NO: 1207409 - RNA, 19 nt, Homo sapiens
  misc_RNA (1)...(19): siRNA sense strand
cacagacaccucucucaug

SEQ ID NO: 1207410 - RNA, 19 nt, Homo sapiens
  misc_RNA (1)...(19): siRNA sense strand
ucacagacaccucucucau

SEQ ID NO: 1207411 - RNA, 19 nt, Homo sapiens
  misc_RNA (1)...(19): siRNA sense strand
ucaaacgggcugcagagau

SEQ ID NO: 1207412 - RNA, 19 nt, Homo sapiens
  misc_RNA (1)...(19): siRNA sense strand
guaaaucuggaccaaguac

SEQ ID NO: 1207413 - RNA, 19 nt, Homo sapiens
  misc_RNA (1)...(19): siRNA sense strand
gauccaaaucaguucacaa

SEQ ID NO: 1207414 - RNA, 19 nt, Homo sapiens
  misc_RNA (1)...(19): siRNA sense strand
gcagauucuucgggauugg

SEQ ID NO: 1207415 - RNA, 19 nt, Homo sapiens
  misc_RNA (1)...(19): siRNA sense strand
ccaggacuucaguggauuu

SEQ ID NO: 1207416 - RNA, 19 nt, Homo sapiens
  misc_RNA (1)...(19): siRNA sense strand
ggcuguaugagcaccguua

SEQ ID NO: 1207417 - RNA, 19 nt, Homo sapiens
  misc_RNA (1)...(19): siRNA sense strand
ggaccucaaccaggacuuc

SEQ ID NO: 1207418 - RNA, 19 nt, Homo sapiens
  misc_RNA (1)...(19): siRNA sense strand
guaugagcaccguuacaau

SEQ ID NO: 1207419 - RNA, 19 nt, Homo sapiens
  misc_RNA (1)...(19): siRNA sense strand
gaugucccuuucucucucu

SEQ ID NO: 1207420 - RNA, 19 nt, Homo sapiens
  misc_RNA (1)...(19): siRNA sense strand
caguggauuucagcuucua

SEQ ID NO: 1207421 - RNA, 19 nt, Homo sapiens
  misc_RNA (1)...(19): siRNA sense strand
ggacacacauacagugauu

SEQ ID NO: 1207422 - RNA, 19 nt, Homo sapiens
  misc_RNA (1)...(19): siRNA sense strand
gcacaaacaugaggaaucu

SEQ ID NO: 1207423 - RNA, 19 nt, Homo sapiens
  misc_RNA (1)...(19): siRNA sense strand
uaaauacugugacaaggaa

SEQ ID NO: 1207424 - RNA, 19 nt, Homo sapiens
  misc_RNA (1)...(19): siRNA sense strand
gaaugucucuccugcacaa

SEQ ID NO: 1207425 - RNA, 19 nt, Homo sapiens
  misc_RNA (1)...(19): siRNA sense strand
gaaucuggcugcuguguag

SEQ ID NO: 1207426 - RNA, 19 nt, Homo sapiens
  misc_RNA (1)...(19): siRNA sense strand
cauugaagcugaaaaguuu

SEQ ID NO: 1207427 - RNA, 19 nt, Homo sapiens
  misc_RNA (1)...(19): siRNA sense strand
guaaauacugugacaagga

SEQ ID NO: 1207428 - RNA, 19 nt, Homo sapiens
  misc_RNA (1)...(19): siRNA sense strand
ggacuaccgcugcuccauu

SEQ ID NO: 1207429 - RNA, 19 nt, Homo sapiens
  misc_RNA (1)...(19): siRNA sense strand
gcuccuuccuggucaagaa

SEQ ID NO: 1207430 - RNA, 19 nt, Homo sapiens
  misc_RNA (1)...(19): siRNA sense strand
gaacuggacacacauacag

SEQ ID NO: 1207431 - RNA, 19 nt, Homo sapiens
  misc_RNA (1)...(19): siRNA sense strand
gacuaccgcugcuccauuc

SEQ ID NO: 1207432 - RNA, 19 nt, Homo sapiens
  misc_RNA (1)...(19): siRNA sense strand
cacauacagugauuauuuc

SEQ ID NO: 1207433 - RNA, 19 nt, Homo sapiens
  misc_RNA (1)...(19): siRNA sense strand
gaagaggaaagacuacagu

SEQ ID NO: 1207434 - RNA, 19 nt, Homo sapiens
  misc_RNA (1)...(19): siRNA sense strand
ucucuccucuuuccggaua

SEQ ID NO: 1207435 - RNA, 19 nt, Homo sapiens
  misc_RNA (1)...(19): siRNA sense strand
ggauacuccucaucuuugg

SEQ ID NO: 1207436 - RNA, 19 nt, Homo sapiens
  misc_RNA (1)...(19): siRNA sense strand
ggaaucuggcugcugugua

SEQ ID NO: 1207437 - RNA, 19 nt, Homo sapiens
  misc_RNA (1)...(19): siRNA sense strand
gcgaugcccagucuagaaa

SEQ ID NO: 1207438 - RNA, 19 nt, Homo sapiens
  misc_RNA (1)...(19): siRNA sense strand
cauuagugaugaagaggaa

SEQ ID NO: 1207439 - RNA, 19 nt, Homo sapiens
  misc_RNA (1)...(19): siRNA sense strand
aauggccucucuccucuuu

SEQ ID NO: 1207440 - RNA, 19 nt, Homo sapiens
  misc_RNA (1)...(19): siRNA sense strand
gacccauucugauguaaag

SEQ ID NO: 1207441 - RNA, 19 nt, Homo sapiens
  misc_RNA (1)...(19): siRNA sense strand
aaagaaauaccagugcaaa

SEQ ID NO: 1207442 - RNA, 19 nt, Homo sapiens
  misc_RNA (1)...(19): siRNA sense strand
ggacacauuagaacucaca

SEQ ID NO: 1207443 - RNA, 19 nt, Homo sapiens
  misc_RNA (1)...(19): siRNA sense strand
ucacugcaacagagcauuu

SEQ ID NO: 1207444 - RNA, 19 nt, Homo sapiens
  misc_RNA (1)...(19): siRNA sense strand
acagcgaacuggacacaca

SEQ ID NO: 1207445 - RNA, 19 nt, Homo sapiens
  misc_RNA (1)...(19): siRNA sense strand
uuucugggcuggccaaaca

SEQ ID NO: 1207446 - RNA, 19 nt, Homo sapiens
  misc_RNA (1)...(19): siRNA sense strand
gcauuucaacgccuccaaa

SEQ ID NO: 1207447 - RNA, 19 nt, Homo sapiens
  misc_RNA (1)...(19): siRNA sense strand
ccggauacuccucaucuuu

SEQ ID NO: 1207448 - RNA, 19 nt, Homo sapiens
  misc_RNA (1)...(19): siRNA sense strand
uaaagaaauaccagugcaa

SEQ ID NO: 1207449 - RNA, 19 nt, Homo sapiens
  misc_RNA (1)...(19): siRNA sense strand
acacacauacagugauuau

SEQ ID NO: 1207450 - RNA, 19 nt, Homo sapiens
  misc_RNA (1)...(19): siRNA sense strand
ugaugaagaggaaagacua

SEQ ID NO: 1207451 - RNA, 19 nt, Homo sapiens
  misc_RNA (1)...(19): siRNA sense strand
gcccugaagaugcauauuc

SEQ ID NO: 1207452 - RNA, 19 nt, Homo sapiens
  misc_RNA (1)...(19): siRNA sense strand
cggauacuccucaucuuug

SEQ ID NO: 1207453 - RNA, 19 nt, Homo sapiens
  misc_RNA (1)...(19): siRNA sense strand
uauucggacccacacauua

SEQ ID NO: 1207454 - RNA, 19 nt, Homo sapiens
  misc_RNA (1)...(19): siRNA sense strand
ucagaaagccccauuagug

SEQ ID NO: 1207455 - RNA, 19 nt, Homo sapiens
  misc_RNA (1)...(19): siRNA sense strand
gcucaucugcagacccauu

SEQ ID NO: 1207456 - RNA, 19 nt, Homo sapiens
  misc_RNA (1)...(19): siRNA sense strand
caucugacaccuccuccaa

SEQ ID NO: 1207457 - RNA, 19 nt, Homo sapiens
  misc_RNA (1)...(19): siRNA sense strand
caaggacacauuagaacuc

SEQ ID NO: 1207458 - RNA, 19 nt, Homo sapiens
  misc_RNA (1)...(19): siRNA sense strand
cuucaaggacacauuagaa

SEQ ID NO: 1207459 - RNA, 19 nt, Homo sapiens
  misc_RNA (1)...(19): siRNA sense strand
gaucugcggcaaggcguuu

SEQ ID NO: 1207460 - RNA, 19 nt, Homo sapiens
  misc_RNA (1)...(19): siRNA sense strand
cagaaagccccauuaguga

SEQ ID NO: 1207461 - RNA, 19 nt, Homo sapiens
  misc_RNA (1)...(19): siRNA sense strand
aaggacacauuagaacuca

SEQ ID NO: 1207462 - RNA, 19 nt, Homo sapiens
  misc_RNA (1)...(19): siRNA sense strand
uuucagcuguaaauacugu

SEQ ID NO: 1207463 - RNA, 19 nt, Homo sapiens
  misc_RNA (1)...(19): siRNA sense strand
uugcuucaaggacacauua

SEQ ID NO: 1207464 - RNA, 19 nt, Homo sapiens
  misc_RNA (1)...(19): siRNA sense strand
gaaagccccauuagugaug

SEQ ID NO: 1207465 - RNA, 19 nt, Homo sapiens
  misc_RNA (1)...(19): siRNA sense strand
ucuuucagcuguaaauacu

SEQ ID NO: 1207466 - RNA, 19 nt, Homo sapiens
  misc_RNA (1)...(19): siRNA sense strand
aauacugugacaaggaaua

SEQ ID NO: 1207467 - RNA, 19 nt, Homo sapiens
  misc_RNA (1)...(19): siRNA sense strand
ggucaagaagcauuucaac

SEQ ID NO: 1207468 - RNA, 19 nt, Homo sapiens
  misc_RNA (1)...(19): siRNA sense strand
gacacacauacagugauua

SEQ ID NO: 1207469 - RNA, 19 nt, Homo sapiens
  misc_RNA (1)...(19): siRNA sense strand
gaauugcucugccuugugu

SEQ ID NO: 1207470 - RNA, 19 nt, Homo sapiens
  misc_RNA (1)...(19): siRNA sense strand
gcaccacacugcgagauga

SEQ ID NO: 1207471 - RNA, 19 nt, Homo sapiens
  misc_RNA (1)...(19): siRNA sense strand
gcaccuaucuggccaccau

SEQ ID NO: 1207472 - RNA, 19 nt, Homo sapiens
  misc_RNA (1)...(19): siRNA sense strand
gcuccucgcuguggcuuug

SEQ ID NO: 1207473 - RNA, 19 nt, Homo sapiens
  misc_RNA (1)...(19): siRNA sense strand
gccuacaguucaacccuuu

SEQ ID NO: 1207474 - RNA, 19 nt, Homo sapiens
  misc_RNA (1)...(19): siRNA sense strand
gagugagacugggacaaga

SEQ ID NO: 1207475 - RNA, 19 nt, Homo sapiens
  misc_RNA (1)...(19): siRNA sense strand
cccuggagcuugcugugua

SEQ ID NO: 1207476 - RNA, 19 nt, Homo sapiens
  misc_RNA (1)...(19): siRNA sense strand
aagaugcucugcuggacuu

SEQ ID NO: 1207477 - RNA, 19 nt, Homo sapiens
  misc_RNA (1)...(19): siRNA sense strand
gaugccagcagcccaagaa

SEQ ID NO: 1207478 - RNA, 19 nt, Homo sapiens
  misc_RNA (1)...(19): siRNA sense strand
cugcuggacuugagcuuug

SEQ ID NO: 1207479 - RNA, 19 nt, Homo sapiens
  misc_RNA (1)...(19): siRNA sense strand
gacuugagcuuugccuaca

SEQ ID NO: 1207480 - RNA, 19 nt, Homo sapiens
  misc_RNA (1)...(19): siRNA sense strand
ccgcggugaucgaguguug

SEQ ID NO: 1207481 - RNA, 19 nt, Homo sapiens
  misc_RNA (1)...(19): siRNA sense strand
ggaauugcucugccuugug

SEQ ID NO: 1207482 - RNA, 19 nt, Homo sapiens
  misc_RNA (1)...(19): siRNA sense strand
ccucgacccugagcucuau

SEQ ID NO: 1207483 - RNA, 19 nt, Homo sapiens
  misc_RNA (1)...(19): siRNA sense strand
cgcuaugccugucgaauuc

SEQ ID NO: 1207484 - RNA, 19 nt, Homo sapiens
  misc_RNA (1)...(19): siRNA sense strand
cagccucucugggcacuug

SEQ ID NO: 1207485 - RNA, 19 nt, Homo sapiens
  misc_RNA (1)...(19): siRNA sense strand
ccauacaccugccauaccu

SEQ ID NO: 1207486 - RNA, 19 nt, Homo sapiens
  misc_RNA (1)...(19): siRNA sense strand
cggaauugcucugccuugu

SEQ ID NO: 1207487 - RNA, 19 nt, Homo sapiens
  misc_RNA (1)...(19): siRNA sense strand
ccaccauacaccugccaua

SEQ ID NO: 1207488 - RNA, 19 nt, Homo sapiens
  misc_RNA (1)...(19): siRNA sense strand
ugaggucacccuggaggua

SEQ ID NO: 1207489 - RNA, 19 nt, Homo sapiens
  misc_RNA (1)...(19): siRNA sense strand
gcaccuggguaagggacau

SEQ ID NO: 1207490 - RNA, 19 nt, Homo sapiens
  misc_RNA (1)...(19): siRNA sense strand
ggauggggcuuggcugaug

SEQ ID NO: 1207491 - RNA, 19 nt, Homo sapiens
  misc_RNA (1)...(19): siRNA sense strand
acgcuaugccugucgaauu

SEQ ID NO: 1207492 - RNA, 19 nt, Homo sapiens
  misc_RNA (1)...(19): siRNA sense strand
gcaccacacugcgagauga

SEQ ID NO: 1207493 - RNA, 19 nt, Homo sapiens
  misc_RNA (1)...(19): siRNA sense strand
gcaccuaucuggccaccau

SEQ ID NO: 1207494 - RNA, 19 nt, Homo sapiens
  misc_RNA (1)...(19): siRNA sense strand
gcuccucgcuguggcuuug

SEQ ID NO: 1207495 - RNA, 19 nt, Homo sapiens
  misc_RNA (1)...(19): siRNA sense strand
gagugagacugggacaaga

SEQ ID NO: 1207496 - RNA, 19 nt, Homo sapiens
  misc_RNA (1)...(19): siRNA sense strand
cccuggagcuugcugugua

SEQ ID NO: 1207497 - RNA, 19 nt, Homo sapiens
  misc_RNA (1)...(19): siRNA sense strand
aagaugcucugcuggacuu

SEQ ID NO: 1207498 - RNA, 19 nt, Homo sapiens
  misc_RNA (1)...(19): siRNA sense strand
gaugccagcagcccaagaa

SEQ ID NO: 1207499 - RNA, 19 nt, Homo sapiens
  misc_RNA (1)...(19): siRNA sense strand
cugcuggacuugagcuuug

SEQ ID NO: 1207500 - RNA, 19 nt, Homo sapiens
  misc_RNA (1)...(19): siRNA sense strand
gacuugagcuuugccuaca

SEQ ID NO: 1207501 - RNA, 19 nt, Homo sapiens
  misc_RNA (1)...(19): siRNA sense strand
ccgcggugaucgaguguug

SEQ ID NO: 1207502 - RNA, 19 nt, Homo sapiens
  misc_RNA (1)...(19): siRNA sense strand
ccucgacccugagcucuau

SEQ ID NO: 1207503 - RNA, 19 nt, Homo sapiens
  misc_RNA (1)...(19): siRNA sense strand
ccauacaccugccauaccu

SEQ ID NO: 1207504 - RNA, 19 nt, Homo sapiens
  misc_RNA (1)...(19): siRNA sense strand
ccaccauacaccugccaua

SEQ ID NO: 1207505 - RNA, 19 nt, Homo sapiens
  misc_RNA (1)...(19): siRNA sense strand
gcaccuggguaagggacau

SEQ ID NO: 1207506 - RNA, 19 nt, Homo sapiens
  misc_RNA (1)...(19): siRNA sense strand
ggauggggcuuggcugaug

SEQ ID NO: 1207507 - RNA, 19 nt, Homo sapiens
  misc_RNA (1)...(19): siRNA sense strand
gaauugcucugccuugugu

SEQ ID NO: 1207508 - RNA, 19 nt, Homo sapiens
  misc_RNA (1)...(19): siRNA sense strand
gcaccacacugcgagauga

SEQ ID NO: 1207509 - RNA, 19 nt, Homo sapiens
  misc_RNA (1)...(19): siRNA sense strand
gcaccuaucuggccaccau

SEQ ID NO: 1207510 - RNA, 19 nt, Homo sapiens
  misc_RNA (1)...(19): siRNA sense strand
gcuccucgcuguggcuuug

SEQ ID NO: 1207511 - RNA, 19 nt, Homo sapiens
  misc_RNA (1)...(19): siRNA sense strand
gccuacaguucaacccuuu

SEQ ID NO: 1207512 - RNA, 19 nt, Homo sapiens
  misc_RNA (1)...(19): siRNA sense strand
gagugagacugggacaaga

SEQ ID NO: 1207513 - RNA, 19 nt, Homo sapiens
  misc_RNA (1)...(19): siRNA sense strand
cccuggagcuugcugugua

SEQ ID NO: 1207514 - RNA, 19 nt, Homo sapiens
  misc_RNA (1)...(19): siRNA sense strand
aagaugcucugcuggacuu

SEQ ID NO: 1207515 - RNA, 19 nt, Homo sapiens
  misc_RNA (1)...(19): siRNA sense strand
gaugccagcagcccaagaa

SEQ ID NO: 1207516 - RNA, 19 nt, Homo sapiens
  misc_RNA (1)...(19): siRNA sense strand
cugcuggacuugagcuuug

SEQ ID NO: 1207517 - RNA, 19 nt, Homo sapiens
  misc_RNA (1)...(19): siRNA sense strand
gacuugagcuuugccuaca

SEQ ID NO: 1207518 - RNA, 19 nt, Homo sapiens
  misc_RNA (1)...(19): siRNA sense strand
ccgcggugaucgaguguug

SEQ ID NO: 1207519 - RNA, 19 nt, Homo sapiens
  misc_RNA (1)...(19): siRNA sense strand
ggaauugcucugccuugug

SEQ ID NO: 1207520 - RNA, 19 nt, Homo sapiens
  misc_RNA (1)...(19): siRNA sense strand
ccucgacccugagcucuau

SEQ ID NO: 1207521 - RNA, 19 nt, Homo sapiens
  misc_RNA (1)...(19): siRNA sense strand
cgcuaugccugucgaauuc

SEQ ID NO: 1207522 - RNA, 19 nt, Homo sapiens
  misc_RNA (1)...(19): siRNA sense strand
cagccucucugggcacuug

SEQ ID NO: 1207523 - RNA, 19 nt, Homo sapiens
  misc_RNA (1)...(19): siRNA sense strand
ccauacaccugccauaccu

SEQ ID NO: 1207524 - RNA, 19 nt, Homo sapiens
  misc_RNA (1)...(19): siRNA sense strand
cggaauugcucugccuugu

SEQ ID NO: 1207525 - RNA, 19 nt, Homo sapiens
  misc_RNA (1)...(19): siRNA sense strand
ccaccauacaccugccaua

SEQ ID NO: 1207526 - RNA, 19 nt, Homo sapiens
  misc_RNA (1)...(19): siRNA sense strand
ugaggucacccuggaggua

SEQ ID NO: 1207527 - RNA, 19 nt, Homo sapiens
  misc_RNA (1)...(19): siRNA sense strand
gcaccuggguaagggacau

SEQ ID NO: 1207528 - RNA, 19 nt, Homo sapiens
  misc_RNA (1)...(19): siRNA sense strand
ggauggggcuuggcugaug

SEQ ID NO: 1207529 - RNA, 19 nt, Homo sapiens
  misc_RNA (1)...(19): siRNA sense strand
acgcuaugccugucgaauu

SEQ ID NO: 1207530 - RNA, 19 nt, Homo sapiens
  misc_RNA (1)...(19): siRNA sense strand
gaacggcgcucgcugcuau

SEQ ID NO: 1207531 - RNA, 19 nt, Homo sapiens
  misc_RNA (1)...(19): siRNA sense strand
gcaaggaagcuguguguaa

SEQ ID NO: 1207532 - RNA, 19 nt, Homo sapiens
  misc_RNA (1)...(19): siRNA sense strand
caaggaagcuguguguaaa

SEQ ID NO: 1207533 - RNA, 19 nt, Homo sapiens
  misc_RNA (1)...(19): siRNA sense strand
acaaagaccugaacuacug

SEQ ID NO: 1207534 - RNA, 19 nt, Homo sapiens
  misc_RNA (1)...(19): siRNA sense strand
aaacaaggguguaauuugc

SEQ ID NO: 1207535 - RNA, 19 nt, Homo sapiens
  misc_RNA (1)...(19): siRNA sense strand
guaaacaaggguguaauuu

SEQ ID NO: 1207536 - RNA, 19 nt, Homo sapiens
  misc_RNA (1)...(19): siRNA sense strand
gcgugugccuuaaggagua

SEQ ID NO: 1207537 - RNA, 19 nt, Homo sapiens
  misc_RNA (1)...(19): siRNA sense strand
uaaacaaggguguaauuug

SEQ ID NO: 1207538 - RNA, 19 nt, Homo sapiens
  misc_RNA (1)...(19): siRNA sense strand
gaagcuguguguaaacaag

SEQ ID NO: 1207539 - RNA, 19 nt, Homo sapiens
  misc_RNA (1)...(19): siRNA sense strand
gaaguuccucucacacaaa

SEQ ID NO: 1207540 - RNA, 19 nt, Homo sapiens
  misc_RNA (1)...(19): siRNA sense strand
ucacacaaauucaccaaag

SEQ ID NO: 1207541 - RNA, 19 nt, Homo sapiens
  misc_RNA (1)...(19): siRNA sense strand
cuacaaugguggcaucugu

SEQ ID NO: 1207542 - RNA, 19 nt, Homo sapiens
  misc_RNA (1)...(19): siRNA sense strand
cgccugcccugaugacuuu

SEQ ID NO: 1207543 - RNA, 19 nt, Homo sapiens
  misc_RNA (1)...(19): siRNA sense strand
ccggccaccuggacaauaa

SEQ ID NO: 1207544 - RNA, 19 nt, Homo sapiens
  misc_RNA (1)...(19): siRNA sense strand
ggucguacuugcacucaca

SEQ ID NO: 1207545 - RNA, 19 nt, Homo sapiens
  misc_RNA (1)...(19): siRNA sense strand
cuacugccaugagaacauu

SEQ ID NO: 1207546 - RNA, 19 nt, Homo sapiens
  misc_RNA (1)...(19): siRNA sense strand
cacacaaauucaccaaaga

SEQ ID NO: 1207547 - RNA, 19 nt, Homo sapiens
  misc_RNA (1)...(19): siRNA sense strand
guacuugcacucacaauac

SEQ ID NO: 1207548 - RNA, 19 nt, Homo sapiens
  misc_RNA (1)...(19): siRNA sense strand
agaaguuccucucacacaa

SEQ ID NO: 1207549 - RNA, 19 nt, Homo sapiens
  misc_RNA (1)...(19): siRNA sense strand
gggcaaggagugcaaggaa

SEQ ID NO: 1207550 - RNA, 19 nt, Homo sapiens
  misc_RNA (1)...(19): siRNA sense strand
gcacucacaauaccaacga

SEQ ID NO: 1207551 - RNA, 19 nt, Homo sapiens
  misc_RNA (1)...(19): siRNA sense strand
ugacaaagaccugaacuac

SEQ ID NO: 1207552 - RNA, 19 nt, Homo sapiens
  misc_RNA (1)...(19): siRNA sense strand
gggaggagagcgccaacaa

SEQ ID NO: 1207553 - RNA, 19 nt, Homo sapiens
  misc_RNA (1)...(19): siRNA sense strand
gcaacaaggccugcaugga

SEQ ID NO: 1207554 - RNA, 19 nt, Homo sapiens
  misc_RNA (1)...(19): siRNA sense strand
acaaggacgugcucuacca

SEQ ID NO: 1207555 - RNA, 19 nt, Homo sapiens
  misc_RNA (1)...(19): siRNA sense strand
cgccucaccuugcauuuca

SEQ ID NO: 1207556 - RNA, 19 nt, Homo sapiens
  misc_RNA (1)...(19): siRNA sense strand
uguaaacaaggguguaauu

SEQ ID NO: 1207557 - RNA, 19 nt, Homo sapiens
  misc_RNA (1)...(19): siRNA sense strand
gcaccuacugccaugagaa

SEQ ID NO: 1207558 - RNA, 19 nt, Homo sapiens
  misc_RNA (1)...(19): siRNA sense strand
ggaccagguggacggcuuu

SEQ ID NO: 1207559 - RNA, 19 nt, Homo sapiens
  misc_RNA (1)...(19): siRNA sense strand
uaaccuggagggugacuau

SEQ ID NO: 1207560 - RNA, 19 nt, Homo sapiens
  misc_RNA (1)...(19): siRNA sense strand
gcaaaggugccuggagaag

SEQ ID NO: 1207561 - RNA, 19 nt, Homo sapiens
  misc_RNA (1)...(19): siRNA sense strand
gcuggugccugugcugugu

SEQ ID NO: 1207562 - RNA, 19 nt, Homo sapiens
  misc_RNA (1)...(19): siRNA sense strand
ugacuuugguggcaagaac

SEQ ID NO: 1207563 - RNA, 19 nt, Homo sapiens
  misc_RNA (1)...(19): siRNA sense strand
gagguucugcgaugagugu

SEQ ID NO: 1207564 - RNA, 19 nt, Homo sapiens
  misc_RNA (1)...(19): siRNA sense strand
acacaaauucaccaaagau

SEQ ID NO: 1207565 - RNA, 19 nt, Homo sapiens
  misc_RNA (1)...(19): siRNA sense strand
augaggagcugcugaucga

SEQ ID NO: 1207566 - RNA, 19 nt, Homo sapiens
  misc_RNA (1)...(19): siRNA sense strand
cguacuugcacucacaaua

SEQ ID NO: 1207567 - RNA, 19 nt, Homo sapiens
  misc_RNA (1)...(19): siRNA sense strand
acgccgagccugaccagua

SEQ ID NO: 1207568 - RNA, 19 nt, Homo sapiens
  misc_RNA (1)...(19): siRNA sense strand
gacaaagaccugaacuacu

SEQ ID NO: 1207569 - RNA, 19 nt, Homo sapiens
  misc_RNA (1)...(19): siRNA sense strand
gugacaaagaccugaacua

SEQ ID NO: 1207570 - RNA, 19 nt, Homo sapiens
  misc_RNA (1)...(19): siRNA sense strand
cgaaugaggagcugcugau

SEQ ID NO: 1207571 - RNA, 19 nt, Homo sapiens
  misc_RNA (1)...(19): siRNA sense strand
uacgugcgcgugugccuua

SEQ ID NO: 1207572 - RNA, 19 nt, Homo sapiens
  misc_RNA (1)...(19): siRNA sense strand
ccucugccuugcuacaaug

SEQ ID NO: 1207573 - RNA, 19 nt, Homo sapiens
  misc_RNA (1)...(19): siRNA sense strand
ggugaacggguaccagugu

SEQ ID NO: 1207574 - RNA, 19 nt, Homo sapiens
  misc_RNA (1)...(19): siRNA sense strand
gggcaggaacugugagaag

SEQ ID NO: 1207575 - RNA, 19 nt, Homo sapiens
  misc_RNA (1)...(19): siRNA sense strand
gugcaaggaagcugugugu

SEQ ID NO: 1207576 - RNA, 19 nt, Homo sapiens
  misc_RNA (1)...(19): siRNA sense strand
ccuggagggugacuauuac

SEQ ID NO: 1207577 - RNA, 19 nt, Homo sapiens
  misc_RNA (1)...(19): siRNA sense strand
ggaagcuguguguaaacaa

SEQ ID NO: 1207578 - RNA, 19 nt, Homo sapiens
  misc_RNA (1)...(19): siRNA sense strand
ggccugcucugugacaaag

SEQ ID NO: 1207579 - RNA, 19 nt, Homo sapiens
  misc_RNA (1)...(19): siRNA sense strand
gcuggaagagccugcacuu

SEQ ID NO: 1207580 - RNA, 19 nt, Homo sapiens
  misc_RNA (1)...(19): siRNA sense strand
guuccucucacacaaauuc

SEQ ID NO: 1207581 - RNA, 19 nt, Homo sapiens
  misc_RNA (1)...(19): siRNA sense strand
ccacaaggacgugcucuac

SEQ ID NO: 1207582 - RNA, 19 nt, Homo sapiens
  misc_RNA (1)...(19): siRNA sense strand
aaugguggcaucuguguug

SEQ ID NO: 1207583 - RNA, 19 nt, Homo sapiens
  misc_RNA (1)...(19): siRNA sense strand
gcugcgacgagaacuacua

SEQ ID NO: 1207584 - RNA, 19 nt, Homo sapiens
  misc_RNA (1)...(19): siRNA sense strand
gcaacugugagaccaacug

SEQ ID NO: 1207585 - RNA, 19 nt, Homo sapiens
  misc_RNA (1)...(19): siRNA sense strand
ccaccuggacaauaacugu

SEQ ID NO: 1207586 - RNA, 19 nt, Homo sapiens
  misc_RNA (1)...(19): siRNA sense strand
gggagguucugcgaugagu

SEQ ID NO: 1207587 - RNA, 19 nt, Homo sapiens
  misc_RNA (1)...(19): siRNA sense strand
ccugugcccuugacaucga

SEQ ID NO: 1207588 - RNA, 19 nt, Homo sapiens
  misc_RNA (1)...(19): siRNA sense strand
gcugggagggucguacuug

SEQ ID NO: 1207589 - RNA, 19 nt, Homo sapiens
  misc_RNA (1)...(19): siRNA sense strand
aggaagcuguguguaaaca

SEQ ID NO: 1207590 - RNA, 19 nt, Homo sapiens
  misc_RNA (1)...(19): siRNA sense strand
gcggucaggagcaucaaug

SEQ ID NO: 1207591 - RNA, 19 nt, Homo sapiens
  misc_RNA (1)...(19): siRNA sense strand
ucacugcuccuggcuguca

SEQ ID NO: 1207592 - RNA, 19 nt, Homo sapiens
  misc_RNA (1)...(19): siRNA sense strand
gagguggccguguccuuca

SEQ ID NO: 1207593 - RNA, 19 nt, Homo sapiens
  misc_RNA (1)...(19): siRNA sense strand
gaagcuccuggguggaaga

SEQ ID NO: 1207594 - RNA, 19 nt, Homo sapiens
  misc_RNA (1)...(19): siRNA sense strand
gaacggcgcucgcugcuau

SEQ ID NO: 1207595 - RNA, 19 nt, Homo sapiens
  misc_RNA (1)...(19): siRNA sense strand
gcaaggaagcuguguguaa

SEQ ID NO: 1207596 - RNA, 19 nt, Homo sapiens
  misc_RNA (1)...(19): siRNA sense strand
caaggaagcuguguguaaa

SEQ ID NO: 1207597 - RNA, 19 nt, Homo sapiens
  misc_RNA (1)...(19): siRNA sense strand
acaaagaccugaacuacug

SEQ ID NO: 1207598 - RNA, 19 nt, Homo sapiens
  misc_RNA (1)...(19): siRNA sense strand
aaacaaggguguaauuugc

SEQ ID NO: 1207599 - RNA, 19 nt, Homo sapiens
  misc_RNA (1)...(19): siRNA sense strand
guaaacaaggguguaauuu

SEQ ID NO: 1207600 - RNA, 19 nt, Homo sapiens
  misc_RNA (1)...(19): siRNA sense strand
gcgugugccuuaaggagua

SEQ ID NO: 1207601 - RNA, 19 nt, Homo sapiens
  misc_RNA (1)...(19): siRNA sense strand
uaaacaaggguguaauuug

SEQ ID NO: 1207602 - RNA, 19 nt, Homo sapiens
  misc_RNA (1)...(19): siRNA sense strand
gaagcuguguguaaacaag

SEQ ID NO: 1207603 - RNA, 19 nt, Homo sapiens
  misc_RNA (1)...(19): siRNA sense strand
gaaguuccucucacacaaa

SEQ ID NO: 1207604 - RNA, 19 nt, Homo sapiens
  misc_RNA (1)...(19): siRNA sense strand
ucacacaaauucaccaaag

SEQ ID NO: 1207605 - RNA, 19 nt, Homo sapiens
  misc_RNA (1)...(19): siRNA sense strand
cuacaaugguggcaucugu

SEQ ID NO: 1207606 - RNA, 19 nt, Homo sapiens
  misc_RNA (1)...(19): siRNA sense strand
cgccugcccugaugacuuu

SEQ ID NO: 1207607 - RNA, 19 nt, Homo sapiens
  misc_RNA (1)...(19): siRNA sense strand
ccggccaccuggacaauaa

SEQ ID NO: 1207608 - RNA, 19 nt, Homo sapiens
  misc_RNA (1)...(19): siRNA sense strand
ggucguacuugcacucaca

SEQ ID NO: 1207609 - RNA, 19 nt, Homo sapiens
  misc_RNA (1)...(19): siRNA sense strand
cuacugccaugagaacauu

SEQ ID NO: 1207610 - RNA, 19 nt, Homo sapiens
  misc_RNA (1)...(19): siRNA sense strand
cacacaaauucaccaaaga

SEQ ID NO: 1207611 - RNA, 19 nt, Homo sapiens
  misc_RNA (1)...(19): siRNA sense strand
guacuugcacucacaauac

SEQ ID NO: 1207612 - RNA, 19 nt, Homo sapiens
  misc_RNA (1)...(19): siRNA sense strand
agaaguuccucucacacaa

SEQ ID NO: 1207613 - RNA, 19 nt, Homo sapiens
  misc_RNA (1)...(19): siRNA sense strand
gggcaaggagugcaaggaa

SEQ ID NO: 1207614 - RNA, 19 nt, Homo sapiens
  misc_RNA (1)...(19): siRNA sense strand
gcacucacaauaccaacga

SEQ ID NO: 1207615 - RNA, 19 nt, Homo sapiens
  misc_RNA (1)...(19): siRNA sense strand
ugacaaagaccugaacuac

SEQ ID NO: 1207616 - RNA, 19 nt, Homo sapiens
  misc_RNA (1)...(19): siRNA sense strand
gggaggagagcgccaacaa

SEQ ID NO: 1207617 - RNA, 19 nt, Homo sapiens
  misc_RNA (1)...(19): siRNA sense strand
gcaacaaggccugcaugga

SEQ ID NO: 1207618 - RNA, 19 nt, Homo sapiens
  misc_RNA (1)...(19): siRNA sense strand
acaaggacgugcucuacca

SEQ ID NO: 1207619 - RNA, 19 nt, Homo sapiens
  misc_RNA (1)...(19): siRNA sense strand
cgccucaccuugcauuuca

SEQ ID NO: 1207620 - RNA, 19 nt, Homo sapiens
  misc_RNA (1)...(19): siRNA sense strand
uguaaacaaggguguaauu

SEQ ID NO: 1207621 - RNA, 19 nt, Homo sapiens
  misc_RNA (1)...(19): siRNA sense strand
gcaccuacugccaugagaa

SEQ ID NO: 1207622 - RNA, 19 nt, Homo sapiens
  misc_RNA (1)...(19): siRNA sense strand
ggaccagguggacggcuuu

SEQ ID NO: 1207623 - RNA, 19 nt, Homo sapiens
  misc_RNA (1)...(19): siRNA sense strand
uaaccuggagggugacuau

SEQ ID NO: 1207624 - RNA, 19 nt, Homo sapiens
  misc_RNA (1)...(19): siRNA sense strand
gcaaaggugccuggagaag

SEQ ID NO: 1207625 - RNA, 19 nt, Homo sapiens
  misc_RNA (1)...(19): siRNA sense strand
gcuggugccugugcugugu

SEQ ID NO: 1207626 - RNA, 19 nt, Homo sapiens
  misc_RNA (1)...(19): siRNA sense strand
ugacuuugguggcaagaac

SEQ ID NO: 1207627 - RNA, 19 nt, Homo sapiens
  misc_RNA (1)...(19): siRNA sense strand
gagguucugcgaugagugu

SEQ ID NO: 1207628 - RNA, 19 nt, Homo sapiens
  misc_RNA (1)...(19): siRNA sense strand
acacaaauucaccaaagau

SEQ ID NO: 1207629 - RNA, 19 nt, Homo sapiens
  misc_RNA (1)...(19): siRNA sense strand
augaggagcugcugaucga

SEQ ID NO: 1207630 - RNA, 19 nt, Homo sapiens
  misc_RNA (1)...(19): siRNA sense strand
cguacuugcacucacaaua

SEQ ID NO: 1207631 - RNA, 19 nt, Homo sapiens
  misc_RNA (1)...(19): siRNA sense strand
acgccgagccugaccagua

SEQ ID NO: 1207632 - RNA, 19 nt, Homo sapiens
  misc_RNA (1)...(19): siRNA sense strand
gacaaagaccugaacuacu

SEQ ID NO: 1207633 - RNA, 19 nt, Homo sapiens
  misc_RNA (1)...(19): siRNA sense strand
gugacaaagaccugaacua

SEQ ID NO: 1207634 - RNA, 19 nt, Homo sapiens
  misc_RNA (1)...(19): siRNA sense strand
cgaaugaggagcugcugau

SEQ ID NO: 1207635 - RNA, 19 nt, Homo sapiens
  misc_RNA (1)...(19): siRNA sense strand
uacgugcgcgugugccuua

SEQ ID NO: 1207636 - RNA, 19 nt, Homo sapiens
  misc_RNA (1)...(19): siRNA sense strand
ccucugccuugcuacaaug

SEQ ID NO: 1207637 - RNA, 19 nt, Homo sapiens
  misc_RNA (1)...(19): siRNA sense strand
ggugaacggguaccagugu

SEQ ID NO: 1207638 - RNA, 19 nt, Homo sapiens
  misc_RNA (1)...(19): siRNA sense strand
gggcaggaacugugagaag

SEQ ID NO: 1207639 - RNA, 19 nt, Homo sapiens
  misc_RNA (1)...(19): siRNA sense strand
gugcaaggaagcugugugu

SEQ ID NO: 1207640 - RNA, 19 nt, Homo sapiens
  misc_RNA (1)...(19): siRNA sense strand
ccuggagggugacuauuac

SEQ ID NO: 1207641 - RNA, 19 nt, Homo sapiens
  misc_RNA (1)...(19): siRNA sense strand
ggaagcuguguguaaacaa

SEQ ID NO: 1207642 - RNA, 19 nt, Homo sapiens
  misc_RNA (1)...(19): siRNA sense strand
ggccugcucugugacaaag

SEQ ID NO: 1207643 - RNA, 19 nt, Homo sapiens
  misc_RNA (1)...(19): siRNA sense strand
gcuggaagagccugcacuu

SEQ ID NO: 1207644 - RNA, 19 nt, Homo sapiens
  misc_RNA (1)...(19): siRNA sense strand
guuccucucacacaaauuc

SEQ ID NO: 1207645 - RNA, 19 nt, Homo sapiens
  misc_RNA (1)...(19): siRNA sense strand
ccacaaggacgugcucuac

SEQ ID NO: 1207646 - RNA, 19 nt, Homo sapiens
  misc_RNA (1)...(19): siRNA sense strand
aaugguggcaucuguguug

SEQ ID NO: 1207647 - RNA, 19 nt, Homo sapiens
  misc_RNA (1)...(19): siRNA sense strand
gcugcgacgagaacuacua

SEQ ID NO: 1207648 - RNA, 19 nt, Homo sapiens
  misc_RNA (1)...(19): siRNA sense strand
gcaacugugagaccaacug

SEQ ID NO: 1207649 - RNA, 19 nt, Homo sapiens
  misc_RNA (1)...(19): siRNA sense strand
ccaccuggacaauaacugu

SEQ ID NO: 1207650 - RNA, 19 nt, Homo sapiens
  misc_RNA (1)...(19): siRNA sense strand
gggagguucugcgaugagu

SEQ ID NO: 1207651 - RNA, 19 nt, Homo sapiens
  misc_RNA (1)...(19): siRNA sense strand
ccugugcccuugacaucga

SEQ ID NO: 1207652 - RNA, 19 nt, Homo sapiens
  misc_RNA (1)...(19): siRNA sense strand
gcugggagggucguacuug

SEQ ID NO: 1207653 - RNA, 19 nt, Homo sapiens
  misc_RNA (1)...(19): siRNA sense strand
aggaagcuguguguaaaca

SEQ ID NO: 1207654 - RNA, 19 nt, Homo sapiens
  misc_RNA (1)...(19): siRNA sense strand
gcggucaggagcaucaaug

SEQ ID NO: 1207655 - RNA, 19 nt, Homo sapiens
  misc_RNA (1)...(19): siRNA sense strand
ucacugcuccuggcuguca

SEQ ID NO: 1207656 - RNA, 19 nt, Homo sapiens
  misc_RNA (1)...(19): siRNA sense strand
gagguggccguguccuuca

SEQ ID NO: 1207657 - RNA, 19 nt, Homo sapiens
  misc_RNA (1)...(19): siRNA sense strand
gaagcuccuggguggaaga

SEQ ID NO: 1207658 - RNA, 19 nt, Homo sapiens
  misc_RNA (1)...(19): siRNA sense strand
gcacucagcuggugaauuc

SEQ ID NO: 1207659 - RNA, 19 nt, Homo sapiens
  misc_RNA (1)...(19): siRNA sense strand
gaacauguccuuggaagaa

SEQ ID NO: 1207660 - RNA, 19 nt, Homo sapiens
  misc_RNA (1)...(19): siRNA sense strand
uaagugcgauucaucauau

SEQ ID NO: 1207661 - RNA, 19 nt, Homo sapiens
  misc_RNA (1)...(19): siRNA sense strand
guuaaaggccuuacuuauu

SEQ ID NO: 1207662 - RNA, 19 nt, Homo sapiens
  misc_RNA (1)...(19): siRNA sense strand
gcaguucaaugauggaaau

SEQ ID NO: 1207663 - RNA, 19 nt, Homo sapiens
  misc_RNA (1)...(19): siRNA sense strand
gccagcaccugaagaauug

SEQ ID NO: 1207664 - RNA, 19 nt, Homo sapiens
  misc_RNA (1)...(19): siRNA sense strand
agaagcaaauuaugucuga

SEQ ID NO: 1207665 - RNA, 19 nt, Homo sapiens
  misc_RNA (1)...(19): siRNA sense strand
uaaaggccuuacuuauuug

SEQ ID NO: 1207666 - RNA, 19 nt, Homo sapiens
  misc_RNA (1)...(19): siRNA sense strand
ggucauacuacuagauauu

SEQ ID NO: 1207667 - RNA, 19 nt, Homo sapiens
  misc_RNA (1)...(19): siRNA sense strand
gugaagcccuccaauaugc

SEQ ID NO: 1207668 - RNA, 19 nt, Homo sapiens
  misc_RNA (1)...(19): siRNA sense strand
gacgugaagcccuccaaua

SEQ ID NO: 1207669 - RNA, 19 nt, Homo sapiens
  misc_RNA (1)...(19): siRNA sense strand
uggaacaaaugcuuauaug

SEQ ID NO: 1207670 - RNA, 19 nt, Homo sapiens
  misc_RNA (1)...(19): siRNA sense strand
ggagccauuuguacauuuc

SEQ ID NO: 1207671 - RNA, 19 nt, Homo sapiens
  misc_RNA (1)...(19): siRNA sense strand
ggccagcaccugaagaauu

SEQ ID NO: 1207672 - RNA, 19 nt, Homo sapiens
  misc_RNA (1)...(19): siRNA sense strand
gccagaacauguccuugga

SEQ ID NO: 1207673 - RNA, 19 nt, Homo sapiens
  misc_RNA (1)...(19): siRNA sense strand
gauauuacacuggaacuuc

SEQ ID NO: 1207674 - RNA, 19 nt, Homo sapiens
  misc_RNA (1)...(19): siRNA sense strand
gaaaacagccaaaagaaag

SEQ ID NO: 1207675 - RNA, 19 nt, Homo sapiens
  misc_RNA (1)...(19): siRNA sense strand
ccuccaauaugcuaguaaa

SEQ ID NO: 1207676 - RNA, 19 nt, Homo sapiens
  misc_RNA (1)...(19): siRNA sense strand
gaauugcaguagcaguugu

SEQ ID NO: 1207677 - RNA, 19 nt, Homo sapiens
  misc_RNA (1)...(19): siRNA sense strand
gaucuuuggauguauauag

SEQ ID NO: 1207678 - RNA, 19 nt, Homo sapiens
  misc_RNA (1)...(19): siRNA sense strand
agguuaagcugugugauuu

SEQ ID NO: 1207679 - RNA, 19 nt, Homo sapiens
  misc_RNA (1)...(19): siRNA sense strand
gaagcaaauuaugucugaa

SEQ ID NO: 1207680 - RNA, 19 nt, Homo sapiens
  misc_RNA (1)...(19): siRNA sense strand
ggauuucaauauguacaga

SEQ ID NO: 1207681 - RNA, 19 nt, Homo sapiens
  misc_RNA (1)...(19): siRNA sense strand
cagguuaagcugugugauu

SEQ ID NO: 1207682 - RNA, 19 nt, Homo sapiens
  misc_RNA (1)...(19): siRNA sense strand
ggagcaguauggaauucau

SEQ ID NO: 1207683 - RNA, 19 nt, Homo sapiens
  misc_RNA (1)...(19): siRNA sense strand
ggaacaaaugcuuauaugg

SEQ ID NO: 1207684 - RNA, 19 nt, Homo sapiens
  misc_RNA (1)...(19): siRNA sense strand
gaagcccuccaauaugcua

SEQ ID NO: 1207685 - RNA, 19 nt, Homo sapiens
  misc_RNA (1)...(19): siRNA sense strand
gcagugcauuguugaugag

SEQ ID NO: 1207686 - RNA, 19 nt, Homo sapiens
  misc_RNA (1)...(19): siRNA sense strand
ccaauaugcuaguaaacac

SEQ ID NO: 1207687 - RNA, 19 nt, Homo sapiens
  misc_RNA (1)...(19): siRNA sense strand
gaaaggccagcaccugaag

SEQ ID NO: 1207688 - RNA, 19 nt, Homo sapiens
  misc_RNA (1)...(19): siRNA sense strand
uggaagaauugcaguagca

SEQ ID NO: 1207689 - RNA, 19 nt, Homo sapiens
  misc_RNA (1)...(19): siRNA sense strand
guacauuucaucacucagu

SEQ ID NO: 1207690 - RNA, 19 nt, Homo sapiens
  misc_RNA (1)...(19): siRNA sense strand
cggagccauuuguacauuu

SEQ ID NO: 1207691 - RNA, 19 nt, Homo sapiens
  misc_RNA (1)...(19): siRNA sense strand
uuuaaugccucuccagcuu

SEQ ID NO: 1207692 - RNA, 19 nt, Homo sapiens
  misc_RNA (1)...(19): siRNA sense strand
ugcaguagcaguuguuaaa

SEQ ID NO: 1207693 - RNA, 19 nt, Homo sapiens
  misc_RNA (1)...(19): siRNA sense strand
aaacacaagaggacagguu

SEQ ID NO: 1207694 - RNA, 19 nt, Homo sapiens
  misc_RNA (1)...(19): siRNA sense strand
aaaccagggaucuuuaaug

SEQ ID NO: 1207695 - RNA, 19 nt, Homo sapiens
  misc_RNA (1)...(19): siRNA sense strand
gcuuauauggcgccugaaa

SEQ ID NO: 1207696 - RNA, 19 nt, Homo sapiens
  misc_RNA (1)...(19): siRNA sense strand
aaccagggaucuuuaaugc

SEQ ID NO: 1207697 - RNA, 19 nt, Homo sapiens
  misc_RNA (1)...(19): siRNA sense strand
gagcaguauggaauucauu

SEQ ID NO: 1207698 - RNA, 19 nt, Homo sapiens
  misc_RNA (1)...(19): siRNA sense strand
uauggcgccugaaaggauu

SEQ ID NO: 1207699 - RNA, 19 nt, Homo sapiens
  misc_RNA (1)...(19): siRNA sense strand
ucugaugucuggagcuuag

SEQ ID NO: 1207700 - RNA, 19 nt, Homo sapiens
  misc_RNA (1)...(19): siRNA sense strand
gugcauuguugaugaggau

SEQ ID NO: 1207701 - RNA, 19 nt, Homo sapiens
  misc_RNA (1)...(19): siRNA sense strand
auaagugcgauucaucaua

SEQ ID NO: 1207702 - RNA, 19 nt, Homo sapiens
  misc_RNA (1)...(19): siRNA sense strand
gaaaaugccagaacauguc

SEQ ID NO: 1207703 - RNA, 19 nt, Homo sapiens
  misc_RNA (1)...(19): siRNA sense strand
caguagcaguuguuaaagg

SEQ ID NO: 1207704 - RNA, 19 nt, Homo sapiens
  misc_RNA (1)...(19): siRNA sense strand
ggaaaaugccagaacaugu

SEQ ID NO: 1207705 - RNA, 19 nt, Homo sapiens
  misc_RNA (1)...(19): siRNA sense strand
cgaaaacagccaaaagaaa

SEQ ID NO: 1207706 - RNA, 19 nt, Homo sapiens
  misc_RNA (1)...(19): siRNA sense strand
ugaauucuauagccaagac

SEQ ID NO: 1207707 - RNA, 19 nt, Homo sapiens
  misc_RNA (1)...(19): siRNA sense strand
caagaggacagguuaagcu

SEQ ID NO: 1207708 - RNA, 19 nt, Homo sapiens
  misc_RNA (1)...(19): siRNA sense strand
acauguccuuggaagaauu

SEQ ID NO: 1207709 - RNA, 19 nt, Homo sapiens
  misc_RNA (1)...(19): siRNA sense strand
aagaauugcaguagcaguu

SEQ ID NO: 1207710 - RNA, 19 nt, Homo sapiens
  misc_RNA (1)...(19): siRNA sense strand
ggggaucuuuggauguaua

SEQ ID NO: 1207711 - RNA, 19 nt, Homo sapiens
  misc_RNA (1)...(19): siRNA sense strand
uuaggaaucucuuuuaugg

SEQ ID NO: 1207712 - RNA, 19 nt, Homo sapiens
  misc_RNA (1)...(19): siRNA sense strand
acgugaagcccuccaauau

SEQ ID NO: 1207713 - RNA, 19 nt, Homo sapiens
  misc_RNA (1)...(19): siRNA sense strand
uguuaaaggccuuacuuau

SEQ ID NO: 1207714 - RNA, 19 nt, Homo sapiens
  misc_RNA (1)...(19): siRNA sense strand
auauuacacuggaacuuca

SEQ ID NO: 1207715 - RNA, 19 nt, Homo sapiens
  misc_RNA (1)...(19): siRNA sense strand
ucggagccauuuguacauu

SEQ ID NO: 1207716 - RNA, 19 nt, Homo sapiens
  misc_RNA (1)...(19): siRNA sense strand
aacacaagaggacagguua

SEQ ID NO: 1207717 - RNA, 19 nt, Homo sapiens
  misc_RNA (1)...(19): siRNA sense strand
gcccuccaauaugcuagua

SEQ ID NO: 1207718 - RNA, 19 nt, Homo sapiens
  misc_RNA (1)...(19): siRNA sense strand
cgugaagcccuccaauaug

SEQ ID NO: 1207719 - RNA, 19 nt, Homo sapiens
  misc_RNA (1)...(19): siRNA sense strand
agaaaggccagcaccugaa

SEQ ID NO: 1207720 - RNA, 19 nt, Homo sapiens
  misc_RNA (1)...(19): siRNA sense strand
ggauguauauaggaaaaug

SEQ ID NO: 1207721 - RNA, 19 nt, Homo sapiens
  misc_RNA (1)...(19): siRNA sense strand
gcgaaaacagccaaaagaa

SEQ ID NO: 1207722 - RNA, 19 nt, Homo sapiens
  misc_RNA (1)...(19): siRNA sense strand
guucucggagccauuugua

SEQ ID NO: 1207723 - RNA, 19 nt, Homo sapiens
  misc_RNA (1)...(19): siRNA sense strand
gcuuaggaaucucuuuuau

SEQ ID NO: 1207724 - RNA, 19 nt, Homo sapiens
  misc_RNA (1)...(19): siRNA sense strand
gagcuuaggaaucucuuuu

SEQ ID NO: 1207725 - RNA, 19 nt, Homo sapiens
  misc_RNA (1)...(19): siRNA sense strand
gucuggagcuuaggaaucu

SEQ ID NO: 1207726 - RNA, 19 nt, Homo sapiens
  misc_RNA (1)...(19): siRNA sense strand
acacaagaggacagguuaa

SEQ ID NO: 1207727 - RNA, 19 nt, Homo sapiens
  misc_RNA (1)...(19): siRNA sense strand
gcaguuguuaaaggccuua

SEQ ID NO: 1207728 - RNA, 19 nt, Homo sapiens
  misc_RNA (1)...(19): siRNA sense strand
ugcgauucaucauauauca

SEQ ID NO: 1207729 - RNA, 19 nt, Homo sapiens
  misc_RNA (1)...(19): siRNA sense strand
guuguuaaaggccuuacuu

SEQ ID NO: 1207730 - RNA, 19 nt, Homo sapiens
  misc_RNA (1)...(19): siRNA sense strand
aagugcgauucaucauaua

SEQ ID NO: 1207731 - RNA, 19 nt, Homo sapiens
  misc_RNA (1)...(19): siRNA sense strand
ccagaacauguccuuggaa

SEQ ID NO: 1207732 - RNA, 19 nt, Homo sapiens
  misc_RNA (1)...(19): siRNA sense strand
uaaugccucuccagcuucu

SEQ ID NO: 1207733 - RNA, 19 nt, Homo sapiens
  misc_RNA (1)...(19): siRNA sense strand
gcaguagcaguuguuaaag

SEQ ID NO: 1207734 - RNA, 19 nt, Homo sapiens
  misc_RNA (1)...(19): siRNA sense strand
ggagcuuaggaaucucuuu

SEQ ID NO: 1207735 - RNA, 19 nt, Homo sapiens
  misc_RNA (1)...(19): siRNA sense strand
gcacucagcuggugaauuc

SEQ ID NO: 1207736 - RNA, 19 nt, Homo sapiens
  misc_RNA (1)...(19): siRNA sense strand
gaacauguccuuggaagaa

SEQ ID NO: 1207737 - RNA, 19 nt, Homo sapiens
  misc_RNA (1)...(19): siRNA sense strand
uaagugcgauucaucauau

SEQ ID NO: 1207738 - RNA, 19 nt, Homo sapiens
  misc_RNA (1)...(19): siRNA sense strand
guuaaaggccuuacuuauu

SEQ ID NO: 1207739 - RNA, 19 nt, Homo sapiens
  misc_RNA (1)...(19): siRNA sense strand
gcaguucaaugauggaaau

SEQ ID NO: 1207740 - RNA, 19 nt, Homo sapiens
  misc_RNA (1)...(19): siRNA sense strand
gccagcaccugaagaauug

SEQ ID NO: 1207741 - RNA, 19 nt, Homo sapiens
  misc_RNA (1)...(19): siRNA sense strand
agaagcaaauuaugucuga

SEQ ID NO: 1207742 - RNA, 19 nt, Homo sapiens
  misc_RNA (1)...(19): siRNA sense strand
uaaaggccuuacuuauuug

SEQ ID NO: 1207743 - RNA, 19 nt, Homo sapiens
  misc_RNA (1)...(19): siRNA sense strand
ggucauacuacuagauauu

SEQ ID NO: 1207744 - RNA, 19 nt, Homo sapiens
  misc_RNA (1)...(19): siRNA sense strand
gugaagcccuccaauaugc

SEQ ID NO: 1207745 - RNA, 19 nt, Homo sapiens
  misc_RNA (1)...(19): siRNA sense strand
gacgugaagcccuccaaua

SEQ ID NO: 1207746 - RNA, 19 nt, Homo sapiens
  misc_RNA (1)...(19): siRNA sense strand
uggaacaaaugcuuauaug

SEQ ID NO: 1207747 - RNA, 19 nt, Homo sapiens
  misc_RNA (1)...(19): siRNA sense strand
ggagccauuuguacauuuc

SEQ ID NO: 1207748 - RNA, 19 nt, Homo sapiens
  misc_RNA (1)...(19): siRNA sense strand
ggccagcaccugaagaauu

SEQ ID NO: 1207749 - RNA, 19 nt, Homo sapiens
  misc_RNA (1)...(19): siRNA sense strand
gccagaacauguccuugga

SEQ ID NO: 1207750 - RNA, 19 nt, Homo sapiens
  misc_RNA (1)...(19): siRNA sense strand
gauauuacacuggaacuuc

SEQ ID NO: 1207751 - RNA, 19 nt, Homo sapiens
  misc_RNA (1)...(19): siRNA sense strand
gaaaacagccaaaagaaag

SEQ ID NO: 1207752 - RNA, 19 nt, Homo sapiens
  misc_RNA (1)...(19): siRNA sense strand
ccuccaauaugcuaguaaa

SEQ ID NO: 1207753 - RNA, 19 nt, Homo sapiens
  misc_RNA (1)...(19): siRNA sense strand
gaauugcaguagcaguugu

SEQ ID NO: 1207754 - RNA, 19 nt, Homo sapiens
  misc_RNA (1)...(19): siRNA sense strand
gaucuuuggauguauauag

SEQ ID NO: 1207755 - RNA, 19 nt, Homo sapiens
  misc_RNA (1)...(19): siRNA sense strand
agguuaagcugugugauuu

SEQ ID NO: 1207756 - RNA, 19 nt, Homo sapiens
  misc_RNA (1)...(19): siRNA sense strand
gaagcaaauuaugucugaa

SEQ ID NO: 1207757 - RNA, 19 nt, Homo sapiens
  misc_RNA (1)...(19): siRNA sense strand
ggauuucaauauguacaga

SEQ ID NO: 1207758 - RNA, 19 nt, Homo sapiens
  misc_RNA (1)...(19): siRNA sense strand
cagguuaagcugugugauu

SEQ ID NO: 1207759 - RNA, 19 nt, Homo sapiens
  misc_RNA (1)...(19): siRNA sense strand
ggagcaguauggaauucau

SEQ ID NO: 1207760 - RNA, 19 nt, Homo sapiens
  misc_RNA (1)...(19): siRNA sense strand
ggaacaaaugcuuauaugg

SEQ ID NO: 1207761 - RNA, 19 nt, Homo sapiens
  misc_RNA (1)...(19): siRNA sense strand
gaagcccuccaauaugcua

SEQ ID NO: 1207762 - RNA, 19 nt, Homo sapiens
  misc_RNA (1)...(19): siRNA sense strand
gcagugcauuguugaugag

SEQ ID NO: 1207763 - RNA, 19 nt, Homo sapiens
  misc_RNA (1)...(19): siRNA sense strand
ccaauaugcuaguaaacac

SEQ ID NO: 1207764 - RNA, 19 nt, Homo sapiens
  misc_RNA (1)...(19): siRNA sense strand
gaaaggccagcaccugaag

SEQ ID NO: 1207765 - RNA, 19 nt, Homo sapiens
  misc_RNA (1)...(19): siRNA sense strand
uggaagaauugcaguagca

SEQ ID NO: 1207766 - RNA, 19 nt, Homo sapiens
  misc_RNA (1)...(19): siRNA sense strand
guacauuucaucacucagu

SEQ ID NO: 1207767 - RNA, 19 nt, Homo sapiens
  misc_RNA (1)...(19): siRNA sense strand
cggagccauuuguacauuu

SEQ ID NO: 1207768 - RNA, 19 nt, Homo sapiens
  misc_RNA (1)...(19): siRNA sense strand
uuuaaugccucuccagcuu

SEQ ID NO: 1207769 - RNA, 19 nt, Homo sapiens
  misc_RNA (1)...(19): siRNA sense strand
ugcaguagcaguuguuaaa

SEQ ID NO: 1207770 - RNA, 19 nt, Homo sapiens
  misc_RNA (1)...(19): siRNA sense strand
aaacacaagaggacagguu

SEQ ID NO: 1207771 - RNA, 19 nt, Homo sapiens
  misc_RNA (1)...(19): siRNA sense strand
aaaccagggaucuuuaaug

SEQ ID NO: 1207772 - RNA, 19 nt, Homo sapiens
  misc_RNA (1)...(19): siRNA sense strand
gcuuauauggcgccugaaa

SEQ ID NO: 1207773 - RNA, 19 nt, Homo sapiens
  misc_RNA (1)...(19): siRNA sense strand
aaccagggaucuuuaaugc

SEQ ID NO: 1207774 - RNA, 19 nt, Homo sapiens
  misc_RNA (1)...(19): siRNA sense strand
gagcaguauggaauucauu

SEQ ID NO: 1207775 - RNA, 19 nt, Homo sapiens
  misc_RNA (1)...(19): siRNA sense strand
uauggcgccugaaaggauu

SEQ ID NO: 1207776 - RNA, 19 nt, Homo sapiens
  misc_RNA (1)...(19): siRNA sense strand
ucugaugucuggagcuuag

SEQ ID NO: 1207777 - RNA, 19 nt, Homo sapiens
  misc_RNA (1)...(19): siRNA sense strand
gugcauuguugaugaggau

SEQ ID NO: 1207778 - RNA, 19 nt, Homo sapiens
  misc_RNA (1)...(19): siRNA sense strand
auaagugcgauucaucaua

SEQ ID NO: 1207779 - RNA, 19 nt, Homo sapiens
  misc_RNA (1)...(19): siRNA sense strand
gaaaaugccagaacauguc

SEQ ID NO: 1207780 - RNA, 19 nt, Homo sapiens
  misc_RNA (1)...(19): siRNA sense strand
caguagcaguuguuaaagg

SEQ ID NO: 1207781 - RNA, 19 nt, Homo sapiens
  misc_RNA (1)...(19): siRNA sense strand
ggaaaaugccagaacaugu

SEQ ID NO: 1207782 - RNA, 19 nt, Homo sapiens
  misc_RNA (1)...(19): siRNA sense strand
cgaaaacagccaaaagaaa

SEQ ID NO: 1207783 - RNA, 19 nt, Homo sapiens
  misc_RNA (1)...(19): siRNA sense strand
ugaauucuauagccaagac

SEQ ID NO: 1207784 - RNA, 19 nt, Homo sapiens
  misc_RNA (1)...(19): siRNA sense strand
caagaggacagguuaagcu

SEQ ID NO: 1207785 - RNA, 19 nt, Homo sapiens
  misc_RNA (1)...(19): siRNA sense strand
acauguccuuggaagaauu

SEQ ID NO: 1207786 - RNA, 19 nt, Homo sapiens
  misc_RNA (1)...(19): siRNA sense strand
aagaauugcaguagcaguu

SEQ ID NO: 1207787 - RNA, 19 nt, Homo sapiens
  misc_RNA (1)...(19): siRNA sense strand
ggggaucuuuggauguaua

SEQ ID NO: 1207788 - RNA, 19 nt, Homo sapiens
  misc_RNA (1)...(19): siRNA sense strand
uuaggaaucucuuuuaugg

SEQ ID NO: 1207789 - RNA, 19 nt, Homo sapiens
  misc_RNA (1)...(19): siRNA sense strand
acgugaagcccuccaauau

SEQ ID NO: 1207790 - RNA, 19 nt, Homo sapiens
  misc_RNA (1)...(19): siRNA sense strand
uguuaaaggccuuacuuau

SEQ ID NO: 1207791 - RNA, 19 nt, Homo sapiens
  misc_RNA (1)...(19): siRNA sense strand
auauuacacuggaacuuca

SEQ ID NO: 1207792 - RNA, 19 nt, Homo sapiens
  misc_RNA (1)...(19): siRNA sense strand
ucggagccauuuguacauu

SEQ ID NO: 1207793 - RNA, 19 nt, Homo sapiens
  misc_RNA (1)...(19): siRNA sense strand
aacacaagaggacagguua

SEQ ID NO: 1207794 - RNA, 19 nt, Homo sapiens
  misc_RNA (1)...(19): siRNA sense strand
gcccuccaauaugcuagua

SEQ ID NO: 1207795 - RNA, 19 nt, Homo sapiens
  misc_RNA (1)...(19): siRNA sense strand
cgugaagcccuccaauaug

SEQ ID NO: 1207796 - RNA, 19 nt, Homo sapiens
  misc_RNA (1)...(19): siRNA sense strand
agaaaggccagcaccugaa

SEQ ID NO: 1207797 - RNA, 19 nt, Homo sapiens
  misc_RNA (1)...(19): siRNA sense strand
ggauguauauaggaaaaug

SEQ ID NO: 1207798 - RNA, 19 nt, Homo sapiens
  misc_RNA (1)...(19): siRNA sense strand
gcgaaaacagccaaaagaa

SEQ ID NO: 1207799 - RNA, 19 nt, Homo sapiens
  misc_RNA (1)...(19): siRNA sense strand
guucucggagccauuugua

SEQ ID NO: 1207800 - RNA, 19 nt, Homo sapiens
  misc_RNA (1)...(19): siRNA sense strand
gcuuaggaaucucuuuuau

SEQ ID NO: 1207801 - RNA, 19 nt, Homo sapiens
  misc_RNA (1)...(19): siRNA sense strand
gagcuuaggaaucucuuuu

SEQ ID NO: 1207802 - RNA, 19 nt, Homo sapiens
  misc_RNA (1)...(19): siRNA sense strand
gucuggagcuuaggaaucu

SEQ ID NO: 1207803 - RNA, 19 nt, Homo sapiens
  misc_RNA (1)...(19): siRNA sense strand
acacaagaggacagguuaa

SEQ ID NO: 1207804 - RNA, 19 nt, Homo sapiens
  misc_RNA (1)...(19): siRNA sense strand
gcaguuguuaaaggccuua

SEQ ID NO: 1207805 - RNA, 19 nt, Homo sapiens
  misc_RNA (1)...(19): siRNA sense strand
ugcgauucaucauauauca

SEQ ID NO: 1207806 - RNA, 19 nt, Homo sapiens
  misc_RNA (1)...(19): siRNA sense strand
guuguuaaaggccuuacuu

SEQ ID NO: 1207807 - RNA, 19 nt, Homo sapiens
  misc_RNA (1)...(19): siRNA sense strand
aagugcgauucaucauaua

SEQ ID NO: 1207808 - RNA, 19 nt, Homo sapiens
  misc_RNA (1)...(19): siRNA sense strand
ccagaacauguccuuggaa

SEQ ID NO: 1207809 - RNA, 19 nt, Homo sapiens
  misc_RNA (1)...(19): siRNA sense strand
uaaugccucuccagcuucu

SEQ ID NO: 1207810 - RNA, 19 nt, Homo sapiens
  misc_RNA (1)...(19): siRNA sense strand
gcaguagcaguuguuaaag

SEQ ID NO: 1207811 - RNA, 19 nt, Homo sapiens
  misc_RNA (1)...(19): siRNA sense strand
ggagcuuaggaaucucuuu

SEQ ID NO: 1207812 - RNA, 19 nt, Homo sapiens
  misc_RNA (1)...(19): siRNA sense strand
gcacucagcuggugaauuc

SEQ ID NO: 1207813 - RNA, 19 nt, Homo sapiens
  misc_RNA (1)...(19): siRNA sense strand
gaacauguccuuggaagaa

SEQ ID NO: 1207814 - RNA, 19 nt, Homo sapiens
  misc_RNA (1)...(19): siRNA sense strand
uaagugcgauucaucauau

SEQ ID NO: 1207815 - RNA, 19 nt, Homo sapiens
  misc_RNA (1)...(19): siRNA sense strand
guuaaaggccuuacuuauu

SEQ ID NO: 1207816 - RNA, 19 nt, Homo sapiens
  misc_RNA (1)...(19): siRNA sense strand
gcaguucaaugauggaaau

SEQ ID NO: 1207817 - RNA, 19 nt, Homo sapiens
  misc_RNA (1)...(19): siRNA sense strand
gccagcaccugaagaauug

SEQ ID NO: 1207818 - RNA, 19 nt, Homo sapiens
  misc_RNA (1)...(19): siRNA sense strand
agaagcaaauuaugucuga

SEQ ID NO: 1207819 - RNA, 19 nt, Homo sapiens
  misc_RNA (1)...(19): siRNA sense strand
uaaaggccuuacuuauuug

SEQ ID NO: 1207820 - RNA, 19 nt, Homo sapiens
  misc_RNA (1)...(19): siRNA sense strand
ggucauacuacuagauauu

SEQ ID NO: 1207821 - RNA, 19 nt, Homo sapiens
  misc_RNA (1)...(19): siRNA sense strand
gugaagcccuccaauaugc

SEQ ID NO: 1207822 - RNA, 19 nt, Homo sapiens
  misc_RNA (1)...(19): siRNA sense strand
gacgugaagcccuccaaua

SEQ ID NO: 1207823 - RNA, 19 nt, Homo sapiens
  misc_RNA (1)...(19): siRNA sense strand
uggaacaaaugcuuauaug

SEQ ID NO: 1207824 - RNA, 19 nt, Homo sapiens
  misc_RNA (1)...(19): siRNA sense strand
ggagccauuuguacauuuc

SEQ ID NO: 1207825 - RNA, 19 nt, Homo sapiens
  misc_RNA (1)...(19): siRNA sense strand
ggccagcaccugaagaauu

SEQ ID NO: 1207826 - RNA, 19 nt, Homo sapiens
  misc_RNA (1)...(19): siRNA sense strand
gccagaacauguccuugga

SEQ ID NO: 1207827 - RNA, 19 nt, Homo sapiens
  misc_RNA (1)...(19): siRNA sense strand
gauauuacacuggaacuuc

SEQ ID NO: 1207828 - RNA, 19 nt, Homo sapiens
  misc_RNA (1)...(19): siRNA sense strand
gaaaacagccaaaagaaag

SEQ ID NO: 1207829 - RNA, 19 nt, Homo sapiens
  misc_RNA (1)...(19): siRNA sense strand
ccuccaauaugcuaguaaa

SEQ ID NO: 1207830 - RNA, 19 nt, Homo sapiens
  misc_RNA (1)...(19): siRNA sense strand
gaauugcaguagcaguugu

SEQ ID NO: 1207831 - RNA, 19 nt, Homo sapiens
  misc_RNA (1)...(19): siRNA sense strand
gaucuuuggauguauauag

SEQ ID NO: 1207832 - RNA, 19 nt, Homo sapiens
  misc_RNA (1)...(19): siRNA sense strand
agguuaagcugugugauuu

SEQ ID NO: 1207833 - RNA, 19 nt, Homo sapiens
  misc_RNA (1)...(19): siRNA sense strand
gaagcaaauuaugucugaa

SEQ ID NO: 1207834 - RNA, 19 nt, Homo sapiens
  misc_RNA (1)...(19): siRNA sense strand
ggauuucaauauguacaga

SEQ ID NO: 1207835 - RNA, 19 nt, Homo sapiens
  misc_RNA (1)...(19): siRNA sense strand
cagguuaagcugugugauu

SEQ ID NO: 1207836 - RNA, 19 nt, Homo sapiens
  misc_RNA (1)...(19): siRNA sense strand
ggagcaguauggaauucau

SEQ ID NO: 1207837 - RNA, 19 nt, Homo sapiens
  misc_RNA (1)...(19): siRNA sense strand
ggaacaaaugcuuauaugg

SEQ ID NO: 1207838 - RNA, 19 nt, Homo sapiens
  misc_RNA (1)...(19): siRNA sense strand
gaagcccuccaauaugcua

SEQ ID NO: 1207839 - RNA, 19 nt, Homo sapiens
  misc_RNA (1)...(19): siRNA sense strand
gcagugcauuguugaugag

SEQ ID NO: 1207840 - RNA, 19 nt, Homo sapiens
  misc_RNA (1)...(19): siRNA sense strand
ccaauaugcuaguaaacac

SEQ ID NO: 1207841 - RNA, 19 nt, Homo sapiens
  misc_RNA (1)...(19): siRNA sense strand
gaaaggccagcaccugaag

SEQ ID NO: 1207842 - RNA, 19 nt, Homo sapiens
  misc_RNA (1)...(19): siRNA sense strand
uggaagaauugcaguagca

SEQ ID NO: 1207843 - RNA, 19 nt, Homo sapiens
  misc_RNA (1)...(19): siRNA sense strand
guacauuucaucacucagu

SEQ ID NO: 1207844 - RNA, 19 nt, Homo sapiens
  misc_RNA (1)...(19): siRNA sense strand
cggagccauuuguacauuu

SEQ ID NO: 1207845 - RNA, 19 nt, Homo sapiens
  misc_RNA (1)...(19): siRNA sense strand
uuuaaugccucuccagcuu

SEQ ID NO: 1207846 - RNA, 19 nt, Homo sapiens
  misc_RNA (1)...(19): siRNA sense strand
ugcaguagcaguuguuaaa

SEQ ID NO: 1207847 - RNA, 19 nt, Homo sapiens
  misc_RNA (1)...(19): siRNA sense strand
aaacacaagaggacagguu

SEQ ID NO: 1207848 - RNA, 19 nt, Homo sapiens
  misc_RNA (1)...(19): siRNA sense strand
aaaccagggaucuuuaaug

SEQ ID NO: 1207849 - RNA, 19 nt, Homo sapiens
  misc_RNA (1)...(19): siRNA sense strand
gcuuauauggcgccugaaa

SEQ ID NO: 1207850 - RNA, 19 nt, Homo sapiens
  misc_RNA (1)...(19): siRNA sense strand
aaccagggaucuuuaaugc

SEQ ID NO: 1207851 - RNA, 19 nt, Homo sapiens
  misc_RNA (1)...(19): siRNA sense strand
gagcaguauggaauucauu

SEQ ID NO: 1207852 - RNA, 19 nt, Homo sapiens
  misc_RNA (1)...(19): siRNA sense strand
uauggcgccugaaaggauu

SEQ ID NO: 1207853 - RNA, 19 nt, Homo sapiens
  misc_RNA (1)...(19): siRNA sense strand
ucugaugucuggagcuuag

SEQ ID NO: 1207854 - RNA, 19 nt, Homo sapiens
  misc_RNA (1)...(19): siRNA sense strand
gugcauuguugaugaggau

SEQ ID NO: 1207855 - RNA, 19 nt, Homo sapiens
  misc_RNA (1)...(19): siRNA sense strand
auaagugcgauucaucaua

SEQ ID NO: 1207856 - RNA, 19 nt, Homo sapiens
  misc_RNA (1)...(19): siRNA sense strand
gaaaaugccagaacauguc

SEQ ID NO: 1207857 - RNA, 19 nt, Homo sapiens
  misc_RNA (1)...(19): siRNA sense strand
caguagcaguuguuaaagg

SEQ ID NO: 1207858 - RNA, 19 nt, Homo sapiens
  misc_RNA (1)...(19): siRNA sense strand
ggaaaaugccagaacaugu

SEQ ID NO: 1207859 - RNA, 19 nt, Homo sapiens
  misc_RNA (1)...(19): siRNA sense strand
cgaaaacagccaaaagaaa

SEQ ID NO: 1207860 - RNA, 19 nt, Homo sapiens
  misc_RNA (1)...(19): siRNA sense strand
ugaauucuauagccaagac

SEQ ID NO: 1207861 - RNA, 19 nt, Homo sapiens
  misc_RNA (1)...(19): siRNA sense strand
caagaggacagguuaagcu

SEQ ID NO: 1207862 - RNA, 19 nt, Homo sapiens
  misc_RNA (1)...(19): siRNA sense strand
acauguccuuggaagaauu

SEQ ID NO: 1207863 - RNA, 19 nt, Homo sapiens
  misc_RNA (1)...(19): siRNA sense strand
aagaauugcaguagcaguu

SEQ ID NO: 1207864 - RNA, 19 nt, Homo sapiens
  misc_RNA (1)...(19): siRNA sense strand
ggggaucuuuggauguaua

SEQ ID NO: 1207865 - RNA, 19 nt, Homo sapiens
  misc_RNA (1)...(19): siRNA sense strand
uuaggaaucucuuuuaugg

SEQ ID NO: 1207866 - RNA, 19 nt, Homo sapiens
  misc_RNA (1)...(19): siRNA sense strand
acgugaagcccuccaauau

SEQ ID NO: 1207867 - RNA, 19 nt, Homo sapiens
  misc_RNA (1)...(19): siRNA sense strand
uguuaaaggccuuacuuau

SEQ ID NO: 1207868 - RNA, 19 nt, Homo sapiens
  misc_RNA (1)...(19): siRNA sense strand
auauuacacuggaacuuca

SEQ ID NO: 1207869 - RNA, 19 nt, Homo sapiens
  misc_RNA (1)...(19): siRNA sense strand
ucggagccauuuguacauu

SEQ ID NO: 1207870 - RNA, 19 nt, Homo sapiens
  misc_RNA (1)...(19): siRNA sense strand
aacacaagaggacagguua

SEQ ID NO: 1207871 - RNA, 19 nt, Homo sapiens
  misc_RNA (1)...(19): siRNA sense strand
gcccuccaauaugcuagua

SEQ ID NO: 1207872 - RNA, 19 nt, Homo sapiens
  misc_RNA (1)...(19): siRNA sense strand
cgugaagcccuccaauaug

SEQ ID NO: 1207873 - RNA, 19 nt, Homo sapiens
  misc_RNA (1)...(19): siRNA sense strand
agaaaggccagcaccugaa

SEQ ID NO: 1207874 - RNA, 19 nt, Homo sapiens
  misc_RNA (1)...(19): siRNA sense strand
ggauguauauaggaaaaug

SEQ ID NO: 1207875 - RNA, 19 nt, Homo sapiens
  misc_RNA (1)...(19): siRNA sense strand
ccccauaccuucugguuug

SEQ ID NO: 1207876 - RNA, 19 nt, Homo sapiens
  misc_RNA (1)...(19): siRNA sense strand
gcgaaaacagccaaaagaa

SEQ ID NO: 1207877 - RNA, 19 nt, Homo sapiens
  misc_RNA (1)...(19): siRNA sense strand
guucucggagccauuugua

SEQ ID NO: 1207878 - RNA, 19 nt, Homo sapiens
  misc_RNA (1)...(19): siRNA sense strand
gcuuaggaaucucuuuuau

SEQ ID NO: 1207879 - RNA, 19 nt, Homo sapiens
  misc_RNA (1)...(19): siRNA sense strand
gagcuuaggaaucucuuuu

SEQ ID NO: 1207880 - RNA, 19 nt, Homo sapiens
  misc_RNA (1)...(19): siRNA sense strand
gucuggagcuuaggaaucu

SEQ ID NO: 1207881 - RNA, 19 nt, Homo sapiens
  misc_RNA (1)...(19): siRNA sense strand
acacaagaggacagguuaa

SEQ ID NO: 1207882 - RNA, 19 nt, Homo sapiens
  misc_RNA (1)...(19): siRNA sense strand
gcaguuguuaaaggccuua

SEQ ID NO: 1207883 - RNA, 19 nt, Homo sapiens
  misc_RNA (1)...(19): siRNA sense strand
ugcgauucaucauauauca

SEQ ID NO: 1207884 - RNA, 19 nt, Homo sapiens
  misc_RNA (1)...(19): siRNA sense strand
guuguuaaaggccuuacuu

SEQ ID NO: 1207885 - RNA, 19 nt, Homo sapiens
  misc_RNA (1)...(19): siRNA sense strand
aagugcgauucaucauaua

SEQ ID NO: 1207886 - RNA, 19 nt, Homo sapiens
  misc_RNA (1)...(19): siRNA sense strand
ccagaacauguccuuggaa

SEQ ID NO: 1207887 - RNA, 19 nt, Homo sapiens
  misc_RNA (1)...(19): siRNA sense strand
gcaguagcaguuguuaaag

SEQ ID NO: 1207888 - RNA, 19 nt, Homo sapiens
  misc_RNA (1)...(19): siRNA sense strand
uaaugccucuccagcuucu

SEQ ID NO: 1207889 - RNA, 19 nt, Homo sapiens
  misc_RNA (1)...(19): siRNA sense strand
ggagcuuaggaaucucuuu

SEQ ID NO: 1207890 - RNA, 19 nt, Homo sapiens
  misc_RNA (1)...(19): siRNA sense strand
gcacucagcuggugaauuc

SEQ ID NO: 1207891 - RNA, 19 nt, Homo sapiens
  misc_RNA (1)...(19): siRNA sense strand
gaacauguccuuggaagaa

SEQ ID NO: 1207892 - RNA, 19 nt, Homo sapiens
  misc_RNA (1)...(19): siRNA sense strand
uaagugcgauucaucauau

SEQ ID NO: 1207893 - RNA, 19 nt, Homo sapiens
  misc_RNA (1)...(19): siRNA sense strand
guuaaaggccuuacuuauu

SEQ ID NO: 1207894 - RNA, 19 nt, Homo sapiens
  misc_RNA (1)...(19): siRNA sense strand
gcaguucaaugauggaaau

SEQ ID NO: 1207895 - RNA, 19 nt, Homo sapiens
  misc_RNA (1)...(19): siRNA sense strand
gccagcaccugaagaauug

SEQ ID NO: 1207896 - RNA, 19 nt, Homo sapiens
  misc_RNA (1)...(19): siRNA sense strand
agaagcaaauuaugucuga

SEQ ID NO: 1207897 - RNA, 19 nt, Homo sapiens
  misc_RNA (1)...(19): siRNA sense strand
uaaaggccuuacuuauuug

SEQ ID NO: 1207898 - RNA, 19 nt, Homo sapiens
  misc_RNA (1)...(19): siRNA sense strand
ggucauacuacuagauauu

SEQ ID NO: 1207899 - RNA, 19 nt, Homo sapiens
  misc_RNA (1)...(19): siRNA sense strand
gugaagcccuccaauaugc

SEQ ID NO: 1207900 - RNA, 19 nt, Homo sapiens
  misc_RNA (1)...(19): siRNA sense strand
gacgugaagcccuccaaua

SEQ ID NO: 1207901 - RNA, 19 nt, Homo sapiens
  misc_RNA (1)...(19): siRNA sense strand
uggaacaaaugcuuauaug

SEQ ID NO: 1207902 - RNA, 19 nt, Homo sapiens
  misc_RNA (1)...(19): siRNA sense strand
ggagccauuuguacauuuc

SEQ ID NO: 1207903 - RNA, 19 nt, Homo sapiens
  misc_RNA (1)...(19): siRNA sense strand
ggccagcaccugaagaauu

SEQ ID NO: 1207904 - RNA, 19 nt, Homo sapiens
  misc_RNA (1)...(19): siRNA sense strand
gccagaacauguccuugga

SEQ ID NO: 1207905 - RNA, 19 nt, Homo sapiens
  misc_RNA (1)...(19): siRNA sense strand
gauauuacacuggaacuuc

SEQ ID NO: 1207906 - RNA, 19 nt, Homo sapiens
  misc_RNA (1)...(19): siRNA sense strand
gaaaacagccaaaagaaag

SEQ ID NO: 1207907 - RNA, 19 nt, Homo sapiens
  misc_RNA (1)...(19): siRNA sense strand
ccuccaauaugcuaguaaa

SEQ ID NO: 1207908 - RNA, 19 nt, Homo sapiens
  misc_RNA (1)...(19): siRNA sense strand
gaauugcaguagcaguugu

SEQ ID NO: 1207909 - RNA, 19 nt, Homo sapiens
  misc_RNA (1)...(19): siRNA sense strand
gaucuuuggauguauauag

SEQ ID NO: 1207910 - RNA, 19 nt, Homo sapiens
  misc_RNA (1)...(19): siRNA sense strand
agguuaagcugugugauuu

SEQ ID NO: 1207911 - RNA, 19 nt, Homo sapiens
  misc_RNA (1)...(19): siRNA sense strand
gaagcaaauuaugucugaa

SEQ ID NO: 1207912 - RNA, 19 nt, Homo sapiens
  misc_RNA (1)...(19): siRNA sense strand
ggauuucaauauguacaga

SEQ ID NO: 1207913 - RNA, 19 nt, Homo sapiens
  misc_RNA (1)...(19): siRNA sense strand
cagguuaagcugugugauu

SEQ ID NO: 1207914 - RNA, 19 nt, Homo sapiens
  misc_RNA (1)...(19): siRNA sense strand
ggagcaguauggaauucau

SEQ ID NO: 1207915 - RNA, 19 nt, Homo sapiens
  misc_RNA (1)...(19): siRNA sense strand
ggaacaaaugcuuauaugg

SEQ ID NO: 1207916 - RNA, 19 nt, Homo sapiens
  misc_RNA (1)...(19): siRNA sense strand
gaagcccuccaauaugcua

SEQ ID NO: 1207917 - RNA, 19 nt, Homo sapiens
  misc_RNA (1)...(19): siRNA sense strand
gcagugcauuguugaugag

SEQ ID NO: 1207918 - RNA, 19 nt, Homo sapiens
  misc_RNA (1)...(19): siRNA sense strand
ccaauaugcuaguaaacac

SEQ ID NO: 1207919 - RNA, 19 nt, Homo sapiens
  misc_RNA (1)...(19): siRNA sense strand
gaaaggccagcaccugaag

SEQ ID NO: 1207920 - RNA, 19 nt, Homo sapiens
  misc_RNA (1)...(19): siRNA sense strand
uggaagaauugcaguagca

SEQ ID NO: 1207921 - RNA, 19 nt, Homo sapiens
  misc_RNA (1)...(19): siRNA sense strand
guacauuucaucacucagu

SEQ ID NO: 1207922 - RNA, 19 nt, Homo sapiens
  misc_RNA (1)...(19): siRNA sense strand
cggagccauuuguacauuu

SEQ ID NO: 1207923 - RNA, 19 nt, Homo sapiens
  misc_RNA (1)...(19): siRNA sense strand
uuuaaugccucuccagcuu

SEQ ID NO: 1207924 - RNA, 19 nt, Homo sapiens
  misc_RNA (1)...(19): siRNA sense strand
ugcaguagcaguuguuaaa

SEQ ID NO: 1207925 - RNA, 19 nt, Homo sapiens
  misc_RNA (1)...(19): siRNA sense strand
aaacacaagaggacagguu

SEQ ID NO: 1207926 - RNA, 19 nt, Homo sapiens
  misc_RNA (1)...(19): siRNA sense strand
aaaccagggaucuuuaaug

SEQ ID NO: 1207927 - RNA, 19 nt, Homo sapiens
  misc_RNA (1)...(19): siRNA sense strand
gcuuauauggcgccugaaa

SEQ ID NO: 1207928 - RNA, 19 nt, Homo sapiens
  misc_RNA (1)...(19): siRNA sense strand
aaccagggaucuuuaaugc

SEQ ID NO: 1207929 - RNA, 19 nt, Homo sapiens
  misc_RNA (1)...(19): siRNA sense strand
gagcaguauggaauucauu

SEQ ID NO: 1207930 - RNA, 19 nt, Homo sapiens
  misc_RNA (1)...(19): siRNA sense strand
uauggcgccugaaaggauu

SEQ ID NO: 1207931 - RNA, 19 nt, Homo sapiens
  misc_RNA (1)...(19): siRNA sense strand
ucugaugucuggagcuuag

SEQ ID NO: 1207932 - RNA, 19 nt, Homo sapiens
  misc_RNA (1)...(19): siRNA sense strand
gugcauuguugaugaggau

SEQ ID NO: 1207933 - RNA, 19 nt, Homo sapiens
  misc_RNA (1)...(19): siRNA sense strand
auaagugcgauucaucaua

SEQ ID NO: 1207934 - RNA, 19 nt, Homo sapiens
  misc_RNA (1)...(19): siRNA sense strand
gaaaaugccagaacauguc

SEQ ID NO: 1207935 - RNA, 19 nt, Homo sapiens
  misc_RNA (1)...(19): siRNA sense strand
caguagcaguuguuaaagg

SEQ ID NO: 1207936 - RNA, 19 nt, Homo sapiens
  misc_RNA (1)...(19): siRNA sense strand
ggaaaaugccagaacaugu

SEQ ID NO: 1207937 - RNA, 19 nt, Homo sapiens
  misc_RNA (1)...(19): siRNA sense strand
cgaaaacagccaaaagaaa

SEQ ID NO: 1207938 - RNA, 19 nt, Homo sapiens
  misc_RNA (1)...(19): siRNA sense strand
ugaauucuauagccaagac

SEQ ID NO: 1207939 - RNA, 19 nt, Homo sapiens
  misc_RNA (1)...(19): siRNA sense strand
caagaggacagguuaagcu

SEQ ID NO: 1207940 - RNA, 19 nt, Homo sapiens
  misc_RNA (1)...(19): siRNA sense strand
acauguccuuggaagaauu

SEQ ID NO: 1207941 - RNA, 19 nt, Homo sapiens
  misc_RNA (1)...(19): siRNA sense strand
aagaauugcaguagcaguu

SEQ ID NO: 1207942 - RNA, 19 nt, Homo sapiens
  misc_RNA (1)...(19): siRNA sense strand
ggggaucuuuggauguaua

SEQ ID NO: 1207943 - RNA, 19 nt, Homo sapiens
  misc_RNA (1)...(19): siRNA sense strand
uuaggaaucucuuuuaugg

SEQ ID NO: 1207944 - RNA, 19 nt, Homo sapiens
  misc_RNA (1)...(19): siRNA sense strand
acgugaagcccuccaauau

SEQ ID NO: 1207945 - RNA, 19 nt, Homo sapiens
  misc_RNA (1)...(19): siRNA sense strand
uguuaaaggccuuacuuau

SEQ ID NO: 1207946 - RNA, 19 nt, Homo sapiens
  misc_RNA (1)...(19): siRNA sense strand
auauuacacuggaacuuca

SEQ ID NO: 1207947 - RNA, 19 nt, Homo sapiens
  misc_RNA (1)...(19): siRNA sense strand
ucggagccauuuguacauu

SEQ ID NO: 1207948 - RNA, 19 nt, Homo sapiens
  misc_RNA (1)...(19): siRNA sense strand
aacacaagaggacagguua

SEQ ID NO: 1207949 - RNA, 19 nt, Homo sapiens
  misc_RNA (1)...(19): siRNA sense strand
gcccuccaauaugcuagua

SEQ ID NO: 1207950 - RNA, 19 nt, Homo sapiens
  misc_RNA (1)...(19): siRNA sense strand
cgugaagcccuccaauaug

SEQ ID NO: 1207951 - RNA, 19 nt, Homo sapiens
  misc_RNA (1)...(19): siRNA sense strand
agaaaggccagcaccugaa

SEQ ID NO: 1207952 - RNA, 19 nt, Homo sapiens
  misc_RNA (1)...(19): siRNA sense strand
ggauguauauaggaaaaug

SEQ ID NO: 1207953 - RNA, 19 nt, Homo sapiens
  misc_RNA (1)...(19): siRNA sense strand
gcgaaaacagccaaaagaa

SEQ ID NO: 1207954 - RNA, 19 nt, Homo sapiens
  misc_RNA (1)...(19): siRNA sense strand
guucucggagccauuugua

SEQ ID NO: 1207955 - RNA, 19 nt, Homo sapiens
  misc_RNA (1)...(19): siRNA sense strand
gcuuaggaaucucuuuuau

SEQ ID NO: 1207956 - RNA, 19 nt, Homo sapiens
  misc_RNA (1)...(19): siRNA sense strand
gagcuuaggaaucucuuuu

SEQ ID NO: 1207957 - RNA, 19 nt, Homo sapiens
  misc_RNA (1)...(19): siRNA sense strand
gucuggagcuuaggaaucu

SEQ ID NO: 1207958 - RNA, 19 nt, Homo sapiens
  misc_RNA (1)...(19): siRNA sense strand
acacaagaggacagguuaa

SEQ ID NO: 1207959 - RNA, 19 nt, Homo sapiens
  misc_RNA (1)...(19): siRNA sense strand
gcaguuguuaaaggccuua

SEQ ID NO: 1207960 - RNA, 19 nt, Homo sapiens
  misc_RNA (1)...(19): siRNA sense strand
ugcgauucaucauauauca

SEQ ID NO: 1207961 - RNA, 19 nt, Homo sapiens
  misc_RNA (1)...(19): siRNA sense strand
guuguuaaaggccuuacuu

SEQ ID NO: 1207962 - RNA, 19 nt, Homo sapiens
  misc_RNA (1)...(19): siRNA sense strand
aagugcgauucaucauaua

SEQ ID NO: 1207963 - RNA, 19 nt, Homo sapiens
  misc_RNA (1)...(19): siRNA sense strand
ccagaacauguccuuggaa

SEQ ID NO: 1207964 - RNA, 19 nt, Homo sapiens
  misc_RNA (1)...(19): siRNA sense strand
uaaugccucuccagcuucu

SEQ ID NO: 1207965 - RNA, 19 nt, Homo sapiens
  misc_RNA (1)...(19): siRNA sense strand
gcaguagcaguuguuaaag

SEQ ID NO: 1207966 - RNA, 19 nt, Homo sapiens
  misc_RNA (1)...(19): siRNA sense strand
ggagcuuaggaaucucuuu

SEQ ID NO: 1207967 - RNA, 19 nt, Homo sapiens
  misc_RNA (1)...(19): siRNA sense strand
gcacucagcuggugaauuc

SEQ ID NO: 1207968 - RNA, 19 nt, Homo sapiens
  misc_RNA (1)...(19): siRNA sense strand
gaacauguccuuggaagaa

SEQ ID NO: 1207969 - RNA, 19 nt, Homo sapiens
  misc_RNA (1)...(19): siRNA sense strand
uaagugcgauucaucauau

SEQ ID NO: 1207970 - RNA, 19 nt, Homo sapiens
  misc_RNA (1)...(19): siRNA sense strand
guuaaaggccuuacuuauu

SEQ ID NO: 1207971 - RNA, 19 nt, Homo sapiens
  misc_RNA (1)...(19): siRNA sense strand
gcaguucaaugauggaaau

SEQ ID NO: 1207972 - RNA, 19 nt, Homo sapiens
  misc_RNA (1)...(19): siRNA sense strand
gccagcaccugaagaauug

SEQ ID NO: 1207973 - RNA, 19 nt, Homo sapiens
  misc_RNA (1)...(19): siRNA sense strand
agaagcaaauuaugucuga

SEQ ID NO: 1207974 - RNA, 19 nt, Homo sapiens
  misc_RNA (1)...(19): siRNA sense strand
uaaaggccuuacuuauuug

SEQ ID NO: 1207975 - RNA, 19 nt, Homo sapiens
  misc_RNA (1)...(19): siRNA sense strand
ggucauacuacuagauauu

SEQ ID NO: 1207976 - RNA, 19 nt, Homo sapiens
  misc_RNA (1)...(19): siRNA sense strand
gugaagcccuccaauaugc

SEQ ID NO: 1207977 - RNA, 19 nt, Homo sapiens
  misc_RNA (1)...(19): siRNA sense strand
gacgugaagcccuccaaua

SEQ ID NO: 1207978 - RNA, 19 nt, Homo sapiens
  misc_RNA (1)...(19): siRNA sense strand
uggaacaaaugcuuauaug

SEQ ID NO: 1207979 - RNA, 19 nt, Homo sapiens
  misc_RNA (1)...(19): siRNA sense strand
ggagccauuuguacauuuc

SEQ ID NO: 1207980 - RNA, 19 nt, Homo sapiens
  misc_RNA (1)...(19): siRNA sense strand
ggccagcaccugaagaauu

SEQ ID NO: 1207981 - RNA, 19 nt, Homo sapiens
  misc_RNA (1)...(19): siRNA sense strand
gccagaacauguccuugga

SEQ ID NO: 1207982 - RNA, 19 nt, Homo sapiens
  misc_RNA (1)...(19): siRNA sense strand
gauauuacacuggaacuuc

SEQ ID NO: 1207983 - RNA, 19 nt, Homo sapiens
  misc_RNA (1)...(19): siRNA sense strand
gaaaacagccaaaagaaag

SEQ ID NO: 1207984 - RNA, 19 nt, Homo sapiens
  misc_RNA (1)...(19): siRNA sense strand
ccuccaauaugcuaguaaa

SEQ ID NO: 1207985 - RNA, 19 nt, Homo sapiens
  misc_RNA (1)...(19): siRNA sense strand
gaauugcaguagcaguugu

SEQ ID NO: 1207986 - RNA, 19 nt, Homo sapiens
  misc_RNA (1)...(19): siRNA sense strand
gaucuuuggauguauauag

SEQ ID NO: 1207987 - RNA, 19 nt, Homo sapiens
  misc_RNA (1)...(19): siRNA sense strand
agguuaagcugugugauuu

SEQ ID NO: 1207988 - RNA, 19 nt, Homo sapiens
  misc_RNA (1)...(19): siRNA sense strand
gaagcaaauuaugucugaa

SEQ ID NO: 1207989 - RNA, 19 nt, Homo sapiens
  misc_RNA (1)...(19): siRNA sense strand
ggauuucaauauguacaga

SEQ ID NO: 1207990 - RNA, 19 nt, Homo sapiens
  misc_RNA (1)...(19): siRNA sense strand
cagguuaagcugugugauu

SEQ ID NO: 1207991 - RNA, 19 nt, Homo sapiens
  misc_RNA (1)...(19): siRNA sense strand
ggagcaguauggaauucau

SEQ ID NO: 1207992 - RNA, 19 nt, Homo sapiens
  misc_RNA (1)...(19): siRNA sense strand
ggaacaaaugcuuauaugg

SEQ ID NO: 1207993 - RNA, 19 nt, Homo sapiens
  misc_RNA (1)...(19): siRNA sense strand
gaagcccuccaauaugcua

SEQ ID NO: 1207994 - RNA, 19 nt, Homo sapiens
  misc_RNA (1)...(19): siRNA sense strand
gcagugcauuguugaugag

SEQ ID NO: 1207995 - RNA, 19 nt, Homo sapiens
  misc_RNA (1)...(19): siRNA sense strand
ccaauaugcuaguaaacac

SEQ ID NO: 1207996 - RNA, 19 nt, Homo sapiens
  misc_RNA (1)...(19): siRNA sense strand
gaaaggccagcaccugaag

SEQ ID NO: 1207997 - RNA, 19 nt, Homo sapiens
  misc_RNA (1)...(19): siRNA sense strand
uggaagaauugcaguagca

SEQ ID NO: 1207998 - RNA, 19 nt, Homo sapiens
  misc_RNA (1)...(19): siRNA sense strand
guacauuucaucacucagu

SEQ ID NO: 1207999 - RNA, 19 nt, Homo sapiens
  misc_RNA (1)...(19): siRNA sense strand
cggagccauuuguacauuu

SEQ ID NO: 1208000 - RNA, 19 nt, Homo sapiens
  misc_RNA (1)...(19): siRNA sense strand
uuuaaugccucuccagcuu

SEQ ID NO: 1208001 - RNA, 19 nt, Homo sapiens
  misc_RNA (1)...(19): siRNA sense strand
ugcaguagcaguuguuaaa

SEQ ID NO: 1208002 - RNA, 19 nt, Homo sapiens
  misc_RNA (1)...(19): siRNA sense strand
aaacacaagaggacagguu

SEQ ID NO: 1208003 - RNA, 19 nt, Homo sapiens
  misc_RNA (1)...(19): siRNA sense strand
aaaccagggaucuuuaaug

SEQ ID NO: 1208004 - RNA, 19 nt, Homo sapiens
  misc_RNA (1)...(19): siRNA sense strand
gcuuauauggcgccugaaa

SEQ ID NO: 1208005 - RNA, 19 nt, Homo sapiens
  misc_RNA (1)...(19): siRNA sense strand
aaccagggaucuuuaaugc

SEQ ID NO: 1208006 - RNA, 19 nt, Homo sapiens
  misc_RNA (1)...(19): siRNA sense strand
gagcaguauggaauucauu

SEQ ID NO: 1208007 - RNA, 19 nt, Homo sapiens
  misc_RNA (1)...(19): siRNA sense strand
uauggcgccugaaaggauu

SEQ ID NO: 1208008 - RNA, 19 nt, Homo sapiens
  misc_RNA (1)...(19): siRNA sense strand
ucugaugucuggagcuuag

SEQ ID NO: 1208009 - RNA, 19 nt, Homo sapiens
  misc_RNA (1)...(19): siRNA sense strand
gugcauuguugaugaggau

SEQ ID NO: 1208010 - RNA, 19 nt, Homo sapiens
  misc_RNA (1)...(19): siRNA sense strand
auaagugcgauucaucaua

SEQ ID NO: 1208011 - RNA, 19 nt, Homo sapiens
  misc_RNA (1)...(19): siRNA sense strand
gaaaaugccagaacauguc

SEQ ID NO: 1208012 - RNA, 19 nt, Homo sapiens
  misc_RNA (1)...(19): siRNA sense strand
caguagcaguuguuaaagg

SEQ ID NO: 1208013 - RNA, 19 nt, Homo sapiens
  misc_RNA (1)...(19): siRNA sense strand
ggaaaaugccagaacaugu

SEQ ID NO: 1208014 - RNA, 19 nt, Homo sapiens
  misc_RNA (1)...(19): siRNA sense strand
cgaaaacagccaaaagaaa

SEQ ID NO: 1208015 - RNA, 19 nt, Homo sapiens
  misc_RNA (1)...(19): siRNA sense strand
ugaauucuauagccaagac

SEQ ID NO: 1208016 - RNA, 19 nt, Homo sapiens
  misc_RNA (1)...(19): siRNA sense strand
caagaggacagguuaagcu

SEQ ID NO: 1208017 - RNA, 19 nt, Homo sapiens
  misc_RNA (1)...(19): siRNA sense strand
acauguccuuggaagaauu

SEQ ID NO: 1208018 - RNA, 19 nt, Homo sapiens
  misc_RNA (1)...(19): siRNA sense strand
aagaauugcaguagcaguu

SEQ ID NO: 1208019 - RNA, 19 nt, Homo sapiens
  misc_RNA (1)...(19): siRNA sense strand
ggggaucuuuggauguaua

SEQ ID NO: 1208020 - RNA, 19 nt, Homo sapiens
  misc_RNA (1)...(19): siRNA sense strand
uuaggaaucucuuuuaugg

SEQ ID NO: 1208021 - RNA, 19 nt, Homo sapiens
  misc_RNA (1)...(19): siRNA sense strand
acgugaagcccuccaauau

SEQ ID NO: 1208022 - RNA, 19 nt, Homo sapiens
  misc_RNA (1)...(19): siRNA sense strand
uguuaaaggccuuacuuau

SEQ ID NO: 1208023 - RNA, 19 nt, Homo sapiens
  misc_RNA (1)...(19): siRNA sense strand
auauuacacuggaacuuca

SEQ ID NO: 1208024 - RNA, 19 nt, Homo sapiens
  misc_RNA (1)...(19): siRNA sense strand
ucggagccauuuguacauu

SEQ ID NO: 1208025 - RNA, 19 nt, Homo sapiens
  misc_RNA (1)...(19): siRNA sense strand
aacacaagaggacagguua

SEQ ID NO: 1208026 - RNA, 19 nt, Homo sapiens
  misc_RNA (1)...(19): siRNA sense strand
gcccuccaauaugcuagua

SEQ ID NO: 1208027 - RNA, 19 nt, Homo sapiens
  misc_RNA (1)...(19): siRNA sense strand
cgugaagcccuccaauaug

SEQ ID NO: 1208028 - RNA, 19 nt, Homo sapiens
  misc_RNA (1)...(19): siRNA sense strand
agaaaggccagcaccugaa

SEQ ID NO: 1208029 - RNA, 19 nt, Homo sapiens
  misc_RNA (1)...(19): siRNA sense strand
ggauguauauaggaaaaug

SEQ ID NO: 1208030 - RNA, 19 nt, Homo sapiens
  misc_RNA (1)...(19): siRNA sense strand
gcgaaaacagccaaaagaa

SEQ ID NO: 1208031 - RNA, 19 nt, Homo sapiens
  misc_RNA (1)...(19): siRNA sense strand
guucucggagccauuugua

SEQ ID NO: 1208032 - RNA, 19 nt, Homo sapiens
  misc_RNA (1)...(19): siRNA sense strand
gcuuaggaaucucuuuuau

SEQ ID NO: 1208033 - RNA, 19 nt, Homo sapiens
  misc_RNA (1)...(19): siRNA sense strand
gagcuuaggaaucucuuuu

SEQ ID NO: 1208034 - RNA, 19 nt, Homo sapiens
  misc_RNA (1)...(19): siRNA sense strand
gucuggagcuuaggaaucu

SEQ ID NO: 1208035 - RNA, 19 nt, Homo sapiens
  misc_RNA (1)...(19): siRNA sense strand
acacaagaggacagguuaa

SEQ ID NO: 1208036 - RNA, 19 nt, Homo sapiens
  misc_RNA (1)...(19): siRNA sense strand
gcaguuguuaaaggccuua

SEQ ID NO: 1208037 - RNA, 19 nt, Homo sapiens
  misc_RNA (1)...(19): siRNA sense strand
ugcgauucaucauauauca

SEQ ID NO: 1208038 - RNA, 19 nt, Homo sapiens
  misc_RNA (1)...(19): siRNA sense strand
guuguuaaaggccuuacuu

SEQ ID NO: 1208039 - RNA, 19 nt, Homo sapiens
  misc_RNA (1)...(19): siRNA sense strand
aagugcgauucaucauaua

SEQ ID NO: 1208040 - RNA, 19 nt, Homo sapiens
  misc_RNA (1)...(19): siRNA sense strand
ccagaacauguccuuggaa

SEQ ID NO: 1208041 - RNA, 19 nt, Homo sapiens
  misc_RNA (1)...(19): siRNA sense strand
uaaugccucuccagcuucu

SEQ ID NO: 1208042 - RNA, 19 nt, Homo sapiens
  misc_RNA (1)...(19): siRNA sense strand
gcaguagcaguuguuaaag

SEQ ID NO: 1208043 - RNA, 19 nt, Homo sapiens
  misc_RNA (1)...(19): siRNA sense strand
ggagcuuaggaaucucuuu

SEQ ID NO: 1208044 - RNA, 19 nt, Homo sapiens
  misc_RNA (1)...(19): siRNA sense strand
gcacucagcuggugaauuc

SEQ ID NO: 1208045 - RNA, 19 nt, Homo sapiens
  misc_RNA (1)...(19): siRNA sense strand
gaacauguccuuggaagaa

SEQ ID NO: 1208046 - RNA, 19 nt, Homo sapiens
  misc_RNA (1)...(19): siRNA sense strand
uaagugcgauucaucauau

SEQ ID NO: 1208047 - RNA, 19 nt, Homo sapiens
  misc_RNA (1)...(19): siRNA sense strand
guuaaaggccuuacuuauu

SEQ ID NO: 1208048 - RNA, 19 nt, Homo sapiens
  misc_RNA (1)...(19): siRNA sense strand
gcaguucaaugauggaaau

SEQ ID NO: 1208049 - RNA, 19 nt, Homo sapiens
  misc_RNA (1)...(19): siRNA sense strand
gccagcaccugaagaauug

SEQ ID NO: 1208050 - RNA, 19 nt, Homo sapiens
  misc_RNA (1)...(19): siRNA sense strand
agaagcaaauuaugucuga

SEQ ID NO: 1208051 - RNA, 19 nt, Homo sapiens
  misc_RNA (1)...(19): siRNA sense strand
uaaaggccuuacuuauuug

SEQ ID NO: 1208052 - RNA, 19 nt, Homo sapiens
  misc_RNA (1)...(19): siRNA sense strand
ggucauacuacuagauauu

SEQ ID NO: 1208053 - RNA, 19 nt, Homo sapiens
  misc_RNA (1)...(19): siRNA sense strand
gugaagcccuccaauaugc

SEQ ID NO: 1208054 - RNA, 19 nt, Homo sapiens
  misc_RNA (1)...(19): siRNA sense strand
gacgugaagcccuccaaua

SEQ ID NO: 1208055 - RNA, 19 nt, Homo sapiens
  misc_RNA (1)...(19): siRNA sense strand
uggaacaaaugcuuauaug

SEQ ID NO: 1208056 - RNA, 19 nt, Homo sapiens
  misc_RNA (1)...(19): siRNA sense strand
ggagccauuuguacauuuc

SEQ ID NO: 1208057 - RNA, 19 nt, Homo sapiens
  misc_RNA (1)...(19): siRNA sense strand
ggccagcaccugaagaauu

SEQ ID NO: 1208058 - RNA, 19 nt, Homo sapiens
  misc_RNA (1)...(19): siRNA sense strand
gccagaacauguccuugga

SEQ ID NO: 1208059 - RNA, 19 nt, Homo sapiens
  misc_RNA (1)...(19): siRNA sense strand
gauauuacacuggaacuuc

SEQ ID NO: 1208060 - RNA, 19 nt, Homo sapiens
  misc_RNA (1)...(19): siRNA sense strand
gaaaacagccaaaagaaag

SEQ ID NO: 1208061 - RNA, 19 nt, Homo sapiens
  misc_RNA (1)...(19): siRNA sense strand
ccuccaauaugcuaguaaa

SEQ ID NO: 1208062 - RNA, 19 nt, Homo sapiens
  misc_RNA (1)...(19): siRNA sense strand
gaauugcaguagcaguugu

SEQ ID NO: 1208063 - RNA, 19 nt, Homo sapiens
  misc_RNA (1)...(19): siRNA sense strand
gaucuuuggauguauauag

SEQ ID NO: 1208064 - RNA, 19 nt, Homo sapiens
  misc_RNA (1)...(19): siRNA sense strand
agguuaagcugugugauuu

SEQ ID NO: 1208065 - RNA, 19 nt, Homo sapiens
  misc_RNA (1)...(19): siRNA sense strand
gaagcaaauuaugucugaa

SEQ ID NO: 1208066 - RNA, 19 nt, Homo sapiens
  misc_RNA (1)...(19): siRNA sense strand
ggauuucaauauguacaga

SEQ ID NO: 1208067 - RNA, 19 nt, Homo sapiens
  misc_RNA (1)...(19): siRNA sense strand
cagguuaagcugugugauu

SEQ ID NO: 1208068 - RNA, 19 nt, Homo sapiens
  misc_RNA (1)...(19): siRNA sense strand
ggagcaguauggaauucau

SEQ ID NO: 1208069 - RNA, 19 nt, Homo sapiens
  misc_RNA (1)...(19): siRNA sense strand
ggaacaaaugcuuauaugg

SEQ ID NO: 1208070 - RNA, 19 nt, Homo sapiens
  misc_RNA (1)...(19): siRNA sense strand
gaagcccuccaauaugcua

SEQ ID NO: 1208071 - RNA, 19 nt, Homo sapiens
  misc_RNA (1)...(19): siRNA sense strand
gcagugcauuguugaugag

SEQ ID NO: 1208072 - RNA, 19 nt, Homo sapiens
  misc_RNA (1)...(19): siRNA sense strand
ccaauaugcuaguaaacac

SEQ ID NO: 1208073 - RNA, 19 nt, Homo sapiens
  misc_RNA (1)...(19): siRNA sense strand
gaaaggccagcaccugaag

SEQ ID NO: 1208074 - RNA, 19 nt, Homo sapiens
  misc_RNA (1)...(19): siRNA sense strand
uggaagaauugcaguagca

SEQ ID NO: 1208075 - RNA, 19 nt, Homo sapiens
  misc_RNA (1)...(19): siRNA sense strand
guacauuucaucacucagu

SEQ ID NO: 1208076 - RNA, 19 nt, Homo sapiens
  misc_RNA (1)...(19): siRNA sense strand
cggagccauuuguacauuu

SEQ ID NO: 1208077 - RNA, 19 nt, Homo sapiens
  misc_RNA (1)...(19): siRNA sense strand
uuuaaugccucuccagcuu

SEQ ID NO: 1208078 - RNA, 19 nt, Homo sapiens
  misc_RNA (1)...(19): siRNA sense strand
ugcaguagcaguuguuaaa

SEQ ID NO: 1208079 - RNA, 19 nt, Homo sapiens
  misc_RNA (1)...(19): siRNA sense strand
aaacacaagaggacagguu

SEQ ID NO: 1208080 - RNA, 19 nt, Homo sapiens
  misc_RNA (1)...(19): siRNA sense strand
aaaccagggaucuuuaaug

SEQ ID NO: 1208081 - RNA, 19 nt, Homo sapiens
  misc_RNA (1)...(19): siRNA sense strand
gcuuauauggcgccugaaa

SEQ ID NO: 1208082 - RNA, 19 nt, Homo sapiens
  misc_RNA (1)...(19): siRNA sense strand
aaccagggaucuuuaaugc

SEQ ID NO: 1208083 - RNA, 19 nt, Homo sapiens
  misc_RNA (1)...(19): siRNA sense strand
gagcaguauggaauucauu

SEQ ID NO: 1208084 - RNA, 19 nt, Homo sapiens
  misc_RNA (1)...(19): siRNA sense strand
uauggcgccugaaaggauu

SEQ ID NO: 1208085 - RNA, 19 nt, Homo sapiens
  misc_RNA (1)...(19): siRNA sense strand
ucugaugucuggagcuuag

SEQ ID NO: 1208086 - RNA, 19 nt, Homo sapiens
  misc_RNA (1)...(19): siRNA sense strand
gugcauuguugaugaggau

SEQ ID NO: 1208087 - RNA, 19 nt, Homo sapiens
  misc_RNA (1)...(19): siRNA sense strand
auaagugcgauucaucaua

SEQ ID NO: 1208088 - RNA, 19 nt, Homo sapiens
  misc_RNA (1)...(19): siRNA sense strand
gaaaaugccagaacauguc

SEQ ID NO: 1208089 - RNA, 19 nt, Homo sapiens
  misc_RNA (1)...(19): siRNA sense strand
caguagcaguuguuaaagg

SEQ ID NO: 1208090 - RNA, 19 nt, Homo sapiens
  misc_RNA (1)...(19): siRNA sense strand
ggaaaaugccagaacaugu

SEQ ID NO: 1208091 - RNA, 19 nt, Homo sapiens
  misc_RNA (1)...(19): siRNA sense strand
cgaaaacagccaaaagaaa

SEQ ID NO: 1208092 - RNA, 19 nt, Homo sapiens
  misc_RNA (1)...(19): siRNA sense strand
ugaauucuauagccaagac

SEQ ID NO: 1208093 - RNA, 19 nt, Homo sapiens
  misc_RNA (1)...(19): siRNA sense strand
caagaggacagguuaagcu

SEQ ID NO: 1208094 - RNA, 19 nt, Homo sapiens
  misc_RNA (1)...(19): siRNA sense strand
acauguccuuggaagaauu

SEQ ID NO: 1208095 - RNA, 19 nt, Homo sapiens
  misc_RNA (1)...(19): siRNA sense strand
aagaauugcaguagcaguu

SEQ ID NO: 1208096 - RNA, 19 nt, Homo sapiens
  misc_RNA (1)...(19): siRNA sense strand
ggggaucuuuggauguaua

SEQ ID NO: 1208097 - RNA, 19 nt, Homo sapiens
  misc_RNA (1)...(19): siRNA sense strand
uuaggaaucucuuuuaugg

SEQ ID NO: 1208098 - RNA, 19 nt, Homo sapiens
  misc_RNA (1)...(19): siRNA sense strand
acgugaagcccuccaauau

SEQ ID NO: 1208099 - RNA, 19 nt, Homo sapiens
  misc_RNA (1)...(19): siRNA sense strand
uguuaaaggccuuacuuau

SEQ ID NO: 1208100 - RNA, 19 nt, Homo sapiens
  misc_RNA (1)...(19): siRNA sense strand
auauuacacuggaacuuca

SEQ ID NO: 1208101 - RNA, 19 nt, Homo sapiens
  misc_RNA (1)...(19): siRNA sense strand
ucggagccauuuguacauu

SEQ ID NO: 1208102 - RNA, 19 nt, Homo sapiens
  misc_RNA (1)...(19): siRNA sense strand
aacacaagaggacagguua

SEQ ID NO: 1208103 - RNA, 19 nt, Homo sapiens
  misc_RNA (1)...(19): siRNA sense strand
gcccuccaauaugcuagua

SEQ ID NO: 1208104 - RNA, 19 nt, Homo sapiens
  misc_RNA (1)...(19): siRNA sense strand
cgugaagcccuccaauaug

SEQ ID NO: 1208105 - RNA, 19 nt, Homo sapiens
  misc_RNA (1)...(19): siRNA sense strand
agaaaggccagcaccugaa

SEQ ID NO: 1208106 - RNA, 19 nt, Homo sapiens
  misc_RNA (1)...(19): siRNA sense strand
ggauguauauaggaaaaug

SEQ ID NO: 1208107 - RNA, 19 nt, Homo sapiens
  misc_RNA (1)...(19): siRNA sense strand
gcgaaaacagccaaaagaa

SEQ ID NO: 1208108 - RNA, 19 nt, Homo sapiens
  misc_RNA (1)...(19): siRNA sense strand
guucucggagccauuugua

SEQ ID NO: 1208109 - RNA, 19 nt, Homo sapiens
  misc_RNA (1)...(19): siRNA sense strand
gcuuaggaaucucuuuuau

SEQ ID NO: 1208110 - RNA, 19 nt, Homo sapiens
  misc_RNA (1)...(19): siRNA sense strand
gagcuuaggaaucucuuuu

SEQ ID NO: 1208111 - RNA, 19 nt, Homo sapiens
  misc_RNA (1)...(19): siRNA sense strand
gucuggagcuuaggaaucu

SEQ ID NO: 1208112 - RNA, 19 nt, Homo sapiens
  misc_RNA (1)...(19): siRNA sense strand
acacaagaggacagguuaa

SEQ ID NO: 1208113 - RNA, 19 nt, Homo sapiens
  misc_RNA (1)...(19): siRNA sense strand
gcaguuguuaaaggccuua

SEQ ID NO: 1208114 - RNA, 19 nt, Homo sapiens
  misc_RNA (1)...(19): siRNA sense strand
ugcgauucaucauauauca

SEQ ID NO: 1208115 - RNA, 19 nt, Homo sapiens
  misc_RNA (1)...(19): siRNA sense strand
guuguuaaaggccuuacuu

SEQ ID NO: 1208116 - RNA, 19 nt, Homo sapiens
  misc_RNA (1)...(19): siRNA sense strand
aagugcgauucaucauaua

SEQ ID NO: 1208117 - RNA, 19 nt, Homo sapiens
  misc_RNA (1)...(19): siRNA sense strand
ccagaacauguccuuggaa

SEQ ID NO: 1208118 - RNA, 19 nt, Homo sapiens
  misc_RNA (1)...(19): siRNA sense strand
uaaugccucuccagcuucu

SEQ ID NO: 1208119 - RNA, 19 nt, Homo sapiens
  misc_RNA (1)...(19): siRNA sense strand
gcaguagcaguuguuaaag

SEQ ID NO: 1208120 - RNA, 19 nt, Homo sapiens
  misc_RNA (1)...(19): siRNA sense strand
ggagcuuaggaaucucuuu

SEQ ID NO: 1208121 - RNA, 19 nt, Homo sapiens
  misc_RNA (1)...(19): siRNA sense strand
gcacucagcuggugaauuc

SEQ ID NO: 1208122 - RNA, 19 nt, Homo sapiens
  misc_RNA (1)...(19): siRNA sense strand
gaacauguccuuggaagaa

SEQ ID NO: 1208123 - RNA, 19 nt, Homo sapiens
  misc_RNA (1)...(19): siRNA sense strand
uaagugcgauucaucauau

SEQ ID NO: 1208124 - RNA, 19 nt, Homo sapiens
  misc_RNA (1)...(19): siRNA sense strand
guuaaaggccuuacuuauu

SEQ ID NO: 1208125 - RNA, 19 nt, Homo sapiens
  misc_RNA (1)...(19): siRNA sense strand
gcaguucaaugauggaaau

SEQ ID NO: 1208126 - RNA, 19 nt, Homo sapiens
  misc_RNA (1)...(19): siRNA sense strand
gccagcaccugaagaauug

SEQ ID NO: 1208127 - RNA, 19 nt, Homo sapiens
  misc_RNA (1)...(19): siRNA sense strand
agaagcaaauuaugucuga

SEQ ID NO: 1208128 - RNA, 19 nt, Homo sapiens
  misc_RNA (1)...(19): siRNA sense strand
uaaaggccuuacuuauuug

SEQ ID NO: 1208129 - RNA, 19 nt, Homo sapiens
  misc_RNA (1)...(19): siRNA sense strand
ggucauacuacuagauauu

SEQ ID NO: 1208130 - RNA, 19 nt, Homo sapiens
  misc_RNA (1)...(19): siRNA sense strand
gugaagcccuccaauaugc

SEQ ID NO: 1208131 - RNA, 19 nt, Homo sapiens
  misc_RNA (1)...(19): siRNA sense strand
gacgugaagcccuccaaua

SEQ ID NO: 1208132 - RNA, 19 nt, Homo sapiens
  misc_RNA (1)...(19): siRNA sense strand
uggaacaaaugcuuauaug

SEQ ID NO: 1208133 - RNA, 19 nt, Homo sapiens
  misc_RNA (1)...(19): siRNA sense strand
ggagccauuuguacauuuc

SEQ ID NO: 1208134 - RNA, 19 nt, Homo sapiens
  misc_RNA (1)...(19): siRNA sense strand
ggccagcaccugaagaauu

SEQ ID NO: 1208135 - RNA, 19 nt, Homo sapiens
  misc_RNA (1)...(19): siRNA sense strand
gccagaacauguccuugga

SEQ ID NO: 1208136 - RNA, 19 nt, Homo sapiens
  misc_RNA (1)...(19): siRNA sense strand
gauauuacacuggaacuuc

SEQ ID NO: 1208137 - RNA, 19 nt, Homo sapiens
  misc_RNA (1)...(19): siRNA sense strand
gaaaacagccaaaagaaag

SEQ ID NO: 1208138 - RNA, 19 nt, Homo sapiens
  misc_RNA (1)...(19): siRNA sense strand
ccuccaauaugcuaguaaa

SEQ ID NO: 1208139 - RNA, 19 nt, Homo sapiens
  misc_RNA (1)...(19): siRNA sense strand
gaauugcaguagcaguugu

SEQ ID NO: 1208140 - RNA, 19 nt, Homo sapiens
  misc_RNA (1)...(19): siRNA sense strand
gaucuuuggauguauauag

SEQ ID NO: 1208141 - RNA, 19 nt, Homo sapiens
  misc_RNA (1)...(19): siRNA sense strand
agguuaagcugugugauuu

SEQ ID NO: 1208142 - RNA, 19 nt, Homo sapiens
  misc_RNA (1)...(19): siRNA sense strand
gaagcaaauuaugucugaa

SEQ ID NO: 1208143 - RNA, 19 nt, Homo sapiens
  misc_RNA (1)...(19): siRNA sense strand
ggauuucaauauguacaga

SEQ ID NO: 1208144 - RNA, 19 nt, Homo sapiens
  misc_RNA (1)...(19): siRNA sense strand
cagguuaagcugugugauu

SEQ ID NO: 1208145 - RNA, 19 nt, Homo sapiens
  misc_RNA (1)...(19): siRNA sense strand
ggagcaguauggaauucau

SEQ ID NO: 1208146 - RNA, 19 nt, Homo sapiens
  misc_RNA (1)...(19): siRNA sense strand
ggaacaaaugcuuauaugg

SEQ ID NO: 1208147 - RNA, 19 nt, Homo sapiens
  misc_RNA (1)...(19): siRNA sense strand
gaagcccuccaauaugcua

SEQ ID NO: 1208148 - RNA, 19 nt, Homo sapiens
  misc_RNA (1)...(19): siRNA sense strand
gcagugcauuguugaugag

SEQ ID NO: 1208149 - RNA, 19 nt, Homo sapiens
  misc_RNA (1)...(19): siRNA sense strand
ccaauaugcuaguaaacac

SEQ ID NO: 1208150 - RNA, 19 nt, Homo sapiens
  misc_RNA (1)...(19): siRNA sense strand
gaaaggccagcaccugaag

SEQ ID NO: 1208151 - RNA, 19 nt, Homo sapiens
  misc_RNA (1)...(19): siRNA sense strand
uggaagaauugcaguagca

SEQ ID NO: 1208152 - RNA, 19 nt, Homo sapiens
  misc_RNA (1)...(19): siRNA sense strand
guacauuucaucacucagu

SEQ ID NO: 1208153 - RNA, 19 nt, Homo sapiens
  misc_RNA (1)...(19): siRNA sense strand
cggagccauuuguacauuu

SEQ ID NO: 1208154 - RNA, 19 nt, Homo sapiens
  misc_RNA (1)...(19): siRNA sense strand
uuuaaugccucuccagcuu

SEQ ID NO: 1208155 - RNA, 19 nt, Homo sapiens
  misc_RNA (1)...(19): siRNA sense strand
ugcaguagcaguuguuaaa

SEQ ID NO: 1208156 - RNA, 19 nt, Homo sapiens
  misc_RNA (1)...(19): siRNA sense strand
aaacacaagaggacagguu

SEQ ID NO: 1208157 - RNA, 19 nt, Homo sapiens
  misc_RNA (1)...(19): siRNA sense strand
aaaccagggaucuuuaaug

SEQ ID NO: 1208158 - RNA, 19 nt, Homo sapiens
  misc_RNA (1)...(19): siRNA sense strand
gcuuauauggcgccugaaa

SEQ ID NO: 1208159 - RNA, 19 nt, Homo sapiens
  misc_RNA (1)...(19): siRNA sense strand
aaccagggaucuuuaaugc

SEQ ID NO: 1208160 - RNA, 19 nt, Homo sapiens
  misc_RNA (1)...(19): siRNA sense strand
gagcaguauggaauucauu

SEQ ID NO: 1208161 - RNA, 19 nt, Homo sapiens
  misc_RNA (1)...(19): siRNA sense strand
uauggcgccugaaaggauu

SEQ ID NO: 1208162 - RNA, 19 nt, Homo sapiens
  misc_RNA (1)...(19): siRNA sense strand
ucugaugucuggagcuuag

SEQ ID NO: 1208163 - RNA, 19 nt, Homo sapiens
  misc_RNA (1)...(19): siRNA sense strand
gugcauuguugaugaggau

SEQ ID NO: 1208164 - RNA, 19 nt, Homo sapiens
  misc_RNA (1)...(19): siRNA sense strand
auaagugcgauucaucaua

SEQ ID NO: 1208165 - RNA, 19 nt, Homo sapiens
  misc_RNA (1)...(19): siRNA sense strand
gaaaaugccagaacauguc

SEQ ID NO: 1208166 - RNA, 19 nt, Homo sapiens
  misc_RNA (1)...(19): siRNA sense strand
caguagcaguuguuaaagg

SEQ ID NO: 1208167 - RNA, 19 nt, Homo sapiens
  misc_RNA (1)...(19): siRNA sense strand
ggaaaaugccagaacaugu

SEQ ID NO: 1208168 - RNA, 19 nt, Homo sapiens
  misc_RNA (1)...(19): siRNA sense strand
cgaaaacagccaaaagaaa

SEQ ID NO: 1208169 - RNA, 19 nt, Homo sapiens
  misc_RNA (1)...(19): siRNA sense strand
ugaauucuauagccaagac

SEQ ID NO: 1208170 - RNA, 19 nt, Homo sapiens
  misc_RNA (1)...(19): siRNA sense strand
caagaggacagguuaagcu

SEQ ID NO: 1208171 - RNA, 19 nt, Homo sapiens
  misc_RNA (1)...(19): siRNA sense strand
acauguccuuggaagaauu

SEQ ID NO: 1208172 - RNA, 19 nt, Homo sapiens
  misc_RNA (1)...(19): siRNA sense strand
aagaauugcaguagcaguu

SEQ ID NO: 1208173 - RNA, 19 nt, Homo sapiens
  misc_RNA (1)...(19): siRNA sense strand
ggggaucuuuggauguaua

SEQ ID NO: 1208174 - RNA, 19 nt, Homo sapiens
  misc_RNA (1)...(19): siRNA sense strand
uuaggaaucucuuuuaugg

SEQ ID NO: 1208175 - RNA, 19 nt, Homo sapiens
  misc_RNA (1)...(19): siRNA sense strand
acgugaagcccuccaauau

SEQ ID NO: 1208176 - RNA, 19 nt, Homo sapiens
  misc_RNA (1)...(19): siRNA sense strand
uguuaaaggccuuacuuau

SEQ ID NO: 1208177 - RNA, 19 nt, Homo sapiens
  misc_RNA (1)...(19): siRNA sense strand
auauuacacuggaacuuca

SEQ ID NO: 1208178 - RNA, 19 nt, Homo sapiens
  misc_RNA (1)...(19): siRNA sense strand
ucggagccauuuguacauu

SEQ ID NO: 1208179 - RNA, 19 nt, Homo sapiens
  misc_RNA (1)...(19): siRNA sense strand
aacacaagaggacagguua

SEQ ID NO: 1208180 - RNA, 19 nt, Homo sapiens
  misc_RNA (1)...(19): siRNA sense strand
gcccuccaauaugcuagua

SEQ ID NO: 1208181 - RNA, 19 nt, Homo sapiens
  misc_RNA (1)...(19): siRNA sense strand
cgugaagcccuccaauaug

SEQ ID NO: 1208182 - RNA, 19 nt, Homo sapiens
  misc_RNA (1)...(19): siRNA sense strand
agaaaggccagcaccugaa

SEQ ID NO: 1208183 - RNA, 19 nt, Homo sapiens
  misc_RNA (1)...(19): siRNA sense strand
ggauguauauaggaaaaug

SEQ ID NO: 1208184 - RNA, 19 nt, Homo sapiens
  misc_RNA (1)...(19): siRNA sense strand
ccccauaccuucugguuug

SEQ ID NO: 1208185 - RNA, 19 nt, Homo sapiens
  misc_RNA (1)...(19): siRNA sense strand
gcgaaaacagccaaaagaa

SEQ ID NO: 1208186 - RNA, 19 nt, Homo sapiens
  misc_RNA (1)...(19): siRNA sense strand
guucucggagccauuugua

SEQ ID NO: 1208187 - RNA, 19 nt, Homo sapiens
  misc_RNA (1)...(19): siRNA sense strand
gcuuaggaaucucuuuuau

SEQ ID NO: 1208188 - RNA, 19 nt, Homo sapiens
  misc_RNA (1)...(19): siRNA sense strand
gagcuuaggaaucucuuuu

SEQ ID NO: 1208189 - RNA, 19 nt, Homo sapiens
  misc_RNA (1)...(19): siRNA sense strand
gucuggagcuuaggaaucu

SEQ ID NO: 1208190 - RNA, 19 nt, Homo sapiens
  misc_RNA (1)...(19): siRNA sense strand
acacaagaggacagguuaa

SEQ ID NO: 1208191 - RNA, 19 nt, Homo sapiens
  misc_RNA (1)...(19): siRNA sense strand
gcaguuguuaaaggccuua

SEQ ID NO: 1208192 - RNA, 19 nt, Homo sapiens
  misc_RNA (1)...(19): siRNA sense strand
ugcgauucaucauauauca

SEQ ID NO: 1208193 - RNA, 19 nt, Homo sapiens
  misc_RNA (1)...(19): siRNA sense strand
guuguuaaaggccuuacuu

SEQ ID NO: 1208194 - RNA, 19 nt, Homo sapiens
  misc_RNA (1)...(19): siRNA sense strand
aagugcgauucaucauaua

SEQ ID NO: 1208195 - RNA, 19 nt, Homo sapiens
  misc_RNA (1)...(19): siRNA sense strand
ccagaacauguccuuggaa

SEQ ID NO: 1208196 - RNA, 19 nt, Homo sapiens
  misc_RNA (1)...(19): siRNA sense strand
gcaguagcaguuguuaaag

SEQ ID NO: 1208197 - RNA, 19 nt, Homo sapiens
  misc_RNA (1)...(19): siRNA sense strand
uaaugccucuccagcuucu

SEQ ID NO: 1208198 - RNA, 19 nt, Homo sapiens
  misc_RNA (1)...(19): siRNA sense strand
ggagcuuaggaaucucuuu

SEQ ID NO: 1208199 - RNA, 19 nt, Homo sapiens
  misc_RNA (1)...(19): siRNA sense strand
gcacucagcuggugaauuc

SEQ ID NO: 1208200 - RNA, 19 nt, Homo sapiens
  misc_RNA (1)...(19): siRNA sense strand
gaacauguccuuggaagaa

SEQ ID NO: 1208201 - RNA, 19 nt, Homo sapiens
  misc_RNA (1)...(19): siRNA sense strand
uaagugcgauucaucauau

SEQ ID NO: 1208202 - RNA, 19 nt, Homo sapiens
  misc_RNA (1)...(19): siRNA sense strand
guuaaaggccuuacuuauu

SEQ ID NO: 1208203 - RNA, 19 nt, Homo sapiens
  misc_RNA (1)...(19): siRNA sense strand
gcaguucaaugauggaaau

SEQ ID NO: 1208204 - RNA, 19 nt, Homo sapiens
  misc_RNA (1)...(19): siRNA sense strand
gccagcaccugaagaauug

SEQ ID NO: 1208205 - RNA, 19 nt, Homo sapiens
  misc_RNA (1)...(19): siRNA sense strand
agaagcaaauuaugucuga

SEQ ID NO: 1208206 - RNA, 19 nt, Homo sapiens
  misc_RNA (1)...(19): siRNA sense strand
uaaaggccuuacuuauuug

SEQ ID NO: 1208207 - RNA, 19 nt, Homo sapiens
  misc_RNA (1)...(19): siRNA sense strand
ggucauacuacuagauauu

SEQ ID NO: 1208208 - RNA, 19 nt, Homo sapiens
  misc_RNA (1)...(19): siRNA sense strand
gugaagcccuccaauaugc

SEQ ID NO: 1208209 - RNA, 19 nt, Homo sapiens
  misc_RNA (1)...(19): siRNA sense strand
gacgugaagcccuccaaua

SEQ ID NO: 1208210 - RNA, 19 nt, Homo sapiens
  misc_RNA (1)...(19): siRNA sense strand
uggaacaaaugcuuauaug

SEQ ID NO: 1208211 - RNA, 19 nt, Homo sapiens
  misc_RNA (1)...(19): siRNA sense strand
ggagccauuuguacauuuc

SEQ ID NO: 1208212 - RNA, 19 nt, Homo sapiens
  misc_RNA (1)...(19): siRNA sense strand
ggccagcaccugaagaauu

SEQ ID NO: 1208213 - RNA, 19 nt, Homo sapiens
  misc_RNA (1)...(19): siRNA sense strand
gccagaacauguccuugga

SEQ ID NO: 1208214 - RNA, 19 nt, Homo sapiens
  misc_RNA (1)...(19): siRNA sense strand
gauauuacacuggaacuuc

SEQ ID NO: 1208215 - RNA, 19 nt, Homo sapiens
  misc_RNA (1)...(19): siRNA sense strand
gaaaacagccaaaagaaag

SEQ ID NO: 1208216 - RNA, 19 nt, Homo sapiens
  misc_RNA (1)...(19): siRNA sense strand
ccuccaauaugcuaguaaa

SEQ ID NO: 1208217 - RNA, 19 nt, Homo sapiens
  misc_RNA (1)...(19): siRNA sense strand
gaauugcaguagcaguugu

SEQ ID NO: 1208218 - RNA, 19 nt, Homo sapiens
  misc_RNA (1)...(19): siRNA sense strand
gaucuuuggauguauauag

SEQ ID NO: 1208219 - RNA, 19 nt, Homo sapiens
  misc_RNA (1)...(19): siRNA sense strand
agguuaagcugugugauuu

SEQ ID NO: 1208220 - RNA, 19 nt, Homo sapiens
  misc_RNA (1)...(19): siRNA sense strand
gaagcaaauuaugucugaa

SEQ ID NO: 1208221 - RNA, 19 nt, Homo sapiens
  misc_RNA (1)...(19): siRNA sense strand
ggauuucaauauguacaga

SEQ ID NO: 1208222 - RNA, 19 nt, Homo sapiens
  misc_RNA (1)...(19): siRNA sense strand
cagguuaagcugugugauu

SEQ ID NO: 1208223 - RNA, 19 nt, Homo sapiens
  misc_RNA (1)...(19): siRNA sense strand
ggagcaguauggaauucau

SEQ ID NO: 1208224 - RNA, 19 nt, Homo sapiens
  misc_RNA (1)...(19): siRNA sense strand
ggaacaaaugcuuauaugg

SEQ ID NO: 1208225 - RNA, 19 nt, Homo sapiens
  misc_RNA (1)...(19): siRNA sense strand
gaagcccuccaauaugcua

SEQ ID NO: 1208226 - RNA, 19 nt, Homo sapiens
  misc_RNA (1)...(19): siRNA sense strand
gcagugcauuguugaugag

SEQ ID NO: 1208227 - RNA, 19 nt, Homo sapiens
  misc_RNA (1)...(19): siRNA sense strand
ccaauaugcuaguaaacac

SEQ ID NO: 1208228 - RNA, 19 nt, Homo sapiens
  misc_RNA (1)...(19): siRNA sense strand
gaaaggccagcaccugaag

SEQ ID NO: 1208229 - RNA, 19 nt, Homo sapiens
  misc_RNA (1)...(19): siRNA sense strand
uggaagaauugcaguagca

SEQ ID NO: 1208230 - RNA, 19 nt, Homo sapiens
  misc_RNA (1)...(19): siRNA sense strand
guacauuucaucacucagu

SEQ ID NO: 1208231 - RNA, 19 nt, Homo sapiens
  misc_RNA (1)...(19): siRNA sense strand
cggagccauuuguacauuu

SEQ ID NO: 1208232 - RNA, 19 nt, Homo sapiens
  misc_RNA (1)...(19): siRNA sense strand
uuuaaugccucuccagcuu

SEQ ID NO: 1208233 - RNA, 19 nt, Homo sapiens
  misc_RNA (1)...(19): siRNA sense strand
ugcaguagcaguuguuaaa

SEQ ID NO: 1208234 - RNA, 19 nt, Homo sapiens
  misc_RNA (1)...(19): siRNA sense strand
aaacacaagaggacagguu

SEQ ID NO: 1208235 - RNA, 19 nt, Homo sapiens
  misc_RNA (1)...(19): siRNA sense strand
aaaccagggaucuuuaaug

SEQ ID NO: 1208236 - RNA, 19 nt, Homo sapiens
  misc_RNA (1)...(19): siRNA sense strand
gcuuauauggcgccugaaa

SEQ ID NO: 1208237 - RNA, 19 nt, Homo sapiens
  misc_RNA (1)...(19): siRNA sense strand
aaccagggaucuuuaaugc

SEQ ID NO: 1208238 - RNA, 19 nt, Homo sapiens
  misc_RNA (1)...(19): siRNA sense strand
gagcaguauggaauucauu

SEQ ID NO: 1208239 - RNA, 19 nt, Homo sapiens
  misc_RNA (1)...(19): siRNA sense strand
uauggcgccugaaaggauu

SEQ ID NO: 1208240 - RNA, 19 nt, Homo sapiens
  misc_RNA (1)...(19): siRNA sense strand
ucugaugucuggagcuuag

SEQ ID NO: 1208241 - RNA, 19 nt, Homo sapiens
  misc_RNA (1)...(19): siRNA sense strand
gugcauuguugaugaggau

SEQ ID NO: 1208242 - RNA, 19 nt, Homo sapiens
  misc_RNA (1)...(19): siRNA sense strand
auaagugcgauucaucaua

SEQ ID NO: 1208243 - RNA, 19 nt, Homo sapiens
  misc_RNA (1)...(19): siRNA sense strand
gaaaaugccagaacauguc

SEQ ID NO: 1208244 - RNA, 19 nt, Homo sapiens
  misc_RNA (1)...(19): siRNA sense strand
caguagcaguuguuaaagg

SEQ ID NO: 1208245 - RNA, 19 nt, Homo sapiens
  misc_RNA (1)...(19): siRNA sense strand
ggaaaaugccagaacaugu

SEQ ID NO: 1208246 - RNA, 19 nt, Homo sapiens
  misc_RNA (1)...(19): siRNA sense strand
cgaaaacagccaaaagaaa

SEQ ID NO: 1208247 - RNA, 19 nt, Homo sapiens
  misc_RNA (1)...(19): siRNA sense strand
ugaauucuauagccaagac

SEQ ID NO: 1208248 - RNA, 19 nt, Homo sapiens
  misc_RNA (1)...(19): siRNA sense strand
caagaggacagguuaagcu

SEQ ID NO: 1208249 - RNA, 19 nt, Homo sapiens
  misc_RNA (1)...(19): siRNA sense strand
acauguccuuggaagaauu

SEQ ID NO: 1208250 - RNA, 19 nt, Homo sapiens
  misc_RNA (1)...(19): siRNA sense strand
aagaauugcaguagcaguu

SEQ ID NO: 1208251 - RNA, 19 nt, Homo sapiens
  misc_RNA (1)...(19): siRNA sense strand
ggggaucuuuggauguaua

SEQ ID NO: 1208252 - RNA, 19 nt, Homo sapiens
  misc_RNA (1)...(19): siRNA sense strand
uuaggaaucucuuuuaugg

SEQ ID NO: 1208253 - RNA, 19 nt, Homo sapiens
  misc_RNA (1)...(19): siRNA sense strand
acgugaagcccuccaauau

SEQ ID NO: 1208254 - RNA, 19 nt, Homo sapiens
  misc_RNA (1)...(19): siRNA sense strand
uguuaaaggccuuacuuau

SEQ ID NO: 1208255 - RNA, 19 nt, Homo sapiens
  misc_RNA (1)...(19): siRNA sense strand
auauuacacuggaacuuca

SEQ ID NO: 1208256 - RNA, 19 nt, Homo sapiens
  misc_RNA (1)...(19): siRNA sense strand
ucggagccauuuguacauu

SEQ ID NO: 1208257 - RNA, 19 nt, Homo sapiens
  misc_RNA (1)...(19): siRNA sense strand
aacacaagaggacagguua

SEQ ID NO: 1208258 - RNA, 19 nt, Homo sapiens
  misc_RNA (1)...(19): siRNA sense strand
gcccuccaauaugcuagua

SEQ ID NO: 1208259 - RNA, 19 nt, Homo sapiens
  misc_RNA (1)...(19): siRNA sense strand
cgugaagcccuccaauaug

SEQ ID NO: 1208260 - RNA, 19 nt, Homo sapiens
  misc_RNA (1)...(19): siRNA sense strand
agaaaggccagcaccugaa

SEQ ID NO: 1208261 - RNA, 19 nt, Homo sapiens
  misc_RNA (1)...(19): siRNA sense strand
ggauguauauaggaaaaug

SEQ ID NO: 1208262 - RNA, 19 nt, Homo sapiens
  misc_RNA (1)...(19): siRNA sense strand
gcgaaaacagccaaaagaa

SEQ ID NO: 1208263 - RNA, 19 nt, Homo sapiens
  misc_RNA (1)...(19): siRNA sense strand
guucucggagccauuugua

SEQ ID NO: 1208264 - RNA, 19 nt, Homo sapiens
  misc_RNA (1)...(19): siRNA sense strand
gcuuaggaaucucuuuuau

SEQ ID NO: 1208265 - RNA, 19 nt, Homo sapiens
  misc_RNA (1)...(19): siRNA sense strand
gagcuuaggaaucucuuuu

SEQ ID NO: 1208266 - RNA, 19 nt, Homo sapiens
  misc_RNA (1)...(19): siRNA sense strand
gucuggagcuuaggaaucu

SEQ ID NO: 1208267 - RNA, 19 nt, Homo sapiens
  misc_RNA (1)...(19): siRNA sense strand
acacaagaggacagguuaa

SEQ ID NO: 1208268 - RNA, 19 nt, Homo sapiens
  misc_RNA (1)...(19): siRNA sense strand
gcaguuguuaaaggccuua

SEQ ID NO: 1208269 - RNA, 19 nt, Homo sapiens
  misc_RNA (1)...(19): siRNA sense strand
ugcgauucaucauauauca

SEQ ID NO: 1208270 - RNA, 19 nt, Homo sapiens
  misc_RNA (1)...(19): siRNA sense strand
guuguuaaaggccuuacuu

SEQ ID NO: 1208271 - RNA, 19 nt, Homo sapiens
  misc_RNA (1)...(19): siRNA sense strand
aagugcgauucaucauaua

SEQ ID NO: 1208272 - RNA, 19 nt, Homo sapiens
  misc_RNA (1)...(19): siRNA sense strand
ccagaacauguccuuggaa

SEQ ID NO: 1208273 - RNA, 19 nt, Homo sapiens
  misc_RNA (1)...(19): siRNA sense strand
uaaugccucuccagcuucu

SEQ ID NO: 1208274 - RNA, 19 nt, Homo sapiens
  misc_RNA (1)...(19): siRNA sense strand
gcaguagcaguuguuaaag

SEQ ID NO: 1208275 - RNA, 19 nt, Homo sapiens
  misc_RNA (1)...(19): siRNA sense strand
ggagcuuaggaaucucuuu

SEQ ID NO: 1208276 - RNA, 19 nt, Homo sapiens
  misc_RNA (1)...(19): siRNA sense strand
gcacucagcuggugaauuc

SEQ ID NO: 1208277 - RNA, 19 nt, Homo sapiens
  misc_RNA (1)...(19): siRNA sense strand
gaacauguccuuggaagaa

SEQ ID NO: 1208278 - RNA, 19 nt, Homo sapiens
  misc_RNA (1)...(19): siRNA sense strand
uaagugcgauucaucauau

SEQ ID NO: 1208279 - RNA, 19 nt, Homo sapiens
  misc_RNA (1)...(19): siRNA sense strand
guuaaaggccuuacuuauu

SEQ ID NO: 1208280 - RNA, 19 nt, Homo sapiens
  misc_RNA (1)...(19): siRNA sense strand
gcaguucaaugauggaaau

SEQ ID NO: 1208281 - RNA, 19 nt, Homo sapiens
  misc_RNA (1)...(19): siRNA sense strand
gccagcaccugaagaauug

SEQ ID NO: 1208282 - RNA, 19 nt, Homo sapiens
  misc_RNA (1)...(19): siRNA sense strand
agaagcaaauuaugucuga

SEQ ID NO: 1208283 - RNA, 19 nt, Homo sapiens
  misc_RNA (1)...(19): siRNA sense strand
uaaaggccuuacuuauuug

SEQ ID NO: 1208284 - RNA, 19 nt, Homo sapiens
  misc_RNA (1)...(19): siRNA sense strand
ggucauacuacuagauauu

SEQ ID NO: 1208285 - RNA, 19 nt, Homo sapiens
  misc_RNA (1)...(19): siRNA sense strand
gugaagcccuccaauaugc

SEQ ID NO: 1208286 - RNA, 19 nt, Homo sapiens
  misc_RNA (1)...(19): siRNA sense strand
gacgugaagcccuccaaua

SEQ ID NO: 1208287 - RNA, 19 nt, Homo sapiens
  misc_RNA (1)...(19): siRNA sense strand
uggaacaaaugcuuauaug

SEQ ID NO: 1208288 - RNA, 19 nt, Homo sapiens
  misc_RNA (1)...(19): siRNA sense strand
ggagccauuuguacauuuc

SEQ ID NO: 1208289 - RNA, 19 nt, Homo sapiens
  misc_RNA (1)...(19): siRNA sense strand
ggccagcaccugaagaauu

SEQ ID NO: 1208290 - RNA, 19 nt, Homo sapiens
  misc_RNA (1)...(19): siRNA sense strand
gccagaacauguccuugga

SEQ ID NO: 1208291 - RNA, 19 nt, Homo sapiens
  misc_RNA (1)...(19): siRNA sense strand
gauauuacacuggaacuuc

SEQ ID NO: 1208292 - RNA, 19 nt, Homo sapiens
  misc_RNA (1)...(19): siRNA sense strand
gaaaacagccaaaagaaag

SEQ ID NO: 1208293 - RNA, 19 nt, Homo sapiens
  misc_RNA (1)...(19): siRNA sense strand
ccuccaauaugcuaguaaa

SEQ ID NO: 1208294 - RNA, 19 nt, Homo sapiens
  misc_RNA (1)...(19): siRNA sense strand
gaauugcaguagcaguugu

SEQ ID NO: 1208295 - RNA, 19 nt, Homo sapiens
  misc_RNA (1)...(19): siRNA sense strand
gaucuuuggauguauauag

SEQ ID NO: 1208296 - RNA, 19 nt, Homo sapiens
  misc_RNA (1)...(19): siRNA sense strand
agguuaagcugugugauuu

SEQ ID NO: 1208297 - RNA, 19 nt, Homo sapiens
  misc_RNA (1)...(19): siRNA sense strand
gaagcaaauuaugucugaa

SEQ ID NO: 1208298 - RNA, 19 nt, Homo sapiens
  misc_RNA (1)...(19): siRNA sense strand
ggauuucaauauguacaga

SEQ ID NO: 1208299 - RNA, 19 nt, Homo sapiens
  misc_RNA (1)...(19): siRNA sense strand
cagguuaagcugugugauu

SEQ ID NO: 1208300 - RNA, 19 nt, Homo sapiens
  misc_RNA (1)...(19): siRNA sense strand
ggagcaguauggaauucau

SEQ ID NO: 1208301 - RNA, 19 nt, Homo sapiens
  misc_RNA (1)...(19): siRNA sense strand
ggaacaaaugcuuauaugg

SEQ ID NO: 1208302 - RNA, 19 nt, Homo sapiens
  misc_RNA (1)...(19): siRNA sense strand
gaagcccuccaauaugcua

SEQ ID NO: 1208303 - RNA, 19 nt, Homo sapiens
  misc_RNA (1)...(19): siRNA sense strand
gcagugcauuguugaugag

SEQ ID NO: 1208304 - RNA, 19 nt, Homo sapiens
  misc_RNA (1)...(19): siRNA sense strand
ccaauaugcuaguaaacac

SEQ ID NO: 1208305 - RNA, 19 nt, Homo sapiens
  misc_RNA (1)...(19): siRNA sense strand
gaaaggccagcaccugaag

SEQ ID NO: 1208306 - RNA, 19 nt, Homo sapiens
  misc_RNA (1)...(19): siRNA sense strand
uggaagaauugcaguagca

SEQ ID NO: 1208307 - RNA, 19 nt, Homo sapiens
  misc_RNA (1)...(19): siRNA sense strand
guacauuucaucacucagu

SEQ ID NO: 1208308 - RNA, 19 nt, Homo sapiens
  misc_RNA (1)...(19): siRNA sense strand
cggagccauuuguacauuu

SEQ ID NO: 1208309 - RNA, 19 nt, Homo sapiens
  misc_RNA (1)...(19): siRNA sense strand
uuuaaugccucuccagcuu

SEQ ID NO: 1208310 - RNA, 19 nt, Homo sapiens
  misc_RNA (1)...(19): siRNA sense strand
ugcaguagcaguuguuaaa

SEQ ID NO: 1208311 - RNA, 19 nt, Homo sapiens
  misc_RNA (1)...(19): siRNA sense strand
aaacacaagaggacagguu

SEQ ID NO: 1208312 - RNA, 19 nt, Homo sapiens
  misc_RNA (1)...(19): siRNA sense strand
aaaccagggaucuuuaaug

SEQ ID NO: 1208313 - RNA, 19 nt, Homo sapiens
  misc_RNA (1)...(19): siRNA sense strand
gcuuauauggcgccugaaa

SEQ ID NO: 1208314 - RNA, 19 nt, Homo sapiens
  misc_RNA (1)...(19): siRNA sense strand
aaccagggaucuuuaaugc

SEQ ID NO: 1208315 - RNA, 19 nt, Homo sapiens
  misc_RNA (1)...(19): siRNA sense strand
gagcaguauggaauucauu

SEQ ID NO: 1208316 - RNA, 19 nt, Homo sapiens
  misc_RNA (1)...(19): siRNA sense strand
uauggcgccugaaaggauu

SEQ ID NO: 1208317 - RNA, 19 nt, Homo sapiens
  misc_RNA (1)...(19): siRNA sense strand
ucugaugucuggagcuuag

SEQ ID NO: 1208318 - RNA, 19 nt, Homo sapiens
  misc_RNA (1)...(19): siRNA sense strand
gugcauuguugaugaggau

SEQ ID NO: 1208319 - RNA, 19 nt, Homo sapiens
  misc_RNA (1)...(19): siRNA sense strand
auaagugcgauucaucaua

SEQ ID NO: 1208320 - RNA, 19 nt, Homo sapiens
  misc_RNA (1)...(19): siRNA sense strand
gaaaaugccagaacauguc

SEQ ID NO: 1208321 - RNA, 19 nt, Homo sapiens
  misc_RNA (1)...(19): siRNA sense strand
caguagcaguuguuaaagg

SEQ ID NO: 1208322 - RNA, 19 nt, Homo sapiens
  misc_RNA (1)...(19): siRNA sense strand
ggaaaaugccagaacaugu

SEQ ID NO: 1208323 - RNA, 19 nt, Homo sapiens
  misc_RNA (1)...(19): siRNA sense strand
cgaaaacagccaaaagaaa

SEQ ID NO: 1208324 - RNA, 19 nt, Homo sapiens
  misc_RNA (1)...(19): siRNA sense strand
ugaauucuauagccaagac

SEQ ID NO: 1208325 - RNA, 19 nt, Homo sapiens
  misc_RNA (1)...(19): siRNA sense strand
caagaggacagguuaagcu

SEQ ID NO: 1208326 - RNA, 19 nt, Homo sapiens
  misc_RNA (1)...(19): siRNA sense strand
acauguccuuggaagaauu

SEQ ID NO: 1208327 - RNA, 19 nt, Homo sapiens
  misc_RNA (1)...(19): siRNA sense strand
aagaauugcaguagcaguu

SEQ ID NO: 1208328 - RNA, 19 nt, Homo sapiens
  misc_RNA (1)...(19): siRNA sense strand
ggggaucuuuggauguaua

SEQ ID NO: 1208329 - RNA, 19 nt, Homo sapiens
  misc_RNA (1)...(19): siRNA sense strand
uuaggaaucucuuuuaugg

SEQ ID NO: 1208330 - RNA, 19 nt, Homo sapiens
  misc_RNA (1)...(19): siRNA sense strand
acgugaagcccuccaauau

SEQ ID NO: 1208331 - RNA, 19 nt, Homo sapiens
  misc_RNA (1)...(19): siRNA sense strand
uguuaaaggccuuacuuau

SEQ ID NO: 1208332 - RNA, 19 nt, Homo sapiens
  misc_RNA (1)...(19): siRNA sense strand
auauuacacuggaacuuca

SEQ ID NO: 1208333 - RNA, 19 nt, Homo sapiens
  misc_RNA (1)...(19): siRNA sense strand
ucggagccauuuguacauu

SEQ ID NO: 1208334 - RNA, 19 nt, Homo sapiens
  misc_RNA (1)...(19): siRNA sense strand
aacacaagaggacagguua

SEQ ID NO: 1208335 - RNA, 19 nt, Homo sapiens
  misc_RNA (1)...(19): siRNA sense strand
gcccuccaauaugcuagua

SEQ ID NO: 1208336 - RNA, 19 nt, Homo sapiens
  misc_RNA (1)...(19): siRNA sense strand
cgugaagcccuccaauaug

SEQ ID NO: 1208337 - RNA, 19 nt, Homo sapiens
  misc_RNA (1)...(19): siRNA sense strand
agaaaggccagcaccugaa

SEQ ID NO: 1208338 - RNA, 19 nt, Homo sapiens
  misc_RNA (1)...(19): siRNA sense strand
ggauguauauaggaaaaug

SEQ ID NO: 1208339 - RNA, 19 nt, Homo sapiens
  misc_RNA (1)...(19): siRNA sense strand
gcgaaaacagccaaaagaa

SEQ ID NO: 1208340 - RNA, 19 nt, Homo sapiens
  misc_RNA (1)...(19): siRNA sense strand
guucucggagccauuugua

SEQ ID NO: 1208341 - RNA, 19 nt, Homo sapiens
  misc_RNA (1)...(19): siRNA sense strand
gcuuaggaaucucuuuuau

SEQ ID NO: 1208342 - RNA, 19 nt, Homo sapiens
  misc_RNA (1)...(19): siRNA sense strand
gagcuuaggaaucucuuuu

SEQ ID NO: 1208343 - RNA, 19 nt, Homo sapiens
  misc_RNA (1)...(19): siRNA sense strand
gucuggagcuuaggaaucu

SEQ ID NO: 1208344 - RNA, 19 nt, Homo sapiens
  misc_RNA (1)...(19): siRNA sense strand
acacaagaggacagguuaa

SEQ ID NO: 1208345 - RNA, 19 nt, Homo sapiens
  misc_RNA (1)...(19): siRNA sense strand
gcaguuguuaaaggccuua

SEQ ID NO: 1208346 - RNA, 19 nt, Homo sapiens
  misc_RNA (1)...(19): siRNA sense strand
ugcgauucaucauauauca

SEQ ID NO: 1208347 - RNA, 19 nt, Homo sapiens
  misc_RNA (1)...(19): siRNA sense strand
guuguuaaaggccuuacuu

SEQ ID NO: 1208348 - RNA, 19 nt, Homo sapiens
  misc_RNA (1)...(19): siRNA sense strand
aagugcgauucaucauaua

SEQ ID NO: 1208349 - RNA, 19 nt, Homo sapiens
  misc_RNA (1)...(19): siRNA sense strand
ccagaacauguccuuggaa

SEQ ID NO: 1208350 - RNA, 19 nt, Homo sapiens
  misc_RNA (1)...(19): siRNA sense strand
uaaugccucuccagcuucu

SEQ ID NO: 1208351 - RNA, 19 nt, Homo sapiens
  misc_RNA (1)...(19): siRNA sense strand
gcaguagcaguuguuaaag

SEQ ID NO: 1208352 - RNA, 19 nt, Homo sapiens
  misc_RNA (1)...(19): siRNA sense strand
ggagcuuaggaaucucuuu

SEQ ID NO: 1208353 - RNA, 19 nt, Homo sapiens
  misc_RNA (1)...(19): siRNA sense strand
gcacucagcuggugaauuc

SEQ ID NO: 1208354 - RNA, 19 nt, Homo sapiens
  misc_RNA (1)...(19): siRNA sense strand
gaacauguccuuggaagaa

SEQ ID NO: 1208355 - RNA, 19 nt, Homo sapiens
  misc_RNA (1)...(19): siRNA sense strand
uaagugcgauucaucauau

SEQ ID NO: 1208356 - RNA, 19 nt, Homo sapiens
  misc_RNA (1)...(19): siRNA sense strand
guuaaaggccuuacuuauu

SEQ ID NO: 1208357 - RNA, 19 nt, Homo sapiens
  misc_RNA (1)...(19): siRNA sense strand
gcaguucaaugauggaaau

SEQ ID NO: 1208358 - RNA, 19 nt, Homo sapiens
  misc_RNA (1)...(19): siRNA sense strand
gccagcaccugaagaauug

SEQ ID NO: 1208359 - RNA, 19 nt, Homo sapiens
  misc_RNA (1)...(19): siRNA sense strand
agaagcaaauuaugucuga

SEQ ID NO: 1208360 - RNA, 19 nt, Homo sapiens
  misc_RNA (1)...(19): siRNA sense strand
uaaaggccuuacuuauuug

SEQ ID NO: 1208361 - RNA, 19 nt, Homo sapiens
  misc_RNA (1)...(19): siRNA sense strand
ggucauacuacuagauauu

SEQ ID NO: 1208362 - RNA, 19 nt, Homo sapiens
  misc_RNA (1)...(19): siRNA sense strand
gugaagcccuccaauaugc

SEQ ID NO: 1208363 - RNA, 19 nt, Homo sapiens
  misc_RNA (1)...(19): siRNA sense strand
gacgugaagcccuccaaua

SEQ ID NO: 1208364 - RNA, 19 nt, Homo sapiens
  misc_RNA (1)...(19): siRNA sense strand
uggaacaaaugcuuauaug

SEQ ID NO: 1208365 - RNA, 19 nt, Homo sapiens
  misc_RNA (1)...(19): siRNA sense strand
ggagccauuuguacauuuc

SEQ ID NO: 1208366 - RNA, 19 nt, Homo sapiens
  misc_RNA (1)...(19): siRNA sense strand
ggccagcaccugaagaauu

SEQ ID NO: 1208367 - RNA, 19 nt, Homo sapiens
  misc_RNA (1)...(19): siRNA sense strand
gccagaacauguccuugga

SEQ ID NO: 1208368 - RNA, 19 nt, Homo sapiens
  misc_RNA (1)...(19): siRNA sense strand
gauauuacacuggaacuuc

SEQ ID NO: 1208369 - RNA, 19 nt, Homo sapiens
  misc_RNA (1)...(19): siRNA sense strand
gaaaacagccaaaagaaag

SEQ ID NO: 1208370 - RNA, 19 nt, Homo sapiens
  misc_RNA (1)...(19): siRNA sense strand
ccuccaauaugcuaguaaa

SEQ ID NO: 1208371 - RNA, 19 nt, Homo sapiens
  misc_RNA (1)...(19): siRNA sense strand
gaauugcaguagcaguugu

SEQ ID NO: 1208372 - RNA, 19 nt, Homo sapiens
  misc_RNA (1)...(19): siRNA sense strand
gaucuuuggauguauauag

SEQ ID NO: 1208373 - RNA, 19 nt, Homo sapiens
  misc_RNA (1)...(19): siRNA sense strand
agguuaagcugugugauuu

SEQ ID NO: 1208374 - RNA, 19 nt, Homo sapiens
  misc_RNA (1)...(19): siRNA sense strand
gaagcaaauuaugucugaa

SEQ ID NO: 1208375 - RNA, 19 nt, Homo sapiens
  misc_RNA (1)...(19): siRNA sense strand
ggauuucaauauguacaga

SEQ ID NO: 1208376 - RNA, 19 nt, Homo sapiens
  misc_RNA (1)...(19): siRNA sense strand
cagguuaagcugugugauu

SEQ ID NO: 1208377 - RNA, 19 nt, Homo sapiens
  misc_RNA (1)...(19): siRNA sense strand
ggagcaguauggaauucau

SEQ ID NO: 1208378 - RNA, 19 nt, Homo sapiens
  misc_RNA (1)...(19): siRNA sense strand
ggaacaaaugcuuauaugg

SEQ ID NO: 1208379 - RNA, 19 nt, Homo sapiens
  misc_RNA (1)...(19): siRNA sense strand
gaagcccuccaauaugcua

SEQ ID NO: 1208380 - RNA, 19 nt, Homo sapiens
  misc_RNA (1)...(19): siRNA sense strand
gcagugcauuguugaugag

SEQ ID NO: 1208381 - RNA, 19 nt, Homo sapiens
  misc_RNA (1)...(19): siRNA sense strand
ccaauaugcuaguaaacac

SEQ ID NO: 1208382 - RNA, 19 nt, Homo sapiens
  misc_RNA (1)...(19): siRNA sense strand
gaaaggccagcaccugaag

SEQ ID NO: 1208383 - RNA, 19 nt, Homo sapiens
  misc_RNA (1)...(19): siRNA sense strand
uggaagaauugcaguagca

SEQ ID NO: 1208384 - RNA, 19 nt, Homo sapiens
  misc_RNA (1)...(19): siRNA sense strand
guacauuucaucacucagu

SEQ ID NO: 1208385 - RNA, 19 nt, Homo sapiens
  misc_RNA (1)...(19): siRNA sense strand
cggagccauuuguacauuu

SEQ ID NO: 1208386 - RNA, 19 nt, Homo sapiens
  misc_RNA (1)...(19): siRNA sense strand
uuuaaugccucuccagcuu

SEQ ID NO: 1208387 - RNA, 19 nt, Homo sapiens
  misc_RNA (1)...(19): siRNA sense strand
ugcaguagcaguuguuaaa

SEQ ID NO: 1208388 - RNA, 19 nt, Homo sapiens
  misc_RNA (1)...(19): siRNA sense strand
aaacacaagaggacagguu

SEQ ID NO: 1208389 - RNA, 19 nt, Homo sapiens
  misc_RNA (1)...(19): siRNA sense strand
aaaccagggaucuuuaaug

SEQ ID NO: 1208390 - RNA, 19 nt, Homo sapiens
  misc_RNA (1)...(19): siRNA sense strand
gcuuauauggcgccugaaa

SEQ ID NO: 1208391 - RNA, 19 nt, Homo sapiens
  misc_RNA (1)...(19): siRNA sense strand
aaccagggaucuuuaaugc

SEQ ID NO: 1208392 - RNA, 19 nt, Homo sapiens
  misc_RNA (1)...(19): siRNA sense strand
gagcaguauggaauucauu

SEQ ID NO: 1208393 - RNA, 19 nt, Homo sapiens
  misc_RNA (1)...(19): siRNA sense strand
uauggcgccugaaaggauu

SEQ ID NO: 1208394 - RNA, 19 nt, Homo sapiens
  misc_RNA (1)...(19): siRNA sense strand
ucugaugucuggagcuuag

SEQ ID NO: 1208395 - RNA, 19 nt, Homo sapiens
  misc_RNA (1)...(19): siRNA sense strand
gugcauuguugaugaggau

SEQ ID NO: 1208396 - RNA, 19 nt, Homo sapiens
  misc_RNA (1)...(19): siRNA sense strand
auaagugcgauucaucaua

SEQ ID NO: 1208397 - RNA, 19 nt, Homo sapiens
  misc_RNA (1)...(19): siRNA sense strand
gaaaaugccagaacauguc

SEQ ID NO: 1208398 - RNA, 19 nt, Homo sapiens
  misc_RNA (1)...(19): siRNA sense strand
caguagcaguuguuaaagg

SEQ ID NO: 1208399 - RNA, 19 nt, Homo sapiens
  misc_RNA (1)...(19): siRNA sense strand
ggaaaaugccagaacaugu

SEQ ID NO: 1208400 - RNA, 19 nt, Homo sapiens
  misc_RNA (1)...(19): siRNA sense strand
cgaaaacagccaaaagaaa

SEQ ID NO: 1208401 - RNA, 19 nt, Homo sapiens
  misc_RNA (1)...(19): siRNA sense strand
ugaauucuauagccaagac

SEQ ID NO: 1208402 - RNA, 19 nt, Homo sapiens
  misc_RNA (1)...(19): siRNA sense strand
caagaggacagguuaagcu

SEQ ID NO: 1208403 - RNA, 19 nt, Homo sapiens
  misc_RNA (1)...(19): siRNA sense strand
acauguccuuggaagaauu

SEQ ID NO: 1208404 - RNA, 19 nt, Homo sapiens
  misc_RNA (1)...(19): siRNA sense strand
aagaauugcaguagcaguu

SEQ ID NO: 1208405 - RNA, 19 nt, Homo sapiens
  misc_RNA (1)...(19): siRNA sense strand
ggggaucuuuggauguaua

SEQ ID NO: 1208406 - RNA, 19 nt, Homo sapiens
  misc_RNA (1)...(19): siRNA sense strand
uuaggaaucucuuuuaugg

SEQ ID NO: 1208407 - RNA, 19 nt, Homo sapiens
  misc_RNA (1)...(19): siRNA sense strand
acgugaagcccuccaauau

SEQ ID NO: 1208408 - RNA, 19 nt, Homo sapiens
  misc_RNA (1)...(19): siRNA sense strand
uguuaaaggccuuacuuau

SEQ ID NO: 1208409 - RNA, 19 nt, Homo sapiens
  misc_RNA (1)...(19): siRNA sense strand
auauuacacuggaacuuca

SEQ ID NO: 1208410 - RNA, 19 nt, Homo sapiens
  misc_RNA (1)...(19): siRNA sense strand
ucggagccauuuguacauu

SEQ ID NO: 1208411 - RNA, 19 nt, Homo sapiens
  misc_RNA (1)...(19): siRNA sense strand
aacacaagaggacagguua

SEQ ID NO: 1208412 - RNA, 19 nt, Homo sapiens
  misc_RNA (1)...(19): siRNA sense strand
gcccuccaauaugcuagua

SEQ ID NO: 1208413 - RNA, 19 nt, Homo sapiens
  misc_RNA (1)...(19): siRNA sense strand
cgugaagcccuccaauaug

SEQ ID NO: 1208414 - RNA, 19 nt, Homo sapiens
  misc_RNA (1)...(19): siRNA sense strand
agaaaggccagcaccugaa

SEQ ID NO: 1208415 - RNA, 19 nt, Homo sapiens
  misc_RNA (1)...(19): siRNA sense strand
ggauguauauaggaaaaug

SEQ ID NO: 1208416 - RNA, 19 nt, Homo sapiens
  misc_RNA (1)...(19): siRNA sense strand
gcgaaaacagccaaaagaa

SEQ ID NO: 1208417 - RNA, 19 nt, Homo sapiens
  misc_RNA (1)...(19): siRNA sense strand
guucucggagccauuugua

SEQ ID NO: 1208418 - RNA, 19 nt, Homo sapiens
  misc_RNA (1)...(19): siRNA sense strand
gcuuaggaaucucuuuuau

SEQ ID NO: 1208419 - RNA, 19 nt, Homo sapiens
  misc_RNA (1)...(19): siRNA sense strand
gagcuuaggaaucucuuuu

SEQ ID NO: 1208420 - RNA, 19 nt, Homo sapiens
  misc_RNA (1)...(19): siRNA sense strand
gucuggagcuuaggaaucu

SEQ ID NO: 1208421 - RNA, 19 nt, Homo sapiens
  misc_RNA (1)...(19): siRNA sense strand
acacaagaggacagguuaa

SEQ ID NO: 1208422 - RNA, 19 nt, Homo sapiens
  misc_RNA (1)...(19): siRNA sense strand
gcaguuguuaaaggccuua

SEQ ID NO: 1208423 - RNA, 19 nt, Homo sapiens
  misc_RNA (1)...(19): siRNA sense strand
ugcgauucaucauauauca

SEQ ID NO: 1208424 - RNA, 19 nt, Homo sapiens
  misc_RNA (1)...(19): siRNA sense strand
guuguuaaaggccuuacuu

SEQ ID NO: 1208425 - RNA, 19 nt, Homo sapiens
  misc_RNA (1)...(19): siRNA sense strand
aagugcgauucaucauaua

SEQ ID NO: 1208426 - RNA, 19 nt, Homo sapiens
  misc_RNA (1)...(19): siRNA sense strand
ccagaacauguccuuggaa

SEQ ID NO: 1208427 - RNA, 19 nt, Homo sapiens
  misc_RNA (1)...(19): siRNA sense strand
uaaugccucuccagcuucu

SEQ ID NO: 1208428 - RNA, 19 nt, Homo sapiens
  misc_RNA (1)...(19): siRNA sense strand
gcaguagcaguuguuaaag

SEQ ID NO: 1208429 - RNA, 19 nt, Homo sapiens
  misc_RNA (1)...(19): siRNA sense strand
ggagcuuaggaaucucuuu

SEQ ID NO: 1208430 - RNA, 19 nt, Homo sapiens
  misc_RNA (1)...(19): siRNA sense strand
gcacucagcuggugaauuc

SEQ ID NO: 1208431 - RNA, 19 nt, Homo sapiens
  misc_RNA (1)...(19): siRNA sense strand
gaacauguccuuggaagaa

SEQ ID NO: 1208432 - RNA, 19 nt, Homo sapiens
  misc_RNA (1)...(19): siRNA sense strand
uaagugcgauucaucauau

SEQ ID NO: 1208433 - RNA, 19 nt, Homo sapiens
  misc_RNA (1)...(19): siRNA sense strand
guuaaaggccuuacuuauu

SEQ ID NO: 1208434 - RNA, 19 nt, Homo sapiens
  misc_RNA (1)...(19): siRNA sense strand
gcaguucaaugauggaaau

SEQ ID NO: 1208435 - RNA, 19 nt, Homo sapiens
  misc_RNA (1)...(19): siRNA sense strand
gccagcaccugaagaauug

SEQ ID NO: 1208436 - RNA, 19 nt, Homo sapiens
  misc_RNA (1)...(19): siRNA sense strand
agaagcaaauuaugucuga

SEQ ID NO: 1208437 - RNA, 19 nt, Homo sapiens
  misc_RNA (1)...(19): siRNA sense strand
uaaaggccuuacuuauuug

SEQ ID NO: 1208438 - RNA, 19 nt, Homo sapiens
  misc_RNA (1)...(19): siRNA sense strand
ggucauacuacuagauauu

SEQ ID NO: 1208439 - RNA, 19 nt, Homo sapiens
  misc_RNA (1)...(19): siRNA sense strand
gugaagcccuccaauaugc

SEQ ID NO: 1208440 - RNA, 19 nt, Homo sapiens
  misc_RNA (1)...(19): siRNA sense strand
gacgugaagcccuccaaua

SEQ ID NO: 1208441 - RNA, 19 nt, Homo sapiens
  misc_RNA (1)...(19): siRNA sense strand
uggaacaaaugcuuauaug

SEQ ID NO: 1208442 - RNA, 19 nt, Homo sapiens
  misc_RNA (1)...(19): siRNA sense strand
ggagccauuuguacauuuc

SEQ ID NO: 1208443 - RNA, 19 nt, Homo sapiens
  misc_RNA (1)...(19): siRNA sense strand
ggccagcaccugaagaauu

SEQ ID NO: 1208444 - RNA, 19 nt, Homo sapiens
  misc_RNA (1)...(19): siRNA sense strand
gccagaacauguccuugga

SEQ ID NO: 1208445 - RNA, 19 nt, Homo sapiens
  misc_RNA (1)...(19): siRNA sense strand
gauauuacacuggaacuuc

SEQ ID NO: 1208446 - RNA, 19 nt, Homo sapiens
  misc_RNA (1)...(19): siRNA sense strand
gaaaacagccaaaagaaag

SEQ ID NO: 1208447 - RNA, 19 nt, Homo sapiens
  misc_RNA (1)...(19): siRNA sense strand
ccuccaauaugcuaguaaa

SEQ ID NO: 1208448 - RNA, 19 nt, Homo sapiens
  misc_RNA (1)...(19): siRNA sense strand
gaauugcaguagcaguugu

SEQ ID NO: 1208449 - RNA, 19 nt, Homo sapiens
  misc_RNA (1)...(19): siRNA sense strand
gaucuuuggauguauauag

SEQ ID NO: 1208450 - RNA, 19 nt, Homo sapiens
  misc_RNA (1)...(19): siRNA sense strand
agguuaagcugugugauuu

SEQ ID NO: 1208451 - RNA, 19 nt, Homo sapiens
  misc_RNA (1)...(19): siRNA sense strand
gaagcaaauuaugucugaa

SEQ ID NO: 1208452 - RNA, 19 nt, Homo sapiens
  misc_RNA (1)...(19): siRNA sense strand
ggauuucaauauguacaga

SEQ ID NO: 1208453 - RNA, 19 nt, Homo sapiens
  misc_RNA (1)...(19): siRNA sense strand
cagguuaagcugugugauu

SEQ ID NO: 1208454 - RNA, 19 nt, Homo sapiens
  misc_RNA (1)...(19): siRNA sense strand
ggagcaguauggaauucau

SEQ ID NO: 1208455 - RNA, 19 nt, Homo sapiens
  misc_RNA (1)...(19): siRNA sense strand
ggaacaaaugcuuauaugg

SEQ ID NO: 1208456 - RNA, 19 nt, Homo sapiens
  misc_RNA (1)...(19): siRNA sense strand
gaagcccuccaauaugcua

SEQ ID NO: 1208457 - RNA, 19 nt, Homo sapiens
  misc_RNA (1)...(19): siRNA sense strand
gcagugcauuguugaugag

SEQ ID NO: 1208458 - RNA, 19 nt, Homo sapiens
  misc_RNA (1)...(19): siRNA sense strand
ccaauaugcuaguaaacac

SEQ ID NO: 1208459 - RNA, 19 nt, Homo sapiens
  misc_RNA (1)...(19): siRNA sense strand
gaaaggccagcaccugaag

SEQ ID NO: 1208460 - RNA, 19 nt, Homo sapiens
  misc_RNA (1)...(19): siRNA sense strand
uggaagaauugcaguagca

SEQ ID NO: 1208461 - RNA, 19 nt, Homo sapiens
  misc_RNA (1)...(19): siRNA sense strand
guacauuucaucacucagu

SEQ ID NO: 1208462 - RNA, 19 nt, Homo sapiens
  misc_RNA (1)...(19): siRNA sense strand
cggagccauuuguacauuu

SEQ ID NO: 1208463 - RNA, 19 nt, Homo sapiens
  misc_RNA (1)...(19): siRNA sense strand
uuuaaugccucuccagcuu

SEQ ID NO: 1208464 - RNA, 19 nt, Homo sapiens
  misc_RNA (1)...(19): siRNA sense strand
ugcaguagcaguuguuaaa

SEQ ID NO: 1208465 - RNA, 19 nt, Homo sapiens
  misc_RNA (1)...(19): siRNA sense strand
aaacacaagaggacagguu

SEQ ID NO: 1208466 - RNA, 19 nt, Homo sapiens
  misc_RNA (1)...(19): siRNA sense strand
aaaccagggaucuuuaaug

SEQ ID NO: 1208467 - RNA, 19 nt, Homo sapiens
  misc_RNA (1)...(19): siRNA sense strand
gcuuauauggcgccugaaa

SEQ ID NO: 1208468 - RNA, 19 nt, Homo sapiens
  misc_RNA (1)...(19): siRNA sense strand
aaccagggaucuuuaaugc

SEQ ID NO: 1208469 - RNA, 19 nt, Homo sapiens
  misc_RNA (1)...(19): siRNA sense strand
gagcaguauggaauucauu

SEQ ID NO: 1208470 - RNA, 19 nt, Homo sapiens
  misc_RNA (1)...(19): siRNA sense strand
uauggcgccugaaaggauu

SEQ ID NO: 1208471 - RNA, 19 nt, Homo sapiens
  misc_RNA (1)...(19): siRNA sense strand
ucugaugucuggagcuuag

SEQ ID NO: 1208472 - RNA, 19 nt, Homo sapiens
  misc_RNA (1)...(19): siRNA sense strand
gugcauuguugaugaggau

SEQ ID NO: 1208473 - RNA, 19 nt, Homo sapiens
  misc_RNA (1)...(19): siRNA sense strand
auaagugcgauucaucaua

SEQ ID NO: 1208474 - RNA, 19 nt, Homo sapiens
  misc_RNA (1)...(19): siRNA sense strand
gaaaaugccagaacauguc

SEQ ID NO: 1208475 - RNA, 19 nt, Homo sapiens
  misc_RNA (1)...(19): siRNA sense strand
caguagcaguuguuaaagg

SEQ ID NO: 1208476 - RNA, 19 nt, Homo sapiens
  misc_RNA (1)...(19): siRNA sense strand
ggaaaaugccagaacaugu

SEQ ID NO: 1208477 - RNA, 19 nt, Homo sapiens
  misc_RNA (1)...(19): siRNA sense strand
cgaaaacagccaaaagaaa

SEQ ID NO: 1208478 - RNA, 19 nt, Homo sapiens
  misc_RNA (1)...(19): siRNA sense strand
ugaauucuauagccaagac

SEQ ID NO: 1208479 - RNA, 19 nt, Homo sapiens
  misc_RNA (1)...(19): siRNA sense strand
caagaggacagguuaagcu

SEQ ID NO: 1208480 - RNA, 19 nt, Homo sapiens
  misc_RNA (1)...(19): siRNA sense strand
acauguccuuggaagaauu

SEQ ID NO: 1208481 - RNA, 19 nt, Homo sapiens
  misc_RNA (1)...(19): siRNA sense strand
aagaauugcaguagcaguu

SEQ ID NO: 1208482 - RNA, 19 nt, Homo sapiens
  misc_RNA (1)...(19): siRNA sense strand
ggggaucuuuggauguaua

SEQ ID NO: 1208483 - RNA, 19 nt, Homo sapiens
  misc_RNA (1)...(19): siRNA sense strand
uuaggaaucucuuuuaugg

SEQ ID NO: 1208484 - RNA, 19 nt, Homo sapiens
  misc_RNA (1)...(19): siRNA sense strand
acgugaagcccuccaauau

SEQ ID NO: 1208485 - RNA, 19 nt, Homo sapiens
  misc_RNA (1)...(19): siRNA sense strand
uguuaaaggccuuacuuau

SEQ ID NO: 1208486 - RNA, 19 nt, Homo sapiens
  misc_RNA (1)...(19): siRNA sense strand
auauuacacuggaacuuca

SEQ ID NO: 1208487 - RNA, 19 nt, Homo sapiens
  misc_RNA (1)...(19): siRNA sense strand
ucggagccauuuguacauu

SEQ ID NO: 1208488 - RNA, 19 nt, Homo sapiens
  misc_RNA (1)...(19): siRNA sense strand
aacacaagaggacagguua

SEQ ID NO: 1208489 - RNA, 19 nt, Homo sapiens
  misc_RNA (1)...(19): siRNA sense strand
gcccuccaauaugcuagua

SEQ ID NO: 1208490 - RNA, 19 nt, Homo sapiens
  misc_RNA (1)...(19): siRNA sense strand
cgugaagcccuccaauaug

SEQ ID NO: 1208491 - RNA, 19 nt, Homo sapiens
  misc_RNA (1)...(19): siRNA sense strand
agaaaggccagcaccugaa

SEQ ID NO: 1208492 - RNA, 19 nt, Homo sapiens
  misc_RNA (1)...(19): siRNA sense strand
ggauguauauaggaaaaug

SEQ ID NO: 1208493 - RNA, 19 nt, Homo sapiens
  misc_RNA (1)...(19): siRNA sense strand
ccccauaccuucugguuug

SEQ ID NO: 1208494 - RNA, 19 nt, Homo sapiens
  misc_RNA (1)...(19): siRNA sense strand
gcgaaaacagccaaaagaa

SEQ ID NO: 1208495 - RNA, 19 nt, Homo sapiens
  misc_RNA (1)...(19): siRNA sense strand
guucucggagccauuugua

SEQ ID NO: 1208496 - RNA, 19 nt, Homo sapiens
  misc_RNA (1)...(19): siRNA sense strand
gcuuaggaaucucuuuuau

SEQ ID NO: 1208497 - RNA, 19 nt, Homo sapiens
  misc_RNA (1)...(19): siRNA sense strand
gagcuuaggaaucucuuuu

SEQ ID NO: 1208498 - RNA, 19 nt, Homo sapiens
  misc_RNA (1)...(19): siRNA sense strand
gucuggagcuuaggaaucu

SEQ ID NO: 1208499 - RNA, 19 nt, Homo sapiens
  misc_RNA (1)...(19): siRNA sense strand
acacaagaggacagguuaa

SEQ ID NO: 1208500 - RNA, 19 nt, Homo sapiens
  misc_RNA (1)...(19): siRNA sense strand
gcaguuguuaaaggccuua

SEQ ID NO: 1208501 - RNA, 19 nt, Homo sapiens
  misc_RNA (1)...(19): siRNA sense strand
ugcgauucaucauauauca

SEQ ID NO: 1208502 - RNA, 19 nt, Homo sapiens
  misc_RNA (1)...(19): siRNA sense strand
guuguuaaaggccuuacuu

SEQ ID NO: 1208503 - RNA, 19 nt, Homo sapiens
  misc_RNA (1)...(19): siRNA sense strand
aagugcgauucaucauaua

SEQ ID NO: 1208504 - RNA, 19 nt, Homo sapiens
  misc_RNA (1)...(19): siRNA sense strand
ccagaacauguccuuggaa

SEQ ID NO: 1208505 - RNA, 19 nt, Homo sapiens
  misc_RNA (1)...(19): siRNA sense strand
gcaguagcaguuguuaaag

SEQ ID NO: 1208506 - RNA, 19 nt, Homo sapiens
  misc_RNA (1)...(19): siRNA sense strand
uaaugccucuccagcuucu

SEQ ID NO: 1208507 - RNA, 19 nt, Homo sapiens
  misc_RNA (1)...(19): siRNA sense strand
ggagcuuaggaaucucuuu

SEQ ID NO: 1208508 - RNA, 19 nt, Homo sapiens
  misc_RNA (1)...(19): siRNA sense strand
gcacucagcuggugaauuc

SEQ ID NO: 1208509 - RNA, 19 nt, Homo sapiens
  misc_RNA (1)...(19): siRNA sense strand
gaacauguccuuggaagaa

SEQ ID NO: 1208510 - RNA, 19 nt, Homo sapiens
  misc_RNA (1)...(19): siRNA sense strand
uaagugcgauucaucauau

SEQ ID NO: 1208511 - RNA, 19 nt, Homo sapiens
  misc_RNA (1)...(19): siRNA sense strand
guuaaaggccuuacuuauu

SEQ ID NO: 1208512 - RNA, 19 nt, Homo sapiens
  misc_RNA (1)...(19): siRNA sense strand
gcaguucaaugauggaaau

SEQ ID NO: 1208513 - RNA, 19 nt, Homo sapiens
  misc_RNA (1)...(19): siRNA sense strand
gccagcaccugaagaauug

SEQ ID NO: 1208514 - RNA, 19 nt, Homo sapiens
  misc_RNA (1)...(19): siRNA sense strand
agaagcaaauuaugucuga

SEQ ID NO: 1208515 - RNA, 19 nt, Homo sapiens
  misc_RNA (1)...(19): siRNA sense strand
uaaaggccuuacuuauuug

SEQ ID NO: 1208516 - RNA, 19 nt, Homo sapiens
  misc_RNA (1)...(19): siRNA sense strand
ggucauacuacuagauauu

SEQ ID NO: 1208517 - RNA, 19 nt, Homo sapiens
  misc_RNA (1)...(19): siRNA sense strand
gugaagcccuccaauaugc

SEQ ID NO: 1208518 - RNA, 19 nt, Homo sapiens
  misc_RNA (1)...(19): siRNA sense strand
gacgugaagcccuccaaua

SEQ ID NO: 1208519 - RNA, 19 nt, Homo sapiens
  misc_RNA (1)...(19): siRNA sense strand
uggaacaaaugcuuauaug

SEQ ID NO: 1208520 - RNA, 19 nt, Homo sapiens
  misc_RNA (1)...(19): siRNA sense strand
ggagccauuuguacauuuc

SEQ ID NO: 1208521 - RNA, 19 nt, Homo sapiens
  misc_RNA (1)...(19): siRNA sense strand
ggccagcaccugaagaauu

SEQ ID NO: 1208522 - RNA, 19 nt, Homo sapiens
  misc_RNA (1)...(19): siRNA sense strand
gccagaacauguccuugga

SEQ ID NO: 1208523 - RNA, 19 nt, Homo sapiens
  misc_RNA (1)...(19): siRNA sense strand
gauauuacacuggaacuuc

SEQ ID NO: 1208524 - RNA, 19 nt, Homo sapiens
  misc_RNA (1)...(19): siRNA sense strand
gaaaacagccaaaagaaag

SEQ ID NO: 1208525 - RNA, 19 nt, Homo sapiens
  misc_RNA (1)...(19): siRNA sense strand
ccuccaauaugcuaguaaa

SEQ ID NO: 1208526 - RNA, 19 nt, Homo sapiens
  misc_RNA (1)...(19): siRNA sense strand
gaauugcaguagcaguugu

SEQ ID NO: 1208527 - RNA, 19 nt, Homo sapiens
  misc_RNA (1)...(19): siRNA sense strand
gaucuuuggauguauauag

SEQ ID NO: 1208528 - RNA, 19 nt, Homo sapiens
  misc_RNA (1)...(19): siRNA sense strand
agguuaagcugugugauuu

SEQ ID NO: 1208529 - RNA, 19 nt, Homo sapiens
  misc_RNA (1)...(19): siRNA sense strand
gaagcaaauuaugucugaa

SEQ ID NO: 1208530 - RNA, 19 nt, Homo sapiens
  misc_RNA (1)...(19): siRNA sense strand
ggauuucaauauguacaga

SEQ ID NO: 1208531 - RNA, 19 nt, Homo sapiens
  misc_RNA (1)...(19): siRNA sense strand
cagguuaagcugugugauu

SEQ ID NO: 1208532 - RNA, 19 nt, Homo sapiens
  misc_RNA (1)...(19): siRNA sense strand
ggagcaguauggaauucau

SEQ ID NO: 1208533 - RNA, 19 nt, Homo sapiens
  misc_RNA (1)...(19): siRNA sense strand
ggaacaaaugcuuauaugg

SEQ ID NO: 1208534 - RNA, 19 nt, Homo sapiens
  misc_RNA (1)...(19): siRNA sense strand
gaagcccuccaauaugcua

SEQ ID NO: 1208535 - RNA, 19 nt, Homo sapiens
  misc_RNA (1)...(19): siRNA sense strand
gcagugcauuguugaugag

SEQ ID NO: 1208536 - RNA, 19 nt, Homo sapiens
  misc_RNA (1)...(19): siRNA sense strand
ccaauaugcuaguaaacac

SEQ ID NO: 1208537 - RNA, 19 nt, Homo sapiens
  misc_RNA (1)...(19): siRNA sense strand
gaaaggccagcaccugaag

SEQ ID NO: 1208538 - RNA, 19 nt, Homo sapiens
  misc_RNA (1)...(19): siRNA sense strand
uggaagaauugcaguagca

SEQ ID NO: 1208539 - RNA, 19 nt, Homo sapiens
  misc_RNA (1)...(19): siRNA sense strand
guacauuucaucacucagu

SEQ ID NO: 1208540 - RNA, 19 nt, Homo sapiens
  misc_RNA (1)...(19): siRNA sense strand
cggagccauuuguacauuu

SEQ ID NO: 1208541 - RNA, 19 nt, Homo sapiens
  misc_RNA (1)...(19): siRNA sense strand
uuuaaugccucuccagcuu

SEQ ID NO: 1208542 - RNA, 19 nt, Homo sapiens
  misc_RNA (1)...(19): siRNA sense strand
ugcaguagcaguuguuaaa

SEQ ID NO: 1208543 - RNA, 19 nt, Homo sapiens
  misc_RNA (1)...(19): siRNA sense strand
aaacacaagaggacagguu

SEQ ID NO: 1208544 - RNA, 19 nt, Homo sapiens
  misc_RNA (1)...(19): siRNA sense strand
aaaccagggaucuuuaaug

SEQ ID NO: 1208545 - RNA, 19 nt, Homo sapiens
  misc_RNA (1)...(19): siRNA sense strand
gcuuauauggcgccugaaa

SEQ ID NO: 1208546 - RNA, 19 nt, Homo sapiens
  misc_RNA (1)...(19): siRNA sense strand
aaccagggaucuuuaaugc

SEQ ID NO: 1208547 - RNA, 19 nt, Homo sapiens
  misc_RNA (1)...(19): siRNA sense strand
gagcaguauggaauucauu

SEQ ID NO: 1208548 - RNA, 19 nt, Homo sapiens
  misc_RNA (1)...(19): siRNA sense strand
uauggcgccugaaaggauu

SEQ ID NO: 1208549 - RNA, 19 nt, Homo sapiens
  misc_RNA (1)...(19): siRNA sense strand
ucugaugucuggagcuuag

SEQ ID NO: 1208550 - RNA, 19 nt, Homo sapiens
  misc_RNA (1)...(19): siRNA sense strand
gugcauuguugaugaggau

SEQ ID NO: 1208551 - RNA, 19 nt, Homo sapiens
  misc_RNA (1)...(19): siRNA sense strand
auaagugcgauucaucaua

SEQ ID NO: 1208552 - RNA, 19 nt, Homo sapiens
  misc_RNA (1)...(19): siRNA sense strand
gaaaaugccagaacauguc

SEQ ID NO: 1208553 - RNA, 19 nt, Homo sapiens
  misc_RNA (1)...(19): siRNA sense strand
caguagcaguuguuaaagg

SEQ ID NO: 1208554 - RNA, 19 nt, Homo sapiens
  misc_RNA (1)...(19): siRNA sense strand
ggaaaaugccagaacaugu

SEQ ID NO: 1208555 - RNA, 19 nt, Homo sapiens
  misc_RNA (1)...(19): siRNA sense strand
cgaaaacagccaaaagaaa

SEQ ID NO: 1208556 - RNA, 19 nt, Homo sapiens
  misc_RNA (1)...(19): siRNA sense strand
ugaauucuauagccaagac

SEQ ID NO: 1208557 - RNA, 19 nt, Homo sapiens
  misc_RNA (1)...(19): siRNA sense strand
caagaggacagguuaagcu

SEQ ID NO: 1208558 - RNA, 19 nt, Homo sapiens
  misc_RNA (1)...(19): siRNA sense strand
acauguccuuggaagaauu

SEQ ID NO: 1208559 - RNA, 19 nt, Homo sapiens
  misc_RNA (1)...(19): siRNA sense strand
aagaauugcaguagcaguu

SEQ ID NO: 1208560 - RNA, 19 nt, Homo sapiens
  misc_RNA (1)...(19): siRNA sense strand
ggggaucuuuggauguaua

SEQ ID NO: 1208561 - RNA, 19 nt, Homo sapiens
  misc_RNA (1)...(19): siRNA sense strand
uuaggaaucucuuuuaugg

SEQ ID NO: 1208562 - RNA, 19 nt, Homo sapiens
  misc_RNA (1)...(19): siRNA sense strand
acgugaagcccuccaauau

SEQ ID NO: 1208563 - RNA, 19 nt, Homo sapiens
  misc_RNA (1)...(19): siRNA sense strand
uguuaaaggccuuacuuau

SEQ ID NO: 1208564 - RNA, 19 nt, Homo sapiens
  misc_RNA (1)...(19): siRNA sense strand
auauuacacuggaacuuca

SEQ ID NO: 1208565 - RNA, 19 nt, Homo sapiens
  misc_RNA (1)...(19): siRNA sense strand
ucggagccauuuguacauu

SEQ ID NO: 1208566 - RNA, 19 nt, Homo sapiens
  misc_RNA (1)...(19): siRNA sense strand
aacacaagaggacagguua

SEQ ID NO: 1208567 - RNA, 19 nt, Homo sapiens
  misc_RNA (1)...(19): siRNA sense strand
gcccuccaauaugcuagua

SEQ ID NO: 1208568 - RNA, 19 nt, Homo sapiens
  misc_RNA (1)...(19): siRNA sense strand
cgugaagcccuccaauaug

SEQ ID NO: 1208569 - RNA, 19 nt, Homo sapiens
  misc_RNA (1)...(19): siRNA sense strand
agaaaggccagcaccugaa

SEQ ID NO: 1208570 - RNA, 19 nt, Homo sapiens
  misc_RNA (1)...(19): siRNA sense strand
ggauguauauaggaaaaug

SEQ ID NO: 1208571 - RNA, 19 nt, Homo sapiens
  misc_RNA (1)...(19): siRNA sense strand
gcgaaaacagccaaaagaa

SEQ ID NO: 1208572 - RNA, 19 nt, Homo sapiens
  misc_RNA (1)...(19): siRNA sense strand
guucucggagccauuugua

SEQ ID NO: 1208573 - RNA, 19 nt, Homo sapiens
  misc_RNA (1)...(19): siRNA sense strand
gcuuaggaaucucuuuuau

SEQ ID NO: 1208574 - RNA, 19 nt, Homo sapiens
  misc_RNA (1)...(19): siRNA sense strand
gagcuuaggaaucucuuuu

SEQ ID NO: 1208575 - RNA, 19 nt, Homo sapiens
  misc_RNA (1)...(19): siRNA sense strand
gucuggagcuuaggaaucu

SEQ ID NO: 1208576 - RNA, 19 nt, Homo sapiens
  misc_RNA (1)...(19): siRNA sense strand
acacaagaggacagguuaa

SEQ ID NO: 1208577 - RNA, 19 nt, Homo sapiens
  misc_RNA (1)...(19): siRNA sense strand
gcaguuguuaaaggccuua

SEQ ID NO: 1208578 - RNA, 19 nt, Homo sapiens
  misc_RNA (1)...(19): siRNA sense strand
ugcgauucaucauauauca

SEQ ID NO: 1208579 - RNA, 19 nt, Homo sapiens
  misc_RNA (1)...(19): siRNA sense strand
guuguuaaaggccuuacuu

SEQ ID NO: 1208580 - RNA, 19 nt, Homo sapiens
  misc_RNA (1)...(19): siRNA sense strand
aagugcgauucaucauaua

SEQ ID NO: 1208581 - RNA, 19 nt, Homo sapiens
  misc_RNA (1)...(19): siRNA sense strand
ccagaacauguccuuggaa

SEQ ID NO: 1208582 - RNA, 19 nt, Homo sapiens
  misc_RNA (1)...(19): siRNA sense strand
uaaugccucuccagcuucu

SEQ ID NO: 1208583 - RNA, 19 nt, Homo sapiens
  misc_RNA (1)...(19): siRNA sense strand
gcaguagcaguuguuaaag

SEQ ID NO: 1208584 - RNA, 19 nt, Homo sapiens
  misc_RNA (1)...(19): siRNA sense strand
ggagcuuaggaaucucuuu

SEQ ID NO: 1208585 - RNA, 19 nt, Homo sapiens
  misc_RNA (1)...(19): siRNA sense strand
gcgaauggcuccugaacuu

SEQ ID NO: 1208586 - RNA, 19 nt, Homo sapiens
  misc_RNA (1)...(19): siRNA sense strand
ggauauccgucacaacuuu

SEQ ID NO: 1208587 - RNA, 19 nt, Homo sapiens
  misc_RNA (1)...(19): siRNA sense strand
ccucaccgcuuuccucuua

SEQ ID NO: 1208588 - RNA, 19 nt, Homo sapiens
  misc_RNA (1)...(19): siRNA sense strand
gaagauauauccagugacu

SEQ ID NO: 1208589 - RNA, 19 nt, Homo sapiens
  misc_RNA (1)...(19): siRNA sense strand
ugacagagagaaucaaaua

SEQ ID NO: 1208590 - RNA, 19 nt, Homo sapiens
  misc_RNA (1)...(19): siRNA sense strand
gaaaagagcuguaguucuc

SEQ ID NO: 1208591 - RNA, 19 nt, Homo sapiens
  misc_RNA (1)...(19): siRNA sense strand
cagagagaaucaaauauga

SEQ ID NO: 1208592 - RNA, 19 nt, Homo sapiens
  misc_RNA (1)...(19): siRNA sense strand
gguuuguucuuucuucuua

SEQ ID NO: 1208593 - RNA, 19 nt, Homo sapiens
  misc_RNA (1)...(19): siRNA sense strand
ucagcgagcucuuuggaaa

SEQ ID NO: 1208594 - RNA, 19 nt, Homo sapiens
  misc_RNA (1)...(19): siRNA sense strand
gcagagagcaaguggaguu

SEQ ID NO: 1208595 - RNA, 19 nt, Homo sapiens
  misc_RNA (1)...(19): siRNA sense strand
agauauauccagugacuua

SEQ ID NO: 1208596 - RNA, 19 nt, Homo sapiens
  misc_RNA (1)...(19): siRNA sense strand
gcagcuguauucuaugguu

SEQ ID NO: 1208597 - RNA, 19 nt, Homo sapiens
  misc_RNA (1)...(19): siRNA sense strand
gaacacaccuacuuuuauc

SEQ ID NO: 1208598 - RNA, 19 nt, Homo sapiens
  misc_RNA (1)...(19): siRNA sense strand
gaauggcuccugaacuuga

SEQ ID NO: 1208599 - RNA, 19 nt, Homo sapiens
  misc_RNA (1)...(19): siRNA sense strand
ccacagcucaucuugcuuu

SEQ ID NO: 1208600 - RNA, 19 nt, Homo sapiens
  misc_RNA (1)...(19): siRNA sense strand
cuccuaauguuaugguuua

SEQ ID NO: 1208601 - RNA, 19 nt, Homo sapiens
  misc_RNA (1)...(19): siRNA sense strand
gggcugugcugcuguuugu

SEQ ID NO: 1208602 - RNA, 19 nt, Homo sapiens
  misc_RNA (1)...(19): siRNA sense strand
gugugcagcuguauucuau

SEQ ID NO: 1208603 - RNA, 19 nt, Homo sapiens
  misc_RNA (1)...(19): siRNA sense strand
ucaccgcuuuccucuuaua

SEQ ID NO: 1208604 - RNA, 19 nt, Homo sapiens
  misc_RNA (1)...(19): siRNA sense strand
guucuagaguuucaaggaa

SEQ ID NO: 1208605 - RNA, 19 nt, Homo sapiens
  misc_RNA (1)...(19): siRNA sense strand
guaguucuccuaauguuau

SEQ ID NO: 1208606 - RNA, 19 nt, Homo sapiens
  misc_RNA (1)...(19): siRNA sense strand
acaccuuucuguuuauuug

SEQ ID NO: 1208607 - RNA, 19 nt, Homo sapiens
  misc_RNA (1)...(19): siRNA sense strand
gagaaucaaauaugacuag

SEQ ID NO: 1208608 - RNA, 19 nt, Homo sapiens
  misc_RNA (1)...(19): siRNA sense strand
gcgcucgccuuaccugaga

SEQ ID NO: 1208609 - RNA, 19 nt, Homo sapiens
  misc_RNA (1)...(19): siRNA sense strand
ugagagccacguaccguua

SEQ ID NO: 1208610 - RNA, 19 nt, Homo sapiens
  misc_RNA (1)...(19): siRNA sense strand
uugguuagcugguuuguuc

SEQ ID NO: 1208611 - RNA, 19 nt, Homo sapiens
  misc_RNA (1)...(19): siRNA sense strand
gaugguccucuacuugaua

SEQ ID NO: 1208612 - RNA, 19 nt, Homo sapiens
  misc_RNA (1)...(19): siRNA sense strand
cccaguacuuucuuuggua

SEQ ID NO: 1208613 - RNA, 19 nt, Homo sapiens
  misc_RNA (1)...(19): siRNA sense strand
acagagagaaucaaauaug

SEQ ID NO: 1208614 - RNA, 19 nt, Homo sapiens
  misc_RNA (1)...(19): siRNA sense strand
gcuccucacucccaacauc

SEQ ID NO: 1208615 - RNA, 19 nt, Homo sapiens
  misc_RNA (1)...(19): siRNA sense strand
gagcuguaguucuccuaau

SEQ ID NO: 1208616 - RNA, 19 nt, Homo sapiens
  misc_RNA (1)...(19): siRNA sense strand
guaaugcggacucuauugu

SEQ ID NO: 1208617 - RNA, 19 nt, Homo sapiens
  misc_RNA (1)...(19): siRNA sense strand
augaagauauauccaguga

SEQ ID NO: 1208618 - RNA, 19 nt, Homo sapiens
  misc_RNA (1)...(19): siRNA sense strand
gaagaaccccugacagaga

SEQ ID NO: 1208619 - RNA, 19 nt, Homo sapiens
  misc_RNA (1)...(19): siRNA sense strand
gguauacggacaucgacua

SEQ ID NO: 1208620 - RNA, 19 nt, Homo sapiens
  misc_RNA (1)...(19): siRNA sense strand
cagcuguauucuaugguuu

SEQ ID NO: 1208621 - RNA, 19 nt, Homo sapiens
  misc_RNA (1)...(19): siRNA sense strand
gguaaugcggacucuauug

SEQ ID NO: 1208622 - RNA, 19 nt, Homo sapiens
  misc_RNA (1)...(19): siRNA sense strand
gugcagcuguauucuaugg

SEQ ID NO: 1208623 - RNA, 19 nt, Homo sapiens
  misc_RNA (1)...(19): siRNA sense strand
gcgguaaugcggacucuau

SEQ ID NO: 1208624 - RNA, 19 nt, Homo sapiens
  misc_RNA (1)...(19): siRNA sense strand
gcugguuuguucuuucuuc

SEQ ID NO: 1208625 - RNA, 19 nt, Homo sapiens
  misc_RNA (1)...(19): siRNA sense strand
ugaguacggcugggaauuu

SEQ ID NO: 1208626 - RNA, 19 nt, Homo sapiens
  misc_RNA (1)...(19): siRNA sense strand
gacaaaagccuccgucaau

SEQ ID NO: 1208627 - RNA, 19 nt, Homo sapiens
  misc_RNA (1)...(19): siRNA sense strand
guccucuacuugauaaaga

SEQ ID NO: 1208628 - RNA, 19 nt, Homo sapiens
  misc_RNA (1)...(19): siRNA sense strand
gagagaaucaaauaugacu

SEQ ID NO: 1208629 - RNA, 19 nt, Homo sapiens
  misc_RNA (1)...(19): siRNA sense strand
guuagcugguuuguucuuu

SEQ ID NO: 1208630 - RNA, 19 nt, Homo sapiens
  misc_RNA (1)...(19): siRNA sense strand
gcuuucagcugugucuuuc

SEQ ID NO: 1208631 - RNA, 19 nt, Homo sapiens
  misc_RNA (1)...(19): siRNA sense strand
cagcucaucuugcuuucag

SEQ ID NO: 1208632 - RNA, 19 nt, Homo sapiens
  misc_RNA (1)...(19): siRNA sense strand
guuccauccugauucaaau

SEQ ID NO: 1208633 - RNA, 19 nt, Homo sapiens
  misc_RNA (1)...(19): siRNA sense strand
ggacccugcacgugaggua

SEQ ID NO: 1208634 - RNA, 19 nt, Homo sapiens
  misc_RNA (1)...(19): siRNA sense strand
cugugucuuucgccuauua

SEQ ID NO: 1208635 - RNA, 19 nt, Homo sapiens
  misc_RNA (1)...(19): siRNA sense strand
guggcuggcuccugccuau

SEQ ID NO: 1208636 - RNA, 19 nt, Homo sapiens
  misc_RNA (1)...(19): siRNA sense strand
ggaacacaccuacuuuuau

SEQ ID NO: 1208637 - RNA, 19 nt, Homo sapiens
  misc_RNA (1)...(19): siRNA sense strand
gacagagagaaucaaauau

SEQ ID NO: 1208638 - RNA, 19 nt, Homo sapiens
  misc_RNA (1)...(19): siRNA sense strand
ccuauguucuagaguuuca

SEQ ID NO: 1208639 - RNA, 19 nt, Homo sapiens
  misc_RNA (1)...(19): siRNA sense strand
cagaaugccuuggaaaaga

SEQ ID NO: 1208640 - RNA, 19 nt, Homo sapiens
  misc_RNA (1)...(19): siRNA sense strand
gcgaccuccucaccgcuuu

SEQ ID NO: 1208641 - RNA, 19 nt, Homo sapiens
  misc_RNA (1)...(19): siRNA sense strand
cugccuauguucuagaguu

SEQ ID NO: 1208642 - RNA, 19 nt, Homo sapiens
  misc_RNA (1)...(19): siRNA sense strand
acacuuuccaggcuuguuu

SEQ ID NO: 1208643 - RNA, 19 nt, Homo sapiens
  misc_RNA (1)...(19): siRNA sense strand
gcuuguggcuacugugucu

SEQ ID NO: 1208644 - RNA, 19 nt, Homo sapiens
  misc_RNA (1)...(19): siRNA sense strand
gaguacggcugggaauuuu

SEQ ID NO: 1208645 - RNA, 19 nt, Homo sapiens
  misc_RNA (1)...(19): siRNA sense strand
uccagugacuuacauccuu

SEQ ID NO: 1208646 - RNA, 19 nt, Homo sapiens
  misc_RNA (1)...(19): siRNA sense strand
caauuguuccauccugauu

SEQ ID NO: 1208647 - RNA, 19 nt, Homo sapiens
  misc_RNA (1)...(19): siRNA sense strand
ugccuauguucuagaguuu

SEQ ID NO: 1208648 - RNA, 19 nt, Homo sapiens
  misc_RNA (1)...(19): siRNA sense strand
cuuacugccucuugugaug

SEQ ID NO: 1208649 - RNA, 19 nt, Homo sapiens
  misc_RNA (1)...(19): siRNA sense strand
gcaccucccaguacuuucu

SEQ ID NO: 1208650 - RNA, 19 nt, Homo sapiens
  misc_RNA (1)...(19): siRNA sense strand
gucaauuccgguacacuuu

SEQ ID NO: 1208651 - RNA, 19 nt, Homo sapiens
  misc_RNA (1)...(19): siRNA sense strand
ccagaucgcgacaaugaca

SEQ ID NO: 1208652 - RNA, 19 nt, Homo sapiens
  misc_RNA (1)...(19): siRNA sense strand
auacggacaucgacuacca

SEQ ID NO: 1208653 - RNA, 19 nt, Homo sapiens
  misc_RNA (1)...(19): siRNA sense strand
gcuggcuccugccuauguu

SEQ ID NO: 1208654 - RNA, 19 nt, Homo sapiens
  misc_RNA (1)...(19): siRNA sense strand
acaaaagccuccgucaauu

SEQ ID NO: 1208655 - RNA, 19 nt, Homo sapiens
  misc_RNA (1)...(19): siRNA sense strand
gcuuccagaucgcgacaau

SEQ ID NO: 1208656 - RNA, 19 nt, Homo sapiens
  misc_RNA (1)...(19): siRNA sense strand
acuuacauccuucccauaa

SEQ ID NO: 1208657 - RNA, 19 nt, Homo sapiens
  misc_RNA (1)...(19): siRNA sense strand
uauauccagugacuuacau

SEQ ID NO: 1208658 - RNA, 19 nt, Homo sapiens
  misc_RNA (1)...(19): siRNA sense strand
uuccagaucgcgacaauga

SEQ ID NO: 1208659 - RNA, 19 nt, Homo sapiens
  misc_RNA (1)...(19): siRNA sense strand
ccauccugauucaaauuau

SEQ ID NO: 1208660 - RNA, 19 nt, Homo sapiens
  misc_RNA (1)...(19): siRNA sense strand
uuauuugguuagcugguuu

SEQ ID NO: 1208661 - RNA, 19 nt, Homo sapiens
  misc_RNA (1)...(19): siRNA sense strand
cgucuuugguguggccuuu

SEQ ID NO: 1208662 - RNA, 19 nt, Homo sapiens
  misc_RNA (1)...(19): siRNA sense strand
ugaaaaggcuguguaaucg

SEQ ID NO: 1208663 - RNA, 19 nt, Homo sapiens
  misc_RNA (1)...(19): siRNA sense strand
gcuccugccuauguucuag

SEQ ID NO: 1208664 - RNA, 19 nt, Homo sapiens
  misc_RNA (1)...(19): siRNA sense strand
uguaguucuccuaauguua

SEQ ID NO: 1208665 - RNA, 19 nt, Homo sapiens
  misc_RNA (1)...(19): siRNA sense strand
gggauauccgucacaacuu

SEQ ID NO: 1208666 - RNA, 19 nt, Homo sapiens
  misc_RNA (1)...(19): siRNA sense strand
ccugaugguccucuacuug

SEQ ID NO: 1208667 - RNA, 19 nt, Homo sapiens
  misc_RNA (1)...(19): siRNA sense strand
uagcugguuuguucuuucu

SEQ ID NO: 1208668 - RNA, 19 nt, Homo sapiens
  misc_RNA (1)...(19): siRNA sense strand
gcuguaguucuccuaaugu

SEQ ID NO: 1208669 - RNA, 19 nt, Homo sapiens
  misc_RNA (1)...(19): siRNA sense strand
uuuccaggcuuguuuguac

SEQ ID NO: 1208670 - RNA, 19 nt, Homo sapiens
  misc_RNA (1)...(19): siRNA sense strand
guuucgcggugcauaugaa

SEQ ID NO: 1208671 - RNA, 19 nt, Homo sapiens
  misc_RNA (1)...(19): siRNA sense strand
cgucgcgugugcagcugua

SEQ ID NO: 1208672 - RNA, 19 nt, Homo sapiens
  misc_RNA (1)...(19): siRNA sense strand
ugaugguccucuacuugau

SEQ ID NO: 1208673 - RNA, 19 nt, Homo sapiens
  misc_RNA (1)...(19): siRNA sense strand
uccauccugauucaaauua

SEQ ID NO: 1208674 - RNA, 19 nt, Homo sapiens
  misc_RNA (1)...(19): siRNA sense strand
caacuuuucuccguacuuc

SEQ ID NO: 1208675 - RNA, 19 nt, Homo sapiens
  misc_RNA (1)...(19): siRNA sense strand
ugaugccacuagucagaau

SEQ ID NO: 1208676 - RNA, 19 nt, Homo sapiens
  misc_RNA (1)...(19): siRNA sense strand
cuguaguucuccuaauguu

SEQ ID NO: 1208677 - RNA, 19 nt, Homo sapiens
  misc_RNA (1)...(19): siRNA sense strand
cugaugguccucuacuuga

SEQ ID NO: 1208678 - RNA, 19 nt, Homo sapiens
  misc_RNA (1)...(19): siRNA sense strand
ccugacagagagaaucaaa

SEQ ID NO: 1208679 - RNA, 19 nt, Homo sapiens
  misc_RNA (1)...(19): siRNA sense strand
ugccacagcucaucuugcu

SEQ ID NO: 1208680 - RNA, 19 nt, Homo sapiens
  misc_RNA (1)...(19): siRNA sense strand
gcugugcugcuguuuguag

SEQ ID NO: 1208681 - RNA, 19 nt, Homo sapiens
  misc_RNA (1)...(19): siRNA sense strand
caaaagccuccgucaauuc

SEQ ID NO: 1208682 - RNA, 19 nt, Homo sapiens
  misc_RNA (1)...(19): siRNA sense strand
caacauaaguggcaucaua

SEQ ID NO: 1208683 - RNA, 19 nt, Homo sapiens
  misc_RNA (1)...(19): siRNA sense strand
gagcugagaugauagauuu

SEQ ID NO: 1208684 - RNA, 19 nt, Homo sapiens
  misc_RNA (1)...(19): siRNA sense strand
gaaauaucguugugaaguu

SEQ ID NO: 1208685 - RNA, 19 nt, Homo sapiens
  misc_RNA (1)...(19): siRNA sense strand
caucauagcagccguagua

SEQ ID NO: 1208686 - RNA, 19 nt, Homo sapiens
  misc_RNA (1)...(19): siRNA sense strand
gaauccagcuccugaauac

SEQ ID NO: 1208687 - RNA, 19 nt, Homo sapiens
  misc_RNA (1)...(19): siRNA sense strand
ggaaacgaaugcaaguaga

SEQ ID NO: 1208688 - RNA, 19 nt, Homo sapiens
  misc_RNA (1)...(19): siRNA sense strand
gaauacacaugguuuaagg

SEQ ID NO: 1208689 - RNA, 19 nt, Homo sapiens
  misc_RNA (1)...(19): siRNA sense strand
ggaacucugcaauuuaaua

SEQ ID NO: 1208690 - RNA, 19 nt, Homo sapiens
  misc_RNA (1)...(19): siRNA sense strand
aaaucgagcugagaugaua

SEQ ID NO: 1208691 - RNA, 19 nt, Homo sapiens
  misc_RNA (1)...(19): siRNA sense strand
ggaauccagcuccugaaua

SEQ ID NO: 1208692 - RNA, 19 nt, Homo sapiens
  misc_RNA (1)...(19): siRNA sense strand
caacagcucauacacaaug

SEQ ID NO: 1208693 - RNA, 19 nt, Homo sapiens
  misc_RNA (1)...(19): siRNA sense strand
cuggaacucugcaauuuaa

SEQ ID NO: 1208694 - RNA, 19 nt, Homo sapiens
  misc_RNA (1)...(19): siRNA sense strand
ggaaauaucguugugaagu

SEQ ID NO: 1208695 - RNA, 19 nt, Homo sapiens
  misc_RNA (1)...(19): siRNA sense strand
gcaguuccaucaugugaag

SEQ ID NO: 1208696 - RNA, 19 nt, Homo sapiens
  misc_RNA (1)...(19): siRNA sense strand
cauagcagccguaguaguu

SEQ ID NO: 1208697 - RNA, 19 nt, Homo sapiens
  misc_RNA (1)...(19): siRNA sense strand
cguaguaguuguggccuua

SEQ ID NO: 1208698 - RNA, 19 nt, Homo sapiens
  misc_RNA (1)...(19): siRNA sense strand
ggaagaggauacagucacu

SEQ ID NO: 1208699 - RNA, 19 nt, Homo sapiens
  misc_RNA (1)...(19): siRNA sense strand
ccgcaauucuguuggauau

SEQ ID NO: 1208700 - RNA, 19 nt, Homo sapiens
  misc_RNA (1)...(19): siRNA sense strand
gcaauucuguuggauaucg

SEQ ID NO: 1208701 - RNA, 19 nt, Homo sapiens
  misc_RNA (1)...(19): siRNA sense strand
guuguggccuuagugauuu

SEQ ID NO: 1208702 - RNA, 19 nt, Homo sapiens
  misc_RNA (1)...(19): siRNA sense strand
uacagucacucuggaagua

SEQ ID NO: 1208703 - RNA, 19 nt, Homo sapiens
  misc_RNA (1)...(19): siRNA sense strand
gcacacaaaauccuuuaua

SEQ ID NO: 1208704 - RNA, 19 nt, Homo sapiens
  misc_RNA (1)...(19): siRNA sense strand
gaaacgaaugcaaguagau

SEQ ID NO: 1208705 - RNA, 19 nt, Homo sapiens
  misc_RNA (1)...(19): siRNA sense strand
aaacuggaacucugcaauu

SEQ ID NO: 1208706 - RNA, 19 nt, Homo sapiens
  misc_RNA (1)...(19): siRNA sense strand
gaacucugcaauuuaauac

SEQ ID NO: 1208707 - RNA, 19 nt, Homo sapiens
  misc_RNA (1)...(19): siRNA sense strand
ucaacagacucuucaaggu

SEQ ID NO: 1208708 - RNA, 19 nt, Homo sapiens
  misc_RNA (1)...(19): siRNA sense strand
ggagaauauuccugugaag

SEQ ID NO: 1208709 - RNA, 19 nt, Homo sapiens
  misc_RNA (1)...(19): siRNA sense strand
guaccaagaggcuauuuua

SEQ ID NO: 1208710 - RNA, 19 nt, Homo sapiens
  misc_RNA (1)...(19): siRNA sense strand
uggagaauauuccugugaa

SEQ ID NO: 1208711 - RNA, 19 nt, Homo sapiens
  misc_RNA (1)...(19): siRNA sense strand
gaagugaugcggggaaaua

SEQ ID NO: 1208712 - RNA, 19 nt, Homo sapiens
  misc_RNA (1)...(19): siRNA sense strand
gacuguuuccuccagauua

SEQ ID NO: 1208713 - RNA, 19 nt, Homo sapiens
  misc_RNA (1)...(19): siRNA sense strand
gaugaucucaacauaagug

SEQ ID NO: 1208714 - RNA, 19 nt, Homo sapiens
  misc_RNA (1)...(19): siRNA sense strand
acuggacacuggagaauau

SEQ ID NO: 1208715 - RNA, 19 nt, Homo sapiens
  misc_RNA (1)...(19): siRNA sense strand
accaacagcucauacacaa

SEQ ID NO: 1208716 - RNA, 19 nt, Homo sapiens
  misc_RNA (1)...(19): siRNA sense strand
ggcauccguuugcuagaaa

SEQ ID NO: 1208717 - RNA, 19 nt, Homo sapiens
  misc_RNA (1)...(19): siRNA sense strand
gggaaacgaaugcaaguag

SEQ ID NO: 1208718 - RNA, 19 nt, Homo sapiens
  misc_RNA (1)...(19): siRNA sense strand
ucuaaagccacgacaauga

SEQ ID NO: 1208719 - RNA, 19 nt, Homo sapiens
  misc_RNA (1)...(19): siRNA sense strand
acaaguagucacagcagua

SEQ ID NO: 1208720 - RNA, 19 nt, Homo sapiens
  misc_RNA (1)...(19): siRNA sense strand
cagauuagaguggaagaaa

SEQ ID NO: 1208721 - RNA, 19 nt, Homo sapiens
  misc_RNA (1)...(19): siRNA sense strand
gaagcccgcaauucuguug

SEQ ID NO: 1208722 - RNA, 19 nt, Homo sapiens
  misc_RNA (1)...(19): siRNA sense strand
aacuggaacucugcaauuu

SEQ ID NO: 1208723 - RNA, 19 nt, Homo sapiens
  misc_RNA (1)...(19): siRNA sense strand
gaguggaacugugguagag

SEQ ID NO: 1208724 - RNA, 19 nt, Homo sapiens
  misc_RNA (1)...(19): siRNA sense strand
caucuaaagccacgacaau

SEQ ID NO: 1208725 - RNA, 19 nt, Homo sapiens
  misc_RNA (1)...(19): siRNA sense strand
caaacuggacacuggagaa

SEQ ID NO: 1208726 - RNA, 19 nt, Homo sapiens
  misc_RNA (1)...(19): siRNA sense strand
auuaguggcuccagcaguu

SEQ ID NO: 1208727 - RNA, 19 nt, Homo sapiens
  misc_RNA (1)...(19): siRNA sense strand
ggauacagucacucuggaa

SEQ ID NO: 1208728 - RNA, 19 nt, Homo sapiens
  misc_RNA (1)...(19): siRNA sense strand
guaguuguggccuuaguga

SEQ ID NO: 1208729 - RNA, 19 nt, Homo sapiens
  misc_RNA (1)...(19): siRNA sense strand
cagcaguuccaucauguga

SEQ ID NO: 1208730 - RNA, 19 nt, Homo sapiens
  misc_RNA (1)...(19): siRNA sense strand
gcaauuuaauacuguuucc

SEQ ID NO: 1208731 - RNA, 19 nt, Homo sapiens
  misc_RNA (1)...(19): siRNA sense strand
ucacagcaguagaguacca

SEQ ID NO: 1208732 - RNA, 19 nt, Homo sapiens
  misc_RNA (1)...(19): siRNA sense strand
uggcauccguuugcuagaa

SEQ ID NO: 1208733 - RNA, 19 nt, Homo sapiens
  misc_RNA (1)...(19): siRNA sense strand
ccugaauacacaugguuua

SEQ ID NO: 1208734 - RNA, 19 nt, Homo sapiens
  misc_RNA (1)...(19): siRNA sense strand
cagucacucuggaaguauu

SEQ ID NO: 1208735 - RNA, 19 nt, Homo sapiens
  misc_RNA (1)...(19): siRNA sense strand
ggggaaauaucguugugaa

SEQ ID NO: 1208736 - RNA, 19 nt, Homo sapiens
  misc_RNA (1)...(19): siRNA sense strand
gguguaugcuaugcucaga

SEQ ID NO: 1208737 - RNA, 19 nt, Homo sapiens
  misc_RNA (1)...(19): siRNA sense strand
gcuagaaaaucccagacuu

SEQ ID NO: 1208738 - RNA, 19 nt, Homo sapiens
  misc_RNA (1)...(19): siRNA sense strand
acuggaacucugcaauuua

SEQ ID NO: 1208739 - RNA, 19 nt, Homo sapiens
  misc_RNA (1)...(19): siRNA sense strand
ccuuagugauuuccguuug

SEQ ID NO: 1208740 - RNA, 19 nt, Homo sapiens
  misc_RNA (1)...(19): siRNA sense strand
gugaagcccgcaauucugu

SEQ ID NO: 1208741 - RNA, 19 nt, Homo sapiens
  misc_RNA (1)...(19): siRNA sense strand
gggaauccagcuccugaau

SEQ ID NO: 1208742 - RNA, 19 nt, Homo sapiens
  misc_RNA (1)...(19): siRNA sense strand
gacaaugagugaaaaugau

SEQ ID NO: 1208743 - RNA, 19 nt, Homo sapiens
  misc_RNA (1)...(19): siRNA sense strand
uagcagccguaguaguugu

SEQ ID NO: 1208744 - RNA, 19 nt, Homo sapiens
  misc_RNA (1)...(19): siRNA sense strand
gauuagaguggaagaaacu

SEQ ID NO: 1208745 - RNA, 19 nt, Homo sapiens
  misc_RNA (1)...(19): siRNA sense strand
acucugcaauuuaauacug

SEQ ID NO: 1208746 - RNA, 19 nt, Homo sapiens
  misc_RNA (1)...(19): siRNA sense strand
cccaaaagaccaacaagua

SEQ ID NO: 1208747 - RNA, 19 nt, Homo sapiens
  misc_RNA (1)...(19): siRNA sense strand
gcugagaugauagauuuca

SEQ ID NO: 1208748 - RNA, 19 nt, Homo sapiens
  misc_RNA (1)...(19): siRNA sense strand
gagugucuccuuugucuac

SEQ ID NO: 1208749 - RNA, 19 nt, Homo sapiens
  misc_RNA (1)...(19): siRNA sense strand
cugaauacacaugguuuaa

SEQ ID NO: 1208750 - RNA, 19 nt, Homo sapiens
  misc_RNA (1)...(19): siRNA sense strand
cgacaaugagugaaaauga

SEQ ID NO: 1208751 - RNA, 19 nt, Homo sapiens
  misc_RNA (1)...(19): siRNA sense strand
aaacgaaugcaaguagaug

SEQ ID NO: 1208752 - RNA, 19 nt, Homo sapiens
  misc_RNA (1)...(19): siRNA sense strand
caaguagucacagcaguag

SEQ ID NO: 1208753 - RNA, 19 nt, Homo sapiens
  misc_RNA (1)...(19): siRNA sense strand
ccacgacaaugagugaaaa

SEQ ID NO: 1208754 - RNA, 19 nt, Homo sapiens
  misc_RNA (1)...(19): siRNA sense strand
gccacgacaaugagugaaa

SEQ ID NO: 1208755 - RNA, 19 nt, Homo sapiens
  misc_RNA (1)...(19): siRNA sense strand
uagaguaccaagaggcuau

SEQ ID NO: 1208756 - RNA, 19 nt, Homo sapiens
  misc_RNA (1)...(19): siRNA sense strand
cuccagcaguuccaucaug

SEQ ID NO: 1208757 - RNA, 19 nt, Homo sapiens
  misc_RNA (1)...(19): siRNA sense strand
ugucuccuuugucuacuau

SEQ ID NO: 1208758 - RNA, 19 nt, Homo sapiens
  misc_RNA (1)...(19): siRNA sense strand
ucuccuuugucuacuauca

SEQ ID NO: 1208759 - RNA, 19 nt, Homo sapiens
  misc_RNA (1)...(19): siRNA sense strand
cuuagugauuuccguuugu

SEQ ID NO: 1208760 - RNA, 19 nt, Homo sapiens
  misc_RNA (1)...(19): siRNA sense strand
ggacaaugcuggccuguuc

SEQ ID NO: 1208761 - RNA, 19 nt, Homo sapiens
  misc_RNA (1)...(19): siRNA sense strand
gagaagcucauccaauuua

SEQ ID NO: 1208762 - RNA, 19 nt, Homo sapiens
  misc_RNA (1)...(19): siRNA sense strand
gaagaagccugggucauug

SEQ ID NO: 1208763 - RNA, 19 nt, Homo sapiens
  misc_RNA (1)...(19): siRNA sense strand
uaccaaagauccuggaaua

SEQ ID NO: 1208764 - RNA, 19 nt, Homo sapiens
  misc_RNA (1)...(19): siRNA sense strand
ucaaaggucucacgaauuc

SEQ ID NO: 1208765 - RNA, 19 nt, Homo sapiens
  misc_RNA (1)...(19): siRNA sense strand
caaagauccuggaauauuc

SEQ ID NO: 1208766 - RNA, 19 nt, Homo sapiens
  misc_RNA (1)...(19): siRNA sense strand
ucaagagacuggagaacua

SEQ ID NO: 1208767 - RNA, 19 nt, Homo sapiens
  misc_RNA (1)...(19): siRNA sense strand
ggaaauaugcccaacuuau

SEQ ID NO: 1208768 - RNA, 19 nt, Homo sapiens
  misc_RNA (1)...(19): siRNA sense strand
ggaagaagccugggucauu

SEQ ID NO: 1208769 - RNA, 19 nt, Homo sapiens
  misc_RNA (1)...(19): siRNA sense strand
gagguuacauggucucuug

SEQ ID NO: 1208770 - RNA, 19 nt, Homo sapiens
  misc_RNA (1)...(19): siRNA sense strand
acaacaagcucuucaacaa

SEQ ID NO: 1208771 - RNA, 19 nt, Homo sapiens
  misc_RNA (1)...(19): siRNA sense strand
ccacugugcugaacuguga

SEQ ID NO: 1208772 - RNA, 19 nt, Homo sapiens
  misc_RNA (1)...(19): siRNA sense strand
ggaaggugguagaauuuga

SEQ ID NO: 1208773 - RNA, 19 nt, Homo sapiens
  misc_RNA (1)...(19): siRNA sense strand
cagcaaagauagcagagaa

SEQ ID NO: 1208774 - RNA, 19 nt, Homo sapiens
  misc_RNA (1)...(19): siRNA sense strand
cauggucucuugcauaauu

SEQ ID NO: 1208775 - RNA, 19 nt, Homo sapiens
  misc_RNA (1)...(19): siRNA sense strand
gaaauaugcccaacuuauc

SEQ ID NO: 1208776 - RNA, 19 nt, Homo sapiens
  misc_RNA (1)...(19): siRNA sense strand
guccagagccugacaagua

SEQ ID NO: 1208777 - RNA, 19 nt, Homo sapiens
  misc_RNA (1)...(19): siRNA sense strand
aaaggaaacuauuggagaa

SEQ ID NO: 1208778 - RNA, 19 nt, Homo sapiens
  misc_RNA (1)...(19): siRNA sense strand
ccaaagauccuggaauauu

SEQ ID NO: 1208779 - RNA, 19 nt, Homo sapiens
  misc_RNA (1)...(19): siRNA sense strand
ugacugaugcgcagaauaa

SEQ ID NO: 1208780 - RNA, 19 nt, Homo sapiens
  misc_RNA (1)...(19): siRNA sense strand
gcaggacacagcaaagaua

SEQ ID NO: 1208781 - RNA, 19 nt, Homo sapiens
  misc_RNA (1)...(19): siRNA sense strand
gaaggaaaggaaacuauug

SEQ ID NO: 1208782 - RNA, 19 nt, Homo sapiens
  misc_RNA (1)...(19): siRNA sense strand
cgacauaggcgaugacaug

SEQ ID NO: 1208783 - RNA, 19 nt, Homo sapiens
  misc_RNA (1)...(19): siRNA sense strand
gaaaaucugugaaaaugga

SEQ ID NO: 1208784 - RNA, 19 nt, Homo sapiens
  misc_RNA (1)...(19): siRNA sense strand
ggaagcuccuuuacacaug

SEQ ID NO: 1208785 - RNA, 19 nt, Homo sapiens
  misc_RNA (1)...(19): siRNA sense strand
ucagugugcugucuccaua

SEQ ID NO: 1208786 - RNA, 19 nt, Homo sapiens
  misc_RNA (1)...(19): siRNA sense strand
uacauggucucuugcauaa

SEQ ID NO: 1208787 - RNA, 19 nt, Homo sapiens
  misc_RNA (1)...(19): siRNA sense strand
ggacucugcuuugcccuuu

SEQ ID NO: 1208788 - RNA, 19 nt, Homo sapiens
  misc_RNA (1)...(19): siRNA sense strand
ggaaggaaaggaaacuauu

SEQ ID NO: 1208789 - RNA, 19 nt, Homo sapiens
  misc_RNA (1)...(19): siRNA sense strand
gagcagcuguuuccuccuu

SEQ ID NO: 1208790 - RNA, 19 nt, Homo sapiens
  misc_RNA (1)...(19): siRNA sense strand
gcgcaucgcuggucaucug

SEQ ID NO: 1208791 - RNA, 19 nt, Homo sapiens
  misc_RNA (1)...(19): siRNA sense strand
ccacggcccugcacaacaa

SEQ ID NO: 1208792 - RNA, 19 nt, Homo sapiens
  misc_RNA (1)...(19): siRNA sense strand
cagcauuucuuccuacuuc

SEQ ID NO: 1208793 - RNA, 19 nt, Homo sapiens
  misc_RNA (1)...(19): siRNA sense strand
uggauacacugcauuuauu

SEQ ID NO: 1208794 - RNA, 19 nt, Homo sapiens
  misc_RNA (1)...(19): siRNA sense strand
gggccaauauugauuauac

SEQ ID NO: 1208795 - RNA, 19 nt, Homo sapiens
  misc_RNA (1)...(19): siRNA sense strand
gacaugguuucaggacuua

SEQ ID NO: 1208796 - RNA, 19 nt, Homo sapiens
  misc_RNA (1)...(19): siRNA sense strand
ggaacgggcaugcuucuga

SEQ ID NO: 1208797 - RNA, 19 nt, Homo sapiens
  misc_RNA (1)...(19): siRNA sense strand
ggagagcccuguuuucuau

SEQ ID NO: 1208798 - RNA, 19 nt, Homo sapiens
  misc_RNA (1)...(19): siRNA sense strand
cauaggcgaugacaugguu

SEQ ID NO: 1208799 - RNA, 19 nt, Homo sapiens
  misc_RNA (1)...(19): siRNA sense strand
gcucaugauccaaagcuua

SEQ ID NO: 1208800 - RNA, 19 nt, Homo sapiens
  misc_RNA (1)...(19): siRNA sense strand
gcccagaguugcacaagau

SEQ ID NO: 1208801 - RNA, 19 nt, Homo sapiens
  misc_RNA (1)...(19): siRNA sense strand
gugaugagguucaagaagu

SEQ ID NO: 1208802 - RNA, 19 nt, Homo sapiens
  misc_RNA (1)...(19): siRNA sense strand
aguauaaccuuguucauca

SEQ ID NO: 1208803 - RNA, 19 nt, Homo sapiens
  misc_RNA (1)...(19): siRNA sense strand
ugacaagaauggcugugaa

SEQ ID NO: 1208804 - RNA, 19 nt, Homo sapiens
  misc_RNA (1)...(19): siRNA sense strand
ugacaugguuucaggacuu

SEQ ID NO: 1208805 - RNA, 19 nt, Homo sapiens
  misc_RNA (1)...(19): siRNA sense strand
gguccaagcucucagugau

SEQ ID NO: 1208806 - RNA, 19 nt, Homo sapiens
  misc_RNA (1)...(19): siRNA sense strand
ugaccaaccuugugaccuu

SEQ ID NO: 1208807 - RNA, 19 nt, Homo sapiens
  misc_RNA (1)...(19): siRNA sense strand
ggagucagcaagagagaaa

SEQ ID NO: 1208808 - RNA, 19 nt, Homo sapiens
  misc_RNA (1)...(19): siRNA sense strand
ggugaucgccguccuguug

SEQ ID NO: 1208809 - RNA, 19 nt, Homo sapiens
  misc_RNA (1)...(19): siRNA sense strand
gaccagcucuugcccaucu

SEQ ID NO: 1208810 - RNA, 19 nt, Homo sapiens
  misc_RNA (1)...(19): siRNA sense strand
guaugaugcugccuugaga

SEQ ID NO: 1208811 - RNA, 19 nt, Homo sapiens
  misc_RNA (1)...(19): siRNA sense strand
ggaaacuauuggagaagug

SEQ ID NO: 1208812 - RNA, 19 nt, Homo sapiens
  misc_RNA (1)...(19): siRNA sense strand
gaacaagguugauuuucga

SEQ ID NO: 1208813 - RNA, 19 nt, Homo sapiens
  misc_RNA (1)...(19): siRNA sense strand
ucaccaaagucacgaggaa

SEQ ID NO: 1208814 - RNA, 19 nt, Homo sapiens
  misc_RNA (1)...(19): siRNA sense strand
gggaaaaucugugaaaaug

SEQ ID NO: 1208815 - RNA, 19 nt, Homo sapiens
  misc_RNA (1)...(19): siRNA sense strand
gguaagagcagccuguugu

SEQ ID NO: 1208816 - RNA, 19 nt, Homo sapiens
  misc_RNA (1)...(19): siRNA sense strand
gaccagcgcauccguguga

SEQ ID NO: 1208817 - RNA, 19 nt, Homo sapiens
  misc_RNA (1)...(19): siRNA sense strand
gggagaaaccauuugcaaa

SEQ ID NO: 1208818 - RNA, 19 nt, Homo sapiens
  misc_RNA (1)...(19): siRNA sense strand
caaccuagaucccuuugac

SEQ ID NO: 1208819 - RNA, 19 nt, Homo sapiens
  misc_RNA (1)...(19): siRNA sense strand
gaaauacagagacaacaca

SEQ ID NO: 1208820 - RNA, 19 nt, Homo sapiens
  misc_RNA (1)...(19): siRNA sense strand
caccaucccuccacuguca

SEQ ID NO: 1208821 - RNA, 19 nt, Homo sapiens
  misc_RNA (1)...(19): siRNA sense strand
auaacuaccugcuguuguu

SEQ ID NO: 1208822 - RNA, 19 nt, Homo sapiens
  misc_RNA (1)...(19): siRNA sense strand
cagagaacaagguugauuu

SEQ ID NO: 1208823 - RNA, 19 nt, Homo sapiens
  misc_RNA (1)...(19): siRNA sense strand
ggagacagaggcacaguuc

SEQ ID NO: 1208824 - RNA, 19 nt, Homo sapiens
  misc_RNA (1)...(19): siRNA sense strand
ggagaaaccauuugcaaaa

SEQ ID NO: 1208825 - RNA, 19 nt, Homo sapiens
  misc_RNA (1)...(19): siRNA sense strand
guacucgggccaauauuga

SEQ ID NO: 1208826 - RNA, 19 nt, Homo sapiens
  misc_RNA (1)...(19): siRNA sense strand
gaccuaagaaggaaggaaa

SEQ ID NO: 1208827 - RNA, 19 nt, Homo sapiens
  misc_RNA (1)...(19): siRNA sense strand
agucauggcugucaacauc

SEQ ID NO: 1208828 - RNA, 19 nt, Homo sapiens
  misc_RNA (1)...(19): siRNA sense strand
gaauaacuaccugcuguug

SEQ ID NO: 1208829 - RNA, 19 nt, Homo sapiens
  misc_RNA (1)...(19): siRNA sense strand
uagccggucuccuuuauuc

SEQ ID NO: 1208830 - RNA, 19 nt, Homo sapiens
  misc_RNA (1)...(19): siRNA sense strand
gugcugaucgucuucuuaa

SEQ ID NO: 1208831 - RNA, 19 nt, Homo sapiens
  misc_RNA (1)...(19): siRNA sense strand
gcagugaugagguucaaga

SEQ ID NO: 1208832 - RNA, 19 nt, Homo sapiens
  misc_RNA (1)...(19): siRNA sense strand
ggcaucugcuucugcauug

SEQ ID NO: 1208833 - RNA, 19 nt, Homo sapiens
  misc_RNA (1)...(19): siRNA sense strand
ucaggauuaucacaugaaa

SEQ ID NO: 1208834 - RNA, 19 nt, Homo sapiens
  misc_RNA (1)...(19): siRNA sense strand
gaggagugcauuaagaaga

SEQ ID NO: 1208835 - RNA, 19 nt, Homo sapiens
  misc_RNA (1)...(19): siRNA sense strand
agucaaaggucucacgaau

SEQ ID NO: 1208836 - RNA, 19 nt, Homo sapiens
  misc_RNA (1)...(19): siRNA sense strand
uaagaaggaaggaaaggaa

SEQ ID NO: 1208837 - RNA, 19 nt, Homo sapiens
  misc_RNA (1)...(19): siRNA sense strand
ggauacacugcauuuauug

SEQ ID NO: 1208838 - RNA, 19 nt, Homo sapiens
  misc_RNA (1)...(19): siRNA sense strand
gaucaugaccaaccuugug

SEQ ID NO: 1208839 - RNA, 19 nt, Homo sapiens
  misc_RNA (1)...(19): siRNA sense strand
uuacauggucucuugcaua

SEQ ID NO: 1208840 - RNA, 19 nt, Homo sapiens
  misc_RNA (1)...(19): siRNA sense strand
agaagcucauccaauuuaa

SEQ ID NO: 1208841 - RNA, 19 nt, Homo sapiens
  misc_RNA (1)...(19): siRNA sense strand
gcaaugggaaggugguaga

SEQ ID NO: 1208842 - RNA, 19 nt, Homo sapiens
  misc_RNA (1)...(19): siRNA sense strand
uauagccggucuccuuuau

SEQ ID NO: 1208843 - RNA, 19 nt, Homo sapiens
  misc_RNA (1)...(19): siRNA sense strand
cacuggagcuggagaggaa

SEQ ID NO: 1208844 - RNA, 19 nt, Homo sapiens
  misc_RNA (1)...(19): siRNA sense strand
ugaugagguucaagaaguu

SEQ ID NO: 1208845 - RNA, 19 nt, Homo sapiens
  misc_RNA (1)...(19): siRNA sense strand
cuggucaucugcagcauuu

SEQ ID NO: 1208846 - RNA, 19 nt, Homo sapiens
  misc_RNA (1)...(19): siRNA sense strand
cggagucgcuuagaugaga

SEQ ID NO: 1208847 - RNA, 19 nt, Homo sapiens
  misc_RNA (1)...(19): siRNA sense strand
ggauuggcuuggagacaga

SEQ ID NO: 1208848 - RNA, 19 nt, Homo sapiens
  misc_RNA (1)...(19): siRNA sense strand
acagugaguuaaugcagaa

SEQ ID NO: 1208849 - RNA, 19 nt, Homo sapiens
  misc_RNA (1)...(19): siRNA sense strand
gagaggaacgggcaugcuu

SEQ ID NO: 1208850 - RNA, 19 nt, Homo sapiens
  misc_RNA (1)...(19): siRNA sense strand
gcagcuguuuccuccuuug

SEQ ID NO: 1208851 - RNA, 19 nt, Homo sapiens
  misc_RNA (1)...(19): siRNA sense strand
caacacacccaccgugcuu

SEQ ID NO: 1208852 - RNA, 19 nt, Homo sapiens
  misc_RNA (1)...(19): siRNA sense strand
cagagaagccaaagguaga

SEQ ID NO: 1208853 - RNA, 19 nt, Homo sapiens
  misc_RNA (1)...(19): siRNA sense strand
uccagaagaugcacaagga

SEQ ID NO: 1208854 - RNA, 19 nt, Homo sapiens
  misc_RNA (1)...(19): siRNA sense strand
gcugcaguacuuagaauuu

SEQ ID NO: 1208855 - RNA, 19 nt, Homo sapiens
  misc_RNA (1)...(19): siRNA sense strand
gggaaauaugcccaacuua

SEQ ID NO: 1208856 - RNA, 19 nt, Homo sapiens
  misc_RNA (1)...(19): siRNA sense strand
gcagacaauccucaacugu

SEQ ID NO: 1208857 - RNA, 19 nt, Homo sapiens
  misc_RNA (1)...(19): siRNA sense strand
ggacacagcaaagauagca

SEQ ID NO: 1208858 - RNA, 19 nt, Homo sapiens
  misc_RNA (1)...(19): siRNA sense strand
cuccauauauccuguuaau

SEQ ID NO: 1208859 - RNA, 19 nt, Homo sapiens
  misc_RNA (1)...(19): siRNA sense strand
ggucugcuccucagggauu

SEQ ID NO: 1208860 - RNA, 19 nt, Homo sapiens
  misc_RNA (1)...(19): siRNA sense strand
ggacaaugcuggccuguuc

SEQ ID NO: 1208861 - RNA, 19 nt, Homo sapiens
  misc_RNA (1)...(19): siRNA sense strand
gagaagcucauccaauuua

SEQ ID NO: 1208862 - RNA, 19 nt, Homo sapiens
  misc_RNA (1)...(19): siRNA sense strand
gaagaagccugggucauug

SEQ ID NO: 1208863 - RNA, 19 nt, Homo sapiens
  misc_RNA (1)...(19): siRNA sense strand
uaccaaagauccuggaaua

SEQ ID NO: 1208864 - RNA, 19 nt, Homo sapiens
  misc_RNA (1)...(19): siRNA sense strand
ucaaaggucucacgaauuc

SEQ ID NO: 1208865 - RNA, 19 nt, Homo sapiens
  misc_RNA (1)...(19): siRNA sense strand
caaagauccuggaauauuc

SEQ ID NO: 1208866 - RNA, 19 nt, Homo sapiens
  misc_RNA (1)...(19): siRNA sense strand
ucaagagacuggagaacua

SEQ ID NO: 1208867 - RNA, 19 nt, Homo sapiens
  misc_RNA (1)...(19): siRNA sense strand
ggaaauaugcccaacuuau

SEQ ID NO: 1208868 - RNA, 19 nt, Homo sapiens
  misc_RNA (1)...(19): siRNA sense strand
ggaagaagccugggucauu

SEQ ID NO: 1208869 - RNA, 19 nt, Homo sapiens
  misc_RNA (1)...(19): siRNA sense strand
gagguuacauggucucuug

SEQ ID NO: 1208870 - RNA, 19 nt, Homo sapiens
  misc_RNA (1)...(19): siRNA sense strand
acaacaagcucuucaacaa

SEQ ID NO: 1208871 - RNA, 19 nt, Homo sapiens
  misc_RNA (1)...(19): siRNA sense strand
ccacugugcugaacuguga

SEQ ID NO: 1208872 - RNA, 19 nt, Homo sapiens
  misc_RNA (1)...(19): siRNA sense strand
ggaaggugguagaauuuga

SEQ ID NO: 1208873 - RNA, 19 nt, Homo sapiens
  misc_RNA (1)...(19): siRNA sense strand
cagcaaagauagcagagaa

SEQ ID NO: 1208874 - RNA, 19 nt, Homo sapiens
  misc_RNA (1)...(19): siRNA sense strand
cauggucucuugcauaauu

SEQ ID NO: 1208875 - RNA, 19 nt, Homo sapiens
  misc_RNA (1)...(19): siRNA sense strand
gaaauaugcccaacuuauc

SEQ ID NO: 1208876 - RNA, 19 nt, Homo sapiens
  misc_RNA (1)...(19): siRNA sense strand
guccagagccugacaagua

SEQ ID NO: 1208877 - RNA, 19 nt, Homo sapiens
  misc_RNA (1)...(19): siRNA sense strand
aaaggaaacuauuggagaa

SEQ ID NO: 1208878 - RNA, 19 nt, Homo sapiens
  misc_RNA (1)...(19): siRNA sense strand
ccaaagauccuggaauauu

SEQ ID NO: 1208879 - RNA, 19 nt, Homo sapiens
  misc_RNA (1)...(19): siRNA sense strand
ugacugaugcgcagaauaa

SEQ ID NO: 1208880 - RNA, 19 nt, Homo sapiens
  misc_RNA (1)...(19): siRNA sense strand
gcaggacacagcaaagaua

SEQ ID NO: 1208881 - RNA, 19 nt, Homo sapiens
  misc_RNA (1)...(19): siRNA sense strand
gaaggaaaggaaacuauug

SEQ ID NO: 1208882 - RNA, 19 nt, Homo sapiens
  misc_RNA (1)...(19): siRNA sense strand
cgacauaggcgaugacaug

SEQ ID NO: 1208883 - RNA, 19 nt, Homo sapiens
  misc_RNA (1)...(19): siRNA sense strand
gaaaaucugugaaaaugga

SEQ ID NO: 1208884 - RNA, 19 nt, Homo sapiens
  misc_RNA (1)...(19): siRNA sense strand
ggaagcuccuuuacacaug

SEQ ID NO: 1208885 - RNA, 19 nt, Homo sapiens
  misc_RNA (1)...(19): siRNA sense strand
ucagugugcugucuccaua

SEQ ID NO: 1208886 - RNA, 19 nt, Homo sapiens
  misc_RNA (1)...(19): siRNA sense strand
uacauggucucuugcauaa

SEQ ID NO: 1208887 - RNA, 19 nt, Homo sapiens
  misc_RNA (1)...(19): siRNA sense strand
ggacucugcuuugcccuuu

SEQ ID NO: 1208888 - RNA, 19 nt, Homo sapiens
  misc_RNA (1)...(19): siRNA sense strand
ggaaggaaaggaaacuauu

SEQ ID NO: 1208889 - RNA, 19 nt, Homo sapiens
  misc_RNA (1)...(19): siRNA sense strand
gagcagcuguuuccuccuu

SEQ ID NO: 1208890 - RNA, 19 nt, Homo sapiens
  misc_RNA (1)...(19): siRNA sense strand
gcgcaucgcuggucaucug

SEQ ID NO: 1208891 - RNA, 19 nt, Homo sapiens
  misc_RNA (1)...(19): siRNA sense strand
ccacggcccugcacaacaa

SEQ ID NO: 1208892 - RNA, 19 nt, Homo sapiens
  misc_RNA (1)...(19): siRNA sense strand
cagcauuucuuccuacuuc

SEQ ID NO: 1208893 - RNA, 19 nt, Homo sapiens
  misc_RNA (1)...(19): siRNA sense strand
uggauacacugcauuuauu

SEQ ID NO: 1208894 - RNA, 19 nt, Homo sapiens
  misc_RNA (1)...(19): siRNA sense strand
gggccaauauugauuauac

SEQ ID NO: 1208895 - RNA, 19 nt, Homo sapiens
  misc_RNA (1)...(19): siRNA sense strand
gacaugguuucaggacuua

SEQ ID NO: 1208896 - RNA, 19 nt, Homo sapiens
  misc_RNA (1)...(19): siRNA sense strand
ggaacgggcaugcuucuga

SEQ ID NO: 1208897 - RNA, 19 nt, Homo sapiens
  misc_RNA (1)...(19): siRNA sense strand
ggagagcccuguuuucuau

SEQ ID NO: 1208898 - RNA, 19 nt, Homo sapiens
  misc_RNA (1)...(19): siRNA sense strand
cauaggcgaugacaugguu

SEQ ID NO: 1208899 - RNA, 19 nt, Homo sapiens
  misc_RNA (1)...(19): siRNA sense strand
gcucaugauccaaagcuua

SEQ ID NO: 1208900 - RNA, 19 nt, Homo sapiens
  misc_RNA (1)...(19): siRNA sense strand
gcccagaguugcacaagau

SEQ ID NO: 1208901 - RNA, 19 nt, Homo sapiens
  misc_RNA (1)...(19): siRNA sense strand
gugaugagguucaagaagu

SEQ ID NO: 1208902 - RNA, 19 nt, Homo sapiens
  misc_RNA (1)...(19): siRNA sense strand
aguauaaccuuguucauca

SEQ ID NO: 1208903 - RNA, 19 nt, Homo sapiens
  misc_RNA (1)...(19): siRNA sense strand
ugacaagaauggcugugaa

SEQ ID NO: 1208904 - RNA, 19 nt, Homo sapiens
  misc_RNA (1)...(19): siRNA sense strand
ugacaugguuucaggacuu

SEQ ID NO: 1208905 - RNA, 19 nt, Homo sapiens
  misc_RNA (1)...(19): siRNA sense strand
gguccaagcucucagugau

SEQ ID NO: 1208906 - RNA, 19 nt, Homo sapiens
  misc_RNA (1)...(19): siRNA sense strand
ugaccaaccuugugaccuu

SEQ ID NO: 1208907 - RNA, 19 nt, Homo sapiens
  misc_RNA (1)...(19): siRNA sense strand
ggagucagcaagagagaaa

SEQ ID NO: 1208908 - RNA, 19 nt, Homo sapiens
  misc_RNA (1)...(19): siRNA sense strand
ggugaucgccguccuguug

SEQ ID NO: 1208909 - RNA, 19 nt, Homo sapiens
  misc_RNA (1)...(19): siRNA sense strand
gaccagcucuugcccaucu

SEQ ID NO: 1208910 - RNA, 19 nt, Homo sapiens
  misc_RNA (1)...(19): siRNA sense strand
guaugaugcugccuugaga

SEQ ID NO: 1208911 - RNA, 19 nt, Homo sapiens
  misc_RNA (1)...(19): siRNA sense strand
ggaaacuauuggagaagug

SEQ ID NO: 1208912 - RNA, 19 nt, Homo sapiens
  misc_RNA (1)...(19): siRNA sense strand
gaacaagguugauuuucga

SEQ ID NO: 1208913 - RNA, 19 nt, Homo sapiens
  misc_RNA (1)...(19): siRNA sense strand
ucaccaaagucacgaggaa

SEQ ID NO: 1208914 - RNA, 19 nt, Homo sapiens
  misc_RNA (1)...(19): siRNA sense strand
gggaaaaucugugaaaaug

SEQ ID NO: 1208915 - RNA, 19 nt, Homo sapiens
  misc_RNA (1)...(19): siRNA sense strand
gguaagagcagccuguugu

SEQ ID NO: 1208916 - RNA, 19 nt, Homo sapiens
  misc_RNA (1)...(19): siRNA sense strand
gaccagcgcauccguguga

SEQ ID NO: 1208917 - RNA, 19 nt, Homo sapiens
  misc_RNA (1)...(19): siRNA sense strand
gggagaaaccauuugcaaa

SEQ ID NO: 1208918 - RNA, 19 nt, Homo sapiens
  misc_RNA (1)...(19): siRNA sense strand
caaccuagaucccuuugac

SEQ ID NO: 1208919 - RNA, 19 nt, Homo sapiens
  misc_RNA (1)...(19): siRNA sense strand
gaaauacagagacaacaca

SEQ ID NO: 1208920 - RNA, 19 nt, Homo sapiens
  misc_RNA (1)...(19): siRNA sense strand
caccaucccuccacuguca

SEQ ID NO: 1208921 - RNA, 19 nt, Homo sapiens
  misc_RNA (1)...(19): siRNA sense strand
auaacuaccugcuguuguu

SEQ ID NO: 1208922 - RNA, 19 nt, Homo sapiens
  misc_RNA (1)...(19): siRNA sense strand
cagagaacaagguugauuu

SEQ ID NO: 1208923 - RNA, 19 nt, Homo sapiens
  misc_RNA (1)...(19): siRNA sense strand
ggagacagaggcacaguuc

SEQ ID NO: 1208924 - RNA, 19 nt, Homo sapiens
  misc_RNA (1)...(19): siRNA sense strand
ggagaaaccauuugcaaaa

SEQ ID NO: 1208925 - RNA, 19 nt, Homo sapiens
  misc_RNA (1)...(19): siRNA sense strand
guacucgggccaauauuga

SEQ ID NO: 1208926 - RNA, 19 nt, Homo sapiens
  misc_RNA (1)...(19): siRNA sense strand
gaccuaagaaggaaggaaa

SEQ ID NO: 1208927 - RNA, 19 nt, Homo sapiens
  misc_RNA (1)...(19): siRNA sense strand
agucauggcugucaacauc

SEQ ID NO: 1208928 - RNA, 19 nt, Homo sapiens
  misc_RNA (1)...(19): siRNA sense strand
gaauaacuaccugcuguug

SEQ ID NO: 1208929 - RNA, 19 nt, Homo sapiens
  misc_RNA (1)...(19): siRNA sense strand
uagccggucuccuuuauuc

SEQ ID NO: 1208930 - RNA, 19 nt, Homo sapiens
  misc_RNA (1)...(19): siRNA sense strand
gugcugaucgucuucuuaa

SEQ ID NO: 1208931 - RNA, 19 nt, Homo sapiens
  misc_RNA (1)...(19): siRNA sense strand
gcagugaugagguucaaga

SEQ ID NO: 1208932 - RNA, 19 nt, Homo sapiens
  misc_RNA (1)...(19): siRNA sense strand
ggcaucugcuucugcauug

SEQ ID NO: 1208933 - RNA, 19 nt, Homo sapiens
  misc_RNA (1)...(19): siRNA sense strand
ucaggauuaucacaugaaa

SEQ ID NO: 1208934 - RNA, 19 nt, Homo sapiens
  misc_RNA (1)...(19): siRNA sense strand
gaggagugcauuaagaaga

SEQ ID NO: 1208935 - RNA, 19 nt, Homo sapiens
  misc_RNA (1)...(19): siRNA sense strand
agucaaaggucucacgaau

SEQ ID NO: 1208936 - RNA, 19 nt, Homo sapiens
  misc_RNA (1)...(19): siRNA sense strand
uaagaaggaaggaaaggaa

SEQ ID NO: 1208937 - RNA, 19 nt, Homo sapiens
  misc_RNA (1)...(19): siRNA sense strand
ggauacacugcauuuauug

SEQ ID NO: 1208938 - RNA, 19 nt, Homo sapiens
  misc_RNA (1)...(19): siRNA sense strand
gaucaugaccaaccuugug

SEQ ID NO: 1208939 - RNA, 19 nt, Homo sapiens
  misc_RNA (1)...(19): siRNA sense strand
uuacauggucucuugcaua

SEQ ID NO: 1208940 - RNA, 19 nt, Homo sapiens
  misc_RNA (1)...(19): siRNA sense strand
agaagcucauccaauuuaa

SEQ ID NO: 1208941 - RNA, 19 nt, Homo sapiens
  misc_RNA (1)...(19): siRNA sense strand
gcaaugggaaggugguaga

SEQ ID NO: 1208942 - RNA, 19 nt, Homo sapiens
  misc_RNA (1)...(19): siRNA sense strand
uauagccggucuccuuuau

SEQ ID NO: 1208943 - RNA, 19 nt, Homo sapiens
  misc_RNA (1)...(19): siRNA sense strand
cacuggagcuggagaggaa

SEQ ID NO: 1208944 - RNA, 19 nt, Homo sapiens
  misc_RNA (1)...(19): siRNA sense strand
ugaugagguucaagaaguu

SEQ ID NO: 1208945 - RNA, 19 nt, Homo sapiens
  misc_RNA (1)...(19): siRNA sense strand
cuggucaucugcagcauuu

SEQ ID NO: 1208946 - RNA, 19 nt, Homo sapiens
  misc_RNA (1)...(19): siRNA sense strand
cggagucgcuuagaugaga

SEQ ID NO: 1208947 - RNA, 19 nt, Homo sapiens
  misc_RNA (1)...(19): siRNA sense strand
ggauuggcuuggagacaga

SEQ ID NO: 1208948 - RNA, 19 nt, Homo sapiens
  misc_RNA (1)...(19): siRNA sense strand
acagugaguuaaugcagaa

SEQ ID NO: 1208949 - RNA, 19 nt, Homo sapiens
  misc_RNA (1)...(19): siRNA sense strand
gagaggaacgggcaugcuu

SEQ ID NO: 1208950 - RNA, 19 nt, Homo sapiens
  misc_RNA (1)...(19): siRNA sense strand
gcagcuguuuccuccuuug

SEQ ID NO: 1208951 - RNA, 19 nt, Homo sapiens
  misc_RNA (1)...(19): siRNA sense strand
caacacacccaccgugcuu

SEQ ID NO: 1208952 - RNA, 19 nt, Homo sapiens
  misc_RNA (1)...(19): siRNA sense strand
cagagaagccaaagguaga

SEQ ID NO: 1208953 - RNA, 19 nt, Homo sapiens
  misc_RNA (1)...(19): siRNA sense strand
uccagaagaugcacaagga

SEQ ID NO: 1208954 - RNA, 19 nt, Homo sapiens
  misc_RNA (1)...(19): siRNA sense strand
gcugcaguacuuagaauuu

SEQ ID NO: 1208955 - RNA, 19 nt, Homo sapiens
  misc_RNA (1)...(19): siRNA sense strand
gggaaauaugcccaacuua

SEQ ID NO: 1208956 - RNA, 19 nt, Homo sapiens
  misc_RNA (1)...(19): siRNA sense strand
gcagacaauccucaacugu

SEQ ID NO: 1208957 - RNA, 19 nt, Homo sapiens
  misc_RNA (1)...(19): siRNA sense strand
ggacacagcaaagauagca

SEQ ID NO: 1208958 - RNA, 19 nt, Homo sapiens
  misc_RNA (1)...(19): siRNA sense strand
cuccauauauccuguuaau

SEQ ID NO: 1208959 - RNA, 19 nt, Homo sapiens
  misc_RNA (1)...(19): siRNA sense strand
ggucugcuccucagggauu

SEQ ID NO: 1208960 - RNA, 19 nt, Homo sapiens
  misc_RNA (1)...(19): siRNA sense strand
ggacaaugcuggccuguuc

SEQ ID NO: 1208961 - RNA, 19 nt, Homo sapiens
  misc_RNA (1)...(19): siRNA sense strand
gagaagcucauccaauuua

SEQ ID NO: 1208962 - RNA, 19 nt, Homo sapiens
  misc_RNA (1)...(19): siRNA sense strand
gaagaagccugggucauug

SEQ ID NO: 1208963 - RNA, 19 nt, Homo sapiens
  misc_RNA (1)...(19): siRNA sense strand
uaccaaagauccuggaaua

SEQ ID NO: 1208964 - RNA, 19 nt, Homo sapiens
  misc_RNA (1)...(19): siRNA sense strand
ucaaaggucucacgaauuc

SEQ ID NO: 1208965 - RNA, 19 nt, Homo sapiens
  misc_RNA (1)...(19): siRNA sense strand
caaagauccuggaauauuc

SEQ ID NO: 1208966 - RNA, 19 nt, Homo sapiens
  misc_RNA (1)...(19): siRNA sense strand
ucaagagacuggagaacua

SEQ ID NO: 1208967 - RNA, 19 nt, Homo sapiens
  misc_RNA (1)...(19): siRNA sense strand
ggaaauaugcccaacuuau

SEQ ID NO: 1208968 - RNA, 19 nt, Homo sapiens
  misc_RNA (1)...(19): siRNA sense strand
ggaagaagccugggucauu

SEQ ID NO: 1208969 - RNA, 19 nt, Homo sapiens
  misc_RNA (1)...(19): siRNA sense strand
gagguuacauggucucuug

SEQ ID NO: 1208970 - RNA, 19 nt, Homo sapiens
  misc_RNA (1)...(19): siRNA sense strand
acaacaagcucuucaacaa

SEQ ID NO: 1208971 - RNA, 19 nt, Homo sapiens
  misc_RNA (1)...(19): siRNA sense strand
ccacugugcugaacuguga

SEQ ID NO: 1208972 - RNA, 19 nt, Homo sapiens
  misc_RNA (1)...(19): siRNA sense strand
ggaaggugguagaauuuga

SEQ ID NO: 1208973 - RNA, 19 nt, Homo sapiens
  misc_RNA (1)...(19): siRNA sense strand
cagcaaagauagcagagaa

SEQ ID NO: 1208974 - RNA, 19 nt, Homo sapiens
  misc_RNA (1)...(19): siRNA sense strand
cauggucucuugcauaauu

SEQ ID NO: 1208975 - RNA, 19 nt, Homo sapiens
  misc_RNA (1)...(19): siRNA sense strand
gaaauaugcccaacuuauc

SEQ ID NO: 1208976 - RNA, 19 nt, Homo sapiens
  misc_RNA (1)...(19): siRNA sense strand
guccagagccugacaagua

SEQ ID NO: 1208977 - RNA, 19 nt, Homo sapiens
  misc_RNA (1)...(19): siRNA sense strand
aaaggaaacuauuggagaa

SEQ ID NO: 1208978 - RNA, 19 nt, Homo sapiens
  misc_RNA (1)...(19): siRNA sense strand
ccaaagauccuggaauauu

SEQ ID NO: 1208979 - RNA, 19 nt, Homo sapiens
  misc_RNA (1)...(19): siRNA sense strand
ugacugaugcgcagaauaa

SEQ ID NO: 1208980 - RNA, 19 nt, Homo sapiens
  misc_RNA (1)...(19): siRNA sense strand
gcaggacacagcaaagaua

SEQ ID NO: 1208981 - RNA, 19 nt, Homo sapiens
  misc_RNA (1)...(19): siRNA sense strand
gaaggaaaggaaacuauug

SEQ ID NO: 1208982 - RNA, 19 nt, Homo sapiens
  misc_RNA (1)...(19): siRNA sense strand
cgacauaggcgaugacaug

SEQ ID NO: 1208983 - RNA, 19 nt, Homo sapiens
  misc_RNA (1)...(19): siRNA sense strand
gaaaaucugugaaaaugga

SEQ ID NO: 1208984 - RNA, 19 nt, Homo sapiens
  misc_RNA (1)...(19): siRNA sense strand
ggaagcuccuuuacacaug

SEQ ID NO: 1208985 - RNA, 19 nt, Homo sapiens
  misc_RNA (1)...(19): siRNA sense strand
ucagugugcugucuccaua

SEQ ID NO: 1208986 - RNA, 19 nt, Homo sapiens
  misc_RNA (1)...(19): siRNA sense strand
uacauggucucuugcauaa

SEQ ID NO: 1208987 - RNA, 19 nt, Homo sapiens
  misc_RNA (1)...(19): siRNA sense strand
ggacucugcuuugcccuuu

SEQ ID NO: 1208988 - RNA, 19 nt, Homo sapiens
  misc_RNA (1)...(19): siRNA sense strand
ggaaggaaaggaaacuauu

SEQ ID NO: 1208989 - RNA, 19 nt, Homo sapiens
  misc_RNA (1)...(19): siRNA sense strand
gagcagcuguuuccuccuu

SEQ ID NO: 1208990 - RNA, 19 nt, Homo sapiens
  misc_RNA (1)...(19): siRNA sense strand
gcgcaucgcuggucaucug

SEQ ID NO: 1208991 - RNA, 19 nt, Homo sapiens
  misc_RNA (1)...(19): siRNA sense strand
ccacggcccugcacaacaa

SEQ ID NO: 1208992 - RNA, 19 nt, Homo sapiens
  misc_RNA (1)...(19): siRNA sense strand
cagcauuucuuccuacuuc

SEQ ID NO: 1208993 - RNA, 19 nt, Homo sapiens
  misc_RNA (1)...(19): siRNA sense strand
uggauacacugcauuuauu

SEQ ID NO: 1208994 - RNA, 19 nt, Homo sapiens
  misc_RNA (1)...(19): siRNA sense strand
gggccaauauugauuauac

SEQ ID NO: 1208995 - RNA, 19 nt, Homo sapiens
  misc_RNA (1)...(19): siRNA sense strand
gacaugguuucaggacuua

SEQ ID NO: 1208996 - RNA, 19 nt, Homo sapiens
  misc_RNA (1)...(19): siRNA sense strand
ggaacgggcaugcuucuga

SEQ ID NO: 1208997 - RNA, 19 nt, Homo sapiens
  misc_RNA (1)...(19): siRNA sense strand
ggagagcccuguuuucuau

SEQ ID NO: 1208998 - RNA, 19 nt, Homo sapiens
  misc_RNA (1)...(19): siRNA sense strand
cauaggcgaugacaugguu

SEQ ID NO: 1208999 - RNA, 19 nt, Homo sapiens
  misc_RNA (1)...(19): siRNA sense strand
gcucaugauccaaagcuua

SEQ ID NO: 1209000 - RNA, 19 nt, Homo sapiens
  misc_RNA (1)...(19): siRNA sense strand
gcccagaguugcacaagau

SEQ ID NO: 1209001 - RNA, 19 nt, Homo sapiens
  misc_RNA (1)...(19): siRNA sense strand
gugaugagguucaagaagu

SEQ ID NO: 1209002 - RNA, 19 nt, Homo sapiens
  misc_RNA (1)...(19): siRNA sense strand
aguauaaccuuguucauca

SEQ ID NO: 1209003 - RNA, 19 nt, Homo sapiens
  misc_RNA (1)...(19): siRNA sense strand
ugacaagaauggcugugaa

SEQ ID NO: 1209004 - RNA, 19 nt, Homo sapiens
  misc_RNA (1)...(19): siRNA sense strand
ugacaugguuucaggacuu

SEQ ID NO: 1209005 - RNA, 19 nt, Homo sapiens
  misc_RNA (1)...(19): siRNA sense strand
gguccaagcucucagugau

SEQ ID NO: 1209006 - RNA, 19 nt, Homo sapiens
  misc_RNA (1)...(19): siRNA sense strand
ugaccaaccuugugaccuu

SEQ ID NO: 1209007 - RNA, 19 nt, Homo sapiens
  misc_RNA (1)...(19): siRNA sense strand
ggagucagcaagagagaaa

SEQ ID NO: 1209008 - RNA, 19 nt, Homo sapiens
  misc_RNA (1)...(19): siRNA sense strand
ggugaucgccguccuguug

SEQ ID NO: 1209009 - RNA, 19 nt, Homo sapiens
  misc_RNA (1)...(19): siRNA sense strand
gaccagcucuugcccaucu

SEQ ID NO: 1209010 - RNA, 19 nt, Homo sapiens
  misc_RNA (1)...(19): siRNA sense strand
guaugaugcugccuugaga

SEQ ID NO: 1209011 - RNA, 19 nt, Homo sapiens
  misc_RNA (1)...(19): siRNA sense strand
ggaaacuauuggagaagug

SEQ ID NO: 1209012 - RNA, 19 nt, Homo sapiens
  misc_RNA (1)...(19): siRNA sense strand
gaacaagguugauuuucga

SEQ ID NO: 1209013 - RNA, 19 nt, Homo sapiens
  misc_RNA (1)...(19): siRNA sense strand
ucaccaaagucacgaggaa

SEQ ID NO: 1209014 - RNA, 19 nt, Homo sapiens
  misc_RNA (1)...(19): siRNA sense strand
gggaaaaucugugaaaaug

SEQ ID NO: 1209015 - RNA, 19 nt, Homo sapiens
  misc_RNA (1)...(19): siRNA sense strand
gguaagagcagccuguugu

SEQ ID NO: 1209016 - RNA, 19 nt, Homo sapiens
  misc_RNA (1)...(19): siRNA sense strand
gaccagcgcauccguguga

SEQ ID NO: 1209017 - RNA, 19 nt, Homo sapiens
  misc_RNA (1)...(19): siRNA sense strand
gggagaaaccauuugcaaa

SEQ ID NO: 1209018 - RNA, 19 nt, Homo sapiens
  misc_RNA (1)...(19): siRNA sense strand
caaccuagaucccuuugac

SEQ ID NO: 1209019 - RNA, 19 nt, Homo sapiens
  misc_RNA (1)...(19): siRNA sense strand
gaaauacagagacaacaca

SEQ ID NO: 1209020 - RNA, 19 nt, Homo sapiens
  misc_RNA (1)...(19): siRNA sense strand
caccaucccuccacuguca

SEQ ID NO: 1209021 - RNA, 19 nt, Homo sapiens
  misc_RNA (1)...(19): siRNA sense strand
auaacuaccugcuguuguu

SEQ ID NO: 1209022 - RNA, 19 nt, Homo sapiens
  misc_RNA (1)...(19): siRNA sense strand
cagagaacaagguugauuu

SEQ ID NO: 1209023 - RNA, 19 nt, Homo sapiens
  misc_RNA (1)...(19): siRNA sense strand
ggagacagaggcacaguuc

SEQ ID NO: 1209024 - RNA, 19 nt, Homo sapiens
  misc_RNA (1)...(19): siRNA sense strand
ggagaaaccauuugcaaaa

SEQ ID NO: 1209025 - RNA, 19 nt, Homo sapiens
  misc_RNA (1)...(19): siRNA sense strand
guacucgggccaauauuga

SEQ ID NO: 1209026 - RNA, 19 nt, Homo sapiens
  misc_RNA (1)...(19): siRNA sense strand
gaccuaagaaggaaggaaa

SEQ ID NO: 1209027 - RNA, 19 nt, Homo sapiens
  misc_RNA (1)...(19): siRNA sense strand
agucauggcugucaacauc

SEQ ID NO: 1209028 - RNA, 19 nt, Homo sapiens
  misc_RNA (1)...(19): siRNA sense strand
gaauaacuaccugcuguug

SEQ ID NO: 1209029 - RNA, 19 nt, Homo sapiens
  misc_RNA (1)...(19): siRNA sense strand
uagccggucuccuuuauuc

SEQ ID NO: 1209030 - RNA, 19 nt, Homo sapiens
  misc_RNA (1)...(19): siRNA sense strand
gugcugaucgucuucuuaa

SEQ ID NO: 1209031 - RNA, 19 nt, Homo sapiens
  misc_RNA (1)...(19): siRNA sense strand
gcagugaugagguucaaga

SEQ ID NO: 1209032 - RNA, 19 nt, Homo sapiens
  misc_RNA (1)...(19): siRNA sense strand
ggcaucugcuucugcauug

SEQ ID NO: 1209033 - RNA, 19 nt, Homo sapiens
  misc_RNA (1)...(19): siRNA sense strand
ucaggauuaucacaugaaa

SEQ ID NO: 1209034 - RNA, 19 nt, Homo sapiens
  misc_RNA (1)...(19): siRNA sense strand
gaggagugcauuaagaaga

SEQ ID NO: 1209035 - RNA, 19 nt, Homo sapiens
  misc_RNA (1)...(19): siRNA sense strand
agucaaaggucucacgaau

SEQ ID NO: 1209036 - RNA, 19 nt, Homo sapiens
  misc_RNA (1)...(19): siRNA sense strand
uaagaaggaaggaaaggaa

SEQ ID NO: 1209037 - RNA, 19 nt, Homo sapiens
  misc_RNA (1)...(19): siRNA sense strand
ggauacacugcauuuauug

SEQ ID NO: 1209038 - RNA, 19 nt, Homo sapiens
  misc_RNA (1)...(19): siRNA sense strand
gaucaugaccaaccuugug

SEQ ID NO: 1209039 - RNA, 19 nt, Homo sapiens
  misc_RNA (1)...(19): siRNA sense strand
uuacauggucucuugcaua

SEQ ID NO: 1209040 - RNA, 19 nt, Homo sapiens
  misc_RNA (1)...(19): siRNA sense strand
agaagcucauccaauuuaa

SEQ ID NO: 1209041 - RNA, 19 nt, Homo sapiens
  misc_RNA (1)...(19): siRNA sense strand
gcaaugggaaggugguaga

SEQ ID NO: 1209042 - RNA, 19 nt, Homo sapiens
  misc_RNA (1)...(19): siRNA sense strand
uauagccggucuccuuuau

SEQ ID NO: 1209043 - RNA, 19 nt, Homo sapiens
  misc_RNA (1)...(19): siRNA sense strand
cacuggagcuggagaggaa

SEQ ID NO: 1209044 - RNA, 19 nt, Homo sapiens
  misc_RNA (1)...(19): siRNA sense strand
ugaugagguucaagaaguu

SEQ ID NO: 1209045 - RNA, 19 nt, Homo sapiens
  misc_RNA (1)...(19): siRNA sense strand
cuggucaucugcagcauuu

SEQ ID NO: 1209046 - RNA, 19 nt, Homo sapiens
  misc_RNA (1)...(19): siRNA sense strand
cggagucgcuuagaugaga

SEQ ID NO: 1209047 - RNA, 19 nt, Homo sapiens
  misc_RNA (1)...(19): siRNA sense strand
ggauuggcuuggagacaga

SEQ ID NO: 1209048 - RNA, 19 nt, Homo sapiens
  misc_RNA (1)...(19): siRNA sense strand
acagugaguuaaugcagaa

SEQ ID NO: 1209049 - RNA, 19 nt, Homo sapiens
  misc_RNA (1)...(19): siRNA sense strand
gagaggaacgggcaugcuu

SEQ ID NO: 1209050 - RNA, 19 nt, Homo sapiens
  misc_RNA (1)...(19): siRNA sense strand
gcagcuguuuccuccuuug

SEQ ID NO: 1209051 - RNA, 19 nt, Homo sapiens
  misc_RNA (1)...(19): siRNA sense strand
caacacacccaccgugcuu

SEQ ID NO: 1209052 - RNA, 19 nt, Homo sapiens
  misc_RNA (1)...(19): siRNA sense strand
cagagaagccaaagguaga

SEQ ID NO: 1209053 - RNA, 19 nt, Homo sapiens
  misc_RNA (1)...(19): siRNA sense strand
uccagaagaugcacaagga

SEQ ID NO: 1209054 - RNA, 19 nt, Homo sapiens
  misc_RNA (1)...(19): siRNA sense strand
gcugcaguacuuagaauuu

SEQ ID NO: 1209055 - RNA, 19 nt, Homo sapiens
  misc_RNA (1)...(19): siRNA sense strand
gggaaauaugcccaacuua

SEQ ID NO: 1209056 - RNA, 19 nt, Homo sapiens
  misc_RNA (1)...(19): siRNA sense strand
gcagacaauccucaacugu

SEQ ID NO: 1209057 - RNA, 19 nt, Homo sapiens
  misc_RNA (1)...(19): siRNA sense strand
ggacacagcaaagauagca

SEQ ID NO: 1209058 - RNA, 19 nt, Homo sapiens
  misc_RNA (1)...(19): siRNA sense strand
cuccauauauccuguuaau

SEQ ID NO: 1209059 - RNA, 19 nt, Homo sapiens
  misc_RNA (1)...(19): siRNA sense strand
ggucugcuccucagggauu

SEQ ID NO: 1209060 - RNA, 19 nt, Homo sapiens
  misc_RNA (1)...(19): siRNA sense strand
ggaagguccugacggauga

SEQ ID NO: 1209061 - RNA, 19 nt, Homo sapiens
  misc_RNA (1)...(19): siRNA sense strand
ccgaggagcucaagaaguu

SEQ ID NO: 1209062 - RNA, 19 nt, Homo sapiens
  misc_RNA (1)...(19): siRNA sense strand
ggaacuggaccugcaagga

SEQ ID NO: 1209063 - RNA, 19 nt, Homo sapiens
  misc_RNA (1)...(19): siRNA sense strand
caagcaagaugcggaagcu

SEQ ID NO: 1209064 - RNA, 19 nt, Homo sapiens
  misc_RNA (1)...(19): siRNA sense strand
gcugcuggaugcucuguac

SEQ ID NO: 1209065 - RNA, 19 nt, Homo sapiens
  misc_RNA (1)...(19): siRNA sense strand
gaggagcucaagaaguuca

SEQ ID NO: 1209066 - RNA, 19 nt, Homo sapiens
  misc_RNA (1)...(19): siRNA sense strand
ggaagguccugacggauga

SEQ ID NO: 1209067 - RNA, 19 nt, Homo sapiens
  misc_RNA (1)...(19): siRNA sense strand
ccgaggagcucaagaaguu

SEQ ID NO: 1209068 - RNA, 19 nt, Homo sapiens
  misc_RNA (1)...(19): siRNA sense strand
ggaacuggaccugcaagga

SEQ ID NO: 1209069 - RNA, 19 nt, Homo sapiens
  misc_RNA (1)...(19): siRNA sense strand
caagcaagaugcggaagcu

SEQ ID NO: 1209070 - RNA, 19 nt, Homo sapiens
  misc_RNA (1)...(19): siRNA sense strand
gcugcuggaugcucuguac

SEQ ID NO: 1209071 - RNA, 19 nt, Homo sapiens
  misc_RNA (1)...(19): siRNA sense strand
gaggagcucaagaaguuca

SEQ ID NO: 1209072 - RNA, 19 nt, Homo sapiens
  misc_RNA (1)...(19): siRNA sense strand
ggaagguccugacggauga

SEQ ID NO: 1209073 - RNA, 19 nt, Homo sapiens
  misc_RNA (1)...(19): siRNA sense strand
ccgaggagcucaagaaguu

SEQ ID NO: 1209074 - RNA, 19 nt, Homo sapiens
  misc_RNA (1)...(19): siRNA sense strand
ggaacuggaccugcaagga

SEQ ID NO: 1209075 - RNA, 19 nt, Homo sapiens
  misc_RNA (1)...(19): siRNA sense strand
caagcaagaugcggaagcu

SEQ ID NO: 1209076 - RNA, 19 nt, Homo sapiens
  misc_RNA (1)...(19): siRNA sense strand
gcugcuggaugcucuguac

SEQ ID NO: 1209077 - RNA, 19 nt, Homo sapiens
  misc_RNA (1)...(19): siRNA sense strand
gaggagcucaagaaguuca

SEQ ID NO: 1209078 - RNA, 19 nt, Homo sapiens
  misc_RNA (1)...(19): siRNA sense strand
ggaagguccugacggauga

SEQ ID NO: 1209079 - RNA, 19 nt, Homo sapiens
  misc_RNA (1)...(19): siRNA sense strand
ccgaggagcucaagaaguu

SEQ ID NO: 1209080 - RNA, 19 nt, Homo sapiens
  misc_RNA (1)...(19): siRNA sense strand
ggaacuggaccugcaagga

SEQ ID NO: 1209081 - RNA, 19 nt, Homo sapiens
  misc_RNA (1)...(19): siRNA sense strand
caagcaagaugcggaagcu

SEQ ID NO: 1209082 - RNA, 19 nt, Homo sapiens
  misc_RNA (1)...(19): siRNA sense strand
gcugcuggaugcucuguac

SEQ ID NO: 1209083 - RNA, 19 nt, Homo sapiens
  misc_RNA (1)...(19): siRNA sense strand
gaggagcucaagaaguuca

SEQ ID NO: 1209084 - RNA, 19 nt, Homo sapiens
  misc_RNA (1)...(19): siRNA sense strand
ggaagguccugacggauga

SEQ ID NO: 1209085 - RNA, 19 nt, Homo sapiens
  misc_RNA (1)...(19): siRNA sense strand
ccgaggagcucaagaaguu

SEQ ID NO: 1209086 - RNA, 19 nt, Homo sapiens
  misc_RNA (1)...(19): siRNA sense strand
ggaacuggaccugcaagga

SEQ ID NO: 1209087 - RNA, 19 nt, Homo sapiens
  misc_RNA (1)...(19): siRNA sense strand
caagcaagaugcggaagcu

SEQ ID NO: 1209088 - RNA, 19 nt, Homo sapiens
  misc_RNA (1)...(19): siRNA sense strand
gcugcuggaugcucuguac

SEQ ID NO: 1209089 - RNA, 19 nt, Homo sapiens
  misc_RNA (1)...(19): siRNA sense strand
gaggagcucaagaaguuca

SEQ ID NO: 1209090 - RNA, 19 nt, Homo sapiens
  misc_RNA (1)...(19): siRNA sense strand
ggaagguccugacggauga

SEQ ID NO: 1209091 - RNA, 19 nt, Homo sapiens
  misc_RNA (1)...(19): siRNA sense strand
ccgaggagcucaagaaguu

SEQ ID NO: 1209092 - RNA, 19 nt, Homo sapiens
  misc_RNA (1)...(19): siRNA sense strand
ggaacuggaccugcaagga

SEQ ID NO: 1209093 - RNA, 19 nt, Homo sapiens
  misc_RNA (1)...(19): siRNA sense strand
caagcaagaugcggaagcu

SEQ ID NO: 1209094 - RNA, 19 nt, Homo sapiens
  misc_RNA (1)...(19): siRNA sense strand
gcugcuggaugcucuguac

SEQ ID NO: 1209095 - RNA, 19 nt, Homo sapiens
  misc_RNA (1)...(19): siRNA sense strand
gaggagcucaagaaguuca

SEQ ID NO: 1209096 - RNA, 19 nt, Homo sapiens
  misc_RNA (1)...(19): siRNA sense strand
gaagcugucccgccuggaa

SEQ ID NO: 1209097 - RNA, 19 nt, Homo sapiens
  misc_RNA (1)...(19): siRNA sense strand
cguccucccuggaacagaa

SEQ ID NO: 1209098 - RNA, 19 nt, Homo sapiens
  misc_RNA (1)...(19): siRNA sense strand
gaccucaaccuggauauca

SEQ ID NO: 1209099 - RNA, 19 nt, Homo sapiens
  misc_RNA (1)...(19): siRNA sense strand
caaagcugaagcaggagaa

SEQ ID NO: 1209100 - RNA, 19 nt, Homo sapiens
  misc_RNA (1)...(19): siRNA sense strand
gaagcugucccgccuggaa

SEQ ID NO: 1209101 - RNA, 19 nt, Homo sapiens
  misc_RNA (1)...(19): siRNA sense strand
cguccucccuggaacagaa

SEQ ID NO: 1209102 - RNA, 19 nt, Homo sapiens
  misc_RNA (1)...(19): siRNA sense strand
gaccucaaccuggauauca

SEQ ID NO: 1209103 - RNA, 19 nt, Homo sapiens
  misc_RNA (1)...(19): siRNA sense strand
caaagcugaagcaggagaa

SEQ ID NO: 1209104 - RNA, 19 nt, Homo sapiens
  misc_RNA (1)...(19): siRNA sense strand
gaagcugucccgccuggaa

SEQ ID NO: 1209105 - RNA, 19 nt, Homo sapiens
  misc_RNA (1)...(19): siRNA sense strand
cguccucccuggaacagaa

SEQ ID NO: 1209106 - RNA, 19 nt, Homo sapiens
  misc_RNA (1)...(19): siRNA sense strand
gaccucaaccuggauauca

SEQ ID NO: 1209107 - RNA, 19 nt, Homo sapiens
  misc_RNA (1)...(19): siRNA sense strand
caaagcugaagcaggagaa

SEQ ID NO: 1209108 - RNA, 19 nt, Homo sapiens
  misc_RNA (1)...(19): siRNA sense strand
gaagcugucccgccuggaa

SEQ ID NO: 1209109 - RNA, 19 nt, Homo sapiens
  misc_RNA (1)...(19): siRNA sense strand
cguccucccuggaacagaa

SEQ ID NO: 1209110 - RNA, 19 nt, Homo sapiens
  misc_RNA (1)...(19): siRNA sense strand
gaccucaaccuggauauca

SEQ ID NO: 1209111 - RNA, 19 nt, Homo sapiens
  misc_RNA (1)...(19): siRNA sense strand
caaagcugaagcaggagaa

SEQ ID NO: 1209112 - RNA, 19 nt, Homo sapiens
  misc_RNA (1)...(19): siRNA sense strand
ggacaaugcuggccuguuc

SEQ ID NO: 1209113 - RNA, 19 nt, Homo sapiens
  misc_RNA (1)...(19): siRNA sense strand
gagaagcucauccaauuua

SEQ ID NO: 1209114 - RNA, 19 nt, Homo sapiens
  misc_RNA (1)...(19): siRNA sense strand
gaagaagccugggucauug

SEQ ID NO: 1209115 - RNA, 19 nt, Homo sapiens
  misc_RNA (1)...(19): siRNA sense strand
uaccaaagauccuggaaua

SEQ ID NO: 1209116 - RNA, 19 nt, Homo sapiens
  misc_RNA (1)...(19): siRNA sense strand
ucaaaggucucacgaauuc

SEQ ID NO: 1209117 - RNA, 19 nt, Homo sapiens
  misc_RNA (1)...(19): siRNA sense strand
caaagauccuggaauauuc

SEQ ID NO: 1209118 - RNA, 19 nt, Homo sapiens
  misc_RNA (1)...(19): siRNA sense strand
ucaagagacuggagaacua

SEQ ID NO: 1209119 - RNA, 19 nt, Homo sapiens
  misc_RNA (1)...(19): siRNA sense strand
ggaaauaugcccaacuuau

SEQ ID NO: 1209120 - RNA, 19 nt, Homo sapiens
  misc_RNA (1)...(19): siRNA sense strand
ggaagaagccugggucauu

SEQ ID NO: 1209121 - RNA, 19 nt, Homo sapiens
  misc_RNA (1)...(19): siRNA sense strand
gagguuacauggucucuug

SEQ ID NO: 1209122 - RNA, 19 nt, Homo sapiens
  misc_RNA (1)...(19): siRNA sense strand
acaacaagcucuucaacaa

SEQ ID NO: 1209123 - RNA, 19 nt, Homo sapiens
  misc_RNA (1)...(19): siRNA sense strand
ccacugugcugaacuguga

SEQ ID NO: 1209124 - RNA, 19 nt, Homo sapiens
  misc_RNA (1)...(19): siRNA sense strand
ggaaggugguagaauuuga

SEQ ID NO: 1209125 - RNA, 19 nt, Homo sapiens
  misc_RNA (1)...(19): siRNA sense strand
cagcaaagauagcagagaa

SEQ ID NO: 1209126 - RNA, 19 nt, Homo sapiens
  misc_RNA (1)...(19): siRNA sense strand
cauggucucuugcauaauu

SEQ ID NO: 1209127 - RNA, 19 nt, Homo sapiens
  misc_RNA (1)...(19): siRNA sense strand
gaaauaugcccaacuuauc

SEQ ID NO: 1209128 - RNA, 19 nt, Homo sapiens
  misc_RNA (1)...(19): siRNA sense strand
guccagagccugacaagua

SEQ ID NO: 1209129 - RNA, 19 nt, Homo sapiens
  misc_RNA (1)...(19): siRNA sense strand
aaaggaaacuauuggagaa

SEQ ID NO: 1209130 - RNA, 19 nt, Homo sapiens
  misc_RNA (1)...(19): siRNA sense strand
ccaaagauccuggaauauu

SEQ ID NO: 1209131 - RNA, 19 nt, Homo sapiens
  misc_RNA (1)...(19): siRNA sense strand
ugacugaugcgcagaauaa

SEQ ID NO: 1209132 - RNA, 19 nt, Homo sapiens
  misc_RNA (1)...(19): siRNA sense strand
gcaggacacagcaaagaua

SEQ ID NO: 1209133 - RNA, 19 nt, Homo sapiens
  misc_RNA (1)...(19): siRNA sense strand
gaaggaaaggaaacuauug

SEQ ID NO: 1209134 - RNA, 19 nt, Homo sapiens
  misc_RNA (1)...(19): siRNA sense strand
cgacauaggcgaugacaug

SEQ ID NO: 1209135 - RNA, 19 nt, Homo sapiens
  misc_RNA (1)...(19): siRNA sense strand
gaaaaucugugaaaaugga

SEQ ID NO: 1209136 - RNA, 19 nt, Homo sapiens
  misc_RNA (1)...(19): siRNA sense strand
ggaagcuccuuuacacaug

SEQ ID NO: 1209137 - RNA, 19 nt, Homo sapiens
  misc_RNA (1)...(19): siRNA sense strand
ucagugugcugucuccaua

SEQ ID NO: 1209138 - RNA, 19 nt, Homo sapiens
  misc_RNA (1)...(19): siRNA sense strand
uacauggucucuugcauaa

SEQ ID NO: 1209139 - RNA, 19 nt, Homo sapiens
  misc_RNA (1)...(19): siRNA sense strand
ggacucugcuuugcccuuu

SEQ ID NO: 1209140 - RNA, 19 nt, Homo sapiens
  misc_RNA (1)...(19): siRNA sense strand
ggaaggaaaggaaacuauu

SEQ ID NO: 1209141 - RNA, 19 nt, Homo sapiens
  misc_RNA (1)...(19): siRNA sense strand
gagcagcuguuuccuccuu

SEQ ID NO: 1209142 - RNA, 19 nt, Homo sapiens
  misc_RNA (1)...(19): siRNA sense strand
gcgcaucgcuggucaucug

SEQ ID NO: 1209143 - RNA, 19 nt, Homo sapiens
  misc_RNA (1)...(19): siRNA sense strand
ccacggcccugcacaacaa

SEQ ID NO: 1209144 - RNA, 19 nt, Homo sapiens
  misc_RNA (1)...(19): siRNA sense strand
cagcauuucuuccuacuuc

SEQ ID NO: 1209145 - RNA, 19 nt, Homo sapiens
  misc_RNA (1)...(19): siRNA sense strand
uggauacacugcauuuauu

SEQ ID NO: 1209146 - RNA, 19 nt, Homo sapiens
  misc_RNA (1)...(19): siRNA sense strand
gggccaauauugauuauac

SEQ ID NO: 1209147 - RNA, 19 nt, Homo sapiens
  misc_RNA (1)...(19): siRNA sense strand
gacaugguuucaggacuua

SEQ ID NO: 1209148 - RNA, 19 nt, Homo sapiens
  misc_RNA (1)...(19): siRNA sense strand
ggaacgggcaugcuucuga

SEQ ID NO: 1209149 - RNA, 19 nt, Homo sapiens
  misc_RNA (1)...(19): siRNA sense strand
ggagagcccuguuuucuau

SEQ ID NO: 1209150 - RNA, 19 nt, Homo sapiens
  misc_RNA (1)...(19): siRNA sense strand
cauaggcgaugacaugguu

SEQ ID NO: 1209151 - RNA, 19 nt, Homo sapiens
  misc_RNA (1)...(19): siRNA sense strand
gcucaugauccaaagcuua

SEQ ID NO: 1209152 - RNA, 19 nt, Homo sapiens
  misc_RNA (1)...(19): siRNA sense strand
gcccagaguugcacaagau

SEQ ID NO: 1209153 - RNA, 19 nt, Homo sapiens
  misc_RNA (1)...(19): siRNA sense strand
gugaugagguucaagaagu

SEQ ID NO: 1209154 - RNA, 19 nt, Homo sapiens
  misc_RNA (1)...(19): siRNA sense strand
aguauaaccuuguucauca

SEQ ID NO: 1209155 - RNA, 19 nt, Homo sapiens
  misc_RNA (1)...(19): siRNA sense strand
ugacaagaauggcugugaa

SEQ ID NO: 1209156 - RNA, 19 nt, Homo sapiens
  misc_RNA (1)...(19): siRNA sense strand
ugacaugguuucaggacuu

SEQ ID NO: 1209157 - RNA, 19 nt, Homo sapiens
  misc_RNA (1)...(19): siRNA sense strand
gguccaagcucucagugau

SEQ ID NO: 1209158 - RNA, 19 nt, Homo sapiens
  misc_RNA (1)...(19): siRNA sense strand
ugaccaaccuugugaccuu

SEQ ID NO: 1209159 - RNA, 19 nt, Homo sapiens
  misc_RNA (1)...(19): siRNA sense strand
ggagucagcaagagagaaa

SEQ ID NO: 1209160 - RNA, 19 nt, Homo sapiens
  misc_RNA (1)...(19): siRNA sense strand
ggugaucgccguccuguug

SEQ ID NO: 1209161 - RNA, 19 nt, Homo sapiens
  misc_RNA (1)...(19): siRNA sense strand
gaccagcucuugcccaucu

SEQ ID NO: 1209162 - RNA, 19 nt, Homo sapiens
  misc_RNA (1)...(19): siRNA sense strand
guaugaugcugccuugaga

SEQ ID NO: 1209163 - RNA, 19 nt, Homo sapiens
  misc_RNA (1)...(19): siRNA sense strand
ggaaacuauuggagaagug

SEQ ID NO: 1209164 - RNA, 19 nt, Homo sapiens
  misc_RNA (1)...(19): siRNA sense strand
gaacaagguugauuuucga

SEQ ID NO: 1209165 - RNA, 19 nt, Homo sapiens
  misc_RNA (1)...(19): siRNA sense strand
ucaccaaagucacgaggaa

SEQ ID NO: 1209166 - RNA, 19 nt, Homo sapiens
  misc_RNA (1)...(19): siRNA sense strand
gggaaaaucugugaaaaug

SEQ ID NO: 1209167 - RNA, 19 nt, Homo sapiens
  misc_RNA (1)...(19): siRNA sense strand
gguaagagcagccuguugu

SEQ ID NO: 1209168 - RNA, 19 nt, Homo sapiens
  misc_RNA (1)...(19): siRNA sense strand
gaccagcgcauccguguga

SEQ ID NO: 1209169 - RNA, 19 nt, Homo sapiens
  misc_RNA (1)...(19): siRNA sense strand
gggagaaaccauuugcaaa

SEQ ID NO: 1209170 - RNA, 19 nt, Homo sapiens
  misc_RNA (1)...(19): siRNA sense strand
caaccuagaucccuuugac

SEQ ID NO: 1209171 - RNA, 19 nt, Homo sapiens
  misc_RNA (1)...(19): siRNA sense strand
gaaauacagagacaacaca

SEQ ID NO: 1209172 - RNA, 19 nt, Homo sapiens
  misc_RNA (1)...(19): siRNA sense strand
caccaucccuccacuguca

SEQ ID NO: 1209173 - RNA, 19 nt, Homo sapiens
  misc_RNA (1)...(19): siRNA sense strand
auaacuaccugcuguuguu

SEQ ID NO: 1209174 - RNA, 19 nt, Homo sapiens
  misc_RNA (1)...(19): siRNA sense strand
cagagaacaagguugauuu

SEQ ID NO: 1209175 - RNA, 19 nt, Homo sapiens
  misc_RNA (1)...(19): siRNA sense strand
ggagacagaggcacaguuc

SEQ ID NO: 1209176 - RNA, 19 nt, Homo sapiens
  misc_RNA (1)...(19): siRNA sense strand
ggagaaaccauuugcaaaa

SEQ ID NO: 1209177 - RNA, 19 nt, Homo sapiens
  misc_RNA (1)...(19): siRNA sense strand
guacucgggccaauauuga

SEQ ID NO: 1209178 - RNA, 19 nt, Homo sapiens
  misc_RNA (1)...(19): siRNA sense strand
gaccuaagaaggaaggaaa

SEQ ID NO: 1209179 - RNA, 19 nt, Homo sapiens
  misc_RNA (1)...(19): siRNA sense strand
agucauggcugucaacauc

SEQ ID NO: 1209180 - RNA, 19 nt, Homo sapiens
  misc_RNA (1)...(19): siRNA sense strand
gaauaacuaccugcuguug

SEQ ID NO: 1209181 - RNA, 19 nt, Homo sapiens
  misc_RNA (1)...(19): siRNA sense strand
uagccggucuccuuuauuc

SEQ ID NO: 1209182 - RNA, 19 nt, Homo sapiens
  misc_RNA (1)...(19): siRNA sense strand
gugcugaucgucuucuuaa

SEQ ID NO: 1209183 - RNA, 19 nt, Homo sapiens
  misc_RNA (1)...(19): siRNA sense strand
gcagugaugagguucaaga

SEQ ID NO: 1209184 - RNA, 19 nt, Homo sapiens
  misc_RNA (1)...(19): siRNA sense strand
ggcaucugcuucugcauug

SEQ ID NO: 1209185 - RNA, 19 nt, Homo sapiens
  misc_RNA (1)...(19): siRNA sense strand
ucaggauuaucacaugaaa

SEQ ID NO: 1209186 - RNA, 19 nt, Homo sapiens
  misc_RNA (1)...(19): siRNA sense strand
gaggagugcauuaagaaga

SEQ ID NO: 1209187 - RNA, 19 nt, Homo sapiens
  misc_RNA (1)...(19): siRNA sense strand
agucaaaggucucacgaau

SEQ ID NO: 1209188 - RNA, 19 nt, Homo sapiens
  misc_RNA (1)...(19): siRNA sense strand
uaagaaggaaggaaaggaa

SEQ ID NO: 1209189 - RNA, 19 nt, Homo sapiens
  misc_RNA (1)...(19): siRNA sense strand
ggauacacugcauuuauug

SEQ ID NO: 1209190 - RNA, 19 nt, Homo sapiens
  misc_RNA (1)...(19): siRNA sense strand
gaucaugaccaaccuugug

SEQ ID NO: 1209191 - RNA, 19 nt, Homo sapiens
  misc_RNA (1)...(19): siRNA sense strand
uuacauggucucuugcaua

SEQ ID NO: 1209192 - RNA, 19 nt, Homo sapiens
  misc_RNA (1)...(19): siRNA sense strand
agaagcucauccaauuuaa

SEQ ID NO: 1209193 - RNA, 19 nt, Homo sapiens
  misc_RNA (1)...(19): siRNA sense strand
gcaaugggaaggugguaga

SEQ ID NO: 1209194 - RNA, 19 nt, Homo sapiens
  misc_RNA (1)...(19): siRNA sense strand
uauagccggucuccuuuau

SEQ ID NO: 1209195 - RNA, 19 nt, Homo sapiens
  misc_RNA (1)...(19): siRNA sense strand
cacuggagcuggagaggaa

SEQ ID NO: 1209196 - RNA, 19 nt, Homo sapiens
  misc_RNA (1)...(19): siRNA sense strand
ugaugagguucaagaaguu

SEQ ID NO: 1209197 - RNA, 19 nt, Homo sapiens
  misc_RNA (1)...(19): siRNA sense strand
cuggucaucugcagcauuu

SEQ ID NO: 1209198 - RNA, 19 nt, Homo sapiens
  misc_RNA (1)...(19): siRNA sense strand
cggagucgcuuagaugaga

SEQ ID NO: 1209199 - RNA, 19 nt, Homo sapiens
  misc_RNA (1)...(19): siRNA sense strand
ggauuggcuuggagacaga

SEQ ID NO: 1209200 - RNA, 19 nt, Homo sapiens
  misc_RNA (1)...(19): siRNA sense strand
acagugaguuaaugcagaa

SEQ ID NO: 1209201 - RNA, 19 nt, Homo sapiens
  misc_RNA (1)...(19): siRNA sense strand
gagaggaacgggcaugcuu

SEQ ID NO: 1209202 - RNA, 19 nt, Homo sapiens
  misc_RNA (1)...(19): siRNA sense strand
gcagcuguuuccuccuuug

SEQ ID NO: 1209203 - RNA, 19 nt, Homo sapiens
  misc_RNA (1)...(19): siRNA sense strand
caacacacccaccgugcuu

SEQ ID NO: 1209204 - RNA, 19 nt, Homo sapiens
  misc_RNA (1)...(19): siRNA sense strand
cagagaagccaaagguaga

SEQ ID NO: 1209205 - RNA, 19 nt, Homo sapiens
  misc_RNA (1)...(19): siRNA sense strand
uccagaagaugcacaagga

SEQ ID NO: 1209206 - RNA, 19 nt, Homo sapiens
  misc_RNA (1)...(19): siRNA sense strand
gcugcaguacuuagaauuu

SEQ ID NO: 1209207 - RNA, 19 nt, Homo sapiens
  misc_RNA (1)...(19): siRNA sense strand
gggaaauaugcccaacuua

SEQ ID NO: 1209208 - RNA, 19 nt, Homo sapiens
  misc_RNA (1)...(19): siRNA sense strand
gcagacaauccucaacugu

SEQ ID NO: 1209209 - RNA, 19 nt, Homo sapiens
  misc_RNA (1)...(19): siRNA sense strand
ggacacagcaaagauagca

SEQ ID NO: 1209210 - RNA, 19 nt, Homo sapiens
  misc_RNA (1)...(19): siRNA sense strand
cuccauauauccuguuaau

SEQ ID NO: 1209211 - RNA, 19 nt, Homo sapiens
  misc_RNA (1)...(19): siRNA sense strand
ggucugcuccucagggauu

SEQ ID NO: 1209212 - RNA, 19 nt, Homo sapiens
  misc_RNA (1)...(19): siRNA sense strand
ggacaaugcuggccuguuc

SEQ ID NO: 1209213 - RNA, 19 nt, Homo sapiens
  misc_RNA (1)...(19): siRNA sense strand
gagaagcucauccaauuua

SEQ ID NO: 1209214 - RNA, 19 nt, Homo sapiens
  misc_RNA (1)...(19): siRNA sense strand
gaagaagccugggucauug

SEQ ID NO: 1209215 - RNA, 19 nt, Homo sapiens
  misc_RNA (1)...(19): siRNA sense strand
uaccaaagauccuggaaua

SEQ ID NO: 1209216 - RNA, 19 nt, Homo sapiens
  misc_RNA (1)...(19): siRNA sense strand
ucaaaggucucacgaauuc

SEQ ID NO: 1209217 - RNA, 19 nt, Homo sapiens
  misc_RNA (1)...(19): siRNA sense strand
caaagauccuggaauauuc

SEQ ID NO: 1209218 - RNA, 19 nt, Homo sapiens
  misc_RNA (1)...(19): siRNA sense strand
ucaagagacuggagaacua

SEQ ID NO: 1209219 - RNA, 19 nt, Homo sapiens
  misc_RNA (1)...(19): siRNA sense strand
ggaaauaugcccaacuuau

SEQ ID NO: 1209220 - RNA, 19 nt, Homo sapiens
  misc_RNA (1)...(19): siRNA sense strand
ggaagaagccugggucauu

SEQ ID NO: 1209221 - RNA, 19 nt, Homo sapiens
  misc_RNA (1)...(19): siRNA sense strand
gagguuacauggucucuug

SEQ ID NO: 1209222 - RNA, 19 nt, Homo sapiens
  misc_RNA (1)...(19): siRNA sense strand
acaacaagcucuucaacaa

SEQ ID NO: 1209223 - RNA, 19 nt, Homo sapiens
  misc_RNA (1)...(19): siRNA sense strand
ccacugugcugaacuguga

SEQ ID NO: 1209224 - RNA, 19 nt, Homo sapiens
  misc_RNA (1)...(19): siRNA sense strand
ggaaggugguagaauuuga

SEQ ID NO: 1209225 - RNA, 19 nt, Homo sapiens
  misc_RNA (1)...(19): siRNA sense strand
cagcaaagauagcagagaa

SEQ ID NO: 1209226 - RNA, 19 nt, Homo sapiens
  misc_RNA (1)...(19): siRNA sense strand
cauggucucuugcauaauu

SEQ ID NO: 1209227 - RNA, 19 nt, Homo sapiens
  misc_RNA (1)...(19): siRNA sense strand
gaaauaugcccaacuuauc

SEQ ID NO: 1209228 - RNA, 19 nt, Homo sapiens
  misc_RNA (1)...(19): siRNA sense strand
guccagagccugacaagua

SEQ ID NO: 1209229 - RNA, 19 nt, Homo sapiens
  misc_RNA (1)...(19): siRNA sense strand
aaaggaaacuauuggagaa

SEQ ID NO: 1209230 - RNA, 19 nt, Homo sapiens
  misc_RNA (1)...(19): siRNA sense strand
ccaaagauccuggaauauu

SEQ ID NO: 1209231 - RNA, 19 nt, Homo sapiens
  misc_RNA (1)...(19): siRNA sense strand
ugacugaugcgcagaauaa

SEQ ID NO: 1209232 - RNA, 19 nt, Homo sapiens
  misc_RNA (1)...(19): siRNA sense strand
gcaggacacagcaaagaua

SEQ ID NO: 1209233 - RNA, 19 nt, Homo sapiens
  misc_RNA (1)...(19): siRNA sense strand
gaaggaaaggaaacuauug

SEQ ID NO: 1209234 - RNA, 19 nt, Homo sapiens
  misc_RNA (1)...(19): siRNA sense strand
cgacauaggcgaugacaug

SEQ ID NO: 1209235 - RNA, 19 nt, Homo sapiens
  misc_RNA (1)...(19): siRNA sense strand
gaaaaucugugaaaaugga

SEQ ID NO: 1209236 - RNA, 19 nt, Homo sapiens
  misc_RNA (1)...(19): siRNA sense strand
ggaagcuccuuuacacaug

SEQ ID NO: 1209237 - RNA, 19 nt, Homo sapiens
  misc_RNA (1)...(19): siRNA sense strand
ucagugugcugucuccaua

SEQ ID NO: 1209238 - RNA, 19 nt, Homo sapiens
  misc_RNA (1)...(19): siRNA sense strand
uacauggucucuugcauaa

SEQ ID NO: 1209239 - RNA, 19 nt, Homo sapiens
  misc_RNA (1)...(19): siRNA sense strand
ggacucugcuuugcccuuu

SEQ ID NO: 1209240 - RNA, 19 nt, Homo sapiens
  misc_RNA (1)...(19): siRNA sense strand
ggaaggaaaggaaacuauu

SEQ ID NO: 1209241 - RNA, 19 nt, Homo sapiens
  misc_RNA (1)...(19): siRNA sense strand
gagcagcuguuuccuccuu

SEQ ID NO: 1209242 - RNA, 19 nt, Homo sapiens
  misc_RNA (1)...(19): siRNA sense strand
gcgcaucgcuggucaucug

SEQ ID NO: 1209243 - RNA, 19 nt, Homo sapiens
  misc_RNA (1)...(19): siRNA sense strand
ccacggcccugcacaacaa

SEQ ID NO: 1209244 - RNA, 19 nt, Homo sapiens
  misc_RNA (1)...(19): siRNA sense strand
cagcauuucuuccuacuuc

SEQ ID NO: 1209245 - RNA, 19 nt, Homo sapiens
  misc_RNA (1)...(19): siRNA sense strand
uggauacacugcauuuauu

SEQ ID NO: 1209246 - RNA, 19 nt, Homo sapiens
  misc_RNA (1)...(19): siRNA sense strand
gggccaauauugauuauac

SEQ ID NO: 1209247 - RNA, 19 nt, Homo sapiens
  misc_RNA (1)...(19): siRNA sense strand
gacaugguuucaggacuua

SEQ ID NO: 1209248 - RNA, 19 nt, Homo sapiens
  misc_RNA (1)...(19): siRNA sense strand
ggaacgggcaugcuucuga

SEQ ID NO: 1209249 - RNA, 19 nt, Homo sapiens
  misc_RNA (1)...(19): siRNA sense strand
ggagagcccuguuuucuau

SEQ ID NO: 1209250 - RNA, 19 nt, Homo sapiens
  misc_RNA (1)...(19): siRNA sense strand
cauaggcgaugacaugguu

SEQ ID NO: 1209251 - RNA, 19 nt, Homo sapiens
  misc_RNA (1)...(19): siRNA sense strand
gcucaugauccaaagcuua

SEQ ID NO: 1209252 - RNA, 19 nt, Homo sapiens
  misc_RNA (1)...(19): siRNA sense strand
gcccagaguugcacaagau

SEQ ID NO: 1209253 - RNA, 19 nt, Homo sapiens
  misc_RNA (1)...(19): siRNA sense strand
gugaugagguucaagaagu

SEQ ID NO: 1209254 - RNA, 19 nt, Homo sapiens
  misc_RNA (1)...(19): siRNA sense strand
aguauaaccuuguucauca

SEQ ID NO: 1209255 - RNA, 19 nt, Homo sapiens
  misc_RNA (1)...(19): siRNA sense strand
ugacaagaauggcugugaa

SEQ ID NO: 1209256 - RNA, 19 nt, Homo sapiens
  misc_RNA (1)...(19): siRNA sense strand
ugacaugguuucaggacuu

SEQ ID NO: 1209257 - RNA, 19 nt, Homo sapiens
  misc_RNA (1)...(19): siRNA sense strand
gguccaagcucucagugau

SEQ ID NO: 1209258 - RNA, 19 nt, Homo sapiens
  misc_RNA (1)...(19): siRNA sense strand
ugaccaaccuugugaccuu

SEQ ID NO: 1209259 - RNA, 19 nt, Homo sapiens
  misc_RNA (1)...(19): siRNA sense strand
ggagucagcaagagagaaa

SEQ ID NO: 1209260 - RNA, 19 nt, Homo sapiens
  misc_RNA (1)...(19): siRNA sense strand
ggugaucgccguccuguug

SEQ ID NO: 1209261 - RNA, 19 nt, Homo sapiens
  misc_RNA (1)...(19): siRNA sense strand
gaccagcucuugcccaucu

SEQ ID NO: 1209262 - RNA, 19 nt, Homo sapiens
  misc_RNA (1)...(19): siRNA sense strand
guaugaugcugccuugaga

SEQ ID NO: 1209263 - RNA, 19 nt, Homo sapiens
  misc_RNA (1)...(19): siRNA sense strand
ggaaacuauuggagaagug

SEQ ID NO: 1209264 - RNA, 19 nt, Homo sapiens
  misc_RNA (1)...(19): siRNA sense strand
gaacaagguugauuuucga

SEQ ID NO: 1209265 - RNA, 19 nt, Homo sapiens
  misc_RNA (1)...(19): siRNA sense strand
ucaccaaagucacgaggaa

SEQ ID NO: 1209266 - RNA, 19 nt, Homo sapiens
  misc_RNA (1)...(19): siRNA sense strand
gggaaaaucugugaaaaug

SEQ ID NO: 1209267 - RNA, 19 nt, Homo sapiens
  misc_RNA (1)...(19): siRNA sense strand
gguaagagcagccuguugu

SEQ ID NO: 1209268 - RNA, 19 nt, Homo sapiens
  misc_RNA (1)...(19): siRNA sense strand
gaccagcgcauccguguga

SEQ ID NO: 1209269 - RNA, 19 nt, Homo sapiens
  misc_RNA (1)...(19): siRNA sense strand
gggagaaaccauuugcaaa

SEQ ID NO: 1209270 - RNA, 19 nt, Homo sapiens
  misc_RNA (1)...(19): siRNA sense strand
caaccuagaucccuuugac

SEQ ID NO: 1209271 - RNA, 19 nt, Homo sapiens
  misc_RNA (1)...(19): siRNA sense strand
gaaauacagagacaacaca

SEQ ID NO: 1209272 - RNA, 19 nt, Homo sapiens
  misc_RNA (1)...(19): siRNA sense strand
caccaucccuccacuguca

SEQ ID NO: 1209273 - RNA, 19 nt, Homo sapiens
  misc_RNA (1)...(19): siRNA sense strand
auaacuaccugcuguuguu

SEQ ID NO: 1209274 - RNA, 19 nt, Homo sapiens
  misc_RNA (1)...(19): siRNA sense strand
cagagaacaagguugauuu

SEQ ID NO: 1209275 - RNA, 19 nt, Homo sapiens
  misc_RNA (1)...(19): siRNA sense strand
ggagacagaggcacaguuc

SEQ ID NO: 1209276 - RNA, 19 nt, Homo sapiens
  misc_RNA (1)...(19): siRNA sense strand
ggagaaaccauuugcaaaa

SEQ ID NO: 1209277 - RNA, 19 nt, Homo sapiens
  misc_RNA (1)...(19): siRNA sense strand
guacucgggccaauauuga

SEQ ID NO: 1209278 - RNA, 19 nt, Homo sapiens
  misc_RNA (1)...(19): siRNA sense strand
gaccuaagaaggaaggaaa

SEQ ID NO: 1209279 - RNA, 19 nt, Homo sapiens
  misc_RNA (1)...(19): siRNA sense strand
agucauggcugucaacauc

SEQ ID NO: 1209280 - RNA, 19 nt, Homo sapiens
  misc_RNA (1)...(19): siRNA sense strand
gaauaacuaccugcuguug

SEQ ID NO: 1209281 - RNA, 19 nt, Homo sapiens
  misc_RNA (1)...(19): siRNA sense strand
uagccggucuccuuuauuc

SEQ ID NO: 1209282 - RNA, 19 nt, Homo sapiens
  misc_RNA (1)...(19): siRNA sense strand
gugcugaucgucuucuuaa

SEQ ID NO: 1209283 - RNA, 19 nt, Homo sapiens
  misc_RNA (1)...(19): siRNA sense strand
gcagugaugagguucaaga

SEQ ID NO: 1209284 - RNA, 19 nt, Homo sapiens
  misc_RNA (1)...(19): siRNA sense strand
ggcaucugcuucugcauug

SEQ ID NO: 1209285 - RNA, 19 nt, Homo sapiens
  misc_RNA (1)...(19): siRNA sense strand
ucaggauuaucacaugaaa

SEQ ID NO: 1209286 - RNA, 19 nt, Homo sapiens
  misc_RNA (1)...(19): siRNA sense strand
gaggagugcauuaagaaga

SEQ ID NO: 1209287 - RNA, 19 nt, Homo sapiens
  misc_RNA (1)...(19): siRNA sense strand
agucaaaggucucacgaau

SEQ ID NO: 1209288 - RNA, 19 nt, Homo sapiens
  misc_RNA (1)...(19): siRNA sense strand
uaagaaggaaggaaaggaa

SEQ ID NO: 1209289 - RNA, 19 nt, Homo sapiens
  misc_RNA (1)...(19): siRNA sense strand
ggauacacugcauuuauug

SEQ ID NO: 1209290 - RNA, 19 nt, Homo sapiens
  misc_RNA (1)...(19): siRNA sense strand
gaucaugaccaaccuugug

SEQ ID NO: 1209291 - RNA, 19 nt, Homo sapiens
  misc_RNA (1)...(19): siRNA sense strand
uuacauggucucuugcaua

SEQ ID NO: 1209292 - RNA, 19 nt, Homo sapiens
  misc_RNA (1)...(19): siRNA sense strand
agaagcucauccaauuuaa

SEQ ID NO: 1209293 - RNA, 19 nt, Homo sapiens
  misc_RNA (1)...(19): siRNA sense strand
gcaaugggaaggugguaga

SEQ ID NO: 1209294 - RNA, 19 nt, Homo sapiens
  misc_RNA (1)...(19): siRNA sense strand
uauagccggucuccuuuau

SEQ ID NO: 1209295 - RNA, 19 nt, Homo sapiens
  misc_RNA (1)...(19): siRNA sense strand
cacuggagcuggagaggaa

SEQ ID NO: 1209296 - RNA, 19 nt, Homo sapiens
  misc_RNA (1)...(19): siRNA sense strand
ugaugagguucaagaaguu

SEQ ID NO: 1209297 - RNA, 19 nt, Homo sapiens
  misc_RNA (1)...(19): siRNA sense strand
cuggucaucugcagcauuu

SEQ ID NO: 1209298 - RNA, 19 nt, Homo sapiens
  misc_RNA (1)...(19): siRNA sense strand
cggagucgcuuagaugaga

SEQ ID NO: 1209299 - RNA, 19 nt, Homo sapiens
  misc_RNA (1)...(19): siRNA sense strand
ggauuggcuuggagacaga

SEQ ID NO: 1209300 - RNA, 19 nt, Homo sapiens
  misc_RNA (1)...(19): siRNA sense strand
acagugaguuaaugcagaa

SEQ ID NO: 1209301 - RNA, 19 nt, Homo sapiens
  misc_RNA (1)...(19): siRNA sense strand
gagaggaacgggcaugcuu

SEQ ID NO: 1209302 - RNA, 19 nt, Homo sapiens
  misc_RNA (1)...(19): siRNA sense strand
gcagcuguuuccuccuuug

SEQ ID NO: 1209303 - RNA, 19 nt, Homo sapiens
  misc_RNA (1)...(19): siRNA sense strand
caacacacccaccgugcuu

SEQ ID NO: 1209304 - RNA, 19 nt, Homo sapiens
  misc_RNA (1)...(19): siRNA sense strand
cagagaagccaaagguaga

SEQ ID NO: 1209305 - RNA, 19 nt, Homo sapiens
  misc_RNA (1)...(19): siRNA sense strand
uccagaagaugcacaagga

SEQ ID NO: 1209306 - RNA, 19 nt, Homo sapiens
  misc_RNA (1)...(19): siRNA sense strand
gcugcaguacuuagaauuu

SEQ ID NO: 1209307 - RNA, 19 nt, Homo sapiens
  misc_RNA (1)...(19): siRNA sense strand
gggaaauaugcccaacuua

SEQ ID NO: 1209308 - RNA, 19 nt, Homo sapiens
  misc_RNA (1)...(19): siRNA sense strand
gcagacaauccucaacugu

SEQ ID NO: 1209309 - RNA, 19 nt, Homo sapiens
  misc_RNA (1)...(19): siRNA sense strand
ggacacagcaaagauagca

SEQ ID NO: 1209310 - RNA, 19 nt, Homo sapiens
  misc_RNA (1)...(19): siRNA sense strand
cuccauauauccuguuaau

SEQ ID NO: 1209311 - RNA, 19 nt, Homo sapiens
  misc_RNA (1)...(19): siRNA sense strand
ggucugcuccucagggauu

SEQ ID NO: 1209312 - RNA, 19 nt, Homo sapiens
  misc_RNA (1)...(19): siRNA sense strand
ggacaaugcuggccuguuc

SEQ ID NO: 1209313 - RNA, 19 nt, Homo sapiens
  misc_RNA (1)...(19): siRNA sense strand
gagaagcucauccaauuua

SEQ ID NO: 1209314 - RNA, 19 nt, Homo sapiens
  misc_RNA (1)...(19): siRNA sense strand
gaagaagccugggucauug

SEQ ID NO: 1209315 - RNA, 19 nt, Homo sapiens
  misc_RNA (1)...(19): siRNA sense strand
uaccaaagauccuggaaua

SEQ ID NO: 1209316 - RNA, 19 nt, Homo sapiens
  misc_RNA (1)...(19): siRNA sense strand
ucaaaggucucacgaauuc

SEQ ID NO: 1209317 - RNA, 19 nt, Homo sapiens
  misc_RNA (1)...(19): siRNA sense strand
caaagauccuggaauauuc

SEQ ID NO: 1209318 - RNA, 19 nt, Homo sapiens
  misc_RNA (1)...(19): siRNA sense strand
ucaagagacuggagaacua

SEQ ID NO: 1209319 - RNA, 19 nt, Homo sapiens
  misc_RNA (1)...(19): siRNA sense strand
ggaaauaugcccaacuuau

SEQ ID NO: 1209320 - RNA, 19 nt, Homo sapiens
  misc_RNA (1)...(19): siRNA sense strand
ggaagaagccugggucauu

SEQ ID NO: 1209321 - RNA, 19 nt, Homo sapiens
  misc_RNA (1)...(19): siRNA sense strand
gagguuacauggucucuug

SEQ ID NO: 1209322 - RNA, 19 nt, Homo sapiens
  misc_RNA (1)...(19): siRNA sense strand
acaacaagcucuucaacaa

SEQ ID NO: 1209323 - RNA, 19 nt, Homo sapiens
  misc_RNA (1)...(19): siRNA sense strand
ccacugugcugaacuguga

SEQ ID NO: 1209324 - RNA, 19 nt, Homo sapiens
  misc_RNA (1)...(19): siRNA sense strand
ggaaggugguagaauuuga

SEQ ID NO: 1209325 - RNA, 19 nt, Homo sapiens
  misc_RNA (1)...(19): siRNA sense strand
cagcaaagauagcagagaa

SEQ ID NO: 1209326 - RNA, 19 nt, Homo sapiens
  misc_RNA (1)...(19): siRNA sense strand
cauggucucuugcauaauu

SEQ ID NO: 1209327 - RNA, 19 nt, Homo sapiens
  misc_RNA (1)...(19): siRNA sense strand
gaaauaugcccaacuuauc

SEQ ID NO: 1209328 - RNA, 19 nt, Homo sapiens
  misc_RNA (1)...(19): siRNA sense strand
guccagagccugacaagua

SEQ ID NO: 1209329 - RNA, 19 nt, Homo sapiens
  misc_RNA (1)...(19): siRNA sense strand
aaaggaaacuauuggagaa

SEQ ID NO: 1209330 - RNA, 19 nt, Homo sapiens
  misc_RNA (1)...(19): siRNA sense strand
ccaaagauccuggaauauu

SEQ ID NO: 1209331 - RNA, 19 nt, Homo sapiens
  misc_RNA (1)...(19): siRNA sense strand
ugacugaugcgcagaauaa

SEQ ID NO: 1209332 - RNA, 19 nt, Homo sapiens
  misc_RNA (1)...(19): siRNA sense strand
gcaggacacagcaaagaua

SEQ ID NO: 1209333 - RNA, 19 nt, Homo sapiens
  misc_RNA (1)...(19): siRNA sense strand
gaaggaaaggaaacuauug

SEQ ID NO: 1209334 - RNA, 19 nt, Homo sapiens
  misc_RNA (1)...(19): siRNA sense strand
cgacauaggcgaugacaug

SEQ ID NO: 1209335 - RNA, 19 nt, Homo sapiens
  misc_RNA (1)...(19): siRNA sense strand
gaaaaucugugaaaaugga

SEQ ID NO: 1209336 - RNA, 19 nt, Homo sapiens
  misc_RNA (1)...(19): siRNA sense strand
ggaagcuccuuuacacaug

SEQ ID NO: 1209337 - RNA, 19 nt, Homo sapiens
  misc_RNA (1)...(19): siRNA sense strand
ucagugugcugucuccaua

SEQ ID NO: 1209338 - RNA, 19 nt, Homo sapiens
  misc_RNA (1)...(19): siRNA sense strand
uacauggucucuugcauaa

SEQ ID NO: 1209339 - RNA, 19 nt, Homo sapiens
  misc_RNA (1)...(19): siRNA sense strand
ggacucugcuuugcccuuu

SEQ ID NO: 1209340 - RNA, 19 nt, Homo sapiens
  misc_RNA (1)...(19): siRNA sense strand
ggaaggaaaggaaacuauu

SEQ ID NO: 1209341 - RNA, 19 nt, Homo sapiens
  misc_RNA (1)...(19): siRNA sense strand
gagcagcuguuuccuccuu

SEQ ID NO: 1209342 - RNA, 19 nt, Homo sapiens
  misc_RNA (1)...(19): siRNA sense strand
gcgcaucgcuggucaucug

SEQ ID NO: 1209343 - RNA, 19 nt, Homo sapiens
  misc_RNA (1)...(19): siRNA sense strand
ccacggcccugcacaacaa

SEQ ID NO: 1209344 - RNA, 19 nt, Homo sapiens
  misc_RNA (1)...(19): siRNA sense strand
cagcauuucuuccuacuuc

SEQ ID NO: 1209345 - RNA, 19 nt, Homo sapiens
  misc_RNA (1)...(19): siRNA sense strand
uggauacacugcauuuauu

SEQ ID NO: 1209346 - RNA, 19 nt, Homo sapiens
  misc_RNA (1)...(19): siRNA sense strand
gggccaauauugauuauac

SEQ ID NO: 1209347 - RNA, 19 nt, Homo sapiens
  misc_RNA (1)...(19): siRNA sense strand
gacaugguuucaggacuua

SEQ ID NO: 1209348 - RNA, 19 nt, Homo sapiens
  misc_RNA (1)...(19): siRNA sense strand
ggaacgggcaugcuucuga

SEQ ID NO: 1209349 - RNA, 19 nt, Homo sapiens
  misc_RNA (1)...(19): siRNA sense strand
ggagagcccuguuuucuau

SEQ ID NO: 1209350 - RNA, 19 nt, Homo sapiens
  misc_RNA (1)...(19): siRNA sense strand
cauaggcgaugacaugguu

SEQ ID NO: 1209351 - RNA, 19 nt, Homo sapiens
  misc_RNA (1)...(19): siRNA sense strand
gcucaugauccaaagcuua

SEQ ID NO: 1209352 - RNA, 19 nt, Homo sapiens
  misc_RNA (1)...(19): siRNA sense strand
gcccagaguugcacaagau

SEQ ID NO: 1209353 - RNA, 19 nt, Homo sapiens
  misc_RNA (1)...(19): siRNA sense strand
gugaugagguucaagaagu

SEQ ID NO: 1209354 - RNA, 19 nt, Homo sapiens
  misc_RNA (1)...(19): siRNA sense strand
aguauaaccuuguucauca

SEQ ID NO: 1209355 - RNA, 19 nt, Homo sapiens
  misc_RNA (1)...(19): siRNA sense strand
ugacaagaauggcugugaa

SEQ ID NO: 1209356 - RNA, 19 nt, Homo sapiens
  misc_RNA (1)...(19): siRNA sense strand
ugacaugguuucaggacuu

SEQ ID NO: 1209357 - RNA, 19 nt, Homo sapiens
  misc_RNA (1)...(19): siRNA sense strand
gguccaagcucucagugau

SEQ ID NO: 1209358 - RNA, 19 nt, Homo sapiens
  misc_RNA (1)...(19): siRNA sense strand
ugaccaaccuugugaccuu

SEQ ID NO: 1209359 - RNA, 19 nt, Homo sapiens
  misc_RNA (1)...(19): siRNA sense strand
ggagucagcaagagagaaa

SEQ ID NO: 1209360 - RNA, 19 nt, Homo sapiens
  misc_RNA (1)...(19): siRNA sense strand
ggugaucgccguccuguug

SEQ ID NO: 1209361 - RNA, 19 nt, Homo sapiens
  misc_RNA (1)...(19): siRNA sense strand
gaccagcucuugcccaucu

SEQ ID NO: 1209362 - RNA, 19 nt, Homo sapiens
  misc_RNA (1)...(19): siRNA sense strand
guaugaugcugccuugaga

SEQ ID NO: 1209363 - RNA, 19 nt, Homo sapiens
  misc_RNA (1)...(19): siRNA sense strand
ggaaacuauuggagaagug

SEQ ID NO: 1209364 - RNA, 19 nt, Homo sapiens
  misc_RNA (1)...(19): siRNA sense strand
gaacaagguugauuuucga

SEQ ID NO: 1209365 - RNA, 19 nt, Homo sapiens
  misc_RNA (1)...(19): siRNA sense strand
ucaccaaagucacgaggaa

SEQ ID NO: 1209366 - RNA, 19 nt, Homo sapiens
  misc_RNA (1)...(19): siRNA sense strand
gggaaaaucugugaaaaug

SEQ ID NO: 1209367 - RNA, 19 nt, Homo sapiens
  misc_RNA (1)...(19): siRNA sense strand
gguaagagcagccuguugu

SEQ ID NO: 1209368 - RNA, 19 nt, Homo sapiens
  misc_RNA (1)...(19): siRNA sense strand
gaccagcgcauccguguga

SEQ ID NO: 1209369 - RNA, 19 nt, Homo sapiens
  misc_RNA (1)...(19): siRNA sense strand
gggagaaaccauuugcaaa

SEQ ID NO: 1209370 - RNA, 19 nt, Homo sapiens
  misc_RNA (1)...(19): siRNA sense strand
caaccuagaucccuuugac

SEQ ID NO: 1209371 - RNA, 19 nt, Homo sapiens
  misc_RNA (1)...(19): siRNA sense strand
gaaauacagagacaacaca

SEQ ID NO: 1209372 - RNA, 19 nt, Homo sapiens
  misc_RNA (1)...(19): siRNA sense strand
caccaucccuccacuguca

SEQ ID NO: 1209373 - RNA, 19 nt, Homo sapiens
  misc_RNA (1)...(19): siRNA sense strand
auaacuaccugcuguuguu

SEQ ID NO: 1209374 - RNA, 19 nt, Homo sapiens
  misc_RNA (1)...(19): siRNA sense strand
cagagaacaagguugauuu

SEQ ID NO: 1209375 - RNA, 19 nt, Homo sapiens
  misc_RNA (1)...(19): siRNA sense strand
ggagacagaggcacaguuc

SEQ ID NO: 1209376 - RNA, 19 nt, Homo sapiens
  misc_RNA (1)...(19): siRNA sense strand
ggagaaaccauuugcaaaa

SEQ ID NO: 1209377 - RNA, 19 nt, Homo sapiens
  misc_RNA (1)...(19): siRNA sense strand
guacucgggccaauauuga

SEQ ID NO: 1209378 - RNA, 19 nt, Homo sapiens
  misc_RNA (1)...(19): siRNA sense strand
gaccuaagaaggaaggaaa

SEQ ID NO: 1209379 - RNA, 19 nt, Homo sapiens
  misc_RNA (1)...(19): siRNA sense strand
agucauggcugucaacauc

SEQ ID NO: 1209380 - RNA, 19 nt, Homo sapiens
  misc_RNA (1)...(19): siRNA sense strand
gaauaacuaccugcuguug

SEQ ID NO: 1209381 - RNA, 19 nt, Homo sapiens
  misc_RNA (1)...(19): siRNA sense strand
uagccggucuccuuuauuc

SEQ ID NO: 1209382 - RNA, 19 nt, Homo sapiens
  misc_RNA (1)...(19): siRNA sense strand
gugcugaucgucuucuuaa

SEQ ID NO: 1209383 - RNA, 19 nt, Homo sapiens
  misc_RNA (1)...(19): siRNA sense strand
gcagugaugagguucaaga

SEQ ID NO: 1209384 - RNA, 19 nt, Homo sapiens
  misc_RNA (1)...(19): siRNA sense strand
ggcaucugcuucugcauug

SEQ ID NO: 1209385 - RNA, 19 nt, Homo sapiens
  misc_RNA (1)...(19): siRNA sense strand
ucaggauuaucacaugaaa

SEQ ID NO: 1209386 - RNA, 19 nt, Homo sapiens
  misc_RNA (1)...(19): siRNA sense strand
gaggagugcauuaagaaga

SEQ ID NO: 1209387 - RNA, 19 nt, Homo sapiens
  misc_RNA (1)...(19): siRNA sense strand
agucaaaggucucacgaau

SEQ ID NO: 1209388 - RNA, 19 nt, Homo sapiens
  misc_RNA (1)...(19): siRNA sense strand
uaagaaggaaggaaaggaa

SEQ ID NO: 1209389 - RNA, 19 nt, Homo sapiens
  misc_RNA (1)...(19): siRNA sense strand
ggauacacugcauuuauug

SEQ ID NO: 1209390 - RNA, 19 nt, Homo sapiens
  misc_RNA (1)...(19): siRNA sense strand
gaucaugaccaaccuugug

SEQ ID NO: 1209391 - RNA, 19 nt, Homo sapiens
  misc_RNA (1)...(19): siRNA sense strand
uuacauggucucuugcaua

SEQ ID NO: 1209392 - RNA, 19 nt, Homo sapiens
  misc_RNA (1)...(19): siRNA sense strand
agaagcucauccaauuuaa

SEQ ID NO: 1209393 - RNA, 19 nt, Homo sapiens
  misc_RNA (1)...(19): siRNA sense strand
gcaaugggaaggugguaga

SEQ ID NO: 1209394 - RNA, 19 nt, Homo sapiens
  misc_RNA (1)...(19): siRNA sense strand
uauagccggucuccuuuau

SEQ ID NO: 1209395 - RNA, 19 nt, Homo sapiens
  misc_RNA (1)...(19): siRNA sense strand
cacuggagcuggagaggaa

SEQ ID NO: 1209396 - RNA, 19 nt, Homo sapiens
  misc_RNA (1)...(19): siRNA sense strand
ugaugagguucaagaaguu

SEQ ID NO: 1209397 - RNA, 19 nt, Homo sapiens
  misc_RNA (1)...(19): siRNA sense strand
cuggucaucugcagcauuu

SEQ ID NO: 1209398 - RNA, 19 nt, Homo sapiens
  misc_RNA (1)...(19): siRNA sense strand
cggagucgcuuagaugaga

SEQ ID NO: 1209399 - RNA, 19 nt, Homo sapiens
  misc_RNA (1)...(19): siRNA sense strand
ggauuggcuuggagacaga

SEQ ID NO: 1209400 - RNA, 19 nt, Homo sapiens
  misc_RNA (1)...(19): siRNA sense strand
acagugaguuaaugcagaa

SEQ ID NO: 1209401 - RNA, 19 nt, Homo sapiens
  misc_RNA (1)...(19): siRNA sense strand
gagaggaacgggcaugcuu

SEQ ID NO: 1209402 - RNA, 19 nt, Homo sapiens
  misc_RNA (1)...(19): siRNA sense strand
gcagcuguuuccuccuuug

SEQ ID NO: 1209403 - RNA, 19 nt, Homo sapiens
  misc_RNA (1)...(19): siRNA sense strand
caacacacccaccgugcuu

SEQ ID NO: 1209404 - RNA, 19 nt, Homo sapiens
  misc_RNA (1)...(19): siRNA sense strand
cagagaagccaaagguaga

SEQ ID NO: 1209405 - RNA, 19 nt, Homo sapiens
  misc_RNA (1)...(19): siRNA sense strand
uccagaagaugcacaagga

SEQ ID NO: 1209406 - RNA, 19 nt, Homo sapiens
  misc_RNA (1)...(19): siRNA sense strand
gcugcaguacuuagaauuu

SEQ ID NO: 1209407 - RNA, 19 nt, Homo sapiens
  misc_RNA (1)...(19): siRNA sense strand
gggaaauaugcccaacuua

SEQ ID NO: 1209408 - RNA, 19 nt, Homo sapiens
  misc_RNA (1)...(19): siRNA sense strand
gcagacaauccucaacugu

SEQ ID NO: 1209409 - RNA, 19 nt, Homo sapiens
  misc_RNA (1)...(19): siRNA sense strand
ggacacagcaaagauagca

SEQ ID NO: 1209410 - RNA, 19 nt, Homo sapiens
  misc_RNA (1)...(19): siRNA sense strand
cuccauauauccuguuaau

SEQ ID NO: 1209411 - RNA, 19 nt, Homo sapiens
  misc_RNA (1)...(19): siRNA sense strand
ggucugcuccucagggauu

SEQ ID NO: 1209412 - RNA, 19 nt, Homo sapiens
  misc_RNA (1)...(19): siRNA sense strand
gagugugucuauacuauuu

SEQ ID NO: 1209413 - RNA, 19 nt, Homo sapiens
  misc_RNA (1)...(19): siRNA sense strand
ccaggaagcuaccaaggaa

SEQ ID NO: 1209414 - RNA, 19 nt, Homo sapiens
  misc_RNA (1)...(19): siRNA sense strand
gaugaugagugugucuaua

SEQ ID NO: 1209415 - RNA, 19 nt, Homo sapiens
  misc_RNA (1)...(19): siRNA sense strand
gaaguucccaccacggaua

SEQ ID NO: 1209416 - RNA, 19 nt, Homo sapiens
  misc_RNA (1)...(19): siRNA sense strand
ccacggauauugacuucuu

SEQ ID NO: 1209417 - RNA, 19 nt, Homo sapiens
  misc_RNA (1)...(19): siRNA sense strand
gcagaucuauguguacuca

SEQ ID NO: 1209418 - RNA, 19 nt, Homo sapiens
  misc_RNA (1)...(19): siRNA sense strand
ggcagcagaucuaugugua

SEQ ID NO: 1209419 - RNA, 19 nt, Homo sapiens
  misc_RNA (1)...(19): siRNA sense strand
acucaaagcugguaaaaga

SEQ ID NO: 1209420 - RNA, 19 nt, Homo sapiens
  misc_RNA (1)...(19): siRNA sense strand
agaucuauguguacucaaa

SEQ ID NO: 1209421 - RNA, 19 nt, Homo sapiens
  misc_RNA (1)...(19): siRNA sense strand
cuagugcucaagaagauua

SEQ ID NO: 1209422 - RNA, 19 nt, Homo sapiens
  misc_RNA (1)...(19): siRNA sense strand
agaugggagucguggguua

SEQ ID NO: 1209423 - RNA, 19 nt, Homo sapiens
  misc_RNA (1)...(19): siRNA sense strand
gcucaagaagauuauaaug

SEQ ID NO: 1209424 - RNA, 19 nt, Homo sapiens
  misc_RNA (1)...(19): siRNA sense strand
gacuguagauucauuaacg

SEQ ID NO: 1209425 - RNA, 19 nt, Homo sapiens
  misc_RNA (1)...(19): siRNA sense strand
gcugugcauggaauauuua

SEQ ID NO: 1209426 - RNA, 19 nt, Homo sapiens
  misc_RNA (1)...(19): siRNA sense strand
ugacuucuucugcgaguaa

SEQ ID NO: 1209427 - RNA, 19 nt, Homo sapiens
  misc_RNA (1)...(19): siRNA sense strand
gaugagugugucuauacua

SEQ ID NO: 1209428 - RNA, 19 nt, Homo sapiens
  misc_RNA (1)...(19): siRNA sense strand
ggcuagugcucaagaagau

SEQ ID NO: 1209429 - RNA, 19 nt, Homo sapiens
  misc_RNA (1)...(19): siRNA sense strand
gugcauggaauauuuaugg

SEQ ID NO: 1209430 - RNA, 19 nt, Homo sapiens
  misc_RNA (1)...(19): siRNA sense strand
gugcucaagaagauuauaa

SEQ ID NO: 1209431 - RNA, 19 nt, Homo sapiens
  misc_RNA (1)...(19): siRNA sense strand
caccacggauauugacuuc

SEQ ID NO: 1209432 - RNA, 19 nt, Homo sapiens
  misc_RNA (1)...(19): siRNA sense strand
ucaaggaacagcgugugua

SEQ ID NO: 1209433 - RNA, 19 nt, Homo sapiens
  misc_RNA (1)...(19): siRNA sense strand
gaagcuaccaaggaaguuc

SEQ ID NO: 1209434 - RNA, 19 nt, Homo sapiens
  misc_RNA (1)...(19): siRNA sense strand
gugcagaugaugagugugu

SEQ ID NO: 1209435 - RNA, 19 nt, Homo sapiens
  misc_RNA (1)...(19): siRNA sense strand
cagcagaucuauguguacu

SEQ ID NO: 1209436 - RNA, 19 nt, Homo sapiens
  misc_RNA (1)...(19): siRNA sense strand
ugcugugcauggaauauuu

SEQ ID NO: 1209437 - RNA, 19 nt, Homo sapiens
  misc_RNA (1)...(19): siRNA sense strand
gggcagcagaucuaugugu

SEQ ID NO: 1209438 - RNA, 19 nt, Homo sapiens
  misc_RNA (1)...(19): siRNA sense strand
caaagcugguaaaagaaaa

SEQ ID NO: 1209439 - RNA, 19 nt, Homo sapiens
  misc_RNA (1)...(19): siRNA sense strand
augagugugucuauacuau

SEQ ID NO: 1209440 - RNA, 19 nt, Homo sapiens
  misc_RNA (1)...(19): siRNA sense strand
caaggaacagcguguguac

SEQ ID NO: 1209441 - RNA, 19 nt, Homo sapiens
  misc_RNA (1)...(19): siRNA sense strand
gaaaauggagcuggagaau

SEQ ID NO: 1209442 - RNA, 19 nt, Homo sapiens
  misc_RNA (1)...(19): siRNA sense strand
uaugugcugugcauggaau

SEQ ID NO: 1209443 - RNA, 19 nt, Homo sapiens
  misc_RNA (1)...(19): siRNA sense strand
ugggagucguggguuauuu

SEQ ID NO: 1209444 - RNA, 19 nt, Homo sapiens
  misc_RNA (1)...(19): siRNA sense strand
gaugggagucguggguuau

SEQ ID NO: 1209445 - RNA, 19 nt, Homo sapiens
  misc_RNA (1)...(19): siRNA sense strand
ggaagcuaccaaggaaguu

SEQ ID NO: 1209446 - RNA, 19 nt, Homo sapiens
  misc_RNA (1)...(19): siRNA sense strand
gggagucguggguuauuuc

SEQ ID NO: 1209447 - RNA, 19 nt, Homo sapiens
  misc_RNA (1)...(19): siRNA sense strand
gaccgucuagcuuccaaga

SEQ ID NO: 1209448 - RNA, 19 nt, Homo sapiens
  misc_RNA (1)...(19): siRNA sense strand
aagggcagcagaucuaugu

SEQ ID NO: 1209449 - RNA, 19 nt, Homo sapiens
  misc_RNA (1)...(19): siRNA sense strand
ccaccacggauauugacuu

SEQ ID NO: 1209450 - RNA, 19 nt, Homo sapiens
  misc_RNA (1)...(19): siRNA sense strand
ucacagagcucacgacaaa

SEQ ID NO: 1209451 - RNA, 19 nt, Homo sapiens
  misc_RNA (1)...(19): siRNA sense strand
agaaggagcugcagugucu

SEQ ID NO: 1209452 - RNA, 19 nt, Homo sapiens
  misc_RNA (1)...(19): siRNA sense strand
gguuugacaugacaccuaa

SEQ ID NO: 1209453 - RNA, 19 nt, Homo sapiens
  misc_RNA (1)...(19): siRNA sense strand
cgacuuccaugccaauugu

SEQ ID NO: 1209454 - RNA, 19 nt, Homo sapiens
  misc_RNA (1)...(19): siRNA sense strand
acagagcucacgacaaaua

SEQ ID NO: 1209455 - RNA, 19 nt, Homo sapiens
  misc_RNA (1)...(19): siRNA sense strand
ugacaugacaccuaacuau

SEQ ID NO: 1209456 - RNA, 19 nt, Homo sapiens
  misc_RNA (1)...(19): siRNA sense strand
gaacauggaggaggagugu

SEQ ID NO: 1209457 - RNA, 19 nt, Homo sapiens
  misc_RNA (1)...(19): siRNA sense strand
ggaggagugugagaaguuc

SEQ ID NO: 1209458 - RNA, 19 nt, Homo sapiens
  misc_RNA (1)...(19): siRNA sense strand
guaacaaggugaucaaacc

SEQ ID NO: 1209459 - RNA, 19 nt, Homo sapiens
  misc_RNA (1)...(19): siRNA sense strand
ccaaagaguuaagcaugug

SEQ ID NO: 1209460 - RNA, 19 nt, Homo sapiens
  misc_RNA (1)...(19): siRNA sense strand
caugacaccuaacuaugug

SEQ ID NO: 1209461 - RNA, 19 nt, Homo sapiens
  misc_RNA (1)...(19): siRNA sense strand
gaucuuggcaaacgucuuc

SEQ ID NO: 1209462 - RNA, 19 nt, Homo sapiens
  misc_RNA (1)...(19): siRNA sense strand
gaagaaggagcugcagugu

SEQ ID NO: 1209463 - RNA, 19 nt, Homo sapiens
  misc_RNA (1)...(19): siRNA sense strand
ggaguaacaaggugaucaa

SEQ ID NO: 1209464 - RNA, 19 nt, Homo sapiens
  misc_RNA (1)...(19): siRNA sense strand
gagcucacgacaaauauca

SEQ ID NO: 1209465 - RNA, 19 nt, Homo sapiens
  misc_RNA (1)...(19): siRNA sense strand
aggcgugucugggcucuua

SEQ ID NO: 1209466 - RNA, 19 nt, Homo sapiens
  misc_RNA (1)...(19): siRNA sense strand
ucagggacuucaccgagaa

SEQ ID NO: 1209467 - RNA, 19 nt, Homo sapiens
  misc_RNA (1)...(19): siRNA sense strand
acaccaugcuggccaacaa

SEQ ID NO: 1209468 - RNA, 19 nt, Homo sapiens
  misc_RNA (1)...(19): siRNA sense strand
gacaugacaccuaacuaug

SEQ ID NO: 1209469 - RNA, 19 nt, Homo sapiens
  misc_RNA (1)...(19): siRNA sense strand
gaccgagggugaggaguuc

SEQ ID NO: 1209470 - RNA, 19 nt, Homo sapiens
  misc_RNA (1)...(19): siRNA sense strand
ccagaugaccucagugaca

SEQ ID NO: 1209471 - RNA, 19 nt, Homo sapiens
  misc_RNA (1)...(19): siRNA sense strand
caggcuugcuucaaucuuc

SEQ ID NO: 1209472 - RNA, 19 nt, Homo sapiens
  misc_RNA (1)...(19): siRNA sense strand
gcgccaagagcaaccauug

SEQ ID NO: 1209473 - RNA, 19 nt, Homo sapiens
  misc_RNA (1)...(19): siRNA sense strand
ccugcaaccugaaugacaa

SEQ ID NO: 1209474 - RNA, 19 nt, Homo sapiens
  misc_RNA (1)...(19): siRNA sense strand
gaaugacaacugcaagaag

SEQ ID NO: 1209475 - RNA, 19 nt, Homo sapiens
  misc_RNA (1)...(19): siRNA sense strand
gaggaggagugugagaagu

SEQ ID NO: 1209476 - RNA, 19 nt, Homo sapiens
  misc_RNA (1)...(19): siRNA sense strand
gaaggccaacaacuccaaa

SEQ ID NO: 1209477 - RNA, 19 nt, Homo sapiens
  misc_RNA (1)...(19): siRNA sense strand
aagcugcgcuccuccuaca

SEQ ID NO: 1209478 - RNA, 19 nt, Homo sapiens
  misc_RNA (1)...(19): siRNA sense strand
uccaaagaguuaagcaugu

SEQ ID NO: 1209479 - RNA, 19 nt, Homo sapiens
  misc_RNA (1)...(19): siRNA sense strand
acaaggcccugcgccaguu

SEQ ID NO: 1209480 - RNA, 19 nt, Homo sapiens
  misc_RNA (1)...(19): siRNA sense strand
gaugaccucagugacagua

SEQ ID NO: 1209481 - RNA, 19 nt, Homo sapiens
  misc_RNA (1)...(19): siRNA sense strand
ccaauugucgagccuccua

SEQ ID NO: 1209482 - RNA, 19 nt, Homo sapiens
  misc_RNA (1)...(19): siRNA sense strand
ugaaugacaacugcaagaa

SEQ ID NO: 1209483 - RNA, 19 nt, Homo sapiens
  misc_RNA (1)...(19): siRNA sense strand
gacgagacccuccgcucuu

SEQ ID NO: 1209484 - RNA, 19 nt, Homo sapiens
  misc_RNA (1)...(19): siRNA sense strand
gcugcccugcggacaauua

SEQ ID NO: 1209485 - RNA, 19 nt, Homo sapiens
  misc_RNA (1)...(19): siRNA sense strand
cagcugcccugcggacaau

SEQ ID NO: 1209486 - RNA, 19 nt, Homo sapiens
  misc_RNA (1)...(19): siRNA sense strand
ccuaugaggacaaggagaa

SEQ ID NO: 1209487 - RNA, 19 nt, Homo sapiens
  misc_RNA (1)...(19): siRNA sense strand
gauuggguuugacaugaca

SEQ ID NO: 1209488 - RNA, 19 nt, Homo sapiens
  misc_RNA (1)...(19): siRNA sense strand
acgagacccuccgcucuuu

SEQ ID NO: 1209489 - RNA, 19 nt, Homo sapiens
  misc_RNA (1)...(19): siRNA sense strand
ggaggaggagugugagaag

SEQ ID NO: 1209490 - RNA, 19 nt, Homo sapiens
  misc_RNA (1)...(19): siRNA sense strand
gaacgccauccaggccuuu

SEQ ID NO: 1209491 - RNA, 19 nt, Homo sapiens
  misc_RNA (1)...(19): siRNA sense strand
ggugaucaaaccuaacuca

SEQ ID NO: 1209492 - RNA, 19 nt, Homo sapiens
  misc_RNA (1)...(19): siRNA sense strand
ugaccgagggugaggaguu

SEQ ID NO: 1209493 - RNA, 19 nt, Homo sapiens
  misc_RNA (1)...(19): siRNA sense strand
cgugcugucuguccugaug

SEQ ID NO: 1209494 - RNA, 19 nt, Homo sapiens
  misc_RNA (1)...(19): siRNA sense strand
acaaggagaagcccaacug

SEQ ID NO: 1209495 - RNA, 19 nt, Homo sapiens
  misc_RNA (1)...(19): siRNA sense strand
ugucuguccugaugcugaa

SEQ ID NO: 1209496 - RNA, 19 nt, Homo sapiens
  misc_RNA (1)...(19): siRNA sense strand
cgccuucuuugccagauga

SEQ ID NO: 1209497 - RNA, 19 nt, Homo sapiens
  misc_RNA (1)...(19): siRNA sense strand
acaauuaccaggcgugucu

SEQ ID NO: 1209498 - RNA, 19 nt, Homo sapiens
  misc_RNA (1)...(19): siRNA sense strand
aaacgucuucugccucuuc

SEQ ID NO: 1209499 - RNA, 19 nt, Homo sapiens
  misc_RNA (1)...(19): siRNA sense strand
gaguaacaaggugaucaaa

SEQ ID NO: 1209500 - RNA, 19 nt, Homo sapiens
  misc_RNA (1)...(19): siRNA sense strand
augauuggguuugacauga

SEQ ID NO: 1209501 - RNA, 19 nt, Homo sapiens
  misc_RNA (1)...(19): siRNA sense strand
ucuucaggcuugcuucaau

SEQ ID NO: 1209502 - RNA, 19 nt, Homo sapiens
  misc_RNA (1)...(19): siRNA sense strand
ggguuugacaugacaccua

SEQ ID NO: 1209503 - RNA, 19 nt, Homo sapiens
  misc_RNA (1)...(19): siRNA sense strand
ccuccuacaucuccaucug

SEQ ID NO: 1209504 - RNA, 19 nt, Homo sapiens
  misc_RNA (1)...(19): siRNA sense strand
gggaguaacaaggugauca

SEQ ID NO: 1209505 - RNA, 19 nt, Homo sapiens
  misc_RNA (1)...(19): siRNA sense strand
acauggaggaggaguguga

SEQ ID NO: 1209506 - RNA, 19 nt, Homo sapiens
  misc_RNA (1)...(19): siRNA sense strand
cugcccagcugcuccuaug

SEQ ID NO: 1209507 - RNA, 19 nt, Homo sapiens
  misc_RNA (1)...(19): siRNA sense strand
gcucacgacaaauaucauc

SEQ ID NO: 1209508 - RNA, 19 nt, Homo sapiens
  misc_RNA (1)...(19): siRNA sense strand
ucaagaagauuccuuauga

SEQ ID NO: 1209509 - RNA, 19 nt, Homo sapiens
  misc_RNA (1)...(19): siRNA sense strand
gagaucaccucguccauga

SEQ ID NO: 1209510 - RNA, 19 nt, Homo sapiens
  misc_RNA (1)...(19): siRNA sense strand
ccaacaagauuccagauga

SEQ ID NO: 1209511 - RNA, 19 nt, Homo sapiens
  misc_RNA (1)...(19): siRNA sense strand
ccacuaagcacuucaauga

SEQ ID NO: 1209512 - RNA, 19 nt, Homo sapiens
  misc_RNA (1)...(19): siRNA sense strand
ucaacaaacugccuacaaa

SEQ ID NO: 1209513 - RNA, 19 nt, Homo sapiens
  misc_RNA (1)...(19): siRNA sense strand
aagcaaagguaacgcaaua

SEQ ID NO: 1209514 - RNA, 19 nt, Homo sapiens
  misc_RNA (1)...(19): siRNA sense strand
ggacaaggauggaugaaac

SEQ ID NO: 1209515 - RNA, 19 nt, Homo sapiens
  misc_RNA (1)...(19): siRNA sense strand
gucgugaacuggacaauaa

SEQ ID NO: 1209516 - RNA, 19 nt, Homo sapiens
  misc_RNA (1)...(19): siRNA sense strand
gaaccgcagugcaaucuuc

SEQ ID NO: 1209517 - RNA, 19 nt, Homo sapiens
  misc_RNA (1)...(19): siRNA sense strand
gcacuucaaugacaucagu

SEQ ID NO: 1209518 - RNA, 19 nt, Homo sapiens
  misc_RNA (1)...(19): siRNA sense strand
ggaccaaucuuuuguaaug

SEQ ID NO: 1209519 - RNA, 19 nt, Homo sapiens
  misc_RNA (1)...(19): siRNA sense strand
ccaacuaaaucuccaacaa

SEQ ID NO: 1209520 - RNA, 19 nt, Homo sapiens
  misc_RNA (1)...(19): siRNA sense strand
gcaaagguaacgcaauauu

SEQ ID NO: 1209521 - RNA, 19 nt, Homo sapiens
  misc_RNA (1)...(19): siRNA sense strand
ggagucagauauugaucaa

SEQ ID NO: 1209522 - RNA, 19 nt, Homo sapiens
  misc_RNA (1)...(19): siRNA sense strand
caaagguaacgcaauauuu

SEQ ID NO: 1209523 - RNA, 19 nt, Homo sapiens
  misc_RNA (1)...(19): siRNA sense strand
gaccaacgaugagcucaaa

SEQ ID NO: 1209524 - RNA, 19 nt, Homo sapiens
  misc_RNA (1)...(19): siRNA sense strand
uaacuugauugcuucagaa

SEQ ID NO: 1209525 - RNA, 19 nt, Homo sapiens
  misc_RNA (1)...(19): siRNA sense strand
caacaacacccaaaucagu

SEQ ID NO: 1209526 - RNA, 19 nt, Homo sapiens
  misc_RNA (1)...(19): siRNA sense strand
caacuacaaugccguacug

SEQ ID NO: 1209527 - RNA, 19 nt, Homo sapiens
  misc_RNA (1)...(19): siRNA sense strand
ggccguagcugacauaugc

SEQ ID NO: 1209528 - RNA, 19 nt, Homo sapiens
  misc_RNA (1)...(19): siRNA sense strand
ggaugaaacuggaaaagaa

SEQ ID NO: 1209529 - RNA, 19 nt, Homo sapiens
  misc_RNA (1)...(19): siRNA sense strand
caagcacucucaggacuuu

SEQ ID NO: 1209530 - RNA, 19 nt, Homo sapiens
  misc_RNA (1)...(19): siRNA sense strand
gacuaaagcuuugauugau

SEQ ID NO: 1209531 - RNA, 19 nt, Homo sapiens
  misc_RNA (1)...(19): siRNA sense strand
guaacuugauugcuucaga

SEQ ID NO: 1209532 - RNA, 19 nt, Homo sapiens
  misc_RNA (1)...(19): siRNA sense strand
cgagucuucucuccgaaua

SEQ ID NO: 1209533 - RNA, 19 nt, Homo sapiens
  misc_RNA (1)...(19): siRNA sense strand
gaauggagacaaggaguuu

SEQ ID NO: 1209534 - RNA, 19 nt, Homo sapiens
  misc_RNA (1)...(19): siRNA sense strand
ucaaugacaucaguaacuu

SEQ ID NO: 1209535 - RNA, 19 nt, Homo sapiens
  misc_RNA (1)...(19): siRNA sense strand
gagaggagucagauauuga

SEQ ID NO: 1209536 - RNA, 19 nt, Homo sapiens
  misc_RNA (1)...(19): siRNA sense strand
acgaugagcucaaaugcaa

SEQ ID NO: 1209537 - RNA, 19 nt, Homo sapiens
  misc_RNA (1)...(19): siRNA sense strand
gagagaggagucagauauu

SEQ ID NO: 1209538 - RNA, 19 nt, Homo sapiens
  misc_RNA (1)...(19): siRNA sense strand
ccaguggccagaacaauaa

SEQ ID NO: 1209539 - RNA, 19 nt, Homo sapiens
  misc_RNA (1)...(19): siRNA sense strand
acugaaacaucaccaacua

SEQ ID NO: 1209540 - RNA, 19 nt, Homo sapiens
  misc_RNA (1)...(19): siRNA sense strand
ggcggaagcucucccugaa

SEQ ID NO: 1209541 - RNA, 19 nt, Homo sapiens
  misc_RNA (1)...(19): siRNA sense strand
aaauagagcaccaagcaaa

SEQ ID NO: 1209542 - RNA, 19 nt, Homo sapiens
  misc_RNA (1)...(19): siRNA sense strand
agacuaaagcuuugauuga

SEQ ID NO: 1209543 - RNA, 19 nt, Homo sapiens
  misc_RNA (1)...(19): siRNA sense strand
caacaagauuccagaugag

SEQ ID NO: 1209544 - RNA, 19 nt, Homo sapiens
  misc_RNA (1)...(19): siRNA sense strand
aaacaucaccaacuaaauc

SEQ ID NO: 1209545 - RNA, 19 nt, Homo sapiens
  misc_RNA (1)...(19): siRNA sense strand
gaaacaucaccaacuaaau

SEQ ID NO: 1209546 - RNA, 19 nt, Homo sapiens
  misc_RNA (1)...(19): siRNA sense strand
ugaaacaucaccaacuaaa

SEQ ID NO: 1209547 - RNA, 19 nt, Homo sapiens
  misc_RNA (1)...(19): siRNA sense strand
ugagagaggagucagauau

SEQ ID NO: 1209548 - RNA, 19 nt, Homo sapiens
  misc_RNA (1)...(19): siRNA sense strand
uagaucaccucgucuucaa

SEQ ID NO: 1209549 - RNA, 19 nt, Homo sapiens
  misc_RNA (1)...(19): siRNA sense strand
aagcagagcucagaagucu

SEQ ID NO: 1209550 - RNA, 19 nt, Homo sapiens
  misc_RNA (1)...(19): siRNA sense strand
agagaggagucagauauug

SEQ ID NO: 1209551 - RNA, 19 nt, Homo sapiens
  misc_RNA (1)...(19): siRNA sense strand
caagaagauuccuuaugag

SEQ ID NO: 1209552 - RNA, 19 nt, Homo sapiens
  misc_RNA (1)...(19): siRNA sense strand
cggaagcucucccugaaca

SEQ ID NO: 1209553 - RNA, 19 nt, Homo sapiens
  misc_RNA (1)...(19): siRNA sense strand
ggaauggagacaaggaguu

SEQ ID NO: 1209554 - RNA, 19 nt, Homo sapiens
  misc_RNA (1)...(19): siRNA sense strand
ccagaggaauggagacaag

SEQ ID NO: 1209555 - RNA, 19 nt, Homo sapiens
  misc_RNA (1)...(19): siRNA sense strand
gagaaguaccggaggaugu

SEQ ID NO: 1209556 - RNA, 19 nt, Homo sapiens
  misc_RNA (1)...(19): siRNA sense strand
acuaagcacuucaaugaca

SEQ ID NO: 1209557 - RNA, 19 nt, Homo sapiens
  misc_RNA (1)...(19): siRNA sense strand
gaaagccucuacgagucuu

SEQ ID NO: 1209558 - RNA, 19 nt, Homo sapiens
  misc_RNA (1)...(19): siRNA sense strand
gaacaauaagcuccuguac

SEQ ID NO: 1209559 - RNA, 19 nt, Homo sapiens
  misc_RNA (1)...(19): siRNA sense strand
gcaagcagagcucagaagu

SEQ ID NO: 1209560 - RNA, 19 nt, Homo sapiens
  misc_RNA (1)...(19): siRNA sense strand
gagcaccaagcaaagguaa

SEQ ID NO: 1209561 - RNA, 19 nt, Homo sapiens
  misc_RNA (1)...(19): siRNA sense strand
cauauuauccgagagauuc

SEQ ID NO: 1209562 - RNA, 19 nt, Homo sapiens
  misc_RNA (1)...(19): siRNA sense strand
gucaacuucuccaagauga

SEQ ID NO: 1209563 - RNA, 19 nt, Homo sapiens
  misc_RNA (1)...(19): siRNA sense strand
ccaccaaucgugucuugaa

SEQ ID NO: 1209564 - RNA, 19 nt, Homo sapiens
  misc_RNA (1)...(19): siRNA sense strand
ccgagagauucgccaguuu

SEQ ID NO: 1209565 - RNA, 19 nt, Homo sapiens
  misc_RNA (1)...(19): siRNA sense strand
cagcuucaccaacaagauu

SEQ ID NO: 1209566 - RNA, 19 nt, Homo sapiens
  misc_RNA (1)...(19): siRNA sense strand
uguaauggaugaagaaagc

SEQ ID NO: 1209567 - RNA, 19 nt, Homo sapiens
  misc_RNA (1)...(19): siRNA sense strand
gccgcugccuccacaacua

SEQ ID NO: 1209568 - RNA, 19 nt, Homo sapiens
  misc_RNA (1)...(19): siRNA sense strand
gaaaaccacuaagcacuuc

SEQ ID NO: 1209569 - RNA, 19 nt, Homo sapiens
  misc_RNA (1)...(19): siRNA sense strand
uggaggagaucacgcagau

SEQ ID NO: 1209570 - RNA, 19 nt, Homo sapiens
  misc_RNA (1)...(19): siRNA sense strand
uaacaauggagucgucaug

SEQ ID NO: 1209571 - RNA, 19 nt, Homo sapiens
  misc_RNA (1)...(19): siRNA sense strand
gaugauggugauacugaaa

SEQ ID NO: 1209572 - RNA, 19 nt, Homo sapiens
  misc_RNA (1)...(19): siRNA sense strand
ccagagugaugauggugau

SEQ ID NO: 1209573 - RNA, 19 nt, Homo sapiens
  misc_RNA (1)...(19): siRNA sense strand
ucaccgaccuggccuucau

SEQ ID NO: 1209574 - RNA, 19 nt, Homo sapiens
  misc_RNA (1)...(19): siRNA sense strand
gugaugauggugauacuga

SEQ ID NO: 1209575 - RNA, 19 nt, Homo sapiens
  misc_RNA (1)...(19): siRNA sense strand
caacuaaaucuccaacaac

SEQ ID NO: 1209576 - RNA, 19 nt, Homo sapiens
  misc_RNA (1)...(19): siRNA sense strand
gagauucgccaguuucaac

SEQ ID NO: 1209577 - RNA, 19 nt, Homo sapiens
  misc_RNA (1)...(19): siRNA sense strand
cagcugacccugcuagauc

SEQ ID NO: 1209578 - RNA, 19 nt, Homo sapiens
  misc_RNA (1)...(19): siRNA sense strand
aacuaaaucuccaacaaca

SEQ ID NO: 1209579 - RNA, 19 nt, Homo sapiens
  misc_RNA (1)...(19): siRNA sense strand
ccaacgaugagcucaaaug

SEQ ID NO: 1209580 - RNA, 19 nt, Homo sapiens
  misc_RNA (1)...(19): siRNA sense strand
aauauuuacuggaccaauc

SEQ ID NO: 1209581 - RNA, 19 nt, Homo sapiens
  misc_RNA (1)...(19): siRNA sense strand
caaacugccuacaaaauag

SEQ ID NO: 1209582 - RNA, 19 nt, Homo sapiens
  misc_RNA (1)...(19): siRNA sense strand
gaggaguucuucggacaag

SEQ ID NO: 1209583 - RNA, 19 nt, Homo sapiens
  misc_RNA (1)...(19): siRNA sense strand
ggucaacuucuccaagaug

SEQ ID NO: 1209584 - RNA, 19 nt, Homo sapiens
  misc_RNA (1)...(19): siRNA sense strand
gcagacuaaagcuuugauu

SEQ ID NO: 1209585 - RNA, 19 nt, Homo sapiens
  misc_RNA (1)...(19): siRNA sense strand
ggaguucuucggacaagga

SEQ ID NO: 1209586 - RNA, 19 nt, Homo sapiens
  misc_RNA (1)...(19): siRNA sense strand
cagacuaaagcuuugauug

SEQ ID NO: 1209587 - RNA, 19 nt, Homo sapiens
  misc_RNA (1)...(19): siRNA sense strand
acaaacugccuacaaaaua

SEQ ID NO: 1209588 - RNA, 19 nt, Homo sapiens
  misc_RNA (1)...(19): siRNA sense strand
gcagagcagccaccaaucg

SEQ ID NO: 1209589 - RNA, 19 nt, Homo sapiens
  misc_RNA (1)...(19): siRNA sense strand
gagagauucgccaguuuca

SEQ ID NO: 1209590 - RNA, 19 nt, Homo sapiens
  misc_RNA (1)...(19): siRNA sense strand
cuggucaacuucuccaaga

SEQ ID NO: 1209591 - RNA, 19 nt, Homo sapiens
  misc_RNA (1)...(19): siRNA sense strand
gaagacggccuggucaacu

SEQ ID NO: 1209592 - RNA, 19 nt, Homo sapiens
  misc_RNA (1)...(19): siRNA sense strand
aagacggccuggucaacuu

SEQ ID NO: 1209593 - RNA, 19 nt, Homo sapiens
  misc_RNA (1)...(19): siRNA sense strand
uccagcagcuucaccaaca

SEQ ID NO: 1209594 - RNA, 19 nt, Homo sapiens
  misc_RNA (1)...(19): siRNA sense strand
ccgcagagcagccaccaau

SEQ ID NO: 1209595 - RNA, 19 nt, Homo sapiens
  misc_RNA (1)...(19): siRNA sense strand
caaaauagagcaccaagca

SEQ ID NO: 1209596 - RNA, 19 nt, Homo sapiens
  misc_RNA (1)...(19): siRNA sense strand
caacaaacugccuacaaaa

SEQ ID NO: 1209597 - RNA, 19 nt, Homo sapiens
  misc_RNA (1)...(19): siRNA sense strand
gaagcucucccugaacauc

SEQ ID NO: 1209598 - RNA, 19 nt, Homo sapiens
  misc_RNA (1)...(19): siRNA sense strand
ggauggaugaaacuggaaa

SEQ ID NO: 1209599 - RNA, 19 nt, Homo sapiens
  misc_RNA (1)...(19): siRNA sense strand
ccaaucgugucuugaacgu

SEQ ID NO: 1209600 - RNA, 19 nt, Homo sapiens
  misc_RNA (1)...(19): siRNA sense strand
ugaugauggugauacugaa

SEQ ID NO: 1209601 - RNA, 19 nt, Homo sapiens
  misc_RNA (1)...(19): siRNA sense strand
cgagagauucgccaguuuc

SEQ ID NO: 1209602 - RNA, 19 nt, Homo sapiens
  misc_RNA (1)...(19): siRNA sense strand
gaccuccugucgugaacug

SEQ ID NO: 1209603 - RNA, 19 nt, Homo sapiens
  misc_RNA (1)...(19): siRNA sense strand
cuucagcgcucagcaagca

SEQ ID NO: 1209604 - RNA, 19 nt, Homo sapiens
  misc_RNA (1)...(19): siRNA sense strand
ccacucagcccuggagauc

SEQ ID NO: 1209605 - RNA, 19 nt, Homo sapiens
  misc_RNA (1)...(19): siRNA sense strand
aaugacaucaguaacuuga

SEQ ID NO: 1209606 - RNA, 19 nt, Homo sapiens
  misc_RNA (1)...(19): siRNA sense strand
ccagcagcuucaccaacaa

SEQ ID NO: 1209607 - RNA, 19 nt, Homo sapiens
  misc_RNA (1)...(19): siRNA sense strand
ggacaccagcaagcucuau

SEQ ID NO: 1209608 - RNA, 19 nt, Homo sapiens
  misc_RNA (1)...(19): siRNA sense strand
ucaagaagauuccuuauga

SEQ ID NO: 1209609 - RNA, 19 nt, Homo sapiens
  misc_RNA (1)...(19): siRNA sense strand
gagaucaccucguccauga

SEQ ID NO: 1209610 - RNA, 19 nt, Homo sapiens
  misc_RNA (1)...(19): siRNA sense strand
ccaacaagauuccagauga

SEQ ID NO: 1209611 - RNA, 19 nt, Homo sapiens
  misc_RNA (1)...(19): siRNA sense strand
ccacuaagcacuucaauga

SEQ ID NO: 1209612 - RNA, 19 nt, Homo sapiens
  misc_RNA (1)...(19): siRNA sense strand
ucaacaaacugccuacaaa

SEQ ID NO: 1209613 - RNA, 19 nt, Homo sapiens
  misc_RNA (1)...(19): siRNA sense strand
aagcaaagguaacgcaaua

SEQ ID NO: 1209614 - RNA, 19 nt, Homo sapiens
  misc_RNA (1)...(19): siRNA sense strand
ggacaaggauggaugaaac

SEQ ID NO: 1209615 - RNA, 19 nt, Homo sapiens
  misc_RNA (1)...(19): siRNA sense strand
gucgugaacuggacaauaa

SEQ ID NO: 1209616 - RNA, 19 nt, Homo sapiens
  misc_RNA (1)...(19): siRNA sense strand
gaaccgcagugcaaucuuc

SEQ ID NO: 1209617 - RNA, 19 nt, Homo sapiens
  misc_RNA (1)...(19): siRNA sense strand
gcacuucaaugacaucagu

SEQ ID NO: 1209618 - RNA, 19 nt, Homo sapiens
  misc_RNA (1)...(19): siRNA sense strand
ggaccaaucuuuuguaaug

SEQ ID NO: 1209619 - RNA, 19 nt, Homo sapiens
  misc_RNA (1)...(19): siRNA sense strand
ccaacuaaaucuccaacaa

SEQ ID NO: 1209620 - RNA, 19 nt, Homo sapiens
  misc_RNA (1)...(19): siRNA sense strand
gcaaagguaacgcaauauu

SEQ ID NO: 1209621 - RNA, 19 nt, Homo sapiens
  misc_RNA (1)...(19): siRNA sense strand
ggagucagauauugaucaa

SEQ ID NO: 1209622 - RNA, 19 nt, Homo sapiens
  misc_RNA (1)...(19): siRNA sense strand
caaagguaacgcaauauuu

SEQ ID NO: 1209623 - RNA, 19 nt, Homo sapiens
  misc_RNA (1)...(19): siRNA sense strand
gaccaacgaugagcucaaa

SEQ ID NO: 1209624 - RNA, 19 nt, Homo sapiens
  misc_RNA (1)...(19): siRNA sense strand
uaacuugauugcuucagaa

SEQ ID NO: 1209625 - RNA, 19 nt, Homo sapiens
  misc_RNA (1)...(19): siRNA sense strand
caacaacacccaaaucagu

SEQ ID NO: 1209626 - RNA, 19 nt, Homo sapiens
  misc_RNA (1)...(19): siRNA sense strand
caacuacaaugccguacug

SEQ ID NO: 1209627 - RNA, 19 nt, Homo sapiens
  misc_RNA (1)...(19): siRNA sense strand
ggccguagcugacauaugc

SEQ ID NO: 1209628 - RNA, 19 nt, Homo sapiens
  misc_RNA (1)...(19): siRNA sense strand
ggaugaaacuggaaaagaa

SEQ ID NO: 1209629 - RNA, 19 nt, Homo sapiens
  misc_RNA (1)...(19): siRNA sense strand
caagcacucucaggacuuu

SEQ ID NO: 1209630 - RNA, 19 nt, Homo sapiens
  misc_RNA (1)...(19): siRNA sense strand
gacuaaagcuuugauugau

SEQ ID NO: 1209631 - RNA, 19 nt, Homo sapiens
  misc_RNA (1)...(19): siRNA sense strand
guaacuugauugcuucaga

SEQ ID NO: 1209632 - RNA, 19 nt, Homo sapiens
  misc_RNA (1)...(19): siRNA sense strand
cgagucuucucuccgaaua

SEQ ID NO: 1209633 - RNA, 19 nt, Homo sapiens
  misc_RNA (1)...(19): siRNA sense strand
gaauggagacaaggaguuu

SEQ ID NO: 1209634 - RNA, 19 nt, Homo sapiens
  misc_RNA (1)...(19): siRNA sense strand
ucaaugacaucaguaacuu

SEQ ID NO: 1209635 - RNA, 19 nt, Homo sapiens
  misc_RNA (1)...(19): siRNA sense strand
gagaggagucagauauuga

SEQ ID NO: 1209636 - RNA, 19 nt, Homo sapiens
  misc_RNA (1)...(19): siRNA sense strand
acgaugagcucaaaugcaa

SEQ ID NO: 1209637 - RNA, 19 nt, Homo sapiens
  misc_RNA (1)...(19): siRNA sense strand
gagagaggagucagauauu

SEQ ID NO: 1209638 - RNA, 19 nt, Homo sapiens
  misc_RNA (1)...(19): siRNA sense strand
acugaaacaucaccaacua

SEQ ID NO: 1209639 - RNA, 19 nt, Homo sapiens
  misc_RNA (1)...(19): siRNA sense strand
agacuaaagcuuugauuga

SEQ ID NO: 1209640 - RNA, 19 nt, Homo sapiens
  misc_RNA (1)...(19): siRNA sense strand
aaauagagcaccaagcaaa

SEQ ID NO: 1209641 - RNA, 19 nt, Homo sapiens
  misc_RNA (1)...(19): siRNA sense strand
ugaaacaucaccaacuaaa

SEQ ID NO: 1209642 - RNA, 19 nt, Homo sapiens
  misc_RNA (1)...(19): siRNA sense strand
caacaagauuccagaugag

SEQ ID NO: 1209643 - RNA, 19 nt, Homo sapiens
  misc_RNA (1)...(19): siRNA sense strand
aaacaucaccaacuaaauc

SEQ ID NO: 1209644 - RNA, 19 nt, Homo sapiens
  misc_RNA (1)...(19): siRNA sense strand
gaaacaucaccaacuaaau

SEQ ID NO: 1209645 - RNA, 19 nt, Homo sapiens
  misc_RNA (1)...(19): siRNA sense strand
ugagagaggagucagauau

SEQ ID NO: 1209646 - RNA, 19 nt, Homo sapiens
  misc_RNA (1)...(19): siRNA sense strand
uagaucaccucgucuucaa

SEQ ID NO: 1209647 - RNA, 19 nt, Homo sapiens
  misc_RNA (1)...(19): siRNA sense strand
aagcagagcucagaagucu

SEQ ID NO: 1209648 - RNA, 19 nt, Homo sapiens
  misc_RNA (1)...(19): siRNA sense strand
agagaggagucagauauug

SEQ ID NO: 1209649 - RNA, 19 nt, Homo sapiens
  misc_RNA (1)...(19): siRNA sense strand
caagaagauuccuuaugag

SEQ ID NO: 1209650 - RNA, 19 nt, Homo sapiens
  misc_RNA (1)...(19): siRNA sense strand
gagaaguaccggaggaugu

SEQ ID NO: 1209651 - RNA, 19 nt, Homo sapiens
  misc_RNA (1)...(19): siRNA sense strand
ggaauggagacaaggaguu

SEQ ID NO: 1209652 - RNA, 19 nt, Homo sapiens
  misc_RNA (1)...(19): siRNA sense strand
ccagaggaauggagacaag

SEQ ID NO: 1209653 - RNA, 19 nt, Homo sapiens
  misc_RNA (1)...(19): siRNA sense strand
acuaagcacuucaaugaca

SEQ ID NO: 1209654 - RNA, 19 nt, Homo sapiens
  misc_RNA (1)...(19): siRNA sense strand
gaaagccucuacgagucuu

SEQ ID NO: 1209655 - RNA, 19 nt, Homo sapiens
  misc_RNA (1)...(19): siRNA sense strand
gcaagcagagcucagaagu

SEQ ID NO: 1209656 - RNA, 19 nt, Homo sapiens
  misc_RNA (1)...(19): siRNA sense strand
gagcaccaagcaaagguaa

SEQ ID NO: 1209657 - RNA, 19 nt, Homo sapiens
  misc_RNA (1)...(19): siRNA sense strand
cauauuauccgagagauuc

SEQ ID NO: 1209658 - RNA, 19 nt, Homo sapiens
  misc_RNA (1)...(19): siRNA sense strand
gucaacuucuccaagauga

SEQ ID NO: 1209659 - RNA, 19 nt, Homo sapiens
  misc_RNA (1)...(19): siRNA sense strand
ccaccaaucgugucuugaa

SEQ ID NO: 1209660 - RNA, 19 nt, Homo sapiens
  misc_RNA (1)...(19): siRNA sense strand
ccgagagauucgccaguuu

SEQ ID NO: 1209661 - RNA, 19 nt, Homo sapiens
  misc_RNA (1)...(19): siRNA sense strand
gaugauggugauacugaaa

SEQ ID NO: 1209662 - RNA, 19 nt, Homo sapiens
  misc_RNA (1)...(19): siRNA sense strand
uguaauggaugaagaaagc

SEQ ID NO: 1209663 - RNA, 19 nt, Homo sapiens
  misc_RNA (1)...(19): siRNA sense strand
gccgcugccuccacaacua

SEQ ID NO: 1209664 - RNA, 19 nt, Homo sapiens
  misc_RNA (1)...(19): siRNA sense strand
cagcuucaccaacaagauu

SEQ ID NO: 1209665 - RNA, 19 nt, Homo sapiens
  misc_RNA (1)...(19): siRNA sense strand
gaaaaccacuaagcacuuc

SEQ ID NO: 1209666 - RNA, 19 nt, Homo sapiens
  misc_RNA (1)...(19): siRNA sense strand
uggaggagaucacgcagau

SEQ ID NO: 1209667 - RNA, 19 nt, Homo sapiens
  misc_RNA (1)...(19): siRNA sense strand
uaacaauggagucgucaug

SEQ ID NO: 1209668 - RNA, 19 nt, Homo sapiens
  misc_RNA (1)...(19): siRNA sense strand
ccagagugaugauggugau

SEQ ID NO: 1209669 - RNA, 19 nt, Homo sapiens
  misc_RNA (1)...(19): siRNA sense strand
ucaccgaccuggccuucau

SEQ ID NO: 1209670 - RNA, 19 nt, Homo sapiens
  misc_RNA (1)...(19): siRNA sense strand
gugaugauggugauacuga

SEQ ID NO: 1209671 - RNA, 19 nt, Homo sapiens
  misc_RNA (1)...(19): siRNA sense strand
caacuaaaucuccaacaac

SEQ ID NO: 1209672 - RNA, 19 nt, Homo sapiens
  misc_RNA (1)...(19): siRNA sense strand
gagauucgccaguuucaac

SEQ ID NO: 1209673 - RNA, 19 nt, Homo sapiens
  misc_RNA (1)...(19): siRNA sense strand
cagcugacccugcuagauc

SEQ ID NO: 1209674 - RNA, 19 nt, Homo sapiens
  misc_RNA (1)...(19): siRNA sense strand
aacuaaaucuccaacaaca

SEQ ID NO: 1209675 - RNA, 19 nt, Homo sapiens
  misc_RNA (1)...(19): siRNA sense strand
ccaacgaugagcucaaaug

SEQ ID NO: 1209676 - RNA, 19 nt, Homo sapiens
  misc_RNA (1)...(19): siRNA sense strand
aauauuuacuggaccaauc

SEQ ID NO: 1209677 - RNA, 19 nt, Homo sapiens
  misc_RNA (1)...(19): siRNA sense strand
caaacugccuacaaaauag

SEQ ID NO: 1209678 - RNA, 19 nt, Homo sapiens
  misc_RNA (1)...(19): siRNA sense strand
gaggaguucuucggacaag

SEQ ID NO: 1209679 - RNA, 19 nt, Homo sapiens
  misc_RNA (1)...(19): siRNA sense strand
ggucaacuucuccaagaug

SEQ ID NO: 1209680 - RNA, 19 nt, Homo sapiens
  misc_RNA (1)...(19): siRNA sense strand
gcagacuaaagcuuugauu

SEQ ID NO: 1209681 - RNA, 19 nt, Homo sapiens
  misc_RNA (1)...(19): siRNA sense strand
ggaguucuucggacaagga

SEQ ID NO: 1209682 - RNA, 19 nt, Homo sapiens
  misc_RNA (1)...(19): siRNA sense strand
cagacuaaagcuuugauug

SEQ ID NO: 1209683 - RNA, 19 nt, Homo sapiens
  misc_RNA (1)...(19): siRNA sense strand
acaaacugccuacaaaaua

SEQ ID NO: 1209684 - RNA, 19 nt, Homo sapiens
  misc_RNA (1)...(19): siRNA sense strand
gcagagcagccaccaaucg

SEQ ID NO: 1209685 - RNA, 19 nt, Homo sapiens
  misc_RNA (1)...(19): siRNA sense strand
gagagauucgccaguuuca

SEQ ID NO: 1209686 - RNA, 19 nt, Homo sapiens
  misc_RNA (1)...(19): siRNA sense strand
cuggucaacuucuccaaga

SEQ ID NO: 1209687 - RNA, 19 nt, Homo sapiens
  misc_RNA (1)...(19): siRNA sense strand
gaagacggccuggucaacu

SEQ ID NO: 1209688 - RNA, 19 nt, Homo sapiens
  misc_RNA (1)...(19): siRNA sense strand
aagacggccuggucaacuu

SEQ ID NO: 1209689 - RNA, 19 nt, Homo sapiens
  misc_RNA (1)...(19): siRNA sense strand
uccagcagcuucaccaaca

SEQ ID NO: 1209690 - RNA, 19 nt, Homo sapiens
  misc_RNA (1)...(19): siRNA sense strand
ccgcagagcagccaccaau

SEQ ID NO: 1209691 - RNA, 19 nt, Homo sapiens
  misc_RNA (1)...(19): siRNA sense strand
caaaauagagcaccaagca

SEQ ID NO: 1209692 - RNA, 19 nt, Homo sapiens
  misc_RNA (1)...(19): siRNA sense strand
caacaaacugccuacaaaa

SEQ ID NO: 1209693 - RNA, 19 nt, Homo sapiens
  misc_RNA (1)...(19): siRNA sense strand
ggauggaugaaacuggaaa

SEQ ID NO: 1209694 - RNA, 19 nt, Homo sapiens
  misc_RNA (1)...(19): siRNA sense strand
ccaaucgugucuugaacgu

SEQ ID NO: 1209695 - RNA, 19 nt, Homo sapiens
  misc_RNA (1)...(19): siRNA sense strand
gaccuccugucgugaacug

SEQ ID NO: 1209696 - RNA, 19 nt, Homo sapiens
  misc_RNA (1)...(19): siRNA sense strand
cgagagauucgccaguuuc

SEQ ID NO: 1209697 - RNA, 19 nt, Homo sapiens
  misc_RNA (1)...(19): siRNA sense strand
ugaugauggugauacugaa

SEQ ID NO: 1209698 - RNA, 19 nt, Homo sapiens
  misc_RNA (1)...(19): siRNA sense strand
ccacucagcccuggagauc

SEQ ID NO: 1209699 - RNA, 19 nt, Homo sapiens
  misc_RNA (1)...(19): siRNA sense strand
cuucagcgcucagcaagca

SEQ ID NO: 1209700 - RNA, 19 nt, Homo sapiens
  misc_RNA (1)...(19): siRNA sense strand
ccagcagcuucaccaacaa

SEQ ID NO: 1209701 - RNA, 19 nt, Homo sapiens
  misc_RNA (1)...(19): siRNA sense strand
ggacaccagcaagcucuau

SEQ ID NO: 1209702 - RNA, 19 nt, Homo sapiens
  misc_RNA (1)...(19): siRNA sense strand
aaugacaucaguaacuuga

SEQ ID NO: 1209703 - RNA, 19 nt, Homo sapiens
  misc_RNA (1)...(19): siRNA sense strand
cuaagcacuucaaugacau

SEQ ID NO: 1209704 - RNA, 19 nt, Homo sapiens
  misc_RNA (1)...(19): siRNA sense strand
agucuucucuccgaauaga

SEQ ID NO: 1209705 - RNA, 19 nt, Homo sapiens
  misc_RNA (1)...(19): siRNA sense strand
uccaaaagcuugugucauc

SEQ ID NO: 1209706 - RNA, 19 nt, Homo sapiens
  misc_RNA (1)...(19): siRNA sense strand
ugagcgccaucgagaagug

SEQ ID NO: 1209707 - RNA, 19 nt, Homo sapiens
  misc_RNA (1)...(19): siRNA sense strand
ggugagcgccaucgagaag

SEQ ID NO: 1209708 - RNA, 19 nt, Homo sapiens
  misc_RNA (1)...(19): siRNA sense strand
gaaacaggcucagaauuug

SEQ ID NO: 1209709 - RNA, 19 nt, Homo sapiens
  misc_RNA (1)...(19): siRNA sense strand
gaaccaagcugacugugau

SEQ ID NO: 1209710 - RNA, 19 nt, Homo sapiens
  misc_RNA (1)...(19): siRNA sense strand
gacaagggcucacggauga

SEQ ID NO: 1209711 - RNA, 19 nt, Homo sapiens
  misc_RNA (1)...(19): siRNA sense strand
gggaagaucuugggaauau

SEQ ID NO: 1209712 - RNA, 19 nt, Homo sapiens
  misc_RNA (1)...(19): siRNA sense strand
gagaauggauguccucaug

SEQ ID NO: 1209713 - RNA, 19 nt, Homo sapiens
  misc_RNA (1)...(19): siRNA sense strand
ggaaggugauugaguuuga

SEQ ID NO: 1209714 - RNA, 19 nt, Homo sapiens
  misc_RNA (1)...(19): siRNA sense strand
ggagagcccugcugagaga

SEQ ID NO: 1209715 - RNA, 19 nt, Homo sapiens
  misc_RNA (1)...(19): siRNA sense strand
gaauggauguccucaugaa

SEQ ID NO: 1209716 - RNA, 19 nt, Homo sapiens
  misc_RNA (1)...(19): siRNA sense strand
ucaagaagguggagaaugu

SEQ ID NO: 1209717 - RNA, 19 nt, Homo sapiens
  misc_RNA (1)...(19): siRNA sense strand
gcgaaugucucucuaagga

SEQ ID NO: 1209718 - RNA, 19 nt, Homo sapiens
  misc_RNA (1)...(19): siRNA sense strand
ugaaacaggcucagaauuu

SEQ ID NO: 1209719 - RNA, 19 nt, Homo sapiens
  misc_RNA (1)...(19): siRNA sense strand
ggaaagucaucguuaggaa

SEQ ID NO: 1209720 - RNA, 19 nt, Homo sapiens
  misc_RNA (1)...(19): siRNA sense strand
guuugaagcugccuuguuu

SEQ ID NO: 1209721 - RNA, 19 nt, Homo sapiens
  misc_RNA (1)...(19): siRNA sense strand
gggcagaggcagaggauua

SEQ ID NO: 1209722 - RNA, 19 nt, Homo sapiens
  misc_RNA (1)...(19): siRNA sense strand
ucaauauacugucaaguga

SEQ ID NO: 1209723 - RNA, 19 nt, Homo sapiens
  misc_RNA (1)...(19): siRNA sense strand
guggauaucugcauucuca

SEQ ID NO: 1209724 - RNA, 19 nt, Homo sapiens
  misc_RNA (1)...(19): siRNA sense strand
gacccuaccuuaucucaga

SEQ ID NO: 1209725 - RNA, 19 nt, Homo sapiens
  misc_RNA (1)...(19): siRNA sense strand
cagcagaagucagauugua

SEQ ID NO: 1209726 - RNA, 19 nt, Homo sapiens
  misc_RNA (1)...(19): siRNA sense strand
caagugauagcuauucuuu

SEQ ID NO: 1209727 - RNA, 19 nt, Homo sapiens
  misc_RNA (1)...(19): siRNA sense strand
ugacaagccugaaguccuu

SEQ ID NO: 1209728 - RNA, 19 nt, Homo sapiens
  misc_RNA (1)...(19): siRNA sense strand
caucaguacuucauccaaa

SEQ ID NO: 1209729 - RNA, 19 nt, Homo sapiens
  misc_RNA (1)...(19): siRNA sense strand
ggcaaaggcugaccguaga

SEQ ID NO: 1209730 - RNA, 19 nt, Homo sapiens
  misc_RNA (1)...(19): siRNA sense strand
caaagaucauucuccuuga

SEQ ID NO: 1209731 - RNA, 19 nt, Homo sapiens
  misc_RNA (1)...(19): siRNA sense strand
gauauaagaaggagggaaa

SEQ ID NO: 1209732 - RNA, 19 nt, Homo sapiens
  misc_RNA (1)...(19): siRNA sense strand
gugaaaggcuaccggcaaa

SEQ ID NO: 1209733 - RNA, 19 nt, Homo sapiens
  misc_RNA (1)...(19): siRNA sense strand
ccaaaggccugucauuguc

SEQ ID NO: 1209734 - RNA, 19 nt, Homo sapiens
  misc_RNA (1)...(19): siRNA sense strand
caaagaaauugcagaacca

SEQ ID NO: 1209735 - RNA, 19 nt, Homo sapiens
  misc_RNA (1)...(19): siRNA sense strand
gcaacaggaccauguguga

SEQ ID NO: 1209736 - RNA, 19 nt, Homo sapiens
  misc_RNA (1)...(19): siRNA sense strand
ggucagaggcauacaguga

SEQ ID NO: 1209737 - RNA, 19 nt, Homo sapiens
  misc_RNA (1)...(19): siRNA sense strand
gaaauugcagaaccagaaa

SEQ ID NO: 1209738 - RNA, 19 nt, Homo sapiens
  misc_RNA (1)...(19): siRNA sense strand
gcaaagugacagccucaaa

SEQ ID NO: 1209739 - RNA, 19 nt, Homo sapiens
  misc_RNA (1)...(19): siRNA sense strand
ugagaaagaugaaggaaaa

SEQ ID NO: 1209740 - RNA, 19 nt, Homo sapiens
  misc_RNA (1)...(19): siRNA sense strand
ugacucaucugacaccaau

SEQ ID NO: 1209741 - RNA, 19 nt, Homo sapiens
  misc_RNA (1)...(19): siRNA sense strand
gagaucaccuucagagacu

SEQ ID NO: 1209742 - RNA, 19 nt, Homo sapiens
  misc_RNA (1)...(19): siRNA sense strand
gcggagauccuuugcagaa

SEQ ID NO: 1209743 - RNA, 19 nt, Homo sapiens
  misc_RNA (1)...(19): siRNA sense strand
gaaagucuggguuggcauu

SEQ ID NO: 1209744 - RNA, 19 nt, Homo sapiens
  misc_RNA (1)...(19): siRNA sense strand
gaacauccuuaccuucacu

SEQ ID NO: 1209745 - RNA, 19 nt, Homo sapiens
  misc_RNA (1)...(19): siRNA sense strand
gaagaucuugggaauaugu

SEQ ID NO: 1209746 - RNA, 19 nt, Homo sapiens
  misc_RNA (1)...(19): siRNA sense strand
gcaugaagccagcaggaaa

SEQ ID NO: 1209747 - RNA, 19 nt, Homo sapiens
  misc_RNA (1)...(19): siRNA sense strand
gaagcgaaugucucucuaa

SEQ ID NO: 1209748 - RNA, 19 nt, Homo sapiens
  misc_RNA (1)...(19): siRNA sense strand
uaagaaggagggaaagaaa

SEQ ID NO: 1209749 - RNA, 19 nt, Homo sapiens
  misc_RNA (1)...(19): siRNA sense strand
ccaccgaguuuaccaaagu

SEQ ID NO: 1209750 - RNA, 19 nt, Homo sapiens
  misc_RNA (1)...(19): siRNA sense strand
gcaagaaacagaggucaga

SEQ ID NO: 1209751 - RNA, 19 nt, Homo sapiens
  misc_RNA (1)...(19): siRNA sense strand
aaacauacucuuuggagaa

SEQ ID NO: 1209752 - RNA, 19 nt, Homo sapiens
  misc_RNA (1)...(19): siRNA sense strand
agugauagcuauucuuugu

SEQ ID NO: 1209753 - RNA, 19 nt, Homo sapiens
  misc_RNA (1)...(19): siRNA sense strand
gaacgucagcugcuuugug

SEQ ID NO: 1209754 - RNA, 19 nt, Homo sapiens
  misc_RNA (1)...(19): siRNA sense strand
cagaugagauacagagaca

SEQ ID NO: 1209755 - RNA, 19 nt, Homo sapiens
  misc_RNA (1)...(19): siRNA sense strand
aaacauaucacacguacau

SEQ ID NO: 1209756 - RNA, 19 nt, Homo sapiens
  misc_RNA (1)...(19): siRNA sense strand
gaacuuuggccuacguuuc

SEQ ID NO: 1209757 - RNA, 19 nt, Homo sapiens
  misc_RNA (1)...(19): siRNA sense strand
gggaauaugugggaaugug

SEQ ID NO: 1209758 - RNA, 19 nt, Homo sapiens
  misc_RNA (1)...(19): siRNA sense strand
gaaaaguaccccaaagaaa

SEQ ID NO: 1209759 - RNA, 19 nt, Homo sapiens
  misc_RNA (1)...(19): siRNA sense strand
acauaucacacguacauua

SEQ ID NO: 1209760 - RNA, 19 nt, Homo sapiens
  misc_RNA (1)...(19): siRNA sense strand
cauaucacacguacauuaa

SEQ ID NO: 1209761 - RNA, 19 nt, Homo sapiens
  misc_RNA (1)...(19): siRNA sense strand
gcacggccauccgguugaa

SEQ ID NO: 1209762 - RNA, 19 nt, Homo sapiens
  misc_RNA (1)...(19): siRNA sense strand
auuagaagauggagagauu

SEQ ID NO: 1209763 - RNA, 19 nt, Homo sapiens
  misc_RNA (1)...(19): siRNA sense strand
gaagauggagagauuugug

SEQ ID NO: 1209764 - RNA, 19 nt, Homo sapiens
  misc_RNA (1)...(19): siRNA sense strand
gaaagucaucguuaggaau

SEQ ID NO: 1209765 - RNA, 19 nt, Homo sapiens
  misc_RNA (1)...(19): siRNA sense strand
gacauuauccugccacauc

SEQ ID NO: 1209766 - RNA, 19 nt, Homo sapiens
  misc_RNA (1)...(19): siRNA sense strand
gcgaucacguccugguuau

SEQ ID NO: 1209767 - RNA, 19 nt, Homo sapiens
  misc_RNA (1)...(19): siRNA sense strand
uaaugaaacucccagaaaa

SEQ ID NO: 1209768 - RNA, 19 nt, Homo sapiens
  misc_RNA (1)...(19): siRNA sense strand
gggcaucauucacgccuau

SEQ ID NO: 1209769 - RNA, 19 nt, Homo sapiens
  misc_RNA (1)...(19): siRNA sense strand
caaagugacagccucaaau

SEQ ID NO: 1209770 - RNA, 19 nt, Homo sapiens
  misc_RNA (1)...(19): siRNA sense strand
gcgacccugugcaagguua

SEQ ID NO: 1209771 - RNA, 19 nt, Homo sapiens
  misc_RNA (1)...(19): siRNA sense strand
gaggagugcauuaagaaga

SEQ ID NO: 1209772 - RNA, 19 nt, Homo sapiens
  misc_RNA (1)...(19): siRNA sense strand
caaaugccaccuugacaug

SEQ ID NO: 1209773 - RNA, 19 nt, Homo sapiens
  misc_RNA (1)...(19): siRNA sense strand
gcaaaugccaccuugacau

SEQ ID NO: 1209774 - RNA, 19 nt, Homo sapiens
  misc_RNA (1)...(19): siRNA sense strand
gcccagaggagcaaaguga

SEQ ID NO: 1209775 - RNA, 19 nt, Homo sapiens
  misc_RNA (1)...(19): siRNA sense strand
cuuagagucuugugaugaa

SEQ ID NO: 1209776 - RNA, 19 nt, Homo sapiens
  misc_RNA (1)...(19): siRNA sense strand
cagcaggcauggaucuuuc

SEQ ID NO: 1209777 - RNA, 19 nt, Homo sapiens
  misc_RNA (1)...(19): siRNA sense strand
ggauaucaguguaugucau

SEQ ID NO: 1209778 - RNA, 19 nt, Homo sapiens
  misc_RNA (1)...(19): siRNA sense strand
ugagguggauaucugcauu

SEQ ID NO: 1209779 - RNA, 19 nt, Homo sapiens
  misc_RNA (1)...(19): siRNA sense strand
cgaccuguguuccugaaug

SEQ ID NO: 1209780 - RNA, 19 nt, Homo sapiens
  misc_RNA (1)...(19): siRNA sense strand
ggcagucaauggaacuuug

SEQ ID NO: 1209781 - RNA, 19 nt, Homo sapiens
  misc_RNA (1)...(19): siRNA sense strand
cagaagacccagauacugu

SEQ ID NO: 1209782 - RNA, 19 nt, Homo sapiens
  misc_RNA (1)...(19): siRNA sense strand
ugauugccauguuuaaugu

SEQ ID NO: 1209783 - RNA, 19 nt, Homo sapiens
  misc_RNA (1)...(19): siRNA sense strand
caaaagauuucgaguccuu

SEQ ID NO: 1209784 - RNA, 19 nt, Homo sapiens
  misc_RNA (1)...(19): siRNA sense strand
gagcucuucuccguaauuc

SEQ ID NO: 1209785 - RNA, 19 nt, Homo sapiens
  misc_RNA (1)...(19): siRNA sense strand
caggaaaugagaaagauga

SEQ ID NO: 1209786 - RNA, 19 nt, Homo sapiens
  misc_RNA (1)...(19): siRNA sense strand
gaggauugcaguucaagga

SEQ ID NO: 1209787 - RNA, 19 nt, Homo sapiens
  misc_RNA (1)...(19): siRNA sense strand
ccaaagguaucagcacaca

SEQ ID NO: 1209788 - RNA, 19 nt, Homo sapiens
  misc_RNA (1)...(19): siRNA sense strand
uuacaucacccaaccagaa

SEQ ID NO: 1209789 - RNA, 19 nt, Homo sapiens
  misc_RNA (1)...(19): siRNA sense strand
caagcgaguucagacaaug

SEQ ID NO: 1209790 - RNA, 19 nt, Homo sapiens
  misc_RNA (1)...(19): siRNA sense strand
ggacugugcauagcccuuu

SEQ ID NO: 1209791 - RNA, 19 nt, Homo sapiens
  misc_RNA (1)...(19): siRNA sense strand
gcucuucuccguaauucaa

SEQ ID NO: 1209792 - RNA, 19 nt, Homo sapiens
  misc_RNA (1)...(19): siRNA sense strand
cccgagcucuucuccguaa

SEQ ID NO: 1209793 - RNA, 19 nt, Homo sapiens
  misc_RNA (1)...(19): siRNA sense strand
caccaaaggcuucgucuuc

SEQ ID NO: 1209794 - RNA, 19 nt, Homo sapiens
  misc_RNA (1)...(19): siRNA sense strand
guaccuccuuucucucuuc

SEQ ID NO: 1209795 - RNA, 19 nt, Homo sapiens
  misc_RNA (1)...(19): siRNA sense strand
ggaaagaaaauuacuggaa

SEQ ID NO: 1209796 - RNA, 19 nt, Homo sapiens
  misc_RNA (1)...(19): siRNA sense strand
gcgaggugcucaauauacu

SEQ ID NO: 1209797 - RNA, 19 nt, Homo sapiens
  misc_RNA (1)...(19): siRNA sense strand
uaccaacacuauccaagau

SEQ ID NO: 1209798 - RNA, 19 nt, Homo sapiens
  misc_RNA (1)...(19): siRNA sense strand
uggaagaccucagaaccaa

SEQ ID NO: 1209799 - RNA, 19 nt, Homo sapiens
  misc_RNA (1)...(19): siRNA sense strand
cagagacgcaagccaaauu

SEQ ID NO: 1209800 - RNA, 19 nt, Homo sapiens
  misc_RNA (1)...(19): siRNA sense strand
ucaugaacauccuuaccuu

SEQ ID NO: 1209801 - RNA, 19 nt, Homo sapiens
  misc_RNA (1)...(19): siRNA sense strand
uaagcuuuguggugagaaa

SEQ ID NO: 1209802 - RNA, 19 nt, Homo sapiens
  misc_RNA (1)...(19): siRNA sense strand
ucagaggcauacagugaga

SEQ ID NO: 1209803 - RNA, 19 nt, Homo sapiens
  misc_RNA (1)...(19): siRNA sense strand
ggaaaaguaccccaaagaa

SEQ ID NO: 1209804 - RNA, 19 nt, Homo sapiens
  misc_RNA (1)...(19): siRNA sense strand
gaagccagcaggaaaagua

SEQ ID NO: 1209805 - RNA, 19 nt, Homo sapiens
  misc_RNA (1)...(19): siRNA sense strand
ccagauacugucuugcuuu

SEQ ID NO: 1209806 - RNA, 19 nt, Homo sapiens
  misc_RNA (1)...(19): siRNA sense strand
ccuuugggaugaagaggua

SEQ ID NO: 1209807 - RNA, 19 nt, Homo sapiens
  misc_RNA (1)...(19): siRNA sense strand
auaaugaaacucccagaaa

SEQ ID NO: 1209808 - RNA, 19 nt, Homo sapiens
  misc_RNA (1)...(19): siRNA sense strand
gaaacaggcucagaauuug

SEQ ID NO: 1209809 - RNA, 19 nt, Homo sapiens
  misc_RNA (1)...(19): siRNA sense strand
gacaagggcucacggauga

SEQ ID NO: 1209810 - RNA, 19 nt, Homo sapiens
  misc_RNA (1)...(19): siRNA sense strand
gggaagaucuugggaauau

SEQ ID NO: 1209811 - RNA, 19 nt, Homo sapiens
  misc_RNA (1)...(19): siRNA sense strand
ggagagcccugcugagaga

SEQ ID NO: 1209812 - RNA, 19 nt, Homo sapiens
  misc_RNA (1)...(19): siRNA sense strand
ucaagaagguggagaaugu

SEQ ID NO: 1209813 - RNA, 19 nt, Homo sapiens
  misc_RNA (1)...(19): siRNA sense strand
gcgaaugucucucuaagga

SEQ ID NO: 1209814 - RNA, 19 nt, Homo sapiens
  misc_RNA (1)...(19): siRNA sense strand
ugaaacaggcucagaauuu

SEQ ID NO: 1209815 - RNA, 19 nt, Homo sapiens
  misc_RNA (1)...(19): siRNA sense strand
guuugaagcugccuuguuu

SEQ ID NO: 1209816 - RNA, 19 nt, Homo sapiens
  misc_RNA (1)...(19): siRNA sense strand
gggcagaggcagaggauua

SEQ ID NO: 1209817 - RNA, 19 nt, Homo sapiens
  misc_RNA (1)...(19): siRNA sense strand
ucaauauacugucaaguga

SEQ ID NO: 1209818 - RNA, 19 nt, Homo sapiens
  misc_RNA (1)...(19): siRNA sense strand
gacccuaccuuaucucaga

SEQ ID NO: 1209819 - RNA, 19 nt, Homo sapiens
  misc_RNA (1)...(19): siRNA sense strand
caagugauagcuauucuuu

SEQ ID NO: 1209820 - RNA, 19 nt, Homo sapiens
  misc_RNA (1)...(19): siRNA sense strand
ggcaaaggcugaccguaga

SEQ ID NO: 1209821 - RNA, 19 nt, Homo sapiens
  misc_RNA (1)...(19): siRNA sense strand
gauauaagaaggagggaaa

SEQ ID NO: 1209822 - RNA, 19 nt, Homo sapiens
  misc_RNA (1)...(19): siRNA sense strand
gugaaaggcuaccggcaaa

SEQ ID NO: 1209823 - RNA, 19 nt, Homo sapiens
  misc_RNA (1)...(19): siRNA sense strand
caaagaaauugcagaacca

SEQ ID NO: 1209824 - RNA, 19 nt, Homo sapiens
  misc_RNA (1)...(19): siRNA sense strand
gcaacaggaccauguguga

SEQ ID NO: 1209825 - RNA, 19 nt, Homo sapiens
  misc_RNA (1)...(19): siRNA sense strand
ggucagaggcauacaguga

SEQ ID NO: 1209826 - RNA, 19 nt, Homo sapiens
  misc_RNA (1)...(19): siRNA sense strand
gaaauugcagaaccagaaa

SEQ ID NO: 1209827 - RNA, 19 nt, Homo sapiens
  misc_RNA (1)...(19): siRNA sense strand
gcaaagugacagccucaaa

SEQ ID NO: 1209828 - RNA, 19 nt, Homo sapiens
  misc_RNA (1)...(19): siRNA sense strand
ugagaaagaugaaggaaaa

SEQ ID NO: 1209829 - RNA, 19 nt, Homo sapiens
  misc_RNA (1)...(19): siRNA sense strand
ugacucaucugacaccaau

SEQ ID NO: 1209830 - RNA, 19 nt, Homo sapiens
  misc_RNA (1)...(19): siRNA sense strand
gcggagauccuuugcagaa

SEQ ID NO: 1209831 - RNA, 19 nt, Homo sapiens
  misc_RNA (1)...(19): siRNA sense strand
gaaagucuggguuggcauu

SEQ ID NO: 1209832 - RNA, 19 nt, Homo sapiens
  misc_RNA (1)...(19): siRNA sense strand
gaagaucuugggaauaugu

SEQ ID NO: 1209833 - RNA, 19 nt, Homo sapiens
  misc_RNA (1)...(19): siRNA sense strand
gcaugaagccagcaggaaa

SEQ ID NO: 1209834 - RNA, 19 nt, Homo sapiens
  misc_RNA (1)...(19): siRNA sense strand
gaagcgaaugucucucuaa

SEQ ID NO: 1209835 - RNA, 19 nt, Homo sapiens
  misc_RNA (1)...(19): siRNA sense strand
uaagaaggagggaaagaaa

SEQ ID NO: 1209836 - RNA, 19 nt, Homo sapiens
  misc_RNA (1)...(19): siRNA sense strand
ccaccgaguuuaccaaagu

SEQ ID NO: 1209837 - RNA, 19 nt, Homo sapiens
  misc_RNA (1)...(19): siRNA sense strand
gcaagaaacagaggucaga

SEQ ID NO: 1209838 - RNA, 19 nt, Homo sapiens
  misc_RNA (1)...(19): siRNA sense strand
aaacauacucuuuggagaa

SEQ ID NO: 1209839 - RNA, 19 nt, Homo sapiens
  misc_RNA (1)...(19): siRNA sense strand
agugauagcuauucuuugu

SEQ ID NO: 1209840 - RNA, 19 nt, Homo sapiens
  misc_RNA (1)...(19): siRNA sense strand
aaacauaucacacguacau

SEQ ID NO: 1209841 - RNA, 19 nt, Homo sapiens
  misc_RNA (1)...(19): siRNA sense strand
gaacuuuggccuacguuuc

SEQ ID NO: 1209842 - RNA, 19 nt, Homo sapiens
  misc_RNA (1)...(19): siRNA sense strand
gggaauaugugggaaugug

SEQ ID NO: 1209843 - RNA, 19 nt, Homo sapiens
  misc_RNA (1)...(19): siRNA sense strand
gaaaaguaccccaaagaaa

SEQ ID NO: 1209844 - RNA, 19 nt, Homo sapiens
  misc_RNA (1)...(19): siRNA sense strand
acauaucacacguacauua

SEQ ID NO: 1209845 - RNA, 19 nt, Homo sapiens
  misc_RNA (1)...(19): siRNA sense strand
cauaucacacguacauuaa

SEQ ID NO: 1209846 - RNA, 19 nt, Homo sapiens
  misc_RNA (1)...(19): siRNA sense strand
gcacggccauccgguugaa

SEQ ID NO: 1209847 - RNA, 19 nt, Homo sapiens
  misc_RNA (1)...(19): siRNA sense strand
auuagaagauggagagauu

SEQ ID NO: 1209848 - RNA, 19 nt, Homo sapiens
  misc_RNA (1)...(19): siRNA sense strand
gaagauggagagauuugug

SEQ ID NO: 1209849 - RNA, 19 nt, Homo sapiens
  misc_RNA (1)...(19): siRNA sense strand
gacauuauccugccacauc

SEQ ID NO: 1209850 - RNA, 19 nt, Homo sapiens
  misc_RNA (1)...(19): siRNA sense strand
gggcaucauucacgccuau

SEQ ID NO: 1209851 - RNA, 19 nt, Homo sapiens
  misc_RNA (1)...(19): siRNA sense strand
caaagugacagccucaaau

SEQ ID NO: 1209852 - RNA, 19 nt, Homo sapiens
  misc_RNA (1)...(19): siRNA sense strand
gcaaaugccaccuugacau

SEQ ID NO: 1209853 - RNA, 19 nt, Homo sapiens
  misc_RNA (1)...(19): siRNA sense strand
gcgacccugugcaagguua

SEQ ID NO: 1209854 - RNA, 19 nt, Homo sapiens
  misc_RNA (1)...(19): siRNA sense strand
gaggagugcauuaagaaga

SEQ ID NO: 1209855 - RNA, 19 nt, Homo sapiens
  misc_RNA (1)...(19): siRNA sense strand
caaaugccaccuugacaug

SEQ ID NO: 1209856 - RNA, 19 nt, Homo sapiens
  misc_RNA (1)...(19): siRNA sense strand
gcccagaggagcaaaguga

SEQ ID NO: 1209857 - RNA, 19 nt, Homo sapiens
  misc_RNA (1)...(19): siRNA sense strand
cuuagagucuugugaugaa

SEQ ID NO: 1209858 - RNA, 19 nt, Homo sapiens
  misc_RNA (1)...(19): siRNA sense strand
cagcaggcauggaucuuuc

SEQ ID NO: 1209859 - RNA, 19 nt, Homo sapiens
  misc_RNA (1)...(19): siRNA sense strand
ggauaucaguguaugucau

SEQ ID NO: 1209860 - RNA, 19 nt, Homo sapiens
  misc_RNA (1)...(19): siRNA sense strand
ggcagucaauggaacuuug

SEQ ID NO: 1209861 - RNA, 19 nt, Homo sapiens
  misc_RNA (1)...(19): siRNA sense strand
cagaagacccagauacugu

SEQ ID NO: 1209862 - RNA, 19 nt, Homo sapiens
  misc_RNA (1)...(19): siRNA sense strand
ugauugccauguuuaaugu

SEQ ID NO: 1209863 - RNA, 19 nt, Homo sapiens
  misc_RNA (1)...(19): siRNA sense strand
caaaagauuucgaguccuu

SEQ ID NO: 1209864 - RNA, 19 nt, Homo sapiens
  misc_RNA (1)...(19): siRNA sense strand
caggaaaugagaaagauga

SEQ ID NO: 1209865 - RNA, 19 nt, Homo sapiens
  misc_RNA (1)...(19): siRNA sense strand
gaggauugcaguucaagga

SEQ ID NO: 1209866 - RNA, 19 nt, Homo sapiens
  misc_RNA (1)...(19): siRNA sense strand
ccaaagguaucagcacaca

SEQ ID NO: 1209867 - RNA, 19 nt, Homo sapiens
  misc_RNA (1)...(19): siRNA sense strand
uuacaucacccaaccagaa

SEQ ID NO: 1209868 - RNA, 19 nt, Homo sapiens
  misc_RNA (1)...(19): siRNA sense strand
caagcgaguucagacaaug

SEQ ID NO: 1209869 - RNA, 19 nt, Homo sapiens
  misc_RNA (1)...(19): siRNA sense strand
ggacugugcauagcccuuu

SEQ ID NO: 1209870 - RNA, 19 nt, Homo sapiens
  misc_RNA (1)...(19): siRNA sense strand
caccaaaggcuucgucuuc

SEQ ID NO: 1209871 - RNA, 19 nt, Homo sapiens
  misc_RNA (1)...(19): siRNA sense strand
guaccuccuuucucucuuc

SEQ ID NO: 1209872 - RNA, 19 nt, Homo sapiens
  misc_RNA (1)...(19): siRNA sense strand
ggaaagaaaauuacuggaa

SEQ ID NO: 1209873 - RNA, 19 nt, Homo sapiens
  misc_RNA (1)...(19): siRNA sense strand
gcgaggugcucaauauacu

SEQ ID NO: 1209874 - RNA, 19 nt, Homo sapiens
  misc_RNA (1)...(19): siRNA sense strand
uaccaacacuauccaagau

SEQ ID NO: 1209875 - RNA, 19 nt, Homo sapiens
  misc_RNA (1)...(19): siRNA sense strand
ccuuugggaugaagaggua

SEQ ID NO: 1209876 - RNA, 19 nt, Homo sapiens
  misc_RNA (1)...(19): siRNA sense strand
uaagcuuuguggugagaaa

SEQ ID NO: 1209877 - RNA, 19 nt, Homo sapiens
  misc_RNA (1)...(19): siRNA sense strand
ucagaggcauacagugaga

SEQ ID NO: 1209878 - RNA, 19 nt, Homo sapiens
  misc_RNA (1)...(19): siRNA sense strand
ggaaaaguaccccaaagaa

SEQ ID NO: 1209879 - RNA, 19 nt, Homo sapiens
  misc_RNA (1)...(19): siRNA sense strand
gaagccagcaggaaaagua

SEQ ID NO: 1209880 - RNA, 19 nt, Homo sapiens
  misc_RNA (1)...(19): siRNA sense strand
ccagauacugucuugcuuu

SEQ ID NO: 1209881 - RNA, 19 nt, Homo sapiens
  misc_RNA (1)...(19): siRNA sense strand
gauagcuauucuuuguuug

SEQ ID NO: 1209882 - RNA, 19 nt, Homo sapiens
  misc_RNA (1)...(19): siRNA sense strand
cugaacaccuuuacaaugc

SEQ ID NO: 1209883 - RNA, 19 nt, Homo sapiens
  misc_RNA (1)...(19): siRNA sense strand
gccaacauccugugcauca

SEQ ID NO: 1209884 - RNA, 19 nt, Homo sapiens
  misc_RNA (1)...(19): siRNA sense strand
gagagagggcgcuaugcaa

SEQ ID NO: 1209885 - RNA, 19 nt, Homo sapiens
  misc_RNA (1)...(19): siRNA sense strand
ggagagagggcgcuaugca

SEQ ID NO: 1209886 - RNA, 19 nt, Homo sapiens
  misc_RNA (1)...(19): siRNA sense strand
gaacccacaaggaguuaau

SEQ ID NO: 1209887 - RNA, 19 nt, Homo sapiens
  misc_RNA (1)...(19): siRNA sense strand
cagcuacaguucuuagagu

SEQ ID NO: 1209888 - RNA, 19 nt, Homo sapiens
  misc_RNA (1)...(19): siRNA sense strand
ggacaucguggccaacauc

SEQ ID NO: 1209889 - RNA, 19 nt, Homo sapiens
  misc_RNA (1)...(19): siRNA sense strand
ugaagcgaaugucucucua

SEQ ID NO: 1209890 - RNA, 19 nt, Homo sapiens
  misc_RNA (1)...(19): siRNA sense strand
agaaauugcagaaccagaa

SEQ ID NO: 1209891 - RNA, 19 nt, Homo sapiens
  misc_RNA (1)...(19): siRNA sense strand
uccaggagcucaagaaggu

SEQ ID NO: 1209892 - RNA, 19 nt, Homo sapiens
  misc_RNA (1)...(19): siRNA sense strand
gauggagagauuugugaaa

SEQ ID NO: 1209893 - RNA, 19 nt, Homo sapiens
  misc_RNA (1)...(19): siRNA sense strand
ggaagaucuugggaauaug

SEQ ID NO: 1209894 - RNA, 19 nt, Homo sapiens
  misc_RNA (1)...(19): siRNA sense strand
uuccgaaggucagcaauuu

SEQ ID NO: 1209895 - RNA, 19 nt, Homo sapiens
  misc_RNA (1)...(19): siRNA sense strand
gaggagagagggcgcuaug

SEQ ID NO: 1209896 - RNA, 19 nt, Homo sapiens
  misc_RNA (1)...(19): siRNA sense strand
gugauugccauguuuaaug

SEQ ID NO: 1209897 - RNA, 19 nt, Homo sapiens
  misc_RNA (1)...(19): siRNA sense strand
gacaaugaaugaguuucug

SEQ ID NO: 1209898 - RNA, 19 nt, Homo sapiens
  misc_RNA (1)...(19): siRNA sense strand
gcaaggguggguccugaga

SEQ ID NO: 1209899 - RNA, 19 nt, Homo sapiens
  misc_RNA (1)...(19): siRNA sense strand
aaaguaugaucaccaaagg

SEQ ID NO: 1209900 - RNA, 19 nt, Homo sapiens
  misc_RNA (1)...(19): siRNA sense strand
aacauacucuuuggagaaa

SEQ ID NO: 1209901 - RNA, 19 nt, Homo sapiens
  misc_RNA (1)...(19): siRNA sense strand
gacaagcgaguucagacaa

SEQ ID NO: 1209902 - RNA, 19 nt, Homo sapiens
  misc_RNA (1)...(19): siRNA sense strand
aguaugaucaccaaaggua

SEQ ID NO: 1209903 - RNA, 19 nt, Homo sapiens
  misc_RNA (1)...(19): siRNA sense strand
gagaaaacauacucuuugg

SEQ ID NO: 1209904 - RNA, 19 nt, Homo sapiens
  misc_RNA (1)...(19): siRNA sense strand
ccuugcagcucuccuagga

SEQ ID NO: 1209905 - RNA, 19 nt, Homo sapiens
  misc_RNA (1)...(19): siRNA sense strand
cauaagcuuuguggugaga

SEQ ID NO: 1209906 - RNA, 19 nt, Homo sapiens
  misc_RNA (1)...(19): siRNA sense strand
agagagggcgcuaugcaaa

SEQ ID NO: 1209907 - RNA, 19 nt, Homo sapiens
  misc_RNA (1)...(19): siRNA sense strand
gaaagaugaaggaaaagaa

SEQ ID NO: 1209908 - RNA, 19 nt, Homo sapiens
  misc_RNA (1)...(19): siRNA sense strand
gaaacaggcucagaauuug

SEQ ID NO: 1209909 - RNA, 19 nt, Homo sapiens
  misc_RNA (1)...(19): siRNA sense strand
gacaagggcucacggauga

SEQ ID NO: 1209910 - RNA, 19 nt, Homo sapiens
  misc_RNA (1)...(19): siRNA sense strand
gggaagaucuugggaauau

SEQ ID NO: 1209911 - RNA, 19 nt, Homo sapiens
  misc_RNA (1)...(19): siRNA sense strand
ggagagcccugcugagaga

SEQ ID NO: 1209912 - RNA, 19 nt, Homo sapiens
  misc_RNA (1)...(19): siRNA sense strand
ucaagaagguggagaaugu

SEQ ID NO: 1209913 - RNA, 19 nt, Homo sapiens
  misc_RNA (1)...(19): siRNA sense strand
gcgaaugucucucuaagga

SEQ ID NO: 1209914 - RNA, 19 nt, Homo sapiens
  misc_RNA (1)...(19): siRNA sense strand
ugaaacaggcucagaauuu

SEQ ID NO: 1209915 - RNA, 19 nt, Homo sapiens
  misc_RNA (1)...(19): siRNA sense strand
guuugaagcugccuuguuu

SEQ ID NO: 1209916 - RNA, 19 nt, Homo sapiens
  misc_RNA (1)...(19): siRNA sense strand
gggcagaggcagaggauua

SEQ ID NO: 1209917 - RNA, 19 nt, Homo sapiens
  misc_RNA (1)...(19): siRNA sense strand
ucaauauacugucaaguga

SEQ ID NO: 1209918 - RNA, 19 nt, Homo sapiens
  misc_RNA (1)...(19): siRNA sense strand
gacccuaccuuaucucaga

SEQ ID NO: 1209919 - RNA, 19 nt, Homo sapiens
  misc_RNA (1)...(19): siRNA sense strand
caagugauagcuauucuuu

SEQ ID NO: 1209920 - RNA, 19 nt, Homo sapiens
  misc_RNA (1)...(19): siRNA sense strand
ggcaaaggcugaccguaga

SEQ ID NO: 1209921 - RNA, 19 nt, Homo sapiens
  misc_RNA (1)...(19): siRNA sense strand
gauauaagaaggagggaaa

SEQ ID NO: 1209922 - RNA, 19 nt, Homo sapiens
  misc_RNA (1)...(19): siRNA sense strand
gugaaaggcuaccggcaaa

SEQ ID NO: 1209923 - RNA, 19 nt, Homo sapiens
  misc_RNA (1)...(19): siRNA sense strand
caaagaaauugcagaacca

SEQ ID NO: 1209924 - RNA, 19 nt, Homo sapiens
  misc_RNA (1)...(19): siRNA sense strand
gcaacaggaccauguguga

SEQ ID NO: 1209925 - RNA, 19 nt, Homo sapiens
  misc_RNA (1)...(19): siRNA sense strand
ggucagaggcauacaguga

SEQ ID NO: 1209926 - RNA, 19 nt, Homo sapiens
  misc_RNA (1)...(19): siRNA sense strand
gaaauugcagaaccagaaa

SEQ ID NO: 1209927 - RNA, 19 nt, Homo sapiens
  misc_RNA (1)...(19): siRNA sense strand
gcaaagugacagccucaaa

SEQ ID NO: 1209928 - RNA, 19 nt, Homo sapiens
  misc_RNA (1)...(19): siRNA sense strand
ugagaaagaugaaggaaaa

SEQ ID NO: 1209929 - RNA, 19 nt, Homo sapiens
  misc_RNA (1)...(19): siRNA sense strand
ugacucaucugacaccaau

SEQ ID NO: 1209930 - RNA, 19 nt, Homo sapiens
  misc_RNA (1)...(19): siRNA sense strand
gcggagauccuuugcagaa

SEQ ID NO: 1209931 - RNA, 19 nt, Homo sapiens
  misc_RNA (1)...(19): siRNA sense strand
gaaagucuggguuggcauu

SEQ ID NO: 1209932 - RNA, 19 nt, Homo sapiens
  misc_RNA (1)...(19): siRNA sense strand
gaagaucuugggaauaugu

SEQ ID NO: 1209933 - RNA, 19 nt, Homo sapiens
  misc_RNA (1)...(19): siRNA sense strand
gcaugaagccagcaggaaa

SEQ ID NO: 1209934 - RNA, 19 nt, Homo sapiens
  misc_RNA (1)...(19): siRNA sense strand
gaagcgaaugucucucuaa

SEQ ID NO: 1209935 - RNA, 19 nt, Homo sapiens
  misc_RNA (1)...(19): siRNA sense strand
uaagaaggagggaaagaaa

SEQ ID NO: 1209936 - RNA, 19 nt, Homo sapiens
  misc_RNA (1)...(19): siRNA sense strand
ccaccgaguuuaccaaagu

SEQ ID NO: 1209937 - RNA, 19 nt, Homo sapiens
  misc_RNA (1)...(19): siRNA sense strand
gcaagaaacagaggucaga

SEQ ID NO: 1209938 - RNA, 19 nt, Homo sapiens
  misc_RNA (1)...(19): siRNA sense strand
aaacauacucuuuggagaa

SEQ ID NO: 1209939 - RNA, 19 nt, Homo sapiens
  misc_RNA (1)...(19): siRNA sense strand
agugauagcuauucuuugu

SEQ ID NO: 1209940 - RNA, 19 nt, Homo sapiens
  misc_RNA (1)...(19): siRNA sense strand
aaacauaucacacguacau

SEQ ID NO: 1209941 - RNA, 19 nt, Homo sapiens
  misc_RNA (1)...(19): siRNA sense strand
gaacuuuggccuacguuuc

SEQ ID NO: 1209942 - RNA, 19 nt, Homo sapiens
  misc_RNA (1)...(19): siRNA sense strand
gggaauaugugggaaugug

SEQ ID NO: 1209943 - RNA, 19 nt, Homo sapiens
  misc_RNA (1)...(19): siRNA sense strand
gaaaaguaccccaaagaaa

SEQ ID NO: 1209944 - RNA, 19 nt, Homo sapiens
  misc_RNA (1)...(19): siRNA sense strand
acauaucacacguacauua

SEQ ID NO: 1209945 - RNA, 19 nt, Homo sapiens
  misc_RNA (1)...(19): siRNA sense strand
cauaucacacguacauuaa

SEQ ID NO: 1209946 - RNA, 19 nt, Homo sapiens
  misc_RNA (1)...(19): siRNA sense strand
gcacggccauccgguugaa

SEQ ID NO: 1209947 - RNA, 19 nt, Homo sapiens
  misc_RNA (1)...(19): siRNA sense strand
auuagaagauggagagauu

SEQ ID NO: 1209948 - RNA, 19 nt, Homo sapiens
  misc_RNA (1)...(19): siRNA sense strand
gaagauggagagauuugug

SEQ ID NO: 1209949 - RNA, 19 nt, Homo sapiens
  misc_RNA (1)...(19): siRNA sense strand
gacauuauccugccacauc

SEQ ID NO: 1209950 - RNA, 19 nt, Homo sapiens
  misc_RNA (1)...(19): siRNA sense strand
gggcaucauucacgccuau

SEQ ID NO: 1209951 - RNA, 19 nt, Homo sapiens
  misc_RNA (1)...(19): siRNA sense strand
caaagugacagccucaaau

SEQ ID NO: 1209952 - RNA, 19 nt, Homo sapiens
  misc_RNA (1)...(19): siRNA sense strand
gcaaaugccaccuugacau

SEQ ID NO: 1209953 - RNA, 19 nt, Homo sapiens
  misc_RNA (1)...(19): siRNA sense strand
gcgacccugugcaagguua

SEQ ID NO: 1209954 - RNA, 19 nt, Homo sapiens
  misc_RNA (1)...(19): siRNA sense strand
gaggagugcauuaagaaga

SEQ ID NO: 1209955 - RNA, 19 nt, Homo sapiens
  misc_RNA (1)...(19): siRNA sense strand
caaaugccaccuugacaug

SEQ ID NO: 1209956 - RNA, 19 nt, Homo sapiens
  misc_RNA (1)...(19): siRNA sense strand
gcccagaggagcaaaguga

SEQ ID NO: 1209957 - RNA, 19 nt, Homo sapiens
  misc_RNA (1)...(19): siRNA sense strand
cuuagagucuugugaugaa

SEQ ID NO: 1209958 - RNA, 19 nt, Homo sapiens
  misc_RNA (1)...(19): siRNA sense strand
cagcaggcauggaucuuuc

SEQ ID NO: 1209959 - RNA, 19 nt, Homo sapiens
  misc_RNA (1)...(19): siRNA sense strand
ggauaucaguguaugucau

SEQ ID NO: 1209960 - RNA, 19 nt, Homo sapiens
  misc_RNA (1)...(19): siRNA sense strand
ggcagucaauggaacuuug

SEQ ID NO: 1209961 - RNA, 19 nt, Homo sapiens
  misc_RNA (1)...(19): siRNA sense strand
cagaagacccagauacugu

SEQ ID NO: 1209962 - RNA, 19 nt, Homo sapiens
  misc_RNA (1)...(19): siRNA sense strand
ugauugccauguuuaaugu

SEQ ID NO: 1209963 - RNA, 19 nt, Homo sapiens
  misc_RNA (1)...(19): siRNA sense strand
caaaagauuucgaguccuu

SEQ ID NO: 1209964 - RNA, 19 nt, Homo sapiens
  misc_RNA (1)...(19): siRNA sense strand
caggaaaugagaaagauga

SEQ ID NO: 1209965 - RNA, 19 nt, Homo sapiens
  misc_RNA (1)...(19): siRNA sense strand
gaggauugcaguucaagga

SEQ ID NO: 1209966 - RNA, 19 nt, Homo sapiens
  misc_RNA (1)...(19): siRNA sense strand
ccaaagguaucagcacaca

SEQ ID NO: 1209967 - RNA, 19 nt, Homo sapiens
  misc_RNA (1)...(19): siRNA sense strand
uuacaucacccaaccagaa

SEQ ID NO: 1209968 - RNA, 19 nt, Homo sapiens
  misc_RNA (1)...(19): siRNA sense strand
caagcgaguucagacaaug

SEQ ID NO: 1209969 - RNA, 19 nt, Homo sapiens
  misc_RNA (1)...(19): siRNA sense strand
ggacugugcauagcccuuu

SEQ ID NO: 1209970 - RNA, 19 nt, Homo sapiens
  misc_RNA (1)...(19): siRNA sense strand
caccaaaggcuucgucuuc

SEQ ID NO: 1209971 - RNA, 19 nt, Homo sapiens
  misc_RNA (1)...(19): siRNA sense strand
guaccuccuuucucucuuc

SEQ ID NO: 1209972 - RNA, 19 nt, Homo sapiens
  misc_RNA (1)...(19): siRNA sense strand
ggaaagaaaauuacuggaa

SEQ ID NO: 1209973 - RNA, 19 nt, Homo sapiens
  misc_RNA (1)...(19): siRNA sense strand
gcgaggugcucaauauacu

SEQ ID NO: 1209974 - RNA, 19 nt, Homo sapiens
  misc_RNA (1)...(19): siRNA sense strand
uaccaacacuauccaagau

SEQ ID NO: 1209975 - RNA, 19 nt, Homo sapiens
  misc_RNA (1)...(19): siRNA sense strand
ccuuugggaugaagaggua

SEQ ID NO: 1209976 - RNA, 19 nt, Homo sapiens
  misc_RNA (1)...(19): siRNA sense strand
uaagcuuuguggugagaaa

SEQ ID NO: 1209977 - RNA, 19 nt, Homo sapiens
  misc_RNA (1)...(19): siRNA sense strand
ucagaggcauacagugaga

SEQ ID NO: 1209978 - RNA, 19 nt, Homo sapiens
  misc_RNA (1)...(19): siRNA sense strand
ggaaaaguaccccaaagaa

SEQ ID NO: 1209979 - RNA, 19 nt, Homo sapiens
  misc_RNA (1)...(19): siRNA sense strand
gaagccagcaggaaaagua

SEQ ID NO: 1209980 - RNA, 19 nt, Homo sapiens
  misc_RNA (1)...(19): siRNA sense strand
ccagauacugucuugcuuu

SEQ ID NO: 1209981 - RNA, 19 nt, Homo sapiens
  misc_RNA (1)...(19): siRNA sense strand
gauagcuauucuuuguuug

SEQ ID NO: 1209982 - RNA, 19 nt, Homo sapiens
  misc_RNA (1)...(19): siRNA sense strand
cugaacaccuuuacaaugc

SEQ ID NO: 1209983 - RNA, 19 nt, Homo sapiens
  misc_RNA (1)...(19): siRNA sense strand
gccaacauccugugcauca

SEQ ID NO: 1209984 - RNA, 19 nt, Homo sapiens
  misc_RNA (1)...(19): siRNA sense strand
gagagagggcgcuaugcaa

SEQ ID NO: 1209985 - RNA, 19 nt, Homo sapiens
  misc_RNA (1)...(19): siRNA sense strand
ggagagagggcgcuaugca

SEQ ID NO: 1209986 - RNA, 19 nt, Homo sapiens
  misc_RNA (1)...(19): siRNA sense strand
gaacccacaaggaguuaau

SEQ ID NO: 1209987 - RNA, 19 nt, Homo sapiens
  misc_RNA (1)...(19): siRNA sense strand
cagcuacaguucuuagagu

SEQ ID NO: 1209988 - RNA, 19 nt, Homo sapiens
  misc_RNA (1)...(19): siRNA sense strand
ggacaucguggccaacauc

SEQ ID NO: 1209989 - RNA, 19 nt, Homo sapiens
  misc_RNA (1)...(19): siRNA sense strand
ugaagcgaaugucucucua

SEQ ID NO: 1209990 - RNA, 19 nt, Homo sapiens
  misc_RNA (1)...(19): siRNA sense strand
agaaauugcagaaccagaa

SEQ ID NO: 1209991 - RNA, 19 nt, Homo sapiens
  misc_RNA (1)...(19): siRNA sense strand
uccaggagcucaagaaggu

SEQ ID NO: 1209992 - RNA, 19 nt, Homo sapiens
  misc_RNA (1)...(19): siRNA sense strand
gauggagagauuugugaaa

SEQ ID NO: 1209993 - RNA, 19 nt, Homo sapiens
  misc_RNA (1)...(19): siRNA sense strand
ggaagaucuugggaauaug

SEQ ID NO: 1209994 - RNA, 19 nt, Homo sapiens
  misc_RNA (1)...(19): siRNA sense strand
uuccgaaggucagcaauuu

SEQ ID NO: 1209995 - RNA, 19 nt, Homo sapiens
  misc_RNA (1)...(19): siRNA sense strand
gaggagagagggcgcuaug

SEQ ID NO: 1209996 - RNA, 19 nt, Homo sapiens
  misc_RNA (1)...(19): siRNA sense strand
gugauugccauguuuaaug

SEQ ID NO: 1209997 - RNA, 19 nt, Homo sapiens
  misc_RNA (1)...(19): siRNA sense strand
gacaaugaaugaguuucug

SEQ ID NO: 1209998 - RNA, 19 nt, Homo sapiens
  misc_RNA (1)...(19): siRNA sense strand
gcaaggguggguccugaga

SEQ ID NO: 1209999 - RNA, 19 nt, Homo sapiens
  misc_RNA (1)...(19): siRNA sense strand
aaaguaugaucaccaaagg

SEQ ID NO: 1210000 - RNA, 19 nt, Homo sapiens
  misc_RNA (1)...(19): siRNA sense strand
aacauacucuuuggagaaa

SEQ ID NO: 1210001 - RNA, 19 nt, Homo sapiens
  misc_RNA (1)...(19): siRNA sense strand
gacaagcgaguucagacaa

SEQ ID NO: 1210002 - RNA, 19 nt, Homo sapiens
  misc_RNA (1)...(19): siRNA sense strand
aguaugaucaccaaaggua

SEQ ID NO: 1210003 - RNA, 19 nt, Homo sapiens
  misc_RNA (1)...(19): siRNA sense strand
gagaaaacauacucuuugg

SEQ ID NO: 1210004 - RNA, 19 nt, Homo sapiens
  misc_RNA (1)...(19): siRNA sense strand
ccuugcagcucuccuagga

SEQ ID NO: 1210005 - RNA, 19 nt, Homo sapiens
  misc_RNA (1)...(19): siRNA sense strand
cauaagcuuuguggugaga

SEQ ID NO: 1210006 - RNA, 19 nt, Homo sapiens
  misc_RNA (1)...(19): siRNA sense strand
agagagggcgcuaugcaaa

SEQ ID NO: 1210007 - RNA, 19 nt, Homo sapiens
  misc_RNA (1)...(19): siRNA sense strand
gaaagaugaaggaaaagaa

SEQ ID NO: 1210008 - RNA, 19 nt, Homo sapiens
  misc_RNA (1)...(19): siRNA sense strand
gaaacaggcucagaauuug

SEQ ID NO: 1210009 - RNA, 19 nt, Homo sapiens
  misc_RNA (1)...(19): siRNA sense strand
gacaagggcucacggauga

SEQ ID NO: 1210010 - RNA, 19 nt, Homo sapiens
  misc_RNA (1)...(19): siRNA sense strand
gggaagaucuugggaauau

SEQ ID NO: 1210011 - RNA, 19 nt, Homo sapiens
  misc_RNA (1)...(19): siRNA sense strand
ggagagcccugcugagaga

SEQ ID NO: 1210012 - RNA, 19 nt, Homo sapiens
  misc_RNA (1)...(19): siRNA sense strand
ucaagaagguggagaaugu

SEQ ID NO: 1210013 - RNA, 19 nt, Homo sapiens
  misc_RNA (1)...(19): siRNA sense strand
gcgaaugucucucuaagga

SEQ ID NO: 1210014 - RNA, 19 nt, Homo sapiens
  misc_RNA (1)...(19): siRNA sense strand
ugaaacaggcucagaauuu

SEQ ID NO: 1210015 - RNA, 19 nt, Homo sapiens
  misc_RNA (1)...(19): siRNA sense strand
guuugaagcugccuuguuu

SEQ ID NO: 1210016 - RNA, 19 nt, Homo sapiens
  misc_RNA (1)...(19): siRNA sense strand
gggcagaggcagaggauua

SEQ ID NO: 1210017 - RNA, 19 nt, Homo sapiens
  misc_RNA (1)...(19): siRNA sense strand
ucaauauacugucaaguga

SEQ ID NO: 1210018 - RNA, 19 nt, Homo sapiens
  misc_RNA (1)...(19): siRNA sense strand
gacccuaccuuaucucaga

SEQ ID NO: 1210019 - RNA, 19 nt, Homo sapiens
  misc_RNA (1)...(19): siRNA sense strand
caagugauagcuauucuuu

SEQ ID NO: 1210020 - RNA, 19 nt, Homo sapiens
  misc_RNA (1)...(19): siRNA sense strand
ggcaaaggcugaccguaga

SEQ ID NO: 1210021 - RNA, 19 nt, Homo sapiens
  misc_RNA (1)...(19): siRNA sense strand
gauauaagaaggagggaaa

SEQ ID NO: 1210022 - RNA, 19 nt, Homo sapiens
  misc_RNA (1)...(19): siRNA sense strand
gugaaaggcuaccggcaaa

SEQ ID NO: 1210023 - RNA, 19 nt, Homo sapiens
  misc_RNA (1)...(19): siRNA sense strand
caaagaaauugcagaacca

SEQ ID NO: 1210024 - RNA, 19 nt, Homo sapiens
  misc_RNA (1)...(19): siRNA sense strand
gcaacaggaccauguguga

SEQ ID NO: 1210025 - RNA, 19 nt, Homo sapiens
  misc_RNA (1)...(19): siRNA sense strand
ggucagaggcauacaguga

SEQ ID NO: 1210026 - RNA, 19 nt, Homo sapiens
  misc_RNA (1)...(19): siRNA sense strand
gaaauugcagaaccagaaa

SEQ ID NO: 1210027 - RNA, 19 nt, Homo sapiens
  misc_RNA (1)...(19): siRNA sense strand
gcaaagugacagccucaaa

SEQ ID NO: 1210028 - RNA, 19 nt, Homo sapiens
  misc_RNA (1)...(19): siRNA sense strand
ugagaaagaugaaggaaaa

SEQ ID NO: 1210029 - RNA, 19 nt, Homo sapiens
  misc_RNA (1)...(19): siRNA sense strand
ugacucaucugacaccaau

SEQ ID NO: 1210030 - RNA, 19 nt, Homo sapiens
  misc_RNA (1)...(19): siRNA sense strand
gcggagauccuuugcagaa

SEQ ID NO: 1210031 - RNA, 19 nt, Homo sapiens
  misc_RNA (1)...(19): siRNA sense strand
gaaagucuggguuggcauu

SEQ ID NO: 1210032 - RNA, 19 nt, Homo sapiens
  misc_RNA (1)...(19): siRNA sense strand
gaagaucuugggaauaugu

SEQ ID NO: 1210033 - RNA, 19 nt, Homo sapiens
  misc_RNA (1)...(19): siRNA sense strand
gcaugaagccagcaggaaa

SEQ ID NO: 1210034 - RNA, 19 nt, Homo sapiens
  misc_RNA (1)...(19): siRNA sense strand
gaagcgaaugucucucuaa

SEQ ID NO: 1210035 - RNA, 19 nt, Homo sapiens
  misc_RNA (1)...(19): siRNA sense strand
uaagaaggagggaaagaaa

SEQ ID NO: 1210036 - RNA, 19 nt, Homo sapiens
  misc_RNA (1)...(19): siRNA sense strand
ccaccgaguuuaccaaagu

SEQ ID NO: 1210037 - RNA, 19 nt, Homo sapiens
  misc_RNA (1)...(19): siRNA sense strand
gcaagaaacagaggucaga

SEQ ID NO: 1210038 - RNA, 19 nt, Homo sapiens
  misc_RNA (1)...(19): siRNA sense strand
aaacauacucuuuggagaa

SEQ ID NO: 1210039 - RNA, 19 nt, Homo sapiens
  misc_RNA (1)...(19): siRNA sense strand
agugauagcuauucuuugu

SEQ ID NO: 1210040 - RNA, 19 nt, Homo sapiens
  misc_RNA (1)...(19): siRNA sense strand
aaacauaucacacguacau

SEQ ID NO: 1210041 - RNA, 19 nt, Homo sapiens
  misc_RNA (1)...(19): siRNA sense strand
gaacuuuggccuacguuuc

SEQ ID NO: 1210042 - RNA, 19 nt, Homo sapiens
  misc_RNA (1)...(19): siRNA sense strand
gggaauaugugggaaugug

SEQ ID NO: 1210043 - RNA, 19 nt, Homo sapiens
  misc_RNA (1)...(19): siRNA sense strand
gaaaaguaccccaaagaaa

SEQ ID NO: 1210044 - RNA, 19 nt, Homo sapiens
  misc_RNA (1)...(19): siRNA sense strand
acauaucacacguacauua

SEQ ID NO: 1210045 - RNA, 19 nt, Homo sapiens
  misc_RNA (1)...(19): siRNA sense strand
cauaucacacguacauuaa

SEQ ID NO: 1210046 - RNA, 19 nt, Homo sapiens
  misc_RNA (1)...(19): siRNA sense strand
gcacggccauccgguugaa

SEQ ID NO: 1210047 - RNA, 19 nt, Homo sapiens
  misc_RNA (1)...(19): siRNA sense strand
auuagaagauggagagauu

SEQ ID NO: 1210048 - RNA, 19 nt, Homo sapiens
  misc_RNA (1)...(19): siRNA sense strand
gaagauggagagauuugug

SEQ ID NO: 1210049 - RNA, 19 nt, Homo sapiens
  misc_RNA (1)...(19): siRNA sense strand
gacauuauccugccacauc

SEQ ID NO: 1210050 - RNA, 19 nt, Homo sapiens
  misc_RNA (1)...(19): siRNA sense strand
gggcaucauucacgccuau

SEQ ID NO: 1210051 - RNA, 19 nt, Homo sapiens
  misc_RNA (1)...(19): siRNA sense strand
caaagugacagccucaaau

SEQ ID NO: 1210052 - RNA, 19 nt, Homo sapiens
  misc_RNA (1)...(19): siRNA sense strand
gcaaaugccaccuugacau

SEQ ID NO: 1210053 - RNA, 19 nt, Homo sapiens
  misc_RNA (1)...(19): siRNA sense strand
gcgacccugugcaagguua

SEQ ID NO: 1210054 - RNA, 19 nt, Homo sapiens
  misc_RNA (1)...(19): siRNA sense strand
gaggagugcauuaagaaga

SEQ ID NO: 1210055 - RNA, 19 nt, Homo sapiens
  misc_RNA (1)...(19): siRNA sense strand
caaaugccaccuugacaug

SEQ ID NO: 1210056 - RNA, 19 nt, Homo sapiens
  misc_RNA (1)...(19): siRNA sense strand
gcccagaggagcaaaguga

SEQ ID NO: 1210057 - RNA, 19 nt, Homo sapiens
  misc_RNA (1)...(19): siRNA sense strand
cuuagagucuugugaugaa

SEQ ID NO: 1210058 - RNA, 19 nt, Homo sapiens
  misc_RNA (1)...(19): siRNA sense strand
cagcaggcauggaucuuuc

SEQ ID NO: 1210059 - RNA, 19 nt, Homo sapiens
  misc_RNA (1)...(19): siRNA sense strand
ggauaucaguguaugucau

SEQ ID NO: 1210060 - RNA, 19 nt, Homo sapiens
  misc_RNA (1)...(19): siRNA sense strand
ggcagucaauggaacuuug

SEQ ID NO: 1210061 - RNA, 19 nt, Homo sapiens
  misc_RNA (1)...(19): siRNA sense strand
cagaagacccagauacugu

SEQ ID NO: 1210062 - RNA, 19 nt, Homo sapiens
  misc_RNA (1)...(19): siRNA sense strand
ugauugccauguuuaaugu

SEQ ID NO: 1210063 - RNA, 19 nt, Homo sapiens
  misc_RNA (1)...(19): siRNA sense strand
caaaagauuucgaguccuu

SEQ ID NO: 1210064 - RNA, 19 nt, Homo sapiens
  misc_RNA (1)...(19): siRNA sense strand
caggaaaugagaaagauga

SEQ ID NO: 1210065 - RNA, 19 nt, Homo sapiens
  misc_RNA (1)...(19): siRNA sense strand
gaggauugcaguucaagga

SEQ ID NO: 1210066 - RNA, 19 nt, Homo sapiens
  misc_RNA (1)...(19): siRNA sense strand
ccaaagguaucagcacaca

SEQ ID NO: 1210067 - RNA, 19 nt, Homo sapiens
  misc_RNA (1)...(19): siRNA sense strand
uuacaucacccaaccagaa

SEQ ID NO: 1210068 - RNA, 19 nt, Homo sapiens
  misc_RNA (1)...(19): siRNA sense strand
caagcgaguucagacaaug

SEQ ID NO: 1210069 - RNA, 19 nt, Homo sapiens
  misc_RNA (1)...(19): siRNA sense strand
ggacugugcauagcccuuu

SEQ ID NO: 1210070 - RNA, 19 nt, Homo sapiens
  misc_RNA (1)...(19): siRNA sense strand
caccaaaggcuucgucuuc

SEQ ID NO: 1210071 - RNA, 19 nt, Homo sapiens
  misc_RNA (1)...(19): siRNA sense strand
guaccuccuuucucucuuc

SEQ ID NO: 1210072 - RNA, 19 nt, Homo sapiens
  misc_RNA (1)...(19): siRNA sense strand
ggaaagaaaauuacuggaa

SEQ ID NO: 1210073 - RNA, 19 nt, Homo sapiens
  misc_RNA (1)...(19): siRNA sense strand
gcgaggugcucaauauacu

SEQ ID NO: 1210074 - RNA, 19 nt, Homo sapiens
  misc_RNA (1)...(19): siRNA sense strand
uaccaacacuauccaagau

SEQ ID NO: 1210075 - RNA, 19 nt, Homo sapiens
  misc_RNA (1)...(19): siRNA sense strand
ccuuugggaugaagaggua

SEQ ID NO: 1210076 - RNA, 19 nt, Homo sapiens
  misc_RNA (1)...(19): siRNA sense strand
uaagcuuuguggugagaaa

SEQ ID NO: 1210077 - RNA, 19 nt, Homo sapiens
  misc_RNA (1)...(19): siRNA sense strand
ucagaggcauacagugaga

SEQ ID NO: 1210078 - RNA, 19 nt, Homo sapiens
  misc_RNA (1)...(19): siRNA sense strand
ggaaaaguaccccaaagaa

SEQ ID NO: 1210079 - RNA, 19 nt, Homo sapiens
  misc_RNA (1)...(19): siRNA sense strand
gaagccagcaggaaaagua

SEQ ID NO: 1210080 - RNA, 19 nt, Homo sapiens
  misc_RNA (1)...(19): siRNA sense strand
ccagauacugucuugcuuu

SEQ ID NO: 1210081 - RNA, 19 nt, Homo sapiens
  misc_RNA (1)...(19): siRNA sense strand
gauagcuauucuuuguuug

SEQ ID NO: 1210082 - RNA, 19 nt, Homo sapiens
  misc_RNA (1)...(19): siRNA sense strand
cugaacaccuuuacaaugc

SEQ ID NO: 1210083 - RNA, 19 nt, Homo sapiens
  misc_RNA (1)...(19): siRNA sense strand
gccaacauccugugcauca

SEQ ID NO: 1210084 - RNA, 19 nt, Homo sapiens
  misc_RNA (1)...(19): siRNA sense strand
gagagagggcgcuaugcaa

SEQ ID NO: 1210085 - RNA, 19 nt, Homo sapiens
  misc_RNA (1)...(19): siRNA sense strand
ggagagagggcgcuaugca

SEQ ID NO: 1210086 - RNA, 19 nt, Homo sapiens
  misc_RNA (1)...(19): siRNA sense strand
gaacccacaaggaguuaau

SEQ ID NO: 1210087 - RNA, 19 nt, Homo sapiens
  misc_RNA (1)...(19): siRNA sense strand
cagcuacaguucuuagagu

SEQ ID NO: 1210088 - RNA, 19 nt, Homo sapiens
  misc_RNA (1)...(19): siRNA sense strand
ggacaucguggccaacauc

SEQ ID NO: 1210089 - RNA, 19 nt, Homo sapiens
  misc_RNA (1)...(19): siRNA sense strand
ugaagcgaaugucucucua

SEQ ID NO: 1210090 - RNA, 19 nt, Homo sapiens
  misc_RNA (1)...(19): siRNA sense strand
agaaauugcagaaccagaa

SEQ ID NO: 1210091 - RNA, 19 nt, Homo sapiens
  misc_RNA (1)...(19): siRNA sense strand
uccaggagcucaagaaggu

SEQ ID NO: 1210092 - RNA, 19 nt, Homo sapiens
  misc_RNA (1)...(19): siRNA sense strand
gauggagagauuugugaaa

SEQ ID NO: 1210093 - RNA, 19 nt, Homo sapiens
  misc_RNA (1)...(19): siRNA sense strand
ggaagaucuugggaauaug

SEQ ID NO: 1210094 - RNA, 19 nt, Homo sapiens
  misc_RNA (1)...(19): siRNA sense strand
uuccgaaggucagcaauuu

SEQ ID NO: 1210095 - RNA, 19 nt, Homo sapiens
  misc_RNA (1)...(19): siRNA sense strand
gaggagagagggcgcuaug

SEQ ID NO: 1210096 - RNA, 19 nt, Homo sapiens
  misc_RNA (1)...(19): siRNA sense strand
gugauugccauguuuaaug

SEQ ID NO: 1210097 - RNA, 19 nt, Homo sapiens
  misc_RNA (1)...(19): siRNA sense strand
gacaaugaaugaguuucug

SEQ ID NO: 1210098 - RNA, 19 nt, Homo sapiens
  misc_RNA (1)...(19): siRNA sense strand
gcaaggguggguccugaga

SEQ ID NO: 1210099 - RNA, 19 nt, Homo sapiens
  misc_RNA (1)...(19): siRNA sense strand
aaaguaugaucaccaaagg

SEQ ID NO: 1210100 - RNA, 19 nt, Homo sapiens
  misc_RNA (1)...(19): siRNA sense strand
aacauacucuuuggagaaa

SEQ ID NO: 1210101 - RNA, 19 nt, Homo sapiens
  misc_RNA (1)...(19): siRNA sense strand
gacaagcgaguucagacaa

SEQ ID NO: 1210102 - RNA, 19 nt, Homo sapiens
  misc_RNA (1)...(19): siRNA sense strand
aguaugaucaccaaaggua

SEQ ID NO: 1210103 - RNA, 19 nt, Homo sapiens
  misc_RNA (1)...(19): siRNA sense strand
gagaaaacauacucuuugg

SEQ ID NO: 1210104 - RNA, 19 nt, Homo sapiens
  misc_RNA (1)...(19): siRNA sense strand
ccuugcagcucuccuagga

SEQ ID NO: 1210105 - RNA, 19 nt, Homo sapiens
  misc_RNA (1)...(19): siRNA sense strand
cauaagcuuuguggugaga

SEQ ID NO: 1210106 - RNA, 19 nt, Homo sapiens
  misc_RNA (1)...(19): siRNA sense strand
agagagggcgcuaugcaaa

SEQ ID NO: 1210107 - RNA, 19 nt, Homo sapiens
  misc_RNA (1)...(19): siRNA sense strand
gaaagaugaaggaaaagaa

SEQ ID NO: 1210108 - RNA, 19 nt, Homo sapiens
  misc_RNA (1)...(19): siRNA sense strand
gaaacaggcucagaauuug

SEQ ID NO: 1210109 - RNA, 19 nt, Homo sapiens
  misc_RNA (1)...(19): siRNA sense strand
gacaagggcucacggauga

SEQ ID NO: 1210110 - RNA, 19 nt, Homo sapiens
  misc_RNA (1)...(19): siRNA sense strand
gggaagaucuugggaauau

SEQ ID NO: 1210111 - RNA, 19 nt, Homo sapiens
  misc_RNA (1)...(19): siRNA sense strand
ggagagcccugcugagaga

SEQ ID NO: 1210112 - RNA, 19 nt, Homo sapiens
  misc_RNA (1)...(19): siRNA sense strand
ucaagaagguggagaaugu

SEQ ID NO: 1210113 - RNA, 19 nt, Homo sapiens
  misc_RNA (1)...(19): siRNA sense strand
gcgaaugucucucuaagga

SEQ ID NO: 1210114 - RNA, 19 nt, Homo sapiens
  misc_RNA (1)...(19): siRNA sense strand
ugaaacaggcucagaauuu

SEQ ID NO: 1210115 - RNA, 19 nt, Homo sapiens
  misc_RNA (1)...(19): siRNA sense strand
guuugaagcugccuuguuu

SEQ ID NO: 1210116 - RNA, 19 nt, Homo sapiens
  misc_RNA (1)...(19): siRNA sense strand
gggcagaggcagaggauua

SEQ ID NO: 1210117 - RNA, 19 nt, Homo sapiens
  misc_RNA (1)...(19): siRNA sense strand
ucaauauacugucaaguga

SEQ ID NO: 1210118 - RNA, 19 nt, Homo sapiens
  misc_RNA (1)...(19): siRNA sense strand
gacccuaccuuaucucaga

SEQ ID NO: 1210119 - RNA, 19 nt, Homo sapiens
  misc_RNA (1)...(19): siRNA sense strand
caagugauagcuauucuuu

SEQ ID NO: 1210120 - RNA, 19 nt, Homo sapiens
  misc_RNA (1)...(19): siRNA sense strand
ggcaaaggcugaccguaga

SEQ ID NO: 1210121 - RNA, 19 nt, Homo sapiens
  misc_RNA (1)...(19): siRNA sense strand
gauauaagaaggagggaaa

SEQ ID NO: 1210122 - RNA, 19 nt, Homo sapiens
  misc_RNA (1)...(19): siRNA sense strand
gugaaaggcuaccggcaaa

SEQ ID NO: 1210123 - RNA, 19 nt, Homo sapiens
  misc_RNA (1)...(19): siRNA sense strand
caaagaaauugcagaacca

SEQ ID NO: 1210124 - RNA, 19 nt, Homo sapiens
  misc_RNA (1)...(19): siRNA sense strand
gcaacaggaccauguguga

SEQ ID NO: 1210125 - RNA, 19 nt, Homo sapiens
  misc_RNA (1)...(19): siRNA sense strand
ggucagaggcauacaguga

SEQ ID NO: 1210126 - RNA, 19 nt, Homo sapiens
  misc_RNA (1)...(19): siRNA sense strand
gaaauugcagaaccagaaa

SEQ ID NO: 1210127 - RNA, 19 nt, Homo sapiens
  misc_RNA (1)...(19): siRNA sense strand
gcaaagugacagccucaaa

SEQ ID NO: 1210128 - RNA, 19 nt, Homo sapiens
  misc_RNA (1)...(19): siRNA sense strand
ugagaaagaugaaggaaaa

SEQ ID NO: 1210129 - RNA, 19 nt, Homo sapiens
  misc_RNA (1)...(19): siRNA sense strand
ugacucaucugacaccaau

SEQ ID NO: 1210130 - RNA, 19 nt, Homo sapiens
  misc_RNA (1)...(19): siRNA sense strand
gcggagauccuuugcagaa

SEQ ID NO: 1210131 - RNA, 19 nt, Homo sapiens
  misc_RNA (1)...(19): siRNA sense strand
gaaagucuggguuggcauu

SEQ ID NO: 1210132 - RNA, 19 nt, Homo sapiens
  misc_RNA (1)...(19): siRNA sense strand
gaagaucuugggaauaugu

SEQ ID NO: 1210133 - RNA, 19 nt, Homo sapiens
  misc_RNA (1)...(19): siRNA sense strand
gcaugaagccagcaggaaa

SEQ ID NO: 1210134 - RNA, 19 nt, Homo sapiens
  misc_RNA (1)...(19): siRNA sense strand
gaagcgaaugucucucuaa

SEQ ID NO: 1210135 - RNA, 19 nt, Homo sapiens
  misc_RNA (1)...(19): siRNA sense strand
uaagaaggagggaaagaaa

SEQ ID NO: 1210136 - RNA, 19 nt, Homo sapiens
  misc_RNA (1)...(19): siRNA sense strand
ccaccgaguuuaccaaagu

SEQ ID NO: 1210137 - RNA, 19 nt, Homo sapiens
  misc_RNA (1)...(19): siRNA sense strand
gcaagaaacagaggucaga

SEQ ID NO: 1210138 - RNA, 19 nt, Homo sapiens
  misc_RNA (1)...(19): siRNA sense strand
aaacauacucuuuggagaa

SEQ ID NO: 1210139 - RNA, 19 nt, Homo sapiens
  misc_RNA (1)...(19): siRNA sense strand
agugauagcuauucuuugu

SEQ ID NO: 1210140 - RNA, 19 nt, Homo sapiens
  misc_RNA (1)...(19): siRNA sense strand
aaacauaucacacguacau

SEQ ID NO: 1210141 - RNA, 19 nt, Homo sapiens
  misc_RNA (1)...(19): siRNA sense strand
gaacuuuggccuacguuuc

SEQ ID NO: 1210142 - RNA, 19 nt, Homo sapiens
  misc_RNA (1)...(19): siRNA sense strand
gggaauaugugggaaugug

SEQ ID NO: 1210143 - RNA, 19 nt, Homo sapiens
  misc_RNA (1)...(19): siRNA sense strand
gaaaaguaccccaaagaaa

SEQ ID NO: 1210144 - RNA, 19 nt, Homo sapiens
  misc_RNA (1)...(19): siRNA sense strand
acauaucacacguacauua

SEQ ID NO: 1210145 - RNA, 19 nt, Homo sapiens
  misc_RNA (1)...(19): siRNA sense strand
cauaucacacguacauuaa

SEQ ID NO: 1210146 - RNA, 19 nt, Homo sapiens
  misc_RNA (1)...(19): siRNA sense strand
gcacggccauccgguugaa

SEQ ID NO: 1210147 - RNA, 19 nt, Homo sapiens
  misc_RNA (1)...(19): siRNA sense strand
auuagaagauggagagauu

SEQ ID NO: 1210148 - RNA, 19 nt, Homo sapiens
  misc_RNA (1)...(19): siRNA sense strand
gaagauggagagauuugug

SEQ ID NO: 1210149 - RNA, 19 nt, Homo sapiens
  misc_RNA (1)...(19): siRNA sense strand
gacauuauccugccacauc

SEQ ID NO: 1210150 - RNA, 19 nt, Homo sapiens
  misc_RNA (1)...(19): siRNA sense strand
gggcaucauucacgccuau

SEQ ID NO: 1210151 - RNA, 19 nt, Homo sapiens
  misc_RNA (1)...(19): siRNA sense strand
caaagugacagccucaaau

SEQ ID NO: 1210152 - RNA, 19 nt, Homo sapiens
  misc_RNA (1)...(19): siRNA sense strand
gcaaaugccaccuugacau

SEQ ID NO: 1210153 - RNA, 19 nt, Homo sapiens
  misc_RNA (1)...(19): siRNA sense strand
gcgacccugugcaagguua

SEQ ID NO: 1210154 - RNA, 19 nt, Homo sapiens
  misc_RNA (1)...(19): siRNA sense strand
gaggagugcauuaagaaga

SEQ ID NO: 1210155 - RNA, 19 nt, Homo sapiens
  misc_RNA (1)...(19): siRNA sense strand
caaaugccaccuugacaug

SEQ ID NO: 1210156 - RNA, 19 nt, Homo sapiens
  misc_RNA (1)...(19): siRNA sense strand
gcccagaggagcaaaguga

SEQ ID NO: 1210157 - RNA, 19 nt, Homo sapiens
  misc_RNA (1)...(19): siRNA sense strand
cuuagagucuugugaugaa

SEQ ID NO: 1210158 - RNA, 19 nt, Homo sapiens
  misc_RNA (1)...(19): siRNA sense strand
cagcaggcauggaucuuuc

SEQ ID NO: 1210159 - RNA, 19 nt, Homo sapiens
  misc_RNA (1)...(19): siRNA sense strand
ggauaucaguguaugucau

SEQ ID NO: 1210160 - RNA, 19 nt, Homo sapiens
  misc_RNA (1)...(19): siRNA sense strand
ggcagucaauggaacuuug

SEQ ID NO: 1210161 - RNA, 19 nt, Homo sapiens
  misc_RNA (1)...(19): siRNA sense strand
cagaagacccagauacugu

SEQ ID NO: 1210162 - RNA, 19 nt, Homo sapiens
  misc_RNA (1)...(19): siRNA sense strand
ugauugccauguuuaaugu

SEQ ID NO: 1210163 - RNA, 19 nt, Homo sapiens
  misc_RNA (1)...(19): siRNA sense strand
caaaagauuucgaguccuu

SEQ ID NO: 1210164 - RNA, 19 nt, Homo sapiens
  misc_RNA (1)...(19): siRNA sense strand
caggaaaugagaaagauga

SEQ ID NO: 1210165 - RNA, 19 nt, Homo sapiens
  misc_RNA (1)...(19): siRNA sense strand
gaggauugcaguucaagga

SEQ ID NO: 1210166 - RNA, 19 nt, Homo sapiens
  misc_RNA (1)...(19): siRNA sense strand
ccaaagguaucagcacaca

SEQ ID NO: 1210167 - RNA, 19 nt, Homo sapiens
  misc_RNA (1)...(19): siRNA sense strand
uuacaucacccaaccagaa

SEQ ID NO: 1210168 - RNA, 19 nt, Homo sapiens
  misc_RNA (1)...(19): siRNA sense strand
caagcgaguucagacaaug

SEQ ID NO: 1210169 - RNA, 19 nt, Homo sapiens
  misc_RNA (1)...(19): siRNA sense strand
ggacugugcauagcccuuu

SEQ ID NO: 1210170 - RNA, 19 nt, Homo sapiens
  misc_RNA (1)...(19): siRNA sense strand
caccaaaggcuucgucuuc

SEQ ID NO: 1210171 - RNA, 19 nt, Homo sapiens
  misc_RNA (1)...(19): siRNA sense strand
guaccuccuuucucucuuc

SEQ ID NO: 1210172 - RNA, 19 nt, Homo sapiens
  misc_RNA (1)...(19): siRNA sense strand
ggaaagaaaauuacuggaa

SEQ ID NO: 1210173 - RNA, 19 nt, Homo sapiens
  misc_RNA (1)...(19): siRNA sense strand
gcgaggugcucaauauacu

SEQ ID NO: 1210174 - RNA, 19 nt, Homo sapiens
  misc_RNA (1)...(19): siRNA sense strand
uaccaacacuauccaagau

SEQ ID NO: 1210175 - RNA, 19 nt, Homo sapiens
  misc_RNA (1)...(19): siRNA sense strand
ccuuugggaugaagaggua

SEQ ID NO: 1210176 - RNA, 19 nt, Homo sapiens
  misc_RNA (1)...(19): siRNA sense strand
uaagcuuuguggugagaaa

SEQ ID NO: 1210177 - RNA, 19 nt, Homo sapiens
  misc_RNA (1)...(19): siRNA sense strand
ucagaggcauacagugaga

SEQ ID NO: 1210178 - RNA, 19 nt, Homo sapiens
  misc_RNA (1)...(19): siRNA sense strand
ggaaaaguaccccaaagaa

SEQ ID NO: 1210179 - RNA, 19 nt, Homo sapiens
  misc_RNA (1)...(19): siRNA sense strand
gaagccagcaggaaaagua

SEQ ID NO: 1210180 - RNA, 19 nt, Homo sapiens
  misc_RNA (1)...(19): siRNA sense strand
ccagauacugucuugcuuu

SEQ ID NO: 1210181 - RNA, 19 nt, Homo sapiens
  misc_RNA (1)...(19): siRNA sense strand
gauagcuauucuuuguuug

SEQ ID NO: 1210182 - RNA, 19 nt, Homo sapiens
  misc_RNA (1)...(19): siRNA sense strand
cugaacaccuuuacaaugc

SEQ ID NO: 1210183 - RNA, 19 nt, Homo sapiens
  misc_RNA (1)...(19): siRNA sense strand
gccaacauccugugcauca

SEQ ID NO: 1210184 - RNA, 19 nt, Homo sapiens
  misc_RNA (1)...(19): siRNA sense strand
gagagagggcgcuaugcaa

SEQ ID NO: 1210185 - RNA, 19 nt, Homo sapiens
  misc_RNA (1)...(19): siRNA sense strand
ggagagagggcgcuaugca

SEQ ID NO: 1210186 - RNA, 19 nt, Homo sapiens
  misc_RNA (1)...(19): siRNA sense strand
gaacccacaaggaguuaau

SEQ ID NO: 1210187 - RNA, 19 nt, Homo sapiens
  misc_RNA (1)...(19): siRNA sense strand
cagcuacaguucuuagagu

SEQ ID NO: 1210188 - RNA, 19 nt, Homo sapiens
  misc_RNA (1)...(19): siRNA sense strand
ggacaucguggccaacauc

SEQ ID NO: 1210189 - RNA, 19 nt, Homo sapiens
  misc_RNA (1)...(19): siRNA sense strand
ugaagcgaaugucucucua

SEQ ID NO: 1210190 - RNA, 19 nt, Homo sapiens
  misc_RNA (1)...(19): siRNA sense strand
agaaauugcagaaccagaa

SEQ ID NO: 1210191 - RNA, 19 nt, Homo sapiens
  misc_RNA (1)...(19): siRNA sense strand
uccaggagcucaagaaggu

SEQ ID NO: 1210192 - RNA, 19 nt, Homo sapiens
  misc_RNA (1)...(19): siRNA sense strand
gauggagagauuugugaaa

SEQ ID NO: 1210193 - RNA, 19 nt, Homo sapiens
  misc_RNA (1)...(19): siRNA sense strand
ggaagaucuugggaauaug

SEQ ID NO: 1210194 - RNA, 19 nt, Homo sapiens
  misc_RNA (1)...(19): siRNA sense strand
uuccgaaggucagcaauuu

SEQ ID NO: 1210195 - RNA, 19 nt, Homo sapiens
  misc_RNA (1)...(19): siRNA sense strand
gaggagagagggcgcuaug

SEQ ID NO: 1210196 - RNA, 19 nt, Homo sapiens
  misc_RNA (1)...(19): siRNA sense strand
gugauugccauguuuaaug

SEQ ID NO: 1210197 - RNA, 19 nt, Homo sapiens
  misc_RNA (1)...(19): siRNA sense strand
gacaaugaaugaguuucug

SEQ ID NO: 1210198 - RNA, 19 nt, Homo sapiens
  misc_RNA (1)...(19): siRNA sense strand
gcaaggguggguccugaga

SEQ ID NO: 1210199 - RNA, 19 nt, Homo sapiens
  misc_RNA (1)...(19): siRNA sense strand
aaaguaugaucaccaaagg

SEQ ID NO: 1210200 - RNA, 19 nt, Homo sapiens
  misc_RNA (1)...(19): siRNA sense strand
aacauacucuuuggagaaa

SEQ ID NO: 1210201 - RNA, 19 nt, Homo sapiens
  misc_RNA (1)...(19): siRNA sense strand
gacaagcgaguucagacaa

SEQ ID NO: 1210202 - RNA, 19 nt, Homo sapiens
  misc_RNA (1)...(19): siRNA sense strand
aguaugaucaccaaaggua

SEQ ID NO: 1210203 - RNA, 19 nt, Homo sapiens
  misc_RNA (1)...(19): siRNA sense strand
gagaaaacauacucuuugg

SEQ ID NO: 1210204 - RNA, 19 nt, Homo sapiens
  misc_RNA (1)...(19): siRNA sense strand
ccuugcagcucuccuagga

SEQ ID NO: 1210205 - RNA, 19 nt, Homo sapiens
  misc_RNA (1)...(19): siRNA sense strand
cauaagcuuuguggugaga

SEQ ID NO: 1210206 - RNA, 19 nt, Homo sapiens
  misc_RNA (1)...(19): siRNA sense strand
agagagggcgcuaugcaaa

SEQ ID NO: 1210207 - RNA, 19 nt, Homo sapiens
  misc_RNA (1)...(19): siRNA sense strand
gaaagaugaaggaaaagaa

SEQ ID NO: 1210208 - RNA, 19 nt, Homo sapiens
  misc_RNA (1)...(19): siRNA sense strand
gaaacaggcucagaauuug

SEQ ID NO: 1210209 - RNA, 19 nt, Homo sapiens
  misc_RNA (1)...(19): siRNA sense strand
gaaccaagcugacugugau

SEQ ID NO: 1210210 - RNA, 19 nt, Homo sapiens
  misc_RNA (1)...(19): siRNA sense strand
gacaagggcucacggauga

SEQ ID NO: 1210211 - RNA, 19 nt, Homo sapiens
  misc_RNA (1)...(19): siRNA sense strand
gggaagaucuugggaauau

SEQ ID NO: 1210212 - RNA, 19 nt, Homo sapiens
  misc_RNA (1)...(19): siRNA sense strand
gagaauggauguccucaug

SEQ ID NO: 1210213 - RNA, 19 nt, Homo sapiens
  misc_RNA (1)...(19): siRNA sense strand
ggaaggugauugaguuuga

SEQ ID NO: 1210214 - RNA, 19 nt, Homo sapiens
  misc_RNA (1)...(19): siRNA sense strand
ggagagcccugcugagaga

SEQ ID NO: 1210215 - RNA, 19 nt, Homo sapiens
  misc_RNA (1)...(19): siRNA sense strand
gaauggauguccucaugaa

SEQ ID NO: 1210216 - RNA, 19 nt, Homo sapiens
  misc_RNA (1)...(19): siRNA sense strand
ucaagaagguggagaaugu

SEQ ID NO: 1210217 - RNA, 19 nt, Homo sapiens
  misc_RNA (1)...(19): siRNA sense strand
gcgaaugucucucuaagga

SEQ ID NO: 1210218 - RNA, 19 nt, Homo sapiens
  misc_RNA (1)...(19): siRNA sense strand
ugaaacaggcucagaauuu

SEQ ID NO: 1210219 - RNA, 19 nt, Homo sapiens
  misc_RNA (1)...(19): siRNA sense strand
ggaaagucaucguuaggaa

SEQ ID NO: 1210220 - RNA, 19 nt, Homo sapiens
  misc_RNA (1)...(19): siRNA sense strand
guuugaagcugccuuguuu

SEQ ID NO: 1210221 - RNA, 19 nt, Homo sapiens
  misc_RNA (1)...(19): siRNA sense strand
gggcagaggcagaggauua

SEQ ID NO: 1210222 - RNA, 19 nt, Homo sapiens
  misc_RNA (1)...(19): siRNA sense strand
ucaauauacugucaaguga

SEQ ID NO: 1210223 - RNA, 19 nt, Homo sapiens
  misc_RNA (1)...(19): siRNA sense strand
guggauaucugcauucuca

SEQ ID NO: 1210224 - RNA, 19 nt, Homo sapiens
  misc_RNA (1)...(19): siRNA sense strand
gacccuaccuuaucucaga

SEQ ID NO: 1210225 - RNA, 19 nt, Homo sapiens
  misc_RNA (1)...(19): siRNA sense strand
cagcagaagucagauugua

SEQ ID NO: 1210226 - RNA, 19 nt, Homo sapiens
  misc_RNA (1)...(19): siRNA sense strand
caagugauagcuauucuuu

SEQ ID NO: 1210227 - RNA, 19 nt, Homo sapiens
  misc_RNA (1)...(19): siRNA sense strand
ugacaagccugaaguccuu

SEQ ID NO: 1210228 - RNA, 19 nt, Homo sapiens
  misc_RNA (1)...(19): siRNA sense strand
caucaguacuucauccaaa

SEQ ID NO: 1210229 - RNA, 19 nt, Homo sapiens
  misc_RNA (1)...(19): siRNA sense strand
ggcaaaggcugaccguaga

SEQ ID NO: 1210230 - RNA, 19 nt, Homo sapiens
  misc_RNA (1)...(19): siRNA sense strand
caaagaucauucuccuuga

SEQ ID NO: 1210231 - RNA, 19 nt, Homo sapiens
  misc_RNA (1)...(19): siRNA sense strand
gauauaagaaggagggaaa

SEQ ID NO: 1210232 - RNA, 19 nt, Homo sapiens
  misc_RNA (1)...(19): siRNA sense strand
gugaaaggcuaccggcaaa

SEQ ID NO: 1210233 - RNA, 19 nt, Homo sapiens
  misc_RNA (1)...(19): siRNA sense strand
ccaaaggccugucauuguc

SEQ ID NO: 1210234 - RNA, 19 nt, Homo sapiens
  misc_RNA (1)...(19): siRNA sense strand
caaagaaauugcagaacca

SEQ ID NO: 1210235 - RNA, 19 nt, Homo sapiens
  misc_RNA (1)...(19): siRNA sense strand
gcaacaggaccauguguga

SEQ ID NO: 1210236 - RNA, 19 nt, Homo sapiens
  misc_RNA (1)...(19): siRNA sense strand
ggucagaggcauacaguga

SEQ ID NO: 1210237 - RNA, 19 nt, Homo sapiens
  misc_RNA (1)...(19): siRNA sense strand
gaaauugcagaaccagaaa

SEQ ID NO: 1210238 - RNA, 19 nt, Homo sapiens
  misc_RNA (1)...(19): siRNA sense strand
gcaaagugacagccucaaa

SEQ ID NO: 1210239 - RNA, 19 nt, Homo sapiens
  misc_RNA (1)...(19): siRNA sense strand
ugagaaagaugaaggaaaa

SEQ ID NO: 1210240 - RNA, 19 nt, Homo sapiens
  misc_RNA (1)...(19): siRNA sense strand
ugacucaucugacaccaau

SEQ ID NO: 1210241 - RNA, 19 nt, Homo sapiens
  misc_RNA (1)...(19): siRNA sense strand
gagaucaccuucagagacu

SEQ ID NO: 1210242 - RNA, 19 nt, Homo sapiens
  misc_RNA (1)...(19): siRNA sense strand
gcggagauccuuugcagaa

SEQ ID NO: 1210243 - RNA, 19 nt, Homo sapiens
  misc_RNA (1)...(19): siRNA sense strand
gaaagucuggguuggcauu

SEQ ID NO: 1210244 - RNA, 19 nt, Homo sapiens
  misc_RNA (1)...(19): siRNA sense strand
gaacauccuuaccuucacu

SEQ ID NO: 1210245 - RNA, 19 nt, Homo sapiens
  misc_RNA (1)...(19): siRNA sense strand
gaagaucuugggaauaugu

SEQ ID NO: 1210246 - RNA, 19 nt, Homo sapiens
  misc_RNA (1)...(19): siRNA sense strand
gcaugaagccagcaggaaa

SEQ ID NO: 1210247 - RNA, 19 nt, Homo sapiens
  misc_RNA (1)...(19): siRNA sense strand
gaagcgaaugucucucuaa

SEQ ID NO: 1210248 - RNA, 19 nt, Homo sapiens
  misc_RNA (1)...(19): siRNA sense strand
uaagaaggagggaaagaaa

SEQ ID NO: 1210249 - RNA, 19 nt, Homo sapiens
  misc_RNA (1)...(19): siRNA sense strand
ccaccgaguuuaccaaagu

SEQ ID NO: 1210250 - RNA, 19 nt, Homo sapiens
  misc_RNA (1)...(19): siRNA sense strand
gcaagaaacagaggucaga

SEQ ID NO: 1210251 - RNA, 19 nt, Homo sapiens
  misc_RNA (1)...(19): siRNA sense strand
aaacauacucuuuggagaa

SEQ ID NO: 1210252 - RNA, 19 nt, Homo sapiens
  misc_RNA (1)...(19): siRNA sense strand
agugauagcuauucuuugu

SEQ ID NO: 1210253 - RNA, 19 nt, Homo sapiens
  misc_RNA (1)...(19): siRNA sense strand
gaacgucagcugcuuugug

SEQ ID NO: 1210254 - RNA, 19 nt, Homo sapiens
  misc_RNA (1)...(19): siRNA sense strand
cagaugagauacagagaca

SEQ ID NO: 1210255 - RNA, 19 nt, Homo sapiens
  misc_RNA (1)...(19): siRNA sense strand
aaacauaucacacguacau

SEQ ID NO: 1210256 - RNA, 19 nt, Homo sapiens
  misc_RNA (1)...(19): siRNA sense strand
gaacuuuggccuacguuuc

SEQ ID NO: 1210257 - RNA, 19 nt, Homo sapiens
  misc_RNA (1)...(19): siRNA sense strand
gggaauaugugggaaugug

SEQ ID NO: 1210258 - RNA, 19 nt, Homo sapiens
  misc_RNA (1)...(19): siRNA sense strand
gaaaaguaccccaaagaaa

SEQ ID NO: 1210259 - RNA, 19 nt, Homo sapiens
  misc_RNA (1)...(19): siRNA sense strand
acauaucacacguacauua

SEQ ID NO: 1210260 - RNA, 19 nt, Homo sapiens
  misc_RNA (1)...(19): siRNA sense strand
cauaucacacguacauuaa

SEQ ID NO: 1210261 - RNA, 19 nt, Homo sapiens
  misc_RNA (1)...(19): siRNA sense strand
gcacggccauccgguugaa

SEQ ID NO: 1210262 - RNA, 19 nt, Homo sapiens
  misc_RNA (1)...(19): siRNA sense strand
auuagaagauggagagauu

SEQ ID NO: 1210263 - RNA, 19 nt, Homo sapiens
  misc_RNA (1)...(19): siRNA sense strand
gaagauggagagauuugug

SEQ ID NO: 1210264 - RNA, 19 nt, Homo sapiens
  misc_RNA (1)...(19): siRNA sense strand
gaaagucaucguuaggaau

SEQ ID NO: 1210265 - RNA, 19 nt, Homo sapiens
  misc_RNA (1)...(19): siRNA sense strand
gacauuauccugccacauc

SEQ ID NO: 1210266 - RNA, 19 nt, Homo sapiens
  misc_RNA (1)...(19): siRNA sense strand
gcgaucacguccugguuau

SEQ ID NO: 1210267 - RNA, 19 nt, Homo sapiens
  misc_RNA (1)...(19): siRNA sense strand
uaaugaaacucccagaaaa

SEQ ID NO: 1210268 - RNA, 19 nt, Homo sapiens
  misc_RNA (1)...(19): siRNA sense strand
gggcaucauucacgccuau

SEQ ID NO: 1210269 - RNA, 19 nt, Homo sapiens
  misc_RNA (1)...(19): siRNA sense strand
caaagugacagccucaaau

SEQ ID NO: 1210270 - RNA, 19 nt, Homo sapiens
  misc_RNA (1)...(19): siRNA sense strand
gcgacccugugcaagguua

SEQ ID NO: 1210271 - RNA, 19 nt, Homo sapiens
  misc_RNA (1)...(19): siRNA sense strand
gaggagugcauuaagaaga

SEQ ID NO: 1210272 - RNA, 19 nt, Homo sapiens
  misc_RNA (1)...(19): siRNA sense strand
caaaugccaccuugacaug

SEQ ID NO: 1210273 - RNA, 19 nt, Homo sapiens
  misc_RNA (1)...(19): siRNA sense strand
gcaaaugccaccuugacau

SEQ ID NO: 1210274 - RNA, 19 nt, Homo sapiens
  misc_RNA (1)...(19): siRNA sense strand
gcccagaggagcaaaguga

SEQ ID NO: 1210275 - RNA, 19 nt, Homo sapiens
  misc_RNA (1)...(19): siRNA sense strand
cuuagagucuugugaugaa

SEQ ID NO: 1210276 - RNA, 19 nt, Homo sapiens
  misc_RNA (1)...(19): siRNA sense strand
cagcaggcauggaucuuuc

SEQ ID NO: 1210277 - RNA, 19 nt, Homo sapiens
  misc_RNA (1)...(19): siRNA sense strand
ggauaucaguguaugucau

SEQ ID NO: 1210278 - RNA, 19 nt, Homo sapiens
  misc_RNA (1)...(19): siRNA sense strand
ugagguggauaucugcauu

SEQ ID NO: 1210279 - RNA, 19 nt, Homo sapiens
  misc_RNA (1)...(19): siRNA sense strand
cgaccuguguuccugaaug

SEQ ID NO: 1210280 - RNA, 19 nt, Homo sapiens
  misc_RNA (1)...(19): siRNA sense strand
ggcagucaauggaacuuug

SEQ ID NO: 1210281 - RNA, 19 nt, Homo sapiens
  misc_RNA (1)...(19): siRNA sense strand
cagaagacccagauacugu

SEQ ID NO: 1210282 - RNA, 19 nt, Homo sapiens
  misc_RNA (1)...(19): siRNA sense strand
ugauugccauguuuaaugu

SEQ ID NO: 1210283 - RNA, 19 nt, Homo sapiens
  misc_RNA (1)...(19): siRNA sense strand
caaaagauuucgaguccuu

SEQ ID NO: 1210284 - RNA, 19 nt, Homo sapiens
  misc_RNA (1)...(19): siRNA sense strand
gagcucuucuccguaauuc

SEQ ID NO: 1210285 - RNA, 19 nt, Homo sapiens
  misc_RNA (1)...(19): siRNA sense strand
caggaaaugagaaagauga

SEQ ID NO: 1210286 - RNA, 19 nt, Homo sapiens
  misc_RNA (1)...(19): siRNA sense strand
gaggauugcaguucaagga

SEQ ID NO: 1210287 - RNA, 19 nt, Homo sapiens
  misc_RNA (1)...(19): siRNA sense strand
ccaaagguaucagcacaca

SEQ ID NO: 1210288 - RNA, 19 nt, Homo sapiens
  misc_RNA (1)...(19): siRNA sense strand
uuacaucacccaaccagaa

SEQ ID NO: 1210289 - RNA, 19 nt, Homo sapiens
  misc_RNA (1)...(19): siRNA sense strand
caagcgaguucagacaaug

SEQ ID NO: 1210290 - RNA, 19 nt, Homo sapiens
  misc_RNA (1)...(19): siRNA sense strand
ggacugugcauagcccuuu

SEQ ID NO: 1210291 - RNA, 19 nt, Homo sapiens
  misc_RNA (1)...(19): siRNA sense strand
gcucuucuccguaauucaa

SEQ ID NO: 1210292 - RNA, 19 nt, Homo sapiens
  misc_RNA (1)...(19): siRNA sense strand
cccgagcucuucuccguaa

SEQ ID NO: 1210293 - RNA, 19 nt, Homo sapiens
  misc_RNA (1)...(19): siRNA sense strand
caccaaaggcuucgucuuc

SEQ ID NO: 1210294 - RNA, 19 nt, Homo sapiens
  misc_RNA (1)...(19): siRNA sense strand
guaccuccuuucucucuuc

SEQ ID NO: 1210295 - RNA, 19 nt, Homo sapiens
  misc_RNA (1)...(19): siRNA sense strand
ggaaagaaaauuacuggaa

SEQ ID NO: 1210296 - RNA, 19 nt, Homo sapiens
  misc_RNA (1)...(19): siRNA sense strand
gcgaggugcucaauauacu

SEQ ID NO: 1210297 - RNA, 19 nt, Homo sapiens
  misc_RNA (1)...(19): siRNA sense strand
uaccaacacuauccaagau

SEQ ID NO: 1210298 - RNA, 19 nt, Homo sapiens
  misc_RNA (1)...(19): siRNA sense strand
uggaagaccucagaaccaa

SEQ ID NO: 1210299 - RNA, 19 nt, Homo sapiens
  misc_RNA (1)...(19): siRNA sense strand
cagagacgcaagccaaauu

SEQ ID NO: 1210300 - RNA, 19 nt, Homo sapiens
  misc_RNA (1)...(19): siRNA sense strand
ucaugaacauccuuaccuu

SEQ ID NO: 1210301 - RNA, 19 nt, Homo sapiens
  misc_RNA (1)...(19): siRNA sense strand
uaagcuuuguggugagaaa

SEQ ID NO: 1210302 - RNA, 19 nt, Homo sapiens
  misc_RNA (1)...(19): siRNA sense strand
ucagaggcauacagugaga

SEQ ID NO: 1210303 - RNA, 19 nt, Homo sapiens
  misc_RNA (1)...(19): siRNA sense strand
ggaaaaguaccccaaagaa

SEQ ID NO: 1210304 - RNA, 19 nt, Homo sapiens
  misc_RNA (1)...(19): siRNA sense strand
gaagccagcaggaaaagua

SEQ ID NO: 1210305 - RNA, 19 nt, Homo sapiens
  misc_RNA (1)...(19): siRNA sense strand
ccagauacugucuugcuuu

SEQ ID NO: 1210306 - RNA, 19 nt, Homo sapiens
  misc_RNA (1)...(19): siRNA sense strand
ccuuugggaugaagaggua

SEQ ID NO: 1210307 - RNA, 19 nt, Homo sapiens
  misc_RNA (1)...(19): siRNA sense strand
auaaugaaacucccagaaa

SEQ ID NO: 1210308 - RNA, 19 nt, Homo sapiens
  misc_RNA (1)...(19): siRNA sense strand
gaaacaggcucagaauuug

SEQ ID NO: 1210309 - RNA, 19 nt, Homo sapiens
  misc_RNA (1)...(19): siRNA sense strand
gacaagggcucacggauga

SEQ ID NO: 1210310 - RNA, 19 nt, Homo sapiens
  misc_RNA (1)...(19): siRNA sense strand
gggaagaucuugggaauau

SEQ ID NO: 1210311 - RNA, 19 nt, Homo sapiens
  misc_RNA (1)...(19): siRNA sense strand
ggagagcccugcugagaga

SEQ ID NO: 1210312 - RNA, 19 nt, Homo sapiens
  misc_RNA (1)...(19): siRNA sense strand
ucaagaagguggagaaugu

SEQ ID NO: 1210313 - RNA, 19 nt, Homo sapiens
  misc_RNA (1)...(19): siRNA sense strand
gcgaaugucucucuaagga

SEQ ID NO: 1210314 - RNA, 19 nt, Homo sapiens
  misc_RNA (1)...(19): siRNA sense strand
ugaaacaggcucagaauuu

SEQ ID NO: 1210315 - RNA, 19 nt, Homo sapiens
  misc_RNA (1)...(19): siRNA sense strand
guuugaagcugccuuguuu

SEQ ID NO: 1210316 - RNA, 19 nt, Homo sapiens
  misc_RNA (1)...(19): siRNA sense strand
gggcagaggcagaggauua

SEQ ID NO: 1210317 - RNA, 19 nt, Homo sapiens
  misc_RNA (1)...(19): siRNA sense strand
ucaauauacugucaaguga

SEQ ID NO: 1210318 - RNA, 19 nt, Homo sapiens
  misc_RNA (1)...(19): siRNA sense strand
gacccuaccuuaucucaga

SEQ ID NO: 1210319 - RNA, 19 nt, Homo sapiens
  misc_RNA (1)...(19): siRNA sense strand
caagugauagcuauucuuu

SEQ ID NO: 1210320 - RNA, 19 nt, Homo sapiens
  misc_RNA (1)...(19): siRNA sense strand
ggcaaaggcugaccguaga

SEQ ID NO: 1210321 - RNA, 19 nt, Homo sapiens
  misc_RNA (1)...(19): siRNA sense strand
gauauaagaaggagggaaa

SEQ ID NO: 1210322 - RNA, 19 nt, Homo sapiens
  misc_RNA (1)...(19): siRNA sense strand
gugaaaggcuaccggcaaa

SEQ ID NO: 1210323 - RNA, 19 nt, Homo sapiens
  misc_RNA (1)...(19): siRNA sense strand
caaagaaauugcagaacca

SEQ ID NO: 1210324 - RNA, 19 nt, Homo sapiens
  misc_RNA (1)...(19): siRNA sense strand
gcaacaggaccauguguga

SEQ ID NO: 1210325 - RNA, 19 nt, Homo sapiens
  misc_RNA (1)...(19): siRNA sense strand
ggucagaggcauacaguga

SEQ ID NO: 1210326 - RNA, 19 nt, Homo sapiens
  misc_RNA (1)...(19): siRNA sense strand
gaaauugcagaaccagaaa

SEQ ID NO: 1210327 - RNA, 19 nt, Homo sapiens
  misc_RNA (1)...(19): siRNA sense strand
gcaaagugacagccucaaa

SEQ ID NO: 1210328 - RNA, 19 nt, Homo sapiens
  misc_RNA (1)...(19): siRNA sense strand
ugagaaagaugaaggaaaa

SEQ ID NO: 1210329 - RNA, 19 nt, Homo sapiens
  misc_RNA (1)...(19): siRNA sense strand
ugacucaucugacaccaau

SEQ ID NO: 1210330 - RNA, 19 nt, Homo sapiens
  misc_RNA (1)...(19): siRNA sense strand
gcggagauccuuugcagaa

SEQ ID NO: 1210331 - RNA, 19 nt, Homo sapiens
  misc_RNA (1)...(19): siRNA sense strand
gaaagucuggguuggcauu

SEQ ID NO: 1210332 - RNA, 19 nt, Homo sapiens
  misc_RNA (1)...(19): siRNA sense strand
gaagaucuugggaauaugu

SEQ ID NO: 1210333 - RNA, 19 nt, Homo sapiens
  misc_RNA (1)...(19): siRNA sense strand
gcaugaagccagcaggaaa

SEQ ID NO: 1210334 - RNA, 19 nt, Homo sapiens
  misc_RNA (1)...(19): siRNA sense strand
gaagcgaaugucucucuaa

SEQ ID NO: 1210335 - RNA, 19 nt, Homo sapiens
  misc_RNA (1)...(19): siRNA sense strand
uaagaaggagggaaagaaa

SEQ ID NO: 1210336 - RNA, 19 nt, Homo sapiens
  misc_RNA (1)...(19): siRNA sense strand
ccaccgaguuuaccaaagu

SEQ ID NO: 1210337 - RNA, 19 nt, Homo sapiens
  misc_RNA (1)...(19): siRNA sense strand
gcaagaaacagaggucaga

SEQ ID NO: 1210338 - RNA, 19 nt, Homo sapiens
  misc_RNA (1)...(19): siRNA sense strand
aaacauacucuuuggagaa

SEQ ID NO: 1210339 - RNA, 19 nt, Homo sapiens
  misc_RNA (1)...(19): siRNA sense strand
agugauagcuauucuuugu

SEQ ID NO: 1210340 - RNA, 19 nt, Homo sapiens
  misc_RNA (1)...(19): siRNA sense strand
aaacauaucacacguacau

SEQ ID NO: 1210341 - RNA, 19 nt, Homo sapiens
  misc_RNA (1)...(19): siRNA sense strand
gaacuuuggccuacguuuc

SEQ ID NO: 1210342 - RNA, 19 nt, Homo sapiens
  misc_RNA (1)...(19): siRNA sense strand
gggaauaugugggaaugug

SEQ ID NO: 1210343 - RNA, 19 nt, Homo sapiens
  misc_RNA (1)...(19): siRNA sense strand
gaaaaguaccccaaagaaa

SEQ ID NO: 1210344 - RNA, 19 nt, Homo sapiens
  misc_RNA (1)...(19): siRNA sense strand
acauaucacacguacauua

SEQ ID NO: 1210345 - RNA, 19 nt, Homo sapiens
  misc_RNA (1)...(19): siRNA sense strand
cauaucacacguacauuaa

SEQ ID NO: 1210346 - RNA, 19 nt, Homo sapiens
  misc_RNA (1)...(19): siRNA sense strand
gcacggccauccgguugaa

SEQ ID NO: 1210347 - RNA, 19 nt, Homo sapiens
  misc_RNA (1)...(19): siRNA sense strand
auuagaagauggagagauu

SEQ ID NO: 1210348 - RNA, 19 nt, Homo sapiens
  misc_RNA (1)...(19): siRNA sense strand
gaagauggagagauuugug

SEQ ID NO: 1210349 - RNA, 19 nt, Homo sapiens
  misc_RNA (1)...(19): siRNA sense strand
gacauuauccugccacauc

SEQ ID NO: 1210350 - RNA, 19 nt, Homo sapiens
  misc_RNA (1)...(19): siRNA sense strand
gggcaucauucacgccuau

SEQ ID NO: 1210351 - RNA, 19 nt, Homo sapiens
  misc_RNA (1)...(19): siRNA sense strand
caaagugacagccucaaau

SEQ ID NO: 1210352 - RNA, 19 nt, Homo sapiens
  misc_RNA (1)...(19): siRNA sense strand
gcaaaugccaccuugacau

SEQ ID NO: 1210353 - RNA, 19 nt, Homo sapiens
  misc_RNA (1)...(19): siRNA sense strand
gcgacccugugcaagguua

SEQ ID NO: 1210354 - RNA, 19 nt, Homo sapiens
  misc_RNA (1)...(19): siRNA sense strand
gaggagugcauuaagaaga

SEQ ID NO: 1210355 - RNA, 19 nt, Homo sapiens
  misc_RNA (1)...(19): siRNA sense strand
caaaugccaccuugacaug

SEQ ID NO: 1210356 - RNA, 19 nt, Homo sapiens
  misc_RNA (1)...(19): siRNA sense strand
gcccagaggagcaaaguga

SEQ ID NO: 1210357 - RNA, 19 nt, Homo sapiens
  misc_RNA (1)...(19): siRNA sense strand
cuuagagucuugugaugaa

SEQ ID NO: 1210358 - RNA, 19 nt, Homo sapiens
  misc_RNA (1)...(19): siRNA sense strand
cagcaggcauggaucuuuc

SEQ ID NO: 1210359 - RNA, 19 nt, Homo sapiens
  misc_RNA (1)...(19): siRNA sense strand
ggauaucaguguaugucau

SEQ ID NO: 1210360 - RNA, 19 nt, Homo sapiens
  misc_RNA (1)...(19): siRNA sense strand
ggcagucaauggaacuuug

SEQ ID NO: 1210361 - RNA, 19 nt, Homo sapiens
  misc_RNA (1)...(19): siRNA sense strand
cagaagacccagauacugu

SEQ ID NO: 1210362 - RNA, 19 nt, Homo sapiens
  misc_RNA (1)...(19): siRNA sense strand
ugauugccauguuuaaugu

SEQ ID NO: 1210363 - RNA, 19 nt, Homo sapiens
  misc_RNA (1)...(19): siRNA sense strand
caaaagauuucgaguccuu

SEQ ID NO: 1210364 - RNA, 19 nt, Homo sapiens
  misc_RNA (1)...(19): siRNA sense strand
caggaaaugagaaagauga

SEQ ID NO: 1210365 - RNA, 19 nt, Homo sapiens
  misc_RNA (1)...(19): siRNA sense strand
gaggauugcaguucaagga

SEQ ID NO: 1210366 - RNA, 19 nt, Homo sapiens
  misc_RNA (1)...(19): siRNA sense strand
ccaaagguaucagcacaca

SEQ ID NO: 1210367 - RNA, 19 nt, Homo sapiens
  misc_RNA (1)...(19): siRNA sense strand
uuacaucacccaaccagaa

SEQ ID NO: 1210368 - RNA, 19 nt, Homo sapiens
  misc_RNA (1)...(19): siRNA sense strand
caagcgaguucagacaaug

SEQ ID NO: 1210369 - RNA, 19 nt, Homo sapiens
  misc_RNA (1)...(19): siRNA sense strand
ggacugugcauagcccuuu

SEQ ID NO: 1210370 - RNA, 19 nt, Homo sapiens
  misc_RNA (1)...(19): siRNA sense strand
caccaaaggcuucgucuuc

SEQ ID NO: 1210371 - RNA, 19 nt, Homo sapiens
  misc_RNA (1)...(19): siRNA sense strand
guaccuccuuucucucuuc

SEQ ID NO: 1210372 - RNA, 19 nt, Homo sapiens
  misc_RNA (1)...(19): siRNA sense strand
ggaaagaaaauuacuggaa

SEQ ID NO: 1210373 - RNA, 19 nt, Homo sapiens
  misc_RNA (1)...(19): siRNA sense strand
gcgaggugcucaauauacu

SEQ ID NO: 1210374 - RNA, 19 nt, Homo sapiens
  misc_RNA (1)...(19): siRNA sense strand
uaccaacacuauccaagau

SEQ ID NO: 1210375 - RNA, 19 nt, Homo sapiens
  misc_RNA (1)...(19): siRNA sense strand
ccuuugggaugaagaggua

SEQ ID NO: 1210376 - RNA, 19 nt, Homo sapiens
  misc_RNA (1)...(19): siRNA sense strand
uaagcuuuguggugagaaa

SEQ ID NO: 1210377 - RNA, 19 nt, Homo sapiens
  misc_RNA (1)...(19): siRNA sense strand
ucagaggcauacagugaga

SEQ ID NO: 1210378 - RNA, 19 nt, Homo sapiens
  misc_RNA (1)...(19): siRNA sense strand
ggaaaaguaccccaaagaa

SEQ ID NO: 1210379 - RNA, 19 nt, Homo sapiens
  misc_RNA (1)...(19): siRNA sense strand
gaagccagcaggaaaagua

SEQ ID NO: 1210380 - RNA, 19 nt, Homo sapiens
  misc_RNA (1)...(19): siRNA sense strand
ccagauacugucuugcuuu

SEQ ID NO: 1210381 - RNA, 19 nt, Homo sapiens
  misc_RNA (1)...(19): siRNA sense strand
gauagcuauucuuuguuug

SEQ ID NO: 1210382 - RNA, 19 nt, Homo sapiens
  misc_RNA (1)...(19): siRNA sense strand
cugaacaccuuuacaaugc

SEQ ID NO: 1210383 - RNA, 19 nt, Homo sapiens
  misc_RNA (1)...(19): siRNA sense strand
gccaacauccugugcauca

SEQ ID NO: 1210384 - RNA, 19 nt, Homo sapiens
  misc_RNA (1)...(19): siRNA sense strand
gagagagggcgcuaugcaa

SEQ ID NO: 1210385 - RNA, 19 nt, Homo sapiens
  misc_RNA (1)...(19): siRNA sense strand
ggagagagggcgcuaugca

SEQ ID NO: 1210386 - RNA, 19 nt, Homo sapiens
  misc_RNA (1)...(19): siRNA sense strand
gaacccacaaggaguuaau

SEQ ID NO: 1210387 - RNA, 19 nt, Homo sapiens
  misc_RNA (1)...(19): siRNA sense strand
cagcuacaguucuuagagu

SEQ ID NO: 1210388 - RNA, 19 nt, Homo sapiens
  misc_RNA (1)...(19): siRNA sense strand
ggacaucguggccaacauc

SEQ ID NO: 1210389 - RNA, 19 nt, Homo sapiens
  misc_RNA (1)...(19): siRNA sense strand
ugaagcgaaugucucucua

SEQ ID NO: 1210390 - RNA, 19 nt, Homo sapiens
  misc_RNA (1)...(19): siRNA sense strand
agaaauugcagaaccagaa

SEQ ID NO: 1210391 - RNA, 19 nt, Homo sapiens
  misc_RNA (1)...(19): siRNA sense strand
uccaggagcucaagaaggu

SEQ ID NO: 1210392 - RNA, 19 nt, Homo sapiens
  misc_RNA (1)...(19): siRNA sense strand
gauggagagauuugugaaa

SEQ ID NO: 1210393 - RNA, 19 nt, Homo sapiens
  misc_RNA (1)...(19): siRNA sense strand
ggaagaucuugggaauaug

SEQ ID NO: 1210394 - RNA, 19 nt, Homo sapiens
  misc_RNA (1)...(19): siRNA sense strand
uuccgaaggucagcaauuu

SEQ ID NO: 1210395 - RNA, 19 nt, Homo sapiens
  misc_RNA (1)...(19): siRNA sense strand
gaggagagagggcgcuaug

SEQ ID NO: 1210396 - RNA, 19 nt, Homo sapiens
  misc_RNA (1)...(19): siRNA sense strand
gugauugccauguuuaaug

SEQ ID NO: 1210397 - RNA, 19 nt, Homo sapiens
  misc_RNA (1)...(19): siRNA sense strand
gacaaugaaugaguuucug

SEQ ID NO: 1210398 - RNA, 19 nt, Homo sapiens
  misc_RNA (1)...(19): siRNA sense strand
gcaaggguggguccugaga

SEQ ID NO: 1210399 - RNA, 19 nt, Homo sapiens
  misc_RNA (1)...(19): siRNA sense strand
aaaguaugaucaccaaagg

SEQ ID NO: 1210400 - RNA, 19 nt, Homo sapiens
  misc_RNA (1)...(19): siRNA sense strand
aacauacucuuuggagaaa

SEQ ID NO: 1210401 - RNA, 19 nt, Homo sapiens
  misc_RNA (1)...(19): siRNA sense strand
gacaagcgaguucagacaa

SEQ ID NO: 1210402 - RNA, 19 nt, Homo sapiens
  misc_RNA (1)...(19): siRNA sense strand
aguaugaucaccaaaggua

SEQ ID NO: 1210403 - RNA, 19 nt, Homo sapiens
  misc_RNA (1)...(19): siRNA sense strand
gagaaaacauacucuuugg

SEQ ID NO: 1210404 - RNA, 19 nt, Homo sapiens
  misc_RNA (1)...(19): siRNA sense strand
ccuugcagcucuccuagga

SEQ ID NO: 1210405 - RNA, 19 nt, Homo sapiens
  misc_RNA (1)...(19): siRNA sense strand
cauaagcuuuguggugaga

SEQ ID NO: 1210406 - RNA, 19 nt, Homo sapiens
  misc_RNA (1)...(19): siRNA sense strand
agagagggcgcuaugcaaa

SEQ ID NO: 1210407 - RNA, 19 nt, Homo sapiens
  misc_RNA (1)...(19): siRNA sense strand
gaaagaugaaggaaaagaa

SEQ ID NO: 1210408 - RNA, 19 nt, Homo sapiens
  misc_RNA (1)...(19): siRNA sense strand
gaaacaggcucagaauuug

SEQ ID NO: 1210409 - RNA, 19 nt, Homo sapiens
  misc_RNA (1)...(19): siRNA sense strand
gacaagggcucacggauga

SEQ ID NO: 1210410 - RNA, 19 nt, Homo sapiens
  misc_RNA (1)...(19): siRNA sense strand
gggaagaucuugggaauau

SEQ ID NO: 1210411 - RNA, 19 nt, Homo sapiens
  misc_RNA (1)...(19): siRNA sense strand
ggagagcccugcugagaga

SEQ ID NO: 1210412 - RNA, 19 nt, Homo sapiens
  misc_RNA (1)...(19): siRNA sense strand
ucaagaagguggagaaugu

SEQ ID NO: 1210413 - RNA, 19 nt, Homo sapiens
  misc_RNA (1)...(19): siRNA sense strand
gcgaaugucucucuaagga

SEQ ID NO: 1210414 - RNA, 19 nt, Homo sapiens
  misc_RNA (1)...(19): siRNA sense strand
ugaaacaggcucagaauuu

SEQ ID NO: 1210415 - RNA, 19 nt, Homo sapiens
  misc_RNA (1)...(19): siRNA sense strand
guuugaagcugccuuguuu

SEQ ID NO: 1210416 - RNA, 19 nt, Homo sapiens
  misc_RNA (1)...(19): siRNA sense strand
gggcagaggcagaggauua

SEQ ID NO: 1210417 - RNA, 19 nt, Homo sapiens
  misc_RNA (1)...(19): siRNA sense strand
ucaauauacugucaaguga

SEQ ID NO: 1210418 - RNA, 19 nt, Homo sapiens
  misc_RNA (1)...(19): siRNA sense strand
gacccuaccuuaucucaga

SEQ ID NO: 1210419 - RNA, 19 nt, Homo sapiens
  misc_RNA (1)...(19): siRNA sense strand
caagugauagcuauucuuu

SEQ ID NO: 1210420 - RNA, 19 nt, Homo sapiens
  misc_RNA (1)...(19): siRNA sense strand
ggcaaaggcugaccguaga

SEQ ID NO: 1210421 - RNA, 19 nt, Homo sapiens
  misc_RNA (1)...(19): siRNA sense strand
gauauaagaaggagggaaa

SEQ ID NO: 1210422 - RNA, 19 nt, Homo sapiens
  misc_RNA (1)...(19): siRNA sense strand
gugaaaggcuaccggcaaa

SEQ ID NO: 1210423 - RNA, 19 nt, Homo sapiens
  misc_RNA (1)...(19): siRNA sense strand
caaagaaauugcagaacca

SEQ ID NO: 1210424 - RNA, 19 nt, Homo sapiens
  misc_RNA (1)...(19): siRNA sense strand
gcaacaggaccauguguga

SEQ ID NO: 1210425 - RNA, 19 nt, Homo sapiens
  misc_RNA (1)...(19): siRNA sense strand
ggucagaggcauacaguga

SEQ ID NO: 1210426 - RNA, 19 nt, Homo sapiens
  misc_RNA (1)...(19): siRNA sense strand
gaaauugcagaaccagaaa

SEQ ID NO: 1210427 - RNA, 19 nt, Homo sapiens
  misc_RNA (1)...(19): siRNA sense strand
gcaaagugacagccucaaa

SEQ ID NO: 1210428 - RNA, 19 nt, Homo sapiens
  misc_RNA (1)...(19): siRNA sense strand
ugagaaagaugaaggaaaa

SEQ ID NO: 1210429 - RNA, 19 nt, Homo sapiens
  misc_RNA (1)...(19): siRNA sense strand
ugacucaucugacaccaau

SEQ ID NO: 1210430 - RNA, 19 nt, Homo sapiens
  misc_RNA (1)...(19): siRNA sense strand
gcggagauccuuugcagaa

SEQ ID NO: 1210431 - RNA, 19 nt, Homo sapiens
  misc_RNA (1)...(19): siRNA sense strand
gaaagucuggguuggcauu

SEQ ID NO: 1210432 - RNA, 19 nt, Homo sapiens
  misc_RNA (1)...(19): siRNA sense strand
gaagaucuugggaauaugu

SEQ ID NO: 1210433 - RNA, 19 nt, Homo sapiens
  misc_RNA (1)...(19): siRNA sense strand
gcaugaagccagcaggaaa

SEQ ID NO: 1210434 - RNA, 19 nt, Homo sapiens
  misc_RNA (1)...(19): siRNA sense strand
gaagcgaaugucucucuaa

SEQ ID NO: 1210435 - RNA, 19 nt, Homo sapiens
  misc_RNA (1)...(19): siRNA sense strand
uaagaaggagggaaagaaa

SEQ ID NO: 1210436 - RNA, 19 nt, Homo sapiens
  misc_RNA (1)...(19): siRNA sense strand
ccaccgaguuuaccaaagu

SEQ ID NO: 1210437 - RNA, 19 nt, Homo sapiens
  misc_RNA (1)...(19): siRNA sense strand
gcaagaaacagaggucaga

SEQ ID NO: 1210438 - RNA, 19 nt, Homo sapiens
  misc_RNA (1)...(19): siRNA sense strand
aaacauacucuuuggagaa

SEQ ID NO: 1210439 - RNA, 19 nt, Homo sapiens
  misc_RNA (1)...(19): siRNA sense strand
agugauagcuauucuuugu

SEQ ID NO: 1210440 - RNA, 19 nt, Homo sapiens
  misc_RNA (1)...(19): siRNA sense strand
aaacauaucacacguacau

SEQ ID NO: 1210441 - RNA, 19 nt, Homo sapiens
  misc_RNA (1)...(19): siRNA sense strand
gaacuuuggccuacguuuc

SEQ ID NO: 1210442 - RNA, 19 nt, Homo sapiens
  misc_RNA (1)...(19): siRNA sense strand
gggaauaugugggaaugug

SEQ ID NO: 1210443 - RNA, 19 nt, Homo sapiens
  misc_RNA (1)...(19): siRNA sense strand
gaaaaguaccccaaagaaa

SEQ ID NO: 1210444 - RNA, 19 nt, Homo sapiens
  misc_RNA (1)...(19): siRNA sense strand
acauaucacacguacauua

SEQ ID NO: 1210445 - RNA, 19 nt, Homo sapiens
  misc_RNA (1)...(19): siRNA sense strand
cauaucacacguacauuaa

SEQ ID NO: 1210446 - RNA, 19 nt, Homo sapiens
  misc_RNA (1)...(19): siRNA sense strand
gcacggccauccgguugaa

SEQ ID NO: 1210447 - RNA, 19 nt, Homo sapiens
  misc_RNA (1)...(19): siRNA sense strand
auuagaagauggagagauu

SEQ ID NO: 1210448 - RNA, 19 nt, Homo sapiens
  misc_RNA (1)...(19): siRNA sense strand
gaagauggagagauuugug

SEQ ID NO: 1210449 - RNA, 19 nt, Homo sapiens
  misc_RNA (1)...(19): siRNA sense strand
gacauuauccugccacauc

SEQ ID NO: 1210450 - RNA, 19 nt, Homo sapiens
  misc_RNA (1)...(19): siRNA sense strand
gggcaucauucacgccuau

SEQ ID NO: 1210451 - RNA, 19 nt, Homo sapiens
  misc_RNA (1)...(19): siRNA sense strand
caaagugacagccucaaau

SEQ ID NO: 1210452 - RNA, 19 nt, Homo sapiens
  misc_RNA (1)...(19): siRNA sense strand
gcaaaugccaccuugacau

SEQ ID NO: 1210453 - RNA, 19 nt, Homo sapiens
  misc_RNA (1)...(19): siRNA sense strand
gcgacccugugcaagguua

SEQ ID NO: 1210454 - RNA, 19 nt, Homo sapiens
  misc_RNA (1)...(19): siRNA sense strand
gaggagugcauuaagaaga

SEQ ID NO: 1210455 - RNA, 19 nt, Homo sapiens
  misc_RNA (1)...(19): siRNA sense strand
caaaugccaccuugacaug

SEQ ID NO: 1210456 - RNA, 19 nt, Homo sapiens
  misc_RNA (1)...(19): siRNA sense strand
gcccagaggagcaaaguga

SEQ ID NO: 1210457 - RNA, 19 nt, Homo sapiens
  misc_RNA (1)...(19): siRNA sense strand
cuuagagucuugugaugaa

SEQ ID NO: 1210458 - RNA, 19 nt, Homo sapiens
  misc_RNA (1)...(19): siRNA sense strand
cagcaggcauggaucuuuc

SEQ ID NO: 1210459 - RNA, 19 nt, Homo sapiens
  misc_RNA (1)...(19): siRNA sense strand
ggauaucaguguaugucau

SEQ ID NO: 1210460 - RNA, 19 nt, Homo sapiens
  misc_RNA (1)...(19): siRNA sense strand
ggcagucaauggaacuuug

SEQ ID NO: 1210461 - RNA, 19 nt, Homo sapiens
  misc_RNA (1)...(19): siRNA sense strand
cagaagacccagauacugu

SEQ ID NO: 1210462 - RNA, 19 nt, Homo sapiens
  misc_RNA (1)...(19): siRNA sense strand
ugauugccauguuuaaugu

SEQ ID NO: 1210463 - RNA, 19 nt, Homo sapiens
  misc_RNA (1)...(19): siRNA sense strand
caaaagauuucgaguccuu

SEQ ID NO: 1210464 - RNA, 19 nt, Homo sapiens
  misc_RNA (1)...(19): siRNA sense strand
caggaaaugagaaagauga

SEQ ID NO: 1210465 - RNA, 19 nt, Homo sapiens
  misc_RNA (1)...(19): siRNA sense strand
gaggauugcaguucaagga

SEQ ID NO: 1210466 - RNA, 19 nt, Homo sapiens
  misc_RNA (1)...(19): siRNA sense strand
ccaaagguaucagcacaca

SEQ ID NO: 1210467 - RNA, 19 nt, Homo sapiens
  misc_RNA (1)...(19): siRNA sense strand
uuacaucacccaaccagaa

SEQ ID NO: 1210468 - RNA, 19 nt, Homo sapiens
  misc_RNA (1)...(19): siRNA sense strand
caagcgaguucagacaaug

SEQ ID NO: 1210469 - RNA, 19 nt, Homo sapiens
  misc_RNA (1)...(19): siRNA sense strand
ggacugugcauagcccuuu

SEQ ID NO: 1210470 - RNA, 19 nt, Homo sapiens
  misc_RNA (1)...(19): siRNA sense strand
caccaaaggcuucgucuuc

SEQ ID NO: 1210471 - RNA, 19 nt, Homo sapiens
  misc_RNA (1)...(19): siRNA sense strand
guaccuccuuucucucuuc

SEQ ID NO: 1210472 - RNA, 19 nt, Homo sapiens
  misc_RNA (1)...(19): siRNA sense strand
ggaaagaaaauuacuggaa

SEQ ID NO: 1210473 - RNA, 19 nt, Homo sapiens
  misc_RNA (1)...(19): siRNA sense strand
gcgaggugcucaauauacu

SEQ ID NO: 1210474 - RNA, 19 nt, Homo sapiens
  misc_RNA (1)...(19): siRNA sense strand
uaccaacacuauccaagau

SEQ ID NO: 1210475 - RNA, 19 nt, Homo sapiens
  misc_RNA (1)...(19): siRNA sense strand
ccuuugggaugaagaggua

SEQ ID NO: 1210476 - RNA, 19 nt, Homo sapiens
  misc_RNA (1)...(19): siRNA sense strand
uaagcuuuguggugagaaa

SEQ ID NO: 1210477 - RNA, 19 nt, Homo sapiens
  misc_RNA (1)...(19): siRNA sense strand
ucagaggcauacagugaga

SEQ ID NO: 1210478 - RNA, 19 nt, Homo sapiens
  misc_RNA (1)...(19): siRNA sense strand
ggaaaaguaccccaaagaa

SEQ ID NO: 1210479 - RNA, 19 nt, Homo sapiens
  misc_RNA (1)...(19): siRNA sense strand
gaagccagcaggaaaagua

SEQ ID NO: 1210480 - RNA, 19 nt, Homo sapiens
  misc_RNA (1)...(19): siRNA sense strand
ccagauacugucuugcuuu

SEQ ID NO: 1210481 - RNA, 19 nt, Homo sapiens
  misc_RNA (1)...(19): siRNA sense strand
gauagcuauucuuuguuug

SEQ ID NO: 1210482 - RNA, 19 nt, Homo sapiens
  misc_RNA (1)...(19): siRNA sense strand
cugaacaccuuuacaaugc

SEQ ID NO: 1210483 - RNA, 19 nt, Homo sapiens
  misc_RNA (1)...(19): siRNA sense strand
gccaacauccugugcauca

SEQ ID NO: 1210484 - RNA, 19 nt, Homo sapiens
  misc_RNA (1)...(19): siRNA sense strand
gagagagggcgcuaugcaa

SEQ ID NO: 1210485 - RNA, 19 nt, Homo sapiens
  misc_RNA (1)...(19): siRNA sense strand
ggagagagggcgcuaugca

SEQ ID NO: 1210486 - RNA, 19 nt, Homo sapiens
  misc_RNA (1)...(19): siRNA sense strand
gaacccacaaggaguuaau

SEQ ID NO: 1210487 - RNA, 19 nt, Homo sapiens
  misc_RNA (1)...(19): siRNA sense strand
cagcuacaguucuuagagu

SEQ ID NO: 1210488 - RNA, 19 nt, Homo sapiens
  misc_RNA (1)...(19): siRNA sense strand
ggacaucguggccaacauc

SEQ ID NO: 1210489 - RNA, 19 nt, Homo sapiens
  misc_RNA (1)...(19): siRNA sense strand
ugaagcgaaugucucucua

SEQ ID NO: 1210490 - RNA, 19 nt, Homo sapiens
  misc_RNA (1)...(19): siRNA sense strand
agaaauugcagaaccagaa

SEQ ID NO: 1210491 - RNA, 19 nt, Homo sapiens
  misc_RNA (1)...(19): siRNA sense strand
uccaggagcucaagaaggu

SEQ ID NO: 1210492 - RNA, 19 nt, Homo sapiens
  misc_RNA (1)...(19): siRNA sense strand
gauggagagauuugugaaa

SEQ ID NO: 1210493 - RNA, 19 nt, Homo sapiens
  misc_RNA (1)...(19): siRNA sense strand
ggaagaucuugggaauaug

SEQ ID NO: 1210494 - RNA, 19 nt, Homo sapiens
  misc_RNA (1)...(19): siRNA sense strand
uuccgaaggucagcaauuu

SEQ ID NO: 1210495 - RNA, 19 nt, Homo sapiens
  misc_RNA (1)...(19): siRNA sense strand
gaggagagagggcgcuaug

SEQ ID NO: 1210496 - RNA, 19 nt, Homo sapiens
  misc_RNA (1)...(19): siRNA sense strand
gugauugccauguuuaaug

SEQ ID NO: 1210497 - RNA, 19 nt, Homo sapiens
  misc_RNA (1)...(19): siRNA sense strand
gacaaugaaugaguuucug

SEQ ID NO: 1210498 - RNA, 19 nt, Homo sapiens
  misc_RNA (1)...(19): siRNA sense strand
gcaaggguggguccugaga

SEQ ID NO: 1210499 - RNA, 19 nt, Homo sapiens
  misc_RNA (1)...(19): siRNA sense strand
aaaguaugaucaccaaagg

SEQ ID NO: 1210500 - RNA, 19 nt, Homo sapiens
  misc_RNA (1)...(19): siRNA sense strand
aacauacucuuuggagaaa

SEQ ID NO: 1210501 - RNA, 19 nt, Homo sapiens
  misc_RNA (1)...(19): siRNA sense strand
gacaagcgaguucagacaa

SEQ ID NO: 1210502 - RNA, 19 nt, Homo sapiens
  misc_RNA (1)...(19): siRNA sense strand
aguaugaucaccaaaggua

SEQ ID NO: 1210503 - RNA, 19 nt, Homo sapiens
  misc_RNA (1)...(19): siRNA sense strand
gagaaaacauacucuuugg

SEQ ID NO: 1210504 - RNA, 19 nt, Homo sapiens
  misc_RNA (1)...(19): siRNA sense strand
ccuugcagcucuccuagga

SEQ ID NO: 1210505 - RNA, 19 nt, Homo sapiens
  misc_RNA (1)...(19): siRNA sense strand
cauaagcuuuguggugaga

SEQ ID NO: 1210506 - RNA, 19 nt, Homo sapiens
  misc_RNA (1)...(19): siRNA sense strand
agagagggcgcuaugcaaa

SEQ ID NO: 1210507 - RNA, 19 nt, Homo sapiens
  misc_RNA (1)...(19): siRNA sense strand
gaaagaugaaggaaaagaa

SEQ ID NO: 1210508 - RNA, 19 nt, Homo sapiens
  misc_RNA (1)...(19): siRNA sense strand
gaaacaggcucagaauuug

SEQ ID NO: 1210509 - RNA, 19 nt, Homo sapiens
  misc_RNA (1)...(19): siRNA sense strand
gacaagggcucacggauga

SEQ ID NO: 1210510 - RNA, 19 nt, Homo sapiens
  misc_RNA (1)...(19): siRNA sense strand
gggaagaucuugggaauau

SEQ ID NO: 1210511 - RNA, 19 nt, Homo sapiens
  misc_RNA (1)...(19): siRNA sense strand
ggagagcccugcugagaga

SEQ ID NO: 1210512 - RNA, 19 nt, Homo sapiens
  misc_RNA (1)...(19): siRNA sense strand
ucaagaagguggagaaugu

SEQ ID NO: 1210513 - RNA, 19 nt, Homo sapiens
  misc_RNA (1)...(19): siRNA sense strand
gcgaaugucucucuaagga

SEQ ID NO: 1210514 - RNA, 19 nt, Homo sapiens
  misc_RNA (1)...(19): siRNA sense strand
ugaaacaggcucagaauuu

SEQ ID NO: 1210515 - RNA, 19 nt, Homo sapiens
  misc_RNA (1)...(19): siRNA sense strand
guuugaagcugccuuguuu

SEQ ID NO: 1210516 - RNA, 19 nt, Homo sapiens
  misc_RNA (1)...(19): siRNA sense strand
gggcagaggcagaggauua

SEQ ID NO: 1210517 - RNA, 19 nt, Homo sapiens
  misc_RNA (1)...(19): siRNA sense strand
ucaauauacugucaaguga

SEQ ID NO: 1210518 - RNA, 19 nt, Homo sapiens
  misc_RNA (1)...(19): siRNA sense strand
gacccuaccuuaucucaga

SEQ ID NO: 1210519 - RNA, 19 nt, Homo sapiens
  misc_RNA (1)...(19): siRNA sense strand
caagugauagcuauucuuu

SEQ ID NO: 1210520 - RNA, 19 nt, Homo sapiens
  misc_RNA (1)...(19): siRNA sense strand
ggcaaaggcugaccguaga

SEQ ID NO: 1210521 - RNA, 19 nt, Homo sapiens
  misc_RNA (1)...(19): siRNA sense strand
gauauaagaaggagggaaa

SEQ ID NO: 1210522 - RNA, 19 nt, Homo sapiens
  misc_RNA (1)...(19): siRNA sense strand
gugaaaggcuaccggcaaa

SEQ ID NO: 1210523 - RNA, 19 nt, Homo sapiens
  misc_RNA (1)...(19): siRNA sense strand
caaagaaauugcagaacca

SEQ ID NO: 1210524 - RNA, 19 nt, Homo sapiens
  misc_RNA (1)...(19): siRNA sense strand
gcaacaggaccauguguga

SEQ ID NO: 1210525 - RNA, 19 nt, Homo sapiens
  misc_RNA (1)...(19): siRNA sense strand
ggucagaggcauacaguga

SEQ ID NO: 1210526 - RNA, 19 nt, Homo sapiens
  misc_RNA (1)...(19): siRNA sense strand
gaaauugcagaaccagaaa

SEQ ID NO: 1210527 - RNA, 19 nt, Homo sapiens
  misc_RNA (1)...(19): siRNA sense strand
gcaaagugacagccucaaa

SEQ ID NO: 1210528 - RNA, 19 nt, Homo sapiens
  misc_RNA (1)...(19): siRNA sense strand
ugagaaagaugaaggaaaa

SEQ ID NO: 1210529 - RNA, 19 nt, Homo sapiens
  misc_RNA (1)...(19): siRNA sense strand
ugacucaucugacaccaau

SEQ ID NO: 1210530 - RNA, 19 nt, Homo sapiens
  misc_RNA (1)...(19): siRNA sense strand
gcggagauccuuugcagaa

SEQ ID NO: 1210531 - RNA, 19 nt, Homo sapiens
  misc_RNA (1)...(19): siRNA sense strand
gaaagucuggguuggcauu

SEQ ID NO: 1210532 - RNA, 19 nt, Homo sapiens
  misc_RNA (1)...(19): siRNA sense strand
gaagaucuugggaauaugu

SEQ ID NO: 1210533 - RNA, 19 nt, Homo sapiens
  misc_RNA (1)...(19): siRNA sense strand
gcaugaagccagcaggaaa

SEQ ID NO: 1210534 - RNA, 19 nt, Homo sapiens
  misc_RNA (1)...(19): siRNA sense strand
gaagcgaaugucucucuaa

SEQ ID NO: 1210535 - RNA, 19 nt, Homo sapiens
  misc_RNA (1)...(19): siRNA sense strand
uaagaaggagggaaagaaa

SEQ ID NO: 1210536 - RNA, 19 nt, Homo sapiens
  misc_RNA (1)...(19): siRNA sense strand
ccaccgaguuuaccaaagu

SEQ ID NO: 1210537 - RNA, 19 nt, Homo sapiens
  misc_RNA (1)...(19): siRNA sense strand
gcaagaaacagaggucaga

SEQ ID NO: 1210538 - RNA, 19 nt, Homo sapiens
  misc_RNA (1)...(19): siRNA sense strand
aaacauacucuuuggagaa

SEQ ID NO: 1210539 - RNA, 19 nt, Homo sapiens
  misc_RNA (1)...(19): siRNA sense strand
agugauagcuauucuuugu

SEQ ID NO: 1210540 - RNA, 19 nt, Homo sapiens
  misc_RNA (1)...(19): siRNA sense strand
aaacauaucacacguacau

SEQ ID NO: 1210541 - RNA, 19 nt, Homo sapiens
  misc_RNA (1)...(19): siRNA sense strand
gaacuuuggccuacguuuc

SEQ ID NO: 1210542 - RNA, 19 nt, Homo sapiens
  misc_RNA (1)...(19): siRNA sense strand
gggaauaugugggaaugug

SEQ ID NO: 1210543 - RNA, 19 nt, Homo sapiens
  misc_RNA (1)...(19): siRNA sense strand
gaaaaguaccccaaagaaa

SEQ ID NO: 1210544 - RNA, 19 nt, Homo sapiens
  misc_RNA (1)...(19): siRNA sense strand
acauaucacacguacauua

SEQ ID NO: 1210545 - RNA, 19 nt, Homo sapiens
  misc_RNA (1)...(19): siRNA sense strand
cauaucacacguacauuaa

SEQ ID NO: 1210546 - RNA, 19 nt, Homo sapiens
  misc_RNA (1)...(19): siRNA sense strand
gcacggccauccgguugaa

SEQ ID NO: 1210547 - RNA, 19 nt, Homo sapiens
  misc_RNA (1)...(19): siRNA sense strand
auuagaagauggagagauu

SEQ ID NO: 1210548 - RNA, 19 nt, Homo sapiens
  misc_RNA (1)...(19): siRNA sense strand
gaagauggagagauuugug

SEQ ID NO: 1210549 - RNA, 19 nt, Homo sapiens
  misc_RNA (1)...(19): siRNA sense strand
gacauuauccugccacauc

SEQ ID NO: 1210550 - RNA, 19 nt, Homo sapiens
  misc_RNA (1)...(19): siRNA sense strand
gggcaucauucacgccuau

SEQ ID NO: 1210551 - RNA, 19 nt, Homo sapiens
  misc_RNA (1)...(19): siRNA sense strand
caaagugacagccucaaau

SEQ ID NO: 1210552 - RNA, 19 nt, Homo sapiens
  misc_RNA (1)...(19): siRNA sense strand
gcaaaugccaccuugacau

SEQ ID NO: 1210553 - RNA, 19 nt, Homo sapiens
  misc_RNA (1)...(19): siRNA sense strand
gcgacccugugcaagguua

SEQ ID NO: 1210554 - RNA, 19 nt, Homo sapiens
  misc_RNA (1)...(19): siRNA sense strand
gaggagugcauuaagaaga

SEQ ID NO: 1210555 - RNA, 19 nt, Homo sapiens
  misc_RNA (1)...(19): siRNA sense strand
caaaugccaccuugacaug

SEQ ID NO: 1210556 - RNA, 19 nt, Homo sapiens
  misc_RNA (1)...(19): siRNA sense strand
gcccagaggagcaaaguga

SEQ ID NO: 1210557 - RNA, 19 nt, Homo sapiens
  misc_RNA (1)...(19): siRNA sense strand
cuuagagucuugugaugaa

SEQ ID NO: 1210558 - RNA, 19 nt, Homo sapiens
  misc_RNA (1)...(19): siRNA sense strand
cagcaggcauggaucuuuc

SEQ ID NO: 1210559 - RNA, 19 nt, Homo sapiens
  misc_RNA (1)...(19): siRNA sense strand
ggauaucaguguaugucau

SEQ ID NO: 1210560 - RNA, 19 nt, Homo sapiens
  misc_RNA (1)...(19): siRNA sense strand
ggcagucaauggaacuuug

SEQ ID NO: 1210561 - RNA, 19 nt, Homo sapiens
  misc_RNA (1)...(19): siRNA sense strand
cagaagacccagauacugu

SEQ ID NO: 1210562 - RNA, 19 nt, Homo sapiens
  misc_RNA (1)...(19): siRNA sense strand
ugauugccauguuuaaugu

SEQ ID NO: 1210563 - RNA, 19 nt, Homo sapiens
  misc_RNA (1)...(19): siRNA sense strand
caaaagauuucgaguccuu

SEQ ID NO: 1210564 - RNA, 19 nt, Homo sapiens
  misc_RNA (1)...(19): siRNA sense strand
caggaaaugagaaagauga

SEQ ID NO: 1210565 - RNA, 19 nt, Homo sapiens
  misc_RNA (1)...(19): siRNA sense strand
gaggauugcaguucaagga

SEQ ID NO: 1210566 - RNA, 19 nt, Homo sapiens
  misc_RNA (1)...(19): siRNA sense strand
ccaaagguaucagcacaca

SEQ ID NO: 1210567 - RNA, 19 nt, Homo sapiens
  misc_RNA (1)...(19): siRNA sense strand
uuacaucacccaaccagaa

SEQ ID NO: 1210568 - RNA, 19 nt, Homo sapiens
  misc_RNA (1)...(19): siRNA sense strand
caagcgaguucagacaaug

SEQ ID NO: 1210569 - RNA, 19 nt, Homo sapiens
  misc_RNA (1)...(19): siRNA sense strand
ggacugugcauagcccuuu

SEQ ID NO: 1210570 - RNA, 19 nt, Homo sapiens
  misc_RNA (1)...(19): siRNA sense strand
caccaaaggcuucgucuuc

SEQ ID NO: 1210571 - RNA, 19 nt, Homo sapiens
  misc_RNA (1)...(19): siRNA sense strand
guaccuccuuucucucuuc

SEQ ID NO: 1210572 - RNA, 19 nt, Homo sapiens
  misc_RNA (1)...(19): siRNA sense strand
ggaaagaaaauuacuggaa

SEQ ID NO: 1210573 - RNA, 19 nt, Homo sapiens
  misc_RNA (1)...(19): siRNA sense strand
gcgaggugcucaauauacu

SEQ ID NO: 1210574 - RNA, 19 nt, Homo sapiens
  misc_RNA (1)...(19): siRNA sense strand
uaccaacacuauccaagau

SEQ ID NO: 1210575 - RNA, 19 nt, Homo sapiens
  misc_RNA (1)...(19): siRNA sense strand
ccuuugggaugaagaggua

SEQ ID NO: 1210576 - RNA, 19 nt, Homo sapiens
  misc_RNA (1)...(19): siRNA sense strand
uaagcuuuguggugagaaa

SEQ ID NO: 1210577 - RNA, 19 nt, Homo sapiens
  misc_RNA (1)...(19): siRNA sense strand
ucagaggcauacagugaga

SEQ ID NO: 1210578 - RNA, 19 nt, Homo sapiens
  misc_RNA (1)...(19): siRNA sense strand
ggaaaaguaccccaaagaa

SEQ ID NO: 1210579 - RNA, 19 nt, Homo sapiens
  misc_RNA (1)...(19): siRNA sense strand
gaagccagcaggaaaagua

SEQ ID NO: 1210580 - RNA, 19 nt, Homo sapiens
  misc_RNA (1)...(19): siRNA sense strand
ccagauacugucuugcuuu

SEQ ID NO: 1210581 - RNA, 19 nt, Homo sapiens
  misc_RNA (1)...(19): siRNA sense strand
gauagcuauucuuuguuug

SEQ ID NO: 1210582 - RNA, 19 nt, Homo sapiens
  misc_RNA (1)...(19): siRNA sense strand
cugaacaccuuuacaaugc

SEQ ID NO: 1210583 - RNA, 19 nt, Homo sapiens
  misc_RNA (1)...(19): siRNA sense strand
gccaacauccugugcauca

SEQ ID NO: 1210584 - RNA, 19 nt, Homo sapiens
  misc_RNA (1)...(19): siRNA sense strand
gagagagggcgcuaugcaa

SEQ ID NO: 1210585 - RNA, 19 nt, Homo sapiens
  misc_RNA (1)...(19): siRNA sense strand
ggagagagggcgcuaugca

SEQ ID NO: 1210586 - RNA, 19 nt, Homo sapiens
  misc_RNA (1)...(19): siRNA sense strand
gaacccacaaggaguuaau

SEQ ID NO: 1210587 - RNA, 19 nt, Homo sapiens
  misc_RNA (1)...(19): siRNA sense strand
cagcuacaguucuuagagu

SEQ ID NO: 1210588 - RNA, 19 nt, Homo sapiens
  misc_RNA (1)...(19): siRNA sense strand
ggacaucguggccaacauc

SEQ ID NO: 1210589 - RNA, 19 nt, Homo sapiens
  misc_RNA (1)...(19): siRNA sense strand
ugaagcgaaugucucucua

SEQ ID NO: 1210590 - RNA, 19 nt, Homo sapiens
  misc_RNA (1)...(19): siRNA sense strand
agaaauugcagaaccagaa

SEQ ID NO: 1210591 - RNA, 19 nt, Homo sapiens
  misc_RNA (1)...(19): siRNA sense strand
uccaggagcucaagaaggu

SEQ ID NO: 1210592 - RNA, 19 nt, Homo sapiens
  misc_RNA (1)...(19): siRNA sense strand
gauggagagauuugugaaa

SEQ ID NO: 1210593 - RNA, 19 nt, Homo sapiens
  misc_RNA (1)...(19): siRNA sense strand
ggaagaucuugggaauaug

SEQ ID NO: 1210594 - RNA, 19 nt, Homo sapiens
  misc_RNA (1)...(19): siRNA sense strand
uuccgaaggucagcaauuu

SEQ ID NO: 1210595 - RNA, 19 nt, Homo sapiens
  misc_RNA (1)...(19): siRNA sense strand
gaggagagagggcgcuaug

SEQ ID NO: 1210596 - RNA, 19 nt, Homo sapiens
  misc_RNA (1)...(19): siRNA sense strand
gugauugccauguuuaaug

SEQ ID NO: 1210597 - RNA, 19 nt, Homo sapiens
  misc_RNA (1)...(19): siRNA sense strand
gacaaugaaugaguuucug

SEQ ID NO: 1210598 - RNA, 19 nt, Homo sapiens
  misc_RNA (1)...(19): siRNA sense strand
gcaaggguggguccugaga

SEQ ID NO: 1210599 - RNA, 19 nt, Homo sapiens
  misc_RNA (1)...(19): siRNA sense strand
aaaguaugaucaccaaagg

SEQ ID NO: 1210600 - RNA, 19 nt, Homo sapiens
  misc_RNA (1)...(19): siRNA sense strand
aacauacucuuuggagaaa

SEQ ID NO: 1210601 - RNA, 19 nt, Homo sapiens
  misc_RNA (1)...(19): siRNA sense strand
gacaagcgaguucagacaa

SEQ ID NO: 1210602 - RNA, 19 nt, Homo sapiens
  misc_RNA (1)...(19): siRNA sense strand
aguaugaucaccaaaggua

SEQ ID NO: 1210603 - RNA, 19 nt, Homo sapiens
  misc_RNA (1)...(19): siRNA sense strand
gagaaaacauacucuuugg

SEQ ID NO: 1210604 - RNA, 19 nt, Homo sapiens
  misc_RNA (1)...(19): siRNA sense strand
ccuugcagcucuccuagga

SEQ ID NO: 1210605 - RNA, 19 nt, Homo sapiens
  misc_RNA (1)...(19): siRNA sense strand
cauaagcuuuguggugaga

SEQ ID NO: 1210606 - RNA, 19 nt, Homo sapiens
  misc_RNA (1)...(19): siRNA sense strand
agagagggcgcuaugcaaa

SEQ ID NO: 1210607 - RNA, 19 nt, Homo sapiens
  misc_RNA (1)...(19): siRNA sense strand
gaaagaugaaggaaaagaa

SEQ ID NO: 1210608 - RNA, 19 nt, Homo sapiens
  misc_RNA (1)...(19): siRNA sense strand
gaaacaggcucagaauuug

SEQ ID NO: 1210609 - RNA, 19 nt, Homo sapiens
  misc_RNA (1)...(19): siRNA sense strand
gacaagggcucacggauga

SEQ ID NO: 1210610 - RNA, 19 nt, Homo sapiens
  misc_RNA (1)...(19): siRNA sense strand
gggaagaucuugggaauau

SEQ ID NO: 1210611 - RNA, 19 nt, Homo sapiens
  misc_RNA (1)...(19): siRNA sense strand
ggagagcccugcugagaga

SEQ ID NO: 1210612 - RNA, 19 nt, Homo sapiens
  misc_RNA (1)...(19): siRNA sense strand
ucaagaagguggagaaugu

SEQ ID NO: 1210613 - RNA, 19 nt, Homo sapiens
  misc_RNA (1)...(19): siRNA sense strand
gcgaaugucucucuaagga

SEQ ID NO: 1210614 - RNA, 19 nt, Homo sapiens
  misc_RNA (1)...(19): siRNA sense strand
ugaaacaggcucagaauuu

SEQ ID NO: 1210615 - RNA, 19 nt, Homo sapiens
  misc_RNA (1)...(19): siRNA sense strand
guuugaagcugccuuguuu

SEQ ID NO: 1210616 - RNA, 19 nt, Homo sapiens
  misc_RNA (1)...(19): siRNA sense strand
gggcagaggcagaggauua

SEQ ID NO: 1210617 - RNA, 19 nt, Homo sapiens
  misc_RNA (1)...(19): siRNA sense strand
ucaauauacugucaaguga

SEQ ID NO: 1210618 - RNA, 19 nt, Homo sapiens
  misc_RNA (1)...(19): siRNA sense strand
gacccuaccuuaucucaga

SEQ ID NO: 1210619 - RNA, 19 nt, Homo sapiens
  misc_RNA (1)...(19): siRNA sense strand
caagugauagcuauucuuu

SEQ ID NO: 1210620 - RNA, 19 nt, Homo sapiens
  misc_RNA (1)...(19): siRNA sense strand
ggcaaaggcugaccguaga

SEQ ID NO: 1210621 - RNA, 19 nt, Homo sapiens
  misc_RNA (1)...(19): siRNA sense strand
gauauaagaaggagggaaa

SEQ ID NO: 1210622 - RNA, 19 nt, Homo sapiens
  misc_RNA (1)...(19): siRNA sense strand
gugaaaggcuaccggcaaa

SEQ ID NO: 1210623 - RNA, 19 nt, Homo sapiens
  misc_RNA (1)...(19): siRNA sense strand
caaagaaauugcagaacca

SEQ ID NO: 1210624 - RNA, 19 nt, Homo sapiens
  misc_RNA (1)...(19): siRNA sense strand
gcaacaggaccauguguga

SEQ ID NO: 1210625 - RNA, 19 nt, Homo sapiens
  misc_RNA (1)...(19): siRNA sense strand
ggucagaggcauacaguga

SEQ ID NO: 1210626 - RNA, 19 nt, Homo sapiens
  misc_RNA (1)...(19): siRNA sense strand
gaaauugcagaaccagaaa

SEQ ID NO: 1210627 - RNA, 19 nt, Homo sapiens
  misc_RNA (1)...(19): siRNA sense strand
gcaaagugacagccucaaa

SEQ ID NO: 1210628 - RNA, 19 nt, Homo sapiens
  misc_RNA (1)...(19): siRNA sense strand
ugagaaagaugaaggaaaa

SEQ ID NO: 1210629 - RNA, 19 nt, Homo sapiens
  misc_RNA (1)...(19): siRNA sense strand
ugacucaucugacaccaau

SEQ ID NO: 1210630 - RNA, 19 nt, Homo sapiens
  misc_RNA (1)...(19): siRNA sense strand
gcggagauccuuugcagaa

SEQ ID NO: 1210631 - RNA, 19 nt, Homo sapiens
  misc_RNA (1)...(19): siRNA sense strand
gaaagucuggguuggcauu

SEQ ID NO: 1210632 - RNA, 19 nt, Homo sapiens
  misc_RNA (1)...(19): siRNA sense strand
gaagaucuugggaauaugu

SEQ ID NO: 1210633 - RNA, 19 nt, Homo sapiens
  misc_RNA (1)...(19): siRNA sense strand
gcaugaagccagcaggaaa

SEQ ID NO: 1210634 - RNA, 19 nt, Homo sapiens
  misc_RNA (1)...(19): siRNA sense strand
gaagcgaaugucucucuaa

SEQ ID NO: 1210635 - RNA, 19 nt, Homo sapiens
  misc_RNA (1)...(19): siRNA sense strand
uaagaaggagggaaagaaa

SEQ ID NO: 1210636 - RNA, 19 nt, Homo sapiens
  misc_RNA (1)...(19): siRNA sense strand
ccaccgaguuuaccaaagu

SEQ ID NO: 1210637 - RNA, 19 nt, Homo sapiens
  misc_RNA (1)...(19): siRNA sense strand
gcaagaaacagaggucaga

SEQ ID NO: 1210638 - RNA, 19 nt, Homo sapiens
  misc_RNA (1)...(19): siRNA sense strand
aaacauacucuuuggagaa

SEQ ID NO: 1210639 - RNA, 19 nt, Homo sapiens
  misc_RNA (1)...(19): siRNA sense strand
agugauagcuauucuuugu

SEQ ID NO: 1210640 - RNA, 19 nt, Homo sapiens
  misc_RNA (1)...(19): siRNA sense strand
aaacauaucacacguacau

SEQ ID NO: 1210641 - RNA, 19 nt, Homo sapiens
  misc_RNA (1)...(19): siRNA sense strand
gaacuuuggccuacguuuc

SEQ ID NO: 1210642 - RNA, 19 nt, Homo sapiens
  misc_RNA (1)...(19): siRNA sense strand
gggaauaugugggaaugug

SEQ ID NO: 1210643 - RNA, 19 nt, Homo sapiens
  misc_RNA (1)...(19): siRNA sense strand
gaaaaguaccccaaagaaa

SEQ ID NO: 1210644 - RNA, 19 nt, Homo sapiens
  misc_RNA (1)...(19): siRNA sense strand
acauaucacacguacauua

SEQ ID NO: 1210645 - RNA, 19 nt, Homo sapiens
  misc_RNA (1)...(19): siRNA sense strand
cauaucacacguacauuaa

SEQ ID NO: 1210646 - RNA, 19 nt, Homo sapiens
  misc_RNA (1)...(19): siRNA sense strand
gcacggccauccgguugaa

SEQ ID NO: 1210647 - RNA, 19 nt, Homo sapiens
  misc_RNA (1)...(19): siRNA sense strand
auuagaagauggagagauu

SEQ ID NO: 1210648 - RNA, 19 nt, Homo sapiens
  misc_RNA (1)...(19): siRNA sense strand
gaagauggagagauuugug

SEQ ID NO: 1210649 - RNA, 19 nt, Homo sapiens
  misc_RNA (1)...(19): siRNA sense strand
gacauuauccugccacauc

SEQ ID NO: 1210650 - RNA, 19 nt, Homo sapiens
  misc_RNA (1)...(19): siRNA sense strand
gggcaucauucacgccuau

SEQ ID NO: 1210651 - RNA, 19 nt, Homo sapiens
  misc_RNA (1)...(19): siRNA sense strand
caaagugacagccucaaau

SEQ ID NO: 1210652 - RNA, 19 nt, Homo sapiens
  misc_RNA (1)...(19): siRNA sense strand
gcaaaugccaccuugacau

SEQ ID NO: 1210653 - RNA, 19 nt, Homo sapiens
  misc_RNA (1)...(19): siRNA sense strand
gcgacccugugcaagguua

SEQ ID NO: 1210654 - RNA, 19 nt, Homo sapiens
  misc_RNA (1)...(19): siRNA sense strand
gaggagugcauuaagaaga

SEQ ID NO: 1210655 - RNA, 19 nt, Homo sapiens
  misc_RNA (1)...(19): siRNA sense strand
caaaugccaccuugacaug

SEQ ID NO: 1210656 - RNA, 19 nt, Homo sapiens
  misc_RNA (1)...(19): siRNA sense strand
gcccagaggagcaaaguga

SEQ ID NO: 1210657 - RNA, 19 nt, Homo sapiens
  misc_RNA (1)...(19): siRNA sense strand
cuuagagucuugugaugaa

SEQ ID NO: 1210658 - RNA, 19 nt, Homo sapiens
  misc_RNA (1)...(19): siRNA sense strand
cagcaggcauggaucuuuc

SEQ ID NO: 1210659 - RNA, 19 nt, Homo sapiens
  misc_RNA (1)...(19): siRNA sense strand
ggauaucaguguaugucau

SEQ ID NO: 1210660 - RNA, 19 nt, Homo sapiens
  misc_RNA (1)...(19): siRNA sense strand
ggcagucaauggaacuuug

SEQ ID NO: 1210661 - RNA, 19 nt, Homo sapiens
  misc_RNA (1)...(19): siRNA sense strand
cagaagacccagauacugu

SEQ ID NO: 1210662 - RNA, 19 nt, Homo sapiens
  misc_RNA (1)...(19): siRNA sense strand
ugauugccauguuuaaugu

SEQ ID NO: 1210663 - RNA, 19 nt, Homo sapiens
  misc_RNA (1)...(19): siRNA sense strand
caaaagauuucgaguccuu

SEQ ID NO: 1210664 - RNA, 19 nt, Homo sapiens
  misc_RNA (1)...(19): siRNA sense strand
caggaaaugagaaagauga

SEQ ID NO: 1210665 - RNA, 19 nt, Homo sapiens
  misc_RNA (1)...(19): siRNA sense strand
gaggauugcaguucaagga

SEQ ID NO: 1210666 - RNA, 19 nt, Homo sapiens
  misc_RNA (1)...(19): siRNA sense strand
ccaaagguaucagcacaca

SEQ ID NO: 1210667 - RNA, 19 nt, Homo sapiens
  misc_RNA (1)...(19): siRNA sense strand
uuacaucacccaaccagaa

SEQ ID NO: 1210668 - RNA, 19 nt, Homo sapiens
  misc_RNA (1)...(19): siRNA sense strand
caagcgaguucagacaaug

SEQ ID NO: 1210669 - RNA, 19 nt, Homo sapiens
  misc_RNA (1)...(19): siRNA sense strand
ggacugugcauagcccuuu

SEQ ID NO: 1210670 - RNA, 19 nt, Homo sapiens
  misc_RNA (1)...(19): siRNA sense strand
caccaaaggcuucgucuuc

SEQ ID NO: 1210671 - RNA, 19 nt, Homo sapiens
  misc_RNA (1)...(19): siRNA sense strand
guaccuccuuucucucuuc

SEQ ID NO: 1210672 - RNA, 19 nt, Homo sapiens
  misc_RNA (1)...(19): siRNA sense strand
ggaaagaaaauuacuggaa

SEQ ID NO: 1210673 - RNA, 19 nt, Homo sapiens
  misc_RNA (1)...(19): siRNA sense strand
gcgaggugcucaauauacu

SEQ ID NO: 1210674 - RNA, 19 nt, Homo sapiens
  misc_RNA (1)...(19): siRNA sense strand
uaccaacacuauccaagau

SEQ ID NO: 1210675 - RNA, 19 nt, Homo sapiens
  misc_RNA (1)...(19): siRNA sense strand
ccuuugggaugaagaggua

SEQ ID NO: 1210676 - RNA, 19 nt, Homo sapiens
  misc_RNA (1)...(19): siRNA sense strand
uaagcuuuguggugagaaa

SEQ ID NO: 1210677 - RNA, 19 nt, Homo sapiens
  misc_RNA (1)...(19): siRNA sense strand
ucagaggcauacagugaga

SEQ ID NO: 1210678 - RNA, 19 nt, Homo sapiens
  misc_RNA (1)...(19): siRNA sense strand
ggaaaaguaccccaaagaa

SEQ ID NO: 1210679 - RNA, 19 nt, Homo sapiens
  misc_RNA (1)...(19): siRNA sense strand
gaagccagcaggaaaagua

SEQ ID NO: 1210680 - RNA, 19 nt, Homo sapiens
  misc_RNA (1)...(19): siRNA sense strand
ccagauacugucuugcuuu

SEQ ID NO: 1210681 - RNA, 19 nt, Homo sapiens
  misc_RNA (1)...(19): siRNA sense strand
gauagcuauucuuuguuug

SEQ ID NO: 1210682 - RNA, 19 nt, Homo sapiens
  misc_RNA (1)...(19): siRNA sense strand
cugaacaccuuuacaaugc

SEQ ID NO: 1210683 - RNA, 19 nt, Homo sapiens
  misc_RNA (1)...(19): siRNA sense strand
gccaacauccugugcauca

SEQ ID NO: 1210684 - RNA, 19 nt, Homo sapiens
  misc_RNA (1)...(19): siRNA sense strand
gagagagggcgcuaugcaa

SEQ ID NO: 1210685 - RNA, 19 nt, Homo sapiens
  misc_RNA (1)...(19): siRNA sense strand
ggagagagggcgcuaugca

SEQ ID NO: 1210686 - RNA, 19 nt, Homo sapiens
  misc_RNA (1)...(19): siRNA sense strand
gaacccacaaggaguuaau

SEQ ID NO: 1210687 - RNA, 19 nt, Homo sapiens
  misc_RNA (1)...(19): siRNA sense strand
cagcuacaguucuuagagu

SEQ ID NO: 1210688 - RNA, 19 nt, Homo sapiens
  misc_RNA (1)...(19): siRNA sense strand
ggacaucguggccaacauc

SEQ ID NO: 1210689 - RNA, 19 nt, Homo sapiens
  misc_RNA (1)...(19): siRNA sense strand
ugaagcgaaugucucucua

SEQ ID NO: 1210690 - RNA, 19 nt, Homo sapiens
  misc_RNA (1)...(19): siRNA sense strand
agaaauugcagaaccagaa

SEQ ID NO: 1210691 - RNA, 19 nt, Homo sapiens
  misc_RNA (1)...(19): siRNA sense strand
uccaggagcucaagaaggu

SEQ ID NO: 1210692 - RNA, 19 nt, Homo sapiens
  misc_RNA (1)...(19): siRNA sense strand
gauggagagauuugugaaa

SEQ ID NO: 1210693 - RNA, 19 nt, Homo sapiens
  misc_RNA (1)...(19): siRNA sense strand
ggaagaucuugggaauaug

SEQ ID NO: 1210694 - RNA, 19 nt, Homo sapiens
  misc_RNA (1)...(19): siRNA sense strand
uuccgaaggucagcaauuu

SEQ ID NO: 1210695 - RNA, 19 nt, Homo sapiens
  misc_RNA (1)...(19): siRNA sense strand
gaggagagagggcgcuaug

SEQ ID NO: 1210696 - RNA, 19 nt, Homo sapiens
  misc_RNA (1)...(19): siRNA sense strand
gugauugccauguuuaaug

SEQ ID NO: 1210697 - RNA, 19 nt, Homo sapiens
  misc_RNA (1)...(19): siRNA sense strand
gacaaugaaugaguuucug

SEQ ID NO: 1210698 - RNA, 19 nt, Homo sapiens
  misc_RNA (1)...(19): siRNA sense strand
gcaaggguggguccugaga

SEQ ID NO: 1210699 - RNA, 19 nt, Homo sapiens
  misc_RNA (1)...(19): siRNA sense strand
aaaguaugaucaccaaagg

SEQ ID NO: 1210700 - RNA, 19 nt, Homo sapiens
  misc_RNA (1)...(19): siRNA sense strand
aacauacucuuuggagaaa

SEQ ID NO: 1210701 - RNA, 19 nt, Homo sapiens
  misc_RNA (1)...(19): siRNA sense strand
gacaagcgaguucagacaa

SEQ ID NO: 1210702 - RNA, 19 nt, Homo sapiens
  misc_RNA (1)...(19): siRNA sense strand
aguaugaucaccaaaggua

SEQ ID NO: 1210703 - RNA, 19 nt, Homo sapiens
  misc_RNA (1)...(19): siRNA sense strand
gagaaaacauacucuuugg

SEQ ID NO: 1210704 - RNA, 19 nt, Homo sapiens
  misc_RNA (1)...(19): siRNA sense strand
ccuugcagcucuccuagga

SEQ ID NO: 1210705 - RNA, 19 nt, Homo sapiens
  misc_RNA (1)...(19): siRNA sense strand
cauaagcuuuguggugaga

SEQ ID NO: 1210706 - RNA, 19 nt, Homo sapiens
  misc_RNA (1)...(19): siRNA sense strand
agagagggcgcuaugcaaa

SEQ ID NO: 1210707 - RNA, 19 nt, Homo sapiens
  misc_RNA (1)...(19): siRNA sense strand
gaaagaugaaggaaaagaa

SEQ ID NO: 1210708 - RNA, 19 nt, Homo sapiens
  misc_RNA (1)...(19): siRNA sense strand
gcaaaucaaugaagaugag

SEQ ID NO: 1210709 - RNA, 19 nt, Homo sapiens
  misc_RNA (1)...(19): siRNA sense strand
gcaggcaaaucaaugaaga

SEQ ID NO: 1210710 - RNA, 19 nt, Homo sapiens
  misc_RNA (1)...(19): siRNA sense strand
caaugaagaugagccguaa

SEQ ID NO: 1210711 - RNA, 19 nt, Homo sapiens
  misc_RNA (1)...(19): siRNA sense strand
aagaagcgcaggcaaauca

SEQ ID NO: 1210712 - RNA, 19 nt, Homo sapiens
  misc_RNA (1)...(19): siRNA sense strand
aauaagaagcgcaggcaaa

SEQ ID NO: 1210713 - RNA, 19 nt, Homo sapiens
  misc_RNA (1)...(19): siRNA sense strand
uaugagaccguucgcaaug

SEQ ID NO: 1210714 - RNA, 19 nt, Homo sapiens
  misc_RNA (1)...(19): siRNA sense strand
guucuacuaugacuaugag

SEQ ID NO: 1210715 - RNA, 19 nt, Homo sapiens
  misc_RNA (1)...(19): siRNA sense strand
gaagcgcaggcaaaucaau

SEQ ID NO: 1210716 - RNA, 19 nt, Homo sapiens
  misc_RNA (1)...(19): siRNA sense strand
ggacguggacccguucuac

SEQ ID NO: 1210717 - RNA, 19 nt, Homo sapiens
  misc_RNA (1)...(19): siRNA sense strand
uggacccguucuacuauga

SEQ ID NO: 1210718 - RNA, 19 nt, Homo sapiens
  misc_RNA (1)...(19): siRNA sense strand
ggcaaaucaaugaagauga

SEQ ID NO: 1210719 - RNA, 19 nt, Homo sapiens
  misc_RNA (1)...(19): siRNA sense strand
gcgcaggcaaaucaaugaa

SEQ ID NO: 1210720 - RNA, 19 nt, Homo sapiens
  misc_RNA (1)...(19): siRNA sense strand
guggacccguucuacuaug

SEQ ID NO: 1210721 - RNA, 19 nt, Homo sapiens
  misc_RNA (1)...(19): siRNA sense strand
auaagaagcgcaggcaaau

SEQ ID NO: 1210722 - RNA, 19 nt, Homo sapiens
  misc_RNA (1)...(19): siRNA sense strand
gcaaaucaaugaagaugag

SEQ ID NO: 1210723 - RNA, 19 nt, Homo sapiens
  misc_RNA (1)...(19): siRNA sense strand
gcaggcaaaucaaugaaga

SEQ ID NO: 1210724 - RNA, 19 nt, Homo sapiens
  misc_RNA (1)...(19): siRNA sense strand
caaugaagaugagccguaa

SEQ ID NO: 1210725 - RNA, 19 nt, Homo sapiens
  misc_RNA (1)...(19): siRNA sense strand
aagaagcgcaggcaaauca

SEQ ID NO: 1210726 - RNA, 19 nt, Homo sapiens
  misc_RNA (1)...(19): siRNA sense strand
aauaagaagcgcaggcaaa

SEQ ID NO: 1210727 - RNA, 19 nt, Homo sapiens
  misc_RNA (1)...(19): siRNA sense strand
uaugagaccguucgcaaug

SEQ ID NO: 1210728 - RNA, 19 nt, Homo sapiens
  misc_RNA (1)...(19): siRNA sense strand
guucuacuaugacuaugag

SEQ ID NO: 1210729 - RNA, 19 nt, Homo sapiens
  misc_RNA (1)...(19): siRNA sense strand
gaagcgcaggcaaaucaau

SEQ ID NO: 1210730 - RNA, 19 nt, Homo sapiens
  misc_RNA (1)...(19): siRNA sense strand
ggacguggacccguucuac

SEQ ID NO: 1210731 - RNA, 19 nt, Homo sapiens
  misc_RNA (1)...(19): siRNA sense strand
uggacccguucuacuauga

SEQ ID NO: 1210732 - RNA, 19 nt, Homo sapiens
  misc_RNA (1)...(19): siRNA sense strand
ggcaaaucaaugaagauga

SEQ ID NO: 1210733 - RNA, 19 nt, Homo sapiens
  misc_RNA (1)...(19): siRNA sense strand
gcgcaggcaaaucaaugaa

SEQ ID NO: 1210734 - RNA, 19 nt, Homo sapiens
  misc_RNA (1)...(19): siRNA sense strand
guggacccguucuacuaug

SEQ ID NO: 1210735 - RNA, 19 nt, Homo sapiens
  misc_RNA (1)...(19): siRNA sense strand
auaagaagcgcaggcaaau

SEQ ID NO: 1210736 - RNA, 19 nt, Homo sapiens
  misc_RNA (1)...(19): siRNA sense strand
ggaaaugcuugacaucaug

SEQ ID NO: 1210737 - RNA, 19 nt, Homo sapiens
  misc_RNA (1)...(19): siRNA sense strand
cagcguggacgaugaauuu

SEQ ID NO: 1210738 - RNA, 19 nt, Homo sapiens
  misc_RNA (1)...(19): siRNA sense strand
gaagauggacagaaacaag

SEQ ID NO: 1210739 - RNA, 19 nt, Homo sapiens
  misc_RNA (1)...(19): siRNA sense strand
caugauggcucggucaguu

SEQ ID NO: 1210740 - RNA, 19 nt, Homo sapiens
  misc_RNA (1)...(19): siRNA sense strand
gggaacacguggagagcuu

SEQ ID NO: 1210741 - RNA, 19 nt, Homo sapiens
  misc_RNA (1)...(19): siRNA sense strand
gaaaugcuugacaucauga

SEQ ID NO: 1210742 - RNA, 19 nt, Homo sapiens
  misc_RNA (1)...(19): siRNA sense strand
ggaauucauugagucuugu

SEQ ID NO: 1210743 - RNA, 19 nt, Homo sapiens
  misc_RNA (1)...(19): siRNA sense strand
cguggacgaugaauuugaa

SEQ ID NO: 1210744 - RNA, 19 nt, Homo sapiens
  misc_RNA (1)...(19): siRNA sense strand
gaccauugaggaauucauu

SEQ ID NO: 1210745 - RNA, 19 nt, Homo sapiens
  misc_RNA (1)...(19): siRNA sense strand
gaaugucccagcggaauug

SEQ ID NO: 1210746 - RNA, 19 nt, Homo sapiens
  misc_RNA (1)...(19): siRNA sense strand
gaggaaaugcuugacauca

SEQ ID NO: 1210747 - RNA, 19 nt, Homo sapiens
  misc_RNA (1)...(19): siRNA sense strand
gauuuacucccaguucuuu

SEQ ID NO: 1210748 - RNA, 19 nt, Homo sapiens
  misc_RNA (1)...(19): siRNA sense strand
gcagauuuacucccaguuc

SEQ ID NO: 1210749 - RNA, 19 nt, Homo sapiens
  misc_RNA (1)...(19): siRNA sense strand
ucaaugaggagaacuucaa

SEQ ID NO: 1210750 - RNA, 19 nt, Homo sapiens
  misc_RNA (1)...(19): siRNA sense strand
gagaacuucaagcagauuu

SEQ ID NO: 1210751 - RNA, 19 nt, Homo sapiens
  misc_RNA (1)...(19): siRNA sense strand
ugaaguccaucuaugacau

SEQ ID NO: 1210752 - RNA, 19 nt, Homo sapiens
  misc_RNA (1)...(19): siRNA sense strand
caucaugaaguccaucuau

SEQ ID NO: 1210753 - RNA, 19 nt, Homo sapiens
  misc_RNA (1)...(19): siRNA sense strand
gaaguccaucuaugacaug

SEQ ID NO: 1210754 - RNA, 19 nt, Homo sapiens
  misc_RNA (1)...(19): siRNA sense strand
aggaauucauugagucuug

SEQ ID NO: 1210755 - RNA, 19 nt, Homo sapiens
  misc_RNA (1)...(19): siRNA sense strand
gaacuucaagcagauuuac

SEQ ID NO: 1210756 - RNA, 19 nt, Homo sapiens
  misc_RNA (1)...(19): siRNA sense strand
ccauugaggaauucauuga

SEQ ID NO: 1210757 - RNA, 19 nt, Homo sapiens
  misc_RNA (1)...(19): siRNA sense strand
gcaggagcaaaccaaauuc

SEQ ID NO: 1210758 - RNA, 19 nt, Homo sapiens
  misc_RNA (1)...(19): siRNA sense strand
cagauuuacucccaguucu

SEQ ID NO: 1210759 - RNA, 19 nt, Homo sapiens
  misc_RNA (1)...(19): siRNA sense strand
ggacagaaacaaggauggu

SEQ ID NO: 1210760 - RNA, 19 nt, Homo sapiens
  misc_RNA (1)...(19): siRNA sense strand
aggaaaugcuugacaucau

SEQ ID NO: 1210761 - RNA, 19 nt, Homo sapiens
  misc_RNA (1)...(19): siRNA sense strand
ggagaacuucaagcagauu

SEQ ID NO: 1210762 - RNA, 19 nt, Homo sapiens
  misc_RNA (1)...(19): siRNA sense strand
ugaauuguccaccgugugu

SEQ ID NO: 1210763 - RNA, 19 nt, Homo sapiens
  misc_RNA (1)...(19): siRNA sense strand
cagaagauggacagaaaca

SEQ ID NO: 1210764 - RNA, 19 nt, Homo sapiens
  misc_RNA (1)...(19): siRNA sense strand
ugcaggagcaaaccaaauu

SEQ ID NO: 1210765 - RNA, 19 nt, Homo sapiens
  misc_RNA (1)...(19): siRNA sense strand
ggugaccauugaggaauuc

SEQ ID NO: 1210766 - RNA, 19 nt, Homo sapiens
  misc_RNA (1)...(19): siRNA sense strand
agaacuucaagcagauuua

SEQ ID NO: 1210767 - RNA, 19 nt, Homo sapiens
  misc_RNA (1)...(19): siRNA sense strand
gcguggacgaugaauuuga

SEQ ID NO: 1210768 - RNA, 19 nt, Homo sapiens
  misc_RNA (1)...(19): siRNA sense strand
gagcagcugcaggagcaaa

SEQ ID NO: 1210769 - RNA, 19 nt, Homo sapiens
  misc_RNA (1)...(19): siRNA sense strand
cagcaccuaugccacuuuu

SEQ ID NO: 1210770 - RNA, 19 nt, Homo sapiens
  misc_RNA (1)...(19): siRNA sense strand
ggaaaugcuugacaucaug

SEQ ID NO: 1210771 - RNA, 19 nt, Homo sapiens
  misc_RNA (1)...(19): siRNA sense strand
cagcguggacgaugaauuu

SEQ ID NO: 1210772 - RNA, 19 nt, Homo sapiens
  misc_RNA (1)...(19): siRNA sense strand
gaagauggacagaaacaag

SEQ ID NO: 1210773 - RNA, 19 nt, Homo sapiens
  misc_RNA (1)...(19): siRNA sense strand
caugauggcucggucaguu

SEQ ID NO: 1210774 - RNA, 19 nt, Homo sapiens
  misc_RNA (1)...(19): siRNA sense strand
gggaacacguggagagcuu

SEQ ID NO: 1210775 - RNA, 19 nt, Homo sapiens
  misc_RNA (1)...(19): siRNA sense strand
gaaaugcuugacaucauga

SEQ ID NO: 1210776 - RNA, 19 nt, Homo sapiens
  misc_RNA (1)...(19): siRNA sense strand
ggaauucauugagucuugu

SEQ ID NO: 1210777 - RNA, 19 nt, Homo sapiens
  misc_RNA (1)...(19): siRNA sense strand
cguggacgaugaauuugaa

SEQ ID NO: 1210778 - RNA, 19 nt, Homo sapiens
  misc_RNA (1)...(19): siRNA sense strand
gaccauugaggaauucauu

SEQ ID NO: 1210779 - RNA, 19 nt, Homo sapiens
  misc_RNA (1)...(19): siRNA sense strand
gaaugucccagcggaauug

SEQ ID NO: 1210780 - RNA, 19 nt, Homo sapiens
  misc_RNA (1)...(19): siRNA sense strand
gaggaaaugcuugacauca

SEQ ID NO: 1210781 - RNA, 19 nt, Homo sapiens
  misc_RNA (1)...(19): siRNA sense strand
gauuuacucccaguucuuu

SEQ ID NO: 1210782 - RNA, 19 nt, Homo sapiens
  misc_RNA (1)...(19): siRNA sense strand
gcagauuuacucccaguuc

SEQ ID NO: 1210783 - RNA, 19 nt, Homo sapiens
  misc_RNA (1)...(19): siRNA sense strand
ucaaugaggagaacuucaa

SEQ ID NO: 1210784 - RNA, 19 nt, Homo sapiens
  misc_RNA (1)...(19): siRNA sense strand
gagaacuucaagcagauuu

SEQ ID NO: 1210785 - RNA, 19 nt, Homo sapiens
  misc_RNA (1)...(19): siRNA sense strand
ugaaguccaucuaugacau

SEQ ID NO: 1210786 - RNA, 19 nt, Homo sapiens
  misc_RNA (1)...(19): siRNA sense strand
caucaugaaguccaucuau

SEQ ID NO: 1210787 - RNA, 19 nt, Homo sapiens
  misc_RNA (1)...(19): siRNA sense strand
gaaguccaucuaugacaug

SEQ ID NO: 1210788 - RNA, 19 nt, Homo sapiens
  misc_RNA (1)...(19): siRNA sense strand
aggaauucauugagucuug

SEQ ID NO: 1210789 - RNA, 19 nt, Homo sapiens
  misc_RNA (1)...(19): siRNA sense strand
gaacuucaagcagauuuac

SEQ ID NO: 1210790 - RNA, 19 nt, Homo sapiens
  misc_RNA (1)...(19): siRNA sense strand
ccauugaggaauucauuga

SEQ ID NO: 1210791 - RNA, 19 nt, Homo sapiens
  misc_RNA (1)...(19): siRNA sense strand
gcaggagcaaaccaaauuc

SEQ ID NO: 1210792 - RNA, 19 nt, Homo sapiens
  misc_RNA (1)...(19): siRNA sense strand
cagauuuacucccaguucu

SEQ ID NO: 1210793 - RNA, 19 nt, Homo sapiens
  misc_RNA (1)...(19): siRNA sense strand
ggacagaaacaaggauggu

SEQ ID NO: 1210794 - RNA, 19 nt, Homo sapiens
  misc_RNA (1)...(19): siRNA sense strand
aggaaaugcuugacaucau

SEQ ID NO: 1210795 - RNA, 19 nt, Homo sapiens
  misc_RNA (1)...(19): siRNA sense strand
ggagaacuucaagcagauu

SEQ ID NO: 1210796 - RNA, 19 nt, Homo sapiens
  misc_RNA (1)...(19): siRNA sense strand
ugaauuguccaccgugugu

SEQ ID NO: 1210797 - RNA, 19 nt, Homo sapiens
  misc_RNA (1)...(19): siRNA sense strand
cagaagauggacagaaaca

SEQ ID NO: 1210798 - RNA, 19 nt, Homo sapiens
  misc_RNA (1)...(19): siRNA sense strand
ugcaggagcaaaccaaauu

SEQ ID NO: 1210799 - RNA, 19 nt, Homo sapiens
  misc_RNA (1)...(19): siRNA sense strand
ggugaccauugaggaauuc

SEQ ID NO: 1210800 - RNA, 19 nt, Homo sapiens
  misc_RNA (1)...(19): siRNA sense strand
agaacuucaagcagauuua

SEQ ID NO: 1210801 - RNA, 19 nt, Homo sapiens
  misc_RNA (1)...(19): siRNA sense strand
gcguggacgaugaauuuga

SEQ ID NO: 1210802 - RNA, 19 nt, Homo sapiens
  misc_RNA (1)...(19): siRNA sense strand
gagcagcugcaggagcaaa

SEQ ID NO: 1210803 - RNA, 19 nt, Homo sapiens
  misc_RNA (1)...(19): siRNA sense strand
cagcaccuaugccacuuuu

SEQ ID NO: 1210804 - RNA, 19 nt, Homo sapiens
  misc_RNA (1)...(19): siRNA sense strand
ggaaaugcuugacaucaug

SEQ ID NO: 1210805 - RNA, 19 nt, Homo sapiens
  misc_RNA (1)...(19): siRNA sense strand
cagcguggacgaugaauuu

SEQ ID NO: 1210806 - RNA, 19 nt, Homo sapiens
  misc_RNA (1)...(19): siRNA sense strand
gaagauggacagaaacaag

SEQ ID NO: 1210807 - RNA, 19 nt, Homo sapiens
  misc_RNA (1)...(19): siRNA sense strand
caugauggcucggucaguu

SEQ ID NO: 1210808 - RNA, 19 nt, Homo sapiens
  misc_RNA (1)...(19): siRNA sense strand
gggaacacguggagagcuu

SEQ ID NO: 1210809 - RNA, 19 nt, Homo sapiens
  misc_RNA (1)...(19): siRNA sense strand
gaaaugcuugacaucauga

SEQ ID NO: 1210810 - RNA, 19 nt, Homo sapiens
  misc_RNA (1)...(19): siRNA sense strand
ggaauucauugagucuugu

SEQ ID NO: 1210811 - RNA, 19 nt, Homo sapiens
  misc_RNA (1)...(19): siRNA sense strand
cguggacgaugaauuugaa

SEQ ID NO: 1210812 - RNA, 19 nt, Homo sapiens
  misc_RNA (1)...(19): siRNA sense strand
gaccauugaggaauucauu

SEQ ID NO: 1210813 - RNA, 19 nt, Homo sapiens
  misc_RNA (1)...(19): siRNA sense strand
gaaugucccagcggaauug

SEQ ID NO: 1210814 - RNA, 19 nt, Homo sapiens
  misc_RNA (1)...(19): siRNA sense strand
gaggaaaugcuugacauca

SEQ ID NO: 1210815 - RNA, 19 nt, Homo sapiens
  misc_RNA (1)...(19): siRNA sense strand
gauuuacucccaguucuuu

SEQ ID NO: 1210816 - RNA, 19 nt, Homo sapiens
  misc_RNA (1)...(19): siRNA sense strand
gcagauuuacucccaguuc

SEQ ID NO: 1210817 - RNA, 19 nt, Homo sapiens
  misc_RNA (1)...(19): siRNA sense strand
ucaaugaggagaacuucaa

SEQ ID NO: 1210818 - RNA, 19 nt, Homo sapiens
  misc_RNA (1)...(19): siRNA sense strand
gagaacuucaagcagauuu

SEQ ID NO: 1210819 - RNA, 19 nt, Homo sapiens
  misc_RNA (1)...(19): siRNA sense strand
ugaaguccaucuaugacau

SEQ ID NO: 1210820 - RNA, 19 nt, Homo sapiens
  misc_RNA (1)...(19): siRNA sense strand
caucaugaaguccaucuau

SEQ ID NO: 1210821 - RNA, 19 nt, Homo sapiens
  misc_RNA (1)...(19): siRNA sense strand
gaaguccaucuaugacaug

SEQ ID NO: 1210822 - RNA, 19 nt, Homo sapiens
  misc_RNA (1)...(19): siRNA sense strand
aggaauucauugagucuug

SEQ ID NO: 1210823 - RNA, 19 nt, Homo sapiens
  misc_RNA (1)...(19): siRNA sense strand
gaacuucaagcagauuuac

SEQ ID NO: 1210824 - RNA, 19 nt, Homo sapiens
  misc_RNA (1)...(19): siRNA sense strand
ccauugaggaauucauuga

SEQ ID NO: 1210825 - RNA, 19 nt, Homo sapiens
  misc_RNA (1)...(19): siRNA sense strand
gcaggagcaaaccaaauuc

SEQ ID NO: 1210826 - RNA, 19 nt, Homo sapiens
  misc_RNA (1)...(19): siRNA sense strand
cagauuuacucccaguucu

SEQ ID NO: 1210827 - RNA, 19 nt, Homo sapiens
  misc_RNA (1)...(19): siRNA sense strand
ggacagaaacaaggauggu

SEQ ID NO: 1210828 - RNA, 19 nt, Homo sapiens
  misc_RNA (1)...(19): siRNA sense strand
aggaaaugcuugacaucau

SEQ ID NO: 1210829 - RNA, 19 nt, Homo sapiens
  misc_RNA (1)...(19): siRNA sense strand
ggagaacuucaagcagauu

SEQ ID NO: 1210830 - RNA, 19 nt, Homo sapiens
  misc_RNA (1)...(19): siRNA sense strand
ugaauuguccaccgugugu

SEQ ID NO: 1210831 - RNA, 19 nt, Homo sapiens
  misc_RNA (1)...(19): siRNA sense strand
cagaagauggacagaaaca

SEQ ID NO: 1210832 - RNA, 19 nt, Homo sapiens
  misc_RNA (1)...(19): siRNA sense strand
ugcaggagcaaaccaaauu

SEQ ID NO: 1210833 - RNA, 19 nt, Homo sapiens
  misc_RNA (1)...(19): siRNA sense strand
ggugaccauugaggaauuc

SEQ ID NO: 1210834 - RNA, 19 nt, Homo sapiens
  misc_RNA (1)...(19): siRNA sense strand
agaacuucaagcagauuua

SEQ ID NO: 1210835 - RNA, 19 nt, Homo sapiens
  misc_RNA (1)...(19): siRNA sense strand
gcguggacgaugaauuuga

SEQ ID NO: 1210836 - RNA, 19 nt, Homo sapiens
  misc_RNA (1)...(19): siRNA sense strand
gagcagcugcaggagcaaa

SEQ ID NO: 1210837 - RNA, 19 nt, Homo sapiens
  misc_RNA (1)...(19): siRNA sense strand
cagcaccuaugccacuuuu

SEQ ID NO: 1210838 - RNA, 19 nt, Homo sapiens
  misc_RNA (1)...(19): siRNA sense strand
ggaaaugcuugacaucaug

SEQ ID NO: 1210839 - RNA, 19 nt, Homo sapiens
  misc_RNA (1)...(19): siRNA sense strand
cagcguggacgaugaauuu

SEQ ID NO: 1210840 - RNA, 19 nt, Homo sapiens
  misc_RNA (1)...(19): siRNA sense strand
gaagauggacagaaacaag

SEQ ID NO: 1210841 - RNA, 19 nt, Homo sapiens
  misc_RNA (1)...(19): siRNA sense strand
caugauggcucggucaguu

SEQ ID NO: 1210842 - RNA, 19 nt, Homo sapiens
  misc_RNA (1)...(19): siRNA sense strand
gggaacacguggagagcuu

SEQ ID NO: 1210843 - RNA, 19 nt, Homo sapiens
  misc_RNA (1)...(19): siRNA sense strand
gaaaugcuugacaucauga

SEQ ID NO: 1210844 - RNA, 19 nt, Homo sapiens
  misc_RNA (1)...(19): siRNA sense strand
ggaauucauugagucuugu

SEQ ID NO: 1210845 - RNA, 19 nt, Homo sapiens
  misc_RNA (1)...(19): siRNA sense strand
cguggacgaugaauuugaa

SEQ ID NO: 1210846 - RNA, 19 nt, Homo sapiens
  misc_RNA (1)...(19): siRNA sense strand
gaccauugaggaauucauu

SEQ ID NO: 1210847 - RNA, 19 nt, Homo sapiens
  misc_RNA (1)...(19): siRNA sense strand
gaaugucccagcggaauug

SEQ ID NO: 1210848 - RNA, 19 nt, Homo sapiens
  misc_RNA (1)...(19): siRNA sense strand
gaggaaaugcuugacauca

SEQ ID NO: 1210849 - RNA, 19 nt, Homo sapiens
  misc_RNA (1)...(19): siRNA sense strand
gauuuacucccaguucuuu

SEQ ID NO: 1210850 - RNA, 19 nt, Homo sapiens
  misc_RNA (1)...(19): siRNA sense strand
gcagauuuacucccaguuc

SEQ ID NO: 1210851 - RNA, 19 nt, Homo sapiens
  misc_RNA (1)...(19): siRNA sense strand
ucaaugaggagaacuucaa

SEQ ID NO: 1210852 - RNA, 19 nt, Homo sapiens
  misc_RNA (1)...(19): siRNA sense strand
gagaacuucaagcagauuu

SEQ ID NO: 1210853 - RNA, 19 nt, Homo sapiens
  misc_RNA (1)...(19): siRNA sense strand
ugaaguccaucuaugacau

SEQ ID NO: 1210854 - RNA, 19 nt, Homo sapiens
  misc_RNA (1)...(19): siRNA sense strand
caucaugaaguccaucuau

SEQ ID NO: 1210855 - RNA, 19 nt, Homo sapiens
  misc_RNA (1)...(19): siRNA sense strand
gaaguccaucuaugacaug

SEQ ID NO: 1210856 - RNA, 19 nt, Homo sapiens
  misc_RNA (1)...(19): siRNA sense strand
aggaauucauugagucuug

SEQ ID NO: 1210857 - RNA, 19 nt, Homo sapiens
  misc_RNA (1)...(19): siRNA sense strand
gaacuucaagcagauuuac

SEQ ID NO: 1210858 - RNA, 19 nt, Homo sapiens
  misc_RNA (1)...(19): siRNA sense strand
ccauugaggaauucauuga

SEQ ID NO: 1210859 - RNA, 19 nt, Homo sapiens
  misc_RNA (1)...(19): siRNA sense strand
gcaggagcaaaccaaauuc

SEQ ID NO: 1210860 - RNA, 19 nt, Homo sapiens
  misc_RNA (1)...(19): siRNA sense strand
cagauuuacucccaguucu

SEQ ID NO: 1210861 - RNA, 19 nt, Homo sapiens
  misc_RNA (1)...(19): siRNA sense strand
ggacagaaacaaggauggu

SEQ ID NO: 1210862 - RNA, 19 nt, Homo sapiens
  misc_RNA (1)...(19): siRNA sense strand
aggaaaugcuugacaucau

SEQ ID NO: 1210863 - RNA, 19 nt, Homo sapiens
  misc_RNA (1)...(19): siRNA sense strand
ggagaacuucaagcagauu

SEQ ID NO: 1210864 - RNA, 19 nt, Homo sapiens
  misc_RNA (1)...(19): siRNA sense strand
ugaauuguccaccgugugu

SEQ ID NO: 1210865 - RNA, 19 nt, Homo sapiens
  misc_RNA (1)...(19): siRNA sense strand
cagaagauggacagaaaca

SEQ ID NO: 1210866 - RNA, 19 nt, Homo sapiens
  misc_RNA (1)...(19): siRNA sense strand
ugcaggagcaaaccaaauu

SEQ ID NO: 1210867 - RNA, 19 nt, Homo sapiens
  misc_RNA (1)...(19): siRNA sense strand
ggugaccauugaggaauuc

SEQ ID NO: 1210868 - RNA, 19 nt, Homo sapiens
  misc_RNA (1)...(19): siRNA sense strand
agaacuucaagcagauuua

SEQ ID NO: 1210869 - RNA, 19 nt, Homo sapiens
  misc_RNA (1)...(19): siRNA sense strand
gcguggacgaugaauuuga

SEQ ID NO: 1210870 - RNA, 19 nt, Homo sapiens
  misc_RNA (1)...(19): siRNA sense strand
gagcagcugcaggagcaaa

SEQ ID NO: 1210871 - RNA, 19 nt, Homo sapiens
  misc_RNA (1)...(19): siRNA sense strand
cagcaccuaugccacuuuu

SEQ ID NO: 1210872 - RNA, 19 nt, Homo sapiens
  misc_RNA (1)...(19): siRNA sense strand
ggaaaugcuugacaucaug

SEQ ID NO: 1210873 - RNA, 19 nt, Homo sapiens
  misc_RNA (1)...(19): siRNA sense strand
cagcguggacgaugaauuu

SEQ ID NO: 1210874 - RNA, 19 nt, Homo sapiens
  misc_RNA (1)...(19): siRNA sense strand
gaagauggacagaaacaag

SEQ ID NO: 1210875 - RNA, 19 nt, Homo sapiens
  misc_RNA (1)...(19): siRNA sense strand
caugauggcucggucaguu

SEQ ID NO: 1210876 - RNA, 19 nt, Homo sapiens
  misc_RNA (1)...(19): siRNA sense strand
gggaacacguggagagcuu

SEQ ID NO: 1210877 - RNA, 19 nt, Homo sapiens
  misc_RNA (1)...(19): siRNA sense strand
gaaaugcuugacaucauga

SEQ ID NO: 1210878 - RNA, 19 nt, Homo sapiens
  misc_RNA (1)...(19): siRNA sense strand
ggaauucauugagucuugu

SEQ ID NO: 1210879 - RNA, 19 nt, Homo sapiens
  misc_RNA (1)...(19): siRNA sense strand
cguggacgaugaauuugaa

SEQ ID NO: 1210880 - RNA, 19 nt, Homo sapiens
  misc_RNA (1)...(19): siRNA sense strand
gaccauugaggaauucauu

SEQ ID NO: 1210881 - RNA, 19 nt, Homo sapiens
  misc_RNA (1)...(19): siRNA sense strand
gaaugucccagcggaauug

SEQ ID NO: 1210882 - RNA, 19 nt, Homo sapiens
  misc_RNA (1)...(19): siRNA sense strand
gaggaaaugcuugacauca

SEQ ID NO: 1210883 - RNA, 19 nt, Homo sapiens
  misc_RNA (1)...(19): siRNA sense strand
gauuuacucccaguucuuu

SEQ ID NO: 1210884 - RNA, 19 nt, Homo sapiens
  misc_RNA (1)...(19): siRNA sense strand
gcagauuuacucccaguuc

SEQ ID NO: 1210885 - RNA, 19 nt, Homo sapiens
  misc_RNA (1)...(19): siRNA sense strand
ucaaugaggagaacuucaa

SEQ ID NO: 1210886 - RNA, 19 nt, Homo sapiens
  misc_RNA (1)...(19): siRNA sense strand
gagaacuucaagcagauuu

SEQ ID NO: 1210887 - RNA, 19 nt, Homo sapiens
  misc_RNA (1)...(19): siRNA sense strand
ugaaguccaucuaugacau

SEQ ID NO: 1210888 - RNA, 19 nt, Homo sapiens
  misc_RNA (1)...(19): siRNA sense strand
caucaugaaguccaucuau

SEQ ID NO: 1210889 - RNA, 19 nt, Homo sapiens
  misc_RNA (1)...(19): siRNA sense strand
gaaguccaucuaugacaug

SEQ ID NO: 1210890 - RNA, 19 nt, Homo sapiens
  misc_RNA (1)...(19): siRNA sense strand
aggaauucauugagucuug

SEQ ID NO: 1210891 - RNA, 19 nt, Homo sapiens
  misc_RNA (1)...(19): siRNA sense strand
gaacuucaagcagauuuac

SEQ ID NO: 1210892 - RNA, 19 nt, Homo sapiens
  misc_RNA (1)...(19): siRNA sense strand
ccauugaggaauucauuga

SEQ ID NO: 1210893 - RNA, 19 nt, Homo sapiens
  misc_RNA (1)...(19): siRNA sense strand
gcaggagcaaaccaaauuc

SEQ ID NO: 1210894 - RNA, 19 nt, Homo sapiens
  misc_RNA (1)...(19): siRNA sense strand
cagauuuacucccaguucu

SEQ ID NO: 1210895 - RNA, 19 nt, Homo sapiens
  misc_RNA (1)...(19): siRNA sense strand
ggacagaaacaaggauggu

SEQ ID NO: 1210896 - RNA, 19 nt, Homo sapiens
  misc_RNA (1)...(19): siRNA sense strand
aggaaaugcuugacaucau

SEQ ID NO: 1210897 - RNA, 19 nt, Homo sapiens
  misc_RNA (1)...(19): siRNA sense strand
ggagaacuucaagcagauu

SEQ ID NO: 1210898 - RNA, 19 nt, Homo sapiens
  misc_RNA (1)...(19): siRNA sense strand
ugaauuguccaccgugugu

SEQ ID NO: 1210899 - RNA, 19 nt, Homo sapiens
  misc_RNA (1)...(19): siRNA sense strand
cagaagauggacagaaaca

SEQ ID NO: 1210900 - RNA, 19 nt, Homo sapiens
  misc_RNA (1)...(19): siRNA sense strand
ugcaggagcaaaccaaauu

SEQ ID NO: 1210901 - RNA, 19 nt, Homo sapiens
  misc_RNA (1)...(19): siRNA sense strand
ggugaccauugaggaauuc

SEQ ID NO: 1210902 - RNA, 19 nt, Homo sapiens
  misc_RNA (1)...(19): siRNA sense strand
agaacuucaagcagauuua

SEQ ID NO: 1210903 - RNA, 19 nt, Homo sapiens
  misc_RNA (1)...(19): siRNA sense strand
gcguggacgaugaauuuga

SEQ ID NO: 1210904 - RNA, 19 nt, Homo sapiens
  misc_RNA (1)...(19): siRNA sense strand
gagcagcugcaggagcaaa

SEQ ID NO: 1210905 - RNA, 19 nt, Homo sapiens
  misc_RNA (1)...(19): siRNA sense strand
cagcaccuaugccacuuuu

SEQ ID NO: 1210906 - RNA, 19 nt, Homo sapiens
  misc_RNA (1)...(19): siRNA sense strand
ggaaaugcuugacaucaug

SEQ ID NO: 1210907 - RNA, 19 nt, Homo sapiens
  misc_RNA (1)...(19): siRNA sense strand
cagcguggacgaugaauuu

SEQ ID NO: 1210908 - RNA, 19 nt, Homo sapiens
  misc_RNA (1)...(19): siRNA sense strand
gaagauggacagaaacaag

SEQ ID NO: 1210909 - RNA, 19 nt, Homo sapiens
  misc_RNA (1)...(19): siRNA sense strand
caugauggcucggucaguu

SEQ ID NO: 1210910 - RNA, 19 nt, Homo sapiens
  misc_RNA (1)...(19): siRNA sense strand
gggaacacguggagagcuu

SEQ ID NO: 1210911 - RNA, 19 nt, Homo sapiens
  misc_RNA (1)...(19): siRNA sense strand
gaaaugcuugacaucauga

SEQ ID NO: 1210912 - RNA, 19 nt, Homo sapiens
  misc_RNA (1)...(19): siRNA sense strand
ggaauucauugagucuugu

SEQ ID NO: 1210913 - RNA, 19 nt, Homo sapiens
  misc_RNA (1)...(19): siRNA sense strand
cguggacgaugaauuugaa

SEQ ID NO: 1210914 - RNA, 19 nt, Homo sapiens
  misc_RNA (1)...(19): siRNA sense strand
gaccauugaggaauucauu

SEQ ID NO: 1210915 - RNA, 19 nt, Homo sapiens
  misc_RNA (1)...(19): siRNA sense strand
gaaugucccagcggaauug

SEQ ID NO: 1210916 - RNA, 19 nt, Homo sapiens
  misc_RNA (1)...(19): siRNA sense strand
gaggaaaugcuugacauca

SEQ ID NO: 1210917 - RNA, 19 nt, Homo sapiens
  misc_RNA (1)...(19): siRNA sense strand
gauuuacucccaguucuuu

SEQ ID NO: 1210918 - RNA, 19 nt, Homo sapiens
  misc_RNA (1)...(19): siRNA sense strand
gcagauuuacucccaguuc

SEQ ID NO: 1210919 - RNA, 19 nt, Homo sapiens
  misc_RNA (1)...(19): siRNA sense strand
ucaaugaggagaacuucaa

SEQ ID NO: 1210920 - RNA, 19 nt, Homo sapiens
  misc_RNA (1)...(19): siRNA sense strand
gagaacuucaagcagauuu

SEQ ID NO: 1210921 - RNA, 19 nt, Homo sapiens
  misc_RNA (1)...(19): siRNA sense strand
ugaaguccaucuaugacau

SEQ ID NO: 1210922 - RNA, 19 nt, Homo sapiens
  misc_RNA (1)...(19): siRNA sense strand
caucaugaaguccaucuau

SEQ ID NO: 1210923 - RNA, 19 nt, Homo sapiens
  misc_RNA (1)...(19): siRNA sense strand
gaaguccaucuaugacaug

SEQ ID NO: 1210924 - RNA, 19 nt, Homo sapiens
  misc_RNA (1)...(19): siRNA sense strand
aggaauucauugagucuug

SEQ ID NO: 1210925 - RNA, 19 nt, Homo sapiens
  misc_RNA (1)...(19): siRNA sense strand
gaacuucaagcagauuuac

SEQ ID NO: 1210926 - RNA, 19 nt, Homo sapiens
  misc_RNA (1)...(19): siRNA sense strand
ccauugaggaauucauuga

SEQ ID NO: 1210927 - RNA, 19 nt, Homo sapiens
  misc_RNA (1)...(19): siRNA sense strand
gcaggagcaaaccaaauuc

SEQ ID NO: 1210928 - RNA, 19 nt, Homo sapiens
  misc_RNA (1)...(19): siRNA sense strand
cagauuuacucccaguucu

SEQ ID NO: 1210929 - RNA, 19 nt, Homo sapiens
  misc_RNA (1)...(19): siRNA sense strand
ggacagaaacaaggauggu

SEQ ID NO: 1210930 - RNA, 19 nt, Homo sapiens
  misc_RNA (1)...(19): siRNA sense strand
aggaaaugcuugacaucau

SEQ ID NO: 1210931 - RNA, 19 nt, Homo sapiens
  misc_RNA (1)...(19): siRNA sense strand
ggagaacuucaagcagauu

SEQ ID NO: 1210932 - RNA, 19 nt, Homo sapiens
  misc_RNA (1)...(19): siRNA sense strand
ugaauuguccaccgugugu

SEQ ID NO: 1210933 - RNA, 19 nt, Homo sapiens
  misc_RNA (1)...(19): siRNA sense strand
cagaagauggacagaaaca

SEQ ID NO: 1210934 - RNA, 19 nt, Homo sapiens
  misc_RNA (1)...(19): siRNA sense strand
ugcaggagcaaaccaaauu

SEQ ID NO: 1210935 - RNA, 19 nt, Homo sapiens
  misc_RNA (1)...(19): siRNA sense strand
ggugaccauugaggaauuc

SEQ ID NO: 1210936 - RNA, 19 nt, Homo sapiens
  misc_RNA (1)...(19): siRNA sense strand
agaacuucaagcagauuua

SEQ ID NO: 1210937 - RNA, 19 nt, Homo sapiens
  misc_RNA (1)...(19): siRNA sense strand
gcguggacgaugaauuuga

SEQ ID NO: 1210938 - RNA, 19 nt, Homo sapiens
  misc_RNA (1)...(19): siRNA sense strand
gagcagcugcaggagcaaa

SEQ ID NO: 1210939 - RNA, 19 nt, Homo sapiens
  misc_RNA (1)...(19): siRNA sense strand
cagcaccuaugccacuuuu

SEQ ID NO: 1210940 - RNA, 19 nt, Homo sapiens
  misc_RNA (1)...(19): siRNA sense strand
ggaaaugcuugacaucaug

SEQ ID NO: 1210941 - RNA, 19 nt, Homo sapiens
  misc_RNA (1)...(19): siRNA sense strand
cagcguggacgaugaauuu

SEQ ID NO: 1210942 - RNA, 19 nt, Homo sapiens
  misc_RNA (1)...(19): siRNA sense strand
gaagauggacagaaacaag

SEQ ID NO: 1210943 - RNA, 19 nt, Homo sapiens
  misc_RNA (1)...(19): siRNA sense strand
caugauggcucggucaguu

SEQ ID NO: 1210944 - RNA, 19 nt, Homo sapiens
  misc_RNA (1)...(19): siRNA sense strand
gggaacacguggagagcuu

SEQ ID NO: 1210945 - RNA, 19 nt, Homo sapiens
  misc_RNA (1)...(19): siRNA sense strand
gaaaugcuugacaucauga

SEQ ID NO: 1210946 - RNA, 19 nt, Homo sapiens
  misc_RNA (1)...(19): siRNA sense strand
ggaauucauugagucuugu

SEQ ID NO: 1210947 - RNA, 19 nt, Homo sapiens
  misc_RNA (1)...(19): siRNA sense strand
cguggacgaugaauuugaa

SEQ ID NO: 1210948 - RNA, 19 nt, Homo sapiens
  misc_RNA (1)...(19): siRNA sense strand
gaccauugaggaauucauu

SEQ ID NO: 1210949 - RNA, 19 nt, Homo sapiens
  misc_RNA (1)...(19): siRNA sense strand
gaaugucccagcggaauug

SEQ ID NO: 1210950 - RNA, 19 nt, Homo sapiens
  misc_RNA (1)...(19): siRNA sense strand
gaggaaaugcuugacauca

SEQ ID NO: 1210951 - RNA, 19 nt, Homo sapiens
  misc_RNA (1)...(19): siRNA sense strand
gauuuacucccaguucuuu

SEQ ID NO: 1210952 - RNA, 19 nt, Homo sapiens
  misc_RNA (1)...(19): siRNA sense strand
gcagauuuacucccaguuc

SEQ ID NO: 1210953 - RNA, 19 nt, Homo sapiens
  misc_RNA (1)...(19): siRNA sense strand
ucaaugaggagaacuucaa

SEQ ID NO: 1210954 - RNA, 19 nt, Homo sapiens
  misc_RNA (1)...(19): siRNA sense strand
gagaacuucaagcagauuu

SEQ ID NO: 1210955 - RNA, 19 nt, Homo sapiens
  misc_RNA (1)...(19): siRNA sense strand
ugaaguccaucuaugacau

SEQ ID NO: 1210956 - RNA, 19 nt, Homo sapiens
  misc_RNA (1)...(19): siRNA sense strand
caucaugaaguccaucuau

SEQ ID NO: 1210957 - RNA, 19 nt, Homo sapiens
  misc_RNA (1)...(19): siRNA sense strand
gaaguccaucuaugacaug

SEQ ID NO: 1210958 - RNA, 19 nt, Homo sapiens
  misc_RNA (1)...(19): siRNA sense strand
aggaauucauugagucuug

SEQ ID NO: 1210959 - RNA, 19 nt, Homo sapiens
  misc_RNA (1)...(19): siRNA sense strand
gaacuucaagcagauuuac

SEQ ID NO: 1210960 - RNA, 19 nt, Homo sapiens
  misc_RNA (1)...(19): siRNA sense strand
ccauugaggaauucauuga

SEQ ID NO: 1210961 - RNA, 19 nt, Homo sapiens
  misc_RNA (1)...(19): siRNA sense strand
gcaggagcaaaccaaauuc

SEQ ID NO: 1210962 - RNA, 19 nt, Homo sapiens
  misc_RNA (1)...(19): siRNA sense strand
cagauuuacucccaguucu

SEQ ID NO: 1210963 - RNA, 19 nt, Homo sapiens
  misc_RNA (1)...(19): siRNA sense strand
ggacagaaacaaggauggu

SEQ ID NO: 1210964 - RNA, 19 nt, Homo sapiens
  misc_RNA (1)...(19): siRNA sense strand
aggaaaugcuugacaucau

SEQ ID NO: 1210965 - RNA, 19 nt, Homo sapiens
  misc_RNA (1)...(19): siRNA sense strand
ggagaacuucaagcagauu

SEQ ID NO: 1210966 - RNA, 19 nt, Homo sapiens
  misc_RNA (1)...(19): siRNA sense strand
ugaauuguccaccgugugu

SEQ ID NO: 1210967 - RNA, 19 nt, Homo sapiens
  misc_RNA (1)...(19): siRNA sense strand
cagaagauggacagaaaca

SEQ ID NO: 1210968 - RNA, 19 nt, Homo sapiens
  misc_RNA (1)...(19): siRNA sense strand
ugcaggagcaaaccaaauu

SEQ ID NO: 1210969 - RNA, 19 nt, Homo sapiens
  misc_RNA (1)...(19): siRNA sense strand
ggugaccauugaggaauuc

SEQ ID NO: 1210970 - RNA, 19 nt, Homo sapiens
  misc_RNA (1)...(19): siRNA sense strand
agaacuucaagcagauuua

SEQ ID NO: 1210971 - RNA, 19 nt, Homo sapiens
  misc_RNA (1)...(19): siRNA sense strand
gcguggacgaugaauuuga

SEQ ID NO: 1210972 - RNA, 19 nt, Homo sapiens
  misc_RNA (1)...(19): siRNA sense strand
gagcagcugcaggagcaaa

SEQ ID NO: 1210973 - RNA, 19 nt, Homo sapiens
  misc_RNA (1)...(19): siRNA sense strand
cagcaccuaugccacuuuu

SEQ ID NO: 1210974 - RNA, 19 nt, Homo sapiens
  misc_RNA (1)...(19): siRNA sense strand
cagcguggacgaugaauuu

SEQ ID NO: 1210975 - RNA, 19 nt, Homo sapiens
  misc_RNA (1)...(19): siRNA sense strand
cguggacgaugaauuugaa

SEQ ID NO: 1210976 - RNA, 19 nt, Homo sapiens
  misc_RNA (1)...(19): siRNA sense strand
gaaugucccagcggaauug

SEQ ID NO: 1210977 - RNA, 19 nt, Homo sapiens
  misc_RNA (1)...(19): siRNA sense strand
gcaggagcaaaccaaauuc

SEQ ID NO: 1210978 - RNA, 19 nt, Homo sapiens
  misc_RNA (1)...(19): siRNA sense strand
ugaauuguccaccgugugu

SEQ ID NO: 1210979 - RNA, 19 nt, Homo sapiens
  misc_RNA (1)...(19): siRNA sense strand
ugcaggagcaaaccaaauu

SEQ ID NO: 1210980 - RNA, 19 nt, Homo sapiens
  misc_RNA (1)...(19): siRNA sense strand
gcguggacgaugaauuuga

SEQ ID NO: 1210981 - RNA, 19 nt, Homo sapiens
  misc_RNA (1)...(19): siRNA sense strand
gagcagcugcaggagcaaa

SEQ ID NO: 1210982 - RNA, 19 nt, Homo sapiens
  misc_RNA (1)...(19): siRNA sense strand
ggaaaugcuugacaucaug

SEQ ID NO: 1210983 - RNA, 19 nt, Homo sapiens
  misc_RNA (1)...(19): siRNA sense strand
cagcguggacgaugaauuu

SEQ ID NO: 1210984 - RNA, 19 nt, Homo sapiens
  misc_RNA (1)...(19): siRNA sense strand
gaagauggacagaaacaag

SEQ ID NO: 1210985 - RNA, 19 nt, Homo sapiens
  misc_RNA (1)...(19): siRNA sense strand
caugauggcucggucaguu

SEQ ID NO: 1210986 - RNA, 19 nt, Homo sapiens
  misc_RNA (1)...(19): siRNA sense strand
gggaacacguggagagcuu

SEQ ID NO: 1210987 - RNA, 19 nt, Homo sapiens
  misc_RNA (1)...(19): siRNA sense strand
gaaaugcuugacaucauga

SEQ ID NO: 1210988 - RNA, 19 nt, Homo sapiens
  misc_RNA (1)...(19): siRNA sense strand
ggaauucauugagucuugu

SEQ ID NO: 1210989 - RNA, 19 nt, Homo sapiens
  misc_RNA (1)...(19): siRNA sense strand
cguggacgaugaauuugaa

SEQ ID NO: 1210990 - RNA, 19 nt, Homo sapiens
  misc_RNA (1)...(19): siRNA sense strand
gaccauugaggaauucauu

SEQ ID NO: 1210991 - RNA, 19 nt, Homo sapiens
  misc_RNA (1)...(19): siRNA sense strand
gaaugucccagcggaauug

SEQ ID NO: 1210992 - RNA, 19 nt, Homo sapiens
  misc_RNA (1)...(19): siRNA sense strand
gaggaaaugcuugacauca

SEQ ID NO: 1210993 - RNA, 19 nt, Homo sapiens
  misc_RNA (1)...(19): siRNA sense strand
gauuuacucccaguucuuu

SEQ ID NO: 1210994 - RNA, 19 nt, Homo sapiens
  misc_RNA (1)...(19): siRNA sense strand
gcagauuuacucccaguuc

SEQ ID NO: 1210995 - RNA, 19 nt, Homo sapiens
  misc_RNA (1)...(19): siRNA sense strand
ucaaugaggagaacuucaa

SEQ ID NO: 1210996 - RNA, 19 nt, Homo sapiens
  misc_RNA (1)...(19): siRNA sense strand
gagaacuucaagcagauuu

SEQ ID NO: 1210997 - RNA, 19 nt, Homo sapiens
  misc_RNA (1)...(19): siRNA sense strand
ugaaguccaucuaugacau

SEQ ID NO: 1210998 - RNA, 19 nt, Homo sapiens
  misc_RNA (1)...(19): siRNA sense strand
caucaugaaguccaucuau

SEQ ID NO: 1210999 - RNA, 19 nt, Homo sapiens
  misc_RNA (1)...(19): siRNA sense strand
gaaguccaucuaugacaug

SEQ ID NO: 1211000 - RNA, 19 nt, Homo sapiens
  misc_RNA (1)...(19): siRNA sense strand
aggaauucauugagucuug

SEQ ID NO: 1211001 - RNA, 19 nt, Homo sapiens
  misc_RNA (1)...(19): siRNA sense strand
gaacuucaagcagauuuac

SEQ ID NO: 1211002 - RNA, 19 nt, Homo sapiens
  misc_RNA (1)...(19): siRNA sense strand
ccauugaggaauucauuga

SEQ ID NO: 1211003 - RNA, 19 nt, Homo sapiens
  misc_RNA (1)...(19): siRNA sense strand
gcaggagcaaaccaaauuc

SEQ ID NO: 1211004 - RNA, 19 nt, Homo sapiens
  misc_RNA (1)...(19): siRNA sense strand
cagauuuacucccaguucu

SEQ ID NO: 1211005 - RNA, 19 nt, Homo sapiens
  misc_RNA (1)...(19): siRNA sense strand
ggacagaaacaaggauggu

SEQ ID NO: 1211006 - RNA, 19 nt, Homo sapiens
  misc_RNA (1)...(19): siRNA sense strand
aggaaaugcuugacaucau

SEQ ID NO: 1211007 - RNA, 19 nt, Homo sapiens
  misc_RNA (1)...(19): siRNA sense strand
ggagaacuucaagcagauu

SEQ ID NO: 1211008 - RNA, 19 nt, Homo sapiens
  misc_RNA (1)...(19): siRNA sense strand
ugaauuguccaccgugugu

SEQ ID NO: 1211009 - RNA, 19 nt, Homo sapiens
  misc_RNA (1)...(19): siRNA sense strand
cagaagauggacagaaaca

SEQ ID NO: 1211010 - RNA, 19 nt, Homo sapiens
  misc_RNA (1)...(19): siRNA sense strand
ugcaggagcaaaccaaauu

SEQ ID NO: 1211011 - RNA, 19 nt, Homo sapiens
  misc_RNA (1)...(19): siRNA sense strand
ggugaccauugaggaauuc

SEQ ID NO: 1211012 - RNA, 19 nt, Homo sapiens
  misc_RNA (1)...(19): siRNA sense strand
agaacuucaagcagauuua

SEQ ID NO: 1211013 - RNA, 19 nt, Homo sapiens
  misc_RNA (1)...(19): siRNA sense strand
gcguggacgaugaauuuga

SEQ ID NO: 1211014 - RNA, 19 nt, Homo sapiens
  misc_RNA (1)...(19): siRNA sense strand
gagcagcugcaggagcaaa

SEQ ID NO: 1211015 - RNA, 19 nt, Homo sapiens
  misc_RNA (1)...(19): siRNA sense strand
cagcaccuaugccacuuuu

SEQ ID NO: 1211016 - RNA, 19 nt, Homo sapiens
  misc_RNA (1)...(19): siRNA sense strand
ggaaaugcuugacaucaug

SEQ ID NO: 1211017 - RNA, 19 nt, Homo sapiens
  misc_RNA (1)...(19): siRNA sense strand
cagcguggacgaugaauuu

SEQ ID NO: 1211018 - RNA, 19 nt, Homo sapiens
  misc_RNA (1)...(19): siRNA sense strand
gaagauggacagaaacaag

SEQ ID NO: 1211019 - RNA, 19 nt, Homo sapiens
  misc_RNA (1)...(19): siRNA sense strand
caugauggcucggucaguu

SEQ ID NO: 1211020 - RNA, 19 nt, Homo sapiens
  misc_RNA (1)...(19): siRNA sense strand
gggaacacguggagagcuu

SEQ ID NO: 1211021 - RNA, 19 nt, Homo sapiens
  misc_RNA (1)...(19): siRNA sense strand
gaaaugcuugacaucauga

SEQ ID NO: 1211022 - RNA, 19 nt, Homo sapiens
  misc_RNA (1)...(19): siRNA sense strand
ggaauucauugagucuugu

SEQ ID NO: 1211023 - RNA, 19 nt, Homo sapiens
  misc_RNA (1)...(19): siRNA sense strand
cguggacgaugaauuugaa

SEQ ID NO: 1211024 - RNA, 19 nt, Homo sapiens
  misc_RNA (1)...(19): siRNA sense strand
gaccauugaggaauucauu

SEQ ID NO: 1211025 - RNA, 19 nt, Homo sapiens
  misc_RNA (1)...(19): siRNA sense strand
gaaugucccagcggaauug

SEQ ID NO: 1211026 - RNA, 19 nt, Homo sapiens
  misc_RNA (1)...(19): siRNA sense strand
gaggaaaugcuugacauca

SEQ ID NO: 1211027 - RNA, 19 nt, Homo sapiens
  misc_RNA (1)...(19): siRNA sense strand
gauuuacucccaguucuuu

SEQ ID NO: 1211028 - RNA, 19 nt, Homo sapiens
  misc_RNA (1)...(19): siRNA sense strand
gcagauuuacucccaguuc

SEQ ID NO: 1211029 - RNA, 19 nt, Homo sapiens
  misc_RNA (1)...(19): siRNA sense strand
ucaaugaggagaacuucaa

SEQ ID NO: 1211030 - RNA, 19 nt, Homo sapiens
  misc_RNA (1)...(19): siRNA sense strand
gagaacuucaagcagauuu

SEQ ID NO: 1211031 - RNA, 19 nt, Homo sapiens
  misc_RNA (1)...(19): siRNA sense strand
ugaaguccaucuaugacau

SEQ ID NO: 1211032 - RNA, 19 nt, Homo sapiens
  misc_RNA (1)...(19): siRNA sense strand
caucaugaaguccaucuau

SEQ ID NO: 1211033 - RNA, 19 nt, Homo sapiens
  misc_RNA (1)...(19): siRNA sense strand
gaaguccaucuaugacaug

SEQ ID NO: 1211034 - RNA, 19 nt, Homo sapiens
  misc_RNA (1)...(19): siRNA sense strand
aggaauucauugagucuug

SEQ ID NO: 1211035 - RNA, 19 nt, Homo sapiens
  misc_RNA (1)...(19): siRNA sense strand
gaacuucaagcagauuuac

SEQ ID NO: 1211036 - RNA, 19 nt, Homo sapiens
  misc_RNA (1)...(19): siRNA sense strand
ccauugaggaauucauuga

SEQ ID NO: 1211037 - RNA, 19 nt, Homo sapiens
  misc_RNA (1)...(19): siRNA sense strand
gcaggagcaaaccaaauuc

SEQ ID NO: 1211038 - RNA, 19 nt, Homo sapiens
  misc_RNA (1)...(19): siRNA sense strand
cagauuuacucccaguucu

SEQ ID NO: 1211039 - RNA, 19 nt, Homo sapiens
  misc_RNA (1)...(19): siRNA sense strand
ggacagaaacaaggauggu

SEQ ID NO: 1211040 - RNA, 19 nt, Homo sapiens
  misc_RNA (1)...(19): siRNA sense strand
aggaaaugcuugacaucau

SEQ ID NO: 1211041 - RNA, 19 nt, Homo sapiens
  misc_RNA (1)...(19): siRNA sense strand
ggagaacuucaagcagauu

SEQ ID NO: 1211042 - RNA, 19 nt, Homo sapiens
  misc_RNA (1)...(19): siRNA sense strand
ugaauuguccaccgugugu

SEQ ID NO: 1211043 - RNA, 19 nt, Homo sapiens
  misc_RNA (1)...(19): siRNA sense strand
cagaagauggacagaaaca

SEQ ID NO: 1211044 - RNA, 19 nt, Homo sapiens
  misc_RNA (1)...(19): siRNA sense strand
ugcaggagcaaaccaaauu

SEQ ID NO: 1211045 - RNA, 19 nt, Homo sapiens
  misc_RNA (1)...(19): siRNA sense strand
ggugaccauugaggaauuc

SEQ ID NO: 1211046 - RNA, 19 nt, Homo sapiens
  misc_RNA (1)...(19): siRNA sense strand
agaacuucaagcagauuua

SEQ ID NO: 1211047 - RNA, 19 nt, Homo sapiens
  misc_RNA (1)...(19): siRNA sense strand
gcguggacgaugaauuuga

SEQ ID NO: 1211048 - RNA, 19 nt, Homo sapiens
  misc_RNA (1)...(19): siRNA sense strand
gagcagcugcaggagcaaa

SEQ ID NO: 1211049 - RNA, 19 nt, Homo sapiens
  misc_RNA (1)...(19): siRNA sense strand
cagcaccuaugccacuuuu

SEQ ID NO: 1211050 - RNA, 19 nt, Homo sapiens
  misc_RNA (1)...(19): siRNA sense strand
ggaaaugcuugacaucaug

SEQ ID NO: 1211051 - RNA, 19 nt, Homo sapiens
  misc_RNA (1)...(19): siRNA sense strand
cagcguggacgaugaauuu

SEQ ID NO: 1211052 - RNA, 19 nt, Homo sapiens
  misc_RNA (1)...(19): siRNA sense strand
gaagauggacagaaacaag

SEQ ID NO: 1211053 - RNA, 19 nt, Homo sapiens
  misc_RNA (1)...(19): siRNA sense strand
caugauggcucggucaguu

SEQ ID NO: 1211054 - RNA, 19 nt, Homo sapiens
  misc_RNA (1)...(19): siRNA sense strand
gggaacacguggagagcuu

SEQ ID NO: 1211055 - RNA, 19 nt, Homo sapiens
  misc_RNA (1)...(19): siRNA sense strand
gaaaugcuugacaucauga

SEQ ID NO: 1211056 - RNA, 19 nt, Homo sapiens
  misc_RNA (1)...(19): siRNA sense strand
ggaauucauugagucuugu

SEQ ID NO: 1211057 - RNA, 19 nt, Homo sapiens
  misc_RNA (1)...(19): siRNA sense strand
cguggacgaugaauuugaa

SEQ ID NO: 1211058 - RNA, 19 nt, Homo sapiens
  misc_RNA (1)...(19): siRNA sense strand
gaccauugaggaauucauu

SEQ ID NO: 1211059 - RNA, 19 nt, Homo sapiens
  misc_RNA (1)...(19): siRNA sense strand
gaaugucccagcggaauug

SEQ ID NO: 1211060 - RNA, 19 nt, Homo sapiens
  misc_RNA (1)...(19): siRNA sense strand
gaggaaaugcuugacauca

SEQ ID NO: 1211061 - RNA, 19 nt, Homo sapiens
  misc_RNA (1)...(19): siRNA sense strand
gauuuacucccaguucuuu

SEQ ID NO: 1211062 - RNA, 19 nt, Homo sapiens
  misc_RNA (1)...(19): siRNA sense strand
gcagauuuacucccaguuc

SEQ ID NO: 1211063 - RNA, 19 nt, Homo sapiens
  misc_RNA (1)...(19): siRNA sense strand
ucaaugaggagaacuucaa

SEQ ID NO: 1211064 - RNA, 19 nt, Homo sapiens
  misc_RNA (1)...(19): siRNA sense strand
gagaacuucaagcagauuu

SEQ ID NO: 1211065 - RNA, 19 nt, Homo sapiens
  misc_RNA (1)...(19): siRNA sense strand
ugaaguccaucuaugacau

SEQ ID NO: 1211066 - RNA, 19 nt, Homo sapiens
  misc_RNA (1)...(19): siRNA sense strand
caucaugaaguccaucuau

SEQ ID NO: 1211067 - RNA, 19 nt, Homo sapiens
  misc_RNA (1)...(19): siRNA sense strand
gaaguccaucuaugacaug

SEQ ID NO: 1211068 - RNA, 19 nt, Homo sapiens
  misc_RNA (1)...(19): siRNA sense strand
aggaauucauugagucuug

SEQ ID NO: 1211069 - RNA, 19 nt, Homo sapiens
  misc_RNA (1)...(19): siRNA sense strand
gaacuucaagcagauuuac

SEQ ID NO: 1211070 - RNA, 19 nt, Homo sapiens
  misc_RNA (1)...(19): siRNA sense strand
ccauugaggaauucauuga

SEQ ID NO: 1211071 - RNA, 19 nt, Homo sapiens
  misc_RNA (1)...(19): siRNA sense strand
gcaggagcaaaccaaauuc

SEQ ID NO: 1211072 - RNA, 19 nt, Homo sapiens
  misc_RNA (1)...(19): siRNA sense strand
cagauuuacucccaguucu

SEQ ID NO: 1211073 - RNA, 19 nt, Homo sapiens
  misc_RNA (1)...(19): siRNA sense strand
ggacagaaacaaggauggu

SEQ ID NO: 1211074 - RNA, 19 nt, Homo sapiens
  misc_RNA (1)...(19): siRNA sense strand
aggaaaugcuugacaucau

SEQ ID NO: 1211075 - RNA, 19 nt, Homo sapiens
  misc_RNA (1)...(19): siRNA sense strand
ggagaacuucaagcagauu

SEQ ID NO: 1211076 - RNA, 19 nt, Homo sapiens
  misc_RNA (1)...(19): siRNA sense strand
ugaauuguccaccgugugu

SEQ ID NO: 1211077 - RNA, 19 nt, Homo sapiens
  misc_RNA (1)...(19): siRNA sense strand
cagaagauggacagaaaca

SEQ ID NO: 1211078 - RNA, 19 nt, Homo sapiens
  misc_RNA (1)...(19): siRNA sense strand
ugcaggagcaaaccaaauu

SEQ ID NO: 1211079 - RNA, 19 nt, Homo sapiens
  misc_RNA (1)...(19): siRNA sense strand
ggugaccauugaggaauuc

SEQ ID NO: 1211080 - RNA, 19 nt, Homo sapiens
  misc_RNA (1)...(19): siRNA sense strand
agaacuucaagcagauuua

SEQ ID NO: 1211081 - RNA, 19 nt, Homo sapiens
  misc_RNA (1)...(19): siRNA sense strand
gcguggacgaugaauuuga

SEQ ID NO: 1211082 - RNA, 19 nt, Homo sapiens
  misc_RNA (1)...(19): siRNA sense strand
gagcagcugcaggagcaaa

SEQ ID NO: 1211083 - RNA, 19 nt, Homo sapiens
  misc_RNA (1)...(19): siRNA sense strand
cagcaccuaugccacuuuu

SEQ ID NO: 1211084 - RNA, 19 nt, Homo sapiens
  misc_RNA (1)...(19): siRNA sense strand
ggaaaugcuugacaucaug

SEQ ID NO: 1211085 - RNA, 19 nt, Homo sapiens
  misc_RNA (1)...(19): siRNA sense strand
cagcguggacgaugaauuu

SEQ ID NO: 1211086 - RNA, 19 nt, Homo sapiens
  misc_RNA (1)...(19): siRNA sense strand
gaagauggacagaaacaag

SEQ ID NO: 1211087 - RNA, 19 nt, Homo sapiens
  misc_RNA (1)...(19): siRNA sense strand
caugauggcucggucaguu

SEQ ID NO: 1211088 - RNA, 19 nt, Homo sapiens
  misc_RNA (1)...(19): siRNA sense strand
gggaacacguggagagcuu

SEQ ID NO: 1211089 - RNA, 19 nt, Homo sapiens
  misc_RNA (1)...(19): siRNA sense strand
gaaaugcuugacaucauga

SEQ ID NO: 1211090 - RNA, 19 nt, Homo sapiens
  misc_RNA (1)...(19): siRNA sense strand
ggaauucauugagucuugu

SEQ ID NO: 1211091 - RNA, 19 nt, Homo sapiens
  misc_RNA (1)...(19): siRNA sense strand
cguggacgaugaauuugaa

SEQ ID NO: 1211092 - RNA, 19 nt, Homo sapiens
  misc_RNA (1)...(19): siRNA sense strand
gaccauugaggaauucauu

SEQ ID NO: 1211093 - RNA, 19 nt, Homo sapiens
  misc_RNA (1)...(19): siRNA sense strand
gaaugucccagcggaauug

SEQ ID NO: 1211094 - RNA, 19 nt, Homo sapiens
  misc_RNA (1)...(19): siRNA sense strand
gaggaaaugcuugacauca

SEQ ID NO: 1211095 - RNA, 19 nt, Homo sapiens
  misc_RNA (1)...(19): siRNA sense strand
gauuuacucccaguucuuu

SEQ ID NO: 1211096 - RNA, 19 nt, Homo sapiens
  misc_RNA (1)...(19): siRNA sense strand
gcagauuuacucccaguuc

SEQ ID NO: 1211097 - RNA, 19 nt, Homo sapiens
  misc_RNA (1)...(19): siRNA sense strand
ucaaugaggagaacuucaa

SEQ ID NO: 1211098 - RNA, 19 nt, Homo sapiens
  misc_RNA (1)...(19): siRNA sense strand
gagaacuucaagcagauuu

SEQ ID NO: 1211099 - RNA, 19 nt, Homo sapiens
  misc_RNA (1)...(19): siRNA sense strand
ugaaguccaucuaugacau

SEQ ID NO: 1211100 - RNA, 19 nt, Homo sapiens
  misc_RNA (1)...(19): siRNA sense strand
caucaugaaguccaucuau

SEQ ID NO: 1211101 - RNA, 19 nt, Homo sapiens
  misc_RNA (1)...(19): siRNA sense strand
gaaguccaucuaugacaug

SEQ ID NO: 1211102 - RNA, 19 nt, Homo sapiens
  misc_RNA (1)...(19): siRNA sense strand
aggaauucauugagucuug

SEQ ID NO: 1211103 - RNA, 19 nt, Homo sapiens
  misc_RNA (1)...(19): siRNA sense strand
gaacuucaagcagauuuac

SEQ ID NO: 1211104 - RNA, 19 nt, Homo sapiens
  misc_RNA (1)...(19): siRNA sense strand
ccauugaggaauucauuga

SEQ ID NO: 1211105 - RNA, 19 nt, Homo sapiens
  misc_RNA (1)...(19): siRNA sense strand
gcaggagcaaaccaaauuc

SEQ ID NO: 1211106 - RNA, 19 nt, Homo sapiens
  misc_RNA (1)...(19): siRNA sense strand
cagauuuacucccaguucu

SEQ ID NO: 1211107 - RNA, 19 nt, Homo sapiens
  misc_RNA (1)...(19): siRNA sense strand
ggacagaaacaaggauggu

SEQ ID NO: 1211108 - RNA, 19 nt, Homo sapiens
  misc_RNA (1)...(19): siRNA sense strand
aggaaaugcuugacaucau

SEQ ID NO: 1211109 - RNA, 19 nt, Homo sapiens
  misc_RNA (1)...(19): siRNA sense strand
ggagaacuucaagcagauu

SEQ ID NO: 1211110 - RNA, 19 nt, Homo sapiens
  misc_RNA (1)...(19): siRNA sense strand
ugaauuguccaccgugugu

SEQ ID NO: 1211111 - RNA, 19 nt, Homo sapiens
  misc_RNA (1)...(19): siRNA sense strand
cagaagauggacagaaaca

SEQ ID NO: 1211112 - RNA, 19 nt, Homo sapiens
  misc_RNA (1)...(19): siRNA sense strand
ugcaggagcaaaccaaauu

SEQ ID NO: 1211113 - RNA, 19 nt, Homo sapiens
  misc_RNA (1)...(19): siRNA sense strand
ggugaccauugaggaauuc

SEQ ID NO: 1211114 - RNA, 19 nt, Homo sapiens
  misc_RNA (1)...(19): siRNA sense strand
agaacuucaagcagauuua

SEQ ID NO: 1211115 - RNA, 19 nt, Homo sapiens
  misc_RNA (1)...(19): siRNA sense strand
gcguggacgaugaauuuga

SEQ ID NO: 1211116 - RNA, 19 nt, Homo sapiens
  misc_RNA (1)...(19): siRNA sense strand
gagcagcugcaggagcaaa

SEQ ID NO: 1211117 - RNA, 19 nt, Homo sapiens
  misc_RNA (1)...(19): siRNA sense strand
cagcaccuaugccacuuuu

SEQ ID NO: 1211118 - RNA, 19 nt, Homo sapiens
  misc_RNA (1)...(19): siRNA sense strand
ggaaaugcuugacaucaug

SEQ ID NO: 1211119 - RNA, 19 nt, Homo sapiens
  misc_RNA (1)...(19): siRNA sense strand
cagcguggacgaugaauuu

SEQ ID NO: 1211120 - RNA, 19 nt, Homo sapiens
  misc_RNA (1)...(19): siRNA sense strand
gaagauggacagaaacaag

SEQ ID NO: 1211121 - RNA, 19 nt, Homo sapiens
  misc_RNA (1)...(19): siRNA sense strand
caugauggcucggucaguu

SEQ ID NO: 1211122 - RNA, 19 nt, Homo sapiens
  misc_RNA (1)...(19): siRNA sense strand
gggaacacguggagagcuu

SEQ ID NO: 1211123 - RNA, 19 nt, Homo sapiens
  misc_RNA (1)...(19): siRNA sense strand
gaaaugcuugacaucauga

SEQ ID NO: 1211124 - RNA, 19 nt, Homo sapiens
  misc_RNA (1)...(19): siRNA sense strand
ggaauucauugagucuugu

SEQ ID NO: 1211125 - RNA, 19 nt, Homo sapiens
  misc_RNA (1)...(19): siRNA sense strand
cguggacgaugaauuugaa

SEQ ID NO: 1211126 - RNA, 19 nt, Homo sapiens
  misc_RNA (1)...(19): siRNA sense strand
gaccauugaggaauucauu

SEQ ID NO: 1211127 - RNA, 19 nt, Homo sapiens
  misc_RNA (1)...(19): siRNA sense strand
gaaugucccagcggaauug

SEQ ID NO: 1211128 - RNA, 19 nt, Homo sapiens
  misc_RNA (1)...(19): siRNA sense strand
gaggaaaugcuugacauca

SEQ ID NO: 1211129 - RNA, 19 nt, Homo sapiens
  misc_RNA (1)...(19): siRNA sense strand
gauuuacucccaguucuuu

SEQ ID NO: 1211130 - RNA, 19 nt, Homo sapiens
  misc_RNA (1)...(19): siRNA sense strand
gcagauuuacucccaguuc

SEQ ID NO: 1211131 - RNA, 19 nt, Homo sapiens
  misc_RNA (1)...(19): siRNA sense strand
ucaaugaggagaacuucaa

SEQ ID NO: 1211132 - RNA, 19 nt, Homo sapiens
  misc_RNA (1)...(19): siRNA sense strand
gagaacuucaagcagauuu

SEQ ID NO: 1211133 - RNA, 19 nt, Homo sapiens
  misc_RNA (1)...(19): siRNA sense strand
ugaaguccaucuaugacau

SEQ ID NO: 1211134 - RNA, 19 nt, Homo sapiens
  misc_RNA (1)...(19): siRNA sense strand
caucaugaaguccaucuau

SEQ ID NO: 1211135 - RNA, 19 nt, Homo sapiens
  misc_RNA (1)...(19): siRNA sense strand
gaaguccaucuaugacaug

SEQ ID NO: 1211136 - RNA, 19 nt, Homo sapiens
  misc_RNA (1)...(19): siRNA sense strand
aggaauucauugagucuug

SEQ ID NO: 1211137 - RNA, 19 nt, Homo sapiens
  misc_RNA (1)...(19): siRNA sense strand
gaacuucaagcagauuuac

SEQ ID NO: 1211138 - RNA, 19 nt, Homo sapiens
  misc_RNA (1)...(19): siRNA sense strand
ccauugaggaauucauuga

SEQ ID NO: 1211139 - RNA, 19 nt, Homo sapiens
  misc_RNA (1)...(19): siRNA sense strand
gcaggagcaaaccaaauuc

SEQ ID NO: 1211140 - RNA, 19 nt, Homo sapiens
  misc_RNA (1)...(19): siRNA sense strand
cagauuuacucccaguucu

SEQ ID NO: 1211141 - RNA, 19 nt, Homo sapiens
  misc_RNA (1)...(19): siRNA sense strand
ggacagaaacaaggauggu

SEQ ID NO: 1211142 - RNA, 19 nt, Homo sapiens
  misc_RNA (1)...(19): siRNA sense strand
aggaaaugcuugacaucau

SEQ ID NO: 1211143 - RNA, 19 nt, Homo sapiens
  misc_RNA (1)...(19): siRNA sense strand
ggagaacuucaagcagauu

SEQ ID NO: 1211144 - RNA, 19 nt, Homo sapiens
  misc_RNA (1)...(19): siRNA sense strand
ugaauuguccaccgugugu

SEQ ID NO: 1211145 - RNA, 19 nt, Homo sapiens
  misc_RNA (1)...(19): siRNA sense strand
cagaagauggacagaaaca

SEQ ID NO: 1211146 - RNA, 19 nt, Homo sapiens
  misc_RNA (1)...(19): siRNA sense strand
ugcaggagcaaaccaaauu

SEQ ID NO: 1211147 - RNA, 19 nt, Homo sapiens
  misc_RNA (1)...(19): siRNA sense strand
ggugaccauugaggaauuc

SEQ ID NO: 1211148 - RNA, 19 nt, Homo sapiens
  misc_RNA (1)...(19): siRNA sense strand
agaacuucaagcagauuua

SEQ ID NO: 1211149 - RNA, 19 nt, Homo sapiens
  misc_RNA (1)...(19): siRNA sense strand
gcguggacgaugaauuuga

SEQ ID NO: 1211150 - RNA, 19 nt, Homo sapiens
  misc_RNA (1)...(19): siRNA sense strand
gagcagcugcaggagcaaa

SEQ ID NO: 1211151 - RNA, 19 nt, Homo sapiens
  misc_RNA (1)...(19): siRNA sense strand
cagcaccuaugccacuuuu

SEQ ID NO: 1211152 - RNA, 19 nt, Homo sapiens
  misc_RNA (1)...(19): siRNA sense strand
ggaaaugcuugacaucaug

SEQ ID NO: 1211153 - RNA, 19 nt, Homo sapiens
  misc_RNA (1)...(19): siRNA sense strand
cagcguggacgaugaauuu

SEQ ID NO: 1211154 - RNA, 19 nt, Homo sapiens
  misc_RNA (1)...(19): siRNA sense strand
gaagauggacagaaacaag

SEQ ID NO: 1211155 - RNA, 19 nt, Homo sapiens
  misc_RNA (1)...(19): siRNA sense strand
caugauggcucggucaguu

SEQ ID NO: 1211156 - RNA, 19 nt, Homo sapiens
  misc_RNA (1)...(19): siRNA sense strand
gggaacacguggagagcuu

SEQ ID NO: 1211157 - RNA, 19 nt, Homo sapiens
  misc_RNA (1)...(19): siRNA sense strand
gaaaugcuugacaucauga

SEQ ID NO: 1211158 - RNA, 19 nt, Homo sapiens
  misc_RNA (1)...(19): siRNA sense strand
ggaauucauugagucuugu

SEQ ID NO: 1211159 - RNA, 19 nt, Homo sapiens
  misc_RNA (1)...(19): siRNA sense strand
cguggacgaugaauuugaa

SEQ ID NO: 1211160 - RNA, 19 nt, Homo sapiens
  misc_RNA (1)...(19): siRNA sense strand
gaccauugaggaauucauu

SEQ ID NO: 1211161 - RNA, 19 nt, Homo sapiens
  misc_RNA (1)...(19): siRNA sense strand
gaaugucccagcggaauug

SEQ ID NO: 1211162 - RNA, 19 nt, Homo sapiens
  misc_RNA (1)...(19): siRNA sense strand
gaggaaaugcuugacauca

SEQ ID NO: 1211163 - RNA, 19 nt, Homo sapiens
  misc_RNA (1)...(19): siRNA sense strand
gauuuacucccaguucuuu

SEQ ID NO: 1211164 - RNA, 19 nt, Homo sapiens
  misc_RNA (1)...(19): siRNA sense strand
gcagauuuacucccaguuc

SEQ ID NO: 1211165 - RNA, 19 nt, Homo sapiens
  misc_RNA (1)...(19): siRNA sense strand
ucaaugaggagaacuucaa

SEQ ID NO: 1211166 - RNA, 19 nt, Homo sapiens
  misc_RNA (1)...(19): siRNA sense strand
gagaacuucaagcagauuu

SEQ ID NO: 1211167 - RNA, 19 nt, Homo sapiens
  misc_RNA (1)...(19): siRNA sense strand
ugaaguccaucuaugacau

SEQ ID NO: 1211168 - RNA, 19 nt, Homo sapiens
  misc_RNA (1)...(19): siRNA sense strand
caucaugaaguccaucuau

SEQ ID NO: 1211169 - RNA, 19 nt, Homo sapiens
  misc_RNA (1)...(19): siRNA sense strand
gaaguccaucuaugacaug

SEQ ID NO: 1211170 - RNA, 19 nt, Homo sapiens
  misc_RNA (1)...(19): siRNA sense strand
aggaauucauugagucuug

SEQ ID NO: 1211171 - RNA, 19 nt, Homo sapiens
  misc_RNA (1)...(19): siRNA sense strand
gaacuucaagcagauuuac

SEQ ID NO: 1211172 - RNA, 19 nt, Homo sapiens
  misc_RNA (1)...(19): siRNA sense strand
ccauugaggaauucauuga

SEQ ID NO: 1211173 - RNA, 19 nt, Homo sapiens
  misc_RNA (1)...(19): siRNA sense strand
gcaggagcaaaccaaauuc

SEQ ID NO: 1211174 - RNA, 19 nt, Homo sapiens
  misc_RNA (1)...(19): siRNA sense strand
cagauuuacucccaguucu

SEQ ID NO: 1211175 - RNA, 19 nt, Homo sapiens
  misc_RNA (1)...(19): siRNA sense strand
ggacagaaacaaggauggu

SEQ ID NO: 1211176 - RNA, 19 nt, Homo sapiens
  misc_RNA (1)...(19): siRNA sense strand
aggaaaugcuugacaucau

SEQ ID NO: 1211177 - RNA, 19 nt, Homo sapiens
  misc_RNA (1)...(19): siRNA sense strand
ggagaacuucaagcagauu

SEQ ID NO: 1211178 - RNA, 19 nt, Homo sapiens
  misc_RNA (1)...(19): siRNA sense strand
ugaauuguccaccgugugu

SEQ ID NO: 1211179 - RNA, 19 nt, Homo sapiens
  misc_RNA (1)...(19): siRNA sense strand
cagaagauggacagaaaca

SEQ ID NO: 1211180 - RNA, 19 nt, Homo sapiens
  misc_RNA (1)...(19): siRNA sense strand
ugcaggagcaaaccaaauu

SEQ ID NO: 1211181 - RNA, 19 nt, Homo sapiens
  misc_RNA (1)...(19): siRNA sense strand
ggugaccauugaggaauuc

SEQ ID NO: 1211182 - RNA, 19 nt, Homo sapiens
  misc_RNA (1)...(19): siRNA sense strand
agaacuucaagcagauuua

SEQ ID NO: 1211183 - RNA, 19 nt, Homo sapiens
  misc_RNA (1)...(19): siRNA sense strand
gcguggacgaugaauuuga

SEQ ID NO: 1211184 - RNA, 19 nt, Homo sapiens
  misc_RNA (1)...(19): siRNA sense strand
gagcagcugcaggagcaaa

SEQ ID NO: 1211185 - RNA, 19 nt, Homo sapiens
  misc_RNA (1)...(19): siRNA sense strand
cagcaccuaugccacuuuu

SEQ ID NO: 1211186 - RNA, 19 nt, Homo sapiens
  misc_RNA (1)...(19): siRNA sense strand
ggaaaugcuugacaucaug

SEQ ID NO: 1211187 - RNA, 19 nt, Homo sapiens
  misc_RNA (1)...(19): siRNA sense strand
cagcguggacgaugaauuu

SEQ ID NO: 1211188 - RNA, 19 nt, Homo sapiens
  misc_RNA (1)...(19): siRNA sense strand
gaagauggacagaaacaag

SEQ ID NO: 1211189 - RNA, 19 nt, Homo sapiens
  misc_RNA (1)...(19): siRNA sense strand
caugauggcucggucaguu

SEQ ID NO: 1211190 - RNA, 19 nt, Homo sapiens
  misc_RNA (1)...(19): siRNA sense strand
gggaacacguggagagcuu

SEQ ID NO: 1211191 - RNA, 19 nt, Homo sapiens
  misc_RNA (1)...(19): siRNA sense strand
gaaaugcuugacaucauga

SEQ ID NO: 1211192 - RNA, 19 nt, Homo sapiens
  misc_RNA (1)...(19): siRNA sense strand
ggaauucauugagucuugu

SEQ ID NO: 1211193 - RNA, 19 nt, Homo sapiens
  misc_RNA (1)...(19): siRNA sense strand
cguggacgaugaauuugaa

SEQ ID NO: 1211194 - RNA, 19 nt, Homo sapiens
  misc_RNA (1)...(19): siRNA sense strand
gaccauugaggaauucauu

SEQ ID NO: 1211195 - RNA, 19 nt, Homo sapiens
  misc_RNA (1)...(19): siRNA sense strand
gaaugucccagcggaauug

SEQ ID NO: 1211196 - RNA, 19 nt, Homo sapiens
  misc_RNA (1)...(19): siRNA sense strand
gaggaaaugcuugacauca

SEQ ID NO: 1211197 - RNA, 19 nt, Homo sapiens
  misc_RNA (1)...(19): siRNA sense strand
gauuuacucccaguucuuu

SEQ ID NO: 1211198 - RNA, 19 nt, Homo sapiens
  misc_RNA (1)...(19): siRNA sense strand
gcagauuuacucccaguuc

SEQ ID NO: 1211199 - RNA, 19 nt, Homo sapiens
  misc_RNA (1)...(19): siRNA sense strand
ucaaugaggagaacuucaa

SEQ ID NO: 1211200 - RNA, 19 nt, Homo sapiens
  misc_RNA (1)...(19): siRNA sense strand
gagaacuucaagcagauuu

SEQ ID NO: 1211201 - RNA, 19 nt, Homo sapiens
  misc_RNA (1)...(19): siRNA sense strand
ugaaguccaucuaugacau

SEQ ID NO: 1211202 - RNA, 19 nt, Homo sapiens
  misc_RNA (1)...(19): siRNA sense strand
caucaugaaguccaucuau

SEQ ID NO: 1211203 - RNA, 19 nt, Homo sapiens
  misc_RNA (1)...(19): siRNA sense strand
gaaguccaucuaugacaug

SEQ ID NO: 1211204 - RNA, 19 nt, Homo sapiens
  misc_RNA (1)...(19): siRNA sense strand
aggaauucauugagucuug

SEQ ID NO: 1211205 - RNA, 19 nt, Homo sapiens
  misc_RNA (1)...(19): siRNA sense strand
gaacuucaagcagauuuac

SEQ ID NO: 1211206 - RNA, 19 nt, Homo sapiens
  misc_RNA (1)...(19): siRNA sense strand
ccauugaggaauucauuga

SEQ ID NO: 1211207 - RNA, 19 nt, Homo sapiens
  misc_RNA (1)...(19): siRNA sense strand
gcaggagcaaaccaaauuc

SEQ ID NO: 1211208 - RNA, 19 nt, Homo sapiens
  misc_RNA (1)...(19): siRNA sense strand
cagauuuacucccaguucu

SEQ ID NO: 1211209 - RNA, 19 nt, Homo sapiens
  misc_RNA (1)...(19): siRNA sense strand
ggacagaaacaaggauggu

SEQ ID NO: 1211210 - RNA, 19 nt, Homo sapiens
  misc_RNA (1)...(19): siRNA sense strand
aggaaaugcuugacaucau

SEQ ID NO: 1211211 - RNA, 19 nt, Homo sapiens
  misc_RNA (1)...(19): siRNA sense strand
ggagaacuucaagcagauu

SEQ ID NO: 1211212 - RNA, 19 nt, Homo sapiens
  misc_RNA (1)...(19): siRNA sense strand
ugaauuguccaccgugugu

SEQ ID NO: 1211213 - RNA, 19 nt, Homo sapiens
  misc_RNA (1)...(19): siRNA sense strand
cagaagauggacagaaaca

SEQ ID NO: 1211214 - RNA, 19 nt, Homo sapiens
  misc_RNA (1)...(19): siRNA sense strand
ugcaggagcaaaccaaauu

SEQ ID NO: 1211215 - RNA, 19 nt, Homo sapiens
  misc_RNA (1)...(19): siRNA sense strand
ggugaccauugaggaauuc

SEQ ID NO: 1211216 - RNA, 19 nt, Homo sapiens
  misc_RNA (1)...(19): siRNA sense strand
agaacuucaagcagauuua

SEQ ID NO: 1211217 - RNA, 19 nt, Homo sapiens
  misc_RNA (1)...(19): siRNA sense strand
gcguggacgaugaauuuga

SEQ ID NO: 1211218 - RNA, 19 nt, Homo sapiens
  misc_RNA (1)...(19): siRNA sense strand
gagcagcugcaggagcaaa

SEQ ID NO: 1211219 - RNA, 19 nt, Homo sapiens
  misc_RNA (1)...(19): siRNA sense strand
cagcaccuaugccacuuuu

SEQ ID NO: 1211220 - RNA, 19 nt, Homo sapiens
  misc_RNA (1)...(19): siRNA sense strand
cagcguggacgaugaauuu

SEQ ID NO: 1211221 - RNA, 19 nt, Homo sapiens
  misc_RNA (1)...(19): siRNA sense strand
cguggacgaugaauuugaa

SEQ ID NO: 1211222 - RNA, 19 nt, Homo sapiens
  misc_RNA (1)...(19): siRNA sense strand
gaaugucccagcggaauug

SEQ ID NO: 1211223 - RNA, 19 nt, Homo sapiens
  misc_RNA (1)...(19): siRNA sense strand
gcaggagcaaaccaaauuc

SEQ ID NO: 1211224 - RNA, 19 nt, Homo sapiens
  misc_RNA (1)...(19): siRNA sense strand
ugaauuguccaccgugugu

SEQ ID NO: 1211225 - RNA, 19 nt, Homo sapiens
  misc_RNA (1)...(19): siRNA sense strand
ugcaggagcaaaccaaauu

SEQ ID NO: 1211226 - RNA, 19 nt, Homo sapiens
  misc_RNA (1)...(19): siRNA sense strand
gcguggacgaugaauuuga

SEQ ID NO: 1211227 - RNA, 19 nt, Homo sapiens
  misc_RNA (1)...(19): siRNA sense strand
gagcagcugcaggagcaaa

SEQ ID NO: 1211228 - RNA, 19 nt, Homo sapiens
  misc_RNA (1)...(19): siRNA sense strand
gcaaaucaaugaagaugag

SEQ ID NO: 1211229 - RNA, 19 nt, Homo sapiens
  misc_RNA (1)...(19): siRNA sense strand
gcaggcaaaucaaugaaga

SEQ ID NO: 1211230 - RNA, 19 nt, Homo sapiens
  misc_RNA (1)...(19): siRNA sense strand
caaugaagaugagccguaa

SEQ ID NO: 1211231 - RNA, 19 nt, Homo sapiens
  misc_RNA (1)...(19): siRNA sense strand
aagaagcgcaggcaaauca

SEQ ID NO: 1211232 - RNA, 19 nt, Homo sapiens
  misc_RNA (1)...(19): siRNA sense strand
aauaagaagcgcaggcaaa

SEQ ID NO: 1211233 - RNA, 19 nt, Homo sapiens
  misc_RNA (1)...(19): siRNA sense strand
uaugagaccguucgcaaug

SEQ ID NO: 1211234 - RNA, 19 nt, Homo sapiens
  misc_RNA (1)...(19): siRNA sense strand
guucuacuaugacuaugag

SEQ ID NO: 1211235 - RNA, 19 nt, Homo sapiens
  misc_RNA (1)...(19): siRNA sense strand
gaagcgcaggcaaaucaau

SEQ ID NO: 1211236 - RNA, 19 nt, Homo sapiens
  misc_RNA (1)...(19): siRNA sense strand
ggacguggacccguucuac

SEQ ID NO: 1211237 - RNA, 19 nt, Homo sapiens
  misc_RNA (1)...(19): siRNA sense strand
uggacccguucuacuauga

SEQ ID NO: 1211238 - RNA, 19 nt, Homo sapiens
  misc_RNA (1)...(19): siRNA sense strand
ggcaaaucaaugaagauga

SEQ ID NO: 1211239 - RNA, 19 nt, Homo sapiens
  misc_RNA (1)...(19): siRNA sense strand
gcgcaggcaaaucaaugaa

SEQ ID NO: 1211240 - RNA, 19 nt, Homo sapiens
  misc_RNA (1)...(19): siRNA sense strand
guggacccguucuacuaug

SEQ ID NO: 1211241 - RNA, 19 nt, Homo sapiens
  misc_RNA (1)...(19): siRNA sense strand
auaagaagcgcaggcaaau

SEQ ID NO: 1211242 - RNA, 19 nt, Homo sapiens
  misc_RNA (1)...(19): siRNA sense strand
gcaaaucaaugaagaugag

SEQ ID NO: 1211243 - RNA, 19 nt, Homo sapiens
  misc_RNA (1)...(19): siRNA sense strand
gcaggcaaaucaaugaaga

SEQ ID NO: 1211244 - RNA, 19 nt, Homo sapiens
  misc_RNA (1)...(19): siRNA sense strand
caaugaagaugagccguaa

SEQ ID NO: 1211245 - RNA, 19 nt, Homo sapiens
  misc_RNA (1)...(19): siRNA sense strand
aagaagcgcaggcaaauca

SEQ ID NO: 1211246 - RNA, 19 nt, Homo sapiens
  misc_RNA (1)...(19): siRNA sense strand
aauaagaagcgcaggcaaa

SEQ ID NO: 1211247 - RNA, 19 nt, Homo sapiens
  misc_RNA (1)...(19): siRNA sense strand
uaugagaccguucgcaaug

SEQ ID NO: 1211248 - RNA, 19 nt, Homo sapiens
  misc_RNA (1)...(19): siRNA sense strand
guucuacuaugacuaugag

SEQ ID NO: 1211249 - RNA, 19 nt, Homo sapiens
  misc_RNA (1)...(19): siRNA sense strand
gaagcgcaggcaaaucaau

SEQ ID NO: 1211250 - RNA, 19 nt, Homo sapiens
  misc_RNA (1)...(19): siRNA sense strand
ggacguggacccguucuac

SEQ ID NO: 1211251 - RNA, 19 nt, Homo sapiens
  misc_RNA (1)...(19): siRNA sense strand
uggacccguucuacuauga

SEQ ID NO: 1211252 - RNA, 19 nt, Homo sapiens
  misc_RNA (1)...(19): siRNA sense strand
ggcaaaucaaugaagauga

SEQ ID NO: 1211253 - RNA, 19 nt, Homo sapiens
  misc_RNA (1)...(19): siRNA sense strand
gcgcaggcaaaucaaugaa

SEQ ID NO: 1211254 - RNA, 19 nt, Homo sapiens
  misc_RNA (1)...(19): siRNA sense strand
guggacccguucuacuaug

SEQ ID NO: 1211255 - RNA, 19 nt, Homo sapiens
  misc_RNA (1)...(19): siRNA sense strand
auaagaagcgcaggcaaau

SEQ ID NO: 1211256 - RNA, 19 nt, Homo sapiens
  misc_RNA (1)...(19): siRNA sense strand
ccagagaucuugauuauuc

SEQ ID NO: 1211257 - RNA, 19 nt, Homo sapiens
  misc_RNA (1)...(19): siRNA sense strand
gaaguuguccguacagaua

SEQ ID NO: 1211258 - RNA, 19 nt, Homo sapiens
  misc_RNA (1)...(19): siRNA sense strand
ccaaagagcccauuacaac

SEQ ID NO: 1211259 - RNA, 19 nt, Homo sapiens
  misc_RNA (1)...(19): siRNA sense strand
ccuccaaucugcaugauga

SEQ ID NO: 1211260 - RNA, 19 nt, Homo sapiens
  misc_RNA (1)...(19): siRNA sense strand
agacauacagcucggaaua

SEQ ID NO: 1211261 - RNA, 19 nt, Homo sapiens
  misc_RNA (1)...(19): siRNA sense strand
gcaccuccauguacuucaa

SEQ ID NO: 1211262 - RNA, 19 nt, Homo sapiens
  misc_RNA (1)...(19): siRNA sense strand
acaccaagcugaccaugga

SEQ ID NO: 1211263 - RNA, 19 nt, Homo sapiens
  misc_RNA (1)...(19): siRNA sense strand
caagagaacagugcagaaa

SEQ ID NO: 1211264 - RNA, 19 nt, Homo sapiens
  misc_RNA (1)...(19): siRNA sense strand
acccagagaucuugauuau

SEQ ID NO: 1211265 - RNA, 19 nt, Homo sapiens
  misc_RNA (1)...(19): siRNA sense strand
ucagaagugucucaguguu

SEQ ID NO: 1211266 - RNA, 19 nt, Homo sapiens
  misc_RNA (1)...(19): siRNA sense strand
caaaccaaagagcccauua

SEQ ID NO: 1211267 - RNA, 19 nt, Homo sapiens
  misc_RNA (1)...(19): siRNA sense strand
gaggucgucugccuuccaa

SEQ ID NO: 1211268 - RNA, 19 nt, Homo sapiens
  misc_RNA (1)...(19): siRNA sense strand
ucucaguguuggaauggua

SEQ ID NO: 1211269 - RNA, 19 nt, Homo sapiens
  misc_RNA (1)...(19): siRNA sense strand
caaagagcccauuacaaca

SEQ ID NO: 1211270 - RNA, 19 nt, Homo sapiens
  misc_RNA (1)...(19): siRNA sense strand
gagcaacuacgaacucaag

SEQ ID NO: 1211271 - RNA, 19 nt, Homo sapiens
  misc_RNA (1)...(19): siRNA sense strand
ugucaguacugucgauuuc

SEQ ID NO: 1211272 - RNA, 19 nt, Homo sapiens
  misc_RNA (1)...(19): siRNA sense strand
gaccuuggcagcacugaga

SEQ ID NO: 1211273 - RNA, 19 nt, Homo sapiens
  misc_RNA (1)...(19): siRNA sense strand
gaauacaccacggagauca

SEQ ID NO: 1211274 - RNA, 19 nt, Homo sapiens
  misc_RNA (1)...(19): siRNA sense strand
ucucagcccucuccaccuu

SEQ ID NO: 1211275 - RNA, 19 nt, Homo sapiens
  misc_RNA (1)...(19): siRNA sense strand
aaaccgaugucaguacugu

SEQ ID NO: 1211276 - RNA, 19 nt, Homo sapiens
  misc_RNA (1)...(19): siRNA sense strand
cgaaaccgaugucaguacu

SEQ ID NO: 1211277 - RNA, 19 nt, Homo sapiens
  misc_RNA (1)...(19): siRNA sense strand
acauacagcucggaauaca

SEQ ID NO: 1211278 - RNA, 19 nt, Homo sapiens
  misc_RNA (1)...(19): siRNA sense strand
guagacaagagacgucgaa

SEQ ID NO: 1211279 - RNA, 19 nt, Homo sapiens
  misc_RNA (1)...(19): siRNA sense strand
caucagcagccauccauuc

SEQ ID NO: 1211280 - RNA, 19 nt, Homo sapiens
  misc_RNA (1)...(19): siRNA sense strand
gacaagagacgucgaaacc

SEQ ID NO: 1211281 - RNA, 19 nt, Homo sapiens
  misc_RNA (1)...(19): siRNA sense strand
cagaagugucucaguguug

SEQ ID NO: 1211282 - RNA, 19 nt, Homo sapiens
  misc_RNA (1)...(19): siRNA sense strand
ggaauacaccacggagauc

SEQ ID NO: 1211283 - RNA, 19 nt, Homo sapiens
  misc_RNA (1)...(19): siRNA sense strand
ccaaucugcaugaugaaug

SEQ ID NO: 1211284 - RNA, 19 nt, Homo sapiens
  misc_RNA (1)...(19): siRNA sense strand
ccagcuaccaucaccauca

SEQ ID NO: 1211285 - RNA, 19 nt, Homo sapiens
  misc_RNA (1)...(19): siRNA sense strand
cgucgaaaccgaugucagu

SEQ ID NO: 1211286 - RNA, 19 nt, Homo sapiens
  misc_RNA (1)...(19): siRNA sense strand
caacacccagagaucuuga

SEQ ID NO: 1211287 - RNA, 19 nt, Homo sapiens
  misc_RNA (1)...(19): siRNA sense strand
cacccagagaucuugauua

SEQ ID NO: 1211288 - RNA, 19 nt, Homo sapiens
  misc_RNA (1)...(19): siRNA sense strand
gcccagcaccuccauguac

SEQ ID NO: 1211289 - RNA, 19 nt, Homo sapiens
  misc_RNA (1)...(19): siRNA sense strand
ccuccagguuccaguuaug

SEQ ID NO: 1211290 - RNA, 19 nt, Homo sapiens
  misc_RNA (1)...(19): siRNA sense strand
cggaauacaccacggagau

SEQ ID NO: 1211291 - RNA, 19 nt, Homo sapiens
  misc_RNA (1)...(19): siRNA sense strand
ucaagagaacagugcagaa

SEQ ID NO: 1211292 - RNA, 19 nt, Homo sapiens
  misc_RNA (1)...(19): siRNA sense strand
gcuucccgcucuuccacuu

SEQ ID NO: 1211293 - RNA, 19 nt, Homo sapiens
  misc_RNA (1)...(19): siRNA sense strand
aaaagaaguuguccguaca

SEQ ID NO: 1211294 - RNA, 19 nt, Homo sapiens
  misc_RNA (1)...(19): siRNA sense strand
ucaguacugucgauuucag

SEQ ID NO: 1211295 - RNA, 19 nt, Homo sapiens
  misc_RNA (1)...(19): siRNA sense strand
aaagagcccauuacaacag

SEQ ID NO: 1211296 - RNA, 19 nt, Homo sapiens
  misc_RNA (1)...(19): siRNA sense strand
cgucugccuuccaaaccaa

SEQ ID NO: 1211297 - RNA, 19 nt, Homo sapiens
  misc_RNA (1)...(19): siRNA sense strand
ccagagaucuugauuauuc

SEQ ID NO: 1211298 - RNA, 19 nt, Homo sapiens
  misc_RNA (1)...(19): siRNA sense strand
gaaguuguccguacagaua

SEQ ID NO: 1211299 - RNA, 19 nt, Homo sapiens
  misc_RNA (1)...(19): siRNA sense strand
ccaaagagcccauuacaac

SEQ ID NO: 1211300 - RNA, 19 nt, Homo sapiens
  misc_RNA (1)...(19): siRNA sense strand
ccuccaaucugcaugauga

SEQ ID NO: 1211301 - RNA, 19 nt, Homo sapiens
  misc_RNA (1)...(19): siRNA sense strand
agacauacagcucggaaua

SEQ ID NO: 1211302 - RNA, 19 nt, Homo sapiens
  misc_RNA (1)...(19): siRNA sense strand
gcaccuccauguacuucaa

SEQ ID NO: 1211303 - RNA, 19 nt, Homo sapiens
  misc_RNA (1)...(19): siRNA sense strand
acaccaagcugaccaugga

SEQ ID NO: 1211304 - RNA, 19 nt, Homo sapiens
  misc_RNA (1)...(19): siRNA sense strand
caagagaacagugcagaaa

SEQ ID NO: 1211305 - RNA, 19 nt, Homo sapiens
  misc_RNA (1)...(19): siRNA sense strand
acccagagaucuugauuau

SEQ ID NO: 1211306 - RNA, 19 nt, Homo sapiens
  misc_RNA (1)...(19): siRNA sense strand
ucagaagugucucaguguu

SEQ ID NO: 1211307 - RNA, 19 nt, Homo sapiens
  misc_RNA (1)...(19): siRNA sense strand
caaaccaaagagcccauua

SEQ ID NO: 1211308 - RNA, 19 nt, Homo sapiens
  misc_RNA (1)...(19): siRNA sense strand
gaggucgucugccuuccaa

SEQ ID NO: 1211309 - RNA, 19 nt, Homo sapiens
  misc_RNA (1)...(19): siRNA sense strand
ucucaguguuggaauggua

SEQ ID NO: 1211310 - RNA, 19 nt, Homo sapiens
  misc_RNA (1)...(19): siRNA sense strand
caaagagcccauuacaaca

SEQ ID NO: 1211311 - RNA, 19 nt, Homo sapiens
  misc_RNA (1)...(19): siRNA sense strand
gagcaacuacgaacucaag

SEQ ID NO: 1211312 - RNA, 19 nt, Homo sapiens
  misc_RNA (1)...(19): siRNA sense strand
ugucaguacugucgauuuc

SEQ ID NO: 1211313 - RNA, 19 nt, Homo sapiens
  misc_RNA (1)...(19): siRNA sense strand
gaccuuggcagcacugaga

SEQ ID NO: 1211314 - RNA, 19 nt, Homo sapiens
  misc_RNA (1)...(19): siRNA sense strand
gaauacaccacggagauca

SEQ ID NO: 1211315 - RNA, 19 nt, Homo sapiens
  misc_RNA (1)...(19): siRNA sense strand
ucucagcccucuccaccuu

SEQ ID NO: 1211316 - RNA, 19 nt, Homo sapiens
  misc_RNA (1)...(19): siRNA sense strand
aaaccgaugucaguacugu

SEQ ID NO: 1211317 - RNA, 19 nt, Homo sapiens
  misc_RNA (1)...(19): siRNA sense strand
cgaaaccgaugucaguacu

SEQ ID NO: 1211318 - RNA, 19 nt, Homo sapiens
  misc_RNA (1)...(19): siRNA sense strand
acauacagcucggaauaca

SEQ ID NO: 1211319 - RNA, 19 nt, Homo sapiens
  misc_RNA (1)...(19): siRNA sense strand
guagacaagagacgucgaa

SEQ ID NO: 1211320 - RNA, 19 nt, Homo sapiens
  misc_RNA (1)...(19): siRNA sense strand
caucagcagccauccauuc

SEQ ID NO: 1211321 - RNA, 19 nt, Homo sapiens
  misc_RNA (1)...(19): siRNA sense strand
gacaagagacgucgaaacc

SEQ ID NO: 1211322 - RNA, 19 nt, Homo sapiens
  misc_RNA (1)...(19): siRNA sense strand
cagaagugucucaguguug

SEQ ID NO: 1211323 - RNA, 19 nt, Homo sapiens
  misc_RNA (1)...(19): siRNA sense strand
ggaauacaccacggagauc

SEQ ID NO: 1211324 - RNA, 19 nt, Homo sapiens
  misc_RNA (1)...(19): siRNA sense strand
ccaaucugcaugaugaaug

SEQ ID NO: 1211325 - RNA, 19 nt, Homo sapiens
  misc_RNA (1)...(19): siRNA sense strand
ccagcuaccaucaccauca

SEQ ID NO: 1211326 - RNA, 19 nt, Homo sapiens
  misc_RNA (1)...(19): siRNA sense strand
cgucgaaaccgaugucagu

SEQ ID NO: 1211327 - RNA, 19 nt, Homo sapiens
  misc_RNA (1)...(19): siRNA sense strand
caacacccagagaucuuga

SEQ ID NO: 1211328 - RNA, 19 nt, Homo sapiens
  misc_RNA (1)...(19): siRNA sense strand
cacccagagaucuugauua

SEQ ID NO: 1211329 - RNA, 19 nt, Homo sapiens
  misc_RNA (1)...(19): siRNA sense strand
gcccagcaccuccauguac

SEQ ID NO: 1211330 - RNA, 19 nt, Homo sapiens
  misc_RNA (1)...(19): siRNA sense strand
ccuccagguuccaguuaug

SEQ ID NO: 1211331 - RNA, 19 nt, Homo sapiens
  misc_RNA (1)...(19): siRNA sense strand
cggaauacaccacggagau

SEQ ID NO: 1211332 - RNA, 19 nt, Homo sapiens
  misc_RNA (1)...(19): siRNA sense strand
ucaagagaacagugcagaa

SEQ ID NO: 1211333 - RNA, 19 nt, Homo sapiens
  misc_RNA (1)...(19): siRNA sense strand
gcuucccgcucuuccacuu

SEQ ID NO: 1211334 - RNA, 19 nt, Homo sapiens
  misc_RNA (1)...(19): siRNA sense strand
aaaagaaguuguccguaca

SEQ ID NO: 1211335 - RNA, 19 nt, Homo sapiens
  misc_RNA (1)...(19): siRNA sense strand
ucaguacugucgauuucag

SEQ ID NO: 1211336 - RNA, 19 nt, Homo sapiens
  misc_RNA (1)...(19): siRNA sense strand
aaagagcccauuacaacag

SEQ ID NO: 1211337 - RNA, 19 nt, Homo sapiens
  misc_RNA (1)...(19): siRNA sense strand
cgucugccuuccaaaccaa

SEQ ID NO: 1211338 - RNA, 19 nt, Homo sapiens
  misc_RNA (1)...(19): siRNA sense strand
ccagagaucuugauuauuc

SEQ ID NO: 1211339 - RNA, 19 nt, Homo sapiens
  misc_RNA (1)...(19): siRNA sense strand
gaaguuguccguacagaua

SEQ ID NO: 1211340 - RNA, 19 nt, Homo sapiens
  misc_RNA (1)...(19): siRNA sense strand
ccaaagagcccauuacaac

SEQ ID NO: 1211341 - RNA, 19 nt, Homo sapiens
  misc_RNA (1)...(19): siRNA sense strand
ccuccaaucugcaugauga

SEQ ID NO: 1211342 - RNA, 19 nt, Homo sapiens
  misc_RNA (1)...(19): siRNA sense strand
agacauacagcucggaaua

SEQ ID NO: 1211343 - RNA, 19 nt, Homo sapiens
  misc_RNA (1)...(19): siRNA sense strand
gcaccuccauguacuucaa

SEQ ID NO: 1211344 - RNA, 19 nt, Homo sapiens
  misc_RNA (1)...(19): siRNA sense strand
acaccaagcugaccaugga

SEQ ID NO: 1211345 - RNA, 19 nt, Homo sapiens
  misc_RNA (1)...(19): siRNA sense strand
caagagaacagugcagaaa

SEQ ID NO: 1211346 - RNA, 19 nt, Homo sapiens
  misc_RNA (1)...(19): siRNA sense strand
acccagagaucuugauuau

SEQ ID NO: 1211347 - RNA, 19 nt, Homo sapiens
  misc_RNA (1)...(19): siRNA sense strand
ucagaagugucucaguguu

SEQ ID NO: 1211348 - RNA, 19 nt, Homo sapiens
  misc_RNA (1)...(19): siRNA sense strand
caaaccaaagagcccauua

SEQ ID NO: 1211349 - RNA, 19 nt, Homo sapiens
  misc_RNA (1)...(19): siRNA sense strand
gaggucgucugccuuccaa

SEQ ID NO: 1211350 - RNA, 19 nt, Homo sapiens
  misc_RNA (1)...(19): siRNA sense strand
ucucaguguuggaauggua

SEQ ID NO: 1211351 - RNA, 19 nt, Homo sapiens
  misc_RNA (1)...(19): siRNA sense strand
caaagagcccauuacaaca

SEQ ID NO: 1211352 - RNA, 19 nt, Homo sapiens
  misc_RNA (1)...(19): siRNA sense strand
gagcaacuacgaacucaag

SEQ ID NO: 1211353 - RNA, 19 nt, Homo sapiens
  misc_RNA (1)...(19): siRNA sense strand
ugucaguacugucgauuuc

SEQ ID NO: 1211354 - RNA, 19 nt, Homo sapiens
  misc_RNA (1)...(19): siRNA sense strand
gaccuuggcagcacugaga

SEQ ID NO: 1211355 - RNA, 19 nt, Homo sapiens
  misc_RNA (1)...(19): siRNA sense strand
gaauacaccacggagauca

SEQ ID NO: 1211356 - RNA, 19 nt, Homo sapiens
  misc_RNA (1)...(19): siRNA sense strand
ucucagcccucuccaccuu

SEQ ID NO: 1211357 - RNA, 19 nt, Homo sapiens
  misc_RNA (1)...(19): siRNA sense strand
aaaccgaugucaguacugu

SEQ ID NO: 1211358 - RNA, 19 nt, Homo sapiens
  misc_RNA (1)...(19): siRNA sense strand
cgaaaccgaugucaguacu

SEQ ID NO: 1211359 - RNA, 19 nt, Homo sapiens
  misc_RNA (1)...(19): siRNA sense strand
acauacagcucggaauaca

SEQ ID NO: 1211360 - RNA, 19 nt, Homo sapiens
  misc_RNA (1)...(19): siRNA sense strand
guagacaagagacgucgaa

SEQ ID NO: 1211361 - RNA, 19 nt, Homo sapiens
  misc_RNA (1)...(19): siRNA sense strand
caucagcagccauccauuc

SEQ ID NO: 1211362 - RNA, 19 nt, Homo sapiens
  misc_RNA (1)...(19): siRNA sense strand
gacaagagacgucgaaacc

SEQ ID NO: 1211363 - RNA, 19 nt, Homo sapiens
  misc_RNA (1)...(19): siRNA sense strand
cagaagugucucaguguug

SEQ ID NO: 1211364 - RNA, 19 nt, Homo sapiens
  misc_RNA (1)...(19): siRNA sense strand
ggaauacaccacggagauc

SEQ ID NO: 1211365 - RNA, 19 nt, Homo sapiens
  misc_RNA (1)...(19): siRNA sense strand
ccaaucugcaugaugaaug

SEQ ID NO: 1211366 - RNA, 19 nt, Homo sapiens
  misc_RNA (1)...(19): siRNA sense strand
ccagcuaccaucaccauca

SEQ ID NO: 1211367 - RNA, 19 nt, Homo sapiens
  misc_RNA (1)...(19): siRNA sense strand
cgucgaaaccgaugucagu

SEQ ID NO: 1211368 - RNA, 19 nt, Homo sapiens
  misc_RNA (1)...(19): siRNA sense strand
caacacccagagaucuuga

SEQ ID NO: 1211369 - RNA, 19 nt, Homo sapiens
  misc_RNA (1)...(19): siRNA sense strand
cacccagagaucuugauua

SEQ ID NO: 1211370 - RNA, 19 nt, Homo sapiens
  misc_RNA (1)...(19): siRNA sense strand
gcccagcaccuccauguac

SEQ ID NO: 1211371 - RNA, 19 nt, Homo sapiens
  misc_RNA (1)...(19): siRNA sense strand
ccuccagguuccaguuaug

SEQ ID NO: 1211372 - RNA, 19 nt, Homo sapiens
  misc_RNA (1)...(19): siRNA sense strand
cggaauacaccacggagau

SEQ ID NO: 1211373 - RNA, 19 nt, Homo sapiens
  misc_RNA (1)...(19): siRNA sense strand
ucaagagaacagugcagaa

SEQ ID NO: 1211374 - RNA, 19 nt, Homo sapiens
  misc_RNA (1)...(19): siRNA sense strand
gcuucccgcucuuccacuu

SEQ ID NO: 1211375 - RNA, 19 nt, Homo sapiens
  misc_RNA (1)...(19): siRNA sense strand
aaaagaaguuguccguaca

SEQ ID NO: 1211376 - RNA, 19 nt, Homo sapiens
  misc_RNA (1)...(19): siRNA sense strand
ucaguacugucgauuucag

SEQ ID NO: 1211377 - RNA, 19 nt, Homo sapiens
  misc_RNA (1)...(19): siRNA sense strand
aaagagcccauuacaacag

SEQ ID NO: 1211378 - RNA, 19 nt, Homo sapiens
  misc_RNA (1)...(19): siRNA sense strand
cgucugccuuccaaaccaa

SEQ ID NO: 1211379 - RNA, 19 nt, Homo sapiens
  misc_RNA (1)...(19): siRNA sense strand
ccagagaucuugauuauuc

SEQ ID NO: 1211380 - RNA, 19 nt, Homo sapiens
  misc_RNA (1)...(19): siRNA sense strand
gaaguuguccguacagaua

SEQ ID NO: 1211381 - RNA, 19 nt, Homo sapiens
  misc_RNA (1)...(19): siRNA sense strand
ccaaagagcccauuacaac

SEQ ID NO: 1211382 - RNA, 19 nt, Homo sapiens
  misc_RNA (1)...(19): siRNA sense strand
ccuccaaucugcaugauga

SEQ ID NO: 1211383 - RNA, 19 nt, Homo sapiens
  misc_RNA (1)...(19): siRNA sense strand
agacauacagcucggaaua

SEQ ID NO: 1211384 - RNA, 19 nt, Homo sapiens
  misc_RNA (1)...(19): siRNA sense strand
gcaccuccauguacuucaa

SEQ ID NO: 1211385 - RNA, 19 nt, Homo sapiens
  misc_RNA (1)...(19): siRNA sense strand
acaccaagcugaccaugga

SEQ ID NO: 1211386 - RNA, 19 nt, Homo sapiens
  misc_RNA (1)...(19): siRNA sense strand
caagagaacagugcagaaa

SEQ ID NO: 1211387 - RNA, 19 nt, Homo sapiens
  misc_RNA (1)...(19): siRNA sense strand
acccagagaucuugauuau

SEQ ID NO: 1211388 - RNA, 19 nt, Homo sapiens
  misc_RNA (1)...(19): siRNA sense strand
ucagaagugucucaguguu

SEQ ID NO: 1211389 - RNA, 19 nt, Homo sapiens
  misc_RNA (1)...(19): siRNA sense strand
caaaccaaagagcccauua

SEQ ID NO: 1211390 - RNA, 19 nt, Homo sapiens
  misc_RNA (1)...(19): siRNA sense strand
gaggucgucugccuuccaa

SEQ ID NO: 1211391 - RNA, 19 nt, Homo sapiens
  misc_RNA (1)...(19): siRNA sense strand
ucucaguguuggaauggua

SEQ ID NO: 1211392 - RNA, 19 nt, Homo sapiens
  misc_RNA (1)...(19): siRNA sense strand
caaagagcccauuacaaca

SEQ ID NO: 1211393 - RNA, 19 nt, Homo sapiens
  misc_RNA (1)...(19): siRNA sense strand
gagcaacuacgaacucaag

SEQ ID NO: 1211394 - RNA, 19 nt, Homo sapiens
  misc_RNA (1)...(19): siRNA sense strand
ugucaguacugucgauuuc

SEQ ID NO: 1211395 - RNA, 19 nt, Homo sapiens
  misc_RNA (1)...(19): siRNA sense strand
gaccuuggcagcacugaga

SEQ ID NO: 1211396 - RNA, 19 nt, Homo sapiens
  misc_RNA (1)...(19): siRNA sense strand
gaauacaccacggagauca

SEQ ID NO: 1211397 - RNA, 19 nt, Homo sapiens
  misc_RNA (1)...(19): siRNA sense strand
ucucagcccucuccaccuu

SEQ ID NO: 1211398 - RNA, 19 nt, Homo sapiens
  misc_RNA (1)...(19): siRNA sense strand
aaaccgaugucaguacugu

SEQ ID NO: 1211399 - RNA, 19 nt, Homo sapiens
  misc_RNA (1)...(19): siRNA sense strand
cgaaaccgaugucaguacu

SEQ ID NO: 1211400 - RNA, 19 nt, Homo sapiens
  misc_RNA (1)...(19): siRNA sense strand
acauacagcucggaauaca

SEQ ID NO: 1211401 - RNA, 19 nt, Homo sapiens
  misc_RNA (1)...(19): siRNA sense strand
guagacaagagacgucgaa

SEQ ID NO: 1211402 - RNA, 19 nt, Homo sapiens
  misc_RNA (1)...(19): siRNA sense strand
caucagcagccauccauuc

SEQ ID NO: 1211403 - RNA, 19 nt, Homo sapiens
  misc_RNA (1)...(19): siRNA sense strand
gacaagagacgucgaaacc

SEQ ID NO: 1211404 - RNA, 19 nt, Homo sapiens
  misc_RNA (1)...(19): siRNA sense strand
cagaagugucucaguguug

SEQ ID NO: 1211405 - RNA, 19 nt, Homo sapiens
  misc_RNA (1)...(19): siRNA sense strand
ggaauacaccacggagauc

SEQ ID NO: 1211406 - RNA, 19 nt, Homo sapiens
  misc_RNA (1)...(19): siRNA sense strand
ccaaucugcaugaugaaug

SEQ ID NO: 1211407 - RNA, 19 nt, Homo sapiens
  misc_RNA (1)...(19): siRNA sense strand
ccagcuaccaucaccauca

SEQ ID NO: 1211408 - RNA, 19 nt, Homo sapiens
  misc_RNA (1)...(19): siRNA sense strand
cgucgaaaccgaugucagu

SEQ ID NO: 1211409 - RNA, 19 nt, Homo sapiens
  misc_RNA (1)...(19): siRNA sense strand
caacacccagagaucuuga

SEQ ID NO: 1211410 - RNA, 19 nt, Homo sapiens
  misc_RNA (1)...(19): siRNA sense strand
cacccagagaucuugauua

SEQ ID NO: 1211411 - RNA, 19 nt, Homo sapiens
  misc_RNA (1)...(19): siRNA sense strand
gcccagcaccuccauguac

SEQ ID NO: 1211412 - RNA, 19 nt, Homo sapiens
  misc_RNA (1)...(19): siRNA sense strand
ccuccagguuccaguuaug

SEQ ID NO: 1211413 - RNA, 19 nt, Homo sapiens
  misc_RNA (1)...(19): siRNA sense strand
cggaauacaccacggagau

SEQ ID NO: 1211414 - RNA, 19 nt, Homo sapiens
  misc_RNA (1)...(19): siRNA sense strand
ucaagagaacagugcagaa

SEQ ID NO: 1211415 - RNA, 19 nt, Homo sapiens
  misc_RNA (1)...(19): siRNA sense strand
gcuucccgcucuuccacuu

SEQ ID NO: 1211416 - RNA, 19 nt, Homo sapiens
  misc_RNA (1)...(19): siRNA sense strand
aaaagaaguuguccguaca

SEQ ID NO: 1211417 - RNA, 19 nt, Homo sapiens
  misc_RNA (1)...(19): siRNA sense strand
ucaguacugucgauuucag

SEQ ID NO: 1211418 - RNA, 19 nt, Homo sapiens
  misc_RNA (1)...(19): siRNA sense strand
aaagagcccauuacaacag

SEQ ID NO: 1211419 - RNA, 19 nt, Homo sapiens
  misc_RNA (1)...(19): siRNA sense strand
cgucugccuuccaaaccaa

SEQ ID NO: 1211420 - RNA, 19 nt, Homo sapiens
  misc_RNA (1)...(19): siRNA sense strand
ccagagaucuugauuauuc

SEQ ID NO: 1211421 - RNA, 19 nt, Homo sapiens
  misc_RNA (1)...(19): siRNA sense strand
gaaguuguccguacagaua

SEQ ID NO: 1211422 - RNA, 19 nt, Homo sapiens
  misc_RNA (1)...(19): siRNA sense strand
ccaaagagcccauuacaac

SEQ ID NO: 1211423 - RNA, 19 nt, Homo sapiens
  misc_RNA (1)...(19): siRNA sense strand
ccuccaaucugcaugauga

SEQ ID NO: 1211424 - RNA, 19 nt, Homo sapiens
  misc_RNA (1)...(19): siRNA sense strand
agacauacagcucggaaua

SEQ ID NO: 1211425 - RNA, 19 nt, Homo sapiens
  misc_RNA (1)...(19): siRNA sense strand
gcaccuccauguacuucaa

SEQ ID NO: 1211426 - RNA, 19 nt, Homo sapiens
  misc_RNA (1)...(19): siRNA sense strand
acaccaagcugaccaugga

SEQ ID NO: 1211427 - RNA, 19 nt, Homo sapiens
  misc_RNA (1)...(19): siRNA sense strand
caagagaacagugcagaaa

SEQ ID NO: 1211428 - RNA, 19 nt, Homo sapiens
  misc_RNA (1)...(19): siRNA sense strand
acccagagaucuugauuau

SEQ ID NO: 1211429 - RNA, 19 nt, Homo sapiens
  misc_RNA (1)...(19): siRNA sense strand
ucagaagugucucaguguu

SEQ ID NO: 1211430 - RNA, 19 nt, Homo sapiens
  misc_RNA (1)...(19): siRNA sense strand
caaaccaaagagcccauua

SEQ ID NO: 1211431 - RNA, 19 nt, Homo sapiens
  misc_RNA (1)...(19): siRNA sense strand
gaggucgucugccuuccaa

SEQ ID NO: 1211432 - RNA, 19 nt, Homo sapiens
  misc_RNA (1)...(19): siRNA sense strand
ucucaguguuggaauggua

SEQ ID NO: 1211433 - RNA, 19 nt, Homo sapiens
  misc_RNA (1)...(19): siRNA sense strand
caaagagcccauuacaaca

SEQ ID NO: 1211434 - RNA, 19 nt, Homo sapiens
  misc_RNA (1)...(19): siRNA sense strand
gagcaacuacgaacucaag

SEQ ID NO: 1211435 - RNA, 19 nt, Homo sapiens
  misc_RNA (1)...(19): siRNA sense strand
ugucaguacugucgauuuc

SEQ ID NO: 1211436 - RNA, 19 nt, Homo sapiens
  misc_RNA (1)...(19): siRNA sense strand
gaccuuggcagcacugaga

SEQ ID NO: 1211437 - RNA, 19 nt, Homo sapiens
  misc_RNA (1)...(19): siRNA sense strand
gaauacaccacggagauca

SEQ ID NO: 1211438 - RNA, 19 nt, Homo sapiens
  misc_RNA (1)...(19): siRNA sense strand
ucucagcccucuccaccuu

SEQ ID NO: 1211439 - RNA, 19 nt, Homo sapiens
  misc_RNA (1)...(19): siRNA sense strand
aaaccgaugucaguacugu

SEQ ID NO: 1211440 - RNA, 19 nt, Homo sapiens
  misc_RNA (1)...(19): siRNA sense strand
cgaaaccgaugucaguacu

SEQ ID NO: 1211441 - RNA, 19 nt, Homo sapiens
  misc_RNA (1)...(19): siRNA sense strand
acauacagcucggaauaca

SEQ ID NO: 1211442 - RNA, 19 nt, Homo sapiens
  misc_RNA (1)...(19): siRNA sense strand
guagacaagagacgucgaa

SEQ ID NO: 1211443 - RNA, 19 nt, Homo sapiens
  misc_RNA (1)...(19): siRNA sense strand
caucagcagccauccauuc

SEQ ID NO: 1211444 - RNA, 19 nt, Homo sapiens
  misc_RNA (1)...(19): siRNA sense strand
gacaagagacgucgaaacc

SEQ ID NO: 1211445 - RNA, 19 nt, Homo sapiens
  misc_RNA (1)...(19): siRNA sense strand
cagaagugucucaguguug

SEQ ID NO: 1211446 - RNA, 19 nt, Homo sapiens
  misc_RNA (1)...(19): siRNA sense strand
ggaauacaccacggagauc

SEQ ID NO: 1211447 - RNA, 19 nt, Homo sapiens
  misc_RNA (1)...(19): siRNA sense strand
ccaaucugcaugaugaaug

SEQ ID NO: 1211448 - RNA, 19 nt, Homo sapiens
  misc_RNA (1)...(19): siRNA sense strand
ccagcuaccaucaccauca

SEQ ID NO: 1211449 - RNA, 19 nt, Homo sapiens
  misc_RNA (1)...(19): siRNA sense strand
cgucgaaaccgaugucagu

SEQ ID NO: 1211450 - RNA, 19 nt, Homo sapiens
  misc_RNA (1)...(19): siRNA sense strand
caacacccagagaucuuga

SEQ ID NO: 1211451 - RNA, 19 nt, Homo sapiens
  misc_RNA (1)...(19): siRNA sense strand
cacccagagaucuugauua

SEQ ID NO: 1211452 - RNA, 19 nt, Homo sapiens
  misc_RNA (1)...(19): siRNA sense strand
gcccagcaccuccauguac

SEQ ID NO: 1211453 - RNA, 19 nt, Homo sapiens
  misc_RNA (1)...(19): siRNA sense strand
ccuccagguuccaguuaug

SEQ ID NO: 1211454 - RNA, 19 nt, Homo sapiens
  misc_RNA (1)...(19): siRNA sense strand
cggaauacaccacggagau

SEQ ID NO: 1211455 - RNA, 19 nt, Homo sapiens
  misc_RNA (1)...(19): siRNA sense strand
ucaagagaacagugcagaa

SEQ ID NO: 1211456 - RNA, 19 nt, Homo sapiens
  misc_RNA (1)...(19): siRNA sense strand
gcuucccgcucuuccacuu

SEQ ID NO: 1211457 - RNA, 19 nt, Homo sapiens
  misc_RNA (1)...(19): siRNA sense strand
aaaagaaguuguccguaca

SEQ ID NO: 1211458 - RNA, 19 nt, Homo sapiens
  misc_RNA (1)...(19): siRNA sense strand
ucaguacugucgauuucag

SEQ ID NO: 1211459 - RNA, 19 nt, Homo sapiens
  misc_RNA (1)...(19): siRNA sense strand
aaagagcccauuacaacag

SEQ ID NO: 1211460 - RNA, 19 nt, Homo sapiens
  misc_RNA (1)...(19): siRNA sense strand
cgucugccuuccaaaccaa

SEQ ID NO: 1211461 - RNA, 19 nt, Homo sapiens
  misc_RNA (1)...(19): siRNA sense strand
ccagagaucuugauuauuc

SEQ ID NO: 1211462 - RNA, 19 nt, Homo sapiens
  misc_RNA (1)...(19): siRNA sense strand
gaaguuguccguacagaua

SEQ ID NO: 1211463 - RNA, 19 nt, Homo sapiens
  misc_RNA (1)...(19): siRNA sense strand
ccaaagagcccauuacaac

SEQ ID NO: 1211464 - RNA, 19 nt, Homo sapiens
  misc_RNA (1)...(19): siRNA sense strand
ccuccaaucugcaugauga

SEQ ID NO: 1211465 - RNA, 19 nt, Homo sapiens
  misc_RNA (1)...(19): siRNA sense strand
agacauacagcucggaaua

SEQ ID NO: 1211466 - RNA, 19 nt, Homo sapiens
  misc_RNA (1)...(19): siRNA sense strand
gcaccuccauguacuucaa

SEQ ID NO: 1211467 - RNA, 19 nt, Homo sapiens
  misc_RNA (1)...(19): siRNA sense strand
acaccaagcugaccaugga

SEQ ID NO: 1211468 - RNA, 19 nt, Homo sapiens
  misc_RNA (1)...(19): siRNA sense strand
caagagaacagugcagaaa

SEQ ID NO: 1211469 - RNA, 19 nt, Homo sapiens
  misc_RNA (1)...(19): siRNA sense strand
acccagagaucuugauuau

SEQ ID NO: 1211470 - RNA, 19 nt, Homo sapiens
  misc_RNA (1)...(19): siRNA sense strand
ucagaagugucucaguguu

SEQ ID NO: 1211471 - RNA, 19 nt, Homo sapiens
  misc_RNA (1)...(19): siRNA sense strand
caaaccaaagagcccauua

SEQ ID NO: 1211472 - RNA, 19 nt, Homo sapiens
  misc_RNA (1)...(19): siRNA sense strand
gaggucgucugccuuccaa

SEQ ID NO: 1211473 - RNA, 19 nt, Homo sapiens
  misc_RNA (1)...(19): siRNA sense strand
ucucaguguuggaauggua

SEQ ID NO: 1211474 - RNA, 19 nt, Homo sapiens
  misc_RNA (1)...(19): siRNA sense strand
caaagagcccauuacaaca

SEQ ID NO: 1211475 - RNA, 19 nt, Homo sapiens
  misc_RNA (1)...(19): siRNA sense strand
gagcaacuacgaacucaag

SEQ ID NO: 1211476 - RNA, 19 nt, Homo sapiens
  misc_RNA (1)...(19): siRNA sense strand
ugucaguacugucgauuuc

SEQ ID NO: 1211477 - RNA, 19 nt, Homo sapiens
  misc_RNA (1)...(19): siRNA sense strand
gaccuuggcagcacugaga

SEQ ID NO: 1211478 - RNA, 19 nt, Homo sapiens
  misc_RNA (1)...(19): siRNA sense strand
gaauacaccacggagauca

SEQ ID NO: 1211479 - RNA, 19 nt, Homo sapiens
  misc_RNA (1)...(19): siRNA sense strand
ucucagcccucuccaccuu

SEQ ID NO: 1211480 - RNA, 19 nt, Homo sapiens
  misc_RNA (1)...(19): siRNA sense strand
aaaccgaugucaguacugu

SEQ ID NO: 1211481 - RNA, 19 nt, Homo sapiens
  misc_RNA (1)...(19): siRNA sense strand
cgaaaccgaugucaguacu

SEQ ID NO: 1211482 - RNA, 19 nt, Homo sapiens
  misc_RNA (1)...(19): siRNA sense strand
acauacagcucggaauaca

SEQ ID NO: 1211483 - RNA, 19 nt, Homo sapiens
  misc_RNA (1)...(19): siRNA sense strand
guagacaagagacgucgaa

SEQ ID NO: 1211484 - RNA, 19 nt, Homo sapiens
  misc_RNA (1)...(19): siRNA sense strand
caucagcagccauccauuc

SEQ ID NO: 1211485 - RNA, 19 nt, Homo sapiens
  misc_RNA (1)...(19): siRNA sense strand
gacaagagacgucgaaacc

SEQ ID NO: 1211486 - RNA, 19 nt, Homo sapiens
  misc_RNA (1)...(19): siRNA sense strand
cagaagugucucaguguug

SEQ ID NO: 1211487 - RNA, 19 nt, Homo sapiens
  misc_RNA (1)...(19): siRNA sense strand
ggaauacaccacggagauc

SEQ ID NO: 1211488 - RNA, 19 nt, Homo sapiens
  misc_RNA (1)...(19): siRNA sense strand
ccaaucugcaugaugaaug

SEQ ID NO: 1211489 - RNA, 19 nt, Homo sapiens
  misc_RNA (1)...(19): siRNA sense strand
ccagcuaccaucaccauca

SEQ ID NO: 1211490 - RNA, 19 nt, Homo sapiens
  misc_RNA (1)...(19): siRNA sense strand
cgucgaaaccgaugucagu

SEQ ID NO: 1211491 - RNA, 19 nt, Homo sapiens
  misc_RNA (1)...(19): siRNA sense strand
caacacccagagaucuuga

SEQ ID NO: 1211492 - RNA, 19 nt, Homo sapiens
  misc_RNA (1)...(19): siRNA sense strand
cacccagagaucuugauua

SEQ ID NO: 1211493 - RNA, 19 nt, Homo sapiens
  misc_RNA (1)...(19): siRNA sense strand
gcccagcaccuccauguac

SEQ ID NO: 1211494 - RNA, 19 nt, Homo sapiens
  misc_RNA (1)...(19): siRNA sense strand
ccuccagguuccaguuaug

SEQ ID NO: 1211495 - RNA, 19 nt, Homo sapiens
  misc_RNA (1)...(19): siRNA sense strand
cggaauacaccacggagau

SEQ ID NO: 1211496 - RNA, 19 nt, Homo sapiens
  misc_RNA (1)...(19): siRNA sense strand
ucaagagaacagugcagaa

SEQ ID NO: 1211497 - RNA, 19 nt, Homo sapiens
  misc_RNA (1)...(19): siRNA sense strand
gcuucccgcucuuccacuu

SEQ ID NO: 1211498 - RNA, 19 nt, Homo sapiens
  misc_RNA (1)...(19): siRNA sense strand
aaaagaaguuguccguaca

SEQ ID NO: 1211499 - RNA, 19 nt, Homo sapiens
  misc_RNA (1)...(19): siRNA sense strand
ucaguacugucgauuucag

SEQ ID NO: 1211500 - RNA, 19 nt, Homo sapiens
  misc_RNA (1)...(19): siRNA sense strand
aaagagcccauuacaacag

SEQ ID NO: 1211501 - RNA, 19 nt, Homo sapiens
  misc_RNA (1)...(19): siRNA sense strand
cgucugccuuccaaaccaa

SEQ ID NO: 1211502 - RNA, 19 nt, Homo sapiens
  misc_RNA (1)...(19): siRNA sense strand
ccagagaucuugauuauuc

SEQ ID NO: 1211503 - RNA, 19 nt, Homo sapiens
  misc_RNA (1)...(19): siRNA sense strand
gaaguuguccguacagaua

SEQ ID NO: 1211504 - RNA, 19 nt, Homo sapiens
  misc_RNA (1)...(19): siRNA sense strand
ccaaagagcccauuacaac

SEQ ID NO: 1211505 - RNA, 19 nt, Homo sapiens
  misc_RNA (1)...(19): siRNA sense strand
ccuccaaucugcaugauga

SEQ ID NO: 1211506 - RNA, 19 nt, Homo sapiens
  misc_RNA (1)...(19): siRNA sense strand
agacauacagcucggaaua

SEQ ID NO: 1211507 - RNA, 19 nt, Homo sapiens
  misc_RNA (1)...(19): siRNA sense strand
gcaccuccauguacuucaa

SEQ ID NO: 1211508 - RNA, 19 nt, Homo sapiens
  misc_RNA (1)...(19): siRNA sense strand
acaccaagcugaccaugga

SEQ ID NO: 1211509 - RNA, 19 nt, Homo sapiens
  misc_RNA (1)...(19): siRNA sense strand
caagagaacagugcagaaa

SEQ ID NO: 1211510 - RNA, 19 nt, Homo sapiens
  misc_RNA (1)...(19): siRNA sense strand
acccagagaucuugauuau

SEQ ID NO: 1211511 - RNA, 19 nt, Homo sapiens
  misc_RNA (1)...(19): siRNA sense strand
ucagaagugucucaguguu

SEQ ID NO: 1211512 - RNA, 19 nt, Homo sapiens
  misc_RNA (1)...(19): siRNA sense strand
caaaccaaagagcccauua

SEQ ID NO: 1211513 - RNA, 19 nt, Homo sapiens
  misc_RNA (1)...(19): siRNA sense strand
gaggucgucugccuuccaa

SEQ ID NO: 1211514 - RNA, 19 nt, Homo sapiens
  misc_RNA (1)...(19): siRNA sense strand
ucucaguguuggaauggua

SEQ ID NO: 1211515 - RNA, 19 nt, Homo sapiens
  misc_RNA (1)...(19): siRNA sense strand
caaagagcccauuacaaca

SEQ ID NO: 1211516 - RNA, 19 nt, Homo sapiens
  misc_RNA (1)...(19): siRNA sense strand
gagcaacuacgaacucaag

SEQ ID NO: 1211517 - RNA, 19 nt, Homo sapiens
  misc_RNA (1)...(19): siRNA sense strand
ugucaguacugucgauuuc

SEQ ID NO: 1211518 - RNA, 19 nt, Homo sapiens
  misc_RNA (1)...(19): siRNA sense strand
gaccuuggcagcacugaga

SEQ ID NO: 1211519 - RNA, 19 nt, Homo sapiens
  misc_RNA (1)...(19): siRNA sense strand
gaauacaccacggagauca

SEQ ID NO: 1211520 - RNA, 19 nt, Homo sapiens
  misc_RNA (1)...(19): siRNA sense strand
ucucagcccucuccaccuu

SEQ ID NO: 1211521 - RNA, 19 nt, Homo sapiens
  misc_RNA (1)...(19): siRNA sense strand
aaaccgaugucaguacugu

SEQ ID NO: 1211522 - RNA, 19 nt, Homo sapiens
  misc_RNA (1)...(19): siRNA sense strand
cgaaaccgaugucaguacu

SEQ ID NO: 1211523 - RNA, 19 nt, Homo sapiens
  misc_RNA (1)...(19): siRNA sense strand
acauacagcucggaauaca

SEQ ID NO: 1211524 - RNA, 19 nt, Homo sapiens
  misc_RNA (1)...(19): siRNA sense strand
guagacaagagacgucgaa

SEQ ID NO: 1211525 - RNA, 19 nt, Homo sapiens
  misc_RNA (1)...(19): siRNA sense strand
caucagcagccauccauuc

SEQ ID NO: 1211526 - RNA, 19 nt, Homo sapiens
  misc_RNA (1)...(19): siRNA sense strand
gacaagagacgucgaaacc

SEQ ID NO: 1211527 - RNA, 19 nt, Homo sapiens
  misc_RNA (1)...(19): siRNA sense strand
cagaagugucucaguguug

SEQ ID NO: 1211528 - RNA, 19 nt, Homo sapiens
  misc_RNA (1)...(19): siRNA sense strand
ggaauacaccacggagauc

SEQ ID NO: 1211529 - RNA, 19 nt, Homo sapiens
  misc_RNA (1)...(19): siRNA sense strand
ccaaucugcaugaugaaug

SEQ ID NO: 1211530 - RNA, 19 nt, Homo sapiens
  misc_RNA (1)...(19): siRNA sense strand
ccagcuaccaucaccauca

SEQ ID NO: 1211531 - RNA, 19 nt, Homo sapiens
  misc_RNA (1)...(19): siRNA sense strand
cgucgaaaccgaugucagu

SEQ ID NO: 1211532 - RNA, 19 nt, Homo sapiens
  misc_RNA (1)...(19): siRNA sense strand
caacacccagagaucuuga

SEQ ID NO: 1211533 - RNA, 19 nt, Homo sapiens
  misc_RNA (1)...(19): siRNA sense strand
cacccagagaucuugauua

SEQ ID NO: 1211534 - RNA, 19 nt, Homo sapiens
  misc_RNA (1)...(19): siRNA sense strand
gcccagcaccuccauguac

SEQ ID NO: 1211535 - RNA, 19 nt, Homo sapiens
  misc_RNA (1)...(19): siRNA sense strand
ccuccagguuccaguuaug

SEQ ID NO: 1211536 - RNA, 19 nt, Homo sapiens
  misc_RNA (1)...(19): siRNA sense strand
cggaauacaccacggagau

SEQ ID NO: 1211537 - RNA, 19 nt, Homo sapiens
  misc_RNA (1)...(19): siRNA sense strand
ucaagagaacagugcagaa

SEQ ID NO: 1211538 - RNA, 19 nt, Homo sapiens
  misc_RNA (1)...(19): siRNA sense strand
gcuucccgcucuuccacuu

SEQ ID NO: 1211539 - RNA, 19 nt, Homo sapiens
  misc_RNA (1)...(19): siRNA sense strand
aaaagaaguuguccguaca

SEQ ID NO: 1211540 - RNA, 19 nt, Homo sapiens
  misc_RNA (1)...(19): siRNA sense strand
ucaguacugucgauuucag

SEQ ID NO: 1211541 - RNA, 19 nt, Homo sapiens
  misc_RNA (1)...(19): siRNA sense strand
aaagagcccauuacaacag

SEQ ID NO: 1211542 - RNA, 19 nt, Homo sapiens
  misc_RNA (1)...(19): siRNA sense strand
cgucugccuuccaaaccaa

SEQ ID NO: 1211543 - RNA, 19 nt, Homo sapiens
  misc_RNA (1)...(19): siRNA sense strand
ccagagaucuugauuauuc

SEQ ID NO: 1211544 - RNA, 19 nt, Homo sapiens
  misc_RNA (1)...(19): siRNA sense strand
gaaguuguccguacagaua

SEQ ID NO: 1211545 - RNA, 19 nt, Homo sapiens
  misc_RNA (1)...(19): siRNA sense strand
ccaaagagcccauuacaac

SEQ ID NO: 1211546 - RNA, 19 nt, Homo sapiens
  misc_RNA (1)...(19): siRNA sense strand
ccuccaaucugcaugauga

SEQ ID NO: 1211547 - RNA, 19 nt, Homo sapiens
  misc_RNA (1)...(19): siRNA sense strand
agacauacagcucggaaua

SEQ ID NO: 1211548 - RNA, 19 nt, Homo sapiens
  misc_RNA (1)...(19): siRNA sense strand
gcaccuccauguacuucaa

SEQ ID NO: 1211549 - RNA, 19 nt, Homo sapiens
  misc_RNA (1)...(19): siRNA sense strand
acaccaagcugaccaugga

SEQ ID NO: 1211550 - RNA, 19 nt, Homo sapiens
  misc_RNA (1)...(19): siRNA sense strand
caagagaacagugcagaaa

SEQ ID NO: 1211551 - RNA, 19 nt, Homo sapiens
  misc_RNA (1)...(19): siRNA sense strand
acccagagaucuugauuau

SEQ ID NO: 1211552 - RNA, 19 nt, Homo sapiens
  misc_RNA (1)...(19): siRNA sense strand
ucagaagugucucaguguu

SEQ ID NO: 1211553 - RNA, 19 nt, Homo sapiens
  misc_RNA (1)...(19): siRNA sense strand
caaaccaaagagcccauua

SEQ ID NO: 1211554 - RNA, 19 nt, Homo sapiens
  misc_RNA (1)...(19): siRNA sense strand
gaggucgucugccuuccaa

SEQ ID NO: 1211555 - RNA, 19 nt, Homo sapiens
  misc_RNA (1)...(19): siRNA sense strand
ucucaguguuggaauggua

SEQ ID NO: 1211556 - RNA, 19 nt, Homo sapiens
  misc_RNA (1)...(19): siRNA sense strand
caaagagcccauuacaaca

SEQ ID NO: 1211557 - RNA, 19 nt, Homo sapiens
  misc_RNA (1)...(19): siRNA sense strand
gagcaacuacgaacucaag

SEQ ID NO: 1211558 - RNA, 19 nt, Homo sapiens
  misc_RNA (1)...(19): siRNA sense strand
ugucaguacugucgauuuc

SEQ ID NO: 1211559 - RNA, 19 nt, Homo sapiens
  misc_RNA (1)...(19): siRNA sense strand
gaccuuggcagcacugaga

SEQ ID NO: 1211560 - RNA, 19 nt, Homo sapiens
  misc_RNA (1)...(19): siRNA sense strand
gaauacaccacggagauca

SEQ ID NO: 1211561 - RNA, 19 nt, Homo sapiens
  misc_RNA (1)...(19): siRNA sense strand
ucucagcccucuccaccuu

SEQ ID NO: 1211562 - RNA, 19 nt, Homo sapiens
  misc_RNA (1)...(19): siRNA sense strand
aaaccgaugucaguacugu

SEQ ID NO: 1211563 - RNA, 19 nt, Homo sapiens
  misc_RNA (1)...(19): siRNA sense strand
cgaaaccgaugucaguacu

SEQ ID NO: 1211564 - RNA, 19 nt, Homo sapiens
  misc_RNA (1)...(19): siRNA sense strand
acauacagcucggaauaca

SEQ ID NO: 1211565 - RNA, 19 nt, Homo sapiens
  misc_RNA (1)...(19): siRNA sense strand
guagacaagagacgucgaa

SEQ ID NO: 1211566 - RNA, 19 nt, Homo sapiens
  misc_RNA (1)...(19): siRNA sense strand
caucagcagccauccauuc

SEQ ID NO: 1211567 - RNA, 19 nt, Homo sapiens
  misc_RNA (1)...(19): siRNA sense strand
gacaagagacgucgaaacc

SEQ ID NO: 1211568 - RNA, 19 nt, Homo sapiens
  misc_RNA (1)...(19): siRNA sense strand
cagaagugucucaguguug

SEQ ID NO: 1211569 - RNA, 19 nt, Homo sapiens
  misc_RNA (1)...(19): siRNA sense strand
ggaauacaccacggagauc

SEQ ID NO: 1211570 - RNA, 19 nt, Homo sapiens
  misc_RNA (1)...(19): siRNA sense strand
ccaaucugcaugaugaaug

SEQ ID NO: 1211571 - RNA, 19 nt, Homo sapiens
  misc_RNA (1)...(19): siRNA sense strand
ccagcuaccaucaccauca

SEQ ID NO: 1211572 - RNA, 19 nt, Homo sapiens
  misc_RNA (1)...(19): siRNA sense strand
cgucgaaaccgaugucagu

SEQ ID NO: 1211573 - RNA, 19 nt, Homo sapiens
  misc_RNA (1)...(19): siRNA sense strand
caacacccagagaucuuga

SEQ ID NO: 1211574 - RNA, 19 nt, Homo sapiens
  misc_RNA (1)...(19): siRNA sense strand
cacccagagaucuugauua

SEQ ID NO: 1211575 - RNA, 19 nt, Homo sapiens
  misc_RNA (1)...(19): siRNA sense strand
gcccagcaccuccauguac

SEQ ID NO: 1211576 - RNA, 19 nt, Homo sapiens
  misc_RNA (1)...(19): siRNA sense strand
ccuccagguuccaguuaug

SEQ ID NO: 1211577 - RNA, 19 nt, Homo sapiens
  misc_RNA (1)...(19): siRNA sense strand
cggaauacaccacggagau

SEQ ID NO: 1211578 - RNA, 19 nt, Homo sapiens
  misc_RNA (1)...(19): siRNA sense strand
ucaagagaacagugcagaa

SEQ ID NO: 1211579 - RNA, 19 nt, Homo sapiens
  misc_RNA (1)...(19): siRNA sense strand
gcuucccgcucuuccacuu

SEQ ID NO: 1211580 - RNA, 19 nt, Homo sapiens
  misc_RNA (1)...(19): siRNA sense strand
aaaagaaguuguccguaca

SEQ ID NO: 1211581 - RNA, 19 nt, Homo sapiens
  misc_RNA (1)...(19): siRNA sense strand
ucaguacugucgauuucag

SEQ ID NO: 1211582 - RNA, 19 nt, Homo sapiens
  misc_RNA (1)...(19): siRNA sense strand
aaagagcccauuacaacag

SEQ ID NO: 1211583 - RNA, 19 nt, Homo sapiens
  misc_RNA (1)...(19): siRNA sense strand
cgucugccuuccaaaccaa

SEQ ID NO: 1211584 - RNA, 19 nt, Homo sapiens
  misc_RNA (1)...(19): siRNA sense strand
ccagagaucuugauuauuc

SEQ ID NO: 1211585 - RNA, 19 nt, Homo sapiens
  misc_RNA (1)...(19): siRNA sense strand
gaaguuguccguacagaua

SEQ ID NO: 1211586 - RNA, 19 nt, Homo sapiens
  misc_RNA (1)...(19): siRNA sense strand
ccaaagagcccauuacaac

SEQ ID NO: 1211587 - RNA, 19 nt, Homo sapiens
  misc_RNA (1)...(19): siRNA sense strand
ccuccaaucugcaugauga

SEQ ID NO: 1211588 - RNA, 19 nt, Homo sapiens
  misc_RNA (1)...(19): siRNA sense strand
agacauacagcucggaaua

SEQ ID NO: 1211589 - RNA, 19 nt, Homo sapiens
  misc_RNA (1)...(19): siRNA sense strand
gcaccuccauguacuucaa

SEQ ID NO: 1211590 - RNA, 19 nt, Homo sapiens
  misc_RNA (1)...(19): siRNA sense strand
acaccaagcugaccaugga

SEQ ID NO: 1211591 - RNA, 19 nt, Homo sapiens
  misc_RNA (1)...(19): siRNA sense strand
caagagaacagugcagaaa

SEQ ID NO: 1211592 - RNA, 19 nt, Homo sapiens
  misc_RNA (1)...(19): siRNA sense strand
acccagagaucuugauuau

SEQ ID NO: 1211593 - RNA, 19 nt, Homo sapiens
  misc_RNA (1)...(19): siRNA sense strand
ucagaagugucucaguguu

SEQ ID NO: 1211594 - RNA, 19 nt, Homo sapiens
  misc_RNA (1)...(19): siRNA sense strand
caaaccaaagagcccauua

SEQ ID NO: 1211595 - RNA, 19 nt, Homo sapiens
  misc_RNA (1)...(19): siRNA sense strand
gaggucgucugccuuccaa

SEQ ID NO: 1211596 - RNA, 19 nt, Homo sapiens
  misc_RNA (1)...(19): siRNA sense strand
ucucaguguuggaauggua

SEQ ID NO: 1211597 - RNA, 19 nt, Homo sapiens
  misc_RNA (1)...(19): siRNA sense strand
caaagagcccauuacaaca

SEQ ID NO: 1211598 - RNA, 19 nt, Homo sapiens
  misc_RNA (1)...(19): siRNA sense strand
gagcaacuacgaacucaag

SEQ ID NO: 1211599 - RNA, 19 nt, Homo sapiens
  misc_RNA (1)...(19): siRNA sense strand
ugucaguacugucgauuuc

SEQ ID NO: 1211600 - RNA, 19 nt, Homo sapiens
  misc_RNA (1)...(19): siRNA sense strand
gaccuuggcagcacugaga

SEQ ID NO: 1211601 - RNA, 19 nt, Homo sapiens
  misc_RNA (1)...(19): siRNA sense strand
gaauacaccacggagauca

SEQ ID NO: 1211602 - RNA, 19 nt, Homo sapiens
  misc_RNA (1)...(19): siRNA sense strand
ucucagcccucuccaccuu

SEQ ID NO: 1211603 - RNA, 19 nt, Homo sapiens
  misc_RNA (1)...(19): siRNA sense strand
aaaccgaugucaguacugu

SEQ ID NO: 1211604 - RNA, 19 nt, Homo sapiens
  misc_RNA (1)...(19): siRNA sense strand
cgaaaccgaugucaguacu

SEQ ID NO: 1211605 - RNA, 19 nt, Homo sapiens
  misc_RNA (1)...(19): siRNA sense strand
acauacagcucggaauaca

SEQ ID NO: 1211606 - RNA, 19 nt, Homo sapiens
  misc_RNA (1)...(19): siRNA sense strand
guagacaagagacgucgaa

SEQ ID NO: 1211607 - RNA, 19 nt, Homo sapiens
  misc_RNA (1)...(19): siRNA sense strand
caucagcagccauccauuc

SEQ ID NO: 1211608 - RNA, 19 nt, Homo sapiens
  misc_RNA (1)...(19): siRNA sense strand
gacaagagacgucgaaacc

SEQ ID NO: 1211609 - RNA, 19 nt, Homo sapiens
  misc_RNA (1)...(19): siRNA sense strand
cagaagugucucaguguug

SEQ ID NO: 1211610 - RNA, 19 nt, Homo sapiens
  misc_RNA (1)...(19): siRNA sense strand
ggaauacaccacggagauc

SEQ ID NO: 1211611 - RNA, 19 nt, Homo sapiens
  misc_RNA (1)...(19): siRNA sense strand
ccaaucugcaugaugaaug

SEQ ID NO: 1211612 - RNA, 19 nt, Homo sapiens
  misc_RNA (1)...(19): siRNA sense strand
ccagcuaccaucaccauca

SEQ ID NO: 1211613 - RNA, 19 nt, Homo sapiens
  misc_RNA (1)...(19): siRNA sense strand
cgucgaaaccgaugucagu

SEQ ID NO: 1211614 - RNA, 19 nt, Homo sapiens
  misc_RNA (1)...(19): siRNA sense strand
caacacccagagaucuuga

SEQ ID NO: 1211615 - RNA, 19 nt, Homo sapiens
  misc_RNA (1)...(19): siRNA sense strand
cacccagagaucuugauua

SEQ ID NO: 1211616 - RNA, 19 nt, Homo sapiens
  misc_RNA (1)...(19): siRNA sense strand
gcccagcaccuccauguac

SEQ ID NO: 1211617 - RNA, 19 nt, Homo sapiens
  misc_RNA (1)...(19): siRNA sense strand
ccuccagguuccaguuaug

SEQ ID NO: 1211618 - RNA, 19 nt, Homo sapiens
  misc_RNA (1)...(19): siRNA sense strand
cggaauacaccacggagau

SEQ ID NO: 1211619 - RNA, 19 nt, Homo sapiens
  misc_RNA (1)...(19): siRNA sense strand
ucaagagaacagugcagaa

SEQ ID NO: 1211620 - RNA, 19 nt, Homo sapiens
  misc_RNA (1)...(19): siRNA sense strand
gcuucccgcucuuccacuu

SEQ ID NO: 1211621 - RNA, 19 nt, Homo sapiens
  misc_RNA (1)...(19): siRNA sense strand
aaaagaaguuguccguaca

SEQ ID NO: 1211622 - RNA, 19 nt, Homo sapiens
  misc_RNA (1)...(19): siRNA sense strand
ucaguacugucgauuucag

SEQ ID NO: 1211623 - RNA, 19 nt, Homo sapiens
  misc_RNA (1)...(19): siRNA sense strand
aaagagcccauuacaacag

SEQ ID NO: 1211624 - RNA, 19 nt, Homo sapiens
  misc_RNA (1)...(19): siRNA sense strand
cgucugccuuccaaaccaa

SEQ ID NO: 1211625 - RNA, 19 nt, Homo sapiens
  misc_RNA (1)...(19): siRNA sense strand
ccagagaucuugauuauuc

SEQ ID NO: 1211626 - RNA, 19 nt, Homo sapiens
  misc_RNA (1)...(19): siRNA sense strand
gaaguuguccguacagaua

SEQ ID NO: 1211627 - RNA, 19 nt, Homo sapiens
  misc_RNA (1)...(19): siRNA sense strand
ccaaagagcccauuacaac

SEQ ID NO: 1211628 - RNA, 19 nt, Homo sapiens
  misc_RNA (1)...(19): siRNA sense strand
ccuccaaucugcaugauga

SEQ ID NO: 1211629 - RNA, 19 nt, Homo sapiens
  misc_RNA (1)...(19): siRNA sense strand
agacauacagcucggaaua

SEQ ID NO: 1211630 - RNA, 19 nt, Homo sapiens
  misc_RNA (1)...(19): siRNA sense strand
gcaccuccauguacuucaa

SEQ ID NO: 1211631 - RNA, 19 nt, Homo sapiens
  misc_RNA (1)...(19): siRNA sense strand
acaccaagcugaccaugga

SEQ ID NO: 1211632 - RNA, 19 nt, Homo sapiens
  misc_RNA (1)...(19): siRNA sense strand
caagagaacagugcagaaa

SEQ ID NO: 1211633 - RNA, 19 nt, Homo sapiens
  misc_RNA (1)...(19): siRNA sense strand
acccagagaucuugauuau

SEQ ID NO: 1211634 - RNA, 19 nt, Homo sapiens
  misc_RNA (1)...(19): siRNA sense strand
ucagaagugucucaguguu

SEQ ID NO: 1211635 - RNA, 19 nt, Homo sapiens
  misc_RNA (1)...(19): siRNA sense strand
caaaccaaagagcccauua

SEQ ID NO: 1211636 - RNA, 19 nt, Homo sapiens
  misc_RNA (1)...(19): siRNA sense strand
gaggucgucugccuuccaa

SEQ ID NO: 1211637 - RNA, 19 nt, Homo sapiens
  misc_RNA (1)...(19): siRNA sense strand
ucucaguguuggaauggua

SEQ ID NO: 1211638 - RNA, 19 nt, Homo sapiens
  misc_RNA (1)...(19): siRNA sense strand
caaagagcccauuacaaca

SEQ ID NO: 1211639 - RNA, 19 nt, Homo sapiens
  misc_RNA (1)...(19): siRNA sense strand
gagcaacuacgaacucaag

SEQ ID NO: 1211640 - RNA, 19 nt, Homo sapiens
  misc_RNA (1)...(19): siRNA sense strand
ugucaguacugucgauuuc

SEQ ID NO: 1211641 - RNA, 19 nt, Homo sapiens
  misc_RNA (1)...(19): siRNA sense strand
gaccuuggcagcacugaga

SEQ ID NO: 1211642 - RNA, 19 nt, Homo sapiens
  misc_RNA (1)...(19): siRNA sense strand
gaauacaccacggagauca

SEQ ID NO: 1211643 - RNA, 19 nt, Homo sapiens
  misc_RNA (1)...(19): siRNA sense strand
ucucagcccucuccaccuu

SEQ ID NO: 1211644 - RNA, 19 nt, Homo sapiens
  misc_RNA (1)...(19): siRNA sense strand
aaaccgaugucaguacugu

SEQ ID NO: 1211645 - RNA, 19 nt, Homo sapiens
  misc_RNA (1)...(19): siRNA sense strand
cgaaaccgaugucaguacu

SEQ ID NO: 1211646 - RNA, 19 nt, Homo sapiens
  misc_RNA (1)...(19): siRNA sense strand
acauacagcucggaauaca

SEQ ID NO: 1211647 - RNA, 19 nt, Homo sapiens
  misc_RNA (1)...(19): siRNA sense strand
guagacaagagacgucgaa

SEQ ID NO: 1211648 - RNA, 19 nt, Homo sapiens
  misc_RNA (1)...(19): siRNA sense strand
caucagcagccauccauuc

SEQ ID NO: 1211649 - RNA, 19 nt, Homo sapiens
  misc_RNA (1)...(19): siRNA sense strand
gacaagagacgucgaaacc

SEQ ID NO: 1211650 - RNA, 19 nt, Homo sapiens
  misc_RNA (1)...(19): siRNA sense strand
cagaagugucucaguguug

SEQ ID NO: 1211651 - RNA, 19 nt, Homo sapiens
  misc_RNA (1)...(19): siRNA sense strand
ggaauacaccacggagauc

SEQ ID NO: 1211652 - RNA, 19 nt, Homo sapiens
  misc_RNA (1)...(19): siRNA sense strand
ccaaucugcaugaugaaug

SEQ ID NO: 1211653 - RNA, 19 nt, Homo sapiens
  misc_RNA (1)...(19): siRNA sense strand
ccagcuaccaucaccauca

SEQ ID NO: 1211654 - RNA, 19 nt, Homo sapiens
  misc_RNA (1)...(19): siRNA sense strand
cgucgaaaccgaugucagu

SEQ ID NO: 1211655 - RNA, 19 nt, Homo sapiens
  misc_RNA (1)...(19): siRNA sense strand
caacacccagagaucuuga

SEQ ID NO: 1211656 - RNA, 19 nt, Homo sapiens
  misc_RNA (1)...(19): siRNA sense strand
cacccagagaucuugauua

SEQ ID NO: 1211657 - RNA, 19 nt, Homo sapiens
  misc_RNA (1)...(19): siRNA sense strand
gcccagcaccuccauguac

SEQ ID NO: 1211658 - RNA, 19 nt, Homo sapiens
  misc_RNA (1)...(19): siRNA sense strand
ccuccagguuccaguuaug

SEQ ID NO: 1211659 - RNA, 19 nt, Homo sapiens
  misc_RNA (1)...(19): siRNA sense strand
cggaauacaccacggagau

SEQ ID NO: 1211660 - RNA, 19 nt, Homo sapiens
  misc_RNA (1)...(19): siRNA sense strand
ucaagagaacagugcagaa

SEQ ID NO: 1211661 - RNA, 19 nt, Homo sapiens
  misc_RNA (1)...(19): siRNA sense strand
gcuucccgcucuuccacuu

SEQ ID NO: 1211662 - RNA, 19 nt, Homo sapiens
  misc_RNA (1)...(19): siRNA sense strand
aaaagaaguuguccguaca

SEQ ID NO: 1211663 - RNA, 19 nt, Homo sapiens
  misc_RNA (1)...(19): siRNA sense strand
ucaguacugucgauuucag

SEQ ID NO: 1211664 - RNA, 19 nt, Homo sapiens
  misc_RNA (1)...(19): siRNA sense strand
aaagagcccauuacaacag

SEQ ID NO: 1211665 - RNA, 19 nt, Homo sapiens
  misc_RNA (1)...(19): siRNA sense strand
cgucugccuuccaaaccaa

SEQ ID NO: 1211666 - RNA, 19 nt, Homo sapiens
  misc_RNA (1)...(19): siRNA sense strand
ccagagaucuugauuauuc

SEQ ID NO: 1211667 - RNA, 19 nt, Homo sapiens
  misc_RNA (1)...(19): siRNA sense strand
gaaguuguccguacagaua

SEQ ID NO: 1211668 - RNA, 19 nt, Homo sapiens
  misc_RNA (1)...(19): siRNA sense strand
ccaaagagcccauuacaac

SEQ ID NO: 1211669 - RNA, 19 nt, Homo sapiens
  misc_RNA (1)...(19): siRNA sense strand
ccuccaaucugcaugauga

SEQ ID NO: 1211670 - RNA, 19 nt, Homo sapiens
  misc_RNA (1)...(19): siRNA sense strand
agacauacagcucggaaua

SEQ ID NO: 1211671 - RNA, 19 nt, Homo sapiens
  misc_RNA (1)...(19): siRNA sense strand
gcaccuccauguacuucaa

SEQ ID NO: 1211672 - RNA, 19 nt, Homo sapiens
  misc_RNA (1)...(19): siRNA sense strand
acaccaagcugaccaugga

SEQ ID NO: 1211673 - RNA, 19 nt, Homo sapiens
  misc_RNA (1)...(19): siRNA sense strand
caagagaacagugcagaaa

SEQ ID NO: 1211674 - RNA, 19 nt, Homo sapiens
  misc_RNA (1)...(19): siRNA sense strand
acccagagaucuugauuau

SEQ ID NO: 1211675 - RNA, 19 nt, Homo sapiens
  misc_RNA (1)...(19): siRNA sense strand
ucagaagugucucaguguu

SEQ ID NO: 1211676 - RNA, 19 nt, Homo sapiens
  misc_RNA (1)...(19): siRNA sense strand
caaaccaaagagcccauua

SEQ ID NO: 1211677 - RNA, 19 nt, Homo sapiens
  misc_RNA (1)...(19): siRNA sense strand
gaggucgucugccuuccaa

SEQ ID NO: 1211678 - RNA, 19 nt, Homo sapiens
  misc_RNA (1)...(19): siRNA sense strand
ucucaguguuggaauggua

SEQ ID NO: 1211679 - RNA, 19 nt, Homo sapiens
  misc_RNA (1)...(19): siRNA sense strand
caaagagcccauuacaaca

SEQ ID NO: 1211680 - RNA, 19 nt, Homo sapiens
  misc_RNA (1)...(19): siRNA sense strand
gagcaacuacgaacucaag

SEQ ID NO: 1211681 - RNA, 19 nt, Homo sapiens
  misc_RNA (1)...(19): siRNA sense strand
ugucaguacugucgauuuc

SEQ ID NO: 1211682 - RNA, 19 nt, Homo sapiens
  misc_RNA (1)...(19): siRNA sense strand
gaccuuggcagcacugaga

SEQ ID NO: 1211683 - RNA, 19 nt, Homo sapiens
  misc_RNA (1)...(19): siRNA sense strand
gaauacaccacggagauca

SEQ ID NO: 1211684 - RNA, 19 nt, Homo sapiens
  misc_RNA (1)...(19): siRNA sense strand
ucucagcccucuccaccuu

SEQ ID NO: 1211685 - RNA, 19 nt, Homo sapiens
  misc_RNA (1)...(19): siRNA sense strand
aaaccgaugucaguacugu

SEQ ID NO: 1211686 - RNA, 19 nt, Homo sapiens
  misc_RNA (1)...(19): siRNA sense strand
cgaaaccgaugucaguacu

SEQ ID NO: 1211687 - RNA, 19 nt, Homo sapiens
  misc_RNA (1)...(19): siRNA sense strand
acauacagcucggaauaca

SEQ ID NO: 1211688 - RNA, 19 nt, Homo sapiens
  misc_RNA (1)...(19): siRNA sense strand
guagacaagagacgucgaa

SEQ ID NO: 1211689 - RNA, 19 nt, Homo sapiens
  misc_RNA (1)...(19): siRNA sense strand
caucagcagccauccauuc

SEQ ID NO: 1211690 - RNA, 19 nt, Homo sapiens
  misc_RNA (1)...(19): siRNA sense strand
gacaagagacgucgaaacc

SEQ ID NO: 1211691 - RNA, 19 nt, Homo sapiens
  misc_RNA (1)...(19): siRNA sense strand
cagaagugucucaguguug

SEQ ID NO: 1211692 - RNA, 19 nt, Homo sapiens
  misc_RNA (1)...(19): siRNA sense strand
ggaauacaccacggagauc

SEQ ID NO: 1211693 - RNA, 19 nt, Homo sapiens
  misc_RNA (1)...(19): siRNA sense strand
ccaaucugcaugaugaaug

SEQ ID NO: 1211694 - RNA, 19 nt, Homo sapiens
  misc_RNA (1)...(19): siRNA sense strand
ccagcuaccaucaccauca

SEQ ID NO: 1211695 - RNA, 19 nt, Homo sapiens
  misc_RNA (1)...(19): siRNA sense strand
cgucgaaaccgaugucagu

SEQ ID NO: 1211696 - RNA, 19 nt, Homo sapiens
  misc_RNA (1)...(19): siRNA sense strand
caacacccagagaucuuga

SEQ ID NO: 1211697 - RNA, 19 nt, Homo sapiens
  misc_RNA (1)...(19): siRNA sense strand
cacccagagaucuugauua

SEQ ID NO: 1211698 - RNA, 19 nt, Homo sapiens
  misc_RNA (1)...(19): siRNA sense strand
gcccagcaccuccauguac

SEQ ID NO: 1211699 - RNA, 19 nt, Homo sapiens
  misc_RNA (1)...(19): siRNA sense strand
ccuccagguuccaguuaug

SEQ ID NO: 1211700 - RNA, 19 nt, Homo sapiens
  misc_RNA (1)...(19): siRNA sense strand
cggaauacaccacggagau

SEQ ID NO: 1211701 - RNA, 19 nt, Homo sapiens
  misc_RNA (1)...(19): siRNA sense strand
ucaagagaacagugcagaa

SEQ ID NO: 1211702 - RNA, 19 nt, Homo sapiens
  misc_RNA (1)...(19): siRNA sense strand
gcuucccgcucuuccacuu

SEQ ID NO: 1211703 - RNA, 19 nt, Homo sapiens
  misc_RNA (1)...(19): siRNA sense strand
aaaagaaguuguccguaca

SEQ ID NO: 1211704 - RNA, 19 nt, Homo sapiens
  misc_RNA (1)...(19): siRNA sense strand
ucaguacugucgauuucag

SEQ ID NO: 1211705 - RNA, 19 nt, Homo sapiens
  misc_RNA (1)...(19): siRNA sense strand
aaagagcccauuacaacag

SEQ ID NO: 1211706 - RNA, 19 nt, Homo sapiens
  misc_RNA (1)...(19): siRNA sense strand
cgucugccuuccaaaccaa

SEQ ID NO: 1211707 - RNA, 19 nt, Homo sapiens
  misc_RNA (1)...(19): siRNA sense strand
ccagagaucuugauuauuc

SEQ ID NO: 1211708 - RNA, 19 nt, Homo sapiens
  misc_RNA (1)...(19): siRNA sense strand
gaaguuguccguacagaua

SEQ ID NO: 1211709 - RNA, 19 nt, Homo sapiens
  misc_RNA (1)...(19): siRNA sense strand
ccaaagagcccauuacaac

SEQ ID NO: 1211710 - RNA, 19 nt, Homo sapiens
  misc_RNA (1)...(19): siRNA sense strand
ccuccaaucugcaugauga

SEQ ID NO: 1211711 - RNA, 19 nt, Homo sapiens
  misc_RNA (1)...(19): siRNA sense strand
agacauacagcucggaaua

SEQ ID NO: 1211712 - RNA, 19 nt, Homo sapiens
  misc_RNA (1)...(19): siRNA sense strand
gcaccuccauguacuucaa

SEQ ID NO: 1211713 - RNA, 19 nt, Homo sapiens
  misc_RNA (1)...(19): siRNA sense strand
acaccaagcugaccaugga

SEQ ID NO: 1211714 - RNA, 19 nt, Homo sapiens
  misc_RNA (1)...(19): siRNA sense strand
caagagaacagugcagaaa

SEQ ID NO: 1211715 - RNA, 19 nt, Homo sapiens
  misc_RNA (1)...(19): siRNA sense strand
acccagagaucuugauuau

SEQ ID NO: 1211716 - RNA, 19 nt, Homo sapiens
  misc_RNA (1)...(19): siRNA sense strand
ucagaagugucucaguguu

SEQ ID NO: 1211717 - RNA, 19 nt, Homo sapiens
  misc_RNA (1)...(19): siRNA sense strand
caaaccaaagagcccauua

SEQ ID NO: 1211718 - RNA, 19 nt, Homo sapiens
  misc_RNA (1)...(19): siRNA sense strand
gaggucgucugccuuccaa

SEQ ID NO: 1211719 - RNA, 19 nt, Homo sapiens
  misc_RNA (1)...(19): siRNA sense strand
ucucaguguuggaauggua

SEQ ID NO: 1211720 - RNA, 19 nt, Homo sapiens
  misc_RNA (1)...(19): siRNA sense strand
caaagagcccauuacaaca

SEQ ID NO: 1211721 - RNA, 19 nt, Homo sapiens
  misc_RNA (1)...(19): siRNA sense strand
gagcaacuacgaacucaag

SEQ ID NO: 1211722 - RNA, 19 nt, Homo sapiens
  misc_RNA (1)...(19): siRNA sense strand
ugucaguacugucgauuuc

SEQ ID NO: 1211723 - RNA, 19 nt, Homo sapiens
  misc_RNA (1)...(19): siRNA sense strand
gaccuuggcagcacugaga

SEQ ID NO: 1211724 - RNA, 19 nt, Homo sapiens
  misc_RNA (1)...(19): siRNA sense strand
gaauacaccacggagauca

SEQ ID NO: 1211725 - RNA, 19 nt, Homo sapiens
  misc_RNA (1)...(19): siRNA sense strand
ucucagcccucuccaccuu

SEQ ID NO: 1211726 - RNA, 19 nt, Homo sapiens
  misc_RNA (1)...(19): siRNA sense strand
aaaccgaugucaguacugu

SEQ ID NO: 1211727 - RNA, 19 nt, Homo sapiens
  misc_RNA (1)...(19): siRNA sense strand
cgaaaccgaugucaguacu

SEQ ID NO: 1211728 - RNA, 19 nt, Homo sapiens
  misc_RNA (1)...(19): siRNA sense strand
acauacagcucggaauaca

SEQ ID NO: 1211729 - RNA, 19 nt, Homo sapiens
  misc_RNA (1)...(19): siRNA sense strand
guagacaagagacgucgaa

SEQ ID NO: 1211730 - RNA, 19 nt, Homo sapiens
  misc_RNA (1)...(19): siRNA sense strand
caucagcagccauccauuc

SEQ ID NO: 1211731 - RNA, 19 nt, Homo sapiens
  misc_RNA (1)...(19): siRNA sense strand
gacaagagacgucgaaacc

SEQ ID NO: 1211732 - RNA, 19 nt, Homo sapiens
  misc_RNA (1)...(19): siRNA sense strand
cagaagugucucaguguug

SEQ ID NO: 1211733 - RNA, 19 nt, Homo sapiens
  misc_RNA (1)...(19): siRNA sense strand
ggaauacaccacggagauc

SEQ ID NO: 1211734 - RNA, 19 nt, Homo sapiens
  misc_RNA (1)...(19): siRNA sense strand
ccaaucugcaugaugaaug

SEQ ID NO: 1211735 - RNA, 19 nt, Homo sapiens
  misc_RNA (1)...(19): siRNA sense strand
ccagcuaccaucaccauca

SEQ ID NO: 1211736 - RNA, 19 nt, Homo sapiens
  misc_RNA (1)...(19): siRNA sense strand
cgucgaaaccgaugucagu

SEQ ID NO: 1211737 - RNA, 19 nt, Homo sapiens
  misc_RNA (1)...(19): siRNA sense strand
caacacccagagaucuuga

SEQ ID NO: 1211738 - RNA, 19 nt, Homo sapiens
  misc_RNA (1)...(19): siRNA sense strand
cacccagagaucuugauua

SEQ ID NO: 1211739 - RNA, 19 nt, Homo sapiens
  misc_RNA (1)...(19): siRNA sense strand
gcccagcaccuccauguac

SEQ ID NO: 1211740 - RNA, 19 nt, Homo sapiens
  misc_RNA (1)...(19): siRNA sense strand
ccuccagguuccaguuaug

SEQ ID NO: 1211741 - RNA, 19 nt, Homo sapiens
  misc_RNA (1)...(19): siRNA sense strand
cggaauacaccacggagau

SEQ ID NO: 1211742 - RNA, 19 nt, Homo sapiens
  misc_RNA (1)...(19): siRNA sense strand
ucaagagaacagugcagaa

SEQ ID NO: 1211743 - RNA, 19 nt, Homo sapiens
  misc_RNA (1)...(19): siRNA sense strand
gcuucccgcucuuccacuu

SEQ ID NO: 1211744 - RNA, 19 nt, Homo sapiens
  misc_RNA (1)...(19): siRNA sense strand
aaaagaaguuguccguaca

SEQ ID NO: 1211745 - RNA, 19 nt, Homo sapiens
  misc_RNA (1)...(19): siRNA sense strand
ucaguacugucgauuucag

SEQ ID NO: 1211746 - RNA, 19 nt, Homo sapiens
  misc_RNA (1)...(19): siRNA sense strand
aaagagcccauuacaacag

SEQ ID NO: 1211747 - RNA, 19 nt, Homo sapiens
  misc_RNA (1)...(19): siRNA sense strand
cgucugccuuccaaaccaa

SEQ ID NO: 1211748 - RNA, 19 nt, Homo sapiens
  misc_RNA (1)...(19): siRNA sense strand
gaaaguccaugucugucua

SEQ ID NO: 1211749 - RNA, 19 nt, Homo sapiens
  misc_RNA (1)...(19): siRNA sense strand
gcaagauguuuaucauuga

SEQ ID NO: 1211750 - RNA, 19 nt, Homo sapiens
  misc_RNA (1)...(19): siRNA sense strand
gaccaucacugccuuuguu

SEQ ID NO: 1211751 - RNA, 19 nt, Homo sapiens
  misc_RNA (1)...(19): siRNA sense strand
ccaaaggugucuaugagaa

SEQ ID NO: 1211752 - RNA, 19 nt, Homo sapiens
  misc_RNA (1)...(19): siRNA sense strand
ggaggccgcucaugcuaaa

SEQ ID NO: 1211753 - RNA, 19 nt, Homo sapiens
  misc_RNA (1)...(19): siRNA sense strand
caaagucccugcagacauc

SEQ ID NO: 1211754 - RNA, 19 nt, Homo sapiens
  misc_RNA (1)...(19): siRNA sense strand
gaucaaggcucgggacauc

SEQ ID NO: 1211755 - RNA, 19 nt, Homo sapiens
  misc_RNA (1)...(19): siRNA sense strand
gcaagucagugcaaaggau

SEQ ID NO: 1211756 - RNA, 19 nt, Homo sapiens
  misc_RNA (1)...(19): siRNA sense strand
gcaccgagauugggaagau

SEQ ID NO: 1211757 - RNA, 19 nt, Homo sapiens
  misc_RNA (1)...(19): siRNA sense strand
gcacagccauugccaucug

SEQ ID NO: 1211758 - RNA, 19 nt, Homo sapiens
  misc_RNA (1)...(19): siRNA sense strand
ggagaaauacggccucaau

SEQ ID NO: 1211759 - RNA, 19 nt, Homo sapiens
  misc_RNA (1)...(19): siRNA sense strand
gcaccucugucaucuguuc

SEQ ID NO: 1211760 - RNA, 19 nt, Homo sapiens
  misc_RNA (1)...(19): siRNA sense strand
gaagauccgagaccaaaug

SEQ ID NO: 1211761 - RNA, 19 nt, Homo sapiens
  misc_RNA (1)...(19): siRNA sense strand
caacuucuccaccaucgua

SEQ ID NO: 1211762 - RNA, 19 nt, Homo sapiens
  misc_RNA (1)...(19): siRNA sense strand
ggaggaauguuuggccuau

SEQ ID NO: 1211763 - RNA, 19 nt, Homo sapiens
  misc_RNA (1)...(19): siRNA sense strand
ugcaagauguuuaucauug

SEQ ID NO: 1211764 - RNA, 19 nt, Homo sapiens
  misc_RNA (1)...(19): siRNA sense strand
agcggaaucuggagaaaua

SEQ ID NO: 1211765 - RNA, 19 nt, Homo sapiens
  misc_RNA (1)...(19): siRNA sense strand
ggacaucugccuccugaau

SEQ ID NO: 1211766 - RNA, 19 nt, Homo sapiens
  misc_RNA (1)...(19): siRNA sense strand
uggaguaccugcaguccua

SEQ ID NO: 1211767 - RNA, 19 nt, Homo sapiens
  misc_RNA (1)...(19): siRNA sense strand
agaaauacggccucaauga

SEQ ID NO: 1211768 - RNA, 19 nt, Homo sapiens
  misc_RNA (1)...(19): siRNA sense strand
ggacaacacccacuuugag

SEQ ID NO: 1211769 - RNA, 19 nt, Homo sapiens
  misc_RNA (1)...(19): siRNA sense strand
ugugggagcuggugauaga

SEQ ID NO: 1211770 - RNA, 19 nt, Homo sapiens
  misc_RNA (1)...(19): siRNA sense strand
ggccaaaggugucuaugag

SEQ ID NO: 1211771 - RNA, 19 nt, Homo sapiens
  misc_RNA (1)...(19): siRNA sense strand
uggagaagaugaauguguu

SEQ ID NO: 1211772 - RNA, 19 nt, Homo sapiens
  misc_RNA (1)...(19): siRNA sense strand
acaacaacaugaagcaguu

SEQ ID NO: 1211773 - RNA, 19 nt, Homo sapiens
  misc_RNA (1)...(19): siRNA sense strand
aggaauguuuggccuauuu

SEQ ID NO: 1211774 - RNA, 19 nt, Homo sapiens
  misc_RNA (1)...(19): siRNA sense strand
caacaagggcacagccauu

SEQ ID NO: 1211775 - RNA, 19 nt, Homo sapiens
  misc_RNA (1)...(19): siRNA sense strand
ugauagagcaguuugaaga

SEQ ID NO: 1211776 - RNA, 19 nt, Homo sapiens
  misc_RNA (1)...(19): siRNA sense strand
gaugagaucacagccauga

SEQ ID NO: 1211777 - RNA, 19 nt, Homo sapiens
  misc_RNA (1)...(19): siRNA sense strand
gcagaagcuggaugaguuu

SEQ ID NO: 1211778 - RNA, 19 nt, Homo sapiens
  misc_RNA (1)...(19): siRNA sense strand
gucuguaucugucaucaaa

SEQ ID NO: 1211779 - RNA, 19 nt, Homo sapiens
  misc_RNA (1)...(19): siRNA sense strand
ucgaggcccugaaggagua

SEQ ID NO: 1211780 - RNA, 19 nt, Homo sapiens
  misc_RNA (1)...(19): siRNA sense strand
ucauugggcucgacgaaau

SEQ ID NO: 1211781 - RNA, 19 nt, Homo sapiens
  misc_RNA (1)...(19): siRNA sense strand
ggucaucucccucaucugu

SEQ ID NO: 1211782 - RNA, 19 nt, Homo sapiens
  misc_RNA (1)...(19): siRNA sense strand
gggaagauccgagaccaaa

SEQ ID NO: 1211783 - RNA, 19 nt, Homo sapiens
  misc_RNA (1)...(19): siRNA sense strand
ggaauucacccuggaguuc

SEQ ID NO: 1211784 - RNA, 19 nt, Homo sapiens
  misc_RNA (1)...(19): siRNA sense strand
ccagcugacucacuucaug

SEQ ID NO: 1211785 - RNA, 19 nt, Homo sapiens
  misc_RNA (1)...(19): siRNA sense strand
ucgcacaaguccaagauug

SEQ ID NO: 1211786 - RNA, 19 nt, Homo sapiens
  misc_RNA (1)...(19): siRNA sense strand
agcagaagcuggaugaguu

SEQ ID NO: 1211787 - RNA, 19 nt, Homo sapiens
  misc_RNA (1)...(19): siRNA sense strand
gacaagaagaacaugcuuu

SEQ ID NO: 1211788 - RNA, 19 nt, Homo sapiens
  misc_RNA (1)...(19): siRNA sense strand
gcaaugacuccuccuugga

SEQ ID NO: 1211789 - RNA, 19 nt, Homo sapiens
  misc_RNA (1)...(19): siRNA sense strand
gagaaauacggccucaaug

SEQ ID NO: 1211790 - RNA, 19 nt, Homo sapiens
  misc_RNA (1)...(19): siRNA sense strand
gaggacaacacccacuuug

SEQ ID NO: 1211791 - RNA, 19 nt, Homo sapiens
  misc_RNA (1)...(19): siRNA sense strand
ggaugggccucaugucaac

SEQ ID NO: 1211792 - RNA, 19 nt, Homo sapiens
  misc_RNA (1)...(19): siRNA sense strand
gacaggugauggcgucaau

SEQ ID NO: 1211793 - RNA, 19 nt, Homo sapiens
  misc_RNA (1)...(19): siRNA sense strand
uaucaacauuggccacuuc

SEQ ID NO: 1211794 - RNA, 19 nt, Homo sapiens
  misc_RNA (1)...(19): siRNA sense strand
acaucugccuccugaauga

SEQ ID NO: 1211795 - RNA, 19 nt, Homo sapiens
  misc_RNA (1)...(19): siRNA sense strand
ucgacgaaauccucaaguu

SEQ ID NO: 1211796 - RNA, 19 nt, Homo sapiens
  misc_RNA (1)...(19): siRNA sense strand
caagacugccucugagaug

SEQ ID NO: 1211797 - RNA, 19 nt, Homo sapiens
  misc_RNA (1)...(19): siRNA sense strand
ugaagaaggcugagauugg

SEQ ID NO: 1211798 - RNA, 19 nt, Homo sapiens
  misc_RNA (1)...(19): siRNA sense strand
ggacaagaagaacaugcuu

SEQ ID NO: 1211799 - RNA, 19 nt, Homo sapiens
  misc_RNA (1)...(19): siRNA sense strand
cgacgaaauccucaaguuc

SEQ ID NO: 1211800 - RNA, 19 nt, Homo sapiens
  misc_RNA (1)...(19): siRNA sense strand
gaaaugguccuggaugacu

SEQ ID NO: 1211801 - RNA, 19 nt, Homo sapiens
  misc_RNA (1)...(19): siRNA sense strand
ucauggcggugaucaagga

SEQ ID NO: 1211802 - RNA, 19 nt, Homo sapiens
  misc_RNA (1)...(19): siRNA sense strand
gaagcuugcccuccguaga

SEQ ID NO: 1211803 - RNA, 19 nt, Homo sapiens
  misc_RNA (1)...(19): siRNA sense strand
ugagcucccugcugaggaa

SEQ ID NO: 1211804 - RNA, 19 nt, Homo sapiens
  misc_RNA (1)...(19): siRNA sense strand
guucauccgcuaccucauu

SEQ ID NO: 1211805 - RNA, 19 nt, Homo sapiens
  misc_RNA (1)...(19): siRNA sense strand
agacggaccugacauucgu

SEQ ID NO: 1211806 - RNA, 19 nt, Homo sapiens
  misc_RNA (1)...(19): siRNA sense strand
ggaccaaguuaagcggaau

SEQ ID NO: 1211807 - RNA, 19 nt, Homo sapiens
  misc_RNA (1)...(19): siRNA sense strand
cugaaugaguucuccauca

SEQ ID NO: 1211808 - RNA, 19 nt, Homo sapiens
  misc_RNA (1)...(19): siRNA sense strand
guggcugucuggcuuauca

SEQ ID NO: 1211809 - RNA, 19 nt, Homo sapiens
  misc_RNA (1)...(19): siRNA sense strand
ccacagaacaggacaagac

SEQ ID NO: 1211810 - RNA, 19 nt, Homo sapiens
  misc_RNA (1)...(19): siRNA sense strand
gaggaauguuuggccuauu

SEQ ID NO: 1211811 - RNA, 19 nt, Homo sapiens
  misc_RNA (1)...(19): siRNA sense strand
caucacugccuuuguugaa

SEQ ID NO: 1211812 - RNA, 19 nt, Homo sapiens
  misc_RNA (1)...(19): siRNA sense strand
gcacuuccucauccucuau

SEQ ID NO: 1211813 - RNA, 19 nt, Homo sapiens
  misc_RNA (1)...(19): siRNA sense strand
ggacuucaacgaggccaaa

SEQ ID NO: 1211814 - RNA, 19 nt, Homo sapiens
  misc_RNA (1)...(19): siRNA sense strand
gaccgcaagucagugcaaa

SEQ ID NO: 1211815 - RNA, 19 nt, Homo sapiens
  misc_RNA (1)...(19): siRNA sense strand
uaagcggaaucuggagaaa

SEQ ID NO: 1211816 - RNA, 19 nt, Homo sapiens
  misc_RNA (1)...(19): siRNA sense strand
guucaacacggaugugaga

SEQ ID NO: 1211817 - RNA, 19 nt, Homo sapiens
  misc_RNA (1)...(19): siRNA sense strand
gccaucuacuacuuuaaga

SEQ ID NO: 1211818 - RNA, 19 nt, Homo sapiens
  misc_RNA (1)...(19): siRNA sense strand
gugauccgccagcuaauga

SEQ ID NO: 1211819 - RNA, 19 nt, Homo sapiens
  misc_RNA (1)...(19): siRNA sense strand
guggagcccucgcacaagu

SEQ ID NO: 1211820 - RNA, 19 nt, Homo sapiens
  misc_RNA (1)...(19): siRNA sense strand
ggugauagagcaguuugaa

SEQ ID NO: 1211821 - RNA, 19 nt, Homo sapiens
  misc_RNA (1)...(19): siRNA sense strand
guccaugucugucuauugc

SEQ ID NO: 1211822 - RNA, 19 nt, Homo sapiens
  misc_RNA (1)...(19): siRNA sense strand
gaaggugaagagaccauca

SEQ ID NO: 1211823 - RNA, 19 nt, Homo sapiens
  misc_RNA (1)...(19): siRNA sense strand
caacauuggccacuucaac

SEQ ID NO: 1211824 - RNA, 19 nt, Homo sapiens
  misc_RNA (1)...(19): siRNA sense strand
ggagcuggccaccaucugu

SEQ ID NO: 1211825 - RNA, 19 nt, Homo sapiens
  misc_RNA (1)...(19): siRNA sense strand
gcucaugguccucaagauc

SEQ ID NO: 1211826 - RNA, 19 nt, Homo sapiens
  misc_RNA (1)...(19): siRNA sense strand
caggugauggcgucaauga

SEQ ID NO: 1211827 - RNA, 19 nt, Homo sapiens
  misc_RNA (1)...(19): siRNA sense strand
ugaaugaguucuccaucac

SEQ ID NO: 1211828 - RNA, 19 nt, Homo sapiens
  misc_RNA (1)...(19): siRNA sense strand
ccggcgaauuggcaucuuu

SEQ ID NO: 1211829 - RNA, 19 nt, Homo sapiens
  misc_RNA (1)...(19): siRNA sense strand
ucugugcccucugcaauga

SEQ ID NO: 1211830 - RNA, 19 nt, Homo sapiens
  misc_RNA (1)...(19): siRNA sense strand
ggaguaugagccagagaug

SEQ ID NO: 1211831 - RNA, 19 nt, Homo sapiens
  misc_RNA (1)...(19): siRNA sense strand
caucgaccgcuguaacuau

SEQ ID NO: 1211832 - RNA, 19 nt, Homo sapiens
  misc_RNA (1)...(19): siRNA sense strand
gggcugcugugggcaacaa

SEQ ID NO: 1211833 - RNA, 19 nt, Homo sapiens
  misc_RNA (1)...(19): siRNA sense strand
caagauguuuaucauugac

SEQ ID NO: 1211834 - RNA, 19 nt, Homo sapiens
  misc_RNA (1)...(19): siRNA sense strand
cugcaccucugucaucugu

SEQ ID NO: 1211835 - RNA, 19 nt, Homo sapiens
  misc_RNA (1)...(19): siRNA sense strand
ucaaccaggacaagaagaa

SEQ ID NO: 1211836 - RNA, 19 nt, Homo sapiens
  misc_RNA (1)...(19): siRNA sense strand
ggaagauccgagaccaaau

SEQ ID NO: 1211837 - RNA, 19 nt, Homo sapiens
  misc_RNA (1)...(19): siRNA sense strand
cgaggacaacacccacuuu

SEQ ID NO: 1211838 - RNA, 19 nt, Homo sapiens
  misc_RNA (1)...(19): siRNA sense strand
ugggcgagguggucuguau

SEQ ID NO: 1211839 - RNA, 19 nt, Homo sapiens
  misc_RNA (1)...(19): siRNA sense strand
ggugcuggcugacgacaac

SEQ ID NO: 1211840 - RNA, 19 nt, Homo sapiens
  misc_RNA (1)...(19): siRNA sense strand
gggcugcaccucugucauc

SEQ ID NO: 1211841 - RNA, 19 nt, Homo sapiens
  misc_RNA (1)...(19): siRNA sense strand
ucaucucccucaucugugu

SEQ ID NO: 1211842 - RNA, 19 nt, Homo sapiens
  misc_RNA (1)...(19): siRNA sense strand
ggagaagaugaauguguuc

SEQ ID NO: 1211843 - RNA, 19 nt, Homo sapiens
  misc_RNA (1)...(19): siRNA sense strand
gacaucugccuccugaaug

SEQ ID NO: 1211844 - RNA, 19 nt, Homo sapiens
  misc_RNA (1)...(19): siRNA sense strand
gagcagcugccuggugguu

SEQ ID NO: 1211845 - RNA, 19 nt, Homo sapiens
  misc_RNA (1)...(19): siRNA sense strand
ucggugauccgccagcuaa

SEQ ID NO: 1211846 - RNA, 19 nt, Homo sapiens
  misc_RNA (1)...(19): siRNA sense strand
uucauccgcuaccucauuu

SEQ ID NO: 1211847 - RNA, 19 nt, Homo sapiens
  misc_RNA (1)...(19): siRNA sense strand
cgagguggucuguaucuuc

SEQ ID NO: 1211848 - RNA, 19 nt, Homo sapiens
  misc_RNA (1)...(19): siRNA sense strand
gaaaguccaugucugucua

SEQ ID NO: 1211849 - RNA, 19 nt, Homo sapiens
  misc_RNA (1)...(19): siRNA sense strand
gcaagauguuuaucauuga

SEQ ID NO: 1211850 - RNA, 19 nt, Homo sapiens
  misc_RNA (1)...(19): siRNA sense strand
gaccaucacugccuuuguu

SEQ ID NO: 1211851 - RNA, 19 nt, Homo sapiens
  misc_RNA (1)...(19): siRNA sense strand
ccaaaggugucuaugagaa

SEQ ID NO: 1211852 - RNA, 19 nt, Homo sapiens
  misc_RNA (1)...(19): siRNA sense strand
ggaggccgcucaugcuaaa

SEQ ID NO: 1211853 - RNA, 19 nt, Homo sapiens
  misc_RNA (1)...(19): siRNA sense strand
caaagucccugcagacauc

SEQ ID NO: 1211854 - RNA, 19 nt, Homo sapiens
  misc_RNA (1)...(19): siRNA sense strand
gaucaaggcucgggacauc

SEQ ID NO: 1211855 - RNA, 19 nt, Homo sapiens
  misc_RNA (1)...(19): siRNA sense strand
gcaagucagugcaaaggau

SEQ ID NO: 1211856 - RNA, 19 nt, Homo sapiens
  misc_RNA (1)...(19): siRNA sense strand
gcaccgagauugggaagau

SEQ ID NO: 1211857 - RNA, 19 nt, Homo sapiens
  misc_RNA (1)...(19): siRNA sense strand
gcacagccauugccaucug

SEQ ID NO: 1211858 - RNA, 19 nt, Homo sapiens
  misc_RNA (1)...(19): siRNA sense strand
ggagaaauacggccucaau

SEQ ID NO: 1211859 - RNA, 19 nt, Homo sapiens
  misc_RNA (1)...(19): siRNA sense strand
gcaccucugucaucuguuc

SEQ ID NO: 1211860 - RNA, 19 nt, Homo sapiens
  misc_RNA (1)...(19): siRNA sense strand
gaagauccgagaccaaaug

SEQ ID NO: 1211861 - RNA, 19 nt, Homo sapiens
  misc_RNA (1)...(19): siRNA sense strand
caacuucuccaccaucgua

SEQ ID NO: 1211862 - RNA, 19 nt, Homo sapiens
  misc_RNA (1)...(19): siRNA sense strand
ggaggaauguuuggccuau

SEQ ID NO: 1211863 - RNA, 19 nt, Homo sapiens
  misc_RNA (1)...(19): siRNA sense strand
ugcaagauguuuaucauug

SEQ ID NO: 1211864 - RNA, 19 nt, Homo sapiens
  misc_RNA (1)...(19): siRNA sense strand
agcggaaucuggagaaaua

SEQ ID NO: 1211865 - RNA, 19 nt, Homo sapiens
  misc_RNA (1)...(19): siRNA sense strand
ggacaucugccuccugaau

SEQ ID NO: 1211866 - RNA, 19 nt, Homo sapiens
  misc_RNA (1)...(19): siRNA sense strand
uggaguaccugcaguccua

SEQ ID NO: 1211867 - RNA, 19 nt, Homo sapiens
  misc_RNA (1)...(19): siRNA sense strand
agaaauacggccucaauga

SEQ ID NO: 1211868 - RNA, 19 nt, Homo sapiens
  misc_RNA (1)...(19): siRNA sense strand
ggacaacacccacuuugag

SEQ ID NO: 1211869 - RNA, 19 nt, Homo sapiens
  misc_RNA (1)...(19): siRNA sense strand
ugugggagcuggugauaga

SEQ ID NO: 1211870 - RNA, 19 nt, Homo sapiens
  misc_RNA (1)...(19): siRNA sense strand
ggccaaaggugucuaugag

SEQ ID NO: 1211871 - RNA, 19 nt, Homo sapiens
  misc_RNA (1)...(19): siRNA sense strand
uggagaagaugaauguguu

SEQ ID NO: 1211872 - RNA, 19 nt, Homo sapiens
  misc_RNA (1)...(19): siRNA sense strand
acaacaacaugaagcaguu

SEQ ID NO: 1211873 - RNA, 19 nt, Homo sapiens
  misc_RNA (1)...(19): siRNA sense strand
aggaauguuuggccuauuu

SEQ ID NO: 1211874 - RNA, 19 nt, Homo sapiens
  misc_RNA (1)...(19): siRNA sense strand
caacaagggcacagccauu

SEQ ID NO: 1211875 - RNA, 19 nt, Homo sapiens
  misc_RNA (1)...(19): siRNA sense strand
ugauagagcaguuugaaga

SEQ ID NO: 1211876 - RNA, 19 nt, Homo sapiens
  misc_RNA (1)...(19): siRNA sense strand
gaugagaucacagccauga

SEQ ID NO: 1211877 - RNA, 19 nt, Homo sapiens
  misc_RNA (1)...(19): siRNA sense strand
gcagaagcuggaugaguuu

SEQ ID NO: 1211878 - RNA, 19 nt, Homo sapiens
  misc_RNA (1)...(19): siRNA sense strand
gucuguaucugucaucaaa

SEQ ID NO: 1211879 - RNA, 19 nt, Homo sapiens
  misc_RNA (1)...(19): siRNA sense strand
ucgaggcccugaaggagua

SEQ ID NO: 1211880 - RNA, 19 nt, Homo sapiens
  misc_RNA (1)...(19): siRNA sense strand
gaagaugaaagaaggaagu

SEQ ID NO: 1211881 - RNA, 19 nt, Homo sapiens
  misc_RNA (1)...(19): siRNA sense strand
ucauugggcucgacgaaau

SEQ ID NO: 1211882 - RNA, 19 nt, Homo sapiens
  misc_RNA (1)...(19): siRNA sense strand
ggucaucucccucaucugu

SEQ ID NO: 1211883 - RNA, 19 nt, Homo sapiens
  misc_RNA (1)...(19): siRNA sense strand
gggaagauccgagaccaaa

SEQ ID NO: 1211884 - RNA, 19 nt, Homo sapiens
  misc_RNA (1)...(19): siRNA sense strand
ggaauucacccuggaguuc

SEQ ID NO: 1211885 - RNA, 19 nt, Homo sapiens
  misc_RNA (1)...(19): siRNA sense strand
ccagcugacucacuucaug

SEQ ID NO: 1211886 - RNA, 19 nt, Homo sapiens
  misc_RNA (1)...(19): siRNA sense strand
ucgcacaaguccaagauug

SEQ ID NO: 1211887 - RNA, 19 nt, Homo sapiens
  misc_RNA (1)...(19): siRNA sense strand
agcagaagcuggaugaguu

SEQ ID NO: 1211888 - RNA, 19 nt, Homo sapiens
  misc_RNA (1)...(19): siRNA sense strand
gacaagaagaacaugcuuu

SEQ ID NO: 1211889 - RNA, 19 nt, Homo sapiens
  misc_RNA (1)...(19): siRNA sense strand
gcaaugacuccuccuugga

SEQ ID NO: 1211890 - RNA, 19 nt, Homo sapiens
  misc_RNA (1)...(19): siRNA sense strand
uaucaacauuggccacuuc

SEQ ID NO: 1211891 - RNA, 19 nt, Homo sapiens
  misc_RNA (1)...(19): siRNA sense strand
gaggacaacacccacuuug

SEQ ID NO: 1211892 - RNA, 19 nt, Homo sapiens
  misc_RNA (1)...(19): siRNA sense strand
ggaugggccucaugucaac

SEQ ID NO: 1211893 - RNA, 19 nt, Homo sapiens
  misc_RNA (1)...(19): siRNA sense strand
gacaggugauggcgucaau

SEQ ID NO: 1211894 - RNA, 19 nt, Homo sapiens
  misc_RNA (1)...(19): siRNA sense strand
gagaaauacggccucaaug

SEQ ID NO: 1211895 - RNA, 19 nt, Homo sapiens
  misc_RNA (1)...(19): siRNA sense strand
acaucugccuccugaauga

SEQ ID NO: 1211896 - RNA, 19 nt, Homo sapiens
  misc_RNA (1)...(19): siRNA sense strand
ucgacgaaauccucaaguu

SEQ ID NO: 1211897 - RNA, 19 nt, Homo sapiens
  misc_RNA (1)...(19): siRNA sense strand
caagacugccucugagaug

SEQ ID NO: 1211898 - RNA, 19 nt, Homo sapiens
  misc_RNA (1)...(19): siRNA sense strand
ugaagaaggcugagauugg

SEQ ID NO: 1211899 - RNA, 19 nt, Homo sapiens
  misc_RNA (1)...(19): siRNA sense strand
ggacaagaagaacaugcuu

SEQ ID NO: 1211900 - RNA, 19 nt, Homo sapiens
  misc_RNA (1)...(19): siRNA sense strand
cgacgaaauccucaaguuc

SEQ ID NO: 1211901 - RNA, 19 nt, Homo sapiens
  misc_RNA (1)...(19): siRNA sense strand
gaaaugguccuggaugacu

SEQ ID NO: 1211902 - RNA, 19 nt, Homo sapiens
  misc_RNA (1)...(19): siRNA sense strand
ucauggcggugaucaagga

SEQ ID NO: 1211903 - RNA, 19 nt, Homo sapiens
  misc_RNA (1)...(19): siRNA sense strand
gaagcuugcccuccguaga

SEQ ID NO: 1211904 - RNA, 19 nt, Homo sapiens
  misc_RNA (1)...(19): siRNA sense strand
gaggaauguuuggccuauu

SEQ ID NO: 1211905 - RNA, 19 nt, Homo sapiens
  misc_RNA (1)...(19): siRNA sense strand
guucauccgcuaccucauu

SEQ ID NO: 1211906 - RNA, 19 nt, Homo sapiens
  misc_RNA (1)...(19): siRNA sense strand
agacggaccugacauucgu

SEQ ID NO: 1211907 - RNA, 19 nt, Homo sapiens
  misc_RNA (1)...(19): siRNA sense strand
ggaccaaguuaagcggaau

SEQ ID NO: 1211908 - RNA, 19 nt, Homo sapiens
  misc_RNA (1)...(19): siRNA sense strand
ugagcucccugcugaggaa

SEQ ID NO: 1211909 - RNA, 19 nt, Homo sapiens
  misc_RNA (1)...(19): siRNA sense strand
cugaaugaguucuccauca

SEQ ID NO: 1211910 - RNA, 19 nt, Homo sapiens
  misc_RNA (1)...(19): siRNA sense strand
guggcugucuggcuuauca

SEQ ID NO: 1211911 - RNA, 19 nt, Homo sapiens
  misc_RNA (1)...(19): siRNA sense strand
ccacagaacaggacaagac

SEQ ID NO: 1211912 - RNA, 19 nt, Homo sapiens
  misc_RNA (1)...(19): siRNA sense strand
caucacugccuuuguugaa

SEQ ID NO: 1211913 - RNA, 19 nt, Homo sapiens
  misc_RNA (1)...(19): siRNA sense strand
gcacuuccucauccucuau

SEQ ID NO: 1211914 - RNA, 19 nt, Homo sapiens
  misc_RNA (1)...(19): siRNA sense strand
ggacuucaacgaggccaaa

SEQ ID NO: 1211915 - RNA, 19 nt, Homo sapiens
  misc_RNA (1)...(19): siRNA sense strand
gaccgcaagucagugcaaa

SEQ ID NO: 1211916 - RNA, 19 nt, Homo sapiens
  misc_RNA (1)...(19): siRNA sense strand
uaagcggaaucuggagaaa

SEQ ID NO: 1211917 - RNA, 19 nt, Homo sapiens
  misc_RNA (1)...(19): siRNA sense strand
guucaacacggaugugaga

SEQ ID NO: 1211918 - RNA, 19 nt, Homo sapiens
  misc_RNA (1)...(19): siRNA sense strand
gccaucuacuacuuuaaga

SEQ ID NO: 1211919 - RNA, 19 nt, Homo sapiens
  misc_RNA (1)...(19): siRNA sense strand
gugauccgccagcuaauga

SEQ ID NO: 1211920 - RNA, 19 nt, Homo sapiens
  misc_RNA (1)...(19): siRNA sense strand
guggagcccucgcacaagu

SEQ ID NO: 1211921 - RNA, 19 nt, Homo sapiens
  misc_RNA (1)...(19): siRNA sense strand
ggugauagagcaguuugaa

SEQ ID NO: 1211922 - RNA, 19 nt, Homo sapiens
  misc_RNA (1)...(19): siRNA sense strand
guccaugucugucuauugc

SEQ ID NO: 1211923 - RNA, 19 nt, Homo sapiens
  misc_RNA (1)...(19): siRNA sense strand
gaaggugaagagaccauca

SEQ ID NO: 1211924 - RNA, 19 nt, Homo sapiens
  misc_RNA (1)...(19): siRNA sense strand
caacauuggccacuucaac

SEQ ID NO: 1211925 - RNA, 19 nt, Homo sapiens
  misc_RNA (1)...(19): siRNA sense strand
ggagcuggccaccaucugu

SEQ ID NO: 1211926 - RNA, 19 nt, Homo sapiens
  misc_RNA (1)...(19): siRNA sense strand
gcucaugguccucaagauc

SEQ ID NO: 1211927 - RNA, 19 nt, Homo sapiens
  misc_RNA (1)...(19): siRNA sense strand
caggugauggcgucaauga

SEQ ID NO: 1211928 - RNA, 19 nt, Homo sapiens
  misc_RNA (1)...(19): siRNA sense strand
ugaaugaguucuccaucac

SEQ ID NO: 1211929 - RNA, 19 nt, Homo sapiens
  misc_RNA (1)...(19): siRNA sense strand
ccggcgaauuggcaucuuu

SEQ ID NO: 1211930 - RNA, 19 nt, Homo sapiens
  misc_RNA (1)...(19): siRNA sense strand
ucugugcccucugcaauga

SEQ ID NO: 1211931 - RNA, 19 nt, Homo sapiens
  misc_RNA (1)...(19): siRNA sense strand
ggaguaugagccagagaug

SEQ ID NO: 1211932 - RNA, 19 nt, Homo sapiens
  misc_RNA (1)...(19): siRNA sense strand
caucgaccgcuguaacuau

SEQ ID NO: 1211933 - RNA, 19 nt, Homo sapiens
  misc_RNA (1)...(19): siRNA sense strand
gggcugcugugggcaacaa

SEQ ID NO: 1211934 - RNA, 19 nt, Homo sapiens
  misc_RNA (1)...(19): siRNA sense strand
caagauguuuaucauugac

SEQ ID NO: 1211935 - RNA, 19 nt, Homo sapiens
  misc_RNA (1)...(19): siRNA sense strand
cugcaccucugucaucugu

SEQ ID NO: 1211936 - RNA, 19 nt, Homo sapiens
  misc_RNA (1)...(19): siRNA sense strand
ucaaccaggacaagaagaa

SEQ ID NO: 1211937 - RNA, 19 nt, Homo sapiens
  misc_RNA (1)...(19): siRNA sense strand
ggaagauccgagaccaaau

SEQ ID NO: 1211938 - RNA, 19 nt, Homo sapiens
  misc_RNA (1)...(19): siRNA sense strand
cgaggacaacacccacuuu

SEQ ID NO: 1211939 - RNA, 19 nt, Homo sapiens
  misc_RNA (1)...(19): siRNA sense strand
ugggcgagguggucuguau

SEQ ID NO: 1211940 - RNA, 19 nt, Homo sapiens
  misc_RNA (1)...(19): siRNA sense strand
ggugcuggcugacgacaac

SEQ ID NO: 1211941 - RNA, 19 nt, Homo sapiens
  misc_RNA (1)...(19): siRNA sense strand
gggcugcaccucugucauc

SEQ ID NO: 1211942 - RNA, 19 nt, Homo sapiens
  misc_RNA (1)...(19): siRNA sense strand
ucaucucccucaucugugu

SEQ ID NO: 1211943 - RNA, 19 nt, Homo sapiens
  misc_RNA (1)...(19): siRNA sense strand
ggagaagaugaauguguuc

SEQ ID NO: 1211944 - RNA, 19 nt, Homo sapiens
  misc_RNA (1)...(19): siRNA sense strand
gacaucugccuccugaaug

SEQ ID NO: 1211945 - RNA, 19 nt, Homo sapiens
  misc_RNA (1)...(19): siRNA sense strand
gagcagcugccuggugguu

SEQ ID NO: 1211946 - RNA, 19 nt, Homo sapiens
  misc_RNA (1)...(19): siRNA sense strand
ucggugauccgccagcuaa

SEQ ID NO: 1211947 - RNA, 19 nt, Homo sapiens
  misc_RNA (1)...(19): siRNA sense strand
cgagguggucuguaucuuc

SEQ ID NO: 1211948 - RNA, 19 nt, Homo sapiens
  misc_RNA (1)...(19): siRNA sense strand
ccagugaggucagcgauua

SEQ ID NO: 1211949 - RNA, 19 nt, Homo sapiens
  misc_RNA (1)...(19): siRNA sense strand
gcauuagccucauccuuga

SEQ ID NO: 1211950 - RNA, 19 nt, Homo sapiens
  misc_RNA (1)...(19): siRNA sense strand
gaacaggaaacacauugaa

SEQ ID NO: 1211951 - RNA, 19 nt, Homo sapiens
  misc_RNA (1)...(19): siRNA sense strand
ugacaaggauaaaggacaa

SEQ ID NO: 1211952 - RNA, 19 nt, Homo sapiens
  misc_RNA (1)...(19): siRNA sense strand
caggaaacacauugaauuu

SEQ ID NO: 1211953 - RNA, 19 nt, Homo sapiens
  misc_RNA (1)...(19): siRNA sense strand
gaaaggaaguccgauucuc

SEQ ID NO: 1211954 - RNA, 19 nt, Homo sapiens
  misc_RNA (1)...(19): siRNA sense strand
gaagaaggagaaacugaug

SEQ ID NO: 1211955 - RNA, 19 nt, Homo sapiens
  misc_RNA (1)...(19): siRNA sense strand
ggagaaaggaaguccgauu

SEQ ID NO: 1211956 - RNA, 19 nt, Homo sapiens
  misc_RNA (1)...(19): siRNA sense strand
gagaaaggaaguccgauuc

SEQ ID NO: 1211957 - RNA, 19 nt, Homo sapiens
  misc_RNA (1)...(19): siRNA sense strand
gagaacaggaaacacauug

SEQ ID NO: 1211958 - RNA, 19 nt, Homo sapiens
  misc_RNA (1)...(19): siRNA sense strand
gauaaaggacaaagucauc

SEQ ID NO: 1211959 - RNA, 19 nt, Homo sapiens
  misc_RNA (1)...(19): siRNA sense strand
acaggaaacacauugaauu

SEQ ID NO: 1211960 - RNA, 19 nt, Homo sapiens
  misc_RNA (1)...(19): siRNA sense strand
gaagcuggcugcccaaaag

SEQ ID NO: 1211961 - RNA, 19 nt, Homo sapiens
  misc_RNA (1)...(19): siRNA sense strand
ggugacagauaaauuugag

SEQ ID NO: 1211962 - RNA, 19 nt, Homo sapiens
  misc_RNA (1)...(19): siRNA sense strand
gcaccuccugcaauuguaa

SEQ ID NO: 1211963 - RNA, 19 nt, Homo sapiens
  misc_RNA (1)...(19): siRNA sense strand
cagauaaauuugagaacag

SEQ ID NO: 1211964 - RNA, 19 nt, Homo sapiens
  misc_RNA (1)...(19): siRNA sense strand
ggauaaaggacaaagucau

SEQ ID NO: 1211965 - RNA, 19 nt, Homo sapiens
  misc_RNA (1)...(19): siRNA sense strand
agaaggagaaacugaugaa

SEQ ID NO: 1211966 - RNA, 19 nt, Homo sapiens
  misc_RNA (1)...(19): siRNA sense strand
aggagaaacugaugaagcu

SEQ ID NO: 1211967 - RNA, 19 nt, Homo sapiens
  misc_RNA (1)...(19): siRNA sense strand
ugaagaaggagaaacugau

SEQ ID NO: 1211968 - RNA, 19 nt, Homo sapiens
  misc_RNA (1)...(19): siRNA sense strand
gcucagccucugcggagaa

SEQ ID NO: 1211969 - RNA, 19 nt, Homo sapiens
  misc_RNA (1)...(19): siRNA sense strand
ucucuacugugacaaggau

SEQ ID NO: 1211970 - RNA, 19 nt, Homo sapiens
  misc_RNA (1)...(19): siRNA sense strand
ugagaacaggaaacacauu

SEQ ID NO: 1211971 - RNA, 19 nt, Homo sapiens
  misc_RNA (1)...(19): siRNA sense strand
ucaaccaguuugcaaagcu

SEQ ID NO: 1211972 - RNA, 19 nt, Homo sapiens
  misc_RNA (1)...(19): siRNA sense strand
gaaggagaaacugaugaag

SEQ ID NO: 1211973 - RNA, 19 nt, Homo sapiens
  misc_RNA (1)...(19): siRNA sense strand
ggaguuuugucucuacugu

SEQ ID NO: 1211974 - RNA, 19 nt, Homo sapiens
  misc_RNA (1)...(19): siRNA sense strand
aaagucauccaucccuuca

SEQ ID NO: 1211975 - RNA, 19 nt, Homo sapiens
  misc_RNA (1)...(19): siRNA sense strand
gggugacagauaaauuuga

SEQ ID NO: 1211976 - RNA, 19 nt, Homo sapiens
  misc_RNA (1)...(19): siRNA sense strand
ccagugaggucagcgauua

SEQ ID NO: 1211977 - RNA, 19 nt, Homo sapiens
  misc_RNA (1)...(19): siRNA sense strand
gcauuagccucauccuuga

SEQ ID NO: 1211978 - RNA, 19 nt, Homo sapiens
  misc_RNA (1)...(19): siRNA sense strand
gaacaggaaacacauugaa

SEQ ID NO: 1211979 - RNA, 19 nt, Homo sapiens
  misc_RNA (1)...(19): siRNA sense strand
ugacaaggauaaaggacaa

SEQ ID NO: 1211980 - RNA, 19 nt, Homo sapiens
  misc_RNA (1)...(19): siRNA sense strand
caggaaacacauugaauuu

SEQ ID NO: 1211981 - RNA, 19 nt, Homo sapiens
  misc_RNA (1)...(19): siRNA sense strand
gaaaggaaguccgauucuc

SEQ ID NO: 1211982 - RNA, 19 nt, Homo sapiens
  misc_RNA (1)...(19): siRNA sense strand
gaagaaggagaaacugaug

SEQ ID NO: 1211983 - RNA, 19 nt, Homo sapiens
  misc_RNA (1)...(19): siRNA sense strand
ggagaaaggaaguccgauu

SEQ ID NO: 1211984 - RNA, 19 nt, Homo sapiens
  misc_RNA (1)...(19): siRNA sense strand
gagaaaggaaguccgauuc

SEQ ID NO: 1211985 - RNA, 19 nt, Homo sapiens
  misc_RNA (1)...(19): siRNA sense strand
gagaacaggaaacacauug

SEQ ID NO: 1211986 - RNA, 19 nt, Homo sapiens
  misc_RNA (1)...(19): siRNA sense strand
gauaaaggacaaagucauc

SEQ ID NO: 1211987 - RNA, 19 nt, Homo sapiens
  misc_RNA (1)...(19): siRNA sense strand
acaggaaacacauugaauu

SEQ ID NO: 1211988 - RNA, 19 nt, Homo sapiens
  misc_RNA (1)...(19): siRNA sense strand
gaagcuggcugcccaaaag

SEQ ID NO: 1211989 - RNA, 19 nt, Homo sapiens
  misc_RNA (1)...(19): siRNA sense strand
ggugacagauaaauuugag

SEQ ID NO: 1211990 - RNA, 19 nt, Homo sapiens
  misc_RNA (1)...(19): siRNA sense strand
gcaccuccugcaauuguaa

SEQ ID NO: 1211991 - RNA, 19 nt, Homo sapiens
  misc_RNA (1)...(19): siRNA sense strand
cagauaaauuugagaacag

SEQ ID NO: 1211992 - RNA, 19 nt, Homo sapiens
  misc_RNA (1)...(19): siRNA sense strand
ggauaaaggacaaagucau

SEQ ID NO: 1211993 - RNA, 19 nt, Homo sapiens
  misc_RNA (1)...(19): siRNA sense strand
agaaggagaaacugaugaa

SEQ ID NO: 1211994 - RNA, 19 nt, Homo sapiens
  misc_RNA (1)...(19): siRNA sense strand
aggagaaacugaugaagcu

SEQ ID NO: 1211995 - RNA, 19 nt, Homo sapiens
  misc_RNA (1)...(19): siRNA sense strand
ugaagaaggagaaacugau

SEQ ID NO: 1211996 - RNA, 19 nt, Homo sapiens
  misc_RNA (1)...(19): siRNA sense strand
gcucagccucugcggagaa

SEQ ID NO: 1211997 - RNA, 19 nt, Homo sapiens
  misc_RNA (1)...(19): siRNA sense strand
ucucuacugugacaaggau

SEQ ID NO: 1211998 - RNA, 19 nt, Homo sapiens
  misc_RNA (1)...(19): siRNA sense strand
ugagaacaggaaacacauu

SEQ ID NO: 1211999 - RNA, 19 nt, Homo sapiens
  misc_RNA (1)...(19): siRNA sense strand
ucaaccaguuugcaaagcu

SEQ ID NO: 1212000 - RNA, 19 nt, Homo sapiens
  misc_RNA (1)...(19): siRNA sense strand
gaaggagaaacugaugaag

SEQ ID NO: 1212001 - RNA, 19 nt, Homo sapiens
  misc_RNA (1)...(19): siRNA sense strand
ggaguuuugucucuacugu

SEQ ID NO: 1212002 - RNA, 19 nt, Homo sapiens
  misc_RNA (1)...(19): siRNA sense strand
aaagucauccaucccuuca

SEQ ID NO: 1212003 - RNA, 19 nt, Homo sapiens
  misc_RNA (1)...(19): siRNA sense strand
gggugacagauaaauuuga

SEQ ID NO: 1212004 - RNA, 19 nt, Homo sapiens
  misc_RNA (1)...(19): siRNA sense strand
ccagugaggucagcgauua

SEQ ID NO: 1212005 - RNA, 19 nt, Homo sapiens
  misc_RNA (1)...(19): siRNA sense strand
gcauuagccucauccuuga

SEQ ID NO: 1212006 - RNA, 19 nt, Homo sapiens
  misc_RNA (1)...(19): siRNA sense strand
gaacaggaaacacauugaa

SEQ ID NO: 1212007 - RNA, 19 nt, Homo sapiens
  misc_RNA (1)...(19): siRNA sense strand
ugacaaggauaaaggacaa

SEQ ID NO: 1212008 - RNA, 19 nt, Homo sapiens
  misc_RNA (1)...(19): siRNA sense strand
caggaaacacauugaauuu

SEQ ID NO: 1212009 - RNA, 19 nt, Homo sapiens
  misc_RNA (1)...(19): siRNA sense strand
gaaaggaaguccgauucuc

SEQ ID NO: 1212010 - RNA, 19 nt, Homo sapiens
  misc_RNA (1)...(19): siRNA sense strand
gaagaaggagaaacugaug

SEQ ID NO: 1212011 - RNA, 19 nt, Homo sapiens
  misc_RNA (1)...(19): siRNA sense strand
ggagaaaggaaguccgauu

SEQ ID NO: 1212012 - RNA, 19 nt, Homo sapiens
  misc_RNA (1)...(19): siRNA sense strand
gagaaaggaaguccgauuc

SEQ ID NO: 1212013 - RNA, 19 nt, Homo sapiens
  misc_RNA (1)...(19): siRNA sense strand
gagaacaggaaacacauug

SEQ ID NO: 1212014 - RNA, 19 nt, Homo sapiens
  misc_RNA (1)...(19): siRNA sense strand
gauaaaggacaaagucauc

SEQ ID NO: 1212015 - RNA, 19 nt, Homo sapiens
  misc_RNA (1)...(19): siRNA sense strand
acaggaaacacauugaauu

SEQ ID NO: 1212016 - RNA, 19 nt, Homo sapiens
  misc_RNA (1)...(19): siRNA sense strand
gaagcuggcugcccaaaag

SEQ ID NO: 1212017 - RNA, 19 nt, Homo sapiens
  misc_RNA (1)...(19): siRNA sense strand
ggugacagauaaauuugag

SEQ ID NO: 1212018 - RNA, 19 nt, Homo sapiens
  misc_RNA (1)...(19): siRNA sense strand
gcaccuccugcaauuguaa

SEQ ID NO: 1212019 - RNA, 19 nt, Homo sapiens
  misc_RNA (1)...(19): siRNA sense strand
cagauaaauuugagaacag

SEQ ID NO: 1212020 - RNA, 19 nt, Homo sapiens
  misc_RNA (1)...(19): siRNA sense strand
ggauaaaggacaaagucau

SEQ ID NO: 1212021 - RNA, 19 nt, Homo sapiens
  misc_RNA (1)...(19): siRNA sense strand
agaaggagaaacugaugaa

SEQ ID NO: 1212022 - RNA, 19 nt, Homo sapiens
  misc_RNA (1)...(19): siRNA sense strand
aggagaaacugaugaagcu

SEQ ID NO: 1212023 - RNA, 19 nt, Homo sapiens
  misc_RNA (1)...(19): siRNA sense strand
ugaagaaggagaaacugau

SEQ ID NO: 1212024 - RNA, 19 nt, Homo sapiens
  misc_RNA (1)...(19): siRNA sense strand
gcucagccucugcggagaa

SEQ ID NO: 1212025 - RNA, 19 nt, Homo sapiens
  misc_RNA (1)...(19): siRNA sense strand
ucucuacugugacaaggau

SEQ ID NO: 1212026 - RNA, 19 nt, Homo sapiens
  misc_RNA (1)...(19): siRNA sense strand
ugagaacaggaaacacauu

SEQ ID NO: 1212027 - RNA, 19 nt, Homo sapiens
  misc_RNA (1)...(19): siRNA sense strand
ucaaccaguuugcaaagcu

SEQ ID NO: 1212028 - RNA, 19 nt, Homo sapiens
  misc_RNA (1)...(19): siRNA sense strand
gaaggagaaacugaugaag

SEQ ID NO: 1212029 - RNA, 19 nt, Homo sapiens
  misc_RNA (1)...(19): siRNA sense strand
ggaguuuugucucuacugu

SEQ ID NO: 1212030 - RNA, 19 nt, Homo sapiens
  misc_RNA (1)...(19): siRNA sense strand
aaagucauccaucccuuca

SEQ ID NO: 1212031 - RNA, 19 nt, Homo sapiens
  misc_RNA (1)...(19): siRNA sense strand
gggugacagauaaauuuga

SEQ ID NO: 1212032 - RNA, 19 nt, Homo sapiens
  misc_RNA (1)...(19): siRNA sense strand
ccagugaggucagcgauua

SEQ ID NO: 1212033 - RNA, 19 nt, Homo sapiens
  misc_RNA (1)...(19): siRNA sense strand
gcauuagccucauccuuga

SEQ ID NO: 1212034 - RNA, 19 nt, Homo sapiens
  misc_RNA (1)...(19): siRNA sense strand
gaacaggaaacacauugaa

SEQ ID NO: 1212035 - RNA, 19 nt, Homo sapiens
  misc_RNA (1)...(19): siRNA sense strand
ugacaaggauaaaggacaa

SEQ ID NO: 1212036 - RNA, 19 nt, Homo sapiens
  misc_RNA (1)...(19): siRNA sense strand
caggaaacacauugaauuu

SEQ ID NO: 1212037 - RNA, 19 nt, Homo sapiens
  misc_RNA (1)...(19): siRNA sense strand
gaaaggaaguccgauucuc

SEQ ID NO: 1212038 - RNA, 19 nt, Homo sapiens
  misc_RNA (1)...(19): siRNA sense strand
gaagaaggagaaacugaug

SEQ ID NO: 1212039 - RNA, 19 nt, Homo sapiens
  misc_RNA (1)...(19): siRNA sense strand
ggagaaaggaaguccgauu

SEQ ID NO: 1212040 - RNA, 19 nt, Homo sapiens
  misc_RNA (1)...(19): siRNA sense strand
gagaaaggaaguccgauuc

SEQ ID NO: 1212041 - RNA, 19 nt, Homo sapiens
  misc_RNA (1)...(19): siRNA sense strand
gagaacaggaaacacauug

SEQ ID NO: 1212042 - RNA, 19 nt, Homo sapiens
  misc_RNA (1)...(19): siRNA sense strand
gauaaaggacaaagucauc

SEQ ID NO: 1212043 - RNA, 19 nt, Homo sapiens
  misc_RNA (1)...(19): siRNA sense strand
acaggaaacacauugaauu

SEQ ID NO: 1212044 - RNA, 19 nt, Homo sapiens
  misc_RNA (1)...(19): siRNA sense strand
gaagcuggcugcccaaaag

SEQ ID NO: 1212045 - RNA, 19 nt, Homo sapiens
  misc_RNA (1)...(19): siRNA sense strand
ggugacagauaaauuugag

SEQ ID NO: 1212046 - RNA, 19 nt, Homo sapiens
  misc_RNA (1)...(19): siRNA sense strand
gcaccuccugcaauuguaa

SEQ ID NO: 1212047 - RNA, 19 nt, Homo sapiens
  misc_RNA (1)...(19): siRNA sense strand
cagauaaauuugagaacag

SEQ ID NO: 1212048 - RNA, 19 nt, Homo sapiens
  misc_RNA (1)...(19): siRNA sense strand
ggauaaaggacaaagucau

SEQ ID NO: 1212049 - RNA, 19 nt, Homo sapiens
  misc_RNA (1)...(19): siRNA sense strand
agaaggagaaacugaugaa

SEQ ID NO: 1212050 - RNA, 19 nt, Homo sapiens
  misc_RNA (1)...(19): siRNA sense strand
aggagaaacugaugaagcu

SEQ ID NO: 1212051 - RNA, 19 nt, Homo sapiens
  misc_RNA (1)...(19): siRNA sense strand
ugaagaaggagaaacugau

SEQ ID NO: 1212052 - RNA, 19 nt, Homo sapiens
  misc_RNA (1)...(19): siRNA sense strand
gcucagccucugcggagaa

SEQ ID NO: 1212053 - RNA, 19 nt, Homo sapiens
  misc_RNA (1)...(19): siRNA sense strand
ucucuacugugacaaggau

SEQ ID NO: 1212054 - RNA, 19 nt, Homo sapiens
  misc_RNA (1)...(19): siRNA sense strand
ugagaacaggaaacacauu

SEQ ID NO: 1212055 - RNA, 19 nt, Homo sapiens
  misc_RNA (1)...(19): siRNA sense strand
ucaaccaguuugcaaagcu

SEQ ID NO: 1212056 - RNA, 19 nt, Homo sapiens
  misc_RNA (1)...(19): siRNA sense strand
gaaggagaaacugaugaag

SEQ ID NO: 1212057 - RNA, 19 nt, Homo sapiens
  misc_RNA (1)...(19): siRNA sense strand
ggaguuuugucucuacugu

SEQ ID NO: 1212058 - RNA, 19 nt, Homo sapiens
  misc_RNA (1)...(19): siRNA sense strand
aaagucauccaucccuuca

SEQ ID NO: 1212059 - RNA, 19 nt, Homo sapiens
  misc_RNA (1)...(19): siRNA sense strand
gggugacagauaaauuuga

SEQ ID NO: 1212060 - RNA, 19 nt, Homo sapiens
  misc_RNA (1)...(19): siRNA sense strand
ccagugaggucagcgauua

SEQ ID NO: 1212061 - RNA, 19 nt, Homo sapiens
  misc_RNA (1)...(19): siRNA sense strand
gcauuagccucauccuuga

SEQ ID NO: 1212062 - RNA, 19 nt, Homo sapiens
  misc_RNA (1)...(19): siRNA sense strand
gaacaggaaacacauugaa

SEQ ID NO: 1212063 - RNA, 19 nt, Homo sapiens
  misc_RNA (1)...(19): siRNA sense strand
ugacaaggauaaaggacaa

SEQ ID NO: 1212064 - RNA, 19 nt, Homo sapiens
  misc_RNA (1)...(19): siRNA sense strand
caggaaacacauugaauuu

SEQ ID NO: 1212065 - RNA, 19 nt, Homo sapiens
  misc_RNA (1)...(19): siRNA sense strand
gaaaggaaguccgauucuc

SEQ ID NO: 1212066 - RNA, 19 nt, Homo sapiens
  misc_RNA (1)...(19): siRNA sense strand
gaagaaggagaaacugaug

SEQ ID NO: 1212067 - RNA, 19 nt, Homo sapiens
  misc_RNA (1)...(19): siRNA sense strand
ggagaaaggaaguccgauu

SEQ ID NO: 1212068 - RNA, 19 nt, Homo sapiens
  misc_RNA (1)...(19): siRNA sense strand
gagaaaggaaguccgauuc

SEQ ID NO: 1212069 - RNA, 19 nt, Homo sapiens
  misc_RNA (1)...(19): siRNA sense strand
gagaacaggaaacacauug

SEQ ID NO: 1212070 - RNA, 19 nt, Homo sapiens
  misc_RNA (1)...(19): siRNA sense strand
gauaaaggacaaagucauc

SEQ ID NO: 1212071 - RNA, 19 nt, Homo sapiens
  misc_RNA (1)...(19): siRNA sense strand
acaggaaacacauugaauu

SEQ ID NO: 1212072 - RNA, 19 nt, Homo sapiens
  misc_RNA (1)...(19): siRNA sense strand
gaagcuggcugcccaaaag

SEQ ID NO: 1212073 - RNA, 19 nt, Homo sapiens
  misc_RNA (1)...(19): siRNA sense strand
ggugacagauaaauuugag

SEQ ID NO: 1212074 - RNA, 19 nt, Homo sapiens
  misc_RNA (1)...(19): siRNA sense strand
gcaccuccugcaauuguaa

SEQ ID NO: 1212075 - RNA, 19 nt, Homo sapiens
  misc_RNA (1)...(19): siRNA sense strand
cagauaaauuugagaacag

SEQ ID NO: 1212076 - RNA, 19 nt, Homo sapiens
  misc_RNA (1)...(19): siRNA sense strand
ggauaaaggacaaagucau

SEQ ID NO: 1212077 - RNA, 19 nt, Homo sapiens
  misc_RNA (1)...(19): siRNA sense strand
agaaggagaaacugaugaa

SEQ ID NO: 1212078 - RNA, 19 nt, Homo sapiens
  misc_RNA (1)...(19): siRNA sense strand
aggagaaacugaugaagcu

SEQ ID NO: 1212079 - RNA, 19 nt, Homo sapiens
  misc_RNA (1)...(19): siRNA sense strand
ugaagaaggagaaacugau

SEQ ID NO: 1212080 - RNA, 19 nt, Homo sapiens
  misc_RNA (1)...(19): siRNA sense strand
gcucagccucugcggagaa

SEQ ID NO: 1212081 - RNA, 19 nt, Homo sapiens
  misc_RNA (1)...(19): siRNA sense strand
ucucuacugugacaaggau

SEQ ID NO: 1212082 - RNA, 19 nt, Homo sapiens
  misc_RNA (1)...(19): siRNA sense strand
ugagaacaggaaacacauu

SEQ ID NO: 1212083 - RNA, 19 nt, Homo sapiens
  misc_RNA (1)...(19): siRNA sense strand
ucaaccaguuugcaaagcu

SEQ ID NO: 1212084 - RNA, 19 nt, Homo sapiens
  misc_RNA (1)...(19): siRNA sense strand
gaaggagaaacugaugaag

SEQ ID NO: 1212085 - RNA, 19 nt, Homo sapiens
  misc_RNA (1)...(19): siRNA sense strand
ggaguuuugucucuacugu

SEQ ID NO: 1212086 - RNA, 19 nt, Homo sapiens
  misc_RNA (1)...(19): siRNA sense strand
aaagucauccaucccuuca

SEQ ID NO: 1212087 - RNA, 19 nt, Homo sapiens
  misc_RNA (1)...(19): siRNA sense strand
gggugacagauaaauuuga

SEQ ID NO: 1212088 - RNA, 19 nt, Homo sapiens
  misc_RNA (1)...(19): siRNA sense strand
ccagugaggucagcgauua

SEQ ID NO: 1212089 - RNA, 19 nt, Homo sapiens
  misc_RNA (1)...(19): siRNA sense strand
gcauuagccucauccuuga

SEQ ID NO: 1212090 - RNA, 19 nt, Homo sapiens
  misc_RNA (1)...(19): siRNA sense strand
gaacaggaaacacauugaa

SEQ ID NO: 1212091 - RNA, 19 nt, Homo sapiens
  misc_RNA (1)...(19): siRNA sense strand
ugacaaggauaaaggacaa

SEQ ID NO: 1212092 - RNA, 19 nt, Homo sapiens
  misc_RNA (1)...(19): siRNA sense strand
caggaaacacauugaauuu

SEQ ID NO: 1212093 - RNA, 19 nt, Homo sapiens
  misc_RNA (1)...(19): siRNA sense strand
gaaaggaaguccgauucuc

SEQ ID NO: 1212094 - RNA, 19 nt, Homo sapiens
  misc_RNA (1)...(19): siRNA sense strand
gaagaaggagaaacugaug

SEQ ID NO: 1212095 - RNA, 19 nt, Homo sapiens
  misc_RNA (1)...(19): siRNA sense strand
ggagaaaggaaguccgauu

SEQ ID NO: 1212096 - RNA, 19 nt, Homo sapiens
  misc_RNA (1)...(19): siRNA sense strand
gagaaaggaaguccgauuc

SEQ ID NO: 1212097 - RNA, 19 nt, Homo sapiens
  misc_RNA (1)...(19): siRNA sense strand
gagaacaggaaacacauug

SEQ ID NO: 1212098 - RNA, 19 nt, Homo sapiens
  misc_RNA (1)...(19): siRNA sense strand
gauaaaggacaaagucauc

SEQ ID NO: 1212099 - RNA, 19 nt, Homo sapiens
  misc_RNA (1)...(19): siRNA sense strand
acaggaaacacauugaauu

SEQ ID NO: 1212100 - RNA, 19 nt, Homo sapiens
  misc_RNA (1)...(19): siRNA sense strand
gaagcuggcugcccaaaag

SEQ ID NO: 1212101 - RNA, 19 nt, Homo sapiens
  misc_RNA (1)...(19): siRNA sense strand
ggugacagauaaauuugag

SEQ ID NO: 1212102 - RNA, 19 nt, Homo sapiens
  misc_RNA (1)...(19): siRNA sense strand
gcaccuccugcaauuguaa

SEQ ID NO: 1212103 - RNA, 19 nt, Homo sapiens
  misc_RNA (1)...(19): siRNA sense strand
cagauaaauuugagaacag

SEQ ID NO: 1212104 - RNA, 19 nt, Homo sapiens
  misc_RNA (1)...(19): siRNA sense strand
ggauaaaggacaaagucau

SEQ ID NO: 1212105 - RNA, 19 nt, Homo sapiens
  misc_RNA (1)...(19): siRNA sense strand
agaaggagaaacugaugaa

SEQ ID NO: 1212106 - RNA, 19 nt, Homo sapiens
  misc_RNA (1)...(19): siRNA sense strand
aggagaaacugaugaagcu

SEQ ID NO: 1212107 - RNA, 19 nt, Homo sapiens
  misc_RNA (1)...(19): siRNA sense strand
ugaagaaggagaaacugau

SEQ ID NO: 1212108 - RNA, 19 nt, Homo sapiens
  misc_RNA (1)...(19): siRNA sense strand
gcucagccucugcggagaa

SEQ ID NO: 1212109 - RNA, 19 nt, Homo sapiens
  misc_RNA (1)...(19): siRNA sense strand
ucucuacugugacaaggau

SEQ ID NO: 1212110 - RNA, 19 nt, Homo sapiens
  misc_RNA (1)...(19): siRNA sense strand
ugagaacaggaaacacauu

SEQ ID NO: 1212111 - RNA, 19 nt, Homo sapiens
  misc_RNA (1)...(19): siRNA sense strand
ucaaccaguuugcaaagcu

SEQ ID NO: 1212112 - RNA, 19 nt, Homo sapiens
  misc_RNA (1)...(19): siRNA sense strand
gaaggagaaacugaugaag

SEQ ID NO: 1212113 - RNA, 19 nt, Homo sapiens
  misc_RNA (1)...(19): siRNA sense strand
ggaguuuugucucuacugu

SEQ ID NO: 1212114 - RNA, 19 nt, Homo sapiens
  misc_RNA (1)...(19): siRNA sense strand
aaagucauccaucccuuca

SEQ ID NO: 1212115 - RNA, 19 nt, Homo sapiens
  misc_RNA (1)...(19): siRNA sense strand
gggugacagauaaauuuga

SEQ ID NO: 1212116 - RNA, 19 nt, Homo sapiens
  misc_RNA (1)...(19): siRNA sense strand
ccagugaggucagcgauua

SEQ ID NO: 1212117 - RNA, 19 nt, Homo sapiens
  misc_RNA (1)...(19): siRNA sense strand
gcauuagccucauccuuga

SEQ ID NO: 1212118 - RNA, 19 nt, Homo sapiens
  misc_RNA (1)...(19): siRNA sense strand
gaacaggaaacacauugaa

SEQ ID NO: 1212119 - RNA, 19 nt, Homo sapiens
  misc_RNA (1)...(19): siRNA sense strand
ugacaaggauaaaggacaa

SEQ ID NO: 1212120 - RNA, 19 nt, Homo sapiens
  misc_RNA (1)...(19): siRNA sense strand
caggaaacacauugaauuu

SEQ ID NO: 1212121 - RNA, 19 nt, Homo sapiens
  misc_RNA (1)...(19): siRNA sense strand
gaaaggaaguccgauucuc

SEQ ID NO: 1212122 - RNA, 19 nt, Homo sapiens
  misc_RNA (1)...(19): siRNA sense strand
gaagaaggagaaacugaug

SEQ ID NO: 1212123 - RNA, 19 nt, Homo sapiens
  misc_RNA (1)...(19): siRNA sense strand
ggagaaaggaaguccgauu

SEQ ID NO: 1212124 - RNA, 19 nt, Homo sapiens
  misc_RNA (1)...(19): siRNA sense strand
gagaaaggaaguccgauuc

SEQ ID NO: 1212125 - RNA, 19 nt, Homo sapiens
  misc_RNA (1)...(19): siRNA sense strand
gagaacaggaaacacauug

SEQ ID NO: 1212126 - RNA, 19 nt, Homo sapiens
  misc_RNA (1)...(19): siRNA sense strand
gauaaaggacaaagucauc

SEQ ID NO: 1212127 - RNA, 19 nt, Homo sapiens
  misc_RNA (1)...(19): siRNA sense strand
acaggaaacacauugaauu

SEQ ID NO: 1212128 - RNA, 19 nt, Homo sapiens
  misc_RNA (1)...(19): siRNA sense strand
gaagcuggcugcccaaaag

SEQ ID NO: 1212129 - RNA, 19 nt, Homo sapiens
  misc_RNA (1)...(19): siRNA sense strand
ggugacagauaaauuugag

SEQ ID NO: 1212130 - RNA, 19 nt, Homo sapiens
  misc_RNA (1)...(19): siRNA sense strand
gcaccuccugcaauuguaa

SEQ ID NO: 1212131 - RNA, 19 nt, Homo sapiens
  misc_RNA (1)...(19): siRNA sense strand
cagauaaauuugagaacag

SEQ ID NO: 1212132 - RNA, 19 nt, Homo sapiens
  misc_RNA (1)...(19): siRNA sense strand
ggauaaaggacaaagucau

SEQ ID NO: 1212133 - RNA, 19 nt, Homo sapiens
  misc_RNA (1)...(19): siRNA sense strand
agaaggagaaacugaugaa

SEQ ID NO: 1212134 - RNA, 19 nt, Homo sapiens
  misc_RNA (1)...(19): siRNA sense strand
aggagaaacugaugaagcu

SEQ ID NO: 1212135 - RNA, 19 nt, Homo sapiens
  misc_RNA (1)...(19): siRNA sense strand
ugaagaaggagaaacugau

SEQ ID NO: 1212136 - RNA, 19 nt, Homo sapiens
  misc_RNA (1)...(19): siRNA sense strand
gcucagccucugcggagaa

SEQ ID NO: 1212137 - RNA, 19 nt, Homo sapiens
  misc_RNA (1)...(19): siRNA sense strand
ucucuacugugacaaggau

SEQ ID NO: 1212138 - RNA, 19 nt, Homo sapiens
  misc_RNA (1)...(19): siRNA sense strand
ugagaacaggaaacacauu

SEQ ID NO: 1212139 - RNA, 19 nt, Homo sapiens
  misc_RNA (1)...(19): siRNA sense strand
ucaaccaguuugcaaagcu

SEQ ID NO: 1212140 - RNA, 19 nt, Homo sapiens
  misc_RNA (1)...(19): siRNA sense strand
gaaggagaaacugaugaag

SEQ ID NO: 1212141 - RNA, 19 nt, Homo sapiens
  misc_RNA (1)...(19): siRNA sense strand
ggaguuuugucucuacugu

SEQ ID NO: 1212142 - RNA, 19 nt, Homo sapiens
  misc_RNA (1)...(19): siRNA sense strand
aaagucauccaucccuuca

SEQ ID NO: 1212143 - RNA, 19 nt, Homo sapiens
  misc_RNA (1)...(19): siRNA sense strand
gggugacagauaaauuuga

SEQ ID NO: 1212144 - RNA, 19 nt, Homo sapiens
  misc_RNA (1)...(19): siRNA sense strand
ccagugaggucagcgauua

SEQ ID NO: 1212145 - RNA, 19 nt, Homo sapiens
  misc_RNA (1)...(19): siRNA sense strand
gcauuagccucauccuuga

SEQ ID NO: 1212146 - RNA, 19 nt, Homo sapiens
  misc_RNA (1)...(19): siRNA sense strand
gaacaggaaacacauugaa

SEQ ID NO: 1212147 - RNA, 19 nt, Homo sapiens
  misc_RNA (1)...(19): siRNA sense strand
ugacaaggauaaaggacaa

SEQ ID NO: 1212148 - RNA, 19 nt, Homo sapiens
  misc_RNA (1)...(19): siRNA sense strand
caggaaacacauugaauuu

SEQ ID NO: 1212149 - RNA, 19 nt, Homo sapiens
  misc_RNA (1)...(19): siRNA sense strand
gaaaggaaguccgauucuc

SEQ ID NO: 1212150 - RNA, 19 nt, Homo sapiens
  misc_RNA (1)...(19): siRNA sense strand
gaagaaggagaaacugaug

SEQ ID NO: 1212151 - RNA, 19 nt, Homo sapiens
  misc_RNA (1)...(19): siRNA sense strand
ggagaaaggaaguccgauu

SEQ ID NO: 1212152 - RNA, 19 nt, Homo sapiens
  misc_RNA (1)...(19): siRNA sense strand
gagaaaggaaguccgauuc

SEQ ID NO: 1212153 - RNA, 19 nt, Homo sapiens
  misc_RNA (1)...(19): siRNA sense strand
gagaacaggaaacacauug

SEQ ID NO: 1212154 - RNA, 19 nt, Homo sapiens
  misc_RNA (1)...(19): siRNA sense strand
gauaaaggacaaagucauc

SEQ ID NO: 1212155 - RNA, 19 nt, Homo sapiens
  misc_RNA (1)...(19): siRNA sense strand
acaggaaacacauugaauu

SEQ ID NO: 1212156 - RNA, 19 nt, Homo sapiens
  misc_RNA (1)...(19): siRNA sense strand
gaagcuggcugcccaaaag

SEQ ID NO: 1212157 - RNA, 19 nt, Homo sapiens
  misc_RNA (1)...(19): siRNA sense strand
ggugacagauaaauuugag

SEQ ID NO: 1212158 - RNA, 19 nt, Homo sapiens
  misc_RNA (1)...(19): siRNA sense strand
gcaccuccugcaauuguaa

SEQ ID NO: 1212159 - RNA, 19 nt, Homo sapiens
  misc_RNA (1)...(19): siRNA sense strand
cagauaaauuugagaacag

SEQ ID NO: 1212160 - RNA, 19 nt, Homo sapiens
  misc_RNA (1)...(19): siRNA sense strand
ggauaaaggacaaagucau

SEQ ID NO: 1212161 - RNA, 19 nt, Homo sapiens
  misc_RNA (1)...(19): siRNA sense strand
agaaggagaaacugaugaa

SEQ ID NO: 1212162 - RNA, 19 nt, Homo sapiens
  misc_RNA (1)...(19): siRNA sense strand
aggagaaacugaugaagcu

SEQ ID NO: 1212163 - RNA, 19 nt, Homo sapiens
  misc_RNA (1)...(19): siRNA sense strand
ugaagaaggagaaacugau

SEQ ID NO: 1212164 - RNA, 19 nt, Homo sapiens
  misc_RNA (1)...(19): siRNA sense strand
gcucagccucugcggagaa

SEQ ID NO: 1212165 - RNA, 19 nt, Homo sapiens
  misc_RNA (1)...(19): siRNA sense strand
ucucuacugugacaaggau

SEQ ID NO: 1212166 - RNA, 19 nt, Homo sapiens
  misc_RNA (1)...(19): siRNA sense strand
ugagaacaggaaacacauu

SEQ ID NO: 1212167 - RNA, 19 nt, Homo sapiens
  misc_RNA (1)...(19): siRNA sense strand
ucaaccaguuugcaaagcu

SEQ ID NO: 1212168 - RNA, 19 nt, Homo sapiens
  misc_RNA (1)...(19): siRNA sense strand
gaaggagaaacugaugaag

SEQ ID NO: 1212169 - RNA, 19 nt, Homo sapiens
  misc_RNA (1)...(19): siRNA sense strand
ggaguuuugucucuacugu

SEQ ID NO: 1212170 - RNA, 19 nt, Homo sapiens
  misc_RNA (1)...(19): siRNA sense strand
aaagucauccaucccuuca

SEQ ID NO: 1212171 - RNA, 19 nt, Homo sapiens
  misc_RNA (1)...(19): siRNA sense strand
gggugacagauaaauuuga

SEQ ID NO: 1212172 - RNA, 19 nt, Homo sapiens
  misc_RNA (1)...(19): siRNA sense strand
ccagugaggucagcgauua

SEQ ID NO: 1212173 - RNA, 19 nt, Homo sapiens
  misc_RNA (1)...(19): siRNA sense strand
gcauuagccucauccuuga

SEQ ID NO: 1212174 - RNA, 19 nt, Homo sapiens
  misc_RNA (1)...(19): siRNA sense strand
gaacaggaaacacauugaa

SEQ ID NO: 1212175 - RNA, 19 nt, Homo sapiens
  misc_RNA (1)...(19): siRNA sense strand
ugacaaggauaaaggacaa

SEQ ID NO: 1212176 - RNA, 19 nt, Homo sapiens
  misc_RNA (1)...(19): siRNA sense strand
caggaaacacauugaauuu

SEQ ID NO: 1212177 - RNA, 19 nt, Homo sapiens
  misc_RNA (1)...(19): siRNA sense strand
gaaaggaaguccgauucuc

SEQ ID NO: 1212178 - RNA, 19 nt, Homo sapiens
  misc_RNA (1)...(19): siRNA sense strand
gaagaaggagaaacugaug

SEQ ID NO: 1212179 - RNA, 19 nt, Homo sapiens
  misc_RNA (1)...(19): siRNA sense strand
ggagaaaggaaguccgauu

SEQ ID NO: 1212180 - RNA, 19 nt, Homo sapiens
  misc_RNA (1)...(19): siRNA sense strand
gagaaaggaaguccgauuc

SEQ ID NO: 1212181 - RNA, 19 nt, Homo sapiens
  misc_RNA (1)...(19): siRNA sense strand
gagaacaggaaacacauug

SEQ ID NO: 1212182 - RNA, 19 nt, Homo sapiens
  misc_RNA (1)...(19): siRNA sense strand
gauaaaggacaaagucauc

SEQ ID NO: 1212183 - RNA, 19 nt, Homo sapiens
  misc_RNA (1)...(19): siRNA sense strand
acaggaaacacauugaauu

SEQ ID NO: 1212184 - RNA, 19 nt, Homo sapiens
  misc_RNA (1)...(19): siRNA sense strand
gaagcuggcugcccaaaag

SEQ ID NO: 1212185 - RNA, 19 nt, Homo sapiens
  misc_RNA (1)...(19): siRNA sense strand
ggugacagauaaauuugag

SEQ ID NO: 1212186 - RNA, 19 nt, Homo sapiens
  misc_RNA (1)...(19): siRNA sense strand
gcaccuccugcaauuguaa

SEQ ID NO: 1212187 - RNA, 19 nt, Homo sapiens
  misc_RNA (1)...(19): siRNA sense strand
cagauaaauuugagaacag

SEQ ID NO: 1212188 - RNA, 19 nt, Homo sapiens
  misc_RNA (1)...(19): siRNA sense strand
ggauaaaggacaaagucau

SEQ ID NO: 1212189 - RNA, 19 nt, Homo sapiens
  misc_RNA (1)...(19): siRNA sense strand
agaaggagaaacugaugaa

SEQ ID NO: 1212190 - RNA, 19 nt, Homo sapiens
  misc_RNA (1)...(19): siRNA sense strand
aggagaaacugaugaagcu

SEQ ID NO: 1212191 - RNA, 19 nt, Homo sapiens
  misc_RNA (1)...(19): siRNA sense strand
ugaagaaggagaaacugau

SEQ ID NO: 1212192 - RNA, 19 nt, Homo sapiens
  misc_RNA (1)...(19): siRNA sense strand
gcucagccucugcggagaa

SEQ ID NO: 1212193 - RNA, 19 nt, Homo sapiens
  misc_RNA (1)...(19): siRNA sense strand
ucucuacugugacaaggau

SEQ ID NO: 1212194 - RNA, 19 nt, Homo sapiens
  misc_RNA (1)...(19): siRNA sense strand
ugagaacaggaaacacauu

SEQ ID NO: 1212195 - RNA, 19 nt, Homo sapiens
  misc_RNA (1)...(19): siRNA sense strand
ucaaccaguuugcaaagcu

SEQ ID NO: 1212196 - RNA, 19 nt, Homo sapiens
  misc_RNA (1)...(19): siRNA sense strand
gaaggagaaacugaugaag

SEQ ID NO: 1212197 - RNA, 19 nt, Homo sapiens
  misc_RNA (1)...(19): siRNA sense strand
ggaguuuugucucuacugu

SEQ ID NO: 1212198 - RNA, 19 nt, Homo sapiens
  misc_RNA (1)...(19): siRNA sense strand
aaagucauccaucccuuca

SEQ ID NO: 1212199 - RNA, 19 nt, Homo sapiens
  misc_RNA (1)...(19): siRNA sense strand
gggugacagauaaauuuga

SEQ ID NO: 1212200 - RNA, 19 nt, Homo sapiens
  misc_RNA (1)...(19): siRNA sense strand
ccagugaggucagcgauua

SEQ ID NO: 1212201 - RNA, 19 nt, Homo sapiens
  misc_RNA (1)...(19): siRNA sense strand
gcauuagccucauccuuga

SEQ ID NO: 1212202 - RNA, 19 nt, Homo sapiens
  misc_RNA (1)...(19): siRNA sense strand
gaacaggaaacacauugaa

SEQ ID NO: 1212203 - RNA, 19 nt, Homo sapiens
  misc_RNA (1)...(19): siRNA sense strand
ugacaaggauaaaggacaa

SEQ ID NO: 1212204 - RNA, 19 nt, Homo sapiens
  misc_RNA (1)...(19): siRNA sense strand
caggaaacacauugaauuu

SEQ ID NO: 1212205 - RNA, 19 nt, Homo sapiens
  misc_RNA (1)...(19): siRNA sense strand
gaaaggaaguccgauucuc

SEQ ID NO: 1212206 - RNA, 19 nt, Homo sapiens
  misc_RNA (1)...(19): siRNA sense strand
gaagaaggagaaacugaug

SEQ ID NO: 1212207 - RNA, 19 nt, Homo sapiens
  misc_RNA (1)...(19): siRNA sense strand
ggagaaaggaaguccgauu

SEQ ID NO: 1212208 - RNA, 19 nt, Homo sapiens
  misc_RNA (1)...(19): siRNA sense strand
gagaaaggaaguccgauuc

SEQ ID NO: 1212209 - RNA, 19 nt, Homo sapiens
  misc_RNA (1)...(19): siRNA sense strand
gagaacaggaaacacauug

SEQ ID NO: 1212210 - RNA, 19 nt, Homo sapiens
  misc_RNA (1)...(19): siRNA sense strand
gauaaaggacaaagucauc

SEQ ID NO: 1212211 - RNA, 19 nt, Homo sapiens
  misc_RNA (1)...(19): siRNA sense strand
acaggaaacacauugaauu

SEQ ID NO: 1212212 - RNA, 19 nt, Homo sapiens
  misc_RNA (1)...(19): siRNA sense strand
gaagcuggcugcccaaaag

SEQ ID NO: 1212213 - RNA, 19 nt, Homo sapiens
  misc_RNA (1)...(19): siRNA sense strand
ggugacagauaaauuugag

SEQ ID NO: 1212214 - RNA, 19 nt, Homo sapiens
  misc_RNA (1)...(19): siRNA sense strand
gcaccuccugcaauuguaa

SEQ ID NO: 1212215 - RNA, 19 nt, Homo sapiens
  misc_RNA (1)...(19): siRNA sense strand
cagauaaauuugagaacag

SEQ ID NO: 1212216 - RNA, 19 nt, Homo sapiens
  misc_RNA (1)...(19): siRNA sense strand
ggauaaaggacaaagucau

SEQ ID NO: 1212217 - RNA, 19 nt, Homo sapiens
  misc_RNA (1)...(19): siRNA sense strand
agaaggagaaacugaugaa

SEQ ID NO: 1212218 - RNA, 19 nt, Homo sapiens
  misc_RNA (1)...(19): siRNA sense strand
aggagaaacugaugaagcu

SEQ ID NO: 1212219 - RNA, 19 nt, Homo sapiens
  misc_RNA (1)...(19): siRNA sense strand
ugaagaaggagaaacugau

SEQ ID NO: 1212220 - RNA, 19 nt, Homo sapiens
  misc_RNA (1)...(19): siRNA sense strand
gcucagccucugcggagaa

SEQ ID NO: 1212221 - RNA, 19 nt, Homo sapiens
  misc_RNA (1)...(19): siRNA sense strand
ucucuacugugacaaggau

SEQ ID NO: 1212222 - RNA, 19 nt, Homo sapiens
  misc_RNA (1)...(19): siRNA sense strand
ugagaacaggaaacacauu

SEQ ID NO: 1212223 - RNA, 19 nt, Homo sapiens
  misc_RNA (1)...(19): siRNA sense strand
ucaaccaguuugcaaagcu

SEQ ID NO: 1212224 - RNA, 19 nt, Homo sapiens
  misc_RNA (1)...(19): siRNA sense strand
gaaggagaaacugaugaag

SEQ ID NO: 1212225 - RNA, 19 nt, Homo sapiens
  misc_RNA (1)...(19): siRNA sense strand
ggaguuuugucucuacugu

SEQ ID NO: 1212226 - RNA, 19 nt, Homo sapiens
  misc_RNA (1)...(19): siRNA sense strand
aaagucauccaucccuuca

SEQ ID NO: 1212227 - RNA, 19 nt, Homo sapiens
  misc_RNA (1)...(19): siRNA sense strand
gggugacagauaaauuuga

SEQ ID NO: 1212228 - RNA, 19 nt, Homo sapiens
  misc_RNA (1)...(19): siRNA sense strand
ccagugaggucagcgauua

SEQ ID NO: 1212229 - RNA, 19 nt, Homo sapiens
  misc_RNA (1)...(19): siRNA sense strand
gcauuagccucauccuuga

SEQ ID NO: 1212230 - RNA, 19 nt, Homo sapiens
  misc_RNA (1)...(19): siRNA sense strand
gaacaggaaacacauugaa

SEQ ID NO: 1212231 - RNA, 19 nt, Homo sapiens
  misc_RNA (1)...(19): siRNA sense strand
ugacaaggauaaaggacaa

SEQ ID NO: 1212232 - RNA, 19 nt, Homo sapiens
  misc_RNA (1)...(19): siRNA sense strand
caggaaacacauugaauuu

SEQ ID NO: 1212233 - RNA, 19 nt, Homo sapiens
  misc_RNA (1)...(19): siRNA sense strand
gaaaggaaguccgauucuc

SEQ ID NO: 1212234 - RNA, 19 nt, Homo sapiens
  misc_RNA (1)...(19): siRNA sense strand
gaagaaggagaaacugaug

SEQ ID NO: 1212235 - RNA, 19 nt, Homo sapiens
  misc_RNA (1)...(19): siRNA sense strand
ggagaaaggaaguccgauu

SEQ ID NO: 1212236 - RNA, 19 nt, Homo sapiens
  misc_RNA (1)...(19): siRNA sense strand
gagaaaggaaguccgauuc

SEQ ID NO: 1212237 - RNA, 19 nt, Homo sapiens
  misc_RNA (1)...(19): siRNA sense strand
gagaacaggaaacacauug

SEQ ID NO: 1212238 - RNA, 19 nt, Homo sapiens
  misc_RNA (1)...(19): siRNA sense strand
gauaaaggacaaagucauc

SEQ ID NO: 1212239 - RNA, 19 nt, Homo sapiens
  misc_RNA (1)...(19): siRNA sense strand
acaggaaacacauugaauu

SEQ ID NO: 1212240 - RNA, 19 nt, Homo sapiens
  misc_RNA (1)...(19): siRNA sense strand
gaagcuggcugcccaaaag

SEQ ID NO: 1212241 - RNA, 19 nt, Homo sapiens
  misc_RNA (1)...(19): siRNA sense strand
ggugacagauaaauuugag

SEQ ID NO: 1212242 - RNA, 19 nt, Homo sapiens
  misc_RNA (1)...(19): siRNA sense strand
gcaccuccugcaauuguaa

SEQ ID NO: 1212243 - RNA, 19 nt, Homo sapiens
  misc_RNA (1)...(19): siRNA sense strand
cagauaaauuugagaacag

SEQ ID NO: 1212244 - RNA, 19 nt, Homo sapiens
  misc_RNA (1)...(19): siRNA sense strand
ggauaaaggacaaagucau

SEQ ID NO: 1212245 - RNA, 19 nt, Homo sapiens
  misc_RNA (1)...(19): siRNA sense strand
agaaggagaaacugaugaa

SEQ ID NO: 1212246 - RNA, 19 nt, Homo sapiens
  misc_RNA (1)...(19): siRNA sense strand
aggagaaacugaugaagcu

SEQ ID NO: 1212247 - RNA, 19 nt, Homo sapiens
  misc_RNA (1)...(19): siRNA sense strand
ugaagaaggagaaacugau

SEQ ID NO: 1212248 - RNA, 19 nt, Homo sapiens
  misc_RNA (1)...(19): siRNA sense strand
gcucagccucugcggagaa

SEQ ID NO: 1212249 - RNA, 19 nt, Homo sapiens
  misc_RNA (1)...(19): siRNA sense strand
ucucuacugugacaaggau

SEQ ID NO: 1212250 - RNA, 19 nt, Homo sapiens
  misc_RNA (1)...(19): siRNA sense strand
ugagaacaggaaacacauu

SEQ ID NO: 1212251 - RNA, 19 nt, Homo sapiens
  misc_RNA (1)...(19): siRNA sense strand
ucaaccaguuugcaaagcu

SEQ ID NO: 1212252 - RNA, 19 nt, Homo sapiens
  misc_RNA (1)...(19): siRNA sense strand
gaaggagaaacugaugaag

SEQ ID NO: 1212253 - RNA, 19 nt, Homo sapiens
  misc_RNA (1)...(19): siRNA sense strand
ggaguuuugucucuacugu

SEQ ID NO: 1212254 - RNA, 19 nt, Homo sapiens
  misc_RNA (1)...(19): siRNA sense strand
aaagucauccaucccuuca

SEQ ID NO: 1212255 - RNA, 19 nt, Homo sapiens
  misc_RNA (1)...(19): siRNA sense strand
gggugacagauaaauuuga

SEQ ID NO: 1212256 - RNA, 19 nt, Homo sapiens
  misc_RNA (1)...(19): siRNA sense strand
ccagugaggucagcgauua

SEQ ID NO: 1212257 - RNA, 19 nt, Homo sapiens
  misc_RNA (1)...(19): siRNA sense strand
gcauuagccucauccuuga

SEQ ID NO: 1212258 - RNA, 19 nt, Homo sapiens
  misc_RNA (1)...(19): siRNA sense strand
gaacaggaaacacauugaa

SEQ ID NO: 1212259 - RNA, 19 nt, Homo sapiens
  misc_RNA (1)...(19): siRNA sense strand
ugacaaggauaaaggacaa

SEQ ID NO: 1212260 - RNA, 19 nt, Homo sapiens
  misc_RNA (1)...(19): siRNA sense strand
caggaaacacauugaauuu

SEQ ID NO: 1212261 - RNA, 19 nt, Homo sapiens
  misc_RNA (1)...(19): siRNA sense strand
gaaaggaaguccgauucuc

SEQ ID NO: 1212262 - RNA, 19 nt, Homo sapiens
  misc_RNA (1)...(19): siRNA sense strand
gaagaaggagaaacugaug

SEQ ID NO: 1212263 - RNA, 19 nt, Homo sapiens
  misc_RNA (1)...(19): siRNA sense strand
ggagaaaggaaguccgauu

SEQ ID NO: 1212264 - RNA, 19 nt, Homo sapiens
  misc_RNA (1)...(19): siRNA sense strand
gagaaaggaaguccgauuc

SEQ ID NO: 1212265 - RNA, 19 nt, Homo sapiens
  misc_RNA (1)...(19): siRNA sense strand
gagaacaggaaacacauug

SEQ ID NO: 1212266 - RNA, 19 nt, Homo sapiens
  misc_RNA (1)...(19): siRNA sense strand
gauaaaggacaaagucauc

SEQ ID NO: 1212267 - RNA, 19 nt, Homo sapiens
  misc_RNA (1)...(19): siRNA sense strand
acaggaaacacauugaauu

SEQ ID NO: 1212268 - RNA, 19 nt, Homo sapiens
  misc_RNA (1)...(19): siRNA sense strand
gaagcuggcugcccaaaag

SEQ ID NO: 1212269 - RNA, 19 nt, Homo sapiens
  misc_RNA (1)...(19): siRNA sense strand
ggugacagauaaauuugag

SEQ ID NO: 1212270 - RNA, 19 nt, Homo sapiens
  misc_RNA (1)...(19): siRNA sense strand
gcaccuccugcaauuguaa

SEQ ID NO: 1212271 - RNA, 19 nt, Homo sapiens
  misc_RNA (1)...(19): siRNA sense strand
cagauaaauuugagaacag

SEQ ID NO: 1212272 - RNA, 19 nt, Homo sapiens
  misc_RNA (1)...(19): siRNA sense strand
ggauaaaggacaaagucau

SEQ ID NO: 1212273 - RNA, 19 nt, Homo sapiens
  misc_RNA (1)...(19): siRNA sense strand
agaaggagaaacugaugaa

SEQ ID NO: 1212274 - RNA, 19 nt, Homo sapiens
  misc_RNA (1)...(19): siRNA sense strand
aggagaaacugaugaagcu

SEQ ID NO: 1212275 - RNA, 19 nt, Homo sapiens
  misc_RNA (1)...(19): siRNA sense strand
ugaagaaggagaaacugau

SEQ ID NO: 1212276 - RNA, 19 nt, Homo sapiens
  misc_RNA (1)...(19): siRNA sense strand
gcucagccucugcggagaa

SEQ ID NO: 1212277 - RNA, 19 nt, Homo sapiens
  misc_RNA (1)...(19): siRNA sense strand
ucucuacugugacaaggau

SEQ ID NO: 1212278 - RNA, 19 nt, Homo sapiens
  misc_RNA (1)...(19): siRNA sense strand
ugagaacaggaaacacauu

SEQ ID NO: 1212279 - RNA, 19 nt, Homo sapiens
  misc_RNA (1)...(19): siRNA sense strand
ucaaccaguuugcaaagcu

SEQ ID NO: 1212280 - RNA, 19 nt, Homo sapiens
  misc_RNA (1)...(19): siRNA sense strand
gaaggagaaacugaugaag

SEQ ID NO: 1212281 - RNA, 19 nt, Homo sapiens
  misc_RNA (1)...(19): siRNA sense strand
ggaguuuugucucuacugu

SEQ ID NO: 1212282 - RNA, 19 nt, Homo sapiens
  misc_RNA (1)...(19): siRNA sense strand
aaagucauccaucccuuca

SEQ ID NO: 1212283 - RNA, 19 nt, Homo sapiens
  misc_RNA (1)...(19): siRNA sense strand
gggugacagauaaauuuga

SEQ ID NO: 1212284 - RNA, 19 nt, Homo sapiens
  misc_RNA (1)...(19): siRNA sense strand
ccagugaggucagcgauua

SEQ ID NO: 1212285 - RNA, 19 nt, Homo sapiens
  misc_RNA (1)...(19): siRNA sense strand
gcauuagccucauccuuga

SEQ ID NO: 1212286 - RNA, 19 nt, Homo sapiens
  misc_RNA (1)...(19): siRNA sense strand
gaacaggaaacacauugaa

SEQ ID NO: 1212287 - RNA, 19 nt, Homo sapiens
  misc_RNA (1)...(19): siRNA sense strand
ugacaaggauaaaggacaa

SEQ ID NO: 1212288 - RNA, 19 nt, Homo sapiens
  misc_RNA (1)...(19): siRNA sense strand
caggaaacacauugaauuu

SEQ ID NO: 1212289 - RNA, 19 nt, Homo sapiens
  misc_RNA (1)...(19): siRNA sense strand
gaaaggaaguccgauucuc

SEQ ID NO: 1212290 - RNA, 19 nt, Homo sapiens
  misc_RNA (1)...(19): siRNA sense strand
gaagaaggagaaacugaug

SEQ ID NO: 1212291 - RNA, 19 nt, Homo sapiens
  misc_RNA (1)...(19): siRNA sense strand
ggagaaaggaaguccgauu

SEQ ID NO: 1212292 - RNA, 19 nt, Homo sapiens
  misc_RNA (1)...(19): siRNA sense strand
gagaaaggaaguccgauuc

SEQ ID NO: 1212293 - RNA, 19 nt, Homo sapiens
  misc_RNA (1)...(19): siRNA sense strand
gagaacaggaaacacauug

SEQ ID NO: 1212294 - RNA, 19 nt, Homo sapiens
  misc_RNA (1)...(19): siRNA sense strand
gauaaaggacaaagucauc

SEQ ID NO: 1212295 - RNA, 19 nt, Homo sapiens
  misc_RNA (1)...(19): siRNA sense strand
acaggaaacacauugaauu

SEQ ID NO: 1212296 - RNA, 19 nt, Homo sapiens
  misc_RNA (1)...(19): siRNA sense strand
gaagcuggcugcccaaaag

SEQ ID NO: 1212297 - RNA, 19 nt, Homo sapiens
  misc_RNA (1)...(19): siRNA sense strand
ggugacagauaaauuugag

SEQ ID NO: 1212298 - RNA, 19 nt, Homo sapiens
  misc_RNA (1)...(19): siRNA sense strand
gcaccuccugcaauuguaa

SEQ ID NO: 1212299 - RNA, 19 nt, Homo sapiens
  misc_RNA (1)...(19): siRNA sense strand
cagauaaauuugagaacag

SEQ ID NO: 1212300 - RNA, 19 nt, Homo sapiens
  misc_RNA (1)...(19): siRNA sense strand
ggauaaaggacaaagucau

SEQ ID NO: 1212301 - RNA, 19 nt, Homo sapiens
  misc_RNA (1)...(19): siRNA sense strand
agaaggagaaacugaugaa

SEQ ID NO: 1212302 - RNA, 19 nt, Homo sapiens
  misc_RNA (1)...(19): siRNA sense strand
aggagaaacugaugaagcu

SEQ ID NO: 1212303 - RNA, 19 nt, Homo sapiens
  misc_RNA (1)...(19): siRNA sense strand
ugaagaaggagaaacugau

SEQ ID NO: 1212304 - RNA, 19 nt, Homo sapiens
  misc_RNA (1)...(19): siRNA sense strand
gcucagccucugcggagaa

SEQ ID NO: 1212305 - RNA, 19 nt, Homo sapiens
  misc_RNA (1)...(19): siRNA sense strand
ucucuacugugacaaggau

SEQ ID NO: 1212306 - RNA, 19 nt, Homo sapiens
  misc_RNA (1)...(19): siRNA sense strand
ugagaacaggaaacacauu

SEQ ID NO: 1212307 - RNA, 19 nt, Homo sapiens
  misc_RNA (1)...(19): siRNA sense strand
ucaaccaguuugcaaagcu

SEQ ID NO: 1212308 - RNA, 19 nt, Homo sapiens
  misc_RNA (1)...(19): siRNA sense strand
gaaggagaaacugaugaag

SEQ ID NO: 1212309 - RNA, 19 nt, Homo sapiens
  misc_RNA (1)...(19): siRNA sense strand
ggaguuuugucucuacugu

SEQ ID NO: 1212310 - RNA, 19 nt, Homo sapiens
  misc_RNA (1)...(19): siRNA sense strand
aaagucauccaucccuuca

SEQ ID NO: 1212311 - RNA, 19 nt, Homo sapiens
  misc_RNA (1)...(19): siRNA sense strand
gggugacagauaaauuuga

SEQ ID NO: 1212312 - RNA, 19 nt, Homo sapiens
  misc_RNA (1)...(19): siRNA sense strand
ccagugaggucagcgauua

SEQ ID NO: 1212313 - RNA, 19 nt, Homo sapiens
  misc_RNA (1)...(19): siRNA sense strand
gcauuagccucauccuuga

SEQ ID NO: 1212314 - RNA, 19 nt, Homo sapiens
  misc_RNA (1)...(19): siRNA sense strand
gaacaggaaacacauugaa

SEQ ID NO: 1212315 - RNA, 19 nt, Homo sapiens
  misc_RNA (1)...(19): siRNA sense strand
ugacaaggauaaaggacaa

SEQ ID NO: 1212316 - RNA, 19 nt, Homo sapiens
  misc_RNA (1)...(19): siRNA sense strand
caggaaacacauugaauuu

SEQ ID NO: 1212317 - RNA, 19 nt, Homo sapiens
  misc_RNA (1)...(19): siRNA sense strand
gaaaggaaguccgauucuc

SEQ ID NO: 1212318 - RNA, 19 nt, Homo sapiens
  misc_RNA (1)...(19): siRNA sense strand
gaagaaggagaaacugaug

SEQ ID NO: 1212319 - RNA, 19 nt, Homo sapiens
  misc_RNA (1)...(19): siRNA sense strand
ggagaaaggaaguccgauu

SEQ ID NO: 1212320 - RNA, 19 nt, Homo sapiens
  misc_RNA (1)...(19): siRNA sense strand
gagaaaggaaguccgauuc

SEQ ID NO: 1212321 - RNA, 19 nt, Homo sapiens
  misc_RNA (1)...(19): siRNA sense strand
gagaacaggaaacacauug

SEQ ID NO: 1212322 - RNA, 19 nt, Homo sapiens
  misc_RNA (1)...(19): siRNA sense strand
gauaaaggacaaagucauc

SEQ ID NO: 1212323 - RNA, 19 nt, Homo sapiens
  misc_RNA (1)...(19): siRNA sense strand
acaggaaacacauugaauu

SEQ ID NO: 1212324 - RNA, 19 nt, Homo sapiens
  misc_RNA (1)...(19): siRNA sense strand
gaagcuggcugcccaaaag

SEQ ID NO: 1212325 - RNA, 19 nt, Homo sapiens
  misc_RNA (1)...(19): siRNA sense strand
ggugacagauaaauuugag

SEQ ID NO: 1212326 - RNA, 19 nt, Homo sapiens
  misc_RNA (1)...(19): siRNA sense strand
gcaccuccugcaauuguaa

SEQ ID NO: 1212327 - RNA, 19 nt, Homo sapiens
  misc_RNA (1)...(19): siRNA sense strand
cagauaaauuugagaacag

SEQ ID NO: 1212328 - RNA, 19 nt, Homo sapiens
  misc_RNA (1)...(19): siRNA sense strand
ggauaaaggacaaagucau

SEQ ID NO: 1212329 - RNA, 19 nt, Homo sapiens
  misc_RNA (1)...(19): siRNA sense strand
agaaggagaaacugaugaa

SEQ ID NO: 1212330 - RNA, 19 nt, Homo sapiens
  misc_RNA (1)...(19): siRNA sense strand
aggagaaacugaugaagcu

SEQ ID NO: 1212331 - RNA, 19 nt, Homo sapiens
  misc_RNA (1)...(19): siRNA sense strand
ugaagaaggagaaacugau

SEQ ID NO: 1212332 - RNA, 19 nt, Homo sapiens
  misc_RNA (1)...(19): siRNA sense strand
gcucagccucugcggagaa

SEQ ID NO: 1212333 - RNA, 19 nt, Homo sapiens
  misc_RNA (1)...(19): siRNA sense strand
ucucuacugugacaaggau

SEQ ID NO: 1212334 - RNA, 19 nt, Homo sapiens
  misc_RNA (1)...(19): siRNA sense strand
ugagaacaggaaacacauu

SEQ ID NO: 1212335 - RNA, 19 nt, Homo sapiens
  misc_RNA (1)...(19): siRNA sense strand
ucaaccaguuugcaaagcu

SEQ ID NO: 1212336 - RNA, 19 nt, Homo sapiens
  misc_RNA (1)...(19): siRNA sense strand
gaaggagaaacugaugaag

SEQ ID NO: 1212337 - RNA, 19 nt, Homo sapiens
  misc_RNA (1)...(19): siRNA sense strand
ggaguuuugucucuacugu

SEQ ID NO: 1212338 - RNA, 19 nt, Homo sapiens
  misc_RNA (1)...(19): siRNA sense strand
aaagucauccaucccuuca

SEQ ID NO: 1212339 - RNA, 19 nt, Homo sapiens
  misc_RNA (1)...(19): siRNA sense strand
gggugacagauaaauuuga

SEQ ID NO: 1212340 - RNA, 19 nt, Homo sapiens
  misc_RNA (1)...(19): siRNA sense strand
ccagugaggucagcgauua

SEQ ID NO: 1212341 - RNA, 19 nt, Homo sapiens
  misc_RNA (1)...(19): siRNA sense strand
gcauuagccucauccuuga

SEQ ID NO: 1212342 - RNA, 19 nt, Homo sapiens
  misc_RNA (1)...(19): siRNA sense strand
gaacaggaaacacauugaa

SEQ ID NO: 1212343 - RNA, 19 nt, Homo sapiens
  misc_RNA (1)...(19): siRNA sense strand
ugacaaggauaaaggacaa

SEQ ID NO: 1212344 - RNA, 19 nt, Homo sapiens
  misc_RNA (1)...(19): siRNA sense strand
caggaaacacauugaauuu

SEQ ID NO: 1212345 - RNA, 19 nt, Homo sapiens
  misc_RNA (1)...(19): siRNA sense strand
gaaaggaaguccgauucuc

SEQ ID NO: 1212346 - RNA, 19 nt, Homo sapiens
  misc_RNA (1)...(19): siRNA sense strand
gaagaaggagaaacugaug

SEQ ID NO: 1212347 - RNA, 19 nt, Homo sapiens
  misc_RNA (1)...(19): siRNA sense strand
ggagaaaggaaguccgauu

SEQ ID NO: 1212348 - RNA, 19 nt, Homo sapiens
  misc_RNA (1)...(19): siRNA sense strand
gagaaaggaaguccgauuc

SEQ ID NO: 1212349 - RNA, 19 nt, Homo sapiens
  misc_RNA (1)...(19): siRNA sense strand
gagaacaggaaacacauug

SEQ ID NO: 1212350 - RNA, 19 nt, Homo sapiens
  misc_RNA (1)...(19): siRNA sense strand
gauaaaggacaaagucauc

SEQ ID NO: 1212351 - RNA, 19 nt, Homo sapiens
  misc_RNA (1)...(19): siRNA sense strand
acaggaaacacauugaauu

SEQ ID NO: 1212352 - RNA, 19 nt, Homo sapiens
  misc_RNA (1)...(19): siRNA sense strand
gaagcuggcugcccaaaag

SEQ ID NO: 1212353 - RNA, 19 nt, Homo sapiens
  misc_RNA (1)...(19): siRNA sense strand
ggugacagauaaauuugag

SEQ ID NO: 1212354 - RNA, 19 nt, Homo sapiens
  misc_RNA (1)...(19): siRNA sense strand
gcaccuccugcaauuguaa

SEQ ID NO: 1212355 - RNA, 19 nt, Homo sapiens
  misc_RNA (1)...(19): siRNA sense strand
cagauaaauuugagaacag

SEQ ID NO: 1212356 - RNA, 19 nt, Homo sapiens
  misc_RNA (1)...(19): siRNA sense strand
ggauaaaggacaaagucau

SEQ ID NO: 1212357 - RNA, 19 nt, Homo sapiens
  misc_RNA (1)...(19): siRNA sense strand
agaaggagaaacugaugaa

SEQ ID NO: 1212358 - RNA, 19 nt, Homo sapiens
  misc_RNA (1)...(19): siRNA sense strand
aggagaaacugaugaagcu

SEQ ID NO: 1212359 - RNA, 19 nt, Homo sapiens
  misc_RNA (1)...(19): siRNA sense strand
ugaagaaggagaaacugau

SEQ ID NO: 1212360 - RNA, 19 nt, Homo sapiens
  misc_RNA (1)...(19): siRNA sense strand
gcucagccucugcggagaa

SEQ ID NO: 1212361 - RNA, 19 nt, Homo sapiens
  misc_RNA (1)...(19): siRNA sense strand
ucucuacugugacaaggau

SEQ ID NO: 1212362 - RNA, 19 nt, Homo sapiens
  misc_RNA (1)...(19): siRNA sense strand
ugagaacaggaaacacauu

SEQ ID NO: 1212363 - RNA, 19 nt, Homo sapiens
  misc_RNA (1)...(19): siRNA sense strand
ucaaccaguuugcaaagcu

SEQ ID NO: 1212364 - RNA, 19 nt, Homo sapiens
  misc_RNA (1)...(19): siRNA sense strand
gaaggagaaacugaugaag

SEQ ID NO: 1212365 - RNA, 19 nt, Homo sapiens
  misc_RNA (1)...(19): siRNA sense strand
ggaguuuugucucuacugu

SEQ ID NO: 1212366 - RNA, 19 nt, Homo sapiens
  misc_RNA (1)...(19): siRNA sense strand
aaagucauccaucccuuca

SEQ ID NO: 1212367 - RNA, 19 nt, Homo sapiens
  misc_RNA (1)...(19): siRNA sense strand
gggugacagauaaauuuga

SEQ ID NO: 1212368 - RNA, 19 nt, Homo sapiens
  misc_RNA (1)...(19): siRNA sense strand
caucaagccuacugucuuu

SEQ ID NO: 1212369 - RNA, 19 nt, Homo sapiens
  misc_RNA (1)...(19): siRNA sense strand
gaaagcagcuggcgauucc

SEQ ID NO: 1212370 - RNA, 19 nt, Homo sapiens
  misc_RNA (1)...(19): siRNA sense strand
ggaagaauccaucuacaau

SEQ ID NO: 1212371 - RNA, 19 nt, Homo sapiens
  misc_RNA (1)...(19): siRNA sense strand
gcaacacugugguuaugaa

SEQ ID NO: 1212372 - RNA, 19 nt, Homo sapiens
  misc_RNA (1)...(19): siRNA sense strand
aagaauccaucuacaauga

SEQ ID NO: 1212373 - RNA, 19 nt, Homo sapiens
  misc_RNA (1)...(19): siRNA sense strand
uaaagacggucaccaucaa

SEQ ID NO: 1212374 - RNA, 19 nt, Homo sapiens
  misc_RNA (1)...(19): siRNA sense strand
gagcgugguuucuucauca

SEQ ID NO: 1212375 - RNA, 19 nt, Homo sapiens
  misc_RNA (1)...(19): siRNA sense strand
caagguguaucgguacuuu

SEQ ID NO: 1212376 - RNA, 19 nt, Homo sapiens
  misc_RNA (1)...(19): siRNA sense strand
gaagaauccaucuacaaug

SEQ ID NO: 1212377 - RNA, 19 nt, Homo sapiens
  misc_RNA (1)...(19): siRNA sense strand
ggacaaggccauguacuuc

SEQ ID NO: 1212378 - RNA, 19 nt, Homo sapiens
  misc_RNA (1)...(19): siRNA sense strand
guaaagacggucaccauca

SEQ ID NO: 1212379 - RNA, 19 nt, Homo sapiens
  misc_RNA (1)...(19): siRNA sense strand
acaaccagcuguucaucaa

SEQ ID NO: 1212380 - RNA, 19 nt, Homo sapiens
  misc_RNA (1)...(19): siRNA sense strand
gguaaacaccuacaacauc

SEQ ID NO: 1212381 - RNA, 19 nt, Homo sapiens
  misc_RNA (1)...(19): siRNA sense strand
gaauccaucuacaaugagu

SEQ ID NO: 1212382 - RNA, 19 nt, Homo sapiens
  misc_RNA (1)...(19): siRNA sense strand
ccaucaagguuccucagaa

SEQ ID NO: 1212383 - RNA, 19 nt, Homo sapiens
  misc_RNA (1)...(19): siRNA sense strand
cgagagaaccguggagaaa

SEQ ID NO: 1212384 - RNA, 19 nt, Homo sapiens
  misc_RNA (1)...(19): siRNA sense strand
ggacaaggagcaguuugaa

SEQ ID NO: 1212385 - RNA, 19 nt, Homo sapiens
  misc_RNA (1)...(19): siRNA sense strand
caggaugacaugagaauug

SEQ ID NO: 1212386 - RNA, 19 nt, Homo sapiens
  misc_RNA (1)...(19): siRNA sense strand
ggccucagguggacaagga

SEQ ID NO: 1212387 - RNA, 19 nt, Homo sapiens
  misc_RNA (1)...(19): siRNA sense strand
caucaagguuccucagaag

SEQ ID NO: 1212388 - RNA, 19 nt, Homo sapiens
  misc_RNA (1)...(19): siRNA sense strand
ugaccgggcugauguggau

SEQ ID NO: 1212389 - RNA, 19 nt, Homo sapiens
  misc_RNA (1)...(19): siRNA sense strand
ggagcgggaucgagucuac

SEQ ID NO: 1212390 - RNA, 19 nt, Homo sapiens
  misc_RNA (1)...(19): siRNA sense strand
gaaagcaaagcagaggaaa

SEQ ID NO: 1212391 - RNA, 19 nt, Homo sapiens
  misc_RNA (1)...(19): siRNA sense strand
gaaggugaccgggcugaug

SEQ ID NO: 1212392 - RNA, 19 nt, Homo sapiens
  misc_RNA (1)...(19): siRNA sense strand
caugagaauugccaaagag

SEQ ID NO: 1212393 - RNA, 19 nt, Homo sapiens
  misc_RNA (1)...(19): siRNA sense strand
ggagcgugguuucuucauc

SEQ ID NO: 1212394 - RNA, 19 nt, Homo sapiens
  misc_RNA (1)...(19): siRNA sense strand
caucaaggaggcaggcuuu

SEQ ID NO: 1212395 - RNA, 19 nt, Homo sapiens
  misc_RNA (1)...(19): siRNA sense strand
gaaccguggagaaagcaaa

SEQ ID NO: 1212396 - RNA, 19 nt, Homo sapiens
  misc_RNA (1)...(19): siRNA sense strand
ucaagguuccucagaagaa

SEQ ID NO: 1212397 - RNA, 19 nt, Homo sapiens
  misc_RNA (1)...(19): siRNA sense strand
gaacgaguccuaggcuaca

SEQ ID NO: 1212398 - RNA, 19 nt, Homo sapiens
  misc_RNA (1)...(19): siRNA sense strand
caagaugcagucagcaaga

SEQ ID NO: 1212399 - RNA, 19 nt, Homo sapiens
  misc_RNA (1)...(19): siRNA sense strand
acaugagaauugccaaaga

SEQ ID NO: 1212400 - RNA, 19 nt, Homo sapiens
  misc_RNA (1)...(19): siRNA sense strand
aacaaugaauggcaagaug

SEQ ID NO: 1212401 - RNA, 19 nt, Homo sapiens
  misc_RNA (1)...(19): siRNA sense strand
gaucaucccguggaacuuc

SEQ ID NO: 1212402 - RNA, 19 nt, Homo sapiens
  misc_RNA (1)...(19): siRNA sense strand
gcaguuugaacgaguccua

SEQ ID NO: 1212403 - RNA, 19 nt, Homo sapiens
  misc_RNA (1)...(19): siRNA sense strand
gcuggccgaugcugacaug

SEQ ID NO: 1212404 - RNA, 19 nt, Homo sapiens
  misc_RNA (1)...(19): siRNA sense strand
gaagauugaggaggugguu

SEQ ID NO: 1212405 - RNA, 19 nt, Homo sapiens
  misc_RNA (1)...(19): siRNA sense strand
gacaaggccauguacuuca

SEQ ID NO: 1212406 - RNA, 19 nt, Homo sapiens
  misc_RNA (1)...(19): siRNA sense strand
acacugugguuaugaaggu

SEQ ID NO: 1212407 - RNA, 19 nt, Homo sapiens
  misc_RNA (1)...(19): siRNA sense strand
guauuuggccucccucauc

SEQ ID NO: 1212408 - RNA, 19 nt, Homo sapiens
  misc_RNA (1)...(19): siRNA sense strand
ggucaugcaggguuggaaa

SEQ ID NO: 1212409 - RNA, 19 nt, Homo sapiens
  misc_RNA (1)...(19): siRNA sense strand
uauuuggccucccucauca

SEQ ID NO: 1212410 - RNA, 19 nt, Homo sapiens
  misc_RNA (1)...(19): siRNA sense strand
gggccaacaacaccaggua

SEQ ID NO: 1212411 - RNA, 19 nt, Homo sapiens
  misc_RNA (1)...(19): siRNA sense strand
augcaggguuggaaacuug

SEQ ID NO: 1212412 - RNA, 19 nt, Homo sapiens
  misc_RNA (1)...(19): siRNA sense strand
caacaaugaauggcaagau

SEQ ID NO: 1212413 - RNA, 19 nt, Homo sapiens
  misc_RNA (1)...(19): siRNA sense strand
aagaugcagucagcaagaa

SEQ ID NO: 1212414 - RNA, 19 nt, Homo sapiens
  misc_RNA (1)...(19): siRNA sense strand
aggcaacacugugguuaug

SEQ ID NO: 1212415 - RNA, 19 nt, Homo sapiens
  misc_RNA (1)...(19): siRNA sense strand
gagagaaccguggagaaag

SEQ ID NO: 1212416 - RNA, 19 nt, Homo sapiens
  misc_RNA (1)...(19): siRNA sense strand
aagcaaagcagaggaaagu

SEQ ID NO: 1212417 - RNA, 19 nt, Homo sapiens
  misc_RNA (1)...(19): siRNA sense strand
uggccucccucaucaagga

SEQ ID NO: 1212418 - RNA, 19 nt, Homo sapiens
  misc_RNA (1)...(19): siRNA sense strand
gaugcagucagcaagaaga

SEQ ID NO: 1212419 - RNA, 19 nt, Homo sapiens
  misc_RNA (1)...(19): siRNA sense strand
cgugcaggaugacaugaga

SEQ ID NO: 1212420 - RNA, 19 nt, Homo sapiens
  misc_RNA (1)...(19): siRNA sense strand
agaaagcaaagcagaggaa

SEQ ID NO: 1212421 - RNA, 19 nt, Homo sapiens
  misc_RNA (1)...(19): siRNA sense strand
gccagaucaucccguggaa

SEQ ID NO: 1212422 - RNA, 19 nt, Homo sapiens
  misc_RNA (1)...(19): siRNA sense strand
ggguaaacaccuacaacau

SEQ ID NO: 1212423 - RNA, 19 nt, Homo sapiens
  misc_RNA (1)...(19): siRNA sense strand
ugacaugagaauugccaaa

SEQ ID NO: 1212424 - RNA, 19 nt, Homo sapiens
  misc_RNA (1)...(19): siRNA sense strand
gcaggaugacaugagaauu

SEQ ID NO: 1212425 - RNA, 19 nt, Homo sapiens
  misc_RNA (1)...(19): siRNA sense strand
cccuggagcugggugguaa

SEQ ID NO: 1212426 - RNA, 19 nt, Homo sapiens
  misc_RNA (1)...(19): siRNA sense strand
gaacuuccccuuggucaug

SEQ ID NO: 1212427 - RNA, 19 nt, Homo sapiens
  misc_RNA (1)...(19): siRNA sense strand
gccaacaacaccagguaug

SEQ ID NO: 1212428 - RNA, 19 nt, Homo sapiens
  misc_RNA (1)...(19): siRNA sense strand
agagaaccguggagaaagc

SEQ ID NO: 1212429 - RNA, 19 nt, Homo sapiens
  misc_RNA (1)...(19): siRNA sense strand
ggcuuaaggccuacacaga

SEQ ID NO: 1212430 - RNA, 19 nt, Homo sapiens
  misc_RNA (1)...(19): siRNA sense strand
gguuuaaggaaucuggaaa

SEQ ID NO: 1212431 - RNA, 19 nt, Homo sapiens
  misc_RNA (1)...(19): siRNA sense strand
ggcaagaugcagucagcaa

SEQ ID NO: 1212432 - RNA, 19 nt, Homo sapiens
  misc_RNA (1)...(19): siRNA sense strand
caaggagcaguuugaacga

SEQ ID NO: 1212433 - RNA, 19 nt, Homo sapiens
  misc_RNA (1)...(19): siRNA sense strand
caugcaggguuggaaacuu

SEQ ID NO: 1212434 - RNA, 19 nt, Homo sapiens
  misc_RNA (1)...(19): siRNA sense strand
gacggucaccaucaagguu

SEQ ID NO: 1212435 - RNA, 19 nt, Homo sapiens
  misc_RNA (1)...(19): siRNA sense strand
ucaucaagccuacugucuu

SEQ ID NO: 1212436 - RNA, 19 nt, Homo sapiens
  misc_RNA (1)...(19): siRNA sense strand
cucgagaccuuggacaaug

SEQ ID NO: 1212437 - RNA, 19 nt, Homo sapiens
  misc_RNA (1)...(19): siRNA sense strand
uaaggccuacacagaggua

SEQ ID NO: 1212438 - RNA, 19 nt, Homo sapiens
  misc_RNA (1)...(19): siRNA sense strand
gacaugagaauugccaaag

SEQ ID NO: 1212439 - RNA, 19 nt, Homo sapiens
  misc_RNA (1)...(19): siRNA sense strand
uggacaaggccauguacuu

SEQ ID NO: 1212440 - RNA, 19 nt, Homo sapiens
  misc_RNA (1)...(19): siRNA sense strand
gcaaggaucgauuugaaua

SEQ ID NO: 1212441 - RNA, 19 nt, Homo sapiens
  misc_RNA (1)...(19): siRNA sense strand
ggagcuggcugucaacaau

SEQ ID NO: 1212442 - RNA, 19 nt, Homo sapiens
  misc_RNA (1)...(19): siRNA sense strand
gcaaacguuucuugaacaa

SEQ ID NO: 1212443 - RNA, 19 nt, Homo sapiens
  misc_RNA (1)...(19): siRNA sense strand
gaggacugcucaugugauu

SEQ ID NO: 1212444 - RNA, 19 nt, Homo sapiens
  misc_RNA (1)...(19): siRNA sense strand
gcagcugcguuaccuguuu

SEQ ID NO: 1212445 - RNA, 19 nt, Homo sapiens
  misc_RNA (1)...(19): siRNA sense strand
gaagggacgugggaaggaa

SEQ ID NO: 1212446 - RNA, 19 nt, Homo sapiens
  misc_RNA (1)...(19): siRNA sense strand
cgagcuggcugccgaguuu

SEQ ID NO: 1212447 - RNA, 19 nt, Homo sapiens
  misc_RNA (1)...(19): siRNA sense strand
ggacguaugucuauuacac

SEQ ID NO: 1212448 - RNA, 19 nt, Homo sapiens
  misc_RNA (1)...(19): siRNA sense strand
gacagcaucucaaagacaa

SEQ ID NO: 1212449 - RNA, 19 nt, Homo sapiens
  misc_RNA (1)...(19): siRNA sense strand
ugcaauggcucaucagauu

SEQ ID NO: 1212450 - RNA, 19 nt, Homo sapiens
  misc_RNA (1)...(19): siRNA sense strand
caucagaccugcauugaac

SEQ ID NO: 1212451 - RNA, 19 nt, Homo sapiens
  misc_RNA (1)...(19): siRNA sense strand
cagaggagcuggcugucaa

SEQ ID NO: 1212452 - RNA, 19 nt, Homo sapiens
  misc_RNA (1)...(19): siRNA sense strand
ccagugagguggaagacuu

SEQ ID NO: 1212453 - RNA, 19 nt, Homo sapiens
  misc_RNA (1)...(19): siRNA sense strand
caagucugcugaugagaga

SEQ ID NO: 1212454 - RNA, 19 nt, Homo sapiens
  misc_RNA (1)...(19): siRNA sense strand
ucaaugcaauggcucauca

SEQ ID NO: 1212455 - RNA, 19 nt, Homo sapiens
  misc_RNA (1)...(19): siRNA sense strand
gcaccauauucacauguug

SEQ ID NO: 1212456 - RNA, 19 nt, Homo sapiens
  misc_RNA (1)...(19): siRNA sense strand
gacacgcucaguugaaaua

SEQ ID NO: 1212457 - RNA, 19 nt, Homo sapiens
  misc_RNA (1)...(19): siRNA sense strand
gaaugcacaccuuggcuuu

SEQ ID NO: 1212458 - RNA, 19 nt, Homo sapiens
  misc_RNA (1)...(19): siRNA sense strand
acacagacuuugucaugga

SEQ ID NO: 1212459 - RNA, 19 nt, Homo sapiens
  misc_RNA (1)...(19): siRNA sense strand
gcuaagcucauccagugua

SEQ ID NO: 1212460 - RNA, 19 nt, Homo sapiens
  misc_RNA (1)...(19): siRNA sense strand
uggaagagguggucaugug

SEQ ID NO: 1212461 - RNA, 19 nt, Homo sapiens
  misc_RNA (1)...(19): siRNA sense strand
aaauaccgcuugcuguguu

SEQ ID NO: 1212462 - RNA, 19 nt, Homo sapiens
  misc_RNA (1)...(19): siRNA sense strand
cugcaaggaucgauuugaa

SEQ ID NO: 1212463 - RNA, 19 nt, Homo sapiens
  misc_RNA (1)...(19): siRNA sense strand
gcacaagaacuaucuacgu

SEQ ID NO: 1212464 - RNA, 19 nt, Homo sapiens
  misc_RNA (1)...(19): siRNA sense strand
gccaagcagugaccaggaa

SEQ ID NO: 1212465 - RNA, 19 nt, Homo sapiens
  misc_RNA (1)...(19): siRNA sense strand
cauccaguguauuguguuu

SEQ ID NO: 1212466 - RNA, 19 nt, Homo sapiens
  misc_RNA (1)...(19): siRNA sense strand
ccagcaagcucgcaaacgu

SEQ ID NO: 1212467 - RNA, 19 nt, Homo sapiens
  misc_RNA (1)...(19): siRNA sense strand
ugcguuaccuguuucauga

SEQ ID NO: 1212468 - RNA, 19 nt, Homo sapiens
  misc_RNA (1)...(19): siRNA sense strand
ggaucgauuugaauaucuu

SEQ ID NO: 1212469 - RNA, 19 nt, Homo sapiens
  misc_RNA (1)...(19): siRNA sense strand
cccaguaccugcucucaga

SEQ ID NO: 1212470 - RNA, 19 nt, Homo sapiens
  misc_RNA (1)...(19): siRNA sense strand
gcaucucaaagacaaauuu

SEQ ID NO: 1212471 - RNA, 19 nt, Homo sapiens
  misc_RNA (1)...(19): siRNA sense strand
gcacaccaccaacauucuu

SEQ ID NO: 1212472 - RNA, 19 nt, Homo sapiens
  misc_RNA (1)...(19): siRNA sense strand
ugacgacugugccaucugu

SEQ ID NO: 1212473 - RNA, 19 nt, Homo sapiens
  misc_RNA (1)...(19): siRNA sense strand
uuacacagacuuugucaug

SEQ ID NO: 1212474 - RNA, 19 nt, Homo sapiens
  misc_RNA (1)...(19): siRNA sense strand
gcggucagauagcaucaga

SEQ ID NO: 1212475 - RNA, 19 nt, Homo sapiens
  misc_RNA (1)...(19): siRNA sense strand
gaaggacggauucaaguac

SEQ ID NO: 1212476 - RNA, 19 nt, Homo sapiens
  misc_RNA (1)...(19): siRNA sense strand
gaauucgucggcacaagaa

SEQ ID NO: 1212477 - RNA, 19 nt, Homo sapiens
  misc_RNA (1)...(19): siRNA sense strand
gaaacugcccuguggacau

SEQ ID NO: 1212478 - RNA, 19 nt, Homo sapiens
  misc_RNA (1)...(19): siRNA sense strand
ggacgaacuccuccagcaa

SEQ ID NO: 1212479 - RNA, 19 nt, Homo sapiens
  misc_RNA (1)...(19): siRNA sense strand
ggcaacaucugguuaucca

SEQ ID NO: 1212480 - RNA, 19 nt, Homo sapiens
  misc_RNA (1)...(19): siRNA sense strand
cuacacagcggucagauag

SEQ ID NO: 1212481 - RNA, 19 nt, Homo sapiens
  misc_RNA (1)...(19): siRNA sense strand
gcucugcaaggaucgauuu

SEQ ID NO: 1212482 - RNA, 19 nt, Homo sapiens
  misc_RNA (1)...(19): siRNA sense strand
caaaaguucugaagaugau

SEQ ID NO: 1212483 - RNA, 19 nt, Homo sapiens
  misc_RNA (1)...(19): siRNA sense strand
ggacuucggcgagguggaa

SEQ ID NO: 1212484 - RNA, 19 nt, Homo sapiens
  misc_RNA (1)...(19): siRNA sense strand
gaggccagguuugcaguug

SEQ ID NO: 1212485 - RNA, 19 nt, Homo sapiens
  misc_RNA (1)...(19): siRNA sense strand
ggacugcucaugugauuuu

SEQ ID NO: 1212486 - RNA, 19 nt, Homo sapiens
  misc_RNA (1)...(19): siRNA sense strand
aaacugcccuguggacauc

SEQ ID NO: 1212487 - RNA, 19 nt, Homo sapiens
  misc_RNA (1)...(19): siRNA sense strand
uugaauaucuuuccuucuc

SEQ ID NO: 1212488 - RNA, 19 nt, Homo sapiens
  misc_RNA (1)...(19): siRNA sense strand
gcucaucagauucaagaga

SEQ ID NO: 1212489 - RNA, 19 nt, Homo sapiens
  misc_RNA (1)...(19): siRNA sense strand
gaggugcaacgucgaauuc

SEQ ID NO: 1212490 - RNA, 19 nt, Homo sapiens
  misc_RNA (1)...(19): siRNA sense strand
uuucauggcugcagagucu

SEQ ID NO: 1212491 - RNA, 19 nt, Homo sapiens
  misc_RNA (1)...(19): siRNA sense strand
agaagcagcagaccuccua

SEQ ID NO: 1212492 - RNA, 19 nt, Homo sapiens
  misc_RNA (1)...(19): siRNA sense strand
agaaggacggauucaagua

SEQ ID NO: 1212493 - RNA, 19 nt, Homo sapiens
  misc_RNA (1)...(19): siRNA sense strand
gaaaggggacguaugucua

SEQ ID NO: 1212494 - RNA, 19 nt, Homo sapiens
  misc_RNA (1)...(19): siRNA sense strand
cguguggguucuaguaaau

SEQ ID NO: 1212495 - RNA, 19 nt, Homo sapiens
  misc_RNA (1)...(19): siRNA sense strand
ucgcaaacguuucuugaac

SEQ ID NO: 1212496 - RNA, 19 nt, Homo sapiens
  misc_RNA (1)...(19): siRNA sense strand
gcucgcaaacguuucuuga

SEQ ID NO: 1212497 - RNA, 19 nt, Homo sapiens
  misc_RNA (1)...(19): siRNA sense strand
gcaucagaccugcauugaa

SEQ ID NO: 1212498 - RNA, 19 nt, Homo sapiens
  misc_RNA (1)...(19): siRNA sense strand
acacagcggucagauagca

SEQ ID NO: 1212499 - RNA, 19 nt, Homo sapiens
  misc_RNA (1)...(19): siRNA sense strand
gaaacauggaggccagguu

SEQ ID NO: 1212500 - RNA, 19 nt, Homo sapiens
  misc_RNA (1)...(19): siRNA sense strand
cgaauucgucggcacaaga

SEQ ID NO: 1212501 - RNA, 19 nt, Homo sapiens
  misc_RNA (1)...(19): siRNA sense strand
caaggaucgauuugaauau

SEQ ID NO: 1212502 - RNA, 19 nt, Homo sapiens
  misc_RNA (1)...(19): siRNA sense strand
gaacuaucuacgugugguu

SEQ ID NO: 1212503 - RNA, 19 nt, Homo sapiens
  misc_RNA (1)...(19): siRNA sense strand
gcaauggcucaucagauuc

SEQ ID NO: 1212504 - RNA, 19 nt, Homo sapiens
  misc_RNA (1)...(19): siRNA sense strand
gcauuacgcaggccagcaa

SEQ ID NO: 1212505 - RNA, 19 nt, Homo sapiens
  misc_RNA (1)...(19): siRNA sense strand
aagcucauccaguguauug

SEQ ID NO: 1212506 - RNA, 19 nt, Homo sapiens
  misc_RNA (1)...(19): siRNA sense strand
cgcaaacguuucuugaaca

SEQ ID NO: 1212507 - RNA, 19 nt, Homo sapiens
  misc_RNA (1)...(19): siRNA sense strand
ucaaguaccuuuuccuaca

SEQ ID NO: 1212508 - RNA, 19 nt, Homo sapiens
  misc_RNA (1)...(19): siRNA sense strand
gaugcacaccaccaacauu

SEQ ID NO: 1212509 - RNA, 19 nt, Homo sapiens
  misc_RNA (1)...(19): siRNA sense strand
gcacaccuuggcuuucaug

SEQ ID NO: 1212510 - RNA, 19 nt, Homo sapiens
  misc_RNA (1)...(19): siRNA sense strand
caauggcucaucagauuca

SEQ ID NO: 1212511 - RNA, 19 nt, Homo sapiens
  misc_RNA (1)...(19): siRNA sense strand
ggaccucaugcaccauauu

SEQ ID NO: 1212512 - RNA, 19 nt, Homo sapiens
  misc_RNA (1)...(19): siRNA sense strand
aaggaucgauuugaauauc

SEQ ID NO: 1212513 - RNA, 19 nt, Homo sapiens
  misc_RNA (1)...(19): siRNA sense strand
gaugaugcggccucagaga

SEQ ID NO: 1212514 - RNA, 19 nt, Homo sapiens
  misc_RNA (1)...(19): siRNA sense strand
acgcucaguugaaauaaca

SEQ ID NO: 1212515 - RNA, 19 nt, Homo sapiens
  misc_RNA (1)...(19): siRNA sense strand
cuaagcucauccaguguau

SEQ ID NO: 1212516 - RNA, 19 nt, Homo sapiens
  misc_RNA (1)...(19): siRNA sense strand
caucuuuggugugcugaau

SEQ ID NO: 1212517 - RNA, 19 nt, Homo sapiens
  misc_RNA (1)...(19): siRNA sense strand
gcaacucccagcucaaugc

SEQ ID NO: 1212518 - RNA, 19 nt, Homo sapiens
  misc_RNA (1)...(19): siRNA sense strand
caacauucuuggcauuacg

SEQ ID NO: 1212519 - RNA, 19 nt, Homo sapiens
  misc_RNA (1)...(19): siRNA sense strand
gaccucaugcaccauauuc

SEQ ID NO: 1212520 - RNA, 19 nt, Homo sapiens
  misc_RNA (1)...(19): siRNA sense strand
gcucauccaguguauugug

SEQ ID NO: 1212521 - RNA, 19 nt, Homo sapiens
  misc_RNA (1)...(19): siRNA sense strand
gcucucagacagccucuuc

SEQ ID NO: 1212522 - RNA, 19 nt, Homo sapiens
  misc_RNA (1)...(19): siRNA sense strand
gauagcaucagaccugcau

SEQ ID NO: 1212523 - RNA, 19 nt, Homo sapiens
  misc_RNA (1)...(19): siRNA sense strand
cagcugcguuaccuguuuc

SEQ ID NO: 1212524 - RNA, 19 nt, Homo sapiens
  misc_RNA (1)...(19): siRNA sense strand
gcggaacggaggcuucaga

SEQ ID NO: 1212525 - RNA, 19 nt, Homo sapiens
  misc_RNA (1)...(19): siRNA sense strand
cggaaggugcguccucuga

SEQ ID NO: 1212526 - RNA, 19 nt, Homo sapiens
  misc_RNA (1)...(19): siRNA sense strand
uagcaucagaccugcauug

SEQ ID NO: 1212527 - RNA, 19 nt, Homo sapiens
  misc_RNA (1)...(19): siRNA sense strand
ucguguggguucuaguaaa

SEQ ID NO: 1212528 - RNA, 19 nt, Homo sapiens
  misc_RNA (1)...(19): siRNA sense strand
acucccagcucaaugcaau

SEQ ID NO: 1212529 - RNA, 19 nt, Homo sapiens
  misc_RNA (1)...(19): siRNA sense strand
cagcaacucccagcucaau

SEQ ID NO: 1212530 - RNA, 19 nt, Homo sapiens
  misc_RNA (1)...(19): siRNA sense strand
ccauauucacauguuguua

SEQ ID NO: 1212531 - RNA, 19 nt, Homo sapiens
  misc_RNA (1)...(19): siRNA sense strand
ggaggagacgcuggacuuc

SEQ ID NO: 1212532 - RNA, 19 nt, Homo sapiens
  misc_RNA (1)...(19): siRNA sense strand
ccaggaagagggagaaacu

SEQ ID NO: 1212533 - RNA, 19 nt, Homo sapiens
  misc_RNA (1)...(19): siRNA sense strand
uaaauaccgcuugcugugu

SEQ ID NO: 1212534 - RNA, 19 nt, Homo sapiens
  misc_RNA (1)...(19): siRNA sense strand
uagaaggacggauucaagu

SEQ ID NO: 1212535 - RNA, 19 nt, Homo sapiens
  misc_RNA (1)...(19): siRNA sense strand
ccuacacagcggucagaua

SEQ ID NO: 1212536 - RNA, 19 nt, Homo sapiens
  misc_RNA (1)...(19): siRNA sense strand
cauguggugccucugguuu

SEQ ID NO: 1212537 - RNA, 19 nt, Homo sapiens
  misc_RNA (1)...(19): siRNA sense strand
cagcaagcucgcaaacguu

SEQ ID NO: 1212538 - RNA, 19 nt, Homo sapiens
  misc_RNA (1)...(19): siRNA sense strand
ggacggauucaaguaccuu

SEQ ID NO: 1212539 - RNA, 19 nt, Homo sapiens
  misc_RNA (1)...(19): siRNA sense strand
aagaugaugcggccucaga

SEQ ID NO: 1212540 - RNA, 19 nt, Homo sapiens
  misc_RNA (1)...(19): siRNA sense strand
gcaaggaucgauuugaaua

SEQ ID NO: 1212541 - RNA, 19 nt, Homo sapiens
  misc_RNA (1)...(19): siRNA sense strand
ggagcuggcugucaacaau

SEQ ID NO: 1212542 - RNA, 19 nt, Homo sapiens
  misc_RNA (1)...(19): siRNA sense strand
gaggacugcucaugugauu

SEQ ID NO: 1212543 - RNA, 19 nt, Homo sapiens
  misc_RNA (1)...(19): siRNA sense strand
gcagcugcguuaccuguuu

SEQ ID NO: 1212544 - RNA, 19 nt, Homo sapiens
  misc_RNA (1)...(19): siRNA sense strand
gaagggacgugggaaggaa

SEQ ID NO: 1212545 - RNA, 19 nt, Homo sapiens
  misc_RNA (1)...(19): siRNA sense strand
cgagcuggcugccgaguuu

SEQ ID NO: 1212546 - RNA, 19 nt, Homo sapiens
  misc_RNA (1)...(19): siRNA sense strand
ggacguaugucuauuacac

SEQ ID NO: 1212547 - RNA, 19 nt, Homo sapiens
  misc_RNA (1)...(19): siRNA sense strand
gacagcaucucaaagacaa

SEQ ID NO: 1212548 - RNA, 19 nt, Homo sapiens
  misc_RNA (1)...(19): siRNA sense strand
cagaggagcuggcugucaa

SEQ ID NO: 1212549 - RNA, 19 nt, Homo sapiens
  misc_RNA (1)...(19): siRNA sense strand
gcaccauauucacauguug

SEQ ID NO: 1212550 - RNA, 19 nt, Homo sapiens
  misc_RNA (1)...(19): siRNA sense strand
gaaugcacaccuuggcuuu

SEQ ID NO: 1212551 - RNA, 19 nt, Homo sapiens
  misc_RNA (1)...(19): siRNA sense strand
acacagacuuugucaugga

SEQ ID NO: 1212552 - RNA, 19 nt, Homo sapiens
  misc_RNA (1)...(19): siRNA sense strand
gcuaagcucauccagugua

SEQ ID NO: 1212553 - RNA, 19 nt, Homo sapiens
  misc_RNA (1)...(19): siRNA sense strand
uggaagagguggucaugug

SEQ ID NO: 1212554 - RNA, 19 nt, Homo sapiens
  misc_RNA (1)...(19): siRNA sense strand
aaauaccgcuugcuguguu

SEQ ID NO: 1212555 - RNA, 19 nt, Homo sapiens
  misc_RNA (1)...(19): siRNA sense strand
cugcaaggaucgauuugaa

SEQ ID NO: 1212556 - RNA, 19 nt, Homo sapiens
  misc_RNA (1)...(19): siRNA sense strand
gcacaagaacuaucuacgu

SEQ ID NO: 1212557 - RNA, 19 nt, Homo sapiens
  misc_RNA (1)...(19): siRNA sense strand
cauccaguguauuguguuu

SEQ ID NO: 1212558 - RNA, 19 nt, Homo sapiens
  misc_RNA (1)...(19): siRNA sense strand
ugcguuaccuguuucauga

SEQ ID NO: 1212559 - RNA, 19 nt, Homo sapiens
  misc_RNA (1)...(19): siRNA sense strand
ggaucgauuugaauaucuu

SEQ ID NO: 1212560 - RNA, 19 nt, Homo sapiens
  misc_RNA (1)...(19): siRNA sense strand
cccaguaccugcucucaga

SEQ ID NO: 1212561 - RNA, 19 nt, Homo sapiens
  misc_RNA (1)...(19): siRNA sense strand
gcaucucaaagacaaauuu

SEQ ID NO: 1212562 - RNA, 19 nt, Homo sapiens
  misc_RNA (1)...(19): siRNA sense strand
ugacgacugugccaucugu

SEQ ID NO: 1212563 - RNA, 19 nt, Homo sapiens
  misc_RNA (1)...(19): siRNA sense strand
uuacacagacuuugucaug

SEQ ID NO: 1212564 - RNA, 19 nt, Homo sapiens
  misc_RNA (1)...(19): siRNA sense strand
gaauucgucggcacaagaa

SEQ ID NO: 1212565 - RNA, 19 nt, Homo sapiens
  misc_RNA (1)...(19): siRNA sense strand
gaaacugcccuguggacau

SEQ ID NO: 1212566 - RNA, 19 nt, Homo sapiens
  misc_RNA (1)...(19): siRNA sense strand
ggcaacaucugguuaucca

SEQ ID NO: 1212567 - RNA, 19 nt, Homo sapiens
  misc_RNA (1)...(19): siRNA sense strand
gcucugcaaggaucgauuu

SEQ ID NO: 1212568 - RNA, 19 nt, Homo sapiens
  misc_RNA (1)...(19): siRNA sense strand
gaggccagguuugcaguug

SEQ ID NO: 1212569 - RNA, 19 nt, Homo sapiens
  misc_RNA (1)...(19): siRNA sense strand
ggacugcucaugugauuuu

SEQ ID NO: 1212570 - RNA, 19 nt, Homo sapiens
  misc_RNA (1)...(19): siRNA sense strand
aaacugcccuguggacauc

SEQ ID NO: 1212571 - RNA, 19 nt, Homo sapiens
  misc_RNA (1)...(19): siRNA sense strand
uugaauaucuuuccuucuc

SEQ ID NO: 1212572 - RNA, 19 nt, Homo sapiens
  misc_RNA (1)...(19): siRNA sense strand
gaggugcaacgucgaauuc

SEQ ID NO: 1212573 - RNA, 19 nt, Homo sapiens
  misc_RNA (1)...(19): siRNA sense strand
uuucauggcugcagagucu

SEQ ID NO: 1212574 - RNA, 19 nt, Homo sapiens
  misc_RNA (1)...(19): siRNA sense strand
gaaaggggacguaugucua

SEQ ID NO: 1212575 - RNA, 19 nt, Homo sapiens
  misc_RNA (1)...(19): siRNA sense strand
cguguggguucuaguaaau

SEQ ID NO: 1212576 - RNA, 19 nt, Homo sapiens
  misc_RNA (1)...(19): siRNA sense strand
gaaacauggaggccagguu

SEQ ID NO: 1212577 - RNA, 19 nt, Homo sapiens
  misc_RNA (1)...(19): siRNA sense strand
cgaauucgucggcacaaga

SEQ ID NO: 1212578 - RNA, 19 nt, Homo sapiens
  misc_RNA (1)...(19): siRNA sense strand
caaggaucgauuugaauau

SEQ ID NO: 1212579 - RNA, 19 nt, Homo sapiens
  misc_RNA (1)...(19): siRNA sense strand
gaacuaucuacgugugguu

SEQ ID NO: 1212580 - RNA, 19 nt, Homo sapiens
  misc_RNA (1)...(19): siRNA sense strand
aagcucauccaguguauug

SEQ ID NO: 1212581 - RNA, 19 nt, Homo sapiens
  misc_RNA (1)...(19): siRNA sense strand
gcacaccuuggcuuucaug

SEQ ID NO: 1212582 - RNA, 19 nt, Homo sapiens
  misc_RNA (1)...(19): siRNA sense strand
ggaccucaugcaccauauu

SEQ ID NO: 1212583 - RNA, 19 nt, Homo sapiens
  misc_RNA (1)...(19): siRNA sense strand
cuaagcucauccaguguau

SEQ ID NO: 1212584 - RNA, 19 nt, Homo sapiens
  misc_RNA (1)...(19): siRNA sense strand
aaggaucgauuugaauauc

SEQ ID NO: 1212585 - RNA, 19 nt, Homo sapiens
  misc_RNA (1)...(19): siRNA sense strand
caucuuuggugugcugaau

SEQ ID NO: 1212586 - RNA, 19 nt, Homo sapiens
  misc_RNA (1)...(19): siRNA sense strand
gaccucaugcaccauauuc

SEQ ID NO: 1212587 - RNA, 19 nt, Homo sapiens
  misc_RNA (1)...(19): siRNA sense strand
gcucauccaguguauugug

SEQ ID NO: 1212588 - RNA, 19 nt, Homo sapiens
  misc_RNA (1)...(19): siRNA sense strand
gcucucagacagccucuuc

SEQ ID NO: 1212589 - RNA, 19 nt, Homo sapiens
  misc_RNA (1)...(19): siRNA sense strand
cagcugcguuaccuguuuc

SEQ ID NO: 1212590 - RNA, 19 nt, Homo sapiens
  misc_RNA (1)...(19): siRNA sense strand
ucguguggguucuaguaaa

SEQ ID NO: 1212591 - RNA, 19 nt, Homo sapiens
  misc_RNA (1)...(19): siRNA sense strand
ccauauucacauguuguua

SEQ ID NO: 1212592 - RNA, 19 nt, Homo sapiens
  misc_RNA (1)...(19): siRNA sense strand
uaaauaccgcuugcugugu

SEQ ID NO: 1212593 - RNA, 19 nt, Homo sapiens
  misc_RNA (1)...(19): siRNA sense strand
cauguggugccucugguuu

SEQ ID NO: 1212594 - RNA, 19 nt, Homo sapiens
  misc_RNA (1)...(19): siRNA sense strand
gagcuggcugucaacaaug

SEQ ID NO: 1212595 - RNA, 19 nt, Homo sapiens
  misc_RNA (1)...(19): siRNA sense strand
cggcuacacccacggaaug

SEQ ID NO: 1212596 - RNA, 19 nt, Homo sapiens
  misc_RNA (1)...(19): siRNA sense strand
guugguggcuaagcucauc

SEQ ID NO: 1212597 - RNA, 19 nt, Homo sapiens
  misc_RNA (1)...(19): siRNA sense strand
aauaccgcuugcuguguuu

SEQ ID NO: 1212598 - RNA, 19 nt, Homo sapiens
  misc_RNA (1)...(19): siRNA sense strand
ggaggccagguuugcaguu

SEQ ID NO: 1212599 - RNA, 19 nt, Homo sapiens
  misc_RNA (1)...(19): siRNA sense strand
ucacugaccugagcgagaa

SEQ ID NO: 1212600 - RNA, 19 nt, Homo sapiens
  misc_RNA (1)...(19): siRNA sense strand
gcaaggaccaaaugucaau

SEQ ID NO: 1212601 - RNA, 19 nt, Homo sapiens
  misc_RNA (1)...(19): siRNA sense strand
gaggaacaaccaacuaguu

SEQ ID NO: 1212602 - RNA, 19 nt, Homo sapiens
  misc_RNA (1)...(19): siRNA sense strand
gacaagcgcuucgccuuca

SEQ ID NO: 1212603 - RNA, 19 nt, Homo sapiens
  misc_RNA (1)...(19): siRNA sense strand
gaugcaagccuucagaauc

SEQ ID NO: 1212604 - RNA, 19 nt, Homo sapiens
  misc_RNA (1)...(19): siRNA sense strand
gaacagaaagcaggacaag

SEQ ID NO: 1212605 - RNA, 19 nt, Homo sapiens
  misc_RNA (1)...(19): siRNA sense strand
gaccugagcgagaacagaa

SEQ ID NO: 1212606 - RNA, 19 nt, Homo sapiens
  misc_RNA (1)...(19): siRNA sense strand
caagaugcaagccuucaga

SEQ ID NO: 1212607 - RNA, 19 nt, Homo sapiens
  misc_RNA (1)...(19): siRNA sense strand
uagaugugguacccauuga

SEQ ID NO: 1212608 - RNA, 19 nt, Homo sapiens
  misc_RNA (1)...(19): siRNA sense strand
gggagaaaauccagcaaga

SEQ ID NO: 1212609 - RNA, 19 nt, Homo sapiens
  misc_RNA (1)...(19): siRNA sense strand
ggaggcaguuaacaucacu

SEQ ID NO: 1212610 - RNA, 19 nt, Homo sapiens
  misc_RNA (1)...(19): siRNA sense strand
gagaaaauccagcaagaug

SEQ ID NO: 1212611 - RNA, 19 nt, Homo sapiens
  misc_RNA (1)...(19): siRNA sense strand
ugucaagucuggugaugag

SEQ ID NO: 1212612 - RNA, 19 nt, Homo sapiens
  misc_RNA (1)...(19): siRNA sense strand
augcaagccuucagaaucu

SEQ ID NO: 1212613 - RNA, 19 nt, Homo sapiens
  misc_RNA (1)...(19): siRNA sense strand
agaugugccuguccugugu

SEQ ID NO: 1212614 - RNA, 19 nt, Homo sapiens
  misc_RNA (1)...(19): siRNA sense strand
gcuggaggcaguuaacauc

SEQ ID NO: 1212615 - RNA, 19 nt, Homo sapiens
  misc_RNA (1)...(19): siRNA sense strand
ggucaccaaauucuacuuc

SEQ ID NO: 1212616 - RNA, 19 nt, Homo sapiens
  misc_RNA (1)...(19): siRNA sense strand
gauagaugugguacccauu

SEQ ID NO: 1212617 - RNA, 19 nt, Homo sapiens
  misc_RNA (1)...(19): siRNA sense strand
ucaccaaauucuacuucca

SEQ ID NO: 1212618 - RNA, 19 nt, Homo sapiens
  misc_RNA (1)...(19): siRNA sense strand
gaaucugggauguuaacca

SEQ ID NO: 1212619 - RNA, 19 nt, Homo sapiens
  misc_RNA (1)...(19): siRNA sense strand
uugcaaggaccaaauguca

SEQ ID NO: 1212620 - RNA, 19 nt, Homo sapiens
  misc_RNA (1)...(19): siRNA sense strand
ccuucuaucugaggaacaa

SEQ ID NO: 1212621 - RNA, 19 nt, Homo sapiens
  misc_RNA (1)...(19): siRNA sense strand
ucacugaccugagcgagaa

SEQ ID NO: 1212622 - RNA, 19 nt, Homo sapiens
  misc_RNA (1)...(19): siRNA sense strand
gcaaggaccaaaugucaau

SEQ ID NO: 1212623 - RNA, 19 nt, Homo sapiens
  misc_RNA (1)...(19): siRNA sense strand
gaggaacaaccaacuaguu

SEQ ID NO: 1212624 - RNA, 19 nt, Homo sapiens
  misc_RNA (1)...(19): siRNA sense strand
gacaagcgcuucgccuuca

SEQ ID NO: 1212625 - RNA, 19 nt, Homo sapiens
  misc_RNA (1)...(19): siRNA sense strand
gaugcaagccuucagaauc

SEQ ID NO: 1212626 - RNA, 19 nt, Homo sapiens
  misc_RNA (1)...(19): siRNA sense strand
gaacagaaagcaggacaag

SEQ ID NO: 1212627 - RNA, 19 nt, Homo sapiens
  misc_RNA (1)...(19): siRNA sense strand
gaccugagcgagaacagaa

SEQ ID NO: 1212628 - RNA, 19 nt, Homo sapiens
  misc_RNA (1)...(19): siRNA sense strand
caagaugcaagccuucaga

SEQ ID NO: 1212629 - RNA, 19 nt, Homo sapiens
  misc_RNA (1)...(19): siRNA sense strand
uagaugugguacccauuga

SEQ ID NO: 1212630 - RNA, 19 nt, Homo sapiens
  misc_RNA (1)...(19): siRNA sense strand
gggagaaaauccagcaaga

SEQ ID NO: 1212631 - RNA, 19 nt, Homo sapiens
  misc_RNA (1)...(19): siRNA sense strand
ggaggcaguuaacaucacu

SEQ ID NO: 1212632 - RNA, 19 nt, Homo sapiens
  misc_RNA (1)...(19): siRNA sense strand
gagaaaauccagcaagaug

SEQ ID NO: 1212633 - RNA, 19 nt, Homo sapiens
  misc_RNA (1)...(19): siRNA sense strand
ugucaagucuggugaugag

SEQ ID NO: 1212634 - RNA, 19 nt, Homo sapiens
  misc_RNA (1)...(19): siRNA sense strand
augcaagccuucagaaucu

SEQ ID NO: 1212635 - RNA, 19 nt, Homo sapiens
  misc_RNA (1)...(19): siRNA sense strand
agaugugccuguccugugu

SEQ ID NO: 1212636 - RNA, 19 nt, Homo sapiens
  misc_RNA (1)...(19): siRNA sense strand
gcuggaggcaguuaacauc

SEQ ID NO: 1212637 - RNA, 19 nt, Homo sapiens
  misc_RNA (1)...(19): siRNA sense strand
ggucaccaaauucuacuuc

SEQ ID NO: 1212638 - RNA, 19 nt, Homo sapiens
  misc_RNA (1)...(19): siRNA sense strand
gauagaugugguacccauu

SEQ ID NO: 1212639 - RNA, 19 nt, Homo sapiens
  misc_RNA (1)...(19): siRNA sense strand
ucaccaaauucuacuucca

SEQ ID NO: 1212640 - RNA, 19 nt, Homo sapiens
  misc_RNA (1)...(19): siRNA sense strand
gaaucugggauguuaacca

SEQ ID NO: 1212641 - RNA, 19 nt, Homo sapiens
  misc_RNA (1)...(19): siRNA sense strand
uugcaaggaccaaauguca

SEQ ID NO: 1212642 - RNA, 19 nt, Homo sapiens
  misc_RNA (1)...(19): siRNA sense strand
ccuucuaucugaggaacaa

SEQ ID NO: 1212643 - RNA, 19 nt, Homo sapiens
  misc_RNA (1)...(19): siRNA sense strand
ucacugaccugagcgagaa

SEQ ID NO: 1212644 - RNA, 19 nt, Homo sapiens
  misc_RNA (1)...(19): siRNA sense strand
gcaaggaccaaaugucaau

SEQ ID NO: 1212645 - RNA, 19 nt, Homo sapiens
  misc_RNA (1)...(19): siRNA sense strand
gaggaacaaccaacuaguu

SEQ ID NO: 1212646 - RNA, 19 nt, Homo sapiens
  misc_RNA (1)...(19): siRNA sense strand
gacaagcgcuucgccuuca

SEQ ID NO: 1212647 - RNA, 19 nt, Homo sapiens
  misc_RNA (1)...(19): siRNA sense strand
gaugcaagccuucagaauc

SEQ ID NO: 1212648 - RNA, 19 nt, Homo sapiens
  misc_RNA (1)...(19): siRNA sense strand
gaacagaaagcaggacaag

SEQ ID NO: 1212649 - RNA, 19 nt, Homo sapiens
  misc_RNA (1)...(19): siRNA sense strand
gaccugagcgagaacagaa

SEQ ID NO: 1212650 - RNA, 19 nt, Homo sapiens
  misc_RNA (1)...(19): siRNA sense strand
caagaugcaagccuucaga

SEQ ID NO: 1212651 - RNA, 19 nt, Homo sapiens
  misc_RNA (1)...(19): siRNA sense strand
uagaugugguacccauuga

SEQ ID NO: 1212652 - RNA, 19 nt, Homo sapiens
  misc_RNA (1)...(19): siRNA sense strand
gggagaaaauccagcaaga

SEQ ID NO: 1212653 - RNA, 19 nt, Homo sapiens
  misc_RNA (1)...(19): siRNA sense strand
ggaggcaguuaacaucacu

SEQ ID NO: 1212654 - RNA, 19 nt, Homo sapiens
  misc_RNA (1)...(19): siRNA sense strand
gagaaaauccagcaagaug

SEQ ID NO: 1212655 - RNA, 19 nt, Homo sapiens
  misc_RNA (1)...(19): siRNA sense strand
ugucaagucuggugaugag

SEQ ID NO: 1212656 - RNA, 19 nt, Homo sapiens
  misc_RNA (1)...(19): siRNA sense strand
augcaagccuucagaaucu

SEQ ID NO: 1212657 - RNA, 19 nt, Homo sapiens
  misc_RNA (1)...(19): siRNA sense strand
agaugugccuguccugugu

SEQ ID NO: 1212658 - RNA, 19 nt, Homo sapiens
  misc_RNA (1)...(19): siRNA sense strand
gcuggaggcaguuaacauc

SEQ ID NO: 1212659 - RNA, 19 nt, Homo sapiens
  misc_RNA (1)...(19): siRNA sense strand
ggucaccaaauucuacuuc

SEQ ID NO: 1212660 - RNA, 19 nt, Homo sapiens
  misc_RNA (1)...(19): siRNA sense strand
gauagaugugguacccauu

SEQ ID NO: 1212661 - RNA, 19 nt, Homo sapiens
  misc_RNA (1)...(19): siRNA sense strand
ucaccaaauucuacuucca

SEQ ID NO: 1212662 - RNA, 19 nt, Homo sapiens
  misc_RNA (1)...(19): siRNA sense strand
gaaucugggauguuaacca

SEQ ID NO: 1212663 - RNA, 19 nt, Homo sapiens
  misc_RNA (1)...(19): siRNA sense strand
uugcaaggaccaaauguca

SEQ ID NO: 1212664 - RNA, 19 nt, Homo sapiens
  misc_RNA (1)...(19): siRNA sense strand
ccuucuaucugaggaacaa

SEQ ID NO: 1212665 - RNA, 19 nt, Homo sapiens
  misc_RNA (1)...(19): siRNA sense strand
ucacugaccugagcgagaa

SEQ ID NO: 1212666 - RNA, 19 nt, Homo sapiens
  misc_RNA (1)...(19): siRNA sense strand
gcaaggaccaaaugucaau

SEQ ID NO: 1212667 - RNA, 19 nt, Homo sapiens
  misc_RNA (1)...(19): siRNA sense strand
gaggaacaaccaacuaguu

SEQ ID NO: 1212668 - RNA, 19 nt, Homo sapiens
  misc_RNA (1)...(19): siRNA sense strand
gacaagcgcuucgccuuca

SEQ ID NO: 1212669 - RNA, 19 nt, Homo sapiens
  misc_RNA (1)...(19): siRNA sense strand
gaacagaaagcaggacaag

SEQ ID NO: 1212670 - RNA, 19 nt, Homo sapiens
  misc_RNA (1)...(19): siRNA sense strand
gaccugagcgagaacagaa

SEQ ID NO: 1212671 - RNA, 19 nt, Homo sapiens
  misc_RNA (1)...(19): siRNA sense strand
uagaugugguacccauuga

SEQ ID NO: 1212672 - RNA, 19 nt, Homo sapiens
  misc_RNA (1)...(19): siRNA sense strand
ggaggcaguuaacaucacu

SEQ ID NO: 1212673 - RNA, 19 nt, Homo sapiens
  misc_RNA (1)...(19): siRNA sense strand
ugucaagucuggugaugag

SEQ ID NO: 1212674 - RNA, 19 nt, Homo sapiens
  misc_RNA (1)...(19): siRNA sense strand
agaugugccuguccugugu

SEQ ID NO: 1212675 - RNA, 19 nt, Homo sapiens
  misc_RNA (1)...(19): siRNA sense strand
gcuggaggcaguuaacauc

SEQ ID NO: 1212676 - RNA, 19 nt, Homo sapiens
  misc_RNA (1)...(19): siRNA sense strand
ggucaccaaauucuacuuc

SEQ ID NO: 1212677 - RNA, 19 nt, Homo sapiens
  misc_RNA (1)...(19): siRNA sense strand
gauagaugugguacccauu

SEQ ID NO: 1212678 - RNA, 19 nt, Homo sapiens
  misc_RNA (1)...(19): siRNA sense strand
ucaccaaauucuacuucca

SEQ ID NO: 1212679 - RNA, 19 nt, Homo sapiens
  misc_RNA (1)...(19): siRNA sense strand
uugcaaggaccaaauguca

SEQ ID NO: 1212680 - RNA, 19 nt, Homo sapiens
  misc_RNA (1)...(19): siRNA sense strand
ccuucuaucugaggaacaa

SEQ ID NO: 1212681 - RNA, 19 nt, Homo sapiens
  misc_RNA (1)...(19): siRNA sense strand
gaaucugggauguuaacca

SEQ ID NO: 1212682 - RNA, 19 nt, Homo sapiens
  misc_RNA (1)...(19): siRNA sense strand
ggacuuauaaugugcaaua

SEQ ID NO: 1212683 - RNA, 19 nt, Homo sapiens
  misc_RNA (1)...(19): siRNA sense strand
ggagugagccugucuguga

SEQ ID NO: 1212684 - RNA, 19 nt, Homo sapiens
  misc_RNA (1)...(19): siRNA sense strand
ucucaagucuuuccaagua

SEQ ID NO: 1212685 - RNA, 19 nt, Homo sapiens
  misc_RNA (1)...(19): siRNA sense strand
gcaaacaacccaugacgaa

SEQ ID NO: 1212686 - RNA, 19 nt, Homo sapiens
  misc_RNA (1)...(19): siRNA sense strand
gaacaaagcuggggaaugg

SEQ ID NO: 1212687 - RNA, 19 nt, Homo sapiens
  misc_RNA (1)...(19): siRNA sense strand
gaccacaccuugagaguca

SEQ ID NO: 1212688 - RNA, 19 nt, Homo sapiens
  misc_RNA (1)...(19): siRNA sense strand
ggaaugugauuucucaagu

SEQ ID NO: 1212689 - RNA, 19 nt, Homo sapiens
  misc_RNA (1)...(19): siRNA sense strand
gcucaguaccuaaguuaua

SEQ ID NO: 1212690 - RNA, 19 nt, Homo sapiens
  misc_RNA (1)...(19): siRNA sense strand
gggcugaauuugcagauga

SEQ ID NO: 1212691 - RNA, 19 nt, Homo sapiens
  misc_RNA (1)...(19): siRNA sense strand
aaacuuggacuaugaagaa

SEQ ID NO: 1212692 - RNA, 19 nt, Homo sapiens
  misc_RNA (1)...(19): siRNA sense strand
gacggaaugugauuucuca

SEQ ID NO: 1212693 - RNA, 19 nt, Homo sapiens
  misc_RNA (1)...(19): siRNA sense strand
ugaagaauguguauaacuc

SEQ ID NO: 1212694 - RNA, 19 nt, Homo sapiens
  misc_RNA (1)...(19): siRNA sense strand
gagaaugaauacgaaacuu

SEQ ID NO: 1212695 - RNA, 19 nt, Homo sapiens
  misc_RNA (1)...(19): siRNA sense strand
ugugauuucucaagucuuu

SEQ ID NO: 1212696 - RNA, 19 nt, Homo sapiens
  misc_RNA (1)...(19): siRNA sense strand
guguauaacucauggacuu

SEQ ID NO: 1212697 - RNA, 19 nt, Homo sapiens
  misc_RNA (1)...(19): siRNA sense strand
uagaaguacuugcugauuc

SEQ ID NO: 1212698 - RNA, 19 nt, Homo sapiens
  misc_RNA (1)...(19): siRNA sense strand
guuauaggauauuccaaga

SEQ ID NO: 1212699 - RNA, 19 nt, Homo sapiens
  misc_RNA (1)...(19): siRNA sense strand
gaaugugauuucucaaguc

SEQ ID NO: 1212700 - RNA, 19 nt, Homo sapiens
  misc_RNA (1)...(19): siRNA sense strand
uacgaaacuuggacuauga

SEQ ID NO: 1212701 - RNA, 19 nt, Homo sapiens
  misc_RNA (1)...(19): siRNA sense strand
caucauaacacacuucugu

SEQ ID NO: 1212702 - RNA, 19 nt, Homo sapiens
  misc_RNA (1)...(19): siRNA sense strand
ggacuaugaagaaugugua

SEQ ID NO: 1212703 - RNA, 19 nt, Homo sapiens
  misc_RNA (1)...(19): siRNA sense strand
aguacuugcugauucuuua

SEQ ID NO: 1212704 - RNA, 19 nt, Homo sapiens
  misc_RNA (1)...(19): siRNA sense strand
gaagaauguguauaacuca

SEQ ID NO: 1212705 - RNA, 19 nt, Homo sapiens
  misc_RNA (1)...(19): siRNA sense strand
cacagcaccugaaagaguu

SEQ ID NO: 1212706 - RNA, 19 nt, Homo sapiens
  misc_RNA (1)...(19): siRNA sense strand
gagccugucugugagcaaa

SEQ ID NO: 1212707 - RNA, 19 nt, Homo sapiens
  misc_RNA (1)...(19): siRNA sense strand
cagcucaguaccuaaguua

SEQ ID NO: 1212708 - RNA, 19 nt, Homo sapiens
  misc_RNA (1)...(19): siRNA sense strand
gaaacuuggacuaugaaga

SEQ ID NO: 1212709 - RNA, 19 nt, Homo sapiens
  misc_RNA (1)...(19): siRNA sense strand
caagcuaagugucauugca

SEQ ID NO: 1212710 - RNA, 19 nt, Homo sapiens
  misc_RNA (1)...(19): siRNA sense strand
uaagugucauugcagaaga

SEQ ID NO: 1212711 - RNA, 19 nt, Homo sapiens
  misc_RNA (1)...(19): siRNA sense strand
ccacagcaccugaaagagu

SEQ ID NO: 1212712 - RNA, 19 nt, Homo sapiens
  misc_RNA (1)...(19): siRNA sense strand
guggaugacaccauuauug

SEQ ID NO: 1212713 - RNA, 19 nt, Homo sapiens
  misc_RNA (1)...(19): siRNA sense strand
uuucacagcucaguaccua

SEQ ID NO: 1212714 - RNA, 19 nt, Homo sapiens
  misc_RNA (1)...(19): siRNA sense strand
gaauacgaaacuuggacua

SEQ ID NO: 1212715 - RNA, 19 nt, Homo sapiens
  misc_RNA (1)...(19): siRNA sense strand
aauacuaccuugacggaau

SEQ ID NO: 1212716 - RNA, 19 nt, Homo sapiens
  misc_RNA (1)...(19): siRNA sense strand
ucaagucuuuccaaguaug

SEQ ID NO: 1212717 - RNA, 19 nt, Homo sapiens
  misc_RNA (1)...(19): siRNA sense strand
cuuauaaugugcaauacug

SEQ ID NO: 1212718 - RNA, 19 nt, Homo sapiens
  misc_RNA (1)...(19): siRNA sense strand
guagaaguacuugcugauu

SEQ ID NO: 1212719 - RNA, 19 nt, Homo sapiens
  misc_RNA (1)...(19): siRNA sense strand
ggguaaacaucaccuucug

SEQ ID NO: 1212720 - RNA, 19 nt, Homo sapiens
  misc_RNA (1)...(19): siRNA sense strand
auacgaaacuuggacuaug

SEQ ID NO: 1212721 - RNA, 19 nt, Homo sapiens
  misc_RNA (1)...(19): siRNA sense strand
caaguucgaggguuucuuc

SEQ ID NO: 1212722 - RNA, 19 nt, Homo sapiens
  misc_RNA (1)...(19): siRNA sense strand
ggauauuccaagauaaaug

SEQ ID NO: 1212723 - RNA, 19 nt, Homo sapiens
  misc_RNA (1)...(19): siRNA sense strand
uuacauaugcguuucuuag

SEQ ID NO: 1212724 - RNA, 19 nt, Homo sapiens
  misc_RNA (1)...(19): siRNA sense strand
caaacaacccaugacgaaa

SEQ ID NO: 1212725 - RNA, 19 nt, Homo sapiens
  misc_RNA (1)...(19): siRNA sense strand
acucauggacuuauaaugu

SEQ ID NO: 1212726 - RNA, 19 nt, Homo sapiens
  misc_RNA (1)...(19): siRNA sense strand
uggaaugcaaguagaagua

SEQ ID NO: 1212727 - RNA, 19 nt, Homo sapiens
  misc_RNA (1)...(19): siRNA sense strand
uguggugcguuuacaagaa

SEQ ID NO: 1212728 - RNA, 19 nt, Homo sapiens
  misc_RNA (1)...(19): siRNA sense strand
ggaugacaccauuauugga

SEQ ID NO: 1212729 - RNA, 19 nt, Homo sapiens
  misc_RNA (1)...(19): siRNA sense strand
gauauuccaagauaaaugc

SEQ ID NO: 1212730 - RNA, 19 nt, Homo sapiens
  misc_RNA (1)...(19): siRNA sense strand
agaaugaauacgaaacuug

SEQ ID NO: 1212731 - RNA, 19 nt, Homo sapiens
  misc_RNA (1)...(19): siRNA sense strand
gcguuuacaagaagacaaa

SEQ ID NO: 1212732 - RNA, 19 nt, Homo sapiens
  misc_RNA (1)...(19): siRNA sense strand
gagcauucagacuggguaa

SEQ ID NO: 1212733 - RNA, 19 nt, Homo sapiens
  misc_RNA (1)...(19): siRNA sense strand
aaacaacccaugacgaaac

SEQ ID NO: 1212734 - RNA, 19 nt, Homo sapiens
  misc_RNA (1)...(19): siRNA sense strand
gagccauggacaacuuauu

SEQ ID NO: 1212735 - RNA, 19 nt, Homo sapiens
  misc_RNA (1)...(19): siRNA sense strand
cuuggacuaugaagaaugu

SEQ ID NO: 1212736 - RNA, 19 nt, Homo sapiens
  misc_RNA (1)...(19): siRNA sense strand
ccccuaaaauugagaauga

SEQ ID NO: 1212737 - RNA, 19 nt, Homo sapiens
  misc_RNA (1)...(19): siRNA sense strand
gcugauucuuuacauaugc

SEQ ID NO: 1212738 - RNA, 19 nt, Homo sapiens
  misc_RNA (1)...(19): siRNA sense strand
cucauggacuuauaaugug

SEQ ID NO: 1212739 - RNA, 19 nt, Homo sapiens
  misc_RNA (1)...(19): siRNA sense strand
cuugcugauucuuuacaua

SEQ ID NO: 1212740 - RNA, 19 nt, Homo sapiens
  misc_RNA (1)...(19): siRNA sense strand
gccuugcuguggugcguuu

SEQ ID NO: 1212741 - RNA, 19 nt, Homo sapiens
  misc_RNA (1)...(19): siRNA sense strand
auacuaccuugacggaaug

SEQ ID NO: 1212742 - RNA, 19 nt, Homo sapiens
  misc_RNA (1)...(19): siRNA sense strand
ccucauggccucggucuuc

SEQ ID NO: 1212743 - RNA, 19 nt, Homo sapiens
  misc_RNA (1)...(19): siRNA sense strand
gcuaagugucauugcagaa

SEQ ID NO: 1212744 - RNA, 19 nt, Homo sapiens
  misc_RNA (1)...(19): siRNA sense strand
acagcucaguaccuaaguu

SEQ ID NO: 1212745 - RNA, 19 nt, Homo sapiens
  misc_RNA (1)...(19): siRNA sense strand
guggugcguuuacaagaag

SEQ ID NO: 1212746 - RNA, 19 nt, Homo sapiens
  misc_RNA (1)...(19): siRNA sense strand
cucaguaccuaaguuauag

SEQ ID NO: 1212747 - RNA, 19 nt, Homo sapiens
  misc_RNA (1)...(19): siRNA sense strand
gguaccaccucccgaaaau

SEQ ID NO: 1212748 - RNA, 19 nt, Homo sapiens
  misc_RNA (1)...(19): siRNA sense strand
uguucaaguucgaggguuu

SEQ ID NO: 1212749 - RNA, 19 nt, Homo sapiens
  misc_RNA (1)...(19): siRNA sense strand
aaugugauuucucaagucu

SEQ ID NO: 1212750 - RNA, 19 nt, Homo sapiens
  misc_RNA (1)...(19): siRNA sense strand
cuggagccauggacaacuu

SEQ ID NO: 1212751 - RNA, 19 nt, Homo sapiens
  misc_RNA (1)...(19): siRNA sense strand
ucacagcucaguaccuaag

SEQ ID NO: 1212752 - RNA, 19 nt, Homo sapiens
  misc_RNA (1)...(19): siRNA sense strand
ggaaugcaaguagaaguac

SEQ ID NO: 1212753 - RNA, 19 nt, Homo sapiens
  misc_RNA (1)...(19): siRNA sense strand
gcaugaauacuaccuugac

SEQ ID NO: 1212754 - RNA, 19 nt, Homo sapiens
  misc_RNA (1)...(19): siRNA sense strand
caccuucuguccuguggau

SEQ ID NO: 1212755 - RNA, 19 nt, Homo sapiens
  misc_RNA (1)...(19): siRNA sense strand
gguaaacaucaccuucugu

SEQ ID NO: 1212756 - RNA, 19 nt, Homo sapiens
  misc_RNA (1)...(19): siRNA sense strand
gcagaugagcauucagacu

SEQ ID NO: 1212757 - RNA, 19 nt, Homo sapiens
  misc_RNA (1)...(19): siRNA sense strand
uguauaacucauggacuua

SEQ ID NO: 1212758 - RNA, 19 nt, Homo sapiens
  misc_RNA (1)...(19): siRNA sense strand
aaacgguacugaugaaaag

SEQ ID NO: 1212759 - RNA, 19 nt, Homo sapiens
  misc_RNA (1)...(19): siRNA sense strand
ugacuuucacagcucagua

SEQ ID NO: 1212760 - RNA, 19 nt, Homo sapiens
  misc_RNA (1)...(19): siRNA sense strand
ccaagauaaaugcaugaau

SEQ ID NO: 1212761 - RNA, 19 nt, Homo sapiens
  misc_RNA (1)...(19): siRNA sense strand
gggccauccucaucauaac

SEQ ID NO: 1212762 - RNA, 19 nt, Homo sapiens
  misc_RNA (1)...(19): siRNA sense strand
gugagcaaacaacccauga

SEQ ID NO: 1212763 - RNA, 19 nt, Homo sapiens
  misc_RNA (1)...(19): siRNA sense strand
uaaugugcaauacuggaaa

SEQ ID NO: 1212764 - RNA, 19 nt, Homo sapiens
  misc_RNA (1)...(19): siRNA sense strand
cuaccuugacggaauguga

SEQ ID NO: 1212765 - RNA, 19 nt, Homo sapiens
  misc_RNA (1)...(19): siRNA sense strand
gagagcggcaagcagaauc

SEQ ID NO: 1212766 - RNA, 19 nt, Homo sapiens
  misc_RNA (1)...(19): siRNA sense strand
gaaacaggcucagaauuug

SEQ ID NO: 1212767 - RNA, 19 nt, Homo sapiens
  misc_RNA (1)...(19): siRNA sense strand
gaaccaagcugacugugau

SEQ ID NO: 1212768 - RNA, 19 nt, Homo sapiens
  misc_RNA (1)...(19): siRNA sense strand
gacaagggcucacggauga

SEQ ID NO: 1212769 - RNA, 19 nt, Homo sapiens
  misc_RNA (1)...(19): siRNA sense strand
gggaagaucuugggaauau

SEQ ID NO: 1212770 - RNA, 19 nt, Homo sapiens
  misc_RNA (1)...(19): siRNA sense strand
gagaauggauguccucaug

SEQ ID NO: 1212771 - RNA, 19 nt, Homo sapiens
  misc_RNA (1)...(19): siRNA sense strand
ggaaggugauugaguuuga

SEQ ID NO: 1212772 - RNA, 19 nt, Homo sapiens
  misc_RNA (1)...(19): siRNA sense strand
ggagagcccugcugagaga

SEQ ID NO: 1212773 - RNA, 19 nt, Homo sapiens
  misc_RNA (1)...(19): siRNA sense strand
gaauggauguccucaugaa

SEQ ID NO: 1212774 - RNA, 19 nt, Homo sapiens
  misc_RNA (1)...(19): siRNA sense strand
ucaagaagguggagaaugu

SEQ ID NO: 1212775 - RNA, 19 nt, Homo sapiens
  misc_RNA (1)...(19): siRNA sense strand
gcgaaugucucucuaagga

SEQ ID NO: 1212776 - RNA, 19 nt, Homo sapiens
  misc_RNA (1)...(19): siRNA sense strand
ugaaacaggcucagaauuu

SEQ ID NO: 1212777 - RNA, 19 nt, Homo sapiens
  misc_RNA (1)...(19): siRNA sense strand
ggaaagucaucguuaggaa

SEQ ID NO: 1212778 - RNA, 19 nt, Homo sapiens
  misc_RNA (1)...(19): siRNA sense strand
guuugaagcugccuuguuu

SEQ ID NO: 1212779 - RNA, 19 nt, Homo sapiens
  misc_RNA (1)...(19): siRNA sense strand
gggcagaggcagaggauua

SEQ ID NO: 1212780 - RNA, 19 nt, Homo sapiens
  misc_RNA (1)...(19): siRNA sense strand
ucaauauacugucaaguga

SEQ ID NO: 1212781 - RNA, 19 nt, Homo sapiens
  misc_RNA (1)...(19): siRNA sense strand
guggauaucugcauucuca

SEQ ID NO: 1212782 - RNA, 19 nt, Homo sapiens
  misc_RNA (1)...(19): siRNA sense strand
gacccuaccuuaucucaga

SEQ ID NO: 1212783 - RNA, 19 nt, Homo sapiens
  misc_RNA (1)...(19): siRNA sense strand
cagcagaagucagauugua

SEQ ID NO: 1212784 - RNA, 19 nt, Homo sapiens
  misc_RNA (1)...(19): siRNA sense strand
caagugauagcuauucuuu

SEQ ID NO: 1212785 - RNA, 19 nt, Homo sapiens
  misc_RNA (1)...(19): siRNA sense strand
ugacaagccugaaguccuu

SEQ ID NO: 1212786 - RNA, 19 nt, Homo sapiens
  misc_RNA (1)...(19): siRNA sense strand
caucaguacuucauccaaa

SEQ ID NO: 1212787 - RNA, 19 nt, Homo sapiens
  misc_RNA (1)...(19): siRNA sense strand
ggcaaaggcugaccguaga

SEQ ID NO: 1212788 - RNA, 19 nt, Homo sapiens
  misc_RNA (1)...(19): siRNA sense strand
caaagaucauucuccuuga

SEQ ID NO: 1212789 - RNA, 19 nt, Homo sapiens
  misc_RNA (1)...(19): siRNA sense strand
gauauaagaaggagggaaa

SEQ ID NO: 1212790 - RNA, 19 nt, Homo sapiens
  misc_RNA (1)...(19): siRNA sense strand
gugaaaggcuaccggcaaa

SEQ ID NO: 1212791 - RNA, 19 nt, Homo sapiens
  misc_RNA (1)...(19): siRNA sense strand
ccaaaggccugucauuguc

SEQ ID NO: 1212792 - RNA, 19 nt, Homo sapiens
  misc_RNA (1)...(19): siRNA sense strand
caaagaaauugcagaacca

SEQ ID NO: 1212793 - RNA, 19 nt, Homo sapiens
  misc_RNA (1)...(19): siRNA sense strand
gcaacaggaccauguguga

SEQ ID NO: 1212794 - RNA, 19 nt, Homo sapiens
  misc_RNA (1)...(19): siRNA sense strand
ggucagaggcauacaguga

SEQ ID NO: 1212795 - RNA, 19 nt, Homo sapiens
  misc_RNA (1)...(19): siRNA sense strand
gaaauugcagaaccagaaa

SEQ ID NO: 1212796 - RNA, 19 nt, Homo sapiens
  misc_RNA (1)...(19): siRNA sense strand
gcaaagugacagccucaaa

SEQ ID NO: 1212797 - RNA, 19 nt, Homo sapiens
  misc_RNA (1)...(19): siRNA sense strand
ugagaaagaugaaggaaaa

SEQ ID NO: 1212798 - RNA, 19 nt, Homo sapiens
  misc_RNA (1)...(19): siRNA sense strand
ugacucaucugacaccaau

SEQ ID NO: 1212799 - RNA, 19 nt, Homo sapiens
  misc_RNA (1)...(19): siRNA sense strand
gagaucaccuucagagacu

SEQ ID NO: 1212800 - RNA, 19 nt, Homo sapiens
  misc_RNA (1)...(19): siRNA sense strand
gcggagauccuuugcagaa

SEQ ID NO: 1212801 - RNA, 19 nt, Homo sapiens
  misc_RNA (1)...(19): siRNA sense strand
gaaagucuggguuggcauu

SEQ ID NO: 1212802 - RNA, 19 nt, Homo sapiens
  misc_RNA (1)...(19): siRNA sense strand
gaacauccuuaccuucacu

SEQ ID NO: 1212803 - RNA, 19 nt, Homo sapiens
  misc_RNA (1)...(19): siRNA sense strand
gaagaucuugggaauaugu

SEQ ID NO: 1212804 - RNA, 19 nt, Homo sapiens
  misc_RNA (1)...(19): siRNA sense strand
gcaugaagccagcaggaaa

SEQ ID NO: 1212805 - RNA, 19 nt, Homo sapiens
  misc_RNA (1)...(19): siRNA sense strand
gaagcgaaugucucucuaa

SEQ ID NO: 1212806 - RNA, 19 nt, Homo sapiens
  misc_RNA (1)...(19): siRNA sense strand
uaagaaggagggaaagaaa

SEQ ID NO: 1212807 - RNA, 19 nt, Homo sapiens
  misc_RNA (1)...(19): siRNA sense strand
ccaccgaguuuaccaaagu

SEQ ID NO: 1212808 - RNA, 19 nt, Homo sapiens
  misc_RNA (1)...(19): siRNA sense strand
gcaagaaacagaggucaga

SEQ ID NO: 1212809 - RNA, 19 nt, Homo sapiens
  misc_RNA (1)...(19): siRNA sense strand
aaacauacucuuuggagaa

SEQ ID NO: 1212810 - RNA, 19 nt, Homo sapiens
  misc_RNA (1)...(19): siRNA sense strand
agugauagcuauucuuugu

SEQ ID NO: 1212811 - RNA, 19 nt, Homo sapiens
  misc_RNA (1)...(19): siRNA sense strand
gaacgucagcugcuuugug

SEQ ID NO: 1212812 - RNA, 19 nt, Homo sapiens
  misc_RNA (1)...(19): siRNA sense strand
cagaugagauacagagaca

SEQ ID NO: 1212813 - RNA, 19 nt, Homo sapiens
  misc_RNA (1)...(19): siRNA sense strand
aaacauaucacacguacau

SEQ ID NO: 1212814 - RNA, 19 nt, Homo sapiens
  misc_RNA (1)...(19): siRNA sense strand
gaacuuuggccuacguuuc

SEQ ID NO: 1212815 - RNA, 19 nt, Homo sapiens
  misc_RNA (1)...(19): siRNA sense strand
gggaauaugugggaaugug

SEQ ID NO: 1212816 - RNA, 19 nt, Homo sapiens
  misc_RNA (1)...(19): siRNA sense strand
gaaaaguaccccaaagaaa

SEQ ID NO: 1212817 - RNA, 19 nt, Homo sapiens
  misc_RNA (1)...(19): siRNA sense strand
acauaucacacguacauua

SEQ ID NO: 1212818 - RNA, 19 nt, Homo sapiens
  misc_RNA (1)...(19): siRNA sense strand
cauaucacacguacauuaa

SEQ ID NO: 1212819 - RNA, 19 nt, Homo sapiens
  misc_RNA (1)...(19): siRNA sense strand
gcacggccauccgguugaa

SEQ ID NO: 1212820 - RNA, 19 nt, Homo sapiens
  misc_RNA (1)...(19): siRNA sense strand
auuagaagauggagagauu

SEQ ID NO: 1212821 - RNA, 19 nt, Homo sapiens
  misc_RNA (1)...(19): siRNA sense strand
gaagauggagagauuugug

SEQ ID NO: 1212822 - RNA, 19 nt, Homo sapiens
  misc_RNA (1)...(19): siRNA sense strand
gaaagucaucguuaggaau

SEQ ID NO: 1212823 - RNA, 19 nt, Homo sapiens
  misc_RNA (1)...(19): siRNA sense strand
gacauuauccugccacauc

SEQ ID NO: 1212824 - RNA, 19 nt, Homo sapiens
  misc_RNA (1)...(19): siRNA sense strand
gcgaucacguccugguuau

SEQ ID NO: 1212825 - RNA, 19 nt, Homo sapiens
  misc_RNA (1)...(19): siRNA sense strand
uaaugaaacucccagaaaa

SEQ ID NO: 1212826 - RNA, 19 nt, Homo sapiens
  misc_RNA (1)...(19): siRNA sense strand
gggcaucauucacgccuau

SEQ ID NO: 1212827 - RNA, 19 nt, Homo sapiens
  misc_RNA (1)...(19): siRNA sense strand
caaagugacagccucaaau

SEQ ID NO: 1212828 - RNA, 19 nt, Homo sapiens
  misc_RNA (1)...(19): siRNA sense strand
gcgacccugugcaagguua

SEQ ID NO: 1212829 - RNA, 19 nt, Homo sapiens
  misc_RNA (1)...(19): siRNA sense strand
gaggagugcauuaagaaga

SEQ ID NO: 1212830 - RNA, 19 nt, Homo sapiens
  misc_RNA (1)...(19): siRNA sense strand
caaaugccaccuugacaug

SEQ ID NO: 1212831 - RNA, 19 nt, Homo sapiens
  misc_RNA (1)...(19): siRNA sense strand
gcaaaugccaccuugacau

SEQ ID NO: 1212832 - RNA, 19 nt, Homo sapiens
  misc_RNA (1)...(19): siRNA sense strand
gcccagaggagcaaaguga

SEQ ID NO: 1212833 - RNA, 19 nt, Homo sapiens
  misc_RNA (1)...(19): siRNA sense strand
cuuagagucuugugaugaa

SEQ ID NO: 1212834 - RNA, 19 nt, Homo sapiens
  misc_RNA (1)...(19): siRNA sense strand
cagcaggcauggaucuuuc

SEQ ID NO: 1212835 - RNA, 19 nt, Homo sapiens
  misc_RNA (1)...(19): siRNA sense strand
ggauaucaguguaugucau

SEQ ID NO: 1212836 - RNA, 19 nt, Homo sapiens
  misc_RNA (1)...(19): siRNA sense strand
ugagguggauaucugcauu

SEQ ID NO: 1212837 - RNA, 19 nt, Homo sapiens
  misc_RNA (1)...(19): siRNA sense strand
cgaccuguguuccugaaug

SEQ ID NO: 1212838 - RNA, 19 nt, Homo sapiens
  misc_RNA (1)...(19): siRNA sense strand
ggcagucaauggaacuuug

SEQ ID NO: 1212839 - RNA, 19 nt, Homo sapiens
  misc_RNA (1)...(19): siRNA sense strand
cagaagacccagauacugu

SEQ ID NO: 1212840 - RNA, 19 nt, Homo sapiens
  misc_RNA (1)...(19): siRNA sense strand
ugauugccauguuuaaugu

SEQ ID NO: 1212841 - RNA, 19 nt, Homo sapiens
  misc_RNA (1)...(19): siRNA sense strand
caaaagauuucgaguccuu

SEQ ID NO: 1212842 - RNA, 19 nt, Homo sapiens
  misc_RNA (1)...(19): siRNA sense strand
gagcucuucuccguaauuc

SEQ ID NO: 1212843 - RNA, 19 nt, Homo sapiens
  misc_RNA (1)...(19): siRNA sense strand
caggaaaugagaaagauga

SEQ ID NO: 1212844 - RNA, 19 nt, Homo sapiens
  misc_RNA (1)...(19): siRNA sense strand
gaggauugcaguucaagga

SEQ ID NO: 1212845 - RNA, 19 nt, Homo sapiens
  misc_RNA (1)...(19): siRNA sense strand
ccaaagguaucagcacaca

SEQ ID NO: 1212846 - RNA, 19 nt, Homo sapiens
  misc_RNA (1)...(19): siRNA sense strand
uuacaucacccaaccagaa

SEQ ID NO: 1212847 - RNA, 19 nt, Homo sapiens
  misc_RNA (1)...(19): siRNA sense strand
caagcgaguucagacaaug

SEQ ID NO: 1212848 - RNA, 19 nt, Homo sapiens
  misc_RNA (1)...(19): siRNA sense strand
ggacugugcauagcccuuu

SEQ ID NO: 1212849 - RNA, 19 nt, Homo sapiens
  misc_RNA (1)...(19): siRNA sense strand
gcucuucuccguaauucaa

SEQ ID NO: 1212850 - RNA, 19 nt, Homo sapiens
  misc_RNA (1)...(19): siRNA sense strand
cccgagcucuucuccguaa

SEQ ID NO: 1212851 - RNA, 19 nt, Homo sapiens
  misc_RNA (1)...(19): siRNA sense strand
caccaaaggcuucgucuuc

SEQ ID NO: 1212852 - RNA, 19 nt, Homo sapiens
  misc_RNA (1)...(19): siRNA sense strand
guaccuccuuucucucuuc

SEQ ID NO: 1212853 - RNA, 19 nt, Homo sapiens
  misc_RNA (1)...(19): siRNA sense strand
ggaaagaaaauuacuggaa

SEQ ID NO: 1212854 - RNA, 19 nt, Homo sapiens
  misc_RNA (1)...(19): siRNA sense strand
gcgaggugcucaauauacu

SEQ ID NO: 1212855 - RNA, 19 nt, Homo sapiens
  misc_RNA (1)...(19): siRNA sense strand
uaccaacacuauccaagau

SEQ ID NO: 1212856 - RNA, 19 nt, Homo sapiens
  misc_RNA (1)...(19): siRNA sense strand
uggaagaccucagaaccaa

SEQ ID NO: 1212857 - RNA, 19 nt, Homo sapiens
  misc_RNA (1)...(19): siRNA sense strand
cagagacgcaagccaaauu

SEQ ID NO: 1212858 - RNA, 19 nt, Homo sapiens
  misc_RNA (1)...(19): siRNA sense strand
ucaugaacauccuuaccuu

SEQ ID NO: 1212859 - RNA, 19 nt, Homo sapiens
  misc_RNA (1)...(19): siRNA sense strand
uaagcuuuguggugagaaa

SEQ ID NO: 1212860 - RNA, 19 nt, Homo sapiens
  misc_RNA (1)...(19): siRNA sense strand
ucagaggcauacagugaga

SEQ ID NO: 1212861 - RNA, 19 nt, Homo sapiens
  misc_RNA (1)...(19): siRNA sense strand
ggaaaaguaccccaaagaa

SEQ ID NO: 1212862 - RNA, 19 nt, Homo sapiens
  misc_RNA (1)...(19): siRNA sense strand
gaagccagcaggaaaagua

SEQ ID NO: 1212863 - RNA, 19 nt, Homo sapiens
  misc_RNA (1)...(19): siRNA sense strand
ccagauacugucuugcuuu

SEQ ID NO: 1212864 - RNA, 19 nt, Homo sapiens
  misc_RNA (1)...(19): siRNA sense strand
ccuuugggaugaagaggua

SEQ ID NO: 1212865 - RNA, 19 nt, Homo sapiens
  misc_RNA (1)...(19): siRNA sense strand
auaaugaaacucccagaaa

SEQ ID NO: 1212866 - RNA, 19 nt, Homo sapiens
  misc_RNA (1)...(19): siRNA sense strand
gaaacaggcucagaauuug

SEQ ID NO: 1212867 - RNA, 19 nt, Homo sapiens
  misc_RNA (1)...(19): siRNA sense strand
gacaagggcucacggauga

SEQ ID NO: 1212868 - RNA, 19 nt, Homo sapiens
  misc_RNA (1)...(19): siRNA sense strand
gggaagaucuugggaauau

SEQ ID NO: 1212869 - RNA, 19 nt, Homo sapiens
  misc_RNA (1)...(19): siRNA sense strand
ggagagcccugcugagaga

SEQ ID NO: 1212870 - RNA, 19 nt, Homo sapiens
  misc_RNA (1)...(19): siRNA sense strand
ucaagaagguggagaaugu

SEQ ID NO: 1212871 - RNA, 19 nt, Homo sapiens
  misc_RNA (1)...(19): siRNA sense strand
gcgaaugucucucuaagga

SEQ ID NO: 1212872 - RNA, 19 nt, Homo sapiens
  misc_RNA (1)...(19): siRNA sense strand
ugaaacaggcucagaauuu

SEQ ID NO: 1212873 - RNA, 19 nt, Homo sapiens
  misc_RNA (1)...(19): siRNA sense strand
guuugaagcugccuuguuu

SEQ ID NO: 1212874 - RNA, 19 nt, Homo sapiens
  misc_RNA (1)...(19): siRNA sense strand
gggcagaggcagaggauua

SEQ ID NO: 1212875 - RNA, 19 nt, Homo sapiens
  misc_RNA (1)...(19): siRNA sense strand
ucaauauacugucaaguga

SEQ ID NO: 1212876 - RNA, 19 nt, Homo sapiens
  misc_RNA (1)...(19): siRNA sense strand
gacccuaccuuaucucaga

SEQ ID NO: 1212877 - RNA, 19 nt, Homo sapiens
  misc_RNA (1)...(19): siRNA sense strand
caagugauagcuauucuuu

SEQ ID NO: 1212878 - RNA, 19 nt, Homo sapiens
  misc_RNA (1)...(19): siRNA sense strand
ggcaaaggcugaccguaga

SEQ ID NO: 1212879 - RNA, 19 nt, Homo sapiens
  misc_RNA (1)...(19): siRNA sense strand
gauauaagaaggagggaaa

SEQ ID NO: 1212880 - RNA, 19 nt, Homo sapiens
  misc_RNA (1)...(19): siRNA sense strand
gugaaaggcuaccggcaaa

SEQ ID NO: 1212881 - RNA, 19 nt, Homo sapiens
  misc_RNA (1)...(19): siRNA sense strand
caaagaaauugcagaacca

SEQ ID NO: 1212882 - RNA, 19 nt, Homo sapiens
  misc_RNA (1)...(19): siRNA sense strand
gcaacaggaccauguguga

SEQ ID NO: 1212883 - RNA, 19 nt, Homo sapiens
  misc_RNA (1)...(19): siRNA sense strand
ggucagaggcauacaguga

SEQ ID NO: 1212884 - RNA, 19 nt, Homo sapiens
  misc_RNA (1)...(19): siRNA sense strand
gaaauugcagaaccagaaa

SEQ ID NO: 1212885 - RNA, 19 nt, Homo sapiens
  misc_RNA (1)...(19): siRNA sense strand
gcaaagugacagccucaaa

SEQ ID NO: 1212886 - RNA, 19 nt, Homo sapiens
  misc_RNA (1)...(19): siRNA sense strand
ugagaaagaugaaggaaaa

SEQ ID NO: 1212887 - RNA, 19 nt, Homo sapiens
  misc_RNA (1)...(19): siRNA sense strand
ugacucaucugacaccaau

SEQ ID NO: 1212888 - RNA, 19 nt, Homo sapiens
  misc_RNA (1)...(19): siRNA sense strand
gcggagauccuuugcagaa

SEQ ID NO: 1212889 - RNA, 19 nt, Homo sapiens
  misc_RNA (1)...(19): siRNA sense strand
gaaagucuggguuggcauu

SEQ ID NO: 1212890 - RNA, 19 nt, Homo sapiens
  misc_RNA (1)...(19): siRNA sense strand
gaagaucuugggaauaugu

SEQ ID NO: 1212891 - RNA, 19 nt, Homo sapiens
  misc_RNA (1)...(19): siRNA sense strand
gcaugaagccagcaggaaa

SEQ ID NO: 1212892 - RNA, 19 nt, Homo sapiens
  misc_RNA (1)...(19): siRNA sense strand
gaagcgaaugucucucuaa

SEQ ID NO: 1212893 - RNA, 19 nt, Homo sapiens
  misc_RNA (1)...(19): siRNA sense strand
uaagaaggagggaaagaaa

SEQ ID NO: 1212894 - RNA, 19 nt, Homo sapiens
  misc_RNA (1)...(19): siRNA sense strand
ccaccgaguuuaccaaagu

SEQ ID NO: 1212895 - RNA, 19 nt, Homo sapiens
  misc_RNA (1)...(19): siRNA sense strand
gcaagaaacagaggucaga

SEQ ID NO: 1212896 - RNA, 19 nt, Homo sapiens
  misc_RNA (1)...(19): siRNA sense strand
aaacauacucuuuggagaa

SEQ ID NO: 1212897 - RNA, 19 nt, Homo sapiens
  misc_RNA (1)...(19): siRNA sense strand
agugauagcuauucuuugu

SEQ ID NO: 1212898 - RNA, 19 nt, Homo sapiens
  misc_RNA (1)...(19): siRNA sense strand
aaacauaucacacguacau

SEQ ID NO: 1212899 - RNA, 19 nt, Homo sapiens
  misc_RNA (1)...(19): siRNA sense strand
gaacuuuggccuacguuuc

SEQ ID NO: 1212900 - RNA, 19 nt, Homo sapiens
  misc_RNA (1)...(19): siRNA sense strand
gggaauaugugggaaugug

SEQ ID NO: 1212901 - RNA, 19 nt, Homo sapiens
  misc_RNA (1)...(19): siRNA sense strand
gaaaaguaccccaaagaaa

SEQ ID NO: 1212902 - RNA, 19 nt, Homo sapiens
  misc_RNA (1)...(19): siRNA sense strand
acauaucacacguacauua

SEQ ID NO: 1212903 - RNA, 19 nt, Homo sapiens
  misc_RNA (1)...(19): siRNA sense strand
cauaucacacguacauuaa

SEQ ID NO: 1212904 - RNA, 19 nt, Homo sapiens
  misc_RNA (1)...(19): siRNA sense strand
gcacggccauccgguugaa

SEQ ID NO: 1212905 - RNA, 19 nt, Homo sapiens
  misc_RNA (1)...(19): siRNA sense strand
auuagaagauggagagauu

SEQ ID NO: 1212906 - RNA, 19 nt, Homo sapiens
  misc_RNA (1)...(19): siRNA sense strand
gaagauggagagauuugug

SEQ ID NO: 1212907 - RNA, 19 nt, Homo sapiens
  misc_RNA (1)...(19): siRNA sense strand
gacauuauccugccacauc

SEQ ID NO: 1212908 - RNA, 19 nt, Homo sapiens
  misc_RNA (1)...(19): siRNA sense strand
gggcaucauucacgccuau

SEQ ID NO: 1212909 - RNA, 19 nt, Homo sapiens
  misc_RNA (1)...(19): siRNA sense strand
caaagugacagccucaaau

SEQ ID NO: 1212910 - RNA, 19 nt, Homo sapiens
  misc_RNA (1)...(19): siRNA sense strand
gcaaaugccaccuugacau

SEQ ID NO: 1212911 - RNA, 19 nt, Homo sapiens
  misc_RNA (1)...(19): siRNA sense strand
gcgacccugugcaagguua

SEQ ID NO: 1212912 - RNA, 19 nt, Homo sapiens
  misc_RNA (1)...(19): siRNA sense strand
gaggagugcauuaagaaga

SEQ ID NO: 1212913 - RNA, 19 nt, Homo sapiens
  misc_RNA (1)...(19): siRNA sense strand
caaaugccaccuugacaug

SEQ ID NO: 1212914 - RNA, 19 nt, Homo sapiens
  misc_RNA (1)...(19): siRNA sense strand
gcccagaggagcaaaguga

SEQ ID NO: 1212915 - RNA, 19 nt, Homo sapiens
  misc_RNA (1)...(19): siRNA sense strand
cuuagagucuugugaugaa

SEQ ID NO: 1212916 - RNA, 19 nt, Homo sapiens
  misc_RNA (1)...(19): siRNA sense strand
cagcaggcauggaucuuuc

SEQ ID NO: 1212917 - RNA, 19 nt, Homo sapiens
  misc_RNA (1)...(19): siRNA sense strand
ggauaucaguguaugucau

SEQ ID NO: 1212918 - RNA, 19 nt, Homo sapiens
  misc_RNA (1)...(19): siRNA sense strand
ggcagucaauggaacuuug

SEQ ID NO: 1212919 - RNA, 19 nt, Homo sapiens
  misc_RNA (1)...(19): siRNA sense strand
cagaagacccagauacugu

SEQ ID NO: 1212920 - RNA, 19 nt, Homo sapiens
  misc_RNA (1)...(19): siRNA sense strand
ugauugccauguuuaaugu

SEQ ID NO: 1212921 - RNA, 19 nt, Homo sapiens
  misc_RNA (1)...(19): siRNA sense strand
caaaagauuucgaguccuu

SEQ ID NO: 1212922 - RNA, 19 nt, Homo sapiens
  misc_RNA (1)...(19): siRNA sense strand
caggaaaugagaaagauga

SEQ ID NO: 1212923 - RNA, 19 nt, Homo sapiens
  misc_RNA (1)...(19): siRNA sense strand
gaggauugcaguucaagga

SEQ ID NO: 1212924 - RNA, 19 nt, Homo sapiens
  misc_RNA (1)...(19): siRNA sense strand
ccaaagguaucagcacaca

SEQ ID NO: 1212925 - RNA, 19 nt, Homo sapiens
  misc_RNA (1)...(19): siRNA sense strand
uuacaucacccaaccagaa

SEQ ID NO: 1212926 - RNA, 19 nt, Homo sapiens
  misc_RNA (1)...(19): siRNA sense strand
caagcgaguucagacaaug

SEQ ID NO: 1212927 - RNA, 19 nt, Homo sapiens
  misc_RNA (1)...(19): siRNA sense strand
ggacugugcauagcccuuu

SEQ ID NO: 1212928 - RNA, 19 nt, Homo sapiens
  misc_RNA (1)...(19): siRNA sense strand
caccaaaggcuucgucuuc

SEQ ID NO: 1212929 - RNA, 19 nt, Homo sapiens
  misc_RNA (1)...(19): siRNA sense strand
guaccuccuuucucucuuc

SEQ ID NO: 1212930 - RNA, 19 nt, Homo sapiens
  misc_RNA (1)...(19): siRNA sense strand
ggaaagaaaauuacuggaa

SEQ ID NO: 1212931 - RNA, 19 nt, Homo sapiens
  misc_RNA (1)...(19): siRNA sense strand
gcgaggugcucaauauacu

SEQ ID NO: 1212932 - RNA, 19 nt, Homo sapiens
  misc_RNA (1)...(19): siRNA sense strand
uaccaacacuauccaagau

SEQ ID NO: 1212933 - RNA, 19 nt, Homo sapiens
  misc_RNA (1)...(19): siRNA sense strand
ccuuugggaugaagaggua

SEQ ID NO: 1212934 - RNA, 19 nt, Homo sapiens
  misc_RNA (1)...(19): siRNA sense strand
uaagcuuuguggugagaaa

SEQ ID NO: 1212935 - RNA, 19 nt, Homo sapiens
  misc_RNA (1)...(19): siRNA sense strand
ucagaggcauacagugaga

SEQ ID NO: 1212936 - RNA, 19 nt, Homo sapiens
  misc_RNA (1)...(19): siRNA sense strand
ggaaaaguaccccaaagaa

SEQ ID NO: 1212937 - RNA, 19 nt, Homo sapiens
  misc_RNA (1)...(19): siRNA sense strand
gaagccagcaggaaaagua

SEQ ID NO: 1212938 - RNA, 19 nt, Homo sapiens
  misc_RNA (1)...(19): siRNA sense strand
ccagauacugucuugcuuu

SEQ ID NO: 1212939 - RNA, 19 nt, Homo sapiens
  misc_RNA (1)...(19): siRNA sense strand
gauagcuauucuuuguuug

SEQ ID NO: 1212940 - RNA, 19 nt, Homo sapiens
  misc_RNA (1)...(19): siRNA sense strand
cugaacaccuuuacaaugc

SEQ ID NO: 1212941 - RNA, 19 nt, Homo sapiens
  misc_RNA (1)...(19): siRNA sense strand
gccaacauccugugcauca

SEQ ID NO: 1212942 - RNA, 19 nt, Homo sapiens
  misc_RNA (1)...(19): siRNA sense strand
gagagagggcgcuaugcaa

SEQ ID NO: 1212943 - RNA, 19 nt, Homo sapiens
  misc_RNA (1)...(19): siRNA sense strand
ggagagagggcgcuaugca

SEQ ID NO: 1212944 - RNA, 19 nt, Homo sapiens
  misc_RNA (1)...(19): siRNA sense strand
gaacccacaaggaguuaau

SEQ ID NO: 1212945 - RNA, 19 nt, Homo sapiens
  misc_RNA (1)...(19): siRNA sense strand
cagcuacaguucuuagagu

SEQ ID NO: 1212946 - RNA, 19 nt, Homo sapiens
  misc_RNA (1)...(19): siRNA sense strand
ggacaucguggccaacauc

SEQ ID NO: 1212947 - RNA, 19 nt, Homo sapiens
  misc_RNA (1)...(19): siRNA sense strand
ugaagcgaaugucucucua

SEQ ID NO: 1212948 - RNA, 19 nt, Homo sapiens
  misc_RNA (1)...(19): siRNA sense strand
agaaauugcagaaccagaa

SEQ ID NO: 1212949 - RNA, 19 nt, Homo sapiens
  misc_RNA (1)...(19): siRNA sense strand
uccaggagcucaagaaggu

SEQ ID NO: 1212950 - RNA, 19 nt, Homo sapiens
  misc_RNA (1)...(19): siRNA sense strand
gauggagagauuugugaaa

SEQ ID NO: 1212951 - RNA, 19 nt, Homo sapiens
  misc_RNA (1)...(19): siRNA sense strand
ggaagaucuugggaauaug

SEQ ID NO: 1212952 - RNA, 19 nt, Homo sapiens
  misc_RNA (1)...(19): siRNA sense strand
uuccgaaggucagcaauuu

SEQ ID NO: 1212953 - RNA, 19 nt, Homo sapiens
  misc_RNA (1)...(19): siRNA sense strand
gaggagagagggcgcuaug

SEQ ID NO: 1212954 - RNA, 19 nt, Homo sapiens
  misc_RNA (1)...(19): siRNA sense strand
gugauugccauguuuaaug

SEQ ID NO: 1212955 - RNA, 19 nt, Homo sapiens
  misc_RNA (1)...(19): siRNA sense strand
gacaaugaaugaguuucug

SEQ ID NO: 1212956 - RNA, 19 nt, Homo sapiens
  misc_RNA (1)...(19): siRNA sense strand
gcaaggguggguccugaga

SEQ ID NO: 1212957 - RNA, 19 nt, Homo sapiens
  misc_RNA (1)...(19): siRNA sense strand
aaaguaugaucaccaaagg

SEQ ID NO: 1212958 - RNA, 19 nt, Homo sapiens
  misc_RNA (1)...(19): siRNA sense strand
aacauacucuuuggagaaa

SEQ ID NO: 1212959 - RNA, 19 nt, Homo sapiens
  misc_RNA (1)...(19): siRNA sense strand
gacaagcgaguucagacaa

SEQ ID NO: 1212960 - RNA, 19 nt, Homo sapiens
  misc_RNA (1)...(19): siRNA sense strand
aguaugaucaccaaaggua

SEQ ID NO: 1212961 - RNA, 19 nt, Homo sapiens
  misc_RNA (1)...(19): siRNA sense strand
gagaaaacauacucuuugg

SEQ ID NO: 1212962 - RNA, 19 nt, Homo sapiens
  misc_RNA (1)...(19): siRNA sense strand
ccuugcagcucuccuagga

SEQ ID NO: 1212963 - RNA, 19 nt, Homo sapiens
  misc_RNA (1)...(19): siRNA sense strand
cauaagcuuuguggugaga

SEQ ID NO: 1212964 - RNA, 19 nt, Homo sapiens
  misc_RNA (1)...(19): siRNA sense strand
agagagggcgcuaugcaaa

SEQ ID NO: 1212965 - RNA, 19 nt, Homo sapiens
  misc_RNA (1)...(19): siRNA sense strand
gaaagaugaaggaaaagaa

SEQ ID NO: 1212966 - RNA, 19 nt, Homo sapiens
  misc_RNA (1)...(19): siRNA sense strand
gaaacaggcucagaauuug

SEQ ID NO: 1212967 - RNA, 19 nt, Homo sapiens
  misc_RNA (1)...(19): siRNA sense strand
gacaagggcucacggauga

SEQ ID NO: 1212968 - RNA, 19 nt, Homo sapiens
  misc_RNA (1)...(19): siRNA sense strand
gggaagaucuugggaauau

SEQ ID NO: 1212969 - RNA, 19 nt, Homo sapiens
  misc_RNA (1)...(19): siRNA sense strand
ggagagcccugcugagaga

SEQ ID NO: 1212970 - RNA, 19 nt, Homo sapiens
  misc_RNA (1)...(19): siRNA sense strand
ucaagaagguggagaaugu

SEQ ID NO: 1212971 - RNA, 19 nt, Homo sapiens
  misc_RNA (1)...(19): siRNA sense strand
gcgaaugucucucuaagga

SEQ ID NO: 1212972 - RNA, 19 nt, Homo sapiens
  misc_RNA (1)...(19): siRNA sense strand
ugaaacaggcucagaauuu

SEQ ID NO: 1212973 - RNA, 19 nt, Homo sapiens
  misc_RNA (1)...(19): siRNA sense strand
guuugaagcugccuuguuu

SEQ ID NO: 1212974 - RNA, 19 nt, Homo sapiens
  misc_RNA (1)...(19): siRNA sense strand
gggcagaggcagaggauua

SEQ ID NO: 1212975 - RNA, 19 nt, Homo sapiens
  misc_RNA (1)...(19): siRNA sense strand
ucaauauacugucaaguga

SEQ ID NO: 1212976 - RNA, 19 nt, Homo sapiens
  misc_RNA (1)...(19): siRNA sense strand
gacccuaccuuaucucaga

SEQ ID NO: 1212977 - RNA, 19 nt, Homo sapiens
  misc_RNA (1)...(19): siRNA sense strand
caagugauagcuauucuuu

SEQ ID NO: 1212978 - RNA, 19 nt, Homo sapiens
  misc_RNA (1)...(19): siRNA sense strand
ggcaaaggcugaccguaga

SEQ ID NO: 1212979 - RNA, 19 nt, Homo sapiens
  misc_RNA (1)...(19): siRNA sense strand
gauauaagaaggagggaaa

SEQ ID NO: 1212980 - RNA, 19 nt, Homo sapiens
  misc_RNA (1)...(19): siRNA sense strand
gugaaaggcuaccggcaaa

SEQ ID NO: 1212981 - RNA, 19 nt, Homo sapiens
  misc_RNA (1)...(19): siRNA sense strand
caaagaaauugcagaacca

SEQ ID NO: 1212982 - RNA, 19 nt, Homo sapiens
  misc_RNA (1)...(19): siRNA sense strand
gcaacaggaccauguguga

SEQ ID NO: 1212983 - RNA, 19 nt, Homo sapiens
  misc_RNA (1)...(19): siRNA sense strand
ggucagaggcauacaguga

SEQ ID NO: 1212984 - RNA, 19 nt, Homo sapiens
  misc_RNA (1)...(19): siRNA sense strand
gaaauugcagaaccagaaa

SEQ ID NO: 1212985 - RNA, 19 nt, Homo sapiens
  misc_RNA (1)...(19): siRNA sense strand
gcaaagugacagccucaaa

SEQ ID NO: 1212986 - RNA, 19 nt, Homo sapiens
  misc_RNA (1)...(19): siRNA sense strand
ugagaaagaugaaggaaaa

SEQ ID NO: 1212987 - RNA, 19 nt, Homo sapiens
  misc_RNA (1)...(19): siRNA sense strand
ugacucaucugacaccaau

SEQ ID NO: 1212988 - RNA, 19 nt, Homo sapiens
  misc_RNA (1)...(19): siRNA sense strand
gcggagauccuuugcagaa

SEQ ID NO: 1212989 - RNA, 19 nt, Homo sapiens
  misc_RNA (1)...(19): siRNA sense strand
gaaagucuggguuggcauu

SEQ ID NO: 1212990 - RNA, 19 nt, Homo sapiens
  misc_RNA (1)...(19): siRNA sense strand
gaagaucuugggaauaugu

SEQ ID NO: 1212991 - RNA, 19 nt, Homo sapiens
  misc_RNA (1)...(19): siRNA sense strand
gcaugaagccagcaggaaa

SEQ ID NO: 1212992 - RNA, 19 nt, Homo sapiens
  misc_RNA (1)...(19): siRNA sense strand
gaagcgaaugucucucuaa

SEQ ID NO: 1212993 - RNA, 19 nt, Homo sapiens
  misc_RNA (1)...(19): siRNA sense strand
uaagaaggagggaaagaaa

SEQ ID NO: 1212994 - RNA, 19 nt, Homo sapiens
  misc_RNA (1)...(19): siRNA sense strand
ccaccgaguuuaccaaagu

SEQ ID NO: 1212995 - RNA, 19 nt, Homo sapiens
  misc_RNA (1)...(19): siRNA sense strand
gcaagaaacagaggucaga

SEQ ID NO: 1212996 - RNA, 19 nt, Homo sapiens
  misc_RNA (1)...(19): siRNA sense strand
aaacauacucuuuggagaa

SEQ ID NO: 1212997 - RNA, 19 nt, Homo sapiens
  misc_RNA (1)...(19): siRNA sense strand
agugauagcuauucuuugu

SEQ ID NO: 1212998 - RNA, 19 nt, Homo sapiens
  misc_RNA (1)...(19): siRNA sense strand
aaacauaucacacguacau

SEQ ID NO: 1212999 - RNA, 19 nt, Homo sapiens
  misc_RNA (1)...(19): siRNA sense strand
gaacuuuggccuacguuuc

SEQ ID NO: 1213000 - RNA, 19 nt, Homo sapiens
  misc_RNA (1)...(19): siRNA sense strand
gggaauaugugggaaugug

SEQ ID NO: 1213001 - RNA, 19 nt, Homo sapiens
  misc_RNA (1)...(19): siRNA sense strand
gaaaaguaccccaaagaaa

SEQ ID NO: 1213002 - RNA, 19 nt, Homo sapiens
  misc_RNA (1)...(19): siRNA sense strand
acauaucacacguacauua

SEQ ID NO: 1213003 - RNA, 19 nt, Homo sapiens
  misc_RNA (1)...(19): siRNA sense strand
cauaucacacguacauuaa

SEQ ID NO: 1213004 - RNA, 19 nt, Homo sapiens
  misc_RNA (1)...(19): siRNA sense strand
gcacggccauccgguugaa

SEQ ID NO: 1213005 - RNA, 19 nt, Homo sapiens
  misc_RNA (1)...(19): siRNA sense strand
auuagaagauggagagauu

SEQ ID NO: 1213006 - RNA, 19 nt, Homo sapiens
  misc_RNA (1)...(19): siRNA sense strand
gaagauggagagauuugug

SEQ ID NO: 1213007 - RNA, 19 nt, Homo sapiens
  misc_RNA (1)...(19): siRNA sense strand
gacauuauccugccacauc

SEQ ID NO: 1213008 - RNA, 19 nt, Homo sapiens
  misc_RNA (1)...(19): siRNA sense strand
gggcaucauucacgccuau

SEQ ID NO: 1213009 - RNA, 19 nt, Homo sapiens
  misc_RNA (1)...(19): siRNA sense strand
caaagugacagccucaaau

SEQ ID NO: 1213010 - RNA, 19 nt, Homo sapiens
  misc_RNA (1)...(19): siRNA sense strand
gcaaaugccaccuugacau

SEQ ID NO: 1213011 - RNA, 19 nt, Homo sapiens
  misc_RNA (1)...(19): siRNA sense strand
gcgacccugugcaagguua

SEQ ID NO: 1213012 - RNA, 19 nt, Homo sapiens
  misc_RNA (1)...(19): siRNA sense strand
gaggagugcauuaagaaga

SEQ ID NO: 1213013 - RNA, 19 nt, Homo sapiens
  misc_RNA (1)...(19): siRNA sense strand
caaaugccaccuugacaug

SEQ ID NO: 1213014 - RNA, 19 nt, Homo sapiens
  misc_RNA (1)...(19): siRNA sense strand
gcccagaggagcaaaguga

SEQ ID NO: 1213015 - RNA, 19 nt, Homo sapiens
  misc_RNA (1)...(19): siRNA sense strand
cuuagagucuugugaugaa

SEQ ID NO: 1213016 - RNA, 19 nt, Homo sapiens
  misc_RNA (1)...(19): siRNA sense strand
cagcaggcauggaucuuuc

SEQ ID NO: 1213017 - RNA, 19 nt, Homo sapiens
  misc_RNA (1)...(19): siRNA sense strand
ggauaucaguguaugucau

SEQ ID NO: 1213018 - RNA, 19 nt, Homo sapiens
  misc_RNA (1)...(19): siRNA sense strand
ggcagucaauggaacuuug

SEQ ID NO: 1213019 - RNA, 19 nt, Homo sapiens
  misc_RNA (1)...(19): siRNA sense strand
cagaagacccagauacugu

SEQ ID NO: 1213020 - RNA, 19 nt, Homo sapiens
  misc_RNA (1)...(19): siRNA sense strand
ugauugccauguuuaaugu

SEQ ID NO: 1213021 - RNA, 19 nt, Homo sapiens
  misc_RNA (1)...(19): siRNA sense strand
caaaagauuucgaguccuu

SEQ ID NO: 1213022 - RNA, 19 nt, Homo sapiens
  misc_RNA (1)...(19): siRNA sense strand
caggaaaugagaaagauga

SEQ ID NO: 1213023 - RNA, 19 nt, Homo sapiens
  misc_RNA (1)...(19): siRNA sense strand
gaggauugcaguucaagga

SEQ ID NO: 1213024 - RNA, 19 nt, Homo sapiens
  misc_RNA (1)...(19): siRNA sense strand
ccaaagguaucagcacaca

SEQ ID NO: 1213025 - RNA, 19 nt, Homo sapiens
  misc_RNA (1)...(19): siRNA sense strand
uuacaucacccaaccagaa

SEQ ID NO: 1213026 - RNA, 19 nt, Homo sapiens
  misc_RNA (1)...(19): siRNA sense strand
caagcgaguucagacaaug

SEQ ID NO: 1213027 - RNA, 19 nt, Homo sapiens
  misc_RNA (1)...(19): siRNA sense strand
ggacugugcauagcccuuu

SEQ ID NO: 1213028 - RNA, 19 nt, Homo sapiens
  misc_RNA (1)...(19): siRNA sense strand
caccaaaggcuucgucuuc

SEQ ID NO: 1213029 - RNA, 19 nt, Homo sapiens
  misc_RNA (1)...(19): siRNA sense strand
guaccuccuuucucucuuc

SEQ ID NO: 1213030 - RNA, 19 nt, Homo sapiens
  misc_RNA (1)...(19): siRNA sense strand
ggaaagaaaauuacuggaa

SEQ ID NO: 1213031 - RNA, 19 nt, Homo sapiens
  misc_RNA (1)...(19): siRNA sense strand
gcgaggugcucaauauacu

SEQ ID NO: 1213032 - RNA, 19 nt, Homo sapiens
  misc_RNA (1)...(19): siRNA sense strand
uaccaacacuauccaagau

SEQ ID NO: 1213033 - RNA, 19 nt, Homo sapiens
  misc_RNA (1)...(19): siRNA sense strand
ccuuugggaugaagaggua

SEQ ID NO: 1213034 - RNA, 19 nt, Homo sapiens
  misc_RNA (1)...(19): siRNA sense strand
uaagcuuuguggugagaaa

SEQ ID NO: 1213035 - RNA, 19 nt, Homo sapiens
  misc_RNA (1)...(19): siRNA sense strand
ucagaggcauacagugaga

SEQ ID NO: 1213036 - RNA, 19 nt, Homo sapiens
  misc_RNA (1)...(19): siRNA sense strand
ggaaaaguaccccaaagaa

SEQ ID NO: 1213037 - RNA, 19 nt, Homo sapiens
  misc_RNA (1)...(19): siRNA sense strand
gaagccagcaggaaaagua

SEQ ID NO: 1213038 - RNA, 19 nt, Homo sapiens
  misc_RNA (1)...(19): siRNA sense strand
ccagauacugucuugcuuu

SEQ ID NO: 1213039 - RNA, 19 nt, Homo sapiens
  misc_RNA (1)...(19): siRNA sense strand
gauagcuauucuuuguuug

SEQ ID NO: 1213040 - RNA, 19 nt, Homo sapiens
  misc_RNA (1)...(19): siRNA sense strand
cugaacaccuuuacaaugc

SEQ ID NO: 1213041 - RNA, 19 nt, Homo sapiens
  misc_RNA (1)...(19): siRNA sense strand
gccaacauccugugcauca

SEQ ID NO: 1213042 - RNA, 19 nt, Homo sapiens
  misc_RNA (1)...(19): siRNA sense strand
gagagagggcgcuaugcaa

SEQ ID NO: 1213043 - RNA, 19 nt, Homo sapiens
  misc_RNA (1)...(19): siRNA sense strand
ggagagagggcgcuaugca

SEQ ID NO: 1213044 - RNA, 19 nt, Homo sapiens
  misc_RNA (1)...(19): siRNA sense strand
gaacccacaaggaguuaau

SEQ ID NO: 1213045 - RNA, 19 nt, Homo sapiens
  misc_RNA (1)...(19): siRNA sense strand
cagcuacaguucuuagagu

SEQ ID NO: 1213046 - RNA, 19 nt, Homo sapiens
  misc_RNA (1)...(19): siRNA sense strand
ggacaucguggccaacauc

SEQ ID NO: 1213047 - RNA, 19 nt, Homo sapiens
  misc_RNA (1)...(19): siRNA sense strand
ugaagcgaaugucucucua

SEQ ID NO: 1213048 - RNA, 19 nt, Homo sapiens
  misc_RNA (1)...(19): siRNA sense strand
agaaauugcagaaccagaa

SEQ ID NO: 1213049 - RNA, 19 nt, Homo sapiens
  misc_RNA (1)...(19): siRNA sense strand
uccaggagcucaagaaggu

SEQ ID NO: 1213050 - RNA, 19 nt, Homo sapiens
  misc_RNA (1)...(19): siRNA sense strand
gauggagagauuugugaaa

SEQ ID NO: 1213051 - RNA, 19 nt, Homo sapiens
  misc_RNA (1)...(19): siRNA sense strand
ggaagaucuugggaauaug

SEQ ID NO: 1213052 - RNA, 19 nt, Homo sapiens
  misc_RNA (1)...(19): siRNA sense strand
uuccgaaggucagcaauuu

SEQ ID NO: 1213053 - RNA, 19 nt, Homo sapiens
  misc_RNA (1)...(19): siRNA sense strand
gaggagagagggcgcuaug

SEQ ID NO: 1213054 - RNA, 19 nt, Homo sapiens
  misc_RNA (1)...(19): siRNA sense strand
gugauugccauguuuaaug

SEQ ID NO: 1213055 - RNA, 19 nt, Homo sapiens
  misc_RNA (1)...(19): siRNA sense strand
gacaaugaaugaguuucug

SEQ ID NO: 1213056 - RNA, 19 nt, Homo sapiens
  misc_RNA (1)...(19): siRNA sense strand
gcaaggguggguccugaga

SEQ ID NO: 1213057 - RNA, 19 nt, Homo sapiens
  misc_RNA (1)...(19): siRNA sense strand
aaaguaugaucaccaaagg

SEQ ID NO: 1213058 - RNA, 19 nt, Homo sapiens
  misc_RNA (1)...(19): siRNA sense strand
aacauacucuuuggagaaa

SEQ ID NO: 1213059 - RNA, 19 nt, Homo sapiens
  misc_RNA (1)...(19): siRNA sense strand
gacaagcgaguucagacaa

SEQ ID NO: 1213060 - RNA, 19 nt, Homo sapiens
  misc_RNA (1)...(19): siRNA sense strand
aguaugaucaccaaaggua

SEQ ID NO: 1213061 - RNA, 19 nt, Homo sapiens
  misc_RNA (1)...(19): siRNA sense strand
gagaaaacauacucuuugg

SEQ ID NO: 1213062 - RNA, 19 nt, Homo sapiens
  misc_RNA (1)...(19): siRNA sense strand
ccuugcagcucuccuagga

SEQ ID NO: 1213063 - RNA, 19 nt, Homo sapiens
  misc_RNA (1)...(19): siRNA sense strand
cauaagcuuuguggugaga

SEQ ID NO: 1213064 - RNA, 19 nt, Homo sapiens
  misc_RNA (1)...(19): siRNA sense strand
agagagggcgcuaugcaaa

SEQ ID NO: 1213065 - RNA, 19 nt, Homo sapiens
  misc_RNA (1)...(19): siRNA sense strand
gaaagaugaaggaaaagaa

SEQ ID NO: 1213066 - RNA, 19 nt, Homo sapiens
  misc_RNA (1)...(19): siRNA sense strand
gaaacaggcucagaauuug

SEQ ID NO: 1213067 - RNA, 19 nt, Homo sapiens
  misc_RNA (1)...(19): siRNA sense strand
gacaagggcucacggauga

SEQ ID NO: 1213068 - RNA, 19 nt, Homo sapiens
  misc_RNA (1)...(19): siRNA sense strand
gggaagaucuugggaauau

SEQ ID NO: 1213069 - RNA, 19 nt, Homo sapiens
  misc_RNA (1)...(19): siRNA sense strand
ggagagcccugcugagaga

SEQ ID NO: 1213070 - RNA, 19 nt, Homo sapiens
  misc_RNA (1)...(19): siRNA sense strand
ucaagaagguggagaaugu

SEQ ID NO: 1213071 - RNA, 19 nt, Homo sapiens
  misc_RNA (1)...(19): siRNA sense strand
gcgaaugucucucuaagga

SEQ ID NO: 1213072 - RNA, 19 nt, Homo sapiens
  misc_RNA (1)...(19): siRNA sense strand
ugaaacaggcucagaauuu

SEQ ID NO: 1213073 - RNA, 19 nt, Homo sapiens
  misc_RNA (1)...(19): siRNA sense strand
guuugaagcugccuuguuu

SEQ ID NO: 1213074 - RNA, 19 nt, Homo sapiens
  misc_RNA (1)...(19): siRNA sense strand
gggcagaggcagaggauua

SEQ ID NO: 1213075 - RNA, 19 nt, Homo sapiens
  misc_RNA (1)...(19): siRNA sense strand
ucaauauacugucaaguga

SEQ ID NO: 1213076 - RNA, 19 nt, Homo sapiens
  misc_RNA (1)...(19): siRNA sense strand
gacccuaccuuaucucaga

SEQ ID NO: 1213077 - RNA, 19 nt, Homo sapiens
  misc_RNA (1)...(19): siRNA sense strand
caagugauagcuauucuuu

SEQ ID NO: 1213078 - RNA, 19 nt, Homo sapiens
  misc_RNA (1)...(19): siRNA sense strand
ggcaaaggcugaccguaga

SEQ ID NO: 1213079 - RNA, 19 nt, Homo sapiens
  misc_RNA (1)...(19): siRNA sense strand
gauauaagaaggagggaaa

SEQ ID NO: 1213080 - RNA, 19 nt, Homo sapiens
  misc_RNA (1)...(19): siRNA sense strand
gugaaaggcuaccggcaaa

SEQ ID NO: 1213081 - RNA, 19 nt, Homo sapiens
  misc_RNA (1)...(19): siRNA sense strand
caaagaaauugcagaacca

SEQ ID NO: 1213082 - RNA, 19 nt, Homo sapiens
  misc_RNA (1)...(19): siRNA sense strand
gcaacaggaccauguguga

SEQ ID NO: 1213083 - RNA, 19 nt, Homo sapiens
  misc_RNA (1)...(19): siRNA sense strand
ggucagaggcauacaguga

SEQ ID NO: 1213084 - RNA, 19 nt, Homo sapiens
  misc_RNA (1)...(19): siRNA sense strand
gaaauugcagaaccagaaa

SEQ ID NO: 1213085 - RNA, 19 nt, Homo sapiens
  misc_RNA (1)...(19): siRNA sense strand
gcaaagugacagccucaaa

SEQ ID NO: 1213086 - RNA, 19 nt, Homo sapiens
  misc_RNA (1)...(19): siRNA sense strand
ugagaaagaugaaggaaaa

SEQ ID NO: 1213087 - RNA, 19 nt, Homo sapiens
  misc_RNA (1)...(19): siRNA sense strand
ugacucaucugacaccaau

SEQ ID NO: 1213088 - RNA, 19 nt, Homo sapiens
  misc_RNA (1)...(19): siRNA sense strand
gcggagauccuuugcagaa

SEQ ID NO: 1213089 - RNA, 19 nt, Homo sapiens
  misc_RNA (1)...(19): siRNA sense strand
gaaagucuggguuggcauu

SEQ ID NO: 1213090 - RNA, 19 nt, Homo sapiens
  misc_RNA (1)...(19): siRNA sense strand
gaagaucuugggaauaugu

SEQ ID NO: 1213091 - RNA, 19 nt, Homo sapiens
  misc_RNA (1)...(19): siRNA sense strand
gcaugaagccagcaggaaa

SEQ ID NO: 1213092 - RNA, 19 nt, Homo sapiens
  misc_RNA (1)...(19): siRNA sense strand
gaagcgaaugucucucuaa

SEQ ID NO: 1213093 - RNA, 19 nt, Homo sapiens
  misc_RNA (1)...(19): siRNA sense strand
uaagaaggagggaaagaaa

SEQ ID NO: 1213094 - RNA, 19 nt, Homo sapiens
  misc_RNA (1)...(19): siRNA sense strand
ccaccgaguuuaccaaagu

SEQ ID NO: 1213095 - RNA, 19 nt, Homo sapiens
  misc_RNA (1)...(19): siRNA sense strand
gcaagaaacagaggucaga

SEQ ID NO: 1213096 - RNA, 19 nt, Homo sapiens
  misc_RNA (1)...(19): siRNA sense strand
aaacauacucuuuggagaa

SEQ ID NO: 1213097 - RNA, 19 nt, Homo sapiens
  misc_RNA (1)...(19): siRNA sense strand
agugauagcuauucuuugu

SEQ ID NO: 1213098 - RNA, 19 nt, Homo sapiens
  misc_RNA (1)...(19): siRNA sense strand
aaacauaucacacguacau

SEQ ID NO: 1213099 - RNA, 19 nt, Homo sapiens
  misc_RNA (1)...(19): siRNA sense strand
gaacuuuggccuacguuuc

SEQ ID NO: 1213100 - RNA, 19 nt, Homo sapiens
  misc_RNA (1)...(19): siRNA sense strand
gggaauaugugggaaugug

SEQ ID NO: 1213101 - RNA, 19 nt, Homo sapiens
  misc_RNA (1)...(19): siRNA sense strand
gaaaaguaccccaaagaaa

SEQ ID NO: 1213102 - RNA, 19 nt, Homo sapiens
  misc_RNA (1)...(19): siRNA sense strand
acauaucacacguacauua

SEQ ID NO: 1213103 - RNA, 19 nt, Homo sapiens
  misc_RNA (1)...(19): siRNA sense strand
cauaucacacguacauuaa

SEQ ID NO: 1213104 - RNA, 19 nt, Homo sapiens
  misc_RNA (1)...(19): siRNA sense strand
gcacggccauccgguugaa

SEQ ID NO: 1213105 - RNA, 19 nt, Homo sapiens
  misc_RNA (1)...(19): siRNA sense strand
auuagaagauggagagauu

SEQ ID NO: 1213106 - RNA, 19 nt, Homo sapiens
  misc_RNA (1)...(19): siRNA sense strand
gaagauggagagauuugug

SEQ ID NO: 1213107 - RNA, 19 nt, Homo sapiens
  misc_RNA (1)...(19): siRNA sense strand
gacauuauccugccacauc

SEQ ID NO: 1213108 - RNA, 19 nt, Homo sapiens
  misc_RNA (1)...(19): siRNA sense strand
gggcaucauucacgccuau

SEQ ID NO: 1213109 - RNA, 19 nt, Homo sapiens
  misc_RNA (1)...(19): siRNA sense strand
caaagugacagccucaaau

SEQ ID NO: 1213110 - RNA, 19 nt, Homo sapiens
  misc_RNA (1)...(19): siRNA sense strand
gcaaaugccaccuugacau

SEQ ID NO: 1213111 - RNA, 19 nt, Homo sapiens
  misc_RNA (1)...(19): siRNA sense strand
gcgacccugugcaagguua

SEQ ID NO: 1213112 - RNA, 19 nt, Homo sapiens
  misc_RNA (1)...(19): siRNA sense strand
gaggagugcauuaagaaga

SEQ ID NO: 1213113 - RNA, 19 nt, Homo sapiens
  misc_RNA (1)...(19): siRNA sense strand
caaaugccaccuugacaug

SEQ ID NO: 1213114 - RNA, 19 nt, Homo sapiens
  misc_RNA (1)...(19): siRNA sense strand
gcccagaggagcaaaguga

SEQ ID NO: 1213115 - RNA, 19 nt, Homo sapiens
  misc_RNA (1)...(19): siRNA sense strand
cuuagagucuugugaugaa

SEQ ID NO: 1213116 - RNA, 19 nt, Homo sapiens
  misc_RNA (1)...(19): siRNA sense strand
cagcaggcauggaucuuuc

SEQ ID NO: 1213117 - RNA, 19 nt, Homo sapiens
  misc_RNA (1)...(19): siRNA sense strand
ggauaucaguguaugucau

SEQ ID NO: 1213118 - RNA, 19 nt, Homo sapiens
  misc_RNA (1)...(19): siRNA sense strand
ggcagucaauggaacuuug

SEQ ID NO: 1213119 - RNA, 19 nt, Homo sapiens
  misc_RNA (1)...(19): siRNA sense strand
cagaagacccagauacugu

SEQ ID NO: 1213120 - RNA, 19 nt, Homo sapiens
  misc_RNA (1)...(19): siRNA sense strand
ugauugccauguuuaaugu

SEQ ID NO: 1213121 - RNA, 19 nt, Homo sapiens
  misc_RNA (1)...(19): siRNA sense strand
caaaagauuucgaguccuu

SEQ ID NO: 1213122 - RNA, 19 nt, Homo sapiens
  misc_RNA (1)...(19): siRNA sense strand
caggaaaugagaaagauga

SEQ ID NO: 1213123 - RNA, 19 nt, Homo sapiens
  misc_RNA (1)...(19): siRNA sense strand
gaggauugcaguucaagga

SEQ ID NO: 1213124 - RNA, 19 nt, Homo sapiens
  misc_RNA (1)...(19): siRNA sense strand
ccaaagguaucagcacaca

SEQ ID NO: 1213125 - RNA, 19 nt, Homo sapiens
  misc_RNA (1)...(19): siRNA sense strand
uuacaucacccaaccagaa

SEQ ID NO: 1213126 - RNA, 19 nt, Homo sapiens
  misc_RNA (1)...(19): siRNA sense strand
caagcgaguucagacaaug

SEQ ID NO: 1213127 - RNA, 19 nt, Homo sapiens
  misc_RNA (1)...(19): siRNA sense strand
ggacugugcauagcccuuu

SEQ ID NO: 1213128 - RNA, 19 nt, Homo sapiens
  misc_RNA (1)...(19): siRNA sense strand
caccaaaggcuucgucuuc

SEQ ID NO: 1213129 - RNA, 19 nt, Homo sapiens
  misc_RNA (1)...(19): siRNA sense strand
guaccuccuuucucucuuc

SEQ ID NO: 1213130 - RNA, 19 nt, Homo sapiens
  misc_RNA (1)...(19): siRNA sense strand
ggaaagaaaauuacuggaa

SEQ ID NO: 1213131 - RNA, 19 nt, Homo sapiens
  misc_RNA (1)...(19): siRNA sense strand
gcgaggugcucaauauacu

SEQ ID NO: 1213132 - RNA, 19 nt, Homo sapiens
  misc_RNA (1)...(19): siRNA sense strand
uaccaacacuauccaagau

SEQ ID NO: 1213133 - RNA, 19 nt, Homo sapiens
  misc_RNA (1)...(19): siRNA sense strand
ccuuugggaugaagaggua

SEQ ID NO: 1213134 - RNA, 19 nt, Homo sapiens
  misc_RNA (1)...(19): siRNA sense strand
uaagcuuuguggugagaaa

SEQ ID NO: 1213135 - RNA, 19 nt, Homo sapiens
  misc_RNA (1)...(19): siRNA sense strand
ucagaggcauacagugaga

SEQ ID NO: 1213136 - RNA, 19 nt, Homo sapiens
  misc_RNA (1)...(19): siRNA sense strand
ggaaaaguaccccaaagaa

SEQ ID NO: 1213137 - RNA, 19 nt, Homo sapiens
  misc_RNA (1)...(19): siRNA sense strand
gaagccagcaggaaaagua

SEQ ID NO: 1213138 - RNA, 19 nt, Homo sapiens
  misc_RNA (1)...(19): siRNA sense strand
ccagauacugucuugcuuu

SEQ ID NO: 1213139 - RNA, 19 nt, Homo sapiens
  misc_RNA (1)...(19): siRNA sense strand
gauagcuauucuuuguuug

SEQ ID NO: 1213140 - RNA, 19 nt, Homo sapiens
  misc_RNA (1)...(19): siRNA sense strand
cugaacaccuuuacaaugc

SEQ ID NO: 1213141 - RNA, 19 nt, Homo sapiens
  misc_RNA (1)...(19): siRNA sense strand
gccaacauccugugcauca

SEQ ID NO: 1213142 - RNA, 19 nt, Homo sapiens
  misc_RNA (1)...(19): siRNA sense strand
gagagagggcgcuaugcaa

SEQ ID NO: 1213143 - RNA, 19 nt, Homo sapiens
  misc_RNA (1)...(19): siRNA sense strand
ggagagagggcgcuaugca

SEQ ID NO: 1213144 - RNA, 19 nt, Homo sapiens
  misc_RNA (1)...(19): siRNA sense strand
gaacccacaaggaguuaau

SEQ ID NO: 1213145 - RNA, 19 nt, Homo sapiens
  misc_RNA (1)...(19): siRNA sense strand
cagcuacaguucuuagagu

SEQ ID NO: 1213146 - RNA, 19 nt, Homo sapiens
  misc_RNA (1)...(19): siRNA sense strand
ggacaucguggccaacauc

SEQ ID NO: 1213147 - RNA, 19 nt, Homo sapiens
  misc_RNA (1)...(19): siRNA sense strand
ugaagcgaaugucucucua

SEQ ID NO: 1213148 - RNA, 19 nt, Homo sapiens
  misc_RNA (1)...(19): siRNA sense strand
agaaauugcagaaccagaa

SEQ ID NO: 1213149 - RNA, 19 nt, Homo sapiens
  misc_RNA (1)...(19): siRNA sense strand
uccaggagcucaagaaggu

SEQ ID NO: 1213150 - RNA, 19 nt, Homo sapiens
  misc_RNA (1)...(19): siRNA sense strand
gauggagagauuugugaaa

SEQ ID NO: 1213151 - RNA, 19 nt, Homo sapiens
  misc_RNA (1)...(19): siRNA sense strand
ggaagaucuugggaauaug

SEQ ID NO: 1213152 - RNA, 19 nt, Homo sapiens
  misc_RNA (1)...(19): siRNA sense strand
uuccgaaggucagcaauuu

SEQ ID NO: 1213153 - RNA, 19 nt, Homo sapiens
  misc_RNA (1)...(19): siRNA sense strand
gaggagagagggcgcuaug

SEQ ID NO: 1213154 - RNA, 19 nt, Homo sapiens
  misc_RNA (1)...(19): siRNA sense strand
gugauugccauguuuaaug

SEQ ID NO: 1213155 - RNA, 19 nt, Homo sapiens
  misc_RNA (1)...(19): siRNA sense strand
gacaaugaaugaguuucug

SEQ ID NO: 1213156 - RNA, 19 nt, Homo sapiens
  misc_RNA (1)...(19): siRNA sense strand
gcaaggguggguccugaga

SEQ ID NO: 1213157 - RNA, 19 nt, Homo sapiens
  misc_RNA (1)...(19): siRNA sense strand
aaaguaugaucaccaaagg

SEQ ID NO: 1213158 - RNA, 19 nt, Homo sapiens
  misc_RNA (1)...(19): siRNA sense strand
aacauacucuuuggagaaa

SEQ ID NO: 1213159 - RNA, 19 nt, Homo sapiens
  misc_RNA (1)...(19): siRNA sense strand
gacaagcgaguucagacaa

SEQ ID NO: 1213160 - RNA, 19 nt, Homo sapiens
  misc_RNA (1)...(19): siRNA sense strand
aguaugaucaccaaaggua

SEQ ID NO: 1213161 - RNA, 19 nt, Homo sapiens
  misc_RNA (1)...(19): siRNA sense strand
gagaaaacauacucuuugg

SEQ ID NO: 1213162 - RNA, 19 nt, Homo sapiens
  misc_RNA (1)...(19): siRNA sense strand
ccuugcagcucuccuagga

SEQ ID NO: 1213163 - RNA, 19 nt, Homo sapiens
  misc_RNA (1)...(19): siRNA sense strand
cauaagcuuuguggugaga

SEQ ID NO: 1213164 - RNA, 19 nt, Homo sapiens
  misc_RNA (1)...(19): siRNA sense strand
agagagggcgcuaugcaaa

SEQ ID NO: 1213165 - RNA, 19 nt, Homo sapiens
  misc_RNA (1)...(19): siRNA sense strand
gaaagaugaaggaaaagaa

SEQ ID NO: 1213166 - RNA, 19 nt, Homo sapiens
  misc_RNA (1)...(19): siRNA sense strand
gaaacaggcucagaauuug

SEQ ID NO: 1213167 - RNA, 19 nt, Homo sapiens
  misc_RNA (1)...(19): siRNA sense strand
gacaagggcucacggauga

SEQ ID NO: 1213168 - RNA, 19 nt, Homo sapiens
  misc_RNA (1)...(19): siRNA sense strand
gggaagaucuugggaauau

SEQ ID NO: 1213169 - RNA, 19 nt, Homo sapiens
  misc_RNA (1)...(19): siRNA sense strand
ggagagcccugcugagaga

SEQ ID NO: 1213170 - RNA, 19 nt, Homo sapiens
  misc_RNA (1)...(19): siRNA sense strand
ucaagaagguggagaaugu

SEQ ID NO: 1213171 - RNA, 19 nt, Homo sapiens
  misc_RNA (1)...(19): siRNA sense strand
gcgaaugucucucuaagga

SEQ ID NO: 1213172 - RNA, 19 nt, Homo sapiens
  misc_RNA (1)...(19): siRNA sense strand
ugaaacaggcucagaauuu

SEQ ID NO: 1213173 - RNA, 19 nt, Homo sapiens
  misc_RNA (1)...(19): siRNA sense strand
guuugaagcugccuuguuu

SEQ ID NO: 1213174 - RNA, 19 nt, Homo sapiens
  misc_RNA (1)...(19): siRNA sense strand
gggcagaggcagaggauua

SEQ ID NO: 1213175 - RNA, 19 nt, Homo sapiens
  misc_RNA (1)...(19): siRNA sense strand
ucaauauacugucaaguga

SEQ ID NO: 1213176 - RNA, 19 nt, Homo sapiens
  misc_RNA (1)...(19): siRNA sense strand
gacccuaccuuaucucaga

SEQ ID NO: 1213177 - RNA, 19 nt, Homo sapiens
  misc_RNA (1)...(19): siRNA sense strand
caagugauagcuauucuuu

SEQ ID NO: 1213178 - RNA, 19 nt, Homo sapiens
  misc_RNA (1)...(19): siRNA sense strand
ggcaaaggcugaccguaga

SEQ ID NO: 1213179 - RNA, 19 nt, Homo sapiens
  misc_RNA (1)...(19): siRNA sense strand
gauauaagaaggagggaaa

SEQ ID NO: 1213180 - RNA, 19 nt, Homo sapiens
  misc_RNA (1)...(19): siRNA sense strand
gugaaaggcuaccggcaaa

SEQ ID NO: 1213181 - RNA, 19 nt, Homo sapiens
  misc_RNA (1)...(19): siRNA sense strand
caaagaaauugcagaacca

SEQ ID NO: 1213182 - RNA, 19 nt, Homo sapiens
  misc_RNA (1)...(19): siRNA sense strand
gcaacaggaccauguguga

SEQ ID NO: 1213183 - RNA, 19 nt, Homo sapiens
  misc_RNA (1)...(19): siRNA sense strand
ggucagaggcauacaguga

SEQ ID NO: 1213184 - RNA, 19 nt, Homo sapiens
  misc_RNA (1)...(19): siRNA sense strand
gaaauugcagaaccagaaa

SEQ ID NO: 1213185 - RNA, 19 nt, Homo sapiens
  misc_RNA (1)...(19): siRNA sense strand
gcaaagugacagccucaaa

SEQ ID NO: 1213186 - RNA, 19 nt, Homo sapiens
  misc_RNA (1)...(19): siRNA sense strand
ugagaaagaugaaggaaaa

SEQ ID NO: 1213187 - RNA, 19 nt, Homo sapiens
  misc_RNA (1)...(19): siRNA sense strand
ugacucaucugacaccaau

SEQ ID NO: 1213188 - RNA, 19 nt, Homo sapiens
  misc_RNA (1)...(19): siRNA sense strand
gcggagauccuuugcagaa

SEQ ID NO: 1213189 - RNA, 19 nt, Homo sapiens
  misc_RNA (1)...(19): siRNA sense strand
gaaagucuggguuggcauu

SEQ ID NO: 1213190 - RNA, 19 nt, Homo sapiens
  misc_RNA (1)...(19): siRNA sense strand
gaagaucuugggaauaugu

SEQ ID NO: 1213191 - RNA, 19 nt, Homo sapiens
  misc_RNA (1)...(19): siRNA sense strand
gcaugaagccagcaggaaa

SEQ ID NO: 1213192 - RNA, 19 nt, Homo sapiens
  misc_RNA (1)...(19): siRNA sense strand
gaagcgaaugucucucuaa

SEQ ID NO: 1213193 - RNA, 19 nt, Homo sapiens
  misc_RNA (1)...(19): siRNA sense strand
uaagaaggagggaaagaaa

SEQ ID NO: 1213194 - RNA, 19 nt, Homo sapiens
  misc_RNA (1)...(19): siRNA sense strand
ccaccgaguuuaccaaagu

SEQ ID NO: 1213195 - RNA, 19 nt, Homo sapiens
  misc_RNA (1)...(19): siRNA sense strand
gcaagaaacagaggucaga

SEQ ID NO: 1213196 - RNA, 19 nt, Homo sapiens
  misc_RNA (1)...(19): siRNA sense strand
aaacauacucuuuggagaa

SEQ ID NO: 1213197 - RNA, 19 nt, Homo sapiens
  misc_RNA (1)...(19): siRNA sense strand
agugauagcuauucuuugu

SEQ ID NO: 1213198 - RNA, 19 nt, Homo sapiens
  misc_RNA (1)...(19): siRNA sense strand
aaacauaucacacguacau

SEQ ID NO: 1213199 - RNA, 19 nt, Homo sapiens
  misc_RNA (1)...(19): siRNA sense strand
gaacuuuggccuacguuuc

SEQ ID NO: 1213200 - RNA, 19 nt, Homo sapiens
  misc_RNA (1)...(19): siRNA sense strand
gggaauaugugggaaugug

SEQ ID NO: 1213201 - RNA, 19 nt, Homo sapiens
  misc_RNA (1)...(19): siRNA sense strand
gaaaaguaccccaaagaaa

SEQ ID NO: 1213202 - RNA, 19 nt, Homo sapiens
  misc_RNA (1)...(19): siRNA sense strand
acauaucacacguacauua

SEQ ID NO: 1213203 - RNA, 19 nt, Homo sapiens
  misc_RNA (1)...(19): siRNA sense strand
cauaucacacguacauuaa

SEQ ID NO: 1213204 - RNA, 19 nt, Homo sapiens
  misc_RNA (1)...(19): siRNA sense strand
gcacggccauccgguugaa

SEQ ID NO: 1213205 - RNA, 19 nt, Homo sapiens
  misc_RNA (1)...(19): siRNA sense strand
auuagaagauggagagauu

SEQ ID NO: 1213206 - RNA, 19 nt, Homo sapiens
  misc_RNA (1)...(19): siRNA sense strand
gaagauggagagauuugug

SEQ ID NO: 1213207 - RNA, 19 nt, Homo sapiens
  misc_RNA (1)...(19): siRNA sense strand
gacauuauccugccacauc

SEQ ID NO: 1213208 - RNA, 19 nt, Homo sapiens
  misc_RNA (1)...(19): siRNA sense strand
gggcaucauucacgccuau

SEQ ID NO: 1213209 - RNA, 19 nt, Homo sapiens
  misc_RNA (1)...(19): siRNA sense strand
caaagugacagccucaaau

SEQ ID NO: 1213210 - RNA, 19 nt, Homo sapiens
  misc_RNA (1)...(19): siRNA sense strand
gcaaaugccaccuugacau

SEQ ID NO: 1213211 - RNA, 19 nt, Homo sapiens
  misc_RNA (1)...(19): siRNA sense strand
gcgacccugugcaagguua

SEQ ID NO: 1213212 - RNA, 19 nt, Homo sapiens
  misc_RNA (1)...(19): siRNA sense strand
gaggagugcauuaagaaga

SEQ ID NO: 1213213 - RNA, 19 nt, Homo sapiens
  misc_RNA (1)...(19): siRNA sense strand
caaaugccaccuugacaug

SEQ ID NO: 1213214 - RNA, 19 nt, Homo sapiens
  misc_RNA (1)...(19): siRNA sense strand
gcccagaggagcaaaguga

SEQ ID NO: 1213215 - RNA, 19 nt, Homo sapiens
  misc_RNA (1)...(19): siRNA sense strand
cuuagagucuugugaugaa

SEQ ID NO: 1213216 - RNA, 19 nt, Homo sapiens
  misc_RNA (1)...(19): siRNA sense strand
cagcaggcauggaucuuuc

SEQ ID NO: 1213217 - RNA, 19 nt, Homo sapiens
  misc_RNA (1)...(19): siRNA sense strand
ggauaucaguguaugucau

SEQ ID NO: 1213218 - RNA, 19 nt, Homo sapiens
  misc_RNA (1)...(19): siRNA sense strand
ggcagucaauggaacuuug

SEQ ID NO: 1213219 - RNA, 19 nt, Homo sapiens
  misc_RNA (1)...(19): siRNA sense strand
cagaagacccagauacugu

SEQ ID NO: 1213220 - RNA, 19 nt, Homo sapiens
  misc_RNA (1)...(19): siRNA sense strand
ugauugccauguuuaaugu

SEQ ID NO: 1213221 - RNA, 19 nt, Homo sapiens
  misc_RNA (1)...(19): siRNA sense strand
caaaagauuucgaguccuu

SEQ ID NO: 1213222 - RNA, 19 nt, Homo sapiens
  misc_RNA (1)...(19): siRNA sense strand
caggaaaugagaaagauga

SEQ ID NO: 1213223 - RNA, 19 nt, Homo sapiens
  misc_RNA (1)...(19): siRNA sense strand
gaggauugcaguucaagga

SEQ ID NO: 1213224 - RNA, 19 nt, Homo sapiens
  misc_RNA (1)...(19): siRNA sense strand
ccaaagguaucagcacaca

SEQ ID NO: 1213225 - RNA, 19 nt, Homo sapiens
  misc_RNA (1)...(19): siRNA sense strand
uuacaucacccaaccagaa

SEQ ID NO: 1213226 - RNA, 19 nt, Homo sapiens
  misc_RNA (1)...(19): siRNA sense strand
caagcgaguucagacaaug

SEQ ID NO: 1213227 - RNA, 19 nt, Homo sapiens
  misc_RNA (1)...(19): siRNA sense strand
ggacugugcauagcccuuu

SEQ ID NO: 1213228 - RNA, 19 nt, Homo sapiens
  misc_RNA (1)...(19): siRNA sense strand
caccaaaggcuucgucuuc

SEQ ID NO: 1213229 - RNA, 19 nt, Homo sapiens
  misc_RNA (1)...(19): siRNA sense strand
guaccuccuuucucucuuc

SEQ ID NO: 1213230 - RNA, 19 nt, Homo sapiens
  misc_RNA (1)...(19): siRNA sense strand
ggaaagaaaauuacuggaa

SEQ ID NO: 1213231 - RNA, 19 nt, Homo sapiens
  misc_RNA (1)...(19): siRNA sense strand
gcgaggugcucaauauacu

SEQ ID NO: 1213232 - RNA, 19 nt, Homo sapiens
  misc_RNA (1)...(19): siRNA sense strand
uaccaacacuauccaagau

SEQ ID NO: 1213233 - RNA, 19 nt, Homo sapiens
  misc_RNA (1)...(19): siRNA sense strand
ccuuugggaugaagaggua

SEQ ID NO: 1213234 - RNA, 19 nt, Homo sapiens
  misc_RNA (1)...(19): siRNA sense strand
uaagcuuuguggugagaaa

SEQ ID NO: 1213235 - RNA, 19 nt, Homo sapiens
  misc_RNA (1)...(19): siRNA sense strand
ucagaggcauacagugaga

SEQ ID NO: 1213236 - RNA, 19 nt, Homo sapiens
  misc_RNA (1)...(19): siRNA sense strand
ggaaaaguaccccaaagaa

SEQ ID NO: 1213237 - RNA, 19 nt, Homo sapiens
  misc_RNA (1)...(19): siRNA sense strand
gaagccagcaggaaaagua

SEQ ID NO: 1213238 - RNA, 19 nt, Homo sapiens
  misc_RNA (1)...(19): siRNA sense strand
ccagauacugucuugcuuu

SEQ ID NO: 1213239 - RNA, 19 nt, Homo sapiens
  misc_RNA (1)...(19): siRNA sense strand
gauagcuauucuuuguuug

SEQ ID NO: 1213240 - RNA, 19 nt, Homo sapiens
  misc_RNA (1)...(19): siRNA sense strand
cugaacaccuuuacaaugc

SEQ ID NO: 1213241 - RNA, 19 nt, Homo sapiens
  misc_RNA (1)...(19): siRNA sense strand
gccaacauccugugcauca

SEQ ID NO: 1213242 - RNA, 19 nt, Homo sapiens
  misc_RNA (1)...(19): siRNA sense strand
gagagagggcgcuaugcaa

SEQ ID NO: 1213243 - RNA, 19 nt, Homo sapiens
  misc_RNA (1)...(19): siRNA sense strand
ggagagagggcgcuaugca

SEQ ID NO: 1213244 - RNA, 19 nt, Homo sapiens
  misc_RNA (1)...(19): siRNA sense strand
gaacccacaaggaguuaau

SEQ ID NO: 1213245 - RNA, 19 nt, Homo sapiens
  misc_RNA (1)...(19): siRNA sense strand
cagcuacaguucuuagagu

SEQ ID NO: 1213246 - RNA, 19 nt, Homo sapiens
  misc_RNA (1)...(19): siRNA sense strand
ggacaucguggccaacauc

SEQ ID NO: 1213247 - RNA, 19 nt, Homo sapiens
  misc_RNA (1)...(19): siRNA sense strand
ugaagcgaaugucucucua

SEQ ID NO: 1213248 - RNA, 19 nt, Homo sapiens
  misc_RNA (1)...(19): siRNA sense strand
agaaauugcagaaccagaa

SEQ ID NO: 1213249 - RNA, 19 nt, Homo sapiens
  misc_RNA (1)...(19): siRNA sense strand
uccaggagcucaagaaggu

SEQ ID NO: 1213250 - RNA, 19 nt, Homo sapiens
  misc_RNA (1)...(19): siRNA sense strand
gauggagagauuugugaaa

SEQ ID NO: 1213251 - RNA, 19 nt, Homo sapiens
  misc_RNA (1)...(19): siRNA sense strand
ggaagaucuugggaauaug

SEQ ID NO: 1213252 - RNA, 19 nt, Homo sapiens
  misc_RNA (1)...(19): siRNA sense strand
uuccgaaggucagcaauuu

SEQ ID NO: 1213253 - RNA, 19 nt, Homo sapiens
  misc_RNA (1)...(19): siRNA sense strand
gaggagagagggcgcuaug

SEQ ID NO: 1213254 - RNA, 19 nt, Homo sapiens
  misc_RNA (1)...(19): siRNA sense strand
gugauugccauguuuaaug

SEQ ID NO: 1213255 - RNA, 19 nt, Homo sapiens
  misc_RNA (1)...(19): siRNA sense strand
gacaaugaaugaguuucug

SEQ ID NO: 1213256 - RNA, 19 nt, Homo sapiens
  misc_RNA (1)...(19): siRNA sense strand
gcaaggguggguccugaga

SEQ ID NO: 1213257 - RNA, 19 nt, Homo sapiens
  misc_RNA (1)...(19): siRNA sense strand
aaaguaugaucaccaaagg

SEQ ID NO: 1213258 - RNA, 19 nt, Homo sapiens
  misc_RNA (1)...(19): siRNA sense strand
aacauacucuuuggagaaa

SEQ ID NO: 1213259 - RNA, 19 nt, Homo sapiens
  misc_RNA (1)...(19): siRNA sense strand
gacaagcgaguucagacaa

SEQ ID NO: 1213260 - RNA, 19 nt, Homo sapiens
  misc_RNA (1)...(19): siRNA sense strand
aguaugaucaccaaaggua

SEQ ID NO: 1213261 - RNA, 19 nt, Homo sapiens
  misc_RNA (1)...(19): siRNA sense strand
gagaaaacauacucuuugg

SEQ ID NO: 1213262 - RNA, 19 nt, Homo sapiens
  misc_RNA (1)...(19): siRNA sense strand
ccuugcagcucuccuagga

SEQ ID NO: 1213263 - RNA, 19 nt, Homo sapiens
  misc_RNA (1)...(19): siRNA sense strand
cauaagcuuuguggugaga

SEQ ID NO: 1213264 - RNA, 19 nt, Homo sapiens
  misc_RNA (1)...(19): siRNA sense strand
agagagggcgcuaugcaaa

SEQ ID NO: 1213265 - RNA, 19 nt, Homo sapiens
  misc_RNA (1)...(19): siRNA sense strand
gaaagaugaaggaaaagaa

SEQ ID NO: 1213266 - RNA, 19 nt, Homo sapiens
  misc_RNA (1)...(19): siRNA sense strand
gaaacaggcucagaauuug

SEQ ID NO: 1213267 - RNA, 19 nt, Homo sapiens
  misc_RNA (1)...(19): siRNA sense strand
gaaccaagcugacugugau

SEQ ID NO: 1213268 - RNA, 19 nt, Homo sapiens
  misc_RNA (1)...(19): siRNA sense strand
gacaagggcucacggauga

SEQ ID NO: 1213269 - RNA, 19 nt, Homo sapiens
  misc_RNA (1)...(19): siRNA sense strand
gggaagaucuugggaauau

SEQ ID NO: 1213270 - RNA, 19 nt, Homo sapiens
  misc_RNA (1)...(19): siRNA sense strand
gagaauggauguccucaug

SEQ ID NO: 1213271 - RNA, 19 nt, Homo sapiens
  misc_RNA (1)...(19): siRNA sense strand
ggaaggugauugaguuuga

SEQ ID NO: 1213272 - RNA, 19 nt, Homo sapiens
  misc_RNA (1)...(19): siRNA sense strand
ggagagcccugcugagaga

SEQ ID NO: 1213273 - RNA, 19 nt, Homo sapiens
  misc_RNA (1)...(19): siRNA sense strand
gaauggauguccucaugaa

SEQ ID NO: 1213274 - RNA, 19 nt, Homo sapiens
  misc_RNA (1)...(19): siRNA sense strand
ucaagaagguggagaaugu

SEQ ID NO: 1213275 - RNA, 19 nt, Homo sapiens
  misc_RNA (1)...(19): siRNA sense strand
gcgaaugucucucuaagga

SEQ ID NO: 1213276 - RNA, 19 nt, Homo sapiens
  misc_RNA (1)...(19): siRNA sense strand
ugaaacaggcucagaauuu

SEQ ID NO: 1213277 - RNA, 19 nt, Homo sapiens
  misc_RNA (1)...(19): siRNA sense strand
ggaaagucaucguuaggaa

SEQ ID NO: 1213278 - RNA, 19 nt, Homo sapiens
  misc_RNA (1)...(19): siRNA sense strand
guuugaagcugccuuguuu

SEQ ID NO: 1213279 - RNA, 19 nt, Homo sapiens
  misc_RNA (1)...(19): siRNA sense strand
gggcagaggcagaggauua

SEQ ID NO: 1213280 - RNA, 19 nt, Homo sapiens
  misc_RNA (1)...(19): siRNA sense strand
ucaauauacugucaaguga

SEQ ID NO: 1213281 - RNA, 19 nt, Homo sapiens
  misc_RNA (1)...(19): siRNA sense strand
guggauaucugcauucuca

SEQ ID NO: 1213282 - RNA, 19 nt, Homo sapiens
  misc_RNA (1)...(19): siRNA sense strand
gacccuaccuuaucucaga

SEQ ID NO: 1213283 - RNA, 19 nt, Homo sapiens
  misc_RNA (1)...(19): siRNA sense strand
cagcagaagucagauugua

SEQ ID NO: 1213284 - RNA, 19 nt, Homo sapiens
  misc_RNA (1)...(19): siRNA sense strand
caagugauagcuauucuuu

SEQ ID NO: 1213285 - RNA, 19 nt, Homo sapiens
  misc_RNA (1)...(19): siRNA sense strand
ugacaagccugaaguccuu

SEQ ID NO: 1213286 - RNA, 19 nt, Homo sapiens
  misc_RNA (1)...(19): siRNA sense strand
caucaguacuucauccaaa

SEQ ID NO: 1213287 - RNA, 19 nt, Homo sapiens
  misc_RNA (1)...(19): siRNA sense strand
ggcaaaggcugaccguaga

SEQ ID NO: 1213288 - RNA, 19 nt, Homo sapiens
  misc_RNA (1)...(19): siRNA sense strand
caaagaucauucuccuuga

SEQ ID NO: 1213289 - RNA, 19 nt, Homo sapiens
  misc_RNA (1)...(19): siRNA sense strand
gauauaagaaggagggaaa

SEQ ID NO: 1213290 - RNA, 19 nt, Homo sapiens
  misc_RNA (1)...(19): siRNA sense strand
gugaaaggcuaccggcaaa

SEQ ID NO: 1213291 - RNA, 19 nt, Homo sapiens
  misc_RNA (1)...(19): siRNA sense strand
ccaaaggccugucauuguc

SEQ ID NO: 1213292 - RNA, 19 nt, Homo sapiens
  misc_RNA (1)...(19): siRNA sense strand
caaagaaauugcagaacca

SEQ ID NO: 1213293 - RNA, 19 nt, Homo sapiens
  misc_RNA (1)...(19): siRNA sense strand
gcaacaggaccauguguga

SEQ ID NO: 1213294 - RNA, 19 nt, Homo sapiens
  misc_RNA (1)...(19): siRNA sense strand
ggucagaggcauacaguga

SEQ ID NO: 1213295 - RNA, 19 nt, Homo sapiens
  misc_RNA (1)...(19): siRNA sense strand
gaaauugcagaaccagaaa

SEQ ID NO: 1213296 - RNA, 19 nt, Homo sapiens
  misc_RNA (1)...(19): siRNA sense strand
gcaaagugacagccucaaa

SEQ ID NO: 1213297 - RNA, 19 nt, Homo sapiens
  misc_RNA (1)...(19): siRNA sense strand
ugagaaagaugaaggaaaa

SEQ ID NO: 1213298 - RNA, 19 nt, Homo sapiens
  misc_RNA (1)...(19): siRNA sense strand
ugacucaucugacaccaau

SEQ ID NO: 1213299 - RNA, 19 nt, Homo sapiens
  misc_RNA (1)...(19): siRNA sense strand
gagaucaccuucagagacu

SEQ ID NO: 1213300 - RNA, 19 nt, Homo sapiens
  misc_RNA (1)...(19): siRNA sense strand
gcggagauccuuugcagaa

SEQ ID NO: 1213301 - RNA, 19 nt, Homo sapiens
  misc_RNA (1)...(19): siRNA sense strand
gaaagucuggguuggcauu

SEQ ID NO: 1213302 - RNA, 19 nt, Homo sapiens
  misc_RNA (1)...(19): siRNA sense strand
gaacauccuuaccuucacu

SEQ ID NO: 1213303 - RNA, 19 nt, Homo sapiens
  misc_RNA (1)...(19): siRNA sense strand
gaagaucuugggaauaugu

SEQ ID NO: 1213304 - RNA, 19 nt, Homo sapiens
  misc_RNA (1)...(19): siRNA sense strand
gcaugaagccagcaggaaa

SEQ ID NO: 1213305 - RNA, 19 nt, Homo sapiens
  misc_RNA (1)...(19): siRNA sense strand
gaagcgaaugucucucuaa

SEQ ID NO: 1213306 - RNA, 19 nt, Homo sapiens
  misc_RNA (1)...(19): siRNA sense strand
uaagaaggagggaaagaaa

SEQ ID NO: 1213307 - RNA, 19 nt, Homo sapiens
  misc_RNA (1)...(19): siRNA sense strand
ccaccgaguuuaccaaagu

SEQ ID NO: 1213308 - RNA, 19 nt, Homo sapiens
  misc_RNA (1)...(19): siRNA sense strand
gcaagaaacagaggucaga

SEQ ID NO: 1213309 - RNA, 19 nt, Homo sapiens
  misc_RNA (1)...(19): siRNA sense strand
aaacauacucuuuggagaa

SEQ ID NO: 1213310 - RNA, 19 nt, Homo sapiens
  misc_RNA (1)...(19): siRNA sense strand
agugauagcuauucuuugu

SEQ ID NO: 1213311 - RNA, 19 nt, Homo sapiens
  misc_RNA (1)...(19): siRNA sense strand
gaacgucagcugcuuugug

SEQ ID NO: 1213312 - RNA, 19 nt, Homo sapiens
  misc_RNA (1)...(19): siRNA sense strand
cagaugagauacagagaca

SEQ ID NO: 1213313 - RNA, 19 nt, Homo sapiens
  misc_RNA (1)...(19): siRNA sense strand
aaacauaucacacguacau

SEQ ID NO: 1213314 - RNA, 19 nt, Homo sapiens
  misc_RNA (1)...(19): siRNA sense strand
gaacuuuggccuacguuuc

SEQ ID NO: 1213315 - RNA, 19 nt, Homo sapiens
  misc_RNA (1)...(19): siRNA sense strand
gggaauaugugggaaugug

SEQ ID NO: 1213316 - RNA, 19 nt, Homo sapiens
  misc_RNA (1)...(19): siRNA sense strand
gaaaaguaccccaaagaaa

SEQ ID NO: 1213317 - RNA, 19 nt, Homo sapiens
  misc_RNA (1)...(19): siRNA sense strand
acauaucacacguacauua

SEQ ID NO: 1213318 - RNA, 19 nt, Homo sapiens
  misc_RNA (1)...(19): siRNA sense strand
cauaucacacguacauuaa

SEQ ID NO: 1213319 - RNA, 19 nt, Homo sapiens
  misc_RNA (1)...(19): siRNA sense strand
gcacggccauccgguugaa

SEQ ID NO: 1213320 - RNA, 19 nt, Homo sapiens
  misc_RNA (1)...(19): siRNA sense strand
auuagaagauggagagauu

SEQ ID NO: 1213321 - RNA, 19 nt, Homo sapiens
  misc_RNA (1)...(19): siRNA sense strand
gaagauggagagauuugug

SEQ ID NO: 1213322 - RNA, 19 nt, Homo sapiens
  misc_RNA (1)...(19): siRNA sense strand
gaaagucaucguuaggaau

SEQ ID NO: 1213323 - RNA, 19 nt, Homo sapiens
  misc_RNA (1)...(19): siRNA sense strand
gacauuauccugccacauc

SEQ ID NO: 1213324 - RNA, 19 nt, Homo sapiens
  misc_RNA (1)...(19): siRNA sense strand
gcgaucacguccugguuau

SEQ ID NO: 1213325 - RNA, 19 nt, Homo sapiens
  misc_RNA (1)...(19): siRNA sense strand
uaaugaaacucccagaaaa

SEQ ID NO: 1213326 - RNA, 19 nt, Homo sapiens
  misc_RNA (1)...(19): siRNA sense strand
gggcaucauucacgccuau

SEQ ID NO: 1213327 - RNA, 19 nt, Homo sapiens
  misc_RNA (1)...(19): siRNA sense strand
caaagugacagccucaaau

SEQ ID NO: 1213328 - RNA, 19 nt, Homo sapiens
  misc_RNA (1)...(19): siRNA sense strand
gcgacccugugcaagguua

SEQ ID NO: 1213329 - RNA, 19 nt, Homo sapiens
  misc_RNA (1)...(19): siRNA sense strand
gaggagugcauuaagaaga

SEQ ID NO: 1213330 - RNA, 19 nt, Homo sapiens
  misc_RNA (1)...(19): siRNA sense strand
caaaugccaccuugacaug

SEQ ID NO: 1213331 - RNA, 19 nt, Homo sapiens
  misc_RNA (1)...(19): siRNA sense strand
gcaaaugccaccuugacau

SEQ ID NO: 1213332 - RNA, 19 nt, Homo sapiens
  misc_RNA (1)...(19): siRNA sense strand
gcccagaggagcaaaguga

SEQ ID NO: 1213333 - RNA, 19 nt, Homo sapiens
  misc_RNA (1)...(19): siRNA sense strand
cuuagagucuugugaugaa

SEQ ID NO: 1213334 - RNA, 19 nt, Homo sapiens
  misc_RNA (1)...(19): siRNA sense strand
cagcaggcauggaucuuuc

SEQ ID NO: 1213335 - RNA, 19 nt, Homo sapiens
  misc_RNA (1)...(19): siRNA sense strand
ggauaucaguguaugucau

SEQ ID NO: 1213336 - RNA, 19 nt, Homo sapiens
  misc_RNA (1)...(19): siRNA sense strand
ugagguggauaucugcauu

SEQ ID NO: 1213337 - RNA, 19 nt, Homo sapiens
  misc_RNA (1)...(19): siRNA sense strand
cgaccuguguuccugaaug

SEQ ID NO: 1213338 - RNA, 19 nt, Homo sapiens
  misc_RNA (1)...(19): siRNA sense strand
ggcagucaauggaacuuug

SEQ ID NO: 1213339 - RNA, 19 nt, Homo sapiens
  misc_RNA (1)...(19): siRNA sense strand
cagaagacccagauacugu

SEQ ID NO: 1213340 - RNA, 19 nt, Homo sapiens
  misc_RNA (1)...(19): siRNA sense strand
ugauugccauguuuaaugu

SEQ ID NO: 1213341 - RNA, 19 nt, Homo sapiens
  misc_RNA (1)...(19): siRNA sense strand
caaaagauuucgaguccuu

SEQ ID NO: 1213342 - RNA, 19 nt, Homo sapiens
  misc_RNA (1)...(19): siRNA sense strand
gagcucuucuccguaauuc

SEQ ID NO: 1213343 - RNA, 19 nt, Homo sapiens
  misc_RNA (1)...(19): siRNA sense strand
caggaaaugagaaagauga

SEQ ID NO: 1213344 - RNA, 19 nt, Homo sapiens
  misc_RNA (1)...(19): siRNA sense strand
gaggauugcaguucaagga

SEQ ID NO: 1213345 - RNA, 19 nt, Homo sapiens
  misc_RNA (1)...(19): siRNA sense strand
ccaaagguaucagcacaca

SEQ ID NO: 1213346 - RNA, 19 nt, Homo sapiens
  misc_RNA (1)...(19): siRNA sense strand
uuacaucacccaaccagaa

SEQ ID NO: 1213347 - RNA, 19 nt, Homo sapiens
  misc_RNA (1)...(19): siRNA sense strand
caagcgaguucagacaaug

SEQ ID NO: 1213348 - RNA, 19 nt, Homo sapiens
  misc_RNA (1)...(19): siRNA sense strand
ggacugugcauagcccuuu

SEQ ID NO: 1213349 - RNA, 19 nt, Homo sapiens
  misc_RNA (1)...(19): siRNA sense strand
gcucuucuccguaauucaa

SEQ ID NO: 1213350 - RNA, 19 nt, Homo sapiens
  misc_RNA (1)...(19): siRNA sense strand
cccgagcucuucuccguaa

SEQ ID NO: 1213351 - RNA, 19 nt, Homo sapiens
  misc_RNA (1)...(19): siRNA sense strand
caccaaaggcuucgucuuc

SEQ ID NO: 1213352 - RNA, 19 nt, Homo sapiens
  misc_RNA (1)...(19): siRNA sense strand
guaccuccuuucucucuuc

SEQ ID NO: 1213353 - RNA, 19 nt, Homo sapiens
  misc_RNA (1)...(19): siRNA sense strand
ggaaagaaaauuacuggaa

SEQ ID NO: 1213354 - RNA, 19 nt, Homo sapiens
  misc_RNA (1)...(19): siRNA sense strand
gcgaggugcucaauauacu

SEQ ID NO: 1213355 - RNA, 19 nt, Homo sapiens
  misc_RNA (1)...(19): siRNA sense strand
uaccaacacuauccaagau

SEQ ID NO: 1213356 - RNA, 19 nt, Homo sapiens
  misc_RNA (1)...(19): siRNA sense strand
uggaagaccucagaaccaa

SEQ ID NO: 1213357 - RNA, 19 nt, Homo sapiens
  misc_RNA (1)...(19): siRNA sense strand
cagagacgcaagccaaauu

SEQ ID NO: 1213358 - RNA, 19 nt, Homo sapiens
  misc_RNA (1)...(19): siRNA sense strand
ucaugaacauccuuaccuu

SEQ ID NO: 1213359 - RNA, 19 nt, Homo sapiens
  misc_RNA (1)...(19): siRNA sense strand
uaagcuuuguggugagaaa

SEQ ID NO: 1213360 - RNA, 19 nt, Homo sapiens
  misc_RNA (1)...(19): siRNA sense strand
ucagaggcauacagugaga

SEQ ID NO: 1213361 - RNA, 19 nt, Homo sapiens
  misc_RNA (1)...(19): siRNA sense strand
ggaaaaguaccccaaagaa

SEQ ID NO: 1213362 - RNA, 19 nt, Homo sapiens
  misc_RNA (1)...(19): siRNA sense strand
gaagccagcaggaaaagua

SEQ ID NO: 1213363 - RNA, 19 nt, Homo sapiens
  misc_RNA (1)...(19): siRNA sense strand
ccagauacugucuugcuuu

SEQ ID NO: 1213364 - RNA, 19 nt, Homo sapiens
  misc_RNA (1)...(19): siRNA sense strand
ccuuugggaugaagaggua

SEQ ID NO: 1213365 - RNA, 19 nt, Homo sapiens
  misc_RNA (1)...(19): siRNA sense strand
auaaugaaacucccagaaa

SEQ ID NO: 1213366 - RNA, 19 nt, Homo sapiens
  misc_RNA (1)...(19): siRNA sense strand
gaaacaggcucagaauuug

SEQ ID NO: 1213367 - RNA, 19 nt, Homo sapiens
  misc_RNA (1)...(19): siRNA sense strand
gacaagggcucacggauga

SEQ ID NO: 1213368 - RNA, 19 nt, Homo sapiens
  misc_RNA (1)...(19): siRNA sense strand
gggaagaucuugggaauau

SEQ ID NO: 1213369 - RNA, 19 nt, Homo sapiens
  misc_RNA (1)...(19): siRNA sense strand
ggagagcccugcugagaga

SEQ ID NO: 1213370 - RNA, 19 nt, Homo sapiens
  misc_RNA (1)...(19): siRNA sense strand
ucaagaagguggagaaugu

SEQ ID NO: 1213371 - RNA, 19 nt, Homo sapiens
  misc_RNA (1)...(19): siRNA sense strand
gcgaaugucucucuaagga

SEQ ID NO: 1213372 - RNA, 19 nt, Homo sapiens
  misc_RNA (1)...(19): siRNA sense strand
ugaaacaggcucagaauuu

SEQ ID NO: 1213373 - RNA, 19 nt, Homo sapiens
  misc_RNA (1)...(19): siRNA sense strand
guuugaagcugccuuguuu

SEQ ID NO: 1213374 - RNA, 19 nt, Homo sapiens
  misc_RNA (1)...(19): siRNA sense strand
gggcagaggcagaggauua

SEQ ID NO: 1213375 - RNA, 19 nt, Homo sapiens
  misc_RNA (1)...(19): siRNA sense strand
ucaauauacugucaaguga

SEQ ID NO: 1213376 - RNA, 19 nt, Homo sapiens
  misc_RNA (1)...(19): siRNA sense strand
gacccuaccuuaucucaga

SEQ ID NO: 1213377 - RNA, 19 nt, Homo sapiens
  misc_RNA (1)...(19): siRNA sense strand
caagugauagcuauucuuu

SEQ ID NO: 1213378 - RNA, 19 nt, Homo sapiens
  misc_RNA (1)...(19): siRNA sense strand
ggcaaaggcugaccguaga

SEQ ID NO: 1213379 - RNA, 19 nt, Homo sapiens
  misc_RNA (1)...(19): siRNA sense strand
gauauaagaaggagggaaa

SEQ ID NO: 1213380 - RNA, 19 nt, Homo sapiens
  misc_RNA (1)...(19): siRNA sense strand
gugaaaggcuaccggcaaa

SEQ ID NO: 1213381 - RNA, 19 nt, Homo sapiens
  misc_RNA (1)...(19): siRNA sense strand
caaagaaauugcagaacca

SEQ ID NO: 1213382 - RNA, 19 nt, Homo sapiens
  misc_RNA (1)...(19): siRNA sense strand
gcaacaggaccauguguga

SEQ ID NO: 1213383 - RNA, 19 nt, Homo sapiens
  misc_RNA (1)...(19): siRNA sense strand
ggucagaggcauacaguga

SEQ ID NO: 1213384 - RNA, 19 nt, Homo sapiens
  misc_RNA (1)...(19): siRNA sense strand
gaaauugcagaaccagaaa

SEQ ID NO: 1213385 - RNA, 19 nt, Homo sapiens
  misc_RNA (1)...(19): siRNA sense strand
gcaaagugacagccucaaa

SEQ ID NO: 1213386 - RNA, 19 nt, Homo sapiens
  misc_RNA (1)...(19): siRNA sense strand
ugagaaagaugaaggaaaa

SEQ ID NO: 1213387 - RNA, 19 nt, Homo sapiens
  misc_RNA (1)...(19): siRNA sense strand
ugacucaucugacaccaau

SEQ ID NO: 1213388 - RNA, 19 nt, Homo sapiens
  misc_RNA (1)...(19): siRNA sense strand
gcggagauccuuugcagaa

SEQ ID NO: 1213389 - RNA, 19 nt, Homo sapiens
  misc_RNA (1)...(19): siRNA sense strand
gaaagucuggguuggcauu

SEQ ID NO: 1213390 - RNA, 19 nt, Homo sapiens
  misc_RNA (1)...(19): siRNA sense strand
gaagaucuugggaauaugu

SEQ ID NO: 1213391 - RNA, 19 nt, Homo sapiens
  misc_RNA (1)...(19): siRNA sense strand
gcaugaagccagcaggaaa

SEQ ID NO: 1213392 - RNA, 19 nt, Homo sapiens
  misc_RNA (1)...(19): siRNA sense strand
gaagcgaaugucucucuaa

SEQ ID NO: 1213393 - RNA, 19 nt, Homo sapiens
  misc_RNA (1)...(19): siRNA sense strand
uaagaaggagggaaagaaa

SEQ ID NO: 1213394 - RNA, 19 nt, Homo sapiens
  misc_RNA (1)...(19): siRNA sense strand
ccaccgaguuuaccaaagu

SEQ ID NO: 1213395 - RNA, 19 nt, Homo sapiens
  misc_RNA (1)...(19): siRNA sense strand
gcaagaaacagaggucaga

SEQ ID NO: 1213396 - RNA, 19 nt, Homo sapiens
  misc_RNA (1)...(19): siRNA sense strand
aaacauacucuuuggagaa

SEQ ID NO: 1213397 - RNA, 19 nt, Homo sapiens
  misc_RNA (1)...(19): siRNA sense strand
agugauagcuauucuuugu

SEQ ID NO: 1213398 - RNA, 19 nt, Homo sapiens
  misc_RNA (1)...(19): siRNA sense strand
aaacauaucacacguacau

SEQ ID NO: 1213399 - RNA, 19 nt, Homo sapiens
  misc_RNA (1)...(19): siRNA sense strand
gaacuuuggccuacguuuc

SEQ ID NO: 1213400 - RNA, 19 nt, Homo sapiens
  misc_RNA (1)...(19): siRNA sense strand
gggaauaugugggaaugug

SEQ ID NO: 1213401 - RNA, 19 nt, Homo sapiens
  misc_RNA (1)...(19): siRNA sense strand
gaaaaguaccccaaagaaa

SEQ ID NO: 1213402 - RNA, 19 nt, Homo sapiens
  misc_RNA (1)...(19): siRNA sense strand
acauaucacacguacauua

SEQ ID NO: 1213403 - RNA, 19 nt, Homo sapiens
  misc_RNA (1)...(19): siRNA sense strand
cauaucacacguacauuaa

SEQ ID NO: 1213404 - RNA, 19 nt, Homo sapiens
  misc_RNA (1)...(19): siRNA sense strand
gcacggccauccgguugaa

SEQ ID NO: 1213405 - RNA, 19 nt, Homo sapiens
  misc_RNA (1)...(19): siRNA sense strand
auuagaagauggagagauu

SEQ ID NO: 1213406 - RNA, 19 nt, Homo sapiens
  misc_RNA (1)...(19): siRNA sense strand
gaagauggagagauuugug

SEQ ID NO: 1213407 - RNA, 19 nt, Homo sapiens
  misc_RNA (1)...(19): siRNA sense strand
gacauuauccugccacauc

SEQ ID NO: 1213408 - RNA, 19 nt, Homo sapiens
  misc_RNA (1)...(19): siRNA sense strand
gggcaucauucacgccuau

SEQ ID NO: 1213409 - RNA, 19 nt, Homo sapiens
  misc_RNA (1)...(19): siRNA sense strand
caaagugacagccucaaau

SEQ ID NO: 1213410 - RNA, 19 nt, Homo sapiens
  misc_RNA (1)...(19): siRNA sense strand
gcaaaugccaccuugacau

SEQ ID NO: 1213411 - RNA, 19 nt, Homo sapiens
  misc_RNA (1)...(19): siRNA sense strand
gcgacccugugcaagguua

SEQ ID NO: 1213412 - RNA, 19 nt, Homo sapiens
  misc_RNA (1)...(19): siRNA sense strand
gaggagugcauuaagaaga

SEQ ID NO: 1213413 - RNA, 19 nt, Homo sapiens
  misc_RNA (1)...(19): siRNA sense strand
caaaugccaccuugacaug

SEQ ID NO: 1213414 - RNA, 19 nt, Homo sapiens
  misc_RNA (1)...(19): siRNA sense strand
gcccagaggagcaaaguga

SEQ ID NO: 1213415 - RNA, 19 nt, Homo sapiens
  misc_RNA (1)...(19): siRNA sense strand
cuuagagucuugugaugaa

SEQ ID NO: 1213416 - RNA, 19 nt, Homo sapiens
  misc_RNA (1)...(19): siRNA sense strand
cagcaggcauggaucuuuc

SEQ ID NO: 1213417 - RNA, 19 nt, Homo sapiens
  misc_RNA (1)...(19): siRNA sense strand
ggauaucaguguaugucau

SEQ ID NO: 1213418 - RNA, 19 nt, Homo sapiens
  misc_RNA (1)...(19): siRNA sense strand
ggcagucaauggaacuuug

SEQ ID NO: 1213419 - RNA, 19 nt, Homo sapiens
  misc_RNA (1)...(19): siRNA sense strand
cagaagacccagauacugu

SEQ ID NO: 1213420 - RNA, 19 nt, Homo sapiens
  misc_RNA (1)...(19): siRNA sense strand
ugauugccauguuuaaugu

SEQ ID NO: 1213421 - RNA, 19 nt, Homo sapiens
  misc_RNA (1)...(19): siRNA sense strand
caaaagauuucgaguccuu

SEQ ID NO: 1213422 - RNA, 19 nt, Homo sapiens
  misc_RNA (1)...(19): siRNA sense strand
caggaaaugagaaagauga

SEQ ID NO: 1213423 - RNA, 19 nt, Homo sapiens
  misc_RNA (1)...(19): siRNA sense strand
gaggauugcaguucaagga

SEQ ID NO: 1213424 - RNA, 19 nt, Homo sapiens
  misc_RNA (1)...(19): siRNA sense strand
ccaaagguaucagcacaca

SEQ ID NO: 1213425 - RNA, 19 nt, Homo sapiens
  misc_RNA (1)...(19): siRNA sense strand
uuacaucacccaaccagaa

SEQ ID NO: 1213426 - RNA, 19 nt, Homo sapiens
  misc_RNA (1)...(19): siRNA sense strand
caagcgaguucagacaaug

SEQ ID NO: 1213427 - RNA, 19 nt, Homo sapiens
  misc_RNA (1)...(19): siRNA sense strand
ggacugugcauagcccuuu

SEQ ID NO: 1213428 - RNA, 19 nt, Homo sapiens
  misc_RNA (1)...(19): siRNA sense strand
caccaaaggcuucgucuuc

SEQ ID NO: 1213429 - RNA, 19 nt, Homo sapiens
  misc_RNA (1)...(19): siRNA sense strand
guaccuccuuucucucuuc

SEQ ID NO: 1213430 - RNA, 19 nt, Homo sapiens
  misc_RNA (1)...(19): siRNA sense strand
ggaaagaaaauuacuggaa

SEQ ID NO: 1213431 - RNA, 19 nt, Homo sapiens
  misc_RNA (1)...(19): siRNA sense strand
gcgaggugcucaauauacu

SEQ ID NO: 1213432 - RNA, 19 nt, Homo sapiens
  misc_RNA (1)...(19): siRNA sense strand
uaccaacacuauccaagau

SEQ ID NO: 1213433 - RNA, 19 nt, Homo sapiens
  misc_RNA (1)...(19): siRNA sense strand
ccuuugggaugaagaggua

SEQ ID NO: 1213434 - RNA, 19 nt, Homo sapiens
  misc_RNA (1)...(19): siRNA sense strand
uaagcuuuguggugagaaa

SEQ ID NO: 1213435 - RNA, 19 nt, Homo sapiens
  misc_RNA (1)...(19): siRNA sense strand
ucagaggcauacagugaga

SEQ ID NO: 1213436 - RNA, 19 nt, Homo sapiens
  misc_RNA (1)...(19): siRNA sense strand
ggaaaaguaccccaaagaa

SEQ ID NO: 1213437 - RNA, 19 nt, Homo sapiens
  misc_RNA (1)...(19): siRNA sense strand
gaagccagcaggaaaagua

SEQ ID NO: 1213438 - RNA, 19 nt, Homo sapiens
  misc_RNA (1)...(19): siRNA sense strand
ccagauacugucuugcuuu

SEQ ID NO: 1213439 - RNA, 19 nt, Homo sapiens
  misc_RNA (1)...(19): siRNA sense strand
gauagcuauucuuuguuug

SEQ ID NO: 1213440 - RNA, 19 nt, Homo sapiens
  misc_RNA (1)...(19): siRNA sense strand
cugaacaccuuuacaaugc

SEQ ID NO: 1213441 - RNA, 19 nt, Homo sapiens
  misc_RNA (1)...(19): siRNA sense strand
gccaacauccugugcauca

SEQ ID NO: 1213442 - RNA, 19 nt, Homo sapiens
  misc_RNA (1)...(19): siRNA sense strand
gagagagggcgcuaugcaa

SEQ ID NO: 1213443 - RNA, 19 nt, Homo sapiens
  misc_RNA (1)...(19): siRNA sense strand
ggagagagggcgcuaugca

SEQ ID NO: 1213444 - RNA, 19 nt, Homo sapiens
  misc_RNA (1)...(19): siRNA sense strand
gaacccacaaggaguuaau

SEQ ID NO: 1213445 - RNA, 19 nt, Homo sapiens
  misc_RNA (1)...(19): siRNA sense strand
cagcuacaguucuuagagu

SEQ ID NO: 1213446 - RNA, 19 nt, Homo sapiens
  misc_RNA (1)...(19): siRNA sense strand
ggacaucguggccaacauc

SEQ ID NO: 1213447 - RNA, 19 nt, Homo sapiens
  misc_RNA (1)...(19): siRNA sense strand
ugaagcgaaugucucucua

SEQ ID NO: 1213448 - RNA, 19 nt, Homo sapiens
  misc_RNA (1)...(19): siRNA sense strand
agaaauugcagaaccagaa

SEQ ID NO: 1213449 - RNA, 19 nt, Homo sapiens
  misc_RNA (1)...(19): siRNA sense strand
uccaggagcucaagaaggu

SEQ ID NO: 1213450 - RNA, 19 nt, Homo sapiens
  misc_RNA (1)...(19): siRNA sense strand
gauggagagauuugugaaa

SEQ ID NO: 1213451 - RNA, 19 nt, Homo sapiens
  misc_RNA (1)...(19): siRNA sense strand
ggaagaucuugggaauaug

SEQ ID NO: 1213452 - RNA, 19 nt, Homo sapiens
  misc_RNA (1)...(19): siRNA sense strand
uuccgaaggucagcaauuu

SEQ ID NO: 1213453 - RNA, 19 nt, Homo sapiens
  misc_RNA (1)...(19): siRNA sense strand
gaggagagagggcgcuaug

SEQ ID NO: 1213454 - RNA, 19 nt, Homo sapiens
  misc_RNA (1)...(19): siRNA sense strand
gugauugccauguuuaaug

SEQ ID NO: 1213455 - RNA, 19 nt, Homo sapiens
  misc_RNA (1)...(19): siRNA sense strand
gacaaugaaugaguuucug

SEQ ID NO: 1213456 - RNA, 19 nt, Homo sapiens
  misc_RNA (1)...(19): siRNA sense strand
gcaaggguggguccugaga

SEQ ID NO: 1213457 - RNA, 19 nt, Homo sapiens
  misc_RNA (1)...(19): siRNA sense strand
aaaguaugaucaccaaagg

SEQ ID NO: 1213458 - RNA, 19 nt, Homo sapiens
  misc_RNA (1)...(19): siRNA sense strand
aacauacucuuuggagaaa

SEQ ID NO: 1213459 - RNA, 19 nt, Homo sapiens
  misc_RNA (1)...(19): siRNA sense strand
gacaagcgaguucagacaa

SEQ ID NO: 1213460 - RNA, 19 nt, Homo sapiens
  misc_RNA (1)...(19): siRNA sense strand
aguaugaucaccaaaggua

SEQ ID NO: 1213461 - RNA, 19 nt, Homo sapiens
  misc_RNA (1)...(19): siRNA sense strand
gagaaaacauacucuuugg

SEQ ID NO: 1213462 - RNA, 19 nt, Homo sapiens
  misc_RNA (1)...(19): siRNA sense strand
ccuugcagcucuccuagga

SEQ ID NO: 1213463 - RNA, 19 nt, Homo sapiens
  misc_RNA (1)...(19): siRNA sense strand
cauaagcuuuguggugaga

SEQ ID NO: 1213464 - RNA, 19 nt, Homo sapiens
  misc_RNA (1)...(19): siRNA sense strand
agagagggcgcuaugcaaa

SEQ ID NO: 1213465 - RNA, 19 nt, Homo sapiens
  misc_RNA (1)...(19): siRNA sense strand
gaaagaugaaggaaaagaa

SEQ ID NO: 1213466 - RNA, 19 nt, Homo sapiens
  misc_RNA (1)...(19): siRNA sense strand
gaaacaggcucagaauuug

SEQ ID NO: 1213467 - RNA, 19 nt, Homo sapiens
  misc_RNA (1)...(19): siRNA sense strand
gacaagggcucacggauga

SEQ ID NO: 1213468 - RNA, 19 nt, Homo sapiens
  misc_RNA (1)...(19): siRNA sense strand
gggaagaucuugggaauau

SEQ ID NO: 1213469 - RNA, 19 nt, Homo sapiens
  misc_RNA (1)...(19): siRNA sense strand
ggagagcccugcugagaga

SEQ ID NO: 1213470 - RNA, 19 nt, Homo sapiens
  misc_RNA (1)...(19): siRNA sense strand
ucaagaagguggagaaugu

SEQ ID NO: 1213471 - RNA, 19 nt, Homo sapiens
  misc_RNA (1)...(19): siRNA sense strand
gcgaaugucucucuaagga

SEQ ID NO: 1213472 - RNA, 19 nt, Homo sapiens
  misc_RNA (1)...(19): siRNA sense strand
ugaaacaggcucagaauuu

SEQ ID NO: 1213473 - RNA, 19 nt, Homo sapiens
  misc_RNA (1)...(19): siRNA sense strand
guuugaagcugccuuguuu

SEQ ID NO: 1213474 - RNA, 19 nt, Homo sapiens
  misc_RNA (1)...(19): siRNA sense strand
gggcagaggcagaggauua

SEQ ID NO: 1213475 - RNA, 19 nt, Homo sapiens
  misc_RNA (1)...(19): siRNA sense strand
ucaauauacugucaaguga

SEQ ID NO: 1213476 - RNA, 19 nt, Homo sapiens
  misc_RNA (1)...(19): siRNA sense strand
gacccuaccuuaucucaga

SEQ ID NO: 1213477 - RNA, 19 nt, Homo sapiens
  misc_RNA (1)...(19): siRNA sense strand
caagugauagcuauucuuu

SEQ ID NO: 1213478 - RNA, 19 nt, Homo sapiens
  misc_RNA (1)...(19): siRNA sense strand
ggcaaaggcugaccguaga

SEQ ID NO: 1213479 - RNA, 19 nt, Homo sapiens
  misc_RNA (1)...(19): siRNA sense strand
gauauaagaaggagggaaa

SEQ ID NO: 1213480 - RNA, 19 nt, Homo sapiens
  misc_RNA (1)...(19): siRNA sense strand
gugaaaggcuaccggcaaa

SEQ ID NO: 1213481 - RNA, 19 nt, Homo sapiens
  misc_RNA (1)...(19): siRNA sense strand
caaagaaauugcagaacca

SEQ ID NO: 1213482 - RNA, 19 nt, Homo sapiens
  misc_RNA (1)...(19): siRNA sense strand
gcaacaggaccauguguga

SEQ ID NO: 1213483 - RNA, 19 nt, Homo sapiens
  misc_RNA (1)...(19): siRNA sense strand
ggucagaggcauacaguga

SEQ ID NO: 1213484 - RNA, 19 nt, Homo sapiens
  misc_RNA (1)...(19): siRNA sense strand
gaaauugcagaaccagaaa

SEQ ID NO: 1213485 - RNA, 19 nt, Homo sapiens
  misc_RNA (1)...(19): siRNA sense strand
gcaaagugacagccucaaa

SEQ ID NO: 1213486 - RNA, 19 nt, Homo sapiens
  misc_RNA (1)...(19): siRNA sense strand
ugagaaagaugaaggaaaa

SEQ ID NO: 1213487 - RNA, 19 nt, Homo sapiens
  misc_RNA (1)...(19): siRNA sense strand
ugacucaucugacaccaau

SEQ ID NO: 1213488 - RNA, 19 nt, Homo sapiens
  misc_RNA (1)...(19): siRNA sense strand
gcggagauccuuugcagaa

SEQ ID NO: 1213489 - RNA, 19 nt, Homo sapiens
  misc_RNA (1)...(19): siRNA sense strand
gaaagucuggguuggcauu

SEQ ID NO: 1213490 - RNA, 19 nt, Homo sapiens
  misc_RNA (1)...(19): siRNA sense strand
gaagaucuugggaauaugu

SEQ ID NO: 1213491 - RNA, 19 nt, Homo sapiens
  misc_RNA (1)...(19): siRNA sense strand
gcaugaagccagcaggaaa

SEQ ID NO: 1213492 - RNA, 19 nt, Homo sapiens
  misc_RNA (1)...(19): siRNA sense strand
gaagcgaaugucucucuaa

SEQ ID NO: 1213493 - RNA, 19 nt, Homo sapiens
  misc_RNA (1)...(19): siRNA sense strand
uaagaaggagggaaagaaa

SEQ ID NO: 1213494 - RNA, 19 nt, Homo sapiens
  misc_RNA (1)...(19): siRNA sense strand
ccaccgaguuuaccaaagu

SEQ ID NO: 1213495 - RNA, 19 nt, Homo sapiens
  misc_RNA (1)...(19): siRNA sense strand
gcaagaaacagaggucaga

SEQ ID NO: 1213496 - RNA, 19 nt, Homo sapiens
  misc_RNA (1)...(19): siRNA sense strand
aaacauacucuuuggagaa

SEQ ID NO: 1213497 - RNA, 19 nt, Homo sapiens
  misc_RNA (1)...(19): siRNA sense strand
agugauagcuauucuuugu

SEQ ID NO: 1213498 - RNA, 19 nt, Homo sapiens
  misc_RNA (1)...(19): siRNA sense strand
aaacauaucacacguacau

SEQ ID NO: 1213499 - RNA, 19 nt, Homo sapiens
  misc_RNA (1)...(19): siRNA sense strand
gaacuuuggccuacguuuc

SEQ ID NO: 1213500 - RNA, 19 nt, Homo sapiens
  misc_RNA (1)...(19): siRNA sense strand
gggaauaugugggaaugug

SEQ ID NO: 1213501 - RNA, 19 nt, Homo sapiens
  misc_RNA (1)...(19): siRNA sense strand
gaaaaguaccccaaagaaa

SEQ ID NO: 1213502 - RNA, 19 nt, Homo sapiens
  misc_RNA (1)...(19): siRNA sense strand
acauaucacacguacauua

SEQ ID NO: 1213503 - RNA, 19 nt, Homo sapiens
  misc_RNA (1)...(19): siRNA sense strand
cauaucacacguacauuaa

SEQ ID NO: 1213504 - RNA, 19 nt, Homo sapiens
  misc_RNA (1)...(19): siRNA sense strand
gcacggccauccgguugaa

SEQ ID NO: 1213505 - RNA, 19 nt, Homo sapiens
  misc_RNA (1)...(19): siRNA sense strand
auuagaagauggagagauu

SEQ ID NO: 1213506 - RNA, 19 nt, Homo sapiens
  misc_RNA (1)...(19): siRNA sense strand
gaagauggagagauuugug

SEQ ID NO: 1213507 - RNA, 19 nt, Homo sapiens
  misc_RNA (1)...(19): siRNA sense strand
gacauuauccugccacauc

SEQ ID NO: 1213508 - RNA, 19 nt, Homo sapiens
  misc_RNA (1)...(19): siRNA sense strand
gggcaucauucacgccuau

SEQ ID NO: 1213509 - RNA, 19 nt, Homo sapiens
  misc_RNA (1)...(19): siRNA sense strand
caaagugacagccucaaau

SEQ ID NO: 1213510 - RNA, 19 nt, Homo sapiens
  misc_RNA (1)...(19): siRNA sense strand
gcaaaugccaccuugacau

SEQ ID NO: 1213511 - RNA, 19 nt, Homo sapiens
  misc_RNA (1)...(19): siRNA sense strand
gcgacccugugcaagguua

SEQ ID NO: 1213512 - RNA, 19 nt, Homo sapiens
  misc_RNA (1)...(19): siRNA sense strand
gaggagugcauuaagaaga

SEQ ID NO: 1213513 - RNA, 19 nt, Homo sapiens
  misc_RNA (1)...(19): siRNA sense strand
caaaugccaccuugacaug

SEQ ID NO: 1213514 - RNA, 19 nt, Homo sapiens
  misc_RNA (1)...(19): siRNA sense strand
gcccagaggagcaaaguga

SEQ ID NO: 1213515 - RNA, 19 nt, Homo sapiens
  misc_RNA (1)...(19): siRNA sense strand
cuuagagucuugugaugaa

SEQ ID NO: 1213516 - RNA, 19 nt, Homo sapiens
  misc_RNA (1)...(19): siRNA sense strand
cagcaggcauggaucuuuc

SEQ ID NO: 1213517 - RNA, 19 nt, Homo sapiens
  misc_RNA (1)...(19): siRNA sense strand
ggauaucaguguaugucau

SEQ ID NO: 1213518 - RNA, 19 nt, Homo sapiens
  misc_RNA (1)...(19): siRNA sense strand
ggcagucaauggaacuuug

SEQ ID NO: 1213519 - RNA, 19 nt, Homo sapiens
  misc_RNA (1)...(19): siRNA sense strand
cagaagacccagauacugu

SEQ ID NO: 1213520 - RNA, 19 nt, Homo sapiens
  misc_RNA (1)...(19): siRNA sense strand
ugauugccauguuuaaugu

SEQ ID NO: 1213521 - RNA, 19 nt, Homo sapiens
  misc_RNA (1)...(19): siRNA sense strand
caaaagauuucgaguccuu

SEQ ID NO: 1213522 - RNA, 19 nt, Homo sapiens
  misc_RNA (1)...(19): siRNA sense strand
caggaaaugagaaagauga

SEQ ID NO: 1213523 - RNA, 19 nt, Homo sapiens
  misc_RNA (1)...(19): siRNA sense strand
gaggauugcaguucaagga

SEQ ID NO: 1213524 - RNA, 19 nt, Homo sapiens
  misc_RNA (1)...(19): siRNA sense strand
ccaaagguaucagcacaca

SEQ ID NO: 1213525 - RNA, 19 nt, Homo sapiens
  misc_RNA (1)...(19): siRNA sense strand
uuacaucacccaaccagaa

SEQ ID NO: 1213526 - RNA, 19 nt, Homo sapiens
  misc_RNA (1)...(19): siRNA sense strand
caagcgaguucagacaaug

SEQ ID NO: 1213527 - RNA, 19 nt, Homo sapiens
  misc_RNA (1)...(19): siRNA sense strand
ggacugugcauagcccuuu

SEQ ID NO: 1213528 - RNA, 19 nt, Homo sapiens
  misc_RNA (1)...(19): siRNA sense strand
caccaaaggcuucgucuuc

SEQ ID NO: 1213529 - RNA, 19 nt, Homo sapiens
  misc_RNA (1)...(19): siRNA sense strand
guaccuccuuucucucuuc

SEQ ID NO: 1213530 - RNA, 19 nt, Homo sapiens
  misc_RNA (1)...(19): siRNA sense strand
ggaaagaaaauuacuggaa

SEQ ID NO: 1213531 - RNA, 19 nt, Homo sapiens
  misc_RNA (1)...(19): siRNA sense strand
gcgaggugcucaauauacu

SEQ ID NO: 1213532 - RNA, 19 nt, Homo sapiens
  misc_RNA (1)...(19): siRNA sense strand
uaccaacacuauccaagau

SEQ ID NO: 1213533 - RNA, 19 nt, Homo sapiens
  misc_RNA (1)...(19): siRNA sense strand
ccuuugggaugaagaggua

SEQ ID NO: 1213534 - RNA, 19 nt, Homo sapiens
  misc_RNA (1)...(19): siRNA sense strand
uaagcuuuguggugagaaa

SEQ ID NO: 1213535 - RNA, 19 nt, Homo sapiens
  misc_RNA (1)...(19): siRNA sense strand
ucagaggcauacagugaga

SEQ ID NO: 1213536 - RNA, 19 nt, Homo sapiens
  misc_RNA (1)...(19): siRNA sense strand
ggaaaaguaccccaaagaa

SEQ ID NO: 1213537 - RNA, 19 nt, Homo sapiens
  misc_RNA (1)...(19): siRNA sense strand
gaagccagcaggaaaagua

SEQ ID NO: 1213538 - RNA, 19 nt, Homo sapiens
  misc_RNA (1)...(19): siRNA sense strand
ccagauacugucuugcuuu

SEQ ID NO: 1213539 - RNA, 19 nt, Homo sapiens
  misc_RNA (1)...(19): siRNA sense strand
gauagcuauucuuuguuug

SEQ ID NO: 1213540 - RNA, 19 nt, Homo sapiens
  misc_RNA (1)...(19): siRNA sense strand
cugaacaccuuuacaaugc

SEQ ID NO: 1213541 - RNA, 19 nt, Homo sapiens
  misc_RNA (1)...(19): siRNA sense strand
gccaacauccugugcauca

SEQ ID NO: 1213542 - RNA, 19 nt, Homo sapiens
  misc_RNA (1)...(19): siRNA sense strand
gagagagggcgcuaugcaa

SEQ ID NO: 1213543 - RNA, 19 nt, Homo sapiens
  misc_RNA (1)...(19): siRNA sense strand
ggagagagggcgcuaugca

SEQ ID NO: 1213544 - RNA, 19 nt, Homo sapiens
  misc_RNA (1)...(19): siRNA sense strand
gaacccacaaggaguuaau

SEQ ID NO: 1213545 - RNA, 19 nt, Homo sapiens
  misc_RNA (1)...(19): siRNA sense strand
cagcuacaguucuuagagu

SEQ ID NO: 1213546 - RNA, 19 nt, Homo sapiens
  misc_RNA (1)...(19): siRNA sense strand
ggacaucguggccaacauc

SEQ ID NO: 1213547 - RNA, 19 nt, Homo sapiens
  misc_RNA (1)...(19): siRNA sense strand
ugaagcgaaugucucucua

SEQ ID NO: 1213548 - RNA, 19 nt, Homo sapiens
  misc_RNA (1)...(19): siRNA sense strand
agaaauugcagaaccagaa

SEQ ID NO: 1213549 - RNA, 19 nt, Homo sapiens
  misc_RNA (1)...(19): siRNA sense strand
uccaggagcucaagaaggu

SEQ ID NO: 1213550 - RNA, 19 nt, Homo sapiens
  misc_RNA (1)...(19): siRNA sense strand
gauggagagauuugugaaa

SEQ ID NO: 1213551 - RNA, 19 nt, Homo sapiens
  misc_RNA (1)...(19): siRNA sense strand
ggaagaucuugggaauaug

SEQ ID NO: 1213552 - RNA, 19 nt, Homo sapiens
  misc_RNA (1)...(19): siRNA sense strand
uuccgaaggucagcaauuu

SEQ ID NO: 1213553 - RNA, 19 nt, Homo sapiens
  misc_RNA (1)...(19): siRNA sense strand
gaggagagagggcgcuaug

SEQ ID NO: 1213554 - RNA, 19 nt, Homo sapiens
  misc_RNA (1)...(19): siRNA sense strand
gugauugccauguuuaaug

SEQ ID NO: 1213555 - RNA, 19 nt, Homo sapiens
  misc_RNA (1)...(19): siRNA sense strand
gacaaugaaugaguuucug

SEQ ID NO: 1213556 - RNA, 19 nt, Homo sapiens
  misc_RNA (1)...(19): siRNA sense strand
gcaaggguggguccugaga

SEQ ID NO: 1213557 - RNA, 19 nt, Homo sapiens
  misc_RNA (1)...(19): siRNA sense strand
aaaguaugaucaccaaagg

SEQ ID NO: 1213558 - RNA, 19 nt, Homo sapiens
  misc_RNA (1)...(19): siRNA sense strand
aacauacucuuuggagaaa

SEQ ID NO: 1213559 - RNA, 19 nt, Homo sapiens
  misc_RNA (1)...(19): siRNA sense strand
gacaagcgaguucagacaa

SEQ ID NO: 1213560 - RNA, 19 nt, Homo sapiens
  misc_RNA (1)...(19): siRNA sense strand
aguaugaucaccaaaggua

SEQ ID NO: 1213561 - RNA, 19 nt, Homo sapiens
  misc_RNA (1)...(19): siRNA sense strand
gagaaaacauacucuuugg

SEQ ID NO: 1213562 - RNA, 19 nt, Homo sapiens
  misc_RNA (1)...(19): siRNA sense strand
ccuugcagcucuccuagga

SEQ ID NO: 1213563 - RNA, 19 nt, Homo sapiens
  misc_RNA (1)...(19): siRNA sense strand
cauaagcuuuguggugaga

SEQ ID NO: 1213564 - RNA, 19 nt, Homo sapiens
  misc_RNA (1)...(19): siRNA sense strand
agagagggcgcuaugcaaa

SEQ ID NO: 1213565 - RNA, 19 nt, Homo sapiens
  misc_RNA (1)...(19): siRNA sense strand
gaaagaugaaggaaaagaa

SEQ ID NO: 1213566 - RNA, 19 nt, Homo sapiens
  misc_RNA (1)...(19): siRNA sense strand
gaaacaggcucagaauuug

SEQ ID NO: 1213567 - RNA, 19 nt, Homo sapiens
  misc_RNA (1)...(19): siRNA sense strand
gacaagggcucacggauga

SEQ ID NO: 1213568 - RNA, 19 nt, Homo sapiens
  misc_RNA (1)...(19): siRNA sense strand
gggaagaucuugggaauau

SEQ ID NO: 1213569 - RNA, 19 nt, Homo sapiens
  misc_RNA (1)...(19): siRNA sense strand
ggagagcccugcugagaga

SEQ ID NO: 1213570 - RNA, 19 nt, Homo sapiens
  misc_RNA (1)...(19): siRNA sense strand
ucaagaagguggagaaugu

SEQ ID NO: 1213571 - RNA, 19 nt, Homo sapiens
  misc_RNA (1)...(19): siRNA sense strand
gcgaaugucucucuaagga

SEQ ID NO: 1213572 - RNA, 19 nt, Homo sapiens
  misc_RNA (1)...(19): siRNA sense strand
ugaaacaggcucagaauuu

SEQ ID NO: 1213573 - RNA, 19 nt, Homo sapiens
  misc_RNA (1)...(19): siRNA sense strand
guuugaagcugccuuguuu

SEQ ID NO: 1213574 - RNA, 19 nt, Homo sapiens
  misc_RNA (1)...(19): siRNA sense strand
gggcagaggcagaggauua

SEQ ID NO: 1213575 - RNA, 19 nt, Homo sapiens
  misc_RNA (1)...(19): siRNA sense strand
ucaauauacugucaaguga

SEQ ID NO: 1213576 - RNA, 19 nt, Homo sapiens
  misc_RNA (1)...(19): siRNA sense strand
gacccuaccuuaucucaga

SEQ ID NO: 1213577 - RNA, 19 nt, Homo sapiens
  misc_RNA (1)...(19): siRNA sense strand
caagugauagcuauucuuu

SEQ ID NO: 1213578 - RNA, 19 nt, Homo sapiens
  misc_RNA (1)...(19): siRNA sense strand
ggcaaaggcugaccguaga

SEQ ID NO: 1213579 - RNA, 19 nt, Homo sapiens
  misc_RNA (1)...(19): siRNA sense strand
gauauaagaaggagggaaa

SEQ ID NO: 1213580 - RNA, 19 nt, Homo sapiens
  misc_RNA (1)...(19): siRNA sense strand
gugaaaggcuaccggcaaa

SEQ ID NO: 1213581 - RNA, 19 nt, Homo sapiens
  misc_RNA (1)...(19): siRNA sense strand
caaagaaauugcagaacca

SEQ ID NO: 1213582 - RNA, 19 nt, Homo sapiens
  misc_RNA (1)...(19): siRNA sense strand
gcaacaggaccauguguga

SEQ ID NO: 1213583 - RNA, 19 nt, Homo sapiens
  misc_RNA (1)...(19): siRNA sense strand
ggucagaggcauacaguga

SEQ ID NO: 1213584 - RNA, 19 nt, Homo sapiens
  misc_RNA (1)...(19): siRNA sense strand
gaaauugcagaaccagaaa

SEQ ID NO: 1213585 - RNA, 19 nt, Homo sapiens
  misc_RNA (1)...(19): siRNA sense strand
gcaaagugacagccucaaa

SEQ ID NO: 1213586 - RNA, 19 nt, Homo sapiens
  misc_RNA (1)...(19): siRNA sense strand
ugagaaagaugaaggaaaa

SEQ ID NO: 1213587 - RNA, 19 nt, Homo sapiens
  misc_RNA (1)...(19): siRNA sense strand
ugacucaucugacaccaau

SEQ ID NO: 1213588 - RNA, 19 nt, Homo sapiens
  misc_RNA (1)...(19): siRNA sense strand
gcggagauccuuugcagaa

SEQ ID NO: 1213589 - RNA, 19 nt, Homo sapiens
  misc_RNA (1)...(19): siRNA sense strand
gaaagucuggguuggcauu

SEQ ID NO: 1213590 - RNA, 19 nt, Homo sapiens
  misc_RNA (1)...(19): siRNA sense strand
gaagaucuugggaauaugu

SEQ ID NO: 1213591 - RNA, 19 nt, Homo sapiens
  misc_RNA (1)...(19): siRNA sense strand
gcaugaagccagcaggaaa

SEQ ID NO: 1213592 - RNA, 19 nt, Homo sapiens
  misc_RNA (1)...(19): siRNA sense strand
gaagcgaaugucucucuaa

SEQ ID NO: 1213593 - RNA, 19 nt, Homo sapiens
  misc_RNA (1)...(19): siRNA sense strand
uaagaaggagggaaagaaa

SEQ ID NO: 1213594 - RNA, 19 nt, Homo sapiens
  misc_RNA (1)...(19): siRNA sense strand
ccaccgaguuuaccaaagu

SEQ ID NO: 1213595 - RNA, 19 nt, Homo sapiens
  misc_RNA (1)...(19): siRNA sense strand
gcaagaaacagaggucaga

SEQ ID NO: 1213596 - RNA, 19 nt, Homo sapiens
  misc_RNA (1)...(19): siRNA sense strand
aaacauacucuuuggagaa

SEQ ID NO: 1213597 - RNA, 19 nt, Homo sapiens
  misc_RNA (1)...(19): siRNA sense strand
agugauagcuauucuuugu

SEQ ID NO: 1213598 - RNA, 19 nt, Homo sapiens
  misc_RNA (1)...(19): siRNA sense strand
aaacauaucacacguacau

SEQ ID NO: 1213599 - RNA, 19 nt, Homo sapiens
  misc_RNA (1)...(19): siRNA sense strand
gaacuuuggccuacguuuc

SEQ ID NO: 1213600 - RNA, 19 nt, Homo sapiens
  misc_RNA (1)...(19): siRNA sense strand
gggaauaugugggaaugug

SEQ ID NO: 1213601 - RNA, 19 nt, Homo sapiens
  misc_RNA (1)...(19): siRNA sense strand
gaaaaguaccccaaagaaa

SEQ ID NO: 1213602 - RNA, 19 nt, Homo sapiens
  misc_RNA (1)...(19): siRNA sense strand
acauaucacacguacauua

SEQ ID NO: 1213603 - RNA, 19 nt, Homo sapiens
  misc_RNA (1)...(19): siRNA sense strand
cauaucacacguacauuaa

SEQ ID NO: 1213604 - RNA, 19 nt, Homo sapiens
  misc_RNA (1)...(19): siRNA sense strand
gcacggccauccgguugaa

SEQ ID NO: 1213605 - RNA, 19 nt, Homo sapiens
  misc_RNA (1)...(19): siRNA sense strand
auuagaagauggagagauu

SEQ ID NO: 1213606 - RNA, 19 nt, Homo sapiens
  misc_RNA (1)...(19): siRNA sense strand
gaagauggagagauuugug

SEQ ID NO: 1213607 - RNA, 19 nt, Homo sapiens
  misc_RNA (1)...(19): siRNA sense strand
gacauuauccugccacauc

SEQ ID NO: 1213608 - RNA, 19 nt, Homo sapiens
  misc_RNA (1)...(19): siRNA sense strand
gggcaucauucacgccuau

SEQ ID NO: 1213609 - RNA, 19 nt, Homo sapiens
  misc_RNA (1)...(19): siRNA sense strand
caaagugacagccucaaau

SEQ ID NO: 1213610 - RNA, 19 nt, Homo sapiens
  misc_RNA (1)...(19): siRNA sense strand
gcaaaugccaccuugacau

SEQ ID NO: 1213611 - RNA, 19 nt, Homo sapiens
  misc_RNA (1)...(19): siRNA sense strand
gcgacccugugcaagguua

SEQ ID NO: 1213612 - RNA, 19 nt, Homo sapiens
  misc_RNA (1)...(19): siRNA sense strand
gaggagugcauuaagaaga

SEQ ID NO: 1213613 - RNA, 19 nt, Homo sapiens
  misc_RNA (1)...(19): siRNA sense strand
caaaugccaccuugacaug

SEQ ID NO: 1213614 - RNA, 19 nt, Homo sapiens
  misc_RNA (1)...(19): siRNA sense strand
gcccagaggagcaaaguga

SEQ ID NO: 1213615 - RNA, 19 nt, Homo sapiens
  misc_RNA (1)...(19): siRNA sense strand
cuuagagucuugugaugaa

SEQ ID NO: 1213616 - RNA, 19 nt, Homo sapiens
  misc_RNA (1)...(19): siRNA sense strand
cagcaggcauggaucuuuc

SEQ ID NO: 1213617 - RNA, 19 nt, Homo sapiens
  misc_RNA (1)...(19): siRNA sense strand
ggauaucaguguaugucau

SEQ ID NO: 1213618 - RNA, 19 nt, Homo sapiens
  misc_RNA (1)...(19): siRNA sense strand
ggcagucaauggaacuuug

SEQ ID NO: 1213619 - RNA, 19 nt, Homo sapiens
  misc_RNA (1)...(19): siRNA sense strand
cagaagacccagauacugu

SEQ ID NO: 1213620 - RNA, 19 nt, Homo sapiens
  misc_RNA (1)...(19): siRNA sense strand
ugauugccauguuuaaugu

SEQ ID NO: 1213621 - RNA, 19 nt, Homo sapiens
  misc_RNA (1)...(19): siRNA sense strand
caaaagauuucgaguccuu

SEQ ID NO: 1213622 - RNA, 19 nt, Homo sapiens
  misc_RNA (1)...(19): siRNA sense strand
caggaaaugagaaagauga

SEQ ID NO: 1213623 - RNA, 19 nt, Homo sapiens
  misc_RNA (1)...(19): siRNA sense strand
gaggauugcaguucaagga

SEQ ID NO: 1213624 - RNA, 19 nt, Homo sapiens
  misc_RNA (1)...(19): siRNA sense strand
ccaaagguaucagcacaca

SEQ ID NO: 1213625 - RNA, 19 nt, Homo sapiens
  misc_RNA (1)...(19): siRNA sense strand
uuacaucacccaaccagaa

SEQ ID NO: 1213626 - RNA, 19 nt, Homo sapiens
  misc_RNA (1)...(19): siRNA sense strand
caagcgaguucagacaaug

SEQ ID NO: 1213627 - RNA, 19 nt, Homo sapiens
  misc_RNA (1)...(19): siRNA sense strand
ggacugugcauagcccuuu

SEQ ID NO: 1213628 - RNA, 19 nt, Homo sapiens
  misc_RNA (1)...(19): siRNA sense strand
caccaaaggcuucgucuuc

SEQ ID NO: 1213629 - RNA, 19 nt, Homo sapiens
  misc_RNA (1)...(19): siRNA sense strand
guaccuccuuucucucuuc

SEQ ID NO: 1213630 - RNA, 19 nt, Homo sapiens
  misc_RNA (1)...(19): siRNA sense strand
ggaaagaaaauuacuggaa

SEQ ID NO: 1213631 - RNA, 19 nt, Homo sapiens
  misc_RNA (1)...(19): siRNA sense strand
gcgaggugcucaauauacu

SEQ ID NO: 1213632 - RNA, 19 nt, Homo sapiens
  misc_RNA (1)...(19): siRNA sense strand
uaccaacacuauccaagau

SEQ ID NO: 1213633 - RNA, 19 nt, Homo sapiens
  misc_RNA (1)...(19): siRNA sense strand
ccuuugggaugaagaggua

SEQ ID NO: 1213634 - RNA, 19 nt, Homo sapiens
  misc_RNA (1)...(19): siRNA sense strand
uaagcuuuguggugagaaa

SEQ ID NO: 1213635 - RNA, 19 nt, Homo sapiens
  misc_RNA (1)...(19): siRNA sense strand
ucagaggcauacagugaga

SEQ ID NO: 1213636 - RNA, 19 nt, Homo sapiens
  misc_RNA (1)...(19): siRNA sense strand
ggaaaaguaccccaaagaa

SEQ ID NO: 1213637 - RNA, 19 nt, Homo sapiens
  misc_RNA (1)...(19): siRNA sense strand
gaagccagcaggaaaagua

SEQ ID NO: 1213638 - RNA, 19 nt, Homo sapiens
  misc_RNA (1)...(19): siRNA sense strand
ccagauacugucuugcuuu

SEQ ID NO: 1213639 - RNA, 19 nt, Homo sapiens
  misc_RNA (1)...(19): siRNA sense strand
gauagcuauucuuuguuug

SEQ ID NO: 1213640 - RNA, 19 nt, Homo sapiens
  misc_RNA (1)...(19): siRNA sense strand
cugaacaccuuuacaaugc

SEQ ID NO: 1213641 - RNA, 19 nt, Homo sapiens
  misc_RNA (1)...(19): siRNA sense strand
gccaacauccugugcauca

SEQ ID NO: 1213642 - RNA, 19 nt, Homo sapiens
  misc_RNA (1)...(19): siRNA sense strand
gagagagggcgcuaugcaa

SEQ ID NO: 1213643 - RNA, 19 nt, Homo sapiens
  misc_RNA (1)...(19): siRNA sense strand
ggagagagggcgcuaugca

SEQ ID NO: 1213644 - RNA, 19 nt, Homo sapiens
  misc_RNA (1)...(19): siRNA sense strand
gaacccacaaggaguuaau

SEQ ID NO: 1213645 - RNA, 19 nt, Homo sapiens
  misc_RNA (1)...(19): siRNA sense strand
cagcuacaguucuuagagu

SEQ ID NO: 1213646 - RNA, 19 nt, Homo sapiens
  misc_RNA (1)...(19): siRNA sense strand
ggacaucguggccaacauc

SEQ ID NO: 1213647 - RNA, 19 nt, Homo sapiens
  misc_RNA (1)...(19): siRNA sense strand
ugaagcgaaugucucucua

SEQ ID NO: 1213648 - RNA, 19 nt, Homo sapiens
  misc_RNA (1)...(19): siRNA sense strand
agaaauugcagaaccagaa

SEQ ID NO: 1213649 - RNA, 19 nt, Homo sapiens
  misc_RNA (1)...(19): siRNA sense strand
uccaggagcucaagaaggu

SEQ ID NO: 1213650 - RNA, 19 nt, Homo sapiens
  misc_RNA (1)...(19): siRNA sense strand
gauggagagauuugugaaa

SEQ ID NO: 1213651 - RNA, 19 nt, Homo sapiens
  misc_RNA (1)...(19): siRNA sense strand
ggaagaucuugggaauaug

SEQ ID NO: 1213652 - RNA, 19 nt, Homo sapiens
  misc_RNA (1)...(19): siRNA sense strand
uuccgaaggucagcaauuu

SEQ ID NO: 1213653 - RNA, 19 nt, Homo sapiens
  misc_RNA (1)...(19): siRNA sense strand
gaggagagagggcgcuaug

SEQ ID NO: 1213654 - RNA, 19 nt, Homo sapiens
  misc_RNA (1)...(19): siRNA sense strand
gugauugccauguuuaaug

SEQ ID NO: 1213655 - RNA, 19 nt, Homo sapiens
  misc_RNA (1)...(19): siRNA sense strand
gacaaugaaugaguuucug

SEQ ID NO: 1213656 - RNA, 19 nt, Homo sapiens
  misc_RNA (1)...(19): siRNA sense strand
gcaaggguggguccugaga

SEQ ID NO: 1213657 - RNA, 19 nt, Homo sapiens
  misc_RNA (1)...(19): siRNA sense strand
aaaguaugaucaccaaagg

SEQ ID NO: 1213658 - RNA, 19 nt, Homo sapiens
  misc_RNA (1)...(19): siRNA sense strand
aacauacucuuuggagaaa

SEQ ID NO: 1213659 - RNA, 19 nt, Homo sapiens
  misc_RNA (1)...(19): siRNA sense strand
gacaagcgaguucagacaa

SEQ ID NO: 1213660 - RNA, 19 nt, Homo sapiens
  misc_RNA (1)...(19): siRNA sense strand
aguaugaucaccaaaggua

SEQ ID NO: 1213661 - RNA, 19 nt, Homo sapiens
  misc_RNA (1)...(19): siRNA sense strand
gagaaaacauacucuuugg

SEQ ID NO: 1213662 - RNA, 19 nt, Homo sapiens
  misc_RNA (1)...(19): siRNA sense strand
ccuugcagcucuccuagga

SEQ ID NO: 1213663 - RNA, 19 nt, Homo sapiens
  misc_RNA (1)...(19): siRNA sense strand
cauaagcuuuguggugaga

SEQ ID NO: 1213664 - RNA, 19 nt, Homo sapiens
  misc_RNA (1)...(19): siRNA sense strand
agagagggcgcuaugcaaa

SEQ ID NO: 1213665 - RNA, 19 nt, Homo sapiens
  misc_RNA (1)...(19): siRNA sense strand
gaaagaugaaggaaaagaa

SEQ ID NO: 1213666 - RNA, 19 nt, Homo sapiens
  misc_RNA (1)...(19): siRNA sense strand
gaaacaggcucagaauuug

SEQ ID NO: 1213667 - RNA, 19 nt, Homo sapiens
  misc_RNA (1)...(19): siRNA sense strand
gacaagggcucacggauga

SEQ ID NO: 1213668 - RNA, 19 nt, Homo sapiens
  misc_RNA (1)...(19): siRNA sense strand
gggaagaucuugggaauau

SEQ ID NO: 1213669 - RNA, 19 nt, Homo sapiens
  misc_RNA (1)...(19): siRNA sense strand
ggagagcccugcugagaga

SEQ ID NO: 1213670 - RNA, 19 nt, Homo sapiens
  misc_RNA (1)...(19): siRNA sense strand
ucaagaagguggagaaugu

SEQ ID NO: 1213671 - RNA, 19 nt, Homo sapiens
  misc_RNA (1)...(19): siRNA sense strand
gcgaaugucucucuaagga

SEQ ID NO: 1213672 - RNA, 19 nt, Homo sapiens
  misc_RNA (1)...(19): siRNA sense strand
ugaaacaggcucagaauuu

SEQ ID NO: 1213673 - RNA, 19 nt, Homo sapiens
  misc_RNA (1)...(19): siRNA sense strand
guuugaagcugccuuguuu

SEQ ID NO: 1213674 - RNA, 19 nt, Homo sapiens
  misc_RNA (1)...(19): siRNA sense strand
gggcagaggcagaggauua

SEQ ID NO: 1213675 - RNA, 19 nt, Homo sapiens
  misc_RNA (1)...(19): siRNA sense strand
ucaauauacugucaaguga

SEQ ID NO: 1213676 - RNA, 19 nt, Homo sapiens
  misc_RNA (1)...(19): siRNA sense strand
gacccuaccuuaucucaga

SEQ ID NO: 1213677 - RNA, 19 nt, Homo sapiens
  misc_RNA (1)...(19): siRNA sense strand
caagugauagcuauucuuu

SEQ ID NO: 1213678 - RNA, 19 nt, Homo sapiens
  misc_RNA (1)...(19): siRNA sense strand
ggcaaaggcugaccguaga

SEQ ID NO: 1213679 - RNA, 19 nt, Homo sapiens
  misc_RNA (1)...(19): siRNA sense strand
gauauaagaaggagggaaa

SEQ ID NO: 1213680 - RNA, 19 nt, Homo sapiens
  misc_RNA (1)...(19): siRNA sense strand
gugaaaggcuaccggcaaa

SEQ ID NO: 1213681 - RNA, 19 nt, Homo sapiens
  misc_RNA (1)...(19): siRNA sense strand
caaagaaauugcagaacca

SEQ ID NO: 1213682 - RNA, 19 nt, Homo sapiens
  misc_RNA (1)...(19): siRNA sense strand
gcaacaggaccauguguga

SEQ ID NO: 1213683 - RNA, 19 nt, Homo sapiens
  misc_RNA (1)...(19): siRNA sense strand
ggucagaggcauacaguga

SEQ ID NO: 1213684 - RNA, 19 nt, Homo sapiens
  misc_RNA (1)...(19): siRNA sense strand
gaaauugcagaaccagaaa

SEQ ID NO: 1213685 - RNA, 19 nt, Homo sapiens
  misc_RNA (1)...(19): siRNA sense strand
gcaaagugacagccucaaa

SEQ ID NO: 1213686 - RNA, 19 nt, Homo sapiens
  misc_RNA (1)...(19): siRNA sense strand
ugagaaagaugaaggaaaa

SEQ ID NO: 1213687 - RNA, 19 nt, Homo sapiens
  misc_RNA (1)...(19): siRNA sense strand
ugacucaucugacaccaau

SEQ ID NO: 1213688 - RNA, 19 nt, Homo sapiens
  misc_RNA (1)...(19): siRNA sense strand
gcggagauccuuugcagaa

SEQ ID NO: 1213689 - RNA, 19 nt, Homo sapiens
  misc_RNA (1)...(19): siRNA sense strand
gaaagucuggguuggcauu

SEQ ID NO: 1213690 - RNA, 19 nt, Homo sapiens
  misc_RNA (1)...(19): siRNA sense strand
gaagaucuugggaauaugu

SEQ ID NO: 1213691 - RNA, 19 nt, Homo sapiens
  misc_RNA (1)...(19): siRNA sense strand
gcaugaagccagcaggaaa

SEQ ID NO: 1213692 - RNA, 19 nt, Homo sapiens
  misc_RNA (1)...(19): siRNA sense strand
gaagcgaaugucucucuaa

SEQ ID NO: 1213693 - RNA, 19 nt, Homo sapiens
  misc_RNA (1)...(19): siRNA sense strand
uaagaaggagggaaagaaa

SEQ ID NO: 1213694 - RNA, 19 nt, Homo sapiens
  misc_RNA (1)...(19): siRNA sense strand
ccaccgaguuuaccaaagu

SEQ ID NO: 1213695 - RNA, 19 nt, Homo sapiens
  misc_RNA (1)...(19): siRNA sense strand
gcaagaaacagaggucaga

SEQ ID NO: 1213696 - RNA, 19 nt, Homo sapiens
  misc_RNA (1)...(19): siRNA sense strand
aaacauacucuuuggagaa

SEQ ID NO: 1213697 - RNA, 19 nt, Homo sapiens
  misc_RNA (1)...(19): siRNA sense strand
agugauagcuauucuuugu

SEQ ID NO: 1213698 - RNA, 19 nt, Homo sapiens
  misc_RNA (1)...(19): siRNA sense strand
aaacauaucacacguacau

SEQ ID NO: 1213699 - RNA, 19 nt, Homo sapiens
  misc_RNA (1)...(19): siRNA sense strand
gaacuuuggccuacguuuc

SEQ ID NO: 1213700 - RNA, 19 nt, Homo sapiens
  misc_RNA (1)...(19): siRNA sense strand
gggaauaugugggaaugug

SEQ ID NO: 1213701 - RNA, 19 nt, Homo sapiens
  misc_RNA (1)...(19): siRNA sense strand
gaaaaguaccccaaagaaa

SEQ ID NO: 1213702 - RNA, 19 nt, Homo sapiens
  misc_RNA (1)...(19): siRNA sense strand
acauaucacacguacauua

SEQ ID NO: 1213703 - RNA, 19 nt, Homo sapiens
  misc_RNA (1)...(19): siRNA sense strand
cauaucacacguacauuaa

SEQ ID NO: 1213704 - RNA, 19 nt, Homo sapiens
  misc_RNA (1)...(19): siRNA sense strand
gcacggccauccgguugaa

SEQ ID NO: 1213705 - RNA, 19 nt, Homo sapiens
  misc_RNA (1)...(19): siRNA sense strand
auuagaagauggagagauu

SEQ ID NO: 1213706 - RNA, 19 nt, Homo sapiens
  misc_RNA (1)...(19): siRNA sense strand
gaagauggagagauuugug

SEQ ID NO: 1213707 - RNA, 19 nt, Homo sapiens
  misc_RNA (1)...(19): siRNA sense strand
gacauuauccugccacauc

SEQ ID NO: 1213708 - RNA, 19 nt, Homo sapiens
  misc_RNA (1)...(19): siRNA sense strand
gggcaucauucacgccuau

SEQ ID NO: 1213709 - RNA, 19 nt, Homo sapiens
  misc_RNA (1)...(19): siRNA sense strand
caaagugacagccucaaau

SEQ ID NO: 1213710 - RNA, 19 nt, Homo sapiens
  misc_RNA (1)...(19): siRNA sense strand
gcaaaugccaccuugacau

SEQ ID NO: 1213711 - RNA, 19 nt, Homo sapiens
  misc_RNA (1)...(19): siRNA sense strand
gcgacccugugcaagguua

SEQ ID NO: 1213712 - RNA, 19 nt, Homo sapiens
  misc_RNA (1)...(19): siRNA sense strand
gaggagugcauuaagaaga

SEQ ID NO: 1213713 - RNA, 19 nt, Homo sapiens
  misc_RNA (1)...(19): siRNA sense strand
caaaugccaccuugacaug

SEQ ID NO: 1213714 - RNA, 19 nt, Homo sapiens
  misc_RNA (1)...(19): siRNA sense strand
gcccagaggagcaaaguga

SEQ ID NO: 1213715 - RNA, 19 nt, Homo sapiens
  misc_RNA (1)...(19): siRNA sense strand
cuuagagucuugugaugaa

SEQ ID NO: 1213716 - RNA, 19 nt, Homo sapiens
  misc_RNA (1)...(19): siRNA sense strand
cagcaggcauggaucuuuc

SEQ ID NO: 1213717 - RNA, 19 nt, Homo sapiens
  misc_RNA (1)...(19): siRNA sense strand
ggauaucaguguaugucau

SEQ ID NO: 1213718 - RNA, 19 nt, Homo sapiens
  misc_RNA (1)...(19): siRNA sense strand
ggcagucaauggaacuuug

SEQ ID NO: 1213719 - RNA, 19 nt, Homo sapiens
  misc_RNA (1)...(19): siRNA sense strand
cagaagacccagauacugu

SEQ ID NO: 1213720 - RNA, 19 nt, Homo sapiens
  misc_RNA (1)...(19): siRNA sense strand
ugauugccauguuuaaugu

SEQ ID NO: 1213721 - RNA, 19 nt, Homo sapiens
  misc_RNA (1)...(19): siRNA sense strand
caaaagauuucgaguccuu

SEQ ID NO: 1213722 - RNA, 19 nt, Homo sapiens
  misc_RNA (1)...(19): siRNA sense strand
caggaaaugagaaagauga

SEQ ID NO: 1213723 - RNA, 19 nt, Homo sapiens
  misc_RNA (1)...(19): siRNA sense strand
gaggauugcaguucaagga

SEQ ID NO: 1213724 - RNA, 19 nt, Homo sapiens
  misc_RNA (1)...(19): siRNA sense strand
ccaaagguaucagcacaca

SEQ ID NO: 1213725 - RNA, 19 nt, Homo sapiens
  misc_RNA (1)...(19): siRNA sense strand
uuacaucacccaaccagaa

SEQ ID NO: 1213726 - RNA, 19 nt, Homo sapiens
  misc_RNA (1)...(19): siRNA sense strand
caagcgaguucagacaaug

SEQ ID NO: 1213727 - RNA, 19 nt, Homo sapiens
  misc_RNA (1)...(19): siRNA sense strand
ggacugugcauagcccuuu

SEQ ID NO: 1213728 - RNA, 19 nt, Homo sapiens
  misc_RNA (1)...(19): siRNA sense strand
caccaaaggcuucgucuuc

SEQ ID NO: 1213729 - RNA, 19 nt, Homo sapiens
  misc_RNA (1)...(19): siRNA sense strand
guaccuccuuucucucuuc

SEQ ID NO: 1213730 - RNA, 19 nt, Homo sapiens
  misc_RNA (1)...(19): siRNA sense strand
ggaaagaaaauuacuggaa

SEQ ID NO: 1213731 - RNA, 19 nt, Homo sapiens
  misc_RNA (1)...(19): siRNA sense strand
gcgaggugcucaauauacu

SEQ ID NO: 1213732 - RNA, 19 nt, Homo sapiens
  misc_RNA (1)...(19): siRNA sense strand
uaccaacacuauccaagau

SEQ ID NO: 1213733 - RNA, 19 nt, Homo sapiens
  misc_RNA (1)...(19): siRNA sense strand
ccuuugggaugaagaggua

SEQ ID NO: 1213734 - RNA, 19 nt, Homo sapiens
  misc_RNA (1)...(19): siRNA sense strand
uaagcuuuguggugagaaa

SEQ ID NO: 1213735 - RNA, 19 nt, Homo sapiens
  misc_RNA (1)...(19): siRNA sense strand
ucagaggcauacagugaga

SEQ ID NO: 1213736 - RNA, 19 nt, Homo sapiens
  misc_RNA (1)...(19): siRNA sense strand
ggaaaaguaccccaaagaa

SEQ ID NO: 1213737 - RNA, 19 nt, Homo sapiens
  misc_RNA (1)...(19): siRNA sense strand
gaagccagcaggaaaagua

SEQ ID NO: 1213738 - RNA, 19 nt, Homo sapiens
  misc_RNA (1)...(19): siRNA sense strand
ccagauacugucuugcuuu

SEQ ID NO: 1213739 - RNA, 19 nt, Homo sapiens
  misc_RNA (1)...(19): siRNA sense strand
gauagcuauucuuuguuug

SEQ ID NO: 1213740 - RNA, 19 nt, Homo sapiens
  misc_RNA (1)...(19): siRNA sense strand
cugaacaccuuuacaaugc

SEQ ID NO: 1213741 - RNA, 19 nt, Homo sapiens
  misc_RNA (1)...(19): siRNA sense strand
gccaacauccugugcauca

SEQ ID NO: 1213742 - RNA, 19 nt, Homo sapiens
  misc_RNA (1)...(19): siRNA sense strand
gagagagggcgcuaugcaa

SEQ ID NO: 1213743 - RNA, 19 nt, Homo sapiens
  misc_RNA (1)...(19): siRNA sense strand
ggagagagggcgcuaugca

SEQ ID NO: 1213744 - RNA, 19 nt, Homo sapiens
  misc_RNA (1)...(19): siRNA sense strand
gaacccacaaggaguuaau

SEQ ID NO: 1213745 - RNA, 19 nt, Homo sapiens
  misc_RNA (1)...(19): siRNA sense strand
cagcuacaguucuuagagu

SEQ ID NO: 1213746 - RNA, 19 nt, Homo sapiens
  misc_RNA (1)...(19): siRNA sense strand
ggacaucguggccaacauc

SEQ ID NO: 1213747 - RNA, 19 nt, Homo sapiens
  misc_RNA (1)...(19): siRNA sense strand
ugaagcgaaugucucucua

SEQ ID NO: 1213748 - RNA, 19 nt, Homo sapiens
  misc_RNA (1)...(19): siRNA sense strand
agaaauugcagaaccagaa

SEQ ID NO: 1213749 - RNA, 19 nt, Homo sapiens
  misc_RNA (1)...(19): siRNA sense strand
uccaggagcucaagaaggu

SEQ ID NO: 1213750 - RNA, 19 nt, Homo sapiens
  misc_RNA (1)...(19): siRNA sense strand
gauggagagauuugugaaa

SEQ ID NO: 1213751 - RNA, 19 nt, Homo sapiens
  misc_RNA (1)...(19): siRNA sense strand
ggaagaucuugggaauaug

SEQ ID NO: 1213752 - RNA, 19 nt, Homo sapiens
  misc_RNA (1)...(19): siRNA sense strand
uuccgaaggucagcaauuu

SEQ ID NO: 1213753 - RNA, 19 nt, Homo sapiens
  misc_RNA (1)...(19): siRNA sense strand
gaggagagagggcgcuaug

SEQ ID NO: 1213754 - RNA, 19 nt, Homo sapiens
  misc_RNA (1)...(19): siRNA sense strand
gugauugccauguuuaaug

SEQ ID NO: 1213755 - RNA, 19 nt, Homo sapiens
  misc_RNA (1)...(19): siRNA sense strand
gacaaugaaugaguuucug

SEQ ID NO: 1213756 - RNA, 19 nt, Homo sapiens
  misc_RNA (1)...(19): siRNA sense strand
gcaaggguggguccugaga

SEQ ID NO: 1213757 - RNA, 19 nt, Homo sapiens
  misc_RNA (1)...(19): siRNA sense strand
aaaguaugaucaccaaagg

SEQ ID NO: 1213758 - RNA, 19 nt, Homo sapiens
  misc_RNA (1)...(19): siRNA sense strand
aacauacucuuuggagaaa

SEQ ID NO: 1213759 - RNA, 19 nt, Homo sapiens
  misc_RNA (1)...(19): siRNA sense strand
gacaagcgaguucagacaa

SEQ ID NO: 1213760 - RNA, 19 nt, Homo sapiens
  misc_RNA (1)...(19): siRNA sense strand
aguaugaucaccaaaggua

SEQ ID NO: 1213761 - RNA, 19 nt, Homo sapiens
  misc_RNA (1)...(19): siRNA sense strand
gagaaaacauacucuuugg

SEQ ID NO: 1213762 - RNA, 19 nt, Homo sapiens
  misc_RNA (1)...(19): siRNA sense strand
ccuugcagcucuccuagga

SEQ ID NO: 1213763 - RNA, 19 nt, Homo sapiens
  misc_RNA (1)...(19): siRNA sense strand
cauaagcuuuguggugaga

SEQ ID NO: 1213764 - RNA, 19 nt, Homo sapiens
  misc_RNA (1)...(19): siRNA sense strand
agagagggcgcuaugcaaa

SEQ ID NO: 1213765 - RNA, 19 nt, Homo sapiens
  misc_RNA (1)...(19): siRNA sense strand
gaaagaugaaggaaaagaa

SEQ ID NO: 1213766 - RNA, 19 nt, Homo sapiens
  misc_RNA (1)...(19): siRNA sense strand
ucaaugagauggaggaguu

SEQ ID NO: 1213767 - RNA, 19 nt, Homo sapiens
  misc_RNA (1)...(19): siRNA sense strand
ugaacuaccuacacaauga

SEQ ID NO: 1213768 - RNA, 19 nt, Homo sapiens
  misc_RNA (1)...(19): siRNA sense strand
ccacaccucugccuaguga

SEQ ID NO: 1213769 - RNA, 19 nt, Homo sapiens
  misc_RNA (1)...(19): siRNA sense strand
gcacauguuugaugaccuu

SEQ ID NO: 1213770 - RNA, 19 nt, Homo sapiens
  misc_RNA (1)...(19): siRNA sense strand
ggaccgcgguguucgacua

SEQ ID NO: 1213771 - RNA, 19 nt, Homo sapiens
  misc_RNA (1)...(19): siRNA sense strand
caacauaauugcccuuagg

SEQ ID NO: 1213772 - RNA, 19 nt, Homo sapiens
  misc_RNA (1)...(19): siRNA sense strand
aaacaguggucaucaagug

SEQ ID NO: 1213773 - RNA, 19 nt, Homo sapiens
  misc_RNA (1)...(19): siRNA sense strand
gcacaagaccaccaagaug

SEQ ID NO: 1213774 - RNA, 19 nt, Homo sapiens
  misc_RNA (1)...(19): siRNA sense strand
gcgaggagguggcagucaa

SEQ ID NO: 1213775 - RNA, 19 nt, Homo sapiens
  misc_RNA (1)...(19): siRNA sense strand
ccacacugcuggacaugga

SEQ ID NO: 1213776 - RNA, 19 nt, Homo sapiens
  misc_RNA (1)...(19): siRNA sense strand
gcucgacggccucuucuuu

SEQ ID NO: 1213777 - RNA, 19 nt, Homo sapiens
  misc_RNA (1)...(19): siRNA sense strand
gcagugaugucuggagcuu

SEQ ID NO: 1213778 - RNA, 19 nt, Homo sapiens
  misc_RNA (1)...(19): siRNA sense strand
ggagauucagcacauguuu

SEQ ID NO: 1213779 - RNA, 19 nt, Homo sapiens
  misc_RNA (1)...(19): siRNA sense strand
gagaaggacccggcaguga

SEQ ID NO: 1213780 - RNA, 19 nt, Homo sapiens
  misc_RNA (1)...(19): siRNA sense strand
gcuccacccugcagaagga

SEQ ID NO: 1213781 - RNA, 19 nt, Homo sapiens
  misc_RNA (1)...(19): siRNA sense strand
ggcaugaacuaccuacaca

SEQ ID NO: 1213782 - RNA, 19 nt, Homo sapiens
  misc_RNA (1)...(19): siRNA sense strand
cacaagaccaccaagauga

SEQ ID NO: 1213783 - RNA, 19 nt, Homo sapiens
  misc_RNA (1)...(19): siRNA sense strand
acuggaagcuggagauuca

SEQ ID NO: 1213784 - RNA, 19 nt, Homo sapiens
  misc_RNA (1)...(19): siRNA sense strand
gaccucaaguccaucaaca

SEQ ID NO: 1213785 - RNA, 19 nt, Homo sapiens
  misc_RNA (1)...(19): siRNA sense strand
ccucuggcuuugagcauaa

SEQ ID NO: 1213786 - RNA, 19 nt, Homo sapiens
  misc_RNA (1)...(19): siRNA sense strand
gaaggcggcagccacauca

SEQ ID NO: 1213787 - RNA, 19 nt, Homo sapiens
  misc_RNA (1)...(19): siRNA sense strand
gcaaacaguggucaucaag

SEQ ID NO: 1213788 - RNA, 19 nt, Homo sapiens
  misc_RNA (1)...(19): siRNA sense strand
ccuggaaacuggucuccuu

SEQ ID NO: 1213789 - RNA, 19 nt, Homo sapiens
  misc_RNA (1)...(19): siRNA sense strand
gcagacacggugcucaaga

SEQ ID NO: 1213790 - RNA, 19 nt, Homo sapiens
  misc_RNA (1)...(19): siRNA sense strand
gaaggacccggcagugaca

SEQ ID NO: 1213791 - RNA, 19 nt, Homo sapiens
  misc_RNA (1)...(19): siRNA sense strand
cagcagcaguggaggaagu

SEQ ID NO: 1213792 - RNA, 19 nt, Homo sapiens
  misc_RNA (1)...(19): siRNA sense strand
cagacacggugcucaagau

SEQ ID NO: 1213793 - RNA, 19 nt, Homo sapiens
  misc_RNA (1)...(19): siRNA sense strand
gaacuaccuacacaaugau

SEQ ID NO: 1213794 - RNA, 19 nt, Homo sapiens
  misc_RNA (1)...(19): siRNA sense strand
guucacugcugcgcucuga

SEQ ID NO: 1213795 - RNA, 19 nt, Homo sapiens
  misc_RNA (1)...(19): siRNA sense strand
cguauggcguggcuaugaa

SEQ ID NO: 1213796 - RNA, 19 nt, Homo sapiens
  misc_RNA (1)...(19): siRNA sense strand
gagauucagcacauguuug

SEQ ID NO: 1213797 - RNA, 19 nt, Homo sapiens
  misc_RNA (1)...(19): siRNA sense strand
ggaggaagugggacaugga

SEQ ID NO: 1213798 - RNA, 19 nt, Homo sapiens
  misc_RNA (1)...(19): siRNA sense strand
gaagcaaacaguggucauc

SEQ ID NO: 1213799 - RNA, 19 nt, Homo sapiens
  misc_RNA (1)...(19): siRNA sense strand
agucagcccuguuccagau

SEQ ID NO: 1213800 - RNA, 19 nt, Homo sapiens
  misc_RNA (1)...(19): siRNA sense strand
ccaccacccugaccuuugc

SEQ ID NO: 1213801 - RNA, 19 nt, Homo sapiens
  misc_RNA (1)...(19): siRNA sense strand
gcguauggcguggcuauga

SEQ ID NO: 1213802 - RNA, 19 nt, Homo sapiens
  misc_RNA (1)...(19): siRNA sense strand
agauucagcacauguuuga

SEQ ID NO: 1213803 - RNA, 19 nt, Homo sapiens
  misc_RNA (1)...(19): siRNA sense strand
caugaacuaccuacacaau

SEQ ID NO: 1213804 - RNA, 19 nt, Homo sapiens
  misc_RNA (1)...(19): siRNA sense strand
guccaggccucuccaacuc

SEQ ID NO: 1213805 - RNA, 19 nt, Homo sapiens
  misc_RNA (1)...(19): siRNA sense strand
ggcuugaagucaucgaaca

SEQ ID NO: 1213806 - RNA, 19 nt, Homo sapiens
  misc_RNA (1)...(19): siRNA sense strand
uccaggugcuuucccaaga

SEQ ID NO: 1213807 - RNA, 19 nt, Homo sapiens
  misc_RNA (1)...(19): siRNA sense strand
ccaacauaauugcccuuag

SEQ ID NO: 1213808 - RNA, 19 nt, Homo sapiens
  misc_RNA (1)...(19): siRNA sense strand
ggcacaagaccaccaagau

SEQ ID NO: 1213809 - RNA, 19 nt, Homo sapiens
  misc_RNA (1)...(19): siRNA sense strand
gaggagaggagaggcugaa

SEQ ID NO: 1213810 - RNA, 19 nt, Homo sapiens
  misc_RNA (1)...(19): siRNA sense strand
uccacucgcugcaggaaga

SEQ ID NO: 1213811 - RNA, 19 nt, Homo sapiens
  misc_RNA (1)...(19): siRNA sense strand
gcgcaagggcaacuucaag

SEQ ID NO: 1213812 - RNA, 19 nt, Homo sapiens
  misc_RNA (1)...(19): siRNA sense strand
uucagcacauguuugauga

SEQ ID NO: 1213813 - RNA, 19 nt, Homo sapiens
  misc_RNA (1)...(19): siRNA sense strand
uggcagaacgugagaugga

SEQ ID NO: 1213814 - RNA, 19 nt, Homo sapiens
  misc_RNA (1)...(19): siRNA sense strand
gcaugaacuaccuacacaa

SEQ ID NO: 1213815 - RNA, 19 nt, Homo sapiens
  misc_RNA (1)...(19): siRNA sense strand
ugaagucaucgaacaguca

SEQ ID NO: 1213816 - RNA, 19 nt, Homo sapiens
  misc_RNA (1)...(19): siRNA sense strand
ccucaaguccaucaacauc

SEQ ID NO: 1213817 - RNA, 19 nt, Homo sapiens
  misc_RNA (1)...(19): siRNA sense strand
gcagcuagaggagaucauc

SEQ ID NO: 1213818 - RNA, 19 nt, Homo sapiens
  misc_RNA (1)...(19): siRNA sense strand
uugaugaccuucggaccaa

SEQ ID NO: 1213819 - RNA, 19 nt, Homo sapiens
  misc_RNA (1)...(19): siRNA sense strand
gcuggcagaacgugagaug

SEQ ID NO: 1213820 - RNA, 19 nt, Homo sapiens
  misc_RNA (1)...(19): siRNA sense strand
cucgugaccuucuggacuu

SEQ ID NO: 1213821 - RNA, 19 nt, Homo sapiens
  misc_RNA (1)...(19): siRNA sense strand
gaucgcguccaggugcuuu

SEQ ID NO: 1213822 - RNA, 19 nt, Homo sapiens
  misc_RNA (1)...(19): siRNA sense strand
caaacaguggucaucaagu

SEQ ID NO: 1213823 - RNA, 19 nt, Homo sapiens
  misc_RNA (1)...(19): siRNA sense strand
caacugggcugugcagauu

SEQ ID NO: 1213824 - RNA, 19 nt, Homo sapiens
  misc_RNA (1)...(19): siRNA sense strand
gcagugacgucuggaguuu

SEQ ID NO: 1213825 - RNA, 19 nt, Homo sapiens
  misc_RNA (1)...(19): siRNA sense strand
gcacagguccuacgggaaa

SEQ ID NO: 1213826 - RNA, 19 nt, Homo sapiens
  misc_RNA (1)...(19): siRNA sense strand
caugguaccuggauucaga

SEQ ID NO: 1213827 - RNA, 19 nt, Homo sapiens
  misc_RNA (1)...(19): siRNA sense strand
gaucggcauuggaggcuuu

SEQ ID NO: 1213828 - RNA, 19 nt, Homo sapiens
  misc_RNA (1)...(19): siRNA sense strand
gaucucaaguccaacaaca

SEQ ID NO: 1213829 - RNA, 19 nt, Homo sapiens
  misc_RNA (1)...(19): siRNA sense strand
caacaucauugcccucaag

SEQ ID NO: 1213830 - RNA, 19 nt, Homo sapiens
  misc_RNA (1)...(19): siRNA sense strand
uggcguagcuguuaacaag

SEQ ID NO: 1213831 - RNA, 19 nt, Homo sapiens
  misc_RNA (1)...(19): siRNA sense strand
gcacaaaaccacacaaaug

SEQ ID NO: 1213832 - RNA, 19 nt, Homo sapiens
  misc_RNA (1)...(19): siRNA sense strand
gcacaagacccugaagauc

SEQ ID NO: 1213833 - RNA, 19 nt, Homo sapiens
  misc_RNA (1)...(19): siRNA sense strand
gcagggcacagaccaaaga

SEQ ID NO: 1213834 - RNA, 19 nt, Homo sapiens
  misc_RNA (1)...(19): siRNA sense strand
cacaagacccugaagauca

SEQ ID NO: 1213835 - RNA, 19 nt, Homo sapiens
  misc_RNA (1)...(19): siRNA sense strand
ccucuagggucauggaaug

SEQ ID NO: 1213836 - RNA, 19 nt, Homo sapiens
  misc_RNA (1)...(19): siRNA sense strand
gcaugccacucgacuucaa

SEQ ID NO: 1213837 - RNA, 19 nt, Homo sapiens
  misc_RNA (1)...(19): siRNA sense strand
cuggauggcuccugagguu

SEQ ID NO: 1213838 - RNA, 19 nt, Homo sapiens
  misc_RNA (1)...(19): siRNA sense strand
gagcacaagacccugaaga

SEQ ID NO: 1213839 - RNA, 19 nt, Homo sapiens
  misc_RNA (1)...(19): siRNA sense strand
ggauggcuccugagguuau

SEQ ID NO: 1213840 - RNA, 19 nt, Homo sapiens
  misc_RNA (1)...(19): siRNA sense strand
gagcugcgagccaaggaaa

SEQ ID NO: 1213841 - RNA, 19 nt, Homo sapiens
  misc_RNA (1)...(19): siRNA sense strand
ccuauggcguagcuguuaa

SEQ ID NO: 1213842 - RNA, 19 nt, Homo sapiens
  misc_RNA (1)...(19): siRNA sense strand
guaccuggauucagaugac

SEQ ID NO: 1213843 - RNA, 19 nt, Homo sapiens
  misc_RNA (1)...(19): siRNA sense strand
cuggaggacucaagcaaug

SEQ ID NO: 1213844 - RNA, 19 nt, Homo sapiens
  misc_RNA (1)...(19): siRNA sense strand
guuccgagccauccaguug

SEQ ID NO: 1213845 - RNA, 19 nt, Homo sapiens
  misc_RNA (1)...(19): siRNA sense strand
ucucaaguccaacaacauu

SEQ ID NO: 1213846 - RNA, 19 nt, Homo sapiens
  misc_RNA (1)...(19): siRNA sense strand
ccacaugguaccuggauuc

SEQ ID NO: 1213847 - RNA, 19 nt, Homo sapiens
  misc_RNA (1)...(19): siRNA sense strand
caucuucccguccaacuau

SEQ ID NO: 1213848 - RNA, 19 nt, Homo sapiens
  misc_RNA (1)...(19): siRNA sense strand
gccuauggcguagcuguua

SEQ ID NO: 1213849 - RNA, 19 nt, Homo sapiens
  misc_RNA (1)...(19): siRNA sense strand
gugacgacauggagcacaa

SEQ ID NO: 1213850 - RNA, 19 nt, Homo sapiens
  misc_RNA (1)...(19): siRNA sense strand
cagcaugccacucgacuuc

SEQ ID NO: 1213851 - RNA, 19 nt, Homo sapiens
  misc_RNA (1)...(19): siRNA sense strand
gggcacagaccaaagacau

SEQ ID NO: 1213852 - RNA, 19 nt, Homo sapiens
  misc_RNA (1)...(19): siRNA sense strand
gcauugaucccuggagcuu

SEQ ID NO: 1213853 - RNA, 19 nt, Homo sapiens
  misc_RNA (1)...(19): siRNA sense strand
gcaucuucccguccaacua

SEQ ID NO: 1213854 - RNA, 19 nt, Homo sapiens
  misc_RNA (1)...(19): siRNA sense strand
cgagcacccuggaccuugu

SEQ ID NO: 1213855 - RNA, 19 nt, Homo sapiens
  misc_RNA (1)...(19): siRNA sense strand
cauugagagugacgacaug

SEQ ID NO: 1213856 - RNA, 19 nt, Homo sapiens
  misc_RNA (1)...(19): siRNA sense strand
cacaaaaccacacaaauga

SEQ ID NO: 1213857 - RNA, 19 nt, Homo sapiens
  misc_RNA (1)...(19): siRNA sense strand
cuccaaaggcagcggguua

SEQ ID NO: 1213858 - RNA, 19 nt, Homo sapiens
  misc_RNA (1)...(19): siRNA sense strand
ggaggacucaagcaaugga

SEQ ID NO: 1213859 - RNA, 19 nt, Homo sapiens
  misc_RNA (1)...(19): siRNA sense strand
ggccuugaccggaggagaa

SEQ ID NO: 1213860 - RNA, 19 nt, Homo sapiens
  misc_RNA (1)...(19): siRNA sense strand
agugggagcuagagguguu

SEQ ID NO: 1213861 - RNA, 19 nt, Homo sapiens
  misc_RNA (1)...(19): siRNA sense strand
gagcccuucgcacagcuua

SEQ ID NO: 1213862 - RNA, 19 nt, Homo sapiens
  misc_RNA (1)...(19): siRNA sense strand
auugaucccuggagcuuug

SEQ ID NO: 1213863 - RNA, 19 nt, Homo sapiens
  misc_RNA (1)...(19): siRNA sense strand
cccaugugcuggucaacug

SEQ ID NO: 1213864 - RNA, 19 nt, Homo sapiens
  misc_RNA (1)...(19): siRNA sense strand
ggagaaggucccgcaugga

SEQ ID NO: 1213865 - RNA, 19 nt, Homo sapiens
  misc_RNA (1)...(19): siRNA sense strand
acaagacccugaagaucac

SEQ ID NO: 1213866 - RNA, 19 nt, Homo sapiens
  misc_RNA (1)...(19): siRNA sense strand
ggaggugaucggcauugga

SEQ ID NO: 1213867 - RNA, 19 nt, Homo sapiens
  misc_RNA (1)...(19): siRNA sense strand
cauccaccgugaucucaag

SEQ ID NO: 1213868 - RNA, 19 nt, Homo sapiens
  misc_RNA (1)...(19): siRNA sense strand
accgugaucucaaguccaa

SEQ ID NO: 1213869 - RNA, 19 nt, Homo sapiens
  misc_RNA (1)...(19): siRNA sense strand
ccccagcacucaaugguaa

SEQ ID NO: 1213870 - RNA, 19 nt, Homo sapiens
  misc_RNA (1)...(19): siRNA sense strand
cagaaugggaggagaaggu

SEQ ID NO: 1213871 - RNA, 19 nt, Homo sapiens
  misc_RNA (1)...(19): siRNA sense strand
ccaacaucauugcccucaa

SEQ ID NO: 1213872 - RNA, 19 nt, Homo sapiens
  misc_RNA (1)...(19): siRNA sense strand
ggcagugacgucuggaguu

SEQ ID NO: 1213873 - RNA, 19 nt, Homo sapiens
  misc_RNA (1)...(19): siRNA sense strand
gaggaggugaucggcauug

SEQ ID NO: 1213874 - RNA, 19 nt, Homo sapiens
  misc_RNA (1)...(19): siRNA sense strand
uggacgaagccacauggua

SEQ ID NO: 1213875 - RNA, 19 nt, Homo sapiens
  misc_RNA (1)...(19): siRNA sense strand
ggaggaggugaucggcauu

SEQ ID NO: 1213876 - RNA, 19 nt, Homo sapiens
  misc_RNA (1)...(19): siRNA sense strand
ggaaaugcuugacaucaug

SEQ ID NO: 1213877 - RNA, 19 nt, Homo sapiens
  misc_RNA (1)...(19): siRNA sense strand
cagcguggacgaugaauuu

SEQ ID NO: 1213878 - RNA, 19 nt, Homo sapiens
  misc_RNA (1)...(19): siRNA sense strand
gaagauggacagaaacaag

SEQ ID NO: 1213879 - RNA, 19 nt, Homo sapiens
  misc_RNA (1)...(19): siRNA sense strand
caugauggcucggucaguu

SEQ ID NO: 1213880 - RNA, 19 nt, Homo sapiens
  misc_RNA (1)...(19): siRNA sense strand
gggaacacguggagagcuu

SEQ ID NO: 1213881 - RNA, 19 nt, Homo sapiens
  misc_RNA (1)...(19): siRNA sense strand
gaaaugcuugacaucauga

SEQ ID NO: 1213882 - RNA, 19 nt, Homo sapiens
  misc_RNA (1)...(19): siRNA sense strand
ggaauucauugagucuugu

SEQ ID NO: 1213883 - RNA, 19 nt, Homo sapiens
  misc_RNA (1)...(19): siRNA sense strand
cguggacgaugaauuugaa

SEQ ID NO: 1213884 - RNA, 19 nt, Homo sapiens
  misc_RNA (1)...(19): siRNA sense strand
gaccauugaggaauucauu

SEQ ID NO: 1213885 - RNA, 19 nt, Homo sapiens
  misc_RNA (1)...(19): siRNA sense strand
gaaugucccagcggaauug

SEQ ID NO: 1213886 - RNA, 19 nt, Homo sapiens
  misc_RNA (1)...(19): siRNA sense strand
gaggaaaugcuugacauca

SEQ ID NO: 1213887 - RNA, 19 nt, Homo sapiens
  misc_RNA (1)...(19): siRNA sense strand
gauuuacucccaguucuuu

SEQ ID NO: 1213888 - RNA, 19 nt, Homo sapiens
  misc_RNA (1)...(19): siRNA sense strand
gcagauuuacucccaguuc

SEQ ID NO: 1213889 - RNA, 19 nt, Homo sapiens
  misc_RNA (1)...(19): siRNA sense strand
ucaaugaggagaacuucaa

SEQ ID NO: 1213890 - RNA, 19 nt, Homo sapiens
  misc_RNA (1)...(19): siRNA sense strand
gagaacuucaagcagauuu

SEQ ID NO: 1213891 - RNA, 19 nt, Homo sapiens
  misc_RNA (1)...(19): siRNA sense strand
ugaaguccaucuaugacau

SEQ ID NO: 1213892 - RNA, 19 nt, Homo sapiens
  misc_RNA (1)...(19): siRNA sense strand
caucaugaaguccaucuau

SEQ ID NO: 1213893 - RNA, 19 nt, Homo sapiens
  misc_RNA (1)...(19): siRNA sense strand
gaaguccaucuaugacaug

SEQ ID NO: 1213894 - RNA, 19 nt, Homo sapiens
  misc_RNA (1)...(19): siRNA sense strand
aggaauucauugagucuug

SEQ ID NO: 1213895 - RNA, 19 nt, Homo sapiens
  misc_RNA (1)...(19): siRNA sense strand
gaacuucaagcagauuuac

SEQ ID NO: 1213896 - RNA, 19 nt, Homo sapiens
  misc_RNA (1)...(19): siRNA sense strand
ccauugaggaauucauuga

SEQ ID NO: 1213897 - RNA, 19 nt, Homo sapiens
  misc_RNA (1)...(19): siRNA sense strand
gcaggagcaaaccaaauuc

SEQ ID NO: 1213898 - RNA, 19 nt, Homo sapiens
  misc_RNA (1)...(19): siRNA sense strand
cagauuuacucccaguucu

SEQ ID NO: 1213899 - RNA, 19 nt, Homo sapiens
  misc_RNA (1)...(19): siRNA sense strand
ggacagaaacaaggauggu

SEQ ID NO: 1213900 - RNA, 19 nt, Homo sapiens
  misc_RNA (1)...(19): siRNA sense strand
aggaaaugcuugacaucau

SEQ ID NO: 1213901 - RNA, 19 nt, Homo sapiens
  misc_RNA (1)...(19): siRNA sense strand
ggagaacuucaagcagauu

SEQ ID NO: 1213902 - RNA, 19 nt, Homo sapiens
  misc_RNA (1)...(19): siRNA sense strand
ugaauuguccaccgugugu

SEQ ID NO: 1213903 - RNA, 19 nt, Homo sapiens
  misc_RNA (1)...(19): siRNA sense strand
cagaagauggacagaaaca

SEQ ID NO: 1213904 - RNA, 19 nt, Homo sapiens
  misc_RNA (1)...(19): siRNA sense strand
ugcaggagcaaaccaaauu

SEQ ID NO: 1213905 - RNA, 19 nt, Homo sapiens
  misc_RNA (1)...(19): siRNA sense strand
ggugaccauugaggaauuc

SEQ ID NO: 1213906 - RNA, 19 nt, Homo sapiens
  misc_RNA (1)...(19): siRNA sense strand
agaacuucaagcagauuua

SEQ ID NO: 1213907 - RNA, 19 nt, Homo sapiens
  misc_RNA (1)...(19): siRNA sense strand
gcguggacgaugaauuuga

SEQ ID NO: 1213908 - RNA, 19 nt, Homo sapiens
  misc_RNA (1)...(19): siRNA sense strand
gagcagcugcaggagcaaa

SEQ ID NO: 1213909 - RNA, 19 nt, Homo sapiens
  misc_RNA (1)...(19): siRNA sense strand
cagcaccuaugccacuuuu

SEQ ID NO: 1213910 - RNA, 19 nt, Homo sapiens
  misc_RNA (1)...(19): siRNA sense strand
ggaaaugcuugacaucaug

SEQ ID NO: 1213911 - RNA, 19 nt, Homo sapiens
  misc_RNA (1)...(19): siRNA sense strand
cagcguggacgaugaauuu

SEQ ID NO: 1213912 - RNA, 19 nt, Homo sapiens
  misc_RNA (1)...(19): siRNA sense strand
gaagauggacagaaacaag

SEQ ID NO: 1213913 - RNA, 19 nt, Homo sapiens
  misc_RNA (1)...(19): siRNA sense strand
caugauggcucggucaguu

SEQ ID NO: 1213914 - RNA, 19 nt, Homo sapiens
  misc_RNA (1)...(19): siRNA sense strand
gggaacacguggagagcuu

SEQ ID NO: 1213915 - RNA, 19 nt, Homo sapiens
  misc_RNA (1)...(19): siRNA sense strand
gaaaugcuugacaucauga

SEQ ID NO: 1213916 - RNA, 19 nt, Homo sapiens
  misc_RNA (1)...(19): siRNA sense strand
ggaauucauugagucuugu

SEQ ID NO: 1213917 - RNA, 19 nt, Homo sapiens
  misc_RNA (1)...(19): siRNA sense strand
cguggacgaugaauuugaa

SEQ ID NO: 1213918 - RNA, 19 nt, Homo sapiens
  misc_RNA (1)...(19): siRNA sense strand
gaccauugaggaauucauu

SEQ ID NO: 1213919 - RNA, 19 nt, Homo sapiens
  misc_RNA (1)...(19): siRNA sense strand
gaaugucccagcggaauug

SEQ ID NO: 1213920 - RNA, 19 nt, Homo sapiens
  misc_RNA (1)...(19): siRNA sense strand
gaggaaaugcuugacauca

SEQ ID NO: 1213921 - RNA, 19 nt, Homo sapiens
  misc_RNA (1)...(19): siRNA sense strand
gauuuacucccaguucuuu

SEQ ID NO: 1213922 - RNA, 19 nt, Homo sapiens
  misc_RNA (1)...(19): siRNA sense strand
gcagauuuacucccaguuc

SEQ ID NO: 1213923 - RNA, 19 nt, Homo sapiens
  misc_RNA (1)...(19): siRNA sense strand
ucaaugaggagaacuucaa

SEQ ID NO: 1213924 - RNA, 19 nt, Homo sapiens
  misc_RNA (1)...(19): siRNA sense strand
gagaacuucaagcagauuu

SEQ ID NO: 1213925 - RNA, 19 nt, Homo sapiens
  misc_RNA (1)...(19): siRNA sense strand
ugaaguccaucuaugacau

SEQ ID NO: 1213926 - RNA, 19 nt, Homo sapiens
  misc_RNA (1)...(19): siRNA sense strand
caucaugaaguccaucuau

SEQ ID NO: 1213927 - RNA, 19 nt, Homo sapiens
  misc_RNA (1)...(19): siRNA sense strand
gaaguccaucuaugacaug

SEQ ID NO: 1213928 - RNA, 19 nt, Homo sapiens
  misc_RNA (1)...(19): siRNA sense strand
aggaauucauugagucuug

SEQ ID NO: 1213929 - RNA, 19 nt, Homo sapiens
  misc_RNA (1)...(19): siRNA sense strand
gaacuucaagcagauuuac

SEQ ID NO: 1213930 - RNA, 19 nt, Homo sapiens
  misc_RNA (1)...(19): siRNA sense strand
ccauugaggaauucauuga

SEQ ID NO: 1213931 - RNA, 19 nt, Homo sapiens
  misc_RNA (1)...(19): siRNA sense strand
gcaggagcaaaccaaauuc

SEQ ID NO: 1213932 - RNA, 19 nt, Homo sapiens
  misc_RNA (1)...(19): siRNA sense strand
cagauuuacucccaguucu

SEQ ID NO: 1213933 - RNA, 19 nt, Homo sapiens
  misc_RNA (1)...(19): siRNA sense strand
ggacagaaacaaggauggu

SEQ ID NO: 1213934 - RNA, 19 nt, Homo sapiens
  misc_RNA (1)...(19): siRNA sense strand
aggaaaugcuugacaucau

SEQ ID NO: 1213935 - RNA, 19 nt, Homo sapiens
  misc_RNA (1)...(19): siRNA sense strand
ggagaacuucaagcagauu

SEQ ID NO: 1213936 - RNA, 19 nt, Homo sapiens
  misc_RNA (1)...(19): siRNA sense strand
ugaauuguccaccgugugu

SEQ ID NO: 1213937 - RNA, 19 nt, Homo sapiens
  misc_RNA (1)...(19): siRNA sense strand
cagaagauggacagaaaca

SEQ ID NO: 1213938 - RNA, 19 nt, Homo sapiens
  misc_RNA (1)...(19): siRNA sense strand
ugcaggagcaaaccaaauu

SEQ ID NO: 1213939 - RNA, 19 nt, Homo sapiens
  misc_RNA (1)...(19): siRNA sense strand
ggugaccauugaggaauuc

SEQ ID NO: 1213940 - RNA, 19 nt, Homo sapiens
  misc_RNA (1)...(19): siRNA sense strand
agaacuucaagcagauuua

SEQ ID NO: 1213941 - RNA, 19 nt, Homo sapiens
  misc_RNA (1)...(19): siRNA sense strand
gcguggacgaugaauuuga

SEQ ID NO: 1213942 - RNA, 19 nt, Homo sapiens
  misc_RNA (1)...(19): siRNA sense strand
gagcagcugcaggagcaaa

SEQ ID NO: 1213943 - RNA, 19 nt, Homo sapiens
  misc_RNA (1)...(19): siRNA sense strand
cagcaccuaugccacuuuu

SEQ ID NO: 1213944 - RNA, 19 nt, Homo sapiens
  misc_RNA (1)...(19): siRNA sense strand
ggaaaugcuugacaucaug

SEQ ID NO: 1213945 - RNA, 19 nt, Homo sapiens
  misc_RNA (1)...(19): siRNA sense strand
cagcguggacgaugaauuu

SEQ ID NO: 1213946 - RNA, 19 nt, Homo sapiens
  misc_RNA (1)...(19): siRNA sense strand
gaagauggacagaaacaag

SEQ ID NO: 1213947 - RNA, 19 nt, Homo sapiens
  misc_RNA (1)...(19): siRNA sense strand
caugauggcucggucaguu

SEQ ID NO: 1213948 - RNA, 19 nt, Homo sapiens
  misc_RNA (1)...(19): siRNA sense strand
gggaacacguggagagcuu

SEQ ID NO: 1213949 - RNA, 19 nt, Homo sapiens
  misc_RNA (1)...(19): siRNA sense strand
gaaaugcuugacaucauga

SEQ ID NO: 1213950 - RNA, 19 nt, Homo sapiens
  misc_RNA (1)...(19): siRNA sense strand
ggaauucauugagucuugu

SEQ ID NO: 1213951 - RNA, 19 nt, Homo sapiens
  misc_RNA (1)...(19): siRNA sense strand
cguggacgaugaauuugaa

SEQ ID NO: 1213952 - RNA, 19 nt, Homo sapiens
  misc_RNA (1)...(19): siRNA sense strand
gaccauugaggaauucauu

SEQ ID NO: 1213953 - RNA, 19 nt, Homo sapiens
  misc_RNA (1)...(19): siRNA sense strand
gaaugucccagcggaauug

SEQ ID NO: 1213954 - RNA, 19 nt, Homo sapiens
  misc_RNA (1)...(19): siRNA sense strand
gaggaaaugcuugacauca

SEQ ID NO: 1213955 - RNA, 19 nt, Homo sapiens
  misc_RNA (1)...(19): siRNA sense strand
gauuuacucccaguucuuu

SEQ ID NO: 1213956 - RNA, 19 nt, Homo sapiens
  misc_RNA (1)...(19): siRNA sense strand
gcagauuuacucccaguuc

SEQ ID NO: 1213957 - RNA, 19 nt, Homo sapiens
  misc_RNA (1)...(19): siRNA sense strand
ucaaugaggagaacuucaa

SEQ ID NO: 1213958 - RNA, 19 nt, Homo sapiens
  misc_RNA (1)...(19): siRNA sense strand
gagaacuucaagcagauuu

SEQ ID NO: 1213959 - RNA, 19 nt, Homo sapiens
  misc_RNA (1)...(19): siRNA sense strand
ugaaguccaucuaugacau

SEQ ID NO: 1213960 - RNA, 19 nt, Homo sapiens
  misc_RNA (1)...(19): siRNA sense strand
caucaugaaguccaucuau

SEQ ID NO: 1213961 - RNA, 19 nt, Homo sapiens
  misc_RNA (1)...(19): siRNA sense strand
gaaguccaucuaugacaug

SEQ ID NO: 1213962 - RNA, 19 nt, Homo sapiens
  misc_RNA (1)...(19): siRNA sense strand
aggaauucauugagucuug

SEQ ID NO: 1213963 - RNA, 19 nt, Homo sapiens
  misc_RNA (1)...(19): siRNA sense strand
gaacuucaagcagauuuac

SEQ ID NO: 1213964 - RNA, 19 nt, Homo sapiens
  misc_RNA (1)...(19): siRNA sense strand
ccauugaggaauucauuga

SEQ ID NO: 1213965 - RNA, 19 nt, Homo sapiens
  misc_RNA (1)...(19): siRNA sense strand
gcaggagcaaaccaaauuc

SEQ ID NO: 1213966 - RNA, 19 nt, Homo sapiens
  misc_RNA (1)...(19): siRNA sense strand
cagauuuacucccaguucu

SEQ ID NO: 1213967 - RNA, 19 nt, Homo sapiens
  misc_RNA (1)...(19): siRNA sense strand
ggacagaaacaaggauggu

SEQ ID NO: 1213968 - RNA, 19 nt, Homo sapiens
  misc_RNA (1)...(19): siRNA sense strand
aggaaaugcuugacaucau

SEQ ID NO: 1213969 - RNA, 19 nt, Homo sapiens
  misc_RNA (1)...(19): siRNA sense strand
ggagaacuucaagcagauu

SEQ ID NO: 1213970 - RNA, 19 nt, Homo sapiens
  misc_RNA (1)...(19): siRNA sense strand
ugaauuguccaccgugugu

SEQ ID NO: 1213971 - RNA, 19 nt, Homo sapiens
  misc_RNA (1)...(19): siRNA sense strand
cagaagauggacagaaaca

SEQ ID NO: 1213972 - RNA, 19 nt, Homo sapiens
  misc_RNA (1)...(19): siRNA sense strand
ugcaggagcaaaccaaauu

SEQ ID NO: 1213973 - RNA, 19 nt, Homo sapiens
  misc_RNA (1)...(19): siRNA sense strand
ggugaccauugaggaauuc

SEQ ID NO: 1213974 - RNA, 19 nt, Homo sapiens
  misc_RNA (1)...(19): siRNA sense strand
agaacuucaagcagauuua

SEQ ID NO: 1213975 - RNA, 19 nt, Homo sapiens
  misc_RNA (1)...(19): siRNA sense strand
gcguggacgaugaauuuga

SEQ ID NO: 1213976 - RNA, 19 nt, Homo sapiens
  misc_RNA (1)...(19): siRNA sense strand
gagcagcugcaggagcaaa

SEQ ID NO: 1213977 - RNA, 19 nt, Homo sapiens
  misc_RNA (1)...(19): siRNA sense strand
cagcaccuaugccacuuuu

SEQ ID NO: 1213978 - RNA, 19 nt, Homo sapiens
  misc_RNA (1)...(19): siRNA sense strand
ggaaaugcuugacaucaug

SEQ ID NO: 1213979 - RNA, 19 nt, Homo sapiens
  misc_RNA (1)...(19): siRNA sense strand
cagcguggacgaugaauuu

SEQ ID NO: 1213980 - RNA, 19 nt, Homo sapiens
  misc_RNA (1)...(19): siRNA sense strand
gaagauggacagaaacaag

SEQ ID NO: 1213981 - RNA, 19 nt, Homo sapiens
  misc_RNA (1)...(19): siRNA sense strand
caugauggcucggucaguu

SEQ ID NO: 1213982 - RNA, 19 nt, Homo sapiens
  misc_RNA (1)...(19): siRNA sense strand
gggaacacguggagagcuu

SEQ ID NO: 1213983 - RNA, 19 nt, Homo sapiens
  misc_RNA (1)...(19): siRNA sense strand
gaaaugcuugacaucauga

SEQ ID NO: 1213984 - RNA, 19 nt, Homo sapiens
  misc_RNA (1)...(19): siRNA sense strand
ggaauucauugagucuugu

SEQ ID NO: 1213985 - RNA, 19 nt, Homo sapiens
  misc_RNA (1)...(19): siRNA sense strand
cguggacgaugaauuugaa

SEQ ID NO: 1213986 - RNA, 19 nt, Homo sapiens
  misc_RNA (1)...(19): siRNA sense strand
gaccauugaggaauucauu

SEQ ID NO: 1213987 - RNA, 19 nt, Homo sapiens
  misc_RNA (1)...(19): siRNA sense strand
gaaugucccagcggaauug

SEQ ID NO: 1213988 - RNA, 19 nt, Homo sapiens
  misc_RNA (1)...(19): siRNA sense strand
gaggaaaugcuugacauca

SEQ ID NO: 1213989 - RNA, 19 nt, Homo sapiens
  misc_RNA (1)...(19): siRNA sense strand
gauuuacucccaguucuuu

SEQ ID NO: 1213990 - RNA, 19 nt, Homo sapiens
  misc_RNA (1)...(19): siRNA sense strand
gcagauuuacucccaguuc

SEQ ID NO: 1213991 - RNA, 19 nt, Homo sapiens
  misc_RNA (1)...(19): siRNA sense strand
ucaaugaggagaacuucaa

SEQ ID NO: 1213992 - RNA, 19 nt, Homo sapiens
  misc_RNA (1)...(19): siRNA sense strand
gagaacuucaagcagauuu

SEQ ID NO: 1213993 - RNA, 19 nt, Homo sapiens
  misc_RNA (1)...(19): siRNA sense strand
ugaaguccaucuaugacau

SEQ ID NO: 1213994 - RNA, 19 nt, Homo sapiens
  misc_RNA (1)...(19): siRNA sense strand
caucaugaaguccaucuau

SEQ ID NO: 1213995 - RNA, 19 nt, Homo sapiens
  misc_RNA (1)...(19): siRNA sense strand
gaaguccaucuaugacaug

SEQ ID NO: 1213996 - RNA, 19 nt, Homo sapiens
  misc_RNA (1)...(19): siRNA sense strand
aggaauucauugagucuug

SEQ ID NO: 1213997 - RNA, 19 nt, Homo sapiens
  misc_RNA (1)...(19): siRNA sense strand
gaacuucaagcagauuuac

SEQ ID NO: 1213998 - RNA, 19 nt, Homo sapiens
  misc_RNA (1)...(19): siRNA sense strand
ccauugaggaauucauuga

SEQ ID NO: 1213999 - RNA, 19 nt, Homo sapiens
  misc_RNA (1)...(19): siRNA sense strand
gcaggagcaaaccaaauuc

SEQ ID NO: 1214000 - RNA, 19 nt, Homo sapiens
  misc_RNA (1)...(19): siRNA sense strand
cagauuuacucccaguucu

SEQ ID NO: 1214001 - RNA, 19 nt, Homo sapiens
  misc_RNA (1)...(19): siRNA sense strand
ggacagaaacaaggauggu

SEQ ID NO: 1214002 - RNA, 19 nt, Homo sapiens
  misc_RNA (1)...(19): siRNA sense strand
aggaaaugcuugacaucau

SEQ ID NO: 1214003 - RNA, 19 nt, Homo sapiens
  misc_RNA (1)...(19): siRNA sense strand
ggagaacuucaagcagauu

SEQ ID NO: 1214004 - RNA, 19 nt, Homo sapiens
  misc_RNA (1)...(19): siRNA sense strand
ugaauuguccaccgugugu

SEQ ID NO: 1214005 - RNA, 19 nt, Homo sapiens
  misc_RNA (1)...(19): siRNA sense strand
cagaagauggacagaaaca

SEQ ID NO: 1214006 - RNA, 19 nt, Homo sapiens
  misc_RNA (1)...(19): siRNA sense strand
ugcaggagcaaaccaaauu

SEQ ID NO: 1214007 - RNA, 19 nt, Homo sapiens
  misc_RNA (1)...(19): siRNA sense strand
ggugaccauugaggaauuc

SEQ ID NO: 1214008 - RNA, 19 nt, Homo sapiens
  misc_RNA (1)...(19): siRNA sense strand
agaacuucaagcagauuua

SEQ ID NO: 1214009 - RNA, 19 nt, Homo sapiens
  misc_RNA (1)...(19): siRNA sense strand
gcguggacgaugaauuuga

SEQ ID NO: 1214010 - RNA, 19 nt, Homo sapiens
  misc_RNA (1)...(19): siRNA sense strand
gagcagcugcaggagcaaa

SEQ ID NO: 1214011 - RNA, 19 nt, Homo sapiens
  misc_RNA (1)...(19): siRNA sense strand
cagcaccuaugccacuuuu

SEQ ID NO: 1214012 - RNA, 19 nt, Homo sapiens
  misc_RNA (1)...(19): siRNA sense strand
ggaaaugcuugacaucaug

SEQ ID NO: 1214013 - RNA, 19 nt, Homo sapiens
  misc_RNA (1)...(19): siRNA sense strand
cagcguggacgaugaauuu

SEQ ID NO: 1214014 - RNA, 19 nt, Homo sapiens
  misc_RNA (1)...(19): siRNA sense strand
gaagauggacagaaacaag

SEQ ID NO: 1214015 - RNA, 19 nt, Homo sapiens
  misc_RNA (1)...(19): siRNA sense strand
caugauggcucggucaguu

SEQ ID NO: 1214016 - RNA, 19 nt, Homo sapiens
  misc_RNA (1)...(19): siRNA sense strand
gggaacacguggagagcuu

SEQ ID NO: 1214017 - RNA, 19 nt, Homo sapiens
  misc_RNA (1)...(19): siRNA sense strand
gaaaugcuugacaucauga

SEQ ID NO: 1214018 - RNA, 19 nt, Homo sapiens
  misc_RNA (1)...(19): siRNA sense strand
ggaauucauugagucuugu

SEQ ID NO: 1214019 - RNA, 19 nt, Homo sapiens
  misc_RNA (1)...(19): siRNA sense strand
cguggacgaugaauuugaa

SEQ ID NO: 1214020 - RNA, 19 nt, Homo sapiens
  misc_RNA (1)...(19): siRNA sense strand
gaccauugaggaauucauu

SEQ ID NO: 1214021 - RNA, 19 nt, Homo sapiens
  misc_RNA (1)...(19): siRNA sense strand
gaaugucccagcggaauug

SEQ ID NO: 1214022 - RNA, 19 nt, Homo sapiens
  misc_RNA (1)...(19): siRNA sense strand
gaggaaaugcuugacauca

SEQ ID NO: 1214023 - RNA, 19 nt, Homo sapiens
  misc_RNA (1)...(19): siRNA sense strand
gauuuacucccaguucuuu

SEQ ID NO: 1214024 - RNA, 19 nt, Homo sapiens
  misc_RNA (1)...(19): siRNA sense strand
gcagauuuacucccaguuc

SEQ ID NO: 1214025 - RNA, 19 nt, Homo sapiens
  misc_RNA (1)...(19): siRNA sense strand
ucaaugaggagaacuucaa

SEQ ID NO: 1214026 - RNA, 19 nt, Homo sapiens
  misc_RNA (1)...(19): siRNA sense strand
gagaacuucaagcagauuu

SEQ ID NO: 1214027 - RNA, 19 nt, Homo sapiens
  misc_RNA (1)...(19): siRNA sense strand
ugaaguccaucuaugacau

SEQ ID NO: 1214028 - RNA, 19 nt, Homo sapiens
  misc_RNA (1)...(19): siRNA sense strand
caucaugaaguccaucuau

SEQ ID NO: 1214029 - RNA, 19 nt, Homo sapiens
  misc_RNA (1)...(19): siRNA sense strand
gaaguccaucuaugacaug

SEQ ID NO: 1214030 - RNA, 19 nt, Homo sapiens
  misc_RNA (1)...(19): siRNA sense strand
aggaauucauugagucuug

SEQ ID NO: 1214031 - RNA, 19 nt, Homo sapiens
  misc_RNA (1)...(19): siRNA sense strand
gaacuucaagcagauuuac

SEQ ID NO: 1214032 - RNA, 19 nt, Homo sapiens
  misc_RNA (1)...(19): siRNA sense strand
ccauugaggaauucauuga

SEQ ID NO: 1214033 - RNA, 19 nt, Homo sapiens
  misc_RNA (1)...(19): siRNA sense strand
gcaggagcaaaccaaauuc

SEQ ID NO: 1214034 - RNA, 19 nt, Homo sapiens
  misc_RNA (1)...(19): siRNA sense strand
cagauuuacucccaguucu

SEQ ID NO: 1214035 - RNA, 19 nt, Homo sapiens
  misc_RNA (1)...(19): siRNA sense strand
ggacagaaacaaggauggu

SEQ ID NO: 1214036 - RNA, 19 nt, Homo sapiens
  misc_RNA (1)...(19): siRNA sense strand
aggaaaugcuugacaucau

SEQ ID NO: 1214037 - RNA, 19 nt, Homo sapiens
  misc_RNA (1)...(19): siRNA sense strand
ggagaacuucaagcagauu

SEQ ID NO: 1214038 - RNA, 19 nt, Homo sapiens
  misc_RNA (1)...(19): siRNA sense strand
ugaauuguccaccgugugu

SEQ ID NO: 1214039 - RNA, 19 nt, Homo sapiens
  misc_RNA (1)...(19): siRNA sense strand
cagaagauggacagaaaca

SEQ ID NO: 1214040 - RNA, 19 nt, Homo sapiens
  misc_RNA (1)...(19): siRNA sense strand
ugcaggagcaaaccaaauu

SEQ ID NO: 1214041 - RNA, 19 nt, Homo sapiens
  misc_RNA (1)...(19): siRNA sense strand
ggugaccauugaggaauuc

SEQ ID NO: 1214042 - RNA, 19 nt, Homo sapiens
  misc_RNA (1)...(19): siRNA sense strand
agaacuucaagcagauuua

SEQ ID NO: 1214043 - RNA, 19 nt, Homo sapiens
  misc_RNA (1)...(19): siRNA sense strand
gcguggacgaugaauuuga

SEQ ID NO: 1214044 - RNA, 19 nt, Homo sapiens
  misc_RNA (1)...(19): siRNA sense strand
gagcagcugcaggagcaaa

SEQ ID NO: 1214045 - RNA, 19 nt, Homo sapiens
  misc_RNA (1)...(19): siRNA sense strand
cagcaccuaugccacuuuu

SEQ ID NO: 1214046 - RNA, 19 nt, Homo sapiens
  misc_RNA (1)...(19): siRNA sense strand
ggaaaugcuugacaucaug

SEQ ID NO: 1214047 - RNA, 19 nt, Homo sapiens
  misc_RNA (1)...(19): siRNA sense strand
cagcguggacgaugaauuu

SEQ ID NO: 1214048 - RNA, 19 nt, Homo sapiens
  misc_RNA (1)...(19): siRNA sense strand
gaagauggacagaaacaag

SEQ ID NO: 1214049 - RNA, 19 nt, Homo sapiens
  misc_RNA (1)...(19): siRNA sense strand
caugauggcucggucaguu

SEQ ID NO: 1214050 - RNA, 19 nt, Homo sapiens
  misc_RNA (1)...(19): siRNA sense strand
gggaacacguggagagcuu

SEQ ID NO: 1214051 - RNA, 19 nt, Homo sapiens
  misc_RNA (1)...(19): siRNA sense strand
gaaaugcuugacaucauga

SEQ ID NO: 1214052 - RNA, 19 nt, Homo sapiens
  misc_RNA (1)...(19): siRNA sense strand
ggaauucauugagucuugu

SEQ ID NO: 1214053 - RNA, 19 nt, Homo sapiens
  misc_RNA (1)...(19): siRNA sense strand
cguggacgaugaauuugaa

SEQ ID NO: 1214054 - RNA, 19 nt, Homo sapiens
  misc_RNA (1)...(19): siRNA sense strand
gaccauugaggaauucauu

SEQ ID NO: 1214055 - RNA, 19 nt, Homo sapiens
  misc_RNA (1)...(19): siRNA sense strand
gaaugucccagcggaauug

SEQ ID NO: 1214056 - RNA, 19 nt, Homo sapiens
  misc_RNA (1)...(19): siRNA sense strand
gaggaaaugcuugacauca

SEQ ID NO: 1214057 - RNA, 19 nt, Homo sapiens
  misc_RNA (1)...(19): siRNA sense strand
gauuuacucccaguucuuu

SEQ ID NO: 1214058 - RNA, 19 nt, Homo sapiens
  misc_RNA (1)...(19): siRNA sense strand
gcagauuuacucccaguuc

SEQ ID NO: 1214059 - RNA, 19 nt, Homo sapiens
  misc_RNA (1)...(19): siRNA sense strand
ucaaugaggagaacuucaa

SEQ ID NO: 1214060 - RNA, 19 nt, Homo sapiens
  misc_RNA (1)...(19): siRNA sense strand
gagaacuucaagcagauuu

SEQ ID NO: 1214061 - RNA, 19 nt, Homo sapiens
  misc_RNA (1)...(19): siRNA sense strand
ugaaguccaucuaugacau

SEQ ID NO: 1214062 - RNA, 19 nt, Homo sapiens
  misc_RNA (1)...(19): siRNA sense strand
caucaugaaguccaucuau

SEQ ID NO: 1214063 - RNA, 19 nt, Homo sapiens
  misc_RNA (1)...(19): siRNA sense strand
gaaguccaucuaugacaug

SEQ ID NO: 1214064 - RNA, 19 nt, Homo sapiens
  misc_RNA (1)...(19): siRNA sense strand
aggaauucauugagucuug

SEQ ID NO: 1214065 - RNA, 19 nt, Homo sapiens
  misc_RNA (1)...(19): siRNA sense strand
gaacuucaagcagauuuac

SEQ ID NO: 1214066 - RNA, 19 nt, Homo sapiens
  misc_RNA (1)...(19): siRNA sense strand
ccauugaggaauucauuga

SEQ ID NO: 1214067 - RNA, 19 nt, Homo sapiens
  misc_RNA (1)...(19): siRNA sense strand
gcaggagcaaaccaaauuc

SEQ ID NO: 1214068 - RNA, 19 nt, Homo sapiens
  misc_RNA (1)...(19): siRNA sense strand
cagauuuacucccaguucu

SEQ ID NO: 1214069 - RNA, 19 nt, Homo sapiens
  misc_RNA (1)...(19): siRNA sense strand
ggacagaaacaaggauggu

SEQ ID NO: 1214070 - RNA, 19 nt, Homo sapiens
  misc_RNA (1)...(19): siRNA sense strand
aggaaaugcuugacaucau

SEQ ID NO: 1214071 - RNA, 19 nt, Homo sapiens
  misc_RNA (1)...(19): siRNA sense strand
ggagaacuucaagcagauu

SEQ ID NO: 1214072 - RNA, 19 nt, Homo sapiens
  misc_RNA (1)...(19): siRNA sense strand
ugaauuguccaccgugugu

SEQ ID NO: 1214073 - RNA, 19 nt, Homo sapiens
  misc_RNA (1)...(19): siRNA sense strand
cagaagauggacagaaaca

SEQ ID NO: 1214074 - RNA, 19 nt, Homo sapiens
  misc_RNA (1)...(19): siRNA sense strand
ugcaggagcaaaccaaauu

SEQ ID NO: 1214075 - RNA, 19 nt, Homo sapiens
  misc_RNA (1)...(19): siRNA sense strand
ggugaccauugaggaauuc

SEQ ID NO: 1214076 - RNA, 19 nt, Homo sapiens
  misc_RNA (1)...(19): siRNA sense strand
agaacuucaagcagauuua

SEQ ID NO: 1214077 - RNA, 19 nt, Homo sapiens
  misc_RNA (1)...(19): siRNA sense strand
gcguggacgaugaauuuga

SEQ ID NO: 1214078 - RNA, 19 nt, Homo sapiens
  misc_RNA (1)...(19): siRNA sense strand
gagcagcugcaggagcaaa

SEQ ID NO: 1214079 - RNA, 19 nt, Homo sapiens
  misc_RNA (1)...(19): siRNA sense strand
cagcaccuaugccacuuuu

SEQ ID NO: 1214080 - RNA, 19 nt, Homo sapiens
  misc_RNA (1)...(19): siRNA sense strand
ggaaaugcuugacaucaug

SEQ ID NO: 1214081 - RNA, 19 nt, Homo sapiens
  misc_RNA (1)...(19): siRNA sense strand
cagcguggacgaugaauuu

SEQ ID NO: 1214082 - RNA, 19 nt, Homo sapiens
  misc_RNA (1)...(19): siRNA sense strand
gaagauggacagaaacaag

SEQ ID NO: 1214083 - RNA, 19 nt, Homo sapiens
  misc_RNA (1)...(19): siRNA sense strand
caugauggcucggucaguu

SEQ ID NO: 1214084 - RNA, 19 nt, Homo sapiens
  misc_RNA (1)...(19): siRNA sense strand
gggaacacguggagagcuu

SEQ ID NO: 1214085 - RNA, 19 nt, Homo sapiens
  misc_RNA (1)...(19): siRNA sense strand
gaaaugcuugacaucauga

SEQ ID NO: 1214086 - RNA, 19 nt, Homo sapiens
  misc_RNA (1)...(19): siRNA sense strand
ggaauucauugagucuugu

SEQ ID NO: 1214087 - RNA, 19 nt, Homo sapiens
  misc_RNA (1)...(19): siRNA sense strand
cguggacgaugaauuugaa

SEQ ID NO: 1214088 - RNA, 19 nt, Homo sapiens
  misc_RNA (1)...(19): siRNA sense strand
gaccauugaggaauucauu

SEQ ID NO: 1214089 - RNA, 19 nt, Homo sapiens
  misc_RNA (1)...(19): siRNA sense strand
gaaugucccagcggaauug

SEQ ID NO: 1214090 - RNA, 19 nt, Homo sapiens
  misc_RNA (1)...(19): siRNA sense strand
gaggaaaugcuugacauca

SEQ ID NO: 1214091 - RNA, 19 nt, Homo sapiens
  misc_RNA (1)...(19): siRNA sense strand
gauuuacucccaguucuuu

SEQ ID NO: 1214092 - RNA, 19 nt, Homo sapiens
  misc_RNA (1)...(19): siRNA sense strand
gcagauuuacucccaguuc

SEQ ID NO: 1214093 - RNA, 19 nt, Homo sapiens
  misc_RNA (1)...(19): siRNA sense strand
ucaaugaggagaacuucaa

SEQ ID NO: 1214094 - RNA, 19 nt, Homo sapiens
  misc_RNA (1)...(19): siRNA sense strand
gagaacuucaagcagauuu

SEQ ID NO: 1214095 - RNA, 19 nt, Homo sapiens
  misc_RNA (1)...(19): siRNA sense strand
ugaaguccaucuaugacau

SEQ ID NO: 1214096 - RNA, 19 nt, Homo sapiens
  misc_RNA (1)...(19): siRNA sense strand
caucaugaaguccaucuau

SEQ ID NO: 1214097 - RNA, 19 nt, Homo sapiens
  misc_RNA (1)...(19): siRNA sense strand
gaaguccaucuaugacaug

SEQ ID NO: 1214098 - RNA, 19 nt, Homo sapiens
  misc_RNA (1)...(19): siRNA sense strand
aggaauucauugagucuug

SEQ ID NO: 1214099 - RNA, 19 nt, Homo sapiens
  misc_RNA (1)...(19): siRNA sense strand
gaacuucaagcagauuuac

SEQ ID NO: 1214100 - RNA, 19 nt, Homo sapiens
  misc_RNA (1)...(19): siRNA sense strand
ccauugaggaauucauuga

SEQ ID NO: 1214101 - RNA, 19 nt, Homo sapiens
  misc_RNA (1)...(19): siRNA sense strand
gcaggagcaaaccaaauuc

SEQ ID NO: 1214102 - RNA, 19 nt, Homo sapiens
  misc_RNA (1)...(19): siRNA sense strand
cagauuuacucccaguucu

SEQ ID NO: 1214103 - RNA, 19 nt, Homo sapiens
  misc_RNA (1)...(19): siRNA sense strand
ggacagaaacaaggauggu

SEQ ID NO: 1214104 - RNA, 19 nt, Homo sapiens
  misc_RNA (1)...(19): siRNA sense strand
aggaaaugcuugacaucau

SEQ ID NO: 1214105 - RNA, 19 nt, Homo sapiens
  misc_RNA (1)...(19): siRNA sense strand
ggagaacuucaagcagauu

SEQ ID NO: 1214106 - RNA, 19 nt, Homo sapiens
  misc_RNA (1)...(19): siRNA sense strand
ugaauuguccaccgugugu

SEQ ID NO: 1214107 - RNA, 19 nt, Homo sapiens
  misc_RNA (1)...(19): siRNA sense strand
cagaagauggacagaaaca

SEQ ID NO: 1214108 - RNA, 19 nt, Homo sapiens
  misc_RNA (1)...(19): siRNA sense strand
ugcaggagcaaaccaaauu

SEQ ID NO: 1214109 - RNA, 19 nt, Homo sapiens
  misc_RNA (1)...(19): siRNA sense strand
ggugaccauugaggaauuc

SEQ ID NO: 1214110 - RNA, 19 nt, Homo sapiens
  misc_RNA (1)...(19): siRNA sense strand
agaacuucaagcagauuua

SEQ ID NO: 1214111 - RNA, 19 nt, Homo sapiens
  misc_RNA (1)...(19): siRNA sense strand
gcguggacgaugaauuuga

SEQ ID NO: 1214112 - RNA, 19 nt, Homo sapiens
  misc_RNA (1)...(19): siRNA sense strand
gagcagcugcaggagcaaa

SEQ ID NO: 1214113 - RNA, 19 nt, Homo sapiens
  misc_RNA (1)...(19): siRNA sense strand
cagcaccuaugccacuuuu

SEQ ID NO: 1214114 - RNA, 19 nt, Homo sapiens
  misc_RNA (1)...(19): siRNA sense strand
cagcguggacgaugaauuu

SEQ ID NO: 1214115 - RNA, 19 nt, Homo sapiens
  misc_RNA (1)...(19): siRNA sense strand
cguggacgaugaauuugaa

SEQ ID NO: 1214116 - RNA, 19 nt, Homo sapiens
  misc_RNA (1)...(19): siRNA sense strand
gaaugucccagcggaauug

SEQ ID NO: 1214117 - RNA, 19 nt, Homo sapiens
  misc_RNA (1)...(19): siRNA sense strand
gcaggagcaaaccaaauuc

SEQ ID NO: 1214118 - RNA, 19 nt, Homo sapiens
  misc_RNA (1)...(19): siRNA sense strand
ugaauuguccaccgugugu

SEQ ID NO: 1214119 - RNA, 19 nt, Homo sapiens
  misc_RNA (1)...(19): siRNA sense strand
ugcaggagcaaaccaaauu

SEQ ID NO: 1214120 - RNA, 19 nt, Homo sapiens
  misc_RNA (1)...(19): siRNA sense strand
gcguggacgaugaauuuga

SEQ ID NO: 1214121 - RNA, 19 nt, Homo sapiens
  misc_RNA (1)...(19): siRNA sense strand
gagcagcugcaggagcaaa

SEQ ID NO: 1214122 - RNA, 19 nt, Homo sapiens
  misc_RNA (1)...(19): siRNA sense strand
ggaaaugcuugacaucaug

SEQ ID NO: 1214123 - RNA, 19 nt, Homo sapiens
  misc_RNA (1)...(19): siRNA sense strand
cagcguggacgaugaauuu

SEQ ID NO: 1214124 - RNA, 19 nt, Homo sapiens
  misc_RNA (1)...(19): siRNA sense strand
gaagauggacagaaacaag

SEQ ID NO: 1214125 - RNA, 19 nt, Homo sapiens
  misc_RNA (1)...(19): siRNA sense strand
caugauggcucggucaguu

SEQ ID NO: 1214126 - RNA, 19 nt, Homo sapiens
  misc_RNA (1)...(19): siRNA sense strand
gggaacacguggagagcuu

SEQ ID NO: 1214127 - RNA, 19 nt, Homo sapiens
  misc_RNA (1)...(19): siRNA sense strand
gaaaugcuugacaucauga

SEQ ID NO: 1214128 - RNA, 19 nt, Homo sapiens
  misc_RNA (1)...(19): siRNA sense strand
ggaauucauugagucuugu

SEQ ID NO: 1214129 - RNA, 19 nt, Homo sapiens
  misc_RNA (1)...(19): siRNA sense strand
cguggacgaugaauuugaa

SEQ ID NO: 1214130 - RNA, 19 nt, Homo sapiens
  misc_RNA (1)...(19): siRNA sense strand
gaccauugaggaauucauu

SEQ ID NO: 1214131 - RNA, 19 nt, Homo sapiens
  misc_RNA (1)...(19): siRNA sense strand
gaaugucccagcggaauug

SEQ ID NO: 1214132 - RNA, 19 nt, Homo sapiens
  misc_RNA (1)...(19): siRNA sense strand
gaggaaaugcuugacauca

SEQ ID NO: 1214133 - RNA, 19 nt, Homo sapiens
  misc_RNA (1)...(19): siRNA sense strand
gauuuacucccaguucuuu

SEQ ID NO: 1214134 - RNA, 19 nt, Homo sapiens
  misc_RNA (1)...(19): siRNA sense strand
gcagauuuacucccaguuc

SEQ ID NO: 1214135 - RNA, 19 nt, Homo sapiens
  misc_RNA (1)...(19): siRNA sense strand
ucaaugaggagaacuucaa

SEQ ID NO: 1214136 - RNA, 19 nt, Homo sapiens
  misc_RNA (1)...(19): siRNA sense strand
gagaacuucaagcagauuu

SEQ ID NO: 1214137 - RNA, 19 nt, Homo sapiens
  misc_RNA (1)...(19): siRNA sense strand
ugaaguccaucuaugacau

SEQ ID NO: 1214138 - RNA, 19 nt, Homo sapiens
  misc_RNA (1)...(19): siRNA sense strand
caucaugaaguccaucuau

SEQ ID NO: 1214139 - RNA, 19 nt, Homo sapiens
  misc_RNA (1)...(19): siRNA sense strand
gaaguccaucuaugacaug

SEQ ID NO: 1214140 - RNA, 19 nt, Homo sapiens
  misc_RNA (1)...(19): siRNA sense strand
aggaauucauugagucuug

SEQ ID NO: 1214141 - RNA, 19 nt, Homo sapiens
  misc_RNA (1)...(19): siRNA sense strand
gaacuucaagcagauuuac

SEQ ID NO: 1214142 - RNA, 19 nt, Homo sapiens
  misc_RNA (1)...(19): siRNA sense strand
ccauugaggaauucauuga

SEQ ID NO: 1214143 - RNA, 19 nt, Homo sapiens
  misc_RNA (1)...(19): siRNA sense strand
gcaggagcaaaccaaauuc

SEQ ID NO: 1214144 - RNA, 19 nt, Homo sapiens
  misc_RNA (1)...(19): siRNA sense strand
cagauuuacucccaguucu

SEQ ID NO: 1214145 - RNA, 19 nt, Homo sapiens
  misc_RNA (1)...(19): siRNA sense strand
ggacagaaacaaggauggu

SEQ ID NO: 1214146 - RNA, 19 nt, Homo sapiens
  misc_RNA (1)...(19): siRNA sense strand
aggaaaugcuugacaucau

SEQ ID NO: 1214147 - RNA, 19 nt, Homo sapiens
  misc_RNA (1)...(19): siRNA sense strand
ggagaacuucaagcagauu

SEQ ID NO: 1214148 - RNA, 19 nt, Homo sapiens
  misc_RNA (1)...(19): siRNA sense strand
ugaauuguccaccgugugu

SEQ ID NO: 1214149 - RNA, 19 nt, Homo sapiens
  misc_RNA (1)...(19): siRNA sense strand
cagaagauggacagaaaca

SEQ ID NO: 1214150 - RNA, 19 nt, Homo sapiens
  misc_RNA (1)...(19): siRNA sense strand
ugcaggagcaaaccaaauu

SEQ ID NO: 1214151 - RNA, 19 nt, Homo sapiens
  misc_RNA (1)...(19): siRNA sense strand
ggugaccauugaggaauuc

SEQ ID NO: 1214152 - RNA, 19 nt, Homo sapiens
  misc_RNA (1)...(19): siRNA sense strand
agaacuucaagcagauuua

SEQ ID NO: 1214153 - RNA, 19 nt, Homo sapiens
  misc_RNA (1)...(19): siRNA sense strand
gcguggacgaugaauuuga

SEQ ID NO: 1214154 - RNA, 19 nt, Homo sapiens
  misc_RNA (1)...(19): siRNA sense strand
gagcagcugcaggagcaaa

SEQ ID NO: 1214155 - RNA, 19 nt, Homo sapiens
  misc_RNA (1)...(19): siRNA sense strand
cagcaccuaugccacuuuu

SEQ ID NO: 1214156 - RNA, 19 nt, Homo sapiens
  misc_RNA (1)...(19): siRNA sense strand
ggaaaugcuugacaucaug

SEQ ID NO: 1214157 - RNA, 19 nt, Homo sapiens
  misc_RNA (1)...(19): siRNA sense strand
cagcguggacgaugaauuu

SEQ ID NO: 1214158 - RNA, 19 nt, Homo sapiens
  misc_RNA (1)...(19): siRNA sense strand
gaagauggacagaaacaag

SEQ ID NO: 1214159 - RNA, 19 nt, Homo sapiens
  misc_RNA (1)...(19): siRNA sense strand
caugauggcucggucaguu

SEQ ID NO: 1214160 - RNA, 19 nt, Homo sapiens
  misc_RNA (1)...(19): siRNA sense strand
gggaacacguggagagcuu

SEQ ID NO: 1214161 - RNA, 19 nt, Homo sapiens
  misc_RNA (1)...(19): siRNA sense strand
gaaaugcuugacaucauga

SEQ ID NO: 1214162 - RNA, 19 nt, Homo sapiens
  misc_RNA (1)...(19): siRNA sense strand
ggaauucauugagucuugu

SEQ ID NO: 1214163 - RNA, 19 nt, Homo sapiens
  misc_RNA (1)...(19): siRNA sense strand
cguggacgaugaauuugaa

SEQ ID NO: 1214164 - RNA, 19 nt, Homo sapiens
  misc_RNA (1)...(19): siRNA sense strand
gaccauugaggaauucauu

SEQ ID NO: 1214165 - RNA, 19 nt, Homo sapiens
  misc_RNA (1)...(19): siRNA sense strand
gaaugucccagcggaauug

SEQ ID NO: 1214166 - RNA, 19 nt, Homo sapiens
  misc_RNA (1)...(19): siRNA sense strand
gaggaaaugcuugacauca

SEQ ID NO: 1214167 - RNA, 19 nt, Homo sapiens
  misc_RNA (1)...(19): siRNA sense strand
gauuuacucccaguucuuu

SEQ ID NO: 1214168 - RNA, 19 nt, Homo sapiens
  misc_RNA (1)...(19): siRNA sense strand
gcagauuuacucccaguuc

SEQ ID NO: 1214169 - RNA, 19 nt, Homo sapiens
  misc_RNA (1)...(19): siRNA sense strand
ucaaugaggagaacuucaa

SEQ ID NO: 1214170 - RNA, 19 nt, Homo sapiens
  misc_RNA (1)...(19): siRNA sense strand
gagaacuucaagcagauuu

SEQ ID NO: 1214171 - RNA, 19 nt, Homo sapiens
  misc_RNA (1)...(19): siRNA sense strand
ugaaguccaucuaugacau

SEQ ID NO: 1214172 - RNA, 19 nt, Homo sapiens
  misc_RNA (1)...(19): siRNA sense strand
caucaugaaguccaucuau

SEQ ID NO: 1214173 - RNA, 19 nt, Homo sapiens
  misc_RNA (1)...(19): siRNA sense strand
gaaguccaucuaugacaug

SEQ ID NO: 1214174 - RNA, 19 nt, Homo sapiens
  misc_RNA (1)...(19): siRNA sense strand
aggaauucauugagucuug

SEQ ID NO: 1214175 - RNA, 19 nt, Homo sapiens
  misc_RNA (1)...(19): siRNA sense strand
gaacuucaagcagauuuac

SEQ ID NO: 1214176 - RNA, 19 nt, Homo sapiens
  misc_RNA (1)...(19): siRNA sense strand
ccauugaggaauucauuga

SEQ ID NO: 1214177 - RNA, 19 nt, Homo sapiens
  misc_RNA (1)...(19): siRNA sense strand
gcaggagcaaaccaaauuc

SEQ ID NO: 1214178 - RNA, 19 nt, Homo sapiens
  misc_RNA (1)...(19): siRNA sense strand
cagauuuacucccaguucu

SEQ ID NO: 1214179 - RNA, 19 nt, Homo sapiens
  misc_RNA (1)...(19): siRNA sense strand
ggacagaaacaaggauggu

SEQ ID NO: 1214180 - RNA, 19 nt, Homo sapiens
  misc_RNA (1)...(19): siRNA sense strand
aggaaaugcuugacaucau

SEQ ID NO: 1214181 - RNA, 19 nt, Homo sapiens
  misc_RNA (1)...(19): siRNA sense strand
ggagaacuucaagcagauu

SEQ ID NO: 1214182 - RNA, 19 nt, Homo sapiens
  misc_RNA (1)...(19): siRNA sense strand
ugaauuguccaccgugugu

SEQ ID NO: 1214183 - RNA, 19 nt, Homo sapiens
  misc_RNA (1)...(19): siRNA sense strand
cagaagauggacagaaaca

SEQ ID NO: 1214184 - RNA, 19 nt, Homo sapiens
  misc_RNA (1)...(19): siRNA sense strand
ugcaggagcaaaccaaauu

SEQ ID NO: 1214185 - RNA, 19 nt, Homo sapiens
  misc_RNA (1)...(19): siRNA sense strand
ggugaccauugaggaauuc

SEQ ID NO: 1214186 - RNA, 19 nt, Homo sapiens
  misc_RNA (1)...(19): siRNA sense strand
agaacuucaagcagauuua

SEQ ID NO: 1214187 - RNA, 19 nt, Homo sapiens
  misc_RNA (1)...(19): siRNA sense strand
gcguggacgaugaauuuga

SEQ ID NO: 1214188 - RNA, 19 nt, Homo sapiens
  misc_RNA (1)...(19): siRNA sense strand
gagcagcugcaggagcaaa

SEQ ID NO: 1214189 - RNA, 19 nt, Homo sapiens
  misc_RNA (1)...(19): siRNA sense strand
cagcaccuaugccacuuuu

SEQ ID NO: 1214190 - RNA, 19 nt, Homo sapiens
  misc_RNA (1)...(19): siRNA sense strand
ggaaaugcuugacaucaug

SEQ ID NO: 1214191 - RNA, 19 nt, Homo sapiens
  misc_RNA (1)...(19): siRNA sense strand
cagcguggacgaugaauuu

SEQ ID NO: 1214192 - RNA, 19 nt, Homo sapiens
  misc_RNA (1)...(19): siRNA sense strand
gaagauggacagaaacaag

SEQ ID NO: 1214193 - RNA, 19 nt, Homo sapiens
  misc_RNA (1)...(19): siRNA sense strand
caugauggcucggucaguu

SEQ ID NO: 1214194 - RNA, 19 nt, Homo sapiens
  misc_RNA (1)...(19): siRNA sense strand
gggaacacguggagagcuu

SEQ ID NO: 1214195 - RNA, 19 nt, Homo sapiens
  misc_RNA (1)...(19): siRNA sense strand
gaaaugcuugacaucauga

SEQ ID NO: 1214196 - RNA, 19 nt, Homo sapiens
  misc_RNA (1)...(19): siRNA sense strand
ggaauucauugagucuugu

SEQ ID NO: 1214197 - RNA, 19 nt, Homo sapiens
  misc_RNA (1)...(19): siRNA sense strand
cguggacgaugaauuugaa

SEQ ID NO: 1214198 - RNA, 19 nt, Homo sapiens
  misc_RNA (1)...(19): siRNA sense strand
gaccauugaggaauucauu

SEQ ID NO: 1214199 - RNA, 19 nt, Homo sapiens
  misc_RNA (1)...(19): siRNA sense strand
gaaugucccagcggaauug

SEQ ID NO: 1214200 - RNA, 19 nt, Homo sapiens
  misc_RNA (1)...(19): siRNA sense strand
gaggaaaugcuugacauca

SEQ ID NO: 1214201 - RNA, 19 nt, Homo sapiens
  misc_RNA (1)...(19): siRNA sense strand
gauuuacucccaguucuuu

SEQ ID NO: 1214202 - RNA, 19 nt, Homo sapiens
  misc_RNA (1)...(19): siRNA sense strand
gcagauuuacucccaguuc

SEQ ID NO: 1214203 - RNA, 19 nt, Homo sapiens
  misc_RNA (1)...(19): siRNA sense strand
ucaaugaggagaacuucaa

SEQ ID NO: 1214204 - RNA, 19 nt, Homo sapiens
  misc_RNA (1)...(19): siRNA sense strand
gagaacuucaagcagauuu

SEQ ID NO: 1214205 - RNA, 19 nt, Homo sapiens
  misc_RNA (1)...(19): siRNA sense strand
ugaaguccaucuaugacau

SEQ ID NO: 1214206 - RNA, 19 nt, Homo sapiens
  misc_RNA (1)...(19): siRNA sense strand
caucaugaaguccaucuau

SEQ ID NO: 1214207 - RNA, 19 nt, Homo sapiens
  misc_RNA (1)...(19): siRNA sense strand
gaaguccaucuaugacaug

SEQ ID NO: 1214208 - RNA, 19 nt, Homo sapiens
  misc_RNA (1)...(19): siRNA sense strand
aggaauucauugagucuug

SEQ ID NO: 1214209 - RNA, 19 nt, Homo sapiens
  misc_RNA (1)...(19): siRNA sense strand
gaacuucaagcagauuuac

SEQ ID NO: 1214210 - RNA, 19 nt, Homo sapiens
  misc_RNA (1)...(19): siRNA sense strand
ccauugaggaauucauuga

SEQ ID NO: 1214211 - RNA, 19 nt, Homo sapiens
  misc_RNA (1)...(19): siRNA sense strand
gcaggagcaaaccaaauuc

SEQ ID NO: 1214212 - RNA, 19 nt, Homo sapiens
  misc_RNA (1)...(19): siRNA sense strand
cagauuuacucccaguucu

SEQ ID NO: 1214213 - RNA, 19 nt, Homo sapiens
  misc_RNA (1)...(19): siRNA sense strand
ggacagaaacaaggauggu

SEQ ID NO: 1214214 - RNA, 19 nt, Homo sapiens
  misc_RNA (1)...(19): siRNA sense strand
aggaaaugcuugacaucau

SEQ ID NO: 1214215 - RNA, 19 nt, Homo sapiens
  misc_RNA (1)...(19): siRNA sense strand
ggagaacuucaagcagauu

SEQ ID NO: 1214216 - RNA, 19 nt, Homo sapiens
  misc_RNA (1)...(19): siRNA sense strand
ugaauuguccaccgugugu

SEQ ID NO: 1214217 - RNA, 19 nt, Homo sapiens
  misc_RNA (1)...(19): siRNA sense strand
cagaagauggacagaaaca

SEQ ID NO: 1214218 - RNA, 19 nt, Homo sapiens
  misc_RNA (1)...(19): siRNA sense strand
ugcaggagcaaaccaaauu

SEQ ID NO: 1214219 - RNA, 19 nt, Homo sapiens
  misc_RNA (1)...(19): siRNA sense strand
ggugaccauugaggaauuc

SEQ ID NO: 1214220 - RNA, 19 nt, Homo sapiens
  misc_RNA (1)...(19): siRNA sense strand
agaacuucaagcagauuua

SEQ ID NO: 1214221 - RNA, 19 nt, Homo sapiens
  misc_RNA (1)...(19): siRNA sense strand
gcguggacgaugaauuuga

SEQ ID NO: 1214222 - RNA, 19 nt, Homo sapiens
  misc_RNA (1)...(19): siRNA sense strand
gagcagcugcaggagcaaa

SEQ ID NO: 1214223 - RNA, 19 nt, Homo sapiens
  misc_RNA (1)...(19): siRNA sense strand
cagcaccuaugccacuuuu

SEQ ID NO: 1214224 - RNA, 19 nt, Homo sapiens
  misc_RNA (1)...(19): siRNA sense strand
ggaaaugcuugacaucaug

SEQ ID NO: 1214225 - RNA, 19 nt, Homo sapiens
  misc_RNA (1)...(19): siRNA sense strand
cagcguggacgaugaauuu

SEQ ID NO: 1214226 - RNA, 19 nt, Homo sapiens
  misc_RNA (1)...(19): siRNA sense strand
gaagauggacagaaacaag

SEQ ID NO: 1214227 - RNA, 19 nt, Homo sapiens
  misc_RNA (1)...(19): siRNA sense strand
caugauggcucggucaguu

SEQ ID NO: 1214228 - RNA, 19 nt, Homo sapiens
  misc_RNA (1)...(19): siRNA sense strand
gggaacacguggagagcuu

SEQ ID NO: 1214229 - RNA, 19 nt, Homo sapiens
  misc_RNA (1)...(19): siRNA sense strand
gaaaugcuugacaucauga

SEQ ID NO: 1214230 - RNA, 19 nt, Homo sapiens
  misc_RNA (1)...(19): siRNA sense strand
ggaauucauugagucuugu

SEQ ID NO: 1214231 - RNA, 19 nt, Homo sapiens
  misc_RNA (1)...(19): siRNA sense strand
cguggacgaugaauuugaa

SEQ ID NO: 1214232 - RNA, 19 nt, Homo sapiens
  misc_RNA (1)...(19): siRNA sense strand
gaccauugaggaauucauu

SEQ ID NO: 1214233 - RNA, 19 nt, Homo sapiens
  misc_RNA (1)...(19): siRNA sense strand
gaaugucccagcggaauug

SEQ ID NO: 1214234 - RNA, 19 nt, Homo sapiens
  misc_RNA (1)...(19): siRNA sense strand
gaggaaaugcuugacauca

SEQ ID NO: 1214235 - RNA, 19 nt, Homo sapiens
  misc_RNA (1)...(19): siRNA sense strand
gauuuacucccaguucuuu

SEQ ID NO: 1214236 - RNA, 19 nt, Homo sapiens
  misc_RNA (1)...(19): siRNA sense strand
gcagauuuacucccaguuc

SEQ ID NO: 1214237 - RNA, 19 nt, Homo sapiens
  misc_RNA (1)...(19): siRNA sense strand
ucaaugaggagaacuucaa

SEQ ID NO: 1214238 - RNA, 19 nt, Homo sapiens
  misc_RNA (1)...(19): siRNA sense strand
gagaacuucaagcagauuu

SEQ ID NO: 1214239 - RNA, 19 nt, Homo sapiens
  misc_RNA (1)...(19): siRNA sense strand
ugaaguccaucuaugacau

SEQ ID NO: 1214240 - RNA, 19 nt, Homo sapiens
  misc_RNA (1)...(19): siRNA sense strand
caucaugaaguccaucuau

SEQ ID NO: 1214241 - RNA, 19 nt, Homo sapiens
  misc_RNA (1)...(19): siRNA sense strand
gaaguccaucuaugacaug

SEQ ID NO: 1214242 - RNA, 19 nt, Homo sapiens
  misc_RNA (1)...(19): siRNA sense strand
aggaauucauugagucuug

SEQ ID NO: 1214243 - RNA, 19 nt, Homo sapiens
  misc_RNA (1)...(19): siRNA sense strand
gaacuucaagcagauuuac

SEQ ID NO: 1214244 - RNA, 19 nt, Homo sapiens
  misc_RNA (1)...(19): siRNA sense strand
ccauugaggaauucauuga

SEQ ID NO: 1214245 - RNA, 19 nt, Homo sapiens
  misc_RNA (1)...(19): siRNA sense strand
gcaggagcaaaccaaauuc

SEQ ID NO: 1214246 - RNA, 19 nt, Homo sapiens
  misc_RNA (1)...(19): siRNA sense strand
cagauuuacucccaguucu

SEQ ID NO: 1214247 - RNA, 19 nt, Homo sapiens
  misc_RNA (1)...(19): siRNA sense strand
ggacagaaacaaggauggu

SEQ ID NO: 1214248 - RNA, 19 nt, Homo sapiens
  misc_RNA (1)...(19): siRNA sense strand
aggaaaugcuugacaucau

SEQ ID NO: 1214249 - RNA, 19 nt, Homo sapiens
  misc_RNA (1)...(19): siRNA sense strand
ggagaacuucaagcagauu

SEQ ID NO: 1214250 - RNA, 19 nt, Homo sapiens
  misc_RNA (1)...(19): siRNA sense strand
ugaauuguccaccgugugu

SEQ ID NO: 1214251 - RNA, 19 nt, Homo sapiens
  misc_RNA (1)...(19): siRNA sense strand
cagaagauggacagaaaca

SEQ ID NO: 1214252 - RNA, 19 nt, Homo sapiens
  misc_RNA (1)...(19): siRNA sense strand
ugcaggagcaaaccaaauu

SEQ ID NO: 1214253 - RNA, 19 nt, Homo sapiens
  misc_RNA (1)...(19): siRNA sense strand
ggugaccauugaggaauuc

SEQ ID NO: 1214254 - RNA, 19 nt, Homo sapiens
  misc_RNA (1)...(19): siRNA sense strand
agaacuucaagcagauuua

SEQ ID NO: 1214255 - RNA, 19 nt, Homo sapiens
  misc_RNA (1)...(19): siRNA sense strand
gcguggacgaugaauuuga

SEQ ID NO: 1214256 - RNA, 19 nt, Homo sapiens
  misc_RNA (1)...(19): siRNA sense strand
gagcagcugcaggagcaaa

SEQ ID NO: 1214257 - RNA, 19 nt, Homo sapiens
  misc_RNA (1)...(19): siRNA sense strand
cagcaccuaugccacuuuu

SEQ ID NO: 1214258 - RNA, 19 nt, Homo sapiens
  misc_RNA (1)...(19): siRNA sense strand
ggaaaugcuugacaucaug

SEQ ID NO: 1214259 - RNA, 19 nt, Homo sapiens
  misc_RNA (1)...(19): siRNA sense strand
cagcguggacgaugaauuu

SEQ ID NO: 1214260 - RNA, 19 nt, Homo sapiens
  misc_RNA (1)...(19): siRNA sense strand
gaagauggacagaaacaag

SEQ ID NO: 1214261 - RNA, 19 nt, Homo sapiens
  misc_RNA (1)...(19): siRNA sense strand
caugauggcucggucaguu

SEQ ID NO: 1214262 - RNA, 19 nt, Homo sapiens
  misc_RNA (1)...(19): siRNA sense strand
gggaacacguggagagcuu

SEQ ID NO: 1214263 - RNA, 19 nt, Homo sapiens
  misc_RNA (1)...(19): siRNA sense strand
gaaaugcuugacaucauga

SEQ ID NO: 1214264 - RNA, 19 nt, Homo sapiens
  misc_RNA (1)...(19): siRNA sense strand
ggaauucauugagucuugu

SEQ ID NO: 1214265 - RNA, 19 nt, Homo sapiens
  misc_RNA (1)...(19): siRNA sense strand
cguggacgaugaauuugaa

SEQ ID NO: 1214266 - RNA, 19 nt, Homo sapiens
  misc_RNA (1)...(19): siRNA sense strand
gaccauugaggaauucauu

SEQ ID NO: 1214267 - RNA, 19 nt, Homo sapiens
  misc_RNA (1)...(19): siRNA sense strand
gaaugucccagcggaauug

SEQ ID NO: 1214268 - RNA, 19 nt, Homo sapiens
  misc_RNA (1)...(19): siRNA sense strand
gaggaaaugcuugacauca

SEQ ID NO: 1214269 - RNA, 19 nt, Homo sapiens
  misc_RNA (1)...(19): siRNA sense strand
gauuuacucccaguucuuu

SEQ ID NO: 1214270 - RNA, 19 nt, Homo sapiens
  misc_RNA (1)...(19): siRNA sense strand
gcagauuuacucccaguuc

SEQ ID NO: 1214271 - RNA, 19 nt, Homo sapiens
  misc_RNA (1)...(19): siRNA sense strand
ucaaugaggagaacuucaa

SEQ ID NO: 1214272 - RNA, 19 nt, Homo sapiens
  misc_RNA (1)...(19): siRNA sense strand
gagaacuucaagcagauuu

SEQ ID NO: 1214273 - RNA, 19 nt, Homo sapiens
  misc_RNA (1)...(19): siRNA sense strand
ugaaguccaucuaugacau

SEQ ID NO: 1214274 - RNA, 19 nt, Homo sapiens
  misc_RNA (1)...(19): siRNA sense strand
caucaugaaguccaucuau

SEQ ID NO: 1214275 - RNA, 19 nt, Homo sapiens
  misc_RNA (1)...(19): siRNA sense strand
gaaguccaucuaugacaug

SEQ ID NO: 1214276 - RNA, 19 nt, Homo sapiens
  misc_RNA (1)...(19): siRNA sense strand
aggaauucauugagucuug

SEQ ID NO: 1214277 - RNA, 19 nt, Homo sapiens
  misc_RNA (1)...(19): siRNA sense strand
gaacuucaagcagauuuac

SEQ ID NO: 1214278 - RNA, 19 nt, Homo sapiens
  misc_RNA (1)...(19): siRNA sense strand
ccauugaggaauucauuga

SEQ ID NO: 1214279 - RNA, 19 nt, Homo sapiens
  misc_RNA (1)...(19): siRNA sense strand
gcaggagcaaaccaaauuc

SEQ ID NO: 1214280 - RNA, 19 nt, Homo sapiens
  misc_RNA (1)...(19): siRNA sense strand
cagauuuacucccaguucu

SEQ ID NO: 1214281 - RNA, 19 nt, Homo sapiens
  misc_RNA (1)...(19): siRNA sense strand
ggacagaaacaaggauggu

SEQ ID NO: 1214282 - RNA, 19 nt, Homo sapiens
  misc_RNA (1)...(19): siRNA sense strand
aggaaaugcuugacaucau

SEQ ID NO: 1214283 - RNA, 19 nt, Homo sapiens
  misc_RNA (1)...(19): siRNA sense strand
ggagaacuucaagcagauu

SEQ ID NO: 1214284 - RNA, 19 nt, Homo sapiens
  misc_RNA (1)...(19): siRNA sense strand
ugaauuguccaccgugugu

SEQ ID NO: 1214285 - RNA, 19 nt, Homo sapiens
  misc_RNA (1)...(19): siRNA sense strand
cagaagauggacagaaaca

SEQ ID NO: 1214286 - RNA, 19 nt, Homo sapiens
  misc_RNA (1)...(19): siRNA sense strand
ugcaggagcaaaccaaauu

SEQ ID NO: 1214287 - RNA, 19 nt, Homo sapiens
  misc_RNA (1)...(19): siRNA sense strand
ggugaccauugaggaauuc

SEQ ID NO: 1214288 - RNA, 19 nt, Homo sapiens
  misc_RNA (1)...(19): siRNA sense strand
agaacuucaagcagauuua

SEQ ID NO: 1214289 - RNA, 19 nt, Homo sapiens
  misc_RNA (1)...(19): siRNA sense strand
gcguggacgaugaauuuga

SEQ ID NO: 1214290 - RNA, 19 nt, Homo sapiens
  misc_RNA (1)...(19): siRNA sense strand
gagcagcugcaggagcaaa

SEQ ID NO: 1214291 - RNA, 19 nt, Homo sapiens
  misc_RNA (1)...(19): siRNA sense strand
cagcaccuaugccacuuuu

SEQ ID NO: 1214292 - RNA, 19 nt, Homo sapiens
  misc_RNA (1)...(19): siRNA sense strand
ggaaaugcuugacaucaug

SEQ ID NO: 1214293 - RNA, 19 nt, Homo sapiens
  misc_RNA (1)...(19): siRNA sense strand
cagcguggacgaugaauuu

SEQ ID NO: 1214294 - RNA, 19 nt, Homo sapiens
  misc_RNA (1)...(19): siRNA sense strand
gaagauggacagaaacaag

SEQ ID NO: 1214295 - RNA, 19 nt, Homo sapiens
  misc_RNA (1)...(19): siRNA sense strand
caugauggcucggucaguu

SEQ ID NO: 1214296 - RNA, 19 nt, Homo sapiens
  misc_RNA (1)...(19): siRNA sense strand
gggaacacguggagagcuu

SEQ ID NO: 1214297 - RNA, 19 nt, Homo sapiens
  misc_RNA (1)...(19): siRNA sense strand
gaaaugcuugacaucauga

SEQ ID NO: 1214298 - RNA, 19 nt, Homo sapiens
  misc_RNA (1)...(19): siRNA sense strand
ggaauucauugagucuugu

SEQ ID NO: 1214299 - RNA, 19 nt, Homo sapiens
  misc_RNA (1)...(19): siRNA sense strand
cguggacgaugaauuugaa

SEQ ID NO: 1214300 - RNA, 19 nt, Homo sapiens
  misc_RNA (1)...(19): siRNA sense strand
gaccauugaggaauucauu

SEQ ID NO: 1214301 - RNA, 19 nt, Homo sapiens
  misc_RNA (1)...(19): siRNA sense strand
gaaugucccagcggaauug

SEQ ID NO: 1214302 - RNA, 19 nt, Homo sapiens
  misc_RNA (1)...(19): siRNA sense strand
gaggaaaugcuugacauca

SEQ ID NO: 1214303 - RNA, 19 nt, Homo sapiens
  misc_RNA (1)...(19): siRNA sense strand
gauuuacucccaguucuuu

SEQ ID NO: 1214304 - RNA, 19 nt, Homo sapiens
  misc_RNA (1)...(19): siRNA sense strand
gcagauuuacucccaguuc

SEQ ID NO: 1214305 - RNA, 19 nt, Homo sapiens
  misc_RNA (1)...(19): siRNA sense strand
ucaaugaggagaacuucaa

SEQ ID NO: 1214306 - RNA, 19 nt, Homo sapiens
  misc_RNA (1)...(19): siRNA sense strand
gagaacuucaagcagauuu

SEQ ID NO: 1214307 - RNA, 19 nt, Homo sapiens
  misc_RNA (1)...(19): siRNA sense strand
ugaaguccaucuaugacau

SEQ ID NO: 1214308 - RNA, 19 nt, Homo sapiens
  misc_RNA (1)...(19): siRNA sense strand
caucaugaaguccaucuau

SEQ ID NO: 1214309 - RNA, 19 nt, Homo sapiens
  misc_RNA (1)...(19): siRNA sense strand
gaaguccaucuaugacaug

SEQ ID NO: 1214310 - RNA, 19 nt, Homo sapiens
  misc_RNA (1)...(19): siRNA sense strand
aggaauucauugagucuug

SEQ ID NO: 1214311 - RNA, 19 nt, Homo sapiens
  misc_RNA (1)...(19): siRNA sense strand
gaacuucaagcagauuuac

SEQ ID NO: 1214312 - RNA, 19 nt, Homo sapiens
  misc_RNA (1)...(19): siRNA sense strand
ccauugaggaauucauuga

SEQ ID NO: 1214313 - RNA, 19 nt, Homo sapiens
  misc_RNA (1)...(19): siRNA sense strand
gcaggagcaaaccaaauuc

SEQ ID NO: 1214314 - RNA, 19 nt, Homo sapiens
  misc_RNA (1)...(19): siRNA sense strand
cagauuuacucccaguucu

SEQ ID NO: 1214315 - RNA, 19 nt, Homo sapiens
  misc_RNA (1)...(19): siRNA sense strand
ggacagaaacaaggauggu

SEQ ID NO: 1214316 - RNA, 19 nt, Homo sapiens
  misc_RNA (1)...(19): siRNA sense strand
aggaaaugcuugacaucau

SEQ ID NO: 1214317 - RNA, 19 nt, Homo sapiens
  misc_RNA (1)...(19): siRNA sense strand
ggagaacuucaagcagauu

SEQ ID NO: 1214318 - RNA, 19 nt, Homo sapiens
  misc_RNA (1)...(19): siRNA sense strand
ugaauuguccaccgugugu

SEQ ID NO: 1214319 - RNA, 19 nt, Homo sapiens
  misc_RNA (1)...(19): siRNA sense strand
cagaagauggacagaaaca

SEQ ID NO: 1214320 - RNA, 19 nt, Homo sapiens
  misc_RNA (1)...(19): siRNA sense strand
ugcaggagcaaaccaaauu

SEQ ID NO: 1214321 - RNA, 19 nt, Homo sapiens
  misc_RNA (1)...(19): siRNA sense strand
ggugaccauugaggaauuc

SEQ ID NO: 1214322 - RNA, 19 nt, Homo sapiens
  misc_RNA (1)...(19): siRNA sense strand
agaacuucaagcagauuua

SEQ ID NO: 1214323 - RNA, 19 nt, Homo sapiens
  misc_RNA (1)...(19): siRNA sense strand
gcguggacgaugaauuuga

SEQ ID NO: 1214324 - RNA, 19 nt, Homo sapiens
  misc_RNA (1)...(19): siRNA sense strand
gagcagcugcaggagcaaa

SEQ ID NO: 1214325 - RNA, 19 nt, Homo sapiens
  misc_RNA (1)...(19): siRNA sense strand
cagcaccuaugccacuuuu

SEQ ID NO: 1214326 - RNA, 19 nt, Homo sapiens
  misc_RNA (1)...(19): siRNA sense strand
ggaaaugcuugacaucaug

SEQ ID NO: 1214327 - RNA, 19 nt, Homo sapiens
  misc_RNA (1)...(19): siRNA sense strand
cagcguggacgaugaauuu

SEQ ID NO: 1214328 - RNA, 19 nt, Homo sapiens
  misc_RNA (1)...(19): siRNA sense strand
gaagauggacagaaacaag

SEQ ID NO: 1214329 - RNA, 19 nt, Homo sapiens
  misc_RNA (1)...(19): siRNA sense strand
caugauggcucggucaguu

SEQ ID NO: 1214330 - RNA, 19 nt, Homo sapiens
  misc_RNA (1)...(19): siRNA sense strand
gggaacacguggagagcuu

SEQ ID NO: 1214331 - RNA, 19 nt, Homo sapiens
  misc_RNA (1)...(19): siRNA sense strand
gaaaugcuugacaucauga

SEQ ID NO: 1214332 - RNA, 19 nt, Homo sapiens
  misc_RNA (1)...(19): siRNA sense strand
ggaauucauugagucuugu

SEQ ID NO: 1214333 - RNA, 19 nt, Homo sapiens
  misc_RNA (1)...(19): siRNA sense strand
cguggacgaugaauuugaa

SEQ ID NO: 1214334 - RNA, 19 nt, Homo sapiens
  misc_RNA (1)...(19): siRNA sense strand
gaccauugaggaauucauu

SEQ ID NO: 1214335 - RNA, 19 nt, Homo sapiens
  misc_RNA (1)...(19): siRNA sense strand
gaaugucccagcggaauug

SEQ ID NO: 1214336 - RNA, 19 nt, Homo sapiens
  misc_RNA (1)...(19): siRNA sense strand
gaggaaaugcuugacauca

SEQ ID NO: 1214337 - RNA, 19 nt, Homo sapiens
  misc_RNA (1)...(19): siRNA sense strand
gauuuacucccaguucuuu

SEQ ID NO: 1214338 - RNA, 19 nt, Homo sapiens
  misc_RNA (1)...(19): siRNA sense strand
gcagauuuacucccaguuc

SEQ ID NO: 1214339 - RNA, 19 nt, Homo sapiens
  misc_RNA (1)...(19): siRNA sense strand
ucaaugaggagaacuucaa

SEQ ID NO: 1214340 - RNA, 19 nt, Homo sapiens
  misc_RNA (1)...(19): siRNA sense strand
gagaacuucaagcagauuu

SEQ ID NO: 1214341 - RNA, 19 nt, Homo sapiens
  misc_RNA (1)...(19): siRNA sense strand
ugaaguccaucuaugacau

SEQ ID NO: 1214342 - RNA, 19 nt, Homo sapiens
  misc_RNA (1)...(19): siRNA sense strand
caucaugaaguccaucuau

SEQ ID NO: 1214343 - RNA, 19 nt, Homo sapiens
  misc_RNA (1)...(19): siRNA sense strand
gaaguccaucuaugacaug

SEQ ID NO: 1214344 - RNA, 19 nt, Homo sapiens
  misc_RNA (1)...(19): siRNA sense strand
aggaauucauugagucuug

SEQ ID NO: 1214345 - RNA, 19 nt, Homo sapiens
  misc_RNA (1)...(19): siRNA sense strand
gaacuucaagcagauuuac

SEQ ID NO: 1214346 - RNA, 19 nt, Homo sapiens
  misc_RNA (1)...(19): siRNA sense strand
ccauugaggaauucauuga

SEQ ID NO: 1214347 - RNA, 19 nt, Homo sapiens
  misc_RNA (1)...(19): siRNA sense strand
gcaggagcaaaccaaauuc

SEQ ID NO: 1214348 - RNA, 19 nt, Homo sapiens
  misc_RNA (1)...(19): siRNA sense strand
cagauuuacucccaguucu

SEQ ID NO: 1214349 - RNA, 19 nt, Homo sapiens
  misc_RNA (1)...(19): siRNA sense strand
ggacagaaacaaggauggu

SEQ ID NO: 1214350 - RNA, 19 nt, Homo sapiens
  misc_RNA (1)...(19): siRNA sense strand
aggaaaugcuugacaucau

SEQ ID NO: 1214351 - RNA, 19 nt, Homo sapiens
  misc_RNA (1)...(19): siRNA sense strand
ggagaacuucaagcagauu

SEQ ID NO: 1214352 - RNA, 19 nt, Homo sapiens
  misc_RNA (1)...(19): siRNA sense strand
ugaauuguccaccgugugu

SEQ ID NO: 1214353 - RNA, 19 nt, Homo sapiens
  misc_RNA (1)...(19): siRNA sense strand
cagaagauggacagaaaca

SEQ ID NO: 1214354 - RNA, 19 nt, Homo sapiens
  misc_RNA (1)...(19): siRNA sense strand
ugcaggagcaaaccaaauu

SEQ ID NO: 1214355 - RNA, 19 nt, Homo sapiens
  misc_RNA (1)...(19): siRNA sense strand
ggugaccauugaggaauuc

SEQ ID NO: 1214356 - RNA, 19 nt, Homo sapiens
  misc_RNA (1)...(19): siRNA sense strand
agaacuucaagcagauuua

SEQ ID NO: 1214357 - RNA, 19 nt, Homo sapiens
  misc_RNA (1)...(19): siRNA sense strand
gcguggacgaugaauuuga

SEQ ID NO: 1214358 - RNA, 19 nt, Homo sapiens
  misc_RNA (1)...(19): siRNA sense strand
gagcagcugcaggagcaaa

SEQ ID NO: 1214359 - RNA, 19 nt, Homo sapiens
  misc_RNA (1)...(19): siRNA sense strand
cagcaccuaugccacuuuu

SEQ ID NO: 1214360 - RNA, 19 nt, Homo sapiens
  misc_RNA (1)...(19): siRNA sense strand
cagcguggacgaugaauuu

SEQ ID NO: 1214361 - RNA, 19 nt, Homo sapiens
  misc_RNA (1)...(19): siRNA sense strand
cguggacgaugaauuugaa

SEQ ID NO: 1214362 - RNA, 19 nt, Homo sapiens
  misc_RNA (1)...(19): siRNA sense strand
gaaugucccagcggaauug

SEQ ID NO: 1214363 - RNA, 19 nt, Homo sapiens
  misc_RNA (1)...(19): siRNA sense strand
gcaggagcaaaccaaauuc

SEQ ID NO: 1214364 - RNA, 19 nt, Homo sapiens
  misc_RNA (1)...(19): siRNA sense strand
ugaauuguccaccgugugu

SEQ ID NO: 1214365 - RNA, 19 nt, Homo sapiens
  misc_RNA (1)...(19): siRNA sense strand
ugcaggagcaaaccaaauu

SEQ ID NO: 1214366 - RNA, 19 nt, Homo sapiens
  misc_RNA (1)...(19): siRNA sense strand
gcguggacgaugaauuuga

SEQ ID NO: 1214367 - RNA, 19 nt, Homo sapiens
  misc_RNA (1)...(19): siRNA sense strand
gagcagcugcaggagcaaa

SEQ ID NO: 1214368 - RNA, 19 nt, Homo sapiens
  misc_RNA (1)...(19): siRNA sense strand
cgaaccacguguaccaaga

SEQ ID NO: 1214369 - RNA, 19 nt, Homo sapiens
  misc_RNA (1)...(19): siRNA sense strand
caaugaccuugucgaaauc

SEQ ID NO: 1214370 - RNA, 19 nt, Homo sapiens
  misc_RNA (1)...(19): siRNA sense strand
ccaagacccagcccaacuu

SEQ ID NO: 1214371 - RNA, 19 nt, Homo sapiens
  misc_RNA (1)...(19): siRNA sense strand
cgucggcgaguacaacaaa

SEQ ID NO: 1214372 - RNA, 19 nt, Homo sapiens
  misc_RNA (1)...(19): siRNA sense strand
gaucguagcuggggugaac

SEQ ID NO: 1214373 - RNA, 19 nt, Homo sapiens
  misc_RNA (1)...(19): siRNA sense strand
caaagccagcaacgacaug

SEQ ID NO: 1214374 - RNA, 19 nt, Homo sapiens
  misc_RNA (1)...(19): siRNA sense strand
gaaccacguguaccaagac

SEQ ID NO: 1214375 - RNA, 19 nt, Homo sapiens
  misc_RNA (1)...(19): siRNA sense strand
ggcgugcacuggacuuugc

SEQ ID NO: 1214376 - RNA, 19 nt, Homo sapiens
  misc_RNA (1)...(19): siRNA sense strand
ggaaauaauucacucacaa

SEQ ID NO: 1214377 - RNA, 19 nt, Homo sapiens
  misc_RNA (1)...(19): siRNA sense strand
gcaacaagcuacagccuau

SEQ ID NO: 1214378 - RNA, 19 nt, Homo sapiens
  misc_RNA (1)...(19): siRNA sense strand
uauaggagaugguguagaa

SEQ ID NO: 1214379 - RNA, 19 nt, Homo sapiens
  misc_RNA (1)...(19): siRNA sense strand
gaagguggauugucacagu

SEQ ID NO: 1214380 - RNA, 19 nt, Homo sapiens
  misc_RNA (1)...(19): siRNA sense strand
caacacccauuaaagauuc

SEQ ID NO: 1214381 - RNA, 19 nt, Homo sapiens
  misc_RNA (1)...(19): siRNA sense strand
gaagaaaagugguguaugu

SEQ ID NO: 1214382 - RNA, 19 nt, Homo sapiens
  misc_RNA (1)...(19): siRNA sense strand
ggacaaacugugugaauau

SEQ ID NO: 1214383 - RNA, 19 nt, Homo sapiens
  misc_RNA (1)...(19): siRNA sense strand
cgacgggucuuuaaacaau

SEQ ID NO: 1214384 - RNA, 19 nt, Homo sapiens
  misc_RNA (1)...(19): siRNA sense strand
gacaggaccuaagcacaua

SEQ ID NO: 1214385 - RNA, 19 nt, Homo sapiens
  misc_RNA (1)...(19): siRNA sense strand
ccaaugagcagcagugaaa

SEQ ID NO: 1214386 - RNA, 19 nt, Homo sapiens
  misc_RNA (1)...(19): siRNA sense strand
ggacagacaggauuucuca

SEQ ID NO: 1214387 - RNA, 19 nt, Homo sapiens
  misc_RNA (1)...(19): siRNA sense strand
aaagaaagcuguuuugaga

SEQ ID NO: 1214388 - RNA, 19 nt, Homo sapiens
  misc_RNA (1)...(19): siRNA sense strand
ccauauagaugauguuucu

SEQ ID NO: 1214389 - RNA, 19 nt, Homo sapiens
  misc_RNA (1)...(19): siRNA sense strand
caucaacacccauuaaaga

SEQ ID NO: 1214390 - RNA, 19 nt, Homo sapiens
  misc_RNA (1)...(19): siRNA sense strand
gacaaacugugugaauauu

SEQ ID NO: 1214391 - RNA, 19 nt, Homo sapiens
  misc_RNA (1)...(19): siRNA sense strand
uagaugauguuucuucaga

SEQ ID NO: 1214392 - RNA, 19 nt, Homo sapiens
  misc_RNA (1)...(19): siRNA sense strand
ggacuuggaugagacaauc

SEQ ID NO: 1214393 - RNA, 19 nt, Homo sapiens
  misc_RNA (1)...(19): siRNA sense strand
gcaauugggagcaguaguu

SEQ ID NO: 1214394 - RNA, 19 nt, Homo sapiens
  misc_RNA (1)...(19): siRNA sense strand
gaugauguuucuucagaug

SEQ ID NO: 1214395 - RNA, 19 nt, Homo sapiens
  misc_RNA (1)...(19): siRNA sense strand
gauuuacccuuccaacaga

SEQ ID NO: 1214396 - RNA, 19 nt, Homo sapiens
  misc_RNA (1)...(19): siRNA sense strand
guacggcauuuccucauau

SEQ ID NO: 1214397 - RNA, 19 nt, Homo sapiens
  misc_RNA (1)...(19): siRNA sense strand
ggaacuggaguaccuguaa

SEQ ID NO: 1214398 - RNA, 19 nt, Homo sapiens
  misc_RNA (1)...(19): siRNA sense strand
cgaaaguccugcuguaugg

SEQ ID NO: 1214399 - RNA, 19 nt, Homo sapiens
  misc_RNA (1)...(19): siRNA sense strand
uauaacagcucaccguauc

SEQ ID NO: 1214400 - RNA, 19 nt, Homo sapiens
  misc_RNA (1)...(19): siRNA sense strand
cggacaaacugugugaaua

SEQ ID NO: 1214401 - RNA, 19 nt, Homo sapiens
  misc_RNA (1)...(19): siRNA sense strand
gagaugguguagaagaaga

SEQ ID NO: 1214402 - RNA, 19 nt, Homo sapiens
  misc_RNA (1)...(19): siRNA sense strand
gguguggacuggaugagaa

SEQ ID NO: 1214403 - RNA, 19 nt, Homo sapiens
  misc_RNA (1)...(19): siRNA sense strand
gacaggauuucucagcuau

SEQ ID NO: 1214404 - RNA, 19 nt, Homo sapiens
  misc_RNA (1)...(19): siRNA sense strand
aaagugguguauguuguua

SEQ ID NO: 1214405 - RNA, 19 nt, Homo sapiens
  misc_RNA (1)...(19): siRNA sense strand
caccguauccagcacauua

SEQ ID NO: 1214406 - RNA, 19 nt, Homo sapiens
  misc_RNA (1)...(19): siRNA sense strand
gacugaagguggauuguca

SEQ ID NO: 1214407 - RNA, 19 nt, Homo sapiens
  misc_RNA (1)...(19): siRNA sense strand
ccuaagcacauauaacuuu

SEQ ID NO: 1214408 - RNA, 19 nt, Homo sapiens
  misc_RNA (1)...(19): siRNA sense strand
ggacaggaccuaagcacau

SEQ ID NO: 1214409 - RNA, 19 nt, Homo sapiens
  misc_RNA (1)...(19): siRNA sense strand
ucaggaauauauacaggaa

SEQ ID NO: 1214410 - RNA, 19 nt, Homo sapiens
  misc_RNA (1)...(19): siRNA sense strand
ccacuuaccagcuucaaga

SEQ ID NO: 1214411 - RNA, 19 nt, Homo sapiens
  misc_RNA (1)...(19): siRNA sense strand
gaaaagugguguauguugu

SEQ ID NO: 1214412 - RNA, 19 nt, Homo sapiens
  misc_RNA (1)...(19): siRNA sense strand
agacaggauuucucagcua

SEQ ID NO: 1214413 - RNA, 19 nt, Homo sapiens
  misc_RNA (1)...(19): siRNA sense strand
caacagaccauacccacau

SEQ ID NO: 1214414 - RNA, 19 nt, Homo sapiens
  misc_RNA (1)...(19): siRNA sense strand
gguccuacgccaacagaua

SEQ ID NO: 1214415 - RNA, 19 nt, Homo sapiens
  misc_RNA (1)...(19): siRNA sense strand
uacaacaucaucaggaaua

SEQ ID NO: 1214416 - RNA, 19 nt, Homo sapiens
  misc_RNA (1)...(19): siRNA sense strand
gaccuaagcacauauaacu

SEQ ID NO: 1214417 - RNA, 19 nt, Homo sapiens
  misc_RNA (1)...(19): siRNA sense strand
gucaguacgcacaguauua

SEQ ID NO: 1214418 - RNA, 19 nt, Homo sapiens
  misc_RNA (1)...(19): siRNA sense strand
cguacggcauuuccucaua

SEQ ID NO: 1214419 - RNA, 19 nt, Homo sapiens
  misc_RNA (1)...(19): siRNA sense strand
gcaguugagggccgaaauu

SEQ ID NO: 1214420 - RNA, 19 nt, Homo sapiens
  misc_RNA (1)...(19): siRNA sense strand
gaucuacaacaccuacaaa

SEQ ID NO: 1214421 - RNA, 19 nt, Homo sapiens
  misc_RNA (1)...(19): siRNA sense strand
gcaggacuauccgucuuau

SEQ ID NO: 1214422 - RNA, 19 nt, Homo sapiens
  misc_RNA (1)...(19): siRNA sense strand
ucacaaauuccucuggauu

SEQ ID NO: 1214423 - RNA, 19 nt, Homo sapiens
  misc_RNA (1)...(19): siRNA sense strand
caacaucaucaggaauaua

SEQ ID NO: 1214424 - RNA, 19 nt, Homo sapiens
  misc_RNA (1)...(19): siRNA sense strand
gaccaaguccauauagaug

SEQ ID NO: 1214425 - RNA, 19 nt, Homo sapiens
  misc_RNA (1)...(19): siRNA sense strand
aaagcacucucgcucauuc

SEQ ID NO: 1214426 - RNA, 19 nt, Homo sapiens
  misc_RNA (1)...(19): siRNA sense strand
ugaaagcacucucgcucau

SEQ ID NO: 1214427 - RNA, 19 nt, Homo sapiens
  misc_RNA (1)...(19): siRNA sense strand
cuaagcacauauaacuuug

SEQ ID NO: 1214428 - RNA, 19 nt, Homo sapiens
  misc_RNA (1)...(19): siRNA sense strand
gauguuucuucagaugaua

SEQ ID NO: 1214429 - RNA, 19 nt, Homo sapiens
  misc_RNA (1)...(19): siRNA sense strand
gaaugugaccaaguccaua

SEQ ID NO: 1214430 - RNA, 19 nt, Homo sapiens
  misc_RNA (1)...(19): siRNA sense strand
gcgaaaguccugcuguaug

SEQ ID NO: 1214431 - RNA, 19 nt, Homo sapiens
  misc_RNA (1)...(19): siRNA sense strand
gaaagcacucucgcucauu

SEQ ID NO: 1214432 - RNA, 19 nt, Homo sapiens
  misc_RNA (1)...(19): siRNA sense strand
guugagggccgaaauugaa

SEQ ID NO: 1214433 - RNA, 19 nt, Homo sapiens
  misc_RNA (1)...(19): siRNA sense strand
uaacuuauguuuggcaacu

SEQ ID NO: 1214434 - RNA, 19 nt, Homo sapiens
  misc_RNA (1)...(19): siRNA sense strand
cauauaacuuuggaacaga

SEQ ID NO: 1214435 - RNA, 19 nt, Homo sapiens
  misc_RNA (1)...(19): siRNA sense strand
uggcgaaaguccugcugua

SEQ ID NO: 1214436 - RNA, 19 nt, Homo sapiens
  misc_RNA (1)...(19): siRNA sense strand
agugguguauguuguuaua

SEQ ID NO: 1214437 - RNA, 19 nt, Homo sapiens
  misc_RNA (1)...(19): siRNA sense strand
gaccauacccacauauucu

SEQ ID NO: 1214438 - RNA, 19 nt, Homo sapiens
  misc_RNA (1)...(19): siRNA sense strand
ccaaguccauauagaugau

SEQ ID NO: 1214439 - RNA, 19 nt, Homo sapiens
  misc_RNA (1)...(19): siRNA sense strand
cgaagaaacaauaauccuu

SEQ ID NO: 1214440 - RNA, 19 nt, Homo sapiens
  misc_RNA (1)...(19): siRNA sense strand
uuucucagguucagcaauu

SEQ ID NO: 1214441 - RNA, 19 nt, Homo sapiens
  misc_RNA (1)...(19): siRNA sense strand
ucagucaccuggacagaca

SEQ ID NO: 1214442 - RNA, 19 nt, Homo sapiens
  misc_RNA (1)...(19): siRNA sense strand
caaugccacuuaccagcuu

SEQ ID NO: 1214443 - RNA, 19 nt, Homo sapiens
  misc_RNA (1)...(19): siRNA sense strand
gguguauguuguuauagga

SEQ ID NO: 1214444 - RNA, 19 nt, Homo sapiens
  misc_RNA (1)...(19): siRNA sense strand
ccagugcuaacuuauguuu

SEQ ID NO: 1214445 - RNA, 19 nt, Homo sapiens
  misc_RNA (1)...(19): siRNA sense strand
uaaaagagaucuacaacac

SEQ ID NO: 1214446 - RNA, 19 nt, Homo sapiens
  misc_RNA (1)...(19): siRNA sense strand
cagcaggacuauccgucuu

SEQ ID NO: 1214447 - RNA, 19 nt, Homo sapiens
  misc_RNA (1)...(19): siRNA sense strand
aaccagugcuaacuuaugu

SEQ ID NO: 1214448 - RNA, 19 nt, Homo sapiens
  misc_RNA (1)...(19): siRNA sense strand
caacgacaccauccaccaa

SEQ ID NO: 1214449 - RNA, 19 nt, Homo sapiens
  misc_RNA (1)...(19): siRNA sense strand
caaccagugcuaacuuaug

SEQ ID NO: 1214450 - RNA, 19 nt, Homo sapiens
  misc_RNA (1)...(19): siRNA sense strand
ucaacacccauuaaagauu

SEQ ID NO: 1214451 - RNA, 19 nt, Homo sapiens
  misc_RNA (1)...(19): siRNA sense strand
gccgacgggucuuuaaaca

SEQ ID NO: 1214452 - RNA, 19 nt, Homo sapiens
  misc_RNA (1)...(19): siRNA sense strand
ccucuggauuuaauaguuc

SEQ ID NO: 1214453 - RNA, 19 nt, Homo sapiens
  misc_RNA (1)...(19): siRNA sense strand
gugaccaaguccauauaga

SEQ ID NO: 1214454 - RNA, 19 nt, Homo sapiens
  misc_RNA (1)...(19): siRNA sense strand
gcccaucaacacccauuaa

SEQ ID NO: 1214455 - RNA, 19 nt, Homo sapiens
  misc_RNA (1)...(19): siRNA sense strand
gacaggcaccauacagcua

SEQ ID NO: 1214456 - RNA, 19 nt, Homo sapiens
  misc_RNA (1)...(19): siRNA sense strand
gacgggucuuuaaacaauu

SEQ ID NO: 1214457 - RNA, 19 nt, Homo sapiens
  misc_RNA (1)...(19): siRNA sense strand
gguugacacuggcccugaa

SEQ ID NO: 1214458 - RNA, 19 nt, Homo sapiens
  misc_RNA (1)...(19): siRNA sense strand
aagcacauauaacuuugga

SEQ ID NO: 1214459 - RNA, 19 nt, Homo sapiens
  misc_RNA (1)...(19): siRNA sense strand
caagguagcaguuuuacaa

SEQ ID NO: 1214460 - RNA, 19 nt, Homo sapiens
  misc_RNA (1)...(19): siRNA sense strand
gauaacggacaggaccuaa

SEQ ID NO: 1214461 - RNA, 19 nt, Homo sapiens
  misc_RNA (1)...(19): siRNA sense strand
gaagaagaacaaggagcaa

SEQ ID NO: 1214462 - RNA, 19 nt, Homo sapiens
  misc_RNA (1)...(19): siRNA sense strand
aacagaccauacccacaua

SEQ ID NO: 1214463 - RNA, 19 nt, Homo sapiens
  misc_RNA (1)...(19): siRNA sense strand
gcaaccagugcuaacuuau

SEQ ID NO: 1214464 - RNA, 19 nt, Homo sapiens
  misc_RNA (1)...(19): siRNA sense strand
ccacagauuuacccuucca

SEQ ID NO: 1214465 - RNA, 19 nt, Homo sapiens
  misc_RNA (1)...(19): siRNA sense strand
ggucaguacgcacaguauu

SEQ ID NO: 1214466 - RNA, 19 nt, Homo sapiens
  misc_RNA (1)...(19): siRNA sense strand
aggagaugguguagaagaa

SEQ ID NO: 1214467 - RNA, 19 nt, Homo sapiens
  misc_RNA (1)...(19): siRNA sense strand
uggguuaggaauuguauuu

SEQ ID NO: 1214468 - RNA, 19 nt, Homo sapiens
  misc_RNA (1)...(19): siRNA sense strand
ggacuggaugagaaaguug

SEQ ID NO: 1214469 - RNA, 19 nt, Homo sapiens
  misc_RNA (1)...(19): siRNA sense strand
acauauaacuuuggaacag

SEQ ID NO: 1214470 - RNA, 19 nt, Homo sapiens
  misc_RNA (1)...(19): siRNA sense strand
ugaccaaguccauauagau

SEQ ID NO: 1214471 - RNA, 19 nt, Homo sapiens
  misc_RNA (1)...(19): siRNA sense strand
cauccaccaaugccacuua

SEQ ID NO: 1214472 - RNA, 19 nt, Homo sapiens
  misc_RNA (1)...(19): siRNA sense strand
cauaugggcaaacacaguu

SEQ ID NO: 1214473 - RNA, 19 nt, Homo sapiens
  misc_RNA (1)...(19): siRNA sense strand
auucugaucuugagagagu

SEQ ID NO: 1214474 - RNA, 19 nt, Homo sapiens
  misc_RNA (1)...(19): siRNA sense strand
gcauaugggcaaacacagu

SEQ ID NO: 1214475 - RNA, 19 nt, Homo sapiens
  misc_RNA (1)...(19): siRNA sense strand
gaugcaagguagcaguuuu

SEQ ID NO: 1214476 - RNA, 19 nt, Homo sapiens
  misc_RNA (1)...(19): siRNA sense strand
ggaaauaauucacucacaa

SEQ ID NO: 1214477 - RNA, 19 nt, Homo sapiens
  misc_RNA (1)...(19): siRNA sense strand
gcaacaagcuacagccuau

SEQ ID NO: 1214478 - RNA, 19 nt, Homo sapiens
  misc_RNA (1)...(19): siRNA sense strand
uauaggagaugguguagaa

SEQ ID NO: 1214479 - RNA, 19 nt, Homo sapiens
  misc_RNA (1)...(19): siRNA sense strand
gaagguggauugucacagu

SEQ ID NO: 1214480 - RNA, 19 nt, Homo sapiens
  misc_RNA (1)...(19): siRNA sense strand
caacacccauuaaagauuc

SEQ ID NO: 1214481 - RNA, 19 nt, Homo sapiens
  misc_RNA (1)...(19): siRNA sense strand
gaagaaaagugguguaugu

SEQ ID NO: 1214482 - RNA, 19 nt, Homo sapiens
  misc_RNA (1)...(19): siRNA sense strand
ggacaaacugugugaauau

SEQ ID NO: 1214483 - RNA, 19 nt, Homo sapiens
  misc_RNA (1)...(19): siRNA sense strand
cgacgggucuuuaaacaau

SEQ ID NO: 1214484 - RNA, 19 nt, Homo sapiens
  misc_RNA (1)...(19): siRNA sense strand
gacaggaccuaagcacaua

SEQ ID NO: 1214485 - RNA, 19 nt, Homo sapiens
  misc_RNA (1)...(19): siRNA sense strand
ccaaugagcagcagugaaa

SEQ ID NO: 1214486 - RNA, 19 nt, Homo sapiens
  misc_RNA (1)...(19): siRNA sense strand
ggacagacaggauuucuca

SEQ ID NO: 1214487 - RNA, 19 nt, Homo sapiens
  misc_RNA (1)...(19): siRNA sense strand
aaagaaagcuguuuugaga

SEQ ID NO: 1214488 - RNA, 19 nt, Homo sapiens
  misc_RNA (1)...(19): siRNA sense strand
ccauauagaugauguuucu

SEQ ID NO: 1214489 - RNA, 19 nt, Homo sapiens
  misc_RNA (1)...(19): siRNA sense strand
caucaacacccauuaaaga

SEQ ID NO: 1214490 - RNA, 19 nt, Homo sapiens
  misc_RNA (1)...(19): siRNA sense strand
gacaaacugugugaauauu

SEQ ID NO: 1214491 - RNA, 19 nt, Homo sapiens
  misc_RNA (1)...(19): siRNA sense strand
uagaugauguuucuucaga

SEQ ID NO: 1214492 - RNA, 19 nt, Homo sapiens
  misc_RNA (1)...(19): siRNA sense strand
ggacuuggaugagacaauc

SEQ ID NO: 1214493 - RNA, 19 nt, Homo sapiens
  misc_RNA (1)...(19): siRNA sense strand
gcaauugggagcaguaguu

SEQ ID NO: 1214494 - RNA, 19 nt, Homo sapiens
  misc_RNA (1)...(19): siRNA sense strand
gaugauguuucuucagaug

SEQ ID NO: 1214495 - RNA, 19 nt, Homo sapiens
  misc_RNA (1)...(19): siRNA sense strand
gauuuacccuuccaacaga

SEQ ID NO: 1214496 - RNA, 19 nt, Homo sapiens
  misc_RNA (1)...(19): siRNA sense strand
guacggcauuuccucauau

SEQ ID NO: 1214497 - RNA, 19 nt, Homo sapiens
  misc_RNA (1)...(19): siRNA sense strand
ggaacuggaguaccuguaa

SEQ ID NO: 1214498 - RNA, 19 nt, Homo sapiens
  misc_RNA (1)...(19): siRNA sense strand
cgaaaguccugcuguaugg

SEQ ID NO: 1214499 - RNA, 19 nt, Homo sapiens
  misc_RNA (1)...(19): siRNA sense strand
uauaacagcucaccguauc

SEQ ID NO: 1214500 - RNA, 19 nt, Homo sapiens
  misc_RNA (1)...(19): siRNA sense strand
cggacaaacugugugaaua

SEQ ID NO: 1214501 - RNA, 19 nt, Homo sapiens
  misc_RNA (1)...(19): siRNA sense strand
gagaugguguagaagaaga

SEQ ID NO: 1214502 - RNA, 19 nt, Homo sapiens
  misc_RNA (1)...(19): siRNA sense strand
gguguggacuggaugagaa

SEQ ID NO: 1214503 - RNA, 19 nt, Homo sapiens
  misc_RNA (1)...(19): siRNA sense strand
gacaggauuucucagcuau

SEQ ID NO: 1214504 - RNA, 19 nt, Homo sapiens
  misc_RNA (1)...(19): siRNA sense strand
aaagugguguauguuguua

SEQ ID NO: 1214505 - RNA, 19 nt, Homo sapiens
  misc_RNA (1)...(19): siRNA sense strand
caccguauccagcacauua

SEQ ID NO: 1214506 - RNA, 19 nt, Homo sapiens
  misc_RNA (1)...(19): siRNA sense strand
gacugaagguggauuguca

SEQ ID NO: 1214507 - RNA, 19 nt, Homo sapiens
  misc_RNA (1)...(19): siRNA sense strand
ccuaagcacauauaacuuu

SEQ ID NO: 1214508 - RNA, 19 nt, Homo sapiens
  misc_RNA (1)...(19): siRNA sense strand
ggacaggaccuaagcacau

SEQ ID NO: 1214509 - RNA, 19 nt, Homo sapiens
  misc_RNA (1)...(19): siRNA sense strand
ucaggaauauauacaggaa

SEQ ID NO: 1214510 - RNA, 19 nt, Homo sapiens
  misc_RNA (1)...(19): siRNA sense strand
ccacuuaccagcuucaaga

SEQ ID NO: 1214511 - RNA, 19 nt, Homo sapiens
  misc_RNA (1)...(19): siRNA sense strand
gaaaagugguguauguugu

SEQ ID NO: 1214512 - RNA, 19 nt, Homo sapiens
  misc_RNA (1)...(19): siRNA sense strand
agacaggauuucucagcua

SEQ ID NO: 1214513 - RNA, 19 nt, Homo sapiens
  misc_RNA (1)...(19): siRNA sense strand
caacagaccauacccacau

SEQ ID NO: 1214514 - RNA, 19 nt, Homo sapiens
  misc_RNA (1)...(19): siRNA sense strand
gguccuacgccaacagaua

SEQ ID NO: 1214515 - RNA, 19 nt, Homo sapiens
  misc_RNA (1)...(19): siRNA sense strand
uacaacaucaucaggaaua

SEQ ID NO: 1214516 - RNA, 19 nt, Homo sapiens
  misc_RNA (1)...(19): siRNA sense strand
gaccuaagcacauauaacu

SEQ ID NO: 1214517 - RNA, 19 nt, Homo sapiens
  misc_RNA (1)...(19): siRNA sense strand
gucaguacgcacaguauua

SEQ ID NO: 1214518 - RNA, 19 nt, Homo sapiens
  misc_RNA (1)...(19): siRNA sense strand
cguacggcauuuccucaua

SEQ ID NO: 1214519 - RNA, 19 nt, Homo sapiens
  misc_RNA (1)...(19): siRNA sense strand
gcaguugagggccgaaauu

SEQ ID NO: 1214520 - RNA, 19 nt, Homo sapiens
  misc_RNA (1)...(19): siRNA sense strand
gaucuacaacaccuacaaa

SEQ ID NO: 1214521 - RNA, 19 nt, Homo sapiens
  misc_RNA (1)...(19): siRNA sense strand
gcaggacuauccgucuuau

SEQ ID NO: 1214522 - RNA, 19 nt, Homo sapiens
  misc_RNA (1)...(19): siRNA sense strand
ucacaaauuccucuggauu

SEQ ID NO: 1214523 - RNA, 19 nt, Homo sapiens
  misc_RNA (1)...(19): siRNA sense strand
caacaucaucaggaauaua

SEQ ID NO: 1214524 - RNA, 19 nt, Homo sapiens
  misc_RNA (1)...(19): siRNA sense strand
gaccaaguccauauagaug

SEQ ID NO: 1214525 - RNA, 19 nt, Homo sapiens
  misc_RNA (1)...(19): siRNA sense strand
aaagcacucucgcucauuc

SEQ ID NO: 1214526 - RNA, 19 nt, Homo sapiens
  misc_RNA (1)...(19): siRNA sense strand
ugaaagcacucucgcucau

SEQ ID NO: 1214527 - RNA, 19 nt, Homo sapiens
  misc_RNA (1)...(19): siRNA sense strand
cuaagcacauauaacuuug

SEQ ID NO: 1214528 - RNA, 19 nt, Homo sapiens
  misc_RNA (1)...(19): siRNA sense strand
gauguuucuucagaugaua

SEQ ID NO: 1214529 - RNA, 19 nt, Homo sapiens
  misc_RNA (1)...(19): siRNA sense strand
gaaugugaccaaguccaua

SEQ ID NO: 1214530 - RNA, 19 nt, Homo sapiens
  misc_RNA (1)...(19): siRNA sense strand
gcgaaaguccugcuguaug

SEQ ID NO: 1214531 - RNA, 19 nt, Homo sapiens
  misc_RNA (1)...(19): siRNA sense strand
gaaagcacucucgcucauu

SEQ ID NO: 1214532 - RNA, 19 nt, Homo sapiens
  misc_RNA (1)...(19): siRNA sense strand
guugagggccgaaauugaa

SEQ ID NO: 1214533 - RNA, 19 nt, Homo sapiens
  misc_RNA (1)...(19): siRNA sense strand
uaacuuauguuuggcaacu

SEQ ID NO: 1214534 - RNA, 19 nt, Homo sapiens
  misc_RNA (1)...(19): siRNA sense strand
cauauaacuuuggaacaga

SEQ ID NO: 1214535 - RNA, 19 nt, Homo sapiens
  misc_RNA (1)...(19): siRNA sense strand
uggcgaaaguccugcugua

SEQ ID NO: 1214536 - RNA, 19 nt, Homo sapiens
  misc_RNA (1)...(19): siRNA sense strand
agugguguauguuguuaua

SEQ ID NO: 1214537 - RNA, 19 nt, Homo sapiens
  misc_RNA (1)...(19): siRNA sense strand
gaccauacccacauauucu

SEQ ID NO: 1214538 - RNA, 19 nt, Homo sapiens
  misc_RNA (1)...(19): siRNA sense strand
ccaaguccauauagaugau

SEQ ID NO: 1214539 - RNA, 19 nt, Homo sapiens
  misc_RNA (1)...(19): siRNA sense strand
cgaagaaacaauaauccuu

SEQ ID NO: 1214540 - RNA, 19 nt, Homo sapiens
  misc_RNA (1)...(19): siRNA sense strand
uuucucagguucagcaauu

SEQ ID NO: 1214541 - RNA, 19 nt, Homo sapiens
  misc_RNA (1)...(19): siRNA sense strand
ucagucaccuggacagaca

SEQ ID NO: 1214542 - RNA, 19 nt, Homo sapiens
  misc_RNA (1)...(19): siRNA sense strand
caaugccacuuaccagcuu

SEQ ID NO: 1214543 - RNA, 19 nt, Homo sapiens
  misc_RNA (1)...(19): siRNA sense strand
gguguauguuguuauagga

SEQ ID NO: 1214544 - RNA, 19 nt, Homo sapiens
  misc_RNA (1)...(19): siRNA sense strand
ccagugcuaacuuauguuu

SEQ ID NO: 1214545 - RNA, 19 nt, Homo sapiens
  misc_RNA (1)...(19): siRNA sense strand
uaaaagagaucuacaacac

SEQ ID NO: 1214546 - RNA, 19 nt, Homo sapiens
  misc_RNA (1)...(19): siRNA sense strand
cagcaggacuauccgucuu

SEQ ID NO: 1214547 - RNA, 19 nt, Homo sapiens
  misc_RNA (1)...(19): siRNA sense strand
aaccagugcuaacuuaugu

SEQ ID NO: 1214548 - RNA, 19 nt, Homo sapiens
  misc_RNA (1)...(19): siRNA sense strand
caacgacaccauccaccaa

SEQ ID NO: 1214549 - RNA, 19 nt, Homo sapiens
  misc_RNA (1)...(19): siRNA sense strand
caaccagugcuaacuuaug

SEQ ID NO: 1214550 - RNA, 19 nt, Homo sapiens
  misc_RNA (1)...(19): siRNA sense strand
ucaacacccauuaaagauu

SEQ ID NO: 1214551 - RNA, 19 nt, Homo sapiens
  misc_RNA (1)...(19): siRNA sense strand
gccgacgggucuuuaaaca

SEQ ID NO: 1214552 - RNA, 19 nt, Homo sapiens
  misc_RNA (1)...(19): siRNA sense strand
ccucuggauuuaauaguuc

SEQ ID NO: 1214553 - RNA, 19 nt, Homo sapiens
  misc_RNA (1)...(19): siRNA sense strand
gugaccaaguccauauaga

SEQ ID NO: 1214554 - RNA, 19 nt, Homo sapiens
  misc_RNA (1)...(19): siRNA sense strand
gcccaucaacacccauuaa

SEQ ID NO: 1214555 - RNA, 19 nt, Homo sapiens
  misc_RNA (1)...(19): siRNA sense strand
gacaggcaccauacagcua

SEQ ID NO: 1214556 - RNA, 19 nt, Homo sapiens
  misc_RNA (1)...(19): siRNA sense strand
gacgggucuuuaaacaauu

SEQ ID NO: 1214557 - RNA, 19 nt, Homo sapiens
  misc_RNA (1)...(19): siRNA sense strand
gguugacacuggcccugaa

SEQ ID NO: 1214558 - RNA, 19 nt, Homo sapiens
  misc_RNA (1)...(19): siRNA sense strand
aagcacauauaacuuugga

SEQ ID NO: 1214559 - RNA, 19 nt, Homo sapiens
  misc_RNA (1)...(19): siRNA sense strand
caagguagcaguuuuacaa

SEQ ID NO: 1214560 - RNA, 19 nt, Homo sapiens
  misc_RNA (1)...(19): siRNA sense strand
gauaacggacaggaccuaa

SEQ ID NO: 1214561 - RNA, 19 nt, Homo sapiens
  misc_RNA (1)...(19): siRNA sense strand
gaagaagaacaaggagcaa

SEQ ID NO: 1214562 - RNA, 19 nt, Homo sapiens
  misc_RNA (1)...(19): siRNA sense strand
aacagaccauacccacaua

SEQ ID NO: 1214563 - RNA, 19 nt, Homo sapiens
  misc_RNA (1)...(19): siRNA sense strand
gcaaccagugcuaacuuau

SEQ ID NO: 1214564 - RNA, 19 nt, Homo sapiens
  misc_RNA (1)...(19): siRNA sense strand
ccacagauuuacccuucca

SEQ ID NO: 1214565 - RNA, 19 nt, Homo sapiens
  misc_RNA (1)...(19): siRNA sense strand
ggucaguacgcacaguauu

SEQ ID NO: 1214566 - RNA, 19 nt, Homo sapiens
  misc_RNA (1)...(19): siRNA sense strand
aggagaugguguagaagaa

SEQ ID NO: 1214567 - RNA, 19 nt, Homo sapiens
  misc_RNA (1)...(19): siRNA sense strand
uggguuaggaauuguauuu

SEQ ID NO: 1214568 - RNA, 19 nt, Homo sapiens
  misc_RNA (1)...(19): siRNA sense strand
ggacuggaugagaaaguug

SEQ ID NO: 1214569 - RNA, 19 nt, Homo sapiens
  misc_RNA (1)...(19): siRNA sense strand
acauauaacuuuggaacag

SEQ ID NO: 1214570 - RNA, 19 nt, Homo sapiens
  misc_RNA (1)...(19): siRNA sense strand
ugaccaaguccauauagau

SEQ ID NO: 1214571 - RNA, 19 nt, Homo sapiens
  misc_RNA (1)...(19): siRNA sense strand
cauccaccaaugccacuua

SEQ ID NO: 1214572 - RNA, 19 nt, Homo sapiens
  misc_RNA (1)...(19): siRNA sense strand
cauaugggcaaacacaguu

SEQ ID NO: 1214573 - RNA, 19 nt, Homo sapiens
  misc_RNA (1)...(19): siRNA sense strand
auucugaucuugagagagu

SEQ ID NO: 1214574 - RNA, 19 nt, Homo sapiens
  misc_RNA (1)...(19): siRNA sense strand
gcauaugggcaaacacagu

SEQ ID NO: 1214575 - RNA, 19 nt, Homo sapiens
  misc_RNA (1)...(19): siRNA sense strand
gaugcaagguagcaguuuu

SEQ ID NO: 1214576 - RNA, 19 nt, Homo sapiens
  misc_RNA (1)...(19): siRNA sense strand
ggaaauaauucacucacaa

SEQ ID NO: 1214577 - RNA, 19 nt, Homo sapiens
  misc_RNA (1)...(19): siRNA sense strand
gcaacaagcuacagccuau

SEQ ID NO: 1214578 - RNA, 19 nt, Homo sapiens
  misc_RNA (1)...(19): siRNA sense strand
uauaggagaugguguagaa

SEQ ID NO: 1214579 - RNA, 19 nt, Homo sapiens
  misc_RNA (1)...(19): siRNA sense strand
gaagguggauugucacagu

SEQ ID NO: 1214580 - RNA, 19 nt, Homo sapiens
  misc_RNA (1)...(19): siRNA sense strand
caacacccauuaaagauuc

SEQ ID NO: 1214581 - RNA, 19 nt, Homo sapiens
  misc_RNA (1)...(19): siRNA sense strand
gaagaaaagugguguaugu

SEQ ID NO: 1214582 - RNA, 19 nt, Homo sapiens
  misc_RNA (1)...(19): siRNA sense strand
ggacaaacugugugaauau

SEQ ID NO: 1214583 - RNA, 19 nt, Homo sapiens
  misc_RNA (1)...(19): siRNA sense strand
cgacgggucuuuaaacaau

SEQ ID NO: 1214584 - RNA, 19 nt, Homo sapiens
  misc_RNA (1)...(19): siRNA sense strand
gacaggaccuaagcacaua

SEQ ID NO: 1214585 - RNA, 19 nt, Homo sapiens
  misc_RNA (1)...(19): siRNA sense strand
ccaaugagcagcagugaaa

SEQ ID NO: 1214586 - RNA, 19 nt, Homo sapiens
  misc_RNA (1)...(19): siRNA sense strand
ggacagacaggauuucuca

SEQ ID NO: 1214587 - RNA, 19 nt, Homo sapiens
  misc_RNA (1)...(19): siRNA sense strand
aaagaaagcuguuuugaga

SEQ ID NO: 1214588 - RNA, 19 nt, Homo sapiens
  misc_RNA (1)...(19): siRNA sense strand
ccauauagaugauguuucu

SEQ ID NO: 1214589 - RNA, 19 nt, Homo sapiens
  misc_RNA (1)...(19): siRNA sense strand
caucaacacccauuaaaga

SEQ ID NO: 1214590 - RNA, 19 nt, Homo sapiens
  misc_RNA (1)...(19): siRNA sense strand
gacaaacugugugaauauu

SEQ ID NO: 1214591 - RNA, 19 nt, Homo sapiens
  misc_RNA (1)...(19): siRNA sense strand
uagaugauguuucuucaga

SEQ ID NO: 1214592 - RNA, 19 nt, Homo sapiens
  misc_RNA (1)...(19): siRNA sense strand
ggacuuggaugagacaauc

SEQ ID NO: 1214593 - RNA, 19 nt, Homo sapiens
  misc_RNA (1)...(19): siRNA sense strand
gcaauugggagcaguaguu

SEQ ID NO: 1214594 - RNA, 19 nt, Homo sapiens
  misc_RNA (1)...(19): siRNA sense strand
gaugauguuucuucagaug

SEQ ID NO: 1214595 - RNA, 19 nt, Homo sapiens
  misc_RNA (1)...(19): siRNA sense strand
gauuuacccuuccaacaga

SEQ ID NO: 1214596 - RNA, 19 nt, Homo sapiens
  misc_RNA (1)...(19): siRNA sense strand
guacggcauuuccucauau

SEQ ID NO: 1214597 - RNA, 19 nt, Homo sapiens
  misc_RNA (1)...(19): siRNA sense strand
ggaacuggaguaccuguaa

SEQ ID NO: 1214598 - RNA, 19 nt, Homo sapiens
  misc_RNA (1)...(19): siRNA sense strand
cgaaaguccugcuguaugg

SEQ ID NO: 1214599 - RNA, 19 nt, Homo sapiens
  misc_RNA (1)...(19): siRNA sense strand
uauaacagcucaccguauc

SEQ ID NO: 1214600 - RNA, 19 nt, Homo sapiens
  misc_RNA (1)...(19): siRNA sense strand
cggacaaacugugugaaua

SEQ ID NO: 1214601 - RNA, 19 nt, Homo sapiens
  misc_RNA (1)...(19): siRNA sense strand
gagaugguguagaagaaga

SEQ ID NO: 1214602 - RNA, 19 nt, Homo sapiens
  misc_RNA (1)...(19): siRNA sense strand
gguguggacuggaugagaa

SEQ ID NO: 1214603 - RNA, 19 nt, Homo sapiens
  misc_RNA (1)...(19): siRNA sense strand
gacaggauuucucagcuau

SEQ ID NO: 1214604 - RNA, 19 nt, Homo sapiens
  misc_RNA (1)...(19): siRNA sense strand
aaagugguguauguuguua

SEQ ID NO: 1214605 - RNA, 19 nt, Homo sapiens
  misc_RNA (1)...(19): siRNA sense strand
caccguauccagcacauua

SEQ ID NO: 1214606 - RNA, 19 nt, Homo sapiens
  misc_RNA (1)...(19): siRNA sense strand
gacugaagguggauuguca

SEQ ID NO: 1214607 - RNA, 19 nt, Homo sapiens
  misc_RNA (1)...(19): siRNA sense strand
ccuaagcacauauaacuuu

SEQ ID NO: 1214608 - RNA, 19 nt, Homo sapiens
  misc_RNA (1)...(19): siRNA sense strand
ggacaggaccuaagcacau

SEQ ID NO: 1214609 - RNA, 19 nt, Homo sapiens
  misc_RNA (1)...(19): siRNA sense strand
ucaggaauauauacaggaa

SEQ ID NO: 1214610 - RNA, 19 nt, Homo sapiens
  misc_RNA (1)...(19): siRNA sense strand
ccacuuaccagcuucaaga

SEQ ID NO: 1214611 - RNA, 19 nt, Homo sapiens
  misc_RNA (1)...(19): siRNA sense strand
gaaaagugguguauguugu

SEQ ID NO: 1214612 - RNA, 19 nt, Homo sapiens
  misc_RNA (1)...(19): siRNA sense strand
agacaggauuucucagcua

SEQ ID NO: 1214613 - RNA, 19 nt, Homo sapiens
  misc_RNA (1)...(19): siRNA sense strand
caacagaccauacccacau

SEQ ID NO: 1214614 - RNA, 19 nt, Homo sapiens
  misc_RNA (1)...(19): siRNA sense strand
gguccuacgccaacagaua

SEQ ID NO: 1214615 - RNA, 19 nt, Homo sapiens
  misc_RNA (1)...(19): siRNA sense strand
uacaacaucaucaggaaua

SEQ ID NO: 1214616 - RNA, 19 nt, Homo sapiens
  misc_RNA (1)...(19): siRNA sense strand
gaccuaagcacauauaacu

SEQ ID NO: 1214617 - RNA, 19 nt, Homo sapiens
  misc_RNA (1)...(19): siRNA sense strand
gucaguacgcacaguauua

SEQ ID NO: 1214618 - RNA, 19 nt, Homo sapiens
  misc_RNA (1)...(19): siRNA sense strand
cguacggcauuuccucaua

SEQ ID NO: 1214619 - RNA, 19 nt, Homo sapiens
  misc_RNA (1)...(19): siRNA sense strand
gcaguugagggccgaaauu

SEQ ID NO: 1214620 - RNA, 19 nt, Homo sapiens
  misc_RNA (1)...(19): siRNA sense strand
gaucuacaacaccuacaaa

SEQ ID NO: 1214621 - RNA, 19 nt, Homo sapiens
  misc_RNA (1)...(19): siRNA sense strand
gcaggacuauccgucuuau

SEQ ID NO: 1214622 - RNA, 19 nt, Homo sapiens
  misc_RNA (1)...(19): siRNA sense strand
ucacaaauuccucuggauu

SEQ ID NO: 1214623 - RNA, 19 nt, Homo sapiens
  misc_RNA (1)...(19): siRNA sense strand
caacaucaucaggaauaua

SEQ ID NO: 1214624 - RNA, 19 nt, Homo sapiens
  misc_RNA (1)...(19): siRNA sense strand
gaccaaguccauauagaug

SEQ ID NO: 1214625 - RNA, 19 nt, Homo sapiens
  misc_RNA (1)...(19): siRNA sense strand
aaagcacucucgcucauuc

SEQ ID NO: 1214626 - RNA, 19 nt, Homo sapiens
  misc_RNA (1)...(19): siRNA sense strand
ugaaagcacucucgcucau

SEQ ID NO: 1214627 - RNA, 19 nt, Homo sapiens
  misc_RNA (1)...(19): siRNA sense strand
cuaagcacauauaacuuug

SEQ ID NO: 1214628 - RNA, 19 nt, Homo sapiens
  misc_RNA (1)...(19): siRNA sense strand
gauguuucuucagaugaua

SEQ ID NO: 1214629 - RNA, 19 nt, Homo sapiens
  misc_RNA (1)...(19): siRNA sense strand
gaaugugaccaaguccaua

SEQ ID NO: 1214630 - RNA, 19 nt, Homo sapiens
  misc_RNA (1)...(19): siRNA sense strand
gcgaaaguccugcuguaug

SEQ ID NO: 1214631 - RNA, 19 nt, Homo sapiens
  misc_RNA (1)...(19): siRNA sense strand
gaaagcacucucgcucauu

SEQ ID NO: 1214632 - RNA, 19 nt, Homo sapiens
  misc_RNA (1)...(19): siRNA sense strand
guugagggccgaaauugaa

SEQ ID NO: 1214633 - RNA, 19 nt, Homo sapiens
  misc_RNA (1)...(19): siRNA sense strand
uaacuuauguuuggcaacu

SEQ ID NO: 1214634 - RNA, 19 nt, Homo sapiens
  misc_RNA (1)...(19): siRNA sense strand
cauauaacuuuggaacaga

SEQ ID NO: 1214635 - RNA, 19 nt, Homo sapiens
  misc_RNA (1)...(19): siRNA sense strand
uggcgaaaguccugcugua

SEQ ID NO: 1214636 - RNA, 19 nt, Homo sapiens
  misc_RNA (1)...(19): siRNA sense strand
agugguguauguuguuaua

SEQ ID NO: 1214637 - RNA, 19 nt, Homo sapiens
  misc_RNA (1)...(19): siRNA sense strand
gaccauacccacauauucu

SEQ ID NO: 1214638 - RNA, 19 nt, Homo sapiens
  misc_RNA (1)...(19): siRNA sense strand
ccaaguccauauagaugau

SEQ ID NO: 1214639 - RNA, 19 nt, Homo sapiens
  misc_RNA (1)...(19): siRNA sense strand
cgaagaaacaauaauccuu

SEQ ID NO: 1214640 - RNA, 19 nt, Homo sapiens
  misc_RNA (1)...(19): siRNA sense strand
uuucucagguucagcaauu

SEQ ID NO: 1214641 - RNA, 19 nt, Homo sapiens
  misc_RNA (1)...(19): siRNA sense strand
ucagucaccuggacagaca

SEQ ID NO: 1214642 - RNA, 19 nt, Homo sapiens
  misc_RNA (1)...(19): siRNA sense strand
caaugccacuuaccagcuu

SEQ ID NO: 1214643 - RNA, 19 nt, Homo sapiens
  misc_RNA (1)...(19): siRNA sense strand
gguguauguuguuauagga

SEQ ID NO: 1214644 - RNA, 19 nt, Homo sapiens
  misc_RNA (1)...(19): siRNA sense strand
ccagugcuaacuuauguuu

SEQ ID NO: 1214645 - RNA, 19 nt, Homo sapiens
  misc_RNA (1)...(19): siRNA sense strand
uaaaagagaucuacaacac

SEQ ID NO: 1214646 - RNA, 19 nt, Homo sapiens
  misc_RNA (1)...(19): siRNA sense strand
cagcaggacuauccgucuu

SEQ ID NO: 1214647 - RNA, 19 nt, Homo sapiens
  misc_RNA (1)...(19): siRNA sense strand
aaccagugcuaacuuaugu

SEQ ID NO: 1214648 - RNA, 19 nt, Homo sapiens
  misc_RNA (1)...(19): siRNA sense strand
caacgacaccauccaccaa

SEQ ID NO: 1214649 - RNA, 19 nt, Homo sapiens
  misc_RNA (1)...(19): siRNA sense strand
caaccagugcuaacuuaug

SEQ ID NO: 1214650 - RNA, 19 nt, Homo sapiens
  misc_RNA (1)...(19): siRNA sense strand
ucaacacccauuaaagauu

SEQ ID NO: 1214651 - RNA, 19 nt, Homo sapiens
  misc_RNA (1)...(19): siRNA sense strand
gccgacgggucuuuaaaca

SEQ ID NO: 1214652 - RNA, 19 nt, Homo sapiens
  misc_RNA (1)...(19): siRNA sense strand
ccucuggauuuaauaguuc

SEQ ID NO: 1214653 - RNA, 19 nt, Homo sapiens
  misc_RNA (1)...(19): siRNA sense strand
gugaccaaguccauauaga

SEQ ID NO: 1214654 - RNA, 19 nt, Homo sapiens
  misc_RNA (1)...(19): siRNA sense strand
gcccaucaacacccauuaa

SEQ ID NO: 1214655 - RNA, 19 nt, Homo sapiens
  misc_RNA (1)...(19): siRNA sense strand
gacaggcaccauacagcua

SEQ ID NO: 1214656 - RNA, 19 nt, Homo sapiens
  misc_RNA (1)...(19): siRNA sense strand
gacgggucuuuaaacaauu

SEQ ID NO: 1214657 - RNA, 19 nt, Homo sapiens
  misc_RNA (1)...(19): siRNA sense strand
gguugacacuggcccugaa

SEQ ID NO: 1214658 - RNA, 19 nt, Homo sapiens
  misc_RNA (1)...(19): siRNA sense strand
aagcacauauaacuuugga

SEQ ID NO: 1214659 - RNA, 19 nt, Homo sapiens
  misc_RNA (1)...(19): siRNA sense strand
caagguagcaguuuuacaa

SEQ ID NO: 1214660 - RNA, 19 nt, Homo sapiens
  misc_RNA (1)...(19): siRNA sense strand
gauaacggacaggaccuaa

SEQ ID NO: 1214661 - RNA, 19 nt, Homo sapiens
  misc_RNA (1)...(19): siRNA sense strand
gaagaagaacaaggagcaa

SEQ ID NO: 1214662 - RNA, 19 nt, Homo sapiens
  misc_RNA (1)...(19): siRNA sense strand
aacagaccauacccacaua

SEQ ID NO: 1214663 - RNA, 19 nt, Homo sapiens
  misc_RNA (1)...(19): siRNA sense strand
gcaaccagugcuaacuuau

SEQ ID NO: 1214664 - RNA, 19 nt, Homo sapiens
  misc_RNA (1)...(19): siRNA sense strand
ccacagauuuacccuucca

SEQ ID NO: 1214665 - RNA, 19 nt, Homo sapiens
  misc_RNA (1)...(19): siRNA sense strand
ggucaguacgcacaguauu

SEQ ID NO: 1214666 - RNA, 19 nt, Homo sapiens
  misc_RNA (1)...(19): siRNA sense strand
aggagaugguguagaagaa

SEQ ID NO: 1214667 - RNA, 19 nt, Homo sapiens
  misc_RNA (1)...(19): siRNA sense strand
uggguuaggaauuguauuu

SEQ ID NO: 1214668 - RNA, 19 nt, Homo sapiens
  misc_RNA (1)...(19): siRNA sense strand
ggacuggaugagaaaguug

SEQ ID NO: 1214669 - RNA, 19 nt, Homo sapiens
  misc_RNA (1)...(19): siRNA sense strand
acauauaacuuuggaacag

SEQ ID NO: 1214670 - RNA, 19 nt, Homo sapiens
  misc_RNA (1)...(19): siRNA sense strand
ugaccaaguccauauagau

SEQ ID NO: 1214671 - RNA, 19 nt, Homo sapiens
  misc_RNA (1)...(19): siRNA sense strand
cauccaccaaugccacuua

SEQ ID NO: 1214672 - RNA, 19 nt, Homo sapiens
  misc_RNA (1)...(19): siRNA sense strand
cauaugggcaaacacaguu

SEQ ID NO: 1214673 - RNA, 19 nt, Homo sapiens
  misc_RNA (1)...(19): siRNA sense strand
auucugaucuugagagagu

SEQ ID NO: 1214674 - RNA, 19 nt, Homo sapiens
  misc_RNA (1)...(19): siRNA sense strand
gcauaugggcaaacacagu

SEQ ID NO: 1214675 - RNA, 19 nt, Homo sapiens
  misc_RNA (1)...(19): siRNA sense strand
gaugcaagguagcaguuuu

SEQ ID NO: 1214676 - RNA, 19 nt, Homo sapiens
  misc_RNA (1)...(19): siRNA sense strand
ggaaauaauucacucacaa

SEQ ID NO: 1214677 - RNA, 19 nt, Homo sapiens
  misc_RNA (1)...(19): siRNA sense strand
gcaacaagcuacagccuau

SEQ ID NO: 1214678 - RNA, 19 nt, Homo sapiens
  misc_RNA (1)...(19): siRNA sense strand
uauaggagaugguguagaa

SEQ ID NO: 1214679 - RNA, 19 nt, Homo sapiens
  misc_RNA (1)...(19): siRNA sense strand
gaagguggauugucacagu

SEQ ID NO: 1214680 - RNA, 19 nt, Homo sapiens
  misc_RNA (1)...(19): siRNA sense strand
caacacccauuaaagauuc

SEQ ID NO: 1214681 - RNA, 19 nt, Homo sapiens
  misc_RNA (1)...(19): siRNA sense strand
gaagaaaagugguguaugu

SEQ ID NO: 1214682 - RNA, 19 nt, Homo sapiens
  misc_RNA (1)...(19): siRNA sense strand
ggacaaacugugugaauau

SEQ ID NO: 1214683 - RNA, 19 nt, Homo sapiens
  misc_RNA (1)...(19): siRNA sense strand
cgacgggucuuuaaacaau

SEQ ID NO: 1214684 - RNA, 19 nt, Homo sapiens
  misc_RNA (1)...(19): siRNA sense strand
ccaaugagcagcagugaaa

SEQ ID NO: 1214685 - RNA, 19 nt, Homo sapiens
  misc_RNA (1)...(19): siRNA sense strand
gacaggaccuaagcacaua

SEQ ID NO: 1214686 - RNA, 19 nt, Homo sapiens
  misc_RNA (1)...(19): siRNA sense strand
ggacagacaggauuucuca

SEQ ID NO: 1214687 - RNA, 19 nt, Homo sapiens
  misc_RNA (1)...(19): siRNA sense strand
aaagaaagcuguuuugaga

SEQ ID NO: 1214688 - RNA, 19 nt, Homo sapiens
  misc_RNA (1)...(19): siRNA sense strand
ccauauagaugauguuucu

SEQ ID NO: 1214689 - RNA, 19 nt, Homo sapiens
  misc_RNA (1)...(19): siRNA sense strand
caucaacacccauuaaaga

SEQ ID NO: 1214690 - RNA, 19 nt, Homo sapiens
  misc_RNA (1)...(19): siRNA sense strand
gacaaacugugugaauauu

SEQ ID NO: 1214691 - RNA, 19 nt, Homo sapiens
  misc_RNA (1)...(19): siRNA sense strand
uagaugauguuucuucaga

SEQ ID NO: 1214692 - RNA, 19 nt, Homo sapiens
  misc_RNA (1)...(19): siRNA sense strand
ggacuuggaugagacaauc

SEQ ID NO: 1214693 - RNA, 19 nt, Homo sapiens
  misc_RNA (1)...(19): siRNA sense strand
gcaauugggagcaguaguu

SEQ ID NO: 1214694 - RNA, 19 nt, Homo sapiens
  misc_RNA (1)...(19): siRNA sense strand
gaugauguuucuucagaug

SEQ ID NO: 1214695 - RNA, 19 nt, Homo sapiens
  misc_RNA (1)...(19): siRNA sense strand
gauuuacccuuccaacaga

SEQ ID NO: 1214696 - RNA, 19 nt, Homo sapiens
  misc_RNA (1)...(19): siRNA sense strand
guacggcauuuccucauau

SEQ ID NO: 1214697 - RNA, 19 nt, Homo sapiens
  misc_RNA (1)...(19): siRNA sense strand
ggaacuggaguaccuguaa

SEQ ID NO: 1214698 - RNA, 19 nt, Homo sapiens
  misc_RNA (1)...(19): siRNA sense strand
cgaaaguccugcuguaugg

SEQ ID NO: 1214699 - RNA, 19 nt, Homo sapiens
  misc_RNA (1)...(19): siRNA sense strand
uauaacagcucaccguauc

SEQ ID NO: 1214700 - RNA, 19 nt, Homo sapiens
  misc_RNA (1)...(19): siRNA sense strand
cggacaaacugugugaaua

SEQ ID NO: 1214701 - RNA, 19 nt, Homo sapiens
  misc_RNA (1)...(19): siRNA sense strand
gagaugguguagaagaaga

SEQ ID NO: 1214702 - RNA, 19 nt, Homo sapiens
  misc_RNA (1)...(19): siRNA sense strand
gguguggacuggaugagaa

SEQ ID NO: 1214703 - RNA, 19 nt, Homo sapiens
  misc_RNA (1)...(19): siRNA sense strand
gacaggauuucucagcuau

SEQ ID NO: 1214704 - RNA, 19 nt, Homo sapiens
  misc_RNA (1)...(19): siRNA sense strand
aaagugguguauguuguua

SEQ ID NO: 1214705 - RNA, 19 nt, Homo sapiens
  misc_RNA (1)...(19): siRNA sense strand
caccguauccagcacauua

SEQ ID NO: 1214706 - RNA, 19 nt, Homo sapiens
  misc_RNA (1)...(19): siRNA sense strand
gacugaagguggauuguca

SEQ ID NO: 1214707 - RNA, 19 nt, Homo sapiens
  misc_RNA (1)...(19): siRNA sense strand
ccuaagcacauauaacuuu

SEQ ID NO: 1214708 - RNA, 19 nt, Homo sapiens
  misc_RNA (1)...(19): siRNA sense strand
ggacaggaccuaagcacau

SEQ ID NO: 1214709 - RNA, 19 nt, Homo sapiens
  misc_RNA (1)...(19): siRNA sense strand
ucaggaauauauacaggaa

SEQ ID NO: 1214710 - RNA, 19 nt, Homo sapiens
  misc_RNA (1)...(19): siRNA sense strand
ccacuuaccagcuucaaga

SEQ ID NO: 1214711 - RNA, 19 nt, Homo sapiens
  misc_RNA (1)...(19): siRNA sense strand
gaaaagugguguauguugu

SEQ ID NO: 1214712 - RNA, 19 nt, Homo sapiens
  misc_RNA (1)...(19): siRNA sense strand
agacaggauuucucagcua

SEQ ID NO: 1214713 - RNA, 19 nt, Homo sapiens
  misc_RNA (1)...(19): siRNA sense strand
caacagaccauacccacau

SEQ ID NO: 1214714 - RNA, 19 nt, Homo sapiens
  misc_RNA (1)...(19): siRNA sense strand
gguccuacgccaacagaua

SEQ ID NO: 1214715 - RNA, 19 nt, Homo sapiens
  misc_RNA (1)...(19): siRNA sense strand
uacaacaucaucaggaaua

SEQ ID NO: 1214716 - RNA, 19 nt, Homo sapiens
  misc_RNA (1)...(19): siRNA sense strand
gaccuaagcacauauaacu

SEQ ID NO: 1214717 - RNA, 19 nt, Homo sapiens
  misc_RNA (1)...(19): siRNA sense strand
gucaguacgcacaguauua

SEQ ID NO: 1214718 - RNA, 19 nt, Homo sapiens
  misc_RNA (1)...(19): siRNA sense strand
cguacggcauuuccucaua

SEQ ID NO: 1214719 - RNA, 19 nt, Homo sapiens
  misc_RNA (1)...(19): siRNA sense strand
gcaguugagggccgaaauu

SEQ ID NO: 1214720 - RNA, 19 nt, Homo sapiens
  misc_RNA (1)...(19): siRNA sense strand
gaucuacaacaccuacaaa

SEQ ID NO: 1214721 - RNA, 19 nt, Homo sapiens
  misc_RNA (1)...(19): siRNA sense strand
gcaggacuauccgucuuau

SEQ ID NO: 1214722 - RNA, 19 nt, Homo sapiens
  misc_RNA (1)...(19): siRNA sense strand
ucacaaauuccucuggauu

SEQ ID NO: 1214723 - RNA, 19 nt, Homo sapiens
  misc_RNA (1)...(19): siRNA sense strand
caacaucaucaggaauaua

SEQ ID NO: 1214724 - RNA, 19 nt, Homo sapiens
  misc_RNA (1)...(19): siRNA sense strand
gaccaaguccauauagaug

SEQ ID NO: 1214725 - RNA, 19 nt, Homo sapiens
  misc_RNA (1)...(19): siRNA sense strand
aaagcacucucgcucauuc

SEQ ID NO: 1214726 - RNA, 19 nt, Homo sapiens
  misc_RNA (1)...(19): siRNA sense strand
ugaaagcacucucgcucau

SEQ ID NO: 1214727 - RNA, 19 nt, Homo sapiens
  misc_RNA (1)...(19): siRNA sense strand
cuaagcacauauaacuuug

SEQ ID NO: 1214728 - RNA, 19 nt, Homo sapiens
  misc_RNA (1)...(19): siRNA sense strand
gauguuucuucagaugaua

SEQ ID NO: 1214729 - RNA, 19 nt, Homo sapiens
  misc_RNA (1)...(19): siRNA sense strand
gaaugugaccaaguccaua

SEQ ID NO: 1214730 - RNA, 19 nt, Homo sapiens
  misc_RNA (1)...(19): siRNA sense strand
gcgaaaguccugcuguaug

SEQ ID NO: 1214731 - RNA, 19 nt, Homo sapiens
  misc_RNA (1)...(19): siRNA sense strand
gaaagcacucucgcucauu

SEQ ID NO: 1214732 - RNA, 19 nt, Homo sapiens
  misc_RNA (1)...(19): siRNA sense strand
guugagggccgaaauugaa

SEQ ID NO: 1214733 - RNA, 19 nt, Homo sapiens
  misc_RNA (1)...(19): siRNA sense strand
uaacuuauguuuggcaacu

SEQ ID NO: 1214734 - RNA, 19 nt, Homo sapiens
  misc_RNA (1)...(19): siRNA sense strand
cauauaacuuuggaacaga

SEQ ID NO: 1214735 - RNA, 19 nt, Homo sapiens
  misc_RNA (1)...(19): siRNA sense strand
uggcgaaaguccugcugua

SEQ ID NO: 1214736 - RNA, 19 nt, Homo sapiens
  misc_RNA (1)...(19): siRNA sense strand
agugguguauguuguuaua

SEQ ID NO: 1214737 - RNA, 19 nt, Homo sapiens
  misc_RNA (1)...(19): siRNA sense strand
gaccauacccacauauucu

SEQ ID NO: 1214738 - RNA, 19 nt, Homo sapiens
  misc_RNA (1)...(19): siRNA sense strand
uuucucagguucagcaauu

SEQ ID NO: 1214739 - RNA, 19 nt, Homo sapiens
  misc_RNA (1)...(19): siRNA sense strand
ccaaguccauauagaugau

SEQ ID NO: 1214740 - RNA, 19 nt, Homo sapiens
  misc_RNA (1)...(19): siRNA sense strand
cgaagaaacaauaauccuu

SEQ ID NO: 1214741 - RNA, 19 nt, Homo sapiens
  misc_RNA (1)...(19): siRNA sense strand
ucagucaccuggacagaca

SEQ ID NO: 1214742 - RNA, 19 nt, Homo sapiens
  misc_RNA (1)...(19): siRNA sense strand
caaugccacuuaccagcuu

SEQ ID NO: 1214743 - RNA, 19 nt, Homo sapiens
  misc_RNA (1)...(19): siRNA sense strand
gguguauguuguuauagga

SEQ ID NO: 1214744 - RNA, 19 nt, Homo sapiens
  misc_RNA (1)...(19): siRNA sense strand
ccagugcuaacuuauguuu

SEQ ID NO: 1214745 - RNA, 19 nt, Homo sapiens
  misc_RNA (1)...(19): siRNA sense strand
uaaaagagaucuacaacac

SEQ ID NO: 1214746 - RNA, 19 nt, Homo sapiens
  misc_RNA (1)...(19): siRNA sense strand
cagcaggacuauccgucuu

SEQ ID NO: 1214747 - RNA, 19 nt, Homo sapiens
  misc_RNA (1)...(19): siRNA sense strand
aaccagugcuaacuuaugu

SEQ ID NO: 1214748 - RNA, 19 nt, Homo sapiens
  misc_RNA (1)...(19): siRNA sense strand
caacgacaccauccaccaa

SEQ ID NO: 1214749 - RNA, 19 nt, Homo sapiens
  misc_RNA (1)...(19): siRNA sense strand
caaccagugcuaacuuaug

SEQ ID NO: 1214750 - RNA, 19 nt, Homo sapiens
  misc_RNA (1)...(19): siRNA sense strand
gccgacgggucuuuaaaca

SEQ ID NO: 1214751 - RNA, 19 nt, Homo sapiens
  misc_RNA (1)...(19): siRNA sense strand
ucaacacccauuaaagauu

SEQ ID NO: 1214752 - RNA, 19 nt, Homo sapiens
  misc_RNA (1)...(19): siRNA sense strand
ccucuggauuuaauaguuc

SEQ ID NO: 1214753 - RNA, 19 nt, Homo sapiens
  misc_RNA (1)...(19): siRNA sense strand
gugaccaaguccauauaga

SEQ ID NO: 1214754 - RNA, 19 nt, Homo sapiens
  misc_RNA (1)...(19): siRNA sense strand
gcccaucaacacccauuaa

SEQ ID NO: 1214755 - RNA, 19 nt, Homo sapiens
  misc_RNA (1)...(19): siRNA sense strand
gacgggucuuuaaacaauu

SEQ ID NO: 1214756 - RNA, 19 nt, Homo sapiens
  misc_RNA (1)...(19): siRNA sense strand
gguugacacuggcccugaa

SEQ ID NO: 1214757 - RNA, 19 nt, Homo sapiens
  misc_RNA (1)...(19): siRNA sense strand
aagcacauauaacuuugga

SEQ ID NO: 1214758 - RNA, 19 nt, Homo sapiens
  misc_RNA (1)...(19): siRNA sense strand
caagguagcaguuuuacaa

SEQ ID NO: 1214759 - RNA, 19 nt, Homo sapiens
  misc_RNA (1)...(19): siRNA sense strand
gacaggcaccauacagcua

SEQ ID NO: 1214760 - RNA, 19 nt, Homo sapiens
  misc_RNA (1)...(19): siRNA sense strand
aacagaccauacccacaua

SEQ ID NO: 1214761 - RNA, 19 nt, Homo sapiens
  misc_RNA (1)...(19): siRNA sense strand
gaagaagaacaaggagcaa

SEQ ID NO: 1214762 - RNA, 19 nt, Homo sapiens
  misc_RNA (1)...(19): siRNA sense strand
ccacagauuuacccuucca

SEQ ID NO: 1214763 - RNA, 19 nt, Homo sapiens
  misc_RNA (1)...(19): siRNA sense strand
gcaaccagugcuaacuuau

SEQ ID NO: 1214764 - RNA, 19 nt, Homo sapiens
  misc_RNA (1)...(19): siRNA sense strand
gauaacggacaggaccuaa

SEQ ID NO: 1214765 - RNA, 19 nt, Homo sapiens
  misc_RNA (1)...(19): siRNA sense strand
ggucaguacgcacaguauu

SEQ ID NO: 1214766 - RNA, 19 nt, Homo sapiens
  misc_RNA (1)...(19): siRNA sense strand
aggagaugguguagaagaa

SEQ ID NO: 1214767 - RNA, 19 nt, Homo sapiens
  misc_RNA (1)...(19): siRNA sense strand
uggguuaggaauuguauuu

SEQ ID NO: 1214768 - RNA, 19 nt, Homo sapiens
  misc_RNA (1)...(19): siRNA sense strand
ggacuggaugagaaaguug

SEQ ID NO: 1214769 - RNA, 19 nt, Homo sapiens
  misc_RNA (1)...(19): siRNA sense strand
acauauaacuuuggaacag

SEQ ID NO: 1214770 - RNA, 19 nt, Homo sapiens
  misc_RNA (1)...(19): siRNA sense strand
ugaccaaguccauauagau

SEQ ID NO: 1214771 - RNA, 19 nt, Homo sapiens
  misc_RNA (1)...(19): siRNA sense strand
cauccaccaaugccacuua

SEQ ID NO: 1214772 - RNA, 19 nt, Homo sapiens
  misc_RNA (1)...(19): siRNA sense strand
gaugcaagguagcaguuuu

SEQ ID NO: 1214773 - RNA, 19 nt, Homo sapiens
  misc_RNA (1)...(19): siRNA sense strand
gcauaugggcaaacacagu

SEQ ID NO: 1214774 - RNA, 19 nt, Homo sapiens
  misc_RNA (1)...(19): siRNA sense strand
cauaugggcaaacacaguu

SEQ ID NO: 1214775 - RNA, 19 nt, Homo sapiens
  misc_RNA (1)...(19): siRNA sense strand
auucugaucuugagagagu

SEQ ID NO: 1214776 - RNA, 19 nt, Homo sapiens
  misc_RNA (1)...(19): siRNA sense strand
ggaaauacgugacaaauua

SEQ ID NO: 1214777 - RNA, 19 nt, Homo sapiens
  misc_RNA (1)...(19): siRNA sense strand
ccaaagaacugcaaacuug

SEQ ID NO: 1214778 - RNA, 19 nt, Homo sapiens
  misc_RNA (1)...(19): siRNA sense strand
gaauguaaccugaaucuaa

SEQ ID NO: 1214779 - RNA, 19 nt, Homo sapiens
  misc_RNA (1)...(19): siRNA sense strand
ggaacagucuaccaugaua

SEQ ID NO: 1214780 - RNA, 19 nt, Homo sapiens
  misc_RNA (1)...(19): siRNA sense strand
uagcauaccuuccuuagug

SEQ ID NO: 1214781 - RNA, 19 nt, Homo sapiens
  misc_RNA (1)...(19): siRNA sense strand
gcaaaccaauucuauucuu

SEQ ID NO: 1214782 - RNA, 19 nt, Homo sapiens
  misc_RNA (1)...(19): siRNA sense strand
gaggaacagucuaccauga

SEQ ID NO: 1214783 - RNA, 19 nt, Homo sapiens
  misc_RNA (1)...(19): siRNA sense strand
gauaaucacauucaccuaa

SEQ ID NO: 1214784 - RNA, 19 nt, Homo sapiens
  misc_RNA (1)...(19): siRNA sense strand
gaaacuaccaugcuaacaa

SEQ ID NO: 1214785 - RNA, 19 nt, Homo sapiens
  misc_RNA (1)...(19): siRNA sense strand
aaacuaccaugcuaacaaa

SEQ ID NO: 1214786 - RNA, 19 nt, Homo sapiens
  misc_RNA (1)...(19): siRNA sense strand
ggacguucuugucuucuuu

SEQ ID NO: 1214787 - RNA, 19 nt, Homo sapiens
  misc_RNA (1)...(19): siRNA sense strand
guucuugucuucuuugcua

SEQ ID NO: 1214788 - RNA, 19 nt, Homo sapiens
  misc_RNA (1)...(19): siRNA sense strand
ccacaagaccacaaacuaa

SEQ ID NO: 1214789 - RNA, 19 nt, Homo sapiens
  misc_RNA (1)...(19): siRNA sense strand
gaaggcaaaccaauucuau

SEQ ID NO: 1214790 - RNA, 19 nt, Homo sapiens
  misc_RNA (1)...(19): siRNA sense strand
ccauugcacuuuauuaugu

SEQ ID NO: 1214791 - RNA, 19 nt, Homo sapiens
  misc_RNA (1)...(19): siRNA sense strand
uaaccugaaucuaaugaga

SEQ ID NO: 1214792 - RNA, 19 nt, Homo sapiens
  misc_RNA (1)...(19): siRNA sense strand
gaccacaaacuaaacagua

SEQ ID NO: 1214793 - RNA, 19 nt, Homo sapiens
  misc_RNA (1)...(19): siRNA sense strand
gaucauugguugccauugg

SEQ ID NO: 1214794 - RNA, 19 nt, Homo sapiens
  misc_RNA (1)...(19): siRNA sense strand
uaauaaacccaacggauga

SEQ ID NO: 1214795 - RNA, 19 nt, Homo sapiens
  misc_RNA (1)...(19): siRNA sense strand
uacagucaauuuccaauga

SEQ ID NO: 1214796 - RNA, 19 nt, Homo sapiens
  misc_RNA (1)...(19): siRNA sense strand
aauggaauauucucuguga

SEQ ID NO: 1214797 - RNA, 19 nt, Homo sapiens
  misc_RNA (1)...(19): siRNA sense strand
cagucacacuuggaaauua

SEQ ID NO: 1214798 - RNA, 19 nt, Homo sapiens
  misc_RNA (1)...(19): siRNA sense strand
cuaccaugcuaacaaauau

SEQ ID NO: 1214799 - RNA, 19 nt, Homo sapiens
  misc_RNA (1)...(19): siRNA sense strand
gaacagucacacuuggaaa

SEQ ID NO: 1214800 - RNA, 19 nt, Homo sapiens
  misc_RNA (1)...(19): siRNA sense strand
ugaagcaccugaucauugg

SEQ ID NO: 1214801 - RNA, 19 nt, Homo sapiens
  misc_RNA (1)...(19): siRNA sense strand
gaugggacguucuugucuu

SEQ ID NO: 1214802 - RNA, 19 nt, Homo sapiens
  misc_RNA (1)...(19): siRNA sense strand
gaacagucuaccaugauau

SEQ ID NO: 1214803 - RNA, 19 nt, Homo sapiens
  misc_RNA (1)...(19): siRNA sense strand
caagggaucaggagcaaug

SEQ ID NO: 1214804 - RNA, 19 nt, Homo sapiens
  misc_RNA (1)...(19): siRNA sense strand
agucacacuuggaaauuaa

SEQ ID NO: 1214805 - RNA, 19 nt, Homo sapiens
  misc_RNA (1)...(19): siRNA sense strand
guaauugguaggcaucaaa

SEQ ID NO: 1214806 - RNA, 19 nt, Homo sapiens
  misc_RNA (1)...(19): siRNA sense strand
ucauagacauaaagaaugg

SEQ ID NO: 1214807 - RNA, 19 nt, Homo sapiens
  misc_RNA (1)...(19): siRNA sense strand
gaauucucccucuguugua

SEQ ID NO: 1214808 - RNA, 19 nt, Homo sapiens
  misc_RNA (1)...(19): siRNA sense strand
uagcaaagccaaagaacug

SEQ ID NO: 1214809 - RNA, 19 nt, Homo sapiens
  misc_RNA (1)...(19): siRNA sense strand
gauuugaccuuuuacuuga

SEQ ID NO: 1214810 - RNA, 19 nt, Homo sapiens
  misc_RNA (1)...(19): siRNA sense strand
gagagaagaagguauaaaa

SEQ ID NO: 1214811 - RNA, 19 nt, Homo sapiens
  misc_RNA (1)...(19): siRNA sense strand
aaugagagaagaagguaua

SEQ ID NO: 1214812 - RNA, 19 nt, Homo sapiens
  misc_RNA (1)...(19): siRNA sense strand
cacaagaccacaaacuaaa

SEQ ID NO: 1214813 - RNA, 19 nt, Homo sapiens
  misc_RNA (1)...(19): siRNA sense strand
ggaauauucucugugaaaa

SEQ ID NO: 1214814 - RNA, 19 nt, Homo sapiens
  misc_RNA (1)...(19): siRNA sense strand
caaacuaaacaguaaaugg

SEQ ID NO: 1214815 - RNA, 19 nt, Homo sapiens
  misc_RNA (1)...(19): siRNA sense strand
cuaucaccauugcacuuua

SEQ ID NO: 1214816 - RNA, 19 nt, Homo sapiens
  misc_RNA (1)...(19): siRNA sense strand
caagucuuauuggcaguaa

SEQ ID NO: 1214817 - RNA, 19 nt, Homo sapiens
  misc_RNA (1)...(19): siRNA sense strand
aaacuugggaguggauaua

SEQ ID NO: 1214818 - RNA, 19 nt, Homo sapiens
  misc_RNA (1)...(19): siRNA sense strand
uaucaccauugcacuuuau

SEQ ID NO: 1214819 - RNA, 19 nt, Homo sapiens
  misc_RNA (1)...(19): siRNA sense strand
accacaaacuaaacaguaa

SEQ ID NO: 1214820 - RNA, 19 nt, Homo sapiens
  misc_RNA (1)...(19): siRNA sense strand
caacggaugagacacuguu

SEQ ID NO: 1214821 - RNA, 19 nt, Homo sapiens
  misc_RNA (1)...(19): siRNA sense strand
aagaauugcuuccaguuac

SEQ ID NO: 1214822 - RNA, 19 nt, Homo sapiens
  misc_RNA (1)...(19): siRNA sense strand
ucaccauugcacuuuauua

SEQ ID NO: 1214823 - RNA, 19 nt, Homo sapiens
  misc_RNA (1)...(19): siRNA sense strand
uggaauauucucugugaaa

SEQ ID NO: 1214824 - RNA, 19 nt, Homo sapiens
  misc_RNA (1)...(19): siRNA sense strand
gaaaaggaucccacucuga

SEQ ID NO: 1214825 - RNA, 19 nt, Homo sapiens
  misc_RNA (1)...(19): siRNA sense strand
cuagaaggcaaaccaauuc

SEQ ID NO: 1214826 - RNA, 19 nt, Homo sapiens
  misc_RNA (1)...(19): siRNA sense strand
ccacaaacuaaacaguaaa

SEQ ID NO: 1214827 - RNA, 19 nt, Homo sapiens
  misc_RNA (1)...(19): siRNA sense strand
ccugugaaguacuaaugaa

SEQ ID NO: 1214828 - RNA, 19 nt, Homo sapiens
  misc_RNA (1)...(19): siRNA sense strand
gcuaaagagcccuuaccaa

SEQ ID NO: 1214829 - RNA, 19 nt, Homo sapiens
  misc_RNA (1)...(19): siRNA sense strand
ggaauguaaccugaaucua

SEQ ID NO: 1214830 - RNA, 19 nt, Homo sapiens
  misc_RNA (1)...(19): siRNA sense strand
uaaauagcaaagccaaaga

SEQ ID NO: 1214831 - RNA, 19 nt, Homo sapiens
  misc_RNA (1)...(19): siRNA sense strand
gugaaguacuaaugaaugc

SEQ ID NO: 1214832 - RNA, 19 nt, Homo sapiens
  misc_RNA (1)...(19): siRNA sense strand
guacugaugggacguucuu

SEQ ID NO: 1214833 - RNA, 19 nt, Homo sapiens
  misc_RNA (1)...(19): siRNA sense strand
caccauugcacuuuauuau

SEQ ID NO: 1214834 - RNA, 19 nt, Homo sapiens
  misc_RNA (1)...(19): siRNA sense strand
gggacguucuugucuucuu

SEQ ID NO: 1214835 - RNA, 19 nt, Homo sapiens
  misc_RNA (1)...(19): siRNA sense strand
agacauaaagaauggaaga

SEQ ID NO: 1214836 - RNA, 19 nt, Homo sapiens
  misc_RNA (1)...(19): siRNA sense strand
uauaugaacagucacacuu

SEQ ID NO: 1214837 - RNA, 19 nt, Homo sapiens
  misc_RNA (1)...(19): siRNA sense strand
gccaaagaacugcaaacuu

SEQ ID NO: 1214838 - RNA, 19 nt, Homo sapiens
  misc_RNA (1)...(19): siRNA sense strand
ucugaccugugaaguacua

SEQ ID NO: 1214839 - RNA, 19 nt, Homo sapiens
  misc_RNA (1)...(19): siRNA sense strand
ucuagaaggcaaaccaauu

SEQ ID NO: 1214840 - RNA, 19 nt, Homo sapiens
  misc_RNA (1)...(19): siRNA sense strand
uagaacauguccacaagac

SEQ ID NO: 1214841 - RNA, 19 nt, Homo sapiens
  misc_RNA (1)...(19): siRNA sense strand
aaugaaugcuguugcuaca

SEQ ID NO: 1214842 - RNA, 19 nt, Homo sapiens
  misc_RNA (1)...(19): siRNA sense strand
caacugaaacuaccaugcu

SEQ ID NO: 1214843 - RNA, 19 nt, Homo sapiens
  misc_RNA (1)...(19): siRNA sense strand
uggaaauacgugacaaauu

SEQ ID NO: 1214844 - RNA, 19 nt, Homo sapiens
  misc_RNA (1)...(19): siRNA sense strand
gaaucuaaugagagaagaa

SEQ ID NO: 1214845 - RNA, 19 nt, Homo sapiens
  misc_RNA (1)...(19): siRNA sense strand
caagaccacaaacuaaaca

SEQ ID NO: 1214846 - RNA, 19 nt, Homo sapiens
  misc_RNA (1)...(19): siRNA sense strand
guacuaaugaaugcuguug

SEQ ID NO: 1214847 - RNA, 19 nt, Homo sapiens
  misc_RNA (1)...(19): siRNA sense strand
ugacuuucuuuacaaccaa

SEQ ID NO: 1214848 - RNA, 19 nt, Homo sapiens
  misc_RNA (1)...(19): siRNA sense strand
gauccaugaccauaugaau

SEQ ID NO: 1214849 - RNA, 19 nt, Homo sapiens
  misc_RNA (1)...(19): siRNA sense strand
cuaaugagagaagaaggua

SEQ ID NO: 1214850 - RNA, 19 nt, Homo sapiens
  misc_RNA (1)...(19): siRNA sense strand
cuuagaacauguccacaag

SEQ ID NO: 1214851 - RNA, 19 nt, Homo sapiens
  misc_RNA (1)...(19): siRNA sense strand
uugaagcaccugaucauug

SEQ ID NO: 1214852 - RNA, 19 nt, Homo sapiens
  misc_RNA (1)...(19): siRNA sense strand
ggaguggauauauggcaaa

SEQ ID NO: 1214853 - RNA, 19 nt, Homo sapiens
  misc_RNA (1)...(19): siRNA sense strand
gaaucuagaaggcaaacca

SEQ ID NO: 1214854 - RNA, 19 nt, Homo sapiens
  misc_RNA (1)...(19): siRNA sense strand
aaacuggcucggagaagaa

SEQ ID NO: 1214855 - RNA, 19 nt, Homo sapiens
  misc_RNA (1)...(19): siRNA sense strand
uuuacuugauggacaguuu

SEQ ID NO: 1214856 - RNA, 19 nt, Homo sapiens
  misc_RNA (1)...(19): siRNA sense strand
aaauagcaaagccaaagaa

SEQ ID NO: 1214857 - RNA, 19 nt, Homo sapiens
  misc_RNA (1)...(19): siRNA sense strand
gaccugugaaguacuaaug

SEQ ID NO: 1214858 - RNA, 19 nt, Homo sapiens
  misc_RNA (1)...(19): siRNA sense strand
uuacuugauggacaguuua

SEQ ID NO: 1214859 - RNA, 19 nt, Homo sapiens
  misc_RNA (1)...(19): siRNA sense strand
acuaccaugcuaacaaaua

SEQ ID NO: 1214860 - RNA, 19 nt, Homo sapiens
  misc_RNA (1)...(19): siRNA sense strand
aauacuuccuuucaugugu

SEQ ID NO: 1214861 - RNA, 19 nt, Homo sapiens
  misc_RNA (1)...(19): siRNA sense strand
agaauucucccucuguugu

SEQ ID NO: 1214862 - RNA, 19 nt, Homo sapiens
  misc_RNA (1)...(19): siRNA sense strand
aggcaaaccaauucuauuc

SEQ ID NO: 1214863 - RNA, 19 nt, Homo sapiens
  misc_RNA (1)...(19): siRNA sense strand
gcaaacuugggaguggaua

SEQ ID NO: 1214864 - RNA, 19 nt, Homo sapiens
  misc_RNA (1)...(19): siRNA sense strand
gaccauaugaaucuagaag

SEQ ID NO: 1214865 - RNA, 19 nt, Homo sapiens
  misc_RNA (1)...(19): siRNA sense strand
gauggacaguuuaaaaucu

SEQ ID NO: 1214866 - RNA, 19 nt, Homo sapiens
  misc_RNA (1)...(19): siRNA sense strand
aacugaaacuaccaugcua

SEQ ID NO: 1214867 - RNA, 19 nt, Homo sapiens
  misc_RNA (1)...(19): siRNA sense strand
cuggauccaugaccauaug

SEQ ID NO: 1214868 - RNA, 19 nt, Homo sapiens
  misc_RNA (1)...(19): siRNA sense strand
ugaacagucacacuuggaa

SEQ ID NO: 1214869 - RNA, 19 nt, Homo sapiens
  misc_RNA (1)...(19): siRNA sense strand
gcacuuuauuauguaguac

SEQ ID NO: 1214870 - RNA, 19 nt, Homo sapiens
  misc_RNA (1)...(19): siRNA sense strand
cagucaauuuccaaugaug

SEQ ID NO: 1214871 - RNA, 19 nt, Homo sapiens
  misc_RNA (1)...(19): siRNA sense strand
gacauaaagaauggaagaa

SEQ ID NO: 1214872 - RNA, 19 nt, Homo sapiens
  misc_RNA (1)...(19): siRNA sense strand
uacuuccuuucauguguua

SEQ ID NO: 1214873 - RNA, 19 nt, Homo sapiens
  misc_RNA (1)...(19): siRNA sense strand
auacuuccuuucauguguu

SEQ ID NO: 1214874 - RNA, 19 nt, Homo sapiens
  misc_RNA (1)...(19): siRNA sense strand
acagucaauuuccaaugau

SEQ ID NO: 1214875 - RNA, 19 nt, Homo sapiens
  misc_RNA (1)...(19): siRNA sense strand
caauuuccaaugaugucua

SEQ ID NO: 1214876 - RNA, 19 nt, Homo sapiens
  misc_RNA (1)...(19): siRNA sense strand
ggaaauacgugacaaauua

SEQ ID NO: 1214877 - RNA, 19 nt, Homo sapiens
  misc_RNA (1)...(19): siRNA sense strand
ccaaagaacugcaaacuug

SEQ ID NO: 1214878 - RNA, 19 nt, Homo sapiens
  misc_RNA (1)...(19): siRNA sense strand
gaauguaaccugaaucuaa

SEQ ID NO: 1214879 - RNA, 19 nt, Homo sapiens
  misc_RNA (1)...(19): siRNA sense strand
ggaacagucuaccaugaua

SEQ ID NO: 1214880 - RNA, 19 nt, Homo sapiens
  misc_RNA (1)...(19): siRNA sense strand
uagcauaccuuccuuagug

SEQ ID NO: 1214881 - RNA, 19 nt, Homo sapiens
  misc_RNA (1)...(19): siRNA sense strand
gcaaaccaauucuauucuu

SEQ ID NO: 1214882 - RNA, 19 nt, Homo sapiens
  misc_RNA (1)...(19): siRNA sense strand
gaggaacagucuaccauga

SEQ ID NO: 1214883 - RNA, 19 nt, Homo sapiens
  misc_RNA (1)...(19): siRNA sense strand
gauaaucacauucaccuaa

SEQ ID NO: 1214884 - RNA, 19 nt, Homo sapiens
  misc_RNA (1)...(19): siRNA sense strand
gaaacuaccaugcuaacaa

SEQ ID NO: 1214885 - RNA, 19 nt, Homo sapiens
  misc_RNA (1)...(19): siRNA sense strand
aaacuaccaugcuaacaaa

SEQ ID NO: 1214886 - RNA, 19 nt, Homo sapiens
  misc_RNA (1)...(19): siRNA sense strand
ggacguucuugucuucuuu

SEQ ID NO: 1214887 - RNA, 19 nt, Homo sapiens
  misc_RNA (1)...(19): siRNA sense strand
guucuugucuucuuugcua

SEQ ID NO: 1214888 - RNA, 19 nt, Homo sapiens
  misc_RNA (1)...(19): siRNA sense strand
ccacaagaccacaaacuaa

SEQ ID NO: 1214889 - RNA, 19 nt, Homo sapiens
  misc_RNA (1)...(19): siRNA sense strand
gaaggcaaaccaauucuau

SEQ ID NO: 1214890 - RNA, 19 nt, Homo sapiens
  misc_RNA (1)...(19): siRNA sense strand
ccauugcacuuuauuaugu

SEQ ID NO: 1214891 - RNA, 19 nt, Homo sapiens
  misc_RNA (1)...(19): siRNA sense strand
uaaccugaaucuaaugaga

SEQ ID NO: 1214892 - RNA, 19 nt, Homo sapiens
  misc_RNA (1)...(19): siRNA sense strand
gaccacaaacuaaacagua

SEQ ID NO: 1214893 - RNA, 19 nt, Homo sapiens
  misc_RNA (1)...(19): siRNA sense strand
gaucauugguugccauugg

SEQ ID NO: 1214894 - RNA, 19 nt, Homo sapiens
  misc_RNA (1)...(19): siRNA sense strand
uaauaaacccaacggauga

SEQ ID NO: 1214895 - RNA, 19 nt, Homo sapiens
  misc_RNA (1)...(19): siRNA sense strand
uacagucaauuuccaauga

SEQ ID NO: 1214896 - RNA, 19 nt, Homo sapiens
  misc_RNA (1)...(19): siRNA sense strand
aauggaauauucucuguga

SEQ ID NO: 1214897 - RNA, 19 nt, Homo sapiens
  misc_RNA (1)...(19): siRNA sense strand
cagucacacuuggaaauua

SEQ ID NO: 1214898 - RNA, 19 nt, Homo sapiens
  misc_RNA (1)...(19): siRNA sense strand
cuaccaugcuaacaaauau

SEQ ID NO: 1214899 - RNA, 19 nt, Homo sapiens
  misc_RNA (1)...(19): siRNA sense strand
gaacagucacacuuggaaa

SEQ ID NO: 1214900 - RNA, 19 nt, Homo sapiens
  misc_RNA (1)...(19): siRNA sense strand
ugaagcaccugaucauugg

SEQ ID NO: 1214901 - RNA, 19 nt, Homo sapiens
  misc_RNA (1)...(19): siRNA sense strand
gaugggacguucuugucuu

SEQ ID NO: 1214902 - RNA, 19 nt, Homo sapiens
  misc_RNA (1)...(19): siRNA sense strand
gaacagucuaccaugauau

SEQ ID NO: 1214903 - RNA, 19 nt, Homo sapiens
  misc_RNA (1)...(19): siRNA sense strand
caagggaucaggagcaaug

SEQ ID NO: 1214904 - RNA, 19 nt, Homo sapiens
  misc_RNA (1)...(19): siRNA sense strand
agucacacuuggaaauuaa

SEQ ID NO: 1214905 - RNA, 19 nt, Homo sapiens
  misc_RNA (1)...(19): siRNA sense strand
guaauugguaggcaucaaa

SEQ ID NO: 1214906 - RNA, 19 nt, Homo sapiens
  misc_RNA (1)...(19): siRNA sense strand
ucauagacauaaagaaugg

SEQ ID NO: 1214907 - RNA, 19 nt, Homo sapiens
  misc_RNA (1)...(19): siRNA sense strand
gaauucucccucuguugua

SEQ ID NO: 1214908 - RNA, 19 nt, Homo sapiens
  misc_RNA (1)...(19): siRNA sense strand
uagcaaagccaaagaacug

SEQ ID NO: 1214909 - RNA, 19 nt, Homo sapiens
  misc_RNA (1)...(19): siRNA sense strand
gauuugaccuuuuacuuga

SEQ ID NO: 1214910 - RNA, 19 nt, Homo sapiens
  misc_RNA (1)...(19): siRNA sense strand
gagagaagaagguauaaaa

SEQ ID NO: 1214911 - RNA, 19 nt, Homo sapiens
  misc_RNA (1)...(19): siRNA sense strand
aaugagagaagaagguaua

SEQ ID NO: 1214912 - RNA, 19 nt, Homo sapiens
  misc_RNA (1)...(19): siRNA sense strand
cacaagaccacaaacuaaa

SEQ ID NO: 1214913 - RNA, 19 nt, Homo sapiens
  misc_RNA (1)...(19): siRNA sense strand
ggaauauucucugugaaaa

SEQ ID NO: 1214914 - RNA, 19 nt, Homo sapiens
  misc_RNA (1)...(19): siRNA sense strand
caaacuaaacaguaaaugg

SEQ ID NO: 1214915 - RNA, 19 nt, Homo sapiens
  misc_RNA (1)...(19): siRNA sense strand
cuaucaccauugcacuuua

SEQ ID NO: 1214916 - RNA, 19 nt, Homo sapiens
  misc_RNA (1)...(19): siRNA sense strand
caagucuuauuggcaguaa

SEQ ID NO: 1214917 - RNA, 19 nt, Homo sapiens
  misc_RNA (1)...(19): siRNA sense strand
aaacuugggaguggauaua

SEQ ID NO: 1214918 - RNA, 19 nt, Homo sapiens
  misc_RNA (1)...(19): siRNA sense strand
uaucaccauugcacuuuau

SEQ ID NO: 1214919 - RNA, 19 nt, Homo sapiens
  misc_RNA (1)...(19): siRNA sense strand
accacaaacuaaacaguaa

SEQ ID NO: 1214920 - RNA, 19 nt, Homo sapiens
  misc_RNA (1)...(19): siRNA sense strand
caacggaugagacacuguu

SEQ ID NO: 1214921 - RNA, 19 nt, Homo sapiens
  misc_RNA (1)...(19): siRNA sense strand
aagaauugcuuccaguuac

SEQ ID NO: 1214922 - RNA, 19 nt, Homo sapiens
  misc_RNA (1)...(19): siRNA sense strand
ucaccauugcacuuuauua

SEQ ID NO: 1214923 - RNA, 19 nt, Homo sapiens
  misc_RNA (1)...(19): siRNA sense strand
uggaauauucucugugaaa

SEQ ID NO: 1214924 - RNA, 19 nt, Homo sapiens
  misc_RNA (1)...(19): siRNA sense strand
gaaaaggaucccacucuga

SEQ ID NO: 1214925 - RNA, 19 nt, Homo sapiens
  misc_RNA (1)...(19): siRNA sense strand
cuagaaggcaaaccaauuc

SEQ ID NO: 1214926 - RNA, 19 nt, Homo sapiens
  misc_RNA (1)...(19): siRNA sense strand
ccacaaacuaaacaguaaa

SEQ ID NO: 1214927 - RNA, 19 nt, Homo sapiens
  misc_RNA (1)...(19): siRNA sense strand
ccugugaaguacuaaugaa

SEQ ID NO: 1214928 - RNA, 19 nt, Homo sapiens
  misc_RNA (1)...(19): siRNA sense strand
gcuaaagagcccuuaccaa

SEQ ID NO: 1214929 - RNA, 19 nt, Homo sapiens
  misc_RNA (1)...(19): siRNA sense strand
ggaauguaaccugaaucua

SEQ ID NO: 1214930 - RNA, 19 nt, Homo sapiens
  misc_RNA (1)...(19): siRNA sense strand
uaaauagcaaagccaaaga

SEQ ID NO: 1214931 - RNA, 19 nt, Homo sapiens
  misc_RNA (1)...(19): siRNA sense strand
gugaaguacuaaugaaugc

SEQ ID NO: 1214932 - RNA, 19 nt, Homo sapiens
  misc_RNA (1)...(19): siRNA sense strand
guacugaugggacguucuu

SEQ ID NO: 1214933 - RNA, 19 nt, Homo sapiens
  misc_RNA (1)...(19): siRNA sense strand
caccauugcacuuuauuau

SEQ ID NO: 1214934 - RNA, 19 nt, Homo sapiens
  misc_RNA (1)...(19): siRNA sense strand
gggacguucuugucuucuu

SEQ ID NO: 1214935 - RNA, 19 nt, Homo sapiens
  misc_RNA (1)...(19): siRNA sense strand
agacauaaagaauggaaga

SEQ ID NO: 1214936 - RNA, 19 nt, Homo sapiens
  misc_RNA (1)...(19): siRNA sense strand
uauaugaacagucacacuu

SEQ ID NO: 1214937 - RNA, 19 nt, Homo sapiens
  misc_RNA (1)...(19): siRNA sense strand
gccaaagaacugcaaacuu

SEQ ID NO: 1214938 - RNA, 19 nt, Homo sapiens
  misc_RNA (1)...(19): siRNA sense strand
ucugaccugugaaguacua

SEQ ID NO: 1214939 - RNA, 19 nt, Homo sapiens
  misc_RNA (1)...(19): siRNA sense strand
ucuagaaggcaaaccaauu

SEQ ID NO: 1214940 - RNA, 19 nt, Homo sapiens
  misc_RNA (1)...(19): siRNA sense strand
uagaacauguccacaagac

SEQ ID NO: 1214941 - RNA, 19 nt, Homo sapiens
  misc_RNA (1)...(19): siRNA sense strand
aaugaaugcuguugcuaca

SEQ ID NO: 1214942 - RNA, 19 nt, Homo sapiens
  misc_RNA (1)...(19): siRNA sense strand
caacugaaacuaccaugcu

SEQ ID NO: 1214943 - RNA, 19 nt, Homo sapiens
  misc_RNA (1)...(19): siRNA sense strand
uggaaauacgugacaaauu

SEQ ID NO: 1214944 - RNA, 19 nt, Homo sapiens
  misc_RNA (1)...(19): siRNA sense strand
gaaucuaaugagagaagaa

SEQ ID NO: 1214945 - RNA, 19 nt, Homo sapiens
  misc_RNA (1)...(19): siRNA sense strand
caagaccacaaacuaaaca

SEQ ID NO: 1214946 - RNA, 19 nt, Homo sapiens
  misc_RNA (1)...(19): siRNA sense strand
guacuaaugaaugcuguug

SEQ ID NO: 1214947 - RNA, 19 nt, Homo sapiens
  misc_RNA (1)...(19): siRNA sense strand
ugacuuucuuuacaaccaa

SEQ ID NO: 1214948 - RNA, 19 nt, Homo sapiens
  misc_RNA (1)...(19): siRNA sense strand
gauccaugaccauaugaau

SEQ ID NO: 1214949 - RNA, 19 nt, Homo sapiens
  misc_RNA (1)...(19): siRNA sense strand
cuaaugagagaagaaggua

SEQ ID NO: 1214950 - RNA, 19 nt, Homo sapiens
  misc_RNA (1)...(19): siRNA sense strand
cuuagaacauguccacaag

SEQ ID NO: 1214951 - RNA, 19 nt, Homo sapiens
  misc_RNA (1)...(19): siRNA sense strand
uugaagcaccugaucauug

SEQ ID NO: 1214952 - RNA, 19 nt, Homo sapiens
  misc_RNA (1)...(19): siRNA sense strand
ggaguggauauauggcaaa

SEQ ID NO: 1214953 - RNA, 19 nt, Homo sapiens
  misc_RNA (1)...(19): siRNA sense strand
gaaucuagaaggcaaacca

SEQ ID NO: 1214954 - RNA, 19 nt, Homo sapiens
  misc_RNA (1)...(19): siRNA sense strand
aaacuggcucggagaagaa

SEQ ID NO: 1214955 - RNA, 19 nt, Homo sapiens
  misc_RNA (1)...(19): siRNA sense strand
uuuacuugauggacaguuu

SEQ ID NO: 1214956 - RNA, 19 nt, Homo sapiens
  misc_RNA (1)...(19): siRNA sense strand
aaauagcaaagccaaagaa

SEQ ID NO: 1214957 - RNA, 19 nt, Homo sapiens
  misc_RNA (1)...(19): siRNA sense strand
gaccugugaaguacuaaug

SEQ ID NO: 1214958 - RNA, 19 nt, Homo sapiens
  misc_RNA (1)...(19): siRNA sense strand
uuacuugauggacaguuua

SEQ ID NO: 1214959 - RNA, 19 nt, Homo sapiens
  misc_RNA (1)...(19): siRNA sense strand
acuaccaugcuaacaaaua

SEQ ID NO: 1214960 - RNA, 19 nt, Homo sapiens
  misc_RNA (1)...(19): siRNA sense strand
aauacuuccuuucaugugu

SEQ ID NO: 1214961 - RNA, 19 nt, Homo sapiens
  misc_RNA (1)...(19): siRNA sense strand
agaauucucccucuguugu

SEQ ID NO: 1214962 - RNA, 19 nt, Homo sapiens
  misc_RNA (1)...(19): siRNA sense strand
aggcaaaccaauucuauuc

SEQ ID NO: 1214963 - RNA, 19 nt, Homo sapiens
  misc_RNA (1)...(19): siRNA sense strand
gcaaacuugggaguggaua

SEQ ID NO: 1214964 - RNA, 19 nt, Homo sapiens
  misc_RNA (1)...(19): siRNA sense strand
gaccauaugaaucuagaag

SEQ ID NO: 1214965 - RNA, 19 nt, Homo sapiens
  misc_RNA (1)...(19): siRNA sense strand
gauggacaguuuaaaaucu

SEQ ID NO: 1214966 - RNA, 19 nt, Homo sapiens
  misc_RNA (1)...(19): siRNA sense strand
aacugaaacuaccaugcua

SEQ ID NO: 1214967 - RNA, 19 nt, Homo sapiens
  misc_RNA (1)...(19): siRNA sense strand
cuggauccaugaccauaug

SEQ ID NO: 1214968 - RNA, 19 nt, Homo sapiens
  misc_RNA (1)...(19): siRNA sense strand
ugaacagucacacuuggaa

SEQ ID NO: 1214969 - RNA, 19 nt, Homo sapiens
  misc_RNA (1)...(19): siRNA sense strand
gcacuuuauuauguaguac

SEQ ID NO: 1214970 - RNA, 19 nt, Homo sapiens
  misc_RNA (1)...(19): siRNA sense strand
cagucaauuuccaaugaug

SEQ ID NO: 1214971 - RNA, 19 nt, Homo sapiens
  misc_RNA (1)...(19): siRNA sense strand
gacauaaagaauggaagaa

SEQ ID NO: 1214972 - RNA, 19 nt, Homo sapiens
  misc_RNA (1)...(19): siRNA sense strand
uacuuccuuucauguguua

SEQ ID NO: 1214973 - RNA, 19 nt, Homo sapiens
  misc_RNA (1)...(19): siRNA sense strand
auacuuccuuucauguguu

SEQ ID NO: 1214974 - RNA, 19 nt, Homo sapiens
  misc_RNA (1)...(19): siRNA sense strand
acagucaauuuccaaugau

SEQ ID NO: 1214975 - RNA, 19 nt, Homo sapiens
  misc_RNA (1)...(19): siRNA sense strand
caauuuccaaugaugucua

SEQ ID NO: 1214976 - RNA, 19 nt, Homo sapiens
  misc_RNA (1)...(19): siRNA sense strand
ggaaauacgugacaaauua

SEQ ID NO: 1214977 - RNA, 19 nt, Homo sapiens
  misc_RNA (1)...(19): siRNA sense strand
ccaaagaacugcaaacuug

SEQ ID NO: 1214978 - RNA, 19 nt, Homo sapiens
  misc_RNA (1)...(19): siRNA sense strand
gaauguaaccugaaucuaa

SEQ ID NO: 1214979 - RNA, 19 nt, Homo sapiens
  misc_RNA (1)...(19): siRNA sense strand
ggaacagucuaccaugaua

SEQ ID NO: 1214980 - RNA, 19 nt, Homo sapiens
  misc_RNA (1)...(19): siRNA sense strand
uagcauaccuuccuuagug

SEQ ID NO: 1214981 - RNA, 19 nt, Homo sapiens
  misc_RNA (1)...(19): siRNA sense strand
gcaaaccaauucuauucuu

SEQ ID NO: 1214982 - RNA, 19 nt, Homo sapiens
  misc_RNA (1)...(19): siRNA sense strand
gaggaacagucuaccauga

SEQ ID NO: 1214983 - RNA, 19 nt, Homo sapiens
  misc_RNA (1)...(19): siRNA sense strand
gauaaucacauucaccuaa

SEQ ID NO: 1214984 - RNA, 19 nt, Homo sapiens
  misc_RNA (1)...(19): siRNA sense strand
gaaacuaccaugcuaacaa

SEQ ID NO: 1214985 - RNA, 19 nt, Homo sapiens
  misc_RNA (1)...(19): siRNA sense strand
aaacuaccaugcuaacaaa

SEQ ID NO: 1214986 - RNA, 19 nt, Homo sapiens
  misc_RNA (1)...(19): siRNA sense strand
ggacguucuugucuucuuu

SEQ ID NO: 1214987 - RNA, 19 nt, Homo sapiens
  misc_RNA (1)...(19): siRNA sense strand
guucuugucuucuuugcua

SEQ ID NO: 1214988 - RNA, 19 nt, Homo sapiens
  misc_RNA (1)...(19): siRNA sense strand
ccacaagaccacaaacuaa

SEQ ID NO: 1214989 - RNA, 19 nt, Homo sapiens
  misc_RNA (1)...(19): siRNA sense strand
gaaggcaaaccaauucuau

SEQ ID NO: 1214990 - RNA, 19 nt, Homo sapiens
  misc_RNA (1)...(19): siRNA sense strand
ccauugcacuuuauuaugu

SEQ ID NO: 1214991 - RNA, 19 nt, Homo sapiens
  misc_RNA (1)...(19): siRNA sense strand
uaaccugaaucuaaugaga

SEQ ID NO: 1214992 - RNA, 19 nt, Homo sapiens
  misc_RNA (1)...(19): siRNA sense strand
gaccacaaacuaaacagua

SEQ ID NO: 1214993 - RNA, 19 nt, Homo sapiens
  misc_RNA (1)...(19): siRNA sense strand
gaucauugguugccauugg

SEQ ID NO: 1214994 - RNA, 19 nt, Homo sapiens
  misc_RNA (1)...(19): siRNA sense strand
uaauaaacccaacggauga

SEQ ID NO: 1214995 - RNA, 19 nt, Homo sapiens
  misc_RNA (1)...(19): siRNA sense strand
uacagucaauuuccaauga

SEQ ID NO: 1214996 - RNA, 19 nt, Homo sapiens
  misc_RNA (1)...(19): siRNA sense strand
aauggaauauucucuguga

SEQ ID NO: 1214997 - RNA, 19 nt, Homo sapiens
  misc_RNA (1)...(19): siRNA sense strand
cagucacacuuggaaauua

SEQ ID NO: 1214998 - RNA, 19 nt, Homo sapiens
  misc_RNA (1)...(19): siRNA sense strand
cuaccaugcuaacaaauau

SEQ ID NO: 1214999 - RNA, 19 nt, Homo sapiens
  misc_RNA (1)...(19): siRNA sense strand
gaacagucacacuuggaaa

SEQ ID NO: 1215000 - RNA, 19 nt, Homo sapiens
  misc_RNA (1)...(19): siRNA sense strand
ugaagcaccugaucauugg

SEQ ID NO: 1215001 - RNA, 19 nt, Homo sapiens
  misc_RNA (1)...(19): siRNA sense strand
gaugggacguucuugucuu

SEQ ID NO: 1215002 - RNA, 19 nt, Homo sapiens
  misc_RNA (1)...(19): siRNA sense strand
gaacagucuaccaugauau

SEQ ID NO: 1215003 - RNA, 19 nt, Homo sapiens
  misc_RNA (1)...(19): siRNA sense strand
caagggaucaggagcaaug

SEQ ID NO: 1215004 - RNA, 19 nt, Homo sapiens
  misc_RNA (1)...(19): siRNA sense strand
agucacacuuggaaauuaa

SEQ ID NO: 1215005 - RNA, 19 nt, Homo sapiens
  misc_RNA (1)...(19): siRNA sense strand
guaauugguaggcaucaaa

SEQ ID NO: 1215006 - RNA, 19 nt, Homo sapiens
  misc_RNA (1)...(19): siRNA sense strand
ucauagacauaaagaaugg

SEQ ID NO: 1215007 - RNA, 19 nt, Homo sapiens
  misc_RNA (1)...(19): siRNA sense strand
gaauucucccucuguugua

SEQ ID NO: 1215008 - RNA, 19 nt, Homo sapiens
  misc_RNA (1)...(19): siRNA sense strand
uagcaaagccaaagaacug

SEQ ID NO: 1215009 - RNA, 19 nt, Homo sapiens
  misc_RNA (1)...(19): siRNA sense strand
gauuugaccuuuuacuuga

SEQ ID NO: 1215010 - RNA, 19 nt, Homo sapiens
  misc_RNA (1)...(19): siRNA sense strand
gagagaagaagguauaaaa

SEQ ID NO: 1215011 - RNA, 19 nt, Homo sapiens
  misc_RNA (1)...(19): siRNA sense strand
aaugagagaagaagguaua

SEQ ID NO: 1215012 - RNA, 19 nt, Homo sapiens
  misc_RNA (1)...(19): siRNA sense strand
cacaagaccacaaacuaaa

SEQ ID NO: 1215013 - RNA, 19 nt, Homo sapiens
  misc_RNA (1)...(19): siRNA sense strand
ggaauauucucugugaaaa

SEQ ID NO: 1215014 - RNA, 19 nt, Homo sapiens
  misc_RNA (1)...(19): siRNA sense strand
caaacuaaacaguaaaugg

SEQ ID NO: 1215015 - RNA, 19 nt, Homo sapiens
  misc_RNA (1)...(19): siRNA sense strand
cuaucaccauugcacuuua

SEQ ID NO: 1215016 - RNA, 19 nt, Homo sapiens
  misc_RNA (1)...(19): siRNA sense strand
caagucuuauuggcaguaa

SEQ ID NO: 1215017 - RNA, 19 nt, Homo sapiens
  misc_RNA (1)...(19): siRNA sense strand
aaacuugggaguggauaua

SEQ ID NO: 1215018 - RNA, 19 nt, Homo sapiens
  misc_RNA (1)...(19): siRNA sense strand
uaucaccauugcacuuuau

SEQ ID NO: 1215019 - RNA, 19 nt, Homo sapiens
  misc_RNA (1)...(19): siRNA sense strand
accacaaacuaaacaguaa

SEQ ID NO: 1215020 - RNA, 19 nt, Homo sapiens
  misc_RNA (1)...(19): siRNA sense strand
caacggaugagacacuguu

SEQ ID NO: 1215021 - RNA, 19 nt, Homo sapiens
  misc_RNA (1)...(19): siRNA sense strand
aagaauugcuuccaguuac

SEQ ID NO: 1215022 - RNA, 19 nt, Homo sapiens
  misc_RNA (1)...(19): siRNA sense strand
ucaccauugcacuuuauua

SEQ ID NO: 1215023 - RNA, 19 nt, Homo sapiens
  misc_RNA (1)...(19): siRNA sense strand
uggaauauucucugugaaa

SEQ ID NO: 1215024 - RNA, 19 nt, Homo sapiens
  misc_RNA (1)...(19): siRNA sense strand
gaaaaggaucccacucuga

SEQ ID NO: 1215025 - RNA, 19 nt, Homo sapiens
  misc_RNA (1)...(19): siRNA sense strand
cuagaaggcaaaccaauuc

SEQ ID NO: 1215026 - RNA, 19 nt, Homo sapiens
  misc_RNA (1)...(19): siRNA sense strand
ccacaaacuaaacaguaaa

SEQ ID NO: 1215027 - RNA, 19 nt, Homo sapiens
  misc_RNA (1)...(19): siRNA sense strand
ccugugaaguacuaaugaa

SEQ ID NO: 1215028 - RNA, 19 nt, Homo sapiens
  misc_RNA (1)...(19): siRNA sense strand
gcuaaagagcccuuaccaa

SEQ ID NO: 1215029 - RNA, 19 nt, Homo sapiens
  misc_RNA (1)...(19): siRNA sense strand
ggaauguaaccugaaucua

SEQ ID NO: 1215030 - RNA, 19 nt, Homo sapiens
  misc_RNA (1)...(19): siRNA sense strand
uaaauagcaaagccaaaga

SEQ ID NO: 1215031 - RNA, 19 nt, Homo sapiens
  misc_RNA (1)...(19): siRNA sense strand
gugaaguacuaaugaaugc

SEQ ID NO: 1215032 - RNA, 19 nt, Homo sapiens
  misc_RNA (1)...(19): siRNA sense strand
guacugaugggacguucuu

SEQ ID NO: 1215033 - RNA, 19 nt, Homo sapiens
  misc_RNA (1)...(19): siRNA sense strand
caccauugcacuuuauuau

SEQ ID NO: 1215034 - RNA, 19 nt, Homo sapiens
  misc_RNA (1)...(19): siRNA sense strand
gggacguucuugucuucuu

SEQ ID NO: 1215035 - RNA, 19 nt, Homo sapiens
  misc_RNA (1)...(19): siRNA sense strand
agacauaaagaauggaaga

SEQ ID NO: 1215036 - RNA, 19 nt, Homo sapiens
  misc_RNA (1)...(19): siRNA sense strand
uauaugaacagucacacuu

SEQ ID NO: 1215037 - RNA, 19 nt, Homo sapiens
  misc_RNA (1)...(19): siRNA sense strand
gccaaagaacugcaaacuu

SEQ ID NO: 1215038 - RNA, 19 nt, Homo sapiens
  misc_RNA (1)...(19): siRNA sense strand
ucugaccugugaaguacua

SEQ ID NO: 1215039 - RNA, 19 nt, Homo sapiens
  misc_RNA (1)...(19): siRNA sense strand
ucuagaaggcaaaccaauu

SEQ ID NO: 1215040 - RNA, 19 nt, Homo sapiens
  misc_RNA (1)...(19): siRNA sense strand
uagaacauguccacaagac

SEQ ID NO: 1215041 - RNA, 19 nt, Homo sapiens
  misc_RNA (1)...(19): siRNA sense strand
aaugaaugcuguugcuaca

SEQ ID NO: 1215042 - RNA, 19 nt, Homo sapiens
  misc_RNA (1)...(19): siRNA sense strand
caacugaaacuaccaugcu

SEQ ID NO: 1215043 - RNA, 19 nt, Homo sapiens
  misc_RNA (1)...(19): siRNA sense strand
uggaaauacgugacaaauu

SEQ ID NO: 1215044 - RNA, 19 nt, Homo sapiens
  misc_RNA (1)...(19): siRNA sense strand
gaaucuaaugagagaagaa

SEQ ID NO: 1215045 - RNA, 19 nt, Homo sapiens
  misc_RNA (1)...(19): siRNA sense strand
caagaccacaaacuaaaca

SEQ ID NO: 1215046 - RNA, 19 nt, Homo sapiens
  misc_RNA (1)...(19): siRNA sense strand
guacuaaugaaugcuguug

SEQ ID NO: 1215047 - RNA, 19 nt, Homo sapiens
  misc_RNA (1)...(19): siRNA sense strand
ugacuuucuuuacaaccaa

SEQ ID NO: 1215048 - RNA, 19 nt, Homo sapiens
  misc_RNA (1)...(19): siRNA sense strand
gauccaugaccauaugaau

SEQ ID NO: 1215049 - RNA, 19 nt, Homo sapiens
  misc_RNA (1)...(19): siRNA sense strand
cuaaugagagaagaaggua

SEQ ID NO: 1215050 - RNA, 19 nt, Homo sapiens
  misc_RNA (1)...(19): siRNA sense strand
cuuagaacauguccacaag

SEQ ID NO: 1215051 - RNA, 19 nt, Homo sapiens
  misc_RNA (1)...(19): siRNA sense strand
uugaagcaccugaucauug

SEQ ID NO: 1215052 - RNA, 19 nt, Homo sapiens
  misc_RNA (1)...(19): siRNA sense strand
ggaguggauauauggcaaa

SEQ ID NO: 1215053 - RNA, 19 nt, Homo sapiens
  misc_RNA (1)...(19): siRNA sense strand
gaaucuagaaggcaaacca

SEQ ID NO: 1215054 - RNA, 19 nt, Homo sapiens
  misc_RNA (1)...(19): siRNA sense strand
aaacuggcucggagaagaa

SEQ ID NO: 1215055 - RNA, 19 nt, Homo sapiens
  misc_RNA (1)...(19): siRNA sense strand
uuuacuugauggacaguuu

SEQ ID NO: 1215056 - RNA, 19 nt, Homo sapiens
  misc_RNA (1)...(19): siRNA sense strand
aaauagcaaagccaaagaa

SEQ ID NO: 1215057 - RNA, 19 nt, Homo sapiens
  misc_RNA (1)...(19): siRNA sense strand
gaccugugaaguacuaaug

SEQ ID NO: 1215058 - RNA, 19 nt, Homo sapiens
  misc_RNA (1)...(19): siRNA sense strand
uuacuugauggacaguuua

SEQ ID NO: 1215059 - RNA, 19 nt, Homo sapiens
  misc_RNA (1)...(19): siRNA sense strand
acuaccaugcuaacaaaua

SEQ ID NO: 1215060 - RNA, 19 nt, Homo sapiens
  misc_RNA (1)...(19): siRNA sense strand
aauacuuccuuucaugugu

SEQ ID NO: 1215061 - RNA, 19 nt, Homo sapiens
  misc_RNA (1)...(19): siRNA sense strand
agaauucucccucuguugu

SEQ ID NO: 1215062 - RNA, 19 nt, Homo sapiens
  misc_RNA (1)...(19): siRNA sense strand
aggcaaaccaauucuauuc

SEQ ID NO: 1215063 - RNA, 19 nt, Homo sapiens
  misc_RNA (1)...(19): siRNA sense strand
gcaaacuugggaguggaua

SEQ ID NO: 1215064 - RNA, 19 nt, Homo sapiens
  misc_RNA (1)...(19): siRNA sense strand
gaccauaugaaucuagaag

SEQ ID NO: 1215065 - RNA, 19 nt, Homo sapiens
  misc_RNA (1)...(19): siRNA sense strand
gauggacaguuuaaaaucu

SEQ ID NO: 1215066 - RNA, 19 nt, Homo sapiens
  misc_RNA (1)...(19): siRNA sense strand
aacugaaacuaccaugcua

SEQ ID NO: 1215067 - RNA, 19 nt, Homo sapiens
  misc_RNA (1)...(19): siRNA sense strand
cuggauccaugaccauaug

SEQ ID NO: 1215068 - RNA, 19 nt, Homo sapiens
  misc_RNA (1)...(19): siRNA sense strand
ugaacagucacacuuggaa

SEQ ID NO: 1215069 - RNA, 19 nt, Homo sapiens
  misc_RNA (1)...(19): siRNA sense strand
gcacuuuauuauguaguac

SEQ ID NO: 1215070 - RNA, 19 nt, Homo sapiens
  misc_RNA (1)...(19): siRNA sense strand
cagucaauuuccaaugaug

SEQ ID NO: 1215071 - RNA, 19 nt, Homo sapiens
  misc_RNA (1)...(19): siRNA sense strand
gacauaaagaauggaagaa

SEQ ID NO: 1215072 - RNA, 19 nt, Homo sapiens
  misc_RNA (1)...(19): siRNA sense strand
uacuuccuuucauguguua

SEQ ID NO: 1215073 - RNA, 19 nt, Homo sapiens
  misc_RNA (1)...(19): siRNA sense strand
auacuuccuuucauguguu

SEQ ID NO: 1215074 - RNA, 19 nt, Homo sapiens
  misc_RNA (1)...(19): siRNA sense strand
acagucaauuuccaaugau

SEQ ID NO: 1215075 - RNA, 19 nt, Homo sapiens
  misc_RNA (1)...(19): siRNA sense strand
caauuuccaaugaugucua

SEQ ID NO: 1215076 - RNA, 19 nt, Homo sapiens
  misc_RNA (1)...(19): siRNA sense strand
ggaaauacgugacaaauua

SEQ ID NO: 1215077 - RNA, 19 nt, Homo sapiens
  misc_RNA (1)...(19): siRNA sense strand
ccaaagaacugcaaacuug

SEQ ID NO: 1215078 - RNA, 19 nt, Homo sapiens
  misc_RNA (1)...(19): siRNA sense strand
gaauguaaccugaaucuaa

SEQ ID NO: 1215079 - RNA, 19 nt, Homo sapiens
  misc_RNA (1)...(19): siRNA sense strand
ggaacagucuaccaugaua

SEQ ID NO: 1215080 - RNA, 19 nt, Homo sapiens
  misc_RNA (1)...(19): siRNA sense strand
uagcauaccuuccuuagug

SEQ ID NO: 1215081 - RNA, 19 nt, Homo sapiens
  misc_RNA (1)...(19): siRNA sense strand
gcaaaccaauucuauucuu

SEQ ID NO: 1215082 - RNA, 19 nt, Homo sapiens
  misc_RNA (1)...(19): siRNA sense strand
gaggaacagucuaccauga

SEQ ID NO: 1215083 - RNA, 19 nt, Homo sapiens
  misc_RNA (1)...(19): siRNA sense strand
gauaaucacauucaccuaa

SEQ ID NO: 1215084 - RNA, 19 nt, Homo sapiens
  misc_RNA (1)...(19): siRNA sense strand
gaaacuaccaugcuaacaa

SEQ ID NO: 1215085 - RNA, 19 nt, Homo sapiens
  misc_RNA (1)...(19): siRNA sense strand
aaacuaccaugcuaacaaa

SEQ ID NO: 1215086 - RNA, 19 nt, Homo sapiens
  misc_RNA (1)...(19): siRNA sense strand
ggacguucuugucuucuuu

SEQ ID NO: 1215087 - RNA, 19 nt, Homo sapiens
  misc_RNA (1)...(19): siRNA sense strand
guucuugucuucuuugcua

SEQ ID NO: 1215088 - RNA, 19 nt, Homo sapiens
  misc_RNA (1)...(19): siRNA sense strand
ccacaagaccacaaacuaa

SEQ ID NO: 1215089 - RNA, 19 nt, Homo sapiens
  misc_RNA (1)...(19): siRNA sense strand
gaaggcaaaccaauucuau

SEQ ID NO: 1215090 - RNA, 19 nt, Homo sapiens
  misc_RNA (1)...(19): siRNA sense strand
ccauugcacuuuauuaugu

SEQ ID NO: 1215091 - RNA, 19 nt, Homo sapiens
  misc_RNA (1)...(19): siRNA sense strand
uaaccugaaucuaaugaga

SEQ ID NO: 1215092 - RNA, 19 nt, Homo sapiens
  misc_RNA (1)...(19): siRNA sense strand
gaccacaaacuaaacagua

SEQ ID NO: 1215093 - RNA, 19 nt, Homo sapiens
  misc_RNA (1)...(19): siRNA sense strand
gaucauugguugccauugg

SEQ ID NO: 1215094 - RNA, 19 nt, Homo sapiens
  misc_RNA (1)...(19): siRNA sense strand
uaauaaacccaacggauga

SEQ ID NO: 1215095 - RNA, 19 nt, Homo sapiens
  misc_RNA (1)...(19): siRNA sense strand
uacagucaauuuccaauga

SEQ ID NO: 1215096 - RNA, 19 nt, Homo sapiens
  misc_RNA (1)...(19): siRNA sense strand
aauggaauauucucuguga

SEQ ID NO: 1215097 - RNA, 19 nt, Homo sapiens
  misc_RNA (1)...(19): siRNA sense strand
cagucacacuuggaaauua

SEQ ID NO: 1215098 - RNA, 19 nt, Homo sapiens
  misc_RNA (1)...(19): siRNA sense strand
cuaccaugcuaacaaauau

SEQ ID NO: 1215099 - RNA, 19 nt, Homo sapiens
  misc_RNA (1)...(19): siRNA sense strand
gaacagucacacuuggaaa

SEQ ID NO: 1215100 - RNA, 19 nt, Homo sapiens
  misc_RNA (1)...(19): siRNA sense strand
ugaagcaccugaucauugg

SEQ ID NO: 1215101 - RNA, 19 nt, Homo sapiens
  misc_RNA (1)...(19): siRNA sense strand
gaugggacguucuugucuu

SEQ ID NO: 1215102 - RNA, 19 nt, Homo sapiens
  misc_RNA (1)...(19): siRNA sense strand
gaacagucuaccaugauau

SEQ ID NO: 1215103 - RNA, 19 nt, Homo sapiens
  misc_RNA (1)...(19): siRNA sense strand
caagggaucaggagcaaug

SEQ ID NO: 1215104 - RNA, 19 nt, Homo sapiens
  misc_RNA (1)...(19): siRNA sense strand
agucacacuuggaaauuaa

SEQ ID NO: 1215105 - RNA, 19 nt, Homo sapiens
  misc_RNA (1)...(19): siRNA sense strand
guaauugguaggcaucaaa

SEQ ID NO: 1215106 - RNA, 19 nt, Homo sapiens
  misc_RNA (1)...(19): siRNA sense strand
ucauagacauaaagaaugg

SEQ ID NO: 1215107 - RNA, 19 nt, Homo sapiens
  misc_RNA (1)...(19): siRNA sense strand
gaauucucccucuguugua

SEQ ID NO: 1215108 - RNA, 19 nt, Homo sapiens
  misc_RNA (1)...(19): siRNA sense strand
uagcaaagccaaagaacug

SEQ ID NO: 1215109 - RNA, 19 nt, Homo sapiens
  misc_RNA (1)...(19): siRNA sense strand
gauuugaccuuuuacuuga

SEQ ID NO: 1215110 - RNA, 19 nt, Homo sapiens
  misc_RNA (1)...(19): siRNA sense strand
gagagaagaagguauaaaa

SEQ ID NO: 1215111 - RNA, 19 nt, Homo sapiens
  misc_RNA (1)...(19): siRNA sense strand
aaugagagaagaagguaua

SEQ ID NO: 1215112 - RNA, 19 nt, Homo sapiens
  misc_RNA (1)...(19): siRNA sense strand
cacaagaccacaaacuaaa

SEQ ID NO: 1215113 - RNA, 19 nt, Homo sapiens
  misc_RNA (1)...(19): siRNA sense strand
ggaauauucucugugaaaa

SEQ ID NO: 1215114 - RNA, 19 nt, Homo sapiens
  misc_RNA (1)...(19): siRNA sense strand
caaacuaaacaguaaaugg

SEQ ID NO: 1215115 - RNA, 19 nt, Homo sapiens
  misc_RNA (1)...(19): siRNA sense strand
cuaucaccauugcacuuua

SEQ ID NO: 1215116 - RNA, 19 nt, Homo sapiens
  misc_RNA (1)...(19): siRNA sense strand
caagucuuauuggcaguaa

SEQ ID NO: 1215117 - RNA, 19 nt, Homo sapiens
  misc_RNA (1)...(19): siRNA sense strand
aaacuugggaguggauaua

SEQ ID NO: 1215118 - RNA, 19 nt, Homo sapiens
  misc_RNA (1)...(19): siRNA sense strand
uaucaccauugcacuuuau

SEQ ID NO: 1215119 - RNA, 19 nt, Homo sapiens
  misc_RNA (1)...(19): siRNA sense strand
accacaaacuaaacaguaa

SEQ ID NO: 1215120 - RNA, 19 nt, Homo sapiens
  misc_RNA (1)...(19): siRNA sense strand
caacggaugagacacuguu

SEQ ID NO: 1215121 - RNA, 19 nt, Homo sapiens
  misc_RNA (1)...(19): siRNA sense strand
aagaauugcuuccaguuac

SEQ ID NO: 1215122 - RNA, 19 nt, Homo sapiens
  misc_RNA (1)...(19): siRNA sense strand
ucaccauugcacuuuauua

SEQ ID NO: 1215123 - RNA, 19 nt, Homo sapiens
  misc_RNA (1)...(19): siRNA sense strand
uggaauauucucugugaaa

SEQ ID NO: 1215124 - RNA, 19 nt, Homo sapiens
  misc_RNA (1)...(19): siRNA sense strand
gaaaaggaucccacucuga

SEQ ID NO: 1215125 - RNA, 19 nt, Homo sapiens
  misc_RNA (1)...(19): siRNA sense strand
cuagaaggcaaaccaauuc

SEQ ID NO: 1215126 - RNA, 19 nt, Homo sapiens
  misc_RNA (1)...(19): siRNA sense strand
ccacaaacuaaacaguaaa

SEQ ID NO: 1215127 - RNA, 19 nt, Homo sapiens
  misc_RNA (1)...(19): siRNA sense strand
ccugugaaguacuaaugaa

SEQ ID NO: 1215128 - RNA, 19 nt, Homo sapiens
  misc_RNA (1)...(19): siRNA sense strand
gcuaaagagcccuuaccaa

SEQ ID NO: 1215129 - RNA, 19 nt, Homo sapiens
  misc_RNA (1)...(19): siRNA sense strand
ggaauguaaccugaaucua

SEQ ID NO: 1215130 - RNA, 19 nt, Homo sapiens
  misc_RNA (1)...(19): siRNA sense strand
uaaauagcaaagccaaaga

SEQ ID NO: 1215131 - RNA, 19 nt, Homo sapiens
  misc_RNA (1)...(19): siRNA sense strand
gugaaguacuaaugaaugc

SEQ ID NO: 1215132 - RNA, 19 nt, Homo sapiens
  misc_RNA (1)...(19): siRNA sense strand
guacugaugggacguucuu

SEQ ID NO: 1215133 - RNA, 19 nt, Homo sapiens
  misc_RNA (1)...(19): siRNA sense strand
caccauugcacuuuauuau

SEQ ID NO: 1215134 - RNA, 19 nt, Homo sapiens
  misc_RNA (1)...(19): siRNA sense strand
gggacguucuugucuucuu

SEQ ID NO: 1215135 - RNA, 19 nt, Homo sapiens
  misc_RNA (1)...(19): siRNA sense strand
agacauaaagaauggaaga

SEQ ID NO: 1215136 - RNA, 19 nt, Homo sapiens
  misc_RNA (1)...(19): siRNA sense strand
uauaugaacagucacacuu

SEQ ID NO: 1215137 - RNA, 19 nt, Homo sapiens
  misc_RNA (1)...(19): siRNA sense strand
gccaaagaacugcaaacuu

SEQ ID NO: 1215138 - RNA, 19 nt, Homo sapiens
  misc_RNA (1)...(19): siRNA sense strand
ucugaccugugaaguacua

SEQ ID NO: 1215139 - RNA, 19 nt, Homo sapiens
  misc_RNA (1)...(19): siRNA sense strand
ucuagaaggcaaaccaauu

SEQ ID NO: 1215140 - RNA, 19 nt, Homo sapiens
  misc_RNA (1)...(19): siRNA sense strand
uagaacauguccacaagac

SEQ ID NO: 1215141 - RNA, 19 nt, Homo sapiens
  misc_RNA (1)...(19): siRNA sense strand
aaugaaugcuguugcuaca

SEQ ID NO: 1215142 - RNA, 19 nt, Homo sapiens
  misc_RNA (1)...(19): siRNA sense strand
caacugaaacuaccaugcu

SEQ ID NO: 1215143 - RNA, 19 nt, Homo sapiens
  misc_RNA (1)...(19): siRNA sense strand
uggaaauacgugacaaauu

SEQ ID NO: 1215144 - RNA, 19 nt, Homo sapiens
  misc_RNA (1)...(19): siRNA sense strand
gaaucuaaugagagaagaa

SEQ ID NO: 1215145 - RNA, 19 nt, Homo sapiens
  misc_RNA (1)...(19): siRNA sense strand
caagaccacaaacuaaaca

SEQ ID NO: 1215146 - RNA, 19 nt, Homo sapiens
  misc_RNA (1)...(19): siRNA sense strand
guacuaaugaaugcuguug

SEQ ID NO: 1215147 - RNA, 19 nt, Homo sapiens
  misc_RNA (1)...(19): siRNA sense strand
ugacuuucuuuacaaccaa

SEQ ID NO: 1215148 - RNA, 19 nt, Homo sapiens
  misc_RNA (1)...(19): siRNA sense strand
gauccaugaccauaugaau

SEQ ID NO: 1215149 - RNA, 19 nt, Homo sapiens
  misc_RNA (1)...(19): siRNA sense strand
cuaaugagagaagaaggua

SEQ ID NO: 1215150 - RNA, 19 nt, Homo sapiens
  misc_RNA (1)...(19): siRNA sense strand
cuuagaacauguccacaag

SEQ ID NO: 1215151 - RNA, 19 nt, Homo sapiens
  misc_RNA (1)...(19): siRNA sense strand
uugaagcaccugaucauug

SEQ ID NO: 1215152 - RNA, 19 nt, Homo sapiens
  misc_RNA (1)...(19): siRNA sense strand
ggaguggauauauggcaaa

SEQ ID NO: 1215153 - RNA, 19 nt, Homo sapiens
  misc_RNA (1)...(19): siRNA sense strand
gaaucuagaaggcaaacca

SEQ ID NO: 1215154 - RNA, 19 nt, Homo sapiens
  misc_RNA (1)...(19): siRNA sense strand
aaacuggcucggagaagaa

SEQ ID NO: 1215155 - RNA, 19 nt, Homo sapiens
  misc_RNA (1)...(19): siRNA sense strand
uuuacuugauggacaguuu

SEQ ID NO: 1215156 - RNA, 19 nt, Homo sapiens
  misc_RNA (1)...(19): siRNA sense strand
aaauagcaaagccaaagaa

SEQ ID NO: 1215157 - RNA, 19 nt, Homo sapiens
  misc_RNA (1)...(19): siRNA sense strand
gaccugugaaguacuaaug

SEQ ID NO: 1215158 - RNA, 19 nt, Homo sapiens
  misc_RNA (1)...(19): siRNA sense strand
uuacuugauggacaguuua

SEQ ID NO: 1215159 - RNA, 19 nt, Homo sapiens
  misc_RNA (1)...(19): siRNA sense strand
acuaccaugcuaacaaaua

SEQ ID NO: 1215160 - RNA, 19 nt, Homo sapiens
  misc_RNA (1)...(19): siRNA sense strand
aauacuuccuuucaugugu

SEQ ID NO: 1215161 - RNA, 19 nt, Homo sapiens
  misc_RNA (1)...(19): siRNA sense strand
agaauucucccucuguugu

SEQ ID NO: 1215162 - RNA, 19 nt, Homo sapiens
  misc_RNA (1)...(19): siRNA sense strand
aggcaaaccaauucuauuc

SEQ ID NO: 1215163 - RNA, 19 nt, Homo sapiens
  misc_RNA (1)...(19): siRNA sense strand
gcaaacuugggaguggaua

SEQ ID NO: 1215164 - RNA, 19 nt, Homo sapiens
  misc_RNA (1)...(19): siRNA sense strand
gaccauaugaaucuagaag

SEQ ID NO: 1215165 - RNA, 19 nt, Homo sapiens
  misc_RNA (1)...(19): siRNA sense strand
gauggacaguuuaaaaucu

SEQ ID NO: 1215166 - RNA, 19 nt, Homo sapiens
  misc_RNA (1)...(19): siRNA sense strand
aacugaaacuaccaugcua

SEQ ID NO: 1215167 - RNA, 19 nt, Homo sapiens
  misc_RNA (1)...(19): siRNA sense strand
cuggauccaugaccauaug

SEQ ID NO: 1215168 - RNA, 19 nt, Homo sapiens
  misc_RNA (1)...(19): siRNA sense strand
ugaacagucacacuuggaa

SEQ ID NO: 1215169 - RNA, 19 nt, Homo sapiens
  misc_RNA (1)...(19): siRNA sense strand
gcacuuuauuauguaguac

SEQ ID NO: 1215170 - RNA, 19 nt, Homo sapiens
  misc_RNA (1)...(19): siRNA sense strand
cagucaauuuccaaugaug

SEQ ID NO: 1215171 - RNA, 19 nt, Homo sapiens
  misc_RNA (1)...(19): siRNA sense strand
gacauaaagaauggaagaa

SEQ ID NO: 1215172 - RNA, 19 nt, Homo sapiens
  misc_RNA (1)...(19): siRNA sense strand
uacuuccuuucauguguua

SEQ ID NO: 1215173 - RNA, 19 nt, Homo sapiens
  misc_RNA (1)...(19): siRNA sense strand
auacuuccuuucauguguu

SEQ ID NO: 1215174 - RNA, 19 nt, Homo sapiens
  misc_RNA (1)...(19): siRNA sense strand
acagucaauuuccaaugau

SEQ ID NO: 1215175 - RNA, 19 nt, Homo sapiens
  misc_RNA (1)...(19): siRNA sense strand
caauuuccaaugaugucua

SEQ ID NO: 1215176 - RNA, 19 nt, Homo sapiens
  misc_RNA (1)...(19): siRNA sense strand
ggaaauacgugacaaauua

SEQ ID NO: 1215177 - RNA, 19 nt, Homo sapiens
  misc_RNA (1)...(19): siRNA sense strand
ccaaagaacugcaaacuug

SEQ ID NO: 1215178 - RNA, 19 nt, Homo sapiens
  misc_RNA (1)...(19): siRNA sense strand
gaauguaaccugaaucuaa

SEQ ID NO: 1215179 - RNA, 19 nt, Homo sapiens
  misc_RNA (1)...(19): siRNA sense strand
ggaacagucuaccaugaua

SEQ ID NO: 1215180 - RNA, 19 nt, Homo sapiens
  misc_RNA (1)...(19): siRNA sense strand
uagcauaccuuccuuagug

SEQ ID NO: 1215181 - RNA, 19 nt, Homo sapiens
  misc_RNA (1)...(19): siRNA sense strand
gcaaaccaauucuauucuu

SEQ ID NO: 1215182 - RNA, 19 nt, Homo sapiens
  misc_RNA (1)...(19): siRNA sense strand
gaggaacagucuaccauga

SEQ ID NO: 1215183 - RNA, 19 nt, Homo sapiens
  misc_RNA (1)...(19): siRNA sense strand
gauaaucacauucaccuaa

SEQ ID NO: 1215184 - RNA, 19 nt, Homo sapiens
  misc_RNA (1)...(19): siRNA sense strand
gaaacuaccaugcuaacaa

SEQ ID NO: 1215185 - RNA, 19 nt, Homo sapiens
  misc_RNA (1)...(19): siRNA sense strand
aaacuaccaugcuaacaaa

SEQ ID NO: 1215186 - RNA, 19 nt, Homo sapiens
  misc_RNA (1)...(19): siRNA sense strand
ggacguucuugucuucuuu

SEQ ID NO: 1215187 - RNA, 19 nt, Homo sapiens
  misc_RNA (1)...(19): siRNA sense strand
guucuugucuucuuugcua

SEQ ID NO: 1215188 - RNA, 19 nt, Homo sapiens
  misc_RNA (1)...(19): siRNA sense strand
ccacaagaccacaaacuaa

SEQ ID NO: 1215189 - RNA, 19 nt, Homo sapiens
  misc_RNA (1)...(19): siRNA sense strand
gaaggcaaaccaauucuau

SEQ ID NO: 1215190 - RNA, 19 nt, Homo sapiens
  misc_RNA (1)...(19): siRNA sense strand
ccauugcacuuuauuaugu

SEQ ID NO: 1215191 - RNA, 19 nt, Homo sapiens
  misc_RNA (1)...(19): siRNA sense strand
uaaccugaaucuaaugaga

SEQ ID NO: 1215192 - RNA, 19 nt, Homo sapiens
  misc_RNA (1)...(19): siRNA sense strand
gaccacaaacuaaacagua

SEQ ID NO: 1215193 - RNA, 19 nt, Homo sapiens
  misc_RNA (1)...(19): siRNA sense strand
gaucauugguugccauugg

SEQ ID NO: 1215194 - RNA, 19 nt, Homo sapiens
  misc_RNA (1)...(19): siRNA sense strand
uaauaaacccaacggauga

SEQ ID NO: 1215195 - RNA, 19 nt, Homo sapiens
  misc_RNA (1)...(19): siRNA sense strand
uacagucaauuuccaauga

SEQ ID NO: 1215196 - RNA, 19 nt, Homo sapiens
  misc_RNA (1)...(19): siRNA sense strand
aauggaauauucucuguga

SEQ ID NO: 1215197 - RNA, 19 nt, Homo sapiens
  misc_RNA (1)...(19): siRNA sense strand
cagucacacuuggaaauua

SEQ ID NO: 1215198 - RNA, 19 nt, Homo sapiens
  misc_RNA (1)...(19): siRNA sense strand
cuaccaugcuaacaaauau

SEQ ID NO: 1215199 - RNA, 19 nt, Homo sapiens
  misc_RNA (1)...(19): siRNA sense strand
gaacagucacacuuggaaa

SEQ ID NO: 1215200 - RNA, 19 nt, Homo sapiens
  misc_RNA (1)...(19): siRNA sense strand
ugaagcaccugaucauugg

SEQ ID NO: 1215201 - RNA, 19 nt, Homo sapiens
  misc_RNA (1)...(19): siRNA sense strand
gaugggacguucuugucuu

SEQ ID NO: 1215202 - RNA, 19 nt, Homo sapiens
  misc_RNA (1)...(19): siRNA sense strand
gaacagucuaccaugauau

SEQ ID NO: 1215203 - RNA, 19 nt, Homo sapiens
  misc_RNA (1)...(19): siRNA sense strand
caagggaucaggagcaaug

SEQ ID NO: 1215204 - RNA, 19 nt, Homo sapiens
  misc_RNA (1)...(19): siRNA sense strand
agucacacuuggaaauuaa

SEQ ID NO: 1215205 - RNA, 19 nt, Homo sapiens
  misc_RNA (1)...(19): siRNA sense strand
guaauugguaggcaucaaa

SEQ ID NO: 1215206 - RNA, 19 nt, Homo sapiens
  misc_RNA (1)...(19): siRNA sense strand
ucauagacauaaagaaugg

SEQ ID NO: 1215207 - RNA, 19 nt, Homo sapiens
  misc_RNA (1)...(19): siRNA sense strand
gaauucucccucuguugua

SEQ ID NO: 1215208 - RNA, 19 nt, Homo sapiens
  misc_RNA (1)...(19): siRNA sense strand
uagcaaagccaaagaacug

SEQ ID NO: 1215209 - RNA, 19 nt, Homo sapiens
  misc_RNA (1)...(19): siRNA sense strand
gauuugaccuuuuacuuga

SEQ ID NO: 1215210 - RNA, 19 nt, Homo sapiens
  misc_RNA (1)...(19): siRNA sense strand
gagagaagaagguauaaaa

SEQ ID NO: 1215211 - RNA, 19 nt, Homo sapiens
  misc_RNA (1)...(19): siRNA sense strand
aaugagagaagaagguaua

SEQ ID NO: 1215212 - RNA, 19 nt, Homo sapiens
  misc_RNA (1)...(19): siRNA sense strand
cacaagaccacaaacuaaa

SEQ ID NO: 1215213 - RNA, 19 nt, Homo sapiens
  misc_RNA (1)...(19): siRNA sense strand
ggaauauucucugugaaaa

SEQ ID NO: 1215214 - RNA, 19 nt, Homo sapiens
  misc_RNA (1)...(19): siRNA sense strand
caaacuaaacaguaaaugg

SEQ ID NO: 1215215 - RNA, 19 nt, Homo sapiens
  misc_RNA (1)...(19): siRNA sense strand
cuaucaccauugcacuuua

SEQ ID NO: 1215216 - RNA, 19 nt, Homo sapiens
  misc_RNA (1)...(19): siRNA sense strand
caagucuuauuggcaguaa

SEQ ID NO: 1215217 - RNA, 19 nt, Homo sapiens
  misc_RNA (1)...(19): siRNA sense strand
aaacuugggaguggauaua

SEQ ID NO: 1215218 - RNA, 19 nt, Homo sapiens
  misc_RNA (1)...(19): siRNA sense strand
uaucaccauugcacuuuau

SEQ ID NO: 1215219 - RNA, 19 nt, Homo sapiens
  misc_RNA (1)...(19): siRNA sense strand
accacaaacuaaacaguaa

SEQ ID NO: 1215220 - RNA, 19 nt, Homo sapiens
  misc_RNA (1)...(19): siRNA sense strand
caacggaugagacacuguu

SEQ ID NO: 1215221 - RNA, 19 nt, Homo sapiens
  misc_RNA (1)...(19): siRNA sense strand
aagaauugcuuccaguuac

SEQ ID NO: 1215222 - RNA, 19 nt, Homo sapiens
  misc_RNA (1)...(19): siRNA sense strand
ucaccauugcacuuuauua

SEQ ID NO: 1215223 - RNA, 19 nt, Homo sapiens
  misc_RNA (1)...(19): siRNA sense strand
uggaauauucucugugaaa

SEQ ID NO: 1215224 - RNA, 19 nt, Homo sapiens
  misc_RNA (1)...(19): siRNA sense strand
gaaaaggaucccacucuga

SEQ ID NO: 1215225 - RNA, 19 nt, Homo sapiens
  misc_RNA (1)...(19): siRNA sense strand
cuagaaggcaaaccaauuc

SEQ ID NO: 1215226 - RNA, 19 nt, Homo sapiens
  misc_RNA (1)...(19): siRNA sense strand
ccacaaacuaaacaguaaa

SEQ ID NO: 1215227 - RNA, 19 nt, Homo sapiens
  misc_RNA (1)...(19): siRNA sense strand
ccugugaaguacuaaugaa

SEQ ID NO: 1215228 - RNA, 19 nt, Homo sapiens
  misc_RNA (1)...(19): siRNA sense strand
gcuaaagagcccuuaccaa

SEQ ID NO: 1215229 - RNA, 19 nt, Homo sapiens
  misc_RNA (1)...(19): siRNA sense strand
ggaauguaaccugaaucua

SEQ ID NO: 1215230 - RNA, 19 nt, Homo sapiens
  misc_RNA (1)...(19): siRNA sense strand
uaaauagcaaagccaaaga

SEQ ID NO: 1215231 - RNA, 19 nt, Homo sapiens
  misc_RNA (1)...(19): siRNA sense strand
gugaaguacuaaugaaugc

SEQ ID NO: 1215232 - RNA, 19 nt, Homo sapiens
  misc_RNA (1)...(19): siRNA sense strand
guacugaugggacguucuu

SEQ ID NO: 1215233 - RNA, 19 nt, Homo sapiens
  misc_RNA (1)...(19): siRNA sense strand
caccauugcacuuuauuau

SEQ ID NO: 1215234 - RNA, 19 nt, Homo sapiens
  misc_RNA (1)...(19): siRNA sense strand
gggacguucuugucuucuu

SEQ ID NO: 1215235 - RNA, 19 nt, Homo sapiens
  misc_RNA (1)...(19): siRNA sense strand
agacauaaagaauggaaga

SEQ ID NO: 1215236 - RNA, 19 nt, Homo sapiens
  misc_RNA (1)...(19): siRNA sense strand
uauaugaacagucacacuu

SEQ ID NO: 1215237 - RNA, 19 nt, Homo sapiens
  misc_RNA (1)...(19): siRNA sense strand
gccaaagaacugcaaacuu

SEQ ID NO: 1215238 - RNA, 19 nt, Homo sapiens
  misc_RNA (1)...(19): siRNA sense strand
ucugaccugugaaguacua

SEQ ID NO: 1215239 - RNA, 19 nt, Homo sapiens
  misc_RNA (1)...(19): siRNA sense strand
ucuagaaggcaaaccaauu

SEQ ID NO: 1215240 - RNA, 19 nt, Homo sapiens
  misc_RNA (1)...(19): siRNA sense strand
uagaacauguccacaagac

SEQ ID NO: 1215241 - RNA, 19 nt, Homo sapiens
  misc_RNA (1)...(19): siRNA sense strand
aaugaaugcuguugcuaca

SEQ ID NO: 1215242 - RNA, 19 nt, Homo sapiens
  misc_RNA (1)...(19): siRNA sense strand
caacugaaacuaccaugcu

SEQ ID NO: 1215243 - RNA, 19 nt, Homo sapiens
  misc_RNA (1)...(19): siRNA sense strand
uggaaauacgugacaaauu

SEQ ID NO: 1215244 - RNA, 19 nt, Homo sapiens
  misc_RNA (1)...(19): siRNA sense strand
gaaucuaaugagagaagaa

SEQ ID NO: 1215245 - RNA, 19 nt, Homo sapiens
  misc_RNA (1)...(19): siRNA sense strand
caagaccacaaacuaaaca

SEQ ID NO: 1215246 - RNA, 19 nt, Homo sapiens
  misc_RNA (1)...(19): siRNA sense strand
guacuaaugaaugcuguug

SEQ ID NO: 1215247 - RNA, 19 nt, Homo sapiens
  misc_RNA (1)...(19): siRNA sense strand
ugacuuucuuuacaaccaa

SEQ ID NO: 1215248 - RNA, 19 nt, Homo sapiens
  misc_RNA (1)...(19): siRNA sense strand
gauccaugaccauaugaau

SEQ ID NO: 1215249 - RNA, 19 nt, Homo sapiens
  misc_RNA (1)...(19): siRNA sense strand
cuaaugagagaagaaggua

SEQ ID NO: 1215250 - RNA, 19 nt, Homo sapiens
  misc_RNA (1)...(19): siRNA sense strand
cuuagaacauguccacaag

SEQ ID NO: 1215251 - RNA, 19 nt, Homo sapiens
  misc_RNA (1)...(19): siRNA sense strand
uugaagcaccugaucauug

SEQ ID NO: 1215252 - RNA, 19 nt, Homo sapiens
  misc_RNA (1)...(19): siRNA sense strand
ggaguggauauauggcaaa

SEQ ID NO: 1215253 - RNA, 19 nt, Homo sapiens
  misc_RNA (1)...(19): siRNA sense strand
gaaucuagaaggcaaacca

SEQ ID NO: 1215254 - RNA, 19 nt, Homo sapiens
  misc_RNA (1)...(19): siRNA sense strand
aaacuggcucggagaagaa

SEQ ID NO: 1215255 - RNA, 19 nt, Homo sapiens
  misc_RNA (1)...(19): siRNA sense strand
uuuacuugauggacaguuu

SEQ ID NO: 1215256 - RNA, 19 nt, Homo sapiens
  misc_RNA (1)...(19): siRNA sense strand
aaauagcaaagccaaagaa

SEQ ID NO: 1215257 - RNA, 19 nt, Homo sapiens
  misc_RNA (1)...(19): siRNA sense strand
gaccugugaaguacuaaug

SEQ ID NO: 1215258 - RNA, 19 nt, Homo sapiens
  misc_RNA (1)...(19): siRNA sense strand
uuacuugauggacaguuua

SEQ ID NO: 1215259 - RNA, 19 nt, Homo sapiens
  misc_RNA (1)...(19): siRNA sense strand
acuaccaugcuaacaaaua

SEQ ID NO: 1215260 - RNA, 19 nt, Homo sapiens
  misc_RNA (1)...(19): siRNA sense strand
aauacuuccuuucaugugu

SEQ ID NO: 1215261 - RNA, 19 nt, Homo sapiens
  misc_RNA (1)...(19): siRNA sense strand
agaauucucccucuguugu

SEQ ID NO: 1215262 - RNA, 19 nt, Homo sapiens
  misc_RNA (1)...(19): siRNA sense strand
aggcaaaccaauucuauuc

SEQ ID NO: 1215263 - RNA, 19 nt, Homo sapiens
  misc_RNA (1)...(19): siRNA sense strand
gcaaacuugggaguggaua

SEQ ID NO: 1215264 - RNA, 19 nt, Homo sapiens
  misc_RNA (1)...(19): siRNA sense strand
gaccauaugaaucuagaag

SEQ ID NO: 1215265 - RNA, 19 nt, Homo sapiens
  misc_RNA (1)...(19): siRNA sense strand
gauggacaguuuaaaaucu

SEQ ID NO: 1215266 - RNA, 19 nt, Homo sapiens
  misc_RNA (1)...(19): siRNA sense strand
aacugaaacuaccaugcua

SEQ ID NO: 1215267 - RNA, 19 nt, Homo sapiens
  misc_RNA (1)...(19): siRNA sense strand
cuggauccaugaccauaug

SEQ ID NO: 1215268 - RNA, 19 nt, Homo sapiens
  misc_RNA (1)...(19): siRNA sense strand
ugaacagucacacuuggaa

SEQ ID NO: 1215269 - RNA, 19 nt, Homo sapiens
  misc_RNA (1)...(19): siRNA sense strand
gcacuuuauuauguaguac

SEQ ID NO: 1215270 - RNA, 19 nt, Homo sapiens
  misc_RNA (1)...(19): siRNA sense strand
cagucaauuuccaaugaug

SEQ ID NO: 1215271 - RNA, 19 nt, Homo sapiens
  misc_RNA (1)...(19): siRNA sense strand
gacauaaagaauggaagaa

SEQ ID NO: 1215272 - RNA, 19 nt, Homo sapiens
  misc_RNA (1)...(19): siRNA sense strand
uacuuccuuucauguguua

SEQ ID NO: 1215273 - RNA, 19 nt, Homo sapiens
  misc_RNA (1)...(19): siRNA sense strand
auacuuccuuucauguguu

SEQ ID NO: 1215274 - RNA, 19 nt, Homo sapiens
  misc_RNA (1)...(19): siRNA sense strand
acagucaauuuccaaugau

SEQ ID NO: 1215275 - RNA, 19 nt, Homo sapiens
  misc_RNA (1)...(19): siRNA sense strand
caauuuccaaugaugucua

SEQ ID NO: 1215276 - RNA, 19 nt, Homo sapiens
  misc_RNA (1)...(19): siRNA sense strand
ggaaauacgugacaaauua

SEQ ID NO: 1215277 - RNA, 19 nt, Homo sapiens
  misc_RNA (1)...(19): siRNA sense strand
ccaaagaacugcaaacuug

SEQ ID NO: 1215278 - RNA, 19 nt, Homo sapiens
  misc_RNA (1)...(19): siRNA sense strand
gaauguaaccugaaucuaa

SEQ ID NO: 1215279 - RNA, 19 nt, Homo sapiens
  misc_RNA (1)...(19): siRNA sense strand
ggaacagucuaccaugaua

SEQ ID NO: 1215280 - RNA, 19 nt, Homo sapiens
  misc_RNA (1)...(19): siRNA sense strand
uagcauaccuuccuuagug

SEQ ID NO: 1215281 - RNA, 19 nt, Homo sapiens
  misc_RNA (1)...(19): siRNA sense strand
gcaaaccaauucuauucuu

SEQ ID NO: 1215282 - RNA, 19 nt, Homo sapiens
  misc_RNA (1)...(19): siRNA sense strand
gaggaacagucuaccauga

SEQ ID NO: 1215283 - RNA, 19 nt, Homo sapiens
  misc_RNA (1)...(19): siRNA sense strand
gauaaucacauucaccuaa

SEQ ID NO: 1215284 - RNA, 19 nt, Homo sapiens
  misc_RNA (1)...(19): siRNA sense strand
gaaacuaccaugcuaacaa

SEQ ID NO: 1215285 - RNA, 19 nt, Homo sapiens
  misc_RNA (1)...(19): siRNA sense strand
aaacuaccaugcuaacaaa

SEQ ID NO: 1215286 - RNA, 19 nt, Homo sapiens
  misc_RNA (1)...(19): siRNA sense strand
ggacguucuugucuucuuu

SEQ ID NO: 1215287 - RNA, 19 nt, Homo sapiens
  misc_RNA (1)...(19): siRNA sense strand
guucuugucuucuuugcua

SEQ ID NO: 1215288 - RNA, 19 nt, Homo sapiens
  misc_RNA (1)...(19): siRNA sense strand
ccacaagaccacaaacuaa

SEQ ID NO: 1215289 - RNA, 19 nt, Homo sapiens
  misc_RNA (1)...(19): siRNA sense strand
gaaggcaaaccaauucuau

SEQ ID NO: 1215290 - RNA, 19 nt, Homo sapiens
  misc_RNA (1)...(19): siRNA sense strand
ccauugcacuuuauuaugu

SEQ ID NO: 1215291 - RNA, 19 nt, Homo sapiens
  misc_RNA (1)...(19): siRNA sense strand
uaaccugaaucuaaugaga

SEQ ID NO: 1215292 - RNA, 19 nt, Homo sapiens
  misc_RNA (1)...(19): siRNA sense strand
gaccacaaacuaaacagua

SEQ ID NO: 1215293 - RNA, 19 nt, Homo sapiens
  misc_RNA (1)...(19): siRNA sense strand
gaucauugguugccauugg

SEQ ID NO: 1215294 - RNA, 19 nt, Homo sapiens
  misc_RNA (1)...(19): siRNA sense strand
uaauaaacccaacggauga

SEQ ID NO: 1215295 - RNA, 19 nt, Homo sapiens
  misc_RNA (1)...(19): siRNA sense strand
uacagucaauuuccaauga

SEQ ID NO: 1215296 - RNA, 19 nt, Homo sapiens
  misc_RNA (1)...(19): siRNA sense strand
aauggaauauucucuguga

SEQ ID NO: 1215297 - RNA, 19 nt, Homo sapiens
  misc_RNA (1)...(19): siRNA sense strand
cagucacacuuggaaauua

SEQ ID NO: 1215298 - RNA, 19 nt, Homo sapiens
  misc_RNA (1)...(19): siRNA sense strand
cuaccaugcuaacaaauau

SEQ ID NO: 1215299 - RNA, 19 nt, Homo sapiens
  misc_RNA (1)...(19): siRNA sense strand
gaacagucacacuuggaaa

SEQ ID NO: 1215300 - RNA, 19 nt, Homo sapiens
  misc_RNA (1)...(19): siRNA sense strand
ugaagcaccugaucauugg

SEQ ID NO: 1215301 - RNA, 19 nt, Homo sapiens
  misc_RNA (1)...(19): siRNA sense strand
gaugggacguucuugucuu

SEQ ID NO: 1215302 - RNA, 19 nt, Homo sapiens
  misc_RNA (1)...(19): siRNA sense strand
gaacagucuaccaugauau

SEQ ID NO: 1215303 - RNA, 19 nt, Homo sapiens
  misc_RNA (1)...(19): siRNA sense strand
caagggaucaggagcaaug

SEQ ID NO: 1215304 - RNA, 19 nt, Homo sapiens
  misc_RNA (1)...(19): siRNA sense strand
agucacacuuggaaauuaa

SEQ ID NO: 1215305 - RNA, 19 nt, Homo sapiens
  misc_RNA (1)...(19): siRNA sense strand
guaauugguaggcaucaaa

SEQ ID NO: 1215306 - RNA, 19 nt, Homo sapiens
  misc_RNA (1)...(19): siRNA sense strand
ucauagacauaaagaaugg

SEQ ID NO: 1215307 - RNA, 19 nt, Homo sapiens
  misc_RNA (1)...(19): siRNA sense strand
gaauucucccucuguugua

SEQ ID NO: 1215308 - RNA, 19 nt, Homo sapiens
  misc_RNA (1)...(19): siRNA sense strand
uagcaaagccaaagaacug

SEQ ID NO: 1215309 - RNA, 19 nt, Homo sapiens
  misc_RNA (1)...(19): siRNA sense strand
gauuugaccuuuuacuuga

SEQ ID NO: 1215310 - RNA, 19 nt, Homo sapiens
  misc_RNA (1)...(19): siRNA sense strand
gagagaagaagguauaaaa

SEQ ID NO: 1215311 - RNA, 19 nt, Homo sapiens
  misc_RNA (1)...(19): siRNA sense strand
aaugagagaagaagguaua

SEQ ID NO: 1215312 - RNA, 19 nt, Homo sapiens
  misc_RNA (1)...(19): siRNA sense strand
cacaagaccacaaacuaaa

SEQ ID NO: 1215313 - RNA, 19 nt, Homo sapiens
  misc_RNA (1)...(19): siRNA sense strand
ggaauauucucugugaaaa

SEQ ID NO: 1215314 - RNA, 19 nt, Homo sapiens
  misc_RNA (1)...(19): siRNA sense strand
caaacuaaacaguaaaugg

SEQ ID NO: 1215315 - RNA, 19 nt, Homo sapiens
  misc_RNA (1)...(19): siRNA sense strand
cuaucaccauugcacuuua

SEQ ID NO: 1215316 - RNA, 19 nt, Homo sapiens
  misc_RNA (1)...(19): siRNA sense strand
caagucuuauuggcaguaa

SEQ ID NO: 1215317 - RNA, 19 nt, Homo sapiens
  misc_RNA (1)...(19): siRNA sense strand
aaacuugggaguggauaua

SEQ ID NO: 1215318 - RNA, 19 nt, Homo sapiens
  misc_RNA (1)...(19): siRNA sense strand
uaucaccauugcacuuuau

SEQ ID NO: 1215319 - RNA, 19 nt, Homo sapiens
  misc_RNA (1)...(19): siRNA sense strand
accacaaacuaaacaguaa

SEQ ID NO: 1215320 - RNA, 19 nt, Homo sapiens
  misc_RNA (1)...(19): siRNA sense strand
caacggaugagacacuguu

SEQ ID NO: 1215321 - RNA, 19 nt, Homo sapiens
  misc_RNA (1)...(19): siRNA sense strand
aagaauugcuuccaguuac

SEQ ID NO: 1215322 - RNA, 19 nt, Homo sapiens
  misc_RNA (1)...(19): siRNA sense strand
ucaccauugcacuuuauua

SEQ ID NO: 1215323 - RNA, 19 nt, Homo sapiens
  misc_RNA (1)...(19): siRNA sense strand
uggaauauucucugugaaa

SEQ ID NO: 1215324 - RNA, 19 nt, Homo sapiens
  misc_RNA (1)...(19): siRNA sense strand
gaaaaggaucccacucuga

SEQ ID NO: 1215325 - RNA, 19 nt, Homo sapiens
  misc_RNA (1)...(19): siRNA sense strand
cuagaaggcaaaccaauuc

SEQ ID NO: 1215326 - RNA, 19 nt, Homo sapiens
  misc_RNA (1)...(19): siRNA sense strand
ccacaaacuaaacaguaaa

SEQ ID NO: 1215327 - RNA, 19 nt, Homo sapiens
  misc_RNA (1)...(19): siRNA sense strand
ccugugaaguacuaaugaa

SEQ ID NO: 1215328 - RNA, 19 nt, Homo sapiens
  misc_RNA (1)...(19): siRNA sense strand
gcuaaagagcccuuaccaa

SEQ ID NO: 1215329 - RNA, 19 nt, Homo sapiens
  misc_RNA (1)...(19): siRNA sense strand
ggaauguaaccugaaucua

SEQ ID NO: 1215330 - RNA, 19 nt, Homo sapiens
  misc_RNA (1)...(19): siRNA sense strand
uaaauagcaaagccaaaga

SEQ ID NO: 1215331 - RNA, 19 nt, Homo sapiens
  misc_RNA (1)...(19): siRNA sense strand
gugaaguacuaaugaaugc

SEQ ID NO: 1215332 - RNA, 19 nt, Homo sapiens
  misc_RNA (1)...(19): siRNA sense strand
guacugaugggacguucuu

SEQ ID NO: 1215333 - RNA, 19 nt, Homo sapiens
  misc_RNA (1)...(19): siRNA sense strand
caccauugcacuuuauuau

SEQ ID NO: 1215334 - RNA, 19 nt, Homo sapiens
  misc_RNA (1)...(19): siRNA sense strand
gggacguucuugucuucuu

SEQ ID NO: 1215335 - RNA, 19 nt, Homo sapiens
  misc_RNA (1)...(19): siRNA sense strand
agacauaaagaauggaaga

SEQ ID NO: 1215336 - RNA, 19 nt, Homo sapiens
  misc_RNA (1)...(19): siRNA sense strand
uauaugaacagucacacuu

SEQ ID NO: 1215337 - RNA, 19 nt, Homo sapiens
  misc_RNA (1)...(19): siRNA sense strand
gccaaagaacugcaaacuu

SEQ ID NO: 1215338 - RNA, 19 nt, Homo sapiens
  misc_RNA (1)...(19): siRNA sense strand
ucugaccugugaaguacua

SEQ ID NO: 1215339 - RNA, 19 nt, Homo sapiens
  misc_RNA (1)...(19): siRNA sense strand
ucuagaaggcaaaccaauu

SEQ ID NO: 1215340 - RNA, 19 nt, Homo sapiens
  misc_RNA (1)...(19): siRNA sense strand
uagaacauguccacaagac

SEQ ID NO: 1215341 - RNA, 19 nt, Homo sapiens
  misc_RNA (1)...(19): siRNA sense strand
aaugaaugcuguugcuaca

SEQ ID NO: 1215342 - RNA, 19 nt, Homo sapiens
  misc_RNA (1)...(19): siRNA sense strand
caacugaaacuaccaugcu

SEQ ID NO: 1215343 - RNA, 19 nt, Homo sapiens
  misc_RNA (1)...(19): siRNA sense strand
uggaaauacgugacaaauu

SEQ ID NO: 1215344 - RNA, 19 nt, Homo sapiens
  misc_RNA (1)...(19): siRNA sense strand
gaaucuaaugagagaagaa

SEQ ID NO: 1215345 - RNA, 19 nt, Homo sapiens
  misc_RNA (1)...(19): siRNA sense strand
caagaccacaaacuaaaca

SEQ ID NO: 1215346 - RNA, 19 nt, Homo sapiens
  misc_RNA (1)...(19): siRNA sense strand
guacuaaugaaugcuguug

SEQ ID NO: 1215347 - RNA, 19 nt, Homo sapiens
  misc_RNA (1)...(19): siRNA sense strand
ugacuuucuuuacaaccaa

SEQ ID NO: 1215348 - RNA, 19 nt, Homo sapiens
  misc_RNA (1)...(19): siRNA sense strand
gauccaugaccauaugaau

SEQ ID NO: 1215349 - RNA, 19 nt, Homo sapiens
  misc_RNA (1)...(19): siRNA sense strand
cuaaugagagaagaaggua

SEQ ID NO: 1215350 - RNA, 19 nt, Homo sapiens
  misc_RNA (1)...(19): siRNA sense strand
cuuagaacauguccacaag

SEQ ID NO: 1215351 - RNA, 19 nt, Homo sapiens
  misc_RNA (1)...(19): siRNA sense strand
uugaagcaccugaucauug

SEQ ID NO: 1215352 - RNA, 19 nt, Homo sapiens
  misc_RNA (1)...(19): siRNA sense strand
ggaguggauauauggcaaa

SEQ ID NO: 1215353 - RNA, 19 nt, Homo sapiens
  misc_RNA (1)...(19): siRNA sense strand
gaaucuagaaggcaaacca

SEQ ID NO: 1215354 - RNA, 19 nt, Homo sapiens
  misc_RNA (1)...(19): siRNA sense strand
aaacuggcucggagaagaa

SEQ ID NO: 1215355 - RNA, 19 nt, Homo sapiens
  misc_RNA (1)...(19): siRNA sense strand
uuuacuugauggacaguuu

SEQ ID NO: 1215356 - RNA, 19 nt, Homo sapiens
  misc_RNA (1)...(19): siRNA sense strand
aaauagcaaagccaaagaa

SEQ ID NO: 1215357 - RNA, 19 nt, Homo sapiens
  misc_RNA (1)...(19): siRNA sense strand
gaccugugaaguacuaaug

SEQ ID NO: 1215358 - RNA, 19 nt, Homo sapiens
  misc_RNA (1)...(19): siRNA sense strand
uuacuugauggacaguuua

SEQ ID NO: 1215359 - RNA, 19 nt, Homo sapiens
  misc_RNA (1)...(19): siRNA sense strand
acuaccaugcuaacaaaua

SEQ ID NO: 1215360 - RNA, 19 nt, Homo sapiens
  misc_RNA (1)...(19): siRNA sense strand
aauacuuccuuucaugugu

SEQ ID NO: 1215361 - RNA, 19 nt, Homo sapiens
  misc_RNA (1)...(19): siRNA sense strand
agaauucucccucuguugu

SEQ ID NO: 1215362 - RNA, 19 nt, Homo sapiens
  misc_RNA (1)...(19): siRNA sense strand
aggcaaaccaauucuauuc

SEQ ID NO: 1215363 - RNA, 19 nt, Homo sapiens
  misc_RNA (1)...(19): siRNA sense strand
gcaaacuugggaguggaua

SEQ ID NO: 1215364 - RNA, 19 nt, Homo sapiens
  misc_RNA (1)...(19): siRNA sense strand
gaccauaugaaucuagaag

SEQ ID NO: 1215365 - RNA, 19 nt, Homo sapiens
  misc_RNA (1)...(19): siRNA sense strand
gauggacaguuuaaaaucu

SEQ ID NO: 1215366 - RNA, 19 nt, Homo sapiens
  misc_RNA (1)...(19): siRNA sense strand
aacugaaacuaccaugcua

SEQ ID NO: 1215367 - RNA, 19 nt, Homo sapiens
  misc_RNA (1)...(19): siRNA sense strand
cuggauccaugaccauaug

SEQ ID NO: 1215368 - RNA, 19 nt, Homo sapiens
  misc_RNA (1)...(19): siRNA sense strand
ugaacagucacacuuggaa

SEQ ID NO: 1215369 - RNA, 19 nt, Homo sapiens
  misc_RNA (1)...(19): siRNA sense strand
gcacuuuauuauguaguac

SEQ ID NO: 1215370 - RNA, 19 nt, Homo sapiens
  misc_RNA (1)...(19): siRNA sense strand
cagucaauuuccaaugaug

SEQ ID NO: 1215371 - RNA, 19 nt, Homo sapiens
  misc_RNA (1)...(19): siRNA sense strand
gacauaaagaauggaagaa

SEQ ID NO: 1215372 - RNA, 19 nt, Homo sapiens
  misc_RNA (1)...(19): siRNA sense strand
uacuuccuuucauguguua

SEQ ID NO: 1215373 - RNA, 19 nt, Homo sapiens
  misc_RNA (1)...(19): siRNA sense strand
auacuuccuuucauguguu

SEQ ID NO: 1215374 - RNA, 19 nt, Homo sapiens
  misc_RNA (1)...(19): siRNA sense strand
acagucaauuuccaaugau

SEQ ID NO: 1215375 - RNA, 19 nt, Homo sapiens
  misc_RNA (1)...(19): siRNA sense strand
caauuuccaaugaugucua

SEQ ID NO: 1215376 - RNA, 19 nt, Homo sapiens
  misc_RNA (1)...(19): siRNA sense strand
ggaaauacgugacaaauua

SEQ ID NO: 1215377 - RNA, 19 nt, Homo sapiens
  misc_RNA (1)...(19): siRNA sense strand
ccaaagaacugcaaacuug

SEQ ID NO: 1215378 - RNA, 19 nt, Homo sapiens
  misc_RNA (1)...(19): siRNA sense strand
gaauguaaccugaaucuaa

SEQ ID NO: 1215379 - RNA, 19 nt, Homo sapiens
  misc_RNA (1)...(19): siRNA sense strand
ggaacagucuaccaugaua

SEQ ID NO: 1215380 - RNA, 19 nt, Homo sapiens
  misc_RNA (1)...(19): siRNA sense strand
uagcauaccuuccuuagug

SEQ ID NO: 1215381 - RNA, 19 nt, Homo sapiens
  misc_RNA (1)...(19): siRNA sense strand
gcaaaccaauucuauucuu

SEQ ID NO: 1215382 - RNA, 19 nt, Homo sapiens
  misc_RNA (1)...(19): siRNA sense strand
gaggaacagucuaccauga

SEQ ID NO: 1215383 - RNA, 19 nt, Homo sapiens
  misc_RNA (1)...(19): siRNA sense strand
gauaaucacauucaccuaa

SEQ ID NO: 1215384 - RNA, 19 nt, Homo sapiens
  misc_RNA (1)...(19): siRNA sense strand
gaaacuaccaugcuaacaa

SEQ ID NO: 1215385 - RNA, 19 nt, Homo sapiens
  misc_RNA (1)...(19): siRNA sense strand
aaacuaccaugcuaacaaa

SEQ ID NO: 1215386 - RNA, 19 nt, Homo sapiens
  misc_RNA (1)...(19): siRNA sense strand
ggacguucuugucuucuuu

SEQ ID NO: 1215387 - RNA, 19 nt, Homo sapiens
  misc_RNA (1)...(19): siRNA sense strand
guucuugucuucuuugcua

SEQ ID NO: 1215388 - RNA, 19 nt, Homo sapiens
  misc_RNA (1)...(19): siRNA sense strand
ccacaagaccacaaacuaa

SEQ ID NO: 1215389 - RNA, 19 nt, Homo sapiens
  misc_RNA (1)...(19): siRNA sense strand
gaaggcaaaccaauucuau

SEQ ID NO: 1215390 - RNA, 19 nt, Homo sapiens
  misc_RNA (1)...(19): siRNA sense strand
ccauugcacuuuauuaugu

SEQ ID NO: 1215391 - RNA, 19 nt, Homo sapiens
  misc_RNA (1)...(19): siRNA sense strand
uaaccugaaucuaaugaga

SEQ ID NO: 1215392 - RNA, 19 nt, Homo sapiens
  misc_RNA (1)...(19): siRNA sense strand
gaccacaaacuaaacagua

SEQ ID NO: 1215393 - RNA, 19 nt, Homo sapiens
  misc_RNA (1)...(19): siRNA sense strand
gaucauugguugccauugg

SEQ ID NO: 1215394 - RNA, 19 nt, Homo sapiens
  misc_RNA (1)...(19): siRNA sense strand
uaauaaacccaacggauga

SEQ ID NO: 1215395 - RNA, 19 nt, Homo sapiens
  misc_RNA (1)...(19): siRNA sense strand
uacagucaauuuccaauga

SEQ ID NO: 1215396 - RNA, 19 nt, Homo sapiens
  misc_RNA (1)...(19): siRNA sense strand
aauggaauauucucuguga

SEQ ID NO: 1215397 - RNA, 19 nt, Homo sapiens
  misc_RNA (1)...(19): siRNA sense strand
cagucacacuuggaaauua

SEQ ID NO: 1215398 - RNA, 19 nt, Homo sapiens
  misc_RNA (1)...(19): siRNA sense strand
cuaccaugcuaacaaauau

SEQ ID NO: 1215399 - RNA, 19 nt, Homo sapiens
  misc_RNA (1)...(19): siRNA sense strand
gaacagucacacuuggaaa

SEQ ID NO: 1215400 - RNA, 19 nt, Homo sapiens
  misc_RNA (1)...(19): siRNA sense strand
ugaagcaccugaucauugg

SEQ ID NO: 1215401 - RNA, 19 nt, Homo sapiens
  misc_RNA (1)...(19): siRNA sense strand
gaugggacguucuugucuu

SEQ ID NO: 1215402 - RNA, 19 nt, Homo sapiens
  misc_RNA (1)...(19): siRNA sense strand
gaacagucuaccaugauau

SEQ ID NO: 1215403 - RNA, 19 nt, Homo sapiens
  misc_RNA (1)...(19): siRNA sense strand
caagggaucaggagcaaug

SEQ ID NO: 1215404 - RNA, 19 nt, Homo sapiens
  misc_RNA (1)...(19): siRNA sense strand
agucacacuuggaaauuaa

SEQ ID NO: 1215405 - RNA, 19 nt, Homo sapiens
  misc_RNA (1)...(19): siRNA sense strand
guaauugguaggcaucaaa

SEQ ID NO: 1215406 - RNA, 19 nt, Homo sapiens
  misc_RNA (1)...(19): siRNA sense strand
ucauagacauaaagaaugg

SEQ ID NO: 1215407 - RNA, 19 nt, Homo sapiens
  misc_RNA (1)...(19): siRNA sense strand
gaauucucccucuguugua

SEQ ID NO: 1215408 - RNA, 19 nt, Homo sapiens
  misc_RNA (1)...(19): siRNA sense strand
uagcaaagccaaagaacug

SEQ ID NO: 1215409 - RNA, 19 nt, Homo sapiens
  misc_RNA (1)...(19): siRNA sense strand
gauuugaccuuuuacuuga

SEQ ID NO: 1215410 - RNA, 19 nt, Homo sapiens
  misc_RNA (1)...(19): siRNA sense strand
gagagaagaagguauaaaa

SEQ ID NO: 1215411 - RNA, 19 nt, Homo sapiens
  misc_RNA (1)...(19): siRNA sense strand
aaugagagaagaagguaua

SEQ ID NO: 1215412 - RNA, 19 nt, Homo sapiens
  misc_RNA (1)...(19): siRNA sense strand
cacaagaccacaaacuaaa

SEQ ID NO: 1215413 - RNA, 19 nt, Homo sapiens
  misc_RNA (1)...(19): siRNA sense strand
ggaauauucucugugaaaa

SEQ ID NO: 1215414 - RNA, 19 nt, Homo sapiens
  misc_RNA (1)...(19): siRNA sense strand
caaacuaaacaguaaaugg

SEQ ID NO: 1215415 - RNA, 19 nt, Homo sapiens
  misc_RNA (1)...(19): siRNA sense strand
cuaucaccauugcacuuua

SEQ ID NO: 1215416 - RNA, 19 nt, Homo sapiens
  misc_RNA (1)...(19): siRNA sense strand
caagucuuauuggcaguaa

SEQ ID NO: 1215417 - RNA, 19 nt, Homo sapiens
  misc_RNA (1)...(19): siRNA sense strand
aaacuugggaguggauaua

SEQ ID NO: 1215418 - RNA, 19 nt, Homo sapiens
  misc_RNA (1)...(19): siRNA sense strand
uaucaccauugcacuuuau

SEQ ID NO: 1215419 - RNA, 19 nt, Homo sapiens
  misc_RNA (1)...(19): siRNA sense strand
accacaaacuaaacaguaa

SEQ ID NO: 1215420 - RNA, 19 nt, Homo sapiens
  misc_RNA (1)...(19): siRNA sense strand
caacggaugagacacuguu

SEQ ID NO: 1215421 - RNA, 19 nt, Homo sapiens
  misc_RNA (1)...(19): siRNA sense strand
aagaauugcuuccaguuac

SEQ ID NO: 1215422 - RNA, 19 nt, Homo sapiens
  misc_RNA (1)...(19): siRNA sense strand
ucaccauugcacuuuauua

SEQ ID NO: 1215423 - RNA, 19 nt, Homo sapiens
  misc_RNA (1)...(19): siRNA sense strand
uggaauauucucugugaaa

SEQ ID NO: 1215424 - RNA, 19 nt, Homo sapiens
  misc_RNA (1)...(19): siRNA sense strand
gaaaaggaucccacucuga

SEQ ID NO: 1215425 - RNA, 19 nt, Homo sapiens
  misc_RNA (1)...(19): siRNA sense strand
cuagaaggcaaaccaauuc

SEQ ID NO: 1215426 - RNA, 19 nt, Homo sapiens
  misc_RNA (1)...(19): siRNA sense strand
ccacaaacuaaacaguaaa

SEQ ID NO: 1215427 - RNA, 19 nt, Homo sapiens
  misc_RNA (1)...(19): siRNA sense strand
ccugugaaguacuaaugaa

SEQ ID NO: 1215428 - RNA, 19 nt, Homo sapiens
  misc_RNA (1)...(19): siRNA sense strand
gcuaaagagcccuuaccaa

SEQ ID NO: 1215429 - RNA, 19 nt, Homo sapiens
  misc_RNA (1)...(19): siRNA sense strand
ggaauguaaccugaaucua

SEQ ID NO: 1215430 - RNA, 19 nt, Homo sapiens
  misc_RNA (1)...(19): siRNA sense strand
uaaauagcaaagccaaaga

SEQ ID NO: 1215431 - RNA, 19 nt, Homo sapiens
  misc_RNA (1)...(19): siRNA sense strand
gugaaguacuaaugaaugc

SEQ ID NO: 1215432 - RNA, 19 nt, Homo sapiens
  misc_RNA (1)...(19): siRNA sense strand
guacugaugggacguucuu

SEQ ID NO: 1215433 - RNA, 19 nt, Homo sapiens
  misc_RNA (1)...(19): siRNA sense strand
caccauugcacuuuauuau

SEQ ID NO: 1215434 - RNA, 19 nt, Homo sapiens
  misc_RNA (1)...(19): siRNA sense strand
gggacguucuugucuucuu

SEQ ID NO: 1215435 - RNA, 19 nt, Homo sapiens
  misc_RNA (1)...(19): siRNA sense strand
agacauaaagaauggaaga

SEQ ID NO: 1215436 - RNA, 19 nt, Homo sapiens
  misc_RNA (1)...(19): siRNA sense strand
uauaugaacagucacacuu

SEQ ID NO: 1215437 - RNA, 19 nt, Homo sapiens
  misc_RNA (1)...(19): siRNA sense strand
gccaaagaacugcaaacuu

SEQ ID NO: 1215438 - RNA, 19 nt, Homo sapiens
  misc_RNA (1)...(19): siRNA sense strand
ucugaccugugaaguacua

SEQ ID NO: 1215439 - RNA, 19 nt, Homo sapiens
  misc_RNA (1)...(19): siRNA sense strand
ucuagaaggcaaaccaauu

SEQ ID NO: 1215440 - RNA, 19 nt, Homo sapiens
  misc_RNA (1)...(19): siRNA sense strand
uagaacauguccacaagac

SEQ ID NO: 1215441 - RNA, 19 nt, Homo sapiens
  misc_RNA (1)...(19): siRNA sense strand
aaugaaugcuguugcuaca

SEQ ID NO: 1215442 - RNA, 19 nt, Homo sapiens
  misc_RNA (1)...(19): siRNA sense strand
caacugaaacuaccaugcu

SEQ ID NO: 1215443 - RNA, 19 nt, Homo sapiens
  misc_RNA (1)...(19): siRNA sense strand
uggaaauacgugacaaauu

SEQ ID NO: 1215444 - RNA, 19 nt, Homo sapiens
  misc_RNA (1)...(19): siRNA sense strand
gaaucuaaugagagaagaa

SEQ ID NO: 1215445 - RNA, 19 nt, Homo sapiens
  misc_RNA (1)...(19): siRNA sense strand
caagaccacaaacuaaaca

SEQ ID NO: 1215446 - RNA, 19 nt, Homo sapiens
  misc_RNA (1)...(19): siRNA sense strand
guacuaaugaaugcuguug

SEQ ID NO: 1215447 - RNA, 19 nt, Homo sapiens
  misc_RNA (1)...(19): siRNA sense strand
ugacuuucuuuacaaccaa

SEQ ID NO: 1215448 - RNA, 19 nt, Homo sapiens
  misc_RNA (1)...(19): siRNA sense strand
gauccaugaccauaugaau

SEQ ID NO: 1215449 - RNA, 19 nt, Homo sapiens
  misc_RNA (1)...(19): siRNA sense strand
cuaaugagagaagaaggua

SEQ ID NO: 1215450 - RNA, 19 nt, Homo sapiens
  misc_RNA (1)...(19): siRNA sense strand
cuuagaacauguccacaag

SEQ ID NO: 1215451 - RNA, 19 nt, Homo sapiens
  misc_RNA (1)...(19): siRNA sense strand
uugaagcaccugaucauug

SEQ ID NO: 1215452 - RNA, 19 nt, Homo sapiens
  misc_RNA (1)...(19): siRNA sense strand
ggaguggauauauggcaaa

SEQ ID NO: 1215453 - RNA, 19 nt, Homo sapiens
  misc_RNA (1)...(19): siRNA sense strand
gaaucuagaaggcaaacca

SEQ ID NO: 1215454 - RNA, 19 nt, Homo sapiens
  misc_RNA (1)...(19): siRNA sense strand
aaacuggcucggagaagaa

SEQ ID NO: 1215455 - RNA, 19 nt, Homo sapiens
  misc_RNA (1)...(19): siRNA sense strand
uuuacuugauggacaguuu

SEQ ID NO: 1215456 - RNA, 19 nt, Homo sapiens
  misc_RNA (1)...(19): siRNA sense strand
aaauagcaaagccaaagaa

SEQ ID NO: 1215457 - RNA, 19 nt, Homo sapiens
  misc_RNA (1)...(19): siRNA sense strand
gaccugugaaguacuaaug

SEQ ID NO: 1215458 - RNA, 19 nt, Homo sapiens
  misc_RNA (1)...(19): siRNA sense strand
uuacuugauggacaguuua

SEQ ID NO: 1215459 - RNA, 19 nt, Homo sapiens
  misc_RNA (1)...(19): siRNA sense strand
acuaccaugcuaacaaaua

SEQ ID NO: 1215460 - RNA, 19 nt, Homo sapiens
  misc_RNA (1)...(19): siRNA sense strand
aauacuuccuuucaugugu

SEQ ID NO: 1215461 - RNA, 19 nt, Homo sapiens
  misc_RNA (1)...(19): siRNA sense strand
agaauucucccucuguugu

SEQ ID NO: 1215462 - RNA, 19 nt, Homo sapiens
  misc_RNA (1)...(19): siRNA sense strand
aggcaaaccaauucuauuc

SEQ ID NO: 1215463 - RNA, 19 nt, Homo sapiens
  misc_RNA (1)...(19): siRNA sense strand
gcaaacuugggaguggaua

SEQ ID NO: 1215464 - RNA, 19 nt, Homo sapiens
  misc_RNA (1)...(19): siRNA sense strand
gaccauaugaaucuagaag

SEQ ID NO: 1215465 - RNA, 19 nt, Homo sapiens
  misc_RNA (1)...(19): siRNA sense strand
gauggacaguuuaaaaucu

SEQ ID NO: 1215466 - RNA, 19 nt, Homo sapiens
  misc_RNA (1)...(19): siRNA sense strand
aacugaaacuaccaugcua

SEQ ID NO: 1215467 - RNA, 19 nt, Homo sapiens
  misc_RNA (1)...(19): siRNA sense strand
cuggauccaugaccauaug

SEQ ID NO: 1215468 - RNA, 19 nt, Homo sapiens
  misc_RNA (1)...(19): siRNA sense strand
ugaacagucacacuuggaa

SEQ ID NO: 1215469 - RNA, 19 nt, Homo sapiens
  misc_RNA (1)...(19): siRNA sense strand
gcacuuuauuauguaguac

SEQ ID NO: 1215470 - RNA, 19 nt, Homo sapiens
  misc_RNA (1)...(19): siRNA sense strand
cagucaauuuccaaugaug

SEQ ID NO: 1215471 - RNA, 19 nt, Homo sapiens
  misc_RNA (1)...(19): siRNA sense strand
gacauaaagaauggaagaa

SEQ ID NO: 1215472 - RNA, 19 nt, Homo sapiens
  misc_RNA (1)...(19): siRNA sense strand
uacuuccuuucauguguua

SEQ ID NO: 1215473 - RNA, 19 nt, Homo sapiens
  misc_RNA (1)...(19): siRNA sense strand
auacuuccuuucauguguu

SEQ ID NO: 1215474 - RNA, 19 nt, Homo sapiens
  misc_RNA (1)...(19): siRNA sense strand
acagucaauuuccaaugau

SEQ ID NO: 1215475 - RNA, 19 nt, Homo sapiens
  misc_RNA (1)...(19): siRNA sense strand
caauuuccaaugaugucua

SEQ ID NO: 1215476 - RNA, 19 nt, Homo sapiens
  misc_RNA (1)...(19): siRNA sense strand
ggaaauacgugacaaauua

SEQ ID NO: 1215477 - RNA, 19 nt, Homo sapiens
  misc_RNA (1)...(19): siRNA sense strand
ccaaagaacugcaaacuug

SEQ ID NO: 1215478 - RNA, 19 nt, Homo sapiens
  misc_RNA (1)...(19): siRNA sense strand
gaauguaaccugaaucuaa

SEQ ID NO: 1215479 - RNA, 19 nt, Homo sapiens
  misc_RNA (1)...(19): siRNA sense strand
ggaacagucuaccaugaua

SEQ ID NO: 1215480 - RNA, 19 nt, Homo sapiens
  misc_RNA (1)...(19): siRNA sense strand
uagcauaccuuccuuagug

SEQ ID NO: 1215481 - RNA, 19 nt, Homo sapiens
  misc_RNA (1)...(19): siRNA sense strand
gcaaaccaauucuauucuu

SEQ ID NO: 1215482 - RNA, 19 nt, Homo sapiens
  misc_RNA (1)...(19): siRNA sense strand
gaggaacagucuaccauga

SEQ ID NO: 1215483 - RNA, 19 nt, Homo sapiens
  misc_RNA (1)...(19): siRNA sense strand
gauaaucacauucaccuaa

SEQ ID NO: 1215484 - RNA, 19 nt, Homo sapiens
  misc_RNA (1)...(19): siRNA sense strand
gaaacuaccaugcuaacaa

SEQ ID NO: 1215485 - RNA, 19 nt, Homo sapiens
  misc_RNA (1)...(19): siRNA sense strand
aaacuaccaugcuaacaaa

SEQ ID NO: 1215486 - RNA, 19 nt, Homo sapiens
  misc_RNA (1)...(19): siRNA sense strand
ggacguucuugucuucuuu

SEQ ID NO: 1215487 - RNA, 19 nt, Homo sapiens
  misc_RNA (1)...(19): siRNA sense strand
guucuugucuucuuugcua

SEQ ID NO: 1215488 - RNA, 19 nt, Homo sapiens
  misc_RNA (1)...(19): siRNA sense strand
ccacaagaccacaaacuaa

SEQ ID NO: 1215489 - RNA, 19 nt, Homo sapiens
  misc_RNA (1)...(19): siRNA sense strand
gaaggcaaaccaauucuau

SEQ ID NO: 1215490 - RNA, 19 nt, Homo sapiens
  misc_RNA (1)...(19): siRNA sense strand
ccauugcacuuuauuaugu

SEQ ID NO: 1215491 - RNA, 19 nt, Homo sapiens
  misc_RNA (1)...(19): siRNA sense strand
uaaccugaaucuaaugaga

SEQ ID NO: 1215492 - RNA, 19 nt, Homo sapiens
  misc_RNA (1)...(19): siRNA sense strand
gaccacaaacuaaacagua

SEQ ID NO: 1215493 - RNA, 19 nt, Homo sapiens
  misc_RNA (1)...(19): siRNA sense strand
gaucauugguugccauugg

SEQ ID NO: 1215494 - RNA, 19 nt, Homo sapiens
  misc_RNA (1)...(19): siRNA sense strand
uaauaaacccaacggauga

SEQ ID NO: 1215495 - RNA, 19 nt, Homo sapiens
  misc_RNA (1)...(19): siRNA sense strand
uacagucaauuuccaauga

SEQ ID NO: 1215496 - RNA, 19 nt, Homo sapiens
  misc_RNA (1)...(19): siRNA sense strand
aauggaauauucucuguga

SEQ ID NO: 1215497 - RNA, 19 nt, Homo sapiens
  misc_RNA (1)...(19): siRNA sense strand
cagucacacuuggaaauua

SEQ ID NO: 1215498 - RNA, 19 nt, Homo sapiens
  misc_RNA (1)...(19): siRNA sense strand
cuaccaugcuaacaaauau

SEQ ID NO: 1215499 - RNA, 19 nt, Homo sapiens
  misc_RNA (1)...(19): siRNA sense strand
gaacagucacacuuggaaa

SEQ ID NO: 1215500 - RNA, 19 nt, Homo sapiens
  misc_RNA (1)...(19): siRNA sense strand
ugaagcaccugaucauugg

SEQ ID NO: 1215501 - RNA, 19 nt, Homo sapiens
  misc_RNA (1)...(19): siRNA sense strand
gaugggacguucuugucuu

SEQ ID NO: 1215502 - RNA, 19 nt, Homo sapiens
  misc_RNA (1)...(19): siRNA sense strand
gaacagucuaccaugauau

SEQ ID NO: 1215503 - RNA, 19 nt, Homo sapiens
  misc_RNA (1)...(19): siRNA sense strand
caagggaucaggagcaaug

SEQ ID NO: 1215504 - RNA, 19 nt, Homo sapiens
  misc_RNA (1)...(19): siRNA sense strand
agucacacuuggaaauuaa

SEQ ID NO: 1215505 - RNA, 19 nt, Homo sapiens
  misc_RNA (1)...(19): siRNA sense strand
guaauugguaggcaucaaa

SEQ ID NO: 1215506 - RNA, 19 nt, Homo sapiens
  misc_RNA (1)...(19): siRNA sense strand
ucauagacauaaagaaugg

SEQ ID NO: 1215507 - RNA, 19 nt, Homo sapiens
  misc_RNA (1)...(19): siRNA sense strand
gaauucucccucuguugua

SEQ ID NO: 1215508 - RNA, 19 nt, Homo sapiens
  misc_RNA (1)...(19): siRNA sense strand
uagcaaagccaaagaacug

SEQ ID NO: 1215509 - RNA, 19 nt, Homo sapiens
  misc_RNA (1)...(19): siRNA sense strand
gauuugaccuuuuacuuga

SEQ ID NO: 1215510 - RNA, 19 nt, Homo sapiens
  misc_RNA (1)...(19): siRNA sense strand
gagagaagaagguauaaaa

SEQ ID NO: 1215511 - RNA, 19 nt, Homo sapiens
  misc_RNA (1)...(19): siRNA sense strand
aaugagagaagaagguaua

SEQ ID NO: 1215512 - RNA, 19 nt, Homo sapiens
  misc_RNA (1)...(19): siRNA sense strand
cacaagaccacaaacuaaa

SEQ ID NO: 1215513 - RNA, 19 nt, Homo sapiens
  misc_RNA (1)...(19): siRNA sense strand
ggaauauucucugugaaaa

SEQ ID NO: 1215514 - RNA, 19 nt, Homo sapiens
  misc_RNA (1)...(19): siRNA sense strand
caaacuaaacaguaaaugg

SEQ ID NO: 1215515 - RNA, 19 nt, Homo sapiens
  misc_RNA (1)...(19): siRNA sense strand
cuaucaccauugcacuuua

SEQ ID NO: 1215516 - RNA, 19 nt, Homo sapiens
  misc_RNA (1)...(19): siRNA sense strand
caagucuuauuggcaguaa

SEQ ID NO: 1215517 - RNA, 19 nt, Homo sapiens
  misc_RNA (1)...(19): siRNA sense strand
aaacuugggaguggauaua

SEQ ID NO: 1215518 - RNA, 19 nt, Homo sapiens
  misc_RNA (1)...(19): siRNA sense strand
uaucaccauugcacuuuau

SEQ ID NO: 1215519 - RNA, 19 nt, Homo sapiens
  misc_RNA (1)...(19): siRNA sense strand
accacaaacuaaacaguaa

SEQ ID NO: 1215520 - RNA, 19 nt, Homo sapiens
  misc_RNA (1)...(19): siRNA sense strand
caacggaugagacacuguu

SEQ ID NO: 1215521 - RNA, 19 nt, Homo sapiens
  misc_RNA (1)...(19): siRNA sense strand
aagaauugcuuccaguuac

SEQ ID NO: 1215522 - RNA, 19 nt, Homo sapiens
  misc_RNA (1)...(19): siRNA sense strand
ucaccauugcacuuuauua

SEQ ID NO: 1215523 - RNA, 19 nt, Homo sapiens
  misc_RNA (1)...(19): siRNA sense strand
uggaauauucucugugaaa

SEQ ID NO: 1215524 - RNA, 19 nt, Homo sapiens
  misc_RNA (1)...(19): siRNA sense strand
gaaaaggaucccacucuga

SEQ ID NO: 1215525 - RNA, 19 nt, Homo sapiens
  misc_RNA (1)...(19): siRNA sense strand
cuagaaggcaaaccaauuc

SEQ ID NO: 1215526 - RNA, 19 nt, Homo sapiens
  misc_RNA (1)...(19): siRNA sense strand
ccacaaacuaaacaguaaa

SEQ ID NO: 1215527 - RNA, 19 nt, Homo sapiens
  misc_RNA (1)...(19): siRNA sense strand
ccugugaaguacuaaugaa

SEQ ID NO: 1215528 - RNA, 19 nt, Homo sapiens
  misc_RNA (1)...(19): siRNA sense strand
gcuaaagagcccuuaccaa

SEQ ID NO: 1215529 - RNA, 19 nt, Homo sapiens
  misc_RNA (1)...(19): siRNA sense strand
ggaauguaaccugaaucua

SEQ ID NO: 1215530 - RNA, 19 nt, Homo sapiens
  misc_RNA (1)...(19): siRNA sense strand
uaaauagcaaagccaaaga

SEQ ID NO: 1215531 - RNA, 19 nt, Homo sapiens
  misc_RNA (1)...(19): siRNA sense strand
gugaaguacuaaugaaugc

SEQ ID NO: 1215532 - RNA, 19 nt, Homo sapiens
  misc_RNA (1)...(19): siRNA sense strand
guacugaugggacguucuu

SEQ ID NO: 1215533 - RNA, 19 nt, Homo sapiens
  misc_RNA (1)...(19): siRNA sense strand
caccauugcacuuuauuau

SEQ ID NO: 1215534 - RNA, 19 nt, Homo sapiens
  misc_RNA (1)...(19): siRNA sense strand
gggacguucuugucuucuu

SEQ ID NO: 1215535 - RNA, 19 nt, Homo sapiens
  misc_RNA (1)...(19): siRNA sense strand
agacauaaagaauggaaga

SEQ ID NO: 1215536 - RNA, 19 nt, Homo sapiens
  misc_RNA (1)...(19): siRNA sense strand
uauaugaacagucacacuu

SEQ ID NO: 1215537 - RNA, 19 nt, Homo sapiens
  misc_RNA (1)...(19): siRNA sense strand
gccaaagaacugcaaacuu

SEQ ID NO: 1215538 - RNA, 19 nt, Homo sapiens
  misc_RNA (1)...(19): siRNA sense strand
ucugaccugugaaguacua

SEQ ID NO: 1215539 - RNA, 19 nt, Homo sapiens
  misc_RNA (1)...(19): siRNA sense strand
ucuagaaggcaaaccaauu

SEQ ID NO: 1215540 - RNA, 19 nt, Homo sapiens
  misc_RNA (1)...(19): siRNA sense strand
uagaacauguccacaagac

SEQ ID NO: 1215541 - RNA, 19 nt, Homo sapiens
  misc_RNA (1)...(19): siRNA sense strand
aaugaaugcuguugcuaca

SEQ ID NO: 1215542 - RNA, 19 nt, Homo sapiens
  misc_RNA (1)...(19): siRNA sense strand
caacugaaacuaccaugcu

SEQ ID NO: 1215543 - RNA, 19 nt, Homo sapiens
  misc_RNA (1)...(19): siRNA sense strand
uggaaauacgugacaaauu

SEQ ID NO: 1215544 - RNA, 19 nt, Homo sapiens
  misc_RNA (1)...(19): siRNA sense strand
gaaucuaaugagagaagaa

SEQ ID NO: 1215545 - RNA, 19 nt, Homo sapiens
  misc_RNA (1)...(19): siRNA sense strand
caagaccacaaacuaaaca

SEQ ID NO: 1215546 - RNA, 19 nt, Homo sapiens
  misc_RNA (1)...(19): siRNA sense strand
guacuaaugaaugcuguug

SEQ ID NO: 1215547 - RNA, 19 nt, Homo sapiens
  misc_RNA (1)...(19): siRNA sense strand
ugacuuucuuuacaaccaa

SEQ ID NO: 1215548 - RNA, 19 nt, Homo sapiens
  misc_RNA (1)...(19): siRNA sense strand
gauccaugaccauaugaau

SEQ ID NO: 1215549 - RNA, 19 nt, Homo sapiens
  misc_RNA (1)...(19): siRNA sense strand
cuaaugagagaagaaggua

SEQ ID NO: 1215550 - RNA, 19 nt, Homo sapiens
  misc_RNA (1)...(19): siRNA sense strand
cuuagaacauguccacaag

SEQ ID NO: 1215551 - RNA, 19 nt, Homo sapiens
  misc_RNA (1)...(19): siRNA sense strand
uugaagcaccugaucauug

SEQ ID NO: 1215552 - RNA, 19 nt, Homo sapiens
  misc_RNA (1)...(19): siRNA sense strand
ggaguggauauauggcaaa

SEQ ID NO: 1215553 - RNA, 19 nt, Homo sapiens
  misc_RNA (1)...(19): siRNA sense strand
gaaucuagaaggcaaacca

SEQ ID NO: 1215554 - RNA, 19 nt, Homo sapiens
  misc_RNA (1)...(19): siRNA sense strand
aaacuggcucggagaagaa

SEQ ID NO: 1215555 - RNA, 19 nt, Homo sapiens
  misc_RNA (1)...(19): siRNA sense strand
uuuacuugauggacaguuu

SEQ ID NO: 1215556 - RNA, 19 nt, Homo sapiens
  misc_RNA (1)...(19): siRNA sense strand
aaauagcaaagccaaagaa

SEQ ID NO: 1215557 - RNA, 19 nt, Homo sapiens
  misc_RNA (1)...(19): siRNA sense strand
gaccugugaaguacuaaug

SEQ ID NO: 1215558 - RNA, 19 nt, Homo sapiens
  misc_RNA (1)...(19): siRNA sense strand
uuacuugauggacaguuua

SEQ ID NO: 1215559 - RNA, 19 nt, Homo sapiens
  misc_RNA (1)...(19): siRNA sense strand
acuaccaugcuaacaaaua

SEQ ID NO: 1215560 - RNA, 19 nt, Homo sapiens
  misc_RNA (1)...(19): siRNA sense strand
aauacuuccuuucaugugu

SEQ ID NO: 1215561 - RNA, 19 nt, Homo sapiens
  misc_RNA (1)...(19): siRNA sense strand
agaauucucccucuguugu

SEQ ID NO: 1215562 - RNA, 19 nt, Homo sapiens
  misc_RNA (1)...(19): siRNA sense strand
aggcaaaccaauucuauuc

SEQ ID NO: 1215563 - RNA, 19 nt, Homo sapiens
  misc_RNA (1)...(19): siRNA sense strand
gcaaacuugggaguggaua

SEQ ID NO: 1215564 - RNA, 19 nt, Homo sapiens
  misc_RNA (1)...(19): siRNA sense strand
gaccauaugaaucuagaag

SEQ ID NO: 1215565 - RNA, 19 nt, Homo sapiens
  misc_RNA (1)...(19): siRNA sense strand
gauggacaguuuaaaaucu

SEQ ID NO: 1215566 - RNA, 19 nt, Homo sapiens
  misc_RNA (1)...(19): siRNA sense strand
aacugaaacuaccaugcua

SEQ ID NO: 1215567 - RNA, 19 nt, Homo sapiens
  misc_RNA (1)...(19): siRNA sense strand
cuggauccaugaccauaug

SEQ ID NO: 1215568 - RNA, 19 nt, Homo sapiens
  misc_RNA (1)...(19): siRNA sense strand
ugaacagucacacuuggaa

SEQ ID NO: 1215569 - RNA, 19 nt, Homo sapiens
  misc_RNA (1)...(19): siRNA sense strand
gcacuuuauuauguaguac

SEQ ID NO: 1215570 - RNA, 19 nt, Homo sapiens
  misc_RNA (1)...(19): siRNA sense strand
cagucaauuuccaaugaug

SEQ ID NO: 1215571 - RNA, 19 nt, Homo sapiens
  misc_RNA (1)...(19): siRNA sense strand
gacauaaagaauggaagaa

SEQ ID NO: 1215572 - RNA, 19 nt, Homo sapiens
  misc_RNA (1)...(19): siRNA sense strand
uacuuccuuucauguguua

SEQ ID NO: 1215573 - RNA, 19 nt, Homo sapiens
  misc_RNA (1)...(19): siRNA sense strand
auacuuccuuucauguguu

SEQ ID NO: 1215574 - RNA, 19 nt, Homo sapiens
  misc_RNA (1)...(19): siRNA sense strand
acagucaauuuccaaugau

SEQ ID NO: 1215575 - RNA, 19 nt, Homo sapiens
  misc_RNA (1)...(19): siRNA sense strand
caauuuccaaugaugucua

SEQ ID NO: 1215576 - RNA, 19 nt, Homo sapiens
  misc_RNA (1)...(19): siRNA sense strand
ggaaauacgugacaaauua

SEQ ID NO: 1215577 - RNA, 19 nt, Homo sapiens
  misc_RNA (1)...(19): siRNA sense strand
ccaaagaacugcaaacuug

SEQ ID NO: 1215578 - RNA, 19 nt, Homo sapiens
  misc_RNA (1)...(19): siRNA sense strand
gaauguaaccugaaucuaa

SEQ ID NO: 1215579 - RNA, 19 nt, Homo sapiens
  misc_RNA (1)...(19): siRNA sense strand
ggaacagucuaccaugaua

SEQ ID NO: 1215580 - RNA, 19 nt, Homo sapiens
  misc_RNA (1)...(19): siRNA sense strand
uagcauaccuuccuuagug

SEQ ID NO: 1215581 - RNA, 19 nt, Homo sapiens
  misc_RNA (1)...(19): siRNA sense strand
gcaaaccaauucuauucuu

SEQ ID NO: 1215582 - RNA, 19 nt, Homo sapiens
  misc_RNA (1)...(19): siRNA sense strand
gaggaacagucuaccauga

SEQ ID NO: 1215583 - RNA, 19 nt, Homo sapiens
  misc_RNA (1)...(19): siRNA sense strand
gauaaucacauucaccuaa

SEQ ID NO: 1215584 - RNA, 19 nt, Homo sapiens
  misc_RNA (1)...(19): siRNA sense strand
gaaacuaccaugcuaacaa

SEQ ID NO: 1215585 - RNA, 19 nt, Homo sapiens
  misc_RNA (1)...(19): siRNA sense strand
aaacuaccaugcuaacaaa

SEQ ID NO: 1215586 - RNA, 19 nt, Homo sapiens
  misc_RNA (1)...(19): siRNA sense strand
ggacguucuugucuucuuu

SEQ ID NO: 1215587 - RNA, 19 nt, Homo sapiens
  misc_RNA (1)...(19): siRNA sense strand
guucuugucuucuuugcua

SEQ ID NO: 1215588 - RNA, 19 nt, Homo sapiens
  misc_RNA (1)...(19): siRNA sense strand
ccacaagaccacaaacuaa

SEQ ID NO: 1215589 - RNA, 19 nt, Homo sapiens
  misc_RNA (1)...(19): siRNA sense strand
gaaggcaaaccaauucuau

SEQ ID NO: 1215590 - RNA, 19 nt, Homo sapiens
  misc_RNA (1)...(19): siRNA sense strand
ccauugcacuuuauuaugu

SEQ ID NO: 1215591 - RNA, 19 nt, Homo sapiens
  misc_RNA (1)...(19): siRNA sense strand
uaaccugaaucuaaugaga

SEQ ID NO: 1215592 - RNA, 19 nt, Homo sapiens
  misc_RNA (1)...(19): siRNA sense strand
gaccacaaacuaaacagua

SEQ ID NO: 1215593 - RNA, 19 nt, Homo sapiens
  misc_RNA (1)...(19): siRNA sense strand
gaucauugguugccauugg

SEQ ID NO: 1215594 - RNA, 19 nt, Homo sapiens
  misc_RNA (1)...(19): siRNA sense strand
uaauaaacccaacggauga

SEQ ID NO: 1215595 - RNA, 19 nt, Homo sapiens
  misc_RNA (1)...(19): siRNA sense strand
uacagucaauuuccaauga

SEQ ID NO: 1215596 - RNA, 19 nt, Homo sapiens
  misc_RNA (1)...(19): siRNA sense strand
aauggaauauucucuguga

SEQ ID NO: 1215597 - RNA, 19 nt, Homo sapiens
  misc_RNA (1)...(19): siRNA sense strand
cagucacacuuggaaauua

SEQ ID NO: 1215598 - RNA, 19 nt, Homo sapiens
  misc_RNA (1)...(19): siRNA sense strand
cuaccaugcuaacaaauau

SEQ ID NO: 1215599 - RNA, 19 nt, Homo sapiens
  misc_RNA (1)...(19): siRNA sense strand
gaacagucacacuuggaaa

SEQ ID NO: 1215600 - RNA, 19 nt, Homo sapiens
  misc_RNA (1)...(19): siRNA sense strand
ugaagcaccugaucauugg

SEQ ID NO: 1215601 - RNA, 19 nt, Homo sapiens
  misc_RNA (1)...(19): siRNA sense strand
gaugggacguucuugucuu

SEQ ID NO: 1215602 - RNA, 19 nt, Homo sapiens
  misc_RNA (1)...(19): siRNA sense strand
gaacagucuaccaugauau

SEQ ID NO: 1215603 - RNA, 19 nt, Homo sapiens
  misc_RNA (1)...(19): siRNA sense strand
caagggaucaggagcaaug

SEQ ID NO: 1215604 - RNA, 19 nt, Homo sapiens
  misc_RNA (1)...(19): siRNA sense strand
agucacacuuggaaauuaa

SEQ ID NO: 1215605 - RNA, 19 nt, Homo sapiens
  misc_RNA (1)...(19): siRNA sense strand
guaauugguaggcaucaaa

SEQ ID NO: 1215606 - RNA, 19 nt, Homo sapiens
  misc_RNA (1)...(19): siRNA sense strand
ucauagacauaaagaaugg

SEQ ID NO: 1215607 - RNA, 19 nt, Homo sapiens
  misc_RNA (1)...(19): siRNA sense strand
gaauucucccucuguugua

SEQ ID NO: 1215608 - RNA, 19 nt, Homo sapiens
  misc_RNA (1)...(19): siRNA sense strand
uagcaaagccaaagaacug

SEQ ID NO: 1215609 - RNA, 19 nt, Homo sapiens
  misc_RNA (1)...(19): siRNA sense strand
gauuugaccuuuuacuuga

SEQ ID NO: 1215610 - RNA, 19 nt, Homo sapiens
  misc_RNA (1)...(19): siRNA sense strand
gagagaagaagguauaaaa

SEQ ID NO: 1215611 - RNA, 19 nt, Homo sapiens
  misc_RNA (1)...(19): siRNA sense strand
aaugagagaagaagguaua

SEQ ID NO: 1215612 - RNA, 19 nt, Homo sapiens
  misc_RNA (1)...(19): siRNA sense strand
cacaagaccacaaacuaaa

SEQ ID NO: 1215613 - RNA, 19 nt, Homo sapiens
  misc_RNA (1)...(19): siRNA sense strand
ggaauauucucugugaaaa

SEQ ID NO: 1215614 - RNA, 19 nt, Homo sapiens
  misc_RNA (1)...(19): siRNA sense strand
caaacuaaacaguaaaugg

SEQ ID NO: 1215615 - RNA, 19 nt, Homo sapiens
  misc_RNA (1)...(19): siRNA sense strand
cuaucaccauugcacuuua

SEQ ID NO: 1215616 - RNA, 19 nt, Homo sapiens
  misc_RNA (1)...(19): siRNA sense strand
caagucuuauuggcaguaa

SEQ ID NO: 1215617 - RNA, 19 nt, Homo sapiens
  misc_RNA (1)...(19): siRNA sense strand
aaacuugggaguggauaua

SEQ ID NO: 1215618 - RNA, 19 nt, Homo sapiens
  misc_RNA (1)...(19): siRNA sense strand
uaucaccauugcacuuuau

SEQ ID NO: 1215619 - RNA, 19 nt, Homo sapiens
  misc_RNA (1)...(19): siRNA sense strand
accacaaacuaaacaguaa

SEQ ID NO: 1215620 - RNA, 19 nt, Homo sapiens
  misc_RNA (1)...(19): siRNA sense strand
caacggaugagacacuguu

SEQ ID NO: 1215621 - RNA, 19 nt, Homo sapiens
  misc_RNA (1)...(19): siRNA sense strand
aagaauugcuuccaguuac

SEQ ID NO: 1215622 - RNA, 19 nt, Homo sapiens
  misc_RNA (1)...(19): siRNA sense strand
ucaccauugcacuuuauua

SEQ ID NO: 1215623 - RNA, 19 nt, Homo sapiens
  misc_RNA (1)...(19): siRNA sense strand
uggaauauucucugugaaa

SEQ ID NO: 1215624 - RNA, 19 nt, Homo sapiens
  misc_RNA (1)...(19): siRNA sense strand
gaaaaggaucccacucuga

SEQ ID NO: 1215625 - RNA, 19 nt, Homo sapiens
  misc_RNA (1)...(19): siRNA sense strand
cuagaaggcaaaccaauuc

SEQ ID NO: 1215626 - RNA, 19 nt, Homo sapiens
  misc_RNA (1)...(19): siRNA sense strand
ccacaaacuaaacaguaaa

SEQ ID NO: 1215627 - RNA, 19 nt, Homo sapiens
  misc_RNA (1)...(19): siRNA sense strand
ccugugaaguacuaaugaa

SEQ ID NO: 1215628 - RNA, 19 nt, Homo sapiens
  misc_RNA (1)...(19): siRNA sense strand
gcuaaagagcccuuaccaa

SEQ ID NO: 1215629 - RNA, 19 nt, Homo sapiens
  misc_RNA (1)...(19): siRNA sense strand
ggaauguaaccugaaucua

SEQ ID NO: 1215630 - RNA, 19 nt, Homo sapiens
  misc_RNA (1)...(19): siRNA sense strand
uaaauagcaaagccaaaga

SEQ ID NO: 1215631 - RNA, 19 nt, Homo sapiens
  misc_RNA (1)...(19): siRNA sense strand
gugaaguacuaaugaaugc

SEQ ID NO: 1215632 - RNA, 19 nt, Homo sapiens
  misc_RNA (1)...(19): siRNA sense strand
guacugaugggacguucuu

SEQ ID NO: 1215633 - RNA, 19 nt, Homo sapiens
  misc_RNA (1)...(19): siRNA sense strand
caccauugcacuuuauuau

SEQ ID NO: 1215634 - RNA, 19 nt, Homo sapiens
  misc_RNA (1)...(19): siRNA sense strand
gggacguucuugucuucuu

SEQ ID NO: 1215635 - RNA, 19 nt, Homo sapiens
  misc_RNA (1)...(19): siRNA sense strand
agacauaaagaauggaaga

SEQ ID NO: 1215636 - RNA, 19 nt, Homo sapiens
  misc_RNA (1)...(19): siRNA sense strand
uauaugaacagucacacuu

SEQ ID NO: 1215637 - RNA, 19 nt, Homo sapiens
  misc_RNA (1)...(19): siRNA sense strand
gccaaagaacugcaaacuu

SEQ ID NO: 1215638 - RNA, 19 nt, Homo sapiens
  misc_RNA (1)...(19): siRNA sense strand
ucugaccugugaaguacua

SEQ ID NO: 1215639 - RNA, 19 nt, Homo sapiens
  misc_RNA (1)...(19): siRNA sense strand
ucuagaaggcaaaccaauu

SEQ ID NO: 1215640 - RNA, 19 nt, Homo sapiens
  misc_RNA (1)...(19): siRNA sense strand
uagaacauguccacaagac

SEQ ID NO: 1215641 - RNA, 19 nt, Homo sapiens
  misc_RNA (1)...(19): siRNA sense strand
aaugaaugcuguugcuaca

SEQ ID NO: 1215642 - RNA, 19 nt, Homo sapiens
  misc_RNA (1)...(19): siRNA sense strand
caacugaaacuaccaugcu

SEQ ID NO: 1215643 - RNA, 19 nt, Homo sapiens
  misc_RNA (1)...(19): siRNA sense strand
uggaaauacgugacaaauu

SEQ ID NO: 1215644 - RNA, 19 nt, Homo sapiens
  misc_RNA (1)...(19): siRNA sense strand
gaaucuaaugagagaagaa

SEQ ID NO: 1215645 - RNA, 19 nt, Homo sapiens
  misc_RNA (1)...(19): siRNA sense strand
caagaccacaaacuaaaca

SEQ ID NO: 1215646 - RNA, 19 nt, Homo sapiens
  misc_RNA (1)...(19): siRNA sense strand
guacuaaugaaugcuguug

SEQ ID NO: 1215647 - RNA, 19 nt, Homo sapiens
  misc_RNA (1)...(19): siRNA sense strand
ugacuuucuuuacaaccaa

SEQ ID NO: 1215648 - RNA, 19 nt, Homo sapiens
  misc_RNA (1)...(19): siRNA sense strand
gauccaugaccauaugaau

SEQ ID NO: 1215649 - RNA, 19 nt, Homo sapiens
  misc_RNA (1)...(19): siRNA sense strand
cuaaugagagaagaaggua

SEQ ID NO: 1215650 - RNA, 19 nt, Homo sapiens
  misc_RNA (1)...(19): siRNA sense strand
cuuagaacauguccacaag

SEQ ID NO: 1215651 - RNA, 19 nt, Homo sapiens
  misc_RNA (1)...(19): siRNA sense strand
uugaagcaccugaucauug

SEQ ID NO: 1215652 - RNA, 19 nt, Homo sapiens
  misc_RNA (1)...(19): siRNA sense strand
ggaguggauauauggcaaa

SEQ ID NO: 1215653 - RNA, 19 nt, Homo sapiens
  misc_RNA (1)...(19): siRNA sense strand
gaaucuagaaggcaaacca

SEQ ID NO: 1215654 - RNA, 19 nt, Homo sapiens
  misc_RNA (1)...(19): siRNA sense strand
aaacuggcucggagaagaa

SEQ ID NO: 1215655 - RNA, 19 nt, Homo sapiens
  misc_RNA (1)...(19): siRNA sense strand
uuuacuugauggacaguuu

SEQ ID NO: 1215656 - RNA, 19 nt, Homo sapiens
  misc_RNA (1)...(19): siRNA sense strand
aaauagcaaagccaaagaa

SEQ ID NO: 1215657 - RNA, 19 nt, Homo sapiens
  misc_RNA (1)...(19): siRNA sense strand
gaccugugaaguacuaaug

SEQ ID NO: 1215658 - RNA, 19 nt, Homo sapiens
  misc_RNA (1)...(19): siRNA sense strand
uuacuugauggacaguuua

SEQ ID NO: 1215659 - RNA, 19 nt, Homo sapiens
  misc_RNA (1)...(19): siRNA sense strand
acuaccaugcuaacaaaua

SEQ ID NO: 1215660 - RNA, 19 nt, Homo sapiens
  misc_RNA (1)...(19): siRNA sense strand
aauacuuccuuucaugugu

SEQ ID NO: 1215661 - RNA, 19 nt, Homo sapiens
  misc_RNA (1)...(19): siRNA sense strand
agaauucucccucuguugu

SEQ ID NO: 1215662 - RNA, 19 nt, Homo sapiens
  misc_RNA (1)...(19): siRNA sense strand
aggcaaaccaauucuauuc

SEQ ID NO: 1215663 - RNA, 19 nt, Homo sapiens
  misc_RNA (1)...(19): siRNA sense strand
gcaaacuugggaguggaua

SEQ ID NO: 1215664 - RNA, 19 nt, Homo sapiens
  misc_RNA (1)...(19): siRNA sense strand
gaccauaugaaucuagaag

SEQ ID NO: 1215665 - RNA, 19 nt, Homo sapiens
  misc_RNA (1)...(19): siRNA sense strand
gauggacaguuuaaaaucu

SEQ ID NO: 1215666 - RNA, 19 nt, Homo sapiens
  misc_RNA (1)...(19): siRNA sense strand
aacugaaacuaccaugcua

SEQ ID NO: 1215667 - RNA, 19 nt, Homo sapiens
  misc_RNA (1)...(19): siRNA sense strand
cuggauccaugaccauaug

SEQ ID NO: 1215668 - RNA, 19 nt, Homo sapiens
  misc_RNA (1)...(19): siRNA sense strand
ugaacagucacacuuggaa

SEQ ID NO: 1215669 - RNA, 19 nt, Homo sapiens
  misc_RNA (1)...(19): siRNA sense strand
gcacuuuauuauguaguac

SEQ ID NO: 1215670 - RNA, 19 nt, Homo sapiens
  misc_RNA (1)...(19): siRNA sense strand
cagucaauuuccaaugaug

SEQ ID NO: 1215671 - RNA, 19 nt, Homo sapiens
  misc_RNA (1)...(19): siRNA sense strand
gacauaaagaauggaagaa

SEQ ID NO: 1215672 - RNA, 19 nt, Homo sapiens
  misc_RNA (1)...(19): siRNA sense strand
uacuuccuuucauguguua

SEQ ID NO: 1215673 - RNA, 19 nt, Homo sapiens
  misc_RNA (1)...(19): siRNA sense strand
auacuuccuuucauguguu

SEQ ID NO: 1215674 - RNA, 19 nt, Homo sapiens
  misc_RNA (1)...(19): siRNA sense strand
acagucaauuuccaaugau

SEQ ID NO: 1215675 - RNA, 19 nt, Homo sapiens
  misc_RNA (1)...(19): siRNA sense strand
caauuuccaaugaugucua

SEQ ID NO: 1215676 - RNA, 19 nt, Homo sapiens
  misc_RNA (1)...(19): siRNA sense strand
ggaaauacgugacaaauua

SEQ ID NO: 1215677 - RNA, 19 nt, Homo sapiens
  misc_RNA (1)...(19): siRNA sense strand
ccaaagaacugcaaacuug

SEQ ID NO: 1215678 - RNA, 19 nt, Homo sapiens
  misc_RNA (1)...(19): siRNA sense strand
gaauguaaccugaaucuaa

SEQ ID NO: 1215679 - RNA, 19 nt, Homo sapiens
  misc_RNA (1)...(19): siRNA sense strand
ggaacagucuaccaugaua

SEQ ID NO: 1215680 - RNA, 19 nt, Homo sapiens
  misc_RNA (1)...(19): siRNA sense strand
uagcauaccuuccuuagug

SEQ ID NO: 1215681 - RNA, 19 nt, Homo sapiens
  misc_RNA (1)...(19): siRNA sense strand
gcaaaccaauucuauucuu

SEQ ID NO: 1215682 - RNA, 19 nt, Homo sapiens
  misc_RNA (1)...(19): siRNA sense strand
gaggaacagucuaccauga

SEQ ID NO: 1215683 - RNA, 19 nt, Homo sapiens
  misc_RNA (1)...(19): siRNA sense strand
gauaaucacauucaccuaa

SEQ ID NO: 1215684 - RNA, 19 nt, Homo sapiens
  misc_RNA (1)...(19): siRNA sense strand
gaaacuaccaugcuaacaa

SEQ ID NO: 1215685 - RNA, 19 nt, Homo sapiens
  misc_RNA (1)...(19): siRNA sense strand
aaacuaccaugcuaacaaa

SEQ ID NO: 1215686 - RNA, 19 nt, Homo sapiens
  misc_RNA (1)...(19): siRNA sense strand
ggacguucuugucuucuuu

SEQ ID NO: 1215687 - RNA, 19 nt, Homo sapiens
  misc_RNA (1)...(19): siRNA sense strand
guucuugucuucuuugcua

SEQ ID NO: 1215688 - RNA, 19 nt, Homo sapiens
  misc_RNA (1)...(19): siRNA sense strand
ccacaagaccacaaacuaa

SEQ ID NO: 1215689 - RNA, 19 nt, Homo sapiens
  misc_RNA (1)...(19): siRNA sense strand
gaaggcaaaccaauucuau

SEQ ID NO: 1215690 - RNA, 19 nt, Homo sapiens
  misc_RNA (1)...(19): siRNA sense strand
ccauugcacuuuauuaugu

SEQ ID NO: 1215691 - RNA, 19 nt, Homo sapiens
  misc_RNA (1)...(19): siRNA sense strand
uaaccugaaucuaaugaga

SEQ ID NO: 1215692 - RNA, 19 nt, Homo sapiens
  misc_RNA (1)...(19): siRNA sense strand
gaccacaaacuaaacagua

SEQ ID NO: 1215693 - RNA, 19 nt, Homo sapiens
  misc_RNA (1)...(19): siRNA sense strand
gaucauugguugccauugg

SEQ ID NO: 1215694 - RNA, 19 nt, Homo sapiens
  misc_RNA (1)...(19): siRNA sense strand
uaauaaacccaacggauga

SEQ ID NO: 1215695 - RNA, 19 nt, Homo sapiens
  misc_RNA (1)...(19): siRNA sense strand
uacagucaauuuccaauga

SEQ ID NO: 1215696 - RNA, 19 nt, Homo sapiens
  misc_RNA (1)...(19): siRNA sense strand
aauggaauauucucuguga

SEQ ID NO: 1215697 - RNA, 19 nt, Homo sapiens
  misc_RNA (1)...(19): siRNA sense strand
cagucacacuuggaaauua

SEQ ID NO: 1215698 - RNA, 19 nt, Homo sapiens
  misc_RNA (1)...(19): siRNA sense strand
cuaccaugcuaacaaauau

SEQ ID NO: 1215699 - RNA, 19 nt, Homo sapiens
  misc_RNA (1)...(19): siRNA sense strand
gaacagucacacuuggaaa

SEQ ID NO: 1215700 - RNA, 19 nt, Homo sapiens
  misc_RNA (1)...(19): siRNA sense strand
ugaagcaccugaucauugg

SEQ ID NO: 1215701 - RNA, 19 nt, Homo sapiens
  misc_RNA (1)...(19): siRNA sense strand
gaugggacguucuugucuu

SEQ ID NO: 1215702 - RNA, 19 nt, Homo sapiens
  misc_RNA (1)...(19): siRNA sense strand
gaacagucuaccaugauau

SEQ ID NO: 1215703 - RNA, 19 nt, Homo sapiens
  misc_RNA (1)...(19): siRNA sense strand
caagggaucaggagcaaug

SEQ ID NO: 1215704 - RNA, 19 nt, Homo sapiens
  misc_RNA (1)...(19): siRNA sense strand
agucacacuuggaaauuaa

SEQ ID NO: 1215705 - RNA, 19 nt, Homo sapiens
  misc_RNA (1)...(19): siRNA sense strand
guaauugguaggcaucaaa

SEQ ID NO: 1215706 - RNA, 19 nt, Homo sapiens
  misc_RNA (1)...(19): siRNA sense strand
ucauagacauaaagaaugg

SEQ ID NO: 1215707 - RNA, 19 nt, Homo sapiens
  misc_RNA (1)...(19): siRNA sense strand
gaauucucccucuguugua

SEQ ID NO: 1215708 - RNA, 19 nt, Homo sapiens
  misc_RNA (1)...(19): siRNA sense strand
uagcaaagccaaagaacug

SEQ ID NO: 1215709 - RNA, 19 nt, Homo sapiens
  misc_RNA (1)...(19): siRNA sense strand
gauuugaccuuuuacuuga

SEQ ID NO: 1215710 - RNA, 19 nt, Homo sapiens
  misc_RNA (1)...(19): siRNA sense strand
gagagaagaagguauaaaa

SEQ ID NO: 1215711 - RNA, 19 nt, Homo sapiens
  misc_RNA (1)...(19): siRNA sense strand
aaugagagaagaagguaua

SEQ ID NO: 1215712 - RNA, 19 nt, Homo sapiens
  misc_RNA (1)...(19): siRNA sense strand
cacaagaccacaaacuaaa

SEQ ID NO: 1215713 - RNA, 19 nt, Homo sapiens
  misc_RNA (1)...(19): siRNA sense strand
ggaauauucucugugaaaa

SEQ ID NO: 1215714 - RNA, 19 nt, Homo sapiens
  misc_RNA (1)...(19): siRNA sense strand
caaacuaaacaguaaaugg

SEQ ID NO: 1215715 - RNA, 19 nt, Homo sapiens
  misc_RNA (1)...(19): siRNA sense strand
cuaucaccauugcacuuua

SEQ ID NO: 1215716 - RNA, 19 nt, Homo sapiens
  misc_RNA (1)...(19): siRNA sense strand
caagucuuauuggcaguaa

SEQ ID NO: 1215717 - RNA, 19 nt, Homo sapiens
  misc_RNA (1)...(19): siRNA sense strand
aaacuugggaguggauaua

SEQ ID NO: 1215718 - RNA, 19 nt, Homo sapiens
  misc_RNA (1)...(19): siRNA sense strand
uaucaccauugcacuuuau

SEQ ID NO: 1215719 - RNA, 19 nt, Homo sapiens
  misc_RNA (1)...(19): siRNA sense strand
accacaaacuaaacaguaa

SEQ ID NO: 1215720 - RNA, 19 nt, Homo sapiens
  misc_RNA (1)...(19): siRNA sense strand
caacggaugagacacuguu

SEQ ID NO: 1215721 - RNA, 19 nt, Homo sapiens
  misc_RNA (1)...(19): siRNA sense strand
aagaauugcuuccaguuac

SEQ ID NO: 1215722 - RNA, 19 nt, Homo sapiens
  misc_RNA (1)...(19): siRNA sense strand
ucaccauugcacuuuauua

SEQ ID NO: 1215723 - RNA, 19 nt, Homo sapiens
  misc_RNA (1)...(19): siRNA sense strand
uggaauauucucugugaaa

SEQ ID NO: 1215724 - RNA, 19 nt, Homo sapiens
  misc_RNA (1)...(19): siRNA sense strand
gaaaaggaucccacucuga

SEQ ID NO: 1215725 - RNA, 19 nt, Homo sapiens
  misc_RNA (1)...(19): siRNA sense strand
cuagaaggcaaaccaauuc

SEQ ID NO: 1215726 - RNA, 19 nt, Homo sapiens
  misc_RNA (1)...(19): siRNA sense strand
ccacaaacuaaacaguaaa

SEQ ID NO: 1215727 - RNA, 19 nt, Homo sapiens
  misc_RNA (1)...(19): siRNA sense strand
ccugugaaguacuaaugaa

SEQ ID NO: 1215728 - RNA, 19 nt, Homo sapiens
  misc_RNA (1)...(19): siRNA sense strand
gcuaaagagcccuuaccaa

SEQ ID NO: 1215729 - RNA, 19 nt, Homo sapiens
  misc_RNA (1)...(19): siRNA sense strand
ggaauguaaccugaaucua

SEQ ID NO: 1215730 - RNA, 19 nt, Homo sapiens
  misc_RNA (1)...(19): siRNA sense strand
uaaauagcaaagccaaaga

SEQ ID NO: 1215731 - RNA, 19 nt, Homo sapiens
  misc_RNA (1)...(19): siRNA sense strand
gugaaguacuaaugaaugc

SEQ ID NO: 1215732 - RNA, 19 nt, Homo sapiens
  misc_RNA (1)...(19): siRNA sense strand
guacugaugggacguucuu

SEQ ID NO: 1215733 - RNA, 19 nt, Homo sapiens
  misc_RNA (1)...(19): siRNA sense strand
caccauugcacuuuauuau

SEQ ID NO: 1215734 - RNA, 19 nt, Homo sapiens
  misc_RNA (1)...(19): siRNA sense strand
gggacguucuugucuucuu

SEQ ID NO: 1215735 - RNA, 19 nt, Homo sapiens
  misc_RNA (1)...(19): siRNA sense strand
agacauaaagaauggaaga

SEQ ID NO: 1215736 - RNA, 19 nt, Homo sapiens
  misc_RNA (1)...(19): siRNA sense strand
uauaugaacagucacacuu

SEQ ID NO: 1215737 - RNA, 19 nt, Homo sapiens
  misc_RNA (1)...(19): siRNA sense strand
gccaaagaacugcaaacuu

SEQ ID NO: 1215738 - RNA, 19 nt, Homo sapiens
  misc_RNA (1)...(19): siRNA sense strand
ucugaccugugaaguacua

SEQ ID NO: 1215739 - RNA, 19 nt, Homo sapiens
  misc_RNA (1)...(19): siRNA sense strand
ucuagaaggcaaaccaauu

SEQ ID NO: 1215740 - RNA, 19 nt, Homo sapiens
  misc_RNA (1)...(19): siRNA sense strand
uagaacauguccacaagac

SEQ ID NO: 1215741 - RNA, 19 nt, Homo sapiens
  misc_RNA (1)...(19): siRNA sense strand
aaugaaugcuguugcuaca

SEQ ID NO: 1215742 - RNA, 19 nt, Homo sapiens
  misc_RNA (1)...(19): siRNA sense strand
caacugaaacuaccaugcu

SEQ ID NO: 1215743 - RNA, 19 nt, Homo sapiens
  misc_RNA (1)...(19): siRNA sense strand
uggaaauacgugacaaauu

SEQ ID NO: 1215744 - RNA, 19 nt, Homo sapiens
  misc_RNA (1)...(19): siRNA sense strand
gaaucuaaugagagaagaa

SEQ ID NO: 1215745 - RNA, 19 nt, Homo sapiens
  misc_RNA (1)...(19): siRNA sense strand
caagaccacaaacuaaaca

SEQ ID NO: 1215746 - RNA, 19 nt, Homo sapiens
  misc_RNA (1)...(19): siRNA sense strand
guacuaaugaaugcuguug

SEQ ID NO: 1215747 - RNA, 19 nt, Homo sapiens
  misc_RNA (1)...(19): siRNA sense strand
ugacuuucuuuacaaccaa

SEQ ID NO: 1215748 - RNA, 19 nt, Homo sapiens
  misc_RNA (1)...(19): siRNA sense strand
gauccaugaccauaugaau

SEQ ID NO: 1215749 - RNA, 19 nt, Homo sapiens
  misc_RNA (1)...(19): siRNA sense strand
cuaaugagagaagaaggua

SEQ ID NO: 1215750 - RNA, 19 nt, Homo sapiens
  misc_RNA (1)...(19): siRNA sense strand
cuuagaacauguccacaag

SEQ ID NO: 1215751 - RNA, 19 nt, Homo sapiens
  misc_RNA (1)...(19): siRNA sense strand
uugaagcaccugaucauug

SEQ ID NO: 1215752 - RNA, 19 nt, Homo sapiens
  misc_RNA (1)...(19): siRNA sense strand
ggaguggauauauggcaaa

SEQ ID NO: 1215753 - RNA, 19 nt, Homo sapiens
  misc_RNA (1)...(19): siRNA sense strand
gaaucuagaaggcaaacca

SEQ ID NO: 1215754 - RNA, 19 nt, Homo sapiens
  misc_RNA (1)...(19): siRNA sense strand
aaacuggcucggagaagaa

SEQ ID NO: 1215755 - RNA, 19 nt, Homo sapiens
  misc_RNA (1)...(19): siRNA sense strand
uuuacuugauggacaguuu

SEQ ID NO: 1215756 - RNA, 19 nt, Homo sapiens
  misc_RNA (1)...(19): siRNA sense strand
aaauagcaaagccaaagaa

SEQ ID NO: 1215757 - RNA, 19 nt, Homo sapiens
  misc_RNA (1)...(19): siRNA sense strand
gaccugugaaguacuaaug

SEQ ID NO: 1215758 - RNA, 19 nt, Homo sapiens
  misc_RNA (1)...(19): siRNA sense strand
uuacuugauggacaguuua

SEQ ID NO: 1215759 - RNA, 19 nt, Homo sapiens
  misc_RNA (1)...(19): siRNA sense strand
acuaccaugcuaacaaaua

SEQ ID NO: 1215760 - RNA, 19 nt, Homo sapiens
  misc_RNA (1)...(19): siRNA sense strand
aauacuuccuuucaugugu

SEQ ID NO: 1215761 - RNA, 19 nt, Homo sapiens
  misc_RNA (1)...(19): siRNA sense strand
agaauucucccucuguugu

SEQ ID NO: 1215762 - RNA, 19 nt, Homo sapiens
  misc_RNA (1)...(19): siRNA sense strand
aggcaaaccaauucuauuc

SEQ ID NO: 1215763 - RNA, 19 nt, Homo sapiens
  misc_RNA (1)...(19): siRNA sense strand
gcaaacuugggaguggaua

SEQ ID NO: 1215764 - RNA, 19 nt, Homo sapiens
  misc_RNA (1)...(19): siRNA sense strand
gaccauaugaaucuagaag

SEQ ID NO: 1215765 - RNA, 19 nt, Homo sapiens
  misc_RNA (1)...(19): siRNA sense strand
gauggacaguuuaaaaucu

SEQ ID NO: 1215766 - RNA, 19 nt, Homo sapiens
  misc_RNA (1)...(19): siRNA sense strand
aacugaaacuaccaugcua

SEQ ID NO: 1215767 - RNA, 19 nt, Homo sapiens
  misc_RNA (1)...(19): siRNA sense strand
cuggauccaugaccauaug

SEQ ID NO: 1215768 - RNA, 19 nt, Homo sapiens
  misc_RNA (1)...(19): siRNA sense strand
ugaacagucacacuuggaa

SEQ ID NO: 1215769 - RNA, 19 nt, Homo sapiens
  misc_RNA (1)...(19): siRNA sense strand
gcacuuuauuauguaguac

SEQ ID NO: 1215770 - RNA, 19 nt, Homo sapiens
  misc_RNA (1)...(19): siRNA sense strand
cagucaauuuccaaugaug

SEQ ID NO: 1215771 - RNA, 19 nt, Homo sapiens
  misc_RNA (1)...(19): siRNA sense strand
gacauaaagaauggaagaa

SEQ ID NO: 1215772 - RNA, 19 nt, Homo sapiens
  misc_RNA (1)...(19): siRNA sense strand
uacuuccuuucauguguua

SEQ ID NO: 1215773 - RNA, 19 nt, Homo sapiens
  misc_RNA (1)...(19): siRNA sense strand
auacuuccuuucauguguu

SEQ ID NO: 1215774 - RNA, 19 nt, Homo sapiens
  misc_RNA (1)...(19): siRNA sense strand
acagucaauuuccaaugau

SEQ ID NO: 1215775 - RNA, 19 nt, Homo sapiens
  misc_RNA (1)...(19): siRNA sense strand
caauuuccaaugaugucua

SEQ ID NO: 1215776 - RNA, 19 nt, Homo sapiens
  misc_RNA (1)...(19): siRNA sense strand
ggaaauacgugacaaauua

SEQ ID NO: 1215777 - RNA, 19 nt, Homo sapiens
  misc_RNA (1)...(19): siRNA sense strand
ccaaagaacugcaaacuug

SEQ ID NO: 1215778 - RNA, 19 nt, Homo sapiens
  misc_RNA (1)...(19): siRNA sense strand
gaauguaaccugaaucuaa

SEQ ID NO: 1215779 - RNA, 19 nt, Homo sapiens
  misc_RNA (1)...(19): siRNA sense strand
ggaacagucuaccaugaua

SEQ ID NO: 1215780 - RNA, 19 nt, Homo sapiens
  misc_RNA (1)...(19): siRNA sense strand
uagcauaccuuccuuagug

SEQ ID NO: 1215781 - RNA, 19 nt, Homo sapiens
  misc_RNA (1)...(19): siRNA sense strand
gcaaaccaauucuauucuu

SEQ ID NO: 1215782 - RNA, 19 nt, Homo sapiens
  misc_RNA (1)...(19): siRNA sense strand
gaggaacagucuaccauga

SEQ ID NO: 1215783 - RNA, 19 nt, Homo sapiens
  misc_RNA (1)...(19): siRNA sense strand
gauaaucacauucaccuaa

SEQ ID NO: 1215784 - RNA, 19 nt, Homo sapiens
  misc_RNA (1)...(19): siRNA sense strand
gaaacuaccaugcuaacaa

SEQ ID NO: 1215785 - RNA, 19 nt, Homo sapiens
  misc_RNA (1)...(19): siRNA sense strand
aaacuaccaugcuaacaaa

SEQ ID NO: 1215786 - RNA, 19 nt, Homo sapiens
  misc_RNA (1)...(19): siRNA sense strand
ggacguucuugucuucuuu

SEQ ID NO: 1215787 - RNA, 19 nt, Homo sapiens
  misc_RNA (1)...(19): siRNA sense strand
guucuugucuucuuugcua

SEQ ID NO: 1215788 - RNA, 19 nt, Homo sapiens
  misc_RNA (1)...(19): siRNA sense strand
ccacaagaccacaaacuaa

SEQ ID NO: 1215789 - RNA, 19 nt, Homo sapiens
  misc_RNA (1)...(19): siRNA sense strand
gaaggcaaaccaauucuau

SEQ ID NO: 1215790 - RNA, 19 nt, Homo sapiens
  misc_RNA (1)...(19): siRNA sense strand
ccauugcacuuuauuaugu

SEQ ID NO: 1215791 - RNA, 19 nt, Homo sapiens
  misc_RNA (1)...(19): siRNA sense strand
uaaccugaaucuaaugaga

SEQ ID NO: 1215792 - RNA, 19 nt, Homo sapiens
  misc_RNA (1)...(19): siRNA sense strand
gaccacaaacuaaacagua

SEQ ID NO: 1215793 - RNA, 19 nt, Homo sapiens
  misc_RNA (1)...(19): siRNA sense strand
gaucauugguugccauugg

SEQ ID NO: 1215794 - RNA, 19 nt, Homo sapiens
  misc_RNA (1)...(19): siRNA sense strand
uaauaaacccaacggauga

SEQ ID NO: 1215795 - RNA, 19 nt, Homo sapiens
  misc_RNA (1)...(19): siRNA sense strand
uacagucaauuuccaauga

SEQ ID NO: 1215796 - RNA, 19 nt, Homo sapiens
  misc_RNA (1)...(19): siRNA sense strand
aauggaauauucucuguga

SEQ ID NO: 1215797 - RNA, 19 nt, Homo sapiens
  misc_RNA (1)...(19): siRNA sense strand
cagucacacuuggaaauua

SEQ ID NO: 1215798 - RNA, 19 nt, Homo sapiens
  misc_RNA (1)...(19): siRNA sense strand
cuaccaugcuaacaaauau

SEQ ID NO: 1215799 - RNA, 19 nt, Homo sapiens
  misc_RNA (1)...(19): siRNA sense strand
gaacagucacacuuggaaa

SEQ ID NO: 1215800 - RNA, 19 nt, Homo sapiens
  misc_RNA (1)...(19): siRNA sense strand
ugaagcaccugaucauugg

SEQ ID NO: 1215801 - RNA, 19 nt, Homo sapiens
  misc_RNA (1)...(19): siRNA sense strand
gaugggacguucuugucuu

SEQ ID NO: 1215802 - RNA, 19 nt, Homo sapiens
  misc_RNA (1)...(19): siRNA sense strand
gaacagucuaccaugauau

SEQ ID NO: 1215803 - RNA, 19 nt, Homo sapiens
  misc_RNA (1)...(19): siRNA sense strand
caagggaucaggagcaaug

SEQ ID NO: 1215804 - RNA, 19 nt, Homo sapiens
  misc_RNA (1)...(19): siRNA sense strand
agucacacuuggaaauuaa

SEQ ID NO: 1215805 - RNA, 19 nt, Homo sapiens
  misc_RNA (1)...(19): siRNA sense strand
guaauugguaggcaucaaa

SEQ ID NO: 1215806 - RNA, 19 nt, Homo sapiens
  misc_RNA (1)...(19): siRNA sense strand
ucauagacauaaagaaugg

SEQ ID NO: 1215807 - RNA, 19 nt, Homo sapiens
  misc_RNA (1)...(19): siRNA sense strand
gaauucucccucuguugua

SEQ ID NO: 1215808 - RNA, 19 nt, Homo sapiens
  misc_RNA (1)...(19): siRNA sense strand
uagcaaagccaaagaacug

SEQ ID NO: 1215809 - RNA, 19 nt, Homo sapiens
  misc_RNA (1)...(19): siRNA sense strand
gauuugaccuuuuacuuga

SEQ ID NO: 1215810 - RNA, 19 nt, Homo sapiens
  misc_RNA (1)...(19): siRNA sense strand
gagagaagaagguauaaaa

SEQ ID NO: 1215811 - RNA, 19 nt, Homo sapiens
  misc_RNA (1)...(19): siRNA sense strand
aaugagagaagaagguaua

SEQ ID NO: 1215812 - RNA, 19 nt, Homo sapiens
  misc_RNA (1)...(19): siRNA sense strand
cacaagaccacaaacuaaa

SEQ ID NO: 1215813 - RNA, 19 nt, Homo sapiens
  misc_RNA (1)...(19): siRNA sense strand
ggaauauucucugugaaaa

SEQ ID NO: 1215814 - RNA, 19 nt, Homo sapiens
  misc_RNA (1)...(19): siRNA sense strand
caaacuaaacaguaaaugg

SEQ ID NO: 1215815 - RNA, 19 nt, Homo sapiens
  misc_RNA (1)...(19): siRNA sense strand
cuaucaccauugcacuuua

SEQ ID NO: 1215816 - RNA, 19 nt, Homo sapiens
  misc_RNA (1)...(19): siRNA sense strand
caagucuuauuggcaguaa

SEQ ID NO: 1215817 - RNA, 19 nt, Homo sapiens
  misc_RNA (1)...(19): siRNA sense strand
aaacuugggaguggauaua

SEQ ID NO: 1215818 - RNA, 19 nt, Homo sapiens
  misc_RNA (1)...(19): siRNA sense strand
uaucaccauugcacuuuau

SEQ ID NO: 1215819 - RNA, 19 nt, Homo sapiens
  misc_RNA (1)...(19): siRNA sense strand
accacaaacuaaacaguaa

SEQ ID NO: 1215820 - RNA, 19 nt, Homo sapiens
  misc_RNA (1)...(19): siRNA sense strand
caacggaugagacacuguu

SEQ ID NO: 1215821 - RNA, 19 nt, Homo sapiens
  misc_RNA (1)...(19): siRNA sense strand
aagaauugcuuccaguuac

SEQ ID NO: 1215822 - RNA, 19 nt, Homo sapiens
  misc_RNA (1)...(19): siRNA sense strand
ucaccauugcacuuuauua

SEQ ID NO: 1215823 - RNA, 19 nt, Homo sapiens
  misc_RNA (1)...(19): siRNA sense strand
uggaauauucucugugaaa

SEQ ID NO: 1215824 - RNA, 19 nt, Homo sapiens
  misc_RNA (1)...(19): siRNA sense strand
gaaaaggaucccacucuga

SEQ ID NO: 1215825 - RNA, 19 nt, Homo sapiens
  misc_RNA (1)...(19): siRNA sense strand
cuagaaggcaaaccaauuc

SEQ ID NO: 1215826 - RNA, 19 nt, Homo sapiens
  misc_RNA (1)...(19): siRNA sense strand
ccacaaacuaaacaguaaa

SEQ ID NO: 1215827 - RNA, 19 nt, Homo sapiens
  misc_RNA (1)...(19): siRNA sense strand
ccugugaaguacuaaugaa

SEQ ID NO: 1215828 - RNA, 19 nt, Homo sapiens
  misc_RNA (1)...(19): siRNA sense strand
gcuaaagagcccuuaccaa

SEQ ID NO: 1215829 - RNA, 19 nt, Homo sapiens
  misc_RNA (1)...(19): siRNA sense strand
ggaauguaaccugaaucua

SEQ ID NO: 1215830 - RNA, 19 nt, Homo sapiens
  misc_RNA (1)...(19): siRNA sense strand
uaaauagcaaagccaaaga

SEQ ID NO: 1215831 - RNA, 19 nt, Homo sapiens
  misc_RNA (1)...(19): siRNA sense strand
gugaaguacuaaugaaugc

SEQ ID NO: 1215832 - RNA, 19 nt, Homo sapiens
  misc_RNA (1)...(19): siRNA sense strand
guacugaugggacguucuu

SEQ ID NO: 1215833 - RNA, 19 nt, Homo sapiens
  misc_RNA (1)...(19): siRNA sense strand
caccauugcacuuuauuau

SEQ ID NO: 1215834 - RNA, 19 nt, Homo sapiens
  misc_RNA (1)...(19): siRNA sense strand
gggacguucuugucuucuu

SEQ ID NO: 1215835 - RNA, 19 nt, Homo sapiens
  misc_RNA (1)...(19): siRNA sense strand
agacauaaagaauggaaga

SEQ ID NO: 1215836 - RNA, 19 nt, Homo sapiens
  misc_RNA (1)...(19): siRNA sense strand
uauaugaacagucacacuu

SEQ ID NO: 1215837 - RNA, 19 nt, Homo sapiens
  misc_RNA (1)...(19): siRNA sense strand
gccaaagaacugcaaacuu

SEQ ID NO: 1215838 - RNA, 19 nt, Homo sapiens
  misc_RNA (1)...(19): siRNA sense strand
ucugaccugugaaguacua

SEQ ID NO: 1215839 - RNA, 19 nt, Homo sapiens
  misc_RNA (1)...(19): siRNA sense strand
ucuagaaggcaaaccaauu

SEQ ID NO: 1215840 - RNA, 19 nt, Homo sapiens
  misc_RNA (1)...(19): siRNA sense strand
uagaacauguccacaagac

SEQ ID NO: 1215841 - RNA, 19 nt, Homo sapiens
  misc_RNA (1)...(19): siRNA sense strand
aaugaaugcuguugcuaca

SEQ ID NO: 1215842 - RNA, 19 nt, Homo sapiens
  misc_RNA (1)...(19): siRNA sense strand
caacugaaacuaccaugcu

SEQ ID NO: 1215843 - RNA, 19 nt, Homo sapiens
  misc_RNA (1)...(19): siRNA sense strand
uggaaauacgugacaaauu

SEQ ID NO: 1215844 - RNA, 19 nt, Homo sapiens
  misc_RNA (1)...(19): siRNA sense strand
gaaucuaaugagagaagaa

SEQ ID NO: 1215845 - RNA, 19 nt, Homo sapiens
  misc_RNA (1)...(19): siRNA sense strand
caagaccacaaacuaaaca

SEQ ID NO: 1215846 - RNA, 19 nt, Homo sapiens
  misc_RNA (1)...(19): siRNA sense strand
guacuaaugaaugcuguug

SEQ ID NO: 1215847 - RNA, 19 nt, Homo sapiens
  misc_RNA (1)...(19): siRNA sense strand
ugacuuucuuuacaaccaa

SEQ ID NO: 1215848 - RNA, 19 nt, Homo sapiens
  misc_RNA (1)...(19): siRNA sense strand
gauccaugaccauaugaau

SEQ ID NO: 1215849 - RNA, 19 nt, Homo sapiens
  misc_RNA (1)...(19): siRNA sense strand
cuaaugagagaagaaggua

SEQ ID NO: 1215850 - RNA, 19 nt, Homo sapiens
  misc_RNA (1)...(19): siRNA sense strand
cuuagaacauguccacaag

SEQ ID NO: 1215851 - RNA, 19 nt, Homo sapiens
  misc_RNA (1)...(19): siRNA sense strand
uugaagcaccugaucauug

SEQ ID NO: 1215852 - RNA, 19 nt, Homo sapiens
  misc_RNA (1)...(19): siRNA sense strand
ggaguggauauauggcaaa

SEQ ID NO: 1215853 - RNA, 19 nt, Homo sapiens
  misc_RNA (1)...(19): siRNA sense strand
gaaucuagaaggcaaacca

SEQ ID NO: 1215854 - RNA, 19 nt, Homo sapiens
  misc_RNA (1)...(19): siRNA sense strand
aaacuggcucggagaagaa

SEQ ID NO: 1215855 - RNA, 19 nt, Homo sapiens
  misc_RNA (1)...(19): siRNA sense strand
uuuacuugauggacaguuu

SEQ ID NO: 1215856 - RNA, 19 nt, Homo sapiens
  misc_RNA (1)...(19): siRNA sense strand
aaauagcaaagccaaagaa

SEQ ID NO: 1215857 - RNA, 19 nt, Homo sapiens
  misc_RNA (1)...(19): siRNA sense strand
gaccugugaaguacuaaug

SEQ ID NO: 1215858 - RNA, 19 nt, Homo sapiens
  misc_RNA (1)...(19): siRNA sense strand
uuacuugauggacaguuua

SEQ ID NO: 1215859 - RNA, 19 nt, Homo sapiens
  misc_RNA (1)...(19): siRNA sense strand
acuaccaugcuaacaaaua

SEQ ID NO: 1215860 - RNA, 19 nt, Homo sapiens
  misc_RNA (1)...(19): siRNA sense strand
aauacuuccuuucaugugu

SEQ ID NO: 1215861 - RNA, 19 nt, Homo sapiens
  misc_RNA (1)...(19): siRNA sense strand
agaauucucccucuguugu

SEQ ID NO: 1215862 - RNA, 19 nt, Homo sapiens
  misc_RNA (1)...(19): siRNA sense strand
aggcaaaccaauucuauuc

SEQ ID NO: 1215863 - RNA, 19 nt, Homo sapiens
  misc_RNA (1)...(19): siRNA sense strand
gcaaacuugggaguggaua

SEQ ID NO: 1215864 - RNA, 19 nt, Homo sapiens
  misc_RNA (1)...(19): siRNA sense strand
gaccauaugaaucuagaag

SEQ ID NO: 1215865 - RNA, 19 nt, Homo sapiens
  misc_RNA (1)...(19): siRNA sense strand
gauggacaguuuaaaaucu

SEQ ID NO: 1215866 - RNA, 19 nt, Homo sapiens
  misc_RNA (1)...(19): siRNA sense strand
aacugaaacuaccaugcua

SEQ ID NO: 1215867 - RNA, 19 nt, Homo sapiens
  misc_RNA (1)...(19): siRNA sense strand
cuggauccaugaccauaug

SEQ ID NO: 1215868 - RNA, 19 nt, Homo sapiens
  misc_RNA (1)...(19): siRNA sense strand
ugaacagucacacuuggaa

SEQ ID NO: 1215869 - RNA, 19 nt, Homo sapiens
  misc_RNA (1)...(19): siRNA sense strand
gcacuuuauuauguaguac

SEQ ID NO: 1215870 - RNA, 19 nt, Homo sapiens
  misc_RNA (1)...(19): siRNA sense strand
cagucaauuuccaaugaug

SEQ ID NO: 1215871 - RNA, 19 nt, Homo sapiens
  misc_RNA (1)...(19): siRNA sense strand
gacauaaagaauggaagaa

SEQ ID NO: 1215872 - RNA, 19 nt, Homo sapiens
  misc_RNA (1)...(19): siRNA sense strand
uacuuccuuucauguguua

SEQ ID NO: 1215873 - RNA, 19 nt, Homo sapiens
  misc_RNA (1)...(19): siRNA sense strand
auacuuccuuucauguguu

SEQ ID NO: 1215874 - RNA, 19 nt, Homo sapiens
  misc_RNA (1)...(19): siRNA sense strand
acagucaauuuccaaugau

SEQ ID NO: 1215875 - RNA, 19 nt, Homo sapiens
  misc_RNA (1)...(19): siRNA sense strand
caauuuccaaugaugucua

SEQ ID NO: 1215876 - RNA, 19 nt, Homo sapiens
  misc_RNA (1)...(19): siRNA sense strand
ggaaauacgugacaaauua

SEQ ID NO: 1215877 - RNA, 19 nt, Homo sapiens
  misc_RNA (1)...(19): siRNA sense strand
ccaaagaacugcaaacuug

SEQ ID NO: 1215878 - RNA, 19 nt, Homo sapiens
  misc_RNA (1)...(19): siRNA sense strand
gaauguaaccugaaucuaa

SEQ ID NO: 1215879 - RNA, 19 nt, Homo sapiens
  misc_RNA (1)...(19): siRNA sense strand
ggaacagucuaccaugaua

SEQ ID NO: 1215880 - RNA, 19 nt, Homo sapiens
  misc_RNA (1)...(19): siRNA sense strand
uagcauaccuuccuuagug

SEQ ID NO: 1215881 - RNA, 19 nt, Homo sapiens
  misc_RNA (1)...(19): siRNA sense strand
gcaaaccaauucuauucuu

SEQ ID NO: 1215882 - RNA, 19 nt, Homo sapiens
  misc_RNA (1)...(19): siRNA sense strand
gaggaacagucuaccauga

SEQ ID NO: 1215883 - RNA, 19 nt, Homo sapiens
  misc_RNA (1)...(19): siRNA sense strand
gauaaucacauucaccuaa

SEQ ID NO: 1215884 - RNA, 19 nt, Homo sapiens
  misc_RNA (1)...(19): siRNA sense strand
gaaacuaccaugcuaacaa

SEQ ID NO: 1215885 - RNA, 19 nt, Homo sapiens
  misc_RNA (1)...(19): siRNA sense strand
aaacuaccaugcuaacaaa

SEQ ID NO: 1215886 - RNA, 19 nt, Homo sapiens
  misc_RNA (1)...(19): siRNA sense strand
ggacguucuugucuucuuu

SEQ ID NO: 1215887 - RNA, 19 nt, Homo sapiens
  misc_RNA (1)...(19): siRNA sense strand
guucuugucuucuuugcua

SEQ ID NO: 1215888 - RNA, 19 nt, Homo sapiens
  misc_RNA (1)...(19): siRNA sense strand
ccacaagaccacaaacuaa

SEQ ID NO: 1215889 - RNA, 19 nt, Homo sapiens
  misc_RNA (1)...(19): siRNA sense strand
gaaggcaaaccaauucuau

SEQ ID NO: 1215890 - RNA, 19 nt, Homo sapiens
  misc_RNA (1)...(19): siRNA sense strand
ccauugcacuuuauuaugu

SEQ ID NO: 1215891 - RNA, 19 nt, Homo sapiens
  misc_RNA (1)...(19): siRNA sense strand
uaaccugaaucuaaugaga

SEQ ID NO: 1215892 - RNA, 19 nt, Homo sapiens
  misc_RNA (1)...(19): siRNA sense strand
gaccacaaacuaaacagua

SEQ ID NO: 1215893 - RNA, 19 nt, Homo sapiens
  misc_RNA (1)...(19): siRNA sense strand
gaucauugguugccauugg

SEQ ID NO: 1215894 - RNA, 19 nt, Homo sapiens
  misc_RNA (1)...(19): siRNA sense strand
uaauaaacccaacggauga

SEQ ID NO: 1215895 - RNA, 19 nt, Homo sapiens
  misc_RNA (1)...(19): siRNA sense strand
uacagucaauuuccaauga

SEQ ID NO: 1215896 - RNA, 19 nt, Homo sapiens
  misc_RNA (1)...(19): siRNA sense strand
aauggaauauucucuguga

SEQ ID NO: 1215897 - RNA, 19 nt, Homo sapiens
  misc_RNA (1)...(19): siRNA sense strand
cagucacacuuggaaauua

SEQ ID NO: 1215898 - RNA, 19 nt, Homo sapiens
  misc_RNA (1)...(19): siRNA sense strand
cuaccaugcuaacaaauau

SEQ ID NO: 1215899 - RNA, 19 nt, Homo sapiens
  misc_RNA (1)...(19): siRNA sense strand
gaacagucacacuuggaaa

SEQ ID NO: 1215900 - RNA, 19 nt, Homo sapiens
  misc_RNA (1)...(19): siRNA sense strand
ugaagcaccugaucauugg

SEQ ID NO: 1215901 - RNA, 19 nt, Homo sapiens
  misc_RNA (1)...(19): siRNA sense strand
gaugggacguucuugucuu

SEQ ID NO: 1215902 - RNA, 19 nt, Homo sapiens
  misc_RNA (1)...(19): siRNA sense strand
gaacagucuaccaugauau

SEQ ID NO: 1215903 - RNA, 19 nt, Homo sapiens
  misc_RNA (1)...(19): siRNA sense strand
caagggaucaggagcaaug

SEQ ID NO: 1215904 - RNA, 19 nt, Homo sapiens
  misc_RNA (1)...(19): siRNA sense strand
agucacacuuggaaauuaa

SEQ ID NO: 1215905 - RNA, 19 nt, Homo sapiens
  misc_RNA (1)...(19): siRNA sense strand
guaauugguaggcaucaaa

SEQ ID NO: 1215906 - RNA, 19 nt, Homo sapiens
  misc_RNA (1)...(19): siRNA sense strand
ucauagacauaaagaaugg

SEQ ID NO: 1215907 - RNA, 19 nt, Homo sapiens
  misc_RNA (1)...(19): siRNA sense strand
gaauucucccucuguugua

SEQ ID NO: 1215908 - RNA, 19 nt, Homo sapiens
  misc_RNA (1)...(19): siRNA sense strand
uagcaaagccaaagaacug

SEQ ID NO: 1215909 - RNA, 19 nt, Homo sapiens
  misc_RNA (1)...(19): siRNA sense strand
gauuugaccuuuuacuuga

SEQ ID NO: 1215910 - RNA, 19 nt, Homo sapiens
  misc_RNA (1)...(19): siRNA sense strand
gagagaagaagguauaaaa

SEQ ID NO: 1215911 - RNA, 19 nt, Homo sapiens
  misc_RNA (1)...(19): siRNA sense strand
aaugagagaagaagguaua

SEQ ID NO: 1215912 - RNA, 19 nt, Homo sapiens
  misc_RNA (1)...(19): siRNA sense strand
cacaagaccacaaacuaaa

SEQ ID NO: 1215913 - RNA, 19 nt, Homo sapiens
  misc_RNA (1)...(19): siRNA sense strand
ggaauauucucugugaaaa

SEQ ID NO: 1215914 - RNA, 19 nt, Homo sapiens
  misc_RNA (1)...(19): siRNA sense strand
caaacuaaacaguaaaugg

SEQ ID NO: 1215915 - RNA, 19 nt, Homo sapiens
  misc_RNA (1)...(19): siRNA sense strand
cuaucaccauugcacuuua

SEQ ID NO: 1215916 - RNA, 19 nt, Homo sapiens
  misc_RNA (1)...(19): siRNA sense strand
caagucuuauuggcaguaa

SEQ ID NO: 1215917 - RNA, 19 nt, Homo sapiens
  misc_RNA (1)...(19): siRNA sense strand
aaacuugggaguggauaua

SEQ ID NO: 1215918 - RNA, 19 nt, Homo sapiens
  misc_RNA (1)...(19): siRNA sense strand
uaucaccauugcacuuuau

SEQ ID NO: 1215919 - RNA, 19 nt, Homo sapiens
  misc_RNA (1)...(19): siRNA sense strand
accacaaacuaaacaguaa

SEQ ID NO: 1215920 - RNA, 19 nt, Homo sapiens
  misc_RNA (1)...(19): siRNA sense strand
caacggaugagacacuguu

SEQ ID NO: 1215921 - RNA, 19 nt, Homo sapiens
  misc_RNA (1)...(19): siRNA sense strand
aagaauugcuuccaguuac

SEQ ID NO: 1215922 - RNA, 19 nt, Homo sapiens
  misc_RNA (1)...(19): siRNA sense strand
ucaccauugcacuuuauua

SEQ ID NO: 1215923 - RNA, 19 nt, Homo sapiens
  misc_RNA (1)...(19): siRNA sense strand
uggaauauucucugugaaa

SEQ ID NO: 1215924 - RNA, 19 nt, Homo sapiens
  misc_RNA (1)...(19): siRNA sense strand
gaaaaggaucccacucuga

SEQ ID NO: 1215925 - RNA, 19 nt, Homo sapiens
  misc_RNA (1)...(19): siRNA sense strand
cuagaaggcaaaccaauuc

SEQ ID NO: 1215926 - RNA, 19 nt, Homo sapiens
  misc_RNA (1)...(19): siRNA sense strand
ccacaaacuaaacaguaaa

SEQ ID NO: 1215927 - RNA, 19 nt, Homo sapiens
  misc_RNA (1)...(19): siRNA sense strand
ccugugaaguacuaaugaa

SEQ ID NO: 1215928 - RNA, 19 nt, Homo sapiens
  misc_RNA (1)...(19): siRNA sense strand
gcuaaagagcccuuaccaa

SEQ ID NO: 1215929 - RNA, 19 nt, Homo sapiens
  misc_RNA (1)...(19): siRNA sense strand
ggaauguaaccugaaucua

SEQ ID NO: 1215930 - RNA, 19 nt, Homo sapiens
  misc_RNA (1)...(19): siRNA sense strand
uaaauagcaaagccaaaga

SEQ ID NO: 1215931 - RNA, 19 nt, Homo sapiens
  misc_RNA (1)...(19): siRNA sense strand
gugaaguacuaaugaaugc

SEQ ID NO: 1215932 - RNA, 19 nt, Homo sapiens
  misc_RNA (1)...(19): siRNA sense strand
guacugaugggacguucuu

SEQ ID NO: 1215933 - RNA, 19 nt, Homo sapiens
  misc_RNA (1)...(19): siRNA sense strand
caccauugcacuuuauuau

SEQ ID NO: 1215934 - RNA, 19 nt, Homo sapiens
  misc_RNA (1)...(19): siRNA sense strand
gggacguucuugucuucuu

SEQ ID NO: 1215935 - RNA, 19 nt, Homo sapiens
  misc_RNA (1)...(19): siRNA sense strand
agacauaaagaauggaaga

SEQ ID NO: 1215936 - RNA, 19 nt, Homo sapiens
  misc_RNA (1)...(19): siRNA sense strand
uauaugaacagucacacuu

SEQ ID NO: 1215937 - RNA, 19 nt, Homo sapiens
  misc_RNA (1)...(19): siRNA sense strand
gccaaagaacugcaaacuu

SEQ ID NO: 1215938 - RNA, 19 nt, Homo sapiens
  misc_RNA (1)...(19): siRNA sense strand
ucugaccugugaaguacua

SEQ ID NO: 1215939 - RNA, 19 nt, Homo sapiens
  misc_RNA (1)...(19): siRNA sense strand
ucuagaaggcaaaccaauu

SEQ ID NO: 1215940 - RNA, 19 nt, Homo sapiens
  misc_RNA (1)...(19): siRNA sense strand
uagaacauguccacaagac

SEQ ID NO: 1215941 - RNA, 19 nt, Homo sapiens
  misc_RNA (1)...(19): siRNA sense strand
aaugaaugcuguugcuaca

SEQ ID NO: 1215942 - RNA, 19 nt, Homo sapiens
  misc_RNA (1)...(19): siRNA sense strand
caacugaaacuaccaugcu

SEQ ID NO: 1215943 - RNA, 19 nt, Homo sapiens
  misc_RNA (1)...(19): siRNA sense strand
uggaaauacgugacaaauu

SEQ ID NO: 1215944 - RNA, 19 nt, Homo sapiens
  misc_RNA (1)...(19): siRNA sense strand
gaaucuaaugagagaagaa

SEQ ID NO: 1215945 - RNA, 19 nt, Homo sapiens
  misc_RNA (1)...(19): siRNA sense strand
caagaccacaaacuaaaca

SEQ ID NO: 1215946 - RNA, 19 nt, Homo sapiens
  misc_RNA (1)...(19): siRNA sense strand
guacuaaugaaugcuguug

SEQ ID NO: 1215947 - RNA, 19 nt, Homo sapiens
  misc_RNA (1)...(19): siRNA sense strand
ugacuuucuuuacaaccaa

SEQ ID NO: 1215948 - RNA, 19 nt, Homo sapiens
  misc_RNA (1)...(19): siRNA sense strand
gauccaugaccauaugaau

SEQ ID NO: 1215949 - RNA, 19 nt, Homo sapiens
  misc_RNA (1)...(19): siRNA sense strand
cuaaugagagaagaaggua

SEQ ID NO: 1215950 - RNA, 19 nt, Homo sapiens
  misc_RNA (1)...(19): siRNA sense strand
cuuagaacauguccacaag

SEQ ID NO: 1215951 - RNA, 19 nt, Homo sapiens
  misc_RNA (1)...(19): siRNA sense strand
uugaagcaccugaucauug

SEQ ID NO: 1215952 - RNA, 19 nt, Homo sapiens
  misc_RNA (1)...(19): siRNA sense strand
ggaguggauauauggcaaa

SEQ ID NO: 1215953 - RNA, 19 nt, Homo sapiens
  misc_RNA (1)...(19): siRNA sense strand
gaaucuagaaggcaaacca

SEQ ID NO: 1215954 - RNA, 19 nt, Homo sapiens
  misc_RNA (1)...(19): siRNA sense strand
aaacuggcucggagaagaa

SEQ ID NO: 1215955 - RNA, 19 nt, Homo sapiens
  misc_RNA (1)...(19): siRNA sense strand
uuuacuugauggacaguuu

SEQ ID NO: 1215956 - RNA, 19 nt, Homo sapiens
  misc_RNA (1)...(19): siRNA sense strand
aaauagcaaagccaaagaa

SEQ ID NO: 1215957 - RNA, 19 nt, Homo sapiens
  misc_RNA (1)...(19): siRNA sense strand
gaccugugaaguacuaaug

SEQ ID NO: 1215958 - RNA, 19 nt, Homo sapiens
  misc_RNA (1)...(19): siRNA sense strand
uuacuugauggacaguuua

SEQ ID NO: 1215959 - RNA, 19 nt, Homo sapiens
  misc_RNA (1)...(19): siRNA sense strand
acuaccaugcuaacaaaua

SEQ ID NO: 1215960 - RNA, 19 nt, Homo sapiens
  misc_RNA (1)...(19): siRNA sense strand
aauacuuccuuucaugugu

SEQ ID NO: 1215961 - RNA, 19 nt, Homo sapiens
  misc_RNA (1)...(19): siRNA sense strand
agaauucucccucuguugu

SEQ ID NO: 1215962 - RNA, 19 nt, Homo sapiens
  misc_RNA (1)...(19): siRNA sense strand
aggcaaaccaauucuauuc

SEQ ID NO: 1215963 - RNA, 19 nt, Homo sapiens
  misc_RNA (1)...(19): siRNA sense strand
gcaaacuugggaguggaua

SEQ ID NO: 1215964 - RNA, 19 nt, Homo sapiens
  misc_RNA (1)...(19): siRNA sense strand
gaccauaugaaucuagaag

SEQ ID NO: 1215965 - RNA, 19 nt, Homo sapiens
  misc_RNA (1)...(19): siRNA sense strand
gauggacaguuuaaaaucu

SEQ ID NO: 1215966 - RNA, 19 nt, Homo sapiens
  misc_RNA (1)...(19): siRNA sense strand
aacugaaacuaccaugcua

SEQ ID NO: 1215967 - RNA, 19 nt, Homo sapiens
  misc_RNA (1)...(19): siRNA sense strand
cuggauccaugaccauaug

SEQ ID NO: 1215968 - RNA, 19 nt, Homo sapiens
  misc_RNA (1)...(19): siRNA sense strand
ugaacagucacacuuggaa

SEQ ID NO: 1215969 - RNA, 19 nt, Homo sapiens
  misc_RNA (1)...(19): siRNA sense strand
gcacuuuauuauguaguac

SEQ ID NO: 1215970 - RNA, 19 nt, Homo sapiens
  misc_RNA (1)...(19): siRNA sense strand
cagucaauuuccaaugaug

SEQ ID NO: 1215971 - RNA, 19 nt, Homo sapiens
  misc_RNA (1)...(19): siRNA sense strand
gacauaaagaauggaagaa

SEQ ID NO: 1215972 - RNA, 19 nt, Homo sapiens
  misc_RNA (1)...(19): siRNA sense strand
uacuuccuuucauguguua

SEQ ID NO: 1215973 - RNA, 19 nt, Homo sapiens
  misc_RNA (1)...(19): siRNA sense strand
auacuuccuuucauguguu

SEQ ID NO: 1215974 - RNA, 19 nt, Homo sapiens
  misc_RNA (1)...(19): siRNA sense strand
acagucaauuuccaaugau

SEQ ID NO: 1215975 - RNA, 19 nt, Homo sapiens
  misc_RNA (1)...(19): siRNA sense strand
caauuuccaaugaugucua

SEQ ID NO: 1215976 - RNA, 19 nt, Homo sapiens
  misc_RNA (1)...(19): siRNA sense strand
ggaaauacgugacaaauua

SEQ ID NO: 1215977 - RNA, 19 nt, Homo sapiens
  misc_RNA (1)...(19): siRNA sense strand
ccaaagaacugcaaacuug

SEQ ID NO: 1215978 - RNA, 19 nt, Homo sapiens
  misc_RNA (1)...(19): siRNA sense strand
gaauguaaccugaaucuaa

SEQ ID NO: 1215979 - RNA, 19 nt, Homo sapiens
  misc_RNA (1)...(19): siRNA sense strand
ggaacagucuaccaugaua

SEQ ID NO: 1215980 - RNA, 19 nt, Homo sapiens
  misc_RNA (1)...(19): siRNA sense strand
uagcauaccuuccuuagug

SEQ ID NO: 1215981 - RNA, 19 nt, Homo sapiens
  misc_RNA (1)...(19): siRNA sense strand
gcaaaccaauucuauucuu

SEQ ID NO: 1215982 - RNA, 19 nt, Homo sapiens
  misc_RNA (1)...(19): siRNA sense strand
gaggaacagucuaccauga

SEQ ID NO: 1215983 - RNA, 19 nt, Homo sapiens
  misc_RNA (1)...(19): siRNA sense strand
gauaaucacauucaccuaa

SEQ ID NO: 1215984 - RNA, 19 nt, Homo sapiens
  misc_RNA (1)...(19): siRNA sense strand
gaaacuaccaugcuaacaa

SEQ ID NO: 1215985 - RNA, 19 nt, Homo sapiens
  misc_RNA (1)...(19): siRNA sense strand
aaacuaccaugcuaacaaa

SEQ ID NO: 1215986 - RNA, 19 nt, Homo sapiens
  misc_RNA (1)...(19): siRNA sense strand
ggacguucuugucuucuuu

SEQ ID NO: 1215987 - RNA, 19 nt, Homo sapiens
  misc_RNA (1)...(19): siRNA sense strand
guucuugucuucuuugcua

SEQ ID NO: 1215988 - RNA, 19 nt, Homo sapiens
  misc_RNA (1)...(19): siRNA sense strand
ccacaagaccacaaacuaa

SEQ ID NO: 1215989 - RNA, 19 nt, Homo sapiens
  misc_RNA (1)...(19): siRNA sense strand
gaaggcaaaccaauucuau

SEQ ID NO: 1215990 - RNA, 19 nt, Homo sapiens
  misc_RNA (1)...(19): siRNA sense strand
ccauugcacuuuauuaugu

SEQ ID NO: 1215991 - RNA, 19 nt, Homo sapiens
  misc_RNA (1)...(19): siRNA sense strand
uaaccugaaucuaaugaga

SEQ ID NO: 1215992 - RNA, 19 nt, Homo sapiens
  misc_RNA (1)...(19): siRNA sense strand
gaccacaaacuaaacagua

SEQ ID NO: 1215993 - RNA, 19 nt, Homo sapiens
  misc_RNA (1)...(19): siRNA sense strand
gaucauugguugccauugg

SEQ ID NO: 1215994 - RNA, 19 nt, Homo sapiens
  misc_RNA (1)...(19): siRNA sense strand
uaauaaacccaacggauga

SEQ ID NO: 1215995 - RNA, 19 nt, Homo sapiens
  misc_RNA (1)...(19): siRNA sense strand
uacagucaauuuccaauga

SEQ ID NO: 1215996 - RNA, 19 nt, Homo sapiens
  misc_RNA (1)...(19): siRNA sense strand
aauggaauauucucuguga

SEQ ID NO: 1215997 - RNA, 19 nt, Homo sapiens
  misc_RNA (1)...(19): siRNA sense strand
cagucacacuuggaaauua

SEQ ID NO: 1215998 - RNA, 19 nt, Homo sapiens
  misc_RNA (1)...(19): siRNA sense strand
cuaccaugcuaacaaauau

SEQ ID NO: 1215999 - RNA, 19 nt, Homo sapiens
  misc_RNA (1)...(19): siRNA sense strand
gaacagucacacuuggaaa

SEQ ID NO: 1216000 - RNA, 19 nt, Homo sapiens
  misc_RNA (1)...(19): siRNA sense strand
ugaagcaccugaucauugg

SEQ ID NO: 1216001 - RNA, 19 nt, Homo sapiens
  misc_RNA (1)...(19): siRNA sense strand
gaugggacguucuugucuu

SEQ ID NO: 1216002 - RNA, 19 nt, Homo sapiens
  misc_RNA (1)...(19): siRNA sense strand
gaacagucuaccaugauau

SEQ ID NO: 1216003 - RNA, 19 nt, Homo sapiens
  misc_RNA (1)...(19): siRNA sense strand
caagggaucaggagcaaug

SEQ ID NO: 1216004 - RNA, 19 nt, Homo sapiens
  misc_RNA (1)...(19): siRNA sense strand
agucacacuuggaaauuaa

SEQ ID NO: 1216005 - RNA, 19 nt, Homo sapiens
  misc_RNA (1)...(19): siRNA sense strand
guaauugguaggcaucaaa

SEQ ID NO: 1216006 - RNA, 19 nt, Homo sapiens
  misc_RNA (1)...(19): siRNA sense strand
ucauagacauaaagaaugg

SEQ ID NO: 1216007 - RNA, 19 nt, Homo sapiens
  misc_RNA (1)...(19): siRNA sense strand
gaauucucccucuguugua

SEQ ID NO: 1216008 - RNA, 19 nt, Homo sapiens
  misc_RNA (1)...(19): siRNA sense strand
uagcaaagccaaagaacug

SEQ ID NO: 1216009 - RNA, 19 nt, Homo sapiens
  misc_RNA (1)...(19): siRNA sense strand
gauuugaccuuuuacuuga

SEQ ID NO: 1216010 - RNA, 19 nt, Homo sapiens
  misc_RNA (1)...(19): siRNA sense strand
gagagaagaagguauaaaa

SEQ ID NO: 1216011 - RNA, 19 nt, Homo sapiens
  misc_RNA (1)...(19): siRNA sense strand
aaugagagaagaagguaua

SEQ ID NO: 1216012 - RNA, 19 nt, Homo sapiens
  misc_RNA (1)...(19): siRNA sense strand
cacaagaccacaaacuaaa

SEQ ID NO: 1216013 - RNA, 19 nt, Homo sapiens
  misc_RNA (1)...(19): siRNA sense strand
ggaauauucucugugaaaa

SEQ ID NO: 1216014 - RNA, 19 nt, Homo sapiens
  misc_RNA (1)...(19): siRNA sense strand
caaacuaaacaguaaaugg

SEQ ID NO: 1216015 - RNA, 19 nt, Homo sapiens
  misc_RNA (1)...(19): siRNA sense strand
cuaucaccauugcacuuua

SEQ ID NO: 1216016 - RNA, 19 nt, Homo sapiens
  misc_RNA (1)...(19): siRNA sense strand
caagucuuauuggcaguaa

SEQ ID NO: 1216017 - RNA, 19 nt, Homo sapiens
  misc_RNA (1)...(19): siRNA sense strand
aaacuugggaguggauaua

SEQ ID NO: 1216018 - RNA, 19 nt, Homo sapiens
  misc_RNA (1)...(19): siRNA sense strand
uaucaccauugcacuuuau

SEQ ID NO: 1216019 - RNA, 19 nt, Homo sapiens
  misc_RNA (1)...(19): siRNA sense strand
accacaaacuaaacaguaa

SEQ ID NO: 1216020 - RNA, 19 nt, Homo sapiens
  misc_RNA (1)...(19): siRNA sense strand
caacggaugagacacuguu

SEQ ID NO: 1216021 - RNA, 19 nt, Homo sapiens
  misc_RNA (1)...(19): siRNA sense strand
aagaauugcuuccaguuac

SEQ ID NO: 1216022 - RNA, 19 nt, Homo sapiens
  misc_RNA (1)...(19): siRNA sense strand
ucaccauugcacuuuauua

SEQ ID NO: 1216023 - RNA, 19 nt, Homo sapiens
  misc_RNA (1)...(19): siRNA sense strand
uggaauauucucugugaaa

SEQ ID NO: 1216024 - RNA, 19 nt, Homo sapiens
  misc_RNA (1)...(19): siRNA sense strand
gaaaaggaucccacucuga

SEQ ID NO: 1216025 - RNA, 19 nt, Homo sapiens
  misc_RNA (1)...(19): siRNA sense strand
cuagaaggcaaaccaauuc

SEQ ID NO: 1216026 - RNA, 19 nt, Homo sapiens
  misc_RNA (1)...(19): siRNA sense strand
ccacaaacuaaacaguaaa

SEQ ID NO: 1216027 - RNA, 19 nt, Homo sapiens
  misc_RNA (1)...(19): siRNA sense strand
ccugugaaguacuaaugaa

SEQ ID NO: 1216028 - RNA, 19 nt, Homo sapiens
  misc_RNA (1)...(19): siRNA sense strand
gcuaaagagcccuuaccaa

SEQ ID NO: 1216029 - RNA, 19 nt, Homo sapiens
  misc_RNA (1)...(19): siRNA sense strand
ggaauguaaccugaaucua

SEQ ID NO: 1216030 - RNA, 19 nt, Homo sapiens
  misc_RNA (1)...(19): siRNA sense strand
uaaauagcaaagccaaaga

SEQ ID NO: 1216031 - RNA, 19 nt, Homo sapiens
  misc_RNA (1)...(19): siRNA sense strand
gugaaguacuaaugaaugc

SEQ ID NO: 1216032 - RNA, 19 nt, Homo sapiens
  misc_RNA (1)...(19): siRNA sense strand
guacugaugggacguucuu

SEQ ID NO: 1216033 - RNA, 19 nt, Homo sapiens
  misc_RNA (1)...(19): siRNA sense strand
caccauugcacuuuauuau

SEQ ID NO: 1216034 - RNA, 19 nt, Homo sapiens
  misc_RNA (1)...(19): siRNA sense strand
gggacguucuugucuucuu

SEQ ID NO: 1216035 - RNA, 19 nt, Homo sapiens
  misc_RNA (1)...(19): siRNA sense strand
agacauaaagaauggaaga

SEQ ID NO: 1216036 - RNA, 19 nt, Homo sapiens
  misc_RNA (1)...(19): siRNA sense strand
uauaugaacagucacacuu

SEQ ID NO: 1216037 - RNA, 19 nt, Homo sapiens
  misc_RNA (1)...(19): siRNA sense strand
gccaaagaacugcaaacuu

SEQ ID NO: 1216038 - RNA, 19 nt, Homo sapiens
  misc_RNA (1)...(19): siRNA sense strand
ucugaccugugaaguacua

SEQ ID NO: 1216039 - RNA, 19 nt, Homo sapiens
  misc_RNA (1)...(19): siRNA sense strand
ucuagaaggcaaaccaauu

SEQ ID NO: 1216040 - RNA, 19 nt, Homo sapiens
  misc_RNA (1)...(19): siRNA sense strand
uagaacauguccacaagac

SEQ ID NO: 1216041 - RNA, 19 nt, Homo sapiens
  misc_RNA (1)...(19): siRNA sense strand
aaugaaugcuguugcuaca

SEQ ID NO: 1216042 - RNA, 19 nt, Homo sapiens
  misc_RNA (1)...(19): siRNA sense strand
caacugaaacuaccaugcu

SEQ ID NO: 1216043 - RNA, 19 nt, Homo sapiens
  misc_RNA (1)...(19): siRNA sense strand
uggaaauacgugacaaauu

SEQ ID NO: 1216044 - RNA, 19 nt, Homo sapiens
  misc_RNA (1)...(19): siRNA sense strand
gaaucuaaugagagaagaa

SEQ ID NO: 1216045 - RNA, 19 nt, Homo sapiens
  misc_RNA (1)...(19): siRNA sense strand
caagaccacaaacuaaaca

SEQ ID NO: 1216046 - RNA, 19 nt, Homo sapiens
  misc_RNA (1)...(19): siRNA sense strand
guacuaaugaaugcuguug

SEQ ID NO: 1216047 - RNA, 19 nt, Homo sapiens
  misc_RNA (1)...(19): siRNA sense strand
ugacuuucuuuacaaccaa

SEQ ID NO: 1216048 - RNA, 19 nt, Homo sapiens
  misc_RNA (1)...(19): siRNA sense strand
gauccaugaccauaugaau

SEQ ID NO: 1216049 - RNA, 19 nt, Homo sapiens
  misc_RNA (1)...(19): siRNA sense strand
cuaaugagagaagaaggua

SEQ ID NO: 1216050 - RNA, 19 nt, Homo sapiens
  misc_RNA (1)...(19): siRNA sense strand
cuuagaacauguccacaag

SEQ ID NO: 1216051 - RNA, 19 nt, Homo sapiens
  misc_RNA (1)...(19): siRNA sense strand
uugaagcaccugaucauug

SEQ ID NO: 1216052 - RNA, 19 nt, Homo sapiens
  misc_RNA (1)...(19): siRNA sense strand
ggaguggauauauggcaaa

SEQ ID NO: 1216053 - RNA, 19 nt, Homo sapiens
  misc_RNA (1)...(19): siRNA sense strand
gaaucuagaaggcaaacca

SEQ ID NO: 1216054 - RNA, 19 nt, Homo sapiens
  misc_RNA (1)...(19): siRNA sense strand
aaacuggcucggagaagaa

SEQ ID NO: 1216055 - RNA, 19 nt, Homo sapiens
  misc_RNA (1)...(19): siRNA sense strand
uuuacuugauggacaguuu

SEQ ID NO: 1216056 - RNA, 19 nt, Homo sapiens
  misc_RNA (1)...(19): siRNA sense strand
aaauagcaaagccaaagaa

SEQ ID NO: 1216057 - RNA, 19 nt, Homo sapiens
  misc_RNA (1)...(19): siRNA sense strand
gaccugugaaguacuaaug

SEQ ID NO: 1216058 - RNA, 19 nt, Homo sapiens
  misc_RNA (1)...(19): siRNA sense strand
uuacuugauggacaguuua

SEQ ID NO: 1216059 - RNA, 19 nt, Homo sapiens
  misc_RNA (1)...(19): siRNA sense strand
acuaccaugcuaacaaaua

SEQ ID NO: 1216060 - RNA, 19 nt, Homo sapiens
  misc_RNA (1)...(19): siRNA sense strand
aauacuuccuuucaugugu

SEQ ID NO: 1216061 - RNA, 19 nt, Homo sapiens
  misc_RNA (1)...(19): siRNA sense strand
agaauucucccucuguugu

SEQ ID NO: 1216062 - RNA, 19 nt, Homo sapiens
  misc_RNA (1)...(19): siRNA sense strand
aggcaaaccaauucuauuc

SEQ ID NO: 1216063 - RNA, 19 nt, Homo sapiens
  misc_RNA (1)...(19): siRNA sense strand
gcaaacuugggaguggaua

SEQ ID NO: 1216064 - RNA, 19 nt, Homo sapiens
  misc_RNA (1)...(19): siRNA sense strand
gaccauaugaaucuagaag

SEQ ID NO: 1216065 - RNA, 19 nt, Homo sapiens
  misc_RNA (1)...(19): siRNA sense strand
gauggacaguuuaaaaucu

SEQ ID NO: 1216066 - RNA, 19 nt, Homo sapiens
  misc_RNA (1)...(19): siRNA sense strand
aacugaaacuaccaugcua

SEQ ID NO: 1216067 - RNA, 19 nt, Homo sapiens
  misc_RNA (1)...(19): siRNA sense strand
cuggauccaugaccauaug

SEQ ID NO: 1216068 - RNA, 19 nt, Homo sapiens
  misc_RNA (1)...(19): siRNA sense strand
ugaacagucacacuuggaa

SEQ ID NO: 1216069 - RNA, 19 nt, Homo sapiens
  misc_RNA (1)...(19): siRNA sense strand
gcacuuuauuauguaguac

SEQ ID NO: 1216070 - RNA, 19 nt, Homo sapiens
  misc_RNA (1)...(19): siRNA sense strand
cagucaauuuccaaugaug

SEQ ID NO: 1216071 - RNA, 19 nt, Homo sapiens
  misc_RNA (1)...(19): siRNA sense strand
gacauaaagaauggaagaa

SEQ ID NO: 1216072 - RNA, 19 nt, Homo sapiens
  misc_RNA (1)...(19): siRNA sense strand
uacuuccuuucauguguua

SEQ ID NO: 1216073 - RNA, 19 nt, Homo sapiens
  misc_RNA (1)...(19): siRNA sense strand
auacuuccuuucauguguu

SEQ ID NO: 1216074 - RNA, 19 nt, Homo sapiens
  misc_RNA (1)...(19): siRNA sense strand
acagucaauuuccaaugau

SEQ ID NO: 1216075 - RNA, 19 nt, Homo sapiens
  misc_RNA (1)...(19): siRNA sense strand
caauuuccaaugaugucua

SEQ ID NO: 1216076 - RNA, 19 nt, Homo sapiens
  misc_RNA (1)...(19): siRNA sense strand
ggaaauacgugacaaauua

SEQ ID NO: 1216077 - RNA, 19 nt, Homo sapiens
  misc_RNA (1)...(19): siRNA sense strand
ccaaagaacugcaaacuug

SEQ ID NO: 1216078 - RNA, 19 nt, Homo sapiens
  misc_RNA (1)...(19): siRNA sense strand
gaauguaaccugaaucuaa

SEQ ID NO: 1216079 - RNA, 19 nt, Homo sapiens
  misc_RNA (1)...(19): siRNA sense strand
ggaacagucuaccaugaua

SEQ ID NO: 1216080 - RNA, 19 nt, Homo sapiens
  misc_RNA (1)...(19): siRNA sense strand
uagcauaccuuccuuagug

SEQ ID NO: 1216081 - RNA, 19 nt, Homo sapiens
  misc_RNA (1)...(19): siRNA sense strand
gcaaaccaauucuauucuu

SEQ ID NO: 1216082 - RNA, 19 nt, Homo sapiens
  misc_RNA (1)...(19): siRNA sense strand
gaggaacagucuaccauga

SEQ ID NO: 1216083 - RNA, 19 nt, Homo sapiens
  misc_RNA (1)...(19): siRNA sense strand
gauaaucacauucaccuaa

SEQ ID NO: 1216084 - RNA, 19 nt, Homo sapiens
  misc_RNA (1)...(19): siRNA sense strand
gaaacuaccaugcuaacaa

SEQ ID NO: 1216085 - RNA, 19 nt, Homo sapiens
  misc_RNA (1)...(19): siRNA sense strand
aaacuaccaugcuaacaaa

SEQ ID NO: 1216086 - RNA, 19 nt, Homo sapiens
  misc_RNA (1)...(19): siRNA sense strand
ggacguucuugucuucuuu

SEQ ID NO: 1216087 - RNA, 19 nt, Homo sapiens
  misc_RNA (1)...(19): siRNA sense strand
guucuugucuucuuugcua

SEQ ID NO: 1216088 - RNA, 19 nt, Homo sapiens
  misc_RNA (1)...(19): siRNA sense strand
ccacaagaccacaaacuaa

SEQ ID NO: 1216089 - RNA, 19 nt, Homo sapiens
  misc_RNA (1)...(19): siRNA sense strand
gaaggcaaaccaauucuau

SEQ ID NO: 1216090 - RNA, 19 nt, Homo sapiens
  misc_RNA (1)...(19): siRNA sense strand
ccauugcacuuuauuaugu

SEQ ID NO: 1216091 - RNA, 19 nt, Homo sapiens
  misc_RNA (1)...(19): siRNA sense strand
uaaccugaaucuaaugaga

SEQ ID NO: 1216092 - RNA, 19 nt, Homo sapiens
  misc_RNA (1)...(19): siRNA sense strand
gaccacaaacuaaacagua

SEQ ID NO: 1216093 - RNA, 19 nt, Homo sapiens
  misc_RNA (1)...(19): siRNA sense strand
gaucauugguugccauugg

SEQ ID NO: 1216094 - RNA, 19 nt, Homo sapiens
  misc_RNA (1)...(19): siRNA sense strand
uaauaaacccaacggauga

SEQ ID NO: 1216095 - RNA, 19 nt, Homo sapiens
  misc_RNA (1)...(19): siRNA sense strand
uacagucaauuuccaauga

SEQ ID NO: 1216096 - RNA, 19 nt, Homo sapiens
  misc_RNA (1)...(19): siRNA sense strand
aauggaauauucucuguga

SEQ ID NO: 1216097 - RNA, 19 nt, Homo sapiens
  misc_RNA (1)...(19): siRNA sense strand
cagucacacuuggaaauua

SEQ ID NO: 1216098 - RNA, 19 nt, Homo sapiens
  misc_RNA (1)...(19): siRNA sense strand
cuaccaugcuaacaaauau

SEQ ID NO: 1216099 - RNA, 19 nt, Homo sapiens
  misc_RNA (1)...(19): siRNA sense strand
gaacagucacacuuggaaa

SEQ ID NO: 1216100 - RNA, 19 nt, Homo sapiens
  misc_RNA (1)...(19): siRNA sense strand
ugaagcaccugaucauugg

SEQ ID NO: 1216101 - RNA, 19 nt, Homo sapiens
  misc_RNA (1)...(19): siRNA sense strand
gaugggacguucuugucuu

SEQ ID NO: 1216102 - RNA, 19 nt, Homo sapiens
  misc_RNA (1)...(19): siRNA sense strand
gaacagucuaccaugauau

SEQ ID NO: 1216103 - RNA, 19 nt, Homo sapiens
  misc_RNA (1)...(19): siRNA sense strand
caagggaucaggagcaaug

SEQ ID NO: 1216104 - RNA, 19 nt, Homo sapiens
  misc_RNA (1)...(19): siRNA sense strand
agucacacuuggaaauuaa

SEQ ID NO: 1216105 - RNA, 19 nt, Homo sapiens
  misc_RNA (1)...(19): siRNA sense strand
guaauugguaggcaucaaa

SEQ ID NO: 1216106 - RNA, 19 nt, Homo sapiens
  misc_RNA (1)...(19): siRNA sense strand
ucauagacauaaagaaugg

SEQ ID NO: 1216107 - RNA, 19 nt, Homo sapiens
  misc_RNA (1)...(19): siRNA sense strand
gaauucucccucuguugua

SEQ ID NO: 1216108 - RNA, 19 nt, Homo sapiens
  misc_RNA (1)...(19): siRNA sense strand
uagcaaagccaaagaacug

SEQ ID NO: 1216109 - RNA, 19 nt, Homo sapiens
  misc_RNA (1)...(19): siRNA sense strand
gauuugaccuuuuacuuga

SEQ ID NO: 1216110 - RNA, 19 nt, Homo sapiens
  misc_RNA (1)...(19): siRNA sense strand
gagagaagaagguauaaaa

SEQ ID NO: 1216111 - RNA, 19 nt, Homo sapiens
  misc_RNA (1)...(19): siRNA sense strand
aaugagagaagaagguaua

SEQ ID NO: 1216112 - RNA, 19 nt, Homo sapiens
  misc_RNA (1)...(19): siRNA sense strand
cacaagaccacaaacuaaa

SEQ ID NO: 1216113 - RNA, 19 nt, Homo sapiens
  misc_RNA (1)...(19): siRNA sense strand
ggaauauucucugugaaaa

SEQ ID NO: 1216114 - RNA, 19 nt, Homo sapiens
  misc_RNA (1)...(19): siRNA sense strand
caaacuaaacaguaaaugg

SEQ ID NO: 1216115 - RNA, 19 nt, Homo sapiens
  misc_RNA (1)...(19): siRNA sense strand
cuaucaccauugcacuuua

SEQ ID NO: 1216116 - RNA, 19 nt, Homo sapiens
  misc_RNA (1)...(19): siRNA sense strand
caagucuuauuggcaguaa

SEQ ID NO: 1216117 - RNA, 19 nt, Homo sapiens
  misc_RNA (1)...(19): siRNA sense strand
aaacuugggaguggauaua

SEQ ID NO: 1216118 - RNA, 19 nt, Homo sapiens
  misc_RNA (1)...(19): siRNA sense strand
uaucaccauugcacuuuau

SEQ ID NO: 1216119 - RNA, 19 nt, Homo sapiens
  misc_RNA (1)...(19): siRNA sense strand
accacaaacuaaacaguaa

SEQ ID NO: 1216120 - RNA, 19 nt, Homo sapiens
  misc_RNA (1)...(19): siRNA sense strand
caacggaugagacacuguu

SEQ ID NO: 1216121 - RNA, 19 nt, Homo sapiens
  misc_RNA (1)...(19): siRNA sense strand
aagaauugcuuccaguuac

SEQ ID NO: 1216122 - RNA, 19 nt, Homo sapiens
  misc_RNA (1)...(19): siRNA sense strand
ucaccauugcacuuuauua

SEQ ID NO: 1216123 - RNA, 19 nt, Homo sapiens
  misc_RNA (1)...(19): siRNA sense strand
uggaauauucucugugaaa

SEQ ID NO: 1216124 - RNA, 19 nt, Homo sapiens
  misc_RNA (1)...(19): siRNA sense strand
gaaaaggaucccacucuga

SEQ ID NO: 1216125 - RNA, 19 nt, Homo sapiens
  misc_RNA (1)...(19): siRNA sense strand
cuagaaggcaaaccaauuc

SEQ ID NO: 1216126 - RNA, 19 nt, Homo sapiens
  misc_RNA (1)...(19): siRNA sense strand
ccacaaacuaaacaguaaa

SEQ ID NO: 1216127 - RNA, 19 nt, Homo sapiens
  misc_RNA (1)...(19): siRNA sense strand
ccugugaaguacuaaugaa

SEQ ID NO: 1216128 - RNA, 19 nt, Homo sapiens
  misc_RNA (1)...(19): siRNA sense strand
gcuaaagagcccuuaccaa

SEQ ID NO: 1216129 - RNA, 19 nt, Homo sapiens
  misc_RNA (1)...(19): siRNA sense strand
ggaauguaaccugaaucua

SEQ ID NO: 1216130 - RNA, 19 nt, Homo sapiens
  misc_RNA (1)...(19): siRNA sense strand
uaaauagcaaagccaaaga

SEQ ID NO: 1216131 - RNA, 19 nt, Homo sapiens
  misc_RNA (1)...(19): siRNA sense strand
gugaaguacuaaugaaugc

SEQ ID NO: 1216132 - RNA, 19 nt, Homo sapiens
  misc_RNA (1)...(19): siRNA sense strand
guacugaugggacguucuu

SEQ ID NO: 1216133 - RNA, 19 nt, Homo sapiens
  misc_RNA (1)...(19): siRNA sense strand
caccauugcacuuuauuau

SEQ ID NO: 1216134 - RNA, 19 nt, Homo sapiens
  misc_RNA (1)...(19): siRNA sense strand
gggacguucuugucuucuu

SEQ ID NO: 1216135 - RNA, 19 nt, Homo sapiens
  misc_RNA (1)...(19): siRNA sense strand
agacauaaagaauggaaga

SEQ ID NO: 1216136 - RNA, 19 nt, Homo sapiens
  misc_RNA (1)...(19): siRNA sense strand
uauaugaacagucacacuu

SEQ ID NO: 1216137 - RNA, 19 nt, Homo sapiens
  misc_RNA (1)...(19): siRNA sense strand
gccaaagaacugcaaacuu

SEQ ID NO: 1216138 - RNA, 19 nt, Homo sapiens
  misc_RNA (1)...(19): siRNA sense strand
ucugaccugugaaguacua

SEQ ID NO: 1216139 - RNA, 19 nt, Homo sapiens
  misc_RNA (1)...(19): siRNA sense strand
ucuagaaggcaaaccaauu

SEQ ID NO: 1216140 - RNA, 19 nt, Homo sapiens
  misc_RNA (1)...(19): siRNA sense strand
uagaacauguccacaagac

SEQ ID NO: 1216141 - RNA, 19 nt, Homo sapiens
  misc_RNA (1)...(19): siRNA sense strand
aaugaaugcuguugcuaca

SEQ ID NO: 1216142 - RNA, 19 nt, Homo sapiens
  misc_RNA (1)...(19): siRNA sense strand
caacugaaacuaccaugcu

SEQ ID NO: 1216143 - RNA, 19 nt, Homo sapiens
  misc_RNA (1)...(19): siRNA sense strand
uggaaauacgugacaaauu

SEQ ID NO: 1216144 - RNA, 19 nt, Homo sapiens
  misc_RNA (1)...(19): siRNA sense strand
gaaucuaaugagagaagaa

SEQ ID NO: 1216145 - RNA, 19 nt, Homo sapiens
  misc_RNA (1)...(19): siRNA sense strand
caagaccacaaacuaaaca

SEQ ID NO: 1216146 - RNA, 19 nt, Homo sapiens
  misc_RNA (1)...(19): siRNA sense strand
guacuaaugaaugcuguug

SEQ ID NO: 1216147 - RNA, 19 nt, Homo sapiens
  misc_RNA (1)...(19): siRNA sense strand
ugacuuucuuuacaaccaa

SEQ ID NO: 1216148 - RNA, 19 nt, Homo sapiens
  misc_RNA (1)...(19): siRNA sense strand
gauccaugaccauaugaau

SEQ ID NO: 1216149 - RNA, 19 nt, Homo sapiens
  misc_RNA (1)...(19): siRNA sense strand
cuaaugagagaagaaggua

SEQ ID NO: 1216150 - RNA, 19 nt, Homo sapiens
  misc_RNA (1)...(19): siRNA sense strand
cuuagaacauguccacaag

SEQ ID NO: 1216151 - RNA, 19 nt, Homo sapiens
  misc_RNA (1)...(19): siRNA sense strand
uugaagcaccugaucauug

SEQ ID NO: 1216152 - RNA, 19 nt, Homo sapiens
  misc_RNA (1)...(19): siRNA sense strand
ggaguggauauauggcaaa

SEQ ID NO: 1216153 - RNA, 19 nt, Homo sapiens
  misc_RNA (1)...(19): siRNA sense strand
gaaucuagaaggcaaacca

SEQ ID NO: 1216154 - RNA, 19 nt, Homo sapiens
  misc_RNA (1)...(19): siRNA sense strand
aaacuggcucggagaagaa

SEQ ID NO: 1216155 - RNA, 19 nt, Homo sapiens
  misc_RNA (1)...(19): siRNA sense strand
uuuacuugauggacaguuu

SEQ ID NO: 1216156 - RNA, 19 nt, Homo sapiens
  misc_RNA (1)...(19): siRNA sense strand
aaauagcaaagccaaagaa

SEQ ID NO: 1216157 - RNA, 19 nt, Homo sapiens
  misc_RNA (1)...(19): siRNA sense strand
gaccugugaaguacuaaug

SEQ ID NO: 1216158 - RNA, 19 nt, Homo sapiens
  misc_RNA (1)...(19): siRNA sense strand
uuacuugauggacaguuua

SEQ ID NO: 1216159 - RNA, 19 nt, Homo sapiens
  misc_RNA (1)...(19): siRNA sense strand
acuaccaugcuaacaaaua

SEQ ID NO: 1216160 - RNA, 19 nt, Homo sapiens
  misc_RNA (1)...(19): siRNA sense strand
aauacuuccuuucaugugu

SEQ ID NO: 1216161 - RNA, 19 nt, Homo sapiens
  misc_RNA (1)...(19): siRNA sense strand
agaauucucccucuguugu

SEQ ID NO: 1216162 - RNA, 19 nt, Homo sapiens
  misc_RNA (1)...(19): siRNA sense strand
aggcaaaccaauucuauuc

SEQ ID NO: 1216163 - RNA, 19 nt, Homo sapiens
  misc_RNA (1)...(19): siRNA sense strand
gcaaacuugggaguggaua

SEQ ID NO: 1216164 - RNA, 19 nt, Homo sapiens
  misc_RNA (1)...(19): siRNA sense strand
gaccauaugaaucuagaag

SEQ ID NO: 1216165 - RNA, 19 nt, Homo sapiens
  misc_RNA (1)...(19): siRNA sense strand
gauggacaguuuaaaaucu

SEQ ID NO: 1216166 - RNA, 19 nt, Homo sapiens
  misc_RNA (1)...(19): siRNA sense strand
aacugaaacuaccaugcua

SEQ ID NO: 1216167 - RNA, 19 nt, Homo sapiens
  misc_RNA (1)...(19): siRNA sense strand
cuggauccaugaccauaug

SEQ ID NO: 1216168 - RNA, 19 nt, Homo sapiens
  misc_RNA (1)...(19): siRNA sense strand
ugaacagucacacuuggaa

SEQ ID NO: 1216169 - RNA, 19 nt, Homo sapiens
  misc_RNA (1)...(19): siRNA sense strand
gcacuuuauuauguaguac

SEQ ID NO: 1216170 - RNA, 19 nt, Homo sapiens
  misc_RNA (1)...(19): siRNA sense strand
cagucaauuuccaaugaug

SEQ ID NO: 1216171 - RNA, 19 nt, Homo sapiens
  misc_RNA (1)...(19): siRNA sense strand
gacauaaagaauggaagaa

SEQ ID NO: 1216172 - RNA, 19 nt, Homo sapiens
  misc_RNA (1)...(19): siRNA sense strand
uacuuccuuucauguguua

SEQ ID NO: 1216173 - RNA, 19 nt, Homo sapiens
  misc_RNA (1)...(19): siRNA sense strand
auacuuccuuucauguguu

SEQ ID NO: 1216174 - RNA, 19 nt, Homo sapiens
  misc_RNA (1)...(19): siRNA sense strand
acagucaauuuccaaugau

SEQ ID NO: 1216175 - RNA, 19 nt, Homo sapiens
  misc_RNA (1)...(19): siRNA sense strand
caauuuccaaugaugucua

SEQ ID NO: 1216176 - RNA, 19 nt, Homo sapiens
  misc_RNA (1)...(19): siRNA sense strand
ggaaauacgugacaaauua

SEQ ID NO: 1216177 - RNA, 19 nt, Homo sapiens
  misc_RNA (1)...(19): siRNA sense strand
ccaaagaacugcaaacuug

SEQ ID NO: 1216178 - RNA, 19 nt, Homo sapiens
  misc_RNA (1)...(19): siRNA sense strand
gaauguaaccugaaucuaa

SEQ ID NO: 1216179 - RNA, 19 nt, Homo sapiens
  misc_RNA (1)...(19): siRNA sense strand
ggaacagucuaccaugaua

SEQ ID NO: 1216180 - RNA, 19 nt, Homo sapiens
  misc_RNA (1)...(19): siRNA sense strand
uagcauaccuuccuuagug

SEQ ID NO: 1216181 - RNA, 19 nt, Homo sapiens
  misc_RNA (1)...(19): siRNA sense strand
gcaaaccaauucuauucuu

SEQ ID NO: 1216182 - RNA, 19 nt, Homo sapiens
  misc_RNA (1)...(19): siRNA sense strand
gaggaacagucuaccauga

SEQ ID NO: 1216183 - RNA, 19 nt, Homo sapiens
  misc_RNA (1)...(19): siRNA sense strand
gauaaucacauucaccuaa

SEQ ID NO: 1216184 - RNA, 19 nt, Homo sapiens
  misc_RNA (1)...(19): siRNA sense strand
gaaacuaccaugcuaacaa

SEQ ID NO: 1216185 - RNA, 19 nt, Homo sapiens
  misc_RNA (1)...(19): siRNA sense strand
aaacuaccaugcuaacaaa

SEQ ID NO: 1216186 - RNA, 19 nt, Homo sapiens
  misc_RNA (1)...(19): siRNA sense strand
ggacguucuugucuucuuu

SEQ ID NO: 1216187 - RNA, 19 nt, Homo sapiens
  misc_RNA (1)...(19): siRNA sense strand
guucuugucuucuuugcua

SEQ ID NO: 1216188 - RNA, 19 nt, Homo sapiens
  misc_RNA (1)...(19): siRNA sense strand
ccacaagaccacaaacuaa

SEQ ID NO: 1216189 - RNA, 19 nt, Homo sapiens
  misc_RNA (1)...(19): siRNA sense strand
gaaggcaaaccaauucuau

SEQ ID NO: 1216190 - RNA, 19 nt, Homo sapiens
  misc_RNA (1)...(19): siRNA sense strand
ccauugcacuuuauuaugu

SEQ ID NO: 1216191 - RNA, 19 nt, Homo sapiens
  misc_RNA (1)...(19): siRNA sense strand
uaaccugaaucuaaugaga

SEQ ID NO: 1216192 - RNA, 19 nt, Homo sapiens
  misc_RNA (1)...(19): siRNA sense strand
gaccacaaacuaaacagua

SEQ ID NO: 1216193 - RNA, 19 nt, Homo sapiens
  misc_RNA (1)...(19): siRNA sense strand
gaucauugguugccauugg

SEQ ID NO: 1216194 - RNA, 19 nt, Homo sapiens
  misc_RNA (1)...(19): siRNA sense strand
uaauaaacccaacggauga

SEQ ID NO: 1216195 - RNA, 19 nt, Homo sapiens
  misc_RNA (1)...(19): siRNA sense strand
uacagucaauuuccaauga

SEQ ID NO: 1216196 - RNA, 19 nt, Homo sapiens
  misc_RNA (1)...(19): siRNA sense strand
aauggaauauucucuguga

SEQ ID NO: 1216197 - RNA, 19 nt, Homo sapiens
  misc_RNA (1)...(19): siRNA sense strand
cagucacacuuggaaauua

SEQ ID NO: 1216198 - RNA, 19 nt, Homo sapiens
  misc_RNA (1)...(19): siRNA sense strand
cuaccaugcuaacaaauau

SEQ ID NO: 1216199 - RNA, 19 nt, Homo sapiens
  misc_RNA (1)...(19): siRNA sense strand
gaacagucacacuuggaaa

SEQ ID NO: 1216200 - RNA, 19 nt, Homo sapiens
  misc_RNA (1)...(19): siRNA sense strand
ugaagcaccugaucauugg

SEQ ID NO: 1216201 - RNA, 19 nt, Homo sapiens
  misc_RNA (1)...(19): siRNA sense strand
gaugggacguucuugucuu

SEQ ID NO: 1216202 - RNA, 19 nt, Homo sapiens
  misc_RNA (1)...(19): siRNA sense strand
gaacagucuaccaugauau

SEQ ID NO: 1216203 - RNA, 19 nt, Homo sapiens
  misc_RNA (1)...(19): siRNA sense strand
caagggaucaggagcaaug

SEQ ID NO: 1216204 - RNA, 19 nt, Homo sapiens
  misc_RNA (1)...(19): siRNA sense strand
agucacacuuggaaauuaa

SEQ ID NO: 1216205 - RNA, 19 nt, Homo sapiens
  misc_RNA (1)...(19): siRNA sense strand
guaauugguaggcaucaaa

SEQ ID NO: 1216206 - RNA, 19 nt, Homo sapiens
  misc_RNA (1)...(19): siRNA sense strand
ucauagacauaaagaaugg

SEQ ID NO: 1216207 - RNA, 19 nt, Homo sapiens
  misc_RNA (1)...(19): siRNA sense strand
gaauucucccucuguugua

SEQ ID NO: 1216208 - RNA, 19 nt, Homo sapiens
  misc_RNA (1)...(19): siRNA sense strand
uagcaaagccaaagaacug

SEQ ID NO: 1216209 - RNA, 19 nt, Homo sapiens
  misc_RNA (1)...(19): siRNA sense strand
gauuugaccuuuuacuuga

SEQ ID NO: 1216210 - RNA, 19 nt, Homo sapiens
  misc_RNA (1)...(19): siRNA sense strand
gagagaagaagguauaaaa

SEQ ID NO: 1216211 - RNA, 19 nt, Homo sapiens
  misc_RNA (1)...(19): siRNA sense strand
aaugagagaagaagguaua

SEQ ID NO: 1216212 - RNA, 19 nt, Homo sapiens
  misc_RNA (1)...(19): siRNA sense strand
cacaagaccacaaacuaaa

SEQ ID NO: 1216213 - RNA, 19 nt, Homo sapiens
  misc_RNA (1)...(19): siRNA sense strand
ggaauauucucugugaaaa

SEQ ID NO: 1216214 - RNA, 19 nt, Homo sapiens
  misc_RNA (1)...(19): siRNA sense strand
caaacuaaacaguaaaugg

SEQ ID NO: 1216215 - RNA, 19 nt, Homo sapiens
  misc_RNA (1)...(19): siRNA sense strand
cuaucaccauugcacuuua

SEQ ID NO: 1216216 - RNA, 19 nt, Homo sapiens
  misc_RNA (1)...(19): siRNA sense strand
caagucuuauuggcaguaa

SEQ ID NO: 1216217 - RNA, 19 nt, Homo sapiens
  misc_RNA (1)...(19): siRNA sense strand
aaacuugggaguggauaua

SEQ ID NO: 1216218 - RNA, 19 nt, Homo sapiens
  misc_RNA (1)...(19): siRNA sense strand
uaucaccauugcacuuuau

SEQ ID NO: 1216219 - RNA, 19 nt, Homo sapiens
  misc_RNA (1)...(19): siRNA sense strand
accacaaacuaaacaguaa

SEQ ID NO: 1216220 - RNA, 19 nt, Homo sapiens
  misc_RNA (1)...(19): siRNA sense strand
caacggaugagacacuguu

SEQ ID NO: 1216221 - RNA, 19 nt, Homo sapiens
  misc_RNA (1)...(19): siRNA sense strand
aagaauugcuuccaguuac

SEQ ID NO: 1216222 - RNA, 19 nt, Homo sapiens
  misc_RNA (1)...(19): siRNA sense strand
ucaccauugcacuuuauua

SEQ ID NO: 1216223 - RNA, 19 nt, Homo sapiens
  misc_RNA (1)...(19): siRNA sense strand
uggaauauucucugugaaa

SEQ ID NO: 1216224 - RNA, 19 nt, Homo sapiens
  misc_RNA (1)...(19): siRNA sense strand
gaaaaggaucccacucuga

SEQ ID NO: 1216225 - RNA, 19 nt, Homo sapiens
  misc_RNA (1)...(19): siRNA sense strand
cuagaaggcaaaccaauuc

SEQ ID NO: 1216226 - RNA, 19 nt, Homo sapiens
  misc_RNA (1)...(19): siRNA sense strand
ccacaaacuaaacaguaaa

SEQ ID NO: 1216227 - RNA, 19 nt, Homo sapiens
  misc_RNA (1)...(19): siRNA sense strand
ccugugaaguacuaaugaa

SEQ ID NO: 1216228 - RNA, 19 nt, Homo sapiens
  misc_RNA (1)...(19): siRNA sense strand
gcuaaagagcccuuaccaa

SEQ ID NO: 1216229 - RNA, 19 nt, Homo sapiens
  misc_RNA (1)...(19): siRNA sense strand
ggaauguaaccugaaucua

SEQ ID NO: 1216230 - RNA, 19 nt, Homo sapiens
  misc_RNA (1)...(19): siRNA sense strand
uaaauagcaaagccaaaga

SEQ ID NO: 1216231 - RNA, 19 nt, Homo sapiens
  misc_RNA (1)...(19): siRNA sense strand
gugaaguacuaaugaaugc

SEQ ID NO: 1216232 - RNA, 19 nt, Homo sapiens
  misc_RNA (1)...(19): siRNA sense strand
guacugaugggacguucuu

SEQ ID NO: 1216233 - RNA, 19 nt, Homo sapiens
  misc_RNA (1)...(19): siRNA sense strand
caccauugcacuuuauuau

SEQ ID NO: 1216234 - RNA, 19 nt, Homo sapiens
  misc_RNA (1)...(19): siRNA sense strand
gggacguucuugucuucuu

SEQ ID NO: 1216235 - RNA, 19 nt, Homo sapiens
  misc_RNA (1)...(19): siRNA sense strand
agacauaaagaauggaaga

SEQ ID NO: 1216236 - RNA, 19 nt, Homo sapiens
  misc_RNA (1)...(19): siRNA sense strand
uauaugaacagucacacuu

SEQ ID NO: 1216237 - RNA, 19 nt, Homo sapiens
  misc_RNA (1)...(19): siRNA sense strand
gccaaagaacugcaaacuu

SEQ ID NO: 1216238 - RNA, 19 nt, Homo sapiens
  misc_RNA (1)...(19): siRNA sense strand
ucugaccugugaaguacua

SEQ ID NO: 1216239 - RNA, 19 nt, Homo sapiens
  misc_RNA (1)...(19): siRNA sense strand
ucuagaaggcaaaccaauu

SEQ ID NO: 1216240 - RNA, 19 nt, Homo sapiens
  misc_RNA (1)...(19): siRNA sense strand
uagaacauguccacaagac

SEQ ID NO: 1216241 - RNA, 19 nt, Homo sapiens
  misc_RNA (1)...(19): siRNA sense strand
aaugaaugcuguugcuaca

SEQ ID NO: 1216242 - RNA, 19 nt, Homo sapiens
  misc_RNA (1)...(19): siRNA sense strand
caacugaaacuaccaugcu

SEQ ID NO: 1216243 - RNA, 19 nt, Homo sapiens
  misc_RNA (1)...(19): siRNA sense strand
uggaaauacgugacaaauu

SEQ ID NO: 1216244 - RNA, 19 nt, Homo sapiens
  misc_RNA (1)...(19): siRNA sense strand
gaaucuaaugagagaagaa

SEQ ID NO: 1216245 - RNA, 19 nt, Homo sapiens
  misc_RNA (1)...(19): siRNA sense strand
caagaccacaaacuaaaca

SEQ ID NO: 1216246 - RNA, 19 nt, Homo sapiens
  misc_RNA (1)...(19): siRNA sense strand
guacuaaugaaugcuguug

SEQ ID NO: 1216247 - RNA, 19 nt, Homo sapiens
  misc_RNA (1)...(19): siRNA sense strand
ugacuuucuuuacaaccaa

SEQ ID NO: 1216248 - RNA, 19 nt, Homo sapiens
  misc_RNA (1)...(19): siRNA sense strand
gauccaugaccauaugaau

SEQ ID NO: 1216249 - RNA, 19 nt, Homo sapiens
  misc_RNA (1)...(19): siRNA sense strand
cuaaugagagaagaaggua

SEQ ID NO: 1216250 - RNA, 19 nt, Homo sapiens
  misc_RNA (1)...(19): siRNA sense strand
cuuagaacauguccacaag

SEQ ID NO: 1216251 - RNA, 19 nt, Homo sapiens
  misc_RNA (1)...(19): siRNA sense strand
uugaagcaccugaucauug

SEQ ID NO: 1216252 - RNA, 19 nt, Homo sapiens
  misc_RNA (1)...(19): siRNA sense strand
ggaguggauauauggcaaa

SEQ ID NO: 1216253 - RNA, 19 nt, Homo sapiens
  misc_RNA (1)...(19): siRNA sense strand
gaaucuagaaggcaaacca

SEQ ID NO: 1216254 - RNA, 19 nt, Homo sapiens
  misc_RNA (1)...(19): siRNA sense strand
aaacuggcucggagaagaa

SEQ ID NO: 1216255 - RNA, 19 nt, Homo sapiens
  misc_RNA (1)...(19): siRNA sense strand
uuuacuugauggacaguuu

SEQ ID NO: 1216256 - RNA, 19 nt, Homo sapiens
  misc_RNA (1)...(19): siRNA sense strand
aaauagcaaagccaaagaa

SEQ ID NO: 1216257 - RNA, 19 nt, Homo sapiens
  misc_RNA (1)...(19): siRNA sense strand
gaccugugaaguacuaaug

SEQ ID NO: 1216258 - RNA, 19 nt, Homo sapiens
  misc_RNA (1)...(19): siRNA sense strand
uuacuugauggacaguuua

SEQ ID NO: 1216259 - RNA, 19 nt, Homo sapiens
  misc_RNA (1)...(19): siRNA sense strand
acuaccaugcuaacaaaua

SEQ ID NO: 1216260 - RNA, 19 nt, Homo sapiens
  misc_RNA (1)...(19): siRNA sense strand
aauacuuccuuucaugugu

SEQ ID NO: 1216261 - RNA, 19 nt, Homo sapiens
  misc_RNA (1)...(19): siRNA sense strand
agaauucucccucuguugu

SEQ ID NO: 1216262 - RNA, 19 nt, Homo sapiens
  misc_RNA (1)...(19): siRNA sense strand
aggcaaaccaauucuauuc

SEQ ID NO: 1216263 - RNA, 19 nt, Homo sapiens
  misc_RNA (1)...(19): siRNA sense strand
gcaaacuugggaguggaua

SEQ ID NO: 1216264 - RNA, 19 nt, Homo sapiens
  misc_RNA (1)...(19): siRNA sense strand
gaccauaugaaucuagaag

SEQ ID NO: 1216265 - RNA, 19 nt, Homo sapiens
  misc_RNA (1)...(19): siRNA sense strand
gauggacaguuuaaaaucu

SEQ ID NO: 1216266 - RNA, 19 nt, Homo sapiens
  misc_RNA (1)...(19): siRNA sense strand
aacugaaacuaccaugcua

SEQ ID NO: 1216267 - RNA, 19 nt, Homo sapiens
  misc_RNA (1)...(19): siRNA sense strand
cuggauccaugaccauaug

SEQ ID NO: 1216268 - RNA, 19 nt, Homo sapiens
  misc_RNA (1)...(19): siRNA sense strand
ugaacagucacacuuggaa

SEQ ID NO: 1216269 - RNA, 19 nt, Homo sapiens
  misc_RNA (1)...(19): siRNA sense strand
gcacuuuauuauguaguac

SEQ ID NO: 1216270 - RNA, 19 nt, Homo sapiens
  misc_RNA (1)...(19): siRNA sense strand
cagucaauuuccaaugaug

SEQ ID NO: 1216271 - RNA, 19 nt, Homo sapiens
  misc_RNA (1)...(19): siRNA sense strand
gacauaaagaauggaagaa

SEQ ID NO: 1216272 - RNA, 19 nt, Homo sapiens
  misc_RNA (1)...(19): siRNA sense strand
uacuuccuuucauguguua

SEQ ID NO: 1216273 - RNA, 19 nt, Homo sapiens
  misc_RNA (1)...(19): siRNA sense strand
auacuuccuuucauguguu

SEQ ID NO: 1216274 - RNA, 19 nt, Homo sapiens
  misc_RNA (1)...(19): siRNA sense strand
acagucaauuuccaaugau

SEQ ID NO: 1216275 - RNA, 19 nt, Homo sapiens
  misc_RNA (1)...(19): siRNA sense strand
caauuuccaaugaugucua

SEQ ID NO: 1216276 - RNA, 19 nt, Homo sapiens
  misc_RNA (1)...(19): siRNA sense strand
ggaaauacgugacaaauua

SEQ ID NO: 1216277 - RNA, 19 nt, Homo sapiens
  misc_RNA (1)...(19): siRNA sense strand
ccaaagaacugcaaacuug

SEQ ID NO: 1216278 - RNA, 19 nt, Homo sapiens
  misc_RNA (1)...(19): siRNA sense strand
gaauguaaccugaaucuaa

SEQ ID NO: 1216279 - RNA, 19 nt, Homo sapiens
  misc_RNA (1)...(19): siRNA sense strand
ggaacagucuaccaugaua

SEQ ID NO: 1216280 - RNA, 19 nt, Homo sapiens
  misc_RNA (1)...(19): siRNA sense strand
uagcauaccuuccuuagug

SEQ ID NO: 1216281 - RNA, 19 nt, Homo sapiens
  misc_RNA (1)...(19): siRNA sense strand
gcaaaccaauucuauucuu

SEQ ID NO: 1216282 - RNA, 19 nt, Homo sapiens
  misc_RNA (1)...(19): siRNA sense strand
gaggaacagucuaccauga

SEQ ID NO: 1216283 - RNA, 19 nt, Homo sapiens
  misc_RNA (1)...(19): siRNA sense strand
gauaaucacauucaccuaa

SEQ ID NO: 1216284 - RNA, 19 nt, Homo sapiens
  misc_RNA (1)...(19): siRNA sense strand
gaaacuaccaugcuaacaa

SEQ ID NO: 1216285 - RNA, 19 nt, Homo sapiens
  misc_RNA (1)...(19): siRNA sense strand
aaacuaccaugcuaacaaa

SEQ ID NO: 1216286 - RNA, 19 nt, Homo sapiens
  misc_RNA (1)...(19): siRNA sense strand
ggacguucuugucuucuuu

SEQ ID NO: 1216287 - RNA, 19 nt, Homo sapiens
  misc_RNA (1)...(19): siRNA sense strand
guucuugucuucuuugcua

SEQ ID NO: 1216288 - RNA, 19 nt, Homo sapiens
  misc_RNA (1)...(19): siRNA sense strand
ccacaagaccacaaacuaa

SEQ ID NO: 1216289 - RNA, 19 nt, Homo sapiens
  misc_RNA (1)...(19): siRNA sense strand
gaaggcaaaccaauucuau

SEQ ID NO: 1216290 - RNA, 19 nt, Homo sapiens
  misc_RNA (1)...(19): siRNA sense strand
ccauugcacuuuauuaugu

SEQ ID NO: 1216291 - RNA, 19 nt, Homo sapiens
  misc_RNA (1)...(19): siRNA sense strand
uaaccugaaucuaaugaga

SEQ ID NO: 1216292 - RNA, 19 nt, Homo sapiens
  misc_RNA (1)...(19): siRNA sense strand
gaccacaaacuaaacagua

SEQ ID NO: 1216293 - RNA, 19 nt, Homo sapiens
  misc_RNA (1)...(19): siRNA sense strand
gaucauugguugccauugg

SEQ ID NO: 1216294 - RNA, 19 nt, Homo sapiens
  misc_RNA (1)...(19): siRNA sense strand
uaauaaacccaacggauga

SEQ ID NO: 1216295 - RNA, 19 nt, Homo sapiens
  misc_RNA (1)...(19): siRNA sense strand
uacagucaauuuccaauga

SEQ ID NO: 1216296 - RNA, 19 nt, Homo sapiens
  misc_RNA (1)...(19): siRNA sense strand
aauggaauauucucuguga

SEQ ID NO: 1216297 - RNA, 19 nt, Homo sapiens
  misc_RNA (1)...(19): siRNA sense strand
cagucacacuuggaaauua

SEQ ID NO: 1216298 - RNA, 19 nt, Homo sapiens
  misc_RNA (1)...(19): siRNA sense strand
cuaccaugcuaacaaauau

SEQ ID NO: 1216299 - RNA, 19 nt, Homo sapiens
  misc_RNA (1)...(19): siRNA sense strand
gaacagucacacuuggaaa

SEQ ID NO: 1216300 - RNA, 19 nt, Homo sapiens
  misc_RNA (1)...(19): siRNA sense strand
ugaagcaccugaucauugg

SEQ ID NO: 1216301 - RNA, 19 nt, Homo sapiens
  misc_RNA (1)...(19): siRNA sense strand
gaugggacguucuugucuu

SEQ ID NO: 1216302 - RNA, 19 nt, Homo sapiens
  misc_RNA (1)...(19): siRNA sense strand
gaacagucuaccaugauau

SEQ ID NO: 1216303 - RNA, 19 nt, Homo sapiens
  misc_RNA (1)...(19): siRNA sense strand
caagggaucaggagcaaug

SEQ ID NO: 1216304 - RNA, 19 nt, Homo sapiens
  misc_RNA (1)...(19): siRNA sense strand
agucacacuuggaaauuaa

SEQ ID NO: 1216305 - RNA, 19 nt, Homo sapiens
  misc_RNA (1)...(19): siRNA sense strand
guaauugguaggcaucaaa

SEQ ID NO: 1216306 - RNA, 19 nt, Homo sapiens
  misc_RNA (1)...(19): siRNA sense strand
ucauagacauaaagaaugg

SEQ ID NO: 1216307 - RNA, 19 nt, Homo sapiens
  misc_RNA (1)...(19): siRNA sense strand
gaauucucccucuguugua

SEQ ID NO: 1216308 - RNA, 19 nt, Homo sapiens
  misc_RNA (1)...(19): siRNA sense strand
uagcaaagccaaagaacug

SEQ ID NO: 1216309 - RNA, 19 nt, Homo sapiens
  misc_RNA (1)...(19): siRNA sense strand
gauuugaccuuuuacuuga

SEQ ID NO: 1216310 - RNA, 19 nt, Homo sapiens
  misc_RNA (1)...(19): siRNA sense strand
gagagaagaagguauaaaa

SEQ ID NO: 1216311 - RNA, 19 nt, Homo sapiens
  misc_RNA (1)...(19): siRNA sense strand
aaugagagaagaagguaua

SEQ ID NO: 1216312 - RNA, 19 nt, Homo sapiens
  misc_RNA (1)...(19): siRNA sense strand
cacaagaccacaaacuaaa

SEQ ID NO: 1216313 - RNA, 19 nt, Homo sapiens
  misc_RNA (1)...(19): siRNA sense strand
ggaauauucucugugaaaa

SEQ ID NO: 1216314 - RNA, 19 nt, Homo sapiens
  misc_RNA (1)...(19): siRNA sense strand
caaacuaaacaguaaaugg

SEQ ID NO: 1216315 - RNA, 19 nt, Homo sapiens
  misc_RNA (1)...(19): siRNA sense strand
cuaucaccauugcacuuua

SEQ ID NO: 1216316 - RNA, 19 nt, Homo sapiens
  misc_RNA (1)...(19): siRNA sense strand
caagucuuauuggcaguaa

SEQ ID NO: 1216317 - RNA, 19 nt, Homo sapiens
  misc_RNA (1)...(19): siRNA sense strand
aaacuugggaguggauaua

SEQ ID NO: 1216318 - RNA, 19 nt, Homo sapiens
  misc_RNA (1)...(19): siRNA sense strand
uaucaccauugcacuuuau

SEQ ID NO: 1216319 - RNA, 19 nt, Homo sapiens
  misc_RNA (1)...(19): siRNA sense strand
accacaaacuaaacaguaa

SEQ ID NO: 1216320 - RNA, 19 nt, Homo sapiens
  misc_RNA (1)...(19): siRNA sense strand
caacggaugagacacuguu

SEQ ID NO: 1216321 - RNA, 19 nt, Homo sapiens
  misc_RNA (1)...(19): siRNA sense strand
aagaauugcuuccaguuac

SEQ ID NO: 1216322 - RNA, 19 nt, Homo sapiens
  misc_RNA (1)...(19): siRNA sense strand
ucaccauugcacuuuauua

SEQ ID NO: 1216323 - RNA, 19 nt, Homo sapiens
  misc_RNA (1)...(19): siRNA sense strand
uggaauauucucugugaaa

SEQ ID NO: 1216324 - RNA, 19 nt, Homo sapiens
  misc_RNA (1)...(19): siRNA sense strand
gaaaaggaucccacucuga

SEQ ID NO: 1216325 - RNA, 19 nt, Homo sapiens
  misc_RNA (1)...(19): siRNA sense strand
cuagaaggcaaaccaauuc

SEQ ID NO: 1216326 - RNA, 19 nt, Homo sapiens
  misc_RNA (1)...(19): siRNA sense strand
ccacaaacuaaacaguaaa

SEQ ID NO: 1216327 - RNA, 19 nt, Homo sapiens
  misc_RNA (1)...(19): siRNA sense strand
ccugugaaguacuaaugaa

SEQ ID NO: 1216328 - RNA, 19 nt, Homo sapiens
  misc_RNA (1)...(19): siRNA sense strand
gcuaaagagcccuuaccaa

SEQ ID NO: 1216329 - RNA, 19 nt, Homo sapiens
  misc_RNA (1)...(19): siRNA sense strand
ggaauguaaccugaaucua

SEQ ID NO: 1216330 - RNA, 19 nt, Homo sapiens
  misc_RNA (1)...(19): siRNA sense strand
uaaauagcaaagccaaaga

SEQ ID NO: 1216331 - RNA, 19 nt, Homo sapiens
  misc_RNA (1)...(19): siRNA sense strand
gugaaguacuaaugaaugc

SEQ ID NO: 1216332 - RNA, 19 nt, Homo sapiens
  misc_RNA (1)...(19): siRNA sense strand
guacugaugggacguucuu

SEQ ID NO: 1216333 - RNA, 19 nt, Homo sapiens
  misc_RNA (1)...(19): siRNA sense strand
caccauugcacuuuauuau

SEQ ID NO: 1216334 - RNA, 19 nt, Homo sapiens
  misc_RNA (1)...(19): siRNA sense strand
gggacguucuugucuucuu

SEQ ID NO: 1216335 - RNA, 19 nt, Homo sapiens
  misc_RNA (1)...(19): siRNA sense strand
agacauaaagaauggaaga

SEQ ID NO: 1216336 - RNA, 19 nt, Homo sapiens
  misc_RNA (1)...(19): siRNA sense strand
uauaugaacagucacacuu

SEQ ID NO: 1216337 - RNA, 19 nt, Homo sapiens
  misc_RNA (1)...(19): siRNA sense strand
gccaaagaacugcaaacuu

SEQ ID NO: 1216338 - RNA, 19 nt, Homo sapiens
  misc_RNA (1)...(19): siRNA sense strand
ucugaccugugaaguacua

SEQ ID NO: 1216339 - RNA, 19 nt, Homo sapiens
  misc_RNA (1)...(19): siRNA sense strand
ucuagaaggcaaaccaauu

SEQ ID NO: 1216340 - RNA, 19 nt, Homo sapiens
  misc_RNA (1)...(19): siRNA sense strand
uagaacauguccacaagac

SEQ ID NO: 1216341 - RNA, 19 nt, Homo sapiens
  misc_RNA (1)...(19): siRNA sense strand
aaugaaugcuguugcuaca

SEQ ID NO: 1216342 - RNA, 19 nt, Homo sapiens
  misc_RNA (1)...(19): siRNA sense strand
caacugaaacuaccaugcu

SEQ ID NO: 1216343 - RNA, 19 nt, Homo sapiens
  misc_RNA (1)...(19): siRNA sense strand
uggaaauacgugacaaauu

SEQ ID NO: 1216344 - RNA, 19 nt, Homo sapiens
  misc_RNA (1)...(19): siRNA sense strand
gaaucuaaugagagaagaa

SEQ ID NO: 1216345 - RNA, 19 nt, Homo sapiens
  misc_RNA (1)...(19): siRNA sense strand
caagaccacaaacuaaaca

SEQ ID NO: 1216346 - RNA, 19 nt, Homo sapiens
  misc_RNA (1)...(19): siRNA sense strand
guacuaaugaaugcuguug

SEQ ID NO: 1216347 - RNA, 19 nt, Homo sapiens
  misc_RNA (1)...(19): siRNA sense strand
ugacuuucuuuacaaccaa

SEQ ID NO: 1216348 - RNA, 19 nt, Homo sapiens
  misc_RNA (1)...(19): siRNA sense strand
gauccaugaccauaugaau

SEQ ID NO: 1216349 - RNA, 19 nt, Homo sapiens
  misc_RNA (1)...(19): siRNA sense strand
cuaaugagagaagaaggua

SEQ ID NO: 1216350 - RNA, 19 nt, Homo sapiens
  misc_RNA (1)...(19): siRNA sense strand
cuuagaacauguccacaag

SEQ ID NO: 1216351 - RNA, 19 nt, Homo sapiens
  misc_RNA (1)...(19): siRNA sense strand
uugaagcaccugaucauug

SEQ ID NO: 1216352 - RNA, 19 nt, Homo sapiens
  misc_RNA (1)...(19): siRNA sense strand
ggaguggauauauggcaaa

SEQ ID NO: 1216353 - RNA, 19 nt, Homo sapiens
  misc_RNA (1)...(19): siRNA sense strand
gaaucuagaaggcaaacca

SEQ ID NO: 1216354 - RNA, 19 nt, Homo sapiens
  misc_RNA (1)...(19): siRNA sense strand
aaacuggcucggagaagaa

SEQ ID NO: 1216355 - RNA, 19 nt, Homo sapiens
  misc_RNA (1)...(19): siRNA sense strand
uuuacuugauggacaguuu

SEQ ID NO: 1216356 - RNA, 19 nt, Homo sapiens
  misc_RNA (1)...(19): siRNA sense strand
aaauagcaaagccaaagaa

SEQ ID NO: 1216357 - RNA, 19 nt, Homo sapiens
  misc_RNA (1)...(19): siRNA sense strand
gaccugugaaguacuaaug

SEQ ID NO: 1216358 - RNA, 19 nt, Homo sapiens
  misc_RNA (1)...(19): siRNA sense strand
uuacuugauggacaguuua

SEQ ID NO: 1216359 - RNA, 19 nt, Homo sapiens
  misc_RNA (1)...(19): siRNA sense strand
acuaccaugcuaacaaaua

SEQ ID NO: 1216360 - RNA, 19 nt, Homo sapiens
  misc_RNA (1)...(19): siRNA sense strand
aauacuuccuuucaugugu

SEQ ID NO: 1216361 - RNA, 19 nt, Homo sapiens
  misc_RNA (1)...(19): siRNA sense strand
agaauucucccucuguugu

SEQ ID NO: 1216362 - RNA, 19 nt, Homo sapiens
  misc_RNA (1)...(19): siRNA sense strand
aggcaaaccaauucuauuc

SEQ ID NO: 1216363 - RNA, 19 nt, Homo sapiens
  misc_RNA (1)...(19): siRNA sense strand
gcaaacuugggaguggaua

SEQ ID NO: 1216364 - RNA, 19 nt, Homo sapiens
  misc_RNA (1)...(19): siRNA sense strand
gaccauaugaaucuagaag

SEQ ID NO: 1216365 - RNA, 19 nt, Homo sapiens
  misc_RNA (1)...(19): siRNA sense strand
gauggacaguuuaaaaucu

SEQ ID NO: 1216366 - RNA, 19 nt, Homo sapiens
  misc_RNA (1)...(19): siRNA sense strand
aacugaaacuaccaugcua

SEQ ID NO: 1216367 - RNA, 19 nt, Homo sapiens
  misc_RNA (1)...(19): siRNA sense strand
cuggauccaugaccauaug

SEQ ID NO: 1216368 - RNA, 19 nt, Homo sapiens
  misc_RNA (1)...(19): siRNA sense strand
ugaacagucacacuuggaa

SEQ ID NO: 1216369 - RNA, 19 nt, Homo sapiens
  misc_RNA (1)...(19): siRNA sense strand
gcacuuuauuauguaguac

SEQ ID NO: 1216370 - RNA, 19 nt, Homo sapiens
  misc_RNA (1)...(19): siRNA sense strand
cagucaauuuccaaugaug

SEQ ID NO: 1216371 - RNA, 19 nt, Homo sapiens
  misc_RNA (1)...(19): siRNA sense strand
gacauaaagaauggaagaa

SEQ ID NO: 1216372 - RNA, 19 nt, Homo sapiens
  misc_RNA (1)...(19): siRNA sense strand
uacuuccuuucauguguua

SEQ ID NO: 1216373 - RNA, 19 nt, Homo sapiens
  misc_RNA (1)...(19): siRNA sense strand
auacuuccuuucauguguu

SEQ ID NO: 1216374 - RNA, 19 nt, Homo sapiens
  misc_RNA (1)...(19): siRNA sense strand
acagucaauuuccaaugau

SEQ ID NO: 1216375 - RNA, 19 nt, Homo sapiens
  misc_RNA (1)...(19): siRNA sense strand
caauuuccaaugaugucua

SEQ ID NO: 1216376 - RNA, 19 nt, Homo sapiens
  misc_RNA (1)...(19): siRNA sense strand
ggaaauacgugacaaauua

SEQ ID NO: 1216377 - RNA, 19 nt, Homo sapiens
  misc_RNA (1)...(19): siRNA sense strand
ccaaagaacugcaaacuug

SEQ ID NO: 1216378 - RNA, 19 nt, Homo sapiens
  misc_RNA (1)...(19): siRNA sense strand
gaauguaaccugaaucuaa

SEQ ID NO: 1216379 - RNA, 19 nt, Homo sapiens
  misc_RNA (1)...(19): siRNA sense strand
ggaacagucuaccaugaua

SEQ ID NO: 1216380 - RNA, 19 nt, Homo sapiens
  misc_RNA (1)...(19): siRNA sense strand
uagcauaccuuccuuagug

SEQ ID NO: 1216381 - RNA, 19 nt, Homo sapiens
  misc_RNA (1)...(19): siRNA sense strand
gcaaaccaauucuauucuu

SEQ ID NO: 1216382 - RNA, 19 nt, Homo sapiens
  misc_RNA (1)...(19): siRNA sense strand
gaggaacagucuaccauga

SEQ ID NO: 1216383 - RNA, 19 nt, Homo sapiens
  misc_RNA (1)...(19): siRNA sense strand
gauaaucacauucaccuaa

SEQ ID NO: 1216384 - RNA, 19 nt, Homo sapiens
  misc_RNA (1)...(19): siRNA sense strand
gaaacuaccaugcuaacaa

SEQ ID NO: 1216385 - RNA, 19 nt, Homo sapiens
  misc_RNA (1)...(19): siRNA sense strand
aaacuaccaugcuaacaaa

SEQ ID NO: 1216386 - RNA, 19 nt, Homo sapiens
  misc_RNA (1)...(19): siRNA sense strand
ggacguucuugucuucuuu

SEQ ID NO: 1216387 - RNA, 19 nt, Homo sapiens
  misc_RNA (1)...(19): siRNA sense strand
guucuugucuucuuugcua

SEQ ID NO: 1216388 - RNA, 19 nt, Homo sapiens
  misc_RNA (1)...(19): siRNA sense strand
ccacaagaccacaaacuaa

SEQ ID NO: 1216389 - RNA, 19 nt, Homo sapiens
  misc_RNA (1)...(19): siRNA sense strand
gaaggcaaaccaauucuau

SEQ ID NO: 1216390 - RNA, 19 nt, Homo sapiens
  misc_RNA (1)...(19): siRNA sense strand
ccauugcacuuuauuaugu

SEQ ID NO: 1216391 - RNA, 19 nt, Homo sapiens
  misc_RNA (1)...(19): siRNA sense strand
uaaccugaaucuaaugaga

SEQ ID NO: 1216392 - RNA, 19 nt, Homo sapiens
  misc_RNA (1)...(19): siRNA sense strand
gaccacaaacuaaacagua

SEQ ID NO: 1216393 - RNA, 19 nt, Homo sapiens
  misc_RNA (1)...(19): siRNA sense strand
gaucauugguugccauugg

SEQ ID NO: 1216394 - RNA, 19 nt, Homo sapiens
  misc_RNA (1)...(19): siRNA sense strand
uaauaaacccaacggauga

SEQ ID NO: 1216395 - RNA, 19 nt, Homo sapiens
  misc_RNA (1)...(19): siRNA sense strand
uacagucaauuuccaauga

SEQ ID NO: 1216396 - RNA, 19 nt, Homo sapiens
  misc_RNA (1)...(19): siRNA sense strand
aauggaauauucucuguga

SEQ ID NO: 1216397 - RNA, 19 nt, Homo sapiens
  misc_RNA (1)...(19): siRNA sense strand
cagucacacuuggaaauua

SEQ ID NO: 1216398 - RNA, 19 nt, Homo sapiens
  misc_RNA (1)...(19): siRNA sense strand
cuaccaugcuaacaaauau

SEQ ID NO: 1216399 - RNA, 19 nt, Homo sapiens
  misc_RNA (1)...(19): siRNA sense strand
gaacagucacacuuggaaa

SEQ ID NO: 1216400 - RNA, 19 nt, Homo sapiens
  misc_RNA (1)...(19): siRNA sense strand
ugaagcaccugaucauugg

SEQ ID NO: 1216401 - RNA, 19 nt, Homo sapiens
  misc_RNA (1)...(19): siRNA sense strand
gaugggacguucuugucuu

SEQ ID NO: 1216402 - RNA, 19 nt, Homo sapiens
  misc_RNA (1)...(19): siRNA sense strand
gaacagucuaccaugauau

SEQ ID NO: 1216403 - RNA, 19 nt, Homo sapiens
  misc_RNA (1)...(19): siRNA sense strand
caagggaucaggagcaaug

SEQ ID NO: 1216404 - RNA, 19 nt, Homo sapiens
  misc_RNA (1)...(19): siRNA sense strand
agucacacuuggaaauuaa

SEQ ID NO: 1216405 - RNA, 19 nt, Homo sapiens
  misc_RNA (1)...(19): siRNA sense strand
guaauugguaggcaucaaa

SEQ ID NO: 1216406 - RNA, 19 nt, Homo sapiens
  misc_RNA (1)...(19): siRNA sense strand
ucauagacauaaagaaugg

SEQ ID NO: 1216407 - RNA, 19 nt, Homo sapiens
  misc_RNA (1)...(19): siRNA sense strand
gaauucucccucuguugua

SEQ ID NO: 1216408 - RNA, 19 nt, Homo sapiens
  misc_RNA (1)...(19): siRNA sense strand
uagcaaagccaaagaacug

SEQ ID NO: 1216409 - RNA, 19 nt, Homo sapiens
  misc_RNA (1)...(19): siRNA sense strand
gauuugaccuuuuacuuga

SEQ ID NO: 1216410 - RNA, 19 nt, Homo sapiens
  misc_RNA (1)...(19): siRNA sense strand
gagagaagaagguauaaaa

SEQ ID NO: 1216411 - RNA, 19 nt, Homo sapiens
  misc_RNA (1)...(19): siRNA sense strand
aaugagagaagaagguaua

SEQ ID NO: 1216412 - RNA, 19 nt, Homo sapiens
  misc_RNA (1)...(19): siRNA sense strand
cacaagaccacaaacuaaa

SEQ ID NO: 1216413 - RNA, 19 nt, Homo sapiens
  misc_RNA (1)...(19): siRNA sense strand
ggaauauucucugugaaaa

SEQ ID NO: 1216414 - RNA, 19 nt, Homo sapiens
  misc_RNA (1)...(19): siRNA sense strand
caaacuaaacaguaaaugg

SEQ ID NO: 1216415 - RNA, 19 nt, Homo sapiens
  misc_RNA (1)...(19): siRNA sense strand
cuaucaccauugcacuuua

SEQ ID NO: 1216416 - RNA, 19 nt, Homo sapiens
  misc_RNA (1)...(19): siRNA sense strand
caagucuuauuggcaguaa

SEQ ID NO: 1216417 - RNA, 19 nt, Homo sapiens
  misc_RNA (1)...(19): siRNA sense strand
aaacuugggaguggauaua

SEQ ID NO: 1216418 - RNA, 19 nt, Homo sapiens
  misc_RNA (1)...(19): siRNA sense strand
uaucaccauugcacuuuau

SEQ ID NO: 1216419 - RNA, 19 nt, Homo sapiens
  misc_RNA (1)...(19): siRNA sense strand
accacaaacuaaacaguaa

SEQ ID NO: 1216420 - RNA, 19 nt, Homo sapiens
  misc_RNA (1)...(19): siRNA sense strand
caacggaugagacacuguu

SEQ ID NO: 1216421 - RNA, 19 nt, Homo sapiens
  misc_RNA (1)...(19): siRNA sense strand
aagaauugcuuccaguuac

SEQ ID NO: 1216422 - RNA, 19 nt, Homo sapiens
  misc_RNA (1)...(19): siRNA sense strand
ucaccauugcacuuuauua

SEQ ID NO: 1216423 - RNA, 19 nt, Homo sapiens
  misc_RNA (1)...(19): siRNA sense strand
uggaauauucucugugaaa

SEQ ID NO: 1216424 - RNA, 19 nt, Homo sapiens
  misc_RNA (1)...(19): siRNA sense strand
gaaaaggaucccacucuga

SEQ ID NO: 1216425 - RNA, 19 nt, Homo sapiens
  misc_RNA (1)...(19): siRNA sense strand
cuagaaggcaaaccaauuc

SEQ ID NO: 1216426 - RNA, 19 nt, Homo sapiens
  misc_RNA (1)...(19): siRNA sense strand
ccacaaacuaaacaguaaa

SEQ ID NO: 1216427 - RNA, 19 nt, Homo sapiens
  misc_RNA (1)...(19): siRNA sense strand
ccugugaaguacuaaugaa

SEQ ID NO: 1216428 - RNA, 19 nt, Homo sapiens
  misc_RNA (1)...(19): siRNA sense strand
gcuaaagagcccuuaccaa

SEQ ID NO: 1216429 - RNA, 19 nt, Homo sapiens
  misc_RNA (1)...(19): siRNA sense strand
ggaauguaaccugaaucua

SEQ ID NO: 1216430 - RNA, 19 nt, Homo sapiens
  misc_RNA (1)...(19): siRNA sense strand
uaaauagcaaagccaaaga

SEQ ID NO: 1216431 - RNA, 19 nt, Homo sapiens
  misc_RNA (1)...(19): siRNA sense strand
gugaaguacuaaugaaugc

SEQ ID NO: 1216432 - RNA, 19 nt, Homo sapiens
  misc_RNA (1)...(19): siRNA sense strand
guacugaugggacguucuu

SEQ ID NO: 1216433 - RNA, 19 nt, Homo sapiens
  misc_RNA (1)...(19): siRNA sense strand
caccauugcacuuuauuau

SEQ ID NO: 1216434 - RNA, 19 nt, Homo sapiens
  misc_RNA (1)...(19): siRNA sense strand
gggacguucuugucuucuu

SEQ ID NO: 1216435 - RNA, 19 nt, Homo sapiens
  misc_RNA (1)...(19): siRNA sense strand
agacauaaagaauggaaga

SEQ ID NO: 1216436 - RNA, 19 nt, Homo sapiens
  misc_RNA (1)...(19): siRNA sense strand
uauaugaacagucacacuu

SEQ ID NO: 1216437 - RNA, 19 nt, Homo sapiens
  misc_RNA (1)...(19): siRNA sense strand
gccaaagaacugcaaacuu

SEQ ID NO: 1216438 - RNA, 19 nt, Homo sapiens
  misc_RNA (1)...(19): siRNA sense strand
ucugaccugugaaguacua

SEQ ID NO: 1216439 - RNA, 19 nt, Homo sapiens
  misc_RNA (1)...(19): siRNA sense strand
ucuagaaggcaaaccaauu

SEQ ID NO: 1216440 - RNA, 19 nt, Homo sapiens
  misc_RNA (1)...(19): siRNA sense strand
uagaacauguccacaagac

SEQ ID NO: 1216441 - RNA, 19 nt, Homo sapiens
  misc_RNA (1)...(19): siRNA sense strand
aaugaaugcuguugcuaca

SEQ ID NO: 1216442 - RNA, 19 nt, Homo sapiens
  misc_RNA (1)...(19): siRNA sense strand
caacugaaacuaccaugcu

SEQ ID NO: 1216443 - RNA, 19 nt, Homo sapiens
  misc_RNA (1)...(19): siRNA sense strand
uggaaauacgugacaaauu

SEQ ID NO: 1216444 - RNA, 19 nt, Homo sapiens
  misc_RNA (1)...(19): siRNA sense strand
gaaucuaaugagagaagaa

SEQ ID NO: 1216445 - RNA, 19 nt, Homo sapiens
  misc_RNA (1)...(19): siRNA sense strand
caagaccacaaacuaaaca

SEQ ID NO: 1216446 - RNA, 19 nt, Homo sapiens
  misc_RNA (1)...(19): siRNA sense strand
guacuaaugaaugcuguug

SEQ ID NO: 1216447 - RNA, 19 nt, Homo sapiens
  misc_RNA (1)...(19): siRNA sense strand
ugacuuucuuuacaaccaa

SEQ ID NO: 1216448 - RNA, 19 nt, Homo sapiens
  misc_RNA (1)...(19): siRNA sense strand
gauccaugaccauaugaau

SEQ ID NO: 1216449 - RNA, 19 nt, Homo sapiens
  misc_RNA (1)...(19): siRNA sense strand
cuaaugagagaagaaggua

SEQ ID NO: 1216450 - RNA, 19 nt, Homo sapiens
  misc_RNA (1)...(19): siRNA sense strand
cuuagaacauguccacaag

SEQ ID NO: 1216451 - RNA, 19 nt, Homo sapiens
  misc_RNA (1)...(19): siRNA sense strand
uugaagcaccugaucauug

SEQ ID NO: 1216452 - RNA, 19 nt, Homo sapiens
  misc_RNA (1)...(19): siRNA sense strand
ggaguggauauauggcaaa

SEQ ID NO: 1216453 - RNA, 19 nt, Homo sapiens
  misc_RNA (1)...(19): siRNA sense strand
gaaucuagaaggcaaacca

SEQ ID NO: 1216454 - RNA, 19 nt, Homo sapiens
  misc_RNA (1)...(19): siRNA sense strand
aaacuggcucggagaagaa

SEQ ID NO: 1216455 - RNA, 19 nt, Homo sapiens
  misc_RNA (1)...(19): siRNA sense strand
uuuacuugauggacaguuu

SEQ ID NO: 1216456 - RNA, 19 nt, Homo sapiens
  misc_RNA (1)...(19): siRNA sense strand
aaauagcaaagccaaagaa

SEQ ID NO: 1216457 - RNA, 19 nt, Homo sapiens
  misc_RNA (1)...(19): siRNA sense strand
gaccugugaaguacuaaug

SEQ ID NO: 1216458 - RNA, 19 nt, Homo sapiens
  misc_RNA (1)...(19): siRNA sense strand
uuacuugauggacaguuua

SEQ ID NO: 1216459 - RNA, 19 nt, Homo sapiens
  misc_RNA (1)...(19): siRNA sense strand
acuaccaugcuaacaaaua

SEQ ID NO: 1216460 - RNA, 19 nt, Homo sapiens
  misc_RNA (1)...(19): siRNA sense strand
aauacuuccuuucaugugu

SEQ ID NO: 1216461 - RNA, 19 nt, Homo sapiens
  misc_RNA (1)...(19): siRNA sense strand
agaauucucccucuguugu

SEQ ID NO: 1216462 - RNA, 19 nt, Homo sapiens
  misc_RNA (1)...(19): siRNA sense strand
aggcaaaccaauucuauuc

SEQ ID NO: 1216463 - RNA, 19 nt, Homo sapiens
  misc_RNA (1)...(19): siRNA sense strand
gcaaacuugggaguggaua

SEQ ID NO: 1216464 - RNA, 19 nt, Homo sapiens
  misc_RNA (1)...(19): siRNA sense strand
gaccauaugaaucuagaag

SEQ ID NO: 1216465 - RNA, 19 nt, Homo sapiens
  misc_RNA (1)...(19): siRNA sense strand
gauggacaguuuaaaaucu

SEQ ID NO: 1216466 - RNA, 19 nt, Homo sapiens
  misc_RNA (1)...(19): siRNA sense strand
aacugaaacuaccaugcua

SEQ ID NO: 1216467 - RNA, 19 nt, Homo sapiens
  misc_RNA (1)...(19): siRNA sense strand
cuggauccaugaccauaug

SEQ ID NO: 1216468 - RNA, 19 nt, Homo sapiens
  misc_RNA (1)...(19): siRNA sense strand
ugaacagucacacuuggaa

SEQ ID NO: 1216469 - RNA, 19 nt, Homo sapiens
  misc_RNA (1)...(19): siRNA sense strand
gcacuuuauuauguaguac

SEQ ID NO: 1216470 - RNA, 19 nt, Homo sapiens
  misc_RNA (1)...(19): siRNA sense strand
cagucaauuuccaaugaug

SEQ ID NO: 1216471 - RNA, 19 nt, Homo sapiens
  misc_RNA (1)...(19): siRNA sense strand
gacauaaagaauggaagaa

SEQ ID NO: 1216472 - RNA, 19 nt, Homo sapiens
  misc_RNA (1)...(19): siRNA sense strand
uacuuccuuucauguguua

SEQ ID NO: 1216473 - RNA, 19 nt, Homo sapiens
  misc_RNA (1)...(19): siRNA sense strand
auacuuccuuucauguguu

SEQ ID NO: 1216474 - RNA, 19 nt, Homo sapiens
  misc_RNA (1)...(19): siRNA sense strand
acagucaauuuccaaugau

SEQ ID NO: 1216475 - RNA, 19 nt, Homo sapiens
  misc_RNA (1)...(19): siRNA sense strand
caauuuccaaugaugucua

SEQ ID NO: 1216476 - RNA, 19 nt, Homo sapiens
  misc_RNA (1)...(19): siRNA sense strand
ggaaauacgugacaaauua

SEQ ID NO: 1216477 - RNA, 19 nt, Homo sapiens
  misc_RNA (1)...(19): siRNA sense strand
ccaaagaacugcaaacuug

SEQ ID NO: 1216478 - RNA, 19 nt, Homo sapiens
  misc_RNA (1)...(19): siRNA sense strand
gaauguaaccugaaucuaa

SEQ ID NO: 1216479 - RNA, 19 nt, Homo sapiens
  misc_RNA (1)...(19): siRNA sense strand
ggaacagucuaccaugaua

SEQ ID NO: 1216480 - RNA, 19 nt, Homo sapiens
  misc_RNA (1)...(19): siRNA sense strand
uagcauaccuuccuuagug

SEQ ID NO: 1216481 - RNA, 19 nt, Homo sapiens
  misc_RNA (1)...(19): siRNA sense strand
gcaaaccaauucuauucuu

SEQ ID NO: 1216482 - RNA, 19 nt, Homo sapiens
  misc_RNA (1)...(19): siRNA sense strand
gaggaacagucuaccauga

SEQ ID NO: 1216483 - RNA, 19 nt, Homo sapiens
  misc_RNA (1)...(19): siRNA sense strand
gauaaucacauucaccuaa

SEQ ID NO: 1216484 - RNA, 19 nt, Homo sapiens
  misc_RNA (1)...(19): siRNA sense strand
gaaacuaccaugcuaacaa

SEQ ID NO: 1216485 - RNA, 19 nt, Homo sapiens
  misc_RNA (1)...(19): siRNA sense strand
aaacuaccaugcuaacaaa

SEQ ID NO: 1216486 - RNA, 19 nt, Homo sapiens
  misc_RNA (1)...(19): siRNA sense strand
ggacguucuugucuucuuu

SEQ ID NO: 1216487 - RNA, 19 nt, Homo sapiens
  misc_RNA (1)...(19): siRNA sense strand
guucuugucuucuuugcua

SEQ ID NO: 1216488 - RNA, 19 nt, Homo sapiens
  misc_RNA (1)...(19): siRNA sense strand
ccacaagaccacaaacuaa

SEQ ID NO: 1216489 - RNA, 19 nt, Homo sapiens
  misc_RNA (1)...(19): siRNA sense strand
gaaggcaaaccaauucuau

SEQ ID NO: 1216490 - RNA, 19 nt, Homo sapiens
  misc_RNA (1)...(19): siRNA sense strand
ccauugcacuuuauuaugu

SEQ ID NO: 1216491 - RNA, 19 nt, Homo sapiens
  misc_RNA (1)...(19): siRNA sense strand
uaaccugaaucuaaugaga

SEQ ID NO: 1216492 - RNA, 19 nt, Homo sapiens
  misc_RNA (1)...(19): siRNA sense strand
gaccacaaacuaaacagua

SEQ ID NO: 1216493 - RNA, 19 nt, Homo sapiens
  misc_RNA (1)...(19): siRNA sense strand
gaucauugguugccauugg

SEQ ID NO: 1216494 - RNA, 19 nt, Homo sapiens
  misc_RNA (1)...(19): siRNA sense strand
uaauaaacccaacggauga

SEQ ID NO: 1216495 - RNA, 19 nt, Homo sapiens
  misc_RNA (1)...(19): siRNA sense strand
uacagucaauuuccaauga

SEQ ID NO: 1216496 - RNA, 19 nt, Homo sapiens
  misc_RNA (1)...(19): siRNA sense strand
aauggaauauucucuguga

SEQ ID NO: 1216497 - RNA, 19 nt, Homo sapiens
  misc_RNA (1)...(19): siRNA sense strand
cagucacacuuggaaauua

SEQ ID NO: 1216498 - RNA, 19 nt, Homo sapiens
  misc_RNA (1)...(19): siRNA sense strand
cuaccaugcuaacaaauau

SEQ ID NO: 1216499 - RNA, 19 nt, Homo sapiens
  misc_RNA (1)...(19): siRNA sense strand
gaacagucacacuuggaaa

SEQ ID NO: 1216500 - RNA, 19 nt, Homo sapiens
  misc_RNA (1)...(19): siRNA sense strand
ugaagcaccugaucauugg

SEQ ID NO: 1216501 - RNA, 19 nt, Homo sapiens
  misc_RNA (1)...(19): siRNA sense strand
gaugggacguucuugucuu

SEQ ID NO: 1216502 - RNA, 19 nt, Homo sapiens
  misc_RNA (1)...(19): siRNA sense strand
gaacagucuaccaugauau

SEQ ID NO: 1216503 - RNA, 19 nt, Homo sapiens
  misc_RNA (1)...(19): siRNA sense strand
caagggaucaggagcaaug

SEQ ID NO: 1216504 - RNA, 19 nt, Homo sapiens
  misc_RNA (1)...(19): siRNA sense strand
agucacacuuggaaauuaa

SEQ ID NO: 1216505 - RNA, 19 nt, Homo sapiens
  misc_RNA (1)...(19): siRNA sense strand
guaauugguaggcaucaaa

SEQ ID NO: 1216506 - RNA, 19 nt, Homo sapiens
  misc_RNA (1)...(19): siRNA sense strand
ucauagacauaaagaaugg

SEQ ID NO: 1216507 - RNA, 19 nt, Homo sapiens
  misc_RNA (1)...(19): siRNA sense strand
gaauucucccucuguugua

SEQ ID NO: 1216508 - RNA, 19 nt, Homo sapiens
  misc_RNA (1)...(19): siRNA sense strand
uagcaaagccaaagaacug

SEQ ID NO: 1216509 - RNA, 19 nt, Homo sapiens
  misc_RNA (1)...(19): siRNA sense strand
gauuugaccuuuuacuuga

SEQ ID NO: 1216510 - RNA, 19 nt, Homo sapiens
  misc_RNA (1)...(19): siRNA sense strand
gagagaagaagguauaaaa

SEQ ID NO: 1216511 - RNA, 19 nt, Homo sapiens
  misc_RNA (1)...(19): siRNA sense strand
aaugagagaagaagguaua

SEQ ID NO: 1216512 - RNA, 19 nt, Homo sapiens
  misc_RNA (1)...(19): siRNA sense strand
cacaagaccacaaacuaaa

SEQ ID NO: 1216513 - RNA, 19 nt, Homo sapiens
  misc_RNA (1)...(19): siRNA sense strand
ggaauauucucugugaaaa

SEQ ID NO: 1216514 - RNA, 19 nt, Homo sapiens
  misc_RNA (1)...(19): siRNA sense strand
caaacuaaacaguaaaugg

SEQ ID NO: 1216515 - RNA, 19 nt, Homo sapiens
  misc_RNA (1)...(19): siRNA sense strand
cuaucaccauugcacuuua

SEQ ID NO: 1216516 - RNA, 19 nt, Homo sapiens
  misc_RNA (1)...(19): siRNA sense strand
caagucuuauuggcaguaa

SEQ ID NO: 1216517 - RNA, 19 nt, Homo sapiens
  misc_RNA (1)...(19): siRNA sense strand
aaacuugggaguggauaua

SEQ ID NO: 1216518 - RNA, 19 nt, Homo sapiens
  misc_RNA (1)...(19): siRNA sense strand
uaucaccauugcacuuuau

SEQ ID NO: 1216519 - RNA, 19 nt, Homo sapiens
  misc_RNA (1)...(19): siRNA sense strand
accacaaacuaaacaguaa

SEQ ID NO: 1216520 - RNA, 19 nt, Homo sapiens
  misc_RNA (1)...(19): siRNA sense strand
caacggaugagacacuguu

SEQ ID NO: 1216521 - RNA, 19 nt, Homo sapiens
  misc_RNA (1)...(19): siRNA sense strand
aagaauugcuuccaguuac

SEQ ID NO: 1216522 - RNA, 19 nt, Homo sapiens
  misc_RNA (1)...(19): siRNA sense strand
ucaccauugcacuuuauua

SEQ ID NO: 1216523 - RNA, 19 nt, Homo sapiens
  misc_RNA (1)...(19): siRNA sense strand
uggaauauucucugugaaa

SEQ ID NO: 1216524 - RNA, 19 nt, Homo sapiens
  misc_RNA (1)...(19): siRNA sense strand
gaaaaggaucccacucuga

SEQ ID NO: 1216525 - RNA, 19 nt, Homo sapiens
  misc_RNA (1)...(19): siRNA sense strand
cuagaaggcaaaccaauuc

SEQ ID NO: 1216526 - RNA, 19 nt, Homo sapiens
  misc_RNA (1)...(19): siRNA sense strand
ccacaaacuaaacaguaaa

SEQ ID NO: 1216527 - RNA, 19 nt, Homo sapiens
  misc_RNA (1)...(19): siRNA sense strand
ccugugaaguacuaaugaa

SEQ ID NO: 1216528 - RNA, 19 nt, Homo sapiens
  misc_RNA (1)...(19): siRNA sense strand
gcuaaagagcccuuaccaa

SEQ ID NO: 1216529 - RNA, 19 nt, Homo sapiens
  misc_RNA (1)...(19): siRNA sense strand
ggaauguaaccugaaucua

SEQ ID NO: 1216530 - RNA, 19 nt, Homo sapiens
  misc_RNA (1)...(19): siRNA sense strand
uaaauagcaaagccaaaga

SEQ ID NO: 1216531 - RNA, 19 nt, Homo sapiens
  misc_RNA (1)...(19): siRNA sense strand
gugaaguacuaaugaaugc

SEQ ID NO: 1216532 - RNA, 19 nt, Homo sapiens
  misc_RNA (1)...(19): siRNA sense strand
guacugaugggacguucuu

SEQ ID NO: 1216533 - RNA, 19 nt, Homo sapiens
  misc_RNA (1)...(19): siRNA sense strand
caccauugcacuuuauuau

SEQ ID NO: 1216534 - RNA, 19 nt, Homo sapiens
  misc_RNA (1)...(19): siRNA sense strand
gggacguucuugucuucuu

SEQ ID NO: 1216535 - RNA, 19 nt, Homo sapiens
  misc_RNA (1)...(19): siRNA sense strand
agacauaaagaauggaaga

SEQ ID NO: 1216536 - RNA, 19 nt, Homo sapiens
  misc_RNA (1)...(19): siRNA sense strand
uauaugaacagucacacuu

SEQ ID NO: 1216537 - RNA, 19 nt, Homo sapiens
  misc_RNA (1)...(19): siRNA sense strand
gccaaagaacugcaaacuu

SEQ ID NO: 1216538 - RNA, 19 nt, Homo sapiens
  misc_RNA (1)...(19): siRNA sense strand
ucugaccugugaaguacua

SEQ ID NO: 1216539 - RNA, 19 nt, Homo sapiens
  misc_RNA (1)...(19): siRNA sense strand
ucuagaaggcaaaccaauu

SEQ ID NO: 1216540 - RNA, 19 nt, Homo sapiens
  misc_RNA (1)...(19): siRNA sense strand
uagaacauguccacaagac

SEQ ID NO: 1216541 - RNA, 19 nt, Homo sapiens
  misc_RNA (1)...(19): siRNA sense strand
aaugaaugcuguugcuaca

SEQ ID NO: 1216542 - RNA, 19 nt, Homo sapiens
  misc_RNA (1)...(19): siRNA sense strand
caacugaaacuaccaugcu

SEQ ID NO: 1216543 - RNA, 19 nt, Homo sapiens
  misc_RNA (1)...(19): siRNA sense strand
uggaaauacgugacaaauu

SEQ ID NO: 1216544 - RNA, 19 nt, Homo sapiens
  misc_RNA (1)...(19): siRNA sense strand
gaaucuaaugagagaagaa

SEQ ID NO: 1216545 - RNA, 19 nt, Homo sapiens
  misc_RNA (1)...(19): siRNA sense strand
caagaccacaaacuaaaca

SEQ ID NO: 1216546 - RNA, 19 nt, Homo sapiens
  misc_RNA (1)...(19): siRNA sense strand
guacuaaugaaugcuguug

SEQ ID NO: 1216547 - RNA, 19 nt, Homo sapiens
  misc_RNA (1)...(19): siRNA sense strand
ugacuuucuuuacaaccaa

SEQ ID NO: 1216548 - RNA, 19 nt, Homo sapiens
  misc_RNA (1)...(19): siRNA sense strand
gauccaugaccauaugaau

SEQ ID NO: 1216549 - RNA, 19 nt, Homo sapiens
  misc_RNA (1)...(19): siRNA sense strand
cuaaugagagaagaaggua

SEQ ID NO: 1216550 - RNA, 19 nt, Homo sapiens
  misc_RNA (1)...(19): siRNA sense strand
cuuagaacauguccacaag

SEQ ID NO: 1216551 - RNA, 19 nt, Homo sapiens
  misc_RNA (1)...(19): siRNA sense strand
uugaagcaccugaucauug

SEQ ID NO: 1216552 - RNA, 19 nt, Homo sapiens
  misc_RNA (1)...(19): siRNA sense strand
ggaguggauauauggcaaa

SEQ ID NO: 1216553 - RNA, 19 nt, Homo sapiens
  misc_RNA (1)...(19): siRNA sense strand
gaaucuagaaggcaaacca

SEQ ID NO: 1216554 - RNA, 19 nt, Homo sapiens
  misc_RNA (1)...(19): siRNA sense strand
aaacuggcucggagaagaa

SEQ ID NO: 1216555 - RNA, 19 nt, Homo sapiens
  misc_RNA (1)...(19): siRNA sense strand
uuuacuugauggacaguuu

SEQ ID NO: 1216556 - RNA, 19 nt, Homo sapiens
  misc_RNA (1)...(19): siRNA sense strand
aaauagcaaagccaaagaa

SEQ ID NO: 1216557 - RNA, 19 nt, Homo sapiens
  misc_RNA (1)...(19): siRNA sense strand
gaccugugaaguacuaaug

SEQ ID NO: 1216558 - RNA, 19 nt, Homo sapiens
  misc_RNA (1)...(19): siRNA sense strand
uuacuugauggacaguuua

SEQ ID NO: 1216559 - RNA, 19 nt, Homo sapiens
  misc_RNA (1)...(19): siRNA sense strand
acuaccaugcuaacaaaua

SEQ ID NO: 1216560 - RNA, 19 nt, Homo sapiens
  misc_RNA (1)...(19): siRNA sense strand
aauacuuccuuucaugugu

SEQ ID NO: 1216561 - RNA, 19 nt, Homo sapiens
  misc_RNA (1)...(19): siRNA sense strand
agaauucucccucuguugu

SEQ ID NO: 1216562 - RNA, 19 nt, Homo sapiens
  misc_RNA (1)...(19): siRNA sense strand
aggcaaaccaauucuauuc

SEQ ID NO: 1216563 - RNA, 19 nt, Homo sapiens
  misc_RNA (1)...(19): siRNA sense strand
gcaaacuugggaguggaua

SEQ ID NO: 1216564 - RNA, 19 nt, Homo sapiens
  misc_RNA (1)...(19): siRNA sense strand
gaccauaugaaucuagaag

SEQ ID NO: 1216565 - RNA, 19 nt, Homo sapiens
  misc_RNA (1)...(19): siRNA sense strand
gauggacaguuuaaaaucu

SEQ ID NO: 1216566 - RNA, 19 nt, Homo sapiens
  misc_RNA (1)...(19): siRNA sense strand
aacugaaacuaccaugcua

SEQ ID NO: 1216567 - RNA, 19 nt, Homo sapiens
  misc_RNA (1)...(19): siRNA sense strand
cuggauccaugaccauaug

SEQ ID NO: 1216568 - RNA, 19 nt, Homo sapiens
  misc_RNA (1)...(19): siRNA sense strand
ugaacagucacacuuggaa

SEQ ID NO: 1216569 - RNA, 19 nt, Homo sapiens
  misc_RNA (1)...(19): siRNA sense strand
gcacuuuauuauguaguac

SEQ ID NO: 1216570 - RNA, 19 nt, Homo sapiens
  misc_RNA (1)...(19): siRNA sense strand
cagucaauuuccaaugaug

SEQ ID NO: 1216571 - RNA, 19 nt, Homo sapiens
  misc_RNA (1)...(19): siRNA sense strand
gacauaaagaauggaagaa

SEQ ID NO: 1216572 - RNA, 19 nt, Homo sapiens
  misc_RNA (1)...(19): siRNA sense strand
uacuuccuuucauguguua

SEQ ID NO: 1216573 - RNA, 19 nt, Homo sapiens
  misc_RNA (1)...(19): siRNA sense strand
auacuuccuuucauguguu

SEQ ID NO: 1216574 - RNA, 19 nt, Homo sapiens
  misc_RNA (1)...(19): siRNA sense strand
acagucaauuuccaaugau

SEQ ID NO: 1216575 - RNA, 19 nt, Homo sapiens
  misc_RNA (1)...(19): siRNA sense strand
caauuuccaaugaugucua

SEQ ID NO: 1216576 - RNA, 19 nt, Homo sapiens
  misc_RNA (1)...(19): siRNA sense strand
ggaaauacgugacaaauua

SEQ ID NO: 1216577 - RNA, 19 nt, Homo sapiens
  misc_RNA (1)...(19): siRNA sense strand
ccaaagaacugcaaacuug

SEQ ID NO: 1216578 - RNA, 19 nt, Homo sapiens
  misc_RNA (1)...(19): siRNA sense strand
gaauguaaccugaaucuaa

SEQ ID NO: 1216579 - RNA, 19 nt, Homo sapiens
  misc_RNA (1)...(19): siRNA sense strand
ggaacagucuaccaugaua

SEQ ID NO: 1216580 - RNA, 19 nt, Homo sapiens
  misc_RNA (1)...(19): siRNA sense strand
uagcauaccuuccuuagug

SEQ ID NO: 1216581 - RNA, 19 nt, Homo sapiens
  misc_RNA (1)...(19): siRNA sense strand
gcaaaccaauucuauucuu

SEQ ID NO: 1216582 - RNA, 19 nt, Homo sapiens
  misc_RNA (1)...(19): siRNA sense strand
gaggaacagucuaccauga

SEQ ID NO: 1216583 - RNA, 19 nt, Homo sapiens
  misc_RNA (1)...(19): siRNA sense strand
gauaaucacauucaccuaa

SEQ ID NO: 1216584 - RNA, 19 nt, Homo sapiens
  misc_RNA (1)...(19): siRNA sense strand
gaaacuaccaugcuaacaa

SEQ ID NO: 1216585 - RNA, 19 nt, Homo sapiens
  misc_RNA (1)...(19): siRNA sense strand
aaacuaccaugcuaacaaa

SEQ ID NO: 1216586 - RNA, 19 nt, Homo sapiens
  misc_RNA (1)...(19): siRNA sense strand
ggacguucuugucuucuuu

SEQ ID NO: 1216587 - RNA, 19 nt, Homo sapiens
  misc_RNA (1)...(19): siRNA sense strand
guucuugucuucuuugcua

SEQ ID NO: 1216588 - RNA, 19 nt, Homo sapiens
  misc_RNA (1)...(19): siRNA sense strand
ccacaagaccacaaacuaa

SEQ ID NO: 1216589 - RNA, 19 nt, Homo sapiens
  misc_RNA (1)...(19): siRNA sense strand
gaaggcaaaccaauucuau

SEQ ID NO: 1216590 - RNA, 19 nt, Homo sapiens
  misc_RNA (1)...(19): siRNA sense strand
ccauugcacuuuauuaugu

SEQ ID NO: 1216591 - RNA, 19 nt, Homo sapiens
  misc_RNA (1)...(19): siRNA sense strand
uaaccugaaucuaaugaga

SEQ ID NO: 1216592 - RNA, 19 nt, Homo sapiens
  misc_RNA (1)...(19): siRNA sense strand
gaccacaaacuaaacagua

SEQ ID NO: 1216593 - RNA, 19 nt, Homo sapiens
  misc_RNA (1)...(19): siRNA sense strand
gaucauugguugccauugg

SEQ ID NO: 1216594 - RNA, 19 nt, Homo sapiens
  misc_RNA (1)...(19): siRNA sense strand
uaauaaacccaacggauga

SEQ ID NO: 1216595 - RNA, 19 nt, Homo sapiens
  misc_RNA (1)...(19): siRNA sense strand
uacagucaauuuccaauga

SEQ ID NO: 1216596 - RNA, 19 nt, Homo sapiens
  misc_RNA (1)...(19): siRNA sense strand
aauggaauauucucuguga

SEQ ID NO: 1216597 - RNA, 19 nt, Homo sapiens
  misc_RNA (1)...(19): siRNA sense strand
cagucacacuuggaaauua

SEQ ID NO: 1216598 - RNA, 19 nt, Homo sapiens
  misc_RNA (1)...(19): siRNA sense strand
cuaccaugcuaacaaauau

SEQ ID NO: 1216599 - RNA, 19 nt, Homo sapiens
  misc_RNA (1)...(19): siRNA sense strand
gaacagucacacuuggaaa

SEQ ID NO: 1216600 - RNA, 19 nt, Homo sapiens
  misc_RNA (1)...(19): siRNA sense strand
ugaagcaccugaucauugg

SEQ ID NO: 1216601 - RNA, 19 nt, Homo sapiens
  misc_RNA (1)...(19): siRNA sense strand
gaugggacguucuugucuu

SEQ ID NO: 1216602 - RNA, 19 nt, Homo sapiens
  misc_RNA (1)...(19): siRNA sense strand
gaacagucuaccaugauau

SEQ ID NO: 1216603 - RNA, 19 nt, Homo sapiens
  misc_RNA (1)...(19): siRNA sense strand
caagggaucaggagcaaug

SEQ ID NO: 1216604 - RNA, 19 nt, Homo sapiens
  misc_RNA (1)...(19): siRNA sense strand
agucacacuuggaaauuaa

SEQ ID NO: 1216605 - RNA, 19 nt, Homo sapiens
  misc_RNA (1)...(19): siRNA sense strand
guaauugguaggcaucaaa

SEQ ID NO: 1216606 - RNA, 19 nt, Homo sapiens
  misc_RNA (1)...(19): siRNA sense strand
ucauagacauaaagaaugg

SEQ ID NO: 1216607 - RNA, 19 nt, Homo sapiens
  misc_RNA (1)...(19): siRNA sense strand
gaauucucccucuguugua

SEQ ID NO: 1216608 - RNA, 19 nt, Homo sapiens
  misc_RNA (1)...(19): siRNA sense strand
uagcaaagccaaagaacug

SEQ ID NO: 1216609 - RNA, 19 nt, Homo sapiens
  misc_RNA (1)...(19): siRNA sense strand
gauuugaccuuuuacuuga

SEQ ID NO: 1216610 - RNA, 19 nt, Homo sapiens
  misc_RNA (1)...(19): siRNA sense strand
gagagaagaagguauaaaa

SEQ ID NO: 1216611 - RNA, 19 nt, Homo sapiens
  misc_RNA (1)...(19): siRNA sense strand
aaugagagaagaagguaua

SEQ ID NO: 1216612 - RNA, 19 nt, Homo sapiens
  misc_RNA (1)...(19): siRNA sense strand
cacaagaccacaaacuaaa

SEQ ID NO: 1216613 - RNA, 19 nt, Homo sapiens
  misc_RNA (1)...(19): siRNA sense strand
ggaauauucucugugaaaa

SEQ ID NO: 1216614 - RNA, 19 nt, Homo sapiens
  misc_RNA (1)...(19): siRNA sense strand
caaacuaaacaguaaaugg

SEQ ID NO: 1216615 - RNA, 19 nt, Homo sapiens
  misc_RNA (1)...(19): siRNA sense strand
cuaucaccauugcacuuua

SEQ ID NO: 1216616 - RNA, 19 nt, Homo sapiens
  misc_RNA (1)...(19): siRNA sense strand
caagucuuauuggcaguaa

SEQ ID NO: 1216617 - RNA, 19 nt, Homo sapiens
  misc_RNA (1)...(19): siRNA sense strand
aaacuugggaguggauaua

SEQ ID NO: 1216618 - RNA, 19 nt, Homo sapiens
  misc_RNA (1)...(19): siRNA sense strand
uaucaccauugcacuuuau

SEQ ID NO: 1216619 - RNA, 19 nt, Homo sapiens
  misc_RNA (1)...(19): siRNA sense strand
accacaaacuaaacaguaa

SEQ ID NO: 1216620 - RNA, 19 nt, Homo sapiens
  misc_RNA (1)...(19): siRNA sense strand
caacggaugagacacuguu

SEQ ID NO: 1216621 - RNA, 19 nt, Homo sapiens
  misc_RNA (1)...(19): siRNA sense strand
aagaauugcuuccaguuac

SEQ ID NO: 1216622 - RNA, 19 nt, Homo sapiens
  misc_RNA (1)...(19): siRNA sense strand
ucaccauugcacuuuauua

SEQ ID NO: 1216623 - RNA, 19 nt, Homo sapiens
  misc_RNA (1)...(19): siRNA sense strand
uggaauauucucugugaaa

SEQ ID NO: 1216624 - RNA, 19 nt, Homo sapiens
  misc_RNA (1)...(19): siRNA sense strand
gaaaaggaucccacucuga

SEQ ID NO: 1216625 - RNA, 19 nt, Homo sapiens
  misc_RNA (1)...(19): siRNA sense strand
cuagaaggcaaaccaauuc

SEQ ID NO: 1216626 - RNA, 19 nt, Homo sapiens
  misc_RNA (1)...(19): siRNA sense strand
ccacaaacuaaacaguaaa

SEQ ID NO: 1216627 - RNA, 19 nt, Homo sapiens
  misc_RNA (1)...(19): siRNA sense strand
ccugugaaguacuaaugaa

SEQ ID NO: 1216628 - RNA, 19 nt, Homo sapiens
  misc_RNA (1)...(19): siRNA sense strand
gcuaaagagcccuuaccaa

SEQ ID NO: 1216629 - RNA, 19 nt, Homo sapiens
  misc_RNA (1)...(19): siRNA sense strand
ggaauguaaccugaaucua

SEQ ID NO: 1216630 - RNA, 19 nt, Homo sapiens
  misc_RNA (1)...(19): siRNA sense strand
uaaauagcaaagccaaaga

SEQ ID NO: 1216631 - RNA, 19 nt, Homo sapiens
  misc_RNA (1)...(19): siRNA sense strand
gugaaguacuaaugaaugc

SEQ ID NO: 1216632 - RNA, 19 nt, Homo sapiens
  misc_RNA (1)...(19): siRNA sense strand
guacugaugggacguucuu

SEQ ID NO: 1216633 - RNA, 19 nt, Homo sapiens
  misc_RNA (1)...(19): siRNA sense strand
caccauugcacuuuauuau

SEQ ID NO: 1216634 - RNA, 19 nt, Homo sapiens
  misc_RNA (1)...(19): siRNA sense strand
gggacguucuugucuucuu

SEQ ID NO: 1216635 - RNA, 19 nt, Homo sapiens
  misc_RNA (1)...(19): siRNA sense strand
agacauaaagaauggaaga

SEQ ID NO: 1216636 - RNA, 19 nt, Homo sapiens
  misc_RNA (1)...(19): siRNA sense strand
uauaugaacagucacacuu

SEQ ID NO: 1216637 - RNA, 19 nt, Homo sapiens
  misc_RNA (1)...(19): siRNA sense strand
gccaaagaacugcaaacuu

SEQ ID NO: 1216638 - RNA, 19 nt, Homo sapiens
  misc_RNA (1)...(19): siRNA sense strand
ucugaccugugaaguacua

SEQ ID NO: 1216639 - RNA, 19 nt, Homo sapiens
  misc_RNA (1)...(19): siRNA sense strand
ucuagaaggcaaaccaauu

SEQ ID NO: 1216640 - RNA, 19 nt, Homo sapiens
  misc_RNA (1)...(19): siRNA sense strand
uagaacauguccacaagac

SEQ ID NO: 1216641 - RNA, 19 nt, Homo sapiens
  misc_RNA (1)...(19): siRNA sense strand
aaugaaugcuguugcuaca

SEQ ID NO: 1216642 - RNA, 19 nt, Homo sapiens
  misc_RNA (1)...(19): siRNA sense strand
caacugaaacuaccaugcu

SEQ ID NO: 1216643 - RNA, 19 nt, Homo sapiens
  misc_RNA (1)...(19): siRNA sense strand
uggaaauacgugacaaauu

SEQ ID NO: 1216644 - RNA, 19 nt, Homo sapiens
  misc_RNA (1)...(19): siRNA sense strand
gaaucuaaugagagaagaa

SEQ ID NO: 1216645 - RNA, 19 nt, Homo sapiens
  misc_RNA (1)...(19): siRNA sense strand
caagaccacaaacuaaaca

SEQ ID NO: 1216646 - RNA, 19 nt, Homo sapiens
  misc_RNA (1)...(19): siRNA sense strand
guacuaaugaaugcuguug

SEQ ID NO: 1216647 - RNA, 19 nt, Homo sapiens
  misc_RNA (1)...(19): siRNA sense strand
ugacuuucuuuacaaccaa

SEQ ID NO: 1216648 - RNA, 19 nt, Homo sapiens
  misc_RNA (1)...(19): siRNA sense strand
gauccaugaccauaugaau

SEQ ID NO: 1216649 - RNA, 19 nt, Homo sapiens
  misc_RNA (1)...(19): siRNA sense strand
cuaaugagagaagaaggua

SEQ ID NO: 1216650 - RNA, 19 nt, Homo sapiens
  misc_RNA (1)...(19): siRNA sense strand
cuuagaacauguccacaag

SEQ ID NO: 1216651 - RNA, 19 nt, Homo sapiens
  misc_RNA (1)...(19): siRNA sense strand
uugaagcaccugaucauug

SEQ ID NO: 1216652 - RNA, 19 nt, Homo sapiens
  misc_RNA (1)...(19): siRNA sense strand
ggaguggauauauggcaaa

SEQ ID NO: 1216653 - RNA, 19 nt, Homo sapiens
  misc_RNA (1)...(19): siRNA sense strand
gaaucuagaaggcaaacca

SEQ ID NO: 1216654 - RNA, 19 nt, Homo sapiens
  misc_RNA (1)...(19): siRNA sense strand
aaacuggcucggagaagaa

SEQ ID NO: 1216655 - RNA, 19 nt, Homo sapiens
  misc_RNA (1)...(19): siRNA sense strand
uuuacuugauggacaguuu

SEQ ID NO: 1216656 - RNA, 19 nt, Homo sapiens
  misc_RNA (1)...(19): siRNA sense strand
aaauagcaaagccaaagaa

SEQ ID NO: 1216657 - RNA, 19 nt, Homo sapiens
  misc_RNA (1)...(19): siRNA sense strand
gaccugugaaguacuaaug

SEQ ID NO: 1216658 - RNA, 19 nt, Homo sapiens
  misc_RNA (1)...(19): siRNA sense strand
uuacuugauggacaguuua

SEQ ID NO: 1216659 - RNA, 19 nt, Homo sapiens
  misc_RNA (1)...(19): siRNA sense strand
acuaccaugcuaacaaaua

SEQ ID NO: 1216660 - RNA, 19 nt, Homo sapiens
  misc_RNA (1)...(19): siRNA sense strand
aauacuuccuuucaugugu

SEQ ID NO: 1216661 - RNA, 19 nt, Homo sapiens
  misc_RNA (1)...(19): siRNA sense strand
agaauucucccucuguugu

SEQ ID NO: 1216662 - RNA, 19 nt, Homo sapiens
  misc_RNA (1)...(19): siRNA sense strand
aggcaaaccaauucuauuc

SEQ ID NO: 1216663 - RNA, 19 nt, Homo sapiens
  misc_RNA (1)...(19): siRNA sense strand
gcaaacuugggaguggaua

SEQ ID NO: 1216664 - RNA, 19 nt, Homo sapiens
  misc_RNA (1)...(19): siRNA sense strand
gaccauaugaaucuagaag

SEQ ID NO: 1216665 - RNA, 19 nt, Homo sapiens
  misc_RNA (1)...(19): siRNA sense strand
gauggacaguuuaaaaucu

SEQ ID NO: 1216666 - RNA, 19 nt, Homo sapiens
  misc_RNA (1)...(19): siRNA sense strand
aacugaaacuaccaugcua

SEQ ID NO: 1216667 - RNA, 19 nt, Homo sapiens
  misc_RNA (1)...(19): siRNA sense strand
cuggauccaugaccauaug

SEQ ID NO: 1216668 - RNA, 19 nt, Homo sapiens
  misc_RNA (1)...(19): siRNA sense strand
ugaacagucacacuuggaa

SEQ ID NO: 1216669 - RNA, 19 nt, Homo sapiens
  misc_RNA (1)...(19): siRNA sense strand
gcacuuuauuauguaguac

SEQ ID NO: 1216670 - RNA, 19 nt, Homo sapiens
  misc_RNA (1)...(19): siRNA sense strand
cagucaauuuccaaugaug

SEQ ID NO: 1216671 - RNA, 19 nt, Homo sapiens
  misc_RNA (1)...(19): siRNA sense strand
gacauaaagaauggaagaa

SEQ ID NO: 1216672 - RNA, 19 nt, Homo sapiens
  misc_RNA (1)...(19): siRNA sense strand
uacuuccuuucauguguua

SEQ ID NO: 1216673 - RNA, 19 nt, Homo sapiens
  misc_RNA (1)...(19): siRNA sense strand
auacuuccuuucauguguu

SEQ ID NO: 1216674 - RNA, 19 nt, Homo sapiens
  misc_RNA (1)...(19): siRNA sense strand
acagucaauuuccaaugau

SEQ ID NO: 1216675 - RNA, 19 nt, Homo sapiens
  misc_RNA (1)...(19): siRNA sense strand
caauuuccaaugaugucua

SEQ ID NO: 1216676 - RNA, 19 nt, Homo sapiens
  misc_RNA (1)...(19): siRNA sense strand
ggaaauacgugacaaauua

SEQ ID NO: 1216677 - RNA, 19 nt, Homo sapiens
  misc_RNA (1)...(19): siRNA sense strand
ccaaagaacugcaaacuug

SEQ ID NO: 1216678 - RNA, 19 nt, Homo sapiens
  misc_RNA (1)...(19): siRNA sense strand
gaauguaaccugaaucuaa

SEQ ID NO: 1216679 - RNA, 19 nt, Homo sapiens
  misc_RNA (1)...(19): siRNA sense strand
ggaacagucuaccaugaua

SEQ ID NO: 1216680 - RNA, 19 nt, Homo sapiens
  misc_RNA (1)...(19): siRNA sense strand
uagcauaccuuccuuagug

SEQ ID NO: 1216681 - RNA, 19 nt, Homo sapiens
  misc_RNA (1)...(19): siRNA sense strand
gcaaaccaauucuauucuu

SEQ ID NO: 1216682 - RNA, 19 nt, Homo sapiens
  misc_RNA (1)...(19): siRNA sense strand
gaggaacagucuaccauga

SEQ ID NO: 1216683 - RNA, 19 nt, Homo sapiens
  misc_RNA (1)...(19): siRNA sense strand
gauaaucacauucaccuaa

SEQ ID NO: 1216684 - RNA, 19 nt, Homo sapiens
  misc_RNA (1)...(19): siRNA sense strand
gaaacuaccaugcuaacaa

SEQ ID NO: 1216685 - RNA, 19 nt, Homo sapiens
  misc_RNA (1)...(19): siRNA sense strand
aaacuaccaugcuaacaaa

SEQ ID NO: 1216686 - RNA, 19 nt, Homo sapiens
  misc_RNA (1)...(19): siRNA sense strand
ggacguucuugucuucuuu

SEQ ID NO: 1216687 - RNA, 19 nt, Homo sapiens
  misc_RNA (1)...(19): siRNA sense strand
guucuugucuucuuugcua

SEQ ID NO: 1216688 - RNA, 19 nt, Homo sapiens
  misc_RNA (1)...(19): siRNA sense strand
ccacaagaccacaaacuaa

SEQ ID NO: 1216689 - RNA, 19 nt, Homo sapiens
  misc_RNA (1)...(19): siRNA sense strand
gaaggcaaaccaauucuau

SEQ ID NO: 1216690 - RNA, 19 nt, Homo sapiens
  misc_RNA (1)...(19): siRNA sense strand
ccauugcacuuuauuaugu

SEQ ID NO: 1216691 - RNA, 19 nt, Homo sapiens
  misc_RNA (1)...(19): siRNA sense strand
uaaccugaaucuaaugaga

SEQ ID NO: 1216692 - RNA, 19 nt, Homo sapiens
  misc_RNA (1)...(19): siRNA sense strand
gaccacaaacuaaacagua

SEQ ID NO: 1216693 - RNA, 19 nt, Homo sapiens
  misc_RNA (1)...(19): siRNA sense strand
gaucauugguugccauugg

SEQ ID NO: 1216694 - RNA, 19 nt, Homo sapiens
  misc_RNA (1)...(19): siRNA sense strand
uaauaaacccaacggauga

SEQ ID NO: 1216695 - RNA, 19 nt, Homo sapiens
  misc_RNA (1)...(19): siRNA sense strand
uacagucaauuuccaauga

SEQ ID NO: 1216696 - RNA, 19 nt, Homo sapiens
  misc_RNA (1)...(19): siRNA sense strand
aauggaauauucucuguga

SEQ ID NO: 1216697 - RNA, 19 nt, Homo sapiens
  misc_RNA (1)...(19): siRNA sense strand
cagucacacuuggaaauua

SEQ ID NO: 1216698 - RNA, 19 nt, Homo sapiens
  misc_RNA (1)...(19): siRNA sense strand
cuaccaugcuaacaaauau

SEQ ID NO: 1216699 - RNA, 19 nt, Homo sapiens
  misc_RNA (1)...(19): siRNA sense strand
gaacagucacacuuggaaa

SEQ ID NO: 1216700 - RNA, 19 nt, Homo sapiens
  misc_RNA (1)...(19): siRNA sense strand
ugaagcaccugaucauugg

SEQ ID NO: 1216701 - RNA, 19 nt, Homo sapiens
  misc_RNA (1)...(19): siRNA sense strand
gaugggacguucuugucuu

SEQ ID NO: 1216702 - RNA, 19 nt, Homo sapiens
  misc_RNA (1)...(19): siRNA sense strand
gaacagucuaccaugauau

SEQ ID NO: 1216703 - RNA, 19 nt, Homo sapiens
  misc_RNA (1)...(19): siRNA sense strand
caagggaucaggagcaaug

SEQ ID NO: 1216704 - RNA, 19 nt, Homo sapiens
  misc_RNA (1)...(19): siRNA sense strand
agucacacuuggaaauuaa

SEQ ID NO: 1216705 - RNA, 19 nt, Homo sapiens
  misc_RNA (1)...(19): siRNA sense strand
guaauugguaggcaucaaa

SEQ ID NO: 1216706 - RNA, 19 nt, Homo sapiens
  misc_RNA (1)...(19): siRNA sense strand
ucauagacauaaagaaugg

SEQ ID NO: 1216707 - RNA, 19 nt, Homo sapiens
  misc_RNA (1)...(19): siRNA sense strand
gaauucucccucuguugua

SEQ ID NO: 1216708 - RNA, 19 nt, Homo sapiens
  misc_RNA (1)...(19): siRNA sense strand
uagcaaagccaaagaacug

SEQ ID NO: 1216709 - RNA, 19 nt, Homo sapiens
  misc_RNA (1)...(19): siRNA sense strand
gauuugaccuuuuacuuga

SEQ ID NO: 1216710 - RNA, 19 nt, Homo sapiens
  misc_RNA (1)...(19): siRNA sense strand
gagagaagaagguauaaaa

SEQ ID NO: 1216711 - RNA, 19 nt, Homo sapiens
  misc_RNA (1)...(19): siRNA sense strand
aaugagagaagaagguaua

SEQ ID NO: 1216712 - RNA, 19 nt, Homo sapiens
  misc_RNA (1)...(19): siRNA sense strand
cacaagaccacaaacuaaa

SEQ ID NO: 1216713 - RNA, 19 nt, Homo sapiens
  misc_RNA (1)...(19): siRNA sense strand
ggaauauucucugugaaaa

SEQ ID NO: 1216714 - RNA, 19 nt, Homo sapiens
  misc_RNA (1)...(19): siRNA sense strand
caaacuaaacaguaaaugg

SEQ ID NO: 1216715 - RNA, 19 nt, Homo sapiens
  misc_RNA (1)...(19): siRNA sense strand
cuaucaccauugcacuuua

SEQ ID NO: 1216716 - RNA, 19 nt, Homo sapiens
  misc_RNA (1)...(19): siRNA sense strand
caagucuuauuggcaguaa

SEQ ID NO: 1216717 - RNA, 19 nt, Homo sapiens
  misc_RNA (1)...(19): siRNA sense strand
aaacuugggaguggauaua

SEQ ID NO: 1216718 - RNA, 19 nt, Homo sapiens
  misc_RNA (1)...(19): siRNA sense strand
uaucaccauugcacuuuau

SEQ ID NO: 1216719 - RNA, 19 nt, Homo sapiens
  misc_RNA (1)...(19): siRNA sense strand
accacaaacuaaacaguaa

SEQ ID NO: 1216720 - RNA, 19 nt, Homo sapiens
  misc_RNA (1)...(19): siRNA sense strand
caacggaugagacacuguu

SEQ ID NO: 1216721 - RNA, 19 nt, Homo sapiens
  misc_RNA (1)...(19): siRNA sense strand
aagaauugcuuccaguuac

SEQ ID NO: 1216722 - RNA, 19 nt, Homo sapiens
  misc_RNA (1)...(19): siRNA sense strand
ucaccauugcacuuuauua

SEQ ID NO: 1216723 - RNA, 19 nt, Homo sapiens
  misc_RNA (1)...(19): siRNA sense strand
uggaauauucucugugaaa

SEQ ID NO: 1216724 - RNA, 19 nt, Homo sapiens
  misc_RNA (1)...(19): siRNA sense strand
gaaaaggaucccacucuga

SEQ ID NO: 1216725 - RNA, 19 nt, Homo sapiens
  misc_RNA (1)...(19): siRNA sense strand
cuagaaggcaaaccaauuc

SEQ ID NO: 1216726 - RNA, 19 nt, Homo sapiens
  misc_RNA (1)...(19): siRNA sense strand
ccacaaacuaaacaguaaa

SEQ ID NO: 1216727 - RNA, 19 nt, Homo sapiens
  misc_RNA (1)...(19): siRNA sense strand
ccugugaaguacuaaugaa

SEQ ID NO: 1216728 - RNA, 19 nt, Homo sapiens
  misc_RNA (1)...(19): siRNA sense strand
gcuaaagagcccuuaccaa

SEQ ID NO: 1216729 - RNA, 19 nt, Homo sapiens
  misc_RNA (1)...(19): siRNA sense strand
ggaauguaaccugaaucua

SEQ ID NO: 1216730 - RNA, 19 nt, Homo sapiens
  misc_RNA (1)...(19): siRNA sense strand
uaaauagcaaagccaaaga

SEQ ID NO: 1216731 - RNA, 19 nt, Homo sapiens
  misc_RNA (1)...(19): siRNA sense strand
gugaaguacuaaugaaugc

SEQ ID NO: 1216732 - RNA, 19 nt, Homo sapiens
  misc_RNA (1)...(19): siRNA sense strand
guacugaugggacguucuu

SEQ ID NO: 1216733 - RNA, 19 nt, Homo sapiens
  misc_RNA (1)...(19): siRNA sense strand
caccauugcacuuuauuau

SEQ ID NO: 1216734 - RNA, 19 nt, Homo sapiens
  misc_RNA (1)...(19): siRNA sense strand
gggacguucuugucuucuu

SEQ ID NO: 1216735 - RNA, 19 nt, Homo sapiens
  misc_RNA (1)...(19): siRNA sense strand
agacauaaagaauggaaga

SEQ ID NO: 1216736 - RNA, 19 nt, Homo sapiens
  misc_RNA (1)...(19): siRNA sense strand
uauaugaacagucacacuu

SEQ ID NO: 1216737 - RNA, 19 nt, Homo sapiens
  misc_RNA (1)...(19): siRNA sense strand
gccaaagaacugcaaacuu

SEQ ID NO: 1216738 - RNA, 19 nt, Homo sapiens
  misc_RNA (1)...(19): siRNA sense strand
ucugaccugugaaguacua

SEQ ID NO: 1216739 - RNA, 19 nt, Homo sapiens
  misc_RNA (1)...(19): siRNA sense strand
ucuagaaggcaaaccaauu

SEQ ID NO: 1216740 - RNA, 19 nt, Homo sapiens
  misc_RNA (1)...(19): siRNA sense strand
uagaacauguccacaagac

SEQ ID NO: 1216741 - RNA, 19 nt, Homo sapiens
  misc_RNA (1)...(19): siRNA sense strand
aaugaaugcuguugcuaca

SEQ ID NO: 1216742 - RNA, 19 nt, Homo sapiens
  misc_RNA (1)...(19): siRNA sense strand
caacugaaacuaccaugcu

SEQ ID NO: 1216743 - RNA, 19 nt, Homo sapiens
  misc_RNA (1)...(19): siRNA sense strand
uggaaauacgugacaaauu

SEQ ID NO: 1216744 - RNA, 19 nt, Homo sapiens
  misc_RNA (1)...(19): siRNA sense strand
gaaucuaaugagagaagaa

SEQ ID NO: 1216745 - RNA, 19 nt, Homo sapiens
  misc_RNA (1)...(19): siRNA sense strand
caagaccacaaacuaaaca

SEQ ID NO: 1216746 - RNA, 19 nt, Homo sapiens
  misc_RNA (1)...(19): siRNA sense strand
guacuaaugaaugcuguug

SEQ ID NO: 1216747 - RNA, 19 nt, Homo sapiens
  misc_RNA (1)...(19): siRNA sense strand
ugacuuucuuuacaaccaa

SEQ ID NO: 1216748 - RNA, 19 nt, Homo sapiens
  misc_RNA (1)...(19): siRNA sense strand
gauccaugaccauaugaau

SEQ ID NO: 1216749 - RNA, 19 nt, Homo sapiens
  misc_RNA (1)...(19): siRNA sense strand
cuaaugagagaagaaggua

SEQ ID NO: 1216750 - RNA, 19 nt, Homo sapiens
  misc_RNA (1)...(19): siRNA sense strand
cuuagaacauguccacaag

SEQ ID NO: 1216751 - RNA, 19 nt, Homo sapiens
  misc_RNA (1)...(19): siRNA sense strand
uugaagcaccugaucauug

SEQ ID NO: 1216752 - RNA, 19 nt, Homo sapiens
  misc_RNA (1)...(19): siRNA sense strand
ggaguggauauauggcaaa

SEQ ID NO: 1216753 - RNA, 19 nt, Homo sapiens
  misc_RNA (1)...(19): siRNA sense strand
gaaucuagaaggcaaacca

SEQ ID NO: 1216754 - RNA, 19 nt, Homo sapiens
  misc_RNA (1)...(19): siRNA sense strand
aaacuggcucggagaagaa

SEQ ID NO: 1216755 - RNA, 19 nt, Homo sapiens
  misc_RNA (1)...(19): siRNA sense strand
uuuacuugauggacaguuu

SEQ ID NO: 1216756 - RNA, 19 nt, Homo sapiens
  misc_RNA (1)...(19): siRNA sense strand
aaauagcaaagccaaagaa

SEQ ID NO: 1216757 - RNA, 19 nt, Homo sapiens
  misc_RNA (1)...(19): siRNA sense strand
gaccugugaaguacuaaug

SEQ ID NO: 1216758 - RNA, 19 nt, Homo sapiens
  misc_RNA (1)...(19): siRNA sense strand
uuacuugauggacaguuua

SEQ ID NO: 1216759 - RNA, 19 nt, Homo sapiens
  misc_RNA (1)...(19): siRNA sense strand
acuaccaugcuaacaaaua

SEQ ID NO: 1216760 - RNA, 19 nt, Homo sapiens
  misc_RNA (1)...(19): siRNA sense strand
aauacuuccuuucaugugu

SEQ ID NO: 1216761 - RNA, 19 nt, Homo sapiens
  misc_RNA (1)...(19): siRNA sense strand
agaauucucccucuguugu

SEQ ID NO: 1216762 - RNA, 19 nt, Homo sapiens
  misc_RNA (1)...(19): siRNA sense strand
aggcaaaccaauucuauuc

SEQ ID NO: 1216763 - RNA, 19 nt, Homo sapiens
  misc_RNA (1)...(19): siRNA sense strand
gcaaacuugggaguggaua

SEQ ID NO: 1216764 - RNA, 19 nt, Homo sapiens
  misc_RNA (1)...(19): siRNA sense strand
gaccauaugaaucuagaag

SEQ ID NO: 1216765 - RNA, 19 nt, Homo sapiens
  misc_RNA (1)...(19): siRNA sense strand
gauggacaguuuaaaaucu

SEQ ID NO: 1216766 - RNA, 19 nt, Homo sapiens
  misc_RNA (1)...(19): siRNA sense strand
aacugaaacuaccaugcua

SEQ ID NO: 1216767 - RNA, 19 nt, Homo sapiens
  misc_RNA (1)...(19): siRNA sense strand
cuggauccaugaccauaug

SEQ ID NO: 1216768 - RNA, 19 nt, Homo sapiens
  misc_RNA (1)...(19): siRNA sense strand
ugaacagucacacuuggaa

SEQ ID NO: 1216769 - RNA, 19 nt, Homo sapiens
  misc_RNA (1)...(19): siRNA sense strand
gcacuuuauuauguaguac

SEQ ID NO: 1216770 - RNA, 19 nt, Homo sapiens
  misc_RNA (1)...(19): siRNA sense strand
cagucaauuuccaaugaug

SEQ ID NO: 1216771 - RNA, 19 nt, Homo sapiens
  misc_RNA (1)...(19): siRNA sense strand
gacauaaagaauggaagaa

SEQ ID NO: 1216772 - RNA, 19 nt, Homo sapiens
  misc_RNA (1)...(19): siRNA sense strand
uacuuccuuucauguguua

SEQ ID NO: 1216773 - RNA, 19 nt, Homo sapiens
  misc_RNA (1)...(19): siRNA sense strand
auacuuccuuucauguguu

SEQ ID NO: 1216774 - RNA, 19 nt, Homo sapiens
  misc_RNA (1)...(19): siRNA sense strand
acagucaauuuccaaugau

SEQ ID NO: 1216775 - RNA, 19 nt, Homo sapiens
  misc_RNA (1)...(19): siRNA sense strand
caauuuccaaugaugucua

SEQ ID NO: 1216776 - RNA, 19 nt, Homo sapiens
  misc_RNA (1)...(19): siRNA sense strand
ggaaauacgugacaaauua

SEQ ID NO: 1216777 - RNA, 19 nt, Homo sapiens
  misc_RNA (1)...(19): siRNA sense strand
ccaaagaacugcaaacuug

SEQ ID NO: 1216778 - RNA, 19 nt, Homo sapiens
  misc_RNA (1)...(19): siRNA sense strand
gaauguaaccugaaucuaa

SEQ ID NO: 1216779 - RNA, 19 nt, Homo sapiens
  misc_RNA (1)...(19): siRNA sense strand
ggaacagucuaccaugaua

SEQ ID NO: 1216780 - RNA, 19 nt, Homo sapiens
  misc_RNA (1)...(19): siRNA sense strand
uagcauaccuuccuuagug

SEQ ID NO: 1216781 - RNA, 19 nt, Homo sapiens
  misc_RNA (1)...(19): siRNA sense strand
gcaaaccaauucuauucuu

SEQ ID NO: 1216782 - RNA, 19 nt, Homo sapiens
  misc_RNA (1)...(19): siRNA sense strand
gaggaacagucuaccauga

SEQ ID NO: 1216783 - RNA, 19 nt, Homo sapiens
  misc_RNA (1)...(19): siRNA sense strand
gauaaucacauucaccuaa

SEQ ID NO: 1216784 - RNA, 19 nt, Homo sapiens
  misc_RNA (1)...(19): siRNA sense strand
gaaacuaccaugcuaacaa

SEQ ID NO: 1216785 - RNA, 19 nt, Homo sapiens
  misc_RNA (1)...(19): siRNA sense strand
aaacuaccaugcuaacaaa

SEQ ID NO: 1216786 - RNA, 19 nt, Homo sapiens
  misc_RNA (1)...(19): siRNA sense strand
ggacguucuugucuucuuu

SEQ ID NO: 1216787 - RNA, 19 nt, Homo sapiens
  misc_RNA (1)...(19): siRNA sense strand
guucuugucuucuuugcua

SEQ ID NO: 1216788 - RNA, 19 nt, Homo sapiens
  misc_RNA (1)...(19): siRNA sense strand
ccacaagaccacaaacuaa

SEQ ID NO: 1216789 - RNA, 19 nt, Homo sapiens
  misc_RNA (1)...(19): siRNA sense strand
gaaggcaaaccaauucuau

SEQ ID NO: 1216790 - RNA, 19 nt, Homo sapiens
  misc_RNA (1)...(19): siRNA sense strand
ccauugcacuuuauuaugu

SEQ ID NO: 1216791 - RNA, 19 nt, Homo sapiens
  misc_RNA (1)...(19): siRNA sense strand
uaaccugaaucuaaugaga

SEQ ID NO: 1216792 - RNA, 19 nt, Homo sapiens
  misc_RNA (1)...(19): siRNA sense strand
gaccacaaacuaaacagua

SEQ ID NO: 1216793 - RNA, 19 nt, Homo sapiens
  misc_RNA (1)...(19): siRNA sense strand
gaucauugguugccauugg

SEQ ID NO: 1216794 - RNA, 19 nt, Homo sapiens
  misc_RNA (1)...(19): siRNA sense strand
uaauaaacccaacggauga

SEQ ID NO: 1216795 - RNA, 19 nt, Homo sapiens
  misc_RNA (1)...(19): siRNA sense strand
uacagucaauuuccaauga

SEQ ID NO: 1216796 - RNA, 19 nt, Homo sapiens
  misc_RNA (1)...(19): siRNA sense strand
aauggaauauucucuguga

SEQ ID NO: 1216797 - RNA, 19 nt, Homo sapiens
  misc_RNA (1)...(19): siRNA sense strand
cagucacacuuggaaauua

SEQ ID NO: 1216798 - RNA, 19 nt, Homo sapiens
  misc_RNA (1)...(19): siRNA sense strand
cuaccaugcuaacaaauau

SEQ ID NO: 1216799 - RNA, 19 nt, Homo sapiens
  misc_RNA (1)...(19): siRNA sense strand
gaacagucacacuuggaaa

SEQ ID NO: 1216800 - RNA, 19 nt, Homo sapiens
  misc_RNA (1)...(19): siRNA sense strand
ugaagcaccugaucauugg

SEQ ID NO: 1216801 - RNA, 19 nt, Homo sapiens
  misc_RNA (1)...(19): siRNA sense strand
gaugggacguucuugucuu

SEQ ID NO: 1216802 - RNA, 19 nt, Homo sapiens
  misc_RNA (1)...(19): siRNA sense strand
gaacagucuaccaugauau

SEQ ID NO: 1216803 - RNA, 19 nt, Homo sapiens
  misc_RNA (1)...(19): siRNA sense strand
caagggaucaggagcaaug

SEQ ID NO: 1216804 - RNA, 19 nt, Homo sapiens
  misc_RNA (1)...(19): siRNA sense strand
agucacacuuggaaauuaa

SEQ ID NO: 1216805 - RNA, 19 nt, Homo sapiens
  misc_RNA (1)...(19): siRNA sense strand
guaauugguaggcaucaaa

SEQ ID NO: 1216806 - RNA, 19 nt, Homo sapiens
  misc_RNA (1)...(19): siRNA sense strand
ucauagacauaaagaaugg

SEQ ID NO: 1216807 - RNA, 19 nt, Homo sapiens
  misc_RNA (1)...(19): siRNA sense strand
gaauucucccucuguugua

SEQ ID NO: 1216808 - RNA, 19 nt, Homo sapiens
  misc_RNA (1)...(19): siRNA sense strand
uagcaaagccaaagaacug

SEQ ID NO: 1216809 - RNA, 19 nt, Homo sapiens
  misc_RNA (1)...(19): siRNA sense strand
gauuugaccuuuuacuuga

SEQ ID NO: 1216810 - RNA, 19 nt, Homo sapiens
  misc_RNA (1)...(19): siRNA sense strand
gagagaagaagguauaaaa

SEQ ID NO: 1216811 - RNA, 19 nt, Homo sapiens
  misc_RNA (1)...(19): siRNA sense strand
aaugagagaagaagguaua

SEQ ID NO: 1216812 - RNA, 19 nt, Homo sapiens
  misc_RNA (1)...(19): siRNA sense strand
cacaagaccacaaacuaaa

SEQ ID NO: 1216813 - RNA, 19 nt, Homo sapiens
  misc_RNA (1)...(19): siRNA sense strand
ggaauauucucugugaaaa

SEQ ID NO: 1216814 - RNA, 19 nt, Homo sapiens
  misc_RNA (1)...(19): siRNA sense strand
caaacuaaacaguaaaugg

SEQ ID NO: 1216815 - RNA, 19 nt, Homo sapiens
  misc_RNA (1)...(19): siRNA sense strand
cuaucaccauugcacuuua

SEQ ID NO: 1216816 - RNA, 19 nt, Homo sapiens
  misc_RNA (1)...(19): siRNA sense strand
caagucuuauuggcaguaa

SEQ ID NO: 1216817 - RNA, 19 nt, Homo sapiens
  misc_RNA (1)...(19): siRNA sense strand
aaacuugggaguggauaua

SEQ ID NO: 1216818 - RNA, 19 nt, Homo sapiens
  misc_RNA (1)...(19): siRNA sense strand
uaucaccauugcacuuuau

SEQ ID NO: 1216819 - RNA, 19 nt, Homo sapiens
  misc_RNA (1)...(19): siRNA sense strand
accacaaacuaaacaguaa

SEQ ID NO: 1216820 - RNA, 19 nt, Homo sapiens
  misc_RNA (1)...(19): siRNA sense strand
caacggaugagacacuguu

SEQ ID NO: 1216821 - RNA, 19 nt, Homo sapiens
  misc_RNA (1)...(19): siRNA sense strand
aagaauugcuuccaguuac

SEQ ID NO: 1216822 - RNA, 19 nt, Homo sapiens
  misc_RNA (1)...(19): siRNA sense strand
ucaccauugcacuuuauua

SEQ ID NO: 1216823 - RNA, 19 nt, Homo sapiens
  misc_RNA (1)...(19): siRNA sense strand
uggaauauucucugugaaa

SEQ ID NO: 1216824 - RNA, 19 nt, Homo sapiens
  misc_RNA (1)...(19): siRNA sense strand
gaaaaggaucccacucuga

SEQ ID NO: 1216825 - RNA, 19 nt, Homo sapiens
  misc_RNA (1)...(19): siRNA sense strand
cuagaaggcaaaccaauuc

SEQ ID NO: 1216826 - RNA, 19 nt, Homo sapiens
  misc_RNA (1)...(19): siRNA sense strand
ccacaaacuaaacaguaaa

SEQ ID NO: 1216827 - RNA, 19 nt, Homo sapiens
  misc_RNA (1)...(19): siRNA sense strand
ccugugaaguacuaaugaa

SEQ ID NO: 1216828 - RNA, 19 nt, Homo sapiens
  misc_RNA (1)...(19): siRNA sense strand
gcuaaagagcccuuaccaa

SEQ ID NO: 1216829 - RNA, 19 nt, Homo sapiens
  misc_RNA (1)...(19): siRNA sense strand
ggaauguaaccugaaucua

SEQ ID NO: 1216830 - RNA, 19 nt, Homo sapiens
  misc_RNA (1)...(19): siRNA sense strand
uaaauagcaaagccaaaga

SEQ ID NO: 1216831 - RNA, 19 nt, Homo sapiens
  misc_RNA (1)...(19): siRNA sense strand
gugaaguacuaaugaaugc

SEQ ID NO: 1216832 - RNA, 19 nt, Homo sapiens
  misc_RNA (1)...(19): siRNA sense strand
guacugaugggacguucuu

SEQ ID NO: 1216833 - RNA, 19 nt, Homo sapiens
  misc_RNA (1)...(19): siRNA sense strand
caccauugcacuuuauuau

SEQ ID NO: 1216834 - RNA, 19 nt, Homo sapiens
  misc_RNA (1)...(19): siRNA sense strand
gggacguucuugucuucuu

SEQ ID NO: 1216835 - RNA, 19 nt, Homo sapiens
  misc_RNA (1)...(19): siRNA sense strand
agacauaaagaauggaaga

SEQ ID NO: 1216836 - RNA, 19 nt, Homo sapiens
  misc_RNA (1)...(19): siRNA sense strand
uauaugaacagucacacuu

SEQ ID NO: 1216837 - RNA, 19 nt, Homo sapiens
  misc_RNA (1)...(19): siRNA sense strand
gccaaagaacugcaaacuu

SEQ ID NO: 1216838 - RNA, 19 nt, Homo sapiens
  misc_RNA (1)...(19): siRNA sense strand
ucugaccugugaaguacua

SEQ ID NO: 1216839 - RNA, 19 nt, Homo sapiens
  misc_RNA (1)...(19): siRNA sense strand
ucuagaaggcaaaccaauu

SEQ ID NO: 1216840 - RNA, 19 nt, Homo sapiens
  misc_RNA (1)...(19): siRNA sense strand
uagaacauguccacaagac

SEQ ID NO: 1216841 - RNA, 19 nt, Homo sapiens
  misc_RNA (1)...(19): siRNA sense strand
aaugaaugcuguugcuaca

SEQ ID NO: 1216842 - RNA, 19 nt, Homo sapiens
  misc_RNA (1)...(19): siRNA sense strand
caacugaaacuaccaugcu

SEQ ID NO: 1216843 - RNA, 19 nt, Homo sapiens
  misc_RNA (1)...(19): siRNA sense strand
uggaaauacgugacaaauu

SEQ ID NO: 1216844 - RNA, 19 nt, Homo sapiens
  misc_RNA (1)...(19): siRNA sense strand
gaaucuaaugagagaagaa

SEQ ID NO: 1216845 - RNA, 19 nt, Homo sapiens
  misc_RNA (1)...(19): siRNA sense strand
caagaccacaaacuaaaca

SEQ ID NO: 1216846 - RNA, 19 nt, Homo sapiens
  misc_RNA (1)...(19): siRNA sense strand
guacuaaugaaugcuguug

SEQ ID NO: 1216847 - RNA, 19 nt, Homo sapiens
  misc_RNA (1)...(19): siRNA sense strand
ugacuuucuuuacaaccaa

SEQ ID NO: 1216848 - RNA, 19 nt, Homo sapiens
  misc_RNA (1)...(19): siRNA sense strand
gauccaugaccauaugaau

SEQ ID NO: 1216849 - RNA, 19 nt, Homo sapiens
  misc_RNA (1)...(19): siRNA sense strand
cuaaugagagaagaaggua

SEQ ID NO: 1216850 - RNA, 19 nt, Homo sapiens
  misc_RNA (1)...(19): siRNA sense strand
cuuagaacauguccacaag

SEQ ID NO: 1216851 - RNA, 19 nt, Homo sapiens
  misc_RNA (1)...(19): siRNA sense strand
uugaagcaccugaucauug

SEQ ID NO: 1216852 - RNA, 19 nt, Homo sapiens
  misc_RNA (1)...(19): siRNA sense strand
ggaguggauauauggcaaa

SEQ ID NO: 1216853 - RNA, 19 nt, Homo sapiens
  misc_RNA (1)...(19): siRNA sense strand
gaaucuagaaggcaaacca

SEQ ID NO: 1216854 - RNA, 19 nt, Homo sapiens
  misc_RNA (1)...(19): siRNA sense strand
aaacuggcucggagaagaa

SEQ ID NO: 1216855 - RNA, 19 nt, Homo sapiens
  misc_RNA (1)...(19): siRNA sense strand
uuuacuugauggacaguuu

SEQ ID NO: 1216856 - RNA, 19 nt, Homo sapiens
  misc_RNA (1)...(19): siRNA sense strand
aaauagcaaagccaaagaa

SEQ ID NO: 1216857 - RNA, 19 nt, Homo sapiens
  misc_RNA (1)...(19): siRNA sense strand
gaccugugaaguacuaaug

SEQ ID NO: 1216858 - RNA, 19 nt, Homo sapiens
  misc_RNA (1)...(19): siRNA sense strand
uuacuugauggacaguuua

SEQ ID NO: 1216859 - RNA, 19 nt, Homo sapiens
  misc_RNA (1)...(19): siRNA sense strand
acuaccaugcuaacaaaua

SEQ ID NO: 1216860 - RNA, 19 nt, Homo sapiens
  misc_RNA (1)...(19): siRNA sense strand
aauacuuccuuucaugugu

SEQ ID NO: 1216861 - RNA, 19 nt, Homo sapiens
  misc_RNA (1)...(19): siRNA sense strand
agaauucucccucuguugu

SEQ ID NO: 1216862 - RNA, 19 nt, Homo sapiens
  misc_RNA (1)...(19): siRNA sense strand
aggcaaaccaauucuauuc

SEQ ID NO: 1216863 - RNA, 19 nt, Homo sapiens
  misc_RNA (1)...(19): siRNA sense strand
gcaaacuugggaguggaua

SEQ ID NO: 1216864 - RNA, 19 nt, Homo sapiens
  misc_RNA (1)...(19): siRNA sense strand
gaccauaugaaucuagaag

SEQ ID NO: 1216865 - RNA, 19 nt, Homo sapiens
  misc_RNA (1)...(19): siRNA sense strand
gauggacaguuuaaaaucu

SEQ ID NO: 1216866 - RNA, 19 nt, Homo sapiens
  misc_RNA (1)...(19): siRNA sense strand
aacugaaacuaccaugcua

SEQ ID NO: 1216867 - RNA, 19 nt, Homo sapiens
  misc_RNA (1)...(19): siRNA sense strand
cuggauccaugaccauaug

SEQ ID NO: 1216868 - RNA, 19 nt, Homo sapiens
  misc_RNA (1)...(19): siRNA sense strand
ugaacagucacacuuggaa

SEQ ID NO: 1216869 - RNA, 19 nt, Homo sapiens
  misc_RNA (1)...(19): siRNA sense strand
gcacuuuauuauguaguac

SEQ ID NO: 1216870 - RNA, 19 nt, Homo sapiens
  misc_RNA (1)...(19): siRNA sense strand
cagucaauuuccaaugaug

SEQ ID NO: 1216871 - RNA, 19 nt, Homo sapiens
  misc_RNA (1)...(19): siRNA sense strand
gacauaaagaauggaagaa

SEQ ID NO: 1216872 - RNA, 19 nt, Homo sapiens
  misc_RNA (1)...(19): siRNA sense strand
uacuuccuuucauguguua

SEQ ID NO: 1216873 - RNA, 19 nt, Homo sapiens
  misc_RNA (1)...(19): siRNA sense strand
auacuuccuuucauguguu

SEQ ID NO: 1216874 - RNA, 19 nt, Homo sapiens
  misc_RNA (1)...(19): siRNA sense strand
acagucaauuuccaaugau

SEQ ID NO: 1216875 - RNA, 19 nt, Homo sapiens
  misc_RNA (1)...(19): siRNA sense strand
caauuuccaaugaugucua

SEQ ID NO: 1216876 - RNA, 19 nt, Homo sapiens
  misc_RNA (1)...(19): siRNA sense strand
ggaaauacgugacaaauua

SEQ ID NO: 1216877 - RNA, 19 nt, Homo sapiens
  misc_RNA (1)...(19): siRNA sense strand
ccaaagaacugcaaacuug

SEQ ID NO: 1216878 - RNA, 19 nt, Homo sapiens
  misc_RNA (1)...(19): siRNA sense strand
gaauguaaccugaaucuaa

SEQ ID NO: 1216879 - RNA, 19 nt, Homo sapiens
  misc_RNA (1)...(19): siRNA sense strand
ggaacagucuaccaugaua

SEQ ID NO: 1216880 - RNA, 19 nt, Homo sapiens
  misc_RNA (1)...(19): siRNA sense strand
uagcauaccuuccuuagug

SEQ ID NO: 1216881 - RNA, 19 nt, Homo sapiens
  misc_RNA (1)...(19): siRNA sense strand
gcaaaccaauucuauucuu

SEQ ID NO: 1216882 - RNA, 19 nt, Homo sapiens
  misc_RNA (1)...(19): siRNA sense strand
gaggaacagucuaccauga

SEQ ID NO: 1216883 - RNA, 19 nt, Homo sapiens
  misc_RNA (1)...(19): siRNA sense strand
gauaaucacauucaccuaa

SEQ ID NO: 1216884 - RNA, 19 nt, Homo sapiens
  misc_RNA (1)...(19): siRNA sense strand
gaaacuaccaugcuaacaa

SEQ ID NO: 1216885 - RNA, 19 nt, Homo sapiens
  misc_RNA (1)...(19): siRNA sense strand
aaacuaccaugcuaacaaa

SEQ ID NO: 1216886 - RNA, 19 nt, Homo sapiens
  misc_RNA (1)...(19): siRNA sense strand
ggacguucuugucuucuuu

SEQ ID NO: 1216887 - RNA, 19 nt, Homo sapiens
  misc_RNA (1)...(19): siRNA sense strand
guucuugucuucuuugcua

SEQ ID NO: 1216888 - RNA, 19 nt, Homo sapiens
  misc_RNA (1)...(19): siRNA sense strand
ccacaagaccacaaacuaa

SEQ ID NO: 1216889 - RNA, 19 nt, Homo sapiens
  misc_RNA (1)...(19): siRNA sense strand
gaaggcaaaccaauucuau

SEQ ID NO: 1216890 - RNA, 19 nt, Homo sapiens
  misc_RNA (1)...(19): siRNA sense strand
ccauugcacuuuauuaugu

SEQ ID NO: 1216891 - RNA, 19 nt, Homo sapiens
  misc_RNA (1)...(19): siRNA sense strand
uaaccugaaucuaaugaga

SEQ ID NO: 1216892 - RNA, 19 nt, Homo sapiens
  misc_RNA (1)...(19): siRNA sense strand
gaccacaaacuaaacagua

SEQ ID NO: 1216893 - RNA, 19 nt, Homo sapiens
  misc_RNA (1)...(19): siRNA sense strand
gaucauugguugccauugg

SEQ ID NO: 1216894 - RNA, 19 nt, Homo sapiens
  misc_RNA (1)...(19): siRNA sense strand
uaauaaacccaacggauga

SEQ ID NO: 1216895 - RNA, 19 nt, Homo sapiens
  misc_RNA (1)...(19): siRNA sense strand
uacagucaauuuccaauga

SEQ ID NO: 1216896 - RNA, 19 nt, Homo sapiens
  misc_RNA (1)...(19): siRNA sense strand
aauggaauauucucuguga

SEQ ID NO: 1216897 - RNA, 19 nt, Homo sapiens
  misc_RNA (1)...(19): siRNA sense strand
cagucacacuuggaaauua

SEQ ID NO: 1216898 - RNA, 19 nt, Homo sapiens
  misc_RNA (1)...(19): siRNA sense strand
cuaccaugcuaacaaauau

SEQ ID NO: 1216899 - RNA, 19 nt, Homo sapiens
  misc_RNA (1)...(19): siRNA sense strand
gaacagucacacuuggaaa

SEQ ID NO: 1216900 - RNA, 19 nt, Homo sapiens
  misc_RNA (1)...(19): siRNA sense strand
ugaagcaccugaucauugg

SEQ ID NO: 1216901 - RNA, 19 nt, Homo sapiens
  misc_RNA (1)...(19): siRNA sense strand
gaugggacguucuugucuu

SEQ ID NO: 1216902 - RNA, 19 nt, Homo sapiens
  misc_RNA (1)...(19): siRNA sense strand
gaacagucuaccaugauau

SEQ ID NO: 1216903 - RNA, 19 nt, Homo sapiens
  misc_RNA (1)...(19): siRNA sense strand
caagggaucaggagcaaug

SEQ ID NO: 1216904 - RNA, 19 nt, Homo sapiens
  misc_RNA (1)...(19): siRNA sense strand
agucacacuuggaaauuaa

SEQ ID NO: 1216905 - RNA, 19 nt, Homo sapiens
  misc_RNA (1)...(19): siRNA sense strand
guaauugguaggcaucaaa

SEQ ID NO: 1216906 - RNA, 19 nt, Homo sapiens
  misc_RNA (1)...(19): siRNA sense strand
ucauagacauaaagaaugg

SEQ ID NO: 1216907 - RNA, 19 nt, Homo sapiens
  misc_RNA (1)...(19): siRNA sense strand
gaauucucccucuguugua

SEQ ID NO: 1216908 - RNA, 19 nt, Homo sapiens
  misc_RNA (1)...(19): siRNA sense strand
uagcaaagccaaagaacug

SEQ ID NO: 1216909 - RNA, 19 nt, Homo sapiens
  misc_RNA (1)...(19): siRNA sense strand
gauuugaccuuuuacuuga

SEQ ID NO: 1216910 - RNA, 19 nt, Homo sapiens
  misc_RNA (1)...(19): siRNA sense strand
gagagaagaagguauaaaa

SEQ ID NO: 1216911 - RNA, 19 nt, Homo sapiens
  misc_RNA (1)...(19): siRNA sense strand
aaugagagaagaagguaua

SEQ ID NO: 1216912 - RNA, 19 nt, Homo sapiens
  misc_RNA (1)...(19): siRNA sense strand
cacaagaccacaaacuaaa

SEQ ID NO: 1216913 - RNA, 19 nt, Homo sapiens
  misc_RNA (1)...(19): siRNA sense strand
ggaauauucucugugaaaa

SEQ ID NO: 1216914 - RNA, 19 nt, Homo sapiens
  misc_RNA (1)...(19): siRNA sense strand
caaacuaaacaguaaaugg

SEQ ID NO: 1216915 - RNA, 19 nt, Homo sapiens
  misc_RNA (1)...(19): siRNA sense strand
cuaucaccauugcacuuua

SEQ ID NO: 1216916 - RNA, 19 nt, Homo sapiens
  misc_RNA (1)...(19): siRNA sense strand
caagucuuauuggcaguaa

SEQ ID NO: 1216917 - RNA, 19 nt, Homo sapiens
  misc_RNA (1)...(19): siRNA sense strand
aaacuugggaguggauaua

SEQ ID NO: 1216918 - RNA, 19 nt, Homo sapiens
  misc_RNA (1)...(19): siRNA sense strand
uaucaccauugcacuuuau

SEQ ID NO: 1216919 - RNA, 19 nt, Homo sapiens
  misc_RNA (1)...(19): siRNA sense strand
accacaaacuaaacaguaa

SEQ ID NO: 1216920 - RNA, 19 nt, Homo sapiens
  misc_RNA (1)...(19): siRNA sense strand
caacggaugagacacuguu

SEQ ID NO: 1216921 - RNA, 19 nt, Homo sapiens
  misc_RNA (1)...(19): siRNA sense strand
aagaauugcuuccaguuac

SEQ ID NO: 1216922 - RNA, 19 nt, Homo sapiens
  misc_RNA (1)...(19): siRNA sense strand
ucaccauugcacuuuauua

SEQ ID NO: 1216923 - RNA, 19 nt, Homo sapiens
  misc_RNA (1)...(19): siRNA sense strand
uggaauauucucugugaaa

SEQ ID NO: 1216924 - RNA, 19 nt, Homo sapiens
  misc_RNA (1)...(19): siRNA sense strand
gaaaaggaucccacucuga

SEQ ID NO: 1216925 - RNA, 19 nt, Homo sapiens
  misc_RNA (1)...(19): siRNA sense strand
cuagaaggcaaaccaauuc

SEQ ID NO: 1216926 - RNA, 19 nt, Homo sapiens
  misc_RNA (1)...(19): siRNA sense strand
ccacaaacuaaacaguaaa

SEQ ID NO: 1216927 - RNA, 19 nt, Homo sapiens
  misc_RNA (1)...(19): siRNA sense strand
ccugugaaguacuaaugaa

SEQ ID NO: 1216928 - RNA, 19 nt, Homo sapiens
  misc_RNA (1)...(19): siRNA sense strand
gcuaaagagcccuuaccaa

SEQ ID NO: 1216929 - RNA, 19 nt, Homo sapiens
  misc_RNA (1)...(19): siRNA sense strand
ggaauguaaccugaaucua

SEQ ID NO: 1216930 - RNA, 19 nt, Homo sapiens
  misc_RNA (1)...(19): siRNA sense strand
uaaauagcaaagccaaaga

SEQ ID NO: 1216931 - RNA, 19 nt, Homo sapiens
  misc_RNA (1)...(19): siRNA sense strand
gugaaguacuaaugaaugc

SEQ ID NO: 1216932 - RNA, 19 nt, Homo sapiens
  misc_RNA (1)...(19): siRNA sense strand
guacugaugggacguucuu

SEQ ID NO: 1216933 - RNA, 19 nt, Homo sapiens
  misc_RNA (1)...(19): siRNA sense strand
caccauugcacuuuauuau

SEQ ID NO: 1216934 - RNA, 19 nt, Homo sapiens
  misc_RNA (1)...(19): siRNA sense strand
gggacguucuugucuucuu

SEQ ID NO: 1216935 - RNA, 19 nt, Homo sapiens
  misc_RNA (1)...(19): siRNA sense strand
agacauaaagaauggaaga

SEQ ID NO: 1216936 - RNA, 19 nt, Homo sapiens
  misc_RNA (1)...(19): siRNA sense strand
uauaugaacagucacacuu

SEQ ID NO: 1216937 - RNA, 19 nt, Homo sapiens
  misc_RNA (1)...(19): siRNA sense strand
gccaaagaacugcaaacuu

SEQ ID NO: 1216938 - RNA, 19 nt, Homo sapiens
  misc_RNA (1)...(19): siRNA sense strand
ucugaccugugaaguacua

SEQ ID NO: 1216939 - RNA, 19 nt, Homo sapiens
  misc_RNA (1)...(19): siRNA sense strand
ucuagaaggcaaaccaauu

SEQ ID NO: 1216940 - RNA, 19 nt, Homo sapiens
  misc_RNA (1)...(19): siRNA sense strand
uagaacauguccacaagac

SEQ ID NO: 1216941 - RNA, 19 nt, Homo sapiens
  misc_RNA (1)...(19): siRNA sense strand
aaugaaugcuguugcuaca

SEQ ID NO: 1216942 - RNA, 19 nt, Homo sapiens
  misc_RNA (1)...(19): siRNA sense strand
caacugaaacuaccaugcu

SEQ ID NO: 1216943 - RNA, 19 nt, Homo sapiens
  misc_RNA (1)...(19): siRNA sense strand
uggaaauacgugacaaauu

SEQ ID NO: 1216944 - RNA, 19 nt, Homo sapiens
  misc_RNA (1)...(19): siRNA sense strand
gaaucuaaugagagaagaa

SEQ ID NO: 1216945 - RNA, 19 nt, Homo sapiens
  misc_RNA (1)...(19): siRNA sense strand
caagaccacaaacuaaaca

SEQ ID NO: 1216946 - RNA, 19 nt, Homo sapiens
  misc_RNA (1)...(19): siRNA sense strand
guacuaaugaaugcuguug

SEQ ID NO: 1216947 - RNA, 19 nt, Homo sapiens
  misc_RNA (1)...(19): siRNA sense strand
ugacuuucuuuacaaccaa

SEQ ID NO: 1216948 - RNA, 19 nt, Homo sapiens
  misc_RNA (1)...(19): siRNA sense strand
gauccaugaccauaugaau

SEQ ID NO: 1216949 - RNA, 19 nt, Homo sapiens
  misc_RNA (1)...(19): siRNA sense strand
cuaaugagagaagaaggua

SEQ ID NO: 1216950 - RNA, 19 nt, Homo sapiens
  misc_RNA (1)...(19): siRNA sense strand
cuuagaacauguccacaag

SEQ ID NO: 1216951 - RNA, 19 nt, Homo sapiens
  misc_RNA (1)...(19): siRNA sense strand
uugaagcaccugaucauug

SEQ ID NO: 1216952 - RNA, 19 nt, Homo sapiens
  misc_RNA (1)...(19): siRNA sense strand
ggaguggauauauggcaaa

SEQ ID NO: 1216953 - RNA, 19 nt, Homo sapiens
  misc_RNA (1)...(19): siRNA sense strand
gaaucuagaaggcaaacca

SEQ ID NO: 1216954 - RNA, 19 nt, Homo sapiens
  misc_RNA (1)...(19): siRNA sense strand
aaacuggcucggagaagaa

SEQ ID NO: 1216955 - RNA, 19 nt, Homo sapiens
  misc_RNA (1)...(19): siRNA sense strand
uuuacuugauggacaguuu

SEQ ID NO: 1216956 - RNA, 19 nt, Homo sapiens
  misc_RNA (1)...(19): siRNA sense strand
aaauagcaaagccaaagaa

SEQ ID NO: 1216957 - RNA, 19 nt, Homo sapiens
  misc_RNA (1)...(19): siRNA sense strand
gaccugugaaguacuaaug

SEQ ID NO: 1216958 - RNA, 19 nt, Homo sapiens
  misc_RNA (1)...(19): siRNA sense strand
uuacuugauggacaguuua

SEQ ID NO: 1216959 - RNA, 19 nt, Homo sapiens
  misc_RNA (1)...(19): siRNA sense strand
acuaccaugcuaacaaaua

SEQ ID NO: 1216960 - RNA, 19 nt, Homo sapiens
  misc_RNA (1)...(19): siRNA sense strand
aauacuuccuuucaugugu

SEQ ID NO: 1216961 - RNA, 19 nt, Homo sapiens
  misc_RNA (1)...(19): siRNA sense strand
agaauucucccucuguugu

SEQ ID NO: 1216962 - RNA, 19 nt, Homo sapiens
  misc_RNA (1)...(19): siRNA sense strand
aggcaaaccaauucuauuc

SEQ ID NO: 1216963 - RNA, 19 nt, Homo sapiens
  misc_RNA (1)...(19): siRNA sense strand
gcaaacuugggaguggaua

SEQ ID NO: 1216964 - RNA, 19 nt, Homo sapiens
  misc_RNA (1)...(19): siRNA sense strand
gaccauaugaaucuagaag

SEQ ID NO: 1216965 - RNA, 19 nt, Homo sapiens
  misc_RNA (1)...(19): siRNA sense strand
gauggacaguuuaaaaucu

SEQ ID NO: 1216966 - RNA, 19 nt, Homo sapiens
  misc_RNA (1)...(19): siRNA sense strand
aacugaaacuaccaugcua

SEQ ID NO: 1216967 - RNA, 19 nt, Homo sapiens
  misc_RNA (1)...(19): siRNA sense strand
cuggauccaugaccauaug

SEQ ID NO: 1216968 - RNA, 19 nt, Homo sapiens
  misc_RNA (1)...(19): siRNA sense strand
ugaacagucacacuuggaa

SEQ ID NO: 1216969 - RNA, 19 nt, Homo sapiens
  misc_RNA (1)...(19): siRNA sense strand
gcacuuuauuauguaguac

SEQ ID NO: 1216970 - RNA, 19 nt, Homo sapiens
  misc_RNA (1)...(19): siRNA sense strand
cagucaauuuccaaugaug

SEQ ID NO: 1216971 - RNA, 19 nt, Homo sapiens
  misc_RNA (1)...(19): siRNA sense strand
gacauaaagaauggaagaa

SEQ ID NO: 1216972 - RNA, 19 nt, Homo sapiens
  misc_RNA (1)...(19): siRNA sense strand
uacuuccuuucauguguua

SEQ ID NO: 1216973 - RNA, 19 nt, Homo sapiens
  misc_RNA (1)...(19): siRNA sense strand
auacuuccuuucauguguu

SEQ ID NO: 1216974 - RNA, 19 nt, Homo sapiens
  misc_RNA (1)...(19): siRNA sense strand
acagucaauuuccaaugau

SEQ ID NO: 1216975 - RNA, 19 nt, Homo sapiens
  misc_RNA (1)...(19): siRNA sense strand
caauuuccaaugaugucua

SEQ ID NO: 1216976 - RNA, 19 nt, Homo sapiens
  misc_RNA (1)...(19): siRNA sense strand
ggaaauacgugacaaauua

SEQ ID NO: 1216977 - RNA, 19 nt, Homo sapiens
  misc_RNA (1)...(19): siRNA sense strand
ccaaagaacugcaaacuug

SEQ ID NO: 1216978 - RNA, 19 nt, Homo sapiens
  misc_RNA (1)...(19): siRNA sense strand
gaauguaaccugaaucuaa

SEQ ID NO: 1216979 - RNA, 19 nt, Homo sapiens
  misc_RNA (1)...(19): siRNA sense strand
ggaacagucuaccaugaua

SEQ ID NO: 1216980 - RNA, 19 nt, Homo sapiens
  misc_RNA (1)...(19): siRNA sense strand
uagcauaccuuccuuagug

SEQ ID NO: 1216981 - RNA, 19 nt, Homo sapiens
  misc_RNA (1)...(19): siRNA sense strand
gcaaaccaauucuauucuu

SEQ ID NO: 1216982 - RNA, 19 nt, Homo sapiens
  misc_RNA (1)...(19): siRNA sense strand
gaggaacagucuaccauga

SEQ ID NO: 1216983 - RNA, 19 nt, Homo sapiens
  misc_RNA (1)...(19): siRNA sense strand
gauaaucacauucaccuaa

SEQ ID NO: 1216984 - RNA, 19 nt, Homo sapiens
  misc_RNA (1)...(19): siRNA sense strand
gaaacuaccaugcuaacaa

SEQ ID NO: 1216985 - RNA, 19 nt, Homo sapiens
  misc_RNA (1)...(19): siRNA sense strand
aaacuaccaugcuaacaaa

SEQ ID NO: 1216986 - RNA, 19 nt, Homo sapiens
  misc_RNA (1)...(19): siRNA sense strand
ggacguucuugucuucuuu

SEQ ID NO: 1216987 - RNA, 19 nt, Homo sapiens
  misc_RNA (1)...(19): siRNA sense strand
guucuugucuucuuugcua

SEQ ID NO: 1216988 - RNA, 19 nt, Homo sapiens
  misc_RNA (1)...(19): siRNA sense strand
ccacaagaccacaaacuaa

SEQ ID NO: 1216989 - RNA, 19 nt, Homo sapiens
  misc_RNA (1)...(19): siRNA sense strand
gaaggcaaaccaauucuau

SEQ ID NO: 1216990 - RNA, 19 nt, Homo sapiens
  misc_RNA (1)...(19): siRNA sense strand
ccauugcacuuuauuaugu

SEQ ID NO: 1216991 - RNA, 19 nt, Homo sapiens
  misc_RNA (1)...(19): siRNA sense strand
uaaccugaaucuaaugaga

SEQ ID NO: 1216992 - RNA, 19 nt, Homo sapiens
  misc_RNA (1)...(19): siRNA sense strand
gaccacaaacuaaacagua

SEQ ID NO: 1216993 - RNA, 19 nt, Homo sapiens
  misc_RNA (1)...(19): siRNA sense strand
gaucauugguugccauugg

SEQ ID NO: 1216994 - RNA, 19 nt, Homo sapiens
  misc_RNA (1)...(19): siRNA sense strand
uaauaaacccaacggauga

SEQ ID NO: 1216995 - RNA, 19 nt, Homo sapiens
  misc_RNA (1)...(19): siRNA sense strand
uacagucaauuuccaauga

SEQ ID NO: 1216996 - RNA, 19 nt, Homo sapiens
  misc_RNA (1)...(19): siRNA sense strand
aauggaauauucucuguga

SEQ ID NO: 1216997 - RNA, 19 nt, Homo sapiens
  misc_RNA (1)...(19): siRNA sense strand
cagucacacuuggaaauua

SEQ ID NO: 1216998 - RNA, 19 nt, Homo sapiens
  misc_RNA (1)...(19): siRNA sense strand
cuaccaugcuaacaaauau

SEQ ID NO: 1216999 - RNA, 19 nt, Homo sapiens
  misc_RNA (1)...(19): siRNA sense strand
gaacagucacacuuggaaa

SEQ ID NO: 1217000 - RNA, 19 nt, Homo sapiens
  misc_RNA (1)...(19): siRNA sense strand
ugaagcaccugaucauugg

SEQ ID NO: 1217001 - RNA, 19 nt, Homo sapiens
  misc_RNA (1)...(19): siRNA sense strand
gaugggacguucuugucuu

SEQ ID NO: 1217002 - RNA, 19 nt, Homo sapiens
  misc_RNA (1)...(19): siRNA sense strand
gaacagucuaccaugauau

SEQ ID NO: 1217003 - RNA, 19 nt, Homo sapiens
  misc_RNA (1)...(19): siRNA sense strand
caagggaucaggagcaaug

SEQ ID NO: 1217004 - RNA, 19 nt, Homo sapiens
  misc_RNA (1)...(19): siRNA sense strand
agucacacuuggaaauuaa

SEQ ID NO: 1217005 - RNA, 19 nt, Homo sapiens
  misc_RNA (1)...(19): siRNA sense strand
guaauugguaggcaucaaa

SEQ ID NO: 1217006 - RNA, 19 nt, Homo sapiens
  misc_RNA (1)...(19): siRNA sense strand
ucauagacauaaagaaugg

SEQ ID NO: 1217007 - RNA, 19 nt, Homo sapiens
  misc_RNA (1)...(19): siRNA sense strand
gaauucucccucuguugua

SEQ ID NO: 1217008 - RNA, 19 nt, Homo sapiens
  misc_RNA (1)...(19): siRNA sense strand
uagcaaagccaaagaacug

SEQ ID NO: 1217009 - RNA, 19 nt, Homo sapiens
  misc_RNA (1)...(19): siRNA sense strand
gauuugaccuuuuacuuga

SEQ ID NO: 1217010 - RNA, 19 nt, Homo sapiens
  misc_RNA (1)...(19): siRNA sense strand
gagagaagaagguauaaaa

SEQ ID NO: 1217011 - RNA, 19 nt, Homo sapiens
  misc_RNA (1)...(19): siRNA sense strand
aaugagagaagaagguaua

SEQ ID NO: 1217012 - RNA, 19 nt, Homo sapiens
  misc_RNA (1)...(19): siRNA sense strand
cacaagaccacaaacuaaa

SEQ ID NO: 1217013 - RNA, 19 nt, Homo sapiens
  misc_RNA (1)...(19): siRNA sense strand
ggaauauucucugugaaaa

SEQ ID NO: 1217014 - RNA, 19 nt, Homo sapiens
  misc_RNA (1)...(19): siRNA sense strand
caaacuaaacaguaaaugg

SEQ ID NO: 1217015 - RNA, 19 nt, Homo sapiens
  misc_RNA (1)...(19): siRNA sense strand
cuaucaccauugcacuuua

SEQ ID NO: 1217016 - RNA, 19 nt, Homo sapiens
  misc_RNA (1)...(19): siRNA sense strand
caagucuuauuggcaguaa

SEQ ID NO: 1217017 - RNA, 19 nt, Homo sapiens
  misc_RNA (1)...(19): siRNA sense strand
aaacuugggaguggauaua

SEQ ID NO: 1217018 - RNA, 19 nt, Homo sapiens
  misc_RNA (1)...(19): siRNA sense strand
uaucaccauugcacuuuau

SEQ ID NO: 1217019 - RNA, 19 nt, Homo sapiens
  misc_RNA (1)...(19): siRNA sense strand
accacaaacuaaacaguaa

SEQ ID NO: 1217020 - RNA, 19 nt, Homo sapiens
  misc_RNA (1)...(19): siRNA sense strand
caacggaugagacacuguu

SEQ ID NO: 1217021 - RNA, 19 nt, Homo sapiens
  misc_RNA (1)...(19): siRNA sense strand
aagaauugcuuccaguuac

SEQ ID NO: 1217022 - RNA, 19 nt, Homo sapiens
  misc_RNA (1)...(19): siRNA sense strand
ucaccauugcacuuuauua

SEQ ID NO: 1217023 - RNA, 19 nt, Homo sapiens
  misc_RNA (1)...(19): siRNA sense strand
uggaauauucucugugaaa

SEQ ID NO: 1217024 - RNA, 19 nt, Homo sapiens
  misc_RNA (1)...(19): siRNA sense strand
gaaaaggaucccacucuga

SEQ ID NO: 1217025 - RNA, 19 nt, Homo sapiens
  misc_RNA (1)...(19): siRNA sense strand
cuagaaggcaaaccaauuc

SEQ ID NO: 1217026 - RNA, 19 nt, Homo sapiens
  misc_RNA (1)...(19): siRNA sense strand
ccacaaacuaaacaguaaa

SEQ ID NO: 1217027 - RNA, 19 nt, Homo sapiens
  misc_RNA (1)...(19): siRNA sense strand
ccugugaaguacuaaugaa

SEQ ID NO: 1217028 - RNA, 19 nt, Homo sapiens
  misc_RNA (1)...(19): siRNA sense strand
gcuaaagagcccuuaccaa

SEQ ID NO: 1217029 - RNA, 19 nt, Homo sapiens
  misc_RNA (1)...(19): siRNA sense strand
ggaauguaaccugaaucua

SEQ ID NO: 1217030 - RNA, 19 nt, Homo sapiens
  misc_RNA (1)...(19): siRNA sense strand
uaaauagcaaagccaaaga

SEQ ID NO: 1217031 - RNA, 19 nt, Homo sapiens
  misc_RNA (1)...(19): siRNA sense strand
gugaaguacuaaugaaugc

SEQ ID NO: 1217032 - RNA, 19 nt, Homo sapiens
  misc_RNA (1)...(19): siRNA sense strand
guacugaugggacguucuu

SEQ ID NO: 1217033 - RNA, 19 nt, Homo sapiens
  misc_RNA (1)...(19): siRNA sense strand
caccauugcacuuuauuau

SEQ ID NO: 1217034 - RNA, 19 nt, Homo sapiens
  misc_RNA (1)...(19): siRNA sense strand
gggacguucuugucuucuu

SEQ ID NO: 1217035 - RNA, 19 nt, Homo sapiens
  misc_RNA (1)...(19): siRNA sense strand
agacauaaagaauggaaga

SEQ ID NO: 1217036 - RNA, 19 nt, Homo sapiens
  misc_RNA (1)...(19): siRNA sense strand
uauaugaacagucacacuu

SEQ ID NO: 1217037 - RNA, 19 nt, Homo sapiens
  misc_RNA (1)...(19): siRNA sense strand
gccaaagaacugcaaacuu

SEQ ID NO: 1217038 - RNA, 19 nt, Homo sapiens
  misc_RNA (1)...(19): siRNA sense strand
ucugaccugugaaguacua

SEQ ID NO: 1217039 - RNA, 19 nt, Homo sapiens
  misc_RNA (1)...(19): siRNA sense strand
ucuagaaggcaaaccaauu

SEQ ID NO: 1217040 - RNA, 19 nt, Homo sapiens
  misc_RNA (1)...(19): siRNA sense strand
uagaacauguccacaagac

SEQ ID NO: 1217041 - RNA, 19 nt, Homo sapiens
  misc_RNA (1)...(19): siRNA sense strand
aaugaaugcuguugcuaca

SEQ ID NO: 1217042 - RNA, 19 nt, Homo sapiens
  misc_RNA (1)...(19): siRNA sense strand
caacugaaacuaccaugcu

SEQ ID NO: 1217043 - RNA, 19 nt, Homo sapiens
  misc_RNA (1)...(19): siRNA sense strand
uggaaauacgugacaaauu

SEQ ID NO: 1217044 - RNA, 19 nt, Homo sapiens
  misc_RNA (1)...(19): siRNA sense strand
gaaucuaaugagagaagaa

SEQ ID NO: 1217045 - RNA, 19 nt, Homo sapiens
  misc_RNA (1)...(19): siRNA sense strand
caagaccacaaacuaaaca

SEQ ID NO: 1217046 - RNA, 19 nt, Homo sapiens
  misc_RNA (1)...(19): siRNA sense strand
guacuaaugaaugcuguug

SEQ ID NO: 1217047 - RNA, 19 nt, Homo sapiens
  misc_RNA (1)...(19): siRNA sense strand
ugacuuucuuuacaaccaa

SEQ ID NO: 1217048 - RNA, 19 nt, Homo sapiens
  misc_RNA (1)...(19): siRNA sense strand
gauccaugaccauaugaau

SEQ ID NO: 1217049 - RNA, 19 nt, Homo sapiens
  misc_RNA (1)...(19): siRNA sense strand
cuaaugagagaagaaggua

SEQ ID NO: 1217050 - RNA, 19 nt, Homo sapiens
  misc_RNA (1)...(19): siRNA sense strand
cuuagaacauguccacaag

SEQ ID NO: 1217051 - RNA, 19 nt, Homo sapiens
  misc_RNA (1)...(19): siRNA sense strand
uugaagcaccugaucauug

SEQ ID NO: 1217052 - RNA, 19 nt, Homo sapiens
  misc_RNA (1)...(19): siRNA sense strand
ggaguggauauauggcaaa

SEQ ID NO: 1217053 - RNA, 19 nt, Homo sapiens
  misc_RNA (1)...(19): siRNA sense strand
gaaucuagaaggcaaacca

SEQ ID NO: 1217054 - RNA, 19 nt, Homo sapiens
  misc_RNA (1)...(19): siRNA sense strand
aaacuggcucggagaagaa

SEQ ID NO: 1217055 - RNA, 19 nt, Homo sapiens
  misc_RNA (1)...(19): siRNA sense strand
uuuacuugauggacaguuu

SEQ ID NO: 1217056 - RNA, 19 nt, Homo sapiens
  misc_RNA (1)...(19): siRNA sense strand
aaauagcaaagccaaagaa

SEQ ID NO: 1217057 - RNA, 19 nt, Homo sapiens
  misc_RNA (1)...(19): siRNA sense strand
gaccugugaaguacuaaug

SEQ ID NO: 1217058 - RNA, 19 nt, Homo sapiens
  misc_RNA (1)...(19): siRNA sense strand
uuacuugauggacaguuua

SEQ ID NO: 1217059 - RNA, 19 nt, Homo sapiens
  misc_RNA (1)...(19): siRNA sense strand
acuaccaugcuaacaaaua

SEQ ID NO: 1217060 - RNA, 19 nt, Homo sapiens
  misc_RNA (1)...(19): siRNA sense strand
aauacuuccuuucaugugu

SEQ ID NO: 1217061 - RNA, 19 nt, Homo sapiens
  misc_RNA (1)...(19): siRNA sense strand
agaauucucccucuguugu

SEQ ID NO: 1217062 - RNA, 19 nt, Homo sapiens
  misc_RNA (1)...(19): siRNA sense strand
aggcaaaccaauucuauuc

SEQ ID NO: 1217063 - RNA, 19 nt, Homo sapiens
  misc_RNA (1)...(19): siRNA sense strand
gcaaacuugggaguggaua

SEQ ID NO: 1217064 - RNA, 19 nt, Homo sapiens
  misc_RNA (1)...(19): siRNA sense strand
gaccauaugaaucuagaag

SEQ ID NO: 1217065 - RNA, 19 nt, Homo sapiens
  misc_RNA (1)...(19): siRNA sense strand
gauggacaguuuaaaaucu

SEQ ID NO: 1217066 - RNA, 19 nt, Homo sapiens
  misc_RNA (1)...(19): siRNA sense strand
aacugaaacuaccaugcua

SEQ ID NO: 1217067 - RNA, 19 nt, Homo sapiens
  misc_RNA (1)...(19): siRNA sense strand
cuggauccaugaccauaug

SEQ ID NO: 1217068 - RNA, 19 nt, Homo sapiens
  misc_RNA (1)...(19): siRNA sense strand
ugaacagucacacuuggaa

SEQ ID NO: 1217069 - RNA, 19 nt, Homo sapiens
  misc_RNA (1)...(19): siRNA sense strand
gcacuuuauuauguaguac

SEQ ID NO: 1217070 - RNA, 19 nt, Homo sapiens
  misc_RNA (1)...(19): siRNA sense strand
cagucaauuuccaaugaug

SEQ ID NO: 1217071 - RNA, 19 nt, Homo sapiens
  misc_RNA (1)...(19): siRNA sense strand
gacauaaagaauggaagaa

SEQ ID NO: 1217072 - RNA, 19 nt, Homo sapiens
  misc_RNA (1)...(19): siRNA sense strand
uacuuccuuucauguguua

SEQ ID NO: 1217073 - RNA, 19 nt, Homo sapiens
  misc_RNA (1)...(19): siRNA sense strand
auacuuccuuucauguguu

SEQ ID NO: 1217074 - RNA, 19 nt, Homo sapiens
  misc_RNA (1)...(19): siRNA sense strand
acagucaauuuccaaugau

SEQ ID NO: 1217075 - RNA, 19 nt, Homo sapiens
  misc_RNA (1)...(19): siRNA sense strand
caauuuccaaugaugucua

SEQ ID NO: 1217076 - RNA, 19 nt, Homo sapiens
  misc_RNA (1)...(19): siRNA sense strand
ggaaauacgugacaaauua

SEQ ID NO: 1217077 - RNA, 19 nt, Homo sapiens
  misc_RNA (1)...(19): siRNA sense strand
ccaaagaacugcaaacuug

SEQ ID NO: 1217078 - RNA, 19 nt, Homo sapiens
  misc_RNA (1)...(19): siRNA sense strand
gaauguaaccugaaucuaa

SEQ ID NO: 1217079 - RNA, 19 nt, Homo sapiens
  misc_RNA (1)...(19): siRNA sense strand
ggaacagucuaccaugaua

SEQ ID NO: 1217080 - RNA, 19 nt, Homo sapiens
  misc_RNA (1)...(19): siRNA sense strand
uagcauaccuuccuuagug

SEQ ID NO: 1217081 - RNA, 19 nt, Homo sapiens
  misc_RNA (1)...(19): siRNA sense strand
gcaaaccaauucuauucuu

SEQ ID NO: 1217082 - RNA, 19 nt, Homo sapiens
  misc_RNA (1)...(19): siRNA sense strand
gaggaacagucuaccauga

SEQ ID NO: 1217083 - RNA, 19 nt, Homo sapiens
  misc_RNA (1)...(19): siRNA sense strand
gauaaucacauucaccuaa

SEQ ID NO: 1217084 - RNA, 19 nt, Homo sapiens
  misc_RNA (1)...(19): siRNA sense strand
gaaacuaccaugcuaacaa

SEQ ID NO: 1217085 - RNA, 19 nt, Homo sapiens
  misc_RNA (1)...(19): siRNA sense strand
aaacuaccaugcuaacaaa

SEQ ID NO: 1217086 - RNA, 19 nt, Homo sapiens
  misc_RNA (1)...(19): siRNA sense strand
ggacguucuugucuucuuu

SEQ ID NO: 1217087 - RNA, 19 nt, Homo sapiens
  misc_RNA (1)...(19): siRNA sense strand
guucuugucuucuuugcua

SEQ ID NO: 1217088 - RNA, 19 nt, Homo sapiens
  misc_RNA (1)...(19): siRNA sense strand
ccacaagaccacaaacuaa

SEQ ID NO: 1217089 - RNA, 19 nt, Homo sapiens
  misc_RNA (1)...(19): siRNA sense strand
gaaggcaaaccaauucuau

SEQ ID NO: 1217090 - RNA, 19 nt, Homo sapiens
  misc_RNA (1)...(19): siRNA sense strand
ccauugcacuuuauuaugu

SEQ ID NO: 1217091 - RNA, 19 nt, Homo sapiens
  misc_RNA (1)...(19): siRNA sense strand
uaaccugaaucuaaugaga

SEQ ID NO: 1217092 - RNA, 19 nt, Homo sapiens
  misc_RNA (1)...(19): siRNA sense strand
gaccacaaacuaaacagua

SEQ ID NO: 1217093 - RNA, 19 nt, Homo sapiens
  misc_RNA (1)...(19): siRNA sense strand
gaucauugguugccauugg

SEQ ID NO: 1217094 - RNA, 19 nt, Homo sapiens
  misc_RNA (1)...(19): siRNA sense strand
uaauaaacccaacggauga

SEQ ID NO: 1217095 - RNA, 19 nt, Homo sapiens
  misc_RNA (1)...(19): siRNA sense strand
uacagucaauuuccaauga

SEQ ID NO: 1217096 - RNA, 19 nt, Homo sapiens
  misc_RNA (1)...(19): siRNA sense strand
aauggaauauucucuguga

SEQ ID NO: 1217097 - RNA, 19 nt, Homo sapiens
  misc_RNA (1)...(19): siRNA sense strand
cagucacacuuggaaauua

SEQ ID NO: 1217098 - RNA, 19 nt, Homo sapiens
  misc_RNA (1)...(19): siRNA sense strand
cuaccaugcuaacaaauau

SEQ ID NO: 1217099 - RNA, 19 nt, Homo sapiens
  misc_RNA (1)...(19): siRNA sense strand
gaacagucacacuuggaaa

SEQ ID NO: 1217100 - RNA, 19 nt, Homo sapiens
  misc_RNA (1)...(19): siRNA sense strand
ugaagcaccugaucauugg

SEQ ID NO: 1217101 - RNA, 19 nt, Homo sapiens
  misc_RNA (1)...(19): siRNA sense strand
gaugggacguucuugucuu

SEQ ID NO: 1217102 - RNA, 19 nt, Homo sapiens
  misc_RNA (1)...(19): siRNA sense strand
gaacagucuaccaugauau

SEQ ID NO: 1217103 - RNA, 19 nt, Homo sapiens
  misc_RNA (1)...(19): siRNA sense strand
caagggaucaggagcaaug

SEQ ID NO: 1217104 - RNA, 19 nt, Homo sapiens
  misc_RNA (1)...(19): siRNA sense strand
agucacacuuggaaauuaa

SEQ ID NO: 1217105 - RNA, 19 nt, Homo sapiens
  misc_RNA (1)...(19): siRNA sense strand
guaauugguaggcaucaaa

SEQ ID NO: 1217106 - RNA, 19 nt, Homo sapiens
  misc_RNA (1)...(19): siRNA sense strand
ucauagacauaaagaaugg

SEQ ID NO: 1217107 - RNA, 19 nt, Homo sapiens
  misc_RNA (1)...(19): siRNA sense strand
gaauucucccucuguugua

SEQ ID NO: 1217108 - RNA, 19 nt, Homo sapiens
  misc_RNA (1)...(19): siRNA sense strand
uagcaaagccaaagaacug

SEQ ID NO: 1217109 - RNA, 19 nt, Homo sapiens
  misc_RNA (1)...(19): siRNA sense strand
gauuugaccuuuuacuuga

SEQ ID NO: 1217110 - RNA, 19 nt, Homo sapiens
  misc_RNA (1)...(19): siRNA sense strand
gagagaagaagguauaaaa

SEQ ID NO: 1217111 - RNA, 19 nt, Homo sapiens
  misc_RNA (1)...(19): siRNA sense strand
aaugagagaagaagguaua

SEQ ID NO: 1217112 - RNA, 19 nt, Homo sapiens
  misc_RNA (1)...(19): siRNA sense strand
cacaagaccacaaacuaaa

SEQ ID NO: 1217113 - RNA, 19 nt, Homo sapiens
  misc_RNA (1)...(19): siRNA sense strand
ggaauauucucugugaaaa

SEQ ID NO: 1217114 - RNA, 19 nt, Homo sapiens
  misc_RNA (1)...(19): siRNA sense strand
caaacuaaacaguaaaugg

SEQ ID NO: 1217115 - RNA, 19 nt, Homo sapiens
  misc_RNA (1)...(19): siRNA sense strand
cuaucaccauugcacuuua

SEQ ID NO: 1217116 - RNA, 19 nt, Homo sapiens
  misc_RNA (1)...(19): siRNA sense strand
caagucuuauuggcaguaa

SEQ ID NO: 1217117 - RNA, 19 nt, Homo sapiens
  misc_RNA (1)...(19): siRNA sense strand
aaacuugggaguggauaua

SEQ ID NO: 1217118 - RNA, 19 nt, Homo sapiens
  misc_RNA (1)...(19): siRNA sense strand
uaucaccauugcacuuuau

SEQ ID NO: 1217119 - RNA, 19 nt, Homo sapiens
  misc_RNA (1)...(19): siRNA sense strand
accacaaacuaaacaguaa

SEQ ID NO: 1217120 - RNA, 19 nt, Homo sapiens
  misc_RNA (1)...(19): siRNA sense strand
caacggaugagacacuguu

SEQ ID NO: 1217121 - RNA, 19 nt, Homo sapiens
  misc_RNA (1)...(19): siRNA sense strand
aagaauugcuuccaguuac

SEQ ID NO: 1217122 - RNA, 19 nt, Homo sapiens
  misc_RNA (1)...(19): siRNA sense strand
ucaccauugcacuuuauua

SEQ ID NO: 1217123 - RNA, 19 nt, Homo sapiens
  misc_RNA (1)...(19): siRNA sense strand
uggaauauucucugugaaa

SEQ ID NO: 1217124 - RNA, 19 nt, Homo sapiens
  misc_RNA (1)...(19): siRNA sense strand
gaaaaggaucccacucuga

SEQ ID NO: 1217125 - RNA, 19 nt, Homo sapiens
  misc_RNA (1)...(19): siRNA sense strand
cuagaaggcaaaccaauuc

SEQ ID NO: 1217126 - RNA, 19 nt, Homo sapiens
  misc_RNA (1)...(19): siRNA sense strand
ccacaaacuaaacaguaaa

SEQ ID NO: 1217127 - RNA, 19 nt, Homo sapiens
  misc_RNA (1)...(19): siRNA sense strand
ccugugaaguacuaaugaa

SEQ ID NO: 1217128 - RNA, 19 nt, Homo sapiens
  misc_RNA (1)...(19): siRNA sense strand
gcuaaagagcccuuaccaa

SEQ ID NO: 1217129 - RNA, 19 nt, Homo sapiens
  misc_RNA (1)...(19): siRNA sense strand
ggaauguaaccugaaucua

SEQ ID NO: 1217130 - RNA, 19 nt, Homo sapiens
  misc_RNA (1)...(19): siRNA sense strand
uaaauagcaaagccaaaga

SEQ ID NO: 1217131 - RNA, 19 nt, Homo sapiens
  misc_RNA (1)...(19): siRNA sense strand
gugaaguacuaaugaaugc

SEQ ID NO: 1217132 - RNA, 19 nt, Homo sapiens
  misc_RNA (1)...(19): siRNA sense strand
guacugaugggacguucuu

SEQ ID NO: 1217133 - RNA, 19 nt, Homo sapiens
  misc_RNA (1)...(19): siRNA sense strand
caccauugcacuuuauuau

SEQ ID NO: 1217134 - RNA, 19 nt, Homo sapiens
  misc_RNA (1)...(19): siRNA sense strand
gggacguucuugucuucuu

SEQ ID NO: 1217135 - RNA, 19 nt, Homo sapiens
  misc_RNA (1)...(19): siRNA sense strand
agacauaaagaauggaaga

SEQ ID NO: 1217136 - RNA, 19 nt, Homo sapiens
  misc_RNA (1)...(19): siRNA sense strand
uauaugaacagucacacuu

SEQ ID NO: 1217137 - RNA, 19 nt, Homo sapiens
  misc_RNA (1)...(19): siRNA sense strand
gccaaagaacugcaaacuu

SEQ ID NO: 1217138 - RNA, 19 nt, Homo sapiens
  misc_RNA (1)...(19): siRNA sense strand
ucugaccugugaaguacua

SEQ ID NO: 1217139 - RNA, 19 nt, Homo sapiens
  misc_RNA (1)...(19): siRNA sense strand
ucuagaaggcaaaccaauu

SEQ ID NO: 1217140 - RNA, 19 nt, Homo sapiens
  misc_RNA (1)...(19): siRNA sense strand
uagaacauguccacaagac

SEQ ID NO: 1217141 - RNA, 19 nt, Homo sapiens
  misc_RNA (1)...(19): siRNA sense strand
aaugaaugcuguugcuaca

SEQ ID NO: 1217142 - RNA, 19 nt, Homo sapiens
  misc_RNA (1)...(19): siRNA sense strand
caacugaaacuaccaugcu

SEQ ID NO: 1217143 - RNA, 19 nt, Homo sapiens
  misc_RNA (1)...(19): siRNA sense strand
uggaaauacgugacaaauu

SEQ ID NO: 1217144 - RNA, 19 nt, Homo sapiens
  misc_RNA (1)...(19): siRNA sense strand
gaaucuaaugagagaagaa

SEQ ID NO: 1217145 - RNA, 19 nt, Homo sapiens
  misc_RNA (1)...(19): siRNA sense strand
caagaccacaaacuaaaca

SEQ ID NO: 1217146 - RNA, 19 nt, Homo sapiens
  misc_RNA (1)...(19): siRNA sense strand
guacuaaugaaugcuguug

SEQ ID NO: 1217147 - RNA, 19 nt, Homo sapiens
  misc_RNA (1)...(19): siRNA sense strand
ugacuuucuuuacaaccaa

SEQ ID NO: 1217148 - RNA, 19 nt, Homo sapiens
  misc_RNA (1)...(19): siRNA sense strand
gauccaugaccauaugaau

SEQ ID NO: 1217149 - RNA, 19 nt, Homo sapiens
  misc_RNA (1)...(19): siRNA sense strand
cuaaugagagaagaaggua

SEQ ID NO: 1217150 - RNA, 19 nt, Homo sapiens
  misc_RNA (1)...(19): siRNA sense strand
cuuagaacauguccacaag

SEQ ID NO: 1217151 - RNA, 19 nt, Homo sapiens
  misc_RNA (1)...(19): siRNA sense strand
uugaagcaccugaucauug

SEQ ID NO: 1217152 - RNA, 19 nt, Homo sapiens
  misc_RNA (1)...(19): siRNA sense strand
ggaguggauauauggcaaa

SEQ ID NO: 1217153 - RNA, 19 nt, Homo sapiens
  misc_RNA (1)...(19): siRNA sense strand
gaaucuagaaggcaaacca

SEQ ID NO: 1217154 - RNA, 19 nt, Homo sapiens
  misc_RNA (1)...(19): siRNA sense strand
aaacuggcucggagaagaa

SEQ ID NO: 1217155 - RNA, 19 nt, Homo sapiens
  misc_RNA (1)...(19): siRNA sense strand
uuuacuugauggacaguuu

SEQ ID NO: 1217156 - RNA, 19 nt, Homo sapiens
  misc_RNA (1)...(19): siRNA sense strand
aaauagcaaagccaaagaa

SEQ ID NO: 1217157 - RNA, 19 nt, Homo sapiens
  misc_RNA (1)...(19): siRNA sense strand
gaccugugaaguacuaaug

SEQ ID NO: 1217158 - RNA, 19 nt, Homo sapiens
  misc_RNA (1)...(19): siRNA sense strand
uuacuugauggacaguuua

SEQ ID NO: 1217159 - RNA, 19 nt, Homo sapiens
  misc_RNA (1)...(19): siRNA sense strand
acuaccaugcuaacaaaua

SEQ ID NO: 1217160 - RNA, 19 nt, Homo sapiens
  misc_RNA (1)...(19): siRNA sense strand
aauacuuccuuucaugugu

SEQ ID NO: 1217161 - RNA, 19 nt, Homo sapiens
  misc_RNA (1)...(19): siRNA sense strand
agaauucucccucuguugu

SEQ ID NO: 1217162 - RNA, 19 nt, Homo sapiens
  misc_RNA (1)...(19): siRNA sense strand
aggcaaaccaauucuauuc

SEQ ID NO: 1217163 - RNA, 19 nt, Homo sapiens
  misc_RNA (1)...(19): siRNA sense strand
gcaaacuugggaguggaua

SEQ ID NO: 1217164 - RNA, 19 nt, Homo sapiens
  misc_RNA (1)...(19): siRNA sense strand
gaccauaugaaucuagaag

SEQ ID NO: 1217165 - RNA, 19 nt, Homo sapiens
  misc_RNA (1)...(19): siRNA sense strand
gauggacaguuuaaaaucu

SEQ ID NO: 1217166 - RNA, 19 nt, Homo sapiens
  misc_RNA (1)...(19): siRNA sense strand
aacugaaacuaccaugcua

SEQ ID NO: 1217167 - RNA, 19 nt, Homo sapiens
  misc_RNA (1)...(19): siRNA sense strand
cuggauccaugaccauaug

SEQ ID NO: 1217168 - RNA, 19 nt, Homo sapiens
  misc_RNA (1)...(19): siRNA sense strand
ugaacagucacacuuggaa

SEQ ID NO: 1217169 - RNA, 19 nt, Homo sapiens
  misc_RNA (1)...(19): siRNA sense strand
gcacuuuauuauguaguac

SEQ ID NO: 1217170 - RNA, 19 nt, Homo sapiens
  misc_RNA (1)...(19): siRNA sense strand
cagucaauuuccaaugaug

SEQ ID NO: 1217171 - RNA, 19 nt, Homo sapiens
  misc_RNA (1)...(19): siRNA sense strand
gacauaaagaauggaagaa

SEQ ID NO: 1217172 - RNA, 19 nt, Homo sapiens
  misc_RNA (1)...(19): siRNA sense strand
uacuuccuuucauguguua

SEQ ID NO: 1217173 - RNA, 19 nt, Homo sapiens
  misc_RNA (1)...(19): siRNA sense strand
auacuuccuuucauguguu

SEQ ID NO: 1217174 - RNA, 19 nt, Homo sapiens
  misc_RNA (1)...(19): siRNA sense strand
acagucaauuuccaaugau

SEQ ID NO: 1217175 - RNA, 19 nt, Homo sapiens
  misc_RNA (1)...(19): siRNA sense strand
caauuuccaaugaugucua

SEQ ID NO: 1217176 - RNA, 19 nt, Homo sapiens
  misc_RNA (1)...(19): siRNA sense strand
ggaaauacgugacaaauua

SEQ ID NO: 1217177 - RNA, 19 nt, Homo sapiens
  misc_RNA (1)...(19): siRNA sense strand
ccaaagaacugcaaacuug

SEQ ID NO: 1217178 - RNA, 19 nt, Homo sapiens
  misc_RNA (1)...(19): siRNA sense strand
gaauguaaccugaaucuaa

SEQ ID NO: 1217179 - RNA, 19 nt, Homo sapiens
  misc_RNA (1)...(19): siRNA sense strand
ggaacagucuaccaugaua

SEQ ID NO: 1217180 - RNA, 19 nt, Homo sapiens
  misc_RNA (1)...(19): siRNA sense strand
uagcauaccuuccuuagug

SEQ ID NO: 1217181 - RNA, 19 nt, Homo sapiens
  misc_RNA (1)...(19): siRNA sense strand
gcaaaccaauucuauucuu

SEQ ID NO: 1217182 - RNA, 19 nt, Homo sapiens
  misc_RNA (1)...(19): siRNA sense strand
gaggaacagucuaccauga

SEQ ID NO: 1217183 - RNA, 19 nt, Homo sapiens
  misc_RNA (1)...(19): siRNA sense strand
gauaaucacauucaccuaa

SEQ ID NO: 1217184 - RNA, 19 nt, Homo sapiens
  misc_RNA (1)...(19): siRNA sense strand
gaaacuaccaugcuaacaa

SEQ ID NO: 1217185 - RNA, 19 nt, Homo sapiens
  misc_RNA (1)...(19): siRNA sense strand
aaacuaccaugcuaacaaa

SEQ ID NO: 1217186 - RNA, 19 nt, Homo sapiens
  misc_RNA (1)...(19): siRNA sense strand
ggacguucuugucuucuuu

SEQ ID NO: 1217187 - RNA, 19 nt, Homo sapiens
  misc_RNA (1)...(19): siRNA sense strand
guucuugucuucuuugcua

SEQ ID NO: 1217188 - RNA, 19 nt, Homo sapiens
  misc_RNA (1)...(19): siRNA sense strand
ccacaagaccacaaacuaa

SEQ ID NO: 1217189 - RNA, 19 nt, Homo sapiens
  misc_RNA (1)...(19): siRNA sense strand
gaaggcaaaccaauucuau

SEQ ID NO: 1217190 - RNA, 19 nt, Homo sapiens
  misc_RNA (1)...(19): siRNA sense strand
ccauugcacuuuauuaugu

SEQ ID NO: 1217191 - RNA, 19 nt, Homo sapiens
  misc_RNA (1)...(19): siRNA sense strand
uaaccugaaucuaaugaga

SEQ ID NO: 1217192 - RNA, 19 nt, Homo sapiens
  misc_RNA (1)...(19): siRNA sense strand
gaccacaaacuaaacagua

SEQ ID NO: 1217193 - RNA, 19 nt, Homo sapiens
  misc_RNA (1)...(19): siRNA sense strand
gaucauugguugccauugg

SEQ ID NO: 1217194 - RNA, 19 nt, Homo sapiens
  misc_RNA (1)...(19): siRNA sense strand
uaauaaacccaacggauga

SEQ ID NO: 1217195 - RNA, 19 nt, Homo sapiens
  misc_RNA (1)...(19): siRNA sense strand
uacagucaauuuccaauga

SEQ ID NO: 1217196 - RNA, 19 nt, Homo sapiens
  misc_RNA (1)...(19): siRNA sense strand
aauggaauauucucuguga

SEQ ID NO: 1217197 - RNA, 19 nt, Homo sapiens
  misc_RNA (1)...(19): siRNA sense strand
cagucacacuuggaaauua

SEQ ID NO: 1217198 - RNA, 19 nt, Homo sapiens
  misc_RNA (1)...(19): siRNA sense strand
cuaccaugcuaacaaauau

SEQ ID NO: 1217199 - RNA, 19 nt, Homo sapiens
  misc_RNA (1)...(19): siRNA sense strand
gaacagucacacuuggaaa

SEQ ID NO: 1217200 - RNA, 19 nt, Homo sapiens
  misc_RNA (1)...(19): siRNA sense strand
ugaagcaccugaucauugg

SEQ ID NO: 1217201 - RNA, 19 nt, Homo sapiens
  misc_RNA (1)...(19): siRNA sense strand
gaugggacguucuugucuu

SEQ ID NO: 1217202 - RNA, 19 nt, Homo sapiens
  misc_RNA (1)...(19): siRNA sense strand
gaacagucuaccaugauau

SEQ ID NO: 1217203 - RNA, 19 nt, Homo sapiens
  misc_RNA (1)...(19): siRNA sense strand
caagggaucaggagcaaug

SEQ ID NO: 1217204 - RNA, 19 nt, Homo sapiens
  misc_RNA (1)...(19): siRNA sense strand
agucacacuuggaaauuaa

SEQ ID NO: 1217205 - RNA, 19 nt, Homo sapiens
  misc_RNA (1)...(19): siRNA sense strand
guaauugguaggcaucaaa

SEQ ID NO: 1217206 - RNA, 19 nt, Homo sapiens
  misc_RNA (1)...(19): siRNA sense strand
ucauagacauaaagaaugg

SEQ ID NO: 1217207 - RNA, 19 nt, Homo sapiens
  misc_RNA (1)...(19): siRNA sense strand
gaauucucccucuguugua

SEQ ID NO: 1217208 - RNA, 19 nt, Homo sapiens
  misc_RNA (1)...(19): siRNA sense strand
uagcaaagccaaagaacug

SEQ ID NO: 1217209 - RNA, 19 nt, Homo sapiens
  misc_RNA (1)...(19): siRNA sense strand
gauuugaccuuuuacuuga

SEQ ID NO: 1217210 - RNA, 19 nt, Homo sapiens
  misc_RNA (1)...(19): siRNA sense strand
gagagaagaagguauaaaa

SEQ ID NO: 1217211 - RNA, 19 nt, Homo sapiens
  misc_RNA (1)...(19): siRNA sense strand
aaugagagaagaagguaua

SEQ ID NO: 1217212 - RNA, 19 nt, Homo sapiens
  misc_RNA (1)...(19): siRNA sense strand
cacaagaccacaaacuaaa

SEQ ID NO: 1217213 - RNA, 19 nt, Homo sapiens
  misc_RNA (1)...(19): siRNA sense strand
ggaauauucucugugaaaa

SEQ ID NO: 1217214 - RNA, 19 nt, Homo sapiens
  misc_RNA (1)...(19): siRNA sense strand
caaacuaaacaguaaaugg

SEQ ID NO: 1217215 - RNA, 19 nt, Homo sapiens
  misc_RNA (1)...(19): siRNA sense strand
cuaucaccauugcacuuua

SEQ ID NO: 1217216 - RNA, 19 nt, Homo sapiens
  misc_RNA (1)...(19): siRNA sense strand
caagucuuauuggcaguaa

SEQ ID NO: 1217217 - RNA, 19 nt, Homo sapiens
  misc_RNA (1)...(19): siRNA sense strand
aaacuugggaguggauaua

SEQ ID NO: 1217218 - RNA, 19 nt, Homo sapiens
  misc_RNA (1)...(19): siRNA sense strand
uaucaccauugcacuuuau

SEQ ID NO: 1217219 - RNA, 19 nt, Homo sapiens
  misc_RNA (1)...(19): siRNA sense strand
accacaaacuaaacaguaa

SEQ ID NO: 1217220 - RNA, 19 nt, Homo sapiens
  misc_RNA (1)...(19): siRNA sense strand
caacggaugagacacuguu

SEQ ID NO: 1217221 - RNA, 19 nt, Homo sapiens
  misc_RNA (1)...(19): siRNA sense strand
aagaauugcuuccaguuac

SEQ ID NO: 1217222 - RNA, 19 nt, Homo sapiens
  misc_RNA (1)...(19): siRNA sense strand
ucaccauugcacuuuauua

SEQ ID NO: 1217223 - RNA, 19 nt, Homo sapiens
  misc_RNA (1)...(19): siRNA sense strand
uggaauauucucugugaaa

SEQ ID NO: 1217224 - RNA, 19 nt, Homo sapiens
  misc_RNA (1)...(19): siRNA sense strand
gaaaaggaucccacucuga

SEQ ID NO: 1217225 - RNA, 19 nt, Homo sapiens
  misc_RNA (1)...(19): siRNA sense strand
cuagaaggcaaaccaauuc

SEQ ID NO: 1217226 - RNA, 19 nt, Homo sapiens
  misc_RNA (1)...(19): siRNA sense strand
ccacaaacuaaacaguaaa

SEQ ID NO: 1217227 - RNA, 19 nt, Homo sapiens
  misc_RNA (1)...(19): siRNA sense strand
ccugugaaguacuaaugaa

SEQ ID NO: 1217228 - RNA, 19 nt, Homo sapiens
  misc_RNA (1)...(19): siRNA sense strand
gcuaaagagcccuuaccaa

SEQ ID NO: 1217229 - RNA, 19 nt, Homo sapiens
  misc_RNA (1)...(19): siRNA sense strand
ggaauguaaccugaaucua

SEQ ID NO: 1217230 - RNA, 19 nt, Homo sapiens
  misc_RNA (1)...(19): siRNA sense strand
uaaauagcaaagccaaaga

SEQ ID NO: 1217231 - RNA, 19 nt, Homo sapiens
  misc_RNA (1)...(19): siRNA sense strand
gugaaguacuaaugaaugc

SEQ ID NO: 1217232 - RNA, 19 nt, Homo sapiens
  misc_RNA (1)...(19): siRNA sense strand
guacugaugggacguucuu

SEQ ID NO: 1217233 - RNA, 19 nt, Homo sapiens
  misc_RNA (1)...(19): siRNA sense strand
caccauugcacuuuauuau

SEQ ID NO: 1217234 - RNA, 19 nt, Homo sapiens
  misc_RNA (1)...(19): siRNA sense strand
gggacguucuugucuucuu

SEQ ID NO: 1217235 - RNA, 19 nt, Homo sapiens
  misc_RNA (1)...(19): siRNA sense strand
agacauaaagaauggaaga

SEQ ID NO: 1217236 - RNA, 19 nt, Homo sapiens
  misc_RNA (1)...(19): siRNA sense strand
uauaugaacagucacacuu

SEQ ID NO: 1217237 - RNA, 19 nt, Homo sapiens
  misc_RNA (1)...(19): siRNA sense strand
gccaaagaacugcaaacuu

SEQ ID NO: 1217238 - RNA, 19 nt, Homo sapiens
  misc_RNA (1)...(19): siRNA sense strand
ucugaccugugaaguacua

SEQ ID NO: 1217239 - RNA, 19 nt, Homo sapiens
  misc_RNA (1)...(19): siRNA sense strand
ucuagaaggcaaaccaauu

SEQ ID NO: 1217240 - RNA, 19 nt, Homo sapiens
  misc_RNA (1)...(19): siRNA sense strand
uagaacauguccacaagac

SEQ ID NO: 1217241 - RNA, 19 nt, Homo sapiens
  misc_RNA (1)...(19): siRNA sense strand
aaugaaugcuguugcuaca

SEQ ID NO: 1217242 - RNA, 19 nt, Homo sapiens
  misc_RNA (1)...(19): siRNA sense strand
caacugaaacuaccaugcu

SEQ ID NO: 1217243 - RNA, 19 nt, Homo sapiens
  misc_RNA (1)...(19): siRNA sense strand
uggaaauacgugacaaauu

SEQ ID NO: 1217244 - RNA, 19 nt, Homo sapiens
  misc_RNA (1)...(19): siRNA sense strand
gaaucuaaugagagaagaa

SEQ ID NO: 1217245 - RNA, 19 nt, Homo sapiens
  misc_RNA (1)...(19): siRNA sense strand
caagaccacaaacuaaaca

SEQ ID NO: 1217246 - RNA, 19 nt, Homo sapiens
  misc_RNA (1)...(19): siRNA sense strand
guacuaaugaaugcuguug

SEQ ID NO: 1217247 - RNA, 19 nt, Homo sapiens
  misc_RNA (1)...(19): siRNA sense strand
ugacuuucuuuacaaccaa

SEQ ID NO: 1217248 - RNA, 19 nt, Homo sapiens
  misc_RNA (1)...(19): siRNA sense strand
gauccaugaccauaugaau

SEQ ID NO: 1217249 - RNA, 19 nt, Homo sapiens
  misc_RNA (1)...(19): siRNA sense strand
cuaaugagagaagaaggua

SEQ ID NO: 1217250 - RNA, 19 nt, Homo sapiens
  misc_RNA (1)...(19): siRNA sense strand
cuuagaacauguccacaag

SEQ ID NO: 1217251 - RNA, 19 nt, Homo sapiens
  misc_RNA (1)...(19): siRNA sense strand
uugaagcaccugaucauug

SEQ ID NO: 1217252 - RNA, 19 nt, Homo sapiens
  misc_RNA (1)...(19): siRNA sense strand
ggaguggauauauggcaaa

SEQ ID NO: 1217253 - RNA, 19 nt, Homo sapiens
  misc_RNA (1)...(19): siRNA sense strand
gaaucuagaaggcaaacca

SEQ ID NO: 1217254 - RNA, 19 nt, Homo sapiens
  misc_RNA (1)...(19): siRNA sense strand
aaacuggcucggagaagaa

SEQ ID NO: 1217255 - RNA, 19 nt, Homo sapiens
  misc_RNA (1)...(19): siRNA sense strand
uuuacuugauggacaguuu

SEQ ID NO: 1217256 - RNA, 19 nt, Homo sapiens
  misc_RNA (1)...(19): siRNA sense strand
aaauagcaaagccaaagaa

SEQ ID NO: 1217257 - RNA, 19 nt, Homo sapiens
  misc_RNA (1)...(19): siRNA sense strand
gaccugugaaguacuaaug

SEQ ID NO: 1217258 - RNA, 19 nt, Homo sapiens
  misc_RNA (1)...(19): siRNA sense strand
uuacuugauggacaguuua

SEQ ID NO: 1217259 - RNA, 19 nt, Homo sapiens
  misc_RNA (1)...(19): siRNA sense strand
acuaccaugcuaacaaaua

SEQ ID NO: 1217260 - RNA, 19 nt, Homo sapiens
  misc_RNA (1)...(19): siRNA sense strand
aauacuuccuuucaugugu

SEQ ID NO: 1217261 - RNA, 19 nt, Homo sapiens
  misc_RNA (1)...(19): siRNA sense strand
agaauucucccucuguugu

SEQ ID NO: 1217262 - RNA, 19 nt, Homo sapiens
  misc_RNA (1)...(19): siRNA sense strand
aggcaaaccaauucuauuc

SEQ ID NO: 1217263 - RNA, 19 nt, Homo sapiens
  misc_RNA (1)...(19): siRNA sense strand
gcaaacuugggaguggaua

SEQ ID NO: 1217264 - RNA, 19 nt, Homo sapiens
  misc_RNA (1)...(19): siRNA sense strand
gaccauaugaaucuagaag

SEQ ID NO: 1217265 - RNA, 19 nt, Homo sapiens
  misc_RNA (1)...(19): siRNA sense strand
gauggacaguuuaaaaucu

SEQ ID NO: 1217266 - RNA, 19 nt, Homo sapiens
  misc_RNA (1)...(19): siRNA sense strand
aacugaaacuaccaugcua

SEQ ID NO: 1217267 - RNA, 19 nt, Homo sapiens
  misc_RNA (1)...(19): siRNA sense strand
cuggauccaugaccauaug

SEQ ID NO: 1217268 - RNA, 19 nt, Homo sapiens
  misc_RNA (1)...(19): siRNA sense strand
ugaacagucacacuuggaa

SEQ ID NO: 1217269 - RNA, 19 nt, Homo sapiens
  misc_RNA (1)...(19): siRNA sense strand
gcacuuuauuauguaguac

SEQ ID NO: 1217270 - RNA, 19 nt, Homo sapiens
  misc_RNA (1)...(19): siRNA sense strand
cagucaauuuccaaugaug

SEQ ID NO: 1217271 - RNA, 19 nt, Homo sapiens
  misc_RNA (1)...(19): siRNA sense strand
gacauaaagaauggaagaa

SEQ ID NO: 1217272 - RNA, 19 nt, Homo sapiens
  misc_RNA (1)...(19): siRNA sense strand
uacuuccuuucauguguua

SEQ ID NO: 1217273 - RNA, 19 nt, Homo sapiens
  misc_RNA (1)...(19): siRNA sense strand
auacuuccuuucauguguu

SEQ ID NO: 1217274 - RNA, 19 nt, Homo sapiens
  misc_RNA (1)...(19): siRNA sense strand
acagucaauuuccaaugau

SEQ ID NO: 1217275 - RNA, 19 nt, Homo sapiens
  misc_RNA (1)...(19): siRNA sense strand
caauuuccaaugaugucua

SEQ ID NO: 1217276 - RNA, 19 nt, Homo sapiens
  misc_RNA (1)...(19): siRNA sense strand
caagaaggcuguccugaaa

SEQ ID NO: 1217277 - RNA, 19 nt, Homo sapiens
  misc_RNA (1)...(19): siRNA sense strand
gaagcaacgugacugugua

SEQ ID NO: 1217278 - RNA, 19 nt, Homo sapiens
  misc_RNA (1)...(19): siRNA sense strand
gcaaugaggucagauacca

SEQ ID NO: 1217279 - RNA, 19 nt, Homo sapiens
  misc_RNA (1)...(19): siRNA sense strand
gaaagugagagaccaagaa

SEQ ID NO: 1217280 - RNA, 19 nt, Homo sapiens
  misc_RNA (1)...(19): siRNA sense strand
guaaaccaaugcaaaucaa

SEQ ID NO: 1217281 - RNA, 19 nt, Homo sapiens
  misc_RNA (1)...(19): siRNA sense strand
cggauggacucgcuaauga

SEQ ID NO: 1217282 - RNA, 19 nt, Homo sapiens
  misc_RNA (1)...(19): siRNA sense strand
ggagaacuuucaagcacuu

SEQ ID NO: 1217283 - RNA, 19 nt, Homo sapiens
  misc_RNA (1)...(19): siRNA sense strand
ugaggaagauaucaggaaa

SEQ ID NO: 1217284 - RNA, 19 nt, Homo sapiens
  misc_RNA (1)...(19): siRNA sense strand
gaggucagauaccaucaau

SEQ ID NO: 1217285 - RNA, 19 nt, Homo sapiens
  misc_RNA (1)...(19): siRNA sense strand
gaagacagucagagagaga

SEQ ID NO: 1217286 - RNA, 19 nt, Homo sapiens
  misc_RNA (1)...(19): siRNA sense strand
cagaugcgguggagauaau

SEQ ID NO: 1217287 - RNA, 19 nt, Homo sapiens
  misc_RNA (1)...(19): siRNA sense strand
ggaagcaacgugacugugu

SEQ ID NO: 1217288 - RNA, 19 nt, Homo sapiens
  misc_RNA (1)...(19): siRNA sense strand
uuacagcagugcaggagaa

SEQ ID NO: 1217289 - RNA, 19 nt, Homo sapiens
  misc_RNA (1)...(19): siRNA sense strand
ccaagaaggcuguccugaa

SEQ ID NO: 1217290 - RNA, 19 nt, Homo sapiens
  misc_RNA (1)...(19): siRNA sense strand
gagaauguccaguuacaca

SEQ ID NO: 1217291 - RNA, 19 nt, Homo sapiens
  misc_RNA (1)...(19): siRNA sense strand
gaaagugaagacagucaga

SEQ ID NO: 1217292 - RNA, 19 nt, Homo sapiens
  misc_RNA (1)...(19): siRNA sense strand
gagagagacucgcaauagc

SEQ ID NO: 1217293 - RNA, 19 nt, Homo sapiens
  misc_RNA (1)...(19): siRNA sense strand
ugcagggacuccaggcuua

SEQ ID NO: 1217294 - RNA, 19 nt, Homo sapiens
  misc_RNA (1)...(19): siRNA sense strand
aacaauuucuggucacuga

SEQ ID NO: 1217295 - RNA, 19 nt, Homo sapiens
  misc_RNA (1)...(19): siRNA sense strand
cagcuccucugcaaacaau

SEQ ID NO: 1217296 - RNA, 19 nt, Homo sapiens
  misc_RNA (1)...(19): siRNA sense strand
aaacaggaagggaaaguga

SEQ ID NO: 1217297 - RNA, 19 nt, Homo sapiens
  misc_RNA (1)...(19): siRNA sense strand
gggaggagagcuuggagaa

SEQ ID NO: 1217298 - RNA, 19 nt, Homo sapiens
  misc_RNA (1)...(19): siRNA sense strand
cuuugagaauguccaguua

SEQ ID NO: 1217299 - RNA, 19 nt, Homo sapiens
  misc_RNA (1)...(19): siRNA sense strand
gcaggagaacuuucaagca

SEQ ID NO: 1217300 - RNA, 19 nt, Homo sapiens
  misc_RNA (1)...(19): siRNA sense strand
gaaacaggaagggaaagug

SEQ ID NO: 1217301 - RNA, 19 nt, Homo sapiens
  misc_RNA (1)...(19): siRNA sense strand
gcuccucugcaaacaauuu

SEQ ID NO: 1217302 - RNA, 19 nt, Homo sapiens
  misc_RNA (1)...(19): siRNA sense strand
caacgugacuguguaaacc

SEQ ID NO: 1217303 - RNA, 19 nt, Homo sapiens
  misc_RNA (1)...(19): siRNA sense strand
cagagagagacucgcaaua

SEQ ID NO: 1217304 - RNA, 19 nt, Homo sapiens
  misc_RNA (1)...(19): siRNA sense strand
gugaagacagucagagaga

SEQ ID NO: 1217305 - RNA, 19 nt, Homo sapiens
  misc_RNA (1)...(19): siRNA sense strand
cuaaugaggcagagaaagu

SEQ ID NO: 1217306 - RNA, 19 nt, Homo sapiens
  misc_RNA (1)...(19): siRNA sense strand
aggaagauaucaggaaaca

SEQ ID NO: 1217307 - RNA, 19 nt, Homo sapiens
  misc_RNA (1)...(19): siRNA sense strand
gaacuuucaagcacuuugg

SEQ ID NO: 1217308 - RNA, 19 nt, Homo sapiens
  misc_RNA (1)...(19): siRNA sense strand
agagagagacucgcaauag

SEQ ID NO: 1217309 - RNA, 19 nt, Homo sapiens
  misc_RNA (1)...(19): siRNA sense strand
ggaaacaggaagggaaagu

SEQ ID NO: 1217310 - RNA, 19 nt, Homo sapiens
  misc_RNA (1)...(19): siRNA sense strand
cagcagugcaggagaacuu

SEQ ID NO: 1217311 - RNA, 19 nt, Homo sapiens
  misc_RNA (1)...(19): siRNA sense strand
caggaaacaggaagggaaa

SEQ ID NO: 1217312 - RNA, 19 nt, Homo sapiens
  misc_RNA (1)...(19): siRNA sense strand
gagcaccucaaucccuuug

SEQ ID NO: 1217313 - RNA, 19 nt, Homo sapiens
  misc_RNA (1)...(19): siRNA sense strand
gcggauggacucgcuaaug

SEQ ID NO: 1217314 - RNA, 19 nt, Homo sapiens
  misc_RNA (1)...(19): siRNA sense strand
gcaacgugacuguguaaac

SEQ ID NO: 1217315 - RNA, 19 nt, Homo sapiens
  misc_RNA (1)...(19): siRNA sense strand
aagggaaagugaagacagu

SEQ ID NO: 1217316 - RNA, 19 nt, Homo sapiens
  misc_RNA (1)...(19): siRNA sense strand
caaacaauuucuggucacu

SEQ ID NO: 1217317 - RNA, 19 nt, Homo sapiens
  misc_RNA (1)...(19): siRNA sense strand
gcagagggaguggguaucu

SEQ ID NO: 1217318 - RNA, 19 nt, Homo sapiens
  misc_RNA (1)...(19): siRNA sense strand
uugagaauguccaguuaca

SEQ ID NO: 1217319 - RNA, 19 nt, Homo sapiens
  misc_RNA (1)...(19): siRNA sense strand
gaggaagcaacgugacugu

SEQ ID NO: 1217320 - RNA, 19 nt, Homo sapiens
  misc_RNA (1)...(19): siRNA sense strand
gugacuguguaaaccaaug

SEQ ID NO: 1217321 - RNA, 19 nt, Homo sapiens
  misc_RNA (1)...(19): siRNA sense strand
uguaaaccaaugcaaauca

SEQ ID NO: 1217322 - RNA, 19 nt, Homo sapiens
  misc_RNA (1)...(19): siRNA sense strand
ucagaugcgguggagauaa

SEQ ID NO: 1217323 - RNA, 19 nt, Homo sapiens
  misc_RNA (1)...(19): siRNA sense strand
ccaguuacacauucaagag

SEQ ID NO: 1217324 - RNA, 19 nt, Homo sapiens
  misc_RNA (1)...(19): siRNA sense strand
gggaaagugaagacaguca

SEQ ID NO: 1217325 - RNA, 19 nt, Homo sapiens
  misc_RNA (1)...(19): siRNA sense strand
ccaccuugccugcucuuca

SEQ ID NO: 1217326 - RNA, 19 nt, Homo sapiens
  misc_RNA (1)...(19): siRNA sense strand
ucagagagagacucgcaau

SEQ ID NO: 1217327 - RNA, 19 nt, Homo sapiens
  misc_RNA (1)...(19): siRNA sense strand
aagcaacgugacuguguaa

SEQ ID NO: 1217328 - RNA, 19 nt, Homo sapiens
  misc_RNA (1)...(19): siRNA sense strand
ggaagggaaagugaagaca

SEQ ID NO: 1217329 - RNA, 19 nt, Homo sapiens
  misc_RNA (1)...(19): siRNA sense strand
aaaccaaugcaaaucaaag

SEQ ID NO: 1217330 - RNA, 19 nt, Homo sapiens
  misc_RNA (1)...(19): siRNA sense strand
uguguaaaccaaugcaaau

SEQ ID NO: 1217331 - RNA, 19 nt, Homo sapiens
  misc_RNA (1)...(19): siRNA sense strand
uaaugaggcagagaaagug

SEQ ID NO: 1217332 - RNA, 19 nt, Homo sapiens
  misc_RNA (1)...(19): siRNA sense strand
aggccaguaacgagaauua

SEQ ID NO: 1217333 - RNA, 19 nt, Homo sapiens
  misc_RNA (1)...(19): siRNA sense strand
ggcagaagcuugagguuau

SEQ ID NO: 1217334 - RNA, 19 nt, Homo sapiens
  misc_RNA (1)...(19): siRNA sense strand
ucaccacgauaucauguua

SEQ ID NO: 1217335 - RNA, 19 nt, Homo sapiens
  misc_RNA (1)...(19): siRNA sense strand
gcagaagcuugagguuaua

SEQ ID NO: 1217336 - RNA, 19 nt, Homo sapiens
  misc_RNA (1)...(19): siRNA sense strand
gcaggaaggucuauaacag

SEQ ID NO: 1217337 - RNA, 19 nt, Homo sapiens
  misc_RNA (1)...(19): siRNA sense strand
uaacauaacagaggaagaa

SEQ ID NO: 1217338 - RNA, 19 nt, Homo sapiens
  misc_RNA (1)...(19): siRNA sense strand
ucacccgaaucucccauua

SEQ ID NO: 1217339 - RNA, 19 nt, Homo sapiens
  misc_RNA (1)...(19): siRNA sense strand
cuacauggccuaccuggaa

SEQ ID NO: 1217340 - RNA, 19 nt, Homo sapiens
  misc_RNA (1)...(19): siRNA sense strand
cacgauaucauguuacuaa

SEQ ID NO: 1217341 - RNA, 19 nt, Homo sapiens
  misc_RNA (1)...(19): siRNA sense strand
gcaauuccgucauccaaaa

SEQ ID NO: 1217342 - RNA, 19 nt, Homo sapiens
  misc_RNA (1)...(19): siRNA sense strand
uguggugguuuccuuauaa

SEQ ID NO: 1217343 - RNA, 19 nt, Homo sapiens
  misc_RNA (1)...(19): siRNA sense strand
ccuuggagcccauaacaua

SEQ ID NO: 1217344 - RNA, 19 nt, Homo sapiens
  misc_RNA (1)...(19): siRNA sense strand
uauaacacuucuacucuuc

SEQ ID NO: 1217345 - RNA, 19 nt, Homo sapiens
  misc_RNA (1)...(19): siRNA sense strand
ucagagacuuugaccacaa

SEQ ID NO: 1217346 - RNA, 19 nt, Homo sapiens
  misc_RNA (1)...(19): siRNA sense strand
acacauggcagaagcuuga

SEQ ID NO: 1217347 - RNA, 19 nt, Homo sapiens
  misc_RNA (1)...(19): siRNA sense strand
gcaaucccaggaagacaaa

SEQ ID NO: 1217348 - RNA, 19 nt, Homo sapiens
  misc_RNA (1)...(19): siRNA sense strand
gauccugcaggcaaauuaa

SEQ ID NO: 1217349 - RNA, 19 nt, Homo sapiens
  misc_RNA (1)...(19): siRNA sense strand
auaaagcaauuccgucauc

SEQ ID NO: 1217350 - RNA, 19 nt, Homo sapiens
  misc_RNA (1)...(19): siRNA sense strand
uacuaaaguugaaggagaa

SEQ ID NO: 1217351 - RNA, 19 nt, Homo sapiens
  misc_RNA (1)...(19): siRNA sense strand
uggccuaccuggaaauugu

SEQ ID NO: 1217352 - RNA, 19 nt, Homo sapiens
  misc_RNA (1)...(19): siRNA sense strand
cagagacuuugaccacaau

SEQ ID NO: 1217353 - RNA, 19 nt, Homo sapiens
  misc_RNA (1)...(19): siRNA sense strand
uggcagaagcuugagguua

SEQ ID NO: 1217354 - RNA, 19 nt, Homo sapiens
  misc_RNA (1)...(19): siRNA sense strand
cuuauaagacggaacuuug

SEQ ID NO: 1217355 - RNA, 19 nt, Homo sapiens
  misc_RNA (1)...(19): siRNA sense strand
gaagcuugagguuauaaag

SEQ ID NO: 1217356 - RNA, 19 nt, Homo sapiens
  misc_RNA (1)...(19): siRNA sense strand
uacauggccuaccuggaaa

SEQ ID NO: 1217357 - RNA, 19 nt, Homo sapiens
  misc_RNA (1)...(19): siRNA sense strand
cugcugcucuuucucuugu

SEQ ID NO: 1217358 - RNA, 19 nt, Homo sapiens
  misc_RNA (1)...(19): siRNA sense strand
gagcccauaacauaacaga

SEQ ID NO: 1217359 - RNA, 19 nt, Homo sapiens
  misc_RNA (1)...(19): siRNA sense strand
cccagggcaucguauccua

SEQ ID NO: 1217360 - RNA, 19 nt, Homo sapiens
  misc_RNA (1)...(19): siRNA sense strand
ggcaaucccaggaagacaa

SEQ ID NO: 1217361 - RNA, 19 nt, Homo sapiens
  misc_RNA (1)...(19): siRNA sense strand
ggaaggucuauaacaguca

SEQ ID NO: 1217362 - RNA, 19 nt, Homo sapiens
  misc_RNA (1)...(19): siRNA sense strand
gggcaucguauccuaugga

SEQ ID NO: 1217363 - RNA, 19 nt, Homo sapiens
  misc_RNA (1)...(19): siRNA sense strand
cauaacagaggaagaagac

SEQ ID NO: 1217364 - RNA, 19 nt, Homo sapiens
  misc_RNA (1)...(19): siRNA sense strand
uuguggugguuuccuuaua

SEQ ID NO: 1217365 - RNA, 19 nt, Homo sapiens
  misc_RNA (1)...(19): siRNA sense strand
caggaaggucuauaacagu

SEQ ID NO: 1217366 - RNA, 19 nt, Homo sapiens
  misc_RNA (1)...(19): siRNA sense strand
gcagccacuucagagacuu

SEQ ID NO: 1217367 - RNA, 19 nt, Homo sapiens
  misc_RNA (1)...(19): siRNA sense strand
cagaagcuugagguuauaa

SEQ ID NO: 1217368 - RNA, 19 nt, Homo sapiens
  misc_RNA (1)...(19): siRNA sense strand
gaaaguaguuaagcauuug

SEQ ID NO: 1217369 - RNA, 19 nt, Homo sapiens
  misc_RNA (1)...(19): siRNA sense strand
gguguggagucucuuauuu

SEQ ID NO: 1217370 - RNA, 19 nt, Homo sapiens
  misc_RNA (1)...(19): siRNA sense strand
caagaagacguccauauug

SEQ ID NO: 1217371 - RNA, 19 nt, Homo sapiens
  misc_RNA (1)...(19): siRNA sense strand
uaaagaugcuuggauuaga

SEQ ID NO: 1217372 - RNA, 19 nt, Homo sapiens
  misc_RNA (1)...(19): siRNA sense strand
aaagaugcuuggauuagaa

SEQ ID NO: 1217373 - RNA, 19 nt, Homo sapiens
  misc_RNA (1)...(19): siRNA sense strand
aagaauaucccuucaguga

SEQ ID NO: 1217374 - RNA, 19 nt, Homo sapiens
  misc_RNA (1)...(19): siRNA sense strand
ccucauaaacugcauauug

SEQ ID NO: 1217375 - RNA, 19 nt, Homo sapiens
  misc_RNA (1)...(19): siRNA sense strand
gaucaagaauuccagaaaa

SEQ ID NO: 1217376 - RNA, 19 nt, Homo sapiens
  misc_RNA (1)...(19): siRNA sense strand
ccacagaacccucauaaac

SEQ ID NO: 1217377 - RNA, 19 nt, Homo sapiens
  misc_RNA (1)...(19): siRNA sense strand
acaagaagacguccauauu

SEQ ID NO: 1217378 - RNA, 19 nt, Homo sapiens
  misc_RNA (1)...(19): siRNA sense strand
caaauucaccagaucaaga

SEQ ID NO: 1217379 - RNA, 19 nt, Homo sapiens
  misc_RNA (1)...(19): siRNA sense strand
acagaacccucauaaacug

SEQ ID NO: 1217380 - RNA, 19 nt, Homo sapiens
  misc_RNA (1)...(19): siRNA sense strand
acaagaauaucccuucagu

SEQ ID NO: 1217381 - RNA, 19 nt, Homo sapiens
  misc_RNA (1)...(19): siRNA sense strand
gcacauaccccucaaguuc

SEQ ID NO: 1217382 - RNA, 19 nt, Homo sapiens
  misc_RNA (1)...(19): siRNA sense strand
ucacaagaauaucccuuca

SEQ ID NO: 1217383 - RNA, 19 nt, Homo sapiens
  misc_RNA (1)...(19): siRNA sense strand
aagaagacguccauauugg

SEQ ID NO: 1217384 - RNA, 19 nt, Homo sapiens
  misc_RNA (1)...(19): siRNA sense strand
cucauaaacugcauauugu

SEQ ID NO: 1217385 - RNA, 19 nt, Homo sapiens
  misc_RNA (1)...(19): siRNA sense strand
cgucacaaauucaccagau

SEQ ID NO: 1217386 - RNA, 19 nt, Homo sapiens
  misc_RNA (1)...(19): siRNA sense strand
uggagucucuuauuuguac

SEQ ID NO: 1217387 - RNA, 19 nt, Homo sapiens
  misc_RNA (1)...(19): siRNA sense strand
cagauuggauucgucacaa

SEQ ID NO: 1217388 - RNA, 19 nt, Homo sapiens
  misc_RNA (1)...(19): siRNA sense strand
agacguccauauugggaaa

SEQ ID NO: 1217389 - RNA, 19 nt, Homo sapiens
  misc_RNA (1)...(19): siRNA sense strand
uguggagucucuuauuugu

SEQ ID NO: 1217390 - RNA, 19 nt, Homo sapiens
  misc_RNA (1)...(19): siRNA sense strand
ucacaaauucaccagauca

SEQ ID NO: 1217391 - RNA, 19 nt, Homo sapiens
  misc_RNA (1)...(19): siRNA sense strand
aaagguguggagucucuua

SEQ ID NO: 1217392 - RNA, 19 nt, Homo sapiens
  misc_RNA (1)...(19): siRNA sense strand
ggccucaccugaagaucau

SEQ ID NO: 1217393 - RNA, 19 nt, Homo sapiens
  misc_RNA (1)...(19): siRNA sense strand
aaauucaccagaucaagaa

SEQ ID NO: 1217394 - RNA, 19 nt, Homo sapiens
  misc_RNA (1)...(19): siRNA sense strand
gcgcuuaguaguucaaugg

SEQ ID NO: 1217395 - RNA, 19 nt, Homo sapiens
  misc_RNA (1)...(19): siRNA sense strand
guacaagaagacguccaua

SEQ ID NO: 1217396 - RNA, 19 nt, Homo sapiens
  misc_RNA (1)...(19): siRNA sense strand
ccucaaguucacaagaaua

SEQ ID NO: 1217397 - RNA, 19 nt, Homo sapiens
  misc_RNA (1)...(19): siRNA sense strand
gauccacagaacccucaua

SEQ ID NO: 1217398 - RNA, 19 nt, Homo sapiens
  misc_RNA (1)...(19): siRNA sense strand
caaaagguguggagucucu

SEQ ID NO: 1217399 - RNA, 19 nt, Homo sapiens
  misc_RNA (1)...(19): siRNA sense strand
agauuggauucgucacaaa

SEQ ID NO: 1217400 - RNA, 19 nt, Homo sapiens
  misc_RNA (1)...(19): siRNA sense strand
cacagaacccucauaaacu

SEQ ID NO: 1217401 - RNA, 19 nt, Homo sapiens
  misc_RNA (1)...(19): siRNA sense strand
uacaagaagacguccauau

SEQ ID NO: 1217402 - RNA, 19 nt, Homo sapiens
  misc_RNA (1)...(19): siRNA sense strand
gauuggauucgucacaaau

SEQ ID NO: 1217403 - RNA, 19 nt, Homo sapiens
  misc_RNA (1)...(19): siRNA sense strand
guguggagucucuuauuug

SEQ ID NO: 1217404 - RNA, 19 nt, Homo sapiens
  misc_RNA (1)...(19): siRNA sense strand
gaacccucauaaacugcau

SEQ ID NO: 1217405 - RNA, 19 nt, Homo sapiens
  misc_RNA (1)...(19): siRNA sense strand
agaucaagaauuccagaaa

SEQ ID NO: 1217406 - RNA, 19 nt, Homo sapiens
  misc_RNA (1)...(19): siRNA sense strand
gacaaaagguguggagucu

SEQ ID NO: 1217407 - RNA, 19 nt, Homo sapiens
  misc_RNA (1)...(19): siRNA sense strand
auaaagaugcuuggauuag

SEQ ID NO: 1217408 - RNA, 19 nt, Homo sapiens
  misc_RNA (1)...(19): siRNA sense strand
uucaccagaucaagaauuc

SEQ ID NO: 1217409 - RNA, 19 nt, Homo sapiens
  misc_RNA (1)...(19): siRNA sense strand
uuggauucgucacaaauuc

SEQ ID NO: 1217410 - RNA, 19 nt, Homo sapiens
  misc_RNA (1)...(19): siRNA sense strand
gaaaguaguuaagcauuug

SEQ ID NO: 1217411 - RNA, 19 nt, Homo sapiens
  misc_RNA (1)...(19): siRNA sense strand
gguguggagucucuuauuu

SEQ ID NO: 1217412 - RNA, 19 nt, Homo sapiens
  misc_RNA (1)...(19): siRNA sense strand
caagaagacguccauauug

SEQ ID NO: 1217413 - RNA, 19 nt, Homo sapiens
  misc_RNA (1)...(19): siRNA sense strand
uaaagaugcuuggauuaga

SEQ ID NO: 1217414 - RNA, 19 nt, Homo sapiens
  misc_RNA (1)...(19): siRNA sense strand
aaagaugcuuggauuagaa

SEQ ID NO: 1217415 - RNA, 19 nt, Homo sapiens
  misc_RNA (1)...(19): siRNA sense strand
aagaauaucccuucaguga

SEQ ID NO: 1217416 - RNA, 19 nt, Homo sapiens
  misc_RNA (1)...(19): siRNA sense strand
ccucauaaacugcauauug

SEQ ID NO: 1217417 - RNA, 19 nt, Homo sapiens
  misc_RNA (1)...(19): siRNA sense strand
gaucaagaauuccagaaaa

SEQ ID NO: 1217418 - RNA, 19 nt, Homo sapiens
  misc_RNA (1)...(19): siRNA sense strand
ccacagaacccucauaaac

SEQ ID NO: 1217419 - RNA, 19 nt, Homo sapiens
  misc_RNA (1)...(19): siRNA sense strand
acaagaagacguccauauu

SEQ ID NO: 1217420 - RNA, 19 nt, Homo sapiens
  misc_RNA (1)...(19): siRNA sense strand
caaauucaccagaucaaga

SEQ ID NO: 1217421 - RNA, 19 nt, Homo sapiens
  misc_RNA (1)...(19): siRNA sense strand
acagaacccucauaaacug

SEQ ID NO: 1217422 - RNA, 19 nt, Homo sapiens
  misc_RNA (1)...(19): siRNA sense strand
acaagaauaucccuucagu

SEQ ID NO: 1217423 - RNA, 19 nt, Homo sapiens
  misc_RNA (1)...(19): siRNA sense strand
gcacauaccccucaaguuc

SEQ ID NO: 1217424 - RNA, 19 nt, Homo sapiens
  misc_RNA (1)...(19): siRNA sense strand
ucacaagaauaucccuuca

SEQ ID NO: 1217425 - RNA, 19 nt, Homo sapiens
  misc_RNA (1)...(19): siRNA sense strand
aagaagacguccauauugg

SEQ ID NO: 1217426 - RNA, 19 nt, Homo sapiens
  misc_RNA (1)...(19): siRNA sense strand
cucauaaacugcauauugu

SEQ ID NO: 1217427 - RNA, 19 nt, Homo sapiens
  misc_RNA (1)...(19): siRNA sense strand
cgucacaaauucaccagau

SEQ ID NO: 1217428 - RNA, 19 nt, Homo sapiens
  misc_RNA (1)...(19): siRNA sense strand
uggagucucuuauuuguac

SEQ ID NO: 1217429 - RNA, 19 nt, Homo sapiens
  misc_RNA (1)...(19): siRNA sense strand
cagauuggauucgucacaa

SEQ ID NO: 1217430 - RNA, 19 nt, Homo sapiens
  misc_RNA (1)...(19): siRNA sense strand
agacguccauauugggaaa

SEQ ID NO: 1217431 - RNA, 19 nt, Homo sapiens
  misc_RNA (1)...(19): siRNA sense strand
uguggagucucuuauuugu

SEQ ID NO: 1217432 - RNA, 19 nt, Homo sapiens
  misc_RNA (1)...(19): siRNA sense strand
ucacaaauucaccagauca

SEQ ID NO: 1217433 - RNA, 19 nt, Homo sapiens
  misc_RNA (1)...(19): siRNA sense strand
aaagguguggagucucuua

SEQ ID NO: 1217434 - RNA, 19 nt, Homo sapiens
  misc_RNA (1)...(19): siRNA sense strand
ggccucaccugaagaucau

SEQ ID NO: 1217435 - RNA, 19 nt, Homo sapiens
  misc_RNA (1)...(19): siRNA sense strand
aaauucaccagaucaagaa

SEQ ID NO: 1217436 - RNA, 19 nt, Homo sapiens
  misc_RNA (1)...(19): siRNA sense strand
gcgcuuaguaguucaaugg

SEQ ID NO: 1217437 - RNA, 19 nt, Homo sapiens
  misc_RNA (1)...(19): siRNA sense strand
guacaagaagacguccaua

SEQ ID NO: 1217438 - RNA, 19 nt, Homo sapiens
  misc_RNA (1)...(19): siRNA sense strand
ccucaaguucacaagaaua

SEQ ID NO: 1217439 - RNA, 19 nt, Homo sapiens
  misc_RNA (1)...(19): siRNA sense strand
gauccacagaacccucaua

SEQ ID NO: 1217440 - RNA, 19 nt, Homo sapiens
  misc_RNA (1)...(19): siRNA sense strand
caaaagguguggagucucu

SEQ ID NO: 1217441 - RNA, 19 nt, Homo sapiens
  misc_RNA (1)...(19): siRNA sense strand
agauuggauucgucacaaa

SEQ ID NO: 1217442 - RNA, 19 nt, Homo sapiens
  misc_RNA (1)...(19): siRNA sense strand
cacagaacccucauaaacu

SEQ ID NO: 1217443 - RNA, 19 nt, Homo sapiens
  misc_RNA (1)...(19): siRNA sense strand
uacaagaagacguccauau

SEQ ID NO: 1217444 - RNA, 19 nt, Homo sapiens
  misc_RNA (1)...(19): siRNA sense strand
gauuggauucgucacaaau

SEQ ID NO: 1217445 - RNA, 19 nt, Homo sapiens
  misc_RNA (1)...(19): siRNA sense strand
guguggagucucuuauuug

SEQ ID NO: 1217446 - RNA, 19 nt, Homo sapiens
  misc_RNA (1)...(19): siRNA sense strand
gaacccucauaaacugcau

SEQ ID NO: 1217447 - RNA, 19 nt, Homo sapiens
  misc_RNA (1)...(19): siRNA sense strand
agaucaagaauuccagaaa

SEQ ID NO: 1217448 - RNA, 19 nt, Homo sapiens
  misc_RNA (1)...(19): siRNA sense strand
gacaaaagguguggagucu

SEQ ID NO: 1217449 - RNA, 19 nt, Homo sapiens
  misc_RNA (1)...(19): siRNA sense strand
auaaagaugcuuggauuag

SEQ ID NO: 1217450 - RNA, 19 nt, Homo sapiens
  misc_RNA (1)...(19): siRNA sense strand
uucaccagaucaagaauuc

SEQ ID NO: 1217451 - RNA, 19 nt, Homo sapiens
  misc_RNA (1)...(19): siRNA sense strand
uuggauucgucacaaauuc

SEQ ID NO: 1217452 - RNA, 19 nt, Homo sapiens
  misc_RNA (1)...(19): siRNA sense strand
gaaaguaguuaagcauuug

SEQ ID NO: 1217453 - RNA, 19 nt, Homo sapiens
  misc_RNA (1)...(19): siRNA sense strand
gguguggagucucuuauuu

SEQ ID NO: 1217454 - RNA, 19 nt, Homo sapiens
  misc_RNA (1)...(19): siRNA sense strand
caagaagacguccauauug

SEQ ID NO: 1217455 - RNA, 19 nt, Homo sapiens
  misc_RNA (1)...(19): siRNA sense strand
uaaagaugcuuggauuaga

SEQ ID NO: 1217456 - RNA, 19 nt, Homo sapiens
  misc_RNA (1)...(19): siRNA sense strand
aaagaugcuuggauuagaa

SEQ ID NO: 1217457 - RNA, 19 nt, Homo sapiens
  misc_RNA (1)...(19): siRNA sense strand
aagaauaucccuucaguga

SEQ ID NO: 1217458 - RNA, 19 nt, Homo sapiens
  misc_RNA (1)...(19): siRNA sense strand
ccucauaaacugcauauug

SEQ ID NO: 1217459 - RNA, 19 nt, Homo sapiens
  misc_RNA (1)...(19): siRNA sense strand
gaucaagaauuccagaaaa

SEQ ID NO: 1217460 - RNA, 19 nt, Homo sapiens
  misc_RNA (1)...(19): siRNA sense strand
ccacagaacccucauaaac

SEQ ID NO: 1217461 - RNA, 19 nt, Homo sapiens
  misc_RNA (1)...(19): siRNA sense strand
acaagaagacguccauauu

SEQ ID NO: 1217462 - RNA, 19 nt, Homo sapiens
  misc_RNA (1)...(19): siRNA sense strand
caaauucaccagaucaaga

SEQ ID NO: 1217463 - RNA, 19 nt, Homo sapiens
  misc_RNA (1)...(19): siRNA sense strand
acagaacccucauaaacug

SEQ ID NO: 1217464 - RNA, 19 nt, Homo sapiens
  misc_RNA (1)...(19): siRNA sense strand
acaagaauaucccuucagu

SEQ ID NO: 1217465 - RNA, 19 nt, Homo sapiens
  misc_RNA (1)...(19): siRNA sense strand
gcacauaccccucaaguuc

SEQ ID NO: 1217466 - RNA, 19 nt, Homo sapiens
  misc_RNA (1)...(19): siRNA sense strand
ucacaagaauaucccuuca

SEQ ID NO: 1217467 - RNA, 19 nt, Homo sapiens
  misc_RNA (1)...(19): siRNA sense strand
aagaagacguccauauugg

SEQ ID NO: 1217468 - RNA, 19 nt, Homo sapiens
  misc_RNA (1)...(19): siRNA sense strand
cucauaaacugcauauugu

SEQ ID NO: 1217469 - RNA, 19 nt, Homo sapiens
  misc_RNA (1)...(19): siRNA sense strand
cgucacaaauucaccagau

SEQ ID NO: 1217470 - RNA, 19 nt, Homo sapiens
  misc_RNA (1)...(19): siRNA sense strand
uggagucucuuauuuguac

SEQ ID NO: 1217471 - RNA, 19 nt, Homo sapiens
  misc_RNA (1)...(19): siRNA sense strand
cagauuggauucgucacaa

SEQ ID NO: 1217472 - RNA, 19 nt, Homo sapiens
  misc_RNA (1)...(19): siRNA sense strand
agacguccauauugggaaa

SEQ ID NO: 1217473 - RNA, 19 nt, Homo sapiens
  misc_RNA (1)...(19): siRNA sense strand
uguggagucucuuauuugu

SEQ ID NO: 1217474 - RNA, 19 nt, Homo sapiens
  misc_RNA (1)...(19): siRNA sense strand
ucacaaauucaccagauca

SEQ ID NO: 1217475 - RNA, 19 nt, Homo sapiens
  misc_RNA (1)...(19): siRNA sense strand
aaagguguggagucucuua

SEQ ID NO: 1217476 - RNA, 19 nt, Homo sapiens
  misc_RNA (1)...(19): siRNA sense strand
ggccucaccugaagaucau

SEQ ID NO: 1217477 - RNA, 19 nt, Homo sapiens
  misc_RNA (1)...(19): siRNA sense strand
aaauucaccagaucaagaa

SEQ ID NO: 1217478 - RNA, 19 nt, Homo sapiens
  misc_RNA (1)...(19): siRNA sense strand
gcgcuuaguaguucaaugg

SEQ ID NO: 1217479 - RNA, 19 nt, Homo sapiens
  misc_RNA (1)...(19): siRNA sense strand
guacaagaagacguccaua

SEQ ID NO: 1217480 - RNA, 19 nt, Homo sapiens
  misc_RNA (1)...(19): siRNA sense strand
ccucaaguucacaagaaua

SEQ ID NO: 1217481 - RNA, 19 nt, Homo sapiens
  misc_RNA (1)...(19): siRNA sense strand
gauccacagaacccucaua

SEQ ID NO: 1217482 - RNA, 19 nt, Homo sapiens
  misc_RNA (1)...(19): siRNA sense strand
caaaagguguggagucucu

SEQ ID NO: 1217483 - RNA, 19 nt, Homo sapiens
  misc_RNA (1)...(19): siRNA sense strand
agauuggauucgucacaaa

SEQ ID NO: 1217484 - RNA, 19 nt, Homo sapiens
  misc_RNA (1)...(19): siRNA sense strand
cacagaacccucauaaacu

SEQ ID NO: 1217485 - RNA, 19 nt, Homo sapiens
  misc_RNA (1)...(19): siRNA sense strand
uacaagaagacguccauau

SEQ ID NO: 1217486 - RNA, 19 nt, Homo sapiens
  misc_RNA (1)...(19): siRNA sense strand
gauuggauucgucacaaau

SEQ ID NO: 1217487 - RNA, 19 nt, Homo sapiens
  misc_RNA (1)...(19): siRNA sense strand
guguggagucucuuauuug

SEQ ID NO: 1217488 - RNA, 19 nt, Homo sapiens
  misc_RNA (1)...(19): siRNA sense strand
gaacccucauaaacugcau

SEQ ID NO: 1217489 - RNA, 19 nt, Homo sapiens
  misc_RNA (1)...(19): siRNA sense strand
agaucaagaauuccagaaa

SEQ ID NO: 1217490 - RNA, 19 nt, Homo sapiens
  misc_RNA (1)...(19): siRNA sense strand
gacaaaagguguggagucu

SEQ ID NO: 1217491 - RNA, 19 nt, Homo sapiens
  misc_RNA (1)...(19): siRNA sense strand
auaaagaugcuuggauuag

SEQ ID NO: 1217492 - RNA, 19 nt, Homo sapiens
  misc_RNA (1)...(19): siRNA sense strand
uucaccagaucaagaauuc

SEQ ID NO: 1217493 - RNA, 19 nt, Homo sapiens
  misc_RNA (1)...(19): siRNA sense strand
uuggauucgucacaaauuc

SEQ ID NO: 1217494 - RNA, 19 nt, Homo sapiens
  misc_RNA (1)...(19): siRNA sense strand
gaaaguaguuaagcauuug

SEQ ID NO: 1217495 - RNA, 19 nt, Homo sapiens
  misc_RNA (1)...(19): siRNA sense strand
gguguggagucucuuauuu

SEQ ID NO: 1217496 - RNA, 19 nt, Homo sapiens
  misc_RNA (1)...(19): siRNA sense strand
caagaagacguccauauug

SEQ ID NO: 1217497 - RNA, 19 nt, Homo sapiens
  misc_RNA (1)...(19): siRNA sense strand
uaaagaugcuuggauuaga

SEQ ID NO: 1217498 - RNA, 19 nt, Homo sapiens
  misc_RNA (1)...(19): siRNA sense strand
aaagaugcuuggauuagaa

SEQ ID NO: 1217499 - RNA, 19 nt, Homo sapiens
  misc_RNA (1)...(19): siRNA sense strand
aagaauaucccuucaguga

SEQ ID NO: 1217500 - RNA, 19 nt, Homo sapiens
  misc_RNA (1)...(19): siRNA sense strand
ccucauaaacugcauauug

SEQ ID NO: 1217501 - RNA, 19 nt, Homo sapiens
  misc_RNA (1)...(19): siRNA sense strand
gaucaagaauuccagaaaa

SEQ ID NO: 1217502 - RNA, 19 nt, Homo sapiens
  misc_RNA (1)...(19): siRNA sense strand
ccacagaacccucauaaac

SEQ ID NO: 1217503 - RNA, 19 nt, Homo sapiens
  misc_RNA (1)...(19): siRNA sense strand
acaagaagacguccauauu

SEQ ID NO: 1217504 - RNA, 19 nt, Homo sapiens
  misc_RNA (1)...(19): siRNA sense strand
caaauucaccagaucaaga

SEQ ID NO: 1217505 - RNA, 19 nt, Homo sapiens
  misc_RNA (1)...(19): siRNA sense strand
acagaacccucauaaacug

SEQ ID NO: 1217506 - RNA, 19 nt, Homo sapiens
  misc_RNA (1)...(19): siRNA sense strand
acaagaauaucccuucagu

SEQ ID NO: 1217507 - RNA, 19 nt, Homo sapiens
  misc_RNA (1)...(19): siRNA sense strand
gcacauaccccucaaguuc

SEQ ID NO: 1217508 - RNA, 19 nt, Homo sapiens
  misc_RNA (1)...(19): siRNA sense strand
ucacaagaauaucccuuca

SEQ ID NO: 1217509 - RNA, 19 nt, Homo sapiens
  misc_RNA (1)...(19): siRNA sense strand
aagaagacguccauauugg

SEQ ID NO: 1217510 - RNA, 19 nt, Homo sapiens
  misc_RNA (1)...(19): siRNA sense strand
cucauaaacugcauauugu

SEQ ID NO: 1217511 - RNA, 19 nt, Homo sapiens
  misc_RNA (1)...(19): siRNA sense strand
cgucacaaauucaccagau

SEQ ID NO: 1217512 - RNA, 19 nt, Homo sapiens
  misc_RNA (1)...(19): siRNA sense strand
uggagucucuuauuuguac

SEQ ID NO: 1217513 - RNA, 19 nt, Homo sapiens
  misc_RNA (1)...(19): siRNA sense strand
cagauuggauucgucacaa

SEQ ID NO: 1217514 - RNA, 19 nt, Homo sapiens
  misc_RNA (1)...(19): siRNA sense strand
agacguccauauugggaaa

SEQ ID NO: 1217515 - RNA, 19 nt, Homo sapiens
  misc_RNA (1)...(19): siRNA sense strand
uguggagucucuuauuugu

SEQ ID NO: 1217516 - RNA, 19 nt, Homo sapiens
  misc_RNA (1)...(19): siRNA sense strand
ucacaaauucaccagauca

SEQ ID NO: 1217517 - RNA, 19 nt, Homo sapiens
  misc_RNA (1)...(19): siRNA sense strand
aaagguguggagucucuua

SEQ ID NO: 1217518 - RNA, 19 nt, Homo sapiens
  misc_RNA (1)...(19): siRNA sense strand
ggccucaccugaagaucau

SEQ ID NO: 1217519 - RNA, 19 nt, Homo sapiens
  misc_RNA (1)...(19): siRNA sense strand
aaauucaccagaucaagaa

SEQ ID NO: 1217520 - RNA, 19 nt, Homo sapiens
  misc_RNA (1)...(19): siRNA sense strand
gcgcuuaguaguucaaugg

SEQ ID NO: 1217521 - RNA, 19 nt, Homo sapiens
  misc_RNA (1)...(19): siRNA sense strand
guacaagaagacguccaua

SEQ ID NO: 1217522 - RNA, 19 nt, Homo sapiens
  misc_RNA (1)...(19): siRNA sense strand
ccucaaguucacaagaaua

SEQ ID NO: 1217523 - RNA, 19 nt, Homo sapiens
  misc_RNA (1)...(19): siRNA sense strand
gauccacagaacccucaua

SEQ ID NO: 1217524 - RNA, 19 nt, Homo sapiens
  misc_RNA (1)...(19): siRNA sense strand
caaaagguguggagucucu

SEQ ID NO: 1217525 - RNA, 19 nt, Homo sapiens
  misc_RNA (1)...(19): siRNA sense strand
agauuggauucgucacaaa

SEQ ID NO: 1217526 - RNA, 19 nt, Homo sapiens
  misc_RNA (1)...(19): siRNA sense strand
cacagaacccucauaaacu

SEQ ID NO: 1217527 - RNA, 19 nt, Homo sapiens
  misc_RNA (1)...(19): siRNA sense strand
uacaagaagacguccauau

SEQ ID NO: 1217528 - RNA, 19 nt, Homo sapiens
  misc_RNA (1)...(19): siRNA sense strand
gauuggauucgucacaaau

SEQ ID NO: 1217529 - RNA, 19 nt, Homo sapiens
  misc_RNA (1)...(19): siRNA sense strand
guguggagucucuuauuug

SEQ ID NO: 1217530 - RNA, 19 nt, Homo sapiens
  misc_RNA (1)...(19): siRNA sense strand
gaacccucauaaacugcau

SEQ ID NO: 1217531 - RNA, 19 nt, Homo sapiens
  misc_RNA (1)...(19): siRNA sense strand
agaucaagaauuccagaaa

SEQ ID NO: 1217532 - RNA, 19 nt, Homo sapiens
  misc_RNA (1)...(19): siRNA sense strand
gacaaaagguguggagucu

SEQ ID NO: 1217533 - RNA, 19 nt, Homo sapiens
  misc_RNA (1)...(19): siRNA sense strand
auaaagaugcuuggauuag

SEQ ID NO: 1217534 - RNA, 19 nt, Homo sapiens
  misc_RNA (1)...(19): siRNA sense strand
uucaccagaucaagaauuc

SEQ ID NO: 1217535 - RNA, 19 nt, Homo sapiens
  misc_RNA (1)...(19): siRNA sense strand
uuggauucgucacaaauuc

SEQ ID NO: 1217536 - RNA, 19 nt, Homo sapiens
  misc_RNA (1)...(19): siRNA sense strand
gaaaguaguuaagcauuug

SEQ ID NO: 1217537 - RNA, 19 nt, Homo sapiens
  misc_RNA (1)...(19): siRNA sense strand
gguguggagucucuuauuu

SEQ ID NO: 1217538 - RNA, 19 nt, Homo sapiens
  misc_RNA (1)...(19): siRNA sense strand
caagaagacguccauauug

SEQ ID NO: 1217539 - RNA, 19 nt, Homo sapiens
  misc_RNA (1)...(19): siRNA sense strand
uaaagaugcuuggauuaga

SEQ ID NO: 1217540 - RNA, 19 nt, Homo sapiens
  misc_RNA (1)...(19): siRNA sense strand
aaagaugcuuggauuagaa

SEQ ID NO: 1217541 - RNA, 19 nt, Homo sapiens
  misc_RNA (1)...(19): siRNA sense strand
aagaauaucccuucaguga

SEQ ID NO: 1217542 - RNA, 19 nt, Homo sapiens
  misc_RNA (1)...(19): siRNA sense strand
ccucauaaacugcauauug

SEQ ID NO: 1217543 - RNA, 19 nt, Homo sapiens
  misc_RNA (1)...(19): siRNA sense strand
gaucaagaauuccagaaaa

SEQ ID NO: 1217544 - RNA, 19 nt, Homo sapiens
  misc_RNA (1)...(19): siRNA sense strand
ccacagaacccucauaaac

SEQ ID NO: 1217545 - RNA, 19 nt, Homo sapiens
  misc_RNA (1)...(19): siRNA sense strand
acaagaagacguccauauu

SEQ ID NO: 1217546 - RNA, 19 nt, Homo sapiens
  misc_RNA (1)...(19): siRNA sense strand
caaauucaccagaucaaga

SEQ ID NO: 1217547 - RNA, 19 nt, Homo sapiens
  misc_RNA (1)...(19): siRNA sense strand
acagaacccucauaaacug

SEQ ID NO: 1217548 - RNA, 19 nt, Homo sapiens
  misc_RNA (1)...(19): siRNA sense strand
acaagaauaucccuucagu

SEQ ID NO: 1217549 - RNA, 19 nt, Homo sapiens
  misc_RNA (1)...(19): siRNA sense strand
gcacauaccccucaaguuc

SEQ ID NO: 1217550 - RNA, 19 nt, Homo sapiens
  misc_RNA (1)...(19): siRNA sense strand
ucacaagaauaucccuuca

SEQ ID NO: 1217551 - RNA, 19 nt, Homo sapiens
  misc_RNA (1)...(19): siRNA sense strand
aagaagacguccauauugg

SEQ ID NO: 1217552 - RNA, 19 nt, Homo sapiens
  misc_RNA (1)...(19): siRNA sense strand
cucauaaacugcauauugu

SEQ ID NO: 1217553 - RNA, 19 nt, Homo sapiens
  misc_RNA (1)...(19): siRNA sense strand
cgucacaaauucaccagau

SEQ ID NO: 1217554 - RNA, 19 nt, Homo sapiens
  misc_RNA (1)...(19): siRNA sense strand
uggagucucuuauuuguac

SEQ ID NO: 1217555 - RNA, 19 nt, Homo sapiens
  misc_RNA (1)...(19): siRNA sense strand
cagauuggauucgucacaa

SEQ ID NO: 1217556 - RNA, 19 nt, Homo sapiens
  misc_RNA (1)...(19): siRNA sense strand
agacguccauauugggaaa

SEQ ID NO: 1217557 - RNA, 19 nt, Homo sapiens
  misc_RNA (1)...(19): siRNA sense strand
uguggagucucuuauuugu

SEQ ID NO: 1217558 - RNA, 19 nt, Homo sapiens
  misc_RNA (1)...(19): siRNA sense strand
ucacaaauucaccagauca

SEQ ID NO: 1217559 - RNA, 19 nt, Homo sapiens
  misc_RNA (1)...(19): siRNA sense strand
aaagguguggagucucuua

SEQ ID NO: 1217560 - RNA, 19 nt, Homo sapiens
  misc_RNA (1)...(19): siRNA sense strand
ggccucaccugaagaucau

SEQ ID NO: 1217561 - RNA, 19 nt, Homo sapiens
  misc_RNA (1)...(19): siRNA sense strand
aaauucaccagaucaagaa

SEQ ID NO: 1217562 - RNA, 19 nt, Homo sapiens
  misc_RNA (1)...(19): siRNA sense strand
gcgcuuaguaguucaaugg

SEQ ID NO: 1217563 - RNA, 19 nt, Homo sapiens
  misc_RNA (1)...(19): siRNA sense strand
guacaagaagacguccaua

SEQ ID NO: 1217564 - RNA, 19 nt, Homo sapiens
  misc_RNA (1)...(19): siRNA sense strand
ccucaaguucacaagaaua

SEQ ID NO: 1217565 - RNA, 19 nt, Homo sapiens
  misc_RNA (1)...(19): siRNA sense strand
gauccacagaacccucaua

SEQ ID NO: 1217566 - RNA, 19 nt, Homo sapiens
  misc_RNA (1)...(19): siRNA sense strand
caaaagguguggagucucu

SEQ ID NO: 1217567 - RNA, 19 nt, Homo sapiens
  misc_RNA (1)...(19): siRNA sense strand
agauuggauucgucacaaa

SEQ ID NO: 1217568 - RNA, 19 nt, Homo sapiens
  misc_RNA (1)...(19): siRNA sense strand
cacagaacccucauaaacu

SEQ ID NO: 1217569 - RNA, 19 nt, Homo sapiens
  misc_RNA (1)...(19): siRNA sense strand
uacaagaagacguccauau

SEQ ID NO: 1217570 - RNA, 19 nt, Homo sapiens
  misc_RNA (1)...(19): siRNA sense strand
gauuggauucgucacaaau

SEQ ID NO: 1217571 - RNA, 19 nt, Homo sapiens
  misc_RNA (1)...(19): siRNA sense strand
guguggagucucuuauuug

SEQ ID NO: 1217572 - RNA, 19 nt, Homo sapiens
  misc_RNA (1)...(19): siRNA sense strand
gaacccucauaaacugcau

SEQ ID NO: 1217573 - RNA, 19 nt, Homo sapiens
  misc_RNA (1)...(19): siRNA sense strand
agaucaagaauuccagaaa

SEQ ID NO: 1217574 - RNA, 19 nt, Homo sapiens
  misc_RNA (1)...(19): siRNA sense strand
gacaaaagguguggagucu

SEQ ID NO: 1217575 - RNA, 19 nt, Homo sapiens
  misc_RNA (1)...(19): siRNA sense strand
auaaagaugcuuggauuag

SEQ ID NO: 1217576 - RNA, 19 nt, Homo sapiens
  misc_RNA (1)...(19): siRNA sense strand
uucaccagaucaagaauuc

SEQ ID NO: 1217577 - RNA, 19 nt, Homo sapiens
  misc_RNA (1)...(19): siRNA sense strand
uuggauucgucacaaauuc

SEQ ID NO: 1217578 - RNA, 19 nt, Homo sapiens
  misc_RNA (1)...(19): siRNA sense strand
gaaaguaguuaagcauuug

SEQ ID NO: 1217579 - RNA, 19 nt, Homo sapiens
  misc_RNA (1)...(19): siRNA sense strand
gguguggagucucuuauuu

SEQ ID NO: 1217580 - RNA, 19 nt, Homo sapiens
  misc_RNA (1)...(19): siRNA sense strand
caagaagacguccauauug

SEQ ID NO: 1217581 - RNA, 19 nt, Homo sapiens
  misc_RNA (1)...(19): siRNA sense strand
uaaagaugcuuggauuaga

SEQ ID NO: 1217582 - RNA, 19 nt, Homo sapiens
  misc_RNA (1)...(19): siRNA sense strand
aaagaugcuuggauuagaa

SEQ ID NO: 1217583 - RNA, 19 nt, Homo sapiens
  misc_RNA (1)...(19): siRNA sense strand
aagaauaucccuucaguga

SEQ ID NO: 1217584 - RNA, 19 nt, Homo sapiens
  misc_RNA (1)...(19): siRNA sense strand
ccucauaaacugcauauug

SEQ ID NO: 1217585 - RNA, 19 nt, Homo sapiens
  misc_RNA (1)...(19): siRNA sense strand
gaucaagaauuccagaaaa

SEQ ID NO: 1217586 - RNA, 19 nt, Homo sapiens
  misc_RNA (1)...(19): siRNA sense strand
ccacagaacccucauaaac

SEQ ID NO: 1217587 - RNA, 19 nt, Homo sapiens
  misc_RNA (1)...(19): siRNA sense strand
acaagaagacguccauauu

SEQ ID NO: 1217588 - RNA, 19 nt, Homo sapiens
  misc_RNA (1)...(19): siRNA sense strand
caaauucaccagaucaaga

SEQ ID NO: 1217589 - RNA, 19 nt, Homo sapiens
  misc_RNA (1)...(19): siRNA sense strand
acagaacccucauaaacug

SEQ ID NO: 1217590 - RNA, 19 nt, Homo sapiens
  misc_RNA (1)...(19): siRNA sense strand
acaagaauaucccuucagu

SEQ ID NO: 1217591 - RNA, 19 nt, Homo sapiens
  misc_RNA (1)...(19): siRNA sense strand
gcacauaccccucaaguuc

SEQ ID NO: 1217592 - RNA, 19 nt, Homo sapiens
  misc_RNA (1)...(19): siRNA sense strand
ucacaagaauaucccuuca

SEQ ID NO: 1217593 - RNA, 19 nt, Homo sapiens
  misc_RNA (1)...(19): siRNA sense strand
aagaagacguccauauugg

SEQ ID NO: 1217594 - RNA, 19 nt, Homo sapiens
  misc_RNA (1)...(19): siRNA sense strand
cucauaaacugcauauugu

SEQ ID NO: 1217595 - RNA, 19 nt, Homo sapiens
  misc_RNA (1)...(19): siRNA sense strand
cgucacaaauucaccagau

SEQ ID NO: 1217596 - RNA, 19 nt, Homo sapiens
  misc_RNA (1)...(19): siRNA sense strand
uggagucucuuauuuguac

SEQ ID NO: 1217597 - RNA, 19 nt, Homo sapiens
  misc_RNA (1)...(19): siRNA sense strand
cagauuggauucgucacaa

SEQ ID NO: 1217598 - RNA, 19 nt, Homo sapiens
  misc_RNA (1)...(19): siRNA sense strand
agacguccauauugggaaa

SEQ ID NO: 1217599 - RNA, 19 nt, Homo sapiens
  misc_RNA (1)...(19): siRNA sense strand
uguggagucucuuauuugu

SEQ ID NO: 1217600 - RNA, 19 nt, Homo sapiens
  misc_RNA (1)...(19): siRNA sense strand
ucacaaauucaccagauca

SEQ ID NO: 1217601 - RNA, 19 nt, Homo sapiens
  misc_RNA (1)...(19): siRNA sense strand
aaagguguggagucucuua

SEQ ID NO: 1217602 - RNA, 19 nt, Homo sapiens
  misc_RNA (1)...(19): siRNA sense strand
ggccucaccugaagaucau

SEQ ID NO: 1217603 - RNA, 19 nt, Homo sapiens
  misc_RNA (1)...(19): siRNA sense strand
aaauucaccagaucaagaa

SEQ ID NO: 1217604 - RNA, 19 nt, Homo sapiens
  misc_RNA (1)...(19): siRNA sense strand
gcgcuuaguaguucaaugg

SEQ ID NO: 1217605 - RNA, 19 nt, Homo sapiens
  misc_RNA (1)...(19): siRNA sense strand
guacaagaagacguccaua

SEQ ID NO: 1217606 - RNA, 19 nt, Homo sapiens
  misc_RNA (1)...(19): siRNA sense strand
ccucaaguucacaagaaua

SEQ ID NO: 1217607 - RNA, 19 nt, Homo sapiens
  misc_RNA (1)...(19): siRNA sense strand
gauccacagaacccucaua

SEQ ID NO: 1217608 - RNA, 19 nt, Homo sapiens
  misc_RNA (1)...(19): siRNA sense strand
caaaagguguggagucucu

SEQ ID NO: 1217609 - RNA, 19 nt, Homo sapiens
  misc_RNA (1)...(19): siRNA sense strand
agauuggauucgucacaaa

SEQ ID NO: 1217610 - RNA, 19 nt, Homo sapiens
  misc_RNA (1)...(19): siRNA sense strand
cacagaacccucauaaacu

SEQ ID NO: 1217611 - RNA, 19 nt, Homo sapiens
  misc_RNA (1)...(19): siRNA sense strand
uacaagaagacguccauau

SEQ ID NO: 1217612 - RNA, 19 nt, Homo sapiens
  misc_RNA (1)...(19): siRNA sense strand
gauuggauucgucacaaau

SEQ ID NO: 1217613 - RNA, 19 nt, Homo sapiens
  misc_RNA (1)...(19): siRNA sense strand
guguggagucucuuauuug

SEQ ID NO: 1217614 - RNA, 19 nt, Homo sapiens
  misc_RNA (1)...(19): siRNA sense strand
gaacccucauaaacugcau

SEQ ID NO: 1217615 - RNA, 19 nt, Homo sapiens
  misc_RNA (1)...(19): siRNA sense strand
agaucaagaauuccagaaa

SEQ ID NO: 1217616 - RNA, 19 nt, Homo sapiens
  misc_RNA (1)...(19): siRNA sense strand
gacaaaagguguggagucu

SEQ ID NO: 1217617 - RNA, 19 nt, Homo sapiens
  misc_RNA (1)...(19): siRNA sense strand
auaaagaugcuuggauuag

SEQ ID NO: 1217618 - RNA, 19 nt, Homo sapiens
  misc_RNA (1)...(19): siRNA sense strand
uucaccagaucaagaauuc

SEQ ID NO: 1217619 - RNA, 19 nt, Homo sapiens
  misc_RNA (1)...(19): siRNA sense strand
uuggauucgucacaaauuc

SEQ ID NO: 1217620 - RNA, 19 nt, Homo sapiens
  misc_RNA (1)...(19): siRNA sense strand
gcaaagaccuuacauacuc

SEQ ID NO: 1217621 - RNA, 19 nt, Homo sapiens
  misc_RNA (1)...(19): siRNA sense strand
caaaugacccugugacuaa

SEQ ID NO: 1217622 - RNA, 19 nt, Homo sapiens
  misc_RNA (1)...(19): siRNA sense strand
cagauuaacucaacagugu

SEQ ID NO: 1217623 - RNA, 19 nt, Homo sapiens
  misc_RNA (1)...(19): siRNA sense strand
ggacagaagcucaggcaaa

SEQ ID NO: 1217624 - RNA, 19 nt, Homo sapiens
  misc_RNA (1)...(19): siRNA sense strand
gggcaaucauucuguuuaa

SEQ ID NO: 1217625 - RNA, 19 nt, Homo sapiens
  misc_RNA (1)...(19): siRNA sense strand
gaagaggaucccacacuuu

SEQ ID NO: 1217626 - RNA, 19 nt, Homo sapiens
  misc_RNA (1)...(19): siRNA sense strand
ccacugggcucucccuuuc

SEQ ID NO: 1217627 - RNA, 19 nt, Homo sapiens
  misc_RNA (1)...(19): siRNA sense strand
ucacaccgauccauugaug

SEQ ID NO: 1217628 - RNA, 19 nt, Homo sapiens
  misc_RNA (1)...(19): siRNA sense strand
ggagaaaguguaugcauca

SEQ ID NO: 1217629 - RNA, 19 nt, Homo sapiens
  misc_RNA (1)...(19): siRNA sense strand
gcaaacggcuaugugcaau

SEQ ID NO: 1217630 - RNA, 19 nt, Homo sapiens
  misc_RNA (1)...(19): siRNA sense strand
cgaagaggaucccacacuu

SEQ ID NO: 1217631 - RNA, 19 nt, Homo sapiens
  misc_RNA (1)...(19): siRNA sense strand
gcaaucauucuguuuaauc

SEQ ID NO: 1217632 - RNA, 19 nt, Homo sapiens
  misc_RNA (1)...(19): siRNA sense strand
gacagaagcucaggcaaac

SEQ ID NO: 1217633 - RNA, 19 nt, Homo sapiens
  misc_RNA (1)...(19): siRNA sense strand
ccaaaugacccugugacua

SEQ ID NO: 1217634 - RNA, 19 nt, Homo sapiens
  misc_RNA (1)...(19): siRNA sense strand
ggaguaggagccaucuuug

SEQ ID NO: 1217635 - RNA, 19 nt, Homo sapiens
  misc_RNA (1)...(19): siRNA sense strand
gagaccuacugcaaacaga

SEQ ID NO: 1217636 - RNA, 19 nt, Homo sapiens
  misc_RNA (1)...(19): siRNA sense strand
gcaagggcuucuucaaacg

SEQ ID NO: 1217637 - RNA, 19 nt, Homo sapiens
  misc_RNA (1)...(19): siRNA sense strand
caaagaccuuacauacucu

SEQ ID NO: 1217638 - RNA, 19 nt, Homo sapiens
  misc_RNA (1)...(19): siRNA sense strand
gaguaggagccaucuuuga

SEQ ID NO: 1217639 - RNA, 19 nt, Homo sapiens
  misc_RNA (1)...(19): siRNA sense strand
ugugaagccaccagucuua

SEQ ID NO: 1217640 - RNA, 19 nt, Homo sapiens
  misc_RNA (1)...(19): siRNA sense strand
gaagcucaggcaaacacua

SEQ ID NO: 1217641 - RNA, 19 nt, Homo sapiens
  misc_RNA (1)...(19): siRNA sense strand
ugagggcaaucauucuguu

SEQ ID NO: 1217642 - RNA, 19 nt, Homo sapiens
  misc_RNA (1)...(19): siRNA sense strand
ccauuggccuuaagugucu

SEQ ID NO: 1217643 - RNA, 19 nt, Homo sapiens
  misc_RNA (1)...(19): siRNA sense strand
ccgcaaagaccuuacauac

SEQ ID NO: 1217644 - RNA, 19 nt, Homo sapiens
  misc_RNA (1)...(19): siRNA sense strand
caucgacaccuuccucaug

SEQ ID NO: 1217645 - RNA, 19 nt, Homo sapiens
  misc_RNA (1)...(19): siRNA sense strand
aaacggcuaugugcaaucu

SEQ ID NO: 1217646 - RNA, 19 nt, Homo sapiens
  misc_RNA (1)...(19): siRNA sense strand
caaacgcaccauccgcaaa

SEQ ID NO: 1217647 - RNA, 19 nt, Homo sapiens
  misc_RNA (1)...(19): siRNA sense strand
gagcagcagggacgguuug

SEQ ID NO: 1217648 - RNA, 19 nt, Homo sapiens
  misc_RNA (1)...(19): siRNA sense strand
uuaagugucuagagcaucu

SEQ ID NO: 1217649 - RNA, 19 nt, Homo sapiens
  misc_RNA (1)...(19): siRNA sense strand
ggcaaacggcuaugugcaa

SEQ ID NO: 1217650 - RNA, 19 nt, Homo sapiens
  misc_RNA (1)...(19): siRNA sense strand
ggcaaucauucuguuuaau

SEQ ID NO: 1217651 - RNA, 19 nt, Homo sapiens
  misc_RNA (1)...(19): siRNA sense strand
ugcaagggcuucuucaaac

SEQ ID NO: 1217652 - RNA, 19 nt, Homo sapiens
  misc_RNA (1)...(19): siRNA sense strand
ccucauugccuccuucuca

SEQ ID NO: 1217653 - RNA, 19 nt, Homo sapiens
  misc_RNA (1)...(19): siRNA sense strand
gagggcaaucauucuguuu

SEQ ID NO: 1217654 - RNA, 19 nt, Homo sapiens
  misc_RNA (1)...(19): siRNA sense strand
gauuaacucaacaguguca

SEQ ID NO: 1217655 - RNA, 19 nt, Homo sapiens
  misc_RNA (1)...(19): siRNA sense strand
gcaggcggagaacaacaaa

SEQ ID NO: 1217656 - RNA, 19 nt, Homo sapiens
  misc_RNA (1)...(19): siRNA sense strand
gacaugaggauggacaaga

SEQ ID NO: 1217657 - RNA, 19 nt, Homo sapiens
  misc_RNA (1)...(19): siRNA sense strand
aggaguaggagccaucuuu

SEQ ID NO: 1217658 - RNA, 19 nt, Homo sapiens
  misc_RNA (1)...(19): siRNA sense strand
ggcagagcuugcuguggaa

SEQ ID NO: 1217659 - RNA, 19 nt, Homo sapiens
  misc_RNA (1)...(19): siRNA sense strand
gaugugaagccaccagucu

SEQ ID NO: 1217660 - RNA, 19 nt, Homo sapiens
  misc_RNA (1)...(19): siRNA sense strand
uugcaagggcuucuucaaa

SEQ ID NO: 1217661 - RNA, 19 nt, Homo sapiens
  misc_RNA (1)...(19): siRNA sense strand
guaggagccaucuuugauc

SEQ ID NO: 1217662 - RNA, 19 nt, Homo sapiens
  misc_RNA (1)...(19): siRNA sense strand
ccauucagcaggaguagga

SEQ ID NO: 1217663 - RNA, 19 nt, Homo sapiens
  misc_RNA (1)...(19): siRNA sense strand
guacugccgcuaucagaag

SEQ ID NO: 1217664 - RNA, 19 nt, Homo sapiens
  misc_RNA (1)...(19): siRNA sense strand
gcgaagaggaucccacacu

SEQ ID NO: 1217665 - RNA, 19 nt, Homo sapiens
  misc_RNA (1)...(19): siRNA sense strand
caccgcaacucagcccauu

SEQ ID NO: 1217666 - RNA, 19 nt, Homo sapiens
  misc_RNA (1)...(19): siRNA sense strand
acaccgauccauugauguu

SEQ ID NO: 1217667 - RNA, 19 nt, Homo sapiens
  misc_RNA (1)...(19): siRNA sense strand
gguggcaggcggagaacaa

SEQ ID NO: 1217668 - RNA, 19 nt, Homo sapiens
  misc_RNA (1)...(19): siRNA sense strand
caaucauucuguuuaaucc

SEQ ID NO: 1217669 - RNA, 19 nt, Homo sapiens
  misc_RNA (1)...(19): siRNA sense strand
cggaaccgcugucaguacu

SEQ ID NO: 1217670 - RNA, 19 nt, Homo sapiens
  misc_RNA (1)...(19): siRNA sense strand
cagcuauucacgcuuguug

SEQ ID NO: 1217671 - RNA, 19 nt, Homo sapiens
  misc_RNA (1)...(19): siRNA sense strand
ucacgugcaccgcaacuca

SEQ ID NO: 1217672 - RNA, 19 nt, Homo sapiens
  misc_RNA (1)...(19): siRNA sense strand
agggcaaucauucuguuua

SEQ ID NO: 1217673 - RNA, 19 nt, Homo sapiens
  misc_RNA (1)...(19): siRNA sense strand
gugucuagagcaucuguuu

SEQ ID NO: 1217674 - RNA, 19 nt, Homo sapiens
  misc_RNA (1)...(19): siRNA sense strand
acaccuuccucauggagau

SEQ ID NO: 1217675 - RNA, 19 nt, Homo sapiens
  misc_RNA (1)...(19): siRNA sense strand
aaacgcaccauccgcaaag

SEQ ID NO: 1217676 - RNA, 19 nt, Homo sapiens
  misc_RNA (1)...(19): siRNA sense strand
gagcuaguguccaaaaugc

SEQ ID NO: 1217677 - RNA, 19 nt, Homo sapiens
  misc_RNA (1)...(19): siRNA sense strand
ccgcaacucagcccauuca

SEQ ID NO: 1217678 - RNA, 19 nt, Homo sapiens
  misc_RNA (1)...(19): siRNA sense strand
gaagagggaggcgguacag

SEQ ID NO: 1217679 - RNA, 19 nt, Homo sapiens
  misc_RNA (1)...(19): siRNA sense strand
ugucaguacugccgcuauc

SEQ ID NO: 1217680 - RNA, 19 nt, Homo sapiens
  misc_RNA (1)...(19): siRNA sense strand
gauccuggaggcagagcuu

SEQ ID NO: 1217681 - RNA, 19 nt, Homo sapiens
  misc_RNA (1)...(19): siRNA sense strand
ucucacaccgauccauuga

SEQ ID NO: 1217682 - RNA, 19 nt, Homo sapiens
  misc_RNA (1)...(19): siRNA sense strand
gcuauucacgcuuguugag

SEQ ID NO: 1217683 - RNA, 19 nt, Homo sapiens
  misc_RNA (1)...(19): siRNA sense strand
gcagaggacaagcuucuua

SEQ ID NO: 1217684 - RNA, 19 nt, Homo sapiens
  misc_RNA (1)...(19): siRNA sense strand
cuagguggcugcauugaug

SEQ ID NO: 1217685 - RNA, 19 nt, Homo sapiens
  misc_RNA (1)...(19): siRNA sense strand
ugauggcugugacugaaua

SEQ ID NO: 1217686 - RNA, 19 nt, Homo sapiens
  misc_RNA (1)...(19): siRNA sense strand
gcugauggcugugacugaa

SEQ ID NO: 1217687 - RNA, 19 nt, Homo sapiens
  misc_RNA (1)...(19): siRNA sense strand
gagcaacgcgagaaggauu

SEQ ID NO: 1217688 - RNA, 19 nt, Homo sapiens
  misc_RNA (1)...(19): siRNA sense strand
gcugcuagguggcugcauu

SEQ ID NO: 1217689 - RNA, 19 nt, Homo sapiens
  misc_RNA (1)...(19): siRNA sense strand
gaagccagauccugacacu

SEQ ID NO: 1217690 - RNA, 19 nt, Homo sapiens
  misc_RNA (1)...(19): siRNA sense strand
ccaggacaaccgaaugaua

SEQ ID NO: 1217691 - RNA, 19 nt, Homo sapiens
  misc_RNA (1)...(19): siRNA sense strand
aaacacaagauccugauga

SEQ ID NO: 1217692 - RNA, 19 nt, Homo sapiens
  misc_RNA (1)...(19): siRNA sense strand
gugaagagcccaaggucaa

SEQ ID NO: 1217693 - RNA, 19 nt, Homo sapiens
  misc_RNA (1)...(19): siRNA sense strand
ggcagggcuuuaucaacua

SEQ ID NO: 1217694 - RNA, 19 nt, Homo sapiens
  misc_RNA (1)...(19): siRNA sense strand
ggagauagcagcaguuuuc

SEQ ID NO: 1217695 - RNA, 19 nt, Homo sapiens
  misc_RNA (1)...(19): siRNA sense strand
gagagcaacgcgagaagga

SEQ ID NO: 1217696 - RNA, 19 nt, Homo sapiens
  misc_RNA (1)...(19): siRNA sense strand
gacaccagcugcggaaaca

SEQ ID NO: 1217697 - RNA, 19 nt, Homo sapiens
  misc_RNA (1)...(19): siRNA sense strand
aacacaagauccugaugaa

SEQ ID NO: 1217698 - RNA, 19 nt, Homo sapiens
  misc_RNA (1)...(19): siRNA sense strand
ggaaacacaagauccugau

SEQ ID NO: 1217699 - RNA, 19 nt, Homo sapiens
  misc_RNA (1)...(19): siRNA sense strand
caggacaaccgaaugauag

SEQ ID NO: 1217700 - RNA, 19 nt, Homo sapiens
  misc_RNA (1)...(19): siRNA sense strand
gcaggcagggcuuuaucaa

SEQ ID NO: 1217701 - RNA, 19 nt, Homo sapiens
  misc_RNA (1)...(19): siRNA sense strand
acaagauccugaugaaggu

SEQ ID NO: 1217702 - RNA, 19 nt, Homo sapiens
  misc_RNA (1)...(19): siRNA sense strand
gaaacacaagauccugaug

SEQ ID NO: 1217703 - RNA, 19 nt, Homo sapiens
  misc_RNA (1)...(19): siRNA sense strand
aggcagggcuuuaucaacu

SEQ ID NO: 1217704 - RNA, 19 nt, Homo sapiens
  misc_RNA (1)...(19): siRNA sense strand
gcagggcuuuaucaacuac

SEQ ID NO: 1217705 - RNA, 19 nt, Homo sapiens
  misc_RNA (1)...(19): siRNA sense strand
gaggacaagcuucuuaugc

SEQ ID NO: 1217706 - RNA, 19 nt, Homo sapiens
  misc_RNA (1)...(19): siRNA sense strand
gccagauccugacacuguu

SEQ ID NO: 1217707 - RNA, 19 nt, Homo sapiens
  misc_RNA (1)...(19): siRNA sense strand
cuuaaggacugugccauuc

SEQ ID NO: 1217708 - RNA, 19 nt, Homo sapiens
  misc_RNA (1)...(19): siRNA sense strand
ggcugugacugaauauauc

SEQ ID NO: 1217709 - RNA, 19 nt, Homo sapiens
  misc_RNA (1)...(19): siRNA sense strand
acacuguuccggacucgua

SEQ ID NO: 1217710 - RNA, 19 nt, Homo sapiens
  misc_RNA (1)...(19): siRNA sense strand
ccuccagacuguccgcuau

SEQ ID NO: 1217711 - RNA, 19 nt, Homo sapiens
  misc_RNA (1)...(19): siRNA sense strand
caaaaucugcugccccuuu

SEQ ID NO: 1217712 - RNA, 19 nt, Homo sapiens
  misc_RNA (1)...(19): siRNA sense strand
ccacccuguuggaccagua

SEQ ID NO: 1217713 - RNA, 19 nt, Homo sapiens
  misc_RNA (1)...(19): siRNA sense strand
acaugcugcuggucaguga

SEQ ID NO: 1217714 - RNA, 19 nt, Homo sapiens
  misc_RNA (1)...(19): siRNA sense strand
cagaggacaagcuucuuau

SEQ ID NO: 1217715 - RNA, 19 nt, Homo sapiens
  misc_RNA (1)...(19): siRNA sense strand
gaggauuccaaguaccaaa

SEQ ID NO: 1217716 - RNA, 19 nt, Homo sapiens
  misc_RNA (1)...(19): siRNA sense strand
caaggucaaggagauggua

SEQ ID NO: 1217717 - RNA, 19 nt, Homo sapiens
  misc_RNA (1)...(19): siRNA sense strand
ucagagagcaacgcgagaa

SEQ ID NO: 1217718 - RNA, 19 nt, Homo sapiens
  misc_RNA (1)...(19): siRNA sense strand
uggcugugacugaauauau

SEQ ID NO: 1217719 - RNA, 19 nt, Homo sapiens
  misc_RNA (1)...(19): siRNA sense strand
ugccuacccuccagacugu

SEQ ID NO: 1217720 - RNA, 19 nt, Homo sapiens
  misc_RNA (1)...(19): siRNA sense strand
gcagaggacaagcuucuua

SEQ ID NO: 1217721 - RNA, 19 nt, Homo sapiens
  misc_RNA (1)...(19): siRNA sense strand
cuagguggcugcauugaug

SEQ ID NO: 1217722 - RNA, 19 nt, Homo sapiens
  misc_RNA (1)...(19): siRNA sense strand
ugauggcugugacugaaua

SEQ ID NO: 1217723 - RNA, 19 nt, Homo sapiens
  misc_RNA (1)...(19): siRNA sense strand
gcugauggcugugacugaa

SEQ ID NO: 1217724 - RNA, 19 nt, Homo sapiens
  misc_RNA (1)...(19): siRNA sense strand
gagcaacgcgagaaggauu

SEQ ID NO: 1217725 - RNA, 19 nt, Homo sapiens
  misc_RNA (1)...(19): siRNA sense strand
gcugcuagguggcugcauu

SEQ ID NO: 1217726 - RNA, 19 nt, Homo sapiens
  misc_RNA (1)...(19): siRNA sense strand
gaagccagauccugacacu

SEQ ID NO: 1217727 - RNA, 19 nt, Homo sapiens
  misc_RNA (1)...(19): siRNA sense strand
ccaggacaaccgaaugaua

SEQ ID NO: 1217728 - RNA, 19 nt, Homo sapiens
  misc_RNA (1)...(19): siRNA sense strand
aaacacaagauccugauga

SEQ ID NO: 1217729 - RNA, 19 nt, Homo sapiens
  misc_RNA (1)...(19): siRNA sense strand
gugaagagcccaaggucaa

SEQ ID NO: 1217730 - RNA, 19 nt, Homo sapiens
  misc_RNA (1)...(19): siRNA sense strand
ggcagggcuuuaucaacua

SEQ ID NO: 1217731 - RNA, 19 nt, Homo sapiens
  misc_RNA (1)...(19): siRNA sense strand
ggagauagcagcaguuuuc

SEQ ID NO: 1217732 - RNA, 19 nt, Homo sapiens
  misc_RNA (1)...(19): siRNA sense strand
gagagcaacgcgagaagga

SEQ ID NO: 1217733 - RNA, 19 nt, Homo sapiens
  misc_RNA (1)...(19): siRNA sense strand
gacaccagcugcggaaaca

SEQ ID NO: 1217734 - RNA, 19 nt, Homo sapiens
  misc_RNA (1)...(19): siRNA sense strand
aacacaagauccugaugaa

SEQ ID NO: 1217735 - RNA, 19 nt, Homo sapiens
  misc_RNA (1)...(19): siRNA sense strand
ggaaacacaagauccugau

SEQ ID NO: 1217736 - RNA, 19 nt, Homo sapiens
  misc_RNA (1)...(19): siRNA sense strand
caggacaaccgaaugauag

SEQ ID NO: 1217737 - RNA, 19 nt, Homo sapiens
  misc_RNA (1)...(19): siRNA sense strand
gcaggcagggcuuuaucaa

SEQ ID NO: 1217738 - RNA, 19 nt, Homo sapiens
  misc_RNA (1)...(19): siRNA sense strand
acaagauccugaugaaggu

SEQ ID NO: 1217739 - RNA, 19 nt, Homo sapiens
  misc_RNA (1)...(19): siRNA sense strand
gaaacacaagauccugaug

SEQ ID NO: 1217740 - RNA, 19 nt, Homo sapiens
  misc_RNA (1)...(19): siRNA sense strand
aggcagggcuuuaucaacu

SEQ ID NO: 1217741 - RNA, 19 nt, Homo sapiens
  misc_RNA (1)...(19): siRNA sense strand
gcagggcuuuaucaacuac

SEQ ID NO: 1217742 - RNA, 19 nt, Homo sapiens
  misc_RNA (1)...(19): siRNA sense strand
gaggacaagcuucuuaugc

SEQ ID NO: 1217743 - RNA, 19 nt, Homo sapiens
  misc_RNA (1)...(19): siRNA sense strand
gccagauccugacacuguu

SEQ ID NO: 1217744 - RNA, 19 nt, Homo sapiens
  misc_RNA (1)...(19): siRNA sense strand
cuuaaggacugugccauuc

SEQ ID NO: 1217745 - RNA, 19 nt, Homo sapiens
  misc_RNA (1)...(19): siRNA sense strand
ggcugugacugaauauauc

SEQ ID NO: 1217746 - RNA, 19 nt, Homo sapiens
  misc_RNA (1)...(19): siRNA sense strand
acacuguuccggacucgua

SEQ ID NO: 1217747 - RNA, 19 nt, Homo sapiens
  misc_RNA (1)...(19): siRNA sense strand
ccuccagacuguccgcuau

SEQ ID NO: 1217748 - RNA, 19 nt, Homo sapiens
  misc_RNA (1)...(19): siRNA sense strand
caaaaucugcugccccuuu

SEQ ID NO: 1217749 - RNA, 19 nt, Homo sapiens
  misc_RNA (1)...(19): siRNA sense strand
ccacccuguuggaccagua

SEQ ID NO: 1217750 - RNA, 19 nt, Homo sapiens
  misc_RNA (1)...(19): siRNA sense strand
acaugcugcuggucaguga

SEQ ID NO: 1217751 - RNA, 19 nt, Homo sapiens
  misc_RNA (1)...(19): siRNA sense strand
cagaggacaagcuucuuau

SEQ ID NO: 1217752 - RNA, 19 nt, Homo sapiens
  misc_RNA (1)...(19): siRNA sense strand
gaggauuccaaguaccaaa

SEQ ID NO: 1217753 - RNA, 19 nt, Homo sapiens
  misc_RNA (1)...(19): siRNA sense strand
caaggucaaggagauggua

SEQ ID NO: 1217754 - RNA, 19 nt, Homo sapiens
  misc_RNA (1)...(19): siRNA sense strand
ucagagagcaacgcgagaa

SEQ ID NO: 1217755 - RNA, 19 nt, Homo sapiens
  misc_RNA (1)...(19): siRNA sense strand
uggcugugacugaauauau

SEQ ID NO: 1217756 - RNA, 19 nt, Homo sapiens
  misc_RNA (1)...(19): siRNA sense strand
ugccuacccuccagacugu

SEQ ID NO: 1217757 - RNA, 19 nt, Homo sapiens
  misc_RNA (1)...(19): siRNA sense strand
ggagugagauuauauagua

SEQ ID NO: 1217758 - RNA, 19 nt, Homo sapiens
  misc_RNA (1)...(19): siRNA sense strand
caacagaguuccacagaug

SEQ ID NO: 1217759 - RNA, 19 nt, Homo sapiens
  misc_RNA (1)...(19): siRNA sense strand
gauaagcagugccuugaaa

SEQ ID NO: 1217760 - RNA, 19 nt, Homo sapiens
  misc_RNA (1)...(19): siRNA sense strand
gagcauuacuugguucaua

SEQ ID NO: 1217761 - RNA, 19 nt, Homo sapiens
  misc_RNA (1)...(19): siRNA sense strand
ggagagaaauugcuggaau

SEQ ID NO: 1217762 - RNA, 19 nt, Homo sapiens
  misc_RNA (1)...(19): siRNA sense strand
ggaauuguauuagauguug

SEQ ID NO: 1217763 - RNA, 19 nt, Homo sapiens
  misc_RNA (1)...(19): siRNA sense strand
ucaaccagaugaugaagua

SEQ ID NO: 1217764 - RNA, 19 nt, Homo sapiens
  misc_RNA (1)...(19): siRNA sense strand
gauaauggauggagcaagu

SEQ ID NO: 1217765 - RNA, 19 nt, Homo sapiens
  misc_RNA (1)...(19): siRNA sense strand
gggaguagauauuguccua

SEQ ID NO: 1217766 - RNA, 19 nt, Homo sapiens
  misc_RNA (1)...(19): siRNA sense strand
gaagcaagguaucauucuu

SEQ ID NO: 1217767 - RNA, 19 nt, Homo sapiens
  misc_RNA (1)...(19): siRNA sense strand
gaguagauauuguccuaga

SEQ ID NO: 1217768 - RNA, 19 nt, Homo sapiens
  misc_RNA (1)...(19): siRNA sense strand
ccagauagccacugccuuu

SEQ ID NO: 1217769 - RNA, 19 nt, Homo sapiens
  misc_RNA (1)...(19): siRNA sense strand
ggaagcagcaggaagcauu

SEQ ID NO: 1217770 - RNA, 19 nt, Homo sapiens
  misc_RNA (1)...(19): siRNA sense strand
gcaagugcauuugguacaa

SEQ ID NO: 1217771 - RNA, 19 nt, Homo sapiens
  misc_RNA (1)...(19): siRNA sense strand
uuccacagaugaagaaaua

SEQ ID NO: 1217772 - RNA, 19 nt, Homo sapiens
  misc_RNA (1)...(19): siRNA sense strand
ccagauaaauacaaagcuu

SEQ ID NO: 1217773 - RNA, 19 nt, Homo sapiens
  misc_RNA (1)...(19): siRNA sense strand
ggauggagcaagugcauuu

SEQ ID NO: 1217774 - RNA, 19 nt, Homo sapiens
  misc_RNA (1)...(19): siRNA sense strand
gaggauaacuuugugaaac

SEQ ID NO: 1217775 - RNA, 19 nt, Homo sapiens
  misc_RNA (1)...(19): siRNA sense strand
gauaucaucacacuucuug

SEQ ID NO: 1217776 - RNA, 19 nt, Homo sapiens
  misc_RNA (1)...(19): siRNA sense strand
cuacaacuacuaccacaua

SEQ ID NO: 1217777 - RNA, 19 nt, Homo sapiens
  misc_RNA (1)...(19): siRNA sense strand
gcaugcagccuugaagaua

SEQ ID NO: 1217778 - RNA, 19 nt, Homo sapiens
  misc_RNA (1)...(19): siRNA sense strand
ugaagacccuggacuuugu

SEQ ID NO: 1217779 - RNA, 19 nt, Homo sapiens
  misc_RNA (1)...(19): siRNA sense strand
gaaagcuguuuggaagaaa

SEQ ID NO: 1217780 - RNA, 19 nt, Homo sapiens
  misc_RNA (1)...(19): siRNA sense strand
ugaaagcuguuuggaagaa

SEQ ID NO: 1217781 - RNA, 19 nt, Homo sapiens
  misc_RNA (1)...(19): siRNA sense strand
caugcagccuugaagauaa

SEQ ID NO: 1217782 - RNA, 19 nt, Homo sapiens
  misc_RNA (1)...(19): siRNA sense strand
uggcagaaaugaagaugaa

SEQ ID NO: 1217783 - RNA, 19 nt, Homo sapiens
  misc_RNA (1)...(19): siRNA sense strand
gcagugccuugaaagauuc

SEQ ID NO: 1217784 - RNA, 19 nt, Homo sapiens
  misc_RNA (1)...(19): siRNA sense strand
ugauguaucuaaugggaaa

SEQ ID NO: 1217785 - RNA, 19 nt, Homo sapiens
  misc_RNA (1)...(19): siRNA sense strand
uagcuuuccugaaugauga

SEQ ID NO: 1217786 - RNA, 19 nt, Homo sapiens
  misc_RNA (1)...(19): siRNA sense strand
caagguaucauucuuucaa

SEQ ID NO: 1217787 - RNA, 19 nt, Homo sapiens
  misc_RNA (1)...(19): siRNA sense strand
ucucaucucucuccuggaa

SEQ ID NO: 1217788 - RNA, 19 nt, Homo sapiens
  misc_RNA (1)...(19): siRNA sense strand
auacagcucugcauuaucu

SEQ ID NO: 1217789 - RNA, 19 nt, Homo sapiens
  misc_RNA (1)...(19): siRNA sense strand
cuauacagcucugcauuau

SEQ ID NO: 1217790 - RNA, 19 nt, Homo sapiens
  misc_RNA (1)...(19): siRNA sense strand
uagaggagccaaagugauu

SEQ ID NO: 1217791 - RNA, 19 nt, Homo sapiens
  misc_RNA (1)...(19): siRNA sense strand
ucaguuagcacaucauaga

SEQ ID NO: 1217792 - RNA, 19 nt, Homo sapiens
  misc_RNA (1)...(19): siRNA sense strand
gaugaaguaguuggaauuu

SEQ ID NO: 1217793 - RNA, 19 nt, Homo sapiens
  misc_RNA (1)...(19): siRNA sense strand
ggagcaagugcauuuggua

SEQ ID NO: 1217794 - RNA, 19 nt, Homo sapiens
  misc_RNA (1)...(19): siRNA sense strand
aacguuagcuuuccugaau

SEQ ID NO: 1217795 - RNA, 19 nt, Homo sapiens
  misc_RNA (1)...(19): siRNA sense strand
gagccaaagugauuucaac

SEQ ID NO: 1217796 - RNA, 19 nt, Homo sapiens
  misc_RNA (1)...(19): siRNA sense strand
ccuauacagcucugcauua

SEQ ID NO: 1217797 - RNA, 19 nt, Homo sapiens
  misc_RNA (1)...(19): siRNA sense strand
ggauaacuuugugaaacuu

SEQ ID NO: 1217798 - RNA, 19 nt, Homo sapiens
  misc_RNA (1)...(19): siRNA sense strand
ugagccagauaaauacaaa

SEQ ID NO: 1217799 - RNA, 19 nt, Homo sapiens
  misc_RNA (1)...(19): siRNA sense strand
gaugaugaaccagcuguaa

SEQ ID NO: 1217800 - RNA, 19 nt, Homo sapiens
  misc_RNA (1)...(19): siRNA sense strand
ccacauaaacaugauauca

SEQ ID NO: 1217801 - RNA, 19 nt, Homo sapiens
  misc_RNA (1)...(19): siRNA sense strand
ugaaccagcuguaaaacua

SEQ ID NO: 1217802 - RNA, 19 nt, Homo sapiens
  misc_RNA (1)...(19): siRNA sense strand
ugaaguaguuggaauuuug

SEQ ID NO: 1217803 - RNA, 19 nt, Homo sapiens
  misc_RNA (1)...(19): siRNA sense strand
ggaggccacuggguaacaa

SEQ ID NO: 1217804 - RNA, 19 nt, Homo sapiens
  misc_RNA (1)...(19): siRNA sense strand
ccuagaugcuggagugaga

SEQ ID NO: 1217805 - RNA, 19 nt, Homo sapiens
  misc_RNA (1)...(19): siRNA sense strand
uuagaguacaugagcauua

SEQ ID NO: 1217806 - RNA, 19 nt, Homo sapiens
  misc_RNA (1)...(19): siRNA sense strand
ccucaagggagcaacguua

SEQ ID NO: 1217807 - RNA, 19 nt, Homo sapiens
  misc_RNA (1)...(19): siRNA sense strand
uaguaaagaugaugaacca

SEQ ID NO: 1217808 - RNA, 19 nt, Homo sapiens
  misc_RNA (1)...(19): siRNA sense strand
uuacagaggauaacuuugu

SEQ ID NO: 1217809 - RNA, 19 nt, Homo sapiens
  misc_RNA (1)...(19): siRNA sense strand
guagauauuguccuagaug

SEQ ID NO: 1217810 - RNA, 19 nt, Homo sapiens
  misc_RNA (1)...(19): siRNA sense strand
caacuacuaccacauaaac

SEQ ID NO: 1217811 - RNA, 19 nt, Homo sapiens
  misc_RNA (1)...(19): siRNA sense strand
agcauuacuugguucauaa

SEQ ID NO: 1217812 - RNA, 19 nt, Homo sapiens
  misc_RNA (1)...(19): siRNA sense strand
uacaacuacuaccacauaa

SEQ ID NO: 1217813 - RNA, 19 nt, Homo sapiens
  misc_RNA (1)...(19): siRNA sense strand
gcuggagugagauuauaua

SEQ ID NO: 1217814 - RNA, 19 nt, Homo sapiens
  misc_RNA (1)...(19): siRNA sense strand
ugcauuaucuuucucaucu

SEQ ID NO: 1217815 - RNA, 19 nt, Homo sapiens
  misc_RNA (1)...(19): siRNA sense strand
guuaaagcuugugcucuga

SEQ ID NO: 1217816 - RNA, 19 nt, Homo sapiens
  misc_RNA (1)...(19): siRNA sense strand
ugauugauguaucuaaugg

SEQ ID NO: 1217817 - RNA, 19 nt, Homo sapiens
  misc_RNA (1)...(19): siRNA sense strand
ccaacagaguuccacagau

SEQ ID NO: 1217818 - RNA, 19 nt, Homo sapiens
  misc_RNA (1)...(19): siRNA sense strand
cguuagcuuuccugaauga

SEQ ID NO: 1217819 - RNA, 19 nt, Homo sapiens
  misc_RNA (1)...(19): siRNA sense strand
aaagugauuucaacagcau

SEQ ID NO: 1217820 - RNA, 19 nt, Homo sapiens
  misc_RNA (1)...(19): siRNA sense strand
cauagaggagccaaaguga

SEQ ID NO: 1217821 - RNA, 19 nt, Homo sapiens
  misc_RNA (1)...(19): siRNA sense strand
aagcaagguaucauucuuu

SEQ ID NO: 1217822 - RNA, 19 nt, Homo sapiens
  misc_RNA (1)...(19): siRNA sense strand
caacagggaaaauaucuuu

SEQ ID NO: 1217823 - RNA, 19 nt, Homo sapiens
  misc_RNA (1)...(19): siRNA sense strand
agcagugccuugaaagauu

SEQ ID NO: 1217824 - RNA, 19 nt, Homo sapiens
  misc_RNA (1)...(19): siRNA sense strand
gcauuugguacaauagcua

SEQ ID NO: 1217825 - RNA, 19 nt, Homo sapiens
  misc_RNA (1)...(19): siRNA sense strand
caagugcauuugguacaau

SEQ ID NO: 1217826 - RNA, 19 nt, Homo sapiens
  misc_RNA (1)...(19): siRNA sense strand
ggaagcaagguaucauucu

SEQ ID NO: 1217827 - RNA, 19 nt, Homo sapiens
  misc_RNA (1)...(19): siRNA sense strand
gauguuggaagcaagguau

SEQ ID NO: 1217828 - RNA, 19 nt, Homo sapiens
  misc_RNA (1)...(19): siRNA sense strand
uugugaaguuguuagagua

SEQ ID NO: 1217829 - RNA, 19 nt, Homo sapiens
  misc_RNA (1)...(19): siRNA sense strand
caaauguacaacagggaaa

SEQ ID NO: 1217830 - RNA, 19 nt, Homo sapiens
  misc_RNA (1)...(19): siRNA sense strand
aagaaaaccuucaguugga

SEQ ID NO: 1217831 - RNA, 19 nt, Homo sapiens
  misc_RNA (1)...(19): siRNA sense strand
aagugcauuugguacaaua

SEQ ID NO: 1217832 - RNA, 19 nt, Homo sapiens
  misc_RNA (1)...(19): siRNA sense strand
gcauuacuugguucauaaa

SEQ ID NO: 1217833 - RNA, 19 nt, Homo sapiens
  misc_RNA (1)...(19): siRNA sense strand
acaugagcauuacuugguu

SEQ ID NO: 1217834 - RNA, 19 nt, Homo sapiens
  misc_RNA (1)...(19): siRNA sense strand
gaagcagcaggaagcauuc

SEQ ID NO: 1217835 - RNA, 19 nt, Homo sapiens
  misc_RNA (1)...(19): siRNA sense strand
uagaguacaugagcauuac

SEQ ID NO: 1217836 - RNA, 19 nt, Homo sapiens
  misc_RNA (1)...(19): siRNA sense strand
caacguuagcuuuccugaa

SEQ ID NO: 1217837 - RNA, 19 nt, Homo sapiens
  misc_RNA (1)...(19): siRNA sense strand
gccacuggguaacaacaga

SEQ ID NO: 1217838 - RNA, 19 nt, Homo sapiens
  misc_RNA (1)...(19): siRNA sense strand
gaugcuggagugagauuau

SEQ ID NO: 1217839 - RNA, 19 nt, Homo sapiens
  misc_RNA (1)...(19): siRNA sense strand
uaagcagugccuugaaaga

SEQ ID NO: 1217840 - RNA, 19 nt, Homo sapiens
  misc_RNA (1)...(19): siRNA sense strand
ucauagaggagccaaagug

SEQ ID NO: 1217841 - RNA, 19 nt, Homo sapiens
  misc_RNA (1)...(19): siRNA sense strand
gcagaaaugaagaugaaaa

SEQ ID NO: 1217842 - RNA, 19 nt, Homo sapiens
  misc_RNA (1)...(19): siRNA sense strand
uugcuggaauuguauuaga

SEQ ID NO: 1217843 - RNA, 19 nt, Homo sapiens
  misc_RNA (1)...(19): siRNA sense strand
ugaugaaguaguuggaauu

SEQ ID NO: 1217844 - RNA, 19 nt, Homo sapiens
  misc_RNA (1)...(19): siRNA sense strand
uauuagauguuggaagcaa

SEQ ID NO: 1217845 - RNA, 19 nt, Homo sapiens
  misc_RNA (1)...(19): siRNA sense strand
cagaggauaacuuugugaa

SEQ ID NO: 1217846 - RNA, 19 nt, Homo sapiens
  misc_RNA (1)...(19): siRNA sense strand
gaugaugaaguaguuggaa

SEQ ID NO: 1217847 - RNA, 19 nt, Homo sapiens
  misc_RNA (1)...(19): siRNA sense strand
gggagcaacguuagcuuuc

SEQ ID NO: 1217848 - RNA, 19 nt, Homo sapiens
  misc_RNA (1)...(19): siRNA sense strand
guuggaggccacuggguaa

SEQ ID NO: 1217849 - RNA, 19 nt, Homo sapiens
  misc_RNA (1)...(19): siRNA sense strand
uacagaggauaacuuugug

SEQ ID NO: 1217850 - RNA, 19 nt, Homo sapiens
  misc_RNA (1)...(19): siRNA sense strand
gauggagugcgugccuaua

SEQ ID NO: 1217851 - RNA, 19 nt, Homo sapiens
  misc_RNA (1)...(19): siRNA sense strand
ggauggagugcgugccuau

SEQ ID NO: 1217852 - RNA, 19 nt, Homo sapiens
  misc_RNA (1)...(19): siRNA sense strand
gaaguuguuagaguacaug

SEQ ID NO: 1217853 - RNA, 19 nt, Homo sapiens
  misc_RNA (1)...(19): siRNA sense strand
gagcaacguuagcuuuccu

SEQ ID NO: 1217854 - RNA, 19 nt, Homo sapiens
  misc_RNA (1)...(19): siRNA sense strand
gagugauugauguaucuaa

SEQ ID NO: 1217855 - RNA, 19 nt, Homo sapiens
  misc_RNA (1)...(19): siRNA sense strand
ccgagugauugauguaucu

SEQ ID NO: 1217856 - RNA, 19 nt, Homo sapiens
  misc_RNA (1)...(19): siRNA sense strand
gaguuccacagaugaagaa

SEQ ID NO: 1217857 - RNA, 19 nt, Homo sapiens
  misc_RNA (1)...(19): siRNA sense strand
caacagaguuccacagaug

SEQ ID NO: 1217858 - RNA, 19 nt, Homo sapiens
  misc_RNA (1)...(19): siRNA sense strand
gauaagcagugccuugaaa

SEQ ID NO: 1217859 - RNA, 19 nt, Homo sapiens
  misc_RNA (1)...(19): siRNA sense strand
gagcauuacuugguucaua

SEQ ID NO: 1217860 - RNA, 19 nt, Homo sapiens
  misc_RNA (1)...(19): siRNA sense strand
ggagagaaauugcuggaau

SEQ ID NO: 1217861 - RNA, 19 nt, Homo sapiens
  misc_RNA (1)...(19): siRNA sense strand
ggaauuguauuagauguug

SEQ ID NO: 1217862 - RNA, 19 nt, Homo sapiens
  misc_RNA (1)...(19): siRNA sense strand
ucaaccagaugaugaagua

SEQ ID NO: 1217863 - RNA, 19 nt, Homo sapiens
  misc_RNA (1)...(19): siRNA sense strand
gauaauggauggagcaagu

SEQ ID NO: 1217864 - RNA, 19 nt, Homo sapiens
  misc_RNA (1)...(19): siRNA sense strand
gaagcaagguaucauucuu

SEQ ID NO: 1217865 - RNA, 19 nt, Homo sapiens
  misc_RNA (1)...(19): siRNA sense strand
ggaagcagcaggaagcauu

SEQ ID NO: 1217866 - RNA, 19 nt, Homo sapiens
  misc_RNA (1)...(19): siRNA sense strand
gcaagugcauuugguacaa

SEQ ID NO: 1217867 - RNA, 19 nt, Homo sapiens
  misc_RNA (1)...(19): siRNA sense strand
uuccacagaugaagaaaua

SEQ ID NO: 1217868 - RNA, 19 nt, Homo sapiens
  misc_RNA (1)...(19): siRNA sense strand
ccagauaaauacaaagcuu

SEQ ID NO: 1217869 - RNA, 19 nt, Homo sapiens
  misc_RNA (1)...(19): siRNA sense strand
ggauggagcaagugcauuu

SEQ ID NO: 1217870 - RNA, 19 nt, Homo sapiens
  misc_RNA (1)...(19): siRNA sense strand
gaggauaacuuugugaaac

SEQ ID NO: 1217871 - RNA, 19 nt, Homo sapiens
  misc_RNA (1)...(19): siRNA sense strand
gcaugcagccuugaagaua

SEQ ID NO: 1217872 - RNA, 19 nt, Homo sapiens
  misc_RNA (1)...(19): siRNA sense strand
ugaagacccuggacuuugu

SEQ ID NO: 1217873 - RNA, 19 nt, Homo sapiens
  misc_RNA (1)...(19): siRNA sense strand
caugcagccuugaagauaa

SEQ ID NO: 1217874 - RNA, 19 nt, Homo sapiens
  misc_RNA (1)...(19): siRNA sense strand
uggcagaaaugaagaugaa

SEQ ID NO: 1217875 - RNA, 19 nt, Homo sapiens
  misc_RNA (1)...(19): siRNA sense strand
gcagugccuugaaagauuc

SEQ ID NO: 1217876 - RNA, 19 nt, Homo sapiens
  misc_RNA (1)...(19): siRNA sense strand
caagguaucauucuuucaa

SEQ ID NO: 1217877 - RNA, 19 nt, Homo sapiens
  misc_RNA (1)...(19): siRNA sense strand
ucucaucucucuccuggaa

SEQ ID NO: 1217878 - RNA, 19 nt, Homo sapiens
  misc_RNA (1)...(19): siRNA sense strand
auacagcucugcauuaucu

SEQ ID NO: 1217879 - RNA, 19 nt, Homo sapiens
  misc_RNA (1)...(19): siRNA sense strand
cuauacagcucugcauuau

SEQ ID NO: 1217880 - RNA, 19 nt, Homo sapiens
  misc_RNA (1)...(19): siRNA sense strand
uagaggagccaaagugauu

SEQ ID NO: 1217881 - RNA, 19 nt, Homo sapiens
  misc_RNA (1)...(19): siRNA sense strand
ucaguuagcacaucauaga

SEQ ID NO: 1217882 - RNA, 19 nt, Homo sapiens
  misc_RNA (1)...(19): siRNA sense strand
gaugaaguaguuggaauuu

SEQ ID NO: 1217883 - RNA, 19 nt, Homo sapiens
  misc_RNA (1)...(19): siRNA sense strand
ggagcaagugcauuuggua

SEQ ID NO: 1217884 - RNA, 19 nt, Homo sapiens
  misc_RNA (1)...(19): siRNA sense strand
gagccaaagugauuucaac

SEQ ID NO: 1217885 - RNA, 19 nt, Homo sapiens
  misc_RNA (1)...(19): siRNA sense strand
ugagccagauaaauacaaa

SEQ ID NO: 1217886 - RNA, 19 nt, Homo sapiens
  misc_RNA (1)...(19): siRNA sense strand
ccuauacagcucugcauua

SEQ ID NO: 1217887 - RNA, 19 nt, Homo sapiens
  misc_RNA (1)...(19): siRNA sense strand
ggauaacuuugugaaacuu

SEQ ID NO: 1217888 - RNA, 19 nt, Homo sapiens
  misc_RNA (1)...(19): siRNA sense strand
ugaaguaguuggaauuuug

SEQ ID NO: 1217889 - RNA, 19 nt, Homo sapiens
  misc_RNA (1)...(19): siRNA sense strand
uuacagaggauaacuuugu

SEQ ID NO: 1217890 - RNA, 19 nt, Homo sapiens
  misc_RNA (1)...(19): siRNA sense strand
uuagaguacaugagcauua

SEQ ID NO: 1217891 - RNA, 19 nt, Homo sapiens
  misc_RNA (1)...(19): siRNA sense strand
agcauuacuugguucauaa

SEQ ID NO: 1217892 - RNA, 19 nt, Homo sapiens
  misc_RNA (1)...(19): siRNA sense strand
ugcauuaucuuucucaucu

SEQ ID NO: 1217893 - RNA, 19 nt, Homo sapiens
  misc_RNA (1)...(19): siRNA sense strand
guuaaagcuugugcucuga

SEQ ID NO: 1217894 - RNA, 19 nt, Homo sapiens
  misc_RNA (1)...(19): siRNA sense strand
ccaacagaguuccacagau

SEQ ID NO: 1217895 - RNA, 19 nt, Homo sapiens
  misc_RNA (1)...(19): siRNA sense strand
aaagugauuucaacagcau

SEQ ID NO: 1217896 - RNA, 19 nt, Homo sapiens
  misc_RNA (1)...(19): siRNA sense strand
cauagaggagccaaaguga

SEQ ID NO: 1217897 - RNA, 19 nt, Homo sapiens
  misc_RNA (1)...(19): siRNA sense strand
aagcaagguaucauucuuu

SEQ ID NO: 1217898 - RNA, 19 nt, Homo sapiens
  misc_RNA (1)...(19): siRNA sense strand
agcagugccuugaaagauu

SEQ ID NO: 1217899 - RNA, 19 nt, Homo sapiens
  misc_RNA (1)...(19): siRNA sense strand
gcauuugguacaauagcua

SEQ ID NO: 1217900 - RNA, 19 nt, Homo sapiens
  misc_RNA (1)...(19): siRNA sense strand
caagugcauuugguacaau

SEQ ID NO: 1217901 - RNA, 19 nt, Homo sapiens
  misc_RNA (1)...(19): siRNA sense strand
gauguuggaagcaagguau

SEQ ID NO: 1217902 - RNA, 19 nt, Homo sapiens
  misc_RNA (1)...(19): siRNA sense strand
ggaagcaagguaucauucu

SEQ ID NO: 1217903 - RNA, 19 nt, Homo sapiens
  misc_RNA (1)...(19): siRNA sense strand
uugugaaguuguuagagua

SEQ ID NO: 1217904 - RNA, 19 nt, Homo sapiens
  misc_RNA (1)...(19): siRNA sense strand
aagugcauuugguacaaua

SEQ ID NO: 1217905 - RNA, 19 nt, Homo sapiens
  misc_RNA (1)...(19): siRNA sense strand
gcauuacuugguucauaaa

SEQ ID NO: 1217906 - RNA, 19 nt, Homo sapiens
  misc_RNA (1)...(19): siRNA sense strand
acaugagcauuacuugguu

SEQ ID NO: 1217907 - RNA, 19 nt, Homo sapiens
  misc_RNA (1)...(19): siRNA sense strand
gaagcagcaggaagcauuc

SEQ ID NO: 1217908 - RNA, 19 nt, Homo sapiens
  misc_RNA (1)...(19): siRNA sense strand
uagaguacaugagcauuac

SEQ ID NO: 1217909 - RNA, 19 nt, Homo sapiens
  misc_RNA (1)...(19): siRNA sense strand
uaagcagugccuugaaaga

SEQ ID NO: 1217910 - RNA, 19 nt, Homo sapiens
  misc_RNA (1)...(19): siRNA sense strand
ucauagaggagccaaagug

SEQ ID NO: 1217911 - RNA, 19 nt, Homo sapiens
  misc_RNA (1)...(19): siRNA sense strand
gcagaaaugaagaugaaaa

SEQ ID NO: 1217912 - RNA, 19 nt, Homo sapiens
  misc_RNA (1)...(19): siRNA sense strand
uugcuggaauuguauuaga

SEQ ID NO: 1217913 - RNA, 19 nt, Homo sapiens
  misc_RNA (1)...(19): siRNA sense strand
uauuagauguuggaagcaa

SEQ ID NO: 1217914 - RNA, 19 nt, Homo sapiens
  misc_RNA (1)...(19): siRNA sense strand
cagaggauaacuuugugaa

SEQ ID NO: 1217915 - RNA, 19 nt, Homo sapiens
  misc_RNA (1)...(19): siRNA sense strand
ugaugaaguaguuggaauu

SEQ ID NO: 1217916 - RNA, 19 nt, Homo sapiens
  misc_RNA (1)...(19): siRNA sense strand
gaugaugaaguaguuggaa

SEQ ID NO: 1217917 - RNA, 19 nt, Homo sapiens
  misc_RNA (1)...(19): siRNA sense strand
uacagaggauaacuuugug

SEQ ID NO: 1217918 - RNA, 19 nt, Homo sapiens
  misc_RNA (1)...(19): siRNA sense strand
gauggagugcgugccuaua

SEQ ID NO: 1217919 - RNA, 19 nt, Homo sapiens
  misc_RNA (1)...(19): siRNA sense strand
ggauggagugcgugccuau

SEQ ID NO: 1217920 - RNA, 19 nt, Homo sapiens
  misc_RNA (1)...(19): siRNA sense strand
gaaguuguuagaguacaug

SEQ ID NO: 1217921 - RNA, 19 nt, Homo sapiens
  misc_RNA (1)...(19): siRNA sense strand
gaguuccacagaugaagaa

SEQ ID NO: 1217922 - RNA, 19 nt, Homo sapiens
  misc_RNA (1)...(19): siRNA sense strand
gcaagguaucauucuuuca

SEQ ID NO: 1217923 - RNA, 19 nt, Homo sapiens
  misc_RNA (1)...(19): siRNA sense strand
aagauaagcagugccuuga

SEQ ID NO: 1217924 - RNA, 19 nt, Homo sapiens
  misc_RNA (1)...(19): siRNA sense strand
cagcaugcagccuugaaga

SEQ ID NO: 1217925 - RNA, 19 nt, Homo sapiens
  misc_RNA (1)...(19): siRNA sense strand
gcuggaauuguauuagaug

SEQ ID NO: 1217926 - RNA, 19 nt, Homo sapiens
  misc_RNA (1)...(19): siRNA sense strand
ugaaguuguuagaguacau

SEQ ID NO: 1217927 - RNA, 19 nt, Homo sapiens
  misc_RNA (1)...(19): siRNA sense strand
accagaugaugaaguaguu

SEQ ID NO: 1217928 - RNA, 19 nt, Homo sapiens
  misc_RNA (1)...(19): siRNA sense strand
ccacagaugaagaaauaac

SEQ ID NO: 1217929 - RNA, 19 nt, Homo sapiens
  misc_RNA (1)...(19): siRNA sense strand
aggcuuauauuuccaacag

SEQ ID NO: 1217930 - RNA, 19 nt, Homo sapiens
  misc_RNA (1)...(19): siRNA sense strand
cauuaucuuucucaucucu

SEQ ID NO: 1217931 - RNA, 19 nt, Homo sapiens
  misc_RNA (1)...(19): siRNA sense strand
gaagacccuggacuuugug

SEQ ID NO: 1217932 - RNA, 19 nt, Homo sapiens
  misc_RNA (1)...(19): siRNA sense strand
ucugaagacccuggacuuu

SEQ ID NO: 1217933 - RNA, 19 nt, Homo sapiens
  misc_RNA (1)...(19): siRNA sense strand
agcaagguaucauucuuuc

SEQ ID NO: 1217934 - RNA, 19 nt, Homo sapiens
  misc_RNA (1)...(19): siRNA sense strand
ggagccaaagugauuucaa

SEQ ID NO: 1217935 - RNA, 19 nt, Homo sapiens
  misc_RNA (1)...(19): siRNA sense strand
gaggagccaaagugauuuc

SEQ ID NO: 1217936 - RNA, 19 nt, Homo sapiens
  misc_RNA (1)...(19): siRNA sense strand
caucauagaggagccaaag

SEQ ID NO: 1217937 - RNA, 19 nt, Homo sapiens
  misc_RNA (1)...(19): siRNA sense strand
cuauucaguuagcacauca

SEQ ID NO: 1217938 - RNA, 19 nt, Homo sapiens
  misc_RNA (1)...(19): siRNA sense strand
aggauaacuuugugaaacu

SEQ ID NO: 1217939 - RNA, 19 nt, Homo sapiens
  misc_RNA (1)...(19): siRNA sense strand
uuugugaaguuguuagagu

SEQ ID NO: 1217940 - RNA, 19 nt, Homo sapiens
  misc_RNA (1)...(19): siRNA sense strand
agaggauaacuuugugaaa

SEQ ID NO: 1217941 - RNA, 19 nt, Homo sapiens
  misc_RNA (1)...(19): siRNA sense strand
caacagcaugcagccuuga

SEQ ID NO: 1217942 - RNA, 19 nt, Homo sapiens
  misc_RNA (1)...(19): siRNA sense strand
gauaacuuugugaaacuuc

SEQ ID NO: 1217943 - RNA, 19 nt, Homo sapiens
  misc_RNA (1)...(19): siRNA sense strand
uacaugagcauuacuuggu

SEQ ID NO: 1217944 - RNA, 19 nt, Homo sapiens
  misc_RNA (1)...(19): siRNA sense strand
cugaagacccuggacuuug

SEQ ID NO: 1217945 - RNA, 19 nt, Homo sapiens
  misc_RNA (1)...(19): siRNA sense strand
caacagaguuccacagaug

SEQ ID NO: 1217946 - RNA, 19 nt, Homo sapiens
  misc_RNA (1)...(19): siRNA sense strand
gauaagcagugccuugaaa

SEQ ID NO: 1217947 - RNA, 19 nt, Homo sapiens
  misc_RNA (1)...(19): siRNA sense strand
gagcauuacuugguucaua

SEQ ID NO: 1217948 - RNA, 19 nt, Homo sapiens
  misc_RNA (1)...(19): siRNA sense strand
ggagagaaauugcuggaau

SEQ ID NO: 1217949 - RNA, 19 nt, Homo sapiens
  misc_RNA (1)...(19): siRNA sense strand
ggaauuguauuagauguug

SEQ ID NO: 1217950 - RNA, 19 nt, Homo sapiens
  misc_RNA (1)...(19): siRNA sense strand
ucaaccagaugaugaagua

SEQ ID NO: 1217951 - RNA, 19 nt, Homo sapiens
  misc_RNA (1)...(19): siRNA sense strand
gauaauggauggagcaagu

SEQ ID NO: 1217952 - RNA, 19 nt, Homo sapiens
  misc_RNA (1)...(19): siRNA sense strand
gaagcaagguaucauucuu

SEQ ID NO: 1217953 - RNA, 19 nt, Homo sapiens
  misc_RNA (1)...(19): siRNA sense strand
ggaagcagcaggaagcauu

SEQ ID NO: 1217954 - RNA, 19 nt, Homo sapiens
  misc_RNA (1)...(19): siRNA sense strand
gcaagugcauuugguacaa

SEQ ID NO: 1217955 - RNA, 19 nt, Homo sapiens
  misc_RNA (1)...(19): siRNA sense strand
uuccacagaugaagaaaua

SEQ ID NO: 1217956 - RNA, 19 nt, Homo sapiens
  misc_RNA (1)...(19): siRNA sense strand
ccagauaaauacaaagcuu

SEQ ID NO: 1217957 - RNA, 19 nt, Homo sapiens
  misc_RNA (1)...(19): siRNA sense strand
ggauggagcaagugcauuu

SEQ ID NO: 1217958 - RNA, 19 nt, Homo sapiens
  misc_RNA (1)...(19): siRNA sense strand
gaggauaacuuugugaaac

SEQ ID NO: 1217959 - RNA, 19 nt, Homo sapiens
  misc_RNA (1)...(19): siRNA sense strand
gcaugcagccuugaagaua

SEQ ID NO: 1217960 - RNA, 19 nt, Homo sapiens
  misc_RNA (1)...(19): siRNA sense strand
ugaagacccuggacuuugu

SEQ ID NO: 1217961 - RNA, 19 nt, Homo sapiens
  misc_RNA (1)...(19): siRNA sense strand
caugcagccuugaagauaa

SEQ ID NO: 1217962 - RNA, 19 nt, Homo sapiens
  misc_RNA (1)...(19): siRNA sense strand
uggcagaaaugaagaugaa

SEQ ID NO: 1217963 - RNA, 19 nt, Homo sapiens
  misc_RNA (1)...(19): siRNA sense strand
gcagugccuugaaagauuc

SEQ ID NO: 1217964 - RNA, 19 nt, Homo sapiens
  misc_RNA (1)...(19): siRNA sense strand
caagguaucauucuuucaa

SEQ ID NO: 1217965 - RNA, 19 nt, Homo sapiens
  misc_RNA (1)...(19): siRNA sense strand
ucucaucucucuccuggaa

SEQ ID NO: 1217966 - RNA, 19 nt, Homo sapiens
  misc_RNA (1)...(19): siRNA sense strand
auacagcucugcauuaucu

SEQ ID NO: 1217967 - RNA, 19 nt, Homo sapiens
  misc_RNA (1)...(19): siRNA sense strand
cuauacagcucugcauuau

SEQ ID NO: 1217968 - RNA, 19 nt, Homo sapiens
  misc_RNA (1)...(19): siRNA sense strand
uagaggagccaaagugauu

SEQ ID NO: 1217969 - RNA, 19 nt, Homo sapiens
  misc_RNA (1)...(19): siRNA sense strand
ucaguuagcacaucauaga

SEQ ID NO: 1217970 - RNA, 19 nt, Homo sapiens
  misc_RNA (1)...(19): siRNA sense strand
gaugaaguaguuggaauuu

SEQ ID NO: 1217971 - RNA, 19 nt, Homo sapiens
  misc_RNA (1)...(19): siRNA sense strand
ggagcaagugcauuuggua

SEQ ID NO: 1217972 - RNA, 19 nt, Homo sapiens
  misc_RNA (1)...(19): siRNA sense strand
gagccaaagugauuucaac

SEQ ID NO: 1217973 - RNA, 19 nt, Homo sapiens
  misc_RNA (1)...(19): siRNA sense strand
ugagccagauaaauacaaa

SEQ ID NO: 1217974 - RNA, 19 nt, Homo sapiens
  misc_RNA (1)...(19): siRNA sense strand
ccuauacagcucugcauua

SEQ ID NO: 1217975 - RNA, 19 nt, Homo sapiens
  misc_RNA (1)...(19): siRNA sense strand
ggauaacuuugugaaacuu

SEQ ID NO: 1217976 - RNA, 19 nt, Homo sapiens
  misc_RNA (1)...(19): siRNA sense strand
ugaaguaguuggaauuuug

SEQ ID NO: 1217977 - RNA, 19 nt, Homo sapiens
  misc_RNA (1)...(19): siRNA sense strand
uuacagaggauaacuuugu

SEQ ID NO: 1217978 - RNA, 19 nt, Homo sapiens
  misc_RNA (1)...(19): siRNA sense strand
uuagaguacaugagcauua

SEQ ID NO: 1217979 - RNA, 19 nt, Homo sapiens
  misc_RNA (1)...(19): siRNA sense strand
agcauuacuugguucauaa

SEQ ID NO: 1217980 - RNA, 19 nt, Homo sapiens
  misc_RNA (1)...(19): siRNA sense strand
ugcauuaucuuucucaucu

SEQ ID NO: 1217981 - RNA, 19 nt, Homo sapiens
  misc_RNA (1)...(19): siRNA sense strand
guuaaagcuugugcucuga

SEQ ID NO: 1217982 - RNA, 19 nt, Homo sapiens
  misc_RNA (1)...(19): siRNA sense strand
ccaacagaguuccacagau

SEQ ID NO: 1217983 - RNA, 19 nt, Homo sapiens
  misc_RNA (1)...(19): siRNA sense strand
aaagugauuucaacagcau

SEQ ID NO: 1217984 - RNA, 19 nt, Homo sapiens
  misc_RNA (1)...(19): siRNA sense strand
cauagaggagccaaaguga

SEQ ID NO: 1217985 - RNA, 19 nt, Homo sapiens
  misc_RNA (1)...(19): siRNA sense strand
aagcaagguaucauucuuu

SEQ ID NO: 1217986 - RNA, 19 nt, Homo sapiens
  misc_RNA (1)...(19): siRNA sense strand
agcagugccuugaaagauu

SEQ ID NO: 1217987 - RNA, 19 nt, Homo sapiens
  misc_RNA (1)...(19): siRNA sense strand
gcauuugguacaauagcua

SEQ ID NO: 1217988 - RNA, 19 nt, Homo sapiens
  misc_RNA (1)...(19): siRNA sense strand
caagugcauuugguacaau

SEQ ID NO: 1217989 - RNA, 19 nt, Homo sapiens
  misc_RNA (1)...(19): siRNA sense strand
gauguuggaagcaagguau

SEQ ID NO: 1217990 - RNA, 19 nt, Homo sapiens
  misc_RNA (1)...(19): siRNA sense strand
ggaagcaagguaucauucu

SEQ ID NO: 1217991 - RNA, 19 nt, Homo sapiens
  misc_RNA (1)...(19): siRNA sense strand
uugugaaguuguuagagua

SEQ ID NO: 1217992 - RNA, 19 nt, Homo sapiens
  misc_RNA (1)...(19): siRNA sense strand
aagugcauuugguacaaua

SEQ ID NO: 1217993 - RNA, 19 nt, Homo sapiens
  misc_RNA (1)...(19): siRNA sense strand
gcauuacuugguucauaaa

SEQ ID NO: 1217994 - RNA, 19 nt, Homo sapiens
  misc_RNA (1)...(19): siRNA sense strand
acaugagcauuacuugguu

SEQ ID NO: 1217995 - RNA, 19 nt, Homo sapiens
  misc_RNA (1)...(19): siRNA sense strand
gaagcagcaggaagcauuc

SEQ ID NO: 1217996 - RNA, 19 nt, Homo sapiens
  misc_RNA (1)...(19): siRNA sense strand
uagaguacaugagcauuac

SEQ ID NO: 1217997 - RNA, 19 nt, Homo sapiens
  misc_RNA (1)...(19): siRNA sense strand
uaagcagugccuugaaaga

SEQ ID NO: 1217998 - RNA, 19 nt, Homo sapiens
  misc_RNA (1)...(19): siRNA sense strand
ucauagaggagccaaagug

SEQ ID NO: 1217999 - RNA, 19 nt, Homo sapiens
  misc_RNA (1)...(19): siRNA sense strand
gcagaaaugaagaugaaaa

SEQ ID NO: 1218000 - RNA, 19 nt, Homo sapiens
  misc_RNA (1)...(19): siRNA sense strand
uugcuggaauuguauuaga

SEQ ID NO: 1218001 - RNA, 19 nt, Homo sapiens
  misc_RNA (1)...(19): siRNA sense strand
uauuagauguuggaagcaa

SEQ ID NO: 1218002 - RNA, 19 nt, Homo sapiens
  misc_RNA (1)...(19): siRNA sense strand
cagaggauaacuuugugaa

SEQ ID NO: 1218003 - RNA, 19 nt, Homo sapiens
  misc_RNA (1)...(19): siRNA sense strand
ugaugaaguaguuggaauu

SEQ ID NO: 1218004 - RNA, 19 nt, Homo sapiens
  misc_RNA (1)...(19): siRNA sense strand
gaugaugaaguaguuggaa

SEQ ID NO: 1218005 - RNA, 19 nt, Homo sapiens
  misc_RNA (1)...(19): siRNA sense strand
uacagaggauaacuuugug

SEQ ID NO: 1218006 - RNA, 19 nt, Homo sapiens
  misc_RNA (1)...(19): siRNA sense strand
gauggagugcgugccuaua

SEQ ID NO: 1218007 - RNA, 19 nt, Homo sapiens
  misc_RNA (1)...(19): siRNA sense strand
ggauggagugcgugccuau

SEQ ID NO: 1218008 - RNA, 19 nt, Homo sapiens
  misc_RNA (1)...(19): siRNA sense strand
gaaguuguuagaguacaug

SEQ ID NO: 1218009 - RNA, 19 nt, Homo sapiens
  misc_RNA (1)...(19): siRNA sense strand
gaguuccacagaugaagaa

SEQ ID NO: 1218010 - RNA, 19 nt, Homo sapiens
  misc_RNA (1)...(19): siRNA sense strand
gcaagguaucauucuuuca

SEQ ID NO: 1218011 - RNA, 19 nt, Homo sapiens
  misc_RNA (1)...(19): siRNA sense strand
aagauaagcagugccuuga

SEQ ID NO: 1218012 - RNA, 19 nt, Homo sapiens
  misc_RNA (1)...(19): siRNA sense strand
cagcaugcagccuugaaga

SEQ ID NO: 1218013 - RNA, 19 nt, Homo sapiens
  misc_RNA (1)...(19): siRNA sense strand
gcuggaauuguauuagaug

SEQ ID NO: 1218014 - RNA, 19 nt, Homo sapiens
  misc_RNA (1)...(19): siRNA sense strand
ugaaguuguuagaguacau

SEQ ID NO: 1218015 - RNA, 19 nt, Homo sapiens
  misc_RNA (1)...(19): siRNA sense strand
accagaugaugaaguaguu

SEQ ID NO: 1218016 - RNA, 19 nt, Homo sapiens
  misc_RNA (1)...(19): siRNA sense strand
ccacagaugaagaaauaac

SEQ ID NO: 1218017 - RNA, 19 nt, Homo sapiens
  misc_RNA (1)...(19): siRNA sense strand
aggcuuauauuuccaacag

SEQ ID NO: 1218018 - RNA, 19 nt, Homo sapiens
  misc_RNA (1)...(19): siRNA sense strand
cauuaucuuucucaucucu

SEQ ID NO: 1218019 - RNA, 19 nt, Homo sapiens
  misc_RNA (1)...(19): siRNA sense strand
gaagacccuggacuuugug

SEQ ID NO: 1218020 - RNA, 19 nt, Homo sapiens
  misc_RNA (1)...(19): siRNA sense strand
ucugaagacccuggacuuu

SEQ ID NO: 1218021 - RNA, 19 nt, Homo sapiens
  misc_RNA (1)...(19): siRNA sense strand
agcaagguaucauucuuuc

SEQ ID NO: 1218022 - RNA, 19 nt, Homo sapiens
  misc_RNA (1)...(19): siRNA sense strand
ggagccaaagugauuucaa

SEQ ID NO: 1218023 - RNA, 19 nt, Homo sapiens
  misc_RNA (1)...(19): siRNA sense strand
gaggagccaaagugauuuc

SEQ ID NO: 1218024 - RNA, 19 nt, Homo sapiens
  misc_RNA (1)...(19): siRNA sense strand
caucauagaggagccaaag

SEQ ID NO: 1218025 - RNA, 19 nt, Homo sapiens
  misc_RNA (1)...(19): siRNA sense strand
cuauucaguuagcacauca

SEQ ID NO: 1218026 - RNA, 19 nt, Homo sapiens
  misc_RNA (1)...(19): siRNA sense strand
aggauaacuuugugaaacu

SEQ ID NO: 1218027 - RNA, 19 nt, Homo sapiens
  misc_RNA (1)...(19): siRNA sense strand
uuugugaaguuguuagagu

SEQ ID NO: 1218028 - RNA, 19 nt, Homo sapiens
  misc_RNA (1)...(19): siRNA sense strand
agaggauaacuuugugaaa

SEQ ID NO: 1218029 - RNA, 19 nt, Homo sapiens
  misc_RNA (1)...(19): siRNA sense strand
caacagcaugcagccuuga

SEQ ID NO: 1218030 - RNA, 19 nt, Homo sapiens
  misc_RNA (1)...(19): siRNA sense strand
gauaacuuugugaaacuuc

SEQ ID NO: 1218031 - RNA, 19 nt, Homo sapiens
  misc_RNA (1)...(19): siRNA sense strand
uacaugagcauuacuuggu

SEQ ID NO: 1218032 - RNA, 19 nt, Homo sapiens
  misc_RNA (1)...(19): siRNA sense strand
cugaagacccuggacuuug

SEQ ID NO: 1218033 - RNA, 19 nt, Homo sapiens
  misc_RNA (1)...(19): siRNA sense strand
uggagaagaugcaguauua

SEQ ID NO: 1218034 - RNA, 19 nt, Homo sapiens
  misc_RNA (1)...(19): siRNA sense strand
caggaacucugcaguauau

SEQ ID NO: 1218035 - RNA, 19 nt, Homo sapiens
  misc_RNA (1)...(19): siRNA sense strand
ccaaagagcuccggcuaau

SEQ ID NO: 1218036 - RNA, 19 nt, Homo sapiens
  misc_RNA (1)...(19): siRNA sense strand
gcagggacuuggcuacuug

SEQ ID NO: 1218037 - RNA, 19 nt, Homo sapiens
  misc_RNA (1)...(19): siRNA sense strand
gcagaaaccauguggaaga

SEQ ID NO: 1218038 - RNA, 19 nt, Homo sapiens
  misc_RNA (1)...(19): siRNA sense strand
ucacugggcugcacuguca

SEQ ID NO: 1218039 - RNA, 19 nt, Homo sapiens
  misc_RNA (1)...(19): siRNA sense strand
ggacuacucggccaucauu

SEQ ID NO: 1218040 - RNA, 19 nt, Homo sapiens
  misc_RNA (1)...(19): siRNA sense strand
ccgaagcgcugccucaguu

SEQ ID NO: 1218041 - RNA, 19 nt, Homo sapiens
  misc_RNA (1)...(19): siRNA sense strand
ggaguuugauuaugaguac

SEQ ID NO: 1218042 - RNA, 19 nt, Homo sapiens
  misc_RNA (1)...(19): siRNA sense strand
gggcagcacuuugaggauu

SEQ ID NO: 1218043 - RNA, 19 nt, Homo sapiens
  misc_RNA (1)...(19): siRNA sense strand
gcucaagauuucugacuuc

SEQ ID NO: 1218044 - RNA, 19 nt, Homo sapiens
  misc_RNA (1)...(19): siRNA sense strand
ucagugggcugcucaagau

SEQ ID NO: 1218045 - RNA, 19 nt, Homo sapiens
  misc_RNA (1)...(19): siRNA sense strand
ugaacuugcugcucuccua

SEQ ID NO: 1218046 - RNA, 19 nt, Homo sapiens
  misc_RNA (1)...(19): siRNA sense strand
gggcagaaaccauguggaa

SEQ ID NO: 1218047 - RNA, 19 nt, Homo sapiens
  misc_RNA (1)...(19): siRNA sense strand
guuggcagcuacacacuga

SEQ ID NO: 1218048 - RNA, 19 nt, Homo sapiens
  misc_RNA (1)...(19): siRNA sense strand
ucacaggaacucugcagua

SEQ ID NO: 1218049 - RNA, 19 nt, Homo sapiens
  misc_RNA (1)...(19): siRNA sense strand
gggagauguuggaguuuga

SEQ ID NO: 1218050 - RNA, 19 nt, Homo sapiens
  misc_RNA (1)...(19): siRNA sense strand
gcggcuaccuuaagaucuu

SEQ ID NO: 1218051 - RNA, 19 nt, Homo sapiens
  misc_RNA (1)...(19): siRNA sense strand
gcaggccuaucacugguau

SEQ ID NO: 1218052 - RNA, 19 nt, Homo sapiens
  misc_RNA (1)...(19): siRNA sense strand
acugagaccuucacaggaa

SEQ ID NO: 1218053 - RNA, 19 nt, Homo sapiens
  misc_RNA (1)...(19): siRNA sense strand
aaagagcuccggcuaauag

SEQ ID NO: 1218054 - RNA, 19 nt, Homo sapiens
  misc_RNA (1)...(19): siRNA sense strand
cacaggaacucugcaguau

SEQ ID NO: 1218055 - RNA, 19 nt, Homo sapiens
  misc_RNA (1)...(19): siRNA sense strand
gggacaaugugcugaucaa

SEQ ID NO: 1218056 - RNA, 19 nt, Homo sapiens
  misc_RNA (1)...(19): siRNA sense strand
uguuggaguuugauuauga

SEQ ID NO: 1218057 - RNA, 19 nt, Homo sapiens
  misc_RNA (1)...(19): siRNA sense strand
gauguuggaguuugauuau

SEQ ID NO: 1218058 - RNA, 19 nt, Homo sapiens
  misc_RNA (1)...(19): siRNA sense strand
caaagagcuccggcuaaua

SEQ ID NO: 1218059 - RNA, 19 nt, Homo sapiens
  misc_RNA (1)...(19): siRNA sense strand
cccacaggcugccauguuu

SEQ ID NO: 1218060 - RNA, 19 nt, Homo sapiens
  misc_RNA (1)...(19): siRNA sense strand
ggaaagcagcugacaucug

SEQ ID NO: 1218061 - RNA, 19 nt, Homo sapiens
  misc_RNA (1)...(19): siRNA sense strand
gggcugcacugucauugag

SEQ ID NO: 1218062 - RNA, 19 nt, Homo sapiens
  misc_RNA (1)...(19): siRNA sense strand
ucgcaaggcuuuugacgua

SEQ ID NO: 1218063 - RNA, 19 nt, Homo sapiens
  misc_RNA (1)...(19): siRNA sense strand
gcaaaggcugcguggagaa

SEQ ID NO: 1218064 - RNA, 19 nt, Homo sapiens
  misc_RNA (1)...(19): siRNA sense strand
caagguccauccgccaaug

SEQ ID NO: 1218065 - RNA, 19 nt, Homo sapiens
  misc_RNA (1)...(19): siRNA sense strand
caugcuggccgcaguauug

SEQ ID NO: 1218066 - RNA, 19 nt, Homo sapiens
  misc_RNA (1)...(19): siRNA sense strand
gcagcugugcuccucauug

SEQ ID NO: 1218067 - RNA, 19 nt, Homo sapiens
  misc_RNA (1)...(19): siRNA sense strand
gaagcgcugccucaguuau

SEQ ID NO: 1218068 - RNA, 19 nt, Homo sapiens
  misc_RNA (1)...(19): siRNA sense strand
gacaaugugcugaucaaca

SEQ ID NO: 1218069 - RNA, 19 nt, Homo sapiens
  misc_RNA (1)...(19): siRNA sense strand
cccagauccucgccaauga

SEQ ID NO: 1218070 - RNA, 19 nt, Homo sapiens
  misc_RNA (1)...(19): siRNA sense strand
gcguggagaagaugcagua

SEQ ID NO: 1218071 - RNA, 19 nt, Homo sapiens
  misc_RNA (1)...(19): siRNA sense strand
gggaggauguuuuccagaa

SEQ ID NO: 1218072 - RNA, 19 nt, Homo sapiens
  misc_RNA (1)...(19): siRNA sense strand
gauguggccgagcagcaua

SEQ ID NO: 1218073 - RNA, 19 nt, Homo sapiens
  misc_RNA (1)...(19): siRNA sense strand
cuacaguccugccaaccau

SEQ ID NO: 1218074 - RNA, 19 nt, Homo sapiens
  misc_RNA (1)...(19): siRNA sense strand
gcagagcagcuguauaagc

SEQ ID NO: 1218075 - RNA, 19 nt, Homo sapiens
  misc_RNA (1)...(19): siRNA sense strand
acaaggacauguucuucag

SEQ ID NO: 1218076 - RNA, 19 nt, Homo sapiens
  misc_RNA (1)...(19): siRNA sense strand
cagcugugcuccucauugc

SEQ ID NO: 1218077 - RNA, 19 nt, Homo sapiens
  misc_RNA (1)...(19): siRNA sense strand
caacucaaccacccagucu

SEQ ID NO: 1218078 - RNA, 19 nt, Homo sapiens
  misc_RNA (1)...(19): siRNA sense strand
gcccacaggcugccauguu

SEQ ID NO: 1218079 - RNA, 19 nt, Homo sapiens
  misc_RNA (1)...(19): siRNA sense strand
gagagcaccaucaguuucu

SEQ ID NO: 1218080 - RNA, 19 nt, Homo sapiens
  misc_RNA (1)...(19): siRNA sense strand
gcgcugcugcuuccucuau

SEQ ID NO: 1218081 - RNA, 19 nt, Homo sapiens
  misc_RNA (1)...(19): siRNA sense strand
ggcagcacuuugaggauuc

SEQ ID NO: 1218082 - RNA, 19 nt, Homo sapiens
  misc_RNA (1)...(19): siRNA sense strand
gcccagauccucgccaaug

SEQ ID NO: 1218083 - RNA, 19 nt, Homo sapiens
  misc_RNA (1)...(19): siRNA sense strand
cagaaaccauguggaagag

SEQ ID NO: 1218084 - RNA, 19 nt, Homo sapiens
  misc_RNA (1)...(19): siRNA sense strand
ccaaugcccagcucucugu

SEQ ID NO: 1218085 - RNA, 19 nt, Homo sapiens
  misc_RNA (1)...(19): siRNA sense strand
acaggaacucugcaguaua

SEQ ID NO: 1218086 - RNA, 19 nt, Homo sapiens
  misc_RNA (1)...(19): siRNA sense strand
acaaugugcugaucaacac

SEQ ID NO: 1218087 - RNA, 19 nt, Homo sapiens
  misc_RNA (1)...(19): siRNA sense strand
gcaucgccaucaaggagau

SEQ ID NO: 1218088 - RNA, 19 nt, Homo sapiens
  misc_RNA (1)...(19): siRNA sense strand
ggagucagcgccucaaagc

SEQ ID NO: 1218089 - RNA, 19 nt, Homo sapiens
  misc_RNA (1)...(19): siRNA sense strand
cagcucggguuuccaggau

SEQ ID NO: 1218090 - RNA, 19 nt, Homo sapiens
  misc_RNA (1)...(19): siRNA sense strand
ggaacucugcaguauaugg

SEQ ID NO: 1218091 - RNA, 19 nt, Homo sapiens
  misc_RNA (1)...(19): siRNA sense strand
cgagagcaccaucaguuuc

SEQ ID NO: 1218092 - RNA, 19 nt, Homo sapiens
  misc_RNA (1)...(19): siRNA sense strand
cgaagcgcugccucaguua

SEQ ID NO: 1218093 - RNA, 19 nt, Homo sapiens
  misc_RNA (1)...(19): siRNA sense strand
gugggcugcucaagauuuc

SEQ ID NO: 1218094 - RNA, 19 nt, Homo sapiens
  misc_RNA (1)...(19): siRNA sense strand
agauguuggaguuugauua

SEQ ID NO: 1218095 - RNA, 19 nt, Homo sapiens
  misc_RNA (1)...(19): siRNA sense strand
gcaaggcuuuugacguaga

SEQ ID NO: 1218096 - RNA, 19 nt, Homo sapiens
  misc_RNA (1)...(19): siRNA sense strand
gaggauguuuuccagaaga

SEQ ID NO: 1218097 - RNA, 19 nt, Homo sapiens
  misc_RNA (1)...(19): siRNA sense strand
gcaucacaccuugcacuga

SEQ ID NO: 1218098 - RNA, 19 nt, Homo sapiens
  misc_RNA (1)...(19): siRNA sense strand
ccacacccacagacucuug

SEQ ID NO: 1218099 - RNA, 19 nt, Homo sapiens
  misc_RNA (1)...(19): siRNA sense strand
uuacugggauguggguuuc

SEQ ID NO: 1218100 - RNA, 19 nt, Homo sapiens
  misc_RNA (1)...(19): siRNA sense strand
guggagaagaugcaguauu

SEQ ID NO: 1218101 - RNA, 19 nt, Homo sapiens
  misc_RNA (1)...(19): siRNA sense strand
aacgagagcaccaucaguu

SEQ ID NO: 1218102 - RNA, 19 nt, Homo sapiens
  misc_RNA (1)...(19): siRNA sense strand
gcugcacugucauugagau

SEQ ID NO: 1218103 - RNA, 19 nt, Homo sapiens
  misc_RNA (1)...(19): siRNA sense strand
gcaggcaucacaccuugca

SEQ ID NO: 1218104 - RNA, 19 nt, Homo sapiens
  misc_RNA (1)...(19): siRNA sense strand
gagauguuggaguuugauu

SEQ ID NO: 1218105 - RNA, 19 nt, Homo sapiens
  misc_RNA (1)...(19): siRNA sense strand
uggccgagcagcauaaugu

SEQ ID NO: 1218106 - RNA, 19 nt, Homo sapiens
  misc_RNA (1)...(19): siRNA sense strand
agacucuuguggcuauuuc

SEQ ID NO: 1218107 - RNA, 19 nt, Homo sapiens
  misc_RNA (1)...(19): siRNA sense strand
ugggaaagcagcugacauc

SEQ ID NO: 1218108 - RNA, 19 nt, Homo sapiens
  misc_RNA (1)...(19): siRNA sense strand
ccacuucuggcuccacuuc

SEQ ID NO: 1218109 - RNA, 19 nt, Homo sapiens
  misc_RNA (1)...(19): siRNA sense strand
cuacaaggacauguucuuc

SEQ ID NO: 1218110 - RNA, 19 nt, Homo sapiens
  misc_RNA (1)...(19): siRNA sense strand
cggauugcguuggcagcua

SEQ ID NO: 1218111 - RNA, 19 nt, Homo sapiens
  misc_RNA (1)...(19): siRNA sense strand
caacgagagcaccaucagu

SEQ ID NO: 1218112 - RNA, 19 nt, Homo sapiens
  misc_RNA (1)...(19): siRNA sense strand
gcacguaugggguggugua

SEQ ID NO: 1218113 - RNA, 19 nt, Homo sapiens
  misc_RNA (1)...(19): siRNA sense strand
gugcugguccuggagauga

SEQ ID NO: 1218114 - RNA, 19 nt, Homo sapiens
  misc_RNA (1)...(19): siRNA sense strand
uguuucagguggguaugua

SEQ ID NO: 1218115 - RNA, 19 nt, Homo sapiens
  misc_RNA (1)...(19): siRNA sense strand
guauauggccccagaaauc

SEQ ID NO: 1218116 - RNA, 19 nt, Homo sapiens
  misc_RNA (1)...(19): siRNA sense strand
uggagaagaugcaguauua

SEQ ID NO: 1218117 - RNA, 19 nt, Homo sapiens
  misc_RNA (1)...(19): siRNA sense strand
ggacaaaggcagcuucuga

SEQ ID NO: 1218118 - RNA, 19 nt, Homo sapiens
  misc_RNA (1)...(19): siRNA sense strand
caggaacucugcaguauau

SEQ ID NO: 1218119 - RNA, 19 nt, Homo sapiens
  misc_RNA (1)...(19): siRNA sense strand
ccaaagagcuccggcuaau

SEQ ID NO: 1218120 - RNA, 19 nt, Homo sapiens
  misc_RNA (1)...(19): siRNA sense strand
gcagggacuuggcuacuug

SEQ ID NO: 1218121 - RNA, 19 nt, Homo sapiens
  misc_RNA (1)...(19): siRNA sense strand
gcagaaaccauguggaaga

SEQ ID NO: 1218122 - RNA, 19 nt, Homo sapiens
  misc_RNA (1)...(19): siRNA sense strand
ucacugggcugcacuguca

SEQ ID NO: 1218123 - RNA, 19 nt, Homo sapiens
  misc_RNA (1)...(19): siRNA sense strand
ggacuacucggccaucauu

SEQ ID NO: 1218124 - RNA, 19 nt, Homo sapiens
  misc_RNA (1)...(19): siRNA sense strand
ccgaagcgcugccucaguu

SEQ ID NO: 1218125 - RNA, 19 nt, Homo sapiens
  misc_RNA (1)...(19): siRNA sense strand
ggaguuugauuaugaguac

SEQ ID NO: 1218126 - RNA, 19 nt, Homo sapiens
  misc_RNA (1)...(19): siRNA sense strand
gggcagcacuuugaggauu

SEQ ID NO: 1218127 - RNA, 19 nt, Homo sapiens
  misc_RNA (1)...(19): siRNA sense strand
gcucaagauuucugacuuc

SEQ ID NO: 1218128 - RNA, 19 nt, Homo sapiens
  misc_RNA (1)...(19): siRNA sense strand
ucagugggcugcucaagau

SEQ ID NO: 1218129 - RNA, 19 nt, Homo sapiens
  misc_RNA (1)...(19): siRNA sense strand
ugaacuugcugcucuccua

SEQ ID NO: 1218130 - RNA, 19 nt, Homo sapiens
  misc_RNA (1)...(19): siRNA sense strand
gggcagaaaccauguggaa

SEQ ID NO: 1218131 - RNA, 19 nt, Homo sapiens
  misc_RNA (1)...(19): siRNA sense strand
guuggcagcuacacacuga

SEQ ID NO: 1218132 - RNA, 19 nt, Homo sapiens
  misc_RNA (1)...(19): siRNA sense strand
ucacaggaacucugcagua

SEQ ID NO: 1218133 - RNA, 19 nt, Homo sapiens
  misc_RNA (1)...(19): siRNA sense strand
gggagauguuggaguuuga

SEQ ID NO: 1218134 - RNA, 19 nt, Homo sapiens
  misc_RNA (1)...(19): siRNA sense strand
gcggcuaccuuaagaucuu

SEQ ID NO: 1218135 - RNA, 19 nt, Homo sapiens
  misc_RNA (1)...(19): siRNA sense strand
gcaggccuaucacugguau

SEQ ID NO: 1218136 - RNA, 19 nt, Homo sapiens
  misc_RNA (1)...(19): siRNA sense strand
acugagaccuucacaggaa

SEQ ID NO: 1218137 - RNA, 19 nt, Homo sapiens
  misc_RNA (1)...(19): siRNA sense strand
aaagagcuccggcuaauag

SEQ ID NO: 1218138 - RNA, 19 nt, Homo sapiens
  misc_RNA (1)...(19): siRNA sense strand
cacaggaacucugcaguau

SEQ ID NO: 1218139 - RNA, 19 nt, Homo sapiens
  misc_RNA (1)...(19): siRNA sense strand
gggacaaugugcugaucaa

SEQ ID NO: 1218140 - RNA, 19 nt, Homo sapiens
  misc_RNA (1)...(19): siRNA sense strand
uguuggaguuugauuauga

SEQ ID NO: 1218141 - RNA, 19 nt, Homo sapiens
  misc_RNA (1)...(19): siRNA sense strand
gauguuggaguuugauuau

SEQ ID NO: 1218142 - RNA, 19 nt, Homo sapiens
  misc_RNA (1)...(19): siRNA sense strand
caaagagcuccggcuaaua

SEQ ID NO: 1218143 - RNA, 19 nt, Homo sapiens
  misc_RNA (1)...(19): siRNA sense strand
cccacaggcugccauguuu

SEQ ID NO: 1218144 - RNA, 19 nt, Homo sapiens
  misc_RNA (1)...(19): siRNA sense strand
ggaaagcagcugacaucug

SEQ ID NO: 1218145 - RNA, 19 nt, Homo sapiens
  misc_RNA (1)...(19): siRNA sense strand
gggcugcacugucauugag

SEQ ID NO: 1218146 - RNA, 19 nt, Homo sapiens
  misc_RNA (1)...(19): siRNA sense strand
ucgcaaggcuuuugacgua

SEQ ID NO: 1218147 - RNA, 19 nt, Homo sapiens
  misc_RNA (1)...(19): siRNA sense strand
gcaaaggcugcguggagaa

SEQ ID NO: 1218148 - RNA, 19 nt, Homo sapiens
  misc_RNA (1)...(19): siRNA sense strand
caagguccauccgccaaug

SEQ ID NO: 1218149 - RNA, 19 nt, Homo sapiens
  misc_RNA (1)...(19): siRNA sense strand
caugcuggccgcaguauug

SEQ ID NO: 1218150 - RNA, 19 nt, Homo sapiens
  misc_RNA (1)...(19): siRNA sense strand
gcagcugugcuccucauug

SEQ ID NO: 1218151 - RNA, 19 nt, Homo sapiens
  misc_RNA (1)...(19): siRNA sense strand
gaagcgcugccucaguuau

SEQ ID NO: 1218152 - RNA, 19 nt, Homo sapiens
  misc_RNA (1)...(19): siRNA sense strand
gacaaugugcugaucaaca

SEQ ID NO: 1218153 - RNA, 19 nt, Homo sapiens
  misc_RNA (1)...(19): siRNA sense strand
cccagauccucgccaauga

SEQ ID NO: 1218154 - RNA, 19 nt, Homo sapiens
  misc_RNA (1)...(19): siRNA sense strand
gcguggagaagaugcagua

SEQ ID NO: 1218155 - RNA, 19 nt, Homo sapiens
  misc_RNA (1)...(19): siRNA sense strand
gggaggauguuuuccagaa

SEQ ID NO: 1218156 - RNA, 19 nt, Homo sapiens
  misc_RNA (1)...(19): siRNA sense strand
gauguggccgagcagcaua

SEQ ID NO: 1218157 - RNA, 19 nt, Homo sapiens
  misc_RNA (1)...(19): siRNA sense strand
cuacaguccugccaaccau

SEQ ID NO: 1218158 - RNA, 19 nt, Homo sapiens
  misc_RNA (1)...(19): siRNA sense strand
gcagagcagcuguauaagc

SEQ ID NO: 1218159 - RNA, 19 nt, Homo sapiens
  misc_RNA (1)...(19): siRNA sense strand
acaaggacauguucuucag

SEQ ID NO: 1218160 - RNA, 19 nt, Homo sapiens
  misc_RNA (1)...(19): siRNA sense strand
cagcugugcuccucauugc

SEQ ID NO: 1218161 - RNA, 19 nt, Homo sapiens
  misc_RNA (1)...(19): siRNA sense strand
caacucaaccacccagucu

SEQ ID NO: 1218162 - RNA, 19 nt, Homo sapiens
  misc_RNA (1)...(19): siRNA sense strand
gcccacaggcugccauguu

SEQ ID NO: 1218163 - RNA, 19 nt, Homo sapiens
  misc_RNA (1)...(19): siRNA sense strand
gagagcaccaucaguuucu

SEQ ID NO: 1218164 - RNA, 19 nt, Homo sapiens
  misc_RNA (1)...(19): siRNA sense strand
gcgcugcugcuuccucuau

SEQ ID NO: 1218165 - RNA, 19 nt, Homo sapiens
  misc_RNA (1)...(19): siRNA sense strand
ggcagcacuuugaggauuc

SEQ ID NO: 1218166 - RNA, 19 nt, Homo sapiens
  misc_RNA (1)...(19): siRNA sense strand
gcccagauccucgccaaug

SEQ ID NO: 1218167 - RNA, 19 nt, Homo sapiens
  misc_RNA (1)...(19): siRNA sense strand
cagaaaccauguggaagag

SEQ ID NO: 1218168 - RNA, 19 nt, Homo sapiens
  misc_RNA (1)...(19): siRNA sense strand
ccaaugcccagcucucugu

SEQ ID NO: 1218169 - RNA, 19 nt, Homo sapiens
  misc_RNA (1)...(19): siRNA sense strand
acaggaacucugcaguaua

SEQ ID NO: 1218170 - RNA, 19 nt, Homo sapiens
  misc_RNA (1)...(19): siRNA sense strand
acaaugugcugaucaacac

SEQ ID NO: 1218171 - RNA, 19 nt, Homo sapiens
  misc_RNA (1)...(19): siRNA sense strand
gcaucgccaucaaggagau

SEQ ID NO: 1218172 - RNA, 19 nt, Homo sapiens
  misc_RNA (1)...(19): siRNA sense strand
ggagucagcgccucaaagc

SEQ ID NO: 1218173 - RNA, 19 nt, Homo sapiens
  misc_RNA (1)...(19): siRNA sense strand
cagcucggguuuccaggau

SEQ ID NO: 1218174 - RNA, 19 nt, Homo sapiens
  misc_RNA (1)...(19): siRNA sense strand
ggaacucugcaguauaugg

SEQ ID NO: 1218175 - RNA, 19 nt, Homo sapiens
  misc_RNA (1)...(19): siRNA sense strand
cgagagcaccaucaguuuc

SEQ ID NO: 1218176 - RNA, 19 nt, Homo sapiens
  misc_RNA (1)...(19): siRNA sense strand
cgaagcgcugccucaguua

SEQ ID NO: 1218177 - RNA, 19 nt, Homo sapiens
  misc_RNA (1)...(19): siRNA sense strand
gugggcugcucaagauuuc

SEQ ID NO: 1218178 - RNA, 19 nt, Homo sapiens
  misc_RNA (1)...(19): siRNA sense strand
agauguuggaguuugauua

SEQ ID NO: 1218179 - RNA, 19 nt, Homo sapiens
  misc_RNA (1)...(19): siRNA sense strand
gcaaggcuuuugacguaga

SEQ ID NO: 1218180 - RNA, 19 nt, Homo sapiens
  misc_RNA (1)...(19): siRNA sense strand
gaugaauggagaggacaaa

SEQ ID NO: 1218181 - RNA, 19 nt, Homo sapiens
  misc_RNA (1)...(19): siRNA sense strand
gcaucacaccuugcacuga

SEQ ID NO: 1218182 - RNA, 19 nt, Homo sapiens
  misc_RNA (1)...(19): siRNA sense strand
uuacugggauguggguuuc

SEQ ID NO: 1218183 - RNA, 19 nt, Homo sapiens
  misc_RNA (1)...(19): siRNA sense strand
gaggauguuuuccagaaga

SEQ ID NO: 1218184 - RNA, 19 nt, Homo sapiens
  misc_RNA (1)...(19): siRNA sense strand
guggagaagaugcaguauu

SEQ ID NO: 1218185 - RNA, 19 nt, Homo sapiens
  misc_RNA (1)...(19): siRNA sense strand
ccacacccacagacucuug

SEQ ID NO: 1218186 - RNA, 19 nt, Homo sapiens
  misc_RNA (1)...(19): siRNA sense strand
aacgagagcaccaucaguu

SEQ ID NO: 1218187 - RNA, 19 nt, Homo sapiens
  misc_RNA (1)...(19): siRNA sense strand
gcugcacugucauugagau

SEQ ID NO: 1218188 - RNA, 19 nt, Homo sapiens
  misc_RNA (1)...(19): siRNA sense strand
gcaggcaucacaccuugca

SEQ ID NO: 1218189 - RNA, 19 nt, Homo sapiens
  misc_RNA (1)...(19): siRNA sense strand
gagauguuggaguuugauu

SEQ ID NO: 1218190 - RNA, 19 nt, Homo sapiens
  misc_RNA (1)...(19): siRNA sense strand
uggccgagcagcauaaugu

SEQ ID NO: 1218191 - RNA, 19 nt, Homo sapiens
  misc_RNA (1)...(19): siRNA sense strand
ugggaaagcagcugacauc

SEQ ID NO: 1218192 - RNA, 19 nt, Homo sapiens
  misc_RNA (1)...(19): siRNA sense strand
ccacuucuggcuccacuuc

SEQ ID NO: 1218193 - RNA, 19 nt, Homo sapiens
  misc_RNA (1)...(19): siRNA sense strand
agacucuuguggcuauuuc

SEQ ID NO: 1218194 - RNA, 19 nt, Homo sapiens
  misc_RNA (1)...(19): siRNA sense strand
cuacaaggacauguucuuc

SEQ ID NO: 1218195 - RNA, 19 nt, Homo sapiens
  misc_RNA (1)...(19): siRNA sense strand
cggauugcguuggcagcua

SEQ ID NO: 1218196 - RNA, 19 nt, Homo sapiens
  misc_RNA (1)...(19): siRNA sense strand
caacgagagcaccaucagu

SEQ ID NO: 1218197 - RNA, 19 nt, Homo sapiens
  misc_RNA (1)...(19): siRNA sense strand
gcacguaugggguggugua

SEQ ID NO: 1218198 - RNA, 19 nt, Homo sapiens
  misc_RNA (1)...(19): siRNA sense strand
gugcugguccuggagauga

SEQ ID NO: 1218199 - RNA, 19 nt, Homo sapiens
  misc_RNA (1)...(19): siRNA sense strand
uguuucagguggguaugua

SEQ ID NO: 1218200 - RNA, 19 nt, Homo sapiens
  misc_RNA (1)...(19): siRNA sense strand
guauauggccccagaaauc

SEQ ID NO: 1218201 - RNA, 19 nt, Homo sapiens
  misc_RNA (1)...(19): siRNA sense strand
ggaugaauggagaggacaa

SEQ ID NO: 1218202 - RNA, 19 nt, Homo sapiens
  misc_RNA (1)...(19): siRNA sense strand
gaagaucugugucauauug

SEQ ID NO: 1218203 - RNA, 19 nt, Homo sapiens
  misc_RNA (1)...(19): siRNA sense strand
gaaugaaauugccauguuu

SEQ ID NO: 1218204 - RNA, 19 nt, Homo sapiens
  misc_RNA (1)...(19): siRNA sense strand
agaagaagcugaaauacaa

SEQ ID NO: 1218205 - RNA, 19 nt, Homo sapiens
  misc_RNA (1)...(19): siRNA sense strand
gaaaguagacucuccauca

SEQ ID NO: 1218206 - RNA, 19 nt, Homo sapiens
  misc_RNA (1)...(19): siRNA sense strand
ucaagaaccugcaugauga

SEQ ID NO: 1218207 - RNA, 19 nt, Homo sapiens
  misc_RNA (1)...(19): siRNA sense strand
gcaaauccauggaaauugu

SEQ ID NO: 1218208 - RNA, 19 nt, Homo sapiens
  misc_RNA (1)...(19): siRNA sense strand
ggacaagggcuuccaguuu

SEQ ID NO: 1218209 - RNA, 19 nt, Homo sapiens
  misc_RNA (1)...(19): siRNA sense strand
gagcacaucuaccaucuga

SEQ ID NO: 1218210 - RNA, 19 nt, Homo sapiens
  misc_RNA (1)...(19): siRNA sense strand
ggaacaaagugaccucuug

SEQ ID NO: 1218211 - RNA, 19 nt, Homo sapiens
  misc_RNA (1)...(19): siRNA sense strand
gaauguaucgucagaauga

SEQ ID NO: 1218212 - RNA, 19 nt, Homo sapiens
  misc_RNA (1)...(19): siRNA sense strand
ggacaaaggaaucuugaaa

SEQ ID NO: 1218213 - RNA, 19 nt, Homo sapiens
  misc_RNA (1)...(19): siRNA sense strand
gugauaaucuuuccuuaga

SEQ ID NO: 1218214 - RNA, 19 nt, Homo sapiens
  misc_RNA (1)...(19): siRNA sense strand
gaaguucuguuaucuccaa

SEQ ID NO: 1218215 - RNA, 19 nt, Homo sapiens
  misc_RNA (1)...(19): siRNA sense strand
gaagggaacuuagaagaag

SEQ ID NO: 1218216 - RNA, 19 nt, Homo sapiens
  misc_RNA (1)...(19): siRNA sense strand
gaacuuagaagaagcugaa

SEQ ID NO: 1218217 - RNA, 19 nt, Homo sapiens
  misc_RNA (1)...(19): siRNA sense strand
gaacaacugcagagagaaa

SEQ ID NO: 1218218 - RNA, 19 nt, Homo sapiens
  misc_RNA (1)...(19): siRNA sense strand
gaagcgaagucccggagaa

SEQ ID NO: 1218219 - RNA, 19 nt, Homo sapiens
  misc_RNA (1)...(19): siRNA sense strand
gcgcuggaauuaaaugaaa

SEQ ID NO: 1218220 - RNA, 19 nt, Homo sapiens
  misc_RNA (1)...(19): siRNA sense strand
gagagauugucaucaagaa

SEQ ID NO: 1218221 - RNA, 19 nt, Homo sapiens
  misc_RNA (1)...(19): siRNA sense strand
ggaagggaacuuagaagaa

SEQ ID NO: 1218222 - RNA, 19 nt, Homo sapiens
  misc_RNA (1)...(19): siRNA sense strand
agaaugaaauugccauguu

SEQ ID NO: 1218223 - RNA, 19 nt, Homo sapiens
  misc_RNA (1)...(19): siRNA sense strand
ucuccaagcucuucagaaa

SEQ ID NO: 1218224 - RNA, 19 nt, Homo sapiens
  misc_RNA (1)...(19): siRNA sense strand
gccaagagccaaaccgaua

SEQ ID NO: 1218225 - RNA, 19 nt, Homo sapiens
  misc_RNA (1)...(19): siRNA sense strand
gcuggaagcaagccauuua

SEQ ID NO: 1218226 - RNA, 19 nt, Homo sapiens
  misc_RNA (1)...(19): siRNA sense strand
aagaagaucugugucauau

SEQ ID NO: 1218227 - RNA, 19 nt, Homo sapiens
  misc_RNA (1)...(19): siRNA sense strand
caagaagaucugugucaua

SEQ ID NO: 1218228 - RNA, 19 nt, Homo sapiens
  misc_RNA (1)...(19): siRNA sense strand
gcaauacuauagcuucaca

SEQ ID NO: 1218229 - RNA, 19 nt, Homo sapiens
  misc_RNA (1)...(19): siRNA sense strand
ccaaaccgauauagagaga

SEQ ID NO: 1218230 - RNA, 19 nt, Homo sapiens
  misc_RNA (1)...(19): siRNA sense strand
caacggcaccuauuuggaa

SEQ ID NO: 1218231 - RNA, 19 nt, Homo sapiens
  misc_RNA (1)...(19): siRNA sense strand
ggaaauggcaugaaagcau

SEQ ID NO: 1218232 - RNA, 19 nt, Homo sapiens
  misc_RNA (1)...(19): siRNA sense strand
gcgaggagcuggaguacag

SEQ ID NO: 1218233 - RNA, 19 nt, Homo sapiens
  misc_RNA (1)...(19): siRNA sense strand
cagaauguaucgucagaau

SEQ ID NO: 1218234 - RNA, 19 nt, Homo sapiens
  misc_RNA (1)...(19): siRNA sense strand
gagcaauacuauagcuuca

SEQ ID NO: 1218235 - RNA, 19 nt, Homo sapiens
  misc_RNA (1)...(19): siRNA sense strand
aaaccgagcucuaguucau

SEQ ID NO: 1218236 - RNA, 19 nt, Homo sapiens
  misc_RNA (1)...(19): siRNA sense strand
gcaagaagaucugugucau

SEQ ID NO: 1218237 - RNA, 19 nt, Homo sapiens
  misc_RNA (1)...(19): siRNA sense strand
gcaccuauuuggaacuuag

SEQ ID NO: 1218238 - RNA, 19 nt, Homo sapiens
  misc_RNA (1)...(19): siRNA sense strand
gcagaggauugaacaacug

SEQ ID NO: 1218239 - RNA, 19 nt, Homo sapiens
  misc_RNA (1)...(19): siRNA sense strand
gcaaaauacuggagcacua

SEQ ID NO: 1218240 - RNA, 19 nt, Homo sapiens
  misc_RNA (1)...(19): siRNA sense strand
gacaagggcuuccaguuuu

SEQ ID NO: 1218241 - RNA, 19 nt, Homo sapiens
  misc_RNA (1)...(19): siRNA sense strand
ggaacaacaucgggaagga

SEQ ID NO: 1218242 - RNA, 19 nt, Homo sapiens
  misc_RNA (1)...(19): siRNA sense strand
gaaggucaagucagaagaa

SEQ ID NO: 1218243 - RNA, 19 nt, Homo sapiens
  misc_RNA (1)...(19): siRNA sense strand
gagaagaaccuuggugugu

SEQ ID NO: 1218244 - RNA, 19 nt, Homo sapiens
  misc_RNA (1)...(19): siRNA sense strand
gggcaaauccauggaaauu

SEQ ID NO: 1218245 - RNA, 19 nt, Homo sapiens
  misc_RNA (1)...(19): siRNA sense strand
ggaagcaagccauuuaauc

SEQ ID NO: 1218246 - RNA, 19 nt, Homo sapiens
  misc_RNA (1)...(19): siRNA sense strand
gcacuaaugcccaugagau

SEQ ID NO: 1218247 - RNA, 19 nt, Homo sapiens
  misc_RNA (1)...(19): siRNA sense strand
gagcaacggcaccuauuug

SEQ ID NO: 1218248 - RNA, 19 nt, Homo sapiens
  misc_RNA (1)...(19): siRNA sense strand
acaaguagcugcucuucca

SEQ ID NO: 1218249 - RNA, 19 nt, Homo sapiens
  misc_RNA (1)...(19): siRNA sense strand
uugcauccauaacaucuua

SEQ ID NO: 1218250 - RNA, 19 nt, Homo sapiens
  misc_RNA (1)...(19): siRNA sense strand
ucagugaugucuguaaaga

SEQ ID NO: 1218251 - RNA, 19 nt, Homo sapiens
  misc_RNA (1)...(19): siRNA sense strand
cuuagaagaagcugaaaua

SEQ ID NO: 1218252 - RNA, 19 nt, Homo sapiens
  misc_RNA (1)...(19): siRNA sense strand
ucagugacauaagugauaa

SEQ ID NO: 1218253 - RNA, 19 nt, Homo sapiens
  misc_RNA (1)...(19): siRNA sense strand
cauauugcccauaaaguuu

SEQ ID NO: 1218254 - RNA, 19 nt, Homo sapiens
  misc_RNA (1)...(19): siRNA sense strand
aagaggaaguggcccuuaa

SEQ ID NO: 1218255 - RNA, 19 nt, Homo sapiens
  misc_RNA (1)...(19): siRNA sense strand
gcacaucuaccaucugaag

SEQ ID NO: 1218256 - RNA, 19 nt, Homo sapiens
  misc_RNA (1)...(19): siRNA sense strand
uuaaaaggcuggcauaaga

SEQ ID NO: 1218257 - RNA, 19 nt, Homo sapiens
  misc_RNA (1)...(19): siRNA sense strand
gaagaagcugaaauacaaa

SEQ ID NO: 1218258 - RNA, 19 nt, Homo sapiens
  misc_RNA (1)...(19): siRNA sense strand
gauugaaggcacaguguuu

SEQ ID NO: 1218259 - RNA, 19 nt, Homo sapiens
  misc_RNA (1)...(19): siRNA sense strand
ggagagauugucaucaaga

SEQ ID NO: 1218260 - RNA, 19 nt, Homo sapiens
  misc_RNA (1)...(19): siRNA sense strand
aaaccgauauagagagaga

SEQ ID NO: 1218261 - RNA, 19 nt, Homo sapiens
  misc_RNA (1)...(19): siRNA sense strand
ccagagguuucuagaggaa

SEQ ID NO: 1218262 - RNA, 19 nt, Homo sapiens
  misc_RNA (1)...(19): siRNA sense strand
agagguggauugagcacua

SEQ ID NO: 1218263 - RNA, 19 nt, Homo sapiens
  misc_RNA (1)...(19): siRNA sense strand
ggcaagaugugagauggaa

SEQ ID NO: 1218264 - RNA, 19 nt, Homo sapiens
  misc_RNA (1)...(19): siRNA sense strand
ugagacacgaguuccauua

SEQ ID NO: 1218265 - RNA, 19 nt, Homo sapiens
  misc_RNA (1)...(19): siRNA sense strand
agacuacacuccuccaauc

SEQ ID NO: 1218266 - RNA, 19 nt, Homo sapiens
  misc_RNA (1)...(19): siRNA sense strand
gaaauccgacgaugacucu

SEQ ID NO: 1218267 - RNA, 19 nt, Homo sapiens
  misc_RNA (1)...(19): siRNA sense strand
aaaacgagauuucugauga

SEQ ID NO: 1218268 - RNA, 19 nt, Homo sapiens
  misc_RNA (1)...(19): siRNA sense strand
cuacacuccuccaauccua

SEQ ID NO: 1218269 - RNA, 19 nt, Homo sapiens
  misc_RNA (1)...(19): siRNA sense strand
caugcugagucuagaaauu

SEQ ID NO: 1218270 - RNA, 19 nt, Homo sapiens
  misc_RNA (1)...(19): siRNA sense strand
gaagcaagccauuuaaucc

SEQ ID NO: 1218271 - RNA, 19 nt, Homo sapiens
  misc_RNA (1)...(19): siRNA sense strand
caagagccaaaccgauaua

SEQ ID NO: 1218272 - RNA, 19 nt, Homo sapiens
  misc_RNA (1)...(19): siRNA sense strand
gacaaaggaaucuugaaau

SEQ ID NO: 1218273 - RNA, 19 nt, Homo sapiens
  misc_RNA (1)...(19): siRNA sense strand
uacuauagcuucacacagu

SEQ ID NO: 1218274 - RNA, 19 nt, Homo sapiens
  misc_RNA (1)...(19): siRNA sense strand
guaggaagcguagcaguau

SEQ ID NO: 1218275 - RNA, 19 nt, Homo sapiens
  misc_RNA (1)...(19): siRNA sense strand
cgaaaggcuacgagcaaua

SEQ ID NO: 1218276 - RNA, 19 nt, Homo sapiens
  misc_RNA (1)...(19): siRNA sense strand
caaauccuaugccgaaagg

SEQ ID NO: 1218277 - RNA, 19 nt, Homo sapiens
  misc_RNA (1)...(19): siRNA sense strand
caaacuggaagcaauguau

SEQ ID NO: 1218278 - RNA, 19 nt, Homo sapiens
  misc_RNA (1)...(19): siRNA sense strand
gaguggguaucgaaacuuc

SEQ ID NO: 1218279 - RNA, 19 nt, Homo sapiens
  misc_RNA (1)...(19): siRNA sense strand
uugaacaacugcagagaga

SEQ ID NO: 1218280 - RNA, 19 nt, Homo sapiens
  misc_RNA (1)...(19): siRNA sense strand
gaaccugcaugaugauucc

SEQ ID NO: 1218281 - RNA, 19 nt, Homo sapiens
  misc_RNA (1)...(19): siRNA sense strand
acagcgagcuccuggacaa

SEQ ID NO: 1218282 - RNA, 19 nt, Homo sapiens
  misc_RNA (1)...(19): siRNA sense strand
guucaucagcuuucuaaug

SEQ ID NO: 1218283 - RNA, 19 nt, Homo sapiens
  misc_RNA (1)...(19): siRNA sense strand
ggagagagagaaacugaag

SEQ ID NO: 1218284 - RNA, 19 nt, Homo sapiens
  misc_RNA (1)...(19): siRNA sense strand
ucauauugcccauaaaguu

SEQ ID NO: 1218285 - RNA, 19 nt, Homo sapiens
  misc_RNA (1)...(19): siRNA sense strand
ugugucauauugcccauaa

SEQ ID NO: 1218286 - RNA, 19 nt, Homo sapiens
  misc_RNA (1)...(19): siRNA sense strand
gagccaaaccgauauagag

SEQ ID NO: 1218287 - RNA, 19 nt, Homo sapiens
  misc_RNA (1)...(19): siRNA sense strand
agacacgaguuccauuaug

SEQ ID NO: 1218288 - RNA, 19 nt, Homo sapiens
  misc_RNA (1)...(19): siRNA sense strand
aaacuucgccaccacagaa

SEQ ID NO: 1218289 - RNA, 19 nt, Homo sapiens
  misc_RNA (1)...(19): siRNA sense strand
ucucagugaugucuguaaa

SEQ ID NO: 1218290 - RNA, 19 nt, Homo sapiens
  misc_RNA (1)...(19): siRNA sense strand
gaaaggcuacgagcaauac

SEQ ID NO: 1218291 - RNA, 19 nt, Homo sapiens
  misc_RNA (1)...(19): siRNA sense strand
gcgaagucccggagaagaa

SEQ ID NO: 1218292 - RNA, 19 nt, Homo sapiens
  misc_RNA (1)...(19): siRNA sense strand
uaggaagcguagcaguaua

SEQ ID NO: 1218293 - RNA, 19 nt, Homo sapiens
  misc_RNA (1)...(19): siRNA sense strand
guauggagagcaaauccua

SEQ ID NO: 1218294 - RNA, 19 nt, Homo sapiens
  misc_RNA (1)...(19): siRNA sense strand
acuggaccauccugucuua

SEQ ID NO: 1218295 - RNA, 19 nt, Homo sapiens
  misc_RNA (1)...(19): siRNA sense strand
gcuacgagcaauacuauag

SEQ ID NO: 1218296 - RNA, 19 nt, Homo sapiens
  misc_RNA (1)...(19): siRNA sense strand
cacagaauguaucgucaga

SEQ ID NO: 1218297 - RNA, 19 nt, Homo sapiens
  misc_RNA (1)...(19): siRNA sense strand
ggagccaccaguucagaaa

SEQ ID NO: 1218298 - RNA, 19 nt, Homo sapiens
  misc_RNA (1)...(19): siRNA sense strand
ugagcacuauggagagauu

SEQ ID NO: 1218299 - RNA, 19 nt, Homo sapiens
  misc_RNA (1)...(19): siRNA sense strand
aaacgagauuucugaugau

SEQ ID NO: 1218300 - RNA, 19 nt, Homo sapiens
  misc_RNA (1)...(19): siRNA sense strand
gcggagagagagaaacuga

SEQ ID NO: 1218301 - RNA, 19 nt, Homo sapiens
  misc_RNA (1)...(19): siRNA sense strand
aguuugcgcuggaauuaaa

SEQ ID NO: 1218302 - RNA, 19 nt, Homo sapiens
  misc_RNA (1)...(19): siRNA sense strand
gaagaucugugucauauug

SEQ ID NO: 1218303 - RNA, 19 nt, Homo sapiens
  misc_RNA (1)...(19): siRNA sense strand
gaaugaaauugccauguuu

SEQ ID NO: 1218304 - RNA, 19 nt, Homo sapiens
  misc_RNA (1)...(19): siRNA sense strand
agaagaagcugaaauacaa

SEQ ID NO: 1218305 - RNA, 19 nt, Homo sapiens
  misc_RNA (1)...(19): siRNA sense strand
gaaaguagacucuccauca

SEQ ID NO: 1218306 - RNA, 19 nt, Homo sapiens
  misc_RNA (1)...(19): siRNA sense strand
ucaagaaccugcaugauga

SEQ ID NO: 1218307 - RNA, 19 nt, Homo sapiens
  misc_RNA (1)...(19): siRNA sense strand
gcaaauccauggaaauugu

SEQ ID NO: 1218308 - RNA, 19 nt, Homo sapiens
  misc_RNA (1)...(19): siRNA sense strand
ggacaagggcuuccaguuu

SEQ ID NO: 1218309 - RNA, 19 nt, Homo sapiens
  misc_RNA (1)...(19): siRNA sense strand
gagcacaucuaccaucuga

SEQ ID NO: 1218310 - RNA, 19 nt, Homo sapiens
  misc_RNA (1)...(19): siRNA sense strand
ggaacaaagugaccucuug

SEQ ID NO: 1218311 - RNA, 19 nt, Homo sapiens
  misc_RNA (1)...(19): siRNA sense strand
gaauguaucgucagaauga

SEQ ID NO: 1218312 - RNA, 19 nt, Homo sapiens
  misc_RNA (1)...(19): siRNA sense strand
ggacaaaggaaucuugaaa

SEQ ID NO: 1218313 - RNA, 19 nt, Homo sapiens
  misc_RNA (1)...(19): siRNA sense strand
gugauaaucuuuccuuaga

SEQ ID NO: 1218314 - RNA, 19 nt, Homo sapiens
  misc_RNA (1)...(19): siRNA sense strand
gaaguucuguuaucuccaa

SEQ ID NO: 1218315 - RNA, 19 nt, Homo sapiens
  misc_RNA (1)...(19): siRNA sense strand
gaagggaacuuagaagaag

SEQ ID NO: 1218316 - RNA, 19 nt, Homo sapiens
  misc_RNA (1)...(19): siRNA sense strand
gaacuuagaagaagcugaa

SEQ ID NO: 1218317 - RNA, 19 nt, Homo sapiens
  misc_RNA (1)...(19): siRNA sense strand
gaacaacugcagagagaaa

SEQ ID NO: 1218318 - RNA, 19 nt, Homo sapiens
  misc_RNA (1)...(19): siRNA sense strand
gaagcgaagucccggagaa

SEQ ID NO: 1218319 - RNA, 19 nt, Homo sapiens
  misc_RNA (1)...(19): siRNA sense strand
gcgcuggaauuaaaugaaa

SEQ ID NO: 1218320 - RNA, 19 nt, Homo sapiens
  misc_RNA (1)...(19): siRNA sense strand
gagagauugucaucaagaa

SEQ ID NO: 1218321 - RNA, 19 nt, Homo sapiens
  misc_RNA (1)...(19): siRNA sense strand
ggaagggaacuuagaagaa

SEQ ID NO: 1218322 - RNA, 19 nt, Homo sapiens
  misc_RNA (1)...(19): siRNA sense strand
agaaugaaauugccauguu

SEQ ID NO: 1218323 - RNA, 19 nt, Homo sapiens
  misc_RNA (1)...(19): siRNA sense strand
ucuccaagcucuucagaaa

SEQ ID NO: 1218324 - RNA, 19 nt, Homo sapiens
  misc_RNA (1)...(19): siRNA sense strand
gccaagagccaaaccgaua

SEQ ID NO: 1218325 - RNA, 19 nt, Homo sapiens
  misc_RNA (1)...(19): siRNA sense strand
gcuggaagcaagccauuua

SEQ ID NO: 1218326 - RNA, 19 nt, Homo sapiens
  misc_RNA (1)...(19): siRNA sense strand
aagaagaucugugucauau

SEQ ID NO: 1218327 - RNA, 19 nt, Homo sapiens
  misc_RNA (1)...(19): siRNA sense strand
caagaagaucugugucaua

SEQ ID NO: 1218328 - RNA, 19 nt, Homo sapiens
  misc_RNA (1)...(19): siRNA sense strand
gcaauacuauagcuucaca

SEQ ID NO: 1218329 - RNA, 19 nt, Homo sapiens
  misc_RNA (1)...(19): siRNA sense strand
ccaaaccgauauagagaga

SEQ ID NO: 1218330 - RNA, 19 nt, Homo sapiens
  misc_RNA (1)...(19): siRNA sense strand
caacggcaccuauuuggaa

SEQ ID NO: 1218331 - RNA, 19 nt, Homo sapiens
  misc_RNA (1)...(19): siRNA sense strand
ggaaauggcaugaaagcau

SEQ ID NO: 1218332 - RNA, 19 nt, Homo sapiens
  misc_RNA (1)...(19): siRNA sense strand
gcgaggagcuggaguacag

SEQ ID NO: 1218333 - RNA, 19 nt, Homo sapiens
  misc_RNA (1)...(19): siRNA sense strand
cagaauguaucgucagaau

SEQ ID NO: 1218334 - RNA, 19 nt, Homo sapiens
  misc_RNA (1)...(19): siRNA sense strand
gagcaauacuauagcuuca

SEQ ID NO: 1218335 - RNA, 19 nt, Homo sapiens
  misc_RNA (1)...(19): siRNA sense strand
aaaccgagcucuaguucau

SEQ ID NO: 1218336 - RNA, 19 nt, Homo sapiens
  misc_RNA (1)...(19): siRNA sense strand
gcaagaagaucugugucau

SEQ ID NO: 1218337 - RNA, 19 nt, Homo sapiens
  misc_RNA (1)...(19): siRNA sense strand
gcaccuauuuggaacuuag

SEQ ID NO: 1218338 - RNA, 19 nt, Homo sapiens
  misc_RNA (1)...(19): siRNA sense strand
gcagaggauugaacaacug

SEQ ID NO: 1218339 - RNA, 19 nt, Homo sapiens
  misc_RNA (1)...(19): siRNA sense strand
gcaaaauacuggagcacua

SEQ ID NO: 1218340 - RNA, 19 nt, Homo sapiens
  misc_RNA (1)...(19): siRNA sense strand
gacaagggcuuccaguuuu

SEQ ID NO: 1218341 - RNA, 19 nt, Homo sapiens
  misc_RNA (1)...(19): siRNA sense strand
ggaacaacaucgggaagga

SEQ ID NO: 1218342 - RNA, 19 nt, Homo sapiens
  misc_RNA (1)...(19): siRNA sense strand
gaaggucaagucagaagaa

SEQ ID NO: 1218343 - RNA, 19 nt, Homo sapiens
  misc_RNA (1)...(19): siRNA sense strand
gagaagaaccuuggugugu

SEQ ID NO: 1218344 - RNA, 19 nt, Homo sapiens
  misc_RNA (1)...(19): siRNA sense strand
gggcaaauccauggaaauu

SEQ ID NO: 1218345 - RNA, 19 nt, Homo sapiens
  misc_RNA (1)...(19): siRNA sense strand
ggaagcaagccauuuaauc

SEQ ID NO: 1218346 - RNA, 19 nt, Homo sapiens
  misc_RNA (1)...(19): siRNA sense strand
gcacuaaugcccaugagau

SEQ ID NO: 1218347 - RNA, 19 nt, Homo sapiens
  misc_RNA (1)...(19): siRNA sense strand
gagcaacggcaccuauuug

SEQ ID NO: 1218348 - RNA, 19 nt, Homo sapiens
  misc_RNA (1)...(19): siRNA sense strand
acaaguagcugcucuucca

SEQ ID NO: 1218349 - RNA, 19 nt, Homo sapiens
  misc_RNA (1)...(19): siRNA sense strand
uugcauccauaacaucuua

SEQ ID NO: 1218350 - RNA, 19 nt, Homo sapiens
  misc_RNA (1)...(19): siRNA sense strand
ucagugaugucuguaaaga

SEQ ID NO: 1218351 - RNA, 19 nt, Homo sapiens
  misc_RNA (1)...(19): siRNA sense strand
cuuagaagaagcugaaaua

SEQ ID NO: 1218352 - RNA, 19 nt, Homo sapiens
  misc_RNA (1)...(19): siRNA sense strand
ucagugacauaagugauaa

SEQ ID NO: 1218353 - RNA, 19 nt, Homo sapiens
  misc_RNA (1)...(19): siRNA sense strand
cauauugcccauaaaguuu

SEQ ID NO: 1218354 - RNA, 19 nt, Homo sapiens
  misc_RNA (1)...(19): siRNA sense strand
aagaggaaguggcccuuaa

SEQ ID NO: 1218355 - RNA, 19 nt, Homo sapiens
  misc_RNA (1)...(19): siRNA sense strand
gcacaucuaccaucugaag

SEQ ID NO: 1218356 - RNA, 19 nt, Homo sapiens
  misc_RNA (1)...(19): siRNA sense strand
uuaaaaggcuggcauaaga

SEQ ID NO: 1218357 - RNA, 19 nt, Homo sapiens
  misc_RNA (1)...(19): siRNA sense strand
gaagaagcugaaauacaaa

SEQ ID NO: 1218358 - RNA, 19 nt, Homo sapiens
  misc_RNA (1)...(19): siRNA sense strand
gauugaaggcacaguguuu

SEQ ID NO: 1218359 - RNA, 19 nt, Homo sapiens
  misc_RNA (1)...(19): siRNA sense strand
ggagagauugucaucaaga

SEQ ID NO: 1218360 - RNA, 19 nt, Homo sapiens
  misc_RNA (1)...(19): siRNA sense strand
aaaccgauauagagagaga

SEQ ID NO: 1218361 - RNA, 19 nt, Homo sapiens
  misc_RNA (1)...(19): siRNA sense strand
ccagagguuucuagaggaa

SEQ ID NO: 1218362 - RNA, 19 nt, Homo sapiens
  misc_RNA (1)...(19): siRNA sense strand
agagguggauugagcacua

SEQ ID NO: 1218363 - RNA, 19 nt, Homo sapiens
  misc_RNA (1)...(19): siRNA sense strand
ggcaagaugugagauggaa

SEQ ID NO: 1218364 - RNA, 19 nt, Homo sapiens
  misc_RNA (1)...(19): siRNA sense strand
ugagacacgaguuccauua

SEQ ID NO: 1218365 - RNA, 19 nt, Homo sapiens
  misc_RNA (1)...(19): siRNA sense strand
agacuacacuccuccaauc

SEQ ID NO: 1218366 - RNA, 19 nt, Homo sapiens
  misc_RNA (1)...(19): siRNA sense strand
gaaauccgacgaugacucu

SEQ ID NO: 1218367 - RNA, 19 nt, Homo sapiens
  misc_RNA (1)...(19): siRNA sense strand
aaaacgagauuucugauga

SEQ ID NO: 1218368 - RNA, 19 nt, Homo sapiens
  misc_RNA (1)...(19): siRNA sense strand
cuacacuccuccaauccua

SEQ ID NO: 1218369 - RNA, 19 nt, Homo sapiens
  misc_RNA (1)...(19): siRNA sense strand
caugcugagucuagaaauu

SEQ ID NO: 1218370 - RNA, 19 nt, Homo sapiens
  misc_RNA (1)...(19): siRNA sense strand
gaagcaagccauuuaaucc

SEQ ID NO: 1218371 - RNA, 19 nt, Homo sapiens
  misc_RNA (1)...(19): siRNA sense strand
caagagccaaaccgauaua

SEQ ID NO: 1218372 - RNA, 19 nt, Homo sapiens
  misc_RNA (1)...(19): siRNA sense strand
gacaaaggaaucuugaaau

SEQ ID NO: 1218373 - RNA, 19 nt, Homo sapiens
  misc_RNA (1)...(19): siRNA sense strand
uacuauagcuucacacagu

SEQ ID NO: 1218374 - RNA, 19 nt, Homo sapiens
  misc_RNA (1)...(19): siRNA sense strand
guaggaagcguagcaguau

SEQ ID NO: 1218375 - RNA, 19 nt, Homo sapiens
  misc_RNA (1)...(19): siRNA sense strand
cgaaaggcuacgagcaaua

SEQ ID NO: 1218376 - RNA, 19 nt, Homo sapiens
  misc_RNA (1)...(19): siRNA sense strand
caaauccuaugccgaaagg

SEQ ID NO: 1218377 - RNA, 19 nt, Homo sapiens
  misc_RNA (1)...(19): siRNA sense strand
caaacuggaagcaauguau

SEQ ID NO: 1218378 - RNA, 19 nt, Homo sapiens
  misc_RNA (1)...(19): siRNA sense strand
gaguggguaucgaaacuuc

SEQ ID NO: 1218379 - RNA, 19 nt, Homo sapiens
  misc_RNA (1)...(19): siRNA sense strand
uugaacaacugcagagaga

SEQ ID NO: 1218380 - RNA, 19 nt, Homo sapiens
  misc_RNA (1)...(19): siRNA sense strand
gaaccugcaugaugauucc

SEQ ID NO: 1218381 - RNA, 19 nt, Homo sapiens
  misc_RNA (1)...(19): siRNA sense strand
acagcgagcuccuggacaa

SEQ ID NO: 1218382 - RNA, 19 nt, Homo sapiens
  misc_RNA (1)...(19): siRNA sense strand
guucaucagcuuucuaaug

SEQ ID NO: 1218383 - RNA, 19 nt, Homo sapiens
  misc_RNA (1)...(19): siRNA sense strand
ggagagagagaaacugaag

SEQ ID NO: 1218384 - RNA, 19 nt, Homo sapiens
  misc_RNA (1)...(19): siRNA sense strand
ucauauugcccauaaaguu

SEQ ID NO: 1218385 - RNA, 19 nt, Homo sapiens
  misc_RNA (1)...(19): siRNA sense strand
ugugucauauugcccauaa

SEQ ID NO: 1218386 - RNA, 19 nt, Homo sapiens
  misc_RNA (1)...(19): siRNA sense strand
gagccaaaccgauauagag

SEQ ID NO: 1218387 - RNA, 19 nt, Homo sapiens
  misc_RNA (1)...(19): siRNA sense strand
agacacgaguuccauuaug

SEQ ID NO: 1218388 - RNA, 19 nt, Homo sapiens
  misc_RNA (1)...(19): siRNA sense strand
aaacuucgccaccacagaa

SEQ ID NO: 1218389 - RNA, 19 nt, Homo sapiens
  misc_RNA (1)...(19): siRNA sense strand
ucucagugaugucuguaaa

SEQ ID NO: 1218390 - RNA, 19 nt, Homo sapiens
  misc_RNA (1)...(19): siRNA sense strand
gaaaggcuacgagcaauac

SEQ ID NO: 1218391 - RNA, 19 nt, Homo sapiens
  misc_RNA (1)...(19): siRNA sense strand
gcgaagucccggagaagaa

SEQ ID NO: 1218392 - RNA, 19 nt, Homo sapiens
  misc_RNA (1)...(19): siRNA sense strand
uaggaagcguagcaguaua

SEQ ID NO: 1218393 - RNA, 19 nt, Homo sapiens
  misc_RNA (1)...(19): siRNA sense strand
guauggagagcaaauccua

SEQ ID NO: 1218394 - RNA, 19 nt, Homo sapiens
  misc_RNA (1)...(19): siRNA sense strand
acuggaccauccugucuua

SEQ ID NO: 1218395 - RNA, 19 nt, Homo sapiens
  misc_RNA (1)...(19): siRNA sense strand
gcuacgagcaauacuauag

SEQ ID NO: 1218396 - RNA, 19 nt, Homo sapiens
  misc_RNA (1)...(19): siRNA sense strand
cacagaauguaucgucaga

SEQ ID NO: 1218397 - RNA, 19 nt, Homo sapiens
  misc_RNA (1)...(19): siRNA sense strand
ggagccaccaguucagaaa

SEQ ID NO: 1218398 - RNA, 19 nt, Homo sapiens
  misc_RNA (1)...(19): siRNA sense strand
ugagcacuauggagagauu

SEQ ID NO: 1218399 - RNA, 19 nt, Homo sapiens
  misc_RNA (1)...(19): siRNA sense strand
aaacgagauuucugaugau

SEQ ID NO: 1218400 - RNA, 19 nt, Homo sapiens
  misc_RNA (1)...(19): siRNA sense strand
gcggagagagagaaacuga

SEQ ID NO: 1218401 - RNA, 19 nt, Homo sapiens
  misc_RNA (1)...(19): siRNA sense strand
aguuugcgcuggaauuaaa

SEQ ID NO: 1218402 - RNA, 19 nt, Homo sapiens
  misc_RNA (1)...(19): siRNA sense strand
gaagaucugugucauauug

SEQ ID NO: 1218403 - RNA, 19 nt, Homo sapiens
  misc_RNA (1)...(19): siRNA sense strand
gaaugaaauugccauguuu

SEQ ID NO: 1218404 - RNA, 19 nt, Homo sapiens
  misc_RNA (1)...(19): siRNA sense strand
agaagaagcugaaauacaa

SEQ ID NO: 1218405 - RNA, 19 nt, Homo sapiens
  misc_RNA (1)...(19): siRNA sense strand
gaaaguagacucuccauca

SEQ ID NO: 1218406 - RNA, 19 nt, Homo sapiens
  misc_RNA (1)...(19): siRNA sense strand
ucaagaaccugcaugauga

SEQ ID NO: 1218407 - RNA, 19 nt, Homo sapiens
  misc_RNA (1)...(19): siRNA sense strand
gcaaauccauggaaauugu

SEQ ID NO: 1218408 - RNA, 19 nt, Homo sapiens
  misc_RNA (1)...(19): siRNA sense strand
ggacaagggcuuccaguuu

SEQ ID NO: 1218409 - RNA, 19 nt, Homo sapiens
  misc_RNA (1)...(19): siRNA sense strand
gagcacaucuaccaucuga

SEQ ID NO: 1218410 - RNA, 19 nt, Homo sapiens
  misc_RNA (1)...(19): siRNA sense strand
ggaacaaagugaccucuug

SEQ ID NO: 1218411 - RNA, 19 nt, Homo sapiens
  misc_RNA (1)...(19): siRNA sense strand
gaauguaucgucagaauga

SEQ ID NO: 1218412 - RNA, 19 nt, Homo sapiens
  misc_RNA (1)...(19): siRNA sense strand
ggacaaaggaaucuugaaa

SEQ ID NO: 1218413 - RNA, 19 nt, Homo sapiens
  misc_RNA (1)...(19): siRNA sense strand
gugauaaucuuuccuuaga

SEQ ID NO: 1218414 - RNA, 19 nt, Homo sapiens
  misc_RNA (1)...(19): siRNA sense strand
gaaguucuguuaucuccaa

SEQ ID NO: 1218415 - RNA, 19 nt, Homo sapiens
  misc_RNA (1)...(19): siRNA sense strand
gaagggaacuuagaagaag

SEQ ID NO: 1218416 - RNA, 19 nt, Homo sapiens
  misc_RNA (1)...(19): siRNA sense strand
gaacuuagaagaagcugaa

SEQ ID NO: 1218417 - RNA, 19 nt, Homo sapiens
  misc_RNA (1)...(19): siRNA sense strand
gaacaacugcagagagaaa

SEQ ID NO: 1218418 - RNA, 19 nt, Homo sapiens
  misc_RNA (1)...(19): siRNA sense strand
gaagcgaagucccggagaa

SEQ ID NO: 1218419 - RNA, 19 nt, Homo sapiens
  misc_RNA (1)...(19): siRNA sense strand
gcgcuggaauuaaaugaaa

SEQ ID NO: 1218420 - RNA, 19 nt, Homo sapiens
  misc_RNA (1)...(19): siRNA sense strand
gagagauugucaucaagaa

SEQ ID NO: 1218421 - RNA, 19 nt, Homo sapiens
  misc_RNA (1)...(19): siRNA sense strand
ggaagggaacuuagaagaa

SEQ ID NO: 1218422 - RNA, 19 nt, Homo sapiens
  misc_RNA (1)...(19): siRNA sense strand
agaaugaaauugccauguu

SEQ ID NO: 1218423 - RNA, 19 nt, Homo sapiens
  misc_RNA (1)...(19): siRNA sense strand
ucuccaagcucuucagaaa

SEQ ID NO: 1218424 - RNA, 19 nt, Homo sapiens
  misc_RNA (1)...(19): siRNA sense strand
gccaagagccaaaccgaua

SEQ ID NO: 1218425 - RNA, 19 nt, Homo sapiens
  misc_RNA (1)...(19): siRNA sense strand
gcuggaagcaagccauuua

SEQ ID NO: 1218426 - RNA, 19 nt, Homo sapiens
  misc_RNA (1)...(19): siRNA sense strand
aagaagaucugugucauau

SEQ ID NO: 1218427 - RNA, 19 nt, Homo sapiens
  misc_RNA (1)...(19): siRNA sense strand
caagaagaucugugucaua

SEQ ID NO: 1218428 - RNA, 19 nt, Homo sapiens
  misc_RNA (1)...(19): siRNA sense strand
gcaauacuauagcuucaca

SEQ ID NO: 1218429 - RNA, 19 nt, Homo sapiens
  misc_RNA (1)...(19): siRNA sense strand
ccaaaccgauauagagaga

SEQ ID NO: 1218430 - RNA, 19 nt, Homo sapiens
  misc_RNA (1)...(19): siRNA sense strand
caacggcaccuauuuggaa

SEQ ID NO: 1218431 - RNA, 19 nt, Homo sapiens
  misc_RNA (1)...(19): siRNA sense strand
ggaaauggcaugaaagcau

SEQ ID NO: 1218432 - RNA, 19 nt, Homo sapiens
  misc_RNA (1)...(19): siRNA sense strand
gcgaggagcuggaguacag

SEQ ID NO: 1218433 - RNA, 19 nt, Homo sapiens
  misc_RNA (1)...(19): siRNA sense strand
cagaauguaucgucagaau

SEQ ID NO: 1218434 - RNA, 19 nt, Homo sapiens
  misc_RNA (1)...(19): siRNA sense strand
gagcaauacuauagcuuca

SEQ ID NO: 1218435 - RNA, 19 nt, Homo sapiens
  misc_RNA (1)...(19): siRNA sense strand
aaaccgagcucuaguucau

SEQ ID NO: 1218436 - RNA, 19 nt, Homo sapiens
  misc_RNA (1)...(19): siRNA sense strand
gcaagaagaucugugucau

SEQ ID NO: 1218437 - RNA, 19 nt, Homo sapiens
  misc_RNA (1)...(19): siRNA sense strand
gcaccuauuuggaacuuag

SEQ ID NO: 1218438 - RNA, 19 nt, Homo sapiens
  misc_RNA (1)...(19): siRNA sense strand
gcagaggauugaacaacug

SEQ ID NO: 1218439 - RNA, 19 nt, Homo sapiens
  misc_RNA (1)...(19): siRNA sense strand
gcaaaauacuggagcacua

SEQ ID NO: 1218440 - RNA, 19 nt, Homo sapiens
  misc_RNA (1)...(19): siRNA sense strand
gacaagggcuuccaguuuu

SEQ ID NO: 1218441 - RNA, 19 nt, Homo sapiens
  misc_RNA (1)...(19): siRNA sense strand
ggaacaacaucgggaagga

SEQ ID NO: 1218442 - RNA, 19 nt, Homo sapiens
  misc_RNA (1)...(19): siRNA sense strand
gaaggucaagucagaagaa

SEQ ID NO: 1218443 - RNA, 19 nt, Homo sapiens
  misc_RNA (1)...(19): siRNA sense strand
gagaagaaccuuggugugu

SEQ ID NO: 1218444 - RNA, 19 nt, Homo sapiens
  misc_RNA (1)...(19): siRNA sense strand
gggcaaauccauggaaauu

SEQ ID NO: 1218445 - RNA, 19 nt, Homo sapiens
  misc_RNA (1)...(19): siRNA sense strand
ggaagcaagccauuuaauc

SEQ ID NO: 1218446 - RNA, 19 nt, Homo sapiens
  misc_RNA (1)...(19): siRNA sense strand
gcacuaaugcccaugagau

SEQ ID NO: 1218447 - RNA, 19 nt, Homo sapiens
  misc_RNA (1)...(19): siRNA sense strand
gagcaacggcaccuauuug

SEQ ID NO: 1218448 - RNA, 19 nt, Homo sapiens
  misc_RNA (1)...(19): siRNA sense strand
acaaguagcugcucuucca

SEQ ID NO: 1218449 - RNA, 19 nt, Homo sapiens
  misc_RNA (1)...(19): siRNA sense strand
uugcauccauaacaucuua

SEQ ID NO: 1218450 - RNA, 19 nt, Homo sapiens
  misc_RNA (1)...(19): siRNA sense strand
ucagugaugucuguaaaga

SEQ ID NO: 1218451 - RNA, 19 nt, Homo sapiens
  misc_RNA (1)...(19): siRNA sense strand
cuuagaagaagcugaaaua

SEQ ID NO: 1218452 - RNA, 19 nt, Homo sapiens
  misc_RNA (1)...(19): siRNA sense strand
ucagugacauaagugauaa

SEQ ID NO: 1218453 - RNA, 19 nt, Homo sapiens
  misc_RNA (1)...(19): siRNA sense strand
cauauugcccauaaaguuu

SEQ ID NO: 1218454 - RNA, 19 nt, Homo sapiens
  misc_RNA (1)...(19): siRNA sense strand
aagaggaaguggcccuuaa

SEQ ID NO: 1218455 - RNA, 19 nt, Homo sapiens
  misc_RNA (1)...(19): siRNA sense strand
gcacaucuaccaucugaag

SEQ ID NO: 1218456 - RNA, 19 nt, Homo sapiens
  misc_RNA (1)...(19): siRNA sense strand
uuaaaaggcuggcauaaga

SEQ ID NO: 1218457 - RNA, 19 nt, Homo sapiens
  misc_RNA (1)...(19): siRNA sense strand
gaagaagcugaaauacaaa

SEQ ID NO: 1218458 - RNA, 19 nt, Homo sapiens
  misc_RNA (1)...(19): siRNA sense strand
gauugaaggcacaguguuu

SEQ ID NO: 1218459 - RNA, 19 nt, Homo sapiens
  misc_RNA (1)...(19): siRNA sense strand
ggagagauugucaucaaga

SEQ ID NO: 1218460 - RNA, 19 nt, Homo sapiens
  misc_RNA (1)...(19): siRNA sense strand
aaaccgauauagagagaga

SEQ ID NO: 1218461 - RNA, 19 nt, Homo sapiens
  misc_RNA (1)...(19): siRNA sense strand
ccagagguuucuagaggaa

SEQ ID NO: 1218462 - RNA, 19 nt, Homo sapiens
  misc_RNA (1)...(19): siRNA sense strand
agagguggauugagcacua

SEQ ID NO: 1218463 - RNA, 19 nt, Homo sapiens
  misc_RNA (1)...(19): siRNA sense strand
ggcaagaugugagauggaa

SEQ ID NO: 1218464 - RNA, 19 nt, Homo sapiens
  misc_RNA (1)...(19): siRNA sense strand
ugagacacgaguuccauua

SEQ ID NO: 1218465 - RNA, 19 nt, Homo sapiens
  misc_RNA (1)...(19): siRNA sense strand
agacuacacuccuccaauc

SEQ ID NO: 1218466 - RNA, 19 nt, Homo sapiens
  misc_RNA (1)...(19): siRNA sense strand
gaaauccgacgaugacucu

SEQ ID NO: 1218467 - RNA, 19 nt, Homo sapiens
  misc_RNA (1)...(19): siRNA sense strand
aaaacgagauuucugauga

SEQ ID NO: 1218468 - RNA, 19 nt, Homo sapiens
  misc_RNA (1)...(19): siRNA sense strand
cuacacuccuccaauccua

SEQ ID NO: 1218469 - RNA, 19 nt, Homo sapiens
  misc_RNA (1)...(19): siRNA sense strand
caugcugagucuagaaauu

SEQ ID NO: 1218470 - RNA, 19 nt, Homo sapiens
  misc_RNA (1)...(19): siRNA sense strand
gaagcaagccauuuaaucc

SEQ ID NO: 1218471 - RNA, 19 nt, Homo sapiens
  misc_RNA (1)...(19): siRNA sense strand
caagagccaaaccgauaua

SEQ ID NO: 1218472 - RNA, 19 nt, Homo sapiens
  misc_RNA (1)...(19): siRNA sense strand
gacaaaggaaucuugaaau

SEQ ID NO: 1218473 - RNA, 19 nt, Homo sapiens
  misc_RNA (1)...(19): siRNA sense strand
uacuauagcuucacacagu

SEQ ID NO: 1218474 - RNA, 19 nt, Homo sapiens
  misc_RNA (1)...(19): siRNA sense strand
guaggaagcguagcaguau

SEQ ID NO: 1218475 - RNA, 19 nt, Homo sapiens
  misc_RNA (1)...(19): siRNA sense strand
cgaaaggcuacgagcaaua

SEQ ID NO: 1218476 - RNA, 19 nt, Homo sapiens
  misc_RNA (1)...(19): siRNA sense strand
caaauccuaugccgaaagg

SEQ ID NO: 1218477 - RNA, 19 nt, Homo sapiens
  misc_RNA (1)...(19): siRNA sense strand
caaacuggaagcaauguau

SEQ ID NO: 1218478 - RNA, 19 nt, Homo sapiens
  misc_RNA (1)...(19): siRNA sense strand
gaguggguaucgaaacuuc

SEQ ID NO: 1218479 - RNA, 19 nt, Homo sapiens
  misc_RNA (1)...(19): siRNA sense strand
uugaacaacugcagagaga

SEQ ID NO: 1218480 - RNA, 19 nt, Homo sapiens
  misc_RNA (1)...(19): siRNA sense strand
gaaccugcaugaugauucc

SEQ ID NO: 1218481 - RNA, 19 nt, Homo sapiens
  misc_RNA (1)...(19): siRNA sense strand
acagcgagcuccuggacaa

SEQ ID NO: 1218482 - RNA, 19 nt, Homo sapiens
  misc_RNA (1)...(19): siRNA sense strand
guucaucagcuuucuaaug

SEQ ID NO: 1218483 - RNA, 19 nt, Homo sapiens
  misc_RNA (1)...(19): siRNA sense strand
ggagagagagaaacugaag

SEQ ID NO: 1218484 - RNA, 19 nt, Homo sapiens
  misc_RNA (1)...(19): siRNA sense strand
ucauauugcccauaaaguu

SEQ ID NO: 1218485 - RNA, 19 nt, Homo sapiens
  misc_RNA (1)...(19): siRNA sense strand
ugugucauauugcccauaa

SEQ ID NO: 1218486 - RNA, 19 nt, Homo sapiens
  misc_RNA (1)...(19): siRNA sense strand
gagccaaaccgauauagag

SEQ ID NO: 1218487 - RNA, 19 nt, Homo sapiens
  misc_RNA (1)...(19): siRNA sense strand
agacacgaguuccauuaug

SEQ ID NO: 1218488 - RNA, 19 nt, Homo sapiens
  misc_RNA (1)...(19): siRNA sense strand
aaacuucgccaccacagaa

SEQ ID NO: 1218489 - RNA, 19 nt, Homo sapiens
  misc_RNA (1)...(19): siRNA sense strand
ucucagugaugucuguaaa

SEQ ID NO: 1218490 - RNA, 19 nt, Homo sapiens
  misc_RNA (1)...(19): siRNA sense strand
gaaaggcuacgagcaauac

SEQ ID NO: 1218491 - RNA, 19 nt, Homo sapiens
  misc_RNA (1)...(19): siRNA sense strand
gcgaagucccggagaagaa

SEQ ID NO: 1218492 - RNA, 19 nt, Homo sapiens
  misc_RNA (1)...(19): siRNA sense strand
uaggaagcguagcaguaua

SEQ ID NO: 1218493 - RNA, 19 nt, Homo sapiens
  misc_RNA (1)...(19): siRNA sense strand
guauggagagcaaauccua

SEQ ID NO: 1218494 - RNA, 19 nt, Homo sapiens
  misc_RNA (1)...(19): siRNA sense strand
acuggaccauccugucuua

SEQ ID NO: 1218495 - RNA, 19 nt, Homo sapiens
  misc_RNA (1)...(19): siRNA sense strand
gcuacgagcaauacuauag

SEQ ID NO: 1218496 - RNA, 19 nt, Homo sapiens
  misc_RNA (1)...(19): siRNA sense strand
cacagaauguaucgucaga

SEQ ID NO: 1218497 - RNA, 19 nt, Homo sapiens
  misc_RNA (1)...(19): siRNA sense strand
ggagccaccaguucagaaa

SEQ ID NO: 1218498 - RNA, 19 nt, Homo sapiens
  misc_RNA (1)...(19): siRNA sense strand
ugagcacuauggagagauu

SEQ ID NO: 1218499 - RNA, 19 nt, Homo sapiens
  misc_RNA (1)...(19): siRNA sense strand
aaacgagauuucugaugau

SEQ ID NO: 1218500 - RNA, 19 nt, Homo sapiens
  misc_RNA (1)...(19): siRNA sense strand
gcggagagagagaaacuga

SEQ ID NO: 1218501 - RNA, 19 nt, Homo sapiens
  misc_RNA (1)...(19): siRNA sense strand
aguuugcgcuggaauuaaa

SEQ ID NO: 1218502 - RNA, 19 nt, Homo sapiens
  misc_RNA (1)...(19): siRNA sense strand
gaagaucugugucauauug

SEQ ID NO: 1218503 - RNA, 19 nt, Homo sapiens
  misc_RNA (1)...(19): siRNA sense strand
gaaugaaauugccauguuu

SEQ ID NO: 1218504 - RNA, 19 nt, Homo sapiens
  misc_RNA (1)...(19): siRNA sense strand
agaagaagcugaaauacaa

SEQ ID NO: 1218505 - RNA, 19 nt, Homo sapiens
  misc_RNA (1)...(19): siRNA sense strand
gaaaguagacucuccauca

SEQ ID NO: 1218506 - RNA, 19 nt, Homo sapiens
  misc_RNA (1)...(19): siRNA sense strand
ucaagaaccugcaugauga

SEQ ID NO: 1218507 - RNA, 19 nt, Homo sapiens
  misc_RNA (1)...(19): siRNA sense strand
gcaaauccauggaaauugu

SEQ ID NO: 1218508 - RNA, 19 nt, Homo sapiens
  misc_RNA (1)...(19): siRNA sense strand
ggacaagggcuuccaguuu

SEQ ID NO: 1218509 - RNA, 19 nt, Homo sapiens
  misc_RNA (1)...(19): siRNA sense strand
gagcacaucuaccaucuga

SEQ ID NO: 1218510 - RNA, 19 nt, Homo sapiens
  misc_RNA (1)...(19): siRNA sense strand
ggaacaaagugaccucuug

SEQ ID NO: 1218511 - RNA, 19 nt, Homo sapiens
  misc_RNA (1)...(19): siRNA sense strand
gaauguaucgucagaauga

SEQ ID NO: 1218512 - RNA, 19 nt, Homo sapiens
  misc_RNA (1)...(19): siRNA sense strand
ggacaaaggaaucuugaaa

SEQ ID NO: 1218513 - RNA, 19 nt, Homo sapiens
  misc_RNA (1)...(19): siRNA sense strand
gugauaaucuuuccuuaga

SEQ ID NO: 1218514 - RNA, 19 nt, Homo sapiens
  misc_RNA (1)...(19): siRNA sense strand
gaaguucuguuaucuccaa

SEQ ID NO: 1218515 - RNA, 19 nt, Homo sapiens
  misc_RNA (1)...(19): siRNA sense strand
gaagggaacuuagaagaag

SEQ ID NO: 1218516 - RNA, 19 nt, Homo sapiens
  misc_RNA (1)...(19): siRNA sense strand
gaacuuagaagaagcugaa

SEQ ID NO: 1218517 - RNA, 19 nt, Homo sapiens
  misc_RNA (1)...(19): siRNA sense strand
gaacaacugcagagagaaa

SEQ ID NO: 1218518 - RNA, 19 nt, Homo sapiens
  misc_RNA (1)...(19): siRNA sense strand
gaagcgaagucccggagaa

SEQ ID NO: 1218519 - RNA, 19 nt, Homo sapiens
  misc_RNA (1)...(19): siRNA sense strand
gcgcuggaauuaaaugaaa

SEQ ID NO: 1218520 - RNA, 19 nt, Homo sapiens
  misc_RNA (1)...(19): siRNA sense strand
gagagauugucaucaagaa

SEQ ID NO: 1218521 - RNA, 19 nt, Homo sapiens
  misc_RNA (1)...(19): siRNA sense strand
ggaagggaacuuagaagaa

SEQ ID NO: 1218522 - RNA, 19 nt, Homo sapiens
  misc_RNA (1)...(19): siRNA sense strand
agaaugaaauugccauguu

SEQ ID NO: 1218523 - RNA, 19 nt, Homo sapiens
  misc_RNA (1)...(19): siRNA sense strand
ucuccaagcucuucagaaa

SEQ ID NO: 1218524 - RNA, 19 nt, Homo sapiens
  misc_RNA (1)...(19): siRNA sense strand
gccaagagccaaaccgaua

SEQ ID NO: 1218525 - RNA, 19 nt, Homo sapiens
  misc_RNA (1)...(19): siRNA sense strand
gcuggaagcaagccauuua

SEQ ID NO: 1218526 - RNA, 19 nt, Homo sapiens
  misc_RNA (1)...(19): siRNA sense strand
aagaagaucugugucauau

SEQ ID NO: 1218527 - RNA, 19 nt, Homo sapiens
  misc_RNA (1)...(19): siRNA sense strand
caagaagaucugugucaua

SEQ ID NO: 1218528 - RNA, 19 nt, Homo sapiens
  misc_RNA (1)...(19): siRNA sense strand
gcaauacuauagcuucaca

SEQ ID NO: 1218529 - RNA, 19 nt, Homo sapiens
  misc_RNA (1)...(19): siRNA sense strand
ccaaaccgauauagagaga

SEQ ID NO: 1218530 - RNA, 19 nt, Homo sapiens
  misc_RNA (1)...(19): siRNA sense strand
caacggcaccuauuuggaa

SEQ ID NO: 1218531 - RNA, 19 nt, Homo sapiens
  misc_RNA (1)...(19): siRNA sense strand
ggaaauggcaugaaagcau

SEQ ID NO: 1218532 - RNA, 19 nt, Homo sapiens
  misc_RNA (1)...(19): siRNA sense strand
gcgaggagcuggaguacag

SEQ ID NO: 1218533 - RNA, 19 nt, Homo sapiens
  misc_RNA (1)...(19): siRNA sense strand
cagaauguaucgucagaau

SEQ ID NO: 1218534 - RNA, 19 nt, Homo sapiens
  misc_RNA (1)...(19): siRNA sense strand
gagcaauacuauagcuuca

SEQ ID NO: 1218535 - RNA, 19 nt, Homo sapiens
  misc_RNA (1)...(19): siRNA sense strand
aaaccgagcucuaguucau

SEQ ID NO: 1218536 - RNA, 19 nt, Homo sapiens
  misc_RNA (1)...(19): siRNA sense strand
gcaagaagaucugugucau

SEQ ID NO: 1218537 - RNA, 19 nt, Homo sapiens
  misc_RNA (1)...(19): siRNA sense strand
gcaccuauuuggaacuuag

SEQ ID NO: 1218538 - RNA, 19 nt, Homo sapiens
  misc_RNA (1)...(19): siRNA sense strand
gcagaggauugaacaacug

SEQ ID NO: 1218539 - RNA, 19 nt, Homo sapiens
  misc_RNA (1)...(19): siRNA sense strand
gcaaaauacuggagcacua

SEQ ID NO: 1218540 - RNA, 19 nt, Homo sapiens
  misc_RNA (1)...(19): siRNA sense strand
gacaagggcuuccaguuuu

SEQ ID NO: 1218541 - RNA, 19 nt, Homo sapiens
  misc_RNA (1)...(19): siRNA sense strand
ggaacaacaucgggaagga

SEQ ID NO: 1218542 - RNA, 19 nt, Homo sapiens
  misc_RNA (1)...(19): siRNA sense strand
gaaggucaagucagaagaa

SEQ ID NO: 1218543 - RNA, 19 nt, Homo sapiens
  misc_RNA (1)...(19): siRNA sense strand
gagaagaaccuuggugugu

SEQ ID NO: 1218544 - RNA, 19 nt, Homo sapiens
  misc_RNA (1)...(19): siRNA sense strand
gggcaaauccauggaaauu

SEQ ID NO: 1218545 - RNA, 19 nt, Homo sapiens
  misc_RNA (1)...(19): siRNA sense strand
ggaagcaagccauuuaauc

SEQ ID NO: 1218546 - RNA, 19 nt, Homo sapiens
  misc_RNA (1)...(19): siRNA sense strand
gcacuaaugcccaugagau

SEQ ID NO: 1218547 - RNA, 19 nt, Homo sapiens
  misc_RNA (1)...(19): siRNA sense strand
gagcaacggcaccuauuug

SEQ ID NO: 1218548 - RNA, 19 nt, Homo sapiens
  misc_RNA (1)...(19): siRNA sense strand
acaaguagcugcucuucca

SEQ ID NO: 1218549 - RNA, 19 nt, Homo sapiens
  misc_RNA (1)...(19): siRNA sense strand
uugcauccauaacaucuua

SEQ ID NO: 1218550 - RNA, 19 nt, Homo sapiens
  misc_RNA (1)...(19): siRNA sense strand
ucagugaugucuguaaaga

SEQ ID NO: 1218551 - RNA, 19 nt, Homo sapiens
  misc_RNA (1)...(19): siRNA sense strand
cuuagaagaagcugaaaua

SEQ ID NO: 1218552 - RNA, 19 nt, Homo sapiens
  misc_RNA (1)...(19): siRNA sense strand
ucagugacauaagugauaa

SEQ ID NO: 1218553 - RNA, 19 nt, Homo sapiens
  misc_RNA (1)...(19): siRNA sense strand
cauauugcccauaaaguuu

SEQ ID NO: 1218554 - RNA, 19 nt, Homo sapiens
  misc_RNA (1)...(19): siRNA sense strand
aagaggaaguggcccuuaa

SEQ ID NO: 1218555 - RNA, 19 nt, Homo sapiens
  misc_RNA (1)...(19): siRNA sense strand
gcacaucuaccaucugaag

SEQ ID NO: 1218556 - RNA, 19 nt, Homo sapiens
  misc_RNA (1)...(19): siRNA sense strand
uuaaaaggcuggcauaaga

SEQ ID NO: 1218557 - RNA, 19 nt, Homo sapiens
  misc_RNA (1)...(19): siRNA sense strand
gaagaagcugaaauacaaa

SEQ ID NO: 1218558 - RNA, 19 nt, Homo sapiens
  misc_RNA (1)...(19): siRNA sense strand
gauugaaggcacaguguuu

SEQ ID NO: 1218559 - RNA, 19 nt, Homo sapiens
  misc_RNA (1)...(19): siRNA sense strand
ggagagauugucaucaaga

SEQ ID NO: 1218560 - RNA, 19 nt, Homo sapiens
  misc_RNA (1)...(19): siRNA sense strand
aaaccgauauagagagaga

SEQ ID NO: 1218561 - RNA, 19 nt, Homo sapiens
  misc_RNA (1)...(19): siRNA sense strand
ccagagguuucuagaggaa

SEQ ID NO: 1218562 - RNA, 19 nt, Homo sapiens
  misc_RNA (1)...(19): siRNA sense strand
agagguggauugagcacua

SEQ ID NO: 1218563 - RNA, 19 nt, Homo sapiens
  misc_RNA (1)...(19): siRNA sense strand
ggcaagaugugagauggaa

SEQ ID NO: 1218564 - RNA, 19 nt, Homo sapiens
  misc_RNA (1)...(19): siRNA sense strand
ugagacacgaguuccauua

SEQ ID NO: 1218565 - RNA, 19 nt, Homo sapiens
  misc_RNA (1)...(19): siRNA sense strand
agacuacacuccuccaauc

SEQ ID NO: 1218566 - RNA, 19 nt, Homo sapiens
  misc_RNA (1)...(19): siRNA sense strand
gaaauccgacgaugacucu

SEQ ID NO: 1218567 - RNA, 19 nt, Homo sapiens
  misc_RNA (1)...(19): siRNA sense strand
aaaacgagauuucugauga

SEQ ID NO: 1218568 - RNA, 19 nt, Homo sapiens
  misc_RNA (1)...(19): siRNA sense strand
cuacacuccuccaauccua

SEQ ID NO: 1218569 - RNA, 19 nt, Homo sapiens
  misc_RNA (1)...(19): siRNA sense strand
caugcugagucuagaaauu

SEQ ID NO: 1218570 - RNA, 19 nt, Homo sapiens
  misc_RNA (1)...(19): siRNA sense strand
gaagcaagccauuuaaucc

SEQ ID NO: 1218571 - RNA, 19 nt, Homo sapiens
  misc_RNA (1)...(19): siRNA sense strand
caagagccaaaccgauaua

SEQ ID NO: 1218572 - RNA, 19 nt, Homo sapiens
  misc_RNA (1)...(19): siRNA sense strand
gacaaaggaaucuugaaau

SEQ ID NO: 1218573 - RNA, 19 nt, Homo sapiens
  misc_RNA (1)...(19): siRNA sense strand
uacuauagcuucacacagu

SEQ ID NO: 1218574 - RNA, 19 nt, Homo sapiens
  misc_RNA (1)...(19): siRNA sense strand
guaggaagcguagcaguau

SEQ ID NO: 1218575 - RNA, 19 nt, Homo sapiens
  misc_RNA (1)...(19): siRNA sense strand
cgaaaggcuacgagcaaua

SEQ ID NO: 1218576 - RNA, 19 nt, Homo sapiens
  misc_RNA (1)...(19): siRNA sense strand
caaauccuaugccgaaagg

SEQ ID NO: 1218577 - RNA, 19 nt, Homo sapiens
  misc_RNA (1)...(19): siRNA sense strand
caaacuggaagcaauguau

SEQ ID NO: 1218578 - RNA, 19 nt, Homo sapiens
  misc_RNA (1)...(19): siRNA sense strand
gaguggguaucgaaacuuc

SEQ ID NO: 1218579 - RNA, 19 nt, Homo sapiens
  misc_RNA (1)...(19): siRNA sense strand
uugaacaacugcagagaga

SEQ ID NO: 1218580 - RNA, 19 nt, Homo sapiens
  misc_RNA (1)...(19): siRNA sense strand
gaaccugcaugaugauucc

SEQ ID NO: 1218581 - RNA, 19 nt, Homo sapiens
  misc_RNA (1)...(19): siRNA sense strand
acagcgagcuccuggacaa

SEQ ID NO: 1218582 - RNA, 19 nt, Homo sapiens
  misc_RNA (1)...(19): siRNA sense strand
guucaucagcuuucuaaug

SEQ ID NO: 1218583 - RNA, 19 nt, Homo sapiens
  misc_RNA (1)...(19): siRNA sense strand
ggagagagagaaacugaag

SEQ ID NO: 1218584 - RNA, 19 nt, Homo sapiens
  misc_RNA (1)...(19): siRNA sense strand
ucauauugcccauaaaguu

SEQ ID NO: 1218585 - RNA, 19 nt, Homo sapiens
  misc_RNA (1)...(19): siRNA sense strand
ugugucauauugcccauaa

SEQ ID NO: 1218586 - RNA, 19 nt, Homo sapiens
  misc_RNA (1)...(19): siRNA sense strand
gagccaaaccgauauagag

SEQ ID NO: 1218587 - RNA, 19 nt, Homo sapiens
  misc_RNA (1)...(19): siRNA sense strand
agacacgaguuccauuaug

SEQ ID NO: 1218588 - RNA, 19 nt, Homo sapiens
  misc_RNA (1)...(19): siRNA sense strand
aaacuucgccaccacagaa

SEQ ID NO: 1218589 - RNA, 19 nt, Homo sapiens
  misc_RNA (1)...(19): siRNA sense strand
ucucagugaugucuguaaa

SEQ ID NO: 1218590 - RNA, 19 nt, Homo sapiens
  misc_RNA (1)...(19): siRNA sense strand
gaaaggcuacgagcaauac

SEQ ID NO: 1218591 - RNA, 19 nt, Homo sapiens
  misc_RNA (1)...(19): siRNA sense strand
gcgaagucccggagaagaa

SEQ ID NO: 1218592 - RNA, 19 nt, Homo sapiens
  misc_RNA (1)...(19): siRNA sense strand
uaggaagcguagcaguaua

SEQ ID NO: 1218593 - RNA, 19 nt, Homo sapiens
  misc_RNA (1)...(19): siRNA sense strand
guauggagagcaaauccua

SEQ ID NO: 1218594 - RNA, 19 nt, Homo sapiens
  misc_RNA (1)...(19): siRNA sense strand
acuggaccauccugucuua

SEQ ID NO: 1218595 - RNA, 19 nt, Homo sapiens
  misc_RNA (1)...(19): siRNA sense strand
gcuacgagcaauacuauag

SEQ ID NO: 1218596 - RNA, 19 nt, Homo sapiens
  misc_RNA (1)...(19): siRNA sense strand
cacagaauguaucgucaga

SEQ ID NO: 1218597 - RNA, 19 nt, Homo sapiens
  misc_RNA (1)...(19): siRNA sense strand
ggagccaccaguucagaaa

SEQ ID NO: 1218598 - RNA, 19 nt, Homo sapiens
  misc_RNA (1)...(19): siRNA sense strand
ugagcacuauggagagauu

SEQ ID NO: 1218599 - RNA, 19 nt, Homo sapiens
  misc_RNA (1)...(19): siRNA sense strand
aaacgagauuucugaugau

SEQ ID NO: 1218600 - RNA, 19 nt, Homo sapiens
  misc_RNA (1)...(19): siRNA sense strand
gcggagagagagaaacuga

SEQ ID NO: 1218601 - RNA, 19 nt, Homo sapiens
  misc_RNA (1)...(19): siRNA sense strand
aguuugcgcuggaauuaaa

SEQ ID NO: 1218602 - RNA, 19 nt, Homo sapiens
  misc_RNA (1)...(19): siRNA sense strand
gaagaucugugucauauug

SEQ ID NO: 1218603 - RNA, 19 nt, Homo sapiens
  misc_RNA (1)...(19): siRNA sense strand
gaaugaaauugccauguuu

SEQ ID NO: 1218604 - RNA, 19 nt, Homo sapiens
  misc_RNA (1)...(19): siRNA sense strand
gaaaguagacucuccauca

SEQ ID NO: 1218605 - RNA, 19 nt, Homo sapiens
  misc_RNA (1)...(19): siRNA sense strand
gagcacaucuaccaucuga

SEQ ID NO: 1218606 - RNA, 19 nt, Homo sapiens
  misc_RNA (1)...(19): siRNA sense strand
gaauguaucgucagaauga

SEQ ID NO: 1218607 - RNA, 19 nt, Homo sapiens
  misc_RNA (1)...(19): siRNA sense strand
ggacaaaggaaucuugaaa

SEQ ID NO: 1218608 - RNA, 19 nt, Homo sapiens
  misc_RNA (1)...(19): siRNA sense strand
gugauaaucuuuccuuaga

SEQ ID NO: 1218609 - RNA, 19 nt, Homo sapiens
  misc_RNA (1)...(19): siRNA sense strand
gaaguucuguuaucuccaa

SEQ ID NO: 1218610 - RNA, 19 nt, Homo sapiens
  misc_RNA (1)...(19): siRNA sense strand
gaagcgaagucccggagaa

SEQ ID NO: 1218611 - RNA, 19 nt, Homo sapiens
  misc_RNA (1)...(19): siRNA sense strand
agaaugaaauugccauguu

SEQ ID NO: 1218612 - RNA, 19 nt, Homo sapiens
  misc_RNA (1)...(19): siRNA sense strand
ucuccaagcucuucagaaa

SEQ ID NO: 1218613 - RNA, 19 nt, Homo sapiens
  misc_RNA (1)...(19): siRNA sense strand
gccaagagccaaaccgaua

SEQ ID NO: 1218614 - RNA, 19 nt, Homo sapiens
  misc_RNA (1)...(19): siRNA sense strand
aagaagaucugugucauau

SEQ ID NO: 1218615 - RNA, 19 nt, Homo sapiens
  misc_RNA (1)...(19): siRNA sense strand
caagaagaucugugucaua

SEQ ID NO: 1218616 - RNA, 19 nt, Homo sapiens
  misc_RNA (1)...(19): siRNA sense strand
ccaaaccgauauagagaga

SEQ ID NO: 1218617 - RNA, 19 nt, Homo sapiens
  misc_RNA (1)...(19): siRNA sense strand
gcgaggagcuggaguacag

SEQ ID NO: 1218618 - RNA, 19 nt, Homo sapiens
  misc_RNA (1)...(19): siRNA sense strand
cagaauguaucgucagaau

SEQ ID NO: 1218619 - RNA, 19 nt, Homo sapiens
  misc_RNA (1)...(19): siRNA sense strand
aaaccgagcucuaguucau

SEQ ID NO: 1218620 - RNA, 19 nt, Homo sapiens
  misc_RNA (1)...(19): siRNA sense strand
gcaagaagaucugugucau

SEQ ID NO: 1218621 - RNA, 19 nt, Homo sapiens
  misc_RNA (1)...(19): siRNA sense strand
ggaacaacaucgggaagga

SEQ ID NO: 1218622 - RNA, 19 nt, Homo sapiens
  misc_RNA (1)...(19): siRNA sense strand
gaaggucaagucagaagaa

SEQ ID NO: 1218623 - RNA, 19 nt, Homo sapiens
  misc_RNA (1)...(19): siRNA sense strand
gagaagaaccuuggugugu

SEQ ID NO: 1218624 - RNA, 19 nt, Homo sapiens
  misc_RNA (1)...(19): siRNA sense strand
acaaguagcugcucuucca

SEQ ID NO: 1218625 - RNA, 19 nt, Homo sapiens
  misc_RNA (1)...(19): siRNA sense strand
aagaggaaguggcccuuaa

SEQ ID NO: 1218626 - RNA, 19 nt, Homo sapiens
  misc_RNA (1)...(19): siRNA sense strand
ucagugacauaagugauaa

SEQ ID NO: 1218627 - RNA, 19 nt, Homo sapiens
  misc_RNA (1)...(19): siRNA sense strand
cauauugcccauaaaguuu

SEQ ID NO: 1218628 - RNA, 19 nt, Homo sapiens
  misc_RNA (1)...(19): siRNA sense strand
gcacaucuaccaucugaag

SEQ ID NO: 1218629 - RNA, 19 nt, Homo sapiens
  misc_RNA (1)...(19): siRNA sense strand
ucagugaugucuguaaaga

SEQ ID NO: 1218630 - RNA, 19 nt, Homo sapiens
  misc_RNA (1)...(19): siRNA sense strand
uuaaaaggcuggcauaaga

SEQ ID NO: 1218631 - RNA, 19 nt, Homo sapiens
  misc_RNA (1)...(19): siRNA sense strand
aaaccgauauagagagaga

SEQ ID NO: 1218632 - RNA, 19 nt, Homo sapiens
  misc_RNA (1)...(19): siRNA sense strand
ugagacacgaguuccauua

SEQ ID NO: 1218633 - RNA, 19 nt, Homo sapiens
  misc_RNA (1)...(19): siRNA sense strand
agacuacacuccuccaauc

SEQ ID NO: 1218634 - RNA, 19 nt, Homo sapiens
  misc_RNA (1)...(19): siRNA sense strand
aaaacgagauuucugauga

SEQ ID NO: 1218635 - RNA, 19 nt, Homo sapiens
  misc_RNA (1)...(19): siRNA sense strand
cuacacuccuccaauccua

SEQ ID NO: 1218636 - RNA, 19 nt, Homo sapiens
  misc_RNA (1)...(19): siRNA sense strand
gacaaaggaaucuugaaau

SEQ ID NO: 1218637 - RNA, 19 nt, Homo sapiens
  misc_RNA (1)...(19): siRNA sense strand
caagagccaaaccgauaua

SEQ ID NO: 1218638 - RNA, 19 nt, Homo sapiens
  misc_RNA (1)...(19): siRNA sense strand
guaggaagcguagcaguau

SEQ ID NO: 1218639 - RNA, 19 nt, Homo sapiens
  misc_RNA (1)...(19): siRNA sense strand
caaacuggaagcaauguau

SEQ ID NO: 1218640 - RNA, 19 nt, Homo sapiens
  misc_RNA (1)...(19): siRNA sense strand
gagccaaaccgauauagag

SEQ ID NO: 1218641 - RNA, 19 nt, Homo sapiens
  misc_RNA (1)...(19): siRNA sense strand
acagcgagcuccuggacaa

SEQ ID NO: 1218642 - RNA, 19 nt, Homo sapiens
  misc_RNA (1)...(19): siRNA sense strand
guucaucagcuuucuaaug

SEQ ID NO: 1218643 - RNA, 19 nt, Homo sapiens
  misc_RNA (1)...(19): siRNA sense strand
ggagagagagaaacugaag

SEQ ID NO: 1218644 - RNA, 19 nt, Homo sapiens
  misc_RNA (1)...(19): siRNA sense strand
ucauauugcccauaaaguu

SEQ ID NO: 1218645 - RNA, 19 nt, Homo sapiens
  misc_RNA (1)...(19): siRNA sense strand
ugugucauauugcccauaa

SEQ ID NO: 1218646 - RNA, 19 nt, Homo sapiens
  misc_RNA (1)...(19): siRNA sense strand
agacacgaguuccauuaug

SEQ ID NO: 1218647 - RNA, 19 nt, Homo sapiens
  misc_RNA (1)...(19): siRNA sense strand
aaacuucgccaccacagaa

SEQ ID NO: 1218648 - RNA, 19 nt, Homo sapiens
  misc_RNA (1)...(19): siRNA sense strand
gaguggguaucgaaacuuc

SEQ ID NO: 1218649 - RNA, 19 nt, Homo sapiens
  misc_RNA (1)...(19): siRNA sense strand
ucucagugaugucuguaaa

SEQ ID NO: 1218650 - RNA, 19 nt, Homo sapiens
  misc_RNA (1)...(19): siRNA sense strand
gcgaagucccggagaagaa

SEQ ID NO: 1218651 - RNA, 19 nt, Homo sapiens
  misc_RNA (1)...(19): siRNA sense strand
uaggaagcguagcaguaua

SEQ ID NO: 1218652 - RNA, 19 nt, Homo sapiens
  misc_RNA (1)...(19): siRNA sense strand
cacagaauguaucgucaga

SEQ ID NO: 1218653 - RNA, 19 nt, Homo sapiens
  misc_RNA (1)...(19): siRNA sense strand
aaacgagauuucugaugau

SEQ ID NO: 1218654 - RNA, 19 nt, Homo sapiens
  misc_RNA (1)...(19): siRNA sense strand
gcggagagagagaaacuga

SEQ ID NO: 1218655 - RNA, 19 nt, Homo sapiens
  misc_RNA (1)...(19): siRNA sense strand
ggagccaccaguucagaaa

SEQ ID NO: 1218656 - RNA, 19 nt, Homo sapiens
  misc_RNA (1)...(19): siRNA sense strand
caaaaugcauagaccuuga

SEQ ID NO: 1218657 - RNA, 19 nt, Homo sapiens
  misc_RNA (1)...(19): siRNA sense strand
ucacugacucccuuucuga

SEQ ID NO: 1218658 - RNA, 19 nt, Homo sapiens
  misc_RNA (1)...(19): siRNA sense strand
gagacacgaguuccauuau

SEQ ID NO: 1218659 - RNA, 19 nt, Homo sapiens
  misc_RNA (1)...(19): siRNA sense strand
ggucaagucagaagaaguc

SEQ ID NO: 1218660 - RNA, 19 nt, Homo sapiens
  misc_RNA (1)...(19): siRNA sense strand
ucaggaaguucuguuaucu

SEQ ID NO: 1218661 - RNA, 19 nt, Homo sapiens
  misc_RNA (1)...(19): siRNA sense strand
ccuaauuugucaacacuag

SEQ ID NO: 1218662 - RNA, 19 nt, Homo sapiens
  misc_RNA (1)...(19): siRNA sense strand
gaaacuucgccaccacaga

SEQ ID NO: 1218663 - RNA, 19 nt, Homo sapiens
  misc_RNA (1)...(19): siRNA sense strand
gaugucgggcucucaguga

SEQ ID NO: 1218664 - RNA, 19 nt, Homo sapiens
  misc_RNA (1)...(19): siRNA sense strand
aaauugguaucaccuucaa

SEQ ID NO: 1218665 - RNA, 19 nt, Homo sapiens
  misc_RNA (1)...(19): siRNA sense strand
gauuucugaugaugacuca

SEQ ID NO: 1218666 - RNA, 19 nt, Homo sapiens
  misc_RNA (1)...(19): siRNA sense strand
caucacagacucuucaucu

SEQ ID NO: 1218667 - RNA, 19 nt, Homo sapiens
  misc_RNA (1)...(19): siRNA sense strand
gcacaaguagcugcucuuc

SEQ ID NO: 1218668 - RNA, 19 nt, Homo sapiens
  misc_RNA (1)...(19): siRNA sense strand
gaagucaucaaaaugcaua

SEQ ID NO: 1218669 - RNA, 19 nt, Homo sapiens
  misc_RNA (1)...(19): siRNA sense strand
cgagauuucugaugaugac

SEQ ID NO: 1218670 - RNA, 19 nt, Homo sapiens
  misc_RNA (1)...(19): siRNA sense strand
aagcguagcaguauaucaa

SEQ ID NO: 1218671 - RNA, 19 nt, Homo sapiens
  misc_RNA (1)...(19): siRNA sense strand
gcucaggaaguucuguuau

SEQ ID NO: 1218672 - RNA, 19 nt, Homo sapiens
  misc_RNA (1)...(19): siRNA sense strand
agugaugucuguaaagaag

SEQ ID NO: 1218673 - RNA, 19 nt, Homo sapiens
  misc_RNA (1)...(19): siRNA sense strand
ucaaggagcacaaguagcu

SEQ ID NO: 1218674 - RNA, 19 nt, Homo sapiens
  misc_RNA (1)...(19): siRNA sense strand
cauuaugguuacagucuuc

SEQ ID NO: 1218675 - RNA, 19 nt, Homo sapiens
  misc_RNA (1)...(19): siRNA sense strand
ccaagagccaaaccgauau

SEQ ID NO: 1218676 - RNA, 19 nt, Homo sapiens
  misc_RNA (1)...(19): siRNA sense strand
guagcaguauaucaaagca

SEQ ID NO: 1218677 - RNA, 19 nt, Homo sapiens
  misc_RNA (1)...(19): siRNA sense strand
ugaagaacgcccugucauc

SEQ ID NO: 1218678 - RNA, 19 nt, Homo sapiens
  misc_RNA (1)...(19): siRNA sense strand
gaugagugaugagaagaac

SEQ ID NO: 1218679 - RNA, 19 nt, Homo sapiens
  misc_RNA (1)...(19): siRNA sense strand
gaaaaccgagcucuaguuc

SEQ ID NO: 1218680 - RNA, 19 nt, Homo sapiens
  misc_RNA (1)...(19): siRNA sense strand
gaagcguagcaguauauca

SEQ ID NO: 1218681 - RNA, 19 nt, Homo sapiens
  misc_RNA (1)...(19): siRNA sense strand
gaaacugaagcagcugaug

SEQ ID NO: 1218682 - RNA, 19 nt, Homo sapiens
  misc_RNA (1)...(19): siRNA sense strand
aaagaggaaguggcccuua

SEQ ID NO: 1218683 - RNA, 19 nt, Homo sapiens
  misc_RNA (1)...(19): siRNA sense strand
aguaggaagcguagcagua

SEQ ID NO: 1218684 - RNA, 19 nt, Homo sapiens
  misc_RNA (1)...(19): siRNA sense strand
uaguucaucagcuuucuaa

SEQ ID NO: 1218685 - RNA, 19 nt, Homo sapiens
  misc_RNA (1)...(19): siRNA sense strand
ggucauuggucugaagaac

SEQ ID NO: 1218686 - RNA, 19 nt, Homo sapiens
  misc_RNA (1)...(19): siRNA sense strand
gcguagcaguauaucaaag

SEQ ID NO: 1218687 - RNA, 19 nt, Homo sapiens
  misc_RNA (1)...(19): siRNA sense strand
ccgagcagcaguaacauca

SEQ ID NO: 1218688 - RNA, 19 nt, Homo sapiens
  misc_RNA (1)...(19): siRNA sense strand
aaaguagacucuccaucac

SEQ ID NO: 1218689 - RNA, 19 nt, Homo sapiens
  misc_RNA (1)...(19): siRNA sense strand
gaagugguggaaggacuga

SEQ ID NO: 1218690 - RNA, 19 nt, Homo sapiens
  misc_RNA (1)...(19): siRNA sense strand
gcucuaguucaucagcuuu

SEQ ID NO: 1218691 - RNA, 19 nt, Homo sapiens
  misc_RNA (1)...(19): siRNA sense strand
cuguaaagaagucaucaaa

SEQ ID NO: 1218692 - RNA, 19 nt, Homo sapiens
  misc_RNA (1)...(19): siRNA sense strand
cauaagugauaaucuuucc

SEQ ID NO: 1218693 - RNA, 19 nt, Homo sapiens
  misc_RNA (1)...(19): siRNA sense strand
agaggaaguggcccuuaaa

SEQ ID NO: 1218694 - RNA, 19 nt, Homo sapiens
  misc_RNA (1)...(19): siRNA sense strand
gguguuugacuccauuuca

SEQ ID NO: 1218695 - RNA, 19 nt, Homo sapiens
  misc_RNA (1)...(19): siRNA sense strand
acaccgaggagcacaucua

SEQ ID NO: 1218696 - RNA, 19 nt, Homo sapiens
  misc_RNA (1)...(19): siRNA sense strand
ucacuuuaaggucagcuuu

SEQ ID NO: 1218697 - RNA, 19 nt, Homo sapiens
  misc_RNA (1)...(19): siRNA sense strand
ucuaccaucugaaggucaa

SEQ ID NO: 1218698 - RNA, 19 nt, Homo sapiens
  misc_RNA (1)...(19): siRNA sense strand
ccaugccgguggagcugaa

SEQ ID NO: 1218699 - RNA, 19 nt, Homo sapiens
  misc_RNA (1)...(19): siRNA sense strand
cucaggaaguucuguuauc

SEQ ID NO: 1218700 - RNA, 19 nt, Homo sapiens
  misc_RNA (1)...(19): siRNA sense strand
ucaaacuggaagcaaugua

SEQ ID NO: 1218701 - RNA, 19 nt, Homo sapiens
  misc_RNA (1)...(19): siRNA sense strand
ucaaguaggaagcguagca

SEQ ID NO: 1218702 - RNA, 19 nt, Homo sapiens
  misc_RNA (1)...(19): siRNA sense strand
gaagaucugugucauauug

SEQ ID NO: 1218703 - RNA, 19 nt, Homo sapiens
  misc_RNA (1)...(19): siRNA sense strand
gaaugaaauugccauguuu

SEQ ID NO: 1218704 - RNA, 19 nt, Homo sapiens
  misc_RNA (1)...(19): siRNA sense strand
gaaaguagacucuccauca

SEQ ID NO: 1218705 - RNA, 19 nt, Homo sapiens
  misc_RNA (1)...(19): siRNA sense strand
gagcacaucuaccaucuga

SEQ ID NO: 1218706 - RNA, 19 nt, Homo sapiens
  misc_RNA (1)...(19): siRNA sense strand
gaauguaucgucagaauga

SEQ ID NO: 1218707 - RNA, 19 nt, Homo sapiens
  misc_RNA (1)...(19): siRNA sense strand
ggacaaaggaaucuugaaa

SEQ ID NO: 1218708 - RNA, 19 nt, Homo sapiens
  misc_RNA (1)...(19): siRNA sense strand
gugauaaucuuuccuuaga

SEQ ID NO: 1218709 - RNA, 19 nt, Homo sapiens
  misc_RNA (1)...(19): siRNA sense strand
gaaguucuguuaucuccaa

SEQ ID NO: 1218710 - RNA, 19 nt, Homo sapiens
  misc_RNA (1)...(19): siRNA sense strand
gaagcgaagucccggagaa

SEQ ID NO: 1218711 - RNA, 19 nt, Homo sapiens
  misc_RNA (1)...(19): siRNA sense strand
agaaugaaauugccauguu

SEQ ID NO: 1218712 - RNA, 19 nt, Homo sapiens
  misc_RNA (1)...(19): siRNA sense strand
ucuccaagcucuucagaaa

SEQ ID NO: 1218713 - RNA, 19 nt, Homo sapiens
  misc_RNA (1)...(19): siRNA sense strand
gccaagagccaaaccgaua

SEQ ID NO: 1218714 - RNA, 19 nt, Homo sapiens
  misc_RNA (1)...(19): siRNA sense strand
aagaagaucugugucauau

SEQ ID NO: 1218715 - RNA, 19 nt, Homo sapiens
  misc_RNA (1)...(19): siRNA sense strand
caagaagaucugugucaua

SEQ ID NO: 1218716 - RNA, 19 nt, Homo sapiens
  misc_RNA (1)...(19): siRNA sense strand
ccaaaccgauauagagaga

SEQ ID NO: 1218717 - RNA, 19 nt, Homo sapiens
  misc_RNA (1)...(19): siRNA sense strand
gcgaggagcuggaguacag

SEQ ID NO: 1218718 - RNA, 19 nt, Homo sapiens
  misc_RNA (1)...(19): siRNA sense strand
cagaauguaucgucagaau

SEQ ID NO: 1218719 - RNA, 19 nt, Homo sapiens
  misc_RNA (1)...(19): siRNA sense strand
aaaccgagcucuaguucau

SEQ ID NO: 1218720 - RNA, 19 nt, Homo sapiens
  misc_RNA (1)...(19): siRNA sense strand
gcaagaagaucugugucau

SEQ ID NO: 1218721 - RNA, 19 nt, Homo sapiens
  misc_RNA (1)...(19): siRNA sense strand
ggaacaacaucgggaagga

SEQ ID NO: 1218722 - RNA, 19 nt, Homo sapiens
  misc_RNA (1)...(19): siRNA sense strand
gaaggucaagucagaagaa

SEQ ID NO: 1218723 - RNA, 19 nt, Homo sapiens
  misc_RNA (1)...(19): siRNA sense strand
gagaagaaccuuggugugu

SEQ ID NO: 1218724 - RNA, 19 nt, Homo sapiens
  misc_RNA (1)...(19): siRNA sense strand
acaaguagcugcucuucca

SEQ ID NO: 1218725 - RNA, 19 nt, Homo sapiens
  misc_RNA (1)...(19): siRNA sense strand
aagaggaaguggcccuuaa

SEQ ID NO: 1218726 - RNA, 19 nt, Homo sapiens
  misc_RNA (1)...(19): siRNA sense strand
ucagugacauaagugauaa

SEQ ID NO: 1218727 - RNA, 19 nt, Homo sapiens
  misc_RNA (1)...(19): siRNA sense strand
cauauugcccauaaaguuu

SEQ ID NO: 1218728 - RNA, 19 nt, Homo sapiens
  misc_RNA (1)...(19): siRNA sense strand
gcacaucuaccaucugaag

SEQ ID NO: 1218729 - RNA, 19 nt, Homo sapiens
  misc_RNA (1)...(19): siRNA sense strand
ucagugaugucuguaaaga

SEQ ID NO: 1218730 - RNA, 19 nt, Homo sapiens
  misc_RNA (1)...(19): siRNA sense strand
uuaaaaggcuggcauaaga

SEQ ID NO: 1218731 - RNA, 19 nt, Homo sapiens
  misc_RNA (1)...(19): siRNA sense strand
aaaccgauauagagagaga

SEQ ID NO: 1218732 - RNA, 19 nt, Homo sapiens
  misc_RNA (1)...(19): siRNA sense strand
ugagacacgaguuccauua

SEQ ID NO: 1218733 - RNA, 19 nt, Homo sapiens
  misc_RNA (1)...(19): siRNA sense strand
agacuacacuccuccaauc

SEQ ID NO: 1218734 - RNA, 19 nt, Homo sapiens
  misc_RNA (1)...(19): siRNA sense strand
aaaacgagauuucugauga

SEQ ID NO: 1218735 - RNA, 19 nt, Homo sapiens
  misc_RNA (1)...(19): siRNA sense strand
cuacacuccuccaauccua

SEQ ID NO: 1218736 - RNA, 19 nt, Homo sapiens
  misc_RNA (1)...(19): siRNA sense strand
gacaaaggaaucuugaaau

SEQ ID NO: 1218737 - RNA, 19 nt, Homo sapiens
  misc_RNA (1)...(19): siRNA sense strand
caagagccaaaccgauaua

SEQ ID NO: 1218738 - RNA, 19 nt, Homo sapiens
  misc_RNA (1)...(19): siRNA sense strand
guaggaagcguagcaguau

SEQ ID NO: 1218739 - RNA, 19 nt, Homo sapiens
  misc_RNA (1)...(19): siRNA sense strand
caaacuggaagcaauguau

SEQ ID NO: 1218740 - RNA, 19 nt, Homo sapiens
  misc_RNA (1)...(19): siRNA sense strand
gagccaaaccgauauagag

SEQ ID NO: 1218741 - RNA, 19 nt, Homo sapiens
  misc_RNA (1)...(19): siRNA sense strand
acagcgagcuccuggacaa

SEQ ID NO: 1218742 - RNA, 19 nt, Homo sapiens
  misc_RNA (1)...(19): siRNA sense strand
guucaucagcuuucuaaug

SEQ ID NO: 1218743 - RNA, 19 nt, Homo sapiens
  misc_RNA (1)...(19): siRNA sense strand
ggagagagagaaacugaag

SEQ ID NO: 1218744 - RNA, 19 nt, Homo sapiens
  misc_RNA (1)...(19): siRNA sense strand
ucauauugcccauaaaguu

SEQ ID NO: 1218745 - RNA, 19 nt, Homo sapiens
  misc_RNA (1)...(19): siRNA sense strand
ugugucauauugcccauaa

SEQ ID NO: 1218746 - RNA, 19 nt, Homo sapiens
  misc_RNA (1)...(19): siRNA sense strand
agacacgaguuccauuaug

SEQ ID NO: 1218747 - RNA, 19 nt, Homo sapiens
  misc_RNA (1)...(19): siRNA sense strand
aaacuucgccaccacagaa

SEQ ID NO: 1218748 - RNA, 19 nt, Homo sapiens
  misc_RNA (1)...(19): siRNA sense strand
gaguggguaucgaaacuuc

SEQ ID NO: 1218749 - RNA, 19 nt, Homo sapiens
  misc_RNA (1)...(19): siRNA sense strand
ucucagugaugucuguaaa

SEQ ID NO: 1218750 - RNA, 19 nt, Homo sapiens
  misc_RNA (1)...(19): siRNA sense strand
gcgaagucccggagaagaa

SEQ ID NO: 1218751 - RNA, 19 nt, Homo sapiens
  misc_RNA (1)...(19): siRNA sense strand
uaggaagcguagcaguaua

SEQ ID NO: 1218752 - RNA, 19 nt, Homo sapiens
  misc_RNA (1)...(19): siRNA sense strand
cacagaauguaucgucaga

SEQ ID NO: 1218753 - RNA, 19 nt, Homo sapiens
  misc_RNA (1)...(19): siRNA sense strand
aaacgagauuucugaugau

SEQ ID NO: 1218754 - RNA, 19 nt, Homo sapiens
  misc_RNA (1)...(19): siRNA sense strand
gcggagagagagaaacuga

SEQ ID NO: 1218755 - RNA, 19 nt, Homo sapiens
  misc_RNA (1)...(19): siRNA sense strand
ggagccaccaguucagaaa

SEQ ID NO: 1218756 - RNA, 19 nt, Homo sapiens
  misc_RNA (1)...(19): siRNA sense strand
caaaaugcauagaccuuga

SEQ ID NO: 1218757 - RNA, 19 nt, Homo sapiens
  misc_RNA (1)...(19): siRNA sense strand
ucacugacucccuuucuga

SEQ ID NO: 1218758 - RNA, 19 nt, Homo sapiens
  misc_RNA (1)...(19): siRNA sense strand
gagacacgaguuccauuau

SEQ ID NO: 1218759 - RNA, 19 nt, Homo sapiens
  misc_RNA (1)...(19): siRNA sense strand
ggucaagucagaagaaguc

SEQ ID NO: 1218760 - RNA, 19 nt, Homo sapiens
  misc_RNA (1)...(19): siRNA sense strand
ucaggaaguucuguuaucu

SEQ ID NO: 1218761 - RNA, 19 nt, Homo sapiens
  misc_RNA (1)...(19): siRNA sense strand
ccuaauuugucaacacuag

SEQ ID NO: 1218762 - RNA, 19 nt, Homo sapiens
  misc_RNA (1)...(19): siRNA sense strand
gaaacuucgccaccacaga

SEQ ID NO: 1218763 - RNA, 19 nt, Homo sapiens
  misc_RNA (1)...(19): siRNA sense strand
gaugucgggcucucaguga

SEQ ID NO: 1218764 - RNA, 19 nt, Homo sapiens
  misc_RNA (1)...(19): siRNA sense strand
aaauugguaucaccuucaa

SEQ ID NO: 1218765 - RNA, 19 nt, Homo sapiens
  misc_RNA (1)...(19): siRNA sense strand
gauuucugaugaugacuca

SEQ ID NO: 1218766 - RNA, 19 nt, Homo sapiens
  misc_RNA (1)...(19): siRNA sense strand
caucacagacucuucaucu

SEQ ID NO: 1218767 - RNA, 19 nt, Homo sapiens
  misc_RNA (1)...(19): siRNA sense strand
gcacaaguagcugcucuuc

SEQ ID NO: 1218768 - RNA, 19 nt, Homo sapiens
  misc_RNA (1)...(19): siRNA sense strand
gaagucaucaaaaugcaua

SEQ ID NO: 1218769 - RNA, 19 nt, Homo sapiens
  misc_RNA (1)...(19): siRNA sense strand
cgagauuucugaugaugac

SEQ ID NO: 1218770 - RNA, 19 nt, Homo sapiens
  misc_RNA (1)...(19): siRNA sense strand
aagcguagcaguauaucaa

SEQ ID NO: 1218771 - RNA, 19 nt, Homo sapiens
  misc_RNA (1)...(19): siRNA sense strand
gcucaggaaguucuguuau

SEQ ID NO: 1218772 - RNA, 19 nt, Homo sapiens
  misc_RNA (1)...(19): siRNA sense strand
agugaugucuguaaagaag

SEQ ID NO: 1218773 - RNA, 19 nt, Homo sapiens
  misc_RNA (1)...(19): siRNA sense strand
ucaaggagcacaaguagcu

SEQ ID NO: 1218774 - RNA, 19 nt, Homo sapiens
  misc_RNA (1)...(19): siRNA sense strand
cauuaugguuacagucuuc

SEQ ID NO: 1218775 - RNA, 19 nt, Homo sapiens
  misc_RNA (1)...(19): siRNA sense strand
ccaagagccaaaccgauau

SEQ ID NO: 1218776 - RNA, 19 nt, Homo sapiens
  misc_RNA (1)...(19): siRNA sense strand
guagcaguauaucaaagca

SEQ ID NO: 1218777 - RNA, 19 nt, Homo sapiens
  misc_RNA (1)...(19): siRNA sense strand
ugaagaacgcccugucauc

SEQ ID NO: 1218778 - RNA, 19 nt, Homo sapiens
  misc_RNA (1)...(19): siRNA sense strand
gaugagugaugagaagaac

SEQ ID NO: 1218779 - RNA, 19 nt, Homo sapiens
  misc_RNA (1)...(19): siRNA sense strand
gaaaaccgagcucuaguuc

SEQ ID NO: 1218780 - RNA, 19 nt, Homo sapiens
  misc_RNA (1)...(19): siRNA sense strand
gaagcguagcaguauauca

SEQ ID NO: 1218781 - RNA, 19 nt, Homo sapiens
  misc_RNA (1)...(19): siRNA sense strand
gaaacugaagcagcugaug

SEQ ID NO: 1218782 - RNA, 19 nt, Homo sapiens
  misc_RNA (1)...(19): siRNA sense strand
aaagaggaaguggcccuua

SEQ ID NO: 1218783 - RNA, 19 nt, Homo sapiens
  misc_RNA (1)...(19): siRNA sense strand
aguaggaagcguagcagua

SEQ ID NO: 1218784 - RNA, 19 nt, Homo sapiens
  misc_RNA (1)...(19): siRNA sense strand
uaguucaucagcuuucuaa

SEQ ID NO: 1218785 - RNA, 19 nt, Homo sapiens
  misc_RNA (1)...(19): siRNA sense strand
ggucauuggucugaagaac

SEQ ID NO: 1218786 - RNA, 19 nt, Homo sapiens
  misc_RNA (1)...(19): siRNA sense strand
gcguagcaguauaucaaag

SEQ ID NO: 1218787 - RNA, 19 nt, Homo sapiens
  misc_RNA (1)...(19): siRNA sense strand
ccgagcagcaguaacauca

SEQ ID NO: 1218788 - RNA, 19 nt, Homo sapiens
  misc_RNA (1)...(19): siRNA sense strand
aaaguagacucuccaucac

SEQ ID NO: 1218789 - RNA, 19 nt, Homo sapiens
  misc_RNA (1)...(19): siRNA sense strand
gaagugguggaaggacuga

SEQ ID NO: 1218790 - RNA, 19 nt, Homo sapiens
  misc_RNA (1)...(19): siRNA sense strand
gcucuaguucaucagcuuu

SEQ ID NO: 1218791 - RNA, 19 nt, Homo sapiens
  misc_RNA (1)...(19): siRNA sense strand
cuguaaagaagucaucaaa

SEQ ID NO: 1218792 - RNA, 19 nt, Homo sapiens
  misc_RNA (1)...(19): siRNA sense strand
cauaagugauaaucuuucc

SEQ ID NO: 1218793 - RNA, 19 nt, Homo sapiens
  misc_RNA (1)...(19): siRNA sense strand
agaggaaguggcccuuaaa

SEQ ID NO: 1218794 - RNA, 19 nt, Homo sapiens
  misc_RNA (1)...(19): siRNA sense strand
gguguuugacuccauuuca

SEQ ID NO: 1218795 - RNA, 19 nt, Homo sapiens
  misc_RNA (1)...(19): siRNA sense strand
acaccgaggagcacaucua

SEQ ID NO: 1218796 - RNA, 19 nt, Homo sapiens
  misc_RNA (1)...(19): siRNA sense strand
ucacuuuaaggucagcuuu

SEQ ID NO: 1218797 - RNA, 19 nt, Homo sapiens
  misc_RNA (1)...(19): siRNA sense strand
ucuaccaucugaaggucaa

SEQ ID NO: 1218798 - RNA, 19 nt, Homo sapiens
  misc_RNA (1)...(19): siRNA sense strand
ccaugccgguggagcugaa

SEQ ID NO: 1218799 - RNA, 19 nt, Homo sapiens
  misc_RNA (1)...(19): siRNA sense strand
cucaggaaguucuguuauc

SEQ ID NO: 1218800 - RNA, 19 nt, Homo sapiens
  misc_RNA (1)...(19): siRNA sense strand
ucaaacuggaagcaaugua

SEQ ID NO: 1218801 - RNA, 19 nt, Homo sapiens
  misc_RNA (1)...(19): siRNA sense strand
ucaaguaggaagcguagca

SEQ ID NO: 1218802 - RNA, 19 nt, Homo sapiens
  misc_RNA (1)...(19): siRNA sense strand
gaauuacuucuucgacaua

SEQ ID NO: 1218803 - RNA, 19 nt, Homo sapiens
  misc_RNA (1)...(19): siRNA sense strand
agaaacaguugugcucuuu

SEQ ID NO: 1218804 - RNA, 19 nt, Homo sapiens
  misc_RNA (1)...(19): siRNA sense strand
uaacaaggccacugaagau

SEQ ID NO: 1218805 - RNA, 19 nt, Homo sapiens
  misc_RNA (1)...(19): siRNA sense strand
augcagaccucaaugauga

SEQ ID NO: 1218806 - RNA, 19 nt, Homo sapiens
  misc_RNA (1)...(19): siRNA sense strand
ccacugaagaugaguacua

SEQ ID NO: 1218807 - RNA, 19 nt, Homo sapiens
  misc_RNA (1)...(19): siRNA sense strand
agccagaacugcagaagaa

SEQ ID NO: 1218808 - RNA, 19 nt, Homo sapiens
  misc_RNA (1)...(19): siRNA sense strand
gaggugggccgaaccauau

SEQ ID NO: 1218809 - RNA, 19 nt, Homo sapiens
  misc_RNA (1)...(19): siRNA sense strand
ggacaccugugccuuccau

SEQ ID NO: 1218810 - RNA, 19 nt, Homo sapiens
  misc_RNA (1)...(19): siRNA sense strand
aaucgaggguggcaucuau

SEQ ID NO: 1218811 - RNA, 19 nt, Homo sapiens
  misc_RNA (1)...(19): siRNA sense strand
ugaauuacuucuucgacau

SEQ ID NO: 1218812 - RNA, 19 nt, Homo sapiens
  misc_RNA (1)...(19): siRNA sense strand
gcccuucacuuugucauca

SEQ ID NO: 1218813 - RNA, 19 nt, Homo sapiens
  misc_RNA (1)...(19): siRNA sense strand
cgaaccauauguaccaagu

SEQ ID NO: 1218814 - RNA, 19 nt, Homo sapiens
  misc_RNA (1)...(19): siRNA sense strand
guugugcucuuuccagauc

SEQ ID NO: 1218815 - RNA, 19 nt, Homo sapiens
  misc_RNA (1)...(19): siRNA sense strand
caaggccacugaagaugag

SEQ ID NO: 1218816 - RNA, 19 nt, Homo sapiens
  misc_RNA (1)...(19): siRNA sense strand
gaugcagaccucaaugaug

SEQ ID NO: 1218817 - RNA, 19 nt, Homo sapiens
  misc_RNA (1)...(19): siRNA sense strand
ccaggaggaggacaggaua

SEQ ID NO: 1218818 - RNA, 19 nt, Homo sapiens
  misc_RNA (1)...(19): siRNA sense strand
gaauuccaggugucaagaa

SEQ ID NO: 1218819 - RNA, 19 nt, Homo sapiens
  misc_RNA (1)...(19): siRNA sense strand
cagcgugcccuucacuuug

SEQ ID NO: 1218820 - RNA, 19 nt, Homo sapiens
  misc_RNA (1)...(19): siRNA sense strand
acaaggccacugaagauga

SEQ ID NO: 1218821 - RNA, 19 nt, Homo sapiens
  misc_RNA (1)...(19): siRNA sense strand
agaggugggccgaaccaua

SEQ ID NO: 1218822 - RNA, 19 nt, Homo sapiens
  misc_RNA (1)...(19): siRNA sense strand
caucagcgaguauaacaag

SEQ ID NO: 1218823 - RNA, 19 nt, Homo sapiens
  misc_RNA (1)...(19): siRNA sense strand
gaggaggacaggauaaucg

SEQ ID NO: 1218824 - RNA, 19 nt, Homo sapiens
  misc_RNA (1)...(19): siRNA sense strand
cagaaugucccuggugaau

SEQ ID NO: 1218825 - RNA, 19 nt, Homo sapiens
  misc_RNA (1)...(19): siRNA sense strand
auaacaaggccacugaaga

SEQ ID NO: 1218826 - RNA, 19 nt, Homo sapiens
  misc_RNA (1)...(19): siRNA sense strand
ugaagaugaguacuacaga

SEQ ID NO: 1218827 - RNA, 19 nt, Homo sapiens
  misc_RNA (1)...(19): siRNA sense strand
ggaggaggacaggauaauc

SEQ ID NO: 1218828 - RNA, 19 nt, Homo sapiens
  misc_RNA (1)...(19): siRNA sense strand
cagaacugcagaagaaaca

SEQ ID NO: 1218829 - RNA, 19 nt, Homo sapiens
  misc_RNA (1)...(19): siRNA sense strand
acagcgugcccuucacuuu

SEQ ID NO: 1218830 - RNA, 19 nt, Homo sapiens
  misc_RNA (1)...(19): siRNA sense strand
aaacaguugugcucuuucc

SEQ ID NO: 1218831 - RNA, 19 nt, Homo sapiens
  misc_RNA (1)...(19): siRNA sense strand
caccugugccuuccaugaa

SEQ ID NO: 1218832 - RNA, 19 nt, Homo sapiens
  misc_RNA (1)...(19): siRNA sense strand
guauaacaaggccacugaa

SEQ ID NO: 1218833 - RNA, 19 nt, Homo sapiens
  misc_RNA (1)...(19): siRNA sense strand
caggaggaggacaggauaa

SEQ ID NO: 1218834 - RNA, 19 nt, Homo sapiens
  misc_RNA (1)...(19): siRNA sense strand
gaagacaccuccucucaua

SEQ ID NO: 1218835 - RNA, 19 nt, Homo sapiens
  misc_RNA (1)...(19): siRNA sense strand
gaacauggacccagacaua

SEQ ID NO: 1218836 - RNA, 19 nt, Homo sapiens
  misc_RNA (1)...(19): siRNA sense strand
aaacagacauggauggaua

SEQ ID NO: 1218837 - RNA, 19 nt, Homo sapiens
  misc_RNA (1)...(19): siRNA sense strand
gggaagagcuggugagaug

SEQ ID NO: 1218838 - RNA, 19 nt, Homo sapiens
  misc_RNA (1)...(19): siRNA sense strand
gaaguguguuuaacuauga

SEQ ID NO: 1218839 - RNA, 19 nt, Homo sapiens
  misc_RNA (1)...(19): siRNA sense strand
caaacuacauuggcauuua

SEQ ID NO: 1218840 - RNA, 19 nt, Homo sapiens
  misc_RNA (1)...(19): siRNA sense strand
caaaggaagcuaaagaaua

SEQ ID NO: 1218841 - RNA, 19 nt, Homo sapiens
  misc_RNA (1)...(19): siRNA sense strand
cgaaaggaaugguuaacua

SEQ ID NO: 1218842 - RNA, 19 nt, Homo sapiens
  misc_RNA (1)...(19): siRNA sense strand
gaaagaguccaucagauuu

SEQ ID NO: 1218843 - RNA, 19 nt, Homo sapiens
  misc_RNA (1)...(19): siRNA sense strand
gaugaacucugcaggcuaa

SEQ ID NO: 1218844 - RNA, 19 nt, Homo sapiens
  misc_RNA (1)...(19): siRNA sense strand
agacauggauggauaauau

SEQ ID NO: 1218845 - RNA, 19 nt, Homo sapiens
  misc_RNA (1)...(19): siRNA sense strand
gcaauaaucuaaaccucuu

SEQ ID NO: 1218846 - RNA, 19 nt, Homo sapiens
  misc_RNA (1)...(19): siRNA sense strand
ugacuaaacuuguugaugu

SEQ ID NO: 1218847 - RNA, 19 nt, Homo sapiens
  misc_RNA (1)...(19): siRNA sense strand
gaaaggaaugguuaacuaa

SEQ ID NO: 1218848 - RNA, 19 nt, Homo sapiens
  misc_RNA (1)...(19): siRNA sense strand
gcaaagaaaccuauaaagu

SEQ ID NO: 1218849 - RNA, 19 nt, Homo sapiens
  misc_RNA (1)...(19): siRNA sense strand
ggacagcuccuaacuucua

SEQ ID NO: 1218850 - RNA, 19 nt, Homo sapiens
  misc_RNA (1)...(19): siRNA sense strand
ucaagaagaugguguggaa

SEQ ID NO: 1218851 - RNA, 19 nt, Homo sapiens
  misc_RNA (1)...(19): siRNA sense strand
ggaaacagccaguagagaa

SEQ ID NO: 1218852 - RNA, 19 nt, Homo sapiens
  misc_RNA (1)...(19): siRNA sense strand
uggcugaaaugucuucuua

SEQ ID NO: 1218853 - RNA, 19 nt, Homo sapiens
  misc_RNA (1)...(19): siRNA sense strand
caagaaguguucagcugua

SEQ ID NO: 1218854 - RNA, 19 nt, Homo sapiens
  misc_RNA (1)...(19): siRNA sense strand
ggagaagauuauacaugua

SEQ ID NO: 1218855 - RNA, 19 nt, Homo sapiens
  misc_RNA (1)...(19): siRNA sense strand
gguaacuccuugaaaguaa

SEQ ID NO: 1218856 - RNA, 19 nt, Homo sapiens
  misc_RNA (1)...(19): siRNA sense strand
aacaagagcuggacacauu

SEQ ID NO: 1218857 - RNA, 19 nt, Homo sapiens
  misc_RNA (1)...(19): siRNA sense strand
gauaaauggugcugaagga

SEQ ID NO: 1218858 - RNA, 19 nt, Homo sapiens
  misc_RNA (1)...(19): siRNA sense strand
ggaaguguguuuaacuaug

SEQ ID NO: 1218859 - RNA, 19 nt, Homo sapiens
  misc_RNA (1)...(19): siRNA sense strand
aguaaagguugcccaauua

SEQ ID NO: 1218860 - RNA, 19 nt, Homo sapiens
  misc_RNA (1)...(19): siRNA sense strand
gaaggaagcccucaagaag

SEQ ID NO: 1218861 - RNA, 19 nt, Homo sapiens
  misc_RNA (1)...(19): siRNA sense strand
uaaauaacaucaggcguuu

SEQ ID NO: 1218862 - RNA, 19 nt, Homo sapiens
  misc_RNA (1)...(19): siRNA sense strand
aaaggaagcuaaagaauac

SEQ ID NO: 1218863 - RNA, 19 nt, Homo sapiens
  misc_RNA (1)...(19): siRNA sense strand
ggaccaaccuucaacuauc

SEQ ID NO: 1218864 - RNA, 19 nt, Homo sapiens
  misc_RNA (1)...(19): siRNA sense strand
ucaaaggcuugcugauuaa

SEQ ID NO: 1218865 - RNA, 19 nt, Homo sapiens
  misc_RNA (1)...(19): siRNA sense strand
gaugaagauuucucagauu

SEQ ID NO: 1218866 - RNA, 19 nt, Homo sapiens
  misc_RNA (1)...(19): siRNA sense strand
agacuuggcuacauuuauu

SEQ ID NO: 1218867 - RNA, 19 nt, Homo sapiens
  misc_RNA (1)...(19): siRNA sense strand
gaauuuaucacucccauug

SEQ ID NO: 1218868 - RNA, 19 nt, Homo sapiens
  misc_RNA (1)...(19): siRNA sense strand
uuauguagcugaucagauu

SEQ ID NO: 1218869 - RNA, 19 nt, Homo sapiens
  misc_RNA (1)...(19): siRNA sense strand
guacaaagacaaagaaaca

SEQ ID NO: 1218870 - RNA, 19 nt, Homo sapiens
  misc_RNA (1)...(19): siRNA sense strand
gauagaugaucgaaaggaa

SEQ ID NO: 1218871 - RNA, 19 nt, Homo sapiens
  misc_RNA (1)...(19): siRNA sense strand
gauguuggcauuaacuaua

SEQ ID NO: 1218872 - RNA, 19 nt, Homo sapiens
  misc_RNA (1)...(19): siRNA sense strand
ugccaaugcuuccaaguua

SEQ ID NO: 1218873 - RNA, 19 nt, Homo sapiens
  misc_RNA (1)...(19): siRNA sense strand
gagaagaaccuuugccaau

SEQ ID NO: 1218874 - RNA, 19 nt, Homo sapiens
  misc_RNA (1)...(19): siRNA sense strand
ugucccagcucucauauuu

SEQ ID NO: 1218875 - RNA, 19 nt, Homo sapiens
  misc_RNA (1)...(19): siRNA sense strand
caaauauucugguccugaa

SEQ ID NO: 1218876 - RNA, 19 nt, Homo sapiens
  misc_RNA (1)...(19): siRNA sense strand
guaaaaggauuucguaguu

SEQ ID NO: 1218877 - RNA, 19 nt, Homo sapiens
  misc_RNA (1)...(19): siRNA sense strand
cugcuaaacugaauaauca

SEQ ID NO: 1218878 - RNA, 19 nt, Homo sapiens
  misc_RNA (1)...(19): siRNA sense strand
aaacuagucucacaugcaa

SEQ ID NO: 1218879 - RNA, 19 nt, Homo sapiens
  misc_RNA (1)...(19): siRNA sense strand
gaaauuuguugugaagaug

SEQ ID NO: 1218880 - RNA, 19 nt, Homo sapiens
  misc_RNA (1)...(19): siRNA sense strand
uagaagacaacgaaaguua

SEQ ID NO: 1218881 - RNA, 19 nt, Homo sapiens
  misc_RNA (1)...(19): siRNA sense strand
gcacaucaaaggaagcuaa

SEQ ID NO: 1218882 - RNA, 19 nt, Homo sapiens
  misc_RNA (1)...(19): siRNA sense strand
uuacagccuuccugaauuu

SEQ ID NO: 1218883 - RNA, 19 nt, Homo sapiens
  misc_RNA (1)...(19): siRNA sense strand
caagggugguguugcagua

SEQ ID NO: 1218884 - RNA, 19 nt, Homo sapiens
  misc_RNA (1)...(19): siRNA sense strand
gcugaaaugucuucuuauc

SEQ ID NO: 1218885 - RNA, 19 nt, Homo sapiens
  misc_RNA (1)...(19): siRNA sense strand
caaacuaccacauaucuga

SEQ ID NO: 1218886 - RNA, 19 nt, Homo sapiens
  misc_RNA (1)...(19): siRNA sense strand
ugagggagauucagccaaa

SEQ ID NO: 1218887 - RNA, 19 nt, Homo sapiens
  misc_RNA (1)...(19): siRNA sense strand
cgaugaagauguuggcauu

SEQ ID NO: 1218888 - RNA, 19 nt, Homo sapiens
  misc_RNA (1)...(19): siRNA sense strand
gaccaaaacuuccccaaaa

SEQ ID NO: 1218889 - RNA, 19 nt, Homo sapiens
  misc_RNA (1)...(19): siRNA sense strand
gaagaaccuuugccaaugc

SEQ ID NO: 1218890 - RNA, 19 nt, Homo sapiens
  misc_RNA (1)...(19): siRNA sense strand
gcugauaaauggugcugaa

SEQ ID NO: 1218891 - RNA, 19 nt, Homo sapiens
  misc_RNA (1)...(19): siRNA sense strand
gaaaugucuucuuaucauc

SEQ ID NO: 1218892 - RNA, 19 nt, Homo sapiens
  misc_RNA (1)...(19): siRNA sense strand
gaacucaagcccuucaaug

SEQ ID NO: 1218893 - RNA, 19 nt, Homo sapiens
  misc_RNA (1)...(19): siRNA sense strand
caccaaagaugucaaaguc

SEQ ID NO: 1218894 - RNA, 19 nt, Homo sapiens
  misc_RNA (1)...(19): siRNA sense strand
gaagacuuggcuacauuua

SEQ ID NO: 1218895 - RNA, 19 nt, Homo sapiens
  misc_RNA (1)...(19): siRNA sense strand
uuacaaugcucagcucuuu

SEQ ID NO: 1218896 - RNA, 19 nt, Homo sapiens
  misc_RNA (1)...(19): siRNA sense strand
guauuagagucacaauuga

SEQ ID NO: 1218897 - RNA, 19 nt, Homo sapiens
  misc_RNA (1)...(19): siRNA sense strand
cgaaagcagucacaagcaa

SEQ ID NO: 1218898 - RNA, 19 nt, Homo sapiens
  misc_RNA (1)...(19): siRNA sense strand
cgaauaaccauagaaauga

SEQ ID NO: 1218899 - RNA, 19 nt, Homo sapiens
  misc_RNA (1)...(19): siRNA sense strand
cacguaggcuguuuaaaga

SEQ ID NO: 1218900 - RNA, 19 nt, Homo sapiens
  misc_RNA (1)...(19): siRNA sense strand
caaggguacuauugaagaa

SEQ ID NO: 1218901 - RNA, 19 nt, Homo sapiens
  misc_RNA (1)...(19): siRNA sense strand
acagauagaugaucgaaag

SEQ ID NO: 1218902 - RNA, 19 nt, Homo sapiens
  misc_RNA (1)...(19): siRNA sense strand
guagaaagcauacuaaacu

SEQ ID NO: 1218903 - RNA, 19 nt, Homo sapiens
  misc_RNA (1)...(19): siRNA sense strand
uggcagacauguugauuau

SEQ ID NO: 1218904 - RNA, 19 nt, Homo sapiens
  misc_RNA (1)...(19): siRNA sense strand
gaaauuacaaacccaguuc

SEQ ID NO: 1218905 - RNA, 19 nt, Homo sapiens
  misc_RNA (1)...(19): siRNA sense strand
gguguuggauauucuaaga

SEQ ID NO: 1218906 - RNA, 19 nt, Homo sapiens
  misc_RNA (1)...(19): siRNA sense strand
gaacuucaaggguacuauu

SEQ ID NO: 1218907 - RNA, 19 nt, Homo sapiens
  misc_RNA (1)...(19): siRNA sense strand
ccagacaccuacauugguu

SEQ ID NO: 1218908 - RNA, 19 nt, Homo sapiens
  misc_RNA (1)...(19): siRNA sense strand
caaauuuacuguggaaaca

SEQ ID NO: 1218909 - RNA, 19 nt, Homo sapiens
  misc_RNA (1)...(19): siRNA sense strand
gaacucugcaggcuaagaa

SEQ ID NO: 1218910 - RNA, 19 nt, Homo sapiens
  misc_RNA (1)...(19): siRNA sense strand
gaagagagugacaacgaaa

SEQ ID NO: 1218911 - RNA, 19 nt, Homo sapiens
  misc_RNA (1)...(19): siRNA sense strand
ggugaaguagcuauucuua

SEQ ID NO: 1218912 - RNA, 19 nt, Homo sapiens
  misc_RNA (1)...(19): siRNA sense strand
aaauguggguuuacgauga

SEQ ID NO: 1218913 - RNA, 19 nt, Homo sapiens
  misc_RNA (1)...(19): siRNA sense strand
gaggauagaagacaacgaa

SEQ ID NO: 1218914 - RNA, 19 nt, Homo sapiens
  misc_RNA (1)...(19): siRNA sense strand
caaacucgaugaugccaau

SEQ ID NO: 1218915 - RNA, 19 nt, Homo sapiens
  misc_RNA (1)...(19): siRNA sense strand
caacaugccaauugaguga

SEQ ID NO: 1218916 - RNA, 19 nt, Homo sapiens
  misc_RNA (1)...(19): siRNA sense strand
cugaucagauugugacuaa

SEQ ID NO: 1218917 - RNA, 19 nt, Homo sapiens
  misc_RNA (1)...(19): siRNA sense strand
caaagauauuguugcacua

SEQ ID NO: 1218918 - RNA, 19 nt, Homo sapiens
  misc_RNA (1)...(19): siRNA sense strand
uggagaagauuauacaugu

SEQ ID NO: 1218919 - RNA, 19 nt, Homo sapiens
  misc_RNA (1)...(19): siRNA sense strand
aaacacaaauggcugaagu

SEQ ID NO: 1218920 - RNA, 19 nt, Homo sapiens
  misc_RNA (1)...(19): siRNA sense strand
cuacacauuucccagauga

SEQ ID NO: 1218921 - RNA, 19 nt, Homo sapiens
  misc_RNA (1)...(19): siRNA sense strand
ggagccaaauuguguaaca

SEQ ID NO: 1218922 - RNA, 19 nt, Homo sapiens
  misc_RNA (1)...(19): siRNA sense strand
gggcaaagaaaccuauaaa

SEQ ID NO: 1218923 - RNA, 19 nt, Homo sapiens
  misc_RNA (1)...(19): siRNA sense strand
caauggauuuggauucaga

SEQ ID NO: 1218924 - RNA, 19 nt, Homo sapiens
  misc_RNA (1)...(19): siRNA sense strand
aagaagacuuggcuacauu

SEQ ID NO: 1218925 - RNA, 19 nt, Homo sapiens
  misc_RNA (1)...(19): siRNA sense strand
caucagauuuguggaaaga

SEQ ID NO: 1218926 - RNA, 19 nt, Homo sapiens
  misc_RNA (1)...(19): siRNA sense strand
agaaagaguccaucagauu

SEQ ID NO: 1218927 - RNA, 19 nt, Homo sapiens
  misc_RNA (1)...(19): siRNA sense strand
cuacauugguucuguggaa

SEQ ID NO: 1218928 - RNA, 19 nt, Homo sapiens
  misc_RNA (1)...(19): siRNA sense strand
aagaauggcuccuaggaau

SEQ ID NO: 1218929 - RNA, 19 nt, Homo sapiens
  misc_RNA (1)...(19): siRNA sense strand
aaguaaagguugcccaauu

SEQ ID NO: 1218930 - RNA, 19 nt, Homo sapiens
  misc_RNA (1)...(19): siRNA sense strand
gaaugacaagcgagaagua

SEQ ID NO: 1218931 - RNA, 19 nt, Homo sapiens
  misc_RNA (1)...(19): siRNA sense strand
gaaaccaggucagagaaag

SEQ ID NO: 1218932 - RNA, 19 nt, Homo sapiens
  misc_RNA (1)...(19): siRNA sense strand
gcuaucagccuggccuuua

SEQ ID NO: 1218933 - RNA, 19 nt, Homo sapiens
  misc_RNA (1)...(19): siRNA sense strand
ggaagagucagaugaagau

SEQ ID NO: 1218934 - RNA, 19 nt, Homo sapiens
  misc_RNA (1)...(19): siRNA sense strand
gaagaucugugucauauug

SEQ ID NO: 1218935 - RNA, 19 nt, Homo sapiens
  misc_RNA (1)...(19): siRNA sense strand
gaaugaaauugccauguuu

SEQ ID NO: 1218936 - RNA, 19 nt, Homo sapiens
  misc_RNA (1)...(19): siRNA sense strand
agaagaagcugaaauacaa

SEQ ID NO: 1218937 - RNA, 19 nt, Homo sapiens
  misc_RNA (1)...(19): siRNA sense strand
gaaaguagacucuccauca

SEQ ID NO: 1218938 - RNA, 19 nt, Homo sapiens
  misc_RNA (1)...(19): siRNA sense strand
ucaagaaccugcaugauga

SEQ ID NO: 1218939 - RNA, 19 nt, Homo sapiens
  misc_RNA (1)...(19): siRNA sense strand
gcaaauccauggaaauugu

SEQ ID NO: 1218940 - RNA, 19 nt, Homo sapiens
  misc_RNA (1)...(19): siRNA sense strand
ggacaagggcuuccaguuu

SEQ ID NO: 1218941 - RNA, 19 nt, Homo sapiens
  misc_RNA (1)...(19): siRNA sense strand
gagcacaucuaccaucuga

SEQ ID NO: 1218942 - RNA, 19 nt, Homo sapiens
  misc_RNA (1)...(19): siRNA sense strand
ggaacaaagugaccucuug

SEQ ID NO: 1218943 - RNA, 19 nt, Homo sapiens
  misc_RNA (1)...(19): siRNA sense strand
gaauguaucgucagaauga

SEQ ID NO: 1218944 - RNA, 19 nt, Homo sapiens
  misc_RNA (1)...(19): siRNA sense strand
ggacaaaggaaucuugaaa

SEQ ID NO: 1218945 - RNA, 19 nt, Homo sapiens
  misc_RNA (1)...(19): siRNA sense strand
gugauaaucuuuccuuaga

SEQ ID NO: 1218946 - RNA, 19 nt, Homo sapiens
  misc_RNA (1)...(19): siRNA sense strand
gaaguucuguuaucuccaa

SEQ ID NO: 1218947 - RNA, 19 nt, Homo sapiens
  misc_RNA (1)...(19): siRNA sense strand
gaagggaacuuagaagaag

SEQ ID NO: 1218948 - RNA, 19 nt, Homo sapiens
  misc_RNA (1)...(19): siRNA sense strand
gaacuuagaagaagcugaa

SEQ ID NO: 1218949 - RNA, 19 nt, Homo sapiens
  misc_RNA (1)...(19): siRNA sense strand
gaacaacugcagagagaaa

SEQ ID NO: 1218950 - RNA, 19 nt, Homo sapiens
  misc_RNA (1)...(19): siRNA sense strand
gaagcgaagucccggagaa

SEQ ID NO: 1218951 - RNA, 19 nt, Homo sapiens
  misc_RNA (1)...(19): siRNA sense strand
gcgcuggaauuaaaugaaa

SEQ ID NO: 1218952 - RNA, 19 nt, Homo sapiens
  misc_RNA (1)...(19): siRNA sense strand
gagagauugucaucaagaa

SEQ ID NO: 1218953 - RNA, 19 nt, Homo sapiens
  misc_RNA (1)...(19): siRNA sense strand
ggaagggaacuuagaagaa

SEQ ID NO: 1218954 - RNA, 19 nt, Homo sapiens
  misc_RNA (1)...(19): siRNA sense strand
agaaugaaauugccauguu

SEQ ID NO: 1218955 - RNA, 19 nt, Homo sapiens
  misc_RNA (1)...(19): siRNA sense strand
ucuccaagcucuucagaaa

SEQ ID NO: 1218956 - RNA, 19 nt, Homo sapiens
  misc_RNA (1)...(19): siRNA sense strand
gccaagagccaaaccgaua

SEQ ID NO: 1218957 - RNA, 19 nt, Homo sapiens
  misc_RNA (1)...(19): siRNA sense strand
gcuggaagcaagccauuua

SEQ ID NO: 1218958 - RNA, 19 nt, Homo sapiens
  misc_RNA (1)...(19): siRNA sense strand
aagaagaucugugucauau

SEQ ID NO: 1218959 - RNA, 19 nt, Homo sapiens
  misc_RNA (1)...(19): siRNA sense strand
caagaagaucugugucaua

SEQ ID NO: 1218960 - RNA, 19 nt, Homo sapiens
  misc_RNA (1)...(19): siRNA sense strand
gcaauacuauagcuucaca

SEQ ID NO: 1218961 - RNA, 19 nt, Homo sapiens
  misc_RNA (1)...(19): siRNA sense strand
ccaaaccgauauagagaga

SEQ ID NO: 1218962 - RNA, 19 nt, Homo sapiens
  misc_RNA (1)...(19): siRNA sense strand
caacggcaccuauuuggaa

SEQ ID NO: 1218963 - RNA, 19 nt, Homo sapiens
  misc_RNA (1)...(19): siRNA sense strand
ggaaauggcaugaaagcau

SEQ ID NO: 1218964 - RNA, 19 nt, Homo sapiens
  misc_RNA (1)...(19): siRNA sense strand
gcgaggagcuggaguacag

SEQ ID NO: 1218965 - RNA, 19 nt, Homo sapiens
  misc_RNA (1)...(19): siRNA sense strand
cagaauguaucgucagaau

SEQ ID NO: 1218966 - RNA, 19 nt, Homo sapiens
  misc_RNA (1)...(19): siRNA sense strand
gagcaauacuauagcuuca

SEQ ID NO: 1218967 - RNA, 19 nt, Homo sapiens
  misc_RNA (1)...(19): siRNA sense strand
aaaccgagcucuaguucau

SEQ ID NO: 1218968 - RNA, 19 nt, Homo sapiens
  misc_RNA (1)...(19): siRNA sense strand
gcaagaagaucugugucau

SEQ ID NO: 1218969 - RNA, 19 nt, Homo sapiens
  misc_RNA (1)...(19): siRNA sense strand
gcaccuauuuggaacuuag

SEQ ID NO: 1218970 - RNA, 19 nt, Homo sapiens
  misc_RNA (1)...(19): siRNA sense strand
gcagaggauugaacaacug

SEQ ID NO: 1218971 - RNA, 19 nt, Homo sapiens
  misc_RNA (1)...(19): siRNA sense strand
gcaaaauacuggagcacua

SEQ ID NO: 1218972 - RNA, 19 nt, Homo sapiens
  misc_RNA (1)...(19): siRNA sense strand
gacaagggcuuccaguuuu

SEQ ID NO: 1218973 - RNA, 19 nt, Homo sapiens
  misc_RNA (1)...(19): siRNA sense strand
ggaacaacaucgggaagga

SEQ ID NO: 1218974 - RNA, 19 nt, Homo sapiens
  misc_RNA (1)...(19): siRNA sense strand
gaaggucaagucagaagaa

SEQ ID NO: 1218975 - RNA, 19 nt, Homo sapiens
  misc_RNA (1)...(19): siRNA sense strand
gagaagaaccuuggugugu

SEQ ID NO: 1218976 - RNA, 19 nt, Homo sapiens
  misc_RNA (1)...(19): siRNA sense strand
gggcaaauccauggaaauu

SEQ ID NO: 1218977 - RNA, 19 nt, Homo sapiens
  misc_RNA (1)...(19): siRNA sense strand
ggaagcaagccauuuaauc

SEQ ID NO: 1218978 - RNA, 19 nt, Homo sapiens
  misc_RNA (1)...(19): siRNA sense strand
gcacuaaugcccaugagau

SEQ ID NO: 1218979 - RNA, 19 nt, Homo sapiens
  misc_RNA (1)...(19): siRNA sense strand
gagcaacggcaccuauuug

SEQ ID NO: 1218980 - RNA, 19 nt, Homo sapiens
  misc_RNA (1)...(19): siRNA sense strand
acaaguagcugcucuucca

SEQ ID NO: 1218981 - RNA, 19 nt, Homo sapiens
  misc_RNA (1)...(19): siRNA sense strand
uugcauccauaacaucuua

SEQ ID NO: 1218982 - RNA, 19 nt, Homo sapiens
  misc_RNA (1)...(19): siRNA sense strand
ucagugaugucuguaaaga

SEQ ID NO: 1218983 - RNA, 19 nt, Homo sapiens
  misc_RNA (1)...(19): siRNA sense strand
cuuagaagaagcugaaaua

SEQ ID NO: 1218984 - RNA, 19 nt, Homo sapiens
  misc_RNA (1)...(19): siRNA sense strand
ucagugacauaagugauaa

SEQ ID NO: 1218985 - RNA, 19 nt, Homo sapiens
  misc_RNA (1)...(19): siRNA sense strand
cauauugcccauaaaguuu

SEQ ID NO: 1218986 - RNA, 19 nt, Homo sapiens
  misc_RNA (1)...(19): siRNA sense strand
aagaggaaguggcccuuaa

SEQ ID NO: 1218987 - RNA, 19 nt, Homo sapiens
  misc_RNA (1)...(19): siRNA sense strand
gcacaucuaccaucugaag

SEQ ID NO: 1218988 - RNA, 19 nt, Homo sapiens
  misc_RNA (1)...(19): siRNA sense strand
uuaaaaggcuggcauaaga

SEQ ID NO: 1218989 - RNA, 19 nt, Homo sapiens
  misc_RNA (1)...(19): siRNA sense strand
gaagaagcugaaauacaaa

SEQ ID NO: 1218990 - RNA, 19 nt, Homo sapiens
  misc_RNA (1)...(19): siRNA sense strand
gauugaaggcacaguguuu

SEQ ID NO: 1218991 - RNA, 19 nt, Homo sapiens
  misc_RNA (1)...(19): siRNA sense strand
ggagagauugucaucaaga

SEQ ID NO: 1218992 - RNA, 19 nt, Homo sapiens
  misc_RNA (1)...(19): siRNA sense strand
aaaccgauauagagagaga

SEQ ID NO: 1218993 - RNA, 19 nt, Homo sapiens
  misc_RNA (1)...(19): siRNA sense strand
ccagagguuucuagaggaa

SEQ ID NO: 1218994 - RNA, 19 nt, Homo sapiens
  misc_RNA (1)...(19): siRNA sense strand
agagguggauugagcacua

SEQ ID NO: 1218995 - RNA, 19 nt, Homo sapiens
  misc_RNA (1)...(19): siRNA sense strand
ggcaagaugugagauggaa

SEQ ID NO: 1218996 - RNA, 19 nt, Homo sapiens
  misc_RNA (1)...(19): siRNA sense strand
ugagacacgaguuccauua

SEQ ID NO: 1218997 - RNA, 19 nt, Homo sapiens
  misc_RNA (1)...(19): siRNA sense strand
agacuacacuccuccaauc

SEQ ID NO: 1218998 - RNA, 19 nt, Homo sapiens
  misc_RNA (1)...(19): siRNA sense strand
gaaauccgacgaugacucu

SEQ ID NO: 1218999 - RNA, 19 nt, Homo sapiens
  misc_RNA (1)...(19): siRNA sense strand
aaaacgagauuucugauga

SEQ ID NO: 1219000 - RNA, 19 nt, Homo sapiens
  misc_RNA (1)...(19): siRNA sense strand
cuacacuccuccaauccua

SEQ ID NO: 1219001 - RNA, 19 nt, Homo sapiens
  misc_RNA (1)...(19): siRNA sense strand
caugcugagucuagaaauu

SEQ ID NO: 1219002 - RNA, 19 nt, Homo sapiens
  misc_RNA (1)...(19): siRNA sense strand
gaagcaagccauuuaaucc

SEQ ID NO: 1219003 - RNA, 19 nt, Homo sapiens
  misc_RNA (1)...(19): siRNA sense strand
caagagccaaaccgauaua

SEQ ID NO: 1219004 - RNA, 19 nt, Homo sapiens
  misc_RNA (1)...(19): siRNA sense strand
gacaaaggaaucuugaaau

SEQ ID NO: 1219005 - RNA, 19 nt, Homo sapiens
  misc_RNA (1)...(19): siRNA sense strand
uacuauagcuucacacagu

SEQ ID NO: 1219006 - RNA, 19 nt, Homo sapiens
  misc_RNA (1)...(19): siRNA sense strand
guaggaagcguagcaguau

SEQ ID NO: 1219007 - RNA, 19 nt, Homo sapiens
  misc_RNA (1)...(19): siRNA sense strand
cgaaaggcuacgagcaaua

SEQ ID NO: 1219008 - RNA, 19 nt, Homo sapiens
  misc_RNA (1)...(19): siRNA sense strand
caaauccuaugccgaaagg

SEQ ID NO: 1219009 - RNA, 19 nt, Homo sapiens
  misc_RNA (1)...(19): siRNA sense strand
caaacuggaagcaauguau

SEQ ID NO: 1219010 - RNA, 19 nt, Homo sapiens
  misc_RNA (1)...(19): siRNA sense strand
gaguggguaucgaaacuuc

SEQ ID NO: 1219011 - RNA, 19 nt, Homo sapiens
  misc_RNA (1)...(19): siRNA sense strand
uugaacaacugcagagaga

SEQ ID NO: 1219012 - RNA, 19 nt, Homo sapiens
  misc_RNA (1)...(19): siRNA sense strand
gaaccugcaugaugauucc

SEQ ID NO: 1219013 - RNA, 19 nt, Homo sapiens
  misc_RNA (1)...(19): siRNA sense strand
acagcgagcuccuggacaa

SEQ ID NO: 1219014 - RNA, 19 nt, Homo sapiens
  misc_RNA (1)...(19): siRNA sense strand
guucaucagcuuucuaaug

SEQ ID NO: 1219015 - RNA, 19 nt, Homo sapiens
  misc_RNA (1)...(19): siRNA sense strand
ggagagagagaaacugaag

SEQ ID NO: 1219016 - RNA, 19 nt, Homo sapiens
  misc_RNA (1)...(19): siRNA sense strand
ucauauugcccauaaaguu

SEQ ID NO: 1219017 - RNA, 19 nt, Homo sapiens
  misc_RNA (1)...(19): siRNA sense strand
ugugucauauugcccauaa

SEQ ID NO: 1219018 - RNA, 19 nt, Homo sapiens
  misc_RNA (1)...(19): siRNA sense strand
gagccaaaccgauauagag

SEQ ID NO: 1219019 - RNA, 19 nt, Homo sapiens
  misc_RNA (1)...(19): siRNA sense strand
agacacgaguuccauuaug

SEQ ID NO: 1219020 - RNA, 19 nt, Homo sapiens
  misc_RNA (1)...(19): siRNA sense strand
aaacuucgccaccacagaa

SEQ ID NO: 1219021 - RNA, 19 nt, Homo sapiens
  misc_RNA (1)...(19): siRNA sense strand
ucucagugaugucuguaaa

SEQ ID NO: 1219022 - RNA, 19 nt, Homo sapiens
  misc_RNA (1)...(19): siRNA sense strand
gaaaggcuacgagcaauac

SEQ ID NO: 1219023 - RNA, 19 nt, Homo sapiens
  misc_RNA (1)...(19): siRNA sense strand
gcgaagucccggagaagaa

SEQ ID NO: 1219024 - RNA, 19 nt, Homo sapiens
  misc_RNA (1)...(19): siRNA sense strand
uaggaagcguagcaguaua

SEQ ID NO: 1219025 - RNA, 19 nt, Homo sapiens
  misc_RNA (1)...(19): siRNA sense strand
guauggagagcaaauccua

SEQ ID NO: 1219026 - RNA, 19 nt, Homo sapiens
  misc_RNA (1)...(19): siRNA sense strand
acuggaccauccugucuua

SEQ ID NO: 1219027 - RNA, 19 nt, Homo sapiens
  misc_RNA (1)...(19): siRNA sense strand
gcuacgagcaauacuauag

SEQ ID NO: 1219028 - RNA, 19 nt, Homo sapiens
  misc_RNA (1)...(19): siRNA sense strand
cacagaauguaucgucaga

SEQ ID NO: 1219029 - RNA, 19 nt, Homo sapiens
  misc_RNA (1)...(19): siRNA sense strand
ggagccaccaguucagaaa

SEQ ID NO: 1219030 - RNA, 19 nt, Homo sapiens
  misc_RNA (1)...(19): siRNA sense strand
ugagcacuauggagagauu

SEQ ID NO: 1219031 - RNA, 19 nt, Homo sapiens
  misc_RNA (1)...(19): siRNA sense strand
aaacgagauuucugaugau

SEQ ID NO: 1219032 - RNA, 19 nt, Homo sapiens
  misc_RNA (1)...(19): siRNA sense strand
gcggagagagagaaacuga

SEQ ID NO: 1219033 - RNA, 19 nt, Homo sapiens
  misc_RNA (1)...(19): siRNA sense strand
aguuugcgcuggaauuaaa

SEQ ID NO: 1219034 - RNA, 19 nt, Homo sapiens
  misc_RNA (1)...(19): siRNA sense strand
gaagaucugugucauauug

SEQ ID NO: 1219035 - RNA, 19 nt, Homo sapiens
  misc_RNA (1)...(19): siRNA sense strand
gaaugaaauugccauguuu

SEQ ID NO: 1219036 - RNA, 19 nt, Homo sapiens
  misc_RNA (1)...(19): siRNA sense strand
agaagaagcugaaauacaa

SEQ ID NO: 1219037 - RNA, 19 nt, Homo sapiens
  misc_RNA (1)...(19): siRNA sense strand
gaaaguagacucuccauca

SEQ ID NO: 1219038 - RNA, 19 nt, Homo sapiens
  misc_RNA (1)...(19): siRNA sense strand
ucaagaaccugcaugauga

SEQ ID NO: 1219039 - RNA, 19 nt, Homo sapiens
  misc_RNA (1)...(19): siRNA sense strand
gcaaauccauggaaauugu

SEQ ID NO: 1219040 - RNA, 19 nt, Homo sapiens
  misc_RNA (1)...(19): siRNA sense strand
ggacaagggcuuccaguuu

SEQ ID NO: 1219041 - RNA, 19 nt, Homo sapiens
  misc_RNA (1)...(19): siRNA sense strand
gagcacaucuaccaucuga

SEQ ID NO: 1219042 - RNA, 19 nt, Homo sapiens
  misc_RNA (1)...(19): siRNA sense strand
ggaacaaagugaccucuug

SEQ ID NO: 1219043 - RNA, 19 nt, Homo sapiens
  misc_RNA (1)...(19): siRNA sense strand
gaauguaucgucagaauga

SEQ ID NO: 1219044 - RNA, 19 nt, Homo sapiens
  misc_RNA (1)...(19): siRNA sense strand
ggacaaaggaaucuugaaa

SEQ ID NO: 1219045 - RNA, 19 nt, Homo sapiens
  misc_RNA (1)...(19): siRNA sense strand
gugauaaucuuuccuuaga

SEQ ID NO: 1219046 - RNA, 19 nt, Homo sapiens
  misc_RNA (1)...(19): siRNA sense strand
gaaguucuguuaucuccaa

SEQ ID NO: 1219047 - RNA, 19 nt, Homo sapiens
  misc_RNA (1)...(19): siRNA sense strand
gaagggaacuuagaagaag

SEQ ID NO: 1219048 - RNA, 19 nt, Homo sapiens
  misc_RNA (1)...(19): siRNA sense strand
gaacuuagaagaagcugaa

SEQ ID NO: 1219049 - RNA, 19 nt, Homo sapiens
  misc_RNA (1)...(19): siRNA sense strand
gaacaacugcagagagaaa

SEQ ID NO: 1219050 - RNA, 19 nt, Homo sapiens
  misc_RNA (1)...(19): siRNA sense strand
gaagcgaagucccggagaa

SEQ ID NO: 1219051 - RNA, 19 nt, Homo sapiens
  misc_RNA (1)...(19): siRNA sense strand
gcgcuggaauuaaaugaaa

SEQ ID NO: 1219052 - RNA, 19 nt, Homo sapiens
  misc_RNA (1)...(19): siRNA sense strand
gagagauugucaucaagaa

SEQ ID NO: 1219053 - RNA, 19 nt, Homo sapiens
  misc_RNA (1)...(19): siRNA sense strand
ggaagggaacuuagaagaa

SEQ ID NO: 1219054 - RNA, 19 nt, Homo sapiens
  misc_RNA (1)...(19): siRNA sense strand
agaaugaaauugccauguu

SEQ ID NO: 1219055 - RNA, 19 nt, Homo sapiens
  misc_RNA (1)...(19): siRNA sense strand
ucuccaagcucuucagaaa

SEQ ID NO: 1219056 - RNA, 19 nt, Homo sapiens
  misc_RNA (1)...(19): siRNA sense strand
gccaagagccaaaccgaua

SEQ ID NO: 1219057 - RNA, 19 nt, Homo sapiens
  misc_RNA (1)...(19): siRNA sense strand
gcuggaagcaagccauuua

SEQ ID NO: 1219058 - RNA, 19 nt, Homo sapiens
  misc_RNA (1)...(19): siRNA sense strand
aagaagaucugugucauau

SEQ ID NO: 1219059 - RNA, 19 nt, Homo sapiens
  misc_RNA (1)...(19): siRNA sense strand
caagaagaucugugucaua

SEQ ID NO: 1219060 - RNA, 19 nt, Homo sapiens
  misc_RNA (1)...(19): siRNA sense strand
gcaauacuauagcuucaca

SEQ ID NO: 1219061 - RNA, 19 nt, Homo sapiens
  misc_RNA (1)...(19): siRNA sense strand
ccaaaccgauauagagaga

SEQ ID NO: 1219062 - RNA, 19 nt, Homo sapiens
  misc_RNA (1)...(19): siRNA sense strand
caacggcaccuauuuggaa

SEQ ID NO: 1219063 - RNA, 19 nt, Homo sapiens
  misc_RNA (1)...(19): siRNA sense strand
ggaaauggcaugaaagcau

SEQ ID NO: 1219064 - RNA, 19 nt, Homo sapiens
  misc_RNA (1)...(19): siRNA sense strand
gcgaggagcuggaguacag

SEQ ID NO: 1219065 - RNA, 19 nt, Homo sapiens
  misc_RNA (1)...(19): siRNA sense strand
cagaauguaucgucagaau

SEQ ID NO: 1219066 - RNA, 19 nt, Homo sapiens
  misc_RNA (1)...(19): siRNA sense strand
gagcaauacuauagcuuca

SEQ ID NO: 1219067 - RNA, 19 nt, Homo sapiens
  misc_RNA (1)...(19): siRNA sense strand
aaaccgagcucuaguucau

SEQ ID NO: 1219068 - RNA, 19 nt, Homo sapiens
  misc_RNA (1)...(19): siRNA sense strand
gcaagaagaucugugucau

SEQ ID NO: 1219069 - RNA, 19 nt, Homo sapiens
  misc_RNA (1)...(19): siRNA sense strand
gcaccuauuuggaacuuag

SEQ ID NO: 1219070 - RNA, 19 nt, Homo sapiens
  misc_RNA (1)...(19): siRNA sense strand
gcagaggauugaacaacug

SEQ ID NO: 1219071 - RNA, 19 nt, Homo sapiens
  misc_RNA (1)...(19): siRNA sense strand
gcaaaauacuggagcacua

SEQ ID NO: 1219072 - RNA, 19 nt, Homo sapiens
  misc_RNA (1)...(19): siRNA sense strand
gacaagggcuuccaguuuu

SEQ ID NO: 1219073 - RNA, 19 nt, Homo sapiens
  misc_RNA (1)...(19): siRNA sense strand
ggaacaacaucgggaagga

SEQ ID NO: 1219074 - RNA, 19 nt, Homo sapiens
  misc_RNA (1)...(19): siRNA sense strand
gaaggucaagucagaagaa

SEQ ID NO: 1219075 - RNA, 19 nt, Homo sapiens
  misc_RNA (1)...(19): siRNA sense strand
gagaagaaccuuggugugu

SEQ ID NO: 1219076 - RNA, 19 nt, Homo sapiens
  misc_RNA (1)...(19): siRNA sense strand
gggcaaauccauggaaauu

SEQ ID NO: 1219077 - RNA, 19 nt, Homo sapiens
  misc_RNA (1)...(19): siRNA sense strand
ggaagcaagccauuuaauc

SEQ ID NO: 1219078 - RNA, 19 nt, Homo sapiens
  misc_RNA (1)...(19): siRNA sense strand
gcacuaaugcccaugagau

SEQ ID NO: 1219079 - RNA, 19 nt, Homo sapiens
  misc_RNA (1)...(19): siRNA sense strand
gagcaacggcaccuauuug

SEQ ID NO: 1219080 - RNA, 19 nt, Homo sapiens
  misc_RNA (1)...(19): siRNA sense strand
acaaguagcugcucuucca

SEQ ID NO: 1219081 - RNA, 19 nt, Homo sapiens
  misc_RNA (1)...(19): siRNA sense strand
uugcauccauaacaucuua

SEQ ID NO: 1219082 - RNA, 19 nt, Homo sapiens
  misc_RNA (1)...(19): siRNA sense strand
ucagugaugucuguaaaga

SEQ ID NO: 1219083 - RNA, 19 nt, Homo sapiens
  misc_RNA (1)...(19): siRNA sense strand
cuuagaagaagcugaaaua

SEQ ID NO: 1219084 - RNA, 19 nt, Homo sapiens
  misc_RNA (1)...(19): siRNA sense strand
ucagugacauaagugauaa

SEQ ID NO: 1219085 - RNA, 19 nt, Homo sapiens
  misc_RNA (1)...(19): siRNA sense strand
cauauugcccauaaaguuu

SEQ ID NO: 1219086 - RNA, 19 nt, Homo sapiens
  misc_RNA (1)...(19): siRNA sense strand
aagaggaaguggcccuuaa

SEQ ID NO: 1219087 - RNA, 19 nt, Homo sapiens
  misc_RNA (1)...(19): siRNA sense strand
gcacaucuaccaucugaag

SEQ ID NO: 1219088 - RNA, 19 nt, Homo sapiens
  misc_RNA (1)...(19): siRNA sense strand
uuaaaaggcuggcauaaga

SEQ ID NO: 1219089 - RNA, 19 nt, Homo sapiens
  misc_RNA (1)...(19): siRNA sense strand
gaagaagcugaaauacaaa

SEQ ID NO: 1219090 - RNA, 19 nt, Homo sapiens
  misc_RNA (1)...(19): siRNA sense strand
gauugaaggcacaguguuu

SEQ ID NO: 1219091 - RNA, 19 nt, Homo sapiens
  misc_RNA (1)...(19): siRNA sense strand
ggagagauugucaucaaga

SEQ ID NO: 1219092 - RNA, 19 nt, Homo sapiens
  misc_RNA (1)...(19): siRNA sense strand
aaaccgauauagagagaga

SEQ ID NO: 1219093 - RNA, 19 nt, Homo sapiens
  misc_RNA (1)...(19): siRNA sense strand
ccagagguuucuagaggaa

SEQ ID NO: 1219094 - RNA, 19 nt, Homo sapiens
  misc_RNA (1)...(19): siRNA sense strand
agagguggauugagcacua

SEQ ID NO: 1219095 - RNA, 19 nt, Homo sapiens
  misc_RNA (1)...(19): siRNA sense strand
ggcaagaugugagauggaa

SEQ ID NO: 1219096 - RNA, 19 nt, Homo sapiens
  misc_RNA (1)...(19): siRNA sense strand
ugagacacgaguuccauua

SEQ ID NO: 1219097 - RNA, 19 nt, Homo sapiens
  misc_RNA (1)...(19): siRNA sense strand
agacuacacuccuccaauc

SEQ ID NO: 1219098 - RNA, 19 nt, Homo sapiens
  misc_RNA (1)...(19): siRNA sense strand
gaaauccgacgaugacucu

SEQ ID NO: 1219099 - RNA, 19 nt, Homo sapiens
  misc_RNA (1)...(19): siRNA sense strand
aaaacgagauuucugauga

SEQ ID NO: 1219100 - RNA, 19 nt, Homo sapiens
  misc_RNA (1)...(19): siRNA sense strand
cuacacuccuccaauccua

SEQ ID NO: 1219101 - RNA, 19 nt, Homo sapiens
  misc_RNA (1)...(19): siRNA sense strand
caugcugagucuagaaauu

SEQ ID NO: 1219102 - RNA, 19 nt, Homo sapiens
  misc_RNA (1)...(19): siRNA sense strand
gaagcaagccauuuaaucc

SEQ ID NO: 1219103 - RNA, 19 nt, Homo sapiens
  misc_RNA (1)...(19): siRNA sense strand
caagagccaaaccgauaua

SEQ ID NO: 1219104 - RNA, 19 nt, Homo sapiens
  misc_RNA (1)...(19): siRNA sense strand
gacaaaggaaucuugaaau

SEQ ID NO: 1219105 - RNA, 19 nt, Homo sapiens
  misc_RNA (1)...(19): siRNA sense strand
uacuauagcuucacacagu

SEQ ID NO: 1219106 - RNA, 19 nt, Homo sapiens
  misc_RNA (1)...(19): siRNA sense strand
guaggaagcguagcaguau

SEQ ID NO: 1219107 - RNA, 19 nt, Homo sapiens
  misc_RNA (1)...(19): siRNA sense strand
cgaaaggcuacgagcaaua

SEQ ID NO: 1219108 - RNA, 19 nt, Homo sapiens
  misc_RNA (1)...(19): siRNA sense strand
caaauccuaugccgaaagg

SEQ ID NO: 1219109 - RNA, 19 nt, Homo sapiens
  misc_RNA (1)...(19): siRNA sense strand
caaacuggaagcaauguau

SEQ ID NO: 1219110 - RNA, 19 nt, Homo sapiens
  misc_RNA (1)...(19): siRNA sense strand
gaguggguaucgaaacuuc

SEQ ID NO: 1219111 - RNA, 19 nt, Homo sapiens
  misc_RNA (1)...(19): siRNA sense strand
uugaacaacugcagagaga

SEQ ID NO: 1219112 - RNA, 19 nt, Homo sapiens
  misc_RNA (1)...(19): siRNA sense strand
gaaccugcaugaugauucc

SEQ ID NO: 1219113 - RNA, 19 nt, Homo sapiens
  misc_RNA (1)...(19): siRNA sense strand
acagcgagcuccuggacaa

SEQ ID NO: 1219114 - RNA, 19 nt, Homo sapiens
  misc_RNA (1)...(19): siRNA sense strand
guucaucagcuuucuaaug

SEQ ID NO: 1219115 - RNA, 19 nt, Homo sapiens
  misc_RNA (1)...(19): siRNA sense strand
ggagagagagaaacugaag

SEQ ID NO: 1219116 - RNA, 19 nt, Homo sapiens
  misc_RNA (1)...(19): siRNA sense strand
ucauauugcccauaaaguu

SEQ ID NO: 1219117 - RNA, 19 nt, Homo sapiens
  misc_RNA (1)...(19): siRNA sense strand
ugugucauauugcccauaa

SEQ ID NO: 1219118 - RNA, 19 nt, Homo sapiens
  misc_RNA (1)...(19): siRNA sense strand
gagccaaaccgauauagag

SEQ ID NO: 1219119 - RNA, 19 nt, Homo sapiens
  misc_RNA (1)...(19): siRNA sense strand
agacacgaguuccauuaug

SEQ ID NO: 1219120 - RNA, 19 nt, Homo sapiens
  misc_RNA (1)...(19): siRNA sense strand
aaacuucgccaccacagaa

SEQ ID NO: 1219121 - RNA, 19 nt, Homo sapiens
  misc_RNA (1)...(19): siRNA sense strand
ucucagugaugucuguaaa

SEQ ID NO: 1219122 - RNA, 19 nt, Homo sapiens
  misc_RNA (1)...(19): siRNA sense strand
gaaaggcuacgagcaauac

SEQ ID NO: 1219123 - RNA, 19 nt, Homo sapiens
  misc_RNA (1)...(19): siRNA sense strand
gcgaagucccggagaagaa

SEQ ID NO: 1219124 - RNA, 19 nt, Homo sapiens
  misc_RNA (1)...(19): siRNA sense strand
uaggaagcguagcaguaua

SEQ ID NO: 1219125 - RNA, 19 nt, Homo sapiens
  misc_RNA (1)...(19): siRNA sense strand
guauggagagcaaauccua

SEQ ID NO: 1219126 - RNA, 19 nt, Homo sapiens
  misc_RNA (1)...(19): siRNA sense strand
acuggaccauccugucuua

SEQ ID NO: 1219127 - RNA, 19 nt, Homo sapiens
  misc_RNA (1)...(19): siRNA sense strand
gcuacgagcaauacuauag

SEQ ID NO: 1219128 - RNA, 19 nt, Homo sapiens
  misc_RNA (1)...(19): siRNA sense strand
cacagaauguaucgucaga

SEQ ID NO: 1219129 - RNA, 19 nt, Homo sapiens
  misc_RNA (1)...(19): siRNA sense strand
ggagccaccaguucagaaa

SEQ ID NO: 1219130 - RNA, 19 nt, Homo sapiens
  misc_RNA (1)...(19): siRNA sense strand
ugagcacuauggagagauu

SEQ ID NO: 1219131 - RNA, 19 nt, Homo sapiens
  misc_RNA (1)...(19): siRNA sense strand
aaacgagauuucugaugau

SEQ ID NO: 1219132 - RNA, 19 nt, Homo sapiens
  misc_RNA (1)...(19): siRNA sense strand
gcggagagagagaaacuga

SEQ ID NO: 1219133 - RNA, 19 nt, Homo sapiens
  misc_RNA (1)...(19): siRNA sense strand
aguuugcgcuggaauuaaa

SEQ ID NO: 1219134 - RNA, 19 nt, Homo sapiens
  misc_RNA (1)...(19): siRNA sense strand
gaagaucugugucauauug

SEQ ID NO: 1219135 - RNA, 19 nt, Homo sapiens
  misc_RNA (1)...(19): siRNA sense strand
gaaugaaauugccauguuu

SEQ ID NO: 1219136 - RNA, 19 nt, Homo sapiens
  misc_RNA (1)...(19): siRNA sense strand
agaagaagcugaaauacaa

SEQ ID NO: 1219137 - RNA, 19 nt, Homo sapiens
  misc_RNA (1)...(19): siRNA sense strand
gaaaguagacucuccauca

SEQ ID NO: 1219138 - RNA, 19 nt, Homo sapiens
  misc_RNA (1)...(19): siRNA sense strand
ucaagaaccugcaugauga

SEQ ID NO: 1219139 - RNA, 19 nt, Homo sapiens
  misc_RNA (1)...(19): siRNA sense strand
gcaaauccauggaaauugu

SEQ ID NO: 1219140 - RNA, 19 nt, Homo sapiens
  misc_RNA (1)...(19): siRNA sense strand
ggacaagggcuuccaguuu

SEQ ID NO: 1219141 - RNA, 19 nt, Homo sapiens
  misc_RNA (1)...(19): siRNA sense strand
gagcacaucuaccaucuga

SEQ ID NO: 1219142 - RNA, 19 nt, Homo sapiens
  misc_RNA (1)...(19): siRNA sense strand
ggaacaaagugaccucuug

SEQ ID NO: 1219143 - RNA, 19 nt, Homo sapiens
  misc_RNA (1)...(19): siRNA sense strand
gaauguaucgucagaauga

SEQ ID NO: 1219144 - RNA, 19 nt, Homo sapiens
  misc_RNA (1)...(19): siRNA sense strand
ggacaaaggaaucuugaaa

SEQ ID NO: 1219145 - RNA, 19 nt, Homo sapiens
  misc_RNA (1)...(19): siRNA sense strand
gugauaaucuuuccuuaga

SEQ ID NO: 1219146 - RNA, 19 nt, Homo sapiens
  misc_RNA (1)...(19): siRNA sense strand
gaaguucuguuaucuccaa

SEQ ID NO: 1219147 - RNA, 19 nt, Homo sapiens
  misc_RNA (1)...(19): siRNA sense strand
gaagggaacuuagaagaag

SEQ ID NO: 1219148 - RNA, 19 nt, Homo sapiens
  misc_RNA (1)...(19): siRNA sense strand
gaacuuagaagaagcugaa

SEQ ID NO: 1219149 - RNA, 19 nt, Homo sapiens
  misc_RNA (1)...(19): siRNA sense strand
gaacaacugcagagagaaa

SEQ ID NO: 1219150 - RNA, 19 nt, Homo sapiens
  misc_RNA (1)...(19): siRNA sense strand
gaagcgaagucccggagaa

SEQ ID NO: 1219151 - RNA, 19 nt, Homo sapiens
  misc_RNA (1)...(19): siRNA sense strand
gcgcuggaauuaaaugaaa

SEQ ID NO: 1219152 - RNA, 19 nt, Homo sapiens
  misc_RNA (1)...(19): siRNA sense strand
gagagauugucaucaagaa

SEQ ID NO: 1219153 - RNA, 19 nt, Homo sapiens
  misc_RNA (1)...(19): siRNA sense strand
ggaagggaacuuagaagaa

SEQ ID NO: 1219154 - RNA, 19 nt, Homo sapiens
  misc_RNA (1)...(19): siRNA sense strand
agaaugaaauugccauguu

SEQ ID NO: 1219155 - RNA, 19 nt, Homo sapiens
  misc_RNA (1)...(19): siRNA sense strand
ucuccaagcucuucagaaa

SEQ ID NO: 1219156 - RNA, 19 nt, Homo sapiens
  misc_RNA (1)...(19): siRNA sense strand
gccaagagccaaaccgaua

SEQ ID NO: 1219157 - RNA, 19 nt, Homo sapiens
  misc_RNA (1)...(19): siRNA sense strand
gcuggaagcaagccauuua

SEQ ID NO: 1219158 - RNA, 19 nt, Homo sapiens
  misc_RNA (1)...(19): siRNA sense strand
aagaagaucugugucauau

SEQ ID NO: 1219159 - RNA, 19 nt, Homo sapiens
  misc_RNA (1)...(19): siRNA sense strand
caagaagaucugugucaua

SEQ ID NO: 1219160 - RNA, 19 nt, Homo sapiens
  misc_RNA (1)...(19): siRNA sense strand
gcaauacuauagcuucaca

SEQ ID NO: 1219161 - RNA, 19 nt, Homo sapiens
  misc_RNA (1)...(19): siRNA sense strand
ccaaaccgauauagagaga

SEQ ID NO: 1219162 - RNA, 19 nt, Homo sapiens
  misc_RNA (1)...(19): siRNA sense strand
caacggcaccuauuuggaa

SEQ ID NO: 1219163 - RNA, 19 nt, Homo sapiens
  misc_RNA (1)...(19): siRNA sense strand
ggaaauggcaugaaagcau

SEQ ID NO: 1219164 - RNA, 19 nt, Homo sapiens
  misc_RNA (1)...(19): siRNA sense strand
gcgaggagcuggaguacag

SEQ ID NO: 1219165 - RNA, 19 nt, Homo sapiens
  misc_RNA (1)...(19): siRNA sense strand
cagaauguaucgucagaau

SEQ ID NO: 1219166 - RNA, 19 nt, Homo sapiens
  misc_RNA (1)...(19): siRNA sense strand
gagcaauacuauagcuuca

SEQ ID NO: 1219167 - RNA, 19 nt, Homo sapiens
  misc_RNA (1)...(19): siRNA sense strand
aaaccgagcucuaguucau

SEQ ID NO: 1219168 - RNA, 19 nt, Homo sapiens
  misc_RNA (1)...(19): siRNA sense strand
gcaagaagaucugugucau

SEQ ID NO: 1219169 - RNA, 19 nt, Homo sapiens
  misc_RNA (1)...(19): siRNA sense strand
gcaccuauuuggaacuuag

SEQ ID NO: 1219170 - RNA, 19 nt, Homo sapiens
  misc_RNA (1)...(19): siRNA sense strand
gcagaggauugaacaacug

SEQ ID NO: 1219171 - RNA, 19 nt, Homo sapiens
  misc_RNA (1)...(19): siRNA sense strand
gcaaaauacuggagcacua

SEQ ID NO: 1219172 - RNA, 19 nt, Homo sapiens
  misc_RNA (1)...(19): siRNA sense strand
gacaagggcuuccaguuuu

SEQ ID NO: 1219173 - RNA, 19 nt, Homo sapiens
  misc_RNA (1)...(19): siRNA sense strand
ggaacaacaucgggaagga

SEQ ID NO: 1219174 - RNA, 19 nt, Homo sapiens
  misc_RNA (1)...(19): siRNA sense strand
gaaggucaagucagaagaa

SEQ ID NO: 1219175 - RNA, 19 nt, Homo sapiens
  misc_RNA (1)...(19): siRNA sense strand
gagaagaaccuuggugugu

SEQ ID NO: 1219176 - RNA, 19 nt, Homo sapiens
  misc_RNA (1)...(19): siRNA sense strand
gggcaaauccauggaaauu

SEQ ID NO: 1219177 - RNA, 19 nt, Homo sapiens
  misc_RNA (1)...(19): siRNA sense strand
ggaagcaagccauuuaauc

SEQ ID NO: 1219178 - RNA, 19 nt, Homo sapiens
  misc_RNA (1)...(19): siRNA sense strand
gcacuaaugcccaugagau

SEQ ID NO: 1219179 - RNA, 19 nt, Homo sapiens
  misc_RNA (1)...(19): siRNA sense strand
gagcaacggcaccuauuug

SEQ ID NO: 1219180 - RNA, 19 nt, Homo sapiens
  misc_RNA (1)...(19): siRNA sense strand
acaaguagcugcucuucca

SEQ ID NO: 1219181 - RNA, 19 nt, Homo sapiens
  misc_RNA (1)...(19): siRNA sense strand
uugcauccauaacaucuua

SEQ ID NO: 1219182 - RNA, 19 nt, Homo sapiens
  misc_RNA (1)...(19): siRNA sense strand
ucagugaugucuguaaaga

SEQ ID NO: 1219183 - RNA, 19 nt, Homo sapiens
  misc_RNA (1)...(19): siRNA sense strand
cuuagaagaagcugaaaua

SEQ ID NO: 1219184 - RNA, 19 nt, Homo sapiens
  misc_RNA (1)...(19): siRNA sense strand
ucagugacauaagugauaa

SEQ ID NO: 1219185 - RNA, 19 nt, Homo sapiens
  misc_RNA (1)...(19): siRNA sense strand
cauauugcccauaaaguuu

SEQ ID NO: 1219186 - RNA, 19 nt, Homo sapiens
  misc_RNA (1)...(19): siRNA sense strand
aagaggaaguggcccuuaa

SEQ ID NO: 1219187 - RNA, 19 nt, Homo sapiens
  misc_RNA (1)...(19): siRNA sense strand
gcacaucuaccaucugaag

SEQ ID NO: 1219188 - RNA, 19 nt, Homo sapiens
  misc_RNA (1)...(19): siRNA sense strand
uuaaaaggcuggcauaaga

SEQ ID NO: 1219189 - RNA, 19 nt, Homo sapiens
  misc_RNA (1)...(19): siRNA sense strand
gaagaagcugaaauacaaa

SEQ ID NO: 1219190 - RNA, 19 nt, Homo sapiens
  misc_RNA (1)...(19): siRNA sense strand
gauugaaggcacaguguuu

SEQ ID NO: 1219191 - RNA, 19 nt, Homo sapiens
  misc_RNA (1)...(19): siRNA sense strand
ggagagauugucaucaaga

SEQ ID NO: 1219192 - RNA, 19 nt, Homo sapiens
  misc_RNA (1)...(19): siRNA sense strand
aaaccgauauagagagaga

SEQ ID NO: 1219193 - RNA, 19 nt, Homo sapiens
  misc_RNA (1)...(19): siRNA sense strand
ccagagguuucuagaggaa

SEQ ID NO: 1219194 - RNA, 19 nt, Homo sapiens
  misc_RNA (1)...(19): siRNA sense strand
agagguggauugagcacua

SEQ ID NO: 1219195 - RNA, 19 nt, Homo sapiens
  misc_RNA (1)...(19): siRNA sense strand
ggcaagaugugagauggaa

SEQ ID NO: 1219196 - RNA, 19 nt, Homo sapiens
  misc_RNA (1)...(19): siRNA sense strand
ugagacacgaguuccauua

SEQ ID NO: 1219197 - RNA, 19 nt, Homo sapiens
  misc_RNA (1)...(19): siRNA sense strand
agacuacacuccuccaauc

SEQ ID NO: 1219198 - RNA, 19 nt, Homo sapiens
  misc_RNA (1)...(19): siRNA sense strand
gaaauccgacgaugacucu

SEQ ID NO: 1219199 - RNA, 19 nt, Homo sapiens
  misc_RNA (1)...(19): siRNA sense strand
aaaacgagauuucugauga

SEQ ID NO: 1219200 - RNA, 19 nt, Homo sapiens
  misc_RNA (1)...(19): siRNA sense strand
cuacacuccuccaauccua

SEQ ID NO: 1219201 - RNA, 19 nt, Homo sapiens
  misc_RNA (1)...(19): siRNA sense strand
caugcugagucuagaaauu

SEQ ID NO: 1219202 - RNA, 19 nt, Homo sapiens
  misc_RNA (1)...(19): siRNA sense strand
gaagcaagccauuuaaucc

SEQ ID NO: 1219203 - RNA, 19 nt, Homo sapiens
  misc_RNA (1)...(19): siRNA sense strand
caagagccaaaccgauaua

SEQ ID NO: 1219204 - RNA, 19 nt, Homo sapiens
  misc_RNA (1)...(19): siRNA sense strand
gacaaaggaaucuugaaau

SEQ ID NO: 1219205 - RNA, 19 nt, Homo sapiens
  misc_RNA (1)...(19): siRNA sense strand
uacuauagcuucacacagu

SEQ ID NO: 1219206 - RNA, 19 nt, Homo sapiens
  misc_RNA (1)...(19): siRNA sense strand
guaggaagcguagcaguau

SEQ ID NO: 1219207 - RNA, 19 nt, Homo sapiens
  misc_RNA (1)...(19): siRNA sense strand
cgaaaggcuacgagcaaua

SEQ ID NO: 1219208 - RNA, 19 nt, Homo sapiens
  misc_RNA (1)...(19): siRNA sense strand
caaauccuaugccgaaagg

SEQ ID NO: 1219209 - RNA, 19 nt, Homo sapiens
  misc_RNA (1)...(19): siRNA sense strand
caaacuggaagcaauguau

SEQ ID NO: 1219210 - RNA, 19 nt, Homo sapiens
  misc_RNA (1)...(19): siRNA sense strand
gaguggguaucgaaacuuc

SEQ ID NO: 1219211 - RNA, 19 nt, Homo sapiens
  misc_RNA (1)...(19): siRNA sense strand
uugaacaacugcagagaga

SEQ ID NO: 1219212 - RNA, 19 nt, Homo sapiens
  misc_RNA (1)...(19): siRNA sense strand
gaaccugcaugaugauucc

SEQ ID NO: 1219213 - RNA, 19 nt, Homo sapiens
  misc_RNA (1)...(19): siRNA sense strand
acagcgagcuccuggacaa

SEQ ID NO: 1219214 - RNA, 19 nt, Homo sapiens
  misc_RNA (1)...(19): siRNA sense strand
guucaucagcuuucuaaug

SEQ ID NO: 1219215 - RNA, 19 nt, Homo sapiens
  misc_RNA (1)...(19): siRNA sense strand
ggagagagagaaacugaag

SEQ ID NO: 1219216 - RNA, 19 nt, Homo sapiens
  misc_RNA (1)...(19): siRNA sense strand
ucauauugcccauaaaguu

SEQ ID NO: 1219217 - RNA, 19 nt, Homo sapiens
  misc_RNA (1)...(19): siRNA sense strand
ugugucauauugcccauaa

SEQ ID NO: 1219218 - RNA, 19 nt, Homo sapiens
  misc_RNA (1)...(19): siRNA sense strand
gagccaaaccgauauagag

SEQ ID NO: 1219219 - RNA, 19 nt, Homo sapiens
  misc_RNA (1)...(19): siRNA sense strand
agacacgaguuccauuaug

SEQ ID NO: 1219220 - RNA, 19 nt, Homo sapiens
  misc_RNA (1)...(19): siRNA sense strand
aaacuucgccaccacagaa

SEQ ID NO: 1219221 - RNA, 19 nt, Homo sapiens
  misc_RNA (1)...(19): siRNA sense strand
ucucagugaugucuguaaa

SEQ ID NO: 1219222 - RNA, 19 nt, Homo sapiens
  misc_RNA (1)...(19): siRNA sense strand
gaaaggcuacgagcaauac

SEQ ID NO: 1219223 - RNA, 19 nt, Homo sapiens
  misc_RNA (1)...(19): siRNA sense strand
gcgaagucccggagaagaa

SEQ ID NO: 1219224 - RNA, 19 nt, Homo sapiens
  misc_RNA (1)...(19): siRNA sense strand
uaggaagcguagcaguaua

SEQ ID NO: 1219225 - RNA, 19 nt, Homo sapiens
  misc_RNA (1)...(19): siRNA sense strand
guauggagagcaaauccua

SEQ ID NO: 1219226 - RNA, 19 nt, Homo sapiens
  misc_RNA (1)...(19): siRNA sense strand
acuggaccauccugucuua

SEQ ID NO: 1219227 - RNA, 19 nt, Homo sapiens
  misc_RNA (1)...(19): siRNA sense strand
gcuacgagcaauacuauag

SEQ ID NO: 1219228 - RNA, 19 nt, Homo sapiens
  misc_RNA (1)...(19): siRNA sense strand
cacagaauguaucgucaga

SEQ ID NO: 1219229 - RNA, 19 nt, Homo sapiens
  misc_RNA (1)...(19): siRNA sense strand
ggagccaccaguucagaaa

SEQ ID NO: 1219230 - RNA, 19 nt, Homo sapiens
  misc_RNA (1)...(19): siRNA sense strand
ugagcacuauggagagauu

SEQ ID NO: 1219231 - RNA, 19 nt, Homo sapiens
  misc_RNA (1)...(19): siRNA sense strand
aaacgagauuucugaugau

SEQ ID NO: 1219232 - RNA, 19 nt, Homo sapiens
  misc_RNA (1)...(19): siRNA sense strand
gcggagagagagaaacuga

SEQ ID NO: 1219233 - RNA, 19 nt, Homo sapiens
  misc_RNA (1)...(19): siRNA sense strand
aguuugcgcuggaauuaaa

SEQ ID NO: 1219234 - RNA, 19 nt, Homo sapiens
  misc_RNA (1)...(19): siRNA sense strand
gaagaucugugucauauug

SEQ ID NO: 1219235 - RNA, 19 nt, Homo sapiens
  misc_RNA (1)...(19): siRNA sense strand
gaaugaaauugccauguuu

SEQ ID NO: 1219236 - RNA, 19 nt, Homo sapiens
  misc_RNA (1)...(19): siRNA sense strand
agaagaagcugaaauacaa

SEQ ID NO: 1219237 - RNA, 19 nt, Homo sapiens
  misc_RNA (1)...(19): siRNA sense strand
gaaaguagacucuccauca

SEQ ID NO: 1219238 - RNA, 19 nt, Homo sapiens
  misc_RNA (1)...(19): siRNA sense strand
ucaagaaccugcaugauga

SEQ ID NO: 1219239 - RNA, 19 nt, Homo sapiens
  misc_RNA (1)...(19): siRNA sense strand
gcaaauccauggaaauugu

SEQ ID NO: 1219240 - RNA, 19 nt, Homo sapiens
  misc_RNA (1)...(19): siRNA sense strand
ggacaagggcuuccaguuu

SEQ ID NO: 1219241 - RNA, 19 nt, Homo sapiens
  misc_RNA (1)...(19): siRNA sense strand
gagcacaucuaccaucuga

SEQ ID NO: 1219242 - RNA, 19 nt, Homo sapiens
  misc_RNA (1)...(19): siRNA sense strand
ggaacaaagugaccucuug

SEQ ID NO: 1219243 - RNA, 19 nt, Homo sapiens
  misc_RNA (1)...(19): siRNA sense strand
gaauguaucgucagaauga

SEQ ID NO: 1219244 - RNA, 19 nt, Homo sapiens
  misc_RNA (1)...(19): siRNA sense strand
ggacaaaggaaucuugaaa

SEQ ID NO: 1219245 - RNA, 19 nt, Homo sapiens
  misc_RNA (1)...(19): siRNA sense strand
gugauaaucuuuccuuaga

SEQ ID NO: 1219246 - RNA, 19 nt, Homo sapiens
  misc_RNA (1)...(19): siRNA sense strand
gaaguucuguuaucuccaa

SEQ ID NO: 1219247 - RNA, 19 nt, Homo sapiens
  misc_RNA (1)...(19): siRNA sense strand
gaagggaacuuagaagaag

SEQ ID NO: 1219248 - RNA, 19 nt, Homo sapiens
  misc_RNA (1)...(19): siRNA sense strand
gaacuuagaagaagcugaa

SEQ ID NO: 1219249 - RNA, 19 nt, Homo sapiens
  misc_RNA (1)...(19): siRNA sense strand
gaacaacugcagagagaaa

SEQ ID NO: 1219250 - RNA, 19 nt, Homo sapiens
  misc_RNA (1)...(19): siRNA sense strand
gaagcgaagucccggagaa

SEQ ID NO: 1219251 - RNA, 19 nt, Homo sapiens
  misc_RNA (1)...(19): siRNA sense strand
gcgcuggaauuaaaugaaa

SEQ ID NO: 1219252 - RNA, 19 nt, Homo sapiens
  misc_RNA (1)...(19): siRNA sense strand
gagagauugucaucaagaa

SEQ ID NO: 1219253 - RNA, 19 nt, Homo sapiens
  misc_RNA (1)...(19): siRNA sense strand
ggaagggaacuuagaagaa

SEQ ID NO: 1219254 - RNA, 19 nt, Homo sapiens
  misc_RNA (1)...(19): siRNA sense strand
agaaugaaauugccauguu

SEQ ID NO: 1219255 - RNA, 19 nt, Homo sapiens
  misc_RNA (1)...(19): siRNA sense strand
ucuccaagcucuucagaaa

SEQ ID NO: 1219256 - RNA, 19 nt, Homo sapiens
  misc_RNA (1)...(19): siRNA sense strand
gccaagagccaaaccgaua

SEQ ID NO: 1219257 - RNA, 19 nt, Homo sapiens
  misc_RNA (1)...(19): siRNA sense strand
gcuggaagcaagccauuua

SEQ ID NO: 1219258 - RNA, 19 nt, Homo sapiens
  misc_RNA (1)...(19): siRNA sense strand
aagaagaucugugucauau

SEQ ID NO: 1219259 - RNA, 19 nt, Homo sapiens
  misc_RNA (1)...(19): siRNA sense strand
caagaagaucugugucaua

SEQ ID NO: 1219260 - RNA, 19 nt, Homo sapiens
  misc_RNA (1)...(19): siRNA sense strand
gcaauacuauagcuucaca

SEQ ID NO: 1219261 - RNA, 19 nt, Homo sapiens
  misc_RNA (1)...(19): siRNA sense strand
ccaaaccgauauagagaga

SEQ ID NO: 1219262 - RNA, 19 nt, Homo sapiens
  misc_RNA (1)...(19): siRNA sense strand
caacggcaccuauuuggaa

SEQ ID NO: 1219263 - RNA, 19 nt, Homo sapiens
  misc_RNA (1)...(19): siRNA sense strand
ggaaauggcaugaaagcau

SEQ ID NO: 1219264 - RNA, 19 nt, Homo sapiens
  misc_RNA (1)...(19): siRNA sense strand
gcgaggagcuggaguacag

SEQ ID NO: 1219265 - RNA, 19 nt, Homo sapiens
  misc_RNA (1)...(19): siRNA sense strand
cagaauguaucgucagaau

SEQ ID NO: 1219266 - RNA, 19 nt, Homo sapiens
  misc_RNA (1)...(19): siRNA sense strand
gagcaauacuauagcuuca

SEQ ID NO: 1219267 - RNA, 19 nt, Homo sapiens
  misc_RNA (1)...(19): siRNA sense strand
aaaccgagcucuaguucau

SEQ ID NO: 1219268 - RNA, 19 nt, Homo sapiens
  misc_RNA (1)...(19): siRNA sense strand
gcaagaagaucugugucau

SEQ ID NO: 1219269 - RNA, 19 nt, Homo sapiens
  misc_RNA (1)...(19): siRNA sense strand
gcaccuauuuggaacuuag

SEQ ID NO: 1219270 - RNA, 19 nt, Homo sapiens
  misc_RNA (1)...(19): siRNA sense strand
gcagaggauugaacaacug

SEQ ID NO: 1219271 - RNA, 19 nt, Homo sapiens
  misc_RNA (1)...(19): siRNA sense strand
gcaaaauacuggagcacua

SEQ ID NO: 1219272 - RNA, 19 nt, Homo sapiens
  misc_RNA (1)...(19): siRNA sense strand
gacaagggcuuccaguuuu

SEQ ID NO: 1219273 - RNA, 19 nt, Homo sapiens
  misc_RNA (1)...(19): siRNA sense strand
ggaacaacaucgggaagga

SEQ ID NO: 1219274 - RNA, 19 nt, Homo sapiens
  misc_RNA (1)...(19): siRNA sense strand
gaaggucaagucagaagaa

SEQ ID NO: 1219275 - RNA, 19 nt, Homo sapiens
  misc_RNA (1)...(19): siRNA sense strand
gagaagaaccuuggugugu

SEQ ID NO: 1219276 - RNA, 19 nt, Homo sapiens
  misc_RNA (1)...(19): siRNA sense strand
gggcaaauccauggaaauu

SEQ ID NO: 1219277 - RNA, 19 nt, Homo sapiens
  misc_RNA (1)...(19): siRNA sense strand
ggaagcaagccauuuaauc

SEQ ID NO: 1219278 - RNA, 19 nt, Homo sapiens
  misc_RNA (1)...(19): siRNA sense strand
gcacuaaugcccaugagau

SEQ ID NO: 1219279 - RNA, 19 nt, Homo sapiens
  misc_RNA (1)...(19): siRNA sense strand
gagcaacggcaccuauuug

SEQ ID NO: 1219280 - RNA, 19 nt, Homo sapiens
  misc_RNA (1)...(19): siRNA sense strand
acaaguagcugcucuucca

SEQ ID NO: 1219281 - RNA, 19 nt, Homo sapiens
  misc_RNA (1)...(19): siRNA sense strand
uugcauccauaacaucuua

SEQ ID NO: 1219282 - RNA, 19 nt, Homo sapiens
  misc_RNA (1)...(19): siRNA sense strand
ucagugaugucuguaaaga

SEQ ID NO: 1219283 - RNA, 19 nt, Homo sapiens
  misc_RNA (1)...(19): siRNA sense strand
cuuagaagaagcugaaaua

SEQ ID NO: 1219284 - RNA, 19 nt, Homo sapiens
  misc_RNA (1)...(19): siRNA sense strand
ucagugacauaagugauaa

SEQ ID NO: 1219285 - RNA, 19 nt, Homo sapiens
  misc_RNA (1)...(19): siRNA sense strand
cauauugcccauaaaguuu

SEQ ID NO: 1219286 - RNA, 19 nt, Homo sapiens
  misc_RNA (1)...(19): siRNA sense strand
aagaggaaguggcccuuaa

SEQ ID NO: 1219287 - RNA, 19 nt, Homo sapiens
  misc_RNA (1)...(19): siRNA sense strand
gcacaucuaccaucugaag

SEQ ID NO: 1219288 - RNA, 19 nt, Homo sapiens
  misc_RNA (1)...(19): siRNA sense strand
uuaaaaggcuggcauaaga

SEQ ID NO: 1219289 - RNA, 19 nt, Homo sapiens
  misc_RNA (1)...(19): siRNA sense strand
gaagaagcugaaauacaaa

SEQ ID NO: 1219290 - RNA, 19 nt, Homo sapiens
  misc_RNA (1)...(19): siRNA sense strand
gauugaaggcacaguguuu

SEQ ID NO: 1219291 - RNA, 19 nt, Homo sapiens
  misc_RNA (1)...(19): siRNA sense strand
ggagagauugucaucaaga

SEQ ID NO: 1219292 - RNA, 19 nt, Homo sapiens
  misc_RNA (1)...(19): siRNA sense strand
aaaccgauauagagagaga

SEQ ID NO: 1219293 - RNA, 19 nt, Homo sapiens
  misc_RNA (1)...(19): siRNA sense strand
ccagagguuucuagaggaa

SEQ ID NO: 1219294 - RNA, 19 nt, Homo sapiens
  misc_RNA (1)...(19): siRNA sense strand
agagguggauugagcacua

SEQ ID NO: 1219295 - RNA, 19 nt, Homo sapiens
  misc_RNA (1)...(19): siRNA sense strand
ggcaagaugugagauggaa

SEQ ID NO: 1219296 - RNA, 19 nt, Homo sapiens
  misc_RNA (1)...(19): siRNA sense strand
ugagacacgaguuccauua

SEQ ID NO: 1219297 - RNA, 19 nt, Homo sapiens
  misc_RNA (1)...(19): siRNA sense strand
agacuacacuccuccaauc

SEQ ID NO: 1219298 - RNA, 19 nt, Homo sapiens
  misc_RNA (1)...(19): siRNA sense strand
gaaauccgacgaugacucu

SEQ ID NO: 1219299 - RNA, 19 nt, Homo sapiens
  misc_RNA (1)...(19): siRNA sense strand
aaaacgagauuucugauga

SEQ ID NO: 1219300 - RNA, 19 nt, Homo sapiens
  misc_RNA (1)...(19): siRNA sense strand
cuacacuccuccaauccua

SEQ ID NO: 1219301 - RNA, 19 nt, Homo sapiens
  misc_RNA (1)...(19): siRNA sense strand
caugcugagucuagaaauu

SEQ ID NO: 1219302 - RNA, 19 nt, Homo sapiens
  misc_RNA (1)...(19): siRNA sense strand
gaagcaagccauuuaaucc

SEQ ID NO: 1219303 - RNA, 19 nt, Homo sapiens
  misc_RNA (1)...(19): siRNA sense strand
caagagccaaaccgauaua

SEQ ID NO: 1219304 - RNA, 19 nt, Homo sapiens
  misc_RNA (1)...(19): siRNA sense strand
gacaaaggaaucuugaaau

SEQ ID NO: 1219305 - RNA, 19 nt, Homo sapiens
  misc_RNA (1)...(19): siRNA sense strand
uacuauagcuucacacagu

SEQ ID NO: 1219306 - RNA, 19 nt, Homo sapiens
  misc_RNA (1)...(19): siRNA sense strand
guaggaagcguagcaguau

SEQ ID NO: 1219307 - RNA, 19 nt, Homo sapiens
  misc_RNA (1)...(19): siRNA sense strand
cgaaaggcuacgagcaaua

SEQ ID NO: 1219308 - RNA, 19 nt, Homo sapiens
  misc_RNA (1)...(19): siRNA sense strand
caaauccuaugccgaaagg

SEQ ID NO: 1219309 - RNA, 19 nt, Homo sapiens
  misc_RNA (1)...(19): siRNA sense strand
caaacuggaagcaauguau

SEQ ID NO: 1219310 - RNA, 19 nt, Homo sapiens
  misc_RNA (1)...(19): siRNA sense strand
gaguggguaucgaaacuuc

SEQ ID NO: 1219311 - RNA, 19 nt, Homo sapiens
  misc_RNA (1)...(19): siRNA sense strand
uugaacaacugcagagaga

SEQ ID NO: 1219312 - RNA, 19 nt, Homo sapiens
  misc_RNA (1)...(19): siRNA sense strand
gaaccugcaugaugauucc

SEQ ID NO: 1219313 - RNA, 19 nt, Homo sapiens
  misc_RNA (1)...(19): siRNA sense strand
acagcgagcuccuggacaa

SEQ ID NO: 1219314 - RNA, 19 nt, Homo sapiens
  misc_RNA (1)...(19): siRNA sense strand
guucaucagcuuucuaaug

SEQ ID NO: 1219315 - RNA, 19 nt, Homo sapiens
  misc_RNA (1)...(19): siRNA sense strand
ggagagagagaaacugaag

SEQ ID NO: 1219316 - RNA, 19 nt, Homo sapiens
  misc_RNA (1)...(19): siRNA sense strand
ucauauugcccauaaaguu

SEQ ID NO: 1219317 - RNA, 19 nt, Homo sapiens
  misc_RNA (1)...(19): siRNA sense strand
ugugucauauugcccauaa

SEQ ID NO: 1219318 - RNA, 19 nt, Homo sapiens
  misc_RNA (1)...(19): siRNA sense strand
gagccaaaccgauauagag

SEQ ID NO: 1219319 - RNA, 19 nt, Homo sapiens
  misc_RNA (1)...(19): siRNA sense strand
agacacgaguuccauuaug

SEQ ID NO: 1219320 - RNA, 19 nt, Homo sapiens
  misc_RNA (1)...(19): siRNA sense strand
aaacuucgccaccacagaa

SEQ ID NO: 1219321 - RNA, 19 nt, Homo sapiens
  misc_RNA (1)...(19): siRNA sense strand
ucucagugaugucuguaaa

SEQ ID NO: 1219322 - RNA, 19 nt, Homo sapiens
  misc_RNA (1)...(19): siRNA sense strand
gaaaggcuacgagcaauac

SEQ ID NO: 1219323 - RNA, 19 nt, Homo sapiens
  misc_RNA (1)...(19): siRNA sense strand
gcgaagucccggagaagaa

SEQ ID NO: 1219324 - RNA, 19 nt, Homo sapiens
  misc_RNA (1)...(19): siRNA sense strand
uaggaagcguagcaguaua

SEQ ID NO: 1219325 - RNA, 19 nt, Homo sapiens
  misc_RNA (1)...(19): siRNA sense strand
guauggagagcaaauccua

SEQ ID NO: 1219326 - RNA, 19 nt, Homo sapiens
  misc_RNA (1)...(19): siRNA sense strand
acuggaccauccugucuua

SEQ ID NO: 1219327 - RNA, 19 nt, Homo sapiens
  misc_RNA (1)...(19): siRNA sense strand
gcuacgagcaauacuauag

SEQ ID NO: 1219328 - RNA, 19 nt, Homo sapiens
  misc_RNA (1)...(19): siRNA sense strand
cacagaauguaucgucaga

SEQ ID NO: 1219329 - RNA, 19 nt, Homo sapiens
  misc_RNA (1)...(19): siRNA sense strand
ggagccaccaguucagaaa

SEQ ID NO: 1219330 - RNA, 19 nt, Homo sapiens
  misc_RNA (1)...(19): siRNA sense strand
ugagcacuauggagagauu

SEQ ID NO: 1219331 - RNA, 19 nt, Homo sapiens
  misc_RNA (1)...(19): siRNA sense strand
aaacgagauuucugaugau

SEQ ID NO: 1219332 - RNA, 19 nt, Homo sapiens
  misc_RNA (1)...(19): siRNA sense strand
gcggagagagagaaacuga

SEQ ID NO: 1219333 - RNA, 19 nt, Homo sapiens
  misc_RNA (1)...(19): siRNA sense strand
aguuugcgcuggaauuaaa

SEQ ID NO: 1219334 - RNA, 19 nt, Homo sapiens
  misc_RNA (1)...(19): siRNA sense strand
gaagaucugugucauauug

SEQ ID NO: 1219335 - RNA, 19 nt, Homo sapiens
  misc_RNA (1)...(19): siRNA sense strand
gaaugaaauugccauguuu

SEQ ID NO: 1219336 - RNA, 19 nt, Homo sapiens
  misc_RNA (1)...(19): siRNA sense strand
gaaaguagacucuccauca

SEQ ID NO: 1219337 - RNA, 19 nt, Homo sapiens
  misc_RNA (1)...(19): siRNA sense strand
gagcacaucuaccaucuga

SEQ ID NO: 1219338 - RNA, 19 nt, Homo sapiens
  misc_RNA (1)...(19): siRNA sense strand
gaauguaucgucagaauga

SEQ ID NO: 1219339 - RNA, 19 nt, Homo sapiens
  misc_RNA (1)...(19): siRNA sense strand
ggacaaaggaaucuugaaa

SEQ ID NO: 1219340 - RNA, 19 nt, Homo sapiens
  misc_RNA (1)...(19): siRNA sense strand
gugauaaucuuuccuuaga

SEQ ID NO: 1219341 - RNA, 19 nt, Homo sapiens
  misc_RNA (1)...(19): siRNA sense strand
gaaguucuguuaucuccaa

SEQ ID NO: 1219342 - RNA, 19 nt, Homo sapiens
  misc_RNA (1)...(19): siRNA sense strand
gaagcgaagucccggagaa

SEQ ID NO: 1219343 - RNA, 19 nt, Homo sapiens
  misc_RNA (1)...(19): siRNA sense strand
agaaugaaauugccauguu

SEQ ID NO: 1219344 - RNA, 19 nt, Homo sapiens
  misc_RNA (1)...(19): siRNA sense strand
ucuccaagcucuucagaaa

SEQ ID NO: 1219345 - RNA, 19 nt, Homo sapiens
  misc_RNA (1)...(19): siRNA sense strand
gccaagagccaaaccgaua

SEQ ID NO: 1219346 - RNA, 19 nt, Homo sapiens
  misc_RNA (1)...(19): siRNA sense strand
aagaagaucugugucauau

SEQ ID NO: 1219347 - RNA, 19 nt, Homo sapiens
  misc_RNA (1)...(19): siRNA sense strand
caagaagaucugugucaua

SEQ ID NO: 1219348 - RNA, 19 nt, Homo sapiens
  misc_RNA (1)...(19): siRNA sense strand
ccaaaccgauauagagaga

SEQ ID NO: 1219349 - RNA, 19 nt, Homo sapiens
  misc_RNA (1)...(19): siRNA sense strand
gcgaggagcuggaguacag

SEQ ID NO: 1219350 - RNA, 19 nt, Homo sapiens
  misc_RNA (1)...(19): siRNA sense strand
cagaauguaucgucagaau

SEQ ID NO: 1219351 - RNA, 19 nt, Homo sapiens
  misc_RNA (1)...(19): siRNA sense strand
aaaccgagcucuaguucau

SEQ ID NO: 1219352 - RNA, 19 nt, Homo sapiens
  misc_RNA (1)...(19): siRNA sense strand
gcaagaagaucugugucau

SEQ ID NO: 1219353 - RNA, 19 nt, Homo sapiens
  misc_RNA (1)...(19): siRNA sense strand
ggaacaacaucgggaagga

SEQ ID NO: 1219354 - RNA, 19 nt, Homo sapiens
  misc_RNA (1)...(19): siRNA sense strand
gaaggucaagucagaagaa

SEQ ID NO: 1219355 - RNA, 19 nt, Homo sapiens
  misc_RNA (1)...(19): siRNA sense strand
gagaagaaccuuggugugu

SEQ ID NO: 1219356 - RNA, 19 nt, Homo sapiens
  misc_RNA (1)...(19): siRNA sense strand
acaaguagcugcucuucca

SEQ ID NO: 1219357 - RNA, 19 nt, Homo sapiens
  misc_RNA (1)...(19): siRNA sense strand
aagaggaaguggcccuuaa

SEQ ID NO: 1219358 - RNA, 19 nt, Homo sapiens
  misc_RNA (1)...(19): siRNA sense strand
ucagugacauaagugauaa

SEQ ID NO: 1219359 - RNA, 19 nt, Homo sapiens
  misc_RNA (1)...(19): siRNA sense strand
cauauugcccauaaaguuu

SEQ ID NO: 1219360 - RNA, 19 nt, Homo sapiens
  misc_RNA (1)...(19): siRNA sense strand
gcacaucuaccaucugaag

SEQ ID NO: 1219361 - RNA, 19 nt, Homo sapiens
  misc_RNA (1)...(19): siRNA sense strand
ucagugaugucuguaaaga

SEQ ID NO: 1219362 - RNA, 19 nt, Homo sapiens
  misc_RNA (1)...(19): siRNA sense strand
uuaaaaggcuggcauaaga

SEQ ID NO: 1219363 - RNA, 19 nt, Homo sapiens
  misc_RNA (1)...(19): siRNA sense strand
aaaccgauauagagagaga

SEQ ID NO: 1219364 - RNA, 19 nt, Homo sapiens
  misc_RNA (1)...(19): siRNA sense strand
ugagacacgaguuccauua

SEQ ID NO: 1219365 - RNA, 19 nt, Homo sapiens
  misc_RNA (1)...(19): siRNA sense strand
agacuacacuccuccaauc

SEQ ID NO: 1219366 - RNA, 19 nt, Homo sapiens
  misc_RNA (1)...(19): siRNA sense strand
aaaacgagauuucugauga

SEQ ID NO: 1219367 - RNA, 19 nt, Homo sapiens
  misc_RNA (1)...(19): siRNA sense strand
cuacacuccuccaauccua

SEQ ID NO: 1219368 - RNA, 19 nt, Homo sapiens
  misc_RNA (1)...(19): siRNA sense strand
gacaaaggaaucuugaaau

SEQ ID NO: 1219369 - RNA, 19 nt, Homo sapiens
  misc_RNA (1)...(19): siRNA sense strand
caagagccaaaccgauaua

SEQ ID NO: 1219370 - RNA, 19 nt, Homo sapiens
  misc_RNA (1)...(19): siRNA sense strand
guaggaagcguagcaguau

SEQ ID NO: 1219371 - RNA, 19 nt, Homo sapiens
  misc_RNA (1)...(19): siRNA sense strand
caaacuggaagcaauguau

SEQ ID NO: 1219372 - RNA, 19 nt, Homo sapiens
  misc_RNA (1)...(19): siRNA sense strand
gagccaaaccgauauagag

SEQ ID NO: 1219373 - RNA, 19 nt, Homo sapiens
  misc_RNA (1)...(19): siRNA sense strand
acagcgagcuccuggacaa

SEQ ID NO: 1219374 - RNA, 19 nt, Homo sapiens
  misc_RNA (1)...(19): siRNA sense strand
guucaucagcuuucuaaug

SEQ ID NO: 1219375 - RNA, 19 nt, Homo sapiens
  misc_RNA (1)...(19): siRNA sense strand
ggagagagagaaacugaag

SEQ ID NO: 1219376 - RNA, 19 nt, Homo sapiens
  misc_RNA (1)...(19): siRNA sense strand
ucauauugcccauaaaguu

SEQ ID NO: 1219377 - RNA, 19 nt, Homo sapiens
  misc_RNA (1)...(19): siRNA sense strand
ugugucauauugcccauaa

SEQ ID NO: 1219378 - RNA, 19 nt, Homo sapiens
  misc_RNA (1)...(19): siRNA sense strand
agacacgaguuccauuaug

SEQ ID NO: 1219379 - RNA, 19 nt, Homo sapiens
  misc_RNA (1)...(19): siRNA sense strand
aaacuucgccaccacagaa

SEQ ID NO: 1219380 - RNA, 19 nt, Homo sapiens
  misc_RNA (1)...(19): siRNA sense strand
gaguggguaucgaaacuuc

SEQ ID NO: 1219381 - RNA, 19 nt, Homo sapiens
  misc_RNA (1)...(19): siRNA sense strand
ucucagugaugucuguaaa

SEQ ID NO: 1219382 - RNA, 19 nt, Homo sapiens
  misc_RNA (1)...(19): siRNA sense strand
gcgaagucccggagaagaa

SEQ ID NO: 1219383 - RNA, 19 nt, Homo sapiens
  misc_RNA (1)...(19): siRNA sense strand
uaggaagcguagcaguaua

SEQ ID NO: 1219384 - RNA, 19 nt, Homo sapiens
  misc_RNA (1)...(19): siRNA sense strand
cacagaauguaucgucaga

SEQ ID NO: 1219385 - RNA, 19 nt, Homo sapiens
  misc_RNA (1)...(19): siRNA sense strand
aaacgagauuucugaugau

SEQ ID NO: 1219386 - RNA, 19 nt, Homo sapiens
  misc_RNA (1)...(19): siRNA sense strand
gcggagagagagaaacuga

SEQ ID NO: 1219387 - RNA, 19 nt, Homo sapiens
  misc_RNA (1)...(19): siRNA sense strand
ggagccaccaguucagaaa

SEQ ID NO: 1219388 - RNA, 19 nt, Homo sapiens
  misc_RNA (1)...(19): siRNA sense strand
caaaaugcauagaccuuga

SEQ ID NO: 1219389 - RNA, 19 nt, Homo sapiens
  misc_RNA (1)...(19): siRNA sense strand
ucacugacucccuuucuga

SEQ ID NO: 1219390 - RNA, 19 nt, Homo sapiens
  misc_RNA (1)...(19): siRNA sense strand
gagacacgaguuccauuau

SEQ ID NO: 1219391 - RNA, 19 nt, Homo sapiens
  misc_RNA (1)...(19): siRNA sense strand
ggucaagucagaagaaguc

SEQ ID NO: 1219392 - RNA, 19 nt, Homo sapiens
  misc_RNA (1)...(19): siRNA sense strand
ucaggaaguucuguuaucu

SEQ ID NO: 1219393 - RNA, 19 nt, Homo sapiens
  misc_RNA (1)...(19): siRNA sense strand
ccuaauuugucaacacuag

SEQ ID NO: 1219394 - RNA, 19 nt, Homo sapiens
  misc_RNA (1)...(19): siRNA sense strand
gaaacuucgccaccacaga

SEQ ID NO: 1219395 - RNA, 19 nt, Homo sapiens
  misc_RNA (1)...(19): siRNA sense strand
gaugucgggcucucaguga

SEQ ID NO: 1219396 - RNA, 19 nt, Homo sapiens
  misc_RNA (1)...(19): siRNA sense strand
aaauugguaucaccuucaa

SEQ ID NO: 1219397 - RNA, 19 nt, Homo sapiens
  misc_RNA (1)...(19): siRNA sense strand
gauuucugaugaugacuca

SEQ ID NO: 1219398 - RNA, 19 nt, Homo sapiens
  misc_RNA (1)...(19): siRNA sense strand
caucacagacucuucaucu

SEQ ID NO: 1219399 - RNA, 19 nt, Homo sapiens
  misc_RNA (1)...(19): siRNA sense strand
gcacaaguagcugcucuuc

SEQ ID NO: 1219400 - RNA, 19 nt, Homo sapiens
  misc_RNA (1)...(19): siRNA sense strand
gaagucaucaaaaugcaua

SEQ ID NO: 1219401 - RNA, 19 nt, Homo sapiens
  misc_RNA (1)...(19): siRNA sense strand
cgagauuucugaugaugac

SEQ ID NO: 1219402 - RNA, 19 nt, Homo sapiens
  misc_RNA (1)...(19): siRNA sense strand
aagcguagcaguauaucaa

SEQ ID NO: 1219403 - RNA, 19 nt, Homo sapiens
  misc_RNA (1)...(19): siRNA sense strand
gcucaggaaguucuguuau

SEQ ID NO: 1219404 - RNA, 19 nt, Homo sapiens
  misc_RNA (1)...(19): siRNA sense strand
agugaugucuguaaagaag

SEQ ID NO: 1219405 - RNA, 19 nt, Homo sapiens
  misc_RNA (1)...(19): siRNA sense strand
ucaaggagcacaaguagcu

SEQ ID NO: 1219406 - RNA, 19 nt, Homo sapiens
  misc_RNA (1)...(19): siRNA sense strand
cauuaugguuacagucuuc

SEQ ID NO: 1219407 - RNA, 19 nt, Homo sapiens
  misc_RNA (1)...(19): siRNA sense strand
ccaagagccaaaccgauau

SEQ ID NO: 1219408 - RNA, 19 nt, Homo sapiens
  misc_RNA (1)...(19): siRNA sense strand
guagcaguauaucaaagca

SEQ ID NO: 1219409 - RNA, 19 nt, Homo sapiens
  misc_RNA (1)...(19): siRNA sense strand
ugaagaacgcccugucauc

SEQ ID NO: 1219410 - RNA, 19 nt, Homo sapiens
  misc_RNA (1)...(19): siRNA sense strand
gaugagugaugagaagaac

SEQ ID NO: 1219411 - RNA, 19 nt, Homo sapiens
  misc_RNA (1)...(19): siRNA sense strand
gaaaaccgagcucuaguuc

SEQ ID NO: 1219412 - RNA, 19 nt, Homo sapiens
  misc_RNA (1)...(19): siRNA sense strand
gaagcguagcaguauauca

SEQ ID NO: 1219413 - RNA, 19 nt, Homo sapiens
  misc_RNA (1)...(19): siRNA sense strand
gaaacugaagcagcugaug

SEQ ID NO: 1219414 - RNA, 19 nt, Homo sapiens
  misc_RNA (1)...(19): siRNA sense strand
aaagaggaaguggcccuua

SEQ ID NO: 1219415 - RNA, 19 nt, Homo sapiens
  misc_RNA (1)...(19): siRNA sense strand
aguaggaagcguagcagua

SEQ ID NO: 1219416 - RNA, 19 nt, Homo sapiens
  misc_RNA (1)...(19): siRNA sense strand
uaguucaucagcuuucuaa

SEQ ID NO: 1219417 - RNA, 19 nt, Homo sapiens
  misc_RNA (1)...(19): siRNA sense strand
ggucauuggucugaagaac

SEQ ID NO: 1219418 - RNA, 19 nt, Homo sapiens
  misc_RNA (1)...(19): siRNA sense strand
gcguagcaguauaucaaag

SEQ ID NO: 1219419 - RNA, 19 nt, Homo sapiens
  misc_RNA (1)...(19): siRNA sense strand
ccgagcagcaguaacauca

SEQ ID NO: 1219420 - RNA, 19 nt, Homo sapiens
  misc_RNA (1)...(19): siRNA sense strand
aaaguagacucuccaucac

SEQ ID NO: 1219421 - RNA, 19 nt, Homo sapiens
  misc_RNA (1)...(19): siRNA sense strand
gaagugguggaaggacuga

SEQ ID NO: 1219422 - RNA, 19 nt, Homo sapiens
  misc_RNA (1)...(19): siRNA sense strand
gcucuaguucaucagcuuu

SEQ ID NO: 1219423 - RNA, 19 nt, Homo sapiens
  misc_RNA (1)...(19): siRNA sense strand
cuguaaagaagucaucaaa

SEQ ID NO: 1219424 - RNA, 19 nt, Homo sapiens
  misc_RNA (1)...(19): siRNA sense strand
cauaagugauaaucuuucc

SEQ ID NO: 1219425 - RNA, 19 nt, Homo sapiens
  misc_RNA (1)...(19): siRNA sense strand
agaggaaguggcccuuaaa

SEQ ID NO: 1219426 - RNA, 19 nt, Homo sapiens
  misc_RNA (1)...(19): siRNA sense strand
gguguuugacuccauuuca

SEQ ID NO: 1219427 - RNA, 19 nt, Homo sapiens
  misc_RNA (1)...(19): siRNA sense strand
acaccgaggagcacaucua

SEQ ID NO: 1219428 - RNA, 19 nt, Homo sapiens
  misc_RNA (1)...(19): siRNA sense strand
ucacuuuaaggucagcuuu

SEQ ID NO: 1219429 - RNA, 19 nt, Homo sapiens
  misc_RNA (1)...(19): siRNA sense strand
ucuaccaucugaaggucaa

SEQ ID NO: 1219430 - RNA, 19 nt, Homo sapiens
  misc_RNA (1)...(19): siRNA sense strand
ccaugccgguggagcugaa

SEQ ID NO: 1219431 - RNA, 19 nt, Homo sapiens
  misc_RNA (1)...(19): siRNA sense strand
cucaggaaguucuguuauc

SEQ ID NO: 1219432 - RNA, 19 nt, Homo sapiens
  misc_RNA (1)...(19): siRNA sense strand
ucaaacuggaagcaaugua

SEQ ID NO: 1219433 - RNA, 19 nt, Homo sapiens
  misc_RNA (1)...(19): siRNA sense strand
ucaaguaggaagcguagca

SEQ ID NO: 1219434 - RNA, 19 nt, Homo sapiens
  misc_RNA (1)...(19): siRNA sense strand
gaagaucugugucauauug

SEQ ID NO: 1219435 - RNA, 19 nt, Homo sapiens
  misc_RNA (1)...(19): siRNA sense strand
gaaugaaauugccauguuu

SEQ ID NO: 1219436 - RNA, 19 nt, Homo sapiens
  misc_RNA (1)...(19): siRNA sense strand
gaaaguagacucuccauca

SEQ ID NO: 1219437 - RNA, 19 nt, Homo sapiens
  misc_RNA (1)...(19): siRNA sense strand
gagcacaucuaccaucuga

SEQ ID NO: 1219438 - RNA, 19 nt, Homo sapiens
  misc_RNA (1)...(19): siRNA sense strand
gaauguaucgucagaauga

SEQ ID NO: 1219439 - RNA, 19 nt, Homo sapiens
  misc_RNA (1)...(19): siRNA sense strand
ggacaaaggaaucuugaaa

SEQ ID NO: 1219440 - RNA, 19 nt, Homo sapiens
  misc_RNA (1)...(19): siRNA sense strand
gugauaaucuuuccuuaga

SEQ ID NO: 1219441 - RNA, 19 nt, Homo sapiens
  misc_RNA (1)...(19): siRNA sense strand
gaaguucuguuaucuccaa

SEQ ID NO: 1219442 - RNA, 19 nt, Homo sapiens
  misc_RNA (1)...(19): siRNA sense strand
gaagcgaagucccggagaa

SEQ ID NO: 1219443 - RNA, 19 nt, Homo sapiens
  misc_RNA (1)...(19): siRNA sense strand
agaaugaaauugccauguu

SEQ ID NO: 1219444 - RNA, 19 nt, Homo sapiens
  misc_RNA (1)...(19): siRNA sense strand
ucuccaagcucuucagaaa

SEQ ID NO: 1219445 - RNA, 19 nt, Homo sapiens
  misc_RNA (1)...(19): siRNA sense strand
gccaagagccaaaccgaua

SEQ ID NO: 1219446 - RNA, 19 nt, Homo sapiens
  misc_RNA (1)...(19): siRNA sense strand
aagaagaucugugucauau

SEQ ID NO: 1219447 - RNA, 19 nt, Homo sapiens
  misc_RNA (1)...(19): siRNA sense strand
caagaagaucugugucaua

SEQ ID NO: 1219448 - RNA, 19 nt, Homo sapiens
  misc_RNA (1)...(19): siRNA sense strand
ccaaaccgauauagagaga

SEQ ID NO: 1219449 - RNA, 19 nt, Homo sapiens
  misc_RNA (1)...(19): siRNA sense strand
gcgaggagcuggaguacag

SEQ ID NO: 1219450 - RNA, 19 nt, Homo sapiens
  misc_RNA (1)...(19): siRNA sense strand
cagaauguaucgucagaau

SEQ ID NO: 1219451 - RNA, 19 nt, Homo sapiens
  misc_RNA (1)...(19): siRNA sense strand
aaaccgagcucuaguucau

SEQ ID NO: 1219452 - RNA, 19 nt, Homo sapiens
  misc_RNA (1)...(19): siRNA sense strand
gcaagaagaucugugucau

SEQ ID NO: 1219453 - RNA, 19 nt, Homo sapiens
  misc_RNA (1)...(19): siRNA sense strand
ggaacaacaucgggaagga

SEQ ID NO: 1219454 - RNA, 19 nt, Homo sapiens
  misc_RNA (1)...(19): siRNA sense strand
gaaggucaagucagaagaa

SEQ ID NO: 1219455 - RNA, 19 nt, Homo sapiens
  misc_RNA (1)...(19): siRNA sense strand
gagaagaaccuuggugugu

SEQ ID NO: 1219456 - RNA, 19 nt, Homo sapiens
  misc_RNA (1)...(19): siRNA sense strand
acaaguagcugcucuucca

SEQ ID NO: 1219457 - RNA, 19 nt, Homo sapiens
  misc_RNA (1)...(19): siRNA sense strand
aagaggaaguggcccuuaa

SEQ ID NO: 1219458 - RNA, 19 nt, Homo sapiens
  misc_RNA (1)...(19): siRNA sense strand
ucagugacauaagugauaa

SEQ ID NO: 1219459 - RNA, 19 nt, Homo sapiens
  misc_RNA (1)...(19): siRNA sense strand
cauauugcccauaaaguuu

SEQ ID NO: 1219460 - RNA, 19 nt, Homo sapiens
  misc_RNA (1)...(19): siRNA sense strand
gcacaucuaccaucugaag

SEQ ID NO: 1219461 - RNA, 19 nt, Homo sapiens
  misc_RNA (1)...(19): siRNA sense strand
ucagugaugucuguaaaga

SEQ ID NO: 1219462 - RNA, 19 nt, Homo sapiens
  misc_RNA (1)...(19): siRNA sense strand
uuaaaaggcuggcauaaga

SEQ ID NO: 1219463 - RNA, 19 nt, Homo sapiens
  misc_RNA (1)...(19): siRNA sense strand
aaaccgauauagagagaga

SEQ ID NO: 1219464 - RNA, 19 nt, Homo sapiens
  misc_RNA (1)...(19): siRNA sense strand
ugagacacgaguuccauua

SEQ ID NO: 1219465 - RNA, 19 nt, Homo sapiens
  misc_RNA (1)...(19): siRNA sense strand
agacuacacuccuccaauc

SEQ ID NO: 1219466 - RNA, 19 nt, Homo sapiens
  misc_RNA (1)...(19): siRNA sense strand
aaaacgagauuucugauga

SEQ ID NO: 1219467 - RNA, 19 nt, Homo sapiens
  misc_RNA (1)...(19): siRNA sense strand
cuacacuccuccaauccua

SEQ ID NO: 1219468 - RNA, 19 nt, Homo sapiens
  misc_RNA (1)...(19): siRNA sense strand
gacaaaggaaucuugaaau

SEQ ID NO: 1219469 - RNA, 19 nt, Homo sapiens
  misc_RNA (1)...(19): siRNA sense strand
caagagccaaaccgauaua

SEQ ID NO: 1219470 - RNA, 19 nt, Homo sapiens
  misc_RNA (1)...(19): siRNA sense strand
guaggaagcguagcaguau

SEQ ID NO: 1219471 - RNA, 19 nt, Homo sapiens
  misc_RNA (1)...(19): siRNA sense strand
caaacuggaagcaauguau

SEQ ID NO: 1219472 - RNA, 19 nt, Homo sapiens
  misc_RNA (1)...(19): siRNA sense strand
gagccaaaccgauauagag

SEQ ID NO: 1219473 - RNA, 19 nt, Homo sapiens
  misc_RNA (1)...(19): siRNA sense strand
acagcgagcuccuggacaa

SEQ ID NO: 1219474 - RNA, 19 nt, Homo sapiens
  misc_RNA (1)...(19): siRNA sense strand
guucaucagcuuucuaaug

SEQ ID NO: 1219475 - RNA, 19 nt, Homo sapiens
  misc_RNA (1)...(19): siRNA sense strand
ggagagagagaaacugaag

SEQ ID NO: 1219476 - RNA, 19 nt, Homo sapiens
  misc_RNA (1)...(19): siRNA sense strand
ucauauugcccauaaaguu

SEQ ID NO: 1219477 - RNA, 19 nt, Homo sapiens
  misc_RNA (1)...(19): siRNA sense strand
ugugucauauugcccauaa

SEQ ID NO: 1219478 - RNA, 19 nt, Homo sapiens
  misc_RNA (1)...(19): siRNA sense strand
agacacgaguuccauuaug

SEQ ID NO: 1219479 - RNA, 19 nt, Homo sapiens
  misc_RNA (1)...(19): siRNA sense strand
aaacuucgccaccacagaa

SEQ ID NO: 1219480 - RNA, 19 nt, Homo sapiens
  misc_RNA (1)...(19): siRNA sense strand
gaguggguaucgaaacuuc

SEQ ID NO: 1219481 - RNA, 19 nt, Homo sapiens
  misc_RNA (1)...(19): siRNA sense strand
ucucagugaugucuguaaa

SEQ ID NO: 1219482 - RNA, 19 nt, Homo sapiens
  misc_RNA (1)...(19): siRNA sense strand
gcgaagucccggagaagaa

SEQ ID NO: 1219483 - RNA, 19 nt, Homo sapiens
  misc_RNA (1)...(19): siRNA sense strand
uaggaagcguagcaguaua

SEQ ID NO: 1219484 - RNA, 19 nt, Homo sapiens
  misc_RNA (1)...(19): siRNA sense strand
cacagaauguaucgucaga

SEQ ID NO: 1219485 - RNA, 19 nt, Homo sapiens
  misc_RNA (1)...(19): siRNA sense strand
aaacgagauuucugaugau

SEQ ID NO: 1219486 - RNA, 19 nt, Homo sapiens
  misc_RNA (1)...(19): siRNA sense strand
gcggagagagagaaacuga

SEQ ID NO: 1219487 - RNA, 19 nt, Homo sapiens
  misc_RNA (1)...(19): siRNA sense strand
ggagccaccaguucagaaa

SEQ ID NO: 1219488 - RNA, 19 nt, Homo sapiens
  misc_RNA (1)...(19): siRNA sense strand
caaaaugcauagaccuuga

SEQ ID NO: 1219489 - RNA, 19 nt, Homo sapiens
  misc_RNA (1)...(19): siRNA sense strand
ucacugacucccuuucuga

SEQ ID NO: 1219490 - RNA, 19 nt, Homo sapiens
  misc_RNA (1)...(19): siRNA sense strand
gagacacgaguuccauuau

SEQ ID NO: 1219491 - RNA, 19 nt, Homo sapiens
  misc_RNA (1)...(19): siRNA sense strand
ggucaagucagaagaaguc

SEQ ID NO: 1219492 - RNA, 19 nt, Homo sapiens
  misc_RNA (1)...(19): siRNA sense strand
ucaggaaguucuguuaucu

SEQ ID NO: 1219493 - RNA, 19 nt, Homo sapiens
  misc_RNA (1)...(19): siRNA sense strand
ccuaauuugucaacacuag

SEQ ID NO: 1219494 - RNA, 19 nt, Homo sapiens
  misc_RNA (1)...(19): siRNA sense strand
gaaacuucgccaccacaga

SEQ ID NO: 1219495 - RNA, 19 nt, Homo sapiens
  misc_RNA (1)...(19): siRNA sense strand
gaugucgggcucucaguga

SEQ ID NO: 1219496 - RNA, 19 nt, Homo sapiens
  misc_RNA (1)...(19): siRNA sense strand
aaauugguaucaccuucaa

SEQ ID NO: 1219497 - RNA, 19 nt, Homo sapiens
  misc_RNA (1)...(19): siRNA sense strand
gauuucugaugaugacuca

SEQ ID NO: 1219498 - RNA, 19 nt, Homo sapiens
  misc_RNA (1)...(19): siRNA sense strand
caucacagacucuucaucu

SEQ ID NO: 1219499 - RNA, 19 nt, Homo sapiens
  misc_RNA (1)...(19): siRNA sense strand
gcacaaguagcugcucuuc

SEQ ID NO: 1219500 - RNA, 19 nt, Homo sapiens
  misc_RNA (1)...(19): siRNA sense strand
gaagucaucaaaaugcaua

SEQ ID NO: 1219501 - RNA, 19 nt, Homo sapiens
  misc_RNA (1)...(19): siRNA sense strand
cgagauuucugaugaugac

SEQ ID NO: 1219502 - RNA, 19 nt, Homo sapiens
  misc_RNA (1)...(19): siRNA sense strand
aagcguagcaguauaucaa

SEQ ID NO: 1219503 - RNA, 19 nt, Homo sapiens
  misc_RNA (1)...(19): siRNA sense strand
gcucaggaaguucuguuau

SEQ ID NO: 1219504 - RNA, 19 nt, Homo sapiens
  misc_RNA (1)...(19): siRNA sense strand
agugaugucuguaaagaag

SEQ ID NO: 1219505 - RNA, 19 nt, Homo sapiens
  misc_RNA (1)...(19): siRNA sense strand
ucaaggagcacaaguagcu

SEQ ID NO: 1219506 - RNA, 19 nt, Homo sapiens
  misc_RNA (1)...(19): siRNA sense strand
cauuaugguuacagucuuc

SEQ ID NO: 1219507 - RNA, 19 nt, Homo sapiens
  misc_RNA (1)...(19): siRNA sense strand
ccaagagccaaaccgauau

SEQ ID NO: 1219508 - RNA, 19 nt, Homo sapiens
  misc_RNA (1)...(19): siRNA sense strand
guagcaguauaucaaagca

SEQ ID NO: 1219509 - RNA, 19 nt, Homo sapiens
  misc_RNA (1)...(19): siRNA sense strand
ugaagaacgcccugucauc

SEQ ID NO: 1219510 - RNA, 19 nt, Homo sapiens
  misc_RNA (1)...(19): siRNA sense strand
gaugagugaugagaagaac

SEQ ID NO: 1219511 - RNA, 19 nt, Homo sapiens
  misc_RNA (1)...(19): siRNA sense strand
gaaaaccgagcucuaguuc

SEQ ID NO: 1219512 - RNA, 19 nt, Homo sapiens
  misc_RNA (1)...(19): siRNA sense strand
gaagcguagcaguauauca

SEQ ID NO: 1219513 - RNA, 19 nt, Homo sapiens
  misc_RNA (1)...(19): siRNA sense strand
gaaacugaagcagcugaug

SEQ ID NO: 1219514 - RNA, 19 nt, Homo sapiens
  misc_RNA (1)...(19): siRNA sense strand
aaagaggaaguggcccuua

SEQ ID NO: 1219515 - RNA, 19 nt, Homo sapiens
  misc_RNA (1)...(19): siRNA sense strand
aguaggaagcguagcagua

SEQ ID NO: 1219516 - RNA, 19 nt, Homo sapiens
  misc_RNA (1)...(19): siRNA sense strand
uaguucaucagcuuucuaa

SEQ ID NO: 1219517 - RNA, 19 nt, Homo sapiens
  misc_RNA (1)...(19): siRNA sense strand
ggucauuggucugaagaac

SEQ ID NO: 1219518 - RNA, 19 nt, Homo sapiens
  misc_RNA (1)...(19): siRNA sense strand
gcguagcaguauaucaaag

SEQ ID NO: 1219519 - RNA, 19 nt, Homo sapiens
  misc_RNA (1)...(19): siRNA sense strand
ccgagcagcaguaacauca

SEQ ID NO: 1219520 - RNA, 19 nt, Homo sapiens
  misc_RNA (1)...(19): siRNA sense strand
aaaguagacucuccaucac

SEQ ID NO: 1219521 - RNA, 19 nt, Homo sapiens
  misc_RNA (1)...(19): siRNA sense strand
gaagugguggaaggacuga

SEQ ID NO: 1219522 - RNA, 19 nt, Homo sapiens
  misc_RNA (1)...(19): siRNA sense strand
gcucuaguucaucagcuuu

SEQ ID NO: 1219523 - RNA, 19 nt, Homo sapiens
  misc_RNA (1)...(19): siRNA sense strand
cuguaaagaagucaucaaa

SEQ ID NO: 1219524 - RNA, 19 nt, Homo sapiens
  misc_RNA (1)...(19): siRNA sense strand
cauaagugauaaucuuucc

SEQ ID NO: 1219525 - RNA, 19 nt, Homo sapiens
  misc_RNA (1)...(19): siRNA sense strand
agaggaaguggcccuuaaa

SEQ ID NO: 1219526 - RNA, 19 nt, Homo sapiens
  misc_RNA (1)...(19): siRNA sense strand
gguguuugacuccauuuca

SEQ ID NO: 1219527 - RNA, 19 nt, Homo sapiens
  misc_RNA (1)...(19): siRNA sense strand
acaccgaggagcacaucua

SEQ ID NO: 1219528 - RNA, 19 nt, Homo sapiens
  misc_RNA (1)...(19): siRNA sense strand
ucacuuuaaggucagcuuu

SEQ ID NO: 1219529 - RNA, 19 nt, Homo sapiens
  misc_RNA (1)...(19): siRNA sense strand
ucuaccaucugaaggucaa

SEQ ID NO: 1219530 - RNA, 19 nt, Homo sapiens
  misc_RNA (1)...(19): siRNA sense strand
ccaugccgguggagcugaa

SEQ ID NO: 1219531 - RNA, 19 nt, Homo sapiens
  misc_RNA (1)...(19): siRNA sense strand
cucaggaaguucuguuauc

SEQ ID NO: 1219532 - RNA, 19 nt, Homo sapiens
  misc_RNA (1)...(19): siRNA sense strand
ucaaacuggaagcaaugua

SEQ ID NO: 1219533 - RNA, 19 nt, Homo sapiens
  misc_RNA (1)...(19): siRNA sense strand
ucaaguaggaagcguagca

SEQ ID NO: 1219534 - RNA, 19 nt, Homo sapiens
  misc_RNA (1)...(19): siRNA sense strand
gaagaucugugucauauug

SEQ ID NO: 1219535 - RNA, 19 nt, Homo sapiens
  misc_RNA (1)...(19): siRNA sense strand
gaaugaaauugccauguuu

SEQ ID NO: 1219536 - RNA, 19 nt, Homo sapiens
  misc_RNA (1)...(19): siRNA sense strand
agaagaagcugaaauacaa

SEQ ID NO: 1219537 - RNA, 19 nt, Homo sapiens
  misc_RNA (1)...(19): siRNA sense strand
gaaaguagacucuccauca

SEQ ID NO: 1219538 - RNA, 19 nt, Homo sapiens
  misc_RNA (1)...(19): siRNA sense strand
ucaagaaccugcaugauga

SEQ ID NO: 1219539 - RNA, 19 nt, Homo sapiens
  misc_RNA (1)...(19): siRNA sense strand
gcaaauccauggaaauugu

SEQ ID NO: 1219540 - RNA, 19 nt, Homo sapiens
  misc_RNA (1)...(19): siRNA sense strand
ggacaagggcuuccaguuu

SEQ ID NO: 1219541 - RNA, 19 nt, Homo sapiens
  misc_RNA (1)...(19): siRNA sense strand
gagcacaucuaccaucuga

SEQ ID NO: 1219542 - RNA, 19 nt, Homo sapiens
  misc_RNA (1)...(19): siRNA sense strand
ggaacaaagugaccucuug

SEQ ID NO: 1219543 - RNA, 19 nt, Homo sapiens
  misc_RNA (1)...(19): siRNA sense strand
gaauguaucgucagaauga

SEQ ID NO: 1219544 - RNA, 19 nt, Homo sapiens
  misc_RNA (1)...(19): siRNA sense strand
ggacaaaggaaucuugaaa

SEQ ID NO: 1219545 - RNA, 19 nt, Homo sapiens
  misc_RNA (1)...(19): siRNA sense strand
gugauaaucuuuccuuaga

SEQ ID NO: 1219546 - RNA, 19 nt, Homo sapiens
  misc_RNA (1)...(19): siRNA sense strand
gaaguucuguuaucuccaa

SEQ ID NO: 1219547 - RNA, 19 nt, Homo sapiens
  misc_RNA (1)...(19): siRNA sense strand
gaagggaacuuagaagaag

SEQ ID NO: 1219548 - RNA, 19 nt, Homo sapiens
  misc_RNA (1)...(19): siRNA sense strand
gaacuuagaagaagcugaa

SEQ ID NO: 1219549 - RNA, 19 nt, Homo sapiens
  misc_RNA (1)...(19): siRNA sense strand
gaacaacugcagagagaaa

SEQ ID NO: 1219550 - RNA, 19 nt, Homo sapiens
  misc_RNA (1)...(19): siRNA sense strand
gaagcgaagucccggagaa

SEQ ID NO: 1219551 - RNA, 19 nt, Homo sapiens
  misc_RNA (1)...(19): siRNA sense strand
gcgcuggaauuaaaugaaa

SEQ ID NO: 1219552 - RNA, 19 nt, Homo sapiens
  misc_RNA (1)...(19): siRNA sense strand
gagagauugucaucaagaa

SEQ ID NO: 1219553 - RNA, 19 nt, Homo sapiens
  misc_RNA (1)...(19): siRNA sense strand
ggaagggaacuuagaagaa

SEQ ID NO: 1219554 - RNA, 19 nt, Homo sapiens
  misc_RNA (1)...(19): siRNA sense strand
agaaugaaauugccauguu

SEQ ID NO: 1219555 - RNA, 19 nt, Homo sapiens
  misc_RNA (1)...(19): siRNA sense strand
ucuccaagcucuucagaaa

SEQ ID NO: 1219556 - RNA, 19 nt, Homo sapiens
  misc_RNA (1)...(19): siRNA sense strand
gccaagagccaaaccgaua

SEQ ID NO: 1219557 - RNA, 19 nt, Homo sapiens
  misc_RNA (1)...(19): siRNA sense strand
gcuggaagcaagccauuua

SEQ ID NO: 1219558 - RNA, 19 nt, Homo sapiens
  misc_RNA (1)...(19): siRNA sense strand
aagaagaucugugucauau

SEQ ID NO: 1219559 - RNA, 19 nt, Homo sapiens
  misc_RNA (1)...(19): siRNA sense strand
caagaagaucugugucaua

SEQ ID NO: 1219560 - RNA, 19 nt, Homo sapiens
  misc_RNA (1)...(19): siRNA sense strand
gcaauacuauagcuucaca

SEQ ID NO: 1219561 - RNA, 19 nt, Homo sapiens
  misc_RNA (1)...(19): siRNA sense strand
ccaaaccgauauagagaga

SEQ ID NO: 1219562 - RNA, 19 nt, Homo sapiens
  misc_RNA (1)...(19): siRNA sense strand
caacggcaccuauuuggaa

SEQ ID NO: 1219563 - RNA, 19 nt, Homo sapiens
  misc_RNA (1)...(19): siRNA sense strand
ggaaauggcaugaaagcau

SEQ ID NO: 1219564 - RNA, 19 nt, Homo sapiens
  misc_RNA (1)...(19): siRNA sense strand
gcgaggagcuggaguacag

SEQ ID NO: 1219565 - RNA, 19 nt, Homo sapiens
  misc_RNA (1)...(19): siRNA sense strand
cagaauguaucgucagaau

SEQ ID NO: 1219566 - RNA, 19 nt, Homo sapiens
  misc_RNA (1)...(19): siRNA sense strand
gagcaauacuauagcuuca

SEQ ID NO: 1219567 - RNA, 19 nt, Homo sapiens
  misc_RNA (1)...(19): siRNA sense strand
aaaccgagcucuaguucau

SEQ ID NO: 1219568 - RNA, 19 nt, Homo sapiens
  misc_RNA (1)...(19): siRNA sense strand
gcaagaagaucugugucau

SEQ ID NO: 1219569 - RNA, 19 nt, Homo sapiens
  misc_RNA (1)...(19): siRNA sense strand
gcaccuauuuggaacuuag

SEQ ID NO: 1219570 - RNA, 19 nt, Homo sapiens
  misc_RNA (1)...(19): siRNA sense strand
gcagaggauugaacaacug

SEQ ID NO: 1219571 - RNA, 19 nt, Homo sapiens
  misc_RNA (1)...(19): siRNA sense strand
gcaaaauacuggagcacua

SEQ ID NO: 1219572 - RNA, 19 nt, Homo sapiens
  misc_RNA (1)...(19): siRNA sense strand
gacaagggcuuccaguuuu

SEQ ID NO: 1219573 - RNA, 19 nt, Homo sapiens
  misc_RNA (1)...(19): siRNA sense strand
ggaacaacaucgggaagga

SEQ ID NO: 1219574 - RNA, 19 nt, Homo sapiens
  misc_RNA (1)...(19): siRNA sense strand
gaaggucaagucagaagaa

SEQ ID NO: 1219575 - RNA, 19 nt, Homo sapiens
  misc_RNA (1)...(19): siRNA sense strand
gagaagaaccuuggugugu

SEQ ID NO: 1219576 - RNA, 19 nt, Homo sapiens
  misc_RNA (1)...(19): siRNA sense strand
gggcaaauccauggaaauu

SEQ ID NO: 1219577 - RNA, 19 nt, Homo sapiens
  misc_RNA (1)...(19): siRNA sense strand
ggaagcaagccauuuaauc

SEQ ID NO: 1219578 - RNA, 19 nt, Homo sapiens
  misc_RNA (1)...(19): siRNA sense strand
gcacuaaugcccaugagau

SEQ ID NO: 1219579 - RNA, 19 nt, Homo sapiens
  misc_RNA (1)...(19): siRNA sense strand
gagcaacggcaccuauuug

SEQ ID NO: 1219580 - RNA, 19 nt, Homo sapiens
  misc_RNA (1)...(19): siRNA sense strand
acaaguagcugcucuucca

SEQ ID NO: 1219581 - RNA, 19 nt, Homo sapiens
  misc_RNA (1)...(19): siRNA sense strand
uugcauccauaacaucuua

SEQ ID NO: 1219582 - RNA, 19 nt, Homo sapiens
  misc_RNA (1)...(19): siRNA sense strand
ucagugaugucuguaaaga

SEQ ID NO: 1219583 - RNA, 19 nt, Homo sapiens
  misc_RNA (1)...(19): siRNA sense strand
cuuagaagaagcugaaaua

SEQ ID NO: 1219584 - RNA, 19 nt, Homo sapiens
  misc_RNA (1)...(19): siRNA sense strand
ucagugacauaagugauaa

SEQ ID NO: 1219585 - RNA, 19 nt, Homo sapiens
  misc_RNA (1)...(19): siRNA sense strand
cauauugcccauaaaguuu

SEQ ID NO: 1219586 - RNA, 19 nt, Homo sapiens
  misc_RNA (1)...(19): siRNA sense strand
aagaggaaguggcccuuaa

SEQ ID NO: 1219587 - RNA, 19 nt, Homo sapiens
  misc_RNA (1)...(19): siRNA sense strand
gcacaucuaccaucugaag

SEQ ID NO: 1219588 - RNA, 19 nt, Homo sapiens
  misc_RNA (1)...(19): siRNA sense strand
uuaaaaggcuggcauaaga

SEQ ID NO: 1219589 - RNA, 19 nt, Homo sapiens
  misc_RNA (1)...(19): siRNA sense strand
gaagaagcugaaauacaaa

SEQ ID NO: 1219590 - RNA, 19 nt, Homo sapiens
  misc_RNA (1)...(19): siRNA sense strand
gauugaaggcacaguguuu

SEQ ID NO: 1219591 - RNA, 19 nt, Homo sapiens
  misc_RNA (1)...(19): siRNA sense strand
ggagagauugucaucaaga

SEQ ID NO: 1219592 - RNA, 19 nt, Homo sapiens
  misc_RNA (1)...(19): siRNA sense strand
aaaccgauauagagagaga

SEQ ID NO: 1219593 - RNA, 19 nt, Homo sapiens
  misc_RNA (1)...(19): siRNA sense strand
ccagagguuucuagaggaa

SEQ ID NO: 1219594 - RNA, 19 nt, Homo sapiens
  misc_RNA (1)...(19): siRNA sense strand
agagguggauugagcacua

SEQ ID NO: 1219595 - RNA, 19 nt, Homo sapiens
  misc_RNA (1)...(19): siRNA sense strand
ggcaagaugugagauggaa

SEQ ID NO: 1219596 - RNA, 19 nt, Homo sapiens
  misc_RNA (1)...(19): siRNA sense strand
ugagacacgaguuccauua

SEQ ID NO: 1219597 - RNA, 19 nt, Homo sapiens
  misc_RNA (1)...(19): siRNA sense strand
agacuacacuccuccaauc

SEQ ID NO: 1219598 - RNA, 19 nt, Homo sapiens
  misc_RNA (1)...(19): siRNA sense strand
gaaauccgacgaugacucu

SEQ ID NO: 1219599 - RNA, 19 nt, Homo sapiens
  misc_RNA (1)...(19): siRNA sense strand
aaaacgagauuucugauga

SEQ ID NO: 1219600 - RNA, 19 nt, Homo sapiens
  misc_RNA (1)...(19): siRNA sense strand
cuacacuccuccaauccua

SEQ ID NO: 1219601 - RNA, 19 nt, Homo sapiens
  misc_RNA (1)...(19): siRNA sense strand
caugcugagucuagaaauu

SEQ ID NO: 1219602 - RNA, 19 nt, Homo sapiens
  misc_RNA (1)...(19): siRNA sense strand
gaagcaagccauuuaaucc

SEQ ID NO: 1219603 - RNA, 19 nt, Homo sapiens
  misc_RNA (1)...(19): siRNA sense strand
caagagccaaaccgauaua

SEQ ID NO: 1219604 - RNA, 19 nt, Homo sapiens
  misc_RNA (1)...(19): siRNA sense strand
gacaaaggaaucuugaaau

SEQ ID NO: 1219605 - RNA, 19 nt, Homo sapiens
  misc_RNA (1)...(19): siRNA sense strand
uacuauagcuucacacagu

SEQ ID NO: 1219606 - RNA, 19 nt, Homo sapiens
  misc_RNA (1)...(19): siRNA sense strand
guaggaagcguagcaguau

SEQ ID NO: 1219607 - RNA, 19 nt, Homo sapiens
  misc_RNA (1)...(19): siRNA sense strand
cgaaaggcuacgagcaaua

SEQ ID NO: 1219608 - RNA, 19 nt, Homo sapiens
  misc_RNA (1)...(19): siRNA sense strand
caaauccuaugccgaaagg

SEQ ID NO: 1219609 - RNA, 19 nt, Homo sapiens
  misc_RNA (1)...(19): siRNA sense strand
caaacuggaagcaauguau

SEQ ID NO: 1219610 - RNA, 19 nt, Homo sapiens
  misc_RNA (1)...(19): siRNA sense strand
gaguggguaucgaaacuuc

SEQ ID NO: 1219611 - RNA, 19 nt, Homo sapiens
  misc_RNA (1)...(19): siRNA sense strand
uugaacaacugcagagaga

SEQ ID NO: 1219612 - RNA, 19 nt, Homo sapiens
  misc_RNA (1)...(19): siRNA sense strand
gaaccugcaugaugauucc

SEQ ID NO: 1219613 - RNA, 19 nt, Homo sapiens
  misc_RNA (1)...(19): siRNA sense strand
acagcgagcuccuggacaa

SEQ ID NO: 1219614 - RNA, 19 nt, Homo sapiens
  misc_RNA (1)...(19): siRNA sense strand
guucaucagcuuucuaaug

SEQ ID NO: 1219615 - RNA, 19 nt, Homo sapiens
  misc_RNA (1)...(19): siRNA sense strand
ggagagagagaaacugaag

SEQ ID NO: 1219616 - RNA, 19 nt, Homo sapiens
  misc_RNA (1)...(19): siRNA sense strand
ucauauugcccauaaaguu

SEQ ID NO: 1219617 - RNA, 19 nt, Homo sapiens
  misc_RNA (1)...(19): siRNA sense strand
ugugucauauugcccauaa

SEQ ID NO: 1219618 - RNA, 19 nt, Homo sapiens
  misc_RNA (1)...(19): siRNA sense strand
gagccaaaccgauauagag

SEQ ID NO: 1219619 - RNA, 19 nt, Homo sapiens
  misc_RNA (1)...(19): siRNA sense strand
agacacgaguuccauuaug

SEQ ID NO: 1219620 - RNA, 19 nt, Homo sapiens
  misc_RNA (1)...(19): siRNA sense strand
aaacuucgccaccacagaa

SEQ ID NO: 1219621 - RNA, 19 nt, Homo sapiens
  misc_RNA (1)...(19): siRNA sense strand
ucucagugaugucuguaaa

SEQ ID NO: 1219622 - RNA, 19 nt, Homo sapiens
  misc_RNA (1)...(19): siRNA sense strand
gaaaggcuacgagcaauac

SEQ ID NO: 1219623 - RNA, 19 nt, Homo sapiens
  misc_RNA (1)...(19): siRNA sense strand
gcgaagucccggagaagaa

SEQ ID NO: 1219624 - RNA, 19 nt, Homo sapiens
  misc_RNA (1)...(19): siRNA sense strand
uaggaagcguagcaguaua

SEQ ID NO: 1219625 - RNA, 19 nt, Homo sapiens
  misc_RNA (1)...(19): siRNA sense strand
guauggagagcaaauccua

SEQ ID NO: 1219626 - RNA, 19 nt, Homo sapiens
  misc_RNA (1)...(19): siRNA sense strand
acuggaccauccugucuua

SEQ ID NO: 1219627 - RNA, 19 nt, Homo sapiens
  misc_RNA (1)...(19): siRNA sense strand
gcuacgagcaauacuauag

SEQ ID NO: 1219628 - RNA, 19 nt, Homo sapiens
  misc_RNA (1)...(19): siRNA sense strand
cacagaauguaucgucaga

SEQ ID NO: 1219629 - RNA, 19 nt, Homo sapiens
  misc_RNA (1)...(19): siRNA sense strand
ggagccaccaguucagaaa

SEQ ID NO: 1219630 - RNA, 19 nt, Homo sapiens
  misc_RNA (1)...(19): siRNA sense strand
ugagcacuauggagagauu

SEQ ID NO: 1219631 - RNA, 19 nt, Homo sapiens
  misc_RNA (1)...(19): siRNA sense strand
aaacgagauuucugaugau

SEQ ID NO: 1219632 - RNA, 19 nt, Homo sapiens
  misc_RNA (1)...(19): siRNA sense strand
gcggagagagagaaacuga

SEQ ID NO: 1219633 - RNA, 19 nt, Homo sapiens
  misc_RNA (1)...(19): siRNA sense strand
aguuugcgcuggaauuaaa

SEQ ID NO: 1219634 - RNA, 19 nt, Homo sapiens
  misc_RNA (1)...(19): siRNA sense strand
gaagaucugugucauauug

SEQ ID NO: 1219635 - RNA, 19 nt, Homo sapiens
  misc_RNA (1)...(19): siRNA sense strand
gaaugaaauugccauguuu

SEQ ID NO: 1219636 - RNA, 19 nt, Homo sapiens
  misc_RNA (1)...(19): siRNA sense strand
agaagaagcugaaauacaa

SEQ ID NO: 1219637 - RNA, 19 nt, Homo sapiens
  misc_RNA (1)...(19): siRNA sense strand
gaaaguagacucuccauca

SEQ ID NO: 1219638 - RNA, 19 nt, Homo sapiens
  misc_RNA (1)...(19): siRNA sense strand
ucaagaaccugcaugauga

SEQ ID NO: 1219639 - RNA, 19 nt, Homo sapiens
  misc_RNA (1)...(19): siRNA sense strand
gcaaauccauggaaauugu

SEQ ID NO: 1219640 - RNA, 19 nt, Homo sapiens
  misc_RNA (1)...(19): siRNA sense strand
ggacaagggcuuccaguuu

SEQ ID NO: 1219641 - RNA, 19 nt, Homo sapiens
  misc_RNA (1)...(19): siRNA sense strand
gagcacaucuaccaucuga

SEQ ID NO: 1219642 - RNA, 19 nt, Homo sapiens
  misc_RNA (1)...(19): siRNA sense strand
ggaacaaagugaccucuug

SEQ ID NO: 1219643 - RNA, 19 nt, Homo sapiens
  misc_RNA (1)...(19): siRNA sense strand
gaauguaucgucagaauga

SEQ ID NO: 1219644 - RNA, 19 nt, Homo sapiens
  misc_RNA (1)...(19): siRNA sense strand
ggacaaaggaaucuugaaa

SEQ ID NO: 1219645 - RNA, 19 nt, Homo sapiens
  misc_RNA (1)...(19): siRNA sense strand
gugauaaucuuuccuuaga

SEQ ID NO: 1219646 - RNA, 19 nt, Homo sapiens
  misc_RNA (1)...(19): siRNA sense strand
gaaguucuguuaucuccaa

SEQ ID NO: 1219647 - RNA, 19 nt, Homo sapiens
  misc_RNA (1)...(19): siRNA sense strand
gaagggaacuuagaagaag

SEQ ID NO: 1219648 - RNA, 19 nt, Homo sapiens
  misc_RNA (1)...(19): siRNA sense strand
gaacuuagaagaagcugaa

SEQ ID NO: 1219649 - RNA, 19 nt, Homo sapiens
  misc_RNA (1)...(19): siRNA sense strand
gaacaacugcagagagaaa

SEQ ID NO: 1219650 - RNA, 19 nt, Homo sapiens
  misc_RNA (1)...(19): siRNA sense strand
gaagcgaagucccggagaa

SEQ ID NO: 1219651 - RNA, 19 nt, Homo sapiens
  misc_RNA (1)...(19): siRNA sense strand
gcgcuggaauuaaaugaaa

SEQ ID NO: 1219652 - RNA, 19 nt, Homo sapiens
  misc_RNA (1)...(19): siRNA sense strand
gagagauugucaucaagaa

SEQ ID NO: 1219653 - RNA, 19 nt, Homo sapiens
  misc_RNA (1)...(19): siRNA sense strand
ggaagggaacuuagaagaa

SEQ ID NO: 1219654 - RNA, 19 nt, Homo sapiens
  misc_RNA (1)...(19): siRNA sense strand
agaaugaaauugccauguu

SEQ ID NO: 1219655 - RNA, 19 nt, Homo sapiens
  misc_RNA (1)...(19): siRNA sense strand
ucuccaagcucuucagaaa

SEQ ID NO: 1219656 - RNA, 19 nt, Homo sapiens
  misc_RNA (1)...(19): siRNA sense strand
gccaagagccaaaccgaua

SEQ ID NO: 1219657 - RNA, 19 nt, Homo sapiens
  misc_RNA (1)...(19): siRNA sense strand
gcuggaagcaagccauuua

SEQ ID NO: 1219658 - RNA, 19 nt, Homo sapiens
  misc_RNA (1)...(19): siRNA sense strand
aagaagaucugugucauau

SEQ ID NO: 1219659 - RNA, 19 nt, Homo sapiens
  misc_RNA (1)...(19): siRNA sense strand
caagaagaucugugucaua

SEQ ID NO: 1219660 - RNA, 19 nt, Homo sapiens
  misc_RNA (1)...(19): siRNA sense strand
gcaauacuauagcuucaca

SEQ ID NO: 1219661 - RNA, 19 nt, Homo sapiens
  misc_RNA (1)...(19): siRNA sense strand
ccaaaccgauauagagaga

SEQ ID NO: 1219662 - RNA, 19 nt, Homo sapiens
  misc_RNA (1)...(19): siRNA sense strand
caacggcaccuauuuggaa

SEQ ID NO: 1219663 - RNA, 19 nt, Homo sapiens
  misc_RNA (1)...(19): siRNA sense strand
ggaaauggcaugaaagcau

SEQ ID NO: 1219664 - RNA, 19 nt, Homo sapiens
  misc_RNA (1)...(19): siRNA sense strand
gcgaggagcuggaguacag

SEQ ID NO: 1219665 - RNA, 19 nt, Homo sapiens
  misc_RNA (1)...(19): siRNA sense strand
cagaauguaucgucagaau

SEQ ID NO: 1219666 - RNA, 19 nt, Homo sapiens
  misc_RNA (1)...(19): siRNA sense strand
gagcaauacuauagcuuca

SEQ ID NO: 1219667 - RNA, 19 nt, Homo sapiens
  misc_RNA (1)...(19): siRNA sense strand
aaaccgagcucuaguucau

SEQ ID NO: 1219668 - RNA, 19 nt, Homo sapiens
  misc_RNA (1)...(19): siRNA sense strand
gcaagaagaucugugucau

SEQ ID NO: 1219669 - RNA, 19 nt, Homo sapiens
  misc_RNA (1)...(19): siRNA sense strand
gcaccuauuuggaacuuag

SEQ ID NO: 1219670 - RNA, 19 nt, Homo sapiens
  misc_RNA (1)...(19): siRNA sense strand
gcagaggauugaacaacug

SEQ ID NO: 1219671 - RNA, 19 nt, Homo sapiens
  misc_RNA (1)...(19): siRNA sense strand
gcaaaauacuggagcacua

SEQ ID NO: 1219672 - RNA, 19 nt, Homo sapiens
  misc_RNA (1)...(19): siRNA sense strand
gacaagggcuuccaguuuu

SEQ ID NO: 1219673 - RNA, 19 nt, Homo sapiens
  misc_RNA (1)...(19): siRNA sense strand
ggaacaacaucgggaagga

SEQ ID NO: 1219674 - RNA, 19 nt, Homo sapiens
  misc_RNA (1)...(19): siRNA sense strand
gaaggucaagucagaagaa

SEQ ID NO: 1219675 - RNA, 19 nt, Homo sapiens
  misc_RNA (1)...(19): siRNA sense strand
gagaagaaccuuggugugu

SEQ ID NO: 1219676 - RNA, 19 nt, Homo sapiens
  misc_RNA (1)...(19): siRNA sense strand
gggcaaauccauggaaauu

SEQ ID NO: 1219677 - RNA, 19 nt, Homo sapiens
  misc_RNA (1)...(19): siRNA sense strand
ggaagcaagccauuuaauc

SEQ ID NO: 1219678 - RNA, 19 nt, Homo sapiens
  misc_RNA (1)...(19): siRNA sense strand
gcacuaaugcccaugagau

SEQ ID NO: 1219679 - RNA, 19 nt, Homo sapiens
  misc_RNA (1)...(19): siRNA sense strand
gagcaacggcaccuauuug

SEQ ID NO: 1219680 - RNA, 19 nt, Homo sapiens
  misc_RNA (1)...(19): siRNA sense strand
acaaguagcugcucuucca

SEQ ID NO: 1219681 - RNA, 19 nt, Homo sapiens
  misc_RNA (1)...(19): siRNA sense strand
uugcauccauaacaucuua

SEQ ID NO: 1219682 - RNA, 19 nt, Homo sapiens
  misc_RNA (1)...(19): siRNA sense strand
ucagugaugucuguaaaga

SEQ ID NO: 1219683 - RNA, 19 nt, Homo sapiens
  misc_RNA (1)...(19): siRNA sense strand
cuuagaagaagcugaaaua

SEQ ID NO: 1219684 - RNA, 19 nt, Homo sapiens
  misc_RNA (1)...(19): siRNA sense strand
ucagugacauaagugauaa

SEQ ID NO: 1219685 - RNA, 19 nt, Homo sapiens
  misc_RNA (1)...(19): siRNA sense strand
cauauugcccauaaaguuu

SEQ ID NO: 1219686 - RNA, 19 nt, Homo sapiens
  misc_RNA (1)...(19): siRNA sense strand
aagaggaaguggcccuuaa

SEQ ID NO: 1219687 - RNA, 19 nt, Homo sapiens
  misc_RNA (1)...(19): siRNA sense strand
gcacaucuaccaucugaag

SEQ ID NO: 1219688 - RNA, 19 nt, Homo sapiens
  misc_RNA (1)...(19): siRNA sense strand
uuaaaaggcuggcauaaga

SEQ ID NO: 1219689 - RNA, 19 nt, Homo sapiens
  misc_RNA (1)...(19): siRNA sense strand
gaagaagcugaaauacaaa

SEQ ID NO: 1219690 - RNA, 19 nt, Homo sapiens
  misc_RNA (1)...(19): siRNA sense strand
gauugaaggcacaguguuu

SEQ ID NO: 1219691 - RNA, 19 nt, Homo sapiens
  misc_RNA (1)...(19): siRNA sense strand
ggagagauugucaucaaga

SEQ ID NO: 1219692 - RNA, 19 nt, Homo sapiens
  misc_RNA (1)...(19): siRNA sense strand
aaaccgauauagagagaga

SEQ ID NO: 1219693 - RNA, 19 nt, Homo sapiens
  misc_RNA (1)...(19): siRNA sense strand
ccagagguuucuagaggaa

SEQ ID NO: 1219694 - RNA, 19 nt, Homo sapiens
  misc_RNA (1)...(19): siRNA sense strand
agagguggauugagcacua

SEQ ID NO: 1219695 - RNA, 19 nt, Homo sapiens
  misc_RNA (1)...(19): siRNA sense strand
ggcaagaugugagauggaa

SEQ ID NO: 1219696 - RNA, 19 nt, Homo sapiens
  misc_RNA (1)...(19): siRNA sense strand
ugagacacgaguuccauua

SEQ ID NO: 1219697 - RNA, 19 nt, Homo sapiens
  misc_RNA (1)...(19): siRNA sense strand
agacuacacuccuccaauc

SEQ ID NO: 1219698 - RNA, 19 nt, Homo sapiens
  misc_RNA (1)...(19): siRNA sense strand
gaaauccgacgaugacucu

SEQ ID NO: 1219699 - RNA, 19 nt, Homo sapiens
  misc_RNA (1)...(19): siRNA sense strand
aaaacgagauuucugauga

SEQ ID NO: 1219700 - RNA, 19 nt, Homo sapiens
  misc_RNA (1)...(19): siRNA sense strand
cuacacuccuccaauccua

SEQ ID NO: 1219701 - RNA, 19 nt, Homo sapiens
  misc_RNA (1)...(19): siRNA sense strand
caugcugagucuagaaauu

SEQ ID NO: 1219702 - RNA, 19 nt, Homo sapiens
  misc_RNA (1)...(19): siRNA sense strand
gaagcaagccauuuaaucc

SEQ ID NO: 1219703 - RNA, 19 nt, Homo sapiens
  misc_RNA (1)...(19): siRNA sense strand
caagagccaaaccgauaua

SEQ ID NO: 1219704 - RNA, 19 nt, Homo sapiens
  misc_RNA (1)...(19): siRNA sense strand
gacaaaggaaucuugaaau

SEQ ID NO: 1219705 - RNA, 19 nt, Homo sapiens
  misc_RNA (1)...(19): siRNA sense strand
uacuauagcuucacacagu

SEQ ID NO: 1219706 - RNA, 19 nt, Homo sapiens
  misc_RNA (1)...(19): siRNA sense strand
guaggaagcguagcaguau

SEQ ID NO: 1219707 - RNA, 19 nt, Homo sapiens
  misc_RNA (1)...(19): siRNA sense strand
cgaaaggcuacgagcaaua

SEQ ID NO: 1219708 - RNA, 19 nt, Homo sapiens
  misc_RNA (1)...(19): siRNA sense strand
caaauccuaugccgaaagg

SEQ ID NO: 1219709 - RNA, 19 nt, Homo sapiens
  misc_RNA (1)...(19): siRNA sense strand
caaacuggaagcaauguau

SEQ ID NO: 1219710 - RNA, 19 nt, Homo sapiens
  misc_RNA (1)...(19): siRNA sense strand
gaguggguaucgaaacuuc

SEQ ID NO: 1219711 - RNA, 19 nt, Homo sapiens
  misc_RNA (1)...(19): siRNA sense strand
uugaacaacugcagagaga

SEQ ID NO: 1219712 - RNA, 19 nt, Homo sapiens
  misc_RNA (1)...(19): siRNA sense strand
gaaccugcaugaugauucc

SEQ ID NO: 1219713 - RNA, 19 nt, Homo sapiens
  misc_RNA (1)...(19): siRNA sense strand
acagcgagcuccuggacaa

SEQ ID NO: 1219714 - RNA, 19 nt, Homo sapiens
  misc_RNA (1)...(19): siRNA sense strand
guucaucagcuuucuaaug

SEQ ID NO: 1219715 - RNA, 19 nt, Homo sapiens
  misc_RNA (1)...(19): siRNA sense strand
ggagagagagaaacugaag

SEQ ID NO: 1219716 - RNA, 19 nt, Homo sapiens
  misc_RNA (1)...(19): siRNA sense strand
ucauauugcccauaaaguu

SEQ ID NO: 1219717 - RNA, 19 nt, Homo sapiens
  misc_RNA (1)...(19): siRNA sense strand
ugugucauauugcccauaa

SEQ ID NO: 1219718 - RNA, 19 nt, Homo sapiens
  misc_RNA (1)...(19): siRNA sense strand
gagccaaaccgauauagag

SEQ ID NO: 1219719 - RNA, 19 nt, Homo sapiens
  misc_RNA (1)...(19): siRNA sense strand
agacacgaguuccauuaug

SEQ ID NO: 1219720 - RNA, 19 nt, Homo sapiens
  misc_RNA (1)...(19): siRNA sense strand
aaacuucgccaccacagaa

SEQ ID NO: 1219721 - RNA, 19 nt, Homo sapiens
  misc_RNA (1)...(19): siRNA sense strand
ucucagugaugucuguaaa

SEQ ID NO: 1219722 - RNA, 19 nt, Homo sapiens
  misc_RNA (1)...(19): siRNA sense strand
gaaaggcuacgagcaauac

SEQ ID NO: 1219723 - RNA, 19 nt, Homo sapiens
  misc_RNA (1)...(19): siRNA sense strand
gcgaagucccggagaagaa

SEQ ID NO: 1219724 - RNA, 19 nt, Homo sapiens
  misc_RNA (1)...(19): siRNA sense strand
uaggaagcguagcaguaua

SEQ ID NO: 1219725 - RNA, 19 nt, Homo sapiens
  misc_RNA (1)...(19): siRNA sense strand
guauggagagcaaauccua

SEQ ID NO: 1219726 - RNA, 19 nt, Homo sapiens
  misc_RNA (1)...(19): siRNA sense strand
acuggaccauccugucuua

SEQ ID NO: 1219727 - RNA, 19 nt, Homo sapiens
  misc_RNA (1)...(19): siRNA sense strand
gcuacgagcaauacuauag

SEQ ID NO: 1219728 - RNA, 19 nt, Homo sapiens
  misc_RNA (1)...(19): siRNA sense strand
cacagaauguaucgucaga

SEQ ID NO: 1219729 - RNA, 19 nt, Homo sapiens
  misc_RNA (1)...(19): siRNA sense strand
ggagccaccaguucagaaa

SEQ ID NO: 1219730 - RNA, 19 nt, Homo sapiens
  misc_RNA (1)...(19): siRNA sense strand
ugagcacuauggagagauu

SEQ ID NO: 1219731 - RNA, 19 nt, Homo sapiens
  misc_RNA (1)...(19): siRNA sense strand
aaacgagauuucugaugau

SEQ ID NO: 1219732 - RNA, 19 nt, Homo sapiens
  misc_RNA (1)...(19): siRNA sense strand
gcggagagagagaaacuga

SEQ ID NO: 1219733 - RNA, 19 nt, Homo sapiens
  misc_RNA (1)...(19): siRNA sense strand
aguuugcgcuggaauuaaa

SEQ ID NO: 1219734 - RNA, 19 nt, Homo sapiens
  misc_RNA (1)...(19): siRNA sense strand
gaagaucugugucauauug

SEQ ID NO: 1219735 - RNA, 19 nt, Homo sapiens
  misc_RNA (1)...(19): siRNA sense strand
gaaugaaauugccauguuu

SEQ ID NO: 1219736 - RNA, 19 nt, Homo sapiens
  misc_RNA (1)...(19): siRNA sense strand
agaagaagcugaaauacaa

SEQ ID NO: 1219737 - RNA, 19 nt, Homo sapiens
  misc_RNA (1)...(19): siRNA sense strand
gaaaguagacucuccauca

SEQ ID NO: 1219738 - RNA, 19 nt, Homo sapiens
  misc_RNA (1)...(19): siRNA sense strand
ucaagaaccugcaugauga

SEQ ID NO: 1219739 - RNA, 19 nt, Homo sapiens
  misc_RNA (1)...(19): siRNA sense strand
gcaaauccauggaaauugu

SEQ ID NO: 1219740 - RNA, 19 nt, Homo sapiens
  misc_RNA (1)...(19): siRNA sense strand
ggacaagggcuuccaguuu

SEQ ID NO: 1219741 - RNA, 19 nt, Homo sapiens
  misc_RNA (1)...(19): siRNA sense strand
gagcacaucuaccaucuga

SEQ ID NO: 1219742 - RNA, 19 nt, Homo sapiens
  misc_RNA (1)...(19): siRNA sense strand
ggaacaaagugaccucuug

SEQ ID NO: 1219743 - RNA, 19 nt, Homo sapiens
  misc_RNA (1)...(19): siRNA sense strand
gaauguaucgucagaauga

SEQ ID NO: 1219744 - RNA, 19 nt, Homo sapiens
  misc_RNA (1)...(19): siRNA sense strand
ggacaaaggaaucuugaaa

SEQ ID NO: 1219745 - RNA, 19 nt, Homo sapiens
  misc_RNA (1)...(19): siRNA sense strand
gugauaaucuuuccuuaga

SEQ ID NO: 1219746 - RNA, 19 nt, Homo sapiens
  misc_RNA (1)...(19): siRNA sense strand
gaaguucuguuaucuccaa

SEQ ID NO: 1219747 - RNA, 19 nt, Homo sapiens
  misc_RNA (1)...(19): siRNA sense strand
gaagggaacuuagaagaag

SEQ ID NO: 1219748 - RNA, 19 nt, Homo sapiens
  misc_RNA (1)...(19): siRNA sense strand
gaacuuagaagaagcugaa

SEQ ID NO: 1219749 - RNA, 19 nt, Homo sapiens
  misc_RNA (1)...(19): siRNA sense strand
gaacaacugcagagagaaa

SEQ ID NO: 1219750 - RNA, 19 nt, Homo sapiens
  misc_RNA (1)...(19): siRNA sense strand
gaagcgaagucccggagaa

SEQ ID NO: 1219751 - RNA, 19 nt, Homo sapiens
  misc_RNA (1)...(19): siRNA sense strand
gcgcuggaauuaaaugaaa

SEQ ID NO: 1219752 - RNA, 19 nt, Homo sapiens
  misc_RNA (1)...(19): siRNA sense strand
gagagauugucaucaagaa

SEQ ID NO: 1219753 - RNA, 19 nt, Homo sapiens
  misc_RNA (1)...(19): siRNA sense strand
ggaagggaacuuagaagaa

SEQ ID NO: 1219754 - RNA, 19 nt, Homo sapiens
  misc_RNA (1)...(19): siRNA sense strand
agaaugaaauugccauguu

SEQ ID NO: 1219755 - RNA, 19 nt, Homo sapiens
  misc_RNA (1)...(19): siRNA sense strand
ucuccaagcucuucagaaa

SEQ ID NO: 1219756 - RNA, 19 nt, Homo sapiens
  misc_RNA (1)...(19): siRNA sense strand
gccaagagccaaaccgaua

SEQ ID NO: 1219757 - RNA, 19 nt, Homo sapiens
  misc_RNA (1)...(19): siRNA sense strand
gcuggaagcaagccauuua

SEQ ID NO: 1219758 - RNA, 19 nt, Homo sapiens
  misc_RNA (1)...(19): siRNA sense strand
aagaagaucugugucauau

SEQ ID NO: 1219759 - RNA, 19 nt, Homo sapiens
  misc_RNA (1)...(19): siRNA sense strand
caagaagaucugugucaua

SEQ ID NO: 1219760 - RNA, 19 nt, Homo sapiens
  misc_RNA (1)...(19): siRNA sense strand
gcaauacuauagcuucaca

SEQ ID NO: 1219761 - RNA, 19 nt, Homo sapiens
  misc_RNA (1)...(19): siRNA sense strand
ccaaaccgauauagagaga

SEQ ID NO: 1219762 - RNA, 19 nt, Homo sapiens
  misc_RNA (1)...(19): siRNA sense strand
caacggcaccuauuuggaa

SEQ ID NO: 1219763 - RNA, 19 nt, Homo sapiens
  misc_RNA (1)...(19): siRNA sense strand
ggaaauggcaugaaagcau

SEQ ID NO: 1219764 - RNA, 19 nt, Homo sapiens
  misc_RNA (1)...(19): siRNA sense strand
gcgaggagcuggaguacag

SEQ ID NO: 1219765 - RNA, 19 nt, Homo sapiens
  misc_RNA (1)...(19): siRNA sense strand
cagaauguaucgucagaau

SEQ ID NO: 1219766 - RNA, 19 nt, Homo sapiens
  misc_RNA (1)...(19): siRNA sense strand
gagcaauacuauagcuuca

SEQ ID NO: 1219767 - RNA, 19 nt, Homo sapiens
  misc_RNA (1)...(19): siRNA sense strand
aaaccgagcucuaguucau

SEQ ID NO: 1219768 - RNA, 19 nt, Homo sapiens
  misc_RNA (1)...(19): siRNA sense strand
gcaagaagaucugugucau

SEQ ID NO: 1219769 - RNA, 19 nt, Homo sapiens
  misc_RNA (1)...(19): siRNA sense strand
gcaccuauuuggaacuuag

SEQ ID NO: 1219770 - RNA, 19 nt, Homo sapiens
  misc_RNA (1)...(19): siRNA sense strand
gcagaggauugaacaacug

SEQ ID NO: 1219771 - RNA, 19 nt, Homo sapiens
  misc_RNA (1)...(19): siRNA sense strand
gcaaaauacuggagcacua

SEQ ID NO: 1219772 - RNA, 19 nt, Homo sapiens
  misc_RNA (1)...(19): siRNA sense strand
gacaagggcuuccaguuuu

SEQ ID NO: 1219773 - RNA, 19 nt, Homo sapiens
  misc_RNA (1)...(19): siRNA sense strand
ggaacaacaucgggaagga

SEQ ID NO: 1219774 - RNA, 19 nt, Homo sapiens
  misc_RNA (1)...(19): siRNA sense strand
gaaggucaagucagaagaa

SEQ ID NO: 1219775 - RNA, 19 nt, Homo sapiens
  misc_RNA (1)...(19): siRNA sense strand
gagaagaaccuuggugugu

SEQ ID NO: 1219776 - RNA, 19 nt, Homo sapiens
  misc_RNA (1)...(19): siRNA sense strand
gggcaaauccauggaaauu

SEQ ID NO: 1219777 - RNA, 19 nt, Homo sapiens
  misc_RNA (1)...(19): siRNA sense strand
ggaagcaagccauuuaauc

SEQ ID NO: 1219778 - RNA, 19 nt, Homo sapiens
  misc_RNA (1)...(19): siRNA sense strand
gcacuaaugcccaugagau

SEQ ID NO: 1219779 - RNA, 19 nt, Homo sapiens
  misc_RNA (1)...(19): siRNA sense strand
gagcaacggcaccuauuug

SEQ ID NO: 1219780 - RNA, 19 nt, Homo sapiens
  misc_RNA (1)...(19): siRNA sense strand
acaaguagcugcucuucca

SEQ ID NO: 1219781 - RNA, 19 nt, Homo sapiens
  misc_RNA (1)...(19): siRNA sense strand
uugcauccauaacaucuua

SEQ ID NO: 1219782 - RNA, 19 nt, Homo sapiens
  misc_RNA (1)...(19): siRNA sense strand
ucagugaugucuguaaaga

SEQ ID NO: 1219783 - RNA, 19 nt, Homo sapiens
  misc_RNA (1)...(19): siRNA sense strand
cuuagaagaagcugaaaua

SEQ ID NO: 1219784 - RNA, 19 nt, Homo sapiens
  misc_RNA (1)...(19): siRNA sense strand
ucagugacauaagugauaa

SEQ ID NO: 1219785 - RNA, 19 nt, Homo sapiens
  misc_RNA (1)...(19): siRNA sense strand
cauauugcccauaaaguuu

SEQ ID NO: 1219786 - RNA, 19 nt, Homo sapiens
  misc_RNA (1)...(19): siRNA sense strand
aagaggaaguggcccuuaa

SEQ ID NO: 1219787 - RNA, 19 nt, Homo sapiens
  misc_RNA (1)...(19): siRNA sense strand
gcacaucuaccaucugaag

SEQ ID NO: 1219788 - RNA, 19 nt, Homo sapiens
  misc_RNA (1)...(19): siRNA sense strand
uuaaaaggcuggcauaaga

SEQ ID NO: 1219789 - RNA, 19 nt, Homo sapiens
  misc_RNA (1)...(19): siRNA sense strand
gaagaagcugaaauacaaa

SEQ ID NO: 1219790 - RNA, 19 nt, Homo sapiens
  misc_RNA (1)...(19): siRNA sense strand
gauugaaggcacaguguuu

SEQ ID NO: 1219791 - RNA, 19 nt, Homo sapiens
  misc_RNA (1)...(19): siRNA sense strand
ggagagauugucaucaaga

SEQ ID NO: 1219792 - RNA, 19 nt, Homo sapiens
  misc_RNA (1)...(19): siRNA sense strand
aaaccgauauagagagaga

SEQ ID NO: 1219793 - RNA, 19 nt, Homo sapiens
  misc_RNA (1)...(19): siRNA sense strand
ccagagguuucuagaggaa

SEQ ID NO: 1219794 - RNA, 19 nt, Homo sapiens
  misc_RNA (1)...(19): siRNA sense strand
agagguggauugagcacua

SEQ ID NO: 1219795 - RNA, 19 nt, Homo sapiens
  misc_RNA (1)...(19): siRNA sense strand
ggcaagaugugagauggaa

SEQ ID NO: 1219796 - RNA, 19 nt, Homo sapiens
  misc_RNA (1)...(19): siRNA sense strand
ugagacacgaguuccauua

SEQ ID NO: 1219797 - RNA, 19 nt, Homo sapiens
  misc_RNA (1)...(19): siRNA sense strand
agacuacacuccuccaauc

SEQ ID NO: 1219798 - RNA, 19 nt, Homo sapiens
  misc_RNA (1)...(19): siRNA sense strand
gaaauccgacgaugacucu

SEQ ID NO: 1219799 - RNA, 19 nt, Homo sapiens
  misc_RNA (1)...(19): siRNA sense strand
aaaacgagauuucugauga

SEQ ID NO: 1219800 - RNA, 19 nt, Homo sapiens
  misc_RNA (1)...(19): siRNA sense strand
cuacacuccuccaauccua

SEQ ID NO: 1219801 - RNA, 19 nt, Homo sapiens
  misc_RNA (1)...(19): siRNA sense strand
caugcugagucuagaaauu

SEQ ID NO: 1219802 - RNA, 19 nt, Homo sapiens
  misc_RNA (1)...(19): siRNA sense strand
gaagcaagccauuuaaucc

SEQ ID NO: 1219803 - RNA, 19 nt, Homo sapiens
  misc_RNA (1)...(19): siRNA sense strand
caagagccaaaccgauaua

SEQ ID NO: 1219804 - RNA, 19 nt, Homo sapiens
  misc_RNA (1)...(19): siRNA sense strand
gacaaaggaaucuugaaau

SEQ ID NO: 1219805 - RNA, 19 nt, Homo sapiens
  misc_RNA (1)...(19): siRNA sense strand
uacuauagcuucacacagu

SEQ ID NO: 1219806 - RNA, 19 nt, Homo sapiens
  misc_RNA (1)...(19): siRNA sense strand
guaggaagcguagcaguau

SEQ ID NO: 1219807 - RNA, 19 nt, Homo sapiens
  misc_RNA (1)...(19): siRNA sense strand
cgaaaggcuacgagcaaua

SEQ ID NO: 1219808 - RNA, 19 nt, Homo sapiens
  misc_RNA (1)...(19): siRNA sense strand
caaauccuaugccgaaagg

SEQ ID NO: 1219809 - RNA, 19 nt, Homo sapiens
  misc_RNA (1)...(19): siRNA sense strand
caaacuggaagcaauguau

SEQ ID NO: 1219810 - RNA, 19 nt, Homo sapiens
  misc_RNA (1)...(19): siRNA sense strand
gaguggguaucgaaacuuc

SEQ ID NO: 1219811 - RNA, 19 nt, Homo sapiens
  misc_RNA (1)...(19): siRNA sense strand
uugaacaacugcagagaga

SEQ ID NO: 1219812 - RNA, 19 nt, Homo sapiens
  misc_RNA (1)...(19): siRNA sense strand
gaaccugcaugaugauucc

SEQ ID NO: 1219813 - RNA, 19 nt, Homo sapiens
  misc_RNA (1)...(19): siRNA sense strand
acagcgagcuccuggacaa

SEQ ID NO: 1219814 - RNA, 19 nt, Homo sapiens
  misc_RNA (1)...(19): siRNA sense strand
guucaucagcuuucuaaug

SEQ ID NO: 1219815 - RNA, 19 nt, Homo sapiens
  misc_RNA (1)...(19): siRNA sense strand
ggagagagagaaacugaag

SEQ ID NO: 1219816 - RNA, 19 nt, Homo sapiens
  misc_RNA (1)...(19): siRNA sense strand
ucauauugcccauaaaguu

SEQ ID NO: 1219817 - RNA, 19 nt, Homo sapiens
  misc_RNA (1)...(19): siRNA sense strand
ugugucauauugcccauaa

SEQ ID NO: 1219818 - RNA, 19 nt, Homo sapiens
  misc_RNA (1)...(19): siRNA sense strand
gagccaaaccgauauagag

SEQ ID NO: 1219819 - RNA, 19 nt, Homo sapiens
  misc_RNA (1)...(19): siRNA sense strand
agacacgaguuccauuaug

SEQ ID NO: 1219820 - RNA, 19 nt, Homo sapiens
  misc_RNA (1)...(19): siRNA sense strand
aaacuucgccaccacagaa

SEQ ID NO: 1219821 - RNA, 19 nt, Homo sapiens
  misc_RNA (1)...(19): siRNA sense strand
ucucagugaugucuguaaa

SEQ ID NO: 1219822 - RNA, 19 nt, Homo sapiens
  misc_RNA (1)...(19): siRNA sense strand
gaaaggcuacgagcaauac

SEQ ID NO: 1219823 - RNA, 19 nt, Homo sapiens
  misc_RNA (1)...(19): siRNA sense strand
gcgaagucccggagaagaa

SEQ ID NO: 1219824 - RNA, 19 nt, Homo sapiens
  misc_RNA (1)...(19): siRNA sense strand
uaggaagcguagcaguaua

SEQ ID NO: 1219825 - RNA, 19 nt, Homo sapiens
  misc_RNA (1)...(19): siRNA sense strand
guauggagagcaaauccua

SEQ ID NO: 1219826 - RNA, 19 nt, Homo sapiens
  misc_RNA (1)...(19): siRNA sense strand
acuggaccauccugucuua

SEQ ID NO: 1219827 - RNA, 19 nt, Homo sapiens
  misc_RNA (1)...(19): siRNA sense strand
gcuacgagcaauacuauag

SEQ ID NO: 1219828 - RNA, 19 nt, Homo sapiens
  misc_RNA (1)...(19): siRNA sense strand
cacagaauguaucgucaga

SEQ ID NO: 1219829 - RNA, 19 nt, Homo sapiens
  misc_RNA (1)...(19): siRNA sense strand
ggagccaccaguucagaaa

SEQ ID NO: 1219830 - RNA, 19 nt, Homo sapiens
  misc_RNA (1)...(19): siRNA sense strand
ugagcacuauggagagauu

SEQ ID NO: 1219831 - RNA, 19 nt, Homo sapiens
  misc_RNA (1)...(19): siRNA sense strand
aaacgagauuucugaugau

SEQ ID NO: 1219832 - RNA, 19 nt, Homo sapiens
  misc_RNA (1)...(19): siRNA sense strand
gcggagagagagaaacuga

SEQ ID NO: 1219833 - RNA, 19 nt, Homo sapiens
  misc_RNA (1)...(19): siRNA sense strand
aguuugcgcuggaauuaaa

SEQ ID NO: 1219834 - RNA, 19 nt, Homo sapiens
  misc_RNA (1)...(19): siRNA sense strand
gaagaucugugucauauug

SEQ ID NO: 1219835 - RNA, 19 nt, Homo sapiens
  misc_RNA (1)...(19): siRNA sense strand
gaaugaaauugccauguuu

SEQ ID NO: 1219836 - RNA, 19 nt, Homo sapiens
  misc_RNA (1)...(19): siRNA sense strand
agaagaagcugaaauacaa

SEQ ID NO: 1219837 - RNA, 19 nt, Homo sapiens
  misc_RNA (1)...(19): siRNA sense strand
gaaaguagacucuccauca

SEQ ID NO: 1219838 - RNA, 19 nt, Homo sapiens
  misc_RNA (1)...(19): siRNA sense strand
ucaagaaccugcaugauga

SEQ ID NO: 1219839 - RNA, 19 nt, Homo sapiens
  misc_RNA (1)...(19): siRNA sense strand
gcaaauccauggaaauugu

SEQ ID NO: 1219840 - RNA, 19 nt, Homo sapiens
  misc_RNA (1)...(19): siRNA sense strand
ggacaagggcuuccaguuu

SEQ ID NO: 1219841 - RNA, 19 nt, Homo sapiens
  misc_RNA (1)...(19): siRNA sense strand
gagcacaucuaccaucuga

SEQ ID NO: 1219842 - RNA, 19 nt, Homo sapiens
  misc_RNA (1)...(19): siRNA sense strand
ggaacaaagugaccucuug

SEQ ID NO: 1219843 - RNA, 19 nt, Homo sapiens
  misc_RNA (1)...(19): siRNA sense strand
gaauguaucgucagaauga

SEQ ID NO: 1219844 - RNA, 19 nt, Homo sapiens
  misc_RNA (1)...(19): siRNA sense strand
ggacaaaggaaucuugaaa

SEQ ID NO: 1219845 - RNA, 19 nt, Homo sapiens
  misc_RNA (1)...(19): siRNA sense strand
gugauaaucuuuccuuaga

SEQ ID NO: 1219846 - RNA, 19 nt, Homo sapiens
  misc_RNA (1)...(19): siRNA sense strand
gaaguucuguuaucuccaa

SEQ ID NO: 1219847 - RNA, 19 nt, Homo sapiens
  misc_RNA (1)...(19): siRNA sense strand
gaagggaacuuagaagaag

SEQ ID NO: 1219848 - RNA, 19 nt, Homo sapiens
  misc_RNA (1)...(19): siRNA sense strand
gaacuuagaagaagcugaa

SEQ ID NO: 1219849 - RNA, 19 nt, Homo sapiens
  misc_RNA (1)...(19): siRNA sense strand
gaacaacugcagagagaaa

SEQ ID NO: 1219850 - RNA, 19 nt, Homo sapiens
  misc_RNA (1)...(19): siRNA sense strand
gaagcgaagucccggagaa

SEQ ID NO: 1219851 - RNA, 19 nt, Homo sapiens
  misc_RNA (1)...(19): siRNA sense strand
gcgcuggaauuaaaugaaa

SEQ ID NO: 1219852 - RNA, 19 nt, Homo sapiens
  misc_RNA (1)...(19): siRNA sense strand
gagagauugucaucaagaa

SEQ ID NO: 1219853 - RNA, 19 nt, Homo sapiens
  misc_RNA (1)...(19): siRNA sense strand
ggaagggaacuuagaagaa

SEQ ID NO: 1219854 - RNA, 19 nt, Homo sapiens
  misc_RNA (1)...(19): siRNA sense strand
agaaugaaauugccauguu

SEQ ID NO: 1219855 - RNA, 19 nt, Homo sapiens
  misc_RNA (1)...(19): siRNA sense strand
ucuccaagcucuucagaaa

SEQ ID NO: 1219856 - RNA, 19 nt, Homo sapiens
  misc_RNA (1)...(19): siRNA sense strand
gccaagagccaaaccgaua

SEQ ID NO: 1219857 - RNA, 19 nt, Homo sapiens
  misc_RNA (1)...(19): siRNA sense strand
gcuggaagcaagccauuua

SEQ ID NO: 1219858 - RNA, 19 nt, Homo sapiens
  misc_RNA (1)...(19): siRNA sense strand
aagaagaucugugucauau

SEQ ID NO: 1219859 - RNA, 19 nt, Homo sapiens
  misc_RNA (1)...(19): siRNA sense strand
caagaagaucugugucaua

SEQ ID NO: 1219860 - RNA, 19 nt, Homo sapiens
  misc_RNA (1)...(19): siRNA sense strand
gcaauacuauagcuucaca

SEQ ID NO: 1219861 - RNA, 19 nt, Homo sapiens
  misc_RNA (1)...(19): siRNA sense strand
ccaaaccgauauagagaga

SEQ ID NO: 1219862 - RNA, 19 nt, Homo sapiens
  misc_RNA (1)...(19): siRNA sense strand
caacggcaccuauuuggaa

SEQ ID NO: 1219863 - RNA, 19 nt, Homo sapiens
  misc_RNA (1)...(19): siRNA sense strand
ggaaauggcaugaaagcau

SEQ ID NO: 1219864 - RNA, 19 nt, Homo sapiens
  misc_RNA (1)...(19): siRNA sense strand
gcgaggagcuggaguacag

SEQ ID NO: 1219865 - RNA, 19 nt, Homo sapiens
  misc_RNA (1)...(19): siRNA sense strand
cagaauguaucgucagaau

SEQ ID NO: 1219866 - RNA, 19 nt, Homo sapiens
  misc_RNA (1)...(19): siRNA sense strand
gagcaauacuauagcuuca

SEQ ID NO: 1219867 - RNA, 19 nt, Homo sapiens
  misc_RNA (1)...(19): siRNA sense strand
aaaccgagcucuaguucau

SEQ ID NO: 1219868 - RNA, 19 nt, Homo sapiens
  misc_RNA (1)...(19): siRNA sense strand
gcaagaagaucugugucau

SEQ ID NO: 1219869 - RNA, 19 nt, Homo sapiens
  misc_RNA (1)...(19): siRNA sense strand
gcaccuauuuggaacuuag

SEQ ID NO: 1219870 - RNA, 19 nt, Homo sapiens
  misc_RNA (1)...(19): siRNA sense strand
gcagaggauugaacaacug

SEQ ID NO: 1219871 - RNA, 19 nt, Homo sapiens
  misc_RNA (1)...(19): siRNA sense strand
gcaaaauacuggagcacua

SEQ ID NO: 1219872 - RNA, 19 nt, Homo sapiens
  misc_RNA (1)...(19): siRNA sense strand
gacaagggcuuccaguuuu

SEQ ID NO: 1219873 - RNA, 19 nt, Homo sapiens
  misc_RNA (1)...(19): siRNA sense strand
ggaacaacaucgggaagga

SEQ ID NO: 1219874 - RNA, 19 nt, Homo sapiens
  misc_RNA (1)...(19): siRNA sense strand
gaaggucaagucagaagaa

SEQ ID NO: 1219875 - RNA, 19 nt, Homo sapiens
  misc_RNA (1)...(19): siRNA sense strand
gagaagaaccuuggugugu

SEQ ID NO: 1219876 - RNA, 19 nt, Homo sapiens
  misc_RNA (1)...(19): siRNA sense strand
gggcaaauccauggaaauu

SEQ ID NO: 1219877 - RNA, 19 nt, Homo sapiens
  misc_RNA (1)...(19): siRNA sense strand
ggaagcaagccauuuaauc

SEQ ID NO: 1219878 - RNA, 19 nt, Homo sapiens
  misc_RNA (1)...(19): siRNA sense strand
gcacuaaugcccaugagau

SEQ ID NO: 1219879 - RNA, 19 nt, Homo sapiens
  misc_RNA (1)...(19): siRNA sense strand
gagcaacggcaccuauuug

SEQ ID NO: 1219880 - RNA, 19 nt, Homo sapiens
  misc_RNA (1)...(19): siRNA sense strand
acaaguagcugcucuucca

SEQ ID NO: 1219881 - RNA, 19 nt, Homo sapiens
  misc_RNA (1)...(19): siRNA sense strand
uugcauccauaacaucuua

SEQ ID NO: 1219882 - RNA, 19 nt, Homo sapiens
  misc_RNA (1)...(19): siRNA sense strand
ucagugaugucuguaaaga

SEQ ID NO: 1219883 - RNA, 19 nt, Homo sapiens
  misc_RNA (1)...(19): siRNA sense strand
cuuagaagaagcugaaaua

SEQ ID NO: 1219884 - RNA, 19 nt, Homo sapiens
  misc_RNA (1)...(19): siRNA sense strand
ucagugacauaagugauaa

SEQ ID NO: 1219885 - RNA, 19 nt, Homo sapiens
  misc_RNA (1)...(19): siRNA sense strand
cauauugcccauaaaguuu

SEQ ID NO: 1219886 - RNA, 19 nt, Homo sapiens
  misc_RNA (1)...(19): siRNA sense strand
aagaggaaguggcccuuaa

SEQ ID NO: 1219887 - RNA, 19 nt, Homo sapiens
  misc_RNA (1)...(19): siRNA sense strand
gcacaucuaccaucugaag

SEQ ID NO: 1219888 - RNA, 19 nt, Homo sapiens
  misc_RNA (1)...(19): siRNA sense strand
uuaaaaggcuggcauaaga

SEQ ID NO: 1219889 - RNA, 19 nt, Homo sapiens
  misc_RNA (1)...(19): siRNA sense strand
gaagaagcugaaauacaaa

SEQ ID NO: 1219890 - RNA, 19 nt, Homo sapiens
  misc_RNA (1)...(19): siRNA sense strand
gauugaaggcacaguguuu

SEQ ID NO: 1219891 - RNA, 19 nt, Homo sapiens
  misc_RNA (1)...(19): siRNA sense strand
ggagagauugucaucaaga

SEQ ID NO: 1219892 - RNA, 19 nt, Homo sapiens
  misc_RNA (1)...(19): siRNA sense strand
aaaccgauauagagagaga

SEQ ID NO: 1219893 - RNA, 19 nt, Homo sapiens
  misc_RNA (1)...(19): siRNA sense strand
ccagagguuucuagaggaa

SEQ ID NO: 1219894 - RNA, 19 nt, Homo sapiens
  misc_RNA (1)...(19): siRNA sense strand
agagguggauugagcacua

SEQ ID NO: 1219895 - RNA, 19 nt, Homo sapiens
  misc_RNA (1)...(19): siRNA sense strand
ggcaagaugugagauggaa

SEQ ID NO: 1219896 - RNA, 19 nt, Homo sapiens
  misc_RNA (1)...(19): siRNA sense strand
ugagacacgaguuccauua

SEQ ID NO: 1219897 - RNA, 19 nt, Homo sapiens
  misc_RNA (1)...(19): siRNA sense strand
agacuacacuccuccaauc

SEQ ID NO: 1219898 - RNA, 19 nt, Homo sapiens
  misc_RNA (1)...(19): siRNA sense strand
gaaauccgacgaugacucu

SEQ ID NO: 1219899 - RNA, 19 nt, Homo sapiens
  misc_RNA (1)...(19): siRNA sense strand
aaaacgagauuucugauga

SEQ ID NO: 1219900 - RNA, 19 nt, Homo sapiens
  misc_RNA (1)...(19): siRNA sense strand
cuacacuccuccaauccua

SEQ ID NO: 1219901 - RNA, 19 nt, Homo sapiens
  misc_RNA (1)...(19): siRNA sense strand
caugcugagucuagaaauu

SEQ ID NO: 1219902 - RNA, 19 nt, Homo sapiens
  misc_RNA (1)...(19): siRNA sense strand
gaagcaagccauuuaaucc

SEQ ID NO: 1219903 - RNA, 19 nt, Homo sapiens
  misc_RNA (1)...(19): siRNA sense strand
caagagccaaaccgauaua

SEQ ID NO: 1219904 - RNA, 19 nt, Homo sapiens
  misc_RNA (1)...(19): siRNA sense strand
gacaaaggaaucuugaaau

SEQ ID NO: 1219905 - RNA, 19 nt, Homo sapiens
  misc_RNA (1)...(19): siRNA sense strand
uacuauagcuucacacagu

SEQ ID NO: 1219906 - RNA, 19 nt, Homo sapiens
  misc_RNA (1)...(19): siRNA sense strand
guaggaagcguagcaguau

SEQ ID NO: 1219907 - RNA, 19 nt, Homo sapiens
  misc_RNA (1)...(19): siRNA sense strand
cgaaaggcuacgagcaaua

SEQ ID NO: 1219908 - RNA, 19 nt, Homo sapiens
  misc_RNA (1)...(19): siRNA sense strand
caaauccuaugccgaaagg

SEQ ID NO: 1219909 - RNA, 19 nt, Homo sapiens
  misc_RNA (1)...(19): siRNA sense strand
caaacuggaagcaauguau

SEQ ID NO: 1219910 - RNA, 19 nt, Homo sapiens
  misc_RNA (1)...(19): siRNA sense strand
gaguggguaucgaaacuuc

SEQ ID NO: 1219911 - RNA, 19 nt, Homo sapiens
  misc_RNA (1)...(19): siRNA sense strand
uugaacaacugcagagaga

SEQ ID NO: 1219912 - RNA, 19 nt, Homo sapiens
  misc_RNA (1)...(19): siRNA sense strand
gaaccugcaugaugauucc

SEQ ID NO: 1219913 - RNA, 19 nt, Homo sapiens
  misc_RNA (1)...(19): siRNA sense strand
acagcgagcuccuggacaa

SEQ ID NO: 1219914 - RNA, 19 nt, Homo sapiens
  misc_RNA (1)...(19): siRNA sense strand
guucaucagcuuucuaaug

SEQ ID NO: 1219915 - RNA, 19 nt, Homo sapiens
  misc_RNA (1)...(19): siRNA sense strand
ggagagagagaaacugaag

SEQ ID NO: 1219916 - RNA, 19 nt, Homo sapiens
  misc_RNA (1)...(19): siRNA sense strand
ucauauugcccauaaaguu

SEQ ID NO: 1219917 - RNA, 19 nt, Homo sapiens
  misc_RNA (1)...(19): siRNA sense strand
ugugucauauugcccauaa

SEQ ID NO: 1219918 - RNA, 19 nt, Homo sapiens
  misc_RNA (1)...(19): siRNA sense strand
gagccaaaccgauauagag

SEQ ID NO: 1219919 - RNA, 19 nt, Homo sapiens
  misc_RNA (1)...(19): siRNA sense strand
agacacgaguuccauuaug

SEQ ID NO: 1219920 - RNA, 19 nt, Homo sapiens
  misc_RNA (1)...(19): siRNA sense strand
aaacuucgccaccacagaa

SEQ ID NO: 1219921 - RNA, 19 nt, Homo sapiens
  misc_RNA (1)...(19): siRNA sense strand
ucucagugaugucuguaaa

SEQ ID NO: 1219922 - RNA, 19 nt, Homo sapiens
  misc_RNA (1)...(19): siRNA sense strand
gaaaggcuacgagcaauac

SEQ ID NO: 1219923 - RNA, 19 nt, Homo sapiens
  misc_RNA (1)...(19): siRNA sense strand
gcgaagucccggagaagaa

SEQ ID NO: 1219924 - RNA, 19 nt, Homo sapiens
  misc_RNA (1)...(19): siRNA sense strand
uaggaagcguagcaguaua

SEQ ID NO: 1219925 - RNA, 19 nt, Homo sapiens
  misc_RNA (1)...(19): siRNA sense strand
guauggagagcaaauccua

SEQ ID NO: 1219926 - RNA, 19 nt, Homo sapiens
  misc_RNA (1)...(19): siRNA sense strand
acuggaccauccugucuua

SEQ ID NO: 1219927 - RNA, 19 nt, Homo sapiens
  misc_RNA (1)...(19): siRNA sense strand
gcuacgagcaauacuauag

SEQ ID NO: 1219928 - RNA, 19 nt, Homo sapiens
  misc_RNA (1)...(19): siRNA sense strand
cacagaauguaucgucaga

SEQ ID NO: 1219929 - RNA, 19 nt, Homo sapiens
  misc_RNA (1)...(19): siRNA sense strand
ggagccaccaguucagaaa

SEQ ID NO: 1219930 - RNA, 19 nt, Homo sapiens
  misc_RNA (1)...(19): siRNA sense strand
ugagcacuauggagagauu

SEQ ID NO: 1219931 - RNA, 19 nt, Homo sapiens
  misc_RNA (1)...(19): siRNA sense strand
aaacgagauuucugaugau

SEQ ID NO: 1219932 - RNA, 19 nt, Homo sapiens
  misc_RNA (1)...(19): siRNA sense strand
gcggagagagagaaacuga

SEQ ID NO: 1219933 - RNA, 19 nt, Homo sapiens
  misc_RNA (1)...(19): siRNA sense strand
aguuugcgcuggaauuaaa

SEQ ID NO: 1219934 - RNA, 19 nt, Homo sapiens
  misc_RNA (1)...(19): siRNA sense strand
gaagaucugugucauauug

SEQ ID NO: 1219935 - RNA, 19 nt, Homo sapiens
  misc_RNA (1)...(19): siRNA sense strand
gaaugaaauugccauguuu

SEQ ID NO: 1219936 - RNA, 19 nt, Homo sapiens
  misc_RNA (1)...(19): siRNA sense strand
gaaaguagacucuccauca

SEQ ID NO: 1219937 - RNA, 19 nt, Homo sapiens
  misc_RNA (1)...(19): siRNA sense strand
gagcacaucuaccaucuga

SEQ ID NO: 1219938 - RNA, 19 nt, Homo sapiens
  misc_RNA (1)...(19): siRNA sense strand
gaauguaucgucagaauga

SEQ ID NO: 1219939 - RNA, 19 nt, Homo sapiens
  misc_RNA (1)...(19): siRNA sense strand
ggacaaaggaaucuugaaa

SEQ ID NO: 1219940 - RNA, 19 nt, Homo sapiens
  misc_RNA (1)...(19): siRNA sense strand
gugauaaucuuuccuuaga

SEQ ID NO: 1219941 - RNA, 19 nt, Homo sapiens
  misc_RNA (1)...(19): siRNA sense strand
gaaguucuguuaucuccaa

SEQ ID NO: 1219942 - RNA, 19 nt, Homo sapiens
  misc_RNA (1)...(19): siRNA sense strand
gaagcgaagucccggagaa

SEQ ID NO: 1219943 - RNA, 19 nt, Homo sapiens
  misc_RNA (1)...(19): siRNA sense strand
agaaugaaauugccauguu

SEQ ID NO: 1219944 - RNA, 19 nt, Homo sapiens
  misc_RNA (1)...(19): siRNA sense strand
ucuccaagcucuucagaaa

SEQ ID NO: 1219945 - RNA, 19 nt, Homo sapiens
  misc_RNA (1)...(19): siRNA sense strand
gccaagagccaaaccgaua

SEQ ID NO: 1219946 - RNA, 19 nt, Homo sapiens
  misc_RNA (1)...(19): siRNA sense strand
aagaagaucugugucauau

SEQ ID NO: 1219947 - RNA, 19 nt, Homo sapiens
  misc_RNA (1)...(19): siRNA sense strand
caagaagaucugugucaua

SEQ ID NO: 1219948 - RNA, 19 nt, Homo sapiens
  misc_RNA (1)...(19): siRNA sense strand
ccaaaccgauauagagaga

SEQ ID NO: 1219949 - RNA, 19 nt, Homo sapiens
  misc_RNA (1)...(19): siRNA sense strand
gcgaggagcuggaguacag

SEQ ID NO: 1219950 - RNA, 19 nt, Homo sapiens
  misc_RNA (1)...(19): siRNA sense strand
cagaauguaucgucagaau

SEQ ID NO: 1219951 - RNA, 19 nt, Homo sapiens
  misc_RNA (1)...(19): siRNA sense strand
aaaccgagcucuaguucau

SEQ ID NO: 1219952 - RNA, 19 nt, Homo sapiens
  misc_RNA (1)...(19): siRNA sense strand
gcaagaagaucugugucau

SEQ ID NO: 1219953 - RNA, 19 nt, Homo sapiens
  misc_RNA (1)...(19): siRNA sense strand
ggaacaacaucgggaagga

SEQ ID NO: 1219954 - RNA, 19 nt, Homo sapiens
  misc_RNA (1)...(19): siRNA sense strand
gaaggucaagucagaagaa

SEQ ID NO: 1219955 - RNA, 19 nt, Homo sapiens
  misc_RNA (1)...(19): siRNA sense strand
gagaagaaccuuggugugu

SEQ ID NO: 1219956 - RNA, 19 nt, Homo sapiens
  misc_RNA (1)...(19): siRNA sense strand
acaaguagcugcucuucca

SEQ ID NO: 1219957 - RNA, 19 nt, Homo sapiens
  misc_RNA (1)...(19): siRNA sense strand
aagaggaaguggcccuuaa

SEQ ID NO: 1219958 - RNA, 19 nt, Homo sapiens
  misc_RNA (1)...(19): siRNA sense strand
ucagugacauaagugauaa

SEQ ID NO: 1219959 - RNA, 19 nt, Homo sapiens
  misc_RNA (1)...(19): siRNA sense strand
cauauugcccauaaaguuu

SEQ ID NO: 1219960 - RNA, 19 nt, Homo sapiens
  misc_RNA (1)...(19): siRNA sense strand
gcacaucuaccaucugaag

SEQ ID NO: 1219961 - RNA, 19 nt, Homo sapiens
  misc_RNA (1)...(19): siRNA sense strand
ucagugaugucuguaaaga

SEQ ID NO: 1219962 - RNA, 19 nt, Homo sapiens
  misc_RNA (1)...(19): siRNA sense strand
uuaaaaggcuggcauaaga

SEQ ID NO: 1219963 - RNA, 19 nt, Homo sapiens
  misc_RNA (1)...(19): siRNA sense strand
aaaccgauauagagagaga

SEQ ID NO: 1219964 - RNA, 19 nt, Homo sapiens
  misc_RNA (1)...(19): siRNA sense strand
ugagacacgaguuccauua

SEQ ID NO: 1219965 - RNA, 19 nt, Homo sapiens
  misc_RNA (1)...(19): siRNA sense strand
agacuacacuccuccaauc

SEQ ID NO: 1219966 - RNA, 19 nt, Homo sapiens
  misc_RNA (1)...(19): siRNA sense strand
aaaacgagauuucugauga

SEQ ID NO: 1219967 - RNA, 19 nt, Homo sapiens
  misc_RNA (1)...(19): siRNA sense strand
cuacacuccuccaauccua

SEQ ID NO: 1219968 - RNA, 19 nt, Homo sapiens
  misc_RNA (1)...(19): siRNA sense strand
gacaaaggaaucuugaaau

SEQ ID NO: 1219969 - RNA, 19 nt, Homo sapiens
  misc_RNA (1)...(19): siRNA sense strand
caagagccaaaccgauaua

SEQ ID NO: 1219970 - RNA, 19 nt, Homo sapiens
  misc_RNA (1)...(19): siRNA sense strand
guaggaagcguagcaguau

SEQ ID NO: 1219971 - RNA, 19 nt, Homo sapiens
  misc_RNA (1)...(19): siRNA sense strand
caaacuggaagcaauguau

SEQ ID NO: 1219972 - RNA, 19 nt, Homo sapiens
  misc_RNA (1)...(19): siRNA sense strand
gagccaaaccgauauagag

SEQ ID NO: 1219973 - RNA, 19 nt, Homo sapiens
  misc_RNA (1)...(19): siRNA sense strand
acagcgagcuccuggacaa

SEQ ID NO: 1219974 - RNA, 19 nt, Homo sapiens
  misc_RNA (1)...(19): siRNA sense strand
guucaucagcuuucuaaug

SEQ ID NO: 1219975 - RNA, 19 nt, Homo sapiens
  misc_RNA (1)...(19): siRNA sense strand
ggagagagagaaacugaag

SEQ ID NO: 1219976 - RNA, 19 nt, Homo sapiens
  misc_RNA (1)...(19): siRNA sense strand
ucauauugcccauaaaguu

SEQ ID NO: 1219977 - RNA, 19 nt, Homo sapiens
  misc_RNA (1)...(19): siRNA sense strand
ugugucauauugcccauaa

SEQ ID NO: 1219978 - RNA, 19 nt, Homo sapiens
  misc_RNA (1)...(19): siRNA sense strand
agacacgaguuccauuaug

SEQ ID NO: 1219979 - RNA, 19 nt, Homo sapiens
  misc_RNA (1)...(19): siRNA sense strand
aaacuucgccaccacagaa

SEQ ID NO: 1219980 - RNA, 19 nt, Homo sapiens
  misc_RNA (1)...(19): siRNA sense strand
gaguggguaucgaaacuuc

SEQ ID NO: 1219981 - RNA, 19 nt, Homo sapiens
  misc_RNA (1)...(19): siRNA sense strand
ucucagugaugucuguaaa

SEQ ID NO: 1219982 - RNA, 19 nt, Homo sapiens
  misc_RNA (1)...(19): siRNA sense strand
gcgaagucccggagaagaa

SEQ ID NO: 1219983 - RNA, 19 nt, Homo sapiens
  misc_RNA (1)...(19): siRNA sense strand
uaggaagcguagcaguaua

SEQ ID NO: 1219984 - RNA, 19 nt, Homo sapiens
  misc_RNA (1)...(19): siRNA sense strand
cacagaauguaucgucaga

SEQ ID NO: 1219985 - RNA, 19 nt, Homo sapiens
  misc_RNA (1)...(19): siRNA sense strand
aaacgagauuucugaugau

SEQ ID NO: 1219986 - RNA, 19 nt, Homo sapiens
  misc_RNA (1)...(19): siRNA sense strand
gcggagagagagaaacuga

SEQ ID NO: 1219987 - RNA, 19 nt, Homo sapiens
  misc_RNA (1)...(19): siRNA sense strand
ggagccaccaguucagaaa

SEQ ID NO: 1219988 - RNA, 19 nt, Homo sapiens
  misc_RNA (1)...(19): siRNA sense strand
caaaaugcauagaccuuga

SEQ ID NO: 1219989 - RNA, 19 nt, Homo sapiens
  misc_RNA (1)...(19): siRNA sense strand
ucacugacucccuuucuga

SEQ ID NO: 1219990 - RNA, 19 nt, Homo sapiens
  misc_RNA (1)...(19): siRNA sense strand
gagacacgaguuccauuau

SEQ ID NO: 1219991 - RNA, 19 nt, Homo sapiens
  misc_RNA (1)...(19): siRNA sense strand
ggucaagucagaagaaguc

SEQ ID NO: 1219992 - RNA, 19 nt, Homo sapiens
  misc_RNA (1)...(19): siRNA sense strand
ucaggaaguucuguuaucu

SEQ ID NO: 1219993 - RNA, 19 nt, Homo sapiens
  misc_RNA (1)...(19): siRNA sense strand
ccuaauuugucaacacuag

SEQ ID NO: 1219994 - RNA, 19 nt, Homo sapiens
  misc_RNA (1)...(19): siRNA sense strand
gaaacuucgccaccacaga

SEQ ID NO: 1219995 - RNA, 19 nt, Homo sapiens
  misc_RNA (1)...(19): siRNA sense strand
gaugucgggcucucaguga

SEQ ID NO: 1219996 - RNA, 19 nt, Homo sapiens
  misc_RNA (1)...(19): siRNA sense strand
aaauugguaucaccuucaa

SEQ ID NO: 1219997 - RNA, 19 nt, Homo sapiens
  misc_RNA (1)...(19): siRNA sense strand
gauuucugaugaugacuca

SEQ ID NO: 1219998 - RNA, 19 nt, Homo sapiens
  misc_RNA (1)...(19): siRNA sense strand
caucacagacucuucaucu

SEQ ID NO: 1219999 - RNA, 19 nt, Homo sapiens
  misc_RNA (1)...(19): siRNA sense strand
gcacaaguagcugcucuuc

SEQ ID NO: 1220000 - RNA, 19 nt, Homo sapiens
  misc_RNA (1)...(19): siRNA sense strand
gaagucaucaaaaugcaua

SEQ ID NO: 1220001 - RNA, 19 nt, Homo sapiens
  misc_RNA (1)...(19): siRNA sense strand
cgagauuucugaugaugac

SEQ ID NO: 1220002 - RNA, 19 nt, Homo sapiens
  misc_RNA (1)...(19): siRNA sense strand
aagcguagcaguauaucaa

SEQ ID NO: 1220003 - RNA, 19 nt, Homo sapiens
  misc_RNA (1)...(19): siRNA sense strand
gcucaggaaguucuguuau

SEQ ID NO: 1220004 - RNA, 19 nt, Homo sapiens
  misc_RNA (1)...(19): siRNA sense strand
agugaugucuguaaagaag

SEQ ID NO: 1220005 - RNA, 19 nt, Homo sapiens
  misc_RNA (1)...(19): siRNA sense strand
ucaaggagcacaaguagcu

SEQ ID NO: 1220006 - RNA, 19 nt, Homo sapiens
  misc_RNA (1)...(19): siRNA sense strand
cauuaugguuacagucuuc

SEQ ID NO: 1220007 - RNA, 19 nt, Homo sapiens
  misc_RNA (1)...(19): siRNA sense strand
ccaagagccaaaccgauau

SEQ ID NO: 1220008 - RNA, 19 nt, Homo sapiens
  misc_RNA (1)...(19): siRNA sense strand
guagcaguauaucaaagca

SEQ ID NO: 1220009 - RNA, 19 nt, Homo sapiens
  misc_RNA (1)...(19): siRNA sense strand
ugaagaacgcccugucauc

SEQ ID NO: 1220010 - RNA, 19 nt, Homo sapiens
  misc_RNA (1)...(19): siRNA sense strand
gaugagugaugagaagaac

SEQ ID NO: 1220011 - RNA, 19 nt, Homo sapiens
  misc_RNA (1)...(19): siRNA sense strand
gaaaaccgagcucuaguuc

SEQ ID NO: 1220012 - RNA, 19 nt, Homo sapiens
  misc_RNA (1)...(19): siRNA sense strand
gaagcguagcaguauauca

SEQ ID NO: 1220013 - RNA, 19 nt, Homo sapiens
  misc_RNA (1)...(19): siRNA sense strand
gaaacugaagcagcugaug

SEQ ID NO: 1220014 - RNA, 19 nt, Homo sapiens
  misc_RNA (1)...(19): siRNA sense strand
aaagaggaaguggcccuua

SEQ ID NO: 1220015 - RNA, 19 nt, Homo sapiens
  misc_RNA (1)...(19): siRNA sense strand
aguaggaagcguagcagua

SEQ ID NO: 1220016 - RNA, 19 nt, Homo sapiens
  misc_RNA (1)...(19): siRNA sense strand
uaguucaucagcuuucuaa

SEQ ID NO: 1220017 - RNA, 19 nt, Homo sapiens
  misc_RNA (1)...(19): siRNA sense strand
ggucauuggucugaagaac

SEQ ID NO: 1220018 - RNA, 19 nt, Homo sapiens
  misc_RNA (1)...(19): siRNA sense strand
gcguagcaguauaucaaag

SEQ ID NO: 1220019 - RNA, 19 nt, Homo sapiens
  misc_RNA (1)...(19): siRNA sense strand
ccgagcagcaguaacauca

SEQ ID NO: 1220020 - RNA, 19 nt, Homo sapiens
  misc_RNA (1)...(19): siRNA sense strand
aaaguagacucuccaucac

SEQ ID NO: 1220021 - RNA, 19 nt, Homo sapiens
  misc_RNA (1)...(19): siRNA sense strand
gaagugguggaaggacuga

SEQ ID NO: 1220022 - RNA, 19 nt, Homo sapiens
  misc_RNA (1)...(19): siRNA sense strand
gcucuaguucaucagcuuu

SEQ ID NO: 1220023 - RNA, 19 nt, Homo sapiens
  misc_RNA (1)...(19): siRNA sense strand
cuguaaagaagucaucaaa

SEQ ID NO: 1220024 - RNA, 19 nt, Homo sapiens
  misc_RNA (1)...(19): siRNA sense strand
cauaagugauaaucuuucc

SEQ ID NO: 1220025 - RNA, 19 nt, Homo sapiens
  misc_RNA (1)...(19): siRNA sense strand
agaggaaguggcccuuaaa

SEQ ID NO: 1220026 - RNA, 19 nt, Homo sapiens
  misc_RNA (1)...(19): siRNA sense strand
gguguuugacuccauuuca

SEQ ID NO: 1220027 - RNA, 19 nt, Homo sapiens
  misc_RNA (1)...(19): siRNA sense strand
acaccgaggagcacaucua

SEQ ID NO: 1220028 - RNA, 19 nt, Homo sapiens
  misc_RNA (1)...(19): siRNA sense strand
ucacuuuaaggucagcuuu

SEQ ID NO: 1220029 - RNA, 19 nt, Homo sapiens
  misc_RNA (1)...(19): siRNA sense strand
ucuaccaucugaaggucaa

SEQ ID NO: 1220030 - RNA, 19 nt, Homo sapiens
  misc_RNA (1)...(19): siRNA sense strand
ccaugccgguggagcugaa

SEQ ID NO: 1220031 - RNA, 19 nt, Homo sapiens
  misc_RNA (1)...(19): siRNA sense strand
cucaggaaguucuguuauc

SEQ ID NO: 1220032 - RNA, 19 nt, Homo sapiens
  misc_RNA (1)...(19): siRNA sense strand
ucaaacuggaagcaaugua

SEQ ID NO: 1220033 - RNA, 19 nt, Homo sapiens
  misc_RNA (1)...(19): siRNA sense strand
ucaaguaggaagcguagca

SEQ ID NO: 1220034 - RNA, 19 nt, Homo sapiens
  misc_RNA (1)...(19): siRNA sense strand
gaagaucugugucauauug

SEQ ID NO: 1220035 - RNA, 19 nt, Homo sapiens
  misc_RNA (1)...(19): siRNA sense strand
gaaugaaauugccauguuu

SEQ ID NO: 1220036 - RNA, 19 nt, Homo sapiens
  misc_RNA (1)...(19): siRNA sense strand
gaaaguagacucuccauca

SEQ ID NO: 1220037 - RNA, 19 nt, Homo sapiens
  misc_RNA (1)...(19): siRNA sense strand
gagcacaucuaccaucuga

SEQ ID NO: 1220038 - RNA, 19 nt, Homo sapiens
  misc_RNA (1)...(19): siRNA sense strand
gaauguaucgucagaauga

SEQ ID NO: 1220039 - RNA, 19 nt, Homo sapiens
  misc_RNA (1)...(19): siRNA sense strand
ggacaaaggaaucuugaaa

SEQ ID NO: 1220040 - RNA, 19 nt, Homo sapiens
  misc_RNA (1)...(19): siRNA sense strand
gugauaaucuuuccuuaga

SEQ ID NO: 1220041 - RNA, 19 nt, Homo sapiens
  misc_RNA (1)...(19): siRNA sense strand
gaaguucuguuaucuccaa

SEQ ID NO: 1220042 - RNA, 19 nt, Homo sapiens
  misc_RNA (1)...(19): siRNA sense strand
gaagcgaagucccggagaa

SEQ ID NO: 1220043 - RNA, 19 nt, Homo sapiens
  misc_RNA (1)...(19): siRNA sense strand
agaaugaaauugccauguu

SEQ ID NO: 1220044 - RNA, 19 nt, Homo sapiens
  misc_RNA (1)...(19): siRNA sense strand
ucuccaagcucuucagaaa

SEQ ID NO: 1220045 - RNA, 19 nt, Homo sapiens
  misc_RNA (1)...(19): siRNA sense strand
gccaagagccaaaccgaua

SEQ ID NO: 1220046 - RNA, 19 nt, Homo sapiens
  misc_RNA (1)...(19): siRNA sense strand
aagaagaucugugucauau

SEQ ID NO: 1220047 - RNA, 19 nt, Homo sapiens
  misc_RNA (1)...(19): siRNA sense strand
caagaagaucugugucaua

SEQ ID NO: 1220048 - RNA, 19 nt, Homo sapiens
  misc_RNA (1)...(19): siRNA sense strand
ccaaaccgauauagagaga

SEQ ID NO: 1220049 - RNA, 19 nt, Homo sapiens
  misc_RNA (1)...(19): siRNA sense strand
gcgaggagcuggaguacag

SEQ ID NO: 1220050 - RNA, 19 nt, Homo sapiens
  misc_RNA (1)...(19): siRNA sense strand
cagaauguaucgucagaau

SEQ ID NO: 1220051 - RNA, 19 nt, Homo sapiens
  misc_RNA (1)...(19): siRNA sense strand
aaaccgagcucuaguucau

SEQ ID NO: 1220052 - RNA, 19 nt, Homo sapiens
  misc_RNA (1)...(19): siRNA sense strand
gcaagaagaucugugucau

SEQ ID NO: 1220053 - RNA, 19 nt, Homo sapiens
  misc_RNA (1)...(19): siRNA sense strand
ggaacaacaucgggaagga

SEQ ID NO: 1220054 - RNA, 19 nt, Homo sapiens
  misc_RNA (1)...(19): siRNA sense strand
gaaggucaagucagaagaa

SEQ ID NO: 1220055 - RNA, 19 nt, Homo sapiens
  misc_RNA (1)...(19): siRNA sense strand
gagaagaaccuuggugugu

SEQ ID NO: 1220056 - RNA, 19 nt, Homo sapiens
  misc_RNA (1)...(19): siRNA sense strand
acaaguagcugcucuucca

SEQ ID NO: 1220057 - RNA, 19 nt, Homo sapiens
  misc_RNA (1)...(19): siRNA sense strand
aagaggaaguggcccuuaa

SEQ ID NO: 1220058 - RNA, 19 nt, Homo sapiens
  misc_RNA (1)...(19): siRNA sense strand
ucagugacauaagugauaa

SEQ ID NO: 1220059 - RNA, 19 nt, Homo sapiens
  misc_RNA (1)...(19): siRNA sense strand
cauauugcccauaaaguuu

SEQ ID NO: 1220060 - RNA, 19 nt, Homo sapiens
  misc_RNA (1)...(19): siRNA sense strand
gcacaucuaccaucugaag

SEQ ID NO: 1220061 - RNA, 19 nt, Homo sapiens
  misc_RNA (1)...(19): siRNA sense strand
ucagugaugucuguaaaga

SEQ ID NO: 1220062 - RNA, 19 nt, Homo sapiens
  misc_RNA (1)...(19): siRNA sense strand
uuaaaaggcuggcauaaga

SEQ ID NO: 1220063 - RNA, 19 nt, Homo sapiens
  misc_RNA (1)...(19): siRNA sense strand
aaaccgauauagagagaga

SEQ ID NO: 1220064 - RNA, 19 nt, Homo sapiens
  misc_RNA (1)...(19): siRNA sense strand
ugagacacgaguuccauua

SEQ ID NO: 1220065 - RNA, 19 nt, Homo sapiens
  misc_RNA (1)...(19): siRNA sense strand
agacuacacuccuccaauc

SEQ ID NO: 1220066 - RNA, 19 nt, Homo sapiens
  misc_RNA (1)...(19): siRNA sense strand
aaaacgagauuucugauga

SEQ ID NO: 1220067 - RNA, 19 nt, Homo sapiens
  misc_RNA (1)...(19): siRNA sense strand
cuacacuccuccaauccua

SEQ ID NO: 1220068 - RNA, 19 nt, Homo sapiens
  misc_RNA (1)...(19): siRNA sense strand
gacaaaggaaucuugaaau

SEQ ID NO: 1220069 - RNA, 19 nt, Homo sapiens
  misc_RNA (1)...(19): siRNA sense strand
caagagccaaaccgauaua

SEQ ID NO: 1220070 - RNA, 19 nt, Homo sapiens
  misc_RNA (1)...(19): siRNA sense strand
guaggaagcguagcaguau

SEQ ID NO: 1220071 - RNA, 19 nt, Homo sapiens
  misc_RNA (1)...(19): siRNA sense strand
caaacuggaagcaauguau

SEQ ID NO: 1220072 - RNA, 19 nt, Homo sapiens
  misc_RNA (1)...(19): siRNA sense strand
gagccaaaccgauauagag

SEQ ID NO: 1220073 - RNA, 19 nt, Homo sapiens
  misc_RNA (1)...(19): siRNA sense strand
acagcgagcuccuggacaa

SEQ ID NO: 1220074 - RNA, 19 nt, Homo sapiens
  misc_RNA (1)...(19): siRNA sense strand
guucaucagcuuucuaaug

SEQ ID NO: 1220075 - RNA, 19 nt, Homo sapiens
  misc_RNA (1)...(19): siRNA sense strand
ggagagagagaaacugaag

SEQ ID NO: 1220076 - RNA, 19 nt, Homo sapiens
  misc_RNA (1)...(19): siRNA sense strand
ucauauugcccauaaaguu

SEQ ID NO: 1220077 - RNA, 19 nt, Homo sapiens
  misc_RNA (1)...(19): siRNA sense strand
ugugucauauugcccauaa

SEQ ID NO: 1220078 - RNA, 19 nt, Homo sapiens
  misc_RNA (1)...(19): siRNA sense strand
agacacgaguuccauuaug

SEQ ID NO: 1220079 - RNA, 19 nt, Homo sapiens
  misc_RNA (1)...(19): siRNA sense strand
aaacuucgccaccacagaa

SEQ ID NO: 1220080 - RNA, 19 nt, Homo sapiens
  misc_RNA (1)...(19): siRNA sense strand
gaguggguaucgaaacuuc

SEQ ID NO: 1220081 - RNA, 19 nt, Homo sapiens
  misc_RNA (1)...(19): siRNA sense strand
ucucagugaugucuguaaa

SEQ ID NO: 1220082 - RNA, 19 nt, Homo sapiens
  misc_RNA (1)...(19): siRNA sense strand
gcgaagucccggagaagaa

SEQ ID NO: 1220083 - RNA, 19 nt, Homo sapiens
  misc_RNA (1)...(19): siRNA sense strand
uaggaagcguagcaguaua

SEQ ID NO: 1220084 - RNA, 19 nt, Homo sapiens
  misc_RNA (1)...(19): siRNA sense strand
cacagaauguaucgucaga

SEQ ID NO: 1220085 - RNA, 19 nt, Homo sapiens
  misc_RNA (1)...(19): siRNA sense strand
aaacgagauuucugaugau

SEQ ID NO: 1220086 - RNA, 19 nt, Homo sapiens
  misc_RNA (1)...(19): siRNA sense strand
gcggagagagagaaacuga

SEQ ID NO: 1220087 - RNA, 19 nt, Homo sapiens
  misc_RNA (1)...(19): siRNA sense strand
ggagccaccaguucagaaa

SEQ ID NO: 1220088 - RNA, 19 nt, Homo sapiens
  misc_RNA (1)...(19): siRNA sense strand
caaaaugcauagaccuuga

SEQ ID NO: 1220089 - RNA, 19 nt, Homo sapiens
  misc_RNA (1)...(19): siRNA sense strand
ucacugacucccuuucuga

SEQ ID NO: 1220090 - RNA, 19 nt, Homo sapiens
  misc_RNA (1)...(19): siRNA sense strand
gagacacgaguuccauuau

SEQ ID NO: 1220091 - RNA, 19 nt, Homo sapiens
  misc_RNA (1)...(19): siRNA sense strand
ggucaagucagaagaaguc

SEQ ID NO: 1220092 - RNA, 19 nt, Homo sapiens
  misc_RNA (1)...(19): siRNA sense strand
ucaggaaguucuguuaucu

SEQ ID NO: 1220093 - RNA, 19 nt, Homo sapiens
  misc_RNA (1)...(19): siRNA sense strand
ccuaauuugucaacacuag

SEQ ID NO: 1220094 - RNA, 19 nt, Homo sapiens
  misc_RNA (1)...(19): siRNA sense strand
gaaacuucgccaccacaga

SEQ ID NO: 1220095 - RNA, 19 nt, Homo sapiens
  misc_RNA (1)...(19): siRNA sense strand
gaugucgggcucucaguga

SEQ ID NO: 1220096 - RNA, 19 nt, Homo sapiens
  misc_RNA (1)...(19): siRNA sense strand
aaauugguaucaccuucaa

SEQ ID NO: 1220097 - RNA, 19 nt, Homo sapiens
  misc_RNA (1)...(19): siRNA sense strand
gauuucugaugaugacuca

SEQ ID NO: 1220098 - RNA, 19 nt, Homo sapiens
  misc_RNA (1)...(19): siRNA sense strand
caucacagacucuucaucu

SEQ ID NO: 1220099 - RNA, 19 nt, Homo sapiens
  misc_RNA (1)...(19): siRNA sense strand
gcacaaguagcugcucuuc

SEQ ID NO: 1220100 - RNA, 19 nt, Homo sapiens
  misc_RNA (1)...(19): siRNA sense strand
gaagucaucaaaaugcaua

SEQ ID NO: 1220101 - RNA, 19 nt, Homo sapiens
  misc_RNA (1)...(19): siRNA sense strand
cgagauuucugaugaugac

SEQ ID NO: 1220102 - RNA, 19 nt, Homo sapiens
  misc_RNA (1)...(19): siRNA sense strand
aagcguagcaguauaucaa

SEQ ID NO: 1220103 - RNA, 19 nt, Homo sapiens
  misc_RNA (1)...(19): siRNA sense strand
gcucaggaaguucuguuau

SEQ ID NO: 1220104 - RNA, 19 nt, Homo sapiens
  misc_RNA (1)...(19): siRNA sense strand
agugaugucuguaaagaag

SEQ ID NO: 1220105 - RNA, 19 nt, Homo sapiens
  misc_RNA (1)...(19): siRNA sense strand
ucaaggagcacaaguagcu

SEQ ID NO: 1220106 - RNA, 19 nt, Homo sapiens
  misc_RNA (1)...(19): siRNA sense strand
cauuaugguuacagucuuc

SEQ ID NO: 1220107 - RNA, 19 nt, Homo sapiens
  misc_RNA (1)...(19): siRNA sense strand
ccaagagccaaaccgauau

SEQ ID NO: 1220108 - RNA, 19 nt, Homo sapiens
  misc_RNA (1)...(19): siRNA sense strand
guagcaguauaucaaagca

SEQ ID NO: 1220109 - RNA, 19 nt, Homo sapiens
  misc_RNA (1)...(19): siRNA sense strand
ugaagaacgcccugucauc

SEQ ID NO: 1220110 - RNA, 19 nt, Homo sapiens
  misc_RNA (1)...(19): siRNA sense strand
gaugagugaugagaagaac

SEQ ID NO: 1220111 - RNA, 19 nt, Homo sapiens
  misc_RNA (1)...(19): siRNA sense strand
gaaaaccgagcucuaguuc

SEQ ID NO: 1220112 - RNA, 19 nt, Homo sapiens
  misc_RNA (1)...(19): siRNA sense strand
gaagcguagcaguauauca

SEQ ID NO: 1220113 - RNA, 19 nt, Homo sapiens
  misc_RNA (1)...(19): siRNA sense strand
gaaacugaagcagcugaug

SEQ ID NO: 1220114 - RNA, 19 nt, Homo sapiens
  misc_RNA (1)...(19): siRNA sense strand
aaagaggaaguggcccuua

SEQ ID NO: 1220115 - RNA, 19 nt, Homo sapiens
  misc_RNA (1)...(19): siRNA sense strand
aguaggaagcguagcagua

SEQ ID NO: 1220116 - RNA, 19 nt, Homo sapiens
  misc_RNA (1)...(19): siRNA sense strand
uaguucaucagcuuucuaa

SEQ ID NO: 1220117 - RNA, 19 nt, Homo sapiens
  misc_RNA (1)...(19): siRNA sense strand
ggucauuggucugaagaac

SEQ ID NO: 1220118 - RNA, 19 nt, Homo sapiens
  misc_RNA (1)...(19): siRNA sense strand
gcguagcaguauaucaaag

SEQ ID NO: 1220119 - RNA, 19 nt, Homo sapiens
  misc_RNA (1)...(19): siRNA sense strand
ccgagcagcaguaacauca

SEQ ID NO: 1220120 - RNA, 19 nt, Homo sapiens
  misc_RNA (1)...(19): siRNA sense strand
aaaguagacucuccaucac

SEQ ID NO: 1220121 - RNA, 19 nt, Homo sapiens
  misc_RNA (1)...(19): siRNA sense strand
gaagugguggaaggacuga

SEQ ID NO: 1220122 - RNA, 19 nt, Homo sapiens
  misc_RNA (1)...(19): siRNA sense strand
gcucuaguucaucagcuuu

SEQ ID NO: 1220123 - RNA, 19 nt, Homo sapiens
  misc_RNA (1)...(19): siRNA sense strand
cuguaaagaagucaucaaa

SEQ ID NO: 1220124 - RNA, 19 nt, Homo sapiens
  misc_RNA (1)...(19): siRNA sense strand
cauaagugauaaucuuucc

SEQ ID NO: 1220125 - RNA, 19 nt, Homo sapiens
  misc_RNA (1)...(19): siRNA sense strand
agaggaaguggcccuuaaa

SEQ ID NO: 1220126 - RNA, 19 nt, Homo sapiens
  misc_RNA (1)...(19): siRNA sense strand
gguguuugacuccauuuca

SEQ ID NO: 1220127 - RNA, 19 nt, Homo sapiens
  misc_RNA (1)...(19): siRNA sense strand
acaccgaggagcacaucua

SEQ ID NO: 1220128 - RNA, 19 nt, Homo sapiens
  misc_RNA (1)...(19): siRNA sense strand
ucacuuuaaggucagcuuu

SEQ ID NO: 1220129 - RNA, 19 nt, Homo sapiens
  misc_RNA (1)...(19): siRNA sense strand
ucuaccaucugaaggucaa

SEQ ID NO: 1220130 - RNA, 19 nt, Homo sapiens
  misc_RNA (1)...(19): siRNA sense strand
ccaugccgguggagcugaa

SEQ ID NO: 1220131 - RNA, 19 nt, Homo sapiens
  misc_RNA (1)...(19): siRNA sense strand
cucaggaaguucuguuauc

SEQ ID NO: 1220132 - RNA, 19 nt, Homo sapiens
  misc_RNA (1)...(19): siRNA sense strand
ucaaacuggaagcaaugua

SEQ ID NO: 1220133 - RNA, 19 nt, Homo sapiens
  misc_RNA (1)...(19): siRNA sense strand
ucaaguaggaagcguagca

SEQ ID NO: 1220134 - RNA, 19 nt, Homo sapiens
  misc_RNA (1)...(19): siRNA sense strand
gaagaucugugucauauug

SEQ ID NO: 1220135 - RNA, 19 nt, Homo sapiens
  misc_RNA (1)...(19): siRNA sense strand
gaaugaaauugccauguuu

SEQ ID NO: 1220136 - RNA, 19 nt, Homo sapiens
  misc_RNA (1)...(19): siRNA sense strand
agaagaagcugaaauacaa

SEQ ID NO: 1220137 - RNA, 19 nt, Homo sapiens
  misc_RNA (1)...(19): siRNA sense strand
gaaaguagacucuccauca

SEQ ID NO: 1220138 - RNA, 19 nt, Homo sapiens
  misc_RNA (1)...(19): siRNA sense strand
ucaagaaccugcaugauga

SEQ ID NO: 1220139 - RNA, 19 nt, Homo sapiens
  misc_RNA (1)...(19): siRNA sense strand
gcaaauccauggaaauugu

SEQ ID NO: 1220140 - RNA, 19 nt, Homo sapiens
  misc_RNA (1)...(19): siRNA sense strand
ggacaagggcuuccaguuu

SEQ ID NO: 1220141 - RNA, 19 nt, Homo sapiens
  misc_RNA (1)...(19): siRNA sense strand
gagcacaucuaccaucuga

SEQ ID NO: 1220142 - RNA, 19 nt, Homo sapiens
  misc_RNA (1)...(19): siRNA sense strand
ggaacaaagugaccucuug

SEQ ID NO: 1220143 - RNA, 19 nt, Homo sapiens
  misc_RNA (1)...(19): siRNA sense strand
gaauguaucgucagaauga

SEQ ID NO: 1220144 - RNA, 19 nt, Homo sapiens
  misc_RNA (1)...(19): siRNA sense strand
ggacaaaggaaucuugaaa

SEQ ID NO: 1220145 - RNA, 19 nt, Homo sapiens
  misc_RNA (1)...(19): siRNA sense strand
gugauaaucuuuccuuaga

SEQ ID NO: 1220146 - RNA, 19 nt, Homo sapiens
  misc_RNA (1)...(19): siRNA sense strand
gaaguucuguuaucuccaa

SEQ ID NO: 1220147 - RNA, 19 nt, Homo sapiens
  misc_RNA (1)...(19): siRNA sense strand
gaagggaacuuagaagaag

SEQ ID NO: 1220148 - RNA, 19 nt, Homo sapiens
  misc_RNA (1)...(19): siRNA sense strand
gaacuuagaagaagcugaa

SEQ ID NO: 1220149 - RNA, 19 nt, Homo sapiens
  misc_RNA (1)...(19): siRNA sense strand
gaacaacugcagagagaaa

SEQ ID NO: 1220150 - RNA, 19 nt, Homo sapiens
  misc_RNA (1)...(19): siRNA sense strand
gaagcgaagucccggagaa

SEQ ID NO: 1220151 - RNA, 19 nt, Homo sapiens
  misc_RNA (1)...(19): siRNA sense strand
gcgcuggaauuaaaugaaa

SEQ ID NO: 1220152 - RNA, 19 nt, Homo sapiens
  misc_RNA (1)...(19): siRNA sense strand
gagagauugucaucaagaa

SEQ ID NO: 1220153 - RNA, 19 nt, Homo sapiens
  misc_RNA (1)...(19): siRNA sense strand
ggaagggaacuuagaagaa

SEQ ID NO: 1220154 - RNA, 19 nt, Homo sapiens
  misc_RNA (1)...(19): siRNA sense strand
agaaugaaauugccauguu

SEQ ID NO: 1220155 - RNA, 19 nt, Homo sapiens
  misc_RNA (1)...(19): siRNA sense strand
ucuccaagcucuucagaaa

SEQ ID NO: 1220156 - RNA, 19 nt, Homo sapiens
  misc_RNA (1)...(19): siRNA sense strand
gccaagagccaaaccgaua

SEQ ID NO: 1220157 - RNA, 19 nt, Homo sapiens
  misc_RNA (1)...(19): siRNA sense strand
gcuggaagcaagccauuua

SEQ ID NO: 1220158 - RNA, 19 nt, Homo sapiens
  misc_RNA (1)...(19): siRNA sense strand
aagaagaucugugucauau

SEQ ID NO: 1220159 - RNA, 19 nt, Homo sapiens
  misc_RNA (1)...(19): siRNA sense strand
caagaagaucugugucaua

SEQ ID NO: 1220160 - RNA, 19 nt, Homo sapiens
  misc_RNA (1)...(19): siRNA sense strand
gcaauacuauagcuucaca

SEQ ID NO: 1220161 - RNA, 19 nt, Homo sapiens
  misc_RNA (1)...(19): siRNA sense strand
ccaaaccgauauagagaga

SEQ ID NO: 1220162 - RNA, 19 nt, Homo sapiens
  misc_RNA (1)...(19): siRNA sense strand
caacggcaccuauuuggaa

SEQ ID NO: 1220163 - RNA, 19 nt, Homo sapiens
  misc_RNA (1)...(19): siRNA sense strand
ggaaauggcaugaaagcau

SEQ ID NO: 1220164 - RNA, 19 nt, Homo sapiens
  misc_RNA (1)...(19): siRNA sense strand
gcgaggagcuggaguacag

SEQ ID NO: 1220165 - RNA, 19 nt, Homo sapiens
  misc_RNA (1)...(19): siRNA sense strand
cagaauguaucgucagaau

SEQ ID NO: 1220166 - RNA, 19 nt, Homo sapiens
  misc_RNA (1)...(19): siRNA sense strand
gagcaauacuauagcuuca

SEQ ID NO: 1220167 - RNA, 19 nt, Homo sapiens
  misc_RNA (1)...(19): siRNA sense strand
aaaccgagcucuaguucau

SEQ ID NO: 1220168 - RNA, 19 nt, Homo sapiens
  misc_RNA (1)...(19): siRNA sense strand
gcaagaagaucugugucau

SEQ ID NO: 1220169 - RNA, 19 nt, Homo sapiens
  misc_RNA (1)...(19): siRNA sense strand
gcaccuauuuggaacuuag

SEQ ID NO: 1220170 - RNA, 19 nt, Homo sapiens
  misc_RNA (1)...(19): siRNA sense strand
gcagaggauugaacaacug

SEQ ID NO: 1220171 - RNA, 19 nt, Homo sapiens
  misc_RNA (1)...(19): siRNA sense strand
gcaaaauacuggagcacua

SEQ ID NO: 1220172 - RNA, 19 nt, Homo sapiens
  misc_RNA (1)...(19): siRNA sense strand
gacaagggcuuccaguuuu

SEQ ID NO: 1220173 - RNA, 19 nt, Homo sapiens
  misc_RNA (1)...(19): siRNA sense strand
ggaacaacaucgggaagga

SEQ ID NO: 1220174 - RNA, 19 nt, Homo sapiens
  misc_RNA (1)...(19): siRNA sense strand
gaaggucaagucagaagaa

SEQ ID NO: 1220175 - RNA, 19 nt, Homo sapiens
  misc_RNA (1)...(19): siRNA sense strand
gagaagaaccuuggugugu

SEQ ID NO: 1220176 - RNA, 19 nt, Homo sapiens
  misc_RNA (1)...(19): siRNA sense strand
gggcaaauccauggaaauu

SEQ ID NO: 1220177 - RNA, 19 nt, Homo sapiens
  misc_RNA (1)...(19): siRNA sense strand
ggaagcaagccauuuaauc

SEQ ID NO: 1220178 - RNA, 19 nt, Homo sapiens
  misc_RNA (1)...(19): siRNA sense strand
gcacuaaugcccaugagau

SEQ ID NO: 1220179 - RNA, 19 nt, Homo sapiens
  misc_RNA (1)...(19): siRNA sense strand
gagcaacggcaccuauuug

SEQ ID NO: 1220180 - RNA, 19 nt, Homo sapiens
  misc_RNA (1)...(19): siRNA sense strand
acaaguagcugcucuucca

SEQ ID NO: 1220181 - RNA, 19 nt, Homo sapiens
  misc_RNA (1)...(19): siRNA sense strand
uugcauccauaacaucuua

SEQ ID NO: 1220182 - RNA, 19 nt, Homo sapiens
  misc_RNA (1)...(19): siRNA sense strand
ucagugaugucuguaaaga

SEQ ID NO: 1220183 - RNA, 19 nt, Homo sapiens
  misc_RNA (1)...(19): siRNA sense strand
cuuagaagaagcugaaaua

SEQ ID NO: 1220184 - RNA, 19 nt, Homo sapiens
  misc_RNA (1)...(19): siRNA sense strand
ucagugacauaagugauaa

SEQ ID NO: 1220185 - RNA, 19 nt, Homo sapiens
  misc_RNA (1)...(19): siRNA sense strand
cauauugcccauaaaguuu

SEQ ID NO: 1220186 - RNA, 19 nt, Homo sapiens
  misc_RNA (1)...(19): siRNA sense strand
aagaggaaguggcccuuaa

SEQ ID NO: 1220187 - RNA, 19 nt, Homo sapiens
  misc_RNA (1)...(19): siRNA sense strand
gcacaucuaccaucugaag

SEQ ID NO: 1220188 - RNA, 19 nt, Homo sapiens
  misc_RNA (1)...(19): siRNA sense strand
uuaaaaggcuggcauaaga

SEQ ID NO: 1220189 - RNA, 19 nt, Homo sapiens
  misc_RNA (1)...(19): siRNA sense strand
gaagaagcugaaauacaaa

SEQ ID NO: 1220190 - RNA, 19 nt, Homo sapiens
  misc_RNA (1)...(19): siRNA sense strand
gauugaaggcacaguguuu

SEQ ID NO: 1220191 - RNA, 19 nt, Homo sapiens
  misc_RNA (1)...(19): siRNA sense strand
ggagagauugucaucaaga

SEQ ID NO: 1220192 - RNA, 19 nt, Homo sapiens
  misc_RNA (1)...(19): siRNA sense strand
aaaccgauauagagagaga

SEQ ID NO: 1220193 - RNA, 19 nt, Homo sapiens
  misc_RNA (1)...(19): siRNA sense strand
ccagagguuucuagaggaa

SEQ ID NO: 1220194 - RNA, 19 nt, Homo sapiens
  misc_RNA (1)...(19): siRNA sense strand
agagguggauugagcacua

SEQ ID NO: 1220195 - RNA, 19 nt, Homo sapiens
  misc_RNA (1)...(19): siRNA sense strand
ggcaagaugugagauggaa

SEQ ID NO: 1220196 - RNA, 19 nt, Homo sapiens
  misc_RNA (1)...(19): siRNA sense strand
ugagacacgaguuccauua

SEQ ID NO: 1220197 - RNA, 19 nt, Homo sapiens
  misc_RNA (1)...(19): siRNA sense strand
agacuacacuccuccaauc

SEQ ID NO: 1220198 - RNA, 19 nt, Homo sapiens
  misc_RNA (1)...(19): siRNA sense strand
gaaauccgacgaugacucu

SEQ ID NO: 1220199 - RNA, 19 nt, Homo sapiens
  misc_RNA (1)...(19): siRNA sense strand
aaaacgagauuucugauga

SEQ ID NO: 1220200 - RNA, 19 nt, Homo sapiens
  misc_RNA (1)...(19): siRNA sense strand
cuacacuccuccaauccua

SEQ ID NO: 1220201 - RNA, 19 nt, Homo sapiens
  misc_RNA (1)...(19): siRNA sense strand
caugcugagucuagaaauu

SEQ ID NO: 1220202 - RNA, 19 nt, Homo sapiens
  misc_RNA (1)...(19): siRNA sense strand
gaagcaagccauuuaaucc

SEQ ID NO: 1220203 - RNA, 19 nt, Homo sapiens
  misc_RNA (1)...(19): siRNA sense strand
caagagccaaaccgauaua

SEQ ID NO: 1220204 - RNA, 19 nt, Homo sapiens
  misc_RNA (1)...(19): siRNA sense strand
gacaaaggaaucuugaaau

SEQ ID NO: 1220205 - RNA, 19 nt, Homo sapiens
  misc_RNA (1)...(19): siRNA sense strand
uacuauagcuucacacagu

SEQ ID NO: 1220206 - RNA, 19 nt, Homo sapiens
  misc_RNA (1)...(19): siRNA sense strand
guaggaagcguagcaguau

SEQ ID NO: 1220207 - RNA, 19 nt, Homo sapiens
  misc_RNA (1)...(19): siRNA sense strand
cgaaaggcuacgagcaaua

SEQ ID NO: 1220208 - RNA, 19 nt, Homo sapiens
  misc_RNA (1)...(19): siRNA sense strand
caaauccuaugccgaaagg

SEQ ID NO: 1220209 - RNA, 19 nt, Homo sapiens
  misc_RNA (1)...(19): siRNA sense strand
caaacuggaagcaauguau

SEQ ID NO: 1220210 - RNA, 19 nt, Homo sapiens
  misc_RNA (1)...(19): siRNA sense strand
gaguggguaucgaaacuuc

SEQ ID NO: 1220211 - RNA, 19 nt, Homo sapiens
  misc_RNA (1)...(19): siRNA sense strand
uugaacaacugcagagaga

SEQ ID NO: 1220212 - RNA, 19 nt, Homo sapiens
  misc_RNA (1)...(19): siRNA sense strand
gaaccugcaugaugauucc

SEQ ID NO: 1220213 - RNA, 19 nt, Homo sapiens
  misc_RNA (1)...(19): siRNA sense strand
acagcgagcuccuggacaa

SEQ ID NO: 1220214 - RNA, 19 nt, Homo sapiens
  misc_RNA (1)...(19): siRNA sense strand
guucaucagcuuucuaaug

SEQ ID NO: 1220215 - RNA, 19 nt, Homo sapiens
  misc_RNA (1)...(19): siRNA sense strand
ggagagagagaaacugaag

SEQ ID NO: 1220216 - RNA, 19 nt, Homo sapiens
  misc_RNA (1)...(19): siRNA sense strand
ucauauugcccauaaaguu

SEQ ID NO: 1220217 - RNA, 19 nt, Homo sapiens
  misc_RNA (1)...(19): siRNA sense strand
ugugucauauugcccauaa

SEQ ID NO: 1220218 - RNA, 19 nt, Homo sapiens
  misc_RNA (1)...(19): siRNA sense strand
gagccaaaccgauauagag

SEQ ID NO: 1220219 - RNA, 19 nt, Homo sapiens
  misc_RNA (1)...(19): siRNA sense strand
agacacgaguuccauuaug

SEQ ID NO: 1220220 - RNA, 19 nt, Homo sapiens
  misc_RNA (1)...(19): siRNA sense strand
aaacuucgccaccacagaa

SEQ ID NO: 1220221 - RNA, 19 nt, Homo sapiens
  misc_RNA (1)...(19): siRNA sense strand
ucucagugaugucuguaaa

SEQ ID NO: 1220222 - RNA, 19 nt, Homo sapiens
  misc_RNA (1)...(19): siRNA sense strand
gaaaggcuacgagcaauac

SEQ ID NO: 1220223 - RNA, 19 nt, Homo sapiens
  misc_RNA (1)...(19): siRNA sense strand
gcgaagucccggagaagaa

SEQ ID NO: 1220224 - RNA, 19 nt, Homo sapiens
  misc_RNA (1)...(19): siRNA sense strand
uaggaagcguagcaguaua

SEQ ID NO: 1220225 - RNA, 19 nt, Homo sapiens
  misc_RNA (1)...(19): siRNA sense strand
guauggagagcaaauccua

SEQ ID NO: 1220226 - RNA, 19 nt, Homo sapiens
  misc_RNA (1)...(19): siRNA sense strand
acuggaccauccugucuua

SEQ ID NO: 1220227 - RNA, 19 nt, Homo sapiens
  misc_RNA (1)...(19): siRNA sense strand
gcuacgagcaauacuauag

SEQ ID NO: 1220228 - RNA, 19 nt, Homo sapiens
  misc_RNA (1)...(19): siRNA sense strand
cacagaauguaucgucaga

SEQ ID NO: 1220229 - RNA, 19 nt, Homo sapiens
  misc_RNA (1)...(19): siRNA sense strand
ggagccaccaguucagaaa

SEQ ID NO: 1220230 - RNA, 19 nt, Homo sapiens
  misc_RNA (1)...(19): siRNA sense strand
ugagcacuauggagagauu

SEQ ID NO: 1220231 - RNA, 19 nt, Homo sapiens
  misc_RNA (1)...(19): siRNA sense strand
aaacgagauuucugaugau

SEQ ID NO: 1220232 - RNA, 19 nt, Homo sapiens
  misc_RNA (1)...(19): siRNA sense strand
gcggagagagagaaacuga

SEQ ID NO: 1220233 - RNA, 19 nt, Homo sapiens
  misc_RNA (1)...(19): siRNA sense strand
aguuugcgcuggaauuaaa

SEQ ID NO: 1220234 - RNA, 19 nt, Homo sapiens
  misc_RNA (1)...(19): siRNA sense strand
gaagaucugugucauauug

SEQ ID NO: 1220235 - RNA, 19 nt, Homo sapiens
  misc_RNA (1)...(19): siRNA sense strand
gaaugaaauugccauguuu

SEQ ID NO: 1220236 - RNA, 19 nt, Homo sapiens
  misc_RNA (1)...(19): siRNA sense strand
agaagaagcugaaauacaa

SEQ ID NO: 1220237 - RNA, 19 nt, Homo sapiens
  misc_RNA (1)...(19): siRNA sense strand
gaaaguagacucuccauca

SEQ ID NO: 1220238 - RNA, 19 nt, Homo sapiens
  misc_RNA (1)...(19): siRNA sense strand
ucaagaaccugcaugauga

SEQ ID NO: 1220239 - RNA, 19 nt, Homo sapiens
  misc_RNA (1)...(19): siRNA sense strand
gcaaauccauggaaauugu

SEQ ID NO: 1220240 - RNA, 19 nt, Homo sapiens
  misc_RNA (1)...(19): siRNA sense strand
ggacaagggcuuccaguuu

SEQ ID NO: 1220241 - RNA, 19 nt, Homo sapiens
  misc_RNA (1)...(19): siRNA sense strand
gagcacaucuaccaucuga

SEQ ID NO: 1220242 - RNA, 19 nt, Homo sapiens
  misc_RNA (1)...(19): siRNA sense strand
ggaacaaagugaccucuug

SEQ ID NO: 1220243 - RNA, 19 nt, Homo sapiens
  misc_RNA (1)...(19): siRNA sense strand
gaauguaucgucagaauga

SEQ ID NO: 1220244 - RNA, 19 nt, Homo sapiens
  misc_RNA (1)...(19): siRNA sense strand
ggacaaaggaaucuugaaa

SEQ ID NO: 1220245 - RNA, 19 nt, Homo sapiens
  misc_RNA (1)...(19): siRNA sense strand
gugauaaucuuuccuuaga

SEQ ID NO: 1220246 - RNA, 19 nt, Homo sapiens
  misc_RNA (1)...(19): siRNA sense strand
gaaguucuguuaucuccaa

SEQ ID NO: 1220247 - RNA, 19 nt, Homo sapiens
  misc_RNA (1)...(19): siRNA sense strand
gaagggaacuuagaagaag

SEQ ID NO: 1220248 - RNA, 19 nt, Homo sapiens
  misc_RNA (1)...(19): siRNA sense strand
gaacuuagaagaagcugaa

SEQ ID NO: 1220249 - RNA, 19 nt, Homo sapiens
  misc_RNA (1)...(19): siRNA sense strand
gaacaacugcagagagaaa

SEQ ID NO: 1220250 - RNA, 19 nt, Homo sapiens
  misc_RNA (1)...(19): siRNA sense strand
gaagcgaagucccggagaa

SEQ ID NO: 1220251 - RNA, 19 nt, Homo sapiens
  misc_RNA (1)...(19): siRNA sense strand
gcgcuggaauuaaaugaaa

SEQ ID NO: 1220252 - RNA, 19 nt, Homo sapiens
  misc_RNA (1)...(19): siRNA sense strand
gagagauugucaucaagaa

SEQ ID NO: 1220253 - RNA, 19 nt, Homo sapiens
  misc_RNA (1)...(19): siRNA sense strand
ggaagggaacuuagaagaa

SEQ ID NO: 1220254 - RNA, 19 nt, Homo sapiens
  misc_RNA (1)...(19): siRNA sense strand
agaaugaaauugccauguu

SEQ ID NO: 1220255 - RNA, 19 nt, Homo sapiens
  misc_RNA (1)...(19): siRNA sense strand
ucuccaagcucuucagaaa

SEQ ID NO: 1220256 - RNA, 19 nt, Homo sapiens
  misc_RNA (1)...(19): siRNA sense strand
gccaagagccaaaccgaua

SEQ ID NO: 1220257 - RNA, 19 nt, Homo sapiens
  misc_RNA (1)...(19): siRNA sense strand
gcuggaagcaagccauuua

SEQ ID NO: 1220258 - RNA, 19 nt, Homo sapiens
  misc_RNA (1)...(19): siRNA sense strand
aagaagaucugugucauau

SEQ ID NO: 1220259 - RNA, 19 nt, Homo sapiens
  misc_RNA (1)...(19): siRNA sense strand
caagaagaucugugucaua

SEQ ID NO: 1220260 - RNA, 19 nt, Homo sapiens
  misc_RNA (1)...(19): siRNA sense strand
gcaauacuauagcuucaca

SEQ ID NO: 1220261 - RNA, 19 nt, Homo sapiens
  misc_RNA (1)...(19): siRNA sense strand
ccaaaccgauauagagaga

SEQ ID NO: 1220262 - RNA, 19 nt, Homo sapiens
  misc_RNA (1)...(19): siRNA sense strand
caacggcaccuauuuggaa

SEQ ID NO: 1220263 - RNA, 19 nt, Homo sapiens
  misc_RNA (1)...(19): siRNA sense strand
ggaaauggcaugaaagcau

SEQ ID NO: 1220264 - RNA, 19 nt, Homo sapiens
  misc_RNA (1)...(19): siRNA sense strand
gcgaggagcuggaguacag

SEQ ID NO: 1220265 - RNA, 19 nt, Homo sapiens
  misc_RNA (1)...(19): siRNA sense strand
cagaauguaucgucagaau

SEQ ID NO: 1220266 - RNA, 19 nt, Homo sapiens
  misc_RNA (1)...(19): siRNA sense strand
gagcaauacuauagcuuca

SEQ ID NO: 1220267 - RNA, 19 nt, Homo sapiens
  misc_RNA (1)...(19): siRNA sense strand
aaaccgagcucuaguucau

SEQ ID NO: 1220268 - RNA, 19 nt, Homo sapiens
  misc_RNA (1)...(19): siRNA sense strand
gcaagaagaucugugucau

SEQ ID NO: 1220269 - RNA, 19 nt, Homo sapiens
  misc_RNA (1)...(19): siRNA sense strand
gcaccuauuuggaacuuag

SEQ ID NO: 1220270 - RNA, 19 nt, Homo sapiens
  misc_RNA (1)...(19): siRNA sense strand
gcagaggauugaacaacug

SEQ ID NO: 1220271 - RNA, 19 nt, Homo sapiens
  misc_RNA (1)...(19): siRNA sense strand
gcaaaauacuggagcacua

SEQ ID NO: 1220272 - RNA, 19 nt, Homo sapiens
  misc_RNA (1)...(19): siRNA sense strand
gacaagggcuuccaguuuu

SEQ ID NO: 1220273 - RNA, 19 nt, Homo sapiens
  misc_RNA (1)...(19): siRNA sense strand
ggaacaacaucgggaagga

SEQ ID NO: 1220274 - RNA, 19 nt, Homo sapiens
  misc_RNA (1)...(19): siRNA sense strand
gaaggucaagucagaagaa

SEQ ID NO: 1220275 - RNA, 19 nt, Homo sapiens
  misc_RNA (1)...(19): siRNA sense strand
gagaagaaccuuggugugu

SEQ ID NO: 1220276 - RNA, 19 nt, Homo sapiens
  misc_RNA (1)...(19): siRNA sense strand
gggcaaauccauggaaauu

SEQ ID NO: 1220277 - RNA, 19 nt, Homo sapiens
  misc_RNA (1)...(19): siRNA sense strand
ggaagcaagccauuuaauc

SEQ ID NO: 1220278 - RNA, 19 nt, Homo sapiens
  misc_RNA (1)...(19): siRNA sense strand
gcacuaaugcccaugagau

SEQ ID NO: 1220279 - RNA, 19 nt, Homo sapiens
  misc_RNA (1)...(19): siRNA sense strand
gagcaacggcaccuauuug

SEQ ID NO: 1220280 - RNA, 19 nt, Homo sapiens
  misc_RNA (1)...(19): siRNA sense strand
acaaguagcugcucuucca

SEQ ID NO: 1220281 - RNA, 19 nt, Homo sapiens
  misc_RNA (1)...(19): siRNA sense strand
uugcauccauaacaucuua

SEQ ID NO: 1220282 - RNA, 19 nt, Homo sapiens
  misc_RNA (1)...(19): siRNA sense strand
ucagugaugucuguaaaga

SEQ ID NO: 1220283 - RNA, 19 nt, Homo sapiens
  misc_RNA (1)...(19): siRNA sense strand
cuuagaagaagcugaaaua

SEQ ID NO: 1220284 - RNA, 19 nt, Homo sapiens
  misc_RNA (1)...(19): siRNA sense strand
ucagugacauaagugauaa

SEQ ID NO: 1220285 - RNA, 19 nt, Homo sapiens
  misc_RNA (1)...(19): siRNA sense strand
cauauugcccauaaaguuu

SEQ ID NO: 1220286 - RNA, 19 nt, Homo sapiens
  misc_RNA (1)...(19): siRNA sense strand
aagaggaaguggcccuuaa

SEQ ID NO: 1220287 - RNA, 19 nt, Homo sapiens
  misc_RNA (1)...(19): siRNA sense strand
gcacaucuaccaucugaag

SEQ ID NO: 1220288 - RNA, 19 nt, Homo sapiens
  misc_RNA (1)...(19): siRNA sense strand
uuaaaaggcuggcauaaga

SEQ ID NO: 1220289 - RNA, 19 nt, Homo sapiens
  misc_RNA (1)...(19): siRNA sense strand
gaagaagcugaaauacaaa

SEQ ID NO: 1220290 - RNA, 19 nt, Homo sapiens
  misc_RNA (1)...(19): siRNA sense strand
gauugaaggcacaguguuu

SEQ ID NO: 1220291 - RNA, 19 nt, Homo sapiens
  misc_RNA (1)...(19): siRNA sense strand
ggagagauugucaucaaga

SEQ ID NO: 1220292 - RNA, 19 nt, Homo sapiens
  misc_RNA (1)...(19): siRNA sense strand
aaaccgauauagagagaga

SEQ ID NO: 1220293 - RNA, 19 nt, Homo sapiens
  misc_RNA (1)...(19): siRNA sense strand
ccagagguuucuagaggaa

SEQ ID NO: 1220294 - RNA, 19 nt, Homo sapiens
  misc_RNA (1)...(19): siRNA sense strand
agagguggauugagcacua

SEQ ID NO: 1220295 - RNA, 19 nt, Homo sapiens
  misc_RNA (1)...(19): siRNA sense strand
ggcaagaugugagauggaa

SEQ ID NO: 1220296 - RNA, 19 nt, Homo sapiens
  misc_RNA (1)...(19): siRNA sense strand
ugagacacgaguuccauua

SEQ ID NO: 1220297 - RNA, 19 nt, Homo sapiens
  misc_RNA (1)...(19): siRNA sense strand
agacuacacuccuccaauc

SEQ ID NO: 1220298 - RNA, 19 nt, Homo sapiens
  misc_RNA (1)...(19): siRNA sense strand
gaaauccgacgaugacucu

SEQ ID NO: 1220299 - RNA, 19 nt, Homo sapiens
  misc_RNA (1)...(19): siRNA sense strand
aaaacgagauuucugauga

SEQ ID NO: 1220300 - RNA, 19 nt, Homo sapiens
  misc_RNA (1)...(19): siRNA sense strand
cuacacuccuccaauccua

SEQ ID NO: 1220301 - RNA, 19 nt, Homo sapiens
  misc_RNA (1)...(19): siRNA sense strand
caugcugagucuagaaauu

SEQ ID NO: 1220302 - RNA, 19 nt, Homo sapiens
  misc_RNA (1)...(19): siRNA sense strand
gaagcaagccauuuaaucc

SEQ ID NO: 1220303 - RNA, 19 nt, Homo sapiens
  misc_RNA (1)...(19): siRNA sense strand
caagagccaaaccgauaua

SEQ ID NO: 1220304 - RNA, 19 nt, Homo sapiens
  misc_RNA (1)...(19): siRNA sense strand
gacaaaggaaucuugaaau

SEQ ID NO: 1220305 - RNA, 19 nt, Homo sapiens
  misc_RNA (1)...(19): siRNA sense strand
uacuauagcuucacacagu

SEQ ID NO: 1220306 - RNA, 19 nt, Homo sapiens
  misc_RNA (1)...(19): siRNA sense strand
guaggaagcguagcaguau

SEQ ID NO: 1220307 - RNA, 19 nt, Homo sapiens
  misc_RNA (1)...(19): siRNA sense strand
cgaaaggcuacgagcaaua

SEQ ID NO: 1220308 - RNA, 19 nt, Homo sapiens
  misc_RNA (1)...(19): siRNA sense strand
caaauccuaugccgaaagg

SEQ ID NO: 1220309 - RNA, 19 nt, Homo sapiens
  misc_RNA (1)...(19): siRNA sense strand
caaacuggaagcaauguau

SEQ ID NO: 1220310 - RNA, 19 nt, Homo sapiens
  misc_RNA (1)...(19): siRNA sense strand
gaguggguaucgaaacuuc

SEQ ID NO: 1220311 - RNA, 19 nt, Homo sapiens
  misc_RNA (1)...(19): siRNA sense strand
uugaacaacugcagagaga

SEQ ID NO: 1220312 - RNA, 19 nt, Homo sapiens
  misc_RNA (1)...(19): siRNA sense strand
gaaccugcaugaugauucc

SEQ ID NO: 1220313 - RNA, 19 nt, Homo sapiens
  misc_RNA (1)...(19): siRNA sense strand
acagcgagcuccuggacaa

SEQ ID NO: 1220314 - RNA, 19 nt, Homo sapiens
  misc_RNA (1)...(19): siRNA sense strand
guucaucagcuuucuaaug

SEQ ID NO: 1220315 - RNA, 19 nt, Homo sapiens
  misc_RNA (1)...(19): siRNA sense strand
ggagagagagaaacugaag

SEQ ID NO: 1220316 - RNA, 19 nt, Homo sapiens
  misc_RNA (1)...(19): siRNA sense strand
ucauauugcccauaaaguu

SEQ ID NO: 1220317 - RNA, 19 nt, Homo sapiens
  misc_RNA (1)...(19): siRNA sense strand
ugugucauauugcccauaa

SEQ ID NO: 1220318 - RNA, 19 nt, Homo sapiens
  misc_RNA (1)...(19): siRNA sense strand
gagccaaaccgauauagag

SEQ ID NO: 1220319 - RNA, 19 nt, Homo sapiens
  misc_RNA (1)...(19): siRNA sense strand
agacacgaguuccauuaug

SEQ ID NO: 1220320 - RNA, 19 nt, Homo sapiens
  misc_RNA (1)...(19): siRNA sense strand
aaacuucgccaccacagaa

SEQ ID NO: 1220321 - RNA, 19 nt, Homo sapiens
  misc_RNA (1)...(19): siRNA sense strand
ucucagugaugucuguaaa

SEQ ID NO: 1220322 - RNA, 19 nt, Homo sapiens
  misc_RNA (1)...(19): siRNA sense strand
gaaaggcuacgagcaauac

SEQ ID NO: 1220323 - RNA, 19 nt, Homo sapiens
  misc_RNA (1)...(19): siRNA sense strand
gcgaagucccggagaagaa

SEQ ID NO: 1220324 - RNA, 19 nt, Homo sapiens
  misc_RNA (1)...(19): siRNA sense strand
uaggaagcguagcaguaua

SEQ ID NO: 1220325 - RNA, 19 nt, Homo sapiens
  misc_RNA (1)...(19): siRNA sense strand
guauggagagcaaauccua

SEQ ID NO: 1220326 - RNA, 19 nt, Homo sapiens
  misc_RNA (1)...(19): siRNA sense strand
acuggaccauccugucuua

SEQ ID NO: 1220327 - RNA, 19 nt, Homo sapiens
  misc_RNA (1)...(19): siRNA sense strand
gcuacgagcaauacuauag

SEQ ID NO: 1220328 - RNA, 19 nt, Homo sapiens
  misc_RNA (1)...(19): siRNA sense strand
cacagaauguaucgucaga

SEQ ID NO: 1220329 - RNA, 19 nt, Homo sapiens
  misc_RNA (1)...(19): siRNA sense strand
ggagccaccaguucagaaa

SEQ ID NO: 1220330 - RNA, 19 nt, Homo sapiens
  misc_RNA (1)...(19): siRNA sense strand
ugagcacuauggagagauu

SEQ ID NO: 1220331 - RNA, 19 nt, Homo sapiens
  misc_RNA (1)...(19): siRNA sense strand
aaacgagauuucugaugau

SEQ ID NO: 1220332 - RNA, 19 nt, Homo sapiens
  misc_RNA (1)...(19): siRNA sense strand
gcggagagagagaaacuga

SEQ ID NO: 1220333 - RNA, 19 nt, Homo sapiens
  misc_RNA (1)...(19): siRNA sense strand
aguuugcgcuggaauuaaa

SEQ ID NO: 1220334 - RNA, 19 nt, Homo sapiens
  misc_RNA (1)...(19): siRNA sense strand
gaagaucugugucauauug

SEQ ID NO: 1220335 - RNA, 19 nt, Homo sapiens
  misc_RNA (1)...(19): siRNA sense strand
gaaugaaauugccauguuu

SEQ ID NO: 1220336 - RNA, 19 nt, Homo sapiens
  misc_RNA (1)...(19): siRNA sense strand
agaagaagcugaaauacaa

SEQ ID NO: 1220337 - RNA, 19 nt, Homo sapiens
  misc_RNA (1)...(19): siRNA sense strand
gaaaguagacucuccauca

SEQ ID NO: 1220338 - RNA, 19 nt, Homo sapiens
  misc_RNA (1)...(19): siRNA sense strand
ucaagaaccugcaugauga

SEQ ID NO: 1220339 - RNA, 19 nt, Homo sapiens
  misc_RNA (1)...(19): siRNA sense strand
gcaaauccauggaaauugu

SEQ ID NO: 1220340 - RNA, 19 nt, Homo sapiens
  misc_RNA (1)...(19): siRNA sense strand
ggacaagggcuuccaguuu

SEQ ID NO: 1220341 - RNA, 19 nt, Homo sapiens
  misc_RNA (1)...(19): siRNA sense strand
gagcacaucuaccaucuga

SEQ ID NO: 1220342 - RNA, 19 nt, Homo sapiens
  misc_RNA (1)...(19): siRNA sense strand
ggaacaaagugaccucuug

SEQ ID NO: 1220343 - RNA, 19 nt, Homo sapiens
  misc_RNA (1)...(19): siRNA sense strand
gaauguaucgucagaauga

SEQ ID NO: 1220344 - RNA, 19 nt, Homo sapiens
  misc_RNA (1)...(19): siRNA sense strand
ggacaaaggaaucuugaaa

SEQ ID NO: 1220345 - RNA, 19 nt, Homo sapiens
  misc_RNA (1)...(19): siRNA sense strand
gugauaaucuuuccuuaga

SEQ ID NO: 1220346 - RNA, 19 nt, Homo sapiens
  misc_RNA (1)...(19): siRNA sense strand
gaaguucuguuaucuccaa

SEQ ID NO: 1220347 - RNA, 19 nt, Homo sapiens
  misc_RNA (1)...(19): siRNA sense strand
gaagggaacuuagaagaag

SEQ ID NO: 1220348 - RNA, 19 nt, Homo sapiens
  misc_RNA (1)...(19): siRNA sense strand
gaacuuagaagaagcugaa

SEQ ID NO: 1220349 - RNA, 19 nt, Homo sapiens
  misc_RNA (1)...(19): siRNA sense strand
gaacaacugcagagagaaa

SEQ ID NO: 1220350 - RNA, 19 nt, Homo sapiens
  misc_RNA (1)...(19): siRNA sense strand
gaagcgaagucccggagaa

SEQ ID NO: 1220351 - RNA, 19 nt, Homo sapiens
  misc_RNA (1)...(19): siRNA sense strand
gcgcuggaauuaaaugaaa

SEQ ID NO: 1220352 - RNA, 19 nt, Homo sapiens
  misc_RNA (1)...(19): siRNA sense strand
gagagauugucaucaagaa

SEQ ID NO: 1220353 - RNA, 19 nt, Homo sapiens
  misc_RNA (1)...(19): siRNA sense strand
ggaagggaacuuagaagaa

SEQ ID NO: 1220354 - RNA, 19 nt, Homo sapiens
  misc_RNA (1)...(19): siRNA sense strand
agaaugaaauugccauguu

SEQ ID NO: 1220355 - RNA, 19 nt, Homo sapiens
  misc_RNA (1)...(19): siRNA sense strand
ucuccaagcucuucagaaa

SEQ ID NO: 1220356 - RNA, 19 nt, Homo sapiens
  misc_RNA (1)...(19): siRNA sense strand
gccaagagccaaaccgaua

SEQ ID NO: 1220357 - RNA, 19 nt, Homo sapiens
  misc_RNA (1)...(19): siRNA sense strand
gcuggaagcaagccauuua

SEQ ID NO: 1220358 - RNA, 19 nt, Homo sapiens
  misc_RNA (1)...(19): siRNA sense strand
aagaagaucugugucauau

SEQ ID NO: 1220359 - RNA, 19 nt, Homo sapiens
  misc_RNA (1)...(19): siRNA sense strand
caagaagaucugugucaua

SEQ ID NO: 1220360 - RNA, 19 nt, Homo sapiens
  misc_RNA (1)...(19): siRNA sense strand
gcaauacuauagcuucaca

SEQ ID NO: 1220361 - RNA, 19 nt, Homo sapiens
  misc_RNA (1)...(19): siRNA sense strand
ccaaaccgauauagagaga

SEQ ID NO: 1220362 - RNA, 19 nt, Homo sapiens
  misc_RNA (1)...(19): siRNA sense strand
caacggcaccuauuuggaa

SEQ ID NO: 1220363 - RNA, 19 nt, Homo sapiens
  misc_RNA (1)...(19): siRNA sense strand
ggaaauggcaugaaagcau

SEQ ID NO: 1220364 - RNA, 19 nt, Homo sapiens
  misc_RNA (1)...(19): siRNA sense strand
gcgaggagcuggaguacag

SEQ ID NO: 1220365 - RNA, 19 nt, Homo sapiens
  misc_RNA (1)...(19): siRNA sense strand
cagaauguaucgucagaau

SEQ ID NO: 1220366 - RNA, 19 nt, Homo sapiens
  misc_RNA (1)...(19): siRNA sense strand
gagcaauacuauagcuuca

SEQ ID NO: 1220367 - RNA, 19 nt, Homo sapiens
  misc_RNA (1)...(19): siRNA sense strand
aaaccgagcucuaguucau

SEQ ID NO: 1220368 - RNA, 19 nt, Homo sapiens
  misc_RNA (1)...(19): siRNA sense strand
gcaagaagaucugugucau

SEQ ID NO: 1220369 - RNA, 19 nt, Homo sapiens
  misc_RNA (1)...(19): siRNA sense strand
gcaccuauuuggaacuuag

SEQ ID NO: 1220370 - RNA, 19 nt, Homo sapiens
  misc_RNA (1)...(19): siRNA sense strand
gcagaggauugaacaacug

SEQ ID NO: 1220371 - RNA, 19 nt, Homo sapiens
  misc_RNA (1)...(19): siRNA sense strand
gcaaaauacuggagcacua

SEQ ID NO: 1220372 - RNA, 19 nt, Homo sapiens
  misc_RNA (1)...(19): siRNA sense strand
gacaagggcuuccaguuuu

SEQ ID NO: 1220373 - RNA, 19 nt, Homo sapiens
  misc_RNA (1)...(19): siRNA sense strand
ggaacaacaucgggaagga

SEQ ID NO: 1220374 - RNA, 19 nt, Homo sapiens
  misc_RNA (1)...(19): siRNA sense strand
gaaggucaagucagaagaa

SEQ ID NO: 1220375 - RNA, 19 nt, Homo sapiens
  misc_RNA (1)...(19): siRNA sense strand
gagaagaaccuuggugugu

SEQ ID NO: 1220376 - RNA, 19 nt, Homo sapiens
  misc_RNA (1)...(19): siRNA sense strand
gggcaaauccauggaaauu

SEQ ID NO: 1220377 - RNA, 19 nt, Homo sapiens
  misc_RNA (1)...(19): siRNA sense strand
ggaagcaagccauuuaauc

SEQ ID NO: 1220378 - RNA, 19 nt, Homo sapiens
  misc_RNA (1)...(19): siRNA sense strand
gcacuaaugcccaugagau

SEQ ID NO: 1220379 - RNA, 19 nt, Homo sapiens
  misc_RNA (1)...(19): siRNA sense strand
gagcaacggcaccuauuug

SEQ ID NO: 1220380 - RNA, 19 nt, Homo sapiens
  misc_RNA (1)...(19): siRNA sense strand
acaaguagcugcucuucca

SEQ ID NO: 1220381 - RNA, 19 nt, Homo sapiens
  misc_RNA (1)...(19): siRNA sense strand
uugcauccauaacaucuua

SEQ ID NO: 1220382 - RNA, 19 nt, Homo sapiens
  misc_RNA (1)...(19): siRNA sense strand
ucagugaugucuguaaaga

SEQ ID NO: 1220383 - RNA, 19 nt, Homo sapiens
  misc_RNA (1)...(19): siRNA sense strand
cuuagaagaagcugaaaua

SEQ ID NO: 1220384 - RNA, 19 nt, Homo sapiens
  misc_RNA (1)...(19): siRNA sense strand
ucagugacauaagugauaa

SEQ ID NO: 1220385 - RNA, 19 nt, Homo sapiens
  misc_RNA (1)...(19): siRNA sense strand
cauauugcccauaaaguuu

SEQ ID NO: 1220386 - RNA, 19 nt, Homo sapiens
  misc_RNA (1)...(19): siRNA sense strand
aagaggaaguggcccuuaa

SEQ ID NO: 1220387 - RNA, 19 nt, Homo sapiens
  misc_RNA (1)...(19): siRNA sense strand
gcacaucuaccaucugaag

SEQ ID NO: 1220388 - RNA, 19 nt, Homo sapiens
  misc_RNA (1)...(19): siRNA sense strand
uuaaaaggcuggcauaaga

SEQ ID NO: 1220389 - RNA, 19 nt, Homo sapiens
  misc_RNA (1)...(19): siRNA sense strand
gaagaagcugaaauacaaa

SEQ ID NO: 1220390 - RNA, 19 nt, Homo sapiens
  misc_RNA (1)...(19): siRNA sense strand
gauugaaggcacaguguuu

SEQ ID NO: 1220391 - RNA, 19 nt, Homo sapiens
  misc_RNA (1)...(19): siRNA sense strand
ggagagauugucaucaaga

SEQ ID NO: 1220392 - RNA, 19 nt, Homo sapiens
  misc_RNA (1)...(19): siRNA sense strand
aaaccgauauagagagaga

SEQ ID NO: 1220393 - RNA, 19 nt, Homo sapiens
  misc_RNA (1)...(19): siRNA sense strand
ccagagguuucuagaggaa

SEQ ID NO: 1220394 - RNA, 19 nt, Homo sapiens
  misc_RNA (1)...(19): siRNA sense strand
agagguggauugagcacua

SEQ ID NO: 1220395 - RNA, 19 nt, Homo sapiens
  misc_RNA (1)...(19): siRNA sense strand
ggcaagaugugagauggaa

SEQ ID NO: 1220396 - RNA, 19 nt, Homo sapiens
  misc_RNA (1)...(19): siRNA sense strand
ugagacacgaguuccauua

SEQ ID NO: 1220397 - RNA, 19 nt, Homo sapiens
  misc_RNA (1)...(19): siRNA sense strand
agacuacacuccuccaauc

SEQ ID NO: 1220398 - RNA, 19 nt, Homo sapiens
  misc_RNA (1)...(19): siRNA sense strand
gaaauccgacgaugacucu

SEQ ID NO: 1220399 - RNA, 19 nt, Homo sapiens
  misc_RNA (1)...(19): siRNA sense strand
aaaacgagauuucugauga

SEQ ID NO: 1220400 - RNA, 19 nt, Homo sapiens
  misc_RNA (1)...(19): siRNA sense strand
cuacacuccuccaauccua

SEQ ID NO: 1220401 - RNA, 19 nt, Homo sapiens
  misc_RNA (1)...(19): siRNA sense strand
caugcugagucuagaaauu

SEQ ID NO: 1220402 - RNA, 19 nt, Homo sapiens
  misc_RNA (1)...(19): siRNA sense strand
gaagcaagccauuuaaucc

SEQ ID NO: 1220403 - RNA, 19 nt, Homo sapiens
  misc_RNA (1)...(19): siRNA sense strand
caagagccaaaccgauaua

SEQ ID NO: 1220404 - RNA, 19 nt, Homo sapiens
  misc_RNA (1)...(19): siRNA sense strand
gacaaaggaaucuugaaau

SEQ ID NO: 1220405 - RNA, 19 nt, Homo sapiens
  misc_RNA (1)...(19): siRNA sense strand
uacuauagcuucacacagu

SEQ ID NO: 1220406 - RNA, 19 nt, Homo sapiens
  misc_RNA (1)...(19): siRNA sense strand
guaggaagcguagcaguau

SEQ ID NO: 1220407 - RNA, 19 nt, Homo sapiens
  misc_RNA (1)...(19): siRNA sense strand
cgaaaggcuacgagcaaua

SEQ ID NO: 1220408 - RNA, 19 nt, Homo sapiens
  misc_RNA (1)...(19): siRNA sense strand
caaauccuaugccgaaagg

SEQ ID NO: 1220409 - RNA, 19 nt, Homo sapiens
  misc_RNA (1)...(19): siRNA sense strand
caaacuggaagcaauguau

SEQ ID NO: 1220410 - RNA, 19 nt, Homo sapiens
  misc_RNA (1)...(19): siRNA sense strand
gaguggguaucgaaacuuc

SEQ ID NO: 1220411 - RNA, 19 nt, Homo sapiens
  misc_RNA (1)...(19): siRNA sense strand
uugaacaacugcagagaga

SEQ ID NO: 1220412 - RNA, 19 nt, Homo sapiens
  misc_RNA (1)...(19): siRNA sense strand
gaaccugcaugaugauucc

SEQ ID NO: 1220413 - RNA, 19 nt, Homo sapiens
  misc_RNA (1)...(19): siRNA sense strand
acagcgagcuccuggacaa

SEQ ID NO: 1220414 - RNA, 19 nt, Homo sapiens
  misc_RNA (1)...(19): siRNA sense strand
guucaucagcuuucuaaug

SEQ ID NO: 1220415 - RNA, 19 nt, Homo sapiens
  misc_RNA (1)...(19): siRNA sense strand
ggagagagagaaacugaag

SEQ ID NO: 1220416 - RNA, 19 nt, Homo sapiens
  misc_RNA (1)...(19): siRNA sense strand
ucauauugcccauaaaguu

SEQ ID NO: 1220417 - RNA, 19 nt, Homo sapiens
  misc_RNA (1)...(19): siRNA sense strand
ugugucauauugcccauaa

SEQ ID NO: 1220418 - RNA, 19 nt, Homo sapiens
  misc_RNA (1)...(19): siRNA sense strand
gagccaaaccgauauagag

SEQ ID NO: 1220419 - RNA, 19 nt, Homo sapiens
  misc_RNA (1)...(19): siRNA sense strand
agacacgaguuccauuaug

SEQ ID NO: 1220420 - RNA, 19 nt, Homo sapiens
  misc_RNA (1)...(19): siRNA sense strand
aaacuucgccaccacagaa

SEQ ID NO: 1220421 - RNA, 19 nt, Homo sapiens
  misc_RNA (1)...(19): siRNA sense strand
ucucagugaugucuguaaa

SEQ ID NO: 1220422 - RNA, 19 nt, Homo sapiens
  misc_RNA (1)...(19): siRNA sense strand
gaaaggcuacgagcaauac

SEQ ID NO: 1220423 - RNA, 19 nt, Homo sapiens
  misc_RNA (1)...(19): siRNA sense strand
gcgaagucccggagaagaa

SEQ ID NO: 1220424 - RNA, 19 nt, Homo sapiens
  misc_RNA (1)...(19): siRNA sense strand
uaggaagcguagcaguaua

SEQ ID NO: 1220425 - RNA, 19 nt, Homo sapiens
  misc_RNA (1)...(19): siRNA sense strand
guauggagagcaaauccua

SEQ ID NO: 1220426 - RNA, 19 nt, Homo sapiens
  misc_RNA (1)...(19): siRNA sense strand
acuggaccauccugucuua

SEQ ID NO: 1220427 - RNA, 19 nt, Homo sapiens
  misc_RNA (1)...(19): siRNA sense strand
gcuacgagcaauacuauag

SEQ ID NO: 1220428 - RNA, 19 nt, Homo sapiens
  misc_RNA (1)...(19): siRNA sense strand
cacagaauguaucgucaga

SEQ ID NO: 1220429 - RNA, 19 nt, Homo sapiens
  misc_RNA (1)...(19): siRNA sense strand
ggagccaccaguucagaaa

SEQ ID NO: 1220430 - RNA, 19 nt, Homo sapiens
  misc_RNA (1)...(19): siRNA sense strand
ugagcacuauggagagauu

SEQ ID NO: 1220431 - RNA, 19 nt, Homo sapiens
  misc_RNA (1)...(19): siRNA sense strand
aaacgagauuucugaugau

SEQ ID NO: 1220432 - RNA, 19 nt, Homo sapiens
  misc_RNA (1)...(19): siRNA sense strand
gcggagagagagaaacuga

SEQ ID NO: 1220433 - RNA, 19 nt, Homo sapiens
  misc_RNA (1)...(19): siRNA sense strand
aguuugcgcuggaauuaaa

SEQ ID NO: 1220434 - RNA, 19 nt, Homo sapiens
  misc_RNA (1)...(19): siRNA sense strand
gaagaucugugucauauug

SEQ ID NO: 1220435 - RNA, 19 nt, Homo sapiens
  misc_RNA (1)...(19): siRNA sense strand
gaaugaaauugccauguuu

SEQ ID NO: 1220436 - RNA, 19 nt, Homo sapiens
  misc_RNA (1)...(19): siRNA sense strand
agaagaagcugaaauacaa

SEQ ID NO: 1220437 - RNA, 19 nt, Homo sapiens
  misc_RNA (1)...(19): siRNA sense strand
gaaaguagacucuccauca

SEQ ID NO: 1220438 - RNA, 19 nt, Homo sapiens
  misc_RNA (1)...(19): siRNA sense strand
ucaagaaccugcaugauga

SEQ ID NO: 1220439 - RNA, 19 nt, Homo sapiens
  misc_RNA (1)...(19): siRNA sense strand
gcaaauccauggaaauugu

SEQ ID NO: 1220440 - RNA, 19 nt, Homo sapiens
  misc_RNA (1)...(19): siRNA sense strand
ggacaagggcuuccaguuu

SEQ ID NO: 1220441 - RNA, 19 nt, Homo sapiens
  misc_RNA (1)...(19): siRNA sense strand
gagcacaucuaccaucuga

SEQ ID NO: 1220442 - RNA, 19 nt, Homo sapiens
  misc_RNA (1)...(19): siRNA sense strand
ggaacaaagugaccucuug

SEQ ID NO: 1220443 - RNA, 19 nt, Homo sapiens
  misc_RNA (1)...(19): siRNA sense strand
gaauguaucgucagaauga

SEQ ID NO: 1220444 - RNA, 19 nt, Homo sapiens
  misc_RNA (1)...(19): siRNA sense strand
ggacaaaggaaucuugaaa

SEQ ID NO: 1220445 - RNA, 19 nt, Homo sapiens
  misc_RNA (1)...(19): siRNA sense strand
gugauaaucuuuccuuaga

SEQ ID NO: 1220446 - RNA, 19 nt, Homo sapiens
  misc_RNA (1)...(19): siRNA sense strand
gaaguucuguuaucuccaa

SEQ ID NO: 1220447 - RNA, 19 nt, Homo sapiens
  misc_RNA (1)...(19): siRNA sense strand
gaagggaacuuagaagaag

SEQ ID NO: 1220448 - RNA, 19 nt, Homo sapiens
  misc_RNA (1)...(19): siRNA sense strand
gaacuuagaagaagcugaa

SEQ ID NO: 1220449 - RNA, 19 nt, Homo sapiens
  misc_RNA (1)...(19): siRNA sense strand
gaacaacugcagagagaaa

SEQ ID NO: 1220450 - RNA, 19 nt, Homo sapiens
  misc_RNA (1)...(19): siRNA sense strand
gaagcgaagucccggagaa

SEQ ID NO: 1220451 - RNA, 19 nt, Homo sapiens
  misc_RNA (1)...(19): siRNA sense strand
gcgcuggaauuaaaugaaa

SEQ ID NO: 1220452 - RNA, 19 nt, Homo sapiens
  misc_RNA (1)...(19): siRNA sense strand
gagagauugucaucaagaa

SEQ ID NO: 1220453 - RNA, 19 nt, Homo sapiens
  misc_RNA (1)...(19): siRNA sense strand
ggaagggaacuuagaagaa

SEQ ID NO: 1220454 - RNA, 19 nt, Homo sapiens
  misc_RNA (1)...(19): siRNA sense strand
agaaugaaauugccauguu

SEQ ID NO: 1220455 - RNA, 19 nt, Homo sapiens
  misc_RNA (1)...(19): siRNA sense strand
ucuccaagcucuucagaaa

SEQ ID NO: 1220456 - RNA, 19 nt, Homo sapiens
  misc_RNA (1)...(19): siRNA sense strand
gccaagagccaaaccgaua

SEQ ID NO: 1220457 - RNA, 19 nt, Homo sapiens
  misc_RNA (1)...(19): siRNA sense strand
gcuggaagcaagccauuua

SEQ ID NO: 1220458 - RNA, 19 nt, Homo sapiens
  misc_RNA (1)...(19): siRNA sense strand
aagaagaucugugucauau

SEQ ID NO: 1220459 - RNA, 19 nt, Homo sapiens
  misc_RNA (1)...(19): siRNA sense strand
caagaagaucugugucaua

SEQ ID NO: 1220460 - RNA, 19 nt, Homo sapiens
  misc_RNA (1)...(19): siRNA sense strand
gcaauacuauagcuucaca

SEQ ID NO: 1220461 - RNA, 19 nt, Homo sapiens
  misc_RNA (1)...(19): siRNA sense strand
ccaaaccgauauagagaga

SEQ ID NO: 1220462 - RNA, 19 nt, Homo sapiens
  misc_RNA (1)...(19): siRNA sense strand
caacggcaccuauuuggaa

SEQ ID NO: 1220463 - RNA, 19 nt, Homo sapiens
  misc_RNA (1)...(19): siRNA sense strand
ggaaauggcaugaaagcau

SEQ ID NO: 1220464 - RNA, 19 nt, Homo sapiens
  misc_RNA (1)...(19): siRNA sense strand
gcgaggagcuggaguacag

SEQ ID NO: 1220465 - RNA, 19 nt, Homo sapiens
  misc_RNA (1)...(19): siRNA sense strand
cagaauguaucgucagaau

SEQ ID NO: 1220466 - RNA, 19 nt, Homo sapiens
  misc_RNA (1)...(19): siRNA sense strand
gagcaauacuauagcuuca

SEQ ID NO: 1220467 - RNA, 19 nt, Homo sapiens
  misc_RNA (1)...(19): siRNA sense strand
aaaccgagcucuaguucau

SEQ ID NO: 1220468 - RNA, 19 nt, Homo sapiens
  misc_RNA (1)...(19): siRNA sense strand
gcaagaagaucugugucau

SEQ ID NO: 1220469 - RNA, 19 nt, Homo sapiens
  misc_RNA (1)...(19): siRNA sense strand
gcaccuauuuggaacuuag

SEQ ID NO: 1220470 - RNA, 19 nt, Homo sapiens
  misc_RNA (1)...(19): siRNA sense strand
gcagaggauugaacaacug

SEQ ID NO: 1220471 - RNA, 19 nt, Homo sapiens
  misc_RNA (1)...(19): siRNA sense strand
gcaaaauacuggagcacua

SEQ ID NO: 1220472 - RNA, 19 nt, Homo sapiens
  misc_RNA (1)...(19): siRNA sense strand
gacaagggcuuccaguuuu

SEQ ID NO: 1220473 - RNA, 19 nt, Homo sapiens
  misc_RNA (1)...(19): siRNA sense strand
ggaacaacaucgggaagga

SEQ ID NO: 1220474 - RNA, 19 nt, Homo sapiens
  misc_RNA (1)...(19): siRNA sense strand
gaaggucaagucagaagaa

SEQ ID NO: 1220475 - RNA, 19 nt, Homo sapiens
  misc_RNA (1)...(19): siRNA sense strand
gagaagaaccuuggugugu

SEQ ID NO: 1220476 - RNA, 19 nt, Homo sapiens
  misc_RNA (1)...(19): siRNA sense strand
gggcaaauccauggaaauu

SEQ ID NO: 1220477 - RNA, 19 nt, Homo sapiens
  misc_RNA (1)...(19): siRNA sense strand
ggaagcaagccauuuaauc

SEQ ID NO: 1220478 - RNA, 19 nt, Homo sapiens
  misc_RNA (1)...(19): siRNA sense strand
gcacuaaugcccaugagau

SEQ ID NO: 1220479 - RNA, 19 nt, Homo sapiens
  misc_RNA (1)...(19): siRNA sense strand
gagcaacggcaccuauuug

SEQ ID NO: 1220480 - RNA, 19 nt, Homo sapiens
  misc_RNA (1)...(19): siRNA sense strand
acaaguagcugcucuucca

SEQ ID NO: 1220481 - RNA, 19 nt, Homo sapiens
  misc_RNA (1)...(19): siRNA sense strand
uugcauccauaacaucuua

SEQ ID NO: 1220482 - RNA, 19 nt, Homo sapiens
  misc_RNA (1)...(19): siRNA sense strand
ucagugaugucuguaaaga

SEQ ID NO: 1220483 - RNA, 19 nt, Homo sapiens
  misc_RNA (1)...(19): siRNA sense strand
cuuagaagaagcugaaaua

SEQ ID NO: 1220484 - RNA, 19 nt, Homo sapiens
  misc_RNA (1)...(19): siRNA sense strand
ucagugacauaagugauaa

SEQ ID NO: 1220485 - RNA, 19 nt, Homo sapiens
  misc_RNA (1)...(19): siRNA sense strand
cauauugcccauaaaguuu

SEQ ID NO: 1220486 - RNA, 19 nt, Homo sapiens
  misc_RNA (1)...(19): siRNA sense strand
aagaggaaguggcccuuaa

SEQ ID NO: 1220487 - RNA, 19 nt, Homo sapiens
  misc_RNA (1)...(19): siRNA sense strand
gcacaucuaccaucugaag

SEQ ID NO: 1220488 - RNA, 19 nt, Homo sapiens
  misc_RNA (1)...(19): siRNA sense strand
uuaaaaggcuggcauaaga

SEQ ID NO: 1220489 - RNA, 19 nt, Homo sapiens
  misc_RNA (1)...(19): siRNA sense strand
gaagaagcugaaauacaaa

SEQ ID NO: 1220490 - RNA, 19 nt, Homo sapiens
  misc_RNA (1)...(19): siRNA sense strand
gauugaaggcacaguguuu

SEQ ID NO: 1220491 - RNA, 19 nt, Homo sapiens
  misc_RNA (1)...(19): siRNA sense strand
ggagagauugucaucaaga

SEQ ID NO: 1220492 - RNA, 19 nt, Homo sapiens
  misc_RNA (1)...(19): siRNA sense strand
aaaccgauauagagagaga

SEQ ID NO: 1220493 - RNA, 19 nt, Homo sapiens
  misc_RNA (1)...(19): siRNA sense strand
ccagagguuucuagaggaa

SEQ ID NO: 1220494 - RNA, 19 nt, Homo sapiens
  misc_RNA (1)...(19): siRNA sense strand
agagguggauugagcacua

SEQ ID NO: 1220495 - RNA, 19 nt, Homo sapiens
  misc_RNA (1)...(19): siRNA sense strand
ggcaagaugugagauggaa

SEQ ID NO: 1220496 - RNA, 19 nt, Homo sapiens
  misc_RNA (1)...(19): siRNA sense strand
ugagacacgaguuccauua

SEQ ID NO: 1220497 - RNA, 19 nt, Homo sapiens
  misc_RNA (1)...(19): siRNA sense strand
agacuacacuccuccaauc

SEQ ID NO: 1220498 - RNA, 19 nt, Homo sapiens
  misc_RNA (1)...(19): siRNA sense strand
gaaauccgacgaugacucu

SEQ ID NO: 1220499 - RNA, 19 nt, Homo sapiens
  misc_RNA (1)...(19): siRNA sense strand
aaaacgagauuucugauga

SEQ ID NO: 1220500 - RNA, 19 nt, Homo sapiens
  misc_RNA (1)...(19): siRNA sense strand
cuacacuccuccaauccua

SEQ ID NO: 1220501 - RNA, 19 nt, Homo sapiens
  misc_RNA (1)...(19): siRNA sense strand
caugcugagucuagaaauu

SEQ ID NO: 1220502 - RNA, 19 nt, Homo sapiens
  misc_RNA (1)...(19): siRNA sense strand
gaagcaagccauuuaaucc

SEQ ID NO: 1220503 - RNA, 19 nt, Homo sapiens
  misc_RNA (1)...(19): siRNA sense strand
caagagccaaaccgauaua

SEQ ID NO: 1220504 - RNA, 19 nt, Homo sapiens
  misc_RNA (1)...(19): siRNA sense strand
gacaaaggaaucuugaaau

SEQ ID NO: 1220505 - RNA, 19 nt, Homo sapiens
  misc_RNA (1)...(19): siRNA sense strand
uacuauagcuucacacagu

SEQ ID NO: 1220506 - RNA, 19 nt, Homo sapiens
  misc_RNA (1)...(19): siRNA sense strand
guaggaagcguagcaguau

SEQ ID NO: 1220507 - RNA, 19 nt, Homo sapiens
  misc_RNA (1)...(19): siRNA sense strand
cgaaaggcuacgagcaaua

SEQ ID NO: 1220508 - RNA, 19 nt, Homo sapiens
  misc_RNA (1)...(19): siRNA sense strand
caaauccuaugccgaaagg

SEQ ID NO: 1220509 - RNA, 19 nt, Homo sapiens
  misc_RNA (1)...(19): siRNA sense strand
caaacuggaagcaauguau

SEQ ID NO: 1220510 - RNA, 19 nt, Homo sapiens
  misc_RNA (1)...(19): siRNA sense strand
gaguggguaucgaaacuuc

SEQ ID NO: 1220511 - RNA, 19 nt, Homo sapiens
  misc_RNA (1)...(19): siRNA sense strand
uugaacaacugcagagaga

SEQ ID NO: 1220512 - RNA, 19 nt, Homo sapiens
  misc_RNA (1)...(19): siRNA sense strand
gaaccugcaugaugauucc

SEQ ID NO: 1220513 - RNA, 19 nt, Homo sapiens
  misc_RNA (1)...(19): siRNA sense strand
acagcgagcuccuggacaa

SEQ ID NO: 1220514 - RNA, 19 nt, Homo sapiens
  misc_RNA (1)...(19): siRNA sense strand
guucaucagcuuucuaaug

SEQ ID NO: 1220515 - RNA, 19 nt, Homo sapiens
  misc_RNA (1)...(19): siRNA sense strand
ggagagagagaaacugaag

SEQ ID NO: 1220516 - RNA, 19 nt, Homo sapiens
  misc_RNA (1)...(19): siRNA sense strand
ucauauugcccauaaaguu

SEQ ID NO: 1220517 - RNA, 19 nt, Homo sapiens
  misc_RNA (1)...(19): siRNA sense strand
ugugucauauugcccauaa

SEQ ID NO: 1220518 - RNA, 19 nt, Homo sapiens
  misc_RNA (1)...(19): siRNA sense strand
gagccaaaccgauauagag

SEQ ID NO: 1220519 - RNA, 19 nt, Homo sapiens
  misc_RNA (1)...(19): siRNA sense strand
agacacgaguuccauuaug

SEQ ID NO: 1220520 - RNA, 19 nt, Homo sapiens
  misc_RNA (1)...(19): siRNA sense strand
aaacuucgccaccacagaa

SEQ ID NO: 1220521 - RNA, 19 nt, Homo sapiens
  misc_RNA (1)...(19): siRNA sense strand
ucucagugaugucuguaaa

SEQ ID NO: 1220522 - RNA, 19 nt, Homo sapiens
  misc_RNA (1)...(19): siRNA sense strand
gaaaggcuacgagcaauac

SEQ ID NO: 1220523 - RNA, 19 nt, Homo sapiens
  misc_RNA (1)...(19): siRNA sense strand
gcgaagucccggagaagaa

SEQ ID NO: 1220524 - RNA, 19 nt, Homo sapiens
  misc_RNA (1)...(19): siRNA sense strand
uaggaagcguagcaguaua

SEQ ID NO: 1220525 - RNA, 19 nt, Homo sapiens
  misc_RNA (1)...(19): siRNA sense strand
guauggagagcaaauccua

SEQ ID NO: 1220526 - RNA, 19 nt, Homo sapiens
  misc_RNA (1)...(19): siRNA sense strand
acuggaccauccugucuua

SEQ ID NO: 1220527 - RNA, 19 nt, Homo sapiens
  misc_RNA (1)...(19): siRNA sense strand
gcuacgagcaauacuauag

SEQ ID NO: 1220528 - RNA, 19 nt, Homo sapiens
  misc_RNA (1)...(19): siRNA sense strand
cacagaauguaucgucaga

SEQ ID NO: 1220529 - RNA, 19 nt, Homo sapiens
  misc_RNA (1)...(19): siRNA sense strand
ggagccaccaguucagaaa

SEQ ID NO: 1220530 - RNA, 19 nt, Homo sapiens
  misc_RNA (1)...(19): siRNA sense strand
ugagcacuauggagagauu

SEQ ID NO: 1220531 - RNA, 19 nt, Homo sapiens
  misc_RNA (1)...(19): siRNA sense strand
aaacgagauuucugaugau

SEQ ID NO: 1220532 - RNA, 19 nt, Homo sapiens
  misc_RNA (1)...(19): siRNA sense strand
gcggagagagagaaacuga

SEQ ID NO: 1220533 - RNA, 19 nt, Homo sapiens
  misc_RNA (1)...(19): siRNA sense strand
aguuugcgcuggaauuaaa

SEQ ID NO: 1220534 - RNA, 19 nt, Homo sapiens
  misc_RNA (1)...(19): siRNA sense strand
gaagaucugugucauauug

SEQ ID NO: 1220535 - RNA, 19 nt, Homo sapiens
  misc_RNA (1)...(19): siRNA sense strand
gaaugaaauugccauguuu

SEQ ID NO: 1220536 - RNA, 19 nt, Homo sapiens
  misc_RNA (1)...(19): siRNA sense strand
gaaaguagacucuccauca

SEQ ID NO: 1220537 - RNA, 19 nt, Homo sapiens
  misc_RNA (1)...(19): siRNA sense strand
gagcacaucuaccaucuga

SEQ ID NO: 1220538 - RNA, 19 nt, Homo sapiens
  misc_RNA (1)...(19): siRNA sense strand
gaauguaucgucagaauga

SEQ ID NO: 1220539 - RNA, 19 nt, Homo sapiens
  misc_RNA (1)...(19): siRNA sense strand
ggacaaaggaaucuugaaa

SEQ ID NO: 1220540 - RNA, 19 nt, Homo sapiens
  misc_RNA (1)...(19): siRNA sense strand
gugauaaucuuuccuuaga

SEQ ID NO: 1220541 - RNA, 19 nt, Homo sapiens
  misc_RNA (1)...(19): siRNA sense strand
gaaguucuguuaucuccaa

SEQ ID NO: 1220542 - RNA, 19 nt, Homo sapiens
  misc_RNA (1)...(19): siRNA sense strand
gaagcgaagucccggagaa

SEQ ID NO: 1220543 - RNA, 19 nt, Homo sapiens
  misc_RNA (1)...(19): siRNA sense strand
agaaugaaauugccauguu

SEQ ID NO: 1220544 - RNA, 19 nt, Homo sapiens
  misc_RNA (1)...(19): siRNA sense strand
ucuccaagcucuucagaaa

SEQ ID NO: 1220545 - RNA, 19 nt, Homo sapiens
  misc_RNA (1)...(19): siRNA sense strand
gccaagagccaaaccgaua

SEQ ID NO: 1220546 - RNA, 19 nt, Homo sapiens
  misc_RNA (1)...(19): siRNA sense strand
aagaagaucugugucauau

SEQ ID NO: 1220547 - RNA, 19 nt, Homo sapiens
  misc_RNA (1)...(19): siRNA sense strand
caagaagaucugugucaua

SEQ ID NO: 1220548 - RNA, 19 nt, Homo sapiens
  misc_RNA (1)...(19): siRNA sense strand
ccaaaccgauauagagaga

SEQ ID NO: 1220549 - RNA, 19 nt, Homo sapiens
  misc_RNA (1)...(19): siRNA sense strand
gcgaggagcuggaguacag

SEQ ID NO: 1220550 - RNA, 19 nt, Homo sapiens
  misc_RNA (1)...(19): siRNA sense strand
cagaauguaucgucagaau

SEQ ID NO: 1220551 - RNA, 19 nt, Homo sapiens
  misc_RNA (1)...(19): siRNA sense strand
aaaccgagcucuaguucau

SEQ ID NO: 1220552 - RNA, 19 nt, Homo sapiens
  misc_RNA (1)...(19): siRNA sense strand
gcaagaagaucugugucau

SEQ ID NO: 1220553 - RNA, 19 nt, Homo sapiens
  misc_RNA (1)...(19): siRNA sense strand
ggaacaacaucgggaagga

SEQ ID NO: 1220554 - RNA, 19 nt, Homo sapiens
  misc_RNA (1)...(19): siRNA sense strand
gaaggucaagucagaagaa

SEQ ID NO: 1220555 - RNA, 19 nt, Homo sapiens
  misc_RNA (1)...(19): siRNA sense strand
gagaagaaccuuggugugu

SEQ ID NO: 1220556 - RNA, 19 nt, Homo sapiens
  misc_RNA (1)...(19): siRNA sense strand
acaaguagcugcucuucca

SEQ ID NO: 1220557 - RNA, 19 nt, Homo sapiens
  misc_RNA (1)...(19): siRNA sense strand
aagaggaaguggcccuuaa

SEQ ID NO: 1220558 - RNA, 19 nt, Homo sapiens
  misc_RNA (1)...(19): siRNA sense strand
ucagugacauaagugauaa

SEQ ID NO: 1220559 - RNA, 19 nt, Homo sapiens
  misc_RNA (1)...(19): siRNA sense strand
cauauugcccauaaaguuu

SEQ ID NO: 1220560 - RNA, 19 nt, Homo sapiens
  misc_RNA (1)...(19): siRNA sense strand
gcacaucuaccaucugaag

SEQ ID NO: 1220561 - RNA, 19 nt, Homo sapiens
  misc_RNA (1)...(19): siRNA sense strand
ucagugaugucuguaaaga

SEQ ID NO: 1220562 - RNA, 19 nt, Homo sapiens
  misc_RNA (1)...(19): siRNA sense strand
uuaaaaggcuggcauaaga

SEQ ID NO: 1220563 - RNA, 19 nt, Homo sapiens
  misc_RNA (1)...(19): siRNA sense strand
aaaccgauauagagagaga

SEQ ID NO: 1220564 - RNA, 19 nt, Homo sapiens
  misc_RNA (1)...(19): siRNA sense strand
ugagacacgaguuccauua

SEQ ID NO: 1220565 - RNA, 19 nt, Homo sapiens
  misc_RNA (1)...(19): siRNA sense strand
agacuacacuccuccaauc

SEQ ID NO: 1220566 - RNA, 19 nt, Homo sapiens
  misc_RNA (1)...(19): siRNA sense strand
aaaacgagauuucugauga

SEQ ID NO: 1220567 - RNA, 19 nt, Homo sapiens
  misc_RNA (1)...(19): siRNA sense strand
cuacacuccuccaauccua

SEQ ID NO: 1220568 - RNA, 19 nt, Homo sapiens
  misc_RNA (1)...(19): siRNA sense strand
gacaaaggaaucuugaaau

SEQ ID NO: 1220569 - RNA, 19 nt, Homo sapiens
  misc_RNA (1)...(19): siRNA sense strand
caagagccaaaccgauaua

SEQ ID NO: 1220570 - RNA, 19 nt, Homo sapiens
  misc_RNA (1)...(19): siRNA sense strand
guaggaagcguagcaguau

SEQ ID NO: 1220571 - RNA, 19 nt, Homo sapiens
  misc_RNA (1)...(19): siRNA sense strand
caaacuggaagcaauguau

SEQ ID NO: 1220572 - RNA, 19 nt, Homo sapiens
  misc_RNA (1)...(19): siRNA sense strand
gagccaaaccgauauagag

SEQ ID NO: 1220573 - RNA, 19 nt, Homo sapiens
  misc_RNA (1)...(19): siRNA sense strand
acagcgagcuccuggacaa

SEQ ID NO: 1220574 - RNA, 19 nt, Homo sapiens
  misc_RNA (1)...(19): siRNA sense strand
guucaucagcuuucuaaug

SEQ ID NO: 1220575 - RNA, 19 nt, Homo sapiens
  misc_RNA (1)...(19): siRNA sense strand
ggagagagagaaacugaag

SEQ ID NO: 1220576 - RNA, 19 nt, Homo sapiens
  misc_RNA (1)...(19): siRNA sense strand
ucauauugcccauaaaguu

SEQ ID NO: 1220577 - RNA, 19 nt, Homo sapiens
  misc_RNA (1)...(19): siRNA sense strand
ugugucauauugcccauaa

SEQ ID NO: 1220578 - RNA, 19 nt, Homo sapiens
  misc_RNA (1)...(19): siRNA sense strand
agacacgaguuccauuaug

SEQ ID NO: 1220579 - RNA, 19 nt, Homo sapiens
  misc_RNA (1)...(19): siRNA sense strand
aaacuucgccaccacagaa

SEQ ID NO: 1220580 - RNA, 19 nt, Homo sapiens
  misc_RNA (1)...(19): siRNA sense strand
gaguggguaucgaaacuuc

SEQ ID NO: 1220581 - RNA, 19 nt, Homo sapiens
  misc_RNA (1)...(19): siRNA sense strand
ucucagugaugucuguaaa

SEQ ID NO: 1220582 - RNA, 19 nt, Homo sapiens
  misc_RNA (1)...(19): siRNA sense strand
gcgaagucccggagaagaa

SEQ ID NO: 1220583 - RNA, 19 nt, Homo sapiens
  misc_RNA (1)...(19): siRNA sense strand
uaggaagcguagcaguaua

SEQ ID NO: 1220584 - RNA, 19 nt, Homo sapiens
  misc_RNA (1)...(19): siRNA sense strand
cacagaauguaucgucaga

SEQ ID NO: 1220585 - RNA, 19 nt, Homo sapiens
  misc_RNA (1)...(19): siRNA sense strand
aaacgagauuucugaugau

SEQ ID NO: 1220586 - RNA, 19 nt, Homo sapiens
  misc_RNA (1)...(19): siRNA sense strand
gcggagagagagaaacuga

SEQ ID NO: 1220587 - RNA, 19 nt, Homo sapiens
  misc_RNA (1)...(19): siRNA sense strand
ggagccaccaguucagaaa

SEQ ID NO: 1220588 - RNA, 19 nt, Homo sapiens
  misc_RNA (1)...(19): siRNA sense strand
caaaaugcauagaccuuga

SEQ ID NO: 1220589 - RNA, 19 nt, Homo sapiens
  misc_RNA (1)...(19): siRNA sense strand
ucacugacucccuuucuga

SEQ ID NO: 1220590 - RNA, 19 nt, Homo sapiens
  misc_RNA (1)...(19): siRNA sense strand
gagacacgaguuccauuau

SEQ ID NO: 1220591 - RNA, 19 nt, Homo sapiens
  misc_RNA (1)...(19): siRNA sense strand
ggucaagucagaagaaguc

SEQ ID NO: 1220592 - RNA, 19 nt, Homo sapiens
  misc_RNA (1)...(19): siRNA sense strand
ucaggaaguucuguuaucu

SEQ ID NO: 1220593 - RNA, 19 nt, Homo sapiens
  misc_RNA (1)...(19): siRNA sense strand
ccuaauuugucaacacuag

SEQ ID NO: 1220594 - RNA, 19 nt, Homo sapiens
  misc_RNA (1)...(19): siRNA sense strand
gaaacuucgccaccacaga

SEQ ID NO: 1220595 - RNA, 19 nt, Homo sapiens
  misc_RNA (1)...(19): siRNA sense strand
gaugucgggcucucaguga

SEQ ID NO: 1220596 - RNA, 19 nt, Homo sapiens
  misc_RNA (1)...(19): siRNA sense strand
aaauugguaucaccuucaa

SEQ ID NO: 1220597 - RNA, 19 nt, Homo sapiens
  misc_RNA (1)...(19): siRNA sense strand
gauuucugaugaugacuca

SEQ ID NO: 1220598 - RNA, 19 nt, Homo sapiens
  misc_RNA (1)...(19): siRNA sense strand
caucacagacucuucaucu

SEQ ID NO: 1220599 - RNA, 19 nt, Homo sapiens
  misc_RNA (1)...(19): siRNA sense strand
gcacaaguagcugcucuuc

SEQ ID NO: 1220600 - RNA, 19 nt, Homo sapiens
  misc_RNA (1)...(19): siRNA sense strand
gaagucaucaaaaugcaua

SEQ ID NO: 1220601 - RNA, 19 nt, Homo sapiens
  misc_RNA (1)...(19): siRNA sense strand
cgagauuucugaugaugac

SEQ ID NO: 1220602 - RNA, 19 nt, Homo sapiens
  misc_RNA (1)...(19): siRNA sense strand
aagcguagcaguauaucaa

SEQ ID NO: 1220603 - RNA, 19 nt, Homo sapiens
  misc_RNA (1)...(19): siRNA sense strand
gcucaggaaguucuguuau

SEQ ID NO: 1220604 - RNA, 19 nt, Homo sapiens
  misc_RNA (1)...(19): siRNA sense strand
agugaugucuguaaagaag

SEQ ID NO: 1220605 - RNA, 19 nt, Homo sapiens
  misc_RNA (1)...(19): siRNA sense strand
ucaaggagcacaaguagcu

SEQ ID NO: 1220606 - RNA, 19 nt, Homo sapiens
  misc_RNA (1)...(19): siRNA sense strand
cauuaugguuacagucuuc

SEQ ID NO: 1220607 - RNA, 19 nt, Homo sapiens
  misc_RNA (1)...(19): siRNA sense strand
ccaagagccaaaccgauau

SEQ ID NO: 1220608 - RNA, 19 nt, Homo sapiens
  misc_RNA (1)...(19): siRNA sense strand
guagcaguauaucaaagca

SEQ ID NO: 1220609 - RNA, 19 nt, Homo sapiens
  misc_RNA (1)...(19): siRNA sense strand
ugaagaacgcccugucauc

SEQ ID NO: 1220610 - RNA, 19 nt, Homo sapiens
  misc_RNA (1)...(19): siRNA sense strand
gaugagugaugagaagaac

SEQ ID NO: 1220611 - RNA, 19 nt, Homo sapiens
  misc_RNA (1)...(19): siRNA sense strand
gaaaaccgagcucuaguuc

SEQ ID NO: 1220612 - RNA, 19 nt, Homo sapiens
  misc_RNA (1)...(19): siRNA sense strand
gaagcguagcaguauauca

SEQ ID NO: 1220613 - RNA, 19 nt, Homo sapiens
  misc_RNA (1)...(19): siRNA sense strand
gaaacugaagcagcugaug

SEQ ID NO: 1220614 - RNA, 19 nt, Homo sapiens
  misc_RNA (1)...(19): siRNA sense strand
aaagaggaaguggcccuua

SEQ ID NO: 1220615 - RNA, 19 nt, Homo sapiens
  misc_RNA (1)...(19): siRNA sense strand
aguaggaagcguagcagua

SEQ ID NO: 1220616 - RNA, 19 nt, Homo sapiens
  misc_RNA (1)...(19): siRNA sense strand
uaguucaucagcuuucuaa

SEQ ID NO: 1220617 - RNA, 19 nt, Homo sapiens
  misc_RNA (1)...(19): siRNA sense strand
ggucauuggucugaagaac

SEQ ID NO: 1220618 - RNA, 19 nt, Homo sapiens
  misc_RNA (1)...(19): siRNA sense strand
gcguagcaguauaucaaag

SEQ ID NO: 1220619 - RNA, 19 nt, Homo sapiens
  misc_RNA (1)...(19): siRNA sense strand
ccgagcagcaguaacauca

SEQ ID NO: 1220620 - RNA, 19 nt, Homo sapiens
  misc_RNA (1)...(19): siRNA sense strand
aaaguagacucuccaucac

SEQ ID NO: 1220621 - RNA, 19 nt, Homo sapiens
  misc_RNA (1)...(19): siRNA sense strand
gaagugguggaaggacuga

SEQ ID NO: 1220622 - RNA, 19 nt, Homo sapiens
  misc_RNA (1)...(19): siRNA sense strand
gcucuaguucaucagcuuu

SEQ ID NO: 1220623 - RNA, 19 nt, Homo sapiens
  misc_RNA (1)...(19): siRNA sense strand
cuguaaagaagucaucaaa

SEQ ID NO: 1220624 - RNA, 19 nt, Homo sapiens
  misc_RNA (1)...(19): siRNA sense strand
cauaagugauaaucuuucc

SEQ ID NO: 1220625 - RNA, 19 nt, Homo sapiens
  misc_RNA (1)...(19): siRNA sense strand
agaggaaguggcccuuaaa

SEQ ID NO: 1220626 - RNA, 19 nt, Homo sapiens
  misc_RNA (1)...(19): siRNA sense strand
gguguuugacuccauuuca

SEQ ID NO: 1220627 - RNA, 19 nt, Homo sapiens
  misc_RNA (1)...(19): siRNA sense strand
acaccgaggagcacaucua

SEQ ID NO: 1220628 - RNA, 19 nt, Homo sapiens
  misc_RNA (1)...(19): siRNA sense strand
ucacuuuaaggucagcuuu

SEQ ID NO: 1220629 - RNA, 19 nt, Homo sapiens
  misc_RNA (1)...(19): siRNA sense strand
ucuaccaucugaaggucaa

SEQ ID NO: 1220630 - RNA, 19 nt, Homo sapiens
  misc_RNA (1)...(19): siRNA sense strand
ccaugccgguggagcugaa

SEQ ID NO: 1220631 - RNA, 19 nt, Homo sapiens
  misc_RNA (1)...(19): siRNA sense strand
cucaggaaguucuguuauc

SEQ ID NO: 1220632 - RNA, 19 nt, Homo sapiens
  misc_RNA (1)...(19): siRNA sense strand
ucaaacuggaagcaaugua

SEQ ID NO: 1220633 - RNA, 19 nt, Homo sapiens
  misc_RNA (1)...(19): siRNA sense strand
ucaaguaggaagcguagca

SEQ ID NO: 1220634 - RNA, 19 nt, Homo sapiens
  misc_RNA (1)...(19): siRNA sense strand
gaagaucugugucauauug

SEQ ID NO: 1220635 - RNA, 19 nt, Homo sapiens
  misc_RNA (1)...(19): siRNA sense strand
gaaugaaauugccauguuu

SEQ ID NO: 1220636 - RNA, 19 nt, Homo sapiens
  misc_RNA (1)...(19): siRNA sense strand
gaaaguagacucuccauca

SEQ ID NO: 1220637 - RNA, 19 nt, Homo sapiens
  misc_RNA (1)...(19): siRNA sense strand
gagcacaucuaccaucuga

SEQ ID NO: 1220638 - RNA, 19 nt, Homo sapiens
  misc_RNA (1)...(19): siRNA sense strand
gaauguaucgucagaauga

SEQ ID NO: 1220639 - RNA, 19 nt, Homo sapiens
  misc_RNA (1)...(19): siRNA sense strand
ggacaaaggaaucuugaaa

SEQ ID NO: 1220640 - RNA, 19 nt, Homo sapiens
  misc_RNA (1)...(19): siRNA sense strand
gugauaaucuuuccuuaga

SEQ ID NO: 1220641 - RNA, 19 nt, Homo sapiens
  misc_RNA (1)...(19): siRNA sense strand
gaaguucuguuaucuccaa

SEQ ID NO: 1220642 - RNA, 19 nt, Homo sapiens
  misc_RNA (1)...(19): siRNA sense strand
gaagcgaagucccggagaa

SEQ ID NO: 1220643 - RNA, 19 nt, Homo sapiens
  misc_RNA (1)...(19): siRNA sense strand
agaaugaaauugccauguu

SEQ ID NO: 1220644 - RNA, 19 nt, Homo sapiens
  misc_RNA (1)...(19): siRNA sense strand
ucuccaagcucuucagaaa

SEQ ID NO: 1220645 - RNA, 19 nt, Homo sapiens
  misc_RNA (1)...(19): siRNA sense strand
gccaagagccaaaccgaua

SEQ ID NO: 1220646 - RNA, 19 nt, Homo sapiens
  misc_RNA (1)...(19): siRNA sense strand
aagaagaucugugucauau

SEQ ID NO: 1220647 - RNA, 19 nt, Homo sapiens
  misc_RNA (1)...(19): siRNA sense strand
caagaagaucugugucaua

SEQ ID NO: 1220648 - RNA, 19 nt, Homo sapiens
  misc_RNA (1)...(19): siRNA sense strand
ccaaaccgauauagagaga

SEQ ID NO: 1220649 - RNA, 19 nt, Homo sapiens
  misc_RNA (1)...(19): siRNA sense strand
gcgaggagcuggaguacag

SEQ ID NO: 1220650 - RNA, 19 nt, Homo sapiens
  misc_RNA (1)...(19): siRNA sense strand
cagaauguaucgucagaau

SEQ ID NO: 1220651 - RNA, 19 nt, Homo sapiens
  misc_RNA (1)...(19): siRNA sense strand
aaaccgagcucuaguucau

SEQ ID NO: 1220652 - RNA, 19 nt, Homo sapiens
  misc_RNA (1)...(19): siRNA sense strand
gcaagaagaucugugucau

SEQ ID NO: 1220653 - RNA, 19 nt, Homo sapiens
  misc_RNA (1)...(19): siRNA sense strand
ggaacaacaucgggaagga

SEQ ID NO: 1220654 - RNA, 19 nt, Homo sapiens
  misc_RNA (1)...(19): siRNA sense strand
gaaggucaagucagaagaa

SEQ ID NO: 1220655 - RNA, 19 nt, Homo sapiens
  misc_RNA (1)...(19): siRNA sense strand
gagaagaaccuuggugugu

SEQ ID NO: 1220656 - RNA, 19 nt, Homo sapiens
  misc_RNA (1)...(19): siRNA sense strand
acaaguagcugcucuucca

SEQ ID NO: 1220657 - RNA, 19 nt, Homo sapiens
  misc_RNA (1)...(19): siRNA sense strand
aagaggaaguggcccuuaa

SEQ ID NO: 1220658 - RNA, 19 nt, Homo sapiens
  misc_RNA (1)...(19): siRNA sense strand
ucagugacauaagugauaa

SEQ ID NO: 1220659 - RNA, 19 nt, Homo sapiens
  misc_RNA (1)...(19): siRNA sense strand
cauauugcccauaaaguuu

SEQ ID NO: 1220660 - RNA, 19 nt, Homo sapiens
  misc_RNA (1)...(19): siRNA sense strand
gcacaucuaccaucugaag

SEQ ID NO: 1220661 - RNA, 19 nt, Homo sapiens
  misc_RNA (1)...(19): siRNA sense strand
ucagugaugucuguaaaga

SEQ ID NO: 1220662 - RNA, 19 nt, Homo sapiens
  misc_RNA (1)...(19): siRNA sense strand
uuaaaaggcuggcauaaga

SEQ ID NO: 1220663 - RNA, 19 nt, Homo sapiens
  misc_RNA (1)...(19): siRNA sense strand
aaaccgauauagagagaga

SEQ ID NO: 1220664 - RNA, 19 nt, Homo sapiens
  misc_RNA (1)...(19): siRNA sense strand
ugagacacgaguuccauua

SEQ ID NO: 1220665 - RNA, 19 nt, Homo sapiens
  misc_RNA (1)...(19): siRNA sense strand
agacuacacuccuccaauc

SEQ ID NO: 1220666 - RNA, 19 nt, Homo sapiens
  misc_RNA (1)...(19): siRNA sense strand
aaaacgagauuucugauga

SEQ ID NO: 1220667 - RNA, 19 nt, Homo sapiens
  misc_RNA (1)...(19): siRNA sense strand
cuacacuccuccaauccua

SEQ ID NO: 1220668 - RNA, 19 nt, Homo sapiens
  misc_RNA (1)...(19): siRNA sense strand
gacaaaggaaucuugaaau

SEQ ID NO: 1220669 - RNA, 19 nt, Homo sapiens
  misc_RNA (1)...(19): siRNA sense strand
caagagccaaaccgauaua

SEQ ID NO: 1220670 - RNA, 19 nt, Homo sapiens
  misc_RNA (1)...(19): siRNA sense strand
guaggaagcguagcaguau

SEQ ID NO: 1220671 - RNA, 19 nt, Homo sapiens
  misc_RNA (1)...(19): siRNA sense strand
caaacuggaagcaauguau

SEQ ID NO: 1220672 - RNA, 19 nt, Homo sapiens
  misc_RNA (1)...(19): siRNA sense strand
gagccaaaccgauauagag

SEQ ID NO: 1220673 - RNA, 19 nt, Homo sapiens
  misc_RNA (1)...(19): siRNA sense strand
acagcgagcuccuggacaa

SEQ ID NO: 1220674 - RNA, 19 nt, Homo sapiens
  misc_RNA (1)...(19): siRNA sense strand
guucaucagcuuucuaaug

SEQ ID NO: 1220675 - RNA, 19 nt, Homo sapiens
  misc_RNA (1)...(19): siRNA sense strand
ggagagagagaaacugaag

SEQ ID NO: 1220676 - RNA, 19 nt, Homo sapiens
  misc_RNA (1)...(19): siRNA sense strand
ucauauugcccauaaaguu

SEQ ID NO: 1220677 - RNA, 19 nt, Homo sapiens
  misc_RNA (1)...(19): siRNA sense strand
ugugucauauugcccauaa

SEQ ID NO: 1220678 - RNA, 19 nt, Homo sapiens
  misc_RNA (1)...(19): siRNA sense strand
agacacgaguuccauuaug

SEQ ID NO: 1220679 - RNA, 19 nt, Homo sapiens
  misc_RNA (1)...(19): siRNA sense strand
aaacuucgccaccacagaa

SEQ ID NO: 1220680 - RNA, 19 nt, Homo sapiens
  misc_RNA (1)...(19): siRNA sense strand
gaguggguaucgaaacuuc

SEQ ID NO: 1220681 - RNA, 19 nt, Homo sapiens
  misc_RNA (1)...(19): siRNA sense strand
ucucagugaugucuguaaa

SEQ ID NO: 1220682 - RNA, 19 nt, Homo sapiens
  misc_RNA (1)...(19): siRNA sense strand
gcgaagucccggagaagaa

SEQ ID NO: 1220683 - RNA, 19 nt, Homo sapiens
  misc_RNA (1)...(19): siRNA sense strand
uaggaagcguagcaguaua

SEQ ID NO: 1220684 - RNA, 19 nt, Homo sapiens
  misc_RNA (1)...(19): siRNA sense strand
cacagaauguaucgucaga

SEQ ID NO: 1220685 - RNA, 19 nt, Homo sapiens
  misc_RNA (1)...(19): siRNA sense strand
aaacgagauuucugaugau

SEQ ID NO: 1220686 - RNA, 19 nt, Homo sapiens
  misc_RNA (1)...(19): siRNA sense strand
gcggagagagagaaacuga

SEQ ID NO: 1220687 - RNA, 19 nt, Homo sapiens
  misc_RNA (1)...(19): siRNA sense strand
ggagccaccaguucagaaa

SEQ ID NO: 1220688 - RNA, 19 nt, Homo sapiens
  misc_RNA (1)...(19): siRNA sense strand
caaaaugcauagaccuuga

SEQ ID NO: 1220689 - RNA, 19 nt, Homo sapiens
  misc_RNA (1)...(19): siRNA sense strand
ucacugacucccuuucuga

SEQ ID NO: 1220690 - RNA, 19 nt, Homo sapiens
  misc_RNA (1)...(19): siRNA sense strand
gagacacgaguuccauuau

SEQ ID NO: 1220691 - RNA, 19 nt, Homo sapiens
  misc_RNA (1)...(19): siRNA sense strand
ggucaagucagaagaaguc

SEQ ID NO: 1220692 - RNA, 19 nt, Homo sapiens
  misc_RNA (1)...(19): siRNA sense strand
ucaggaaguucuguuaucu

SEQ ID NO: 1220693 - RNA, 19 nt, Homo sapiens
  misc_RNA (1)...(19): siRNA sense strand
ccuaauuugucaacacuag

SEQ ID NO: 1220694 - RNA, 19 nt, Homo sapiens
  misc_RNA (1)...(19): siRNA sense strand
gaaacuucgccaccacaga

SEQ ID NO: 1220695 - RNA, 19 nt, Homo sapiens
  misc_RNA (1)...(19): siRNA sense strand
gaugucgggcucucaguga

SEQ ID NO: 1220696 - RNA, 19 nt, Homo sapiens
  misc_RNA (1)...(19): siRNA sense strand
aaauugguaucaccuucaa

SEQ ID NO: 1220697 - RNA, 19 nt, Homo sapiens
  misc_RNA (1)...(19): siRNA sense strand
gauuucugaugaugacuca

SEQ ID NO: 1220698 - RNA, 19 nt, Homo sapiens
  misc_RNA (1)...(19): siRNA sense strand
caucacagacucuucaucu

SEQ ID NO: 1220699 - RNA, 19 nt, Homo sapiens
  misc_RNA (1)...(19): siRNA sense strand
gcacaaguagcugcucuuc

SEQ ID NO: 1220700 - RNA, 19 nt, Homo sapiens
  misc_RNA (1)...(19): siRNA sense strand
gaagucaucaaaaugcaua

SEQ ID NO: 1220701 - RNA, 19 nt, Homo sapiens
  misc_RNA (1)...(19): siRNA sense strand
cgagauuucugaugaugac

SEQ ID NO: 1220702 - RNA, 19 nt, Homo sapiens
  misc_RNA (1)...(19): siRNA sense strand
aagcguagcaguauaucaa

SEQ ID NO: 1220703 - RNA, 19 nt, Homo sapiens
  misc_RNA (1)...(19): siRNA sense strand
gcucaggaaguucuguuau

SEQ ID NO: 1220704 - RNA, 19 nt, Homo sapiens
  misc_RNA (1)...(19): siRNA sense strand
agugaugucuguaaagaag

SEQ ID NO: 1220705 - RNA, 19 nt, Homo sapiens
  misc_RNA (1)...(19): siRNA sense strand
ucaaggagcacaaguagcu

SEQ ID NO: 1220706 - RNA, 19 nt, Homo sapiens
  misc_RNA (1)...(19): siRNA sense strand
cauuaugguuacagucuuc

SEQ ID NO: 1220707 - RNA, 19 nt, Homo sapiens
  misc_RNA (1)...(19): siRNA sense strand
ccaagagccaaaccgauau

SEQ ID NO: 1220708 - RNA, 19 nt, Homo sapiens
  misc_RNA (1)...(19): siRNA sense strand
guagcaguauaucaaagca

SEQ ID NO: 1220709 - RNA, 19 nt, Homo sapiens
  misc_RNA (1)...(19): siRNA sense strand
ugaagaacgcccugucauc

SEQ ID NO: 1220710 - RNA, 19 nt, Homo sapiens
  misc_RNA (1)...(19): siRNA sense strand
gaugagugaugagaagaac

SEQ ID NO: 1220711 - RNA, 19 nt, Homo sapiens
  misc_RNA (1)...(19): siRNA sense strand
gaaaaccgagcucuaguuc

SEQ ID NO: 1220712 - RNA, 19 nt, Homo sapiens
  misc_RNA (1)...(19): siRNA sense strand
gaagcguagcaguauauca

SEQ ID NO: 1220713 - RNA, 19 nt, Homo sapiens
  misc_RNA (1)...(19): siRNA sense strand
gaaacugaagcagcugaug

SEQ ID NO: 1220714 - RNA, 19 nt, Homo sapiens
  misc_RNA (1)...(19): siRNA sense strand
aaagaggaaguggcccuua

SEQ ID NO: 1220715 - RNA, 19 nt, Homo sapiens
  misc_RNA (1)...(19): siRNA sense strand
aguaggaagcguagcagua

SEQ ID NO: 1220716 - RNA, 19 nt, Homo sapiens
  misc_RNA (1)...(19): siRNA sense strand
uaguucaucagcuuucuaa

SEQ ID NO: 1220717 - RNA, 19 nt, Homo sapiens
  misc_RNA (1)...(19): siRNA sense strand
ggucauuggucugaagaac

SEQ ID NO: 1220718 - RNA, 19 nt, Homo sapiens
  misc_RNA (1)...(19): siRNA sense strand
gcguagcaguauaucaaag

SEQ ID NO: 1220719 - RNA, 19 nt, Homo sapiens
  misc_RNA (1)...(19): siRNA sense strand
ccgagcagcaguaacauca

SEQ ID NO: 1220720 - RNA, 19 nt, Homo sapiens
  misc_RNA (1)...(19): siRNA sense strand
aaaguagacucuccaucac

SEQ ID NO: 1220721 - RNA, 19 nt, Homo sapiens
  misc_RNA (1)...(19): siRNA sense strand
gaagugguggaaggacuga

SEQ ID NO: 1220722 - RNA, 19 nt, Homo sapiens
  misc_RNA (1)...(19): siRNA sense strand
gcucuaguucaucagcuuu

SEQ ID NO: 1220723 - RNA, 19 nt, Homo sapiens
  misc_RNA (1)...(19): siRNA sense strand
cuguaaagaagucaucaaa

SEQ ID NO: 1220724 - RNA, 19 nt, Homo sapiens
  misc_RNA (1)...(19): siRNA sense strand
cauaagugauaaucuuucc

SEQ ID NO: 1220725 - RNA, 19 nt, Homo sapiens
  misc_RNA (1)...(19): siRNA sense strand
agaggaaguggcccuuaaa

SEQ ID NO: 1220726 - RNA, 19 nt, Homo sapiens
  misc_RNA (1)...(19): siRNA sense strand
gguguuugacuccauuuca

SEQ ID NO: 1220727 - RNA, 19 nt, Homo sapiens
  misc_RNA (1)...(19): siRNA sense strand
acaccgaggagcacaucua

SEQ ID NO: 1220728 - RNA, 19 nt, Homo sapiens
  misc_RNA (1)...(19): siRNA sense strand
ucacuuuaaggucagcuuu

SEQ ID NO: 1220729 - RNA, 19 nt, Homo sapiens
  misc_RNA (1)...(19): siRNA sense strand
ucuaccaucugaaggucaa

SEQ ID NO: 1220730 - RNA, 19 nt, Homo sapiens
  misc_RNA (1)...(19): siRNA sense strand
ccaugccgguggagcugaa

SEQ ID NO: 1220731 - RNA, 19 nt, Homo sapiens
  misc_RNA (1)...(19): siRNA sense strand
cucaggaaguucuguuauc

SEQ ID NO: 1220732 - RNA, 19 nt, Homo sapiens
  misc_RNA (1)...(19): siRNA sense strand
ucaaacuggaagcaaugua

SEQ ID NO: 1220733 - RNA, 19 nt, Homo sapiens
  misc_RNA (1)...(19): siRNA sense strand
ucaaguaggaagcguagca

SEQ ID NO: 1220734 - RNA, 19 nt, Homo sapiens
  misc_RNA (1)...(19): siRNA sense strand
gaagaucugugucauauug

SEQ ID NO: 1220735 - RNA, 19 nt, Homo sapiens
  misc_RNA (1)...(19): siRNA sense strand
gaaugaaauugccauguuu

SEQ ID NO: 1220736 - RNA, 19 nt, Homo sapiens
  misc_RNA (1)...(19): siRNA sense strand
agaagaagcugaaauacaa

SEQ ID NO: 1220737 - RNA, 19 nt, Homo sapiens
  misc_RNA (1)...(19): siRNA sense strand
gaaaguagacucuccauca

SEQ ID NO: 1220738 - RNA, 19 nt, Homo sapiens
  misc_RNA (1)...(19): siRNA sense strand
ucaagaaccugcaugauga

SEQ ID NO: 1220739 - RNA, 19 nt, Homo sapiens
  misc_RNA (1)...(19): siRNA sense strand
gcaaauccauggaaauugu

SEQ ID NO: 1220740 - RNA, 19 nt, Homo sapiens
  misc_RNA (1)...(19): siRNA sense strand
ggacaagggcuuccaguuu

SEQ ID NO: 1220741 - RNA, 19 nt, Homo sapiens
  misc_RNA (1)...(19): siRNA sense strand
gagcacaucuaccaucuga

SEQ ID NO: 1220742 - RNA, 19 nt, Homo sapiens
  misc_RNA (1)...(19): siRNA sense strand
ggaacaaagugaccucuug

SEQ ID NO: 1220743 - RNA, 19 nt, Homo sapiens
  misc_RNA (1)...(19): siRNA sense strand
gaauguaucgucagaauga

SEQ ID NO: 1220744 - RNA, 19 nt, Homo sapiens
  misc_RNA (1)...(19): siRNA sense strand
ggacaaaggaaucuugaaa

SEQ ID NO: 1220745 - RNA, 19 nt, Homo sapiens
  misc_RNA (1)...(19): siRNA sense strand
gugauaaucuuuccuuaga

SEQ ID NO: 1220746 - RNA, 19 nt, Homo sapiens
  misc_RNA (1)...(19): siRNA sense strand
gaaguucuguuaucuccaa

SEQ ID NO: 1220747 - RNA, 19 nt, Homo sapiens
  misc_RNA (1)...(19): siRNA sense strand
gaagggaacuuagaagaag

SEQ ID NO: 1220748 - RNA, 19 nt, Homo sapiens
  misc_RNA (1)...(19): siRNA sense strand
gaacuuagaagaagcugaa

SEQ ID NO: 1220749 - RNA, 19 nt, Homo sapiens
  misc_RNA (1)...(19): siRNA sense strand
gaacaacugcagagagaaa

SEQ ID NO: 1220750 - RNA, 19 nt, Homo sapiens
  misc_RNA (1)...(19): siRNA sense strand
gaagcgaagucccggagaa

SEQ ID NO: 1220751 - RNA, 19 nt, Homo sapiens
  misc_RNA (1)...(19): siRNA sense strand
gcgcuggaauuaaaugaaa

SEQ ID NO: 1220752 - RNA, 19 nt, Homo sapiens
  misc_RNA (1)...(19): siRNA sense strand
gagagauugucaucaagaa

SEQ ID NO: 1220753 - RNA, 19 nt, Homo sapiens
  misc_RNA (1)...(19): siRNA sense strand
ggaagggaacuuagaagaa

SEQ ID NO: 1220754 - RNA, 19 nt, Homo sapiens
  misc_RNA (1)...(19): siRNA sense strand
agaaugaaauugccauguu

SEQ ID NO: 1220755 - RNA, 19 nt, Homo sapiens
  misc_RNA (1)...(19): siRNA sense strand
ucuccaagcucuucagaaa

SEQ ID NO: 1220756 - RNA, 19 nt, Homo sapiens
  misc_RNA (1)...(19): siRNA sense strand
gccaagagccaaaccgaua

SEQ ID NO: 1220757 - RNA, 19 nt, Homo sapiens
  misc_RNA (1)...(19): siRNA sense strand
gcuggaagcaagccauuua

SEQ ID NO: 1220758 - RNA, 19 nt, Homo sapiens
  misc_RNA (1)...(19): siRNA sense strand
aagaagaucugugucauau

SEQ ID NO: 1220759 - RNA, 19 nt, Homo sapiens
  misc_RNA (1)...(19): siRNA sense strand
caagaagaucugugucaua

SEQ ID NO: 1220760 - RNA, 19 nt, Homo sapiens
  misc_RNA (1)...(19): siRNA sense strand
gcaauacuauagcuucaca

SEQ ID NO: 1220761 - RNA, 19 nt, Homo sapiens
  misc_RNA (1)...(19): siRNA sense strand
ccaaaccgauauagagaga

SEQ ID NO: 1220762 - RNA, 19 nt, Homo sapiens
  misc_RNA (1)...(19): siRNA sense strand
caacggcaccuauuuggaa

SEQ ID NO: 1220763 - RNA, 19 nt, Homo sapiens
  misc_RNA (1)...(19): siRNA sense strand
ggaaauggcaugaaagcau

SEQ ID NO: 1220764 - RNA, 19 nt, Homo sapiens
  misc_RNA (1)...(19): siRNA sense strand
gcgaggagcuggaguacag

SEQ ID NO: 1220765 - RNA, 19 nt, Homo sapiens
  misc_RNA (1)...(19): siRNA sense strand
cagaauguaucgucagaau

SEQ ID NO: 1220766 - RNA, 19 nt, Homo sapiens
  misc_RNA (1)...(19): siRNA sense strand
gagcaauacuauagcuuca

SEQ ID NO: 1220767 - RNA, 19 nt, Homo sapiens
  misc_RNA (1)...(19): siRNA sense strand
aaaccgagcucuaguucau

SEQ ID NO: 1220768 - RNA, 19 nt, Homo sapiens
  misc_RNA (1)...(19): siRNA sense strand
gcaagaagaucugugucau

SEQ ID NO: 1220769 - RNA, 19 nt, Homo sapiens
  misc_RNA (1)...(19): siRNA sense strand
gcaccuauuuggaacuuag

SEQ ID NO: 1220770 - RNA, 19 nt, Homo sapiens
  misc_RNA (1)...(19): siRNA sense strand
gcagaggauugaacaacug

SEQ ID NO: 1220771 - RNA, 19 nt, Homo sapiens
  misc_RNA (1)...(19): siRNA sense strand
gcaaaauacuggagcacua

SEQ ID NO: 1220772 - RNA, 19 nt, Homo sapiens
  misc_RNA (1)...(19): siRNA sense strand
gacaagggcuuccaguuuu

SEQ ID NO: 1220773 - RNA, 19 nt, Homo sapiens
  misc_RNA (1)...(19): siRNA sense strand
ggaacaacaucgggaagga

SEQ ID NO: 1220774 - RNA, 19 nt, Homo sapiens
  misc_RNA (1)...(19): siRNA sense strand
gaaggucaagucagaagaa

SEQ ID NO: 1220775 - RNA, 19 nt, Homo sapiens
  misc_RNA (1)...(19): siRNA sense strand
gagaagaaccuuggugugu

SEQ ID NO: 1220776 - RNA, 19 nt, Homo sapiens
  misc_RNA (1)...(19): siRNA sense strand
gggcaaauccauggaaauu

SEQ ID NO: 1220777 - RNA, 19 nt, Homo sapiens
  misc_RNA (1)...(19): siRNA sense strand
ggaagcaagccauuuaauc

SEQ ID NO: 1220778 - RNA, 19 nt, Homo sapiens
  misc_RNA (1)...(19): siRNA sense strand
gcacuaaugcccaugagau

SEQ ID NO: 1220779 - RNA, 19 nt, Homo sapiens
  misc_RNA (1)...(19): siRNA sense strand
gagcaacggcaccuauuug

SEQ ID NO: 1220780 - RNA, 19 nt, Homo sapiens
  misc_RNA (1)...(19): siRNA sense strand
acaaguagcugcucuucca

SEQ ID NO: 1220781 - RNA, 19 nt, Homo sapiens
  misc_RNA (1)...(19): siRNA sense strand
uugcauccauaacaucuua

SEQ ID NO: 1220782 - RNA, 19 nt, Homo sapiens
  misc_RNA (1)...(19): siRNA sense strand
ucagugaugucuguaaaga

SEQ ID NO: 1220783 - RNA, 19 nt, Homo sapiens
  misc_RNA (1)...(19): siRNA sense strand
cuuagaagaagcugaaaua

SEQ ID NO: 1220784 - RNA, 19 nt, Homo sapiens
  misc_RNA (1)...(19): siRNA sense strand
ucagugacauaagugauaa

SEQ ID NO: 1220785 - RNA, 19 nt, Homo sapiens
  misc_RNA (1)...(19): siRNA sense strand
cauauugcccauaaaguuu

SEQ ID NO: 1220786 - RNA, 19 nt, Homo sapiens
  misc_RNA (1)...(19): siRNA sense strand
aagaggaaguggcccuuaa

SEQ ID NO: 1220787 - RNA, 19 nt, Homo sapiens
  misc_RNA (1)...(19): siRNA sense strand
gcacaucuaccaucugaag

SEQ ID NO: 1220788 - RNA, 19 nt, Homo sapiens
  misc_RNA (1)...(19): siRNA sense strand
uuaaaaggcuggcauaaga

SEQ ID NO: 1220789 - RNA, 19 nt, Homo sapiens
  misc_RNA (1)...(19): siRNA sense strand
gaagaagcugaaauacaaa

SEQ ID NO: 1220790 - RNA, 19 nt, Homo sapiens
  misc_RNA (1)...(19): siRNA sense strand
gauugaaggcacaguguuu

SEQ ID NO: 1220791 - RNA, 19 nt, Homo sapiens
  misc_RNA (1)...(19): siRNA sense strand
ggagagauugucaucaaga

SEQ ID NO: 1220792 - RNA, 19 nt, Homo sapiens
  misc_RNA (1)...(19): siRNA sense strand
aaaccgauauagagagaga

SEQ ID NO: 1220793 - RNA, 19 nt, Homo sapiens
  misc_RNA (1)...(19): siRNA sense strand
ccagagguuucuagaggaa

SEQ ID NO: 1220794 - RNA, 19 nt, Homo sapiens
  misc_RNA (1)...(19): siRNA sense strand
agagguggauugagcacua

SEQ ID NO: 1220795 - RNA, 19 nt, Homo sapiens
  misc_RNA (1)...(19): siRNA sense strand
ggcaagaugugagauggaa

SEQ ID NO: 1220796 - RNA, 19 nt, Homo sapiens
  misc_RNA (1)...(19): siRNA sense strand
ugagacacgaguuccauua

SEQ ID NO: 1220797 - RNA, 19 nt, Homo sapiens
  misc_RNA (1)...(19): siRNA sense strand
agacuacacuccuccaauc

SEQ ID NO: 1220798 - RNA, 19 nt, Homo sapiens
  misc_RNA (1)...(19): siRNA sense strand
gaaauccgacgaugacucu

SEQ ID NO: 1220799 - RNA, 19 nt, Homo sapiens
  misc_RNA (1)...(19): siRNA sense strand
aaaacgagauuucugauga

SEQ ID NO: 1220800 - RNA, 19 nt, Homo sapiens
  misc_RNA (1)...(19): siRNA sense strand
cuacacuccuccaauccua

SEQ ID NO: 1220801 - RNA, 19 nt, Homo sapiens
  misc_RNA (1)...(19): siRNA sense strand
caugcugagucuagaaauu

SEQ ID NO: 1220802 - RNA, 19 nt, Homo sapiens
  misc_RNA (1)...(19): siRNA sense strand
gaagcaagccauuuaaucc

SEQ ID NO: 1220803 - RNA, 19 nt, Homo sapiens
  misc_RNA (1)...(19): siRNA sense strand
caagagccaaaccgauaua

SEQ ID NO: 1220804 - RNA, 19 nt, Homo sapiens
  misc_RNA (1)...(19): siRNA sense strand
gacaaaggaaucuugaaau

SEQ ID NO: 1220805 - RNA, 19 nt, Homo sapiens
  misc_RNA (1)...(19): siRNA sense strand
uacuauagcuucacacagu

SEQ ID NO: 1220806 - RNA, 19 nt, Homo sapiens
  misc_RNA (1)...(19): siRNA sense strand
guaggaagcguagcaguau

SEQ ID NO: 1220807 - RNA, 19 nt, Homo sapiens
  misc_RNA (1)...(19): siRNA sense strand
cgaaaggcuacgagcaaua

SEQ ID NO: 1220808 - RNA, 19 nt, Homo sapiens
  misc_RNA (1)...(19): siRNA sense strand
caaauccuaugccgaaagg

SEQ ID NO: 1220809 - RNA, 19 nt, Homo sapiens
  misc_RNA (1)...(19): siRNA sense strand
caaacuggaagcaauguau

SEQ ID NO: 1220810 - RNA, 19 nt, Homo sapiens
  misc_RNA (1)...(19): siRNA sense strand
gaguggguaucgaaacuuc

SEQ ID NO: 1220811 - RNA, 19 nt, Homo sapiens
  misc_RNA (1)...(19): siRNA sense strand
uugaacaacugcagagaga

SEQ ID NO: 1220812 - RNA, 19 nt, Homo sapiens
  misc_RNA (1)...(19): siRNA sense strand
gaaccugcaugaugauucc

SEQ ID NO: 1220813 - RNA, 19 nt, Homo sapiens
  misc_RNA (1)...(19): siRNA sense strand
acagcgagcuccuggacaa

SEQ ID NO: 1220814 - RNA, 19 nt, Homo sapiens
  misc_RNA (1)...(19): siRNA sense strand
guucaucagcuuucuaaug

SEQ ID NO: 1220815 - RNA, 19 nt, Homo sapiens
  misc_RNA (1)...(19): siRNA sense strand
ggagagagagaaacugaag

SEQ ID NO: 1220816 - RNA, 19 nt, Homo sapiens
  misc_RNA (1)...(19): siRNA sense strand
ucauauugcccauaaaguu

SEQ ID NO: 1220817 - RNA, 19 nt, Homo sapiens
  misc_RNA (1)...(19): siRNA sense strand
ugugucauauugcccauaa

SEQ ID NO: 1220818 - RNA, 19 nt, Homo sapiens
  misc_RNA (1)...(19): siRNA sense strand
gagccaaaccgauauagag

SEQ ID NO: 1220819 - RNA, 19 nt, Homo sapiens
  misc_RNA (1)...(19): siRNA sense strand
agacacgaguuccauuaug

SEQ ID NO: 1220820 - RNA, 19 nt, Homo sapiens
  misc_RNA (1)...(19): siRNA sense strand
aaacuucgccaccacagaa

SEQ ID NO: 1220821 - RNA, 19 nt, Homo sapiens
  misc_RNA (1)...(19): siRNA sense strand
ucucagugaugucuguaaa

SEQ ID NO: 1220822 - RNA, 19 nt, Homo sapiens
  misc_RNA (1)...(19): siRNA sense strand
gaaaggcuacgagcaauac

SEQ ID NO: 1220823 - RNA, 19 nt, Homo sapiens
  misc_RNA (1)...(19): siRNA sense strand
gcgaagucccggagaagaa

SEQ ID NO: 1220824 - RNA, 19 nt, Homo sapiens
  misc_RNA (1)...(19): siRNA sense strand
uaggaagcguagcaguaua

SEQ ID NO: 1220825 - RNA, 19 nt, Homo sapiens
  misc_RNA (1)...(19): siRNA sense strand
guauggagagcaaauccua

SEQ ID NO: 1220826 - RNA, 19 nt, Homo sapiens
  misc_RNA (1)...(19): siRNA sense strand
acuggaccauccugucuua

SEQ ID NO: 1220827 - RNA, 19 nt, Homo sapiens
  misc_RNA (1)...(19): siRNA sense strand
gcuacgagcaauacuauag

SEQ ID NO: 1220828 - RNA, 19 nt, Homo sapiens
  misc_RNA (1)...(19): siRNA sense strand
cacagaauguaucgucaga

SEQ ID NO: 1220829 - RNA, 19 nt, Homo sapiens
  misc_RNA (1)...(19): siRNA sense strand
ggagccaccaguucagaaa

SEQ ID NO: 1220830 - RNA, 19 nt, Homo sapiens
  misc_RNA (1)...(19): siRNA sense strand
ugagcacuauggagagauu

SEQ ID NO: 1220831 - RNA, 19 nt, Homo sapiens
  misc_RNA (1)...(19): siRNA sense strand
aaacgagauuucugaugau

SEQ ID NO: 1220832 - RNA, 19 nt, Homo sapiens
  misc_RNA (1)...(19): siRNA sense strand
gcggagagagagaaacuga

SEQ ID NO: 1220833 - RNA, 19 nt, Homo sapiens
  misc_RNA (1)...(19): siRNA sense strand
aguuugcgcuggaauuaaa

SEQ ID NO: 1220834 - RNA, 19 nt, Homo sapiens
  misc_RNA (1)...(19): siRNA sense strand
gaagaucugugucauauug

SEQ ID NO: 1220835 - RNA, 19 nt, Homo sapiens
  misc_RNA (1)...(19): siRNA sense strand
gaaugaaauugccauguuu

SEQ ID NO: 1220836 - RNA, 19 nt, Homo sapiens
  misc_RNA (1)...(19): siRNA sense strand
agaagaagcugaaauacaa

SEQ ID NO: 1220837 - RNA, 19 nt, Homo sapiens
  misc_RNA (1)...(19): siRNA sense strand
gaaaguagacucuccauca

SEQ ID NO: 1220838 - RNA, 19 nt, Homo sapiens
  misc_RNA (1)...(19): siRNA sense strand
ucaagaaccugcaugauga

SEQ ID NO: 1220839 - RNA, 19 nt, Homo sapiens
  misc_RNA (1)...(19): siRNA sense strand
gcaaauccauggaaauugu

SEQ ID NO: 1220840 - RNA, 19 nt, Homo sapiens
  misc_RNA (1)...(19): siRNA sense strand
ggacaagggcuuccaguuu

SEQ ID NO: 1220841 - RNA, 19 nt, Homo sapiens
  misc_RNA (1)...(19): siRNA sense strand
gagcacaucuaccaucuga

SEQ ID NO: 1220842 - RNA, 19 nt, Homo sapiens
  misc_RNA (1)...(19): siRNA sense strand
ggaacaaagugaccucuug

SEQ ID NO: 1220843 - RNA, 19 nt, Homo sapiens
  misc_RNA (1)...(19): siRNA sense strand
gaauguaucgucagaauga

SEQ ID NO: 1220844 - RNA, 19 nt, Homo sapiens
  misc_RNA (1)...(19): siRNA sense strand
ggacaaaggaaucuugaaa

SEQ ID NO: 1220845 - RNA, 19 nt, Homo sapiens
  misc_RNA (1)...(19): siRNA sense strand
gugauaaucuuuccuuaga

SEQ ID NO: 1220846 - RNA, 19 nt, Homo sapiens
  misc_RNA (1)...(19): siRNA sense strand
gaaguucuguuaucuccaa

SEQ ID NO: 1220847 - RNA, 19 nt, Homo sapiens
  misc_RNA (1)...(19): siRNA sense strand
gaagggaacuuagaagaag

SEQ ID NO: 1220848 - RNA, 19 nt, Homo sapiens
  misc_RNA (1)...(19): siRNA sense strand
gaacuuagaagaagcugaa

SEQ ID NO: 1220849 - RNA, 19 nt, Homo sapiens
  misc_RNA (1)...(19): siRNA sense strand
gaacaacugcagagagaaa

SEQ ID NO: 1220850 - RNA, 19 nt, Homo sapiens
  misc_RNA (1)...(19): siRNA sense strand
gaagcgaagucccggagaa

SEQ ID NO: 1220851 - RNA, 19 nt, Homo sapiens
  misc_RNA (1)...(19): siRNA sense strand
gcgcuggaauuaaaugaaa

SEQ ID NO: 1220852 - RNA, 19 nt, Homo sapiens
  misc_RNA (1)...(19): siRNA sense strand
gagagauugucaucaagaa

SEQ ID NO: 1220853 - RNA, 19 nt, Homo sapiens
  misc_RNA (1)...(19): siRNA sense strand
ggaagggaacuuagaagaa

SEQ ID NO: 1220854 - RNA, 19 nt, Homo sapiens
  misc_RNA (1)...(19): siRNA sense strand
agaaugaaauugccauguu

SEQ ID NO: 1220855 - RNA, 19 nt, Homo sapiens
  misc_RNA (1)...(19): siRNA sense strand
ucuccaagcucuucagaaa

SEQ ID NO: 1220856 - RNA, 19 nt, Homo sapiens
  misc_RNA (1)...(19): siRNA sense strand
gccaagagccaaaccgaua

SEQ ID NO: 1220857 - RNA, 19 nt, Homo sapiens
  misc_RNA (1)...(19): siRNA sense strand
gcuggaagcaagccauuua

SEQ ID NO: 1220858 - RNA, 19 nt, Homo sapiens
  misc_RNA (1)...(19): siRNA sense strand
aagaagaucugugucauau

SEQ ID NO: 1220859 - RNA, 19 nt, Homo sapiens
  misc_RNA (1)...(19): siRNA sense strand
caagaagaucugugucaua

SEQ ID NO: 1220860 - RNA, 19 nt, Homo sapiens
  misc_RNA (1)...(19): siRNA sense strand
gcaauacuauagcuucaca

SEQ ID NO: 1220861 - RNA, 19 nt, Homo sapiens
  misc_RNA (1)...(19): siRNA sense strand
ccaaaccgauauagagaga

SEQ ID NO: 1220862 - RNA, 19 nt, Homo sapiens
  misc_RNA (1)...(19): siRNA sense strand
caacggcaccuauuuggaa

SEQ ID NO: 1220863 - RNA, 19 nt, Homo sapiens
  misc_RNA (1)...(19): siRNA sense strand
ggaaauggcaugaaagcau

SEQ ID NO: 1220864 - RNA, 19 nt, Homo sapiens
  misc_RNA (1)...(19): siRNA sense strand
gcgaggagcuggaguacag

SEQ ID NO: 1220865 - RNA, 19 nt, Homo sapiens
  misc_RNA (1)...(19): siRNA sense strand
cagaauguaucgucagaau

SEQ ID NO: 1220866 - RNA, 19 nt, Homo sapiens
  misc_RNA (1)...(19): siRNA sense strand
gagcaauacuauagcuuca

SEQ ID NO: 1220867 - RNA, 19 nt, Homo sapiens
  misc_RNA (1)...(19): siRNA sense strand
aaaccgagcucuaguucau

SEQ ID NO: 1220868 - RNA, 19 nt, Homo sapiens
  misc_RNA (1)...(19): siRNA sense strand
gcaagaagaucugugucau

SEQ ID NO: 1220869 - RNA, 19 nt, Homo sapiens
  misc_RNA (1)...(19): siRNA sense strand
gcaccuauuuggaacuuag

SEQ ID NO: 1220870 - RNA, 19 nt, Homo sapiens
  misc_RNA (1)...(19): siRNA sense strand
gcagaggauugaacaacug

SEQ ID NO: 1220871 - RNA, 19 nt, Homo sapiens
  misc_RNA (1)...(19): siRNA sense strand
gcaaaauacuggagcacua

SEQ ID NO: 1220872 - RNA, 19 nt, Homo sapiens
  misc_RNA (1)...(19): siRNA sense strand
gacaagggcuuccaguuuu

SEQ ID NO: 1220873 - RNA, 19 nt, Homo sapiens
  misc_RNA (1)...(19): siRNA sense strand
ggaacaacaucgggaagga

SEQ ID NO: 1220874 - RNA, 19 nt, Homo sapiens
  misc_RNA (1)...(19): siRNA sense strand
gaaggucaagucagaagaa

SEQ ID NO: 1220875 - RNA, 19 nt, Homo sapiens
  misc_RNA (1)...(19): siRNA sense strand
gagaagaaccuuggugugu

SEQ ID NO: 1220876 - RNA, 19 nt, Homo sapiens
  misc_RNA (1)...(19): siRNA sense strand
gggcaaauccauggaaauu

SEQ ID NO: 1220877 - RNA, 19 nt, Homo sapiens
  misc_RNA (1)...(19): siRNA sense strand
ggaagcaagccauuuaauc

SEQ ID NO: 1220878 - RNA, 19 nt, Homo sapiens
  misc_RNA (1)...(19): siRNA sense strand
gcacuaaugcccaugagau

SEQ ID NO: 1220879 - RNA, 19 nt, Homo sapiens
  misc_RNA (1)...(19): siRNA sense strand
gagcaacggcaccuauuug

SEQ ID NO: 1220880 - RNA, 19 nt, Homo sapiens
  misc_RNA (1)...(19): siRNA sense strand
acaaguagcugcucuucca

SEQ ID NO: 1220881 - RNA, 19 nt, Homo sapiens
  misc_RNA (1)...(19): siRNA sense strand
uugcauccauaacaucuua

SEQ ID NO: 1220882 - RNA, 19 nt, Homo sapiens
  misc_RNA (1)...(19): siRNA sense strand
ucagugaugucuguaaaga

SEQ ID NO: 1220883 - RNA, 19 nt, Homo sapiens
  misc_RNA (1)...(19): siRNA sense strand
cuuagaagaagcugaaaua

SEQ ID NO: 1220884 - RNA, 19 nt, Homo sapiens
  misc_RNA (1)...(19): siRNA sense strand
ucagugacauaagugauaa

SEQ ID NO: 1220885 - RNA, 19 nt, Homo sapiens
  misc_RNA (1)...(19): siRNA sense strand
cauauugcccauaaaguuu

SEQ ID NO: 1220886 - RNA, 19 nt, Homo sapiens
  misc_RNA (1)...(19): siRNA sense strand
aagaggaaguggcccuuaa

SEQ ID NO: 1220887 - RNA, 19 nt, Homo sapiens
  misc_RNA (1)...(19): siRNA sense strand
gcacaucuaccaucugaag

SEQ ID NO: 1220888 - RNA, 19 nt, Homo sapiens
  misc_RNA (1)...(19): siRNA sense strand
uuaaaaggcuggcauaaga

SEQ ID NO: 1220889 - RNA, 19 nt, Homo sapiens
  misc_RNA (1)...(19): siRNA sense strand
gaagaagcugaaauacaaa

SEQ ID NO: 1220890 - RNA, 19 nt, Homo sapiens
  misc_RNA (1)...(19): siRNA sense strand
gauugaaggcacaguguuu

SEQ ID NO: 1220891 - RNA, 19 nt, Homo sapiens
  misc_RNA (1)...(19): siRNA sense strand
ggagagauugucaucaaga

SEQ ID NO: 1220892 - RNA, 19 nt, Homo sapiens
  misc_RNA (1)...(19): siRNA sense strand
aaaccgauauagagagaga

SEQ ID NO: 1220893 - RNA, 19 nt, Homo sapiens
  misc_RNA (1)...(19): siRNA sense strand
ccagagguuucuagaggaa

SEQ ID NO: 1220894 - RNA, 19 nt, Homo sapiens
  misc_RNA (1)...(19): siRNA sense strand
agagguggauugagcacua

SEQ ID NO: 1220895 - RNA, 19 nt, Homo sapiens
  misc_RNA (1)...(19): siRNA sense strand
ggcaagaugugagauggaa

SEQ ID NO: 1220896 - RNA, 19 nt, Homo sapiens
  misc_RNA (1)...(19): siRNA sense strand
ugagacacgaguuccauua

SEQ ID NO: 1220897 - RNA, 19 nt, Homo sapiens
  misc_RNA (1)...(19): siRNA sense strand
agacuacacuccuccaauc

SEQ ID NO: 1220898 - RNA, 19 nt, Homo sapiens
  misc_RNA (1)...(19): siRNA sense strand
gaaauccgacgaugacucu

SEQ ID NO: 1220899 - RNA, 19 nt, Homo sapiens
  misc_RNA (1)...(19): siRNA sense strand
aaaacgagauuucugauga

SEQ ID NO: 1220900 - RNA, 19 nt, Homo sapiens
  misc_RNA (1)...(19): siRNA sense strand
cuacacuccuccaauccua

SEQ ID NO: 1220901 - RNA, 19 nt, Homo sapiens
  misc_RNA (1)...(19): siRNA sense strand
caugcugagucuagaaauu

SEQ ID NO: 1220902 - RNA, 19 nt, Homo sapiens
  misc_RNA (1)...(19): siRNA sense strand
gaagcaagccauuuaaucc

SEQ ID NO: 1220903 - RNA, 19 nt, Homo sapiens
  misc_RNA (1)...(19): siRNA sense strand
caagagccaaaccgauaua

SEQ ID NO: 1220904 - RNA, 19 nt, Homo sapiens
  misc_RNA (1)...(19): siRNA sense strand
gacaaaggaaucuugaaau

SEQ ID NO: 1220905 - RNA, 19 nt, Homo sapiens
  misc_RNA (1)...(19): siRNA sense strand
uacuauagcuucacacagu

SEQ ID NO: 1220906 - RNA, 19 nt, Homo sapiens
  misc_RNA (1)...(19): siRNA sense strand
guaggaagcguagcaguau

SEQ ID NO: 1220907 - RNA, 19 nt, Homo sapiens
  misc_RNA (1)...(19): siRNA sense strand
cgaaaggcuacgagcaaua

SEQ ID NO: 1220908 - RNA, 19 nt, Homo sapiens
  misc_RNA (1)...(19): siRNA sense strand
caaauccuaugccgaaagg

SEQ ID NO: 1220909 - RNA, 19 nt, Homo sapiens
  misc_RNA (1)...(19): siRNA sense strand
caaacuggaagcaauguau

SEQ ID NO: 1220910 - RNA, 19 nt, Homo sapiens
  misc_RNA (1)...(19): siRNA sense strand
gaguggguaucgaaacuuc

SEQ ID NO: 1220911 - RNA, 19 nt, Homo sapiens
  misc_RNA (1)...(19): siRNA sense strand
uugaacaacugcagagaga

SEQ ID NO: 1220912 - RNA, 19 nt, Homo sapiens
  misc_RNA (1)...(19): siRNA sense strand
gaaccugcaugaugauucc

SEQ ID NO: 1220913 - RNA, 19 nt, Homo sapiens
  misc_RNA (1)...(19): siRNA sense strand
acagcgagcuccuggacaa

SEQ ID NO: 1220914 - RNA, 19 nt, Homo sapiens
  misc_RNA (1)...(19): siRNA sense strand
guucaucagcuuucuaaug

SEQ ID NO: 1220915 - RNA, 19 nt, Homo sapiens
  misc_RNA (1)...(19): siRNA sense strand
ggagagagagaaacugaag

SEQ ID NO: 1220916 - RNA, 19 nt, Homo sapiens
  misc_RNA (1)...(19): siRNA sense strand
ucauauugcccauaaaguu

SEQ ID NO: 1220917 - RNA, 19 nt, Homo sapiens
  misc_RNA (1)...(19): siRNA sense strand
ugugucauauugcccauaa

SEQ ID NO: 1220918 - RNA, 19 nt, Homo sapiens
  misc_RNA (1)...(19): siRNA sense strand
gagccaaaccgauauagag

SEQ ID NO: 1220919 - RNA, 19 nt, Homo sapiens
  misc_RNA (1)...(19): siRNA sense strand
agacacgaguuccauuaug

SEQ ID NO: 1220920 - RNA, 19 nt, Homo sapiens
  misc_RNA (1)...(19): siRNA sense strand
aaacuucgccaccacagaa

SEQ ID NO: 1220921 - RNA, 19 nt, Homo sapiens
  misc_RNA (1)...(19): siRNA sense strand
ucucagugaugucuguaaa

SEQ ID NO: 1220922 - RNA, 19 nt, Homo sapiens
  misc_RNA (1)...(19): siRNA sense strand
gaaaggcuacgagcaauac

SEQ ID NO: 1220923 - RNA, 19 nt, Homo sapiens
  misc_RNA (1)...(19): siRNA sense strand
gcgaagucccggagaagaa

SEQ ID NO: 1220924 - RNA, 19 nt, Homo sapiens
  misc_RNA (1)...(19): siRNA sense strand
uaggaagcguagcaguaua

SEQ ID NO: 1220925 - RNA, 19 nt, Homo sapiens
  misc_RNA (1)...(19): siRNA sense strand
guauggagagcaaauccua

SEQ ID NO: 1220926 - RNA, 19 nt, Homo sapiens
  misc_RNA (1)...(19): siRNA sense strand
acuggaccauccugucuua

SEQ ID NO: 1220927 - RNA, 19 nt, Homo sapiens
  misc_RNA (1)...(19): siRNA sense strand
gcuacgagcaauacuauag

SEQ ID NO: 1220928 - RNA, 19 nt, Homo sapiens
  misc_RNA (1)...(19): siRNA sense strand
cacagaauguaucgucaga

SEQ ID NO: 1220929 - RNA, 19 nt, Homo sapiens
  misc_RNA (1)...(19): siRNA sense strand
ggagccaccaguucagaaa

SEQ ID NO: 1220930 - RNA, 19 nt, Homo sapiens
  misc_RNA (1)...(19): siRNA sense strand
ugagcacuauggagagauu

SEQ ID NO: 1220931 - RNA, 19 nt, Homo sapiens
  misc_RNA (1)...(19): siRNA sense strand
aaacgagauuucugaugau

SEQ ID NO: 1220932 - RNA, 19 nt, Homo sapiens
  misc_RNA (1)...(19): siRNA sense strand
gcggagagagagaaacuga

SEQ ID NO: 1220933 - RNA, 19 nt, Homo sapiens
  misc_RNA (1)...(19): siRNA sense strand
aguuugcgcuggaauuaaa

SEQ ID NO: 1220934 - RNA, 19 nt, Homo sapiens
  misc_RNA (1)...(19): siRNA sense strand
gaagaucugugucauauug

SEQ ID NO: 1220935 - RNA, 19 nt, Homo sapiens
  misc_RNA (1)...(19): siRNA sense strand
gaaugaaauugccauguuu

SEQ ID NO: 1220936 - RNA, 19 nt, Homo sapiens
  misc_RNA (1)...(19): siRNA sense strand
agaagaagcugaaauacaa

SEQ ID NO: 1220937 - RNA, 19 nt, Homo sapiens
  misc_RNA (1)...(19): siRNA sense strand
gaaaguagacucuccauca

SEQ ID NO: 1220938 - RNA, 19 nt, Homo sapiens
  misc_RNA (1)...(19): siRNA sense strand
ucaagaaccugcaugauga

SEQ ID NO: 1220939 - RNA, 19 nt, Homo sapiens
  misc_RNA (1)...(19): siRNA sense strand
gcaaauccauggaaauugu

SEQ ID NO: 1220940 - RNA, 19 nt, Homo sapiens
  misc_RNA (1)...(19): siRNA sense strand
ggacaagggcuuccaguuu

SEQ ID NO: 1220941 - RNA, 19 nt, Homo sapiens
  misc_RNA (1)...(19): siRNA sense strand
gagcacaucuaccaucuga

SEQ ID NO: 1220942 - RNA, 19 nt, Homo sapiens
  misc_RNA (1)...(19): siRNA sense strand
ggaacaaagugaccucuug

SEQ ID NO: 1220943 - RNA, 19 nt, Homo sapiens
  misc_RNA (1)...(19): siRNA sense strand
gaauguaucgucagaauga

SEQ ID NO: 1220944 - RNA, 19 nt, Homo sapiens
  misc_RNA (1)...(19): siRNA sense strand
ggacaaaggaaucuugaaa

SEQ ID NO: 1220945 - RNA, 19 nt, Homo sapiens
  misc_RNA (1)...(19): siRNA sense strand
gugauaaucuuuccuuaga

SEQ ID NO: 1220946 - RNA, 19 nt, Homo sapiens
  misc_RNA (1)...(19): siRNA sense strand
gaaguucuguuaucuccaa

SEQ ID NO: 1220947 - RNA, 19 nt, Homo sapiens
  misc_RNA (1)...(19): siRNA sense strand
gaagggaacuuagaagaag

SEQ ID NO: 1220948 - RNA, 19 nt, Homo sapiens
  misc_RNA (1)...(19): siRNA sense strand
gaacuuagaagaagcugaa

SEQ ID NO: 1220949 - RNA, 19 nt, Homo sapiens
  misc_RNA (1)...(19): siRNA sense strand
gaacaacugcagagagaaa

SEQ ID NO: 1220950 - RNA, 19 nt, Homo sapiens
  misc_RNA (1)...(19): siRNA sense strand
gaagcgaagucccggagaa

SEQ ID NO: 1220951 - RNA, 19 nt, Homo sapiens
  misc_RNA (1)...(19): siRNA sense strand
gcgcuggaauuaaaugaaa

SEQ ID NO: 1220952 - RNA, 19 nt, Homo sapiens
  misc_RNA (1)...(19): siRNA sense strand
gagagauugucaucaagaa

SEQ ID NO: 1220953 - RNA, 19 nt, Homo sapiens
  misc_RNA (1)...(19): siRNA sense strand
ggaagggaacuuagaagaa

SEQ ID NO: 1220954 - RNA, 19 nt, Homo sapiens
  misc_RNA (1)...(19): siRNA sense strand
agaaugaaauugccauguu

SEQ ID NO: 1220955 - RNA, 19 nt, Homo sapiens
  misc_RNA (1)...(19): siRNA sense strand
ucuccaagcucuucagaaa

SEQ ID NO: 1220956 - RNA, 19 nt, Homo sapiens
  misc_RNA (1)...(19): siRNA sense strand
gccaagagccaaaccgaua

SEQ ID NO: 1220957 - RNA, 19 nt, Homo sapiens
  misc_RNA (1)...(19): siRNA sense strand
gcuggaagcaagccauuua

SEQ ID NO: 1220958 - RNA, 19 nt, Homo sapiens
  misc_RNA (1)...(19): siRNA sense strand
aagaagaucugugucauau

SEQ ID NO: 1220959 - RNA, 19 nt, Homo sapiens
  misc_RNA (1)...(19): siRNA sense strand
caagaagaucugugucaua

SEQ ID NO: 1220960 - RNA, 19 nt, Homo sapiens
  misc_RNA (1)...(19): siRNA sense strand
gcaauacuauagcuucaca

SEQ ID NO: 1220961 - RNA, 19 nt, Homo sapiens
  misc_RNA (1)...(19): siRNA sense strand
ccaaaccgauauagagaga

SEQ ID NO: 1220962 - RNA, 19 nt, Homo sapiens
  misc_RNA (1)...(19): siRNA sense strand
caacggcaccuauuuggaa

SEQ ID NO: 1220963 - RNA, 19 nt, Homo sapiens
  misc_RNA (1)...(19): siRNA sense strand
ggaaauggcaugaaagcau

SEQ ID NO: 1220964 - RNA, 19 nt, Homo sapiens
  misc_RNA (1)...(19): siRNA sense strand
gcgaggagcuggaguacag

SEQ ID NO: 1220965 - RNA, 19 nt, Homo sapiens
  misc_RNA (1)...(19): siRNA sense strand
cagaauguaucgucagaau

SEQ ID NO: 1220966 - RNA, 19 nt, Homo sapiens
  misc_RNA (1)...(19): siRNA sense strand
gagcaauacuauagcuuca

SEQ ID NO: 1220967 - RNA, 19 nt, Homo sapiens
  misc_RNA (1)...(19): siRNA sense strand
aaaccgagcucuaguucau

SEQ ID NO: 1220968 - RNA, 19 nt, Homo sapiens
  misc_RNA (1)...(19): siRNA sense strand
gcaagaagaucugugucau

SEQ ID NO: 1220969 - RNA, 19 nt, Homo sapiens
  misc_RNA (1)...(19): siRNA sense strand
gcaccuauuuggaacuuag

SEQ ID NO: 1220970 - RNA, 19 nt, Homo sapiens
  misc_RNA (1)...(19): siRNA sense strand
gcagaggauugaacaacug

SEQ ID NO: 1220971 - RNA, 19 nt, Homo sapiens
  misc_RNA (1)...(19): siRNA sense strand
gcaaaauacuggagcacua

SEQ ID NO: 1220972 - RNA, 19 nt, Homo sapiens
  misc_RNA (1)...(19): siRNA sense strand
gacaagggcuuccaguuuu

SEQ ID NO: 1220973 - RNA, 19 nt, Homo sapiens
  misc_RNA (1)...(19): siRNA sense strand
ggaacaacaucgggaagga

SEQ ID NO: 1220974 - RNA, 19 nt, Homo sapiens
  misc_RNA (1)...(19): siRNA sense strand
gaaggucaagucagaagaa

SEQ ID NO: 1220975 - RNA, 19 nt, Homo sapiens
  misc_RNA (1)...(19): siRNA sense strand
gagaagaaccuuggugugu

SEQ ID NO: 1220976 - RNA, 19 nt, Homo sapiens
  misc_RNA (1)...(19): siRNA sense strand
gggcaaauccauggaaauu

SEQ ID NO: 1220977 - RNA, 19 nt, Homo sapiens
  misc_RNA (1)...(19): siRNA sense strand
ggaagcaagccauuuaauc

SEQ ID NO: 1220978 - RNA, 19 nt, Homo sapiens
  misc_RNA (1)...(19): siRNA sense strand
gcacuaaugcccaugagau

SEQ ID NO: 1220979 - RNA, 19 nt, Homo sapiens
  misc_RNA (1)...(19): siRNA sense strand
gagcaacggcaccuauuug

SEQ ID NO: 1220980 - RNA, 19 nt, Homo sapiens
  misc_RNA (1)...(19): siRNA sense strand
acaaguagcugcucuucca

SEQ ID NO: 1220981 - RNA, 19 nt, Homo sapiens
  misc_RNA (1)...(19): siRNA sense strand
uugcauccauaacaucuua

SEQ ID NO: 1220982 - RNA, 19 nt, Homo sapiens
  misc_RNA (1)...(19): siRNA sense strand
ucagugaugucuguaaaga

SEQ ID NO: 1220983 - RNA, 19 nt, Homo sapiens
  misc_RNA (1)...(19): siRNA sense strand
cuuagaagaagcugaaaua

SEQ ID NO: 1220984 - RNA, 19 nt, Homo sapiens
  misc_RNA (1)...(19): siRNA sense strand
ucagugacauaagugauaa

SEQ ID NO: 1220985 - RNA, 19 nt, Homo sapiens
  misc_RNA (1)...(19): siRNA sense strand
cauauugcccauaaaguuu

SEQ ID NO: 1220986 - RNA, 19 nt, Homo sapiens
  misc_RNA (1)...(19): siRNA sense strand
aagaggaaguggcccuuaa

SEQ ID NO: 1220987 - RNA, 19 nt, Homo sapiens
  misc_RNA (1)...(19): siRNA sense strand
gcacaucuaccaucugaag

SEQ ID NO: 1220988 - RNA, 19 nt, Homo sapiens
  misc_RNA (1)...(19): siRNA sense strand
uuaaaaggcuggcauaaga

SEQ ID NO: 1220989 - RNA, 19 nt, Homo sapiens
  misc_RNA (1)...(19): siRNA sense strand
gaagaagcugaaauacaaa

SEQ ID NO: 1220990 - RNA, 19 nt, Homo sapiens
  misc_RNA (1)...(19): siRNA sense strand
gauugaaggcacaguguuu

SEQ ID NO: 1220991 - RNA, 19 nt, Homo sapiens
  misc_RNA (1)...(19): siRNA sense strand
ggagagauugucaucaaga

SEQ ID NO: 1220992 - RNA, 19 nt, Homo sapiens
  misc_RNA (1)...(19): siRNA sense strand
aaaccgauauagagagaga

SEQ ID NO: 1220993 - RNA, 19 nt, Homo sapiens
  misc_RNA (1)...(19): siRNA sense strand
ccagagguuucuagaggaa

SEQ ID NO: 1220994 - RNA, 19 nt, Homo sapiens
  misc_RNA (1)...(19): siRNA sense strand
agagguggauugagcacua

SEQ ID NO: 1220995 - RNA, 19 nt, Homo sapiens
  misc_RNA (1)...(19): siRNA sense strand
ggcaagaugugagauggaa

SEQ ID NO: 1220996 - RNA, 19 nt, Homo sapiens
  misc_RNA (1)...(19): siRNA sense strand
ugagacacgaguuccauua

SEQ ID NO: 1220997 - RNA, 19 nt, Homo sapiens
  misc_RNA (1)...(19): siRNA sense strand
agacuacacuccuccaauc

SEQ ID NO: 1220998 - RNA, 19 nt, Homo sapiens
  misc_RNA (1)...(19): siRNA sense strand
gaaauccgacgaugacucu

SEQ ID NO: 1220999 - RNA, 19 nt, Homo sapiens
  misc_RNA (1)...(19): siRNA sense strand
aaaacgagauuucugauga

SEQ ID NO: 1221000 - RNA, 19 nt, Homo sapiens
  misc_RNA (1)...(19): siRNA sense strand
cuacacuccuccaauccua

SEQ ID NO: 1221001 - RNA, 19 nt, Homo sapiens
  misc_RNA (1)...(19): siRNA sense strand
caugcugagucuagaaauu

SEQ ID NO: 1221002 - RNA, 19 nt, Homo sapiens
  misc_RNA (1)...(19): siRNA sense strand
gaagcaagccauuuaaucc

SEQ ID NO: 1221003 - RNA, 19 nt, Homo sapiens
  misc_RNA (1)...(19): siRNA sense strand
caagagccaaaccgauaua

SEQ ID NO: 1221004 - RNA, 19 nt, Homo sapiens
  misc_RNA (1)...(19): siRNA sense strand
gacaaaggaaucuugaaau

SEQ ID NO: 1221005 - RNA, 19 nt, Homo sapiens
  misc_RNA (1)...(19): siRNA sense strand
uacuauagcuucacacagu

SEQ ID NO: 1221006 - RNA, 19 nt, Homo sapiens
  misc_RNA (1)...(19): siRNA sense strand
guaggaagcguagcaguau

SEQ ID NO: 1221007 - RNA, 19 nt, Homo sapiens
  misc_RNA (1)...(19): siRNA sense strand
cgaaaggcuacgagcaaua

SEQ ID NO: 1221008 - RNA, 19 nt, Homo sapiens
  misc_RNA (1)...(19): siRNA sense strand
caaauccuaugccgaaagg

SEQ ID NO: 1221009 - RNA, 19 nt, Homo sapiens
  misc_RNA (1)...(19): siRNA sense strand
caaacuggaagcaauguau

SEQ ID NO: 1221010 - RNA, 19 nt, Homo sapiens
  misc_RNA (1)...(19): siRNA sense strand
gaguggguaucgaaacuuc

SEQ ID NO: 1221011 - RNA, 19 nt, Homo sapiens
  misc_RNA (1)...(19): siRNA sense strand
uugaacaacugcagagaga

SEQ ID NO: 1221012 - RNA, 19 nt, Homo sapiens
  misc_RNA (1)...(19): siRNA sense strand
gaaccugcaugaugauucc

SEQ ID NO: 1221013 - RNA, 19 nt, Homo sapiens
  misc_RNA (1)...(19): siRNA sense strand
acagcgagcuccuggacaa

SEQ ID NO: 1221014 - RNA, 19 nt, Homo sapiens
  misc_RNA (1)...(19): siRNA sense strand
guucaucagcuuucuaaug

SEQ ID NO: 1221015 - RNA, 19 nt, Homo sapiens
  misc_RNA (1)...(19): siRNA sense strand
ggagagagagaaacugaag

SEQ ID NO: 1221016 - RNA, 19 nt, Homo sapiens
  misc_RNA (1)...(19): siRNA sense strand
ucauauugcccauaaaguu

SEQ ID NO: 1221017 - RNA, 19 nt, Homo sapiens
  misc_RNA (1)...(19): siRNA sense strand
ugugucauauugcccauaa

SEQ ID NO: 1221018 - RNA, 19 nt, Homo sapiens
  misc_RNA (1)...(19): siRNA sense strand
gagccaaaccgauauagag

SEQ ID NO: 1221019 - RNA, 19 nt, Homo sapiens
  misc_RNA (1)...(19): siRNA sense strand
agacacgaguuccauuaug

SEQ ID NO: 1221020 - RNA, 19 nt, Homo sapiens
  misc_RNA (1)...(19): siRNA sense strand
aaacuucgccaccacagaa

SEQ ID NO: 1221021 - RNA, 19 nt, Homo sapiens
  misc_RNA (1)...(19): siRNA sense strand
ucucagugaugucuguaaa

SEQ ID NO: 1221022 - RNA, 19 nt, Homo sapiens
  misc_RNA (1)...(19): siRNA sense strand
gaaaggcuacgagcaauac

SEQ ID NO: 1221023 - RNA, 19 nt, Homo sapiens
  misc_RNA (1)...(19): siRNA sense strand
gcgaagucccggagaagaa

SEQ ID NO: 1221024 - RNA, 19 nt, Homo sapiens
  misc_RNA (1)...(19): siRNA sense strand
uaggaagcguagcaguaua

SEQ ID NO: 1221025 - RNA, 19 nt, Homo sapiens
  misc_RNA (1)...(19): siRNA sense strand
guauggagagcaaauccua

SEQ ID NO: 1221026 - RNA, 19 nt, Homo sapiens
  misc_RNA (1)...(19): siRNA sense strand
acuggaccauccugucuua

SEQ ID NO: 1221027 - RNA, 19 nt, Homo sapiens
  misc_RNA (1)...(19): siRNA sense strand
gcuacgagcaauacuauag

SEQ ID NO: 1221028 - RNA, 19 nt, Homo sapiens
  misc_RNA (1)...(19): siRNA sense strand
cacagaauguaucgucaga

SEQ ID NO: 1221029 - RNA, 19 nt, Homo sapiens
  misc_RNA (1)...(19): siRNA sense strand
ggagccaccaguucagaaa

SEQ ID NO: 1221030 - RNA, 19 nt, Homo sapiens
  misc_RNA (1)...(19): siRNA sense strand
ugagcacuauggagagauu

SEQ ID NO: 1221031 - RNA, 19 nt, Homo sapiens
  misc_RNA (1)...(19): siRNA sense strand
aaacgagauuucugaugau

SEQ ID NO: 1221032 - RNA, 19 nt, Homo sapiens
  misc_RNA (1)...(19): siRNA sense strand
gcggagagagagaaacuga

SEQ ID NO: 1221033 - RNA, 19 nt, Homo sapiens
  misc_RNA (1)...(19): siRNA sense strand
aguuugcgcuggaauuaaa

SEQ ID NO: 1221034 - RNA, 19 nt, Homo sapiens
  misc_RNA (1)...(19): siRNA sense strand
gaagaucugugucauauug

SEQ ID NO: 1221035 - RNA, 19 nt, Homo sapiens
  misc_RNA (1)...(19): siRNA sense strand
gaaugaaauugccauguuu

SEQ ID NO: 1221036 - RNA, 19 nt, Homo sapiens
  misc_RNA (1)...(19): siRNA sense strand
agaagaagcugaaauacaa

SEQ ID NO: 1221037 - RNA, 19 nt, Homo sapiens
  misc_RNA (1)...(19): siRNA sense strand
gaaaguagacucuccauca

SEQ ID NO: 1221038 - RNA, 19 nt, Homo sapiens
  misc_RNA (1)...(19): siRNA sense strand
ucaagaaccugcaugauga

SEQ ID NO: 1221039 - RNA, 19 nt, Homo sapiens
  misc_RNA (1)...(19): siRNA sense strand
gcaaauccauggaaauugu

SEQ ID NO: 1221040 - RNA, 19 nt, Homo sapiens
  misc_RNA (1)...(19): siRNA sense strand
ggacaagggcuuccaguuu

SEQ ID NO: 1221041 - RNA, 19 nt, Homo sapiens
  misc_RNA (1)...(19): siRNA sense strand
gagcacaucuaccaucuga

SEQ ID NO: 1221042 - RNA, 19 nt, Homo sapiens
  misc_RNA (1)...(19): siRNA sense strand
ggaacaaagugaccucuug

SEQ ID NO: 1221043 - RNA, 19 nt, Homo sapiens
  misc_RNA (1)...(19): siRNA sense strand
gaauguaucgucagaauga

SEQ ID NO: 1221044 - RNA, 19 nt, Homo sapiens
  misc_RNA (1)...(19): siRNA sense strand
ggacaaaggaaucuugaaa

SEQ ID NO: 1221045 - RNA, 19 nt, Homo sapiens
  misc_RNA (1)...(19): siRNA sense strand
gugauaaucuuuccuuaga

SEQ ID NO: 1221046 - RNA, 19 nt, Homo sapiens
  misc_RNA (1)...(19): siRNA sense strand
gaaguucuguuaucuccaa

SEQ ID NO: 1221047 - RNA, 19 nt, Homo sapiens
  misc_RNA (1)...(19): siRNA sense strand
gaagggaacuuagaagaag

SEQ ID NO: 1221048 - RNA, 19 nt, Homo sapiens
  misc_RNA (1)...(19): siRNA sense strand
gaacuuagaagaagcugaa

SEQ ID NO: 1221049 - RNA, 19 nt, Homo sapiens
  misc_RNA (1)...(19): siRNA sense strand
gaacaacugcagagagaaa

SEQ ID NO: 1221050 - RNA, 19 nt, Homo sapiens
  misc_RNA (1)...(19): siRNA sense strand
gaagcgaagucccggagaa

SEQ ID NO: 1221051 - RNA, 19 nt, Homo sapiens
  misc_RNA (1)...(19): siRNA sense strand
gcgcuggaauuaaaugaaa

SEQ ID NO: 1221052 - RNA, 19 nt, Homo sapiens
  misc_RNA (1)...(19): siRNA sense strand
gagagauugucaucaagaa

SEQ ID NO: 1221053 - RNA, 19 nt, Homo sapiens
  misc_RNA (1)...(19): siRNA sense strand
ggaagggaacuuagaagaa

SEQ ID NO: 1221054 - RNA, 19 nt, Homo sapiens
  misc_RNA (1)...(19): siRNA sense strand
agaaugaaauugccauguu

SEQ ID NO: 1221055 - RNA, 19 nt, Homo sapiens
  misc_RNA (1)...(19): siRNA sense strand
ucuccaagcucuucagaaa

SEQ ID NO: 1221056 - RNA, 19 nt, Homo sapiens
  misc_RNA (1)...(19): siRNA sense strand
gccaagagccaaaccgaua

SEQ ID NO: 1221057 - RNA, 19 nt, Homo sapiens
  misc_RNA (1)...(19): siRNA sense strand
gcuggaagcaagccauuua

SEQ ID NO: 1221058 - RNA, 19 nt, Homo sapiens
  misc_RNA (1)...(19): siRNA sense strand
aagaagaucugugucauau

SEQ ID NO: 1221059 - RNA, 19 nt, Homo sapiens
  misc_RNA (1)...(19): siRNA sense strand
caagaagaucugugucaua

SEQ ID NO: 1221060 - RNA, 19 nt, Homo sapiens
  misc_RNA (1)...(19): siRNA sense strand
gcaauacuauagcuucaca

SEQ ID NO: 1221061 - RNA, 19 nt, Homo sapiens
  misc_RNA (1)...(19): siRNA sense strand
ccaaaccgauauagagaga

SEQ ID NO: 1221062 - RNA, 19 nt, Homo sapiens
  misc_RNA (1)...(19): siRNA sense strand
caacggcaccuauuuggaa

SEQ ID NO: 1221063 - RNA, 19 nt, Homo sapiens
  misc_RNA (1)...(19): siRNA sense strand
ggaaauggcaugaaagcau

SEQ ID NO: 1221064 - RNA, 19 nt, Homo sapiens
  misc_RNA (1)...(19): siRNA sense strand
gcgaggagcuggaguacag

SEQ ID NO: 1221065 - RNA, 19 nt, Homo sapiens
  misc_RNA (1)...(19): siRNA sense strand
cagaauguaucgucagaau

SEQ ID NO: 1221066 - RNA, 19 nt, Homo sapiens
  misc_RNA (1)...(19): siRNA sense strand
gagcaauacuauagcuuca

SEQ ID NO: 1221067 - RNA, 19 nt, Homo sapiens
  misc_RNA (1)...(19): siRNA sense strand
aaaccgagcucuaguucau

SEQ ID NO: 1221068 - RNA, 19 nt, Homo sapiens
  misc_RNA (1)...(19): siRNA sense strand
gcaagaagaucugugucau

SEQ ID NO: 1221069 - RNA, 19 nt, Homo sapiens
  misc_RNA (1)...(19): siRNA sense strand
gcaccuauuuggaacuuag

SEQ ID NO: 1221070 - RNA, 19 nt, Homo sapiens
  misc_RNA (1)...(19): siRNA sense strand
gcagaggauugaacaacug

SEQ ID NO: 1221071 - RNA, 19 nt, Homo sapiens
  misc_RNA (1)...(19): siRNA sense strand
gcaaaauacuggagcacua

SEQ ID NO: 1221072 - RNA, 19 nt, Homo sapiens
  misc_RNA (1)...(19): siRNA sense strand
gacaagggcuuccaguuuu

SEQ ID NO: 1221073 - RNA, 19 nt, Homo sapiens
  misc_RNA (1)...(19): siRNA sense strand
ggaacaacaucgggaagga

SEQ ID NO: 1221074 - RNA, 19 nt, Homo sapiens
  misc_RNA (1)...(19): siRNA sense strand
gaaggucaagucagaagaa

SEQ ID NO: 1221075 - RNA, 19 nt, Homo sapiens
  misc_RNA (1)...(19): siRNA sense strand
gagaagaaccuuggugugu

SEQ ID NO: 1221076 - RNA, 19 nt, Homo sapiens
  misc_RNA (1)...(19): siRNA sense strand
gggcaaauccauggaaauu

SEQ ID NO: 1221077 - RNA, 19 nt, Homo sapiens
  misc_RNA (1)...(19): siRNA sense strand
ggaagcaagccauuuaauc

SEQ ID NO: 1221078 - RNA, 19 nt, Homo sapiens
  misc_RNA (1)...(19): siRNA sense strand
gcacuaaugcccaugagau

SEQ ID NO: 1221079 - RNA, 19 nt, Homo sapiens
  misc_RNA (1)...(19): siRNA sense strand
gagcaacggcaccuauuug

SEQ ID NO: 1221080 - RNA, 19 nt, Homo sapiens
  misc_RNA (1)...(19): siRNA sense strand
acaaguagcugcucuucca

SEQ ID NO: 1221081 - RNA, 19 nt, Homo sapiens
  misc_RNA (1)...(19): siRNA sense strand
uugcauccauaacaucuua

SEQ ID NO: 1221082 - RNA, 19 nt, Homo sapiens
  misc_RNA (1)...(19): siRNA sense strand
ucagugaugucuguaaaga

SEQ ID NO: 1221083 - RNA, 19 nt, Homo sapiens
  misc_RNA (1)...(19): siRNA sense strand
cuuagaagaagcugaaaua

SEQ ID NO: 1221084 - RNA, 19 nt, Homo sapiens
  misc_RNA (1)...(19): siRNA sense strand
ucagugacauaagugauaa

SEQ ID NO: 1221085 - RNA, 19 nt, Homo sapiens
  misc_RNA (1)...(19): siRNA sense strand
cauauugcccauaaaguuu

SEQ ID NO: 1221086 - RNA, 19 nt, Homo sapiens
  misc_RNA (1)...(19): siRNA sense strand
aagaggaaguggcccuuaa

SEQ ID NO: 1221087 - RNA, 19 nt, Homo sapiens
  misc_RNA (1)...(19): siRNA sense strand
gcacaucuaccaucugaag

SEQ ID NO: 1221088 - RNA, 19 nt, Homo sapiens
  misc_RNA (1)...(19): siRNA sense strand
uuaaaaggcuggcauaaga

SEQ ID NO: 1221089 - RNA, 19 nt, Homo sapiens
  misc_RNA (1)...(19): siRNA sense strand
gaagaagcugaaauacaaa

SEQ ID NO: 1221090 - RNA, 19 nt, Homo sapiens
  misc_RNA (1)...(19): siRNA sense strand
gauugaaggcacaguguuu

SEQ ID NO: 1221091 - RNA, 19 nt, Homo sapiens
  misc_RNA (1)...(19): siRNA sense strand
ggagagauugucaucaaga

SEQ ID NO: 1221092 - RNA, 19 nt, Homo sapiens
  misc_RNA (1)...(19): siRNA sense strand
aaaccgauauagagagaga

SEQ ID NO: 1221093 - RNA, 19 nt, Homo sapiens
  misc_RNA (1)...(19): siRNA sense strand
ccagagguuucuagaggaa

SEQ ID NO: 1221094 - RNA, 19 nt, Homo sapiens
  misc_RNA (1)...(19): siRNA sense strand
agagguggauugagcacua

SEQ ID NO: 1221095 - RNA, 19 nt, Homo sapiens
  misc_RNA (1)...(19): siRNA sense strand
ggcaagaugugagauggaa

SEQ ID NO: 1221096 - RNA, 19 nt, Homo sapiens
  misc_RNA (1)...(19): siRNA sense strand
ugagacacgaguuccauua

SEQ ID NO: 1221097 - RNA, 19 nt, Homo sapiens
  misc_RNA (1)...(19): siRNA sense strand
agacuacacuccuccaauc

SEQ ID NO: 1221098 - RNA, 19 nt, Homo sapiens
  misc_RNA (1)...(19): siRNA sense strand
gaaauccgacgaugacucu

SEQ ID NO: 1221099 - RNA, 19 nt, Homo sapiens
  misc_RNA (1)...(19): siRNA sense strand
aaaacgagauuucugauga

SEQ ID NO: 1221100 - RNA, 19 nt, Homo sapiens
  misc_RNA (1)...(19): siRNA sense strand
cuacacuccuccaauccua

SEQ ID NO: 1221101 - RNA, 19 nt, Homo sapiens
  misc_RNA (1)...(19): siRNA sense strand
caugcugagucuagaaauu

SEQ ID NO: 1221102 - RNA, 19 nt, Homo sapiens
  misc_RNA (1)...(19): siRNA sense strand
gaagcaagccauuuaaucc

SEQ ID NO: 1221103 - RNA, 19 nt, Homo sapiens
  misc_RNA (1)...(19): siRNA sense strand
caagagccaaaccgauaua

SEQ ID NO: 1221104 - RNA, 19 nt, Homo sapiens
  misc_RNA (1)...(19): siRNA sense strand
gacaaaggaaucuugaaau

SEQ ID NO: 1221105 - RNA, 19 nt, Homo sapiens
  misc_RNA (1)...(19): siRNA sense strand
uacuauagcuucacacagu

SEQ ID NO: 1221106 - RNA, 19 nt, Homo sapiens
  misc_RNA (1)...(19): siRNA sense strand
guaggaagcguagcaguau

SEQ ID NO: 1221107 - RNA, 19 nt, Homo sapiens
  misc_RNA (1)...(19): siRNA sense strand
cgaaaggcuacgagcaaua

SEQ ID NO: 1221108 - RNA, 19 nt, Homo sapiens
  misc_RNA (1)...(19): siRNA sense strand
caaauccuaugccgaaagg

SEQ ID NO: 1221109 - RNA, 19 nt, Homo sapiens
  misc_RNA (1)...(19): siRNA sense strand
caaacuggaagcaauguau

SEQ ID NO: 1221110 - RNA, 19 nt, Homo sapiens
  misc_RNA (1)...(19): siRNA sense strand
gaguggguaucgaaacuuc

SEQ ID NO: 1221111 - RNA, 19 nt, Homo sapiens
  misc_RNA (1)...(19): siRNA sense strand
uugaacaacugcagagaga

SEQ ID NO: 1221112 - RNA, 19 nt, Homo sapiens
  misc_RNA (1)...(19): siRNA sense strand
gaaccugcaugaugauucc

SEQ ID NO: 1221113 - RNA, 19 nt, Homo sapiens
  misc_RNA (1)...(19): siRNA sense strand
acagcgagcuccuggacaa

SEQ ID NO: 1221114 - RNA, 19 nt, Homo sapiens
  misc_RNA (1)...(19): siRNA sense strand
guucaucagcuuucuaaug

SEQ ID NO: 1221115 - RNA, 19 nt, Homo sapiens
  misc_RNA (1)...(19): siRNA sense strand
ggagagagagaaacugaag

SEQ ID NO: 1221116 - RNA, 19 nt, Homo sapiens
  misc_RNA (1)...(19): siRNA sense strand
ucauauugcccauaaaguu

SEQ ID NO: 1221117 - RNA, 19 nt, Homo sapiens
  misc_RNA (1)...(19): siRNA sense strand
ugugucauauugcccauaa

SEQ ID NO: 1221118 - RNA, 19 nt, Homo sapiens
  misc_RNA (1)...(19): siRNA sense strand
gagccaaaccgauauagag

SEQ ID NO: 1221119 - RNA, 19 nt, Homo sapiens
  misc_RNA (1)...(19): siRNA sense strand
agacacgaguuccauuaug

SEQ ID NO: 1221120 - RNA, 19 nt, Homo sapiens
  misc_RNA (1)...(19): siRNA sense strand
aaacuucgccaccacagaa

SEQ ID NO: 1221121 - RNA, 19 nt, Homo sapiens
  misc_RNA (1)...(19): siRNA sense strand
ucucagugaugucuguaaa

SEQ ID NO: 1221122 - RNA, 19 nt, Homo sapiens
  misc_RNA (1)...(19): siRNA sense strand
gaaaggcuacgagcaauac

SEQ ID NO: 1221123 - RNA, 19 nt, Homo sapiens
  misc_RNA (1)...(19): siRNA sense strand
gcgaagucccggagaagaa

SEQ ID NO: 1221124 - RNA, 19 nt, Homo sapiens
  misc_RNA (1)...(19): siRNA sense strand
uaggaagcguagcaguaua

SEQ ID NO: 1221125 - RNA, 19 nt, Homo sapiens
  misc_RNA (1)...(19): siRNA sense strand
guauggagagcaaauccua

SEQ ID NO: 1221126 - RNA, 19 nt, Homo sapiens
  misc_RNA (1)...(19): siRNA sense strand
acuggaccauccugucuua

SEQ ID NO: 1221127 - RNA, 19 nt, Homo sapiens
  misc_RNA (1)...(19): siRNA sense strand
gcuacgagcaauacuauag

SEQ ID NO: 1221128 - RNA, 19 nt, Homo sapiens
  misc_RNA (1)...(19): siRNA sense strand
cacagaauguaucgucaga

SEQ ID NO: 1221129 - RNA, 19 nt, Homo sapiens
  misc_RNA (1)...(19): siRNA sense strand
ggagccaccaguucagaaa

SEQ ID NO: 1221130 - RNA, 19 nt, Homo sapiens
  misc_RNA (1)...(19): siRNA sense strand
ugagcacuauggagagauu

SEQ ID NO: 1221131 - RNA, 19 nt, Homo sapiens
  misc_RNA (1)...(19): siRNA sense strand
aaacgagauuucugaugau

SEQ ID NO: 1221132 - RNA, 19 nt, Homo sapiens
  misc_RNA (1)...(19): siRNA sense strand
gcggagagagagaaacuga

SEQ ID NO: 1221133 - RNA, 19 nt, Homo sapiens
  misc_RNA (1)...(19): siRNA sense strand
aguuugcgcuggaauuaaa

SEQ ID NO: 1221134 - RNA, 19 nt, Homo sapiens
  misc_RNA (1)...(19): siRNA sense strand
gaagaucugugucauauug

SEQ ID NO: 1221135 - RNA, 19 nt, Homo sapiens
  misc_RNA (1)...(19): siRNA sense strand
gaaugaaauugccauguuu

SEQ ID NO: 1221136 - RNA, 19 nt, Homo sapiens
  misc_RNA (1)...(19): siRNA sense strand
gaaaguagacucuccauca

SEQ ID NO: 1221137 - RNA, 19 nt, Homo sapiens
  misc_RNA (1)...(19): siRNA sense strand
gagcacaucuaccaucuga

SEQ ID NO: 1221138 - RNA, 19 nt, Homo sapiens
  misc_RNA (1)...(19): siRNA sense strand
gaauguaucgucagaauga

SEQ ID NO: 1221139 - RNA, 19 nt, Homo sapiens
  misc_RNA (1)...(19): siRNA sense strand
ggacaaaggaaucuugaaa

SEQ ID NO: 1221140 - RNA, 19 nt, Homo sapiens
  misc_RNA (1)...(19): siRNA sense strand
gugauaaucuuuccuuaga

SEQ ID NO: 1221141 - RNA, 19 nt, Homo sapiens
  misc_RNA (1)...(19): siRNA sense strand
gaaguucuguuaucuccaa

SEQ ID NO: 1221142 - RNA, 19 nt, Homo sapiens
  misc_RNA (1)...(19): siRNA sense strand
gaagcgaagucccggagaa

SEQ ID NO: 1221143 - RNA, 19 nt, Homo sapiens
  misc_RNA (1)...(19): siRNA sense strand
agaaugaaauugccauguu

SEQ ID NO: 1221144 - RNA, 19 nt, Homo sapiens
  misc_RNA (1)...(19): siRNA sense strand
ucuccaagcucuucagaaa

SEQ ID NO: 1221145 - RNA, 19 nt, Homo sapiens
  misc_RNA (1)...(19): siRNA sense strand
gccaagagccaaaccgaua

SEQ ID NO: 1221146 - RNA, 19 nt, Homo sapiens
  misc_RNA (1)...(19): siRNA sense strand
aagaagaucugugucauau

SEQ ID NO: 1221147 - RNA, 19 nt, Homo sapiens
  misc_RNA (1)...(19): siRNA sense strand
caagaagaucugugucaua

SEQ ID NO: 1221148 - RNA, 19 nt, Homo sapiens
  misc_RNA (1)...(19): siRNA sense strand
ccaaaccgauauagagaga

SEQ ID NO: 1221149 - RNA, 19 nt, Homo sapiens
  misc_RNA (1)...(19): siRNA sense strand
gcgaggagcuggaguacag

SEQ ID NO: 1221150 - RNA, 19 nt, Homo sapiens
  misc_RNA (1)...(19): siRNA sense strand
cagaauguaucgucagaau

SEQ ID NO: 1221151 - RNA, 19 nt, Homo sapiens
  misc_RNA (1)...(19): siRNA sense strand
aaaccgagcucuaguucau

SEQ ID NO: 1221152 - RNA, 19 nt, Homo sapiens
  misc_RNA (1)...(19): siRNA sense strand
gcaagaagaucugugucau

SEQ ID NO: 1221153 - RNA, 19 nt, Homo sapiens
  misc_RNA (1)...(19): siRNA sense strand
ggaacaacaucgggaagga

SEQ ID NO: 1221154 - RNA, 19 nt, Homo sapiens
  misc_RNA (1)...(19): siRNA sense strand
gaaggucaagucagaagaa

SEQ ID NO: 1221155 - RNA, 19 nt, Homo sapiens
  misc_RNA (1)...(19): siRNA sense strand
gagaagaaccuuggugugu

SEQ ID NO: 1221156 - RNA, 19 nt, Homo sapiens
  misc_RNA (1)...(19): siRNA sense strand
acaaguagcugcucuucca

SEQ ID NO: 1221157 - RNA, 19 nt, Homo sapiens
  misc_RNA (1)...(19): siRNA sense strand
aagaggaaguggcccuuaa

SEQ ID NO: 1221158 - RNA, 19 nt, Homo sapiens
  misc_RNA (1)...(19): siRNA sense strand
ucagugacauaagugauaa

SEQ ID NO: 1221159 - RNA, 19 nt, Homo sapiens
  misc_RNA (1)...(19): siRNA sense strand
cauauugcccauaaaguuu

SEQ ID NO: 1221160 - RNA, 19 nt, Homo sapiens
  misc_RNA (1)...(19): siRNA sense strand
gcacaucuaccaucugaag

SEQ ID NO: 1221161 - RNA, 19 nt, Homo sapiens
  misc_RNA (1)...(19): siRNA sense strand
ucagugaugucuguaaaga

SEQ ID NO: 1221162 - RNA, 19 nt, Homo sapiens
  misc_RNA (1)...(19): siRNA sense strand
uuaaaaggcuggcauaaga

SEQ ID NO: 1221163 - RNA, 19 nt, Homo sapiens
  misc_RNA (1)...(19): siRNA sense strand
aaaccgauauagagagaga

SEQ ID NO: 1221164 - RNA, 19 nt, Homo sapiens
  misc_RNA (1)...(19): siRNA sense strand
ugagacacgaguuccauua

SEQ ID NO: 1221165 - RNA, 19 nt, Homo sapiens
  misc_RNA (1)...(19): siRNA sense strand
agacuacacuccuccaauc

SEQ ID NO: 1221166 - RNA, 19 nt, Homo sapiens
  misc_RNA (1)...(19): siRNA sense strand
aaaacgagauuucugauga

SEQ ID NO: 1221167 - RNA, 19 nt, Homo sapiens
  misc_RNA (1)...(19): siRNA sense strand
cuacacuccuccaauccua

SEQ ID NO: 1221168 - RNA, 19 nt, Homo sapiens
  misc_RNA (1)...(19): siRNA sense strand
gacaaaggaaucuugaaau

SEQ ID NO: 1221169 - RNA, 19 nt, Homo sapiens
  misc_RNA (1)...(19): siRNA sense strand
caagagccaaaccgauaua

SEQ ID NO: 1221170 - RNA, 19 nt, Homo sapiens
  misc_RNA (1)...(19): siRNA sense strand
guaggaagcguagcaguau

SEQ ID NO: 1221171 - RNA, 19 nt, Homo sapiens
  misc_RNA (1)...(19): siRNA sense strand
caaacuggaagcaauguau

SEQ ID NO: 1221172 - RNA, 19 nt, Homo sapiens
  misc_RNA (1)...(19): siRNA sense strand
gagccaaaccgauauagag

SEQ ID NO: 1221173 - RNA, 19 nt, Homo sapiens
  misc_RNA (1)...(19): siRNA sense strand
acagcgagcuccuggacaa

SEQ ID NO: 1221174 - RNA, 19 nt, Homo sapiens
  misc_RNA (1)...(19): siRNA sense strand
guucaucagcuuucuaaug

SEQ ID NO: 1221175 - RNA, 19 nt, Homo sapiens
  misc_RNA (1)...(19): siRNA sense strand
ggagagagagaaacugaag

SEQ ID NO: 1221176 - RNA, 19 nt, Homo sapiens
  misc_RNA (1)...(19): siRNA sense strand
ucauauugcccauaaaguu

SEQ ID NO: 1221177 - RNA, 19 nt, Homo sapiens
  misc_RNA (1)...(19): siRNA sense strand
ugugucauauugcccauaa

SEQ ID NO: 1221178 - RNA, 19 nt, Homo sapiens
  misc_RNA (1)...(19): siRNA sense strand
agacacgaguuccauuaug

SEQ ID NO: 1221179 - RNA, 19 nt, Homo sapiens
  misc_RNA (1)...(19): siRNA sense strand
aaacuucgccaccacagaa

SEQ ID NO: 1221180 - RNA, 19 nt, Homo sapiens
  misc_RNA (1)...(19): siRNA sense strand
gaguggguaucgaaacuuc

SEQ ID NO: 1221181 - RNA, 19 nt, Homo sapiens
  misc_RNA (1)...(19): siRNA sense strand
ucucagugaugucuguaaa

SEQ ID NO: 1221182 - RNA, 19 nt, Homo sapiens
  misc_RNA (1)...(19): siRNA sense strand
gcgaagucccggagaagaa

SEQ ID NO: 1221183 - RNA, 19 nt, Homo sapiens
  misc_RNA (1)...(19): siRNA sense strand
uaggaagcguagcaguaua

SEQ ID NO: 1221184 - RNA, 19 nt, Homo sapiens
  misc_RNA (1)...(19): siRNA sense strand
cacagaauguaucgucaga

SEQ ID NO: 1221185 - RNA, 19 nt, Homo sapiens
  misc_RNA (1)...(19): siRNA sense strand
aaacgagauuucugaugau

SEQ ID NO: 1221186 - RNA, 19 nt, Homo sapiens
  misc_RNA (1)...(19): siRNA sense strand
gcggagagagagaaacuga

SEQ ID NO: 1221187 - RNA, 19 nt, Homo sapiens
  misc_RNA (1)...(19): siRNA sense strand
ggagccaccaguucagaaa

SEQ ID NO: 1221188 - RNA, 19 nt, Homo sapiens
  misc_RNA (1)...(19): siRNA sense strand
caaaaugcauagaccuuga

SEQ ID NO: 1221189 - RNA, 19 nt, Homo sapiens
  misc_RNA (1)...(19): siRNA sense strand
ucacugacucccuuucuga

SEQ ID NO: 1221190 - RNA, 19 nt, Homo sapiens
  misc_RNA (1)...(19): siRNA sense strand
gagacacgaguuccauuau

SEQ ID NO: 1221191 - RNA, 19 nt, Homo sapiens
  misc_RNA (1)...(19): siRNA sense strand
ggucaagucagaagaaguc

SEQ ID NO: 1221192 - RNA, 19 nt, Homo sapiens
  misc_RNA (1)...(19): siRNA sense strand
ucaggaaguucuguuaucu

SEQ ID NO: 1221193 - RNA, 19 nt, Homo sapiens
  misc_RNA (1)...(19): siRNA sense strand
ccuaauuugucaacacuag

SEQ ID NO: 1221194 - RNA, 19 nt, Homo sapiens
  misc_RNA (1)...(19): siRNA sense strand
gaaacuucgccaccacaga

SEQ ID NO: 1221195 - RNA, 19 nt, Homo sapiens
  misc_RNA (1)...(19): siRNA sense strand
gaugucgggcucucaguga

SEQ ID NO: 1221196 - RNA, 19 nt, Homo sapiens
  misc_RNA (1)...(19): siRNA sense strand
aaauugguaucaccuucaa

SEQ ID NO: 1221197 - RNA, 19 nt, Homo sapiens
  misc_RNA (1)...(19): siRNA sense strand
gauuucugaugaugacuca

SEQ ID NO: 1221198 - RNA, 19 nt, Homo sapiens
  misc_RNA (1)...(19): siRNA sense strand
caucacagacucuucaucu

SEQ ID NO: 1221199 - RNA, 19 nt, Homo sapiens
  misc_RNA (1)...(19): siRNA sense strand
gcacaaguagcugcucuuc

SEQ ID NO: 1221200 - RNA, 19 nt, Homo sapiens
  misc_RNA (1)...(19): siRNA sense strand
gaagucaucaaaaugcaua

SEQ ID NO: 1221201 - RNA, 19 nt, Homo sapiens
  misc_RNA (1)...(19): siRNA sense strand
cgagauuucugaugaugac

SEQ ID NO: 1221202 - RNA, 19 nt, Homo sapiens
  misc_RNA (1)...(19): siRNA sense strand
aagcguagcaguauaucaa

SEQ ID NO: 1221203 - RNA, 19 nt, Homo sapiens
  misc_RNA (1)...(19): siRNA sense strand
gcucaggaaguucuguuau

SEQ ID NO: 1221204 - RNA, 19 nt, Homo sapiens
  misc_RNA (1)...(19): siRNA sense strand
agugaugucuguaaagaag

SEQ ID NO: 1221205 - RNA, 19 nt, Homo sapiens
  misc_RNA (1)...(19): siRNA sense strand
ucaaggagcacaaguagcu

SEQ ID NO: 1221206 - RNA, 19 nt, Homo sapiens
  misc_RNA (1)...(19): siRNA sense strand
cauuaugguuacagucuuc

SEQ ID NO: 1221207 - RNA, 19 nt, Homo sapiens
  misc_RNA (1)...(19): siRNA sense strand
ccaagagccaaaccgauau

SEQ ID NO: 1221208 - RNA, 19 nt, Homo sapiens
  misc_RNA (1)...(19): siRNA sense strand
guagcaguauaucaaagca

SEQ ID NO: 1221209 - RNA, 19 nt, Homo sapiens
  misc_RNA (1)...(19): siRNA sense strand
ugaagaacgcccugucauc

SEQ ID NO: 1221210 - RNA, 19 nt, Homo sapiens
  misc_RNA (1)...(19): siRNA sense strand
gaugagugaugagaagaac

SEQ ID NO: 1221211 - RNA, 19 nt, Homo sapiens
  misc_RNA (1)...(19): siRNA sense strand
gaaaaccgagcucuaguuc

SEQ ID NO: 1221212 - RNA, 19 nt, Homo sapiens
  misc_RNA (1)...(19): siRNA sense strand
gaagcguagcaguauauca

SEQ ID NO: 1221213 - RNA, 19 nt, Homo sapiens
  misc_RNA (1)...(19): siRNA sense strand
gaaacugaagcagcugaug

SEQ ID NO: 1221214 - RNA, 19 nt, Homo sapiens
  misc_RNA (1)...(19): siRNA sense strand
aaagaggaaguggcccuua

SEQ ID NO: 1221215 - RNA, 19 nt, Homo sapiens
  misc_RNA (1)...(19): siRNA sense strand
aguaggaagcguagcagua

SEQ ID NO: 1221216 - RNA, 19 nt, Homo sapiens
  misc_RNA (1)...(19): siRNA sense strand
uaguucaucagcuuucuaa

SEQ ID NO: 1221217 - RNA, 19 nt, Homo sapiens
  misc_RNA (1)...(19): siRNA sense strand
ggucauuggucugaagaac

SEQ ID NO: 1221218 - RNA, 19 nt, Homo sapiens
  misc_RNA (1)...(19): siRNA sense strand
gcguagcaguauaucaaag

SEQ ID NO: 1221219 - RNA, 19 nt, Homo sapiens
  misc_RNA (1)...(19): siRNA sense strand
ccgagcagcaguaacauca

SEQ ID NO: 1221220 - RNA, 19 nt, Homo sapiens
  misc_RNA (1)...(19): siRNA sense strand
aaaguagacucuccaucac

SEQ ID NO: 1221221 - RNA, 19 nt, Homo sapiens
  misc_RNA (1)...(19): siRNA sense strand
gaagugguggaaggacuga

SEQ ID NO: 1221222 - RNA, 19 nt, Homo sapiens
  misc_RNA (1)...(19): siRNA sense strand
gcucuaguucaucagcuuu

SEQ ID NO: 1221223 - RNA, 19 nt, Homo sapiens
  misc_RNA (1)...(19): siRNA sense strand
cuguaaagaagucaucaaa

SEQ ID NO: 1221224 - RNA, 19 nt, Homo sapiens
  misc_RNA (1)...(19): siRNA sense strand
cauaagugauaaucuuucc

SEQ ID NO: 1221225 - RNA, 19 nt, Homo sapiens
  misc_RNA (1)...(19): siRNA sense strand
agaggaaguggcccuuaaa

SEQ ID NO: 1221226 - RNA, 19 nt, Homo sapiens
  misc_RNA (1)...(19): siRNA sense strand
gguguuugacuccauuuca

SEQ ID NO: 1221227 - RNA, 19 nt, Homo sapiens
  misc_RNA (1)...(19): siRNA sense strand
acaccgaggagcacaucua

SEQ ID NO: 1221228 - RNA, 19 nt, Homo sapiens
  misc_RNA (1)...(19): siRNA sense strand
ucacuuuaaggucagcuuu

SEQ ID NO: 1221229 - RNA, 19 nt, Homo sapiens
  misc_RNA (1)...(19): siRNA sense strand
ucuaccaucugaaggucaa

SEQ ID NO: 1221230 - RNA, 19 nt, Homo sapiens
  misc_RNA (1)...(19): siRNA sense strand
ccaugccgguggagcugaa

SEQ ID NO: 1221231 - RNA, 19 nt, Homo sapiens
  misc_RNA (1)...(19): siRNA sense strand
cucaggaaguucuguuauc

SEQ ID NO: 1221232 - RNA, 19 nt, Homo sapiens
  misc_RNA (1)...(19): siRNA sense strand
ucaaacuggaagcaaugua

SEQ ID NO: 1221233 - RNA, 19 nt, Homo sapiens
  misc_RNA (1)...(19): siRNA sense strand
ucaaguaggaagcguagca

SEQ ID NO: 1221234 - RNA, 19 nt, Homo sapiens
  misc_RNA (1)...(19): siRNA sense strand
gaagaucugugucauauug

SEQ ID NO: 1221235 - RNA, 19 nt, Homo sapiens
  misc_RNA (1)...(19): siRNA sense strand
gaaugaaauugccauguuu

SEQ ID NO: 1221236 - RNA, 19 nt, Homo sapiens
  misc_RNA (1)...(19): siRNA sense strand
gaaaguagacucuccauca

SEQ ID NO: 1221237 - RNA, 19 nt, Homo sapiens
  misc_RNA (1)...(19): siRNA sense strand
gagcacaucuaccaucuga

SEQ ID NO: 1221238 - RNA, 19 nt, Homo sapiens
  misc_RNA (1)...(19): siRNA sense strand
gaauguaucgucagaauga

SEQ ID NO: 1221239 - RNA, 19 nt, Homo sapiens
  misc_RNA (1)...(19): siRNA sense strand
ggacaaaggaaucuugaaa

SEQ ID NO: 1221240 - RNA, 19 nt, Homo sapiens
  misc_RNA (1)...(19): siRNA sense strand
gugauaaucuuuccuuaga

SEQ ID NO: 1221241 - RNA, 19 nt, Homo sapiens
  misc_RNA (1)...(19): siRNA sense strand
gaaguucuguuaucuccaa

SEQ ID NO: 1221242 - RNA, 19 nt, Homo sapiens
  misc_RNA (1)...(19): siRNA sense strand
gaagcgaagucccggagaa

SEQ ID NO: 1221243 - RNA, 19 nt, Homo sapiens
  misc_RNA (1)...(19): siRNA sense strand
agaaugaaauugccauguu

SEQ ID NO: 1221244 - RNA, 19 nt, Homo sapiens
  misc_RNA (1)...(19): siRNA sense strand
ucuccaagcucuucagaaa

SEQ ID NO: 1221245 - RNA, 19 nt, Homo sapiens
  misc_RNA (1)...(19): siRNA sense strand
gccaagagccaaaccgaua

SEQ ID NO: 1221246 - RNA, 19 nt, Homo sapiens
  misc_RNA (1)...(19): siRNA sense strand
aagaagaucugugucauau

SEQ ID NO: 1221247 - RNA, 19 nt, Homo sapiens
  misc_RNA (1)...(19): siRNA sense strand
caagaagaucugugucaua

SEQ ID NO: 1221248 - RNA, 19 nt, Homo sapiens
  misc_RNA (1)...(19): siRNA sense strand
ccaaaccgauauagagaga

SEQ ID NO: 1221249 - RNA, 19 nt, Homo sapiens
  misc_RNA (1)...(19): siRNA sense strand
gcgaggagcuggaguacag

SEQ ID NO: 1221250 - RNA, 19 nt, Homo sapiens
  misc_RNA (1)...(19): siRNA sense strand
cagaauguaucgucagaau

SEQ ID NO: 1221251 - RNA, 19 nt, Homo sapiens
  misc_RNA (1)...(19): siRNA sense strand
aaaccgagcucuaguucau

SEQ ID NO: 1221252 - RNA, 19 nt, Homo sapiens
  misc_RNA (1)...(19): siRNA sense strand
gcaagaagaucugugucau

SEQ ID NO: 1221253 - RNA, 19 nt, Homo sapiens
  misc_RNA (1)...(19): siRNA sense strand
ggaacaacaucgggaagga

SEQ ID NO: 1221254 - RNA, 19 nt, Homo sapiens
  misc_RNA (1)...(19): siRNA sense strand
gaaggucaagucagaagaa

SEQ ID NO: 1221255 - RNA, 19 nt, Homo sapiens
  misc_RNA (1)...(19): siRNA sense strand
gagaagaaccuuggugugu

SEQ ID NO: 1221256 - RNA, 19 nt, Homo sapiens
  misc_RNA (1)...(19): siRNA sense strand
acaaguagcugcucuucca

SEQ ID NO: 1221257 - RNA, 19 nt, Homo sapiens
  misc_RNA (1)...(19): siRNA sense strand
aagaggaaguggcccuuaa

SEQ ID NO: 1221258 - RNA, 19 nt, Homo sapiens
  misc_RNA (1)...(19): siRNA sense strand
ucagugacauaagugauaa

SEQ ID NO: 1221259 - RNA, 19 nt, Homo sapiens
  misc_RNA (1)...(19): siRNA sense strand
cauauugcccauaaaguuu

SEQ ID NO: 1221260 - RNA, 19 nt, Homo sapiens
  misc_RNA (1)...(19): siRNA sense strand
gcacaucuaccaucugaag

SEQ ID NO: 1221261 - RNA, 19 nt, Homo sapiens
  misc_RNA (1)...(19): siRNA sense strand
ucagugaugucuguaaaga

SEQ ID NO: 1221262 - RNA, 19 nt, Homo sapiens
  misc_RNA (1)...(19): siRNA sense strand
uuaaaaggcuggcauaaga

SEQ ID NO: 1221263 - RNA, 19 nt, Homo sapiens
  misc_RNA (1)...(19): siRNA sense strand
aaaccgauauagagagaga

SEQ ID NO: 1221264 - RNA, 19 nt, Homo sapiens
  misc_RNA (1)...(19): siRNA sense strand
ugagacacgaguuccauua

SEQ ID NO: 1221265 - RNA, 19 nt, Homo sapiens
  misc_RNA (1)...(19): siRNA sense strand
agacuacacuccuccaauc

SEQ ID NO: 1221266 - RNA, 19 nt, Homo sapiens
  misc_RNA (1)...(19): siRNA sense strand
aaaacgagauuucugauga

SEQ ID NO: 1221267 - RNA, 19 nt, Homo sapiens
  misc_RNA (1)...(19): siRNA sense strand
cuacacuccuccaauccua

SEQ ID NO: 1221268 - RNA, 19 nt, Homo sapiens
  misc_RNA (1)...(19): siRNA sense strand
gacaaaggaaucuugaaau

SEQ ID NO: 1221269 - RNA, 19 nt, Homo sapiens
  misc_RNA (1)...(19): siRNA sense strand
caagagccaaaccgauaua

SEQ ID NO: 1221270 - RNA, 19 nt, Homo sapiens
  misc_RNA (1)...(19): siRNA sense strand
guaggaagcguagcaguau

SEQ ID NO: 1221271 - RNA, 19 nt, Homo sapiens
  misc_RNA (1)...(19): siRNA sense strand
caaacuggaagcaauguau

SEQ ID NO: 1221272 - RNA, 19 nt, Homo sapiens
  misc_RNA (1)...(19): siRNA sense strand
gagccaaaccgauauagag

SEQ ID NO: 1221273 - RNA, 19 nt, Homo sapiens
  misc_RNA (1)...(19): siRNA sense strand
acagcgagcuccuggacaa

SEQ ID NO: 1221274 - RNA, 19 nt, Homo sapiens
  misc_RNA (1)...(19): siRNA sense strand
guucaucagcuuucuaaug

SEQ ID NO: 1221275 - RNA, 19 nt, Homo sapiens
  misc_RNA (1)...(19): siRNA sense strand
ggagagagagaaacugaag

SEQ ID NO: 1221276 - RNA, 19 nt, Homo sapiens
  misc_RNA (1)...(19): siRNA sense strand
ucauauugcccauaaaguu

SEQ ID NO: 1221277 - RNA, 19 nt, Homo sapiens
  misc_RNA (1)...(19): siRNA sense strand
ugugucauauugcccauaa

SEQ ID NO: 1221278 - RNA, 19 nt, Homo sapiens
  misc_RNA (1)...(19): siRNA sense strand
agacacgaguuccauuaug

SEQ ID NO: 1221279 - RNA, 19 nt, Homo sapiens
  misc_RNA (1)...(19): siRNA sense strand
aaacuucgccaccacagaa

SEQ ID NO: 1221280 - RNA, 19 nt, Homo sapiens
  misc_RNA (1)...(19): siRNA sense strand
gaguggguaucgaaacuuc

SEQ ID NO: 1221281 - RNA, 19 nt, Homo sapiens
  misc_RNA (1)...(19): siRNA sense strand
ucucagugaugucuguaaa

SEQ ID NO: 1221282 - RNA, 19 nt, Homo sapiens
  misc_RNA (1)...(19): siRNA sense strand
gcgaagucccggagaagaa

SEQ ID NO: 1221283 - RNA, 19 nt, Homo sapiens
  misc_RNA (1)...(19): siRNA sense strand
uaggaagcguagcaguaua

SEQ ID NO: 1221284 - RNA, 19 nt, Homo sapiens
  misc_RNA (1)...(19): siRNA sense strand
cacagaauguaucgucaga

SEQ ID NO: 1221285 - RNA, 19 nt, Homo sapiens
  misc_RNA (1)...(19): siRNA sense strand
aaacgagauuucugaugau

SEQ ID NO: 1221286 - RNA, 19 nt, Homo sapiens
  misc_RNA (1)...(19): siRNA sense strand
gcggagagagagaaacuga

SEQ ID NO: 1221287 - RNA, 19 nt, Homo sapiens
  misc_RNA (1)...(19): siRNA sense strand
ggagccaccaguucagaaa

SEQ ID NO: 1221288 - RNA, 19 nt, Homo sapiens
  misc_RNA (1)...(19): siRNA sense strand
caaaaugcauagaccuuga

SEQ ID NO: 1221289 - RNA, 19 nt, Homo sapiens
  misc_RNA (1)...(19): siRNA sense strand
ucacugacucccuuucuga

SEQ ID NO: 1221290 - RNA, 19 nt, Homo sapiens
  misc_RNA (1)...(19): siRNA sense strand
gagacacgaguuccauuau

SEQ ID NO: 1221291 - RNA, 19 nt, Homo sapiens
  misc_RNA (1)...(19): siRNA sense strand
ggucaagucagaagaaguc

SEQ ID NO: 1221292 - RNA, 19 nt, Homo sapiens
  misc_RNA (1)...(19): siRNA sense strand
ucaggaaguucuguuaucu

SEQ ID NO: 1221293 - RNA, 19 nt, Homo sapiens
  misc_RNA (1)...(19): siRNA sense strand
ccuaauuugucaacacuag

SEQ ID NO: 1221294 - RNA, 19 nt, Homo sapiens
  misc_RNA (1)...(19): siRNA sense strand
gaaacuucgccaccacaga

SEQ ID NO: 1221295 - RNA, 19 nt, Homo sapiens
  misc_RNA (1)...(19): siRNA sense strand
gaugucgggcucucaguga

SEQ ID NO: 1221296 - RNA, 19 nt, Homo sapiens
  misc_RNA (1)...(19): siRNA sense strand
aaauugguaucaccuucaa

SEQ ID NO: 1221297 - RNA, 19 nt, Homo sapiens
  misc_RNA (1)...(19): siRNA sense strand
gauuucugaugaugacuca

SEQ ID NO: 1221298 - RNA, 19 nt, Homo sapiens
  misc_RNA (1)...(19): siRNA sense strand
caucacagacucuucaucu

SEQ ID NO: 1221299 - RNA, 19 nt, Homo sapiens
  misc_RNA (1)...(19): siRNA sense strand
gcacaaguagcugcucuuc

SEQ ID NO: 1221300 - RNA, 19 nt, Homo sapiens
  misc_RNA (1)...(19): siRNA sense strand
gaagucaucaaaaugcaua

SEQ ID NO: 1221301 - RNA, 19 nt, Homo sapiens
  misc_RNA (1)...(19): siRNA sense strand
cgagauuucugaugaugac

SEQ ID NO: 1221302 - RNA, 19 nt, Homo sapiens
  misc_RNA (1)...(19): siRNA sense strand
aagcguagcaguauaucaa

SEQ ID NO: 1221303 - RNA, 19 nt, Homo sapiens
  misc_RNA (1)...(19): siRNA sense strand
gcucaggaaguucuguuau

SEQ ID NO: 1221304 - RNA, 19 nt, Homo sapiens
  misc_RNA (1)...(19): siRNA sense strand
agugaugucuguaaagaag

SEQ ID NO: 1221305 - RNA, 19 nt, Homo sapiens
  misc_RNA (1)...(19): siRNA sense strand
ucaaggagcacaaguagcu

SEQ ID NO: 1221306 - RNA, 19 nt, Homo sapiens
  misc_RNA (1)...(19): siRNA sense strand
cauuaugguuacagucuuc

SEQ ID NO: 1221307 - RNA, 19 nt, Homo sapiens
  misc_RNA (1)...(19): siRNA sense strand
ccaagagccaaaccgauau

SEQ ID NO: 1221308 - RNA, 19 nt, Homo sapiens
  misc_RNA (1)...(19): siRNA sense strand
guagcaguauaucaaagca

SEQ ID NO: 1221309 - RNA, 19 nt, Homo sapiens
  misc_RNA (1)...(19): siRNA sense strand
ugaagaacgcccugucauc

SEQ ID NO: 1221310 - RNA, 19 nt, Homo sapiens
  misc_RNA (1)...(19): siRNA sense strand
gaugagugaugagaagaac

SEQ ID NO: 1221311 - RNA, 19 nt, Homo sapiens
  misc_RNA (1)...(19): siRNA sense strand
gaaaaccgagcucuaguuc

SEQ ID NO: 1221312 - RNA, 19 nt, Homo sapiens
  misc_RNA (1)...(19): siRNA sense strand
gaagcguagcaguauauca

SEQ ID NO: 1221313 - RNA, 19 nt, Homo sapiens
  misc_RNA (1)...(19): siRNA sense strand
gaaacugaagcagcugaug

SEQ ID NO: 1221314 - RNA, 19 nt, Homo sapiens
  misc_RNA (1)...(19): siRNA sense strand
aaagaggaaguggcccuua

SEQ ID NO: 1221315 - RNA, 19 nt, Homo sapiens
  misc_RNA (1)...(19): siRNA sense strand
aguaggaagcguagcagua

SEQ ID NO: 1221316 - RNA, 19 nt, Homo sapiens
  misc_RNA (1)...(19): siRNA sense strand
uaguucaucagcuuucuaa

SEQ ID NO: 1221317 - RNA, 19 nt, Homo sapiens
  misc_RNA (1)...(19): siRNA sense strand
ggucauuggucugaagaac

SEQ ID NO: 1221318 - RNA, 19 nt, Homo sapiens
  misc_RNA (1)...(19): siRNA sense strand
gcguagcaguauaucaaag

SEQ ID NO: 1221319 - RNA, 19 nt, Homo sapiens
  misc_RNA (1)...(19): siRNA sense strand
ccgagcagcaguaacauca

SEQ ID NO: 1221320 - RNA, 19 nt, Homo sapiens
  misc_RNA (1)...(19): siRNA sense strand
aaaguagacucuccaucac

SEQ ID NO: 1221321 - RNA, 19 nt, Homo sapiens
  misc_RNA (1)...(19): siRNA sense strand
gaagugguggaaggacuga

SEQ ID NO: 1221322 - RNA, 19 nt, Homo sapiens
  misc_RNA (1)...(19): siRNA sense strand
gcucuaguucaucagcuuu

SEQ ID NO: 1221323 - RNA, 19 nt, Homo sapiens
  misc_RNA (1)...(19): siRNA sense strand
cuguaaagaagucaucaaa

SEQ ID NO: 1221324 - RNA, 19 nt, Homo sapiens
  misc_RNA (1)...(19): siRNA sense strand
cauaagugauaaucuuucc

SEQ ID NO: 1221325 - RNA, 19 nt, Homo sapiens
  misc_RNA (1)...(19): siRNA sense strand
agaggaaguggcccuuaaa

SEQ ID NO: 1221326 - RNA, 19 nt, Homo sapiens
  misc_RNA (1)...(19): siRNA sense strand
gguguuugacuccauuuca

SEQ ID NO: 1221327 - RNA, 19 nt, Homo sapiens
  misc_RNA (1)...(19): siRNA sense strand
acaccgaggagcacaucua

SEQ ID NO: 1221328 - RNA, 19 nt, Homo sapiens
  misc_RNA (1)...(19): siRNA sense strand
ucacuuuaaggucagcuuu

SEQ ID NO: 1221329 - RNA, 19 nt, Homo sapiens
  misc_RNA (1)...(19): siRNA sense strand
ucuaccaucugaaggucaa

SEQ ID NO: 1221330 - RNA, 19 nt, Homo sapiens
  misc_RNA (1)...(19): siRNA sense strand
ccaugccgguggagcugaa

SEQ ID NO: 1221331 - RNA, 19 nt, Homo sapiens
  misc_RNA (1)...(19): siRNA sense strand
cucaggaaguucuguuauc

SEQ ID NO: 1221332 - RNA, 19 nt, Homo sapiens
  misc_RNA (1)...(19): siRNA sense strand
ucaaacuggaagcaaugua

SEQ ID NO: 1221333 - RNA, 19 nt, Homo sapiens
  misc_RNA (1)...(19): siRNA sense strand
ucaaguaggaagcguagca

SEQ ID NO: 1221334 - RNA, 19 nt, Homo sapiens
  misc_RNA (1)...(19): siRNA sense strand
gcgagaagaucaccauuaa

SEQ ID NO: 1221335 - RNA, 19 nt, Homo sapiens
  misc_RNA (1)...(19): siRNA sense strand
gagaagaucaccauuaaca

SEQ ID NO: 1221336 - RNA, 19 nt, Homo sapiens
  misc_RNA (1)...(19): siRNA sense strand
uaacaaggacaccaaggua

SEQ ID NO: 1221337 - RNA, 19 nt, Homo sapiens
  misc_RNA (1)...(19): siRNA sense strand
caacaaagaagaccacaca

SEQ ID NO: 1221338 - RNA, 19 nt, Homo sapiens
  misc_RNA (1)...(19): siRNA sense strand
gaagaucaccauuaacaag

SEQ ID NO: 1221339 - RNA, 19 nt, Homo sapiens
  misc_RNA (1)...(19): siRNA sense strand
gguacccaaugccuguuua

SEQ ID NO: 1221340 - RNA, 19 nt, Homo sapiens
  misc_RNA (1)...(19): siRNA sense strand
ggcgagaagaucaccauua

SEQ ID NO: 1221341 - RNA, 19 nt, Homo sapiens
  misc_RNA (1)...(19): siRNA sense strand
ugggaaacaucauuaaauc

SEQ ID NO: 1221342 - RNA, 19 nt, Homo sapiens
  misc_RNA (1)...(19): siRNA sense strand
cccaaugccuguuuauuca

SEQ ID NO: 1221343 - RNA, 19 nt, Homo sapiens
  misc_RNA (1)...(19): siRNA sense strand
acacugggaaacaucauua

SEQ ID NO: 1221344 - RNA, 19 nt, Homo sapiens
  misc_RNA (1)...(19): siRNA sense strand
ggaaacaucauuaaaucac

SEQ ID NO: 1221345 - RNA, 19 nt, Homo sapiens
  misc_RNA (1)...(19): siRNA sense strand
gggaaacaucauuaaauca

SEQ ID NO: 1221346 - RNA, 19 nt, Homo sapiens
  misc_RNA (1)...(19): siRNA sense strand
ggacaccaagguacccaau

SEQ ID NO: 1221347 - RNA, 19 nt, Homo sapiens
  misc_RNA (1)...(19): siRNA sense strand
acaccaagguacccaaugc

SEQ ID NO: 1221348 - RNA, 19 nt, Homo sapiens
  misc_RNA (1)...(19): siRNA sense strand
uauucaccaucaacaaaga

SEQ ID NO: 1221349 - RNA, 19 nt, Homo sapiens
  misc_RNA (1)...(19): siRNA sense strand
cugggaaacaucauuaaau

SEQ ID NO: 1221350 - RNA, 19 nt, Homo sapiens
  misc_RNA (1)...(19): siRNA sense strand
agaucaccauuaacaagga

SEQ ID NO: 1221351 - RNA, 19 nt, Homo sapiens
  misc_RNA (1)...(19): siRNA sense strand
acccaaugccuguuuauuc

SEQ ID NO: 1221352 - RNA, 19 nt, Homo sapiens
  misc_RNA (1)...(19): siRNA sense strand
gaccacacacugggaaaca

SEQ ID NO: 1221353 - RNA, 19 nt, Homo sapiens
  misc_RNA (1)...(19): siRNA sense strand
agaagaucaccauuaacaa

SEQ ID NO: 1221354 - RNA, 19 nt, Homo sapiens
  misc_RNA (1)...(19): siRNA sense strand
gcgagaagaucaccauuaa

SEQ ID NO: 1221355 - RNA, 19 nt, Homo sapiens
  misc_RNA (1)...(19): siRNA sense strand
gagaagaucaccauuaaca

SEQ ID NO: 1221356 - RNA, 19 nt, Homo sapiens
  misc_RNA (1)...(19): siRNA sense strand
uaacaaggacaccaaggua

SEQ ID NO: 1221357 - RNA, 19 nt, Homo sapiens
  misc_RNA (1)...(19): siRNA sense strand
caacaaagaagaccacaca

SEQ ID NO: 1221358 - RNA, 19 nt, Homo sapiens
  misc_RNA (1)...(19): siRNA sense strand
gaagaucaccauuaacaag

SEQ ID NO: 1221359 - RNA, 19 nt, Homo sapiens
  misc_RNA (1)...(19): siRNA sense strand
gguacccaaugccuguuua

SEQ ID NO: 1221360 - RNA, 19 nt, Homo sapiens
  misc_RNA (1)...(19): siRNA sense strand
ggcgagaagaucaccauua

SEQ ID NO: 1221361 - RNA, 19 nt, Homo sapiens
  misc_RNA (1)...(19): siRNA sense strand
ugggaaacaucauuaaauc

SEQ ID NO: 1221362 - RNA, 19 nt, Homo sapiens
  misc_RNA (1)...(19): siRNA sense strand
cccaaugccuguuuauuca

SEQ ID NO: 1221363 - RNA, 19 nt, Homo sapiens
  misc_RNA (1)...(19): siRNA sense strand
acacugggaaacaucauua

SEQ ID NO: 1221364 - RNA, 19 nt, Homo sapiens
  misc_RNA (1)...(19): siRNA sense strand
ggaaacaucauuaaaucac

SEQ ID NO: 1221365 - RNA, 19 nt, Homo sapiens
  misc_RNA (1)...(19): siRNA sense strand
gggaaacaucauuaaauca

SEQ ID NO: 1221366 - RNA, 19 nt, Homo sapiens
  misc_RNA (1)...(19): siRNA sense strand
ggacaccaagguacccaau

SEQ ID NO: 1221367 - RNA, 19 nt, Homo sapiens
  misc_RNA (1)...(19): siRNA sense strand
acaccaagguacccaaugc

SEQ ID NO: 1221368 - RNA, 19 nt, Homo sapiens
  misc_RNA (1)...(19): siRNA sense strand
uauucaccaucaacaaaga

SEQ ID NO: 1221369 - RNA, 19 nt, Homo sapiens
  misc_RNA (1)...(19): siRNA sense strand
cugggaaacaucauuaaau

SEQ ID NO: 1221370 - RNA, 19 nt, Homo sapiens
  misc_RNA (1)...(19): siRNA sense strand
agaucaccauuaacaagga

SEQ ID NO: 1221371 - RNA, 19 nt, Homo sapiens
  misc_RNA (1)...(19): siRNA sense strand
acccaaugccuguuuauuc

SEQ ID NO: 1221372 - RNA, 19 nt, Homo sapiens
  misc_RNA (1)...(19): siRNA sense strand
gaccacacacugggaaaca

SEQ ID NO: 1221373 - RNA, 19 nt, Homo sapiens
  misc_RNA (1)...(19): siRNA sense strand
agaagaucaccauuaacaa

SEQ ID NO: 1221374 - RNA, 19 nt, Homo sapiens
  misc_RNA (1)...(19): siRNA sense strand
gcgagaagaucaccauuaa

SEQ ID NO: 1221375 - RNA, 19 nt, Homo sapiens
  misc_RNA (1)...(19): siRNA sense strand
gagaagaucaccauuaaca

SEQ ID NO: 1221376 - RNA, 19 nt, Homo sapiens
  misc_RNA (1)...(19): siRNA sense strand
uaacaaggacaccaaggua

SEQ ID NO: 1221377 - RNA, 19 nt, Homo sapiens
  misc_RNA (1)...(19): siRNA sense strand
caacaaagaagaccacaca

SEQ ID NO: 1221378 - RNA, 19 nt, Homo sapiens
  misc_RNA (1)...(19): siRNA sense strand
gaagaucaccauuaacaag

SEQ ID NO: 1221379 - RNA, 19 nt, Homo sapiens
  misc_RNA (1)...(19): siRNA sense strand
gguacccaaugccuguuua

SEQ ID NO: 1221380 - RNA, 19 nt, Homo sapiens
  misc_RNA (1)...(19): siRNA sense strand
ggcgagaagaucaccauua

SEQ ID NO: 1221381 - RNA, 19 nt, Homo sapiens
  misc_RNA (1)...(19): siRNA sense strand
ugggaaacaucauuaaauc

SEQ ID NO: 1221382 - RNA, 19 nt, Homo sapiens
  misc_RNA (1)...(19): siRNA sense strand
cccaaugccuguuuauuca

SEQ ID NO: 1221383 - RNA, 19 nt, Homo sapiens
  misc_RNA (1)...(19): siRNA sense strand
acacugggaaacaucauua

SEQ ID NO: 1221384 - RNA, 19 nt, Homo sapiens
  misc_RNA (1)...(19): siRNA sense strand
ggaaacaucauuaaaucac

SEQ ID NO: 1221385 - RNA, 19 nt, Homo sapiens
  misc_RNA (1)...(19): siRNA sense strand
gggaaacaucauuaaauca

SEQ ID NO: 1221386 - RNA, 19 nt, Homo sapiens
  misc_RNA (1)...(19): siRNA sense strand
ggacaccaagguacccaau

SEQ ID NO: 1221387 - RNA, 19 nt, Homo sapiens
  misc_RNA (1)...(19): siRNA sense strand
acaccaagguacccaaugc

SEQ ID NO: 1221388 - RNA, 19 nt, Homo sapiens
  misc_RNA (1)...(19): siRNA sense strand
uauucaccaucaacaaaga

SEQ ID NO: 1221389 - RNA, 19 nt, Homo sapiens
  misc_RNA (1)...(19): siRNA sense strand
cugggaaacaucauuaaau

SEQ ID NO: 1221390 - RNA, 19 nt, Homo sapiens
  misc_RNA (1)...(19): siRNA sense strand
agaucaccauuaacaagga

SEQ ID NO: 1221391 - RNA, 19 nt, Homo sapiens
  misc_RNA (1)...(19): siRNA sense strand
acccaaugccuguuuauuc

SEQ ID NO: 1221392 - RNA, 19 nt, Homo sapiens
  misc_RNA (1)...(19): siRNA sense strand
gaccacacacugggaaaca

SEQ ID NO: 1221393 - RNA, 19 nt, Homo sapiens
  misc_RNA (1)...(19): siRNA sense strand
agaagaucaccauuaacaa

SEQ ID NO: 1221394 - RNA, 19 nt, Homo sapiens
  misc_RNA (1)...(19): siRNA sense strand
gcaaauacgugcucuauga

SEQ ID NO: 1221395 - RNA, 19 nt, Homo sapiens
  misc_RNA (1)...(19): siRNA sense strand
gaaaggacaguucagcaaa

SEQ ID NO: 1221396 - RNA, 19 nt, Homo sapiens
  misc_RNA (1)...(19): siRNA sense strand
gcgugaagcucaagaacuu

SEQ ID NO: 1221397 - RNA, 19 nt, Homo sapiens
  misc_RNA (1)...(19): siRNA sense strand
gcacaggcgguacgagaua

SEQ ID NO: 1221398 - RNA, 19 nt, Homo sapiens
  misc_RNA (1)...(19): siRNA sense strand
ggaugaggaugucaccaaa

SEQ ID NO: 1221399 - RNA, 19 nt, Homo sapiens
  misc_RNA (1)...(19): siRNA sense strand
cagcagaccuagucguuug

SEQ ID NO: 1221400 - RNA, 19 nt, Homo sapiens
  misc_RNA (1)...(19): siRNA sense strand
uggaggaucucaucauuug

SEQ ID NO: 1221401 - RNA, 19 nt, Homo sapiens
  misc_RNA (1)...(19): siRNA sense strand
gcuauaagaucaaguacag

SEQ ID NO: 1221402 - RNA, 19 nt, Homo sapiens
  misc_RNA (1)...(19): siRNA sense strand
gcuggaggaucucaucauu

SEQ ID NO: 1221403 - RNA, 19 nt, Homo sapiens
  misc_RNA (1)...(19): siRNA sense strand
gagaagcccucagaaaucu

SEQ ID NO: 1221404 - RNA, 19 nt, Homo sapiens
  misc_RNA (1)...(19): siRNA sense strand
gcaagaaguacgccaagaa

SEQ ID NO: 1221405 - RNA, 19 nt, Homo sapiens
  misc_RNA (1)...(19): siRNA sense strand
gggcugagcuuaccuccau

SEQ ID NO: 1221406 - RNA, 19 nt, Homo sapiens
  misc_RNA (1)...(19): siRNA sense strand
ggagaagcccucagaaauc

SEQ ID NO: 1221407 - RNA, 19 nt, Homo sapiens
  misc_RNA (1)...(19): siRNA sense strand
gcacaggccuacagcuaca

SEQ ID NO: 1221408 - RNA, 19 nt, Homo sapiens
  misc_RNA (1)...(19): siRNA sense strand
ggugaucgauggcauguca

SEQ ID NO: 1221409 - RNA, 19 nt, Homo sapiens
  misc_RNA (1)...(19): siRNA sense strand
gguacaagauuuauuucug

SEQ ID NO: 1221410 - RNA, 19 nt, Homo sapiens
  misc_RNA (1)...(19): siRNA sense strand
ggaaaggacaguucagcaa

SEQ ID NO: 1221411 - RNA, 19 nt, Homo sapiens
  misc_RNA (1)...(19): siRNA sense strand
gcagcagccugacggagaa

SEQ ID NO: 1221412 - RNA, 19 nt, Homo sapiens
  misc_RNA (1)...(19): siRNA sense strand
gagcuuaccuccauguacu

SEQ ID NO: 1221413 - RNA, 19 nt, Homo sapiens
  misc_RNA (1)...(19): siRNA sense strand
ccagucagccuucuagaaa

SEQ ID NO: 1221414 - RNA, 19 nt, Homo sapiens
  misc_RNA (1)...(19): siRNA sense strand
gcaagagccgggagagaaa

SEQ ID NO: 1221415 - RNA, 19 nt, Homo sapiens
  misc_RNA (1)...(19): siRNA sense strand
gaacaggaagaggagguua

SEQ ID NO: 1221416 - RNA, 19 nt, Homo sapiens
  misc_RNA (1)...(19): siRNA sense strand
gagugaaggcgaccaauga

SEQ ID NO: 1221417 - RNA, 19 nt, Homo sapiens
  misc_RNA (1)...(19): siRNA sense strand
ucaccgcgcucaccaccua

SEQ ID NO: 1221418 - RNA, 19 nt, Homo sapiens
  misc_RNA (1)...(19): siRNA sense strand
augaggaugucaccaaaua

SEQ ID NO: 1221419 - RNA, 19 nt, Homo sapiens
  misc_RNA (1)...(19): siRNA sense strand
ucaccucagugcuguguuu

SEQ ID NO: 1221420 - RNA, 19 nt, Homo sapiens
  misc_RNA (1)...(19): siRNA sense strand
gagccaagaccuucaccua

SEQ ID NO: 1221421 - RNA, 19 nt, Homo sapiens
  misc_RNA (1)...(19): siRNA sense strand
ggagagccauccucguauc

SEQ ID NO: 1221422 - RNA, 19 nt, Homo sapiens
  misc_RNA (1)...(19): siRNA sense strand
agaucgagguggcugcuua

SEQ ID NO: 1221423 - RNA, 19 nt, Homo sapiens
  misc_RNA (1)...(19): siRNA sense strand
gggacauccucaucaaaga

SEQ ID NO: 1221424 - RNA, 19 nt, Homo sapiens
  misc_RNA (1)...(19): siRNA sense strand
ugucuggccugaagaaguu

SEQ ID NO: 1221425 - RNA, 19 nt, Homo sapiens
  misc_RNA (1)...(19): siRNA sense strand
gcgggcaucuggagagaga

SEQ ID NO: 1221426 - RNA, 19 nt, Homo sapiens
  misc_RNA (1)...(19): siRNA sense strand
gcagcugccucgcuucaca

SEQ ID NO: 1221427 - RNA, 19 nt, Homo sapiens
  misc_RNA (1)...(19): siRNA sense strand
gaccacaaccucagugaau

SEQ ID NO: 1221428 - RNA, 19 nt, Homo sapiens
  misc_RNA (1)...(19): siRNA sense strand
ccaccaaccugggcauuuc

SEQ ID NO: 1221429 - RNA, 19 nt, Homo sapiens
  misc_RNA (1)...(19): siRNA sense strand
gggcacaggccuacagcua

SEQ ID NO: 1221430 - RNA, 19 nt, Homo sapiens
  misc_RNA (1)...(19): siRNA sense strand
cgagguggcugcuuacaac

SEQ ID NO: 1221431 - RNA, 19 nt, Homo sapiens
  misc_RNA (1)...(19): siRNA sense strand
gaagugacagcgaguacga

SEQ ID NO: 1221432 - RNA, 19 nt, Homo sapiens
  misc_RNA (1)...(19): siRNA sense strand
gcucugccaucgccauuca

SEQ ID NO: 1221433 - RNA, 19 nt, Homo sapiens
  misc_RNA (1)...(19): siRNA sense strand
gaaccaaccaguccaucau

SEQ ID NO: 1221434 - RNA, 19 nt, Homo sapiens
  misc_RNA (1)...(19): siRNA sense strand
ggucaacgacuaugguuuc

SEQ ID NO: 1221435 - RNA, 19 nt, Homo sapiens
  misc_RNA (1)...(19): siRNA sense strand
gcagaggacaagaucaaug

SEQ ID NO: 1221436 - RNA, 19 nt, Homo sapiens
  misc_RNA (1)...(19): siRNA sense strand
cacaaugccuccagcuuca

SEQ ID NO: 1221437 - RNA, 19 nt, Homo sapiens
  misc_RNA (1)...(19): siRNA sense strand
ucucaaggguuacaucauc

SEQ ID NO: 1221438 - RNA, 19 nt, Homo sapiens
  misc_RNA (1)...(19): siRNA sense strand
caaauacgugcucuaugaa

SEQ ID NO: 1221439 - RNA, 19 nt, Homo sapiens
  misc_RNA (1)...(19): siRNA sense strand
augaugagcuuggaugaaa

SEQ ID NO: 1221440 - RNA, 19 nt, Homo sapiens
  misc_RNA (1)...(19): siRNA sense strand
ggacaguucagcaaagaca

SEQ ID NO: 1221441 - RNA, 19 nt, Homo sapiens
  misc_RNA (1)...(19): siRNA sense strand
cggagaagcccucagaaau

SEQ ID NO: 1221442 - RNA, 19 nt, Homo sapiens
  misc_RNA (1)...(19): siRNA sense strand
gcacuacucggaugaggau

SEQ ID NO: 1221443 - RNA, 19 nt, Homo sapiens
  misc_RNA (1)...(19): siRNA sense strand
uccaccagcucuccaauga

SEQ ID NO: 1221444 - RNA, 19 nt, Homo sapiens
  misc_RNA (1)...(19): siRNA sense strand
aggguuacaucaucaggua

SEQ ID NO: 1221445 - RNA, 19 nt, Homo sapiens
  misc_RNA (1)...(19): siRNA sense strand
gagagggagcggaggcuaa

SEQ ID NO: 1221446 - RNA, 19 nt, Homo sapiens
  misc_RNA (1)...(19): siRNA sense strand
aguacgaggucgacucaaa

SEQ ID NO: 1221447 - RNA, 19 nt, Homo sapiens
  misc_RNA (1)...(19): siRNA sense strand
caaauacaacgaccucauc

SEQ ID NO: 1221448 - RNA, 19 nt, Homo sapiens
  misc_RNA (1)...(19): siRNA sense strand
gggcaaauacgugcucuau

SEQ ID NO: 1221449 - RNA, 19 nt, Homo sapiens
  misc_RNA (1)...(19): siRNA sense strand
cggccuaacuuucaagaca

SEQ ID NO: 1221450 - RNA, 19 nt, Homo sapiens
  misc_RNA (1)...(19): siRNA sense strand
gaggaucucaucauuugga

SEQ ID NO: 1221451 - RNA, 19 nt, Homo sapiens
  misc_RNA (1)...(19): siRNA sense strand
ggcaagagccgggagagaa

SEQ ID NO: 1221452 - RNA, 19 nt, Homo sapiens
  misc_RNA (1)...(19): siRNA sense strand
cgaaagaacggccuguaca

SEQ ID NO: 1221453 - RNA, 19 nt, Homo sapiens
  misc_RNA (1)...(19): siRNA sense strand
gaaguacgccaagaagaca

SEQ ID NO: 1221454 - RNA, 19 nt, Homo sapiens
  misc_RNA (1)...(19): siRNA sense strand
ucccggagauggaauacaa

SEQ ID NO: 1221455 - RNA, 19 nt, Homo sapiens
  misc_RNA (1)...(19): siRNA sense strand
auaaggugauguauaagga

SEQ ID NO: 1221456 - RNA, 19 nt, Homo sapiens
  misc_RNA (1)...(19): siRNA sense strand
ucagguacaucugggagaa

SEQ ID NO: 1221457 - RNA, 19 nt, Homo sapiens
  misc_RNA (1)...(19): siRNA sense strand
gaggaugucaccaaauaca

SEQ ID NO: 1221458 - RNA, 19 nt, Homo sapiens
  misc_RNA (1)...(19): siRNA sense strand
ucaaagacauccccaagga

SEQ ID NO: 1221459 - RNA, 19 nt, Homo sapiens
  misc_RNA (1)...(19): siRNA sense strand
cagcagaggacaagaucaa

SEQ ID NO: 1221460 - RNA, 19 nt, Homo sapiens
  misc_RNA (1)...(19): siRNA sense strand
gguaccaguuuaagaacau

SEQ ID NO: 1221461 - RNA, 19 nt, Homo sapiens
  misc_RNA (1)...(19): siRNA sense strand
guauccgccuggacagaaa

SEQ ID NO: 1221462 - RNA, 19 nt, Homo sapiens
  misc_RNA (1)...(19): siRNA sense strand
acagcgagaugaugagcuu

SEQ ID NO: 1221463 - RNA, 19 nt, Homo sapiens
  misc_RNA (1)...(19): siRNA sense strand
uaugggacauccucaucaa

SEQ ID NO: 1221464 - RNA, 19 nt, Homo sapiens
  misc_RNA (1)...(19): siRNA sense strand
ccacagcagcaccucguaa

SEQ ID NO: 1221465 - RNA, 19 nt, Homo sapiens
  misc_RNA (1)...(19): siRNA sense strand
auggaauucucaaggguua

SEQ ID NO: 1221466 - RNA, 19 nt, Homo sapiens
  misc_RNA (1)...(19): siRNA sense strand
ggagaugucggagaacaau

SEQ ID NO: 1221467 - RNA, 19 nt, Homo sapiens
  misc_RNA (1)...(19): siRNA sense strand
cgggagacaucggcacgua

SEQ ID NO: 1221468 - RNA, 19 nt, Homo sapiens
  misc_RNA (1)...(19): siRNA sense strand
ggccacagcgagaugauga

SEQ ID NO: 1221469 - RNA, 19 nt, Homo sapiens
  misc_RNA (1)...(19): siRNA sense strand
ucaccggcuugggcaaaua

SEQ ID NO: 1221470 - RNA, 19 nt, Homo sapiens
  misc_RNA (1)...(19): siRNA sense strand
ucugugaccuugcaguuca

SEQ ID NO: 1221471 - RNA, 19 nt, Homo sapiens
  misc_RNA (1)...(19): siRNA sense strand
aaaggacaguucagcaaag

SEQ ID NO: 1221472 - RNA, 19 nt, Homo sapiens
  misc_RNA (1)...(19): siRNA sense strand
aagaggagguuaccauggu

SEQ ID NO: 1221473 - RNA, 19 nt, Homo sapiens
  misc_RNA (1)...(19): siRNA sense strand
ugacggagaagcccucaga

SEQ ID NO: 1221474 - RNA, 19 nt, Homo sapiens
  misc_RNA (1)...(19): siRNA sense strand
gaaagaacggccuguacac

SEQ ID NO: 1221475 - RNA, 19 nt, Homo sapiens
  misc_RNA (1)...(19): siRNA sense strand
caagaaguacgccaagaag

SEQ ID NO: 1221476 - RNA, 19 nt, Homo sapiens
  misc_RNA (1)...(19): siRNA sense strand
ggagacaucggcacguaca

SEQ ID NO: 1221477 - RNA, 19 nt, Homo sapiens
  misc_RNA (1)...(19): siRNA sense strand
gcucuucagcuuugagaug

SEQ ID NO: 1221478 - RNA, 19 nt, Homo sapiens
  misc_RNA (1)...(19): siRNA sense strand
uggacaaccugaacaagca

SEQ ID NO: 1221479 - RNA, 19 nt, Homo sapiens
  misc_RNA (1)...(19): siRNA sense strand
agucagccuucuagaaaga

SEQ ID NO: 1221480 - RNA, 19 nt, Homo sapiens
  misc_RNA (1)...(19): siRNA sense strand
gcuaucacuuggcagaaag

SEQ ID NO: 1221481 - RNA, 19 nt, Homo sapiens
  misc_RNA (1)...(19): siRNA sense strand
ccugagagccaccagaaug

SEQ ID NO: 1221482 - RNA, 19 nt, Homo sapiens
  misc_RNA (1)...(19): siRNA sense strand
ggacagcacggugaucgau

SEQ ID NO: 1221483 - RNA, 19 nt, Homo sapiens
  misc_RNA (1)...(19): siRNA sense strand
ggaucagagugucaucaag

SEQ ID NO: 1221484 - RNA, 19 nt, Homo sapiens
  misc_RNA (1)...(19): siRNA sense strand
gaaaggggagcgcaucuug

SEQ ID NO: 1221485 - RNA, 19 nt, Homo sapiens
  misc_RNA (1)...(19): siRNA sense strand
gagagccaccagaauggaa

SEQ ID NO: 1221486 - RNA, 19 nt, Homo sapiens
  misc_RNA (1)...(19): siRNA sense strand
caguggugcuagcauguga

SEQ ID NO: 1221487 - RNA, 19 nt, Homo sapiens
  misc_RNA (1)...(19): siRNA sense strand
gaugaugagcuuggaugaa

SEQ ID NO: 1221488 - RNA, 19 nt, Homo sapiens
  misc_RNA (1)...(19): siRNA sense strand
ucaucgcggucaacgacua

SEQ ID NO: 1221489 - RNA, 19 nt, Homo sapiens
  misc_RNA (1)...(19): siRNA sense strand
ccacaugggcugagcuuac

SEQ ID NO: 1221490 - RNA, 19 nt, Homo sapiens
  misc_RNA (1)...(19): siRNA sense strand
acggagagccauccucgua

SEQ ID NO: 1221491 - RNA, 19 nt, Homo sapiens
  misc_RNA (1)...(19): siRNA sense strand
gugagauccuggacacauc

SEQ ID NO: 1221492 - RNA, 19 nt, Homo sapiens
  misc_RNA (1)...(19): siRNA sense strand
gaagaaguucaccgaguac

SEQ ID NO: 1221493 - RNA, 19 nt, Homo sapiens
  misc_RNA (1)...(19): siRNA sense strand
cagcagggcagccucuuuc

SEQ ID NO: 1221494 - RNA, 19 nt, Homo sapiens
  misc_RNA (1)...(19): siRNA sense strand
gaaaugaguuguugcagaa

SEQ ID NO: 1221495 - RNA, 19 nt, Homo sapiens
  misc_RNA (1)...(19): siRNA sense strand
ggaaauaacagacaagaaa

SEQ ID NO: 1221496 - RNA, 19 nt, Homo sapiens
  misc_RNA (1)...(19): siRNA sense strand
ggacagaggugcagcuuca

SEQ ID NO: 1221497 - RNA, 19 nt, Homo sapiens
  misc_RNA (1)...(19): siRNA sense strand
gaacagagucaaggaaaua

SEQ ID NO: 1221498 - RNA, 19 nt, Homo sapiens
  misc_RNA (1)...(19): siRNA sense strand
ggaaagaaucagaguauau

SEQ ID NO: 1221499 - RNA, 19 nt, Homo sapiens
  misc_RNA (1)...(19): siRNA sense strand
caguagaaauucacgagua

SEQ ID NO: 1221500 - RNA, 19 nt, Homo sapiens
  misc_RNA (1)...(19): siRNA sense strand
caucaaaaguugccaauaa

SEQ ID NO: 1221501 - RNA, 19 nt, Homo sapiens
  misc_RNA (1)...(19): siRNA sense strand
ugaagacuauccaguagaa

SEQ ID NO: 1221502 - RNA, 19 nt, Homo sapiens
  misc_RNA (1)...(19): siRNA sense strand
aaacaggaauuggaaagaa

SEQ ID NO: 1221503 - RNA, 19 nt, Homo sapiens
  misc_RNA (1)...(19): siRNA sense strand
gaguauauaugaacagagu

SEQ ID NO: 1221504 - RNA, 19 nt, Homo sapiens
  misc_RNA (1)...(19): siRNA sense strand
uaaugaagacuauccagua

SEQ ID NO: 1221505 - RNA, 19 nt, Homo sapiens
  misc_RNA (1)...(19): siRNA sense strand
caugaugucuguuucuaga

SEQ ID NO: 1221506 - RNA, 19 nt, Homo sapiens
  misc_RNA (1)...(19): siRNA sense strand
ucaaggaaauaacagacaa

SEQ ID NO: 1221507 - RNA, 19 nt, Homo sapiens
  misc_RNA (1)...(19): siRNA sense strand
uaaggaacauccaguaaaa

SEQ ID NO: 1221508 - RNA, 19 nt, Homo sapiens
  misc_RNA (1)...(19): siRNA sense strand
ggaauuggaaagaaucaga

SEQ ID NO: 1221509 - RNA, 19 nt, Homo sapiens
  misc_RNA (1)...(19): siRNA sense strand
ugucagcguuugagaauuc

SEQ ID NO: 1221510 - RNA, 19 nt, Homo sapiens
  misc_RNA (1)...(19): siRNA sense strand
ggauuugguuucugcauac

SEQ ID NO: 1221511 - RNA, 19 nt, Homo sapiens
  misc_RNA (1)...(19): siRNA sense strand
uggauuugguuucugcaua

SEQ ID NO: 1221512 - RNA, 19 nt, Homo sapiens
  misc_RNA (1)...(19): siRNA sense strand
cuaaggaacauccaguaaa

SEQ ID NO: 1221513 - RNA, 19 nt, Homo sapiens
  misc_RNA (1)...(19): siRNA sense strand
uggaaagaaucagaguaua

SEQ ID NO: 1221514 - RNA, 19 nt, Homo sapiens
  misc_RNA (1)...(19): siRNA sense strand
aggugcagcuucaagauuu

SEQ ID NO: 1221515 - RNA, 19 nt, Homo sapiens
  misc_RNA (1)...(19): siRNA sense strand
cagaguauauaugaacaga

SEQ ID NO: 1221516 - RNA, 19 nt, Homo sapiens
  misc_RNA (1)...(19): siRNA sense strand
ugaacagagucaaggaaau

SEQ ID NO: 1221517 - RNA, 19 nt, Homo sapiens
  misc_RNA (1)...(19): siRNA sense strand
gaggugcagcuucaagauu

SEQ ID NO: 1221518 - RNA, 19 nt, Homo sapiens
  misc_RNA (1)...(19): siRNA sense strand
aguagaaauucacgaguau

SEQ ID NO: 1221519 - RNA, 19 nt, Homo sapiens
  misc_RNA (1)...(19): siRNA sense strand
gcaggugaagaaauuaaug

SEQ ID NO: 1221520 - RNA, 19 nt, Homo sapiens
  misc_RNA (1)...(19): siRNA sense strand
aaugaagacuauccaguag

SEQ ID NO: 1221521 - RNA, 19 nt, Homo sapiens
  misc_RNA (1)...(19): siRNA sense strand
gguuucugcauacacauua

SEQ ID NO: 1221522 - RNA, 19 nt, Homo sapiens
  misc_RNA (1)...(19): siRNA sense strand
agacuauccaguagaaauu

SEQ ID NO: 1221523 - RNA, 19 nt, Homo sapiens
  misc_RNA (1)...(19): siRNA sense strand
ccuaaggaacauccaguaa

SEQ ID NO: 1221524 - RNA, 19 nt, Homo sapiens
  misc_RNA (1)...(19): siRNA sense strand
uggaugagaugcugaagac

SEQ ID NO: 1221525 - RNA, 19 nt, Homo sapiens
  misc_RNA (1)...(19): siRNA sense strand
gcagcuucaagauuuguaa

SEQ ID NO: 1221526 - RNA, 19 nt, Homo sapiens
  misc_RNA (1)...(19): siRNA sense strand
caggugaagaaauuaauga

SEQ ID NO: 1221527 - RNA, 19 nt, Homo sapiens
  misc_RNA (1)...(19): siRNA sense strand
ggugcagcuucaagauuug

SEQ ID NO: 1221528 - RNA, 19 nt, Homo sapiens
  misc_RNA (1)...(19): siRNA sense strand
gagaugcugaagaccauga

SEQ ID NO: 1221529 - RNA, 19 nt, Homo sapiens
  misc_RNA (1)...(19): siRNA sense strand
cugcauacacauuaaauuc

SEQ ID NO: 1221530 - RNA, 19 nt, Homo sapiens
  misc_RNA (1)...(19): siRNA sense strand
guauauaugaacagaguca

SEQ ID NO: 1221531 - RNA, 19 nt, Homo sapiens
  misc_RNA (1)...(19): siRNA sense strand
aacaggaauuggaaagaau

SEQ ID NO: 1221532 - RNA, 19 nt, Homo sapiens
  misc_RNA (1)...(19): siRNA sense strand
gaguauuugucagcguuug

SEQ ID NO: 1221533 - RNA, 19 nt, Homo sapiens
  misc_RNA (1)...(19): siRNA sense strand
gaagacuauccaguagaaa

SEQ ID NO: 1221534 - RNA, 19 nt, Homo sapiens
  misc_RNA (1)...(19): siRNA sense strand
guagaaauucacgaguauu

SEQ ID NO: 1221535 - RNA, 19 nt, Homo sapiens
  misc_RNA (1)...(19): siRNA sense strand
aaaguugccaauaaaggaa

SEQ ID NO: 1221536 - RNA, 19 nt, Homo sapiens
  misc_RNA (1)...(19): siRNA sense strand
guuucugcauacacauuaa

SEQ ID NO: 1221537 - RNA, 19 nt, Homo sapiens
  misc_RNA (1)...(19): siRNA sense strand
ccauuggugcuguggauga

SEQ ID NO: 1221538 - RNA, 19 nt, Homo sapiens
  misc_RNA (1)...(19): siRNA sense strand
cagaggugcagcuucaaga

SEQ ID NO: 1221539 - RNA, 19 nt, Homo sapiens
  misc_RNA (1)...(19): siRNA sense strand
ggugaagaaauuaaugaag

SEQ ID NO: 1221540 - RNA, 19 nt, Homo sapiens
  misc_RNA (1)...(19): siRNA sense strand
uuggaaagaaucagaguau

SEQ ID NO: 1221541 - RNA, 19 nt, Homo sapiens
  misc_RNA (1)...(19): siRNA sense strand
cagagucaaggaaauaaca

SEQ ID NO: 1221542 - RNA, 19 nt, Homo sapiens
  misc_RNA (1)...(19): siRNA sense strand
gagucaaggaaauaacaga

SEQ ID NO: 1221543 - RNA, 19 nt, Homo sapiens
  misc_RNA (1)...(19): siRNA sense strand
accaugaugucuguuucua

SEQ ID NO: 1221544 - RNA, 19 nt, Homo sapiens
  misc_RNA (1)...(19): siRNA sense strand
aagacuauccaguagaaau

SEQ ID NO: 1221545 - RNA, 19 nt, Homo sapiens
  misc_RNA (1)...(19): siRNA sense strand
gaaaugaguuguugcagaa

SEQ ID NO: 1221546 - RNA, 19 nt, Homo sapiens
  misc_RNA (1)...(19): siRNA sense strand
ggaaauaacagacaagaaa

SEQ ID NO: 1221547 - RNA, 19 nt, Homo sapiens
  misc_RNA (1)...(19): siRNA sense strand
ggacagaggugcagcuuca

SEQ ID NO: 1221548 - RNA, 19 nt, Homo sapiens
  misc_RNA (1)...(19): siRNA sense strand
gaacagagucaaggaaaua

SEQ ID NO: 1221549 - RNA, 19 nt, Homo sapiens
  misc_RNA (1)...(19): siRNA sense strand
ggaaagaaucagaguauau

SEQ ID NO: 1221550 - RNA, 19 nt, Homo sapiens
  misc_RNA (1)...(19): siRNA sense strand
caguagaaauucacgagua

SEQ ID NO: 1221551 - RNA, 19 nt, Homo sapiens
  misc_RNA (1)...(19): siRNA sense strand
caucaaaaguugccaauaa

SEQ ID NO: 1221552 - RNA, 19 nt, Homo sapiens
  misc_RNA (1)...(19): siRNA sense strand
ugaagacuauccaguagaa

SEQ ID NO: 1221553 - RNA, 19 nt, Homo sapiens
  misc_RNA (1)...(19): siRNA sense strand
aaacaggaauuggaaagaa

SEQ ID NO: 1221554 - RNA, 19 nt, Homo sapiens
  misc_RNA (1)...(19): siRNA sense strand
gaguauauaugaacagagu

SEQ ID NO: 1221555 - RNA, 19 nt, Homo sapiens
  misc_RNA (1)...(19): siRNA sense strand
uaaugaagacuauccagua

SEQ ID NO: 1221556 - RNA, 19 nt, Homo sapiens
  misc_RNA (1)...(19): siRNA sense strand
caugaugucuguuucuaga

SEQ ID NO: 1221557 - RNA, 19 nt, Homo sapiens
  misc_RNA (1)...(19): siRNA sense strand
ucaaggaaauaacagacaa

SEQ ID NO: 1221558 - RNA, 19 nt, Homo sapiens
  misc_RNA (1)...(19): siRNA sense strand
uaaggaacauccaguaaaa

SEQ ID NO: 1221559 - RNA, 19 nt, Homo sapiens
  misc_RNA (1)...(19): siRNA sense strand
ggaauuggaaagaaucaga

SEQ ID NO: 1221560 - RNA, 19 nt, Homo sapiens
  misc_RNA (1)...(19): siRNA sense strand
ugucagcguuugagaauuc

SEQ ID NO: 1221561 - RNA, 19 nt, Homo sapiens
  misc_RNA (1)...(19): siRNA sense strand
ggauuugguuucugcauac

SEQ ID NO: 1221562 - RNA, 19 nt, Homo sapiens
  misc_RNA (1)...(19): siRNA sense strand
uggauuugguuucugcaua

SEQ ID NO: 1221563 - RNA, 19 nt, Homo sapiens
  misc_RNA (1)...(19): siRNA sense strand
cuaaggaacauccaguaaa

SEQ ID NO: 1221564 - RNA, 19 nt, Homo sapiens
  misc_RNA (1)...(19): siRNA sense strand
uggaaagaaucagaguaua

SEQ ID NO: 1221565 - RNA, 19 nt, Homo sapiens
  misc_RNA (1)...(19): siRNA sense strand
aggugcagcuucaagauuu

SEQ ID NO: 1221566 - RNA, 19 nt, Homo sapiens
  misc_RNA (1)...(19): siRNA sense strand
cagaguauauaugaacaga

SEQ ID NO: 1221567 - RNA, 19 nt, Homo sapiens
  misc_RNA (1)...(19): siRNA sense strand
ugaacagagucaaggaaau

SEQ ID NO: 1221568 - RNA, 19 nt, Homo sapiens
  misc_RNA (1)...(19): siRNA sense strand
gaggugcagcuucaagauu

SEQ ID NO: 1221569 - RNA, 19 nt, Homo sapiens
  misc_RNA (1)...(19): siRNA sense strand
aguagaaauucacgaguau

SEQ ID NO: 1221570 - RNA, 19 nt, Homo sapiens
  misc_RNA (1)...(19): siRNA sense strand
gcaggugaagaaauuaaug

SEQ ID NO: 1221571 - RNA, 19 nt, Homo sapiens
  misc_RNA (1)...(19): siRNA sense strand
aaugaagacuauccaguag

SEQ ID NO: 1221572 - RNA, 19 nt, Homo sapiens
  misc_RNA (1)...(19): siRNA sense strand
gguuucugcauacacauua

SEQ ID NO: 1221573 - RNA, 19 nt, Homo sapiens
  misc_RNA (1)...(19): siRNA sense strand
agacuauccaguagaaauu

SEQ ID NO: 1221574 - RNA, 19 nt, Homo sapiens
  misc_RNA (1)...(19): siRNA sense strand
ccuaaggaacauccaguaa

SEQ ID NO: 1221575 - RNA, 19 nt, Homo sapiens
  misc_RNA (1)...(19): siRNA sense strand
uggaugagaugcugaagac

SEQ ID NO: 1221576 - RNA, 19 nt, Homo sapiens
  misc_RNA (1)...(19): siRNA sense strand
gcagcuucaagauuuguaa

SEQ ID NO: 1221577 - RNA, 19 nt, Homo sapiens
  misc_RNA (1)...(19): siRNA sense strand
caggugaagaaauuaauga

SEQ ID NO: 1221578 - RNA, 19 nt, Homo sapiens
  misc_RNA (1)...(19): siRNA sense strand
ggugcagcuucaagauuug

SEQ ID NO: 1221579 - RNA, 19 nt, Homo sapiens
  misc_RNA (1)...(19): siRNA sense strand
gagaugcugaagaccauga

SEQ ID NO: 1221580 - RNA, 19 nt, Homo sapiens
  misc_RNA (1)...(19): siRNA sense strand
cugcauacacauuaaauuc

SEQ ID NO: 1221581 - RNA, 19 nt, Homo sapiens
  misc_RNA (1)...(19): siRNA sense strand
guauauaugaacagaguca

SEQ ID NO: 1221582 - RNA, 19 nt, Homo sapiens
  misc_RNA (1)...(19): siRNA sense strand
aacaggaauuggaaagaau

SEQ ID NO: 1221583 - RNA, 19 nt, Homo sapiens
  misc_RNA (1)...(19): siRNA sense strand
gaguauuugucagcguuug

SEQ ID NO: 1221584 - RNA, 19 nt, Homo sapiens
  misc_RNA (1)...(19): siRNA sense strand
gaagacuauccaguagaaa

SEQ ID NO: 1221585 - RNA, 19 nt, Homo sapiens
  misc_RNA (1)...(19): siRNA sense strand
guagaaauucacgaguauu

SEQ ID NO: 1221586 - RNA, 19 nt, Homo sapiens
  misc_RNA (1)...(19): siRNA sense strand
aaaguugccaauaaaggaa

SEQ ID NO: 1221587 - RNA, 19 nt, Homo sapiens
  misc_RNA (1)...(19): siRNA sense strand
guuucugcauacacauuaa

SEQ ID NO: 1221588 - RNA, 19 nt, Homo sapiens
  misc_RNA (1)...(19): siRNA sense strand
ccauuggugcuguggauga

SEQ ID NO: 1221589 - RNA, 19 nt, Homo sapiens
  misc_RNA (1)...(19): siRNA sense strand
cagaggugcagcuucaaga

SEQ ID NO: 1221590 - RNA, 19 nt, Homo sapiens
  misc_RNA (1)...(19): siRNA sense strand
ggugaagaaauuaaugaag

SEQ ID NO: 1221591 - RNA, 19 nt, Homo sapiens
  misc_RNA (1)...(19): siRNA sense strand
uuggaaagaaucagaguau

SEQ ID NO: 1221592 - RNA, 19 nt, Homo sapiens
  misc_RNA (1)...(19): siRNA sense strand
cagagucaaggaaauaaca

SEQ ID NO: 1221593 - RNA, 19 nt, Homo sapiens
  misc_RNA (1)...(19): siRNA sense strand
gagucaaggaaauaacaga

SEQ ID NO: 1221594 - RNA, 19 nt, Homo sapiens
  misc_RNA (1)...(19): siRNA sense strand
accaugaugucuguuucua

SEQ ID NO: 1221595 - RNA, 19 nt, Homo sapiens
  misc_RNA (1)...(19): siRNA sense strand
aagacuauccaguagaaau

SEQ ID NO: 1221596 - RNA, 19 nt, Homo sapiens
  misc_RNA (1)...(19): siRNA sense strand
gaaaugaguuguugcagaa

SEQ ID NO: 1221597 - RNA, 19 nt, Homo sapiens
  misc_RNA (1)...(19): siRNA sense strand
ggaaauaacagacaagaaa

SEQ ID NO: 1221598 - RNA, 19 nt, Homo sapiens
  misc_RNA (1)...(19): siRNA sense strand
ggacagaggugcagcuuca

SEQ ID NO: 1221599 - RNA, 19 nt, Homo sapiens
  misc_RNA (1)...(19): siRNA sense strand
gaacagagucaaggaaaua

SEQ ID NO: 1221600 - RNA, 19 nt, Homo sapiens
  misc_RNA (1)...(19): siRNA sense strand
ggaaagaaucagaguauau

SEQ ID NO: 1221601 - RNA, 19 nt, Homo sapiens
  misc_RNA (1)...(19): siRNA sense strand
caguagaaauucacgagua

SEQ ID NO: 1221602 - RNA, 19 nt, Homo sapiens
  misc_RNA (1)...(19): siRNA sense strand
caucaaaaguugccaauaa

SEQ ID NO: 1221603 - RNA, 19 nt, Homo sapiens
  misc_RNA (1)...(19): siRNA sense strand
ugaagacuauccaguagaa

SEQ ID NO: 1221604 - RNA, 19 nt, Homo sapiens
  misc_RNA (1)...(19): siRNA sense strand
aaacaggaauuggaaagaa

SEQ ID NO: 1221605 - RNA, 19 nt, Homo sapiens
  misc_RNA (1)...(19): siRNA sense strand
gaguauauaugaacagagu

SEQ ID NO: 1221606 - RNA, 19 nt, Homo sapiens
  misc_RNA (1)...(19): siRNA sense strand
uaaugaagacuauccagua

SEQ ID NO: 1221607 - RNA, 19 nt, Homo sapiens
  misc_RNA (1)...(19): siRNA sense strand
caugaugucuguuucuaga

SEQ ID NO: 1221608 - RNA, 19 nt, Homo sapiens
  misc_RNA (1)...(19): siRNA sense strand
ucaaggaaauaacagacaa

SEQ ID NO: 1221609 - RNA, 19 nt, Homo sapiens
  misc_RNA (1)...(19): siRNA sense strand
uaaggaacauccaguaaaa

SEQ ID NO: 1221610 - RNA, 19 nt, Homo sapiens
  misc_RNA (1)...(19): siRNA sense strand
ggaauuggaaagaaucaga

SEQ ID NO: 1221611 - RNA, 19 nt, Homo sapiens
  misc_RNA (1)...(19): siRNA sense strand
ugucagcguuugagaauuc

SEQ ID NO: 1221612 - RNA, 19 nt, Homo sapiens
  misc_RNA (1)...(19): siRNA sense strand
ggauuugguuucugcauac

SEQ ID NO: 1221613 - RNA, 19 nt, Homo sapiens
  misc_RNA (1)...(19): siRNA sense strand
uggauuugguuucugcaua

SEQ ID NO: 1221614 - RNA, 19 nt, Homo sapiens
  misc_RNA (1)...(19): siRNA sense strand
cuaaggaacauccaguaaa

SEQ ID NO: 1221615 - RNA, 19 nt, Homo sapiens
  misc_RNA (1)...(19): siRNA sense strand
uggaaagaaucagaguaua

SEQ ID NO: 1221616 - RNA, 19 nt, Homo sapiens
  misc_RNA (1)...(19): siRNA sense strand
aggugcagcuucaagauuu

SEQ ID NO: 1221617 - RNA, 19 nt, Homo sapiens
  misc_RNA (1)...(19): siRNA sense strand
cagaguauauaugaacaga

SEQ ID NO: 1221618 - RNA, 19 nt, Homo sapiens
  misc_RNA (1)...(19): siRNA sense strand
ugaacagagucaaggaaau

SEQ ID NO: 1221619 - RNA, 19 nt, Homo sapiens
  misc_RNA (1)...(19): siRNA sense strand
gaggugcagcuucaagauu

SEQ ID NO: 1221620 - RNA, 19 nt, Homo sapiens
  misc_RNA (1)...(19): siRNA sense strand
aguagaaauucacgaguau

SEQ ID NO: 1221621 - RNA, 19 nt, Homo sapiens
  misc_RNA (1)...(19): siRNA sense strand
gcaggugaagaaauuaaug

SEQ ID NO: 1221622 - RNA, 19 nt, Homo sapiens
  misc_RNA (1)...(19): siRNA sense strand
aaugaagacuauccaguag

SEQ ID NO: 1221623 - RNA, 19 nt, Homo sapiens
  misc_RNA (1)...(19): siRNA sense strand
gguuucugcauacacauua

SEQ ID NO: 1221624 - RNA, 19 nt, Homo sapiens
  misc_RNA (1)...(19): siRNA sense strand
agacuauccaguagaaauu

SEQ ID NO: 1221625 - RNA, 19 nt, Homo sapiens
  misc_RNA (1)...(19): siRNA sense strand
ccuaaggaacauccaguaa

SEQ ID NO: 1221626 - RNA, 19 nt, Homo sapiens
  misc_RNA (1)...(19): siRNA sense strand
uggaugagaugcugaagac

SEQ ID NO: 1221627 - RNA, 19 nt, Homo sapiens
  misc_RNA (1)...(19): siRNA sense strand
gcagcuucaagauuuguaa

SEQ ID NO: 1221628 - RNA, 19 nt, Homo sapiens
  misc_RNA (1)...(19): siRNA sense strand
caggugaagaaauuaauga

SEQ ID NO: 1221629 - RNA, 19 nt, Homo sapiens
  misc_RNA (1)...(19): siRNA sense strand
ggugcagcuucaagauuug

SEQ ID NO: 1221630 - RNA, 19 nt, Homo sapiens
  misc_RNA (1)...(19): siRNA sense strand
gagaugcugaagaccauga

SEQ ID NO: 1221631 - RNA, 19 nt, Homo sapiens
  misc_RNA (1)...(19): siRNA sense strand
cugcauacacauuaaauuc

SEQ ID NO: 1221632 - RNA, 19 nt, Homo sapiens
  misc_RNA (1)...(19): siRNA sense strand
guauauaugaacagaguca

SEQ ID NO: 1221633 - RNA, 19 nt, Homo sapiens
  misc_RNA (1)...(19): siRNA sense strand
aacaggaauuggaaagaau

SEQ ID NO: 1221634 - RNA, 19 nt, Homo sapiens
  misc_RNA (1)...(19): siRNA sense strand
gaguauuugucagcguuug

SEQ ID NO: 1221635 - RNA, 19 nt, Homo sapiens
  misc_RNA (1)...(19): siRNA sense strand
gaagacuauccaguagaaa

SEQ ID NO: 1221636 - RNA, 19 nt, Homo sapiens
  misc_RNA (1)...(19): siRNA sense strand
guagaaauucacgaguauu

SEQ ID NO: 1221637 - RNA, 19 nt, Homo sapiens
  misc_RNA (1)...(19): siRNA sense strand
aaaguugccaauaaaggaa

SEQ ID NO: 1221638 - RNA, 19 nt, Homo sapiens
  misc_RNA (1)...(19): siRNA sense strand
guuucugcauacacauuaa

SEQ ID NO: 1221639 - RNA, 19 nt, Homo sapiens
  misc_RNA (1)...(19): siRNA sense strand
ccauuggugcuguggauga

SEQ ID NO: 1221640 - RNA, 19 nt, Homo sapiens
  misc_RNA (1)...(19): siRNA sense strand
cagaggugcagcuucaaga

SEQ ID NO: 1221641 - RNA, 19 nt, Homo sapiens
  misc_RNA (1)...(19): siRNA sense strand
ggugaagaaauuaaugaag

SEQ ID NO: 1221642 - RNA, 19 nt, Homo sapiens
  misc_RNA (1)...(19): siRNA sense strand
uuggaaagaaucagaguau

SEQ ID NO: 1221643 - RNA, 19 nt, Homo sapiens
  misc_RNA (1)...(19): siRNA sense strand
cagagucaaggaaauaaca

SEQ ID NO: 1221644 - RNA, 19 nt, Homo sapiens
  misc_RNA (1)...(19): siRNA sense strand
gagucaaggaaauaacaga

SEQ ID NO: 1221645 - RNA, 19 nt, Homo sapiens
  misc_RNA (1)...(19): siRNA sense strand
accaugaugucuguuucua

SEQ ID NO: 1221646 - RNA, 19 nt, Homo sapiens
  misc_RNA (1)...(19): siRNA sense strand
aagacuauccaguagaaau

SEQ ID NO: 1221647 - RNA, 19 nt, Homo sapiens
  misc_RNA (1)...(19): siRNA sense strand
gaaaugaguuguugcagaa

SEQ ID NO: 1221648 - RNA, 19 nt, Homo sapiens
  misc_RNA (1)...(19): siRNA sense strand
ggaaauaacagacaagaaa

SEQ ID NO: 1221649 - RNA, 19 nt, Homo sapiens
  misc_RNA (1)...(19): siRNA sense strand
ggacagaggugcagcuuca

SEQ ID NO: 1221650 - RNA, 19 nt, Homo sapiens
  misc_RNA (1)...(19): siRNA sense strand
gaacagagucaaggaaaua

SEQ ID NO: 1221651 - RNA, 19 nt, Homo sapiens
  misc_RNA (1)...(19): siRNA sense strand
ggaaagaaucagaguauau

SEQ ID NO: 1221652 - RNA, 19 nt, Homo sapiens
  misc_RNA (1)...(19): siRNA sense strand
caguagaaauucacgagua

SEQ ID NO: 1221653 - RNA, 19 nt, Homo sapiens
  misc_RNA (1)...(19): siRNA sense strand
caucaaaaguugccaauaa

SEQ ID NO: 1221654 - RNA, 19 nt, Homo sapiens
  misc_RNA (1)...(19): siRNA sense strand
ugaagacuauccaguagaa

SEQ ID NO: 1221655 - RNA, 19 nt, Homo sapiens
  misc_RNA (1)...(19): siRNA sense strand
aaacaggaauuggaaagaa

SEQ ID NO: 1221656 - RNA, 19 nt, Homo sapiens
  misc_RNA (1)...(19): siRNA sense strand
gaguauauaugaacagagu

SEQ ID NO: 1221657 - RNA, 19 nt, Homo sapiens
  misc_RNA (1)...(19): siRNA sense strand
uaaugaagacuauccagua

SEQ ID NO: 1221658 - RNA, 19 nt, Homo sapiens
  misc_RNA (1)...(19): siRNA sense strand
caugaugucuguuucuaga

SEQ ID NO: 1221659 - RNA, 19 nt, Homo sapiens
  misc_RNA (1)...(19): siRNA sense strand
ucaaggaaauaacagacaa

SEQ ID NO: 1221660 - RNA, 19 nt, Homo sapiens
  misc_RNA (1)...(19): siRNA sense strand
uaaggaacauccaguaaaa

SEQ ID NO: 1221661 - RNA, 19 nt, Homo sapiens
  misc_RNA (1)...(19): siRNA sense strand
ggaauuggaaagaaucaga

SEQ ID NO: 1221662 - RNA, 19 nt, Homo sapiens
  misc_RNA (1)...(19): siRNA sense strand
ugucagcguuugagaauuc

SEQ ID NO: 1221663 - RNA, 19 nt, Homo sapiens
  misc_RNA (1)...(19): siRNA sense strand
ggauuugguuucugcauac

SEQ ID NO: 1221664 - RNA, 19 nt, Homo sapiens
  misc_RNA (1)...(19): siRNA sense strand
uggauuugguuucugcaua

SEQ ID NO: 1221665 - RNA, 19 nt, Homo sapiens
  misc_RNA (1)...(19): siRNA sense strand
cuaaggaacauccaguaaa

SEQ ID NO: 1221666 - RNA, 19 nt, Homo sapiens
  misc_RNA (1)...(19): siRNA sense strand
uggaaagaaucagaguaua

SEQ ID NO: 1221667 - RNA, 19 nt, Homo sapiens
  misc_RNA (1)...(19): siRNA sense strand
aggugcagcuucaagauuu

SEQ ID NO: 1221668 - RNA, 19 nt, Homo sapiens
  misc_RNA (1)...(19): siRNA sense strand
cagaguauauaugaacaga

SEQ ID NO: 1221669 - RNA, 19 nt, Homo sapiens
  misc_RNA (1)...(19): siRNA sense strand
ugaacagagucaaggaaau

SEQ ID NO: 1221670 - RNA, 19 nt, Homo sapiens
  misc_RNA (1)...(19): siRNA sense strand
gaggugcagcuucaagauu

SEQ ID NO: 1221671 - RNA, 19 nt, Homo sapiens
  misc_RNA (1)...(19): siRNA sense strand
aguagaaauucacgaguau

SEQ ID NO: 1221672 - RNA, 19 nt, Homo sapiens
  misc_RNA (1)...(19): siRNA sense strand
gcaggugaagaaauuaaug

SEQ ID NO: 1221673 - RNA, 19 nt, Homo sapiens
  misc_RNA (1)...(19): siRNA sense strand
aaugaagacuauccaguag

SEQ ID NO: 1221674 - RNA, 19 nt, Homo sapiens
  misc_RNA (1)...(19): siRNA sense strand
gguuucugcauacacauua

SEQ ID NO: 1221675 - RNA, 19 nt, Homo sapiens
  misc_RNA (1)...(19): siRNA sense strand
agacuauccaguagaaauu

SEQ ID NO: 1221676 - RNA, 19 nt, Homo sapiens
  misc_RNA (1)...(19): siRNA sense strand
ccuaaggaacauccaguaa

SEQ ID NO: 1221677 - RNA, 19 nt, Homo sapiens
  misc_RNA (1)...(19): siRNA sense strand
uggaugagaugcugaagac

SEQ ID NO: 1221678 - RNA, 19 nt, Homo sapiens
  misc_RNA (1)...(19): siRNA sense strand
gcagcuucaagauuuguaa

SEQ ID NO: 1221679 - RNA, 19 nt, Homo sapiens
  misc_RNA (1)...(19): siRNA sense strand
caggugaagaaauuaauga

SEQ ID NO: 1221680 - RNA, 19 nt, Homo sapiens
  misc_RNA (1)...(19): siRNA sense strand
ggugcagcuucaagauuug

SEQ ID NO: 1221681 - RNA, 19 nt, Homo sapiens
  misc_RNA (1)...(19): siRNA sense strand
gagaugcugaagaccauga

SEQ ID NO: 1221682 - RNA, 19 nt, Homo sapiens
  misc_RNA (1)...(19): siRNA sense strand
cugcauacacauuaaauuc

SEQ ID NO: 1221683 - RNA, 19 nt, Homo sapiens
  misc_RNA (1)...(19): siRNA sense strand
guauauaugaacagaguca

SEQ ID NO: 1221684 - RNA, 19 nt, Homo sapiens
  misc_RNA (1)...(19): siRNA sense strand
aacaggaauuggaaagaau

SEQ ID NO: 1221685 - RNA, 19 nt, Homo sapiens
  misc_RNA (1)...(19): siRNA sense strand
gaguauuugucagcguuug

SEQ ID NO: 1221686 - RNA, 19 nt, Homo sapiens
  misc_RNA (1)...(19): siRNA sense strand
gaagacuauccaguagaaa

SEQ ID NO: 1221687 - RNA, 19 nt, Homo sapiens
  misc_RNA (1)...(19): siRNA sense strand
guagaaauucacgaguauu

SEQ ID NO: 1221688 - RNA, 19 nt, Homo sapiens
  misc_RNA (1)...(19): siRNA sense strand
aaaguugccaauaaaggaa

SEQ ID NO: 1221689 - RNA, 19 nt, Homo sapiens
  misc_RNA (1)...(19): siRNA sense strand
guuucugcauacacauuaa

SEQ ID NO: 1221690 - RNA, 19 nt, Homo sapiens
  misc_RNA (1)...(19): siRNA sense strand
ccauuggugcuguggauga

SEQ ID NO: 1221691 - RNA, 19 nt, Homo sapiens
  misc_RNA (1)...(19): siRNA sense strand
cagaggugcagcuucaaga

SEQ ID NO: 1221692 - RNA, 19 nt, Homo sapiens
  misc_RNA (1)...(19): siRNA sense strand
ggugaagaaauuaaugaag

SEQ ID NO: 1221693 - RNA, 19 nt, Homo sapiens
  misc_RNA (1)...(19): siRNA sense strand
uuggaaagaaucagaguau

SEQ ID NO: 1221694 - RNA, 19 nt, Homo sapiens
  misc_RNA (1)...(19): siRNA sense strand
cagagucaaggaaauaaca

SEQ ID NO: 1221695 - RNA, 19 nt, Homo sapiens
  misc_RNA (1)...(19): siRNA sense strand
gagucaaggaaauaacaga

SEQ ID NO: 1221696 - RNA, 19 nt, Homo sapiens
  misc_RNA (1)...(19): siRNA sense strand
accaugaugucuguuucua

SEQ ID NO: 1221697 - RNA, 19 nt, Homo sapiens
  misc_RNA (1)...(19): siRNA sense strand
aagacuauccaguagaaau

SEQ ID NO: 1221698 - RNA, 19 nt, Homo sapiens
  misc_RNA (1)...(19): siRNA sense strand
ccucuuagccgcagcauua

SEQ ID NO: 1221699 - RNA, 19 nt, Homo sapiens
  misc_RNA (1)...(19): siRNA sense strand
gcacccaaauccuaugcua

SEQ ID NO: 1221700 - RNA, 19 nt, Homo sapiens
  misc_RNA (1)...(19): siRNA sense strand
gccugucacucuucauuua

SEQ ID NO: 1221701 - RNA, 19 nt, Homo sapiens
  misc_RNA (1)...(19): siRNA sense strand
ggaaaaggguaauaugguu

SEQ ID NO: 1221702 - RNA, 19 nt, Homo sapiens
  misc_RNA (1)...(19): siRNA sense strand
gcauuaagccugucacucu

SEQ ID NO: 1221703 - RNA, 19 nt, Homo sapiens
  misc_RNA (1)...(19): siRNA sense strand
agaauucagugacaaggaa

SEQ ID NO: 1221704 - RNA, 19 nt, Homo sapiens
  misc_RNA (1)...(19): siRNA sense strand
uuaauagccuguagagaca

SEQ ID NO: 1221705 - RNA, 19 nt, Homo sapiens
  misc_RNA (1)...(19): siRNA sense strand
uuaauagcagcuccucuua

SEQ ID NO: 1221706 - RNA, 19 nt, Homo sapiens
  misc_RNA (1)...(19): siRNA sense strand
acacagaauucagugacaa

SEQ ID NO: 1221707 - RNA, 19 nt, Homo sapiens
  misc_RNA (1)...(19): siRNA sense strand
caaauccuaugcuauucgu

SEQ ID NO: 1221708 - RNA, 19 nt, Homo sapiens
  misc_RNA (1)...(19): siRNA sense strand
gacacagaauucagugaca

SEQ ID NO: 1221709 - RNA, 19 nt, Homo sapiens
  misc_RNA (1)...(19): siRNA sense strand
cauuaagccugucacucuu

SEQ ID NO: 1221710 - RNA, 19 nt, Homo sapiens
  misc_RNA (1)...(19): siRNA sense strand
gaaaaggguaauaugguuu

SEQ ID NO: 1221711 - RNA, 19 nt, Homo sapiens
  misc_RNA (1)...(19): siRNA sense strand
gaauucagugacaaggaaa

SEQ ID NO: 1221712 - RNA, 19 nt, Homo sapiens
  misc_RNA (1)...(19): siRNA sense strand
acccaaauccuaugcuauu

SEQ ID NO: 1221713 - RNA, 19 nt, Homo sapiens
  misc_RNA (1)...(19): siRNA sense strand
gguccugaguggaaauucu

SEQ ID NO: 1221714 - RNA, 19 nt, Homo sapiens
  misc_RNA (1)...(19): siRNA sense strand
aauagcagcuccucuuagc

SEQ ID NO: 1221715 - RNA, 19 nt, Homo sapiens
  misc_RNA (1)...(19): siRNA sense strand
ccuaugcuauucgugauuc

SEQ ID NO: 1221716 - RNA, 19 nt, Homo sapiens
  misc_RNA (1)...(19): siRNA sense strand
ggaggcagcacccaaaucc

SEQ ID NO: 1221717 - RNA, 19 nt, Homo sapiens
  misc_RNA (1)...(19): siRNA sense strand
aggcagcacccaaauccua

SEQ ID NO: 1221718 - RNA, 19 nt, Homo sapiens
  misc_RNA (1)...(19): siRNA sense strand
gagacacagaauucaguga

SEQ ID NO: 1221719 - RNA, 19 nt, Homo sapiens
  misc_RNA (1)...(19): siRNA sense strand
uuaagccugucacucuuca

SEQ ID NO: 1221720 - RNA, 19 nt, Homo sapiens
  misc_RNA (1)...(19): siRNA sense strand
uuuaauagcagcuccucuu

SEQ ID NO: 1221721 - RNA, 19 nt, Homo sapiens
  misc_RNA (1)...(19): siRNA sense strand
uaauagcagcuccucuuag

SEQ ID NO: 1221722 - RNA, 19 nt, Homo sapiens
  misc_RNA (1)...(19): siRNA sense strand
ccugucacucuucauuuaa

SEQ ID NO: 1221723 - RNA, 19 nt, Homo sapiens
  misc_RNA (1)...(19): siRNA sense strand
ccugaguggaaauucuuua

SEQ ID NO: 1221724 - RNA, 19 nt, Homo sapiens
  misc_RNA (1)...(19): siRNA sense strand
cccaaauccuaugcuauuc

SEQ ID NO: 1221725 - RNA, 19 nt, Homo sapiens
  misc_RNA (1)...(19): siRNA sense strand
guagagacacagaauucag

SEQ ID NO: 1221726 - RNA, 19 nt, Homo sapiens
  misc_RNA (1)...(19): siRNA sense strand
cugaguggaaauucuuuaa

SEQ ID NO: 1221727 - RNA, 19 nt, Homo sapiens
  misc_RNA (1)...(19): siRNA sense strand
ccucuuagccgcagcauua

SEQ ID NO: 1221728 - RNA, 19 nt, Homo sapiens
  misc_RNA (1)...(19): siRNA sense strand
gcacccaaauccuaugcua

SEQ ID NO: 1221729 - RNA, 19 nt, Homo sapiens
  misc_RNA (1)...(19): siRNA sense strand
gccugucacucuucauuua

SEQ ID NO: 1221730 - RNA, 19 nt, Homo sapiens
  misc_RNA (1)...(19): siRNA sense strand
ggaaaaggguaauaugguu

SEQ ID NO: 1221731 - RNA, 19 nt, Homo sapiens
  misc_RNA (1)...(19): siRNA sense strand
gcauuaagccugucacucu

SEQ ID NO: 1221732 - RNA, 19 nt, Homo sapiens
  misc_RNA (1)...(19): siRNA sense strand
agaauucagugacaaggaa

SEQ ID NO: 1221733 - RNA, 19 nt, Homo sapiens
  misc_RNA (1)...(19): siRNA sense strand
uuaauagccuguagagaca

SEQ ID NO: 1221734 - RNA, 19 nt, Homo sapiens
  misc_RNA (1)...(19): siRNA sense strand
uuaauagcagcuccucuua

SEQ ID NO: 1221735 - RNA, 19 nt, Homo sapiens
  misc_RNA (1)...(19): siRNA sense strand
acacagaauucagugacaa

SEQ ID NO: 1221736 - RNA, 19 nt, Homo sapiens
  misc_RNA (1)...(19): siRNA sense strand
caaauccuaugcuauucgu

SEQ ID NO: 1221737 - RNA, 19 nt, Homo sapiens
  misc_RNA (1)...(19): siRNA sense strand
gacacagaauucagugaca

SEQ ID NO: 1221738 - RNA, 19 nt, Homo sapiens
  misc_RNA (1)...(19): siRNA sense strand
cauuaagccugucacucuu

SEQ ID NO: 1221739 - RNA, 19 nt, Homo sapiens
  misc_RNA (1)...(19): siRNA sense strand
gaaaaggguaauaugguuu

SEQ ID NO: 1221740 - RNA, 19 nt, Homo sapiens
  misc_RNA (1)...(19): siRNA sense strand
gaauucagugacaaggaaa

SEQ ID NO: 1221741 - RNA, 19 nt, Homo sapiens
  misc_RNA (1)...(19): siRNA sense strand
acccaaauccuaugcuauu

SEQ ID NO: 1221742 - RNA, 19 nt, Homo sapiens
  misc_RNA (1)...(19): siRNA sense strand
gguccugaguggaaauucu

SEQ ID NO: 1221743 - RNA, 19 nt, Homo sapiens
  misc_RNA (1)...(19): siRNA sense strand
aauagcagcuccucuuagc

SEQ ID NO: 1221744 - RNA, 19 nt, Homo sapiens
  misc_RNA (1)...(19): siRNA sense strand
ccuaugcuauucgugauuc

SEQ ID NO: 1221745 - RNA, 19 nt, Homo sapiens
  misc_RNA (1)...(19): siRNA sense strand
ggaggcagcacccaaaucc

SEQ ID NO: 1221746 - RNA, 19 nt, Homo sapiens
  misc_RNA (1)...(19): siRNA sense strand
aggcagcacccaaauccua

SEQ ID NO: 1221747 - RNA, 19 nt, Homo sapiens
  misc_RNA (1)...(19): siRNA sense strand
gagacacagaauucaguga

SEQ ID NO: 1221748 - RNA, 19 nt, Homo sapiens
  misc_RNA (1)...(19): siRNA sense strand
uuaagccugucacucuuca

SEQ ID NO: 1221749 - RNA, 19 nt, Homo sapiens
  misc_RNA (1)...(19): siRNA sense strand
uuuaauagcagcuccucuu

SEQ ID NO: 1221750 - RNA, 19 nt, Homo sapiens
  misc_RNA (1)...(19): siRNA sense strand
uaauagcagcuccucuuag

SEQ ID NO: 1221751 - RNA, 19 nt, Homo sapiens
  misc_RNA (1)...(19): siRNA sense strand
ccugucacucuucauuuaa

SEQ ID NO: 1221752 - RNA, 19 nt, Homo sapiens
  misc_RNA (1)...(19): siRNA sense strand
ccugaguggaaauucuuua

SEQ ID NO: 1221753 - RNA, 19 nt, Homo sapiens
  misc_RNA (1)...(19): siRNA sense strand
cccaaauccuaugcuauuc

SEQ ID NO: 1221754 - RNA, 19 nt, Homo sapiens
  misc_RNA (1)...(19): siRNA sense strand
guagagacacagaauucag

SEQ ID NO: 1221755 - RNA, 19 nt, Homo sapiens
  misc_RNA (1)...(19): siRNA sense strand
cugaguggaaauucuuuaa

SEQ ID NO: 1221756 - RNA, 19 nt, Homo sapiens
  misc_RNA (1)...(19): siRNA sense strand
gagaaaguccugcccguuu

SEQ ID NO: 1221757 - RNA, 19 nt, Homo sapiens
  misc_RNA (1)...(19): siRNA sense strand
ugaagaagcugcggcacaa

SEQ ID NO: 1221758 - RNA, 19 nt, Homo sapiens
  misc_RNA (1)...(19): siRNA sense strand
ccgcgacucugaugagaaa

SEQ ID NO: 1221759 - RNA, 19 nt, Homo sapiens
  misc_RNA (1)...(19): siRNA sense strand
ugcccgagcuugugaacua

SEQ ID NO: 1221760 - RNA, 19 nt, Homo sapiens
  misc_RNA (1)...(19): siRNA sense strand
ggccauuacuccaccaaau

SEQ ID NO: 1221761 - RNA, 19 nt, Homo sapiens
  misc_RNA (1)...(19): siRNA sense strand
uggcugagggcauguguua

SEQ ID NO: 1221762 - RNA, 19 nt, Homo sapiens
  misc_RNA (1)...(19): siRNA sense strand
ggaaaacacccucugcaaa

SEQ ID NO: 1221763 - RNA, 19 nt, Homo sapiens
  misc_RNA (1)...(19): siRNA sense strand
ggguccagguggccauuaa

SEQ ID NO: 1221764 - RNA, 19 nt, Homo sapiens
  misc_RNA (1)...(19): siRNA sense strand
gaaaacacccucugcaaag

SEQ ID NO: 1221765 - RNA, 19 nt, Homo sapiens
  misc_RNA (1)...(19): siRNA sense strand
ggugauuucucgagacaac

SEQ ID NO: 1221766 - RNA, 19 nt, Homo sapiens
  misc_RNA (1)...(19): siRNA sense strand
uaccuggagucgcagaauu

SEQ ID NO: 1221767 - RNA, 19 nt, Homo sapiens
  misc_RNA (1)...(19): siRNA sense strand
gaagaagcugcggcacaaa

SEQ ID NO: 1221768 - RNA, 19 nt, Homo sapiens
  misc_RNA (1)...(19): siRNA sense strand
gaagccgagugccgacuac

SEQ ID NO: 1221769 - RNA, 19 nt, Homo sapiens
  misc_RNA (1)...(19): siRNA sense strand
uuucggagcugcuggacau

SEQ ID NO: 1221770 - RNA, 19 nt, Homo sapiens
  misc_RNA (1)...(19): siRNA sense strand
acaagcugaugcugacaug

SEQ ID NO: 1221771 - RNA, 19 nt, Homo sapiens
  misc_RNA (1)...(19): siRNA sense strand
aaacacccucugcaaaguu

SEQ ID NO: 1221772 - RNA, 19 nt, Homo sapiens
  misc_RNA (1)...(19): siRNA sense strand
ggagauccaggccaugaag

SEQ ID NO: 1221773 - RNA, 19 nt, Homo sapiens
  misc_RNA (1)...(19): siRNA sense strand
cgucugguccuuugggauu

SEQ ID NO: 1221774 - RNA, 19 nt, Homo sapiens
  misc_RNA (1)...(19): siRNA sense strand
ugaacgaggcgguguccuu

SEQ ID NO: 1221775 - RNA, 19 nt, Homo sapiens
  misc_RNA (1)...(19): siRNA sense strand
gaucagggucagcgagaag

SEQ ID NO: 1221776 - RNA, 19 nt, Homo sapiens
  misc_RNA (1)...(19): siRNA sense strand
gccauuacuccaccaaauc

SEQ ID NO: 1221777 - RNA, 19 nt, Homo sapiens
  misc_RNA (1)...(19): siRNA sense strand
acgucuaccucucccauga

SEQ ID NO: 1221778 - RNA, 19 nt, Homo sapiens
  misc_RNA (1)...(19): siRNA sense strand
gagauccaggccaugaaga

SEQ ID NO: 1221779 - RNA, 19 nt, Homo sapiens
  misc_RNA (1)...(19): siRNA sense strand
aaggugauuucucgagaca

SEQ ID NO: 1221780 - RNA, 19 nt, Homo sapiens
  misc_RNA (1)...(19): siRNA sense strand
ccucucccaugaccacaau

SEQ ID NO: 1221781 - RNA, 19 nt, Homo sapiens
  misc_RNA (1)...(19): siRNA sense strand
aacacccucugcaaaguug

SEQ ID NO: 1221782 - RNA, 19 nt, Homo sapiens
  misc_RNA (1)...(19): siRNA sense strand
caucaucacggagcucaug

SEQ ID NO: 1221783 - RNA, 19 nt, Homo sapiens
  misc_RNA (1)...(19): siRNA sense strand
ggaaaugcuugacaucaug

SEQ ID NO: 1221784 - RNA, 19 nt, Homo sapiens
  misc_RNA (1)...(19): siRNA sense strand
cagcguggacgaugaauuu

SEQ ID NO: 1221785 - RNA, 19 nt, Homo sapiens
  misc_RNA (1)...(19): siRNA sense strand
gaagauggacagaaacaag

SEQ ID NO: 1221786 - RNA, 19 nt, Homo sapiens
  misc_RNA (1)...(19): siRNA sense strand
caugauggcucggucaguu

SEQ ID NO: 1221787 - RNA, 19 nt, Homo sapiens
  misc_RNA (1)...(19): siRNA sense strand
gggaacacguggagagcuu

SEQ ID NO: 1221788 - RNA, 19 nt, Homo sapiens
  misc_RNA (1)...(19): siRNA sense strand
gaaaugcuugacaucauga

SEQ ID NO: 1221789 - RNA, 19 nt, Homo sapiens
  misc_RNA (1)...(19): siRNA sense strand
ggaauucauugagucuugu

SEQ ID NO: 1221790 - RNA, 19 nt, Homo sapiens
  misc_RNA (1)...(19): siRNA sense strand
cguggacgaugaauuugaa

SEQ ID NO: 1221791 - RNA, 19 nt, Homo sapiens
  misc_RNA (1)...(19): siRNA sense strand
gaccauugaggaauucauu

SEQ ID NO: 1221792 - RNA, 19 nt, Homo sapiens
  misc_RNA (1)...(19): siRNA sense strand
gaaugucccagcggaauug

SEQ ID NO: 1221793 - RNA, 19 nt, Homo sapiens
  misc_RNA (1)...(19): siRNA sense strand
gaggaaaugcuugacauca

SEQ ID NO: 1221794 - RNA, 19 nt, Homo sapiens
  misc_RNA (1)...(19): siRNA sense strand
gauuuacucccaguucuuu

SEQ ID NO: 1221795 - RNA, 19 nt, Homo sapiens
  misc_RNA (1)...(19): siRNA sense strand
gcagauuuacucccaguuc

SEQ ID NO: 1221796 - RNA, 19 nt, Homo sapiens
  misc_RNA (1)...(19): siRNA sense strand
ucaaugaggagaacuucaa

SEQ ID NO: 1221797 - RNA, 19 nt, Homo sapiens
  misc_RNA (1)...(19): siRNA sense strand
gagaacuucaagcagauuu

SEQ ID NO: 1221798 - RNA, 19 nt, Homo sapiens
  misc_RNA (1)...(19): siRNA sense strand
ugaaguccaucuaugacau

SEQ ID NO: 1221799 - RNA, 19 nt, Homo sapiens
  misc_RNA (1)...(19): siRNA sense strand
caucaugaaguccaucuau

SEQ ID NO: 1221800 - RNA, 19 nt, Homo sapiens
  misc_RNA (1)...(19): siRNA sense strand
gaaguccaucuaugacaug

SEQ ID NO: 1221801 - RNA, 19 nt, Homo sapiens
  misc_RNA (1)...(19): siRNA sense strand
aggaauucauugagucuug

SEQ ID NO: 1221802 - RNA, 19 nt, Homo sapiens
  misc_RNA (1)...(19): siRNA sense strand
gaacuucaagcagauuuac

SEQ ID NO: 1221803 - RNA, 19 nt, Homo sapiens
  misc_RNA (1)...(19): siRNA sense strand
ccauugaggaauucauuga

SEQ ID NO: 1221804 - RNA, 19 nt, Homo sapiens
  misc_RNA (1)...(19): siRNA sense strand
gcaggagcaaaccaaauuc

SEQ ID NO: 1221805 - RNA, 19 nt, Homo sapiens
  misc_RNA (1)...(19): siRNA sense strand
cagauuuacucccaguucu

SEQ ID NO: 1221806 - RNA, 19 nt, Homo sapiens
  misc_RNA (1)...(19): siRNA sense strand
ggacagaaacaaggauggu

SEQ ID NO: 1221807 - RNA, 19 nt, Homo sapiens
  misc_RNA (1)...(19): siRNA sense strand
aggaaaugcuugacaucau

SEQ ID NO: 1221808 - RNA, 19 nt, Homo sapiens
  misc_RNA (1)...(19): siRNA sense strand
ggagaacuucaagcagauu

SEQ ID NO: 1221809 - RNA, 19 nt, Homo sapiens
  misc_RNA (1)...(19): siRNA sense strand
ugaauuguccaccgugugu

SEQ ID NO: 1221810 - RNA, 19 nt, Homo sapiens
  misc_RNA (1)...(19): siRNA sense strand
cagaagauggacagaaaca

SEQ ID NO: 1221811 - RNA, 19 nt, Homo sapiens
  misc_RNA (1)...(19): siRNA sense strand
ugcaggagcaaaccaaauu

SEQ ID NO: 1221812 - RNA, 19 nt, Homo sapiens
  misc_RNA (1)...(19): siRNA sense strand
ggugaccauugaggaauuc

SEQ ID NO: 1221813 - RNA, 19 nt, Homo sapiens
  misc_RNA (1)...(19): siRNA sense strand
agaacuucaagcagauuua

SEQ ID NO: 1221814 - RNA, 19 nt, Homo sapiens
  misc_RNA (1)...(19): siRNA sense strand
gcguggacgaugaauuuga

SEQ ID NO: 1221815 - RNA, 19 nt, Homo sapiens
  misc_RNA (1)...(19): siRNA sense strand
gagcagcugcaggagcaaa

SEQ ID NO: 1221816 - RNA, 19 nt, Homo sapiens
  misc_RNA (1)...(19): siRNA sense strand
cagcaccuaugccacuuuu

SEQ ID NO: 1221817 - RNA, 19 nt, Homo sapiens
  misc_RNA (1)...(19): siRNA sense strand
ggaaaugcuugacaucaug

SEQ ID NO: 1221818 - RNA, 19 nt, Homo sapiens
  misc_RNA (1)...(19): siRNA sense strand
cagcguggacgaugaauuu

SEQ ID NO: 1221819 - RNA, 19 nt, Homo sapiens
  misc_RNA (1)...(19): siRNA sense strand
gaagauggacagaaacaag

SEQ ID NO: 1221820 - RNA, 19 nt, Homo sapiens
  misc_RNA (1)...(19): siRNA sense strand
caugauggcucggucaguu

SEQ ID NO: 1221821 - RNA, 19 nt, Homo sapiens
  misc_RNA (1)...(19): siRNA sense strand
gggaacacguggagagcuu

SEQ ID NO: 1221822 - RNA, 19 nt, Homo sapiens
  misc_RNA (1)...(19): siRNA sense strand
gaaaugcuugacaucauga

SEQ ID NO: 1221823 - RNA, 19 nt, Homo sapiens
  misc_RNA (1)...(19): siRNA sense strand
ggaauucauugagucuugu

SEQ ID NO: 1221824 - RNA, 19 nt, Homo sapiens
  misc_RNA (1)...(19): siRNA sense strand
cguggacgaugaauuugaa

SEQ ID NO: 1221825 - RNA, 19 nt, Homo sapiens
  misc_RNA (1)...(19): siRNA sense strand
gaccauugaggaauucauu

SEQ ID NO: 1221826 - RNA, 19 nt, Homo sapiens
  misc_RNA (1)...(19): siRNA sense strand
gaaugucccagcggaauug

SEQ ID NO: 1221827 - RNA, 19 nt, Homo sapiens
  misc_RNA (1)...(19): siRNA sense strand
gaggaaaugcuugacauca

SEQ ID NO: 1221828 - RNA, 19 nt, Homo sapiens
  misc_RNA (1)...(19): siRNA sense strand
gauuuacucccaguucuuu

SEQ ID NO: 1221829 - RNA, 19 nt, Homo sapiens
  misc_RNA (1)...(19): siRNA sense strand
gcagauuuacucccaguuc

SEQ ID NO: 1221830 - RNA, 19 nt, Homo sapiens
  misc_RNA (1)...(19): siRNA sense strand
ucaaugaggagaacuucaa

SEQ ID NO: 1221831 - RNA, 19 nt, Homo sapiens
  misc_RNA (1)...(19): siRNA sense strand
gagaacuucaagcagauuu

SEQ ID NO: 1221832 - RNA, 19 nt, Homo sapiens
  misc_RNA (1)...(19): siRNA sense strand
ugaaguccaucuaugacau

SEQ ID NO: 1221833 - RNA, 19 nt, Homo sapiens
  misc_RNA (1)...(19): siRNA sense strand
caucaugaaguccaucuau

SEQ ID NO: 1221834 - RNA, 19 nt, Homo sapiens
  misc_RNA (1)...(19): siRNA sense strand
gaaguccaucuaugacaug

SEQ ID NO: 1221835 - RNA, 19 nt, Homo sapiens
  misc_RNA (1)...(19): siRNA sense strand
aggaauucauugagucuug

SEQ ID NO: 1221836 - RNA, 19 nt, Homo sapiens
  misc_RNA (1)...(19): siRNA sense strand
gaacuucaagcagauuuac

SEQ ID NO: 1221837 - RNA, 19 nt, Homo sapiens
  misc_RNA (1)...(19): siRNA sense strand
ccauugaggaauucauuga

SEQ ID NO: 1221838 - RNA, 19 nt, Homo sapiens
  misc_RNA (1)...(19): siRNA sense strand
gcaggagcaaaccaaauuc

SEQ ID NO: 1221839 - RNA, 19 nt, Homo sapiens
  misc_RNA (1)...(19): siRNA sense strand
cagauuuacucccaguucu

SEQ ID NO: 1221840 - RNA, 19 nt, Homo sapiens
  misc_RNA (1)...(19): siRNA sense strand
ggacagaaacaaggauggu

SEQ ID NO: 1221841 - RNA, 19 nt, Homo sapiens
  misc_RNA (1)...(19): siRNA sense strand
aggaaaugcuugacaucau

SEQ ID NO: 1221842 - RNA, 19 nt, Homo sapiens
  misc_RNA (1)...(19): siRNA sense strand
ggagaacuucaagcagauu

SEQ ID NO: 1221843 - RNA, 19 nt, Homo sapiens
  misc_RNA (1)...(19): siRNA sense strand
ugaauuguccaccgugugu

SEQ ID NO: 1221844 - RNA, 19 nt, Homo sapiens
  misc_RNA (1)...(19): siRNA sense strand
cagaagauggacagaaaca

SEQ ID NO: 1221845 - RNA, 19 nt, Homo sapiens
  misc_RNA (1)...(19): siRNA sense strand
ugcaggagcaaaccaaauu

SEQ ID NO: 1221846 - RNA, 19 nt, Homo sapiens
  misc_RNA (1)...(19): siRNA sense strand
ggugaccauugaggaauuc

SEQ ID NO: 1221847 - RNA, 19 nt, Homo sapiens
  misc_RNA (1)...(19): siRNA sense strand
agaacuucaagcagauuua

SEQ ID NO: 1221848 - RNA, 19 nt, Homo sapiens
  misc_RNA (1)...(19): siRNA sense strand
gcguggacgaugaauuuga

SEQ ID NO: 1221849 - RNA, 19 nt, Homo sapiens
  misc_RNA (1)...(19): siRNA sense strand
gagcagcugcaggagcaaa

SEQ ID NO: 1221850 - RNA, 19 nt, Homo sapiens
  misc_RNA (1)...(19): siRNA sense strand
cagcaccuaugccacuuuu

SEQ ID NO: 1221851 - RNA, 19 nt, Homo sapiens
  misc_RNA (1)...(19): siRNA sense strand
ggaaaugcuugacaucaug

SEQ ID NO: 1221852 - RNA, 19 nt, Homo sapiens
  misc_RNA (1)...(19): siRNA sense strand
cagcguggacgaugaauuu

SEQ ID NO: 1221853 - RNA, 19 nt, Homo sapiens
  misc_RNA (1)...(19): siRNA sense strand
gaagauggacagaaacaag

SEQ ID NO: 1221854 - RNA, 19 nt, Homo sapiens
  misc_RNA (1)...(19): siRNA sense strand
caugauggcucggucaguu

SEQ ID NO: 1221855 - RNA, 19 nt, Homo sapiens
  misc_RNA (1)...(19): siRNA sense strand
gggaacacguggagagcuu

SEQ ID NO: 1221856 - RNA, 19 nt, Homo sapiens
  misc_RNA (1)...(19): siRNA sense strand
gaaaugcuugacaucauga

SEQ ID NO: 1221857 - RNA, 19 nt, Homo sapiens
  misc_RNA (1)...(19): siRNA sense strand
ggaauucauugagucuugu

SEQ ID NO: 1221858 - RNA, 19 nt, Homo sapiens
  misc_RNA (1)...(19): siRNA sense strand
cguggacgaugaauuugaa

SEQ ID NO: 1221859 - RNA, 19 nt, Homo sapiens
  misc_RNA (1)...(19): siRNA sense strand
gaccauugaggaauucauu

SEQ ID NO: 1221860 - RNA, 19 nt, Homo sapiens
  misc_RNA (1)...(19): siRNA sense strand
gaaugucccagcggaauug

SEQ ID NO: 1221861 - RNA, 19 nt, Homo sapiens
  misc_RNA (1)...(19): siRNA sense strand
gaggaaaugcuugacauca

SEQ ID NO: 1221862 - RNA, 19 nt, Homo sapiens
  misc_RNA (1)...(19): siRNA sense strand
gauuuacucccaguucuuu

SEQ ID NO: 1221863 - RNA, 19 nt, Homo sapiens
  misc_RNA (1)...(19): siRNA sense strand
gcagauuuacucccaguuc

SEQ ID NO: 1221864 - RNA, 19 nt, Homo sapiens
  misc_RNA (1)...(19): siRNA sense strand
ucaaugaggagaacuucaa

SEQ ID NO: 1221865 - RNA, 19 nt, Homo sapiens
  misc_RNA (1)...(19): siRNA sense strand
gagaacuucaagcagauuu

SEQ ID NO: 1221866 - RNA, 19 nt, Homo sapiens
  misc_RNA (1)...(19): siRNA sense strand
ugaaguccaucuaugacau

SEQ ID NO: 1221867 - RNA, 19 nt, Homo sapiens
  misc_RNA (1)...(19): siRNA sense strand
caucaugaaguccaucuau

SEQ ID NO: 1221868 - RNA, 19 nt, Homo sapiens
  misc_RNA (1)...(19): siRNA sense strand
gaaguccaucuaugacaug

SEQ ID NO: 1221869 - RNA, 19 nt, Homo sapiens
  misc_RNA (1)...(19): siRNA sense strand
aggaauucauugagucuug

SEQ ID NO: 1221870 - RNA, 19 nt, Homo sapiens
  misc_RNA (1)...(19): siRNA sense strand
gaacuucaagcagauuuac

SEQ ID NO: 1221871 - RNA, 19 nt, Homo sapiens
  misc_RNA (1)...(19): siRNA sense strand
ccauugaggaauucauuga

SEQ ID NO: 1221872 - RNA, 19 nt, Homo sapiens
  misc_RNA (1)...(19): siRNA sense strand
gcaggagcaaaccaaauuc

SEQ ID NO: 1221873 - RNA, 19 nt, Homo sapiens
  misc_RNA (1)...(19): siRNA sense strand
cagauuuacucccaguucu

SEQ ID NO: 1221874 - RNA, 19 nt, Homo sapiens
  misc_RNA (1)...(19): siRNA sense strand
ggacagaaacaaggauggu

SEQ ID NO: 1221875 - RNA, 19 nt, Homo sapiens
  misc_RNA (1)...(19): siRNA sense strand
aggaaaugcuugacaucau

SEQ ID NO: 1221876 - RNA, 19 nt, Homo sapiens
  misc_RNA (1)...(19): siRNA sense strand
ggagaacuucaagcagauu

SEQ ID NO: 1221877 - RNA, 19 nt, Homo sapiens
  misc_RNA (1)...(19): siRNA sense strand
ugaauuguccaccgugugu

SEQ ID NO: 1221878 - RNA, 19 nt, Homo sapiens
  misc_RNA (1)...(19): siRNA sense strand
cagaagauggacagaaaca

SEQ ID NO: 1221879 - RNA, 19 nt, Homo sapiens
  misc_RNA (1)...(19): siRNA sense strand
ugcaggagcaaaccaaauu

SEQ ID NO: 1221880 - RNA, 19 nt, Homo sapiens
  misc_RNA (1)...(19): siRNA sense strand
ggugaccauugaggaauuc

SEQ ID NO: 1221881 - RNA, 19 nt, Homo sapiens
  misc_RNA (1)...(19): siRNA sense strand
agaacuucaagcagauuua

SEQ ID NO: 1221882 - RNA, 19 nt, Homo sapiens
  misc_RNA (1)...(19): siRNA sense strand
gcguggacgaugaauuuga

SEQ ID NO: 1221883 - RNA, 19 nt, Homo sapiens
  misc_RNA (1)...(19): siRNA sense strand
gagcagcugcaggagcaaa

SEQ ID NO: 1221884 - RNA, 19 nt, Homo sapiens
  misc_RNA (1)...(19): siRNA sense strand
cagcaccuaugccacuuuu

SEQ ID NO: 1221885 - RNA, 19 nt, Homo sapiens
  misc_RNA (1)...(19): siRNA sense strand
ggaaaugcuugacaucaug

SEQ ID NO: 1221886 - RNA, 19 nt, Homo sapiens
  misc_RNA (1)...(19): siRNA sense strand
cagcguggacgaugaauuu

SEQ ID NO: 1221887 - RNA, 19 nt, Homo sapiens
  misc_RNA (1)...(19): siRNA sense strand
gaagauggacagaaacaag

SEQ ID NO: 1221888 - RNA, 19 nt, Homo sapiens
  misc_RNA (1)...(19): siRNA sense strand
caugauggcucggucaguu

SEQ ID NO: 1221889 - RNA, 19 nt, Homo sapiens
  misc_RNA (1)...(19): siRNA sense strand
gggaacacguggagagcuu

SEQ ID NO: 1221890 - RNA, 19 nt, Homo sapiens
  misc_RNA (1)...(19): siRNA sense strand
gaaaugcuugacaucauga

SEQ ID NO: 1221891 - RNA, 19 nt, Homo sapiens
  misc_RNA (1)...(19): siRNA sense strand
ggaauucauugagucuugu

SEQ ID NO: 1221892 - RNA, 19 nt, Homo sapiens
  misc_RNA (1)...(19): siRNA sense strand
cguggacgaugaauuugaa

SEQ ID NO: 1221893 - RNA, 19 nt, Homo sapiens
  misc_RNA (1)...(19): siRNA sense strand
gaccauugaggaauucauu

SEQ ID NO: 1221894 - RNA, 19 nt, Homo sapiens
  misc_RNA (1)...(19): siRNA sense strand
gaaugucccagcggaauug

SEQ ID NO: 1221895 - RNA, 19 nt, Homo sapiens
  misc_RNA (1)...(19): siRNA sense strand
gaggaaaugcuugacauca

SEQ ID NO: 1221896 - RNA, 19 nt, Homo sapiens
  misc_RNA (1)...(19): siRNA sense strand
gauuuacucccaguucuuu

SEQ ID NO: 1221897 - RNA, 19 nt, Homo sapiens
  misc_RNA (1)...(19): siRNA sense strand
gcagauuuacucccaguuc

SEQ ID NO: 1221898 - RNA, 19 nt, Homo sapiens
  misc_RNA (1)...(19): siRNA sense strand
ucaaugaggagaacuucaa

SEQ ID NO: 1221899 - RNA, 19 nt, Homo sapiens
  misc_RNA (1)...(19): siRNA sense strand
gagaacuucaagcagauuu

SEQ ID NO: 1221900 - RNA, 19 nt, Homo sapiens
  misc_RNA (1)...(19): siRNA sense strand
ugaaguccaucuaugacau

SEQ ID NO: 1221901 - RNA, 19 nt, Homo sapiens
  misc_RNA (1)...(19): siRNA sense strand
caucaugaaguccaucuau

SEQ ID NO: 1221902 - RNA, 19 nt, Homo sapiens
  misc_RNA (1)...(19): siRNA sense strand
gaaguccaucuaugacaug

SEQ ID NO: 1221903 - RNA, 19 nt, Homo sapiens
  misc_RNA (1)...(19): siRNA sense strand
aggaauucauugagucuug

SEQ ID NO: 1221904 - RNA, 19 nt, Homo sapiens
  misc_RNA (1)...(19): siRNA sense strand
gaacuucaagcagauuuac

SEQ ID NO: 1221905 - RNA, 19 nt, Homo sapiens
  misc_RNA (1)...(19): siRNA sense strand
ccauugaggaauucauuga

SEQ ID NO: 1221906 - RNA, 19 nt, Homo sapiens
  misc_RNA (1)...(19): siRNA sense strand
gcaggagcaaaccaaauuc

SEQ ID NO: 1221907 - RNA, 19 nt, Homo sapiens
  misc_RNA (1)...(19): siRNA sense strand
cagauuuacucccaguucu

SEQ ID NO: 1221908 - RNA, 19 nt, Homo sapiens
  misc_RNA (1)...(19): siRNA sense strand
ggacagaaacaaggauggu

SEQ ID NO: 1221909 - RNA, 19 nt, Homo sapiens
  misc_RNA (1)...(19): siRNA sense strand
aggaaaugcuugacaucau

SEQ ID NO: 1221910 - RNA, 19 nt, Homo sapiens
  misc_RNA (1)...(19): siRNA sense strand
ggagaacuucaagcagauu

SEQ ID NO: 1221911 - RNA, 19 nt, Homo sapiens
  misc_RNA (1)...(19): siRNA sense strand
ugaauuguccaccgugugu

SEQ ID NO: 1221912 - RNA, 19 nt, Homo sapiens
  misc_RNA (1)...(19): siRNA sense strand
cagaagauggacagaaaca

SEQ ID NO: 1221913 - RNA, 19 nt, Homo sapiens
  misc_RNA (1)...(19): siRNA sense strand
ugcaggagcaaaccaaauu

SEQ ID NO: 1221914 - RNA, 19 nt, Homo sapiens
  misc_RNA (1)...(19): siRNA sense strand
ggugaccauugaggaauuc

SEQ ID NO: 1221915 - RNA, 19 nt, Homo sapiens
  misc_RNA (1)...(19): siRNA sense strand
agaacuucaagcagauuua

SEQ ID NO: 1221916 - RNA, 19 nt, Homo sapiens
  misc_RNA (1)...(19): siRNA sense strand
gcguggacgaugaauuuga

SEQ ID NO: 1221917 - RNA, 19 nt, Homo sapiens
  misc_RNA (1)...(19): siRNA sense strand
gagcagcugcaggagcaaa

SEQ ID NO: 1221918 - RNA, 19 nt, Homo sapiens
  misc_RNA (1)...(19): siRNA sense strand
cagcaccuaugccacuuuu

SEQ ID NO: 1221919 - RNA, 19 nt, Homo sapiens
  misc_RNA (1)...(19): siRNA sense strand
ggaaaugcuugacaucaug

SEQ ID NO: 1221920 - RNA, 19 nt, Homo sapiens
  misc_RNA (1)...(19): siRNA sense strand
cagcguggacgaugaauuu

SEQ ID NO: 1221921 - RNA, 19 nt, Homo sapiens
  misc_RNA (1)...(19): siRNA sense strand
gaagauggacagaaacaag

SEQ ID NO: 1221922 - RNA, 19 nt, Homo sapiens
  misc_RNA (1)...(19): siRNA sense strand
caugauggcucggucaguu

SEQ ID NO: 1221923 - RNA, 19 nt, Homo sapiens
  misc_RNA (1)...(19): siRNA sense strand
gggaacacguggagagcuu

SEQ ID NO: 1221924 - RNA, 19 nt, Homo sapiens
  misc_RNA (1)...(19): siRNA sense strand
gaaaugcuugacaucauga

SEQ ID NO: 1221925 - RNA, 19 nt, Homo sapiens
  misc_RNA (1)...(19): siRNA sense strand
ggaauucauugagucuugu

SEQ ID NO: 1221926 - RNA, 19 nt, Homo sapiens
  misc_RNA (1)...(19): siRNA sense strand
cguggacgaugaauuugaa

SEQ ID NO: 1221927 - RNA, 19 nt, Homo sapiens
  misc_RNA (1)...(19): siRNA sense strand
gaccauugaggaauucauu

SEQ ID NO: 1221928 - RNA, 19 nt, Homo sapiens
  misc_RNA (1)...(19): siRNA sense strand
gaaugucccagcggaauug

SEQ ID NO: 1221929 - RNA, 19 nt, Homo sapiens
  misc_RNA (1)...(19): siRNA sense strand
gaggaaaugcuugacauca

SEQ ID NO: 1221930 - RNA, 19 nt, Homo sapiens
  misc_RNA (1)...(19): siRNA sense strand
gauuuacucccaguucuuu

SEQ ID NO: 1221931 - RNA, 19 nt, Homo sapiens
  misc_RNA (1)...(19): siRNA sense strand
gcagauuuacucccaguuc

SEQ ID NO: 1221932 - RNA, 19 nt, Homo sapiens
  misc_RNA (1)...(19): siRNA sense strand
ucaaugaggagaacuucaa

SEQ ID NO: 1221933 - RNA, 19 nt, Homo sapiens
  misc_RNA (1)...(19): siRNA sense strand
gagaacuucaagcagauuu

SEQ ID NO: 1221934 - RNA, 19 nt, Homo sapiens
  misc_RNA (1)...(19): siRNA sense strand
ugaaguccaucuaugacau

SEQ ID NO: 1221935 - RNA, 19 nt, Homo sapiens
  misc_RNA (1)...(19): siRNA sense strand
caucaugaaguccaucuau

SEQ ID NO: 1221936 - RNA, 19 nt, Homo sapiens
  misc_RNA (1)...(19): siRNA sense strand
gaaguccaucuaugacaug

SEQ ID NO: 1221937 - RNA, 19 nt, Homo sapiens
  misc_RNA (1)...(19): siRNA sense strand
aggaauucauugagucuug

SEQ ID NO: 1221938 - RNA, 19 nt, Homo sapiens
  misc_RNA (1)...(19): siRNA sense strand
gaacuucaagcagauuuac

SEQ ID NO: 1221939 - RNA, 19 nt, Homo sapiens
  misc_RNA (1)...(19): siRNA sense strand
ccauugaggaauucauuga

SEQ ID NO: 1221940 - RNA, 19 nt, Homo sapiens
  misc_RNA (1)...(19): siRNA sense strand
gcaggagcaaaccaaauuc

SEQ ID NO: 1221941 - RNA, 19 nt, Homo sapiens
  misc_RNA (1)...(19): siRNA sense strand
cagauuuacucccaguucu

SEQ ID NO: 1221942 - RNA, 19 nt, Homo sapiens
  misc_RNA (1)...(19): siRNA sense strand
ggacagaaacaaggauggu

SEQ ID NO: 1221943 - RNA, 19 nt, Homo sapiens
  misc_RNA (1)...(19): siRNA sense strand
aggaaaugcuugacaucau

SEQ ID NO: 1221944 - RNA, 19 nt, Homo sapiens
  misc_RNA (1)...(19): siRNA sense strand
ggagaacuucaagcagauu

SEQ ID NO: 1221945 - RNA, 19 nt, Homo sapiens
  misc_RNA (1)...(19): siRNA sense strand
ugaauuguccaccgugugu

SEQ ID NO: 1221946 - RNA, 19 nt, Homo sapiens
  misc_RNA (1)...(19): siRNA sense strand
cagaagauggacagaaaca

SEQ ID NO: 1221947 - RNA, 19 nt, Homo sapiens
  misc_RNA (1)...(19): siRNA sense strand
ugcaggagcaaaccaaauu

SEQ ID NO: 1221948 - RNA, 19 nt, Homo sapiens
  misc_RNA (1)...(19): siRNA sense strand
ggugaccauugaggaauuc

SEQ ID NO: 1221949 - RNA, 19 nt, Homo sapiens
  misc_RNA (1)...(19): siRNA sense strand
agaacuucaagcagauuua

SEQ ID NO: 1221950 - RNA, 19 nt, Homo sapiens
  misc_RNA (1)...(19): siRNA sense strand
gcguggacgaugaauuuga

SEQ ID NO: 1221951 - RNA, 19 nt, Homo sapiens
  misc_RNA (1)...(19): siRNA sense strand
gagcagcugcaggagcaaa

SEQ ID NO: 1221952 - RNA, 19 nt, Homo sapiens
  misc_RNA (1)...(19): siRNA sense strand
cagcaccuaugccacuuuu

SEQ ID NO: 1221953 - RNA, 19 nt, Homo sapiens
  misc_RNA (1)...(19): siRNA sense strand
ggaaaugcuugacaucaug

SEQ ID NO: 1221954 - RNA, 19 nt, Homo sapiens
  misc_RNA (1)...(19): siRNA sense strand
cagcguggacgaugaauuu

SEQ ID NO: 1221955 - RNA, 19 nt, Homo sapiens
  misc_RNA (1)...(19): siRNA sense strand
gaagauggacagaaacaag

SEQ ID NO: 1221956 - RNA, 19 nt, Homo sapiens
  misc_RNA (1)...(19): siRNA sense strand
caugauggcucggucaguu

SEQ ID NO: 1221957 - RNA, 19 nt, Homo sapiens
  misc_RNA (1)...(19): siRNA sense strand
gggaacacguggagagcuu

SEQ ID NO: 1221958 - RNA, 19 nt, Homo sapiens
  misc_RNA (1)...(19): siRNA sense strand
gaaaugcuugacaucauga

SEQ ID NO: 1221959 - RNA, 19 nt, Homo sapiens
  misc_RNA (1)...(19): siRNA sense strand
ggaauucauugagucuugu

SEQ ID NO: 1221960 - RNA, 19 nt, Homo sapiens
  misc_RNA (1)...(19): siRNA sense strand
cguggacgaugaauuugaa

SEQ ID NO: 1221961 - RNA, 19 nt, Homo sapiens
  misc_RNA (1)...(19): siRNA sense strand
gaccauugaggaauucauu

SEQ ID NO: 1221962 - RNA, 19 nt, Homo sapiens
  misc_RNA (1)...(19): siRNA sense strand
gaaugucccagcggaauug

SEQ ID NO: 1221963 - RNA, 19 nt, Homo sapiens
  misc_RNA (1)...(19): siRNA sense strand
gaggaaaugcuugacauca

SEQ ID NO: 1221964 - RNA, 19 nt, Homo sapiens
  misc_RNA (1)...(19): siRNA sense strand
gauuuacucccaguucuuu

SEQ ID NO: 1221965 - RNA, 19 nt, Homo sapiens
  misc_RNA (1)...(19): siRNA sense strand
gcagauuuacucccaguuc

SEQ ID NO: 1221966 - RNA, 19 nt, Homo sapiens
  misc_RNA (1)...(19): siRNA sense strand
ucaaugaggagaacuucaa

SEQ ID NO: 1221967 - RNA, 19 nt, Homo sapiens
  misc_RNA (1)...(19): siRNA sense strand
gagaacuucaagcagauuu

SEQ ID NO: 1221968 - RNA, 19 nt, Homo sapiens
  misc_RNA (1)...(19): siRNA sense strand
ugaaguccaucuaugacau

SEQ ID NO: 1221969 - RNA, 19 nt, Homo sapiens
  misc_RNA (1)...(19): siRNA sense strand
caucaugaaguccaucuau

SEQ ID NO: 1221970 - RNA, 19 nt, Homo sapiens
  misc_RNA (1)...(19): siRNA sense strand
gaaguccaucuaugacaug

SEQ ID NO: 1221971 - RNA, 19 nt, Homo sapiens
  misc_RNA (1)...(19): siRNA sense strand
aggaauucauugagucuug

SEQ ID NO: 1221972 - RNA, 19 nt, Homo sapiens
  misc_RNA (1)...(19): siRNA sense strand
gaacuucaagcagauuuac

SEQ ID NO: 1221973 - RNA, 19 nt, Homo sapiens
  misc_RNA (1)...(19): siRNA sense strand
ccauugaggaauucauuga

SEQ ID NO: 1221974 - RNA, 19 nt, Homo sapiens
  misc_RNA (1)...(19): siRNA sense strand
gcaggagcaaaccaaauuc

SEQ ID NO: 1221975 - RNA, 19 nt, Homo sapiens
  misc_RNA (1)...(19): siRNA sense strand
cagauuuacucccaguucu

SEQ ID NO: 1221976 - RNA, 19 nt, Homo sapiens
  misc_RNA (1)...(19): siRNA sense strand
ggacagaaacaaggauggu

SEQ ID NO: 1221977 - RNA, 19 nt, Homo sapiens
  misc_RNA (1)...(19): siRNA sense strand
aggaaaugcuugacaucau

SEQ ID NO: 1221978 - RNA, 19 nt, Homo sapiens
  misc_RNA (1)...(19): siRNA sense strand
ggagaacuucaagcagauu

SEQ ID NO: 1221979 - RNA, 19 nt, Homo sapiens
  misc_RNA (1)...(19): siRNA sense strand
ugaauuguccaccgugugu

SEQ ID NO: 1221980 - RNA, 19 nt, Homo sapiens
  misc_RNA (1)...(19): siRNA sense strand
cagaagauggacagaaaca

SEQ ID NO: 1221981 - RNA, 19 nt, Homo sapiens
  misc_RNA (1)...(19): siRNA sense strand
ugcaggagcaaaccaaauu

SEQ ID NO: 1221982 - RNA, 19 nt, Homo sapiens
  misc_RNA (1)...(19): siRNA sense strand
ggugaccauugaggaauuc

SEQ ID NO: 1221983 - RNA, 19 nt, Homo sapiens
  misc_RNA (1)...(19): siRNA sense strand
agaacuucaagcagauuua

SEQ ID NO: 1221984 - RNA, 19 nt, Homo sapiens
  misc_RNA (1)...(19): siRNA sense strand
gcguggacgaugaauuuga

SEQ ID NO: 1221985 - RNA, 19 nt, Homo sapiens
  misc_RNA (1)...(19): siRNA sense strand
gagcagcugcaggagcaaa

SEQ ID NO: 1221986 - RNA, 19 nt, Homo sapiens
  misc_RNA (1)...(19): siRNA sense strand
cagcaccuaugccacuuuu

SEQ ID NO: 1221987 - RNA, 19 nt, Homo sapiens
  misc_RNA (1)...(19): siRNA sense strand
ggaaaugcuugacaucaug

SEQ ID NO: 1221988 - RNA, 19 nt, Homo sapiens
  misc_RNA (1)...(19): siRNA sense strand
cagcguggacgaugaauuu

SEQ ID NO: 1221989 - RNA, 19 nt, Homo sapiens
  misc_RNA (1)...(19): siRNA sense strand
gaagauggacagaaacaag

SEQ ID NO: 1221990 - RNA, 19 nt, Homo sapiens
  misc_RNA (1)...(19): siRNA sense strand
caugauggcucggucaguu

SEQ ID NO: 1221991 - RNA, 19 nt, Homo sapiens
  misc_RNA (1)...(19): siRNA sense strand
gggaacacguggagagcuu

SEQ ID NO: 1221992 - RNA, 19 nt, Homo sapiens
  misc_RNA (1)...(19): siRNA sense strand
gaaaugcuugacaucauga

SEQ ID NO: 1221993 - RNA, 19 nt, Homo sapiens
  misc_RNA (1)...(19): siRNA sense strand
ggaauucauugagucuugu

SEQ ID NO: 1221994 - RNA, 19 nt, Homo sapiens
  misc_RNA (1)...(19): siRNA sense strand
cguggacgaugaauuugaa

SEQ ID NO: 1221995 - RNA, 19 nt, Homo sapiens
  misc_RNA (1)...(19): siRNA sense strand
gaccauugaggaauucauu

SEQ ID NO: 1221996 - RNA, 19 nt, Homo sapiens
  misc_RNA (1)...(19): siRNA sense strand
gaaugucccagcggaauug

SEQ ID NO: 1221997 - RNA, 19 nt, Homo sapiens
  misc_RNA (1)...(19): siRNA sense strand
gaggaaaugcuugacauca

SEQ ID NO: 1221998 - RNA, 19 nt, Homo sapiens
  misc_RNA (1)...(19): siRNA sense strand
gauuuacucccaguucuuu

SEQ ID NO: 1221999 - RNA, 19 nt, Homo sapiens
  misc_RNA (1)...(19): siRNA sense strand
gcagauuuacucccaguuc

SEQ ID NO: 1222000 - RNA, 19 nt, Homo sapiens
  misc_RNA (1)...(19): siRNA sense strand
ucaaugaggagaacuucaa

SEQ ID NO: 1222001 - RNA, 19 nt, Homo sapiens
  misc_RNA (1)...(19): siRNA sense strand
gagaacuucaagcagauuu

SEQ ID NO: 1222002 - RNA, 19 nt, Homo sapiens
  misc_RNA (1)...(19): siRNA sense strand
ugaaguccaucuaugacau

SEQ ID NO: 1222003 - RNA, 19 nt, Homo sapiens
  misc_RNA (1)...(19): siRNA sense strand
caucaugaaguccaucuau

SEQ ID NO: 1222004 - RNA, 19 nt, Homo sapiens
  misc_RNA (1)...(19): siRNA sense strand
gaaguccaucuaugacaug

SEQ ID NO: 1222005 - RNA, 19 nt, Homo sapiens
  misc_RNA (1)...(19): siRNA sense strand
aggaauucauugagucuug

SEQ ID NO: 1222006 - RNA, 19 nt, Homo sapiens
  misc_RNA (1)...(19): siRNA sense strand
gaacuucaagcagauuuac

SEQ ID NO: 1222007 - RNA, 19 nt, Homo sapiens
  misc_RNA (1)...(19): siRNA sense strand
ccauugaggaauucauuga

SEQ ID NO: 1222008 - RNA, 19 nt, Homo sapiens
  misc_RNA (1)...(19): siRNA sense strand
gcaggagcaaaccaaauuc

SEQ ID NO: 1222009 - RNA, 19 nt, Homo sapiens
  misc_RNA (1)...(19): siRNA sense strand
cagauuuacucccaguucu

SEQ ID NO: 1222010 - RNA, 19 nt, Homo sapiens
  misc_RNA (1)...(19): siRNA sense strand
ggacagaaacaaggauggu

SEQ ID NO: 1222011 - RNA, 19 nt, Homo sapiens
  misc_RNA (1)...(19): siRNA sense strand
aggaaaugcuugacaucau

SEQ ID NO: 1222012 - RNA, 19 nt, Homo sapiens
  misc_RNA (1)...(19): siRNA sense strand
ggagaacuucaagcagauu

SEQ ID NO: 1222013 - RNA, 19 nt, Homo sapiens
  misc_RNA (1)...(19): siRNA sense strand
ugaauuguccaccgugugu

SEQ ID NO: 1222014 - RNA, 19 nt, Homo sapiens
  misc_RNA (1)...(19): siRNA sense strand
cagaagauggacagaaaca

SEQ ID NO: 1222015 - RNA, 19 nt, Homo sapiens
  misc_RNA (1)...(19): siRNA sense strand
ugcaggagcaaaccaaauu

SEQ ID NO: 1222016 - RNA, 19 nt, Homo sapiens
  misc_RNA (1)...(19): siRNA sense strand
ggugaccauugaggaauuc

SEQ ID NO: 1222017 - RNA, 19 nt, Homo sapiens
  misc_RNA (1)...(19): siRNA sense strand
agaacuucaagcagauuua

SEQ ID NO: 1222018 - RNA, 19 nt, Homo sapiens
  misc_RNA (1)...(19): siRNA sense strand
gcguggacgaugaauuuga

SEQ ID NO: 1222019 - RNA, 19 nt, Homo sapiens
  misc_RNA (1)...(19): siRNA sense strand
gagcagcugcaggagcaaa

SEQ ID NO: 1222020 - RNA, 19 nt, Homo sapiens
  misc_RNA (1)...(19): siRNA sense strand
cagcaccuaugccacuuuu

SEQ ID NO: 1222021 - RNA, 19 nt, Homo sapiens
  misc_RNA (1)...(19): siRNA sense strand
cagcguggacgaugaauuu

SEQ ID NO: 1222022 - RNA, 19 nt, Homo sapiens
  misc_RNA (1)...(19): siRNA sense strand
cguggacgaugaauuugaa

SEQ ID NO: 1222023 - RNA, 19 nt, Homo sapiens
  misc_RNA (1)...(19): siRNA sense strand
gaaugucccagcggaauug

SEQ ID NO: 1222024 - RNA, 19 nt, Homo sapiens
  misc_RNA (1)...(19): siRNA sense strand
gcaggagcaaaccaaauuc

SEQ ID NO: 1222025 - RNA, 19 nt, Homo sapiens
  misc_RNA (1)...(19): siRNA sense strand
ugaauuguccaccgugugu

SEQ ID NO: 1222026 - RNA, 19 nt, Homo sapiens
  misc_RNA (1)...(19): siRNA sense strand
ugcaggagcaaaccaaauu

SEQ ID NO: 1222027 - RNA, 19 nt, Homo sapiens
  misc_RNA (1)...(19): siRNA sense strand
gcguggacgaugaauuuga

SEQ ID NO: 1222028 - RNA, 19 nt, Homo sapiens
  misc_RNA (1)...(19): siRNA sense strand
gagcagcugcaggagcaaa

SEQ ID NO: 1222029 - RNA, 19 nt, Homo sapiens
  misc_RNA (1)...(19): siRNA sense strand
ggaaaugcuugacaucaug

SEQ ID NO: 1222030 - RNA, 19 nt, Homo sapiens
  misc_RNA (1)...(19): siRNA sense strand
cagcguggacgaugaauuu

SEQ ID NO: 1222031 - RNA, 19 nt, Homo sapiens
  misc_RNA (1)...(19): siRNA sense strand
gaagauggacagaaacaag

SEQ ID NO: 1222032 - RNA, 19 nt, Homo sapiens
  misc_RNA (1)...(19): siRNA sense strand
caugauggcucggucaguu

SEQ ID NO: 1222033 - RNA, 19 nt, Homo sapiens
  misc_RNA (1)...(19): siRNA sense strand
gggaacacguggagagcuu

SEQ ID NO: 1222034 - RNA, 19 nt, Homo sapiens
  misc_RNA (1)...(19): siRNA sense strand
gaaaugcuugacaucauga

SEQ ID NO: 1222035 - RNA, 19 nt, Homo sapiens
  misc_RNA (1)...(19): siRNA sense strand
ggaauucauugagucuugu

SEQ ID NO: 1222036 - RNA, 19 nt, Homo sapiens
  misc_RNA (1)...(19): siRNA sense strand
cguggacgaugaauuugaa

SEQ ID NO: 1222037 - RNA, 19 nt, Homo sapiens
  misc_RNA (1)...(19): siRNA sense strand
gaccauugaggaauucauu

SEQ ID NO: 1222038 - RNA, 19 nt, Homo sapiens
  misc_RNA (1)...(19): siRNA sense strand
gaaugucccagcggaauug

SEQ ID NO: 1222039 - RNA, 19 nt, Homo sapiens
  misc_RNA (1)...(19): siRNA sense strand
gaggaaaugcuugacauca

SEQ ID NO: 1222040 - RNA, 19 nt, Homo sapiens
  misc_RNA (1)...(19): siRNA sense strand
gauuuacucccaguucuuu

SEQ ID NO: 1222041 - RNA, 19 nt, Homo sapiens
  misc_RNA (1)...(19): siRNA sense strand
gcagauuuacucccaguuc

SEQ ID NO: 1222042 - RNA, 19 nt, Homo sapiens
  misc_RNA (1)...(19): siRNA sense strand
ucaaugaggagaacuucaa

SEQ ID NO: 1222043 - RNA, 19 nt, Homo sapiens
  misc_RNA (1)...(19): siRNA sense strand
gagaacuucaagcagauuu

SEQ ID NO: 1222044 - RNA, 19 nt, Homo sapiens
  misc_RNA (1)...(19): siRNA sense strand
ugaaguccaucuaugacau

SEQ ID NO: 1222045 - RNA, 19 nt, Homo sapiens
  misc_RNA (1)...(19): siRNA sense strand
caucaugaaguccaucuau

SEQ ID NO: 1222046 - RNA, 19 nt, Homo sapiens
  misc_RNA (1)...(19): siRNA sense strand
gaaguccaucuaugacaug

SEQ ID NO: 1222047 - RNA, 19 nt, Homo sapiens
  misc_RNA (1)...(19): siRNA sense strand
aggaauucauugagucuug

SEQ ID NO: 1222048 - RNA, 19 nt, Homo sapiens
  misc_RNA (1)...(19): siRNA sense strand
gaacuucaagcagauuuac

SEQ ID NO: 1222049 - RNA, 19 nt, Homo sapiens
  misc_RNA (1)...(19): siRNA sense strand
ccauugaggaauucauuga

SEQ ID NO: 1222050 - RNA, 19 nt, Homo sapiens
  misc_RNA (1)...(19): siRNA sense strand
gcaggagcaaaccaaauuc

SEQ ID NO: 1222051 - RNA, 19 nt, Homo sapiens
  misc_RNA (1)...(19): siRNA sense strand
cagauuuacucccaguucu

SEQ ID NO: 1222052 - RNA, 19 nt, Homo sapiens
  misc_RNA (1)...(19): siRNA sense strand
ggacagaaacaaggauggu

SEQ ID NO: 1222053 - RNA, 19 nt, Homo sapiens
  misc_RNA (1)...(19): siRNA sense strand
aggaaaugcuugacaucau

SEQ ID NO: 1222054 - RNA, 19 nt, Homo sapiens
  misc_RNA (1)...(19): siRNA sense strand
ggagaacuucaagcagauu

SEQ ID NO: 1222055 - RNA, 19 nt, Homo sapiens
  misc_RNA (1)...(19): siRNA sense strand
ugaauuguccaccgugugu

SEQ ID NO: 1222056 - RNA, 19 nt, Homo sapiens
  misc_RNA (1)...(19): siRNA sense strand
cagaagauggacagaaaca

SEQ ID NO: 1222057 - RNA, 19 nt, Homo sapiens
  misc_RNA (1)...(19): siRNA sense strand
ugcaggagcaaaccaaauu

SEQ ID NO: 1222058 - RNA, 19 nt, Homo sapiens
  misc_RNA (1)...(19): siRNA sense strand
ggugaccauugaggaauuc

SEQ ID NO: 1222059 - RNA, 19 nt, Homo sapiens
  misc_RNA (1)...(19): siRNA sense strand
agaacuucaagcagauuua

SEQ ID NO: 1222060 - RNA, 19 nt, Homo sapiens
  misc_RNA (1)...(19): siRNA sense strand
gcguggacgaugaauuuga

SEQ ID NO: 1222061 - RNA, 19 nt, Homo sapiens
  misc_RNA (1)...(19): siRNA sense strand
gagcagcugcaggagcaaa

SEQ ID NO: 1222062 - RNA, 19 nt, Homo sapiens
  misc_RNA (1)...(19): siRNA sense strand
cagcaccuaugccacuuuu

SEQ ID NO: 1222063 - RNA, 19 nt, Homo sapiens
  misc_RNA (1)...(19): siRNA sense strand
ggaaaugcuugacaucaug

SEQ ID NO: 1222064 - RNA, 19 nt, Homo sapiens
  misc_RNA (1)...(19): siRNA sense strand
cagcguggacgaugaauuu

SEQ ID NO: 1222065 - RNA, 19 nt, Homo sapiens
  misc_RNA (1)...(19): siRNA sense strand
gaagauggacagaaacaag

SEQ ID NO: 1222066 - RNA, 19 nt, Homo sapiens
  misc_RNA (1)...(19): siRNA sense strand
caugauggcucggucaguu

SEQ ID NO: 1222067 - RNA, 19 nt, Homo sapiens
  misc_RNA (1)...(19): siRNA sense strand
gggaacacguggagagcuu

SEQ ID NO: 1222068 - RNA, 19 nt, Homo sapiens
  misc_RNA (1)...(19): siRNA sense strand
gaaaugcuugacaucauga

SEQ ID NO: 1222069 - RNA, 19 nt, Homo sapiens
  misc_RNA (1)...(19): siRNA sense strand
ggaauucauugagucuugu

SEQ ID NO: 1222070 - RNA, 19 nt, Homo sapiens
  misc_RNA (1)...(19): siRNA sense strand
cguggacgaugaauuugaa

SEQ ID NO: 1222071 - RNA, 19 nt, Homo sapiens
  misc_RNA (1)...(19): siRNA sense strand
gaccauugaggaauucauu

SEQ ID NO: 1222072 - RNA, 19 nt, Homo sapiens
  misc_RNA (1)...(19): siRNA sense strand
gaaugucccagcggaauug

SEQ ID NO: 1222073 - RNA, 19 nt, Homo sapiens
  misc_RNA (1)...(19): siRNA sense strand
gaggaaaugcuugacauca

SEQ ID NO: 1222074 - RNA, 19 nt, Homo sapiens
  misc_RNA (1)...(19): siRNA sense strand
gauuuacucccaguucuuu

SEQ ID NO: 1222075 - RNA, 19 nt, Homo sapiens
  misc_RNA (1)...(19): siRNA sense strand
gcagauuuacucccaguuc

SEQ ID NO: 1222076 - RNA, 19 nt, Homo sapiens
  misc_RNA (1)...(19): siRNA sense strand
ucaaugaggagaacuucaa

SEQ ID NO: 1222077 - RNA, 19 nt, Homo sapiens
  misc_RNA (1)...(19): siRNA sense strand
gagaacuucaagcagauuu

SEQ ID NO: 1222078 - RNA, 19 nt, Homo sapiens
  misc_RNA (1)...(19): siRNA sense strand
ugaaguccaucuaugacau

SEQ ID NO: 1222079 - RNA, 19 nt, Homo sapiens
  misc_RNA (1)...(19): siRNA sense strand
caucaugaaguccaucuau

SEQ ID NO: 1222080 - RNA, 19 nt, Homo sapiens
  misc_RNA (1)...(19): siRNA sense strand
gaaguccaucuaugacaug

SEQ ID NO: 1222081 - RNA, 19 nt, Homo sapiens
  misc_RNA (1)...(19): siRNA sense strand
aggaauucauugagucuug

SEQ ID NO: 1222082 - RNA, 19 nt, Homo sapiens
  misc_RNA (1)...(19): siRNA sense strand
gaacuucaagcagauuuac

SEQ ID NO: 1222083 - RNA, 19 nt, Homo sapiens
  misc_RNA (1)...(19): siRNA sense strand
ccauugaggaauucauuga

SEQ ID NO: 1222084 - RNA, 19 nt, Homo sapiens
  misc_RNA (1)...(19): siRNA sense strand
gcaggagcaaaccaaauuc

SEQ ID NO: 1222085 - RNA, 19 nt, Homo sapiens
  misc_RNA (1)...(19): siRNA sense strand
cagauuuacucccaguucu

SEQ ID NO: 1222086 - RNA, 19 nt, Homo sapiens
  misc_RNA (1)...(19): siRNA sense strand
ggacagaaacaaggauggu

SEQ ID NO: 1222087 - RNA, 19 nt, Homo sapiens
  misc_RNA (1)...(19): siRNA sense strand
aggaaaugcuugacaucau

SEQ ID NO: 1222088 - RNA, 19 nt, Homo sapiens
  misc_RNA (1)...(19): siRNA sense strand
ggagaacuucaagcagauu

SEQ ID NO: 1222089 - RNA, 19 nt, Homo sapiens
  misc_RNA (1)...(19): siRNA sense strand
ugaauuguccaccgugugu

SEQ ID NO: 1222090 - RNA, 19 nt, Homo sapiens
  misc_RNA (1)...(19): siRNA sense strand
cagaagauggacagaaaca

SEQ ID NO: 1222091 - RNA, 19 nt, Homo sapiens
  misc_RNA (1)...(19): siRNA sense strand
ugcaggagcaaaccaaauu

SEQ ID NO: 1222092 - RNA, 19 nt, Homo sapiens
  misc_RNA (1)...(19): siRNA sense strand
ggugaccauugaggaauuc

SEQ ID NO: 1222093 - RNA, 19 nt, Homo sapiens
  misc_RNA (1)...(19): siRNA sense strand
agaacuucaagcagauuua

SEQ ID NO: 1222094 - RNA, 19 nt, Homo sapiens
  misc_RNA (1)...(19): siRNA sense strand
gcguggacgaugaauuuga

SEQ ID NO: 1222095 - RNA, 19 nt, Homo sapiens
  misc_RNA (1)...(19): siRNA sense strand
gagcagcugcaggagcaaa

SEQ ID NO: 1222096 - RNA, 19 nt, Homo sapiens
  misc_RNA (1)...(19): siRNA sense strand
cagcaccuaugccacuuuu

SEQ ID NO: 1222097 - RNA, 19 nt, Homo sapiens
  misc_RNA (1)...(19): siRNA sense strand
ggaaaugcuugacaucaug

SEQ ID NO: 1222098 - RNA, 19 nt, Homo sapiens
  misc_RNA (1)...(19): siRNA sense strand
cagcguggacgaugaauuu

SEQ ID NO: 1222099 - RNA, 19 nt, Homo sapiens
  misc_RNA (1)...(19): siRNA sense strand
gaagauggacagaaacaag

SEQ ID NO: 1222100 - RNA, 19 nt, Homo sapiens
  misc_RNA (1)...(19): siRNA sense strand
caugauggcucggucaguu

SEQ ID NO: 1222101 - RNA, 19 nt, Homo sapiens
  misc_RNA (1)...(19): siRNA sense strand
gggaacacguggagagcuu

SEQ ID NO: 1222102 - RNA, 19 nt, Homo sapiens
  misc_RNA (1)...(19): siRNA sense strand
gaaaugcuugacaucauga

SEQ ID NO: 1222103 - RNA, 19 nt, Homo sapiens
  misc_RNA (1)...(19): siRNA sense strand
ggaauucauugagucuugu

SEQ ID NO: 1222104 - RNA, 19 nt, Homo sapiens
  misc_RNA (1)...(19): siRNA sense strand
cguggacgaugaauuugaa

SEQ ID NO: 1222105 - RNA, 19 nt, Homo sapiens
  misc_RNA (1)...(19): siRNA sense strand
gaccauugaggaauucauu

SEQ ID NO: 1222106 - RNA, 19 nt, Homo sapiens
  misc_RNA (1)...(19): siRNA sense strand
gaaugucccagcggaauug

SEQ ID NO: 1222107 - RNA, 19 nt, Homo sapiens
  misc_RNA (1)...(19): siRNA sense strand
gaggaaaugcuugacauca

SEQ ID NO: 1222108 - RNA, 19 nt, Homo sapiens
  misc_RNA (1)...(19): siRNA sense strand
gauuuacucccaguucuuu

SEQ ID NO: 1222109 - RNA, 19 nt, Homo sapiens
  misc_RNA (1)...(19): siRNA sense strand
gcagauuuacucccaguuc

SEQ ID NO: 1222110 - RNA, 19 nt, Homo sapiens
  misc_RNA (1)...(19): siRNA sense strand
ucaaugaggagaacuucaa

SEQ ID NO: 1222111 - RNA, 19 nt, Homo sapiens
  misc_RNA (1)...(19): siRNA sense strand
gagaacuucaagcagauuu

SEQ ID NO: 1222112 - RNA, 19 nt, Homo sapiens
  misc_RNA (1)...(19): siRNA sense strand
ugaaguccaucuaugacau

SEQ ID NO: 1222113 - RNA, 19 nt, Homo sapiens
  misc_RNA (1)...(19): siRNA sense strand
caucaugaaguccaucuau

SEQ ID NO: 1222114 - RNA, 19 nt, Homo sapiens
  misc_RNA (1)...(19): siRNA sense strand
gaaguccaucuaugacaug

SEQ ID NO: 1222115 - RNA, 19 nt, Homo sapiens
  misc_RNA (1)...(19): siRNA sense strand
aggaauucauugagucuug

SEQ ID NO: 1222116 - RNA, 19 nt, Homo sapiens
  misc_RNA (1)...(19): siRNA sense strand
gaacuucaagcagauuuac

SEQ ID NO: 1222117 - RNA, 19 nt, Homo sapiens
  misc_RNA (1)...(19): siRNA sense strand
ccauugaggaauucauuga

SEQ ID NO: 1222118 - RNA, 19 nt, Homo sapiens
  misc_RNA (1)...(19): siRNA sense strand
gcaggagcaaaccaaauuc

SEQ ID NO: 1222119 - RNA, 19 nt, Homo sapiens
  misc_RNA (1)...(19): siRNA sense strand
cagauuuacucccaguucu

SEQ ID NO: 1222120 - RNA, 19 nt, Homo sapiens
  misc_RNA (1)...(19): siRNA sense strand
ggacagaaacaaggauggu

SEQ ID NO: 1222121 - RNA, 19 nt, Homo sapiens
  misc_RNA (1)...(19): siRNA sense strand
aggaaaugcuugacaucau

SEQ ID NO: 1222122 - RNA, 19 nt, Homo sapiens
  misc_RNA (1)...(19): siRNA sense strand
ggagaacuucaagcagauu

SEQ ID NO: 1222123 - RNA, 19 nt, Homo sapiens
  misc_RNA (1)...(19): siRNA sense strand
ugaauuguccaccgugugu

SEQ ID NO: 1222124 - RNA, 19 nt, Homo sapiens
  misc_RNA (1)...(19): siRNA sense strand
cagaagauggacagaaaca

SEQ ID NO: 1222125 - RNA, 19 nt, Homo sapiens
  misc_RNA (1)...(19): siRNA sense strand
ugcaggagcaaaccaaauu

SEQ ID NO: 1222126 - RNA, 19 nt, Homo sapiens
  misc_RNA (1)...(19): siRNA sense strand
ggugaccauugaggaauuc

SEQ ID NO: 1222127 - RNA, 19 nt, Homo sapiens
  misc_RNA (1)...(19): siRNA sense strand
agaacuucaagcagauuua

SEQ ID NO: 1222128 - RNA, 19 nt, Homo sapiens
  misc_RNA (1)...(19): siRNA sense strand
gcguggacgaugaauuuga

SEQ ID NO: 1222129 - RNA, 19 nt, Homo sapiens
  misc_RNA (1)...(19): siRNA sense strand
gagcagcugcaggagcaaa

SEQ ID NO: 1222130 - RNA, 19 nt, Homo sapiens
  misc_RNA (1)...(19): siRNA sense strand
cagcaccuaugccacuuuu

SEQ ID NO: 1222131 - RNA, 19 nt, Homo sapiens
  misc_RNA (1)...(19): siRNA sense strand
ggaaaugcuugacaucaug

SEQ ID NO: 1222132 - RNA, 19 nt, Homo sapiens
  misc_RNA (1)...(19): siRNA sense strand
cagcguggacgaugaauuu

SEQ ID NO: 1222133 - RNA, 19 nt, Homo sapiens
  misc_RNA (1)...(19): siRNA sense strand
gaagauggacagaaacaag

SEQ ID NO: 1222134 - RNA, 19 nt, Homo sapiens
  misc_RNA (1)...(19): siRNA sense strand
caugauggcucggucaguu

SEQ ID NO: 1222135 - RNA, 19 nt, Homo sapiens
  misc_RNA (1)...(19): siRNA sense strand
gggaacacguggagagcuu

SEQ ID NO: 1222136 - RNA, 19 nt, Homo sapiens
  misc_RNA (1)...(19): siRNA sense strand
gaaaugcuugacaucauga

SEQ ID NO: 1222137 - RNA, 19 nt, Homo sapiens
  misc_RNA (1)...(19): siRNA sense strand
ggaauucauugagucuugu

SEQ ID NO: 1222138 - RNA, 19 nt, Homo sapiens
  misc_RNA (1)...(19): siRNA sense strand
cguggacgaugaauuugaa

SEQ ID NO: 1222139 - RNA, 19 nt, Homo sapiens
  misc_RNA (1)...(19): siRNA sense strand
gaccauugaggaauucauu

SEQ ID NO: 1222140 - RNA, 19 nt, Homo sapiens
  misc_RNA (1)...(19): siRNA sense strand
gaaugucccagcggaauug

SEQ ID NO: 1222141 - RNA, 19 nt, Homo sapiens
  misc_RNA (1)...(19): siRNA sense strand
gaggaaaugcuugacauca

SEQ ID NO: 1222142 - RNA, 19 nt, Homo sapiens
  misc_RNA (1)...(19): siRNA sense strand
gauuuacucccaguucuuu

SEQ ID NO: 1222143 - RNA, 19 nt, Homo sapiens
  misc_RNA (1)...(19): siRNA sense strand
gcagauuuacucccaguuc

SEQ ID NO: 1222144 - RNA, 19 nt, Homo sapiens
  misc_RNA (1)...(19): siRNA sense strand
ucaaugaggagaacuucaa

SEQ ID NO: 1222145 - RNA, 19 nt, Homo sapiens
  misc_RNA (1)...(19): siRNA sense strand
gagaacuucaagcagauuu

SEQ ID NO: 1222146 - RNA, 19 nt, Homo sapiens
  misc_RNA (1)...(19): siRNA sense strand
ugaaguccaucuaugacau

SEQ ID NO: 1222147 - RNA, 19 nt, Homo sapiens
  misc_RNA (1)...(19): siRNA sense strand
caucaugaaguccaucuau

SEQ ID NO: 1222148 - RNA, 19 nt, Homo sapiens
  misc_RNA (1)...(19): siRNA sense strand
gaaguccaucuaugacaug

SEQ ID NO: 1222149 - RNA, 19 nt, Homo sapiens
  misc_RNA (1)...(19): siRNA sense strand
aggaauucauugagucuug

SEQ ID NO: 1222150 - RNA, 19 nt, Homo sapiens
  misc_RNA (1)...(19): siRNA sense strand
gaacuucaagcagauuuac

SEQ ID NO: 1222151 - RNA, 19 nt, Homo sapiens
  misc_RNA (1)...(19): siRNA sense strand
ccauugaggaauucauuga

SEQ ID NO: 1222152 - RNA, 19 nt, Homo sapiens
  misc_RNA (1)...(19): siRNA sense strand
gcaggagcaaaccaaauuc

SEQ ID NO: 1222153 - RNA, 19 nt, Homo sapiens
  misc_RNA (1)...(19): siRNA sense strand
cagauuuacucccaguucu

SEQ ID NO: 1222154 - RNA, 19 nt, Homo sapiens
  misc_RNA (1)...(19): siRNA sense strand
ggacagaaacaaggauggu

SEQ ID NO: 1222155 - RNA, 19 nt, Homo sapiens
  misc_RNA (1)...(19): siRNA sense strand
aggaaaugcuugacaucau

SEQ ID NO: 1222156 - RNA, 19 nt, Homo sapiens
  misc_RNA (1)...(19): siRNA sense strand
ggagaacuucaagcagauu

SEQ ID NO: 1222157 - RNA, 19 nt, Homo sapiens
  misc_RNA (1)...(19): siRNA sense strand
ugaauuguccaccgugugu

SEQ ID NO: 1222158 - RNA, 19 nt, Homo sapiens
  misc_RNA (1)...(19): siRNA sense strand
cagaagauggacagaaaca

SEQ ID NO: 1222159 - RNA, 19 nt, Homo sapiens
  misc_RNA (1)...(19): siRNA sense strand
ugcaggagcaaaccaaauu

SEQ ID NO: 1222160 - RNA, 19 nt, Homo sapiens
  misc_RNA (1)...(19): siRNA sense strand
ggugaccauugaggaauuc

SEQ ID NO: 1222161 - RNA, 19 nt, Homo sapiens
  misc_RNA (1)...(19): siRNA sense strand
agaacuucaagcagauuua

SEQ ID NO: 1222162 - RNA, 19 nt, Homo sapiens
  misc_RNA (1)...(19): siRNA sense strand
gcguggacgaugaauuuga

SEQ ID NO: 1222163 - RNA, 19 nt, Homo sapiens
  misc_RNA (1)...(19): siRNA sense strand
gagcagcugcaggagcaaa

SEQ ID NO: 1222164 - RNA, 19 nt, Homo sapiens
  misc_RNA (1)...(19): siRNA sense strand
cagcaccuaugccacuuuu

SEQ ID NO: 1222165 - RNA, 19 nt, Homo sapiens
  misc_RNA (1)...(19): siRNA sense strand
ggaaaugcuugacaucaug

SEQ ID NO: 1222166 - RNA, 19 nt, Homo sapiens
  misc_RNA (1)...(19): siRNA sense strand
cagcguggacgaugaauuu

SEQ ID NO: 1222167 - RNA, 19 nt, Homo sapiens
  misc_RNA (1)...(19): siRNA sense strand
gaagauggacagaaacaag

SEQ ID NO: 1222168 - RNA, 19 nt, Homo sapiens
  misc_RNA (1)...(19): siRNA sense strand
caugauggcucggucaguu

SEQ ID NO: 1222169 - RNA, 19 nt, Homo sapiens
  misc_RNA (1)...(19): siRNA sense strand
gggaacacguggagagcuu

SEQ ID NO: 1222170 - RNA, 19 nt, Homo sapiens
  misc_RNA (1)...(19): siRNA sense strand
gaaaugcuugacaucauga

SEQ ID NO: 1222171 - RNA, 19 nt, Homo sapiens
  misc_RNA (1)...(19): siRNA sense strand
ggaauucauugagucuugu

SEQ ID NO: 1222172 - RNA, 19 nt, Homo sapiens
  misc_RNA (1)...(19): siRNA sense strand
cguggacgaugaauuugaa

SEQ ID NO: 1222173 - RNA, 19 nt, Homo sapiens
  misc_RNA (1)...(19): siRNA sense strand
gaccauugaggaauucauu

SEQ ID NO: 1222174 - RNA, 19 nt, Homo sapiens
  misc_RNA (1)...(19): siRNA sense strand
gaaugucccagcggaauug

SEQ ID NO: 1222175 - RNA, 19 nt, Homo sapiens
  misc_RNA (1)...(19): siRNA sense strand
gaggaaaugcuugacauca

SEQ ID NO: 1222176 - RNA, 19 nt, Homo sapiens
  misc_RNA (1)...(19): siRNA sense strand
gauuuacucccaguucuuu

SEQ ID NO: 1222177 - RNA, 19 nt, Homo sapiens
  misc_RNA (1)...(19): siRNA sense strand
gcagauuuacucccaguuc

SEQ ID NO: 1222178 - RNA, 19 nt, Homo sapiens
  misc_RNA (1)...(19): siRNA sense strand
ucaaugaggagaacuucaa

SEQ ID NO: 1222179 - RNA, 19 nt, Homo sapiens
  misc_RNA (1)...(19): siRNA sense strand
gagaacuucaagcagauuu

SEQ ID NO: 1222180 - RNA, 19 nt, Homo sapiens
  misc_RNA (1)...(19): siRNA sense strand
ugaaguccaucuaugacau

SEQ ID NO: 1222181 - RNA, 19 nt, Homo sapiens
  misc_RNA (1)...(19): siRNA sense strand
caucaugaaguccaucuau

SEQ ID NO: 1222182 - RNA, 19 nt, Homo sapiens
  misc_RNA (1)...(19): siRNA sense strand
gaaguccaucuaugacaug

SEQ ID NO: 1222183 - RNA, 19 nt, Homo sapiens
  misc_RNA (1)...(19): siRNA sense strand
aggaauucauugagucuug

SEQ ID NO: 1222184 - RNA, 19 nt, Homo sapiens
  misc_RNA (1)...(19): siRNA sense strand
gaacuucaagcagauuuac

SEQ ID NO: 1222185 - RNA, 19 nt, Homo sapiens
  misc_RNA (1)...(19): siRNA sense strand
ccauugaggaauucauuga

SEQ ID NO: 1222186 - RNA, 19 nt, Homo sapiens
  misc_RNA (1)...(19): siRNA sense strand
gcaggagcaaaccaaauuc

SEQ ID NO: 1222187 - RNA, 19 nt, Homo sapiens
  misc_RNA (1)...(19): siRNA sense strand
cagauuuacucccaguucu

SEQ ID NO: 1222188 - RNA, 19 nt, Homo sapiens
  misc_RNA (1)...(19): siRNA sense strand
ggacagaaacaaggauggu

SEQ ID NO: 1222189 - RNA, 19 nt, Homo sapiens
  misc_RNA (1)...(19): siRNA sense strand
aggaaaugcuugacaucau

SEQ ID NO: 1222190 - RNA, 19 nt, Homo sapiens
  misc_RNA (1)...(19): siRNA sense strand
ggagaacuucaagcagauu

SEQ ID NO: 1222191 - RNA, 19 nt, Homo sapiens
  misc_RNA (1)...(19): siRNA sense strand
ugaauuguccaccgugugu

SEQ ID NO: 1222192 - RNA, 19 nt, Homo sapiens
  misc_RNA (1)...(19): siRNA sense strand
cagaagauggacagaaaca

SEQ ID NO: 1222193 - RNA, 19 nt, Homo sapiens
  misc_RNA (1)...(19): siRNA sense strand
ugcaggagcaaaccaaauu

SEQ ID NO: 1222194 - RNA, 19 nt, Homo sapiens
  misc_RNA (1)...(19): siRNA sense strand
ggugaccauugaggaauuc

SEQ ID NO: 1222195 - RNA, 19 nt, Homo sapiens
  misc_RNA (1)...(19): siRNA sense strand
agaacuucaagcagauuua

SEQ ID NO: 1222196 - RNA, 19 nt, Homo sapiens
  misc_RNA (1)...(19): siRNA sense strand
gcguggacgaugaauuuga

SEQ ID NO: 1222197 - RNA, 19 nt, Homo sapiens
  misc_RNA (1)...(19): siRNA sense strand
gagcagcugcaggagcaaa

SEQ ID NO: 1222198 - RNA, 19 nt, Homo sapiens
  misc_RNA (1)...(19): siRNA sense strand
cagcaccuaugccacuuuu

SEQ ID NO: 1222199 - RNA, 19 nt, Homo sapiens
  misc_RNA (1)...(19): siRNA sense strand
ggaaaugcuugacaucaug

SEQ ID NO: 1222200 - RNA, 19 nt, Homo sapiens
  misc_RNA (1)...(19): siRNA sense strand
cagcguggacgaugaauuu

SEQ ID NO: 1222201 - RNA, 19 nt, Homo sapiens
  misc_RNA (1)...(19): siRNA sense strand
gaagauggacagaaacaag

SEQ ID NO: 1222202 - RNA, 19 nt, Homo sapiens
  misc_RNA (1)...(19): siRNA sense strand
caugauggcucggucaguu

SEQ ID NO: 1222203 - RNA, 19 nt, Homo sapiens
  misc_RNA (1)...(19): siRNA sense strand
gggaacacguggagagcuu

SEQ ID NO: 1222204 - RNA, 19 nt, Homo sapiens
  misc_RNA (1)...(19): siRNA sense strand
gaaaugcuugacaucauga

SEQ ID NO: 1222205 - RNA, 19 nt, Homo sapiens
  misc_RNA (1)...(19): siRNA sense strand
ggaauucauugagucuugu

SEQ ID NO: 1222206 - RNA, 19 nt, Homo sapiens
  misc_RNA (1)...(19): siRNA sense strand
cguggacgaugaauuugaa

SEQ ID NO: 1222207 - RNA, 19 nt, Homo sapiens
  misc_RNA (1)...(19): siRNA sense strand
gaccauugaggaauucauu

SEQ ID NO: 1222208 - RNA, 19 nt, Homo sapiens
  misc_RNA (1)...(19): siRNA sense strand
gaaugucccagcggaauug

SEQ ID NO: 1222209 - RNA, 19 nt, Homo sapiens
  misc_RNA (1)...(19): siRNA sense strand
gaggaaaugcuugacauca

SEQ ID NO: 1222210 - RNA, 19 nt, Homo sapiens
  misc_RNA (1)...(19): siRNA sense strand
gauuuacucccaguucuuu

SEQ ID NO: 1222211 - RNA, 19 nt, Homo sapiens
  misc_RNA (1)...(19): siRNA sense strand
gcagauuuacucccaguuc

SEQ ID NO: 1222212 - RNA, 19 nt, Homo sapiens
  misc_RNA (1)...(19): siRNA sense strand
ucaaugaggagaacuucaa

SEQ ID NO: 1222213 - RNA, 19 nt, Homo sapiens
  misc_RNA (1)...(19): siRNA sense strand
gagaacuucaagcagauuu

SEQ ID NO: 1222214 - RNA, 19 nt, Homo sapiens
  misc_RNA (1)...(19): siRNA sense strand
ugaaguccaucuaugacau

SEQ ID NO: 1222215 - RNA, 19 nt, Homo sapiens
  misc_RNA (1)...(19): siRNA sense strand
caucaugaaguccaucuau

SEQ ID NO: 1222216 - RNA, 19 nt, Homo sapiens
  misc_RNA (1)...(19): siRNA sense strand
gaaguccaucuaugacaug

SEQ ID NO: 1222217 - RNA, 19 nt, Homo sapiens
  misc_RNA (1)...(19): siRNA sense strand
aggaauucauugagucuug

SEQ ID NO: 1222218 - RNA, 19 nt, Homo sapiens
  misc_RNA (1)...(19): siRNA sense strand
gaacuucaagcagauuuac

SEQ ID NO: 1222219 - RNA, 19 nt, Homo sapiens
  misc_RNA (1)...(19): siRNA sense strand
ccauugaggaauucauuga

SEQ ID NO: 1222220 - RNA, 19 nt, Homo sapiens
  misc_RNA (1)...(19): siRNA sense strand
gcaggagcaaaccaaauuc

SEQ ID NO: 1222221 - RNA, 19 nt, Homo sapiens
  misc_RNA (1)...(19): siRNA sense strand
cagauuuacucccaguucu

SEQ ID NO: 1222222 - RNA, 19 nt, Homo sapiens
  misc_RNA (1)...(19): siRNA sense strand
ggacagaaacaaggauggu

SEQ ID NO: 1222223 - RNA, 19 nt, Homo sapiens
  misc_RNA (1)...(19): siRNA sense strand
aggaaaugcuugacaucau

SEQ ID NO: 1222224 - RNA, 19 nt, Homo sapiens
  misc_RNA (1)...(19): siRNA sense strand
ggagaacuucaagcagauu

SEQ ID NO: 1222225 - RNA, 19 nt, Homo sapiens
  misc_RNA (1)...(19): siRNA sense strand
ugaauuguccaccgugugu

SEQ ID NO: 1222226 - RNA, 19 nt, Homo sapiens
  misc_RNA (1)...(19): siRNA sense strand
cagaagauggacagaaaca

SEQ ID NO: 1222227 - RNA, 19 nt, Homo sapiens
  misc_RNA (1)...(19): siRNA sense strand
ugcaggagcaaaccaaauu

SEQ ID NO: 1222228 - RNA, 19 nt, Homo sapiens
  misc_RNA (1)...(19): siRNA sense strand
ggugaccauugaggaauuc

SEQ ID NO: 1222229 - RNA, 19 nt, Homo sapiens
  misc_RNA (1)...(19): siRNA sense strand
agaacuucaagcagauuua

SEQ ID NO: 1222230 - RNA, 19 nt, Homo sapiens
  misc_RNA (1)...(19): siRNA sense strand
gcguggacgaugaauuuga

SEQ ID NO: 1222231 - RNA, 19 nt, Homo sapiens
  misc_RNA (1)...(19): siRNA sense strand
gagcagcugcaggagcaaa

SEQ ID NO: 1222232 - RNA, 19 nt, Homo sapiens
  misc_RNA (1)...(19): siRNA sense strand
cagcaccuaugccacuuuu

SEQ ID NO: 1222233 - RNA, 19 nt, Homo sapiens
  misc_RNA (1)...(19): siRNA sense strand
ggaaaugcuugacaucaug

SEQ ID NO: 1222234 - RNA, 19 nt, Homo sapiens
  misc_RNA (1)...(19): siRNA sense strand
cagcguggacgaugaauuu

SEQ ID NO: 1222235 - RNA, 19 nt, Homo sapiens
  misc_RNA (1)...(19): siRNA sense strand
gaagauggacagaaacaag

SEQ ID NO: 1222236 - RNA, 19 nt, Homo sapiens
  misc_RNA (1)...(19): siRNA sense strand
caugauggcucggucaguu

SEQ ID NO: 1222237 - RNA, 19 nt, Homo sapiens
  misc_RNA (1)...(19): siRNA sense strand
gggaacacguggagagcuu

SEQ ID NO: 1222238 - RNA, 19 nt, Homo sapiens
  misc_RNA (1)...(19): siRNA sense strand
gaaaugcuugacaucauga

SEQ ID NO: 1222239 - RNA, 19 nt, Homo sapiens
  misc_RNA (1)...(19): siRNA sense strand
ggaauucauugagucuugu

SEQ ID NO: 1222240 - RNA, 19 nt, Homo sapiens
  misc_RNA (1)...(19): siRNA sense strand
cguggacgaugaauuugaa

SEQ ID NO: 1222241 - RNA, 19 nt, Homo sapiens
  misc_RNA (1)...(19): siRNA sense strand
gaccauugaggaauucauu

SEQ ID NO: 1222242 - RNA, 19 nt, Homo sapiens
  misc_RNA (1)...(19): siRNA sense strand
gaaugucccagcggaauug

SEQ ID NO: 1222243 - RNA, 19 nt, Homo sapiens
  misc_RNA (1)...(19): siRNA sense strand
gaggaaaugcuugacauca

SEQ ID NO: 1222244 - RNA, 19 nt, Homo sapiens
  misc_RNA (1)...(19): siRNA sense strand
gauuuacucccaguucuuu

SEQ ID NO: 1222245 - RNA, 19 nt, Homo sapiens
  misc_RNA (1)...(19): siRNA sense strand
gcagauuuacucccaguuc

SEQ ID NO: 1222246 - RNA, 19 nt, Homo sapiens
  misc_RNA (1)...(19): siRNA sense strand
ucaaugaggagaacuucaa

SEQ ID NO: 1222247 - RNA, 19 nt, Homo sapiens
  misc_RNA (1)...(19): siRNA sense strand
gagaacuucaagcagauuu

SEQ ID NO: 1222248 - RNA, 19 nt, Homo sapiens
  misc_RNA (1)...(19): siRNA sense strand
ugaaguccaucuaugacau

SEQ ID NO: 1222249 - RNA, 19 nt, Homo sapiens
  misc_RNA (1)...(19): siRNA sense strand
caucaugaaguccaucuau

SEQ ID NO: 1222250 - RNA, 19 nt, Homo sapiens
  misc_RNA (1)...(19): siRNA sense strand
gaaguccaucuaugacaug

SEQ ID NO: 1222251 - RNA, 19 nt, Homo sapiens
  misc_RNA (1)...(19): siRNA sense strand
aggaauucauugagucuug

SEQ ID NO: 1222252 - RNA, 19 nt, Homo sapiens
  misc_RNA (1)...(19): siRNA sense strand
gaacuucaagcagauuuac

SEQ ID NO: 1222253 - RNA, 19 nt, Homo sapiens
  misc_RNA (1)...(19): siRNA sense strand
ccauugaggaauucauuga

SEQ ID NO: 1222254 - RNA, 19 nt, Homo sapiens
  misc_RNA (1)...(19): siRNA sense strand
gcaggagcaaaccaaauuc

SEQ ID NO: 1222255 - RNA, 19 nt, Homo sapiens
  misc_RNA (1)...(19): siRNA sense strand
cagauuuacucccaguucu

SEQ ID NO: 1222256 - RNA, 19 nt, Homo sapiens
  misc_RNA (1)...(19): siRNA sense strand
ggacagaaacaaggauggu

SEQ ID NO: 1222257 - RNA, 19 nt, Homo sapiens
  misc_RNA (1)...(19): siRNA sense strand
aggaaaugcuugacaucau

SEQ ID NO: 1222258 - RNA, 19 nt, Homo sapiens
  misc_RNA (1)...(19): siRNA sense strand
ggagaacuucaagcagauu

SEQ ID NO: 1222259 - RNA, 19 nt, Homo sapiens
  misc_RNA (1)...(19): siRNA sense strand
ugaauuguccaccgugugu

SEQ ID NO: 1222260 - RNA, 19 nt, Homo sapiens
  misc_RNA (1)...(19): siRNA sense strand
cagaagauggacagaaaca

SEQ ID NO: 1222261 - RNA, 19 nt, Homo sapiens
  misc_RNA (1)...(19): siRNA sense strand
ugcaggagcaaaccaaauu

SEQ ID NO: 1222262 - RNA, 19 nt, Homo sapiens
  misc_RNA (1)...(19): siRNA sense strand
ggugaccauugaggaauuc

SEQ ID NO: 1222263 - RNA, 19 nt, Homo sapiens
  misc_RNA (1)...(19): siRNA sense strand
agaacuucaagcagauuua

SEQ ID NO: 1222264 - RNA, 19 nt, Homo sapiens
  misc_RNA (1)...(19): siRNA sense strand
gcguggacgaugaauuuga

SEQ ID NO: 1222265 - RNA, 19 nt, Homo sapiens
  misc_RNA (1)...(19): siRNA sense strand
gagcagcugcaggagcaaa

SEQ ID NO: 1222266 - RNA, 19 nt, Homo sapiens
  misc_RNA (1)...(19): siRNA sense strand
cagcaccuaugccacuuuu

SEQ ID NO: 1222267 - RNA, 19 nt, Homo sapiens
  misc_RNA (1)...(19): siRNA sense strand
cagcguggacgaugaauuu

SEQ ID NO: 1222268 - RNA, 19 nt, Homo sapiens
  misc_RNA (1)...(19): siRNA sense strand
cguggacgaugaauuugaa

SEQ ID NO: 1222269 - RNA, 19 nt, Homo sapiens
  misc_RNA (1)...(19): siRNA sense strand
gaaugucccagcggaauug

SEQ ID NO: 1222270 - RNA, 19 nt, Homo sapiens
  misc_RNA (1)...(19): siRNA sense strand
gcaggagcaaaccaaauuc

SEQ ID NO: 1222271 - RNA, 19 nt, Homo sapiens
  misc_RNA (1)...(19): siRNA sense strand
ugaauuguccaccgugugu

SEQ ID NO: 1222272 - RNA, 19 nt, Homo sapiens
  misc_RNA (1)...(19): siRNA sense strand
ugcaggagcaaaccaaauu

SEQ ID NO: 1222273 - RNA, 19 nt, Homo sapiens
  misc_RNA (1)...(19): siRNA sense strand
gcguggacgaugaauuuga

SEQ ID NO: 1222274 - RNA, 19 nt, Homo sapiens
  misc_RNA (1)...(19): siRNA sense strand
gagcagcugcaggagcaaa

SEQ ID NO: 1222275 - RNA, 19 nt, Homo sapiens
  misc_RNA (1)...(19): siRNA sense strand
agaaacaguugugcucuuu

SEQ ID NO: 1222276 - RNA, 19 nt, Homo sapiens
  misc_RNA (1)...(19): siRNA sense strand
agccagaacugcagaagaa

SEQ ID NO: 1222277 - RNA, 19 nt, Homo sapiens
  misc_RNA (1)...(19): siRNA sense strand
gaauuacuucuucgacgua

SEQ ID NO: 1222278 - RNA, 19 nt, Homo sapiens
  misc_RNA (1)...(19): siRNA sense strand
caaggaggaggauaggaua

SEQ ID NO: 1222279 - RNA, 19 nt, Homo sapiens
  misc_RNA (1)...(19): siRNA sense strand
ggaggaggauaggauaauc

SEQ ID NO: 1222280 - RNA, 19 nt, Homo sapiens
  misc_RNA (1)...(19): siRNA sense strand
ggacaccugugccuuccau

SEQ ID NO: 1222281 - RNA, 19 nt, Homo sapiens
  misc_RNA (1)...(19): siRNA sense strand
guugugcucuuucgagauc

SEQ ID NO: 1222282 - RNA, 19 nt, Homo sapiens
  misc_RNA (1)...(19): siRNA sense strand
ccaaggaggaggauaggau

SEQ ID NO: 1222283 - RNA, 19 nt, Homo sapiens
  misc_RNA (1)...(19): siRNA sense strand
gcccuucacuucgccauca

SEQ ID NO: 1222284 - RNA, 19 nt, Homo sapiens
  misc_RNA (1)...(19): siRNA sense strand
aaacaguugugcucuuucg

SEQ ID NO: 1222285 - RNA, 19 nt, Homo sapiens
  misc_RNA (1)...(19): siRNA sense strand
cagaacugcagaagaaaca

SEQ ID NO: 1222286 - RNA, 19 nt, Homo sapiens
  misc_RNA (1)...(19): siRNA sense strand
ccaggugucaagaauccua

SEQ ID NO: 1222287 - RNA, 19 nt, Homo sapiens
  misc_RNA (1)...(19): siRNA sense strand
caccugugccuuccaugaa

SEQ ID NO: 1222288 - RNA, 19 nt, Homo sapiens
  misc_RNA (1)...(19): siRNA sense strand
aaagacagcuguuucaauu

SEQ ID NO: 1222289 - RNA, 19 nt, Homo sapiens
  misc_RNA (1)...(19): siRNA sense strand
gaaacaagaacucagauuu

SEQ ID NO: 1222290 - RNA, 19 nt, Homo sapiens
  misc_RNA (1)...(19): siRNA sense strand
ggacguacguuucaucuca

SEQ ID NO: 1222291 - RNA, 19 nt, Homo sapiens
  misc_RNA (1)...(19): siRNA sense strand
gcaaagugaugccucagaa

SEQ ID NO: 1222292 - RNA, 19 nt, Homo sapiens
  misc_RNA (1)...(19): siRNA sense strand
caacuauaccugcauguua

SEQ ID NO: 1222293 - RNA, 19 nt, Homo sapiens
  misc_RNA (1)...(19): siRNA sense strand
ucaagaaaguuaccucuga

SEQ ID NO: 1222294 - RNA, 19 nt, Homo sapiens
  misc_RNA (1)...(19): siRNA sense strand
gaggaucacuuguccaaau

SEQ ID NO: 1222295 - RNA, 19 nt, Homo sapiens
  misc_RNA (1)...(19): siRNA sense strand
gaacagaagaugaaacaag

SEQ ID NO: 1222296 - RNA, 19 nt, Homo sapiens
  misc_RNA (1)...(19): siRNA sense strand
agaaagaugugcugugguu

SEQ ID NO: 1222297 - RNA, 19 nt, Homo sapiens
  misc_RNA (1)...(19): siRNA sense strand
caaugacacuggcaacuau

SEQ ID NO: 1222298 - RNA, 19 nt, Homo sapiens
  misc_RNA (1)...(19): siRNA sense strand
gaucacuuguccaaaugua

SEQ ID NO: 1222299 - RNA, 19 nt, Homo sapiens
  misc_RNA (1)...(19): siRNA sense strand
uaaggaacacuacauauug

SEQ ID NO: 1222300 - RNA, 19 nt, Homo sapiens
  misc_RNA (1)...(19): siRNA sense strand
ccaggacucugacuguaaa

SEQ ID NO: 1222301 - RNA, 19 nt, Homo sapiens
  misc_RNA (1)...(19): siRNA sense strand
cuauugaugucaccauuaa

SEQ ID NO: 1222302 - RNA, 19 nt, Homo sapiens
  misc_RNA (1)...(19): siRNA sense strand
gugcauaaacuguauauag

SEQ ID NO: 1222303 - RNA, 19 nt, Homo sapiens
  misc_RNA (1)...(19): siRNA sense strand
cagccaaggugaagcagaa

SEQ ID NO: 1222304 - RNA, 19 nt, Homo sapiens
  misc_RNA (1)...(19): siRNA sense strand
ggcccacucuccucaauga

SEQ ID NO: 1222305 - RNA, 19 nt, Homo sapiens
  misc_RNA (1)...(19): siRNA sense strand
aacagaagaugaaacaaga

SEQ ID NO: 1222306 - RNA, 19 nt, Homo sapiens
  misc_RNA (1)...(19): siRNA sense strand
gagaggagcuacucauucc

SEQ ID NO: 1222307 - RNA, 19 nt, Homo sapiens
  misc_RNA (1)...(19): siRNA sense strand
aacuauaccugcauguuaa

SEQ ID NO: 1222308 - RNA, 19 nt, Homo sapiens
  misc_RNA (1)...(19): siRNA sense strand
gaugaaacaagaacucaga

SEQ ID NO: 1222309 - RNA, 19 nt, Homo sapiens
  misc_RNA (1)...(19): siRNA sense strand
guuguuacauauccagaaa

SEQ ID NO: 1222310 - RNA, 19 nt, Homo sapiens
  misc_RNA (1)...(19): siRNA sense strand
ggagaggagcuacucauuc

SEQ ID NO: 1222311 - RNA, 19 nt, Homo sapiens
  misc_RNA (1)...(19): siRNA sense strand
gacucugacuguaaaggua

SEQ ID NO: 1222312 - RNA, 19 nt, Homo sapiens
  misc_RNA (1)...(19): siRNA sense strand
gagcuacucauucccugua

SEQ ID NO: 1222313 - RNA, 19 nt, Homo sapiens
  misc_RNA (1)...(19): siRNA sense strand
gccuuacucugaucuggua

SEQ ID NO: 1222314 - RNA, 19 nt, Homo sapiens
  misc_RNA (1)...(19): siRNA sense strand
ucaaaccgacuaucacuug

SEQ ID NO: 1222315 - RNA, 19 nt, Homo sapiens
  misc_RNA (1)...(19): siRNA sense strand
gaaacucccagugcauaaa

SEQ ID NO: 1222316 - RNA, 19 nt, Homo sapiens
  misc_RNA (1)...(19): siRNA sense strand
ccgagaaccgcauuaguaa

SEQ ID NO: 1222317 - RNA, 19 nt, Homo sapiens
  misc_RNA (1)...(19): siRNA sense strand
caaaggcgaaguugccaaa

SEQ ID NO: 1222318 - RNA, 19 nt, Homo sapiens
  misc_RNA (1)...(19): siRNA sense strand
gaccuugaggagccaauua

SEQ ID NO: 1222319 - RNA, 19 nt, Homo sapiens
  misc_RNA (1)...(19): siRNA sense strand
cccgagaaccgcauuagua

SEQ ID NO: 1222320 - RNA, 19 nt, Homo sapiens
  misc_RNA (1)...(19): siRNA sense strand
acucugaucugguauugga

SEQ ID NO: 1222321 - RNA, 19 nt, Homo sapiens
  misc_RNA (1)...(19): siRNA sense strand
gaagaugaaacaagaacuc

SEQ ID NO: 1222322 - RNA, 19 nt, Homo sapiens
  misc_RNA (1)...(19): siRNA sense strand
gaugucaccauuaacgaaa

SEQ ID NO: 1222323 - RNA, 19 nt, Homo sapiens
  misc_RNA (1)...(19): siRNA sense strand
gacuaucacuugguauaug

SEQ ID NO: 1222324 - RNA, 19 nt, Homo sapiens
  misc_RNA (1)...(19): siRNA sense strand
gcauucagaggaucacuug

SEQ ID NO: 1222325 - RNA, 19 nt, Homo sapiens
  misc_RNA (1)...(19): siRNA sense strand
caccaggacucugacugua

SEQ ID NO: 1222326 - RNA, 19 nt, Homo sapiens
  misc_RNA (1)...(19): siRNA sense strand
cuugguauaugggcuguua

SEQ ID NO: 1222327 - RNA, 19 nt, Homo sapiens
  misc_RNA (1)...(19): siRNA sense strand
gaggcaaauccaaguguuu

SEQ ID NO: 1222328 - RNA, 19 nt, Homo sapiens
  misc_RNA (1)...(19): siRNA sense strand
cuaaugaucauguggucua

SEQ ID NO: 1222329 - RNA, 19 nt, Homo sapiens
  misc_RNA (1)...(19): siRNA sense strand
gagaaccgcauuaguaagg

SEQ ID NO: 1222330 - RNA, 19 nt, Homo sapiens
  misc_RNA (1)...(19): siRNA sense strand
gcaacuauaccugcauguu

SEQ ID NO: 1222331 - RNA, 19 nt, Homo sapiens
  misc_RNA (1)...(19): siRNA sense strand
ucaaugacacuggcaacua

SEQ ID NO: 1222332 - RNA, 19 nt, Homo sapiens
  misc_RNA (1)...(19): siRNA sense strand
ccucauugccuuaauuuca

SEQ ID NO: 1222333 - RNA, 19 nt, Homo sapiens
  misc_RNA (1)...(19): siRNA sense strand
gcauuaguaaggagaaaga

SEQ ID NO: 1222334 - RNA, 19 nt, Homo sapiens
  misc_RNA (1)...(19): siRNA sense strand
ugaggcaaauccaaguguu

SEQ ID NO: 1222335 - RNA, 19 nt, Homo sapiens
  misc_RNA (1)...(19): siRNA sense strand
aaccgacuaucacuuggua

SEQ ID NO: 1222336 - RNA, 19 nt, Homo sapiens
  misc_RNA (1)...(19): siRNA sense strand
cagcuggccuuacucugau

SEQ ID NO: 1222337 - RNA, 19 nt, Homo sapiens
  misc_RNA (1)...(19): siRNA sense strand
uauggaauccugcaaagug

SEQ ID NO: 1222338 - RNA, 19 nt, Homo sapiens
  misc_RNA (1)...(19): siRNA sense strand
ccaaagcagccaaggugaa

SEQ ID NO: 1222339 - RNA, 19 nt, Homo sapiens
  misc_RNA (1)...(19): siRNA sense strand
ccauucagcuggccuuacu

SEQ ID NO: 1222340 - RNA, 19 nt, Homo sapiens
  misc_RNA (1)...(19): siRNA sense strand
uagaacagaagaugaaaca

SEQ ID NO: 1222341 - RNA, 19 nt, Homo sapiens
  misc_RNA (1)...(19): siRNA sense strand
gauggauucucgcaaugag

SEQ ID NO: 1222342 - RNA, 19 nt, Homo sapiens
  misc_RNA (1)...(19): siRNA sense strand
ugaaacucccagugcauaa

SEQ ID NO: 1222343 - RNA, 19 nt, Homo sapiens
  misc_RNA (1)...(19): siRNA sense strand
gcgcagcuaugucugucau

SEQ ID NO: 1222344 - RNA, 19 nt, Homo sapiens
  misc_RNA (1)...(19): siRNA sense strand
ugaaacaagaacucagauu

SEQ ID NO: 1222345 - RNA, 19 nt, Homo sapiens
  misc_RNA (1)...(19): siRNA sense strand
uagugagucucuacuuuua

SEQ ID NO: 1222346 - RNA, 19 nt, Homo sapiens
  misc_RNA (1)...(19): siRNA sense strand
caucucaccaggacucuga

SEQ ID NO: 1222347 - RNA, 19 nt, Homo sapiens
  misc_RNA (1)...(19): siRNA sense strand
ccgacuaucacuugguaua

SEQ ID NO: 1222348 - RNA, 19 nt, Homo sapiens
  misc_RNA (1)...(19): siRNA sense strand
ucagaacgcugcgaugacu

SEQ ID NO: 1222349 - RNA, 19 nt, Homo sapiens
  misc_RNA (1)...(19): siRNA sense strand
ccaaguguuugaagaugag

SEQ ID NO: 1222350 - RNA, 19 nt, Homo sapiens
  misc_RNA (1)...(19): siRNA sense strand
ucugauggauucucgcaau

SEQ ID NO: 1222351 - RNA, 19 nt, Homo sapiens
  misc_RNA (1)...(19): siRNA sense strand
cagaggaucacuuguccaa

SEQ ID NO: 1222352 - RNA, 19 nt, Homo sapiens
  misc_RNA (1)...(19): siRNA sense strand
guuaaggaacacuacauau

SEQ ID NO: 1222353 - RNA, 19 nt, Homo sapiens
  misc_RNA (1)...(19): siRNA sense strand
aaauccaaguguuugaaga

SEQ ID NO: 1222354 - RNA, 19 nt, Homo sapiens
  misc_RNA (1)...(19): siRNA sense strand
ggaauccugcaaagugaug

SEQ ID NO: 1222355 - RNA, 19 nt, Homo sapiens
  misc_RNA (1)...(19): siRNA sense strand
gaucucaagcgcagcuaug

SEQ ID NO: 1222356 - RNA, 19 nt, Homo sapiens
  misc_RNA (1)...(19): siRNA sense strand
caccauuaacgaaaguaua

SEQ ID NO: 1222357 - RNA, 19 nt, Homo sapiens
  misc_RNA (1)...(19): siRNA sense strand
uccaaguguuugaagauga

SEQ ID NO: 1222358 - RNA, 19 nt, Homo sapiens
  misc_RNA (1)...(19): siRNA sense strand
uaguagaacagaagaugaa

SEQ ID NO: 1222359 - RNA, 19 nt, Homo sapiens
  misc_RNA (1)...(19): siRNA sense strand
cuacagcacagcccauuca

SEQ ID NO: 1222360 - RNA, 19 nt, Homo sapiens
  misc_RNA (1)...(19): siRNA sense strand
guagauggauauuuuccuu

SEQ ID NO: 1222361 - RNA, 19 nt, Homo sapiens
  misc_RNA (1)...(19): siRNA sense strand
ucacuuguccaaauguaga

SEQ ID NO: 1222362 - RNA, 19 nt, Homo sapiens
  misc_RNA (1)...(19): siRNA sense strand
uuacucugaucugguauug

SEQ ID NO: 1222363 - RNA, 19 nt, Homo sapiens
  misc_RNA (1)...(19): siRNA sense strand
gguaguaggcucuccaaaa

SEQ ID NO: 1222364 - RNA, 19 nt, Homo sapiens
  misc_RNA (1)...(19): siRNA sense strand
cucauugccuuaauuucaa

SEQ ID NO: 1222365 - RNA, 19 nt, Homo sapiens
  misc_RNA (1)...(19): siRNA sense strand
auaccugcauguuaaggaa

SEQ ID NO: 1222366 - RNA, 19 nt, Homo sapiens
  misc_RNA (1)...(19): siRNA sense strand
cauaguagaacagaagaug

SEQ ID NO: 1222367 - RNA, 19 nt, Homo sapiens
  misc_RNA (1)...(19): siRNA sense strand
cacuauugaugucaccauu

SEQ ID NO: 1222368 - RNA, 19 nt, Homo sapiens
  misc_RNA (1)...(19): siRNA sense strand
cuagacaccaugaggcaaa

SEQ ID NO: 1222369 - RNA, 19 nt, Homo sapiens
  misc_RNA (1)...(19): siRNA sense strand
ggacucugacuguaaaggu

SEQ ID NO: 1222370 - RNA, 19 nt, Homo sapiens
  misc_RNA (1)...(19): siRNA sense strand
ccgaagguaugaacuugag

SEQ ID NO: 1222371 - RNA, 19 nt, Homo sapiens
  misc_RNA (1)...(19): siRNA sense strand
aauauggcauucagaggau

SEQ ID NO: 1222372 - RNA, 19 nt, Homo sapiens
  misc_RNA (1)...(19): siRNA sense strand
agacagcuguuucaauucc

SEQ ID NO: 1222373 - RNA, 19 nt, Homo sapiens
  misc_RNA (1)...(19): siRNA sense strand
caaagcagccaaggugaag

SEQ ID NO: 1222374 - RNA, 19 nt, Homo sapiens
  misc_RNA (1)...(19): siRNA sense strand
ccucagaacgcugcgauga

SEQ ID NO: 1222375 - RNA, 19 nt, Homo sapiens
  misc_RNA (1)...(19): siRNA sense strand
uuaguaaggagaaagaugu

SEQ ID NO: 1222376 - RNA, 19 nt, Homo sapiens
  misc_RNA (1)...(19): siRNA sense strand
ccaaauguagauggauauu

SEQ ID NO: 1222377 - RNA, 19 nt, Homo sapiens
  misc_RNA (1)...(19): siRNA sense strand
uugaggagccaauuaacuu

SEQ ID NO: 1222378 - RNA, 19 nt, Homo sapiens
  misc_RNA (1)...(19): siRNA sense strand
gaguuuccucauugccuua

SEQ ID NO: 1222379 - RNA, 19 nt, Homo sapiens
  misc_RNA (1)...(19): siRNA sense strand
cgacuaucacuugguauau

SEQ ID NO: 1222380 - RNA, 19 nt, Homo sapiens
  misc_RNA (1)...(19): siRNA sense strand
aggaucacuuguccaaaug

SEQ ID NO: 1222381 - RNA, 19 nt, Homo sapiens
  misc_RNA (1)...(19): siRNA sense strand
uaaugaucauguggucuau

SEQ ID NO: 1222382 - RNA, 19 nt, Homo sapiens
  misc_RNA (1)...(19): siRNA sense strand
auggaauccugcaaaguga

SEQ ID NO: 1222383 - RNA, 19 nt, Homo sapiens
  misc_RNA (1)...(19): siRNA sense strand
aggcgaaguugccaaagca

SEQ ID NO: 1222384 - RNA, 19 nt, Homo sapiens
  misc_RNA (1)...(19): siRNA sense strand
cuaugucugucaugcuaga

SEQ ID NO: 1222385 - RNA, 19 nt, Homo sapiens
  misc_RNA (1)...(19): siRNA sense strand
ucaccaggacucugacugu

SEQ ID NO: 1222386 - RNA, 19 nt, Homo sapiens
  misc_RNA (1)...(19): siRNA sense strand
agcuaugucugucaugcua

SEQ ID NO: 1222387 - RNA, 19 nt, Homo sapiens
  misc_RNA (1)...(19): siRNA sense strand
aacaagaacucagauuuug

SEQ ID NO: 1222388 - RNA, 19 nt, Homo sapiens
  misc_RNA (1)...(19): siRNA sense strand
aaagacagcuguuucaauu

SEQ ID NO: 1222389 - RNA, 19 nt, Homo sapiens
  misc_RNA (1)...(19): siRNA sense strand
gaaacaagaacucagauuu

SEQ ID NO: 1222390 - RNA, 19 nt, Homo sapiens
  misc_RNA (1)...(19): siRNA sense strand
ggacguacguuucaucuca

SEQ ID NO: 1222391 - RNA, 19 nt, Homo sapiens
  misc_RNA (1)...(19): siRNA sense strand
gcaaagugaugccucagaa

SEQ ID NO: 1222392 - RNA, 19 nt, Homo sapiens
  misc_RNA (1)...(19): siRNA sense strand
caacuauaccugcauguua

SEQ ID NO: 1222393 - RNA, 19 nt, Homo sapiens
  misc_RNA (1)...(19): siRNA sense strand
ucaagaaaguuaccucuga

SEQ ID NO: 1222394 - RNA, 19 nt, Homo sapiens
  misc_RNA (1)...(19): siRNA sense strand
gaggaucacuuguccaaau

SEQ ID NO: 1222395 - RNA, 19 nt, Homo sapiens
  misc_RNA (1)...(19): siRNA sense strand
gaacagaagaugaaacaag

SEQ ID NO: 1222396 - RNA, 19 nt, Homo sapiens
  misc_RNA (1)...(19): siRNA sense strand
agaaagaugugcugugguu

SEQ ID NO: 1222397 - RNA, 19 nt, Homo sapiens
  misc_RNA (1)...(19): siRNA sense strand
caaugacacuggcaacuau

SEQ ID NO: 1222398 - RNA, 19 nt, Homo sapiens
  misc_RNA (1)...(19): siRNA sense strand
gaucacuuguccaaaugua

SEQ ID NO: 1222399 - RNA, 19 nt, Homo sapiens
  misc_RNA (1)...(19): siRNA sense strand
uaaggaacacuacauauug

SEQ ID NO: 1222400 - RNA, 19 nt, Homo sapiens
  misc_RNA (1)...(19): siRNA sense strand
ccaggacucugacuguaaa

SEQ ID NO: 1222401 - RNA, 19 nt, Homo sapiens
  misc_RNA (1)...(19): siRNA sense strand
cuauugaugucaccauuaa

SEQ ID NO: 1222402 - RNA, 19 nt, Homo sapiens
  misc_RNA (1)...(19): siRNA sense strand
gugcauaaacuguauauag

SEQ ID NO: 1222403 - RNA, 19 nt, Homo sapiens
  misc_RNA (1)...(19): siRNA sense strand
cagccaaggugaagcagaa

SEQ ID NO: 1222404 - RNA, 19 nt, Homo sapiens
  misc_RNA (1)...(19): siRNA sense strand
ggcccacucuccucaauga

SEQ ID NO: 1222405 - RNA, 19 nt, Homo sapiens
  misc_RNA (1)...(19): siRNA sense strand
aacagaagaugaaacaaga

SEQ ID NO: 1222406 - RNA, 19 nt, Homo sapiens
  misc_RNA (1)...(19): siRNA sense strand
gagaggagcuacucauucc

SEQ ID NO: 1222407 - RNA, 19 nt, Homo sapiens
  misc_RNA (1)...(19): siRNA sense strand
aacuauaccugcauguuaa

SEQ ID NO: 1222408 - RNA, 19 nt, Homo sapiens
  misc_RNA (1)...(19): siRNA sense strand
gaugaaacaagaacucaga

SEQ ID NO: 1222409 - RNA, 19 nt, Homo sapiens
  misc_RNA (1)...(19): siRNA sense strand
guuguuacauauccagaaa

SEQ ID NO: 1222410 - RNA, 19 nt, Homo sapiens
  misc_RNA (1)...(19): siRNA sense strand
ggagaggagcuacucauuc

SEQ ID NO: 1222411 - RNA, 19 nt, Homo sapiens
  misc_RNA (1)...(19): siRNA sense strand
gacucugacuguaaaggua

SEQ ID NO: 1222412 - RNA, 19 nt, Homo sapiens
  misc_RNA (1)...(19): siRNA sense strand
gagcuacucauucccugua

SEQ ID NO: 1222413 - RNA, 19 nt, Homo sapiens
  misc_RNA (1)...(19): siRNA sense strand
gccuuacucugaucuggua

SEQ ID NO: 1222414 - RNA, 19 nt, Homo sapiens
  misc_RNA (1)...(19): siRNA sense strand
ucaaaccgacuaucacuug

SEQ ID NO: 1222415 - RNA, 19 nt, Homo sapiens
  misc_RNA (1)...(19): siRNA sense strand
gaaacucccagugcauaaa

SEQ ID NO: 1222416 - RNA, 19 nt, Homo sapiens
  misc_RNA (1)...(19): siRNA sense strand
ccgagaaccgcauuaguaa

SEQ ID NO: 1222417 - RNA, 19 nt, Homo sapiens
  misc_RNA (1)...(19): siRNA sense strand
caaaggcgaaguugccaaa

SEQ ID NO: 1222418 - RNA, 19 nt, Homo sapiens
  misc_RNA (1)...(19): siRNA sense strand
gaccuugaggagccaauua

SEQ ID NO: 1222419 - RNA, 19 nt, Homo sapiens
  misc_RNA (1)...(19): siRNA sense strand
cccgagaaccgcauuagua

SEQ ID NO: 1222420 - RNA, 19 nt, Homo sapiens
  misc_RNA (1)...(19): siRNA sense strand
acucugaucugguauugga

SEQ ID NO: 1222421 - RNA, 19 nt, Homo sapiens
  misc_RNA (1)...(19): siRNA sense strand
gaagaugaaacaagaacuc

SEQ ID NO: 1222422 - RNA, 19 nt, Homo sapiens
  misc_RNA (1)...(19): siRNA sense strand
gaugucaccauuaacgaaa

SEQ ID NO: 1222423 - RNA, 19 nt, Homo sapiens
  misc_RNA (1)...(19): siRNA sense strand
gacuaucacuugguauaug

SEQ ID NO: 1222424 - RNA, 19 nt, Homo sapiens
  misc_RNA (1)...(19): siRNA sense strand
gcauucagaggaucacuug

SEQ ID NO: 1222425 - RNA, 19 nt, Homo sapiens
  misc_RNA (1)...(19): siRNA sense strand
caccaggacucugacugua

SEQ ID NO: 1222426 - RNA, 19 nt, Homo sapiens
  misc_RNA (1)...(19): siRNA sense strand
cuugguauaugggcuguua

SEQ ID NO: 1222427 - RNA, 19 nt, Homo sapiens
  misc_RNA (1)...(19): siRNA sense strand
gaggcaaauccaaguguuu

SEQ ID NO: 1222428 - RNA, 19 nt, Homo sapiens
  misc_RNA (1)...(19): siRNA sense strand
cuaaugaucauguggucua

SEQ ID NO: 1222429 - RNA, 19 nt, Homo sapiens
  misc_RNA (1)...(19): siRNA sense strand
gagaaccgcauuaguaagg

SEQ ID NO: 1222430 - RNA, 19 nt, Homo sapiens
  misc_RNA (1)...(19): siRNA sense strand
gcaacuauaccugcauguu

SEQ ID NO: 1222431 - RNA, 19 nt, Homo sapiens
  misc_RNA (1)...(19): siRNA sense strand
ucaaugacacuggcaacua

SEQ ID NO: 1222432 - RNA, 19 nt, Homo sapiens
  misc_RNA (1)...(19): siRNA sense strand
ccucauugccuuaauuuca

SEQ ID NO: 1222433 - RNA, 19 nt, Homo sapiens
  misc_RNA (1)...(19): siRNA sense strand
gcauuaguaaggagaaaga

SEQ ID NO: 1222434 - RNA, 19 nt, Homo sapiens
  misc_RNA (1)...(19): siRNA sense strand
ugaggcaaauccaaguguu

SEQ ID NO: 1222435 - RNA, 19 nt, Homo sapiens
  misc_RNA (1)...(19): siRNA sense strand
aaccgacuaucacuuggua

SEQ ID NO: 1222436 - RNA, 19 nt, Homo sapiens
  misc_RNA (1)...(19): siRNA sense strand
cagcuggccuuacucugau

SEQ ID NO: 1222437 - RNA, 19 nt, Homo sapiens
  misc_RNA (1)...(19): siRNA sense strand
uauggaauccugcaaagug

SEQ ID NO: 1222438 - RNA, 19 nt, Homo sapiens
  misc_RNA (1)...(19): siRNA sense strand
ccaaagcagccaaggugaa

SEQ ID NO: 1222439 - RNA, 19 nt, Homo sapiens
  misc_RNA (1)...(19): siRNA sense strand
ccauucagcuggccuuacu

SEQ ID NO: 1222440 - RNA, 19 nt, Homo sapiens
  misc_RNA (1)...(19): siRNA sense strand
uagaacagaagaugaaaca

SEQ ID NO: 1222441 - RNA, 19 nt, Homo sapiens
  misc_RNA (1)...(19): siRNA sense strand
gauggauucucgcaaugag

SEQ ID NO: 1222442 - RNA, 19 nt, Homo sapiens
  misc_RNA (1)...(19): siRNA sense strand
ugaaacucccagugcauaa

SEQ ID NO: 1222443 - RNA, 19 nt, Homo sapiens
  misc_RNA (1)...(19): siRNA sense strand
gcgcagcuaugucugucau

SEQ ID NO: 1222444 - RNA, 19 nt, Homo sapiens
  misc_RNA (1)...(19): siRNA sense strand
ugaaacaagaacucagauu

SEQ ID NO: 1222445 - RNA, 19 nt, Homo sapiens
  misc_RNA (1)...(19): siRNA sense strand
uagugagucucuacuuuua

SEQ ID NO: 1222446 - RNA, 19 nt, Homo sapiens
  misc_RNA (1)...(19): siRNA sense strand
caucucaccaggacucuga

SEQ ID NO: 1222447 - RNA, 19 nt, Homo sapiens
  misc_RNA (1)...(19): siRNA sense strand
ccgacuaucacuugguaua

SEQ ID NO: 1222448 - RNA, 19 nt, Homo sapiens
  misc_RNA (1)...(19): siRNA sense strand
ucagaacgcugcgaugacu

SEQ ID NO: 1222449 - RNA, 19 nt, Homo sapiens
  misc_RNA (1)...(19): siRNA sense strand
ccaaguguuugaagaugag

SEQ ID NO: 1222450 - RNA, 19 nt, Homo sapiens
  misc_RNA (1)...(19): siRNA sense strand
ucugauggauucucgcaau

SEQ ID NO: 1222451 - RNA, 19 nt, Homo sapiens
  misc_RNA (1)...(19): siRNA sense strand
cagaggaucacuuguccaa

SEQ ID NO: 1222452 - RNA, 19 nt, Homo sapiens
  misc_RNA (1)...(19): siRNA sense strand
guuaaggaacacuacauau

SEQ ID NO: 1222453 - RNA, 19 nt, Homo sapiens
  misc_RNA (1)...(19): siRNA sense strand
aaauccaaguguuugaaga

SEQ ID NO: 1222454 - RNA, 19 nt, Homo sapiens
  misc_RNA (1)...(19): siRNA sense strand
ggaauccugcaaagugaug

SEQ ID NO: 1222455 - RNA, 19 nt, Homo sapiens
  misc_RNA (1)...(19): siRNA sense strand
gaucucaagcgcagcuaug

SEQ ID NO: 1222456 - RNA, 19 nt, Homo sapiens
  misc_RNA (1)...(19): siRNA sense strand
caccauuaacgaaaguaua

SEQ ID NO: 1222457 - RNA, 19 nt, Homo sapiens
  misc_RNA (1)...(19): siRNA sense strand
uccaaguguuugaagauga

SEQ ID NO: 1222458 - RNA, 19 nt, Homo sapiens
  misc_RNA (1)...(19): siRNA sense strand
uaguagaacagaagaugaa

SEQ ID NO: 1222459 - RNA, 19 nt, Homo sapiens
  misc_RNA (1)...(19): siRNA sense strand
cuacagcacagcccauuca

SEQ ID NO: 1222460 - RNA, 19 nt, Homo sapiens
  misc_RNA (1)...(19): siRNA sense strand
guagauggauauuuuccuu

SEQ ID NO: 1222461 - RNA, 19 nt, Homo sapiens
  misc_RNA (1)...(19): siRNA sense strand
ucacuuguccaaauguaga

SEQ ID NO: 1222462 - RNA, 19 nt, Homo sapiens
  misc_RNA (1)...(19): siRNA sense strand
uuacucugaucugguauug

SEQ ID NO: 1222463 - RNA, 19 nt, Homo sapiens
  misc_RNA (1)...(19): siRNA sense strand
gguaguaggcucuccaaaa

SEQ ID NO: 1222464 - RNA, 19 nt, Homo sapiens
  misc_RNA (1)...(19): siRNA sense strand
cucauugccuuaauuucaa

SEQ ID NO: 1222465 - RNA, 19 nt, Homo sapiens
  misc_RNA (1)...(19): siRNA sense strand
auaccugcauguuaaggaa

SEQ ID NO: 1222466 - RNA, 19 nt, Homo sapiens
  misc_RNA (1)...(19): siRNA sense strand
cauaguagaacagaagaug

SEQ ID NO: 1222467 - RNA, 19 nt, Homo sapiens
  misc_RNA (1)...(19): siRNA sense strand
cacuauugaugucaccauu

SEQ ID NO: 1222468 - RNA, 19 nt, Homo sapiens
  misc_RNA (1)...(19): siRNA sense strand
cuagacaccaugaggcaaa

SEQ ID NO: 1222469 - RNA, 19 nt, Homo sapiens
  misc_RNA (1)...(19): siRNA sense strand
ggacucugacuguaaaggu

SEQ ID NO: 1222470 - RNA, 19 nt, Homo sapiens
  misc_RNA (1)...(19): siRNA sense strand
ccgaagguaugaacuugag

SEQ ID NO: 1222471 - RNA, 19 nt, Homo sapiens
  misc_RNA (1)...(19): siRNA sense strand
aauauggcauucagaggau

SEQ ID NO: 1222472 - RNA, 19 nt, Homo sapiens
  misc_RNA (1)...(19): siRNA sense strand
agacagcuguuucaauucc

SEQ ID NO: 1222473 - RNA, 19 nt, Homo sapiens
  misc_RNA (1)...(19): siRNA sense strand
caaagcagccaaggugaag

SEQ ID NO: 1222474 - RNA, 19 nt, Homo sapiens
  misc_RNA (1)...(19): siRNA sense strand
ccucagaacgcugcgauga

SEQ ID NO: 1222475 - RNA, 19 nt, Homo sapiens
  misc_RNA (1)...(19): siRNA sense strand
uuaguaaggagaaagaugu

SEQ ID NO: 1222476 - RNA, 19 nt, Homo sapiens
  misc_RNA (1)...(19): siRNA sense strand
ccaaauguagauggauauu

SEQ ID NO: 1222477 - RNA, 19 nt, Homo sapiens
  misc_RNA (1)...(19): siRNA sense strand
uugaggagccaauuaacuu

SEQ ID NO: 1222478 - RNA, 19 nt, Homo sapiens
  misc_RNA (1)...(19): siRNA sense strand
gaguuuccucauugccuua

SEQ ID NO: 1222479 - RNA, 19 nt, Homo sapiens
  misc_RNA (1)...(19): siRNA sense strand
cgacuaucacuugguauau

SEQ ID NO: 1222480 - RNA, 19 nt, Homo sapiens
  misc_RNA (1)...(19): siRNA sense strand
aggaucacuuguccaaaug

SEQ ID NO: 1222481 - RNA, 19 nt, Homo sapiens
  misc_RNA (1)...(19): siRNA sense strand
uaaugaucauguggucuau

SEQ ID NO: 1222482 - RNA, 19 nt, Homo sapiens
  misc_RNA (1)...(19): siRNA sense strand
auggaauccugcaaaguga

SEQ ID NO: 1222483 - RNA, 19 nt, Homo sapiens
  misc_RNA (1)...(19): siRNA sense strand
aggcgaaguugccaaagca

SEQ ID NO: 1222484 - RNA, 19 nt, Homo sapiens
  misc_RNA (1)...(19): siRNA sense strand
cuaugucugucaugcuaga

SEQ ID NO: 1222485 - RNA, 19 nt, Homo sapiens
  misc_RNA (1)...(19): siRNA sense strand
ucaccaggacucugacugu

SEQ ID NO: 1222486 - RNA, 19 nt, Homo sapiens
  misc_RNA (1)...(19): siRNA sense strand
agcuaugucugucaugcua

SEQ ID NO: 1222487 - RNA, 19 nt, Homo sapiens
  misc_RNA (1)...(19): siRNA sense strand
aacaagaacucagauuuug

SEQ ID NO: 1222488 - RNA, 19 nt, Homo sapiens
  misc_RNA (1)...(19): siRNA sense strand
ccaaauggcccgagaauug

SEQ ID NO: 1222489 - RNA, 19 nt, Homo sapiens
  misc_RNA (1)...(19): siRNA sense strand
gaacgacuccgaagaggaa

SEQ ID NO: 1222490 - RNA, 19 nt, Homo sapiens
  misc_RNA (1)...(19): siRNA sense strand
ccgcagaagugaauaugua

SEQ ID NO: 1222491 - RNA, 19 nt, Homo sapiens
  misc_RNA (1)...(19): siRNA sense strand
agacagaacucaacucauc

SEQ ID NO: 1222492 - RNA, 19 nt, Homo sapiens
  misc_RNA (1)...(19): siRNA sense strand
ggaagaaaaugaagaaguu

SEQ ID NO: 1222493 - RNA, 19 nt, Homo sapiens
  misc_RNA (1)...(19): siRNA sense strand
ucaagaagauggaguuauc

SEQ ID NO: 1222494 - RNA, 19 nt, Homo sapiens
  misc_RNA (1)...(19): siRNA sense strand
ggauacaaaucaagaagau

SEQ ID NO: 1222495 - RNA, 19 nt, Homo sapiens
  misc_RNA (1)...(19): siRNA sense strand
gagugaugaugaugcuuua

SEQ ID NO: 1222496 - RNA, 19 nt, Homo sapiens
  misc_RNA (1)...(19): siRNA sense strand
aaauggauauggaaaguga

SEQ ID NO: 1222497 - RNA, 19 nt, Homo sapiens
  misc_RNA (1)...(19): siRNA sense strand
gaacaggagcagauaagga

SEQ ID NO: 1222498 - RNA, 19 nt, Homo sapiens
  misc_RNA (1)...(19): siRNA sense strand
ccagaacacuuaccagaca

SEQ ID NO: 1222499 - RNA, 19 nt, Homo sapiens
  misc_RNA (1)...(19): siRNA sense strand
gaagaaguuuucaaaguga

SEQ ID NO: 1222500 - RNA, 19 nt, Homo sapiens
  misc_RNA (1)...(19): siRNA sense strand
ccagggcuauugaaagauu

SEQ ID NO: 1222501 - RNA, 19 nt, Homo sapiens
  misc_RNA (1)...(19): siRNA sense strand
uaccagggcuauugaaaga

SEQ ID NO: 1222502 - RNA, 19 nt, Homo sapiens
  misc_RNA (1)...(19): siRNA sense strand
gcagauaaggaaaggaauu

SEQ ID NO: 1222503 - RNA, 19 nt, Homo sapiens
  misc_RNA (1)...(19): siRNA sense strand
gaggguauguccaagacuu

SEQ ID NO: 1222504 - RNA, 19 nt, Homo sapiens
  misc_RNA (1)...(19): siRNA sense strand
gauaauacagucccuuuca

SEQ ID NO: 1222505 - RNA, 19 nt, Homo sapiens
  misc_RNA (1)...(19): siRNA sense strand
ggagugaugaugaugcuuu

SEQ ID NO: 1222506 - RNA, 19 nt, Homo sapiens
  misc_RNA (1)...(19): siRNA sense strand
gagcagauaaggaaaggaa

SEQ ID NO: 1222507 - RNA, 19 nt, Homo sapiens
  misc_RNA (1)...(19): siRNA sense strand
ugaugaugaugcuuuagua

SEQ ID NO: 1222508 - RNA, 19 nt, Homo sapiens
  misc_RNA (1)...(19): siRNA sense strand
guaaagaaacagcuuaaag

SEQ ID NO: 1222509 - RNA, 19 nt, Homo sapiens
  misc_RNA (1)...(19): siRNA sense strand
uaaaauugcucaagaagga

SEQ ID NO: 1222510 - RNA, 19 nt, Homo sapiens
  misc_RNA (1)...(19): siRNA sense strand
cagauaaggaaaggaauua

SEQ ID NO: 1222511 - RNA, 19 nt, Homo sapiens
  misc_RNA (1)...(19): siRNA sense strand
gcaagaggccucgcgagaa

SEQ ID NO: 1222512 - RNA, 19 nt, Homo sapiens
  misc_RNA (1)...(19): siRNA sense strand
aagacuugcuugaguguuu

SEQ ID NO: 1222513 - RNA, 19 nt, Homo sapiens
  misc_RNA (1)...(19): siRNA sense strand
gcucaagaaggaauauaaa

SEQ ID NO: 1222514 - RNA, 19 nt, Homo sapiens
  misc_RNA (1)...(19): siRNA sense strand
ugacucccguuacuauuga

SEQ ID NO: 1222515 - RNA, 19 nt, Homo sapiens
  misc_RNA (1)...(19): siRNA sense strand
caagaggccucgcgagaac

SEQ ID NO: 1222516 - RNA, 19 nt, Homo sapiens
  misc_RNA (1)...(19): siRNA sense strand
gaacauggugaagaugaaa

SEQ ID NO: 1222517 - RNA, 19 nt, Homo sapiens
  misc_RNA (1)...(19): siRNA sense strand
gaaagaaaagucacaaaga

SEQ ID NO: 1222518 - RNA, 19 nt, Homo sapiens
  misc_RNA (1)...(19): siRNA sense strand
gaugaugaugcuuuaguaa

SEQ ID NO: 1222519 - RNA, 19 nt, Homo sapiens
  misc_RNA (1)...(19): siRNA sense strand
gaagaaaucaaguuauagc

SEQ ID NO: 1222520 - RNA, 19 nt, Homo sapiens
  misc_RNA (1)...(19): siRNA sense strand
ugaaauggauauggaaagu

SEQ ID NO: 1222521 - RNA, 19 nt, Homo sapiens
  misc_RNA (1)...(19): siRNA sense strand
caacucaucagcugaaagu

SEQ ID NO: 1222522 - RNA, 19 nt, Homo sapiens
  misc_RNA (1)...(19): siRNA sense strand
gaugagaaacgccggauag

SEQ ID NO: 1222523 - RNA, 19 nt, Homo sapiens
  misc_RNA (1)...(19): siRNA sense strand
aagaugaaauggauaugga

SEQ ID NO: 1222524 - RNA, 19 nt, Homo sapiens
  misc_RNA (1)...(19): siRNA sense strand
caaaucgacagcagcauga

SEQ ID NO: 1222525 - RNA, 19 nt, Homo sapiens
  misc_RNA (1)...(19): siRNA sense strand
gaugaaauggauauggaaa

SEQ ID NO: 1222526 - RNA, 19 nt, Homo sapiens
  misc_RNA (1)...(19): siRNA sense strand
uaauacagucccuuucaaa

SEQ ID NO: 1222527 - RNA, 19 nt, Homo sapiens
  misc_RNA (1)...(19): siRNA sense strand
uguacuaccagaacacuua

SEQ ID NO: 1222528 - RNA, 19 nt, Homo sapiens
  misc_RNA (1)...(19): siRNA sense strand
uauacaugcugcaaggaaa

SEQ ID NO: 1222529 - RNA, 19 nt, Homo sapiens
  misc_RNA (1)...(19): siRNA sense strand
uaagacagaacucaacuca

SEQ ID NO: 1222530 - RNA, 19 nt, Homo sapiens
  misc_RNA (1)...(19): siRNA sense strand
ggugaacgguauaaauuuu

SEQ ID NO: 1222531 - RNA, 19 nt, Homo sapiens
  misc_RNA (1)...(19): siRNA sense strand
uggcauuccuuauaguuau

SEQ ID NO: 1222532 - RNA, 19 nt, Homo sapiens
  misc_RNA (1)...(19): siRNA sense strand
uaauaucccucagguucaa

SEQ ID NO: 1222533 - RNA, 19 nt, Homo sapiens
  misc_RNA (1)...(19): siRNA sense strand
uuagagaagaugagaauga

SEQ ID NO: 1222534 - RNA, 19 nt, Homo sapiens
  misc_RNA (1)...(19): siRNA sense strand
ggaguuaucaucagugaac

SEQ ID NO: 1222535 - RNA, 19 nt, Homo sapiens
  misc_RNA (1)...(19): siRNA sense strand
gcaagaaaugcgaggguau

SEQ ID NO: 1222536 - RNA, 19 nt, Homo sapiens
  misc_RNA (1)...(19): siRNA sense strand
cagaagugaauauguacua

SEQ ID NO: 1222537 - RNA, 19 nt, Homo sapiens
  misc_RNA (1)...(19): siRNA sense strand
uagagaagaugagaaugau

SEQ ID NO: 1222538 - RNA, 19 nt, Homo sapiens
  misc_RNA (1)...(19): siRNA sense strand
ugaacauggugaagaugaa

SEQ ID NO: 1222539 - RNA, 19 nt, Homo sapiens
  misc_RNA (1)...(19): siRNA sense strand
gagauuucacuccucauga

SEQ ID NO: 1222540 - RNA, 19 nt, Homo sapiens
  misc_RNA (1)...(19): siRNA sense strand
gacagcagcaugagaaaca

SEQ ID NO: 1222541 - RNA, 19 nt, Homo sapiens
  misc_RNA (1)...(19): siRNA sense strand
ccagugaugaugaagauga

SEQ ID NO: 1222542 - RNA, 19 nt, Homo sapiens
  misc_RNA (1)...(19): siRNA sense strand
gaagaugaaauggauaugg

SEQ ID NO: 1222543 - RNA, 19 nt, Homo sapiens
  misc_RNA (1)...(19): siRNA sense strand
ugagaugacucccguuacu

SEQ ID NO: 1222544 - RNA, 19 nt, Homo sapiens
  misc_RNA (1)...(19): siRNA sense strand
cagauaauacagucccuuu

SEQ ID NO: 1222545 - RNA, 19 nt, Homo sapiens
  misc_RNA (1)...(19): siRNA sense strand
cauccuauggcauuccuua

SEQ ID NO: 1222546 - RNA, 19 nt, Homo sapiens
  misc_RNA (1)...(19): siRNA sense strand
ugaagaugacgaugagaaa

SEQ ID NO: 1222547 - RNA, 19 nt, Homo sapiens
  misc_RNA (1)...(19): siRNA sense strand
gugaacaaccuuuggacaa

SEQ ID NO: 1222548 - RNA, 19 nt, Homo sapiens
  misc_RNA (1)...(19): siRNA sense strand
caugaaagaauugcacaaa

SEQ ID NO: 1222549 - RNA, 19 nt, Homo sapiens
  misc_RNA (1)...(19): siRNA sense strand
gagaugacucccguuacua

SEQ ID NO: 1222550 - RNA, 19 nt, Homo sapiens
  misc_RNA (1)...(19): siRNA sense strand
gaauauguacuaccagaac

SEQ ID NO: 1222551 - RNA, 19 nt, Homo sapiens
  misc_RNA (1)...(19): siRNA sense strand
caggacauguuaaggauac

SEQ ID NO: 1222552 - RNA, 19 nt, Homo sapiens
  misc_RNA (1)...(19): siRNA sense strand
gauuucacuccucaugaua

SEQ ID NO: 1222553 - RNA, 19 nt, Homo sapiens
  misc_RNA (1)...(19): siRNA sense strand
cagugaacauggugaagau

SEQ ID NO: 1222554 - RNA, 19 nt, Homo sapiens
  misc_RNA (1)...(19): siRNA sense strand
ggguauuggugaacgguau

SEQ ID NO: 1222555 - RNA, 19 nt, Homo sapiens
  misc_RNA (1)...(19): siRNA sense strand
cagggcuauugaaagauua

SEQ ID NO: 1222556 - RNA, 19 nt, Homo sapiens
  misc_RNA (1)...(19): siRNA sense strand
gaugaugcuuuaguaacug

SEQ ID NO: 1222557 - RNA, 19 nt, Homo sapiens
  misc_RNA (1)...(19): siRNA sense strand
uaucaucagugaacauggu

SEQ ID NO: 1222558 - RNA, 19 nt, Homo sapiens
  misc_RNA (1)...(19): siRNA sense strand
aaugagaugacucccguua

SEQ ID NO: 1222559 - RNA, 19 nt, Homo sapiens
  misc_RNA (1)...(19): siRNA sense strand
ugaugaagaugacgaugag

SEQ ID NO: 1222560 - RNA, 19 nt, Homo sapiens
  misc_RNA (1)...(19): siRNA sense strand
gauaaugagccugguaaag

SEQ ID NO: 1222561 - RNA, 19 nt, Homo sapiens
  misc_RNA (1)...(19): siRNA sense strand
gaacacuuaccagacaaug

SEQ ID NO: 1222562 - RNA, 19 nt, Homo sapiens
  misc_RNA (1)...(19): siRNA sense strand
ugaugaugcuuuaguaacu

SEQ ID NO: 1222563 - RNA, 19 nt, Homo sapiens
  misc_RNA (1)...(19): siRNA sense strand
gugaacauggugaagauga

SEQ ID NO: 1222564 - RNA, 19 nt, Homo sapiens
  misc_RNA (1)...(19): siRNA sense strand
caagaaaugcgaggguaug

SEQ ID NO: 1222565 - RNA, 19 nt, Homo sapiens
  misc_RNA (1)...(19): siRNA sense strand
caugagaaacaucugcaaa

SEQ ID NO: 1222566 - RNA, 19 nt, Homo sapiens
  misc_RNA (1)...(19): siRNA sense strand
gguaaagaaacagcuuaaa

SEQ ID NO: 1222567 - RNA, 19 nt, Homo sapiens
  misc_RNA (1)...(19): siRNA sense strand
auaauacagucccuuucaa

SEQ ID NO: 1222568 - RNA, 19 nt, Homo sapiens
  misc_RNA (1)...(19): siRNA sense strand
cucaucagcugaaagugaa

SEQ ID NO: 1222569 - RNA, 19 nt, Homo sapiens
  misc_RNA (1)...(19): siRNA sense strand
gaaauggauauggaaagug

SEQ ID NO: 1222570 - RNA, 19 nt, Homo sapiens
  misc_RNA (1)...(19): siRNA sense strand
gugaagaugaaauggauau

SEQ ID NO: 1222571 - RNA, 19 nt, Homo sapiens
  misc_RNA (1)...(19): siRNA sense strand
gagaaugaugccagugaug

SEQ ID NO: 1222572 - RNA, 19 nt, Homo sapiens
  misc_RNA (1)...(19): siRNA sense strand
gaugacucccguuacuauu

SEQ ID NO: 1222573 - RNA, 19 nt, Homo sapiens
  misc_RNA (1)...(19): siRNA sense strand
gaugggaacaggagcagau

SEQ ID NO: 1222574 - RNA, 19 nt, Homo sapiens
  misc_RNA (1)...(19): siRNA sense strand
gcccgagaauugggagauu

SEQ ID NO: 1222575 - RNA, 19 nt, Homo sapiens
  misc_RNA (1)...(19): siRNA sense strand
cagaacacuuaccagacaa

SEQ ID NO: 1222576 - RNA, 19 nt, Homo sapiens
  misc_RNA (1)...(19): siRNA sense strand
gaaaagucacaaagacaaa

SEQ ID NO: 1222577 - RNA, 19 nt, Homo sapiens
  misc_RNA (1)...(19): siRNA sense strand
ugagaaacgccggauaguu

SEQ ID NO: 1222578 - RNA, 19 nt, Homo sapiens
  misc_RNA (1)...(19): siRNA sense strand
gaaugaugccagugaugau

SEQ ID NO: 1222579 - RNA, 19 nt, Homo sapiens
  misc_RNA (1)...(19): siRNA sense strand
ugagaaugaugccagugau

SEQ ID NO: 1222580 - RNA, 19 nt, Homo sapiens
  misc_RNA (1)...(19): siRNA sense strand
agauuucacuccucaugau

SEQ ID NO: 1222581 - RNA, 19 nt, Homo sapiens
  misc_RNA (1)...(19): siRNA sense strand
ugagaaacaucugcaaagc

SEQ ID NO: 1222582 - RNA, 19 nt, Homo sapiens
  misc_RNA (1)...(19): siRNA sense strand
ggacuccaugaaagaauug

SEQ ID NO: 1222583 - RNA, 19 nt, Homo sapiens
  misc_RNA (1)...(19): siRNA sense strand
agaaugaugccagugauga

SEQ ID NO: 1222584 - RNA, 19 nt, Homo sapiens
  misc_RNA (1)...(19): siRNA sense strand
uuuaguaacuggagaacag

SEQ ID NO: 1222585 - RNA, 19 nt, Homo sapiens
  misc_RNA (1)...(19): siRNA sense strand
gcgaggguauguccaagac

SEQ ID NO: 1222586 - RNA, 19 nt, Homo sapiens
  misc_RNA (1)...(19): siRNA sense strand
gaaagaauugcacaaaaca

SEQ ID NO: 1222587 - RNA, 19 nt, Homo sapiens
  misc_RNA (1)...(19): siRNA sense strand
uaacuggagaacaggauga

SEQ ID NO: 1222588 - RNA, 19 nt, Homo sapiens
  misc_RNA (1)...(19): siRNA sense strand
ccaaauggcccgagaauug

SEQ ID NO: 1222589 - RNA, 19 nt, Homo sapiens
  misc_RNA (1)...(19): siRNA sense strand
gaacgacuccgaagaggaa

SEQ ID NO: 1222590 - RNA, 19 nt, Homo sapiens
  misc_RNA (1)...(19): siRNA sense strand
ccgcagaagugaauaugua

SEQ ID NO: 1222591 - RNA, 19 nt, Homo sapiens
  misc_RNA (1)...(19): siRNA sense strand
agacagaacucaacucauc

SEQ ID NO: 1222592 - RNA, 19 nt, Homo sapiens
  misc_RNA (1)...(19): siRNA sense strand
ggaagaaaaugaagaaguu

SEQ ID NO: 1222593 - RNA, 19 nt, Homo sapiens
  misc_RNA (1)...(19): siRNA sense strand
ucaagaagauggaguuauc

SEQ ID NO: 1222594 - RNA, 19 nt, Homo sapiens
  misc_RNA (1)...(19): siRNA sense strand
ggauacaaaucaagaagau

SEQ ID NO: 1222595 - RNA, 19 nt, Homo sapiens
  misc_RNA (1)...(19): siRNA sense strand
gagugaugaugaugcuuua

SEQ ID NO: 1222596 - RNA, 19 nt, Homo sapiens
  misc_RNA (1)...(19): siRNA sense strand
aaauggauauggaaaguga

SEQ ID NO: 1222597 - RNA, 19 nt, Homo sapiens
  misc_RNA (1)...(19): siRNA sense strand
gaacaggagcagauaagga

SEQ ID NO: 1222598 - RNA, 19 nt, Homo sapiens
  misc_RNA (1)...(19): siRNA sense strand
ccagaacacuuaccagaca

SEQ ID NO: 1222599 - RNA, 19 nt, Homo sapiens
  misc_RNA (1)...(19): siRNA sense strand
gaagaaguuuucaaaguga

SEQ ID NO: 1222600 - RNA, 19 nt, Homo sapiens
  misc_RNA (1)...(19): siRNA sense strand
ccagggcuauugaaagauu

SEQ ID NO: 1222601 - RNA, 19 nt, Homo sapiens
  misc_RNA (1)...(19): siRNA sense strand
uaccagggcuauugaaaga

SEQ ID NO: 1222602 - RNA, 19 nt, Homo sapiens
  misc_RNA (1)...(19): siRNA sense strand
gcagauaaggaaaggaauu

SEQ ID NO: 1222603 - RNA, 19 nt, Homo sapiens
  misc_RNA (1)...(19): siRNA sense strand
gaggguauguccaagacuu

SEQ ID NO: 1222604 - RNA, 19 nt, Homo sapiens
  misc_RNA (1)...(19): siRNA sense strand
gauaauacagucccuuuca

SEQ ID NO: 1222605 - RNA, 19 nt, Homo sapiens
  misc_RNA (1)...(19): siRNA sense strand
ggagugaugaugaugcuuu

SEQ ID NO: 1222606 - RNA, 19 nt, Homo sapiens
  misc_RNA (1)...(19): siRNA sense strand
gagcagauaaggaaaggaa

SEQ ID NO: 1222607 - RNA, 19 nt, Homo sapiens
  misc_RNA (1)...(19): siRNA sense strand
ugaugaugaugcuuuagua

SEQ ID NO: 1222608 - RNA, 19 nt, Homo sapiens
  misc_RNA (1)...(19): siRNA sense strand
guaaagaaacagcuuaaag

SEQ ID NO: 1222609 - RNA, 19 nt, Homo sapiens
  misc_RNA (1)...(19): siRNA sense strand
uaaaauugcucaagaagga

SEQ ID NO: 1222610 - RNA, 19 nt, Homo sapiens
  misc_RNA (1)...(19): siRNA sense strand
cagauaaggaaaggaauua

SEQ ID NO: 1222611 - RNA, 19 nt, Homo sapiens
  misc_RNA (1)...(19): siRNA sense strand
gcaagaggccucgcgagaa

SEQ ID NO: 1222612 - RNA, 19 nt, Homo sapiens
  misc_RNA (1)...(19): siRNA sense strand
aagacuugcuugaguguuu

SEQ ID NO: 1222613 - RNA, 19 nt, Homo sapiens
  misc_RNA (1)...(19): siRNA sense strand
gcucaagaaggaauauaaa

SEQ ID NO: 1222614 - RNA, 19 nt, Homo sapiens
  misc_RNA (1)...(19): siRNA sense strand
ugacucccguuacuauuga

SEQ ID NO: 1222615 - RNA, 19 nt, Homo sapiens
  misc_RNA (1)...(19): siRNA sense strand
caagaggccucgcgagaac

SEQ ID NO: 1222616 - RNA, 19 nt, Homo sapiens
  misc_RNA (1)...(19): siRNA sense strand
gaacauggugaagaugaaa

SEQ ID NO: 1222617 - RNA, 19 nt, Homo sapiens
  misc_RNA (1)...(19): siRNA sense strand
gaaagaaaagucacaaaga

SEQ ID NO: 1222618 - RNA, 19 nt, Homo sapiens
  misc_RNA (1)...(19): siRNA sense strand
gaugaugaugcuuuaguaa

SEQ ID NO: 1222619 - RNA, 19 nt, Homo sapiens
  misc_RNA (1)...(19): siRNA sense strand
gaagaaaucaaguuauagc

SEQ ID NO: 1222620 - RNA, 19 nt, Homo sapiens
  misc_RNA (1)...(19): siRNA sense strand
ugaaauggauauggaaagu

SEQ ID NO: 1222621 - RNA, 19 nt, Homo sapiens
  misc_RNA (1)...(19): siRNA sense strand
caacucaucagcugaaagu

SEQ ID NO: 1222622 - RNA, 19 nt, Homo sapiens
  misc_RNA (1)...(19): siRNA sense strand
gaugagaaacgccggauag

SEQ ID NO: 1222623 - RNA, 19 nt, Homo sapiens
  misc_RNA (1)...(19): siRNA sense strand
aagaugaaauggauaugga

SEQ ID NO: 1222624 - RNA, 19 nt, Homo sapiens
  misc_RNA (1)...(19): siRNA sense strand
caaaucgacagcagcauga

SEQ ID NO: 1222625 - RNA, 19 nt, Homo sapiens
  misc_RNA (1)...(19): siRNA sense strand
gaugaaauggauauggaaa

SEQ ID NO: 1222626 - RNA, 19 nt, Homo sapiens
  misc_RNA (1)...(19): siRNA sense strand
uaauacagucccuuucaaa

SEQ ID NO: 1222627 - RNA, 19 nt, Homo sapiens
  misc_RNA (1)...(19): siRNA sense strand
uguacuaccagaacacuua

SEQ ID NO: 1222628 - RNA, 19 nt, Homo sapiens
  misc_RNA (1)...(19): siRNA sense strand
uauacaugcugcaaggaaa

SEQ ID NO: 1222629 - RNA, 19 nt, Homo sapiens
  misc_RNA (1)...(19): siRNA sense strand
uaagacagaacucaacuca

SEQ ID NO: 1222630 - RNA, 19 nt, Homo sapiens
  misc_RNA (1)...(19): siRNA sense strand
ggugaacgguauaaauuuu

SEQ ID NO: 1222631 - RNA, 19 nt, Homo sapiens
  misc_RNA (1)...(19): siRNA sense strand
uggcauuccuuauaguuau

SEQ ID NO: 1222632 - RNA, 19 nt, Homo sapiens
  misc_RNA (1)...(19): siRNA sense strand
uaauaucccucagguucaa

SEQ ID NO: 1222633 - RNA, 19 nt, Homo sapiens
  misc_RNA (1)...(19): siRNA sense strand
uuagagaagaugagaauga

SEQ ID NO: 1222634 - RNA, 19 nt, Homo sapiens
  misc_RNA (1)...(19): siRNA sense strand
ggaguuaucaucagugaac

SEQ ID NO: 1222635 - RNA, 19 nt, Homo sapiens
  misc_RNA (1)...(19): siRNA sense strand
gcaagaaaugcgaggguau

SEQ ID NO: 1222636 - RNA, 19 nt, Homo sapiens
  misc_RNA (1)...(19): siRNA sense strand
cagaagugaauauguacua

SEQ ID NO: 1222637 - RNA, 19 nt, Homo sapiens
  misc_RNA (1)...(19): siRNA sense strand
uagagaagaugagaaugau

SEQ ID NO: 1222638 - RNA, 19 nt, Homo sapiens
  misc_RNA (1)...(19): siRNA sense strand
ugaacauggugaagaugaa

SEQ ID NO: 1222639 - RNA, 19 nt, Homo sapiens
  misc_RNA (1)...(19): siRNA sense strand
gagauuucacuccucauga

SEQ ID NO: 1222640 - RNA, 19 nt, Homo sapiens
  misc_RNA (1)...(19): siRNA sense strand
gacagcagcaugagaaaca

SEQ ID NO: 1222641 - RNA, 19 nt, Homo sapiens
  misc_RNA (1)...(19): siRNA sense strand
ccagugaugaugaagauga

SEQ ID NO: 1222642 - RNA, 19 nt, Homo sapiens
  misc_RNA (1)...(19): siRNA sense strand
gaagaugaaauggauaugg

SEQ ID NO: 1222643 - RNA, 19 nt, Homo sapiens
  misc_RNA (1)...(19): siRNA sense strand
ugagaugacucccguuacu

SEQ ID NO: 1222644 - RNA, 19 nt, Homo sapiens
  misc_RNA (1)...(19): siRNA sense strand
cagauaauacagucccuuu

SEQ ID NO: 1222645 - RNA, 19 nt, Homo sapiens
  misc_RNA (1)...(19): siRNA sense strand
cauccuauggcauuccuua

SEQ ID NO: 1222646 - RNA, 19 nt, Homo sapiens
  misc_RNA (1)...(19): siRNA sense strand
ugaagaugacgaugagaaa

SEQ ID NO: 1222647 - RNA, 19 nt, Homo sapiens
  misc_RNA (1)...(19): siRNA sense strand
gugaacaaccuuuggacaa

SEQ ID NO: 1222648 - RNA, 19 nt, Homo sapiens
  misc_RNA (1)...(19): siRNA sense strand
caugaaagaauugcacaaa

SEQ ID NO: 1222649 - RNA, 19 nt, Homo sapiens
  misc_RNA (1)...(19): siRNA sense strand
gagaugacucccguuacua

SEQ ID NO: 1222650 - RNA, 19 nt, Homo sapiens
  misc_RNA (1)...(19): siRNA sense strand
gaauauguacuaccagaac

SEQ ID NO: 1222651 - RNA, 19 nt, Homo sapiens
  misc_RNA (1)...(19): siRNA sense strand
caggacauguuaaggauac

SEQ ID NO: 1222652 - RNA, 19 nt, Homo sapiens
  misc_RNA (1)...(19): siRNA sense strand
gauuucacuccucaugaua

SEQ ID NO: 1222653 - RNA, 19 nt, Homo sapiens
  misc_RNA (1)...(19): siRNA sense strand
cagugaacauggugaagau

SEQ ID NO: 1222654 - RNA, 19 nt, Homo sapiens
  misc_RNA (1)...(19): siRNA sense strand
ggguauuggugaacgguau

SEQ ID NO: 1222655 - RNA, 19 nt, Homo sapiens
  misc_RNA (1)...(19): siRNA sense strand
cagggcuauugaaagauua

SEQ ID NO: 1222656 - RNA, 19 nt, Homo sapiens
  misc_RNA (1)...(19): siRNA sense strand
gaugaugcuuuaguaacug

SEQ ID NO: 1222657 - RNA, 19 nt, Homo sapiens
  misc_RNA (1)...(19): siRNA sense strand
uaucaucagugaacauggu

SEQ ID NO: 1222658 - RNA, 19 nt, Homo sapiens
  misc_RNA (1)...(19): siRNA sense strand
aaugagaugacucccguua

SEQ ID NO: 1222659 - RNA, 19 nt, Homo sapiens
  misc_RNA (1)...(19): siRNA sense strand
ugaugaagaugacgaugag

SEQ ID NO: 1222660 - RNA, 19 nt, Homo sapiens
  misc_RNA (1)...(19): siRNA sense strand
gauaaugagccugguaaag

SEQ ID NO: 1222661 - RNA, 19 nt, Homo sapiens
  misc_RNA (1)...(19): siRNA sense strand
gaacacuuaccagacaaug

SEQ ID NO: 1222662 - RNA, 19 nt, Homo sapiens
  misc_RNA (1)...(19): siRNA sense strand
ugaugaugcuuuaguaacu

SEQ ID NO: 1222663 - RNA, 19 nt, Homo sapiens
  misc_RNA (1)...(19): siRNA sense strand
gugaacauggugaagauga

SEQ ID NO: 1222664 - RNA, 19 nt, Homo sapiens
  misc_RNA (1)...(19): siRNA sense strand
caagaaaugcgaggguaug

SEQ ID NO: 1222665 - RNA, 19 nt, Homo sapiens
  misc_RNA (1)...(19): siRNA sense strand
caugagaaacaucugcaaa

SEQ ID NO: 1222666 - RNA, 19 nt, Homo sapiens
  misc_RNA (1)...(19): siRNA sense strand
gguaaagaaacagcuuaaa

SEQ ID NO: 1222667 - RNA, 19 nt, Homo sapiens
  misc_RNA (1)...(19): siRNA sense strand
auaauacagucccuuucaa

SEQ ID NO: 1222668 - RNA, 19 nt, Homo sapiens
  misc_RNA (1)...(19): siRNA sense strand
cucaucagcugaaagugaa

SEQ ID NO: 1222669 - RNA, 19 nt, Homo sapiens
  misc_RNA (1)...(19): siRNA sense strand
gaaauggauauggaaagug

SEQ ID NO: 1222670 - RNA, 19 nt, Homo sapiens
  misc_RNA (1)...(19): siRNA sense strand
gugaagaugaaauggauau

SEQ ID NO: 1222671 - RNA, 19 nt, Homo sapiens
  misc_RNA (1)...(19): siRNA sense strand
gagaaugaugccagugaug

SEQ ID NO: 1222672 - RNA, 19 nt, Homo sapiens
  misc_RNA (1)...(19): siRNA sense strand
gaugacucccguuacuauu

SEQ ID NO: 1222673 - RNA, 19 nt, Homo sapiens
  misc_RNA (1)...(19): siRNA sense strand
gaugggaacaggagcagau

SEQ ID NO: 1222674 - RNA, 19 nt, Homo sapiens
  misc_RNA (1)...(19): siRNA sense strand
gcccgagaauugggagauu

SEQ ID NO: 1222675 - RNA, 19 nt, Homo sapiens
  misc_RNA (1)...(19): siRNA sense strand
cagaacacuuaccagacaa

SEQ ID NO: 1222676 - RNA, 19 nt, Homo sapiens
  misc_RNA (1)...(19): siRNA sense strand
gaaaagucacaaagacaaa

SEQ ID NO: 1222677 - RNA, 19 nt, Homo sapiens
  misc_RNA (1)...(19): siRNA sense strand
ugagaaacgccggauaguu

SEQ ID NO: 1222678 - RNA, 19 nt, Homo sapiens
  misc_RNA (1)...(19): siRNA sense strand
gaaugaugccagugaugau

SEQ ID NO: 1222679 - RNA, 19 nt, Homo sapiens
  misc_RNA (1)...(19): siRNA sense strand
ugagaaugaugccagugau

SEQ ID NO: 1222680 - RNA, 19 nt, Homo sapiens
  misc_RNA (1)...(19): siRNA sense strand
agauuucacuccucaugau

SEQ ID NO: 1222681 - RNA, 19 nt, Homo sapiens
  misc_RNA (1)...(19): siRNA sense strand
ugagaaacaucugcaaagc

SEQ ID NO: 1222682 - RNA, 19 nt, Homo sapiens
  misc_RNA (1)...(19): siRNA sense strand
ggacuccaugaaagaauug

SEQ ID NO: 1222683 - RNA, 19 nt, Homo sapiens
  misc_RNA (1)...(19): siRNA sense strand
agaaugaugccagugauga

SEQ ID NO: 1222684 - RNA, 19 nt, Homo sapiens
  misc_RNA (1)...(19): siRNA sense strand
uuuaguaacuggagaacag

SEQ ID NO: 1222685 - RNA, 19 nt, Homo sapiens
  misc_RNA (1)...(19): siRNA sense strand
gcgaggguauguccaagac

SEQ ID NO: 1222686 - RNA, 19 nt, Homo sapiens
  misc_RNA (1)...(19): siRNA sense strand
gaaagaauugcacaaaaca

SEQ ID NO: 1222687 - RNA, 19 nt, Homo sapiens
  misc_RNA (1)...(19): siRNA sense strand
uaacuggagaacaggauga

SEQ ID NO: 1222688 - RNA, 19 nt, Homo sapiens
  misc_RNA (1)...(19): siRNA sense strand
ccaaauggcccgagaauug

SEQ ID NO: 1222689 - RNA, 19 nt, Homo sapiens
  misc_RNA (1)...(19): siRNA sense strand
gaacgacuccgaagaggaa

SEQ ID NO: 1222690 - RNA, 19 nt, Homo sapiens
  misc_RNA (1)...(19): siRNA sense strand
ccgcagaagugaauaugua

SEQ ID NO: 1222691 - RNA, 19 nt, Homo sapiens
  misc_RNA (1)...(19): siRNA sense strand
agacagaacucaacucauc

SEQ ID NO: 1222692 - RNA, 19 nt, Homo sapiens
  misc_RNA (1)...(19): siRNA sense strand
ggaagaaaaugaagaaguu

SEQ ID NO: 1222693 - RNA, 19 nt, Homo sapiens
  misc_RNA (1)...(19): siRNA sense strand
ucaagaagauggaguuauc

SEQ ID NO: 1222694 - RNA, 19 nt, Homo sapiens
  misc_RNA (1)...(19): siRNA sense strand
ggauacaaaucaagaagau

SEQ ID NO: 1222695 - RNA, 19 nt, Homo sapiens
  misc_RNA (1)...(19): siRNA sense strand
gagugaugaugaugcuuua

SEQ ID NO: 1222696 - RNA, 19 nt, Homo sapiens
  misc_RNA (1)...(19): siRNA sense strand
aaauggauauggaaaguga

SEQ ID NO: 1222697 - RNA, 19 nt, Homo sapiens
  misc_RNA (1)...(19): siRNA sense strand
gaacaggagcagauaagga

SEQ ID NO: 1222698 - RNA, 19 nt, Homo sapiens
  misc_RNA (1)...(19): siRNA sense strand
ccagaacacuuaccagaca

SEQ ID NO: 1222699 - RNA, 19 nt, Homo sapiens
  misc_RNA (1)...(19): siRNA sense strand
gaagaaguuuucaaaguga

SEQ ID NO: 1222700 - RNA, 19 nt, Homo sapiens
  misc_RNA (1)...(19): siRNA sense strand
ccagggcuauugaaagauu

SEQ ID NO: 1222701 - RNA, 19 nt, Homo sapiens
  misc_RNA (1)...(19): siRNA sense strand
uaccagggcuauugaaaga

SEQ ID NO: 1222702 - RNA, 19 nt, Homo sapiens
  misc_RNA (1)...(19): siRNA sense strand
gcagauaaggaaaggaauu

SEQ ID NO: 1222703 - RNA, 19 nt, Homo sapiens
  misc_RNA (1)...(19): siRNA sense strand
gaggguauguccaagacuu

SEQ ID NO: 1222704 - RNA, 19 nt, Homo sapiens
  misc_RNA (1)...(19): siRNA sense strand
gauaauacagucccuuuca

SEQ ID NO: 1222705 - RNA, 19 nt, Homo sapiens
  misc_RNA (1)...(19): siRNA sense strand
ggagugaugaugaugcuuu

SEQ ID NO: 1222706 - RNA, 19 nt, Homo sapiens
  misc_RNA (1)...(19): siRNA sense strand
gagcagauaaggaaaggaa

SEQ ID NO: 1222707 - RNA, 19 nt, Homo sapiens
  misc_RNA (1)...(19): siRNA sense strand
ugaugaugaugcuuuagua

SEQ ID NO: 1222708 - RNA, 19 nt, Homo sapiens
  misc_RNA (1)...(19): siRNA sense strand
guaaagaaacagcuuaaag

SEQ ID NO: 1222709 - RNA, 19 nt, Homo sapiens
  misc_RNA (1)...(19): siRNA sense strand
uaaaauugcucaagaagga

SEQ ID NO: 1222710 - RNA, 19 nt, Homo sapiens
  misc_RNA (1)...(19): siRNA sense strand
cagauaaggaaaggaauua

SEQ ID NO: 1222711 - RNA, 19 nt, Homo sapiens
  misc_RNA (1)...(19): siRNA sense strand
gcaagaggccucgcgagaa

SEQ ID NO: 1222712 - RNA, 19 nt, Homo sapiens
  misc_RNA (1)...(19): siRNA sense strand
aagacuugcuugaguguuu

SEQ ID NO: 1222713 - RNA, 19 nt, Homo sapiens
  misc_RNA (1)...(19): siRNA sense strand
gcucaagaaggaauauaaa

SEQ ID NO: 1222714 - RNA, 19 nt, Homo sapiens
  misc_RNA (1)...(19): siRNA sense strand
ugacucccguuacuauuga

SEQ ID NO: 1222715 - RNA, 19 nt, Homo sapiens
  misc_RNA (1)...(19): siRNA sense strand
caagaggccucgcgagaac

SEQ ID NO: 1222716 - RNA, 19 nt, Homo sapiens
  misc_RNA (1)...(19): siRNA sense strand
gaacauggugaagaugaaa

SEQ ID NO: 1222717 - RNA, 19 nt, Homo sapiens
  misc_RNA (1)...(19): siRNA sense strand
gaaagaaaagucacaaaga

SEQ ID NO: 1222718 - RNA, 19 nt, Homo sapiens
  misc_RNA (1)...(19): siRNA sense strand
gaugaugaugcuuuaguaa

SEQ ID NO: 1222719 - RNA, 19 nt, Homo sapiens
  misc_RNA (1)...(19): siRNA sense strand
gaagaaaucaaguuauagc

SEQ ID NO: 1222720 - RNA, 19 nt, Homo sapiens
  misc_RNA (1)...(19): siRNA sense strand
ugaaauggauauggaaagu

SEQ ID NO: 1222721 - RNA, 19 nt, Homo sapiens
  misc_RNA (1)...(19): siRNA sense strand
caacucaucagcugaaagu

SEQ ID NO: 1222722 - RNA, 19 nt, Homo sapiens
  misc_RNA (1)...(19): siRNA sense strand
gaugagaaacgccggauag

SEQ ID NO: 1222723 - RNA, 19 nt, Homo sapiens
  misc_RNA (1)...(19): siRNA sense strand
aagaugaaauggauaugga

SEQ ID NO: 1222724 - RNA, 19 nt, Homo sapiens
  misc_RNA (1)...(19): siRNA sense strand
caaaucgacagcagcauga

SEQ ID NO: 1222725 - RNA, 19 nt, Homo sapiens
  misc_RNA (1)...(19): siRNA sense strand
gaugaaauggauauggaaa

SEQ ID NO: 1222726 - RNA, 19 nt, Homo sapiens
  misc_RNA (1)...(19): siRNA sense strand
uaauacagucccuuucaaa

SEQ ID NO: 1222727 - RNA, 19 nt, Homo sapiens
  misc_RNA (1)...(19): siRNA sense strand
uguacuaccagaacacuua

SEQ ID NO: 1222728 - RNA, 19 nt, Homo sapiens
  misc_RNA (1)...(19): siRNA sense strand
uauacaugcugcaaggaaa

SEQ ID NO: 1222729 - RNA, 19 nt, Homo sapiens
  misc_RNA (1)...(19): siRNA sense strand
uaagacagaacucaacuca

SEQ ID NO: 1222730 - RNA, 19 nt, Homo sapiens
  misc_RNA (1)...(19): siRNA sense strand
ggugaacgguauaaauuuu

SEQ ID NO: 1222731 - RNA, 19 nt, Homo sapiens
  misc_RNA (1)...(19): siRNA sense strand
uggcauuccuuauaguuau

SEQ ID NO: 1222732 - RNA, 19 nt, Homo sapiens
  misc_RNA (1)...(19): siRNA sense strand
uaauaucccucagguucaa

SEQ ID NO: 1222733 - RNA, 19 nt, Homo sapiens
  misc_RNA (1)...(19): siRNA sense strand
uuagagaagaugagaauga

SEQ ID NO: 1222734 - RNA, 19 nt, Homo sapiens
  misc_RNA (1)...(19): siRNA sense strand
ggaguuaucaucagugaac

SEQ ID NO: 1222735 - RNA, 19 nt, Homo sapiens
  misc_RNA (1)...(19): siRNA sense strand
gcaagaaaugcgaggguau

SEQ ID NO: 1222736 - RNA, 19 nt, Homo sapiens
  misc_RNA (1)...(19): siRNA sense strand
cagaagugaauauguacua

SEQ ID NO: 1222737 - RNA, 19 nt, Homo sapiens
  misc_RNA (1)...(19): siRNA sense strand
uagagaagaugagaaugau

SEQ ID NO: 1222738 - RNA, 19 nt, Homo sapiens
  misc_RNA (1)...(19): siRNA sense strand
ugaacauggugaagaugaa

SEQ ID NO: 1222739 - RNA, 19 nt, Homo sapiens
  misc_RNA (1)...(19): siRNA sense strand
gagauuucacuccucauga

SEQ ID NO: 1222740 - RNA, 19 nt, Homo sapiens
  misc_RNA (1)...(19): siRNA sense strand
gacagcagcaugagaaaca

SEQ ID NO: 1222741 - RNA, 19 nt, Homo sapiens
  misc_RNA (1)...(19): siRNA sense strand
ccagugaugaugaagauga

SEQ ID NO: 1222742 - RNA, 19 nt, Homo sapiens
  misc_RNA (1)...(19): siRNA sense strand
gaagaugaaauggauaugg

SEQ ID NO: 1222743 - RNA, 19 nt, Homo sapiens
  misc_RNA (1)...(19): siRNA sense strand
ugagaugacucccguuacu

SEQ ID NO: 1222744 - RNA, 19 nt, Homo sapiens
  misc_RNA (1)...(19): siRNA sense strand
cagauaauacagucccuuu

SEQ ID NO: 1222745 - RNA, 19 nt, Homo sapiens
  misc_RNA (1)...(19): siRNA sense strand
cauccuauggcauuccuua

SEQ ID NO: 1222746 - RNA, 19 nt, Homo sapiens
  misc_RNA (1)...(19): siRNA sense strand
ugaagaugacgaugagaaa

SEQ ID NO: 1222747 - RNA, 19 nt, Homo sapiens
  misc_RNA (1)...(19): siRNA sense strand
gugaacaaccuuuggacaa

SEQ ID NO: 1222748 - RNA, 19 nt, Homo sapiens
  misc_RNA (1)...(19): siRNA sense strand
caugaaagaauugcacaaa

SEQ ID NO: 1222749 - RNA, 19 nt, Homo sapiens
  misc_RNA (1)...(19): siRNA sense strand
gagaugacucccguuacua

SEQ ID NO: 1222750 - RNA, 19 nt, Homo sapiens
  misc_RNA (1)...(19): siRNA sense strand
gaauauguacuaccagaac

SEQ ID NO: 1222751 - RNA, 19 nt, Homo sapiens
  misc_RNA (1)...(19): siRNA sense strand
caggacauguuaaggauac

SEQ ID NO: 1222752 - RNA, 19 nt, Homo sapiens
  misc_RNA (1)...(19): siRNA sense strand
gauuucacuccucaugaua

SEQ ID NO: 1222753 - RNA, 19 nt, Homo sapiens
  misc_RNA (1)...(19): siRNA sense strand
cagugaacauggugaagau

SEQ ID NO: 1222754 - RNA, 19 nt, Homo sapiens
  misc_RNA (1)...(19): siRNA sense strand
ggguauuggugaacgguau

SEQ ID NO: 1222755 - RNA, 19 nt, Homo sapiens
  misc_RNA (1)...(19): siRNA sense strand
cagggcuauugaaagauua

SEQ ID NO: 1222756 - RNA, 19 nt, Homo sapiens
  misc_RNA (1)...(19): siRNA sense strand
gaugaugcuuuaguaacug

SEQ ID NO: 1222757 - RNA, 19 nt, Homo sapiens
  misc_RNA (1)...(19): siRNA sense strand
uaucaucagugaacauggu

SEQ ID NO: 1222758 - RNA, 19 nt, Homo sapiens
  misc_RNA (1)...(19): siRNA sense strand
aaugagaugacucccguua

SEQ ID NO: 1222759 - RNA, 19 nt, Homo sapiens
  misc_RNA (1)...(19): siRNA sense strand
ugaugaagaugacgaugag

SEQ ID NO: 1222760 - RNA, 19 nt, Homo sapiens
  misc_RNA (1)...(19): siRNA sense strand
gauaaugagccugguaaag

SEQ ID NO: 1222761 - RNA, 19 nt, Homo sapiens
  misc_RNA (1)...(19): siRNA sense strand
gaacacuuaccagacaaug

SEQ ID NO: 1222762 - RNA, 19 nt, Homo sapiens
  misc_RNA (1)...(19): siRNA sense strand
ugaugaugcuuuaguaacu

SEQ ID NO: 1222763 - RNA, 19 nt, Homo sapiens
  misc_RNA (1)...(19): siRNA sense strand
gugaacauggugaagauga

SEQ ID NO: 1222764 - RNA, 19 nt, Homo sapiens
  misc_RNA (1)...(19): siRNA sense strand
caagaaaugcgaggguaug

SEQ ID NO: 1222765 - RNA, 19 nt, Homo sapiens
  misc_RNA (1)...(19): siRNA sense strand
caugagaaacaucugcaaa

SEQ ID NO: 1222766 - RNA, 19 nt, Homo sapiens
  misc_RNA (1)...(19): siRNA sense strand
gguaaagaaacagcuuaaa

SEQ ID NO: 1222767 - RNA, 19 nt, Homo sapiens
  misc_RNA (1)...(19): siRNA sense strand
auaauacagucccuuucaa

SEQ ID NO: 1222768 - RNA, 19 nt, Homo sapiens
  misc_RNA (1)...(19): siRNA sense strand
cucaucagcugaaagugaa

SEQ ID NO: 1222769 - RNA, 19 nt, Homo sapiens
  misc_RNA (1)...(19): siRNA sense strand
gaaauggauauggaaagug

SEQ ID NO: 1222770 - RNA, 19 nt, Homo sapiens
  misc_RNA (1)...(19): siRNA sense strand
gugaagaugaaauggauau

SEQ ID NO: 1222771 - RNA, 19 nt, Homo sapiens
  misc_RNA (1)...(19): siRNA sense strand
gagaaugaugccagugaug

SEQ ID NO: 1222772 - RNA, 19 nt, Homo sapiens
  misc_RNA (1)...(19): siRNA sense strand
gaugacucccguuacuauu

SEQ ID NO: 1222773 - RNA, 19 nt, Homo sapiens
  misc_RNA (1)...(19): siRNA sense strand
gaugggaacaggagcagau

SEQ ID NO: 1222774 - RNA, 19 nt, Homo sapiens
  misc_RNA (1)...(19): siRNA sense strand
gcccgagaauugggagauu

SEQ ID NO: 1222775 - RNA, 19 nt, Homo sapiens
  misc_RNA (1)...(19): siRNA sense strand
cagaacacuuaccagacaa

SEQ ID NO: 1222776 - RNA, 19 nt, Homo sapiens
  misc_RNA (1)...(19): siRNA sense strand
gaaaagucacaaagacaaa

SEQ ID NO: 1222777 - RNA, 19 nt, Homo sapiens
  misc_RNA (1)...(19): siRNA sense strand
ugagaaacgccggauaguu

SEQ ID NO: 1222778 - RNA, 19 nt, Homo sapiens
  misc_RNA (1)...(19): siRNA sense strand
gaaugaugccagugaugau

SEQ ID NO: 1222779 - RNA, 19 nt, Homo sapiens
  misc_RNA (1)...(19): siRNA sense strand
ugagaaugaugccagugau

SEQ ID NO: 1222780 - RNA, 19 nt, Homo sapiens
  misc_RNA (1)...(19): siRNA sense strand
agauuucacuccucaugau

SEQ ID NO: 1222781 - RNA, 19 nt, Homo sapiens
  misc_RNA (1)...(19): siRNA sense strand
ugagaaacaucugcaaagc

SEQ ID NO: 1222782 - RNA, 19 nt, Homo sapiens
  misc_RNA (1)...(19): siRNA sense strand
ggacuccaugaaagaauug

SEQ ID NO: 1222783 - RNA, 19 nt, Homo sapiens
  misc_RNA (1)...(19): siRNA sense strand
agaaugaugccagugauga

SEQ ID NO: 1222784 - RNA, 19 nt, Homo sapiens
  misc_RNA (1)...(19): siRNA sense strand
uuuaguaacuggagaacag

SEQ ID NO: 1222785 - RNA, 19 nt, Homo sapiens
  misc_RNA (1)...(19): siRNA sense strand
gcgaggguauguccaagac

SEQ ID NO: 1222786 - RNA, 19 nt, Homo sapiens
  misc_RNA (1)...(19): siRNA sense strand
gaaagaauugcacaaaaca

SEQ ID NO: 1222787 - RNA, 19 nt, Homo sapiens
  misc_RNA (1)...(19): siRNA sense strand
uaacuggagaacaggauga

SEQ ID NO: 1222788 - RNA, 19 nt, Homo sapiens
  misc_RNA (1)...(19): siRNA sense strand
ccaaauggcccgagaauug

SEQ ID NO: 1222789 - RNA, 19 nt, Homo sapiens
  misc_RNA (1)...(19): siRNA sense strand
gaacgacuccgaagaggaa

SEQ ID NO: 1222790 - RNA, 19 nt, Homo sapiens
  misc_RNA (1)...(19): siRNA sense strand
ccgcagaagugaauaugua

SEQ ID NO: 1222791 - RNA, 19 nt, Homo sapiens
  misc_RNA (1)...(19): siRNA sense strand
agacagaacucaacucauc

SEQ ID NO: 1222792 - RNA, 19 nt, Homo sapiens
  misc_RNA (1)...(19): siRNA sense strand
ggaagaaaaugaagaaguu

SEQ ID NO: 1222793 - RNA, 19 nt, Homo sapiens
  misc_RNA (1)...(19): siRNA sense strand
ucaagaagauggaguuauc

SEQ ID NO: 1222794 - RNA, 19 nt, Homo sapiens
  misc_RNA (1)...(19): siRNA sense strand
ggauacaaaucaagaagau

SEQ ID NO: 1222795 - RNA, 19 nt, Homo sapiens
  misc_RNA (1)...(19): siRNA sense strand
gagugaugaugaugcuuua

SEQ ID NO: 1222796 - RNA, 19 nt, Homo sapiens
  misc_RNA (1)...(19): siRNA sense strand
aaauggauauggaaaguga

SEQ ID NO: 1222797 - RNA, 19 nt, Homo sapiens
  misc_RNA (1)...(19): siRNA sense strand
gaacaggagcagauaagga

SEQ ID NO: 1222798 - RNA, 19 nt, Homo sapiens
  misc_RNA (1)...(19): siRNA sense strand
ccagaacacuuaccagaca

SEQ ID NO: 1222799 - RNA, 19 nt, Homo sapiens
  misc_RNA (1)...(19): siRNA sense strand
gaagaaguuuucaaaguga

SEQ ID NO: 1222800 - RNA, 19 nt, Homo sapiens
  misc_RNA (1)...(19): siRNA sense strand
ccagggcuauugaaagauu

SEQ ID NO: 1222801 - RNA, 19 nt, Homo sapiens
  misc_RNA (1)...(19): siRNA sense strand
uaccagggcuauugaaaga

SEQ ID NO: 1222802 - RNA, 19 nt, Homo sapiens
  misc_RNA (1)...(19): siRNA sense strand
gcagauaaggaaaggaauu

SEQ ID NO: 1222803 - RNA, 19 nt, Homo sapiens
  misc_RNA (1)...(19): siRNA sense strand
gaggguauguccaagacuu

SEQ ID NO: 1222804 - RNA, 19 nt, Homo sapiens
  misc_RNA (1)...(19): siRNA sense strand
gauaauacagucccuuuca

SEQ ID NO: 1222805 - RNA, 19 nt, Homo sapiens
  misc_RNA (1)...(19): siRNA sense strand
ggagugaugaugaugcuuu

SEQ ID NO: 1222806 - RNA, 19 nt, Homo sapiens
  misc_RNA (1)...(19): siRNA sense strand
gagcagauaaggaaaggaa

SEQ ID NO: 1222807 - RNA, 19 nt, Homo sapiens
  misc_RNA (1)...(19): siRNA sense strand
ugaugaugaugcuuuagua

SEQ ID NO: 1222808 - RNA, 19 nt, Homo sapiens
  misc_RNA (1)...(19): siRNA sense strand
guaaagaaacagcuuaaag

SEQ ID NO: 1222809 - RNA, 19 nt, Homo sapiens
  misc_RNA (1)...(19): siRNA sense strand
uaaaauugcucaagaagga

SEQ ID NO: 1222810 - RNA, 19 nt, Homo sapiens
  misc_RNA (1)...(19): siRNA sense strand
cagauaaggaaaggaauua

SEQ ID NO: 1222811 - RNA, 19 nt, Homo sapiens
  misc_RNA (1)...(19): siRNA sense strand
gcaagaggccucgcgagaa

SEQ ID NO: 1222812 - RNA, 19 nt, Homo sapiens
  misc_RNA (1)...(19): siRNA sense strand
aagacuugcuugaguguuu

SEQ ID NO: 1222813 - RNA, 19 nt, Homo sapiens
  misc_RNA (1)...(19): siRNA sense strand
gcucaagaaggaauauaaa

SEQ ID NO: 1222814 - RNA, 19 nt, Homo sapiens
  misc_RNA (1)...(19): siRNA sense strand
ugacucccguuacuauuga

SEQ ID NO: 1222815 - RNA, 19 nt, Homo sapiens
  misc_RNA (1)...(19): siRNA sense strand
caagaggccucgcgagaac

SEQ ID NO: 1222816 - RNA, 19 nt, Homo sapiens
  misc_RNA (1)...(19): siRNA sense strand
gaacauggugaagaugaaa

SEQ ID NO: 1222817 - RNA, 19 nt, Homo sapiens
  misc_RNA (1)...(19): siRNA sense strand
gaaagaaaagucacaaaga

SEQ ID NO: 1222818 - RNA, 19 nt, Homo sapiens
  misc_RNA (1)...(19): siRNA sense strand
gaugaugaugcuuuaguaa

SEQ ID NO: 1222819 - RNA, 19 nt, Homo sapiens
  misc_RNA (1)...(19): siRNA sense strand
gaagaaaucaaguuauagc

SEQ ID NO: 1222820 - RNA, 19 nt, Homo sapiens
  misc_RNA (1)...(19): siRNA sense strand
ugaaauggauauggaaagu

SEQ ID NO: 1222821 - RNA, 19 nt, Homo sapiens
  misc_RNA (1)...(19): siRNA sense strand
caacucaucagcugaaagu

SEQ ID NO: 1222822 - RNA, 19 nt, Homo sapiens
  misc_RNA (1)...(19): siRNA sense strand
gaugagaaacgccggauag

SEQ ID NO: 1222823 - RNA, 19 nt, Homo sapiens
  misc_RNA (1)...(19): siRNA sense strand
aagaugaaauggauaugga

SEQ ID NO: 1222824 - RNA, 19 nt, Homo sapiens
  misc_RNA (1)...(19): siRNA sense strand
caaaucgacagcagcauga

SEQ ID NO: 1222825 - RNA, 19 nt, Homo sapiens
  misc_RNA (1)...(19): siRNA sense strand
gaugaaauggauauggaaa

SEQ ID NO: 1222826 - RNA, 19 nt, Homo sapiens
  misc_RNA (1)...(19): siRNA sense strand
uaauacagucccuuucaaa

SEQ ID NO: 1222827 - RNA, 19 nt, Homo sapiens
  misc_RNA (1)...(19): siRNA sense strand
uguacuaccagaacacuua

SEQ ID NO: 1222828 - RNA, 19 nt, Homo sapiens
  misc_RNA (1)...(19): siRNA sense strand
uauacaugcugcaaggaaa

SEQ ID NO: 1222829 - RNA, 19 nt, Homo sapiens
  misc_RNA (1)...(19): siRNA sense strand
uaagacagaacucaacuca

SEQ ID NO: 1222830 - RNA, 19 nt, Homo sapiens
  misc_RNA (1)...(19): siRNA sense strand
ggugaacgguauaaauuuu

SEQ ID NO: 1222831 - RNA, 19 nt, Homo sapiens
  misc_RNA (1)...(19): siRNA sense strand
uggcauuccuuauaguuau

SEQ ID NO: 1222832 - RNA, 19 nt, Homo sapiens
  misc_RNA (1)...(19): siRNA sense strand
uaauaucccucagguucaa

SEQ ID NO: 1222833 - RNA, 19 nt, Homo sapiens
  misc_RNA (1)...(19): siRNA sense strand
uuagagaagaugagaauga

SEQ ID NO: 1222834 - RNA, 19 nt, Homo sapiens
  misc_RNA (1)...(19): siRNA sense strand
ggaguuaucaucagugaac

SEQ ID NO: 1222835 - RNA, 19 nt, Homo sapiens
  misc_RNA (1)...(19): siRNA sense strand
gcaagaaaugcgaggguau

SEQ ID NO: 1222836 - RNA, 19 nt, Homo sapiens
  misc_RNA (1)...(19): siRNA sense strand
cagaagugaauauguacua

SEQ ID NO: 1222837 - RNA, 19 nt, Homo sapiens
  misc_RNA (1)...(19): siRNA sense strand
uagagaagaugagaaugau

SEQ ID NO: 1222838 - RNA, 19 nt, Homo sapiens
  misc_RNA (1)...(19): siRNA sense strand
ugaacauggugaagaugaa

SEQ ID NO: 1222839 - RNA, 19 nt, Homo sapiens
  misc_RNA (1)...(19): siRNA sense strand
gagauuucacuccucauga

SEQ ID NO: 1222840 - RNA, 19 nt, Homo sapiens
  misc_RNA (1)...(19): siRNA sense strand
gacagcagcaugagaaaca

SEQ ID NO: 1222841 - RNA, 19 nt, Homo sapiens
  misc_RNA (1)...(19): siRNA sense strand
ccagugaugaugaagauga

SEQ ID NO: 1222842 - RNA, 19 nt, Homo sapiens
  misc_RNA (1)...(19): siRNA sense strand
gaagaugaaauggauaugg

SEQ ID NO: 1222843 - RNA, 19 nt, Homo sapiens
  misc_RNA (1)...(19): siRNA sense strand
ugagaugacucccguuacu

SEQ ID NO: 1222844 - RNA, 19 nt, Homo sapiens
  misc_RNA (1)...(19): siRNA sense strand
cagauaauacagucccuuu

SEQ ID NO: 1222845 - RNA, 19 nt, Homo sapiens
  misc_RNA (1)...(19): siRNA sense strand
cauccuauggcauuccuua

SEQ ID NO: 1222846 - RNA, 19 nt, Homo sapiens
  misc_RNA (1)...(19): siRNA sense strand
ugaagaugacgaugagaaa

SEQ ID NO: 1222847 - RNA, 19 nt, Homo sapiens
  misc_RNA (1)...(19): siRNA sense strand
gugaacaaccuuuggacaa

SEQ ID NO: 1222848 - RNA, 19 nt, Homo sapiens
  misc_RNA (1)...(19): siRNA sense strand
caugaaagaauugcacaaa

SEQ ID NO: 1222849 - RNA, 19 nt, Homo sapiens
  misc_RNA (1)...(19): siRNA sense strand
gagaugacucccguuacua

SEQ ID NO: 1222850 - RNA, 19 nt, Homo sapiens
  misc_RNA (1)...(19): siRNA sense strand
gaauauguacuaccagaac

SEQ ID NO: 1222851 - RNA, 19 nt, Homo sapiens
  misc_RNA (1)...(19): siRNA sense strand
caggacauguuaaggauac

SEQ ID NO: 1222852 - RNA, 19 nt, Homo sapiens
  misc_RNA (1)...(19): siRNA sense strand
gauuucacuccucaugaua

SEQ ID NO: 1222853 - RNA, 19 nt, Homo sapiens
  misc_RNA (1)...(19): siRNA sense strand
cagugaacauggugaagau

SEQ ID NO: 1222854 - RNA, 19 nt, Homo sapiens
  misc_RNA (1)...(19): siRNA sense strand
ggguauuggugaacgguau

SEQ ID NO: 1222855 - RNA, 19 nt, Homo sapiens
  misc_RNA (1)...(19): siRNA sense strand
cagggcuauugaaagauua

SEQ ID NO: 1222856 - RNA, 19 nt, Homo sapiens
  misc_RNA (1)...(19): siRNA sense strand
gaugaugcuuuaguaacug

SEQ ID NO: 1222857 - RNA, 19 nt, Homo sapiens
  misc_RNA (1)...(19): siRNA sense strand
uaucaucagugaacauggu

SEQ ID NO: 1222858 - RNA, 19 nt, Homo sapiens
  misc_RNA (1)...(19): siRNA sense strand
aaugagaugacucccguua

SEQ ID NO: 1222859 - RNA, 19 nt, Homo sapiens
  misc_RNA (1)...(19): siRNA sense strand
ugaugaagaugacgaugag

SEQ ID NO: 1222860 - RNA, 19 nt, Homo sapiens
  misc_RNA (1)...(19): siRNA sense strand
gauaaugagccugguaaag

SEQ ID NO: 1222861 - RNA, 19 nt, Homo sapiens
  misc_RNA (1)...(19): siRNA sense strand
gaacacuuaccagacaaug

SEQ ID NO: 1222862 - RNA, 19 nt, Homo sapiens
  misc_RNA (1)...(19): siRNA sense strand
ugaugaugcuuuaguaacu

SEQ ID NO: 1222863 - RNA, 19 nt, Homo sapiens
  misc_RNA (1)...(19): siRNA sense strand
gugaacauggugaagauga

SEQ ID NO: 1222864 - RNA, 19 nt, Homo sapiens
  misc_RNA (1)...(19): siRNA sense strand
caagaaaugcgaggguaug

SEQ ID NO: 1222865 - RNA, 19 nt, Homo sapiens
  misc_RNA (1)...(19): siRNA sense strand
caugagaaacaucugcaaa

SEQ ID NO: 1222866 - RNA, 19 nt, Homo sapiens
  misc_RNA (1)...(19): siRNA sense strand
gguaaagaaacagcuuaaa

SEQ ID NO: 1222867 - RNA, 19 nt, Homo sapiens
  misc_RNA (1)...(19): siRNA sense strand
auaauacagucccuuucaa

SEQ ID NO: 1222868 - RNA, 19 nt, Homo sapiens
  misc_RNA (1)...(19): siRNA sense strand
cucaucagcugaaagugaa

SEQ ID NO: 1222869 - RNA, 19 nt, Homo sapiens
  misc_RNA (1)...(19): siRNA sense strand
gaaauggauauggaaagug

SEQ ID NO: 1222870 - RNA, 19 nt, Homo sapiens
  misc_RNA (1)...(19): siRNA sense strand
gugaagaugaaauggauau

SEQ ID NO: 1222871 - RNA, 19 nt, Homo sapiens
  misc_RNA (1)...(19): siRNA sense strand
gagaaugaugccagugaug

SEQ ID NO: 1222872 - RNA, 19 nt, Homo sapiens
  misc_RNA (1)...(19): siRNA sense strand
gaugacucccguuacuauu

SEQ ID NO: 1222873 - RNA, 19 nt, Homo sapiens
  misc_RNA (1)...(19): siRNA sense strand
gaugggaacaggagcagau

SEQ ID NO: 1222874 - RNA, 19 nt, Homo sapiens
  misc_RNA (1)...(19): siRNA sense strand
gcccgagaauugggagauu

SEQ ID NO: 1222875 - RNA, 19 nt, Homo sapiens
  misc_RNA (1)...(19): siRNA sense strand
cagaacacuuaccagacaa

SEQ ID NO: 1222876 - RNA, 19 nt, Homo sapiens
  misc_RNA (1)...(19): siRNA sense strand
gaaaagucacaaagacaaa

SEQ ID NO: 1222877 - RNA, 19 nt, Homo sapiens
  misc_RNA (1)...(19): siRNA sense strand
ugagaaacgccggauaguu

SEQ ID NO: 1222878 - RNA, 19 nt, Homo sapiens
  misc_RNA (1)...(19): siRNA sense strand
gaaugaugccagugaugau

SEQ ID NO: 1222879 - RNA, 19 nt, Homo sapiens
  misc_RNA (1)...(19): siRNA sense strand
ugagaaugaugccagugau

SEQ ID NO: 1222880 - RNA, 19 nt, Homo sapiens
  misc_RNA (1)...(19): siRNA sense strand
agauuucacuccucaugau

SEQ ID NO: 1222881 - RNA, 19 nt, Homo sapiens
  misc_RNA (1)...(19): siRNA sense strand
ugagaaacaucugcaaagc

SEQ ID NO: 1222882 - RNA, 19 nt, Homo sapiens
  misc_RNA (1)...(19): siRNA sense strand
ggacuccaugaaagaauug

SEQ ID NO: 1222883 - RNA, 19 nt, Homo sapiens
  misc_RNA (1)...(19): siRNA sense strand
agaaugaugccagugauga

SEQ ID NO: 1222884 - RNA, 19 nt, Homo sapiens
  misc_RNA (1)...(19): siRNA sense strand
uuuaguaacuggagaacag

SEQ ID NO: 1222885 - RNA, 19 nt, Homo sapiens
  misc_RNA (1)...(19): siRNA sense strand
gcgaggguauguccaagac

SEQ ID NO: 1222886 - RNA, 19 nt, Homo sapiens
  misc_RNA (1)...(19): siRNA sense strand
gaaagaauugcacaaaaca

SEQ ID NO: 1222887 - RNA, 19 nt, Homo sapiens
  misc_RNA (1)...(19): siRNA sense strand
uaacuggagaacaggauga

SEQ ID NO: 1222888 - RNA, 19 nt, Homo sapiens
  misc_RNA (1)...(19): siRNA sense strand
ccaaauggcccgagaauug

SEQ ID NO: 1222889 - RNA, 19 nt, Homo sapiens
  misc_RNA (1)...(19): siRNA sense strand
gaacgacuccgaagaggaa

SEQ ID NO: 1222890 - RNA, 19 nt, Homo sapiens
  misc_RNA (1)...(19): siRNA sense strand
ccgcagaagugaauaugua

SEQ ID NO: 1222891 - RNA, 19 nt, Homo sapiens
  misc_RNA (1)...(19): siRNA sense strand
agacagaacucaacucauc

SEQ ID NO: 1222892 - RNA, 19 nt, Homo sapiens
  misc_RNA (1)...(19): siRNA sense strand
ggaagaaaaugaagaaguu

SEQ ID NO: 1222893 - RNA, 19 nt, Homo sapiens
  misc_RNA (1)...(19): siRNA sense strand
ucaagaagauggaguuauc

SEQ ID NO: 1222894 - RNA, 19 nt, Homo sapiens
  misc_RNA (1)...(19): siRNA sense strand
ggauacaaaucaagaagau

SEQ ID NO: 1222895 - RNA, 19 nt, Homo sapiens
  misc_RNA (1)...(19): siRNA sense strand
gagugaugaugaugcuuua

SEQ ID NO: 1222896 - RNA, 19 nt, Homo sapiens
  misc_RNA (1)...(19): siRNA sense strand
aaauggauauggaaaguga

SEQ ID NO: 1222897 - RNA, 19 nt, Homo sapiens
  misc_RNA (1)...(19): siRNA sense strand
gaacaggagcagauaagga

SEQ ID NO: 1222898 - RNA, 19 nt, Homo sapiens
  misc_RNA (1)...(19): siRNA sense strand
ccagaacacuuaccagaca

SEQ ID NO: 1222899 - RNA, 19 nt, Homo sapiens
  misc_RNA (1)...(19): siRNA sense strand
gaagaaguuuucaaaguga

SEQ ID NO: 1222900 - RNA, 19 nt, Homo sapiens
  misc_RNA (1)...(19): siRNA sense strand
ccagggcuauugaaagauu

SEQ ID NO: 1222901 - RNA, 19 nt, Homo sapiens
  misc_RNA (1)...(19): siRNA sense strand
uaccagggcuauugaaaga

SEQ ID NO: 1222902 - RNA, 19 nt, Homo sapiens
  misc_RNA (1)...(19): siRNA sense strand
gcagauaaggaaaggaauu

SEQ ID NO: 1222903 - RNA, 19 nt, Homo sapiens
  misc_RNA (1)...(19): siRNA sense strand
gaggguauguccaagacuu

SEQ ID NO: 1222904 - RNA, 19 nt, Homo sapiens
  misc_RNA (1)...(19): siRNA sense strand
gauaauacagucccuuuca

SEQ ID NO: 1222905 - RNA, 19 nt, Homo sapiens
  misc_RNA (1)...(19): siRNA sense strand
ggagugaugaugaugcuuu

SEQ ID NO: 1222906 - RNA, 19 nt, Homo sapiens
  misc_RNA (1)...(19): siRNA sense strand
gagcagauaaggaaaggaa

SEQ ID NO: 1222907 - RNA, 19 nt, Homo sapiens
  misc_RNA (1)...(19): siRNA sense strand
ugaugaugaugcuuuagua

SEQ ID NO: 1222908 - RNA, 19 nt, Homo sapiens
  misc_RNA (1)...(19): siRNA sense strand
guaaagaaacagcuuaaag

SEQ ID NO: 1222909 - RNA, 19 nt, Homo sapiens
  misc_RNA (1)...(19): siRNA sense strand
uaaaauugcucaagaagga

SEQ ID NO: 1222910 - RNA, 19 nt, Homo sapiens
  misc_RNA (1)...(19): siRNA sense strand
cagauaaggaaaggaauua

SEQ ID NO: 1222911 - RNA, 19 nt, Homo sapiens
  misc_RNA (1)...(19): siRNA sense strand
gcaagaggccucgcgagaa

SEQ ID NO: 1222912 - RNA, 19 nt, Homo sapiens
  misc_RNA (1)...(19): siRNA sense strand
aagacuugcuugaguguuu

SEQ ID NO: 1222913 - RNA, 19 nt, Homo sapiens
  misc_RNA (1)...(19): siRNA sense strand
gcucaagaaggaauauaaa

SEQ ID NO: 1222914 - RNA, 19 nt, Homo sapiens
  misc_RNA (1)...(19): siRNA sense strand
ugacucccguuacuauuga

SEQ ID NO: 1222915 - RNA, 19 nt, Homo sapiens
  misc_RNA (1)...(19): siRNA sense strand
caagaggccucgcgagaac

SEQ ID NO: 1222916 - RNA, 19 nt, Homo sapiens
  misc_RNA (1)...(19): siRNA sense strand
gaacauggugaagaugaaa

SEQ ID NO: 1222917 - RNA, 19 nt, Homo sapiens
  misc_RNA (1)...(19): siRNA sense strand
gaaagaaaagucacaaaga

SEQ ID NO: 1222918 - RNA, 19 nt, Homo sapiens
  misc_RNA (1)...(19): siRNA sense strand
gaugaugaugcuuuaguaa

SEQ ID NO: 1222919 - RNA, 19 nt, Homo sapiens
  misc_RNA (1)...(19): siRNA sense strand
gaagaaaucaaguuauagc

SEQ ID NO: 1222920 - RNA, 19 nt, Homo sapiens
  misc_RNA (1)...(19): siRNA sense strand
ugaaauggauauggaaagu

SEQ ID NO: 1222921 - RNA, 19 nt, Homo sapiens
  misc_RNA (1)...(19): siRNA sense strand
caacucaucagcugaaagu

SEQ ID NO: 1222922 - RNA, 19 nt, Homo sapiens
  misc_RNA (1)...(19): siRNA sense strand
gaugagaaacgccggauag

SEQ ID NO: 1222923 - RNA, 19 nt, Homo sapiens
  misc_RNA (1)...(19): siRNA sense strand
aagaugaaauggauaugga

SEQ ID NO: 1222924 - RNA, 19 nt, Homo sapiens
  misc_RNA (1)...(19): siRNA sense strand
caaaucgacagcagcauga

SEQ ID NO: 1222925 - RNA, 19 nt, Homo sapiens
  misc_RNA (1)...(19): siRNA sense strand
gaugaaauggauauggaaa

SEQ ID NO: 1222926 - RNA, 19 nt, Homo sapiens
  misc_RNA (1)...(19): siRNA sense strand
uaauacagucccuuucaaa

SEQ ID NO: 1222927 - RNA, 19 nt, Homo sapiens
  misc_RNA (1)...(19): siRNA sense strand
uguacuaccagaacacuua

SEQ ID NO: 1222928 - RNA, 19 nt, Homo sapiens
  misc_RNA (1)...(19): siRNA sense strand
uauacaugcugcaaggaaa

SEQ ID NO: 1222929 - RNA, 19 nt, Homo sapiens
  misc_RNA (1)...(19): siRNA sense strand
uaagacagaacucaacuca

SEQ ID NO: 1222930 - RNA, 19 nt, Homo sapiens
  misc_RNA (1)...(19): siRNA sense strand
ggugaacgguauaaauuuu

SEQ ID NO: 1222931 - RNA, 19 nt, Homo sapiens
  misc_RNA (1)...(19): siRNA sense strand
uggcauuccuuauaguuau

SEQ ID NO: 1222932 - RNA, 19 nt, Homo sapiens
  misc_RNA (1)...(19): siRNA sense strand
uaauaucccucagguucaa

SEQ ID NO: 1222933 - RNA, 19 nt, Homo sapiens
  misc_RNA (1)...(19): siRNA sense strand
uuagagaagaugagaauga

SEQ ID NO: 1222934 - RNA, 19 nt, Homo sapiens
  misc_RNA (1)...(19): siRNA sense strand
ggaguuaucaucagugaac

SEQ ID NO: 1222935 - RNA, 19 nt, Homo sapiens
  misc_RNA (1)...(19): siRNA sense strand
gcaagaaaugcgaggguau

SEQ ID NO: 1222936 - RNA, 19 nt, Homo sapiens
  misc_RNA (1)...(19): siRNA sense strand
cagaagugaauauguacua

SEQ ID NO: 1222937 - RNA, 19 nt, Homo sapiens
  misc_RNA (1)...(19): siRNA sense strand
uagagaagaugagaaugau

SEQ ID NO: 1222938 - RNA, 19 nt, Homo sapiens
  misc_RNA (1)...(19): siRNA sense strand
ugaacauggugaagaugaa

SEQ ID NO: 1222939 - RNA, 19 nt, Homo sapiens
  misc_RNA (1)...(19): siRNA sense strand
gagauuucacuccucauga

SEQ ID NO: 1222940 - RNA, 19 nt, Homo sapiens
  misc_RNA (1)...(19): siRNA sense strand
gacagcagcaugagaaaca

SEQ ID NO: 1222941 - RNA, 19 nt, Homo sapiens
  misc_RNA (1)...(19): siRNA sense strand
ccagugaugaugaagauga

SEQ ID NO: 1222942 - RNA, 19 nt, Homo sapiens
  misc_RNA (1)...(19): siRNA sense strand
gaagaugaaauggauaugg

SEQ ID NO: 1222943 - RNA, 19 nt, Homo sapiens
  misc_RNA (1)...(19): siRNA sense strand
ugagaugacucccguuacu

SEQ ID NO: 1222944 - RNA, 19 nt, Homo sapiens
  misc_RNA (1)...(19): siRNA sense strand
cagauaauacagucccuuu

SEQ ID NO: 1222945 - RNA, 19 nt, Homo sapiens
  misc_RNA (1)...(19): siRNA sense strand
cauccuauggcauuccuua

SEQ ID NO: 1222946 - RNA, 19 nt, Homo sapiens
  misc_RNA (1)...(19): siRNA sense strand
ugaagaugacgaugagaaa

SEQ ID NO: 1222947 - RNA, 19 nt, Homo sapiens
  misc_RNA (1)...(19): siRNA sense strand
gugaacaaccuuuggacaa

SEQ ID NO: 1222948 - RNA, 19 nt, Homo sapiens
  misc_RNA (1)...(19): siRNA sense strand
caugaaagaauugcacaaa

SEQ ID NO: 1222949 - RNA, 19 nt, Homo sapiens
  misc_RNA (1)...(19): siRNA sense strand
gagaugacucccguuacua

SEQ ID NO: 1222950 - RNA, 19 nt, Homo sapiens
  misc_RNA (1)...(19): siRNA sense strand
gaauauguacuaccagaac

SEQ ID NO: 1222951 - RNA, 19 nt, Homo sapiens
  misc_RNA (1)...(19): siRNA sense strand
caggacauguuaaggauac

SEQ ID NO: 1222952 - RNA, 19 nt, Homo sapiens
  misc_RNA (1)...(19): siRNA sense strand
gauuucacuccucaugaua

SEQ ID NO: 1222953 - RNA, 19 nt, Homo sapiens
  misc_RNA (1)...(19): siRNA sense strand
cagugaacauggugaagau

SEQ ID NO: 1222954 - RNA, 19 nt, Homo sapiens
  misc_RNA (1)...(19): siRNA sense strand
ggguauuggugaacgguau

SEQ ID NO: 1222955 - RNA, 19 nt, Homo sapiens
  misc_RNA (1)...(19): siRNA sense strand
cagggcuauugaaagauua

SEQ ID NO: 1222956 - RNA, 19 nt, Homo sapiens
  misc_RNA (1)...(19): siRNA sense strand
gaugaugcuuuaguaacug

SEQ ID NO: 1222957 - RNA, 19 nt, Homo sapiens
  misc_RNA (1)...(19): siRNA sense strand
uaucaucagugaacauggu

SEQ ID NO: 1222958 - RNA, 19 nt, Homo sapiens
  misc_RNA (1)...(19): siRNA sense strand
aaugagaugacucccguua

SEQ ID NO: 1222959 - RNA, 19 nt, Homo sapiens
  misc_RNA (1)...(19): siRNA sense strand
ugaugaagaugacgaugag

SEQ ID NO: 1222960 - RNA, 19 nt, Homo sapiens
  misc_RNA (1)...(19): siRNA sense strand
gauaaugagccugguaaag

SEQ ID NO: 1222961 - RNA, 19 nt, Homo sapiens
  misc_RNA (1)...(19): siRNA sense strand
gaacacuuaccagacaaug

SEQ ID NO: 1222962 - RNA, 19 nt, Homo sapiens
  misc_RNA (1)...(19): siRNA sense strand
ugaugaugcuuuaguaacu

SEQ ID NO: 1222963 - RNA, 19 nt, Homo sapiens
  misc_RNA (1)...(19): siRNA sense strand
gugaacauggugaagauga

SEQ ID NO: 1222964 - RNA, 19 nt, Homo sapiens
  misc_RNA (1)...(19): siRNA sense strand
caagaaaugcgaggguaug

SEQ ID NO: 1222965 - RNA, 19 nt, Homo sapiens
  misc_RNA (1)...(19): siRNA sense strand
caugagaaacaucugcaaa

SEQ ID NO: 1222966 - RNA, 19 nt, Homo sapiens
  misc_RNA (1)...(19): siRNA sense strand
gguaaagaaacagcuuaaa

SEQ ID NO: 1222967 - RNA, 19 nt, Homo sapiens
  misc_RNA (1)...(19): siRNA sense strand
auaauacagucccuuucaa

SEQ ID NO: 1222968 - RNA, 19 nt, Homo sapiens
  misc_RNA (1)...(19): siRNA sense strand
cucaucagcugaaagugaa

SEQ ID NO: 1222969 - RNA, 19 nt, Homo sapiens
  misc_RNA (1)...(19): siRNA sense strand
gaaauggauauggaaagug

SEQ ID NO: 1222970 - RNA, 19 nt, Homo sapiens
  misc_RNA (1)...(19): siRNA sense strand
gugaagaugaaauggauau

SEQ ID NO: 1222971 - RNA, 19 nt, Homo sapiens
  misc_RNA (1)...(19): siRNA sense strand
gagaaugaugccagugaug

SEQ ID NO: 1222972 - RNA, 19 nt, Homo sapiens
  misc_RNA (1)...(19): siRNA sense strand
gaugacucccguuacuauu

SEQ ID NO: 1222973 - RNA, 19 nt, Homo sapiens
  misc_RNA (1)...(19): siRNA sense strand
gaugggaacaggagcagau

SEQ ID NO: 1222974 - RNA, 19 nt, Homo sapiens
  misc_RNA (1)...(19): siRNA sense strand
gcccgagaauugggagauu

SEQ ID NO: 1222975 - RNA, 19 nt, Homo sapiens
  misc_RNA (1)...(19): siRNA sense strand
cagaacacuuaccagacaa

SEQ ID NO: 1222976 - RNA, 19 nt, Homo sapiens
  misc_RNA (1)...(19): siRNA sense strand
gaaaagucacaaagacaaa

SEQ ID NO: 1222977 - RNA, 19 nt, Homo sapiens
  misc_RNA (1)...(19): siRNA sense strand
ugagaaacgccggauaguu

SEQ ID NO: 1222978 - RNA, 19 nt, Homo sapiens
  misc_RNA (1)...(19): siRNA sense strand
gaaugaugccagugaugau

SEQ ID NO: 1222979 - RNA, 19 nt, Homo sapiens
  misc_RNA (1)...(19): siRNA sense strand
ugagaaugaugccagugau

SEQ ID NO: 1222980 - RNA, 19 nt, Homo sapiens
  misc_RNA (1)...(19): siRNA sense strand
agauuucacuccucaugau

SEQ ID NO: 1222981 - RNA, 19 nt, Homo sapiens
  misc_RNA (1)...(19): siRNA sense strand
ugagaaacaucugcaaagc

SEQ ID NO: 1222982 - RNA, 19 nt, Homo sapiens
  misc_RNA (1)...(19): siRNA sense strand
ggacuccaugaaagaauug

SEQ ID NO: 1222983 - RNA, 19 nt, Homo sapiens
  misc_RNA (1)...(19): siRNA sense strand
agaaugaugccagugauga

SEQ ID NO: 1222984 - RNA, 19 nt, Homo sapiens
  misc_RNA (1)...(19): siRNA sense strand
uuuaguaacuggagaacag

SEQ ID NO: 1222985 - RNA, 19 nt, Homo sapiens
  misc_RNA (1)...(19): siRNA sense strand
gcgaggguauguccaagac

SEQ ID NO: 1222986 - RNA, 19 nt, Homo sapiens
  misc_RNA (1)...(19): siRNA sense strand
gaaagaauugcacaaaaca

SEQ ID NO: 1222987 - RNA, 19 nt, Homo sapiens
  misc_RNA (1)...(19): siRNA sense strand
uaacuggagaacaggauga

SEQ ID NO: 1222988 - RNA, 19 nt, Homo sapiens
  misc_RNA (1)...(19): siRNA sense strand
ccaaauggcccgagaauug

SEQ ID NO: 1222989 - RNA, 19 nt, Homo sapiens
  misc_RNA (1)...(19): siRNA sense strand
gaacgacuccgaagaggaa

SEQ ID NO: 1222990 - RNA, 19 nt, Homo sapiens
  misc_RNA (1)...(19): siRNA sense strand
ccgcagaagugaauaugua

SEQ ID NO: 1222991 - RNA, 19 nt, Homo sapiens
  misc_RNA (1)...(19): siRNA sense strand
agacagaacucaacucauc

SEQ ID NO: 1222992 - RNA, 19 nt, Homo sapiens
  misc_RNA (1)...(19): siRNA sense strand
ggaagaaaaugaagaaguu

SEQ ID NO: 1222993 - RNA, 19 nt, Homo sapiens
  misc_RNA (1)...(19): siRNA sense strand
ucaagaagauggaguuauc

SEQ ID NO: 1222994 - RNA, 19 nt, Homo sapiens
  misc_RNA (1)...(19): siRNA sense strand
ggauacaaaucaagaagau

SEQ ID NO: 1222995 - RNA, 19 nt, Homo sapiens
  misc_RNA (1)...(19): siRNA sense strand
gagugaugaugaugcuuua

SEQ ID NO: 1222996 - RNA, 19 nt, Homo sapiens
  misc_RNA (1)...(19): siRNA sense strand
aaauggauauggaaaguga

SEQ ID NO: 1222997 - RNA, 19 nt, Homo sapiens
  misc_RNA (1)...(19): siRNA sense strand
gaacaggagcagauaagga

SEQ ID NO: 1222998 - RNA, 19 nt, Homo sapiens
  misc_RNA (1)...(19): siRNA sense strand
ccagaacacuuaccagaca

SEQ ID NO: 1222999 - RNA, 19 nt, Homo sapiens
  misc_RNA (1)...(19): siRNA sense strand
gaagaaguuuucaaaguga

SEQ ID NO: 1223000 - RNA, 19 nt, Homo sapiens
  misc_RNA (1)...(19): siRNA sense strand
ccagggcuauugaaagauu

SEQ ID NO: 1223001 - RNA, 19 nt, Homo sapiens
  misc_RNA (1)...(19): siRNA sense strand
uaccagggcuauugaaaga

SEQ ID NO: 1223002 - RNA, 19 nt, Homo sapiens
  misc_RNA (1)...(19): siRNA sense strand
gcagauaaggaaaggaauu

SEQ ID NO: 1223003 - RNA, 19 nt, Homo sapiens
  misc_RNA (1)...(19): siRNA sense strand
gaggguauguccaagacuu

SEQ ID NO: 1223004 - RNA, 19 nt, Homo sapiens
  misc_RNA (1)...(19): siRNA sense strand
gauaauacagucccuuuca

SEQ ID NO: 1223005 - RNA, 19 nt, Homo sapiens
  misc_RNA (1)...(19): siRNA sense strand
ggagugaugaugaugcuuu

SEQ ID NO: 1223006 - RNA, 19 nt, Homo sapiens
  misc_RNA (1)...(19): siRNA sense strand
gagcagauaaggaaaggaa

SEQ ID NO: 1223007 - RNA, 19 nt, Homo sapiens
  misc_RNA (1)...(19): siRNA sense strand
ugaugaugaugcuuuagua

SEQ ID NO: 1223008 - RNA, 19 nt, Homo sapiens
  misc_RNA (1)...(19): siRNA sense strand
guaaagaaacagcuuaaag

SEQ ID NO: 1223009 - RNA, 19 nt, Homo sapiens
  misc_RNA (1)...(19): siRNA sense strand
uaaaauugcucaagaagga

SEQ ID NO: 1223010 - RNA, 19 nt, Homo sapiens
  misc_RNA (1)...(19): siRNA sense strand
cagauaaggaaaggaauua

SEQ ID NO: 1223011 - RNA, 19 nt, Homo sapiens
  misc_RNA (1)...(19): siRNA sense strand
gcaagaggccucgcgagaa

SEQ ID NO: 1223012 - RNA, 19 nt, Homo sapiens
  misc_RNA (1)...(19): siRNA sense strand
aagacuugcuugaguguuu

SEQ ID NO: 1223013 - RNA, 19 nt, Homo sapiens
  misc_RNA (1)...(19): siRNA sense strand
gcucaagaaggaauauaaa

SEQ ID NO: 1223014 - RNA, 19 nt, Homo sapiens
  misc_RNA (1)...(19): siRNA sense strand
ugacucccguuacuauuga

SEQ ID NO: 1223015 - RNA, 19 nt, Homo sapiens
  misc_RNA (1)...(19): siRNA sense strand
caagaggccucgcgagaac

SEQ ID NO: 1223016 - RNA, 19 nt, Homo sapiens
  misc_RNA (1)...(19): siRNA sense strand
gaacauggugaagaugaaa

SEQ ID NO: 1223017 - RNA, 19 nt, Homo sapiens
  misc_RNA (1)...(19): siRNA sense strand
gaaagaaaagucacaaaga

SEQ ID NO: 1223018 - RNA, 19 nt, Homo sapiens
  misc_RNA (1)...(19): siRNA sense strand
gaugaugaugcuuuaguaa

SEQ ID NO: 1223019 - RNA, 19 nt, Homo sapiens
  misc_RNA (1)...(19): siRNA sense strand
gaagaaaucaaguuauagc

SEQ ID NO: 1223020 - RNA, 19 nt, Homo sapiens
  misc_RNA (1)...(19): siRNA sense strand
ugaaauggauauggaaagu

SEQ ID NO: 1223021 - RNA, 19 nt, Homo sapiens
  misc_RNA (1)...(19): siRNA sense strand
caacucaucagcugaaagu

SEQ ID NO: 1223022 - RNA, 19 nt, Homo sapiens
  misc_RNA (1)...(19): siRNA sense strand
gaugagaaacgccggauag

SEQ ID NO: 1223023 - RNA, 19 nt, Homo sapiens
  misc_RNA (1)...(19): siRNA sense strand
aagaugaaauggauaugga

SEQ ID NO: 1223024 - RNA, 19 nt, Homo sapiens
  misc_RNA (1)...(19): siRNA sense strand
caaaucgacagcagcauga

SEQ ID NO: 1223025 - RNA, 19 nt, Homo sapiens
  misc_RNA (1)...(19): siRNA sense strand
gaugaaauggauauggaaa

SEQ ID NO: 1223026 - RNA, 19 nt, Homo sapiens
  misc_RNA (1)...(19): siRNA sense strand
uaauacagucccuuucaaa

SEQ ID NO: 1223027 - RNA, 19 nt, Homo sapiens
  misc_RNA (1)...(19): siRNA sense strand
uguacuaccagaacacuua

SEQ ID NO: 1223028 - RNA, 19 nt, Homo sapiens
  misc_RNA (1)...(19): siRNA sense strand
uauacaugcugcaaggaaa

SEQ ID NO: 1223029 - RNA, 19 nt, Homo sapiens
  misc_RNA (1)...(19): siRNA sense strand
uaagacagaacucaacuca

SEQ ID NO: 1223030 - RNA, 19 nt, Homo sapiens
  misc_RNA (1)...(19): siRNA sense strand
ggugaacgguauaaauuuu

SEQ ID NO: 1223031 - RNA, 19 nt, Homo sapiens
  misc_RNA (1)...(19): siRNA sense strand
uggcauuccuuauaguuau

SEQ ID NO: 1223032 - RNA, 19 nt, Homo sapiens
  misc_RNA (1)...(19): siRNA sense strand
uaauaucccucagguucaa

SEQ ID NO: 1223033 - RNA, 19 nt, Homo sapiens
  misc_RNA (1)...(19): siRNA sense strand
uuagagaagaugagaauga

SEQ ID NO: 1223034 - RNA, 19 nt, Homo sapiens
  misc_RNA (1)...(19): siRNA sense strand
ggaguuaucaucagugaac

SEQ ID NO: 1223035 - RNA, 19 nt, Homo sapiens
  misc_RNA (1)...(19): siRNA sense strand
gcaagaaaugcgaggguau

SEQ ID NO: 1223036 - RNA, 19 nt, Homo sapiens
  misc_RNA (1)...(19): siRNA sense strand
cagaagugaauauguacua

SEQ ID NO: 1223037 - RNA, 19 nt, Homo sapiens
  misc_RNA (1)...(19): siRNA sense strand
uagagaagaugagaaugau

SEQ ID NO: 1223038 - RNA, 19 nt, Homo sapiens
  misc_RNA (1)...(19): siRNA sense strand
ugaacauggugaagaugaa

SEQ ID NO: 1223039 - RNA, 19 nt, Homo sapiens
  misc_RNA (1)...(19): siRNA sense strand
gagauuucacuccucauga

SEQ ID NO: 1223040 - RNA, 19 nt, Homo sapiens
  misc_RNA (1)...(19): siRNA sense strand
gacagcagcaugagaaaca

SEQ ID NO: 1223041 - RNA, 19 nt, Homo sapiens
  misc_RNA (1)...(19): siRNA sense strand
ccagugaugaugaagauga

SEQ ID NO: 1223042 - RNA, 19 nt, Homo sapiens
  misc_RNA (1)...(19): siRNA sense strand
gaagaugaaauggauaugg

SEQ ID NO: 1223043 - RNA, 19 nt, Homo sapiens
  misc_RNA (1)...(19): siRNA sense strand
ugagaugacucccguuacu

SEQ ID NO: 1223044 - RNA, 19 nt, Homo sapiens
  misc_RNA (1)...(19): siRNA sense strand
cagauaauacagucccuuu

SEQ ID NO: 1223045 - RNA, 19 nt, Homo sapiens
  misc_RNA (1)...(19): siRNA sense strand
cauccuauggcauuccuua

SEQ ID NO: 1223046 - RNA, 19 nt, Homo sapiens
  misc_RNA (1)...(19): siRNA sense strand
ugaagaugacgaugagaaa

SEQ ID NO: 1223047 - RNA, 19 nt, Homo sapiens
  misc_RNA (1)...(19): siRNA sense strand
gugaacaaccuuuggacaa

SEQ ID NO: 1223048 - RNA, 19 nt, Homo sapiens
  misc_RNA (1)...(19): siRNA sense strand
caugaaagaauugcacaaa

SEQ ID NO: 1223049 - RNA, 19 nt, Homo sapiens
  misc_RNA (1)...(19): siRNA sense strand
gagaugacucccguuacua

SEQ ID NO: 1223050 - RNA, 19 nt, Homo sapiens
  misc_RNA (1)...(19): siRNA sense strand
gaauauguacuaccagaac

SEQ ID NO: 1223051 - RNA, 19 nt, Homo sapiens
  misc_RNA (1)...(19): siRNA sense strand
caggacauguuaaggauac

SEQ ID NO: 1223052 - RNA, 19 nt, Homo sapiens
  misc_RNA (1)...(19): siRNA sense strand
gauuucacuccucaugaua

SEQ ID NO: 1223053 - RNA, 19 nt, Homo sapiens
  misc_RNA (1)...(19): siRNA sense strand
cagugaacauggugaagau

SEQ ID NO: 1223054 - RNA, 19 nt, Homo sapiens
  misc_RNA (1)...(19): siRNA sense strand
ggguauuggugaacgguau

SEQ ID NO: 1223055 - RNA, 19 nt, Homo sapiens
  misc_RNA (1)...(19): siRNA sense strand
cagggcuauugaaagauua

SEQ ID NO: 1223056 - RNA, 19 nt, Homo sapiens
  misc_RNA (1)...(19): siRNA sense strand
gaugaugcuuuaguaacug

SEQ ID NO: 1223057 - RNA, 19 nt, Homo sapiens
  misc_RNA (1)...(19): siRNA sense strand
uaucaucagugaacauggu

SEQ ID NO: 1223058 - RNA, 19 nt, Homo sapiens
  misc_RNA (1)...(19): siRNA sense strand
aaugagaugacucccguua

SEQ ID NO: 1223059 - RNA, 19 nt, Homo sapiens
  misc_RNA (1)...(19): siRNA sense strand
ugaugaagaugacgaugag

SEQ ID NO: 1223060 - RNA, 19 nt, Homo sapiens
  misc_RNA (1)...(19): siRNA sense strand
gauaaugagccugguaaag

SEQ ID NO: 1223061 - RNA, 19 nt, Homo sapiens
  misc_RNA (1)...(19): siRNA sense strand
gaacacuuaccagacaaug

SEQ ID NO: 1223062 - RNA, 19 nt, Homo sapiens
  misc_RNA (1)...(19): siRNA sense strand
ugaugaugcuuuaguaacu

SEQ ID NO: 1223063 - RNA, 19 nt, Homo sapiens
  misc_RNA (1)...(19): siRNA sense strand
gugaacauggugaagauga

SEQ ID NO: 1223064 - RNA, 19 nt, Homo sapiens
  misc_RNA (1)...(19): siRNA sense strand
caagaaaugcgaggguaug

SEQ ID NO: 1223065 - RNA, 19 nt, Homo sapiens
  misc_RNA (1)...(19): siRNA sense strand
caugagaaacaucugcaaa

SEQ ID NO: 1223066 - RNA, 19 nt, Homo sapiens
  misc_RNA (1)...(19): siRNA sense strand
gguaaagaaacagcuuaaa

SEQ ID NO: 1223067 - RNA, 19 nt, Homo sapiens
  misc_RNA (1)...(19): siRNA sense strand
auaauacagucccuuucaa

SEQ ID NO: 1223068 - RNA, 19 nt, Homo sapiens
  misc_RNA (1)...(19): siRNA sense strand
cucaucagcugaaagugaa

SEQ ID NO: 1223069 - RNA, 19 nt, Homo sapiens
  misc_RNA (1)...(19): siRNA sense strand
gaaauggauauggaaagug

SEQ ID NO: 1223070 - RNA, 19 nt, Homo sapiens
  misc_RNA (1)...(19): siRNA sense strand
gugaagaugaaauggauau

SEQ ID NO: 1223071 - RNA, 19 nt, Homo sapiens
  misc_RNA (1)...(19): siRNA sense strand
gagaaugaugccagugaug

SEQ ID NO: 1223072 - RNA, 19 nt, Homo sapiens
  misc_RNA (1)...(19): siRNA sense strand
gaugacucccguuacuauu

SEQ ID NO: 1223073 - RNA, 19 nt, Homo sapiens
  misc_RNA (1)...(19): siRNA sense strand
gaugggaacaggagcagau

SEQ ID NO: 1223074 - RNA, 19 nt, Homo sapiens
  misc_RNA (1)...(19): siRNA sense strand
gcccgagaauugggagauu

SEQ ID NO: 1223075 - RNA, 19 nt, Homo sapiens
  misc_RNA (1)...(19): siRNA sense strand
cagaacacuuaccagacaa

SEQ ID NO: 1223076 - RNA, 19 nt, Homo sapiens
  misc_RNA (1)...(19): siRNA sense strand
gaaaagucacaaagacaaa

SEQ ID NO: 1223077 - RNA, 19 nt, Homo sapiens
  misc_RNA (1)...(19): siRNA sense strand
ugagaaacgccggauaguu

SEQ ID NO: 1223078 - RNA, 19 nt, Homo sapiens
  misc_RNA (1)...(19): siRNA sense strand
gaaugaugccagugaugau

SEQ ID NO: 1223079 - RNA, 19 nt, Homo sapiens
  misc_RNA (1)...(19): siRNA sense strand
ugagaaugaugccagugau

SEQ ID NO: 1223080 - RNA, 19 nt, Homo sapiens
  misc_RNA (1)...(19): siRNA sense strand
agauuucacuccucaugau

SEQ ID NO: 1223081 - RNA, 19 nt, Homo sapiens
  misc_RNA (1)...(19): siRNA sense strand
ugagaaacaucugcaaagc

SEQ ID NO: 1223082 - RNA, 19 nt, Homo sapiens
  misc_RNA (1)...(19): siRNA sense strand
ggacuccaugaaagaauug

SEQ ID NO: 1223083 - RNA, 19 nt, Homo sapiens
  misc_RNA (1)...(19): siRNA sense strand
agaaugaugccagugauga

SEQ ID NO: 1223084 - RNA, 19 nt, Homo sapiens
  misc_RNA (1)...(19): siRNA sense strand
uuuaguaacuggagaacag

SEQ ID NO: 1223085 - RNA, 19 nt, Homo sapiens
  misc_RNA (1)...(19): siRNA sense strand
gcgaggguauguccaagac

SEQ ID NO: 1223086 - RNA, 19 nt, Homo sapiens
  misc_RNA (1)...(19): siRNA sense strand
gaaagaauugcacaaaaca

SEQ ID NO: 1223087 - RNA, 19 nt, Homo sapiens
  misc_RNA (1)...(19): siRNA sense strand
uaacuggagaacaggauga

SEQ ID NO: 1223088 - RNA, 19 nt, Homo sapiens
  misc_RNA (1)...(19): siRNA sense strand
ccaaauggcccgagaauug

SEQ ID NO: 1223089 - RNA, 19 nt, Homo sapiens
  misc_RNA (1)...(19): siRNA sense strand
gaacgacuccgaagaggaa

SEQ ID NO: 1223090 - RNA, 19 nt, Homo sapiens
  misc_RNA (1)...(19): siRNA sense strand
ccgcagaagugaauaugua

SEQ ID NO: 1223091 - RNA, 19 nt, Homo sapiens
  misc_RNA (1)...(19): siRNA sense strand
agacagaacucaacucauc

SEQ ID NO: 1223092 - RNA, 19 nt, Homo sapiens
  misc_RNA (1)...(19): siRNA sense strand
ggaagaaaaugaagaaguu

SEQ ID NO: 1223093 - RNA, 19 nt, Homo sapiens
  misc_RNA (1)...(19): siRNA sense strand
ucaagaagauggaguuauc

SEQ ID NO: 1223094 - RNA, 19 nt, Homo sapiens
  misc_RNA (1)...(19): siRNA sense strand
ggauacaaaucaagaagau

SEQ ID NO: 1223095 - RNA, 19 nt, Homo sapiens
  misc_RNA (1)...(19): siRNA sense strand
gagugaugaugaugcuuua

SEQ ID NO: 1223096 - RNA, 19 nt, Homo sapiens
  misc_RNA (1)...(19): siRNA sense strand
aaauggauauggaaaguga

SEQ ID NO: 1223097 - RNA, 19 nt, Homo sapiens
  misc_RNA (1)...(19): siRNA sense strand
gaacaggagcagauaagga

SEQ ID NO: 1223098 - RNA, 19 nt, Homo sapiens
  misc_RNA (1)...(19): siRNA sense strand
ccagaacacuuaccagaca

SEQ ID NO: 1223099 - RNA, 19 nt, Homo sapiens
  misc_RNA (1)...(19): siRNA sense strand
gaagaaguuuucaaaguga

SEQ ID NO: 1223100 - RNA, 19 nt, Homo sapiens
  misc_RNA (1)...(19): siRNA sense strand
ccagggcuauugaaagauu

SEQ ID NO: 1223101 - RNA, 19 nt, Homo sapiens
  misc_RNA (1)...(19): siRNA sense strand
uaccagggcuauugaaaga

SEQ ID NO: 1223102 - RNA, 19 nt, Homo sapiens
  misc_RNA (1)...(19): siRNA sense strand
gcagauaaggaaaggaauu

SEQ ID NO: 1223103 - RNA, 19 nt, Homo sapiens
  misc_RNA (1)...(19): siRNA sense strand
gaggguauguccaagacuu

SEQ ID NO: 1223104 - RNA, 19 nt, Homo sapiens
  misc_RNA (1)...(19): siRNA sense strand
gauaauacagucccuuuca

SEQ ID NO: 1223105 - RNA, 19 nt, Homo sapiens
  misc_RNA (1)...(19): siRNA sense strand
ggagugaugaugaugcuuu

SEQ ID NO: 1223106 - RNA, 19 nt, Homo sapiens
  misc_RNA (1)...(19): siRNA sense strand
gagcagauaaggaaaggaa

SEQ ID NO: 1223107 - RNA, 19 nt, Homo sapiens
  misc_RNA (1)...(19): siRNA sense strand
ugaugaugaugcuuuagua

SEQ ID NO: 1223108 - RNA, 19 nt, Homo sapiens
  misc_RNA (1)...(19): siRNA sense strand
guaaagaaacagcuuaaag

SEQ ID NO: 1223109 - RNA, 19 nt, Homo sapiens
  misc_RNA (1)...(19): siRNA sense strand
uaaaauugcucaagaagga

SEQ ID NO: 1223110 - RNA, 19 nt, Homo sapiens
  misc_RNA (1)...(19): siRNA sense strand
cagauaaggaaaggaauua

SEQ ID NO: 1223111 - RNA, 19 nt, Homo sapiens
  misc_RNA (1)...(19): siRNA sense strand
gcaagaggccucgcgagaa

SEQ ID NO: 1223112 - RNA, 19 nt, Homo sapiens
  misc_RNA (1)...(19): siRNA sense strand
aagacuugcuugaguguuu

SEQ ID NO: 1223113 - RNA, 19 nt, Homo sapiens
  misc_RNA (1)...(19): siRNA sense strand
gcucaagaaggaauauaaa

SEQ ID NO: 1223114 - RNA, 19 nt, Homo sapiens
  misc_RNA (1)...(19): siRNA sense strand
ugacucccguuacuauuga

SEQ ID NO: 1223115 - RNA, 19 nt, Homo sapiens
  misc_RNA (1)...(19): siRNA sense strand
caagaggccucgcgagaac

SEQ ID NO: 1223116 - RNA, 19 nt, Homo sapiens
  misc_RNA (1)...(19): siRNA sense strand
gaacauggugaagaugaaa

SEQ ID NO: 1223117 - RNA, 19 nt, Homo sapiens
  misc_RNA (1)...(19): siRNA sense strand
gaaagaaaagucacaaaga

SEQ ID NO: 1223118 - RNA, 19 nt, Homo sapiens
  misc_RNA (1)...(19): siRNA sense strand
gaugaugaugcuuuaguaa

SEQ ID NO: 1223119 - RNA, 19 nt, Homo sapiens
  misc_RNA (1)...(19): siRNA sense strand
gaagaaaucaaguuauagc

SEQ ID NO: 1223120 - RNA, 19 nt, Homo sapiens
  misc_RNA (1)...(19): siRNA sense strand
ugaaauggauauggaaagu

SEQ ID NO: 1223121 - RNA, 19 nt, Homo sapiens
  misc_RNA (1)...(19): siRNA sense strand
caacucaucagcugaaagu

SEQ ID NO: 1223122 - RNA, 19 nt, Homo sapiens
  misc_RNA (1)...(19): siRNA sense strand
gaugagaaacgccggauag

SEQ ID NO: 1223123 - RNA, 19 nt, Homo sapiens
  misc_RNA (1)...(19): siRNA sense strand
aagaugaaauggauaugga

SEQ ID NO: 1223124 - RNA, 19 nt, Homo sapiens
  misc_RNA (1)...(19): siRNA sense strand
caaaucgacagcagcauga

SEQ ID NO: 1223125 - RNA, 19 nt, Homo sapiens
  misc_RNA (1)...(19): siRNA sense strand
gaugaaauggauauggaaa

SEQ ID NO: 1223126 - RNA, 19 nt, Homo sapiens
  misc_RNA (1)...(19): siRNA sense strand
uaauacagucccuuucaaa

SEQ ID NO: 1223127 - RNA, 19 nt, Homo sapiens
  misc_RNA (1)...(19): siRNA sense strand
uguacuaccagaacacuua

SEQ ID NO: 1223128 - RNA, 19 nt, Homo sapiens
  misc_RNA (1)...(19): siRNA sense strand
uauacaugcugcaaggaaa

SEQ ID NO: 1223129 - RNA, 19 nt, Homo sapiens
  misc_RNA (1)...(19): siRNA sense strand
uaagacagaacucaacuca

SEQ ID NO: 1223130 - RNA, 19 nt, Homo sapiens
  misc_RNA (1)...(19): siRNA sense strand
ggugaacgguauaaauuuu

SEQ ID NO: 1223131 - RNA, 19 nt, Homo sapiens
  misc_RNA (1)...(19): siRNA sense strand
uggcauuccuuauaguuau

SEQ ID NO: 1223132 - RNA, 19 nt, Homo sapiens
  misc_RNA (1)...(19): siRNA sense strand
uaauaucccucagguucaa

SEQ ID NO: 1223133 - RNA, 19 nt, Homo sapiens
  misc_RNA (1)...(19): siRNA sense strand
uuagagaagaugagaauga

SEQ ID NO: 1223134 - RNA, 19 nt, Homo sapiens
  misc_RNA (1)...(19): siRNA sense strand
ggaguuaucaucagugaac

SEQ ID NO: 1223135 - RNA, 19 nt, Homo sapiens
  misc_RNA (1)...(19): siRNA sense strand
gcaagaaaugcgaggguau

SEQ ID NO: 1223136 - RNA, 19 nt, Homo sapiens
  misc_RNA (1)...(19): siRNA sense strand
cagaagugaauauguacua

SEQ ID NO: 1223137 - RNA, 19 nt, Homo sapiens
  misc_RNA (1)...(19): siRNA sense strand
uagagaagaugagaaugau

SEQ ID NO: 1223138 - RNA, 19 nt, Homo sapiens
  misc_RNA (1)...(19): siRNA sense strand
ugaacauggugaagaugaa

SEQ ID NO: 1223139 - RNA, 19 nt, Homo sapiens
  misc_RNA (1)...(19): siRNA sense strand
gagauuucacuccucauga

SEQ ID NO: 1223140 - RNA, 19 nt, Homo sapiens
  misc_RNA (1)...(19): siRNA sense strand
gacagcagcaugagaaaca

SEQ ID NO: 1223141 - RNA, 19 nt, Homo sapiens
  misc_RNA (1)...(19): siRNA sense strand
ccagugaugaugaagauga

SEQ ID NO: 1223142 - RNA, 19 nt, Homo sapiens
  misc_RNA (1)...(19): siRNA sense strand
gaagaugaaauggauaugg

SEQ ID NO: 1223143 - RNA, 19 nt, Homo sapiens
  misc_RNA (1)...(19): siRNA sense strand
ugagaugacucccguuacu

SEQ ID NO: 1223144 - RNA, 19 nt, Homo sapiens
  misc_RNA (1)...(19): siRNA sense strand
cagauaauacagucccuuu

SEQ ID NO: 1223145 - RNA, 19 nt, Homo sapiens
  misc_RNA (1)...(19): siRNA sense strand
cauccuauggcauuccuua

SEQ ID NO: 1223146 - RNA, 19 nt, Homo sapiens
  misc_RNA (1)...(19): siRNA sense strand
ugaagaugacgaugagaaa

SEQ ID NO: 1223147 - RNA, 19 nt, Homo sapiens
  misc_RNA (1)...(19): siRNA sense strand
gugaacaaccuuuggacaa

SEQ ID NO: 1223148 - RNA, 19 nt, Homo sapiens
  misc_RNA (1)...(19): siRNA sense strand
caugaaagaauugcacaaa

SEQ ID NO: 1223149 - RNA, 19 nt, Homo sapiens
  misc_RNA (1)...(19): siRNA sense strand
gagaugacucccguuacua

SEQ ID NO: 1223150 - RNA, 19 nt, Homo sapiens
  misc_RNA (1)...(19): siRNA sense strand
gaauauguacuaccagaac

SEQ ID NO: 1223151 - RNA, 19 nt, Homo sapiens
  misc_RNA (1)...(19): siRNA sense strand
caggacauguuaaggauac

SEQ ID NO: 1223152 - RNA, 19 nt, Homo sapiens
  misc_RNA (1)...(19): siRNA sense strand
gauuucacuccucaugaua

SEQ ID NO: 1223153 - RNA, 19 nt, Homo sapiens
  misc_RNA (1)...(19): siRNA sense strand
cagugaacauggugaagau

SEQ ID NO: 1223154 - RNA, 19 nt, Homo sapiens
  misc_RNA (1)...(19): siRNA sense strand
ggguauuggugaacgguau

SEQ ID NO: 1223155 - RNA, 19 nt, Homo sapiens
  misc_RNA (1)...(19): siRNA sense strand
cagggcuauugaaagauua

SEQ ID NO: 1223156 - RNA, 19 nt, Homo sapiens
  misc_RNA (1)...(19): siRNA sense strand
gaugaugcuuuaguaacug

SEQ ID NO: 1223157 - RNA, 19 nt, Homo sapiens
  misc_RNA (1)...(19): siRNA sense strand
uaucaucagugaacauggu

SEQ ID NO: 1223158 - RNA, 19 nt, Homo sapiens
  misc_RNA (1)...(19): siRNA sense strand
aaugagaugacucccguua

SEQ ID NO: 1223159 - RNA, 19 nt, Homo sapiens
  misc_RNA (1)...(19): siRNA sense strand
ugaugaagaugacgaugag

SEQ ID NO: 1223160 - RNA, 19 nt, Homo sapiens
  misc_RNA (1)...(19): siRNA sense strand
gauaaugagccugguaaag

SEQ ID NO: 1223161 - RNA, 19 nt, Homo sapiens
  misc_RNA (1)...(19): siRNA sense strand
gaacacuuaccagacaaug

SEQ ID NO: 1223162 - RNA, 19 nt, Homo sapiens
  misc_RNA (1)...(19): siRNA sense strand
ugaugaugcuuuaguaacu

SEQ ID NO: 1223163 - RNA, 19 nt, Homo sapiens
  misc_RNA (1)...(19): siRNA sense strand
gugaacauggugaagauga

SEQ ID NO: 1223164 - RNA, 19 nt, Homo sapiens
  misc_RNA (1)...(19): siRNA sense strand
caagaaaugcgaggguaug

SEQ ID NO: 1223165 - RNA, 19 nt, Homo sapiens
  misc_RNA (1)...(19): siRNA sense strand
caugagaaacaucugcaaa

SEQ ID NO: 1223166 - RNA, 19 nt, Homo sapiens
  misc_RNA (1)...(19): siRNA sense strand
gguaaagaaacagcuuaaa

SEQ ID NO: 1223167 - RNA, 19 nt, Homo sapiens
  misc_RNA (1)...(19): siRNA sense strand
auaauacagucccuuucaa

SEQ ID NO: 1223168 - RNA, 19 nt, Homo sapiens
  misc_RNA (1)...(19): siRNA sense strand
cucaucagcugaaagugaa

SEQ ID NO: 1223169 - RNA, 19 nt, Homo sapiens
  misc_RNA (1)...(19): siRNA sense strand
gaaauggauauggaaagug

SEQ ID NO: 1223170 - RNA, 19 nt, Homo sapiens
  misc_RNA (1)...(19): siRNA sense strand
gugaagaugaaauggauau

SEQ ID NO: 1223171 - RNA, 19 nt, Homo sapiens
  misc_RNA (1)...(19): siRNA sense strand
gagaaugaugccagugaug

SEQ ID NO: 1223172 - RNA, 19 nt, Homo sapiens
  misc_RNA (1)...(19): siRNA sense strand
gaugacucccguuacuauu

SEQ ID NO: 1223173 - RNA, 19 nt, Homo sapiens
  misc_RNA (1)...(19): siRNA sense strand
gaugggaacaggagcagau

SEQ ID NO: 1223174 - RNA, 19 nt, Homo sapiens
  misc_RNA (1)...(19): siRNA sense strand
gcccgagaauugggagauu

SEQ ID NO: 1223175 - RNA, 19 nt, Homo sapiens
  misc_RNA (1)...(19): siRNA sense strand
cagaacacuuaccagacaa

SEQ ID NO: 1223176 - RNA, 19 nt, Homo sapiens
  misc_RNA (1)...(19): siRNA sense strand
gaaaagucacaaagacaaa

SEQ ID NO: 1223177 - RNA, 19 nt, Homo sapiens
  misc_RNA (1)...(19): siRNA sense strand
ugagaaacgccggauaguu

SEQ ID NO: 1223178 - RNA, 19 nt, Homo sapiens
  misc_RNA (1)...(19): siRNA sense strand
gaaugaugccagugaugau

SEQ ID NO: 1223179 - RNA, 19 nt, Homo sapiens
  misc_RNA (1)...(19): siRNA sense strand
ugagaaugaugccagugau

SEQ ID NO: 1223180 - RNA, 19 nt, Homo sapiens
  misc_RNA (1)...(19): siRNA sense strand
agauuucacuccucaugau

SEQ ID NO: 1223181 - RNA, 19 nt, Homo sapiens
  misc_RNA (1)...(19): siRNA sense strand
ugagaaacaucugcaaagc

SEQ ID NO: 1223182 - RNA, 19 nt, Homo sapiens
  misc_RNA (1)...(19): siRNA sense strand
ggacuccaugaaagaauug

SEQ ID NO: 1223183 - RNA, 19 nt, Homo sapiens
  misc_RNA (1)...(19): siRNA sense strand
agaaugaugccagugauga

SEQ ID NO: 1223184 - RNA, 19 nt, Homo sapiens
  misc_RNA (1)...(19): siRNA sense strand
uuuaguaacuggagaacag

SEQ ID NO: 1223185 - RNA, 19 nt, Homo sapiens
  misc_RNA (1)...(19): siRNA sense strand
gcgaggguauguccaagac

SEQ ID NO: 1223186 - RNA, 19 nt, Homo sapiens
  misc_RNA (1)...(19): siRNA sense strand
gaaagaauugcacaaaaca

SEQ ID NO: 1223187 - RNA, 19 nt, Homo sapiens
  misc_RNA (1)...(19): siRNA sense strand
uaacuggagaacaggauga

SEQ ID NO: 1223188 - RNA, 19 nt, Homo sapiens
  misc_RNA (1)...(19): siRNA sense strand
ccaaauggcccgagaauug

SEQ ID NO: 1223189 - RNA, 19 nt, Homo sapiens
  misc_RNA (1)...(19): siRNA sense strand
gaacgacuccgaagaggaa

SEQ ID NO: 1223190 - RNA, 19 nt, Homo sapiens
  misc_RNA (1)...(19): siRNA sense strand
ccgcagaagugaauaugua

SEQ ID NO: 1223191 - RNA, 19 nt, Homo sapiens
  misc_RNA (1)...(19): siRNA sense strand
agacagaacucaacucauc

SEQ ID NO: 1223192 - RNA, 19 nt, Homo sapiens
  misc_RNA (1)...(19): siRNA sense strand
ggaagaaaaugaagaaguu

SEQ ID NO: 1223193 - RNA, 19 nt, Homo sapiens
  misc_RNA (1)...(19): siRNA sense strand
ucaagaagauggaguuauc

SEQ ID NO: 1223194 - RNA, 19 nt, Homo sapiens
  misc_RNA (1)...(19): siRNA sense strand
ggauacaaaucaagaagau

SEQ ID NO: 1223195 - RNA, 19 nt, Homo sapiens
  misc_RNA (1)...(19): siRNA sense strand
gagugaugaugaugcuuua

SEQ ID NO: 1223196 - RNA, 19 nt, Homo sapiens
  misc_RNA (1)...(19): siRNA sense strand
aaauggauauggaaaguga

SEQ ID NO: 1223197 - RNA, 19 nt, Homo sapiens
  misc_RNA (1)...(19): siRNA sense strand
gaacaggagcagauaagga

SEQ ID NO: 1223198 - RNA, 19 nt, Homo sapiens
  misc_RNA (1)...(19): siRNA sense strand
ccagaacacuuaccagaca

SEQ ID NO: 1223199 - RNA, 19 nt, Homo sapiens
  misc_RNA (1)...(19): siRNA sense strand
gaagaaguuuucaaaguga

SEQ ID NO: 1223200 - RNA, 19 nt, Homo sapiens
  misc_RNA (1)...(19): siRNA sense strand
ccagggcuauugaaagauu

SEQ ID NO: 1223201 - RNA, 19 nt, Homo sapiens
  misc_RNA (1)...(19): siRNA sense strand
uaccagggcuauugaaaga

SEQ ID NO: 1223202 - RNA, 19 nt, Homo sapiens
  misc_RNA (1)...(19): siRNA sense strand
gcagauaaggaaaggaauu

SEQ ID NO: 1223203 - RNA, 19 nt, Homo sapiens
  misc_RNA (1)...(19): siRNA sense strand
gaggguauguccaagacuu

SEQ ID NO: 1223204 - RNA, 19 nt, Homo sapiens
  misc_RNA (1)...(19): siRNA sense strand
gauaauacagucccuuuca

SEQ ID NO: 1223205 - RNA, 19 nt, Homo sapiens
  misc_RNA (1)...(19): siRNA sense strand
ggagugaugaugaugcuuu

SEQ ID NO: 1223206 - RNA, 19 nt, Homo sapiens
  misc_RNA (1)...(19): siRNA sense strand
gagcagauaaggaaaggaa

SEQ ID NO: 1223207 - RNA, 19 nt, Homo sapiens
  misc_RNA (1)...(19): siRNA sense strand
ugaugaugaugcuuuagua

SEQ ID NO: 1223208 - RNA, 19 nt, Homo sapiens
  misc_RNA (1)...(19): siRNA sense strand
guaaagaaacagcuuaaag

SEQ ID NO: 1223209 - RNA, 19 nt, Homo sapiens
  misc_RNA (1)...(19): siRNA sense strand
uaaaauugcucaagaagga

SEQ ID NO: 1223210 - RNA, 19 nt, Homo sapiens
  misc_RNA (1)...(19): siRNA sense strand
cagauaaggaaaggaauua

SEQ ID NO: 1223211 - RNA, 19 nt, Homo sapiens
  misc_RNA (1)...(19): siRNA sense strand
gcaagaggccucgcgagaa

SEQ ID NO: 1223212 - RNA, 19 nt, Homo sapiens
  misc_RNA (1)...(19): siRNA sense strand
aagacuugcuugaguguuu

SEQ ID NO: 1223213 - RNA, 19 nt, Homo sapiens
  misc_RNA (1)...(19): siRNA sense strand
gcucaagaaggaauauaaa

SEQ ID NO: 1223214 - RNA, 19 nt, Homo sapiens
  misc_RNA (1)...(19): siRNA sense strand
ugacucccguuacuauuga

SEQ ID NO: 1223215 - RNA, 19 nt, Homo sapiens
  misc_RNA (1)...(19): siRNA sense strand
caagaggccucgcgagaac

SEQ ID NO: 1223216 - RNA, 19 nt, Homo sapiens
  misc_RNA (1)...(19): siRNA sense strand
gaacauggugaagaugaaa

SEQ ID NO: 1223217 - RNA, 19 nt, Homo sapiens
  misc_RNA (1)...(19): siRNA sense strand
gaaagaaaagucacaaaga

SEQ ID NO: 1223218 - RNA, 19 nt, Homo sapiens
  misc_RNA (1)...(19): siRNA sense strand
gaugaugaugcuuuaguaa

SEQ ID NO: 1223219 - RNA, 19 nt, Homo sapiens
  misc_RNA (1)...(19): siRNA sense strand
gaagaaaucaaguuauagc

SEQ ID NO: 1223220 - RNA, 19 nt, Homo sapiens
  misc_RNA (1)...(19): siRNA sense strand
ugaaauggauauggaaagu

SEQ ID NO: 1223221 - RNA, 19 nt, Homo sapiens
  misc_RNA (1)...(19): siRNA sense strand
caacucaucagcugaaagu

SEQ ID NO: 1223222 - RNA, 19 nt, Homo sapiens
  misc_RNA (1)...(19): siRNA sense strand
gaugagaaacgccggauag

SEQ ID NO: 1223223 - RNA, 19 nt, Homo sapiens
  misc_RNA (1)...(19): siRNA sense strand
aagaugaaauggauaugga

SEQ ID NO: 1223224 - RNA, 19 nt, Homo sapiens
  misc_RNA (1)...(19): siRNA sense strand
caaaucgacagcagcauga

SEQ ID NO: 1223225 - RNA, 19 nt, Homo sapiens
  misc_RNA (1)...(19): siRNA sense strand
gaugaaauggauauggaaa

SEQ ID NO: 1223226 - RNA, 19 nt, Homo sapiens
  misc_RNA (1)...(19): siRNA sense strand
uaauacagucccuuucaaa

SEQ ID NO: 1223227 - RNA, 19 nt, Homo sapiens
  misc_RNA (1)...(19): siRNA sense strand
uguacuaccagaacacuua

SEQ ID NO: 1223228 - RNA, 19 nt, Homo sapiens
  misc_RNA (1)...(19): siRNA sense strand
uauacaugcugcaaggaaa

SEQ ID NO: 1223229 - RNA, 19 nt, Homo sapiens
  misc_RNA (1)...(19): siRNA sense strand
uaagacagaacucaacuca

SEQ ID NO: 1223230 - RNA, 19 nt, Homo sapiens
  misc_RNA (1)...(19): siRNA sense strand
ggugaacgguauaaauuuu

SEQ ID NO: 1223231 - RNA, 19 nt, Homo sapiens
  misc_RNA (1)...(19): siRNA sense strand
uggcauuccuuauaguuau

SEQ ID NO: 1223232 - RNA, 19 nt, Homo sapiens
  misc_RNA (1)...(19): siRNA sense strand
uaauaucccucagguucaa

SEQ ID NO: 1223233 - RNA, 19 nt, Homo sapiens
  misc_RNA (1)...(19): siRNA sense strand
uuagagaagaugagaauga

SEQ ID NO: 1223234 - RNA, 19 nt, Homo sapiens
  misc_RNA (1)...(19): siRNA sense strand
ggaguuaucaucagugaac

SEQ ID NO: 1223235 - RNA, 19 nt, Homo sapiens
  misc_RNA (1)...(19): siRNA sense strand
gcaagaaaugcgaggguau

SEQ ID NO: 1223236 - RNA, 19 nt, Homo sapiens
  misc_RNA (1)...(19): siRNA sense strand
cagaagugaauauguacua

SEQ ID NO: 1223237 - RNA, 19 nt, Homo sapiens
  misc_RNA (1)...(19): siRNA sense strand
uagagaagaugagaaugau

SEQ ID NO: 1223238 - RNA, 19 nt, Homo sapiens
  misc_RNA (1)...(19): siRNA sense strand
ugaacauggugaagaugaa

SEQ ID NO: 1223239 - RNA, 19 nt, Homo sapiens
  misc_RNA (1)...(19): siRNA sense strand
gagauuucacuccucauga

SEQ ID NO: 1223240 - RNA, 19 nt, Homo sapiens
  misc_RNA (1)...(19): siRNA sense strand
gacagcagcaugagaaaca

SEQ ID NO: 1223241 - RNA, 19 nt, Homo sapiens
  misc_RNA (1)...(19): siRNA sense strand
ccagugaugaugaagauga

SEQ ID NO: 1223242 - RNA, 19 nt, Homo sapiens
  misc_RNA (1)...(19): siRNA sense strand
gaagaugaaauggauaugg

SEQ ID NO: 1223243 - RNA, 19 nt, Homo sapiens
  misc_RNA (1)...(19): siRNA sense strand
ugagaugacucccguuacu

SEQ ID NO: 1223244 - RNA, 19 nt, Homo sapiens
  misc_RNA (1)...(19): siRNA sense strand
cagauaauacagucccuuu

SEQ ID NO: 1223245 - RNA, 19 nt, Homo sapiens
  misc_RNA (1)...(19): siRNA sense strand
cauccuauggcauuccuua

SEQ ID NO: 1223246 - RNA, 19 nt, Homo sapiens
  misc_RNA (1)...(19): siRNA sense strand
ugaagaugacgaugagaaa

SEQ ID NO: 1223247 - RNA, 19 nt, Homo sapiens
  misc_RNA (1)...(19): siRNA sense strand
gugaacaaccuuuggacaa

SEQ ID NO: 1223248 - RNA, 19 nt, Homo sapiens
  misc_RNA (1)...(19): siRNA sense strand
caugaaagaauugcacaaa

SEQ ID NO: 1223249 - RNA, 19 nt, Homo sapiens
  misc_RNA (1)...(19): siRNA sense strand
gagaugacucccguuacua

SEQ ID NO: 1223250 - RNA, 19 nt, Homo sapiens
  misc_RNA (1)...(19): siRNA sense strand
gaauauguacuaccagaac

SEQ ID NO: 1223251 - RNA, 19 nt, Homo sapiens
  misc_RNA (1)...(19): siRNA sense strand
caggacauguuaaggauac

SEQ ID NO: 1223252 - RNA, 19 nt, Homo sapiens
  misc_RNA (1)...(19): siRNA sense strand
gauuucacuccucaugaua

SEQ ID NO: 1223253 - RNA, 19 nt, Homo sapiens
  misc_RNA (1)...(19): siRNA sense strand
cagugaacauggugaagau

SEQ ID NO: 1223254 - RNA, 19 nt, Homo sapiens
  misc_RNA (1)...(19): siRNA sense strand
ggguauuggugaacgguau

SEQ ID NO: 1223255 - RNA, 19 nt, Homo sapiens
  misc_RNA (1)...(19): siRNA sense strand
cagggcuauugaaagauua

SEQ ID NO: 1223256 - RNA, 19 nt, Homo sapiens
  misc_RNA (1)...(19): siRNA sense strand
gaugaugcuuuaguaacug

SEQ ID NO: 1223257 - RNA, 19 nt, Homo sapiens
  misc_RNA (1)...(19): siRNA sense strand
uaucaucagugaacauggu

SEQ ID NO: 1223258 - RNA, 19 nt, Homo sapiens
  misc_RNA (1)...(19): siRNA sense strand
aaugagaugacucccguua

SEQ ID NO: 1223259 - RNA, 19 nt, Homo sapiens
  misc_RNA (1)...(19): siRNA sense strand
ugaugaagaugacgaugag

SEQ ID NO: 1223260 - RNA, 19 nt, Homo sapiens
  misc_RNA (1)...(19): siRNA sense strand
gauaaugagccugguaaag

SEQ ID NO: 1223261 - RNA, 19 nt, Homo sapiens
  misc_RNA (1)...(19): siRNA sense strand
gaacacuuaccagacaaug

SEQ ID NO: 1223262 - RNA, 19 nt, Homo sapiens
  misc_RNA (1)...(19): siRNA sense strand
ugaugaugcuuuaguaacu

SEQ ID NO: 1223263 - RNA, 19 nt, Homo sapiens
  misc_RNA (1)...(19): siRNA sense strand
gugaacauggugaagauga

SEQ ID NO: 1223264 - RNA, 19 nt, Homo sapiens
  misc_RNA (1)...(19): siRNA sense strand
caagaaaugcgaggguaug

SEQ ID NO: 1223265 - RNA, 19 nt, Homo sapiens
  misc_RNA (1)...(19): siRNA sense strand
caugagaaacaucugcaaa

SEQ ID NO: 1223266 - RNA, 19 nt, Homo sapiens
  misc_RNA (1)...(19): siRNA sense strand
gguaaagaaacagcuuaaa

SEQ ID NO: 1223267 - RNA, 19 nt, Homo sapiens
  misc_RNA (1)...(19): siRNA sense strand
auaauacagucccuuucaa

SEQ ID NO: 1223268 - RNA, 19 nt, Homo sapiens
  misc_RNA (1)...(19): siRNA sense strand
cucaucagcugaaagugaa

SEQ ID NO: 1223269 - RNA, 19 nt, Homo sapiens
  misc_RNA (1)...(19): siRNA sense strand
gaaauggauauggaaagug

SEQ ID NO: 1223270 - RNA, 19 nt, Homo sapiens
  misc_RNA (1)...(19): siRNA sense strand
gugaagaugaaauggauau

SEQ ID NO: 1223271 - RNA, 19 nt, Homo sapiens
  misc_RNA (1)...(19): siRNA sense strand
gagaaugaugccagugaug

SEQ ID NO: 1223272 - RNA, 19 nt, Homo sapiens
  misc_RNA (1)...(19): siRNA sense strand
gaugacucccguuacuauu

SEQ ID NO: 1223273 - RNA, 19 nt, Homo sapiens
  misc_RNA (1)...(19): siRNA sense strand
gaugggaacaggagcagau

SEQ ID NO: 1223274 - RNA, 19 nt, Homo sapiens
  misc_RNA (1)...(19): siRNA sense strand
gcccgagaauugggagauu

SEQ ID NO: 1223275 - RNA, 19 nt, Homo sapiens
  misc_RNA (1)...(19): siRNA sense strand
cagaacacuuaccagacaa

SEQ ID NO: 1223276 - RNA, 19 nt, Homo sapiens
  misc_RNA (1)...(19): siRNA sense strand
gaaaagucacaaagacaaa

SEQ ID NO: 1223277 - RNA, 19 nt, Homo sapiens
  misc_RNA (1)...(19): siRNA sense strand
ugagaaacgccggauaguu

SEQ ID NO: 1223278 - RNA, 19 nt, Homo sapiens
  misc_RNA (1)...(19): siRNA sense strand
gaaugaugccagugaugau

SEQ ID NO: 1223279 - RNA, 19 nt, Homo sapiens
  misc_RNA (1)...(19): siRNA sense strand
ugagaaugaugccagugau

SEQ ID NO: 1223280 - RNA, 19 nt, Homo sapiens
  misc_RNA (1)...(19): siRNA sense strand
agauuucacuccucaugau

SEQ ID NO: 1223281 - RNA, 19 nt, Homo sapiens
  misc_RNA (1)...(19): siRNA sense strand
ugagaaacaucugcaaagc

SEQ ID NO: 1223282 - RNA, 19 nt, Homo sapiens
  misc_RNA (1)...(19): siRNA sense strand
ggacuccaugaaagaauug

SEQ ID NO: 1223283 - RNA, 19 nt, Homo sapiens
  misc_RNA (1)...(19): siRNA sense strand
agaaugaugccagugauga

SEQ ID NO: 1223284 - RNA, 19 nt, Homo sapiens
  misc_RNA (1)...(19): siRNA sense strand
uuuaguaacuggagaacag

SEQ ID NO: 1223285 - RNA, 19 nt, Homo sapiens
  misc_RNA (1)...(19): siRNA sense strand
gcgaggguauguccaagac

SEQ ID NO: 1223286 - RNA, 19 nt, Homo sapiens
  misc_RNA (1)...(19): siRNA sense strand
gaaagaauugcacaaaaca

SEQ ID NO: 1223287 - RNA, 19 nt, Homo sapiens
  misc_RNA (1)...(19): siRNA sense strand
uaacuggagaacaggauga

SEQ ID NO: 1223288 - RNA, 19 nt, Homo sapiens
  misc_RNA (1)...(19): siRNA sense strand
gaacauggcugaccucaua

SEQ ID NO: 1223289 - RNA, 19 nt, Homo sapiens
  misc_RNA (1)...(19): siRNA sense strand
ggaccacgcugcucuauuu

SEQ ID NO: 1223290 - RNA, 19 nt, Homo sapiens
  misc_RNA (1)...(19): siRNA sense strand
caaagcagaugcaggagaa

SEQ ID NO: 1223291 - RNA, 19 nt, Homo sapiens
  misc_RNA (1)...(19): siRNA sense strand
ucagagagcugcagcauag

SEQ ID NO: 1223292 - RNA, 19 nt, Homo sapiens
  misc_RNA (1)...(19): siRNA sense strand
ggacgaggacuauuacaaa

SEQ ID NO: 1223293 - RNA, 19 nt, Homo sapiens
  misc_RNA (1)...(19): siRNA sense strand
uggcagagcucaucaacaa

SEQ ID NO: 1223294 - RNA, 19 nt, Homo sapiens
  misc_RNA (1)...(19): siRNA sense strand
auucaaggauggaacauua

SEQ ID NO: 1223295 - RNA, 19 nt, Homo sapiens
  misc_RNA (1)...(19): siRNA sense strand
agaaacugcucaacaaaga

SEQ ID NO: 1223296 - RNA, 19 nt, Homo sapiens
  misc_RNA (1)...(19): siRNA sense strand
caccaaggcucucucauca

SEQ ID NO: 1223297 - RNA, 19 nt, Homo sapiens
  misc_RNA (1)...(19): siRNA sense strand
caucauccauccuaggaaa

SEQ ID NO: 1223298 - RNA, 19 nt, Homo sapiens
  misc_RNA (1)...(19): siRNA sense strand
gaacaagaacucccugaag

SEQ ID NO: 1223299 - RNA, 19 nt, Homo sapiens
  misc_RNA (1)...(19): siRNA sense strand
ccaaggcucucucaucauc

SEQ ID NO: 1223300 - RNA, 19 nt, Homo sapiens
  misc_RNA (1)...(19): siRNA sense strand
gcccggagguccacaguau

SEQ ID NO: 1223301 - RNA, 19 nt, Homo sapiens
  misc_RNA (1)...(19): siRNA sense strand
ccacccaccugcagaguga

SEQ ID NO: 1223302 - RNA, 19 nt, Homo sapiens
  misc_RNA (1)...(19): siRNA sense strand
gaugugguccugaaucgua

SEQ ID NO: 1223303 - RNA, 19 nt, Homo sapiens
  misc_RNA (1)...(19): siRNA sense strand
gagcccaccuggaucauca

SEQ ID NO: 1223304 - RNA, 19 nt, Homo sapiens
  misc_RNA (1)...(19): siRNA sense strand
gcagagcucaucaacaaga

SEQ ID NO: 1223305 - RNA, 19 nt, Homo sapiens
  misc_RNA (1)...(19): siRNA sense strand
gcagaugcaggagaacuua

SEQ ID NO: 1223306 - RNA, 19 nt, Homo sapiens
  misc_RNA (1)...(19): siRNA sense strand
ggacugaugaccuggugua

SEQ ID NO: 1223307 - RNA, 19 nt, Homo sapiens
  misc_RNA (1)...(19): siRNA sense strand
gugaagaugugguccugaa

SEQ ID NO: 1223308 - RNA, 19 nt, Homo sapiens
  misc_RNA (1)...(19): siRNA sense strand
caacuucgagcuccuagaa

SEQ ID NO: 1223309 - RNA, 19 nt, Homo sapiens
  misc_RNA (1)...(19): siRNA sense strand
gcccaagccugaucucugu

SEQ ID NO: 1223310 - RNA, 19 nt, Homo sapiens
  misc_RNA (1)...(19): siRNA sense strand
uaggaaagauggugagaag

SEQ ID NO: 1223311 - RNA, 19 nt, Homo sapiens
  misc_RNA (1)...(19): siRNA sense strand
gucaagaccugcaagaaag

SEQ ID NO: 1223312 - RNA, 19 nt, Homo sapiens
  misc_RNA (1)...(19): siRNA sense strand
aaacaguuccggaagauga

SEQ ID NO: 1223313 - RNA, 19 nt, Homo sapiens
  misc_RNA (1)...(19): siRNA sense strand
gcgaggcagugaucaugaa

SEQ ID NO: 1223314 - RNA, 19 nt, Homo sapiens
  misc_RNA (1)...(19): siRNA sense strand
cucaaggucugcuucuaua

SEQ ID NO: 1223315 - RNA, 19 nt, Homo sapiens
  misc_RNA (1)...(19): siRNA sense strand
cccagaaacugcucaacaa

SEQ ID NO: 1223316 - RNA, 19 nt, Homo sapiens
  misc_RNA (1)...(19): siRNA sense strand
gaggaggagugcgucauga

SEQ ID NO: 1223317 - RNA, 19 nt, Homo sapiens
  misc_RNA (1)...(19): siRNA sense strand
gaacuuaaagcccaaacag

SEQ ID NO: 1223318 - RNA, 19 nt, Homo sapiens
  misc_RNA (1)...(19): siRNA sense strand
ggcaaauccuggacaaaca

SEQ ID NO: 1223319 - RNA, 19 nt, Homo sapiens
  misc_RNA (1)...(19): siRNA sense strand
gcaccaaggcucucucauc

SEQ ID NO: 1223320 - RNA, 19 nt, Homo sapiens
  misc_RNA (1)...(19): siRNA sense strand
gcuaugggcugaggcugaa

SEQ ID NO: 1223321 - RNA, 19 nt, Homo sapiens
  misc_RNA (1)...(19): siRNA sense strand
gccgugaccucccuaagug

SEQ ID NO: 1223322 - RNA, 19 nt, Homo sapiens
  misc_RNA (1)...(19): siRNA sense strand
gaguaaaguugggcacguu

SEQ ID NO: 1223323 - RNA, 19 nt, Homo sapiens
  misc_RNA (1)...(19): siRNA sense strand
ugcuggagcucaagaauga

SEQ ID NO: 1223324 - RNA, 19 nt, Homo sapiens
  misc_RNA (1)...(19): siRNA sense strand
agaaggacauugccaugga

SEQ ID NO: 1223325 - RNA, 19 nt, Homo sapiens
  misc_RNA (1)...(19): siRNA sense strand
ucagugacguuuaucagau

SEQ ID NO: 1223326 - RNA, 19 nt, Homo sapiens
  misc_RNA (1)...(19): siRNA sense strand
gcaaagccauggccuaccu

SEQ ID NO: 1223327 - RNA, 19 nt, Homo sapiens
  misc_RNA (1)...(19): siRNA sense strand
cagcuucaauccugggaaa

SEQ ID NO: 1223328 - RNA, 19 nt, Homo sapiens
  misc_RNA (1)...(19): siRNA sense strand
ggaucaucauggaauugua

SEQ ID NO: 1223329 - RNA, 19 nt, Homo sapiens
  misc_RNA (1)...(19): siRNA sense strand
ccaaacaguuccggaagau

SEQ ID NO: 1223330 - RNA, 19 nt, Homo sapiens
  misc_RNA (1)...(19): siRNA sense strand
ccaagguucuggccaaucu

SEQ ID NO: 1223331 - RNA, 19 nt, Homo sapiens
  misc_RNA (1)...(19): siRNA sense strand
ggaacaagaacucccugaa

SEQ ID NO: 1223332 - RNA, 19 nt, Homo sapiens
  misc_RNA (1)...(19): siRNA sense strand
ccaccuggaucaucaugga

SEQ ID NO: 1223333 - RNA, 19 nt, Homo sapiens
  misc_RNA (1)...(19): siRNA sense strand
ggacgugcguauccucaag

SEQ ID NO: 1223334 - RNA, 19 nt, Homo sapiens
  misc_RNA (1)...(19): siRNA sense strand
gacgaggacuauuacaaag

SEQ ID NO: 1223335 - RNA, 19 nt, Homo sapiens
  misc_RNA (1)...(19): siRNA sense strand
gaucaucauggaauuguau

SEQ ID NO: 1223336 - RNA, 19 nt, Homo sapiens
  misc_RNA (1)...(19): siRNA sense strand
gaagaugugguccugaauc

SEQ ID NO: 1223337 - RNA, 19 nt, Homo sapiens
  misc_RNA (1)...(19): siRNA sense strand
ggaggaggacuucauccaa

SEQ ID NO: 1223338 - RNA, 19 nt, Homo sapiens
  misc_RNA (1)...(19): siRNA sense strand
gaucgagggcacccagaaa

SEQ ID NO: 1223339 - RNA, 19 nt, Homo sapiens
  misc_RNA (1)...(19): siRNA sense strand
cuaccgcugugaacucauu

SEQ ID NO: 1223340 - RNA, 19 nt, Homo sapiens
  misc_RNA (1)...(19): siRNA sense strand
uuacaaagccucugugacu

SEQ ID NO: 1223341 - RNA, 19 nt, Homo sapiens
  misc_RNA (1)...(19): siRNA sense strand
ugucaagaccugcaagaaa

SEQ ID NO: 1223342 - RNA, 19 nt, Homo sapiens
  misc_RNA (1)...(19): siRNA sense strand
aggcagugaucaugaagaa

SEQ ID NO: 1223343 - RNA, 19 nt, Homo sapiens
  misc_RNA (1)...(19): siRNA sense strand
ccagaaacugcucaacaaa

SEQ ID NO: 1223344 - RNA, 19 nt, Homo sapiens
  misc_RNA (1)...(19): siRNA sense strand
cagcauagagucagacauc

SEQ ID NO: 1223345 - RNA, 19 nt, Homo sapiens
  misc_RNA (1)...(19): siRNA sense strand
gaagccgaguggagguaug

SEQ ID NO: 1223346 - RNA, 19 nt, Homo sapiens
  misc_RNA (1)...(19): siRNA sense strand
gaccugguguaccucaaug

SEQ ID NO: 1223347 - RNA, 19 nt, Homo sapiens
  misc_RNA (1)...(19): siRNA sense strand
cagccucagugacguuuau

SEQ ID NO: 1223348 - RNA, 19 nt, Homo sapiens
  misc_RNA (1)...(19): siRNA sense strand
ggacaacaaggagaaguuc

SEQ ID NO: 1223349 - RNA, 19 nt, Homo sapiens
  misc_RNA (1)...(19): siRNA sense strand
gagcucaggcgguucuuca

SEQ ID NO: 1223350 - RNA, 19 nt, Homo sapiens
  misc_RNA (1)...(19): siRNA sense strand
ggucuuucccgguacauug

SEQ ID NO: 1223351 - RNA, 19 nt, Homo sapiens
  misc_RNA (1)...(19): siRNA sense strand
gcagagauucccgacgaaa

SEQ ID NO: 1223352 - RNA, 19 nt, Homo sapiens
  misc_RNA (1)...(19): siRNA sense strand
ucagacaucuacgcagaga

SEQ ID NO: 1223353 - RNA, 19 nt, Homo sapiens
  misc_RNA (1)...(19): siRNA sense strand
gugaggugcaggacaagua

SEQ ID NO: 1223354 - RNA, 19 nt, Homo sapiens
  misc_RNA (1)...(19): siRNA sense strand
acaaacagcagaagcagau

SEQ ID NO: 1223355 - RNA, 19 nt, Homo sapiens
  misc_RNA (1)...(19): siRNA sense strand
uuuaucagauggagaagga

SEQ ID NO: 1223356 - RNA, 19 nt, Homo sapiens
  misc_RNA (1)...(19): siRNA sense strand
uagcagaggcugagaacau

SEQ ID NO: 1223357 - RNA, 19 nt, Homo sapiens
  misc_RNA (1)...(19): siRNA sense strand
ggaggaggagugcgucaug

SEQ ID NO: 1223358 - RNA, 19 nt, Homo sapiens
  misc_RNA (1)...(19): siRNA sense strand
aggcgguucuucaaggaua

SEQ ID NO: 1223359 - RNA, 19 nt, Homo sapiens
  misc_RNA (1)...(19): siRNA sense strand
uugaggacgaggacuauua

SEQ ID NO: 1223360 - RNA, 19 nt, Homo sapiens
  misc_RNA (1)...(19): siRNA sense strand
cccaaacaguuccggaaga

SEQ ID NO: 1223361 - RNA, 19 nt, Homo sapiens
  misc_RNA (1)...(19): siRNA sense strand
uguacucacugcagauaug

SEQ ID NO: 1223362 - RNA, 19 nt, Homo sapiens
  misc_RNA (1)...(19): siRNA sense strand
gaggagcccaccuggauca

SEQ ID NO: 1223363 - RNA, 19 nt, Homo sapiens
  misc_RNA (1)...(19): siRNA sense strand
gcaggacaaguaugagugu

SEQ ID NO: 1223364 - RNA, 19 nt, Homo sapiens
  misc_RNA (1)...(19): siRNA sense strand
ucaagaaugagcucuguca

SEQ ID NO: 1223365 - RNA, 19 nt, Homo sapiens
  misc_RNA (1)...(19): siRNA sense strand
cacaugaaguccgaugaga

SEQ ID NO: 1223366 - RNA, 19 nt, Homo sapiens
  misc_RNA (1)...(19): siRNA sense strand
gagcgaggcagugaucaug

SEQ ID NO: 1223367 - RNA, 19 nt, Homo sapiens
  misc_RNA (1)...(19): siRNA sense strand
caacaaggagaaguucaug

SEQ ID NO: 1223368 - RNA, 19 nt, Homo sapiens
  misc_RNA (1)...(19): siRNA sense strand
aagcagaucagguccauca

SEQ ID NO: 1223369 - RNA, 19 nt, Homo sapiens
  misc_RNA (1)...(19): siRNA sense strand
acuuaaagcccaaacaguu

SEQ ID NO: 1223370 - RNA, 19 nt, Homo sapiens
  misc_RNA (1)...(19): siRNA sense strand
gcacaugaaguccgaugag

SEQ ID NO: 1223371 - RNA, 19 nt, Homo sapiens
  misc_RNA (1)...(19): siRNA sense strand
guccaccgguccuuuauac

SEQ ID NO: 1223372 - RNA, 19 nt, Homo sapiens
  misc_RNA (1)...(19): siRNA sense strand
ugugggagauccugagcuu

SEQ ID NO: 1223373 - RNA, 19 nt, Homo sapiens
  misc_RNA (1)...(19): siRNA sense strand
caugaaguccgaugagauc

SEQ ID NO: 1223374 - RNA, 19 nt, Homo sapiens
  misc_RNA (1)...(19): siRNA sense strand
ccauccagcccacagcuaa

SEQ ID NO: 1223375 - RNA, 19 nt, Homo sapiens
  misc_RNA (1)...(19): siRNA sense strand
cagugacguuuaucagaug

SEQ ID NO: 1223376 - RNA, 19 nt, Homo sapiens
  misc_RNA (1)...(19): siRNA sense strand
gcuguacucacugcagaua

SEQ ID NO: 1223377 - RNA, 19 nt, Homo sapiens
  misc_RNA (1)...(19): siRNA sense strand
gcauugcccgugaagaugu

SEQ ID NO: 1223378 - RNA, 19 nt, Homo sapiens
  misc_RNA (1)...(19): siRNA sense strand
guacuucagcugggcauug

SEQ ID NO: 1223379 - RNA, 19 nt, Homo sapiens
  misc_RNA (1)...(19): siRNA sense strand
aggagugcgucaugaaguu

SEQ ID NO: 1223380 - RNA, 19 nt, Homo sapiens
  misc_RNA (1)...(19): siRNA sense strand
ggagaccuaccgcugugaa

SEQ ID NO: 1223381 - RNA, 19 nt, Homo sapiens
  misc_RNA (1)...(19): siRNA sense strand
ccucaaggucugcuucuau

SEQ ID NO: 1223382 - RNA, 19 nt, Homo sapiens
  misc_RNA (1)...(19): siRNA sense strand
ugggugaggugcaggacaa

SEQ ID NO: 1223383 - RNA, 19 nt, Homo sapiens
  misc_RNA (1)...(19): siRNA sense strand
cuccaaagcugcaguucca

SEQ ID NO: 1223384 - RNA, 19 nt, Homo sapiens
  misc_RNA (1)...(19): siRNA sense strand
ccaaccuccuggcuccaaa

SEQ ID NO: 1223385 - RNA, 19 nt, Homo sapiens
  misc_RNA (1)...(19): siRNA sense strand
ugggagauccugagcuuug

SEQ ID NO: 1223386 - RNA, 19 nt, Homo sapiens
  misc_RNA (1)...(19): siRNA sense strand
acuucaaacuggucaaaug

SEQ ID NO: 1223387 - RNA, 19 nt, Homo sapiens
  misc_RNA (1)...(19): siRNA sense strand
gggauccgccagcugacua

SEQ ID NO: 1223388 - RNA, 19 nt, Homo sapiens
  misc_RNA (1)...(19): siRNA sense strand
gaacauggcugaccucaua

SEQ ID NO: 1223389 - RNA, 19 nt, Homo sapiens
  misc_RNA (1)...(19): siRNA sense strand
ggaccacgcugcucuauuu

SEQ ID NO: 1223390 - RNA, 19 nt, Homo sapiens
  misc_RNA (1)...(19): siRNA sense strand
caaagcagaugcaggagaa

SEQ ID NO: 1223391 - RNA, 19 nt, Homo sapiens
  misc_RNA (1)...(19): siRNA sense strand
ucagagagcugcagcauag

SEQ ID NO: 1223392 - RNA, 19 nt, Homo sapiens
  misc_RNA (1)...(19): siRNA sense strand
ggacgaggacuauuacaaa

SEQ ID NO: 1223393 - RNA, 19 nt, Homo sapiens
  misc_RNA (1)...(19): siRNA sense strand
uggcagagcucaucaacaa

SEQ ID NO: 1223394 - RNA, 19 nt, Homo sapiens
  misc_RNA (1)...(19): siRNA sense strand
auucaaggauggaacauua

SEQ ID NO: 1223395 - RNA, 19 nt, Homo sapiens
  misc_RNA (1)...(19): siRNA sense strand
agaaacugcucaacaaaga

SEQ ID NO: 1223396 - RNA, 19 nt, Homo sapiens
  misc_RNA (1)...(19): siRNA sense strand
caccaaggcucucucauca

SEQ ID NO: 1223397 - RNA, 19 nt, Homo sapiens
  misc_RNA (1)...(19): siRNA sense strand
caucauccauccuaggaaa

SEQ ID NO: 1223398 - RNA, 19 nt, Homo sapiens
  misc_RNA (1)...(19): siRNA sense strand
gaacaagaacucccugaag

SEQ ID NO: 1223399 - RNA, 19 nt, Homo sapiens
  misc_RNA (1)...(19): siRNA sense strand
ccaaggcucucucaucauc

SEQ ID NO: 1223400 - RNA, 19 nt, Homo sapiens
  misc_RNA (1)...(19): siRNA sense strand
gcccggagguccacaguau

SEQ ID NO: 1223401 - RNA, 19 nt, Homo sapiens
  misc_RNA (1)...(19): siRNA sense strand
ccacccaccugcagaguga

SEQ ID NO: 1223402 - RNA, 19 nt, Homo sapiens
  misc_RNA (1)...(19): siRNA sense strand
gaugugguccugaaucgua

SEQ ID NO: 1223403 - RNA, 19 nt, Homo sapiens
  misc_RNA (1)...(19): siRNA sense strand
gagcccaccuggaucauca

SEQ ID NO: 1223404 - RNA, 19 nt, Homo sapiens
  misc_RNA (1)...(19): siRNA sense strand
gcagagcucaucaacaaga

SEQ ID NO: 1223405 - RNA, 19 nt, Homo sapiens
  misc_RNA (1)...(19): siRNA sense strand
gcagaugcaggagaacuua

SEQ ID NO: 1223406 - RNA, 19 nt, Homo sapiens
  misc_RNA (1)...(19): siRNA sense strand
ggacugaugaccuggugua

SEQ ID NO: 1223407 - RNA, 19 nt, Homo sapiens
  misc_RNA (1)...(19): siRNA sense strand
gugaagaugugguccugaa

SEQ ID NO: 1223408 - RNA, 19 nt, Homo sapiens
  misc_RNA (1)...(19): siRNA sense strand
caacuucgagcuccuagaa

SEQ ID NO: 1223409 - RNA, 19 nt, Homo sapiens
  misc_RNA (1)...(19): siRNA sense strand
gcccaagccugaucucugu

SEQ ID NO: 1223410 - RNA, 19 nt, Homo sapiens
  misc_RNA (1)...(19): siRNA sense strand
uaggaaagauggugagaag

SEQ ID NO: 1223411 - RNA, 19 nt, Homo sapiens
  misc_RNA (1)...(19): siRNA sense strand
gucaagaccugcaagaaag

SEQ ID NO: 1223412 - RNA, 19 nt, Homo sapiens
  misc_RNA (1)...(19): siRNA sense strand
aaacaguuccggaagauga

SEQ ID NO: 1223413 - RNA, 19 nt, Homo sapiens
  misc_RNA (1)...(19): siRNA sense strand
gcgaggcagugaucaugaa

SEQ ID NO: 1223414 - RNA, 19 nt, Homo sapiens
  misc_RNA (1)...(19): siRNA sense strand
cucaaggucugcuucuaua

SEQ ID NO: 1223415 - RNA, 19 nt, Homo sapiens
  misc_RNA (1)...(19): siRNA sense strand
cccagaaacugcucaacaa

SEQ ID NO: 1223416 - RNA, 19 nt, Homo sapiens
  misc_RNA (1)...(19): siRNA sense strand
gaggaggagugcgucauga

SEQ ID NO: 1223417 - RNA, 19 nt, Homo sapiens
  misc_RNA (1)...(19): siRNA sense strand
gaacuuaaagcccaaacag

SEQ ID NO: 1223418 - RNA, 19 nt, Homo sapiens
  misc_RNA (1)...(19): siRNA sense strand
ggcaaauccuggacaaaca

SEQ ID NO: 1223419 - RNA, 19 nt, Homo sapiens
  misc_RNA (1)...(19): siRNA sense strand
gcaccaaggcucucucauc

SEQ ID NO: 1223420 - RNA, 19 nt, Homo sapiens
  misc_RNA (1)...(19): siRNA sense strand
gcuaugggcugaggcugaa

SEQ ID NO: 1223421 - RNA, 19 nt, Homo sapiens
  misc_RNA (1)...(19): siRNA sense strand
gccgugaccucccuaagug

SEQ ID NO: 1223422 - RNA, 19 nt, Homo sapiens
  misc_RNA (1)...(19): siRNA sense strand
gaguaaaguugggcacguu

SEQ ID NO: 1223423 - RNA, 19 nt, Homo sapiens
  misc_RNA (1)...(19): siRNA sense strand
ugcuggagcucaagaauga

SEQ ID NO: 1223424 - RNA, 19 nt, Homo sapiens
  misc_RNA (1)...(19): siRNA sense strand
agaaggacauugccaugga

SEQ ID NO: 1223425 - RNA, 19 nt, Homo sapiens
  misc_RNA (1)...(19): siRNA sense strand
ucagugacguuuaucagau

SEQ ID NO: 1223426 - RNA, 19 nt, Homo sapiens
  misc_RNA (1)...(19): siRNA sense strand
gcaaagccauggccuaccu

SEQ ID NO: 1223427 - RNA, 19 nt, Homo sapiens
  misc_RNA (1)...(19): siRNA sense strand
cagcuucaauccugggaaa

SEQ ID NO: 1223428 - RNA, 19 nt, Homo sapiens
  misc_RNA (1)...(19): siRNA sense strand
ggaucaucauggaauugua

SEQ ID NO: 1223429 - RNA, 19 nt, Homo sapiens
  misc_RNA (1)...(19): siRNA sense strand
ccaaacaguuccggaagau

SEQ ID NO: 1223430 - RNA, 19 nt, Homo sapiens
  misc_RNA (1)...(19): siRNA sense strand
ccaagguucuggccaaucu

SEQ ID NO: 1223431 - RNA, 19 nt, Homo sapiens
  misc_RNA (1)...(19): siRNA sense strand
ggaacaagaacucccugaa

SEQ ID NO: 1223432 - RNA, 19 nt, Homo sapiens
  misc_RNA (1)...(19): siRNA sense strand
ccaccuggaucaucaugga

SEQ ID NO: 1223433 - RNA, 19 nt, Homo sapiens
  misc_RNA (1)...(19): siRNA sense strand
ggacgugcguauccucaag

SEQ ID NO: 1223434 - RNA, 19 nt, Homo sapiens
  misc_RNA (1)...(19): siRNA sense strand
gacgaggacuauuacaaag

SEQ ID NO: 1223435 - RNA, 19 nt, Homo sapiens
  misc_RNA (1)...(19): siRNA sense strand
gaucaucauggaauuguau

SEQ ID NO: 1223436 - RNA, 19 nt, Homo sapiens
  misc_RNA (1)...(19): siRNA sense strand
gaagaugugguccugaauc

SEQ ID NO: 1223437 - RNA, 19 nt, Homo sapiens
  misc_RNA (1)...(19): siRNA sense strand
ggaggaggacuucauccaa

SEQ ID NO: 1223438 - RNA, 19 nt, Homo sapiens
  misc_RNA (1)...(19): siRNA sense strand
gaucgagggcacccagaaa

SEQ ID NO: 1223439 - RNA, 19 nt, Homo sapiens
  misc_RNA (1)...(19): siRNA sense strand
cuaccgcugugaacucauu

SEQ ID NO: 1223440 - RNA, 19 nt, Homo sapiens
  misc_RNA (1)...(19): siRNA sense strand
uuacaaagccucugugacu

SEQ ID NO: 1223441 - RNA, 19 nt, Homo sapiens
  misc_RNA (1)...(19): siRNA sense strand
ugucaagaccugcaagaaa

SEQ ID NO: 1223442 - RNA, 19 nt, Homo sapiens
  misc_RNA (1)...(19): siRNA sense strand
aggcagugaucaugaagaa

SEQ ID NO: 1223443 - RNA, 19 nt, Homo sapiens
  misc_RNA (1)...(19): siRNA sense strand
ccagaaacugcucaacaaa

SEQ ID NO: 1223444 - RNA, 19 nt, Homo sapiens
  misc_RNA (1)...(19): siRNA sense strand
cagcauagagucagacauc

SEQ ID NO: 1223445 - RNA, 19 nt, Homo sapiens
  misc_RNA (1)...(19): siRNA sense strand
gaagccgaguggagguaug

SEQ ID NO: 1223446 - RNA, 19 nt, Homo sapiens
  misc_RNA (1)...(19): siRNA sense strand
gaccugguguaccucaaug

SEQ ID NO: 1223447 - RNA, 19 nt, Homo sapiens
  misc_RNA (1)...(19): siRNA sense strand
cagccucagugacguuuau

SEQ ID NO: 1223448 - RNA, 19 nt, Homo sapiens
  misc_RNA (1)...(19): siRNA sense strand
ggacaacaaggagaaguuc

SEQ ID NO: 1223449 - RNA, 19 nt, Homo sapiens
  misc_RNA (1)...(19): siRNA sense strand
gagcucaggcgguucuuca

SEQ ID NO: 1223450 - RNA, 19 nt, Homo sapiens
  misc_RNA (1)...(19): siRNA sense strand
ggucuuucccgguacauug

SEQ ID NO: 1223451 - RNA, 19 nt, Homo sapiens
  misc_RNA (1)...(19): siRNA sense strand
gcagagauucccgacgaaa

SEQ ID NO: 1223452 - RNA, 19 nt, Homo sapiens
  misc_RNA (1)...(19): siRNA sense strand
ucagacaucuacgcagaga

SEQ ID NO: 1223453 - RNA, 19 nt, Homo sapiens
  misc_RNA (1)...(19): siRNA sense strand
gugaggugcaggacaagua

SEQ ID NO: 1223454 - RNA, 19 nt, Homo sapiens
  misc_RNA (1)...(19): siRNA sense strand
acaaacagcagaagcagau

SEQ ID NO: 1223455 - RNA, 19 nt, Homo sapiens
  misc_RNA (1)...(19): siRNA sense strand
uuuaucagauggagaagga

SEQ ID NO: 1223456 - RNA, 19 nt, Homo sapiens
  misc_RNA (1)...(19): siRNA sense strand
uagcagaggcugagaacau

SEQ ID NO: 1223457 - RNA, 19 nt, Homo sapiens
  misc_RNA (1)...(19): siRNA sense strand
ggaggaggagugcgucaug

SEQ ID NO: 1223458 - RNA, 19 nt, Homo sapiens
  misc_RNA (1)...(19): siRNA sense strand
aggcgguucuucaaggaua

SEQ ID NO: 1223459 - RNA, 19 nt, Homo sapiens
  misc_RNA (1)...(19): siRNA sense strand
uugaggacgaggacuauua

SEQ ID NO: 1223460 - RNA, 19 nt, Homo sapiens
  misc_RNA (1)...(19): siRNA sense strand
cccaaacaguuccggaaga

SEQ ID NO: 1223461 - RNA, 19 nt, Homo sapiens
  misc_RNA (1)...(19): siRNA sense strand
uguacucacugcagauaug

SEQ ID NO: 1223462 - RNA, 19 nt, Homo sapiens
  misc_RNA (1)...(19): siRNA sense strand
gaggagcccaccuggauca

SEQ ID NO: 1223463 - RNA, 19 nt, Homo sapiens
  misc_RNA (1)...(19): siRNA sense strand
gcaggacaaguaugagugu

SEQ ID NO: 1223464 - RNA, 19 nt, Homo sapiens
  misc_RNA (1)...(19): siRNA sense strand
ucaagaaugagcucuguca

SEQ ID NO: 1223465 - RNA, 19 nt, Homo sapiens
  misc_RNA (1)...(19): siRNA sense strand
cacaugaaguccgaugaga

SEQ ID NO: 1223466 - RNA, 19 nt, Homo sapiens
  misc_RNA (1)...(19): siRNA sense strand
gagcgaggcagugaucaug

SEQ ID NO: 1223467 - RNA, 19 nt, Homo sapiens
  misc_RNA (1)...(19): siRNA sense strand
caacaaggagaaguucaug

SEQ ID NO: 1223468 - RNA, 19 nt, Homo sapiens
  misc_RNA (1)...(19): siRNA sense strand
aagcagaucagguccauca

SEQ ID NO: 1223469 - RNA, 19 nt, Homo sapiens
  misc_RNA (1)...(19): siRNA sense strand
acuuaaagcccaaacaguu

SEQ ID NO: 1223470 - RNA, 19 nt, Homo sapiens
  misc_RNA (1)...(19): siRNA sense strand
gcacaugaaguccgaugag

SEQ ID NO: 1223471 - RNA, 19 nt, Homo sapiens
  misc_RNA (1)...(19): siRNA sense strand
guccaccgguccuuuauac

SEQ ID NO: 1223472 - RNA, 19 nt, Homo sapiens
  misc_RNA (1)...(19): siRNA sense strand
ugugggagauccugagcuu

SEQ ID NO: 1223473 - RNA, 19 nt, Homo sapiens
  misc_RNA (1)...(19): siRNA sense strand
caugaaguccgaugagauc

SEQ ID NO: 1223474 - RNA, 19 nt, Homo sapiens
  misc_RNA (1)...(19): siRNA sense strand
ccauccagcccacagcuaa

SEQ ID NO: 1223475 - RNA, 19 nt, Homo sapiens
  misc_RNA (1)...(19): siRNA sense strand
cagugacguuuaucagaug

SEQ ID NO: 1223476 - RNA, 19 nt, Homo sapiens
  misc_RNA (1)...(19): siRNA sense strand
gcuguacucacugcagaua

SEQ ID NO: 1223477 - RNA, 19 nt, Homo sapiens
  misc_RNA (1)...(19): siRNA sense strand
gcauugcccgugaagaugu

SEQ ID NO: 1223478 - RNA, 19 nt, Homo sapiens
  misc_RNA (1)...(19): siRNA sense strand
guacuucagcugggcauug

SEQ ID NO: 1223479 - RNA, 19 nt, Homo sapiens
  misc_RNA (1)...(19): siRNA sense strand
aggagugcgucaugaaguu

SEQ ID NO: 1223480 - RNA, 19 nt, Homo sapiens
  misc_RNA (1)...(19): siRNA sense strand
ggagaccuaccgcugugaa

SEQ ID NO: 1223481 - RNA, 19 nt, Homo sapiens
  misc_RNA (1)...(19): siRNA sense strand
ccucaaggucugcuucuau

SEQ ID NO: 1223482 - RNA, 19 nt, Homo sapiens
  misc_RNA (1)...(19): siRNA sense strand
ugggugaggugcaggacaa

SEQ ID NO: 1223483 - RNA, 19 nt, Homo sapiens
  misc_RNA (1)...(19): siRNA sense strand
cuccaaagcugcaguucca

SEQ ID NO: 1223484 - RNA, 19 nt, Homo sapiens
  misc_RNA (1)...(19): siRNA sense strand
ccaaccuccuggcuccaaa

SEQ ID NO: 1223485 - RNA, 19 nt, Homo sapiens
  misc_RNA (1)...(19): siRNA sense strand
ugggagauccugagcuuug

SEQ ID NO: 1223486 - RNA, 19 nt, Homo sapiens
  misc_RNA (1)...(19): siRNA sense strand
acuucaaacuggucaaaug

SEQ ID NO: 1223487 - RNA, 19 nt, Homo sapiens
  misc_RNA (1)...(19): siRNA sense strand
gggauccgccagcugacua

SEQ ID NO: 1223488 - RNA, 19 nt, Homo sapiens
  misc_RNA (1)...(19): siRNA sense strand
gaacauggcugaccucaua

SEQ ID NO: 1223489 - RNA, 19 nt, Homo sapiens
  misc_RNA (1)...(19): siRNA sense strand
ggaccacgcugcucuauuu

SEQ ID NO: 1223490 - RNA, 19 nt, Homo sapiens
  misc_RNA (1)...(19): siRNA sense strand
caaagcagaugcaggagaa

SEQ ID NO: 1223491 - RNA, 19 nt, Homo sapiens
  misc_RNA (1)...(19): siRNA sense strand
ucagagagcugcagcauag

SEQ ID NO: 1223492 - RNA, 19 nt, Homo sapiens
  misc_RNA (1)...(19): siRNA sense strand
ggacgaggacuauuacaaa

SEQ ID NO: 1223493 - RNA, 19 nt, Homo sapiens
  misc_RNA (1)...(19): siRNA sense strand
uggcagagcucaucaacaa

SEQ ID NO: 1223494 - RNA, 19 nt, Homo sapiens
  misc_RNA (1)...(19): siRNA sense strand
auucaaggauggaacauua

SEQ ID NO: 1223495 - RNA, 19 nt, Homo sapiens
  misc_RNA (1)...(19): siRNA sense strand
agaaacugcucaacaaaga

SEQ ID NO: 1223496 - RNA, 19 nt, Homo sapiens
  misc_RNA (1)...(19): siRNA sense strand
caccaaggcucucucauca

SEQ ID NO: 1223497 - RNA, 19 nt, Homo sapiens
  misc_RNA (1)...(19): siRNA sense strand
caucauccauccuaggaaa

SEQ ID NO: 1223498 - RNA, 19 nt, Homo sapiens
  misc_RNA (1)...(19): siRNA sense strand
gaacaagaacucccugaag

SEQ ID NO: 1223499 - RNA, 19 nt, Homo sapiens
  misc_RNA (1)...(19): siRNA sense strand
ccaaggcucucucaucauc

SEQ ID NO: 1223500 - RNA, 19 nt, Homo sapiens
  misc_RNA (1)...(19): siRNA sense strand
gcccggagguccacaguau

SEQ ID NO: 1223501 - RNA, 19 nt, Homo sapiens
  misc_RNA (1)...(19): siRNA sense strand
ccacccaccugcagaguga

SEQ ID NO: 1223502 - RNA, 19 nt, Homo sapiens
  misc_RNA (1)...(19): siRNA sense strand
gaugugguccugaaucgua

SEQ ID NO: 1223503 - RNA, 19 nt, Homo sapiens
  misc_RNA (1)...(19): siRNA sense strand
gagcccaccuggaucauca

SEQ ID NO: 1223504 - RNA, 19 nt, Homo sapiens
  misc_RNA (1)...(19): siRNA sense strand
gcagagcucaucaacaaga

SEQ ID NO: 1223505 - RNA, 19 nt, Homo sapiens
  misc_RNA (1)...(19): siRNA sense strand
gcagaugcaggagaacuua

SEQ ID NO: 1223506 - RNA, 19 nt, Homo sapiens
  misc_RNA (1)...(19): siRNA sense strand
ggacugaugaccuggugua

SEQ ID NO: 1223507 - RNA, 19 nt, Homo sapiens
  misc_RNA (1)...(19): siRNA sense strand
gugaagaugugguccugaa

SEQ ID NO: 1223508 - RNA, 19 nt, Homo sapiens
  misc_RNA (1)...(19): siRNA sense strand
caacuucgagcuccuagaa

SEQ ID NO: 1223509 - RNA, 19 nt, Homo sapiens
  misc_RNA (1)...(19): siRNA sense strand
gcccaagccugaucucugu

SEQ ID NO: 1223510 - RNA, 19 nt, Homo sapiens
  misc_RNA (1)...(19): siRNA sense strand
uaggaaagauggugagaag

SEQ ID NO: 1223511 - RNA, 19 nt, Homo sapiens
  misc_RNA (1)...(19): siRNA sense strand
gucaagaccugcaagaaag

SEQ ID NO: 1223512 - RNA, 19 nt, Homo sapiens
  misc_RNA (1)...(19): siRNA sense strand
aaacaguuccggaagauga

SEQ ID NO: 1223513 - RNA, 19 nt, Homo sapiens
  misc_RNA (1)...(19): siRNA sense strand
gcgaggcagugaucaugaa

SEQ ID NO: 1223514 - RNA, 19 nt, Homo sapiens
  misc_RNA (1)...(19): siRNA sense strand
cucaaggucugcuucuaua

SEQ ID NO: 1223515 - RNA, 19 nt, Homo sapiens
  misc_RNA (1)...(19): siRNA sense strand
cccagaaacugcucaacaa

SEQ ID NO: 1223516 - RNA, 19 nt, Homo sapiens
  misc_RNA (1)...(19): siRNA sense strand
gaggaggagugcgucauga

SEQ ID NO: 1223517 - RNA, 19 nt, Homo sapiens
  misc_RNA (1)...(19): siRNA sense strand
gaacuuaaagcccaaacag

SEQ ID NO: 1223518 - RNA, 19 nt, Homo sapiens
  misc_RNA (1)...(19): siRNA sense strand
ggcaaauccuggacaaaca

SEQ ID NO: 1223519 - RNA, 19 nt, Homo sapiens
  misc_RNA (1)...(19): siRNA sense strand
gcaccaaggcucucucauc

SEQ ID NO: 1223520 - RNA, 19 nt, Homo sapiens
  misc_RNA (1)...(19): siRNA sense strand
gcuaugggcugaggcugaa

SEQ ID NO: 1223521 - RNA, 19 nt, Homo sapiens
  misc_RNA (1)...(19): siRNA sense strand
gccgugaccucccuaagug

SEQ ID NO: 1223522 - RNA, 19 nt, Homo sapiens
  misc_RNA (1)...(19): siRNA sense strand
gaguaaaguugggcacguu

SEQ ID NO: 1223523 - RNA, 19 nt, Homo sapiens
  misc_RNA (1)...(19): siRNA sense strand
ugcuggagcucaagaauga

SEQ ID NO: 1223524 - RNA, 19 nt, Homo sapiens
  misc_RNA (1)...(19): siRNA sense strand
agaaggacauugccaugga

SEQ ID NO: 1223525 - RNA, 19 nt, Homo sapiens
  misc_RNA (1)...(19): siRNA sense strand
ucagugacguuuaucagau

SEQ ID NO: 1223526 - RNA, 19 nt, Homo sapiens
  misc_RNA (1)...(19): siRNA sense strand
gcaaagccauggccuaccu

SEQ ID NO: 1223527 - RNA, 19 nt, Homo sapiens
  misc_RNA (1)...(19): siRNA sense strand
cagcuucaauccugggaaa

SEQ ID NO: 1223528 - RNA, 19 nt, Homo sapiens
  misc_RNA (1)...(19): siRNA sense strand
ggaucaucauggaauugua

SEQ ID NO: 1223529 - RNA, 19 nt, Homo sapiens
  misc_RNA (1)...(19): siRNA sense strand
ccaaacaguuccggaagau

SEQ ID NO: 1223530 - RNA, 19 nt, Homo sapiens
  misc_RNA (1)...(19): siRNA sense strand
ccaagguucuggccaaucu

SEQ ID NO: 1223531 - RNA, 19 nt, Homo sapiens
  misc_RNA (1)...(19): siRNA sense strand
ggaacaagaacucccugaa

SEQ ID NO: 1223532 - RNA, 19 nt, Homo sapiens
  misc_RNA (1)...(19): siRNA sense strand
ccaccuggaucaucaugga

SEQ ID NO: 1223533 - RNA, 19 nt, Homo sapiens
  misc_RNA (1)...(19): siRNA sense strand
ggacgugcguauccucaag

SEQ ID NO: 1223534 - RNA, 19 nt, Homo sapiens
  misc_RNA (1)...(19): siRNA sense strand
gacgaggacuauuacaaag

SEQ ID NO: 1223535 - RNA, 19 nt, Homo sapiens
  misc_RNA (1)...(19): siRNA sense strand
gaucaucauggaauuguau

SEQ ID NO: 1223536 - RNA, 19 nt, Homo sapiens
  misc_RNA (1)...(19): siRNA sense strand
gaagaugugguccugaauc

SEQ ID NO: 1223537 - RNA, 19 nt, Homo sapiens
  misc_RNA (1)...(19): siRNA sense strand
ggaggaggacuucauccaa

SEQ ID NO: 1223538 - RNA, 19 nt, Homo sapiens
  misc_RNA (1)...(19): siRNA sense strand
gaucgagggcacccagaaa

SEQ ID NO: 1223539 - RNA, 19 nt, Homo sapiens
  misc_RNA (1)...(19): siRNA sense strand
cuaccgcugugaacucauu

SEQ ID NO: 1223540 - RNA, 19 nt, Homo sapiens
  misc_RNA (1)...(19): siRNA sense strand
uuacaaagccucugugacu

SEQ ID NO: 1223541 - RNA, 19 nt, Homo sapiens
  misc_RNA (1)...(19): siRNA sense strand
ugucaagaccugcaagaaa

SEQ ID NO: 1223542 - RNA, 19 nt, Homo sapiens
  misc_RNA (1)...(19): siRNA sense strand
aggcagugaucaugaagaa

SEQ ID NO: 1223543 - RNA, 19 nt, Homo sapiens
  misc_RNA (1)...(19): siRNA sense strand
ccagaaacugcucaacaaa

SEQ ID NO: 1223544 - RNA, 19 nt, Homo sapiens
  misc_RNA (1)...(19): siRNA sense strand
cagcauagagucagacauc

SEQ ID NO: 1223545 - RNA, 19 nt, Homo sapiens
  misc_RNA (1)...(19): siRNA sense strand
gaagccgaguggagguaug

SEQ ID NO: 1223546 - RNA, 19 nt, Homo sapiens
  misc_RNA (1)...(19): siRNA sense strand
gaccugguguaccucaaug

SEQ ID NO: 1223547 - RNA, 19 nt, Homo sapiens
  misc_RNA (1)...(19): siRNA sense strand
cagccucagugacguuuau

SEQ ID NO: 1223548 - RNA, 19 nt, Homo sapiens
  misc_RNA (1)...(19): siRNA sense strand
ggacaacaaggagaaguuc

SEQ ID NO: 1223549 - RNA, 19 nt, Homo sapiens
  misc_RNA (1)...(19): siRNA sense strand
gagcucaggcgguucuuca

SEQ ID NO: 1223550 - RNA, 19 nt, Homo sapiens
  misc_RNA (1)...(19): siRNA sense strand
ggucuuucccgguacauug

SEQ ID NO: 1223551 - RNA, 19 nt, Homo sapiens
  misc_RNA (1)...(19): siRNA sense strand
gcagagauucccgacgaaa

SEQ ID NO: 1223552 - RNA, 19 nt, Homo sapiens
  misc_RNA (1)...(19): siRNA sense strand
ucagacaucuacgcagaga

SEQ ID NO: 1223553 - RNA, 19 nt, Homo sapiens
  misc_RNA (1)...(19): siRNA sense strand
gugaggugcaggacaagua

SEQ ID NO: 1223554 - RNA, 19 nt, Homo sapiens
  misc_RNA (1)...(19): siRNA sense strand
acaaacagcagaagcagau

SEQ ID NO: 1223555 - RNA, 19 nt, Homo sapiens
  misc_RNA (1)...(19): siRNA sense strand
uuuaucagauggagaagga

SEQ ID NO: 1223556 - RNA, 19 nt, Homo sapiens
  misc_RNA (1)...(19): siRNA sense strand
uagcagaggcugagaacau

SEQ ID NO: 1223557 - RNA, 19 nt, Homo sapiens
  misc_RNA (1)...(19): siRNA sense strand
ggaggaggagugcgucaug

SEQ ID NO: 1223558 - RNA, 19 nt, Homo sapiens
  misc_RNA (1)...(19): siRNA sense strand
aggcgguucuucaaggaua

SEQ ID NO: 1223559 - RNA, 19 nt, Homo sapiens
  misc_RNA (1)...(19): siRNA sense strand
uugaggacgaggacuauua

SEQ ID NO: 1223560 - RNA, 19 nt, Homo sapiens
  misc_RNA (1)...(19): siRNA sense strand
cccaaacaguuccggaaga

SEQ ID NO: 1223561 - RNA, 19 nt, Homo sapiens
  misc_RNA (1)...(19): siRNA sense strand
uguacucacugcagauaug

SEQ ID NO: 1223562 - RNA, 19 nt, Homo sapiens
  misc_RNA (1)...(19): siRNA sense strand
gaggagcccaccuggauca

SEQ ID NO: 1223563 - RNA, 19 nt, Homo sapiens
  misc_RNA (1)...(19): siRNA sense strand
gcaggacaaguaugagugu

SEQ ID NO: 1223564 - RNA, 19 nt, Homo sapiens
  misc_RNA (1)...(19): siRNA sense strand
ucaagaaugagcucuguca

SEQ ID NO: 1223565 - RNA, 19 nt, Homo sapiens
  misc_RNA (1)...(19): siRNA sense strand
cacaugaaguccgaugaga

SEQ ID NO: 1223566 - RNA, 19 nt, Homo sapiens
  misc_RNA (1)...(19): siRNA sense strand
gagcgaggcagugaucaug

SEQ ID NO: 1223567 - RNA, 19 nt, Homo sapiens
  misc_RNA (1)...(19): siRNA sense strand
caacaaggagaaguucaug

SEQ ID NO: 1223568 - RNA, 19 nt, Homo sapiens
  misc_RNA (1)...(19): siRNA sense strand
aagcagaucagguccauca

SEQ ID NO: 1223569 - RNA, 19 nt, Homo sapiens
  misc_RNA (1)...(19): siRNA sense strand
acuuaaagcccaaacaguu

SEQ ID NO: 1223570 - RNA, 19 nt, Homo sapiens
  misc_RNA (1)...(19): siRNA sense strand
gcacaugaaguccgaugag

SEQ ID NO: 1223571 - RNA, 19 nt, Homo sapiens
  misc_RNA (1)...(19): siRNA sense strand
guccaccgguccuuuauac

SEQ ID NO: 1223572 - RNA, 19 nt, Homo sapiens
  misc_RNA (1)...(19): siRNA sense strand
ugugggagauccugagcuu

SEQ ID NO: 1223573 - RNA, 19 nt, Homo sapiens
  misc_RNA (1)...(19): siRNA sense strand
caugaaguccgaugagauc

SEQ ID NO: 1223574 - RNA, 19 nt, Homo sapiens
  misc_RNA (1)...(19): siRNA sense strand
ccauccagcccacagcuaa

SEQ ID NO: 1223575 - RNA, 19 nt, Homo sapiens
  misc_RNA (1)...(19): siRNA sense strand
cagugacguuuaucagaug

SEQ ID NO: 1223576 - RNA, 19 nt, Homo sapiens
  misc_RNA (1)...(19): siRNA sense strand
gcuguacucacugcagaua

SEQ ID NO: 1223577 - RNA, 19 nt, Homo sapiens
  misc_RNA (1)...(19): siRNA sense strand
gcauugcccgugaagaugu

SEQ ID NO: 1223578 - RNA, 19 nt, Homo sapiens
  misc_RNA (1)...(19): siRNA sense strand
guacuucagcugggcauug

SEQ ID NO: 1223579 - RNA, 19 nt, Homo sapiens
  misc_RNA (1)...(19): siRNA sense strand
aggagugcgucaugaaguu

SEQ ID NO: 1223580 - RNA, 19 nt, Homo sapiens
  misc_RNA (1)...(19): siRNA sense strand
ggagaccuaccgcugugaa

SEQ ID NO: 1223581 - RNA, 19 nt, Homo sapiens
  misc_RNA (1)...(19): siRNA sense strand
ccucaaggucugcuucuau

SEQ ID NO: 1223582 - RNA, 19 nt, Homo sapiens
  misc_RNA (1)...(19): siRNA sense strand
ugggugaggugcaggacaa

SEQ ID NO: 1223583 - RNA, 19 nt, Homo sapiens
  misc_RNA (1)...(19): siRNA sense strand
cuccaaagcugcaguucca

SEQ ID NO: 1223584 - RNA, 19 nt, Homo sapiens
  misc_RNA (1)...(19): siRNA sense strand
ccaaccuccuggcuccaaa

SEQ ID NO: 1223585 - RNA, 19 nt, Homo sapiens
  misc_RNA (1)...(19): siRNA sense strand
ugggagauccugagcuuug

SEQ ID NO: 1223586 - RNA, 19 nt, Homo sapiens
  misc_RNA (1)...(19): siRNA sense strand
acuucaaacuggucaaaug

SEQ ID NO: 1223587 - RNA, 19 nt, Homo sapiens
  misc_RNA (1)...(19): siRNA sense strand
gggauccgccagcugacua

SEQ ID NO: 1223588 - RNA, 19 nt, Homo sapiens
  misc_RNA (1)...(19): siRNA sense strand
gaacauggcugaccucaua

SEQ ID NO: 1223589 - RNA, 19 nt, Homo sapiens
  misc_RNA (1)...(19): siRNA sense strand
ggaccacgcugcucuauuu

SEQ ID NO: 1223590 - RNA, 19 nt, Homo sapiens
  misc_RNA (1)...(19): siRNA sense strand
caaagcagaugcaggagaa

SEQ ID NO: 1223591 - RNA, 19 nt, Homo sapiens
  misc_RNA (1)...(19): siRNA sense strand
ucagagagcugcagcauag

SEQ ID NO: 1223592 - RNA, 19 nt, Homo sapiens
  misc_RNA (1)...(19): siRNA sense strand
ggacgaggacuauuacaaa

SEQ ID NO: 1223593 - RNA, 19 nt, Homo sapiens
  misc_RNA (1)...(19): siRNA sense strand
uggcagagcucaucaacaa

SEQ ID NO: 1223594 - RNA, 19 nt, Homo sapiens
  misc_RNA (1)...(19): siRNA sense strand
auucaaggauggaacauua

SEQ ID NO: 1223595 - RNA, 19 nt, Homo sapiens
  misc_RNA (1)...(19): siRNA sense strand
agaaacugcucaacaaaga

SEQ ID NO: 1223596 - RNA, 19 nt, Homo sapiens
  misc_RNA (1)...(19): siRNA sense strand
caccaaggcucucucauca

SEQ ID NO: 1223597 - RNA, 19 nt, Homo sapiens
  misc_RNA (1)...(19): siRNA sense strand
caucauccauccuaggaaa

SEQ ID NO: 1223598 - RNA, 19 nt, Homo sapiens
  misc_RNA (1)...(19): siRNA sense strand
gaacaagaacucccugaag

SEQ ID NO: 1223599 - RNA, 19 nt, Homo sapiens
  misc_RNA (1)...(19): siRNA sense strand
ccaaggcucucucaucauc

SEQ ID NO: 1223600 - RNA, 19 nt, Homo sapiens
  misc_RNA (1)...(19): siRNA sense strand
gcccggagguccacaguau

SEQ ID NO: 1223601 - RNA, 19 nt, Homo sapiens
  misc_RNA (1)...(19): siRNA sense strand
ccacccaccugcagaguga

SEQ ID NO: 1223602 - RNA, 19 nt, Homo sapiens
  misc_RNA (1)...(19): siRNA sense strand
gaugugguccugaaucgua

SEQ ID NO: 1223603 - RNA, 19 nt, Homo sapiens
  misc_RNA (1)...(19): siRNA sense strand
gagcccaccuggaucauca

SEQ ID NO: 1223604 - RNA, 19 nt, Homo sapiens
  misc_RNA (1)...(19): siRNA sense strand
gcagagcucaucaacaaga

SEQ ID NO: 1223605 - RNA, 19 nt, Homo sapiens
  misc_RNA (1)...(19): siRNA sense strand
gcagaugcaggagaacuua

SEQ ID NO: 1223606 - RNA, 19 nt, Homo sapiens
  misc_RNA (1)...(19): siRNA sense strand
ggacugaugaccuggugua

SEQ ID NO: 1223607 - RNA, 19 nt, Homo sapiens
  misc_RNA (1)...(19): siRNA sense strand
gugaagaugugguccugaa

SEQ ID NO: 1223608 - RNA, 19 nt, Homo sapiens
  misc_RNA (1)...(19): siRNA sense strand
caacuucgagcuccuagaa

SEQ ID NO: 1223609 - RNA, 19 nt, Homo sapiens
  misc_RNA (1)...(19): siRNA sense strand
gcccaagccugaucucugu

SEQ ID NO: 1223610 - RNA, 19 nt, Homo sapiens
  misc_RNA (1)...(19): siRNA sense strand
uaggaaagauggugagaag

SEQ ID NO: 1223611 - RNA, 19 nt, Homo sapiens
  misc_RNA (1)...(19): siRNA sense strand
gucaagaccugcaagaaag

SEQ ID NO: 1223612 - RNA, 19 nt, Homo sapiens
  misc_RNA (1)...(19): siRNA sense strand
aaacaguuccggaagauga

SEQ ID NO: 1223613 - RNA, 19 nt, Homo sapiens
  misc_RNA (1)...(19): siRNA sense strand
gcgaggcagugaucaugaa

SEQ ID NO: 1223614 - RNA, 19 nt, Homo sapiens
  misc_RNA (1)...(19): siRNA sense strand
cucaaggucugcuucuaua

SEQ ID NO: 1223615 - RNA, 19 nt, Homo sapiens
  misc_RNA (1)...(19): siRNA sense strand
cccagaaacugcucaacaa

SEQ ID NO: 1223616 - RNA, 19 nt, Homo sapiens
  misc_RNA (1)...(19): siRNA sense strand
gaggaggagugcgucauga

SEQ ID NO: 1223617 - RNA, 19 nt, Homo sapiens
  misc_RNA (1)...(19): siRNA sense strand
gaacuuaaagcccaaacag

SEQ ID NO: 1223618 - RNA, 19 nt, Homo sapiens
  misc_RNA (1)...(19): siRNA sense strand
ggcaaauccuggacaaaca

SEQ ID NO: 1223619 - RNA, 19 nt, Homo sapiens
  misc_RNA (1)...(19): siRNA sense strand
gcaccaaggcucucucauc

SEQ ID NO: 1223620 - RNA, 19 nt, Homo sapiens
  misc_RNA (1)...(19): siRNA sense strand
gcuaugggcugaggcugaa

SEQ ID NO: 1223621 - RNA, 19 nt, Homo sapiens
  misc_RNA (1)...(19): siRNA sense strand
gccgugaccucccuaagug

SEQ ID NO: 1223622 - RNA, 19 nt, Homo sapiens
  misc_RNA (1)...(19): siRNA sense strand
gaguaaaguugggcacguu

SEQ ID NO: 1223623 - RNA, 19 nt, Homo sapiens
  misc_RNA (1)...(19): siRNA sense strand
ugcuggagcucaagaauga

SEQ ID NO: 1223624 - RNA, 19 nt, Homo sapiens
  misc_RNA (1)...(19): siRNA sense strand
agaaggacauugccaugga

SEQ ID NO: 1223625 - RNA, 19 nt, Homo sapiens
  misc_RNA (1)...(19): siRNA sense strand
ucagugacguuuaucagau

SEQ ID NO: 1223626 - RNA, 19 nt, Homo sapiens
  misc_RNA (1)...(19): siRNA sense strand
gcaaagccauggccuaccu

SEQ ID NO: 1223627 - RNA, 19 nt, Homo sapiens
  misc_RNA (1)...(19): siRNA sense strand
cagcuucaauccugggaaa

SEQ ID NO: 1223628 - RNA, 19 nt, Homo sapiens
  misc_RNA (1)...(19): siRNA sense strand
ggaucaucauggaauugua

SEQ ID NO: 1223629 - RNA, 19 nt, Homo sapiens
  misc_RNA (1)...(19): siRNA sense strand
ccaaacaguuccggaagau

SEQ ID NO: 1223630 - RNA, 19 nt, Homo sapiens
  misc_RNA (1)...(19): siRNA sense strand
ccaagguucuggccaaucu

SEQ ID NO: 1223631 - RNA, 19 nt, Homo sapiens
  misc_RNA (1)...(19): siRNA sense strand
ggaacaagaacucccugaa

SEQ ID NO: 1223632 - RNA, 19 nt, Homo sapiens
  misc_RNA (1)...(19): siRNA sense strand
ccaccuggaucaucaugga

SEQ ID NO: 1223633 - RNA, 19 nt, Homo sapiens
  misc_RNA (1)...(19): siRNA sense strand
ggacgugcguauccucaag

SEQ ID NO: 1223634 - RNA, 19 nt, Homo sapiens
  misc_RNA (1)...(19): siRNA sense strand
gacgaggacuauuacaaag

SEQ ID NO: 1223635 - RNA, 19 nt, Homo sapiens
  misc_RNA (1)...(19): siRNA sense strand
gaucaucauggaauuguau

SEQ ID NO: 1223636 - RNA, 19 nt, Homo sapiens
  misc_RNA (1)...(19): siRNA sense strand
gaagaugugguccugaauc

SEQ ID NO: 1223637 - RNA, 19 nt, Homo sapiens
  misc_RNA (1)...(19): siRNA sense strand
ggaggaggacuucauccaa

SEQ ID NO: 1223638 - RNA, 19 nt, Homo sapiens
  misc_RNA (1)...(19): siRNA sense strand
gaucgagggcacccagaaa

SEQ ID NO: 1223639 - RNA, 19 nt, Homo sapiens
  misc_RNA (1)...(19): siRNA sense strand
cuaccgcugugaacucauu

SEQ ID NO: 1223640 - RNA, 19 nt, Homo sapiens
  misc_RNA (1)...(19): siRNA sense strand
uuacaaagccucugugacu

SEQ ID NO: 1223641 - RNA, 19 nt, Homo sapiens
  misc_RNA (1)...(19): siRNA sense strand
ugucaagaccugcaagaaa

SEQ ID NO: 1223642 - RNA, 19 nt, Homo sapiens
  misc_RNA (1)...(19): siRNA sense strand
aggcagugaucaugaagaa

SEQ ID NO: 1223643 - RNA, 19 nt, Homo sapiens
  misc_RNA (1)...(19): siRNA sense strand
ccagaaacugcucaacaaa

SEQ ID NO: 1223644 - RNA, 19 nt, Homo sapiens
  misc_RNA (1)...(19): siRNA sense strand
cagcauagagucagacauc

SEQ ID NO: 1223645 - RNA, 19 nt, Homo sapiens
  misc_RNA (1)...(19): siRNA sense strand
gaagccgaguggagguaug

SEQ ID NO: 1223646 - RNA, 19 nt, Homo sapiens
  misc_RNA (1)...(19): siRNA sense strand
gaccugguguaccucaaug

SEQ ID NO: 1223647 - RNA, 19 nt, Homo sapiens
  misc_RNA (1)...(19): siRNA sense strand
cagccucagugacguuuau

SEQ ID NO: 1223648 - RNA, 19 nt, Homo sapiens
  misc_RNA (1)...(19): siRNA sense strand
ggacaacaaggagaaguuc

SEQ ID NO: 1223649 - RNA, 19 nt, Homo sapiens
  misc_RNA (1)...(19): siRNA sense strand
gagcucaggcgguucuuca

SEQ ID NO: 1223650 - RNA, 19 nt, Homo sapiens
  misc_RNA (1)...(19): siRNA sense strand
ggucuuucccgguacauug

SEQ ID NO: 1223651 - RNA, 19 nt, Homo sapiens
  misc_RNA (1)...(19): siRNA sense strand
gcagagauucccgacgaaa

SEQ ID NO: 1223652 - RNA, 19 nt, Homo sapiens
  misc_RNA (1)...(19): siRNA sense strand
ucagacaucuacgcagaga

SEQ ID NO: 1223653 - RNA, 19 nt, Homo sapiens
  misc_RNA (1)...(19): siRNA sense strand
gugaggugcaggacaagua

SEQ ID NO: 1223654 - RNA, 19 nt, Homo sapiens
  misc_RNA (1)...(19): siRNA sense strand
acaaacagcagaagcagau

SEQ ID NO: 1223655 - RNA, 19 nt, Homo sapiens
  misc_RNA (1)...(19): siRNA sense strand
uuuaucagauggagaagga

SEQ ID NO: 1223656 - RNA, 19 nt, Homo sapiens
  misc_RNA (1)...(19): siRNA sense strand
uagcagaggcugagaacau

SEQ ID NO: 1223657 - RNA, 19 nt, Homo sapiens
  misc_RNA (1)...(19): siRNA sense strand
ggaggaggagugcgucaug

SEQ ID NO: 1223658 - RNA, 19 nt, Homo sapiens
  misc_RNA (1)...(19): siRNA sense strand
aggcgguucuucaaggaua

SEQ ID NO: 1223659 - RNA, 19 nt, Homo sapiens
  misc_RNA (1)...(19): siRNA sense strand
uugaggacgaggacuauua

SEQ ID NO: 1223660 - RNA, 19 nt, Homo sapiens
  misc_RNA (1)...(19): siRNA sense strand
cccaaacaguuccggaaga

SEQ ID NO: 1223661 - RNA, 19 nt, Homo sapiens
  misc_RNA (1)...(19): siRNA sense strand
uguacucacugcagauaug

SEQ ID NO: 1223662 - RNA, 19 nt, Homo sapiens
  misc_RNA (1)...(19): siRNA sense strand
gaggagcccaccuggauca

SEQ ID NO: 1223663 - RNA, 19 nt, Homo sapiens
  misc_RNA (1)...(19): siRNA sense strand
gcaggacaaguaugagugu

SEQ ID NO: 1223664 - RNA, 19 nt, Homo sapiens
  misc_RNA (1)...(19): siRNA sense strand
ucaagaaugagcucuguca

SEQ ID NO: 1223665 - RNA, 19 nt, Homo sapiens
  misc_RNA (1)...(19): siRNA sense strand
cacaugaaguccgaugaga

SEQ ID NO: 1223666 - RNA, 19 nt, Homo sapiens
  misc_RNA (1)...(19): siRNA sense strand
gagcgaggcagugaucaug

SEQ ID NO: 1223667 - RNA, 19 nt, Homo sapiens
  misc_RNA (1)...(19): siRNA sense strand
caacaaggagaaguucaug

SEQ ID NO: 1223668 - RNA, 19 nt, Homo sapiens
  misc_RNA (1)...(19): siRNA sense strand
aagcagaucagguccauca

SEQ ID NO: 1223669 - RNA, 19 nt, Homo sapiens
  misc_RNA (1)...(19): siRNA sense strand
acuuaaagcccaaacaguu

SEQ ID NO: 1223670 - RNA, 19 nt, Homo sapiens
  misc_RNA (1)...(19): siRNA sense strand
gcacaugaaguccgaugag

SEQ ID NO: 1223671 - RNA, 19 nt, Homo sapiens
  misc_RNA (1)...(19): siRNA sense strand
guccaccgguccuuuauac

SEQ ID NO: 1223672 - RNA, 19 nt, Homo sapiens
  misc_RNA (1)...(19): siRNA sense strand
ugugggagauccugagcuu

SEQ ID NO: 1223673 - RNA, 19 nt, Homo sapiens
  misc_RNA (1)...(19): siRNA sense strand
caugaaguccgaugagauc

SEQ ID NO: 1223674 - RNA, 19 nt, Homo sapiens
  misc_RNA (1)...(19): siRNA sense strand
ccauccagcccacagcuaa

SEQ ID NO: 1223675 - RNA, 19 nt, Homo sapiens
  misc_RNA (1)...(19): siRNA sense strand
cagugacguuuaucagaug

SEQ ID NO: 1223676 - RNA, 19 nt, Homo sapiens
  misc_RNA (1)...(19): siRNA sense strand
gcuguacucacugcagaua

SEQ ID NO: 1223677 - RNA, 19 nt, Homo sapiens
  misc_RNA (1)...(19): siRNA sense strand
gcauugcccgugaagaugu

SEQ ID NO: 1223678 - RNA, 19 nt, Homo sapiens
  misc_RNA (1)...(19): siRNA sense strand
guacuucagcugggcauug

SEQ ID NO: 1223679 - RNA, 19 nt, Homo sapiens
  misc_RNA (1)...(19): siRNA sense strand
aggagugcgucaugaaguu

SEQ ID NO: 1223680 - RNA, 19 nt, Homo sapiens
  misc_RNA (1)...(19): siRNA sense strand
ggagaccuaccgcugugaa

SEQ ID NO: 1223681 - RNA, 19 nt, Homo sapiens
  misc_RNA (1)...(19): siRNA sense strand
ccucaaggucugcuucuau

SEQ ID NO: 1223682 - RNA, 19 nt, Homo sapiens
  misc_RNA (1)...(19): siRNA sense strand
ugggugaggugcaggacaa

SEQ ID NO: 1223683 - RNA, 19 nt, Homo sapiens
  misc_RNA (1)...(19): siRNA sense strand
cuccaaagcugcaguucca

SEQ ID NO: 1223684 - RNA, 19 nt, Homo sapiens
  misc_RNA (1)...(19): siRNA sense strand
ccaaccuccuggcuccaaa

SEQ ID NO: 1223685 - RNA, 19 nt, Homo sapiens
  misc_RNA (1)...(19): siRNA sense strand
ugggagauccugagcuuug

SEQ ID NO: 1223686 - RNA, 19 nt, Homo sapiens
  misc_RNA (1)...(19): siRNA sense strand
acuucaaacuggucaaaug

SEQ ID NO: 1223687 - RNA, 19 nt, Homo sapiens
  misc_RNA (1)...(19): siRNA sense strand
gggauccgccagcugacua

SEQ ID NO: 1223688 - RNA, 19 nt, Homo sapiens
  misc_RNA (1)...(19): siRNA sense strand
gaacauggcugaccucaua

SEQ ID NO: 1223689 - RNA, 19 nt, Homo sapiens
  misc_RNA (1)...(19): siRNA sense strand
ggaccacgcugcucuauuu

SEQ ID NO: 1223690 - RNA, 19 nt, Homo sapiens
  misc_RNA (1)...(19): siRNA sense strand
caaagcagaugcaggagaa

SEQ ID NO: 1223691 - RNA, 19 nt, Homo sapiens
  misc_RNA (1)...(19): siRNA sense strand
ucagagagcugcagcauag

SEQ ID NO: 1223692 - RNA, 19 nt, Homo sapiens
  misc_RNA (1)...(19): siRNA sense strand
ggacgaggacuauuacaaa

SEQ ID NO: 1223693 - RNA, 19 nt, Homo sapiens
  misc_RNA (1)...(19): siRNA sense strand
uggcagagcucaucaacaa

SEQ ID NO: 1223694 - RNA, 19 nt, Homo sapiens
  misc_RNA (1)...(19): siRNA sense strand
auucaaggauggaacauua

SEQ ID NO: 1223695 - RNA, 19 nt, Homo sapiens
  misc_RNA (1)...(19): siRNA sense strand
agaaacugcucaacaaaga

SEQ ID NO: 1223696 - RNA, 19 nt, Homo sapiens
  misc_RNA (1)...(19): siRNA sense strand
caccaaggcucucucauca

SEQ ID NO: 1223697 - RNA, 19 nt, Homo sapiens
  misc_RNA (1)...(19): siRNA sense strand
caucauccauccuaggaaa

SEQ ID NO: 1223698 - RNA, 19 nt, Homo sapiens
  misc_RNA (1)...(19): siRNA sense strand
gaacaagaacucccugaag

SEQ ID NO: 1223699 - RNA, 19 nt, Homo sapiens
  misc_RNA (1)...(19): siRNA sense strand
ccaaggcucucucaucauc

SEQ ID NO: 1223700 - RNA, 19 nt, Homo sapiens
  misc_RNA (1)...(19): siRNA sense strand
gcccggagguccacaguau

SEQ ID NO: 1223701 - RNA, 19 nt, Homo sapiens
  misc_RNA (1)...(19): siRNA sense strand
ccacccaccugcagaguga

SEQ ID NO: 1223702 - RNA, 19 nt, Homo sapiens
  misc_RNA (1)...(19): siRNA sense strand
gaugugguccugaaucgua

SEQ ID NO: 1223703 - RNA, 19 nt, Homo sapiens
  misc_RNA (1)...(19): siRNA sense strand
gagcccaccuggaucauca

SEQ ID NO: 1223704 - RNA, 19 nt, Homo sapiens
  misc_RNA (1)...(19): siRNA sense strand
gcagagcucaucaacaaga

SEQ ID NO: 1223705 - RNA, 19 nt, Homo sapiens
  misc_RNA (1)...(19): siRNA sense strand
gcagaugcaggagaacuua

SEQ ID NO: 1223706 - RNA, 19 nt, Homo sapiens
  misc_RNA (1)...(19): siRNA sense strand
ggacugaugaccuggugua

SEQ ID NO: 1223707 - RNA, 19 nt, Homo sapiens
  misc_RNA (1)...(19): siRNA sense strand
gugaagaugugguccugaa

SEQ ID NO: 1223708 - RNA, 19 nt, Homo sapiens
  misc_RNA (1)...(19): siRNA sense strand
caacuucgagcuccuagaa

SEQ ID NO: 1223709 - RNA, 19 nt, Homo sapiens
  misc_RNA (1)...(19): siRNA sense strand
gcccaagccugaucucugu

SEQ ID NO: 1223710 - RNA, 19 nt, Homo sapiens
  misc_RNA (1)...(19): siRNA sense strand
uaggaaagauggugagaag

SEQ ID NO: 1223711 - RNA, 19 nt, Homo sapiens
  misc_RNA (1)...(19): siRNA sense strand
gucaagaccugcaagaaag

SEQ ID NO: 1223712 - RNA, 19 nt, Homo sapiens
  misc_RNA (1)...(19): siRNA sense strand
aaacaguuccggaagauga

SEQ ID NO: 1223713 - RNA, 19 nt, Homo sapiens
  misc_RNA (1)...(19): siRNA sense strand
gcgaggcagugaucaugaa

SEQ ID NO: 1223714 - RNA, 19 nt, Homo sapiens
  misc_RNA (1)...(19): siRNA sense strand
cucaaggucugcuucuaua

SEQ ID NO: 1223715 - RNA, 19 nt, Homo sapiens
  misc_RNA (1)...(19): siRNA sense strand
cccagaaacugcucaacaa

SEQ ID NO: 1223716 - RNA, 19 nt, Homo sapiens
  misc_RNA (1)...(19): siRNA sense strand
gaggaggagugcgucauga

SEQ ID NO: 1223717 - RNA, 19 nt, Homo sapiens
  misc_RNA (1)...(19): siRNA sense strand
gaacuuaaagcccaaacag

SEQ ID NO: 1223718 - RNA, 19 nt, Homo sapiens
  misc_RNA (1)...(19): siRNA sense strand
ggcaaauccuggacaaaca

SEQ ID NO: 1223719 - RNA, 19 nt, Homo sapiens
  misc_RNA (1)...(19): siRNA sense strand
gcaccaaggcucucucauc

SEQ ID NO: 1223720 - RNA, 19 nt, Homo sapiens
  misc_RNA (1)...(19): siRNA sense strand
gcuaugggcugaggcugaa

SEQ ID NO: 1223721 - RNA, 19 nt, Homo sapiens
  misc_RNA (1)...(19): siRNA sense strand
gccgugaccucccuaagug

SEQ ID NO: 1223722 - RNA, 19 nt, Homo sapiens
  misc_RNA (1)...(19): siRNA sense strand
gaguaaaguugggcacguu

SEQ ID NO: 1223723 - RNA, 19 nt, Homo sapiens
  misc_RNA (1)...(19): siRNA sense strand
ugcuggagcucaagaauga

SEQ ID NO: 1223724 - RNA, 19 nt, Homo sapiens
  misc_RNA (1)...(19): siRNA sense strand
agaaggacauugccaugga

SEQ ID NO: 1223725 - RNA, 19 nt, Homo sapiens
  misc_RNA (1)...(19): siRNA sense strand
ucagugacguuuaucagau

SEQ ID NO: 1223726 - RNA, 19 nt, Homo sapiens
  misc_RNA (1)...(19): siRNA sense strand
gcaaagccauggccuaccu

SEQ ID NO: 1223727 - RNA, 19 nt, Homo sapiens
  misc_RNA (1)...(19): siRNA sense strand
cagcuucaauccugggaaa

SEQ ID NO: 1223728 - RNA, 19 nt, Homo sapiens
  misc_RNA (1)...(19): siRNA sense strand
ggaucaucauggaauugua

SEQ ID NO: 1223729 - RNA, 19 nt, Homo sapiens
  misc_RNA (1)...(19): siRNA sense strand
ccaaacaguuccggaagau

SEQ ID NO: 1223730 - RNA, 19 nt, Homo sapiens
  misc_RNA (1)...(19): siRNA sense strand
ccaagguucuggccaaucu

SEQ ID NO: 1223731 - RNA, 19 nt, Homo sapiens
  misc_RNA (1)...(19): siRNA sense strand
ggaacaagaacucccugaa

SEQ ID NO: 1223732 - RNA, 19 nt, Homo sapiens
  misc_RNA (1)...(19): siRNA sense strand
ccaccuggaucaucaugga

SEQ ID NO: 1223733 - RNA, 19 nt, Homo sapiens
  misc_RNA (1)...(19): siRNA sense strand
ggacgugcguauccucaag

SEQ ID NO: 1223734 - RNA, 19 nt, Homo sapiens
  misc_RNA (1)...(19): siRNA sense strand
gacgaggacuauuacaaag

SEQ ID NO: 1223735 - RNA, 19 nt, Homo sapiens
  misc_RNA (1)...(19): siRNA sense strand
gaucaucauggaauuguau

SEQ ID NO: 1223736 - RNA, 19 nt, Homo sapiens
  misc_RNA (1)...(19): siRNA sense strand
gaagaugugguccugaauc

SEQ ID NO: 1223737 - RNA, 19 nt, Homo sapiens
  misc_RNA (1)...(19): siRNA sense strand
ggaggaggacuucauccaa

SEQ ID NO: 1223738 - RNA, 19 nt, Homo sapiens
  misc_RNA (1)...(19): siRNA sense strand
gaucgagggcacccagaaa

SEQ ID NO: 1223739 - RNA, 19 nt, Homo sapiens
  misc_RNA (1)...(19): siRNA sense strand
cuaccgcugugaacucauu

SEQ ID NO: 1223740 - RNA, 19 nt, Homo sapiens
  misc_RNA (1)...(19): siRNA sense strand
uuacaaagccucugugacu

SEQ ID NO: 1223741 - RNA, 19 nt, Homo sapiens
  misc_RNA (1)...(19): siRNA sense strand
ugucaagaccugcaagaaa

SEQ ID NO: 1223742 - RNA, 19 nt, Homo sapiens
  misc_RNA (1)...(19): siRNA sense strand
aggcagugaucaugaagaa

SEQ ID NO: 1223743 - RNA, 19 nt, Homo sapiens
  misc_RNA (1)...(19): siRNA sense strand
ccagaaacugcucaacaaa

SEQ ID NO: 1223744 - RNA, 19 nt, Homo sapiens
  misc_RNA (1)...(19): siRNA sense strand
cagcauagagucagacauc

SEQ ID NO: 1223745 - RNA, 19 nt, Homo sapiens
  misc_RNA (1)...(19): siRNA sense strand
gaagccgaguggagguaug

SEQ ID NO: 1223746 - RNA, 19 nt, Homo sapiens
  misc_RNA (1)...(19): siRNA sense strand
gaccugguguaccucaaug

SEQ ID NO: 1223747 - RNA, 19 nt, Homo sapiens
  misc_RNA (1)...(19): siRNA sense strand
cagccucagugacguuuau

SEQ ID NO: 1223748 - RNA, 19 nt, Homo sapiens
  misc_RNA (1)...(19): siRNA sense strand
ggacaacaaggagaaguuc

SEQ ID NO: 1223749 - RNA, 19 nt, Homo sapiens
  misc_RNA (1)...(19): siRNA sense strand
gagcucaggcgguucuuca

SEQ ID NO: 1223750 - RNA, 19 nt, Homo sapiens
  misc_RNA (1)...(19): siRNA sense strand
ggucuuucccgguacauug

SEQ ID NO: 1223751 - RNA, 19 nt, Homo sapiens
  misc_RNA (1)...(19): siRNA sense strand
gcagagauucccgacgaaa

SEQ ID NO: 1223752 - RNA, 19 nt, Homo sapiens
  misc_RNA (1)...(19): siRNA sense strand
ucagacaucuacgcagaga

SEQ ID NO: 1223753 - RNA, 19 nt, Homo sapiens
  misc_RNA (1)...(19): siRNA sense strand
gugaggugcaggacaagua

SEQ ID NO: 1223754 - RNA, 19 nt, Homo sapiens
  misc_RNA (1)...(19): siRNA sense strand
acaaacagcagaagcagau

SEQ ID NO: 1223755 - RNA, 19 nt, Homo sapiens
  misc_RNA (1)...(19): siRNA sense strand
uuuaucagauggagaagga

SEQ ID NO: 1223756 - RNA, 19 nt, Homo sapiens
  misc_RNA (1)...(19): siRNA sense strand
uagcagaggcugagaacau

SEQ ID NO: 1223757 - RNA, 19 nt, Homo sapiens
  misc_RNA (1)...(19): siRNA sense strand
ggaggaggagugcgucaug

SEQ ID NO: 1223758 - RNA, 19 nt, Homo sapiens
  misc_RNA (1)...(19): siRNA sense strand
aggcgguucuucaaggaua

SEQ ID NO: 1223759 - RNA, 19 nt, Homo sapiens
  misc_RNA (1)...(19): siRNA sense strand
uugaggacgaggacuauua

SEQ ID NO: 1223760 - RNA, 19 nt, Homo sapiens
  misc_RNA (1)...(19): siRNA sense strand
cccaaacaguuccggaaga

SEQ ID NO: 1223761 - RNA, 19 nt, Homo sapiens
  misc_RNA (1)...(19): siRNA sense strand
uguacucacugcagauaug

SEQ ID NO: 1223762 - RNA, 19 nt, Homo sapiens
  misc_RNA (1)...(19): siRNA sense strand
gaggagcccaccuggauca

SEQ ID NO: 1223763 - RNA, 19 nt, Homo sapiens
  misc_RNA (1)...(19): siRNA sense strand
gcaggacaaguaugagugu

SEQ ID NO: 1223764 - RNA, 19 nt, Homo sapiens
  misc_RNA (1)...(19): siRNA sense strand
ucaagaaugagcucuguca

SEQ ID NO: 1223765 - RNA, 19 nt, Homo sapiens
  misc_RNA (1)...(19): siRNA sense strand
cacaugaaguccgaugaga

SEQ ID NO: 1223766 - RNA, 19 nt, Homo sapiens
  misc_RNA (1)...(19): siRNA sense strand
gagcgaggcagugaucaug

SEQ ID NO: 1223767 - RNA, 19 nt, Homo sapiens
  misc_RNA (1)...(19): siRNA sense strand
caacaaggagaaguucaug

SEQ ID NO: 1223768 - RNA, 19 nt, Homo sapiens
  misc_RNA (1)...(19): siRNA sense strand
aagcagaucagguccauca

SEQ ID NO: 1223769 - RNA, 19 nt, Homo sapiens
  misc_RNA (1)...(19): siRNA sense strand
acuuaaagcccaaacaguu

SEQ ID NO: 1223770 - RNA, 19 nt, Homo sapiens
  misc_RNA (1)...(19): siRNA sense strand
gcacaugaaguccgaugag

SEQ ID NO: 1223771 - RNA, 19 nt, Homo sapiens
  misc_RNA (1)...(19): siRNA sense strand
guccaccgguccuuuauac

SEQ ID NO: 1223772 - RNA, 19 nt, Homo sapiens
  misc_RNA (1)...(19): siRNA sense strand
ugugggagauccugagcuu

SEQ ID NO: 1223773 - RNA, 19 nt, Homo sapiens
  misc_RNA (1)...(19): siRNA sense strand
caugaaguccgaugagauc

SEQ ID NO: 1223774 - RNA, 19 nt, Homo sapiens
  misc_RNA (1)...(19): siRNA sense strand
ccauccagcccacagcuaa

SEQ ID NO: 1223775 - RNA, 19 nt, Homo sapiens
  misc_RNA (1)...(19): siRNA sense strand
cagugacguuuaucagaug

SEQ ID NO: 1223776 - RNA, 19 nt, Homo sapiens
  misc_RNA (1)...(19): siRNA sense strand
gcuguacucacugcagaua

SEQ ID NO: 1223777 - RNA, 19 nt, Homo sapiens
  misc_RNA (1)...(19): siRNA sense strand
gcauugcccgugaagaugu

SEQ ID NO: 1223778 - RNA, 19 nt, Homo sapiens
  misc_RNA (1)...(19): siRNA sense strand
guacuucagcugggcauug

SEQ ID NO: 1223779 - RNA, 19 nt, Homo sapiens
  misc_RNA (1)...(19): siRNA sense strand
aggagugcgucaugaaguu

SEQ ID NO: 1223780 - RNA, 19 nt, Homo sapiens
  misc_RNA (1)...(19): siRNA sense strand
ggagaccuaccgcugugaa

SEQ ID NO: 1223781 - RNA, 19 nt, Homo sapiens
  misc_RNA (1)...(19): siRNA sense strand
ccucaaggucugcuucuau

SEQ ID NO: 1223782 - RNA, 19 nt, Homo sapiens
  misc_RNA (1)...(19): siRNA sense strand
ugggugaggugcaggacaa

SEQ ID NO: 1223783 - RNA, 19 nt, Homo sapiens
  misc_RNA (1)...(19): siRNA sense strand
cuccaaagcugcaguucca

SEQ ID NO: 1223784 - RNA, 19 nt, Homo sapiens
  misc_RNA (1)...(19): siRNA sense strand
ccaaccuccuggcuccaaa

SEQ ID NO: 1223785 - RNA, 19 nt, Homo sapiens
  misc_RNA (1)...(19): siRNA sense strand
ugggagauccugagcuuug

SEQ ID NO: 1223786 - RNA, 19 nt, Homo sapiens
  misc_RNA (1)...(19): siRNA sense strand
acuucaaacuggucaaaug

SEQ ID NO: 1223787 - RNA, 19 nt, Homo sapiens
  misc_RNA (1)...(19): siRNA sense strand
gggauccgccagcugacua

SEQ ID NO: 1223788 - RNA, 19 nt, Homo sapiens
  misc_RNA (1)...(19): siRNA sense strand
gaacauggcugaccucaua

SEQ ID NO: 1223789 - RNA, 19 nt, Homo sapiens
  misc_RNA (1)...(19): siRNA sense strand
ggaccacgcugcucuauuu

SEQ ID NO: 1223790 - RNA, 19 nt, Homo sapiens
  misc_RNA (1)...(19): siRNA sense strand
caaagcagaugcaggagaa

SEQ ID NO: 1223791 - RNA, 19 nt, Homo sapiens
  misc_RNA (1)...(19): siRNA sense strand
ucagagagcugcagcauag

SEQ ID NO: 1223792 - RNA, 19 nt, Homo sapiens
  misc_RNA (1)...(19): siRNA sense strand
ggacgaggacuauuacaaa

SEQ ID NO: 1223793 - RNA, 19 nt, Homo sapiens
  misc_RNA (1)...(19): siRNA sense strand
uggcagagcucaucaacaa

SEQ ID NO: 1223794 - RNA, 19 nt, Homo sapiens
  misc_RNA (1)...(19): siRNA sense strand
auucaaggauggaacauua

SEQ ID NO: 1223795 - RNA, 19 nt, Homo sapiens
  misc_RNA (1)...(19): siRNA sense strand
agaaacugcucaacaaaga

SEQ ID NO: 1223796 - RNA, 19 nt, Homo sapiens
  misc_RNA (1)...(19): siRNA sense strand
caccaaggcucucucauca

SEQ ID NO: 1223797 - RNA, 19 nt, Homo sapiens
  misc_RNA (1)...(19): siRNA sense strand
caucauccauccuaggaaa

SEQ ID NO: 1223798 - RNA, 19 nt, Homo sapiens
  misc_RNA (1)...(19): siRNA sense strand
gaacaagaacucccugaag

SEQ ID NO: 1223799 - RNA, 19 nt, Homo sapiens
  misc_RNA (1)...(19): siRNA sense strand
ccaaggcucucucaucauc

SEQ ID NO: 1223800 - RNA, 19 nt, Homo sapiens
  misc_RNA (1)...(19): siRNA sense strand
gcccggagguccacaguau

SEQ ID NO: 1223801 - RNA, 19 nt, Homo sapiens
  misc_RNA (1)...(19): siRNA sense strand
ccacccaccugcagaguga

SEQ ID NO: 1223802 - RNA, 19 nt, Homo sapiens
  misc_RNA (1)...(19): siRNA sense strand
gaugugguccugaaucgua

SEQ ID NO: 1223803 - RNA, 19 nt, Homo sapiens
  misc_RNA (1)...(19): siRNA sense strand
gagcccaccuggaucauca

SEQ ID NO: 1223804 - RNA, 19 nt, Homo sapiens
  misc_RNA (1)...(19): siRNA sense strand
gcagagcucaucaacaaga

SEQ ID NO: 1223805 - RNA, 19 nt, Homo sapiens
  misc_RNA (1)...(19): siRNA sense strand
gcagaugcaggagaacuua

SEQ ID NO: 1223806 - RNA, 19 nt, Homo sapiens
  misc_RNA (1)...(19): siRNA sense strand
ggacugaugaccuggugua

SEQ ID NO: 1223807 - RNA, 19 nt, Homo sapiens
  misc_RNA (1)...(19): siRNA sense strand
gugaagaugugguccugaa

SEQ ID NO: 1223808 - RNA, 19 nt, Homo sapiens
  misc_RNA (1)...(19): siRNA sense strand
caacuucgagcuccuagaa

SEQ ID NO: 1223809 - RNA, 19 nt, Homo sapiens
  misc_RNA (1)...(19): siRNA sense strand
gcccaagccugaucucugu

SEQ ID NO: 1223810 - RNA, 19 nt, Homo sapiens
  misc_RNA (1)...(19): siRNA sense strand
uaggaaagauggugagaag

SEQ ID NO: 1223811 - RNA, 19 nt, Homo sapiens
  misc_RNA (1)...(19): siRNA sense strand
gucaagaccugcaagaaag

SEQ ID NO: 1223812 - RNA, 19 nt, Homo sapiens
  misc_RNA (1)...(19): siRNA sense strand
aaacaguuccggaagauga

SEQ ID NO: 1223813 - RNA, 19 nt, Homo sapiens
  misc_RNA (1)...(19): siRNA sense strand
gcgaggcagugaucaugaa

SEQ ID NO: 1223814 - RNA, 19 nt, Homo sapiens
  misc_RNA (1)...(19): siRNA sense strand
cucaaggucugcuucuaua

SEQ ID NO: 1223815 - RNA, 19 nt, Homo sapiens
  misc_RNA (1)...(19): siRNA sense strand
cccagaaacugcucaacaa

SEQ ID NO: 1223816 - RNA, 19 nt, Homo sapiens
  misc_RNA (1)...(19): siRNA sense strand
gaggaggagugcgucauga

SEQ ID NO: 1223817 - RNA, 19 nt, Homo sapiens
  misc_RNA (1)...(19): siRNA sense strand
gaacuuaaagcccaaacag

SEQ ID NO: 1223818 - RNA, 19 nt, Homo sapiens
  misc_RNA (1)...(19): siRNA sense strand
ggcaaauccuggacaaaca

SEQ ID NO: 1223819 - RNA, 19 nt, Homo sapiens
  misc_RNA (1)...(19): siRNA sense strand
gcaccaaggcucucucauc

SEQ ID NO: 1223820 - RNA, 19 nt, Homo sapiens
  misc_RNA (1)...(19): siRNA sense strand
gcuaugggcugaggcugaa

SEQ ID NO: 1223821 - RNA, 19 nt, Homo sapiens
  misc_RNA (1)...(19): siRNA sense strand
gccgugaccucccuaagug

SEQ ID NO: 1223822 - RNA, 19 nt, Homo sapiens
  misc_RNA (1)...(19): siRNA sense strand
gaguaaaguugggcacguu

SEQ ID NO: 1223823 - RNA, 19 nt, Homo sapiens
  misc_RNA (1)...(19): siRNA sense strand
ugcuggagcucaagaauga

SEQ ID NO: 1223824 - RNA, 19 nt, Homo sapiens
  misc_RNA (1)...(19): siRNA sense strand
agaaggacauugccaugga

SEQ ID NO: 1223825 - RNA, 19 nt, Homo sapiens
  misc_RNA (1)...(19): siRNA sense strand
ucagugacguuuaucagau

SEQ ID NO: 1223826 - RNA, 19 nt, Homo sapiens
  misc_RNA (1)...(19): siRNA sense strand
gcaaagccauggccuaccu

SEQ ID NO: 1223827 - RNA, 19 nt, Homo sapiens
  misc_RNA (1)...(19): siRNA sense strand
cagcuucaauccugggaaa

SEQ ID NO: 1223828 - RNA, 19 nt, Homo sapiens
  misc_RNA (1)...(19): siRNA sense strand
ggaucaucauggaauugua

SEQ ID NO: 1223829 - RNA, 19 nt, Homo sapiens
  misc_RNA (1)...(19): siRNA sense strand
ccaaacaguuccggaagau

SEQ ID NO: 1223830 - RNA, 19 nt, Homo sapiens
  misc_RNA (1)...(19): siRNA sense strand
ccaagguucuggccaaucu

SEQ ID NO: 1223831 - RNA, 19 nt, Homo sapiens
  misc_RNA (1)...(19): siRNA sense strand
ggaacaagaacucccugaa

SEQ ID NO: 1223832 - RNA, 19 nt, Homo sapiens
  misc_RNA (1)...(19): siRNA sense strand
ccaccuggaucaucaugga

SEQ ID NO: 1223833 - RNA, 19 nt, Homo sapiens
  misc_RNA (1)...(19): siRNA sense strand
ggacgugcguauccucaag

SEQ ID NO: 1223834 - RNA, 19 nt, Homo sapiens
  misc_RNA (1)...(19): siRNA sense strand
gacgaggacuauuacaaag

SEQ ID NO: 1223835 - RNA, 19 nt, Homo sapiens
  misc_RNA (1)...(19): siRNA sense strand
gaucaucauggaauuguau

SEQ ID NO: 1223836 - RNA, 19 nt, Homo sapiens
  misc_RNA (1)...(19): siRNA sense strand
gaagaugugguccugaauc

SEQ ID NO: 1223837 - RNA, 19 nt, Homo sapiens
  misc_RNA (1)...(19): siRNA sense strand
ggaggaggacuucauccaa

SEQ ID NO: 1223838 - RNA, 19 nt, Homo sapiens
  misc_RNA (1)...(19): siRNA sense strand
gaucgagggcacccagaaa

SEQ ID NO: 1223839 - RNA, 19 nt, Homo sapiens
  misc_RNA (1)...(19): siRNA sense strand
cuaccgcugugaacucauu

SEQ ID NO: 1223840 - RNA, 19 nt, Homo sapiens
  misc_RNA (1)...(19): siRNA sense strand
uuacaaagccucugugacu

SEQ ID NO: 1223841 - RNA, 19 nt, Homo sapiens
  misc_RNA (1)...(19): siRNA sense strand
ugucaagaccugcaagaaa

SEQ ID NO: 1223842 - RNA, 19 nt, Homo sapiens
  misc_RNA (1)...(19): siRNA sense strand
aggcagugaucaugaagaa

SEQ ID NO: 1223843 - RNA, 19 nt, Homo sapiens
  misc_RNA (1)...(19): siRNA sense strand
ccagaaacugcucaacaaa

SEQ ID NO: 1223844 - RNA, 19 nt, Homo sapiens
  misc_RNA (1)...(19): siRNA sense strand
cagcauagagucagacauc

SEQ ID NO: 1223845 - RNA, 19 nt, Homo sapiens
  misc_RNA (1)...(19): siRNA sense strand
gaagccgaguggagguaug

SEQ ID NO: 1223846 - RNA, 19 nt, Homo sapiens
  misc_RNA (1)...(19): siRNA sense strand
gaccugguguaccucaaug

SEQ ID NO: 1223847 - RNA, 19 nt, Homo sapiens
  misc_RNA (1)...(19): siRNA sense strand
cagccucagugacguuuau

SEQ ID NO: 1223848 - RNA, 19 nt, Homo sapiens
  misc_RNA (1)...(19): siRNA sense strand
ggacaacaaggagaaguuc

SEQ ID NO: 1223849 - RNA, 19 nt, Homo sapiens
  misc_RNA (1)...(19): siRNA sense strand
gagcucaggcgguucuuca

SEQ ID NO: 1223850 - RNA, 19 nt, Homo sapiens
  misc_RNA (1)...(19): siRNA sense strand
ggucuuucccgguacauug

SEQ ID NO: 1223851 - RNA, 19 nt, Homo sapiens
  misc_RNA (1)...(19): siRNA sense strand
gcagagauucccgacgaaa

SEQ ID NO: 1223852 - RNA, 19 nt, Homo sapiens
  misc_RNA (1)...(19): siRNA sense strand
ucagacaucuacgcagaga

SEQ ID NO: 1223853 - RNA, 19 nt, Homo sapiens
  misc_RNA (1)...(19): siRNA sense strand
gugaggugcaggacaagua

SEQ ID NO: 1223854 - RNA, 19 nt, Homo sapiens
  misc_RNA (1)...(19): siRNA sense strand
acaaacagcagaagcagau

SEQ ID NO: 1223855 - RNA, 19 nt, Homo sapiens
  misc_RNA (1)...(19): siRNA sense strand
uuuaucagauggagaagga

SEQ ID NO: 1223856 - RNA, 19 nt, Homo sapiens
  misc_RNA (1)...(19): siRNA sense strand
uagcagaggcugagaacau

SEQ ID NO: 1223857 - RNA, 19 nt, Homo sapiens
  misc_RNA (1)...(19): siRNA sense strand
ggaggaggagugcgucaug

SEQ ID NO: 1223858 - RNA, 19 nt, Homo sapiens
  misc_RNA (1)...(19): siRNA sense strand
aggcgguucuucaaggaua

SEQ ID NO: 1223859 - RNA, 19 nt, Homo sapiens
  misc_RNA (1)...(19): siRNA sense strand
uugaggacgaggacuauua

SEQ ID NO: 1223860 - RNA, 19 nt, Homo sapiens
  misc_RNA (1)...(19): siRNA sense strand
cccaaacaguuccggaaga

SEQ ID NO: 1223861 - RNA, 19 nt, Homo sapiens
  misc_RNA (1)...(19): siRNA sense strand
uguacucacugcagauaug

SEQ ID NO: 1223862 - RNA, 19 nt, Homo sapiens
  misc_RNA (1)...(19): siRNA sense strand
gaggagcccaccuggauca

SEQ ID NO: 1223863 - RNA, 19 nt, Homo sapiens
  misc_RNA (1)...(19): siRNA sense strand
gcaggacaaguaugagugu

SEQ ID NO: 1223864 - RNA, 19 nt, Homo sapiens
  misc_RNA (1)...(19): siRNA sense strand
ucaagaaugagcucuguca

SEQ ID NO: 1223865 - RNA, 19 nt, Homo sapiens
  misc_RNA (1)...(19): siRNA sense strand
cacaugaaguccgaugaga

SEQ ID NO: 1223866 - RNA, 19 nt, Homo sapiens
  misc_RNA (1)...(19): siRNA sense strand
gagcgaggcagugaucaug

SEQ ID NO: 1223867 - RNA, 19 nt, Homo sapiens
  misc_RNA (1)...(19): siRNA sense strand
caacaaggagaaguucaug

SEQ ID NO: 1223868 - RNA, 19 nt, Homo sapiens
  misc_RNA (1)...(19): siRNA sense strand
aagcagaucagguccauca

SEQ ID NO: 1223869 - RNA, 19 nt, Homo sapiens
  misc_RNA (1)...(19): siRNA sense strand
acuuaaagcccaaacaguu

SEQ ID NO: 1223870 - RNA, 19 nt, Homo sapiens
  misc_RNA (1)...(19): siRNA sense strand
gcacaugaaguccgaugag

SEQ ID NO: 1223871 - RNA, 19 nt, Homo sapiens
  misc_RNA (1)...(19): siRNA sense strand
guccaccgguccuuuauac

SEQ ID NO: 1223872 - RNA, 19 nt, Homo sapiens
  misc_RNA (1)...(19): siRNA sense strand
ugugggagauccugagcuu

SEQ ID NO: 1223873 - RNA, 19 nt, Homo sapiens
  misc_RNA (1)...(19): siRNA sense strand
caugaaguccgaugagauc

SEQ ID NO: 1223874 - RNA, 19 nt, Homo sapiens
  misc_RNA (1)...(19): siRNA sense strand
ccauccagcccacagcuaa

SEQ ID NO: 1223875 - RNA, 19 nt, Homo sapiens
  misc_RNA (1)...(19): siRNA sense strand
cagugacguuuaucagaug

SEQ ID NO: 1223876 - RNA, 19 nt, Homo sapiens
  misc_RNA (1)...(19): siRNA sense strand
gcuguacucacugcagaua

SEQ ID NO: 1223877 - RNA, 19 nt, Homo sapiens
  misc_RNA (1)...(19): siRNA sense strand
gcauugcccgugaagaugu

SEQ ID NO: 1223878 - RNA, 19 nt, Homo sapiens
  misc_RNA (1)...(19): siRNA sense strand
guacuucagcugggcauug

SEQ ID NO: 1223879 - RNA, 19 nt, Homo sapiens
  misc_RNA (1)...(19): siRNA sense strand
aggagugcgucaugaaguu

SEQ ID NO: 1223880 - RNA, 19 nt, Homo sapiens
  misc_RNA (1)...(19): siRNA sense strand
ggagaccuaccgcugugaa

SEQ ID NO: 1223881 - RNA, 19 nt, Homo sapiens
  misc_RNA (1)...(19): siRNA sense strand
ccucaaggucugcuucuau

SEQ ID NO: 1223882 - RNA, 19 nt, Homo sapiens
  misc_RNA (1)...(19): siRNA sense strand
ugggugaggugcaggacaa

SEQ ID NO: 1223883 - RNA, 19 nt, Homo sapiens
  misc_RNA (1)...(19): siRNA sense strand
cuccaaagcugcaguucca

SEQ ID NO: 1223884 - RNA, 19 nt, Homo sapiens
  misc_RNA (1)...(19): siRNA sense strand
ccaaccuccuggcuccaaa

SEQ ID NO: 1223885 - RNA, 19 nt, Homo sapiens
  misc_RNA (1)...(19): siRNA sense strand
ugggagauccugagcuuug

SEQ ID NO: 1223886 - RNA, 19 nt, Homo sapiens
  misc_RNA (1)...(19): siRNA sense strand
acuucaaacuggucaaaug

SEQ ID NO: 1223887 - RNA, 19 nt, Homo sapiens
  misc_RNA (1)...(19): siRNA sense strand
gggauccgccagcugacua

SEQ ID NO: 1223888 - RNA, 19 nt, Homo sapiens
  misc_RNA (1)...(19): siRNA sense strand
gaacauggcugaccucaua

SEQ ID NO: 1223889 - RNA, 19 nt, Homo sapiens
  misc_RNA (1)...(19): siRNA sense strand
ggaccacgcugcucuauuu

SEQ ID NO: 1223890 - RNA, 19 nt, Homo sapiens
  misc_RNA (1)...(19): siRNA sense strand
caaagcagaugcaggagaa

SEQ ID NO: 1223891 - RNA, 19 nt, Homo sapiens
  misc_RNA (1)...(19): siRNA sense strand
ucagagagcugcagcauag

SEQ ID NO: 1223892 - RNA, 19 nt, Homo sapiens
  misc_RNA (1)...(19): siRNA sense strand
ggacgaggacuauuacaaa

SEQ ID NO: 1223893 - RNA, 19 nt, Homo sapiens
  misc_RNA (1)...(19): siRNA sense strand
uggcagagcucaucaacaa

SEQ ID NO: 1223894 - RNA, 19 nt, Homo sapiens
  misc_RNA (1)...(19): siRNA sense strand
auucaaggauggaacauua

SEQ ID NO: 1223895 - RNA, 19 nt, Homo sapiens
  misc_RNA (1)...(19): siRNA sense strand
agaaacugcucaacaaaga

SEQ ID NO: 1223896 - RNA, 19 nt, Homo sapiens
  misc_RNA (1)...(19): siRNA sense strand
caccaaggcucucucauca

SEQ ID NO: 1223897 - RNA, 19 nt, Homo sapiens
  misc_RNA (1)...(19): siRNA sense strand
caucauccauccuaggaaa

SEQ ID NO: 1223898 - RNA, 19 nt, Homo sapiens
  misc_RNA (1)...(19): siRNA sense strand
gaacaagaacucccugaag

SEQ ID NO: 1223899 - RNA, 19 nt, Homo sapiens
  misc_RNA (1)...(19): siRNA sense strand
ccaaggcucucucaucauc

SEQ ID NO: 1223900 - RNA, 19 nt, Homo sapiens
  misc_RNA (1)...(19): siRNA sense strand
gcccggagguccacaguau

SEQ ID NO: 1223901 - RNA, 19 nt, Homo sapiens
  misc_RNA (1)...(19): siRNA sense strand
ccacccaccugcagaguga

SEQ ID NO: 1223902 - RNA, 19 nt, Homo sapiens
  misc_RNA (1)...(19): siRNA sense strand
gaugugguccugaaucgua

SEQ ID NO: 1223903 - RNA, 19 nt, Homo sapiens
  misc_RNA (1)...(19): siRNA sense strand
gagcccaccuggaucauca

SEQ ID NO: 1223904 - RNA, 19 nt, Homo sapiens
  misc_RNA (1)...(19): siRNA sense strand
gcagagcucaucaacaaga

SEQ ID NO: 1223905 - RNA, 19 nt, Homo sapiens
  misc_RNA (1)...(19): siRNA sense strand
gcagaugcaggagaacuua

SEQ ID NO: 1223906 - RNA, 19 nt, Homo sapiens
  misc_RNA (1)...(19): siRNA sense strand
ggacugaugaccuggugua

SEQ ID NO: 1223907 - RNA, 19 nt, Homo sapiens
  misc_RNA (1)...(19): siRNA sense strand
gugaagaugugguccugaa

SEQ ID NO: 1223908 - RNA, 19 nt, Homo sapiens
  misc_RNA (1)...(19): siRNA sense strand
caacuucgagcuccuagaa

SEQ ID NO: 1223909 - RNA, 19 nt, Homo sapiens
  misc_RNA (1)...(19): siRNA sense strand
gcccaagccugaucucugu

SEQ ID NO: 1223910 - RNA, 19 nt, Homo sapiens
  misc_RNA (1)...(19): siRNA sense strand
uaggaaagauggugagaag

SEQ ID NO: 1223911 - RNA, 19 nt, Homo sapiens
  misc_RNA (1)...(19): siRNA sense strand
gucaagaccugcaagaaag

SEQ ID NO: 1223912 - RNA, 19 nt, Homo sapiens
  misc_RNA (1)...(19): siRNA sense strand
aaacaguuccggaagauga

SEQ ID NO: 1223913 - RNA, 19 nt, Homo sapiens
  misc_RNA (1)...(19): siRNA sense strand
gcgaggcagugaucaugaa

SEQ ID NO: 1223914 - RNA, 19 nt, Homo sapiens
  misc_RNA (1)...(19): siRNA sense strand
cucaaggucugcuucuaua

SEQ ID NO: 1223915 - RNA, 19 nt, Homo sapiens
  misc_RNA (1)...(19): siRNA sense strand
cccagaaacugcucaacaa

SEQ ID NO: 1223916 - RNA, 19 nt, Homo sapiens
  misc_RNA (1)...(19): siRNA sense strand
gaggaggagugcgucauga

SEQ ID NO: 1223917 - RNA, 19 nt, Homo sapiens
  misc_RNA (1)...(19): siRNA sense strand
gaacuuaaagcccaaacag

SEQ ID NO: 1223918 - RNA, 19 nt, Homo sapiens
  misc_RNA (1)...(19): siRNA sense strand
ggcaaauccuggacaaaca

SEQ ID NO: 1223919 - RNA, 19 nt, Homo sapiens
  misc_RNA (1)...(19): siRNA sense strand
gcaccaaggcucucucauc

SEQ ID NO: 1223920 - RNA, 19 nt, Homo sapiens
  misc_RNA (1)...(19): siRNA sense strand
gcuaugggcugaggcugaa

SEQ ID NO: 1223921 - RNA, 19 nt, Homo sapiens
  misc_RNA (1)...(19): siRNA sense strand
gccgugaccucccuaagug

SEQ ID NO: 1223922 - RNA, 19 nt, Homo sapiens
  misc_RNA (1)...(19): siRNA sense strand
gaguaaaguugggcacguu

SEQ ID NO: 1223923 - RNA, 19 nt, Homo sapiens
  misc_RNA (1)...(19): siRNA sense strand
ugcuggagcucaagaauga

SEQ ID NO: 1223924 - RNA, 19 nt, Homo sapiens
  misc_RNA (1)...(19): siRNA sense strand
agaaggacauugccaugga

SEQ ID NO: 1223925 - RNA, 19 nt, Homo sapiens
  misc_RNA (1)...(19): siRNA sense strand
ucagugacguuuaucagau

SEQ ID NO: 1223926 - RNA, 19 nt, Homo sapiens
  misc_RNA (1)...(19): siRNA sense strand
gcaaagccauggccuaccu

SEQ ID NO: 1223927 - RNA, 19 nt, Homo sapiens
  misc_RNA (1)...(19): siRNA sense strand
cagcuucaauccugggaaa

SEQ ID NO: 1223928 - RNA, 19 nt, Homo sapiens
  misc_RNA (1)...(19): siRNA sense strand
ggaucaucauggaauugua

SEQ ID NO: 1223929 - RNA, 19 nt, Homo sapiens
  misc_RNA (1)...(19): siRNA sense strand
ccaaacaguuccggaagau

SEQ ID NO: 1223930 - RNA, 19 nt, Homo sapiens
  misc_RNA (1)...(19): siRNA sense strand
ccaagguucuggccaaucu

SEQ ID NO: 1223931 - RNA, 19 nt, Homo sapiens
  misc_RNA (1)...(19): siRNA sense strand
ggaacaagaacucccugaa

SEQ ID NO: 1223932 - RNA, 19 nt, Homo sapiens
  misc_RNA (1)...(19): siRNA sense strand
ccaccuggaucaucaugga

SEQ ID NO: 1223933 - RNA, 19 nt, Homo sapiens
  misc_RNA (1)...(19): siRNA sense strand
ggacgugcguauccucaag

SEQ ID NO: 1223934 - RNA, 19 nt, Homo sapiens
  misc_RNA (1)...(19): siRNA sense strand
gacgaggacuauuacaaag

SEQ ID NO: 1223935 - RNA, 19 nt, Homo sapiens
  misc_RNA (1)...(19): siRNA sense strand
gaucaucauggaauuguau

SEQ ID NO: 1223936 - RNA, 19 nt, Homo sapiens
  misc_RNA (1)...(19): siRNA sense strand
gaagaugugguccugaauc

SEQ ID NO: 1223937 - RNA, 19 nt, Homo sapiens
  misc_RNA (1)...(19): siRNA sense strand
ggaggaggacuucauccaa

SEQ ID NO: 1223938 - RNA, 19 nt, Homo sapiens
  misc_RNA (1)...(19): siRNA sense strand
gaucgagggcacccagaaa

SEQ ID NO: 1223939 - RNA, 19 nt, Homo sapiens
  misc_RNA (1)...(19): siRNA sense strand
cuaccgcugugaacucauu

SEQ ID NO: 1223940 - RNA, 19 nt, Homo sapiens
  misc_RNA (1)...(19): siRNA sense strand
uuacaaagccucugugacu

SEQ ID NO: 1223941 - RNA, 19 nt, Homo sapiens
  misc_RNA (1)...(19): siRNA sense strand
ugucaagaccugcaagaaa

SEQ ID NO: 1223942 - RNA, 19 nt, Homo sapiens
  misc_RNA (1)...(19): siRNA sense strand
aggcagugaucaugaagaa

SEQ ID NO: 1223943 - RNA, 19 nt, Homo sapiens
  misc_RNA (1)...(19): siRNA sense strand
ccagaaacugcucaacaaa

SEQ ID NO: 1223944 - RNA, 19 nt, Homo sapiens
  misc_RNA (1)...(19): siRNA sense strand
cagcauagagucagacauc

SEQ ID NO: 1223945 - RNA, 19 nt, Homo sapiens
  misc_RNA (1)...(19): siRNA sense strand
gaagccgaguggagguaug

SEQ ID NO: 1223946 - RNA, 19 nt, Homo sapiens
  misc_RNA (1)...(19): siRNA sense strand
gaccugguguaccucaaug

SEQ ID NO: 1223947 - RNA, 19 nt, Homo sapiens
  misc_RNA (1)...(19): siRNA sense strand
cagccucagugacguuuau

SEQ ID NO: 1223948 - RNA, 19 nt, Homo sapiens
  misc_RNA (1)...(19): siRNA sense strand
ggacaacaaggagaaguuc

SEQ ID NO: 1223949 - RNA, 19 nt, Homo sapiens
  misc_RNA (1)...(19): siRNA sense strand
gagcucaggcgguucuuca

SEQ ID NO: 1223950 - RNA, 19 nt, Homo sapiens
  misc_RNA (1)...(19): siRNA sense strand
ggucuuucccgguacauug

SEQ ID NO: 1223951 - RNA, 19 nt, Homo sapiens
  misc_RNA (1)...(19): siRNA sense strand
gcagagauucccgacgaaa

SEQ ID NO: 1223952 - RNA, 19 nt, Homo sapiens
  misc_RNA (1)...(19): siRNA sense strand
ucagacaucuacgcagaga

SEQ ID NO: 1223953 - RNA, 19 nt, Homo sapiens
  misc_RNA (1)...(19): siRNA sense strand
gugaggugcaggacaagua

SEQ ID NO: 1223954 - RNA, 19 nt, Homo sapiens
  misc_RNA (1)...(19): siRNA sense strand
acaaacagcagaagcagau

SEQ ID NO: 1223955 - RNA, 19 nt, Homo sapiens
  misc_RNA (1)...(19): siRNA sense strand
uuuaucagauggagaagga

SEQ ID NO: 1223956 - RNA, 19 nt, Homo sapiens
  misc_RNA (1)...(19): siRNA sense strand
uagcagaggcugagaacau

SEQ ID NO: 1223957 - RNA, 19 nt, Homo sapiens
  misc_RNA (1)...(19): siRNA sense strand
ggaggaggagugcgucaug

SEQ ID NO: 1223958 - RNA, 19 nt, Homo sapiens
  misc_RNA (1)...(19): siRNA sense strand
aggcgguucuucaaggaua

SEQ ID NO: 1223959 - RNA, 19 nt, Homo sapiens
  misc_RNA (1)...(19): siRNA sense strand
uugaggacgaggacuauua

SEQ ID NO: 1223960 - RNA, 19 nt, Homo sapiens
  misc_RNA (1)...(19): siRNA sense strand
cccaaacaguuccggaaga

SEQ ID NO: 1223961 - RNA, 19 nt, Homo sapiens
  misc_RNA (1)...(19): siRNA sense strand
uguacucacugcagauaug

SEQ ID NO: 1223962 - RNA, 19 nt, Homo sapiens
  misc_RNA (1)...(19): siRNA sense strand
gaggagcccaccuggauca

SEQ ID NO: 1223963 - RNA, 19 nt, Homo sapiens
  misc_RNA (1)...(19): siRNA sense strand
gcaggacaaguaugagugu

SEQ ID NO: 1223964 - RNA, 19 nt, Homo sapiens
  misc_RNA (1)...(19): siRNA sense strand
ucaagaaugagcucuguca

SEQ ID NO: 1223965 - RNA, 19 nt, Homo sapiens
  misc_RNA (1)...(19): siRNA sense strand
cacaugaaguccgaugaga

SEQ ID NO: 1223966 - RNA, 19 nt, Homo sapiens
  misc_RNA (1)...(19): siRNA sense strand
gagcgaggcagugaucaug

SEQ ID NO: 1223967 - RNA, 19 nt, Homo sapiens
  misc_RNA (1)...(19): siRNA sense strand
caacaaggagaaguucaug

SEQ ID NO: 1223968 - RNA, 19 nt, Homo sapiens
  misc_RNA (1)...(19): siRNA sense strand
aagcagaucagguccauca

SEQ ID NO: 1223969 - RNA, 19 nt, Homo sapiens
  misc_RNA (1)...(19): siRNA sense strand
acuuaaagcccaaacaguu

SEQ ID NO: 1223970 - RNA, 19 nt, Homo sapiens
  misc_RNA (1)...(19): siRNA sense strand
gcacaugaaguccgaugag

SEQ ID NO: 1223971 - RNA, 19 nt, Homo sapiens
  misc_RNA (1)...(19): siRNA sense strand
guccaccgguccuuuauac

SEQ ID NO: 1223972 - RNA, 19 nt, Homo sapiens
  misc_RNA (1)...(19): siRNA sense strand
ugugggagauccugagcuu

SEQ ID NO: 1223973 - RNA, 19 nt, Homo sapiens
  misc_RNA (1)...(19): siRNA sense strand
caugaaguccgaugagauc

SEQ ID NO: 1223974 - RNA, 19 nt, Homo sapiens
  misc_RNA (1)...(19): siRNA sense strand
ccauccagcccacagcuaa

SEQ ID NO: 1223975 - RNA, 19 nt, Homo sapiens
  misc_RNA (1)...(19): siRNA sense strand
cagugacguuuaucagaug

SEQ ID NO: 1223976 - RNA, 19 nt, Homo sapiens
  misc_RNA (1)...(19): siRNA sense strand
gcuguacucacugcagaua

SEQ ID NO: 1223977 - RNA, 19 nt, Homo sapiens
  misc_RNA (1)...(19): siRNA sense strand
gcauugcccgugaagaugu

SEQ ID NO: 1223978 - RNA, 19 nt, Homo sapiens
  misc_RNA (1)...(19): siRNA sense strand
guacuucagcugggcauug

SEQ ID NO: 1223979 - RNA, 19 nt, Homo sapiens
  misc_RNA (1)...(19): siRNA sense strand
aggagugcgucaugaaguu

SEQ ID NO: 1223980 - RNA, 19 nt, Homo sapiens
  misc_RNA (1)...(19): siRNA sense strand
ggagaccuaccgcugugaa

SEQ ID NO: 1223981 - RNA, 19 nt, Homo sapiens
  misc_RNA (1)...(19): siRNA sense strand
ccucaaggucugcuucuau

SEQ ID NO: 1223982 - RNA, 19 nt, Homo sapiens
  misc_RNA (1)...(19): siRNA sense strand
ugggugaggugcaggacaa

SEQ ID NO: 1223983 - RNA, 19 nt, Homo sapiens
  misc_RNA (1)...(19): siRNA sense strand
cuccaaagcugcaguucca

SEQ ID NO: 1223984 - RNA, 19 nt, Homo sapiens
  misc_RNA (1)...(19): siRNA sense strand
ccaaccuccuggcuccaaa

SEQ ID NO: 1223985 - RNA, 19 nt, Homo sapiens
  misc_RNA (1)...(19): siRNA sense strand
ugggagauccugagcuuug

SEQ ID NO: 1223986 - RNA, 19 nt, Homo sapiens
  misc_RNA (1)...(19): siRNA sense strand
acuucaaacuggucaaaug

SEQ ID NO: 1223987 - RNA, 19 nt, Homo sapiens
  misc_RNA (1)...(19): siRNA sense strand
gggauccgccagcugacua

SEQ ID NO: 1223988 - RNA, 19 nt, Homo sapiens
  misc_RNA (1)...(19): siRNA sense strand
gaacauggcugaccucaua

SEQ ID NO: 1223989 - RNA, 19 nt, Homo sapiens
  misc_RNA (1)...(19): siRNA sense strand
ggaccacgcugcucuauuu

SEQ ID NO: 1223990 - RNA, 19 nt, Homo sapiens
  misc_RNA (1)...(19): siRNA sense strand
caaagcagaugcaggagaa

SEQ ID NO: 1223991 - RNA, 19 nt, Homo sapiens
  misc_RNA (1)...(19): siRNA sense strand
ucagagagcugcagcauag

SEQ ID NO: 1223992 - RNA, 19 nt, Homo sapiens
  misc_RNA (1)...(19): siRNA sense strand
ggacgaggacuauuacaaa

SEQ ID NO: 1223993 - RNA, 19 nt, Homo sapiens
  misc_RNA (1)...(19): siRNA sense strand
uggcagagcucaucaacaa

SEQ ID NO: 1223994 - RNA, 19 nt, Homo sapiens
  misc_RNA (1)...(19): siRNA sense strand
auucaaggauggaacauua

SEQ ID NO: 1223995 - RNA, 19 nt, Homo sapiens
  misc_RNA (1)...(19): siRNA sense strand
agaaacugcucaacaaaga

SEQ ID NO: 1223996 - RNA, 19 nt, Homo sapiens
  misc_RNA (1)...(19): siRNA sense strand
caccaaggcucucucauca

SEQ ID NO: 1223997 - RNA, 19 nt, Homo sapiens
  misc_RNA (1)...(19): siRNA sense strand
caucauccauccuaggaaa

SEQ ID NO: 1223998 - RNA, 19 nt, Homo sapiens
  misc_RNA (1)...(19): siRNA sense strand
gaacaagaacucccugaag

SEQ ID NO: 1223999 - RNA, 19 nt, Homo sapiens
  misc_RNA (1)...(19): siRNA sense strand
ccaaggcucucucaucauc

SEQ ID NO: 1224000 - RNA, 19 nt, Homo sapiens
  misc_RNA (1)...(19): siRNA sense strand
gcccggagguccacaguau

SEQ ID NO: 1224001 - RNA, 19 nt, Homo sapiens
  misc_RNA (1)...(19): siRNA sense strand
ccacccaccugcagaguga

SEQ ID NO: 1224002 - RNA, 19 nt, Homo sapiens
  misc_RNA (1)...(19): siRNA sense strand
gaugugguccugaaucgua

SEQ ID NO: 1224003 - RNA, 19 nt, Homo sapiens
  misc_RNA (1)...(19): siRNA sense strand
gagcccaccuggaucauca

SEQ ID NO: 1224004 - RNA, 19 nt, Homo sapiens
  misc_RNA (1)...(19): siRNA sense strand
gcagagcucaucaacaaga

SEQ ID NO: 1224005 - RNA, 19 nt, Homo sapiens
  misc_RNA (1)...(19): siRNA sense strand
gcagaugcaggagaacuua

SEQ ID NO: 1224006 - RNA, 19 nt, Homo sapiens
  misc_RNA (1)...(19): siRNA sense strand
ggacugaugaccuggugua

SEQ ID NO: 1224007 - RNA, 19 nt, Homo sapiens
  misc_RNA (1)...(19): siRNA sense strand
gugaagaugugguccugaa

SEQ ID NO: 1224008 - RNA, 19 nt, Homo sapiens
  misc_RNA (1)...(19): siRNA sense strand
caacuucgagcuccuagaa

SEQ ID NO: 1224009 - RNA, 19 nt, Homo sapiens
  misc_RNA (1)...(19): siRNA sense strand
gcccaagccugaucucugu

SEQ ID NO: 1224010 - RNA, 19 nt, Homo sapiens
  misc_RNA (1)...(19): siRNA sense strand
uaggaaagauggugagaag

SEQ ID NO: 1224011 - RNA, 19 nt, Homo sapiens
  misc_RNA (1)...(19): siRNA sense strand
gucaagaccugcaagaaag

SEQ ID NO: 1224012 - RNA, 19 nt, Homo sapiens
  misc_RNA (1)...(19): siRNA sense strand
aaacaguuccggaagauga

SEQ ID NO: 1224013 - RNA, 19 nt, Homo sapiens
  misc_RNA (1)...(19): siRNA sense strand
gcgaggcagugaucaugaa

SEQ ID NO: 1224014 - RNA, 19 nt, Homo sapiens
  misc_RNA (1)...(19): siRNA sense strand
cucaaggucugcuucuaua

SEQ ID NO: 1224015 - RNA, 19 nt, Homo sapiens
  misc_RNA (1)...(19): siRNA sense strand
cccagaaacugcucaacaa

SEQ ID NO: 1224016 - RNA, 19 nt, Homo sapiens
  misc_RNA (1)...(19): siRNA sense strand
gaggaggagugcgucauga

SEQ ID NO: 1224017 - RNA, 19 nt, Homo sapiens
  misc_RNA (1)...(19): siRNA sense strand
gaacuuaaagcccaaacag

SEQ ID NO: 1224018 - RNA, 19 nt, Homo sapiens
  misc_RNA (1)...(19): siRNA sense strand
ggcaaauccuggacaaaca

SEQ ID NO: 1224019 - RNA, 19 nt, Homo sapiens
  misc_RNA (1)...(19): siRNA sense strand
gcaccaaggcucucucauc

SEQ ID NO: 1224020 - RNA, 19 nt, Homo sapiens
  misc_RNA (1)...(19): siRNA sense strand
gcuaugggcugaggcugaa

SEQ ID NO: 1224021 - RNA, 19 nt, Homo sapiens
  misc_RNA (1)...(19): siRNA sense strand
gccgugaccucccuaagug

SEQ ID NO: 1224022 - RNA, 19 nt, Homo sapiens
  misc_RNA (1)...(19): siRNA sense strand
gaguaaaguugggcacguu

SEQ ID NO: 1224023 - RNA, 19 nt, Homo sapiens
  misc_RNA (1)...(19): siRNA sense strand
ugcuggagcucaagaauga

SEQ ID NO: 1224024 - RNA, 19 nt, Homo sapiens
  misc_RNA (1)...(19): siRNA sense strand
agaaggacauugccaugga

SEQ ID NO: 1224025 - RNA, 19 nt, Homo sapiens
  misc_RNA (1)...(19): siRNA sense strand
ucagugacguuuaucagau

SEQ ID NO: 1224026 - RNA, 19 nt, Homo sapiens
  misc_RNA (1)...(19): siRNA sense strand
gcaaagccauggccuaccu

SEQ ID NO: 1224027 - RNA, 19 nt, Homo sapiens
  misc_RNA (1)...(19): siRNA sense strand
cagcuucaauccugggaaa

SEQ ID NO: 1224028 - RNA, 19 nt, Homo sapiens
  misc_RNA (1)...(19): siRNA sense strand
ggaucaucauggaauugua

SEQ ID NO: 1224029 - RNA, 19 nt, Homo sapiens
  misc_RNA (1)...(19): siRNA sense strand
ccaaacaguuccggaagau

SEQ ID NO: 1224030 - RNA, 19 nt, Homo sapiens
  misc_RNA (1)...(19): siRNA sense strand
ccaagguucuggccaaucu

SEQ ID NO: 1224031 - RNA, 19 nt, Homo sapiens
  misc_RNA (1)...(19): siRNA sense strand
ggaacaagaacucccugaa

SEQ ID NO: 1224032 - RNA, 19 nt, Homo sapiens
  misc_RNA (1)...(19): siRNA sense strand
ccaccuggaucaucaugga

SEQ ID NO: 1224033 - RNA, 19 nt, Homo sapiens
  misc_RNA (1)...(19): siRNA sense strand
ggacgugcguauccucaag

SEQ ID NO: 1224034 - RNA, 19 nt, Homo sapiens
  misc_RNA (1)...(19): siRNA sense strand
gacgaggacuauuacaaag

SEQ ID NO: 1224035 - RNA, 19 nt, Homo sapiens
  misc_RNA (1)...(19): siRNA sense strand
gaucaucauggaauuguau

SEQ ID NO: 1224036 - RNA, 19 nt, Homo sapiens
  misc_RNA (1)...(19): siRNA sense strand
gaagaugugguccugaauc

SEQ ID NO: 1224037 - RNA, 19 nt, Homo sapiens
  misc_RNA (1)...(19): siRNA sense strand
ggaggaggacuucauccaa

SEQ ID NO: 1224038 - RNA, 19 nt, Homo sapiens
  misc_RNA (1)...(19): siRNA sense strand
gaucgagggcacccagaaa

SEQ ID NO: 1224039 - RNA, 19 nt, Homo sapiens
  misc_RNA (1)...(19): siRNA sense strand
cuaccgcugugaacucauu

SEQ ID NO: 1224040 - RNA, 19 nt, Homo sapiens
  misc_RNA (1)...(19): siRNA sense strand
uuacaaagccucugugacu

SEQ ID NO: 1224041 - RNA, 19 nt, Homo sapiens
  misc_RNA (1)...(19): siRNA sense strand
ugucaagaccugcaagaaa

SEQ ID NO: 1224042 - RNA, 19 nt, Homo sapiens
  misc_RNA (1)...(19): siRNA sense strand
aggcagugaucaugaagaa

SEQ ID NO: 1224043 - RNA, 19 nt, Homo sapiens
  misc_RNA (1)...(19): siRNA sense strand
ccagaaacugcucaacaaa

SEQ ID NO: 1224044 - RNA, 19 nt, Homo sapiens
  misc_RNA (1)...(19): siRNA sense strand
cagcauagagucagacauc

SEQ ID NO: 1224045 - RNA, 19 nt, Homo sapiens
  misc_RNA (1)...(19): siRNA sense strand
gaagccgaguggagguaug

SEQ ID NO: 1224046 - RNA, 19 nt, Homo sapiens
  misc_RNA (1)...(19): siRNA sense strand
gaccugguguaccucaaug

SEQ ID NO: 1224047 - RNA, 19 nt, Homo sapiens
  misc_RNA (1)...(19): siRNA sense strand
cagccucagugacguuuau

SEQ ID NO: 1224048 - RNA, 19 nt, Homo sapiens
  misc_RNA (1)...(19): siRNA sense strand
ggacaacaaggagaaguuc

SEQ ID NO: 1224049 - RNA, 19 nt, Homo sapiens
  misc_RNA (1)...(19): siRNA sense strand
gagcucaggcgguucuuca

SEQ ID NO: 1224050 - RNA, 19 nt, Homo sapiens
  misc_RNA (1)...(19): siRNA sense strand
ggucuuucccgguacauug

SEQ ID NO: 1224051 - RNA, 19 nt, Homo sapiens
  misc_RNA (1)...(19): siRNA sense strand
gcagagauucccgacgaaa

SEQ ID NO: 1224052 - RNA, 19 nt, Homo sapiens
  misc_RNA (1)...(19): siRNA sense strand
ucagacaucuacgcagaga

SEQ ID NO: 1224053 - RNA, 19 nt, Homo sapiens
  misc_RNA (1)...(19): siRNA sense strand
gugaggugcaggacaagua

SEQ ID NO: 1224054 - RNA, 19 nt, Homo sapiens
  misc_RNA (1)...(19): siRNA sense strand
acaaacagcagaagcagau

SEQ ID NO: 1224055 - RNA, 19 nt, Homo sapiens
  misc_RNA (1)...(19): siRNA sense strand
uuuaucagauggagaagga

SEQ ID NO: 1224056 - RNA, 19 nt, Homo sapiens
  misc_RNA (1)...(19): siRNA sense strand
uagcagaggcugagaacau

SEQ ID NO: 1224057 - RNA, 19 nt, Homo sapiens
  misc_RNA (1)...(19): siRNA sense strand
ggaggaggagugcgucaug

SEQ ID NO: 1224058 - RNA, 19 nt, Homo sapiens
  misc_RNA (1)...(19): siRNA sense strand
aggcgguucuucaaggaua

SEQ ID NO: 1224059 - RNA, 19 nt, Homo sapiens
  misc_RNA (1)...(19): siRNA sense strand
uugaggacgaggacuauua

SEQ ID NO: 1224060 - RNA, 19 nt, Homo sapiens
  misc_RNA (1)...(19): siRNA sense strand
cccaaacaguuccggaaga

SEQ ID NO: 1224061 - RNA, 19 nt, Homo sapiens
  misc_RNA (1)...(19): siRNA sense strand
uguacucacugcagauaug

SEQ ID NO: 1224062 - RNA, 19 nt, Homo sapiens
  misc_RNA (1)...(19): siRNA sense strand
gaggagcccaccuggauca

SEQ ID NO: 1224063 - RNA, 19 nt, Homo sapiens
  misc_RNA (1)...(19): siRNA sense strand
gcaggacaaguaugagugu

SEQ ID NO: 1224064 - RNA, 19 nt, Homo sapiens
  misc_RNA (1)...(19): siRNA sense strand
ucaagaaugagcucuguca

SEQ ID NO: 1224065 - RNA, 19 nt, Homo sapiens
  misc_RNA (1)...(19): siRNA sense strand
cacaugaaguccgaugaga

SEQ ID NO: 1224066 - RNA, 19 nt, Homo sapiens
  misc_RNA (1)...(19): siRNA sense strand
gagcgaggcagugaucaug

SEQ ID NO: 1224067 - RNA, 19 nt, Homo sapiens
  misc_RNA (1)...(19): siRNA sense strand
caacaaggagaaguucaug

SEQ ID NO: 1224068 - RNA, 19 nt, Homo sapiens
  misc_RNA (1)...(19): siRNA sense strand
aagcagaucagguccauca

SEQ ID NO: 1224069 - RNA, 19 nt, Homo sapiens
  misc_RNA (1)...(19): siRNA sense strand
acuuaaagcccaaacaguu

SEQ ID NO: 1224070 - RNA, 19 nt, Homo sapiens
  misc_RNA (1)...(19): siRNA sense strand
gcacaugaaguccgaugag

SEQ ID NO: 1224071 - RNA, 19 nt, Homo sapiens
  misc_RNA (1)...(19): siRNA sense strand
guccaccgguccuuuauac

SEQ ID NO: 1224072 - RNA, 19 nt, Homo sapiens
  misc_RNA (1)...(19): siRNA sense strand
ugugggagauccugagcuu

SEQ ID NO: 1224073 - RNA, 19 nt, Homo sapiens
  misc_RNA (1)...(19): siRNA sense strand
caugaaguccgaugagauc

SEQ ID NO: 1224074 - RNA, 19 nt, Homo sapiens
  misc_RNA (1)...(19): siRNA sense strand
ccauccagcccacagcuaa

SEQ ID NO: 1224075 - RNA, 19 nt, Homo sapiens
  misc_RNA (1)...(19): siRNA sense strand
cagugacguuuaucagaug

SEQ ID NO: 1224076 - RNA, 19 nt, Homo sapiens
  misc_RNA (1)...(19): siRNA sense strand
gcuguacucacugcagaua

SEQ ID NO: 1224077 - RNA, 19 nt, Homo sapiens
  misc_RNA (1)...(19): siRNA sense strand
gcauugcccgugaagaugu

SEQ ID NO: 1224078 - RNA, 19 nt, Homo sapiens
  misc_RNA (1)...(19): siRNA sense strand
guacuucagcugggcauug

SEQ ID NO: 1224079 - RNA, 19 nt, Homo sapiens
  misc_RNA (1)...(19): siRNA sense strand
aggagugcgucaugaaguu

SEQ ID NO: 1224080 - RNA, 19 nt, Homo sapiens
  misc_RNA (1)...(19): siRNA sense strand
ggagaccuaccgcugugaa

SEQ ID NO: 1224081 - RNA, 19 nt, Homo sapiens
  misc_RNA (1)...(19): siRNA sense strand
ccucaaggucugcuucuau

SEQ ID NO: 1224082 - RNA, 19 nt, Homo sapiens
  misc_RNA (1)...(19): siRNA sense strand
ugggugaggugcaggacaa

SEQ ID NO: 1224083 - RNA, 19 nt, Homo sapiens
  misc_RNA (1)...(19): siRNA sense strand
cuccaaagcugcaguucca

SEQ ID NO: 1224084 - RNA, 19 nt, Homo sapiens
  misc_RNA (1)...(19): siRNA sense strand
ccaaccuccuggcuccaaa

SEQ ID NO: 1224085 - RNA, 19 nt, Homo sapiens
  misc_RNA (1)...(19): siRNA sense strand
ugggagauccugagcuuug

SEQ ID NO: 1224086 - RNA, 19 nt, Homo sapiens
  misc_RNA (1)...(19): siRNA sense strand
acuucaaacuggucaaaug

SEQ ID NO: 1224087 - RNA, 19 nt, Homo sapiens
  misc_RNA (1)...(19): siRNA sense strand
gggauccgccagcugacua

SEQ ID NO: 1224088 - RNA, 19 nt, Homo sapiens
  misc_RNA (1)...(19): siRNA sense strand
ggaagaagguagauaauga

SEQ ID NO: 1224089 - RNA, 19 nt, Homo sapiens
  misc_RNA (1)...(19): siRNA sense strand
gaagguagauaaugacuau

SEQ ID NO: 1224090 - RNA, 19 nt, Homo sapiens
  misc_RNA (1)...(19): siRNA sense strand
ggaaagaacauguaagaaa

SEQ ID NO: 1224091 - RNA, 19 nt, Homo sapiens
  misc_RNA (1)...(19): siRNA sense strand
gaaaggaaguucuguugga

SEQ ID NO: 1224092 - RNA, 19 nt, Homo sapiens
  misc_RNA (1)...(19): siRNA sense strand
caaaugaugugaaauccaa

SEQ ID NO: 1224093 - RNA, 19 nt, Homo sapiens
  misc_RNA (1)...(19): siRNA sense strand
ggagauaauucuauaccaa

SEQ ID NO: 1224094 - RNA, 19 nt, Homo sapiens
  misc_RNA (1)...(19): siRNA sense strand
aagcagauauugcaaauga

SEQ ID NO: 1224095 - RNA, 19 nt, Homo sapiens
  misc_RNA (1)...(19): siRNA sense strand
aaagcaggcuguagguuua

SEQ ID NO: 1224096 - RNA, 19 nt, Homo sapiens
  misc_RNA (1)...(19): siRNA sense strand
aaagaggguuucaaaguuu

SEQ ID NO: 1224097 - RNA, 19 nt, Homo sapiens
  misc_RNA (1)...(19): siRNA sense strand
ggaagcaucugaagaaacu

SEQ ID NO: 1224098 - RNA, 19 nt, Homo sapiens
  misc_RNA (1)...(19): siRNA sense strand
guuuaaagcugccagauug

SEQ ID NO: 1224099 - RNA, 19 nt, Homo sapiens
  misc_RNA (1)...(19): siRNA sense strand
gaagaggaaccacaagaaa

SEQ ID NO: 1224100 - RNA, 19 nt, Homo sapiens
  misc_RNA (1)...(19): siRNA sense strand
gcaccuugccugauaaauu

SEQ ID NO: 1224101 - RNA, 19 nt, Homo sapiens
  misc_RNA (1)...(19): siRNA sense strand
ugggugaacuugauaguaa

SEQ ID NO: 1224102 - RNA, 19 nt, Homo sapiens
  misc_RNA (1)...(19): siRNA sense strand
caccuugccugauaaauug

SEQ ID NO: 1224103 - RNA, 19 nt, Homo sapiens
  misc_RNA (1)...(19): siRNA sense strand
gguuggagauaauucuaua

SEQ ID NO: 1224104 - RNA, 19 nt, Homo sapiens
  misc_RNA (1)...(19): siRNA sense strand
uaacgaccaugaggcuuua

SEQ ID NO: 1224105 - RNA, 19 nt, Homo sapiens
  misc_RNA (1)...(19): siRNA sense strand
caaagcaggcuguagguuu

SEQ ID NO: 1224106 - RNA, 19 nt, Homo sapiens
  misc_RNA (1)...(19): siRNA sense strand
ugacauacgagaagaaauu

SEQ ID NO: 1224107 - RNA, 19 nt, Homo sapiens
  misc_RNA (1)...(19): siRNA sense strand
gaauaugucccucgcaaau

SEQ ID NO: 1224108 - RNA, 19 nt, Homo sapiens
  misc_RNA (1)...(19): siRNA sense strand
aaaggaagaucguaacaca

SEQ ID NO: 1224109 - RNA, 19 nt, Homo sapiens
  misc_RNA (1)...(19): siRNA sense strand
gagaaagacucagcaccuu

SEQ ID NO: 1224110 - RNA, 19 nt, Homo sapiens
  misc_RNA (1)...(19): siRNA sense strand
ggaagaggaaccacaagaa

SEQ ID NO: 1224111 - RNA, 19 nt, Homo sapiens
  misc_RNA (1)...(19): siRNA sense strand
gaaaacuuguccauacuaa

SEQ ID NO: 1224112 - RNA, 19 nt, Homo sapiens
  misc_RNA (1)...(19): siRNA sense strand
ccuaagaggguccgaauaa

SEQ ID NO: 1224113 - RNA, 19 nt, Homo sapiens
  misc_RNA (1)...(19): siRNA sense strand
gaaagaagaagccaaacgu

SEQ ID NO: 1224114 - RNA, 19 nt, Homo sapiens
  misc_RNA (1)...(19): siRNA sense strand
cacagaagauuugcagaaa

SEQ ID NO: 1224115 - RNA, 19 nt, Homo sapiens
  misc_RNA (1)...(19): siRNA sense strand
aagaggguccgaauaaaua

SEQ ID NO: 1224116 - RNA, 19 nt, Homo sapiens
  misc_RNA (1)...(19): siRNA sense strand
ugaagcagauauugcaaau

SEQ ID NO: 1224117 - RNA, 19 nt, Homo sapiens
  misc_RNA (1)...(19): siRNA sense strand
ccacagugaugaugaugau

SEQ ID NO: 1224118 - RNA, 19 nt, Homo sapiens
  misc_RNA (1)...(19): siRNA sense strand
gaagaucguaacacaaaug

SEQ ID NO: 1224119 - RNA, 19 nt, Homo sapiens
  misc_RNA (1)...(19): siRNA sense strand
caaguaacagacucucaua

SEQ ID NO: 1224120 - RNA, 19 nt, Homo sapiens
  misc_RNA (1)...(19): siRNA sense strand
uauaaugcccuucgagaaa

SEQ ID NO: 1224121 - RNA, 19 nt, Homo sapiens
  misc_RNA (1)...(19): siRNA sense strand
uuacagagccuuuguugau

SEQ ID NO: 1224122 - RNA, 19 nt, Homo sapiens
  misc_RNA (1)...(19): siRNA sense strand
ggacgccugcagacauuua

SEQ ID NO: 1224123 - RNA, 19 nt, Homo sapiens
  misc_RNA (1)...(19): siRNA sense strand
aaagaaagaagaagccaaa

SEQ ID NO: 1224124 - RNA, 19 nt, Homo sapiens
  misc_RNA (1)...(19): siRNA sense strand
ucaagugaauagucaguug

SEQ ID NO: 1224125 - RNA, 19 nt, Homo sapiens
  misc_RNA (1)...(19): siRNA sense strand
gaguugaauucacagaaga

SEQ ID NO: 1224126 - RNA, 19 nt, Homo sapiens
  misc_RNA (1)...(19): siRNA sense strand
ggaagaucguaacacaaau

SEQ ID NO: 1224127 - RNA, 19 nt, Homo sapiens
  misc_RNA (1)...(19): siRNA sense strand
gcagauauugcaaaugaug

SEQ ID NO: 1224128 - RNA, 19 nt, Homo sapiens
  misc_RNA (1)...(19): siRNA sense strand
gaacugugggcucgacuug

SEQ ID NO: 1224129 - RNA, 19 nt, Homo sapiens
  misc_RNA (1)...(19): siRNA sense strand
aagaggguuucaaaguuua

SEQ ID NO: 1224130 - RNA, 19 nt, Homo sapiens
  misc_RNA (1)...(19): siRNA sense strand
agaagaagccaaacguaaa

SEQ ID NO: 1224131 - RNA, 19 nt, Homo sapiens
  misc_RNA (1)...(19): siRNA sense strand
guaacagacucucauacuc

SEQ ID NO: 1224132 - RNA, 19 nt, Homo sapiens
  misc_RNA (1)...(19): siRNA sense strand
cgacgacgacgacaacauu

SEQ ID NO: 1224133 - RNA, 19 nt, Homo sapiens
  misc_RNA (1)...(19): siRNA sense strand
cuaagaggguccgaauaaa

SEQ ID NO: 1224134 - RNA, 19 nt, Homo sapiens
  misc_RNA (1)...(19): siRNA sense strand
aaacuuguccauacuaaug

SEQ ID NO: 1224135 - RNA, 19 nt, Homo sapiens
  misc_RNA (1)...(19): siRNA sense strand
auaaggauguugcaaguuc

SEQ ID NO: 1224136 - RNA, 19 nt, Homo sapiens
  misc_RNA (1)...(19): siRNA sense strand
uuugcuagcugauaaagaa

SEQ ID NO: 1224137 - RNA, 19 nt, Homo sapiens
  misc_RNA (1)...(19): siRNA sense strand
gacauacgagaagaaauua

SEQ ID NO: 1224138 - RNA, 19 nt, Homo sapiens
  misc_RNA (1)...(19): siRNA sense strand
ugaauucacagaagauuug

SEQ ID NO: 1224139 - RNA, 19 nt, Homo sapiens
  misc_RNA (1)...(19): siRNA sense strand
cacauacuguugagccuaa

SEQ ID NO: 1224140 - RNA, 19 nt, Homo sapiens
  misc_RNA (1)...(19): siRNA sense strand
ucacagaagauuugcagaa

SEQ ID NO: 1224141 - RNA, 19 nt, Homo sapiens
  misc_RNA (1)...(19): siRNA sense strand
guuggaagcaucugaagaa

SEQ ID NO: 1224142 - RNA, 19 nt, Homo sapiens
  misc_RNA (1)...(19): siRNA sense strand
aaaggaaguucuguuggaa

SEQ ID NO: 1224143 - RNA, 19 nt, Homo sapiens
  misc_RNA (1)...(19): siRNA sense strand
uguaucaccuuccuuaaca

SEQ ID NO: 1224144 - RNA, 19 nt, Homo sapiens
  misc_RNA (1)...(19): siRNA sense strand
gaaguagagagaauagugu

SEQ ID NO: 1224145 - RNA, 19 nt, Homo sapiens
  misc_RNA (1)...(19): siRNA sense strand
gaagccaaacguaaacgaa

SEQ ID NO: 1224146 - RNA, 19 nt, Homo sapiens
  misc_RNA (1)...(19): siRNA sense strand
aagaagaagccaaacguaa

SEQ ID NO: 1224147 - RNA, 19 nt, Homo sapiens
  misc_RNA (1)...(19): siRNA sense strand
uaagaggguccgaauaaau

SEQ ID NO: 1224148 - RNA, 19 nt, Homo sapiens
  misc_RNA (1)...(19): siRNA sense strand
acaccgaauugcucauaaa

SEQ ID NO: 1224149 - RNA, 19 nt, Homo sapiens
  misc_RNA (1)...(19): siRNA sense strand
gagcgaugcugcaggugau

SEQ ID NO: 1224150 - RNA, 19 nt, Homo sapiens
  misc_RNA (1)...(19): siRNA sense strand
gauugcaaauggagaagau

SEQ ID NO: 1224151 - RNA, 19 nt, Homo sapiens
  misc_RNA (1)...(19): siRNA sense strand
cgacaacauugacgacgau

SEQ ID NO: 1224152 - RNA, 19 nt, Homo sapiens
  misc_RNA (1)...(19): siRNA sense strand
gugaaugguuccaguucuu

SEQ ID NO: 1224153 - RNA, 19 nt, Homo sapiens
  misc_RNA (1)...(19): siRNA sense strand
ucucauacuccuugucaua

SEQ ID NO: 1224154 - RNA, 19 nt, Homo sapiens
  misc_RNA (1)...(19): siRNA sense strand
gagagaauaguguguguag

SEQ ID NO: 1224155 - RNA, 19 nt, Homo sapiens
  misc_RNA (1)...(19): siRNA sense strand
gaagaagccaaacguaaac

SEQ ID NO: 1224156 - RNA, 19 nt, Homo sapiens
  misc_RNA (1)...(19): siRNA sense strand
ucauaaggauguugcaagu

SEQ ID NO: 1224157 - RNA, 19 nt, Homo sapiens
  misc_RNA (1)...(19): siRNA sense strand
gcaccggaaagaacaugua

SEQ ID NO: 1224158 - RNA, 19 nt, Homo sapiens
  misc_RNA (1)...(19): siRNA sense strand
gaaguucuguuggaagcau

SEQ ID NO: 1224159 - RNA, 19 nt, Homo sapiens
  misc_RNA (1)...(19): siRNA sense strand
aaacguaaacgaaagaaca

SEQ ID NO: 1224160 - RNA, 19 nt, Homo sapiens
  misc_RNA (1)...(19): siRNA sense strand
aggauuugcuagcugauaa

SEQ ID NO: 1224161 - RNA, 19 nt, Homo sapiens
  misc_RNA (1)...(19): siRNA sense strand
agagagacaggaagaauug

SEQ ID NO: 1224162 - RNA, 19 nt, Homo sapiens
  misc_RNA (1)...(19): siRNA sense strand
gcugccagauugcaacaga

SEQ ID NO: 1224163 - RNA, 19 nt, Homo sapiens
  misc_RNA (1)...(19): siRNA sense strand
ggacaacugguuugcaaag

SEQ ID NO: 1224164 - RNA, 19 nt, Homo sapiens
  misc_RNA (1)...(19): siRNA sense strand
ccgaauaaauacuggaaag

SEQ ID NO: 1224165 - RNA, 19 nt, Homo sapiens
  misc_RNA (1)...(19): siRNA sense strand
caacauugacgacgaugau

SEQ ID NO: 1224166 - RNA, 19 nt, Homo sapiens
  misc_RNA (1)...(19): siRNA sense strand
ugacgacgaugauggugau

SEQ ID NO: 1224167 - RNA, 19 nt, Homo sapiens
  misc_RNA (1)...(19): siRNA sense strand
cgaaguagagagaauagug

SEQ ID NO: 1224168 - RNA, 19 nt, Homo sapiens
  misc_RNA (1)...(19): siRNA sense strand
aaagaagaagccaaacgua

SEQ ID NO: 1224169 - RNA, 19 nt, Homo sapiens
  misc_RNA (1)...(19): siRNA sense strand
cuaaugaagucacuguuuu

SEQ ID NO: 1224170 - RNA, 19 nt, Homo sapiens
  misc_RNA (1)...(19): siRNA sense strand
aggaagaucguaacacaaa

SEQ ID NO: 1224171 - RNA, 19 nt, Homo sapiens
  misc_RNA (1)...(19): siRNA sense strand
ucauaaaccgcauuccaaa

SEQ ID NO: 1224172 - RNA, 19 nt, Homo sapiens
  misc_RNA (1)...(19): siRNA sense strand
ccggaaagaacauguaaga

SEQ ID NO: 1224173 - RNA, 19 nt, Homo sapiens
  misc_RNA (1)...(19): siRNA sense strand
gaguaucagcugcgaagaa

SEQ ID NO: 1224174 - RNA, 19 nt, Homo sapiens
  misc_RNA (1)...(19): siRNA sense strand
aaacaccgaauugcucaua

SEQ ID NO: 1224175 - RNA, 19 nt, Homo sapiens
  misc_RNA (1)...(19): siRNA sense strand
gugaugaugaugaugauga

SEQ ID NO: 1224176 - RNA, 19 nt, Homo sapiens
  misc_RNA (1)...(19): siRNA sense strand
caggugauauuguugacau

SEQ ID NO: 1224177 - RNA, 19 nt, Homo sapiens
  misc_RNA (1)...(19): siRNA sense strand
ugaaugguuccaguucuua

SEQ ID NO: 1224178 - RNA, 19 nt, Homo sapiens
  misc_RNA (1)...(19): siRNA sense strand
uugaagaacuagagagaca

SEQ ID NO: 1224179 - RNA, 19 nt, Homo sapiens
  misc_RNA (1)...(19): siRNA sense strand
acaacugguuugcaaagug

SEQ ID NO: 1224180 - RNA, 19 nt, Homo sapiens
  misc_RNA (1)...(19): siRNA sense strand
gauugcaacagaaagacua

SEQ ID NO: 1224181 - RNA, 19 nt, Homo sapiens
  misc_RNA (1)...(19): siRNA sense strand
ccagauugcaacagaaaga

SEQ ID NO: 1224182 - RNA, 19 nt, Homo sapiens
  misc_RNA (1)...(19): siRNA sense strand
caagugaauagucaguuga

SEQ ID NO: 1224183 - RNA, 19 nt, Homo sapiens
  misc_RNA (1)...(19): siRNA sense strand
guggucaagugaauaguca

SEQ ID NO: 1224184 - RNA, 19 nt, Homo sapiens
  misc_RNA (1)...(19): siRNA sense strand
uaaggauguugcaaguuca

SEQ ID NO: 1224185 - RNA, 19 nt, Homo sapiens
  misc_RNA (1)...(19): siRNA sense strand
gcaaagcaggcuguagguu

SEQ ID NO: 1224186 - RNA, 19 nt, Homo sapiens
  misc_RNA (1)...(19): siRNA sense strand
cgacgaugauggugauaac

SEQ ID NO: 1224187 - RNA, 19 nt, Homo sapiens
  misc_RNA (1)...(19): siRNA sense strand
gaauuuguaucaccuuccu

SEQ ID NO: 1224188 - RNA, 19 nt, Homo sapiens
  misc_RNA (1)...(19): siRNA sense strand
ggaagaagguagauaauga

SEQ ID NO: 1224189 - RNA, 19 nt, Homo sapiens
  misc_RNA (1)...(19): siRNA sense strand
gaagguagauaaugacuau

SEQ ID NO: 1224190 - RNA, 19 nt, Homo sapiens
  misc_RNA (1)...(19): siRNA sense strand
ggaaagaacauguaagaaa

SEQ ID NO: 1224191 - RNA, 19 nt, Homo sapiens
  misc_RNA (1)...(19): siRNA sense strand
gaaaggaaguucuguugga

SEQ ID NO: 1224192 - RNA, 19 nt, Homo sapiens
  misc_RNA (1)...(19): siRNA sense strand
caaaugaugugaaauccaa

SEQ ID NO: 1224193 - RNA, 19 nt, Homo sapiens
  misc_RNA (1)...(19): siRNA sense strand
ggagauaauucuauaccaa

SEQ ID NO: 1224194 - RNA, 19 nt, Homo sapiens
  misc_RNA (1)...(19): siRNA sense strand
aagcagauauugcaaauga

SEQ ID NO: 1224195 - RNA, 19 nt, Homo sapiens
  misc_RNA (1)...(19): siRNA sense strand
aaagcaggcuguagguuua

SEQ ID NO: 1224196 - RNA, 19 nt, Homo sapiens
  misc_RNA (1)...(19): siRNA sense strand
aaagaggguuucaaaguuu

SEQ ID NO: 1224197 - RNA, 19 nt, Homo sapiens
  misc_RNA (1)...(19): siRNA sense strand
ggaagcaucugaagaaacu

SEQ ID NO: 1224198 - RNA, 19 nt, Homo sapiens
  misc_RNA (1)...(19): siRNA sense strand
guuuaaagcugccagauug

SEQ ID NO: 1224199 - RNA, 19 nt, Homo sapiens
  misc_RNA (1)...(19): siRNA sense strand
gaagaggaaccacaagaaa

SEQ ID NO: 1224200 - RNA, 19 nt, Homo sapiens
  misc_RNA (1)...(19): siRNA sense strand
gcaccuugccugauaaauu

SEQ ID NO: 1224201 - RNA, 19 nt, Homo sapiens
  misc_RNA (1)...(19): siRNA sense strand
ugggugaacuugauaguaa

SEQ ID NO: 1224202 - RNA, 19 nt, Homo sapiens
  misc_RNA (1)...(19): siRNA sense strand
caccuugccugauaaauug

SEQ ID NO: 1224203 - RNA, 19 nt, Homo sapiens
  misc_RNA (1)...(19): siRNA sense strand
gguuggagauaauucuaua

SEQ ID NO: 1224204 - RNA, 19 nt, Homo sapiens
  misc_RNA (1)...(19): siRNA sense strand
uaacgaccaugaggcuuua

SEQ ID NO: 1224205 - RNA, 19 nt, Homo sapiens
  misc_RNA (1)...(19): siRNA sense strand
caaagcaggcuguagguuu

SEQ ID NO: 1224206 - RNA, 19 nt, Homo sapiens
  misc_RNA (1)...(19): siRNA sense strand
ugacauacgagaagaaauu

SEQ ID NO: 1224207 - RNA, 19 nt, Homo sapiens
  misc_RNA (1)...(19): siRNA sense strand
gaauaugucccucgcaaau

SEQ ID NO: 1224208 - RNA, 19 nt, Homo sapiens
  misc_RNA (1)...(19): siRNA sense strand
aaaggaagaucguaacaca

SEQ ID NO: 1224209 - RNA, 19 nt, Homo sapiens
  misc_RNA (1)...(19): siRNA sense strand
gagaaagacucagcaccuu

SEQ ID NO: 1224210 - RNA, 19 nt, Homo sapiens
  misc_RNA (1)...(19): siRNA sense strand
ggaagaggaaccacaagaa

SEQ ID NO: 1224211 - RNA, 19 nt, Homo sapiens
  misc_RNA (1)...(19): siRNA sense strand
gaaaacuuguccauacuaa

SEQ ID NO: 1224212 - RNA, 19 nt, Homo sapiens
  misc_RNA (1)...(19): siRNA sense strand
ccuaagaggguccgaauaa

SEQ ID NO: 1224213 - RNA, 19 nt, Homo sapiens
  misc_RNA (1)...(19): siRNA sense strand
gaaagaagaagccaaacgu

SEQ ID NO: 1224214 - RNA, 19 nt, Homo sapiens
  misc_RNA (1)...(19): siRNA sense strand
cacagaagauuugcagaaa

SEQ ID NO: 1224215 - RNA, 19 nt, Homo sapiens
  misc_RNA (1)...(19): siRNA sense strand
aagaggguccgaauaaaua

SEQ ID NO: 1224216 - RNA, 19 nt, Homo sapiens
  misc_RNA (1)...(19): siRNA sense strand
ugaagcagauauugcaaau

SEQ ID NO: 1224217 - RNA, 19 nt, Homo sapiens
  misc_RNA (1)...(19): siRNA sense strand
ccacagugaugaugaugau

SEQ ID NO: 1224218 - RNA, 19 nt, Homo sapiens
  misc_RNA (1)...(19): siRNA sense strand
gaagaucguaacacaaaug

SEQ ID NO: 1224219 - RNA, 19 nt, Homo sapiens
  misc_RNA (1)...(19): siRNA sense strand
caaguaacagacucucaua

SEQ ID NO: 1224220 - RNA, 19 nt, Homo sapiens
  misc_RNA (1)...(19): siRNA sense strand
uauaaugcccuucgagaaa

SEQ ID NO: 1224221 - RNA, 19 nt, Homo sapiens
  misc_RNA (1)...(19): siRNA sense strand
uuacagagccuuuguugau

SEQ ID NO: 1224222 - RNA, 19 nt, Homo sapiens
  misc_RNA (1)...(19): siRNA sense strand
ggacgccugcagacauuua

SEQ ID NO: 1224223 - RNA, 19 nt, Homo sapiens
  misc_RNA (1)...(19): siRNA sense strand
aaagaaagaagaagccaaa

SEQ ID NO: 1224224 - RNA, 19 nt, Homo sapiens
  misc_RNA (1)...(19): siRNA sense strand
ucaagugaauagucaguug

SEQ ID NO: 1224225 - RNA, 19 nt, Homo sapiens
  misc_RNA (1)...(19): siRNA sense strand
gaguugaauucacagaaga

SEQ ID NO: 1224226 - RNA, 19 nt, Homo sapiens
  misc_RNA (1)...(19): siRNA sense strand
ggaagaucguaacacaaau

SEQ ID NO: 1224227 - RNA, 19 nt, Homo sapiens
  misc_RNA (1)...(19): siRNA sense strand
gcagauauugcaaaugaug

SEQ ID NO: 1224228 - RNA, 19 nt, Homo sapiens
  misc_RNA (1)...(19): siRNA sense strand
gaacugugggcucgacuug

SEQ ID NO: 1224229 - RNA, 19 nt, Homo sapiens
  misc_RNA (1)...(19): siRNA sense strand
aagaggguuucaaaguuua

SEQ ID NO: 1224230 - RNA, 19 nt, Homo sapiens
  misc_RNA (1)...(19): siRNA sense strand
agaagaagccaaacguaaa

SEQ ID NO: 1224231 - RNA, 19 nt, Homo sapiens
  misc_RNA (1)...(19): siRNA sense strand
guaacagacucucauacuc

SEQ ID NO: 1224232 - RNA, 19 nt, Homo sapiens
  misc_RNA (1)...(19): siRNA sense strand
cgacgacgacgacaacauu

SEQ ID NO: 1224233 - RNA, 19 nt, Homo sapiens
  misc_RNA (1)...(19): siRNA sense strand
cuaagaggguccgaauaaa

SEQ ID NO: 1224234 - RNA, 19 nt, Homo sapiens
  misc_RNA (1)...(19): siRNA sense strand
aaacuuguccauacuaaug

SEQ ID NO: 1224235 - RNA, 19 nt, Homo sapiens
  misc_RNA (1)...(19): siRNA sense strand
auaaggauguugcaaguuc

SEQ ID NO: 1224236 - RNA, 19 nt, Homo sapiens
  misc_RNA (1)...(19): siRNA sense strand
uuugcuagcugauaaagaa

SEQ ID NO: 1224237 - RNA, 19 nt, Homo sapiens
  misc_RNA (1)...(19): siRNA sense strand
gacauacgagaagaaauua

SEQ ID NO: 1224238 - RNA, 19 nt, Homo sapiens
  misc_RNA (1)...(19): siRNA sense strand
ugaauucacagaagauuug

SEQ ID NO: 1224239 - RNA, 19 nt, Homo sapiens
  misc_RNA (1)...(19): siRNA sense strand
cacauacuguugagccuaa

SEQ ID NO: 1224240 - RNA, 19 nt, Homo sapiens
  misc_RNA (1)...(19): siRNA sense strand
ucacagaagauuugcagaa

SEQ ID NO: 1224241 - RNA, 19 nt, Homo sapiens
  misc_RNA (1)...(19): siRNA sense strand
guuggaagcaucugaagaa

SEQ ID NO: 1224242 - RNA, 19 nt, Homo sapiens
  misc_RNA (1)...(19): siRNA sense strand
aaaggaaguucuguuggaa

SEQ ID NO: 1224243 - RNA, 19 nt, Homo sapiens
  misc_RNA (1)...(19): siRNA sense strand
uguaucaccuuccuuaaca

SEQ ID NO: 1224244 - RNA, 19 nt, Homo sapiens
  misc_RNA (1)...(19): siRNA sense strand
gaaguagagagaauagugu

SEQ ID NO: 1224245 - RNA, 19 nt, Homo sapiens
  misc_RNA (1)...(19): siRNA sense strand
gaagccaaacguaaacgaa

SEQ ID NO: 1224246 - RNA, 19 nt, Homo sapiens
  misc_RNA (1)...(19): siRNA sense strand
aagaagaagccaaacguaa

SEQ ID NO: 1224247 - RNA, 19 nt, Homo sapiens
  misc_RNA (1)...(19): siRNA sense strand
uaagaggguccgaauaaau

SEQ ID NO: 1224248 - RNA, 19 nt, Homo sapiens
  misc_RNA (1)...(19): siRNA sense strand
acaccgaauugcucauaaa

SEQ ID NO: 1224249 - RNA, 19 nt, Homo sapiens
  misc_RNA (1)...(19): siRNA sense strand
gagcgaugcugcaggugau

SEQ ID NO: 1224250 - RNA, 19 nt, Homo sapiens
  misc_RNA (1)...(19): siRNA sense strand
gauugcaaauggagaagau

SEQ ID NO: 1224251 - RNA, 19 nt, Homo sapiens
  misc_RNA (1)...(19): siRNA sense strand
cgacaacauugacgacgau

SEQ ID NO: 1224252 - RNA, 19 nt, Homo sapiens
  misc_RNA (1)...(19): siRNA sense strand
gugaaugguuccaguucuu

SEQ ID NO: 1224253 - RNA, 19 nt, Homo sapiens
  misc_RNA (1)...(19): siRNA sense strand
ucucauacuccuugucaua

SEQ ID NO: 1224254 - RNA, 19 nt, Homo sapiens
  misc_RNA (1)...(19): siRNA sense strand
gagagaauaguguguguag

SEQ ID NO: 1224255 - RNA, 19 nt, Homo sapiens
  misc_RNA (1)...(19): siRNA sense strand
gaagaagccaaacguaaac

SEQ ID NO: 1224256 - RNA, 19 nt, Homo sapiens
  misc_RNA (1)...(19): siRNA sense strand
ucauaaggauguugcaagu

SEQ ID NO: 1224257 - RNA, 19 nt, Homo sapiens
  misc_RNA (1)...(19): siRNA sense strand
gcaccggaaagaacaugua

SEQ ID NO: 1224258 - RNA, 19 nt, Homo sapiens
  misc_RNA (1)...(19): siRNA sense strand
gaaguucuguuggaagcau

SEQ ID NO: 1224259 - RNA, 19 nt, Homo sapiens
  misc_RNA (1)...(19): siRNA sense strand
aaacguaaacgaaagaaca

SEQ ID NO: 1224260 - RNA, 19 nt, Homo sapiens
  misc_RNA (1)...(19): siRNA sense strand
aggauuugcuagcugauaa

SEQ ID NO: 1224261 - RNA, 19 nt, Homo sapiens
  misc_RNA (1)...(19): siRNA sense strand
agagagacaggaagaauug

SEQ ID NO: 1224262 - RNA, 19 nt, Homo sapiens
  misc_RNA (1)...(19): siRNA sense strand
gcugccagauugcaacaga

SEQ ID NO: 1224263 - RNA, 19 nt, Homo sapiens
  misc_RNA (1)...(19): siRNA sense strand
ggacaacugguuugcaaag

SEQ ID NO: 1224264 - RNA, 19 nt, Homo sapiens
  misc_RNA (1)...(19): siRNA sense strand
ccgaauaaauacuggaaag

SEQ ID NO: 1224265 - RNA, 19 nt, Homo sapiens
  misc_RNA (1)...(19): siRNA sense strand
caacauugacgacgaugau

SEQ ID NO: 1224266 - RNA, 19 nt, Homo sapiens
  misc_RNA (1)...(19): siRNA sense strand
ugacgacgaugauggugau

SEQ ID NO: 1224267 - RNA, 19 nt, Homo sapiens
  misc_RNA (1)...(19): siRNA sense strand
cgaaguagagagaauagug

SEQ ID NO: 1224268 - RNA, 19 nt, Homo sapiens
  misc_RNA (1)...(19): siRNA sense strand
aaagaagaagccaaacgua

SEQ ID NO: 1224269 - RNA, 19 nt, Homo sapiens
  misc_RNA (1)...(19): siRNA sense strand
cuaaugaagucacuguuuu

SEQ ID NO: 1224270 - RNA, 19 nt, Homo sapiens
  misc_RNA (1)...(19): siRNA sense strand
aggaagaucguaacacaaa

SEQ ID NO: 1224271 - RNA, 19 nt, Homo sapiens
  misc_RNA (1)...(19): siRNA sense strand
ucauaaaccgcauuccaaa

SEQ ID NO: 1224272 - RNA, 19 nt, Homo sapiens
  misc_RNA (1)...(19): siRNA sense strand
ccggaaagaacauguaaga

SEQ ID NO: 1224273 - RNA, 19 nt, Homo sapiens
  misc_RNA (1)...(19): siRNA sense strand
gaguaucagcugcgaagaa

SEQ ID NO: 1224274 - RNA, 19 nt, Homo sapiens
  misc_RNA (1)...(19): siRNA sense strand
aaacaccgaauugcucaua

SEQ ID NO: 1224275 - RNA, 19 nt, Homo sapiens
  misc_RNA (1)...(19): siRNA sense strand
gugaugaugaugaugauga

SEQ ID NO: 1224276 - RNA, 19 nt, Homo sapiens
  misc_RNA (1)...(19): siRNA sense strand
caggugauauuguugacau

SEQ ID NO: 1224277 - RNA, 19 nt, Homo sapiens
  misc_RNA (1)...(19): siRNA sense strand
ugaaugguuccaguucuua

SEQ ID NO: 1224278 - RNA, 19 nt, Homo sapiens
  misc_RNA (1)...(19): siRNA sense strand
uugaagaacuagagagaca

SEQ ID NO: 1224279 - RNA, 19 nt, Homo sapiens
  misc_RNA (1)...(19): siRNA sense strand
acaacugguuugcaaagug

SEQ ID NO: 1224280 - RNA, 19 nt, Homo sapiens
  misc_RNA (1)...(19): siRNA sense strand
gauugcaacagaaagacua

SEQ ID NO: 1224281 - RNA, 19 nt, Homo sapiens
  misc_RNA (1)...(19): siRNA sense strand
ccagauugcaacagaaaga

SEQ ID NO: 1224282 - RNA, 19 nt, Homo sapiens
  misc_RNA (1)...(19): siRNA sense strand
caagugaauagucaguuga

SEQ ID NO: 1224283 - RNA, 19 nt, Homo sapiens
  misc_RNA (1)...(19): siRNA sense strand
guggucaagugaauaguca

SEQ ID NO: 1224284 - RNA, 19 nt, Homo sapiens
  misc_RNA (1)...(19): siRNA sense strand
uaaggauguugcaaguuca

SEQ ID NO: 1224285 - RNA, 19 nt, Homo sapiens
  misc_RNA (1)...(19): siRNA sense strand
gcaaagcaggcuguagguu

SEQ ID NO: 1224286 - RNA, 19 nt, Homo sapiens
  misc_RNA (1)...(19): siRNA sense strand
cgacgaugauggugauaac

SEQ ID NO: 1224287 - RNA, 19 nt, Homo sapiens
  misc_RNA (1)...(19): siRNA sense strand
gaauuuguaucaccuuccu

SEQ ID NO: 1224288 - RNA, 19 nt, Homo sapiens
  misc_RNA (1)...(19): siRNA sense strand
ggaagaagguagauaauga

SEQ ID NO: 1224289 - RNA, 19 nt, Homo sapiens
  misc_RNA (1)...(19): siRNA sense strand
gaagguagauaaugacuau

SEQ ID NO: 1224290 - RNA, 19 nt, Homo sapiens
  misc_RNA (1)...(19): siRNA sense strand
ggaaagaacauguaagaaa

SEQ ID NO: 1224291 - RNA, 19 nt, Homo sapiens
  misc_RNA (1)...(19): siRNA sense strand
gaaaggaaguucuguugga

SEQ ID NO: 1224292 - RNA, 19 nt, Homo sapiens
  misc_RNA (1)...(19): siRNA sense strand
caaaugaugugaaauccaa

SEQ ID NO: 1224293 - RNA, 19 nt, Homo sapiens
  misc_RNA (1)...(19): siRNA sense strand
ggagauaauucuauaccaa

SEQ ID NO: 1224294 - RNA, 19 nt, Homo sapiens
  misc_RNA (1)...(19): siRNA sense strand
aagcagauauugcaaauga

SEQ ID NO: 1224295 - RNA, 19 nt, Homo sapiens
  misc_RNA (1)...(19): siRNA sense strand
aaagcaggcuguagguuua

SEQ ID NO: 1224296 - RNA, 19 nt, Homo sapiens
  misc_RNA (1)...(19): siRNA sense strand
aaagaggguuucaaaguuu

SEQ ID NO: 1224297 - RNA, 19 nt, Homo sapiens
  misc_RNA (1)...(19): siRNA sense strand
ggaagcaucugaagaaacu

SEQ ID NO: 1224298 - RNA, 19 nt, Homo sapiens
  misc_RNA (1)...(19): siRNA sense strand
guuuaaagcugccagauug

SEQ ID NO: 1224299 - RNA, 19 nt, Homo sapiens
  misc_RNA (1)...(19): siRNA sense strand
gaagaggaaccacaagaaa

SEQ ID NO: 1224300 - RNA, 19 nt, Homo sapiens
  misc_RNA (1)...(19): siRNA sense strand
gcaccuugccugauaaauu

SEQ ID NO: 1224301 - RNA, 19 nt, Homo sapiens
  misc_RNA (1)...(19): siRNA sense strand
ugggugaacuugauaguaa

SEQ ID NO: 1224302 - RNA, 19 nt, Homo sapiens
  misc_RNA (1)...(19): siRNA sense strand
caccuugccugauaaauug

SEQ ID NO: 1224303 - RNA, 19 nt, Homo sapiens
  misc_RNA (1)...(19): siRNA sense strand
gguuggagauaauucuaua

SEQ ID NO: 1224304 - RNA, 19 nt, Homo sapiens
  misc_RNA (1)...(19): siRNA sense strand
uaacgaccaugaggcuuua

SEQ ID NO: 1224305 - RNA, 19 nt, Homo sapiens
  misc_RNA (1)...(19): siRNA sense strand
caaagcaggcuguagguuu

SEQ ID NO: 1224306 - RNA, 19 nt, Homo sapiens
  misc_RNA (1)...(19): siRNA sense strand
ugacauacgagaagaaauu

SEQ ID NO: 1224307 - RNA, 19 nt, Homo sapiens
  misc_RNA (1)...(19): siRNA sense strand
gaauaugucccucgcaaau

SEQ ID NO: 1224308 - RNA, 19 nt, Homo sapiens
  misc_RNA (1)...(19): siRNA sense strand
aaaggaagaucguaacaca

SEQ ID NO: 1224309 - RNA, 19 nt, Homo sapiens
  misc_RNA (1)...(19): siRNA sense strand
gagaaagacucagcaccuu

SEQ ID NO: 1224310 - RNA, 19 nt, Homo sapiens
  misc_RNA (1)...(19): siRNA sense strand
ggaagaggaaccacaagaa

SEQ ID NO: 1224311 - RNA, 19 nt, Homo sapiens
  misc_RNA (1)...(19): siRNA sense strand
gaaaacuuguccauacuaa

SEQ ID NO: 1224312 - RNA, 19 nt, Homo sapiens
  misc_RNA (1)...(19): siRNA sense strand
ccuaagaggguccgaauaa

SEQ ID NO: 1224313 - RNA, 19 nt, Homo sapiens
  misc_RNA (1)...(19): siRNA sense strand
gaaagaagaagccaaacgu

SEQ ID NO: 1224314 - RNA, 19 nt, Homo sapiens
  misc_RNA (1)...(19): siRNA sense strand
cacagaagauuugcagaaa

SEQ ID NO: 1224315 - RNA, 19 nt, Homo sapiens
  misc_RNA (1)...(19): siRNA sense strand
aagaggguccgaauaaaua

SEQ ID NO: 1224316 - RNA, 19 nt, Homo sapiens
  misc_RNA (1)...(19): siRNA sense strand
ugaagcagauauugcaaau

SEQ ID NO: 1224317 - RNA, 19 nt, Homo sapiens
  misc_RNA (1)...(19): siRNA sense strand
ccacagugaugaugaugau

SEQ ID NO: 1224318 - RNA, 19 nt, Homo sapiens
  misc_RNA (1)...(19): siRNA sense strand
gaagaucguaacacaaaug

SEQ ID NO: 1224319 - RNA, 19 nt, Homo sapiens
  misc_RNA (1)...(19): siRNA sense strand
caaguaacagacucucaua

SEQ ID NO: 1224320 - RNA, 19 nt, Homo sapiens
  misc_RNA (1)...(19): siRNA sense strand
uauaaugcccuucgagaaa

SEQ ID NO: 1224321 - RNA, 19 nt, Homo sapiens
  misc_RNA (1)...(19): siRNA sense strand
uuacagagccuuuguugau

SEQ ID NO: 1224322 - RNA, 19 nt, Homo sapiens
  misc_RNA (1)...(19): siRNA sense strand
ggacgccugcagacauuua

SEQ ID NO: 1224323 - RNA, 19 nt, Homo sapiens
  misc_RNA (1)...(19): siRNA sense strand
aaagaaagaagaagccaaa

SEQ ID NO: 1224324 - RNA, 19 nt, Homo sapiens
  misc_RNA (1)...(19): siRNA sense strand
ucaagugaauagucaguug

SEQ ID NO: 1224325 - RNA, 19 nt, Homo sapiens
  misc_RNA (1)...(19): siRNA sense strand
gaguugaauucacagaaga

SEQ ID NO: 1224326 - RNA, 19 nt, Homo sapiens
  misc_RNA (1)...(19): siRNA sense strand
ggaagaucguaacacaaau

SEQ ID NO: 1224327 - RNA, 19 nt, Homo sapiens
  misc_RNA (1)...(19): siRNA sense strand
gcagauauugcaaaugaug

SEQ ID NO: 1224328 - RNA, 19 nt, Homo sapiens
  misc_RNA (1)...(19): siRNA sense strand
gaacugugggcucgacuug

SEQ ID NO: 1224329 - RNA, 19 nt, Homo sapiens
  misc_RNA (1)...(19): siRNA sense strand
aagaggguuucaaaguuua

SEQ ID NO: 1224330 - RNA, 19 nt, Homo sapiens
  misc_RNA (1)...(19): siRNA sense strand
agaagaagccaaacguaaa

SEQ ID NO: 1224331 - RNA, 19 nt, Homo sapiens
  misc_RNA (1)...(19): siRNA sense strand
guaacagacucucauacuc

SEQ ID NO: 1224332 - RNA, 19 nt, Homo sapiens
  misc_RNA (1)...(19): siRNA sense strand
cgacgacgacgacaacauu

SEQ ID NO: 1224333 - RNA, 19 nt, Homo sapiens
  misc_RNA (1)...(19): siRNA sense strand
cuaagaggguccgaauaaa

SEQ ID NO: 1224334 - RNA, 19 nt, Homo sapiens
  misc_RNA (1)...(19): siRNA sense strand
aaacuuguccauacuaaug

SEQ ID NO: 1224335 - RNA, 19 nt, Homo sapiens
  misc_RNA (1)...(19): siRNA sense strand
auaaggauguugcaaguuc

SEQ ID NO: 1224336 - RNA, 19 nt, Homo sapiens
  misc_RNA (1)...(19): siRNA sense strand
uuugcuagcugauaaagaa

SEQ ID NO: 1224337 - RNA, 19 nt, Homo sapiens
  misc_RNA (1)...(19): siRNA sense strand
gacauacgagaagaaauua

SEQ ID NO: 1224338 - RNA, 19 nt, Homo sapiens
  misc_RNA (1)...(19): siRNA sense strand
ugaauucacagaagauuug

SEQ ID NO: 1224339 - RNA, 19 nt, Homo sapiens
  misc_RNA (1)...(19): siRNA sense strand
cacauacuguugagccuaa

SEQ ID NO: 1224340 - RNA, 19 nt, Homo sapiens
  misc_RNA (1)...(19): siRNA sense strand
ucacagaagauuugcagaa

SEQ ID NO: 1224341 - RNA, 19 nt, Homo sapiens
  misc_RNA (1)...(19): siRNA sense strand
guuggaagcaucugaagaa

SEQ ID NO: 1224342 - RNA, 19 nt, Homo sapiens
  misc_RNA (1)...(19): siRNA sense strand
aaaggaaguucuguuggaa

SEQ ID NO: 1224343 - RNA, 19 nt, Homo sapiens
  misc_RNA (1)...(19): siRNA sense strand
uguaucaccuuccuuaaca

SEQ ID NO: 1224344 - RNA, 19 nt, Homo sapiens
  misc_RNA (1)...(19): siRNA sense strand
gaaguagagagaauagugu

SEQ ID NO: 1224345 - RNA, 19 nt, Homo sapiens
  misc_RNA (1)...(19): siRNA sense strand
gaagccaaacguaaacgaa

SEQ ID NO: 1224346 - RNA, 19 nt, Homo sapiens
  misc_RNA (1)...(19): siRNA sense strand
aagaagaagccaaacguaa

SEQ ID NO: 1224347 - RNA, 19 nt, Homo sapiens
  misc_RNA (1)...(19): siRNA sense strand
uaagaggguccgaauaaau

SEQ ID NO: 1224348 - RNA, 19 nt, Homo sapiens
  misc_RNA (1)...(19): siRNA sense strand
acaccgaauugcucauaaa

SEQ ID NO: 1224349 - RNA, 19 nt, Homo sapiens
  misc_RNA (1)...(19): siRNA sense strand
gagcgaugcugcaggugau

SEQ ID NO: 1224350 - RNA, 19 nt, Homo sapiens
  misc_RNA (1)...(19): siRNA sense strand
gauugcaaauggagaagau

SEQ ID NO: 1224351 - RNA, 19 nt, Homo sapiens
  misc_RNA (1)...(19): siRNA sense strand
cgacaacauugacgacgau

SEQ ID NO: 1224352 - RNA, 19 nt, Homo sapiens
  misc_RNA (1)...(19): siRNA sense strand
gugaaugguuccaguucuu

SEQ ID NO: 1224353 - RNA, 19 nt, Homo sapiens
  misc_RNA (1)...(19): siRNA sense strand
ucucauacuccuugucaua

SEQ ID NO: 1224354 - RNA, 19 nt, Homo sapiens
  misc_RNA (1)...(19): siRNA sense strand
gagagaauaguguguguag

SEQ ID NO: 1224355 - RNA, 19 nt, Homo sapiens
  misc_RNA (1)...(19): siRNA sense strand
gaagaagccaaacguaaac

SEQ ID NO: 1224356 - RNA, 19 nt, Homo sapiens
  misc_RNA (1)...(19): siRNA sense strand
ucauaaggauguugcaagu

SEQ ID NO: 1224357 - RNA, 19 nt, Homo sapiens
  misc_RNA (1)...(19): siRNA sense strand
gcaccggaaagaacaugua

SEQ ID NO: 1224358 - RNA, 19 nt, Homo sapiens
  misc_RNA (1)...(19): siRNA sense strand
gaaguucuguuggaagcau

SEQ ID NO: 1224359 - RNA, 19 nt, Homo sapiens
  misc_RNA (1)...(19): siRNA sense strand
aaacguaaacgaaagaaca

SEQ ID NO: 1224360 - RNA, 19 nt, Homo sapiens
  misc_RNA (1)...(19): siRNA sense strand
aggauuugcuagcugauaa

SEQ ID NO: 1224361 - RNA, 19 nt, Homo sapiens
  misc_RNA (1)...(19): siRNA sense strand
agagagacaggaagaauug

SEQ ID NO: 1224362 - RNA, 19 nt, Homo sapiens
  misc_RNA (1)...(19): siRNA sense strand
gcugccagauugcaacaga

SEQ ID NO: 1224363 - RNA, 19 nt, Homo sapiens
  misc_RNA (1)...(19): siRNA sense strand
ggacaacugguuugcaaag

SEQ ID NO: 1224364 - RNA, 19 nt, Homo sapiens
  misc_RNA (1)...(19): siRNA sense strand
ccgaauaaauacuggaaag

SEQ ID NO: 1224365 - RNA, 19 nt, Homo sapiens
  misc_RNA (1)...(19): siRNA sense strand
caacauugacgacgaugau

SEQ ID NO: 1224366 - RNA, 19 nt, Homo sapiens
  misc_RNA (1)...(19): siRNA sense strand
ugacgacgaugauggugau

SEQ ID NO: 1224367 - RNA, 19 nt, Homo sapiens
  misc_RNA (1)...(19): siRNA sense strand
cgaaguagagagaauagug

SEQ ID NO: 1224368 - RNA, 19 nt, Homo sapiens
  misc_RNA (1)...(19): siRNA sense strand
aaagaagaagccaaacgua

SEQ ID NO: 1224369 - RNA, 19 nt, Homo sapiens
  misc_RNA (1)...(19): siRNA sense strand
cuaaugaagucacuguuuu

SEQ ID NO: 1224370 - RNA, 19 nt, Homo sapiens
  misc_RNA (1)...(19): siRNA sense strand
aggaagaucguaacacaaa

SEQ ID NO: 1224371 - RNA, 19 nt, Homo sapiens
  misc_RNA (1)...(19): siRNA sense strand
ucauaaaccgcauuccaaa

SEQ ID NO: 1224372 - RNA, 19 nt, Homo sapiens
  misc_RNA (1)...(19): siRNA sense strand
ccggaaagaacauguaaga

SEQ ID NO: 1224373 - RNA, 19 nt, Homo sapiens
  misc_RNA (1)...(19): siRNA sense strand
gaguaucagcugcgaagaa

SEQ ID NO: 1224374 - RNA, 19 nt, Homo sapiens
  misc_RNA (1)...(19): siRNA sense strand
aaacaccgaauugcucaua

SEQ ID NO: 1224375 - RNA, 19 nt, Homo sapiens
  misc_RNA (1)...(19): siRNA sense strand
gugaugaugaugaugauga

SEQ ID NO: 1224376 - RNA, 19 nt, Homo sapiens
  misc_RNA (1)...(19): siRNA sense strand
caggugauauuguugacau

SEQ ID NO: 1224377 - RNA, 19 nt, Homo sapiens
  misc_RNA (1)...(19): siRNA sense strand
ugaaugguuccaguucuua

SEQ ID NO: 1224378 - RNA, 19 nt, Homo sapiens
  misc_RNA (1)...(19): siRNA sense strand
uugaagaacuagagagaca

SEQ ID NO: 1224379 - RNA, 19 nt, Homo sapiens
  misc_RNA (1)...(19): siRNA sense strand
acaacugguuugcaaagug

SEQ ID NO: 1224380 - RNA, 19 nt, Homo sapiens
  misc_RNA (1)...(19): siRNA sense strand
gauugcaacagaaagacua

SEQ ID NO: 1224381 - RNA, 19 nt, Homo sapiens
  misc_RNA (1)...(19): siRNA sense strand
ccagauugcaacagaaaga

SEQ ID NO: 1224382 - RNA, 19 nt, Homo sapiens
  misc_RNA (1)...(19): siRNA sense strand
caagugaauagucaguuga

SEQ ID NO: 1224383 - RNA, 19 nt, Homo sapiens
  misc_RNA (1)...(19): siRNA sense strand
guggucaagugaauaguca

SEQ ID NO: 1224384 - RNA, 19 nt, Homo sapiens
  misc_RNA (1)...(19): siRNA sense strand
uaaggauguugcaaguuca

SEQ ID NO: 1224385 - RNA, 19 nt, Homo sapiens
  misc_RNA (1)...(19): siRNA sense strand
gcaaagcaggcuguagguu

SEQ ID NO: 1224386 - RNA, 19 nt, Homo sapiens
  misc_RNA (1)...(19): siRNA sense strand
cgacgaugauggugauaac

SEQ ID NO: 1224387 - RNA, 19 nt, Homo sapiens
  misc_RNA (1)...(19): siRNA sense strand
gaauuuguaucaccuuccu

SEQ ID NO: 1224388 - RNA, 19 nt, Homo sapiens
  misc_RNA (1)...(19): siRNA sense strand
ggaagaagguagauaauga

SEQ ID NO: 1224389 - RNA, 19 nt, Homo sapiens
  misc_RNA (1)...(19): siRNA sense strand
gaagguagauaaugacuau

SEQ ID NO: 1224390 - RNA, 19 nt, Homo sapiens
  misc_RNA (1)...(19): siRNA sense strand
ggaaagaacauguaagaaa

SEQ ID NO: 1224391 - RNA, 19 nt, Homo sapiens
  misc_RNA (1)...(19): siRNA sense strand
gaaaggaaguucuguugga

SEQ ID NO: 1224392 - RNA, 19 nt, Homo sapiens
  misc_RNA (1)...(19): siRNA sense strand
caaaugaugugaaauccaa

SEQ ID NO: 1224393 - RNA, 19 nt, Homo sapiens
  misc_RNA (1)...(19): siRNA sense strand
ggagauaauucuauaccaa

SEQ ID NO: 1224394 - RNA, 19 nt, Homo sapiens
  misc_RNA (1)...(19): siRNA sense strand
aagcagauauugcaaauga

SEQ ID NO: 1224395 - RNA, 19 nt, Homo sapiens
  misc_RNA (1)...(19): siRNA sense strand
aaagcaggcuguagguuua

SEQ ID NO: 1224396 - RNA, 19 nt, Homo sapiens
  misc_RNA (1)...(19): siRNA sense strand
aaagaggguuucaaaguuu

SEQ ID NO: 1224397 - RNA, 19 nt, Homo sapiens
  misc_RNA (1)...(19): siRNA sense strand
ggaagcaucugaagaaacu

SEQ ID NO: 1224398 - RNA, 19 nt, Homo sapiens
  misc_RNA (1)...(19): siRNA sense strand
guuuaaagcugccagauug

SEQ ID NO: 1224399 - RNA, 19 nt, Homo sapiens
  misc_RNA (1)...(19): siRNA sense strand
gaagaggaaccacaagaaa

SEQ ID NO: 1224400 - RNA, 19 nt, Homo sapiens
  misc_RNA (1)...(19): siRNA sense strand
gcaccuugccugauaaauu

SEQ ID NO: 1224401 - RNA, 19 nt, Homo sapiens
  misc_RNA (1)...(19): siRNA sense strand
ugggugaacuugauaguaa

SEQ ID NO: 1224402 - RNA, 19 nt, Homo sapiens
  misc_RNA (1)...(19): siRNA sense strand
caccuugccugauaaauug

SEQ ID NO: 1224403 - RNA, 19 nt, Homo sapiens
  misc_RNA (1)...(19): siRNA sense strand
gguuggagauaauucuaua

SEQ ID NO: 1224404 - RNA, 19 nt, Homo sapiens
  misc_RNA (1)...(19): siRNA sense strand
uaacgaccaugaggcuuua

SEQ ID NO: 1224405 - RNA, 19 nt, Homo sapiens
  misc_RNA (1)...(19): siRNA sense strand
caaagcaggcuguagguuu

SEQ ID NO: 1224406 - RNA, 19 nt, Homo sapiens
  misc_RNA (1)...(19): siRNA sense strand
ugacauacgagaagaaauu

SEQ ID NO: 1224407 - RNA, 19 nt, Homo sapiens
  misc_RNA (1)...(19): siRNA sense strand
gaauaugucccucgcaaau

SEQ ID NO: 1224408 - RNA, 19 nt, Homo sapiens
  misc_RNA (1)...(19): siRNA sense strand
aaaggaagaucguaacaca

SEQ ID NO: 1224409 - RNA, 19 nt, Homo sapiens
  misc_RNA (1)...(19): siRNA sense strand
gagaaagacucagcaccuu

SEQ ID NO: 1224410 - RNA, 19 nt, Homo sapiens
  misc_RNA (1)...(19): siRNA sense strand
ggaagaggaaccacaagaa

SEQ ID NO: 1224411 - RNA, 19 nt, Homo sapiens
  misc_RNA (1)...(19): siRNA sense strand
gaaaacuuguccauacuaa

SEQ ID NO: 1224412 - RNA, 19 nt, Homo sapiens
  misc_RNA (1)...(19): siRNA sense strand
ccuaagaggguccgaauaa

SEQ ID NO: 1224413 - RNA, 19 nt, Homo sapiens
  misc_RNA (1)...(19): siRNA sense strand
gaaagaagaagccaaacgu

SEQ ID NO: 1224414 - RNA, 19 nt, Homo sapiens
  misc_RNA (1)...(19): siRNA sense strand
cacagaagauuugcagaaa

SEQ ID NO: 1224415 - RNA, 19 nt, Homo sapiens
  misc_RNA (1)...(19): siRNA sense strand
aagaggguccgaauaaaua

SEQ ID NO: 1224416 - RNA, 19 nt, Homo sapiens
  misc_RNA (1)...(19): siRNA sense strand
ugaagcagauauugcaaau

SEQ ID NO: 1224417 - RNA, 19 nt, Homo sapiens
  misc_RNA (1)...(19): siRNA sense strand
ccacagugaugaugaugau

SEQ ID NO: 1224418 - RNA, 19 nt, Homo sapiens
  misc_RNA (1)...(19): siRNA sense strand
gaagaucguaacacaaaug

SEQ ID NO: 1224419 - RNA, 19 nt, Homo sapiens
  misc_RNA (1)...(19): siRNA sense strand
caaguaacagacucucaua

SEQ ID NO: 1224420 - RNA, 19 nt, Homo sapiens
  misc_RNA (1)...(19): siRNA sense strand
uauaaugcccuucgagaaa

SEQ ID NO: 1224421 - RNA, 19 nt, Homo sapiens
  misc_RNA (1)...(19): siRNA sense strand
uuacagagccuuuguugau

SEQ ID NO: 1224422 - RNA, 19 nt, Homo sapiens
  misc_RNA (1)...(19): siRNA sense strand
ggacgccugcagacauuua

SEQ ID NO: 1224423 - RNA, 19 nt, Homo sapiens
  misc_RNA (1)...(19): siRNA sense strand
aaagaaagaagaagccaaa

SEQ ID NO: 1224424 - RNA, 19 nt, Homo sapiens
  misc_RNA (1)...(19): siRNA sense strand
ucaagugaauagucaguug

SEQ ID NO: 1224425 - RNA, 19 nt, Homo sapiens
  misc_RNA (1)...(19): siRNA sense strand
gaguugaauucacagaaga

SEQ ID NO: 1224426 - RNA, 19 nt, Homo sapiens
  misc_RNA (1)...(19): siRNA sense strand
ggaagaucguaacacaaau

SEQ ID NO: 1224427 - RNA, 19 nt, Homo sapiens
  misc_RNA (1)...(19): siRNA sense strand
gcagauauugcaaaugaug

SEQ ID NO: 1224428 - RNA, 19 nt, Homo sapiens
  misc_RNA (1)...(19): siRNA sense strand
gaacugugggcucgacuug

SEQ ID NO: 1224429 - RNA, 19 nt, Homo sapiens
  misc_RNA (1)...(19): siRNA sense strand
aagaggguuucaaaguuua

SEQ ID NO: 1224430 - RNA, 19 nt, Homo sapiens
  misc_RNA (1)...(19): siRNA sense strand
agaagaagccaaacguaaa

SEQ ID NO: 1224431 - RNA, 19 nt, Homo sapiens
  misc_RNA (1)...(19): siRNA sense strand
guaacagacucucauacuc

SEQ ID NO: 1224432 - RNA, 19 nt, Homo sapiens
  misc_RNA (1)...(19): siRNA sense strand
cgacgacgacgacaacauu

SEQ ID NO: 1224433 - RNA, 19 nt, Homo sapiens
  misc_RNA (1)...(19): siRNA sense strand
cuaagaggguccgaauaaa

SEQ ID NO: 1224434 - RNA, 19 nt, Homo sapiens
  misc_RNA (1)...(19): siRNA sense strand
aaacuuguccauacuaaug

SEQ ID NO: 1224435 - RNA, 19 nt, Homo sapiens
  misc_RNA (1)...(19): siRNA sense strand
auaaggauguugcaaguuc

SEQ ID NO: 1224436 - RNA, 19 nt, Homo sapiens
  misc_RNA (1)...(19): siRNA sense strand
uuugcuagcugauaaagaa

SEQ ID NO: 1224437 - RNA, 19 nt, Homo sapiens
  misc_RNA (1)...(19): siRNA sense strand
gacauacgagaagaaauua

SEQ ID NO: 1224438 - RNA, 19 nt, Homo sapiens
  misc_RNA (1)...(19): siRNA sense strand
ugaauucacagaagauuug

SEQ ID NO: 1224439 - RNA, 19 nt, Homo sapiens
  misc_RNA (1)...(19): siRNA sense strand
cacauacuguugagccuaa

SEQ ID NO: 1224440 - RNA, 19 nt, Homo sapiens
  misc_RNA (1)...(19): siRNA sense strand
ucacagaagauuugcagaa

SEQ ID NO: 1224441 - RNA, 19 nt, Homo sapiens
  misc_RNA (1)...(19): siRNA sense strand
guuggaagcaucugaagaa

SEQ ID NO: 1224442 - RNA, 19 nt, Homo sapiens
  misc_RNA (1)...(19): siRNA sense strand
aaaggaaguucuguuggaa

SEQ ID NO: 1224443 - RNA, 19 nt, Homo sapiens
  misc_RNA (1)...(19): siRNA sense strand
uguaucaccuuccuuaaca

SEQ ID NO: 1224444 - RNA, 19 nt, Homo sapiens
  misc_RNA (1)...(19): siRNA sense strand
gaaguagagagaauagugu

SEQ ID NO: 1224445 - RNA, 19 nt, Homo sapiens
  misc_RNA (1)...(19): siRNA sense strand
gaagccaaacguaaacgaa

SEQ ID NO: 1224446 - RNA, 19 nt, Homo sapiens
  misc_RNA (1)...(19): siRNA sense strand
aagaagaagccaaacguaa

SEQ ID NO: 1224447 - RNA, 19 nt, Homo sapiens
  misc_RNA (1)...(19): siRNA sense strand
uaagaggguccgaauaaau

SEQ ID NO: 1224448 - RNA, 19 nt, Homo sapiens
  misc_RNA (1)...(19): siRNA sense strand
acaccgaauugcucauaaa

SEQ ID NO: 1224449 - RNA, 19 nt, Homo sapiens
  misc_RNA (1)...(19): siRNA sense strand
gagcgaugcugcaggugau

SEQ ID NO: 1224450 - RNA, 19 nt, Homo sapiens
  misc_RNA (1)...(19): siRNA sense strand
gauugcaaauggagaagau

SEQ ID NO: 1224451 - RNA, 19 nt, Homo sapiens
  misc_RNA (1)...(19): siRNA sense strand
cgacaacauugacgacgau

SEQ ID NO: 1224452 - RNA, 19 nt, Homo sapiens
  misc_RNA (1)...(19): siRNA sense strand
gugaaugguuccaguucuu

SEQ ID NO: 1224453 - RNA, 19 nt, Homo sapiens
  misc_RNA (1)...(19): siRNA sense strand
ucucauacuccuugucaua

SEQ ID NO: 1224454 - RNA, 19 nt, Homo sapiens
  misc_RNA (1)...(19): siRNA sense strand
gagagaauaguguguguag

SEQ ID NO: 1224455 - RNA, 19 nt, Homo sapiens
  misc_RNA (1)...(19): siRNA sense strand
gaagaagccaaacguaaac

SEQ ID NO: 1224456 - RNA, 19 nt, Homo sapiens
  misc_RNA (1)...(19): siRNA sense strand
ucauaaggauguugcaagu

SEQ ID NO: 1224457 - RNA, 19 nt, Homo sapiens
  misc_RNA (1)...(19): siRNA sense strand
gcaccggaaagaacaugua

SEQ ID NO: 1224458 - RNA, 19 nt, Homo sapiens
  misc_RNA (1)...(19): siRNA sense strand
gaaguucuguuggaagcau

SEQ ID NO: 1224459 - RNA, 19 nt, Homo sapiens
  misc_RNA (1)...(19): siRNA sense strand
aaacguaaacgaaagaaca

SEQ ID NO: 1224460 - RNA, 19 nt, Homo sapiens
  misc_RNA (1)...(19): siRNA sense strand
aggauuugcuagcugauaa

SEQ ID NO: 1224461 - RNA, 19 nt, Homo sapiens
  misc_RNA (1)...(19): siRNA sense strand
agagagacaggaagaauug

SEQ ID NO: 1224462 - RNA, 19 nt, Homo sapiens
  misc_RNA (1)...(19): siRNA sense strand
gcugccagauugcaacaga

SEQ ID NO: 1224463 - RNA, 19 nt, Homo sapiens
  misc_RNA (1)...(19): siRNA sense strand
ggacaacugguuugcaaag

SEQ ID NO: 1224464 - RNA, 19 nt, Homo sapiens
  misc_RNA (1)...(19): siRNA sense strand
ccgaauaaauacuggaaag

SEQ ID NO: 1224465 - RNA, 19 nt, Homo sapiens
  misc_RNA (1)...(19): siRNA sense strand
caacauugacgacgaugau

SEQ ID NO: 1224466 - RNA, 19 nt, Homo sapiens
  misc_RNA (1)...(19): siRNA sense strand
ugacgacgaugauggugau

SEQ ID NO: 1224467 - RNA, 19 nt, Homo sapiens
  misc_RNA (1)...(19): siRNA sense strand
cgaaguagagagaauagug

SEQ ID NO: 1224468 - RNA, 19 nt, Homo sapiens
  misc_RNA (1)...(19): siRNA sense strand
aaagaagaagccaaacgua

SEQ ID NO: 1224469 - RNA, 19 nt, Homo sapiens
  misc_RNA (1)...(19): siRNA sense strand
cuaaugaagucacuguuuu

SEQ ID NO: 1224470 - RNA, 19 nt, Homo sapiens
  misc_RNA (1)...(19): siRNA sense strand
aggaagaucguaacacaaa

SEQ ID NO: 1224471 - RNA, 19 nt, Homo sapiens
  misc_RNA (1)...(19): siRNA sense strand
ucauaaaccgcauuccaaa

SEQ ID NO: 1224472 - RNA, 19 nt, Homo sapiens
  misc_RNA (1)...(19): siRNA sense strand
ccggaaagaacauguaaga

SEQ ID NO: 1224473 - RNA, 19 nt, Homo sapiens
  misc_RNA (1)...(19): siRNA sense strand
gaguaucagcugcgaagaa

SEQ ID NO: 1224474 - RNA, 19 nt, Homo sapiens
  misc_RNA (1)...(19): siRNA sense strand
aaacaccgaauugcucaua

SEQ ID NO: 1224475 - RNA, 19 nt, Homo sapiens
  misc_RNA (1)...(19): siRNA sense strand
gugaugaugaugaugauga

SEQ ID NO: 1224476 - RNA, 19 nt, Homo sapiens
  misc_RNA (1)...(19): siRNA sense strand
caggugauauuguugacau

SEQ ID NO: 1224477 - RNA, 19 nt, Homo sapiens
  misc_RNA (1)...(19): siRNA sense strand
ugaaugguuccaguucuua

SEQ ID NO: 1224478 - RNA, 19 nt, Homo sapiens
  misc_RNA (1)...(19): siRNA sense strand
uugaagaacuagagagaca

SEQ ID NO: 1224479 - RNA, 19 nt, Homo sapiens
  misc_RNA (1)...(19): siRNA sense strand
acaacugguuugcaaagug

SEQ ID NO: 1224480 - RNA, 19 nt, Homo sapiens
  misc_RNA (1)...(19): siRNA sense strand
gauugcaacagaaagacua

SEQ ID NO: 1224481 - RNA, 19 nt, Homo sapiens
  misc_RNA (1)...(19): siRNA sense strand
ccagauugcaacagaaaga

SEQ ID NO: 1224482 - RNA, 19 nt, Homo sapiens
  misc_RNA (1)...(19): siRNA sense strand
caagugaauagucaguuga

SEQ ID NO: 1224483 - RNA, 19 nt, Homo sapiens
  misc_RNA (1)...(19): siRNA sense strand
guggucaagugaauaguca

SEQ ID NO: 1224484 - RNA, 19 nt, Homo sapiens
  misc_RNA (1)...(19): siRNA sense strand
uaaggauguugcaaguuca

SEQ ID NO: 1224485 - RNA, 19 nt, Homo sapiens
  misc_RNA (1)...(19): siRNA sense strand
gcaaagcaggcuguagguu

SEQ ID NO: 1224486 - RNA, 19 nt, Homo sapiens
  misc_RNA (1)...(19): siRNA sense strand
cgacgaugauggugauaac

SEQ ID NO: 1224487 - RNA, 19 nt, Homo sapiens
  misc_RNA (1)...(19): siRNA sense strand
gaauuuguaucaccuuccu

SEQ ID NO: 1224488 - RNA, 19 nt, Homo sapiens
  misc_RNA (1)...(19): siRNA sense strand
ggaagaugcuccucagaca

SEQ ID NO: 1224489 - RNA, 19 nt, Homo sapiens
  misc_RNA (1)...(19): siRNA sense strand
gcgcgcagauugccauuug

SEQ ID NO: 1224490 - RNA, 19 nt, Homo sapiens
  misc_RNA (1)...(19): siRNA sense strand
caacaaagauacagaaacc

SEQ ID NO: 1224491 - RNA, 19 nt, Homo sapiens
  misc_RNA (1)...(19): siRNA sense strand
gcuaggagucuguuuacua

SEQ ID NO: 1224492 - RNA, 19 nt, Homo sapiens
  misc_RNA (1)...(19): siRNA sense strand
caaagauacagaaaccaua

SEQ ID NO: 1224493 - RNA, 19 nt, Homo sapiens
  misc_RNA (1)...(19): siRNA sense strand
ggauggaggaaguuauuaa

SEQ ID NO: 1224494 - RNA, 19 nt, Homo sapiens
  misc_RNA (1)...(19): siRNA sense strand
ggagucuguuuacuacuga

SEQ ID NO: 1224495 - RNA, 19 nt, Homo sapiens
  misc_RNA (1)...(19): siRNA sense strand
gauggaggaaguuauuaaa

SEQ ID NO: 1224496 - RNA, 19 nt, Homo sapiens
  misc_RNA (1)...(19): siRNA sense strand
cuaggagucuguuuacuac

SEQ ID NO: 1224497 - RNA, 19 nt, Homo sapiens
  misc_RNA (1)...(19): siRNA sense strand
cauccuucaucaacaaaga

SEQ ID NO: 1224498 - RNA, 19 nt, Homo sapiens
  misc_RNA (1)...(19): siRNA sense strand
guuuacuacugaaccaauu

SEQ ID NO: 1224499 - RNA, 19 nt, Homo sapiens
  misc_RNA (1)...(19): siRNA sense strand
caucaacaaagauacagaa

SEQ ID NO: 1224500 - RNA, 19 nt, Homo sapiens
  misc_RNA (1)...(19): siRNA sense strand
acucauggauggaggaagu

SEQ ID NO: 1224501 - RNA, 19 nt, Homo sapiens
  misc_RNA (1)...(19): siRNA sense strand
ccugcuaggagucuguuua

SEQ ID NO: 1224502 - RNA, 19 nt, Homo sapiens
  misc_RNA (1)...(19): siRNA sense strand
acaaagauacagaaaccau

SEQ ID NO: 1224503 - RNA, 19 nt, Homo sapiens
  misc_RNA (1)...(19): siRNA sense strand
gugccauccuucaucaaca

SEQ ID NO: 1224504 - RNA, 19 nt, Homo sapiens
  misc_RNA (1)...(19): siRNA sense strand
ugccauccuucaucaacaa

SEQ ID NO: 1224505 - RNA, 19 nt, Homo sapiens
  misc_RNA (1)...(19): siRNA sense strand
caugagcaccuggagcaaa

SEQ ID NO: 1224506 - RNA, 19 nt, Homo sapiens
  misc_RNA (1)...(19): siRNA sense strand
aggagucuguuuacuacug

SEQ ID NO: 1224507 - RNA, 19 nt, Homo sapiens
  misc_RNA (1)...(19): siRNA sense strand
cagcaguccuucagaauua

SEQ ID NO: 1224508 - RNA, 19 nt, Homo sapiens
  misc_RNA (1)...(19): siRNA sense strand
ggaagaugcuccucagaca

SEQ ID NO: 1224509 - RNA, 19 nt, Homo sapiens
  misc_RNA (1)...(19): siRNA sense strand
gcgcgcagauugccauuug

SEQ ID NO: 1224510 - RNA, 19 nt, Homo sapiens
  misc_RNA (1)...(19): siRNA sense strand
caacaaagauacagaaacc

SEQ ID NO: 1224511 - RNA, 19 nt, Homo sapiens
  misc_RNA (1)...(19): siRNA sense strand
caacauguaccuguauuaa

SEQ ID NO: 1224512 - RNA, 19 nt, Homo sapiens
  misc_RNA (1)...(19): siRNA sense strand
gcuaggagucuguuuacua

SEQ ID NO: 1224513 - RNA, 19 nt, Homo sapiens
  misc_RNA (1)...(19): siRNA sense strand
ugucagaauuuguugcuaa

SEQ ID NO: 1224514 - RNA, 19 nt, Homo sapiens
  misc_RNA (1)...(19): siRNA sense strand
caaagauacagaaaccaua

SEQ ID NO: 1224515 - RNA, 19 nt, Homo sapiens
  misc_RNA (1)...(19): siRNA sense strand
ggauggaggaaguuauuaa

SEQ ID NO: 1224516 - RNA, 19 nt, Homo sapiens
  misc_RNA (1)...(19): siRNA sense strand
acaacaacauguaccugua

SEQ ID NO: 1224517 - RNA, 19 nt, Homo sapiens
  misc_RNA (1)...(19): siRNA sense strand
ccacaggagcugaaguuaa

SEQ ID NO: 1224518 - RNA, 19 nt, Homo sapiens
  misc_RNA (1)...(19): siRNA sense strand
acagugcauuggcuaauaa

SEQ ID NO: 1224519 - RNA, 19 nt, Homo sapiens
  misc_RNA (1)...(19): siRNA sense strand
agacagcaguccuucagaa

SEQ ID NO: 1224520 - RNA, 19 nt, Homo sapiens
  misc_RNA (1)...(19): siRNA sense strand
ggagucuguuuacuacuga

SEQ ID NO: 1224521 - RNA, 19 nt, Homo sapiens
  misc_RNA (1)...(19): siRNA sense strand
gauggaggaaguuauuaaa

SEQ ID NO: 1224522 - RNA, 19 nt, Homo sapiens
  misc_RNA (1)...(19): siRNA sense strand
cacaggagcugaaguuaac

SEQ ID NO: 1224523 - RNA, 19 nt, Homo sapiens
  misc_RNA (1)...(19): siRNA sense strand
caacaacauguaccuguau

SEQ ID NO: 1224524 - RNA, 19 nt, Homo sapiens
  misc_RNA (1)...(19): siRNA sense strand
aauaaauguugccauguug

SEQ ID NO: 1224525 - RNA, 19 nt, Homo sapiens
  misc_RNA (1)...(19): siRNA sense strand
uacagugcauuggcuaaua

SEQ ID NO: 1224526 - RNA, 19 nt, Homo sapiens
  misc_RNA (1)...(19): siRNA sense strand
uaccacagcuacaacaaca

SEQ ID NO: 1224527 - RNA, 19 nt, Homo sapiens
  misc_RNA (1)...(19): siRNA sense strand
cuaggagucuguuuacuac

SEQ ID NO: 1224528 - RNA, 19 nt, Homo sapiens
  misc_RNA (1)...(19): siRNA sense strand
agacaacucuacagugcau

SEQ ID NO: 1224529 - RNA, 19 nt, Homo sapiens
  misc_RNA (1)...(19): siRNA sense strand
cauccuucaucaacaaaga

SEQ ID NO: 1224530 - RNA, 19 nt, Homo sapiens
  misc_RNA (1)...(19): siRNA sense strand
caucaacaaagauacagaa

SEQ ID NO: 1224531 - RNA, 19 nt, Homo sapiens
  misc_RNA (1)...(19): siRNA sense strand
guuuacuacugaaccaauu

SEQ ID NO: 1224532 - RNA, 19 nt, Homo sapiens
  misc_RNA (1)...(19): siRNA sense strand
ccacagcuacaacaacaug

SEQ ID NO: 1224533 - RNA, 19 nt, Homo sapiens
  misc_RNA (1)...(19): siRNA sense strand
agauuccagucuucucuuu

SEQ ID NO: 1224534 - RNA, 19 nt, Homo sapiens
  misc_RNA (1)...(19): siRNA sense strand
gcagacagcaguccuucag

SEQ ID NO: 1224535 - RNA, 19 nt, Homo sapiens
  misc_RNA (1)...(19): siRNA sense strand
acucauggauggaggaagu

SEQ ID NO: 1224536 - RNA, 19 nt, Homo sapiens
  misc_RNA (1)...(19): siRNA sense strand
acaacauguaccuguauua

SEQ ID NO: 1224537 - RNA, 19 nt, Homo sapiens
  misc_RNA (1)...(19): siRNA sense strand
gucagaauuuguugcuaau

SEQ ID NO: 1224538 - RNA, 19 nt, Homo sapiens
  misc_RNA (1)...(19): siRNA sense strand
ugaaguuaacccugucuga

SEQ ID NO: 1224539 - RNA, 19 nt, Homo sapiens
  misc_RNA (1)...(19): siRNA sense strand
aacaacauguaccuguauu

SEQ ID NO: 1224540 - RNA, 19 nt, Homo sapiens
  misc_RNA (1)...(19): siRNA sense strand
ccugcuaggagucuguuua

SEQ ID NO: 1224541 - RNA, 19 nt, Homo sapiens
  misc_RNA (1)...(19): siRNA sense strand
gacagcaguccuucagaau

SEQ ID NO: 1224542 - RNA, 19 nt, Homo sapiens
  misc_RNA (1)...(19): siRNA sense strand
auuccagucuucucuuuga

SEQ ID NO: 1224543 - RNA, 19 nt, Homo sapiens
  misc_RNA (1)...(19): siRNA sense strand
gcaguccuucagaauuaaa

SEQ ID NO: 1224544 - RNA, 19 nt, Homo sapiens
  misc_RNA (1)...(19): siRNA sense strand
acagcaguccuucagaauu

SEQ ID NO: 1224545 - RNA, 19 nt, Homo sapiens
  misc_RNA (1)...(19): siRNA sense strand
acaaagauacagaaaccau

SEQ ID NO: 1224546 - RNA, 19 nt, Homo sapiens
  misc_RNA (1)...(19): siRNA sense strand
gugccauccuucaucaaca

SEQ ID NO: 1224547 - RNA, 19 nt, Homo sapiens
  misc_RNA (1)...(19): siRNA sense strand
ugccauccuucaucaacaa

SEQ ID NO: 1224548 - RNA, 19 nt, Homo sapiens
  misc_RNA (1)...(19): siRNA sense strand
gccacaggagcugaaguua

SEQ ID NO: 1224549 - RNA, 19 nt, Homo sapiens
  misc_RNA (1)...(19): siRNA sense strand
ggauacucauucucgaaaa

SEQ ID NO: 1224550 - RNA, 19 nt, Homo sapiens
  misc_RNA (1)...(19): siRNA sense strand
caugagcaccuggagcaaa

SEQ ID NO: 1224551 - RNA, 19 nt, Homo sapiens
  misc_RNA (1)...(19): siRNA sense strand
aaguuaacccugucugaga

SEQ ID NO: 1224552 - RNA, 19 nt, Homo sapiens
  misc_RNA (1)...(19): siRNA sense strand
aggagucuguuuacuacug

SEQ ID NO: 1224553 - RNA, 19 nt, Homo sapiens
  misc_RNA (1)...(19): siRNA sense strand
uggauacucauucucgaaa

SEQ ID NO: 1224554 - RNA, 19 nt, Homo sapiens
  misc_RNA (1)...(19): siRNA sense strand
ggaagaugcuccucagaca

SEQ ID NO: 1224555 - RNA, 19 nt, Homo sapiens
  misc_RNA (1)...(19): siRNA sense strand
gcgcgcagauugccauuug

SEQ ID NO: 1224556 - RNA, 19 nt, Homo sapiens
  misc_RNA (1)...(19): siRNA sense strand
caacaaagauacagaaacc

SEQ ID NO: 1224557 - RNA, 19 nt, Homo sapiens
  misc_RNA (1)...(19): siRNA sense strand
gcuaggagucuguuuacua

SEQ ID NO: 1224558 - RNA, 19 nt, Homo sapiens
  misc_RNA (1)...(19): siRNA sense strand
caaagauacagaaaccaua

SEQ ID NO: 1224559 - RNA, 19 nt, Homo sapiens
  misc_RNA (1)...(19): siRNA sense strand
ggauggaggaaguuauuaa

SEQ ID NO: 1224560 - RNA, 19 nt, Homo sapiens
  misc_RNA (1)...(19): siRNA sense strand
ggagucuguuuacuacuga

SEQ ID NO: 1224561 - RNA, 19 nt, Homo sapiens
  misc_RNA (1)...(19): siRNA sense strand
gauggaggaaguuauuaaa

SEQ ID NO: 1224562 - RNA, 19 nt, Homo sapiens
  misc_RNA (1)...(19): siRNA sense strand
cuaggagucuguuuacuac

SEQ ID NO: 1224563 - RNA, 19 nt, Homo sapiens
  misc_RNA (1)...(19): siRNA sense strand
cauccuucaucaacaaaga

SEQ ID NO: 1224564 - RNA, 19 nt, Homo sapiens
  misc_RNA (1)...(19): siRNA sense strand
guuuacuacugaaccaauu

SEQ ID NO: 1224565 - RNA, 19 nt, Homo sapiens
  misc_RNA (1)...(19): siRNA sense strand
caucaacaaagauacagaa

SEQ ID NO: 1224566 - RNA, 19 nt, Homo sapiens
  misc_RNA (1)...(19): siRNA sense strand
acucauggauggaggaagu

SEQ ID NO: 1224567 - RNA, 19 nt, Homo sapiens
  misc_RNA (1)...(19): siRNA sense strand
ccugcuaggagucuguuua

SEQ ID NO: 1224568 - RNA, 19 nt, Homo sapiens
  misc_RNA (1)...(19): siRNA sense strand
acaaagauacagaaaccau

SEQ ID NO: 1224569 - RNA, 19 nt, Homo sapiens
  misc_RNA (1)...(19): siRNA sense strand
gugccauccuucaucaaca

SEQ ID NO: 1224570 - RNA, 19 nt, Homo sapiens
  misc_RNA (1)...(19): siRNA sense strand
ugccauccuucaucaacaa

SEQ ID NO: 1224571 - RNA, 19 nt, Homo sapiens
  misc_RNA (1)...(19): siRNA sense strand
caugagcaccuggagcaaa

SEQ ID NO: 1224572 - RNA, 19 nt, Homo sapiens
  misc_RNA (1)...(19): siRNA sense strand
aggagucuguuuacuacug

SEQ ID NO: 1224573 - RNA, 19 nt, Homo sapiens
  misc_RNA (1)...(19): siRNA sense strand
cagcaguccuucagaauua

SEQ ID NO: 1224574 - RNA, 19 nt, Homo sapiens
  misc_RNA (1)...(19): siRNA sense strand
ggaagaugcuccucagaca

SEQ ID NO: 1224575 - RNA, 19 nt, Homo sapiens
  misc_RNA (1)...(19): siRNA sense strand
gcgcgcagauugccauuug

SEQ ID NO: 1224576 - RNA, 19 nt, Homo sapiens
  misc_RNA (1)...(19): siRNA sense strand
caacaaagauacagaaacc

SEQ ID NO: 1224577 - RNA, 19 nt, Homo sapiens
  misc_RNA (1)...(19): siRNA sense strand
caacauguaccuguauuaa

SEQ ID NO: 1224578 - RNA, 19 nt, Homo sapiens
  misc_RNA (1)...(19): siRNA sense strand
gcuaggagucuguuuacua

SEQ ID NO: 1224579 - RNA, 19 nt, Homo sapiens
  misc_RNA (1)...(19): siRNA sense strand
ugucagaauuuguugcuaa

SEQ ID NO: 1224580 - RNA, 19 nt, Homo sapiens
  misc_RNA (1)...(19): siRNA sense strand
caaagauacagaaaccaua

SEQ ID NO: 1224581 - RNA, 19 nt, Homo sapiens
  misc_RNA (1)...(19): siRNA sense strand
ggauggaggaaguuauuaa

SEQ ID NO: 1224582 - RNA, 19 nt, Homo sapiens
  misc_RNA (1)...(19): siRNA sense strand
acaacaacauguaccugua

SEQ ID NO: 1224583 - RNA, 19 nt, Homo sapiens
  misc_RNA (1)...(19): siRNA sense strand
ccacaggagcugaaguuaa

SEQ ID NO: 1224584 - RNA, 19 nt, Homo sapiens
  misc_RNA (1)...(19): siRNA sense strand
acagugcauuggcuaauaa

SEQ ID NO: 1224585 - RNA, 19 nt, Homo sapiens
  misc_RNA (1)...(19): siRNA sense strand
agacagcaguccuucagaa

SEQ ID NO: 1224586 - RNA, 19 nt, Homo sapiens
  misc_RNA (1)...(19): siRNA sense strand
ggagucuguuuacuacuga

SEQ ID NO: 1224587 - RNA, 19 nt, Homo sapiens
  misc_RNA (1)...(19): siRNA sense strand
gauggaggaaguuauuaaa

SEQ ID NO: 1224588 - RNA, 19 nt, Homo sapiens
  misc_RNA (1)...(19): siRNA sense strand
cacaggagcugaaguuaac

SEQ ID NO: 1224589 - RNA, 19 nt, Homo sapiens
  misc_RNA (1)...(19): siRNA sense strand
caacaacauguaccuguau

SEQ ID NO: 1224590 - RNA, 19 nt, Homo sapiens
  misc_RNA (1)...(19): siRNA sense strand
aauaaauguugccauguug

SEQ ID NO: 1224591 - RNA, 19 nt, Homo sapiens
  misc_RNA (1)...(19): siRNA sense strand
uacagugcauuggcuaaua

SEQ ID NO: 1224592 - RNA, 19 nt, Homo sapiens
  misc_RNA (1)...(19): siRNA sense strand
uaccacagcuacaacaaca

SEQ ID NO: 1224593 - RNA, 19 nt, Homo sapiens
  misc_RNA (1)...(19): siRNA sense strand
cuaggagucuguuuacuac

SEQ ID NO: 1224594 - RNA, 19 nt, Homo sapiens
  misc_RNA (1)...(19): siRNA sense strand
agacaacucuacagugcau

SEQ ID NO: 1224595 - RNA, 19 nt, Homo sapiens
  misc_RNA (1)...(19): siRNA sense strand
cauccuucaucaacaaaga

SEQ ID NO: 1224596 - RNA, 19 nt, Homo sapiens
  misc_RNA (1)...(19): siRNA sense strand
caucaacaaagauacagaa

SEQ ID NO: 1224597 - RNA, 19 nt, Homo sapiens
  misc_RNA (1)...(19): siRNA sense strand
guuuacuacugaaccaauu

SEQ ID NO: 1224598 - RNA, 19 nt, Homo sapiens
  misc_RNA (1)...(19): siRNA sense strand
ccacagcuacaacaacaug

SEQ ID NO: 1224599 - RNA, 19 nt, Homo sapiens
  misc_RNA (1)...(19): siRNA sense strand
agauuccagucuucucuuu

SEQ ID NO: 1224600 - RNA, 19 nt, Homo sapiens
  misc_RNA (1)...(19): siRNA sense strand
gcagacagcaguccuucag

SEQ ID NO: 1224601 - RNA, 19 nt, Homo sapiens
  misc_RNA (1)...(19): siRNA sense strand
acucauggauggaggaagu

SEQ ID NO: 1224602 - RNA, 19 nt, Homo sapiens
  misc_RNA (1)...(19): siRNA sense strand
acaacauguaccuguauua

SEQ ID NO: 1224603 - RNA, 19 nt, Homo sapiens
  misc_RNA (1)...(19): siRNA sense strand
gucagaauuuguugcuaau

SEQ ID NO: 1224604 - RNA, 19 nt, Homo sapiens
  misc_RNA (1)...(19): siRNA sense strand
ugaaguuaacccugucuga

SEQ ID NO: 1224605 - RNA, 19 nt, Homo sapiens
  misc_RNA (1)...(19): siRNA sense strand
aacaacauguaccuguauu

SEQ ID NO: 1224606 - RNA, 19 nt, Homo sapiens
  misc_RNA (1)...(19): siRNA sense strand
ccugcuaggagucuguuua

SEQ ID NO: 1224607 - RNA, 19 nt, Homo sapiens
  misc_RNA (1)...(19): siRNA sense strand
gacagcaguccuucagaau

SEQ ID NO: 1224608 - RNA, 19 nt, Homo sapiens
  misc_RNA (1)...(19): siRNA sense strand
auuccagucuucucuuuga

SEQ ID NO: 1224609 - RNA, 19 nt, Homo sapiens
  misc_RNA (1)...(19): siRNA sense strand
gcaguccuucagaauuaaa

SEQ ID NO: 1224610 - RNA, 19 nt, Homo sapiens
  misc_RNA (1)...(19): siRNA sense strand
acagcaguccuucagaauu

SEQ ID NO: 1224611 - RNA, 19 nt, Homo sapiens
  misc_RNA (1)...(19): siRNA sense strand
acaaagauacagaaaccau

SEQ ID NO: 1224612 - RNA, 19 nt, Homo sapiens
  misc_RNA (1)...(19): siRNA sense strand
gugccauccuucaucaaca

SEQ ID NO: 1224613 - RNA, 19 nt, Homo sapiens
  misc_RNA (1)...(19): siRNA sense strand
ugccauccuucaucaacaa

SEQ ID NO: 1224614 - RNA, 19 nt, Homo sapiens
  misc_RNA (1)...(19): siRNA sense strand
gccacaggagcugaaguua

SEQ ID NO: 1224615 - RNA, 19 nt, Homo sapiens
  misc_RNA (1)...(19): siRNA sense strand
ggauacucauucucgaaaa

SEQ ID NO: 1224616 - RNA, 19 nt, Homo sapiens
  misc_RNA (1)...(19): siRNA sense strand
caugagcaccuggagcaaa

SEQ ID NO: 1224617 - RNA, 19 nt, Homo sapiens
  misc_RNA (1)...(19): siRNA sense strand
aaguuaacccugucugaga

SEQ ID NO: 1224618 - RNA, 19 nt, Homo sapiens
  misc_RNA (1)...(19): siRNA sense strand
aggagucuguuuacuacug

SEQ ID NO: 1224619 - RNA, 19 nt, Homo sapiens
  misc_RNA (1)...(19): siRNA sense strand
uggauacucauucucgaaa

SEQ ID NO: 1224620 - RNA, 19 nt, Homo sapiens
  misc_RNA (1)...(19): siRNA sense strand
gaagcugucccgccuggaa

SEQ ID NO: 1224621 - RNA, 19 nt, Homo sapiens
  misc_RNA (1)...(19): siRNA sense strand
cguccucccuggaacagaa

SEQ ID NO: 1224622 - RNA, 19 nt, Homo sapiens
  misc_RNA (1)...(19): siRNA sense strand
gaccucaaccuggauauca

SEQ ID NO: 1224623 - RNA, 19 nt, Homo sapiens
  misc_RNA (1)...(19): siRNA sense strand
caaagcugaagcaggagaa

SEQ ID NO: 1224624 - RNA, 19 nt, Homo sapiens
  misc_RNA (1)...(19): siRNA sense strand
gaagcugucccgccuggaa

SEQ ID NO: 1224625 - RNA, 19 nt, Homo sapiens
  misc_RNA (1)...(19): siRNA sense strand
cguccucccuggaacagaa

SEQ ID NO: 1224626 - RNA, 19 nt, Homo sapiens
  misc_RNA (1)...(19): siRNA sense strand
gaccucaaccuggauauca

SEQ ID NO: 1224627 - RNA, 19 nt, Homo sapiens
  misc_RNA (1)...(19): siRNA sense strand
caaagcugaagcaggagaa

SEQ ID NO: 1224628 - RNA, 19 nt, Homo sapiens
  misc_RNA (1)...(19): siRNA sense strand
ccucuccgcggucuucuuu

SEQ ID NO: 1224629 - RNA, 19 nt, Homo sapiens
  misc_RNA (1)...(19): siRNA sense strand
aaaauacgcucccuuuaaa

SEQ ID NO: 1224630 - RNA, 19 nt, Homo sapiens
  misc_RNA (1)...(19): siRNA sense strand
uuuaaacgguggauugaaa

SEQ ID NO: 1224631 - RNA, 19 nt, Homo sapiens
  misc_RNA (1)...(19): siRNA sense strand
ccucuccgcggucuucuuu

SEQ ID NO: 1224632 - RNA, 19 nt, Homo sapiens
  misc_RNA (1)...(19): siRNA sense strand
ggauugaaaaugacuuuga

SEQ ID NO: 1224633 - RNA, 19 nt, Homo sapiens
  misc_RNA (1)...(19): siRNA sense strand
ccucuccgcggucuucuuu

SEQ ID NO: 1224634 - RNA, 19 nt, Homo sapiens
  misc_RNA (1)...(19): siRNA sense strand
aaaauacgcucccuuuaaa

SEQ ID NO: 1224635 - RNA, 19 nt, Homo sapiens
  misc_RNA (1)...(19): siRNA sense strand
uuuaaacgguggauugaaa

SEQ ID NO: 1224636 - RNA, 19 nt, Homo sapiens
  misc_RNA (1)...(19): siRNA sense strand
ccucuccgcggucuucuuu

SEQ ID NO: 1224637 - RNA, 19 nt, Homo sapiens
  misc_RNA (1)...(19): siRNA sense strand
ggauugaaaaugacuuuga

SEQ ID NO: 1224638 - RNA, 19 nt, Homo sapiens
  misc_RNA (1)...(19): siRNA sense strand
ggacauugcuucuacaaau

SEQ ID NO: 1224639 - RNA, 19 nt, Homo sapiens
  misc_RNA (1)...(19): siRNA sense strand
gagugaaucuggacguuua

SEQ ID NO: 1224640 - RNA, 19 nt, Homo sapiens
  misc_RNA (1)...(19): siRNA sense strand
ugacaugucugaaauagaa

SEQ ID NO: 1224641 - RNA, 19 nt, Homo sapiens
  misc_RNA (1)...(19): siRNA sense strand
gaggaaagcguuuauugua

SEQ ID NO: 1224642 - RNA, 19 nt, Homo sapiens
  misc_RNA (1)...(19): siRNA sense strand
ggaaagcguuuauuguaga

SEQ ID NO: 1224643 - RNA, 19 nt, Homo sapiens
  misc_RNA (1)...(19): siRNA sense strand
gaaccauccuaauauugua

SEQ ID NO: 1224644 - RNA, 19 nt, Homo sapiens
  misc_RNA (1)...(19): siRNA sense strand
agacacacaugaccaauaa

SEQ ID NO: 1224645 - RNA, 19 nt, Homo sapiens
  misc_RNA (1)...(19): siRNA sense strand
gacauugcuucuacaaaua

SEQ ID NO: 1224646 - RNA, 19 nt, Homo sapiens
  misc_RNA (1)...(19): siRNA sense strand
gcaaugaguugguguuuac

SEQ ID NO: 1224647 - RNA, 19 nt, Homo sapiens
  misc_RNA (1)...(19): siRNA sense strand
ggaagagguuguuggaaga

SEQ ID NO: 1224648 - RNA, 19 nt, Homo sapiens
  misc_RNA (1)...(19): siRNA sense strand
gaaaaggaccagcaaaaua

SEQ ID NO: 1224649 - RNA, 19 nt, Homo sapiens
  misc_RNA (1)...(19): siRNA sense strand
gcaaguuccugccacaaau

SEQ ID NO: 1224650 - RNA, 19 nt, Homo sapiens
  misc_RNA (1)...(19): siRNA sense strand
aaauacaucucgccuggua

SEQ ID NO: 1224651 - RNA, 19 nt, Homo sapiens
  misc_RNA (1)...(19): siRNA sense strand
gaaccauugccauauuaua

SEQ ID NO: 1224652 - RNA, 19 nt, Homo sapiens
  misc_RNA (1)...(19): siRNA sense strand
gaaacccuuugaugagauu

SEQ ID NO: 1224653 - RNA, 19 nt, Homo sapiens
  misc_RNA (1)...(19): siRNA sense strand
ggaguuguuugcaaagcua

SEQ ID NO: 1224654 - RNA, 19 nt, Homo sapiens
  misc_RNA (1)...(19): siRNA sense strand
cagaugagccauuacagua

SEQ ID NO: 1224655 - RNA, 19 nt, Homo sapiens
  misc_RNA (1)...(19): siRNA sense strand
aauaaugacucacuugaug

SEQ ID NO: 1224656 - RNA, 19 nt, Homo sapiens
  misc_RNA (1)...(19): siRNA sense strand
gcugaaccauugccauauu

SEQ ID NO: 1224657 - RNA, 19 nt, Homo sapiens
  misc_RNA (1)...(19): siRNA sense strand
gagaggaaagcguuuauug

SEQ ID NO: 1224658 - RNA, 19 nt, Homo sapiens
  misc_RNA (1)...(19): siRNA sense strand
gguaguaauuacagugaaa

SEQ ID NO: 1224659 - RNA, 19 nt, Homo sapiens
  misc_RNA (1)...(19): siRNA sense strand
ccugaaaccaccaaacuua

SEQ ID NO: 1224660 - RNA, 19 nt, Homo sapiens
  misc_RNA (1)...(19): siRNA sense strand
gaggaugagugcugacaug

SEQ ID NO: 1224661 - RNA, 19 nt, Homo sapiens
  misc_RNA (1)...(19): siRNA sense strand
gaugagugcugacaugucu

SEQ ID NO: 1224662 - RNA, 19 nt, Homo sapiens
  misc_RNA (1)...(19): siRNA sense strand
caugugggcuguucauaau

SEQ ID NO: 1224663 - RNA, 19 nt, Homo sapiens
  misc_RNA (1)...(19): siRNA sense strand
guagauccauccaagacuu

SEQ ID NO: 1224664 - RNA, 19 nt, Homo sapiens
  misc_RNA (1)...(19): siRNA sense strand
ggaaacccuuugaugagau

SEQ ID NO: 1224665 - RNA, 19 nt, Homo sapiens
  misc_RNA (1)...(19): siRNA sense strand
uugaagagaucgacuacaa

SEQ ID NO: 1224666 - RNA, 19 nt, Homo sapiens
  misc_RNA (1)...(19): siRNA sense strand
cugaaccauugccauauua

SEQ ID NO: 1224667 - RNA, 19 nt, Homo sapiens
  misc_RNA (1)...(19): siRNA sense strand
ggaggaaauugugaaaaua

SEQ ID NO: 1224668 - RNA, 19 nt, Homo sapiens
  misc_RNA (1)...(19): siRNA sense strand
gugcugacaugucugaaau

SEQ ID NO: 1224669 - RNA, 19 nt, Homo sapiens
  misc_RNA (1)...(19): siRNA sense strand
gaugagccauuacaguauc

SEQ ID NO: 1224670 - RNA, 19 nt, Homo sapiens
  misc_RNA (1)...(19): siRNA sense strand
cccaauggcuuaucuuaca

SEQ ID NO: 1224671 - RNA, 19 nt, Homo sapiens
  misc_RNA (1)...(19): siRNA sense strand
acacuaauauggagcaagu

SEQ ID NO: 1224672 - RNA, 19 nt, Homo sapiens
  misc_RNA (1)...(19): siRNA sense strand
ccugaugauuccacagaua

SEQ ID NO: 1224673 - RNA, 19 nt, Homo sapiens
  misc_RNA (1)...(19): siRNA sense strand
gcaaagcaacagagugaau

SEQ ID NO: 1224674 - RNA, 19 nt, Homo sapiens
  misc_RNA (1)...(19): siRNA sense strand
cgugugaaccauccuaaua

SEQ ID NO: 1224675 - RNA, 19 nt, Homo sapiens
  misc_RNA (1)...(19): siRNA sense strand
gaaagcguuuauuguagag

SEQ ID NO: 1224676 - RNA, 19 nt, Homo sapiens
  misc_RNA (1)...(19): siRNA sense strand
gcaguuaucccgugugaac

SEQ ID NO: 1224677 - RNA, 19 nt, Homo sapiens
  misc_RNA (1)...(19): siRNA sense strand
gcugacaugucugaaauag

SEQ ID NO: 1224678 - RNA, 19 nt, Homo sapiens
  misc_RNA (1)...(19): siRNA sense strand
gugcugaaccauugccaua

SEQ ID NO: 1224679 - RNA, 19 nt, Homo sapiens
  misc_RNA (1)...(19): siRNA sense strand
ugugaaccauccuaauauu

SEQ ID NO: 1224680 - RNA, 19 nt, Homo sapiens
  misc_RNA (1)...(19): siRNA sense strand
cggaaacccuuugaugaga

SEQ ID NO: 1224681 - RNA, 19 nt, Homo sapiens
  misc_RNA (1)...(19): siRNA sense strand
aagaggagccuuuggaguu

SEQ ID NO: 1224682 - RNA, 19 nt, Homo sapiens
  misc_RNA (1)...(19): siRNA sense strand
ggacagccaagacguagau

SEQ ID NO: 1224683 - RNA, 19 nt, Homo sapiens
  misc_RNA (1)...(19): siRNA sense strand
aggagcagaugagccauua

SEQ ID NO: 1224684 - RNA, 19 nt, Homo sapiens
  misc_RNA (1)...(19): siRNA sense strand
gaguugguguuuacagugu

SEQ ID NO: 1224685 - RNA, 19 nt, Homo sapiens
  misc_RNA (1)...(19): siRNA sense strand
gaaacgacaaggcacuuca

SEQ ID NO: 1224686 - RNA, 19 nt, Homo sapiens
  misc_RNA (1)...(19): siRNA sense strand
acaguauccuugucaguau

SEQ ID NO: 1224687 - RNA, 19 nt, Homo sapiens
  misc_RNA (1)...(19): siRNA sense strand
cgcaaugaguugguguuua

SEQ ID NO: 1224688 - RNA, 19 nt, Homo sapiens
  misc_RNA (1)...(19): siRNA sense strand
gcagaugagccauuacagu

SEQ ID NO: 1224689 - RNA, 19 nt, Homo sapiens
  misc_RNA (1)...(19): siRNA sense strand
gagcagaugagccauuaca

SEQ ID NO: 1224690 - RNA, 19 nt, Homo sapiens
  misc_RNA (1)...(19): siRNA sense strand
uacacuggaucaccaacua

SEQ ID NO: 1224691 - RNA, 19 nt, Homo sapiens
  misc_RNA (1)...(19): siRNA sense strand
gaagucagcagcagaaacg

SEQ ID NO: 1224692 - RNA, 19 nt, Homo sapiens
  misc_RNA (1)...(19): siRNA sense strand
caacuagaggucaucagaa

SEQ ID NO: 1224693 - RNA, 19 nt, Homo sapiens
  misc_RNA (1)...(19): siRNA sense strand
aaagcuaaguggagagcaa

SEQ ID NO: 1224694 - RNA, 19 nt, Homo sapiens
  misc_RNA (1)...(19): siRNA sense strand
ggagcaguguggagagcuu

SEQ ID NO: 1224695 - RNA, 19 nt, Homo sapiens
  misc_RNA (1)...(19): siRNA sense strand
cagacacacaugaccaaua

SEQ ID NO: 1224696 - RNA, 19 nt, Homo sapiens
  misc_RNA (1)...(19): siRNA sense strand
cuacaaauacgaguaacaa

SEQ ID NO: 1224697 - RNA, 19 nt, Homo sapiens
  misc_RNA (1)...(19): siRNA sense strand
gcccuucaauggaggaaau

SEQ ID NO: 1224698 - RNA, 19 nt, Homo sapiens
  misc_RNA (1)...(19): siRNA sense strand
aaauuuaccuaagcccauu

SEQ ID NO: 1224699 - RNA, 19 nt, Homo sapiens
  misc_RNA (1)...(19): siRNA sense strand
cgaaucaugugggcuguuc

SEQ ID NO: 1224700 - RNA, 19 nt, Homo sapiens
  misc_RNA (1)...(19): siRNA sense strand
uggcuuaucuucacagcau

SEQ ID NO: 1224701 - RNA, 19 nt, Homo sapiens
  misc_RNA (1)...(19): siRNA sense strand
gauaccaauggaucagaua

SEQ ID NO: 1224702 - RNA, 19 nt, Homo sapiens
  misc_RNA (1)...(19): siRNA sense strand
cccagugucagaaugauua

SEQ ID NO: 1224703 - RNA, 19 nt, Homo sapiens
  misc_RNA (1)...(19): siRNA sense strand
ucaugugggcuguucauaa

SEQ ID NO: 1224704 - RNA, 19 nt, Homo sapiens
  misc_RNA (1)...(19): siRNA sense strand
gaaaccaccaaacuuacug

SEQ ID NO: 1224705 - RNA, 19 nt, Homo sapiens
  misc_RNA (1)...(19): siRNA sense strand
gaaaauaaugacucacuug

SEQ ID NO: 1224706 - RNA, 19 nt, Homo sapiens
  misc_RNA (1)...(19): siRNA sense strand
ugccacaaaugauacuauu

SEQ ID NO: 1224707 - RNA, 19 nt, Homo sapiens
  misc_RNA (1)...(19): siRNA sense strand
cggcaguuaucccguguga

SEQ ID NO: 1224708 - RNA, 19 nt, Homo sapiens
  misc_RNA (1)...(19): siRNA sense strand
gccacaaaugauacuauua

SEQ ID NO: 1224709 - RNA, 19 nt, Homo sapiens
  misc_RNA (1)...(19): siRNA sense strand
agaggagccuuuggaguug

SEQ ID NO: 1224710 - RNA, 19 nt, Homo sapiens
  misc_RNA (1)...(19): siRNA sense strand
aggaaagcguuuauuguag

SEQ ID NO: 1224711 - RNA, 19 nt, Homo sapiens
  misc_RNA (1)...(19): siRNA sense strand
ggaguggcuuaucuucaca

SEQ ID NO: 1224712 - RNA, 19 nt, Homo sapiens
  misc_RNA (1)...(19): siRNA sense strand
ugaaccauccuaauauugu

SEQ ID NO: 1224713 - RNA, 19 nt, Homo sapiens
  misc_RNA (1)...(19): siRNA sense strand
uauggagccugcuugaauc

SEQ ID NO: 1224714 - RNA, 19 nt, Homo sapiens
  misc_RNA (1)...(19): siRNA sense strand
guuccugccacaaaugaua

SEQ ID NO: 1224715 - RNA, 19 nt, Homo sapiens
  misc_RNA (1)...(19): siRNA sense strand
gguacucgaccaccacuga

SEQ ID NO: 1224716 - RNA, 19 nt, Homo sapiens
  misc_RNA (1)...(19): siRNA sense strand
aauccagugugucuuguga

SEQ ID NO: 1224717 - RNA, 19 nt, Homo sapiens
  misc_RNA (1)...(19): siRNA sense strand
ucauggacauugcuucuac

SEQ ID NO: 1224718 - RNA, 19 nt, Homo sapiens
  misc_RNA (1)...(19): siRNA sense strand
uacaguauccuugucagua

SEQ ID NO: 1224719 - RNA, 19 nt, Homo sapiens
  misc_RNA (1)...(19): siRNA sense strand
gucggaaacccuuugauga

SEQ ID NO: 1224720 - RNA, 19 nt, Homo sapiens
  misc_RNA (1)...(19): siRNA sense strand
gacauucagacacacauga

SEQ ID NO: 1224721 - RNA, 19 nt, Homo sapiens
  misc_RNA (1)...(19): siRNA sense strand
cagugugucuugugaugga

SEQ ID NO: 1224722 - RNA, 19 nt, Homo sapiens
  misc_RNA (1)...(19): siRNA sense strand
ucagaagucagcagcagaa

SEQ ID NO: 1224723 - RNA, 19 nt, Homo sapiens
  misc_RNA (1)...(19): siRNA sense strand
aggcaaagcaacagaguga

SEQ ID NO: 1224724 - RNA, 19 nt, Homo sapiens
  misc_RNA (1)...(19): siRNA sense strand
gcgcuuagaaucaaaauug

SEQ ID NO: 1224725 - RNA, 19 nt, Homo sapiens
  misc_RNA (1)...(19): siRNA sense strand
caacccaaagcgcuaauuc

SEQ ID NO: 1224726 - RNA, 19 nt, Homo sapiens
  misc_RNA (1)...(19): siRNA sense strand
aaagugaaucugagaggaa

SEQ ID NO: 1224727 - RNA, 19 nt, Homo sapiens
  misc_RNA (1)...(19): siRNA sense strand
uguagagcuucggcaguua

SEQ ID NO: 1224728 - RNA, 19 nt, Homo sapiens
  misc_RNA (1)...(19): siRNA sense strand
gcucauucauggacauugc

SEQ ID NO: 1224729 - RNA, 19 nt, Homo sapiens
  misc_RNA (1)...(19): siRNA sense strand
gugugaaccauccuaauau

SEQ ID NO: 1224730 - RNA, 19 nt, Homo sapiens
  misc_RNA (1)...(19): siRNA sense strand
caguauccuugucaguauu

SEQ ID NO: 1224731 - RNA, 19 nt, Homo sapiens
  misc_RNA (1)...(19): siRNA sense strand
ccaaggaguggcuuaucuu

SEQ ID NO: 1224732 - RNA, 19 nt, Homo sapiens
  misc_RNA (1)...(19): siRNA sense strand
gugaaccauccuaauauug

SEQ ID NO: 1224733 - RNA, 19 nt, Homo sapiens
  misc_RNA (1)...(19): siRNA sense strand
gaucgagguggaagagguu

SEQ ID NO: 1224734 - RNA, 19 nt, Homo sapiens
  misc_RNA (1)...(19): siRNA sense strand
uuauggagccugcuugaau

SEQ ID NO: 1224735 - RNA, 19 nt, Homo sapiens
  misc_RNA (1)...(19): siRNA sense strand
aagugaaucugagaggaaa

SEQ ID NO: 1224736 - RNA, 19 nt, Homo sapiens
  misc_RNA (1)...(19): siRNA sense strand
acaacuagaggucaucaga

SEQ ID NO: 1224737 - RNA, 19 nt, Homo sapiens
  misc_RNA (1)...(19): siRNA sense strand
caaagcaacagagugaauc

SEQ ID NO: 1224738 - RNA, 19 nt, Homo sapiens
  misc_RNA (1)...(19): siRNA sense strand
ggacauugcuucuacaaau

SEQ ID NO: 1224739 - RNA, 19 nt, Homo sapiens
  misc_RNA (1)...(19): siRNA sense strand
gagugaaucuggacguuua

SEQ ID NO: 1224740 - RNA, 19 nt, Homo sapiens
  misc_RNA (1)...(19): siRNA sense strand
ugacaugucugaaauagaa

SEQ ID NO: 1224741 - RNA, 19 nt, Homo sapiens
  misc_RNA (1)...(19): siRNA sense strand
gaggaaagcguuuauugua

SEQ ID NO: 1224742 - RNA, 19 nt, Homo sapiens
  misc_RNA (1)...(19): siRNA sense strand
ggaaagcguuuauuguaga

SEQ ID NO: 1224743 - RNA, 19 nt, Homo sapiens
  misc_RNA (1)...(19): siRNA sense strand
gaaccauccuaauauugua

SEQ ID NO: 1224744 - RNA, 19 nt, Homo sapiens
  misc_RNA (1)...(19): siRNA sense strand
agacacacaugaccaauaa

SEQ ID NO: 1224745 - RNA, 19 nt, Homo sapiens
  misc_RNA (1)...(19): siRNA sense strand
gacauugcuucuacaaaua

SEQ ID NO: 1224746 - RNA, 19 nt, Homo sapiens
  misc_RNA (1)...(19): siRNA sense strand
gcaaugaguugguguuuac

SEQ ID NO: 1224747 - RNA, 19 nt, Homo sapiens
  misc_RNA (1)...(19): siRNA sense strand
ggaagagguuguuggaaga

SEQ ID NO: 1224748 - RNA, 19 nt, Homo sapiens
  misc_RNA (1)...(19): siRNA sense strand
gaaaaggaccagcaaaaua

SEQ ID NO: 1224749 - RNA, 19 nt, Homo sapiens
  misc_RNA (1)...(19): siRNA sense strand
gcaaguuccugccacaaau

SEQ ID NO: 1224750 - RNA, 19 nt, Homo sapiens
  misc_RNA (1)...(19): siRNA sense strand
aaauacaucucgccuggua

SEQ ID NO: 1224751 - RNA, 19 nt, Homo sapiens
  misc_RNA (1)...(19): siRNA sense strand
gaaccauugccauauuaua

SEQ ID NO: 1224752 - RNA, 19 nt, Homo sapiens
  misc_RNA (1)...(19): siRNA sense strand
gaaacccuuugaugagauu

SEQ ID NO: 1224753 - RNA, 19 nt, Homo sapiens
  misc_RNA (1)...(19): siRNA sense strand
ggaguuguuugcaaagcua

SEQ ID NO: 1224754 - RNA, 19 nt, Homo sapiens
  misc_RNA (1)...(19): siRNA sense strand
cagaugagccauuacagua

SEQ ID NO: 1224755 - RNA, 19 nt, Homo sapiens
  misc_RNA (1)...(19): siRNA sense strand
aauaaugacucacuugaug

SEQ ID NO: 1224756 - RNA, 19 nt, Homo sapiens
  misc_RNA (1)...(19): siRNA sense strand
gcugaaccauugccauauu

SEQ ID NO: 1224757 - RNA, 19 nt, Homo sapiens
  misc_RNA (1)...(19): siRNA sense strand
gagaggaaagcguuuauug

SEQ ID NO: 1224758 - RNA, 19 nt, Homo sapiens
  misc_RNA (1)...(19): siRNA sense strand
gguaguaauuacagugaaa

SEQ ID NO: 1224759 - RNA, 19 nt, Homo sapiens
  misc_RNA (1)...(19): siRNA sense strand
ccugaaaccaccaaacuua

SEQ ID NO: 1224760 - RNA, 19 nt, Homo sapiens
  misc_RNA (1)...(19): siRNA sense strand
gaggaugagugcugacaug

SEQ ID NO: 1224761 - RNA, 19 nt, Homo sapiens
  misc_RNA (1)...(19): siRNA sense strand
gaugagugcugacaugucu

SEQ ID NO: 1224762 - RNA, 19 nt, Homo sapiens
  misc_RNA (1)...(19): siRNA sense strand
caugugggcuguucauaau

SEQ ID NO: 1224763 - RNA, 19 nt, Homo sapiens
  misc_RNA (1)...(19): siRNA sense strand
guagauccauccaagacuu

SEQ ID NO: 1224764 - RNA, 19 nt, Homo sapiens
  misc_RNA (1)...(19): siRNA sense strand
ggaaacccuuugaugagau

SEQ ID NO: 1224765 - RNA, 19 nt, Homo sapiens
  misc_RNA (1)...(19): siRNA sense strand
uugaagagaucgacuacaa

SEQ ID NO: 1224766 - RNA, 19 nt, Homo sapiens
  misc_RNA (1)...(19): siRNA sense strand
cugaaccauugccauauua

SEQ ID NO: 1224767 - RNA, 19 nt, Homo sapiens
  misc_RNA (1)...(19): siRNA sense strand
ggaggaaauugugaaaaua

SEQ ID NO: 1224768 - RNA, 19 nt, Homo sapiens
  misc_RNA (1)...(19): siRNA sense strand
gugcugacaugucugaaau

SEQ ID NO: 1224769 - RNA, 19 nt, Homo sapiens
  misc_RNA (1)...(19): siRNA sense strand
gaugagccauuacaguauc

SEQ ID NO: 1224770 - RNA, 19 nt, Homo sapiens
  misc_RNA (1)...(19): siRNA sense strand
cccaauggcuuaucuuaca

SEQ ID NO: 1224771 - RNA, 19 nt, Homo sapiens
  misc_RNA (1)...(19): siRNA sense strand
acacuaauauggagcaagu

SEQ ID NO: 1224772 - RNA, 19 nt, Homo sapiens
  misc_RNA (1)...(19): siRNA sense strand
ccugaugauuccacagaua

SEQ ID NO: 1224773 - RNA, 19 nt, Homo sapiens
  misc_RNA (1)...(19): siRNA sense strand
gcaaagcaacagagugaau

SEQ ID NO: 1224774 - RNA, 19 nt, Homo sapiens
  misc_RNA (1)...(19): siRNA sense strand
cgugugaaccauccuaaua

SEQ ID NO: 1224775 - RNA, 19 nt, Homo sapiens
  misc_RNA (1)...(19): siRNA sense strand
gaaagcguuuauuguagag

SEQ ID NO: 1224776 - RNA, 19 nt, Homo sapiens
  misc_RNA (1)...(19): siRNA sense strand
gcaguuaucccgugugaac

SEQ ID NO: 1224777 - RNA, 19 nt, Homo sapiens
  misc_RNA (1)...(19): siRNA sense strand
gcugacaugucugaaauag

SEQ ID NO: 1224778 - RNA, 19 nt, Homo sapiens
  misc_RNA (1)...(19): siRNA sense strand
gugcugaaccauugccaua

SEQ ID NO: 1224779 - RNA, 19 nt, Homo sapiens
  misc_RNA (1)...(19): siRNA sense strand
ugugaaccauccuaauauu

SEQ ID NO: 1224780 - RNA, 19 nt, Homo sapiens
  misc_RNA (1)...(19): siRNA sense strand
cggaaacccuuugaugaga

SEQ ID NO: 1224781 - RNA, 19 nt, Homo sapiens
  misc_RNA (1)...(19): siRNA sense strand
aagaggagccuuuggaguu

SEQ ID NO: 1224782 - RNA, 19 nt, Homo sapiens
  misc_RNA (1)...(19): siRNA sense strand
ggacagccaagacguagau

SEQ ID NO: 1224783 - RNA, 19 nt, Homo sapiens
  misc_RNA (1)...(19): siRNA sense strand
aggagcagaugagccauua

SEQ ID NO: 1224784 - RNA, 19 nt, Homo sapiens
  misc_RNA (1)...(19): siRNA sense strand
gaguugguguuuacagugu

SEQ ID NO: 1224785 - RNA, 19 nt, Homo sapiens
  misc_RNA (1)...(19): siRNA sense strand
gaaacgacaaggcacuuca

SEQ ID NO: 1224786 - RNA, 19 nt, Homo sapiens
  misc_RNA (1)...(19): siRNA sense strand
acaguauccuugucaguau

SEQ ID NO: 1224787 - RNA, 19 nt, Homo sapiens
  misc_RNA (1)...(19): siRNA sense strand
cgcaaugaguugguguuua

SEQ ID NO: 1224788 - RNA, 19 nt, Homo sapiens
  misc_RNA (1)...(19): siRNA sense strand
gcagaugagccauuacagu

SEQ ID NO: 1224789 - RNA, 19 nt, Homo sapiens
  misc_RNA (1)...(19): siRNA sense strand
gagcagaugagccauuaca

SEQ ID NO: 1224790 - RNA, 19 nt, Homo sapiens
  misc_RNA (1)...(19): siRNA sense strand
uacacuggaucaccaacua

SEQ ID NO: 1224791 - RNA, 19 nt, Homo sapiens
  misc_RNA (1)...(19): siRNA sense strand
gaagucagcagcagaaacg

SEQ ID NO: 1224792 - RNA, 19 nt, Homo sapiens
  misc_RNA (1)...(19): siRNA sense strand
caacuagaggucaucagaa

SEQ ID NO: 1224793 - RNA, 19 nt, Homo sapiens
  misc_RNA (1)...(19): siRNA sense strand
aaagcuaaguggagagcaa

SEQ ID NO: 1224794 - RNA, 19 nt, Homo sapiens
  misc_RNA (1)...(19): siRNA sense strand
ggagcaguguggagagcuu

SEQ ID NO: 1224795 - RNA, 19 nt, Homo sapiens
  misc_RNA (1)...(19): siRNA sense strand
cagacacacaugaccaaua

SEQ ID NO: 1224796 - RNA, 19 nt, Homo sapiens
  misc_RNA (1)...(19): siRNA sense strand
cuacaaauacgaguaacaa

SEQ ID NO: 1224797 - RNA, 19 nt, Homo sapiens
  misc_RNA (1)...(19): siRNA sense strand
gcccuucaauggaggaaau

SEQ ID NO: 1224798 - RNA, 19 nt, Homo sapiens
  misc_RNA (1)...(19): siRNA sense strand
aaauuuaccuaagcccauu

SEQ ID NO: 1224799 - RNA, 19 nt, Homo sapiens
  misc_RNA (1)...(19): siRNA sense strand
cgaaucaugugggcuguuc

SEQ ID NO: 1224800 - RNA, 19 nt, Homo sapiens
  misc_RNA (1)...(19): siRNA sense strand
uggcuuaucuucacagcau

SEQ ID NO: 1224801 - RNA, 19 nt, Homo sapiens
  misc_RNA (1)...(19): siRNA sense strand
gauaccaauggaucagaua

SEQ ID NO: 1224802 - RNA, 19 nt, Homo sapiens
  misc_RNA (1)...(19): siRNA sense strand
cccagugucagaaugauua

SEQ ID NO: 1224803 - RNA, 19 nt, Homo sapiens
  misc_RNA (1)...(19): siRNA sense strand
ucaugugggcuguucauaa

SEQ ID NO: 1224804 - RNA, 19 nt, Homo sapiens
  misc_RNA (1)...(19): siRNA sense strand
gaaaccaccaaacuuacug

SEQ ID NO: 1224805 - RNA, 19 nt, Homo sapiens
  misc_RNA (1)...(19): siRNA sense strand
gaaaauaaugacucacuug

SEQ ID NO: 1224806 - RNA, 19 nt, Homo sapiens
  misc_RNA (1)...(19): siRNA sense strand
ugccacaaaugauacuauu

SEQ ID NO: 1224807 - RNA, 19 nt, Homo sapiens
  misc_RNA (1)...(19): siRNA sense strand
cggcaguuaucccguguga

SEQ ID NO: 1224808 - RNA, 19 nt, Homo sapiens
  misc_RNA (1)...(19): siRNA sense strand
gccacaaaugauacuauua

SEQ ID NO: 1224809 - RNA, 19 nt, Homo sapiens
  misc_RNA (1)...(19): siRNA sense strand
agaggagccuuuggaguug

SEQ ID NO: 1224810 - RNA, 19 nt, Homo sapiens
  misc_RNA (1)...(19): siRNA sense strand
aggaaagcguuuauuguag

SEQ ID NO: 1224811 - RNA, 19 nt, Homo sapiens
  misc_RNA (1)...(19): siRNA sense strand
ggaguggcuuaucuucaca

SEQ ID NO: 1224812 - RNA, 19 nt, Homo sapiens
  misc_RNA (1)...(19): siRNA sense strand
ugaaccauccuaauauugu

SEQ ID NO: 1224813 - RNA, 19 nt, Homo sapiens
  misc_RNA (1)...(19): siRNA sense strand
uauggagccugcuugaauc

SEQ ID NO: 1224814 - RNA, 19 nt, Homo sapiens
  misc_RNA (1)...(19): siRNA sense strand
guuccugccacaaaugaua

SEQ ID NO: 1224815 - RNA, 19 nt, Homo sapiens
  misc_RNA (1)...(19): siRNA sense strand
gguacucgaccaccacuga

SEQ ID NO: 1224816 - RNA, 19 nt, Homo sapiens
  misc_RNA (1)...(19): siRNA sense strand
aauccagugugucuuguga

SEQ ID NO: 1224817 - RNA, 19 nt, Homo sapiens
  misc_RNA (1)...(19): siRNA sense strand
ucauggacauugcuucuac

SEQ ID NO: 1224818 - RNA, 19 nt, Homo sapiens
  misc_RNA (1)...(19): siRNA sense strand
uacaguauccuugucagua

SEQ ID NO: 1224819 - RNA, 19 nt, Homo sapiens
  misc_RNA (1)...(19): siRNA sense strand
gucggaaacccuuugauga

SEQ ID NO: 1224820 - RNA, 19 nt, Homo sapiens
  misc_RNA (1)...(19): siRNA sense strand
gacauucagacacacauga

SEQ ID NO: 1224821 - RNA, 19 nt, Homo sapiens
  misc_RNA (1)...(19): siRNA sense strand
cagugugucuugugaugga

SEQ ID NO: 1224822 - RNA, 19 nt, Homo sapiens
  misc_RNA (1)...(19): siRNA sense strand
ucagaagucagcagcagaa

SEQ ID NO: 1224823 - RNA, 19 nt, Homo sapiens
  misc_RNA (1)...(19): siRNA sense strand
aggcaaagcaacagaguga

SEQ ID NO: 1224824 - RNA, 19 nt, Homo sapiens
  misc_RNA (1)...(19): siRNA sense strand
gcgcuuagaaucaaaauug

SEQ ID NO: 1224825 - RNA, 19 nt, Homo sapiens
  misc_RNA (1)...(19): siRNA sense strand
caacccaaagcgcuaauuc

SEQ ID NO: 1224826 - RNA, 19 nt, Homo sapiens
  misc_RNA (1)...(19): siRNA sense strand
aaagugaaucugagaggaa

SEQ ID NO: 1224827 - RNA, 19 nt, Homo sapiens
  misc_RNA (1)...(19): siRNA sense strand
uguagagcuucggcaguua

SEQ ID NO: 1224828 - RNA, 19 nt, Homo sapiens
  misc_RNA (1)...(19): siRNA sense strand
gcucauucauggacauugc

SEQ ID NO: 1224829 - RNA, 19 nt, Homo sapiens
  misc_RNA (1)...(19): siRNA sense strand
gugugaaccauccuaauau

SEQ ID NO: 1224830 - RNA, 19 nt, Homo sapiens
  misc_RNA (1)...(19): siRNA sense strand
caguauccuugucaguauu

SEQ ID NO: 1224831 - RNA, 19 nt, Homo sapiens
  misc_RNA (1)...(19): siRNA sense strand
ccaaggaguggcuuaucuu

SEQ ID NO: 1224832 - RNA, 19 nt, Homo sapiens
  misc_RNA (1)...(19): siRNA sense strand
gugaaccauccuaauauug

SEQ ID NO: 1224833 - RNA, 19 nt, Homo sapiens
  misc_RNA (1)...(19): siRNA sense strand
gaucgagguggaagagguu

SEQ ID NO: 1224834 - RNA, 19 nt, Homo sapiens
  misc_RNA (1)...(19): siRNA sense strand
uuauggagccugcuugaau

SEQ ID NO: 1224835 - RNA, 19 nt, Homo sapiens
  misc_RNA (1)...(19): siRNA sense strand
aagugaaucugagaggaaa

SEQ ID NO: 1224836 - RNA, 19 nt, Homo sapiens
  misc_RNA (1)...(19): siRNA sense strand
acaacuagaggucaucaga

SEQ ID NO: 1224837 - RNA, 19 nt, Homo sapiens
  misc_RNA (1)...(19): siRNA sense strand
caaagcaacagagugaauc

SEQ ID NO: 1224838 - RNA, 19 nt, Homo sapiens
  misc_RNA (1)...(19): siRNA sense strand
ggacauugcuucuacaaau

SEQ ID NO: 1224839 - RNA, 19 nt, Homo sapiens
  misc_RNA (1)...(19): siRNA sense strand
gagugaaucuggacguuua

SEQ ID NO: 1224840 - RNA, 19 nt, Homo sapiens
  misc_RNA (1)...(19): siRNA sense strand
ugacaugucugaaauagaa

SEQ ID NO: 1224841 - RNA, 19 nt, Homo sapiens
  misc_RNA (1)...(19): siRNA sense strand
gaggaaagcguuuauugua

SEQ ID NO: 1224842 - RNA, 19 nt, Homo sapiens
  misc_RNA (1)...(19): siRNA sense strand
ggaaagcguuuauuguaga

SEQ ID NO: 1224843 - RNA, 19 nt, Homo sapiens
  misc_RNA (1)...(19): siRNA sense strand
gaaccauccuaauauugua

SEQ ID NO: 1224844 - RNA, 19 nt, Homo sapiens
  misc_RNA (1)...(19): siRNA sense strand
agacacacaugaccaauaa

SEQ ID NO: 1224845 - RNA, 19 nt, Homo sapiens
  misc_RNA (1)...(19): siRNA sense strand
gacauugcuucuacaaaua

SEQ ID NO: 1224846 - RNA, 19 nt, Homo sapiens
  misc_RNA (1)...(19): siRNA sense strand
gcaaugaguugguguuuac

SEQ ID NO: 1224847 - RNA, 19 nt, Homo sapiens
  misc_RNA (1)...(19): siRNA sense strand
ggaagagguuguuggaaga

SEQ ID NO: 1224848 - RNA, 19 nt, Homo sapiens
  misc_RNA (1)...(19): siRNA sense strand
gcaaguuccugccacaaau

SEQ ID NO: 1224849 - RNA, 19 nt, Homo sapiens
  misc_RNA (1)...(19): siRNA sense strand
gaaccauugccauauuaua

SEQ ID NO: 1224850 - RNA, 19 nt, Homo sapiens
  misc_RNA (1)...(19): siRNA sense strand
gaaacccuuugaugagauu

SEQ ID NO: 1224851 - RNA, 19 nt, Homo sapiens
  misc_RNA (1)...(19): siRNA sense strand
ggaguuguuugcaaagcua

SEQ ID NO: 1224852 - RNA, 19 nt, Homo sapiens
  misc_RNA (1)...(19): siRNA sense strand
cagaugagccauuacagua

SEQ ID NO: 1224853 - RNA, 19 nt, Homo sapiens
  misc_RNA (1)...(19): siRNA sense strand
aauaaugacucacuugaug

SEQ ID NO: 1224854 - RNA, 19 nt, Homo sapiens
  misc_RNA (1)...(19): siRNA sense strand
gcugaaccauugccauauu

SEQ ID NO: 1224855 - RNA, 19 nt, Homo sapiens
  misc_RNA (1)...(19): siRNA sense strand
gagaggaaagcguuuauug

SEQ ID NO: 1224856 - RNA, 19 nt, Homo sapiens
  misc_RNA (1)...(19): siRNA sense strand
gguaguaauuacagugaaa

SEQ ID NO: 1224857 - RNA, 19 nt, Homo sapiens
  misc_RNA (1)...(19): siRNA sense strand
ccugaaaccaccaaacuua

SEQ ID NO: 1224858 - RNA, 19 nt, Homo sapiens
  misc_RNA (1)...(19): siRNA sense strand
gaggaugagugcugacaug

SEQ ID NO: 1224859 - RNA, 19 nt, Homo sapiens
  misc_RNA (1)...(19): siRNA sense strand
gaugagugcugacaugucu

SEQ ID NO: 1224860 - RNA, 19 nt, Homo sapiens
  misc_RNA (1)...(19): siRNA sense strand
caugugggcuguucauaau

SEQ ID NO: 1224861 - RNA, 19 nt, Homo sapiens
  misc_RNA (1)...(19): siRNA sense strand
guagauccauccaagacuu

SEQ ID NO: 1224862 - RNA, 19 nt, Homo sapiens
  misc_RNA (1)...(19): siRNA sense strand
ggaaacccuuugaugagau

SEQ ID NO: 1224863 - RNA, 19 nt, Homo sapiens
  misc_RNA (1)...(19): siRNA sense strand
uugaagagaucgacuacaa

SEQ ID NO: 1224864 - RNA, 19 nt, Homo sapiens
  misc_RNA (1)...(19): siRNA sense strand
cugaaccauugccauauua

SEQ ID NO: 1224865 - RNA, 19 nt, Homo sapiens
  misc_RNA (1)...(19): siRNA sense strand
ggaggaaauugugaaaaua

SEQ ID NO: 1224866 - RNA, 19 nt, Homo sapiens
  misc_RNA (1)...(19): siRNA sense strand
gugcugacaugucugaaau

SEQ ID NO: 1224867 - RNA, 19 nt, Homo sapiens
  misc_RNA (1)...(19): siRNA sense strand
gaugagccauuacaguauc

SEQ ID NO: 1224868 - RNA, 19 nt, Homo sapiens
  misc_RNA (1)...(19): siRNA sense strand
cccaauggcuuaucuuaca

SEQ ID NO: 1224869 - RNA, 19 nt, Homo sapiens
  misc_RNA (1)...(19): siRNA sense strand
acacuaauauggagcaagu

SEQ ID NO: 1224870 - RNA, 19 nt, Homo sapiens
  misc_RNA (1)...(19): siRNA sense strand
ccugaugauuccacagaua

SEQ ID NO: 1224871 - RNA, 19 nt, Homo sapiens
  misc_RNA (1)...(19): siRNA sense strand
gcaaagcaacagagugaau

SEQ ID NO: 1224872 - RNA, 19 nt, Homo sapiens
  misc_RNA (1)...(19): siRNA sense strand
cgugugaaccauccuaaua

SEQ ID NO: 1224873 - RNA, 19 nt, Homo sapiens
  misc_RNA (1)...(19): siRNA sense strand
gaaagcguuuauuguagag

SEQ ID NO: 1224874 - RNA, 19 nt, Homo sapiens
  misc_RNA (1)...(19): siRNA sense strand
gcaguuaucccgugugaac

SEQ ID NO: 1224875 - RNA, 19 nt, Homo sapiens
  misc_RNA (1)...(19): siRNA sense strand
gcugacaugucugaaauag

SEQ ID NO: 1224876 - RNA, 19 nt, Homo sapiens
  misc_RNA (1)...(19): siRNA sense strand
gugcugaaccauugccaua

SEQ ID NO: 1224877 - RNA, 19 nt, Homo sapiens
  misc_RNA (1)...(19): siRNA sense strand
ugugaaccauccuaauauu

SEQ ID NO: 1224878 - RNA, 19 nt, Homo sapiens
  misc_RNA (1)...(19): siRNA sense strand
cggaaacccuuugaugaga

SEQ ID NO: 1224879 - RNA, 19 nt, Homo sapiens
  misc_RNA (1)...(19): siRNA sense strand
aagaggagccuuuggaguu

SEQ ID NO: 1224880 - RNA, 19 nt, Homo sapiens
  misc_RNA (1)...(19): siRNA sense strand
ggacagccaagacguagau

SEQ ID NO: 1224881 - RNA, 19 nt, Homo sapiens
  misc_RNA (1)...(19): siRNA sense strand
aggagcagaugagccauua

SEQ ID NO: 1224882 - RNA, 19 nt, Homo sapiens
  misc_RNA (1)...(19): siRNA sense strand
gaguugguguuuacagugu

SEQ ID NO: 1224883 - RNA, 19 nt, Homo sapiens
  misc_RNA (1)...(19): siRNA sense strand
acaguauccuugucaguau

SEQ ID NO: 1224884 - RNA, 19 nt, Homo sapiens
  misc_RNA (1)...(19): siRNA sense strand
cgcaaugaguugguguuua

SEQ ID NO: 1224885 - RNA, 19 nt, Homo sapiens
  misc_RNA (1)...(19): siRNA sense strand
gcagaugagccauuacagu

SEQ ID NO: 1224886 - RNA, 19 nt, Homo sapiens
  misc_RNA (1)...(19): siRNA sense strand
gagcagaugagccauuaca

SEQ ID NO: 1224887 - RNA, 19 nt, Homo sapiens
  misc_RNA (1)...(19): siRNA sense strand
uacacuggaucaccaacua

SEQ ID NO: 1224888 - RNA, 19 nt, Homo sapiens
  misc_RNA (1)...(19): siRNA sense strand
aaagcuaaguggagagcaa

SEQ ID NO: 1224889 - RNA, 19 nt, Homo sapiens
  misc_RNA (1)...(19): siRNA sense strand
ggagcaguguggagagcuu

SEQ ID NO: 1224890 - RNA, 19 nt, Homo sapiens
  misc_RNA (1)...(19): siRNA sense strand
cagacacacaugaccaaua

SEQ ID NO: 1224891 - RNA, 19 nt, Homo sapiens
  misc_RNA (1)...(19): siRNA sense strand
cuacaaauacgaguaacaa

SEQ ID NO: 1224892 - RNA, 19 nt, Homo sapiens
  misc_RNA (1)...(19): siRNA sense strand
gcccuucaauggaggaaau

SEQ ID NO: 1224893 - RNA, 19 nt, Homo sapiens
  misc_RNA (1)...(19): siRNA sense strand
aaauuuaccuaagcccauu

SEQ ID NO: 1224894 - RNA, 19 nt, Homo sapiens
  misc_RNA (1)...(19): siRNA sense strand
cgaaucaugugggcuguuc

SEQ ID NO: 1224895 - RNA, 19 nt, Homo sapiens
  misc_RNA (1)...(19): siRNA sense strand
uggcuuaucuucacagcau

SEQ ID NO: 1224896 - RNA, 19 nt, Homo sapiens
  misc_RNA (1)...(19): siRNA sense strand
gauaccaauggaucagaua

SEQ ID NO: 1224897 - RNA, 19 nt, Homo sapiens
  misc_RNA (1)...(19): siRNA sense strand
cccagugucagaaugauua

SEQ ID NO: 1224898 - RNA, 19 nt, Homo sapiens
  misc_RNA (1)...(19): siRNA sense strand
ucaugugggcuguucauaa

SEQ ID NO: 1224899 - RNA, 19 nt, Homo sapiens
  misc_RNA (1)...(19): siRNA sense strand
gaaaccaccaaacuuacug

SEQ ID NO: 1224900 - RNA, 19 nt, Homo sapiens
  misc_RNA (1)...(19): siRNA sense strand
gaaaauaaugacucacuug

SEQ ID NO: 1224901 - RNA, 19 nt, Homo sapiens
  misc_RNA (1)...(19): siRNA sense strand
ugccacaaaugauacuauu

SEQ ID NO: 1224902 - RNA, 19 nt, Homo sapiens
  misc_RNA (1)...(19): siRNA sense strand
aggaaagcguuuauuguag

SEQ ID NO: 1224903 - RNA, 19 nt, Homo sapiens
  misc_RNA (1)...(19): siRNA sense strand
agaggagccuuuggaguug

SEQ ID NO: 1224904 - RNA, 19 nt, Homo sapiens
  misc_RNA (1)...(19): siRNA sense strand
gccacaaaugauacuauua

SEQ ID NO: 1224905 - RNA, 19 nt, Homo sapiens
  misc_RNA (1)...(19): siRNA sense strand
ggaguggcuuaucuucaca

SEQ ID NO: 1224906 - RNA, 19 nt, Homo sapiens
  misc_RNA (1)...(19): siRNA sense strand
ugaaccauccuaauauugu

SEQ ID NO: 1224907 - RNA, 19 nt, Homo sapiens
  misc_RNA (1)...(19): siRNA sense strand
cggcaguuaucccguguga

SEQ ID NO: 1224908 - RNA, 19 nt, Homo sapiens
  misc_RNA (1)...(19): siRNA sense strand
uauggagccugcuugaauc

SEQ ID NO: 1224909 - RNA, 19 nt, Homo sapiens
  misc_RNA (1)...(19): siRNA sense strand
guuccugccacaaaugaua

SEQ ID NO: 1224910 - RNA, 19 nt, Homo sapiens
  misc_RNA (1)...(19): siRNA sense strand
gguacucgaccaccacuga

SEQ ID NO: 1224911 - RNA, 19 nt, Homo sapiens
  misc_RNA (1)...(19): siRNA sense strand
aauccagugugucuuguga

SEQ ID NO: 1224912 - RNA, 19 nt, Homo sapiens
  misc_RNA (1)...(19): siRNA sense strand
ucauggacauugcuucuac

SEQ ID NO: 1224913 - RNA, 19 nt, Homo sapiens
  misc_RNA (1)...(19): siRNA sense strand
uacaguauccuugucagua

SEQ ID NO: 1224914 - RNA, 19 nt, Homo sapiens
  misc_RNA (1)...(19): siRNA sense strand
gucggaaacccuuugauga

SEQ ID NO: 1224915 - RNA, 19 nt, Homo sapiens
  misc_RNA (1)...(19): siRNA sense strand
gacauucagacacacauga

SEQ ID NO: 1224916 - RNA, 19 nt, Homo sapiens
  misc_RNA (1)...(19): siRNA sense strand
cagugugucuugugaugga

SEQ ID NO: 1224917 - RNA, 19 nt, Homo sapiens
  misc_RNA (1)...(19): siRNA sense strand
aggcaaagcaacagaguga

SEQ ID NO: 1224918 - RNA, 19 nt, Homo sapiens
  misc_RNA (1)...(19): siRNA sense strand
gcgcuuagaaucaaaauug

SEQ ID NO: 1224919 - RNA, 19 nt, Homo sapiens
  misc_RNA (1)...(19): siRNA sense strand
caacccaaagcgcuaauuc

SEQ ID NO: 1224920 - RNA, 19 nt, Homo sapiens
  misc_RNA (1)...(19): siRNA sense strand
gugugaaccauccuaauau

SEQ ID NO: 1224921 - RNA, 19 nt, Homo sapiens
  misc_RNA (1)...(19): siRNA sense strand
gcucauucauggacauugc

SEQ ID NO: 1224922 - RNA, 19 nt, Homo sapiens
  misc_RNA (1)...(19): siRNA sense strand
caguauccuugucaguauu

SEQ ID NO: 1224923 - RNA, 19 nt, Homo sapiens
  misc_RNA (1)...(19): siRNA sense strand
aaagugaaucugagaggaa

SEQ ID NO: 1224924 - RNA, 19 nt, Homo sapiens
  misc_RNA (1)...(19): siRNA sense strand
uguagagcuucggcaguua

SEQ ID NO: 1224925 - RNA, 19 nt, Homo sapiens
  misc_RNA (1)...(19): siRNA sense strand
gugaaccauccuaauauug

SEQ ID NO: 1224926 - RNA, 19 nt, Homo sapiens
  misc_RNA (1)...(19): siRNA sense strand
gaucgagguggaagagguu

SEQ ID NO: 1224927 - RNA, 19 nt, Homo sapiens
  misc_RNA (1)...(19): siRNA sense strand
ccaaggaguggcuuaucuu

SEQ ID NO: 1224928 - RNA, 19 nt, Homo sapiens
  misc_RNA (1)...(19): siRNA sense strand
uuauggagccugcuugaau

SEQ ID NO: 1224929 - RNA, 19 nt, Homo sapiens
  misc_RNA (1)...(19): siRNA sense strand
caaggaguggcuuaucuuc

SEQ ID NO: 1224930 - RNA, 19 nt, Homo sapiens
  misc_RNA (1)...(19): siRNA sense strand
caaagcaacagagugaauc

SEQ ID NO: 1224931 - RNA, 19 nt, Homo sapiens
  misc_RNA (1)...(19): siRNA sense strand
acacaugaccaauaacaag

SEQ ID NO: 1224932 - RNA, 19 nt, Homo sapiens
  misc_RNA (1)...(19): siRNA sense strand
aagugaaucugagaggaaa

SEQ ID NO: 1224933 - RNA, 19 nt, Homo sapiens
  misc_RNA (1)...(19): siRNA sense strand
gaccugaaaccaccaaacu

SEQ ID NO: 1224934 - RNA, 19 nt, Homo sapiens
  misc_RNA (1)...(19): siRNA sense strand
guagagcuucggcaguuau

SEQ ID NO: 1224935 - RNA, 19 nt, Homo sapiens
  misc_RNA (1)...(19): siRNA sense strand
agaggaaagcguuuauugu

SEQ ID NO: 1224936 - RNA, 19 nt, Homo sapiens
  misc_RNA (1)...(19): siRNA sense strand
gguggaagagguuguugga

SEQ ID NO: 1224937 - RNA, 19 nt, Homo sapiens
  misc_RNA (1)...(19): siRNA sense strand
uggcccagcuuuccgaauc

SEQ ID NO: 1224938 - RNA, 19 nt, Homo sapiens
  misc_RNA (1)...(19): siRNA sense strand
ggacauugcuucuacaaau

SEQ ID NO: 1224939 - RNA, 19 nt, Homo sapiens
  misc_RNA (1)...(19): siRNA sense strand
gagugaaucuggacguuua

SEQ ID NO: 1224940 - RNA, 19 nt, Homo sapiens
  misc_RNA (1)...(19): siRNA sense strand
ugacaugucugaaauagaa

SEQ ID NO: 1224941 - RNA, 19 nt, Homo sapiens
  misc_RNA (1)...(19): siRNA sense strand
gaggaaagcguuuauugua

SEQ ID NO: 1224942 - RNA, 19 nt, Homo sapiens
  misc_RNA (1)...(19): siRNA sense strand
ggaaagcguuuauuguaga

SEQ ID NO: 1224943 - RNA, 19 nt, Homo sapiens
  misc_RNA (1)...(19): siRNA sense strand
gaaccauccuaauauugua

SEQ ID NO: 1224944 - RNA, 19 nt, Homo sapiens
  misc_RNA (1)...(19): siRNA sense strand
agacacacaugaccaauaa

SEQ ID NO: 1224945 - RNA, 19 nt, Homo sapiens
  misc_RNA (1)...(19): siRNA sense strand
gacauugcuucuacaaaua

SEQ ID NO: 1224946 - RNA, 19 nt, Homo sapiens
  misc_RNA (1)...(19): siRNA sense strand
gcaaugaguugguguuuac

SEQ ID NO: 1224947 - RNA, 19 nt, Homo sapiens
  misc_RNA (1)...(19): siRNA sense strand
ggaagagguuguuggaaga

SEQ ID NO: 1224948 - RNA, 19 nt, Homo sapiens
  misc_RNA (1)...(19): siRNA sense strand
gcaaguuccugccacaaau

SEQ ID NO: 1224949 - RNA, 19 nt, Homo sapiens
  misc_RNA (1)...(19): siRNA sense strand
gaaccauugccauauuaua

SEQ ID NO: 1224950 - RNA, 19 nt, Homo sapiens
  misc_RNA (1)...(19): siRNA sense strand
gaaacccuuugaugagauu

SEQ ID NO: 1224951 - RNA, 19 nt, Homo sapiens
  misc_RNA (1)...(19): siRNA sense strand
ggaguuguuugcaaagcua

SEQ ID NO: 1224952 - RNA, 19 nt, Homo sapiens
  misc_RNA (1)...(19): siRNA sense strand
cagaugagccauuacagua

SEQ ID NO: 1224953 - RNA, 19 nt, Homo sapiens
  misc_RNA (1)...(19): siRNA sense strand
aauaaugacucacuugaug

SEQ ID NO: 1224954 - RNA, 19 nt, Homo sapiens
  misc_RNA (1)...(19): siRNA sense strand
gcugaaccauugccauauu

SEQ ID NO: 1224955 - RNA, 19 nt, Homo sapiens
  misc_RNA (1)...(19): siRNA sense strand
gagaggaaagcguuuauug

SEQ ID NO: 1224956 - RNA, 19 nt, Homo sapiens
  misc_RNA (1)...(19): siRNA sense strand
gguaguaauuacagugaaa

SEQ ID NO: 1224957 - RNA, 19 nt, Homo sapiens
  misc_RNA (1)...(19): siRNA sense strand
ccugaaaccaccaaacuua

SEQ ID NO: 1224958 - RNA, 19 nt, Homo sapiens
  misc_RNA (1)...(19): siRNA sense strand
gaggaugagugcugacaug

SEQ ID NO: 1224959 - RNA, 19 nt, Homo sapiens
  misc_RNA (1)...(19): siRNA sense strand
gaugagugcugacaugucu

SEQ ID NO: 1224960 - RNA, 19 nt, Homo sapiens
  misc_RNA (1)...(19): siRNA sense strand
caugugggcuguucauaau

SEQ ID NO: 1224961 - RNA, 19 nt, Homo sapiens
  misc_RNA (1)...(19): siRNA sense strand
guagauccauccaagacuu

SEQ ID NO: 1224962 - RNA, 19 nt, Homo sapiens
  misc_RNA (1)...(19): siRNA sense strand
ggaaacccuuugaugagau

SEQ ID NO: 1224963 - RNA, 19 nt, Homo sapiens
  misc_RNA (1)...(19): siRNA sense strand
uugaagagaucgacuacaa

SEQ ID NO: 1224964 - RNA, 19 nt, Homo sapiens
  misc_RNA (1)...(19): siRNA sense strand
cugaaccauugccauauua

SEQ ID NO: 1224965 - RNA, 19 nt, Homo sapiens
  misc_RNA (1)...(19): siRNA sense strand
ggaggaaauugugaaaaua

SEQ ID NO: 1224966 - RNA, 19 nt, Homo sapiens
  misc_RNA (1)...(19): siRNA sense strand
gugcugacaugucugaaau

SEQ ID NO: 1224967 - RNA, 19 nt, Homo sapiens
  misc_RNA (1)...(19): siRNA sense strand
gaugagccauuacaguauc

SEQ ID NO: 1224968 - RNA, 19 nt, Homo sapiens
  misc_RNA (1)...(19): siRNA sense strand
cccaauggcuuaucuuaca

SEQ ID NO: 1224969 - RNA, 19 nt, Homo sapiens
  misc_RNA (1)...(19): siRNA sense strand
acacuaauauggagcaagu

SEQ ID NO: 1224970 - RNA, 19 nt, Homo sapiens
  misc_RNA (1)...(19): siRNA sense strand
ccugaugauuccacagaua

SEQ ID NO: 1224971 - RNA, 19 nt, Homo sapiens
  misc_RNA (1)...(19): siRNA sense strand
gcaaagcaacagagugaau

SEQ ID NO: 1224972 - RNA, 19 nt, Homo sapiens
  misc_RNA (1)...(19): siRNA sense strand
cgugugaaccauccuaaua

SEQ ID NO: 1224973 - RNA, 19 nt, Homo sapiens
  misc_RNA (1)...(19): siRNA sense strand
gaaagcguuuauuguagag

SEQ ID NO: 1224974 - RNA, 19 nt, Homo sapiens
  misc_RNA (1)...(19): siRNA sense strand
gcaguuaucccgugugaac

SEQ ID NO: 1224975 - RNA, 19 nt, Homo sapiens
  misc_RNA (1)...(19): siRNA sense strand
gcugacaugucugaaauag

SEQ ID NO: 1224976 - RNA, 19 nt, Homo sapiens
  misc_RNA (1)...(19): siRNA sense strand
gugcugaaccauugccaua

SEQ ID NO: 1224977 - RNA, 19 nt, Homo sapiens
  misc_RNA (1)...(19): siRNA sense strand
ugugaaccauccuaauauu

SEQ ID NO: 1224978 - RNA, 19 nt, Homo sapiens
  misc_RNA (1)...(19): siRNA sense strand
cggaaacccuuugaugaga

SEQ ID NO: 1224979 - RNA, 19 nt, Homo sapiens
  misc_RNA (1)...(19): siRNA sense strand
aagaggagccuuuggaguu

SEQ ID NO: 1224980 - RNA, 19 nt, Homo sapiens
  misc_RNA (1)...(19): siRNA sense strand
ggacagccaagacguagau

SEQ ID NO: 1224981 - RNA, 19 nt, Homo sapiens
  misc_RNA (1)...(19): siRNA sense strand
aggagcagaugagccauua

SEQ ID NO: 1224982 - RNA, 19 nt, Homo sapiens
  misc_RNA (1)...(19): siRNA sense strand
gaguugguguuuacagugu

SEQ ID NO: 1224983 - RNA, 19 nt, Homo sapiens
  misc_RNA (1)...(19): siRNA sense strand
acaguauccuugucaguau

SEQ ID NO: 1224984 - RNA, 19 nt, Homo sapiens
  misc_RNA (1)...(19): siRNA sense strand
cgcaaugaguugguguuua

SEQ ID NO: 1224985 - RNA, 19 nt, Homo sapiens
  misc_RNA (1)...(19): siRNA sense strand
gcagaugagccauuacagu

SEQ ID NO: 1224986 - RNA, 19 nt, Homo sapiens
  misc_RNA (1)...(19): siRNA sense strand
gagcagaugagccauuaca

SEQ ID NO: 1224987 - RNA, 19 nt, Homo sapiens
  misc_RNA (1)...(19): siRNA sense strand
uacacuggaucaccaacua

SEQ ID NO: 1224988 - RNA, 19 nt, Homo sapiens
  misc_RNA (1)...(19): siRNA sense strand
aaagcuaaguggagagcaa

SEQ ID NO: 1224989 - RNA, 19 nt, Homo sapiens
  misc_RNA (1)...(19): siRNA sense strand
ggagcaguguggagagcuu

SEQ ID NO: 1224990 - RNA, 19 nt, Homo sapiens
  misc_RNA (1)...(19): siRNA sense strand
cagacacacaugaccaaua

SEQ ID NO: 1224991 - RNA, 19 nt, Homo sapiens
  misc_RNA (1)...(19): siRNA sense strand
cuacaaauacgaguaacaa

SEQ ID NO: 1224992 - RNA, 19 nt, Homo sapiens
  misc_RNA (1)...(19): siRNA sense strand
gcccuucaauggaggaaau

SEQ ID NO: 1224993 - RNA, 19 nt, Homo sapiens
  misc_RNA (1)...(19): siRNA sense strand
aaauuuaccuaagcccauu

SEQ ID NO: 1224994 - RNA, 19 nt, Homo sapiens
  misc_RNA (1)...(19): siRNA sense strand
cgaaucaugugggcuguuc

SEQ ID NO: 1224995 - RNA, 19 nt, Homo sapiens
  misc_RNA (1)...(19): siRNA sense strand
uggcuuaucuucacagcau

SEQ ID NO: 1224996 - RNA, 19 nt, Homo sapiens
  misc_RNA (1)...(19): siRNA sense strand
gauaccaauggaucagaua

SEQ ID NO: 1224997 - RNA, 19 nt, Homo sapiens
  misc_RNA (1)...(19): siRNA sense strand
cccagugucagaaugauua

SEQ ID NO: 1224998 - RNA, 19 nt, Homo sapiens
  misc_RNA (1)...(19): siRNA sense strand
ucaugugggcuguucauaa

SEQ ID NO: 1224999 - RNA, 19 nt, Homo sapiens
  misc_RNA (1)...(19): siRNA sense strand
gaaaccaccaaacuuacug

SEQ ID NO: 1225000 - RNA, 19 nt, Homo sapiens
  misc_RNA (1)...(19): siRNA sense strand
gaaaauaaugacucacuug

SEQ ID NO: 1225001 - RNA, 19 nt, Homo sapiens
  misc_RNA (1)...(19): siRNA sense strand
ugccacaaaugauacuauu

SEQ ID NO: 1225002 - RNA, 19 nt, Homo sapiens
  misc_RNA (1)...(19): siRNA sense strand
aggaaagcguuuauuguag

SEQ ID NO: 1225003 - RNA, 19 nt, Homo sapiens
  misc_RNA (1)...(19): siRNA sense strand
agaggagccuuuggaguug

SEQ ID NO: 1225004 - RNA, 19 nt, Homo sapiens
  misc_RNA (1)...(19): siRNA sense strand
gccacaaaugauacuauua

SEQ ID NO: 1225005 - RNA, 19 nt, Homo sapiens
  misc_RNA (1)...(19): siRNA sense strand
ggaguggcuuaucuucaca

SEQ ID NO: 1225006 - RNA, 19 nt, Homo sapiens
  misc_RNA (1)...(19): siRNA sense strand
ugaaccauccuaauauugu

SEQ ID NO: 1225007 - RNA, 19 nt, Homo sapiens
  misc_RNA (1)...(19): siRNA sense strand
cggcaguuaucccguguga

SEQ ID NO: 1225008 - RNA, 19 nt, Homo sapiens
  misc_RNA (1)...(19): siRNA sense strand
uauggagccugcuugaauc

SEQ ID NO: 1225009 - RNA, 19 nt, Homo sapiens
  misc_RNA (1)...(19): siRNA sense strand
guuccugccacaaaugaua

SEQ ID NO: 1225010 - RNA, 19 nt, Homo sapiens
  misc_RNA (1)...(19): siRNA sense strand
gguacucgaccaccacuga

SEQ ID NO: 1225011 - RNA, 19 nt, Homo sapiens
  misc_RNA (1)...(19): siRNA sense strand
aauccagugugucuuguga

SEQ ID NO: 1225012 - RNA, 19 nt, Homo sapiens
  misc_RNA (1)...(19): siRNA sense strand
ucauggacauugcuucuac

SEQ ID NO: 1225013 - RNA, 19 nt, Homo sapiens
  misc_RNA (1)...(19): siRNA sense strand
uacaguauccuugucagua

SEQ ID NO: 1225014 - RNA, 19 nt, Homo sapiens
  misc_RNA (1)...(19): siRNA sense strand
gucggaaacccuuugauga

SEQ ID NO: 1225015 - RNA, 19 nt, Homo sapiens
  misc_RNA (1)...(19): siRNA sense strand
gacauucagacacacauga

SEQ ID NO: 1225016 - RNA, 19 nt, Homo sapiens
  misc_RNA (1)...(19): siRNA sense strand
cagugugucuugugaugga

SEQ ID NO: 1225017 - RNA, 19 nt, Homo sapiens
  misc_RNA (1)...(19): siRNA sense strand
aggcaaagcaacagaguga

SEQ ID NO: 1225018 - RNA, 19 nt, Homo sapiens
  misc_RNA (1)...(19): siRNA sense strand
gcgcuuagaaucaaaauug

SEQ ID NO: 1225019 - RNA, 19 nt, Homo sapiens
  misc_RNA (1)...(19): siRNA sense strand
caacccaaagcgcuaauuc

SEQ ID NO: 1225020 - RNA, 19 nt, Homo sapiens
  misc_RNA (1)...(19): siRNA sense strand
gugugaaccauccuaauau

SEQ ID NO: 1225021 - RNA, 19 nt, Homo sapiens
  misc_RNA (1)...(19): siRNA sense strand
gcucauucauggacauugc

SEQ ID NO: 1225022 - RNA, 19 nt, Homo sapiens
  misc_RNA (1)...(19): siRNA sense strand
caguauccuugucaguauu

SEQ ID NO: 1225023 - RNA, 19 nt, Homo sapiens
  misc_RNA (1)...(19): siRNA sense strand
aaagugaaucugagaggaa

SEQ ID NO: 1225024 - RNA, 19 nt, Homo sapiens
  misc_RNA (1)...(19): siRNA sense strand
uguagagcuucggcaguua

SEQ ID NO: 1225025 - RNA, 19 nt, Homo sapiens
  misc_RNA (1)...(19): siRNA sense strand
gugaaccauccuaauauug

SEQ ID NO: 1225026 - RNA, 19 nt, Homo sapiens
  misc_RNA (1)...(19): siRNA sense strand
gaucgagguggaagagguu

SEQ ID NO: 1225027 - RNA, 19 nt, Homo sapiens
  misc_RNA (1)...(19): siRNA sense strand
ccaaggaguggcuuaucuu

SEQ ID NO: 1225028 - RNA, 19 nt, Homo sapiens
  misc_RNA (1)...(19): siRNA sense strand
uuauggagccugcuugaau

SEQ ID NO: 1225029 - RNA, 19 nt, Homo sapiens
  misc_RNA (1)...(19): siRNA sense strand
caaggaguggcuuaucuuc

SEQ ID NO: 1225030 - RNA, 19 nt, Homo sapiens
  misc_RNA (1)...(19): siRNA sense strand
caaagcaacagagugaauc

SEQ ID NO: 1225031 - RNA, 19 nt, Homo sapiens
  misc_RNA (1)...(19): siRNA sense strand
acacaugaccaauaacaag

SEQ ID NO: 1225032 - RNA, 19 nt, Homo sapiens
  misc_RNA (1)...(19): siRNA sense strand
aagugaaucugagaggaaa

SEQ ID NO: 1225033 - RNA, 19 nt, Homo sapiens
  misc_RNA (1)...(19): siRNA sense strand
gaccugaaaccaccaaacu

SEQ ID NO: 1225034 - RNA, 19 nt, Homo sapiens
  misc_RNA (1)...(19): siRNA sense strand
guagagcuucggcaguuau

SEQ ID NO: 1225035 - RNA, 19 nt, Homo sapiens
  misc_RNA (1)...(19): siRNA sense strand
agaggaaagcguuuauugu

SEQ ID NO: 1225036 - RNA, 19 nt, Homo sapiens
  misc_RNA (1)...(19): siRNA sense strand
gguggaagagguuguugga

SEQ ID NO: 1225037 - RNA, 19 nt, Homo sapiens
  misc_RNA (1)...(19): siRNA sense strand
uggcccagcuuuccgaauc

SEQ ID NO: 1225038 - RNA, 19 nt, Homo sapiens
  misc_RNA (1)...(19): siRNA sense strand
ggacauugcuucuacaaau

SEQ ID NO: 1225039 - RNA, 19 nt, Homo sapiens
  misc_RNA (1)...(19): siRNA sense strand
gagugaaucuggacguuua

SEQ ID NO: 1225040 - RNA, 19 nt, Homo sapiens
  misc_RNA (1)...(19): siRNA sense strand
ugacaugucugaaauagaa

SEQ ID NO: 1225041 - RNA, 19 nt, Homo sapiens
  misc_RNA (1)...(19): siRNA sense strand
gaggaaagcguuuauugua

SEQ ID NO: 1225042 - RNA, 19 nt, Homo sapiens
  misc_RNA (1)...(19): siRNA sense strand
ggaaagcguuuauuguaga

SEQ ID NO: 1225043 - RNA, 19 nt, Homo sapiens
  misc_RNA (1)...(19): siRNA sense strand
gaaccauccuaauauugua

SEQ ID NO: 1225044 - RNA, 19 nt, Homo sapiens
  misc_RNA (1)...(19): siRNA sense strand
agacacacaugaccaauaa

SEQ ID NO: 1225045 - RNA, 19 nt, Homo sapiens
  misc_RNA (1)...(19): siRNA sense strand
gacauugcuucuacaaaua

SEQ ID NO: 1225046 - RNA, 19 nt, Homo sapiens
  misc_RNA (1)...(19): siRNA sense strand
gcaaugaguugguguuuac

SEQ ID NO: 1225047 - RNA, 19 nt, Homo sapiens
  misc_RNA (1)...(19): siRNA sense strand
ggaagagguuguuggaaga

SEQ ID NO: 1225048 - RNA, 19 nt, Homo sapiens
  misc_RNA (1)...(19): siRNA sense strand
gaaaaggaccagcaaaaua

SEQ ID NO: 1225049 - RNA, 19 nt, Homo sapiens
  misc_RNA (1)...(19): siRNA sense strand
gcaaguuccugccacaaau

SEQ ID NO: 1225050 - RNA, 19 nt, Homo sapiens
  misc_RNA (1)...(19): siRNA sense strand
aaauacaucucgccuggua

SEQ ID NO: 1225051 - RNA, 19 nt, Homo sapiens
  misc_RNA (1)...(19): siRNA sense strand
gaaccauugccauauuaua

SEQ ID NO: 1225052 - RNA, 19 nt, Homo sapiens
  misc_RNA (1)...(19): siRNA sense strand
gaaacccuuugaugagauu

SEQ ID NO: 1225053 - RNA, 19 nt, Homo sapiens
  misc_RNA (1)...(19): siRNA sense strand
ggaguuguuugcaaagcua

SEQ ID NO: 1225054 - RNA, 19 nt, Homo sapiens
  misc_RNA (1)...(19): siRNA sense strand
cagaugagccauuacagua

SEQ ID NO: 1225055 - RNA, 19 nt, Homo sapiens
  misc_RNA (1)...(19): siRNA sense strand
aauaaugacucacuugaug

SEQ ID NO: 1225056 - RNA, 19 nt, Homo sapiens
  misc_RNA (1)...(19): siRNA sense strand
gcugaaccauugccauauu

SEQ ID NO: 1225057 - RNA, 19 nt, Homo sapiens
  misc_RNA (1)...(19): siRNA sense strand
gagaggaaagcguuuauug

SEQ ID NO: 1225058 - RNA, 19 nt, Homo sapiens
  misc_RNA (1)...(19): siRNA sense strand
gguaguaauuacagugaaa

SEQ ID NO: 1225059 - RNA, 19 nt, Homo sapiens
  misc_RNA (1)...(19): siRNA sense strand
ccugaaaccaccaaacuua

SEQ ID NO: 1225060 - RNA, 19 nt, Homo sapiens
  misc_RNA (1)...(19): siRNA sense strand
gaggaugagugcugacaug

SEQ ID NO: 1225061 - RNA, 19 nt, Homo sapiens
  misc_RNA (1)...(19): siRNA sense strand
gaugagugcugacaugucu

SEQ ID NO: 1225062 - RNA, 19 nt, Homo sapiens
  misc_RNA (1)...(19): siRNA sense strand
caugugggcuguucauaau

SEQ ID NO: 1225063 - RNA, 19 nt, Homo sapiens
  misc_RNA (1)...(19): siRNA sense strand
guagauccauccaagacuu

SEQ ID NO: 1225064 - RNA, 19 nt, Homo sapiens
  misc_RNA (1)...(19): siRNA sense strand
ggaaacccuuugaugagau

SEQ ID NO: 1225065 - RNA, 19 nt, Homo sapiens
  misc_RNA (1)...(19): siRNA sense strand
uugaagagaucgacuacaa

SEQ ID NO: 1225066 - RNA, 19 nt, Homo sapiens
  misc_RNA (1)...(19): siRNA sense strand
cugaaccauugccauauua

SEQ ID NO: 1225067 - RNA, 19 nt, Homo sapiens
  misc_RNA (1)...(19): siRNA sense strand
ggaggaaauugugaaaaua

SEQ ID NO: 1225068 - RNA, 19 nt, Homo sapiens
  misc_RNA (1)...(19): siRNA sense strand
gugcugacaugucugaaau

SEQ ID NO: 1225069 - RNA, 19 nt, Homo sapiens
  misc_RNA (1)...(19): siRNA sense strand
gaugagccauuacaguauc

SEQ ID NO: 1225070 - RNA, 19 nt, Homo sapiens
  misc_RNA (1)...(19): siRNA sense strand
cccaauggcuuaucuuaca

SEQ ID NO: 1225071 - RNA, 19 nt, Homo sapiens
  misc_RNA (1)...(19): siRNA sense strand
acacuaauauggagcaagu

SEQ ID NO: 1225072 - RNA, 19 nt, Homo sapiens
  misc_RNA (1)...(19): siRNA sense strand
ccugaugauuccacagaua

SEQ ID NO: 1225073 - RNA, 19 nt, Homo sapiens
  misc_RNA (1)...(19): siRNA sense strand
gcaaagcaacagagugaau

SEQ ID NO: 1225074 - RNA, 19 nt, Homo sapiens
  misc_RNA (1)...(19): siRNA sense strand
cgugugaaccauccuaaua

SEQ ID NO: 1225075 - RNA, 19 nt, Homo sapiens
  misc_RNA (1)...(19): siRNA sense strand
gaaagcguuuauuguagag

SEQ ID NO: 1225076 - RNA, 19 nt, Homo sapiens
  misc_RNA (1)...(19): siRNA sense strand
gcaguuaucccgugugaac

SEQ ID NO: 1225077 - RNA, 19 nt, Homo sapiens
  misc_RNA (1)...(19): siRNA sense strand
gcugacaugucugaaauag

SEQ ID NO: 1225078 - RNA, 19 nt, Homo sapiens
  misc_RNA (1)...(19): siRNA sense strand
gugcugaaccauugccaua

SEQ ID NO: 1225079 - RNA, 19 nt, Homo sapiens
  misc_RNA (1)...(19): siRNA sense strand
ugugaaccauccuaauauu

SEQ ID NO: 1225080 - RNA, 19 nt, Homo sapiens
  misc_RNA (1)...(19): siRNA sense strand
cggaaacccuuugaugaga

SEQ ID NO: 1225081 - RNA, 19 nt, Homo sapiens
  misc_RNA (1)...(19): siRNA sense strand
aagaggagccuuuggaguu

SEQ ID NO: 1225082 - RNA, 19 nt, Homo sapiens
  misc_RNA (1)...(19): siRNA sense strand
ggacagccaagacguagau

SEQ ID NO: 1225083 - RNA, 19 nt, Homo sapiens
  misc_RNA (1)...(19): siRNA sense strand
aggagcagaugagccauua

SEQ ID NO: 1225084 - RNA, 19 nt, Homo sapiens
  misc_RNA (1)...(19): siRNA sense strand
gaguugguguuuacagugu

SEQ ID NO: 1225085 - RNA, 19 nt, Homo sapiens
  misc_RNA (1)...(19): siRNA sense strand
gaaacgacaaggcacuuca

SEQ ID NO: 1225086 - RNA, 19 nt, Homo sapiens
  misc_RNA (1)...(19): siRNA sense strand
acaguauccuugucaguau

SEQ ID NO: 1225087 - RNA, 19 nt, Homo sapiens
  misc_RNA (1)...(19): siRNA sense strand
cgcaaugaguugguguuua

SEQ ID NO: 1225088 - RNA, 19 nt, Homo sapiens
  misc_RNA (1)...(19): siRNA sense strand
gcagaugagccauuacagu

SEQ ID NO: 1225089 - RNA, 19 nt, Homo sapiens
  misc_RNA (1)...(19): siRNA sense strand
gagcagaugagccauuaca

SEQ ID NO: 1225090 - RNA, 19 nt, Homo sapiens
  misc_RNA (1)...(19): siRNA sense strand
uacacuggaucaccaacua

SEQ ID NO: 1225091 - RNA, 19 nt, Homo sapiens
  misc_RNA (1)...(19): siRNA sense strand
gaagucagcagcagaaacg

SEQ ID NO: 1225092 - RNA, 19 nt, Homo sapiens
  misc_RNA (1)...(19): siRNA sense strand
caacuagaggucaucagaa

SEQ ID NO: 1225093 - RNA, 19 nt, Homo sapiens
  misc_RNA (1)...(19): siRNA sense strand
aaagcuaaguggagagcaa

SEQ ID NO: 1225094 - RNA, 19 nt, Homo sapiens
  misc_RNA (1)...(19): siRNA sense strand
ggagcaguguggagagcuu

SEQ ID NO: 1225095 - RNA, 19 nt, Homo sapiens
  misc_RNA (1)...(19): siRNA sense strand
cagacacacaugaccaaua

SEQ ID NO: 1225096 - RNA, 19 nt, Homo sapiens
  misc_RNA (1)...(19): siRNA sense strand
cuacaaauacgaguaacaa

SEQ ID NO: 1225097 - RNA, 19 nt, Homo sapiens
  misc_RNA (1)...(19): siRNA sense strand
gcccuucaauggaggaaau

SEQ ID NO: 1225098 - RNA, 19 nt, Homo sapiens
  misc_RNA (1)...(19): siRNA sense strand
aaauuuaccuaagcccauu

SEQ ID NO: 1225099 - RNA, 19 nt, Homo sapiens
  misc_RNA (1)...(19): siRNA sense strand
cgaaucaugugggcuguuc

SEQ ID NO: 1225100 - RNA, 19 nt, Homo sapiens
  misc_RNA (1)...(19): siRNA sense strand
uggcuuaucuucacagcau

SEQ ID NO: 1225101 - RNA, 19 nt, Homo sapiens
  misc_RNA (1)...(19): siRNA sense strand
gauaccaauggaucagaua

SEQ ID NO: 1225102 - RNA, 19 nt, Homo sapiens
  misc_RNA (1)...(19): siRNA sense strand
cccagugucagaaugauua

SEQ ID NO: 1225103 - RNA, 19 nt, Homo sapiens
  misc_RNA (1)...(19): siRNA sense strand
ucaugugggcuguucauaa

SEQ ID NO: 1225104 - RNA, 19 nt, Homo sapiens
  misc_RNA (1)...(19): siRNA sense strand
gaaaccaccaaacuuacug

SEQ ID NO: 1225105 - RNA, 19 nt, Homo sapiens
  misc_RNA (1)...(19): siRNA sense strand
gaaaauaaugacucacuug

SEQ ID NO: 1225106 - RNA, 19 nt, Homo sapiens
  misc_RNA (1)...(19): siRNA sense strand
ugccacaaaugauacuauu

SEQ ID NO: 1225107 - RNA, 19 nt, Homo sapiens
  misc_RNA (1)...(19): siRNA sense strand
cggcaguuaucccguguga

SEQ ID NO: 1225108 - RNA, 19 nt, Homo sapiens
  misc_RNA (1)...(19): siRNA sense strand
gccacaaaugauacuauua

SEQ ID NO: 1225109 - RNA, 19 nt, Homo sapiens
  misc_RNA (1)...(19): siRNA sense strand
agaggagccuuuggaguug

SEQ ID NO: 1225110 - RNA, 19 nt, Homo sapiens
  misc_RNA (1)...(19): siRNA sense strand
aggaaagcguuuauuguag

SEQ ID NO: 1225111 - RNA, 19 nt, Homo sapiens
  misc_RNA (1)...(19): siRNA sense strand
ggaguggcuuaucuucaca

SEQ ID NO: 1225112 - RNA, 19 nt, Homo sapiens
  misc_RNA (1)...(19): siRNA sense strand
ugaaccauccuaauauugu

SEQ ID NO: 1225113 - RNA, 19 nt, Homo sapiens
  misc_RNA (1)...(19): siRNA sense strand
uauggagccugcuugaauc

SEQ ID NO: 1225114 - RNA, 19 nt, Homo sapiens
  misc_RNA (1)...(19): siRNA sense strand
guuccugccacaaaugaua

SEQ ID NO: 1225115 - RNA, 19 nt, Homo sapiens
  misc_RNA (1)...(19): siRNA sense strand
gguacucgaccaccacuga

SEQ ID NO: 1225116 - RNA, 19 nt, Homo sapiens
  misc_RNA (1)...(19): siRNA sense strand
aauccagugugucuuguga

SEQ ID NO: 1225117 - RNA, 19 nt, Homo sapiens
  misc_RNA (1)...(19): siRNA sense strand
ucauggacauugcuucuac

SEQ ID NO: 1225118 - RNA, 19 nt, Homo sapiens
  misc_RNA (1)...(19): siRNA sense strand
uacaguauccuugucagua

SEQ ID NO: 1225119 - RNA, 19 nt, Homo sapiens
  misc_RNA (1)...(19): siRNA sense strand
gucggaaacccuuugauga

SEQ ID NO: 1225120 - RNA, 19 nt, Homo sapiens
  misc_RNA (1)...(19): siRNA sense strand
gacauucagacacacauga

SEQ ID NO: 1225121 - RNA, 19 nt, Homo sapiens
  misc_RNA (1)...(19): siRNA sense strand
cagugugucuugugaugga

SEQ ID NO: 1225122 - RNA, 19 nt, Homo sapiens
  misc_RNA (1)...(19): siRNA sense strand
ucagaagucagcagcagaa

SEQ ID NO: 1225123 - RNA, 19 nt, Homo sapiens
  misc_RNA (1)...(19): siRNA sense strand
aggcaaagcaacagaguga

SEQ ID NO: 1225124 - RNA, 19 nt, Homo sapiens
  misc_RNA (1)...(19): siRNA sense strand
gcgcuuagaaucaaaauug

SEQ ID NO: 1225125 - RNA, 19 nt, Homo sapiens
  misc_RNA (1)...(19): siRNA sense strand
caacccaaagcgcuaauuc

SEQ ID NO: 1225126 - RNA, 19 nt, Homo sapiens
  misc_RNA (1)...(19): siRNA sense strand
aaagugaaucugagaggaa

SEQ ID NO: 1225127 - RNA, 19 nt, Homo sapiens
  misc_RNA (1)...(19): siRNA sense strand
uguagagcuucggcaguua

SEQ ID NO: 1225128 - RNA, 19 nt, Homo sapiens
  misc_RNA (1)...(19): siRNA sense strand
gcucauucauggacauugc

SEQ ID NO: 1225129 - RNA, 19 nt, Homo sapiens
  misc_RNA (1)...(19): siRNA sense strand
gugugaaccauccuaauau

SEQ ID NO: 1225130 - RNA, 19 nt, Homo sapiens
  misc_RNA (1)...(19): siRNA sense strand
caguauccuugucaguauu

SEQ ID NO: 1225131 - RNA, 19 nt, Homo sapiens
  misc_RNA (1)...(19): siRNA sense strand
ccaaggaguggcuuaucuu

SEQ ID NO: 1225132 - RNA, 19 nt, Homo sapiens
  misc_RNA (1)...(19): siRNA sense strand
gugaaccauccuaauauug

SEQ ID NO: 1225133 - RNA, 19 nt, Homo sapiens
  misc_RNA (1)...(19): siRNA sense strand
gaucgagguggaagagguu

SEQ ID NO: 1225134 - RNA, 19 nt, Homo sapiens
  misc_RNA (1)...(19): siRNA sense strand
uuauggagccugcuugaau

SEQ ID NO: 1225135 - RNA, 19 nt, Homo sapiens
  misc_RNA (1)...(19): siRNA sense strand
aagugaaucugagaggaaa

SEQ ID NO: 1225136 - RNA, 19 nt, Homo sapiens
  misc_RNA (1)...(19): siRNA sense strand
acaacuagaggucaucaga

SEQ ID NO: 1225137 - RNA, 19 nt, Homo sapiens
  misc_RNA (1)...(19): siRNA sense strand
caaagcaacagagugaauc

SEQ ID NO: 1225138 - RNA, 19 nt, Homo sapiens
  misc_RNA (1)...(19): siRNA sense strand
ggacauugcuucuacaaau

SEQ ID NO: 1225139 - RNA, 19 nt, Homo sapiens
  misc_RNA (1)...(19): siRNA sense strand
gagugaaucuggacguuua

SEQ ID NO: 1225140 - RNA, 19 nt, Homo sapiens
  misc_RNA (1)...(19): siRNA sense strand
ugacaugucugaaauagaa

SEQ ID NO: 1225141 - RNA, 19 nt, Homo sapiens
  misc_RNA (1)...(19): siRNA sense strand
gaggaaagcguuuauugua

SEQ ID NO: 1225142 - RNA, 19 nt, Homo sapiens
  misc_RNA (1)...(19): siRNA sense strand
ggaaagcguuuauuguaga

SEQ ID NO: 1225143 - RNA, 19 nt, Homo sapiens
  misc_RNA (1)...(19): siRNA sense strand
gaaccauccuaauauugua

SEQ ID NO: 1225144 - RNA, 19 nt, Homo sapiens
  misc_RNA (1)...(19): siRNA sense strand
agacacacaugaccaauaa

SEQ ID NO: 1225145 - RNA, 19 nt, Homo sapiens
  misc_RNA (1)...(19): siRNA sense strand
gacauugcuucuacaaaua

SEQ ID NO: 1225146 - RNA, 19 nt, Homo sapiens
  misc_RNA (1)...(19): siRNA sense strand
gcaaugaguugguguuuac

SEQ ID NO: 1225147 - RNA, 19 nt, Homo sapiens
  misc_RNA (1)...(19): siRNA sense strand
ggaagagguuguuggaaga

SEQ ID NO: 1225148 - RNA, 19 nt, Homo sapiens
  misc_RNA (1)...(19): siRNA sense strand
gaaaaggaccagcaaaaua

SEQ ID NO: 1225149 - RNA, 19 nt, Homo sapiens
  misc_RNA (1)...(19): siRNA sense strand
gcaaguuccugccacaaau

SEQ ID NO: 1225150 - RNA, 19 nt, Homo sapiens
  misc_RNA (1)...(19): siRNA sense strand
aaauacaucucgccuggua

SEQ ID NO: 1225151 - RNA, 19 nt, Homo sapiens
  misc_RNA (1)...(19): siRNA sense strand
gaaccauugccauauuaua

SEQ ID NO: 1225152 - RNA, 19 nt, Homo sapiens
  misc_RNA (1)...(19): siRNA sense strand
gaaacccuuugaugagauu

SEQ ID NO: 1225153 - RNA, 19 nt, Homo sapiens
  misc_RNA (1)...(19): siRNA sense strand
ggaguuguuugcaaagcua

SEQ ID NO: 1225154 - RNA, 19 nt, Homo sapiens
  misc_RNA (1)...(19): siRNA sense strand
cagaugagccauuacagua

SEQ ID NO: 1225155 - RNA, 19 nt, Homo sapiens
  misc_RNA (1)...(19): siRNA sense strand
aauaaugacucacuugaug

SEQ ID NO: 1225156 - RNA, 19 nt, Homo sapiens
  misc_RNA (1)...(19): siRNA sense strand
gcugaaccauugccauauu

SEQ ID NO: 1225157 - RNA, 19 nt, Homo sapiens
  misc_RNA (1)...(19): siRNA sense strand
gagaggaaagcguuuauug

SEQ ID NO: 1225158 - RNA, 19 nt, Homo sapiens
  misc_RNA (1)...(19): siRNA sense strand
gguaguaauuacagugaaa

SEQ ID NO: 1225159 - RNA, 19 nt, Homo sapiens
  misc_RNA (1)...(19): siRNA sense strand
ccugaaaccaccaaacuua

SEQ ID NO: 1225160 - RNA, 19 nt, Homo sapiens
  misc_RNA (1)...(19): siRNA sense strand
gaggaugagugcugacaug

SEQ ID NO: 1225161 - RNA, 19 nt, Homo sapiens
  misc_RNA (1)...(19): siRNA sense strand
gaugagugcugacaugucu

SEQ ID NO: 1225162 - RNA, 19 nt, Homo sapiens
  misc_RNA (1)...(19): siRNA sense strand
caugugggcuguucauaau

SEQ ID NO: 1225163 - RNA, 19 nt, Homo sapiens
  misc_RNA (1)...(19): siRNA sense strand
guagauccauccaagacuu

SEQ ID NO: 1225164 - RNA, 19 nt, Homo sapiens
  misc_RNA (1)...(19): siRNA sense strand
ggaaacccuuugaugagau

SEQ ID NO: 1225165 - RNA, 19 nt, Homo sapiens
  misc_RNA (1)...(19): siRNA sense strand
uugaagagaucgacuacaa

SEQ ID NO: 1225166 - RNA, 19 nt, Homo sapiens
  misc_RNA (1)...(19): siRNA sense strand
cugaaccauugccauauua

SEQ ID NO: 1225167 - RNA, 19 nt, Homo sapiens
  misc_RNA (1)...(19): siRNA sense strand
ggaggaaauugugaaaaua

SEQ ID NO: 1225168 - RNA, 19 nt, Homo sapiens
  misc_RNA (1)...(19): siRNA sense strand
gugcugacaugucugaaau

SEQ ID NO: 1225169 - RNA, 19 nt, Homo sapiens
  misc_RNA (1)...(19): siRNA sense strand
gaugagccauuacaguauc

SEQ ID NO: 1225170 - RNA, 19 nt, Homo sapiens
  misc_RNA (1)...(19): siRNA sense strand
cccaauggcuuaucuuaca

SEQ ID NO: 1225171 - RNA, 19 nt, Homo sapiens
  misc_RNA (1)...(19): siRNA sense strand
acacuaauauggagcaagu

SEQ ID NO: 1225172 - RNA, 19 nt, Homo sapiens
  misc_RNA (1)...(19): siRNA sense strand
ccugaugauuccacagaua

SEQ ID NO: 1225173 - RNA, 19 nt, Homo sapiens
  misc_RNA (1)...(19): siRNA sense strand
gcaaagcaacagagugaau

SEQ ID NO: 1225174 - RNA, 19 nt, Homo sapiens
  misc_RNA (1)...(19): siRNA sense strand
cgugugaaccauccuaaua

SEQ ID NO: 1225175 - RNA, 19 nt, Homo sapiens
  misc_RNA (1)...(19): siRNA sense strand
gaaagcguuuauuguagag

SEQ ID NO: 1225176 - RNA, 19 nt, Homo sapiens
  misc_RNA (1)...(19): siRNA sense strand
gcaguuaucccgugugaac

SEQ ID NO: 1225177 - RNA, 19 nt, Homo sapiens
  misc_RNA (1)...(19): siRNA sense strand
gcugacaugucugaaauag

SEQ ID NO: 1225178 - RNA, 19 nt, Homo sapiens
  misc_RNA (1)...(19): siRNA sense strand
gugcugaaccauugccaua

SEQ ID NO: 1225179 - RNA, 19 nt, Homo sapiens
  misc_RNA (1)...(19): siRNA sense strand
ugugaaccauccuaauauu

SEQ ID NO: 1225180 - RNA, 19 nt, Homo sapiens
  misc_RNA (1)...(19): siRNA sense strand
cggaaacccuuugaugaga

SEQ ID NO: 1225181 - RNA, 19 nt, Homo sapiens
  misc_RNA (1)...(19): siRNA sense strand
aagaggagccuuuggaguu

SEQ ID NO: 1225182 - RNA, 19 nt, Homo sapiens
  misc_RNA (1)...(19): siRNA sense strand
ggacagccaagacguagau

SEQ ID NO: 1225183 - RNA, 19 nt, Homo sapiens
  misc_RNA (1)...(19): siRNA sense strand
aggagcagaugagccauua

SEQ ID NO: 1225184 - RNA, 19 nt, Homo sapiens
  misc_RNA (1)...(19): siRNA sense strand
gaguugguguuuacagugu

SEQ ID NO: 1225185 - RNA, 19 nt, Homo sapiens
  misc_RNA (1)...(19): siRNA sense strand
gaaacgacaaggcacuuca

SEQ ID NO: 1225186 - RNA, 19 nt, Homo sapiens
  misc_RNA (1)...(19): siRNA sense strand
acaguauccuugucaguau

SEQ ID NO: 1225187 - RNA, 19 nt, Homo sapiens
  misc_RNA (1)...(19): siRNA sense strand
cgcaaugaguugguguuua

SEQ ID NO: 1225188 - RNA, 19 nt, Homo sapiens
  misc_RNA (1)...(19): siRNA sense strand
gcagaugagccauuacagu

SEQ ID NO: 1225189 - RNA, 19 nt, Homo sapiens
  misc_RNA (1)...(19): siRNA sense strand
gagcagaugagccauuaca

SEQ ID NO: 1225190 - RNA, 19 nt, Homo sapiens
  misc_RNA (1)...(19): siRNA sense strand
uacacuggaucaccaacua

SEQ ID NO: 1225191 - RNA, 19 nt, Homo sapiens
  misc_RNA (1)...(19): siRNA sense strand
gaagucagcagcagaaacg

SEQ ID NO: 1225192 - RNA, 19 nt, Homo sapiens
  misc_RNA (1)...(19): siRNA sense strand
caacuagaggucaucagaa

SEQ ID NO: 1225193 - RNA, 19 nt, Homo sapiens
  misc_RNA (1)...(19): siRNA sense strand
aaagcuaaguggagagcaa

SEQ ID NO: 1225194 - RNA, 19 nt, Homo sapiens
  misc_RNA (1)...(19): siRNA sense strand
ggagcaguguggagagcuu

SEQ ID NO: 1225195 - RNA, 19 nt, Homo sapiens
  misc_RNA (1)...(19): siRNA sense strand
cagacacacaugaccaaua

SEQ ID NO: 1225196 - RNA, 19 nt, Homo sapiens
  misc_RNA (1)...(19): siRNA sense strand
cuacaaauacgaguaacaa

SEQ ID NO: 1225197 - RNA, 19 nt, Homo sapiens
  misc_RNA (1)...(19): siRNA sense strand
gcccuucaauggaggaaau

SEQ ID NO: 1225198 - RNA, 19 nt, Homo sapiens
  misc_RNA (1)...(19): siRNA sense strand
aaauuuaccuaagcccauu

SEQ ID NO: 1225199 - RNA, 19 nt, Homo sapiens
  misc_RNA (1)...(19): siRNA sense strand
cgaaucaugugggcuguuc

SEQ ID NO: 1225200 - RNA, 19 nt, Homo sapiens
  misc_RNA (1)...(19): siRNA sense strand
uggcuuaucuucacagcau

SEQ ID NO: 1225201 - RNA, 19 nt, Homo sapiens
  misc_RNA (1)...(19): siRNA sense strand
gauaccaauggaucagaua

SEQ ID NO: 1225202 - RNA, 19 nt, Homo sapiens
  misc_RNA (1)...(19): siRNA sense strand
cccagugucagaaugauua

SEQ ID NO: 1225203 - RNA, 19 nt, Homo sapiens
  misc_RNA (1)...(19): siRNA sense strand
ucaugugggcuguucauaa

SEQ ID NO: 1225204 - RNA, 19 nt, Homo sapiens
  misc_RNA (1)...(19): siRNA sense strand
gaaaccaccaaacuuacug

SEQ ID NO: 1225205 - RNA, 19 nt, Homo sapiens
  misc_RNA (1)...(19): siRNA sense strand
gaaaauaaugacucacuug

SEQ ID NO: 1225206 - RNA, 19 nt, Homo sapiens
  misc_RNA (1)...(19): siRNA sense strand
ugccacaaaugauacuauu

SEQ ID NO: 1225207 - RNA, 19 nt, Homo sapiens
  misc_RNA (1)...(19): siRNA sense strand
cggcaguuaucccguguga

SEQ ID NO: 1225208 - RNA, 19 nt, Homo sapiens
  misc_RNA (1)...(19): siRNA sense strand
gccacaaaugauacuauua

SEQ ID NO: 1225209 - RNA, 19 nt, Homo sapiens
  misc_RNA (1)...(19): siRNA sense strand
agaggagccuuuggaguug

SEQ ID NO: 1225210 - RNA, 19 nt, Homo sapiens
  misc_RNA (1)...(19): siRNA sense strand
aggaaagcguuuauuguag

SEQ ID NO: 1225211 - RNA, 19 nt, Homo sapiens
  misc_RNA (1)...(19): siRNA sense strand
ggaguggcuuaucuucaca

SEQ ID NO: 1225212 - RNA, 19 nt, Homo sapiens
  misc_RNA (1)...(19): siRNA sense strand
ugaaccauccuaauauugu

SEQ ID NO: 1225213 - RNA, 19 nt, Homo sapiens
  misc_RNA (1)...(19): siRNA sense strand
uauggagccugcuugaauc

SEQ ID NO: 1225214 - RNA, 19 nt, Homo sapiens
  misc_RNA (1)...(19): siRNA sense strand
guuccugccacaaaugaua

SEQ ID NO: 1225215 - RNA, 19 nt, Homo sapiens
  misc_RNA (1)...(19): siRNA sense strand
gguacucgaccaccacuga

SEQ ID NO: 1225216 - RNA, 19 nt, Homo sapiens
  misc_RNA (1)...(19): siRNA sense strand
aauccagugugucuuguga

SEQ ID NO: 1225217 - RNA, 19 nt, Homo sapiens
  misc_RNA (1)...(19): siRNA sense strand
ucauggacauugcuucuac

SEQ ID NO: 1225218 - RNA, 19 nt, Homo sapiens
  misc_RNA (1)...(19): siRNA sense strand
uacaguauccuugucagua

SEQ ID NO: 1225219 - RNA, 19 nt, Homo sapiens
  misc_RNA (1)...(19): siRNA sense strand
gucggaaacccuuugauga

SEQ ID NO: 1225220 - RNA, 19 nt, Homo sapiens
  misc_RNA (1)...(19): siRNA sense strand
gacauucagacacacauga

SEQ ID NO: 1225221 - RNA, 19 nt, Homo sapiens
  misc_RNA (1)...(19): siRNA sense strand
cagugugucuugugaugga

SEQ ID NO: 1225222 - RNA, 19 nt, Homo sapiens
  misc_RNA (1)...(19): siRNA sense strand
ucagaagucagcagcagaa

SEQ ID NO: 1225223 - RNA, 19 nt, Homo sapiens
  misc_RNA (1)...(19): siRNA sense strand
aggcaaagcaacagaguga

SEQ ID NO: 1225224 - RNA, 19 nt, Homo sapiens
  misc_RNA (1)...(19): siRNA sense strand
gcgcuuagaaucaaaauug

SEQ ID NO: 1225225 - RNA, 19 nt, Homo sapiens
  misc_RNA (1)...(19): siRNA sense strand
caacccaaagcgcuaauuc

SEQ ID NO: 1225226 - RNA, 19 nt, Homo sapiens
  misc_RNA (1)...(19): siRNA sense strand
aaagugaaucugagaggaa

SEQ ID NO: 1225227 - RNA, 19 nt, Homo sapiens
  misc_RNA (1)...(19): siRNA sense strand
uguagagcuucggcaguua

SEQ ID NO: 1225228 - RNA, 19 nt, Homo sapiens
  misc_RNA (1)...(19): siRNA sense strand
gcucauucauggacauugc

SEQ ID NO: 1225229 - RNA, 19 nt, Homo sapiens
  misc_RNA (1)...(19): siRNA sense strand
gugugaaccauccuaauau

SEQ ID NO: 1225230 - RNA, 19 nt, Homo sapiens
  misc_RNA (1)...(19): siRNA sense strand
caguauccuugucaguauu

SEQ ID NO: 1225231 - RNA, 19 nt, Homo sapiens
  misc_RNA (1)...(19): siRNA sense strand
ccaaggaguggcuuaucuu

SEQ ID NO: 1225232 - RNA, 19 nt, Homo sapiens
  misc_RNA (1)...(19): siRNA sense strand
gugaaccauccuaauauug

SEQ ID NO: 1225233 - RNA, 19 nt, Homo sapiens
  misc_RNA (1)...(19): siRNA sense strand
gaucgagguggaagagguu

SEQ ID NO: 1225234 - RNA, 19 nt, Homo sapiens
  misc_RNA (1)...(19): siRNA sense strand
uuauggagccugcuugaau

SEQ ID NO: 1225235 - RNA, 19 nt, Homo sapiens
  misc_RNA (1)...(19): siRNA sense strand
aagugaaucugagaggaaa

SEQ ID NO: 1225236 - RNA, 19 nt, Homo sapiens
  misc_RNA (1)...(19): siRNA sense strand
acaacuagaggucaucaga

SEQ ID NO: 1225237 - RNA, 19 nt, Homo sapiens
  misc_RNA (1)...(19): siRNA sense strand
caaagcaacagagugaauc

SEQ ID NO: 1225238 - RNA, 19 nt, Homo sapiens
  misc_RNA (1)...(19): siRNA sense strand
ggacauugcuucuacaaau

SEQ ID NO: 1225239 - RNA, 19 nt, Homo sapiens
  misc_RNA (1)...(19): siRNA sense strand
gagugaaucuggacguuua

SEQ ID NO: 1225240 - RNA, 19 nt, Homo sapiens
  misc_RNA (1)...(19): siRNA sense strand
ugacaugucugaaauagaa

SEQ ID NO: 1225241 - RNA, 19 nt, Homo sapiens
  misc_RNA (1)...(19): siRNA sense strand
gaggaaagcguuuauugua

SEQ ID NO: 1225242 - RNA, 19 nt, Homo sapiens
  misc_RNA (1)...(19): siRNA sense strand
ggaaagcguuuauuguaga

SEQ ID NO: 1225243 - RNA, 19 nt, Homo sapiens
  misc_RNA (1)...(19): siRNA sense strand
gaaccauccuaauauugua

SEQ ID NO: 1225244 - RNA, 19 nt, Homo sapiens
  misc_RNA (1)...(19): siRNA sense strand
agacacacaugaccaauaa

SEQ ID NO: 1225245 - RNA, 19 nt, Homo sapiens
  misc_RNA (1)...(19): siRNA sense strand
gacauugcuucuacaaaua

SEQ ID NO: 1225246 - RNA, 19 nt, Homo sapiens
  misc_RNA (1)...(19): siRNA sense strand
gcaaugaguugguguuuac

SEQ ID NO: 1225247 - RNA, 19 nt, Homo sapiens
  misc_RNA (1)...(19): siRNA sense strand
ggaagagguuguuggaaga

SEQ ID NO: 1225248 - RNA, 19 nt, Homo sapiens
  misc_RNA (1)...(19): siRNA sense strand
gcaaguuccugccacaaau

SEQ ID NO: 1225249 - RNA, 19 nt, Homo sapiens
  misc_RNA (1)...(19): siRNA sense strand
gaaccauugccauauuaua

SEQ ID NO: 1225250 - RNA, 19 nt, Homo sapiens
  misc_RNA (1)...(19): siRNA sense strand
gaaacccuuugaugagauu

SEQ ID NO: 1225251 - RNA, 19 nt, Homo sapiens
  misc_RNA (1)...(19): siRNA sense strand
ggaguuguuugcaaagcua

SEQ ID NO: 1225252 - RNA, 19 nt, Homo sapiens
  misc_RNA (1)...(19): siRNA sense strand
cagaugagccauuacagua

SEQ ID NO: 1225253 - RNA, 19 nt, Homo sapiens
  misc_RNA (1)...(19): siRNA sense strand
aauaaugacucacuugaug

SEQ ID NO: 1225254 - RNA, 19 nt, Homo sapiens
  misc_RNA (1)...(19): siRNA sense strand
gcugaaccauugccauauu

SEQ ID NO: 1225255 - RNA, 19 nt, Homo sapiens
  misc_RNA (1)...(19): siRNA sense strand
gagaggaaagcguuuauug

SEQ ID NO: 1225256 - RNA, 19 nt, Homo sapiens
  misc_RNA (1)...(19): siRNA sense strand
gguaguaauuacagugaaa

SEQ ID NO: 1225257 - RNA, 19 nt, Homo sapiens
  misc_RNA (1)...(19): siRNA sense strand
ccugaaaccaccaaacuua

SEQ ID NO: 1225258 - RNA, 19 nt, Homo sapiens
  misc_RNA (1)...(19): siRNA sense strand
gaggaugagugcugacaug

SEQ ID NO: 1225259 - RNA, 19 nt, Homo sapiens
  misc_RNA (1)...(19): siRNA sense strand
gaugagugcugacaugucu

SEQ ID NO: 1225260 - RNA, 19 nt, Homo sapiens
  misc_RNA (1)...(19): siRNA sense strand
caugugggcuguucauaau

SEQ ID NO: 1225261 - RNA, 19 nt, Homo sapiens
  misc_RNA (1)...(19): siRNA sense strand
guagauccauccaagacuu

SEQ ID NO: 1225262 - RNA, 19 nt, Homo sapiens
  misc_RNA (1)...(19): siRNA sense strand
ggaaacccuuugaugagau

SEQ ID NO: 1225263 - RNA, 19 nt, Homo sapiens
  misc_RNA (1)...(19): siRNA sense strand
uugaagagaucgacuacaa

SEQ ID NO: 1225264 - RNA, 19 nt, Homo sapiens
  misc_RNA (1)...(19): siRNA sense strand
cugaaccauugccauauua

SEQ ID NO: 1225265 - RNA, 19 nt, Homo sapiens
  misc_RNA (1)...(19): siRNA sense strand
ggaggaaauugugaaaaua

SEQ ID NO: 1225266 - RNA, 19 nt, Homo sapiens
  misc_RNA (1)...(19): siRNA sense strand
gugcugacaugucugaaau

SEQ ID NO: 1225267 - RNA, 19 nt, Homo sapiens
  misc_RNA (1)...(19): siRNA sense strand
gaugagccauuacaguauc

SEQ ID NO: 1225268 - RNA, 19 nt, Homo sapiens
  misc_RNA (1)...(19): siRNA sense strand
cccaauggcuuaucuuaca

SEQ ID NO: 1225269 - RNA, 19 nt, Homo sapiens
  misc_RNA (1)...(19): siRNA sense strand
acacuaauauggagcaagu

SEQ ID NO: 1225270 - RNA, 19 nt, Homo sapiens
  misc_RNA (1)...(19): siRNA sense strand
ccugaugauuccacagaua

SEQ ID NO: 1225271 - RNA, 19 nt, Homo sapiens
  misc_RNA (1)...(19): siRNA sense strand
gcaaagcaacagagugaau

SEQ ID NO: 1225272 - RNA, 19 nt, Homo sapiens
  misc_RNA (1)...(19): siRNA sense strand
cgugugaaccauccuaaua

SEQ ID NO: 1225273 - RNA, 19 nt, Homo sapiens
  misc_RNA (1)...(19): siRNA sense strand
gaaagcguuuauuguagag

SEQ ID NO: 1225274 - RNA, 19 nt, Homo sapiens
  misc_RNA (1)...(19): siRNA sense strand
gcaguuaucccgugugaac

SEQ ID NO: 1225275 - RNA, 19 nt, Homo sapiens
  misc_RNA (1)...(19): siRNA sense strand
gcugacaugucugaaauag

SEQ ID NO: 1225276 - RNA, 19 nt, Homo sapiens
  misc_RNA (1)...(19): siRNA sense strand
gugcugaaccauugccaua

SEQ ID NO: 1225277 - RNA, 19 nt, Homo sapiens
  misc_RNA (1)...(19): siRNA sense strand
ugugaaccauccuaauauu

SEQ ID NO: 1225278 - RNA, 19 nt, Homo sapiens
  misc_RNA (1)...(19): siRNA sense strand
cggaaacccuuugaugaga

SEQ ID NO: 1225279 - RNA, 19 nt, Homo sapiens
  misc_RNA (1)...(19): siRNA sense strand
aagaggagccuuuggaguu

SEQ ID NO: 1225280 - RNA, 19 nt, Homo sapiens
  misc_RNA (1)...(19): siRNA sense strand
ggacagccaagacguagau

SEQ ID NO: 1225281 - RNA, 19 nt, Homo sapiens
  misc_RNA (1)...(19): siRNA sense strand
aggagcagaugagccauua

SEQ ID NO: 1225282 - RNA, 19 nt, Homo sapiens
  misc_RNA (1)...(19): siRNA sense strand
gaguugguguuuacagugu

SEQ ID NO: 1225283 - RNA, 19 nt, Homo sapiens
  misc_RNA (1)...(19): siRNA sense strand
acaguauccuugucaguau

SEQ ID NO: 1225284 - RNA, 19 nt, Homo sapiens
  misc_RNA (1)...(19): siRNA sense strand
cgcaaugaguugguguuua

SEQ ID NO: 1225285 - RNA, 19 nt, Homo sapiens
  misc_RNA (1)...(19): siRNA sense strand
gcagaugagccauuacagu

SEQ ID NO: 1225286 - RNA, 19 nt, Homo sapiens
  misc_RNA (1)...(19): siRNA sense strand
gagcagaugagccauuaca

SEQ ID NO: 1225287 - RNA, 19 nt, Homo sapiens
  misc_RNA (1)...(19): siRNA sense strand
uacacuggaucaccaacua

SEQ ID NO: 1225288 - RNA, 19 nt, Homo sapiens
  misc_RNA (1)...(19): siRNA sense strand
aaagcuaaguggagagcaa

SEQ ID NO: 1225289 - RNA, 19 nt, Homo sapiens
  misc_RNA (1)...(19): siRNA sense strand
ggagcaguguggagagcuu

SEQ ID NO: 1225290 - RNA, 19 nt, Homo sapiens
  misc_RNA (1)...(19): siRNA sense strand
cagacacacaugaccaaua

SEQ ID NO: 1225291 - RNA, 19 nt, Homo sapiens
  misc_RNA (1)...(19): siRNA sense strand
cuacaaauacgaguaacaa

SEQ ID NO: 1225292 - RNA, 19 nt, Homo sapiens
  misc_RNA (1)...(19): siRNA sense strand
gcccuucaauggaggaaau

SEQ ID NO: 1225293 - RNA, 19 nt, Homo sapiens
  misc_RNA (1)...(19): siRNA sense strand
aaauuuaccuaagcccauu

SEQ ID NO: 1225294 - RNA, 19 nt, Homo sapiens
  misc_RNA (1)...(19): siRNA sense strand
cgaaucaugugggcuguuc

SEQ ID NO: 1225295 - RNA, 19 nt, Homo sapiens
  misc_RNA (1)...(19): siRNA sense strand
uggcuuaucuucacagcau

SEQ ID NO: 1225296 - RNA, 19 nt, Homo sapiens
  misc_RNA (1)...(19): siRNA sense strand
gauaccaauggaucagaua

SEQ ID NO: 1225297 - RNA, 19 nt, Homo sapiens
  misc_RNA (1)...(19): siRNA sense strand
cccagugucagaaugauua

SEQ ID NO: 1225298 - RNA, 19 nt, Homo sapiens
  misc_RNA (1)...(19): siRNA sense strand
ucaugugggcuguucauaa

SEQ ID NO: 1225299 - RNA, 19 nt, Homo sapiens
  misc_RNA (1)...(19): siRNA sense strand
gaaaccaccaaacuuacug

SEQ ID NO: 1225300 - RNA, 19 nt, Homo sapiens
  misc_RNA (1)...(19): siRNA sense strand
gaaaauaaugacucacuug

SEQ ID NO: 1225301 - RNA, 19 nt, Homo sapiens
  misc_RNA (1)...(19): siRNA sense strand
ugccacaaaugauacuauu

SEQ ID NO: 1225302 - RNA, 19 nt, Homo sapiens
  misc_RNA (1)...(19): siRNA sense strand
aggaaagcguuuauuguag

SEQ ID NO: 1225303 - RNA, 19 nt, Homo sapiens
  misc_RNA (1)...(19): siRNA sense strand
agaggagccuuuggaguug

SEQ ID NO: 1225304 - RNA, 19 nt, Homo sapiens
  misc_RNA (1)...(19): siRNA sense strand
gccacaaaugauacuauua

SEQ ID NO: 1225305 - RNA, 19 nt, Homo sapiens
  misc_RNA (1)...(19): siRNA sense strand
ggaguggcuuaucuucaca

SEQ ID NO: 1225306 - RNA, 19 nt, Homo sapiens
  misc_RNA (1)...(19): siRNA sense strand
ugaaccauccuaauauugu

SEQ ID NO: 1225307 - RNA, 19 nt, Homo sapiens
  misc_RNA (1)...(19): siRNA sense strand
cggcaguuaucccguguga

SEQ ID NO: 1225308 - RNA, 19 nt, Homo sapiens
  misc_RNA (1)...(19): siRNA sense strand
uauggagccugcuugaauc

SEQ ID NO: 1225309 - RNA, 19 nt, Homo sapiens
  misc_RNA (1)...(19): siRNA sense strand
guuccugccacaaaugaua

SEQ ID NO: 1225310 - RNA, 19 nt, Homo sapiens
  misc_RNA (1)...(19): siRNA sense strand
gguacucgaccaccacuga

SEQ ID NO: 1225311 - RNA, 19 nt, Homo sapiens
  misc_RNA (1)...(19): siRNA sense strand
aauccagugugucuuguga

SEQ ID NO: 1225312 - RNA, 19 nt, Homo sapiens
  misc_RNA (1)...(19): siRNA sense strand
ucauggacauugcuucuac

SEQ ID NO: 1225313 - RNA, 19 nt, Homo sapiens
  misc_RNA (1)...(19): siRNA sense strand
uacaguauccuugucagua

SEQ ID NO: 1225314 - RNA, 19 nt, Homo sapiens
  misc_RNA (1)...(19): siRNA sense strand
gucggaaacccuuugauga

SEQ ID NO: 1225315 - RNA, 19 nt, Homo sapiens
  misc_RNA (1)...(19): siRNA sense strand
gacauucagacacacauga

SEQ ID NO: 1225316 - RNA, 19 nt, Homo sapiens
  misc_RNA (1)...(19): siRNA sense strand
cagugugucuugugaugga

SEQ ID NO: 1225317 - RNA, 19 nt, Homo sapiens
  misc_RNA (1)...(19): siRNA sense strand
aggcaaagcaacagaguga

SEQ ID NO: 1225318 - RNA, 19 nt, Homo sapiens
  misc_RNA (1)...(19): siRNA sense strand
gcgcuuagaaucaaaauug

SEQ ID NO: 1225319 - RNA, 19 nt, Homo sapiens
  misc_RNA (1)...(19): siRNA sense strand
caacccaaagcgcuaauuc

SEQ ID NO: 1225320 - RNA, 19 nt, Homo sapiens
  misc_RNA (1)...(19): siRNA sense strand
gugugaaccauccuaauau

SEQ ID NO: 1225321 - RNA, 19 nt, Homo sapiens
  misc_RNA (1)...(19): siRNA sense strand
gcucauucauggacauugc

SEQ ID NO: 1225322 - RNA, 19 nt, Homo sapiens
  misc_RNA (1)...(19): siRNA sense strand
caguauccuugucaguauu

SEQ ID NO: 1225323 - RNA, 19 nt, Homo sapiens
  misc_RNA (1)...(19): siRNA sense strand
aaagugaaucugagaggaa

SEQ ID NO: 1225324 - RNA, 19 nt, Homo sapiens
  misc_RNA (1)...(19): siRNA sense strand
uguagagcuucggcaguua

SEQ ID NO: 1225325 - RNA, 19 nt, Homo sapiens
  misc_RNA (1)...(19): siRNA sense strand
gugaaccauccuaauauug

SEQ ID NO: 1225326 - RNA, 19 nt, Homo sapiens
  misc_RNA (1)...(19): siRNA sense strand
gaucgagguggaagagguu

SEQ ID NO: 1225327 - RNA, 19 nt, Homo sapiens
  misc_RNA (1)...(19): siRNA sense strand
ccaaggaguggcuuaucuu

SEQ ID NO: 1225328 - RNA, 19 nt, Homo sapiens
  misc_RNA (1)...(19): siRNA sense strand
uuauggagccugcuugaau

SEQ ID NO: 1225329 - RNA, 19 nt, Homo sapiens
  misc_RNA (1)...(19): siRNA sense strand
caaggaguggcuuaucuuc

SEQ ID NO: 1225330 - RNA, 19 nt, Homo sapiens
  misc_RNA (1)...(19): siRNA sense strand
caaagcaacagagugaauc

SEQ ID NO: 1225331 - RNA, 19 nt, Homo sapiens
  misc_RNA (1)...(19): siRNA sense strand
acacaugaccaauaacaag

SEQ ID NO: 1225332 - RNA, 19 nt, Homo sapiens
  misc_RNA (1)...(19): siRNA sense strand
aagugaaucugagaggaaa

SEQ ID NO: 1225333 - RNA, 19 nt, Homo sapiens
  misc_RNA (1)...(19): siRNA sense strand
gaccugaaaccaccaaacu

SEQ ID NO: 1225334 - RNA, 19 nt, Homo sapiens
  misc_RNA (1)...(19): siRNA sense strand
guagagcuucggcaguuau

SEQ ID NO: 1225335 - RNA, 19 nt, Homo sapiens
  misc_RNA (1)...(19): siRNA sense strand
agaggaaagcguuuauugu

SEQ ID NO: 1225336 - RNA, 19 nt, Homo sapiens
  misc_RNA (1)...(19): siRNA sense strand
gguggaagagguuguugga

SEQ ID NO: 1225337 - RNA, 19 nt, Homo sapiens
  misc_RNA (1)...(19): siRNA sense strand
uggcccagcuuuccgaauc

SEQ ID NO: 1225338 - RNA, 19 nt, Homo sapiens
  misc_RNA (1)...(19): siRNA sense strand
ggacauugcuucuacaaau

SEQ ID NO: 1225339 - RNA, 19 nt, Homo sapiens
  misc_RNA (1)...(19): siRNA sense strand
gagugaaucuggacguuua

SEQ ID NO: 1225340 - RNA, 19 nt, Homo sapiens
  misc_RNA (1)...(19): siRNA sense strand
ugacaugucugaaauagaa

SEQ ID NO: 1225341 - RNA, 19 nt, Homo sapiens
  misc_RNA (1)...(19): siRNA sense strand
gaggaaagcguuuauugua

SEQ ID NO: 1225342 - RNA, 19 nt, Homo sapiens
  misc_RNA (1)...(19): siRNA sense strand
ggaaagcguuuauuguaga

SEQ ID NO: 1225343 - RNA, 19 nt, Homo sapiens
  misc_RNA (1)...(19): siRNA sense strand
gaaccauccuaauauugua

SEQ ID NO: 1225344 - RNA, 19 nt, Homo sapiens
  misc_RNA (1)...(19): siRNA sense strand
agacacacaugaccaauaa

SEQ ID NO: 1225345 - RNA, 19 nt, Homo sapiens
  misc_RNA (1)...(19): siRNA sense strand
gacauugcuucuacaaaua

SEQ ID NO: 1225346 - RNA, 19 nt, Homo sapiens
  misc_RNA (1)...(19): siRNA sense strand
gcaaugaguugguguuuac

SEQ ID NO: 1225347 - RNA, 19 nt, Homo sapiens
  misc_RNA (1)...(19): siRNA sense strand
ggaagagguuguuggaaga

SEQ ID NO: 1225348 - RNA, 19 nt, Homo sapiens
  misc_RNA (1)...(19): siRNA sense strand
gcaaguuccugccacaaau

SEQ ID NO: 1225349 - RNA, 19 nt, Homo sapiens
  misc_RNA (1)...(19): siRNA sense strand
gaaccauugccauauuaua

SEQ ID NO: 1225350 - RNA, 19 nt, Homo sapiens
  misc_RNA (1)...(19): siRNA sense strand
gaaacccuuugaugagauu

SEQ ID NO: 1225351 - RNA, 19 nt, Homo sapiens
  misc_RNA (1)...(19): siRNA sense strand
ggaguuguuugcaaagcua

SEQ ID NO: 1225352 - RNA, 19 nt, Homo sapiens
  misc_RNA (1)...(19): siRNA sense strand
cagaugagccauuacagua

SEQ ID NO: 1225353 - RNA, 19 nt, Homo sapiens
  misc_RNA (1)...(19): siRNA sense strand
aauaaugacucacuugaug

SEQ ID NO: 1225354 - RNA, 19 nt, Homo sapiens
  misc_RNA (1)...(19): siRNA sense strand
gcugaaccauugccauauu

SEQ ID NO: 1225355 - RNA, 19 nt, Homo sapiens
  misc_RNA (1)...(19): siRNA sense strand
gagaggaaagcguuuauug

SEQ ID NO: 1225356 - RNA, 19 nt, Homo sapiens
  misc_RNA (1)...(19): siRNA sense strand
gguaguaauuacagugaaa

SEQ ID NO: 1225357 - RNA, 19 nt, Homo sapiens
  misc_RNA (1)...(19): siRNA sense strand
ccugaaaccaccaaacuua

SEQ ID NO: 1225358 - RNA, 19 nt, Homo sapiens
  misc_RNA (1)...(19): siRNA sense strand
gaggaugagugcugacaug

SEQ ID NO: 1225359 - RNA, 19 nt, Homo sapiens
  misc_RNA (1)...(19): siRNA sense strand
gaugagugcugacaugucu

SEQ ID NO: 1225360 - RNA, 19 nt, Homo sapiens
  misc_RNA (1)...(19): siRNA sense strand
caugugggcuguucauaau

SEQ ID NO: 1225361 - RNA, 19 nt, Homo sapiens
  misc_RNA (1)...(19): siRNA sense strand
guagauccauccaagacuu

SEQ ID NO: 1225362 - RNA, 19 nt, Homo sapiens
  misc_RNA (1)...(19): siRNA sense strand
ggaaacccuuugaugagau

SEQ ID NO: 1225363 - RNA, 19 nt, Homo sapiens
  misc_RNA (1)...(19): siRNA sense strand
uugaagagaucgacuacaa

SEQ ID NO: 1225364 - RNA, 19 nt, Homo sapiens
  misc_RNA (1)...(19): siRNA sense strand
cugaaccauugccauauua

SEQ ID NO: 1225365 - RNA, 19 nt, Homo sapiens
  misc_RNA (1)...(19): siRNA sense strand
ggaggaaauugugaaaaua

SEQ ID NO: 1225366 - RNA, 19 nt, Homo sapiens
  misc_RNA (1)...(19): siRNA sense strand
gugcugacaugucugaaau

SEQ ID NO: 1225367 - RNA, 19 nt, Homo sapiens
  misc_RNA (1)...(19): siRNA sense strand
gaugagccauuacaguauc

SEQ ID NO: 1225368 - RNA, 19 nt, Homo sapiens
  misc_RNA (1)...(19): siRNA sense strand
cccaauggcuuaucuuaca

SEQ ID NO: 1225369 - RNA, 19 nt, Homo sapiens
  misc_RNA (1)...(19): siRNA sense strand
acacuaauauggagcaagu

SEQ ID NO: 1225370 - RNA, 19 nt, Homo sapiens
  misc_RNA (1)...(19): siRNA sense strand
ccugaugauuccacagaua

SEQ ID NO: 1225371 - RNA, 19 nt, Homo sapiens
  misc_RNA (1)...(19): siRNA sense strand
gcaaagcaacagagugaau

SEQ ID NO: 1225372 - RNA, 19 nt, Homo sapiens
  misc_RNA (1)...(19): siRNA sense strand
cgugugaaccauccuaaua

SEQ ID NO: 1225373 - RNA, 19 nt, Homo sapiens
  misc_RNA (1)...(19): siRNA sense strand
gaaagcguuuauuguagag

SEQ ID NO: 1225374 - RNA, 19 nt, Homo sapiens
  misc_RNA (1)...(19): siRNA sense strand
gcaguuaucccgugugaac

SEQ ID NO: 1225375 - RNA, 19 nt, Homo sapiens
  misc_RNA (1)...(19): siRNA sense strand
gcugacaugucugaaauag

SEQ ID NO: 1225376 - RNA, 19 nt, Homo sapiens
  misc_RNA (1)...(19): siRNA sense strand
gugcugaaccauugccaua

SEQ ID NO: 1225377 - RNA, 19 nt, Homo sapiens
  misc_RNA (1)...(19): siRNA sense strand
ugugaaccauccuaauauu

SEQ ID NO: 1225378 - RNA, 19 nt, Homo sapiens
  misc_RNA (1)...(19): siRNA sense strand
cggaaacccuuugaugaga

SEQ ID NO: 1225379 - RNA, 19 nt, Homo sapiens
  misc_RNA (1)...(19): siRNA sense strand
aagaggagccuuuggaguu

SEQ ID NO: 1225380 - RNA, 19 nt, Homo sapiens
  misc_RNA (1)...(19): siRNA sense strand
ggacagccaagacguagau

SEQ ID NO: 1225381 - RNA, 19 nt, Homo sapiens
  misc_RNA (1)...(19): siRNA sense strand
aggagcagaugagccauua

SEQ ID NO: 1225382 - RNA, 19 nt, Homo sapiens
  misc_RNA (1)...(19): siRNA sense strand
gaguugguguuuacagugu

SEQ ID NO: 1225383 - RNA, 19 nt, Homo sapiens
  misc_RNA (1)...(19): siRNA sense strand
acaguauccuugucaguau

SEQ ID NO: 1225384 - RNA, 19 nt, Homo sapiens
  misc_RNA (1)...(19): siRNA sense strand
cgcaaugaguugguguuua

SEQ ID NO: 1225385 - RNA, 19 nt, Homo sapiens
  misc_RNA (1)...(19): siRNA sense strand
gcagaugagccauuacagu

SEQ ID NO: 1225386 - RNA, 19 nt, Homo sapiens
  misc_RNA (1)...(19): siRNA sense strand
gagcagaugagccauuaca

SEQ ID NO: 1225387 - RNA, 19 nt, Homo sapiens
  misc_RNA (1)...(19): siRNA sense strand
uacacuggaucaccaacua

SEQ ID NO: 1225388 - RNA, 19 nt, Homo sapiens
  misc_RNA (1)...(19): siRNA sense strand
aaagcuaaguggagagcaa

SEQ ID NO: 1225389 - RNA, 19 nt, Homo sapiens
  misc_RNA (1)...(19): siRNA sense strand
ggagcaguguggagagcuu

SEQ ID NO: 1225390 - RNA, 19 nt, Homo sapiens
  misc_RNA (1)...(19): siRNA sense strand
cagacacacaugaccaaua

SEQ ID NO: 1225391 - RNA, 19 nt, Homo sapiens
  misc_RNA (1)...(19): siRNA sense strand
cuacaaauacgaguaacaa

SEQ ID NO: 1225392 - RNA, 19 nt, Homo sapiens
  misc_RNA (1)...(19): siRNA sense strand
gcccuucaauggaggaaau

SEQ ID NO: 1225393 - RNA, 19 nt, Homo sapiens
  misc_RNA (1)...(19): siRNA sense strand
aaauuuaccuaagcccauu

SEQ ID NO: 1225394 - RNA, 19 nt, Homo sapiens
  misc_RNA (1)...(19): siRNA sense strand
cgaaucaugugggcuguuc

SEQ ID NO: 1225395 - RNA, 19 nt, Homo sapiens
  misc_RNA (1)...(19): siRNA sense strand
uggcuuaucuucacagcau

SEQ ID NO: 1225396 - RNA, 19 nt, Homo sapiens
  misc_RNA (1)...(19): siRNA sense strand
gauaccaauggaucagaua

SEQ ID NO: 1225397 - RNA, 19 nt, Homo sapiens
  misc_RNA (1)...(19): siRNA sense strand
cccagugucagaaugauua

SEQ ID NO: 1225398 - RNA, 19 nt, Homo sapiens
  misc_RNA (1)...(19): siRNA sense strand
ucaugugggcuguucauaa

SEQ ID NO: 1225399 - RNA, 19 nt, Homo sapiens
  misc_RNA (1)...(19): siRNA sense strand
gaaaccaccaaacuuacug

SEQ ID NO: 1225400 - RNA, 19 nt, Homo sapiens
  misc_RNA (1)...(19): siRNA sense strand
gaaaauaaugacucacuug

SEQ ID NO: 1225401 - RNA, 19 nt, Homo sapiens
  misc_RNA (1)...(19): siRNA sense strand
ugccacaaaugauacuauu

SEQ ID NO: 1225402 - RNA, 19 nt, Homo sapiens
  misc_RNA (1)...(19): siRNA sense strand
aggaaagcguuuauuguag

SEQ ID NO: 1225403 - RNA, 19 nt, Homo sapiens
  misc_RNA (1)...(19): siRNA sense strand
agaggagccuuuggaguug

SEQ ID NO: 1225404 - RNA, 19 nt, Homo sapiens
  misc_RNA (1)...(19): siRNA sense strand
gccacaaaugauacuauua

SEQ ID NO: 1225405 - RNA, 19 nt, Homo sapiens
  misc_RNA (1)...(19): siRNA sense strand
ggaguggcuuaucuucaca

SEQ ID NO: 1225406 - RNA, 19 nt, Homo sapiens
  misc_RNA (1)...(19): siRNA sense strand
ugaaccauccuaauauugu

SEQ ID NO: 1225407 - RNA, 19 nt, Homo sapiens
  misc_RNA (1)...(19): siRNA sense strand
cggcaguuaucccguguga

SEQ ID NO: 1225408 - RNA, 19 nt, Homo sapiens
  misc_RNA (1)...(19): siRNA sense strand
uauggagccugcuugaauc

SEQ ID NO: 1225409 - RNA, 19 nt, Homo sapiens
  misc_RNA (1)...(19): siRNA sense strand
guuccugccacaaaugaua

SEQ ID NO: 1225410 - RNA, 19 nt, Homo sapiens
  misc_RNA (1)...(19): siRNA sense strand
gguacucgaccaccacuga

SEQ ID NO: 1225411 - RNA, 19 nt, Homo sapiens
  misc_RNA (1)...(19): siRNA sense strand
aauccagugugucuuguga

SEQ ID NO: 1225412 - RNA, 19 nt, Homo sapiens
  misc_RNA (1)...(19): siRNA sense strand
ucauggacauugcuucuac

SEQ ID NO: 1225413 - RNA, 19 nt, Homo sapiens
  misc_RNA (1)...(19): siRNA sense strand
uacaguauccuugucagua

SEQ ID NO: 1225414 - RNA, 19 nt, Homo sapiens
  misc_RNA (1)...(19): siRNA sense strand
gucggaaacccuuugauga

SEQ ID NO: 1225415 - RNA, 19 nt, Homo sapiens
  misc_RNA (1)...(19): siRNA sense strand
gacauucagacacacauga

SEQ ID NO: 1225416 - RNA, 19 nt, Homo sapiens
  misc_RNA (1)...(19): siRNA sense strand
cagugugucuugugaugga

SEQ ID NO: 1225417 - RNA, 19 nt, Homo sapiens
  misc_RNA (1)...(19): siRNA sense strand
aggcaaagcaacagaguga

SEQ ID NO: 1225418 - RNA, 19 nt, Homo sapiens
  misc_RNA (1)...(19): siRNA sense strand
gcgcuuagaaucaaaauug

SEQ ID NO: 1225419 - RNA, 19 nt, Homo sapiens
  misc_RNA (1)...(19): siRNA sense strand
caacccaaagcgcuaauuc

SEQ ID NO: 1225420 - RNA, 19 nt, Homo sapiens
  misc_RNA (1)...(19): siRNA sense strand
gugugaaccauccuaauau

SEQ ID NO: 1225421 - RNA, 19 nt, Homo sapiens
  misc_RNA (1)...(19): siRNA sense strand
gcucauucauggacauugc

SEQ ID NO: 1225422 - RNA, 19 nt, Homo sapiens
  misc_RNA (1)...(19): siRNA sense strand
caguauccuugucaguauu

SEQ ID NO: 1225423 - RNA, 19 nt, Homo sapiens
  misc_RNA (1)...(19): siRNA sense strand
aaagugaaucugagaggaa

SEQ ID NO: 1225424 - RNA, 19 nt, Homo sapiens
  misc_RNA (1)...(19): siRNA sense strand
uguagagcuucggcaguua

SEQ ID NO: 1225425 - RNA, 19 nt, Homo sapiens
  misc_RNA (1)...(19): siRNA sense strand
gugaaccauccuaauauug

SEQ ID NO: 1225426 - RNA, 19 nt, Homo sapiens
  misc_RNA (1)...(19): siRNA sense strand
gaucgagguggaagagguu

SEQ ID NO: 1225427 - RNA, 19 nt, Homo sapiens
  misc_RNA (1)...(19): siRNA sense strand
ccaaggaguggcuuaucuu

SEQ ID NO: 1225428 - RNA, 19 nt, Homo sapiens
  misc_RNA (1)...(19): siRNA sense strand
uuauggagccugcuugaau

SEQ ID NO: 1225429 - RNA, 19 nt, Homo sapiens
  misc_RNA (1)...(19): siRNA sense strand
caaggaguggcuuaucuuc

SEQ ID NO: 1225430 - RNA, 19 nt, Homo sapiens
  misc_RNA (1)...(19): siRNA sense strand
caaagcaacagagugaauc

SEQ ID NO: 1225431 - RNA, 19 nt, Homo sapiens
  misc_RNA (1)...(19): siRNA sense strand
acacaugaccaauaacaag

SEQ ID NO: 1225432 - RNA, 19 nt, Homo sapiens
  misc_RNA (1)...(19): siRNA sense strand
aagugaaucugagaggaaa

SEQ ID NO: 1225433 - RNA, 19 nt, Homo sapiens
  misc_RNA (1)...(19): siRNA sense strand
gaccugaaaccaccaaacu

SEQ ID NO: 1225434 - RNA, 19 nt, Homo sapiens
  misc_RNA (1)...(19): siRNA sense strand
guagagcuucggcaguuau

SEQ ID NO: 1225435 - RNA, 19 nt, Homo sapiens
  misc_RNA (1)...(19): siRNA sense strand
agaggaaagcguuuauugu

SEQ ID NO: 1225436 - RNA, 19 nt, Homo sapiens
  misc_RNA (1)...(19): siRNA sense strand
gguggaagagguuguugga

SEQ ID NO: 1225437 - RNA, 19 nt, Homo sapiens
  misc_RNA (1)...(19): siRNA sense strand
uggcccagcuuuccgaauc

SEQ ID NO: 1225438 - RNA, 19 nt, Homo sapiens
  misc_RNA (1)...(19): siRNA sense strand
ggacauugcuucuacaaau

SEQ ID NO: 1225439 - RNA, 19 nt, Homo sapiens
  misc_RNA (1)...(19): siRNA sense strand
gagugaaucuggacguuua

SEQ ID NO: 1225440 - RNA, 19 nt, Homo sapiens
  misc_RNA (1)...(19): siRNA sense strand
ugacaugucugaaauagaa

SEQ ID NO: 1225441 - RNA, 19 nt, Homo sapiens
  misc_RNA (1)...(19): siRNA sense strand
gaggaaagcguuuauugua

SEQ ID NO: 1225442 - RNA, 19 nt, Homo sapiens
  misc_RNA (1)...(19): siRNA sense strand
ggaaagcguuuauuguaga

SEQ ID NO: 1225443 - RNA, 19 nt, Homo sapiens
  misc_RNA (1)...(19): siRNA sense strand
gaaccauccuaauauugua

SEQ ID NO: 1225444 - RNA, 19 nt, Homo sapiens
  misc_RNA (1)...(19): siRNA sense strand
agacacacaugaccaauaa

SEQ ID NO: 1225445 - RNA, 19 nt, Homo sapiens
  misc_RNA (1)...(19): siRNA sense strand
gacauugcuucuacaaaua

SEQ ID NO: 1225446 - RNA, 19 nt, Homo sapiens
  misc_RNA (1)...(19): siRNA sense strand
gcaaugaguugguguuuac

SEQ ID NO: 1225447 - RNA, 19 nt, Homo sapiens
  misc_RNA (1)...(19): siRNA sense strand
ggaagagguuguuggaaga

SEQ ID NO: 1225448 - RNA, 19 nt, Homo sapiens
  misc_RNA (1)...(19): siRNA sense strand
gaaaaggaccagcaaaaua

SEQ ID NO: 1225449 - RNA, 19 nt, Homo sapiens
  misc_RNA (1)...(19): siRNA sense strand
gcaaguuccugccacaaau

SEQ ID NO: 1225450 - RNA, 19 nt, Homo sapiens
  misc_RNA (1)...(19): siRNA sense strand
aaauacaucucgccuggua

SEQ ID NO: 1225451 - RNA, 19 nt, Homo sapiens
  misc_RNA (1)...(19): siRNA sense strand
gaaccauugccauauuaua

SEQ ID NO: 1225452 - RNA, 19 nt, Homo sapiens
  misc_RNA (1)...(19): siRNA sense strand
gaaacccuuugaugagauu

SEQ ID NO: 1225453 - RNA, 19 nt, Homo sapiens
  misc_RNA (1)...(19): siRNA sense strand
ggaguuguuugcaaagcua

SEQ ID NO: 1225454 - RNA, 19 nt, Homo sapiens
  misc_RNA (1)...(19): siRNA sense strand
cagaugagccauuacagua

SEQ ID NO: 1225455 - RNA, 19 nt, Homo sapiens
  misc_RNA (1)...(19): siRNA sense strand
aauaaugacucacuugaug

SEQ ID NO: 1225456 - RNA, 19 nt, Homo sapiens
  misc_RNA (1)...(19): siRNA sense strand
gcugaaccauugccauauu

SEQ ID NO: 1225457 - RNA, 19 nt, Homo sapiens
  misc_RNA (1)...(19): siRNA sense strand
gagaggaaagcguuuauug

SEQ ID NO: 1225458 - RNA, 19 nt, Homo sapiens
  misc_RNA (1)...(19): siRNA sense strand
gguaguaauuacagugaaa

SEQ ID NO: 1225459 - RNA, 19 nt, Homo sapiens
  misc_RNA (1)...(19): siRNA sense strand
ccugaaaccaccaaacuua

SEQ ID NO: 1225460 - RNA, 19 nt, Homo sapiens
  misc_RNA (1)...(19): siRNA sense strand
gaggaugagugcugacaug

SEQ ID NO: 1225461 - RNA, 19 nt, Homo sapiens
  misc_RNA (1)...(19): siRNA sense strand
gaugagugcugacaugucu

SEQ ID NO: 1225462 - RNA, 19 nt, Homo sapiens
  misc_RNA (1)...(19): siRNA sense strand
caugugggcuguucauaau

SEQ ID NO: 1225463 - RNA, 19 nt, Homo sapiens
  misc_RNA (1)...(19): siRNA sense strand
guagauccauccaagacuu

SEQ ID NO: 1225464 - RNA, 19 nt, Homo sapiens
  misc_RNA (1)...(19): siRNA sense strand
ggaaacccuuugaugagau

SEQ ID NO: 1225465 - RNA, 19 nt, Homo sapiens
  misc_RNA (1)...(19): siRNA sense strand
uugaagagaucgacuacaa

SEQ ID NO: 1225466 - RNA, 19 nt, Homo sapiens
  misc_RNA (1)...(19): siRNA sense strand
cugaaccauugccauauua

SEQ ID NO: 1225467 - RNA, 19 nt, Homo sapiens
  misc_RNA (1)...(19): siRNA sense strand
ggaggaaauugugaaaaua

SEQ ID NO: 1225468 - RNA, 19 nt, Homo sapiens
  misc_RNA (1)...(19): siRNA sense strand
gugcugacaugucugaaau

SEQ ID NO: 1225469 - RNA, 19 nt, Homo sapiens
  misc_RNA (1)...(19): siRNA sense strand
gaugagccauuacaguauc

SEQ ID NO: 1225470 - RNA, 19 nt, Homo sapiens
  misc_RNA (1)...(19): siRNA sense strand
cccaauggcuuaucuuaca

SEQ ID NO: 1225471 - RNA, 19 nt, Homo sapiens
  misc_RNA (1)...(19): siRNA sense strand
acacuaauauggagcaagu

SEQ ID NO: 1225472 - RNA, 19 nt, Homo sapiens
  misc_RNA (1)...(19): siRNA sense strand
ccugaugauuccacagaua

SEQ ID NO: 1225473 - RNA, 19 nt, Homo sapiens
  misc_RNA (1)...(19): siRNA sense strand
gcaaagcaacagagugaau

SEQ ID NO: 1225474 - RNA, 19 nt, Homo sapiens
  misc_RNA (1)...(19): siRNA sense strand
cgugugaaccauccuaaua

SEQ ID NO: 1225475 - RNA, 19 nt, Homo sapiens
  misc_RNA (1)...(19): siRNA sense strand
gaaagcguuuauuguagag

SEQ ID NO: 1225476 - RNA, 19 nt, Homo sapiens
  misc_RNA (1)...(19): siRNA sense strand
gcaguuaucccgugugaac

SEQ ID NO: 1225477 - RNA, 19 nt, Homo sapiens
  misc_RNA (1)...(19): siRNA sense strand
gcugacaugucugaaauag

SEQ ID NO: 1225478 - RNA, 19 nt, Homo sapiens
  misc_RNA (1)...(19): siRNA sense strand
gugcugaaccauugccaua

SEQ ID NO: 1225479 - RNA, 19 nt, Homo sapiens
  misc_RNA (1)...(19): siRNA sense strand
ugugaaccauccuaauauu

SEQ ID NO: 1225480 - RNA, 19 nt, Homo sapiens
  misc_RNA (1)...(19): siRNA sense strand
cggaaacccuuugaugaga

SEQ ID NO: 1225481 - RNA, 19 nt, Homo sapiens
  misc_RNA (1)...(19): siRNA sense strand
aagaggagccuuuggaguu

SEQ ID NO: 1225482 - RNA, 19 nt, Homo sapiens
  misc_RNA (1)...(19): siRNA sense strand
ggacagccaagacguagau

SEQ ID NO: 1225483 - RNA, 19 nt, Homo sapiens
  misc_RNA (1)...(19): siRNA sense strand
aggagcagaugagccauua

SEQ ID NO: 1225484 - RNA, 19 nt, Homo sapiens
  misc_RNA (1)...(19): siRNA sense strand
gaguugguguuuacagugu

SEQ ID NO: 1225485 - RNA, 19 nt, Homo sapiens
  misc_RNA (1)...(19): siRNA sense strand
gaaacgacaaggcacuuca

SEQ ID NO: 1225486 - RNA, 19 nt, Homo sapiens
  misc_RNA (1)...(19): siRNA sense strand
acaguauccuugucaguau

SEQ ID NO: 1225487 - RNA, 19 nt, Homo sapiens
  misc_RNA (1)...(19): siRNA sense strand
cgcaaugaguugguguuua

SEQ ID NO: 1225488 - RNA, 19 nt, Homo sapiens
  misc_RNA (1)...(19): siRNA sense strand
gcagaugagccauuacagu

SEQ ID NO: 1225489 - RNA, 19 nt, Homo sapiens
  misc_RNA (1)...(19): siRNA sense strand
gagcagaugagccauuaca

SEQ ID NO: 1225490 - RNA, 19 nt, Homo sapiens
  misc_RNA (1)...(19): siRNA sense strand
uacacuggaucaccaacua

SEQ ID NO: 1225491 - RNA, 19 nt, Homo sapiens
  misc_RNA (1)...(19): siRNA sense strand
gaagucagcagcagaaacg

SEQ ID NO: 1225492 - RNA, 19 nt, Homo sapiens
  misc_RNA (1)...(19): siRNA sense strand
caacuagaggucaucagaa

SEQ ID NO: 1225493 - RNA, 19 nt, Homo sapiens
  misc_RNA (1)...(19): siRNA sense strand
aaagcuaaguggagagcaa

SEQ ID NO: 1225494 - RNA, 19 nt, Homo sapiens
  misc_RNA (1)...(19): siRNA sense strand
ggagcaguguggagagcuu

SEQ ID NO: 1225495 - RNA, 19 nt, Homo sapiens
  misc_RNA (1)...(19): siRNA sense strand
cagacacacaugaccaaua

SEQ ID NO: 1225496 - RNA, 19 nt, Homo sapiens
  misc_RNA (1)...(19): siRNA sense strand
cuacaaauacgaguaacaa

SEQ ID NO: 1225497 - RNA, 19 nt, Homo sapiens
  misc_RNA (1)...(19): siRNA sense strand
gcccuucaauggaggaaau

SEQ ID NO: 1225498 - RNA, 19 nt, Homo sapiens
  misc_RNA (1)...(19): siRNA sense strand
aaauuuaccuaagcccauu

SEQ ID NO: 1225499 - RNA, 19 nt, Homo sapiens
  misc_RNA (1)...(19): siRNA sense strand
cgaaucaugugggcuguuc

SEQ ID NO: 1225500 - RNA, 19 nt, Homo sapiens
  misc_RNA (1)...(19): siRNA sense strand
uggcuuaucuucacagcau

SEQ ID NO: 1225501 - RNA, 19 nt, Homo sapiens
  misc_RNA (1)...(19): siRNA sense strand
gauaccaauggaucagaua

SEQ ID NO: 1225502 - RNA, 19 nt, Homo sapiens
  misc_RNA (1)...(19): siRNA sense strand
cccagugucagaaugauua

SEQ ID NO: 1225503 - RNA, 19 nt, Homo sapiens
  misc_RNA (1)...(19): siRNA sense strand
ucaugugggcuguucauaa

SEQ ID NO: 1225504 - RNA, 19 nt, Homo sapiens
  misc_RNA (1)...(19): siRNA sense strand
gaaaccaccaaacuuacug

SEQ ID NO: 1225505 - RNA, 19 nt, Homo sapiens
  misc_RNA (1)...(19): siRNA sense strand
gaaaauaaugacucacuug

SEQ ID NO: 1225506 - RNA, 19 nt, Homo sapiens
  misc_RNA (1)...(19): siRNA sense strand
ugccacaaaugauacuauu

SEQ ID NO: 1225507 - RNA, 19 nt, Homo sapiens
  misc_RNA (1)...(19): siRNA sense strand
cggcaguuaucccguguga

SEQ ID NO: 1225508 - RNA, 19 nt, Homo sapiens
  misc_RNA (1)...(19): siRNA sense strand
gccacaaaugauacuauua

SEQ ID NO: 1225509 - RNA, 19 nt, Homo sapiens
  misc_RNA (1)...(19): siRNA sense strand
agaggagccuuuggaguug

SEQ ID NO: 1225510 - RNA, 19 nt, Homo sapiens
  misc_RNA (1)...(19): siRNA sense strand
aggaaagcguuuauuguag

SEQ ID NO: 1225511 - RNA, 19 nt, Homo sapiens
  misc_RNA (1)...(19): siRNA sense strand
ggaguggcuuaucuucaca

SEQ ID NO: 1225512 - RNA, 19 nt, Homo sapiens
  misc_RNA (1)...(19): siRNA sense strand
ugaaccauccuaauauugu

SEQ ID NO: 1225513 - RNA, 19 nt, Homo sapiens
  misc_RNA (1)...(19): siRNA sense strand
uauggagccugcuugaauc

SEQ ID NO: 1225514 - RNA, 19 nt, Homo sapiens
  misc_RNA (1)...(19): siRNA sense strand
guuccugccacaaaugaua

SEQ ID NO: 1225515 - RNA, 19 nt, Homo sapiens
  misc_RNA (1)...(19): siRNA sense strand
gguacucgaccaccacuga

SEQ ID NO: 1225516 - RNA, 19 nt, Homo sapiens
  misc_RNA (1)...(19): siRNA sense strand
aauccagugugucuuguga

SEQ ID NO: 1225517 - RNA, 19 nt, Homo sapiens
  misc_RNA (1)...(19): siRNA sense strand
ucauggacauugcuucuac

SEQ ID NO: 1225518 - RNA, 19 nt, Homo sapiens
  misc_RNA (1)...(19): siRNA sense strand
uacaguauccuugucagua

SEQ ID NO: 1225519 - RNA, 19 nt, Homo sapiens
  misc_RNA (1)...(19): siRNA sense strand
gucggaaacccuuugauga

SEQ ID NO: 1225520 - RNA, 19 nt, Homo sapiens
  misc_RNA (1)...(19): siRNA sense strand
gacauucagacacacauga

SEQ ID NO: 1225521 - RNA, 19 nt, Homo sapiens
  misc_RNA (1)...(19): siRNA sense strand
cagugugucuugugaugga

SEQ ID NO: 1225522 - RNA, 19 nt, Homo sapiens
  misc_RNA (1)...(19): siRNA sense strand
ucagaagucagcagcagaa

SEQ ID NO: 1225523 - RNA, 19 nt, Homo sapiens
  misc_RNA (1)...(19): siRNA sense strand
aggcaaagcaacagaguga

SEQ ID NO: 1225524 - RNA, 19 nt, Homo sapiens
  misc_RNA (1)...(19): siRNA sense strand
gcgcuuagaaucaaaauug

SEQ ID NO: 1225525 - RNA, 19 nt, Homo sapiens
  misc_RNA (1)...(19): siRNA sense strand
caacccaaagcgcuaauuc

SEQ ID NO: 1225526 - RNA, 19 nt, Homo sapiens
  misc_RNA (1)...(19): siRNA sense strand
aaagugaaucugagaggaa

SEQ ID NO: 1225527 - RNA, 19 nt, Homo sapiens
  misc_RNA (1)...(19): siRNA sense strand
uguagagcuucggcaguua

SEQ ID NO: 1225528 - RNA, 19 nt, Homo sapiens
  misc_RNA (1)...(19): siRNA sense strand
gcucauucauggacauugc

SEQ ID NO: 1225529 - RNA, 19 nt, Homo sapiens
  misc_RNA (1)...(19): siRNA sense strand
gugugaaccauccuaauau

SEQ ID NO: 1225530 - RNA, 19 nt, Homo sapiens
  misc_RNA (1)...(19): siRNA sense strand
caguauccuugucaguauu

SEQ ID NO: 1225531 - RNA, 19 nt, Homo sapiens
  misc_RNA (1)...(19): siRNA sense strand
ccaaggaguggcuuaucuu

SEQ ID NO: 1225532 - RNA, 19 nt, Homo sapiens
  misc_RNA (1)...(19): siRNA sense strand
gugaaccauccuaauauug

SEQ ID NO: 1225533 - RNA, 19 nt, Homo sapiens
  misc_RNA (1)...(19): siRNA sense strand
gaucgagguggaagagguu

SEQ ID NO: 1225534 - RNA, 19 nt, Homo sapiens
  misc_RNA (1)...(19): siRNA sense strand
uuauggagccugcuugaau

SEQ ID NO: 1225535 - RNA, 19 nt, Homo sapiens
  misc_RNA (1)...(19): siRNA sense strand
aagugaaucugagaggaaa

SEQ ID NO: 1225536 - RNA, 19 nt, Homo sapiens
  misc_RNA (1)...(19): siRNA sense strand
acaacuagaggucaucaga

SEQ ID NO: 1225537 - RNA, 19 nt, Homo sapiens
  misc_RNA (1)...(19): siRNA sense strand
caaagcaacagagugaauc

SEQ ID NO: 1225538 - RNA, 19 nt, Homo sapiens
  misc_RNA (1)...(19): siRNA sense strand
ggacauugcuucuacaaau

SEQ ID NO: 1225539 - RNA, 19 nt, Homo sapiens
  misc_RNA (1)...(19): siRNA sense strand
gagugaaucuggacguuua

SEQ ID NO: 1225540 - RNA, 19 nt, Homo sapiens
  misc_RNA (1)...(19): siRNA sense strand
ugacaugucugaaauagaa

SEQ ID NO: 1225541 - RNA, 19 nt, Homo sapiens
  misc_RNA (1)...(19): siRNA sense strand
gaggaaagcguuuauugua

SEQ ID NO: 1225542 - RNA, 19 nt, Homo sapiens
  misc_RNA (1)...(19): siRNA sense strand
ggaaagcguuuauuguaga

SEQ ID NO: 1225543 - RNA, 19 nt, Homo sapiens
  misc_RNA (1)...(19): siRNA sense strand
gaaccauccuaauauugua

SEQ ID NO: 1225544 - RNA, 19 nt, Homo sapiens
  misc_RNA (1)...(19): siRNA sense strand
agacacacaugaccaauaa

SEQ ID NO: 1225545 - RNA, 19 nt, Homo sapiens
  misc_RNA (1)...(19): siRNA sense strand
gacauugcuucuacaaaua

SEQ ID NO: 1225546 - RNA, 19 nt, Homo sapiens
  misc_RNA (1)...(19): siRNA sense strand
gcaaugaguugguguuuac

SEQ ID NO: 1225547 - RNA, 19 nt, Homo sapiens
  misc_RNA (1)...(19): siRNA sense strand
ggaagagguuguuggaaga

SEQ ID NO: 1225548 - RNA, 19 nt, Homo sapiens
  misc_RNA (1)...(19): siRNA sense strand
gaaaaggaccagcaaaaua

SEQ ID NO: 1225549 - RNA, 19 nt, Homo sapiens
  misc_RNA (1)...(19): siRNA sense strand
gcaaguuccugccacaaau

SEQ ID NO: 1225550 - RNA, 19 nt, Homo sapiens
  misc_RNA (1)...(19): siRNA sense strand
aaauacaucucgccuggua

SEQ ID NO: 1225551 - RNA, 19 nt, Homo sapiens
  misc_RNA (1)...(19): siRNA sense strand
gaaccauugccauauuaua

SEQ ID NO: 1225552 - RNA, 19 nt, Homo sapiens
  misc_RNA (1)...(19): siRNA sense strand
gaaacccuuugaugagauu

SEQ ID NO: 1225553 - RNA, 19 nt, Homo sapiens
  misc_RNA (1)...(19): siRNA sense strand
ggaguuguuugcaaagcua

SEQ ID NO: 1225554 - RNA, 19 nt, Homo sapiens
  misc_RNA (1)...(19): siRNA sense strand
cagaugagccauuacagua

SEQ ID NO: 1225555 - RNA, 19 nt, Homo sapiens
  misc_RNA (1)...(19): siRNA sense strand
aauaaugacucacuugaug

SEQ ID NO: 1225556 - RNA, 19 nt, Homo sapiens
  misc_RNA (1)...(19): siRNA sense strand
gcugaaccauugccauauu

SEQ ID NO: 1225557 - RNA, 19 nt, Homo sapiens
  misc_RNA (1)...(19): siRNA sense strand
gagaggaaagcguuuauug

SEQ ID NO: 1225558 - RNA, 19 nt, Homo sapiens
  misc_RNA (1)...(19): siRNA sense strand
gguaguaauuacagugaaa

SEQ ID NO: 1225559 - RNA, 19 nt, Homo sapiens
  misc_RNA (1)...(19): siRNA sense strand
ccugaaaccaccaaacuua

SEQ ID NO: 1225560 - RNA, 19 nt, Homo sapiens
  misc_RNA (1)...(19): siRNA sense strand
gaggaugagugcugacaug

SEQ ID NO: 1225561 - RNA, 19 nt, Homo sapiens
  misc_RNA (1)...(19): siRNA sense strand
gaugagugcugacaugucu

SEQ ID NO: 1225562 - RNA, 19 nt, Homo sapiens
  misc_RNA (1)...(19): siRNA sense strand
caugugggcuguucauaau

SEQ ID NO: 1225563 - RNA, 19 nt, Homo sapiens
  misc_RNA (1)...(19): siRNA sense strand
guagauccauccaagacuu

SEQ ID NO: 1225564 - RNA, 19 nt, Homo sapiens
  misc_RNA (1)...(19): siRNA sense strand
ggaaacccuuugaugagau

SEQ ID NO: 1225565 - RNA, 19 nt, Homo sapiens
  misc_RNA (1)...(19): siRNA sense strand
uugaagagaucgacuacaa

SEQ ID NO: 1225566 - RNA, 19 nt, Homo sapiens
  misc_RNA (1)...(19): siRNA sense strand
cugaaccauugccauauua

SEQ ID NO: 1225567 - RNA, 19 nt, Homo sapiens
  misc_RNA (1)...(19): siRNA sense strand
ggaggaaauugugaaaaua

SEQ ID NO: 1225568 - RNA, 19 nt, Homo sapiens
  misc_RNA (1)...(19): siRNA sense strand
gugcugacaugucugaaau

SEQ ID NO: 1225569 - RNA, 19 nt, Homo sapiens
  misc_RNA (1)...(19): siRNA sense strand
gaugagccauuacaguauc

SEQ ID NO: 1225570 - RNA, 19 nt, Homo sapiens
  misc_RNA (1)...(19): siRNA sense strand
cccaauggcuuaucuuaca

SEQ ID NO: 1225571 - RNA, 19 nt, Homo sapiens
  misc_RNA (1)...(19): siRNA sense strand
acacuaauauggagcaagu

SEQ ID NO: 1225572 - RNA, 19 nt, Homo sapiens
  misc_RNA (1)...(19): siRNA sense strand
ccugaugauuccacagaua

SEQ ID NO: 1225573 - RNA, 19 nt, Homo sapiens
  misc_RNA (1)...(19): siRNA sense strand
gcaaagcaacagagugaau

SEQ ID NO: 1225574 - RNA, 19 nt, Homo sapiens
  misc_RNA (1)...(19): siRNA sense strand
cgugugaaccauccuaaua

SEQ ID NO: 1225575 - RNA, 19 nt, Homo sapiens
  misc_RNA (1)...(19): siRNA sense strand
gaaagcguuuauuguagag

SEQ ID NO: 1225576 - RNA, 19 nt, Homo sapiens
  misc_RNA (1)...(19): siRNA sense strand
gcaguuaucccgugugaac

SEQ ID NO: 1225577 - RNA, 19 nt, Homo sapiens
  misc_RNA (1)...(19): siRNA sense strand
gcugacaugucugaaauag

SEQ ID NO: 1225578 - RNA, 19 nt, Homo sapiens
  misc_RNA (1)...(19): siRNA sense strand
gugcugaaccauugccaua

SEQ ID NO: 1225579 - RNA, 19 nt, Homo sapiens
  misc_RNA (1)...(19): siRNA sense strand
ugugaaccauccuaauauu

SEQ ID NO: 1225580 - RNA, 19 nt, Homo sapiens
  misc_RNA (1)...(19): siRNA sense strand
cggaaacccuuugaugaga

SEQ ID NO: 1225581 - RNA, 19 nt, Homo sapiens
  misc_RNA (1)...(19): siRNA sense strand
aagaggagccuuuggaguu

SEQ ID NO: 1225582 - RNA, 19 nt, Homo sapiens
  misc_RNA (1)...(19): siRNA sense strand
ggacagccaagacguagau

SEQ ID NO: 1225583 - RNA, 19 nt, Homo sapiens
  misc_RNA (1)...(19): siRNA sense strand
aggagcagaugagccauua

SEQ ID NO: 1225584 - RNA, 19 nt, Homo sapiens
  misc_RNA (1)...(19): siRNA sense strand
gaguugguguuuacagugu

SEQ ID NO: 1225585 - RNA, 19 nt, Homo sapiens
  misc_RNA (1)...(19): siRNA sense strand
gaaacgacaaggcacuuca

SEQ ID NO: 1225586 - RNA, 19 nt, Homo sapiens
  misc_RNA (1)...(19): siRNA sense strand
acaguauccuugucaguau

SEQ ID NO: 1225587 - RNA, 19 nt, Homo sapiens
  misc_RNA (1)...(19): siRNA sense strand
cgcaaugaguugguguuua

SEQ ID NO: 1225588 - RNA, 19 nt, Homo sapiens
  misc_RNA (1)...(19): siRNA sense strand
gcagaugagccauuacagu

SEQ ID NO: 1225589 - RNA, 19 nt, Homo sapiens
  misc_RNA (1)...(19): siRNA sense strand
gagcagaugagccauuaca

SEQ ID NO: 1225590 - RNA, 19 nt, Homo sapiens
  misc_RNA (1)...(19): siRNA sense strand
uacacuggaucaccaacua

SEQ ID NO: 1225591 - RNA, 19 nt, Homo sapiens
  misc_RNA (1)...(19): siRNA sense strand
gaagucagcagcagaaacg

SEQ ID NO: 1225592 - RNA, 19 nt, Homo sapiens
  misc_RNA (1)...(19): siRNA sense strand
caacuagaggucaucagaa

SEQ ID NO: 1225593 - RNA, 19 nt, Homo sapiens
  misc_RNA (1)...(19): siRNA sense strand
aaagcuaaguggagagcaa

SEQ ID NO: 1225594 - RNA, 19 nt, Homo sapiens
  misc_RNA (1)...(19): siRNA sense strand
ggagcaguguggagagcuu

SEQ ID NO: 1225595 - RNA, 19 nt, Homo sapiens
  misc_RNA (1)...(19): siRNA sense strand
cagacacacaugaccaaua

SEQ ID NO: 1225596 - RNA, 19 nt, Homo sapiens
  misc_RNA (1)...(19): siRNA sense strand
cuacaaauacgaguaacaa

SEQ ID NO: 1225597 - RNA, 19 nt, Homo sapiens
  misc_RNA (1)...(19): siRNA sense strand
gcccuucaauggaggaaau

SEQ ID NO: 1225598 - RNA, 19 nt, Homo sapiens
  misc_RNA (1)...(19): siRNA sense strand
aaauuuaccuaagcccauu

SEQ ID NO: 1225599 - RNA, 19 nt, Homo sapiens
  misc_RNA (1)...(19): siRNA sense strand
cgaaucaugugggcuguuc

SEQ ID NO: 1225600 - RNA, 19 nt, Homo sapiens
  misc_RNA (1)...(19): siRNA sense strand
uggcuuaucuucacagcau

SEQ ID NO: 1225601 - RNA, 19 nt, Homo sapiens
  misc_RNA (1)...(19): siRNA sense strand
gauaccaauggaucagaua

SEQ ID NO: 1225602 - RNA, 19 nt, Homo sapiens
  misc_RNA (1)...(19): siRNA sense strand
cccagugucagaaugauua

SEQ ID NO: 1225603 - RNA, 19 nt, Homo sapiens
  misc_RNA (1)...(19): siRNA sense strand
ucaugugggcuguucauaa

SEQ ID NO: 1225604 - RNA, 19 nt, Homo sapiens
  misc_RNA (1)...(19): siRNA sense strand
gaaaccaccaaacuuacug

SEQ ID NO: 1225605 - RNA, 19 nt, Homo sapiens
  misc_RNA (1)...(19): siRNA sense strand
gaaaauaaugacucacuug

SEQ ID NO: 1225606 - RNA, 19 nt, Homo sapiens
  misc_RNA (1)...(19): siRNA sense strand
ugccacaaaugauacuauu

SEQ ID NO: 1225607 - RNA, 19 nt, Homo sapiens
  misc_RNA (1)...(19): siRNA sense strand
cggcaguuaucccguguga

SEQ ID NO: 1225608 - RNA, 19 nt, Homo sapiens
  misc_RNA (1)...(19): siRNA sense strand
gccacaaaugauacuauua

SEQ ID NO: 1225609 - RNA, 19 nt, Homo sapiens
  misc_RNA (1)...(19): siRNA sense strand
agaggagccuuuggaguug

SEQ ID NO: 1225610 - RNA, 19 nt, Homo sapiens
  misc_RNA (1)...(19): siRNA sense strand
aggaaagcguuuauuguag

SEQ ID NO: 1225611 - RNA, 19 nt, Homo sapiens
  misc_RNA (1)...(19): siRNA sense strand
ggaguggcuuaucuucaca

SEQ ID NO: 1225612 - RNA, 19 nt, Homo sapiens
  misc_RNA (1)...(19): siRNA sense strand
ugaaccauccuaauauugu

SEQ ID NO: 1225613 - RNA, 19 nt, Homo sapiens
  misc_RNA (1)...(19): siRNA sense strand
uauggagccugcuugaauc

SEQ ID NO: 1225614 - RNA, 19 nt, Homo sapiens
  misc_RNA (1)...(19): siRNA sense strand
guuccugccacaaaugaua

SEQ ID NO: 1225615 - RNA, 19 nt, Homo sapiens
  misc_RNA (1)...(19): siRNA sense strand
gguacucgaccaccacuga

SEQ ID NO: 1225616 - RNA, 19 nt, Homo sapiens
  misc_RNA (1)...(19): siRNA sense strand
aauccagugugucuuguga

SEQ ID NO: 1225617 - RNA, 19 nt, Homo sapiens
  misc_RNA (1)...(19): siRNA sense strand
ucauggacauugcuucuac

SEQ ID NO: 1225618 - RNA, 19 nt, Homo sapiens
  misc_RNA (1)...(19): siRNA sense strand
uacaguauccuugucagua

SEQ ID NO: 1225619 - RNA, 19 nt, Homo sapiens
  misc_RNA (1)...(19): siRNA sense strand
gucggaaacccuuugauga

SEQ ID NO: 1225620 - RNA, 19 nt, Homo sapiens
  misc_RNA (1)...(19): siRNA sense strand
gacauucagacacacauga

SEQ ID NO: 1225621 - RNA, 19 nt, Homo sapiens
  misc_RNA (1)...(19): siRNA sense strand
cagugugucuugugaugga

SEQ ID NO: 1225622 - RNA, 19 nt, Homo sapiens
  misc_RNA (1)...(19): siRNA sense strand
ucagaagucagcagcagaa

SEQ ID NO: 1225623 - RNA, 19 nt, Homo sapiens
  misc_RNA (1)...(19): siRNA sense strand
aggcaaagcaacagaguga

SEQ ID NO: 1225624 - RNA, 19 nt, Homo sapiens
  misc_RNA (1)...(19): siRNA sense strand
gcgcuuagaaucaaaauug

SEQ ID NO: 1225625 - RNA, 19 nt, Homo sapiens
  misc_RNA (1)...(19): siRNA sense strand
caacccaaagcgcuaauuc

SEQ ID NO: 1225626 - RNA, 19 nt, Homo sapiens
  misc_RNA (1)...(19): siRNA sense strand
aaagugaaucugagaggaa

SEQ ID NO: 1225627 - RNA, 19 nt, Homo sapiens
  misc_RNA (1)...(19): siRNA sense strand
uguagagcuucggcaguua

SEQ ID NO: 1225628 - RNA, 19 nt, Homo sapiens
  misc_RNA (1)...(19): siRNA sense strand
gcucauucauggacauugc

SEQ ID NO: 1225629 - RNA, 19 nt, Homo sapiens
  misc_RNA (1)...(19): siRNA sense strand
gugugaaccauccuaauau

SEQ ID NO: 1225630 - RNA, 19 nt, Homo sapiens
  misc_RNA (1)...(19): siRNA sense strand
caguauccuugucaguauu

SEQ ID NO: 1225631 - RNA, 19 nt, Homo sapiens
  misc_RNA (1)...(19): siRNA sense strand
ccaaggaguggcuuaucuu

SEQ ID NO: 1225632 - RNA, 19 nt, Homo sapiens
  misc_RNA (1)...(19): siRNA sense strand
gugaaccauccuaauauug

SEQ ID NO: 1225633 - RNA, 19 nt, Homo sapiens
  misc_RNA (1)...(19): siRNA sense strand
gaucgagguggaagagguu

SEQ ID NO: 1225634 - RNA, 19 nt, Homo sapiens
  misc_RNA (1)...(19): siRNA sense strand
uuauggagccugcuugaau

SEQ ID NO: 1225635 - RNA, 19 nt, Homo sapiens
  misc_RNA (1)...(19): siRNA sense strand
aagugaaucugagaggaaa

SEQ ID NO: 1225636 - RNA, 19 nt, Homo sapiens
  misc_RNA (1)...(19): siRNA sense strand
acaacuagaggucaucaga

SEQ ID NO: 1225637 - RNA, 19 nt, Homo sapiens
  misc_RNA (1)...(19): siRNA sense strand
caaagcaacagagugaauc

SEQ ID NO: 1225638 - RNA, 19 nt, Homo sapiens
  misc_RNA (1)...(19): siRNA sense strand
ggacauugcuucuacaaau

SEQ ID NO: 1225639 - RNA, 19 nt, Homo sapiens
  misc_RNA (1)...(19): siRNA sense strand
gagugaaucuggacguuua

SEQ ID NO: 1225640 - RNA, 19 nt, Homo sapiens
  misc_RNA (1)...(19): siRNA sense strand
ugacaugucugaaauagaa

SEQ ID NO: 1225641 - RNA, 19 nt, Homo sapiens
  misc_RNA (1)...(19): siRNA sense strand
gaggaaagcguuuauugua

SEQ ID NO: 1225642 - RNA, 19 nt, Homo sapiens
  misc_RNA (1)...(19): siRNA sense strand
ggaaagcguuuauuguaga

SEQ ID NO: 1225643 - RNA, 19 nt, Homo sapiens
  misc_RNA (1)...(19): siRNA sense strand
gaaccauccuaauauugua

SEQ ID NO: 1225644 - RNA, 19 nt, Homo sapiens
  misc_RNA (1)...(19): siRNA sense strand
agacacacaugaccaauaa

SEQ ID NO: 1225645 - RNA, 19 nt, Homo sapiens
  misc_RNA (1)...(19): siRNA sense strand
gacauugcuucuacaaaua

SEQ ID NO: 1225646 - RNA, 19 nt, Homo sapiens
  misc_RNA (1)...(19): siRNA sense strand
gcaaugaguugguguuuac

SEQ ID NO: 1225647 - RNA, 19 nt, Homo sapiens
  misc_RNA (1)...(19): siRNA sense strand
ggaagagguuguuggaaga

SEQ ID NO: 1225648 - RNA, 19 nt, Homo sapiens
  misc_RNA (1)...(19): siRNA sense strand
gcaaguuccugccacaaau

SEQ ID NO: 1225649 - RNA, 19 nt, Homo sapiens
  misc_RNA (1)...(19): siRNA sense strand
gaaccauugccauauuaua

SEQ ID NO: 1225650 - RNA, 19 nt, Homo sapiens
  misc_RNA (1)...(19): siRNA sense strand
gaaacccuuugaugagauu

SEQ ID NO: 1225651 - RNA, 19 nt, Homo sapiens
  misc_RNA (1)...(19): siRNA sense strand
ggaguuguuugcaaagcua

SEQ ID NO: 1225652 - RNA, 19 nt, Homo sapiens
  misc_RNA (1)...(19): siRNA sense strand
cagaugagccauuacagua

SEQ ID NO: 1225653 - RNA, 19 nt, Homo sapiens
  misc_RNA (1)...(19): siRNA sense strand
aauaaugacucacuugaug

SEQ ID NO: 1225654 - RNA, 19 nt, Homo sapiens
  misc_RNA (1)...(19): siRNA sense strand
gcugaaccauugccauauu

SEQ ID NO: 1225655 - RNA, 19 nt, Homo sapiens
  misc_RNA (1)...(19): siRNA sense strand
gagaggaaagcguuuauug

SEQ ID NO: 1225656 - RNA, 19 nt, Homo sapiens
  misc_RNA (1)...(19): siRNA sense strand
gguaguaauuacagugaaa

SEQ ID NO: 1225657 - RNA, 19 nt, Homo sapiens
  misc_RNA (1)...(19): siRNA sense strand
ccugaaaccaccaaacuua

SEQ ID NO: 1225658 - RNA, 19 nt, Homo sapiens
  misc_RNA (1)...(19): siRNA sense strand
gaggaugagugcugacaug

SEQ ID NO: 1225659 - RNA, 19 nt, Homo sapiens
  misc_RNA (1)...(19): siRNA sense strand
gaugagugcugacaugucu

SEQ ID NO: 1225660 - RNA, 19 nt, Homo sapiens
  misc_RNA (1)...(19): siRNA sense strand
caugugggcuguucauaau

SEQ ID NO: 1225661 - RNA, 19 nt, Homo sapiens
  misc_RNA (1)...(19): siRNA sense strand
guagauccauccaagacuu

SEQ ID NO: 1225662 - RNA, 19 nt, Homo sapiens
  misc_RNA (1)...(19): siRNA sense strand
ggaaacccuuugaugagau

SEQ ID NO: 1225663 - RNA, 19 nt, Homo sapiens
  misc_RNA (1)...(19): siRNA sense strand
uugaagagaucgacuacaa

SEQ ID NO: 1225664 - RNA, 19 nt, Homo sapiens
  misc_RNA (1)...(19): siRNA sense strand
cugaaccauugccauauua

SEQ ID NO: 1225665 - RNA, 19 nt, Homo sapiens
  misc_RNA (1)...(19): siRNA sense strand
ggaggaaauugugaaaaua

SEQ ID NO: 1225666 - RNA, 19 nt, Homo sapiens
  misc_RNA (1)...(19): siRNA sense strand
gugcugacaugucugaaau

SEQ ID NO: 1225667 - RNA, 19 nt, Homo sapiens
  misc_RNA (1)...(19): siRNA sense strand
gaugagccauuacaguauc

SEQ ID NO: 1225668 - RNA, 19 nt, Homo sapiens
  misc_RNA (1)...(19): siRNA sense strand
cccaauggcuuaucuuaca

SEQ ID NO: 1225669 - RNA, 19 nt, Homo sapiens
  misc_RNA (1)...(19): siRNA sense strand
acacuaauauggagcaagu

SEQ ID NO: 1225670 - RNA, 19 nt, Homo sapiens
  misc_RNA (1)...(19): siRNA sense strand
ccugaugauuccacagaua

SEQ ID NO: 1225671 - RNA, 19 nt, Homo sapiens
  misc_RNA (1)...(19): siRNA sense strand
gcaaagcaacagagugaau

SEQ ID NO: 1225672 - RNA, 19 nt, Homo sapiens
  misc_RNA (1)...(19): siRNA sense strand
cgugugaaccauccuaaua

SEQ ID NO: 1225673 - RNA, 19 nt, Homo sapiens
  misc_RNA (1)...(19): siRNA sense strand
gaaagcguuuauuguagag

SEQ ID NO: 1225674 - RNA, 19 nt, Homo sapiens
  misc_RNA (1)...(19): siRNA sense strand
gcaguuaucccgugugaac

SEQ ID NO: 1225675 - RNA, 19 nt, Homo sapiens
  misc_RNA (1)...(19): siRNA sense strand
gcugacaugucugaaauag

SEQ ID NO: 1225676 - RNA, 19 nt, Homo sapiens
  misc_RNA (1)...(19): siRNA sense strand
gugcugaaccauugccaua

SEQ ID NO: 1225677 - RNA, 19 nt, Homo sapiens
  misc_RNA (1)...(19): siRNA sense strand
ugugaaccauccuaauauu

SEQ ID NO: 1225678 - RNA, 19 nt, Homo sapiens
  misc_RNA (1)...(19): siRNA sense strand
cggaaacccuuugaugaga

SEQ ID NO: 1225679 - RNA, 19 nt, Homo sapiens
  misc_RNA (1)...(19): siRNA sense strand
aagaggagccuuuggaguu

SEQ ID NO: 1225680 - RNA, 19 nt, Homo sapiens
  misc_RNA (1)...(19): siRNA sense strand
ggacagccaagacguagau

SEQ ID NO: 1225681 - RNA, 19 nt, Homo sapiens
  misc_RNA (1)...(19): siRNA sense strand
aggagcagaugagccauua

SEQ ID NO: 1225682 - RNA, 19 nt, Homo sapiens
  misc_RNA (1)...(19): siRNA sense strand
gaguugguguuuacagugu

SEQ ID NO: 1225683 - RNA, 19 nt, Homo sapiens
  misc_RNA (1)...(19): siRNA sense strand
acaguauccuugucaguau

SEQ ID NO: 1225684 - RNA, 19 nt, Homo sapiens
  misc_RNA (1)...(19): siRNA sense strand
cgcaaugaguugguguuua

SEQ ID NO: 1225685 - RNA, 19 nt, Homo sapiens
  misc_RNA (1)...(19): siRNA sense strand
gcagaugagccauuacagu

SEQ ID NO: 1225686 - RNA, 19 nt, Homo sapiens
  misc_RNA (1)...(19): siRNA sense strand
gagcagaugagccauuaca

SEQ ID NO: 1225687 - RNA, 19 nt, Homo sapiens
  misc_RNA (1)...(19): siRNA sense strand
uacacuggaucaccaacua

SEQ ID NO: 1225688 - RNA, 19 nt, Homo sapiens
  misc_RNA (1)...(19): siRNA sense strand
aaagcuaaguggagagcaa

SEQ ID NO: 1225689 - RNA, 19 nt, Homo sapiens
  misc_RNA (1)...(19): siRNA sense strand
ggagcaguguggagagcuu

SEQ ID NO: 1225690 - RNA, 19 nt, Homo sapiens
  misc_RNA (1)...(19): siRNA sense strand
cagacacacaugaccaaua

SEQ ID NO: 1225691 - RNA, 19 nt, Homo sapiens
  misc_RNA (1)...(19): siRNA sense strand
cuacaaauacgaguaacaa

SEQ ID NO: 1225692 - RNA, 19 nt, Homo sapiens
  misc_RNA (1)...(19): siRNA sense strand
gcccuucaauggaggaaau

SEQ ID NO: 1225693 - RNA, 19 nt, Homo sapiens
  misc_RNA (1)...(19): siRNA sense strand
aaauuuaccuaagcccauu

SEQ ID NO: 1225694 - RNA, 19 nt, Homo sapiens
  misc_RNA (1)...(19): siRNA sense strand
cgaaucaugugggcuguuc

SEQ ID NO: 1225695 - RNA, 19 nt, Homo sapiens
  misc_RNA (1)...(19): siRNA sense strand
uggcuuaucuucacagcau

SEQ ID NO: 1225696 - RNA, 19 nt, Homo sapiens
  misc_RNA (1)...(19): siRNA sense strand
gauaccaauggaucagaua

SEQ ID NO: 1225697 - RNA, 19 nt, Homo sapiens
  misc_RNA (1)...(19): siRNA sense strand
cccagugucagaaugauua

SEQ ID NO: 1225698 - RNA, 19 nt, Homo sapiens
  misc_RNA (1)...(19): siRNA sense strand
ucaugugggcuguucauaa

SEQ ID NO: 1225699 - RNA, 19 nt, Homo sapiens
  misc_RNA (1)...(19): siRNA sense strand
gaaaccaccaaacuuacug

SEQ ID NO: 1225700 - RNA, 19 nt, Homo sapiens
  misc_RNA (1)...(19): siRNA sense strand
gaaaauaaugacucacuug

SEQ ID NO: 1225701 - RNA, 19 nt, Homo sapiens
  misc_RNA (1)...(19): siRNA sense strand
ugccacaaaugauacuauu

SEQ ID NO: 1225702 - RNA, 19 nt, Homo sapiens
  misc_RNA (1)...(19): siRNA sense strand
aggaaagcguuuauuguag

SEQ ID NO: 1225703 - RNA, 19 nt, Homo sapiens
  misc_RNA (1)...(19): siRNA sense strand
agaggagccuuuggaguug

SEQ ID NO: 1225704 - RNA, 19 nt, Homo sapiens
  misc_RNA (1)...(19): siRNA sense strand
gccacaaaugauacuauua

SEQ ID NO: 1225705 - RNA, 19 nt, Homo sapiens
  misc_RNA (1)...(19): siRNA sense strand
ggaguggcuuaucuucaca

SEQ ID NO: 1225706 - RNA, 19 nt, Homo sapiens
  misc_RNA (1)...(19): siRNA sense strand
ugaaccauccuaauauugu

SEQ ID NO: 1225707 - RNA, 19 nt, Homo sapiens
  misc_RNA (1)...(19): siRNA sense strand
cggcaguuaucccguguga

SEQ ID NO: 1225708 - RNA, 19 nt, Homo sapiens
  misc_RNA (1)...(19): siRNA sense strand
uauggagccugcuugaauc

SEQ ID NO: 1225709 - RNA, 19 nt, Homo sapiens
  misc_RNA (1)...(19): siRNA sense strand
guuccugccacaaaugaua

SEQ ID NO: 1225710 - RNA, 19 nt, Homo sapiens
  misc_RNA (1)...(19): siRNA sense strand
gguacucgaccaccacuga

SEQ ID NO: 1225711 - RNA, 19 nt, Homo sapiens
  misc_RNA (1)...(19): siRNA sense strand
aauccagugugucuuguga

SEQ ID NO: 1225712 - RNA, 19 nt, Homo sapiens
  misc_RNA (1)...(19): siRNA sense strand
ucauggacauugcuucuac

SEQ ID NO: 1225713 - RNA, 19 nt, Homo sapiens
  misc_RNA (1)...(19): siRNA sense strand
uacaguauccuugucagua

SEQ ID NO: 1225714 - RNA, 19 nt, Homo sapiens
  misc_RNA (1)...(19): siRNA sense strand
gucggaaacccuuugauga

SEQ ID NO: 1225715 - RNA, 19 nt, Homo sapiens
  misc_RNA (1)...(19): siRNA sense strand
gacauucagacacacauga

SEQ ID NO: 1225716 - RNA, 19 nt, Homo sapiens
  misc_RNA (1)...(19): siRNA sense strand
cagugugucuugugaugga

SEQ ID NO: 1225717 - RNA, 19 nt, Homo sapiens
  misc_RNA (1)...(19): siRNA sense strand
aggcaaagcaacagaguga

SEQ ID NO: 1225718 - RNA, 19 nt, Homo sapiens
  misc_RNA (1)...(19): siRNA sense strand
gcgcuuagaaucaaaauug

SEQ ID NO: 1225719 - RNA, 19 nt, Homo sapiens
  misc_RNA (1)...(19): siRNA sense strand
caacccaaagcgcuaauuc

SEQ ID NO: 1225720 - RNA, 19 nt, Homo sapiens
  misc_RNA (1)...(19): siRNA sense strand
gugugaaccauccuaauau

SEQ ID NO: 1225721 - RNA, 19 nt, Homo sapiens
  misc_RNA (1)...(19): siRNA sense strand
gcucauucauggacauugc

SEQ ID NO: 1225722 - RNA, 19 nt, Homo sapiens
  misc_RNA (1)...(19): siRNA sense strand
caguauccuugucaguauu

SEQ ID NO: 1225723 - RNA, 19 nt, Homo sapiens
  misc_RNA (1)...(19): siRNA sense strand
aaagugaaucugagaggaa

SEQ ID NO: 1225724 - RNA, 19 nt, Homo sapiens
  misc_RNA (1)...(19): siRNA sense strand
uguagagcuucggcaguua

SEQ ID NO: 1225725 - RNA, 19 nt, Homo sapiens
  misc_RNA (1)...(19): siRNA sense strand
gugaaccauccuaauauug

SEQ ID NO: 1225726 - RNA, 19 nt, Homo sapiens
  misc_RNA (1)...(19): siRNA sense strand
gaucgagguggaagagguu

SEQ ID NO: 1225727 - RNA, 19 nt, Homo sapiens
  misc_RNA (1)...(19): siRNA sense strand
ccaaggaguggcuuaucuu

SEQ ID NO: 1225728 - RNA, 19 nt, Homo sapiens
  misc_RNA (1)...(19): siRNA sense strand
uuauggagccugcuugaau

SEQ ID NO: 1225729 - RNA, 19 nt, Homo sapiens
  misc_RNA (1)...(19): siRNA sense strand
caaggaguggcuuaucuuc

SEQ ID NO: 1225730 - RNA, 19 nt, Homo sapiens
  misc_RNA (1)...(19): siRNA sense strand
caaagcaacagagugaauc

SEQ ID NO: 1225731 - RNA, 19 nt, Homo sapiens
  misc_RNA (1)...(19): siRNA sense strand
acacaugaccaauaacaag

SEQ ID NO: 1225732 - RNA, 19 nt, Homo sapiens
  misc_RNA (1)...(19): siRNA sense strand
aagugaaucugagaggaaa

SEQ ID NO: 1225733 - RNA, 19 nt, Homo sapiens
  misc_RNA (1)...(19): siRNA sense strand
gaccugaaaccaccaaacu

SEQ ID NO: 1225734 - RNA, 19 nt, Homo sapiens
  misc_RNA (1)...(19): siRNA sense strand
guagagcuucggcaguuau

SEQ ID NO: 1225735 - RNA, 19 nt, Homo sapiens
  misc_RNA (1)...(19): siRNA sense strand
agaggaaagcguuuauugu

SEQ ID NO: 1225736 - RNA, 19 nt, Homo sapiens
  misc_RNA (1)...(19): siRNA sense strand
gguggaagagguuguugga

SEQ ID NO: 1225737 - RNA, 19 nt, Homo sapiens
  misc_RNA (1)...(19): siRNA sense strand
uggcccagcuuuccgaauc

SEQ ID NO: 1225738 - RNA, 19 nt, Homo sapiens
  misc_RNA (1)...(19): siRNA sense strand
ggacauugcuucuacaaau

SEQ ID NO: 1225739 - RNA, 19 nt, Homo sapiens
  misc_RNA (1)...(19): siRNA sense strand
gagugaaucuggacguuua

SEQ ID NO: 1225740 - RNA, 19 nt, Homo sapiens
  misc_RNA (1)...(19): siRNA sense strand
ugacaugucugaaauagaa

SEQ ID NO: 1225741 - RNA, 19 nt, Homo sapiens
  misc_RNA (1)...(19): siRNA sense strand
gaggaaagcguuuauugua

SEQ ID NO: 1225742 - RNA, 19 nt, Homo sapiens
  misc_RNA (1)...(19): siRNA sense strand
ggaaagcguuuauuguaga

SEQ ID NO: 1225743 - RNA, 19 nt, Homo sapiens
  misc_RNA (1)...(19): siRNA sense strand
gaaccauccuaauauugua

SEQ ID NO: 1225744 - RNA, 19 nt, Homo sapiens
  misc_RNA (1)...(19): siRNA sense strand
agacacacaugaccaauaa

SEQ ID NO: 1225745 - RNA, 19 nt, Homo sapiens
  misc_RNA (1)...(19): siRNA sense strand
gacauugcuucuacaaaua

SEQ ID NO: 1225746 - RNA, 19 nt, Homo sapiens
  misc_RNA (1)...(19): siRNA sense strand
gcaaugaguugguguuuac

SEQ ID NO: 1225747 - RNA, 19 nt, Homo sapiens
  misc_RNA (1)...(19): siRNA sense strand
ggaagagguuguuggaaga

SEQ ID NO: 1225748 - RNA, 19 nt, Homo sapiens
  misc_RNA (1)...(19): siRNA sense strand
gcaaguuccugccacaaau

SEQ ID NO: 1225749 - RNA, 19 nt, Homo sapiens
  misc_RNA (1)...(19): siRNA sense strand
gaaccauugccauauuaua

SEQ ID NO: 1225750 - RNA, 19 nt, Homo sapiens
  misc_RNA (1)...(19): siRNA sense strand
gaaacccuuugaugagauu

SEQ ID NO: 1225751 - RNA, 19 nt, Homo sapiens
  misc_RNA (1)...(19): siRNA sense strand
ggaguuguuugcaaagcua

SEQ ID NO: 1225752 - RNA, 19 nt, Homo sapiens
  misc_RNA (1)...(19): siRNA sense strand
cagaugagccauuacagua

SEQ ID NO: 1225753 - RNA, 19 nt, Homo sapiens
  misc_RNA (1)...(19): siRNA sense strand
aauaaugacucacuugaug

SEQ ID NO: 1225754 - RNA, 19 nt, Homo sapiens
  misc_RNA (1)...(19): siRNA sense strand
gcugaaccauugccauauu

SEQ ID NO: 1225755 - RNA, 19 nt, Homo sapiens
  misc_RNA (1)...(19): siRNA sense strand
gagaggaaagcguuuauug

SEQ ID NO: 1225756 - RNA, 19 nt, Homo sapiens
  misc_RNA (1)...(19): siRNA sense strand
gguaguaauuacagugaaa

SEQ ID NO: 1225757 - RNA, 19 nt, Homo sapiens
  misc_RNA (1)...(19): siRNA sense strand
ccugaaaccaccaaacuua

SEQ ID NO: 1225758 - RNA, 19 nt, Homo sapiens
  misc_RNA (1)...(19): siRNA sense strand
gaggaugagugcugacaug

SEQ ID NO: 1225759 - RNA, 19 nt, Homo sapiens
  misc_RNA (1)...(19): siRNA sense strand
gaugagugcugacaugucu

SEQ ID NO: 1225760 - RNA, 19 nt, Homo sapiens
  misc_RNA (1)...(19): siRNA sense strand
caugugggcuguucauaau

SEQ ID NO: 1225761 - RNA, 19 nt, Homo sapiens
  misc_RNA (1)...(19): siRNA sense strand
guagauccauccaagacuu

SEQ ID NO: 1225762 - RNA, 19 nt, Homo sapiens
  misc_RNA (1)...(19): siRNA sense strand
ggaaacccuuugaugagau

SEQ ID NO: 1225763 - RNA, 19 nt, Homo sapiens
  misc_RNA (1)...(19): siRNA sense strand
uugaagagaucgacuacaa

SEQ ID NO: 1225764 - RNA, 19 nt, Homo sapiens
  misc_RNA (1)...(19): siRNA sense strand
cugaaccauugccauauua

SEQ ID NO: 1225765 - RNA, 19 nt, Homo sapiens
  misc_RNA (1)...(19): siRNA sense strand
ggaggaaauugugaaaaua

SEQ ID NO: 1225766 - RNA, 19 nt, Homo sapiens
  misc_RNA (1)...(19): siRNA sense strand
gugcugacaugucugaaau

SEQ ID NO: 1225767 - RNA, 19 nt, Homo sapiens
  misc_RNA (1)...(19): siRNA sense strand
gaugagccauuacaguauc

SEQ ID NO: 1225768 - RNA, 19 nt, Homo sapiens
  misc_RNA (1)...(19): siRNA sense strand
cccaauggcuuaucuuaca

SEQ ID NO: 1225769 - RNA, 19 nt, Homo sapiens
  misc_RNA (1)...(19): siRNA sense strand
acacuaauauggagcaagu

SEQ ID NO: 1225770 - RNA, 19 nt, Homo sapiens
  misc_RNA (1)...(19): siRNA sense strand
ccugaugauuccacagaua

SEQ ID NO: 1225771 - RNA, 19 nt, Homo sapiens
  misc_RNA (1)...(19): siRNA sense strand
gcaaagcaacagagugaau

SEQ ID NO: 1225772 - RNA, 19 nt, Homo sapiens
  misc_RNA (1)...(19): siRNA sense strand
cgugugaaccauccuaaua

SEQ ID NO: 1225773 - RNA, 19 nt, Homo sapiens
  misc_RNA (1)...(19): siRNA sense strand
gaaagcguuuauuguagag

SEQ ID NO: 1225774 - RNA, 19 nt, Homo sapiens
  misc_RNA (1)...(19): siRNA sense strand
gcaguuaucccgugugaac

SEQ ID NO: 1225775 - RNA, 19 nt, Homo sapiens
  misc_RNA (1)...(19): siRNA sense strand
gcugacaugucugaaauag

SEQ ID NO: 1225776 - RNA, 19 nt, Homo sapiens
  misc_RNA (1)...(19): siRNA sense strand
gugcugaaccauugccaua

SEQ ID NO: 1225777 - RNA, 19 nt, Homo sapiens
  misc_RNA (1)...(19): siRNA sense strand
ugugaaccauccuaauauu

SEQ ID NO: 1225778 - RNA, 19 nt, Homo sapiens
  misc_RNA (1)...(19): siRNA sense strand
cggaaacccuuugaugaga

SEQ ID NO: 1225779 - RNA, 19 nt, Homo sapiens
  misc_RNA (1)...(19): siRNA sense strand
aagaggagccuuuggaguu

SEQ ID NO: 1225780 - RNA, 19 nt, Homo sapiens
  misc_RNA (1)...(19): siRNA sense strand
ggacagccaagacguagau

SEQ ID NO: 1225781 - RNA, 19 nt, Homo sapiens
  misc_RNA (1)...(19): siRNA sense strand
aggagcagaugagccauua

SEQ ID NO: 1225782 - RNA, 19 nt, Homo sapiens
  misc_RNA (1)...(19): siRNA sense strand
gaguugguguuuacagugu

SEQ ID NO: 1225783 - RNA, 19 nt, Homo sapiens
  misc_RNA (1)...(19): siRNA sense strand
acaguauccuugucaguau

SEQ ID NO: 1225784 - RNA, 19 nt, Homo sapiens
  misc_RNA (1)...(19): siRNA sense strand
cgcaaugaguugguguuua

SEQ ID NO: 1225785 - RNA, 19 nt, Homo sapiens
  misc_RNA (1)...(19): siRNA sense strand
gcagaugagccauuacagu

SEQ ID NO: 1225786 - RNA, 19 nt, Homo sapiens
  misc_RNA (1)...(19): siRNA sense strand
gagcagaugagccauuaca

SEQ ID NO: 1225787 - RNA, 19 nt, Homo sapiens
  misc_RNA (1)...(19): siRNA sense strand
uacacuggaucaccaacua

SEQ ID NO: 1225788 - RNA, 19 nt, Homo sapiens
  misc_RNA (1)...(19): siRNA sense strand
aaagcuaaguggagagcaa

SEQ ID NO: 1225789 - RNA, 19 nt, Homo sapiens
  misc_RNA (1)...(19): siRNA sense strand
ggagcaguguggagagcuu

SEQ ID NO: 1225790 - RNA, 19 nt, Homo sapiens
  misc_RNA (1)...(19): siRNA sense strand
cagacacacaugaccaaua

SEQ ID NO: 1225791 - RNA, 19 nt, Homo sapiens
  misc_RNA (1)...(19): siRNA sense strand
cuacaaauacgaguaacaa

SEQ ID NO: 1225792 - RNA, 19 nt, Homo sapiens
  misc_RNA (1)...(19): siRNA sense strand
gcccuucaauggaggaaau

SEQ ID NO: 1225793 - RNA, 19 nt, Homo sapiens
  misc_RNA (1)...(19): siRNA sense strand
aaauuuaccuaagcccauu

SEQ ID NO: 1225794 - RNA, 19 nt, Homo sapiens
  misc_RNA (1)...(19): siRNA sense strand
cgaaucaugugggcuguuc

SEQ ID NO: 1225795 - RNA, 19 nt, Homo sapiens
  misc_RNA (1)...(19): siRNA sense strand
uggcuuaucuucacagcau

SEQ ID NO: 1225796 - RNA, 19 nt, Homo sapiens
  misc_RNA (1)...(19): siRNA sense strand
gauaccaauggaucagaua

SEQ ID NO: 1225797 - RNA, 19 nt, Homo sapiens
  misc_RNA (1)...(19): siRNA sense strand
cccagugucagaaugauua

SEQ ID NO: 1225798 - RNA, 19 nt, Homo sapiens
  misc_RNA (1)...(19): siRNA sense strand
ucaugugggcuguucauaa

SEQ ID NO: 1225799 - RNA, 19 nt, Homo sapiens
  misc_RNA (1)...(19): siRNA sense strand
gaaaccaccaaacuuacug

SEQ ID NO: 1225800 - RNA, 19 nt, Homo sapiens
  misc_RNA (1)...(19): siRNA sense strand
gaaaauaaugacucacuug

SEQ ID NO: 1225801 - RNA, 19 nt, Homo sapiens
  misc_RNA (1)...(19): siRNA sense strand
ugccacaaaugauacuauu

SEQ ID NO: 1225802 - RNA, 19 nt, Homo sapiens
  misc_RNA (1)...(19): siRNA sense strand
aggaaagcguuuauuguag

SEQ ID NO: 1225803 - RNA, 19 nt, Homo sapiens
  misc_RNA (1)...(19): siRNA sense strand
agaggagccuuuggaguug

SEQ ID NO: 1225804 - RNA, 19 nt, Homo sapiens
  misc_RNA (1)...(19): siRNA sense strand
gccacaaaugauacuauua

SEQ ID NO: 1225805 - RNA, 19 nt, Homo sapiens
  misc_RNA (1)...(19): siRNA sense strand
ggaguggcuuaucuucaca

SEQ ID NO: 1225806 - RNA, 19 nt, Homo sapiens
  misc_RNA (1)...(19): siRNA sense strand
ugaaccauccuaauauugu

SEQ ID NO: 1225807 - RNA, 19 nt, Homo sapiens
  misc_RNA (1)...(19): siRNA sense strand
cggcaguuaucccguguga

SEQ ID NO: 1225808 - RNA, 19 nt, Homo sapiens
  misc_RNA (1)...(19): siRNA sense strand
uauggagccugcuugaauc

SEQ ID NO: 1225809 - RNA, 19 nt, Homo sapiens
  misc_RNA (1)...(19): siRNA sense strand
guuccugccacaaaugaua

SEQ ID NO: 1225810 - RNA, 19 nt, Homo sapiens
  misc_RNA (1)...(19): siRNA sense strand
gguacucgaccaccacuga

SEQ ID NO: 1225811 - RNA, 19 nt, Homo sapiens
  misc_RNA (1)...(19): siRNA sense strand
aauccagugugucuuguga

SEQ ID NO: 1225812 - RNA, 19 nt, Homo sapiens
  misc_RNA (1)...(19): siRNA sense strand
ucauggacauugcuucuac

SEQ ID NO: 1225813 - RNA, 19 nt, Homo sapiens
  misc_RNA (1)...(19): siRNA sense strand
uacaguauccuugucagua

SEQ ID NO: 1225814 - RNA, 19 nt, Homo sapiens
  misc_RNA (1)...(19): siRNA sense strand
gucggaaacccuuugauga

SEQ ID NO: 1225815 - RNA, 19 nt, Homo sapiens
  misc_RNA (1)...(19): siRNA sense strand
gacauucagacacacauga

SEQ ID NO: 1225816 - RNA, 19 nt, Homo sapiens
  misc_RNA (1)...(19): siRNA sense strand
cagugugucuugugaugga

SEQ ID NO: 1225817 - RNA, 19 nt, Homo sapiens
  misc_RNA (1)...(19): siRNA sense strand
aggcaaagcaacagaguga

SEQ ID NO: 1225818 - RNA, 19 nt, Homo sapiens
  misc_RNA (1)...(19): siRNA sense strand
gcgcuuagaaucaaaauug

SEQ ID NO: 1225819 - RNA, 19 nt, Homo sapiens
  misc_RNA (1)...(19): siRNA sense strand
caacccaaagcgcuaauuc

SEQ ID NO: 1225820 - RNA, 19 nt, Homo sapiens
  misc_RNA (1)...(19): siRNA sense strand
gugugaaccauccuaauau

SEQ ID NO: 1225821 - RNA, 19 nt, Homo sapiens
  misc_RNA (1)...(19): siRNA sense strand
gcucauucauggacauugc

SEQ ID NO: 1225822 - RNA, 19 nt, Homo sapiens
  misc_RNA (1)...(19): siRNA sense strand
caguauccuugucaguauu

SEQ ID NO: 1225823 - RNA, 19 nt, Homo sapiens
  misc_RNA (1)...(19): siRNA sense strand
aaagugaaucugagaggaa

SEQ ID NO: 1225824 - RNA, 19 nt, Homo sapiens
  misc_RNA (1)...(19): siRNA sense strand
uguagagcuucggcaguua

SEQ ID NO: 1225825 - RNA, 19 nt, Homo sapiens
  misc_RNA (1)...(19): siRNA sense strand
gugaaccauccuaauauug

SEQ ID NO: 1225826 - RNA, 19 nt, Homo sapiens
  misc_RNA (1)...(19): siRNA sense strand
gaucgagguggaagagguu

SEQ ID NO: 1225827 - RNA, 19 nt, Homo sapiens
  misc_RNA (1)...(19): siRNA sense strand
ccaaggaguggcuuaucuu

SEQ ID NO: 1225828 - RNA, 19 nt, Homo sapiens
  misc_RNA (1)...(19): siRNA sense strand
uuauggagccugcuugaau

SEQ ID NO: 1225829 - RNA, 19 nt, Homo sapiens
  misc_RNA (1)...(19): siRNA sense strand
caaggaguggcuuaucuuc

SEQ ID NO: 1225830 - RNA, 19 nt, Homo sapiens
  misc_RNA (1)...(19): siRNA sense strand
caaagcaacagagugaauc

SEQ ID NO: 1225831 - RNA, 19 nt, Homo sapiens
  misc_RNA (1)...(19): siRNA sense strand
acacaugaccaauaacaag

SEQ ID NO: 1225832 - RNA, 19 nt, Homo sapiens
  misc_RNA (1)...(19): siRNA sense strand
aagugaaucugagaggaaa

SEQ ID NO: 1225833 - RNA, 19 nt, Homo sapiens
  misc_RNA (1)...(19): siRNA sense strand
gaccugaaaccaccaaacu

SEQ ID NO: 1225834 - RNA, 19 nt, Homo sapiens
  misc_RNA (1)...(19): siRNA sense strand
guagagcuucggcaguuau

SEQ ID NO: 1225835 - RNA, 19 nt, Homo sapiens
  misc_RNA (1)...(19): siRNA sense strand
agaggaaagcguuuauugu

SEQ ID NO: 1225836 - RNA, 19 nt, Homo sapiens
  misc_RNA (1)...(19): siRNA sense strand
gguggaagagguuguugga

SEQ ID NO: 1225837 - RNA, 19 nt, Homo sapiens
  misc_RNA (1)...(19): siRNA sense strand
uggcccagcuuuccgaauc

SEQ ID NO: 1225838 - RNA, 19 nt, Homo sapiens
  misc_RNA (1)...(19): siRNA sense strand
aaagugagcuugaggauaa

SEQ ID NO: 1225839 - RNA, 19 nt, Homo sapiens
  misc_RNA (1)...(19): siRNA sense strand
gaacauauccaacuuucuu

SEQ ID NO: 1225840 - RNA, 19 nt, Homo sapiens
  misc_RNA (1)...(19): siRNA sense strand
ccagagagcaguaucuuua

SEQ ID NO: 1225841 - RNA, 19 nt, Homo sapiens
  misc_RNA (1)...(19): siRNA sense strand
caagacaaaugaucaugaa

SEQ ID NO: 1225842 - RNA, 19 nt, Homo sapiens
  misc_RNA (1)...(19): siRNA sense strand
gacaaaugaucaugaaaga

SEQ ID NO: 1225843 - RNA, 19 nt, Homo sapiens
  misc_RNA (1)...(19): siRNA sense strand
ggacauccgugcccucaga

SEQ ID NO: 1225844 - RNA, 19 nt, Homo sapiens
  misc_RNA (1)...(19): siRNA sense strand
ccuguaagcuucuuucuug

SEQ ID NO: 1225845 - RNA, 19 nt, Homo sapiens
  misc_RNA (1)...(19): siRNA sense strand
gagaacauauccaacuuuc

SEQ ID NO: 1225846 - RNA, 19 nt, Homo sapiens
  misc_RNA (1)...(19): siRNA sense strand
gaaaugagcagaggaguca

SEQ ID NO: 1225847 - RNA, 19 nt, Homo sapiens
  misc_RNA (1)...(19): siRNA sense strand
gagccaaucucagcugaaa

SEQ ID NO: 1225848 - RNA, 19 nt, Homo sapiens
  misc_RNA (1)...(19): siRNA sense strand
ggacaaccuugcaagacaa

SEQ ID NO: 1225849 - RNA, 19 nt, Homo sapiens
  misc_RNA (1)...(19): siRNA sense strand
gagccaaucuucagucagu

SEQ ID NO: 1225850 - RNA, 19 nt, Homo sapiens
  misc_RNA (1)...(19): siRNA sense strand
aaucaaagcacuuacauga

SEQ ID NO: 1225851 - RNA, 19 nt, Homo sapiens
  misc_RNA (1)...(19): siRNA sense strand
guacgaaucaaagcacuua

SEQ ID NO: 1225852 - RNA, 19 nt, Homo sapiens
  misc_RNA (1)...(19): siRNA sense strand
caaaugaucaugaaagaca

SEQ ID NO: 1225853 - RNA, 19 nt, Homo sapiens
  misc_RNA (1)...(19): siRNA sense strand
gcaccaccaucgccaaugu

SEQ ID NO: 1225854 - RNA, 19 nt, Homo sapiens
  misc_RNA (1)...(19): siRNA sense strand
gcaagacaaaugaucauga

SEQ ID NO: 1225855 - RNA, 19 nt, Homo sapiens
  misc_RNA (1)...(19): siRNA sense strand
gcuaaacauucucaacaau

SEQ ID NO: 1225856 - RNA, 19 nt, Homo sapiens
  misc_RNA (1)...(19): siRNA sense strand
gagucaagcucacggaugu

SEQ ID NO: 1225857 - RNA, 19 nt, Homo sapiens
  misc_RNA (1)...(19): siRNA sense strand
gaggagaagcuaaacauuc

SEQ ID NO: 1225858 - RNA, 19 nt, Homo sapiens
  misc_RNA (1)...(19): siRNA sense strand
aggaugccauuaaguauuu

SEQ ID NO: 1225859 - RNA, 19 nt, Homo sapiens
  misc_RNA (1)...(19): siRNA sense strand
guaaagcucuggacaaccu

SEQ ID NO: 1225860 - RNA, 19 nt, Homo sapiens
  misc_RNA (1)...(19): siRNA sense strand
gagagcaguaucuuuauug

SEQ ID NO: 1225861 - RNA, 19 nt, Homo sapiens
  misc_RNA (1)...(19): siRNA sense strand
caaaagccuugacaaauug

SEQ ID NO: 1225862 - RNA, 19 nt, Homo sapiens
  misc_RNA (1)...(19): siRNA sense strand
gaggaugccauuaaguauu

SEQ ID NO: 1225863 - RNA, 19 nt, Homo sapiens
  misc_RNA (1)...(19): siRNA sense strand
agagagcaguaucuuuauu

SEQ ID NO: 1225864 - RNA, 19 nt, Homo sapiens
  misc_RNA (1)...(19): siRNA sense strand
gugagaacauauccaacuu

SEQ ID NO: 1225865 - RNA, 19 nt, Homo sapiens
  misc_RNA (1)...(19): siRNA sense strand
gcuugaggauaacauaaga

SEQ ID NO: 1225866 - RNA, 19 nt, Homo sapiens
  misc_RNA (1)...(19): siRNA sense strand
cuggagauccucaaaguaa

SEQ ID NO: 1225867 - RNA, 19 nt, Homo sapiens
  misc_RNA (1)...(19): siRNA sense strand
ggagcgagggugcaacaaa

SEQ ID NO: 1225868 - RNA, 19 nt, Homo sapiens
  misc_RNA (1)...(19): siRNA sense strand
gcagaugagcuccguaaag

SEQ ID NO: 1225869 - RNA, 19 nt, Homo sapiens
  misc_RNA (1)...(19): siRNA sense strand
ggaggagaagcuaaacauu

SEQ ID NO: 1225870 - RNA, 19 nt, Homo sapiens
  misc_RNA (1)...(19): siRNA sense strand
gauaaaggccagcaguaca

SEQ ID NO: 1225871 - RNA, 19 nt, Homo sapiens
  misc_RNA (1)...(19): siRNA sense strand
gagcgagggugcaacaaaa

SEQ ID NO: 1225872 - RNA, 19 nt, Homo sapiens
  misc_RNA (1)...(19): siRNA sense strand
cugaggagcugaagaaggu

SEQ ID NO: 1225873 - RNA, 19 nt, Homo sapiens
  misc_RNA (1)...(19): siRNA sense strand
ggcaauacuuaccaacuca

SEQ ID NO: 1225874 - RNA, 19 nt, Homo sapiens
  misc_RNA (1)...(19): siRNA sense strand
gagcuugaggauaacauaa

SEQ ID NO: 1225875 - RNA, 19 nt, Homo sapiens
  misc_RNA (1)...(19): siRNA sense strand
cugcugaacugcccaggaa

SEQ ID NO: 1225876 - RNA, 19 nt, Homo sapiens
  misc_RNA (1)...(19): siRNA sense strand
cagaugagcuccguaaagc

SEQ ID NO: 1225877 - RNA, 19 nt, Homo sapiens
  misc_RNA (1)...(19): siRNA sense strand
cucaggagcuggaggagaa

SEQ ID NO: 1225878 - RNA, 19 nt, Homo sapiens
  misc_RNA (1)...(19): siRNA sense strand
agagcaguaucuuuauuga

SEQ ID NO: 1225879 - RNA, 19 nt, Homo sapiens
  misc_RNA (1)...(19): siRNA sense strand
gggauggaguugggaauca

SEQ ID NO: 1225880 - RNA, 19 nt, Homo sapiens
  misc_RNA (1)...(19): siRNA sense strand
aaagugagcacacagaauc

SEQ ID NO: 1225881 - RNA, 19 nt, Homo sapiens
  misc_RNA (1)...(19): siRNA sense strand
gaaagaagugguggacaca

SEQ ID NO: 1225882 - RNA, 19 nt, Homo sapiens
  misc_RNA (1)...(19): siRNA sense strand
caacaaaacguuccaagug

SEQ ID NO: 1225883 - RNA, 19 nt, Homo sapiens
  misc_RNA (1)...(19): siRNA sense strand
gagcugcuuugcugagagu

SEQ ID NO: 1225884 - RNA, 19 nt, Homo sapiens
  misc_RNA (1)...(19): siRNA sense strand
gaaucaaagcacuuacaug

SEQ ID NO: 1225885 - RNA, 19 nt, Homo sapiens
  misc_RNA (1)...(19): siRNA sense strand
ccaggaaugaggcagauga

SEQ ID NO: 1225886 - RNA, 19 nt, Homo sapiens
  misc_RNA (1)...(19): siRNA sense strand
cagagccaaucuucaguca

SEQ ID NO: 1225887 - RNA, 19 nt, Homo sapiens
  misc_RNA (1)...(19): siRNA sense strand
caacucacacgaggcauug

SEQ ID NO: 1225888 - RNA, 19 nt, Homo sapiens
  misc_RNA (1)...(19): siRNA sense strand
uugaggaugccauuaagua

SEQ ID NO: 1225889 - RNA, 19 nt, Homo sapiens
  misc_RNA (1)...(19): siRNA sense strand
ugagaacauauccaacuuu

SEQ ID NO: 1225890 - RNA, 19 nt, Homo sapiens
  misc_RNA (1)...(19): siRNA sense strand
uggacaaccuugcaagaca

SEQ ID NO: 1225891 - RNA, 19 nt, Homo sapiens
  misc_RNA (1)...(19): siRNA sense strand
uuauugaggaugccauuaa

SEQ ID NO: 1225892 - RNA, 19 nt, Homo sapiens
  misc_RNA (1)...(19): siRNA sense strand
gauacuggagauccucaaa

SEQ ID NO: 1225893 - RNA, 19 nt, Homo sapiens
  misc_RNA (1)...(19): siRNA sense strand
caaccuugcaagacaaaug

SEQ ID NO: 1225894 - RNA, 19 nt, Homo sapiens
  misc_RNA (1)...(19): siRNA sense strand
cuacuccugcugacugaua

SEQ ID NO: 1225895 - RNA, 19 nt, Homo sapiens
  misc_RNA (1)...(19): siRNA sense strand
guuccaagugggacagaua

SEQ ID NO: 1225896 - RNA, 19 nt, Homo sapiens
  misc_RNA (1)...(19): siRNA sense strand
uauccaacuuucuuuccuu

SEQ ID NO: 1225897 - RNA, 19 nt, Homo sapiens
  misc_RNA (1)...(19): siRNA sense strand
gggagcugcuuugcugaga

SEQ ID NO: 1225898 - RNA, 19 nt, Homo sapiens
  misc_RNA (1)...(19): siRNA sense strand
agacaaaugaucaugaaag

SEQ ID NO: 1225899 - RNA, 19 nt, Homo sapiens
  misc_RNA (1)...(19): siRNA sense strand
gaagcuaaacauucucaac

SEQ ID NO: 1225900 - RNA, 19 nt, Homo sapiens
  misc_RNA (1)...(19): siRNA sense strand
ccauuaaguauuucaagga

SEQ ID NO: 1225901 - RNA, 19 nt, Homo sapiens
  misc_RNA (1)...(19): siRNA sense strand
caacuuucuuuccuuagcu

SEQ ID NO: 1225902 - RNA, 19 nt, Homo sapiens
  misc_RNA (1)...(19): siRNA sense strand
auccaacuuucuuuccuua

SEQ ID NO: 1225903 - RNA, 19 nt, Homo sapiens
  misc_RNA (1)...(19): siRNA sense strand
ggugagaacauauccaacu

SEQ ID NO: 1225904 - RNA, 19 nt, Homo sapiens
  misc_RNA (1)...(19): siRNA sense strand
ugaggaugccauuaaguau

SEQ ID NO: 1225905 - RNA, 19 nt, Homo sapiens
  misc_RNA (1)...(19): siRNA sense strand
uacuggagauccucaaagu

SEQ ID NO: 1225906 - RNA, 19 nt, Homo sapiens
  misc_RNA (1)...(19): siRNA sense strand
gcugaacugcccaggaaug

SEQ ID NO: 1225907 - RNA, 19 nt, Homo sapiens
  misc_RNA (1)...(19): siRNA sense strand
ccuuagcuggcaauacuua

SEQ ID NO: 1225908 - RNA, 19 nt, Homo sapiens
  misc_RNA (1)...(19): siRNA sense strand
aagaagugguggacacaag

SEQ ID NO: 1225909 - RNA, 19 nt, Homo sapiens
  misc_RNA (1)...(19): siRNA sense strand
gggauuaccagcaguacca

SEQ ID NO: 1225910 - RNA, 19 nt, Homo sapiens
  misc_RNA (1)...(19): siRNA sense strand
cagagagcaguaucuuuau

SEQ ID NO: 1225911 - RNA, 19 nt, Homo sapiens
  misc_RNA (1)...(19): siRNA sense strand
gcaggcggaccaagaacug

SEQ ID NO: 1225912 - RNA, 19 nt, Homo sapiens
  misc_RNA (1)...(19): siRNA sense strand
aagcuaaacauucucaaca

SEQ ID NO: 1225913 - RNA, 19 nt, Homo sapiens
  misc_RNA (1)...(19): siRNA sense strand
uggcaauacuuaccaacuc

SEQ ID NO: 1225914 - RNA, 19 nt, Homo sapiens
  misc_RNA (1)...(19): siRNA sense strand
ccaacucacacgaggcauu

SEQ ID NO: 1225915 - RNA, 19 nt, Homo sapiens
  misc_RNA (1)...(19): siRNA sense strand
auucguggcugcugcugaa

SEQ ID NO: 1225916 - RNA, 19 nt, Homo sapiens
  misc_RNA (1)...(19): siRNA sense strand
ggccagcaguacagaaacu

SEQ ID NO: 1225917 - RNA, 19 nt, Homo sapiens
  misc_RNA (1)...(19): siRNA sense strand
uauugaggaugccauuaag

SEQ ID NO: 1225918 - RNA, 19 nt, Homo sapiens
  misc_RNA (1)...(19): siRNA sense strand
ccguaaagcucuggacaac

SEQ ID NO: 1225919 - RNA, 19 nt, Homo sapiens
  misc_RNA (1)...(19): siRNA sense strand
agcuaaacauucucaacaa

SEQ ID NO: 1225920 - RNA, 19 nt, Homo sapiens
  misc_RNA (1)...(19): siRNA sense strand
cgaaucaaagcacuuacau

SEQ ID NO: 1225921 - RNA, 19 nt, Homo sapiens
  misc_RNA (1)...(19): siRNA sense strand
ccaacuuucuuuccuuagc

SEQ ID NO: 1225922 - RNA, 19 nt, Homo sapiens
  misc_RNA (1)...(19): siRNA sense strand
ugagcuugaggauaacaua

SEQ ID NO: 1225923 - RNA, 19 nt, Homo sapiens
  misc_RNA (1)...(19): siRNA sense strand
gacaaccuugcaagacaaa

SEQ ID NO: 1225924 - RNA, 19 nt, Homo sapiens
  misc_RNA (1)...(19): siRNA sense strand
uuccuuagcuggcaauacu

SEQ ID NO: 1225925 - RNA, 19 nt, Homo sapiens
  misc_RNA (1)...(19): siRNA sense strand
guucagaagguccacaaag

SEQ ID NO: 1225926 - RNA, 19 nt, Homo sapiens
  misc_RNA (1)...(19): siRNA sense strand
gucuggcucucucagcauu

SEQ ID NO: 1225927 - RNA, 19 nt, Homo sapiens
  misc_RNA (1)...(19): siRNA sense strand
gcccaggaaugaggcagau

SEQ ID NO: 1225928 - RNA, 19 nt, Homo sapiens
  misc_RNA (1)...(19): siRNA sense strand
gagccagagccaaucuuca

SEQ ID NO: 1225929 - RNA, 19 nt, Homo sapiens
  misc_RNA (1)...(19): siRNA sense strand
cagacgagccagagccaau

SEQ ID NO: 1225930 - RNA, 19 nt, Homo sapiens
  misc_RNA (1)...(19): siRNA sense strand
ugggacagauacuggagau

SEQ ID NO: 1225931 - RNA, 19 nt, Homo sapiens
  misc_RNA (1)...(19): siRNA sense strand
gaaaagugagcuugaggau

SEQ ID NO: 1225932 - RNA, 19 nt, Homo sapiens
  misc_RNA (1)...(19): siRNA sense strand
aggcagaugagcuccguaa

SEQ ID NO: 1225933 - RNA, 19 nt, Homo sapiens
  misc_RNA (1)...(19): siRNA sense strand
aaagugagcuugaggauaa

SEQ ID NO: 1225934 - RNA, 19 nt, Homo sapiens
  misc_RNA (1)...(19): siRNA sense strand
gaacauauccaacuuucuu

SEQ ID NO: 1225935 - RNA, 19 nt, Homo sapiens
  misc_RNA (1)...(19): siRNA sense strand
ccagagagcaguaucuuua

SEQ ID NO: 1225936 - RNA, 19 nt, Homo sapiens
  misc_RNA (1)...(19): siRNA sense strand
caagacaaaugaucaugaa

SEQ ID NO: 1225937 - RNA, 19 nt, Homo sapiens
  misc_RNA (1)...(19): siRNA sense strand
gacaaaugaucaugaaaga

SEQ ID NO: 1225938 - RNA, 19 nt, Homo sapiens
  misc_RNA (1)...(19): siRNA sense strand
ggacauccgugcccucaga

SEQ ID NO: 1225939 - RNA, 19 nt, Homo sapiens
  misc_RNA (1)...(19): siRNA sense strand
ccuguaagcuucuuucuug

SEQ ID NO: 1225940 - RNA, 19 nt, Homo sapiens
  misc_RNA (1)...(19): siRNA sense strand
gagaacauauccaacuuuc

SEQ ID NO: 1225941 - RNA, 19 nt, Homo sapiens
  misc_RNA (1)...(19): siRNA sense strand
gaaaugagcagaggaguca

SEQ ID NO: 1225942 - RNA, 19 nt, Homo sapiens
  misc_RNA (1)...(19): siRNA sense strand
gagccaaucucagcugaaa

SEQ ID NO: 1225943 - RNA, 19 nt, Homo sapiens
  misc_RNA (1)...(19): siRNA sense strand
ggacaaccuugcaagacaa

SEQ ID NO: 1225944 - RNA, 19 nt, Homo sapiens
  misc_RNA (1)...(19): siRNA sense strand
gagccaaucuucagucagu

SEQ ID NO: 1225945 - RNA, 19 nt, Homo sapiens
  misc_RNA (1)...(19): siRNA sense strand
aaucaaagcacuuacauga

SEQ ID NO: 1225946 - RNA, 19 nt, Homo sapiens
  misc_RNA (1)...(19): siRNA sense strand
guacgaaucaaagcacuua

SEQ ID NO: 1225947 - RNA, 19 nt, Homo sapiens
  misc_RNA (1)...(19): siRNA sense strand
caaaugaucaugaaagaca

SEQ ID NO: 1225948 - RNA, 19 nt, Homo sapiens
  misc_RNA (1)...(19): siRNA sense strand
gcaccaccaucgccaaugu

SEQ ID NO: 1225949 - RNA, 19 nt, Homo sapiens
  misc_RNA (1)...(19): siRNA sense strand
gcaagacaaaugaucauga

SEQ ID NO: 1225950 - RNA, 19 nt, Homo sapiens
  misc_RNA (1)...(19): siRNA sense strand
gcuaaacauucucaacaau

SEQ ID NO: 1225951 - RNA, 19 nt, Homo sapiens
  misc_RNA (1)...(19): siRNA sense strand
gagucaagcucacggaugu

SEQ ID NO: 1225952 - RNA, 19 nt, Homo sapiens
  misc_RNA (1)...(19): siRNA sense strand
gaggagaagcuaaacauuc

SEQ ID NO: 1225953 - RNA, 19 nt, Homo sapiens
  misc_RNA (1)...(19): siRNA sense strand
aggaugccauuaaguauuu

SEQ ID NO: 1225954 - RNA, 19 nt, Homo sapiens
  misc_RNA (1)...(19): siRNA sense strand
guaaagcucuggacaaccu

SEQ ID NO: 1225955 - RNA, 19 nt, Homo sapiens
  misc_RNA (1)...(19): siRNA sense strand
gagagcaguaucuuuauug

SEQ ID NO: 1225956 - RNA, 19 nt, Homo sapiens
  misc_RNA (1)...(19): siRNA sense strand
caaaagccuugacaaauug

SEQ ID NO: 1225957 - RNA, 19 nt, Homo sapiens
  misc_RNA (1)...(19): siRNA sense strand
gaggaugccauuaaguauu

SEQ ID NO: 1225958 - RNA, 19 nt, Homo sapiens
  misc_RNA (1)...(19): siRNA sense strand
agagagcaguaucuuuauu

SEQ ID NO: 1225959 - RNA, 19 nt, Homo sapiens
  misc_RNA (1)...(19): siRNA sense strand
gugagaacauauccaacuu

SEQ ID NO: 1225960 - RNA, 19 nt, Homo sapiens
  misc_RNA (1)...(19): siRNA sense strand
gcuugaggauaacauaaga

SEQ ID NO: 1225961 - RNA, 19 nt, Homo sapiens
  misc_RNA (1)...(19): siRNA sense strand
cuggagauccucaaaguaa

SEQ ID NO: 1225962 - RNA, 19 nt, Homo sapiens
  misc_RNA (1)...(19): siRNA sense strand
ggagcgagggugcaacaaa

SEQ ID NO: 1225963 - RNA, 19 nt, Homo sapiens
  misc_RNA (1)...(19): siRNA sense strand
gcagaugagcuccguaaag

SEQ ID NO: 1225964 - RNA, 19 nt, Homo sapiens
  misc_RNA (1)...(19): siRNA sense strand
ggaggagaagcuaaacauu

SEQ ID NO: 1225965 - RNA, 19 nt, Homo sapiens
  misc_RNA (1)...(19): siRNA sense strand
gauaaaggccagcaguaca

SEQ ID NO: 1225966 - RNA, 19 nt, Homo sapiens
  misc_RNA (1)...(19): siRNA sense strand
gagcuugaggauaacauaa

SEQ ID NO: 1225967 - RNA, 19 nt, Homo sapiens
  misc_RNA (1)...(19): siRNA sense strand
cugaggagcugaagaaggu

SEQ ID NO: 1225968 - RNA, 19 nt, Homo sapiens
  misc_RNA (1)...(19): siRNA sense strand
ggcaauacuuaccaacuca

SEQ ID NO: 1225969 - RNA, 19 nt, Homo sapiens
  misc_RNA (1)...(19): siRNA sense strand
gagcgagggugcaacaaaa

SEQ ID NO: 1225970 - RNA, 19 nt, Homo sapiens
  misc_RNA (1)...(19): siRNA sense strand
cugcugaacugcccaggaa

SEQ ID NO: 1225971 - RNA, 19 nt, Homo sapiens
  misc_RNA (1)...(19): siRNA sense strand
cagaugagcuccguaaagc

SEQ ID NO: 1225972 - RNA, 19 nt, Homo sapiens
  misc_RNA (1)...(19): siRNA sense strand
cucaggagcuggaggagaa

SEQ ID NO: 1225973 - RNA, 19 nt, Homo sapiens
  misc_RNA (1)...(19): siRNA sense strand
agagcaguaucuuuauuga

SEQ ID NO: 1225974 - RNA, 19 nt, Homo sapiens
  misc_RNA (1)...(19): siRNA sense strand
gggauggaguugggaauca

SEQ ID NO: 1225975 - RNA, 19 nt, Homo sapiens
  misc_RNA (1)...(19): siRNA sense strand
aaagugagcacacagaauc

SEQ ID NO: 1225976 - RNA, 19 nt, Homo sapiens
  misc_RNA (1)...(19): siRNA sense strand
gaaagaagugguggacaca

SEQ ID NO: 1225977 - RNA, 19 nt, Homo sapiens
  misc_RNA (1)...(19): siRNA sense strand
caacaaaacguuccaagug

SEQ ID NO: 1225978 - RNA, 19 nt, Homo sapiens
  misc_RNA (1)...(19): siRNA sense strand
gagcugcuuugcugagagu

SEQ ID NO: 1225979 - RNA, 19 nt, Homo sapiens
  misc_RNA (1)...(19): siRNA sense strand
gaaucaaagcacuuacaug

SEQ ID NO: 1225980 - RNA, 19 nt, Homo sapiens
  misc_RNA (1)...(19): siRNA sense strand
ccaggaaugaggcagauga

SEQ ID NO: 1225981 - RNA, 19 nt, Homo sapiens
  misc_RNA (1)...(19): siRNA sense strand
cagagccaaucuucaguca

SEQ ID NO: 1225982 - RNA, 19 nt, Homo sapiens
  misc_RNA (1)...(19): siRNA sense strand
caacucacacgaggcauug

SEQ ID NO: 1225983 - RNA, 19 nt, Homo sapiens
  misc_RNA (1)...(19): siRNA sense strand
uugaggaugccauuaagua

SEQ ID NO: 1225984 - RNA, 19 nt, Homo sapiens
  misc_RNA (1)...(19): siRNA sense strand
ugagaacauauccaacuuu

SEQ ID NO: 1225985 - RNA, 19 nt, Homo sapiens
  misc_RNA (1)...(19): siRNA sense strand
uggacaaccuugcaagaca

SEQ ID NO: 1225986 - RNA, 19 nt, Homo sapiens
  misc_RNA (1)...(19): siRNA sense strand
uuauugaggaugccauuaa

SEQ ID NO: 1225987 - RNA, 19 nt, Homo sapiens
  misc_RNA (1)...(19): siRNA sense strand
gauacuggagauccucaaa

SEQ ID NO: 1225988 - RNA, 19 nt, Homo sapiens
  misc_RNA (1)...(19): siRNA sense strand
caaccuugcaagacaaaug

SEQ ID NO: 1225989 - RNA, 19 nt, Homo sapiens
  misc_RNA (1)...(19): siRNA sense strand
cuacuccugcugacugaua

SEQ ID NO: 1225990 - RNA, 19 nt, Homo sapiens
  misc_RNA (1)...(19): siRNA sense strand
guuccaagugggacagaua

SEQ ID NO: 1225991 - RNA, 19 nt, Homo sapiens
  misc_RNA (1)...(19): siRNA sense strand
gggagcugcuuugcugaga

SEQ ID NO: 1225992 - RNA, 19 nt, Homo sapiens
  misc_RNA (1)...(19): siRNA sense strand
uauccaacuuucuuuccuu

SEQ ID NO: 1225993 - RNA, 19 nt, Homo sapiens
  misc_RNA (1)...(19): siRNA sense strand
agacaaaugaucaugaaag

SEQ ID NO: 1225994 - RNA, 19 nt, Homo sapiens
  misc_RNA (1)...(19): siRNA sense strand
gaagcuaaacauucucaac

SEQ ID NO: 1225995 - RNA, 19 nt, Homo sapiens
  misc_RNA (1)...(19): siRNA sense strand
ccauuaaguauuucaagga

SEQ ID NO: 1225996 - RNA, 19 nt, Homo sapiens
  misc_RNA (1)...(19): siRNA sense strand
caacuuucuuuccuuagcu

SEQ ID NO: 1225997 - RNA, 19 nt, Homo sapiens
  misc_RNA (1)...(19): siRNA sense strand
auccaacuuucuuuccuua

SEQ ID NO: 1225998 - RNA, 19 nt, Homo sapiens
  misc_RNA (1)...(19): siRNA sense strand
ggugagaacauauccaacu

SEQ ID NO: 1225999 - RNA, 19 nt, Homo sapiens
  misc_RNA (1)...(19): siRNA sense strand
ugaggaugccauuaaguau

SEQ ID NO: 1226000 - RNA, 19 nt, Homo sapiens
  misc_RNA (1)...(19): siRNA sense strand
uacuggagauccucaaagu

SEQ ID NO: 1226001 - RNA, 19 nt, Homo sapiens
  misc_RNA (1)...(19): siRNA sense strand
gcugaacugcccaggaaug

SEQ ID NO: 1226002 - RNA, 19 nt, Homo sapiens
  misc_RNA (1)...(19): siRNA sense strand
ccuuagcuggcaauacuua

SEQ ID NO: 1226003 - RNA, 19 nt, Homo sapiens
  misc_RNA (1)...(19): siRNA sense strand
aagaagugguggacacaag

SEQ ID NO: 1226004 - RNA, 19 nt, Homo sapiens
  misc_RNA (1)...(19): siRNA sense strand
gggauuaccagcaguacca

SEQ ID NO: 1226005 - RNA, 19 nt, Homo sapiens
  misc_RNA (1)...(19): siRNA sense strand
cagagagcaguaucuuuau

SEQ ID NO: 1226006 - RNA, 19 nt, Homo sapiens
  misc_RNA (1)...(19): siRNA sense strand
gcaggcggaccaagaacug

SEQ ID NO: 1226007 - RNA, 19 nt, Homo sapiens
  misc_RNA (1)...(19): siRNA sense strand
aagcuaaacauucucaaca

SEQ ID NO: 1226008 - RNA, 19 nt, Homo sapiens
  misc_RNA (1)...(19): siRNA sense strand
uggcaauacuuaccaacuc

SEQ ID NO: 1226009 - RNA, 19 nt, Homo sapiens
  misc_RNA (1)...(19): siRNA sense strand
ccaacucacacgaggcauu

SEQ ID NO: 1226010 - RNA, 19 nt, Homo sapiens
  misc_RNA (1)...(19): siRNA sense strand
auucguggcugcugcugaa

SEQ ID NO: 1226011 - RNA, 19 nt, Homo sapiens
  misc_RNA (1)...(19): siRNA sense strand
ggccagcaguacagaaacu

SEQ ID NO: 1226012 - RNA, 19 nt, Homo sapiens
  misc_RNA (1)...(19): siRNA sense strand
uauugaggaugccauuaag

SEQ ID NO: 1226013 - RNA, 19 nt, Homo sapiens
  misc_RNA (1)...(19): siRNA sense strand
ccguaaagcucuggacaac

SEQ ID NO: 1226014 - RNA, 19 nt, Homo sapiens
  misc_RNA (1)...(19): siRNA sense strand
agcuaaacauucucaacaa

SEQ ID NO: 1226015 - RNA, 19 nt, Homo sapiens
  misc_RNA (1)...(19): siRNA sense strand
cgaaucaaagcacuuacau

SEQ ID NO: 1226016 - RNA, 19 nt, Homo sapiens
  misc_RNA (1)...(19): siRNA sense strand
ccaacuuucuuuccuuagc

SEQ ID NO: 1226017 - RNA, 19 nt, Homo sapiens
  misc_RNA (1)...(19): siRNA sense strand
ugagcuugaggauaacaua

SEQ ID NO: 1226018 - RNA, 19 nt, Homo sapiens
  misc_RNA (1)...(19): siRNA sense strand
gacaaccuugcaagacaaa

SEQ ID NO: 1226019 - RNA, 19 nt, Homo sapiens
  misc_RNA (1)...(19): siRNA sense strand
uuccuuagcuggcaauacu

SEQ ID NO: 1226020 - RNA, 19 nt, Homo sapiens
  misc_RNA (1)...(19): siRNA sense strand
guucagaagguccacaaag

SEQ ID NO: 1226021 - RNA, 19 nt, Homo sapiens
  misc_RNA (1)...(19): siRNA sense strand
gucuggcucucucagcauu

SEQ ID NO: 1226022 - RNA, 19 nt, Homo sapiens
  misc_RNA (1)...(19): siRNA sense strand
gcccaggaaugaggcagau

SEQ ID NO: 1226023 - RNA, 19 nt, Homo sapiens
  misc_RNA (1)...(19): siRNA sense strand
gagccagagccaaucuuca

SEQ ID NO: 1226024 - RNA, 19 nt, Homo sapiens
  misc_RNA (1)...(19): siRNA sense strand
cagacgagccagagccaau

SEQ ID NO: 1226025 - RNA, 19 nt, Homo sapiens
  misc_RNA (1)...(19): siRNA sense strand
aggcagaugagcuccguaa

SEQ ID NO: 1226026 - RNA, 19 nt, Homo sapiens
  misc_RNA (1)...(19): siRNA sense strand
ugggacagauacuggagau

SEQ ID NO: 1226027 - RNA, 19 nt, Homo sapiens
  misc_RNA (1)...(19): siRNA sense strand
gaaaagugagcuugaggau

SEQ ID NO: 1226028 - RNA, 19 nt, Homo sapiens
  misc_RNA (1)...(19): siRNA sense strand
aaagugagcuugaggauaa

SEQ ID NO: 1226029 - RNA, 19 nt, Homo sapiens
  misc_RNA (1)...(19): siRNA sense strand
gaacauauccaacuuucuu

SEQ ID NO: 1226030 - RNA, 19 nt, Homo sapiens
  misc_RNA (1)...(19): siRNA sense strand
ccagagagcaguaucuuua

SEQ ID NO: 1226031 - RNA, 19 nt, Homo sapiens
  misc_RNA (1)...(19): siRNA sense strand
caagacaaaugaucaugaa

SEQ ID NO: 1226032 - RNA, 19 nt, Homo sapiens
  misc_RNA (1)...(19): siRNA sense strand
gacaaaugaucaugaaaga

SEQ ID NO: 1226033 - RNA, 19 nt, Homo sapiens
  misc_RNA (1)...(19): siRNA sense strand
ggacauccgugcccucaga

SEQ ID NO: 1226034 - RNA, 19 nt, Homo sapiens
  misc_RNA (1)...(19): siRNA sense strand
ccuguaagcuucuuucuug

SEQ ID NO: 1226035 - RNA, 19 nt, Homo sapiens
  misc_RNA (1)...(19): siRNA sense strand
gagaacauauccaacuuuc

SEQ ID NO: 1226036 - RNA, 19 nt, Homo sapiens
  misc_RNA (1)...(19): siRNA sense strand
gaaaugagcagaggaguca

SEQ ID NO: 1226037 - RNA, 19 nt, Homo sapiens
  misc_RNA (1)...(19): siRNA sense strand
gagccaaucucagcugaaa

SEQ ID NO: 1226038 - RNA, 19 nt, Homo sapiens
  misc_RNA (1)...(19): siRNA sense strand
ggacaaccuugcaagacaa

SEQ ID NO: 1226039 - RNA, 19 nt, Homo sapiens
  misc_RNA (1)...(19): siRNA sense strand
gagccaaucuucagucagu

SEQ ID NO: 1226040 - RNA, 19 nt, Homo sapiens
  misc_RNA (1)...(19): siRNA sense strand
aaucaaagcacuuacauga

SEQ ID NO: 1226041 - RNA, 19 nt, Homo sapiens
  misc_RNA (1)...(19): siRNA sense strand
guacgaaucaaagcacuua

SEQ ID NO: 1226042 - RNA, 19 nt, Homo sapiens
  misc_RNA (1)...(19): siRNA sense strand
caaaugaucaugaaagaca

SEQ ID NO: 1226043 - RNA, 19 nt, Homo sapiens
  misc_RNA (1)...(19): siRNA sense strand
gcaccaccaucgccaaugu

SEQ ID NO: 1226044 - RNA, 19 nt, Homo sapiens
  misc_RNA (1)...(19): siRNA sense strand
gcaagacaaaugaucauga

SEQ ID NO: 1226045 - RNA, 19 nt, Homo sapiens
  misc_RNA (1)...(19): siRNA sense strand
gcuaaacauucucaacaau

SEQ ID NO: 1226046 - RNA, 19 nt, Homo sapiens
  misc_RNA (1)...(19): siRNA sense strand
gagucaagcucacggaugu

SEQ ID NO: 1226047 - RNA, 19 nt, Homo sapiens
  misc_RNA (1)...(19): siRNA sense strand
gaggagaagcuaaacauuc

SEQ ID NO: 1226048 - RNA, 19 nt, Homo sapiens
  misc_RNA (1)...(19): siRNA sense strand
aggaugccauuaaguauuu

SEQ ID NO: 1226049 - RNA, 19 nt, Homo sapiens
  misc_RNA (1)...(19): siRNA sense strand
guaaagcucuggacaaccu

SEQ ID NO: 1226050 - RNA, 19 nt, Homo sapiens
  misc_RNA (1)...(19): siRNA sense strand
gagagcaguaucuuuauug

SEQ ID NO: 1226051 - RNA, 19 nt, Homo sapiens
  misc_RNA (1)...(19): siRNA sense strand
caaaagccuugacaaauug

SEQ ID NO: 1226052 - RNA, 19 nt, Homo sapiens
  misc_RNA (1)...(19): siRNA sense strand
gaggaugccauuaaguauu

SEQ ID NO: 1226053 - RNA, 19 nt, Homo sapiens
  misc_RNA (1)...(19): siRNA sense strand
agagagcaguaucuuuauu

SEQ ID NO: 1226054 - RNA, 19 nt, Homo sapiens
  misc_RNA (1)...(19): siRNA sense strand
gugagaacauauccaacuu

SEQ ID NO: 1226055 - RNA, 19 nt, Homo sapiens
  misc_RNA (1)...(19): siRNA sense strand
gcuugaggauaacauaaga

SEQ ID NO: 1226056 - RNA, 19 nt, Homo sapiens
  misc_RNA (1)...(19): siRNA sense strand
cuggagauccucaaaguaa

SEQ ID NO: 1226057 - RNA, 19 nt, Homo sapiens
  misc_RNA (1)...(19): siRNA sense strand
ggagcgagggugcaacaaa

SEQ ID NO: 1226058 - RNA, 19 nt, Homo sapiens
  misc_RNA (1)...(19): siRNA sense strand
gcagaugagcuccguaaag

SEQ ID NO: 1226059 - RNA, 19 nt, Homo sapiens
  misc_RNA (1)...(19): siRNA sense strand
ggaggagaagcuaaacauu

SEQ ID NO: 1226060 - RNA, 19 nt, Homo sapiens
  misc_RNA (1)...(19): siRNA sense strand
gauaaaggccagcaguaca

SEQ ID NO: 1226061 - RNA, 19 nt, Homo sapiens
  misc_RNA (1)...(19): siRNA sense strand
gagcgagggugcaacaaaa

SEQ ID NO: 1226062 - RNA, 19 nt, Homo sapiens
  misc_RNA (1)...(19): siRNA sense strand
cugaggagcugaagaaggu

SEQ ID NO: 1226063 - RNA, 19 nt, Homo sapiens
  misc_RNA (1)...(19): siRNA sense strand
ggcaauacuuaccaacuca

SEQ ID NO: 1226064 - RNA, 19 nt, Homo sapiens
  misc_RNA (1)...(19): siRNA sense strand
gagcuugaggauaacauaa

SEQ ID NO: 1226065 - RNA, 19 nt, Homo sapiens
  misc_RNA (1)...(19): siRNA sense strand
cugcugaacugcccaggaa

SEQ ID NO: 1226066 - RNA, 19 nt, Homo sapiens
  misc_RNA (1)...(19): siRNA sense strand
cagaugagcuccguaaagc

SEQ ID NO: 1226067 - RNA, 19 nt, Homo sapiens
  misc_RNA (1)...(19): siRNA sense strand
cucaggagcuggaggagaa

SEQ ID NO: 1226068 - RNA, 19 nt, Homo sapiens
  misc_RNA (1)...(19): siRNA sense strand
agagcaguaucuuuauuga

SEQ ID NO: 1226069 - RNA, 19 nt, Homo sapiens
  misc_RNA (1)...(19): siRNA sense strand
gggauggaguugggaauca

SEQ ID NO: 1226070 - RNA, 19 nt, Homo sapiens
  misc_RNA (1)...(19): siRNA sense strand
aaagugagcacacagaauc

SEQ ID NO: 1226071 - RNA, 19 nt, Homo sapiens
  misc_RNA (1)...(19): siRNA sense strand
gaaagaagugguggacaca

SEQ ID NO: 1226072 - RNA, 19 nt, Homo sapiens
  misc_RNA (1)...(19): siRNA sense strand
caacaaaacguuccaagug

SEQ ID NO: 1226073 - RNA, 19 nt, Homo sapiens
  misc_RNA (1)...(19): siRNA sense strand
gagcugcuuugcugagagu

SEQ ID NO: 1226074 - RNA, 19 nt, Homo sapiens
  misc_RNA (1)...(19): siRNA sense strand
gaaucaaagcacuuacaug

SEQ ID NO: 1226075 - RNA, 19 nt, Homo sapiens
  misc_RNA (1)...(19): siRNA sense strand
ccaggaaugaggcagauga

SEQ ID NO: 1226076 - RNA, 19 nt, Homo sapiens
  misc_RNA (1)...(19): siRNA sense strand
cagagccaaucuucaguca

SEQ ID NO: 1226077 - RNA, 19 nt, Homo sapiens
  misc_RNA (1)...(19): siRNA sense strand
caacucacacgaggcauug

SEQ ID NO: 1226078 - RNA, 19 nt, Homo sapiens
  misc_RNA (1)...(19): siRNA sense strand
uugaggaugccauuaagua

SEQ ID NO: 1226079 - RNA, 19 nt, Homo sapiens
  misc_RNA (1)...(19): siRNA sense strand
ugagaacauauccaacuuu

SEQ ID NO: 1226080 - RNA, 19 nt, Homo sapiens
  misc_RNA (1)...(19): siRNA sense strand
uggacaaccuugcaagaca

SEQ ID NO: 1226081 - RNA, 19 nt, Homo sapiens
  misc_RNA (1)...(19): siRNA sense strand
uuauugaggaugccauuaa

SEQ ID NO: 1226082 - RNA, 19 nt, Homo sapiens
  misc_RNA (1)...(19): siRNA sense strand
gauacuggagauccucaaa

SEQ ID NO: 1226083 - RNA, 19 nt, Homo sapiens
  misc_RNA (1)...(19): siRNA sense strand
caaccuugcaagacaaaug

SEQ ID NO: 1226084 - RNA, 19 nt, Homo sapiens
  misc_RNA (1)...(19): siRNA sense strand
cuacuccugcugacugaua

SEQ ID NO: 1226085 - RNA, 19 nt, Homo sapiens
  misc_RNA (1)...(19): siRNA sense strand
guuccaagugggacagaua

SEQ ID NO: 1226086 - RNA, 19 nt, Homo sapiens
  misc_RNA (1)...(19): siRNA sense strand
uauccaacuuucuuuccuu

SEQ ID NO: 1226087 - RNA, 19 nt, Homo sapiens
  misc_RNA (1)...(19): siRNA sense strand
gggagcugcuuugcugaga

SEQ ID NO: 1226088 - RNA, 19 nt, Homo sapiens
  misc_RNA (1)...(19): siRNA sense strand
agacaaaugaucaugaaag

SEQ ID NO: 1226089 - RNA, 19 nt, Homo sapiens
  misc_RNA (1)...(19): siRNA sense strand
gaagcuaaacauucucaac

SEQ ID NO: 1226090 - RNA, 19 nt, Homo sapiens
  misc_RNA (1)...(19): siRNA sense strand
ccauuaaguauuucaagga

SEQ ID NO: 1226091 - RNA, 19 nt, Homo sapiens
  misc_RNA (1)...(19): siRNA sense strand
caacuuucuuuccuuagcu

SEQ ID NO: 1226092 - RNA, 19 nt, Homo sapiens
  misc_RNA (1)...(19): siRNA sense strand
auccaacuuucuuuccuua

SEQ ID NO: 1226093 - RNA, 19 nt, Homo sapiens
  misc_RNA (1)...(19): siRNA sense strand
ggugagaacauauccaacu

SEQ ID NO: 1226094 - RNA, 19 nt, Homo sapiens
  misc_RNA (1)...(19): siRNA sense strand
ugaggaugccauuaaguau

SEQ ID NO: 1226095 - RNA, 19 nt, Homo sapiens
  misc_RNA (1)...(19): siRNA sense strand
uacuggagauccucaaagu

SEQ ID NO: 1226096 - RNA, 19 nt, Homo sapiens
  misc_RNA (1)...(19): siRNA sense strand
gcugaacugcccaggaaug

SEQ ID NO: 1226097 - RNA, 19 nt, Homo sapiens
  misc_RNA (1)...(19): siRNA sense strand
ccuuagcuggcaauacuua

SEQ ID NO: 1226098 - RNA, 19 nt, Homo sapiens
  misc_RNA (1)...(19): siRNA sense strand
aagaagugguggacacaag

SEQ ID NO: 1226099 - RNA, 19 nt, Homo sapiens
  misc_RNA (1)...(19): siRNA sense strand
gggauuaccagcaguacca

SEQ ID NO: 1226100 - RNA, 19 nt, Homo sapiens
  misc_RNA (1)...(19): siRNA sense strand
cagagagcaguaucuuuau

SEQ ID NO: 1226101 - RNA, 19 nt, Homo sapiens
  misc_RNA (1)...(19): siRNA sense strand
gcaggcggaccaagaacug

SEQ ID NO: 1226102 - RNA, 19 nt, Homo sapiens
  misc_RNA (1)...(19): siRNA sense strand
aagcuaaacauucucaaca

SEQ ID NO: 1226103 - RNA, 19 nt, Homo sapiens
  misc_RNA (1)...(19): siRNA sense strand
uggcaauacuuaccaacuc

SEQ ID NO: 1226104 - RNA, 19 nt, Homo sapiens
  misc_RNA (1)...(19): siRNA sense strand
ccaacucacacgaggcauu

SEQ ID NO: 1226105 - RNA, 19 nt, Homo sapiens
  misc_RNA (1)...(19): siRNA sense strand
auucguggcugcugcugaa

SEQ ID NO: 1226106 - RNA, 19 nt, Homo sapiens
  misc_RNA (1)...(19): siRNA sense strand
ggccagcaguacagaaacu

SEQ ID NO: 1226107 - RNA, 19 nt, Homo sapiens
  misc_RNA (1)...(19): siRNA sense strand
uauugaggaugccauuaag

SEQ ID NO: 1226108 - RNA, 19 nt, Homo sapiens
  misc_RNA (1)...(19): siRNA sense strand
ccguaaagcucuggacaac

SEQ ID NO: 1226109 - RNA, 19 nt, Homo sapiens
  misc_RNA (1)...(19): siRNA sense strand
agcuaaacauucucaacaa

SEQ ID NO: 1226110 - RNA, 19 nt, Homo sapiens
  misc_RNA (1)...(19): siRNA sense strand
cgaaucaaagcacuuacau

SEQ ID NO: 1226111 - RNA, 19 nt, Homo sapiens
  misc_RNA (1)...(19): siRNA sense strand
ccaacuuucuuuccuuagc

SEQ ID NO: 1226112 - RNA, 19 nt, Homo sapiens
  misc_RNA (1)...(19): siRNA sense strand
ugagcuugaggauaacaua

SEQ ID NO: 1226113 - RNA, 19 nt, Homo sapiens
  misc_RNA (1)...(19): siRNA sense strand
gacaaccuugcaagacaaa

SEQ ID NO: 1226114 - RNA, 19 nt, Homo sapiens
  misc_RNA (1)...(19): siRNA sense strand
uuccuuagcuggcaauacu

SEQ ID NO: 1226115 - RNA, 19 nt, Homo sapiens
  misc_RNA (1)...(19): siRNA sense strand
guucagaagguccacaaag

SEQ ID NO: 1226116 - RNA, 19 nt, Homo sapiens
  misc_RNA (1)...(19): siRNA sense strand
gucuggcucucucagcauu

SEQ ID NO: 1226117 - RNA, 19 nt, Homo sapiens
  misc_RNA (1)...(19): siRNA sense strand
gcccaggaaugaggcagau

SEQ ID NO: 1226118 - RNA, 19 nt, Homo sapiens
  misc_RNA (1)...(19): siRNA sense strand
gagccagagccaaucuuca

SEQ ID NO: 1226119 - RNA, 19 nt, Homo sapiens
  misc_RNA (1)...(19): siRNA sense strand
cagacgagccagagccaau

SEQ ID NO: 1226120 - RNA, 19 nt, Homo sapiens
  misc_RNA (1)...(19): siRNA sense strand
ugggacagauacuggagau

SEQ ID NO: 1226121 - RNA, 19 nt, Homo sapiens
  misc_RNA (1)...(19): siRNA sense strand
gaaaagugagcuugaggau

SEQ ID NO: 1226122 - RNA, 19 nt, Homo sapiens
  misc_RNA (1)...(19): siRNA sense strand
aggcagaugagcuccguaa

SEQ ID NO: 1226123 - RNA, 19 nt, Homo sapiens
  misc_RNA (1)...(19): siRNA sense strand
caucuaagcuucuuucuga

SEQ ID NO: 1226124 - RNA, 19 nt, Homo sapiens
  misc_RNA (1)...(19): siRNA sense strand
caaaggaacuguagauugu

SEQ ID NO: 1226125 - RNA, 19 nt, Homo sapiens
  misc_RNA (1)...(19): siRNA sense strand
ugaaagaucuaccugaauu

SEQ ID NO: 1226126 - RNA, 19 nt, Homo sapiens
  misc_RNA (1)...(19): siRNA sense strand
gaaaagagguuaugagaga

SEQ ID NO: 1226127 - RNA, 19 nt, Homo sapiens
  misc_RNA (1)...(19): siRNA sense strand
ugaaagauccuaacuauga

SEQ ID NO: 1226128 - RNA, 19 nt, Homo sapiens
  misc_RNA (1)...(19): siRNA sense strand
gagcagauacugaauguaa

SEQ ID NO: 1226129 - RNA, 19 nt, Homo sapiens
  misc_RNA (1)...(19): siRNA sense strand
ggagaacuguguuuaugaa

SEQ ID NO: 1226130 - RNA, 19 nt, Homo sapiens
  misc_RNA (1)...(19): siRNA sense strand
ucaaucaccuuguuaaaga

SEQ ID NO: 1226131 - RNA, 19 nt, Homo sapiens
  misc_RNA (1)...(19): siRNA sense strand
gcggaaauguuaagagauu

SEQ ID NO: 1226132 - RNA, 19 nt, Homo sapiens
  misc_RNA (1)...(19): siRNA sense strand
ggagauggaggucgucuua

SEQ ID NO: 1226133 - RNA, 19 nt, Homo sapiens
  misc_RNA (1)...(19): siRNA sense strand
agacauaucugaagcugaa

SEQ ID NO: 1226134 - RNA, 19 nt, Homo sapiens
  misc_RNA (1)...(19): siRNA sense strand
gagaagacuuuaacaccaa

SEQ ID NO: 1226135 - RNA, 19 nt, Homo sapiens
  misc_RNA (1)...(19): siRNA sense strand
gaaagggcauuugagaaga

SEQ ID NO: 1226136 - RNA, 19 nt, Homo sapiens
  misc_RNA (1)...(19): siRNA sense strand
ggagaaaguacauuuaaga

SEQ ID NO: 1226137 - RNA, 19 nt, Homo sapiens
  misc_RNA (1)...(19): siRNA sense strand
gaaagaucuaccugaauua

SEQ ID NO: 1226138 - RNA, 19 nt, Homo sapiens
  misc_RNA (1)...(19): siRNA sense strand
gcauggagauacuaaugaa

SEQ ID NO: 1226139 - RNA, 19 nt, Homo sapiens
  misc_RNA (1)...(19): siRNA sense strand
gaaagauccuaacuaugau

SEQ ID NO: 1226140 - RNA, 19 nt, Homo sapiens
  misc_RNA (1)...(19): siRNA sense strand
ggacugaggaaauaaagaa

SEQ ID NO: 1226141 - RNA, 19 nt, Homo sapiens
  misc_RNA (1)...(19): siRNA sense strand
accaugagcuuguauauga

SEQ ID NO: 1226142 - RNA, 19 nt, Homo sapiens
  misc_RNA (1)...(19): siRNA sense strand
guaaugagcacaacugaug

SEQ ID NO: 1226143 - RNA, 19 nt, Homo sapiens
  misc_RNA (1)...(19): siRNA sense strand
ugugaaagauccuaacuau

SEQ ID NO: 1226144 - RNA, 19 nt, Homo sapiens
  misc_RNA (1)...(19): siRNA sense strand
guugaaagaucuaccugaa

SEQ ID NO: 1226145 - RNA, 19 nt, Homo sapiens
  misc_RNA (1)...(19): siRNA sense strand
gaacuggaaguaccucauu

SEQ ID NO: 1226146 - RNA, 19 nt, Homo sapiens
  misc_RNA (1)...(19): siRNA sense strand
ggauaaggcuaccgugcuu

SEQ ID NO: 1226147 - RNA, 19 nt, Homo sapiens
  misc_RNA (1)...(19): siRNA sense strand
ugaaguugcggaaauguua

SEQ ID NO: 1226148 - RNA, 19 nt, Homo sapiens
  misc_RNA (1)...(19): siRNA sense strand
gaugaaagggcauuugaga

SEQ ID NO: 1226149 - RNA, 19 nt, Homo sapiens
  misc_RNA (1)...(19): siRNA sense strand
cuaaugaaguugcggaaau

SEQ ID NO: 1226150 - RNA, 19 nt, Homo sapiens
  misc_RNA (1)...(19): siRNA sense strand
gguggaaagcguaaagaua

SEQ ID NO: 1226151 - RNA, 19 nt, Homo sapiens
  misc_RNA (1)...(19): siRNA sense strand
aagggaagguugcuggaua

SEQ ID NO: 1226152 - RNA, 19 nt, Homo sapiens
  misc_RNA (1)...(19): siRNA sense strand
caggagaacuguguuuaug

SEQ ID NO: 1226153 - RNA, 19 nt, Homo sapiens
  misc_RNA (1)...(19): siRNA sense strand
ggagguggaugugaaagau

SEQ ID NO: 1226154 - RNA, 19 nt, Homo sapiens
  misc_RNA (1)...(19): siRNA sense strand
gauccuaacuaugaugaug

SEQ ID NO: 1226155 - RNA, 19 nt, Homo sapiens
  misc_RNA (1)...(19): siRNA sense strand
gaagcugaacauugccuua

SEQ ID NO: 1226156 - RNA, 19 nt, Homo sapiens
  misc_RNA (1)...(19): siRNA sense strand
agauggaggucgucuuaaa

SEQ ID NO: 1226157 - RNA, 19 nt, Homo sapiens
  misc_RNA (1)...(19): siRNA sense strand
gagguuaugagagaauuua

SEQ ID NO: 1226158 - RNA, 19 nt, Homo sapiens
  misc_RNA (1)...(19): siRNA sense strand
gacuuuaacaccaaucaua

SEQ ID NO: 1226159 - RNA, 19 nt, Homo sapiens
  misc_RNA (1)...(19): siRNA sense strand
ccaaacaacucagagaucu

SEQ ID NO: 1226160 - RNA, 19 nt, Homo sapiens
  misc_RNA (1)...(19): siRNA sense strand
ggcaguauccuuagcauug

SEQ ID NO: 1226161 - RNA, 19 nt, Homo sapiens
  misc_RNA (1)...(19): siRNA sense strand
ggagcgguuuguagaagaa

SEQ ID NO: 1226162 - RNA, 19 nt, Homo sapiens
  misc_RNA (1)...(19): siRNA sense strand
cugaggaaauaaagaauga

SEQ ID NO: 1226163 - RNA, 19 nt, Homo sapiens
  misc_RNA (1)...(19): siRNA sense strand
aaacaacucagagaucuuu

SEQ ID NO: 1226164 - RNA, 19 nt, Homo sapiens
  misc_RNA (1)...(19): siRNA sense strand
gagcauggagauacuaaug

SEQ ID NO: 1226165 - RNA, 19 nt, Homo sapiens
  misc_RNA (1)...(19): siRNA sense strand
gaaggggacuaccaaagaa

SEQ ID NO: 1226166 - RNA, 19 nt, Homo sapiens
  misc_RNA (1)...(19): siRNA sense strand
uaaugaaguugcggaaaug

SEQ ID NO: 1226167 - RNA, 19 nt, Homo sapiens
  misc_RNA (1)...(19): siRNA sense strand
gaaauuccggacauuaauc

SEQ ID NO: 1226168 - RNA, 19 nt, Homo sapiens
  misc_RNA (1)...(19): siRNA sense strand
gaaguugcggaaauguuaa

SEQ ID NO: 1226169 - RNA, 19 nt, Homo sapiens
  misc_RNA (1)...(19): siRNA sense strand
ccugauaacuuaagugacu

SEQ ID NO: 1226170 - RNA, 19 nt, Homo sapiens
  misc_RNA (1)...(19): siRNA sense strand
cuaccgugcuucugaguau

SEQ ID NO: 1226171 - RNA, 19 nt, Homo sapiens
  misc_RNA (1)...(19): siRNA sense strand
caccaaucauacaggaaua

SEQ ID NO: 1226172 - RNA, 19 nt, Homo sapiens
  misc_RNA (1)...(19): siRNA sense strand
agagucaacuggagaaagu

SEQ ID NO: 1226173 - RNA, 19 nt, Homo sapiens
  misc_RNA (1)...(19): siRNA sense strand
guggaaagcguaaagauag

SEQ ID NO: 1226174 - RNA, 19 nt, Homo sapiens
  misc_RNA (1)...(19): siRNA sense strand
acaaaggaacuguagauug

SEQ ID NO: 1226175 - RNA, 19 nt, Homo sapiens
  misc_RNA (1)...(19): siRNA sense strand
ggaaggcuagucauagaga

SEQ ID NO: 1226176 - RNA, 19 nt, Homo sapiens
  misc_RNA (1)...(19): siRNA sense strand
gauaugcugcugaaagaau

SEQ ID NO: 1226177 - RNA, 19 nt, Homo sapiens
  misc_RNA (1)...(19): siRNA sense strand
gcagcaaucugucaaucac

SEQ ID NO: 1226178 - RNA, 19 nt, Homo sapiens
  misc_RNA (1)...(19): siRNA sense strand
uaucugaagcugaacauug

SEQ ID NO: 1226179 - RNA, 19 nt, Homo sapiens
  misc_RNA (1)...(19): siRNA sense strand
ugaaagggcauuugagaag

SEQ ID NO: 1226180 - RNA, 19 nt, Homo sapiens
  misc_RNA (1)...(19): siRNA sense strand
acaaugaaauuccggacau

SEQ ID NO: 1226181 - RNA, 19 nt, Homo sapiens
  misc_RNA (1)...(19): siRNA sense strand
gaaaaugagcagauacuga

SEQ ID NO: 1226182 - RNA, 19 nt, Homo sapiens
  misc_RNA (1)...(19): siRNA sense strand
uggaggagguggaugugaa

SEQ ID NO: 1226183 - RNA, 19 nt, Homo sapiens
  misc_RNA (1)...(19): siRNA sense strand
uugauaugcugcugaaaga

SEQ ID NO: 1226184 - RNA, 19 nt, Homo sapiens
  misc_RNA (1)...(19): siRNA sense strand
ggagauggaauuuuaugua

SEQ ID NO: 1226185 - RNA, 19 nt, Homo sapiens
  misc_RNA (1)...(19): siRNA sense strand
ggaggagguggaugugaaa

SEQ ID NO: 1226186 - RNA, 19 nt, Homo sapiens
  misc_RNA (1)...(19): siRNA sense strand
guaccaguguuggcaguau

SEQ ID NO: 1226187 - RNA, 19 nt, Homo sapiens
  misc_RNA (1)...(19): siRNA sense strand
gcugaaagaauauuuacuc

SEQ ID NO: 1226188 - RNA, 19 nt, Homo sapiens
  misc_RNA (1)...(19): siRNA sense strand
gcugcugaaagaauauuua

SEQ ID NO: 1226189 - RNA, 19 nt, Homo sapiens
  misc_RNA (1)...(19): siRNA sense strand
gggagugacgcccuuagaa

SEQ ID NO: 1226190 - RNA, 19 nt, Homo sapiens
  misc_RNA (1)...(19): siRNA sense strand
gauuucagcauccuccauu

SEQ ID NO: 1226191 - RNA, 19 nt, Homo sapiens
  misc_RNA (1)...(19): siRNA sense strand
auaugcugcugaaagaaua

SEQ ID NO: 1226192 - RNA, 19 nt, Homo sapiens
  misc_RNA (1)...(19): siRNA sense strand
gcaguauccuuagcauugg

SEQ ID NO: 1226193 - RNA, 19 nt, Homo sapiens
  misc_RNA (1)...(19): siRNA sense strand
ggagugacgcccuuagaag

SEQ ID NO: 1226194 - RNA, 19 nt, Homo sapiens
  misc_RNA (1)...(19): siRNA sense strand
gggcauuugagaagacuuu

SEQ ID NO: 1226195 - RNA, 19 nt, Homo sapiens
  misc_RNA (1)...(19): siRNA sense strand
gggcagcaaucugucaauc

SEQ ID NO: 1226196 - RNA, 19 nt, Homo sapiens
  misc_RNA (1)...(19): siRNA sense strand
uugcggaaauguuaagaga

SEQ ID NO: 1226197 - RNA, 19 nt, Homo sapiens
  misc_RNA (1)...(19): siRNA sense strand
gcauuugagaagacuuuaa

SEQ ID NO: 1226198 - RNA, 19 nt, Homo sapiens
  misc_RNA (1)...(19): siRNA sense strand
gagaacuguguuuaugaaa

SEQ ID NO: 1226199 - RNA, 19 nt, Homo sapiens
  misc_RNA (1)...(19): siRNA sense strand
uaccauuacuguagaccaa

SEQ ID NO: 1226200 - RNA, 19 nt, Homo sapiens
  misc_RNA (1)...(19): siRNA sense strand
gaggugggcagcaaucugu

SEQ ID NO: 1226201 - RNA, 19 nt, Homo sapiens
  misc_RNA (1)...(19): siRNA sense strand
ggacaguaaugagcacaac

SEQ ID NO: 1226202 - RNA, 19 nt, Homo sapiens
  misc_RNA (1)...(19): siRNA sense strand
gcccuuagaaguggauuaa

SEQ ID NO: 1226203 - RNA, 19 nt, Homo sapiens
  misc_RNA (1)...(19): siRNA sense strand
ggaaggggacuaccaaaga

SEQ ID NO: 1226204 - RNA, 19 nt, Homo sapiens
  misc_RNA (1)...(19): siRNA sense strand
ccaugagcuuguauaugaa

SEQ ID NO: 1226205 - RNA, 19 nt, Homo sapiens
  misc_RNA (1)...(19): siRNA sense strand
agauugauaugcugcugaa

SEQ ID NO: 1226206 - RNA, 19 nt, Homo sapiens
  misc_RNA (1)...(19): siRNA sense strand
uggagauacuaaugaaguu

SEQ ID NO: 1226207 - RNA, 19 nt, Homo sapiens
  misc_RNA (1)...(19): siRNA sense strand
gaccaggagaacuguguuu

SEQ ID NO: 1226208 - RNA, 19 nt, Homo sapiens
  misc_RNA (1)...(19): siRNA sense strand
ggaaguaccucauuuucac

SEQ ID NO: 1226209 - RNA, 19 nt, Homo sapiens
  misc_RNA (1)...(19): siRNA sense strand
gcugaacauugccuuaagg

SEQ ID NO: 1226210 - RNA, 19 nt, Homo sapiens
  misc_RNA (1)...(19): siRNA sense strand
gaaagcguaaagauagugu

SEQ ID NO: 1226211 - RNA, 19 nt, Homo sapiens
  misc_RNA (1)...(19): siRNA sense strand
uuaagugacucucucuuuu

SEQ ID NO: 1226212 - RNA, 19 nt, Homo sapiens
  misc_RNA (1)...(19): siRNA sense strand
uguuggagauggaauuuua

SEQ ID NO: 1226213 - RNA, 19 nt, Homo sapiens
  misc_RNA (1)...(19): siRNA sense strand
agaucuaccugaauuagca

SEQ ID NO: 1226214 - RNA, 19 nt, Homo sapiens
  misc_RNA (1)...(19): siRNA sense strand
ccaggagaacuguguuuau

SEQ ID NO: 1226215 - RNA, 19 nt, Homo sapiens
  misc_RNA (1)...(19): siRNA sense strand
cuggacagguguaugaugu

SEQ ID NO: 1226216 - RNA, 19 nt, Homo sapiens
  misc_RNA (1)...(19): siRNA sense strand
agagaucuuuguccuucaa

SEQ ID NO: 1226217 - RNA, 19 nt, Homo sapiens
  misc_RNA (1)...(19): siRNA sense strand
ugaaauuccggacauuaau

SEQ ID NO: 1226218 - RNA, 19 nt, Homo sapiens
  misc_RNA (1)...(19): siRNA sense strand
ggagauacuaaugaaguug

SEQ ID NO: 1226219 - RNA, 19 nt, Homo sapiens
  misc_RNA (1)...(19): siRNA sense strand
cauuaacgaagcuagaauu

SEQ ID NO: 1226220 - RNA, 19 nt, Homo sapiens
  misc_RNA (1)...(19): siRNA sense strand
cuggagaaaguacauuuaa

SEQ ID NO: 1226221 - RNA, 19 nt, Homo sapiens
  misc_RNA (1)...(19): siRNA sense strand
cuuaagugacucucucuuu

SEQ ID NO: 1226222 - RNA, 19 nt, Homo sapiens
  misc_RNA (1)...(19): siRNA sense strand
ucaccuuguuaaagagauu

SEQ ID NO: 1226223 - RNA, 19 nt, Homo sapiens
  misc_RNA (1)...(19): siRNA sense strand
caucuaagcuucuuucuga

SEQ ID NO: 1226224 - RNA, 19 nt, Homo sapiens
  misc_RNA (1)...(19): siRNA sense strand
caaaggaacuguagauugu

SEQ ID NO: 1226225 - RNA, 19 nt, Homo sapiens
  misc_RNA (1)...(19): siRNA sense strand
ugaaagaucuaccugaauu

SEQ ID NO: 1226226 - RNA, 19 nt, Homo sapiens
  misc_RNA (1)...(19): siRNA sense strand
gaaaagagguuaugagaga

SEQ ID NO: 1226227 - RNA, 19 nt, Homo sapiens
  misc_RNA (1)...(19): siRNA sense strand
ugaaagauccuaacuauga

SEQ ID NO: 1226228 - RNA, 19 nt, Homo sapiens
  misc_RNA (1)...(19): siRNA sense strand
ggagaacuguguuuaugaa

SEQ ID NO: 1226229 - RNA, 19 nt, Homo sapiens
  misc_RNA (1)...(19): siRNA sense strand
ucaaucaccuuguuaaaga

SEQ ID NO: 1226230 - RNA, 19 nt, Homo sapiens
  misc_RNA (1)...(19): siRNA sense strand
gcggaaauguuaagagauu

SEQ ID NO: 1226231 - RNA, 19 nt, Homo sapiens
  misc_RNA (1)...(19): siRNA sense strand
ggagauggaggucgucuua

SEQ ID NO: 1226232 - RNA, 19 nt, Homo sapiens
  misc_RNA (1)...(19): siRNA sense strand
agacauaucugaagcugaa

SEQ ID NO: 1226233 - RNA, 19 nt, Homo sapiens
  misc_RNA (1)...(19): siRNA sense strand
gagaagacuuuaacaccaa

SEQ ID NO: 1226234 - RNA, 19 nt, Homo sapiens
  misc_RNA (1)...(19): siRNA sense strand
gaaagggcauuugagaaga

SEQ ID NO: 1226235 - RNA, 19 nt, Homo sapiens
  misc_RNA (1)...(19): siRNA sense strand
ggagaaaguacauuuaaga

SEQ ID NO: 1226236 - RNA, 19 nt, Homo sapiens
  misc_RNA (1)...(19): siRNA sense strand
gaaagaucuaccugaauua

SEQ ID NO: 1226237 - RNA, 19 nt, Homo sapiens
  misc_RNA (1)...(19): siRNA sense strand
gcauggagauacuaaugaa

SEQ ID NO: 1226238 - RNA, 19 nt, Homo sapiens
  misc_RNA (1)...(19): siRNA sense strand
gaaagauccuaacuaugau

SEQ ID NO: 1226239 - RNA, 19 nt, Homo sapiens
  misc_RNA (1)...(19): siRNA sense strand
ggacugaggaaauaaagaa

SEQ ID NO: 1226240 - RNA, 19 nt, Homo sapiens
  misc_RNA (1)...(19): siRNA sense strand
accaugagcuuguauauga

SEQ ID NO: 1226241 - RNA, 19 nt, Homo sapiens
  misc_RNA (1)...(19): siRNA sense strand
guaaugagcacaacugaug

SEQ ID NO: 1226242 - RNA, 19 nt, Homo sapiens
  misc_RNA (1)...(19): siRNA sense strand
ugugaaagauccuaacuau

SEQ ID NO: 1226243 - RNA, 19 nt, Homo sapiens
  misc_RNA (1)...(19): siRNA sense strand
guugaaagaucuaccugaa

SEQ ID NO: 1226244 - RNA, 19 nt, Homo sapiens
  misc_RNA (1)...(19): siRNA sense strand
gaacuggaaguaccucauu

SEQ ID NO: 1226245 - RNA, 19 nt, Homo sapiens
  misc_RNA (1)...(19): siRNA sense strand
ggauaaggcuaccgugcuu

SEQ ID NO: 1226246 - RNA, 19 nt, Homo sapiens
  misc_RNA (1)...(19): siRNA sense strand
ugaaguugcggaaauguua

SEQ ID NO: 1226247 - RNA, 19 nt, Homo sapiens
  misc_RNA (1)...(19): siRNA sense strand
gaugaaagggcauuugaga

SEQ ID NO: 1226248 - RNA, 19 nt, Homo sapiens
  misc_RNA (1)...(19): siRNA sense strand
cuaaugaaguugcggaaau

SEQ ID NO: 1226249 - RNA, 19 nt, Homo sapiens
  misc_RNA (1)...(19): siRNA sense strand
gguggaaagcguaaagaua

SEQ ID NO: 1226250 - RNA, 19 nt, Homo sapiens
  misc_RNA (1)...(19): siRNA sense strand
aagggaagguugcuggaua

SEQ ID NO: 1226251 - RNA, 19 nt, Homo sapiens
  misc_RNA (1)...(19): siRNA sense strand
caggagaacuguguuuaug

SEQ ID NO: 1226252 - RNA, 19 nt, Homo sapiens
  misc_RNA (1)...(19): siRNA sense strand
ggagguggaugugaaagau

SEQ ID NO: 1226253 - RNA, 19 nt, Homo sapiens
  misc_RNA (1)...(19): siRNA sense strand
gauccuaacuaugaugaug

SEQ ID NO: 1226254 - RNA, 19 nt, Homo sapiens
  misc_RNA (1)...(19): siRNA sense strand
gaagcugaacauugccuua

SEQ ID NO: 1226255 - RNA, 19 nt, Homo sapiens
  misc_RNA (1)...(19): siRNA sense strand
agauggaggucgucuuaaa

SEQ ID NO: 1226256 - RNA, 19 nt, Homo sapiens
  misc_RNA (1)...(19): siRNA sense strand
gagguuaugagagaauuua

SEQ ID NO: 1226257 - RNA, 19 nt, Homo sapiens
  misc_RNA (1)...(19): siRNA sense strand
gacuuuaacaccaaucaua

SEQ ID NO: 1226258 - RNA, 19 nt, Homo sapiens
  misc_RNA (1)...(19): siRNA sense strand
ccaaacaacucagagaucu

SEQ ID NO: 1226259 - RNA, 19 nt, Homo sapiens
  misc_RNA (1)...(19): siRNA sense strand
ggcaguauccuuagcauug

SEQ ID NO: 1226260 - RNA, 19 nt, Homo sapiens
  misc_RNA (1)...(19): siRNA sense strand
ggagcgguuuguagaagaa

SEQ ID NO: 1226261 - RNA, 19 nt, Homo sapiens
  misc_RNA (1)...(19): siRNA sense strand
gagcauggagauacuaaug

SEQ ID NO: 1226262 - RNA, 19 nt, Homo sapiens
  misc_RNA (1)...(19): siRNA sense strand
aaacaacucagagaucuuu

SEQ ID NO: 1226263 - RNA, 19 nt, Homo sapiens
  misc_RNA (1)...(19): siRNA sense strand
cugaggaaauaaagaauga

SEQ ID NO: 1226264 - RNA, 19 nt, Homo sapiens
  misc_RNA (1)...(19): siRNA sense strand
gaaggggacuaccaaagaa

SEQ ID NO: 1226265 - RNA, 19 nt, Homo sapiens
  misc_RNA (1)...(19): siRNA sense strand
uaaugaaguugcggaaaug

SEQ ID NO: 1226266 - RNA, 19 nt, Homo sapiens
  misc_RNA (1)...(19): siRNA sense strand
gaaauuccggacauuaauc

SEQ ID NO: 1226267 - RNA, 19 nt, Homo sapiens
  misc_RNA (1)...(19): siRNA sense strand
gaaguugcggaaauguuaa

SEQ ID NO: 1226268 - RNA, 19 nt, Homo sapiens
  misc_RNA (1)...(19): siRNA sense strand
ccugauaacuuaagugacu

SEQ ID NO: 1226269 - RNA, 19 nt, Homo sapiens
  misc_RNA (1)...(19): siRNA sense strand
cuaccgugcuucugaguau

SEQ ID NO: 1226270 - RNA, 19 nt, Homo sapiens
  misc_RNA (1)...(19): siRNA sense strand
caccaaucauacaggaaua

SEQ ID NO: 1226271 - RNA, 19 nt, Homo sapiens
  misc_RNA (1)...(19): siRNA sense strand
agagucaacuggagaaagu

SEQ ID NO: 1226272 - RNA, 19 nt, Homo sapiens
  misc_RNA (1)...(19): siRNA sense strand
guggaaagcguaaagauag

SEQ ID NO: 1226273 - RNA, 19 nt, Homo sapiens
  misc_RNA (1)...(19): siRNA sense strand
acaaaggaacuguagauug

SEQ ID NO: 1226274 - RNA, 19 nt, Homo sapiens
  misc_RNA (1)...(19): siRNA sense strand
ggaaggcuagucauagaga

SEQ ID NO: 1226275 - RNA, 19 nt, Homo sapiens
  misc_RNA (1)...(19): siRNA sense strand
gauaugcugcugaaagaau

SEQ ID NO: 1226276 - RNA, 19 nt, Homo sapiens
  misc_RNA (1)...(19): siRNA sense strand
gcagcaaucugucaaucac

SEQ ID NO: 1226277 - RNA, 19 nt, Homo sapiens
  misc_RNA (1)...(19): siRNA sense strand
uaucugaagcugaacauug

SEQ ID NO: 1226278 - RNA, 19 nt, Homo sapiens
  misc_RNA (1)...(19): siRNA sense strand
ugaaagggcauuugagaag

SEQ ID NO: 1226279 - RNA, 19 nt, Homo sapiens
  misc_RNA (1)...(19): siRNA sense strand
acaaugaaauuccggacau

SEQ ID NO: 1226280 - RNA, 19 nt, Homo sapiens
  misc_RNA (1)...(19): siRNA sense strand
uggaggagguggaugugaa

SEQ ID NO: 1226281 - RNA, 19 nt, Homo sapiens
  misc_RNA (1)...(19): siRNA sense strand
uugauaugcugcugaaaga

SEQ ID NO: 1226282 - RNA, 19 nt, Homo sapiens
  misc_RNA (1)...(19): siRNA sense strand
ggagauggaauuuuaugua

SEQ ID NO: 1226283 - RNA, 19 nt, Homo sapiens
  misc_RNA (1)...(19): siRNA sense strand
ggaggagguggaugugaaa

SEQ ID NO: 1226284 - RNA, 19 nt, Homo sapiens
  misc_RNA (1)...(19): siRNA sense strand
guaccaguguuggcaguau

SEQ ID NO: 1226285 - RNA, 19 nt, Homo sapiens
  misc_RNA (1)...(19): siRNA sense strand
gcugaaagaauauuuacuc

SEQ ID NO: 1226286 - RNA, 19 nt, Homo sapiens
  misc_RNA (1)...(19): siRNA sense strand
gcugcugaaagaauauuua

SEQ ID NO: 1226287 - RNA, 19 nt, Homo sapiens
  misc_RNA (1)...(19): siRNA sense strand
ggagugacgcccuuagaag

SEQ ID NO: 1226288 - RNA, 19 nt, Homo sapiens
  misc_RNA (1)...(19): siRNA sense strand
gggagugacgcccuuagaa

SEQ ID NO: 1226289 - RNA, 19 nt, Homo sapiens
  misc_RNA (1)...(19): siRNA sense strand
gauuucagcauccuccauu

SEQ ID NO: 1226290 - RNA, 19 nt, Homo sapiens
  misc_RNA (1)...(19): siRNA sense strand
auaugcugcugaaagaaua

SEQ ID NO: 1226291 - RNA, 19 nt, Homo sapiens
  misc_RNA (1)...(19): siRNA sense strand
gcaguauccuuagcauugg

SEQ ID NO: 1226292 - RNA, 19 nt, Homo sapiens
  misc_RNA (1)...(19): siRNA sense strand
gggcauuugagaagacuuu

SEQ ID NO: 1226293 - RNA, 19 nt, Homo sapiens
  misc_RNA (1)...(19): siRNA sense strand
gggcagcaaucugucaauc

SEQ ID NO: 1226294 - RNA, 19 nt, Homo sapiens
  misc_RNA (1)...(19): siRNA sense strand
uugcggaaauguuaagaga

SEQ ID NO: 1226295 - RNA, 19 nt, Homo sapiens
  misc_RNA (1)...(19): siRNA sense strand
gcauuugagaagacuuuaa

SEQ ID NO: 1226296 - RNA, 19 nt, Homo sapiens
  misc_RNA (1)...(19): siRNA sense strand
gagaacuguguuuaugaaa

SEQ ID NO: 1226297 - RNA, 19 nt, Homo sapiens
  misc_RNA (1)...(19): siRNA sense strand
uaccauuacuguagaccaa

SEQ ID NO: 1226298 - RNA, 19 nt, Homo sapiens
  misc_RNA (1)...(19): siRNA sense strand
gcccuuagaaguggauuaa

SEQ ID NO: 1226299 - RNA, 19 nt, Homo sapiens
  misc_RNA (1)...(19): siRNA sense strand
gaggugggcagcaaucugu

SEQ ID NO: 1226300 - RNA, 19 nt, Homo sapiens
  misc_RNA (1)...(19): siRNA sense strand
ggacaguaaugagcacaac

SEQ ID NO: 1226301 - RNA, 19 nt, Homo sapiens
  misc_RNA (1)...(19): siRNA sense strand
ggaaggggacuaccaaaga

SEQ ID NO: 1226302 - RNA, 19 nt, Homo sapiens
  misc_RNA (1)...(19): siRNA sense strand
ccaugagcuuguauaugaa

SEQ ID NO: 1226303 - RNA, 19 nt, Homo sapiens
  misc_RNA (1)...(19): siRNA sense strand
agauugauaugcugcugaa

SEQ ID NO: 1226304 - RNA, 19 nt, Homo sapiens
  misc_RNA (1)...(19): siRNA sense strand
uggagauacuaaugaaguu

SEQ ID NO: 1226305 - RNA, 19 nt, Homo sapiens
  misc_RNA (1)...(19): siRNA sense strand
gaccaggagaacuguguuu

SEQ ID NO: 1226306 - RNA, 19 nt, Homo sapiens
  misc_RNA (1)...(19): siRNA sense strand
ggaaguaccucauuuucac

SEQ ID NO: 1226307 - RNA, 19 nt, Homo sapiens
  misc_RNA (1)...(19): siRNA sense strand
gcugaacauugccuuaagg

SEQ ID NO: 1226308 - RNA, 19 nt, Homo sapiens
  misc_RNA (1)...(19): siRNA sense strand
gaaagcguaaagauagugu

SEQ ID NO: 1226309 - RNA, 19 nt, Homo sapiens
  misc_RNA (1)...(19): siRNA sense strand
uguuggagauggaauuuua

SEQ ID NO: 1226310 - RNA, 19 nt, Homo sapiens
  misc_RNA (1)...(19): siRNA sense strand
agaucuaccugaauuagca

SEQ ID NO: 1226311 - RNA, 19 nt, Homo sapiens
  misc_RNA (1)...(19): siRNA sense strand
uuaagugacucucucuuuu

SEQ ID NO: 1226312 - RNA, 19 nt, Homo sapiens
  misc_RNA (1)...(19): siRNA sense strand
ccaggagaacuguguuuau

SEQ ID NO: 1226313 - RNA, 19 nt, Homo sapiens
  misc_RNA (1)...(19): siRNA sense strand
cuggacagguguaugaugu

SEQ ID NO: 1226314 - RNA, 19 nt, Homo sapiens
  misc_RNA (1)...(19): siRNA sense strand
agagaucuuuguccuucaa

SEQ ID NO: 1226315 - RNA, 19 nt, Homo sapiens
  misc_RNA (1)...(19): siRNA sense strand
ugaaauuccggacauuaau

SEQ ID NO: 1226316 - RNA, 19 nt, Homo sapiens
  misc_RNA (1)...(19): siRNA sense strand
ggagauacuaaugaaguug

SEQ ID NO: 1226317 - RNA, 19 nt, Homo sapiens
  misc_RNA (1)...(19): siRNA sense strand
cauuaacgaagcuagaauu

SEQ ID NO: 1226318 - RNA, 19 nt, Homo sapiens
  misc_RNA (1)...(19): siRNA sense strand
cuggagaaaguacauuuaa

SEQ ID NO: 1226319 - RNA, 19 nt, Homo sapiens
  misc_RNA (1)...(19): siRNA sense strand
ucaccuuguuaaagagauu

SEQ ID NO: 1226320 - RNA, 19 nt, Homo sapiens
  misc_RNA (1)...(19): siRNA sense strand
cuuaagugacucucucuuu

SEQ ID NO: 1226321 - RNA, 19 nt, Homo sapiens
  misc_RNA (1)...(19): siRNA sense strand
gagugacgcccuuagaagu

SEQ ID NO: 1226322 - RNA, 19 nt, Homo sapiens
  misc_RNA (1)...(19): siRNA sense strand
ccuuagaaguggauuaacu

SEQ ID NO: 1226323 - RNA, 19 nt, Homo sapiens
  misc_RNA (1)...(19): siRNA sense strand
gaaaucagcccacuguuua

SEQ ID NO: 1226324 - RNA, 19 nt, Homo sapiens
  misc_RNA (1)...(19): siRNA sense strand
gaucaaagguccaucauca

SEQ ID NO: 1226325 - RNA, 19 nt, Homo sapiens
  misc_RNA (1)...(19): siRNA sense strand
ccucaaggcuuuaauguuu

SEQ ID NO: 1226326 - RNA, 19 nt, Homo sapiens
  misc_RNA (1)...(19): siRNA sense strand
caacaaacucccagauuua

SEQ ID NO: 1226327 - RNA, 19 nt, Homo sapiens
  misc_RNA (1)...(19): siRNA sense strand
gaacaugucugggcaagug

SEQ ID NO: 1226328 - RNA, 19 nt, Homo sapiens
  misc_RNA (1)...(19): siRNA sense strand
ucaacaaacucccagauuu

SEQ ID NO: 1226329 - RNA, 19 nt, Homo sapiens
  misc_RNA (1)...(19): siRNA sense strand
aaagagaacuugagauuca

SEQ ID NO: 1226330 - RNA, 19 nt, Homo sapiens
  misc_RNA (1)...(19): siRNA sense strand
gagcauggguccugccuuu

SEQ ID NO: 1226331 - RNA, 19 nt, Homo sapiens
  misc_RNA (1)...(19): siRNA sense strand
ccagauaccuucccuugaa

SEQ ID NO: 1226332 - RNA, 19 nt, Homo sapiens
  misc_RNA (1)...(19): siRNA sense strand
ugaaguaccugaaguuguu

SEQ ID NO: 1226333 - RNA, 19 nt, Homo sapiens
  misc_RNA (1)...(19): siRNA sense strand
guaauacuccuacaucuuu

SEQ ID NO: 1226334 - RNA, 19 nt, Homo sapiens
  misc_RNA (1)...(19): siRNA sense strand
caaggaagccaccaaauug

SEQ ID NO: 1226335 - RNA, 19 nt, Homo sapiens
  misc_RNA (1)...(19): siRNA sense strand
ccaaucaguucaccuacua

SEQ ID NO: 1226336 - RNA, 19 nt, Homo sapiens
  misc_RNA (1)...(19): siRNA sense strand
gcugagaaguuguaauaga

SEQ ID NO: 1226337 - RNA, 19 nt, Homo sapiens
  misc_RNA (1)...(19): siRNA sense strand
gcacauguggauagaauaa

SEQ ID NO: 1226338 - RNA, 19 nt, Homo sapiens
  misc_RNA (1)...(19): siRNA sense strand
ggaaguaggaugaauggaa

SEQ ID NO: 1226339 - RNA, 19 nt, Homo sapiens
  misc_RNA (1)...(19): siRNA sense strand
cagcugagaaguuguaaua

SEQ ID NO: 1226340 - RNA, 19 nt, Homo sapiens
  misc_RNA (1)...(19): siRNA sense strand
ggaacgacuucaaagagaa

SEQ ID NO: 1226341 - RNA, 19 nt, Homo sapiens
  misc_RNA (1)...(19): siRNA sense strand
ucacauaccucaucucaac

SEQ ID NO: 1226342 - RNA, 19 nt, Homo sapiens
  misc_RNA (1)...(19): siRNA sense strand
ggagcucaguggaauugua

SEQ ID NO: 1226343 - RNA, 19 nt, Homo sapiens
  misc_RNA (1)...(19): siRNA sense strand
gcaaucacaugacuucucu

SEQ ID NO: 1226344 - RNA, 19 nt, Homo sapiens
  misc_RNA (1)...(19): siRNA sense strand
gaacaucuagccuuucuca

SEQ ID NO: 1226345 - RNA, 19 nt, Homo sapiens
  misc_RNA (1)...(19): siRNA sense strand
caagguggccaguccaaua

SEQ ID NO: 1226346 - RNA, 19 nt, Homo sapiens
  misc_RNA (1)...(19): siRNA sense strand
gaacaggucaugcggaauc

SEQ ID NO: 1226347 - RNA, 19 nt, Homo sapiens
  misc_RNA (1)...(19): siRNA sense strand
ccaaggaagccaccaaauu

SEQ ID NO: 1226348 - RNA, 19 nt, Homo sapiens
  misc_RNA (1)...(19): siRNA sense strand
ucaaguuccucaaggcuuu

SEQ ID NO: 1226349 - RNA, 19 nt, Homo sapiens
  misc_RNA (1)...(19): siRNA sense strand
gauugacauugacugcuua

SEQ ID NO: 1226350 - RNA, 19 nt, Homo sapiens
  misc_RNA (1)...(19): siRNA sense strand
gagcugaugucccguaguc

SEQ ID NO: 1226351 - RNA, 19 nt, Homo sapiens
  misc_RNA (1)...(19): siRNA sense strand
cagggaaauucuaucuaua

SEQ ID NO: 1226352 - RNA, 19 nt, Homo sapiens
  misc_RNA (1)...(19): siRNA sense strand
ugacuucucucaacuugga

SEQ ID NO: 1226353 - RNA, 19 nt, Homo sapiens
  misc_RNA (1)...(19): siRNA sense strand
acagggaaauucuaucuau

SEQ ID NO: 1226354 - RNA, 19 nt, Homo sapiens
  misc_RNA (1)...(19): siRNA sense strand
gaaggaaguaggaugaaug

SEQ ID NO: 1226355 - RNA, 19 nt, Homo sapiens
  misc_RNA (1)...(19): siRNA sense strand
auagacaacuccagauuga

SEQ ID NO: 1226356 - RNA, 19 nt, Homo sapiens
  misc_RNA (1)...(19): siRNA sense strand
guagaaaccgagaauauuc

SEQ ID NO: 1226357 - RNA, 19 nt, Homo sapiens
  misc_RNA (1)...(19): siRNA sense strand
ggaaucagcccacacucuu

SEQ ID NO: 1226358 - RNA, 19 nt, Homo sapiens
  misc_RNA (1)...(19): siRNA sense strand
gaaccauccagccuuaauu

SEQ ID NO: 1226359 - RNA, 19 nt, Homo sapiens
  misc_RNA (1)...(19): siRNA sense strand
ucacaugacuucucucaac

SEQ ID NO: 1226360 - RNA, 19 nt, Homo sapiens
  misc_RNA (1)...(19): siRNA sense strand
gaaacacggaaacugagua

SEQ ID NO: 1226361 - RNA, 19 nt, Homo sapiens
  misc_RNA (1)...(19): siRNA sense strand
cuacuuguccugcaucuaa

SEQ ID NO: 1226362 - RNA, 19 nt, Homo sapiens
  misc_RNA (1)...(19): siRNA sense strand
gcacagcauuagugaugga

SEQ ID NO: 1226363 - RNA, 19 nt, Homo sapiens
  misc_RNA (1)...(19): siRNA sense strand
gaacauuuaccaccaugga

SEQ ID NO: 1226364 - RNA, 19 nt, Homo sapiens
  misc_RNA (1)...(19): siRNA sense strand
caaauucuauaucccagau

SEQ ID NO: 1226365 - RNA, 19 nt, Homo sapiens
  misc_RNA (1)...(19): siRNA sense strand
gcccauagccaauauaaca

SEQ ID NO: 1226366 - RNA, 19 nt, Homo sapiens
  misc_RNA (1)...(19): siRNA sense strand
caucuagccuuucucaaca

SEQ ID NO: 1226367 - RNA, 19 nt, Homo sapiens
  misc_RNA (1)...(19): siRNA sense strand
ucaaagguccaucaucaaa

SEQ ID NO: 1226368 - RNA, 19 nt, Homo sapiens
  misc_RNA (1)...(19): siRNA sense strand
ucagcccacuguuuacaua

SEQ ID NO: 1226369 - RNA, 19 nt, Homo sapiens
  misc_RNA (1)...(19): siRNA sense strand
ggaagccaccaaauugauu

SEQ ID NO: 1226370 - RNA, 19 nt, Homo sapiens
  misc_RNA (1)...(19): siRNA sense strand
caucuuggauuucacuuag

SEQ ID NO: 1226371 - RNA, 19 nt, Homo sapiens
  misc_RNA (1)...(19): siRNA sense strand
ucacucagcccaauacgaa

SEQ ID NO: 1226372 - RNA, 19 nt, Homo sapiens
  misc_RNA (1)...(19): siRNA sense strand
gucaauagccagaccuuaa

SEQ ID NO: 1226373 - RNA, 19 nt, Homo sapiens
  misc_RNA (1)...(19): siRNA sense strand
gacauugacugcuuaacca

SEQ ID NO: 1226374 - RNA, 19 nt, Homo sapiens
  misc_RNA (1)...(19): siRNA sense strand
caugaacccucagcaaguu

SEQ ID NO: 1226375 - RNA, 19 nt, Homo sapiens
  misc_RNA (1)...(19): siRNA sense strand
ccaggugcauguuacagaa

SEQ ID NO: 1226376 - RNA, 19 nt, Homo sapiens
  misc_RNA (1)...(19): siRNA sense strand
guggauagaauaagugaaa

SEQ ID NO: 1226377 - RNA, 19 nt, Homo sapiens
  misc_RNA (1)...(19): siRNA sense strand
uagcacauguggauagaau

SEQ ID NO: 1226378 - RNA, 19 nt, Homo sapiens
  misc_RNA (1)...(19): siRNA sense strand
ccaauacgaaauacacuuu

SEQ ID NO: 1226379 - RNA, 19 nt, Homo sapiens
  misc_RNA (1)...(19): siRNA sense strand
caacuuggacuugcaauca

SEQ ID NO: 1226380 - RNA, 19 nt, Homo sapiens
  misc_RNA (1)...(19): siRNA sense strand
uuacaugaccugcgacaaa

SEQ ID NO: 1226381 - RNA, 19 nt, Homo sapiens
  misc_RNA (1)...(19): siRNA sense strand
agaaaucagcccacuguuu

SEQ ID NO: 1226382 - RNA, 19 nt, Homo sapiens
  misc_RNA (1)...(19): siRNA sense strand
agccagaccuuaaacagaa

SEQ ID NO: 1226383 - RNA, 19 nt, Homo sapiens
  misc_RNA (1)...(19): siRNA sense strand
gaauggaaguaggacucua

SEQ ID NO: 1226384 - RNA, 19 nt, Homo sapiens
  misc_RNA (1)...(19): siRNA sense strand
ccucacggacccuacauua

SEQ ID NO: 1226385 - RNA, 19 nt, Homo sapiens
  misc_RNA (1)...(19): siRNA sense strand
gguccugccuuuauucauc

SEQ ID NO: 1226386 - RNA, 19 nt, Homo sapiens
  misc_RNA (1)...(19): siRNA sense strand
gugaaggagacuugaauuu

SEQ ID NO: 1226387 - RNA, 19 nt, Homo sapiens
  misc_RNA (1)...(19): siRNA sense strand
ccucgaaccuccagcacuu

SEQ ID NO: 1226388 - RNA, 19 nt, Homo sapiens
  misc_RNA (1)...(19): siRNA sense strand
caugacuucucucaacuug

SEQ ID NO: 1226389 - RNA, 19 nt, Homo sapiens
  misc_RNA (1)...(19): siRNA sense strand
ccagaaggccagaauggaa

SEQ ID NO: 1226390 - RNA, 19 nt, Homo sapiens
  misc_RNA (1)...(19): siRNA sense strand
cgacagacacaacagcauu

SEQ ID NO: 1226391 - RNA, 19 nt, Homo sapiens
  misc_RNA (1)...(19): siRNA sense strand
ggaagagaaggaaguagga

SEQ ID NO: 1226392 - RNA, 19 nt, Homo sapiens
  misc_RNA (1)...(19): siRNA sense strand
ugcaaucacagaacauuua

SEQ ID NO: 1226393 - RNA, 19 nt, Homo sapiens
  misc_RNA (1)...(19): siRNA sense strand
uaauagacaacuccagauu

SEQ ID NO: 1226394 - RNA, 19 nt, Homo sapiens
  misc_RNA (1)...(19): siRNA sense strand
uggaacgacuucaaagaga

SEQ ID NO: 1226395 - RNA, 19 nt, Homo sapiens
  misc_RNA (1)...(19): siRNA sense strand
gcauggguccugccuuuau

SEQ ID NO: 1226396 - RNA, 19 nt, Homo sapiens
  misc_RNA (1)...(19): siRNA sense strand
ucaauagccagaccuuaaa

SEQ ID NO: 1226397 - RNA, 19 nt, Homo sapiens
  misc_RNA (1)...(19): siRNA sense strand
caucuaauccucugucaca

SEQ ID NO: 1226398 - RNA, 19 nt, Homo sapiens
  misc_RNA (1)...(19): siRNA sense strand
cacaaacucuggagcaucu

SEQ ID NO: 1226399 - RNA, 19 nt, Homo sapiens
  misc_RNA (1)...(19): siRNA sense strand
ggucuacgcaaucacauga

SEQ ID NO: 1226400 - RNA, 19 nt, Homo sapiens
  misc_RNA (1)...(19): siRNA sense strand
gccaauauaacauucagaa

SEQ ID NO: 1226401 - RNA, 19 nt, Homo sapiens
  misc_RNA (1)...(19): siRNA sense strand
caccacaucuuggauuuca

SEQ ID NO: 1226402 - RNA, 19 nt, Homo sapiens
  misc_RNA (1)...(19): siRNA sense strand
cauggguccugccuuuauu

SEQ ID NO: 1226403 - RNA, 19 nt, Homo sapiens
  misc_RNA (1)...(19): siRNA sense strand
ggcuggguaucucaguuua

SEQ ID NO: 1226404 - RNA, 19 nt, Homo sapiens
  misc_RNA (1)...(19): siRNA sense strand
uaacgcacagcauuaguga

SEQ ID NO: 1226405 - RNA, 19 nt, Homo sapiens
  misc_RNA (1)...(19): siRNA sense strand
uuugaaccauccagccuua

SEQ ID NO: 1226406 - RNA, 19 nt, Homo sapiens
  misc_RNA (1)...(19): siRNA sense strand
caaagacucaagacacaga

SEQ ID NO: 1226407 - RNA, 19 nt, Homo sapiens
  misc_RNA (1)...(19): siRNA sense strand
gcugugcuguucucucuca

SEQ ID NO: 1226408 - RNA, 19 nt, Homo sapiens
  misc_RNA (1)...(19): siRNA sense strand
cuacaucuuugcacauaca

SEQ ID NO: 1226409 - RNA, 19 nt, Homo sapiens
  misc_RNA (1)...(19): siRNA sense strand
ucaggagaguacaagauau

SEQ ID NO: 1226410 - RNA, 19 nt, Homo sapiens
  misc_RNA (1)...(19): siRNA sense strand
ccagcgcuauucauaacuu

SEQ ID NO: 1226411 - RNA, 19 nt, Homo sapiens
  misc_RNA (1)...(19): siRNA sense strand
cugcuuaaccaaagaaauu

SEQ ID NO: 1226412 - RNA, 19 nt, Homo sapiens
  misc_RNA (1)...(19): siRNA sense strand
caccaaccauucauucauc

SEQ ID NO: 1226413 - RNA, 19 nt, Homo sapiens
  misc_RNA (1)...(19): siRNA sense strand
gcaaguuuaucagccuuca

SEQ ID NO: 1226414 - RNA, 19 nt, Homo sapiens
  misc_RNA (1)...(19): siRNA sense strand
uauuaggccuuacauuaca

SEQ ID NO: 1226415 - RNA, 19 nt, Homo sapiens
  misc_RNA (1)...(19): siRNA sense strand
cuaucuauauuaggccuua

SEQ ID NO: 1226416 - RNA, 19 nt, Homo sapiens
  misc_RNA (1)...(19): siRNA sense strand
ucacuuaggcagcaaagga

SEQ ID NO: 1226417 - RNA, 19 nt, Homo sapiens
  misc_RNA (1)...(19): siRNA sense strand
cagcauuagugauggacaa

SEQ ID NO: 1226418 - RNA, 19 nt, Homo sapiens
  misc_RNA (1)...(19): siRNA sense strand
ggugcauguuacagaauaa

SEQ ID NO: 1226419 - RNA, 19 nt, Homo sapiens
  misc_RNA (1)...(19): siRNA sense strand
ugagguuaaugaaauggaa

SEQ ID NO: 1226420 - RNA, 19 nt, Homo sapiens
  misc_RNA (1)...(19): siRNA sense strand
ucugguagcucacagucuu

SEQ ID NO: 1226421 - RNA, 19 nt, Homo sapiens
  misc_RNA (1)...(19): siRNA sense strand
cuaauccucugucacauac

SEQ ID NO: 1226422 - RNA, 19 nt, Homo sapiens
  misc_RNA (1)...(19): siRNA sense strand
gaauggaacgacuucaaag

SEQ ID NO: 1226423 - RNA, 19 nt, Homo sapiens
  misc_RNA (1)...(19): siRNA sense strand
gaaaucagcccacuguuua

SEQ ID NO: 1226424 - RNA, 19 nt, Homo sapiens
  misc_RNA (1)...(19): siRNA sense strand
ccucaaggcuuuaauguuu

SEQ ID NO: 1226425 - RNA, 19 nt, Homo sapiens
  misc_RNA (1)...(19): siRNA sense strand
caacaaacucccagauuua

SEQ ID NO: 1226426 - RNA, 19 nt, Homo sapiens
  misc_RNA (1)...(19): siRNA sense strand
gaacaugucugggcaagug

SEQ ID NO: 1226427 - RNA, 19 nt, Homo sapiens
  misc_RNA (1)...(19): siRNA sense strand
ucaacaaacucccagauuu

SEQ ID NO: 1226428 - RNA, 19 nt, Homo sapiens
  misc_RNA (1)...(19): siRNA sense strand
gagcauggguccugccuuu

SEQ ID NO: 1226429 - RNA, 19 nt, Homo sapiens
  misc_RNA (1)...(19): siRNA sense strand
ugaaguaccugaaguuguu

SEQ ID NO: 1226430 - RNA, 19 nt, Homo sapiens
  misc_RNA (1)...(19): siRNA sense strand
guaauacuccuacaucuuu

SEQ ID NO: 1226431 - RNA, 19 nt, Homo sapiens
  misc_RNA (1)...(19): siRNA sense strand
caaggaagccaccaaauug

SEQ ID NO: 1226432 - RNA, 19 nt, Homo sapiens
  misc_RNA (1)...(19): siRNA sense strand
ccaaucaguucaccuacua

SEQ ID NO: 1226433 - RNA, 19 nt, Homo sapiens
  misc_RNA (1)...(19): siRNA sense strand
gcacauguggauagaauaa

SEQ ID NO: 1226434 - RNA, 19 nt, Homo sapiens
  misc_RNA (1)...(19): siRNA sense strand
ggaaguaggaugaauggaa

SEQ ID NO: 1226435 - RNA, 19 nt, Homo sapiens
  misc_RNA (1)...(19): siRNA sense strand
ucacauaccucaucucaac

SEQ ID NO: 1226436 - RNA, 19 nt, Homo sapiens
  misc_RNA (1)...(19): siRNA sense strand
gcaaucacaugacuucucu

SEQ ID NO: 1226437 - RNA, 19 nt, Homo sapiens
  misc_RNA (1)...(19): siRNA sense strand
gaacaucuagccuuucuca

SEQ ID NO: 1226438 - RNA, 19 nt, Homo sapiens
  misc_RNA (1)...(19): siRNA sense strand
caagguggccaguccaaua

SEQ ID NO: 1226439 - RNA, 19 nt, Homo sapiens
  misc_RNA (1)...(19): siRNA sense strand
gaacaggucaugcggaauc

SEQ ID NO: 1226440 - RNA, 19 nt, Homo sapiens
  misc_RNA (1)...(19): siRNA sense strand
ccaaggaagccaccaaauu

SEQ ID NO: 1226441 - RNA, 19 nt, Homo sapiens
  misc_RNA (1)...(19): siRNA sense strand
ucaaguuccucaaggcuuu

SEQ ID NO: 1226442 - RNA, 19 nt, Homo sapiens
  misc_RNA (1)...(19): siRNA sense strand
gagcugaugucccguaguc

SEQ ID NO: 1226443 - RNA, 19 nt, Homo sapiens
  misc_RNA (1)...(19): siRNA sense strand
cagggaaauucuaucuaua

SEQ ID NO: 1226444 - RNA, 19 nt, Homo sapiens
  misc_RNA (1)...(19): siRNA sense strand
ugacuucucucaacuugga

SEQ ID NO: 1226445 - RNA, 19 nt, Homo sapiens
  misc_RNA (1)...(19): siRNA sense strand
acagggaaauucuaucuau

SEQ ID NO: 1226446 - RNA, 19 nt, Homo sapiens
  misc_RNA (1)...(19): siRNA sense strand
gaaggaaguaggaugaaug

SEQ ID NO: 1226447 - RNA, 19 nt, Homo sapiens
  misc_RNA (1)...(19): siRNA sense strand
guagaaaccgagaauauuc

SEQ ID NO: 1226448 - RNA, 19 nt, Homo sapiens
  misc_RNA (1)...(19): siRNA sense strand
ggaaucagcccacacucuu

SEQ ID NO: 1226449 - RNA, 19 nt, Homo sapiens
  misc_RNA (1)...(19): siRNA sense strand
ucacaugacuucucucaac

SEQ ID NO: 1226450 - RNA, 19 nt, Homo sapiens
  misc_RNA (1)...(19): siRNA sense strand
gaaacacggaaacugagua

SEQ ID NO: 1226451 - RNA, 19 nt, Homo sapiens
  misc_RNA (1)...(19): siRNA sense strand
cuacuuguccugcaucuaa

SEQ ID NO: 1226452 - RNA, 19 nt, Homo sapiens
  misc_RNA (1)...(19): siRNA sense strand
gcacagcauuagugaugga

SEQ ID NO: 1226453 - RNA, 19 nt, Homo sapiens
  misc_RNA (1)...(19): siRNA sense strand
gaacauuuaccaccaugga

SEQ ID NO: 1226454 - RNA, 19 nt, Homo sapiens
  misc_RNA (1)...(19): siRNA sense strand
gcccauagccaauauaaca

SEQ ID NO: 1226455 - RNA, 19 nt, Homo sapiens
  misc_RNA (1)...(19): siRNA sense strand
caucuagccuuucucaaca

SEQ ID NO: 1226456 - RNA, 19 nt, Homo sapiens
  misc_RNA (1)...(19): siRNA sense strand
ucagcccacuguuuacaua

SEQ ID NO: 1226457 - RNA, 19 nt, Homo sapiens
  misc_RNA (1)...(19): siRNA sense strand
ggaagccaccaaauugauu

SEQ ID NO: 1226458 - RNA, 19 nt, Homo sapiens
  misc_RNA (1)...(19): siRNA sense strand
caucuuggauuucacuuag

SEQ ID NO: 1226459 - RNA, 19 nt, Homo sapiens
  misc_RNA (1)...(19): siRNA sense strand
ucacucagcccaauacgaa

SEQ ID NO: 1226460 - RNA, 19 nt, Homo sapiens
  misc_RNA (1)...(19): siRNA sense strand
gucaauagccagaccuuaa

SEQ ID NO: 1226461 - RNA, 19 nt, Homo sapiens
  misc_RNA (1)...(19): siRNA sense strand
caugaacccucagcaaguu

SEQ ID NO: 1226462 - RNA, 19 nt, Homo sapiens
  misc_RNA (1)...(19): siRNA sense strand
guggauagaauaagugaaa

SEQ ID NO: 1226463 - RNA, 19 nt, Homo sapiens
  misc_RNA (1)...(19): siRNA sense strand
uagcacauguggauagaau

SEQ ID NO: 1226464 - RNA, 19 nt, Homo sapiens
  misc_RNA (1)...(19): siRNA sense strand
ccaauacgaaauacacuuu

SEQ ID NO: 1226465 - RNA, 19 nt, Homo sapiens
  misc_RNA (1)...(19): siRNA sense strand
ccaggugcauguuacagaa

SEQ ID NO: 1226466 - RNA, 19 nt, Homo sapiens
  misc_RNA (1)...(19): siRNA sense strand
caacuuggacuugcaauca

SEQ ID NO: 1226467 - RNA, 19 nt, Homo sapiens
  misc_RNA (1)...(19): siRNA sense strand
agaaaucagcccacuguuu

SEQ ID NO: 1226468 - RNA, 19 nt, Homo sapiens
  misc_RNA (1)...(19): siRNA sense strand
agccagaccuuaaacagaa

SEQ ID NO: 1226469 - RNA, 19 nt, Homo sapiens
  misc_RNA (1)...(19): siRNA sense strand
uuacaugaccugcgacaaa

SEQ ID NO: 1226470 - RNA, 19 nt, Homo sapiens
  misc_RNA (1)...(19): siRNA sense strand
gugaaggagacuugaauuu

SEQ ID NO: 1226471 - RNA, 19 nt, Homo sapiens
  misc_RNA (1)...(19): siRNA sense strand
ccucacggacccuacauua

SEQ ID NO: 1226472 - RNA, 19 nt, Homo sapiens
  misc_RNA (1)...(19): siRNA sense strand
gguccugccuuuauucauc

SEQ ID NO: 1226473 - RNA, 19 nt, Homo sapiens
  misc_RNA (1)...(19): siRNA sense strand
gaauggaaguaggacucua

SEQ ID NO: 1226474 - RNA, 19 nt, Homo sapiens
  misc_RNA (1)...(19): siRNA sense strand
ccucgaaccuccagcacuu

SEQ ID NO: 1226475 - RNA, 19 nt, Homo sapiens
  misc_RNA (1)...(19): siRNA sense strand
caugacuucucucaacuug

SEQ ID NO: 1226476 - RNA, 19 nt, Homo sapiens
  misc_RNA (1)...(19): siRNA sense strand
cgacagacacaacagcauu

SEQ ID NO: 1226477 - RNA, 19 nt, Homo sapiens
  misc_RNA (1)...(19): siRNA sense strand
ggaagagaaggaaguagga

SEQ ID NO: 1226478 - RNA, 19 nt, Homo sapiens
  misc_RNA (1)...(19): siRNA sense strand
ugcaaucacagaacauuua

SEQ ID NO: 1226479 - RNA, 19 nt, Homo sapiens
  misc_RNA (1)...(19): siRNA sense strand
gcauggguccugccuuuau

SEQ ID NO: 1226480 - RNA, 19 nt, Homo sapiens
  misc_RNA (1)...(19): siRNA sense strand
ucaauagccagaccuuaaa

SEQ ID NO: 1226481 - RNA, 19 nt, Homo sapiens
  misc_RNA (1)...(19): siRNA sense strand
ggucuacgcaaucacauga

SEQ ID NO: 1226482 - RNA, 19 nt, Homo sapiens
  misc_RNA (1)...(19): siRNA sense strand
cacaaacucuggagcaucu

SEQ ID NO: 1226483 - RNA, 19 nt, Homo sapiens
  misc_RNA (1)...(19): siRNA sense strand
gccaauauaacauucagaa

SEQ ID NO: 1226484 - RNA, 19 nt, Homo sapiens
  misc_RNA (1)...(19): siRNA sense strand
caucuaauccucugucaca

SEQ ID NO: 1226485 - RNA, 19 nt, Homo sapiens
  misc_RNA (1)...(19): siRNA sense strand
caccacaucuuggauuuca

SEQ ID NO: 1226486 - RNA, 19 nt, Homo sapiens
  misc_RNA (1)...(19): siRNA sense strand
cauggguccugccuuuauu

SEQ ID NO: 1226487 - RNA, 19 nt, Homo sapiens
  misc_RNA (1)...(19): siRNA sense strand
ggcuggguaucucaguuua

SEQ ID NO: 1226488 - RNA, 19 nt, Homo sapiens
  misc_RNA (1)...(19): siRNA sense strand
uaacgcacagcauuaguga

SEQ ID NO: 1226489 - RNA, 19 nt, Homo sapiens
  misc_RNA (1)...(19): siRNA sense strand
gcugugcuguucucucuca

SEQ ID NO: 1226490 - RNA, 19 nt, Homo sapiens
  misc_RNA (1)...(19): siRNA sense strand
cuacaucuuugcacauaca

SEQ ID NO: 1226491 - RNA, 19 nt, Homo sapiens
  misc_RNA (1)...(19): siRNA sense strand
ucaggagaguacaagauau

SEQ ID NO: 1226492 - RNA, 19 nt, Homo sapiens
  misc_RNA (1)...(19): siRNA sense strand
caccaaccauucauucauc

SEQ ID NO: 1226493 - RNA, 19 nt, Homo sapiens
  misc_RNA (1)...(19): siRNA sense strand
gcaaguuuaucagccuuca

SEQ ID NO: 1226494 - RNA, 19 nt, Homo sapiens
  misc_RNA (1)...(19): siRNA sense strand
uauuaggccuuacauuaca

SEQ ID NO: 1226495 - RNA, 19 nt, Homo sapiens
  misc_RNA (1)...(19): siRNA sense strand
cuaucuauauuaggccuua

SEQ ID NO: 1226496 - RNA, 19 nt, Homo sapiens
  misc_RNA (1)...(19): siRNA sense strand
ucacuuaggcagcaaagga

SEQ ID NO: 1226497 - RNA, 19 nt, Homo sapiens
  misc_RNA (1)...(19): siRNA sense strand
cagcauuagugauggacaa

SEQ ID NO: 1226498 - RNA, 19 nt, Homo sapiens
  misc_RNA (1)...(19): siRNA sense strand
ggugcauguuacagaauaa

SEQ ID NO: 1226499 - RNA, 19 nt, Homo sapiens
  misc_RNA (1)...(19): siRNA sense strand
ucugguagcucacagucuu

SEQ ID NO: 1226500 - RNA, 19 nt, Homo sapiens
  misc_RNA (1)...(19): siRNA sense strand
cuaauccucugucacauac

SEQ ID NO: 1226501 - RNA, 19 nt, Homo sapiens
  misc_RNA (1)...(19): siRNA sense strand
cauuagugauggacaacuu

SEQ ID NO: 1226502 - RNA, 19 nt, Homo sapiens
  misc_RNA (1)...(19): siRNA sense strand
auuacagucucucccaaua

SEQ ID NO: 1226503 - RNA, 19 nt, Homo sapiens
  misc_RNA (1)...(19): siRNA sense strand
ucacaaccaccaaccauuc

SEQ ID NO: 1226504 - RNA, 19 nt, Homo sapiens
  misc_RNA (1)...(19): siRNA sense strand
gacagcaccagcucaaguu

SEQ ID NO: 1226505 - RNA, 19 nt, Homo sapiens
  misc_RNA (1)...(19): siRNA sense strand
gacccuacauuagcacaug

SEQ ID NO: 1226506 - RNA, 19 nt, Homo sapiens
  misc_RNA (1)...(19): siRNA sense strand
gguagucacucagcccaau

SEQ ID NO: 1226507 - RNA, 19 nt, Homo sapiens
  misc_RNA (1)...(19): siRNA sense strand
caucucaacagccaaauca

SEQ ID NO: 1226508 - RNA, 19 nt, Homo sapiens
  misc_RNA (1)...(19): siRNA sense strand
ucaguucaccuacuacuuc

SEQ ID NO: 1226509 - RNA, 19 nt, Homo sapiens
  misc_RNA (1)...(19): siRNA sense strand
gaaacugaguaugggaucu

SEQ ID NO: 1226510 - RNA, 19 nt, Homo sapiens
  misc_RNA (1)...(19): siRNA sense strand
agagaaggaaguaggauga

SEQ ID NO: 1226511 - RNA, 19 nt, Homo sapiens
  misc_RNA (1)...(19): siRNA sense strand
cauagccaauauaacauuc

SEQ ID NO: 1226512 - RNA, 19 nt, Homo sapiens
  misc_RNA (1)...(19): siRNA sense strand
caaccaccaaccauucauu

SEQ ID NO: 1226513 - RNA, 19 nt, Homo sapiens
  misc_RNA (1)...(19): siRNA sense strand
uaauacuccuacaucuuug

SEQ ID NO: 1226514 - RNA, 19 nt, Homo sapiens
  misc_RNA (1)...(19): siRNA sense strand
guacaacucgacagacaca

SEQ ID NO: 1226515 - RNA, 19 nt, Homo sapiens
  misc_RNA (1)...(19): siRNA sense strand
gccagaccuuaaacagaaa

SEQ ID NO: 1226516 - RNA, 19 nt, Homo sapiens
  misc_RNA (1)...(19): siRNA sense strand
ucuaauccucugucacaua

SEQ ID NO: 1226517 - RNA, 19 nt, Homo sapiens
  misc_RNA (1)...(19): siRNA sense strand
ggugaaggagacuugaauu

SEQ ID NO: 1226518 - RNA, 19 nt, Homo sapiens
  misc_RNA (1)...(19): siRNA sense strand
acucuaacgcacagcauua

SEQ ID NO: 1226519 - RNA, 19 nt, Homo sapiens
  misc_RNA (1)...(19): siRNA sense strand
uguagaaaccgagaauauu

SEQ ID NO: 1226520 - RNA, 19 nt, Homo sapiens
  misc_RNA (1)...(19): siRNA sense strand
ccauagccaauauaacauu

SEQ ID NO: 1226521 - RNA, 19 nt, Homo sapiens
  misc_RNA (1)...(19): siRNA sense strand
ucacagucuucugcccaua

SEQ ID NO: 1226522 - RNA, 19 nt, Homo sapiens
  misc_RNA (1)...(19): siRNA sense strand
uacagucucucccaauaag

SEQ ID NO: 1226523 - RNA, 19 nt, Homo sapiens
  misc_RNA (1)...(19): siRNA sense strand
gaaaucagcccacuguuua

SEQ ID NO: 1226524 - RNA, 19 nt, Homo sapiens
  misc_RNA (1)...(19): siRNA sense strand
gaucaaagguccaucauca

SEQ ID NO: 1226525 - RNA, 19 nt, Homo sapiens
  misc_RNA (1)...(19): siRNA sense strand
ccucaaggcuuuaauguuu

SEQ ID NO: 1226526 - RNA, 19 nt, Homo sapiens
  misc_RNA (1)...(19): siRNA sense strand
caacaaacucccagauuua

SEQ ID NO: 1226527 - RNA, 19 nt, Homo sapiens
  misc_RNA (1)...(19): siRNA sense strand
gaacaugucugggcaagug

SEQ ID NO: 1226528 - RNA, 19 nt, Homo sapiens
  misc_RNA (1)...(19): siRNA sense strand
ucaacaaacucccagauuu

SEQ ID NO: 1226529 - RNA, 19 nt, Homo sapiens
  misc_RNA (1)...(19): siRNA sense strand
aaagagaacuugagauuca

SEQ ID NO: 1226530 - RNA, 19 nt, Homo sapiens
  misc_RNA (1)...(19): siRNA sense strand
gagcauggguccugccuuu

SEQ ID NO: 1226531 - RNA, 19 nt, Homo sapiens
  misc_RNA (1)...(19): siRNA sense strand
ccagauaccuucccuugaa

SEQ ID NO: 1226532 - RNA, 19 nt, Homo sapiens
  misc_RNA (1)...(19): siRNA sense strand
ugaaguaccugaaguuguu

SEQ ID NO: 1226533 - RNA, 19 nt, Homo sapiens
  misc_RNA (1)...(19): siRNA sense strand
guaauacuccuacaucuuu

SEQ ID NO: 1226534 - RNA, 19 nt, Homo sapiens
  misc_RNA (1)...(19): siRNA sense strand
caaggaagccaccaaauug

SEQ ID NO: 1226535 - RNA, 19 nt, Homo sapiens
  misc_RNA (1)...(19): siRNA sense strand
ccaaucaguucaccuacua

SEQ ID NO: 1226536 - RNA, 19 nt, Homo sapiens
  misc_RNA (1)...(19): siRNA sense strand
gcugagaaguuguaauaga

SEQ ID NO: 1226537 - RNA, 19 nt, Homo sapiens
  misc_RNA (1)...(19): siRNA sense strand
gcacauguggauagaauaa

SEQ ID NO: 1226538 - RNA, 19 nt, Homo sapiens
  misc_RNA (1)...(19): siRNA sense strand
ggaaguaggaugaauggaa

SEQ ID NO: 1226539 - RNA, 19 nt, Homo sapiens
  misc_RNA (1)...(19): siRNA sense strand
cagcugagaaguuguaaua

SEQ ID NO: 1226540 - RNA, 19 nt, Homo sapiens
  misc_RNA (1)...(19): siRNA sense strand
ggaacgacuucaaagagaa

SEQ ID NO: 1226541 - RNA, 19 nt, Homo sapiens
  misc_RNA (1)...(19): siRNA sense strand
ucacauaccucaucucaac

SEQ ID NO: 1226542 - RNA, 19 nt, Homo sapiens
  misc_RNA (1)...(19): siRNA sense strand
ggagcucaguggaauugua

SEQ ID NO: 1226543 - RNA, 19 nt, Homo sapiens
  misc_RNA (1)...(19): siRNA sense strand
gcaaucacaugacuucucu

SEQ ID NO: 1226544 - RNA, 19 nt, Homo sapiens
  misc_RNA (1)...(19): siRNA sense strand
gaacaucuagccuuucuca

SEQ ID NO: 1226545 - RNA, 19 nt, Homo sapiens
  misc_RNA (1)...(19): siRNA sense strand
caagguggccaguccaaua

SEQ ID NO: 1226546 - RNA, 19 nt, Homo sapiens
  misc_RNA (1)...(19): siRNA sense strand
gaacaggucaugcggaauc

SEQ ID NO: 1226547 - RNA, 19 nt, Homo sapiens
  misc_RNA (1)...(19): siRNA sense strand
ccaaggaagccaccaaauu

SEQ ID NO: 1226548 - RNA, 19 nt, Homo sapiens
  misc_RNA (1)...(19): siRNA sense strand
ucaaguuccucaaggcuuu

SEQ ID NO: 1226549 - RNA, 19 nt, Homo sapiens
  misc_RNA (1)...(19): siRNA sense strand
gauugacauugacugcuua

SEQ ID NO: 1226550 - RNA, 19 nt, Homo sapiens
  misc_RNA (1)...(19): siRNA sense strand
gagcugaugucccguaguc

SEQ ID NO: 1226551 - RNA, 19 nt, Homo sapiens
  misc_RNA (1)...(19): siRNA sense strand
cagggaaauucuaucuaua

SEQ ID NO: 1226552 - RNA, 19 nt, Homo sapiens
  misc_RNA (1)...(19): siRNA sense strand
ugacuucucucaacuugga

SEQ ID NO: 1226553 - RNA, 19 nt, Homo sapiens
  misc_RNA (1)...(19): siRNA sense strand
acagggaaauucuaucuau

SEQ ID NO: 1226554 - RNA, 19 nt, Homo sapiens
  misc_RNA (1)...(19): siRNA sense strand
gaaggaaguaggaugaaug

SEQ ID NO: 1226555 - RNA, 19 nt, Homo sapiens
  misc_RNA (1)...(19): siRNA sense strand
auagacaacuccagauuga

SEQ ID NO: 1226556 - RNA, 19 nt, Homo sapiens
  misc_RNA (1)...(19): siRNA sense strand
guagaaaccgagaauauuc

SEQ ID NO: 1226557 - RNA, 19 nt, Homo sapiens
  misc_RNA (1)...(19): siRNA sense strand
ggaaucagcccacacucuu

SEQ ID NO: 1226558 - RNA, 19 nt, Homo sapiens
  misc_RNA (1)...(19): siRNA sense strand
gaaccauccagccuuaauu

SEQ ID NO: 1226559 - RNA, 19 nt, Homo sapiens
  misc_RNA (1)...(19): siRNA sense strand
ucacaugacuucucucaac

SEQ ID NO: 1226560 - RNA, 19 nt, Homo sapiens
  misc_RNA (1)...(19): siRNA sense strand
gaaacacggaaacugagua

SEQ ID NO: 1226561 - RNA, 19 nt, Homo sapiens
  misc_RNA (1)...(19): siRNA sense strand
cuacuuguccugcaucuaa

SEQ ID NO: 1226562 - RNA, 19 nt, Homo sapiens
  misc_RNA (1)...(19): siRNA sense strand
gcacagcauuagugaugga

SEQ ID NO: 1226563 - RNA, 19 nt, Homo sapiens
  misc_RNA (1)...(19): siRNA sense strand
gaacauuuaccaccaugga

SEQ ID NO: 1226564 - RNA, 19 nt, Homo sapiens
  misc_RNA (1)...(19): siRNA sense strand
caaauucuauaucccagau

SEQ ID NO: 1226565 - RNA, 19 nt, Homo sapiens
  misc_RNA (1)...(19): siRNA sense strand
gcccauagccaauauaaca

SEQ ID NO: 1226566 - RNA, 19 nt, Homo sapiens
  misc_RNA (1)...(19): siRNA sense strand
caucuagccuuucucaaca

SEQ ID NO: 1226567 - RNA, 19 nt, Homo sapiens
  misc_RNA (1)...(19): siRNA sense strand
ucaaagguccaucaucaaa

SEQ ID NO: 1226568 - RNA, 19 nt, Homo sapiens
  misc_RNA (1)...(19): siRNA sense strand
ucagcccacuguuuacaua

SEQ ID NO: 1226569 - RNA, 19 nt, Homo sapiens
  misc_RNA (1)...(19): siRNA sense strand
ggaagccaccaaauugauu

SEQ ID NO: 1226570 - RNA, 19 nt, Homo sapiens
  misc_RNA (1)...(19): siRNA sense strand
caucuuggauuucacuuag

SEQ ID NO: 1226571 - RNA, 19 nt, Homo sapiens
  misc_RNA (1)...(19): siRNA sense strand
ucacucagcccaauacgaa

SEQ ID NO: 1226572 - RNA, 19 nt, Homo sapiens
  misc_RNA (1)...(19): siRNA sense strand
gucaauagccagaccuuaa

SEQ ID NO: 1226573 - RNA, 19 nt, Homo sapiens
  misc_RNA (1)...(19): siRNA sense strand
gacauugacugcuuaacca

SEQ ID NO: 1226574 - RNA, 19 nt, Homo sapiens
  misc_RNA (1)...(19): siRNA sense strand
caugaacccucagcaaguu

SEQ ID NO: 1226575 - RNA, 19 nt, Homo sapiens
  misc_RNA (1)...(19): siRNA sense strand
ccaggugcauguuacagaa

SEQ ID NO: 1226576 - RNA, 19 nt, Homo sapiens
  misc_RNA (1)...(19): siRNA sense strand
guggauagaauaagugaaa

SEQ ID NO: 1226577 - RNA, 19 nt, Homo sapiens
  misc_RNA (1)...(19): siRNA sense strand
uagcacauguggauagaau

SEQ ID NO: 1226578 - RNA, 19 nt, Homo sapiens
  misc_RNA (1)...(19): siRNA sense strand
ccaauacgaaauacacuuu

SEQ ID NO: 1226579 - RNA, 19 nt, Homo sapiens
  misc_RNA (1)...(19): siRNA sense strand
caacuuggacuugcaauca

SEQ ID NO: 1226580 - RNA, 19 nt, Homo sapiens
  misc_RNA (1)...(19): siRNA sense strand
uuacaugaccugcgacaaa

SEQ ID NO: 1226581 - RNA, 19 nt, Homo sapiens
  misc_RNA (1)...(19): siRNA sense strand
agaaaucagcccacuguuu

SEQ ID NO: 1226582 - RNA, 19 nt, Homo sapiens
  misc_RNA (1)...(19): siRNA sense strand
agccagaccuuaaacagaa

SEQ ID NO: 1226583 - RNA, 19 nt, Homo sapiens
  misc_RNA (1)...(19): siRNA sense strand
gaauggaaguaggacucua

SEQ ID NO: 1226584 - RNA, 19 nt, Homo sapiens
  misc_RNA (1)...(19): siRNA sense strand
ccucacggacccuacauua

SEQ ID NO: 1226585 - RNA, 19 nt, Homo sapiens
  misc_RNA (1)...(19): siRNA sense strand
gguccugccuuuauucauc

SEQ ID NO: 1226586 - RNA, 19 nt, Homo sapiens
  misc_RNA (1)...(19): siRNA sense strand
gugaaggagacuugaauuu

SEQ ID NO: 1226587 - RNA, 19 nt, Homo sapiens
  misc_RNA (1)...(19): siRNA sense strand
ccucgaaccuccagcacuu

SEQ ID NO: 1226588 - RNA, 19 nt, Homo sapiens
  misc_RNA (1)...(19): siRNA sense strand
caugacuucucucaacuug

SEQ ID NO: 1226589 - RNA, 19 nt, Homo sapiens
  misc_RNA (1)...(19): siRNA sense strand
ccagaaggccagaauggaa

SEQ ID NO: 1226590 - RNA, 19 nt, Homo sapiens
  misc_RNA (1)...(19): siRNA sense strand
cgacagacacaacagcauu

SEQ ID NO: 1226591 - RNA, 19 nt, Homo sapiens
  misc_RNA (1)...(19): siRNA sense strand
ggaagagaaggaaguagga

SEQ ID NO: 1226592 - RNA, 19 nt, Homo sapiens
  misc_RNA (1)...(19): siRNA sense strand
ugcaaucacagaacauuua

SEQ ID NO: 1226593 - RNA, 19 nt, Homo sapiens
  misc_RNA (1)...(19): siRNA sense strand
uaauagacaacuccagauu

SEQ ID NO: 1226594 - RNA, 19 nt, Homo sapiens
  misc_RNA (1)...(19): siRNA sense strand
uggaacgacuucaaagaga

SEQ ID NO: 1226595 - RNA, 19 nt, Homo sapiens
  misc_RNA (1)...(19): siRNA sense strand
gcauggguccugccuuuau

SEQ ID NO: 1226596 - RNA, 19 nt, Homo sapiens
  misc_RNA (1)...(19): siRNA sense strand
ucaauagccagaccuuaaa

SEQ ID NO: 1226597 - RNA, 19 nt, Homo sapiens
  misc_RNA (1)...(19): siRNA sense strand
caucuaauccucugucaca

SEQ ID NO: 1226598 - RNA, 19 nt, Homo sapiens
  misc_RNA (1)...(19): siRNA sense strand
cacaaacucuggagcaucu

SEQ ID NO: 1226599 - RNA, 19 nt, Homo sapiens
  misc_RNA (1)...(19): siRNA sense strand
ggucuacgcaaucacauga

SEQ ID NO: 1226600 - RNA, 19 nt, Homo sapiens
  misc_RNA (1)...(19): siRNA sense strand
gccaauauaacauucagaa

SEQ ID NO: 1226601 - RNA, 19 nt, Homo sapiens
  misc_RNA (1)...(19): siRNA sense strand
caccacaucuuggauuuca

SEQ ID NO: 1226602 - RNA, 19 nt, Homo sapiens
  misc_RNA (1)...(19): siRNA sense strand
cauggguccugccuuuauu

SEQ ID NO: 1226603 - RNA, 19 nt, Homo sapiens
  misc_RNA (1)...(19): siRNA sense strand
ggcuggguaucucaguuua

SEQ ID NO: 1226604 - RNA, 19 nt, Homo sapiens
  misc_RNA (1)...(19): siRNA sense strand
uaacgcacagcauuaguga

SEQ ID NO: 1226605 - RNA, 19 nt, Homo sapiens
  misc_RNA (1)...(19): siRNA sense strand
uuugaaccauccagccuua

SEQ ID NO: 1226606 - RNA, 19 nt, Homo sapiens
  misc_RNA (1)...(19): siRNA sense strand
caaagacucaagacacaga

SEQ ID NO: 1226607 - RNA, 19 nt, Homo sapiens
  misc_RNA (1)...(19): siRNA sense strand
gcugugcuguucucucuca

SEQ ID NO: 1226608 - RNA, 19 nt, Homo sapiens
  misc_RNA (1)...(19): siRNA sense strand
cuacaucuuugcacauaca

SEQ ID NO: 1226609 - RNA, 19 nt, Homo sapiens
  misc_RNA (1)...(19): siRNA sense strand
ucaggagaguacaagauau

SEQ ID NO: 1226610 - RNA, 19 nt, Homo sapiens
  misc_RNA (1)...(19): siRNA sense strand
ccagcgcuauucauaacuu

SEQ ID NO: 1226611 - RNA, 19 nt, Homo sapiens
  misc_RNA (1)...(19): siRNA sense strand
cugcuuaaccaaagaaauu

SEQ ID NO: 1226612 - RNA, 19 nt, Homo sapiens
  misc_RNA (1)...(19): siRNA sense strand
caccaaccauucauucauc

SEQ ID NO: 1226613 - RNA, 19 nt, Homo sapiens
  misc_RNA (1)...(19): siRNA sense strand
gcaaguuuaucagccuuca

SEQ ID NO: 1226614 - RNA, 19 nt, Homo sapiens
  misc_RNA (1)...(19): siRNA sense strand
uauuaggccuuacauuaca

SEQ ID NO: 1226615 - RNA, 19 nt, Homo sapiens
  misc_RNA (1)...(19): siRNA sense strand
cuaucuauauuaggccuua

SEQ ID NO: 1226616 - RNA, 19 nt, Homo sapiens
  misc_RNA (1)...(19): siRNA sense strand
ucacuuaggcagcaaagga

SEQ ID NO: 1226617 - RNA, 19 nt, Homo sapiens
  misc_RNA (1)...(19): siRNA sense strand
cagcauuagugauggacaa

SEQ ID NO: 1226618 - RNA, 19 nt, Homo sapiens
  misc_RNA (1)...(19): siRNA sense strand
ggugcauguuacagaauaa

SEQ ID NO: 1226619 - RNA, 19 nt, Homo sapiens
  misc_RNA (1)...(19): siRNA sense strand
ugagguuaaugaaauggaa

SEQ ID NO: 1226620 - RNA, 19 nt, Homo sapiens
  misc_RNA (1)...(19): siRNA sense strand
ucugguagcucacagucuu

SEQ ID NO: 1226621 - RNA, 19 nt, Homo sapiens
  misc_RNA (1)...(19): siRNA sense strand
cuaauccucugucacauac

SEQ ID NO: 1226622 - RNA, 19 nt, Homo sapiens
  misc_RNA (1)...(19): siRNA sense strand
gaauggaacgacuucaaag

SEQ ID NO: 1226623 - RNA, 19 nt, Homo sapiens
  misc_RNA (1)...(19): siRNA sense strand
gaaaucagcccacuguuua

SEQ ID NO: 1226624 - RNA, 19 nt, Homo sapiens
  misc_RNA (1)...(19): siRNA sense strand
ccucaaggcuuuaauguuu

SEQ ID NO: 1226625 - RNA, 19 nt, Homo sapiens
  misc_RNA (1)...(19): siRNA sense strand
caacaaacucccagauuua

SEQ ID NO: 1226626 - RNA, 19 nt, Homo sapiens
  misc_RNA (1)...(19): siRNA sense strand
gaacaugucugggcaagug

SEQ ID NO: 1226627 - RNA, 19 nt, Homo sapiens
  misc_RNA (1)...(19): siRNA sense strand
ucaacaaacucccagauuu

SEQ ID NO: 1226628 - RNA, 19 nt, Homo sapiens
  misc_RNA (1)...(19): siRNA sense strand
gagcauggguccugccuuu

SEQ ID NO: 1226629 - RNA, 19 nt, Homo sapiens
  misc_RNA (1)...(19): siRNA sense strand
ugaaguaccugaaguuguu

SEQ ID NO: 1226630 - RNA, 19 nt, Homo sapiens
  misc_RNA (1)...(19): siRNA sense strand
guaauacuccuacaucuuu

SEQ ID NO: 1226631 - RNA, 19 nt, Homo sapiens
  misc_RNA (1)...(19): siRNA sense strand
caaggaagccaccaaauug

SEQ ID NO: 1226632 - RNA, 19 nt, Homo sapiens
  misc_RNA (1)...(19): siRNA sense strand
ccaaucaguucaccuacua

SEQ ID NO: 1226633 - RNA, 19 nt, Homo sapiens
  misc_RNA (1)...(19): siRNA sense strand
gcacauguggauagaauaa

SEQ ID NO: 1226634 - RNA, 19 nt, Homo sapiens
  misc_RNA (1)...(19): siRNA sense strand
ggaaguaggaugaauggaa

SEQ ID NO: 1226635 - RNA, 19 nt, Homo sapiens
  misc_RNA (1)...(19): siRNA sense strand
ucacauaccucaucucaac

SEQ ID NO: 1226636 - RNA, 19 nt, Homo sapiens
  misc_RNA (1)...(19): siRNA sense strand
gcaaucacaugacuucucu

SEQ ID NO: 1226637 - RNA, 19 nt, Homo sapiens
  misc_RNA (1)...(19): siRNA sense strand
gaacaucuagccuuucuca

SEQ ID NO: 1226638 - RNA, 19 nt, Homo sapiens
  misc_RNA (1)...(19): siRNA sense strand
caagguggccaguccaaua

SEQ ID NO: 1226639 - RNA, 19 nt, Homo sapiens
  misc_RNA (1)...(19): siRNA sense strand
gaacaggucaugcggaauc

SEQ ID NO: 1226640 - RNA, 19 nt, Homo sapiens
  misc_RNA (1)...(19): siRNA sense strand
ccaaggaagccaccaaauu

SEQ ID NO: 1226641 - RNA, 19 nt, Homo sapiens
  misc_RNA (1)...(19): siRNA sense strand
ucaaguuccucaaggcuuu

SEQ ID NO: 1226642 - RNA, 19 nt, Homo sapiens
  misc_RNA (1)...(19): siRNA sense strand
gagcugaugucccguaguc

SEQ ID NO: 1226643 - RNA, 19 nt, Homo sapiens
  misc_RNA (1)...(19): siRNA sense strand
cagggaaauucuaucuaua

SEQ ID NO: 1226644 - RNA, 19 nt, Homo sapiens
  misc_RNA (1)...(19): siRNA sense strand
ugacuucucucaacuugga

SEQ ID NO: 1226645 - RNA, 19 nt, Homo sapiens
  misc_RNA (1)...(19): siRNA sense strand
acagggaaauucuaucuau

SEQ ID NO: 1226646 - RNA, 19 nt, Homo sapiens
  misc_RNA (1)...(19): siRNA sense strand
gaaggaaguaggaugaaug

SEQ ID NO: 1226647 - RNA, 19 nt, Homo sapiens
  misc_RNA (1)...(19): siRNA sense strand
guagaaaccgagaauauuc

SEQ ID NO: 1226648 - RNA, 19 nt, Homo sapiens
  misc_RNA (1)...(19): siRNA sense strand
ggaaucagcccacacucuu

SEQ ID NO: 1226649 - RNA, 19 nt, Homo sapiens
  misc_RNA (1)...(19): siRNA sense strand
ucacaugacuucucucaac

SEQ ID NO: 1226650 - RNA, 19 nt, Homo sapiens
  misc_RNA (1)...(19): siRNA sense strand
gaaacacggaaacugagua

SEQ ID NO: 1226651 - RNA, 19 nt, Homo sapiens
  misc_RNA (1)...(19): siRNA sense strand
cuacuuguccugcaucuaa

SEQ ID NO: 1226652 - RNA, 19 nt, Homo sapiens
  misc_RNA (1)...(19): siRNA sense strand
gcacagcauuagugaugga

SEQ ID NO: 1226653 - RNA, 19 nt, Homo sapiens
  misc_RNA (1)...(19): siRNA sense strand
gaacauuuaccaccaugga

SEQ ID NO: 1226654 - RNA, 19 nt, Homo sapiens
  misc_RNA (1)...(19): siRNA sense strand
gcccauagccaauauaaca

SEQ ID NO: 1226655 - RNA, 19 nt, Homo sapiens
  misc_RNA (1)...(19): siRNA sense strand
caucuagccuuucucaaca

SEQ ID NO: 1226656 - RNA, 19 nt, Homo sapiens
  misc_RNA (1)...(19): siRNA sense strand
ucagcccacuguuuacaua

SEQ ID NO: 1226657 - RNA, 19 nt, Homo sapiens
  misc_RNA (1)...(19): siRNA sense strand
ggaagccaccaaauugauu

SEQ ID NO: 1226658 - RNA, 19 nt, Homo sapiens
  misc_RNA (1)...(19): siRNA sense strand
caucuuggauuucacuuag

SEQ ID NO: 1226659 - RNA, 19 nt, Homo sapiens
  misc_RNA (1)...(19): siRNA sense strand
ucacucagcccaauacgaa

SEQ ID NO: 1226660 - RNA, 19 nt, Homo sapiens
  misc_RNA (1)...(19): siRNA sense strand
gucaauagccagaccuuaa

SEQ ID NO: 1226661 - RNA, 19 nt, Homo sapiens
  misc_RNA (1)...(19): siRNA sense strand
caugaacccucagcaaguu

SEQ ID NO: 1226662 - RNA, 19 nt, Homo sapiens
  misc_RNA (1)...(19): siRNA sense strand
guggauagaauaagugaaa

SEQ ID NO: 1226663 - RNA, 19 nt, Homo sapiens
  misc_RNA (1)...(19): siRNA sense strand
uagcacauguggauagaau

SEQ ID NO: 1226664 - RNA, 19 nt, Homo sapiens
  misc_RNA (1)...(19): siRNA sense strand
ccaauacgaaauacacuuu

SEQ ID NO: 1226665 - RNA, 19 nt, Homo sapiens
  misc_RNA (1)...(19): siRNA sense strand
ccaggugcauguuacagaa

SEQ ID NO: 1226666 - RNA, 19 nt, Homo sapiens
  misc_RNA (1)...(19): siRNA sense strand
caacuuggacuugcaauca

SEQ ID NO: 1226667 - RNA, 19 nt, Homo sapiens
  misc_RNA (1)...(19): siRNA sense strand
agaaaucagcccacuguuu

SEQ ID NO: 1226668 - RNA, 19 nt, Homo sapiens
  misc_RNA (1)...(19): siRNA sense strand
agccagaccuuaaacagaa

SEQ ID NO: 1226669 - RNA, 19 nt, Homo sapiens
  misc_RNA (1)...(19): siRNA sense strand
uuacaugaccugcgacaaa

SEQ ID NO: 1226670 - RNA, 19 nt, Homo sapiens
  misc_RNA (1)...(19): siRNA sense strand
gugaaggagacuugaauuu

SEQ ID NO: 1226671 - RNA, 19 nt, Homo sapiens
  misc_RNA (1)...(19): siRNA sense strand
ccucacggacccuacauua

SEQ ID NO: 1226672 - RNA, 19 nt, Homo sapiens
  misc_RNA (1)...(19): siRNA sense strand
gguccugccuuuauucauc

SEQ ID NO: 1226673 - RNA, 19 nt, Homo sapiens
  misc_RNA (1)...(19): siRNA sense strand
gaauggaaguaggacucua

SEQ ID NO: 1226674 - RNA, 19 nt, Homo sapiens
  misc_RNA (1)...(19): siRNA sense strand
ccucgaaccuccagcacuu

SEQ ID NO: 1226675 - RNA, 19 nt, Homo sapiens
  misc_RNA (1)...(19): siRNA sense strand
caugacuucucucaacuug

SEQ ID NO: 1226676 - RNA, 19 nt, Homo sapiens
  misc_RNA (1)...(19): siRNA sense strand
cgacagacacaacagcauu

SEQ ID NO: 1226677 - RNA, 19 nt, Homo sapiens
  misc_RNA (1)...(19): siRNA sense strand
ggaagagaaggaaguagga

SEQ ID NO: 1226678 - RNA, 19 nt, Homo sapiens
  misc_RNA (1)...(19): siRNA sense strand
ugcaaucacagaacauuua

SEQ ID NO: 1226679 - RNA, 19 nt, Homo sapiens
  misc_RNA (1)...(19): siRNA sense strand
gcauggguccugccuuuau

SEQ ID NO: 1226680 - RNA, 19 nt, Homo sapiens
  misc_RNA (1)...(19): siRNA sense strand
ucaauagccagaccuuaaa

SEQ ID NO: 1226681 - RNA, 19 nt, Homo sapiens
  misc_RNA (1)...(19): siRNA sense strand
ggucuacgcaaucacauga

SEQ ID NO: 1226682 - RNA, 19 nt, Homo sapiens
  misc_RNA (1)...(19): siRNA sense strand
cacaaacucuggagcaucu

SEQ ID NO: 1226683 - RNA, 19 nt, Homo sapiens
  misc_RNA (1)...(19): siRNA sense strand
gccaauauaacauucagaa

SEQ ID NO: 1226684 - RNA, 19 nt, Homo sapiens
  misc_RNA (1)...(19): siRNA sense strand
caucuaauccucugucaca

SEQ ID NO: 1226685 - RNA, 19 nt, Homo sapiens
  misc_RNA (1)...(19): siRNA sense strand
caccacaucuuggauuuca

SEQ ID NO: 1226686 - RNA, 19 nt, Homo sapiens
  misc_RNA (1)...(19): siRNA sense strand
cauggguccugccuuuauu

SEQ ID NO: 1226687 - RNA, 19 nt, Homo sapiens
  misc_RNA (1)...(19): siRNA sense strand
ggcuggguaucucaguuua

SEQ ID NO: 1226688 - RNA, 19 nt, Homo sapiens
  misc_RNA (1)...(19): siRNA sense strand
uaacgcacagcauuaguga

SEQ ID NO: 1226689 - RNA, 19 nt, Homo sapiens
  misc_RNA (1)...(19): siRNA sense strand
gcugugcuguucucucuca

SEQ ID NO: 1226690 - RNA, 19 nt, Homo sapiens
  misc_RNA (1)...(19): siRNA sense strand
cuacaucuuugcacauaca

SEQ ID NO: 1226691 - RNA, 19 nt, Homo sapiens
  misc_RNA (1)...(19): siRNA sense strand
ucaggagaguacaagauau

SEQ ID NO: 1226692 - RNA, 19 nt, Homo sapiens
  misc_RNA (1)...(19): siRNA sense strand
caccaaccauucauucauc

SEQ ID NO: 1226693 - RNA, 19 nt, Homo sapiens
  misc_RNA (1)...(19): siRNA sense strand
gcaaguuuaucagccuuca

SEQ ID NO: 1226694 - RNA, 19 nt, Homo sapiens
  misc_RNA (1)...(19): siRNA sense strand
uauuaggccuuacauuaca

SEQ ID NO: 1226695 - RNA, 19 nt, Homo sapiens
  misc_RNA (1)...(19): siRNA sense strand
cuaucuauauuaggccuua

SEQ ID NO: 1226696 - RNA, 19 nt, Homo sapiens
  misc_RNA (1)...(19): siRNA sense strand
ucacuuaggcagcaaagga

SEQ ID NO: 1226697 - RNA, 19 nt, Homo sapiens
  misc_RNA (1)...(19): siRNA sense strand
cagcauuagugauggacaa

SEQ ID NO: 1226698 - RNA, 19 nt, Homo sapiens
  misc_RNA (1)...(19): siRNA sense strand
ggugcauguuacagaauaa

SEQ ID NO: 1226699 - RNA, 19 nt, Homo sapiens
  misc_RNA (1)...(19): siRNA sense strand
ucugguagcucacagucuu

SEQ ID NO: 1226700 - RNA, 19 nt, Homo sapiens
  misc_RNA (1)...(19): siRNA sense strand
cuaauccucugucacauac

SEQ ID NO: 1226701 - RNA, 19 nt, Homo sapiens
  misc_RNA (1)...(19): siRNA sense strand
cauuagugauggacaacuu

SEQ ID NO: 1226702 - RNA, 19 nt, Homo sapiens
  misc_RNA (1)...(19): siRNA sense strand
auuacagucucucccaaua

SEQ ID NO: 1226703 - RNA, 19 nt, Homo sapiens
  misc_RNA (1)...(19): siRNA sense strand
ucacaaccaccaaccauuc

SEQ ID NO: 1226704 - RNA, 19 nt, Homo sapiens
  misc_RNA (1)...(19): siRNA sense strand
gacagcaccagcucaaguu

SEQ ID NO: 1226705 - RNA, 19 nt, Homo sapiens
  misc_RNA (1)...(19): siRNA sense strand
gacccuacauuagcacaug

SEQ ID NO: 1226706 - RNA, 19 nt, Homo sapiens
  misc_RNA (1)...(19): siRNA sense strand
gguagucacucagcccaau

SEQ ID NO: 1226707 - RNA, 19 nt, Homo sapiens
  misc_RNA (1)...(19): siRNA sense strand
caucucaacagccaaauca

SEQ ID NO: 1226708 - RNA, 19 nt, Homo sapiens
  misc_RNA (1)...(19): siRNA sense strand
ucaguucaccuacuacuuc

SEQ ID NO: 1226709 - RNA, 19 nt, Homo sapiens
  misc_RNA (1)...(19): siRNA sense strand
gaaacugaguaugggaucu

SEQ ID NO: 1226710 - RNA, 19 nt, Homo sapiens
  misc_RNA (1)...(19): siRNA sense strand
agagaaggaaguaggauga

SEQ ID NO: 1226711 - RNA, 19 nt, Homo sapiens
  misc_RNA (1)...(19): siRNA sense strand
cauagccaauauaacauuc

SEQ ID NO: 1226712 - RNA, 19 nt, Homo sapiens
  misc_RNA (1)...(19): siRNA sense strand
caaccaccaaccauucauu

SEQ ID NO: 1226713 - RNA, 19 nt, Homo sapiens
  misc_RNA (1)...(19): siRNA sense strand
uaauacuccuacaucuuug

SEQ ID NO: 1226714 - RNA, 19 nt, Homo sapiens
  misc_RNA (1)...(19): siRNA sense strand
guacaacucgacagacaca

SEQ ID NO: 1226715 - RNA, 19 nt, Homo sapiens
  misc_RNA (1)...(19): siRNA sense strand
gccagaccuuaaacagaaa

SEQ ID NO: 1226716 - RNA, 19 nt, Homo sapiens
  misc_RNA (1)...(19): siRNA sense strand
ucuaauccucugucacaua

SEQ ID NO: 1226717 - RNA, 19 nt, Homo sapiens
  misc_RNA (1)...(19): siRNA sense strand
ggugaaggagacuugaauu

SEQ ID NO: 1226718 - RNA, 19 nt, Homo sapiens
  misc_RNA (1)...(19): siRNA sense strand
acucuaacgcacagcauua

SEQ ID NO: 1226719 - RNA, 19 nt, Homo sapiens
  misc_RNA (1)...(19): siRNA sense strand
uguagaaaccgagaauauu

SEQ ID NO: 1226720 - RNA, 19 nt, Homo sapiens
  misc_RNA (1)...(19): siRNA sense strand
ccauagccaauauaacauu

SEQ ID NO: 1226721 - RNA, 19 nt, Homo sapiens
  misc_RNA (1)...(19): siRNA sense strand
ucacagucuucugcccaua

SEQ ID NO: 1226722 - RNA, 19 nt, Homo sapiens
  misc_RNA (1)...(19): siRNA sense strand
uacagucucucccaauaag

SEQ ID NO: 1226723 - RNA, 19 nt, Homo sapiens
  misc_RNA (1)...(19): siRNA sense strand
ccacgugacuuucaacaau

SEQ ID NO: 1226724 - RNA, 19 nt, Homo sapiens
  misc_RNA (1)...(19): siRNA sense strand
ggagaugacacccagcaua

SEQ ID NO: 1226725 - RNA, 19 nt, Homo sapiens
  misc_RNA (1)...(19): siRNA sense strand
ggacaagcgucgccggaau

SEQ ID NO: 1226726 - RNA, 19 nt, Homo sapiens
  misc_RNA (1)...(19): siRNA sense strand
ccaccuugcuuguaccaaa

SEQ ID NO: 1226727 - RNA, 19 nt, Homo sapiens
  misc_RNA (1)...(19): siRNA sense strand
gaauaugaacaucgacauu

SEQ ID NO: 1226728 - RNA, 19 nt, Homo sapiens
  misc_RNA (1)...(19): siRNA sense strand
gagaugacacccagcauau

SEQ ID NO: 1226729 - RNA, 19 nt, Homo sapiens
  misc_RNA (1)...(19): siRNA sense strand
guaccuuuauggacaacua

SEQ ID NO: 1226730 - RNA, 19 nt, Homo sapiens
  misc_RNA (1)...(19): siRNA sense strand
acauucagaugcacaacua

SEQ ID NO: 1226731 - RNA, 19 nt, Homo sapiens
  misc_RNA (1)...(19): siRNA sense strand
uagaagacauucagaugca

SEQ ID NO: 1226732 - RNA, 19 nt, Homo sapiens
  misc_RNA (1)...(19): siRNA sense strand
gcaguccuccauuaaggua

SEQ ID NO: 1226733 - RNA, 19 nt, Homo sapiens
  misc_RNA (1)...(19): siRNA sense strand
gaacccugacuaucaaaug

SEQ ID NO: 1226734 - RNA, 19 nt, Homo sapiens
  misc_RNA (1)...(19): siRNA sense strand
gguagaagacauucagaug

SEQ ID NO: 1226735 - RNA, 19 nt, Homo sapiens
  misc_RNA (1)...(19): siRNA sense strand
gacagcaguccuccauuaa

SEQ ID NO: 1226736 - RNA, 19 nt, Homo sapiens
  misc_RNA (1)...(19): siRNA sense strand
cgggaucucuccacaacuu

SEQ ID NO: 1226737 - RNA, 19 nt, Homo sapiens
  misc_RNA (1)...(19): siRNA sense strand
ggcgaacccugacuaucaa

SEQ ID NO: 1226738 - RNA, 19 nt, Homo sapiens
  misc_RNA (1)...(19): siRNA sense strand
gcauauccagcaauucuau

SEQ ID NO: 1226739 - RNA, 19 nt, Homo sapiens
  misc_RNA (1)...(19): siRNA sense strand
ucaaggaacccaagagagu

SEQ ID NO: 1226740 - RNA, 19 nt, Homo sapiens
  misc_RNA (1)...(19): siRNA sense strand
cagcaguccuccauuaagg

SEQ ID NO: 1226741 - RNA, 19 nt, Homo sapiens
  misc_RNA (1)...(19): siRNA sense strand
ggacacuuuaccuuucuaa

SEQ ID NO: 1226742 - RNA, 19 nt, Homo sapiens
  misc_RNA (1)...(19): siRNA sense strand
caagagaguggaagaacug

SEQ ID NO: 1226743 - RNA, 19 nt, Homo sapiens
  misc_RNA (1)...(19): siRNA sense strand
gcucaaggaacccaagaga

SEQ ID NO: 1226744 - RNA, 19 nt, Homo sapiens
  misc_RNA (1)...(19): siRNA sense strand
auacguguguuuagcaaau

SEQ ID NO: 1226745 - RNA, 19 nt, Homo sapiens
  misc_RNA (1)...(19): siRNA sense strand
ccaagagaguggaagaacu

SEQ ID NO: 1226746 - RNA, 19 nt, Homo sapiens
  misc_RNA (1)...(19): siRNA sense strand
ugucaguacugccgauuuc

SEQ ID NO: 1226747 - RNA, 19 nt, Homo sapiens
  misc_RNA (1)...(19): siRNA sense strand
cggaaucgcugucaguacu

SEQ ID NO: 1226748 - RNA, 19 nt, Homo sapiens
  misc_RNA (1)...(19): siRNA sense strand
ccgggucgguuuacuacaa

SEQ ID NO: 1226749 - RNA, 19 nt, Homo sapiens
  misc_RNA (1)...(19): siRNA sense strand
gaacuucguacccuuugca

SEQ ID NO: 1226750 - RNA, 19 nt, Homo sapiens
  misc_RNA (1)...(19): siRNA sense strand
uggaagaacugcaaaacaa

SEQ ID NO: 1226751 - RNA, 19 nt, Homo sapiens
  misc_RNA (1)...(19): siRNA sense strand
gagaguggaagaacugcaa

SEQ ID NO: 1226752 - RNA, 19 nt, Homo sapiens
  misc_RNA (1)...(19): siRNA sense strand
gcccaaagccgaccaagac

SEQ ID NO: 1226753 - RNA, 19 nt, Homo sapiens
  misc_RNA (1)...(19): siRNA sense strand
cagcauauccagcaauucu

SEQ ID NO: 1226754 - RNA, 19 nt, Homo sapiens
  misc_RNA (1)...(19): siRNA sense strand
ucaaaugaguggagaugac

SEQ ID NO: 1226755 - RNA, 19 nt, Homo sapiens
  misc_RNA (1)...(19): siRNA sense strand
ccauuaagguagaagacau

SEQ ID NO: 1226756 - RNA, 19 nt, Homo sapiens
  misc_RNA (1)...(19): siRNA sense strand
ccagaacuucguacccuuu

SEQ ID NO: 1226757 - RNA, 19 nt, Homo sapiens
  misc_RNA (1)...(19): siRNA sense strand
aaauacguguguuuagcaa

SEQ ID NO: 1226758 - RNA, 19 nt, Homo sapiens
  misc_RNA (1)...(19): siRNA sense strand
ccuggacacuuuaccuuuc

SEQ ID NO: 1226759 - RNA, 19 nt, Homo sapiens
  misc_RNA (1)...(19): siRNA sense strand
cccagcauauccagcaauu

SEQ ID NO: 1226760 - RNA, 19 nt, Homo sapiens
  misc_RNA (1)...(19): siRNA sense strand
aacccugacuaucaaauga

SEQ ID NO: 1226761 - RNA, 19 nt, Homo sapiens
  misc_RNA (1)...(19): siRNA sense strand
ccacuacgcacaugaucga

SEQ ID NO: 1226762 - RNA, 19 nt, Homo sapiens
  misc_RNA (1)...(19): siRNA sense strand
cacgugacuuucaacaaug

SEQ ID NO: 1226763 - RNA, 19 nt, Homo sapiens
  misc_RNA (1)...(19): siRNA sense strand
auaugaacaucgacauuuc

SEQ ID NO: 1226764 - RNA, 19 nt, Homo sapiens
  misc_RNA (1)...(19): siRNA sense strand
gaagugguucgcacagaca

SEQ ID NO: 1226765 - RNA, 19 nt, Homo sapiens
  misc_RNA (1)...(19): siRNA sense strand
ucaguaccuuuauggacaa

SEQ ID NO: 1226766 - RNA, 19 nt, Homo sapiens
  misc_RNA (1)...(19): siRNA sense strand
agaacuacguggccacuac

SEQ ID NO: 1226767 - RNA, 19 nt, Homo sapiens
  misc_RNA (1)...(19): siRNA sense strand
cagaagugccuggcuguug

SEQ ID NO: 1226768 - RNA, 19 nt, Homo sapiens
  misc_RNA (1)...(19): siRNA sense strand
aggcgaacccugacuauca

SEQ ID NO: 1226769 - RNA, 19 nt, Homo sapiens
  misc_RNA (1)...(19): siRNA sense strand
gauggucaaagaagugguu

SEQ ID NO: 1226770 - RNA, 19 nt, Homo sapiens
  misc_RNA (1)...(19): siRNA sense strand
gagacacgggcucaaggaa

SEQ ID NO: 1226771 - RNA, 19 nt, Homo sapiens
  misc_RNA (1)...(19): siRNA sense strand
caaaugaguggagaugaca

SEQ ID NO: 1226772 - RNA, 19 nt, Homo sapiens
  misc_RNA (1)...(19): siRNA sense strand
gggcccaugucgacuccaa

SEQ ID NO: 1226773 - RNA, 19 nt, Homo sapiens
  misc_RNA (1)...(19): siRNA sense strand
ccucuucuccuuuaagcaa

SEQ ID NO: 1226774 - RNA, 19 nt, Homo sapiens
  misc_RNA (1)...(19): siRNA sense strand
gaagaacugcaaaacaaga

SEQ ID NO: 1226775 - RNA, 19 nt, Homo sapiens
  misc_RNA (1)...(19): siRNA sense strand
uacguguguuuagcaaaua

SEQ ID NO: 1226776 - RNA, 19 nt, Homo sapiens
  misc_RNA (1)...(19): siRNA sense strand
caccuugcuuguaccaaau

SEQ ID NO: 1226777 - RNA, 19 nt, Homo sapiens
  misc_RNA (1)...(19): siRNA sense strand
cuguugggauggucaaaga

SEQ ID NO: 1226778 - RNA, 19 nt, Homo sapiens
  misc_RNA (1)...(19): siRNA sense strand
gcauugcugcccuggcuau

SEQ ID NO: 1226779 - RNA, 19 nt, Homo sapiens
  misc_RNA (1)...(19): siRNA sense strand
gcacagacaguuuaaaagg

SEQ ID NO: 1226780 - RNA, 19 nt, Homo sapiens
  misc_RNA (1)...(19): siRNA sense strand
gguucgcacagacaguuua

SEQ ID NO: 1226781 - RNA, 19 nt, Homo sapiens
  misc_RNA (1)...(19): siRNA sense strand
aagaagugguucgcacaga

SEQ ID NO: 1226782 - RNA, 19 nt, Homo sapiens
  misc_RNA (1)...(19): siRNA sense strand
gacaagcgucgccggaauc

SEQ ID NO: 1226783 - RNA, 19 nt, Homo sapiens
  misc_RNA (1)...(19): siRNA sense strand
gaacugcaaaacaagauug

SEQ ID NO: 1226784 - RNA, 19 nt, Homo sapiens
  misc_RNA (1)...(19): siRNA sense strand
gaacuguuuguccuucgau

SEQ ID NO: 1226785 - RNA, 19 nt, Homo sapiens
  misc_RNA (1)...(19): siRNA sense strand
gcaaaauacguguguuuag

SEQ ID NO: 1226786 - RNA, 19 nt, Homo sapiens
  misc_RNA (1)...(19): siRNA sense strand
cauuaagguagaagacauu

SEQ ID NO: 1226787 - RNA, 19 nt, Homo sapiens
  misc_RNA (1)...(19): siRNA sense strand
gcacaggcuacgacgucaa

SEQ ID NO: 1226788 - RNA, 19 nt, Homo sapiens
  misc_RNA (1)...(19): siRNA sense strand
guacugccgauuucagaag

SEQ ID NO: 1226789 - RNA, 19 nt, Homo sapiens
  misc_RNA (1)...(19): siRNA sense strand
uaagguagaagacauucag

SEQ ID NO: 1226790 - RNA, 19 nt, Homo sapiens
  misc_RNA (1)...(19): siRNA sense strand
ccugaaauuggaagacuug

SEQ ID NO: 1226791 - RNA, 19 nt, Homo sapiens
  misc_RNA (1)...(19): siRNA sense strand
guucgcacagacaguuuaa

SEQ ID NO: 1226792 - RNA, 19 nt, Homo sapiens
  misc_RNA (1)...(19): siRNA sense strand
guccuucgauuagcauaca

SEQ ID NO: 1226793 - RNA, 19 nt, Homo sapiens
  misc_RNA (1)...(19): siRNA sense strand
gaugacacccagcauaucc

SEQ ID NO: 1226794 - RNA, 19 nt, Homo sapiens
  misc_RNA (1)...(19): siRNA sense strand
uaucaaaugaguggagaug

SEQ ID NO: 1226795 - RNA, 19 nt, Homo sapiens
  misc_RNA (1)...(19): siRNA sense strand
caacuuccaccagaacuac

SEQ ID NO: 1226796 - RNA, 19 nt, Homo sapiens
  misc_RNA (1)...(19): siRNA sense strand
ggugucuaguugccagaug

SEQ ID NO: 1226797 - RNA, 19 nt, Homo sapiens
  misc_RNA (1)...(19): siRNA sense strand
ucucaaagaccacgugacu

SEQ ID NO: 1226798 - RNA, 19 nt, Homo sapiens
  misc_RNA (1)...(19): siRNA sense strand
gccggaaucgcugucagua

SEQ ID NO: 1226799 - RNA, 19 nt, Homo sapiens
  misc_RNA (1)...(19): siRNA sense strand
caaaauacguguguuuagc

SEQ ID NO: 1226800 - RNA, 19 nt, Homo sapiens
  misc_RNA (1)...(19): siRNA sense strand
ccacgugacuuucaacaau

SEQ ID NO: 1226801 - RNA, 19 nt, Homo sapiens
  misc_RNA (1)...(19): siRNA sense strand
ggagaugacacccagcaua

SEQ ID NO: 1226802 - RNA, 19 nt, Homo sapiens
  misc_RNA (1)...(19): siRNA sense strand
ggacaagcgucgccggaau

SEQ ID NO: 1226803 - RNA, 19 nt, Homo sapiens
  misc_RNA (1)...(19): siRNA sense strand
ccaccuugcuuguaccaaa

SEQ ID NO: 1226804 - RNA, 19 nt, Homo sapiens
  misc_RNA (1)...(19): siRNA sense strand
gaauaugaacaucgacauu

SEQ ID NO: 1226805 - RNA, 19 nt, Homo sapiens
  misc_RNA (1)...(19): siRNA sense strand
gagaugacacccagcauau

SEQ ID NO: 1226806 - RNA, 19 nt, Homo sapiens
  misc_RNA (1)...(19): siRNA sense strand
guaccuuuauggacaacua

SEQ ID NO: 1226807 - RNA, 19 nt, Homo sapiens
  misc_RNA (1)...(19): siRNA sense strand
acauucagaugcacaacua

SEQ ID NO: 1226808 - RNA, 19 nt, Homo sapiens
  misc_RNA (1)...(19): siRNA sense strand
uagaagacauucagaugca

SEQ ID NO: 1226809 - RNA, 19 nt, Homo sapiens
  misc_RNA (1)...(19): siRNA sense strand
gcaguccuccauuaaggua

SEQ ID NO: 1226810 - RNA, 19 nt, Homo sapiens
  misc_RNA (1)...(19): siRNA sense strand
gaacccugacuaucaaaug

SEQ ID NO: 1226811 - RNA, 19 nt, Homo sapiens
  misc_RNA (1)...(19): siRNA sense strand
gguagaagacauucagaug

SEQ ID NO: 1226812 - RNA, 19 nt, Homo sapiens
  misc_RNA (1)...(19): siRNA sense strand
gacagcaguccuccauuaa

SEQ ID NO: 1226813 - RNA, 19 nt, Homo sapiens
  misc_RNA (1)...(19): siRNA sense strand
cgggaucucuccacaacuu

SEQ ID NO: 1226814 - RNA, 19 nt, Homo sapiens
  misc_RNA (1)...(19): siRNA sense strand
ggcgaacccugacuaucaa

SEQ ID NO: 1226815 - RNA, 19 nt, Homo sapiens
  misc_RNA (1)...(19): siRNA sense strand
gcauauccagcaauucuau

SEQ ID NO: 1226816 - RNA, 19 nt, Homo sapiens
  misc_RNA (1)...(19): siRNA sense strand
ucaaggaacccaagagagu

SEQ ID NO: 1226817 - RNA, 19 nt, Homo sapiens
  misc_RNA (1)...(19): siRNA sense strand
cagcaguccuccauuaagg

SEQ ID NO: 1226818 - RNA, 19 nt, Homo sapiens
  misc_RNA (1)...(19): siRNA sense strand
ggacacuuuaccuuucuaa

SEQ ID NO: 1226819 - RNA, 19 nt, Homo sapiens
  misc_RNA (1)...(19): siRNA sense strand
caagagaguggaagaacug

SEQ ID NO: 1226820 - RNA, 19 nt, Homo sapiens
  misc_RNA (1)...(19): siRNA sense strand
gcucaaggaacccaagaga

SEQ ID NO: 1226821 - RNA, 19 nt, Homo sapiens
  misc_RNA (1)...(19): siRNA sense strand
auacguguguuuagcaaau

SEQ ID NO: 1226822 - RNA, 19 nt, Homo sapiens
  misc_RNA (1)...(19): siRNA sense strand
ccaagagaguggaagaacu

SEQ ID NO: 1226823 - RNA, 19 nt, Homo sapiens
  misc_RNA (1)...(19): siRNA sense strand
ugucaguacugccgauuuc

SEQ ID NO: 1226824 - RNA, 19 nt, Homo sapiens
  misc_RNA (1)...(19): siRNA sense strand
cggaaucgcugucaguacu

SEQ ID NO: 1226825 - RNA, 19 nt, Homo sapiens
  misc_RNA (1)...(19): siRNA sense strand
ccgggucgguuuacuacaa

SEQ ID NO: 1226826 - RNA, 19 nt, Homo sapiens
  misc_RNA (1)...(19): siRNA sense strand
gaacuucguacccuuugca

SEQ ID NO: 1226827 - RNA, 19 nt, Homo sapiens
  misc_RNA (1)...(19): siRNA sense strand
uggaagaacugcaaaacaa

SEQ ID NO: 1226828 - RNA, 19 nt, Homo sapiens
  misc_RNA (1)...(19): siRNA sense strand
gagaguggaagaacugcaa

SEQ ID NO: 1226829 - RNA, 19 nt, Homo sapiens
  misc_RNA (1)...(19): siRNA sense strand
gcccaaagccgaccaagac

SEQ ID NO: 1226830 - RNA, 19 nt, Homo sapiens
  misc_RNA (1)...(19): siRNA sense strand
cagcauauccagcaauucu

SEQ ID NO: 1226831 - RNA, 19 nt, Homo sapiens
  misc_RNA (1)...(19): siRNA sense strand
ucaaaugaguggagaugac

SEQ ID NO: 1226832 - RNA, 19 nt, Homo sapiens
  misc_RNA (1)...(19): siRNA sense strand
ccauuaagguagaagacau

SEQ ID NO: 1226833 - RNA, 19 nt, Homo sapiens
  misc_RNA (1)...(19): siRNA sense strand
ccagaacuucguacccuuu

SEQ ID NO: 1226834 - RNA, 19 nt, Homo sapiens
  misc_RNA (1)...(19): siRNA sense strand
aaauacguguguuuagcaa

SEQ ID NO: 1226835 - RNA, 19 nt, Homo sapiens
  misc_RNA (1)...(19): siRNA sense strand
ccuggacacuuuaccuuuc

SEQ ID NO: 1226836 - RNA, 19 nt, Homo sapiens
  misc_RNA (1)...(19): siRNA sense strand
cccagcauauccagcaauu

SEQ ID NO: 1226837 - RNA, 19 nt, Homo sapiens
  misc_RNA (1)...(19): siRNA sense strand
aacccugacuaucaaauga

SEQ ID NO: 1226838 - RNA, 19 nt, Homo sapiens
  misc_RNA (1)...(19): siRNA sense strand
ccacuacgcacaugaucga

SEQ ID NO: 1226839 - RNA, 19 nt, Homo sapiens
  misc_RNA (1)...(19): siRNA sense strand
cacgugacuuucaacaaug

SEQ ID NO: 1226840 - RNA, 19 nt, Homo sapiens
  misc_RNA (1)...(19): siRNA sense strand
auaugaacaucgacauuuc

SEQ ID NO: 1226841 - RNA, 19 nt, Homo sapiens
  misc_RNA (1)...(19): siRNA sense strand
gaagugguucgcacagaca

SEQ ID NO: 1226842 - RNA, 19 nt, Homo sapiens
  misc_RNA (1)...(19): siRNA sense strand
ucaguaccuuuauggacaa

SEQ ID NO: 1226843 - RNA, 19 nt, Homo sapiens
  misc_RNA (1)...(19): siRNA sense strand
agaacuacguggccacuac

SEQ ID NO: 1226844 - RNA, 19 nt, Homo sapiens
  misc_RNA (1)...(19): siRNA sense strand
cagaagugccuggcuguug

SEQ ID NO: 1226845 - RNA, 19 nt, Homo sapiens
  misc_RNA (1)...(19): siRNA sense strand
aggcgaacccugacuauca

SEQ ID NO: 1226846 - RNA, 19 nt, Homo sapiens
  misc_RNA (1)...(19): siRNA sense strand
gauggucaaagaagugguu

SEQ ID NO: 1226847 - RNA, 19 nt, Homo sapiens
  misc_RNA (1)...(19): siRNA sense strand
gagacacgggcucaaggaa

SEQ ID NO: 1226848 - RNA, 19 nt, Homo sapiens
  misc_RNA (1)...(19): siRNA sense strand
caaaugaguggagaugaca

SEQ ID NO: 1226849 - RNA, 19 nt, Homo sapiens
  misc_RNA (1)...(19): siRNA sense strand
gggcccaugucgacuccaa

SEQ ID NO: 1226850 - RNA, 19 nt, Homo sapiens
  misc_RNA (1)...(19): siRNA sense strand
ccucuucuccuuuaagcaa

SEQ ID NO: 1226851 - RNA, 19 nt, Homo sapiens
  misc_RNA (1)...(19): siRNA sense strand
gaagaacugcaaaacaaga

SEQ ID NO: 1226852 - RNA, 19 nt, Homo sapiens
  misc_RNA (1)...(19): siRNA sense strand
uacguguguuuagcaaaua

SEQ ID NO: 1226853 - RNA, 19 nt, Homo sapiens
  misc_RNA (1)...(19): siRNA sense strand
caccuugcuuguaccaaau

SEQ ID NO: 1226854 - RNA, 19 nt, Homo sapiens
  misc_RNA (1)...(19): siRNA sense strand
cuguugggauggucaaaga

SEQ ID NO: 1226855 - RNA, 19 nt, Homo sapiens
  misc_RNA (1)...(19): siRNA sense strand
gcauugcugcccuggcuau

SEQ ID NO: 1226856 - RNA, 19 nt, Homo sapiens
  misc_RNA (1)...(19): siRNA sense strand
gcacagacaguuuaaaagg

SEQ ID NO: 1226857 - RNA, 19 nt, Homo sapiens
  misc_RNA (1)...(19): siRNA sense strand
gguucgcacagacaguuua

SEQ ID NO: 1226858 - RNA, 19 nt, Homo sapiens
  misc_RNA (1)...(19): siRNA sense strand
aagaagugguucgcacaga

SEQ ID NO: 1226859 - RNA, 19 nt, Homo sapiens
  misc_RNA (1)...(19): siRNA sense strand
gacaagcgucgccggaauc

SEQ ID NO: 1226860 - RNA, 19 nt, Homo sapiens
  misc_RNA (1)...(19): siRNA sense strand
gaacugcaaaacaagauug

SEQ ID NO: 1226861 - RNA, 19 nt, Homo sapiens
  misc_RNA (1)...(19): siRNA sense strand
gaacuguuuguccuucgau

SEQ ID NO: 1226862 - RNA, 19 nt, Homo sapiens
  misc_RNA (1)...(19): siRNA sense strand
gcaaaauacguguguuuag

SEQ ID NO: 1226863 - RNA, 19 nt, Homo sapiens
  misc_RNA (1)...(19): siRNA sense strand
cauuaagguagaagacauu

SEQ ID NO: 1226864 - RNA, 19 nt, Homo sapiens
  misc_RNA (1)...(19): siRNA sense strand
gcacaggcuacgacgucaa

SEQ ID NO: 1226865 - RNA, 19 nt, Homo sapiens
  misc_RNA (1)...(19): siRNA sense strand
guacugccgauuucagaag

SEQ ID NO: 1226866 - RNA, 19 nt, Homo sapiens
  misc_RNA (1)...(19): siRNA sense strand
uaagguagaagacauucag

SEQ ID NO: 1226867 - RNA, 19 nt, Homo sapiens
  misc_RNA (1)...(19): siRNA sense strand
ccugaaauuggaagacuug

SEQ ID NO: 1226868 - RNA, 19 nt, Homo sapiens
  misc_RNA (1)...(19): siRNA sense strand
guucgcacagacaguuuaa

SEQ ID NO: 1226869 - RNA, 19 nt, Homo sapiens
  misc_RNA (1)...(19): siRNA sense strand
guccuucgauuagcauaca

SEQ ID NO: 1226870 - RNA, 19 nt, Homo sapiens
  misc_RNA (1)...(19): siRNA sense strand
gaugacacccagcauaucc

SEQ ID NO: 1226871 - RNA, 19 nt, Homo sapiens
  misc_RNA (1)...(19): siRNA sense strand
uaucaaaugaguggagaug

SEQ ID NO: 1226872 - RNA, 19 nt, Homo sapiens
  misc_RNA (1)...(19): siRNA sense strand
caacuuccaccagaacuac

SEQ ID NO: 1226873 - RNA, 19 nt, Homo sapiens
  misc_RNA (1)...(19): siRNA sense strand
ggugucuaguugccagaug

SEQ ID NO: 1226874 - RNA, 19 nt, Homo sapiens
  misc_RNA (1)...(19): siRNA sense strand
ucucaaagaccacgugacu

SEQ ID NO: 1226875 - RNA, 19 nt, Homo sapiens
  misc_RNA (1)...(19): siRNA sense strand
gccggaaucgcugucagua

SEQ ID NO: 1226876 - RNA, 19 nt, Homo sapiens
  misc_RNA (1)...(19): siRNA sense strand
caaaauacguguguuuagc

SEQ ID NO: 1226877 - RNA, 19 nt, Homo sapiens
  misc_RNA (1)...(19): siRNA sense strand
ggagaugacacccagcaua

SEQ ID NO: 1226878 - RNA, 19 nt, Homo sapiens
  misc_RNA (1)...(19): siRNA sense strand
ggacaagcgucgccggaau

SEQ ID NO: 1226879 - RNA, 19 nt, Homo sapiens
  misc_RNA (1)...(19): siRNA sense strand
ccaccuugcuuguaccaaa

SEQ ID NO: 1226880 - RNA, 19 nt, Homo sapiens
  misc_RNA (1)...(19): siRNA sense strand
gagaugacacccagcauau

SEQ ID NO: 1226881 - RNA, 19 nt, Homo sapiens
  misc_RNA (1)...(19): siRNA sense strand
guaccuuuauggacaacua

SEQ ID NO: 1226882 - RNA, 19 nt, Homo sapiens
  misc_RNA (1)...(19): siRNA sense strand
acauucagaugcacaacua

SEQ ID NO: 1226883 - RNA, 19 nt, Homo sapiens
  misc_RNA (1)...(19): siRNA sense strand
uagaagacauucagaugca

SEQ ID NO: 1226884 - RNA, 19 nt, Homo sapiens
  misc_RNA (1)...(19): siRNA sense strand
gcaguccuccauuaaggua

SEQ ID NO: 1226885 - RNA, 19 nt, Homo sapiens
  misc_RNA (1)...(19): siRNA sense strand
gaacccugacuaucaaaug

SEQ ID NO: 1226886 - RNA, 19 nt, Homo sapiens
  misc_RNA (1)...(19): siRNA sense strand
gguagaagacauucagaug

SEQ ID NO: 1226887 - RNA, 19 nt, Homo sapiens
  misc_RNA (1)...(19): siRNA sense strand
gacagcaguccuccauuaa

SEQ ID NO: 1226888 - RNA, 19 nt, Homo sapiens
  misc_RNA (1)...(19): siRNA sense strand
cgggaucucuccacaacuu

SEQ ID NO: 1226889 - RNA, 19 nt, Homo sapiens
  misc_RNA (1)...(19): siRNA sense strand
ggcgaacccugacuaucaa

SEQ ID NO: 1226890 - RNA, 19 nt, Homo sapiens
  misc_RNA (1)...(19): siRNA sense strand
gcauauccagcaauucuau

SEQ ID NO: 1226891 - RNA, 19 nt, Homo sapiens
  misc_RNA (1)...(19): siRNA sense strand
cagcaguccuccauuaagg

SEQ ID NO: 1226892 - RNA, 19 nt, Homo sapiens
  misc_RNA (1)...(19): siRNA sense strand
auacguguguuuagcaaau

SEQ ID NO: 1226893 - RNA, 19 nt, Homo sapiens
  misc_RNA (1)...(19): siRNA sense strand
ugucaguacugccgauuuc

SEQ ID NO: 1226894 - RNA, 19 nt, Homo sapiens
  misc_RNA (1)...(19): siRNA sense strand
cggaaucgcugucaguacu

SEQ ID NO: 1226895 - RNA, 19 nt, Homo sapiens
  misc_RNA (1)...(19): siRNA sense strand
ccauuaagguagaagacau

SEQ ID NO: 1226896 - RNA, 19 nt, Homo sapiens
  misc_RNA (1)...(19): siRNA sense strand
gcccaaagccgaccaagac

SEQ ID NO: 1226897 - RNA, 19 nt, Homo sapiens
  misc_RNA (1)...(19): siRNA sense strand
cagcauauccagcaauucu

SEQ ID NO: 1226898 - RNA, 19 nt, Homo sapiens
  misc_RNA (1)...(19): siRNA sense strand
ucaaaugaguggagaugac

SEQ ID NO: 1226899 - RNA, 19 nt, Homo sapiens
  misc_RNA (1)...(19): siRNA sense strand
ccgggucgguuuacuacaa

SEQ ID NO: 1226900 - RNA, 19 nt, Homo sapiens
  misc_RNA (1)...(19): siRNA sense strand
aaauacguguguuuagcaa

SEQ ID NO: 1226901 - RNA, 19 nt, Homo sapiens
  misc_RNA (1)...(19): siRNA sense strand
cccagcauauccagcaauu

SEQ ID NO: 1226902 - RNA, 19 nt, Homo sapiens
  misc_RNA (1)...(19): siRNA sense strand
aacccugacuaucaaauga

SEQ ID NO: 1226903 - RNA, 19 nt, Homo sapiens
  misc_RNA (1)...(19): siRNA sense strand
ccacuacgcacaugaucga

SEQ ID NO: 1226904 - RNA, 19 nt, Homo sapiens
  misc_RNA (1)...(19): siRNA sense strand
ucaguaccuuuauggacaa

SEQ ID NO: 1226905 - RNA, 19 nt, Homo sapiens
  misc_RNA (1)...(19): siRNA sense strand
gaagugguucgcacagaca

SEQ ID NO: 1226906 - RNA, 19 nt, Homo sapiens
  misc_RNA (1)...(19): siRNA sense strand
agaacuacguggccacuac

SEQ ID NO: 1226907 - RNA, 19 nt, Homo sapiens
  misc_RNA (1)...(19): siRNA sense strand
cagaagugccuggcuguug

SEQ ID NO: 1226908 - RNA, 19 nt, Homo sapiens
  misc_RNA (1)...(19): siRNA sense strand
aggcgaacccugacuauca

SEQ ID NO: 1226909 - RNA, 19 nt, Homo sapiens
  misc_RNA (1)...(19): siRNA sense strand
gauggucaaagaagugguu

SEQ ID NO: 1226910 - RNA, 19 nt, Homo sapiens
  misc_RNA (1)...(19): siRNA sense strand
caaaugaguggagaugaca

SEQ ID NO: 1226911 - RNA, 19 nt, Homo sapiens
  misc_RNA (1)...(19): siRNA sense strand
gggcccaugucgacuccaa

SEQ ID NO: 1226912 - RNA, 19 nt, Homo sapiens
  misc_RNA (1)...(19): siRNA sense strand
ccucuucuccuuuaagcaa

SEQ ID NO: 1226913 - RNA, 19 nt, Homo sapiens
  misc_RNA (1)...(19): siRNA sense strand
uacguguguuuagcaaaua

SEQ ID NO: 1226914 - RNA, 19 nt, Homo sapiens
  misc_RNA (1)...(19): siRNA sense strand
caccuugcuuguaccaaau

SEQ ID NO: 1226915 - RNA, 19 nt, Homo sapiens
  misc_RNA (1)...(19): siRNA sense strand
cuguugggauggucaaaga

SEQ ID NO: 1226916 - RNA, 19 nt, Homo sapiens
  misc_RNA (1)...(19): siRNA sense strand
gcacagacaguuuaaaagg

SEQ ID NO: 1226917 - RNA, 19 nt, Homo sapiens
  misc_RNA (1)...(19): siRNA sense strand
gguucgcacagacaguuua

SEQ ID NO: 1226918 - RNA, 19 nt, Homo sapiens
  misc_RNA (1)...(19): siRNA sense strand
aagaagugguucgcacaga

SEQ ID NO: 1226919 - RNA, 19 nt, Homo sapiens
  misc_RNA (1)...(19): siRNA sense strand
gacaagcgucgccggaauc

SEQ ID NO: 1226920 - RNA, 19 nt, Homo sapiens
  misc_RNA (1)...(19): siRNA sense strand
gaacuguuuguccuucgau

SEQ ID NO: 1226921 - RNA, 19 nt, Homo sapiens
  misc_RNA (1)...(19): siRNA sense strand
gcacaggcuacgacgucaa

SEQ ID NO: 1226922 - RNA, 19 nt, Homo sapiens
  misc_RNA (1)...(19): siRNA sense strand
cauuaagguagaagacauu

SEQ ID NO: 1226923 - RNA, 19 nt, Homo sapiens
  misc_RNA (1)...(19): siRNA sense strand
gcaaaauacguguguuuag

SEQ ID NO: 1226924 - RNA, 19 nt, Homo sapiens
  misc_RNA (1)...(19): siRNA sense strand
guacugccgauuucagaag

SEQ ID NO: 1226925 - RNA, 19 nt, Homo sapiens
  misc_RNA (1)...(19): siRNA sense strand
uaagguagaagacauucag

SEQ ID NO: 1226926 - RNA, 19 nt, Homo sapiens
  misc_RNA (1)...(19): siRNA sense strand
caacuuccaccagaacuac

SEQ ID NO: 1226927 - RNA, 19 nt, Homo sapiens
  misc_RNA (1)...(19): siRNA sense strand
guccuucgauuagcauaca

SEQ ID NO: 1226928 - RNA, 19 nt, Homo sapiens
  misc_RNA (1)...(19): siRNA sense strand
gaugacacccagcauaucc

SEQ ID NO: 1226929 - RNA, 19 nt, Homo sapiens
  misc_RNA (1)...(19): siRNA sense strand
uaucaaaugaguggagaug

SEQ ID NO: 1226930 - RNA, 19 nt, Homo sapiens
  misc_RNA (1)...(19): siRNA sense strand
guucgcacagacaguuuaa

SEQ ID NO: 1226931 - RNA, 19 nt, Homo sapiens
  misc_RNA (1)...(19): siRNA sense strand
ggugucuaguugccagaug

SEQ ID NO: 1226932 - RNA, 19 nt, Homo sapiens
  misc_RNA (1)...(19): siRNA sense strand
gccggaaucgcugucagua

SEQ ID NO: 1226933 - RNA, 19 nt, Homo sapiens
  misc_RNA (1)...(19): siRNA sense strand
caaaauacguguguuuagc

SEQ ID NO: 1226934 - RNA, 19 nt, Homo sapiens
  misc_RNA (1)...(19): siRNA sense strand
ccacgugacuuucaacaau

SEQ ID NO: 1226935 - RNA, 19 nt, Homo sapiens
  misc_RNA (1)...(19): siRNA sense strand
ggagaugacacccagcaua

SEQ ID NO: 1226936 - RNA, 19 nt, Homo sapiens
  misc_RNA (1)...(19): siRNA sense strand
ggacaagcgucgccggaau

SEQ ID NO: 1226937 - RNA, 19 nt, Homo sapiens
  misc_RNA (1)...(19): siRNA sense strand
ccaccuugcuuguaccaaa

SEQ ID NO: 1226938 - RNA, 19 nt, Homo sapiens
  misc_RNA (1)...(19): siRNA sense strand
gaauaugaacaucgacauu

SEQ ID NO: 1226939 - RNA, 19 nt, Homo sapiens
  misc_RNA (1)...(19): siRNA sense strand
gagaugacacccagcauau

SEQ ID NO: 1226940 - RNA, 19 nt, Homo sapiens
  misc_RNA (1)...(19): siRNA sense strand
acauucagaugcacaacua

SEQ ID NO: 1226941 - RNA, 19 nt, Homo sapiens
  misc_RNA (1)...(19): siRNA sense strand
uagaagacauucagaugca

SEQ ID NO: 1226942 - RNA, 19 nt, Homo sapiens
  misc_RNA (1)...(19): siRNA sense strand
gcaguccuccauuaaggua

SEQ ID NO: 1226943 - RNA, 19 nt, Homo sapiens
  misc_RNA (1)...(19): siRNA sense strand
gaacccugacuaucaaaug

SEQ ID NO: 1226944 - RNA, 19 nt, Homo sapiens
  misc_RNA (1)...(19): siRNA sense strand
gguagaagacauucagaug

SEQ ID NO: 1226945 - RNA, 19 nt, Homo sapiens
  misc_RNA (1)...(19): siRNA sense strand
gacagcaguccuccauuaa

SEQ ID NO: 1226946 - RNA, 19 nt, Homo sapiens
  misc_RNA (1)...(19): siRNA sense strand
cgggaucucuccacaacuu

SEQ ID NO: 1226947 - RNA, 19 nt, Homo sapiens
  misc_RNA (1)...(19): siRNA sense strand
ggcgaacccugacuaucaa

SEQ ID NO: 1226948 - RNA, 19 nt, Homo sapiens
  misc_RNA (1)...(19): siRNA sense strand
gcauauccagcaauucuau

SEQ ID NO: 1226949 - RNA, 19 nt, Homo sapiens
  misc_RNA (1)...(19): siRNA sense strand
ucaaggaacccaagagagu

SEQ ID NO: 1226950 - RNA, 19 nt, Homo sapiens
  misc_RNA (1)...(19): siRNA sense strand
cagcaguccuccauuaagg

SEQ ID NO: 1226951 - RNA, 19 nt, Homo sapiens
  misc_RNA (1)...(19): siRNA sense strand
ggacacuuuaccuuucuaa

SEQ ID NO: 1226952 - RNA, 19 nt, Homo sapiens
  misc_RNA (1)...(19): siRNA sense strand
caagagaguggaagaacug

SEQ ID NO: 1226953 - RNA, 19 nt, Homo sapiens
  misc_RNA (1)...(19): siRNA sense strand
gcucaaggaacccaagaga

SEQ ID NO: 1226954 - RNA, 19 nt, Homo sapiens
  misc_RNA (1)...(19): siRNA sense strand
auacguguguuuagcaaau

SEQ ID NO: 1226955 - RNA, 19 nt, Homo sapiens
  misc_RNA (1)...(19): siRNA sense strand
ccaagagaguggaagaacu

SEQ ID NO: 1226956 - RNA, 19 nt, Homo sapiens
  misc_RNA (1)...(19): siRNA sense strand
ugucaguacugccgauuuc

SEQ ID NO: 1226957 - RNA, 19 nt, Homo sapiens
  misc_RNA (1)...(19): siRNA sense strand
cggaaucgcugucaguacu

SEQ ID NO: 1226958 - RNA, 19 nt, Homo sapiens
  misc_RNA (1)...(19): siRNA sense strand
ccgggucgguuuacuacaa

SEQ ID NO: 1226959 - RNA, 19 nt, Homo sapiens
  misc_RNA (1)...(19): siRNA sense strand
gaacuucguacccuuugca

SEQ ID NO: 1226960 - RNA, 19 nt, Homo sapiens
  misc_RNA (1)...(19): siRNA sense strand
uggaagaacugcaaaacaa

SEQ ID NO: 1226961 - RNA, 19 nt, Homo sapiens
  misc_RNA (1)...(19): siRNA sense strand
gagaguggaagaacugcaa

SEQ ID NO: 1226962 - RNA, 19 nt, Homo sapiens
  misc_RNA (1)...(19): siRNA sense strand
gcccaaagccgaccaagac

SEQ ID NO: 1226963 - RNA, 19 nt, Homo sapiens
  misc_RNA (1)...(19): siRNA sense strand
cagcauauccagcaauucu

SEQ ID NO: 1226964 - RNA, 19 nt, Homo sapiens
  misc_RNA (1)...(19): siRNA sense strand
ucaaaugaguggagaugac

SEQ ID NO: 1226965 - RNA, 19 nt, Homo sapiens
  misc_RNA (1)...(19): siRNA sense strand
ccauuaagguagaagacau

SEQ ID NO: 1226966 - RNA, 19 nt, Homo sapiens
  misc_RNA (1)...(19): siRNA sense strand
ccagaacuucguacccuuu

SEQ ID NO: 1226967 - RNA, 19 nt, Homo sapiens
  misc_RNA (1)...(19): siRNA sense strand
aaauacguguguuuagcaa

SEQ ID NO: 1226968 - RNA, 19 nt, Homo sapiens
  misc_RNA (1)...(19): siRNA sense strand
ccuggacacuuuaccuuuc

SEQ ID NO: 1226969 - RNA, 19 nt, Homo sapiens
  misc_RNA (1)...(19): siRNA sense strand
cccagcauauccagcaauu

SEQ ID NO: 1226970 - RNA, 19 nt, Homo sapiens
  misc_RNA (1)...(19): siRNA sense strand
aacccugacuaucaaauga

SEQ ID NO: 1226971 - RNA, 19 nt, Homo sapiens
  misc_RNA (1)...(19): siRNA sense strand
ccacuacgcacaugaucga

SEQ ID NO: 1226972 - RNA, 19 nt, Homo sapiens
  misc_RNA (1)...(19): siRNA sense strand
cacgugacuuucaacaaug

SEQ ID NO: 1226973 - RNA, 19 nt, Homo sapiens
  misc_RNA (1)...(19): siRNA sense strand
auaugaacaucgacauuuc

SEQ ID NO: 1226974 - RNA, 19 nt, Homo sapiens
  misc_RNA (1)...(19): siRNA sense strand
gaagugguucgcacagaca

SEQ ID NO: 1226975 - RNA, 19 nt, Homo sapiens
  misc_RNA (1)...(19): siRNA sense strand
agaacuacguggccacuac

SEQ ID NO: 1226976 - RNA, 19 nt, Homo sapiens
  misc_RNA (1)...(19): siRNA sense strand
cagaagugccuggcuguug

SEQ ID NO: 1226977 - RNA, 19 nt, Homo sapiens
  misc_RNA (1)...(19): siRNA sense strand
aggcgaacccugacuauca

SEQ ID NO: 1226978 - RNA, 19 nt, Homo sapiens
  misc_RNA (1)...(19): siRNA sense strand
gauggucaaagaagugguu

SEQ ID NO: 1226979 - RNA, 19 nt, Homo sapiens
  misc_RNA (1)...(19): siRNA sense strand
gagacacgggcucaaggaa

SEQ ID NO: 1226980 - RNA, 19 nt, Homo sapiens
  misc_RNA (1)...(19): siRNA sense strand
caaaugaguggagaugaca

SEQ ID NO: 1226981 - RNA, 19 nt, Homo sapiens
  misc_RNA (1)...(19): siRNA sense strand
gggcccaugucgacuccaa

SEQ ID NO: 1226982 - RNA, 19 nt, Homo sapiens
  misc_RNA (1)...(19): siRNA sense strand
ccucuucuccuuuaagcaa

SEQ ID NO: 1226983 - RNA, 19 nt, Homo sapiens
  misc_RNA (1)...(19): siRNA sense strand
gaagaacugcaaaacaaga

SEQ ID NO: 1226984 - RNA, 19 nt, Homo sapiens
  misc_RNA (1)...(19): siRNA sense strand
uacguguguuuagcaaaua

SEQ ID NO: 1226985 - RNA, 19 nt, Homo sapiens
  misc_RNA (1)...(19): siRNA sense strand
caccuugcuuguaccaaau

SEQ ID NO: 1226986 - RNA, 19 nt, Homo sapiens
  misc_RNA (1)...(19): siRNA sense strand
cuguugggauggucaaaga

SEQ ID NO: 1226987 - RNA, 19 nt, Homo sapiens
  misc_RNA (1)...(19): siRNA sense strand
gcauugcugcccuggcuau

SEQ ID NO: 1226988 - RNA, 19 nt, Homo sapiens
  misc_RNA (1)...(19): siRNA sense strand
gcacagacaguuuaaaagg

SEQ ID NO: 1226989 - RNA, 19 nt, Homo sapiens
  misc_RNA (1)...(19): siRNA sense strand
gguucgcacagacaguuua

SEQ ID NO: 1226990 - RNA, 19 nt, Homo sapiens
  misc_RNA (1)...(19): siRNA sense strand
aagaagugguucgcacaga

SEQ ID NO: 1226991 - RNA, 19 nt, Homo sapiens
  misc_RNA (1)...(19): siRNA sense strand
gacaagcgucgccggaauc

SEQ ID NO: 1226992 - RNA, 19 nt, Homo sapiens
  misc_RNA (1)...(19): siRNA sense strand
gaacugcaaaacaagauug

SEQ ID NO: 1226993 - RNA, 19 nt, Homo sapiens
  misc_RNA (1)...(19): siRNA sense strand
gaacuguuuguccuucgau

SEQ ID NO: 1226994 - RNA, 19 nt, Homo sapiens
  misc_RNA (1)...(19): siRNA sense strand
gcaaaauacguguguuuag

SEQ ID NO: 1226995 - RNA, 19 nt, Homo sapiens
  misc_RNA (1)...(19): siRNA sense strand
gcacaggcuacgacgucaa

SEQ ID NO: 1226996 - RNA, 19 nt, Homo sapiens
  misc_RNA (1)...(19): siRNA sense strand
cauuaagguagaagacauu

SEQ ID NO: 1226997 - RNA, 19 nt, Homo sapiens
  misc_RNA (1)...(19): siRNA sense strand
guacugccgauuucagaag

SEQ ID NO: 1226998 - RNA, 19 nt, Homo sapiens
  misc_RNA (1)...(19): siRNA sense strand
ccugaaauuggaagacuug

SEQ ID NO: 1226999 - RNA, 19 nt, Homo sapiens
  misc_RNA (1)...(19): siRNA sense strand
uaagguagaagacauucag

SEQ ID NO: 1227000 - RNA, 19 nt, Homo sapiens
  misc_RNA (1)...(19): siRNA sense strand
caacuuccaccagaacuac

SEQ ID NO: 1227001 - RNA, 19 nt, Homo sapiens
  misc_RNA (1)...(19): siRNA sense strand
guccuucgauuagcauaca

SEQ ID NO: 1227002 - RNA, 19 nt, Homo sapiens
  misc_RNA (1)...(19): siRNA sense strand
gaugacacccagcauaucc

SEQ ID NO: 1227003 - RNA, 19 nt, Homo sapiens
  misc_RNA (1)...(19): siRNA sense strand
uaucaaaugaguggagaug

SEQ ID NO: 1227004 - RNA, 19 nt, Homo sapiens
  misc_RNA (1)...(19): siRNA sense strand
guucgcacagacaguuuaa

SEQ ID NO: 1227005 - RNA, 19 nt, Homo sapiens
  misc_RNA (1)...(19): siRNA sense strand
ggugucuaguugccagaug

SEQ ID NO: 1227006 - RNA, 19 nt, Homo sapiens
  misc_RNA (1)...(19): siRNA sense strand
ucucaaagaccacgugacu

SEQ ID NO: 1227007 - RNA, 19 nt, Homo sapiens
  misc_RNA (1)...(19): siRNA sense strand
gccggaaucgcugucagua

SEQ ID NO: 1227008 - RNA, 19 nt, Homo sapiens
  misc_RNA (1)...(19): siRNA sense strand
caaaauacguguguuuagc

SEQ ID NO: 1227009 - RNA, 19 nt, Homo sapiens
  misc_RNA (1)...(19): siRNA sense strand
gaacauggcugaccucaua

SEQ ID NO: 1227010 - RNA, 19 nt, Homo sapiens
  misc_RNA (1)...(19): siRNA sense strand
ggaccacgcugcucuauuu

SEQ ID NO: 1227011 - RNA, 19 nt, Homo sapiens
  misc_RNA (1)...(19): siRNA sense strand
caaagcagaugcaggagaa

SEQ ID NO: 1227012 - RNA, 19 nt, Homo sapiens
  misc_RNA (1)...(19): siRNA sense strand
ucagagagcugcagcauag

SEQ ID NO: 1227013 - RNA, 19 nt, Homo sapiens
  misc_RNA (1)...(19): siRNA sense strand
ggacgaggacuauuacaaa

SEQ ID NO: 1227014 - RNA, 19 nt, Homo sapiens
  misc_RNA (1)...(19): siRNA sense strand
uggcagagcucaucaacaa

SEQ ID NO: 1227015 - RNA, 19 nt, Homo sapiens
  misc_RNA (1)...(19): siRNA sense strand
auucaaggauggaacauua

SEQ ID NO: 1227016 - RNA, 19 nt, Homo sapiens
  misc_RNA (1)...(19): siRNA sense strand
agaaacugcucaacaaaga

SEQ ID NO: 1227017 - RNA, 19 nt, Homo sapiens
  misc_RNA (1)...(19): siRNA sense strand
caccaaggcucucucauca

SEQ ID NO: 1227018 - RNA, 19 nt, Homo sapiens
  misc_RNA (1)...(19): siRNA sense strand
caucauccauccuaggaaa

SEQ ID NO: 1227019 - RNA, 19 nt, Homo sapiens
  misc_RNA (1)...(19): siRNA sense strand
gaacaagaacucccugaag

SEQ ID NO: 1227020 - RNA, 19 nt, Homo sapiens
  misc_RNA (1)...(19): siRNA sense strand
ccaaggcucucucaucauc

SEQ ID NO: 1227021 - RNA, 19 nt, Homo sapiens
  misc_RNA (1)...(19): siRNA sense strand
gcccggagguccacaguau

SEQ ID NO: 1227022 - RNA, 19 nt, Homo sapiens
  misc_RNA (1)...(19): siRNA sense strand
ccacccaccugcagaguga

SEQ ID NO: 1227023 - RNA, 19 nt, Homo sapiens
  misc_RNA (1)...(19): siRNA sense strand
gaugugguccugaaucgua

SEQ ID NO: 1227024 - RNA, 19 nt, Homo sapiens
  misc_RNA (1)...(19): siRNA sense strand
gagcccaccuggaucauca

SEQ ID NO: 1227025 - RNA, 19 nt, Homo sapiens
  misc_RNA (1)...(19): siRNA sense strand
gcagagcucaucaacaaga

SEQ ID NO: 1227026 - RNA, 19 nt, Homo sapiens
  misc_RNA (1)...(19): siRNA sense strand
gcagaugcaggagaacuua

SEQ ID NO: 1227027 - RNA, 19 nt, Homo sapiens
  misc_RNA (1)...(19): siRNA sense strand
ggacugaugaccuggugua

SEQ ID NO: 1227028 - RNA, 19 nt, Homo sapiens
  misc_RNA (1)...(19): siRNA sense strand
gugaagaugugguccugaa

SEQ ID NO: 1227029 - RNA, 19 nt, Homo sapiens
  misc_RNA (1)...(19): siRNA sense strand
caacuucgagcuccuagaa

SEQ ID NO: 1227030 - RNA, 19 nt, Homo sapiens
  misc_RNA (1)...(19): siRNA sense strand
gcccaagccugaucucugu

SEQ ID NO: 1227031 - RNA, 19 nt, Homo sapiens
  misc_RNA (1)...(19): siRNA sense strand
uaggaaagauggugagaag

SEQ ID NO: 1227032 - RNA, 19 nt, Homo sapiens
  misc_RNA (1)...(19): siRNA sense strand
gucaagaccugcaagaaag

SEQ ID NO: 1227033 - RNA, 19 nt, Homo sapiens
  misc_RNA (1)...(19): siRNA sense strand
aaacaguuccggaagauga

SEQ ID NO: 1227034 - RNA, 19 nt, Homo sapiens
  misc_RNA (1)...(19): siRNA sense strand
gcgaggcagugaucaugaa

SEQ ID NO: 1227035 - RNA, 19 nt, Homo sapiens
  misc_RNA (1)...(19): siRNA sense strand
cucaaggucugcuucuaua

SEQ ID NO: 1227036 - RNA, 19 nt, Homo sapiens
  misc_RNA (1)...(19): siRNA sense strand
cccagaaacugcucaacaa

SEQ ID NO: 1227037 - RNA, 19 nt, Homo sapiens
  misc_RNA (1)...(19): siRNA sense strand
gaggaggagugcgucauga

SEQ ID NO: 1227038 - RNA, 19 nt, Homo sapiens
  misc_RNA (1)...(19): siRNA sense strand
gaacuuaaagcccaaacag

SEQ ID NO: 1227039 - RNA, 19 nt, Homo sapiens
  misc_RNA (1)...(19): siRNA sense strand
ggcaaauccuggacaaaca

SEQ ID NO: 1227040 - RNA, 19 nt, Homo sapiens
  misc_RNA (1)...(19): siRNA sense strand
gcaccaaggcucucucauc

SEQ ID NO: 1227041 - RNA, 19 nt, Homo sapiens
  misc_RNA (1)...(19): siRNA sense strand
gcuaugggcugaggcugaa

SEQ ID NO: 1227042 - RNA, 19 nt, Homo sapiens
  misc_RNA (1)...(19): siRNA sense strand
gccgugaccucccuaagug

SEQ ID NO: 1227043 - RNA, 19 nt, Homo sapiens
  misc_RNA (1)...(19): siRNA sense strand
gaguaaaguugggcacguu

SEQ ID NO: 1227044 - RNA, 19 nt, Homo sapiens
  misc_RNA (1)...(19): siRNA sense strand
ugcuggagcucaagaauga

SEQ ID NO: 1227045 - RNA, 19 nt, Homo sapiens
  misc_RNA (1)...(19): siRNA sense strand
agaaggacauugccaugga

SEQ ID NO: 1227046 - RNA, 19 nt, Homo sapiens
  misc_RNA (1)...(19): siRNA sense strand
ucagugacguuuaucagau

SEQ ID NO: 1227047 - RNA, 19 nt, Homo sapiens
  misc_RNA (1)...(19): siRNA sense strand
gcaaagccauggccuaccu

SEQ ID NO: 1227048 - RNA, 19 nt, Homo sapiens
  misc_RNA (1)...(19): siRNA sense strand
cagcuucaauccugggaaa

SEQ ID NO: 1227049 - RNA, 19 nt, Homo sapiens
  misc_RNA (1)...(19): siRNA sense strand
ggaucaucauggaauugua

SEQ ID NO: 1227050 - RNA, 19 nt, Homo sapiens
  misc_RNA (1)...(19): siRNA sense strand
ccaaacaguuccggaagau

SEQ ID NO: 1227051 - RNA, 19 nt, Homo sapiens
  misc_RNA (1)...(19): siRNA sense strand
ccaagguucuggccaaucu

SEQ ID NO: 1227052 - RNA, 19 nt, Homo sapiens
  misc_RNA (1)...(19): siRNA sense strand
ggaacaagaacucccugaa

SEQ ID NO: 1227053 - RNA, 19 nt, Homo sapiens
  misc_RNA (1)...(19): siRNA sense strand
ccaccuggaucaucaugga

SEQ ID NO: 1227054 - RNA, 19 nt, Homo sapiens
  misc_RNA (1)...(19): siRNA sense strand
ggacgugcguauccucaag

SEQ ID NO: 1227055 - RNA, 19 nt, Homo sapiens
  misc_RNA (1)...(19): siRNA sense strand
gacgaggacuauuacaaag

SEQ ID NO: 1227056 - RNA, 19 nt, Homo sapiens
  misc_RNA (1)...(19): siRNA sense strand
gaucaucauggaauuguau

SEQ ID NO: 1227057 - RNA, 19 nt, Homo sapiens
  misc_RNA (1)...(19): siRNA sense strand
gaagaugugguccugaauc

SEQ ID NO: 1227058 - RNA, 19 nt, Homo sapiens
  misc_RNA (1)...(19): siRNA sense strand
ggaggaggacuucauccaa

SEQ ID NO: 1227059 - RNA, 19 nt, Homo sapiens
  misc_RNA (1)...(19): siRNA sense strand
gaucgagggcacccagaaa

SEQ ID NO: 1227060 - RNA, 19 nt, Homo sapiens
  misc_RNA (1)...(19): siRNA sense strand
cuaccgcugugaacucauu

SEQ ID NO: 1227061 - RNA, 19 nt, Homo sapiens
  misc_RNA (1)...(19): siRNA sense strand
uuacaaagccucugugacu

SEQ ID NO: 1227062 - RNA, 19 nt, Homo sapiens
  misc_RNA (1)...(19): siRNA sense strand
ugucaagaccugcaagaaa

SEQ ID NO: 1227063 - RNA, 19 nt, Homo sapiens
  misc_RNA (1)...(19): siRNA sense strand
aggcagugaucaugaagaa

SEQ ID NO: 1227064 - RNA, 19 nt, Homo sapiens
  misc_RNA (1)...(19): siRNA sense strand
ccagaaacugcucaacaaa

SEQ ID NO: 1227065 - RNA, 19 nt, Homo sapiens
  misc_RNA (1)...(19): siRNA sense strand
cagcauagagucagacauc

SEQ ID NO: 1227066 - RNA, 19 nt, Homo sapiens
  misc_RNA (1)...(19): siRNA sense strand
gaagccgaguggagguaug

SEQ ID NO: 1227067 - RNA, 19 nt, Homo sapiens
  misc_RNA (1)...(19): siRNA sense strand
gaccugguguaccucaaug

SEQ ID NO: 1227068 - RNA, 19 nt, Homo sapiens
  misc_RNA (1)...(19): siRNA sense strand
cagccucagugacguuuau

SEQ ID NO: 1227069 - RNA, 19 nt, Homo sapiens
  misc_RNA (1)...(19): siRNA sense strand
ggacaacaaggagaaguuc

SEQ ID NO: 1227070 - RNA, 19 nt, Homo sapiens
  misc_RNA (1)...(19): siRNA sense strand
gagcucaggcgguucuuca

SEQ ID NO: 1227071 - RNA, 19 nt, Homo sapiens
  misc_RNA (1)...(19): siRNA sense strand
ggucuuucccgguacauug

SEQ ID NO: 1227072 - RNA, 19 nt, Homo sapiens
  misc_RNA (1)...(19): siRNA sense strand
gcagagauucccgacgaaa

SEQ ID NO: 1227073 - RNA, 19 nt, Homo sapiens
  misc_RNA (1)...(19): siRNA sense strand
ucagacaucuacgcagaga

SEQ ID NO: 1227074 - RNA, 19 nt, Homo sapiens
  misc_RNA (1)...(19): siRNA sense strand
gugaggugcaggacaagua

SEQ ID NO: 1227075 - RNA, 19 nt, Homo sapiens
  misc_RNA (1)...(19): siRNA sense strand
acaaacagcagaagcagau

SEQ ID NO: 1227076 - RNA, 19 nt, Homo sapiens
  misc_RNA (1)...(19): siRNA sense strand
uuuaucagauggagaagga

SEQ ID NO: 1227077 - RNA, 19 nt, Homo sapiens
  misc_RNA (1)...(19): siRNA sense strand
uagcagaggcugagaacau

SEQ ID NO: 1227078 - RNA, 19 nt, Homo sapiens
  misc_RNA (1)...(19): siRNA sense strand
ggaggaggagugcgucaug

SEQ ID NO: 1227079 - RNA, 19 nt, Homo sapiens
  misc_RNA (1)...(19): siRNA sense strand
aggcgguucuucaaggaua

SEQ ID NO: 1227080 - RNA, 19 nt, Homo sapiens
  misc_RNA (1)...(19): siRNA sense strand
uugaggacgaggacuauua

SEQ ID NO: 1227081 - RNA, 19 nt, Homo sapiens
  misc_RNA (1)...(19): siRNA sense strand
cccaaacaguuccggaaga

SEQ ID NO: 1227082 - RNA, 19 nt, Homo sapiens
  misc_RNA (1)...(19): siRNA sense strand
uguacucacugcagauaug

SEQ ID NO: 1227083 - RNA, 19 nt, Homo sapiens
  misc_RNA (1)...(19): siRNA sense strand
gaggagcccaccuggauca

SEQ ID NO: 1227084 - RNA, 19 nt, Homo sapiens
  misc_RNA (1)...(19): siRNA sense strand
gcaggacaaguaugagugu

SEQ ID NO: 1227085 - RNA, 19 nt, Homo sapiens
  misc_RNA (1)...(19): siRNA sense strand
ucaagaaugagcucuguca

SEQ ID NO: 1227086 - RNA, 19 nt, Homo sapiens
  misc_RNA (1)...(19): siRNA sense strand
cacaugaaguccgaugaga

SEQ ID NO: 1227087 - RNA, 19 nt, Homo sapiens
  misc_RNA (1)...(19): siRNA sense strand
gagcgaggcagugaucaug

SEQ ID NO: 1227088 - RNA, 19 nt, Homo sapiens
  misc_RNA (1)...(19): siRNA sense strand
caacaaggagaaguucaug

SEQ ID NO: 1227089 - RNA, 19 nt, Homo sapiens
  misc_RNA (1)...(19): siRNA sense strand
aagcagaucagguccauca

SEQ ID NO: 1227090 - RNA, 19 nt, Homo sapiens
  misc_RNA (1)...(19): siRNA sense strand
acuuaaagcccaaacaguu

SEQ ID NO: 1227091 - RNA, 19 nt, Homo sapiens
  misc_RNA (1)...(19): siRNA sense strand
gcacaugaaguccgaugag

SEQ ID NO: 1227092 - RNA, 19 nt, Homo sapiens
  misc_RNA (1)...(19): siRNA sense strand
guccaccgguccuuuauac

SEQ ID NO: 1227093 - RNA, 19 nt, Homo sapiens
  misc_RNA (1)...(19): siRNA sense strand
ugugggagauccugagcuu

SEQ ID NO: 1227094 - RNA, 19 nt, Homo sapiens
  misc_RNA (1)...(19): siRNA sense strand
caugaaguccgaugagauc

SEQ ID NO: 1227095 - RNA, 19 nt, Homo sapiens
  misc_RNA (1)...(19): siRNA sense strand
ccauccagcccacagcuaa

SEQ ID NO: 1227096 - RNA, 19 nt, Homo sapiens
  misc_RNA (1)...(19): siRNA sense strand
cagugacguuuaucagaug

SEQ ID NO: 1227097 - RNA, 19 nt, Homo sapiens
  misc_RNA (1)...(19): siRNA sense strand
gcuguacucacugcagaua

SEQ ID NO: 1227098 - RNA, 19 nt, Homo sapiens
  misc_RNA (1)...(19): siRNA sense strand
gcauugcccgugaagaugu

SEQ ID NO: 1227099 - RNA, 19 nt, Homo sapiens
  misc_RNA (1)...(19): siRNA sense strand
guacuucagcugggcauug

SEQ ID NO: 1227100 - RNA, 19 nt, Homo sapiens
  misc_RNA (1)...(19): siRNA sense strand
aggagugcgucaugaaguu

SEQ ID NO: 1227101 - RNA, 19 nt, Homo sapiens
  misc_RNA (1)...(19): siRNA sense strand
ggagaccuaccgcugugaa

SEQ ID NO: 1227102 - RNA, 19 nt, Homo sapiens
  misc_RNA (1)...(19): siRNA sense strand
ccucaaggucugcuucuau

SEQ ID NO: 1227103 - RNA, 19 nt, Homo sapiens
  misc_RNA (1)...(19): siRNA sense strand
ugggugaggugcaggacaa

SEQ ID NO: 1227104 - RNA, 19 nt, Homo sapiens
  misc_RNA (1)...(19): siRNA sense strand
cuccaaagcugcaguucca

SEQ ID NO: 1227105 - RNA, 19 nt, Homo sapiens
  misc_RNA (1)...(19): siRNA sense strand
ccaaccuccuggcuccaaa

SEQ ID NO: 1227106 - RNA, 19 nt, Homo sapiens
  misc_RNA (1)...(19): siRNA sense strand
ugggagauccugagcuuug

SEQ ID NO: 1227107 - RNA, 19 nt, Homo sapiens
  misc_RNA (1)...(19): siRNA sense strand
acuucaaacuggucaaaug

SEQ ID NO: 1227108 - RNA, 19 nt, Homo sapiens
  misc_RNA (1)...(19): siRNA sense strand
gggauccgccagcugacua

SEQ ID NO: 1227109 - RNA, 19 nt, Homo sapiens
  misc_RNA (1)...(19): siRNA sense strand
gaacauggcugaccucaua

SEQ ID NO: 1227110 - RNA, 19 nt, Homo sapiens
  misc_RNA (1)...(19): siRNA sense strand
ggaccacgcugcucuauuu

SEQ ID NO: 1227111 - RNA, 19 nt, Homo sapiens
  misc_RNA (1)...(19): siRNA sense strand
caaagcagaugcaggagaa

SEQ ID NO: 1227112 - RNA, 19 nt, Homo sapiens
  misc_RNA (1)...(19): siRNA sense strand
ucagagagcugcagcauag

SEQ ID NO: 1227113 - RNA, 19 nt, Homo sapiens
  misc_RNA (1)...(19): siRNA sense strand
ggacgaggacuauuacaaa

SEQ ID NO: 1227114 - RNA, 19 nt, Homo sapiens
  misc_RNA (1)...(19): siRNA sense strand
uggcagagcucaucaacaa

SEQ ID NO: 1227115 - RNA, 19 nt, Homo sapiens
  misc_RNA (1)...(19): siRNA sense strand
auucaaggauggaacauua

SEQ ID NO: 1227116 - RNA, 19 nt, Homo sapiens
  misc_RNA (1)...(19): siRNA sense strand
agaaacugcucaacaaaga

SEQ ID NO: 1227117 - RNA, 19 nt, Homo sapiens
  misc_RNA (1)...(19): siRNA sense strand
caccaaggcucucucauca

SEQ ID NO: 1227118 - RNA, 19 nt, Homo sapiens
  misc_RNA (1)...(19): siRNA sense strand
caucauccauccuaggaaa

SEQ ID NO: 1227119 - RNA, 19 nt, Homo sapiens
  misc_RNA (1)...(19): siRNA sense strand
gaacaagaacucccugaag

SEQ ID NO: 1227120 - RNA, 19 nt, Homo sapiens
  misc_RNA (1)...(19): siRNA sense strand
ccaaggcucucucaucauc

SEQ ID NO: 1227121 - RNA, 19 nt, Homo sapiens
  misc_RNA (1)...(19): siRNA sense strand
gcccggagguccacaguau

SEQ ID NO: 1227122 - RNA, 19 nt, Homo sapiens
  misc_RNA (1)...(19): siRNA sense strand
ccacccaccugcagaguga

SEQ ID NO: 1227123 - RNA, 19 nt, Homo sapiens
  misc_RNA (1)...(19): siRNA sense strand
gaugugguccugaaucgua

SEQ ID NO: 1227124 - RNA, 19 nt, Homo sapiens
  misc_RNA (1)...(19): siRNA sense strand
gagcccaccuggaucauca

SEQ ID NO: 1227125 - RNA, 19 nt, Homo sapiens
  misc_RNA (1)...(19): siRNA sense strand
gcagagcucaucaacaaga

SEQ ID NO: 1227126 - RNA, 19 nt, Homo sapiens
  misc_RNA (1)...(19): siRNA sense strand
gcagaugcaggagaacuua

SEQ ID NO: 1227127 - RNA, 19 nt, Homo sapiens
  misc_RNA (1)...(19): siRNA sense strand
ggacugaugaccuggugua

SEQ ID NO: 1227128 - RNA, 19 nt, Homo sapiens
  misc_RNA (1)...(19): siRNA sense strand
gugaagaugugguccugaa

SEQ ID NO: 1227129 - RNA, 19 nt, Homo sapiens
  misc_RNA (1)...(19): siRNA sense strand
caacuucgagcuccuagaa

SEQ ID NO: 1227130 - RNA, 19 nt, Homo sapiens
  misc_RNA (1)...(19): siRNA sense strand
gcccaagccugaucucugu

SEQ ID NO: 1227131 - RNA, 19 nt, Homo sapiens
  misc_RNA (1)...(19): siRNA sense strand
uaggaaagauggugagaag

SEQ ID NO: 1227132 - RNA, 19 nt, Homo sapiens
  misc_RNA (1)...(19): siRNA sense strand
gucaagaccugcaagaaag

SEQ ID NO: 1227133 - RNA, 19 nt, Homo sapiens
  misc_RNA (1)...(19): siRNA sense strand
aaacaguuccggaagauga

SEQ ID NO: 1227134 - RNA, 19 nt, Homo sapiens
  misc_RNA (1)...(19): siRNA sense strand
gcgaggcagugaucaugaa

SEQ ID NO: 1227135 - RNA, 19 nt, Homo sapiens
  misc_RNA (1)...(19): siRNA sense strand
cucaaggucugcuucuaua

SEQ ID NO: 1227136 - RNA, 19 nt, Homo sapiens
  misc_RNA (1)...(19): siRNA sense strand
cccagaaacugcucaacaa

SEQ ID NO: 1227137 - RNA, 19 nt, Homo sapiens
  misc_RNA (1)...(19): siRNA sense strand
gaggaggagugcgucauga

SEQ ID NO: 1227138 - RNA, 19 nt, Homo sapiens
  misc_RNA (1)...(19): siRNA sense strand
gaacuuaaagcccaaacag

SEQ ID NO: 1227139 - RNA, 19 nt, Homo sapiens
  misc_RNA (1)...(19): siRNA sense strand
ggcaaauccuggacaaaca

SEQ ID NO: 1227140 - RNA, 19 nt, Homo sapiens
  misc_RNA (1)...(19): siRNA sense strand
gcaccaaggcucucucauc

SEQ ID NO: 1227141 - RNA, 19 nt, Homo sapiens
  misc_RNA (1)...(19): siRNA sense strand
gcuaugggcugaggcugaa

SEQ ID NO: 1227142 - RNA, 19 nt, Homo sapiens
  misc_RNA (1)...(19): siRNA sense strand
gccgugaccucccuaagug

SEQ ID NO: 1227143 - RNA, 19 nt, Homo sapiens
  misc_RNA (1)...(19): siRNA sense strand
gaguaaaguugggcacguu

SEQ ID NO: 1227144 - RNA, 19 nt, Homo sapiens
  misc_RNA (1)...(19): siRNA sense strand
ugcuggagcucaagaauga

SEQ ID NO: 1227145 - RNA, 19 nt, Homo sapiens
  misc_RNA (1)...(19): siRNA sense strand
agaaggacauugccaugga

SEQ ID NO: 1227146 - RNA, 19 nt, Homo sapiens
  misc_RNA (1)...(19): siRNA sense strand
ucagugacguuuaucagau

SEQ ID NO: 1227147 - RNA, 19 nt, Homo sapiens
  misc_RNA (1)...(19): siRNA sense strand
gcaaagccauggccuaccu

SEQ ID NO: 1227148 - RNA, 19 nt, Homo sapiens
  misc_RNA (1)...(19): siRNA sense strand
cagcuucaauccugggaaa

SEQ ID NO: 1227149 - RNA, 19 nt, Homo sapiens
  misc_RNA (1)...(19): siRNA sense strand
ggaucaucauggaauugua

SEQ ID NO: 1227150 - RNA, 19 nt, Homo sapiens
  misc_RNA (1)...(19): siRNA sense strand
ccaaacaguuccggaagau

SEQ ID NO: 1227151 - RNA, 19 nt, Homo sapiens
  misc_RNA (1)...(19): siRNA sense strand
ccaagguucuggccaaucu

SEQ ID NO: 1227152 - RNA, 19 nt, Homo sapiens
  misc_RNA (1)...(19): siRNA sense strand
ggaacaagaacucccugaa

SEQ ID NO: 1227153 - RNA, 19 nt, Homo sapiens
  misc_RNA (1)...(19): siRNA sense strand
ccaccuggaucaucaugga

SEQ ID NO: 1227154 - RNA, 19 nt, Homo sapiens
  misc_RNA (1)...(19): siRNA sense strand
ggacgugcguauccucaag

SEQ ID NO: 1227155 - RNA, 19 nt, Homo sapiens
  misc_RNA (1)...(19): siRNA sense strand
gacgaggacuauuacaaag

SEQ ID NO: 1227156 - RNA, 19 nt, Homo sapiens
  misc_RNA (1)...(19): siRNA sense strand
gaucaucauggaauuguau

SEQ ID NO: 1227157 - RNA, 19 nt, Homo sapiens
  misc_RNA (1)...(19): siRNA sense strand
gaagaugugguccugaauc

SEQ ID NO: 1227158 - RNA, 19 nt, Homo sapiens
  misc_RNA (1)...(19): siRNA sense strand
ggaggaggacuucauccaa

SEQ ID NO: 1227159 - RNA, 19 nt, Homo sapiens
  misc_RNA (1)...(19): siRNA sense strand
gaucgagggcacccagaaa

SEQ ID NO: 1227160 - RNA, 19 nt, Homo sapiens
  misc_RNA (1)...(19): siRNA sense strand
cuaccgcugugaacucauu

SEQ ID NO: 1227161 - RNA, 19 nt, Homo sapiens
  misc_RNA (1)...(19): siRNA sense strand
uuacaaagccucugugacu

SEQ ID NO: 1227162 - RNA, 19 nt, Homo sapiens
  misc_RNA (1)...(19): siRNA sense strand
ugucaagaccugcaagaaa

SEQ ID NO: 1227163 - RNA, 19 nt, Homo sapiens
  misc_RNA (1)...(19): siRNA sense strand
aggcagugaucaugaagaa

SEQ ID NO: 1227164 - RNA, 19 nt, Homo sapiens
  misc_RNA (1)...(19): siRNA sense strand
ccagaaacugcucaacaaa

SEQ ID NO: 1227165 - RNA, 19 nt, Homo sapiens
  misc_RNA (1)...(19): siRNA sense strand
cagcauagagucagacauc

SEQ ID NO: 1227166 - RNA, 19 nt, Homo sapiens
  misc_RNA (1)...(19): siRNA sense strand
gaagccgaguggagguaug

SEQ ID NO: 1227167 - RNA, 19 nt, Homo sapiens
  misc_RNA (1)...(19): siRNA sense strand
gaccugguguaccucaaug

SEQ ID NO: 1227168 - RNA, 19 nt, Homo sapiens
  misc_RNA (1)...(19): siRNA sense strand
cagccucagugacguuuau

SEQ ID NO: 1227169 - RNA, 19 nt, Homo sapiens
  misc_RNA (1)...(19): siRNA sense strand
ggacaacaaggagaaguuc

SEQ ID NO: 1227170 - RNA, 19 nt, Homo sapiens
  misc_RNA (1)...(19): siRNA sense strand
gagcucaggcgguucuuca

SEQ ID NO: 1227171 - RNA, 19 nt, Homo sapiens
  misc_RNA (1)...(19): siRNA sense strand
ggucuuucccgguacauug

SEQ ID NO: 1227172 - RNA, 19 nt, Homo sapiens
  misc_RNA (1)...(19): siRNA sense strand
gcagagauucccgacgaaa

SEQ ID NO: 1227173 - RNA, 19 nt, Homo sapiens
  misc_RNA (1)...(19): siRNA sense strand
ucagacaucuacgcagaga

SEQ ID NO: 1227174 - RNA, 19 nt, Homo sapiens
  misc_RNA (1)...(19): siRNA sense strand
gugaggugcaggacaagua

SEQ ID NO: 1227175 - RNA, 19 nt, Homo sapiens
  misc_RNA (1)...(19): siRNA sense strand
acaaacagcagaagcagau

SEQ ID NO: 1227176 - RNA, 19 nt, Homo sapiens
  misc_RNA (1)...(19): siRNA sense strand
uuuaucagauggagaagga

SEQ ID NO: 1227177 - RNA, 19 nt, Homo sapiens
  misc_RNA (1)...(19): siRNA sense strand
uagcagaggcugagaacau

SEQ ID NO: 1227178 - RNA, 19 nt, Homo sapiens
  misc_RNA (1)...(19): siRNA sense strand
ggaggaggagugcgucaug

SEQ ID NO: 1227179 - RNA, 19 nt, Homo sapiens
  misc_RNA (1)...(19): siRNA sense strand
aggcgguucuucaaggaua

SEQ ID NO: 1227180 - RNA, 19 nt, Homo sapiens
  misc_RNA (1)...(19): siRNA sense strand
uugaggacgaggacuauua

SEQ ID NO: 1227181 - RNA, 19 nt, Homo sapiens
  misc_RNA (1)...(19): siRNA sense strand
cccaaacaguuccggaaga

SEQ ID NO: 1227182 - RNA, 19 nt, Homo sapiens
  misc_RNA (1)...(19): siRNA sense strand
uguacucacugcagauaug

SEQ ID NO: 1227183 - RNA, 19 nt, Homo sapiens
  misc_RNA (1)...(19): siRNA sense strand
gaggagcccaccuggauca

SEQ ID NO: 1227184 - RNA, 19 nt, Homo sapiens
  misc_RNA (1)...(19): siRNA sense strand
gcaggacaaguaugagugu

SEQ ID NO: 1227185 - RNA, 19 nt, Homo sapiens
  misc_RNA (1)...(19): siRNA sense strand
ucaagaaugagcucuguca

SEQ ID NO: 1227186 - RNA, 19 nt, Homo sapiens
  misc_RNA (1)...(19): siRNA sense strand
cacaugaaguccgaugaga

SEQ ID NO: 1227187 - RNA, 19 nt, Homo sapiens
  misc_RNA (1)...(19): siRNA sense strand
gagcgaggcagugaucaug

SEQ ID NO: 1227188 - RNA, 19 nt, Homo sapiens
  misc_RNA (1)...(19): siRNA sense strand
caacaaggagaaguucaug

SEQ ID NO: 1227189 - RNA, 19 nt, Homo sapiens
  misc_RNA (1)...(19): siRNA sense strand
aagcagaucagguccauca

SEQ ID NO: 1227190 - RNA, 19 nt, Homo sapiens
  misc_RNA (1)...(19): siRNA sense strand
acuuaaagcccaaacaguu

SEQ ID NO: 1227191 - RNA, 19 nt, Homo sapiens
  misc_RNA (1)...(19): siRNA sense strand
gcacaugaaguccgaugag

SEQ ID NO: 1227192 - RNA, 19 nt, Homo sapiens
  misc_RNA (1)...(19): siRNA sense strand
guccaccgguccuuuauac

SEQ ID NO: 1227193 - RNA, 19 nt, Homo sapiens
  misc_RNA (1)...(19): siRNA sense strand
ugugggagauccugagcuu

SEQ ID NO: 1227194 - RNA, 19 nt, Homo sapiens
  misc_RNA (1)...(19): siRNA sense strand
caugaaguccgaugagauc

SEQ ID NO: 1227195 - RNA, 19 nt, Homo sapiens
  misc_RNA (1)...(19): siRNA sense strand
ccauccagcccacagcuaa

SEQ ID NO: 1227196 - RNA, 19 nt, Homo sapiens
  misc_RNA (1)...(19): siRNA sense strand
cagugacguuuaucagaug

SEQ ID NO: 1227197 - RNA, 19 nt, Homo sapiens
  misc_RNA (1)...(19): siRNA sense strand
gcuguacucacugcagaua

SEQ ID NO: 1227198 - RNA, 19 nt, Homo sapiens
  misc_RNA (1)...(19): siRNA sense strand
gcauugcccgugaagaugu

SEQ ID NO: 1227199 - RNA, 19 nt, Homo sapiens
  misc_RNA (1)...(19): siRNA sense strand
guacuucagcugggcauug

SEQ ID NO: 1227200 - RNA, 19 nt, Homo sapiens
  misc_RNA (1)...(19): siRNA sense strand
aggagugcgucaugaaguu

SEQ ID NO: 1227201 - RNA, 19 nt, Homo sapiens
  misc_RNA (1)...(19): siRNA sense strand
ggagaccuaccgcugugaa

SEQ ID NO: 1227202 - RNA, 19 nt, Homo sapiens
  misc_RNA (1)...(19): siRNA sense strand
ccucaaggucugcuucuau

SEQ ID NO: 1227203 - RNA, 19 nt, Homo sapiens
  misc_RNA (1)...(19): siRNA sense strand
ugggugaggugcaggacaa

SEQ ID NO: 1227204 - RNA, 19 nt, Homo sapiens
  misc_RNA (1)...(19): siRNA sense strand
cuccaaagcugcaguucca

SEQ ID NO: 1227205 - RNA, 19 nt, Homo sapiens
  misc_RNA (1)...(19): siRNA sense strand
ccaaccuccuggcuccaaa

SEQ ID NO: 1227206 - RNA, 19 nt, Homo sapiens
  misc_RNA (1)...(19): siRNA sense strand
ugggagauccugagcuuug

SEQ ID NO: 1227207 - RNA, 19 nt, Homo sapiens
  misc_RNA (1)...(19): siRNA sense strand
acuucaaacuggucaaaug

SEQ ID NO: 1227208 - RNA, 19 nt, Homo sapiens
  misc_RNA (1)...(19): siRNA sense strand
gggauccgccagcugacua

SEQ ID NO: 1227209 - RNA, 19 nt, Homo sapiens
  misc_RNA (1)...(19): siRNA sense strand
gaacauggcugaccucaua

SEQ ID NO: 1227210 - RNA, 19 nt, Homo sapiens
  misc_RNA (1)...(19): siRNA sense strand
ggaccacgcugcucuauuu

SEQ ID NO: 1227211 - RNA, 19 nt, Homo sapiens
  misc_RNA (1)...(19): siRNA sense strand
caaagcagaugcaggagaa

SEQ ID NO: 1227212 - RNA, 19 nt, Homo sapiens
  misc_RNA (1)...(19): siRNA sense strand
ucagagagcugcagcauag

SEQ ID NO: 1227213 - RNA, 19 nt, Homo sapiens
  misc_RNA (1)...(19): siRNA sense strand
ggacgaggacuauuacaaa

SEQ ID NO: 1227214 - RNA, 19 nt, Homo sapiens
  misc_RNA (1)...(19): siRNA sense strand
uggcagagcucaucaacaa

SEQ ID NO: 1227215 - RNA, 19 nt, Homo sapiens
  misc_RNA (1)...(19): siRNA sense strand
auucaaggauggaacauua

SEQ ID NO: 1227216 - RNA, 19 nt, Homo sapiens
  misc_RNA (1)...(19): siRNA sense strand
agaaacugcucaacaaaga

SEQ ID NO: 1227217 - RNA, 19 nt, Homo sapiens
  misc_RNA (1)...(19): siRNA sense strand
caccaaggcucucucauca

SEQ ID NO: 1227218 - RNA, 19 nt, Homo sapiens
  misc_RNA (1)...(19): siRNA sense strand
caucauccauccuaggaaa

SEQ ID NO: 1227219 - RNA, 19 nt, Homo sapiens
  misc_RNA (1)...(19): siRNA sense strand
gaacaagaacucccugaag

SEQ ID NO: 1227220 - RNA, 19 nt, Homo sapiens
  misc_RNA (1)...(19): siRNA sense strand
ccaaggcucucucaucauc

SEQ ID NO: 1227221 - RNA, 19 nt, Homo sapiens
  misc_RNA (1)...(19): siRNA sense strand
gcccggagguccacaguau

SEQ ID NO: 1227222 - RNA, 19 nt, Homo sapiens
  misc_RNA (1)...(19): siRNA sense strand
ccacccaccugcagaguga

SEQ ID NO: 1227223 - RNA, 19 nt, Homo sapiens
  misc_RNA (1)...(19): siRNA sense strand
gaugugguccugaaucgua

SEQ ID NO: 1227224 - RNA, 19 nt, Homo sapiens
  misc_RNA (1)...(19): siRNA sense strand
gagcccaccuggaucauca

SEQ ID NO: 1227225 - RNA, 19 nt, Homo sapiens
  misc_RNA (1)...(19): siRNA sense strand
gcagagcucaucaacaaga

SEQ ID NO: 1227226 - RNA, 19 nt, Homo sapiens
  misc_RNA (1)...(19): siRNA sense strand
gcagaugcaggagaacuua

SEQ ID NO: 1227227 - RNA, 19 nt, Homo sapiens
  misc_RNA (1)...(19): siRNA sense strand
ggacugaugaccuggugua

SEQ ID NO: 1227228 - RNA, 19 nt, Homo sapiens
  misc_RNA (1)...(19): siRNA sense strand
gugaagaugugguccugaa

SEQ ID NO: 1227229 - RNA, 19 nt, Homo sapiens
  misc_RNA (1)...(19): siRNA sense strand
caacuucgagcuccuagaa

SEQ ID NO: 1227230 - RNA, 19 nt, Homo sapiens
  misc_RNA (1)...(19): siRNA sense strand
gcccaagccugaucucugu

SEQ ID NO: 1227231 - RNA, 19 nt, Homo sapiens
  misc_RNA (1)...(19): siRNA sense strand
uaggaaagauggugagaag

SEQ ID NO: 1227232 - RNA, 19 nt, Homo sapiens
  misc_RNA (1)...(19): siRNA sense strand
gucaagaccugcaagaaag

SEQ ID NO: 1227233 - RNA, 19 nt, Homo sapiens
  misc_RNA (1)...(19): siRNA sense strand
aaacaguuccggaagauga

SEQ ID NO: 1227234 - RNA, 19 nt, Homo sapiens
  misc_RNA (1)...(19): siRNA sense strand
gcgaggcagugaucaugaa

SEQ ID NO: 1227235 - RNA, 19 nt, Homo sapiens
  misc_RNA (1)...(19): siRNA sense strand
cucaaggucugcuucuaua

SEQ ID NO: 1227236 - RNA, 19 nt, Homo sapiens
  misc_RNA (1)...(19): siRNA sense strand
cccagaaacugcucaacaa

SEQ ID NO: 1227237 - RNA, 19 nt, Homo sapiens
  misc_RNA (1)...(19): siRNA sense strand
gaggaggagugcgucauga

SEQ ID NO: 1227238 - RNA, 19 nt, Homo sapiens
  misc_RNA (1)...(19): siRNA sense strand
gaacuuaaagcccaaacag

SEQ ID NO: 1227239 - RNA, 19 nt, Homo sapiens
  misc_RNA (1)...(19): siRNA sense strand
ggcaaauccuggacaaaca

SEQ ID NO: 1227240 - RNA, 19 nt, Homo sapiens
  misc_RNA (1)...(19): siRNA sense strand
gcaccaaggcucucucauc

SEQ ID NO: 1227241 - RNA, 19 nt, Homo sapiens
  misc_RNA (1)...(19): siRNA sense strand
gcuaugggcugaggcugaa

SEQ ID NO: 1227242 - RNA, 19 nt, Homo sapiens
  misc_RNA (1)...(19): siRNA sense strand
gccgugaccucccuaagug

SEQ ID NO: 1227243 - RNA, 19 nt, Homo sapiens
  misc_RNA (1)...(19): siRNA sense strand
gaguaaaguugggcacguu

SEQ ID NO: 1227244 - RNA, 19 nt, Homo sapiens
  misc_RNA (1)...(19): siRNA sense strand
ugcuggagcucaagaauga

SEQ ID NO: 1227245 - RNA, 19 nt, Homo sapiens
  misc_RNA (1)...(19): siRNA sense strand
agaaggacauugccaugga

SEQ ID NO: 1227246 - RNA, 19 nt, Homo sapiens
  misc_RNA (1)...(19): siRNA sense strand
ucagugacguuuaucagau

SEQ ID NO: 1227247 - RNA, 19 nt, Homo sapiens
  misc_RNA (1)...(19): siRNA sense strand
gcaaagccauggccuaccu

SEQ ID NO: 1227248 - RNA, 19 nt, Homo sapiens
  misc_RNA (1)...(19): siRNA sense strand
cagcuucaauccugggaaa

SEQ ID NO: 1227249 - RNA, 19 nt, Homo sapiens
  misc_RNA (1)...(19): siRNA sense strand
ggaucaucauggaauugua

SEQ ID NO: 1227250 - RNA, 19 nt, Homo sapiens
  misc_RNA (1)...(19): siRNA sense strand
ccaaacaguuccggaagau

SEQ ID NO: 1227251 - RNA, 19 nt, Homo sapiens
  misc_RNA (1)...(19): siRNA sense strand
ccaagguucuggccaaucu

SEQ ID NO: 1227252 - RNA, 19 nt, Homo sapiens
  misc_RNA (1)...(19): siRNA sense strand
ggaacaagaacucccugaa

SEQ ID NO: 1227253 - RNA, 19 nt, Homo sapiens
  misc_RNA (1)...(19): siRNA sense strand
ccaccuggaucaucaugga

SEQ ID NO: 1227254 - RNA, 19 nt, Homo sapiens
  misc_RNA (1)...(19): siRNA sense strand
ggacgugcguauccucaag

SEQ ID NO: 1227255 - RNA, 19 nt, Homo sapiens
  misc_RNA (1)...(19): siRNA sense strand
gacgaggacuauuacaaag

SEQ ID NO: 1227256 - RNA, 19 nt, Homo sapiens
  misc_RNA (1)...(19): siRNA sense strand
gaucaucauggaauuguau

SEQ ID NO: 1227257 - RNA, 19 nt, Homo sapiens
  misc_RNA (1)...(19): siRNA sense strand
gaagaugugguccugaauc

SEQ ID NO: 1227258 - RNA, 19 nt, Homo sapiens
  misc_RNA (1)...(19): siRNA sense strand
ggaggaggacuucauccaa

SEQ ID NO: 1227259 - RNA, 19 nt, Homo sapiens
  misc_RNA (1)...(19): siRNA sense strand
gaucgagggcacccagaaa

SEQ ID NO: 1227260 - RNA, 19 nt, Homo sapiens
  misc_RNA (1)...(19): siRNA sense strand
cuaccgcugugaacucauu

SEQ ID NO: 1227261 - RNA, 19 nt, Homo sapiens
  misc_RNA (1)...(19): siRNA sense strand
uuacaaagccucugugacu

SEQ ID NO: 1227262 - RNA, 19 nt, Homo sapiens
  misc_RNA (1)...(19): siRNA sense strand
ugucaagaccugcaagaaa

SEQ ID NO: 1227263 - RNA, 19 nt, Homo sapiens
  misc_RNA (1)...(19): siRNA sense strand
aggcagugaucaugaagaa

SEQ ID NO: 1227264 - RNA, 19 nt, Homo sapiens
  misc_RNA (1)...(19): siRNA sense strand
ccagaaacugcucaacaaa

SEQ ID NO: 1227265 - RNA, 19 nt, Homo sapiens
  misc_RNA (1)...(19): siRNA sense strand
cagcauagagucagacauc

SEQ ID NO: 1227266 - RNA, 19 nt, Homo sapiens
  misc_RNA (1)...(19): siRNA sense strand
gaagccgaguggagguaug

SEQ ID NO: 1227267 - RNA, 19 nt, Homo sapiens
  misc_RNA (1)...(19): siRNA sense strand
gaccugguguaccucaaug

SEQ ID NO: 1227268 - RNA, 19 nt, Homo sapiens
  misc_RNA (1)...(19): siRNA sense strand
cagccucagugacguuuau

SEQ ID NO: 1227269 - RNA, 19 nt, Homo sapiens
  misc_RNA (1)...(19): siRNA sense strand
ggacaacaaggagaaguuc

SEQ ID NO: 1227270 - RNA, 19 nt, Homo sapiens
  misc_RNA (1)...(19): siRNA sense strand
gagcucaggcgguucuuca

SEQ ID NO: 1227271 - RNA, 19 nt, Homo sapiens
  misc_RNA (1)...(19): siRNA sense strand
ggucuuucccgguacauug

SEQ ID NO: 1227272 - RNA, 19 nt, Homo sapiens
  misc_RNA (1)...(19): siRNA sense strand
gcagagauucccgacgaaa

SEQ ID NO: 1227273 - RNA, 19 nt, Homo sapiens
  misc_RNA (1)...(19): siRNA sense strand
ucagacaucuacgcagaga

SEQ ID NO: 1227274 - RNA, 19 nt, Homo sapiens
  misc_RNA (1)...(19): siRNA sense strand
gugaggugcaggacaagua

SEQ ID NO: 1227275 - RNA, 19 nt, Homo sapiens
  misc_RNA (1)...(19): siRNA sense strand
acaaacagcagaagcagau

SEQ ID NO: 1227276 - RNA, 19 nt, Homo sapiens
  misc_RNA (1)...(19): siRNA sense strand
uuuaucagauggagaagga

SEQ ID NO: 1227277 - RNA, 19 nt, Homo sapiens
  misc_RNA (1)...(19): siRNA sense strand
uagcagaggcugagaacau

SEQ ID NO: 1227278 - RNA, 19 nt, Homo sapiens
  misc_RNA (1)...(19): siRNA sense strand
ggaggaggagugcgucaug

SEQ ID NO: 1227279 - RNA, 19 nt, Homo sapiens
  misc_RNA (1)...(19): siRNA sense strand
aggcgguucuucaaggaua

SEQ ID NO: 1227280 - RNA, 19 nt, Homo sapiens
  misc_RNA (1)...(19): siRNA sense strand
uugaggacgaggacuauua

SEQ ID NO: 1227281 - RNA, 19 nt, Homo sapiens
  misc_RNA (1)...(19): siRNA sense strand
cccaaacaguuccggaaga

SEQ ID NO: 1227282 - RNA, 19 nt, Homo sapiens
  misc_RNA (1)...(19): siRNA sense strand
uguacucacugcagauaug

SEQ ID NO: 1227283 - RNA, 19 nt, Homo sapiens
  misc_RNA (1)...(19): siRNA sense strand
gaggagcccaccuggauca

SEQ ID NO: 1227284 - RNA, 19 nt, Homo sapiens
  misc_RNA (1)...(19): siRNA sense strand
gcaggacaaguaugagugu

SEQ ID NO: 1227285 - RNA, 19 nt, Homo sapiens
  misc_RNA (1)...(19): siRNA sense strand
ucaagaaugagcucuguca

SEQ ID NO: 1227286 - RNA, 19 nt, Homo sapiens
  misc_RNA (1)...(19): siRNA sense strand
cacaugaaguccgaugaga

SEQ ID NO: 1227287 - RNA, 19 nt, Homo sapiens
  misc_RNA (1)...(19): siRNA sense strand
gagcgaggcagugaucaug

SEQ ID NO: 1227288 - RNA, 19 nt, Homo sapiens
  misc_RNA (1)...(19): siRNA sense strand
caacaaggagaaguucaug

SEQ ID NO: 1227289 - RNA, 19 nt, Homo sapiens
  misc_RNA (1)...(19): siRNA sense strand
aagcagaucagguccauca

SEQ ID NO: 1227290 - RNA, 19 nt, Homo sapiens
  misc_RNA (1)...(19): siRNA sense strand
acuuaaagcccaaacaguu

SEQ ID NO: 1227291 - RNA, 19 nt, Homo sapiens
  misc_RNA (1)...(19): siRNA sense strand
gcacaugaaguccgaugag

SEQ ID NO: 1227292 - RNA, 19 nt, Homo sapiens
  misc_RNA (1)...(19): siRNA sense strand
guccaccgguccuuuauac

SEQ ID NO: 1227293 - RNA, 19 nt, Homo sapiens
  misc_RNA (1)...(19): siRNA sense strand
ugugggagauccugagcuu

SEQ ID NO: 1227294 - RNA, 19 nt, Homo sapiens
  misc_RNA (1)...(19): siRNA sense strand
caugaaguccgaugagauc

SEQ ID NO: 1227295 - RNA, 19 nt, Homo sapiens
  misc_RNA (1)...(19): siRNA sense strand
ccauccagcccacagcuaa

SEQ ID NO: 1227296 - RNA, 19 nt, Homo sapiens
  misc_RNA (1)...(19): siRNA sense strand
cagugacguuuaucagaug

SEQ ID NO: 1227297 - RNA, 19 nt, Homo sapiens
  misc_RNA (1)...(19): siRNA sense strand
gcuguacucacugcagaua

SEQ ID NO: 1227298 - RNA, 19 nt, Homo sapiens
  misc_RNA (1)...(19): siRNA sense strand
gcauugcccgugaagaugu

SEQ ID NO: 1227299 - RNA, 19 nt, Homo sapiens
  misc_RNA (1)...(19): siRNA sense strand
guacuucagcugggcauug

SEQ ID NO: 1227300 - RNA, 19 nt, Homo sapiens
  misc_RNA (1)...(19): siRNA sense strand
aggagugcgucaugaaguu

SEQ ID NO: 1227301 - RNA, 19 nt, Homo sapiens
  misc_RNA (1)...(19): siRNA sense strand
ggagaccuaccgcugugaa

SEQ ID NO: 1227302 - RNA, 19 nt, Homo sapiens
  misc_RNA (1)...(19): siRNA sense strand
ccucaaggucugcuucuau

SEQ ID NO: 1227303 - RNA, 19 nt, Homo sapiens
  misc_RNA (1)...(19): siRNA sense strand
ugggugaggugcaggacaa

SEQ ID NO: 1227304 - RNA, 19 nt, Homo sapiens
  misc_RNA (1)...(19): siRNA sense strand
cuccaaagcugcaguucca

SEQ ID NO: 1227305 - RNA, 19 nt, Homo sapiens
  misc_RNA (1)...(19): siRNA sense strand
ccaaccuccuggcuccaaa

SEQ ID NO: 1227306 - RNA, 19 nt, Homo sapiens
  misc_RNA (1)...(19): siRNA sense strand
ugggagauccugagcuuug

SEQ ID NO: 1227307 - RNA, 19 nt, Homo sapiens
  misc_RNA (1)...(19): siRNA sense strand
acuucaaacuggucaaaug

SEQ ID NO: 1227308 - RNA, 19 nt, Homo sapiens
  misc_RNA (1)...(19): siRNA sense strand
gggauccgccagcugacua

SEQ ID NO: 1227309 - RNA, 19 nt, Homo sapiens
  misc_RNA (1)...(19): siRNA sense strand
gaacauggcugaccucaua

SEQ ID NO: 1227310 - RNA, 19 nt, Homo sapiens
  misc_RNA (1)...(19): siRNA sense strand
ggaccacgcugcucuauuu

SEQ ID NO: 1227311 - RNA, 19 nt, Homo sapiens
  misc_RNA (1)...(19): siRNA sense strand
caaagcagaugcaggagaa

SEQ ID NO: 1227312 - RNA, 19 nt, Homo sapiens
  misc_RNA (1)...(19): siRNA sense strand
ucagagagcugcagcauag

SEQ ID NO: 1227313 - RNA, 19 nt, Homo sapiens
  misc_RNA (1)...(19): siRNA sense strand
ggacgaggacuauuacaaa

SEQ ID NO: 1227314 - RNA, 19 nt, Homo sapiens
  misc_RNA (1)...(19): siRNA sense strand
uggcagagcucaucaacaa

SEQ ID NO: 1227315 - RNA, 19 nt, Homo sapiens
  misc_RNA (1)...(19): siRNA sense strand
auucaaggauggaacauua

SEQ ID NO: 1227316 - RNA, 19 nt, Homo sapiens
  misc_RNA (1)...(19): siRNA sense strand
agaaacugcucaacaaaga

SEQ ID NO: 1227317 - RNA, 19 nt, Homo sapiens
  misc_RNA (1)...(19): siRNA sense strand
caccaaggcucucucauca

SEQ ID NO: 1227318 - RNA, 19 nt, Homo sapiens
  misc_RNA (1)...(19): siRNA sense strand
caucauccauccuaggaaa

SEQ ID NO: 1227319 - RNA, 19 nt, Homo sapiens
  misc_RNA (1)...(19): siRNA sense strand
gaacaagaacucccugaag

SEQ ID NO: 1227320 - RNA, 19 nt, Homo sapiens
  misc_RNA (1)...(19): siRNA sense strand
ccaaggcucucucaucauc

SEQ ID NO: 1227321 - RNA, 19 nt, Homo sapiens
  misc_RNA (1)...(19): siRNA sense strand
gcccggagguccacaguau

SEQ ID NO: 1227322 - RNA, 19 nt, Homo sapiens
  misc_RNA (1)...(19): siRNA sense strand
ccacccaccugcagaguga

SEQ ID NO: 1227323 - RNA, 19 nt, Homo sapiens
  misc_RNA (1)...(19): siRNA sense strand
gaugugguccugaaucgua

SEQ ID NO: 1227324 - RNA, 19 nt, Homo sapiens
  misc_RNA (1)...(19): siRNA sense strand
gagcccaccuggaucauca

SEQ ID NO: 1227325 - RNA, 19 nt, Homo sapiens
  misc_RNA (1)...(19): siRNA sense strand
gcagagcucaucaacaaga

SEQ ID NO: 1227326 - RNA, 19 nt, Homo sapiens
  misc_RNA (1)...(19): siRNA sense strand
gcagaugcaggagaacuua

SEQ ID NO: 1227327 - RNA, 19 nt, Homo sapiens
  misc_RNA (1)...(19): siRNA sense strand
ggacugaugaccuggugua

SEQ ID NO: 1227328 - RNA, 19 nt, Homo sapiens
  misc_RNA (1)...(19): siRNA sense strand
gugaagaugugguccugaa

SEQ ID NO: 1227329 - RNA, 19 nt, Homo sapiens
  misc_RNA (1)...(19): siRNA sense strand
caacuucgagcuccuagaa

SEQ ID NO: 1227330 - RNA, 19 nt, Homo sapiens
  misc_RNA (1)...(19): siRNA sense strand
gcccaagccugaucucugu

SEQ ID NO: 1227331 - RNA, 19 nt, Homo sapiens
  misc_RNA (1)...(19): siRNA sense strand
uaggaaagauggugagaag

SEQ ID NO: 1227332 - RNA, 19 nt, Homo sapiens
  misc_RNA (1)...(19): siRNA sense strand
gucaagaccugcaagaaag

SEQ ID NO: 1227333 - RNA, 19 nt, Homo sapiens
  misc_RNA (1)...(19): siRNA sense strand
aaacaguuccggaagauga

SEQ ID NO: 1227334 - RNA, 19 nt, Homo sapiens
  misc_RNA (1)...(19): siRNA sense strand
gcgaggcagugaucaugaa

SEQ ID NO: 1227335 - RNA, 19 nt, Homo sapiens
  misc_RNA (1)...(19): siRNA sense strand
cucaaggucugcuucuaua

SEQ ID NO: 1227336 - RNA, 19 nt, Homo sapiens
  misc_RNA (1)...(19): siRNA sense strand
cccagaaacugcucaacaa

SEQ ID NO: 1227337 - RNA, 19 nt, Homo sapiens
  misc_RNA (1)...(19): siRNA sense strand
gaggaggagugcgucauga

SEQ ID NO: 1227338 - RNA, 19 nt, Homo sapiens
  misc_RNA (1)...(19): siRNA sense strand
gaacuuaaagcccaaacag

SEQ ID NO: 1227339 - RNA, 19 nt, Homo sapiens
  misc_RNA (1)...(19): siRNA sense strand
ggcaaauccuggacaaaca

SEQ ID NO: 1227340 - RNA, 19 nt, Homo sapiens
  misc_RNA (1)...(19): siRNA sense strand
gcaccaaggcucucucauc

SEQ ID NO: 1227341 - RNA, 19 nt, Homo sapiens
  misc_RNA (1)...(19): siRNA sense strand
gcuaugggcugaggcugaa

SEQ ID NO: 1227342 - RNA, 19 nt, Homo sapiens
  misc_RNA (1)...(19): siRNA sense strand
gccgugaccucccuaagug

SEQ ID NO: 1227343 - RNA, 19 nt, Homo sapiens
  misc_RNA (1)...(19): siRNA sense strand
gaguaaaguugggcacguu

SEQ ID NO: 1227344 - RNA, 19 nt, Homo sapiens
  misc_RNA (1)...(19): siRNA sense strand
ugcuggagcucaagaauga

SEQ ID NO: 1227345 - RNA, 19 nt, Homo sapiens
  misc_RNA (1)...(19): siRNA sense strand
agaaggacauugccaugga

SEQ ID NO: 1227346 - RNA, 19 nt, Homo sapiens
  misc_RNA (1)...(19): siRNA sense strand
ucagugacguuuaucagau

SEQ ID NO: 1227347 - RNA, 19 nt, Homo sapiens
  misc_RNA (1)...(19): siRNA sense strand
gcaaagccauggccuaccu

SEQ ID NO: 1227348 - RNA, 19 nt, Homo sapiens
  misc_RNA (1)...(19): siRNA sense strand
cagcuucaauccugggaaa

SEQ ID NO: 1227349 - RNA, 19 nt, Homo sapiens
  misc_RNA (1)...(19): siRNA sense strand
ggaucaucauggaauugua

SEQ ID NO: 1227350 - RNA, 19 nt, Homo sapiens
  misc_RNA (1)...(19): siRNA sense strand
ccaaacaguuccggaagau

SEQ ID NO: 1227351 - RNA, 19 nt, Homo sapiens
  misc_RNA (1)...(19): siRNA sense strand
ccaagguucuggccaaucu

SEQ ID NO: 1227352 - RNA, 19 nt, Homo sapiens
  misc_RNA (1)...(19): siRNA sense strand
ggaacaagaacucccugaa

SEQ ID NO: 1227353 - RNA, 19 nt, Homo sapiens
  misc_RNA (1)...(19): siRNA sense strand
ccaccuggaucaucaugga

SEQ ID NO: 1227354 - RNA, 19 nt, Homo sapiens
  misc_RNA (1)...(19): siRNA sense strand
ggacgugcguauccucaag

SEQ ID NO: 1227355 - RNA, 19 nt, Homo sapiens
  misc_RNA (1)...(19): siRNA sense strand
gacgaggacuauuacaaag

SEQ ID NO: 1227356 - RNA, 19 nt, Homo sapiens
  misc_RNA (1)...(19): siRNA sense strand
gaucaucauggaauuguau

SEQ ID NO: 1227357 - RNA, 19 nt, Homo sapiens
  misc_RNA (1)...(19): siRNA sense strand
gaagaugugguccugaauc

SEQ ID NO: 1227358 - RNA, 19 nt, Homo sapiens
  misc_RNA (1)...(19): siRNA sense strand
ggaggaggacuucauccaa

SEQ ID NO: 1227359 - RNA, 19 nt, Homo sapiens
  misc_RNA (1)...(19): siRNA sense strand
gaucgagggcacccagaaa

SEQ ID NO: 1227360 - RNA, 19 nt, Homo sapiens
  misc_RNA (1)...(19): siRNA sense strand
cuaccgcugugaacucauu

SEQ ID NO: 1227361 - RNA, 19 nt, Homo sapiens
  misc_RNA (1)...(19): siRNA sense strand
uuacaaagccucugugacu

SEQ ID NO: 1227362 - RNA, 19 nt, Homo sapiens
  misc_RNA (1)...(19): siRNA sense strand
ugucaagaccugcaagaaa

SEQ ID NO: 1227363 - RNA, 19 nt, Homo sapiens
  misc_RNA (1)...(19): siRNA sense strand
aggcagugaucaugaagaa

SEQ ID NO: 1227364 - RNA, 19 nt, Homo sapiens
  misc_RNA (1)...(19): siRNA sense strand
ccagaaacugcucaacaaa

SEQ ID NO: 1227365 - RNA, 19 nt, Homo sapiens
  misc_RNA (1)...(19): siRNA sense strand
cagcauagagucagacauc

SEQ ID NO: 1227366 - RNA, 19 nt, Homo sapiens
  misc_RNA (1)...(19): siRNA sense strand
gaagccgaguggagguaug

SEQ ID NO: 1227367 - RNA, 19 nt, Homo sapiens
  misc_RNA (1)...(19): siRNA sense strand
gaccugguguaccucaaug

SEQ ID NO: 1227368 - RNA, 19 nt, Homo sapiens
  misc_RNA (1)...(19): siRNA sense strand
cagccucagugacguuuau

SEQ ID NO: 1227369 - RNA, 19 nt, Homo sapiens
  misc_RNA (1)...(19): siRNA sense strand
ggacaacaaggagaaguuc

SEQ ID NO: 1227370 - RNA, 19 nt, Homo sapiens
  misc_RNA (1)...(19): siRNA sense strand
gagcucaggcgguucuuca

SEQ ID NO: 1227371 - RNA, 19 nt, Homo sapiens
  misc_RNA (1)...(19): siRNA sense strand
ggucuuucccgguacauug

SEQ ID NO: 1227372 - RNA, 19 nt, Homo sapiens
  misc_RNA (1)...(19): siRNA sense strand
gcagagauucccgacgaaa

SEQ ID NO: 1227373 - RNA, 19 nt, Homo sapiens
  misc_RNA (1)...(19): siRNA sense strand
ucagacaucuacgcagaga

SEQ ID NO: 1227374 - RNA, 19 nt, Homo sapiens
  misc_RNA (1)...(19): siRNA sense strand
gugaggugcaggacaagua

SEQ ID NO: 1227375 - RNA, 19 nt, Homo sapiens
  misc_RNA (1)...(19): siRNA sense strand
acaaacagcagaagcagau

SEQ ID NO: 1227376 - RNA, 19 nt, Homo sapiens
  misc_RNA (1)...(19): siRNA sense strand
uuuaucagauggagaagga

SEQ ID NO: 1227377 - RNA, 19 nt, Homo sapiens
  misc_RNA (1)...(19): siRNA sense strand
uagcagaggcugagaacau

SEQ ID NO: 1227378 - RNA, 19 nt, Homo sapiens
  misc_RNA (1)...(19): siRNA sense strand
ggaggaggagugcgucaug

SEQ ID NO: 1227379 - RNA, 19 nt, Homo sapiens
  misc_RNA (1)...(19): siRNA sense strand
aggcgguucuucaaggaua

SEQ ID NO: 1227380 - RNA, 19 nt, Homo sapiens
  misc_RNA (1)...(19): siRNA sense strand
uugaggacgaggacuauua

SEQ ID NO: 1227381 - RNA, 19 nt, Homo sapiens
  misc_RNA (1)...(19): siRNA sense strand
cccaaacaguuccggaaga

SEQ ID NO: 1227382 - RNA, 19 nt, Homo sapiens
  misc_RNA (1)...(19): siRNA sense strand
uguacucacugcagauaug

SEQ ID NO: 1227383 - RNA, 19 nt, Homo sapiens
  misc_RNA (1)...(19): siRNA sense strand
gaggagcccaccuggauca

SEQ ID NO: 1227384 - RNA, 19 nt, Homo sapiens
  misc_RNA (1)...(19): siRNA sense strand
gcaggacaaguaugagugu

SEQ ID NO: 1227385 - RNA, 19 nt, Homo sapiens
  misc_RNA (1)...(19): siRNA sense strand
ucaagaaugagcucuguca

SEQ ID NO: 1227386 - RNA, 19 nt, Homo sapiens
  misc_RNA (1)...(19): siRNA sense strand
cacaugaaguccgaugaga

SEQ ID NO: 1227387 - RNA, 19 nt, Homo sapiens
  misc_RNA (1)...(19): siRNA sense strand
gagcgaggcagugaucaug

SEQ ID NO: 1227388 - RNA, 19 nt, Homo sapiens
  misc_RNA (1)...(19): siRNA sense strand
caacaaggagaaguucaug

SEQ ID NO: 1227389 - RNA, 19 nt, Homo sapiens
  misc_RNA (1)...(19): siRNA sense strand
aagcagaucagguccauca

SEQ ID NO: 1227390 - RNA, 19 nt, Homo sapiens
  misc_RNA (1)...(19): siRNA sense strand
acuuaaagcccaaacaguu

SEQ ID NO: 1227391 - RNA, 19 nt, Homo sapiens
  misc_RNA (1)...(19): siRNA sense strand
gcacaugaaguccgaugag

SEQ ID NO: 1227392 - RNA, 19 nt, Homo sapiens
  misc_RNA (1)...(19): siRNA sense strand
guccaccgguccuuuauac

SEQ ID NO: 1227393 - RNA, 19 nt, Homo sapiens
  misc_RNA (1)...(19): siRNA sense strand
ugugggagauccugagcuu

SEQ ID NO: 1227394 - RNA, 19 nt, Homo sapiens
  misc_RNA (1)...(19): siRNA sense strand
caugaaguccgaugagauc

SEQ ID NO: 1227395 - RNA, 19 nt, Homo sapiens
  misc_RNA (1)...(19): siRNA sense strand
ccauccagcccacagcuaa

SEQ ID NO: 1227396 - RNA, 19 nt, Homo sapiens
  misc_RNA (1)...(19): siRNA sense strand
cagugacguuuaucagaug

SEQ ID NO: 1227397 - RNA, 19 nt, Homo sapiens
  misc_RNA (1)...(19): siRNA sense strand
gcuguacucacugcagaua

SEQ ID NO: 1227398 - RNA, 19 nt, Homo sapiens
  misc_RNA (1)...(19): siRNA sense strand
gcauugcccgugaagaugu

SEQ ID NO: 1227399 - RNA, 19 nt, Homo sapiens
  misc_RNA (1)...(19): siRNA sense strand
guacuucagcugggcauug

SEQ ID NO: 1227400 - RNA, 19 nt, Homo sapiens
  misc_RNA (1)...(19): siRNA sense strand
aggagugcgucaugaaguu

SEQ ID NO: 1227401 - RNA, 19 nt, Homo sapiens
  misc_RNA (1)...(19): siRNA sense strand
ggagaccuaccgcugugaa

SEQ ID NO: 1227402 - RNA, 19 nt, Homo sapiens
  misc_RNA (1)...(19): siRNA sense strand
ccucaaggucugcuucuau

SEQ ID NO: 1227403 - RNA, 19 nt, Homo sapiens
  misc_RNA (1)...(19): siRNA sense strand
ugggugaggugcaggacaa

SEQ ID NO: 1227404 - RNA, 19 nt, Homo sapiens
  misc_RNA (1)...(19): siRNA sense strand
cuccaaagcugcaguucca

SEQ ID NO: 1227405 - RNA, 19 nt, Homo sapiens
  misc_RNA (1)...(19): siRNA sense strand
ccaaccuccuggcuccaaa

SEQ ID NO: 1227406 - RNA, 19 nt, Homo sapiens
  misc_RNA (1)...(19): siRNA sense strand
ugggagauccugagcuuug

SEQ ID NO: 1227407 - RNA, 19 nt, Homo sapiens
  misc_RNA (1)...(19): siRNA sense strand
acuucaaacuggucaaaug

SEQ ID NO: 1227408 - RNA, 19 nt, Homo sapiens
  misc_RNA (1)...(19): siRNA sense strand
gggauccgccagcugacua

SEQ ID NO: 1227409 - RNA, 19 nt, Homo sapiens
  misc_RNA (1)...(19): siRNA sense strand
gaaggacgauguuauuaaa

SEQ ID NO: 1227410 - RNA, 19 nt, Homo sapiens
  misc_RNA (1)...(19): siRNA sense strand
cagcaauccuucagaauua

SEQ ID NO: 1227411 - RNA, 19 nt, Homo sapiens
  misc_RNA (1)...(19): siRNA sense strand
aaaggucucuugcuaaaua

SEQ ID NO: 1227412 - RNA, 19 nt, Homo sapiens
  misc_RNA (1)...(19): siRNA sense strand
ugagaaauguugccuaauu

SEQ ID NO: 1227413 - RNA, 19 nt, Homo sapiens
  misc_RNA (1)...(19): siRNA sense strand
caacaaagauacagaaacu

SEQ ID NO: 1227414 - RNA, 19 nt, Homo sapiens
  misc_RNA (1)...(19): siRNA sense strand
gagaaauguugccuaauug

SEQ ID NO: 1227415 - RNA, 19 nt, Homo sapiens
  misc_RNA (1)...(19): siRNA sense strand
ggaaggacgauguuauuaa

SEQ ID NO: 1227416 - RNA, 19 nt, Homo sapiens
  misc_RNA (1)...(19): siRNA sense strand
ggaagaugcuccucagaca

SEQ ID NO: 1227417 - RNA, 19 nt, Homo sapiens
  misc_RNA (1)...(19): siRNA sense strand
uaccagagcuacagcagua

SEQ ID NO: 1227418 - RNA, 19 nt, Homo sapiens
  misc_RNA (1)...(19): siRNA sense strand
guauguaccugcauuaaag

SEQ ID NO: 1227419 - RNA, 19 nt, Homo sapiens
  misc_RNA (1)...(19): siRNA sense strand
gcgcgcagauugccauuug

SEQ ID NO: 1227420 - RNA, 19 nt, Homo sapiens
  misc_RNA (1)...(19): siRNA sense strand
caaaaggucucuugcuaaa

SEQ ID NO: 1227421 - RNA, 19 nt, Homo sapiens
  misc_RNA (1)...(19): siRNA sense strand
gaaauuguaccauccuuca

SEQ ID NO: 1227422 - RNA, 19 nt, Homo sapiens
  misc_RNA (1)...(19): siRNA sense strand
gaauucuguuuacuacuga

SEQ ID NO: 1227423 - RNA, 19 nt, Homo sapiens
  misc_RNA (1)...(19): siRNA sense strand
guaccugcauuaaaggauu

SEQ ID NO: 1227424 - RNA, 19 nt, Homo sapiens
  misc_RNA (1)...(19): siRNA sense strand
agacagcaauccuucagaa

SEQ ID NO: 1227425 - RNA, 19 nt, Homo sapiens
  misc_RNA (1)...(19): siRNA sense strand
gcuagaauucuguuuacua

SEQ ID NO: 1227426 - RNA, 19 nt, Homo sapiens
  misc_RNA (1)...(19): siRNA sense strand
ugagaggcaaccaucauua

SEQ ID NO: 1227427 - RNA, 19 nt, Homo sapiens
  misc_RNA (1)...(19): siRNA sense strand
uuugagaaauguugccuaa

SEQ ID NO: 1227428 - RNA, 19 nt, Homo sapiens
  misc_RNA (1)...(19): siRNA sense strand
agaauucuguuuacuacug

SEQ ID NO: 1227429 - RNA, 19 nt, Homo sapiens
  misc_RNA (1)...(19): siRNA sense strand
guaccauccuucaucaaca

SEQ ID NO: 1227430 - RNA, 19 nt, Homo sapiens
  misc_RNA (1)...(19): siRNA sense strand
cuagaauucuguuuacuac

SEQ ID NO: 1227431 - RNA, 19 nt, Homo sapiens
  misc_RNA (1)...(19): siRNA sense strand
ccaaauggaaggacgaugu

SEQ ID NO: 1227432 - RNA, 19 nt, Homo sapiens
  misc_RNA (1)...(19): siRNA sense strand
caaauggaaggacgauguu

SEQ ID NO: 1227433 - RNA, 19 nt, Homo sapiens
  misc_RNA (1)...(19): siRNA sense strand
acagcaauccuucagaauu

SEQ ID NO: 1227434 - RNA, 19 nt, Homo sapiens
  misc_RNA (1)...(19): siRNA sense strand
gcaauccuucagaauuaaa

SEQ ID NO: 1227435 - RNA, 19 nt, Homo sapiens
  misc_RNA (1)...(19): siRNA sense strand
gacccuacguggcacuguu

SEQ ID NO: 1227436 - RNA, 19 nt, Homo sapiens
  misc_RNA (1)...(19): siRNA sense strand
cauccuucaucaacaaaga

SEQ ID NO: 1227437 - RNA, 19 nt, Homo sapiens
  misc_RNA (1)...(19): siRNA sense strand
gaaauguugccuaauuggu

SEQ ID NO: 1227438 - RNA, 19 nt, Homo sapiens
  misc_RNA (1)...(19): siRNA sense strand
guuuacuacugaaccaauu

SEQ ID NO: 1227439 - RNA, 19 nt, Homo sapiens
  misc_RNA (1)...(19): siRNA sense strand
caucaacaaagauacagaa

SEQ ID NO: 1227440 - RNA, 19 nt, Homo sapiens
  misc_RNA (1)...(19): siRNA sense strand
uggaaggacgauguuauua

SEQ ID NO: 1227441 - RNA, 19 nt, Homo sapiens
  misc_RNA (1)...(19): siRNA sense strand
ugaaggcagcccuaucuga

SEQ ID NO: 1227442 - RNA, 19 nt, Homo sapiens
  misc_RNA (1)...(19): siRNA sense strand
uaccauccuucaucaacaa

SEQ ID NO: 1227443 - RNA, 19 nt, Homo sapiens
  misc_RNA (1)...(19): siRNA sense strand
ccugcuagaauucuguuua

SEQ ID NO: 1227444 - RNA, 19 nt, Homo sapiens
  misc_RNA (1)...(19): siRNA sense strand
cuagaccaguggcagaaau

SEQ ID NO: 1227445 - RNA, 19 nt, Homo sapiens
  misc_RNA (1)...(19): siRNA sense strand
ggucucuugcuaaauauug

SEQ ID NO: 1227446 - RNA, 19 nt, Homo sapiens
  misc_RNA (1)...(19): siRNA sense strand
aaauguugccuaauugguu

SEQ ID NO: 1227447 - RNA, 19 nt, Homo sapiens
  misc_RNA (1)...(19): siRNA sense strand
gagaggcaaccaucauuac

SEQ ID NO: 1227448 - RNA, 19 nt, Homo sapiens
  misc_RNA (1)...(19): siRNA sense strand
uguuggaauucauugcuaa

SEQ ID NO: 1227449 - RNA, 19 nt, Homo sapiens
  misc_RNA (1)...(19): siRNA sense strand
cagaaauuguaccauccuu

SEQ ID NO: 1227450 - RNA, 19 nt, Homo sapiens
  misc_RNA (1)...(19): siRNA sense strand
gcuuggauacucauucuca

SEQ ID NO: 1227451 - RNA, 19 nt, Homo sapiens
  misc_RNA (1)...(19): siRNA sense strand
auuccaaucuuagcuuuga

SEQ ID NO: 1227452 - RNA, 19 nt, Homo sapiens
  misc_RNA (1)...(19): siRNA sense strand
gcagacagcaauccuucag

SEQ ID NO: 1227453 - RNA, 19 nt, Homo sapiens
  misc_RNA (1)...(19): siRNA sense strand
ccaaaaggucucuugcuaa

SEQ ID NO: 1227454 - RNA, 19 nt, Homo sapiens
  misc_RNA (1)...(19): siRNA sense strand
uggcacuguuugagaaaug

SEQ ID NO: 1227455 - RNA, 19 nt, Homo sapiens
  misc_RNA (1)...(19): siRNA sense strand
gaccaguggcagaaauugu

SEQ ID NO: 1227456 - RNA, 19 nt, Homo sapiens
  misc_RNA (1)...(19): siRNA sense strand
uguuccaccugcuagaauu

SEQ ID NO: 1227457 - RNA, 19 nt, Homo sapiens
  misc_RNA (1)...(19): siRNA sense strand
caugagcaccuggagcaaa

SEQ ID NO: 1227458 - RNA, 19 nt, Homo sapiens
  misc_RNA (1)...(19): siRNA sense strand
cugcuagaauucuguuuac

SEQ ID NO: 1227459 - RNA, 19 nt, Homo sapiens
  misc_RNA (1)...(19): siRNA sense strand
agcaauccuucagaauuaa

SEQ ID NO: 1227460 - RNA, 19 nt, Homo sapiens
  misc_RNA (1)...(19): siRNA sense strand
gacagcaauccuucagaau

SEQ ID NO: 1227461 - RNA, 19 nt, Homo sapiens
  misc_RNA (1)...(19): siRNA sense strand
caguauguaccugcauuaa

SEQ ID NO: 1227462 - RNA, 19 nt, Homo sapiens
  misc_RNA (1)...(19): siRNA sense strand
aaauggaaggacgauguua

SEQ ID NO: 1227463 - RNA, 19 nt, Homo sapiens
  misc_RNA (1)...(19): siRNA sense strand
gaggcaaccaucauuacca

SEQ ID NO: 1227464 - RNA, 19 nt, Homo sapiens
  misc_RNA (1)...(19): siRNA sense strand
accaguggcagaaauugua

SEQ ID NO: 1227465 - RNA, 19 nt, Homo sapiens
  misc_RNA (1)...(19): siRNA sense strand
aguauguaccugcauuaaa

SEQ ID NO: 1227466 - RNA, 19 nt, Homo sapiens
  misc_RNA (1)...(19): siRNA sense strand
caacaucuaugauuggaau

SEQ ID NO: 1227467 - RNA, 19 nt, Homo sapiens
  misc_RNA (1)...(19): siRNA sense strand
caucugggccuccgccuuu

SEQ ID NO: 1227468 - RNA, 19 nt, Homo sapiens
  misc_RNA (1)...(19): siRNA sense strand
gcacaggcggcuacacaga

SEQ ID NO: 1227469 - RNA, 19 nt, Homo sapiens
  misc_RNA (1)...(19): siRNA sense strand
gaaccggaugccaguguuu

SEQ ID NO: 1227470 - RNA, 19 nt, Homo sapiens
  misc_RNA (1)...(19): siRNA sense strand
gagggacgccacugcugua

SEQ ID NO: 1227471 - RNA, 19 nt, Homo sapiens
  misc_RNA (1)...(19): siRNA sense strand
ugcaacaggugaucgagaa

SEQ ID NO: 1227472 - RNA, 19 nt, Homo sapiens
  misc_RNA (1)...(19): siRNA sense strand
gcgggaaccacgugaaaug

SEQ ID NO: 1227473 - RNA, 19 nt, Homo sapiens
  misc_RNA (1)...(19): siRNA sense strand
ggaaagugcaacaggugau

SEQ ID NO: 1227474 - RNA, 19 nt, Homo sapiens
  misc_RNA (1)...(19): siRNA sense strand
gaaagugcaacaggugauc

SEQ ID NO: 1227475 - RNA, 19 nt, Homo sapiens
  misc_RNA (1)...(19): siRNA sense strand
caucuaugauuggaaugga

SEQ ID NO: 1227476 - RNA, 19 nt, Homo sapiens
  misc_RNA (1)...(19): siRNA sense strand
ugaaccggaugccaguguu

SEQ ID NO: 1227477 - RNA, 19 nt, Homo sapiens
  misc_RNA (1)...(19): siRNA sense strand
cagcacaggcggcuacaca

SEQ ID NO: 1227478 - RNA, 19 nt, Homo sapiens
  misc_RNA (1)...(19): siRNA sense strand
uuacccagccugcagaaga

SEQ ID NO: 1227479 - RNA, 19 nt, Homo sapiens
  misc_RNA (1)...(19): siRNA sense strand
gagcgugacguggacauca

SEQ ID NO: 1227480 - RNA, 19 nt, Homo sapiens
  misc_RNA (1)...(19): siRNA sense strand
acguggacaucaacaucua

SEQ ID NO: 1227481 - RNA, 19 nt, Homo sapiens
  misc_RNA (1)...(19): siRNA sense strand
gcccugggauaccggaaag

SEQ ID NO: 1227482 - RNA, 19 nt, Homo sapiens
  misc_RNA (1)...(19): siRNA sense strand
ugacguggacaucaacauc

SEQ ID NO: 1227483 - RNA, 19 nt, Homo sapiens
  misc_RNA (1)...(19): siRNA sense strand
acaggcggcuacacagaca

SEQ ID NO: 1227484 - RNA, 19 nt, Homo sapiens
  misc_RNA (1)...(19): siRNA sense strand
ggagaggaggcugcagaug

SEQ ID NO: 1227485 - RNA, 19 nt, Homo sapiens
  misc_RNA (1)...(19): siRNA sense strand
caacaucuaugauuggaau

SEQ ID NO: 1227486 - RNA, 19 nt, Homo sapiens
  misc_RNA (1)...(19): siRNA sense strand
caucugggccuccgccuuu

SEQ ID NO: 1227487 - RNA, 19 nt, Homo sapiens
  misc_RNA (1)...(19): siRNA sense strand
gcacaggcggcuacacaga

SEQ ID NO: 1227488 - RNA, 19 nt, Homo sapiens
  misc_RNA (1)...(19): siRNA sense strand
gaaccggaugccaguguuu

SEQ ID NO: 1227489 - RNA, 19 nt, Homo sapiens
  misc_RNA (1)...(19): siRNA sense strand
gagggacgccacugcugua

SEQ ID NO: 1227490 - RNA, 19 nt, Homo sapiens
  misc_RNA (1)...(19): siRNA sense strand
ugcaacaggugaucgagaa

SEQ ID NO: 1227491 - RNA, 19 nt, Homo sapiens
  misc_RNA (1)...(19): siRNA sense strand
gcgggaaccacgugaaaug

SEQ ID NO: 1227492 - RNA, 19 nt, Homo sapiens
  misc_RNA (1)...(19): siRNA sense strand
ggaaagugcaacaggugau

SEQ ID NO: 1227493 - RNA, 19 nt, Homo sapiens
  misc_RNA (1)...(19): siRNA sense strand
gaaagugcaacaggugauc

SEQ ID NO: 1227494 - RNA, 19 nt, Homo sapiens
  misc_RNA (1)...(19): siRNA sense strand
caucuaugauuggaaugga

SEQ ID NO: 1227495 - RNA, 19 nt, Homo sapiens
  misc_RNA (1)...(19): siRNA sense strand
ugaaccggaugccaguguu

SEQ ID NO: 1227496 - RNA, 19 nt, Homo sapiens
  misc_RNA (1)...(19): siRNA sense strand
cagcacaggcggcuacaca

SEQ ID NO: 1227497 - RNA, 19 nt, Homo sapiens
  misc_RNA (1)...(19): siRNA sense strand
uuacccagccugcagaaga

SEQ ID NO: 1227498 - RNA, 19 nt, Homo sapiens
  misc_RNA (1)...(19): siRNA sense strand
gagcgugacguggacauca

SEQ ID NO: 1227499 - RNA, 19 nt, Homo sapiens
  misc_RNA (1)...(19): siRNA sense strand
acguggacaucaacaucua

SEQ ID NO: 1227500 - RNA, 19 nt, Homo sapiens
  misc_RNA (1)...(19): siRNA sense strand
gcccugggauaccggaaag

SEQ ID NO: 1227501 - RNA, 19 nt, Homo sapiens
  misc_RNA (1)...(19): siRNA sense strand
ugacguggacaucaacauc

SEQ ID NO: 1227502 - RNA, 19 nt, Homo sapiens
  misc_RNA (1)...(19): siRNA sense strand
acaggcggcuacacagaca

SEQ ID NO: 1227503 - RNA, 19 nt, Homo sapiens
  misc_RNA (1)...(19): siRNA sense strand
ggagaggaggcugcagaug

SEQ ID NO: 1227504 - RNA, 19 nt, Homo sapiens
  misc_RNA (1)...(19): siRNA sense strand
aaagugagcuugaggauaa

SEQ ID NO: 1227505 - RNA, 19 nt, Homo sapiens
  misc_RNA (1)...(19): siRNA sense strand
gaacauauccaacuuucuu

SEQ ID NO: 1227506 - RNA, 19 nt, Homo sapiens
  misc_RNA (1)...(19): siRNA sense strand
ccagagagcaguaucuuua

SEQ ID NO: 1227507 - RNA, 19 nt, Homo sapiens
  misc_RNA (1)...(19): siRNA sense strand
caagacaaaugaucaugaa

SEQ ID NO: 1227508 - RNA, 19 nt, Homo sapiens
  misc_RNA (1)...(19): siRNA sense strand
gacaaaugaucaugaaaga

SEQ ID NO: 1227509 - RNA, 19 nt, Homo sapiens
  misc_RNA (1)...(19): siRNA sense strand
ggacauccgugcccucaga

SEQ ID NO: 1227510 - RNA, 19 nt, Homo sapiens
  misc_RNA (1)...(19): siRNA sense strand
ccuguaagcuucuuucuug

SEQ ID NO: 1227511 - RNA, 19 nt, Homo sapiens
  misc_RNA (1)...(19): siRNA sense strand
gagaacauauccaacuuuc

SEQ ID NO: 1227512 - RNA, 19 nt, Homo sapiens
  misc_RNA (1)...(19): siRNA sense strand
gaaaugagcagaggaguca

SEQ ID NO: 1227513 - RNA, 19 nt, Homo sapiens
  misc_RNA (1)...(19): siRNA sense strand
gagccaaucucagcugaaa

SEQ ID NO: 1227514 - RNA, 19 nt, Homo sapiens
  misc_RNA (1)...(19): siRNA sense strand
ggacaaccuugcaagacaa

SEQ ID NO: 1227515 - RNA, 19 nt, Homo sapiens
  misc_RNA (1)...(19): siRNA sense strand
gagccaaucuucagucagu

SEQ ID NO: 1227516 - RNA, 19 nt, Homo sapiens
  misc_RNA (1)...(19): siRNA sense strand
aaucaaagcacuuacauga

SEQ ID NO: 1227517 - RNA, 19 nt, Homo sapiens
  misc_RNA (1)...(19): siRNA sense strand
guacgaaucaaagcacuua

SEQ ID NO: 1227518 - RNA, 19 nt, Homo sapiens
  misc_RNA (1)...(19): siRNA sense strand
caaaugaucaugaaagaca

SEQ ID NO: 1227519 - RNA, 19 nt, Homo sapiens
  misc_RNA (1)...(19): siRNA sense strand
gcaccaccaucgccaaugu

SEQ ID NO: 1227520 - RNA, 19 nt, Homo sapiens
  misc_RNA (1)...(19): siRNA sense strand
gcaagacaaaugaucauga

SEQ ID NO: 1227521 - RNA, 19 nt, Homo sapiens
  misc_RNA (1)...(19): siRNA sense strand
gcuaaacauucucaacaau

SEQ ID NO: 1227522 - RNA, 19 nt, Homo sapiens
  misc_RNA (1)...(19): siRNA sense strand
gagucaagcucacggaugu

SEQ ID NO: 1227523 - RNA, 19 nt, Homo sapiens
  misc_RNA (1)...(19): siRNA sense strand
gaggagaagcuaaacauuc

SEQ ID NO: 1227524 - RNA, 19 nt, Homo sapiens
  misc_RNA (1)...(19): siRNA sense strand
aggaugccauuaaguauuu

SEQ ID NO: 1227525 - RNA, 19 nt, Homo sapiens
  misc_RNA (1)...(19): siRNA sense strand
guaaagcucuggacaaccu

SEQ ID NO: 1227526 - RNA, 19 nt, Homo sapiens
  misc_RNA (1)...(19): siRNA sense strand
gagagcaguaucuuuauug

SEQ ID NO: 1227527 - RNA, 19 nt, Homo sapiens
  misc_RNA (1)...(19): siRNA sense strand
caaaagccuugacaaauug

SEQ ID NO: 1227528 - RNA, 19 nt, Homo sapiens
  misc_RNA (1)...(19): siRNA sense strand
gaggaugccauuaaguauu

SEQ ID NO: 1227529 - RNA, 19 nt, Homo sapiens
  misc_RNA (1)...(19): siRNA sense strand
agagagcaguaucuuuauu

SEQ ID NO: 1227530 - RNA, 19 nt, Homo sapiens
  misc_RNA (1)...(19): siRNA sense strand
gugagaacauauccaacuu

SEQ ID NO: 1227531 - RNA, 19 nt, Homo sapiens
  misc_RNA (1)...(19): siRNA sense strand
gcuugaggauaacauaaga

SEQ ID NO: 1227532 - RNA, 19 nt, Homo sapiens
  misc_RNA (1)...(19): siRNA sense strand
cuggagauccucaaaguaa

SEQ ID NO: 1227533 - RNA, 19 nt, Homo sapiens
  misc_RNA (1)...(19): siRNA sense strand
ggagcgagggugcaacaaa

SEQ ID NO: 1227534 - RNA, 19 nt, Homo sapiens
  misc_RNA (1)...(19): siRNA sense strand
gcagaugagcuccguaaag

SEQ ID NO: 1227535 - RNA, 19 nt, Homo sapiens
  misc_RNA (1)...(19): siRNA sense strand
ggaggagaagcuaaacauu

SEQ ID NO: 1227536 - RNA, 19 nt, Homo sapiens
  misc_RNA (1)...(19): siRNA sense strand
gauaaaggccagcaguaca

SEQ ID NO: 1227537 - RNA, 19 nt, Homo sapiens
  misc_RNA (1)...(19): siRNA sense strand
gagcgagggugcaacaaaa

SEQ ID NO: 1227538 - RNA, 19 nt, Homo sapiens
  misc_RNA (1)...(19): siRNA sense strand
cugaggagcugaagaaggu

SEQ ID NO: 1227539 - RNA, 19 nt, Homo sapiens
  misc_RNA (1)...(19): siRNA sense strand
ggcaauacuuaccaacuca

SEQ ID NO: 1227540 - RNA, 19 nt, Homo sapiens
  misc_RNA (1)...(19): siRNA sense strand
gagcuugaggauaacauaa

SEQ ID NO: 1227541 - RNA, 19 nt, Homo sapiens
  misc_RNA (1)...(19): siRNA sense strand
cugcugaacugcccaggaa

SEQ ID NO: 1227542 - RNA, 19 nt, Homo sapiens
  misc_RNA (1)...(19): siRNA sense strand
cagaugagcuccguaaagc

SEQ ID NO: 1227543 - RNA, 19 nt, Homo sapiens
  misc_RNA (1)...(19): siRNA sense strand
cucaggagcuggaggagaa

SEQ ID NO: 1227544 - RNA, 19 nt, Homo sapiens
  misc_RNA (1)...(19): siRNA sense strand
agagcaguaucuuuauuga

SEQ ID NO: 1227545 - RNA, 19 nt, Homo sapiens
  misc_RNA (1)...(19): siRNA sense strand
gggauggaguugggaauca

SEQ ID NO: 1227546 - RNA, 19 nt, Homo sapiens
  misc_RNA (1)...(19): siRNA sense strand
aaagugagcacacagaauc

SEQ ID NO: 1227547 - RNA, 19 nt, Homo sapiens
  misc_RNA (1)...(19): siRNA sense strand
gaaagaagugguggacaca

SEQ ID NO: 1227548 - RNA, 19 nt, Homo sapiens
  misc_RNA (1)...(19): siRNA sense strand
caacaaaacguuccaagug

SEQ ID NO: 1227549 - RNA, 19 nt, Homo sapiens
  misc_RNA (1)...(19): siRNA sense strand
gagcugcuuugcugagagu

SEQ ID NO: 1227550 - RNA, 19 nt, Homo sapiens
  misc_RNA (1)...(19): siRNA sense strand
gaaucaaagcacuuacaug

SEQ ID NO: 1227551 - RNA, 19 nt, Homo sapiens
  misc_RNA (1)...(19): siRNA sense strand
ccaggaaugaggcagauga

SEQ ID NO: 1227552 - RNA, 19 nt, Homo sapiens
  misc_RNA (1)...(19): siRNA sense strand
cagagccaaucuucaguca

SEQ ID NO: 1227553 - RNA, 19 nt, Homo sapiens
  misc_RNA (1)...(19): siRNA sense strand
caacucacacgaggcauug

SEQ ID NO: 1227554 - RNA, 19 nt, Homo sapiens
  misc_RNA (1)...(19): siRNA sense strand
uugaggaugccauuaagua

SEQ ID NO: 1227555 - RNA, 19 nt, Homo sapiens
  misc_RNA (1)...(19): siRNA sense strand
ugagaacauauccaacuuu

SEQ ID NO: 1227556 - RNA, 19 nt, Homo sapiens
  misc_RNA (1)...(19): siRNA sense strand
uggacaaccuugcaagaca

SEQ ID NO: 1227557 - RNA, 19 nt, Homo sapiens
  misc_RNA (1)...(19): siRNA sense strand
uuauugaggaugccauuaa

SEQ ID NO: 1227558 - RNA, 19 nt, Homo sapiens
  misc_RNA (1)...(19): siRNA sense strand
gauacuggagauccucaaa

SEQ ID NO: 1227559 - RNA, 19 nt, Homo sapiens
  misc_RNA (1)...(19): siRNA sense strand
caaccuugcaagacaaaug

SEQ ID NO: 1227560 - RNA, 19 nt, Homo sapiens
  misc_RNA (1)...(19): siRNA sense strand
cuacuccugcugacugaua

SEQ ID NO: 1227561 - RNA, 19 nt, Homo sapiens
  misc_RNA (1)...(19): siRNA sense strand
guuccaagugggacagaua

SEQ ID NO: 1227562 - RNA, 19 nt, Homo sapiens
  misc_RNA (1)...(19): siRNA sense strand
uauccaacuuucuuuccuu

SEQ ID NO: 1227563 - RNA, 19 nt, Homo sapiens
  misc_RNA (1)...(19): siRNA sense strand
gggagcugcuuugcugaga

SEQ ID NO: 1227564 - RNA, 19 nt, Homo sapiens
  misc_RNA (1)...(19): siRNA sense strand
agacaaaugaucaugaaag

SEQ ID NO: 1227565 - RNA, 19 nt, Homo sapiens
  misc_RNA (1)...(19): siRNA sense strand
gaagcuaaacauucucaac

SEQ ID NO: 1227566 - RNA, 19 nt, Homo sapiens
  misc_RNA (1)...(19): siRNA sense strand
ccauuaaguauuucaagga

SEQ ID NO: 1227567 - RNA, 19 nt, Homo sapiens
  misc_RNA (1)...(19): siRNA sense strand
caacuuucuuuccuuagcu

SEQ ID NO: 1227568 - RNA, 19 nt, Homo sapiens
  misc_RNA (1)...(19): siRNA sense strand
auccaacuuucuuuccuua

SEQ ID NO: 1227569 - RNA, 19 nt, Homo sapiens
  misc_RNA (1)...(19): siRNA sense strand
ggugagaacauauccaacu

SEQ ID NO: 1227570 - RNA, 19 nt, Homo sapiens
  misc_RNA (1)...(19): siRNA sense strand
ugaggaugccauuaaguau

SEQ ID NO: 1227571 - RNA, 19 nt, Homo sapiens
  misc_RNA (1)...(19): siRNA sense strand
uacuggagauccucaaagu

SEQ ID NO: 1227572 - RNA, 19 nt, Homo sapiens
  misc_RNA (1)...(19): siRNA sense strand
gcugaacugcccaggaaug

SEQ ID NO: 1227573 - RNA, 19 nt, Homo sapiens
  misc_RNA (1)...(19): siRNA sense strand
ccuuagcuggcaauacuua

SEQ ID NO: 1227574 - RNA, 19 nt, Homo sapiens
  misc_RNA (1)...(19): siRNA sense strand
aagaagugguggacacaag

SEQ ID NO: 1227575 - RNA, 19 nt, Homo sapiens
  misc_RNA (1)...(19): siRNA sense strand
gggauuaccagcaguacca

SEQ ID NO: 1227576 - RNA, 19 nt, Homo sapiens
  misc_RNA (1)...(19): siRNA sense strand
cagagagcaguaucuuuau

SEQ ID NO: 1227577 - RNA, 19 nt, Homo sapiens
  misc_RNA (1)...(19): siRNA sense strand
gcaggcggaccaagaacug

SEQ ID NO: 1227578 - RNA, 19 nt, Homo sapiens
  misc_RNA (1)...(19): siRNA sense strand
aagcuaaacauucucaaca

SEQ ID NO: 1227579 - RNA, 19 nt, Homo sapiens
  misc_RNA (1)...(19): siRNA sense strand
uggcaauacuuaccaacuc

SEQ ID NO: 1227580 - RNA, 19 nt, Homo sapiens
  misc_RNA (1)...(19): siRNA sense strand
ccaacucacacgaggcauu

SEQ ID NO: 1227581 - RNA, 19 nt, Homo sapiens
  misc_RNA (1)...(19): siRNA sense strand
auucguggcugcugcugaa

SEQ ID NO: 1227582 - RNA, 19 nt, Homo sapiens
  misc_RNA (1)...(19): siRNA sense strand
ggccagcaguacagaaacu

SEQ ID NO: 1227583 - RNA, 19 nt, Homo sapiens
  misc_RNA (1)...(19): siRNA sense strand
uauugaggaugccauuaag

SEQ ID NO: 1227584 - RNA, 19 nt, Homo sapiens
  misc_RNA (1)...(19): siRNA sense strand
ccguaaagcucuggacaac

SEQ ID NO: 1227585 - RNA, 19 nt, Homo sapiens
  misc_RNA (1)...(19): siRNA sense strand
agcuaaacauucucaacaa

SEQ ID NO: 1227586 - RNA, 19 nt, Homo sapiens
  misc_RNA (1)...(19): siRNA sense strand
cgaaucaaagcacuuacau

SEQ ID NO: 1227587 - RNA, 19 nt, Homo sapiens
  misc_RNA (1)...(19): siRNA sense strand
ccaacuuucuuuccuuagc

SEQ ID NO: 1227588 - RNA, 19 nt, Homo sapiens
  misc_RNA (1)...(19): siRNA sense strand
ugagcuugaggauaacaua

SEQ ID NO: 1227589 - RNA, 19 nt, Homo sapiens
  misc_RNA (1)...(19): siRNA sense strand
gacaaccuugcaagacaaa

SEQ ID NO: 1227590 - RNA, 19 nt, Homo sapiens
  misc_RNA (1)...(19): siRNA sense strand
uuccuuagcuggcaauacu

SEQ ID NO: 1227591 - RNA, 19 nt, Homo sapiens
  misc_RNA (1)...(19): siRNA sense strand
guucagaagguccacaaag

SEQ ID NO: 1227592 - RNA, 19 nt, Homo sapiens
  misc_RNA (1)...(19): siRNA sense strand
gucuggcucucucagcauu

SEQ ID NO: 1227593 - RNA, 19 nt, Homo sapiens
  misc_RNA (1)...(19): siRNA sense strand
gcccaggaaugaggcagau

SEQ ID NO: 1227594 - RNA, 19 nt, Homo sapiens
  misc_RNA (1)...(19): siRNA sense strand
gagccagagccaaucuuca

SEQ ID NO: 1227595 - RNA, 19 nt, Homo sapiens
  misc_RNA (1)...(19): siRNA sense strand
cagacgagccagagccaau

SEQ ID NO: 1227596 - RNA, 19 nt, Homo sapiens
  misc_RNA (1)...(19): siRNA sense strand
ugggacagauacuggagau

SEQ ID NO: 1227597 - RNA, 19 nt, Homo sapiens
  misc_RNA (1)...(19): siRNA sense strand
gaaaagugagcuugaggau

SEQ ID NO: 1227598 - RNA, 19 nt, Homo sapiens
  misc_RNA (1)...(19): siRNA sense strand
aggcagaugagcuccguaa

SEQ ID NO: 1227599 - RNA, 19 nt, Homo sapiens
  misc_RNA (1)...(19): siRNA sense strand
aaagugagcuugaggauaa

SEQ ID NO: 1227600 - RNA, 19 nt, Homo sapiens
  misc_RNA (1)...(19): siRNA sense strand
gaacauauccaacuuucuu

SEQ ID NO: 1227601 - RNA, 19 nt, Homo sapiens
  misc_RNA (1)...(19): siRNA sense strand
ccagagagcaguaucuuua

SEQ ID NO: 1227602 - RNA, 19 nt, Homo sapiens
  misc_RNA (1)...(19): siRNA sense strand
caagacaaaugaucaugaa

SEQ ID NO: 1227603 - RNA, 19 nt, Homo sapiens
  misc_RNA (1)...(19): siRNA sense strand
gacaaaugaucaugaaaga

SEQ ID NO: 1227604 - RNA, 19 nt, Homo sapiens
  misc_RNA (1)...(19): siRNA sense strand
ggacauccgugcccucaga

SEQ ID NO: 1227605 - RNA, 19 nt, Homo sapiens
  misc_RNA (1)...(19): siRNA sense strand
ccuguaagcuucuuucuug

SEQ ID NO: 1227606 - RNA, 19 nt, Homo sapiens
  misc_RNA (1)...(19): siRNA sense strand
gagaacauauccaacuuuc

SEQ ID NO: 1227607 - RNA, 19 nt, Homo sapiens
  misc_RNA (1)...(19): siRNA sense strand
gaaaugagcagaggaguca

SEQ ID NO: 1227608 - RNA, 19 nt, Homo sapiens
  misc_RNA (1)...(19): siRNA sense strand
gagccaaucucagcugaaa

SEQ ID NO: 1227609 - RNA, 19 nt, Homo sapiens
  misc_RNA (1)...(19): siRNA sense strand
ggacaaccuugcaagacaa

SEQ ID NO: 1227610 - RNA, 19 nt, Homo sapiens
  misc_RNA (1)...(19): siRNA sense strand
gagccaaucuucagucagu

SEQ ID NO: 1227611 - RNA, 19 nt, Homo sapiens
  misc_RNA (1)...(19): siRNA sense strand
aaucaaagcacuuacauga

SEQ ID NO: 1227612 - RNA, 19 nt, Homo sapiens
  misc_RNA (1)...(19): siRNA sense strand
guacgaaucaaagcacuua

SEQ ID NO: 1227613 - RNA, 19 nt, Homo sapiens
  misc_RNA (1)...(19): siRNA sense strand
caaaugaucaugaaagaca

SEQ ID NO: 1227614 - RNA, 19 nt, Homo sapiens
  misc_RNA (1)...(19): siRNA sense strand
gcaccaccaucgccaaugu

SEQ ID NO: 1227615 - RNA, 19 nt, Homo sapiens
  misc_RNA (1)...(19): siRNA sense strand
gcaagacaaaugaucauga

SEQ ID NO: 1227616 - RNA, 19 nt, Homo sapiens
  misc_RNA (1)...(19): siRNA sense strand
gcuaaacauucucaacaau

SEQ ID NO: 1227617 - RNA, 19 nt, Homo sapiens
  misc_RNA (1)...(19): siRNA sense strand
gagucaagcucacggaugu

SEQ ID NO: 1227618 - RNA, 19 nt, Homo sapiens
  misc_RNA (1)...(19): siRNA sense strand
gaggagaagcuaaacauuc

SEQ ID NO: 1227619 - RNA, 19 nt, Homo sapiens
  misc_RNA (1)...(19): siRNA sense strand
aggaugccauuaaguauuu

SEQ ID NO: 1227620 - RNA, 19 nt, Homo sapiens
  misc_RNA (1)...(19): siRNA sense strand
guaaagcucuggacaaccu

SEQ ID NO: 1227621 - RNA, 19 nt, Homo sapiens
  misc_RNA (1)...(19): siRNA sense strand
gagagcaguaucuuuauug

SEQ ID NO: 1227622 - RNA, 19 nt, Homo sapiens
  misc_RNA (1)...(19): siRNA sense strand
caaaagccuugacaaauug

SEQ ID NO: 1227623 - RNA, 19 nt, Homo sapiens
  misc_RNA (1)...(19): siRNA sense strand
gaggaugccauuaaguauu

SEQ ID NO: 1227624 - RNA, 19 nt, Homo sapiens
  misc_RNA (1)...(19): siRNA sense strand
agagagcaguaucuuuauu

SEQ ID NO: 1227625 - RNA, 19 nt, Homo sapiens
  misc_RNA (1)...(19): siRNA sense strand
gugagaacauauccaacuu

SEQ ID NO: 1227626 - RNA, 19 nt, Homo sapiens
  misc_RNA (1)...(19): siRNA sense strand
gcuugaggauaacauaaga

SEQ ID NO: 1227627 - RNA, 19 nt, Homo sapiens
  misc_RNA (1)...(19): siRNA sense strand
cuggagauccucaaaguaa

SEQ ID NO: 1227628 - RNA, 19 nt, Homo sapiens
  misc_RNA (1)...(19): siRNA sense strand
ggagcgagggugcaacaaa

SEQ ID NO: 1227629 - RNA, 19 nt, Homo sapiens
  misc_RNA (1)...(19): siRNA sense strand
gcagaugagcuccguaaag

SEQ ID NO: 1227630 - RNA, 19 nt, Homo sapiens
  misc_RNA (1)...(19): siRNA sense strand
ggaggagaagcuaaacauu

SEQ ID NO: 1227631 - RNA, 19 nt, Homo sapiens
  misc_RNA (1)...(19): siRNA sense strand
gauaaaggccagcaguaca

SEQ ID NO: 1227632 - RNA, 19 nt, Homo sapiens
  misc_RNA (1)...(19): siRNA sense strand
gagcuugaggauaacauaa

SEQ ID NO: 1227633 - RNA, 19 nt, Homo sapiens
  misc_RNA (1)...(19): siRNA sense strand
cugaggagcugaagaaggu

SEQ ID NO: 1227634 - RNA, 19 nt, Homo sapiens
  misc_RNA (1)...(19): siRNA sense strand
ggcaauacuuaccaacuca

SEQ ID NO: 1227635 - RNA, 19 nt, Homo sapiens
  misc_RNA (1)...(19): siRNA sense strand
gagcgagggugcaacaaaa

SEQ ID NO: 1227636 - RNA, 19 nt, Homo sapiens
  misc_RNA (1)...(19): siRNA sense strand
cugcugaacugcccaggaa

SEQ ID NO: 1227637 - RNA, 19 nt, Homo sapiens
  misc_RNA (1)...(19): siRNA sense strand
cagaugagcuccguaaagc

SEQ ID NO: 1227638 - RNA, 19 nt, Homo sapiens
  misc_RNA (1)...(19): siRNA sense strand
cucaggagcuggaggagaa

SEQ ID NO: 1227639 - RNA, 19 nt, Homo sapiens
  misc_RNA (1)...(19): siRNA sense strand
agagcaguaucuuuauuga

SEQ ID NO: 1227640 - RNA, 19 nt, Homo sapiens
  misc_RNA (1)...(19): siRNA sense strand
gggauggaguugggaauca

SEQ ID NO: 1227641 - RNA, 19 nt, Homo sapiens
  misc_RNA (1)...(19): siRNA sense strand
aaagugagcacacagaauc

SEQ ID NO: 1227642 - RNA, 19 nt, Homo sapiens
  misc_RNA (1)...(19): siRNA sense strand
gaaagaagugguggacaca

SEQ ID NO: 1227643 - RNA, 19 nt, Homo sapiens
  misc_RNA (1)...(19): siRNA sense strand
caacaaaacguuccaagug

SEQ ID NO: 1227644 - RNA, 19 nt, Homo sapiens
  misc_RNA (1)...(19): siRNA sense strand
gagcugcuuugcugagagu

SEQ ID NO: 1227645 - RNA, 19 nt, Homo sapiens
  misc_RNA (1)...(19): siRNA sense strand
gaaucaaagcacuuacaug

SEQ ID NO: 1227646 - RNA, 19 nt, Homo sapiens
  misc_RNA (1)...(19): siRNA sense strand
ccaggaaugaggcagauga

SEQ ID NO: 1227647 - RNA, 19 nt, Homo sapiens
  misc_RNA (1)...(19): siRNA sense strand
cagagccaaucuucaguca

SEQ ID NO: 1227648 - RNA, 19 nt, Homo sapiens
  misc_RNA (1)...(19): siRNA sense strand
caacucacacgaggcauug

SEQ ID NO: 1227649 - RNA, 19 nt, Homo sapiens
  misc_RNA (1)...(19): siRNA sense strand
uugaggaugccauuaagua

SEQ ID NO: 1227650 - RNA, 19 nt, Homo sapiens
  misc_RNA (1)...(19): siRNA sense strand
ugagaacauauccaacuuu

SEQ ID NO: 1227651 - RNA, 19 nt, Homo sapiens
  misc_RNA (1)...(19): siRNA sense strand
uggacaaccuugcaagaca

SEQ ID NO: 1227652 - RNA, 19 nt, Homo sapiens
  misc_RNA (1)...(19): siRNA sense strand
uuauugaggaugccauuaa

SEQ ID NO: 1227653 - RNA, 19 nt, Homo sapiens
  misc_RNA (1)...(19): siRNA sense strand
gauacuggagauccucaaa

SEQ ID NO: 1227654 - RNA, 19 nt, Homo sapiens
  misc_RNA (1)...(19): siRNA sense strand
caaccuugcaagacaaaug

SEQ ID NO: 1227655 - RNA, 19 nt, Homo sapiens
  misc_RNA (1)...(19): siRNA sense strand
cuacuccugcugacugaua

SEQ ID NO: 1227656 - RNA, 19 nt, Homo sapiens
  misc_RNA (1)...(19): siRNA sense strand
guuccaagugggacagaua

SEQ ID NO: 1227657 - RNA, 19 nt, Homo sapiens
  misc_RNA (1)...(19): siRNA sense strand
gggagcugcuuugcugaga

SEQ ID NO: 1227658 - RNA, 19 nt, Homo sapiens
  misc_RNA (1)...(19): siRNA sense strand
uauccaacuuucuuuccuu

SEQ ID NO: 1227659 - RNA, 19 nt, Homo sapiens
  misc_RNA (1)...(19): siRNA sense strand
agacaaaugaucaugaaag

SEQ ID NO: 1227660 - RNA, 19 nt, Homo sapiens
  misc_RNA (1)...(19): siRNA sense strand
gaagcuaaacauucucaac

SEQ ID NO: 1227661 - RNA, 19 nt, Homo sapiens
  misc_RNA (1)...(19): siRNA sense strand
ccauuaaguauuucaagga

SEQ ID NO: 1227662 - RNA, 19 nt, Homo sapiens
  misc_RNA (1)...(19): siRNA sense strand
caacuuucuuuccuuagcu

SEQ ID NO: 1227663 - RNA, 19 nt, Homo sapiens
  misc_RNA (1)...(19): siRNA sense strand
auccaacuuucuuuccuua

SEQ ID NO: 1227664 - RNA, 19 nt, Homo sapiens
  misc_RNA (1)...(19): siRNA sense strand
ggugagaacauauccaacu

SEQ ID NO: 1227665 - RNA, 19 nt, Homo sapiens
  misc_RNA (1)...(19): siRNA sense strand
ugaggaugccauuaaguau

SEQ ID NO: 1227666 - RNA, 19 nt, Homo sapiens
  misc_RNA (1)...(19): siRNA sense strand
uacuggagauccucaaagu

SEQ ID NO: 1227667 - RNA, 19 nt, Homo sapiens
  misc_RNA (1)...(19): siRNA sense strand
gcugaacugcccaggaaug

SEQ ID NO: 1227668 - RNA, 19 nt, Homo sapiens
  misc_RNA (1)...(19): siRNA sense strand
ccuuagcuggcaauacuua

SEQ ID NO: 1227669 - RNA, 19 nt, Homo sapiens
  misc_RNA (1)...(19): siRNA sense strand
aagaagugguggacacaag

SEQ ID NO: 1227670 - RNA, 19 nt, Homo sapiens
  misc_RNA (1)...(19): siRNA sense strand
gggauuaccagcaguacca

SEQ ID NO: 1227671 - RNA, 19 nt, Homo sapiens
  misc_RNA (1)...(19): siRNA sense strand
cagagagcaguaucuuuau

SEQ ID NO: 1227672 - RNA, 19 nt, Homo sapiens
  misc_RNA (1)...(19): siRNA sense strand
gcaggcggaccaagaacug

SEQ ID NO: 1227673 - RNA, 19 nt, Homo sapiens
  misc_RNA (1)...(19): siRNA sense strand
aagcuaaacauucucaaca

SEQ ID NO: 1227674 - RNA, 19 nt, Homo sapiens
  misc_RNA (1)...(19): siRNA sense strand
uggcaauacuuaccaacuc

SEQ ID NO: 1227675 - RNA, 19 nt, Homo sapiens
  misc_RNA (1)...(19): siRNA sense strand
ccaacucacacgaggcauu

SEQ ID NO: 1227676 - RNA, 19 nt, Homo sapiens
  misc_RNA (1)...(19): siRNA sense strand
auucguggcugcugcugaa

SEQ ID NO: 1227677 - RNA, 19 nt, Homo sapiens
  misc_RNA (1)...(19): siRNA sense strand
ggccagcaguacagaaacu

SEQ ID NO: 1227678 - RNA, 19 nt, Homo sapiens
  misc_RNA (1)...(19): siRNA sense strand
uauugaggaugccauuaag

SEQ ID NO: 1227679 - RNA, 19 nt, Homo sapiens
  misc_RNA (1)...(19): siRNA sense strand
ccguaaagcucuggacaac

SEQ ID NO: 1227680 - RNA, 19 nt, Homo sapiens
  misc_RNA (1)...(19): siRNA sense strand
agcuaaacauucucaacaa

SEQ ID NO: 1227681 - RNA, 19 nt, Homo sapiens
  misc_RNA (1)...(19): siRNA sense strand
cgaaucaaagcacuuacau

SEQ ID NO: 1227682 - RNA, 19 nt, Homo sapiens
  misc_RNA (1)...(19): siRNA sense strand
ccaacuuucuuuccuuagc

SEQ ID NO: 1227683 - RNA, 19 nt, Homo sapiens
  misc_RNA (1)...(19): siRNA sense strand
ugagcuugaggauaacaua

SEQ ID NO: 1227684 - RNA, 19 nt, Homo sapiens
  misc_RNA (1)...(19): siRNA sense strand
gacaaccuugcaagacaaa

SEQ ID NO: 1227685 - RNA, 19 nt, Homo sapiens
  misc_RNA (1)...(19): siRNA sense strand
uuccuuagcuggcaauacu

SEQ ID NO: 1227686 - RNA, 19 nt, Homo sapiens
  misc_RNA (1)...(19): siRNA sense strand
guucagaagguccacaaag

SEQ ID NO: 1227687 - RNA, 19 nt, Homo sapiens
  misc_RNA (1)...(19): siRNA sense strand
gucuggcucucucagcauu

SEQ ID NO: 1227688 - RNA, 19 nt, Homo sapiens
  misc_RNA (1)...(19): siRNA sense strand
gcccaggaaugaggcagau

SEQ ID NO: 1227689 - RNA, 19 nt, Homo sapiens
  misc_RNA (1)...(19): siRNA sense strand
gagccagagccaaucuuca

SEQ ID NO: 1227690 - RNA, 19 nt, Homo sapiens
  misc_RNA (1)...(19): siRNA sense strand
cagacgagccagagccaau

SEQ ID NO: 1227691 - RNA, 19 nt, Homo sapiens
  misc_RNA (1)...(19): siRNA sense strand
aggcagaugagcuccguaa

SEQ ID NO: 1227692 - RNA, 19 nt, Homo sapiens
  misc_RNA (1)...(19): siRNA sense strand
ugggacagauacuggagau

SEQ ID NO: 1227693 - RNA, 19 nt, Homo sapiens
  misc_RNA (1)...(19): siRNA sense strand
gaaaagugagcuugaggau

SEQ ID NO: 1227694 - RNA, 19 nt, Homo sapiens
  misc_RNA (1)...(19): siRNA sense strand
aaagugagcuugaggauaa

SEQ ID NO: 1227695 - RNA, 19 nt, Homo sapiens
  misc_RNA (1)...(19): siRNA sense strand
gaacauauccaacuuucuu

SEQ ID NO: 1227696 - RNA, 19 nt, Homo sapiens
  misc_RNA (1)...(19): siRNA sense strand
ccagagagcaguaucuuua

SEQ ID NO: 1227697 - RNA, 19 nt, Homo sapiens
  misc_RNA (1)...(19): siRNA sense strand
caagacaaaugaucaugaa

SEQ ID NO: 1227698 - RNA, 19 nt, Homo sapiens
  misc_RNA (1)...(19): siRNA sense strand
gacaaaugaucaugaaaga

SEQ ID NO: 1227699 - RNA, 19 nt, Homo sapiens
  misc_RNA (1)...(19): siRNA sense strand
ggacauccgugcccucaga

SEQ ID NO: 1227700 - RNA, 19 nt, Homo sapiens
  misc_RNA (1)...(19): siRNA sense strand
ccuguaagcuucuuucuug

SEQ ID NO: 1227701 - RNA, 19 nt, Homo sapiens
  misc_RNA (1)...(19): siRNA sense strand
gagaacauauccaacuuuc

SEQ ID NO: 1227702 - RNA, 19 nt, Homo sapiens
  misc_RNA (1)...(19): siRNA sense strand
gaaaugagcagaggaguca

SEQ ID NO: 1227703 - RNA, 19 nt, Homo sapiens
  misc_RNA (1)...(19): siRNA sense strand
gagccaaucucagcugaaa

SEQ ID NO: 1227704 - RNA, 19 nt, Homo sapiens
  misc_RNA (1)...(19): siRNA sense strand
ggacaaccuugcaagacaa

SEQ ID NO: 1227705 - RNA, 19 nt, Homo sapiens
  misc_RNA (1)...(19): siRNA sense strand
gagccaaucuucagucagu

SEQ ID NO: 1227706 - RNA, 19 nt, Homo sapiens
  misc_RNA (1)...(19): siRNA sense strand
aaucaaagcacuuacauga

SEQ ID NO: 1227707 - RNA, 19 nt, Homo sapiens
  misc_RNA (1)...(19): siRNA sense strand
guacgaaucaaagcacuua

SEQ ID NO: 1227708 - RNA, 19 nt, Homo sapiens
  misc_RNA (1)...(19): siRNA sense strand
caaaugaucaugaaagaca

SEQ ID NO: 1227709 - RNA, 19 nt, Homo sapiens
  misc_RNA (1)...(19): siRNA sense strand
gcaccaccaucgccaaugu

SEQ ID NO: 1227710 - RNA, 19 nt, Homo sapiens
  misc_RNA (1)...(19): siRNA sense strand
gcaagacaaaugaucauga

SEQ ID NO: 1227711 - RNA, 19 nt, Homo sapiens
  misc_RNA (1)...(19): siRNA sense strand
gcuaaacauucucaacaau

SEQ ID NO: 1227712 - RNA, 19 nt, Homo sapiens
  misc_RNA (1)...(19): siRNA sense strand
gagucaagcucacggaugu

SEQ ID NO: 1227713 - RNA, 19 nt, Homo sapiens
  misc_RNA (1)...(19): siRNA sense strand
gaggagaagcuaaacauuc

SEQ ID NO: 1227714 - RNA, 19 nt, Homo sapiens
  misc_RNA (1)...(19): siRNA sense strand
aggaugccauuaaguauuu

SEQ ID NO: 1227715 - RNA, 19 nt, Homo sapiens
  misc_RNA (1)...(19): siRNA sense strand
guaaagcucuggacaaccu

SEQ ID NO: 1227716 - RNA, 19 nt, Homo sapiens
  misc_RNA (1)...(19): siRNA sense strand
gagagcaguaucuuuauug

SEQ ID NO: 1227717 - RNA, 19 nt, Homo sapiens
  misc_RNA (1)...(19): siRNA sense strand
caaaagccuugacaaauug

SEQ ID NO: 1227718 - RNA, 19 nt, Homo sapiens
  misc_RNA (1)...(19): siRNA sense strand
gaggaugccauuaaguauu

SEQ ID NO: 1227719 - RNA, 19 nt, Homo sapiens
  misc_RNA (1)...(19): siRNA sense strand
agagagcaguaucuuuauu

SEQ ID NO: 1227720 - RNA, 19 nt, Homo sapiens
  misc_RNA (1)...(19): siRNA sense strand
gugagaacauauccaacuu

SEQ ID NO: 1227721 - RNA, 19 nt, Homo sapiens
  misc_RNA (1)...(19): siRNA sense strand
gcuugaggauaacauaaga

SEQ ID NO: 1227722 - RNA, 19 nt, Homo sapiens
  misc_RNA (1)...(19): siRNA sense strand
cuggagauccucaaaguaa

SEQ ID NO: 1227723 - RNA, 19 nt, Homo sapiens
  misc_RNA (1)...(19): siRNA sense strand
ggagcgagggugcaacaaa

SEQ ID NO: 1227724 - RNA, 19 nt, Homo sapiens
  misc_RNA (1)...(19): siRNA sense strand
gcagaugagcuccguaaag

SEQ ID NO: 1227725 - RNA, 19 nt, Homo sapiens
  misc_RNA (1)...(19): siRNA sense strand
ggaggagaagcuaaacauu

SEQ ID NO: 1227726 - RNA, 19 nt, Homo sapiens
  misc_RNA (1)...(19): siRNA sense strand
gauaaaggccagcaguaca

SEQ ID NO: 1227727 - RNA, 19 nt, Homo sapiens
  misc_RNA (1)...(19): siRNA sense strand
gagcgagggugcaacaaaa

SEQ ID NO: 1227728 - RNA, 19 nt, Homo sapiens
  misc_RNA (1)...(19): siRNA sense strand
cugaggagcugaagaaggu

SEQ ID NO: 1227729 - RNA, 19 nt, Homo sapiens
  misc_RNA (1)...(19): siRNA sense strand
ggcaauacuuaccaacuca

SEQ ID NO: 1227730 - RNA, 19 nt, Homo sapiens
  misc_RNA (1)...(19): siRNA sense strand
gagcuugaggauaacauaa

SEQ ID NO: 1227731 - RNA, 19 nt, Homo sapiens
  misc_RNA (1)...(19): siRNA sense strand
cugcugaacugcccaggaa

SEQ ID NO: 1227732 - RNA, 19 nt, Homo sapiens
  misc_RNA (1)...(19): siRNA sense strand
cagaugagcuccguaaagc

SEQ ID NO: 1227733 - RNA, 19 nt, Homo sapiens
  misc_RNA (1)...(19): siRNA sense strand
cucaggagcuggaggagaa

SEQ ID NO: 1227734 - RNA, 19 nt, Homo sapiens
  misc_RNA (1)...(19): siRNA sense strand
agagcaguaucuuuauuga

SEQ ID NO: 1227735 - RNA, 19 nt, Homo sapiens
  misc_RNA (1)...(19): siRNA sense strand
gggauggaguugggaauca

SEQ ID NO: 1227736 - RNA, 19 nt, Homo sapiens
  misc_RNA (1)...(19): siRNA sense strand
aaagugagcacacagaauc

SEQ ID NO: 1227737 - RNA, 19 nt, Homo sapiens
  misc_RNA (1)...(19): siRNA sense strand
gaaagaagugguggacaca

SEQ ID NO: 1227738 - RNA, 19 nt, Homo sapiens
  misc_RNA (1)...(19): siRNA sense strand
caacaaaacguuccaagug

SEQ ID NO: 1227739 - RNA, 19 nt, Homo sapiens
  misc_RNA (1)...(19): siRNA sense strand
gagcugcuuugcugagagu

SEQ ID NO: 1227740 - RNA, 19 nt, Homo sapiens
  misc_RNA (1)...(19): siRNA sense strand
gaaucaaagcacuuacaug

SEQ ID NO: 1227741 - RNA, 19 nt, Homo sapiens
  misc_RNA (1)...(19): siRNA sense strand
ccaggaaugaggcagauga

SEQ ID NO: 1227742 - RNA, 19 nt, Homo sapiens
  misc_RNA (1)...(19): siRNA sense strand
cagagccaaucuucaguca

SEQ ID NO: 1227743 - RNA, 19 nt, Homo sapiens
  misc_RNA (1)...(19): siRNA sense strand
caacucacacgaggcauug

SEQ ID NO: 1227744 - RNA, 19 nt, Homo sapiens
  misc_RNA (1)...(19): siRNA sense strand
uugaggaugccauuaagua

SEQ ID NO: 1227745 - RNA, 19 nt, Homo sapiens
  misc_RNA (1)...(19): siRNA sense strand
ugagaacauauccaacuuu

SEQ ID NO: 1227746 - RNA, 19 nt, Homo sapiens
  misc_RNA (1)...(19): siRNA sense strand
uggacaaccuugcaagaca

SEQ ID NO: 1227747 - RNA, 19 nt, Homo sapiens
  misc_RNA (1)...(19): siRNA sense strand
uuauugaggaugccauuaa

SEQ ID NO: 1227748 - RNA, 19 nt, Homo sapiens
  misc_RNA (1)...(19): siRNA sense strand
gauacuggagauccucaaa

SEQ ID NO: 1227749 - RNA, 19 nt, Homo sapiens
  misc_RNA (1)...(19): siRNA sense strand
caaccuugcaagacaaaug

SEQ ID NO: 1227750 - RNA, 19 nt, Homo sapiens
  misc_RNA (1)...(19): siRNA sense strand
cuacuccugcugacugaua

SEQ ID NO: 1227751 - RNA, 19 nt, Homo sapiens
  misc_RNA (1)...(19): siRNA sense strand
guuccaagugggacagaua

SEQ ID NO: 1227752 - RNA, 19 nt, Homo sapiens
  misc_RNA (1)...(19): siRNA sense strand
uauccaacuuucuuuccuu

SEQ ID NO: 1227753 - RNA, 19 nt, Homo sapiens
  misc_RNA (1)...(19): siRNA sense strand
gggagcugcuuugcugaga

SEQ ID NO: 1227754 - RNA, 19 nt, Homo sapiens
  misc_RNA (1)...(19): siRNA sense strand
agacaaaugaucaugaaag

SEQ ID NO: 1227755 - RNA, 19 nt, Homo sapiens
  misc_RNA (1)...(19): siRNA sense strand
gaagcuaaacauucucaac

SEQ ID NO: 1227756 - RNA, 19 nt, Homo sapiens
  misc_RNA (1)...(19): siRNA sense strand
ccauuaaguauuucaagga

SEQ ID NO: 1227757 - RNA, 19 nt, Homo sapiens
  misc_RNA (1)...(19): siRNA sense strand
caacuuucuuuccuuagcu

SEQ ID NO: 1227758 - RNA, 19 nt, Homo sapiens
  misc_RNA (1)...(19): siRNA sense strand
auccaacuuucuuuccuua

SEQ ID NO: 1227759 - RNA, 19 nt, Homo sapiens
  misc_RNA (1)...(19): siRNA sense strand
ggugagaacauauccaacu

SEQ ID NO: 1227760 - RNA, 19 nt, Homo sapiens
  misc_RNA (1)...(19): siRNA sense strand
ugaggaugccauuaaguau

SEQ ID NO: 1227761 - RNA, 19 nt, Homo sapiens
  misc_RNA (1)...(19): siRNA sense strand
uacuggagauccucaaagu

SEQ ID NO: 1227762 - RNA, 19 nt, Homo sapiens
  misc_RNA (1)...(19): siRNA sense strand
gcugaacugcccaggaaug

SEQ ID NO: 1227763 - RNA, 19 nt, Homo sapiens
  misc_RNA (1)...(19): siRNA sense strand
ccuuagcuggcaauacuua

SEQ ID NO: 1227764 - RNA, 19 nt, Homo sapiens
  misc_RNA (1)...(19): siRNA sense strand
aagaagugguggacacaag

SEQ ID NO: 1227765 - RNA, 19 nt, Homo sapiens
  misc_RNA (1)...(19): siRNA sense strand
gggauuaccagcaguacca

SEQ ID NO: 1227766 - RNA, 19 nt, Homo sapiens
  misc_RNA (1)...(19): siRNA sense strand
cagagagcaguaucuuuau

SEQ ID NO: 1227767 - RNA, 19 nt, Homo sapiens
  misc_RNA (1)...(19): siRNA sense strand
gcaggcggaccaagaacug

SEQ ID NO: 1227768 - RNA, 19 nt, Homo sapiens
  misc_RNA (1)...(19): siRNA sense strand
aagcuaaacauucucaaca

SEQ ID NO: 1227769 - RNA, 19 nt, Homo sapiens
  misc_RNA (1)...(19): siRNA sense strand
uggcaauacuuaccaacuc

SEQ ID NO: 1227770 - RNA, 19 nt, Homo sapiens
  misc_RNA (1)...(19): siRNA sense strand
ccaacucacacgaggcauu

SEQ ID NO: 1227771 - RNA, 19 nt, Homo sapiens
  misc_RNA (1)...(19): siRNA sense strand
auucguggcugcugcugaa

SEQ ID NO: 1227772 - RNA, 19 nt, Homo sapiens
  misc_RNA (1)...(19): siRNA sense strand
ggccagcaguacagaaacu

SEQ ID NO: 1227773 - RNA, 19 nt, Homo sapiens
  misc_RNA (1)...(19): siRNA sense strand
uauugaggaugccauuaag

SEQ ID NO: 1227774 - RNA, 19 nt, Homo sapiens
  misc_RNA (1)...(19): siRNA sense strand
ccguaaagcucuggacaac

SEQ ID NO: 1227775 - RNA, 19 nt, Homo sapiens
  misc_RNA (1)...(19): siRNA sense strand
agcuaaacauucucaacaa

SEQ ID NO: 1227776 - RNA, 19 nt, Homo sapiens
  misc_RNA (1)...(19): siRNA sense strand
cgaaucaaagcacuuacau

SEQ ID NO: 1227777 - RNA, 19 nt, Homo sapiens
  misc_RNA (1)...(19): siRNA sense strand
ccaacuuucuuuccuuagc

SEQ ID NO: 1227778 - RNA, 19 nt, Homo sapiens
  misc_RNA (1)...(19): siRNA sense strand
ugagcuugaggauaacaua

SEQ ID NO: 1227779 - RNA, 19 nt, Homo sapiens
  misc_RNA (1)...(19): siRNA sense strand
gacaaccuugcaagacaaa

SEQ ID NO: 1227780 - RNA, 19 nt, Homo sapiens
  misc_RNA (1)...(19): siRNA sense strand
uuccuuagcuggcaauacu

SEQ ID NO: 1227781 - RNA, 19 nt, Homo sapiens
  misc_RNA (1)...(19): siRNA sense strand
guucagaagguccacaaag

SEQ ID NO: 1227782 - RNA, 19 nt, Homo sapiens
  misc_RNA (1)...(19): siRNA sense strand
gucuggcucucucagcauu

SEQ ID NO: 1227783 - RNA, 19 nt, Homo sapiens
  misc_RNA (1)...(19): siRNA sense strand
gcccaggaaugaggcagau

SEQ ID NO: 1227784 - RNA, 19 nt, Homo sapiens
  misc_RNA (1)...(19): siRNA sense strand
gagccagagccaaucuuca

SEQ ID NO: 1227785 - RNA, 19 nt, Homo sapiens
  misc_RNA (1)...(19): siRNA sense strand
cagacgagccagagccaau

SEQ ID NO: 1227786 - RNA, 19 nt, Homo sapiens
  misc_RNA (1)...(19): siRNA sense strand
ugggacagauacuggagau

SEQ ID NO: 1227787 - RNA, 19 nt, Homo sapiens
  misc_RNA (1)...(19): siRNA sense strand
gaaaagugagcuugaggau

SEQ ID NO: 1227788 - RNA, 19 nt, Homo sapiens
  misc_RNA (1)...(19): siRNA sense strand
aggcagaugagcuccguaa

SEQ ID NO: 1227789 - RNA, 19 nt, Homo sapiens
  misc_RNA (1)...(19): siRNA sense strand
aaagugagcuugaggauaa

SEQ ID NO: 1227790 - RNA, 19 nt, Homo sapiens
  misc_RNA (1)...(19): siRNA sense strand
gaacauauccaacuuucuu

SEQ ID NO: 1227791 - RNA, 19 nt, Homo sapiens
  misc_RNA (1)...(19): siRNA sense strand
ccagagagcaguaucuuua

SEQ ID NO: 1227792 - RNA, 19 nt, Homo sapiens
  misc_RNA (1)...(19): siRNA sense strand
caagacaaaugaucaugaa

SEQ ID NO: 1227793 - RNA, 19 nt, Homo sapiens
  misc_RNA (1)...(19): siRNA sense strand
gacaaaugaucaugaaaga

SEQ ID NO: 1227794 - RNA, 19 nt, Homo sapiens
  misc_RNA (1)...(19): siRNA sense strand
ggacauccgugcccucaga

SEQ ID NO: 1227795 - RNA, 19 nt, Homo sapiens
  misc_RNA (1)...(19): siRNA sense strand
ccuguaagcuucuuucuug

SEQ ID NO: 1227796 - RNA, 19 nt, Homo sapiens
  misc_RNA (1)...(19): siRNA sense strand
gagaacauauccaacuuuc

SEQ ID NO: 1227797 - RNA, 19 nt, Homo sapiens
  misc_RNA (1)...(19): siRNA sense strand
gaaaugagcagaggaguca

SEQ ID NO: 1227798 - RNA, 19 nt, Homo sapiens
  misc_RNA (1)...(19): siRNA sense strand
gagccaaucucagcugaaa

SEQ ID NO: 1227799 - RNA, 19 nt, Homo sapiens
  misc_RNA (1)...(19): siRNA sense strand
ggacaaccuugcaagacaa

SEQ ID NO: 1227800 - RNA, 19 nt, Homo sapiens
  misc_RNA (1)...(19): siRNA sense strand
gagccaaucuucagucagu

SEQ ID NO: 1227801 - RNA, 19 nt, Homo sapiens
  misc_RNA (1)...(19): siRNA sense strand
aaucaaagcacuuacauga

SEQ ID NO: 1227802 - RNA, 19 nt, Homo sapiens
  misc_RNA (1)...(19): siRNA sense strand
guacgaaucaaagcacuua

SEQ ID NO: 1227803 - RNA, 19 nt, Homo sapiens
  misc_RNA (1)...(19): siRNA sense strand
caaaugaucaugaaagaca

SEQ ID NO: 1227804 - RNA, 19 nt, Homo sapiens
  misc_RNA (1)...(19): siRNA sense strand
gcaccaccaucgccaaugu

SEQ ID NO: 1227805 - RNA, 19 nt, Homo sapiens
  misc_RNA (1)...(19): siRNA sense strand
gcaagacaaaugaucauga

SEQ ID NO: 1227806 - RNA, 19 nt, Homo sapiens
  misc_RNA (1)...(19): siRNA sense strand
gcuaaacauucucaacaau

SEQ ID NO: 1227807 - RNA, 19 nt, Homo sapiens
  misc_RNA (1)...(19): siRNA sense strand
gagucaagcucacggaugu

SEQ ID NO: 1227808 - RNA, 19 nt, Homo sapiens
  misc_RNA (1)...(19): siRNA sense strand
gaggagaagcuaaacauuc

SEQ ID NO: 1227809 - RNA, 19 nt, Homo sapiens
  misc_RNA (1)...(19): siRNA sense strand
aggaugccauuaaguauuu

SEQ ID NO: 1227810 - RNA, 19 nt, Homo sapiens
  misc_RNA (1)...(19): siRNA sense strand
guaaagcucuggacaaccu

SEQ ID NO: 1227811 - RNA, 19 nt, Homo sapiens
  misc_RNA (1)...(19): siRNA sense strand
gagagcaguaucuuuauug

SEQ ID NO: 1227812 - RNA, 19 nt, Homo sapiens
  misc_RNA (1)...(19): siRNA sense strand
caaaagccuugacaaauug

SEQ ID NO: 1227813 - RNA, 19 nt, Homo sapiens
  misc_RNA (1)...(19): siRNA sense strand
gaggaugccauuaaguauu

SEQ ID NO: 1227814 - RNA, 19 nt, Homo sapiens
  misc_RNA (1)...(19): siRNA sense strand
agagagcaguaucuuuauu

SEQ ID NO: 1227815 - RNA, 19 nt, Homo sapiens
  misc_RNA (1)...(19): siRNA sense strand
gugagaacauauccaacuu

SEQ ID NO: 1227816 - RNA, 19 nt, Homo sapiens
  misc_RNA (1)...(19): siRNA sense strand
gcuugaggauaacauaaga

SEQ ID NO: 1227817 - RNA, 19 nt, Homo sapiens
  misc_RNA (1)...(19): siRNA sense strand
cuggagauccucaaaguaa

SEQ ID NO: 1227818 - RNA, 19 nt, Homo sapiens
  misc_RNA (1)...(19): siRNA sense strand
ggagcgagggugcaacaaa

SEQ ID NO: 1227819 - RNA, 19 nt, Homo sapiens
  misc_RNA (1)...(19): siRNA sense strand
gcagaugagcuccguaaag

SEQ ID NO: 1227820 - RNA, 19 nt, Homo sapiens
  misc_RNA (1)...(19): siRNA sense strand
ggaggagaagcuaaacauu

SEQ ID NO: 1227821 - RNA, 19 nt, Homo sapiens
  misc_RNA (1)...(19): siRNA sense strand
gauaaaggccagcaguaca

SEQ ID NO: 1227822 - RNA, 19 nt, Homo sapiens
  misc_RNA (1)...(19): siRNA sense strand
gagcgagggugcaacaaaa

SEQ ID NO: 1227823 - RNA, 19 nt, Homo sapiens
  misc_RNA (1)...(19): siRNA sense strand
cugaggagcugaagaaggu

SEQ ID NO: 1227824 - RNA, 19 nt, Homo sapiens
  misc_RNA (1)...(19): siRNA sense strand
ggcaauacuuaccaacuca

SEQ ID NO: 1227825 - RNA, 19 nt, Homo sapiens
  misc_RNA (1)...(19): siRNA sense strand
gagcuugaggauaacauaa

SEQ ID NO: 1227826 - RNA, 19 nt, Homo sapiens
  misc_RNA (1)...(19): siRNA sense strand
cugcugaacugcccaggaa

SEQ ID NO: 1227827 - RNA, 19 nt, Homo sapiens
  misc_RNA (1)...(19): siRNA sense strand
cagaugagcuccguaaagc

SEQ ID NO: 1227828 - RNA, 19 nt, Homo sapiens
  misc_RNA (1)...(19): siRNA sense strand
cucaggagcuggaggagaa

SEQ ID NO: 1227829 - RNA, 19 nt, Homo sapiens
  misc_RNA (1)...(19): siRNA sense strand
agagcaguaucuuuauuga

SEQ ID NO: 1227830 - RNA, 19 nt, Homo sapiens
  misc_RNA (1)...(19): siRNA sense strand
gggauggaguugggaauca

SEQ ID NO: 1227831 - RNA, 19 nt, Homo sapiens
  misc_RNA (1)...(19): siRNA sense strand
aaagugagcacacagaauc

SEQ ID NO: 1227832 - RNA, 19 nt, Homo sapiens
  misc_RNA (1)...(19): siRNA sense strand
gaaagaagugguggacaca

SEQ ID NO: 1227833 - RNA, 19 nt, Homo sapiens
  misc_RNA (1)...(19): siRNA sense strand
caacaaaacguuccaagug

SEQ ID NO: 1227834 - RNA, 19 nt, Homo sapiens
  misc_RNA (1)...(19): siRNA sense strand
gagcugcuuugcugagagu

SEQ ID NO: 1227835 - RNA, 19 nt, Homo sapiens
  misc_RNA (1)...(19): siRNA sense strand
gaaucaaagcacuuacaug

SEQ ID NO: 1227836 - RNA, 19 nt, Homo sapiens
  misc_RNA (1)...(19): siRNA sense strand
ccaggaaugaggcagauga

SEQ ID NO: 1227837 - RNA, 19 nt, Homo sapiens
  misc_RNA (1)...(19): siRNA sense strand
cagagccaaucuucaguca

SEQ ID NO: 1227838 - RNA, 19 nt, Homo sapiens
  misc_RNA (1)...(19): siRNA sense strand
caacucacacgaggcauug

SEQ ID NO: 1227839 - RNA, 19 nt, Homo sapiens
  misc_RNA (1)...(19): siRNA sense strand
uugaggaugccauuaagua

SEQ ID NO: 1227840 - RNA, 19 nt, Homo sapiens
  misc_RNA (1)...(19): siRNA sense strand
ugagaacauauccaacuuu

SEQ ID NO: 1227841 - RNA, 19 nt, Homo sapiens
  misc_RNA (1)...(19): siRNA sense strand
uggacaaccuugcaagaca

SEQ ID NO: 1227842 - RNA, 19 nt, Homo sapiens
  misc_RNA (1)...(19): siRNA sense strand
uuauugaggaugccauuaa

SEQ ID NO: 1227843 - RNA, 19 nt, Homo sapiens
  misc_RNA (1)...(19): siRNA sense strand
gauacuggagauccucaaa

SEQ ID NO: 1227844 - RNA, 19 nt, Homo sapiens
  misc_RNA (1)...(19): siRNA sense strand
caaccuugcaagacaaaug

SEQ ID NO: 1227845 - RNA, 19 nt, Homo sapiens
  misc_RNA (1)...(19): siRNA sense strand
cuacuccugcugacugaua

SEQ ID NO: 1227846 - RNA, 19 nt, Homo sapiens
  misc_RNA (1)...(19): siRNA sense strand
guuccaagugggacagaua

SEQ ID NO: 1227847 - RNA, 19 nt, Homo sapiens
  misc_RNA (1)...(19): siRNA sense strand
uauccaacuuucuuuccuu

SEQ ID NO: 1227848 - RNA, 19 nt, Homo sapiens
  misc_RNA (1)...(19): siRNA sense strand
gggagcugcuuugcugaga

SEQ ID NO: 1227849 - RNA, 19 nt, Homo sapiens
  misc_RNA (1)...(19): siRNA sense strand
agacaaaugaucaugaaag

SEQ ID NO: 1227850 - RNA, 19 nt, Homo sapiens
  misc_RNA (1)...(19): siRNA sense strand
gaagcuaaacauucucaac

SEQ ID NO: 1227851 - RNA, 19 nt, Homo sapiens
  misc_RNA (1)...(19): siRNA sense strand
ccauuaaguauuucaagga

SEQ ID NO: 1227852 - RNA, 19 nt, Homo sapiens
  misc_RNA (1)...(19): siRNA sense strand
caacuuucuuuccuuagcu

SEQ ID NO: 1227853 - RNA, 19 nt, Homo sapiens
  misc_RNA (1)...(19): siRNA sense strand
auccaacuuucuuuccuua

SEQ ID NO: 1227854 - RNA, 19 nt, Homo sapiens
  misc_RNA (1)...(19): siRNA sense strand
ggugagaacauauccaacu

SEQ ID NO: 1227855 - RNA, 19 nt, Homo sapiens
  misc_RNA (1)...(19): siRNA sense strand
ugaggaugccauuaaguau

SEQ ID NO: 1227856 - RNA, 19 nt, Homo sapiens
  misc_RNA (1)...(19): siRNA sense strand
uacuggagauccucaaagu

SEQ ID NO: 1227857 - RNA, 19 nt, Homo sapiens
  misc_RNA (1)...(19): siRNA sense strand
gcugaacugcccaggaaug

SEQ ID NO: 1227858 - RNA, 19 nt, Homo sapiens
  misc_RNA (1)...(19): siRNA sense strand
ccuuagcuggcaauacuua

SEQ ID NO: 1227859 - RNA, 19 nt, Homo sapiens
  misc_RNA (1)...(19): siRNA sense strand
aagaagugguggacacaag

SEQ ID NO: 1227860 - RNA, 19 nt, Homo sapiens
  misc_RNA (1)...(19): siRNA sense strand
gggauuaccagcaguacca

SEQ ID NO: 1227861 - RNA, 19 nt, Homo sapiens
  misc_RNA (1)...(19): siRNA sense strand
cagagagcaguaucuuuau

SEQ ID NO: 1227862 - RNA, 19 nt, Homo sapiens
  misc_RNA (1)...(19): siRNA sense strand
gcaggcggaccaagaacug

SEQ ID NO: 1227863 - RNA, 19 nt, Homo sapiens
  misc_RNA (1)...(19): siRNA sense strand
aagcuaaacauucucaaca

SEQ ID NO: 1227864 - RNA, 19 nt, Homo sapiens
  misc_RNA (1)...(19): siRNA sense strand
uggcaauacuuaccaacuc

SEQ ID NO: 1227865 - RNA, 19 nt, Homo sapiens
  misc_RNA (1)...(19): siRNA sense strand
ccaacucacacgaggcauu

SEQ ID NO: 1227866 - RNA, 19 nt, Homo sapiens
  misc_RNA (1)...(19): siRNA sense strand
auucguggcugcugcugaa

SEQ ID NO: 1227867 - RNA, 19 nt, Homo sapiens
  misc_RNA (1)...(19): siRNA sense strand
ggccagcaguacagaaacu

SEQ ID NO: 1227868 - RNA, 19 nt, Homo sapiens
  misc_RNA (1)...(19): siRNA sense strand
uauugaggaugccauuaag

SEQ ID NO: 1227869 - RNA, 19 nt, Homo sapiens
  misc_RNA (1)...(19): siRNA sense strand
ccguaaagcucuggacaac

SEQ ID NO: 1227870 - RNA, 19 nt, Homo sapiens
  misc_RNA (1)...(19): siRNA sense strand
agcuaaacauucucaacaa

SEQ ID NO: 1227871 - RNA, 19 nt, Homo sapiens
  misc_RNA (1)...(19): siRNA sense strand
cgaaucaaagcacuuacau

SEQ ID NO: 1227872 - RNA, 19 nt, Homo sapiens
  misc_RNA (1)...(19): siRNA sense strand
ccaacuuucuuuccuuagc

SEQ ID NO: 1227873 - RNA, 19 nt, Homo sapiens
  misc_RNA (1)...(19): siRNA sense strand
ugagcuugaggauaacaua

SEQ ID NO: 1227874 - RNA, 19 nt, Homo sapiens
  misc_RNA (1)...(19): siRNA sense strand
gacaaccuugcaagacaaa

SEQ ID NO: 1227875 - RNA, 19 nt, Homo sapiens
  misc_RNA (1)...(19): siRNA sense strand
uuccuuagcuggcaauacu

SEQ ID NO: 1227876 - RNA, 19 nt, Homo sapiens
  misc_RNA (1)...(19): siRNA sense strand
guucagaagguccacaaag

SEQ ID NO: 1227877 - RNA, 19 nt, Homo sapiens
  misc_RNA (1)...(19): siRNA sense strand
gucuggcucucucagcauu

SEQ ID NO: 1227878 - RNA, 19 nt, Homo sapiens
  misc_RNA (1)...(19): siRNA sense strand
gcccaggaaugaggcagau

SEQ ID NO: 1227879 - RNA, 19 nt, Homo sapiens
  misc_RNA (1)...(19): siRNA sense strand
gagccagagccaaucuuca

SEQ ID NO: 1227880 - RNA, 19 nt, Homo sapiens
  misc_RNA (1)...(19): siRNA sense strand
cagacgagccagagccaau

SEQ ID NO: 1227881 - RNA, 19 nt, Homo sapiens
  misc_RNA (1)...(19): siRNA sense strand
ugggacagauacuggagau

SEQ ID NO: 1227882 - RNA, 19 nt, Homo sapiens
  misc_RNA (1)...(19): siRNA sense strand
gaaaagugagcuugaggau

SEQ ID NO: 1227883 - RNA, 19 nt, Homo sapiens
  misc_RNA (1)...(19): siRNA sense strand
aggcagaugagcuccguaa

SEQ ID NO: 1227884 - RNA, 19 nt, Homo sapiens
  misc_RNA (1)...(19): siRNA sense strand
aaagugagcuugaggauaa

SEQ ID NO: 1227885 - RNA, 19 nt, Homo sapiens
  misc_RNA (1)...(19): siRNA sense strand
gaacauauccaacuuucuu

SEQ ID NO: 1227886 - RNA, 19 nt, Homo sapiens
  misc_RNA (1)...(19): siRNA sense strand
ccagagagcaguaucuuua

SEQ ID NO: 1227887 - RNA, 19 nt, Homo sapiens
  misc_RNA (1)...(19): siRNA sense strand
caagacaaaugaucaugaa

SEQ ID NO: 1227888 - RNA, 19 nt, Homo sapiens
  misc_RNA (1)...(19): siRNA sense strand
gacaaaugaucaugaaaga

SEQ ID NO: 1227889 - RNA, 19 nt, Homo sapiens
  misc_RNA (1)...(19): siRNA sense strand
ggacauccgugcccucaga

SEQ ID NO: 1227890 - RNA, 19 nt, Homo sapiens
  misc_RNA (1)...(19): siRNA sense strand
ccuguaagcuucuuucuug

SEQ ID NO: 1227891 - RNA, 19 nt, Homo sapiens
  misc_RNA (1)...(19): siRNA sense strand
gagaacauauccaacuuuc

SEQ ID NO: 1227892 - RNA, 19 nt, Homo sapiens
  misc_RNA (1)...(19): siRNA sense strand
gaaaugagcagaggaguca

SEQ ID NO: 1227893 - RNA, 19 nt, Homo sapiens
  misc_RNA (1)...(19): siRNA sense strand
gagccaaucucagcugaaa

SEQ ID NO: 1227894 - RNA, 19 nt, Homo sapiens
  misc_RNA (1)...(19): siRNA sense strand
ggacaaccuugcaagacaa

SEQ ID NO: 1227895 - RNA, 19 nt, Homo sapiens
  misc_RNA (1)...(19): siRNA sense strand
gagccaaucuucagucagu

SEQ ID NO: 1227896 - RNA, 19 nt, Homo sapiens
  misc_RNA (1)...(19): siRNA sense strand
aaucaaagcacuuacauga

SEQ ID NO: 1227897 - RNA, 19 nt, Homo sapiens
  misc_RNA (1)...(19): siRNA sense strand
guacgaaucaaagcacuua

SEQ ID NO: 1227898 - RNA, 19 nt, Homo sapiens
  misc_RNA (1)...(19): siRNA sense strand
caaaugaucaugaaagaca

SEQ ID NO: 1227899 - RNA, 19 nt, Homo sapiens
  misc_RNA (1)...(19): siRNA sense strand
gcaccaccaucgccaaugu

SEQ ID NO: 1227900 - RNA, 19 nt, Homo sapiens
  misc_RNA (1)...(19): siRNA sense strand
gcaagacaaaugaucauga

SEQ ID NO: 1227901 - RNA, 19 nt, Homo sapiens
  misc_RNA (1)...(19): siRNA sense strand
gcuaaacauucucaacaau

SEQ ID NO: 1227902 - RNA, 19 nt, Homo sapiens
  misc_RNA (1)...(19): siRNA sense strand
gagucaagcucacggaugu

SEQ ID NO: 1227903 - RNA, 19 nt, Homo sapiens
  misc_RNA (1)...(19): siRNA sense strand
gaggagaagcuaaacauuc

SEQ ID NO: 1227904 - RNA, 19 nt, Homo sapiens
  misc_RNA (1)...(19): siRNA sense strand
aggaugccauuaaguauuu

SEQ ID NO: 1227905 - RNA, 19 nt, Homo sapiens
  misc_RNA (1)...(19): siRNA sense strand
guaaagcucuggacaaccu

SEQ ID NO: 1227906 - RNA, 19 nt, Homo sapiens
  misc_RNA (1)...(19): siRNA sense strand
gagagcaguaucuuuauug

SEQ ID NO: 1227907 - RNA, 19 nt, Homo sapiens
  misc_RNA (1)...(19): siRNA sense strand
caaaagccuugacaaauug

SEQ ID NO: 1227908 - RNA, 19 nt, Homo sapiens
  misc_RNA (1)...(19): siRNA sense strand
gaggaugccauuaaguauu

SEQ ID NO: 1227909 - RNA, 19 nt, Homo sapiens
  misc_RNA (1)...(19): siRNA sense strand
agagagcaguaucuuuauu

SEQ ID NO: 1227910 - RNA, 19 nt, Homo sapiens
  misc_RNA (1)...(19): siRNA sense strand
gugagaacauauccaacuu

SEQ ID NO: 1227911 - RNA, 19 nt, Homo sapiens
  misc_RNA (1)...(19): siRNA sense strand
gcuugaggauaacauaaga

SEQ ID NO: 1227912 - RNA, 19 nt, Homo sapiens
  misc_RNA (1)...(19): siRNA sense strand
cuggagauccucaaaguaa

SEQ ID NO: 1227913 - RNA, 19 nt, Homo sapiens
  misc_RNA (1)...(19): siRNA sense strand
ggagcgagggugcaacaaa

SEQ ID NO: 1227914 - RNA, 19 nt, Homo sapiens
  misc_RNA (1)...(19): siRNA sense strand
gcagaugagcuccguaaag

SEQ ID NO: 1227915 - RNA, 19 nt, Homo sapiens
  misc_RNA (1)...(19): siRNA sense strand
ggaggagaagcuaaacauu

SEQ ID NO: 1227916 - RNA, 19 nt, Homo sapiens
  misc_RNA (1)...(19): siRNA sense strand
gauaaaggccagcaguaca

SEQ ID NO: 1227917 - RNA, 19 nt, Homo sapiens
  misc_RNA (1)...(19): siRNA sense strand
gagcuugaggauaacauaa

SEQ ID NO: 1227918 - RNA, 19 nt, Homo sapiens
  misc_RNA (1)...(19): siRNA sense strand
cugaggagcugaagaaggu

SEQ ID NO: 1227919 - RNA, 19 nt, Homo sapiens
  misc_RNA (1)...(19): siRNA sense strand
ggcaauacuuaccaacuca

SEQ ID NO: 1227920 - RNA, 19 nt, Homo sapiens
  misc_RNA (1)...(19): siRNA sense strand
gagcgagggugcaacaaaa

SEQ ID NO: 1227921 - RNA, 19 nt, Homo sapiens
  misc_RNA (1)...(19): siRNA sense strand
cugcugaacugcccaggaa

SEQ ID NO: 1227922 - RNA, 19 nt, Homo sapiens
  misc_RNA (1)...(19): siRNA sense strand
cagaugagcuccguaaagc

SEQ ID NO: 1227923 - RNA, 19 nt, Homo sapiens
  misc_RNA (1)...(19): siRNA sense strand
cucaggagcuggaggagaa

SEQ ID NO: 1227924 - RNA, 19 nt, Homo sapiens
  misc_RNA (1)...(19): siRNA sense strand
agagcaguaucuuuauuga

SEQ ID NO: 1227925 - RNA, 19 nt, Homo sapiens
  misc_RNA (1)...(19): siRNA sense strand
gggauggaguugggaauca

SEQ ID NO: 1227926 - RNA, 19 nt, Homo sapiens
  misc_RNA (1)...(19): siRNA sense strand
aaagugagcacacagaauc

SEQ ID NO: 1227927 - RNA, 19 nt, Homo sapiens
  misc_RNA (1)...(19): siRNA sense strand
gaaagaagugguggacaca

SEQ ID NO: 1227928 - RNA, 19 nt, Homo sapiens
  misc_RNA (1)...(19): siRNA sense strand
caacaaaacguuccaagug

SEQ ID NO: 1227929 - RNA, 19 nt, Homo sapiens
  misc_RNA (1)...(19): siRNA sense strand
gagcugcuuugcugagagu

SEQ ID NO: 1227930 - RNA, 19 nt, Homo sapiens
  misc_RNA (1)...(19): siRNA sense strand
gaaucaaagcacuuacaug

SEQ ID NO: 1227931 - RNA, 19 nt, Homo sapiens
  misc_RNA (1)...(19): siRNA sense strand
ccaggaaugaggcagauga

SEQ ID NO: 1227932 - RNA, 19 nt, Homo sapiens
  misc_RNA (1)...(19): siRNA sense strand
cagagccaaucuucaguca

SEQ ID NO: 1227933 - RNA, 19 nt, Homo sapiens
  misc_RNA (1)...(19): siRNA sense strand
caacucacacgaggcauug

SEQ ID NO: 1227934 - RNA, 19 nt, Homo sapiens
  misc_RNA (1)...(19): siRNA sense strand
uugaggaugccauuaagua

SEQ ID NO: 1227935 - RNA, 19 nt, Homo sapiens
  misc_RNA (1)...(19): siRNA sense strand
ugagaacauauccaacuuu

SEQ ID NO: 1227936 - RNA, 19 nt, Homo sapiens
  misc_RNA (1)...(19): siRNA sense strand
uggacaaccuugcaagaca

SEQ ID NO: 1227937 - RNA, 19 nt, Homo sapiens
  misc_RNA (1)...(19): siRNA sense strand
uuauugaggaugccauuaa

SEQ ID NO: 1227938 - RNA, 19 nt, Homo sapiens
  misc_RNA (1)...(19): siRNA sense strand
gauacuggagauccucaaa

SEQ ID NO: 1227939 - RNA, 19 nt, Homo sapiens
  misc_RNA (1)...(19): siRNA sense strand
caaccuugcaagacaaaug

SEQ ID NO: 1227940 - RNA, 19 nt, Homo sapiens
  misc_RNA (1)...(19): siRNA sense strand
cuacuccugcugacugaua

SEQ ID NO: 1227941 - RNA, 19 nt, Homo sapiens
  misc_RNA (1)...(19): siRNA sense strand
guuccaagugggacagaua

SEQ ID NO: 1227942 - RNA, 19 nt, Homo sapiens
  misc_RNA (1)...(19): siRNA sense strand
gggagcugcuuugcugaga

SEQ ID NO: 1227943 - RNA, 19 nt, Homo sapiens
  misc_RNA (1)...(19): siRNA sense strand
uauccaacuuucuuuccuu

SEQ ID NO: 1227944 - RNA, 19 nt, Homo sapiens
  misc_RNA (1)...(19): siRNA sense strand
agacaaaugaucaugaaag

SEQ ID NO: 1227945 - RNA, 19 nt, Homo sapiens
  misc_RNA (1)...(19): siRNA sense strand
gaagcuaaacauucucaac

SEQ ID NO: 1227946 - RNA, 19 nt, Homo sapiens
  misc_RNA (1)...(19): siRNA sense strand
ccauuaaguauuucaagga

SEQ ID NO: 1227947 - RNA, 19 nt, Homo sapiens
  misc_RNA (1)...(19): siRNA sense strand
caacuuucuuuccuuagcu

SEQ ID NO: 1227948 - RNA, 19 nt, Homo sapiens
  misc_RNA (1)...(19): siRNA sense strand
auccaacuuucuuuccuua

SEQ ID NO: 1227949 - RNA, 19 nt, Homo sapiens
  misc_RNA (1)...(19): siRNA sense strand
ggugagaacauauccaacu

SEQ ID NO: 1227950 - RNA, 19 nt, Homo sapiens
  misc_RNA (1)...(19): siRNA sense strand
ugaggaugccauuaaguau

SEQ ID NO: 1227951 - RNA, 19 nt, Homo sapiens
  misc_RNA (1)...(19): siRNA sense strand
uacuggagauccucaaagu

SEQ ID NO: 1227952 - RNA, 19 nt, Homo sapiens
  misc_RNA (1)...(19): siRNA sense strand
gcugaacugcccaggaaug

SEQ ID NO: 1227953 - RNA, 19 nt, Homo sapiens
  misc_RNA (1)...(19): siRNA sense strand
ccuuagcuggcaauacuua

SEQ ID NO: 1227954 - RNA, 19 nt, Homo sapiens
  misc_RNA (1)...(19): siRNA sense strand
aagaagugguggacacaag

SEQ ID NO: 1227955 - RNA, 19 nt, Homo sapiens
  misc_RNA (1)...(19): siRNA sense strand
gggauuaccagcaguacca

SEQ ID NO: 1227956 - RNA, 19 nt, Homo sapiens
  misc_RNA (1)...(19): siRNA sense strand
cagagagcaguaucuuuau

SEQ ID NO: 1227957 - RNA, 19 nt, Homo sapiens
  misc_RNA (1)...(19): siRNA sense strand
gcaggcggaccaagaacug

SEQ ID NO: 1227958 - RNA, 19 nt, Homo sapiens
  misc_RNA (1)...(19): siRNA sense strand
aagcuaaacauucucaaca

SEQ ID NO: 1227959 - RNA, 19 nt, Homo sapiens
  misc_RNA (1)...(19): siRNA sense strand
uggcaauacuuaccaacuc

SEQ ID NO: 1227960 - RNA, 19 nt, Homo sapiens
  misc_RNA (1)...(19): siRNA sense strand
ccaacucacacgaggcauu

SEQ ID NO: 1227961 - RNA, 19 nt, Homo sapiens
  misc_RNA (1)...(19): siRNA sense strand
auucguggcugcugcugaa

SEQ ID NO: 1227962 - RNA, 19 nt, Homo sapiens
  misc_RNA (1)...(19): siRNA sense strand
ggccagcaguacagaaacu

SEQ ID NO: 1227963 - RNA, 19 nt, Homo sapiens
  misc_RNA (1)...(19): siRNA sense strand
uauugaggaugccauuaag

SEQ ID NO: 1227964 - RNA, 19 nt, Homo sapiens
  misc_RNA (1)...(19): siRNA sense strand
ccguaaagcucuggacaac

SEQ ID NO: 1227965 - RNA, 19 nt, Homo sapiens
  misc_RNA (1)...(19): siRNA sense strand
agcuaaacauucucaacaa

SEQ ID NO: 1227966 - RNA, 19 nt, Homo sapiens
  misc_RNA (1)...(19): siRNA sense strand
cgaaucaaagcacuuacau

SEQ ID NO: 1227967 - RNA, 19 nt, Homo sapiens
  misc_RNA (1)...(19): siRNA sense strand
ccaacuuucuuuccuuagc

SEQ ID NO: 1227968 - RNA, 19 nt, Homo sapiens
  misc_RNA (1)...(19): siRNA sense strand
ugagcuugaggauaacaua

SEQ ID NO: 1227969 - RNA, 19 nt, Homo sapiens
  misc_RNA (1)...(19): siRNA sense strand
gacaaccuugcaagacaaa

SEQ ID NO: 1227970 - RNA, 19 nt, Homo sapiens
  misc_RNA (1)...(19): siRNA sense strand
uuccuuagcuggcaauacu

SEQ ID NO: 1227971 - RNA, 19 nt, Homo sapiens
  misc_RNA (1)...(19): siRNA sense strand
guucagaagguccacaaag

SEQ ID NO: 1227972 - RNA, 19 nt, Homo sapiens
  misc_RNA (1)...(19): siRNA sense strand
gucuggcucucucagcauu

SEQ ID NO: 1227973 - RNA, 19 nt, Homo sapiens
  misc_RNA (1)...(19): siRNA sense strand
gcccaggaaugaggcagau

SEQ ID NO: 1227974 - RNA, 19 nt, Homo sapiens
  misc_RNA (1)...(19): siRNA sense strand
gagccagagccaaucuuca

SEQ ID NO: 1227975 - RNA, 19 nt, Homo sapiens
  misc_RNA (1)...(19): siRNA sense strand
cagacgagccagagccaau

SEQ ID NO: 1227976 - RNA, 19 nt, Homo sapiens
  misc_RNA (1)...(19): siRNA sense strand
aggcagaugagcuccguaa

SEQ ID NO: 1227977 - RNA, 19 nt, Homo sapiens
  misc_RNA (1)...(19): siRNA sense strand
ugggacagauacuggagau

SEQ ID NO: 1227978 - RNA, 19 nt, Homo sapiens
  misc_RNA (1)...(19): siRNA sense strand
gaaaagugagcuugaggau

SEQ ID NO: 1227979 - RNA, 19 nt, Homo sapiens
  misc_RNA (1)...(19): siRNA sense strand
aaagugagcuugaggauaa

SEQ ID NO: 1227980 - RNA, 19 nt, Homo sapiens
  misc_RNA (1)...(19): siRNA sense strand
gaacauauccaacuuucuu

SEQ ID NO: 1227981 - RNA, 19 nt, Homo sapiens
  misc_RNA (1)...(19): siRNA sense strand
ccagagagcaguaucuuua

SEQ ID NO: 1227982 - RNA, 19 nt, Homo sapiens
  misc_RNA (1)...(19): siRNA sense strand
caagacaaaugaucaugaa

SEQ ID NO: 1227983 - RNA, 19 nt, Homo sapiens
  misc_RNA (1)...(19): siRNA sense strand
gacaaaugaucaugaaaga

SEQ ID NO: 1227984 - RNA, 19 nt, Homo sapiens
  misc_RNA (1)...(19): siRNA sense strand
ggacauccgugcccucaga

SEQ ID NO: 1227985 - RNA, 19 nt, Homo sapiens
  misc_RNA (1)...(19): siRNA sense strand
ccuguaagcuucuuucuug

SEQ ID NO: 1227986 - RNA, 19 nt, Homo sapiens
  misc_RNA (1)...(19): siRNA sense strand
gagaacauauccaacuuuc

SEQ ID NO: 1227987 - RNA, 19 nt, Homo sapiens
  misc_RNA (1)...(19): siRNA sense strand
gaaaugagcagaggaguca

SEQ ID NO: 1227988 - RNA, 19 nt, Homo sapiens
  misc_RNA (1)...(19): siRNA sense strand
gagccaaucucagcugaaa

SEQ ID NO: 1227989 - RNA, 19 nt, Homo sapiens
  misc_RNA (1)...(19): siRNA sense strand
ggacaaccuugcaagacaa

SEQ ID NO: 1227990 - RNA, 19 nt, Homo sapiens
  misc_RNA (1)...(19): siRNA sense strand
gagccaaucuucagucagu

SEQ ID NO: 1227991 - RNA, 19 nt, Homo sapiens
  misc_RNA (1)...(19): siRNA sense strand
aaucaaagcacuuacauga

SEQ ID NO: 1227992 - RNA, 19 nt, Homo sapiens
  misc_RNA (1)...(19): siRNA sense strand
guacgaaucaaagcacuua

SEQ ID NO: 1227993 - RNA, 19 nt, Homo sapiens
  misc_RNA (1)...(19): siRNA sense strand
caaaugaucaugaaagaca

SEQ ID NO: 1227994 - RNA, 19 nt, Homo sapiens
  misc_RNA (1)...(19): siRNA sense strand
gcaccaccaucgccaaugu

SEQ ID NO: 1227995 - RNA, 19 nt, Homo sapiens
  misc_RNA (1)...(19): siRNA sense strand
gcaagacaaaugaucauga

SEQ ID NO: 1227996 - RNA, 19 nt, Homo sapiens
  misc_RNA (1)...(19): siRNA sense strand
gcuaaacauucucaacaau

SEQ ID NO: 1227997 - RNA, 19 nt, Homo sapiens
  misc_RNA (1)...(19): siRNA sense strand
gagucaagcucacggaugu

SEQ ID NO: 1227998 - RNA, 19 nt, Homo sapiens
  misc_RNA (1)...(19): siRNA sense strand
gaggagaagcuaaacauuc

SEQ ID NO: 1227999 - RNA, 19 nt, Homo sapiens
  misc_RNA (1)...(19): siRNA sense strand
aggaugccauuaaguauuu

SEQ ID NO: 1228000 - RNA, 19 nt, Homo sapiens
  misc_RNA (1)...(19): siRNA sense strand
guaaagcucuggacaaccu

SEQ ID NO: 1228001 - RNA, 19 nt, Homo sapiens
  misc_RNA (1)...(19): siRNA sense strand
gagagcaguaucuuuauug

SEQ ID NO: 1228002 - RNA, 19 nt, Homo sapiens
  misc_RNA (1)...(19): siRNA sense strand
caaaagccuugacaaauug

SEQ ID NO: 1228003 - RNA, 19 nt, Homo sapiens
  misc_RNA (1)...(19): siRNA sense strand
gaggaugccauuaaguauu

SEQ ID NO: 1228004 - RNA, 19 nt, Homo sapiens
  misc_RNA (1)...(19): siRNA sense strand
agagagcaguaucuuuauu

SEQ ID NO: 1228005 - RNA, 19 nt, Homo sapiens
  misc_RNA (1)...(19): siRNA sense strand
gugagaacauauccaacuu

SEQ ID NO: 1228006 - RNA, 19 nt, Homo sapiens
  misc_RNA (1)...(19): siRNA sense strand
gcuugaggauaacauaaga

SEQ ID NO: 1228007 - RNA, 19 nt, Homo sapiens
  misc_RNA (1)...(19): siRNA sense strand
cuggagauccucaaaguaa

SEQ ID NO: 1228008 - RNA, 19 nt, Homo sapiens
  misc_RNA (1)...(19): siRNA sense strand
ggagcgagggugcaacaaa

SEQ ID NO: 1228009 - RNA, 19 nt, Homo sapiens
  misc_RNA (1)...(19): siRNA sense strand
gcagaugagcuccguaaag

SEQ ID NO: 1228010 - RNA, 19 nt, Homo sapiens
  misc_RNA (1)...(19): siRNA sense strand
ggaggagaagcuaaacauu

SEQ ID NO: 1228011 - RNA, 19 nt, Homo sapiens
  misc_RNA (1)...(19): siRNA sense strand
gauaaaggccagcaguaca

SEQ ID NO: 1228012 - RNA, 19 nt, Homo sapiens
  misc_RNA (1)...(19): siRNA sense strand
gagcgagggugcaacaaaa

SEQ ID NO: 1228013 - RNA, 19 nt, Homo sapiens
  misc_RNA (1)...(19): siRNA sense strand
cugaggagcugaagaaggu

SEQ ID NO: 1228014 - RNA, 19 nt, Homo sapiens
  misc_RNA (1)...(19): siRNA sense strand
ggcaauacuuaccaacuca

SEQ ID NO: 1228015 - RNA, 19 nt, Homo sapiens
  misc_RNA (1)...(19): siRNA sense strand
gagcuugaggauaacauaa

SEQ ID NO: 1228016 - RNA, 19 nt, Homo sapiens
  misc_RNA (1)...(19): siRNA sense strand
cugcugaacugcccaggaa

SEQ ID NO: 1228017 - RNA, 19 nt, Homo sapiens
  misc_RNA (1)...(19): siRNA sense strand
cagaugagcuccguaaagc

SEQ ID NO: 1228018 - RNA, 19 nt, Homo sapiens
  misc_RNA (1)...(19): siRNA sense strand
cucaggagcuggaggagaa

SEQ ID NO: 1228019 - RNA, 19 nt, Homo sapiens
  misc_RNA (1)...(19): siRNA sense strand
agagcaguaucuuuauuga

SEQ ID NO: 1228020 - RNA, 19 nt, Homo sapiens
  misc_RNA (1)...(19): siRNA sense strand
gggauggaguugggaauca

SEQ ID NO: 1228021 - RNA, 19 nt, Homo sapiens
  misc_RNA (1)...(19): siRNA sense strand
aaagugagcacacagaauc

SEQ ID NO: 1228022 - RNA, 19 nt, Homo sapiens
  misc_RNA (1)...(19): siRNA sense strand
gaaagaagugguggacaca

SEQ ID NO: 1228023 - RNA, 19 nt, Homo sapiens
  misc_RNA (1)...(19): siRNA sense strand
caacaaaacguuccaagug

SEQ ID NO: 1228024 - RNA, 19 nt, Homo sapiens
  misc_RNA (1)...(19): siRNA sense strand
gagcugcuuugcugagagu

SEQ ID NO: 1228025 - RNA, 19 nt, Homo sapiens
  misc_RNA (1)...(19): siRNA sense strand
gaaucaaagcacuuacaug

SEQ ID NO: 1228026 - RNA, 19 nt, Homo sapiens
  misc_RNA (1)...(19): siRNA sense strand
ccaggaaugaggcagauga

SEQ ID NO: 1228027 - RNA, 19 nt, Homo sapiens
  misc_RNA (1)...(19): siRNA sense strand
cagagccaaucuucaguca

SEQ ID NO: 1228028 - RNA, 19 nt, Homo sapiens
  misc_RNA (1)...(19): siRNA sense strand
caacucacacgaggcauug

SEQ ID NO: 1228029 - RNA, 19 nt, Homo sapiens
  misc_RNA (1)...(19): siRNA sense strand
uugaggaugccauuaagua

SEQ ID NO: 1228030 - RNA, 19 nt, Homo sapiens
  misc_RNA (1)...(19): siRNA sense strand
ugagaacauauccaacuuu

SEQ ID NO: 1228031 - RNA, 19 nt, Homo sapiens
  misc_RNA (1)...(19): siRNA sense strand
uggacaaccuugcaagaca

SEQ ID NO: 1228032 - RNA, 19 nt, Homo sapiens
  misc_RNA (1)...(19): siRNA sense strand
uuauugaggaugccauuaa

SEQ ID NO: 1228033 - RNA, 19 nt, Homo sapiens
  misc_RNA (1)...(19): siRNA sense strand
gauacuggagauccucaaa

SEQ ID NO: 1228034 - RNA, 19 nt, Homo sapiens
  misc_RNA (1)...(19): siRNA sense strand
caaccuugcaagacaaaug

SEQ ID NO: 1228035 - RNA, 19 nt, Homo sapiens
  misc_RNA (1)...(19): siRNA sense strand
cuacuccugcugacugaua

SEQ ID NO: 1228036 - RNA, 19 nt, Homo sapiens
  misc_RNA (1)...(19): siRNA sense strand
guuccaagugggacagaua

SEQ ID NO: 1228037 - RNA, 19 nt, Homo sapiens
  misc_RNA (1)...(19): siRNA sense strand
uauccaacuuucuuuccuu

SEQ ID NO: 1228038 - RNA, 19 nt, Homo sapiens
  misc_RNA (1)...(19): siRNA sense strand
gggagcugcuuugcugaga

SEQ ID NO: 1228039 - RNA, 19 nt, Homo sapiens
  misc_RNA (1)...(19): siRNA sense strand
agacaaaugaucaugaaag

SEQ ID NO: 1228040 - RNA, 19 nt, Homo sapiens
  misc_RNA (1)...(19): siRNA sense strand
gaagcuaaacauucucaac

SEQ ID NO: 1228041 - RNA, 19 nt, Homo sapiens
  misc_RNA (1)...(19): siRNA sense strand
ccauuaaguauuucaagga

SEQ ID NO: 1228042 - RNA, 19 nt, Homo sapiens
  misc_RNA (1)...(19): siRNA sense strand
caacuuucuuuccuuagcu

SEQ ID NO: 1228043 - RNA, 19 nt, Homo sapiens
  misc_RNA (1)...(19): siRNA sense strand
auccaacuuucuuuccuua

SEQ ID NO: 1228044 - RNA, 19 nt, Homo sapiens
  misc_RNA (1)...(19): siRNA sense strand
ggugagaacauauccaacu

SEQ ID NO: 1228045 - RNA, 19 nt, Homo sapiens
  misc_RNA (1)...(19): siRNA sense strand
ugaggaugccauuaaguau

SEQ ID NO: 1228046 - RNA, 19 nt, Homo sapiens
  misc_RNA (1)...(19): siRNA sense strand
uacuggagauccucaaagu

SEQ ID NO: 1228047 - RNA, 19 nt, Homo sapiens
  misc_RNA (1)...(19): siRNA sense strand
gcugaacugcccaggaaug

SEQ ID NO: 1228048 - RNA, 19 nt, Homo sapiens
  misc_RNA (1)...(19): siRNA sense strand
ccuuagcuggcaauacuua

SEQ ID NO: 1228049 - RNA, 19 nt, Homo sapiens
  misc_RNA (1)...(19): siRNA sense strand
aagaagugguggacacaag

SEQ ID NO: 1228050 - RNA, 19 nt, Homo sapiens
  misc_RNA (1)...(19): siRNA sense strand
gggauuaccagcaguacca

SEQ ID NO: 1228051 - RNA, 19 nt, Homo sapiens
  misc_RNA (1)...(19): siRNA sense strand
cagagagcaguaucuuuau

SEQ ID NO: 1228052 - RNA, 19 nt, Homo sapiens
  misc_RNA (1)...(19): siRNA sense strand
gcaggcggaccaagaacug

SEQ ID NO: 1228053 - RNA, 19 nt, Homo sapiens
  misc_RNA (1)...(19): siRNA sense strand
aagcuaaacauucucaaca

SEQ ID NO: 1228054 - RNA, 19 nt, Homo sapiens
  misc_RNA (1)...(19): siRNA sense strand
uggcaauacuuaccaacuc

SEQ ID NO: 1228055 - RNA, 19 nt, Homo sapiens
  misc_RNA (1)...(19): siRNA sense strand
ccaacucacacgaggcauu

SEQ ID NO: 1228056 - RNA, 19 nt, Homo sapiens
  misc_RNA (1)...(19): siRNA sense strand
auucguggcugcugcugaa

SEQ ID NO: 1228057 - RNA, 19 nt, Homo sapiens
  misc_RNA (1)...(19): siRNA sense strand
ggccagcaguacagaaacu

SEQ ID NO: 1228058 - RNA, 19 nt, Homo sapiens
  misc_RNA (1)...(19): siRNA sense strand
uauugaggaugccauuaag

SEQ ID NO: 1228059 - RNA, 19 nt, Homo sapiens
  misc_RNA (1)...(19): siRNA sense strand
ccguaaagcucuggacaac

SEQ ID NO: 1228060 - RNA, 19 nt, Homo sapiens
  misc_RNA (1)...(19): siRNA sense strand
agcuaaacauucucaacaa

SEQ ID NO: 1228061 - RNA, 19 nt, Homo sapiens
  misc_RNA (1)...(19): siRNA sense strand
cgaaucaaagcacuuacau

SEQ ID NO: 1228062 - RNA, 19 nt, Homo sapiens
  misc_RNA (1)...(19): siRNA sense strand
ccaacuuucuuuccuuagc

SEQ ID NO: 1228063 - RNA, 19 nt, Homo sapiens
  misc_RNA (1)...(19): siRNA sense strand
ugagcuugaggauaacaua

SEQ ID NO: 1228064 - RNA, 19 nt, Homo sapiens
  misc_RNA (1)...(19): siRNA sense strand
gacaaccuugcaagacaaa

SEQ ID NO: 1228065 - RNA, 19 nt, Homo sapiens
  misc_RNA (1)...(19): siRNA sense strand
uuccuuagcuggcaauacu

SEQ ID NO: 1228066 - RNA, 19 nt, Homo sapiens
  misc_RNA (1)...(19): siRNA sense strand
guucagaagguccacaaag

SEQ ID NO: 1228067 - RNA, 19 nt, Homo sapiens
  misc_RNA (1)...(19): siRNA sense strand
gucuggcucucucagcauu

SEQ ID NO: 1228068 - RNA, 19 nt, Homo sapiens
  misc_RNA (1)...(19): siRNA sense strand
gcccaggaaugaggcagau

SEQ ID NO: 1228069 - RNA, 19 nt, Homo sapiens
  misc_RNA (1)...(19): siRNA sense strand
gagccagagccaaucuuca

SEQ ID NO: 1228070 - RNA, 19 nt, Homo sapiens
  misc_RNA (1)...(19): siRNA sense strand
cagacgagccagagccaau

SEQ ID NO: 1228071 - RNA, 19 nt, Homo sapiens
  misc_RNA (1)...(19): siRNA sense strand
ugggacagauacuggagau

SEQ ID NO: 1228072 - RNA, 19 nt, Homo sapiens
  misc_RNA (1)...(19): siRNA sense strand
gaaaagugagcuugaggau

SEQ ID NO: 1228073 - RNA, 19 nt, Homo sapiens
  misc_RNA (1)...(19): siRNA sense strand
aggcagaugagcuccguaa

SEQ ID NO: 1228074 - RNA, 19 nt, Homo sapiens
  misc_RNA (1)...(19): siRNA sense strand
gagccaagcuuguguguaa

SEQ ID NO: 1228075 - RNA, 19 nt, Homo sapiens
  misc_RNA (1)...(19): siRNA sense strand
gaagaugggugcacaaaga

SEQ ID NO: 1228076 - RNA, 19 nt, Homo sapiens
  misc_RNA (1)...(19): siRNA sense strand
ggagggagaucaucaguga

SEQ ID NO: 1228077 - RNA, 19 nt, Homo sapiens
  misc_RNA (1)...(19): siRNA sense strand
gcaauaggauucacuacaa

SEQ ID NO: 1228078 - RNA, 19 nt, Homo sapiens
  misc_RNA (1)...(19): siRNA sense strand
ggucaaagauggacaaaca

SEQ ID NO: 1228079 - RNA, 19 nt, Homo sapiens
  misc_RNA (1)...(19): siRNA sense strand
ccucaacgcuggucaagua

SEQ ID NO: 1228080 - RNA, 19 nt, Homo sapiens
  misc_RNA (1)...(19): siRNA sense strand
gaacaacagcugauucuga

SEQ ID NO: 1228081 - RNA, 19 nt, Homo sapiens
  misc_RNA (1)...(19): siRNA sense strand
ggaaguaccagucaaagaa

SEQ ID NO: 1228082 - RNA, 19 nt, Homo sapiens
  misc_RNA (1)...(19): siRNA sense strand
acgaagagcugaccauuga

SEQ ID NO: 1228083 - RNA, 19 nt, Homo sapiens
  misc_RNA (1)...(19): siRNA sense strand
gaagaacggaggaaacaaa

SEQ ID NO: 1228084 - RNA, 19 nt, Homo sapiens
  misc_RNA (1)...(19): siRNA sense strand
gggauuaacaucagcaaua

SEQ ID NO: 1228085 - RNA, 19 nt, Homo sapiens
  misc_RNA (1)...(19): siRNA sense strand
gcuacuaucuuggauguuu

SEQ ID NO: 1228086 - RNA, 19 nt, Homo sapiens
  misc_RNA (1)...(19): siRNA sense strand
aagcagagcugacaagcaa

SEQ ID NO: 1228087 - RNA, 19 nt, Homo sapiens
  misc_RNA (1)...(19): siRNA sense strand
uggaagaccucuauuggaa

SEQ ID NO: 1228088 - RNA, 19 nt, Homo sapiens
  misc_RNA (1)...(19): siRNA sense strand
caagaagcgucucaucaug

SEQ ID NO: 1228089 - RNA, 19 nt, Homo sapiens
  misc_RNA (1)...(19): siRNA sense strand
gaauggaauuuacuguaug

SEQ ID NO: 1228090 - RNA, 19 nt, Homo sapiens
  misc_RNA (1)...(19): siRNA sense strand
gagcuacuaucuuggaugu

SEQ ID NO: 1228091 - RNA, 19 nt, Homo sapiens
  misc_RNA (1)...(19): siRNA sense strand
gaccaacgccaacguguuu

SEQ ID NO: 1228092 - RNA, 19 nt, Homo sapiens
  misc_RNA (1)...(19): siRNA sense strand
caagaucgcaguuguugaa

SEQ ID NO: 1228093 - RNA, 19 nt, Homo sapiens
  misc_RNA (1)...(19): siRNA sense strand
ggauuaacaucagcaauag

SEQ ID NO: 1228094 - RNA, 19 nt, Homo sapiens
  misc_RNA (1)...(19): siRNA sense strand
caaagaagaaguugaaucu

SEQ ID NO: 1228095 - RNA, 19 nt, Homo sapiens
  misc_RNA (1)...(19): siRNA sense strand
gccuauaucuucaggagaa

SEQ ID NO: 1228096 - RNA, 19 nt, Homo sapiens
  misc_RNA (1)...(19): siRNA sense strand
gaacagccaaggacagaga

SEQ ID NO: 1228097 - RNA, 19 nt, Homo sapiens
  misc_RNA (1)...(19): siRNA sense strand
gaggaugaauggaauuuac

SEQ ID NO: 1228098 - RNA, 19 nt, Homo sapiens
  misc_RNA (1)...(19): siRNA sense strand
gcauagccgugcuucucua

SEQ ID NO: 1228099 - RNA, 19 nt, Homo sapiens
  misc_RNA (1)...(19): siRNA sense strand
aaagaugcaucccugaguu

SEQ ID NO: 1228100 - RNA, 19 nt, Homo sapiens
  misc_RNA (1)...(19): siRNA sense strand
gcacugagccacauuugca

SEQ ID NO: 1228101 - RNA, 19 nt, Homo sapiens
  misc_RNA (1)...(19): siRNA sense strand
caaguuaacacccuucaug

SEQ ID NO: 1228102 - RNA, 19 nt, Homo sapiens
  misc_RNA (1)...(19): siRNA sense strand
gaagaggcgcaccagauga

SEQ ID NO: 1228103 - RNA, 19 nt, Homo sapiens
  misc_RNA (1)...(19): siRNA sense strand
gacagagagucaugguuga

SEQ ID NO: 1228104 - RNA, 19 nt, Homo sapiens
  misc_RNA (1)...(19): siRNA sense strand
gccauugacugccagcauu

SEQ ID NO: 1228105 - RNA, 19 nt, Homo sapiens
  misc_RNA (1)...(19): siRNA sense strand
agggaaggguggauucaua

SEQ ID NO: 1228106 - RNA, 19 nt, Homo sapiens
  misc_RNA (1)...(19): siRNA sense strand
ggucaaguaugcagagaag

SEQ ID NO: 1228107 - RNA, 19 nt, Homo sapiens
  misc_RNA (1)...(19): siRNA sense strand
aacaacagcugauucugaa

SEQ ID NO: 1228108 - RNA, 19 nt, Homo sapiens
  misc_RNA (1)...(19): siRNA sense strand
ccauccaacuuacacauga

SEQ ID NO: 1228109 - RNA, 19 nt, Homo sapiens
  misc_RNA (1)...(19): siRNA sense strand
cuucagaguugagucauuu

SEQ ID NO: 1228110 - RNA, 19 nt, Homo sapiens
  misc_RNA (1)...(19): siRNA sense strand
aaacaaaaccucgucauua

SEQ ID NO: 1228111 - RNA, 19 nt, Homo sapiens
  misc_RNA (1)...(19): siRNA sense strand
aaacagagauccgaaccau

SEQ ID NO: 1228112 - RNA, 19 nt, Homo sapiens
  misc_RNA (1)...(19): siRNA sense strand
ugugggagcuacuaucuug

SEQ ID NO: 1228113 - RNA, 19 nt, Homo sapiens
  misc_RNA (1)...(19): siRNA sense strand
gcacaccagcuaucaugaa

SEQ ID NO: 1228114 - RNA, 19 nt, Homo sapiens
  misc_RNA (1)...(19): siRNA sense strand
gaaggguggauucauaaga

SEQ ID NO: 1228115 - RNA, 19 nt, Homo sapiens
  misc_RNA (1)...(19): siRNA sense strand
aggauucacuacaacauuu

SEQ ID NO: 1228116 - RNA, 19 nt, Homo sapiens
  misc_RNA (1)...(19): siRNA sense strand
gcugacaagcaacgucuua

SEQ ID NO: 1228117 - RNA, 19 nt, Homo sapiens
  misc_RNA (1)...(19): siRNA sense strand
gggaaggguggauucauaa

SEQ ID NO: 1228118 - RNA, 19 nt, Homo sapiens
  misc_RNA (1)...(19): siRNA sense strand
aagaagaaguugaaucucu

SEQ ID NO: 1228119 - RNA, 19 nt, Homo sapiens
  misc_RNA (1)...(19): siRNA sense strand
gcaagaagcagaggacagu

SEQ ID NO: 1228120 - RNA, 19 nt, Homo sapiens
  misc_RNA (1)...(19): siRNA sense strand
ggacuuugcagaguacauu

SEQ ID NO: 1228121 - RNA, 19 nt, Homo sapiens
  misc_RNA (1)...(19): siRNA sense strand
gauacacagccaccacuaa

SEQ ID NO: 1228122 - RNA, 19 nt, Homo sapiens
  misc_RNA (1)...(19): siRNA sense strand
gaagcacugagccacauuu

SEQ ID NO: 1228123 - RNA, 19 nt, Homo sapiens
  misc_RNA (1)...(19): siRNA sense strand
aucgauaccugaugaauga

SEQ ID NO: 1228124 - RNA, 19 nt, Homo sapiens
  misc_RNA (1)...(19): siRNA sense strand
ugaagaagcugcccaucac

SEQ ID NO: 1228125 - RNA, 19 nt, Homo sapiens
  misc_RNA (1)...(19): siRNA sense strand
cauuagaggugacgcaaag

SEQ ID NO: 1228126 - RNA, 19 nt, Homo sapiens
  misc_RNA (1)...(19): siRNA sense strand
uaacaucagcaauaggauu

SEQ ID NO: 1228127 - RNA, 19 nt, Homo sapiens
  misc_RNA (1)...(19): siRNA sense strand
gauaccugaugaaugaaga

SEQ ID NO: 1228128 - RNA, 19 nt, Homo sapiens
  misc_RNA (1)...(19): siRNA sense strand
gaagagcugaccauugauc

SEQ ID NO: 1228129 - RNA, 19 nt, Homo sapiens
  misc_RNA (1)...(19): siRNA sense strand
acaaugccaucccuguuga

SEQ ID NO: 1228130 - RNA, 19 nt, Homo sapiens
  misc_RNA (1)...(19): siRNA sense strand
aacaaaaccucgucauuaa

SEQ ID NO: 1228131 - RNA, 19 nt, Homo sapiens
  misc_RNA (1)...(19): siRNA sense strand
gcaagcagccgugcaccaa

SEQ ID NO: 1228132 - RNA, 19 nt, Homo sapiens
  misc_RNA (1)...(19): siRNA sense strand
gugccuauuugguguaaga

SEQ ID NO: 1228133 - RNA, 19 nt, Homo sapiens
  misc_RNA (1)...(19): siRNA sense strand
agccuucgcuggccucuuu

SEQ ID NO: 1228134 - RNA, 19 nt, Homo sapiens
  misc_RNA (1)...(19): siRNA sense strand
gcacuucagaguugaguca

SEQ ID NO: 1228135 - RNA, 19 nt, Homo sapiens
  misc_RNA (1)...(19): siRNA sense strand
gaaacaaaaccucgucauu

SEQ ID NO: 1228136 - RNA, 19 nt, Homo sapiens
  misc_RNA (1)...(19): siRNA sense strand
gcacauagggcggaaguac

SEQ ID NO: 1228137 - RNA, 19 nt, Homo sapiens
  misc_RNA (1)...(19): siRNA sense strand
ugacaagcaacgucuuaaa

SEQ ID NO: 1228138 - RNA, 19 nt, Homo sapiens
  misc_RNA (1)...(19): siRNA sense strand
ccaagaagcgucucaucau

SEQ ID NO: 1228139 - RNA, 19 nt, Homo sapiens
  misc_RNA (1)...(19): siRNA sense strand
gagcagguuucuguaugug

SEQ ID NO: 1228140 - RNA, 19 nt, Homo sapiens
  misc_RNA (1)...(19): siRNA sense strand
ggaccaacgccaacguguu

SEQ ID NO: 1228141 - RNA, 19 nt, Homo sapiens
  misc_RNA (1)...(19): siRNA sense strand
guaagacucuagaaaacuu

SEQ ID NO: 1228142 - RNA, 19 nt, Homo sapiens
  misc_RNA (1)...(19): siRNA sense strand
ccagcaacgucaucugcaa

SEQ ID NO: 1228143 - RNA, 19 nt, Homo sapiens
  misc_RNA (1)...(19): siRNA sense strand
ugcugaaccucauacgaua

SEQ ID NO: 1228144 - RNA, 19 nt, Homo sapiens
  misc_RNA (1)...(19): siRNA sense strand
gccaagaagcgucucauca

SEQ ID NO: 1228145 - RNA, 19 nt, Homo sapiens
  misc_RNA (1)...(19): siRNA sense strand
ggucagggaagucaaagau

SEQ ID NO: 1228146 - RNA, 19 nt, Homo sapiens
  misc_RNA (1)...(19): siRNA sense strand
cagaagaggcgcaccagau

SEQ ID NO: 1228147 - RNA, 19 nt, Homo sapiens
  misc_RNA (1)...(19): siRNA sense strand
aaagauggacaaacagaga

SEQ ID NO: 1228148 - RNA, 19 nt, Homo sapiens
  misc_RNA (1)...(19): siRNA sense strand
caacgcuggucaaguaugc

SEQ ID NO: 1228149 - RNA, 19 nt, Homo sapiens
  misc_RNA (1)...(19): siRNA sense strand
accauggucucuauccuaa

SEQ ID NO: 1228150 - RNA, 19 nt, Homo sapiens
  misc_RNA (1)...(19): siRNA sense strand
gaagcugcccaucaccuau

SEQ ID NO: 1228151 - RNA, 19 nt, Homo sapiens
  misc_RNA (1)...(19): siRNA sense strand
uagaagauuuggacuuugc

SEQ ID NO: 1228152 - RNA, 19 nt, Homo sapiens
  misc_RNA (1)...(19): siRNA sense strand
ucaaagauggacaaacaga

SEQ ID NO: 1228153 - RNA, 19 nt, Homo sapiens
  misc_RNA (1)...(19): siRNA sense strand
gaaguaccagucaaagaag

SEQ ID NO: 1228154 - RNA, 19 nt, Homo sapiens
  misc_RNA (1)...(19): siRNA sense strand
aagaaaaccauccaacuua

SEQ ID NO: 1228155 - RNA, 19 nt, Homo sapiens
  misc_RNA (1)...(19): siRNA sense strand
uuaaagaggagccaucugu

SEQ ID NO: 1228156 - RNA, 19 nt, Homo sapiens
  misc_RNA (1)...(19): siRNA sense strand
uaacacccuucauggucaa

SEQ ID NO: 1228157 - RNA, 19 nt, Homo sapiens
  misc_RNA (1)...(19): siRNA sense strand
gauauuuggauccuucuuc

SEQ ID NO: 1228158 - RNA, 19 nt, Homo sapiens
  misc_RNA (1)...(19): siRNA sense strand
caccagcuaucaugaacau

SEQ ID NO: 1228159 - RNA, 19 nt, Homo sapiens
  misc_RNA (1)...(19): siRNA sense strand
gacgaagagcugaccauug

SEQ ID NO: 1228160 - RNA, 19 nt, Homo sapiens
  misc_RNA (1)...(19): siRNA sense strand
gagcuuggugugccacuug

SEQ ID NO: 1228161 - RNA, 19 nt, Homo sapiens
  misc_RNA (1)...(19): siRNA sense strand
gccaagaucgcaguuguug

SEQ ID NO: 1228162 - RNA, 19 nt, Homo sapiens
  misc_RNA (1)...(19): siRNA sense strand
uuaguggcuucaagaggua

SEQ ID NO: 1228163 - RNA, 19 nt, Homo sapiens
  misc_RNA (1)...(19): siRNA sense strand
ccacacccacgucuucuau

SEQ ID NO: 1228164 - RNA, 19 nt, Homo sapiens
  misc_RNA (1)...(19): siRNA sense strand
aagcagccgugcaccaaug

SEQ ID NO: 1228165 - RNA, 19 nt, Homo sapiens
  misc_RNA (1)...(19): siRNA sense strand
gaagggaaggguggauuca

SEQ ID NO: 1228166 - RNA, 19 nt, Homo sapiens
  misc_RNA (1)...(19): siRNA sense strand
acaagagcaucgcaaagca

SEQ ID NO: 1228167 - RNA, 19 nt, Homo sapiens
  misc_RNA (1)...(19): siRNA sense strand
ucaacaagagcaucgcaaa

SEQ ID NO: 1228168 - RNA, 19 nt, Homo sapiens
  misc_RNA (1)...(19): siRNA sense strand
ccugaugaaugaagagcaa

SEQ ID NO: 1228169 - RNA, 19 nt, Homo sapiens
  misc_RNA (1)...(19): siRNA sense strand
gggcggaaguaccagucaa

SEQ ID NO: 1228170 - RNA, 19 nt, Homo sapiens
  misc_RNA (1)...(19): siRNA sense strand
caaagaugcaucccugagu

SEQ ID NO: 1228171 - RNA, 19 nt, Homo sapiens
  misc_RNA (1)...(19): siRNA sense strand
ggucaacgcccuguucaca

SEQ ID NO: 1228172 - RNA, 19 nt, Homo sapiens
  misc_RNA (1)...(19): siRNA sense strand
ggacugcacaccagcuauc

SEQ ID NO: 1228173 - RNA, 19 nt, Homo sapiens
  misc_RNA (1)...(19): siRNA sense strand
cauaagagccaagcuugug

SEQ ID NO: 1228174 - RNA, 19 nt, Homo sapiens
  misc_RNA (1)...(19): siRNA sense strand
gagccaagcuuguguguaa

SEQ ID NO: 1228175 - RNA, 19 nt, Homo sapiens
  misc_RNA (1)...(19): siRNA sense strand
gaagaugggugcacaaaga

SEQ ID NO: 1228176 - RNA, 19 nt, Homo sapiens
  misc_RNA (1)...(19): siRNA sense strand
ggagggagaucaucaguga

SEQ ID NO: 1228177 - RNA, 19 nt, Homo sapiens
  misc_RNA (1)...(19): siRNA sense strand
gcaauaggauucacuacaa

SEQ ID NO: 1228178 - RNA, 19 nt, Homo sapiens
  misc_RNA (1)...(19): siRNA sense strand
ggucaaagauggacaaaca

SEQ ID NO: 1228179 - RNA, 19 nt, Homo sapiens
  misc_RNA (1)...(19): siRNA sense strand
ccucaacgcuggucaagua

SEQ ID NO: 1228180 - RNA, 19 nt, Homo sapiens
  misc_RNA (1)...(19): siRNA sense strand
gaacaacagcugauucuga

SEQ ID NO: 1228181 - RNA, 19 nt, Homo sapiens
  misc_RNA (1)...(19): siRNA sense strand
ggaaguaccagucaaagaa

SEQ ID NO: 1228182 - RNA, 19 nt, Homo sapiens
  misc_RNA (1)...(19): siRNA sense strand
acgaagagcugaccauuga

SEQ ID NO: 1228183 - RNA, 19 nt, Homo sapiens
  misc_RNA (1)...(19): siRNA sense strand
gaagaacggaggaaacaaa

SEQ ID NO: 1228184 - RNA, 19 nt, Homo sapiens
  misc_RNA (1)...(19): siRNA sense strand
gggauuaacaucagcaaua

SEQ ID NO: 1228185 - RNA, 19 nt, Homo sapiens
  misc_RNA (1)...(19): siRNA sense strand
gcuacuaucuuggauguuu

SEQ ID NO: 1228186 - RNA, 19 nt, Homo sapiens
  misc_RNA (1)...(19): siRNA sense strand
aagcagagcugacaagcaa

SEQ ID NO: 1228187 - RNA, 19 nt, Homo sapiens
  misc_RNA (1)...(19): siRNA sense strand
uggaagaccucuauuggaa

SEQ ID NO: 1228188 - RNA, 19 nt, Homo sapiens
  misc_RNA (1)...(19): siRNA sense strand
caagaagcgucucaucaug

SEQ ID NO: 1228189 - RNA, 19 nt, Homo sapiens
  misc_RNA (1)...(19): siRNA sense strand
gaauggaauuuacuguaug

SEQ ID NO: 1228190 - RNA, 19 nt, Homo sapiens
  misc_RNA (1)...(19): siRNA sense strand
gagcuacuaucuuggaugu

SEQ ID NO: 1228191 - RNA, 19 nt, Homo sapiens
  misc_RNA (1)...(19): siRNA sense strand
gaccaacgccaacguguuu

SEQ ID NO: 1228192 - RNA, 19 nt, Homo sapiens
  misc_RNA (1)...(19): siRNA sense strand
caagaucgcaguuguugaa

SEQ ID NO: 1228193 - RNA, 19 nt, Homo sapiens
  misc_RNA (1)...(19): siRNA sense strand
ggauuaacaucagcaauag

SEQ ID NO: 1228194 - RNA, 19 nt, Homo sapiens
  misc_RNA (1)...(19): siRNA sense strand
caaagaagaaguugaaucu

SEQ ID NO: 1228195 - RNA, 19 nt, Homo sapiens
  misc_RNA (1)...(19): siRNA sense strand
gccuauaucuucaggagaa

SEQ ID NO: 1228196 - RNA, 19 nt, Homo sapiens
  misc_RNA (1)...(19): siRNA sense strand
gaacagccaaggacagaga

SEQ ID NO: 1228197 - RNA, 19 nt, Homo sapiens
  misc_RNA (1)...(19): siRNA sense strand
gaggaugaauggaauuuac

SEQ ID NO: 1228198 - RNA, 19 nt, Homo sapiens
  misc_RNA (1)...(19): siRNA sense strand
gcauagccgugcuucucua

SEQ ID NO: 1228199 - RNA, 19 nt, Homo sapiens
  misc_RNA (1)...(19): siRNA sense strand
aaagaugcaucccugaguu

SEQ ID NO: 1228200 - RNA, 19 nt, Homo sapiens
  misc_RNA (1)...(19): siRNA sense strand
gcacugagccacauuugca

SEQ ID NO: 1228201 - RNA, 19 nt, Homo sapiens
  misc_RNA (1)...(19): siRNA sense strand
caaguuaacacccuucaug

SEQ ID NO: 1228202 - RNA, 19 nt, Homo sapiens
  misc_RNA (1)...(19): siRNA sense strand
gaagaggcgcaccagauga

SEQ ID NO: 1228203 - RNA, 19 nt, Homo sapiens
  misc_RNA (1)...(19): siRNA sense strand
gacagagagucaugguuga

SEQ ID NO: 1228204 - RNA, 19 nt, Homo sapiens
  misc_RNA (1)...(19): siRNA sense strand
gccauugacugccagcauu

SEQ ID NO: 1228205 - RNA, 19 nt, Homo sapiens
  misc_RNA (1)...(19): siRNA sense strand
agggaaggguggauucaua

SEQ ID NO: 1228206 - RNA, 19 nt, Homo sapiens
  misc_RNA (1)...(19): siRNA sense strand
ggucaaguaugcagagaag

SEQ ID NO: 1228207 - RNA, 19 nt, Homo sapiens
  misc_RNA (1)...(19): siRNA sense strand
aacaacagcugauucugaa

SEQ ID NO: 1228208 - RNA, 19 nt, Homo sapiens
  misc_RNA (1)...(19): siRNA sense strand
ccauccaacuuacacauga

SEQ ID NO: 1228209 - RNA, 19 nt, Homo sapiens
  misc_RNA (1)...(19): siRNA sense strand
cuucagaguugagucauuu

SEQ ID NO: 1228210 - RNA, 19 nt, Homo sapiens
  misc_RNA (1)...(19): siRNA sense strand
aaacaaaaccucgucauua

SEQ ID NO: 1228211 - RNA, 19 nt, Homo sapiens
  misc_RNA (1)...(19): siRNA sense strand
aaacagagauccgaaccau

SEQ ID NO: 1228212 - RNA, 19 nt, Homo sapiens
  misc_RNA (1)...(19): siRNA sense strand
ugugggagcuacuaucuug

SEQ ID NO: 1228213 - RNA, 19 nt, Homo sapiens
  misc_RNA (1)...(19): siRNA sense strand
gcacaccagcuaucaugaa

SEQ ID NO: 1228214 - RNA, 19 nt, Homo sapiens
  misc_RNA (1)...(19): siRNA sense strand
gaaggguggauucauaaga

SEQ ID NO: 1228215 - RNA, 19 nt, Homo sapiens
  misc_RNA (1)...(19): siRNA sense strand
aggauucacuacaacauuu

SEQ ID NO: 1228216 - RNA, 19 nt, Homo sapiens
  misc_RNA (1)...(19): siRNA sense strand
gcugacaagcaacgucuua

SEQ ID NO: 1228217 - RNA, 19 nt, Homo sapiens
  misc_RNA (1)...(19): siRNA sense strand
gggaaggguggauucauaa

SEQ ID NO: 1228218 - RNA, 19 nt, Homo sapiens
  misc_RNA (1)...(19): siRNA sense strand
aagaagaaguugaaucucu

SEQ ID NO: 1228219 - RNA, 19 nt, Homo sapiens
  misc_RNA (1)...(19): siRNA sense strand
gcaagaagcagaggacagu

SEQ ID NO: 1228220 - RNA, 19 nt, Homo sapiens
  misc_RNA (1)...(19): siRNA sense strand
ggacuuugcagaguacauu

SEQ ID NO: 1228221 - RNA, 19 nt, Homo sapiens
  misc_RNA (1)...(19): siRNA sense strand
gauacacagccaccacuaa

SEQ ID NO: 1228222 - RNA, 19 nt, Homo sapiens
  misc_RNA (1)...(19): siRNA sense strand
gaagcacugagccacauuu

SEQ ID NO: 1228223 - RNA, 19 nt, Homo sapiens
  misc_RNA (1)...(19): siRNA sense strand
aucgauaccugaugaauga

SEQ ID NO: 1228224 - RNA, 19 nt, Homo sapiens
  misc_RNA (1)...(19): siRNA sense strand
ugaagaagcugcccaucac

SEQ ID NO: 1228225 - RNA, 19 nt, Homo sapiens
  misc_RNA (1)...(19): siRNA sense strand
cauuagaggugacgcaaag

SEQ ID NO: 1228226 - RNA, 19 nt, Homo sapiens
  misc_RNA (1)...(19): siRNA sense strand
uaacaucagcaauaggauu

SEQ ID NO: 1228227 - RNA, 19 nt, Homo sapiens
  misc_RNA (1)...(19): siRNA sense strand
gauaccugaugaaugaaga

SEQ ID NO: 1228228 - RNA, 19 nt, Homo sapiens
  misc_RNA (1)...(19): siRNA sense strand
gaagagcugaccauugauc

SEQ ID NO: 1228229 - RNA, 19 nt, Homo sapiens
  misc_RNA (1)...(19): siRNA sense strand
acaaugccaucccuguuga

SEQ ID NO: 1228230 - RNA, 19 nt, Homo sapiens
  misc_RNA (1)...(19): siRNA sense strand
aacaaaaccucgucauuaa

SEQ ID NO: 1228231 - RNA, 19 nt, Homo sapiens
  misc_RNA (1)...(19): siRNA sense strand
gcaagcagccgugcaccaa

SEQ ID NO: 1228232 - RNA, 19 nt, Homo sapiens
  misc_RNA (1)...(19): siRNA sense strand
gugccuauuugguguaaga

SEQ ID NO: 1228233 - RNA, 19 nt, Homo sapiens
  misc_RNA (1)...(19): siRNA sense strand
agccuucgcuggccucuuu

SEQ ID NO: 1228234 - RNA, 19 nt, Homo sapiens
  misc_RNA (1)...(19): siRNA sense strand
gcacuucagaguugaguca

SEQ ID NO: 1228235 - RNA, 19 nt, Homo sapiens
  misc_RNA (1)...(19): siRNA sense strand
gaaacaaaaccucgucauu

SEQ ID NO: 1228236 - RNA, 19 nt, Homo sapiens
  misc_RNA (1)...(19): siRNA sense strand
gcacauagggcggaaguac

SEQ ID NO: 1228237 - RNA, 19 nt, Homo sapiens
  misc_RNA (1)...(19): siRNA sense strand
ugacaagcaacgucuuaaa

SEQ ID NO: 1228238 - RNA, 19 nt, Homo sapiens
  misc_RNA (1)...(19): siRNA sense strand
ccaagaagcgucucaucau

SEQ ID NO: 1228239 - RNA, 19 nt, Homo sapiens
  misc_RNA (1)...(19): siRNA sense strand
gagcagguuucuguaugug

SEQ ID NO: 1228240 - RNA, 19 nt, Homo sapiens
  misc_RNA (1)...(19): siRNA sense strand
ggaccaacgccaacguguu

SEQ ID NO: 1228241 - RNA, 19 nt, Homo sapiens
  misc_RNA (1)...(19): siRNA sense strand
guaagacucuagaaaacuu

SEQ ID NO: 1228242 - RNA, 19 nt, Homo sapiens
  misc_RNA (1)...(19): siRNA sense strand
ccagcaacgucaucugcaa

SEQ ID NO: 1228243 - RNA, 19 nt, Homo sapiens
  misc_RNA (1)...(19): siRNA sense strand
ugcugaaccucauacgaua

SEQ ID NO: 1228244 - RNA, 19 nt, Homo sapiens
  misc_RNA (1)...(19): siRNA sense strand
gccaagaagcgucucauca

SEQ ID NO: 1228245 - RNA, 19 nt, Homo sapiens
  misc_RNA (1)...(19): siRNA sense strand
ggucagggaagucaaagau

SEQ ID NO: 1228246 - RNA, 19 nt, Homo sapiens
  misc_RNA (1)...(19): siRNA sense strand
cagaagaggcgcaccagau

SEQ ID NO: 1228247 - RNA, 19 nt, Homo sapiens
  misc_RNA (1)...(19): siRNA sense strand
aaagauggacaaacagaga

SEQ ID NO: 1228248 - RNA, 19 nt, Homo sapiens
  misc_RNA (1)...(19): siRNA sense strand
caacgcuggucaaguaugc

SEQ ID NO: 1228249 - RNA, 19 nt, Homo sapiens
  misc_RNA (1)...(19): siRNA sense strand
accauggucucuauccuaa

SEQ ID NO: 1228250 - RNA, 19 nt, Homo sapiens
  misc_RNA (1)...(19): siRNA sense strand
gaagcugcccaucaccuau

SEQ ID NO: 1228251 - RNA, 19 nt, Homo sapiens
  misc_RNA (1)...(19): siRNA sense strand
uagaagauuuggacuuugc

SEQ ID NO: 1228252 - RNA, 19 nt, Homo sapiens
  misc_RNA (1)...(19): siRNA sense strand
ucaaagauggacaaacaga

SEQ ID NO: 1228253 - RNA, 19 nt, Homo sapiens
  misc_RNA (1)...(19): siRNA sense strand
gaaguaccagucaaagaag

SEQ ID NO: 1228254 - RNA, 19 nt, Homo sapiens
  misc_RNA (1)...(19): siRNA sense strand
aagaaaaccauccaacuua

SEQ ID NO: 1228255 - RNA, 19 nt, Homo sapiens
  misc_RNA (1)...(19): siRNA sense strand
uuaaagaggagccaucugu

SEQ ID NO: 1228256 - RNA, 19 nt, Homo sapiens
  misc_RNA (1)...(19): siRNA sense strand
uaacacccuucauggucaa

SEQ ID NO: 1228257 - RNA, 19 nt, Homo sapiens
  misc_RNA (1)...(19): siRNA sense strand
gauauuuggauccuucuuc

SEQ ID NO: 1228258 - RNA, 19 nt, Homo sapiens
  misc_RNA (1)...(19): siRNA sense strand
caccagcuaucaugaacau

SEQ ID NO: 1228259 - RNA, 19 nt, Homo sapiens
  misc_RNA (1)...(19): siRNA sense strand
gacgaagagcugaccauug

SEQ ID NO: 1228260 - RNA, 19 nt, Homo sapiens
  misc_RNA (1)...(19): siRNA sense strand
gagcuuggugugccacuug

SEQ ID NO: 1228261 - RNA, 19 nt, Homo sapiens
  misc_RNA (1)...(19): siRNA sense strand
gccaagaucgcaguuguug

SEQ ID NO: 1228262 - RNA, 19 nt, Homo sapiens
  misc_RNA (1)...(19): siRNA sense strand
uuaguggcuucaagaggua

SEQ ID NO: 1228263 - RNA, 19 nt, Homo sapiens
  misc_RNA (1)...(19): siRNA sense strand
ccacacccacgucuucuau

SEQ ID NO: 1228264 - RNA, 19 nt, Homo sapiens
  misc_RNA (1)...(19): siRNA sense strand
aagcagccgugcaccaaug

SEQ ID NO: 1228265 - RNA, 19 nt, Homo sapiens
  misc_RNA (1)...(19): siRNA sense strand
gaagggaaggguggauuca

SEQ ID NO: 1228266 - RNA, 19 nt, Homo sapiens
  misc_RNA (1)...(19): siRNA sense strand
acaagagcaucgcaaagca

SEQ ID NO: 1228267 - RNA, 19 nt, Homo sapiens
  misc_RNA (1)...(19): siRNA sense strand
ucaacaagagcaucgcaaa

SEQ ID NO: 1228268 - RNA, 19 nt, Homo sapiens
  misc_RNA (1)...(19): siRNA sense strand
ccugaugaaugaagagcaa

SEQ ID NO: 1228269 - RNA, 19 nt, Homo sapiens
  misc_RNA (1)...(19): siRNA sense strand
gggcggaaguaccagucaa

SEQ ID NO: 1228270 - RNA, 19 nt, Homo sapiens
  misc_RNA (1)...(19): siRNA sense strand
caaagaugcaucccugagu

SEQ ID NO: 1228271 - RNA, 19 nt, Homo sapiens
  misc_RNA (1)...(19): siRNA sense strand
ggucaacgcccuguucaca

SEQ ID NO: 1228272 - RNA, 19 nt, Homo sapiens
  misc_RNA (1)...(19): siRNA sense strand
ggacugcacaccagcuauc

SEQ ID NO: 1228273 - RNA, 19 nt, Homo sapiens
  misc_RNA (1)...(19): siRNA sense strand
cauaagagccaagcuugug

SEQ ID NO: 1228274 - RNA, 19 nt, Homo sapiens
  misc_RNA (1)...(19): siRNA sense strand
gaagcugggcuguguggua

SEQ ID NO: 1228275 - RNA, 19 nt, Homo sapiens
  misc_RNA (1)...(19): siRNA sense strand
cugcagggcuuccucuuuc

SEQ ID NO: 1228276 - RNA, 19 nt, Homo sapiens
  misc_RNA (1)...(19): siRNA sense strand
guccaggccuguccgaaug

SEQ ID NO: 1228277 - RNA, 19 nt, Homo sapiens
  misc_RNA (1)...(19): siRNA sense strand
cuacgcuucugccgcauga

SEQ ID NO: 1228278 - RNA, 19 nt, Homo sapiens
  misc_RNA (1)...(19): siRNA sense strand
ggacuucccggacgaguac

SEQ ID NO: 1228279 - RNA, 19 nt, Homo sapiens
  misc_RNA (1)...(19): siRNA sense strand
aggagaagcugggcugugu

SEQ ID NO: 1228280 - RNA, 19 nt, Homo sapiens
  misc_RNA (1)...(19): siRNA sense strand
ccgaaugcuuccaggugaa

SEQ ID NO: 1228281 - RNA, 19 nt, Homo sapiens
  misc_RNA (1)...(19): siRNA sense strand
agacagaggagggcaucua

SEQ ID NO: 1228282 - RNA, 19 nt, Homo sapiens
  misc_RNA (1)...(19): siRNA sense strand
gaccagacgcagcaacaca

SEQ ID NO: 1228283 - RNA, 19 nt, Homo sapiens
  misc_RNA (1)...(19): siRNA sense strand
acugugaccagaucuguuu

SEQ ID NO: 1228284 - RNA, 19 nt, Homo sapiens
  misc_RNA (1)...(19): siRNA sense strand
gggaugcuuuguggacuca

SEQ ID NO: 1228285 - RNA, 19 nt, Homo sapiens
  misc_RNA (1)...(19): siRNA sense strand
agacgcagcaacacagcua

SEQ ID NO: 1228286 - RNA, 19 nt, Homo sapiens
  misc_RNA (1)...(19): siRNA sense strand
cagaggagggcaucuacug

SEQ ID NO: 1228287 - RNA, 19 nt, Homo sapiens
  misc_RNA (1)...(19): siRNA sense strand
gcacaacuucugccguaac

SEQ ID NO: 1228288 - RNA, 19 nt, Homo sapiens
  misc_RNA (1)...(19): siRNA sense strand
caccgacugugaccagauc

SEQ ID NO: 1228289 - RNA, 19 nt, Homo sapiens
  misc_RNA (1)...(19): siRNA sense strand
gcugggcgucuaugaagug

SEQ ID NO: 1228290 - RNA, 19 nt, Homo sapiens
  misc_RNA (1)...(19): siRNA sense strand
cugcagggcuuccucuuuc

SEQ ID NO: 1228291 - RNA, 19 nt, Homo sapiens
  misc_RNA (1)...(19): siRNA sense strand
guccaggccuguccgaaug

SEQ ID NO: 1228292 - RNA, 19 nt, Homo sapiens
  misc_RNA (1)...(19): siRNA sense strand
cuacgcuucugccgcauga

SEQ ID NO: 1228293 - RNA, 19 nt, Homo sapiens
  misc_RNA (1)...(19): siRNA sense strand
ggacuucccggacgaguac

SEQ ID NO: 1228294 - RNA, 19 nt, Homo sapiens
  misc_RNA (1)...(19): siRNA sense strand
ccgaaugcuuccaggugaa

SEQ ID NO: 1228295 - RNA, 19 nt, Homo sapiens
  misc_RNA (1)...(19): siRNA sense strand
agacagaggagggcaucua

SEQ ID NO: 1228296 - RNA, 19 nt, Homo sapiens
  misc_RNA (1)...(19): siRNA sense strand
gaccagacgcagcaacaca

SEQ ID NO: 1228297 - RNA, 19 nt, Homo sapiens
  misc_RNA (1)...(19): siRNA sense strand
acugugaccagaucuguuu

SEQ ID NO: 1228298 - RNA, 19 nt, Homo sapiens
  misc_RNA (1)...(19): siRNA sense strand
gggaugcuuuguggacuca

SEQ ID NO: 1228299 - RNA, 19 nt, Homo sapiens
  misc_RNA (1)...(19): siRNA sense strand
agacgcagcaacacagcua

SEQ ID NO: 1228300 - RNA, 19 nt, Homo sapiens
  misc_RNA (1)...(19): siRNA sense strand
cagaggagggcaucuacug

SEQ ID NO: 1228301 - RNA, 19 nt, Homo sapiens
  misc_RNA (1)...(19): siRNA sense strand
gcacaacuucugccguaac

SEQ ID NO: 1228302 - RNA, 19 nt, Homo sapiens
  misc_RNA (1)...(19): siRNA sense strand
caccgacugugaccagauc

SEQ ID NO: 1228303 - RNA, 19 nt, Homo sapiens
  misc_RNA (1)...(19): siRNA sense strand
gcugggcgucuaugaagug

SEQ ID NO: 1228304 - RNA, 19 nt, Homo sapiens
  misc_RNA (1)...(19): siRNA sense strand
cugcagggcuuccucuuuc

SEQ ID NO: 1228305 - RNA, 19 nt, Homo sapiens
  misc_RNA (1)...(19): siRNA sense strand
guccaggccuguccgaaug

SEQ ID NO: 1228306 - RNA, 19 nt, Homo sapiens
  misc_RNA (1)...(19): siRNA sense strand
cuacgcuucugccgcauga

SEQ ID NO: 1228307 - RNA, 19 nt, Homo sapiens
  misc_RNA (1)...(19): siRNA sense strand
ggacuucccggacgaguac

SEQ ID NO: 1228308 - RNA, 19 nt, Homo sapiens
  misc_RNA (1)...(19): siRNA sense strand
ccgaaugcuuccaggugaa

SEQ ID NO: 1228309 - RNA, 19 nt, Homo sapiens
  misc_RNA (1)...(19): siRNA sense strand
agacagaggagggcaucua

SEQ ID NO: 1228310 - RNA, 19 nt, Homo sapiens
  misc_RNA (1)...(19): siRNA sense strand
gaccagacgcagcaacaca

SEQ ID NO: 1228311 - RNA, 19 nt, Homo sapiens
  misc_RNA (1)...(19): siRNA sense strand
acugugaccagaucuguuu

SEQ ID NO: 1228312 - RNA, 19 nt, Homo sapiens
  misc_RNA (1)...(19): siRNA sense strand
gggaugcuuuguggacuca

SEQ ID NO: 1228313 - RNA, 19 nt, Homo sapiens
  misc_RNA (1)...(19): siRNA sense strand
agacgcagcaacacagcua

SEQ ID NO: 1228314 - RNA, 19 nt, Homo sapiens
  misc_RNA (1)...(19): siRNA sense strand
cagaggagggcaucuacug

SEQ ID NO: 1228315 - RNA, 19 nt, Homo sapiens
  misc_RNA (1)...(19): siRNA sense strand
gcacaacuucugccguaac

SEQ ID NO: 1228316 - RNA, 19 nt, Homo sapiens
  misc_RNA (1)...(19): siRNA sense strand
caccgacugugaccagauc

SEQ ID NO: 1228317 - RNA, 19 nt, Homo sapiens
  misc_RNA (1)...(19): siRNA sense strand
gcugggcgucuaugaagug

SEQ ID NO: 1228318 - RNA, 19 nt, Homo sapiens
  misc_RNA (1)...(19): siRNA sense strand
gaagcugggcuguguggua

SEQ ID NO: 1228319 - RNA, 19 nt, Homo sapiens
  misc_RNA (1)...(19): siRNA sense strand
gcucaucuccgcucucuga

SEQ ID NO: 1228320 - RNA, 19 nt, Homo sapiens
  misc_RNA (1)...(19): siRNA sense strand
guccaggccuguccgaaug

SEQ ID NO: 1228321 - RNA, 19 nt, Homo sapiens
  misc_RNA (1)...(19): siRNA sense strand
cugcagggcuuccucuuuc

SEQ ID NO: 1228322 - RNA, 19 nt, Homo sapiens
  misc_RNA (1)...(19): siRNA sense strand
cuacgcuucugccgcauga

SEQ ID NO: 1228323 - RNA, 19 nt, Homo sapiens
  misc_RNA (1)...(19): siRNA sense strand
ggacuucccggacgaguac

SEQ ID NO: 1228324 - RNA, 19 nt, Homo sapiens
  misc_RNA (1)...(19): siRNA sense strand
aggagaagcugggcugugu

SEQ ID NO: 1228325 - RNA, 19 nt, Homo sapiens
  misc_RNA (1)...(19): siRNA sense strand
ccgaaugcuuccaggugaa

SEQ ID NO: 1228326 - RNA, 19 nt, Homo sapiens
  misc_RNA (1)...(19): siRNA sense strand
agacagaggagggcaucua

SEQ ID NO: 1228327 - RNA, 19 nt, Homo sapiens
  misc_RNA (1)...(19): siRNA sense strand
gaccagacgcagcaacaca

SEQ ID NO: 1228328 - RNA, 19 nt, Homo sapiens
  misc_RNA (1)...(19): siRNA sense strand
acugugaccagaucuguuu

SEQ ID NO: 1228329 - RNA, 19 nt, Homo sapiens
  misc_RNA (1)...(19): siRNA sense strand
gggaugcuuuguggacuca

SEQ ID NO: 1228330 - RNA, 19 nt, Homo sapiens
  misc_RNA (1)...(19): siRNA sense strand
agacgcagcaacacagcua

SEQ ID NO: 1228331 - RNA, 19 nt, Homo sapiens
  misc_RNA (1)...(19): siRNA sense strand
cagaggagggcaucuacug

SEQ ID NO: 1228332 - RNA, 19 nt, Homo sapiens
  misc_RNA (1)...(19): siRNA sense strand
gcacaacuucugccguaac

SEQ ID NO: 1228333 - RNA, 19 nt, Homo sapiens
  misc_RNA (1)...(19): siRNA sense strand
caccgacugugaccagauc

SEQ ID NO: 1228334 - RNA, 19 nt, Homo sapiens
  misc_RNA (1)...(19): siRNA sense strand
gcugggcgucuaugaagug

SEQ ID NO: 1228335 - RNA, 19 nt, Homo sapiens
  misc_RNA (1)...(19): siRNA sense strand
ucccugcgcucgcucaucu

SEQ ID NO: 1228336 - RNA, 19 nt, Homo sapiens
  misc_RNA (1)...(19): siRNA sense strand
gaagcugggcuguguggua

SEQ ID NO: 1228337 - RNA, 19 nt, Homo sapiens
  misc_RNA (1)...(19): siRNA sense strand
cugcagggcuuccucuuuc

SEQ ID NO: 1228338 - RNA, 19 nt, Homo sapiens
  misc_RNA (1)...(19): siRNA sense strand
guccaggccuguccgaaug

SEQ ID NO: 1228339 - RNA, 19 nt, Homo sapiens
  misc_RNA (1)...(19): siRNA sense strand
cuacgcuucugccgcauga

SEQ ID NO: 1228340 - RNA, 19 nt, Homo sapiens
  misc_RNA (1)...(19): siRNA sense strand
ggacuucccggacgaguac

SEQ ID NO: 1228341 - RNA, 19 nt, Homo sapiens
  misc_RNA (1)...(19): siRNA sense strand
aggagaagcugggcugugu

SEQ ID NO: 1228342 - RNA, 19 nt, Homo sapiens
  misc_RNA (1)...(19): siRNA sense strand
ccgaaugcuuccaggugaa

SEQ ID NO: 1228343 - RNA, 19 nt, Homo sapiens
  misc_RNA (1)...(19): siRNA sense strand
agacagaggagggcaucua

SEQ ID NO: 1228344 - RNA, 19 nt, Homo sapiens
  misc_RNA (1)...(19): siRNA sense strand
gaccagacgcagcaacaca

SEQ ID NO: 1228345 - RNA, 19 nt, Homo sapiens
  misc_RNA (1)...(19): siRNA sense strand
acugugaccagaucuguuu

SEQ ID NO: 1228346 - RNA, 19 nt, Homo sapiens
  misc_RNA (1)...(19): siRNA sense strand
gggaugcuuuguggacuca

SEQ ID NO: 1228347 - RNA, 19 nt, Homo sapiens
  misc_RNA (1)...(19): siRNA sense strand
agacgcagcaacacagcua

SEQ ID NO: 1228348 - RNA, 19 nt, Homo sapiens
  misc_RNA (1)...(19): siRNA sense strand
cagaggagggcaucuacug

SEQ ID NO: 1228349 - RNA, 19 nt, Homo sapiens
  misc_RNA (1)...(19): siRNA sense strand
gcacaacuucugccguaac

SEQ ID NO: 1228350 - RNA, 19 nt, Homo sapiens
  misc_RNA (1)...(19): siRNA sense strand
caccgacugugaccagauc

SEQ ID NO: 1228351 - RNA, 19 nt, Homo sapiens
  misc_RNA (1)...(19): siRNA sense strand
gcugggcgucuaugaagug

SEQ ID NO: 1228352 - RNA, 19 nt, Homo sapiens
  misc_RNA (1)...(19): siRNA sense strand
cugcagggcuuccucuuuc

SEQ ID NO: 1228353 - RNA, 19 nt, Homo sapiens
  misc_RNA (1)...(19): siRNA sense strand
guccaggccuguccgaaug

SEQ ID NO: 1228354 - RNA, 19 nt, Homo sapiens
  misc_RNA (1)...(19): siRNA sense strand
cuacgcuucugccgcauga

SEQ ID NO: 1228355 - RNA, 19 nt, Homo sapiens
  misc_RNA (1)...(19): siRNA sense strand
ggacuucccggacgaguac

SEQ ID NO: 1228356 - RNA, 19 nt, Homo sapiens
  misc_RNA (1)...(19): siRNA sense strand
ccgaaugcuuccaggugaa

SEQ ID NO: 1228357 - RNA, 19 nt, Homo sapiens
  misc_RNA (1)...(19): siRNA sense strand
agacagaggagggcaucua

SEQ ID NO: 1228358 - RNA, 19 nt, Homo sapiens
  misc_RNA (1)...(19): siRNA sense strand
gaccagacgcagcaacaca

SEQ ID NO: 1228359 - RNA, 19 nt, Homo sapiens
  misc_RNA (1)...(19): siRNA sense strand
acugugaccagaucuguuu

SEQ ID NO: 1228360 - RNA, 19 nt, Homo sapiens
  misc_RNA (1)...(19): siRNA sense strand
gggaugcuuuguggacuca

SEQ ID NO: 1228361 - RNA, 19 nt, Homo sapiens
  misc_RNA (1)...(19): siRNA sense strand
agacgcagcaacacagcua

SEQ ID NO: 1228362 - RNA, 19 nt, Homo sapiens
  misc_RNA (1)...(19): siRNA sense strand
cagaggagggcaucuacug

SEQ ID NO: 1228363 - RNA, 19 nt, Homo sapiens
  misc_RNA (1)...(19): siRNA sense strand
gcacaacuucugccguaac

SEQ ID NO: 1228364 - RNA, 19 nt, Homo sapiens
  misc_RNA (1)...(19): siRNA sense strand
caccgacugugaccagauc

SEQ ID NO: 1228365 - RNA, 19 nt, Homo sapiens
  misc_RNA (1)...(19): siRNA sense strand
gcugggcgucuaugaagug

SEQ ID NO: 1228366 - RNA, 19 nt, Homo sapiens
  misc_RNA (1)...(19): siRNA sense strand
cugcagggcuuccucuuuc

SEQ ID NO: 1228367 - RNA, 19 nt, Homo sapiens
  misc_RNA (1)...(19): siRNA sense strand
guccaggccuguccgaaug

SEQ ID NO: 1228368 - RNA, 19 nt, Homo sapiens
  misc_RNA (1)...(19): siRNA sense strand
cuacgcuucugccgcauga

SEQ ID NO: 1228369 - RNA, 19 nt, Homo sapiens
  misc_RNA (1)...(19): siRNA sense strand
ggacuucccggacgaguac

SEQ ID NO: 1228370 - RNA, 19 nt, Homo sapiens
  misc_RNA (1)...(19): siRNA sense strand
ccgaaugcuuccaggugaa

SEQ ID NO: 1228371 - RNA, 19 nt, Homo sapiens
  misc_RNA (1)...(19): siRNA sense strand
agacagaggagggcaucua

SEQ ID NO: 1228372 - RNA, 19 nt, Homo sapiens
  misc_RNA (1)...(19): siRNA sense strand
gaccagacgcagcaacaca

SEQ ID NO: 1228373 - RNA, 19 nt, Homo sapiens
  misc_RNA (1)...(19): siRNA sense strand
acugugaccagaucuguuu

SEQ ID NO: 1228374 - RNA, 19 nt, Homo sapiens
  misc_RNA (1)...(19): siRNA sense strand
gggaugcuuuguggacuca

SEQ ID NO: 1228375 - RNA, 19 nt, Homo sapiens
  misc_RNA (1)...(19): siRNA sense strand
agacgcagcaacacagcua

SEQ ID NO: 1228376 - RNA, 19 nt, Homo sapiens
  misc_RNA (1)...(19): siRNA sense strand
cagaggagggcaucuacug

SEQ ID NO: 1228377 - RNA, 19 nt, Homo sapiens
  misc_RNA (1)...(19): siRNA sense strand
gcacaacuucugccguaac

SEQ ID NO: 1228378 - RNA, 19 nt, Homo sapiens
  misc_RNA (1)...(19): siRNA sense strand
caccgacugugaccagauc

SEQ ID NO: 1228379 - RNA, 19 nt, Homo sapiens
  misc_RNA (1)...(19): siRNA sense strand
gcugggcgucuaugaagug

SEQ ID NO: 1228380 - RNA, 19 nt, Homo sapiens
  misc_RNA (1)...(19): siRNA sense strand
gaagcugggcuguguggua

SEQ ID NO: 1228381 - RNA, 19 nt, Homo sapiens
  misc_RNA (1)...(19): siRNA sense strand
gcucaucuccgcucucuga

SEQ ID NO: 1228382 - RNA, 19 nt, Homo sapiens
  misc_RNA (1)...(19): siRNA sense strand
guccaggccuguccgaaug

SEQ ID NO: 1228383 - RNA, 19 nt, Homo sapiens
  misc_RNA (1)...(19): siRNA sense strand
cugcagggcuuccucuuuc

SEQ ID NO: 1228384 - RNA, 19 nt, Homo sapiens
  misc_RNA (1)...(19): siRNA sense strand
cuacgcuucugccgcauga

SEQ ID NO: 1228385 - RNA, 19 nt, Homo sapiens
  misc_RNA (1)...(19): siRNA sense strand
ggacuucccggacgaguac

SEQ ID NO: 1228386 - RNA, 19 nt, Homo sapiens
  misc_RNA (1)...(19): siRNA sense strand
aggagaagcugggcugugu

SEQ ID NO: 1228387 - RNA, 19 nt, Homo sapiens
  misc_RNA (1)...(19): siRNA sense strand
ccgaaugcuuccaggugaa

SEQ ID NO: 1228388 - RNA, 19 nt, Homo sapiens
  misc_RNA (1)...(19): siRNA sense strand
agacagaggagggcaucua

SEQ ID NO: 1228389 - RNA, 19 nt, Homo sapiens
  misc_RNA (1)...(19): siRNA sense strand
gaccagacgcagcaacaca

SEQ ID NO: 1228390 - RNA, 19 nt, Homo sapiens
  misc_RNA (1)...(19): siRNA sense strand
acugugaccagaucuguuu

SEQ ID NO: 1228391 - RNA, 19 nt, Homo sapiens
  misc_RNA (1)...(19): siRNA sense strand
gggaugcuuuguggacuca

SEQ ID NO: 1228392 - RNA, 19 nt, Homo sapiens
  misc_RNA (1)...(19): siRNA sense strand
agacgcagcaacacagcua

SEQ ID NO: 1228393 - RNA, 19 nt, Homo sapiens
  misc_RNA (1)...(19): siRNA sense strand
cagaggagggcaucuacug

SEQ ID NO: 1228394 - RNA, 19 nt, Homo sapiens
  misc_RNA (1)...(19): siRNA sense strand
gcacaacuucugccguaac

SEQ ID NO: 1228395 - RNA, 19 nt, Homo sapiens
  misc_RNA (1)...(19): siRNA sense strand
caccgacugugaccagauc

SEQ ID NO: 1228396 - RNA, 19 nt, Homo sapiens
  misc_RNA (1)...(19): siRNA sense strand
gcugggcgucuaugaagug

SEQ ID NO: 1228397 - RNA, 19 nt, Homo sapiens
  misc_RNA (1)...(19): siRNA sense strand
ucccugcgcucgcucaucu

SEQ ID NO: 1228398 - RNA, 19 nt, Homo sapiens
  misc_RNA (1)...(19): siRNA sense strand
gaagcaggcugaagaggaa

SEQ ID NO: 1228399 - RNA, 19 nt, Homo sapiens
  misc_RNA (1)...(19): siRNA sense strand
gcagaaggaucaagaaugc

SEQ ID NO: 1228400 - RNA, 19 nt, Homo sapiens
  misc_RNA (1)...(19): siRNA sense strand
ggaggaaccugaguaugag

SEQ ID NO: 1228401 - RNA, 19 nt, Homo sapiens
  misc_RNA (1)...(19): siRNA sense strand
augcaagccuggauucuuu

SEQ ID NO: 1228402 - RNA, 19 nt, Homo sapiens
  misc_RNA (1)...(19): siRNA sense strand
gaaccugaguaugagaaug

SEQ ID NO: 1228403 - RNA, 19 nt, Homo sapiens
  misc_RNA (1)...(19): siRNA sense strand
gagcuaccguguccaggau

SEQ ID NO: 1228404 - RNA, 19 nt, Homo sapiens
  misc_RNA (1)...(19): siRNA sense strand
ggaggcagaaggaucaaga

SEQ ID NO: 1228405 - RNA, 19 nt, Homo sapiens
  misc_RNA (1)...(19): siRNA sense strand
aggaggaaccugaguauga

SEQ ID NO: 1228406 - RNA, 19 nt, Homo sapiens
  misc_RNA (1)...(19): siRNA sense strand
ccagaaagacgaggugugu

SEQ ID NO: 1228407 - RNA, 19 nt, Homo sapiens
  misc_RNA (1)...(19): siRNA sense strand
gcuaccguguccaggauga

SEQ ID NO: 1228408 - RNA, 19 nt, Homo sapiens
  misc_RNA (1)...(19): siRNA sense strand
uuugguagcuuccagaaag

SEQ ID NO: 1228409 - RNA, 19 nt, Homo sapiens
  misc_RNA (1)...(19): siRNA sense strand
ggcagaaggaucaagaaug

SEQ ID NO: 1228410 - RNA, 19 nt, Homo sapiens
  misc_RNA (1)...(19): siRNA sense strand
ugagguuccugccuacugu

SEQ ID NO: 1228411 - RNA, 19 nt, Homo sapiens
  misc_RNA (1)...(19): siRNA sense strand
gaugcaagccuggauucuu

SEQ ID NO: 1228412 - RNA, 19 nt, Homo sapiens
  misc_RNA (1)...(19): siRNA sense strand
agaaagacgaggugugugu

SEQ ID NO: 1228413 - RNA, 19 nt, Homo sapiens
  misc_RNA (1)...(19): siRNA sense strand
gcuggaggcagaaggauca

SEQ ID NO: 1228414 - RNA, 19 nt, Homo sapiens
  misc_RNA (1)...(19): siRNA sense strand
gccgugcucuccagacaca

SEQ ID NO: 1228415 - RNA, 19 nt, Homo sapiens
  misc_RNA (1)...(19): siRNA sense strand
gcacguggaagccauugag

SEQ ID NO: 1228416 - RNA, 19 nt, Homo sapiens
  misc_RNA (1)...(19): siRNA sense strand
ggacaggccagcgagagau

SEQ ID NO: 1228417 - RNA, 19 nt, Homo sapiens
  misc_RNA (1)...(19): siRNA sense strand
caaagggcagcacgucugu

SEQ ID NO: 1228418 - RNA, 19 nt, Homo sapiens
  misc_RNA (1)...(19): siRNA sense strand
gcucugucuuccgccauuu

SEQ ID NO: 1228419 - RNA, 19 nt, Homo sapiens
  misc_RNA (1)...(19): siRNA sense strand
ccacagagucgccgaagcu

SEQ ID NO: 1228420 - RNA, 19 nt, Homo sapiens
  misc_RNA (1)...(19): siRNA sense strand
caaguuugcaccacagagu

SEQ ID NO: 1228421 - RNA, 19 nt, Homo sapiens
  misc_RNA (1)...(19): siRNA sense strand
cccagaagcaggcugaaga

SEQ ID NO: 1228422 - RNA, 19 nt, Homo sapiens
  misc_RNA (1)...(19): siRNA sense strand
gagaauguuguacccaucu

SEQ ID NO: 1228423 - RNA, 19 nt, Homo sapiens
  misc_RNA (1)...(19): siRNA sense strand
gaggcagaaggaucaagaa

SEQ ID NO: 1228424 - RNA, 19 nt, Homo sapiens
  misc_RNA (1)...(19): siRNA sense strand
ugaccacgaucuacaugcu

SEQ ID NO: 1228425 - RNA, 19 nt, Homo sapiens
  misc_RNA (1)...(19): siRNA sense strand
aagacgaggugugugugaa

SEQ ID NO: 1228426 - RNA, 19 nt, Homo sapiens
  misc_RNA (1)...(19): siRNA sense strand
aaagacgagguguguguga

SEQ ID NO: 1228427 - RNA, 19 nt, Homo sapiens
  misc_RNA (1)...(19): siRNA sense strand
ggaggccugugagccagau

SEQ ID NO: 1228428 - RNA, 19 nt, Homo sapiens
  misc_RNA (1)...(19): siRNA sense strand
ugaguaugagaauguugua

SEQ ID NO: 1228429 - RNA, 19 nt, Homo sapiens
  misc_RNA (1)...(19): siRNA sense strand
ggaaccugaguaugagaau

SEQ ID NO: 1228430 - RNA, 19 nt, Homo sapiens
  misc_RNA (1)...(19): siRNA sense strand
uggagaggcagaugagguu

SEQ ID NO: 1228431 - RNA, 19 nt, Homo sapiens
  misc_RNA (1)...(19): siRNA sense strand
gcagaaggaucaagaaugc

SEQ ID NO: 1228432 - RNA, 19 nt, Homo sapiens
  misc_RNA (1)...(19): siRNA sense strand
augcaagccuggauucuuu

SEQ ID NO: 1228433 - RNA, 19 nt, Homo sapiens
  misc_RNA (1)...(19): siRNA sense strand
ggaggcagaaggaucaaga

SEQ ID NO: 1228434 - RNA, 19 nt, Homo sapiens
  misc_RNA (1)...(19): siRNA sense strand
ccagaaagacgaggugugu

SEQ ID NO: 1228435 - RNA, 19 nt, Homo sapiens
  misc_RNA (1)...(19): siRNA sense strand
ggcagaaggaucaagaaug

SEQ ID NO: 1228436 - RNA, 19 nt, Homo sapiens
  misc_RNA (1)...(19): siRNA sense strand
gaugcaagccuggauucuu

SEQ ID NO: 1228437 - RNA, 19 nt, Homo sapiens
  misc_RNA (1)...(19): siRNA sense strand
agaaagacgaggugugugu

SEQ ID NO: 1228438 - RNA, 19 nt, Homo sapiens
  misc_RNA (1)...(19): siRNA sense strand
gcuggaggcagaaggauca

SEQ ID NO: 1228439 - RNA, 19 nt, Homo sapiens
  misc_RNA (1)...(19): siRNA sense strand
gccgugcucuccagacaca

SEQ ID NO: 1228440 - RNA, 19 nt, Homo sapiens
  misc_RNA (1)...(19): siRNA sense strand
caaagggcagcacgucugu

SEQ ID NO: 1228441 - RNA, 19 nt, Homo sapiens
  misc_RNA (1)...(19): siRNA sense strand
gaggcagaaggaucaagaa

SEQ ID NO: 1228442 - RNA, 19 nt, Homo sapiens
  misc_RNA (1)...(19): siRNA sense strand
aaagacgagguguguguga

SEQ ID NO: 1228443 - RNA, 19 nt, Homo sapiens
  misc_RNA (1)...(19): siRNA sense strand
aagacgaggugugugugaa

SEQ ID NO: 1228444 - RNA, 19 nt, Homo sapiens
  misc_RNA (1)...(19): siRNA sense strand
ggaggccugugagccagau

SEQ ID NO: 1228445 - RNA, 19 nt, Homo sapiens
  misc_RNA (1)...(19): siRNA sense strand
gcagaaggaucaagaaugc

SEQ ID NO: 1228446 - RNA, 19 nt, Homo sapiens
  misc_RNA (1)...(19): siRNA sense strand
augcaagccuggauucuuu

SEQ ID NO: 1228447 - RNA, 19 nt, Homo sapiens
  misc_RNA (1)...(19): siRNA sense strand
gagcuaccguguccaggau

SEQ ID NO: 1228448 - RNA, 19 nt, Homo sapiens
  misc_RNA (1)...(19): siRNA sense strand
ggaggcagaaggaucaaga

SEQ ID NO: 1228449 - RNA, 19 nt, Homo sapiens
  misc_RNA (1)...(19): siRNA sense strand
ccagaaagacgaggugugu

SEQ ID NO: 1228450 - RNA, 19 nt, Homo sapiens
  misc_RNA (1)...(19): siRNA sense strand
gcuaccguguccaggauga

SEQ ID NO: 1228451 - RNA, 19 nt, Homo sapiens
  misc_RNA (1)...(19): siRNA sense strand
ggcagaaggaucaagaaug

SEQ ID NO: 1228452 - RNA, 19 nt, Homo sapiens
  misc_RNA (1)...(19): siRNA sense strand
ugagguuccugccuacugu

SEQ ID NO: 1228453 - RNA, 19 nt, Homo sapiens
  misc_RNA (1)...(19): siRNA sense strand
gaugcaagccuggauucuu

SEQ ID NO: 1228454 - RNA, 19 nt, Homo sapiens
  misc_RNA (1)...(19): siRNA sense strand
agaaagacgaggugugugu

SEQ ID NO: 1228455 - RNA, 19 nt, Homo sapiens
  misc_RNA (1)...(19): siRNA sense strand
gcuggaggcagaaggauca

SEQ ID NO: 1228456 - RNA, 19 nt, Homo sapiens
  misc_RNA (1)...(19): siRNA sense strand
gccgugcucuccagacaca

SEQ ID NO: 1228457 - RNA, 19 nt, Homo sapiens
  misc_RNA (1)...(19): siRNA sense strand
ggacaggccagcgagagau

SEQ ID NO: 1228458 - RNA, 19 nt, Homo sapiens
  misc_RNA (1)...(19): siRNA sense strand
caaagggcagcacgucugu

SEQ ID NO: 1228459 - RNA, 19 nt, Homo sapiens
  misc_RNA (1)...(19): siRNA sense strand
gaggcagaaggaucaagaa

SEQ ID NO: 1228460 - RNA, 19 nt, Homo sapiens
  misc_RNA (1)...(19): siRNA sense strand
aaagacgagguguguguga

SEQ ID NO: 1228461 - RNA, 19 nt, Homo sapiens
  misc_RNA (1)...(19): siRNA sense strand
aagacgaggugugugugaa

SEQ ID NO: 1228462 - RNA, 19 nt, Homo sapiens
  misc_RNA (1)...(19): siRNA sense strand
ggaggccugugagccagau

SEQ ID NO: 1228463 - RNA, 19 nt, Homo sapiens
  misc_RNA (1)...(19): siRNA sense strand
uggagaggcagaugagguu

SEQ ID NO: 1228464 - RNA, 19 nt, Homo sapiens
  misc_RNA (1)...(19): siRNA sense strand
gcagaaggaucaagaaugc

SEQ ID NO: 1228465 - RNA, 19 nt, Homo sapiens
  misc_RNA (1)...(19): siRNA sense strand
augcaagccuggauucuuu

SEQ ID NO: 1228466 - RNA, 19 nt, Homo sapiens
  misc_RNA (1)...(19): siRNA sense strand
ggaggcagaaggaucaaga

SEQ ID NO: 1228467 - RNA, 19 nt, Homo sapiens
  misc_RNA (1)...(19): siRNA sense strand
ccagaaagacgaggugugu

SEQ ID NO: 1228468 - RNA, 19 nt, Homo sapiens
  misc_RNA (1)...(19): siRNA sense strand
ggcagaaggaucaagaaug

SEQ ID NO: 1228469 - RNA, 19 nt, Homo sapiens
  misc_RNA (1)...(19): siRNA sense strand
gaugcaagccuggauucuu

SEQ ID NO: 1228470 - RNA, 19 nt, Homo sapiens
  misc_RNA (1)...(19): siRNA sense strand
agaaagacgaggugugugu

SEQ ID NO: 1228471 - RNA, 19 nt, Homo sapiens
  misc_RNA (1)...(19): siRNA sense strand
gcuggaggcagaaggauca

SEQ ID NO: 1228472 - RNA, 19 nt, Homo sapiens
  misc_RNA (1)...(19): siRNA sense strand
gccgugcucuccagacaca

SEQ ID NO: 1228473 - RNA, 19 nt, Homo sapiens
  misc_RNA (1)...(19): siRNA sense strand
caaagggcagcacgucugu

SEQ ID NO: 1228474 - RNA, 19 nt, Homo sapiens
  misc_RNA (1)...(19): siRNA sense strand
gaggcagaaggaucaagaa

SEQ ID NO: 1228475 - RNA, 19 nt, Homo sapiens
  misc_RNA (1)...(19): siRNA sense strand
aaagacgagguguguguga

SEQ ID NO: 1228476 - RNA, 19 nt, Homo sapiens
  misc_RNA (1)...(19): siRNA sense strand
aagacgaggugugugugaa

SEQ ID NO: 1228477 - RNA, 19 nt, Homo sapiens
  misc_RNA (1)...(19): siRNA sense strand
ggaggccugugagccagau

SEQ ID NO: 1228478 - RNA, 19 nt, Homo sapiens
  misc_RNA (1)...(19): siRNA sense strand
gaagcaggcugaagaggaa

SEQ ID NO: 1228479 - RNA, 19 nt, Homo sapiens
  misc_RNA (1)...(19): siRNA sense strand
gcagaaggaucaagaaugc

SEQ ID NO: 1228480 - RNA, 19 nt, Homo sapiens
  misc_RNA (1)...(19): siRNA sense strand
ggaggaaccugaguaugag

SEQ ID NO: 1228481 - RNA, 19 nt, Homo sapiens
  misc_RNA (1)...(19): siRNA sense strand
augcaagccuggauucuuu

SEQ ID NO: 1228482 - RNA, 19 nt, Homo sapiens
  misc_RNA (1)...(19): siRNA sense strand
gaaccugaguaugagaaug

SEQ ID NO: 1228483 - RNA, 19 nt, Homo sapiens
  misc_RNA (1)...(19): siRNA sense strand
gagcuaccguguccaggau

SEQ ID NO: 1228484 - RNA, 19 nt, Homo sapiens
  misc_RNA (1)...(19): siRNA sense strand
ggaggcagaaggaucaaga

SEQ ID NO: 1228485 - RNA, 19 nt, Homo sapiens
  misc_RNA (1)...(19): siRNA sense strand
aggaggaaccugaguauga

SEQ ID NO: 1228486 - RNA, 19 nt, Homo sapiens
  misc_RNA (1)...(19): siRNA sense strand
ccagaaagacgaggugugu

SEQ ID NO: 1228487 - RNA, 19 nt, Homo sapiens
  misc_RNA (1)...(19): siRNA sense strand
gcuaccguguccaggauga

SEQ ID NO: 1228488 - RNA, 19 nt, Homo sapiens
  misc_RNA (1)...(19): siRNA sense strand
uuugguagcuuccagaaag

SEQ ID NO: 1228489 - RNA, 19 nt, Homo sapiens
  misc_RNA (1)...(19): siRNA sense strand
ggcagaaggaucaagaaug

SEQ ID NO: 1228490 - RNA, 19 nt, Homo sapiens
  misc_RNA (1)...(19): siRNA sense strand
ugagguuccugccuacugu

SEQ ID NO: 1228491 - RNA, 19 nt, Homo sapiens
  misc_RNA (1)...(19): siRNA sense strand
gaugcaagccuggauucuu

SEQ ID NO: 1228492 - RNA, 19 nt, Homo sapiens
  misc_RNA (1)...(19): siRNA sense strand
agaaagacgaggugugugu

SEQ ID NO: 1228493 - RNA, 19 nt, Homo sapiens
  misc_RNA (1)...(19): siRNA sense strand
gcuggaggcagaaggauca

SEQ ID NO: 1228494 - RNA, 19 nt, Homo sapiens
  misc_RNA (1)...(19): siRNA sense strand
gccgugcucuccagacaca

SEQ ID NO: 1228495 - RNA, 19 nt, Homo sapiens
  misc_RNA (1)...(19): siRNA sense strand
gcacguggaagccauugag

SEQ ID NO: 1228496 - RNA, 19 nt, Homo sapiens
  misc_RNA (1)...(19): siRNA sense strand
ggacaggccagcgagagau

SEQ ID NO: 1228497 - RNA, 19 nt, Homo sapiens
  misc_RNA (1)...(19): siRNA sense strand
caaagggcagcacgucugu

SEQ ID NO: 1228498 - RNA, 19 nt, Homo sapiens
  misc_RNA (1)...(19): siRNA sense strand
gcucugucuuccgccauuu

SEQ ID NO: 1228499 - RNA, 19 nt, Homo sapiens
  misc_RNA (1)...(19): siRNA sense strand
ccacagagucgccgaagcu

SEQ ID NO: 1228500 - RNA, 19 nt, Homo sapiens
  misc_RNA (1)...(19): siRNA sense strand
caaguuugcaccacagagu

SEQ ID NO: 1228501 - RNA, 19 nt, Homo sapiens
  misc_RNA (1)...(19): siRNA sense strand
cccagaagcaggcugaaga

SEQ ID NO: 1228502 - RNA, 19 nt, Homo sapiens
  misc_RNA (1)...(19): siRNA sense strand
gagaauguuguacccaucu

SEQ ID NO: 1228503 - RNA, 19 nt, Homo sapiens
  misc_RNA (1)...(19): siRNA sense strand
gaggcagaaggaucaagaa

SEQ ID NO: 1228504 - RNA, 19 nt, Homo sapiens
  misc_RNA (1)...(19): siRNA sense strand
ugaccacgaucuacaugcu

SEQ ID NO: 1228505 - RNA, 19 nt, Homo sapiens
  misc_RNA (1)...(19): siRNA sense strand
aagacgaggugugugugaa

SEQ ID NO: 1228506 - RNA, 19 nt, Homo sapiens
  misc_RNA (1)...(19): siRNA sense strand
aaagacgagguguguguga

SEQ ID NO: 1228507 - RNA, 19 nt, Homo sapiens
  misc_RNA (1)...(19): siRNA sense strand
ggaggccugugagccagau

SEQ ID NO: 1228508 - RNA, 19 nt, Homo sapiens
  misc_RNA (1)...(19): siRNA sense strand
ugaguaugagaauguugua

SEQ ID NO: 1228509 - RNA, 19 nt, Homo sapiens
  misc_RNA (1)...(19): siRNA sense strand
ggaaccugaguaugagaau

SEQ ID NO: 1228510 - RNA, 19 nt, Homo sapiens
  misc_RNA (1)...(19): siRNA sense strand
uggagaggcagaugagguu

SEQ ID NO: 1228511 - RNA, 19 nt, Homo sapiens
  misc_RNA (1)...(19): siRNA sense strand
uaaauaagcugguagacua

SEQ ID NO: 1228512 - RNA, 19 nt, Homo sapiens
  misc_RNA (1)...(19): siRNA sense strand
caacaaggguaauuacuuu

SEQ ID NO: 1228513 - RNA, 19 nt, Homo sapiens
  misc_RNA (1)...(19): siRNA sense strand
gauaugugcccaagaauuu

SEQ ID NO: 1228514 - RNA, 19 nt, Homo sapiens
  misc_RNA (1)...(19): siRNA sense strand
gagguuggcuucuucauca

SEQ ID NO: 1228515 - RNA, 19 nt, Homo sapiens
  misc_RNA (1)...(19): siRNA sense strand
gaaauccgaccuucgauga

SEQ ID NO: 1228516 - RNA, 19 nt, Homo sapiens
  misc_RNA (1)...(19): siRNA sense strand
gcaaggagguuggcuucuu

SEQ ID NO: 1228517 - RNA, 19 nt, Homo sapiens
  misc_RNA (1)...(19): siRNA sense strand
ggaagcuguugccaaguuu

SEQ ID NO: 1228518 - RNA, 19 nt, Homo sapiens
  misc_RNA (1)...(19): siRNA sense strand
caaauuccaucuccagaca

SEQ ID NO: 1228519 - RNA, 19 nt, Homo sapiens
  misc_RNA (1)...(19): siRNA sense strand
gcaugaggaugacguucaa

SEQ ID NO: 1228520 - RNA, 19 nt, Homo sapiens
  misc_RNA (1)...(19): siRNA sense strand
aagcagaucuuccuuagag

SEQ ID NO: 1228521 - RNA, 19 nt, Homo sapiens
  misc_RNA (1)...(19): siRNA sense strand
gagacaacaaggguaauua

SEQ ID NO: 1228522 - RNA, 19 nt, Homo sapiens
  misc_RNA (1)...(19): siRNA sense strand
ggagauguuuugaagauuu

SEQ ID NO: 1228523 - RNA, 19 nt, Homo sapiens
  misc_RNA (1)...(19): siRNA sense strand
caagaggagugguuuaagg

SEQ ID NO: 1228524 - RNA, 19 nt, Homo sapiens
  misc_RNA (1)...(19): siRNA sense strand
aaggauaugugcccaagaa

SEQ ID NO: 1228525 - RNA, 19 nt, Homo sapiens
  misc_RNA (1)...(19): siRNA sense strand
ggaugacguucaacacuuc

SEQ ID NO: 1228526 - RNA, 19 nt, Homo sapiens
  misc_RNA (1)...(19): siRNA sense strand
caaggagguuggcuucuuc

SEQ ID NO: 1228527 - RNA, 19 nt, Homo sapiens
  misc_RNA (1)...(19): siRNA sense strand
ggauaugugcccaagaauu

SEQ ID NO: 1228528 - RNA, 19 nt, Homo sapiens
  misc_RNA (1)...(19): siRNA sense strand
gaaguuuccaucccuaaau

SEQ ID NO: 1228529 - RNA, 19 nt, Homo sapiens
  misc_RNA (1)...(19): siRNA sense strand
ccaagaauuucauagacau

SEQ ID NO: 1228530 - RNA, 19 nt, Homo sapiens
  misc_RNA (1)...(19): siRNA sense strand
aaguuuccaucccuaaaua

SEQ ID NO: 1228531 - RNA, 19 nt, Homo sapiens
  misc_RNA (1)...(19): siRNA sense strand
gaucuuccuuagagacaga

SEQ ID NO: 1228532 - RNA, 19 nt, Homo sapiens
  misc_RNA (1)...(19): siRNA sense strand
uuucauagacauccaguuu

SEQ ID NO: 1228533 - RNA, 19 nt, Homo sapiens
  misc_RNA (1)...(19): siRNA sense strand
gagaaguuuccaucccuaa

SEQ ID NO: 1228534 - RNA, 19 nt, Homo sapiens
  misc_RNA (1)...(19): siRNA sense strand
gacauccaguuucccaaau

SEQ ID NO: 1228535 - RNA, 19 nt, Homo sapiens
  misc_RNA (1)...(19): siRNA sense strand
gcccaagaauuucauagac

SEQ ID NO: 1228536 - RNA, 19 nt, Homo sapiens
  misc_RNA (1)...(19): siRNA sense strand
caaggguaauuacuuucug

SEQ ID NO: 1228537 - RNA, 19 nt, Homo sapiens
  misc_RNA (1)...(19): siRNA sense strand
ggagaagaaauccgaccuu

SEQ ID NO: 1228538 - RNA, 19 nt, Homo sapiens
  misc_RNA (1)...(19): siRNA sense strand
ucuguggacugagaaguuu

SEQ ID NO: 1228539 - RNA, 19 nt, Homo sapiens
  misc_RNA (1)...(19): siRNA sense strand
cccaagaauuucauagaca

SEQ ID NO: 1228540 - RNA, 19 nt, Homo sapiens
  misc_RNA (1)...(19): siRNA sense strand
agccacagccuccgcaaua

SEQ ID NO: 1228541 - RNA, 19 nt, Homo sapiens
  misc_RNA (1)...(19): siRNA sense strand
gaggaugaacugagcuuuc

SEQ ID NO: 1228542 - RNA, 19 nt, Homo sapiens
  misc_RNA (1)...(19): siRNA sense strand
acaccaggcagagaacuua

SEQ ID NO: 1228543 - RNA, 19 nt, Homo sapiens
  misc_RNA (1)...(19): siRNA sense strand
uggcacccaugacccgaua

SEQ ID NO: 1228544 - RNA, 19 nt, Homo sapiens
  misc_RNA (1)...(19): siRNA sense strand
acaacaaggguaauuacuu

SEQ ID NO: 1228545 - RNA, 19 nt, Homo sapiens
  misc_RNA (1)...(19): siRNA sense strand
uugaggcccuggaggauga

SEQ ID NO: 1228546 - RNA, 19 nt, Homo sapiens
  misc_RNA (1)...(19): siRNA sense strand
gccacagccuccgcaauau

SEQ ID NO: 1228547 - RNA, 19 nt, Homo sapiens
  misc_RNA (1)...(19): siRNA sense strand
agacagaacccgagaagac

SEQ ID NO: 1228548 - RNA, 19 nt, Homo sapiens
  misc_RNA (1)...(19): siRNA sense strand
ggagguuggcuucuucauc

SEQ ID NO: 1228549 - RNA, 19 nt, Homo sapiens
  misc_RNA (1)...(19): siRNA sense strand
aggaugacguucaacacuu

SEQ ID NO: 1228550 - RNA, 19 nt, Homo sapiens
  misc_RNA (1)...(19): siRNA sense strand
cgagacaacaaggguaauu

SEQ ID NO: 1228551 - RNA, 19 nt, Homo sapiens
  misc_RNA (1)...(19): siRNA sense strand
accggaagcugucggauca

SEQ ID NO: 1228552 - RNA, 19 nt, Homo sapiens
  misc_RNA (1)...(19): siRNA sense strand
ccagacagaagcagaucuu

SEQ ID NO: 1228553 - RNA, 19 nt, Homo sapiens
  misc_RNA (1)...(19): siRNA sense strand
ccacagccuccgcaauaug

SEQ ID NO: 1228554 - RNA, 19 nt, Homo sapiens
  misc_RNA (1)...(19): siRNA sense strand
agacauccaguuucccaaa

SEQ ID NO: 1228555 - RNA, 19 nt, Homo sapiens
  misc_RNA (1)...(19): siRNA sense strand
ccaguuucccaaaugguuu

SEQ ID NO: 1228556 - RNA, 19 nt, Homo sapiens
  misc_RNA (1)...(19): siRNA sense strand
gcuguugccaaguuugauu

SEQ ID NO: 1228557 - RNA, 19 nt, Homo sapiens
  misc_RNA (1)...(19): siRNA sense strand
ucauagacauccaguuucc

SEQ ID NO: 1228558 - RNA, 19 nt, Homo sapiens
  misc_RNA (1)...(19): siRNA sense strand
gaggaugacguucaacacu

SEQ ID NO: 1228559 - RNA, 19 nt, Homo sapiens
  misc_RNA (1)...(19): siRNA sense strand
gaagcuguugccaaguuug

SEQ ID NO: 1228560 - RNA, 19 nt, Homo sapiens
  misc_RNA (1)...(19): siRNA sense strand
gaaggauaugugcccaaga

SEQ ID NO: 1228561 - RNA, 19 nt, Homo sapiens
  misc_RNA (1)...(19): siRNA sense strand
ggcagagaacuuacucaug

SEQ ID NO: 1228562 - RNA, 19 nt, Homo sapiens
  misc_RNA (1)...(19): siRNA sense strand
cauccaguuucccaaaugg

SEQ ID NO: 1228563 - RNA, 19 nt, Homo sapiens
  misc_RNA (1)...(19): siRNA sense strand
acauccaguuucccaaaug

SEQ ID NO: 1228564 - RNA, 19 nt, Homo sapiens
  misc_RNA (1)...(19): siRNA sense strand
ggcaugaggaugacguuca

SEQ ID NO: 1228565 - RNA, 19 nt, Homo sapiens
  misc_RNA (1)...(19): siRNA sense strand
ugguggagguccuggauag

SEQ ID NO: 1228566 - RNA, 19 nt, Homo sapiens
  misc_RNA (1)...(19): siRNA sense strand
gagccaggaaggauaugug

SEQ ID NO: 1228567 - RNA, 19 nt, Homo sapiens
  misc_RNA (1)...(19): siRNA sense strand
aaggguaauuacuuucugu

SEQ ID NO: 1228568 - RNA, 19 nt, Homo sapiens
  misc_RNA (1)...(19): siRNA sense strand
ggucaugcgagacaacaag

SEQ ID NO: 1228569 - RNA, 19 nt, Homo sapiens
  misc_RNA (1)...(19): siRNA sense strand
gcagccuugacauaaauga

SEQ ID NO: 1228570 - RNA, 19 nt, Homo sapiens
  misc_RNA (1)...(19): siRNA sense strand
aauuccaucuccagacaga

SEQ ID NO: 1228571 - RNA, 19 nt, Homo sapiens
  misc_RNA (1)...(19): siRNA sense strand
gacuacuacaggacaaauu

SEQ ID NO: 1228572 - RNA, 19 nt, Homo sapiens
  misc_RNA (1)...(19): siRNA sense strand
acacaaaccuugaacauuu

SEQ ID NO: 1228573 - RNA, 19 nt, Homo sapiens
  misc_RNA (1)...(19): siRNA sense strand
gaagaggcauugguuauaa

SEQ ID NO: 1228574 - RNA, 19 nt, Homo sapiens
  misc_RNA (1)...(19): siRNA sense strand
caagacaucugaacauauu

SEQ ID NO: 1228575 - RNA, 19 nt, Homo sapiens
  misc_RNA (1)...(19): siRNA sense strand
gaauguagcucaacuugug

SEQ ID NO: 1228576 - RNA, 19 nt, Homo sapiens
  misc_RNA (1)...(19): siRNA sense strand
ggagagauggucagaaaua

SEQ ID NO: 1228577 - RNA, 19 nt, Homo sapiens
  misc_RNA (1)...(19): siRNA sense strand
agaaugaucugcaagaauu

SEQ ID NO: 1228578 - RNA, 19 nt, Homo sapiens
  misc_RNA (1)...(19): siRNA sense strand
gaacuucgaccuacugaaa

SEQ ID NO: 1228579 - RNA, 19 nt, Homo sapiens
  misc_RNA (1)...(19): siRNA sense strand
auaaauaucucccaccuaa

SEQ ID NO: 1228580 - RNA, 19 nt, Homo sapiens
  misc_RNA (1)...(19): siRNA sense strand
gaagaaaguacuagagaaa

SEQ ID NO: 1228581 - RNA, 19 nt, Homo sapiens
  misc_RNA (1)...(19): siRNA sense strand
cuacaacccucuccuguuu

SEQ ID NO: 1228582 - RNA, 19 nt, Homo sapiens
  misc_RNA (1)...(19): siRNA sense strand
gaagcuuggugaauaauug

SEQ ID NO: 1228583 - RNA, 19 nt, Homo sapiens
  misc_RNA (1)...(19): siRNA sense strand
gaagagggccaaacacuga

SEQ ID NO: 1228584 - RNA, 19 nt, Homo sapiens
  misc_RNA (1)...(19): siRNA sense strand
gugaaaggaucaagauauu

SEQ ID NO: 1228585 - RNA, 19 nt, Homo sapiens
  misc_RNA (1)...(19): siRNA sense strand
gagcuauucuugcugauga

SEQ ID NO: 1228586 - RNA, 19 nt, Homo sapiens
  misc_RNA (1)...(19): siRNA sense strand
gaagaacagugccauuaag

SEQ ID NO: 1228587 - RNA, 19 nt, Homo sapiens
  misc_RNA (1)...(19): siRNA sense strand
uagaagaacccaagaaauu

SEQ ID NO: 1228588 - RNA, 19 nt, Homo sapiens
  misc_RNA (1)...(19): siRNA sense strand
uggaggaucucacuuaauu

SEQ ID NO: 1228589 - RNA, 19 nt, Homo sapiens
  misc_RNA (1)...(19): siRNA sense strand
gagaaugaauggcagaugu

SEQ ID NO: 1228590 - RNA, 19 nt, Homo sapiens
  misc_RNA (1)...(19): siRNA sense strand
gcagauuguugauggcuuu

SEQ ID NO: 1228591 - RNA, 19 nt, Homo sapiens
  misc_RNA (1)...(19): siRNA sense strand
gaaauggguuuagggaaga

SEQ ID NO: 1228592 - RNA, 19 nt, Homo sapiens
  misc_RNA (1)...(19): siRNA sense strand
gaaaucugauagccuaguu

SEQ ID NO: 1228593 - RNA, 19 nt, Homo sapiens
  misc_RNA (1)...(19): siRNA sense strand
gaaaauaguccccaucuaa

SEQ ID NO: 1228594 - RNA, 19 nt, Homo sapiens
  misc_RNA (1)...(19): siRNA sense strand
ggaagaggcauugguuaua

SEQ ID NO: 1228595 - RNA, 19 nt, Homo sapiens
  misc_RNA (1)...(19): siRNA sense strand
guuuaaaucugccuaguga

SEQ ID NO: 1228596 - RNA, 19 nt, Homo sapiens
  misc_RNA (1)...(19): siRNA sense strand
gguguaagccuucaaagaa

SEQ ID NO: 1228597 - RNA, 19 nt, Homo sapiens
  misc_RNA (1)...(19): siRNA sense strand
ucagaaagaaggaaucaua

SEQ ID NO: 1228598 - RNA, 19 nt, Homo sapiens
  misc_RNA (1)...(19): siRNA sense strand
agauugagcuuuaucgaaa

SEQ ID NO: 1228599 - RNA, 19 nt, Homo sapiens
  misc_RNA (1)...(19): siRNA sense strand
uagcucaacuugugauaaa

SEQ ID NO: 1228600 - RNA, 19 nt, Homo sapiens
  misc_RNA (1)...(19): siRNA sense strand
gcaagccaguaauaaagaa

SEQ ID NO: 1228601 - RNA, 19 nt, Homo sapiens
  misc_RNA (1)...(19): siRNA sense strand
ccuggaagcuuggugaaua

SEQ ID NO: 1228602 - RNA, 19 nt, Homo sapiens
  misc_RNA (1)...(19): siRNA sense strand
gaaaguucagauuguguua

SEQ ID NO: 1228603 - RNA, 19 nt, Homo sapiens
  misc_RNA (1)...(19): siRNA sense strand
gaagaacccaagaaauuau

SEQ ID NO: 1228604 - RNA, 19 nt, Homo sapiens
  misc_RNA (1)...(19): siRNA sense strand
gaucuuagaauaugcaguu

SEQ ID NO: 1228605 - RNA, 19 nt, Homo sapiens
  misc_RNA (1)...(19): siRNA sense strand
guucaacucuauaaaggaa

SEQ ID NO: 1228606 - RNA, 19 nt, Homo sapiens
  misc_RNA (1)...(19): siRNA sense strand
gcuguuaaauucucagguu

SEQ ID NO: 1228607 - RNA, 19 nt, Homo sapiens
  misc_RNA (1)...(19): siRNA sense strand
gaacagugccauuaagaca

SEQ ID NO: 1228608 - RNA, 19 nt, Homo sapiens
  misc_RNA (1)...(19): siRNA sense strand
guaaugggaaugagaauga

SEQ ID NO: 1228609 - RNA, 19 nt, Homo sapiens
  misc_RNA (1)...(19): siRNA sense strand
aaaccaaguucaaaggaaa

SEQ ID NO: 1228610 - RNA, 19 nt, Homo sapiens
  misc_RNA (1)...(19): siRNA sense strand
cugauagccuaguuaaaua

SEQ ID NO: 1228611 - RNA, 19 nt, Homo sapiens
  misc_RNA (1)...(19): siRNA sense strand
cagauuguguuacucauga

SEQ ID NO: 1228612 - RNA, 19 nt, Homo sapiens
  misc_RNA (1)...(19): siRNA sense strand
uacaaaggcuugcuaagug

SEQ ID NO: 1228613 - RNA, 19 nt, Homo sapiens
  misc_RNA (1)...(19): siRNA sense strand
agaagaacccaagaaauua

SEQ ID NO: 1228614 - RNA, 19 nt, Homo sapiens
  misc_RNA (1)...(19): siRNA sense strand
guacugcuaucucgcauuc

SEQ ID NO: 1228615 - RNA, 19 nt, Homo sapiens
  misc_RNA (1)...(19): siRNA sense strand
ggaaggugaugcuguucuu

SEQ ID NO: 1228616 - RNA, 19 nt, Homo sapiens
  misc_RNA (1)...(19): siRNA sense strand
ugaagaaaguacuagagaa

SEQ ID NO: 1228617 - RNA, 19 nt, Homo sapiens
  misc_RNA (1)...(19): siRNA sense strand
gagagauggucagaaauau

SEQ ID NO: 1228618 - RNA, 19 nt, Homo sapiens
  misc_RNA (1)...(19): siRNA sense strand
ggccaaacacugaugauuu

SEQ ID NO: 1228619 - RNA, 19 nt, Homo sapiens
  misc_RNA (1)...(19): siRNA sense strand
cacuacagauugagcuuua

SEQ ID NO: 1228620 - RNA, 19 nt, Homo sapiens
  misc_RNA (1)...(19): siRNA sense strand
ggaguuaggagaaagaaga

SEQ ID NO: 1228621 - RNA, 19 nt, Homo sapiens
  misc_RNA (1)...(19): siRNA sense strand
ggaucaagauauuuacugu

SEQ ID NO: 1228622 - RNA, 19 nt, Homo sapiens
  misc_RNA (1)...(19): siRNA sense strand
gauugauccuuaccuugua

SEQ ID NO: 1228623 - RNA, 19 nt, Homo sapiens
  misc_RNA (1)...(19): siRNA sense strand
uaaaccaaguucaaaggaa

SEQ ID NO: 1228624 - RNA, 19 nt, Homo sapiens
  misc_RNA (1)...(19): siRNA sense strand
ucagaaauauccuguacau

SEQ ID NO: 1228625 - RNA, 19 nt, Homo sapiens
  misc_RNA (1)...(19): siRNA sense strand
guguaagccuucaaagaaa

SEQ ID NO: 1228626 - RNA, 19 nt, Homo sapiens
  misc_RNA (1)...(19): siRNA sense strand
gaaaaggaguuaggagaaa

SEQ ID NO: 1228627 - RNA, 19 nt, Homo sapiens
  misc_RNA (1)...(19): siRNA sense strand
ucauuagccuuucuuguga

SEQ ID NO: 1228628 - RNA, 19 nt, Homo sapiens
  misc_RNA (1)...(19): siRNA sense strand
gaagugaaaggaucaagau

SEQ ID NO: 1228629 - RNA, 19 nt, Homo sapiens
  misc_RNA (1)...(19): siRNA sense strand
gaaagcuguuaaauucuca

SEQ ID NO: 1228630 - RNA, 19 nt, Homo sapiens
  misc_RNA (1)...(19): siRNA sense strand
caggagcacuacagauuga

SEQ ID NO: 1228631 - RNA, 19 nt, Homo sapiens
  misc_RNA (1)...(19): siRNA sense strand
uaucaaaggcagaucagua

SEQ ID NO: 1228632 - RNA, 19 nt, Homo sapiens
  misc_RNA (1)...(19): siRNA sense strand
ggucagaaauauccuguac

SEQ ID NO: 1228633 - RNA, 19 nt, Homo sapiens
  misc_RNA (1)...(19): siRNA sense strand
caccuacacuggcaacauu

SEQ ID NO: 1228634 - RNA, 19 nt, Homo sapiens
  misc_RNA (1)...(19): siRNA sense strand
cgucauggauaugcuuaua

SEQ ID NO: 1228635 - RNA, 19 nt, Homo sapiens
  misc_RNA (1)...(19): siRNA sense strand
gggcaucguuugaagaaca

SEQ ID NO: 1228636 - RNA, 19 nt, Homo sapiens
  misc_RNA (1)...(19): siRNA sense strand
gaggcaagccaguaauaaa

SEQ ID NO: 1228637 - RNA, 19 nt, Homo sapiens
  misc_RNA (1)...(19): siRNA sense strand
gaaaguacuagagaaauca

SEQ ID NO: 1228638 - RNA, 19 nt, Homo sapiens
  misc_RNA (1)...(19): siRNA sense strand
ccacaucaccagaaaucua

SEQ ID NO: 1228639 - RNA, 19 nt, Homo sapiens
  misc_RNA (1)...(19): siRNA sense strand
acuggacucuuuauccuua

SEQ ID NO: 1228640 - RNA, 19 nt, Homo sapiens
  misc_RNA (1)...(19): siRNA sense strand
caagaagagaaaucugaua

SEQ ID NO: 1228641 - RNA, 19 nt, Homo sapiens
  misc_RNA (1)...(19): siRNA sense strand
agagauaauugcaguggaa

SEQ ID NO: 1228642 - RNA, 19 nt, Homo sapiens
  misc_RNA (1)...(19): siRNA sense strand
gaaaucuaacucccugaaa

SEQ ID NO: 1228643 - RNA, 19 nt, Homo sapiens
  misc_RNA (1)...(19): siRNA sense strand
ucuaugacauugauuggaa

SEQ ID NO: 1228644 - RNA, 19 nt, Homo sapiens
  misc_RNA (1)...(19): siRNA sense strand
uauguaagcgucauggaua

SEQ ID NO: 1228645 - RNA, 19 nt, Homo sapiens
  misc_RNA (1)...(19): siRNA sense strand
ugaagaacagugccauuaa

SEQ ID NO: 1228646 - RNA, 19 nt, Homo sapiens
  misc_RNA (1)...(19): siRNA sense strand
caaggaacaagaagagaaa

SEQ ID NO: 1228647 - RNA, 19 nt, Homo sapiens
  misc_RNA (1)...(19): siRNA sense strand
ucauucggcuccuaaagaa

SEQ ID NO: 1228648 - RNA, 19 nt, Homo sapiens
  misc_RNA (1)...(19): siRNA sense strand
ggaggcaagccaguaauaa

SEQ ID NO: 1228649 - RNA, 19 nt, Homo sapiens
  misc_RNA (1)...(19): siRNA sense strand
gaaaaggaauguagcucaa

SEQ ID NO: 1228650 - RNA, 19 nt, Homo sapiens
  misc_RNA (1)...(19): siRNA sense strand
gugaauaauuggaagaaag

SEQ ID NO: 1228651 - RNA, 19 nt, Homo sapiens
  misc_RNA (1)...(19): siRNA sense strand
aucgaaagcuguuaaauuc

SEQ ID NO: 1228652 - RNA, 19 nt, Homo sapiens
  misc_RNA (1)...(19): siRNA sense strand
ggcaaugucuagaguaugg

SEQ ID NO: 1228653 - RNA, 19 nt, Homo sapiens
  misc_RNA (1)...(19): siRNA sense strand
uggauaugcuuauacaaga

SEQ ID NO: 1228654 - RNA, 19 nt, Homo sapiens
  misc_RNA (1)...(19): siRNA sense strand
cgaaagcuguuaaauucuc

SEQ ID NO: 1228655 - RNA, 19 nt, Homo sapiens
  misc_RNA (1)...(19): siRNA sense strand
agaaaguacuagagaaauc

SEQ ID NO: 1228656 - RNA, 19 nt, Homo sapiens
  misc_RNA (1)...(19): siRNA sense strand
gaauauaaccacucaagcu

SEQ ID NO: 1228657 - RNA, 19 nt, Homo sapiens
  misc_RNA (1)...(19): siRNA sense strand
gaauccagccacugacauu

SEQ ID NO: 1228658 - RNA, 19 nt, Homo sapiens
  misc_RNA (1)...(19): siRNA sense strand
gaucucacuuaauucucua

SEQ ID NO: 1228659 - RNA, 19 nt, Homo sapiens
  misc_RNA (1)...(19): siRNA sense strand
ggaucucacuuaauucucu

SEQ ID NO: 1228660 - RNA, 19 nt, Homo sapiens
  misc_RNA (1)...(19): siRNA sense strand
cuucaaggguuguuggaaa

SEQ ID NO: 1228661 - RNA, 19 nt, Homo sapiens
  misc_RNA (1)...(19): siRNA sense strand
uggcagauguggagcuauu

SEQ ID NO: 1228662 - RNA, 19 nt, Homo sapiens
  misc_RNA (1)...(19): siRNA sense strand
gaaggugaugcuguucuua

SEQ ID NO: 1228663 - RNA, 19 nt, Homo sapiens
  misc_RNA (1)...(19): siRNA sense strand
cuagagaaaucaauaacag

SEQ ID NO: 1228664 - RNA, 19 nt, Homo sapiens
  misc_RNA (1)...(19): siRNA sense strand
gaaaagagucuauacaaag

SEQ ID NO: 1228665 - RNA, 19 nt, Homo sapiens
  misc_RNA (1)...(19): siRNA sense strand
ggaagugaaaggaucaaga

SEQ ID NO: 1228666 - RNA, 19 nt, Homo sapiens
  misc_RNA (1)...(19): siRNA sense strand
guaaauccaggaauauuag

SEQ ID NO: 1228667 - RNA, 19 nt, Homo sapiens
  misc_RNA (1)...(19): siRNA sense strand
cauuggaggaucucacuua

SEQ ID NO: 1228668 - RNA, 19 nt, Homo sapiens
  misc_RNA (1)...(19): siRNA sense strand
gaggguguugcaauuaaua

SEQ ID NO: 1228669 - RNA, 19 nt, Homo sapiens
  misc_RNA (1)...(19): siRNA sense strand
gaaguaauccaggucugaa

SEQ ID NO: 1228670 - RNA, 19 nt, Homo sapiens
  misc_RNA (1)...(19): siRNA sense strand
aagaagagcagcugaacuu

SEQ ID NO: 1228671 - RNA, 19 nt, Homo sapiens
  misc_RNA (1)...(19): siRNA sense strand
aaacaccaaucucucaaag

SEQ ID NO: 1228672 - RNA, 19 nt, Homo sapiens
  misc_RNA (1)...(19): siRNA sense strand
gaagaaaguacuagagaaa

SEQ ID NO: 1228673 - RNA, 19 nt, Homo sapiens
  misc_RNA (1)...(19): siRNA sense strand
guuuaaaucugccuaguga

SEQ ID NO: 1228674 - RNA, 19 nt, Homo sapiens
  misc_RNA (1)...(19): siRNA sense strand
gaucuuagaauaugcaguu

SEQ ID NO: 1228675 - RNA, 19 nt, Homo sapiens
  misc_RNA (1)...(19): siRNA sense strand
ugaagaaaguacuagagaa

SEQ ID NO: 1228676 - RNA, 19 nt, Homo sapiens
  misc_RNA (1)...(19): siRNA sense strand
caccuacacuggcaacauu

SEQ ID NO: 1228677 - RNA, 19 nt, Homo sapiens
  misc_RNA (1)...(19): siRNA sense strand
gaaaguacuagagaaauca

SEQ ID NO: 1228678 - RNA, 19 nt, Homo sapiens
  misc_RNA (1)...(19): siRNA sense strand
agagauaauugcaguggaa

SEQ ID NO: 1228679 - RNA, 19 nt, Homo sapiens
  misc_RNA (1)...(19): siRNA sense strand
agaaaguacuagagaaauc

SEQ ID NO: 1228680 - RNA, 19 nt, Homo sapiens
  misc_RNA (1)...(19): siRNA sense strand
cuagagaaaucaauaacag

SEQ ID NO: 1228681 - RNA, 19 nt, Homo sapiens
  misc_RNA (1)...(19): siRNA sense strand
gaaguaauccaggucugaa

SEQ ID NO: 1228682 - RNA, 19 nt, Homo sapiens
  misc_RNA (1)...(19): siRNA sense strand
gaggguguugcaauuaaua

SEQ ID NO: 1228683 - RNA, 19 nt, Homo sapiens
  misc_RNA (1)...(19): siRNA sense strand
gcaggggaauuccuucaaa

SEQ ID NO: 1228684 - RNA, 19 nt, Homo sapiens
  misc_RNA (1)...(19): siRNA sense strand
gugaagaaaguacuagaga

SEQ ID NO: 1228685 - RNA, 19 nt, Homo sapiens
  misc_RNA (1)...(19): siRNA sense strand
guaauccaggucugaauga

SEQ ID NO: 1228686 - RNA, 19 nt, Homo sapiens
  misc_RNA (1)...(19): siRNA sense strand
gaagagauuacaaaacuga

SEQ ID NO: 1228687 - RNA, 19 nt, Homo sapiens
  misc_RNA (1)...(19): siRNA sense strand
gagaaaucaauaacagaga

SEQ ID NO: 1228688 - RNA, 19 nt, Homo sapiens
  misc_RNA (1)...(19): siRNA sense strand
uugaggguguugcaauuaa

SEQ ID NO: 1228689 - RNA, 19 nt, Homo sapiens
  misc_RNA (1)...(19): siRNA sense strand
aaaucugccuagugaagaa

SEQ ID NO: 1228690 - RNA, 19 nt, Homo sapiens
  misc_RNA (1)...(19): siRNA sense strand
gcaauuaauaacaccuuuc

SEQ ID NO: 1228691 - RNA, 19 nt, Homo sapiens
  misc_RNA (1)...(19): siRNA sense strand
aaauuuauaccuccaggaa

SEQ ID NO: 1228692 - RNA, 19 nt, Homo sapiens
  misc_RNA (1)...(19): siRNA sense strand
ggucugaaugaagagauua

SEQ ID NO: 1228693 - RNA, 19 nt, Homo sapiens
  misc_RNA (1)...(19): siRNA sense strand
auuuauaccuccaggaaga

SEQ ID NO: 1228694 - RNA, 19 nt, Homo sapiens
  misc_RNA (1)...(19): siRNA sense strand
uaauccaggucugaaugaa

SEQ ID NO: 1228695 - RNA, 19 nt, Homo sapiens
  misc_RNA (1)...(19): siRNA sense strand
ugaggguguugcaauuaau

SEQ ID NO: 1228696 - RNA, 19 nt, Homo sapiens
  misc_RNA (1)...(19): siRNA sense strand
uaaaucugccuagugaaga

SEQ ID NO: 1228697 - RNA, 19 nt, Homo sapiens
  misc_RNA (1)...(19): siRNA sense strand
gaucugcagcaccaaguca

SEQ ID NO: 1228698 - RNA, 19 nt, Homo sapiens
  misc_RNA (1)...(19): siRNA sense strand
gagauaauugcaguggaaa

SEQ ID NO: 1228699 - RNA, 19 nt, Homo sapiens
  misc_RNA (1)...(19): siRNA sense strand
auccaggucugaaugaaga

SEQ ID NO: 1228700 - RNA, 19 nt, Homo sapiens
  misc_RNA (1)...(19): siRNA sense strand
gcaccuacacuggcaacau

SEQ ID NO: 1228701 - RNA, 19 nt, Homo sapiens
  misc_RNA (1)...(19): siRNA sense strand
aacauuagauccaccucau

SEQ ID NO: 1228702 - RNA, 19 nt, Homo sapiens
  misc_RNA (1)...(19): siRNA sense strand
uuaaaucugccuagugaag

SEQ ID NO: 1228703 - RNA, 19 nt, Homo sapiens
  misc_RNA (1)...(19): siRNA sense strand
agaaguaauccaggucuga

SEQ ID NO: 1228704 - RNA, 19 nt, Homo sapiens
  misc_RNA (1)...(19): siRNA sense strand
acaccuuucucccgucaca

SEQ ID NO: 1228705 - RNA, 19 nt, Homo sapiens
  misc_RNA (1)...(19): siRNA sense strand
cauuagauccaccucauac

SEQ ID NO: 1228706 - RNA, 19 nt, Homo sapiens
  misc_RNA (1)...(19): siRNA sense strand
acauuagauccaccucaua

SEQ ID NO: 1228707 - RNA, 19 nt, Homo sapiens
  misc_RNA (1)...(19): siRNA sense strand
gaagcaggcugaagaggaa

SEQ ID NO: 1228708 - RNA, 19 nt, Homo sapiens
  misc_RNA (1)...(19): siRNA sense strand
gcagaaggaucaagaaugc

SEQ ID NO: 1228709 - RNA, 19 nt, Homo sapiens
  misc_RNA (1)...(19): siRNA sense strand
ggaggaaccugaguaugag

SEQ ID NO: 1228710 - RNA, 19 nt, Homo sapiens
  misc_RNA (1)...(19): siRNA sense strand
augcaagccuggauucuuu

SEQ ID NO: 1228711 - RNA, 19 nt, Homo sapiens
  misc_RNA (1)...(19): siRNA sense strand
gaaccugaguaugagaaug

SEQ ID NO: 1228712 - RNA, 19 nt, Homo sapiens
  misc_RNA (1)...(19): siRNA sense strand
gagcuaccguguccaggau

SEQ ID NO: 1228713 - RNA, 19 nt, Homo sapiens
  misc_RNA (1)...(19): siRNA sense strand
ggaggcagaaggaucaaga

SEQ ID NO: 1228714 - RNA, 19 nt, Homo sapiens
  misc_RNA (1)...(19): siRNA sense strand
aggaggaaccugaguauga

SEQ ID NO: 1228715 - RNA, 19 nt, Homo sapiens
  misc_RNA (1)...(19): siRNA sense strand
ccagaaagacgaggugugu

SEQ ID NO: 1228716 - RNA, 19 nt, Homo sapiens
  misc_RNA (1)...(19): siRNA sense strand
gcuaccguguccaggauga

SEQ ID NO: 1228717 - RNA, 19 nt, Homo sapiens
  misc_RNA (1)...(19): siRNA sense strand
uuugguagcuuccagaaag

SEQ ID NO: 1228718 - RNA, 19 nt, Homo sapiens
  misc_RNA (1)...(19): siRNA sense strand
ggcagaaggaucaagaaug

SEQ ID NO: 1228719 - RNA, 19 nt, Homo sapiens
  misc_RNA (1)...(19): siRNA sense strand
ugagguuccugccuacugu

SEQ ID NO: 1228720 - RNA, 19 nt, Homo sapiens
  misc_RNA (1)...(19): siRNA sense strand
gaugcaagccuggauucuu

SEQ ID NO: 1228721 - RNA, 19 nt, Homo sapiens
  misc_RNA (1)...(19): siRNA sense strand
agaaagacgaggugugugu

SEQ ID NO: 1228722 - RNA, 19 nt, Homo sapiens
  misc_RNA (1)...(19): siRNA sense strand
gcuggaggcagaaggauca

SEQ ID NO: 1228723 - RNA, 19 nt, Homo sapiens
  misc_RNA (1)...(19): siRNA sense strand
gccgugcucuccagacaca

SEQ ID NO: 1228724 - RNA, 19 nt, Homo sapiens
  misc_RNA (1)...(19): siRNA sense strand
gcacguggaagccauugag

SEQ ID NO: 1228725 - RNA, 19 nt, Homo sapiens
  misc_RNA (1)...(19): siRNA sense strand
ggacaggccagcgagagau

SEQ ID NO: 1228726 - RNA, 19 nt, Homo sapiens
  misc_RNA (1)...(19): siRNA sense strand
caaagggcagcacgucugu

SEQ ID NO: 1228727 - RNA, 19 nt, Homo sapiens
  misc_RNA (1)...(19): siRNA sense strand
gcucugucuuccgccauuu

SEQ ID NO: 1228728 - RNA, 19 nt, Homo sapiens
  misc_RNA (1)...(19): siRNA sense strand
ccacagagucgccgaagcu

SEQ ID NO: 1228729 - RNA, 19 nt, Homo sapiens
  misc_RNA (1)...(19): siRNA sense strand
caaguuugcaccacagagu

SEQ ID NO: 1228730 - RNA, 19 nt, Homo sapiens
  misc_RNA (1)...(19): siRNA sense strand
cccagaagcaggcugaaga

SEQ ID NO: 1228731 - RNA, 19 nt, Homo sapiens
  misc_RNA (1)...(19): siRNA sense strand
gagaauguuguacccaucu

SEQ ID NO: 1228732 - RNA, 19 nt, Homo sapiens
  misc_RNA (1)...(19): siRNA sense strand
gaggcagaaggaucaagaa

SEQ ID NO: 1228733 - RNA, 19 nt, Homo sapiens
  misc_RNA (1)...(19): siRNA sense strand
ugaccacgaucuacaugcu

SEQ ID NO: 1228734 - RNA, 19 nt, Homo sapiens
  misc_RNA (1)...(19): siRNA sense strand
aagacgaggugugugugaa

SEQ ID NO: 1228735 - RNA, 19 nt, Homo sapiens
  misc_RNA (1)...(19): siRNA sense strand
aaagacgagguguguguga

SEQ ID NO: 1228736 - RNA, 19 nt, Homo sapiens
  misc_RNA (1)...(19): siRNA sense strand
ggaggccugugagccagau

SEQ ID NO: 1228737 - RNA, 19 nt, Homo sapiens
  misc_RNA (1)...(19): siRNA sense strand
ugaguaugagaauguugua

SEQ ID NO: 1228738 - RNA, 19 nt, Homo sapiens
  misc_RNA (1)...(19): siRNA sense strand
ggaaccugaguaugagaau

SEQ ID NO: 1228739 - RNA, 19 nt, Homo sapiens
  misc_RNA (1)...(19): siRNA sense strand
uggagaggcagaugagguu

SEQ ID NO: 1228740 - RNA, 19 nt, Homo sapiens
  misc_RNA (1)...(19): siRNA sense strand
gcagaaggaucaagaaugc

SEQ ID NO: 1228741 - RNA, 19 nt, Homo sapiens
  misc_RNA (1)...(19): siRNA sense strand
augcaagccuggauucuuu

SEQ ID NO: 1228742 - RNA, 19 nt, Homo sapiens
  misc_RNA (1)...(19): siRNA sense strand
ggaggcagaaggaucaaga

SEQ ID NO: 1228743 - RNA, 19 nt, Homo sapiens
  misc_RNA (1)...(19): siRNA sense strand
ccagaaagacgaggugugu

SEQ ID NO: 1228744 - RNA, 19 nt, Homo sapiens
  misc_RNA (1)...(19): siRNA sense strand
ggcagaaggaucaagaaug

SEQ ID NO: 1228745 - RNA, 19 nt, Homo sapiens
  misc_RNA (1)...(19): siRNA sense strand
gaugcaagccuggauucuu

SEQ ID NO: 1228746 - RNA, 19 nt, Homo sapiens
  misc_RNA (1)...(19): siRNA sense strand
agaaagacgaggugugugu

SEQ ID NO: 1228747 - RNA, 19 nt, Homo sapiens
  misc_RNA (1)...(19): siRNA sense strand
gcuggaggcagaaggauca

SEQ ID NO: 1228748 - RNA, 19 nt, Homo sapiens
  misc_RNA (1)...(19): siRNA sense strand
gccgugcucuccagacaca

SEQ ID NO: 1228749 - RNA, 19 nt, Homo sapiens
  misc_RNA (1)...(19): siRNA sense strand
caaagggcagcacgucugu

SEQ ID NO: 1228750 - RNA, 19 nt, Homo sapiens
  misc_RNA (1)...(19): siRNA sense strand
gaggcagaaggaucaagaa

SEQ ID NO: 1228751 - RNA, 19 nt, Homo sapiens
  misc_RNA (1)...(19): siRNA sense strand
aaagacgagguguguguga

SEQ ID NO: 1228752 - RNA, 19 nt, Homo sapiens
  misc_RNA (1)...(19): siRNA sense strand
aagacgaggugugugugaa

SEQ ID NO: 1228753 - RNA, 19 nt, Homo sapiens
  misc_RNA (1)...(19): siRNA sense strand
ggaggccugugagccagau

SEQ ID NO: 1228754 - RNA, 19 nt, Homo sapiens
  misc_RNA (1)...(19): siRNA sense strand
gcagaaggaucaagaaugc

SEQ ID NO: 1228755 - RNA, 19 nt, Homo sapiens
  misc_RNA (1)...(19): siRNA sense strand
augcaagccuggauucuuu

SEQ ID NO: 1228756 - RNA, 19 nt, Homo sapiens
  misc_RNA (1)...(19): siRNA sense strand
gagcuaccguguccaggau

SEQ ID NO: 1228757 - RNA, 19 nt, Homo sapiens
  misc_RNA (1)...(19): siRNA sense strand
ggaggcagaaggaucaaga

SEQ ID NO: 1228758 - RNA, 19 nt, Homo sapiens
  misc_RNA (1)...(19): siRNA sense strand
ccagaaagacgaggugugu

SEQ ID NO: 1228759 - RNA, 19 nt, Homo sapiens
  misc_RNA (1)...(19): siRNA sense strand
gcuaccguguccaggauga

SEQ ID NO: 1228760 - RNA, 19 nt, Homo sapiens
  misc_RNA (1)...(19): siRNA sense strand
ggcagaaggaucaagaaug

SEQ ID NO: 1228761 - RNA, 19 nt, Homo sapiens
  misc_RNA (1)...(19): siRNA sense strand
ugagguuccugccuacugu

SEQ ID NO: 1228762 - RNA, 19 nt, Homo sapiens
  misc_RNA (1)...(19): siRNA sense strand
gaugcaagccuggauucuu

SEQ ID NO: 1228763 - RNA, 19 nt, Homo sapiens
  misc_RNA (1)...(19): siRNA sense strand
agaaagacgaggugugugu

SEQ ID NO: 1228764 - RNA, 19 nt, Homo sapiens
  misc_RNA (1)...(19): siRNA sense strand
gcuggaggcagaaggauca

SEQ ID NO: 1228765 - RNA, 19 nt, Homo sapiens
  misc_RNA (1)...(19): siRNA sense strand
gccgugcucuccagacaca

SEQ ID NO: 1228766 - RNA, 19 nt, Homo sapiens
  misc_RNA (1)...(19): siRNA sense strand
ggacaggccagcgagagau

SEQ ID NO: 1228767 - RNA, 19 nt, Homo sapiens
  misc_RNA (1)...(19): siRNA sense strand
caaagggcagcacgucugu

SEQ ID NO: 1228768 - RNA, 19 nt, Homo sapiens
  misc_RNA (1)...(19): siRNA sense strand
gaggcagaaggaucaagaa

SEQ ID NO: 1228769 - RNA, 19 nt, Homo sapiens
  misc_RNA (1)...(19): siRNA sense strand
aaagacgagguguguguga

SEQ ID NO: 1228770 - RNA, 19 nt, Homo sapiens
  misc_RNA (1)...(19): siRNA sense strand
aagacgaggugugugugaa

SEQ ID NO: 1228771 - RNA, 19 nt, Homo sapiens
  misc_RNA (1)...(19): siRNA sense strand
ggaggccugugagccagau

SEQ ID NO: 1228772 - RNA, 19 nt, Homo sapiens
  misc_RNA (1)...(19): siRNA sense strand
uggagaggcagaugagguu

SEQ ID NO: 1228773 - RNA, 19 nt, Homo sapiens
  misc_RNA (1)...(19): siRNA sense strand
gcagaaggaucaagaaugc

SEQ ID NO: 1228774 - RNA, 19 nt, Homo sapiens
  misc_RNA (1)...(19): siRNA sense strand
augcaagccuggauucuuu

SEQ ID NO: 1228775 - RNA, 19 nt, Homo sapiens
  misc_RNA (1)...(19): siRNA sense strand
ggaggcagaaggaucaaga

SEQ ID NO: 1228776 - RNA, 19 nt, Homo sapiens
  misc_RNA (1)...(19): siRNA sense strand
ccagaaagacgaggugugu

SEQ ID NO: 1228777 - RNA, 19 nt, Homo sapiens
  misc_RNA (1)...(19): siRNA sense strand
ggcagaaggaucaagaaug

SEQ ID NO: 1228778 - RNA, 19 nt, Homo sapiens
  misc_RNA (1)...(19): siRNA sense strand
gaugcaagccuggauucuu

SEQ ID NO: 1228779 - RNA, 19 nt, Homo sapiens
  misc_RNA (1)...(19): siRNA sense strand
agaaagacgaggugugugu

SEQ ID NO: 1228780 - RNA, 19 nt, Homo sapiens
  misc_RNA (1)...(19): siRNA sense strand
gcuggaggcagaaggauca

SEQ ID NO: 1228781 - RNA, 19 nt, Homo sapiens
  misc_RNA (1)...(19): siRNA sense strand
gccgugcucuccagacaca

SEQ ID NO: 1228782 - RNA, 19 nt, Homo sapiens
  misc_RNA (1)...(19): siRNA sense strand
caaagggcagcacgucugu

SEQ ID NO: 1228783 - RNA, 19 nt, Homo sapiens
  misc_RNA (1)...(19): siRNA sense strand
gaggcagaaggaucaagaa

SEQ ID NO: 1228784 - RNA, 19 nt, Homo sapiens
  misc_RNA (1)...(19): siRNA sense strand
aaagacgagguguguguga

SEQ ID NO: 1228785 - RNA, 19 nt, Homo sapiens
  misc_RNA (1)...(19): siRNA sense strand
aagacgaggugugugugaa

SEQ ID NO: 1228786 - RNA, 19 nt, Homo sapiens
  misc_RNA (1)...(19): siRNA sense strand
ggaggccugugagccagau

SEQ ID NO: 1228787 - RNA, 19 nt, Homo sapiens
  misc_RNA (1)...(19): siRNA sense strand
gaagcaggcugaagaggaa

SEQ ID NO: 1228788 - RNA, 19 nt, Homo sapiens
  misc_RNA (1)...(19): siRNA sense strand
gcagaaggaucaagaaugc

SEQ ID NO: 1228789 - RNA, 19 nt, Homo sapiens
  misc_RNA (1)...(19): siRNA sense strand
ggaggaaccugaguaugag

SEQ ID NO: 1228790 - RNA, 19 nt, Homo sapiens
  misc_RNA (1)...(19): siRNA sense strand
augcaagccuggauucuuu

SEQ ID NO: 1228791 - RNA, 19 nt, Homo sapiens
  misc_RNA (1)...(19): siRNA sense strand
gaaccugaguaugagaaug

SEQ ID NO: 1228792 - RNA, 19 nt, Homo sapiens
  misc_RNA (1)...(19): siRNA sense strand
gagcuaccguguccaggau

SEQ ID NO: 1228793 - RNA, 19 nt, Homo sapiens
  misc_RNA (1)...(19): siRNA sense strand
ggaggcagaaggaucaaga

SEQ ID NO: 1228794 - RNA, 19 nt, Homo sapiens
  misc_RNA (1)...(19): siRNA sense strand
aggaggaaccugaguauga

SEQ ID NO: 1228795 - RNA, 19 nt, Homo sapiens
  misc_RNA (1)...(19): siRNA sense strand
ccagaaagacgaggugugu

SEQ ID NO: 1228796 - RNA, 19 nt, Homo sapiens
  misc_RNA (1)...(19): siRNA sense strand
gcuaccguguccaggauga

SEQ ID NO: 1228797 - RNA, 19 nt, Homo sapiens
  misc_RNA (1)...(19): siRNA sense strand
uuugguagcuuccagaaag

SEQ ID NO: 1228798 - RNA, 19 nt, Homo sapiens
  misc_RNA (1)...(19): siRNA sense strand
ggcagaaggaucaagaaug

SEQ ID NO: 1228799 - RNA, 19 nt, Homo sapiens
  misc_RNA (1)...(19): siRNA sense strand
ugagguuccugccuacugu

SEQ ID NO: 1228800 - RNA, 19 nt, Homo sapiens
  misc_RNA (1)...(19): siRNA sense strand
gaugcaagccuggauucuu

SEQ ID NO: 1228801 - RNA, 19 nt, Homo sapiens
  misc_RNA (1)...(19): siRNA sense strand
agaaagacgaggugugugu

SEQ ID NO: 1228802 - RNA, 19 nt, Homo sapiens
  misc_RNA (1)...(19): siRNA sense strand
gcuggaggcagaaggauca

SEQ ID NO: 1228803 - RNA, 19 nt, Homo sapiens
  misc_RNA (1)...(19): siRNA sense strand
gccgugcucuccagacaca

SEQ ID NO: 1228804 - RNA, 19 nt, Homo sapiens
  misc_RNA (1)...(19): siRNA sense strand
gcacguggaagccauugag

SEQ ID NO: 1228805 - RNA, 19 nt, Homo sapiens
  misc_RNA (1)...(19): siRNA sense strand
ggacaggccagcgagagau

SEQ ID NO: 1228806 - RNA, 19 nt, Homo sapiens
  misc_RNA (1)...(19): siRNA sense strand
caaagggcagcacgucugu

SEQ ID NO: 1228807 - RNA, 19 nt, Homo sapiens
  misc_RNA (1)...(19): siRNA sense strand
gcucugucuuccgccauuu

SEQ ID NO: 1228808 - RNA, 19 nt, Homo sapiens
  misc_RNA (1)...(19): siRNA sense strand
ccacagagucgccgaagcu

SEQ ID NO: 1228809 - RNA, 19 nt, Homo sapiens
  misc_RNA (1)...(19): siRNA sense strand
caaguuugcaccacagagu

SEQ ID NO: 1228810 - RNA, 19 nt, Homo sapiens
  misc_RNA (1)...(19): siRNA sense strand
cccagaagcaggcugaaga

SEQ ID NO: 1228811 - RNA, 19 nt, Homo sapiens
  misc_RNA (1)...(19): siRNA sense strand
gagaauguuguacccaucu

SEQ ID NO: 1228812 - RNA, 19 nt, Homo sapiens
  misc_RNA (1)...(19): siRNA sense strand
gaggcagaaggaucaagaa

SEQ ID NO: 1228813 - RNA, 19 nt, Homo sapiens
  misc_RNA (1)...(19): siRNA sense strand
ugaccacgaucuacaugcu

SEQ ID NO: 1228814 - RNA, 19 nt, Homo sapiens
  misc_RNA (1)...(19): siRNA sense strand
aagacgaggugugugugaa

SEQ ID NO: 1228815 - RNA, 19 nt, Homo sapiens
  misc_RNA (1)...(19): siRNA sense strand
aaagacgagguguguguga

SEQ ID NO: 1228816 - RNA, 19 nt, Homo sapiens
  misc_RNA (1)...(19): siRNA sense strand
ggaggccugugagccagau

SEQ ID NO: 1228817 - RNA, 19 nt, Homo sapiens
  misc_RNA (1)...(19): siRNA sense strand
ugaguaugagaauguugua

SEQ ID NO: 1228818 - RNA, 19 nt, Homo sapiens
  misc_RNA (1)...(19): siRNA sense strand
ggaaccugaguaugagaau

SEQ ID NO: 1228819 - RNA, 19 nt, Homo sapiens
  misc_RNA (1)...(19): siRNA sense strand
uggagaggcagaugagguu

SEQ ID NO: 1228820 - RNA, 19 nt, Homo sapiens
  misc_RNA (1)...(19): siRNA sense strand
gaagcaggcugaagaggaa

SEQ ID NO: 1228821 - RNA, 19 nt, Homo sapiens
  misc_RNA (1)...(19): siRNA sense strand
gcagaaggaucaagaaugc

SEQ ID NO: 1228822 - RNA, 19 nt, Homo sapiens
  misc_RNA (1)...(19): siRNA sense strand
ggaggaaccugaguaugag

SEQ ID NO: 1228823 - RNA, 19 nt, Homo sapiens
  misc_RNA (1)...(19): siRNA sense strand
augcaagccuggauucuuu

SEQ ID NO: 1228824 - RNA, 19 nt, Homo sapiens
  misc_RNA (1)...(19): siRNA sense strand
gaaccugaguaugagaaug

SEQ ID NO: 1228825 - RNA, 19 nt, Homo sapiens
  misc_RNA (1)...(19): siRNA sense strand
gagcuaccguguccaggau

SEQ ID NO: 1228826 - RNA, 19 nt, Homo sapiens
  misc_RNA (1)...(19): siRNA sense strand
ggaggcagaaggaucaaga

SEQ ID NO: 1228827 - RNA, 19 nt, Homo sapiens
  misc_RNA (1)...(19): siRNA sense strand
aggaggaaccugaguauga

SEQ ID NO: 1228828 - RNA, 19 nt, Homo sapiens
  misc_RNA (1)...(19): siRNA sense strand
ccagaaagacgaggugugu

SEQ ID NO: 1228829 - RNA, 19 nt, Homo sapiens
  misc_RNA (1)...(19): siRNA sense strand
gcuaccguguccaggauga

SEQ ID NO: 1228830 - RNA, 19 nt, Homo sapiens
  misc_RNA (1)...(19): siRNA sense strand
uuugguagcuuccagaaag

SEQ ID NO: 1228831 - RNA, 19 nt, Homo sapiens
  misc_RNA (1)...(19): siRNA sense strand
ggcagaaggaucaagaaug

SEQ ID NO: 1228832 - RNA, 19 nt, Homo sapiens
  misc_RNA (1)...(19): siRNA sense strand
ugagguuccugccuacugu

SEQ ID NO: 1228833 - RNA, 19 nt, Homo sapiens
  misc_RNA (1)...(19): siRNA sense strand
gaugcaagccuggauucuu

SEQ ID NO: 1228834 - RNA, 19 nt, Homo sapiens
  misc_RNA (1)...(19): siRNA sense strand
agaaagacgaggugugugu

SEQ ID NO: 1228835 - RNA, 19 nt, Homo sapiens
  misc_RNA (1)...(19): siRNA sense strand
gcuggaggcagaaggauca

SEQ ID NO: 1228836 - RNA, 19 nt, Homo sapiens
  misc_RNA (1)...(19): siRNA sense strand
gccgugcucuccagacaca

SEQ ID NO: 1228837 - RNA, 19 nt, Homo sapiens
  misc_RNA (1)...(19): siRNA sense strand
gcacguggaagccauugag

SEQ ID NO: 1228838 - RNA, 19 nt, Homo sapiens
  misc_RNA (1)...(19): siRNA sense strand
ggacaggccagcgagagau

SEQ ID NO: 1228839 - RNA, 19 nt, Homo sapiens
  misc_RNA (1)...(19): siRNA sense strand
caaagggcagcacgucugu

SEQ ID NO: 1228840 - RNA, 19 nt, Homo sapiens
  misc_RNA (1)...(19): siRNA sense strand
gcucugucuuccgccauuu

SEQ ID NO: 1228841 - RNA, 19 nt, Homo sapiens
  misc_RNA (1)...(19): siRNA sense strand
ccacagagucgccgaagcu

SEQ ID NO: 1228842 - RNA, 19 nt, Homo sapiens
  misc_RNA (1)...(19): siRNA sense strand
caaguuugcaccacagagu

SEQ ID NO: 1228843 - RNA, 19 nt, Homo sapiens
  misc_RNA (1)...(19): siRNA sense strand
cccagaagcaggcugaaga

SEQ ID NO: 1228844 - RNA, 19 nt, Homo sapiens
  misc_RNA (1)...(19): siRNA sense strand
gagaauguuguacccaucu

SEQ ID NO: 1228845 - RNA, 19 nt, Homo sapiens
  misc_RNA (1)...(19): siRNA sense strand
gaggcagaaggaucaagaa

SEQ ID NO: 1228846 - RNA, 19 nt, Homo sapiens
  misc_RNA (1)...(19): siRNA sense strand
ugaccacgaucuacaugcu

SEQ ID NO: 1228847 - RNA, 19 nt, Homo sapiens
  misc_RNA (1)...(19): siRNA sense strand
aagacgaggugugugugaa

SEQ ID NO: 1228848 - RNA, 19 nt, Homo sapiens
  misc_RNA (1)...(19): siRNA sense strand
aaagacgagguguguguga

SEQ ID NO: 1228849 - RNA, 19 nt, Homo sapiens
  misc_RNA (1)...(19): siRNA sense strand
ggaggccugugagccagau

SEQ ID NO: 1228850 - RNA, 19 nt, Homo sapiens
  misc_RNA (1)...(19): siRNA sense strand
ugaguaugagaauguugua

SEQ ID NO: 1228851 - RNA, 19 nt, Homo sapiens
  misc_RNA (1)...(19): siRNA sense strand
ggaaccugaguaugagaau

SEQ ID NO: 1228852 - RNA, 19 nt, Homo sapiens
  misc_RNA (1)...(19): siRNA sense strand
uggagaggcagaugagguu

SEQ ID NO: 1228853 - RNA, 19 nt, Homo sapiens
  misc_RNA (1)...(19): siRNA sense strand
gcagaaggaucaagaaugc

SEQ ID NO: 1228854 - RNA, 19 nt, Homo sapiens
  misc_RNA (1)...(19): siRNA sense strand
augcaagccuggauucuuu

SEQ ID NO: 1228855 - RNA, 19 nt, Homo sapiens
  misc_RNA (1)...(19): siRNA sense strand
ggaggcagaaggaucaaga

SEQ ID NO: 1228856 - RNA, 19 nt, Homo sapiens
  misc_RNA (1)...(19): siRNA sense strand
ccagaaagacgaggugugu

SEQ ID NO: 1228857 - RNA, 19 nt, Homo sapiens
  misc_RNA (1)...(19): siRNA sense strand
ggcagaaggaucaagaaug

SEQ ID NO: 1228858 - RNA, 19 nt, Homo sapiens
  misc_RNA (1)...(19): siRNA sense strand
gaugcaagccuggauucuu

SEQ ID NO: 1228859 - RNA, 19 nt, Homo sapiens
  misc_RNA (1)...(19): siRNA sense strand
agaaagacgaggugugugu

SEQ ID NO: 1228860 - RNA, 19 nt, Homo sapiens
  misc_RNA (1)...(19): siRNA sense strand
gcuggaggcagaaggauca

SEQ ID NO: 1228861 - RNA, 19 nt, Homo sapiens
  misc_RNA (1)...(19): siRNA sense strand
gccgugcucuccagacaca

SEQ ID NO: 1228862 - RNA, 19 nt, Homo sapiens
  misc_RNA (1)...(19): siRNA sense strand
caaagggcagcacgucugu

SEQ ID NO: 1228863 - RNA, 19 nt, Homo sapiens
  misc_RNA (1)...(19): siRNA sense strand
gaggcagaaggaucaagaa

SEQ ID NO: 1228864 - RNA, 19 nt, Homo sapiens
  misc_RNA (1)...(19): siRNA sense strand
aaagacgagguguguguga

SEQ ID NO: 1228865 - RNA, 19 nt, Homo sapiens
  misc_RNA (1)...(19): siRNA sense strand
aagacgaggugugugugaa

SEQ ID NO: 1228866 - RNA, 19 nt, Homo sapiens
  misc_RNA (1)...(19): siRNA sense strand
ggaggccugugagccagau

SEQ ID NO: 1228867 - RNA, 19 nt, Homo sapiens
  misc_RNA (1)...(19): siRNA sense strand
gcagaaggaucaagaaugc

SEQ ID NO: 1228868 - RNA, 19 nt, Homo sapiens
  misc_RNA (1)...(19): siRNA sense strand
augcaagccuggauucuuu

SEQ ID NO: 1228869 - RNA, 19 nt, Homo sapiens
  misc_RNA (1)...(19): siRNA sense strand
gagcuaccguguccaggau

SEQ ID NO: 1228870 - RNA, 19 nt, Homo sapiens
  misc_RNA (1)...(19): siRNA sense strand
ggaggcagaaggaucaaga

SEQ ID NO: 1228871 - RNA, 19 nt, Homo sapiens
  misc_RNA (1)...(19): siRNA sense strand
ccagaaagacgaggugugu

SEQ ID NO: 1228872 - RNA, 19 nt, Homo sapiens
  misc_RNA (1)...(19): siRNA sense strand
gcuaccguguccaggauga

SEQ ID NO: 1228873 - RNA, 19 nt, Homo sapiens
  misc_RNA (1)...(19): siRNA sense strand
ggcagaaggaucaagaaug

SEQ ID NO: 1228874 - RNA, 19 nt, Homo sapiens
  misc_RNA (1)...(19): siRNA sense strand
ugagguuccugccuacugu

SEQ ID NO: 1228875 - RNA, 19 nt, Homo sapiens
  misc_RNA (1)...(19): siRNA sense strand
gaugcaagccuggauucuu

SEQ ID NO: 1228876 - RNA, 19 nt, Homo sapiens
  misc_RNA (1)...(19): siRNA sense strand
agaaagacgaggugugugu

SEQ ID NO: 1228877 - RNA, 19 nt, Homo sapiens
  misc_RNA (1)...(19): siRNA sense strand
gcuggaggcagaaggauca

SEQ ID NO: 1228878 - RNA, 19 nt, Homo sapiens
  misc_RNA (1)...(19): siRNA sense strand
gccgugcucuccagacaca

SEQ ID NO: 1228879 - RNA, 19 nt, Homo sapiens
  misc_RNA (1)...(19): siRNA sense strand
ggacaggccagcgagagau

SEQ ID NO: 1228880 - RNA, 19 nt, Homo sapiens
  misc_RNA (1)...(19): siRNA sense strand
caaagggcagcacgucugu

SEQ ID NO: 1228881 - RNA, 19 nt, Homo sapiens
  misc_RNA (1)...(19): siRNA sense strand
gaggcagaaggaucaagaa

SEQ ID NO: 1228882 - RNA, 19 nt, Homo sapiens
  misc_RNA (1)...(19): siRNA sense strand
aaagacgagguguguguga

SEQ ID NO: 1228883 - RNA, 19 nt, Homo sapiens
  misc_RNA (1)...(19): siRNA sense strand
aagacgaggugugugugaa

SEQ ID NO: 1228884 - RNA, 19 nt, Homo sapiens
  misc_RNA (1)...(19): siRNA sense strand
ggaggccugugagccagau

SEQ ID NO: 1228885 - RNA, 19 nt, Homo sapiens
  misc_RNA (1)...(19): siRNA sense strand
uggagaggcagaugagguu

SEQ ID NO: 1228886 - RNA, 19 nt, Homo sapiens
  misc_RNA (1)...(19): siRNA sense strand
gcagaaggaucaagaaugc

SEQ ID NO: 1228887 - RNA, 19 nt, Homo sapiens
  misc_RNA (1)...(19): siRNA sense strand
augcaagccuggauucuuu

SEQ ID NO: 1228888 - RNA, 19 nt, Homo sapiens
  misc_RNA (1)...(19): siRNA sense strand
ggaggcagaaggaucaaga

SEQ ID NO: 1228889 - RNA, 19 nt, Homo sapiens
  misc_RNA (1)...(19): siRNA sense strand
ccagaaagacgaggugugu

SEQ ID NO: 1228890 - RNA, 19 nt, Homo sapiens
  misc_RNA (1)...(19): siRNA sense strand
ggcagaaggaucaagaaug

SEQ ID NO: 1228891 - RNA, 19 nt, Homo sapiens
  misc_RNA (1)...(19): siRNA sense strand
gaugcaagccuggauucuu

SEQ ID NO: 1228892 - RNA, 19 nt, Homo sapiens
  misc_RNA (1)...(19): siRNA sense strand
agaaagacgaggugugugu

SEQ ID NO: 1228893 - RNA, 19 nt, Homo sapiens
  misc_RNA (1)...(19): siRNA sense strand
gcuggaggcagaaggauca

SEQ ID NO: 1228894 - RNA, 19 nt, Homo sapiens
  misc_RNA (1)...(19): siRNA sense strand
gccgugcucuccagacaca

SEQ ID NO: 1228895 - RNA, 19 nt, Homo sapiens
  misc_RNA (1)...(19): siRNA sense strand
caaagggcagcacgucugu

SEQ ID NO: 1228896 - RNA, 19 nt, Homo sapiens
  misc_RNA (1)...(19): siRNA sense strand
gaggcagaaggaucaagaa

SEQ ID NO: 1228897 - RNA, 19 nt, Homo sapiens
  misc_RNA (1)...(19): siRNA sense strand
aaagacgagguguguguga

SEQ ID NO: 1228898 - RNA, 19 nt, Homo sapiens
  misc_RNA (1)...(19): siRNA sense strand
aagacgaggugugugugaa

SEQ ID NO: 1228899 - RNA, 19 nt, Homo sapiens
  misc_RNA (1)...(19): siRNA sense strand
ggaggccugugagccagau

SEQ ID NO: 1228900 - RNA, 19 nt, Homo sapiens
  misc_RNA (1)...(19): siRNA sense strand
gaagcaggcugaagaggaa

SEQ ID NO: 1228901 - RNA, 19 nt, Homo sapiens
  misc_RNA (1)...(19): siRNA sense strand
gcagaaggaucaagaaugc

SEQ ID NO: 1228902 - RNA, 19 nt, Homo sapiens
  misc_RNA (1)...(19): siRNA sense strand
ggaggaaccugaguaugag

SEQ ID NO: 1228903 - RNA, 19 nt, Homo sapiens
  misc_RNA (1)...(19): siRNA sense strand
augcaagccuggauucuuu

SEQ ID NO: 1228904 - RNA, 19 nt, Homo sapiens
  misc_RNA (1)...(19): siRNA sense strand
gaaccugaguaugagaaug

SEQ ID NO: 1228905 - RNA, 19 nt, Homo sapiens
  misc_RNA (1)...(19): siRNA sense strand
gagcuaccguguccaggau

SEQ ID NO: 1228906 - RNA, 19 nt, Homo sapiens
  misc_RNA (1)...(19): siRNA sense strand
ggaggcagaaggaucaaga

SEQ ID NO: 1228907 - RNA, 19 nt, Homo sapiens
  misc_RNA (1)...(19): siRNA sense strand
aggaggaaccugaguauga

SEQ ID NO: 1228908 - RNA, 19 nt, Homo sapiens
  misc_RNA (1)...(19): siRNA sense strand
ccagaaagacgaggugugu

SEQ ID NO: 1228909 - RNA, 19 nt, Homo sapiens
  misc_RNA (1)...(19): siRNA sense strand
gcuaccguguccaggauga

SEQ ID NO: 1228910 - RNA, 19 nt, Homo sapiens
  misc_RNA (1)...(19): siRNA sense strand
uuugguagcuuccagaaag

SEQ ID NO: 1228911 - RNA, 19 nt, Homo sapiens
  misc_RNA (1)...(19): siRNA sense strand
ggcagaaggaucaagaaug

SEQ ID NO: 1228912 - RNA, 19 nt, Homo sapiens
  misc_RNA (1)...(19): siRNA sense strand
ugagguuccugccuacugu

SEQ ID NO: 1228913 - RNA, 19 nt, Homo sapiens
  misc_RNA (1)...(19): siRNA sense strand
gaugcaagccuggauucuu

SEQ ID NO: 1228914 - RNA, 19 nt, Homo sapiens
  misc_RNA (1)...(19): siRNA sense strand
agaaagacgaggugugugu

SEQ ID NO: 1228915 - RNA, 19 nt, Homo sapiens
  misc_RNA (1)...(19): siRNA sense strand
gcuggaggcagaaggauca

SEQ ID NO: 1228916 - RNA, 19 nt, Homo sapiens
  misc_RNA (1)...(19): siRNA sense strand
gccgugcucuccagacaca

SEQ ID NO: 1228917 - RNA, 19 nt, Homo sapiens
  misc_RNA (1)...(19): siRNA sense strand
gcacguggaagccauugag

SEQ ID NO: 1228918 - RNA, 19 nt, Homo sapiens
  misc_RNA (1)...(19): siRNA sense strand
ggacaggccagcgagagau

SEQ ID NO: 1228919 - RNA, 19 nt, Homo sapiens
  misc_RNA (1)...(19): siRNA sense strand
caaagggcagcacgucugu

SEQ ID NO: 1228920 - RNA, 19 nt, Homo sapiens
  misc_RNA (1)...(19): siRNA sense strand
gcucugucuuccgccauuu

SEQ ID NO: 1228921 - RNA, 19 nt, Homo sapiens
  misc_RNA (1)...(19): siRNA sense strand
ccacagagucgccgaagcu

SEQ ID NO: 1228922 - RNA, 19 nt, Homo sapiens
  misc_RNA (1)...(19): siRNA sense strand
caaguuugcaccacagagu

SEQ ID NO: 1228923 - RNA, 19 nt, Homo sapiens
  misc_RNA (1)...(19): siRNA sense strand
cccagaagcaggcugaaga

SEQ ID NO: 1228924 - RNA, 19 nt, Homo sapiens
  misc_RNA (1)...(19): siRNA sense strand
gagaauguuguacccaucu

SEQ ID NO: 1228925 - RNA, 19 nt, Homo sapiens
  misc_RNA (1)...(19): siRNA sense strand
gaggcagaaggaucaagaa

SEQ ID NO: 1228926 - RNA, 19 nt, Homo sapiens
  misc_RNA (1)...(19): siRNA sense strand
ugaccacgaucuacaugcu

SEQ ID NO: 1228927 - RNA, 19 nt, Homo sapiens
  misc_RNA (1)...(19): siRNA sense strand
aagacgaggugugugugaa

SEQ ID NO: 1228928 - RNA, 19 nt, Homo sapiens
  misc_RNA (1)...(19): siRNA sense strand
aaagacgagguguguguga

SEQ ID NO: 1228929 - RNA, 19 nt, Homo sapiens
  misc_RNA (1)...(19): siRNA sense strand
ggaggccugugagccagau

SEQ ID NO: 1228930 - RNA, 19 nt, Homo sapiens
  misc_RNA (1)...(19): siRNA sense strand
ugaguaugagaauguugua

SEQ ID NO: 1228931 - RNA, 19 nt, Homo sapiens
  misc_RNA (1)...(19): siRNA sense strand
ggaaccugaguaugagaau

SEQ ID NO: 1228932 - RNA, 19 nt, Homo sapiens
  misc_RNA (1)...(19): siRNA sense strand
uggagaggcagaugagguu

SEQ ID NO: 1228933 - RNA, 19 nt, Homo sapiens
  misc_RNA (1)...(19): siRNA sense strand
gaagcaggcugaagaggaa

SEQ ID NO: 1228934 - RNA, 19 nt, Homo sapiens
  misc_RNA (1)...(19): siRNA sense strand
gcagaaggaucaagaaugc

SEQ ID NO: 1228935 - RNA, 19 nt, Homo sapiens
  misc_RNA (1)...(19): siRNA sense strand
ggaggaaccugaguaugag

SEQ ID NO: 1228936 - RNA, 19 nt, Homo sapiens
  misc_RNA (1)...(19): siRNA sense strand
augcaagccuggauucuuu

SEQ ID NO: 1228937 - RNA, 19 nt, Homo sapiens
  misc_RNA (1)...(19): siRNA sense strand
gaaccugaguaugagaaug

SEQ ID NO: 1228938 - RNA, 19 nt, Homo sapiens
  misc_RNA (1)...(19): siRNA sense strand
gagcuaccguguccaggau

SEQ ID NO: 1228939 - RNA, 19 nt, Homo sapiens
  misc_RNA (1)...(19): siRNA sense strand
ggaggcagaaggaucaaga

SEQ ID NO: 1228940 - RNA, 19 nt, Homo sapiens
  misc_RNA (1)...(19): siRNA sense strand
aggaggaaccugaguauga

SEQ ID NO: 1228941 - RNA, 19 nt, Homo sapiens
  misc_RNA (1)...(19): siRNA sense strand
ccagaaagacgaggugugu

SEQ ID NO: 1228942 - RNA, 19 nt, Homo sapiens
  misc_RNA (1)...(19): siRNA sense strand
gcuaccguguccaggauga

SEQ ID NO: 1228943 - RNA, 19 nt, Homo sapiens
  misc_RNA (1)...(19): siRNA sense strand
uuugguagcuuccagaaag

SEQ ID NO: 1228944 - RNA, 19 nt, Homo sapiens
  misc_RNA (1)...(19): siRNA sense strand
ggcagaaggaucaagaaug

SEQ ID NO: 1228945 - RNA, 19 nt, Homo sapiens
  misc_RNA (1)...(19): siRNA sense strand
ugagguuccugccuacugu

SEQ ID NO: 1228946 - RNA, 19 nt, Homo sapiens
  misc_RNA (1)...(19): siRNA sense strand
gaugcaagccuggauucuu

SEQ ID NO: 1228947 - RNA, 19 nt, Homo sapiens
  misc_RNA (1)...(19): siRNA sense strand
agaaagacgaggugugugu

SEQ ID NO: 1228948 - RNA, 19 nt, Homo sapiens
  misc_RNA (1)...(19): siRNA sense strand
gcuggaggcagaaggauca

SEQ ID NO: 1228949 - RNA, 19 nt, Homo sapiens
  misc_RNA (1)...(19): siRNA sense strand
gccgugcucuccagacaca

SEQ ID NO: 1228950 - RNA, 19 nt, Homo sapiens
  misc_RNA (1)...(19): siRNA sense strand
gcacguggaagccauugag

SEQ ID NO: 1228951 - RNA, 19 nt, Homo sapiens
  misc_RNA (1)...(19): siRNA sense strand
ggacaggccagcgagagau

SEQ ID NO: 1228952 - RNA, 19 nt, Homo sapiens
  misc_RNA (1)...(19): siRNA sense strand
caaagggcagcacgucugu

SEQ ID NO: 1228953 - RNA, 19 nt, Homo sapiens
  misc_RNA (1)...(19): siRNA sense strand
gcucugucuuccgccauuu

SEQ ID NO: 1228954 - RNA, 19 nt, Homo sapiens
  misc_RNA (1)...(19): siRNA sense strand
ccacagagucgccgaagcu

SEQ ID NO: 1228955 - RNA, 19 nt, Homo sapiens
  misc_RNA (1)...(19): siRNA sense strand
caaguuugcaccacagagu

SEQ ID NO: 1228956 - RNA, 19 nt, Homo sapiens
  misc_RNA (1)...(19): siRNA sense strand
cccagaagcaggcugaaga

SEQ ID NO: 1228957 - RNA, 19 nt, Homo sapiens
  misc_RNA (1)...(19): siRNA sense strand
gagaauguuguacccaucu

SEQ ID NO: 1228958 - RNA, 19 nt, Homo sapiens
  misc_RNA (1)...(19): siRNA sense strand
gaggcagaaggaucaagaa

SEQ ID NO: 1228959 - RNA, 19 nt, Homo sapiens
  misc_RNA (1)...(19): siRNA sense strand
ugaccacgaucuacaugcu

SEQ ID NO: 1228960 - RNA, 19 nt, Homo sapiens
  misc_RNA (1)...(19): siRNA sense strand
aagacgaggugugugugaa

SEQ ID NO: 1228961 - RNA, 19 nt, Homo sapiens
  misc_RNA (1)...(19): siRNA sense strand
aaagacgagguguguguga

SEQ ID NO: 1228962 - RNA, 19 nt, Homo sapiens
  misc_RNA (1)...(19): siRNA sense strand
ggaggccugugagccagau

SEQ ID NO: 1228963 - RNA, 19 nt, Homo sapiens
  misc_RNA (1)...(19): siRNA sense strand
ugaguaugagaauguugua

SEQ ID NO: 1228964 - RNA, 19 nt, Homo sapiens
  misc_RNA (1)...(19): siRNA sense strand
ggaaccugaguaugagaau

SEQ ID NO: 1228965 - RNA, 19 nt, Homo sapiens
  misc_RNA (1)...(19): siRNA sense strand
uggagaggcagaugagguu

SEQ ID NO: 1228966 - RNA, 19 nt, Homo sapiens
  misc_RNA (1)...(19): siRNA sense strand
gcagaaggaucaagaaugc

SEQ ID NO: 1228967 - RNA, 19 nt, Homo sapiens
  misc_RNA (1)...(19): siRNA sense strand
augcaagccuggauucuuu

SEQ ID NO: 1228968 - RNA, 19 nt, Homo sapiens
  misc_RNA (1)...(19): siRNA sense strand
ggaggcagaaggaucaaga

SEQ ID NO: 1228969 - RNA, 19 nt, Homo sapiens
  misc_RNA (1)...(19): siRNA sense strand
ccagaaagacgaggugugu

SEQ ID NO: 1228970 - RNA, 19 nt, Homo sapiens
  misc_RNA (1)...(19): siRNA sense strand
ggcagaaggaucaagaaug

SEQ ID NO: 1228971 - RNA, 19 nt, Homo sapiens
  misc_RNA (1)...(19): siRNA sense strand
gaugcaagccuggauucuu

SEQ ID NO: 1228972 - RNA, 19 nt, Homo sapiens
  misc_RNA (1)...(19): siRNA sense strand
agaaagacgaggugugugu

SEQ ID NO: 1228973 - RNA, 19 nt, Homo sapiens
  misc_RNA (1)...(19): siRNA sense strand
gcuggaggcagaaggauca

SEQ ID NO: 1228974 - RNA, 19 nt, Homo sapiens
  misc_RNA (1)...(19): siRNA sense strand
gccgugcucuccagacaca

SEQ ID NO: 1228975 - RNA, 19 nt, Homo sapiens
  misc_RNA (1)...(19): siRNA sense strand
caaagggcagcacgucugu

SEQ ID NO: 1228976 - RNA, 19 nt, Homo sapiens
  misc_RNA (1)...(19): siRNA sense strand
gaggcagaaggaucaagaa

SEQ ID NO: 1228977 - RNA, 19 nt, Homo sapiens
  misc_RNA (1)...(19): siRNA sense strand
aaagacgagguguguguga

SEQ ID NO: 1228978 - RNA, 19 nt, Homo sapiens
  misc_RNA (1)...(19): siRNA sense strand
aagacgaggugugugugaa

SEQ ID NO: 1228979 - RNA, 19 nt, Homo sapiens
  misc_RNA (1)...(19): siRNA sense strand
ggaggccugugagccagau

SEQ ID NO: 1228980 - RNA, 19 nt, Homo sapiens
  misc_RNA (1)...(19): siRNA sense strand
gcagaaggaucaagaaugc

SEQ ID NO: 1228981 - RNA, 19 nt, Homo sapiens
  misc_RNA (1)...(19): siRNA sense strand
augcaagccuggauucuuu

SEQ ID NO: 1228982 - RNA, 19 nt, Homo sapiens
  misc_RNA (1)...(19): siRNA sense strand
gagcuaccguguccaggau

SEQ ID NO: 1228983 - RNA, 19 nt, Homo sapiens
  misc_RNA (1)...(19): siRNA sense strand
ggaggcagaaggaucaaga

SEQ ID NO: 1228984 - RNA, 19 nt, Homo sapiens
  misc_RNA (1)...(19): siRNA sense strand
ccagaaagacgaggugugu

SEQ ID NO: 1228985 - RNA, 19 nt, Homo sapiens
  misc_RNA (1)...(19): siRNA sense strand
gcuaccguguccaggauga

SEQ ID NO: 1228986 - RNA, 19 nt, Homo sapiens
  misc_RNA (1)...(19): siRNA sense strand
ggcagaaggaucaagaaug

SEQ ID NO: 1228987 - RNA, 19 nt, Homo sapiens
  misc_RNA (1)...(19): siRNA sense strand
ugagguuccugccuacugu

SEQ ID NO: 1228988 - RNA, 19 nt, Homo sapiens
  misc_RNA (1)...(19): siRNA sense strand
gaugcaagccuggauucuu

SEQ ID NO: 1228989 - RNA, 19 nt, Homo sapiens
  misc_RNA (1)...(19): siRNA sense strand
agaaagacgaggugugugu

SEQ ID NO: 1228990 - RNA, 19 nt, Homo sapiens
  misc_RNA (1)...(19): siRNA sense strand
gcuggaggcagaaggauca

SEQ ID NO: 1228991 - RNA, 19 nt, Homo sapiens
  misc_RNA (1)...(19): siRNA sense strand
gccgugcucuccagacaca

SEQ ID NO: 1228992 - RNA, 19 nt, Homo sapiens
  misc_RNA (1)...(19): siRNA sense strand
ggacaggccagcgagagau

SEQ ID NO: 1228993 - RNA, 19 nt, Homo sapiens
  misc_RNA (1)...(19): siRNA sense strand
caaagggcagcacgucugu

SEQ ID NO: 1228994 - RNA, 19 nt, Homo sapiens
  misc_RNA (1)...(19): siRNA sense strand
gaggcagaaggaucaagaa

SEQ ID NO: 1228995 - RNA, 19 nt, Homo sapiens
  misc_RNA (1)...(19): siRNA sense strand
aaagacgagguguguguga

SEQ ID NO: 1228996 - RNA, 19 nt, Homo sapiens
  misc_RNA (1)...(19): siRNA sense strand
aagacgaggugugugugaa

SEQ ID NO: 1228997 - RNA, 19 nt, Homo sapiens
  misc_RNA (1)...(19): siRNA sense strand
ggaggccugugagccagau

SEQ ID NO: 1228998 - RNA, 19 nt, Homo sapiens
  misc_RNA (1)...(19): siRNA sense strand
uggagaggcagaugagguu

SEQ ID NO: 1228999 - RNA, 19 nt, Homo sapiens
  misc_RNA (1)...(19): siRNA sense strand
gcagaaggaucaagaaugc

SEQ ID NO: 1229000 - RNA, 19 nt, Homo sapiens
  misc_RNA (1)...(19): siRNA sense strand
augcaagccuggauucuuu

SEQ ID NO: 1229001 - RNA, 19 nt, Homo sapiens
  misc_RNA (1)...(19): siRNA sense strand
ggaggcagaaggaucaaga

SEQ ID NO: 1229002 - RNA, 19 nt, Homo sapiens
  misc_RNA (1)...(19): siRNA sense strand
ccagaaagacgaggugugu

SEQ ID NO: 1229003 - RNA, 19 nt, Homo sapiens
  misc_RNA (1)...(19): siRNA sense strand
ggcagaaggaucaagaaug

SEQ ID NO: 1229004 - RNA, 19 nt, Homo sapiens
  misc_RNA (1)...(19): siRNA sense strand
gaugcaagccuggauucuu

SEQ ID NO: 1229005 - RNA, 19 nt, Homo sapiens
  misc_RNA (1)...(19): siRNA sense strand
agaaagacgaggugugugu

SEQ ID NO: 1229006 - RNA, 19 nt, Homo sapiens
  misc_RNA (1)...(19): siRNA sense strand
gcuggaggcagaaggauca

SEQ ID NO: 1229007 - RNA, 19 nt, Homo sapiens
  misc_RNA (1)...(19): siRNA sense strand
gccgugcucuccagacaca

SEQ ID NO: 1229008 - RNA, 19 nt, Homo sapiens
  misc_RNA (1)...(19): siRNA sense strand
caaagggcagcacgucugu

SEQ ID NO: 1229009 - RNA, 19 nt, Homo sapiens
  misc_RNA (1)...(19): siRNA sense strand
gaggcagaaggaucaagaa

SEQ ID NO: 1229010 - RNA, 19 nt, Homo sapiens
  misc_RNA (1)...(19): siRNA sense strand
aaagacgagguguguguga

SEQ ID NO: 1229011 - RNA, 19 nt, Homo sapiens
  misc_RNA (1)...(19): siRNA sense strand
aagacgaggugugugugaa

SEQ ID NO: 1229012 - RNA, 19 nt, Homo sapiens
  misc_RNA (1)...(19): siRNA sense strand
ggaggccugugagccagau

SEQ ID NO: 1229013 - RNA, 19 nt, Homo sapiens
  misc_RNA (1)...(19): siRNA sense strand
gaagcaggcugaagaggaa

SEQ ID NO: 1229014 - RNA, 19 nt, Homo sapiens
  misc_RNA (1)...(19): siRNA sense strand
gcagaaggaucaagaaugc

SEQ ID NO: 1229015 - RNA, 19 nt, Homo sapiens
  misc_RNA (1)...(19): siRNA sense strand
ggaggaaccugaguaugag

SEQ ID NO: 1229016 - RNA, 19 nt, Homo sapiens
  misc_RNA (1)...(19): siRNA sense strand
augcaagccuggauucuuu

SEQ ID NO: 1229017 - RNA, 19 nt, Homo sapiens
  misc_RNA (1)...(19): siRNA sense strand
gaaccugaguaugagaaug

SEQ ID NO: 1229018 - RNA, 19 nt, Homo sapiens
  misc_RNA (1)...(19): siRNA sense strand
gagcuaccguguccaggau

SEQ ID NO: 1229019 - RNA, 19 nt, Homo sapiens
  misc_RNA (1)...(19): siRNA sense strand
ggaggcagaaggaucaaga

SEQ ID NO: 1229020 - RNA, 19 nt, Homo sapiens
  misc_RNA (1)...(19): siRNA sense strand
aggaggaaccugaguauga

SEQ ID NO: 1229021 - RNA, 19 nt, Homo sapiens
  misc_RNA (1)...(19): siRNA sense strand
ccagaaagacgaggugugu

SEQ ID NO: 1229022 - RNA, 19 nt, Homo sapiens
  misc_RNA (1)...(19): siRNA sense strand
gcuaccguguccaggauga

SEQ ID NO: 1229023 - RNA, 19 nt, Homo sapiens
  misc_RNA (1)...(19): siRNA sense strand
uuugguagcuuccagaaag

SEQ ID NO: 1229024 - RNA, 19 nt, Homo sapiens
  misc_RNA (1)...(19): siRNA sense strand
ggcagaaggaucaagaaug

SEQ ID NO: 1229025 - RNA, 19 nt, Homo sapiens
  misc_RNA (1)...(19): siRNA sense strand
ugagguuccugccuacugu

SEQ ID NO: 1229026 - RNA, 19 nt, Homo sapiens
  misc_RNA (1)...(19): siRNA sense strand
gaugcaagccuggauucuu

SEQ ID NO: 1229027 - RNA, 19 nt, Homo sapiens
  misc_RNA (1)...(19): siRNA sense strand
agaaagacgaggugugugu

SEQ ID NO: 1229028 - RNA, 19 nt, Homo sapiens
  misc_RNA (1)...(19): siRNA sense strand
gcuggaggcagaaggauca

SEQ ID NO: 1229029 - RNA, 19 nt, Homo sapiens
  misc_RNA (1)...(19): siRNA sense strand
gccgugcucuccagacaca

SEQ ID NO: 1229030 - RNA, 19 nt, Homo sapiens
  misc_RNA (1)...(19): siRNA sense strand
gcacguggaagccauugag

SEQ ID NO: 1229031 - RNA, 19 nt, Homo sapiens
  misc_RNA (1)...(19): siRNA sense strand
ggacaggccagcgagagau

SEQ ID NO: 1229032 - RNA, 19 nt, Homo sapiens
  misc_RNA (1)...(19): siRNA sense strand
caaagggcagcacgucugu

SEQ ID NO: 1229033 - RNA, 19 nt, Homo sapiens
  misc_RNA (1)...(19): siRNA sense strand
gcucugucuuccgccauuu

SEQ ID NO: 1229034 - RNA, 19 nt, Homo sapiens
  misc_RNA (1)...(19): siRNA sense strand
ccacagagucgccgaagcu

SEQ ID NO: 1229035 - RNA, 19 nt, Homo sapiens
  misc_RNA (1)...(19): siRNA sense strand
caaguuugcaccacagagu

SEQ ID NO: 1229036 - RNA, 19 nt, Homo sapiens
  misc_RNA (1)...(19): siRNA sense strand
cccagaagcaggcugaaga

SEQ ID NO: 1229037 - RNA, 19 nt, Homo sapiens
  misc_RNA (1)...(19): siRNA sense strand
gagaauguuguacccaucu

SEQ ID NO: 1229038 - RNA, 19 nt, Homo sapiens
  misc_RNA (1)...(19): siRNA sense strand
gaggcagaaggaucaagaa

SEQ ID NO: 1229039 - RNA, 19 nt, Homo sapiens
  misc_RNA (1)...(19): siRNA sense strand
ugaccacgaucuacaugcu

SEQ ID NO: 1229040 - RNA, 19 nt, Homo sapiens
  misc_RNA (1)...(19): siRNA sense strand
aagacgaggugugugugaa

SEQ ID NO: 1229041 - RNA, 19 nt, Homo sapiens
  misc_RNA (1)...(19): siRNA sense strand
aaagacgagguguguguga

SEQ ID NO: 1229042 - RNA, 19 nt, Homo sapiens
  misc_RNA (1)...(19): siRNA sense strand
ggaggccugugagccagau

SEQ ID NO: 1229043 - RNA, 19 nt, Homo sapiens
  misc_RNA (1)...(19): siRNA sense strand
ugaguaugagaauguugua

SEQ ID NO: 1229044 - RNA, 19 nt, Homo sapiens
  misc_RNA (1)...(19): siRNA sense strand
ggaaccugaguaugagaau

SEQ ID NO: 1229045 - RNA, 19 nt, Homo sapiens
  misc_RNA (1)...(19): siRNA sense strand
uggagaggcagaugagguu

SEQ ID NO: 1229046 - RNA, 19 nt, Homo sapiens
  misc_RNA (1)...(19): siRNA sense strand
gaacauccgugccaucaga

SEQ ID NO: 1229047 - RNA, 19 nt, Homo sapiens
  misc_RNA (1)...(19): siRNA sense strand
ccagagagcaguaucuuua

SEQ ID NO: 1229048 - RNA, 19 nt, Homo sapiens
  misc_RNA (1)...(19): siRNA sense strand
aaagggagcuugaggauca

SEQ ID NO: 1229049 - RNA, 19 nt, Homo sapiens
  misc_RNA (1)...(19): siRNA sense strand
ugaacaagcuugcaaguca

SEQ ID NO: 1229050 - RNA, 19 nt, Homo sapiens
  misc_RNA (1)...(19): siRNA sense strand
uagcaaaggugaugaagga

SEQ ID NO: 1229051 - RNA, 19 nt, Homo sapiens
  misc_RNA (1)...(19): siRNA sense strand
gagagaaucugcuacaacu

SEQ ID NO: 1229052 - RNA, 19 nt, Homo sapiens
  misc_RNA (1)...(19): siRNA sense strand
caaaggugaugaaggaguu

SEQ ID NO: 1229053 - RNA, 19 nt, Homo sapiens
  misc_RNA (1)...(19): siRNA sense strand
gaugaagccuggaauggau

SEQ ID NO: 1229054 - RNA, 19 nt, Homo sapiens
  misc_RNA (1)...(19): siRNA sense strand
gaccaaagcggcaccaaug

SEQ ID NO: 1229055 - RNA, 19 nt, Homo sapiens
  misc_RNA (1)...(19): siRNA sense strand
ugaaggcggugaacagguu

SEQ ID NO: 1229056 - RNA, 19 nt, Homo sapiens
  misc_RNA (1)...(19): siRNA sense strand
gagagcaguaucuuuauug

SEQ ID NO: 1229057 - RNA, 19 nt, Homo sapiens
  misc_RNA (1)...(19): siRNA sense strand
ccaaagcggcaccaaugua

SEQ ID NO: 1229058 - RNA, 19 nt, Homo sapiens
  misc_RNA (1)...(19): siRNA sense strand
ucaccaagauccaugagau

SEQ ID NO: 1229059 - RNA, 19 nt, Homo sapiens
  misc_RNA (1)...(19): siRNA sense strand
gcaccaauguagcaaaggu

SEQ ID NO: 1229060 - RNA, 19 nt, Homo sapiens
  misc_RNA (1)...(19): siRNA sense strand
ccaauguucuuaccuuagu

SEQ ID NO: 1229061 - RNA, 19 nt, Homo sapiens
  misc_RNA (1)...(19): siRNA sense strand
gaggauuaccuuaaguauu

SEQ ID NO: 1229062 - RNA, 19 nt, Homo sapiens
  misc_RNA (1)...(19): siRNA sense strand
ucacagaaggaaucaguuu

SEQ ID NO: 1229063 - RNA, 19 nt, Homo sapiens
  misc_RNA (1)...(19): siRNA sense strand
ccacagaggcaccaccauu

SEQ ID NO: 1229064 - RNA, 19 nt, Homo sapiens
  misc_RNA (1)...(19): siRNA sense strand
agagagcaguaucuuuauu

SEQ ID NO: 1229065 - RNA, 19 nt, Homo sapiens
  misc_RNA (1)...(19): siRNA sense strand
guucuuaccuuaguugaca

SEQ ID NO: 1229066 - RNA, 19 nt, Homo sapiens
  misc_RNA (1)...(19): siRNA sense strand
uacaacugcugacugauga

SEQ ID NO: 1229067 - RNA, 19 nt, Homo sapiens
  misc_RNA (1)...(19): siRNA sense strand
gcagaugagcuccguaaag

SEQ ID NO: 1229068 - RNA, 19 nt, Homo sapiens
  misc_RNA (1)...(19): siRNA sense strand
gggcgaaucucagcugaag

SEQ ID NO: 1229069 - RNA, 19 nt, Homo sapiens
  misc_RNA (1)...(19): siRNA sense strand
cagaugagcuccguaaagc

SEQ ID NO: 1229070 - RNA, 19 nt, Homo sapiens
  misc_RNA (1)...(19): siRNA sense strand
gguagaacuaguaaacaaa

SEQ ID NO: 1229071 - RNA, 19 nt, Homo sapiens
  misc_RNA (1)...(19): siRNA sense strand
gagcuugaggaucacauaa

SEQ ID NO: 1229072 - RNA, 19 nt, Homo sapiens
  misc_RNA (1)...(19): siRNA sense strand
gcaaugagcagaggaacca

SEQ ID NO: 1229073 - RNA, 19 nt, Homo sapiens
  misc_RNA (1)...(19): siRNA sense strand
agagcaguaucuuuauuga

SEQ ID NO: 1229074 - RNA, 19 nt, Homo sapiens
  misc_RNA (1)...(19): siRNA sense strand
ugguagaacuaguaaacaa

SEQ ID NO: 1229075 - RNA, 19 nt, Homo sapiens
  misc_RNA (1)...(19): siRNA sense strand
ggagcuugaggaucacaua

SEQ ID NO: 1229076 - RNA, 19 nt, Homo sapiens
  misc_RNA (1)...(19): siRNA sense strand
ucaacuuucucaccaagau

SEQ ID NO: 1229077 - RNA, 19 nt, Homo sapiens
  misc_RNA (1)...(19): siRNA sense strand
gagcagaggaaccaugauc

SEQ ID NO: 1229078 - RNA, 19 nt, Homo sapiens
  misc_RNA (1)...(19): siRNA sense strand
caaagcggcaccaauguag

SEQ ID NO: 1229079 - RNA, 19 nt, Homo sapiens
  misc_RNA (1)...(19): siRNA sense strand
ccaagucacacaagggauu

SEQ ID NO: 1229080 - RNA, 19 nt, Homo sapiens
  misc_RNA (1)...(19): siRNA sense strand
uuaccuuaguugacaauug

SEQ ID NO: 1229081 - RNA, 19 nt, Homo sapiens
  misc_RNA (1)...(19): siRNA sense strand
cagagccaacccucaguua

SEQ ID NO: 1229082 - RNA, 19 nt, Homo sapiens
  misc_RNA (1)...(19): siRNA sense strand
gaagcuccgugcccuugca

SEQ ID NO: 1229083 - RNA, 19 nt, Homo sapiens
  misc_RNA (1)...(19): siRNA sense strand
caagugagcagagagaauc

SEQ ID NO: 1229084 - RNA, 19 nt, Homo sapiens
  misc_RNA (1)...(19): siRNA sense strand
cacaagggauugggaggaa

SEQ ID NO: 1229085 - RNA, 19 nt, Homo sapiens
  misc_RNA (1)...(19): siRNA sense strand
ccaaugugguguccaacuc

SEQ ID NO: 1229086 - RNA, 19 nt, Homo sapiens
  misc_RNA (1)...(19): siRNA sense strand
ggaccaaagcggcaccaau

SEQ ID NO: 1229087 - RNA, 19 nt, Homo sapiens
  misc_RNA (1)...(19): siRNA sense strand
acccaauguucuuaccuua

SEQ ID NO: 1229088 - RNA, 19 nt, Homo sapiens
  misc_RNA (1)...(19): siRNA sense strand
uaccuuaguugacaauugg

SEQ ID NO: 1229089 - RNA, 19 nt, Homo sapiens
  misc_RNA (1)...(19): siRNA sense strand
gaugaugaagccuggaaug

SEQ ID NO: 1229090 - RNA, 19 nt, Homo sapiens
  misc_RNA (1)...(19): siRNA sense strand
cuacaacugcugacugaug

SEQ ID NO: 1229091 - RNA, 19 nt, Homo sapiens
  misc_RNA (1)...(19): siRNA sense strand
gcuugaggaucacauaagg

SEQ ID NO: 1229092 - RNA, 19 nt, Homo sapiens
  misc_RNA (1)...(19): siRNA sense strand
ccguaaagcucugaacaag

SEQ ID NO: 1229093 - RNA, 19 nt, Homo sapiens
  misc_RNA (1)...(19): siRNA sense strand
gcagugugguagaacuagu

SEQ ID NO: 1229094 - RNA, 19 nt, Homo sapiens
  misc_RNA (1)...(19): siRNA sense strand
gggaagcucaacuuucuca

SEQ ID NO: 1229095 - RNA, 19 nt, Homo sapiens
  misc_RNA (1)...(19): siRNA sense strand
gaacuaguaaacaaauugc

SEQ ID NO: 1229096 - RNA, 19 nt, Homo sapiens
  misc_RNA (1)...(19): siRNA sense strand
ccagggaugaggcagauga

SEQ ID NO: 1229097 - RNA, 19 nt, Homo sapiens
  misc_RNA (1)...(19): siRNA sense strand
ggucagccuugcauaugag

SEQ ID NO: 1229098 - RNA, 19 nt, Homo sapiens
  misc_RNA (1)...(19): siRNA sense strand
cacccaauguucuuaccuu

SEQ ID NO: 1229099 - RNA, 19 nt, Homo sapiens
  misc_RNA (1)...(19): siRNA sense strand
gcauaucauugggcgaauc

SEQ ID NO: 1229100 - RNA, 19 nt, Homo sapiens
  misc_RNA (1)...(19): siRNA sense strand
gcucugaacaagcuugcaa

SEQ ID NO: 1229101 - RNA, 19 nt, Homo sapiens
  misc_RNA (1)...(19): siRNA sense strand
gagccaacccucaguuagg

SEQ ID NO: 1229102 - RNA, 19 nt, Homo sapiens
  misc_RNA (1)...(19): siRNA sense strand
ugcuacaacugcugacuga

SEQ ID NO: 1229103 - RNA, 19 nt, Homo sapiens
  misc_RNA (1)...(19): siRNA sense strand
caauguucuuaccuuaguu

SEQ ID NO: 1229104 - RNA, 19 nt, Homo sapiens
  misc_RNA (1)...(19): siRNA sense strand
gaaaagggagcuugaggau

SEQ ID NO: 1229105 - RNA, 19 nt, Homo sapiens
  misc_RNA (1)...(19): siRNA sense strand
gaccaagugagcagagaga

SEQ ID NO: 1229106 - RNA, 19 nt, Homo sapiens
  misc_RNA (1)...(19): siRNA sense strand
cacagaggcaccaccauug

SEQ ID NO: 1229107 - RNA, 19 nt, Homo sapiens
  misc_RNA (1)...(19): siRNA sense strand
ggauuaccuuaaguauuuc

SEQ ID NO: 1229108 - RNA, 19 nt, Homo sapiens
  misc_RNA (1)...(19): siRNA sense strand
gcagccaggccaagaccaa

SEQ ID NO: 1229109 - RNA, 19 nt, Homo sapiens
  misc_RNA (1)...(19): siRNA sense strand
uggucagccuugcauauga

SEQ ID NO: 1229110 - RNA, 19 nt, Homo sapiens
  misc_RNA (1)...(19): siRNA sense strand
uauugaggauuaccuuaag

SEQ ID NO: 1229111 - RNA, 19 nt, Homo sapiens
  misc_RNA (1)...(19): siRNA sense strand
gcccagggaugaggcagau

SEQ ID NO: 1229112 - RNA, 19 nt, Homo sapiens
  misc_RNA (1)...(19): siRNA sense strand
caauguagcaaaggugaug

SEQ ID NO: 1229113 - RNA, 19 nt, Homo sapiens
  misc_RNA (1)...(19): siRNA sense strand
cagagagcaguaucuuuau

SEQ ID NO: 1229114 - RNA, 19 nt, Homo sapiens
  misc_RNA (1)...(19): siRNA sense strand
cauaugagucaaagcacuu

SEQ ID NO: 1229115 - RNA, 19 nt, Homo sapiens
  misc_RNA (1)...(19): siRNA sense strand
auucguggcugcugcugaa

SEQ ID NO: 1229116 - RNA, 19 nt, Homo sapiens
  misc_RNA (1)...(19): siRNA sense strand
gcagaggaaccaugaucgu

SEQ ID NO: 1229117 - RNA, 19 nt, Homo sapiens
  misc_RNA (1)...(19): siRNA sense strand
gaacccagagagcaguauc

SEQ ID NO: 1229118 - RNA, 19 nt, Homo sapiens
  misc_RNA (1)...(19): siRNA sense strand
ccaagugagcagagagaau

SEQ ID NO: 1229119 - RNA, 19 nt, Homo sapiens
  misc_RNA (1)...(19): siRNA sense strand
gccaggccaagaccaauga

SEQ ID NO: 1229120 - RNA, 19 nt, Homo sapiens
  misc_RNA (1)...(19): siRNA sense strand
cggcaccaauguagcaaag

SEQ ID NO: 1229121 - RNA, 19 nt, Homo sapiens
  misc_RNA (1)...(19): siRNA sense strand
ugaggauuaccuuaaguau

SEQ ID NO: 1229122 - RNA, 19 nt, Homo sapiens
  misc_RNA (1)...(19): siRNA sense strand
ccagagccaacccucaguu

SEQ ID NO: 1229123 - RNA, 19 nt, Homo sapiens
  misc_RNA (1)...(19): siRNA sense strand
ugaugaagccuggaaugga

SEQ ID NO: 1229124 - RNA, 19 nt, Homo sapiens
  misc_RNA (1)...(19): siRNA sense strand
caacugcugacugaugaug

SEQ ID NO: 1229125 - RNA, 19 nt, Homo sapiens
  misc_RNA (1)...(19): siRNA sense strand
acugcugacugaugaugaa

SEQ ID NO: 1229126 - RNA, 19 nt, Homo sapiens
  misc_RNA (1)...(19): siRNA sense strand
uugaggaucacauaaggaa

SEQ ID NO: 1229127 - RNA, 19 nt, Homo sapiens
  misc_RNA (1)...(19): siRNA sense strand
aggcagaugagcuccguaa

SEQ ID NO: 1229128 - RNA, 19 nt, Homo sapiens
  misc_RNA (1)...(19): siRNA sense strand
caagucacacaagggauug

SEQ ID NO: 1229129 - RNA, 19 nt, Homo sapiens
  misc_RNA (1)...(19): siRNA sense strand
cagugugguagaacuagua

SEQ ID NO: 1229130 - RNA, 19 nt, Homo sapiens
  misc_RNA (1)...(19): siRNA sense strand
gaacauccgugccaucaga

SEQ ID NO: 1229131 - RNA, 19 nt, Homo sapiens
  misc_RNA (1)...(19): siRNA sense strand
ccagagagcaguaucuuua

SEQ ID NO: 1229132 - RNA, 19 nt, Homo sapiens
  misc_RNA (1)...(19): siRNA sense strand
aaagggagcuugaggauca

SEQ ID NO: 1229133 - RNA, 19 nt, Homo sapiens
  misc_RNA (1)...(19): siRNA sense strand
ugaacaagcuugcaaguca

SEQ ID NO: 1229134 - RNA, 19 nt, Homo sapiens
  misc_RNA (1)...(19): siRNA sense strand
uagcaaaggugaugaagga

SEQ ID NO: 1229135 - RNA, 19 nt, Homo sapiens
  misc_RNA (1)...(19): siRNA sense strand
gagagaaucugcuacaacu

SEQ ID NO: 1229136 - RNA, 19 nt, Homo sapiens
  misc_RNA (1)...(19): siRNA sense strand
caaaggugaugaaggaguu

SEQ ID NO: 1229137 - RNA, 19 nt, Homo sapiens
  misc_RNA (1)...(19): siRNA sense strand
gaugaagccuggaauggau

SEQ ID NO: 1229138 - RNA, 19 nt, Homo sapiens
  misc_RNA (1)...(19): siRNA sense strand
gaccaaagcggcaccaaug

SEQ ID NO: 1229139 - RNA, 19 nt, Homo sapiens
  misc_RNA (1)...(19): siRNA sense strand
ugaaggcggugaacagguu

SEQ ID NO: 1229140 - RNA, 19 nt, Homo sapiens
  misc_RNA (1)...(19): siRNA sense strand
gagagcaguaucuuuauug

SEQ ID NO: 1229141 - RNA, 19 nt, Homo sapiens
  misc_RNA (1)...(19): siRNA sense strand
ccaaagcggcaccaaugua

SEQ ID NO: 1229142 - RNA, 19 nt, Homo sapiens
  misc_RNA (1)...(19): siRNA sense strand
ucaccaagauccaugagau

SEQ ID NO: 1229143 - RNA, 19 nt, Homo sapiens
  misc_RNA (1)...(19): siRNA sense strand
gcaccaauguagcaaaggu

SEQ ID NO: 1229144 - RNA, 19 nt, Homo sapiens
  misc_RNA (1)...(19): siRNA sense strand
ccaauguucuuaccuuagu

SEQ ID NO: 1229145 - RNA, 19 nt, Homo sapiens
  misc_RNA (1)...(19): siRNA sense strand
gaggauuaccuuaaguauu

SEQ ID NO: 1229146 - RNA, 19 nt, Homo sapiens
  misc_RNA (1)...(19): siRNA sense strand
ucacagaaggaaucaguuu

SEQ ID NO: 1229147 - RNA, 19 nt, Homo sapiens
  misc_RNA (1)...(19): siRNA sense strand
ccacagaggcaccaccauu

SEQ ID NO: 1229148 - RNA, 19 nt, Homo sapiens
  misc_RNA (1)...(19): siRNA sense strand
agagagcaguaucuuuauu

SEQ ID NO: 1229149 - RNA, 19 nt, Homo sapiens
  misc_RNA (1)...(19): siRNA sense strand
guucuuaccuuaguugaca

SEQ ID NO: 1229150 - RNA, 19 nt, Homo sapiens
  misc_RNA (1)...(19): siRNA sense strand
uacaacugcugacugauga

SEQ ID NO: 1229151 - RNA, 19 nt, Homo sapiens
  misc_RNA (1)...(19): siRNA sense strand
gcagaugagcuccguaaag

SEQ ID NO: 1229152 - RNA, 19 nt, Homo sapiens
  misc_RNA (1)...(19): siRNA sense strand
gggcgaaucucagcugaag

SEQ ID NO: 1229153 - RNA, 19 nt, Homo sapiens
  misc_RNA (1)...(19): siRNA sense strand
cagaugagcuccguaaagc

SEQ ID NO: 1229154 - RNA, 19 nt, Homo sapiens
  misc_RNA (1)...(19): siRNA sense strand
gguagaacuaguaaacaaa

SEQ ID NO: 1229155 - RNA, 19 nt, Homo sapiens
  misc_RNA (1)...(19): siRNA sense strand
gagcuugaggaucacauaa

SEQ ID NO: 1229156 - RNA, 19 nt, Homo sapiens
  misc_RNA (1)...(19): siRNA sense strand
gcaaugagcagaggaacca

SEQ ID NO: 1229157 - RNA, 19 nt, Homo sapiens
  misc_RNA (1)...(19): siRNA sense strand
agagcaguaucuuuauuga

SEQ ID NO: 1229158 - RNA, 19 nt, Homo sapiens
  misc_RNA (1)...(19): siRNA sense strand
ugguagaacuaguaaacaa

SEQ ID NO: 1229159 - RNA, 19 nt, Homo sapiens
  misc_RNA (1)...(19): siRNA sense strand
ggagcuugaggaucacaua

SEQ ID NO: 1229160 - RNA, 19 nt, Homo sapiens
  misc_RNA (1)...(19): siRNA sense strand
ucaacuuucucaccaagau

SEQ ID NO: 1229161 - RNA, 19 nt, Homo sapiens
  misc_RNA (1)...(19): siRNA sense strand
gagcagaggaaccaugauc

SEQ ID NO: 1229162 - RNA, 19 nt, Homo sapiens
  misc_RNA (1)...(19): siRNA sense strand
caaagcggcaccaauguag

SEQ ID NO: 1229163 - RNA, 19 nt, Homo sapiens
  misc_RNA (1)...(19): siRNA sense strand
ccaagucacacaagggauu

SEQ ID NO: 1229164 - RNA, 19 nt, Homo sapiens
  misc_RNA (1)...(19): siRNA sense strand
uuaccuuaguugacaauug

SEQ ID NO: 1229165 - RNA, 19 nt, Homo sapiens
  misc_RNA (1)...(19): siRNA sense strand
cagagccaacccucaguua

SEQ ID NO: 1229166 - RNA, 19 nt, Homo sapiens
  misc_RNA (1)...(19): siRNA sense strand
gaagcuccgugcccuugca

SEQ ID NO: 1229167 - RNA, 19 nt, Homo sapiens
  misc_RNA (1)...(19): siRNA sense strand
caagugagcagagagaauc

SEQ ID NO: 1229168 - RNA, 19 nt, Homo sapiens
  misc_RNA (1)...(19): siRNA sense strand
cacaagggauugggaggaa

SEQ ID NO: 1229169 - RNA, 19 nt, Homo sapiens
  misc_RNA (1)...(19): siRNA sense strand
ccaaugugguguccaacuc

SEQ ID NO: 1229170 - RNA, 19 nt, Homo sapiens
  misc_RNA (1)...(19): siRNA sense strand
ggaccaaagcggcaccaau

SEQ ID NO: 1229171 - RNA, 19 nt, Homo sapiens
  misc_RNA (1)...(19): siRNA sense strand
acccaauguucuuaccuua

SEQ ID NO: 1229172 - RNA, 19 nt, Homo sapiens
  misc_RNA (1)...(19): siRNA sense strand
uaccuuaguugacaauugg

SEQ ID NO: 1229173 - RNA, 19 nt, Homo sapiens
  misc_RNA (1)...(19): siRNA sense strand
gaugaugaagccuggaaug

SEQ ID NO: 1229174 - RNA, 19 nt, Homo sapiens
  misc_RNA (1)...(19): siRNA sense strand
cuacaacugcugacugaug

SEQ ID NO: 1229175 - RNA, 19 nt, Homo sapiens
  misc_RNA (1)...(19): siRNA sense strand
gcuugaggaucacauaagg

SEQ ID NO: 1229176 - RNA, 19 nt, Homo sapiens
  misc_RNA (1)...(19): siRNA sense strand
ccguaaagcucugaacaag

SEQ ID NO: 1229177 - RNA, 19 nt, Homo sapiens
  misc_RNA (1)...(19): siRNA sense strand
gcagugugguagaacuagu

SEQ ID NO: 1229178 - RNA, 19 nt, Homo sapiens
  misc_RNA (1)...(19): siRNA sense strand
gggaagcucaacuuucuca

SEQ ID NO: 1229179 - RNA, 19 nt, Homo sapiens
  misc_RNA (1)...(19): siRNA sense strand
gaacuaguaaacaaauugc

SEQ ID NO: 1229180 - RNA, 19 nt, Homo sapiens
  misc_RNA (1)...(19): siRNA sense strand
ccagggaugaggcagauga

SEQ ID NO: 1229181 - RNA, 19 nt, Homo sapiens
  misc_RNA (1)...(19): siRNA sense strand
ggucagccuugcauaugag

SEQ ID NO: 1229182 - RNA, 19 nt, Homo sapiens
  misc_RNA (1)...(19): siRNA sense strand
cacccaauguucuuaccuu

SEQ ID NO: 1229183 - RNA, 19 nt, Homo sapiens
  misc_RNA (1)...(19): siRNA sense strand
gcauaucauugggcgaauc

SEQ ID NO: 1229184 - RNA, 19 nt, Homo sapiens
  misc_RNA (1)...(19): siRNA sense strand
gcucugaacaagcuugcaa

SEQ ID NO: 1229185 - RNA, 19 nt, Homo sapiens
  misc_RNA (1)...(19): siRNA sense strand
gagccaacccucaguuagg

SEQ ID NO: 1229186 - RNA, 19 nt, Homo sapiens
  misc_RNA (1)...(19): siRNA sense strand
ugcuacaacugcugacuga

SEQ ID NO: 1229187 - RNA, 19 nt, Homo sapiens
  misc_RNA (1)...(19): siRNA sense strand
caauguucuuaccuuaguu

SEQ ID NO: 1229188 - RNA, 19 nt, Homo sapiens
  misc_RNA (1)...(19): siRNA sense strand
gaaaagggagcuugaggau

SEQ ID NO: 1229189 - RNA, 19 nt, Homo sapiens
  misc_RNA (1)...(19): siRNA sense strand
gaccaagugagcagagaga

SEQ ID NO: 1229190 - RNA, 19 nt, Homo sapiens
  misc_RNA (1)...(19): siRNA sense strand
cacagaggcaccaccauug

SEQ ID NO: 1229191 - RNA, 19 nt, Homo sapiens
  misc_RNA (1)...(19): siRNA sense strand
ggauuaccuuaaguauuuc

SEQ ID NO: 1229192 - RNA, 19 nt, Homo sapiens
  misc_RNA (1)...(19): siRNA sense strand
gcagccaggccaagaccaa

SEQ ID NO: 1229193 - RNA, 19 nt, Homo sapiens
  misc_RNA (1)...(19): siRNA sense strand
uggucagccuugcauauga

SEQ ID NO: 1229194 - RNA, 19 nt, Homo sapiens
  misc_RNA (1)...(19): siRNA sense strand
uauugaggauuaccuuaag

SEQ ID NO: 1229195 - RNA, 19 nt, Homo sapiens
  misc_RNA (1)...(19): siRNA sense strand
gcccagggaugaggcagau

SEQ ID NO: 1229196 - RNA, 19 nt, Homo sapiens
  misc_RNA (1)...(19): siRNA sense strand
caauguagcaaaggugaug

SEQ ID NO: 1229197 - RNA, 19 nt, Homo sapiens
  misc_RNA (1)...(19): siRNA sense strand
cagagagcaguaucuuuau

SEQ ID NO: 1229198 - RNA, 19 nt, Homo sapiens
  misc_RNA (1)...(19): siRNA sense strand
cauaugagucaaagcacuu

SEQ ID NO: 1229199 - RNA, 19 nt, Homo sapiens
  misc_RNA (1)...(19): siRNA sense strand
auucguggcugcugcugaa

SEQ ID NO: 1229200 - RNA, 19 nt, Homo sapiens
  misc_RNA (1)...(19): siRNA sense strand
gcagaggaaccaugaucgu

SEQ ID NO: 1229201 - RNA, 19 nt, Homo sapiens
  misc_RNA (1)...(19): siRNA sense strand
gaacccagagagcaguauc

SEQ ID NO: 1229202 - RNA, 19 nt, Homo sapiens
  misc_RNA (1)...(19): siRNA sense strand
ccaagugagcagagagaau

SEQ ID NO: 1229203 - RNA, 19 nt, Homo sapiens
  misc_RNA (1)...(19): siRNA sense strand
gccaggccaagaccaauga

SEQ ID NO: 1229204 - RNA, 19 nt, Homo sapiens
  misc_RNA (1)...(19): siRNA sense strand
cggcaccaauguagcaaag

SEQ ID NO: 1229205 - RNA, 19 nt, Homo sapiens
  misc_RNA (1)...(19): siRNA sense strand
ugaggauuaccuuaaguau

SEQ ID NO: 1229206 - RNA, 19 nt, Homo sapiens
  misc_RNA (1)...(19): siRNA sense strand
ccagagccaacccucaguu

SEQ ID NO: 1229207 - RNA, 19 nt, Homo sapiens
  misc_RNA (1)...(19): siRNA sense strand
ugaugaagccuggaaugga

SEQ ID NO: 1229208 - RNA, 19 nt, Homo sapiens
  misc_RNA (1)...(19): siRNA sense strand
caacugcugacugaugaug

SEQ ID NO: 1229209 - RNA, 19 nt, Homo sapiens
  misc_RNA (1)...(19): siRNA sense strand
acugcugacugaugaugaa

SEQ ID NO: 1229210 - RNA, 19 nt, Homo sapiens
  misc_RNA (1)...(19): siRNA sense strand
uugaggaucacauaaggaa

SEQ ID NO: 1229211 - RNA, 19 nt, Homo sapiens
  misc_RNA (1)...(19): siRNA sense strand
aggcagaugagcuccguaa

SEQ ID NO: 1229212 - RNA, 19 nt, Homo sapiens
  misc_RNA (1)...(19): siRNA sense strand
caagucacacaagggauug

SEQ ID NO: 1229213 - RNA, 19 nt, Homo sapiens
  misc_RNA (1)...(19): siRNA sense strand
cagugugguagaacuagua

SEQ ID NO: 1229214 - RNA, 19 nt, Homo sapiens
  misc_RNA (1)...(19): siRNA sense strand
gaacauccgugccaucaga

SEQ ID NO: 1229215 - RNA, 19 nt, Homo sapiens
  misc_RNA (1)...(19): siRNA sense strand
ccagagagcaguaucuuua

SEQ ID NO: 1229216 - RNA, 19 nt, Homo sapiens
  misc_RNA (1)...(19): siRNA sense strand
aaagggagcuugaggauca

SEQ ID NO: 1229217 - RNA, 19 nt, Homo sapiens
  misc_RNA (1)...(19): siRNA sense strand
ugaacaagcuugcaaguca

SEQ ID NO: 1229218 - RNA, 19 nt, Homo sapiens
  misc_RNA (1)...(19): siRNA sense strand
uagcaaaggugaugaagga

SEQ ID NO: 1229219 - RNA, 19 nt, Homo sapiens
  misc_RNA (1)...(19): siRNA sense strand
gagagaaucugcuacaacu

SEQ ID NO: 1229220 - RNA, 19 nt, Homo sapiens
  misc_RNA (1)...(19): siRNA sense strand
caaaggugaugaaggaguu

SEQ ID NO: 1229221 - RNA, 19 nt, Homo sapiens
  misc_RNA (1)...(19): siRNA sense strand
gaugaagccuggaauggau

SEQ ID NO: 1229222 - RNA, 19 nt, Homo sapiens
  misc_RNA (1)...(19): siRNA sense strand
gaccaaagcggcaccaaug

SEQ ID NO: 1229223 - RNA, 19 nt, Homo sapiens
  misc_RNA (1)...(19): siRNA sense strand
ugaaggcggugaacagguu

SEQ ID NO: 1229224 - RNA, 19 nt, Homo sapiens
  misc_RNA (1)...(19): siRNA sense strand
gagagcaguaucuuuauug

SEQ ID NO: 1229225 - RNA, 19 nt, Homo sapiens
  misc_RNA (1)...(19): siRNA sense strand
ccaaagcggcaccaaugua

SEQ ID NO: 1229226 - RNA, 19 nt, Homo sapiens
  misc_RNA (1)...(19): siRNA sense strand
ucaccaagauccaugagau

SEQ ID NO: 1229227 - RNA, 19 nt, Homo sapiens
  misc_RNA (1)...(19): siRNA sense strand
gcaccaauguagcaaaggu

SEQ ID NO: 1229228 - RNA, 19 nt, Homo sapiens
  misc_RNA (1)...(19): siRNA sense strand
ccaauguucuuaccuuagu

SEQ ID NO: 1229229 - RNA, 19 nt, Homo sapiens
  misc_RNA (1)...(19): siRNA sense strand
gaggauuaccuuaaguauu

SEQ ID NO: 1229230 - RNA, 19 nt, Homo sapiens
  misc_RNA (1)...(19): siRNA sense strand
ucacagaaggaaucaguuu

SEQ ID NO: 1229231 - RNA, 19 nt, Homo sapiens
  misc_RNA (1)...(19): siRNA sense strand
ccacagaggcaccaccauu

SEQ ID NO: 1229232 - RNA, 19 nt, Homo sapiens
  misc_RNA (1)...(19): siRNA sense strand
agagagcaguaucuuuauu

SEQ ID NO: 1229233 - RNA, 19 nt, Homo sapiens
  misc_RNA (1)...(19): siRNA sense strand
guucuuaccuuaguugaca

SEQ ID NO: 1229234 - RNA, 19 nt, Homo sapiens
  misc_RNA (1)...(19): siRNA sense strand
uacaacugcugacugauga

SEQ ID NO: 1229235 - RNA, 19 nt, Homo sapiens
  misc_RNA (1)...(19): siRNA sense strand
gcagaugagcuccguaaag

SEQ ID NO: 1229236 - RNA, 19 nt, Homo sapiens
  misc_RNA (1)...(19): siRNA sense strand
gggcgaaucucagcugaag

SEQ ID NO: 1229237 - RNA, 19 nt, Homo sapiens
  misc_RNA (1)...(19): siRNA sense strand
cagaugagcuccguaaagc

SEQ ID NO: 1229238 - RNA, 19 nt, Homo sapiens
  misc_RNA (1)...(19): siRNA sense strand
gguagaacuaguaaacaaa

SEQ ID NO: 1229239 - RNA, 19 nt, Homo sapiens
  misc_RNA (1)...(19): siRNA sense strand
gagcuugaggaucacauaa

SEQ ID NO: 1229240 - RNA, 19 nt, Homo sapiens
  misc_RNA (1)...(19): siRNA sense strand
gcaaugagcagaggaacca

SEQ ID NO: 1229241 - RNA, 19 nt, Homo sapiens
  misc_RNA (1)...(19): siRNA sense strand
agagcaguaucuuuauuga

SEQ ID NO: 1229242 - RNA, 19 nt, Homo sapiens
  misc_RNA (1)...(19): siRNA sense strand
ugguagaacuaguaaacaa

SEQ ID NO: 1229243 - RNA, 19 nt, Homo sapiens
  misc_RNA (1)...(19): siRNA sense strand
ggagcuugaggaucacaua

SEQ ID NO: 1229244 - RNA, 19 nt, Homo sapiens
  misc_RNA (1)...(19): siRNA sense strand
ucaacuuucucaccaagau

SEQ ID NO: 1229245 - RNA, 19 nt, Homo sapiens
  misc_RNA (1)...(19): siRNA sense strand
gagcagaggaaccaugauc

SEQ ID NO: 1229246 - RNA, 19 nt, Homo sapiens
  misc_RNA (1)...(19): siRNA sense strand
caaagcggcaccaauguag

SEQ ID NO: 1229247 - RNA, 19 nt, Homo sapiens
  misc_RNA (1)...(19): siRNA sense strand
ccaagucacacaagggauu

SEQ ID NO: 1229248 - RNA, 19 nt, Homo sapiens
  misc_RNA (1)...(19): siRNA sense strand
uuaccuuaguugacaauug

SEQ ID NO: 1229249 - RNA, 19 nt, Homo sapiens
  misc_RNA (1)...(19): siRNA sense strand
cagagccaacccucaguua

SEQ ID NO: 1229250 - RNA, 19 nt, Homo sapiens
  misc_RNA (1)...(19): siRNA sense strand
gaagcuccgugcccuugca

SEQ ID NO: 1229251 - RNA, 19 nt, Homo sapiens
  misc_RNA (1)...(19): siRNA sense strand
caagugagcagagagaauc

SEQ ID NO: 1229252 - RNA, 19 nt, Homo sapiens
  misc_RNA (1)...(19): siRNA sense strand
cacaagggauugggaggaa

SEQ ID NO: 1229253 - RNA, 19 nt, Homo sapiens
  misc_RNA (1)...(19): siRNA sense strand
ccaaugugguguccaacuc

SEQ ID NO: 1229254 - RNA, 19 nt, Homo sapiens
  misc_RNA (1)...(19): siRNA sense strand
ggaccaaagcggcaccaau

SEQ ID NO: 1229255 - RNA, 19 nt, Homo sapiens
  misc_RNA (1)...(19): siRNA sense strand
acccaauguucuuaccuua

SEQ ID NO: 1229256 - RNA, 19 nt, Homo sapiens
  misc_RNA (1)...(19): siRNA sense strand
uaccuuaguugacaauugg

SEQ ID NO: 1229257 - RNA, 19 nt, Homo sapiens
  misc_RNA (1)...(19): siRNA sense strand
gaugaugaagccuggaaug

SEQ ID NO: 1229258 - RNA, 19 nt, Homo sapiens
  misc_RNA (1)...(19): siRNA sense strand
cuacaacugcugacugaug

SEQ ID NO: 1229259 - RNA, 19 nt, Homo sapiens
  misc_RNA (1)...(19): siRNA sense strand
gcuugaggaucacauaagg

SEQ ID NO: 1229260 - RNA, 19 nt, Homo sapiens
  misc_RNA (1)...(19): siRNA sense strand
ccguaaagcucugaacaag

SEQ ID NO: 1229261 - RNA, 19 nt, Homo sapiens
  misc_RNA (1)...(19): siRNA sense strand
gcagugugguagaacuagu

SEQ ID NO: 1229262 - RNA, 19 nt, Homo sapiens
  misc_RNA (1)...(19): siRNA sense strand
gggaagcucaacuuucuca

SEQ ID NO: 1229263 - RNA, 19 nt, Homo sapiens
  misc_RNA (1)...(19): siRNA sense strand
gaacuaguaaacaaauugc

SEQ ID NO: 1229264 - RNA, 19 nt, Homo sapiens
  misc_RNA (1)...(19): siRNA sense strand
ccagggaugaggcagauga

SEQ ID NO: 1229265 - RNA, 19 nt, Homo sapiens
  misc_RNA (1)...(19): siRNA sense strand
ggucagccuugcauaugag

SEQ ID NO: 1229266 - RNA, 19 nt, Homo sapiens
  misc_RNA (1)...(19): siRNA sense strand
cacccaauguucuuaccuu

SEQ ID NO: 1229267 - RNA, 19 nt, Homo sapiens
  misc_RNA (1)...(19): siRNA sense strand
gcauaucauugggcgaauc

SEQ ID NO: 1229268 - RNA, 19 nt, Homo sapiens
  misc_RNA (1)...(19): siRNA sense strand
gcucugaacaagcuugcaa

SEQ ID NO: 1229269 - RNA, 19 nt, Homo sapiens
  misc_RNA (1)...(19): siRNA sense strand
gagccaacccucaguuagg

SEQ ID NO: 1229270 - RNA, 19 nt, Homo sapiens
  misc_RNA (1)...(19): siRNA sense strand
ugcuacaacugcugacuga

SEQ ID NO: 1229271 - RNA, 19 nt, Homo sapiens
  misc_RNA (1)...(19): siRNA sense strand
caauguucuuaccuuaguu

SEQ ID NO: 1229272 - RNA, 19 nt, Homo sapiens
  misc_RNA (1)...(19): siRNA sense strand
gaaaagggagcuugaggau

SEQ ID NO: 1229273 - RNA, 19 nt, Homo sapiens
  misc_RNA (1)...(19): siRNA sense strand
gaccaagugagcagagaga

SEQ ID NO: 1229274 - RNA, 19 nt, Homo sapiens
  misc_RNA (1)...(19): siRNA sense strand
cacagaggcaccaccauug

SEQ ID NO: 1229275 - RNA, 19 nt, Homo sapiens
  misc_RNA (1)...(19): siRNA sense strand
ggauuaccuuaaguauuuc

SEQ ID NO: 1229276 - RNA, 19 nt, Homo sapiens
  misc_RNA (1)...(19): siRNA sense strand
gcagccaggccaagaccaa

SEQ ID NO: 1229277 - RNA, 19 nt, Homo sapiens
  misc_RNA (1)...(19): siRNA sense strand
uggucagccuugcauauga

SEQ ID NO: 1229278 - RNA, 19 nt, Homo sapiens
  misc_RNA (1)...(19): siRNA sense strand
uauugaggauuaccuuaag

SEQ ID NO: 1229279 - RNA, 19 nt, Homo sapiens
  misc_RNA (1)...(19): siRNA sense strand
gcccagggaugaggcagau

SEQ ID NO: 1229280 - RNA, 19 nt, Homo sapiens
  misc_RNA (1)...(19): siRNA sense strand
caauguagcaaaggugaug

SEQ ID NO: 1229281 - RNA, 19 nt, Homo sapiens
  misc_RNA (1)...(19): siRNA sense strand
cagagagcaguaucuuuau

SEQ ID NO: 1229282 - RNA, 19 nt, Homo sapiens
  misc_RNA (1)...(19): siRNA sense strand
cauaugagucaaagcacuu

SEQ ID NO: 1229283 - RNA, 19 nt, Homo sapiens
  misc_RNA (1)...(19): siRNA sense strand
auucguggcugcugcugaa

SEQ ID NO: 1229284 - RNA, 19 nt, Homo sapiens
  misc_RNA (1)...(19): siRNA sense strand
gcagaggaaccaugaucgu

SEQ ID NO: 1229285 - RNA, 19 nt, Homo sapiens
  misc_RNA (1)...(19): siRNA sense strand
gaacccagagagcaguauc

SEQ ID NO: 1229286 - RNA, 19 nt, Homo sapiens
  misc_RNA (1)...(19): siRNA sense strand
ccaagugagcagagagaau

SEQ ID NO: 1229287 - RNA, 19 nt, Homo sapiens
  misc_RNA (1)...(19): siRNA sense strand
gccaggccaagaccaauga

SEQ ID NO: 1229288 - RNA, 19 nt, Homo sapiens
  misc_RNA (1)...(19): siRNA sense strand
cggcaccaauguagcaaag

SEQ ID NO: 1229289 - RNA, 19 nt, Homo sapiens
  misc_RNA (1)...(19): siRNA sense strand
ugaggauuaccuuaaguau

SEQ ID NO: 1229290 - RNA, 19 nt, Homo sapiens
  misc_RNA (1)...(19): siRNA sense strand
ccagagccaacccucaguu

SEQ ID NO: 1229291 - RNA, 19 nt, Homo sapiens
  misc_RNA (1)...(19): siRNA sense strand
ugaugaagccuggaaugga

SEQ ID NO: 1229292 - RNA, 19 nt, Homo sapiens
  misc_RNA (1)...(19): siRNA sense strand
caacugcugacugaugaug

SEQ ID NO: 1229293 - RNA, 19 nt, Homo sapiens
  misc_RNA (1)...(19): siRNA sense strand
acugcugacugaugaugaa

SEQ ID NO: 1229294 - RNA, 19 nt, Homo sapiens
  misc_RNA (1)...(19): siRNA sense strand
uugaggaucacauaaggaa

SEQ ID NO: 1229295 - RNA, 19 nt, Homo sapiens
  misc_RNA (1)...(19): siRNA sense strand
aggcagaugagcuccguaa

SEQ ID NO: 1229296 - RNA, 19 nt, Homo sapiens
  misc_RNA (1)...(19): siRNA sense strand
caagucacacaagggauug

SEQ ID NO: 1229297 - RNA, 19 nt, Homo sapiens
  misc_RNA (1)...(19): siRNA sense strand
cagugugguagaacuagua

SEQ ID NO: 1229298 - RNA, 19 nt, Homo sapiens
  misc_RNA (1)...(19): siRNA sense strand
gaacauccgugccaucaga

SEQ ID NO: 1229299 - RNA, 19 nt, Homo sapiens
  misc_RNA (1)...(19): siRNA sense strand
ccagagagcaguaucuuua

SEQ ID NO: 1229300 - RNA, 19 nt, Homo sapiens
  misc_RNA (1)...(19): siRNA sense strand
aaagggagcuugaggauca

SEQ ID NO: 1229301 - RNA, 19 nt, Homo sapiens
  misc_RNA (1)...(19): siRNA sense strand
ugaacaagcuugcaaguca

SEQ ID NO: 1229302 - RNA, 19 nt, Homo sapiens
  misc_RNA (1)...(19): siRNA sense strand
uagcaaaggugaugaagga

SEQ ID NO: 1229303 - RNA, 19 nt, Homo sapiens
  misc_RNA (1)...(19): siRNA sense strand
gagagaaucugcuacaacu

SEQ ID NO: 1229304 - RNA, 19 nt, Homo sapiens
  misc_RNA (1)...(19): siRNA sense strand
caaaggugaugaaggaguu

SEQ ID NO: 1229305 - RNA, 19 nt, Homo sapiens
  misc_RNA (1)...(19): siRNA sense strand
gaugaagccuggaauggau

SEQ ID NO: 1229306 - RNA, 19 nt, Homo sapiens
  misc_RNA (1)...(19): siRNA sense strand
gaccaaagcggcaccaaug

SEQ ID NO: 1229307 - RNA, 19 nt, Homo sapiens
  misc_RNA (1)...(19): siRNA sense strand
ugaaggcggugaacagguu

SEQ ID NO: 1229308 - RNA, 19 nt, Homo sapiens
  misc_RNA (1)...(19): siRNA sense strand
gagagcaguaucuuuauug

SEQ ID NO: 1229309 - RNA, 19 nt, Homo sapiens
  misc_RNA (1)...(19): siRNA sense strand
ccaaagcggcaccaaugua

SEQ ID NO: 1229310 - RNA, 19 nt, Homo sapiens
  misc_RNA (1)...(19): siRNA sense strand
ucaccaagauccaugagau

SEQ ID NO: 1229311 - RNA, 19 nt, Homo sapiens
  misc_RNA (1)...(19): siRNA sense strand
gcaccaauguagcaaaggu

SEQ ID NO: 1229312 - RNA, 19 nt, Homo sapiens
  misc_RNA (1)...(19): siRNA sense strand
ccaauguucuuaccuuagu

SEQ ID NO: 1229313 - RNA, 19 nt, Homo sapiens
  misc_RNA (1)...(19): siRNA sense strand
gaggauuaccuuaaguauu

SEQ ID NO: 1229314 - RNA, 19 nt, Homo sapiens
  misc_RNA (1)...(19): siRNA sense strand
ucacagaaggaaucaguuu

SEQ ID NO: 1229315 - RNA, 19 nt, Homo sapiens
  misc_RNA (1)...(19): siRNA sense strand
ccacagaggcaccaccauu

SEQ ID NO: 1229316 - RNA, 19 nt, Homo sapiens
  misc_RNA (1)...(19): siRNA sense strand
agagagcaguaucuuuauu

SEQ ID NO: 1229317 - RNA, 19 nt, Homo sapiens
  misc_RNA (1)...(19): siRNA sense strand
guucuuaccuuaguugaca

SEQ ID NO: 1229318 - RNA, 19 nt, Homo sapiens
  misc_RNA (1)...(19): siRNA sense strand
uacaacugcugacugauga

SEQ ID NO: 1229319 - RNA, 19 nt, Homo sapiens
  misc_RNA (1)...(19): siRNA sense strand
gcagaugagcuccguaaag

SEQ ID NO: 1229320 - RNA, 19 nt, Homo sapiens
  misc_RNA (1)...(19): siRNA sense strand
gggcgaaucucagcugaag

SEQ ID NO: 1229321 - RNA, 19 nt, Homo sapiens
  misc_RNA (1)...(19): siRNA sense strand
cagaugagcuccguaaagc

SEQ ID NO: 1229322 - RNA, 19 nt, Homo sapiens
  misc_RNA (1)...(19): siRNA sense strand
gguagaacuaguaaacaaa

SEQ ID NO: 1229323 - RNA, 19 nt, Homo sapiens
  misc_RNA (1)...(19): siRNA sense strand
gagcuugaggaucacauaa

SEQ ID NO: 1229324 - RNA, 19 nt, Homo sapiens
  misc_RNA (1)...(19): siRNA sense strand
gcaaugagcagaggaacca

SEQ ID NO: 1229325 - RNA, 19 nt, Homo sapiens
  misc_RNA (1)...(19): siRNA sense strand
agagcaguaucuuuauuga

SEQ ID NO: 1229326 - RNA, 19 nt, Homo sapiens
  misc_RNA (1)...(19): siRNA sense strand
ugguagaacuaguaaacaa

SEQ ID NO: 1229327 - RNA, 19 nt, Homo sapiens
  misc_RNA (1)...(19): siRNA sense strand
ggagcuugaggaucacaua

SEQ ID NO: 1229328 - RNA, 19 nt, Homo sapiens
  misc_RNA (1)...(19): siRNA sense strand
ucaacuuucucaccaagau

SEQ ID NO: 1229329 - RNA, 19 nt, Homo sapiens
  misc_RNA (1)...(19): siRNA sense strand
gagcagaggaaccaugauc

SEQ ID NO: 1229330 - RNA, 19 nt, Homo sapiens
  misc_RNA (1)...(19): siRNA sense strand
caaagcggcaccaauguag

SEQ ID NO: 1229331 - RNA, 19 nt, Homo sapiens
  misc_RNA (1)...(19): siRNA sense strand
ccaagucacacaagggauu

SEQ ID NO: 1229332 - RNA, 19 nt, Homo sapiens
  misc_RNA (1)...(19): siRNA sense strand
uuaccuuaguugacaauug

SEQ ID NO: 1229333 - RNA, 19 nt, Homo sapiens
  misc_RNA (1)...(19): siRNA sense strand
cagagccaacccucaguua

SEQ ID NO: 1229334 - RNA, 19 nt, Homo sapiens
  misc_RNA (1)...(19): siRNA sense strand
gaagcuccgugcccuugca

SEQ ID NO: 1229335 - RNA, 19 nt, Homo sapiens
  misc_RNA (1)...(19): siRNA sense strand
caagugagcagagagaauc

SEQ ID NO: 1229336 - RNA, 19 nt, Homo sapiens
  misc_RNA (1)...(19): siRNA sense strand
cacaagggauugggaggaa

SEQ ID NO: 1229337 - RNA, 19 nt, Homo sapiens
  misc_RNA (1)...(19): siRNA sense strand
ccaaugugguguccaacuc

SEQ ID NO: 1229338 - RNA, 19 nt, Homo sapiens
  misc_RNA (1)...(19): siRNA sense strand
ggaccaaagcggcaccaau

SEQ ID NO: 1229339 - RNA, 19 nt, Homo sapiens
  misc_RNA (1)...(19): siRNA sense strand
acccaauguucuuaccuua

SEQ ID NO: 1229340 - RNA, 19 nt, Homo sapiens
  misc_RNA (1)...(19): siRNA sense strand
uaccuuaguugacaauugg

SEQ ID NO: 1229341 - RNA, 19 nt, Homo sapiens
  misc_RNA (1)...(19): siRNA sense strand
gaugaugaagccuggaaug

SEQ ID NO: 1229342 - RNA, 19 nt, Homo sapiens
  misc_RNA (1)...(19): siRNA sense strand
cuacaacugcugacugaug

SEQ ID NO: 1229343 - RNA, 19 nt, Homo sapiens
  misc_RNA (1)...(19): siRNA sense strand
gcuugaggaucacauaagg

SEQ ID NO: 1229344 - RNA, 19 nt, Homo sapiens
  misc_RNA (1)...(19): siRNA sense strand
ccguaaagcucugaacaag

SEQ ID NO: 1229345 - RNA, 19 nt, Homo sapiens
  misc_RNA (1)...(19): siRNA sense strand
gcagugugguagaacuagu

SEQ ID NO: 1229346 - RNA, 19 nt, Homo sapiens
  misc_RNA (1)...(19): siRNA sense strand
gggaagcucaacuuucuca

SEQ ID NO: 1229347 - RNA, 19 nt, Homo sapiens
  misc_RNA (1)...(19): siRNA sense strand
gaacuaguaaacaaauugc

SEQ ID NO: 1229348 - RNA, 19 nt, Homo sapiens
  misc_RNA (1)...(19): siRNA sense strand
ccagggaugaggcagauga

SEQ ID NO: 1229349 - RNA, 19 nt, Homo sapiens
  misc_RNA (1)...(19): siRNA sense strand
ggucagccuugcauaugag

SEQ ID NO: 1229350 - RNA, 19 nt, Homo sapiens
  misc_RNA (1)...(19): siRNA sense strand
cacccaauguucuuaccuu

SEQ ID NO: 1229351 - RNA, 19 nt, Homo sapiens
  misc_RNA (1)...(19): siRNA sense strand
gcauaucauugggcgaauc

SEQ ID NO: 1229352 - RNA, 19 nt, Homo sapiens
  misc_RNA (1)...(19): siRNA sense strand
gcucugaacaagcuugcaa

SEQ ID NO: 1229353 - RNA, 19 nt, Homo sapiens
  misc_RNA (1)...(19): siRNA sense strand
gagccaacccucaguuagg

SEQ ID NO: 1229354 - RNA, 19 nt, Homo sapiens
  misc_RNA (1)...(19): siRNA sense strand
ugcuacaacugcugacuga

SEQ ID NO: 1229355 - RNA, 19 nt, Homo sapiens
  misc_RNA (1)...(19): siRNA sense strand
caauguucuuaccuuaguu

SEQ ID NO: 1229356 - RNA, 19 nt, Homo sapiens
  misc_RNA (1)...(19): siRNA sense strand
gaaaagggagcuugaggau

SEQ ID NO: 1229357 - RNA, 19 nt, Homo sapiens
  misc_RNA (1)...(19): siRNA sense strand
gaccaagugagcagagaga

SEQ ID NO: 1229358 - RNA, 19 nt, Homo sapiens
  misc_RNA (1)...(19): siRNA sense strand
cacagaggcaccaccauug

SEQ ID NO: 1229359 - RNA, 19 nt, Homo sapiens
  misc_RNA (1)...(19): siRNA sense strand
ggauuaccuuaaguauuuc

SEQ ID NO: 1229360 - RNA, 19 nt, Homo sapiens
  misc_RNA (1)...(19): siRNA sense strand
gcagccaggccaagaccaa

SEQ ID NO: 1229361 - RNA, 19 nt, Homo sapiens
  misc_RNA (1)...(19): siRNA sense strand
uggucagccuugcauauga

SEQ ID NO: 1229362 - RNA, 19 nt, Homo sapiens
  misc_RNA (1)...(19): siRNA sense strand
uauugaggauuaccuuaag

SEQ ID NO: 1229363 - RNA, 19 nt, Homo sapiens
  misc_RNA (1)...(19): siRNA sense strand
gcccagggaugaggcagau

SEQ ID NO: 1229364 - RNA, 19 nt, Homo sapiens
  misc_RNA (1)...(19): siRNA sense strand
caauguagcaaaggugaug

SEQ ID NO: 1229365 - RNA, 19 nt, Homo sapiens
  misc_RNA (1)...(19): siRNA sense strand
cagagagcaguaucuuuau

SEQ ID NO: 1229366 - RNA, 19 nt, Homo sapiens
  misc_RNA (1)...(19): siRNA sense strand
cauaugagucaaagcacuu

SEQ ID NO: 1229367 - RNA, 19 nt, Homo sapiens
  misc_RNA (1)...(19): siRNA sense strand
auucguggcugcugcugaa

SEQ ID NO: 1229368 - RNA, 19 nt, Homo sapiens
  misc_RNA (1)...(19): siRNA sense strand
gcagaggaaccaugaucgu

SEQ ID NO: 1229369 - RNA, 19 nt, Homo sapiens
  misc_RNA (1)...(19): siRNA sense strand
gaacccagagagcaguauc

SEQ ID NO: 1229370 - RNA, 19 nt, Homo sapiens
  misc_RNA (1)...(19): siRNA sense strand
ccaagugagcagagagaau

SEQ ID NO: 1229371 - RNA, 19 nt, Homo sapiens
  misc_RNA (1)...(19): siRNA sense strand
gccaggccaagaccaauga

SEQ ID NO: 1229372 - RNA, 19 nt, Homo sapiens
  misc_RNA (1)...(19): siRNA sense strand
cggcaccaauguagcaaag

SEQ ID NO: 1229373 - RNA, 19 nt, Homo sapiens
  misc_RNA (1)...(19): siRNA sense strand
ugaggauuaccuuaaguau

SEQ ID NO: 1229374 - RNA, 19 nt, Homo sapiens
  misc_RNA (1)...(19): siRNA sense strand
ccagagccaacccucaguu

SEQ ID NO: 1229375 - RNA, 19 nt, Homo sapiens
  misc_RNA (1)...(19): siRNA sense strand
ugaugaagccuggaaugga

SEQ ID NO: 1229376 - RNA, 19 nt, Homo sapiens
  misc_RNA (1)...(19): siRNA sense strand
caacugcugacugaugaug

SEQ ID NO: 1229377 - RNA, 19 nt, Homo sapiens
  misc_RNA (1)...(19): siRNA sense strand
acugcugacugaugaugaa

SEQ ID NO: 1229378 - RNA, 19 nt, Homo sapiens
  misc_RNA (1)...(19): siRNA sense strand
uugaggaucacauaaggaa

SEQ ID NO: 1229379 - RNA, 19 nt, Homo sapiens
  misc_RNA (1)...(19): siRNA sense strand
aggcagaugagcuccguaa

SEQ ID NO: 1229380 - RNA, 19 nt, Homo sapiens
  misc_RNA (1)...(19): siRNA sense strand
caagucacacaagggauug

SEQ ID NO: 1229381 - RNA, 19 nt, Homo sapiens
  misc_RNA (1)...(19): siRNA sense strand
cagugugguagaacuagua

SEQ ID NO: 1229382 - RNA, 19 nt, Homo sapiens
  misc_RNA (1)...(19): siRNA sense strand
ugaacaagcucuccgacua

SEQ ID NO: 1229383 - RNA, 19 nt, Homo sapiens
  misc_RNA (1)...(19): siRNA sense strand
ggagcaggauggugacuuu

SEQ ID NO: 1229384 - RNA, 19 nt, Homo sapiens
  misc_RNA (1)...(19): siRNA sense strand
cgugucagcuguucauuaa

SEQ ID NO: 1229385 - RNA, 19 nt, Homo sapiens
  misc_RNA (1)...(19): siRNA sense strand
uuaaccacauccucaaaua

SEQ ID NO: 1229386 - RNA, 19 nt, Homo sapiens
  misc_RNA (1)...(19): siRNA sense strand
caagaccuguucccacuga

SEQ ID NO: 1229387 - RNA, 19 nt, Homo sapiens
  misc_RNA (1)...(19): siRNA sense strand
ggagagggaccaccuaugu

SEQ ID NO: 1229388 - RNA, 19 nt, Homo sapiens
  misc_RNA (1)...(19): siRNA sense strand
ugaaggacaucgcccaguu

SEQ ID NO: 1229389 - RNA, 19 nt, Homo sapiens
  misc_RNA (1)...(19): siRNA sense strand
gaaggacaucgcccaguuu

SEQ ID NO: 1229390 - RNA, 19 nt, Homo sapiens
  misc_RNA (1)...(19): siRNA sense strand
ggucuucccuggagaacga

SEQ ID NO: 1229391 - RNA, 19 nt, Homo sapiens
  misc_RNA (1)...(19): siRNA sense strand
gaggagaacaagagucuga

SEQ ID NO: 1229392 - RNA, 19 nt, Homo sapiens
  misc_RNA (1)...(19): siRNA sense strand
gaaccgagccgaggauuac

SEQ ID NO: 1229393 - RNA, 19 nt, Homo sapiens
  misc_RNA (1)...(19): siRNA sense strand
ucaaccagaucucgggaaa

SEQ ID NO: 1229394 - RNA, 19 nt, Homo sapiens
  misc_RNA (1)...(19): siRNA sense strand
guaccugucuggcuucuac

SEQ ID NO: 1229395 - RNA, 19 nt, Homo sapiens
  misc_RNA (1)...(19): siRNA sense strand
gcaccagcaucaaccagau

SEQ ID NO: 1229396 - RNA, 19 nt, Homo sapiens
  misc_RNA (1)...(19): siRNA sense strand
cagcuggaauucaaacuca

SEQ ID NO: 1229397 - RNA, 19 nt, Homo sapiens
  misc_RNA (1)...(19): siRNA sense strand
gcaaagccacgcucaccuu

SEQ ID NO: 1229398 - RNA, 19 nt, Homo sapiens
  misc_RNA (1)...(19): siRNA sense strand
gaaggucaccaucgagugu

SEQ ID NO: 1229399 - RNA, 19 nt, Homo sapiens
  misc_RNA (1)...(19): siRNA sense strand
gaacaagcucuccgacuac

SEQ ID NO: 1229400 - RNA, 19 nt, Homo sapiens
  misc_RNA (1)...(19): siRNA sense strand
caacgggucagacaaggaa

SEQ ID NO: 1229401 - RNA, 19 nt, Homo sapiens
  misc_RNA (1)...(19): siRNA sense strand
aaccagaucucgggaaaga

SEQ ID NO: 1229402 - RNA, 19 nt, Homo sapiens
  misc_RNA (1)...(19): siRNA sense strand
gaaucaagaagccguacaa

SEQ ID NO: 1229403 - RNA, 19 nt, Homo sapiens
  misc_RNA (1)...(19): siRNA sense strand
acaagaagcccaagggaau

SEQ ID NO: 1229404 - RNA, 19 nt, Homo sapiens
  misc_RNA (1)...(19): siRNA sense strand
ggacagggacguguuuauc

SEQ ID NO: 1229405 - RNA, 19 nt, Homo sapiens
  misc_RNA (1)...(19): siRNA sense strand
ggacaucgcccaguuugag

SEQ ID NO: 1229406 - RNA, 19 nt, Homo sapiens
  misc_RNA (1)...(19): siRNA sense strand
gcaggauggugacuuuguc

SEQ ID NO: 1229407 - RNA, 19 nt, Homo sapiens
  misc_RNA (1)...(19): siRNA sense strand
gagaacaagagucugaugu

SEQ ID NO: 1229408 - RNA, 19 nt, Homo sapiens
  misc_RNA (1)...(19): siRNA sense strand
acagggacguguuuaucaa

SEQ ID NO: 1229409 - RNA, 19 nt, Homo sapiens
  misc_RNA (1)...(19): siRNA sense strand
ggucagacaaggaaugugu

SEQ ID NO: 1229410 - RNA, 19 nt, Homo sapiens
  misc_RNA (1)...(19): siRNA sense strand
gcgugucagcuguucauua

SEQ ID NO: 1229411 - RNA, 19 nt, Homo sapiens
  misc_RNA (1)...(19): siRNA sense strand
gacagggacguguuuauca

SEQ ID NO: 1229412 - RNA, 19 nt, Homo sapiens
  misc_RNA (1)...(19): siRNA sense strand
gaagcucacccggaacuug

SEQ ID NO: 1229413 - RNA, 19 nt, Homo sapiens
  misc_RNA (1)...(19): siRNA sense strand
ucaaggcgcagaaggagaa

SEQ ID NO: 1229414 - RNA, 19 nt, Homo sapiens
  misc_RNA (1)...(19): siRNA sense strand
gccgaggauuacacccuua

SEQ ID NO: 1229415 - RNA, 19 nt, Homo sapiens
  misc_RNA (1)...(19): siRNA sense strand
aaggacggcuucugcauca

SEQ ID NO: 1229416 - RNA, 19 nt, Homo sapiens
  misc_RNA (1)...(19): siRNA sense strand
gcgcugcucuagccuacug

SEQ ID NO: 1229417 - RNA, 19 nt, Homo sapiens
  misc_RNA (1)...(19): siRNA sense strand
gaucacgucgggagaggaa

SEQ ID NO: 1229418 - RNA, 19 nt, Homo sapiens
  misc_RNA (1)...(19): siRNA sense strand
agagaacccugaggaguca

SEQ ID NO: 1229419 - RNA, 19 nt, Homo sapiens
  misc_RNA (1)...(19): siRNA sense strand
gcccuacgcccacugcaaa

SEQ ID NO: 1229420 - RNA, 19 nt, Homo sapiens
  misc_RNA (1)...(19): siRNA sense strand
cagccgcacauucuacaua

SEQ ID NO: 1229421 - RNA, 19 nt, Homo sapiens
  misc_RNA (1)...(19): siRNA sense strand
ccgccagggucaccaagaa

SEQ ID NO: 1229422 - RNA, 19 nt, Homo sapiens
  misc_RNA (1)...(19): siRNA sense strand
ggagaacaagagucugaug

SEQ ID NO: 1229423 - RNA, 19 nt, Homo sapiens
  misc_RNA (1)...(19): siRNA sense strand
gugggaaggucaccaucga

SEQ ID NO: 1229424 - RNA, 19 nt, Homo sapiens
  misc_RNA (1)...(19): siRNA sense strand
gcucuagccuacugagacu

SEQ ID NO: 1229425 - RNA, 19 nt, Homo sapiens
  misc_RNA (1)...(19): siRNA sense strand
gggacguguuuaucaagga

SEQ ID NO: 1229426 - RNA, 19 nt, Homo sapiens
  misc_RNA (1)...(19): siRNA sense strand
ugaaccgagccgaggauua

SEQ ID NO: 1229427 - RNA, 19 nt, Homo sapiens
  misc_RNA (1)...(19): siRNA sense strand
gagagggaccaccuaugug

SEQ ID NO: 1229428 - RNA, 19 nt, Homo sapiens
  misc_RNA (1)...(19): siRNA sense strand
gcggagacaaugagcucua

SEQ ID NO: 1229429 - RNA, 19 nt, Homo sapiens
  misc_RNA (1)...(19): siRNA sense strand
uaaccacauccucaaauag

SEQ ID NO: 1229430 - RNA, 19 nt, Homo sapiens
  misc_RNA (1)...(19): siRNA sense strand
ggacggcuucugcaucagu

SEQ ID NO: 1229431 - RNA, 19 nt, Homo sapiens
  misc_RNA (1)...(19): siRNA sense strand
gcaacgggucagacaagga

SEQ ID NO: 1229432 - RNA, 19 nt, Homo sapiens
  misc_RNA (1)...(19): siRNA sense strand
caaacucaagcccuucuuc

SEQ ID NO: 1229433 - RNA, 19 nt, Homo sapiens
  misc_RNA (1)...(19): siRNA sense strand
ucacagccaaguccagguu

SEQ ID NO: 1229434 - RNA, 19 nt, Homo sapiens
  misc_RNA (1)...(19): siRNA sense strand
gggccacacaggagaaguu

SEQ ID NO: 1229435 - RNA, 19 nt, Homo sapiens
  misc_RNA (1)...(19): siRNA sense strand
cagacaagucggagagaga

SEQ ID NO: 1229436 - RNA, 19 nt, Homo sapiens
  misc_RNA (1)...(19): siRNA sense strand
ccuggaagccgcagcuguu

SEQ ID NO: 1229437 - RNA, 19 nt, Homo sapiens
  misc_RNA (1)...(19): siRNA sense strand
ccacacaggagaaguuugc

SEQ ID NO: 1229438 - RNA, 19 nt, Homo sapiens
  misc_RNA (1)...(19): siRNA sense strand
agaacuaccggcaggagaa

SEQ ID NO: 1229439 - RNA, 19 nt, Homo sapiens
  misc_RNA (1)...(19): siRNA sense strand
aggcccagcuggaauucaa

SEQ ID NO: 1229440 - RNA, 19 nt, Homo sapiens
  misc_RNA (1)...(19): siRNA sense strand
caagcucuccgacuacuac

SEQ ID NO: 1229441 - RNA, 19 nt, Homo sapiens
  misc_RNA (1)...(19): siRNA sense strand
cagaggagaacaagagucu

SEQ ID NO: 1229442 - RNA, 19 nt, Homo sapiens
  misc_RNA (1)...(19): siRNA sense strand
gcguguuccuggcguguca

SEQ ID NO: 1229443 - RNA, 19 nt, Homo sapiens
  misc_RNA (1)...(19): siRNA sense strand
gcggagagggaccaccuau

SEQ ID NO: 1229444 - RNA, 19 nt, Homo sapiens
  misc_RNA (1)...(19): siRNA sense strand
gggacagggacguguuuau

SEQ ID NO: 1229445 - RNA, 19 nt, Homo sapiens
  misc_RNA (1)...(19): siRNA sense strand
caagaagcccaagggaauc

SEQ ID NO: 1229446 - RNA, 19 nt, Homo sapiens
  misc_RNA (1)...(19): siRNA sense strand
gcuguucauuaaccacauc

SEQ ID NO: 1229447 - RNA, 19 nt, Homo sapiens
  misc_RNA (1)...(19): siRNA sense strand
gaacuaccggcaggagaag

SEQ ID NO: 1229448 - RNA, 19 nt, Homo sapiens
  misc_RNA (1)...(19): siRNA sense strand
gaugcauucucagacaagu

SEQ ID NO: 1229449 - RNA, 19 nt, Homo sapiens
  misc_RNA (1)...(19): siRNA sense strand
agaacaagagucugaugug

SEQ ID NO: 1229450 - RNA, 19 nt, Homo sapiens
  misc_RNA (1)...(19): siRNA sense strand
cccagcagcuaccugaucu

SEQ ID NO: 1229451 - RNA, 19 nt, Homo sapiens
  misc_RNA (1)...(19): siRNA sense strand
cauuaaccacauccucaaa

SEQ ID NO: 1229452 - RNA, 19 nt, Homo sapiens
  misc_RNA (1)...(19): siRNA sense strand
ggccacacaggagaaguuu

SEQ ID NO: 1229453 - RNA, 19 nt, Homo sapiens
  misc_RNA (1)...(19): siRNA sense strand
cugucuggcuucuacaaga

SEQ ID NO: 1229454 - RNA, 19 nt, Homo sapiens
  misc_RNA (1)...(19): siRNA sense strand
gcucuccgacuacuacuac

SEQ ID NO: 1229455 - RNA, 19 nt, Homo sapiens
  misc_RNA (1)...(19): siRNA sense strand
gcuccuuccugaacaagcu

SEQ ID NO: 1229456 - RNA, 19 nt, Homo sapiens
  misc_RNA (1)...(19): siRNA sense strand
ugucagaggagaacaagag

SEQ ID NO: 1229457 - RNA, 19 nt, Homo sapiens
  misc_RNA (1)...(19): siRNA sense strand
ugaacaagcucuccgacua

SEQ ID NO: 1229458 - RNA, 19 nt, Homo sapiens
  misc_RNA (1)...(19): siRNA sense strand
ggagcaggauggugacuuu

SEQ ID NO: 1229459 - RNA, 19 nt, Homo sapiens
  misc_RNA (1)...(19): siRNA sense strand
cgugucagcuguucauuaa

SEQ ID NO: 1229460 - RNA, 19 nt, Homo sapiens
  misc_RNA (1)...(19): siRNA sense strand
uuaaccacauccucaaaua

SEQ ID NO: 1229461 - RNA, 19 nt, Homo sapiens
  misc_RNA (1)...(19): siRNA sense strand
caagaccuguucccacuga

SEQ ID NO: 1229462 - RNA, 19 nt, Homo sapiens
  misc_RNA (1)...(19): siRNA sense strand
ggagagggaccaccuaugu

SEQ ID NO: 1229463 - RNA, 19 nt, Homo sapiens
  misc_RNA (1)...(19): siRNA sense strand
ugaaggacaucgcccaguu

SEQ ID NO: 1229464 - RNA, 19 nt, Homo sapiens
  misc_RNA (1)...(19): siRNA sense strand
gaaggacaucgcccaguuu

SEQ ID NO: 1229465 - RNA, 19 nt, Homo sapiens
  misc_RNA (1)...(19): siRNA sense strand
ggucuucccuggagaacga

SEQ ID NO: 1229466 - RNA, 19 nt, Homo sapiens
  misc_RNA (1)...(19): siRNA sense strand
gaggagaacaagagucuga

SEQ ID NO: 1229467 - RNA, 19 nt, Homo sapiens
  misc_RNA (1)...(19): siRNA sense strand
gaaccgagccgaggauuac

SEQ ID NO: 1229468 - RNA, 19 nt, Homo sapiens
  misc_RNA (1)...(19): siRNA sense strand
ucaaccagaucucgggaaa

SEQ ID NO: 1229469 - RNA, 19 nt, Homo sapiens
  misc_RNA (1)...(19): siRNA sense strand
guaccugucuggcuucuac

SEQ ID NO: 1229470 - RNA, 19 nt, Homo sapiens
  misc_RNA (1)...(19): siRNA sense strand
gcaccagcaucaaccagau

SEQ ID NO: 1229471 - RNA, 19 nt, Homo sapiens
  misc_RNA (1)...(19): siRNA sense strand
cagcuggaauucaaacuca

SEQ ID NO: 1229472 - RNA, 19 nt, Homo sapiens
  misc_RNA (1)...(19): siRNA sense strand
gcaaagccacgcucaccuu

SEQ ID NO: 1229473 - RNA, 19 nt, Homo sapiens
  misc_RNA (1)...(19): siRNA sense strand
gaaggucaccaucgagugu

SEQ ID NO: 1229474 - RNA, 19 nt, Homo sapiens
  misc_RNA (1)...(19): siRNA sense strand
gaacaagcucuccgacuac

SEQ ID NO: 1229475 - RNA, 19 nt, Homo sapiens
  misc_RNA (1)...(19): siRNA sense strand
caacgggucagacaaggaa

SEQ ID NO: 1229476 - RNA, 19 nt, Homo sapiens
  misc_RNA (1)...(19): siRNA sense strand
aaccagaucucgggaaaga

SEQ ID NO: 1229477 - RNA, 19 nt, Homo sapiens
  misc_RNA (1)...(19): siRNA sense strand
gaaucaagaagccguacaa

SEQ ID NO: 1229478 - RNA, 19 nt, Homo sapiens
  misc_RNA (1)...(19): siRNA sense strand
acaagaagcccaagggaau

SEQ ID NO: 1229479 - RNA, 19 nt, Homo sapiens
  misc_RNA (1)...(19): siRNA sense strand
ggacagggacguguuuauc

SEQ ID NO: 1229480 - RNA, 19 nt, Homo sapiens
  misc_RNA (1)...(19): siRNA sense strand
ggacaucgcccaguuugag

SEQ ID NO: 1229481 - RNA, 19 nt, Homo sapiens
  misc_RNA (1)...(19): siRNA sense strand
gcaggauggugacuuuguc

SEQ ID NO: 1229482 - RNA, 19 nt, Homo sapiens
  misc_RNA (1)...(19): siRNA sense strand
gagaacaagagucugaugu

SEQ ID NO: 1229483 - RNA, 19 nt, Homo sapiens
  misc_RNA (1)...(19): siRNA sense strand
acagggacguguuuaucaa

SEQ ID NO: 1229484 - RNA, 19 nt, Homo sapiens
  misc_RNA (1)...(19): siRNA sense strand
ggucagacaaggaaugugu

SEQ ID NO: 1229485 - RNA, 19 nt, Homo sapiens
  misc_RNA (1)...(19): siRNA sense strand
gcgugucagcuguucauua

SEQ ID NO: 1229486 - RNA, 19 nt, Homo sapiens
  misc_RNA (1)...(19): siRNA sense strand
gacagggacguguuuauca

SEQ ID NO: 1229487 - RNA, 19 nt, Homo sapiens
  misc_RNA (1)...(19): siRNA sense strand
gaagcucacccggaacuug

SEQ ID NO: 1229488 - RNA, 19 nt, Homo sapiens
  misc_RNA (1)...(19): siRNA sense strand
ucaaggcgcagaaggagaa

SEQ ID NO: 1229489 - RNA, 19 nt, Homo sapiens
  misc_RNA (1)...(19): siRNA sense strand
gccgaggauuacacccuua

SEQ ID NO: 1229490 - RNA, 19 nt, Homo sapiens
  misc_RNA (1)...(19): siRNA sense strand
aaggacggcuucugcauca

SEQ ID NO: 1229491 - RNA, 19 nt, Homo sapiens
  misc_RNA (1)...(19): siRNA sense strand
gcgcugcucuagccuacug

SEQ ID NO: 1229492 - RNA, 19 nt, Homo sapiens
  misc_RNA (1)...(19): siRNA sense strand
gaucacgucgggagaggaa

SEQ ID NO: 1229493 - RNA, 19 nt, Homo sapiens
  misc_RNA (1)...(19): siRNA sense strand
agagaacccugaggaguca

SEQ ID NO: 1229494 - RNA, 19 nt, Homo sapiens
  misc_RNA (1)...(19): siRNA sense strand
gcccuacgcccacugcaaa

SEQ ID NO: 1229495 - RNA, 19 nt, Homo sapiens
  misc_RNA (1)...(19): siRNA sense strand
cagccgcacauucuacaua

SEQ ID NO: 1229496 - RNA, 19 nt, Homo sapiens
  misc_RNA (1)...(19): siRNA sense strand
ccgccagggucaccaagaa

SEQ ID NO: 1229497 - RNA, 19 nt, Homo sapiens
  misc_RNA (1)...(19): siRNA sense strand
ggagaacaagagucugaug

SEQ ID NO: 1229498 - RNA, 19 nt, Homo sapiens
  misc_RNA (1)...(19): siRNA sense strand
gugggaaggucaccaucga

SEQ ID NO: 1229499 - RNA, 19 nt, Homo sapiens
  misc_RNA (1)...(19): siRNA sense strand
gcucuagccuacugagacu

SEQ ID NO: 1229500 - RNA, 19 nt, Homo sapiens
  misc_RNA (1)...(19): siRNA sense strand
gggacguguuuaucaagga

SEQ ID NO: 1229501 - RNA, 19 nt, Homo sapiens
  misc_RNA (1)...(19): siRNA sense strand
ugaaccgagccgaggauua

SEQ ID NO: 1229502 - RNA, 19 nt, Homo sapiens
  misc_RNA (1)...(19): siRNA sense strand
gagagggaccaccuaugug

SEQ ID NO: 1229503 - RNA, 19 nt, Homo sapiens
  misc_RNA (1)...(19): siRNA sense strand
gcggagacaaugagcucua

SEQ ID NO: 1229504 - RNA, 19 nt, Homo sapiens
  misc_RNA (1)...(19): siRNA sense strand
uaaccacauccucaaauag

SEQ ID NO: 1229505 - RNA, 19 nt, Homo sapiens
  misc_RNA (1)...(19): siRNA sense strand
ggacggcuucugcaucagu

SEQ ID NO: 1229506 - RNA, 19 nt, Homo sapiens
  misc_RNA (1)...(19): siRNA sense strand
gcaacgggucagacaagga

SEQ ID NO: 1229507 - RNA, 19 nt, Homo sapiens
  misc_RNA (1)...(19): siRNA sense strand
caaacucaagcccuucuuc

SEQ ID NO: 1229508 - RNA, 19 nt, Homo sapiens
  misc_RNA (1)...(19): siRNA sense strand
ucacagccaaguccagguu

SEQ ID NO: 1229509 - RNA, 19 nt, Homo sapiens
  misc_RNA (1)...(19): siRNA sense strand
gggccacacaggagaaguu

SEQ ID NO: 1229510 - RNA, 19 nt, Homo sapiens
  misc_RNA (1)...(19): siRNA sense strand
cagacaagucggagagaga

SEQ ID NO: 1229511 - RNA, 19 nt, Homo sapiens
  misc_RNA (1)...(19): siRNA sense strand
ccuggaagccgcagcuguu

SEQ ID NO: 1229512 - RNA, 19 nt, Homo sapiens
  misc_RNA (1)...(19): siRNA sense strand
ccacacaggagaaguuugc

SEQ ID NO: 1229513 - RNA, 19 nt, Homo sapiens
  misc_RNA (1)...(19): siRNA sense strand
agaacuaccggcaggagaa

SEQ ID NO: 1229514 - RNA, 19 nt, Homo sapiens
  misc_RNA (1)...(19): siRNA sense strand
aggcccagcuggaauucaa

SEQ ID NO: 1229515 - RNA, 19 nt, Homo sapiens
  misc_RNA (1)...(19): siRNA sense strand
caagcucuccgacuacuac

SEQ ID NO: 1229516 - RNA, 19 nt, Homo sapiens
  misc_RNA (1)...(19): siRNA sense strand
cagaggagaacaagagucu

SEQ ID NO: 1229517 - RNA, 19 nt, Homo sapiens
  misc_RNA (1)...(19): siRNA sense strand
gcguguuccuggcguguca

SEQ ID NO: 1229518 - RNA, 19 nt, Homo sapiens
  misc_RNA (1)...(19): siRNA sense strand
gcggagagggaccaccuau

SEQ ID NO: 1229519 - RNA, 19 nt, Homo sapiens
  misc_RNA (1)...(19): siRNA sense strand
gggacagggacguguuuau

SEQ ID NO: 1229520 - RNA, 19 nt, Homo sapiens
  misc_RNA (1)...(19): siRNA sense strand
caagaagcccaagggaauc

SEQ ID NO: 1229521 - RNA, 19 nt, Homo sapiens
  misc_RNA (1)...(19): siRNA sense strand
gcuguucauuaaccacauc

SEQ ID NO: 1229522 - RNA, 19 nt, Homo sapiens
  misc_RNA (1)...(19): siRNA sense strand
gaacuaccggcaggagaag

SEQ ID NO: 1229523 - RNA, 19 nt, Homo sapiens
  misc_RNA (1)...(19): siRNA sense strand
gaugcauucucagacaagu

SEQ ID NO: 1229524 - RNA, 19 nt, Homo sapiens
  misc_RNA (1)...(19): siRNA sense strand
agaacaagagucugaugug

SEQ ID NO: 1229525 - RNA, 19 nt, Homo sapiens
  misc_RNA (1)...(19): siRNA sense strand
cccagcagcuaccugaucu

SEQ ID NO: 1229526 - RNA, 19 nt, Homo sapiens
  misc_RNA (1)...(19): siRNA sense strand
cauuaaccacauccucaaa

SEQ ID NO: 1229527 - RNA, 19 nt, Homo sapiens
  misc_RNA (1)...(19): siRNA sense strand
ggccacacaggagaaguuu

SEQ ID NO: 1229528 - RNA, 19 nt, Homo sapiens
  misc_RNA (1)...(19): siRNA sense strand
cugucuggcuucuacaaga

SEQ ID NO: 1229529 - RNA, 19 nt, Homo sapiens
  misc_RNA (1)...(19): siRNA sense strand
gcucuccgacuacuacuac

SEQ ID NO: 1229530 - RNA, 19 nt, Homo sapiens
  misc_RNA (1)...(19): siRNA sense strand
gcuccuuccugaacaagcu

SEQ ID NO: 1229531 - RNA, 19 nt, Homo sapiens
  misc_RNA (1)...(19): siRNA sense strand
ugucagaggagaacaagag

SEQ ID NO: 1229532 - RNA, 19 nt, Homo sapiens
  misc_RNA (1)...(19): siRNA sense strand
gcagaaagaugagcaguuu

SEQ ID NO: 1229533 - RNA, 19 nt, Homo sapiens
  misc_RNA (1)...(19): siRNA sense strand
ugaagaagcuuagaacaua

SEQ ID NO: 1229534 - RNA, 19 nt, Homo sapiens
  misc_RNA (1)...(19): siRNA sense strand
gaacauaugcagcuauuga

SEQ ID NO: 1229535 - RNA, 19 nt, Homo sapiens
  misc_RNA (1)...(19): siRNA sense strand
gaagaagcuuagaacauau

SEQ ID NO: 1229536 - RNA, 19 nt, Homo sapiens
  misc_RNA (1)...(19): siRNA sense strand
ugacaucacacccaacuua

SEQ ID NO: 1229537 - RNA, 19 nt, Homo sapiens
  misc_RNA (1)...(19): siRNA sense strand
gaagguauuuaaggaaguu

SEQ ID NO: 1229538 - RNA, 19 nt, Homo sapiens
  misc_RNA (1)...(19): siRNA sense strand
caacuuacuuucccuucuu

SEQ ID NO: 1229539 - RNA, 19 nt, Homo sapiens
  misc_RNA (1)...(19): siRNA sense strand
gauugaagguauuuaagga

SEQ ID NO: 1229540 - RNA, 19 nt, Homo sapiens
  misc_RNA (1)...(19): siRNA sense strand
uaauggagcucacucagau

SEQ ID NO: 1229541 - RNA, 19 nt, Homo sapiens
  misc_RNA (1)...(19): siRNA sense strand
cugaagaggccaccaaaua

SEQ ID NO: 1229542 - RNA, 19 nt, Homo sapiens
  misc_RNA (1)...(19): siRNA sense strand
aagaaacgcuuuacugaag

SEQ ID NO: 1229543 - RNA, 19 nt, Homo sapiens
  misc_RNA (1)...(19): siRNA sense strand
ggacgagucuggcccuuac

SEQ ID NO: 1229544 - RNA, 19 nt, Homo sapiens
  misc_RNA (1)...(19): siRNA sense strand
uagaacauaugcagcuauu

SEQ ID NO: 1229545 - RNA, 19 nt, Homo sapiens
  misc_RNA (1)...(19): siRNA sense strand
gaugagcaguuuagggaau

SEQ ID NO: 1229546 - RNA, 19 nt, Homo sapiens
  misc_RNA (1)...(19): siRNA sense strand
caaccagcauugaccgauu

SEQ ID NO: 1229547 - RNA, 19 nt, Homo sapiens
  misc_RNA (1)...(19): siRNA sense strand
ggagcucacucagaucuau

SEQ ID NO: 1229548 - RNA, 19 nt, Homo sapiens
  misc_RNA (1)...(19): siRNA sense strand
cuacgaagcucugaagaag

SEQ ID NO: 1229549 - RNA, 19 nt, Homo sapiens
  misc_RNA (1)...(19): siRNA sense strand
gaaguuaugcgugacauca

SEQ ID NO: 1229550 - RNA, 19 nt, Homo sapiens
  misc_RNA (1)...(19): siRNA sense strand
ggcagaugcucucuacgaa

SEQ ID NO: 1229551 - RNA, 19 nt, Homo sapiens
  misc_RNA (1)...(19): siRNA sense strand
gaagauccaggaguccaua

SEQ ID NO: 1229552 - RNA, 19 nt, Homo sapiens
  misc_RNA (1)...(19): siRNA sense strand
acgaauaugugcagcagaa

SEQ ID NO: 1229553 - RNA, 19 nt, Homo sapiens
  misc_RNA (1)...(19): siRNA sense strand
agucaaagcacuugcauga

SEQ ID NO: 1229554 - RNA, 19 nt, Homo sapiens
  misc_RNA (1)...(19): siRNA sense strand
ugcaaauccugcugacuaa

SEQ ID NO: 1229555 - RNA, 19 nt, Homo sapiens
  misc_RNA (1)...(19): siRNA sense strand
caaugaagccuggaagaga

SEQ ID NO: 1229556 - RNA, 19 nt, Homo sapiens
  misc_RNA (1)...(19): siRNA sense strand
gcacucauacacaucauca

SEQ ID NO: 1229557 - RNA, 19 nt, Homo sapiens
  misc_RNA (1)...(19): siRNA sense strand
gaaacgcuuuacugaagag

SEQ ID NO: 1229558 - RNA, 19 nt, Homo sapiens
  misc_RNA (1)...(19): siRNA sense strand
gaagaggccaccaaauacu

SEQ ID NO: 1229559 - RNA, 19 nt, Homo sapiens
  misc_RNA (1)...(19): siRNA sense strand
cucaggagcuggaggagaa

SEQ ID NO: 1229560 - RNA, 19 nt, Homo sapiens
  misc_RNA (1)...(19): siRNA sense strand
cugcaaauccugcugacua

SEQ ID NO: 1229561 - RNA, 19 nt, Homo sapiens
  misc_RNA (1)...(19): siRNA sense strand
gauccaggaguccauagaa

SEQ ID NO: 1229562 - RNA, 19 nt, Homo sapiens
  misc_RNA (1)...(19): siRNA sense strand
agaaacgcuuuacugaaga

SEQ ID NO: 1229563 - RNA, 19 nt, Homo sapiens
  misc_RNA (1)...(19): siRNA sense strand
gaagccacacaaaccauug

SEQ ID NO: 1229564 - RNA, 19 nt, Homo sapiens
  misc_RNA (1)...(19): siRNA sense strand
cacagaggcugcaccaucu

SEQ ID NO: 1229565 - RNA, 19 nt, Homo sapiens
  misc_RNA (1)...(19): siRNA sense strand
gagcuggaggagaaucuaa

SEQ ID NO: 1229566 - RNA, 19 nt, Homo sapiens
  misc_RNA (1)...(19): siRNA sense strand
cacaaaccauugggaguga

SEQ ID NO: 1229567 - RNA, 19 nt, Homo sapiens
  misc_RNA (1)...(19): siRNA sense strand
caucacacccaacuuacuu

SEQ ID NO: 1229568 - RNA, 19 nt, Homo sapiens
  misc_RNA (1)...(19): siRNA sense strand
ugaggcagaugcucucuac

SEQ ID NO: 1229569 - RNA, 19 nt, Homo sapiens
  misc_RNA (1)...(19): siRNA sense strand
aaugaagccuggaagagau

SEQ ID NO: 1229570 - RNA, 19 nt, Homo sapiens
  misc_RNA (1)...(19): siRNA sense strand
guggagcacucauacacau

SEQ ID NO: 1229571 - RNA, 19 nt, Homo sapiens
  misc_RNA (1)...(19): siRNA sense strand
ugaagaggccaccaaauac

SEQ ID NO: 1229572 - RNA, 19 nt, Homo sapiens
  misc_RNA (1)...(19): siRNA sense strand
caaauccugcugacuaaca

SEQ ID NO: 1229573 - RNA, 19 nt, Homo sapiens
  misc_RNA (1)...(19): siRNA sense strand
uggcgaaucucagcuggaa

SEQ ID NO: 1229574 - RNA, 19 nt, Homo sapiens
  misc_RNA (1)...(19): siRNA sense strand
gcucugaagaagcuuagaa

SEQ ID NO: 1229575 - RNA, 19 nt, Homo sapiens
  misc_RNA (1)...(19): siRNA sense strand
ggagcacucauacacauca

SEQ ID NO: 1229576 - RNA, 19 nt, Homo sapiens
  misc_RNA (1)...(19): siRNA sense strand
gcugcaccaucuccaaugu

SEQ ID NO: 1229577 - RNA, 19 nt, Homo sapiens
  misc_RNA (1)...(19): siRNA sense strand
agaaagaugagcaguuuag

SEQ ID NO: 1229578 - RNA, 19 nt, Homo sapiens
  misc_RNA (1)...(19): siRNA sense strand
gcaguuuagggaaugguuu

SEQ ID NO: 1229579 - RNA, 19 nt, Homo sapiens
  misc_RNA (1)...(19): siRNA sense strand
ggauguggucaaccuugua

SEQ ID NO: 1229580 - RNA, 19 nt, Homo sapiens
  misc_RNA (1)...(19): siRNA sense strand
gaauaugugcagcagaaag

SEQ ID NO: 1229581 - RNA, 19 nt, Homo sapiens
  misc_RNA (1)...(19): siRNA sense strand
gauguggucaaccuuguau

SEQ ID NO: 1229582 - RNA, 19 nt, Homo sapiens
  misc_RNA (1)...(19): siRNA sense strand
cagaaagaugagcaguuua

SEQ ID NO: 1229583 - RNA, 19 nt, Homo sapiens
  misc_RNA (1)...(19): siRNA sense strand
cgucugaauccaugccaua

SEQ ID NO: 1229584 - RNA, 19 nt, Homo sapiens
  misc_RNA (1)...(19): siRNA sense strand
gcgaaucucagcuggaagu

SEQ ID NO: 1229585 - RNA, 19 nt, Homo sapiens
  misc_RNA (1)...(19): siRNA sense strand
gugaccaccuggcgaaucu

SEQ ID NO: 1229586 - RNA, 19 nt, Homo sapiens
  misc_RNA (1)...(19): siRNA sense strand
auacacaucaucagcagaa

SEQ ID NO: 1229587 - RNA, 19 nt, Homo sapiens
  misc_RNA (1)...(19): siRNA sense strand
gggacgagucuggcccuua

SEQ ID NO: 1229588 - RNA, 19 nt, Homo sapiens
  misc_RNA (1)...(19): siRNA sense strand
cgaagccacacaaaccauu

SEQ ID NO: 1229589 - RNA, 19 nt, Homo sapiens
  misc_RNA (1)...(19): siRNA sense strand
aacuuacuuucccuucuua

SEQ ID NO: 1229590 - RNA, 19 nt, Homo sapiens
  misc_RNA (1)...(19): siRNA sense strand
ccaacuuacuuucccuucu

SEQ ID NO: 1229591 - RNA, 19 nt, Homo sapiens
  misc_RNA (1)...(19): siRNA sense strand
aaccagcauugaccgauug

SEQ ID NO: 1229592 - RNA, 19 nt, Homo sapiens
  misc_RNA (1)...(19): siRNA sense strand
caaaccauugggagugaaa

SEQ ID NO: 1229593 - RNA, 19 nt, Homo sapiens
  misc_RNA (1)...(19): siRNA sense strand
gcauugaccgauugaaggu

SEQ ID NO: 1229594 - RNA, 19 nt, Homo sapiens
  misc_RNA (1)...(19): siRNA sense strand
cuaauggagcucacucaga

SEQ ID NO: 1229595 - RNA, 19 nt, Homo sapiens
  misc_RNA (1)...(19): siRNA sense strand
caucuuccuugcacuggau

SEQ ID NO: 1229596 - RNA, 19 nt, Homo sapiens
  misc_RNA (1)...(19): siRNA sense strand
aaauccugcugacuaacaa

SEQ ID NO: 1229597 - RNA, 19 nt, Homo sapiens
  misc_RNA (1)...(19): siRNA sense strand
gcccagggaugaggcagau

SEQ ID NO: 1229598 - RNA, 19 nt, Homo sapiens
  misc_RNA (1)...(19): siRNA sense strand
ugaagguauuuaaggaagu

SEQ ID NO: 1229599 - RNA, 19 nt, Homo sapiens
  misc_RNA (1)...(19): siRNA sense strand
aauaugugcagcagaaaga

SEQ ID NO: 1229600 - RNA, 19 nt, Homo sapiens
  misc_RNA (1)...(19): siRNA sense strand
gcaucguggagcacucaua

SEQ ID NO: 1229601 - RNA, 19 nt, Homo sapiens
  misc_RNA (1)...(19): siRNA sense strand
gucccuugcuggucuuguu

SEQ ID NO: 1229602 - RNA, 19 nt, Homo sapiens
  misc_RNA (1)...(19): siRNA sense strand
ccuugcaaaugguauugaa

SEQ ID NO: 1229603 - RNA, 19 nt, Homo sapiens
  misc_RNA (1)...(19): siRNA sense strand
uggaagugguggucaagca

SEQ ID NO: 1229604 - RNA, 19 nt, Homo sapiens
  misc_RNA (1)...(19): siRNA sense strand
caagcagagagaacgauug

SEQ ID NO: 1229605 - RNA, 19 nt, Homo sapiens
  misc_RNA (1)...(19): siRNA sense strand
ucaagcagagagaacgauu

SEQ ID NO: 1229606 - RNA, 19 nt, Homo sapiens
  misc_RNA (1)...(19): siRNA sense strand
ccugcugacuaacaaugaa

SEQ ID NO: 1229607 - RNA, 19 nt, Homo sapiens
  misc_RNA (1)...(19): siRNA sense strand
cuuagaacauaugcagcua

SEQ ID NO: 1229608 - RNA, 19 nt, Homo sapiens
  misc_RNA (1)...(19): siRNA sense strand
gcuggaggagaaucuaaug

SEQ ID NO: 1229609 - RNA, 19 nt, Homo sapiens
  misc_RNA (1)...(19): siRNA sense strand
ugacugcaaccagcauuga

SEQ ID NO: 1229610 - RNA, 19 nt, Homo sapiens
  misc_RNA (1)...(19): siRNA sense strand
caaauacuuccgggagaga

SEQ ID NO: 1229611 - RNA, 19 nt, Homo sapiens
  misc_RNA (1)...(19): siRNA sense strand
ggaagauccaggaguccau

SEQ ID NO: 1229612 - RNA, 19 nt, Homo sapiens
  misc_RNA (1)...(19): siRNA sense strand
gguauuuaaggaaguuaug

SEQ ID NO: 1229613 - RNA, 19 nt, Homo sapiens
  misc_RNA (1)...(19): siRNA sense strand
cagcauugaccgauugaag

SEQ ID NO: 1229614 - RNA, 19 nt, Homo sapiens
  misc_RNA (1)...(19): siRNA sense strand
ucuacgaagcucugaagaa

SEQ ID NO: 1229615 - RNA, 19 nt, Homo sapiens
  misc_RNA (1)...(19): siRNA sense strand
gagcacucauacacaucau

SEQ ID NO: 1229616 - RNA, 19 nt, Homo sapiens
  misc_RNA (1)...(19): siRNA sense strand
auccaggaguccauagaaa

SEQ ID NO: 1229617 - RNA, 19 nt, Homo sapiens
  misc_RNA (1)...(19): siRNA sense strand
gaaagaugagcaguuuagg

SEQ ID NO: 1229618 - RNA, 19 nt, Homo sapiens
  misc_RNA (1)...(19): siRNA sense strand
ggagcuggaggagaaucua

SEQ ID NO: 1229619 - RNA, 19 nt, Homo sapiens
  misc_RNA (1)...(19): siRNA sense strand
uggucaaccuuguauacga

SEQ ID NO: 1229620 - RNA, 19 nt, Homo sapiens
  misc_RNA (1)...(19): siRNA sense strand
cugaagaagcuuagaacau

SEQ ID NO: 1229621 - RNA, 19 nt, Homo sapiens
  misc_RNA (1)...(19): siRNA sense strand
uugcaaaugguauugaaga

SEQ ID NO: 1229622 - RNA, 19 nt, Homo sapiens
  misc_RNA (1)...(19): siRNA sense strand
gcagaaagaugagcaguuu

SEQ ID NO: 1229623 - RNA, 19 nt, Homo sapiens
  misc_RNA (1)...(19): siRNA sense strand
ugaagaagcuuagaacaua

SEQ ID NO: 1229624 - RNA, 19 nt, Homo sapiens
  misc_RNA (1)...(19): siRNA sense strand
gaacauaugcagcuauuga

SEQ ID NO: 1229625 - RNA, 19 nt, Homo sapiens
  misc_RNA (1)...(19): siRNA sense strand
gaagaagcuuagaacauau

SEQ ID NO: 1229626 - RNA, 19 nt, Homo sapiens
  misc_RNA (1)...(19): siRNA sense strand
ugacaucacacccaacuua

SEQ ID NO: 1229627 - RNA, 19 nt, Homo sapiens
  misc_RNA (1)...(19): siRNA sense strand
gaagguauuuaaggaaguu

SEQ ID NO: 1229628 - RNA, 19 nt, Homo sapiens
  misc_RNA (1)...(19): siRNA sense strand
caacuuacuuucccuucuu

SEQ ID NO: 1229629 - RNA, 19 nt, Homo sapiens
  misc_RNA (1)...(19): siRNA sense strand
gauugaagguauuuaagga

SEQ ID NO: 1229630 - RNA, 19 nt, Homo sapiens
  misc_RNA (1)...(19): siRNA sense strand
uaauggagcucacucagau

SEQ ID NO: 1229631 - RNA, 19 nt, Homo sapiens
  misc_RNA (1)...(19): siRNA sense strand
cugaagaggccaccaaaua

SEQ ID NO: 1229632 - RNA, 19 nt, Homo sapiens
  misc_RNA (1)...(19): siRNA sense strand
aagaaacgcuuuacugaag

SEQ ID NO: 1229633 - RNA, 19 nt, Homo sapiens
  misc_RNA (1)...(19): siRNA sense strand
ggacgagucuggcccuuac

SEQ ID NO: 1229634 - RNA, 19 nt, Homo sapiens
  misc_RNA (1)...(19): siRNA sense strand
uagaacauaugcagcuauu

SEQ ID NO: 1229635 - RNA, 19 nt, Homo sapiens
  misc_RNA (1)...(19): siRNA sense strand
gaugagcaguuuagggaau

SEQ ID NO: 1229636 - RNA, 19 nt, Homo sapiens
  misc_RNA (1)...(19): siRNA sense strand
caaccagcauugaccgauu

SEQ ID NO: 1229637 - RNA, 19 nt, Homo sapiens
  misc_RNA (1)...(19): siRNA sense strand
ggagcucacucagaucuau

SEQ ID NO: 1229638 - RNA, 19 nt, Homo sapiens
  misc_RNA (1)...(19): siRNA sense strand
cuacgaagcucugaagaag

SEQ ID NO: 1229639 - RNA, 19 nt, Homo sapiens
  misc_RNA (1)...(19): siRNA sense strand
gaaguuaugcgugacauca

SEQ ID NO: 1229640 - RNA, 19 nt, Homo sapiens
  misc_RNA (1)...(19): siRNA sense strand
ggcagaugcucucuacgaa

SEQ ID NO: 1229641 - RNA, 19 nt, Homo sapiens
  misc_RNA (1)...(19): siRNA sense strand
gaagauccaggaguccaua

SEQ ID NO: 1229642 - RNA, 19 nt, Homo sapiens
  misc_RNA (1)...(19): siRNA sense strand
acgaauaugugcagcagaa

SEQ ID NO: 1229643 - RNA, 19 nt, Homo sapiens
  misc_RNA (1)...(19): siRNA sense strand
agucaaagcacuugcauga

SEQ ID NO: 1229644 - RNA, 19 nt, Homo sapiens
  misc_RNA (1)...(19): siRNA sense strand
ugcaaauccugcugacuaa

SEQ ID NO: 1229645 - RNA, 19 nt, Homo sapiens
  misc_RNA (1)...(19): siRNA sense strand
caaugaagccuggaagaga

SEQ ID NO: 1229646 - RNA, 19 nt, Homo sapiens
  misc_RNA (1)...(19): siRNA sense strand
gcacucauacacaucauca

SEQ ID NO: 1229647 - RNA, 19 nt, Homo sapiens
  misc_RNA (1)...(19): siRNA sense strand
gaaacgcuuuacugaagag

SEQ ID NO: 1229648 - RNA, 19 nt, Homo sapiens
  misc_RNA (1)...(19): siRNA sense strand
gaagaggccaccaaauacu

SEQ ID NO: 1229649 - RNA, 19 nt, Homo sapiens
  misc_RNA (1)...(19): siRNA sense strand
cucaggagcuggaggagaa

SEQ ID NO: 1229650 - RNA, 19 nt, Homo sapiens
  misc_RNA (1)...(19): siRNA sense strand
cugcaaauccugcugacua

SEQ ID NO: 1229651 - RNA, 19 nt, Homo sapiens
  misc_RNA (1)...(19): siRNA sense strand
gauccaggaguccauagaa

SEQ ID NO: 1229652 - RNA, 19 nt, Homo sapiens
  misc_RNA (1)...(19): siRNA sense strand
agaaacgcuuuacugaaga

SEQ ID NO: 1229653 - RNA, 19 nt, Homo sapiens
  misc_RNA (1)...(19): siRNA sense strand
gaagccacacaaaccauug

SEQ ID NO: 1229654 - RNA, 19 nt, Homo sapiens
  misc_RNA (1)...(19): siRNA sense strand
cacagaggcugcaccaucu

SEQ ID NO: 1229655 - RNA, 19 nt, Homo sapiens
  misc_RNA (1)...(19): siRNA sense strand
gagcuggaggagaaucuaa

SEQ ID NO: 1229656 - RNA, 19 nt, Homo sapiens
  misc_RNA (1)...(19): siRNA sense strand
cacaaaccauugggaguga

SEQ ID NO: 1229657 - RNA, 19 nt, Homo sapiens
  misc_RNA (1)...(19): siRNA sense strand
caucacacccaacuuacuu

SEQ ID NO: 1229658 - RNA, 19 nt, Homo sapiens
  misc_RNA (1)...(19): siRNA sense strand
ugaggcagaugcucucuac

SEQ ID NO: 1229659 - RNA, 19 nt, Homo sapiens
  misc_RNA (1)...(19): siRNA sense strand
aaugaagccuggaagagau

SEQ ID NO: 1229660 - RNA, 19 nt, Homo sapiens
  misc_RNA (1)...(19): siRNA sense strand
guggagcacucauacacau

SEQ ID NO: 1229661 - RNA, 19 nt, Homo sapiens
  misc_RNA (1)...(19): siRNA sense strand
ugaagaggccaccaaauac

SEQ ID NO: 1229662 - RNA, 19 nt, Homo sapiens
  misc_RNA (1)...(19): siRNA sense strand
caaauccugcugacuaaca

SEQ ID NO: 1229663 - RNA, 19 nt, Homo sapiens
  misc_RNA (1)...(19): siRNA sense strand
uggcgaaucucagcuggaa

SEQ ID NO: 1229664 - RNA, 19 nt, Homo sapiens
  misc_RNA (1)...(19): siRNA sense strand
gcucugaagaagcuuagaa

SEQ ID NO: 1229665 - RNA, 19 nt, Homo sapiens
  misc_RNA (1)...(19): siRNA sense strand
ggagcacucauacacauca

SEQ ID NO: 1229666 - RNA, 19 nt, Homo sapiens
  misc_RNA (1)...(19): siRNA sense strand
gcugcaccaucuccaaugu

SEQ ID NO: 1229667 - RNA, 19 nt, Homo sapiens
  misc_RNA (1)...(19): siRNA sense strand
agaaagaugagcaguuuag

SEQ ID NO: 1229668 - RNA, 19 nt, Homo sapiens
  misc_RNA (1)...(19): siRNA sense strand
gcaguuuagggaaugguuu

SEQ ID NO: 1229669 - RNA, 19 nt, Homo sapiens
  misc_RNA (1)...(19): siRNA sense strand
ggauguggucaaccuugua

SEQ ID NO: 1229670 - RNA, 19 nt, Homo sapiens
  misc_RNA (1)...(19): siRNA sense strand
gaauaugugcagcagaaag

SEQ ID NO: 1229671 - RNA, 19 nt, Homo sapiens
  misc_RNA (1)...(19): siRNA sense strand
gauguggucaaccuuguau

SEQ ID NO: 1229672 - RNA, 19 nt, Homo sapiens
  misc_RNA (1)...(19): siRNA sense strand
cagaaagaugagcaguuua

SEQ ID NO: 1229673 - RNA, 19 nt, Homo sapiens
  misc_RNA (1)...(19): siRNA sense strand
cgucugaauccaugccaua

SEQ ID NO: 1229674 - RNA, 19 nt, Homo sapiens
  misc_RNA (1)...(19): siRNA sense strand
gcgaaucucagcuggaagu

SEQ ID NO: 1229675 - RNA, 19 nt, Homo sapiens
  misc_RNA (1)...(19): siRNA sense strand
gugaccaccuggcgaaucu

SEQ ID NO: 1229676 - RNA, 19 nt, Homo sapiens
  misc_RNA (1)...(19): siRNA sense strand
auacacaucaucagcagaa

SEQ ID NO: 1229677 - RNA, 19 nt, Homo sapiens
  misc_RNA (1)...(19): siRNA sense strand
gggacgagucuggcccuua

SEQ ID NO: 1229678 - RNA, 19 nt, Homo sapiens
  misc_RNA (1)...(19): siRNA sense strand
cgaagccacacaaaccauu

SEQ ID NO: 1229679 - RNA, 19 nt, Homo sapiens
  misc_RNA (1)...(19): siRNA sense strand
aacuuacuuucccuucuua

SEQ ID NO: 1229680 - RNA, 19 nt, Homo sapiens
  misc_RNA (1)...(19): siRNA sense strand
ccaacuuacuuucccuucu

SEQ ID NO: 1229681 - RNA, 19 nt, Homo sapiens
  misc_RNA (1)...(19): siRNA sense strand
aaccagcauugaccgauug

SEQ ID NO: 1229682 - RNA, 19 nt, Homo sapiens
  misc_RNA (1)...(19): siRNA sense strand
caaaccauugggagugaaa

SEQ ID NO: 1229683 - RNA, 19 nt, Homo sapiens
  misc_RNA (1)...(19): siRNA sense strand
gcauugaccgauugaaggu

SEQ ID NO: 1229684 - RNA, 19 nt, Homo sapiens
  misc_RNA (1)...(19): siRNA sense strand
cuaauggagcucacucaga

SEQ ID NO: 1229685 - RNA, 19 nt, Homo sapiens
  misc_RNA (1)...(19): siRNA sense strand
caucuuccuugcacuggau

SEQ ID NO: 1229686 - RNA, 19 nt, Homo sapiens
  misc_RNA (1)...(19): siRNA sense strand
aaauccugcugacuaacaa

SEQ ID NO: 1229687 - RNA, 19 nt, Homo sapiens
  misc_RNA (1)...(19): siRNA sense strand
gcccagggaugaggcagau

SEQ ID NO: 1229688 - RNA, 19 nt, Homo sapiens
  misc_RNA (1)...(19): siRNA sense strand
ugaagguauuuaaggaagu

SEQ ID NO: 1229689 - RNA, 19 nt, Homo sapiens
  misc_RNA (1)...(19): siRNA sense strand
aauaugugcagcagaaaga

SEQ ID NO: 1229690 - RNA, 19 nt, Homo sapiens
  misc_RNA (1)...(19): siRNA sense strand
gcaucguggagcacucaua

SEQ ID NO: 1229691 - RNA, 19 nt, Homo sapiens
  misc_RNA (1)...(19): siRNA sense strand
gucccuugcuggucuuguu

SEQ ID NO: 1229692 - RNA, 19 nt, Homo sapiens
  misc_RNA (1)...(19): siRNA sense strand
ccuugcaaaugguauugaa

SEQ ID NO: 1229693 - RNA, 19 nt, Homo sapiens
  misc_RNA (1)...(19): siRNA sense strand
uggaagugguggucaagca

SEQ ID NO: 1229694 - RNA, 19 nt, Homo sapiens
  misc_RNA (1)...(19): siRNA sense strand
caagcagagagaacgauug

SEQ ID NO: 1229695 - RNA, 19 nt, Homo sapiens
  misc_RNA (1)...(19): siRNA sense strand
ucaagcagagagaacgauu

SEQ ID NO: 1229696 - RNA, 19 nt, Homo sapiens
  misc_RNA (1)...(19): siRNA sense strand
ccugcugacuaacaaugaa

SEQ ID NO: 1229697 - RNA, 19 nt, Homo sapiens
  misc_RNA (1)...(19): siRNA sense strand
cuuagaacauaugcagcua

SEQ ID NO: 1229698 - RNA, 19 nt, Homo sapiens
  misc_RNA (1)...(19): siRNA sense strand
gcuggaggagaaucuaaug

SEQ ID NO: 1229699 - RNA, 19 nt, Homo sapiens
  misc_RNA (1)...(19): siRNA sense strand
ugacugcaaccagcauuga

SEQ ID NO: 1229700 - RNA, 19 nt, Homo sapiens
  misc_RNA (1)...(19): siRNA sense strand
caaauacuuccgggagaga

SEQ ID NO: 1229701 - RNA, 19 nt, Homo sapiens
  misc_RNA (1)...(19): siRNA sense strand
ggaagauccaggaguccau

SEQ ID NO: 1229702 - RNA, 19 nt, Homo sapiens
  misc_RNA (1)...(19): siRNA sense strand
gguauuuaaggaaguuaug

SEQ ID NO: 1229703 - RNA, 19 nt, Homo sapiens
  misc_RNA (1)...(19): siRNA sense strand
cagcauugaccgauugaag

SEQ ID NO: 1229704 - RNA, 19 nt, Homo sapiens
  misc_RNA (1)...(19): siRNA sense strand
ucuacgaagcucugaagaa

SEQ ID NO: 1229705 - RNA, 19 nt, Homo sapiens
  misc_RNA (1)...(19): siRNA sense strand
gagcacucauacacaucau

SEQ ID NO: 1229706 - RNA, 19 nt, Homo sapiens
  misc_RNA (1)...(19): siRNA sense strand
auccaggaguccauagaaa

SEQ ID NO: 1229707 - RNA, 19 nt, Homo sapiens
  misc_RNA (1)...(19): siRNA sense strand
gaaagaugagcaguuuagg

SEQ ID NO: 1229708 - RNA, 19 nt, Homo sapiens
  misc_RNA (1)...(19): siRNA sense strand
ggagcuggaggagaaucua

SEQ ID NO: 1229709 - RNA, 19 nt, Homo sapiens
  misc_RNA (1)...(19): siRNA sense strand
uggucaaccuuguauacga

SEQ ID NO: 1229710 - RNA, 19 nt, Homo sapiens
  misc_RNA (1)...(19): siRNA sense strand
cugaagaagcuuagaacau

SEQ ID NO: 1229711 - RNA, 19 nt, Homo sapiens
  misc_RNA (1)...(19): siRNA sense strand
uugcaaaugguauugaaga

SEQ ID NO: 1229712 - RNA, 19 nt, Homo sapiens
  misc_RNA (1)...(19): siRNA sense strand
gcagaaagaugagcaguuu

SEQ ID NO: 1229713 - RNA, 19 nt, Homo sapiens
  misc_RNA (1)...(19): siRNA sense strand
ugaagaagcuuagaacaua

SEQ ID NO: 1229714 - RNA, 19 nt, Homo sapiens
  misc_RNA (1)...(19): siRNA sense strand
gaacauaugcagcuauuga

SEQ ID NO: 1229715 - RNA, 19 nt, Homo sapiens
  misc_RNA (1)...(19): siRNA sense strand
gaagaagcuuagaacauau

SEQ ID NO: 1229716 - RNA, 19 nt, Homo sapiens
  misc_RNA (1)...(19): siRNA sense strand
ugacaucacacccaacuua

SEQ ID NO: 1229717 - RNA, 19 nt, Homo sapiens
  misc_RNA (1)...(19): siRNA sense strand
gaagguauuuaaggaaguu

SEQ ID NO: 1229718 - RNA, 19 nt, Homo sapiens
  misc_RNA (1)...(19): siRNA sense strand
caacuuacuuucccuucuu

SEQ ID NO: 1229719 - RNA, 19 nt, Homo sapiens
  misc_RNA (1)...(19): siRNA sense strand
gauugaagguauuuaagga

SEQ ID NO: 1229720 - RNA, 19 nt, Homo sapiens
  misc_RNA (1)...(19): siRNA sense strand
uaauggagcucacucagau

SEQ ID NO: 1229721 - RNA, 19 nt, Homo sapiens
  misc_RNA (1)...(19): siRNA sense strand
cugaagaggccaccaaaua

SEQ ID NO: 1229722 - RNA, 19 nt, Homo sapiens
  misc_RNA (1)...(19): siRNA sense strand
aagaaacgcuuuacugaag

SEQ ID NO: 1229723 - RNA, 19 nt, Homo sapiens
  misc_RNA (1)...(19): siRNA sense strand
ggacgagucuggcccuuac

SEQ ID NO: 1229724 - RNA, 19 nt, Homo sapiens
  misc_RNA (1)...(19): siRNA sense strand
uagaacauaugcagcuauu

SEQ ID NO: 1229725 - RNA, 19 nt, Homo sapiens
  misc_RNA (1)...(19): siRNA sense strand
gaugagcaguuuagggaau

SEQ ID NO: 1229726 - RNA, 19 nt, Homo sapiens
  misc_RNA (1)...(19): siRNA sense strand
caaccagcauugaccgauu

SEQ ID NO: 1229727 - RNA, 19 nt, Homo sapiens
  misc_RNA (1)...(19): siRNA sense strand
ggagcucacucagaucuau

SEQ ID NO: 1229728 - RNA, 19 nt, Homo sapiens
  misc_RNA (1)...(19): siRNA sense strand
cuacgaagcucugaagaag

SEQ ID NO: 1229729 - RNA, 19 nt, Homo sapiens
  misc_RNA (1)...(19): siRNA sense strand
gaaguuaugcgugacauca

SEQ ID NO: 1229730 - RNA, 19 nt, Homo sapiens
  misc_RNA (1)...(19): siRNA sense strand
ggcagaugcucucuacgaa

SEQ ID NO: 1229731 - RNA, 19 nt, Homo sapiens
  misc_RNA (1)...(19): siRNA sense strand
gaagauccaggaguccaua

SEQ ID NO: 1229732 - RNA, 19 nt, Homo sapiens
  misc_RNA (1)...(19): siRNA sense strand
acgaauaugugcagcagaa

SEQ ID NO: 1229733 - RNA, 19 nt, Homo sapiens
  misc_RNA (1)...(19): siRNA sense strand
agucaaagcacuugcauga

SEQ ID NO: 1229734 - RNA, 19 nt, Homo sapiens
  misc_RNA (1)...(19): siRNA sense strand
ugcaaauccugcugacuaa

SEQ ID NO: 1229735 - RNA, 19 nt, Homo sapiens
  misc_RNA (1)...(19): siRNA sense strand
caaugaagccuggaagaga

SEQ ID NO: 1229736 - RNA, 19 nt, Homo sapiens
  misc_RNA (1)...(19): siRNA sense strand
gcacucauacacaucauca

SEQ ID NO: 1229737 - RNA, 19 nt, Homo sapiens
  misc_RNA (1)...(19): siRNA sense strand
gaaacgcuuuacugaagag

SEQ ID NO: 1229738 - RNA, 19 nt, Homo sapiens
  misc_RNA (1)...(19): siRNA sense strand
gaagaggccaccaaauacu

SEQ ID NO: 1229739 - RNA, 19 nt, Homo sapiens
  misc_RNA (1)...(19): siRNA sense strand
cucaggagcuggaggagaa

SEQ ID NO: 1229740 - RNA, 19 nt, Homo sapiens
  misc_RNA (1)...(19): siRNA sense strand
cugcaaauccugcugacua

SEQ ID NO: 1229741 - RNA, 19 nt, Homo sapiens
  misc_RNA (1)...(19): siRNA sense strand
gauccaggaguccauagaa

SEQ ID NO: 1229742 - RNA, 19 nt, Homo sapiens
  misc_RNA (1)...(19): siRNA sense strand
agaaacgcuuuacugaaga

SEQ ID NO: 1229743 - RNA, 19 nt, Homo sapiens
  misc_RNA (1)...(19): siRNA sense strand
gaagccacacaaaccauug

SEQ ID NO: 1229744 - RNA, 19 nt, Homo sapiens
  misc_RNA (1)...(19): siRNA sense strand
cacagaggcugcaccaucu

SEQ ID NO: 1229745 - RNA, 19 nt, Homo sapiens
  misc_RNA (1)...(19): siRNA sense strand
gagcuggaggagaaucuaa

SEQ ID NO: 1229746 - RNA, 19 nt, Homo sapiens
  misc_RNA (1)...(19): siRNA sense strand
cacaaaccauugggaguga

SEQ ID NO: 1229747 - RNA, 19 nt, Homo sapiens
  misc_RNA (1)...(19): siRNA sense strand
caucacacccaacuuacuu

SEQ ID NO: 1229748 - RNA, 19 nt, Homo sapiens
  misc_RNA (1)...(19): siRNA sense strand
ugaggcagaugcucucuac

SEQ ID NO: 1229749 - RNA, 19 nt, Homo sapiens
  misc_RNA (1)...(19): siRNA sense strand
aaugaagccuggaagagau

SEQ ID NO: 1229750 - RNA, 19 nt, Homo sapiens
  misc_RNA (1)...(19): siRNA sense strand
guggagcacucauacacau

SEQ ID NO: 1229751 - RNA, 19 nt, Homo sapiens
  misc_RNA (1)...(19): siRNA sense strand
ugaagaggccaccaaauac

SEQ ID NO: 1229752 - RNA, 19 nt, Homo sapiens
  misc_RNA (1)...(19): siRNA sense strand
caaauccugcugacuaaca

SEQ ID NO: 1229753 - RNA, 19 nt, Homo sapiens
  misc_RNA (1)...(19): siRNA sense strand
uggcgaaucucagcuggaa

SEQ ID NO: 1229754 - RNA, 19 nt, Homo sapiens
  misc_RNA (1)...(19): siRNA sense strand
gcucugaagaagcuuagaa

SEQ ID NO: 1229755 - RNA, 19 nt, Homo sapiens
  misc_RNA (1)...(19): siRNA sense strand
ggagcacucauacacauca

SEQ ID NO: 1229756 - RNA, 19 nt, Homo sapiens
  misc_RNA (1)...(19): siRNA sense strand
gcugcaccaucuccaaugu
